United States Patent Application Publication US 2021/0199660 A1 - sequence listing, part 16

SEQ ID NO: 217974 - DNA, 120 bp, Artificial Sequence
  ENSG00000116701_21 (sequence is synthesized)
ccaagctagtgggccagatcttactcagtaggaattcctgtccaagcaagggttgggctaaaggacctctgaaggccttttaggctactgtgaaaccagttacttactggcctctcccct

SEQ ID NO: 217975 - DNA, 120 bp, Artificial Sequence
  ENSG00000116703_0 (sequence is synthesized)
agtagacagggattctcacccactcaacaaggacaccaggcacagagatccaaactattatatcaaatccagtccctaaaatggaagaagccaaaagccaaagtttggaggaagactttg

SEQ ID NO: 217976 - DNA, 120 bp, Artificial Sequence
  ENSG00000116703_1 (sequence is synthesized)
aaggacaggccacacatacaggacccaaaggagtaataaatgattggagaaagtttaaattagagagtcaagacagtgattcaattccacctagcaagaaggagattctcaggcaaatgt

SEQ ID NO: 217977 - DNA, 120 bp, Artificial Sequence
  ENSG00000116703_2 (sequence is synthesized)
cttctcctcagagtaggaatggcaaagattcaaaggaacgagtcagcagaaagatgagcattcaagaatatgaactaatccataaagagaaagaggatgaaaactgccttcgtaaatacc

SEQ ID NO: 217978 - DNA, 120 bp, Artificial Sequence
  ENSG00000116703_3 (sequence is synthesized)
gtagacagtgtatgcaggatatgcaccagaagctgagttttgggcctagatatgggtttgtgtatgagctggaaactggaaagcaattcctagaaacaattgaaaaggaactgaagatca

SEQ ID NO: 217979 - DNA, 120 bp, Artificial Sequence
  ENSG00000116703_4 (sequence is synthesized)
ccacaattgttgttcacatttatgaagatggtattaagggttgtgatgctctaaacagtagtttaacatgccttgcagcagaataccctatagttaagttttgtaaaataaaagcttcga

SEQ ID NO: 217980 - DNA, 120 bp, Artificial Sequence
  ENSG00000116703_5 (sequence is synthesized)
acttcctacactgctcatctataaaggtggggaactcataagcaattttattagtgttgctgaacagtttgctgaagaattttttgctggggatgtggagtctttcctaaatgaatatgg

SEQ ID NO: 217981 - DNA, 120 bp, Artificial Sequence
  ENSG00000116703_6 (sequence is synthesized)
gttactacctgaaagagaggtacatgtcctagagcataccaaaatagaagaagaagatgttgaatgaagattcactatgtcaatatctcatgtttatcctttaggtattggatgatggtt

SEQ ID NO: 217982 - DNA, 120 bp, Artificial Sequence
  ENSG00000116703_7 (sequence is synthesized)
ttggtagtatctatattgctttagtgaacacagagtatgggcacggctatgctaacttgacaaaaatgactgatgcaacaatcgagttattagcatttcttagtattagttactcaaatt

SEQ ID NO: 217983 - DNA, 120 bp, Artificial Sequence
  ENSG00000116703_8 (sequence is synthesized)
gatacaatgcttgactacaaaacagagctgtcttcagcaacattattagtagacaaagaggatgtggataatattatgacatttttcaaaaatccctttcaagttatgttttgtcttttt

SEQ ID NO: 217984 - DNA, 120 bp, Artificial Sequence
  ENSG00000116703_9 (sequence is synthesized)
tactccattttccctcatcactgttattatttggacttttcaaattacattattcattataattttctttgtgtaataaaaatgaaatctcatgagaaaataaattttctatttgaagtc

SEQ ID NO: 217985 - DNA, 120 bp, Artificial Sequence
  ENSG00000116704_0 (sequence is synthesized)
aagcggggagtcgaggcggcgagcgcgcagctggcctagtctgcggtccccaactcctggagtcccctgggagctgccgctgcaggcccccgagccgctaggccccgccgccaggccacc

SEQ ID NO: 217986 - DNA, 120 bp, Artificial Sequence
  ENSG00000116704_1 (sequence is synthesized)
gctgctgcggcagccatggcggaagttcatagacgtcagcatgctcgggttaaaggagaagcccccgcgaaatcctccacactccgagatgaggaggagctggggatggcgtcggccgaa

SEQ ID NO: 217987 - DNA, 120 bp, Artificial Sequence
  ENSG00000116704_2 (sequence is synthesized)
acgctgaccgtgtttctgaagctgctggccgccggcttttacggcgtgagctccttcctgatcgtggtggtgaataagagcgtgctcaccaattacagatttccctcctcactatgtgtt

SEQ ID NO: 217988 - DNA, 120 bp, Artificial Sequence
  ENSG00000116704_3 (sequence is synthesized)
ggacttggccagatggtggccacagtggcagttctctgggtgggaaaggcgctcagagtagtcaagtttcctgaccttgacagaaatgtacctcgaaagacgtttccactacctctacta

SEQ ID NO: 217989 - DNA, 120 bp, Artificial Sequence
  ENSG00000116704_4 (sequence is synthesized)
tattttgggaaccaaatcacgggactgttcagcacaaagaaactgaacttgccaatgtttacagttctgagaaggttctccatcctgtttacaatgtttgctgaaggagttttactcaag

SEQ ID NO: 217990 - DNA, 120 bp, Artificial Sequence
  ENSG00000116704_5 (sequence is synthesized)
aagactttttcttggggtattaaaatgactgtatttgcaatgattattggagcctttgtagctgccagctctgacttggcatttgatctggaaggatatgcttttattctgataaacgat

SEQ ID NO: 217991 - DNA, 120 bp, Artificial Sequence
  ENSG00000116704_6 (sequence is synthesized)
gtcctaacagcagcaaatggtgcatacgtaaaacaaaaattagattcaaaagagctgggaaaatatggactgctctattacaatgcactgttcatgattctgcccaccctggccattgcg

SEQ ID NO: 217992 - DNA, 120 bp, Artificial Sequence
  ENSG00000116704_7 (sequence is synthesized)
tatttcacaggagatgcacaaaaggctgtggagtttgaaggctgggctgacaccctctttcttctgcagttcaccctctcctgtgtgatggggtttatcttaatgtacgccacagtactc

SEQ ID NO: 217993 - DNA, 120 bp, Artificial Sequence
  ENSG00000116704_8 (sequence is synthesized)
tgcacgcagtataattctgctcttacaactacaatagttggctgtattaagaatatattaataacttatattggaatggtctttggtggagattatattttcacgtggacaaacttcatt

SEQ ID NO: 217994 - DNA, 120 bp, Artificial Sequence
  ENSG00000116704_9 (sequence is synthesized)
ggtttaaatatcagcattgctgggagcctggtatattcctatatcactttcactgaagagcagctgagcaaacagtcagaggctaataacaagctggacattaaggggaaaggagcagtg

SEQ ID NO: 217995 - DNA, 120 bp, Artificial Sequence
  ENSG00000116704_10 (sequence is synthesized)
tgaccagaggattgcttcatctgatacgtaggcctaagtttttaatcaactcagaacactggcagttcctacagagacactgaggtgtcttgattatggaggaaataaccattcctttgc

SEQ ID NO: 217996 - DNA, 120 bp, Artificial Sequence
  ENSG00000116704_11 (sequence is synthesized)
acttgtacaatctgaggattgattgctgccttttaaaattttatgaagagagaaacttataattgactctattttaaatatgttgtttgaattaatttatatcagactggaaaaggtact

SEQ ID NO: 217997 - DNA, 120 bp, Artificial Sequence
  ENSG00000116704_12 (sequence is synthesized)
gggctttttaatttatttttcttatatgccgacagtgaaacatcagtgttttgaaagtattttatttcataatttgatatccaggtgtccctgagagctgcatatgtaatgtttgccaac

SEQ ID NO: 217998 - DNA, 120 bp, Artificial Sequence
  ENSG00000116704_13 (sequence is synthesized)
tggagcttcatcattcaaattgttgctgcatctggaggcagtttagcctttcctctgctggaaatgcagacgaatatgtgaaatttctcttctttgaatcttatttcttatgattgcatt

SEQ ID NO: 217999 - DNA, 120 bp, Artificial Sequence
  ENSG00000116704_14 (sequence is synthesized)
gtcttcatcatatcatcattccatttgccaaggaaaacaactttggcactataaaaatatgtggggctttgaagtgtattgctatctatgttggcttccctgactttcataggatgagca

SEQ ID NO: 218000 - DNA, 120 bp, Artificial Sequence
  ENSG00000116704_15 (sequence is synthesized)
gagtgcattccttgaaaacatgttctttttttgttgtgtagaatggggataatgaagggggtgagaaagtaggccttttactaatttttcatctatttgacttattgattcaactaaaat

SEQ ID NO: 218001 - DNA, 120 bp, Artificial Sequence
  ENSG00000116704_16 (sequence is synthesized)
gttttaagtatatgtgccaggcattgtgctaaatgctggggatacagagatgtttgcagaggtagttgaaacatctcactcctgccatagtgactcaggtaaggttgagaatttagctct

SEQ ID NO: 218002 - DNA, 120 bp, Artificial Sequence
  ENSG00000116704_17 (sequence is synthesized)
gttaatctattcagaagatgtcactaagagtaagttgtttcagcactcaaaagccgcaaatctgtaaattggattaagaacacctgccctacctacccggcaatagtgtgaatccaaatg

SEQ ID NO: 218003 - DNA, 120 bp, Artificial Sequence
  ENSG00000116704_18 (sequence is synthesized)
ctgcaatgtgagatgaggtacaagtaaagagctgtgttttgtaaaccagtgcagctcagcattgactccctctctaagtgaaaattgcagacaggcaagtctgttttcccttgccacctt

SEQ ID NO: 218004 - DNA, 120 bp, Artificial Sequence
  ENSG00000116704_19 (sequence is synthesized)
cctttgggtttggttgctctttggatgaatatgatgaggtcccacatttctgaatttattggtttgaggggaaaggctggttagacgtctttgtattgtcaatggttggtttttctctgg

SEQ ID NO: 218005 - DNA, 120 bp, Artificial Sequence
  ENSG00000116704_20 (sequence is synthesized)
cagtgtcagtgttagagctatcatcttccttcttaaatggcatgagcaatgagcaaacttccctcctttcaacattctcacctacatcatgtgccccttggctcacctactgagcttgcc

SEQ ID NO: 218006 - DNA, 120 bp, Artificial Sequence
  ENSG00000116704_21 (sequence is synthesized)
aacttctctcaaaaccaatgctgcattttgggagagcagctgtgaatgggcactgcctaaattgcctcttggggtaatctggagggtggaggtgttaactcaaacataaccctatgactt

SEQ ID NO: 218007 - DNA, 120 bp, Artificial Sequence
  ENSG00000116704_22 (sequence is synthesized)
gactcagagatatccattgactttgaggattagtgtgtttgctcaggccagttgtacagccagtgtgcaagagatttggtacctttgcactaatgcacacaccagtgtctatttcattgg

SEQ ID NO: 218008 - DNA, 120 bp, Artificial Sequence
  ENSG00000116704_23 (sequence is synthesized)
gtttggaatccactggactctgttgacctaaacagttagggttttgattttttttgatatgcaaatttatattgagatcattttcatattcctgtcttttggtttgtctttactaaagct

SEQ ID NO: 218009 - DNA, 120 bp, Artificial Sequence
  ENSG00000116704_24 (sequence is synthesized)
tggctggtggtgctgtgtccctagaattatccctgcaaccaactcccaagttacaagcttcattaagagccttagactcacttttttctagcatcttctgacctgagaaaattccactgg

SEQ ID NO: 218010 - DNA, 120 bp, Artificial Sequence
  ENSG00000116704_25 (sequence is synthesized)
gaaagatgacttgctaatacatcaaacccatgtcctttttattgaactatgctgccatttaattaaccgcccttcccctctgagggagtaaggaaacagatcctgagttcacttgagcac

SEQ ID NO: 218011 - DNA, 120 bp, Artificial Sequence
  ENSG00000116704_26 (sequence is synthesized)
tttcaaaaaagcaagcagttgattgaatttggtgtcagagaggagcatactttgcaaatcaggaagagtgacagcttaccctgtcctggaacccttatcccacttccaggctgactttag

SEQ ID NO: 218012 - DNA, 120 bp, Artificial Sequence
  ENSG00000116704_27 (sequence is synthesized)
ttgataatgcacttctggctgtaaatgttgccaacacttcctggttttgcttaggtacagtgaaagggcatagtgagagctatttttagtgattctgttctttctgtcagcaacatgaag

SEQ ID NO: 218013 - DNA, 120 bp, Artificial Sequence
  ENSG00000116704_28 (sequence is synthesized)
gagggacgtttgaataatttttgttgtagaatatttcttcatgaaaggcttttgggtgtctttaacaggtgttgggctagagccccaccaggagttgaactgcctcttgggggtcaggtt

SEQ ID NO: 218014 - DNA, 120 bp, Artificial Sequence
  ENSG00000116704_29 (sequence is synthesized)
ccctaggagatctgtcacctcttcaggagtatttgagaacattgtgtagttacagcttcactaaatgcacgtgacaggcttctgtgccttgggagccctggcttatgctgaaacttctgg

SEQ ID NO: 218015 - DNA, 120 bp, Artificial Sequence
  ENSG00000116704_30 (sequence is synthesized)
ctgaccagagcagtacagcaactttgccctgtctgtgttctgcttcctggatgcatccttcagccactaaccagcattgcaagatggagcagggtgaacaagctggagactgaatagtct

SEQ ID NO: 218016 - DNA, 120 bp, Artificial Sequence
  ENSG00000116704_31 (sequence is synthesized)
tttggagtttgcgttttgattattgcaggcgtgttacaatatactggtgatttacctggtactgtggcacctcccagaaagtctggtttttgccccatgtttgatatttactaggcagaa

SEQ ID NO: 218017 - DNA, 120 bp, Artificial Sequence
  ENSG00000116704_32 (sequence is synthesized)
attctttgtcctgttaactgcctcctgggagaaaaagaggcaatacagagttaaatccttaatttgcccactgagacagatgagctgtggtattccaaaagacaaattctatgactagtg

SEQ ID NO: 218018 - DNA, 120 bp, Artificial Sequence
  ENSG00000116704_33 (sequence is synthesized)
tctcctgttcaatgtaagtgagaccctctttggccaatctgcttctagtcaaggctaaatggattggaataaccctagttggccaggctacacattgccagcatgtcccgttgagtttta

SEQ ID NO: 218019 - DNA, 120 bp, Artificial Sequence
  ENSG00000116704_34 (sequence is synthesized)
attgcctcatgtggctgtggactttatgagtcaatcatttgtaggctccagtttgcacctagtttttttttttaaaaagtgcatttacacgcttttggtagtcctgttttatcaagaatc

SEQ ID NO: 218020 - DNA, 120 bp, Artificial Sequence
  ENSG00000116704_35 (sequence is synthesized)
catggagggttttggtcagtacagctggtgcaggatcctcacggagaaacagtggagtttcacattgagttggtttgaaatggcaccccaggactttgggcctgccttacttgatagcct

SEQ ID NO: 218021 - DNA, 120 bp, Artificial Sequence
  ENSG00000116704_36 (sequence is synthesized)
cgttcagtgagcaaagacttagtgagcagctcttgtatgccaagtattttgctaagctctggaaaaaagataaacaagacatggttcttgctttcaaggagtgtgtaattctttagccag

SEQ ID NO: 218022 - DNA, 120 bp, Artificial Sequence
  ENSG00000116704_37 (sequence is synthesized)
atatggaaacctggaccctgagtgggagaaaggagacagatgaaaggagtccgtgattttgtaaccaagagctgcctgcatggttatgagtatcactgattttagggacgccccacagag

SEQ ID NO: 218023 - DNA, 120 bp, Artificial Sequence
  ENSG00000116704_38 (sequence is synthesized)
ctaaagcatttttttaatccgagaggacttttgtaactcatattagttaatcttctagctctgagatagcaacacagctcttagaattctgtaagtagcttgaggcctcctcctctactg

SEQ ID NO: 218024 - DNA, 120 bp, Artificial Sequence
  ENSG00000116704_39 (sequence is synthesized)
tacatgttcttgctttcccaaaattgtaagtttggtttttcctatgaacaagactgtaattgatttttctctccctgaggaaaaaagttcggaataaatgagacatggatatgaaactac

SEQ ID NO: 218025 - DNA, 120 bp, Artificial Sequence
  ENSG00000116704_40 (sequence is synthesized)
ttagcacaatgcctggtacatattaggccctcagcaaatgtggctaccgtgtcattatttcatggtgagactcaaggcaaaacaagattcttaatttatgctccgtaaatgctagaggct

SEQ ID NO: 218026 - DNA, 120 bp, Artificial Sequence
  ENSG00000116704_41 (sequence is synthesized)
tgggcaatacggtctgtcctgaaaaacaggactctgtgtctcattgcctctagaatccttaggtagcagtttctgttcactgtcttttcttttttaaaaatatctgctggacacaattac

SEQ ID NO: 218027 - DNA, 120 bp, Artificial Sequence
  ENSG00000116704_42 (sequence is synthesized)
ggccattacatgatgcaggtgattctacctattttttaaaaagaacaaaatttcttttatattgtgacagtacattttaataaaggaaaattattttcttccccctactccccctccttt

SEQ ID NO: 218028 - DNA, 120 bp, Artificial Sequence
  ENSG00000116704_43 (sequence is synthesized)
tttttaaaaaaaaaaaaaaaaaagaaagaaggtcttgctctgtcgccagccaggctggagtgtaatggcgtaatcatagcagctcaccacagtctcaaactcctaggctcaagtgatcct

SEQ ID NO: 218029 - DNA, 120 bp, Artificial Sequence
  ENSG00000116704_44 (sequence is synthesized)
cctgccttagcctgctaagtagctacgactataggcatgtgccattacgcctggctcgtttcttcctttttttttttttttctggtaaagacagggtctcactctgttgccagactggtc

SEQ ID NO: 218030 - DNA, 89 bp, Artificial Sequence
  ENSG00000116704_45 (sequence is synthesized)
atgtccggccaggaaaattattttctatcttaaagaaacatagttacattttagaatgtcaattcagttaaatctttctcagtttttac

SEQ ID NO: 218031 - DNA, 120 bp, Artificial Sequence
  ENSG00000116704_46 (sequence is synthesized)
tttagaatgtcaattcagttaaatctttctcagtttttacctttagatggctcctggaaaggccagcgttccttttcccctctctgaattgaaagcacttgaccccatgctgcccctgct

SEQ ID NO: 218032 - DNA, 120 bp, Artificial Sequence
  ENSG00000116704_47 (sequence is synthesized)
tccaggcctgtctcagttgtcatatattgtgagtccctggcaccattactgttttctaagccagtcttctaggtcttactttcaggatgctgcttcatggcatgaggatatagtttacag

SEQ ID NO: 218033 - DNA, 120 bp, Artificial Sequence
  ENSG00000116704_48 (sequence is synthesized)
tgttgtagtttttttttttttaaagctttgttctttaaaaatactttttaaaaagaaatctactggttagatttattgtctcacaaaaatgtttttagagattatttttttcacaaatgt

SEQ ID NO: 218034 - DNA, 120 bp, Artificial Sequence
  ENSG00000116704_49 (sequence is synthesized)
tttctttctcatgctgatgatcaactgatttttgtctacaggtgttagcttctcacagtattttttcattttagagtctatttaccaaatgaccatttttagtgttaaaaggtactgagg

SEQ ID NO: 218035 - DNA, 120 bp, Artificial Sequence
  ENSG00000116704_50 (sequence is synthesized)
aattgaggtatgtaaatcaggtgacataaacatgaaaattatgtgcctaaatatttttgtaatggtgtaaaataaatactttttcctgaaaacaagtattaaaattcctttgtaactgca

SEQ ID NO: 218036 - DNA, 120 bp, Artificial Sequence
  ENSG00000116711_0 (sequence is synthesized)
actcaggataagactttctctaagtccggagctgaaaaaggatcctgactgaaagctagaggcattgaggagcctgaagattctcaggttttaaagacgctagagtgccaaagaagactt

SEQ ID NO: 218037 - DNA, 120 bp, Artificial Sequence
  ENSG00000116711_1 (sequence is synthesized)
tgaagtgtgaaaacatttcctgtaattgaaaccaaaatgtcatttatagatccttaccagcacattatagtggagcaccagtattcccacaagtttacggtagtggtgttacgtgccacc

SEQ ID NO: 218038 - DNA, 120 bp, Artificial Sequence
  ENSG00000116711_2 (sequence is synthesized)
aaagtgacaaagggggcctttggtgacatgcttgatactccagatccctatgtggaactttttatctctacaacccctgacagcaggaagagaacaagacatttcaataatgacataaac

SEQ ID NO: 218039 - DNA, 120 bp, Artificial Sequence
  ENSG00000116711_3 (sequence is synthesized)
cctgtgtggaatgagacctttgaatttattttggatcctaatcaggaaaatgttttggagattacgttaatggatgccaattatgtcatggatgaaactctagggacagcaacatttact

SEQ ID NO: 218040 - DNA, 120 bp, Artificial Sequence
  ENSG00000116711_4 (sequence is synthesized)
gtatcttctatgaaggtgggagaaaagaaagaagttccttttattttcaaccaagtcactgaaatggttctagaaatgtctcttgaagtttgctcatgcccagacctacgatttagtatg

SEQ ID NO: 218041 - DNA, 120 bp, Artificial Sequence
  ENSG00000116711_5 (sequence is synthesized)
gctctgtgtgatcaggagaagactttcagacaacagagaaaagaacacataagggagagcatgaagaaactcttgggtccaaagaatagtgaaggattgcattctgcacgtgatgtgcct

SEQ ID NO: 218042 - DNA, 120 bp, Artificial Sequence
  ENSG00000116711_6 (sequence is synthesized)
gtggtagccatattgggttcaggtgggggtttccgagccatggtgggattctctggtgtgatgaaggcattatacgaatcaggaattctggattgtgctacctacgttgctggtctttct

SEQ ID NO: 218043 - DNA, 120 bp, Artificial Sequence
  ENSG00000116711_7 (sequence is synthesized)
ggctccacctggtatatgtcaaccttgtattctcaccctgattttccagagaaagggccagaggagattaatgaagaactaatgaaaaatgttagccacaatccccttttacttctcaca

SEQ ID NO: 218044 - DNA, 120 bp, Artificial Sequence
  ENSG00000116711_8 (sequence is synthesized)
ccacagaaagttaaaagatatgttgagtctttatggaagaagaaaagctctggacaacctgtcacctttactgatatctttgggatgttaataggagaaacactaattcataatagaatg

SEQ ID NO: 218045 - DNA, 120 bp, Artificial Sequence
  ENSG00000116711_9 (sequence is synthesized)
aatactactctgagcagtttgaaggaaaaagttaatactgcacaatgccctttacctcttttcacctgtcttcatgtcaaacctgacgtttcagagctgatgtttgcagattgggttgaa

SEQ ID NO: 218046 - DNA, 120 bp, Artificial Sequence
  ENSG00000116711_10 (sequence is synthesized)
tttagtccatacgaaattggcatggctaaatatggtacttttatggctcccgacttatttggaagcaaattttttatgggaacagtcgttaagaagtatgaagaaaaccccttgcatttc

SEQ ID NO: 218047 - DNA, 120 bp, Artificial Sequence
  ENSG00000116711_11 (sequence is synthesized)
tattgtgagtaatgatagctcggacagtgatgatgaatcacacgaacccaaaggcactgaaaatgaagatgctggaagtgactatcaaagtgataatcaagcaagttggattcatcgtat

SEQ ID NO: 218048 - DNA, 120 bp, Artificial Sequence
  ENSG00000116711_12 (sequence is synthesized)
gataatggccttggtgagtgattcagctttattcaataccagagaaggacgtgctgggaaggtacacaacttcatgctgggcttgaatctcaatacatcttatccactgtctcctttgag

SEQ ID NO: 218049 - DNA, 120 bp, Artificial Sequence
  ENSG00000116711_13 (sequence is synthesized)
tgactttgccacacaggactcctttgatgatgatgaactggatgcagctgtagcagatcctgatgaatttgagcgaatatatgagcctctggatgtcaaaagtaaaaagattcatgtagt

SEQ ID NO: 218050 - DNA, 120 bp, Artificial Sequence
  ENSG00000116711_14 (sequence is synthesized)
ggacagtgggctcacatttaacctgccgtatcccttgatactgagacctcagagaggggttgatctcataatctcctttgacttttctgcaaggccaagtgactctagtcctccgttcaa

SEQ ID NO: 218051 - DNA, 120 bp, Artificial Sequence
  ENSG00000116711_15 (sequence is synthesized)
ggaacttctacttgcagaaaagtgggctaaaatgaacaagctcccctttccaaagattgatccttatgtgtttgatcgggaagggctgaaggagtgctatgtctttaaacccaagaatcc

SEQ ID NO: 218052 - DNA, 120 bp, Artificial Sequence
  ENSG00000116711_16 (sequence is synthesized)
tgatatggagaaagattgcccaaccatcatccactttgttctggccaacatcaacttcagaaagtacagggctccaggtgttccaagggaaactgaggaagagaaagaaatcgctgactt

SEQ ID NO: 218053 - DNA, 120 bp, Artificial Sequence
  ENSG00000116711_17 (sequence is synthesized)
tgatatttttgatgacccagaatcaccattttcaaccttcaattttcaatatccaaatcaagcattcaaaagactacatgatcttatgcacttcaatactctgaacaacattgatgtgat

SEQ ID NO: 218054 - DNA, 120 bp, Artificial Sequence
  ENSG00000116711_18 (sequence is synthesized)
aaaagaagccatggttgaaagcattgaatatagaagacagaatccatctcgttgctctgtttcccttagtaatgttgaggcaagaagatttttcaacaaggagtttctaagtaaacccaa

SEQ ID NO: 218055 - DNA, 120 bp, Artificial Sequence
  ENSG00000116711_19 (sequence is synthesized)
agcatagttcatgtactggaaatggcagcagtttctgatgctgaggcagtttgcaatcccatgacaactggatttaaaagtacagtacagatagtcgtactgatcatgagagactggctg

SEQ ID NO: 218056 - DNA, 120 bp, Artificial Sequence
  ENSG00000116711_20 (sequence is synthesized)
atactcaaagttgcagttacttagctgcatgagaataatactattataagttaggttgacaaatgatgttgattatgtaaggatatacttagctacattttcagtcagtatgaacttcct

SEQ ID NO: 218057 - DNA, 120 bp, Artificial Sequence
  ENSG00000116711_21 (sequence is synthesized)
gatacaaatgtagggatatatactgtatttttaaacatttctcaccaactttcttatgtgtgttctttttaaaaattttttttcttttaaaatatttaacagttcaatctcaataagacc

SEQ ID NO: 218058 - DNA, 120 bp, Artificial Sequence
  ENSG00000116711_22 (sequence is synthesized)
gacctcgcattatgtatgaatgttattcactgactagatttattcataccatgagacaacactatttttatttatatatgcatatatatacatacatgaaataaatacatcaatataaaa

SEQ ID NO: 218059 - DNA, 120 bp, Artificial Sequence
  ENSG00000116717_0 (sequence is synthesized)
agtggctggtaggcagtggctgggaggcagcggcccaattagtgtcgtgcggcccgtggcgaggcgaggtccggggagcgagcgagcaagcaaggcgggaggggtggccggagctgcggc

SEQ ID NO: 218060 - DNA, 120 bp, Artificial Sequence
  ENSG00000116717_1 (sequence is synthesized)
ggctggcacaggaggaggagcccgggcgggcgaggggcggccggagagcgccagggcctgagctgccggagcggcgcctgtgagtgagtgcagaaagcaggcgcccgcgcgctagccgtg

SEQ ID NO: 218061 - DNA, 120 bp, Artificial Sequence
  ENSG00000116717_2 (sequence is synthesized)
gcaggagcagcccgcacgccgcgctctctccctgggcgacctgcagtttgcaatatgactttggaggaattctcggctggagagcagaagaccgaaaggatggataaggtgggggatgcc

SEQ ID NO: 218062 - DNA, 120 bp, Artificial Sequence
  ENSG00000116717_3 (sequence is synthesized)
ctggaggaagtgctcagcaaagccctgagtcagcgcacgatcactgtcggggtgtacgaagcggccaagctgctcaacgtcgaccccgataacgtggtgttgtgcctgctggcggcggac

SEQ ID NO: 218063 - DNA, 120 bp, Artificial Sequence
  ENSG00000116717_4 (sequence is synthesized)
gaggacgacgacagagatgtggctctgcagatccacttcaccctgatccaggcgttttgctgcgagaacgacatcaacatcctgcgcgtcagcaacccgggccggctggcggagctcctg

SEQ ID NO: 218064 - DNA, 120 bp, Artificial Sequence
  ENSG00000116717_5 (sequence is synthesized)
cgagggcgccgagcagcccccggacctgcactgcgtgctggtgacgaatccacattcatctcaatggaaggatcctgccttaagtcaacttatttgtttttgccgggaaagtcgctacat

SEQ ID NO: 218065 - DNA, 120 bp, Artificial Sequence
  ENSG00000116717_6 (sequence is synthesized)
ggatcaatgggttccagtgattaatctccctgaacggtgatggcatctgaatgaaaataactgaaccaaattgcactgaagtttttgaaatacctttgtagttactcaagcagttactcc

SEQ ID NO: 218066 - DNA, 120 bp, Artificial Sequence
  ENSG00000116717_7 (sequence is synthesized)
ctacactgatgcaaggattacagaaactgatgccaaggggctgagtgagttcaactacatgttctgggggcccggagatagatgactttgcagatggaaagaggtgaaaatgaagaagga

SEQ ID NO: 218067 - DNA, 120 bp, Artificial Sequence
  ENSG00000116717_8 (sequence is synthesized)
agctgtgttgaaacagaaaaataagtcaaaaggaacaaaaattacaaagaaccatgcaggaaggaaaactatgtattaatttagaatggttgagttacattaaaataaaccaaatatgtt

SEQ ID NO: 218068 - DNA, 120 bp, Artificial Sequence
  ENSG00000116717_9 (sequence is synthesized)
aaagtttaagtgtgcagccatagtttgggtatttttggtttatatgccctcaagtaaaagaaaagccgaaagggttaatcatatttgaaaaccatattttattgtattttgatgagatat

SEQ ID NO: 218069 - DNA, 120 bp, Artificial Sequence
  ENSG00000116717_10 (sequence is synthesized)
ggccaagctgctcaacgtgtaagtggggcccttgcgcgtcccccatggcaccccttcccgccccagcccgggaggtcgccttggctgggcgcccctcgcccggccgcgccacttcctgtc

SEQ ID NO: 218070 - DNA, 120 bp, Artificial Sequence
  ENSG00000116717_11 (sequence is synthesized)
tgtcgcttttctgcctgtctcggaagggagggggcgagcgggccgggcggcgacccccagggacccgggcagtggttgagggcgcccgcgcttctgcgctcactggccccgcccgctgcc

SEQ ID NO: 218071 - DNA, 120 bp, Artificial Sequence
  ENSG00000116717_12 (sequence is synthesized)
gggactctccgtggagctcccacggactgaaagagcgtgccccccaacccgaacgagccccgccggggcctttgcaaagggcagcagtggccgtcgctgcccgtgcggctcccgtggctg

SEQ ID NO: 218072 - DNA, 120 bp, Artificial Sequence
  ENSG00000116717_13 (sequence is synthesized)
gcagcctgtggcaggggcactctcgggacttctcacgggacgcccggtccttgggcgtgcaggggtcatggggggtgacggggccgcgggagcgccgggttttcgtagagcccaggtgcg

SEQ ID NO: 218073 - DNA, 120 bp, Artificial Sequence
  ENSG00000116721_0 (sequence is synthesized)
acccacagcactcattcctggagctactggttggtttcctgagaggtcccagaactctgcgaagtgagtccagcgctgagattttccttgcagatctatcaggatgagcatccaggcccc

SEQ ID NO: 218074 - DNA, 120 bp, Artificial Sequence
  ENSG00000116721_1 (sequence is synthesized)
acccagactactggagctggcagggcagagcctgctgagagaccaggccttgtccatctctgccatggaggagctgcccagggtgctctatctcccactcttcatggaggccttcagcag

SEQ ID NO: 218075 - DNA, 120 bp, Artificial Sequence
  ENSG00000116721_2 (sequence is synthesized)
gagacacttccagactctgacggtgatggttcaggcctggcccttcacctgcctccctctgggatcactgatgaagacgcttcatttggagaccttaaaagcattgctggaagggcttca

SEQ ID NO: 218076 - DNA, 120 bp, Artificial Sequence
  ENSG00000116721_3 (sequence is synthesized)
cttcaagtgctggatttgcgggatgttgacgagaatttctgggccagatggcctggagcctgggccctgtcctgcttcccagagaccacgagtaagaggcagacagcagaggactgtcca

SEQ ID NO: 218077 - DNA, 120 bp, Artificial Sequence
  ENSG00000116721_4 (sequence is synthesized)
agagaccacgagtaagaggcagacagcagaggactgtccaaggatgggagagcaccagcccttaaaggtgttcatagacatctgcctcaaggaaataccccaggatgaatgcctgagata

SEQ ID NO: 218078 - DNA, 120 bp, Artificial Sequence
  ENSG00000116721_5 (sequence is synthesized)
cctcttccagtgggtttaccaaaggagaggtttagtacacctgtgctgtagtaagctggtcaattatctaacgccgattaaatatctcagaaagtcattgaaaataatatacctgaatag

SEQ ID NO: 218079 - DNA, 120 bp, Artificial Sequence
  ENSG00000116721_6 (sequence is synthesized)
tattcaagagctggaaattcgcaacatgtcctggccacgtctgataagaaagcttcgttgttacctgaaggagatgaagaatcttcgcaaactcgttttctccaggtgccatcattacac

SEQ ID NO: 218080 - DNA, 120 bp, Artificial Sequence
  ENSG00000116721_7 (sequence is synthesized)
gtcagataatgaactcgaaggacggttagttgccaaattcagctctgtgttcctcaggctggaacaccttcagttgcttaaaataaaattgatcaccttcttcagtgggcacctggaaca

SEQ ID NO: 218081 - DNA, 120 bp, Artificial Sequence
  ENSG00000116721_8 (sequence is synthesized)
gctgatcaggtgcctccagaaccccttggagaacttggaattaacttatggctacctattggaagaagacatgaagtgtctctcccagtacccaagcctcggttacctaaagcatctgaa

SEQ ID NO: 218082 - DNA, 120 bp, Artificial Sequence
  ENSG00000116721_9 (sequence is synthesized)
tctcagctacgtgctgctgttccgcatcagtcttgaacccctcggagctctgctggagaaaattgctgcctctctcaaaaccctcatcttggagggctgtcagatccactactcccaact

SEQ ID NO: 218083 - DNA, 120 bp, Artificial Sequence
  ENSG00000116721_10 (sequence is synthesized)
cagtgccatcctgcctggcctgagccgctgctcccagctcaccaccttctactttggcagaaattgcatgtctattgacgccctgaaggacctgctgcgccacaccagtgggctgagcaa

SEQ ID NO: 218084 - DNA, 120 bp, Artificial Sequence
  ENSG00000116721_11 (sequence is synthesized)
gttaagcctggagacgtatcctgcccctgaggagagtttgaattccttggttcgtgtcaattgggagatcttcaccccacttcgggctgagctgatgtgtacactgagggaagtcaggca

SEQ ID NO: 218085 - DNA, 120 bp, Artificial Sequence
  ENSG00000116721_12 (sequence is synthesized)
gcccaagaggatcttcattggccccaccccctgcccttcctgtggctcatcaccgtctgaggaactggagctccatctttgctgctagggaaggcgtgcccagtggggtagagaaatcca

SEQ ID NO: 218086 - DNA, 120 bp, Artificial Sequence
  ENSG00000116721_13 (sequence is synthesized)
aagttctcttccaggcacttggacactaaaatctactatgtgggtgcaaactatttttctcttttcttatttatttcattttttaataattccaaaatttttattaaagacaatttgaga

SEQ ID NO: 218087 - DNA, 120 bp, Artificial Sequence
  ENSG00000116721_14 (sequence is synthesized)
cagggtttcgctgtgttgctccagctggtctcaaactgctgggcttatgggatcctcctgcctcagcttcctaaagtgctgggattactggcatgagtgactgtgtccaggccacatgca

SEQ ID NO: 218088 - DNA, 120 bp, Artificial Sequence
  ENSG00000116721_15 (sequence is synthesized)
acttaaaggaagcacaggcaagtgttcagtgtgagggaaaaaacataacagcagggggcaaggttggaggaaaatgttgaggtgacatcagtgagaacttcagggacccgtgtcctagag

SEQ ID NO: 218089 - DNA, 120 bp, Artificial Sequence
  ENSG00000116721_16 (sequence is synthesized)
tcggaaagagaagctaaagttctacagtgatgagactgttatccctgcaaggatggttaccaaggaatatcagcaataaagagcacctgaatgaaaacttttaacctgttgtgcaattta

SEQ ID NO: 218090 - DNA, 120 bp, Artificial Sequence
  ENSG00000116721_17 (sequence is synthesized)
tccatcagaaatctctagttatcgagttacggatggaaaaataacgaaatactaatttgtctgtgattgagtttcagttgtagaacatcaaagcaaccaaataaaaattagatcattttg

SEQ ID NO: 218091 - DNA, 120 bp, Artificial Sequence
  ENSG00000116721_18 (sequence is synthesized)
ggcgtcacctggggtagaagctagagagggacatcatgtacaagctagttagtgggggtttcagctctattgggggtgcacgtgtgaatttcctgttacaaagtgtgtttcaagttgata

SEQ ID NO: 218092 - DNA, 120 bp, Artificial Sequence
  ENSG00000116721_19 (sequence is synthesized)
tgatgtcaaagagataatagaggagggtatgaaaggagggaaagcgcatcaaacctgtccatttcacaatagaacgtctgtcctcaccggcttagtgatcacgaatgatcctgtctctga

SEQ ID NO: 218093 - DNA, 120 bp, Artificial Sequence
  ENSG00000116726_0 (sequence is synthesized)
gatgtttttttctctagattcatcaggatgagcctccaggccccacctagactcctggagctggctgagcagagtctgctgagagaccgggccttggccatccccaccctggaggagctg

SEQ ID NO: 218094 - DNA, 120 bp, Artificial Sequence
  ENSG00000116726_1 (sequence is synthesized)
cccagggagctctttcccccactgttcatggaggcctttaccaggagatgctgcgagaccctgacaactatggtgcaggcctggcccttcacctgccttcctctagggtccctgatgaag

SEQ ID NO: 218095 - DNA, 120 bp, Artificial Sequence
  ENSG00000116726_2 (sequence is synthesized)
tcatgtaatctagagatctttcgagctgtgctggaggggcttgatgcactgcttgcccagaaggttcgccccaggcggtggaaacttcaagtgttggacttgcggaatgtggatgagaac

SEQ ID NO: 218096 - DNA, 120 bp, Artificial Sequence
  ENSG00000116726_3 (sequence is synthesized)
ttctggggcatatggtctggagcttctgcactctccccagaggccctgagtaagagacgaacagcagggaactgtccaaggccgggtgggcagcagcccttgatggtgatcctagacctt

SEQ ID NO: 218097 - DNA, 120 bp, Artificial Sequence
  ENSG00000116726_4 (sequence is synthesized)
tgcttcaagaatgggacgctggatgaatgcctcacccacttcttagagtggggcaagcagagaaaaggcttactgcacgtgtgttgcaaggagctgcagatttttggaatagccatccac

SEQ ID NO: 218098 - DNA, 120 bp, Artificial Sequence
  ENSG00000116726_5 (sequence is synthesized)
aggatcatagaggtcctgaacacggtggagctagactgtatccaggaggtggaagtgtgctgcccgtgggagctgtccattcttataaggttcgccccttacctgggccagatgaggaat

SEQ ID NO: 218099 - DNA, 120 bp, Artificial Sequence
  ENSG00000116726_6 (sequence is synthesized)
ctccgcaaacttgttctcttcaacatccatgtctctgcctgcattcccctagacaggaaggagcagtttgtcatccagttcacctctcagttcctcaagctggactacttccagaagctt

SEQ ID NO: 218100 - DNA, 120 bp, Artificial Sequence
  ENSG00000116726_7 (sequence is synthesized)
cggacctgaagcatctctcttggtgcccgagcatccgtcagctaaaagagctagacctgaggggcatcacactgacccatttcagtcctgagcccctctcagttctgctggagcaagctg

SEQ ID NO: 218101 - DNA, 120 bp, Artificial Sequence
  ENSG00000116726_8 (sequence is synthesized)
aggccaccctgcagaccctggacttagaggactgtgggatcgtggattcccaactcagcgccatcctgcctgccctgagccgctgctcccagctcagcaccttcagcttctgtgggaacc

SEQ ID NO: 218102 - DNA, 120 bp, Artificial Sequence
  ENSG00000116726_9 (sequence is synthesized)
tcatctccatggccgccctggagaacctgctgcgccacaccgtcgggctgagcaagctaagcctggagctgtatcctgcccctctggagagttatgatgcccagggtgctctctgctggg

SEQ ID NO: 218103 - DNA, 120 bp, Artificial Sequence
  ENSG00000116726_10 (sequence is synthesized)
gaagattttctcaacttggggctgagctgatgaagacactgagggacttaaggcagcccaagataattgtgttcagcactgtcccctgccctcgctgtggcatcagggcctcctatgacc

SEQ ID NO: 218104 - DNA, 120 bp, Artificial Sequence
  ENSG00000116726_11 (sequence is synthesized)
tggagcccagtcactgtctgttgaatgcctgctgtcagggtggatttatttaaagctttcttctggtcatttggcaactgaatcctaggccatgagtgtatgtcaaagggagcacagacc

SEQ ID NO: 218105 - DNA, 120 bp, Artificial Sequence
  ENSG00000116726_12 (sequence is synthesized)
catcgtttcatatgcctgctcaatgtgaaccggaaaggaaaggggatgcaggaagggagggactgggggaaaagttgagttggagtcaataggagctttagagacctgtgtcccagagaa

SEQ ID NO: 218106 - DNA, 120 bp, Artificial Sequence
  ENSG00000116726_13 (sequence is synthesized)
tcagaaatgggaatctgaattgctagaatgagaatcaggtaggagagacacatgagacagttacccctgcacggatggttgtaaagaaacagtcagaaataaagggaagctgagtggaaa

SEQ ID NO: 218107 - DNA, 120 bp, Artificial Sequence
  ENSG00000116729_0 (sequence is synthesized)
acaatcacagctccgggcattgggggaacccgagccggctgcgccgggggaatccgtgcgggcgccttccgtcccggtcccatcctcgccgcgctccagcacctctgaagttttgcagcg

SEQ ID NO: 218108 - DNA, 120 bp, Artificial Sequence
  ENSG00000116729_1 (sequence is synthesized)
cccagaaaggaggcgaggaaggagggagtgtgtgagaggagggagcaaaaagctcaccctaaaacatttatttcaaggagaaaagaaaaagggggggcgcaaaaatggctggggcaatta

SEQ ID NO: 218109 - DNA, 120 bp, Artificial Sequence
  ENSG00000116729_2 (sequence is synthesized)
tagaaaacatgagcaccaagaagctgtgcattgttggtgggattctgctcgtgttccaaatcatcgcctttctggtgggaggcttgattgctccagggcccacaacggcagtgtcctaca

SEQ ID NO: 218110 - DNA, 120 bp, Artificial Sequence
  ENSG00000116729_3 (sequence is synthesized)
tgtcggtgaaatgtgtggatgcccgtaagaaccatcacaagacaaaatggttcgtgccttggggacccaatcattgtgacaagatccgagacattgaagaggcaattccaagggaaattg

SEQ ID NO: 218111 - DNA, 120 bp, Artificial Sequence
  ENSG00000116729_4 (sequence is synthesized)
aagccaatgacatcgtgttttctgttcacattcccctcccccacatggagatgagtccttggttccaattcatgctgtttatcctgcagctggacattgccttcaagctaaacaaccaaa

SEQ ID NO: 218112 - DNA, 120 bp, Artificial Sequence
  ENSG00000116729_5 (sequence is synthesized)
tcagagaaaatgcagaagtctccatggacgtttccctggcttaccgtgatgacgcgtttgctgagtggactgaaatggcccatgaaagagtaccacggaaactcaaatgcaccttcacat

SEQ ID NO: 218113 - DNA, 120 bp, Artificial Sequence
  ENSG00000116729_6 (sequence is synthesized)
ctcccaagactccagagcatgagggccgttactatgaatgtgatgtccttcctttcatggaaattgggtctgtggcccataagttttaccttttaaacatccggctgcctgtgaatgaga

SEQ ID NO: 218114 - DNA, 120 bp, Artificial Sequence
  ENSG00000116729_7 (sequence is synthesized)
agaagaaaatcaatgtgggaattggggagataaaggatatccggttggtggggatccaccaaaatggaggcttcaccaaggtgtggtttgccatgaagaccttccttacgcccagcatct

SEQ ID NO: 218115 - DNA, 120 bp, Artificial Sequence
  ENSG00000116729_8 (sequence is synthesized)
tcatcattatggtgtggtattggaggaggatcaccatgatgtcccgacccccagtgcttctggaaaaagtcatctttgcccttgggatttccatgacctttatcaatatcccagtggaat

SEQ ID NO: 218116 - DNA, 120 bp, Artificial Sequence
  ENSG00000116729_9 (sequence is synthesized)
ggttttccatcgggtttgactggacctggatgctgctgtttggtgacatccgacagggcatcttctatgcgatgcttctgtccttctggatcatcttctgtggcgagcacatgatggatc

SEQ ID NO: 218117 - DNA, 120 bp, Artificial Sequence
  ENSG00000116729_10 (sequence is synthesized)
agcacgagcggaaccacatcgcagggtattggaagcaagtcggacccattgccgttggctccttctgcctcttcatatttgacatgtgtgagagaggggtacaactcacgaatcccttct

SEQ ID NO: 218118 - DNA, 120 bp, Artificial Sequence
  ENSG00000116729_11 (sequence is synthesized)
ctacttcctgtttctatgcttcatggtatttcaggtgtttcggaacatcagtgggaagcagtccagcctgccagctatgagcaaagtccggcggctacactatgaggggctaatttttag

SEQ ID NO: 218119 - DNA, 120 bp, Artificial Sequence
  ENSG00000116729_12 (sequence is synthesized)
gttcaagttcctcatgcttatcaccttggcctgcgctgccatgactgtcatcttcttcatcgttagtcaggtaacggaaggccattggaaatggggcggcgtcacagtccaagtgaacag

SEQ ID NO: 218120 - DNA, 120 bp, Artificial Sequence
  ENSG00000116729_13 (sequence is synthesized)
tgcctttttcacaggcatctatgggatgtggaatctgtatgtctttgctctgatgttcttgtatgcaccatcccataaaaactatggagaagaccagtccaatggcgatctgggtgtcca

SEQ ID NO: 218121 - DNA, 120 bp, Artificial Sequence
  ENSG00000116729_14 (sequence is synthesized)
tagtggggaagaactccagctcaccaccactatcacccatgtggacggacccactgagatctacaagttgacccgcaaggaggcccaggagtaggaggctgcagcgcccggctgggacgg

SEQ ID NO: 218122 - DNA, 120 bp, Artificial Sequence
  ENSG00000116729_15 (sequence is synthesized)
tctctccataccccagcccctctaactagagtggggagcatgccagagagagctcaatgtacaaatgaatgcctcatggctcttagctgtggtttcttggaccagcggcatggacatttg

SEQ ID NO: 218123 - DNA, 120 bp, Artificial Sequence
  ENSG00000116729_16 (sequence is synthesized)
tcagtttgccttctgacggtagcttttggaggaagattcctgcagccactaatgcattgtgtatgataacaaaaactctggtatgacacattttctgtgatcattgttaattagtgacat

SEQ ID NO: 218124 - DNA, 120 bp, Artificial Sequence
  ENSG00000116729_17 (sequence is synthesized)
agtaacatctgtagcagctggttagtaaacctcatgtgggggtggggtgggggtgtattccttgggggatggtttgggccgaatggggagtggaatatttgacatttttcctgttttaaa

SEQ ID NO: 218125 - DNA, 120 bp, Artificial Sequence
  ENSG00000116729_18 (sequence is synthesized)
ttctaggatagattttaacatcctttgcggtcccagtccaaggtaggctggtgtcatagtcttctcactcctaatccatgaccactgtttttttcctatttatatcaccaggtagcccac

SEQ ID NO: 218126 - DNA, 120 bp, Artificial Sequence
  ENSG00000116729_19 (sequence is synthesized)
tgagttaatatttaagttgtcaatagataagtgtccctgttttgtggcataatataactgaatttcatgagaagatttattccaccaggggtatttcagctttgaaaccaaatctgtgta

SEQ ID NO: 218127 - DNA, 120 bp, Artificial Sequence
  ENSG00000116729_20 (sequence is synthesized)
tctaatactaaccaatctgttggatgtgggttttaaaaaatgtttgctaaactacccaagtaagatttactgtattaaatggccttcgggtctgaaaagcttttttaacttcttgcttaa

SEQ ID NO: 218128 - DNA, 120 bp, Artificial Sequence
  ENSG00000116729_21 (sequence is synthesized)
aatgcgttttattttgataagatacttcaaatagcctccaaaagtgtagatccaatcatttaaataaacctgtatgtatatgcatatgtgtacatgcatatcccctcctgctaaaactca

SEQ ID NO: 218129 - DNA, 120 bp, Artificial Sequence
  ENSG00000116729_22 (sequence is synthesized)
tttgtttcggaactttatcaagaattgttcagcgcttcgaaatattccttcatcaatgacaacgcagcttctggtatttgagtcaacaaggcaacacatgtttatcagctttgcatttgc

SEQ ID NO: 218130 - DNA, 120 bp, Artificial Sequence
  ENSG00000116729_23 (sequence is synthesized)
agttgtcacagtcacattgattgtacttgtatacgcacacaaatacactcatttagcctttatctcaaaatgttaaatataaggaaaaaagcgtcaacaataaatattctttgagtattg

SEQ ID NO: 218131 - DNA, 120 bp, Artificial Sequence
  ENSG00000116729_24 (sequence is synthesized)
ggttcccttccaatcagctccgggagggcaacgtaatcgactttattaggaacaacagaagagtcggggaactgtgcccggcgcaaacccggagctctgttacaaggctgagatacttgc

SEQ ID NO: 218132 - DNA, 120 bp, Artificial Sequence
  ENSG00000116729_25 (sequence is synthesized)
acacatgatggcttcctgcttatcagagattcacctgtaacaatattacttcatatgagaaaatgcagaagtctccatggacgtttccctggcttaccgtgatgacgcgtttgctgagtg

SEQ ID NO: 218133 - DNA, 120 bp, Artificial Sequence
  ENSG00000116729_26 (sequence is synthesized)
ctatccaaggacacccaagaggaccccaagtttggagcctctagagccctgttgttggctctgccactggggagtgttagtgttgctagctctgctgaggttgaaatgaacgtggaaaaa

SEQ ID NO: 218134 - DNA, 120 bp, Artificial Sequence
  ENSG00000116729_27 (sequence is synthesized)
ataaactgatacacatatatgtctttgtaagttctgttcaccacatctgctttgacctacaacactgctgtgtttatatcaggttgtttataaaaccttggaaacttcgctttccactcc

SEQ ID NO: 218135 - DNA, 120 bp, Artificial Sequence
  ENSG00000116729_28 (sequence is synthesized)
gggcaaggtaaggaccactgactgtgcctgacagaaagctagagaaccttcagttgaccttaatttacaccgaaatgattcagattaaaagatggagtcttacatggcccttcatgtttc

SEQ ID NO: 218136 - DNA, 120 bp, Artificial Sequence
  ENSG00000116729_29 (sequence is synthesized)
ccacatgtagaagagacttggttttcatgttggttggttcctttattggtgttatgtttcttctgtttcttctctgtttcaattgaatatcaccatcctttctccgcaggtaacggaagg

SEQ ID NO: 218137 - DNA, 120 bp, Artificial Sequence
  ENSG00000116729_30 (sequence is synthesized)
agaaagaagtcgagctgagactttattccgcatctctgtgttttgacttaggcatctattgggtccttttaaaaaaaattctcctcctctttcctaaagagagttctagcagttgggggt

SEQ ID NO: 218138 - DNA, 120 bp, Artificial Sequence
  ENSG00000116729_31 (sequence is synthesized)
ggggtggggaccatttcctaaagtcaacgcgtaagttaaaggtctgcaaggcggtccaccggtgatttaaatctcgcacttcggaaaccagaaaaggaaacctgtgagaagctgggcagg

SEQ ID NO: 218139 - DNA, 120 bp, Artificial Sequence
  ENSG00000116729_32 (sequence is synthesized)
gggaacccgcttaacatcaacagcaacccctaaatggcatcagaccttggagagacaggttgcaggccagactcgggagccaggcgccagcacccgccagagctctgagccccgaactgc

SEQ ID NO: 218140 - DNA, 120 bp, Artificial Sequence
  ENSG00000116731_0 (sequence is synthesized)
gtaaaagtgacattctaaatgttcctcactctgcgaggcttattttttagggactttgctataattctgaaagacttagttttacagtacatctgaaagtaggagttttcagaagtatgg

SEQ ID NO: 218141 - DNA, 120 bp, Artificial Sequence
  ENSG00000116731_1 (sequence is synthesized)
ctcttgggataaatttagattcttaattgtgaagctctgttaccacttgttagaaggcaggtcagctcacctgcttggggaggtaaatatatgaatgcactctcgagtaatttaatggag

SEQ ID NO: 218142 - DNA, 120 bp, Artificial Sequence
  ENSG00000116731_2 (sequence is synthesized)
ccctacctcaatgtacagaatgacagtatcacagatcaagaatggagtacgagtgattttcggctatggtgggggtaggtaggtcacttgtcccctgttgtctcttactatttgtaaagt

SEQ ID NO: 218143 - DNA, 120 bp, Artificial Sequence
  ENSG00000116731_3 (sequence is synthesized)
gaagactatgattagtctttttgatcgggatggtttgagatgaataaagaataggcaggcaatttggatactttaggcttttcaagaacattagtaacattttttcttagatatttctcc

SEQ ID NO: 218144 - DNA, 120 bp, Artificial Sequence
  ENSG00000116731_4 (sequence is synthesized)
taatacaatgagtgttgtgaaataacatggcagttattgttgagagaaaagccttcccagttatgtattgagtccttaggcgttttgaccttccctccactcttacagaacttggtggaa

SEQ ID NO: 218145 - DNA, 120 bp, Artificial Sequence
  ENSG00000116731_5 (sequence is synthesized)
ggggccactatgttttctacctccttccgtgcctttcacaaagccacatcctgcaccgtctacccttctctgtggatatttttccgcttggcaatttcctttcctgaggcacccacttgg

SEQ ID NO: 218146 - DNA, 120 bp, Artificial Sequence
  ENSG00000116731_6 (sequence is synthesized)
gacatctgaatctccatctccatgttgatggcccgtttgtgcttggacgtgttcttccacttgagactgagggttcatgtaatcaaagaagtttctttgttgtgtgtatctttacagaac

SEQ ID NO: 218147 - DNA, 120 bp, Artificial Sequence
  ENSG00000116731_7 (sequence is synthesized)
acaacaggaattgaaaatgaatcagaacactactgagcctgtggcggccaccgagaccctggctgaggtacccgaacatgtgctgcgaggacttccggaggaagtgaggcttttcccttc

SEQ ID NO: 218148 - DNA, 120 bp, Artificial Sequence
  ENSG00000116731_8 (sequence is synthesized)
tgctgttgacaagacccggattggtgtctgggccactaaaccaattttaaaaggcaaaaaatttgggccatttgttggtgataagaaaaaaagatctcaggttaagaataatgtatacat

SEQ ID NO: 218149 - DNA, 120 bp, Artificial Sequence
  ENSG00000116731_9 (sequence is synthesized)
gtgggaggtgtattacccaaatttgggatggatgtgcattgatgccactgatccagagaagggaaactggctgcgatatgtgaattgggcttgctcaggagaagagcaaaatttattccc

SEQ ID NO: 218150 - DNA, 120 bp, Artificial Sequence
  ENSG00000116731_10 (sequence is synthesized)
actggaaatcaacagagccatttactataaaactttaaagccaatcgcgccgggcgaggagctcctggtctggtacaatggggaagacaaccctgagatagcagctgcgattgaggaaga

SEQ ID NO: 218151 - DNA, 120 bp, Artificial Sequence
  ENSG00000116731_11 (sequence is synthesized)
gcgagccagcgcccggagcaagcggagctcccccaagagccggaaagggaagaaaaaatcccaggaaaataaaaacaaaggaaacaaaatccaagacatacaactgaagacaagtgagcc

SEQ ID NO: 218152 - DNA, 120 bp, Artificial Sequence
  ENSG00000116731_12 (sequence is synthesized)
agatttcacctctgcaaatatgagagattctgcagaaggtcctaaagaagacgaagagaagccttcagcctcagcacttgagcagccggccaccctccaggaggtggccagtcaggaggt

SEQ ID NO: 218153 - DNA, 120 bp, Artificial Sequence
  ENSG00000116731_13 (sequence is synthesized)
gcctccagaactagcaacccctgcccctgcctgggagccacagccagaaccagacgagcgattagaagcggcagcttgtgaggtgaatgatttgggggaagaggaggaggaggaagagga

SEQ ID NO: 218154 - DNA, 120 bp, Artificial Sequence
  ENSG00000116731_14 (sequence is synthesized)
ggaggatgaagaagaagaagaagatgatgatgatgatgagttggaagacgagggggaagaagaagccagcatgccaaatgaaaattctgtgaaagagccagaaatacggtgtgatgagaa

SEQ ID NO: 218155 - DNA, 120 bp, Artificial Sequence
  ENSG00000116731_15 (sequence is synthesized)
gccagaagatttattagaggaaccaaaaacaacttcagaagaaactcttgaagactgctcagaggtaacacctgccatgcaaatccccagaactaaagaagaggccaatggtgatgtatt

SEQ ID NO: 218156 - DNA, 120 bp, Artificial Sequence
  ENSG00000116731_16 (sequence is synthesized)
tgaaacgtttatgtttccgtgtcaacattgtgaaaggaagtttacaaccaaacaggggcttgagcgtcacatgcatatccatatatccaccgtcaatcatgctttcaaatgcaagtactg

SEQ ID NO: 218157 - DNA, 120 bp, Artificial Sequence
  ENSG00000116731_17 (sequence is synthesized)
tgggaaagcctttggcacacagattaaccggcggcgacatgagcggcgccatgaagcagggttaaagcggaaacccagccaaacactacagccgtcagaggatctggctgatggcaaagc

SEQ ID NO: 218158 - DNA, 120 bp, Artificial Sequence
  ENSG00000116731_18 (sequence is synthesized)
atctggagaaaacgttgcttcaaaagatgattcgagtcctcccagtcttgggccagactgtctgatcatgaattcagagaaggcttcccaagacacaataaattcttctgtcgtagaaga

SEQ ID NO: 218159 - DNA, 120 bp, Artificial Sequence
  ENSG00000116731_19 (sequence is synthesized)
gaatggggaagttaaagaacttcatccgtgcaaatattgtaaaaaggtttttggaactcatactaatatgagacggcatcagcgtagagttcacgaacgtcatctgattcccaaaggtgt

SEQ ID NO: 218160 - DNA, 120 bp, Artificial Sequence
  ENSG00000116731_20 (sequence is synthesized)
acggcgaaaaggaggccttgaagagccccagcctccagcagaacaggcccaggccacccagaacgtgtatgtaccaagcacagagccggaggaggaaggggaagcagatgatgtgtacat

SEQ ID NO: 218161 - DNA, 120 bp, Artificial Sequence
  ENSG00000116731_21 (sequence is synthesized)
catggacatttctagcaatatctctgaaaacttaaattactatattgatggtaaaattcaaactaataacaacactagtaactgtgatgtgattgagatggagtctgcttcggcagattt

SEQ ID NO: 218162 - DNA, 120 bp, Artificial Sequence
  ENSG00000116731_22 (sequence is synthesized)
gtatggtataaattgtctgctcactccagttacagtggaaattactcaaaatataaagaccacacaggtccctgtaacagaagatcttcctaaagagcctttgggcagcacaaatagtga

SEQ ID NO: 218163 - DNA, 120 bp, Artificial Sequence
  ENSG00000116731_23 (sequence is synthesized)
ggccaagaagcggagaactgcgagcccacctgcactgcccaaaattaaggccgaaacagactctgaccccatggtcccctcttgctctttaagtcttcctcttagcatatcaacaacaga

SEQ ID NO: 218164 - DNA, 120 bp, Artificial Sequence
  ENSG00000116731_24 (sequence is synthesized)
ggcagtgtctttccacaaagagaaaagtgtttatttgtcatcaaagctcaaacaacttcttcaaacccaagataaactaactcctgcagggatttcagcaactgaaatagctaaattagg

SEQ ID NO: 218165 - DNA, 120 bp, Artificial Sequence
  ENSG00000116731_25 (sequence is synthesized)
tcctgtttgtgtgtctgctcctgcatcaatgttgcctgtgacctcaagtaggtttaagaggcggaccagctctcctcccagttctccacagcacagtcctgcccttcgagactttggaaa

SEQ ID NO: 218166 - DNA, 120 bp, Artificial Sequence
  ENSG00000116731_26 (sequence is synthesized)
gccaagtgatgggaaagcagcatggaccgatgccgggctgacttccaaaaaatccaaattagaaagtcacagcgactcaccagcatggagtttgtctgggagagatgagagagaaactgt

SEQ ID NO: 218167 - DNA, 120 bp, Artificial Sequence
  ENSG00000116731_27 (sequence is synthesized)
gagccctccatgctttgatgaatataaaatgtctaaagagtggacagctagttctgcttttagcagtgtgtgcaaccagcagccactggatttatccagcggtgtcaaacagaaggctga

SEQ ID NO: 218168 - DNA, 120 bp, Artificial Sequence
  ENSG00000116731_28 (sequence is synthesized)
gggtacaggcaagactccagtccagtgggaatctgtcttagatctcagtgtgcataaaaagcattgtagtgactctgaaggcaaggaattcaaagaaagtcattcagtgcagcctacgtg

SEQ ID NO: 218169 - DNA, 120 bp, Artificial Sequence
  ENSG00000116731_29 (sequence is synthesized)
tagtgctgtaaagaaaaggaaaccaaccacctgcatgctgcagaaggttcttctcaatgaatataatggcatcgatttacctgtagaaaaccctgcagatgggaccaggagcccaagtcc

SEQ ID NO: 218170 - DNA, 120 bp, Artificial Sequence
  ENSG00000116731_30 (sequence is synthesized)
ttgtaaatccctagaagctcagccagatcctgacctcggtccgggctctggtttccctgcccctactgttgagtccacacctgatgtttgtccttcatcacctgccctgcagacaccctc

SEQ ID NO: 218171 - DNA, 120 bp, Artificial Sequence
  ENSG00000116731_31 (sequence is synthesized)
cctttcatccggtcagctgcctcctctcttgatccccacagatccctcttcccctccaccctgtcccccggtattaactgttgccactccgccccctcccctccttcctaccgtacctct

SEQ ID NO: 218172 - DNA, 120 bp, Artificial Sequence
  ENSG00000116731_32 (sequence is synthesized)
tccagccccctcttccagtgcatctccacacccatgcccctctccactctcaaatgccaccgcacagtccccacttccaattctgtccccaacagtgtccccctctccctctcccattcc

SEQ ID NO: 218173 - DNA, 120 bp, Artificial Sequence
  ENSG00000116731_33 (sequence is synthesized)
cctccaacactttcttcttcctcctcttcatcttcctcctcctcttcgttttcttcttcatcttcctcctcttctccttctccacctcctctctccgcaatatcatctgttgtttcctct

SEQ ID NO: 218174 - DNA, 120 bp, Artificial Sequence
  ENSG00000116731_34 (sequence is synthesized)
ggtgataatctggaggcttctctccccatgatatctttcaaacaggaggaattagagaatgaaggtctgaaacccagggaagagccccagtctgctgctgaacaggatgttgttgttcag

SEQ ID NO: 218175 - DNA, 120 bp, Artificial Sequence
  ENSG00000116731_35 (sequence is synthesized)
gaaacattcaacaaaaactttgtttgcaacgtctgtgaatcaccttttctttccattaaagatctaaccaaacatttatctattcatgctgaagaatggcccttcaaatgtgaattttgt

SEQ ID NO: 218176 - DNA, 120 bp, Artificial Sequence
  ENSG00000116731_36 (sequence is synthesized)
gtgcagctttttaaggataaaacggacttgtcagaacatcgctttttgcttcatggagttgggaatatctttgtgtgttctgtttgtaaaaaagaatttgcttttttgtgcaatttgcag

SEQ ID NO: 218177 - DNA, 120 bp, Artificial Sequence
  ENSG00000116731_37 (sequence is synthesized)
cagcaccagcgagatctccacccagataaggtgtgcacacatcacgagtttgaaagcgggactctgaggccccagaactttacagatcccagcaaggcccatgtagagcatatgcagagc

SEQ ID NO: 218178 - DNA, 120 bp, Artificial Sequence
  ENSG00000116731_38 (sequence is synthesized)
ttgccagaagatcctttagaaacttctaaagaagaagaggagttaaatgattcctctgaagagctttacacgactataaaaataatggcttctggaataaagacaaaagatccagatgtt

SEQ ID NO: 218179 - DNA, 120 bp, Artificial Sequence
  ENSG00000116731_39 (sequence is synthesized)
cgattgggcctcaatcagcattacccaagctttaaaccacctccatttcagtaccatcaccgtaaccccatggggattggtgtgacagccacaaatttcactacacacaatattccacag

SEQ ID NO: 218180 - DNA, 120 bp, Artificial Sequence
  ENSG00000116731_40 (sequence is synthesized)
actttcactaccgccattcgctgcacaaagtgtggaaaaggtgtcgacaatatgccggagttgcacaaacatatcctggcttgtgcttctgcaagtgacaagaagaggtacacgcctaag

SEQ ID NO: 218181 - DNA, 120 bp, Artificial Sequence
  ENSG00000116731_41 (sequence is synthesized)
aaaaacccagtaccattaaaacaaactgtgcaacccaaaaatggcgtggtggttttagataactctgggaaaaatgccttccgacgaatgggacagcccaaaaggcttaactttagtgtt

SEQ ID NO: 218182 - DNA, 120 bp, Artificial Sequence
  ENSG00000116731_42 (sequence is synthesized)
gagctcagcaaaatgtcgtcgaataagctcaaattaaatgcattgaagaaaaaaaatcagctagtacagaaagcaattcttcagaaaaacaaatctgcaaagcagaaggccgacttgaaa

SEQ ID NO: 218183 - DNA, 120 bp, Artificial Sequence
  ENSG00000116731_43 (sequence is synthesized)
aatgcttgtgagtcatcctctcacatctgcccttactgtaatcgagagttcacttacattggaagcctgaataaacacgccgccttcagctgtcccaaaaaacccctttctcctcccaaa

SEQ ID NO: 218184 - DNA, 120 bp, Artificial Sequence
  ENSG00000116731_44 (sequence is synthesized)
aaaaaagtttctcattcatctaagaaaggtggacactcatcacctgcaagtagtgacaaaaacagtaacagcaaccaccgcagacggacagcggatgcggagattaaaatgcaaagcatg

SEQ ID NO: 218185 - DNA, 120 bp, Artificial Sequence
  ENSG00000116731_45 (sequence is synthesized)
cagactccgttgggcaagaccagagcccgcagctcaggccccacccaagtcccacttccctcctcatccttcaggtccaagcagaacgtcaagtttgcagcttcggtgaaatccaaaaaa

SEQ ID NO: 218186 - DNA, 120 bp, Artificial Sequence
  ENSG00000116731_46 (sequence is synthesized)
ccaagctcctcctctttaaggaactccagcccgataagaatggccaaaataactcatgttgaggggaaaaaacctaaagctgtggccaagaatcattctgctcagctttccagcaaaaca

SEQ ID NO: 218187 - DNA, 120 bp, Artificial Sequence
  ENSG00000116731_47 (sequence is synthesized)
tcacggagcctgcacgtgagggtacagaaaagcaaagctgttttacaaagcaaatccaccttggcgagtaagaaaagaacagaccggttcaatataaaatctagagagcggagtgggggg

SEQ ID NO: 218188 - DNA, 120 bp, Artificial Sequence
  ENSG00000116731_48 (sequence is synthesized)
ccagtcacccggagccttcagctggcagctgctgctgacttgagtgagaacaagagagaggacggcagcgccaagcaggagctgaaggacttcagctacagcctccgcttggcgtcccga

SEQ ID NO: 218189 - DNA, 120 bp, Artificial Sequence
  ENSG00000116731_49 (sequence is synthesized)
tgctctccaccagcggccccgtacatcaccaggcagtataggaaggtcaaagctccagctgcagcccagttccagggaccattcttcaaagagtagacactctggctgctccctgacagc

SEQ ID NO: 218190 - DNA, 120 bp, Artificial Sequence
  ENSG00000116731_50 (sequence is synthesized)
acctgaagtgacctggaatcagtgaagccaaagggactggcagtctgccctgcagggagtaccgacctatcccagttgtgtgaggctgcgagagaaagggagtgcatgtgcgcgcgtgca

SEQ ID NO: 218191 - DNA, 120 bp, Artificial Sequence
  ENSG00000116731_51 (sequence is synthesized)
tgtgtgcgtgcgtgtgtgttcacgtgttctcgtgcgggcgcgtgagtggtcttcaaacgagggtcccgatccccggggcggcaggaagggggccgactccacgctgtcctttgggatgat

SEQ ID NO: 218192 - DNA, 120 bp, Artificial Sequence
  ENSG00000116731_52 (sequence is synthesized)
acttggatgcagctcttgggaccgtgttctgcagcccagccttcctgttggggtggggcctctcctactatgcaatttttcaagagctccttgaccctgctttttgcttcttgagttgtc

SEQ ID NO: 218193 - DNA, 120 bp, Artificial Sequence
  ENSG00000116731_53 (sequence is synthesized)
ttttgccattatggggactttggtttgacccaggggtcagccttaggaaggccttcaggaggaggccgagttccccttcagtaccacccctctctccccaccttccctctcccggcaaca

SEQ ID NO: 218194 - DNA, 120 bp, Artificial Sequence
  ENSG00000116731_54 (sequence is synthesized)
tctctgggaatcaacagcatattgacacgttggagccgagcctgaacatgcccctcggccccagcacatggaaaacccccttccttgcctaaggtgtctgagtttctggctcttgaggca

SEQ ID NO: 218195 - DNA, 120 bp, Artificial Sequence
  ENSG00000116731_55 (sequence is synthesized)
tttccagacttgaaattctcatcagtccattgctcttgagtctttgcagagaacctcagatcaggtgcacctgggagaaagactttgtccccacttacagatctatctcctcccttggga

SEQ ID NO: 218196 - DNA, 120 bp, Artificial Sequence
  ENSG00000116731_56 (sequence is synthesized)
agggcagggaatggggacggtgtatggaggggagggatctcctgcgcccttcattgccacacttggtgggaccatgaacatctttagtgtctgagcttctcaaattagctgcaataggaa

SEQ ID NO: 218197 - DNA, 120 bp, Artificial Sequence
  ENSG00000116731_57 (sequence is synthesized)
aaaaacaaattgggaaatgaaaaaaaaatgggaagattaaaaagcacagggggaagaagaagagatttcggaggccatcctgccaggggcggacggggctgactcctgctctctggagga

SEQ ID NO: 218198 - DNA, 120 bp, Artificial Sequence
  ENSG00000116731_58 (sequence is synthesized)
cggtcagtccatgtctcggagaaacgggtgagctgagcttggcgtttggacccagttcagtgaggttcttgggttttgtgcctttggggcagaccccaggcaaggatgtctgagaccact

SEQ ID NO: 218199 - DNA, 120 bp, Artificial Sequence
  ENSG00000116731_59 (sequence is synthesized)
tgggcgctgttttctcagctccaatttcaagagtgagctatcaaacccagagcggaaggagggagctctgatgagcacggtttgtcacacgataaagggattttttttttcagggctact

SEQ ID NO: 218200 - DNA, 120 bp, Artificial Sequence
  ENSG00000116731_60 (sequence is synthesized)
acggttgatcttgcaactctgtaaatatgtatgtagacacttttaaaagcacgtatttatgtccctgactgtaaatgctccatttttaaagttttataacttgtgttatttaatgagtca

SEQ ID NO: 218201 - DNA, 120 bp, Artificial Sequence
  ENSG00000116731_61 (sequence is synthesized)
gtcaatcggctgcagtatgggatctgataaggatctaggagaagggtctcatgcggaccctcacatgggcagaaaaatggtggtcattggccgacatcacagttttcctgtttcccaccc

SEQ ID NO: 218202 - DNA, 120 bp, Artificial Sequence
  ENSG00000116731_62 (sequence is synthesized)
agctaaaaaccgttgtttgctttaaattttcataaactggaatcctttcacccgctcctacagctaaccctcacaagcatgaagtgctgtggctgttccttatcctaatgatgcgctttt

SEQ ID NO: 218203 - DNA, 120 bp, Artificial Sequence
  ENSG00000116731_63 (sequence is synthesized)
gtcccgtaaatgttaacactcatgaagcataccccggcctctcagttcttgagggcctccccaccgcagcagcaaggaaagctcacgaaccccaaacctggcaagtcacctgcagcccat

SEQ ID NO: 218204 - DNA, 120 bp, Artificial Sequence
  ENSG00000116731_64 (sequence is synthesized)
ggtgagctctgggaagtgtggttgaggccttggggtcactccttttttgcatgtgcaaatgtgctggtcacccttcaacgctcccagacggtcaggaaaactgttccaatcatgaaaagg

SEQ ID NO: 218205 - DNA, 120 bp, Artificial Sequence
  ENSG00000116731_65 (sequence is synthesized)
ggggatgattttgtaaaagtggcatttcctggtcagtggtggtcttcaagacgacagctctgtatctgccatgtgaagagaattaacaataaaagtgtgaagagcgattgtgaggaacaa

SEQ ID NO: 218206 - DNA, 120 bp, Artificial Sequence
  ENSG00000116731_66 (sequence is synthesized)
gctgaaggacttcaggaacttcctgtagaaaagcccccaaaacaaaacaaaccttaattgactaaaaagtattgcatgctcaacttaggataagcactacggcaaaggatacgaaatcta

SEQ ID NO: 218207 - DNA, 120 bp, Artificial Sequence
  ENSG00000116731_67 (sequence is synthesized)
ccaagcttgcaagaccagttgaagctgactcaaaaatcctaacattcagctgattgccggcaggcttagagtcaggcatctgctgcttcggtgggggcccaacgcgcatgctgggcgccc

SEQ ID NO: 218208 - DNA, 120 bp, Artificial Sequence
  ENSG00000116731_68 (sequence is synthesized)
gggtgattgagatccaaagagaagggcactgtaagacaggccagatgaactggctcctcgtcatgggactggtacctcagatctgagcatggcccttgtttttggcacgtagcagagaaa

SEQ ID NO: 218209 - DNA, 120 bp, Artificial Sequence
  ENSG00000116731_69 (sequence is synthesized)
ggattgatttgaacttaaccttgcaaagcaagttgcctgttttagcagtagtttgttgtaggtttcagggatgacagatttggatgcactcatttaaaacgttttggtcacatatcagct

SEQ ID NO: 218210 - DNA, 120 bp, Artificial Sequence
  ENSG00000116731_70 (sequence is synthesized)
cttgatgcctttcttttaaattaattatagacagagagaggcatttagctgatctcttacccctggtatttcttttttttgttgttttcgtttttttaaatcacaagtagattgccagcg

SEQ ID NO: 218211 - DNA, 120 bp, Artificial Sequence
  ENSG00000116731_71 (sequence is synthesized)
taatggagaggaaaccagattggatatggactcttttttatgcctattctggtgttgcgtttgtatatccaaatggacgttatcctctcagattcttatctggcactaatttataactat

SEQ ID NO: 218212 - DNA, 120 bp, Artificial Sequence
  ENSG00000116731_72 (sequence is synthesized)
tatattatcagagactatgtagcaatatatcagtgcacaggcgcatcccaggcctgtacagatgtatgtctacacgtaagtataaatgaatttgcataccaggttttacacttgcatctc

SEQ ID NO: 218213 - DNA, 120 bp, Artificial Sequence
  ENSG00000116731_73 (sequence is synthesized)
taatagagattaaaaacaacaaattggcctcttcctaagtatattaatatcatttatccttacattttatgcctccccctaaattaatgactgagttggtggaaagcggctaggttttat

SEQ ID NO: 218214 - DNA, 120 bp, Artificial Sequence
  ENSG00000116731_74 (sequence is synthesized)
tcatactgttttttgttctcaacttcaaaagtaatctacctctgaaaaatttgtagtttaatatttgtttggtgaatttgtgccactttaatccttccactatcattcccattttgttac

SEQ ID NO: 218215 - DNA, 120 bp, Artificial Sequence
  ENSG00000116731_75 (sequence is synthesized)
atttctgttatggggactttatgttgaaatattgtataaagcatttgtagcaatttaaaaataaaatatttaaaattatttaaattgttttggacgcttcaattgtattatatgtgattt

SEQ ID NO: 218216 - DNA, 120 bp, Artificial Sequence
  ENSG00000116731_76 (sequence is synthesized)
acatttcactttttttgttggcgttgttaacccggagagtgctcctgtattgaactttgctgttagttattttattgcttctttttggagagtgctataaaagactattctaatgaaaac

SEQ ID NO: 218217 - DNA, 120 bp, Artificial Sequence
  ENSG00000116731_77 (sequence is synthesized)
attaaaatttacaatttgacatacaaaaaggggttgtccattgattttaaccaatgtagcactgagagagagagaggttaattatagatagacaagagtggtgtttgttgtttttcccct

SEQ ID NO: 218218 - DNA, 120 bp, Artificial Sequence
  ENSG00000116731_78 (sequence is synthesized)
cccagcattgaaatcattggggcttgtcagatgtattaaaaaaagatttgttgtgctattgctgcaaacacttaataactagaggagaatttaaacaatgcattttatattattgtaacc

SEQ ID NO: 218219 - DNA, 120 bp, Artificial Sequence
  ENSG00000116731_79 (sequence is synthesized)
gaagagcgagccagcgcccggagcaagcggagctcccccaagagccggaaagtgttgtcctgtccctctgctgttccttgtcatcatttccatttcacttcccttgtgtttcattcctct

SEQ ID NO: 218220 - DNA, 120 bp, Artificial Sequence
  ENSG00000116731_80 (sequence is synthesized)
tctgaggagtgaagtagttgatactgaagacccgtttttgtctgtagtcaccagaaatttaattctgtaggatgtcagttttataatcttcaacaaacccttcaggtatctaattctgta

SEQ ID NO: 218221 - DNA, 120 bp, Artificial Sequence
  ENSG00000116731_81 (sequence is synthesized)
ctcccccaagagccggaaagaccaagcggagcagccagctggcagtagcgccctgtaggacccccaggacccgatgggaagaaaaaatcccaggaaaataaaaacaaaggaaacaaaatc

SEQ ID NO: 218222 - DNA, 120 bp, Artificial Sequence
  ENSG00000116731_82 (sequence is synthesized)
ggagtcaagatggcggcggcgcggccgcgggcgccggggccggcgaaacagcggcggcggcggcggccctcggtgctctgaggcgctggcgcggcgggcgcggggttcatgtaatcaaag

SEQ ID NO: 218223 - DNA, 120 bp, Artificial Sequence
  ENSG00000116731_83 (sequence is synthesized)
ctgaagacaagtgagccagatttcacctctgcaaatatgagagattctgcagaaggtaagcttgtgatattggcttggtctgaattgggtgtgtatgtacccagtgaatttaactttgta

SEQ ID NO: 218224 - DNA, 120 bp, Artificial Sequence
  ENSG00000116731_84 (sequence is synthesized)
aaagctgcctaaatttaatgtggtaagctgagccttctatatgctaccttcccttcaaacaattgtgaaagacttttcttcttaaaaatgaacttgttcctttgttaaaataaaatgaga

SEQ ID NO: 218225 - DNA, 88 bp, Artificial Sequence
  ENSG00000116731_85 (sequence is synthesized)
ccagcactttgggaggctgagccagaaggatctctggaggccaggagtttgaggccagcccgaaaataagaaaattcactaagatgat

SEQ ID NO: 218226 - DNA, 120 bp, Artificial Sequence
  ENSG00000116731_86 (sequence is synthesized)
agaaaataagaaaattcactaagatgatggcatgtgcctgtagttctagctacttgacaggctgaggtgggaggatcactggtgcccaggagttagaggctacattgagctgtgatcccc

SEQ ID NO: 218227 - DNA, 120 bp, Artificial Sequence
  ENSG00000116731_87 (sequence is synthesized)
tctcaaaaacaaagaaaaaaaaaggtgtttaaaatggtattttagaatttacgttttaagactaacaagcaaaatgactgttaaggttatgtctcaaatttttgtcaaaatctggtggtg

SEQ ID NO: 218228 - DNA, 120 bp, Artificial Sequence
  ENSG00000116731_88 (sequence is synthesized)
ttttttaggatttgtttttgctttgtattgtatttgatgtttctacttttaatctagatgttttcaatgatgctattttatgtctctgacctcatttttgtctgtttacatttttagcta

SEQ ID NO: 218229 - DNA, 120 bp, Artificial Sequence
  ENSG00000116731_89 (sequence is synthesized)
acgtgtatatagcagctttaagtcgtttttagtttgattttactaatgcagagataaaaggtgtcagaggcttgtagttctggaagctggtggaggtttgtctgggggagagcagcggag

SEQ ID NO: 218230 - DNA, 120 bp, Artificial Sequence
  ENSG00000116731_90 (sequence is synthesized)
aaaaaggaggattgttacggaagaatggggatctgtctggatctgaagactgaaacaccagcttccagaaaaatagaaatctgggaagaaaaaatcccaggaaaataaaaacaaaggaaa

SEQ ID NO: 218231 - DNA, 120 bp, Artificial Sequence
  ENSG00000116741_0 (sequence is synthesized)
gcaaacagccggggctccagcgggagaacgataatgcaaagtgctatgttcttggctgttcaacacgactgcagacccatggacaagagcgcaggcagtggccacaagagcgaggagaag

SEQ ID NO: 218232 - DNA, 120 bp, Artificial Sequence
  ENSG00000116741_1 (sequence is synthesized)
cgagaaaagatgaaacggacccttttaaaagattggaagacccgtttgagctacttcttacaaaattcctctactcctgggaagcccaaaaccggcaaaaaaagcaaacagcaagctttc

SEQ ID NO: 218233 - DNA, 120 bp, Artificial Sequence
  ENSG00000116741_2 (sequence is synthesized)
atcaagccttctcctgaggaagcacagctgtggtcagaagcatttgacgagctgctagccagcaaatatggtcttgctgcattcagggcttttttaaagtcggaattctgtgaagaaaat

SEQ ID NO: 218234 - DNA, 120 bp, Artificial Sequence
  ENSG00000116741_3 (sequence is synthesized)
attgaattctggctggcctgtgaagacttcaaaaaaaccaaatcaccccaaaagctgtcctcaaaagcaaggaaaatatatactgacttcatagaaaaggaagctccaaaagagataaac

SEQ ID NO: 218235 - DNA, 120 bp, Artificial Sequence
  ENSG00000116741_4 (sequence is synthesized)
atagattttcaaaccaaaactctgattgcccagaatatacaagaagctacaagtggctgctttacaactgcccagaaaagggtatacagcttgatggagaacaactcttatcctcgtttc

SEQ ID NO: 218236 - DNA, 120 bp, Artificial Sequence
  ENSG00000116741_5 (sequence is synthesized)
gtaaaaagccacaaatcaccacagagcctcatgctacatgaaatgtaaaagggagcccagaaatggaggacatttcattctttttcctgaggggaaggactgtgacctgccataaagact

SEQ ID NO: 218237 - DNA, 120 bp, Artificial Sequence
  ENSG00000116741_6 (sequence is synthesized)
gaccttgaattcagcctgggtgttcaggaaacatcactcagaactattgattcaaagttgggtagtgaatcaggaagccagtaactgactaggagaagctggtatcagaacagcttccct

SEQ ID NO: 218238 - DNA, 120 bp, Artificial Sequence
  ENSG00000116741_7 (sequence is synthesized)
cactgtgtacagaacgcaagaagggaataggtggtctgaacgtggtgtctcactctgaaaagcaggaatgtaagatgatgaaagagacaatgtaatactgttggtccaaaagcatttaaa

SEQ ID NO: 218239 - DNA, 120 bp, Artificial Sequence
  ENSG00000116741_8 (sequence is synthesized)
atcaatagatctgggattatgtggccttaggtagctggttgtacatctttccctaaatcgatccatgttaccacatagtagttttagtttaggattcagtaacagtgaagtgtttactat

SEQ ID NO: 218240 - DNA, 120 bp, Artificial Sequence
  ENSG00000116741_9 (sequence is synthesized)
gtgcaacggtattgaagttcttatgaccacagatcatcagtactgttgtctcatgtaatgctaaaactgaaatggtccgtgtttgcattgttaaaaatgatgtgtgaaatagaatgagtg

SEQ ID NO: 218241 - DNA, 120 bp, Artificial Sequence
  ENSG00000116741_10 (sequence is synthesized)
ctatggtgttgaaaactgcagtgtccgttatgagtgccaaaaatctgtcttgaaggcagctacactttgaagtggtctttgaatacttttaataaatttattttgataaataatattgaa

SEQ ID NO: 218242 - DNA, 120 bp, Artificial Sequence
  ENSG00000116741_11 (sequence is synthesized)
tagccagcaaatgtaagttaactcttgagcttgagccattgctaacatcgcaaaagcctggaaaggctgcgtccacctaacaaaagagcagcttgcctgagggggattagactgcagtca

SEQ ID NO: 218243 - DNA, 120 bp, Artificial Sequence
  ENSG00000116741_12 (sequence is synthesized)
ctataggataaagcctgtttttctttcctttatttcccagggtttaacaaataaatgcatatattctctccaggtggggaagaaaatcagcctaaacaaattaaagtggcagttgcttat

SEQ ID NO: 218244 - DNA, 120 bp, Artificial Sequence
  ENSG00000116741_13 (sequence is synthesized)
agttaaggttgagtcagtttttccattgcatacaatgttttcaagaggcttagttcccagagaatttatggctcccctataaatatttactttgcattgacagcaaagtacttatatttt

SEQ ID NO: 218245 - DNA, 120 bp, Artificial Sequence
  ENSG00000116741_14 (sequence is synthesized)
tgcagcagagtgccaacataagccttttgcctactggtatcttagtctttaaaaagctaaattttgagaattacaggtttgagcgaaatctagaaaattcatttagaaataattaaaatg

SEQ ID NO: 218246 - DNA, 120 bp, Artificial Sequence
  ENSG00000116741_15 (sequence is synthesized)
caagagcgaggagaagcgagaaaagatgaaacggaccctaatcctgcggctgaagcgcgtccccagcattcatacgttgcatgatgagttctcatcagcttacacagctactggaagttt

SEQ ID NO: 218247 - DNA, 120 bp, Artificial Sequence
  ENSG00000116745_0 (sequence is synthesized)
cttcattctgcagttggtgccagaactctggatcctgaactggaagaaaatgtctatccaggttgagcatcctgctggtggttacaagaaactgtttgaaactgtggaggaactgtcctc

SEQ ID NO: 218248 - DNA, 120 bp, Artificial Sequence
  ENSG00000116745_1 (sequence is synthesized)
gccgctcacagctcatgtaacaggcaggatccccctctggctcaccggcagtctccttcgatgtgggccaggactctttgaagttggatctgagccattttaccacctgtttgatgggca

SEQ ID NO: 218249 - DNA, 120 bp, Artificial Sequence
  ENSG00000116745_2 (sequence is synthesized)
agccctcctgcacaagtttgactttaaagaaggacatgtcacataccacagaaggttcatccgcactgatgcttacgtacgggcaatgactgagaaaaggatcgtcataacagaatttgg

SEQ ID NO: 218250 - DNA, 120 bp, Artificial Sequence
  ENSG00000116745_3 (sequence is synthesized)
cacctgtgctttcccagatccctgcaagaatatattttccaggtttttttcttactttcgaggagtagaggttactgacaatgcccttgttaatgtctacccagtgggggaagattacta

SEQ ID NO: 218251 - DNA, 120 bp, Artificial Sequence
  ENSG00000116745_4 (sequence is synthesized)
cgcttgcacagagaccaactttattacaaagattaatccagagaccttggagacaattaagcaggttgatctttgcaactatgtctctgtcaatggggccactgctcacccccacattga

SEQ ID NO: 218252 - DNA, 120 bp, Artificial Sequence
  ENSG00000116745_5 (sequence is synthesized)
aaatgatggaaccgtttacaatattggtaattgctttggaaaaaatttttcaattgcctacaacattgtaaagatcccaccactgcaagcagacaaggaagatccaataagcaagtcaga

SEQ ID NO: 218253 - DNA, 120 bp, Artificial Sequence
  ENSG00000116745_6 (sequence is synthesized)
gatcgttgtacaattcccctgcagtgaccgattcaagccatcttacgttcatagttttggtctgactcccaactatatcgtttttgtggagacaccagtcaaaattaacctgttcaagtt

SEQ ID NO: 218254 - DNA, 120 bp, Artificial Sequence
  ENSG00000116745_7 (sequence is synthesized)
cctttcttcatggagtctttggggagccaactacatggattgttttgagtccaatgaaaccatgggggtttggcttcatattgctgacaaaaaaaggaaaaagtacctcaataataaata

SEQ ID NO: 218255 - DNA, 120 bp, Artificial Sequence
  ENSG00000116745_8 (sequence is synthesized)
cagaacttctcctttcaacctcttccatcacatcaacacctatgaagacaatgggtttctgattgtggatctctgctgctggaaaggatttgagtttgtttataattacttatatttagc

SEQ ID NO: 218256 - DNA, 120 bp, Artificial Sequence
  ENSG00000116745_9 (sequence is synthesized)
caatttacgtgagaactgggaagaggtgaaaaaaaatgccagaaaggctccccaacctgaagttaggagatatgtacttcctttgaatattgacaaggctgacacaggcaagaatttagt

SEQ ID NO: 218257 - DNA, 120 bp, Artificial Sequence
  ENSG00000116745_10 (sequence is synthesized)
cgtcaagcatttgagtttcctcaaatcaattaccagaagtattgtgggaaaccttacacatatgcgtatggacttggcttgaatcactttgttccagataggctctgtaagctgaatgtc

SEQ ID NO: 218258 - DNA, 120 bp, Artificial Sequence
  ENSG00000116745_11 (sequence is synthesized)
aaaactaaagaaacttgggtttggcaagagcctgattcatacccatcagaacccatctttgtttctcacccagatgccttggaagaagatgatggtgtagttctgagtgtggtggtgagc

SEQ ID NO: 218259 - DNA, 120 bp, Artificial Sequence
  ENSG00000116745_12 (sequence is synthesized)
ccaggagcaggacaaaagcctgcttatctcctgattctgaatgccaaggacttaagtgaagttgcccgggctgaagtggagattaacatccctgtcacctttcatggactgttcaaaaaa

SEQ ID NO: 218260 - DNA, 120 bp, Artificial Sequence
  ENSG00000116745_13 (sequence is synthesized)
tcttgagcatactccagcaagatatgtttttggtagcaaaactgagaaaatcagcttcaggtctgcaatcaaattctgttcaattttagcctgctatatgtcatggttttaacttgcaga

SEQ ID NO: 218261 - DNA, 120 bp, Artificial Sequence
  ENSG00000116745_14 (sequence is synthesized)
tgcgcacaattttgcaatgttttacagaaagcactgagttgagcaagcaattcctttatttaaaaaaaaaagtacgtatttagataatcatacttcctctgtgagacaggccataactga

SEQ ID NO: 218262 - DNA, 120 bp, Artificial Sequence
  ENSG00000116745_15 (sequence is synthesized)
aaaactcttaaatatttagcaatcaaataggaaatgaatgtggacttactaaatggcttttaattcctattataagagcatattttaggtacctatctgctccaattatatttttaacat

SEQ ID NO: 218263 - DNA, 120 bp, Artificial Sequence
  ENSG00000116745_16 (sequence is synthesized)
ttaaaaaccaaagtcctctacacttgatttatattatatgtggctttgctgagtcaaggaagtatcatgcaataaggcttaattactaaatgtcaaaccaaactttttctcaaaccaggg

SEQ ID NO: 218264 - DNA, 120 bp, Artificial Sequence
  ENSG00000116745_17 (sequence is synthesized)
actatcatctaagattaattacagtaattattttgcgtatacgtaactgctcaaagattatgaatcttatgaatgttaacctttccgtttattacaagcaagtactattatttctgattt

SEQ ID NO: 218265 - DNA, 120 bp, Artificial Sequence
  ENSG00000116745_18 (sequence is synthesized)
tataataagaaaatctgtgtttaatcaactgaggcctctcaaccaaataacatctcagagattaagttatatattaaaagcttatgtaacataaaagcaagtacatatagtagtgactat

SEQ ID NO: 218266 - DNA, 120 bp, Artificial Sequence
  ENSG00000116745_19 (sequence is synthesized)
atttaaaaaaacagcataaaatgcttaaaaatgtaatatttactaaaatcagattatgggataatgttgcaggattatactttattgcatcttttttgtttaattgtatttaagcattgt

SEQ ID NO: 218267 - DNA, 120 bp, Artificial Sequence
  ENSG00000116745_20 (sequence is synthesized)
gcaatcacttgggaaaaatattaaattattaacattgaggtattaatacattttaagccttttgtttttaaatttcttttcttccagagattgtttaaaaataaatattgacaaaaataa

SEQ ID NO: 218268 - DNA, 120 bp, Artificial Sequence
  ENSG00000116747_0 (sequence is synthesized)
attttgcctttttgttaggtttcctaaagacaaaaaaaaatggaggaatctgtaaaccaaatgcagccactgaatgagaagcagatagccaattctcaggatggatatgtatggcaagtc

SEQ ID NO: 218269 - DNA, 120 bp, Artificial Sequence
  ENSG00000116747_1 (sequence is synthesized)
actgacatgaatcgactacaccggttcttatgtttcggttctgaaggtgggacttattatatcaaagaacagaagttgggccttgaaaatgctgaagctttaattagattgattgaagat

SEQ ID NO: 218270 - DNA, 120 bp, Artificial Sequence
  ENSG00000116747_2 (sequence is synthesized)
ggcagaggatgtgaagtgatacaagaaataaagtcatttagtcaagaaggcagaaccacaaagcaagagcctatgctctttgcacttgccatttgttcccagtgctccgacataagcaca

SEQ ID NO: 218271 - DNA, 120 bp, Artificial Sequence
  ENSG00000116747_3 (sequence is synthesized)
aaacaagcagcatttaaagctgtttctgaagtttgtcgcattcctacccatctctttacttttatccagtttaagaaagatctgaaggaaagcatgaaatgtggcatgtggggtcgtgcc

SEQ ID NO: 218272 - DNA, 120 bp, Artificial Sequence
  ENSG00000116747_4 (sequence is synthesized)
ctccggaaggctatagcggactggtacaatgagaaaggtggcatggcccttgctctggcagttacaaaatataaacagagaaatggctggtctcacaaagatctattaagattgtcacat

SEQ ID NO: 218273 - DNA, 120 bp, Artificial Sequence
  ENSG00000116747_5 (sequence is synthesized)
cttaaaccttccagtgaaggacttgcaattgtgaccaaatatattacaaagggctggaaagaagttcatgaattgtataaagaaaaagcactctctgtggagactgaaaaattattaaag

SEQ ID NO: 218274 - DNA, 120 bp, Artificial Sequence
  ENSG00000116747_6 (sequence is synthesized)
tatctggaggctgtagagaaagtgaagcgcacaagagatgagctagaagtcattcatctaatagaagaacatagattagttagagaacatcttttaacaaatcacttaaagtctaaagag

SEQ ID NO: 218275 - DNA, 120 bp, Artificial Sequence
  ENSG00000116747_7 (sequence is synthesized)
tgtgaaaaactgtgtaatgaaaaactattaaaaaaggctcgtatacatccatttcatattttgatcgcattagaaacttacaagacaggtcatggtctcagagggaaactgaagtggcgc

SEQ ID NO: 218276 - DNA, 120 bp, Artificial Sequence
  ENSG00000116747_8 (sequence is synthesized)
cctgatgaagaaattttgaaagcattggatgctgctttttataaaacatttaagacagttgaaccaactggaaaacgtttcttactagctgttgatgtcagtgcttctatgaaccaaaga

SEQ ID NO: 218277 - DNA, 120 bp, Artificial Sequence
  ENSG00000116747_9 (sequence is synthesized)
gttttgggtagtatactcaacgctagtacagttgctgcagcaatgtgcatggttgtcacacgaacagaaaaagattcttatgtagttgctttttccgatgaaatggtaccatgtccagtg

SEQ ID NO: 218278 - DNA, 120 bp, Artificial Sequence
  ENSG00000116747_10 (sequence is synthesized)
actacagatatgaccttacaacaggttttaatggctatgagtcagatcccagcaggtggaactgattgctctcttccaatgatctgggctcagaagacaaacacacctgctgatgtcttc

SEQ ID NO: 218279 - DNA, 120 bp, Artificial Sequence
  ENSG00000116747_11 (sequence is synthesized)
attgtattcactgataatgagacctttgctggaggtgtccatcctgctattgctctgagggagtatcgaaagaaaatggatattccagctaaattgattgtttgtggaatgacatcaaat

SEQ ID NO: 218280 - DNA, 120 bp, Artificial Sequence
  ENSG00000116747_12 (sequence is synthesized)
ggtttcaccattgcagacccagatgatagaggcatgttggatatgtgcggctttgatactggagctctggatgtaattcgaaatttcacattagatatgatttaaccataagcagcagca

SEQ ID NO: 218281 - DNA, 120 bp, Artificial Sequence
  ENSG00000116747_13 (sequence is synthesized)
cgatccagagatccattgccatcagtgatctcactaaaaatatacagctacttcccagctaatctccacccaatgaatgatgatggtatagtatgtgcataatggaaagttaccttactg

SEQ ID NO: 218282 - DNA, 120 bp, Artificial Sequence
  ENSG00000116747_14 (sequence is synthesized)
tcctgcttgtcggcatcgctccccacaggccgacgtcgagagggcctgctttactcctcctctttctcctccttctcccgcggcttctgcgcggagaggcgtcgcccgggatctgggttt

SEQ ID NO: 218283 - DNA, 120 bp, Artificial Sequence
  ENSG00000116747_15 (sequence is synthesized)
tctatctactaaactagctcttggggaaatagcttcaggatactgtagtttcctctatctaatagagaactttttgttaacagacactgtaaaatagttttgctttgttgaataatacgt

SEQ ID NO: 218284 - DNA, 120 bp, Artificial Sequence
  ENSG00000116747_16 (sequence is synthesized)
gtgtacctaaaagaggtaagagcaaaaagtgtaattccacatcatgttacttgagaagtgcttaacgttttcttaaatgttttcattgggaaaggacagctttgataatgtccaaatact

SEQ ID NO: 218285 - DNA, 120 bp, Artificial Sequence
  ENSG00000116747_17 (sequence is synthesized)
ctgaaatgcactagaccatataactgtgatgaaatatgaaactcatctgtaaacttttataccaagggggtaaaaaaaaaaactaaggcatttgattaaattatgaatgagttttacaaa

SEQ ID NO: 218286 - DNA, 120 bp, Artificial Sequence
  ENSG00000116747_18 (sequence is synthesized)
ttcctttcagagttttactaagatcacacaaataacagctttcttattcagtgaaaaagatattttatttctgatgttttatttgcacttgtggaatatgttaccattaatcagaaacat

SEQ ID NO: 218287 - DNA, 120 bp, Artificial Sequence
  ENSG00000116747_19 (sequence is synthesized)
catggcaacccctaagaatagactaagtttgtgttggctgagggattctatttggtttgcttttttttttttgctttgttatattttattgctacaaggggtgtgacttgataatgattt

SEQ ID NO: 218288 - DNA, 120 bp, Artificial Sequence
  ENSG00000116747_20 (sequence is synthesized)
cctctgaattataataacatagccagatgtagtctcacactgtttttcatactcttaagtgtaaataatataaaatgtttcaagcgcttaactccccctcattcacaaagtataacaatt

SEQ ID NO: 218289 - DNA, 120 bp, Artificial Sequence
  ENSG00000116747_21 (sequence is synthesized)
aaaatctcaactataaccagtttagctttttccttacttttaaaataaaattttttacttttaactatttttttagttaatatttttaaaagtatacatgtcaatggcctctttgtccat

SEQ ID NO: 218290 - DNA, 120 bp, Artificial Sequence
  ENSG00000116747_22 (sequence is synthesized)
tattcattttgtggcaaaatattcttctttgatagtgtaaacaaataataaagcaatctaggtcctttaggtttgaaaggcaatttttgagtagcatattaccagctagccagtcactag

SEQ ID NO: 218291 - DNA, 120 bp, Artificial Sequence
  ENSG00000116747_23 (sequence is synthesized)
gaatttttttcagtattatttgtatgtattaaacttttcattacactaaagtgcattattttattgagcaagtatccttcattgtgaggtttaacattaaagcaatctgttgaaatgcca

SEQ ID NO: 218292 - DNA, 120 bp, Artificial Sequence
  ENSG00000116747_24 (sequence is synthesized)
gactgagcgcgggaggacgctctagccaccctagagacatcgaaactcttcccaggccttgcagcacccgtagcggattcggaagggctggggcctgagaagaaagggcggtgattcaca

SEQ ID NO: 218293 - DNA, 120 bp, Artificial Sequence
  ENSG00000116747_25 (sequence is synthesized)
gcgccgaggaggcaacatccgggatcctcgcccctctggggcggaggcggggcaaaagaagaggggcaggactcgttcccgggaaccgaacctggaatccccggcggcagtggggctgtt

SEQ ID NO: 218294 - DNA, 120 bp, Artificial Sequence
  ENSG00000116747_26 (sequence is synthesized)
gctgttgctgtggctgtcgctgcccgtcaggctgccttcttttgtcgtttcccagcgctgcgcaggacttctcctggcggcgctgcggatccagggggtcggctgccaggtacaggtttc

SEQ ID NO: 218295 - DNA, 120 bp, Artificial Sequence
  ENSG00000116747_27 (sequence is synthesized)
aaataccctactaaataaatcattttagacatggagtgcaggtggacactgtgtgaactgtttttggtcagttattgtagaaattgatagatgtaccaaataaactctatgcacattaaa

SEQ ID NO: 218296 - DNA, 120 bp, Artificial Sequence
  ENSG00000116747_28 (sequence is synthesized)
taagccaagacttgcaattgtgaccaaatatattacaaagggctggaaagaagttcatgaattgtataaagaaaaagcactctctgtggagactgaaaaattattaaagtatctggaggc

SEQ ID NO: 218297 - DNA, 120 bp, Artificial Sequence
  ENSG00000116747_29 (sequence is synthesized)
gttgaggctgggcaaacgccgcgaaactatcgctcttccccgtcccgcttccgcgcctgtccaccctgggtaacggaaccagcatcgcggtagggacatcctcgctaggcccggccggac

SEQ ID NO: 218298 - DNA, 120 bp, Artificial Sequence
  ENSG00000116747_30 (sequence is synthesized)
atctttgtgggaagacagggtgaatttatcacagaggaataacgagggagaggagaaaggtttgtccatggggctgctagactagtggaaggggatgcggtgcgtcaagggaaaattagg

SEQ ID NO: 218299 - DNA, 120 bp, Artificial Sequence
  ENSG00000116747_31 (sequence is synthesized)
gccgtctaaggtagcttacacataaaacctgtttgcgtatctgttgttctctaaatattaattgaagatttactgaggatttgtaaggtccttctcgctgttatgtgaaaagtcaaactg

SEQ ID NO: 218300 - DNA, 120 bp, Artificial Sequence
  ENSG00000116747_32 (sequence is synthesized)
tagttaatgtaaattatagccttttaggtgcttgggggttagagggtttatgttttttgggaaagggggactttagtagtctgaggatttctgtacatattttcttctgttttatgtgaa

SEQ ID NO: 218301 - DNA, 120 bp, Artificial Sequence
  ENSG00000116747_33 (sequence is synthesized)
atttgggctctgggaataagaaaatattcctttcaaatttatttgacatattaatgctggttttgatatgtacccattccttcaaggcaactggtatcagtttttaagtgtgatttacct

SEQ ID NO: 218302 - DNA, 120 bp, Artificial Sequence
  ENSG00000116747_34 (sequence is synthesized)
gagatatttttgttcagcaaagctcatagcaccctcacccccactccagacatgcattgcttctgatgttgttcacgtttttaaccctgtcaagcattgaactgaatatattagctactt

SEQ ID NO: 218303 - DNA, 120 bp, Artificial Sequence
  ENSG00000116747_35 (sequence is synthesized)
ttgacacattaaaatattacgttcagattgaatttaaagtttaaagaaactaatagaattacgtaatagttattgaattgtttaagtaaacccaagatcttaaaaattataacatgatca

SEQ ID NO: 218304 - DNA, 120 bp, Artificial Sequence
  ENSG00000116747_36 (sequence is synthesized)
attcctaatagaaatgttaaatagaatatagtacaaaagtgcattaccttcagttgtgtactatttccataatacttttagacaaatatatctataagttaatattaaatccatcaagga

SEQ ID NO: 218305 - DNA, 120 bp, Artificial Sequence
  ENSG00000116747_37 (sequence is synthesized)
aggatacaagattggatggatatgacctttctgaagtatttaggtaggtctaattaaatggactagggtaacatttaagaaagaaaggataagtaggagaagctaccacagaaggtaact

SEQ ID NO: 218306 - DNA, 120 bp, Artificial Sequence
  ENSG00000116747_38 (sequence is synthesized)
tttcaaatcatggcatatttgagctggaagaaaccttagaaacctaaaagctaattttttaaatttttgttagagagctgaggtccaagacagagtgtgattttgaagtactataaccta

SEQ ID NO: 218307 - DNA, 120 bp, Artificial Sequence
  ENSG00000116747_39 (sequence is synthesized)
gaaatcttggtctcttcattcctgtgccagaatttatttccccacaacatgggaatacatggtctcagaagagtagaggataaaataaaattatttaagacttttaccttattgagttat

SEQ ID NO: 218308 - DNA, 120 bp, Artificial Sequence
  ENSG00000116747_40 (sequence is synthesized)
taggaaataatgtatatacgattgctttaggagtagaaaaatagaatgggaacatgtataatcttgtaattcataggaatcctcaagcacaattaacctgtgttgctatatatatctaca

SEQ ID NO: 218309 - DNA, 120 bp, Artificial Sequence
  ENSG00000116747_41 (sequence is synthesized)
tgaagtgataagttttttatttcctgagttacttttaggattactgttaaattaatatttgggaaaatactgcttttaaaaacaatcctgcaagaataaacaaactttatttcctaggta

SEQ ID NO: 218310 - DNA, 120 bp, Artificial Sequence
  ENSG00000116747_42 (sequence is synthesized)
gtatgtaaatagttccaggatatagttgtaattagtaaaacaaaaactaatcttataatcccaccctttattagttgaaagttcttggaaattccatttattaatacttatattatttag

SEQ ID NO: 218311 - DNA, 120 bp, Artificial Sequence
  ENSG00000116747_43 (sequence is synthesized)
taatctatcttatgagagtgttagtgaggcaagatgctagtgaatggaatttagtgttaccctttgacacctcctttgctttatctaacttactgtgtgactgtagacaaccagtttaac

SEQ ID NO: 218312 - DNA, 120 bp, Artificial Sequence
  ENSG00000116747_44 (sequence is synthesized)
ctaagtgatttgattatttttatccttaaaaagtaacatatctgtgcttggatcatagaagaatcagtgatttaatatttgtataaaaattgaaactgggaagagggcttgcaatacaag

SEQ ID NO: 218313 - DNA, 120 bp, Artificial Sequence
  ENSG00000116747_45 (sequence is synthesized)
ttagaattctttttttttttggttaaaaacattcttgttaataagatacgtatttcaaaagataaaatgttttagaaaaatagctcactcaataggcctaacagtgttttaaaacattcc

SEQ ID NO: 218314 - DNA, 120 bp, Artificial Sequence
  ENSG00000116747_46 (sequence is synthesized)
tgttcagagtagaaaaatttagaagaaaaattttcacagctaaagtattacccaaaaagtcactattctctactgaagagggagaaaaaatatactccaagatcttcttggacagaccta

SEQ ID NO: 218315 - DNA, 120 bp, Artificial Sequence
  ENSG00000116747_47 (sequence is synthesized)
tggacagacctagaaaaacaagcttatactctgaggaaatgctgttaacaaacttttttttttgagacaggctatccctctgtcacccaggctggagtggcatgatcacagctcactgca

SEQ ID NO: 218316 - DNA, 82 bp, Artificial Sequence
  ENSG00000116747_48 (sequence is synthesized)
agttcaagtgatcttcccaagtagccaggaacactggtgtgcactgcactaccacgcctgcttttttttttttttttttttt

SEQ ID NO: 218317 - DNA, 120 bp, Artificial Sequence
  ENSG00000116747_49 (sequence is synthesized)
caggctggtgtcaaactcctgggctcaagggatcttcctgccttggcctcccgaagtgctggaattagaggcatgagccactgcacccagccagcaaacattctcttaatcttttaaagt

SEQ ID NO: 218318 - DNA, 120 bp, Artificial Sequence
  ENSG00000116747_50 (sequence is synthesized)
aaccagtaaatctacaaatagtaaagtactattttcatcagggattttttttttcttattttctagattttacagaaacaatgtgaaattattttggaaagataaggtaggattcttgaa

SEQ ID NO: 218319 - DNA, 120 bp, Artificial Sequence
  ENSG00000116747_51 (sequence is synthesized)
taaatctgaaggtctcacaattaagtgagaaacacctttaaaagcatagtaaagctacacctaaataactaaagcctaaatcattgtaatgttttgttggacttactttaacttgacctg

SEQ ID NO: 218320 - DNA, 120 bp, Artificial Sequence
  ENSG00000116747_52 (sequence is synthesized)
ttgtagccacaaataacaaatttcttggtaactgatgctattacagtaggtaatcaaaaatgaaaaattctagtcttatatactgcaggtttggggtgattgttaaggcactatcccctc

SEQ ID NO: 218321 - DNA, 120 bp, Artificial Sequence
  ENSG00000116747_53 (sequence is synthesized)
tggagaaatgtcatatggcatcagtgtaaacatgcacaagaaagaatttgtaaaaaaaaatgacaggttaatcaatgaaattagttgtatttactgtttggattttatttagtgtttcct

SEQ ID NO: 218322 - DNA, 120 bp, Artificial Sequence
  ENSG00000116747_54 (sequence is synthesized)
tgatgtctgtttcctcatctcttatttgttggaagattacttttctacctcttttttttcttttaaaattcctttcttacatttctgttgtttctttttctagtccttctctatctggat

SEQ ID NO: 218323 - DNA, 120 bp, Artificial Sequence
  ENSG00000116747_55 (sequence is synthesized)
aataaaatgaatgacaggaaagtcacccacatagaggtttgggatgaaccttttgcagattgctttttgtttcatacaagtataagatcatattttctttttcaacttagtaataggcag

SEQ ID NO: 218324 - DNA, 120 bp, Artificial Sequence
  ENSG00000116747_56 (sequence is synthesized)
gcttcttggaacaataagtagattgatacactcctccccaaatcaaattatattgtatatcttttatattagatgtttgcagaaattctgtggcctttaagatcagttattcagcctttg

SEQ ID NO: 218325 - DNA, 120 bp, Artificial Sequence
  ENSG00000116747_57 (sequence is synthesized)
taattatgttatctagctatgttgaaaagataagtgcttactatataagcactcttagaaaaataattaactgattactctttcagaaaatagcaggtgtctcaatgctttttttccata

SEQ ID NO: 218326 - DNA, 120 bp, Artificial Sequence
  ENSG00000116747_58 (sequence is synthesized)
attataaagaccattgtcaaaatctttggtttactaaatatttcactgagcatatatagagatacgttgcttgtggcataaaaagtcttgtagataacttactcacatttggcttttttt

SEQ ID NO: 218327 - DNA, 120 bp, Artificial Sequence
  ENSG00000116747_59 (sequence is synthesized)
ttggcttttttttaattggtgcattttttaatttgcttttttgaaaattatgaagttaaaatttaattctaaggtagtatttttcatgtataaaactaataatgtagttaagcatactgt

SEQ ID NO: 218328 - DNA, 120 bp, Artificial Sequence
  ENSG00000116747_60 (sequence is synthesized)
ataataaatggcacaattccttaaaccctgaaaataccaagttatattggaaaatagtggaaagaaaaaactagtggagaacatcttagaaaattctattgtggaaattacgatgattat

SEQ ID NO: 218329 - DNA, 120 bp, Artificial Sequence
  ENSG00000116747_61 (sequence is synthesized)
tttcagtgagaatgaatttatatatacaacaaaaatatacaaaagctaaccttctcatcctaaaaagatttttccctttgcttctgttttatttagccctgccatgcaccacattaattt

SEQ ID NO: 218330 - DNA, 66 bp, Artificial Sequence
  ENSG00000116747_62 (sequence is synthesized)
cttctgttttatttagccctgccatgcaccacattaattttatgaacataaatgaaggctggagtg

SEQ ID NO: 218331 - DNA, 61 bp, Artificial Sequence
  ENSG00000116747_63 (sequence is synthesized)
ttcaccatgttggtcaggctggcctcgatctcgtgacctcgtgatctgttttcatcttaag

SEQ ID NO: 218332 - DNA, 120 bp, Artificial Sequence
  ENSG00000116747_64 (sequence is synthesized)
ttagatatcagaatatatgcttgaacaaaggaaatagtaaattagctatatgtctgctggtttcacttcgatgtggatatggatatgtggataaagacagtaaatgaaattaaaaccctg

SEQ ID NO: 218333 - DNA, 120 bp, Artificial Sequence
  ENSG00000116747_65 (sequence is synthesized)
ctgttttaaatatcattaccagatataattgagggaatattatatcaacaaacatattgaaacttggctttatttgtaacgtaaactatatataatccatacgtagccaaattagattta

SEQ ID NO: 218334 - DNA, 120 bp, Artificial Sequence
  ENSG00000116747_66 (sequence is synthesized)
aaatatacaattaatgaatagtactcaaagtgtttttgttgcactgttactctgaatatggactctctatatctggtatggcgtgactgggcataacttctgtaatgtatttcagttata

SEQ ID NO: 218335 - DNA, 120 bp, Artificial Sequence
  ENSG00000116747_67 (sequence is synthesized)
tgtttttccttttattgccagcttctgataatgaaattttccaaagggatgagatataagaatcatcttttataaaaaccagtggggagtggggtattataatctagttctaaactgtcc

SEQ ID NO: 218336 - DNA, 120 bp, Artificial Sequence
  ENSG00000116747_68 (sequence is synthesized)
atttgctttatataaaggctttgatttcaataactgaccatttgatgaatatttaaattacacagaataatgtctacatagaataaacttaagtattcaagagccttaaagtgaaaaaat

SEQ ID NO: 218337 - DNA, 120 bp, Artificial Sequence
  ENSG00000116747_69 (sequence is synthesized)
gaaccttttgactgccttaaaatactacttgctctgtaattcaggcatactagttactttccttggggtctgtttaaataatgccttaatagtgttctaatgtttctgaaatacagaact

SEQ ID NO: 218338 - DNA, 120 bp, Artificial Sequence
  ENSG00000116747_70 (sequence is synthesized)
caaagggtcttttagagcttttaattttacatagtgaatggaaatttaagtattacattttaaaacctgattgtacattggtaatttaaacatccaataacaggaaaatctagatacagt

SEQ ID NO: 218339 - DNA, 120 bp, Artificial Sequence
  ENSG00000116747_71 (sequence is synthesized)
gatgtgttatacatacatgactgttaacatcagtaatattttatgatagtttaaggttttttattgttttctataacaagttatccaacaggttggactttgtaacatgatatccaagga

SEQ ID NO: 218340 - DNA, 120 bp, Artificial Sequence
  ENSG00000116747_72 (sequence is synthesized)
ccaagttgcatatttaacatcgaatgaaaatgtagttgtacagttccaaaaataattaattttttaagggaatttttcaagacaaaaggcaaatattttgtttcaaacctacaagcaaat

SEQ ID NO: 218341 - DNA, 120 bp, Artificial Sequence
  ENSG00000116748_0 (sequence is synthesized)
aaagcaaaataataaaatgaatgtcaggatattttatagtgtcagtcagtcaccccacagtctcctctctcttcttttctactgtgctatcctagaatcaaggatttcagcaacaatgcc

SEQ ID NO: 218342 - DNA, 120 bp, Artificial Sequence
  ENSG00000116748_1 (sequence is synthesized)
tctgttcaaactcccagctgaagagaaacaaattgatgatgcaatgcgcaactttgctgaaaaagtgtttgcctctgaagtcaaagatgaaggaggtcgtcaggagatttccccctttga

SEQ ID NO: 218343 - DNA, 120 bp, Artificial Sequence
  ENSG00000116748_2 (sequence is synthesized)
tgtggatgagatctgtccgatttctcatcatgagatgcaagcacacatattccatctggagactctgtccacctccacagaagccaggagaaaaaagcgtttccaaggacggaagactgt

SEQ ID NO: 218344 - DNA, 120 bp, Artificial Sequence
  ENSG00000116748_3 (sequence is synthesized)
taatttgtccattccactaagtgaaacatcttccaccaaactgtcccacattgatgaatacatttcctcatctccaacctaccagaccgtgcctgattttcagagagtgcagattactgg

SEQ ID NO: 218345 - DNA, 120 bp, Artificial Sequence
  ENSG00000116748_4 (sequence is synthesized)
tgactatgcctctggggttacagttgaagattttgaaattgtttgcaaaggtctgtatcgggcactatgcatacgtgagaaatacatgcagaagtcgtttcagaggttccctaaaacccc

SEQ ID NO: 218346 - DNA, 120 bp, Artificial Sequence
  ENSG00000116748_5 (sequence is synthesized)
ttccaaatacttgcggaacattgatggtgaggcttgggtagcaaatgagagcttctatccagtctttactcctcctgtgaagaagggagaggaccccttccgaacagacaaccttcctga

SEQ ID NO: 218347 - DNA, 120 bp, Artificial Sequence
  ENSG00000116748_6 (sequence is synthesized)
aaacctgggctatcacctcaaaatgaaggacggtgtagtttacgtctatcctaatgaagcagcagtcagcaaagatgagcctaagccacttccttacccaaatctggacaccttcttaga

SEQ ID NO: 218348 - DNA, 120 bp, Artificial Sequence
  ENSG00000116748_7 (sequence is synthesized)
cgatatgaattttttacttgctttaattgctcaaggacctgttaagacctatacccaccggcgcctgaagttcctctcctccaagttccaggtccatcagatgcttaacgagatggacga

SEQ ID NO: 218349 - DNA, 120 bp, Artificial Sequence
  ENSG00000116748_8 (sequence is synthesized)
gttaaaggagctgaaaaacaacccccaccgagatttttataactgcaggaaggtggacacccatatccatgcagccgcttgcatgaaccagaaacatctgctgcgttttattaagaaatc

SEQ ID NO: 218350 - DNA, 120 bp, Artificial Sequence
  ENSG00000116748_9 (sequence is synthesized)
acctgactgttgattctctggatgttcatgctggacgccagaccttccagcgttttgataagttcaatgacaaatataatcctgtaggagcaagtgagctacgggacctctacttgaaga

SEQ ID NO: 218351 - DNA, 120 bp, Artificial Sequence
  ENSG00000116748_10 (sequence is synthesized)
cagacaattacattaatggggaatattttgccactatcatcaaggaggtaggtgcggacctggtggaggccaagtaccagcatgctgagccccgcctgtccatctatggccgcagtcctg

SEQ ID NO: 218352 - DNA, 120 bp, Artificial Sequence
  ENSG00000116748_11 (sequence is synthesized)
atgagtggagcaaactctcctcctggttcgtctgcaatcgcatccactgccccaacatgacatggatgatccaggttcccaggatctatgatgtgttccgttccaagaatttccttccac

SEQ ID NO: 218353 - DNA, 120 bp, Artificial Sequence
  ENSG00000116748_12 (sequence is synthesized)
attttggaaaaatgctggagaatattttcatgccagtgtttgaggccaccatcaacccccaggctgacccagaactcagtgtcttcctcaagcatatcactggctttgacagtgtggatg

SEQ ID NO: 218354 - DNA, 120 bp, Artificial Sequence
  ENSG00000116748_13 (sequence is synthesized)
atgagtccaaacacagtggccacatgttctcctccaagagtcccaagccccaggagtggacattggaaaagaatccatcttacacttactatgcctactacatgtatgcaaacatcatgg

SEQ ID NO: 218355 - DNA, 120 bp, Artificial Sequence
  ENSG00000116748_14 (sequence is synthesized)
tgctcaacagcctgagaaaggaacgaggcatgaatacgtttctgttccgacctcactgtggagaagctggagccctcacccatctcatgacagcattcatgatagcagatgatatctctc

SEQ ID NO: 218356 - DNA, 120 bp, Artificial Sequence
  ENSG00000116748_15 (sequence is synthesized)
atggcctaaatttaaaaaagagtcccgtgctacagtacttgtttttcttagcccaaattcccatcgccatgtcaccactaagtaacaatagcctatttctagagtatgccaaaaatcctt

SEQ ID NO: 218357 - DNA, 120 bp, Artificial Sequence
  ENSG00000116748_16 (sequence is synthesized)
ttttggatttccttcagaaagggctaatgatctcactgtctacagatgacccaatgcaattccactttaccaaggagcccctaatggaagaatatgctattgctgcacaagtcttcaagc

SEQ ID NO: 218358 - DNA, 120 bp, Artificial Sequence
  ENSG00000116748_17 (sequence is synthesized)
tgagcacctgtgatatgtgcgaagtggcaaggaacagtgtcttgcagtgtggaatttctcatgaggagaaagtaaagtttctgggcgacaattaccttgaggaaggccctgctggaaatg

SEQ ID NO: 218359 - DNA, 120 bp, Artificial Sequence
  ENSG00000116748_18 (sequence is synthesized)
atatccggaggacaaatgtagcccaaatccgcatggcctatcgctatgaaacctggtgttatgaactcaatttaattgctgagggtcttaaatcaacagaataaaaaaaagtaaaccaaa

SEQ ID NO: 218360 - DNA, 120 bp, Artificial Sequence
  ENSG00000116748_19 (sequence is synthesized)
ttgtaaaaaagatggggacatagggtccaccaaaaaatttttatttcctatgtgctgcccaaactgaatccctctctataggggaccaaaaagaatgtatgaggagcatggacctaggat

SEQ ID NO: 218361 - DNA, 120 bp, Artificial Sequence
  ENSG00000116748_20 (sequence is synthesized)
agatataccacgtcttttcctgtgcatgacattcgattctctggttccctcatactggggctatcagtcctaaaaatctttttttctcctaaattctcttcattcttgcctctagtgatg

SEQ ID NO: 218362 - DNA, 120 bp, Artificial Sequence
  ENSG00000116748_21 (sequence is synthesized)
atgtaagcatgacccttcaggccttcatactgctgctcatgaaccagccttcctacctggtcatgactaattcttggtgcttatctctttatgtttggtctgtgcctttggacctgaaag

SEQ ID NO: 218363 - DNA, 120 bp, Artificial Sequence
  ENSG00000116750_0 (sequence is synthesized)
cgctacgggtgctgcaaggcctgggaagagtttcgatgtctctagggtggctagagcgtcctcccgcgctcagtcgcgctgcaggtgacggcgcccggaggctgtcgggaagtaggcggg

SEQ ID NO: 218364 - DNA, 120 bp, Artificial Sequence
  ENSG00000116750_1 (sequence is synthesized)
gtgacgtgtggttgacgagctcggcggcgggtttgctgagatctgtggccggcggcagctggtgcggggggcagctgagagcgagaggtggatcggggcggtgtgtggccagggccatga

SEQ ID NO: 218365 - DNA, 120 bp, Artificial Sequence
  ENSG00000116750_2 (sequence is synthesized)
cgggcaatgccggggagtggtgcctcatggaaagcgaccccggggtcttcaccgagctcattaaaggattcggttgccgaggagcccaagtagaagaaatatggagtttagagcctgaga

SEQ ID NO: 218366 - DNA, 120 bp, Artificial Sequence
  ENSG00000116750_3 (sequence is synthesized)
attttgaaaaattaaagccagttcatgggttaatttttcttttcaagtggcagccaggagaagaaccagcaggctctgtggttcaggactcccgacttgacacgatattttttgctaagc

SEQ ID NO: 218367 - DNA, 120 bp, Artificial Sequence
  ENSG00000116750_4 (sequence is synthesized)
aggtaattaataatgcttgtgctactcaagccatagtgagtgtgttactgaactgtacccaccaggatgtccatttaggcgagacattatcagagtttaaagaattttcacaaagttttg

SEQ ID NO: 218368 - DNA, 120 bp, Artificial Sequence
  ENSG00000116750_5 (sequence is synthesized)
atgcagctatgaaaggcttggcactgagcaattcagatgtgattcgacaagtacacaacagtttcgccagacagcaaatgtttgaatttgatacgaagacatcagcaaaagaagaagatg

SEQ ID NO: 218369 - DNA, 120 bp, Artificial Sequence
  ENSG00000116750_6 (sequence is synthesized)
cttttcactttgtcagttatgttcctgttaatgggagactgtatgaattagatggattaagagaaggaccgattgatttaggtgcatgcaatcaagatgattggatcagtgcagtaaggc

SEQ ID NO: 218370 - DNA, 120 bp, Artificial Sequence
  ENSG00000116750_7 (sequence is synthesized)
ctgtcatagaaaaaaggatacaaaagtacagtgaaggtgaaattcgatttaatttaatggccattgtgtctgacagaaaaatgatatatgagcagaagatagcagagttacaaagacaac

SEQ ID NO: 218371 - DNA, 120 bp, Artificial Sequence
  ENSG00000116750_8 (sequence is synthesized)
ttgcagaggaggaacccatggatacagatcaaggtaatagtatgttaagtgctattcagtcagaagttgccaaaaatcagatgcttattgaagaagaagtacagaaattaaaaagataca

SEQ ID NO: 218372 - DNA, 120 bp, Artificial Sequence
  ENSG00000116750_9 (sequence is synthesized)
agattgagaatatcagaaggaagcataattatctgcctttcattatggaattgttaaagactttagcagaacaccagcagttaataccactagtagaaaaggcaaaagaaaaacagaacg

SEQ ID NO: 218373 - DNA, 120 bp, Artificial Sequence
  ENSG00000116750_10 (sequence is synthesized)
caaagaaagctcaggaaaccaaatgaagatgttttcagatatgtacacatttctgcttctgcacatattttcatggaaaccattatgtataaagaacttagagcaacatcctaattggct

SEQ ID NO: 218374 - DNA, 120 bp, Artificial Sequence
  ENSG00000116750_11 (sequence is synthesized)
cagtgcacgtttggcaatagtgccagcctgtcttgtctttaatgcatggattcataaacttcttccctacctgcatcatgtgcatgtagtgcatattaaatgaaagtgatattaagaatg

SEQ ID NO: 218375 - DNA, 120 bp, Artificial Sequence
  ENSG00000116750_12 (sequence is synthesized)
ctttcccaaattccattatttgacattgagtctgacaactgttagttttctggttgtctaactaccatatgaagctagaaaatgcacaaacgatattccttatctgtaatttaaatactt

SEQ ID NO: 218376 - DNA, 120 bp, Artificial Sequence
  ENSG00000116750_13 (sequence is synthesized)
aaaatttgcaattgtcagatcttgattaaactggttgtcttatttcttctcatcattaacggaaaaaaaatcagtatttctatctttgatatctaagtgttttgaggattttaaaactga

SEQ ID NO: 218377 - DNA, 120 bp, Artificial Sequence
  ENSG00000116750_14 (sequence is synthesized)
attttatctgctataccagttatttgagaaagtatgattttaatgtaaatcatttaaaaaggacaaaagtataatttccagtgattttcactgctgtcagtagaaaagtaataaacatct

SEQ ID NO: 218378 - DNA, 120 bp, Artificial Sequence
  ENSG00000116750_15 (sequence is synthesized)
caattttattttagtaaattttcttcaagtgtttggggttatttgtttatgtattagagaattgtttcaggaaggtctgagtattatgcttcaaagcaaaatttcaggttaagaagaaat

SEQ ID NO: 218379 - DNA, 120 bp, Artificial Sequence
  ENSG00000116750_16 (sequence is synthesized)
tgtaaatcttaaagaatgttggtgttactctcaatggaatattgtttcaagcttgtaagctgtgtataaaaaaactggaggtctgacagttcatgttatctgcttttttaaaaagatggt

SEQ ID NO: 218380 - DNA, 120 bp, Artificial Sequence
  ENSG00000116750_17 (sequence is synthesized)
agtggtgatgggggtctttctatgccaatttgaataaatttcgtacagcctgcagttttcaagagccatatgtaatttgctcacaattgatttttaaaaattgatttgggagttgctttg

SEQ ID NO: 218381 - DNA, 120 bp, Artificial Sequence
  ENSG00000116750_18 (sequence is synthesized)
taataatcttctgcttctaatcttcctttgcaagtcagactttaaagaagactttataaagctttcttttttaaaggaagtaacctacttttttctttatcaagaatatttctgaggttg

SEQ ID NO: 218382 - DNA, 120 bp, Artificial Sequence
  ENSG00000116750_19 (sequence is synthesized)
atacatgactttaacattttattatttattgtaaaatcaatttagcataatttattttattagggagaatgtgtacccatcttccagcttcagcacatttttaaggattgtttttaagct

SEQ ID NO: 218383 - DNA, 120 bp, Artificial Sequence
  ENSG00000116750_20 (sequence is synthesized)
tagtaattgtggtattaaatgacttagaactaatggagaaaaacctgataggaaattgatagaaaaacgaatgaaatatttttcatacataatttcagttggaggtaatggaaaatatgt

SEQ ID NO: 218384 - DNA, 120 bp, Artificial Sequence
  ENSG00000116750_21 (sequence is synthesized)
agtctctcagttatttgtgggtaaatatgttttgctgttgatacagtaataattatggagtgttttcaaagccatgatataatttttaaaaatagatttttaaggaaggctcatcttgat

SEQ ID NO: 218385 - DNA, 120 bp, Artificial Sequence
  ENSG00000116750_22 (sequence is synthesized)
cttaaattttgttaagcaatgtgaggattattgtggtaagttgtatttagtaatcaatacagtgtgatactggcactaggattgacaaataaagcaatggaacagaagagagagcctgaa

SEQ ID NO: 218386 - DNA, 120 bp, Artificial Sequence
  ENSG00000116750_23 (sequence is synthesized)
aacagatcaacgtttatatgatcacttgatttcgacaaaggtggcaaaacaattcaacagagaaggaaagtcttttcaacaaatggagccagaatagaatagctgaatatccatatagaa

SEQ ID NO: 218387 - DNA, 120 bp, Artificial Sequence
  ENSG00000116750_24 (sequence is synthesized)
aaaagtgaacaatgaccccctacctcacaaaaatgactttgagatgaatcatagacctaaatgtaatattttaaaagtatgaagctttttaactgaaaacagatgatatttttgtgactt

SEQ ID NO: 218388 - DNA, 120 bp, Artificial Sequence
  ENSG00000116750_25 (sequence is synthesized)
ggggggttagccaaaggtttcttaggtcacagaaagcagtaaccataaaagatccaaaattagagctcatcagaattgtcattgaaagtgttaacaaaagtaatatcaaatgacatttga

SEQ ID NO: 218389 - DNA, 120 bp, Artificial Sequence
  ENSG00000116750_26 (sequence is synthesized)
aaaatatccttgtaaaatgactatattaataggtataaggatttttcttattaatctaataaaattccttaataggaatttccatagcttaagagtggtttattttatctgcatcttctt

SEQ ID NO: 218390 - DNA, 120 bp, Artificial Sequence
  ENSG00000116750_27 (sequence is synthesized)
tggtgattgcaaatcccttgtgatacttcatgattacttctgtctgtgaataaagaagtgtgacttgtctgggtgctatatgttgctggtttgaaattaagtcatgaagctagagggtag

SEQ ID NO: 218391 - DNA, 120 bp, Artificial Sequence
  ENSG00000116750_28 (sequence is synthesized)
agaaaatggaagaataaagagcaacccataaatagataaatgctatttggaaagttttttttaaatgatattttatagaaaatcttgctcatttcatatttagtcttttctaaaatttta

SEQ ID NO: 218392 - DNA, 120 bp, Artificial Sequence
  ENSG00000116750_29 (sequence is synthesized)
tttaattattgggtaggtgaagtcgcttccattctattttaagccttcaaaatagccaattctaagggatgtacttctgttattatcaacaaaaaccttgccaacagctgcggcactggc

SEQ ID NO: 218393 - DNA, 120 bp, Artificial Sequence
  ENSG00000116750_30 (sequence is synthesized)
tactctcaccttatatgtttagttcccaagatagcttgcccttttccgaacagcagtcagctcgactgtgccactaaaacagacaaatatttgctcgggaatcacaaccacggggacttg

SEQ ID NO: 218394 - DNA, 120 bp, Artificial Sequence
  ENSG00000116750_31 (sequence is synthesized)
ctcccccagttaggaccatggtacatatttgtgtgtatattatggtgttacatgcagattaatactttcaattaatcctcctagttgcctgtaacgttaacatttcaagatgcatttaga

SEQ ID NO: 218395 - DNA, 120 bp, Artificial Sequence
  ENSG00000116750_32 (sequence is synthesized)
tatttttatcctgtaggaggattttgtttatttgagggaaaaaaagggcttttaatgtattctcctcaaaaaccatttagagaaaacagataagtaaaaataaaatttaaattaccatat

SEQ ID NO: 218396 - DNA, 120 bp, Artificial Sequence
  ENSG00000116750_33 (sequence is synthesized)
ttctatttacagggatgagcacattaacattttatgtatttagtgatcctttttcctcatgtgtacacatatgtttttgtgtgttagtcttgcttgccctccccatagtctgaaatagtt

SEQ ID NO: 218397 - DNA, 120 bp, Artificial Sequence
  ENSG00000116750_34 (sequence is synthesized)
ctatgaagtttatattatttttaaacttgatcatatacaaattttcaggaaacaaaccactctagctatttgaagaggaatgcagatttatattgggagttttgaaactacatagtttct

SEQ ID NO: 218398 - DNA, 120 bp, Artificial Sequence
  ENSG00000116750_35 (sequence is synthesized)
tacaaaatcattggaaggtttggaggagcggtttcaagcttaagtctccagagattactcccatccaaacatacagtattggtgtacctagggaactgctcacttttgcaacagtcaggg

SEQ ID NO: 218399 - DNA, 120 bp, Artificial Sequence
  ENSG00000116750_36 (sequence is synthesized)
agttcactgttggaactattaatgttagaacatgttgcagtagttgtgttcaaggaatgaggaacctgctgtaacacttaatgactgtgcactggaatgcagaaaagttaaaccttctat

SEQ ID NO: 218400 - DNA, 120 bp, Artificial Sequence
  ENSG00000116750_37 (sequence is synthesized)
gcctaaatgcctaaaacagacaaactggatagttatatttttagaatgatactgcgttttttagagtagtatgaattcctagatcagtcaaacatgcatgttatttagtttgttctttag

SEQ ID NO: 218401 - DNA, 120 bp, Artificial Sequence
  ENSG00000116750_38 (sequence is synthesized)
tatattgttaactggcctaaatccaatgactgacatggtaaagattcaccacttctagcatactgggcactttttatttttgacttgattacattaactttttgaaaactattcagtgat

SEQ ID NO: 218402 - DNA, 120 bp, Artificial Sequence
  ENSG00000116750_39 (sequence is synthesized)
ttattcagccaatcttatgaggtacatctgagttgttctagatgctagaggatagtataacaggaaaaagcccctgctctcatggtgagacagataataagtatgtaatacaacttttca

SEQ ID NO: 218403 - DNA, 120 bp, Artificial Sequence
  ENSG00000116750_40 (sequence is synthesized)
aatagtagtatgaatggtaaaaaaaatagggaaaaggggtgggaggagctgaggtttgatagaatggtcatggaagatcccattaatgagatgtactttaagtagagacctaaatgaaga

SEQ ID NO: 218404 - DNA, 120 bp, Artificial Sequence
  ENSG00000116750_41 (sequence is synthesized)
taattttttctctagtactgaactagcactgtacaagtggattgcatataggcatataggcagaacttctctagtactgaactaacactgtacaagtggattgcatataggcatataggc

SEQ ID NO: 218405 - DNA, 120 bp, Artificial Sequence
  ENSG00000116750_42 (sequence is synthesized)
agaaccaatgtgcaataattaagaatattaatttgcaatcatgtttgatggttaaatggtttattaatgttggagtgtcaatatgaaaatgggttgaataaaagatatatggaaatgcct

SEQ ID NO: 218406 - DNA, 120 bp, Artificial Sequence
  ENSG00000116750_43 (sequence is synthesized)
aggactactgctctatttactttttagcttatccatatattttatgtaatatgcttctttgattctttcttgtagcaatgataatataatattgaataaaccataaaaccagtggggaaa

SEQ ID NO: 218407 - DNA, 120 bp, Artificial Sequence
  ENSG00000116750_44 (sequence is synthesized)
aataaaattttggaccattaacttaaagacgagaatacatgggaaaataggataaaagaacaaggtgtgagaaggaatagaaggaaacaaacaggaaagatatggctgcaccatgcagtg

SEQ ID NO: 218408 - DNA, 120 bp, Artificial Sequence
  ENSG00000116750_45 (sequence is synthesized)
ctactatatgctgagattctacaggatgagatttttgaatagctgaggcagttgcctataatctgtgatgacataaaagtatttgacctaaaatctttttatttgcaaaataataaataa

SEQ ID NO: 218409 - DNA, 120 bp, Artificial Sequence
  ENSG00000116750_46 (sequence is synthesized)
tcaaactcttacactcttaaaaattattgacatctccaattacagtcttaaaaattattgacatctcaaaagagcttttgtttctgggattatctatcaatgtttgccatattagacatt

SEQ ID NO: 218410 - DNA, 120 bp, Artificial Sequence
  ENSG00000116750_47 (sequence is synthesized)
cacaccacatttaaaaactgcctaggaggtaatccaaaaatatatagttataaaacttcttgtattatgtaccaaatctctttcttaaaatataaaataaaattatctagtttaagatta

SEQ ID NO: 218411 - DNA, 120 bp, Artificial Sequence
  ENSG00000116750_48 (sequence is synthesized)
tctcaggccccagcccttccgaatccgctacgggtgctgcaaggcctgggaagagtttcgatgtctctagggtggctagagcgtcctcccgcgctcagtcgcgctgcaggttgccgagga

SEQ ID NO: 218412 - DNA, 120 bp, Artificial Sequence
  ENSG00000116750_49 (sequence is synthesized)
aggccctctcgacgtcggcctgtggggagcgatgccgacaagcaggagcggtcccggcttcggaaagggcccaccctgaggaatggtccggccgggcctagcgaggatgtccctaccgcg

SEQ ID NO: 218413 - DNA, 120 bp, Artificial Sequence
  ENSG00000116750_50 (sequence is synthesized)
atgctggttccgttacccagggtggacaggcgcggaagcgggacggggaagagcgatagtttcgcggcgtttgcccagcctcaacccctgggatgcgggtgagagacatggaggactggt

SEQ ID NO: 218414 - DNA, 120 bp, Artificial Sequence
  ENSG00000116750_51 (sequence is synthesized)
attctgatataggggaaggattctttaataagttccccaagtgattctaatgcaactggtctgtgtaccacagtttgagaaacactttgagaagacactactaggcaaataaaattttgg

SEQ ID NO: 218415 - DNA, 120 bp, Artificial Sequence
  ENSG00000116752_0 (sequence is synthesized)
gcaggcaaacctgaggtcctcagaatggcgggcacaggtttggtggctggagaggttgtggtggatgcgctgccgtattttgatcaaggttatgaagcccctggtgtgcgggaagcggct

SEQ ID NO: 218416 - DNA, 120 bp, Artificial Sequence
  ENSG00000116752_1 (sequence is synthesized)
gcagcgctggtggaggaggaaactcgcagataccgacctactaagaactacctgagctacctgacagccccggattattctgcctttgaaactgacataatgagaaatgaatttgaaaga

SEQ ID NO: 218417 - DNA, 120 bp, Artificial Sequence
  ENSG00000116752_2 (sequence is synthesized)
ctggctgctcgacaaccaattgaattgctcagtatgaaacgatatgagcttccagccccctcctctggtcaaaaaaatgacattactgcatggcaagaatgtgtaaacaattctatggcc

SEQ ID NO: 218418 - DNA, 120 bp, Artificial Sequence
  ENSG00000116752_3 (sequence is synthesized)
cagttagagcatcaagcagttagaattgagaatctggaactaatgtcacagcatggatgtaatgcctggaaagtatacaatgaaaatctagttcatatgattgaacacgcacagaaggaa

SEQ ID NO: 218419 - DNA, 120 bp, Artificial Sequence
  ENSG00000116752_4 (sequence is synthesized)
cttcagaagttaagaaaacatattcaagatttaaactggcagagaaagaacatgcaactcacagctggatctaaattgagagaaatggagtcaaattgggtatccctggtcagtaagaat

SEQ ID NO: 218420 - DNA, 120 bp, Artificial Sequence
  ENSG00000116752_5 (sequence is synthesized)
aaagaaaacatccggcaagacttctgaaaagacaatttagcaggtagaagaaaagttgggctttcacaaaaggcatctgaacttttaatgaactttgaaggacaacagcatcttcccaaa

SEQ ID NO: 218421 - DNA, 120 bp, Artificial Sequence
  ENSG00000116752_6 (sequence is synthesized)
accattgatgtttaagtgtttagaaatcatagaaggtgtaggctgctgtggtaattctatttgtatatctcaacagaattaaaatgtctagcttggtggtatttttatagccataaaaga

SEQ ID NO: 218422 - DNA, 120 bp, Artificial Sequence
  ENSG00000116752_7 (sequence is synthesized)
aaatctttaggctttcaaaataaggatgactttagaataatattgtgtcatagaattaattttcagccatgtggaccatattttgtatccaaggatccttatttaaagctttcaacatgt

SEQ ID NO: 218423 - DNA, 120 bp, Artificial Sequence
  ENSG00000116752_8 (sequence is synthesized)
acaggaagttggaaatttttggtttatgactttgtctaataaagagatagttctaaacacattcttgatcaccaaacaacttcagaaagacagtgactgtacagttatcattatcatcat

SEQ ID NO: 218424 - DNA, 120 bp, Artificial Sequence
  ENSG00000116752_9 (sequence is synthesized)
catcgtcatcatcataggtaacagttatatcaagcttaatatgtgctgaacattgttctgaacactttaggtagatgaactagatgtatgtgaataaaaattatttggtcctcacaaaaa

SEQ ID NO: 218425 - DNA, 120 bp, Artificial Sequence
  ENSG00000116754_0 (sequence is synthesized)
agagaagccttttccgttgccggtgccggcctagcgtcctggaattacttcaatcaacaggagcgagaacccgagcagcgccatgagcaacactaccgtcgtccccagcactgcaggtcc

SEQ ID NO: 218426 - DNA, 120 bp, Artificial Sequence
  ENSG00000116754_1 (sequence is synthesized)
gggccccagcggcgggcccggtggcggaggtggtggtggcggcggaggcggcggcaccgaggtaatccaggtgactaatgtctccccgagcgctagctctgagcagatgcggactctctt

SEQ ID NO: 218427 - DNA, 120 bp, Artificial Sequence
  ENSG00000116754_2 (sequence is synthesized)
cggtttcctaggcaagatcgacgaactgcgcctcttcccgccggatgattcgcctttgccagtctcatctcgtgtctgctttgttaagttccatgatccagactcagcagttgtggcaca

SEQ ID NO: 218428 - DNA, 120 bp, Artificial Sequence
  ENSG00000116754_3 (sequence is synthesized)
gcatctgacaaacactgtattcgttgacagagctttgatagtcgtaccatatgcagaaggagttattcctgatgaagctaaagctttgtctctgttggcaccagctaatgcagtggcagg

SEQ ID NO: 218429 - DNA, 120 bp, Artificial Sequence
  ENSG00000116754_4 (sequence is synthesized)
tcttctgcctggtggtggactcctgcctactcctaacccacttacccagattggcgctgttccactggctgctttgggggctcctactcttgatcctgcccttgctgcacttgggcttcc

SEQ ID NO: 218430 - DNA, 120 bp, Artificial Sequence
  ENSG00000116754_5 (sequence is synthesized)
tggagcaaacttgaactctcagtctcttgctgcagatcagttgctgaagcttatgagtactgttgatcccaagttgaatcatgtagctgctggtctcgtttcaccaagtctgaaatcgga

SEQ ID NO: 218431 - DNA, 120 bp, Artificial Sequence
  ENSG00000116754_6 (sequence is synthesized)
tacctctagtaaagaaatagaggaagctatgaaaagagtacgagaagcacagtccctaatttctgctgctatagaaccagataagaaagaagaaaaaagaaggcattcaagatcaagatc

SEQ ID NO: 218432 - DNA, 120 bp, Artificial Sequence
  ENSG00000116754_7 (sequence is synthesized)
acgttctaggaggaggaggactccctcatcttctagacacaggcggtcaagaagcagatcgagacggcggtcacattctaagtctaggagtcggcgacgatccaaaagcccaaggcggag

SEQ ID NO: 218433 - DNA, 120 bp, Artificial Sequence
  ENSG00000116754_8 (sequence is synthesized)
aagatctcattccagagaaagaggtagaaggtcaaggagcacatcaaaaacaagagacaaaaagaaagaagacaaagaaaagaaacgttctaaaacaccaccaaaaagttacagcacagc

SEQ ID NO: 218434 - DNA, 120 bp, Artificial Sequence
  ENSG00000116754_9 (sequence is synthesized)
cagacgttctagaagtgcaagcagagagagacgacgacgaagaagcaggagtggcacaagatctcctaaaaagcctcggtctcctaaaagaaaattgtcccgctcaccatcccctaggag

SEQ ID NO: 218435 - DNA, 120 bp, Artificial Sequence
  ENSG00000116754_10 (sequence is synthesized)
acataaaaaggagaagaagaaagataaagacaaagaaagaagtagggatgaaagagaacgatcaacaagcaagaagaagaagagtaaagataaggaaaaggaccgggaaagaaaatcaga

SEQ ID NO: 218436 - DNA, 120 bp, Artificial Sequence
  ENSG00000116754_11 (sequence is synthesized)
gagtgataaagatgtaaaacaggttacacgggattatgatgaagaggaacaggggtatgacagtgagaaagagaaaaaagaagagaagaaaccaatagaaacaggttcccctaaaacaaa

SEQ ID NO: 218437 - DNA, 120 bp, Artificial Sequence
  ENSG00000116754_12 (sequence is synthesized)
ggaatgttctgtggaaaagggaactggtgattcactaagagaatccaaagtgaatggggatgatcatcatgaagaagacatggatatgagtgactgaatattgcctctgagggagtccaa

SEQ ID NO: 218438 - DNA, 120 bp, Artificial Sequence
  ENSG00000116754_13 (sequence is synthesized)
ctgtatacctgcatcagtgtcattcctttgtgtgatttcttaatgctgtatttgttcatctcaaacctagatgtatacagctctgagttataaatggttataaagctcctgttactcata

SEQ ID NO: 218439 - DNA, 120 bp, Artificial Sequence
  ENSG00000116754_14 (sequence is synthesized)
ttagttatttacatcaaaaagcttttagaaaatggtacgaggtaaccaattcttgtcatggtgaaatctgattgagtaaccaagcagttttactattctggtgctgcttcataacaaaaa

SEQ ID NO: 218440 - DNA, 120 bp, Artificial Sequence
  ENSG00000116754_15 (sequence is synthesized)
taagttcacttatagtatttctataatttgattcattgccgtaatagagccatgtaggaaatgcactgattgcatgttattgtggcaagaatatcctaaatgtcattaaaatcctccaac

SEQ ID NO: 218441 - DNA, 120 bp, Artificial Sequence
  ENSG00000116754_16 (sequence is synthesized)
atgatggatctacttatggtcttgtttgttgacatgacaaattaacattcttatagttacatctggaaatgagcatttgaaatagataatcctttaagccttgtggcaaaatttttgtgg

SEQ ID NO: 218442 - DNA, 120 bp, Artificial Sequence
  ENSG00000116754_17 (sequence is synthesized)
cttttgtttaactttgaaaggttattatgcactaaccttttttggtggctaattagggtttaaatacagaaacaagatttcaaataaaactgtctttggcagtgagtaaatagcatattt

SEQ ID NO: 218443 - DNA, 120 bp, Artificial Sequence
  ENSG00000116754_18 (sequence is synthesized)
tgaagtagagttgtatactttttcataagatgtttgggaatttttttcctgaagtaataatttattccacatctacatcagtgaaagctatctacctatcctgagtctatcttaaaggaa

SEQ ID NO: 218444 - DNA, 120 bp, Artificial Sequence
  ENSG00000116754_19 (sequence is synthesized)
aaaaagaaaaaaaccttatctcttgcccttattttgaattttccactctttcattaatttgttttaagctccgtgttggaaaaaaggggtagtgcattttaaattgaccttcatacgctt

SEQ ID NO: 218445 - DNA, 120 bp, Artificial Sequence
  ENSG00000116754_20 (sequence is synthesized)
ttaaaataagacaaatctacttgataatgtacctttatttgatctcaagttgtataaaaccaataaatttgtgttactgcagtagtaatcttatgcacacggtgatttcatgttatatat

SEQ ID NO: 218446 - DNA, 120 bp, Artificial Sequence
  ENSG00000116754_21 (sequence is synthesized)
gcaaagtaggcaactgttttcttagttacagaagtttcaagcttcacttttgtgcagtagaaacaaaagtaggctacagtctgtgccatgttgatgtacagtttctgaaattgttttaca

SEQ ID NO: 218447 - DNA, 120 bp, Artificial Sequence
  ENSG00000116754_22 (sequence is synthesized)
agactttgataataaaacccttaaacttatgttcatgttcctgtaaaaccgtatttgtatttatttacgctactgaatgtatgacatttacctcattcattttacaaattctttcccttt

SEQ ID NO: 218448 - DNA, 120 bp, Artificial Sequence
  ENSG00000116754_23 (sequence is synthesized)
ctgtccacatatttcagtatagtaaaaagaggaagtctatcactgtagtgataattgccatcaaaattgtcaaaaatgatttaatttctatccaaaatagtccttttcttagcttagtat

SEQ ID NO: 218449 - DNA, 120 bp, Artificial Sequence
  ENSG00000116754_24 (sequence is synthesized)
cattttattgcttattttttgtgtgggaatggggttggataaagcaatgaactttagtataaacaaatcccacctatatctagcaaatttatattttcggtgaaatacagatatttgcct

SEQ ID NO: 218450 - DNA, 120 bp, Artificial Sequence
  ENSG00000116754_25 (sequence is synthesized)
ttctggagtagtatagaagctgtcaatatgtatctactgtacagtactaaatagtattcatttatgaaatgagtagtgtttgggtggctggggttaagggaaaatgagacttggaattgt

SEQ ID NO: 218451 - DNA, 120 bp, Artificial Sequence
  ENSG00000116754_26 (sequence is synthesized)
agcttttatccaagttttgagtataaatagggttttgttttgttttttttaacctaaaaactgaaatgccatatagaaaaacagcattgtttttacagtttgtagtaagtaactttttaa

SEQ ID NO: 218452 - DNA, 120 bp, Artificial Sequence
  ENSG00000116754_27 (sequence is synthesized)
agattttatcaaaaagaattgtctatagtgagtaaaagaagttctaataatggtcctaatcactgcatttttaaaaaacaaagttcaacacaaatgacatttgttttaaactttagtaga

SEQ ID NO: 218453 - DNA, 120 bp, Artificial Sequence
  ENSG00000116754_28 (sequence is synthesized)
taaaaggtgaaccatgtgacatgggcatttttgtaagtcaaaaacaaatttcacatatggtaaacctaatattcacagtgtgttccctcacttgtaatctctgaatacaaatatactagc

SEQ ID NO: 218454 - DNA, 120 bp, Artificial Sequence
  ENSG00000116754_29 (sequence is synthesized)
ttttctaaagggaatcatttttttaaaagtagtgccactgacaagatgctacagtgaagattatccattcttaggatatttattttcagtgaacattttctgcacaaaggtagtgttgca

SEQ ID NO: 218455 - DNA, 120 bp, Artificial Sequence
  ENSG00000116754_30 (sequence is synthesized)
ctgggacacaagccttttaacagataaccagttgaaatcaaacactgcctccacaccgagttctgttgtgtatttgatagtaaattgatttaaaaataaaagtggtttttgttagaaaaa

SEQ ID NO: 218456 - DNA, 120 bp, Artificial Sequence
  ENSG00000116754_31 (sequence is synthesized)
gcagtccagatgtcgtcagcaccagcgcctgggctggaggacagagaagccttttccgttgccggtgccggcctagcgtcctggaattacttcaatcaagagcgagaacccgagcagcgc

SEQ ID NO: 218457 - DNA, 120 bp, Artificial Sequence
  ENSG00000116754_32 (sequence is synthesized)
ttatatgaaatgcccagaataggcaaatctataaagataccaagtagattactgattgctggggagatagggaggattagagtgataactaaagggtagggagtttttggggtggtgaaa

SEQ ID NO: 218458 - DNA, 120 bp, Artificial Sequence
  ENSG00000116754_33 (sequence is synthesized)
attttcttaaaaactaaatttttaagcatgaaaatgaaaccaaatgtaagtacagaaggaaatgctgaatcaggcctgagggataggtggcaaagagatagaaaagatggaaggtactac

SEQ ID NO: 218459 - DNA, 120 bp, Artificial Sequence
  ENSG00000116754_34 (sequence is synthesized)
atatattttcttaccttaaaaactgttgaggatttttttttttacctgttgctttatataatgtacttgtaagtgccttctcatgctgtattattggatcactctaaattaaggcatctt

SEQ ID NO: 218460 - DNA, 120 bp, Artificial Sequence
  ENSG00000116754_35 (sequence is synthesized)
ctgtgagttattaaatacccactgtgtttgtagttgtgctacagtctgttgaaggacacggaaatgtaatataaaatacttcttccgtctagagaatttggagtttcagttacataagac

SEQ ID NO: 218461 - DNA, 120 bp, Artificial Sequence
  ENSG00000116754_36 (sequence is synthesized)
agtagcaaaaagtataaggtgcacagtcgtgacaatgtttgataagtgaatgctcagttatgtgtaacgtttccaggacaagggtcacagagggctgtgtaagtagaaaaaaagcttcat

SEQ ID NO: 218462 - DNA, 120 bp, Artificial Sequence
  ENSG00000116754_37 (sequence is synthesized)
ttggaaattagacaactaagtacagggttttttaagtctgataacttttgagaatcaggaacagaatttttttttttaagttacagtaaaaaggaggggaaggctgtatatcagctgtat

SEQ ID NO: 218463 - DNA, 120 bp, Artificial Sequence
  ENSG00000116754_38 (sequence is synthesized)
atcttcaaagtaattggtgaaagcagggttttgggggactgcaggagggcgattttgctagagtataaggtttctacctttccactaactagttctctgaatttcatctaatgatttaaa

SEQ ID NO: 218464 - DNA, 120 bp, Artificial Sequence
  ENSG00000116754_39 (sequence is synthesized)
ggtgaatgtggggatattttattagtaactaccttctatatcacattattgaattattctgtacttactctgaacactgaatgtttgaaccaaaaactaacttcttcagtaatagtttac

SEQ ID NO: 218465 - DNA, 120 bp, Artificial Sequence
  ENSG00000116754_40 (sequence is synthesized)
ttcacacgtcacccctctcgcattagttttgttaaatcagttttttctcaagcttagtatttctaacattttgtcatcaattaaaagaattactagaaattaggagttttcttgagggta

SEQ ID NO: 218466 - DNA, 120 bp, Artificial Sequence
  ENSG00000116754_41 (sequence is synthesized)
gtaaagggaaagattcatggtttgcagatgattatattactcatttaattgtttagcttataccagtattgtgaaacaatctttcatttttctgtttttttgagacagggtctctctctg

SEQ ID NO: 218467 - DNA, 74 bp, Artificial Sequence
  ENSG00000116754_42 (sequence is synthesized)
tatcacaactcactccagcttcaacctccgcaggctcaagtgatcttcctgcctctgcctcctgagtagctggg

SEQ ID NO: 218468 - DNA, 120 bp, Artificial Sequence
  ENSG00000116754_43 (sequence is synthesized)
ataggcatgagccactacatctggccacatctttcattgttagaatcatctatgatgtgtctgcatttttaagatcacactgtattttaaaacctagtttgcacatttgtgattctagag

SEQ ID NO: 218469 - DNA, 120 bp, Artificial Sequence
  ENSG00000116754_44 (sequence is synthesized)
ttttcattttaaaactgtcctgtagtttttcttttcagcagttacagttcttaagaatgttttaatgtattctccttctgacttgtgacttaaacaccattaaggactgaacattttagt

SEQ ID NO: 218470 - DNA, 120 bp, Artificial Sequence
  ENSG00000116754_45 (sequence is synthesized)
cctataaacaagttagttttgtagcctgtgttacttctccaaggttttgaagttggatctttgctgtactacttatatcctgtgaaattgagtcaggctcatcatctaaacaagttaaac

SEQ ID NO: 218471 - DNA, 120 bp, Artificial Sequence
  ENSG00000116754_46 (sequence is synthesized)
gcgaggtggggcggccgtttgttttctcgtggtctcgagctcgcgcgctctcatcccctcccccgcggcgtgcggcggggcggagaaacggcggcggcggcggcggcatcggcagcagta

SEQ ID NO: 218472 - DNA, 120 bp, Artificial Sequence
  ENSG00000116754_47 (sequence is synthesized)
gcagaggctgtagcatcggacaccctcctctctcccgcaatccggttcctcttccccctccttctcactgtttgttgtgtgtttgatgtgttaaagcaggagcgagaacccgagcagcgc

SEQ ID NO: 218473 - DNA, 120 bp, Artificial Sequence
  ENSG00000116754_48 (sequence is synthesized)
ggcggcaccgaggtaatccaggtgactaatgtctccccgagcgctagctctgagcagatgcggactctcttcggtttcctaggcaagatcgacgaactgcgcctcttcccgccggagaaa

SEQ ID NO: 218474 - DNA, 120 bp, Artificial Sequence
  ENSG00000116754_49 (sequence is synthesized)
tttgatagtcgtaccatatgcagaagttcttttccctggttcagcctgaactatataccaggccctgctgaaaataccacccaacagttttcttctgcagcttatccagtttctcttaag

SEQ ID NO: 218475 - DNA, 120 bp, Artificial Sequence
  ENSG00000116754_50 (sequence is synthesized)
tgccctgtacatatttgaagcagccgacacgagtcgttgttcataaaacagcttttgaaagttgagagcacacccctggagaaccgactgtgcttgcttacgtttggttcatgacttaaa

SEQ ID NO: 218476 - DNA, 120 bp, Artificial Sequence
  ENSG00000116754_51 (sequence is synthesized)
tctgattatatttttgtgtttgtagtgctatataaattggcatcagctgagtcttctaatgcattcataaattgtgttcatttgttagagacaaaaagaaagaagacaaagaaaagaaac

SEQ ID NO: 218477 - DNA, 120 bp, Artificial Sequence
  ENSG00000116754_52 (sequence is synthesized)
tgaatttaattctggtatgatatgctgtattaatgttacctccagtaaatacaattccctccagatttagctattacacttcggtgttagctcttggtcagtgttttagaacagtagaca

SEQ ID NO: 218478 - DNA, 120 bp, Artificial Sequence
  ENSG00000116754_53 (sequence is synthesized)
tagtctacggtaaggaatagtcttaattggtaaaactaagatagctgaatttggaaggaactcttaatagtaatggatttggggattttttaggttccttggttaatgtttgtttctttt

SEQ ID NO: 218479 - DNA, 120 bp, Artificial Sequence
  ENSG00000116754_54 (sequence is synthesized)
gtctgtttctttttctttcatttctacacattcatgcagtatttcatggttctatcaaagcagcagtaaaaaaaatactcttgacgcatgaaaattaactggtgaggggcctcattgcta

SEQ ID NO: 218480 - DNA, 120 bp, Artificial Sequence
  ENSG00000116754_55 (sequence is synthesized)
tttttaaattgtagttttatttttaaatagtctttttttaatcagaggatcagatgcatgacttttttttttttaatggatgcagatcttctatcaggtgtctcacaataaattcaagag

SEQ ID NO: 218481 - DNA, 120 bp, Artificial Sequence
  ENSG00000116754_56 (sequence is synthesized)
gattttagtttgccagaaatgttgcaaatgcactaatttgagtaagatgttgatactgaatatatcctcttgagacataattttgcatgcaaaattatcccataatctttgtaggtttgt

SEQ ID NO: 218482 - DNA, 120 bp, Artificial Sequence
  ENSG00000116754_57 (sequence is synthesized)
taatattgatgcattactgccctatatctaaatgatcttctcccccttcccctccataactcttggtatctaaattgatgacagctctgacacaagcaagataacagtgctgtgtagtat

SEQ ID NO: 218483 - DNA, 120 bp, Artificial Sequence
  ENSG00000116754_58 (sequence is synthesized)
gtattacagaaatactactggtatttgcaaatatgtagtttaattgtattattgaactctcattttgggggcttgggcacattaacagattaatccatctgtatagggcttttgctgttg

SEQ ID NO: 218484 - DNA, 120 bp, Artificial Sequence
  ENSG00000116754_59 (sequence is synthesized)
gatagaatttaaattgtctacataaatatttgttttaggacccttagattttatctgaatacacagattaggctttaaaaacagatatatatgtcatttttggcttaaggagtttggcta

SEQ ID NO: 218485 - DNA, 120 bp, Artificial Sequence
  ENSG00000116754_60 (sequence is synthesized)
agttagcttttcaactggcactgtatggcagcattttttggtatggttagcatggcacatggcgaaacataaagcattttactgtacaggtaaggaatgtgccatgttgttttacctatc

SEQ ID NO: 218486 - DNA, 120 bp, Artificial Sequence
  ENSG00000116754_61 (sequence is synthesized)
tctctttctctctcactcccatgcacacatcctgtgtgtattcagagaccttcagaaacattcatattcattttcatgagtcagcaaaagccctacgcttgattccaacagaatatttcc

SEQ ID NO: 218487 - DNA, 120 bp, Artificial Sequence
  ENSG00000116754_62 (sequence is synthesized)
tttacatactttcttctcttaatttttacaaaatttgtatggtaggtgtaaaagaaaatcatagtaactgtaccatattattaacccctaaatcaaactttttttgtcttgtgtatcttg

SEQ ID NO: 218488 - DNA, 120 bp, Artificial Sequence
  ENSG00000116754_63 (sequence is synthesized)
ttttttactctagaaacttaaccatttgtagagaaaaaggaaacaaattttcacacattgaagttcattctgacataaaattaatgataaataatcatagaaatcaagctttgtatttta

SEQ ID NO: 218489 - DNA, 120 bp, Artificial Sequence
  ENSG00000116754_64 (sequence is synthesized)
gcgaacataagtactttcaacaaactcaggtggtgtatcagggagacattttctgggtgtttttgtgtgttttctgtcttagaaaagaatgtgttctaatgcaaggatgtttctctgcag

SEQ ID NO: 218490 - DNA, 120 bp, Artificial Sequence
  ENSG00000116754_65 (sequence is synthesized)
tcagtagatgtagagtgagcattagtagcatgttaaatctaagctattaacatttttaaacccttgttatactgcagtccgtaatttttgcttgcagattttttttaattctaaaaatta

SEQ ID NO: 218491 - DNA, 120 bp, Artificial Sequence
  ENSG00000116754_66 (sequence is synthesized)
aaaacattttggttagcctgtaaatttaaattttttattggctaagtattatagttcccaatccctgaacataatacagtatatcatataaatgactttcataaatattttcaggccata

SEQ ID NO: 218492 - DNA, 120 bp, Artificial Sequence
  ENSG00000116761_0 (sequence is synthesized)
gccgctttagtgcgctcgccgtcggctctacctgcgtgctttagctccttctcgcctgatccttctgtctctcccaaccccggacacccggcttcgactggttatatcttcggtgttctt

SEQ ID NO: 218493 - DNA, 120 bp, Artificial Sequence
  ENSG00000116761_1 (sequence is synthesized)
ttcctctcttcttctttcgcggttcagcatgcaggaaaaagacgcctcctcacaaggtttcctgccacacttccaacatttcgccacgcaggcgatccatgtgggccaggatccagagca

SEQ ID NO: 218494 - DNA, 120 bp, Artificial Sequence
  ENSG00000116761_2 (sequence is synthesized)
atggacctccagggctgtagtgccccccatctcactgtccaccacgttcaagcaaggggcgcctggccagcactcgggttttgaatatagccgttctggaaatcccactaggaattgcct

SEQ ID NO: 218495 - DNA, 120 bp, Artificial Sequence
  ENSG00000116761_3 (sequence is synthesized)
tgaaaaagcagtggcagcactggatggggctaagtactgtttggcctttgcttcaggtttagcagccactgtaactattacccatcttttaaaagcaggagaccaaattatttgtatgga

SEQ ID NO: 218496 - DNA, 120 bp, Artificial Sequence
  ENSG00000116761_4 (sequence is synthesized)
tgatgtgtatggaggtacaaacaggtacttcaggcaagtggcatctgaatttggattaaagatttcttttgttgattgttccaaaatcaaattactagaggcagcaattacaccagaaac

SEQ ID NO: 218497 - DNA, 120 bp, Artificial Sequence
  ENSG00000116761_5 (sequence is synthesized)
caagcttgtttggatcgaaacccccacaaaccccacccagaaggtgattgacattgaaggctgtgcacatattgtccataagcatggagacattattttggtcgtggataacacttttat

SEQ ID NO: 218498 - DNA, 120 bp, Artificial Sequence
  ENSG00000116761_6 (sequence is synthesized)
gtcaccatatttccagcgccctttggctctgggagctgatatttctatgtattctgcaacaaaatacatgaatggccacagtgatgttgtaatgggcctggtgtctgttaattgtgaaag

SEQ ID NO: 218499 - DNA, 120 bp, Artificial Sequence
  ENSG00000116761_7 (sequence is synthesized)
ccttcataatagacttcgtttcttgcaaaactctcttggagcagttccatctcctattgattgttacctctgcaatcgaggtctgaagactctacatgtccgaatggaaaagcatttcaa

SEQ ID NO: 218500 - DNA, 120 bp, Artificial Sequence
  ENSG00000116761_8 (sequence is synthesized)
aggttatttatcctgggctgccctctcatccacagcatgagttggtgaagcgtcagtgtacaggttgtacagggatggtcaccttttatattaagggcactcttcagcatgctgagattt

SEQ ID NO: 218501 - DNA, 120 bp, Artificial Sequence
  ENSG00000116761_9 (sequence is synthesized)
tcctcaagaacctaaagctatttactctggccgagagcttgggaggattcgaaagccttgctgagcttccggcaatcatgactcatgcatcagttcttaagaatgacagagatgtccttg

SEQ ID NO: 218502 - DNA, 120 bp, Artificial Sequence
  ENSG00000116761_10 (sequence is synthesized)
gaattagtgacacactgattcgactttctgtgggcttagaggatgaggaagacctactggaagatctagatcaagctttgaaggcagcacaccctccaagtggaagtcacagctagtatt

SEQ ID NO: 218503 - DNA, 120 bp, Artificial Sequence
  ENSG00000116761_11 (sequence is synthesized)
ccagagctgctattagaagctgcttcctgtgaagatcaaatcttcctgagtaattaaatggaccaacaatgagcctttgcaaaattttcaagcggaaattttaaggcacctcattatctt

SEQ ID NO: 218504 - DNA, 120 bp, Artificial Sequence
  ENSG00000116761_12 (sequence is synthesized)
tcataactgtaattttcttagggatcatctctgttaaaaagttttctgtatgtcatgttataattacaggtcaattctgttaatatctttttgttaattttgctctatgtttgcctctga

SEQ ID NO: 218505 - DNA, 120 bp, Artificial Sequence
  ENSG00000116761_13 (sequence is synthesized)
aggaggtgagatttgtgctactttgggagattatgttcttttttcatgtctaagatttattttgatcatgtttataatataatggtaattcatttttgatgttttgtgaagaatttaaat

SEQ ID NO: 218506 - DNA, 120 bp, Artificial Sequence
  ENSG00000116761_14 (sequence is synthesized)
ttaaacgaatgttcttaaatcaagtgtgatttttttgcatatcattgaaaagaacattaaaagcaatggtttacacttagttaccataagccgaaaatcaaatacttgaaaagtttactg

SEQ ID NO: 218507 - DNA, 120 bp, Artificial Sequence
  ENSG00000116761_15 (sequence is synthesized)
tgaaattctactgatttaagactatacttaatatttttaaaaaaataaatcagctgggcgcggtggctcacgcatgtaatgccagcacttttggaggataaggcgggcggatcacgaggt

SEQ ID NO: 218508 - DNA, 73 bp, Artificial Sequence
  ENSG00000116761_16 (sequence is synthesized)
gcagtgaaacccccatctctactaaaaatgcaaaaaaaattagacggacgtggtggcgggtgcctgtagtccc

SEQ ID NO: 218509 - DNA, 120 bp, Artificial Sequence
  ENSG00000116771_0 (sequence is synthesized)
acactcgcctcgccgttcgggaccagccagatcgcggcggcctcgcgggcggtttggtcggtgaggtcttggccgcgcgcggcaatgctgaggctgctggcgtccgggtgcgcccggggc

SEQ ID NO: 218510 - DNA, 120 bp, Artificial Sequence
  ENSG00000116771_1 (sequence is synthesized)
gcgtcctgccgcagggctctttcatccggggcgccgccagagccgccaggcttccgacgcgccccggaaccagccccccagccccgagttcgtggcccggccggtgggcgtctgctccat

SEQ ID NO: 218511 - DNA, 120 bp, Artificial Sequence
  ENSG00000116771_2 (sequence is synthesized)
ccggtgggcgtctgctccatgatgcgcctgccggtgcagacctcccccgaggggctggacgctgccttcatcggggtgcccctggatactgggacctccaaccggcctggggcgagattc

SEQ ID NO: 218512 - DNA, 120 bp, Artificial Sequence
  ENSG00000116771_3 (sequence is synthesized)
ggacctcgccgcatccgggaagaatcagtgatgcttgggacagtcaatcctagcacgggggccctccccttccagtccctcatggttgcagacctaggcgatgtgaatgtcaatctttac

SEQ ID NO: 218513 - DNA, 120 bp, Artificial Sequence
  ENSG00000116771_4 (sequence is synthesized)
aaccttcaggacagctgccggcgaattcaagaggcctatgagaaaattgtagcagctggctgtattcctctgaccttgggtggagatcacacaatcacatatcccatattgcaagcgatg

SEQ ID NO: 218514 - DNA, 120 bp, Artificial Sequence
  ENSG00000116771_5 (sequence is synthesized)
gcaaaaaagcatggcccagtggggctgctgcacgtggatgcgcacacggacacgaccgacaaggccctaggagagaagctctaccacggggcgcccttccgccggtgtgtggatgagggt

SEQ ID NO: 218515 - DNA, 120 bp, Artificial Sequence
  ENSG00000116771_6 (sequence is synthesized)
ctcctggactgtaagcgtgtggtgcagattggcatccggggctcttccacgaccttggatccctacagatacaaccggagccagggcttccgggtagtcctggctgaagactgctggatg

SEQ ID NO: 218516 - DNA, 120 bp, Artificial Sequence
  ENSG00000116771_7 (sequence is synthesized)
aagtcgctggttcctctgatgggggaagtcaggcagcagatgggaggcaaacccatttatatcagctttgatattgacgctctggatcctgcctatgcgccagggacagggacacctgaa

SEQ ID NO: 218517 - DNA, 120 bp, Artificial Sequence
  ENSG00000116771_8 (sequence is synthesized)
attgctggtctcactcctagtcaggctctggagatcatcaggggttgtcaaggcctgaacgtgatgggctgtgatcttgtcgaagtttcaccaccgtatgatctttctgggaacacagcc

SEQ ID NO: 218518 - DNA, 120 bp, Artificial Sequence
  ENSG00000116771_9 (sequence is synthesized)
ctgctggcggctaacctgctgtttgagatgctatgtgctctccccaaagtgacaaccgtctgagtcttgtgctcttcaagacaaaacagattgcgtcgctgacaagttctcaagaagaac

SEQ ID NO: 218519 - DNA, 120 bp, Artificial Sequence
  ENSG00000116771_10 (sequence is synthesized)
ttatgagtaagcagtctgagaactaaagagtttatgccaagaaaactttctgctgaaagtgtcattgctggctgtgaagtcgggataatcagtagaattctcacccaaacagcaacattt

SEQ ID NO: 218520 - DNA, 120 bp, Artificial Sequence
  ENSG00000116771_11 (sequence is synthesized)
ctaaggaacttggattaattgggggaaaaaaaaaggagtacttgtactgctttgattttttttcctttgatgaaagatggaggataaaggggaagtgaggagaatttctttcaagattat

SEQ ID NO: 218521 - DNA, 78 bp, Artificial Sequence
  ENSG00000116771_12 (sequence is synthesized)
ttccatatttctatatcttccttttaaacatttttttttttgagatagagttttgttgcaacctccgcctcccgagtt

SEQ ID NO: 218522 - DNA, 120 bp, Artificial Sequence
  ENSG00000116771_13 (sequence is synthesized)
tacaggcatgagccaccgcacccagccgctttttaaaattttgatgatctgcttcctagagtattgagtatcttcctttaaactacagctcctcctcggacgctgcagtgagctgagatc

SEQ ID NO: 218523 - DNA, 80 bp, Artificial Sequence
  ENSG00000116771_14 (sequence is synthesized)
gcagcttctcctatgaggtgcttagggctgcatcttggttttaggaccactgtgaacgtaagtaaaaagtataaagtaac

SEQ ID NO: 218524 - DNA, 120 bp, Artificial Sequence
  ENSG00000116771_15 (sequence is synthesized)
ttaggaccactgtgaacgtaagtaaaaagtataaagtaacacggagagcctaatgaagaaacttcttgctcagaggcctagaagggtacacaaaatgtcttctaaactagaaaacctaag

SEQ ID NO: 218525 - DNA, 71 bp, Artificial Sequence
  ENSG00000116771_16 (sequence is synthesized)
gtgaaaacccatctctactgaaaatacagaagttagctgggcgcattgcttgaacccgggaggtggaggtt

SEQ ID NO: 218526 - DNA, 60 bp, Artificial Sequence
  ENSG00000116771_17 (sequence is synthesized)
cggacccagtggctcacgcctgtaatcccaggcctaggcgggaggatcacctgaggtcag

SEQ ID NO: 218527 - DNA, 84 bp, Artificial Sequence
  ENSG00000116771_18 (sequence is synthesized)
tgaaaccccgtctctactccagaaaacaaaacaaaactggaaaatgtcagctgggcttttttttttttttttttttctgagatg

SEQ ID NO: 218528 - DNA, 120 bp, Artificial Sequence
  ENSG00000116771_19 (sequence is synthesized)
ctcttaatgttacttattgtaactcacttcctgtaagactcaatctactcttcaagttgatgtaccctctatgactgtaattcctgaaatctgcagttatgctgtggtgatcttaagcgt

SEQ ID NO: 218529 - DNA, 120 bp, Artificial Sequence
  ENSG00000116771_20 (sequence is synthesized)
gtcttgagttccatgcaaattcaattctgttgataatgtgtccataatcaaatcatcatcttgcaatgcaagggctaccccataattatcagacattaaaatagtttatttctttttcca

SEQ ID NO: 218530 - DNA, 120 bp, Artificial Sequence
  ENSG00000116774_0 (sequence is synthesized)
gactgtacgttccttctactctggcaccactctccaggctgccatggggcccagcacccctctcctcatcttgttccttttgtcatggtcgggacccctccaaggacagcagcaccacct

SEQ ID NO: 218531 - DNA, 120 bp, Artificial Sequence
  ENSG00000116774_1 (sequence is synthesized)
tgtggagtacatggaacgccgactagctgctttagaggaacggctggcccagtgccaggaccagagtagtcggcatgctgctgagctgcgggacttcaagaacaagatgctgccactgct

SEQ ID NO: 218532 - DNA, 120 bp, Artificial Sequence
  ENSG00000116774_2 (sequence is synthesized)
ggaggtggcagagaaggagcgggaggcactcagaactgaggccgacaccatctccgggagagtggatcgtctggagcgggaggtagactatctggagacccagaacccagctctgccctg

SEQ ID NO: 218533 - DNA, 120 bp, Artificial Sequence
  ENSG00000116774_3 (sequence is synthesized)
tgtagagtttgatgagaaggtgactggaggccctgggaccaaaggcaagggaagaaggaatgagaagtacgatatggtgacagactgtggctacacaatctctcaagtgagatcaatgaa

SEQ ID NO: 218534 - DNA, 120 bp, Artificial Sequence
  ENSG00000116774_4 (sequence is synthesized)
gattctgaagcgatttggtggcccagctggtctatggaccaaggatccactggggcaaacagagaagatctacgtgttagatgggacacagaatgacacagcctttgtcttcccaaggct

SEQ ID NO: 218535 - DNA, 120 bp, Artificial Sequence
  ENSG00000116774_5 (sequence is synthesized)
gcgtgacttcacccttgccatggctgcccggaaagcttcccgagtccgggtgcccttcccctgggtaggcacagggcagctggtatatggtggctttctttattttgctcggaggcctcc

SEQ ID NO: 218536 - DNA, 120 bp, Artificial Sequence
  ENSG00000116774_6 (sequence is synthesized)
tggaagacctggtggaggtggtgagatggagaacactttgcagctaatcaaattccacctggcaaaccgaacagtggtggacagctcagtattcccagcagaggggctgatcccccccta

SEQ ID NO: 218537 - DNA, 120 bp, Artificial Sequence
  ENSG00000116774_7 (sequence is synthesized)
cccgggaggatgacaggcacttgtgtctggccaagttagatccacagacactggacacagagcagcagtgggacacaccatgtcccagagagaatgctgaggctgcctttgtcatctgtg

SEQ ID NO: 218538 - DNA, 120 bp, Artificial Sequence
  ENSG00000116774_8 (sequence is synthesized)
ggaccctctatgtcgtctataacacccgtcctgccagtcgggcccgcatccagtgctcctttgatgccagcggcaccctgacccctgaacgggcagcactcccttattttccccgcagat

SEQ ID NO: 218539 - DNA, 120 bp, Artificial Sequence
  ENSG00000116774_9 (sequence is synthesized)
atggtgcccatgccagcctccgctataacccccgagaacgccagctctatgcctgggatgatggctaccagattgtctataagctggagatgaggaagaaagaggaggaggtttgaggag

SEQ ID NO: 218540 - DNA, 120 bp, Artificial Sequence
  ENSG00000116774_10 (sequence is synthesized)
ctagccttgttttttgcatctttctcactcccatacatttatattatatccccactaaatttcttgttcctcattcttcaaatgtgggccagttgtggctcaaatcctctatatttttag

SEQ ID NO: 218541 - DNA, 120 bp, Artificial Sequence
  ENSG00000116774_11 (sequence is synthesized)
ccaatggcaatcaaattctttcagctcctttgtttcatacggaactccagatcctgagtaatccttttagagcccgaagagtcaaaaccctcaatgttccctcctgctctcctgccccat

SEQ ID NO: 218542 - DNA, 120 bp, Artificial Sequence
  ENSG00000116774_12 (sequence is synthesized)
gtcaacaaatttcaggctaaggatgccccagacccagggctctaaccttgtatgcgggcaggcccagggagcaggcagcagtgttcttcccctcagagtgacttggggagggagaaatag

SEQ ID NO: 218543 - DNA, 120 bp, Artificial Sequence
  ENSG00000116774_13 (sequence is synthesized)
gaggagacgtccagctctgtcctctcttcctcactcctcccttcagtgtcctgaggaacaggactttctccacattgttttgtattgcaacattttgcattaaaaggaaaatccactgct

SEQ ID NO: 218544 - DNA, 120 bp, Artificial Sequence
  ENSG00000116774_14 (sequence is synthesized)
agagacctcttcacaccttcatgcgcttagacctgcctagaggctcagatggctcagtggcactgctcacagagaacacaggctggaggacatggagtcggggaacggctggcccagtgc

SEQ ID NO: 218545 - DNA, 120 bp, Artificial Sequence
  ENSG00000116774_15 (sequence is synthesized)
gagtggaaggggatattgaagcctggctgagtttgctctttttttcccattcctgactcccgagttgggcctctccctgcctgggagttgtaaccctgcagcctccctcctgatccccca

SEQ ID NO: 218546 - DNA, 120 bp, Artificial Sequence
  ENSG00000116774_16 (sequence is synthesized)
ccttgcttcttactctttttttcgctttgtcccagtccattgtggctctgtcttctggaatctgttttagggaaacctctgtaatgccaggtctattaaggagaggttctggggatccag

SEQ ID NO: 218547 - DNA, 120 bp, Artificial Sequence
  ENSG00000116774_17 (sequence is synthesized)
gccgctgtggtacccgctctttctcaattctccctaagattggaggcaaccactgggcaaatgctcactattctccagatcacccaccctgggggagttcctgctggaggcatctaattc

SEQ ID NO: 218548 - DNA, 120 bp, Artificial Sequence
  ENSG00000116774_18 (sequence is synthesized)
cattcagggaaagaagactgcagcatttgctcatggagaggagctgaaatggaggtgaaaaatccactatttctgctcatcatccctccccacatgcgtagttctcagctgattagcaga

SEQ ID NO: 218549 - DNA, 120 bp, Artificial Sequence
  ENSG00000116774_19 (sequence is synthesized)
agaccatactgacacccgcctgaggaaatggcaggaccaagaggagagtgggcttaggttttcctcatcctataggagaggaagaatatcctgactgaggaaggacttacagtggggact

SEQ ID NO: 218550 - DNA, 120 bp, Artificial Sequence
  ENSG00000116774_20 (sequence is synthesized)
gtgaaggggatggagtgggatgaggaagggaattagagaatggggaacattctgcccgaggcgttgccttctcttatgtacagataatggtagctctcctttatttgaggagctactctg

SEQ ID NO: 218551 - DNA, 120 bp, Artificial Sequence
  ENSG00000116783_0 (sequence is synthesized)
gcacttgaacttggaatcttataacttgaagaactgccctggagaaaggaagaaacttataataaatgggaaattataaatctagaccaacccaaacttgtactgatgaatggaagaaaa

SEQ ID NO: 218552 - DNA, 120 bp, Artificial Sequence
  ENSG00000116783_1 (sequence is synthesized)
aagtcagtgaatcatatgttatcacaatagaaagattagaagatgacctgcagatcaaggaaaaagaactgacagaactaaggaatatatttggctctgatgaagccttcagtaaagtca

SEQ ID NO: 218553 - DNA, 120 bp, Artificial Sequence
  ENSG00000116783_2 (sequence is synthesized)
atttaaattaccgcactgaaaatgggctgtctctacttcatttatgttgcatttgtggaggcaagaaatcacatattcgaactcttatgttgaaagggctccgcccatctcgactgacaa

SEQ ID NO: 218554 - DNA, 120 bp, Artificial Sequence
  ENSG00000116783_3 (sequence is synthesized)
gaaatggatttacagccttgcatttagcagtttacaaggataatgcagaattgatcacttctctgcttcacagtggagctgatatacagcaggttggatacggtggcctcactgccctcc

SEQ ID NO: 218555 - DNA, 120 bp, Artificial Sequence
  ENSG00000116783_4 (sequence is synthesized)
atattgctacaatagctggccacctagaggctgctgatgtgctgttgcaacatggagctaatgtcaatattcaagatgcagtttttttcactccattgcatattgcagcgtactatggac

SEQ ID NO: 218556 - DNA, 120 bp, Artificial Sequence
  ENSG00000116783_5 (sequence is synthesized)
atgaacaggtaactcgccttcttttgaaatttggtgctgatgtaaatgtaagtggtgaagttggagatagacccctccacctagcatctgcaaaaggattcttgaatattgcaaaactct

SEQ ID NO: 218557 - DNA, 120 bp, Artificial Sequence
  ENSG00000116783_6 (sequence is synthesized)
tgatggaagaaggcagcaaagcagatgtgaatgctcaagataatgaagaccatgtcccactccatttctgttctcgatttggacaccatgatatagttaagtatctgctgcaaagtgatt

SEQ ID NO: 218558 - DNA, 120 bp, Artificial Sequence
  ENSG00000116783_7 (sequence is synthesized)
tggaagttcaacctcatgttgttaatatctatggagatacccccttacacctggcatgctacaatggcaaatttgaagttgccaaggaaatcatccaaatatcaggaacagaaagtctga

SEQ ID NO: 218559 - DNA, 120 bp, Artificial Sequence
  ENSG00000116783_8 (sequence is synthesized)
ctaaggaaaacatcttcagtgaaacagcttttcatagtgcttgtacctatggcaagagcattgacctagtcaaatttcttcttgatcagaatgtcataaacatcaaccaccaaggaaggg

SEQ ID NO: 218560 - DNA, 120 bp, Artificial Sequence
  ENSG00000116783_9 (sequence is synthesized)
atgggcacactggattacactctgcttgctaccacggtcacattcgcctggttcagttcttactggataatggagctgatatgaatctagtggcttgtgatcccagcaggtctagtggtg

SEQ ID NO: 218561 - DNA, 120 bp, Artificial Sequence
  ENSG00000116783_10 (sequence is synthesized)
aaaaagatgagcagacatgtttgatgtgggcttatgaaaaagggcatgatgccattgtcacactcctgaagcattataagagaccacaagatgaattgccctgtaatgaatattctcagc

SEQ ID NO: 218562 - DNA, 120 bp, Artificial Sequence
  ENSG00000116783_11 (sequence is synthesized)
ctggaggagatggctcctatgtgtctgttccatcacccttggggaagattaaaagcatgacaaaagagaaggcagatattctcctcctaagagctggattgccttcacatttccatcttc

SEQ ID NO: 218563 - DNA, 120 bp, Artificial Sequence
  ENSG00000116783_12 (sequence is synthesized)
ccatgagattattggctcaggttcttttgggaaagtatataaaggacgatgcagaaataaaatagtggctataaaacgttatcgagccaatacctactgctccaagtcagatgtggatat

SEQ ID NO: 218564 - DNA, 120 bp, Artificial Sequence
  ENSG00000116783_13 (sequence is synthesized)
gttttgccgagaggtgtccattctctgccagctcaatcatccctgcgtaattcagtttgtgggtgcttgcttgaatgatcccagccagtttgccattgtcactcaatacatatcaggggg

SEQ ID NO: 218565 - DNA, 120 bp, Artificial Sequence
  ENSG00000116783_14 (sequence is synthesized)
ttctctgttctccctccttcatgagcagaagaggattcttgatttgcagtctaaattaattattgcagtagatgttgccaaaggcatggagtaccttcacaacctgacacagccaattat

SEQ ID NO: 218566 - DNA, 120 bp, Artificial Sequence
  ENSG00000116783_15 (sequence is synthesized)
acatcgtgacttgaacagtcacaatattcttctctatgaggatgggcatgctgtggtggcagattttggagaatcaagatttctacagtctctggatgaagacaacatgacaaaacaacc

SEQ ID NO: 218567 - DNA, 120 bp, Artificial Sequence
  ENSG00000116783_16 (sequence is synthesized)
tgggaacctccgttggatggctcctgaggtgttcacgcagtgcactcggtacaccatcaaagcagatgtcttcagctatgctctgtgtctgtgggaaattctcactggcgaaattccatt

SEQ ID NO: 218568 - DNA, 120 bp, Artificial Sequence
  ENSG00000116783_17 (sequence is synthesized)
cgctcatctcaagccagcggctgcggcagcagacatggcttaccaccacatcagacctcccattggctattccattcccaagcccatatcatctctgctgatacgagggtggaacgcatg

SEQ ID NO: 218569 - DNA, 120 bp, Artificial Sequence
  ENSG00000116783_18 (sequence is synthesized)
tcctgaaggaagacccgaattttctgaagttgtcatgaagttagaagagtgtctctgcaacattgagctgatgtctcctgcatcaagtaacagcagtgggtctctctcaccttcttcttc

SEQ ID NO: 218570 - DNA, 120 bp, Artificial Sequence
  ENSG00000116783_19 (sequence is synthesized)
ttctgattgcctggtgaaccggggaggacctggccggagtcatgtggcagcattaagaagtcgtttcgaattggaatatgctctaaatgcaaggtcctatgctgctttgtcccaaagtgc

SEQ ID NO: 218571 - DNA, 120 bp, Artificial Sequence
  ENSG00000116783_20 (sequence is synthesized)
tggacaatattcctctcaaggtctgtctttggaggagatgaaaagaagtcttcaatacacacccattgacaaatatggctatgtatccgatcccatgagctcaatgcattttcattcttg

SEQ ID NO: 218572 - DNA, 120 bp, Artificial Sequence
  ENSG00000116783_21 (sequence is synthesized)
ccgaaatagtagcagctttgaggacagcagctgacagcattcggcgtatacctaaggagagttttttccccgaactgacagcaacgattccaaccacggcaagctggcttccaactataa

SEQ ID NO: 218573 - DNA, 120 bp, Artificial Sequence
  ENSG00000116783_22 (sequence is synthesized)
cattttactctcaaaggtctccttaaattgggcttgtttttacttgtcctatttaattccccactattagcaggctttggatttgtgcctaaggaataatatgcaaaagaaccaagacag

SEQ ID NO: 218574 - DNA, 120 bp, Artificial Sequence
  ENSG00000116783_23 (sequence is synthesized)
aatgtatatgaagaattgtttttaattttgtaaattaaaaaaaaatttagatcgttacttggaaatggagcctaagtctgtggtggacagataataattatgttttcctgggctgaatta

SEQ ID NO: 218575 - DNA, 120 bp, Artificial Sequence
  ENSG00000116783_24 (sequence is synthesized)
tgtagacttgtgtttgacagctatgggtttatttcttagaacattgttcattttcttttctcattatgttacttctagtgttcacctctgtgattaaagattctttggtgaaatagaaaa

SEQ ID NO: 218576 - DNA, 120 bp, Artificial Sequence
  ENSG00000116783_25 (sequence is synthesized)
cagtgcatcagaaagagcagagcagcaagaaagaaggcatctcagttcctaacgaatgaagtcaccacatcagccatagaagcctgcctctaggactctgaaataaaaaagagaaataaa

SEQ ID NO: 218577 - DNA, 120 bp, Artificial Sequence
  ENSG00000116783_26 (sequence is synthesized)
ttctccctccttcatgagcagaagaggtatgggtcttttgttctgatttatccttggacattccgtagaaactactcttgcaatacttcagagggtttcccattggatgagccttcacct

SEQ ID NO: 218578 - DNA, 120 bp, Artificial Sequence
  ENSG00000116783_27 (sequence is synthesized)
tttgaaatctgagtgctgctagcaagtgtgtcatttttaatatcgctaataatttatgcctaataactgtgtttcaatgaatagaaatactttatgctttcttagcagaaattcagttga

SEQ ID NO: 218579 - DNA, 120 bp, Artificial Sequence
  ENSG00000116783_28 (sequence is synthesized)
agataacaaatttaaggaatttaaattggaaactggagcttaaaataattaggctaaatttgaaatactgataaagaagatatatgtaagctcagaataaaataaacttttaaaaaagtg

SEQ ID NO: 218580 - DNA, 120 bp, Artificial Sequence
  ENSG00000116783_29 (sequence is synthesized)
acatcgtgacttgaacaggtctgccattacctctaggatctggatcacccatagtatttgcatctggaggggagctcattactttaacagggaagaatgcaatttcaggtgtatgcttac

SEQ ID NO: 218581 - DNA, 120 bp, Artificial Sequence
  ENSG00000116783_30 (sequence is synthesized)
ttctgccatcctaaaagaatcaagatttctacagtctctggatgaagacaacatgacaaaacaacctgggaacctccgttggatggctcctgaggtgttcacgcagtgcactcggtacac

SEQ ID NO: 218582 - DNA, 120 bp, Artificial Sequence
  ENSG00000116783_31 (sequence is synthesized)
aggtctgtctttggaggagatgaaaagaagtcttcaatacacacccattgacaaatatgatgtaacttcataaacacaaaacatagggcatcctttgaaacatttgctttgaccagaagt

SEQ ID NO: 218583 - DNA, 120 bp, Artificial Sequence
  ENSG00000116783_32 (sequence is synthesized)
actcccagggagacatagggtccctggatgaatccatggttggctattctgaaccttgtaaggcttctaagggaggaagatgtttatagatttaaaaaaataatgctgcttctcattgta

SEQ ID NO: 218584 - DNA, 120 bp, Artificial Sequence
  ENSG00000116783_33 (sequence is synthesized)
taagaggcagacttacttgatgattaattacttgtgtgatgttttaggaagaattatgaactttatgatcttccaatgattaaaaaatgccctttgaggaactgaacagccacagtaaac

SEQ ID NO: 218585 - DNA, 120 bp, Artificial Sequence
  ENSG00000116783_34 (sequence is synthesized)
tttatgccttttgagagcatcgggagaacacagtaaattctcactaagaagaatgctactctgcagtggaagaaccaaacacttggtaaatggcttgtggatgtttcttgatgtgcagaa

SEQ ID NO: 218586 - DNA, 120 bp, Artificial Sequence
  ENSG00000116783_35 (sequence is synthesized)
ctgggtcatctggtctcctggccccaggagactgactcagcatcaagaggacaactttgacaccctatgatatcatctccaacccaaccaatcagcagtccccactttcagacccctacc

SEQ ID NO: 218587 - DNA, 120 bp, Artificial Sequence
  ENSG00000116783_36 (sequence is synthesized)
caccaagttttccttaaaacccccatcctcaagtttttgagaagactgatttgagtaataataacactcttctctcctgtacagctggctgtgcgtgaattaaacttttctctattgcaa

SEQ ID NO: 218588 - DNA, 120 bp, Artificial Sequence
  ENSG00000116783_37 (sequence is synthesized)
tgcaaaatttgtctataaaaatcttatttccttgcatcttgaaatttattaatttttccacaaatactttctcacacctggaaagaactgataatgaaaggtcctctacaatttgtaatg

SEQ ID NO: 218589 - DNA, 120 bp, Artificial Sequence
  ENSG00000116783_38 (sequence is synthesized)
tgattctataagcattaattcacttgaaatttcagcaacaatttggcacattgatagggtattgtctattatagttttatagatggtaaaactaaaactcacagaggtcaaagaacttgt

SEQ ID NO: 218590 - DNA, 120 bp, Artificial Sequence
  ENSG00000116785_0 (sequence is synthesized)
gaaccacacttggtaactaataatgaaagatttcaaaccccaaacagtgcaactgaaacttttgtattagcatactactgagaatatctaacatgttgttactaatcaatgtcattctga

SEQ ID NO: 218591 - DNA, 120 bp, Artificial Sequence
  ENSG00000116785_1 (sequence is synthesized)
ccttgtgggtttcctgtgctaatggacaagtgaaaccttgtgattttccagacattaaacatggaggtctatttcatgagaatatgcgtagaccatactttccagtagctgtaggaaaat

SEQ ID NO: 218592 - DNA, 120 bp, Artificial Sequence
  ENSG00000116785_2 (sequence is synthesized)
attactcctattactgtgatgaacattttgagactccttcaggaagttactgggattacattcattgcacacaaaatgggtggtcaccagcagtaccatgtctcagaaaatgttattttc

SEQ ID NO: 218593 - DNA, 120 bp, Artificial Sequence
  ENSG00000116785_3 (sequence is synthesized)
cttatttggaaaatggatataatcaaaattatggaagaaagtttgtacagggtaactctacagaagttgcctgccatcctggctacggtcttccaaaagcgcagaccacagttacatgta

SEQ ID NO: 218594 - DNA, 120 bp, Artificial Sequence
  ENSG00000116785_4 (sequence is synthesized)
cggagaaaggctggtctcctactcccagatgcatccgtgtcagaacatgctcaaaatcagatatagaaattgaaaatggattcatttccgaatcttcctctatttatattttaaataaag

SEQ ID NO: 218595 - DNA, 120 bp, Artificial Sequence
  ENSG00000116785_5 (sequence is synthesized)
aaatacaatataaatgtaaaccaggatatgcaacagcagatggaaattcttcaggatcaattacatgtttgcaaaatggatggtcagcacaaccaatttgcattaattcttcagaaaagt

SEQ ID NO: 218596 - DNA, 120 bp, Artificial Sequence
  ENSG00000116785_6 (sequence is synthesized)
atgccagccctactatgaacttcagggttctaattatgtaacatgtagtaatggagagtggtcggaaccaccaagatgcatacatccatgtataataactgaagaaaacatgaataaaaa

SEQ ID NO: 218597 - DNA, 120 bp, Artificial Sequence
  ENSG00000116785_7 (sequence is synthesized)
taacataaagttaaaaggaagaagtgacagaaaatattatgcaaaaacaggggataccattgaatttatgtgtaaattgggatataatgcaaatacatcaattctatcatttcaagcagt

SEQ ID NO: 218598 - DNA, 120 bp, Artificial Sequence
  ENSG00000116785_8 (sequence is synthesized)
gtgtcgggaagggatagtggaataccccagatgcgaataaggcagcattgttaccctaaatgtatgtccaacttccacttttccacttctcactcttatggtctcaaagcttgcaaagat

SEQ ID NO: 218599 - DNA, 120 bp, Artificial Sequence
  ENSG00000116785_9 (sequence is synthesized)
gtctcaaagcttgcaaagatagcttctgatattgttgtaatttctactttatttcaaagaaaattaatataatagtttcaatttgcaacttaatatattctcaaaaatatattaaaacaa

SEQ ID NO: 218600 - DNA, 120 bp, Artificial Sequence
  ENSG00000116785_10 (sequence is synthesized)
tgtactaaaataataaaaactactcttatattggacttcttatcaatgaattagtaagtatagagacagacagctgaatggctttctgcatattgtatagtatacctagacatagaaaca

SEQ ID NO: 218601 - DNA, 120 bp, Artificial Sequence
  ENSG00000116785_11 (sequence is synthesized)
aaatgactttagattttatttggggaagtaataataccataaaattagatattaaaattgtaagtgaagataaacacactatagtattcccttattgtagccatggtcctctagatgcag

SEQ ID NO: 218602 - DNA, 120 bp, Artificial Sequence
  ENSG00000116785_12 (sequence is synthesized)
ttaaccaaatagggtcatttttattaaaagtagtgtttcctggcaaacactgacattacatcattatcatgatttaaaggaaatagtactagagaaggtgaattattatcattttcctgt

SEQ ID NO: 218603 - DNA, 120 bp, Artificial Sequence
  ENSG00000116785_13 (sequence is synthesized)
caggatatgcaacagcagatggaaattcttcagatatggttttttgcatttcttattaagttttgcttcagatttttttttgtcttttctcctgttaattgccttcactctctttctgtt

SEQ ID NO: 218604 - DNA, 120 bp, Artificial Sequence
  ENSG00000116785_14 (sequence is synthesized)
ggattttttgaaaagattgtatatccctgttaacaaattgaaatctctattcactttaatagatttttacccccagttagcatatggttagtgagaagttgcagggtaagaagaaaacaa

SEQ ID NO: 218605 - DNA, 120 bp, Artificial Sequence
  ENSG00000116785_15 (sequence is synthesized)
tgttccctttcccaacacttttcctgattatagagaaaaaagcatgaacttgtataatgatctagtcctgtacagaatgagaaatattaattgctagactgagaatgttttggtggctaa

SEQ ID NO: 218606 - DNA, 120 bp, Artificial Sequence
  ENSG00000116785_16 (sequence is synthesized)
agctaggaataactttttaagactgaagaatgatataagctatcaaatctaactcagttttcaaataacaggtttgcagagactggagaataaaaagtaaaaaattgttttattaattcc

SEQ ID NO: 218607 - DNA, 120 bp, Artificial Sequence
  ENSG00000116785_17 (sequence is synthesized)
agtgactaattctacttcatcaacatacatcataaataaaatttcaaaaataattgctgatatggtttggctgtgtcccacccaattttcaccttgaattatataatcaccatgcatcaa

SEQ ID NO: 218608 - DNA, 120 bp, Artificial Sequence
  ENSG00000116785_18 (sequence is synthesized)
aggtagggccaggtggagataatggaatcatgggagcagtttccccataccccactcatggtagtaaatacatctcatgagatctaatggttttataaatgaaagttcccctggacaagt

SEQ ID NO: 218609 - DNA, 120 bp, Artificial Sequence
  ENSG00000116785_19 (sequence is synthesized)
gttcccctggacaagttctcttgcctgccaccatgtaagatgtacctttgctactcattcaccttctgtcatgatggtgaggccttcccagcaatgtggaactgtgagtccattaaacct

SEQ ID NO: 218610 - DNA, 120 bp, Artificial Sequence
  ENSG00000116785_20 (sequence is synthesized)
tttttattagaattaaataaaataataaatagacacctacatatgtatatgtacacatatgtgtgtacatatatgtacatatatatgtagtcctcctatgagtgtgaattatcttgagac

SEQ ID NO: 218611 - DNA, 120 bp, Artificial Sequence
  ENSG00000116785_21 (sequence is synthesized)
agtgtgaattatcttgagacttaaaaagaaaaaacaacgttgaaaatgcagatgtcttcctaagaaatcaaataagatacagttaagagtatataaaaagctttatttagaaagtttcca

SEQ ID NO: 218612 - DNA, 120 bp, Artificial Sequence
  ENSG00000116785_22 (sequence is synthesized)
ataagactattgatttttccccacatataaagtattttttttcagattcttcagaaaagtgtgggcctcctccacctattagcaatggtgataccacctcctttctactaaaagtgtatg

SEQ ID NO: 218613 - DNA, 120 bp, Artificial Sequence
  ENSG00000116785_23 (sequence is synthesized)
atttctgctagcgtcaggagaatcagaccttaataatttgtatcaatgatgctactgaggatatccaatcaaaaaattatctctaccctattgtttactacagagaaaacaagtaaagga

SEQ ID NO: 218614 - DNA, 120 bp, Artificial Sequence
  ENSG00000116785_24 (sequence is synthesized)
aaaggaaatctttcagtggcaaaagttgattttttttctttcctctttatatattcacaaagagttttaaagataaattgctgaatgtatttttaacccaaatactgttgtataatttac

SEQ ID NO: 218615 - DNA, 120 bp, Artificial Sequence
  ENSG00000116785_25 (sequence is synthesized)
atactcccaaatccacttcattttcaagggtacaattcaactatttttagtcatgagataatatggaaccttgatacataatacaacatggaagactctcaaaaatattaagctaagaga

SEQ ID NO: 218616 - DNA, 120 bp, Artificial Sequence
  ENSG00000116785_26 (sequence is synthesized)
gaaaaaagatacacttacaaagtgattatctcaatgttatcatgagttttgggggttatatgaattcctacatttctagaatactgttttcaatttctatacttatcaagggctctgtgt

SEQ ID NO: 218617 - DNA, 120 bp, Artificial Sequence
  ENSG00000116785_27 (sequence is synthesized)
aaagaaaaaggtgtatacttcaattttactcagctttgataaatgatctactttaaaacttgtgaaataaaagacaggatgcttcataaattttatagaacttatatccaattaatataa

SEQ ID NO: 218618 - DNA, 120 bp, Artificial Sequence
  ENSG00000116785_28 (sequence is synthesized)
tttttatctaatatatacacccttactgttagtaaatcgttacataactacataaatggttacattaacttttaaattcacaaatttaaaagcggtttaagctccgtgacacattggact

SEQ ID NO: 218619 - DNA, 80 bp, Artificial Sequence
  ENSG00000116786_0 (sequence is synthesized)
cggggcggcggcggcggtggcggtggcggtggcggcgacggtggcagcgccatggagccgggggaggtgaaggaccggat

SEQ ID NO: 218620 - DNA, 120 bp, Artificial Sequence
  ENSG00000116786_1 (sequence is synthesized)
tggagccgggggaggtgaaggaccggatcctggagaacatctcgctgtcggtgaagaagttgcagagctattttgctgcatgtgaggatgagatccctgccatccggaaccatgacaagg

SEQ ID NO: 218621 - DNA, 120 bp, Artificial Sequence
  ENSG00000116786_2 (sequence is synthesized)
tcctacagcgtctgtgtgagcacctggaccacgccctgctgtacggactgcaagacctctcctctggctactgggtgctcgtggtgcattttactcggagagaggccatcaagcagatcg

SEQ ID NO: 218622 - DNA, 120 bp, Artificial Sequence
  ENSG00000116786_3 (sequence is synthesized)
aggtgctgcagcacgtggccaccaacctggggcgcagccgtgcctggctgtacctggccctcaacgagaactccttggagagctacctgcggttgttccaggagaacctgggcctgctgc

SEQ ID NO: 218623 - DNA, 120 bp, Artificial Sequence
  ENSG00000116786_4 (sequence is synthesized)
ataagtactacgtcaagaatgccctggtctgcagccacgatcacctgacgctcttcctgaccttggtgtccgggctagagttcattcgtttcgagctggatctggatgccccttacctag

SEQ ID NO: 218624 - DNA, 120 bp, Artificial Sequence
  ENSG00000116786_5 (sequence is synthesized)
acctggccccctacatgcccgactactacaaacctcagtacctgctggactttgaagaccgccttcccagctcggtccacggctcagacagtctgtccctcaactctttcaactccgtca

SEQ ID NO: 218625 - DNA, 120 bp, Artificial Sequence
  ENSG00000116786_6 (sequence is synthesized)
cctccaccaacctggagtgggatgacagtgcgattgccccatctagtgaggattatgattttggagatgtgtttccagcagtgccgtctgtacccagcacagactgggaagatggagacc

SEQ ID NO: 218626 - DNA, 120 bp, Artificial Sequence
  ENSG00000116786_7 (sequence is synthesized)
tcacagacacggtcagtggtccccgctccacagcctccgacctgaccagcagcaaggcctccaccaggagccccacccagcgccagaaccccttcaacgaggagccggcagagactgtgt

SEQ ID NO: 218627 - DNA, 120 bp, Artificial Sequence
  ENSG00000116786_8 (sequence is synthesized)
cctcctctgacaccacccccgtgcacaccacctctcaggagaaggaggaggcccaggccctggacccgccggatgcctgcacggagctcgaggtcatcagggtcaccaagaagaagaaaa

SEQ ID NO: 218628 - DNA, 120 bp, Artificial Sequence
  ENSG00000116786_9 (sequence is synthesized)
ttggcaagaagaaaaagagcagatcagatgaggaggcaagtccactccaccccgcctgcagccagaagaaatgtgccaagcagggggacggtgacagccgcaacggcagcccaagccttg

SEQ ID NO: 218629 - DNA, 120 bp, Artificial Sequence
  ENSG00000116786_10 (sequence is synthesized)
ggcgggactcgccagacactatgcttgcctccccccaggaggagggagaggggccgagcagcaccacggagagcagcgagcgctccgagccgggcctgctgatccctgagatgaaggaca

SEQ ID NO: 218630 - DNA, 120 bp, Artificial Sequence
  ENSG00000116786_11 (sequence is synthesized)
cctccatggagcgcttggggcagcccctgagcaaggttatcgaccagctcaacgggcagctggaccccagcacctggtgctcccgtgctgagcccccagaccagtcctttcggaccggct

SEQ ID NO: 218631 - DNA, 120 bp, Artificial Sequence
  ENSG00000116786_12 (sequence is synthesized)
ctcccggggatgccccggagaggccgccgctttgcgactttagtgaggggctttcagccccaatggacttctaccgctttaccgtcgagagtccaagcactgttacatcaggtggcggcc

SEQ ID NO: 218632 - DNA, 120 bp, Artificial Sequence
  ENSG00000116786_13 (sequence is synthesized)
accatgaccctgcagggcttggccaaccgctgcatgttcctagtagccctgaggctgctggccaagaagaagagggaggaggaggagagggacagacgcctcggcccctagaggatacca

SEQ ID NO: 218633 - DNA, 120 bp, Artificial Sequence
  ENSG00000116786_14 (sequence is synthesized)
cgagggaggctcaggagctggaggcccagctgtccctggtcagggaggggcctgtgtctgagccagagcctgggacccaggaggttctctgccagctcaagcgagaccagcccagcccgt

SEQ ID NO: 218634 - DNA, 120 bp, Artificial Sequence
  ENSG00000116786_15 (sequence is synthesized)
gtctgagtagcgctgaggattctggggtggatgagggacaggggagcccttcggagatggtccattcctcggagttcagagtagacaacaatcacctgctcctgctcatgatccacgtgt

SEQ ID NO: 218635 - DNA, 120 bp, Artificial Sequence
  ENSG00000116786_16 (sequence is synthesized)
tggagggcaacctgcagctgctgtacgtgctgctcacagactgctatgtctacctgctccggaaaggggccacagagaagccatacctggtggaagaggccgtttcttacaatgaacttg

SEQ ID NO: 218636 - DNA, 120 bp, Artificial Sequence
  ENSG00000116786_17 (sequence is synthesized)
actatgtgtcggttggccttgaccagcagacggtgaagctggtgtgcaccaaccgcaggaagcagtttctgctggacacggctgatgtggcgctggctgagttctttttggcttctttga

SEQ ID NO: 218637 - DNA, 120 bp, Artificial Sequence
  ENSG00000116786_18 (sequence is synthesized)
agtcagccatgatcaaaggctgtcgagaacctccctaccccagcatcctgacggatgccaccatggagaagctggcactggccaaatttgtggcccaagaatcgaagtgtgaggcatctg

SEQ ID NO: 218638 - DNA, 120 bp, Artificial Sequence
  ENSG00000116786_19 (sequence is synthesized)
ctgtcaccgtgcgcttctacggccttgtgcactgggaggaccccacagacgagtccctgggccccacgccctgccactgctcaccccccgagggcaccatcaccaaagaaggcatgctgc

SEQ ID NO: 218639 - DNA, 120 bp, Artificial Sequence
  ENSG00000116786_20 (sequence is synthesized)
actacaaggcgggcacctcctacctgggcaaggaacactggaagacgtgcttcgtggtgctcagcaacgggatcctctaccagtacccggaccgcaccgacgtcatccctctgctctcgg

SEQ ID NO: 218640 - DNA, 120 bp, Artificial Sequence
  ENSG00000116786_21 (sequence is synthesized)
tgaacatggggggggagcagtgcggtggctgccggagagccaacaccacggatcggccccacgccttccaggtcattctctccgaccggccctgcctggagctaagtgccgagagcgagg

SEQ ID NO: 218641 - DNA, 120 bp, Artificial Sequence
  ENSG00000116786_22 (sequence is synthesized)
ccgagatggccgagtggatgcagcatctctgccaggctgtgtccaaaggggtcatcccccagggcgtagctcccagcccctgcataccctgctgcctggtcctcacggatgaccgcctct

SEQ ID NO: 218642 - DNA, 120 bp, Artificial Sequence
  ENSG00000116786_23 (sequence is synthesized)
ttacgtgccatgaggattgccagaccagcttcttccgctctttgggcacagccaagctgggcgacatcagcgccgtctccaccgagccgggcaaggagtactgcgtcttggagttctccc

SEQ ID NO: 218643 - DNA, 120 bp, Artificial Sequence
  ENSG00000116786_24 (sequence is synthesized)
aggacagccagcagctcctcccgccctgggtcatctacctgagctgcacttctgaactggaccgattgctgtctgcactgaactctgggtggaaaaccatctatcaggtggacctccccc

SEQ ID NO: 218644 - DNA, 120 bp, Artificial Sequence
  ENSG00000116786_25 (sequence is synthesized)
acacggcgatccaggaagcctccaacaagaagaaattcgaggatgccttgagcctcatccacagcgcctggcagcggagcgacagtctctgccgcggccgagcctcccgagacccctggt

SEQ ID NO: 218645 - DNA, 120 bp, Artificial Sequence
  ENSG00000116786_26 (sequence is synthesized)
gctgaggcagagctggttggcgtccctggtgggcaggaaaggaaggcacgccagccggcaggcacactgtcacggctgttgtcatgctgtcgggagcctacagtccacccctgccctggg

SEQ ID NO: 218646 - DNA, 120 bp, Artificial Sequence
  ENSG00000116786_27 (sequence is synthesized)
cggcagaaccaccgagtgtggcttaagacagggtccctccactccagggatccagatcaggtgcccggcacccctgggcatcctgcccgacaggtagcgaatggaggtcgctgggggcag

SEQ ID NO: 218647 - DNA, 120 bp, Artificial Sequence
  ENSG00000116786_28 (sequence is synthesized)
agggtccgagccctgtgggctctgcggatgcacgccctcctcccgggcctccgcctcagtctgcagaatttctgccgagtggcaccgagaacaccatccatctaaggacgaacaaaagaa

SEQ ID NO: 218648 - DNA, 120 bp, Artificial Sequence
  ENSG00000116786_29 (sequence is synthesized)
ccaggagggcgggacccccctcttcctctcctgggttgggggctggggccctgagtgcccagccatccttgttcgtgtttgaacactctcctggccacgtggggaagcgggaacacgggg

SEQ ID NO: 218649 - DNA, 120 bp, Artificial Sequence
  ENSG00000116786_30 (sequence is synthesized)
tgtctgcgcatgtttcctcctcctagctccatcactgcgcacacagctgcctgcctcgccagatgcaggggggcgggcagccctccctggctgccaggaggctctgcatgcccacagtcc

SEQ ID NO: 218650 - DNA, 120 bp, Artificial Sequence
  ENSG00000116786_31 (sequence is synthesized)
tgccctgcctgtcccctcaacccggcagtgcctgtagcaccgaggagcaaagggggtggatggggggcttggagaagggcggagcccaccagcctggcatccatgttgacatcttctgac

SEQ ID NO: 218651 - DNA, 120 bp, Artificial Sequence
  ENSG00000116786_32 (sequence is synthesized)
tgtcccctgcttggctggagccaggcccttccctagagtttcgtcaagagcctcctggggaaggggtcaggtggtttgggttttgttttttaaaataaaatagacatgttatattgccaa

SEQ ID NO: 218652 - DNA, 120 bp, Artificial Sequence
  ENSG00000116791_0 (sequence is synthesized)
gtggagcctgcaaaagttggagaaggtgtggcagtcctcatttctgtggaatctgaagaagcccacgcagattttaattcccactctagattctgtatctagatcaccatggcgactgga

SEQ ID NO: 218653 - DNA, 120 bp, Artificial Sequence
  ENSG00000116791_1 (sequence is synthesized)
cagaagttgatgagagctgttagagtttttgaatttggtgggccagaagtcctgaaattgcgatcagatattgcagtaccgattccaaaagaccatcaggttctaatcaaggtccatgca

SEQ ID NO: 218654 - DNA, 120 bp, Artificial Sequence
  ENSG00000116791_2 (sequence is synthesized)
tgtggtgtcaaccccgtggagacatacattcgctctggtacttatagtagaaaaccactcttaccctatactcctggctcagatgtggctggggtgatagaagctgttggagataatgca

SEQ ID NO: 218655 - DNA, 120 bp, Artificial Sequence
  ENSG00000116791_3 (sequence is synthesized)
tctgctttcaagaaaggtgacagagttttcactagcagcacgatctctgggggttatgcagagtatgctcttgcagcagaccacactgtttacaaactacctgaaaaactggactttaaa

SEQ ID NO: 218656 - DNA, 120 bp, Artificial Sequence
  ENSG00000116791_4 (sequence is synthesized)
caaggagctgccatcggcattccatattttactgcttatcgagctctgatccacagtgcctgtgtgaaagctggagagagtgttctggttcatggggcaagtggaggagttggattagca

SEQ ID NO: 218657 - DNA, 120 bp, Artificial Sequence
  ENSG00000116791_5 (sequence is synthesized)
gcatgccaaattgctagagcttatggcttaaagattttgggcactgctggtactgaggaaggacaaaagattgttttgcaaaatggagcccatgaagtgttcaatcacagagaagtgaat

SEQ ID NO: 218658 - DNA, 120 bp, Artificial Sequence
  ENSG00000116791_6 (sequence is synthesized)
tacattgataaaattaagaagtatgttggtgagaaaggaattgatataattattgaaatgttagctaatgtaaatcttagtaaagacttgagtcttctgtcacatggaggacgagtgata

SEQ ID NO: 218659 - DNA, 120 bp, Artificial Sequence
  ENSG00000116791_7 (sequence is synthesized)
caatatgcagcagcccttcaagctggaatggaaattggctggttgaaacctgtgataggttctcaatatccattggagaaggtggccgaggctcatgaaaatatcattcatggtagtggg

SEQ ID NO: 218660 - DNA, 120 bp, Artificial Sequence
  ENSG00000116791_8 (sequence is synthesized)
gctactggaaaaatgattcttctcttatgatgattaattctttcatggatttcctatgtaattagaggtactgtctttcccccagttgtacttaccctatcttttctttaattaacattc

SEQ ID NO: 218661 - DNA, 120 bp, Artificial Sequence
  ENSG00000116791_9 (sequence is synthesized)
gattccatgagcttcttatgtgaaaaaataagatttttctttagagagcagaagcagaagagtaaaatttattgtatagctagcaatatttttttatgccatctgtctcaaatcaaagag

SEQ ID NO: 218662 - DNA, 120 bp, Artificial Sequence
  ENSG00000116791_10 (sequence is synthesized)
tcatcatagtaggaaataacatgttagttgtcatttggcatgagtgtgcattccagtaattcttaattgatatttgattaattccatacctttgattaaaacatgctagttcaaaataag

SEQ ID NO: 218663 - DNA, 120 bp, Artificial Sequence
  ENSG00000116791_11 (sequence is synthesized)
actgctcagtttccaagggttttcaagcctacttacctttataaaggttctctagtctctgattagccatgactgtattggactttgaacattttctgaactaaaaacctctattctaaa

SEQ ID NO: 218664 - DNA, 120 bp, Artificial Sequence
  ENSG00000116791_12 (sequence is synthesized)
ctaatctcatttggatgtgtaagtcttttgtaaaggcaagaataaataatatccaggacaatttattagttttctcagtattttcccaaatattagaatatttacttcattattggttgg

SEQ ID NO: 218665 - DNA, 120 bp, Artificial Sequence
  ENSG00000116791_13 (sequence is synthesized)
ctgccaatgaccccatatgttctgtgagaatagtagctttatctttgatataatacatagtctccaaataggtaatacttcgcaattgattagattttcagagtagatttagagttatct

SEQ ID NO: 218666 - DNA, 120 bp, Artificial Sequence
  ENSG00000116791_14 (sequence is synthesized)
gtttttctggtgagggtcaaatatttttgttaattaagctcacaaatttgataaattaagaattatctgcatttgtctcgtaacataataatgtgtaataaagtctatagaaaattaaaa

SEQ ID NO: 218667 - DNA, 120 bp, Artificial Sequence
  ENSG00000116791_15 (sequence is synthesized)
agtaggatgcggccagcgcaggagctggtggtgaaaaactgatctcgcatgttcagaaactgcacaagctctaccacatcctcgtcaacactgcccttccggctgaggtccgctttgctc

SEQ ID NO: 218668 - DNA, 120 bp, Artificial Sequence
  ENSG00000116791_16 (sequence is synthesized)
aaacattgcgccttccatttcctgaactccgcgctgcgatccatgggtgacggactcagggtctgcgctcggctccttcatggtagcctcgtctctccctgggggcagccatattgaagc

SEQ ID NO: 218669 - DNA, 120 bp, Artificial Sequence
  ENSG00000116791_17 (sequence is synthesized)
gagcggtggccgaaaaggtccaaacttcctcttcgttcttaatttgggaaattctagtgccttcgcctaggggtggagagaggcgcacatcctgggtggagcgaggcgcacatcctgggt

SEQ ID NO: 218670 - DNA, 120 bp, Artificial Sequence
  ENSG00000116791_18 (sequence is synthesized)
ggagcctgcaaaagttggagaaggtgtggcagtcctcatttctgtggaatctgaagaagcccacgcagattttaattcccactctagattctggcttcatcgttatgaagcatatgatga

SEQ ID NO: 218671 - DNA, 120 bp, Artificial Sequence
  ENSG00000116791_19 (sequence is synthesized)
catcttccctggtgctagactttcatcctgatcagtctcatatactcttgtggctcccttactacccatatactgttgatttccaaaactgtctttggcctgagttcacttccttcatgc

SEQ ID NO: 218672 - DNA, 120 bp, Artificial Sequence
  ENSG00000116791_20 (sequence is synthesized)
catcaacccgctagacattgctactcatctggtcgcccaagacagaaaccctcattttgtttgtttttcctgtcttttaattatcattctccctcccacccagcaagttggttacctcat

SEQ ID NO: 218673 - DNA, 120 bp, Artificial Sequence
  ENSG00000116791_21 (sequence is synthesized)
tttatcagtttcatctctgacatgcctttcaaatgtatttccttatctctattccactgaccaccataacttagtttaggcctcagtttctccagccttgactgttattcataactgagc

SEQ ID NO: 218674 - DNA, 120 bp, Artificial Sequence
  ENSG00000116791_22 (sequence is synthesized)
taatacacccttttatctatgctgtcatctccctcttaaaaaagatctccagaaataaataaaatggaagctttatgaggagaggagttttgtctctctgttccctactgcacttgcaca

SEQ ID NO: 218675 - DNA, 120 bp, Artificial Sequence
  ENSG00000116791_23 (sequence is synthesized)
tgcagtaataaacccctgtaataaaaaaacaaaacaaaacaactacaaaaaaaaccccacacaatccaaatcctttaatatggcattcactgtgttttcactatctgtcccaacttacag

SEQ ID NO: 218676 - DNA, 120 bp, Artificial Sequence
  ENSG00000116791_24 (sequence is synthesized)
tctcctctctcctacctcttcctctccttgccactcccccttacctgattatgtacttcagttcctcttgtatttcaatccttgtgttctcagtcccctccatctttgcttttctgtttc

SEQ ID NO: 218677 - DNA, 120 bp, Artificial Sequence
  ENSG00000116791_25 (sequence is synthesized)
tttggtccagactgactcagcctcaggtctagcttccccttactcattttcctttcttttggcttgggaaactcctattcatccctgagggcccagttcatcgtctctgtggaactttat

SEQ ID NO: 218678 - DNA, 120 bp, Artificial Sequence
  ENSG00000116791_26 (sequence is synthesized)
ctgaccatggcaggcaatcaaaccttaaccttttttctctgtattctatgatttatttctgctaatgtgttacttagcccattactttatagctatgactgtagtatttcccatctttct

SEQ ID NO: 218679 - DNA, 120 bp, Artificial Sequence
  ENSG00000116791_27 (sequence is synthesized)
cactagttttgttttgagctccctatgtttgtatttgtattcctggtacctagtgcaatcccgggcacagggattcatttgtgtgtgtgtgttaaaataaaatgaatataatgtagatgt

SEQ ID NO: 218680 - DNA, 120 bp, Artificial Sequence
  ENSG00000116791_28 (sequence is synthesized)
gtgtagctttttgtaagagccagcgtccaacatccaagagcccaaaagagttagtgcatcaaacagatgataaaccatttagaacaaaaccaaatgcactaaaacaacaaaaatcatgca

SEQ ID NO: 218681 - DNA, 120 bp, Artificial Sequence
  ENSG00000116791_29 (sequence is synthesized)
aaaccgaacagctaatgatatcttcttttgctttttgtttattaataaaaatgggagccccctgggggtttggggcttttgatttattgtttctttatgaaagtttattttacagataga

SEQ ID NO: 218682 - DNA, 120 bp, Artificial Sequence
  ENSG00000116791_30 (sequence is synthesized)
aaattttcagctaagtattttatactcaagttgagtctagcacctgaaaattccagacaaactttatttcactacagcaatgtatttagtacaaatttttatcagtttagatgttctggc

SEQ ID NO: 218683 - DNA, 120 bp, Artificial Sequence
  ENSG00000116791_31 (sequence is synthesized)
attagattatttaaaattttgcattattagtctcaaagatgtagcatttatatatcatttgaaacatatttctataatatcttgtacagatagtagctattttacagtttttcacttgct

SEQ ID NO: 218684 - DNA, 120 bp, Artificial Sequence
  ENSG00000116791_32 (sequence is synthesized)
ttttcacttgctatcttactctacatttctcttttattatatagaagtatgttggtgagaaaggaattgatataattattgaaatgttagctaatgtaaatcttagtaaagacttgagtc

SEQ ID NO: 218685 - DNA, 120 bp, Artificial Sequence
  ENSG00000116791_33 (sequence is synthesized)
ttctgtcacatggaggacgagtgatagtaagtattccttttcttttttttttttttaccactttaatgttttaccacaatttaacactattttacagtaatctttaactgtagaattgct

SEQ ID NO: 218686 - DNA, 120 bp, Artificial Sequence
  ENSG00000116791_34 (sequence is synthesized)
gtttttcatgttaggttgttggcagcagaggtactattgaaataaacccacgagacaccatggcaaaggagtcgagtataattggagttactctcttttcctcaaccaaggaggaatttc

SEQ ID NO: 218687 - DNA, 120 bp, Artificial Sequence
  ENSG00000116793_0 (sequence is synthesized)
agacggctgagtcactgcatcccggcgcggcccgcagaagacgagcgccgctgccgccgcctcctcctcccgggctcccgggctctcggggtccggggcctttgcacctgtcttttccag

SEQ ID NO: 218688 - DNA, 120 bp, Artificial Sequence
  ENSG00000116793_1 (sequence is synthesized)
ctgggcacaaagccttttgctgtcgccgtggcgactggaggccttcacttttaatccccctcattttccagttcattctctgcttattttctggtcagtccgtgaccctgtaggcggcct

SEQ ID NO: 218689 - DNA, 120 bp, Artificial Sequence
  ENSG00000116793_2 (sequence is synthesized)
ctgaccggcgatcgatttgccgccctcagggcgctgggcggccggctgcctccgaagctggggcggcctccgcggtctccatggtaacggcctctccggcgtctccgcctggaggggaag

SEQ ID NO: 218690 - DNA, 120 bp, Artificial Sequence
  ENSG00000116793_3 (sequence is synthesized)
atgcggcctgcctggcccgccgcctcgcccccggcctcacggtgggaccccgggcactgaggacggaggtcccgggcgccggcccgcggggcaacgggcactagtgaaatcccattctct

SEQ ID NO: 218691 - DNA, 120 bp, Artificial Sequence
  ENSG00000116793_4 (sequence is synthesized)
ggctggagacacagatggcctcaaatgagagagatgctatatcgtggtaccaaaagaagattggagcctacgatcagcagatatgggaaaagtcaatcgaacagactcagattaagggtt

SEQ ID NO: 218692 - DNA, 120 bp, Artificial Sequence
  ENSG00000116793_5 (sequence is synthesized)
tgaaaaacaaaccgaaaaagatgggccacataaagccagacttgattgacgttgacttaatcagagggtcaacatttgccaaagcaaaacctgaaattccatggacatctctgactcgga

SEQ ID NO: 218693 - DNA, 120 bp, Artificial Sequence
  ENSG00000116793_6 (sequence is synthesized)
aggggcttgttcgagttgtattttttccattgttcagcaattggtggattcaggttacctctttaagaatctttgtttggctgttactactttatttcatgcaagttatagcaattgtct

SEQ ID NO: 218694 - DNA, 120 bp, Artificial Sequence
  ENSG00000116793_7 (sequence is synthesized)
tatatttgatgatgcctattgtgaacataagtgaagtacttggacccttgtgccttatgctactcatgggaactgtccactgtcaaattgtgtctactcagataacaagaccatcaggaa

SEQ ID NO: 218695 - DNA, 120 bp, Artificial Sequence
  ENSG00000116793_8 (sequence is synthesized)
acaatggaaatcgaagaagaagaaaattacgaaaaactgtaaatggtgatgggagccgagaaaatggaaataactcctctgataaagtcagaggaatagaaactttggaatctgtaccca

SEQ ID NO: 218696 - DNA, 120 bp, Artificial Sequence
  ENSG00000116793_9 (sequence is synthesized)
ttattggtggtttttgggagactatctttggcaacaggattaaaagagtaaaattaatatctaacaaagggactgaaactgacaatgacccaagttgtgtccatcctatcattaagagga

SEQ ID NO: 218697 - DNA, 120 bp, Artificial Sequence
  ENSG00000116793_10 (sequence is synthesized)
gacaatgtcgaccagagattagaatgtggcaaacaagagagaaagcaaaattttcagatggagaaaagtgccgtagggaggcttttaggcgtttgggtaatggggtgtctgatgacctgt

SEQ ID NO: 218698 - DNA, 120 bp, Artificial Sequence
  ENSG00000116793_11 (sequence is synthesized)
caagtgaagaagatggtgaagcacggacacagatgatattattgcgtaggagtgtggaaggggcctcaagtgacaatggttgtgaagttaagaatagaaaatcaatactttcaaggcacc

SEQ ID NO: 218699 - DNA, 120 bp, Artificial Sequence
  ENSG00000116793_12 (sequence is synthesized)
taaactctcaggtaaagaaaaccactacaaggtggtgtcatattgtgcgggattcagatagtctggctgaatcagaatttgaatcagcagccttcagccagggctctagatcgggtgtga

SEQ ID NO: 218700 - DNA, 120 bp, Artificial Sequence
  ENSG00000116793_13 (sequence is synthesized)
gtggtggctctcgaagcctcaacatgtcaagaagagactcagaaagcacccgccatgactcggagactgaggacatgttatgggacgacctgctacatggcccagagtgccggtcatctg

SEQ ID NO: 218701 - DNA, 120 bp, Artificial Sequence
  ENSG00000116793_14 (sequence is synthesized)
tcaccagtgacagtgagggggcccatgtgaatacccttcactcagggaccaaacgtgaccccaaagaggatgtttttcagcagaatcatttattctggcttcagaattcaagtccttcct

SEQ ID NO: 218702 - DNA, 120 bp, Artificial Sequence
  ENSG00000116793_15 (sequence is synthesized)
ctgtgttggaaataagtggcatcatcatgagcagggtcaatgcctatcagcaaggagtaggttatcagatgctgggaaatgttgtcactattggattagcattttttccattcttacatc

SEQ ID NO: 218703 - DNA, 120 bp, Artificial Sequence
  ENSG00000116793_16 (sequence is synthesized)
gacttttccgtgagaagagccttgaccaactaaagtccatttcagctgaggagatcttgactctcttttgtggggcaccacctgttacacctattattgttttgtcgataattaattttt

SEQ ID NO: 218704 - DNA, 120 bp, Artificial Sequence
  ENSG00000116793_17 (sequence is synthesized)
ttgaaagattgtgtcttacttggatgttttttttcatgatgtgtgtggcagagagaacatataaacagagatttttatttgcaaaactcttcagccatattacttctgccaggaaagcta

SEQ ID NO: 218705 - DNA, 120 bp, Artificial Sequence
  ENSG00000116793_18 (sequence is synthesized)
ggaaatatgaaatacctcatttcagacttaagaaggtggagaatattaaaatatggttatcactgcgttcctatctaaagagacgggggccacagcgttcagttgatgtggttgtatcct

SEQ ID NO: 218706 - DNA, 120 bp, Artificial Sequence
  ENSG00000116793_19 (sequence is synthesized)
cggttttcctactgacactttcgattgctttcatttgttgtgctcaggttctccaaggacataaaactttcctgaatgatgcttataactgggagtttttgatctgggaaacagctttac

SEQ ID NO: 218707 - DNA, 120 bp, Artificial Sequence
  ENSG00000116793_20 (sequence is synthesized)
tactttttttattgcgtctggcctcactggggtctgaaaccaataagaaatacagcaatgtttcaatattacttacagaacagattaatttatatcttaagatggaaaaaaagccaaata

SEQ ID NO: 218708 - DNA, 120 bp, Artificial Sequence
  ENSG00000116793_21 (sequence is synthesized)
agaaagaacagcttactctagtaaacaatgtattaaagctgtccaccaagttgttgaaagagctggacacaccatttagactctatggactgacaatgaatcccttaatctacaatatca

SEQ ID NO: 218709 - DNA, 120 bp, Artificial Sequence
  ENSG00000116793_22 (sequence is synthesized)
caagagtagttatcctttctgctgtctcaggtgttataagtgatcttctaggatttaatataagactgtggaaaattaaatcataagctgagtaaatgcctggactctcccctggctggt

SEQ ID NO: 218710 - DNA, 120 bp, Artificial Sequence
  ENSG00000116793_23 (sequence is synthesized)
atcaaaacttacctatcaaggaaagtgatgactgcagaaaccagtgagatacccacctgcttgttcacatgcacaggtgctctcagctctgccaaagcgaatgaatggtgtttccggagg

SEQ ID NO: 218711 - DNA, 120 bp, Artificial Sequence
  ENSG00000116793_24 (sequence is synthesized)
agcaagtccttttccaactgggtgtgcatgctaaaaacctgtattttcatgcttttcaaacaacatgaatagtcagctgactaaagactgtgtgtgttgtggtaacacaaagacaatttt

SEQ ID NO: 218712 - DNA, 120 bp, Artificial Sequence
  ENSG00000116793_25 (sequence is synthesized)
gtaagtttgcgcttcagtactgtgacagttatgtttactggacatagtcttttgggcaactatgatagatgcccaaagcatgaagcaaatatcttttattggaaatatgcaaattcaata

SEQ ID NO: 218713 - DNA, 120 bp, Artificial Sequence
  ENSG00000116793_26 (sequence is synthesized)
cttttccattatagtctatagaactggagatttcatttctctatcaaagagagatcaagcgaactattttaggttaaatccgaataaaagaactttactggagactttcagtttctaggt

SEQ ID NO: 218714 - DNA, 120 bp, Artificial Sequence
  ENSG00000116793_27 (sequence is synthesized)
tttctttgttgttgaaggaagaaaattaacttttaaactgtgagtttctgttaaactgtggagaaatgttttgttcgtttacgattttgggttaataactgtatagttgttggcaaacga

SEQ ID NO: 218715 - DNA, 120 bp, Artificial Sequence
  ENSG00000116793_28 (sequence is synthesized)
tgcatgcatacaatatgccatgtaattcagcatgaaaaatttaagtatatgcctactcatccatttccatcatacaacatggtttccacgttctatgtggaagccatggaagcattgttt

SEQ ID NO: 218716 - DNA, 120 bp, Artificial Sequence
  ENSG00000116793_29 (sequence is synthesized)
ccatatagatcatctgagttgtggttcctaacacagtgctatgtgtcctatcacaagcatcattgatagtttatcagttgtgcaacttaatgtattaaaccctccgtacattttcaggtc

SEQ ID NO: 218717 - DNA, 120 bp, Artificial Sequence
  ENSG00000116793_30 (sequence is synthesized)
caacgggcactaggtgagagccggacgcgggcgagcgaaggaggcgggtgccgggcgactccagcggcggcccctgcccctcccccgcacccacgaacacgctcgcccgatatattgcag

SEQ ID NO: 218718 - DNA, 120 bp, Artificial Sequence
  ENSG00000116793_31 (sequence is synthesized)
aggcttctccggtcgccgctgcgccagtttttttttgtttgtttgttgtgttttccctggcaaacagctggagaaagagcagctcatggagaggctgagagaagcggttttcgcgtccta

SEQ ID NO: 218719 - DNA, 120 bp, Artificial Sequence
  ENSG00000116793_32 (sequence is synthesized)
ggagaattcttcctacaaggcaaaatataaggaattagtaaagtaaaaggagctatcttcttctgttccataaatgtttaatgaggatgttagattatctagggggatagtgagatgaat

SEQ ID NO: 218720 - DNA, 120 bp, Artificial Sequence
  ENSG00000116793_33 (sequence is synthesized)
aagatagaggttttgaactcaaggtgcttacgtgctaattatgttatgttgcaagtaatattaaaatttttcattgttttgatatttaaattgcttcatcattaatttttcatcactaaa

SEQ ID NO: 218721 - DNA, 120 bp, Artificial Sequence
  ENSG00000116793_34 (sequence is synthesized)
tagtttttctttgccagagggagactgatcaggaatgggggctagagcacatgacatatgttctctgtagcgatagctattggaatttcaaaatttattttacttgaaaacatgaccttt

SEQ ID NO: 218722 - DNA, 64 bp, Artificial Sequence
  ENSG00000116793_35 (sequence is synthesized)
caccacacccagctaatttttttttttgaatttagtagagatgggatttcaccatgttaatgac

SEQ ID NO: 218723 - DNA, 120 bp, Artificial Sequence
  ENSG00000116793_36 (sequence is synthesized)
actgcacccagccgtctaaacttttaataaggatttatttggcttttctttacatattgaattcatgttatattttaatcgattatatggtatatgtgagttttggaactgttgaaatgt

SEQ ID NO: 218724 - DNA, 120 bp, Artificial Sequence
  ENSG00000116793_37 (sequence is synthesized)
tcttaggtatatgcagtgttattttccaaaagttatgttatcttccctcagaatatctgtagatttttgcctgcgtaagcaattactaaataagaattttccattaggtgcaatgaattt

SEQ ID NO: 218725 - DNA, 120 bp, Artificial Sequence
  ENSG00000116793_38 (sequence is synthesized)
tgcaatgaatttcaacatattcttatttttgaatgttattttaaaaactttttaaaaaagatttcttgtaaattcagttaaattaatggaatgttttctaaggaaataaaatgctatgct

SEQ ID NO: 218726 - DNA, 120 bp, Artificial Sequence
  ENSG00000116793_39 (sequence is synthesized)
tggagaaataaggaaaattttttacctgtttttgtatatgatattccattgagttgcttttgttctcttgatttggtctctcttcaagttgatgtgggcaataaaggattgataagtgga

SEQ ID NO: 218727 - DNA, 120 bp, Artificial Sequence
  ENSG00000116793_40 (sequence is synthesized)
gtttattgtagtcttcacagtctgggcttctttgtacctgtccttcttgggaaggctttccaagtatttgaggggaattgggcattgtgatctaagtctttggtcactgcagctgtatct

SEQ ID NO: 218728 - DNA, 120 bp, Artificial Sequence
  ENSG00000116793_41 (sequence is synthesized)
gcattagggggcaccctaagcccagtaatgttgtggctcctgcagacttgtagaggttactgccttggtggtcttgggtcagatctgggagaattctctggattaccagggagagactct

SEQ ID NO: 218729 - DNA, 120 bp, Artificial Sequence
  ENSG00000116793_42 (sequence is synthesized)
tgttctcttccctaactttctcccaaacaaatggagtctctttctctctgtgctgagctgcttggagccaggaggagtgacacagcacccctgtggccattaatactgggactggcctgg

SEQ ID NO: 218730 - DNA, 120 bp, Artificial Sequence
  ENSG00000116793_43 (sequence is synthesized)
gtcaggtctgaagccagcacagcactgggtcttgcccaaggtccacatggtgaccacttgcctgtctaccacctatgtttactcaaagcccaagggcactacaatcagcaggtggcaaat

SEQ ID NO: 218731 - DNA, 120 bp, Artificial Sequence
  ENSG00000116793_44 (sequence is synthesized)
ccagccaggcttatgtccttccttttagggcagccagttaccctagctctgggcagatccagagacgctatcagggcctggcgttgagaaccttaggaatcttcctgtcattctattcta

SEQ ID NO: 218732 - DNA, 120 bp, Artificial Sequence
  ENSG00000116793_45 (sequence is synthesized)
cagcagctgagctcacacccaaaccaaaagacaaactccttctcattcttctctcccgtttcctcaagcagaggaatctctccccatggccaccgctgccccaggcctgcagcaagtact

SEQ ID NO: 218733 - DNA, 120 bp, Artificial Sequence
  ENSG00000116793_46 (sequence is synthesized)
gcaaggctgttgctgatattcactcaaggtccaagggctctttggtcagcttgtggtcaatgctgataggcctgggtatctcccttcagggcaacgggctcccctctggcccagagtgcg

SEQ ID NO: 218734 - DNA, 120 bp, Artificial Sequence
  ENSG00000116793_47 (sequence is synthesized)
tccagaaataccatccaggagccaaggcctagaatcagggacctcaagagcacacttggtgttctaccccactgtggttgagcttgtaccctgcctgtaagacagagtcccctttactct

SEQ ID NO: 218735 - DNA, 120 bp, Artificial Sequence
  ENSG00000116793_48 (sequence is synthesized)
tccctctcttttcctcaagcagaaagagtctctccctgtagccaccacagctgggaatatactgggtccctcctgaggccagcatggctctgagtctcacccaatgcccacagtgagtac

SEQ ID NO: 218736 - DNA, 120 bp, Artificial Sequence
  ENSG00000116793_49 (sequence is synthesized)
tgcctggctaccactgttgattatacagagcccaagggctctttggtcagcaggtgatgactcctgccaggactggatccttcccttcaaatgtgctggttgcattttggtccaaggtgt

SEQ ID NO: 218737 - DNA, 120 bp, Artificial Sequence
  ENSG00000116793_50 (sequence is synthesized)
tggttgcattttggtccaaggtgtgtctagaaatgtcatccataagctaggtcctggaatgggggcctcaggactctggtcccttgttctactctggctgagctggtatccaagttgcaa

SEQ ID NO: 218738 - DNA, 120 bp, Artificial Sequence
  ENSG00000116793_51 (sequence is synthesized)
tctcttcctgggctgtgaacaacactgcctggctttgcagtaagggtggcaaaaatgcactccctggccacccagctggtgtctcaataggtcatgtgcacctaagtctactgggctagt

SEQ ID NO: 218739 - DNA, 120 bp, Artificial Sequence
  ENSG00000116793_52 (sequence is synthesized)
ggagtggcaataacagacgatataaggtaggagttgcattgtgtctgagaagatgtggagaggactgtgaacctacttttgtgcaacactgaaaagtatatgcttcctttcagttaattg

SEQ ID NO: 218740 - DNA, 120 bp, Artificial Sequence
  ENSG00000116793_53 (sequence is synthesized)
acatgagtctttgaagaatagactcacattctgagtctgtgagtgagtattttgtcattctacacccttacttagcaagctaaagtcctgaaaaatatgattcctgcattttcttgattt

SEQ ID NO: 218741 - DNA, 120 bp, Artificial Sequence
  ENSG00000116793_54 (sequence is synthesized)
ccagaataatatagcgtattccttaaaagaaagtggtttcatgaaaggtgttactttcaaaaaattaatcttcttttccttttttaaaaaataggattaaaagagtaaaattaatatcta

SEQ ID NO: 218742 - DNA, 120 bp, Artificial Sequence
  ENSG00000116793_55 (sequence is synthesized)
ctttaaggaaaaatgaaaattctattatagagttcactttctgttttagacttaggtcactgtccttaagtatgtatttttaatgcatctacattttttactattttggatgtttggtaa

SEQ ID NO: 218743 - DNA, 120 bp, Artificial Sequence
  ENSG00000116793_56 (sequence is synthesized)
tttttctaacttttcaaaatgggaatacaagtaattctgaagtcctttcaaactgtaagatcgctctaattttagttggtaattattaattgataataaaactatcatatggttgcaaaa

SEQ ID NO: 218744 - DNA, 120 bp, Artificial Sequence
  ENSG00000116809_0 (sequence is synthesized)
cggaagttgcagccgggaagcctgcgaggtcggttccgcccgactctaacatggcggcgccctttgtctgctctggagtgccgtccccggccttctcgcggccgtgatgcacctccctct

SEQ ID NO: 218745 - DNA, 120 bp, Artificial Sequence
  ENSG00000116809_1 (sequence is synthesized)
gcggtggggtccgggacatggcaggtaatgagccggacgaggggagccaagctggagtttacacaggcaaactgtcagaaaagagtagcctgggctgtctggaaatctgagccatggact

SEQ ID NO: 218746 - DNA, 120 bp, Artificial Sequence
  ENSG00000116809_2 (sequence is synthesized)
ttccccagcacagccagcatgtcttggaacagctgaaccagcagcggcagctggggcttctctgtgactgcacctttgtggtggacggtgttcactttaaggctcataaagcagtgctgg

SEQ ID NO: 218747 - DNA, 120 bp, Artificial Sequence
  ENSG00000116809_3 (sequence is synthesized)
cggcctgcagcgagtacttcaagatgctcttcgtggaccagaaggacgtggtgcacctggacatcagtaacgcggcaggcctggggcaggtgctggagtttatgtacacggccaagctga

SEQ ID NO: 218748 - DNA, 120 bp, Artificial Sequence
  ENSG00000116809_4 (sequence is synthesized)
gcctgagccctgagaacgtggatgatgtgctggccgtggccactttcctccaaatgcaggacatcatcacggcctgccatgccctcaagtcacttgctgagccggctaccagccctgggg

SEQ ID NO: 218749 - DNA, 120 bp, Artificial Sequence
  ENSG00000116809_5 (sequence is synthesized)
gaaatgcggaggccttggccacagaaggaggggacaagagagccaaagaggagaaggtggccaccagcacgctgagcaggctggagcaggcaggacgcagcacacccataggccccagca

SEQ ID NO: 218750 - DNA, 120 bp, Artificial Sequence
  ENSG00000116809_6 (sequence is synthesized)
gggacctcaaggaggagcgcggcggtcaggcccagagtgcggccagcggtgcagagcagacagagaaagccgatgcgccccgggagccgccgcctgtggagctcaagccagaccccacga

SEQ ID NO: 218751 - DNA, 120 bp, Artificial Sequence
  ENSG00000116809_7 (sequence is synthesized)
gtggcatggctgctgcagaagctgaggccgctttgtccgagagctcggagcaagaaatggaggtggagcccgcccggaaaggggaagaggagcaaaaggagcaagaggagcaagaggagg

SEQ ID NO: 218752 - DNA, 120 bp, Artificial Sequence
  ENSG00000116809_8 (sequence is synthesized)
agggcgcagggccagctgaggtcaaggaggagggttcccagctggagaacggagaggcccccgaggagaacgagaatgaggagtcagcgggcacagactcggggcaggagctcggctccg

SEQ ID NO: 218753 - DNA, 120 bp, Artificial Sequence
  ENSG00000116809_9 (sequence is synthesized)
aggcccggggcctgcgctcaggcacctacggcgaccgcacggagtccaaggcctacggctccgtcatccacaagtgcgaggactgtgggaaggagttcacgcacacggggaacttcaagc

SEQ ID NO: 218754 - DNA, 120 bp, Artificial Sequence
  ENSG00000116809_10 (sequence is synthesized)
ggcacatccgcatccacacgggggagaagcccttctcgtgccgggagtgcagcaaggccttttccgacccggccgcgtgcaaggcccatgagaagacgcacagccctctgaagccctacg

SEQ ID NO: 218755 - DNA, 120 bp, Artificial Sequence
  ENSG00000116809_11 (sequence is synthesized)
tcttcaccacctcgggcaacctcaagcgccaccagctggtgcacagcggcgagaagccctaccagtgcgactactgcggccgctccttctccgaccccacttccaagatgcgccacctgg

SEQ ID NO: 218756 - DNA, 120 bp, Artificial Sequence
  ENSG00000116809_12 (sequence is synthesized)
agacccacgacacggacaaggagcacaagtgcccacactgcgacaagaagttcaaccaggtagggaacctgaaggcccacctgaagatccacatcgctgacgggcccctcaagtgccgag

SEQ ID NO: 218757 - DNA, 120 bp, Artificial Sequence
  ENSG00000116809_13 (sequence is synthesized)
agtgtgggaagcagttcaccacctcagggaacctgaagcggcaccttcggatccacagcggggagaagccctacgtgtgcatccactgccagcgacagtttgcagaccccggcgctctgc

SEQ ID NO: 218758 - DNA, 120 bp, Artificial Sequence
  ENSG00000116809_14 (sequence is synthesized)
agcggcacgtccgcattcacacaggtgagaagccatgccagtgtgtgatgtgcggtaaggccttcacccaggccagctccctcatcgcccacgtgcgccagcacaccggggagaagccct

SEQ ID NO: 218759 - DNA, 120 bp, Artificial Sequence
  ENSG00000116809_15 (sequence is synthesized)
acgtctgcgagcgctgcggcaagagattcgtccagtccagccagttggccaatcatattcgccaccacgacaacatccgcccacacaagtgcagcgtgtgcagcaaggccttcgtgaacg

SEQ ID NO: 218760 - DNA, 120 bp, Artificial Sequence
  ENSG00000116809_16 (sequence is synthesized)
tgggggacctgtccaagcacatcatcattcacactggagagaagccttacctgtgtgataagtgtgggcgtggcttcaaccgggtagacaacctgcgctcccacgtgaagaccgtgcacc

SEQ ID NO: 218761 - DNA, 120 bp, Artificial Sequence
  ENSG00000116809_17 (sequence is synthesized)
agggcaaggcaggcatcaagatcctggagcccgaggagggcagtgaggtcagcgtggtcactgtggatgacatggtcacgctggctaccgaggcactggcagcgacagccgtcactcagc

SEQ ID NO: 218762 - DNA, 120 bp, Artificial Sequence
  ENSG00000116809_18 (sequence is synthesized)
tcacagtggtgccggtgggagctgcagtgacagccgatgagacggaagtcctgaaggccgagatcagcaaagctgtgaagcaagtgcaggaagaagaccccaacactcacatcctctacg

SEQ ID NO: 218763 - DNA, 120 bp, Artificial Sequence
  ENSG00000116809_19 (sequence is synthesized)
cctgtgactcctgtggggacaagtttctggatgccaacagcctggctcagcatgtgcgaatccacacagcccaggcactggtcatgttccagacagacgcggacttctatcagcagtatg

SEQ ID NO: 218764 - DNA, 120 bp, Artificial Sequence
  ENSG00000116809_20 (sequence is synthesized)
ggccaggtggcacgtggcctgccgggcaggtgctgcaggctggggagctggtcttccgccctcgcgacggggctgagggccagcccgcactggcagagacctcccctacagctcctgaat

SEQ ID NO: 218765 - DNA, 120 bp, Artificial Sequence
  ENSG00000116809_21 (sequence is synthesized)
gtcccccgcctgccgagtgagctggcggcccttctgactgtttatttaaggatggatggcaccctggaaccgggaagggtggcctgttccctagagagaataaattggattattttctaa

SEQ ID NO: 218766 - DNA, 120 bp, Artificial Sequence
  ENSG00000116809_22 (sequence is synthesized)
gcccagagtgcggccagcggtgagtcagatgccaaggacccagccggctgtcctgtcacctcccagcagcctgggcacagggtagtgagggctgccttggggcaggtagcacgggcacct

SEQ ID NO: 218767 - DNA, 120 bp, Artificial Sequence
  ENSG00000116809_23 (sequence is synthesized)
gcacctcttgagcctgtgttacccagaatgacctattgtgtgttccagggggtctgtttcaaccagagcagacacaacagccttggctaggggtgtgctggggcctcccctcctgggtca

SEQ ID NO: 218768 - DNA, 120 bp, Artificial Sequence
  ENSG00000116809_24 (sequence is synthesized)
cccacacccactggccagacaccccacagtgagggggctcagaagacaaactgggggcttggctggggactgagctgactgctgcccacgccccaggctctggtcctaggggtccttttc

SEQ ID NO: 218769 - DNA, 120 bp, Artificial Sequence
  ENSG00000116809_25 (sequence is synthesized)
gaggcacccgtgcagccaccccagagcacctcctgctgtaaaagacagggttgctgggcaaacgagtcattgagggcctcccaccccatccctgcggccccttcccacaaaggcaagaga

SEQ ID NO: 218770 - DNA, 120 bp, Artificial Sequence
  ENSG00000116809_26 (sequence is synthesized)
cttctccgaccccacttccaagatgcgccacctggagacccacgacacggacaaggagcacaagtgcccacactgcgacaagaagttcaaccaggtgtgcggacccctcccggaaccagc

SEQ ID NO: 218771 - DNA, 120 bp, Artificial Sequence
  ENSG00000116809_27 (sequence is synthesized)
gcctggcagccgccggtggccgcagccgcatgcatgccacgtggtggggcgggcggggagcacagccccggcctccaggagctcatcagcttgttcacccaggaaacaggcgcagcgaga

SEQ ID NO: 218772 - DNA, 120 bp, Artificial Sequence
  ENSG00000116809_28 (sequence is synthesized)
gccacttccgcgggggagctcccggttgctctgcggagggcaggccgactcagggcggggtttggtcctgaaaaaatggggtggggcggcttacctctcaccgctgggacctgggacctc

SEQ ID NO: 218773 - DNA, 120 bp, Artificial Sequence
  ENSG00000116809_29 (sequence is synthesized)
gagatcccccaggttacctgcctcctctccacagaggagatggggcgatgcaggcttgccactcagctgttcctaaatccctgcgtcctgctgctgagtggagtggtggggcaggctgcc

SEQ ID NO: 218774 - DNA, 120 bp, Artificial Sequence
  ENSG00000116815_0 (sequence is synthesized)
gaacttagggctgcttgtggctgggcactcgcgcagaggccggcccgacgagccatggttgctgggagcgacgcggggcgggccctgggggtcctcagcgtggtctgcctgctgcactgc

SEQ ID NO: 218775 - DNA, 120 bp, Artificial Sequence
  ENSG00000116815_1 (sequence is synthesized)
tttggtttcatcagctgtttttcccaacaaatatatggtgttgtgtatgggaatgtaactttccatgtaccaagcaatgtgcctttaaaagaggtcctatggaaaaaacaaaaggataaa

SEQ ID NO: 218776 - DNA, 120 bp, Artificial Sequence
  ENSG00000116815_2 (sequence is synthesized)
gttgcagaactggaaaattctgaattcagagctttctcatcttttaaaaatagggtttatttagacactgtgtcaggtagcctcactatctacaacttaacatcatcagatgaagatgag

SEQ ID NO: 218777 - DNA, 120 bp, Artificial Sequence
  ENSG00000116815_3 (sequence is synthesized)
tatgaaatggaatcgccaaatattactgataccatgaagttctttctttatgtgcttgagtctcttccatctcccacactaacttgtgcattgactaatggaagcattgaagtccaatgc

SEQ ID NO: 218778 - DNA, 120 bp, Artificial Sequence
  ENSG00000116815_4 (sequence is synthesized)
ccagagcattacaacagccatcgaggacttataatgtactcatgggattgtcctatggagcaatgtaaacgtaactcaaccagtatatattttaagatggaaaatgatcttccacaaaaa

SEQ ID NO: 218779 - DNA, 120 bp, Artificial Sequence
  ENSG00000116815_5 (sequence is synthesized)
atacagtgtactcttagcaatccattatttaatacaacatcatcaatcattttgacaacctgtatcccaagcagcggtcattcaagacacagatatgcacttatacccataccattagca

SEQ ID NO: 218780 - DNA, 120 bp, Artificial Sequence
  ENSG00000116815_6 (sequence is synthesized)
gtaattacaacatgtattgtgctgtatatgaatggtattctgaaatgtgacagaaaaccagacagaaccaactccaattgattggtaacagaagatgaagacaacagcataactaaatta

SEQ ID NO: 218781 - DNA, 120 bp, Artificial Sequence
  ENSG00000116815_7 (sequence is synthesized)
ttttaaaaactaaaaagccatctgatttctcatttgagtattacaatttttgaacaactgttggaaatgtaacttgaagcagctgctttaagaagaaatacccactaacaaagaacaagc

SEQ ID NO: 218782 - DNA, 120 bp, Artificial Sequence
  ENSG00000116815_8 (sequence is synthesized)
attagttttggctgtcatcaacttattatatgactaggtgcttgctttttttgtcagtaaattgtttttactgatgatgtagatacttttgtaaataaatgtaaatatgtacacaagtga

SEQ ID NO: 218783 - DNA, 120 bp, Artificial Sequence
  ENSG00000116815_9 (sequence is synthesized)
ggtatgtatgctttttaaaacaaaatagtttgaaaacttgcattgttttccaaaggtcagaaaatagtttaaggatgaaaataaagtttgaaattttagacatttgaaaagaaacaaaaa

SEQ ID NO: 218784 - DNA, 120 bp, Artificial Sequence
  ENSG00000116815_10 (sequence is synthesized)
tgtagatgcccattacttgggaagccagattgtactcatctgttggttgccttgtacagtaataagaagtaacatcagcagatatactaaccatagtgtattaagtaccaactgtgtgcc

SEQ ID NO: 218785 - DNA, 120 bp, Artificial Sequence
  ENSG00000116815_11 (sequence is synthesized)
atgcactgcactagccactctctgcatatcgtttcctggaaccctctcaatgagccttgcaggaggagtatcataccccttgcttagagacagcgcatatgagattcatagaagtcaagt

SEQ ID NO: 218786 - DNA, 120 bp, Artificial Sequence
  ENSG00000116815_12 (sequence is synthesized)
gagatatcaaagtcacgttgctagtaagtgatgggctgggatttaaatctaggtctttggactccaagagttatactgttaaccactacaatacactccctccacctcccatcccagaaa

SEQ ID NO: 218787 - DNA, 120 bp, Artificial Sequence
  ENSG00000116815_13 (sequence is synthesized)
aagttggatcagggatagggttcacttcaggagccagggtcagagctgggcctgtagtcacatataaaagataggacacaaacacaattagcagcagtgttggtttaataaaccgccgta

SEQ ID NO: 218788 - DNA, 120 bp, Artificial Sequence
  ENSG00000116815_14 (sequence is synthesized)
gcttggtcattcaagacacagatatgcacttatacccataccattagcagtaattacaacatgtattgtgctgtatatgaatggtattctgaaatgtgacagaaaaccagacagaaccaa

SEQ ID NO: 218789 - DNA, 120 bp, Artificial Sequence
  ENSG00000116819_0 (sequence is synthesized)
agaggaggaagggcgggcgctgggcacccgttgaccgacttttccaagtgcgatcagtgcccgtccgtcctgcctccatggacccgcccgggaacggccaccgctgaggaccccacgccc

SEQ ID NO: 218790 - DNA, 120 bp, Artificial Sequence
  ENSG00000116819_1 (sequence is synthesized)
actaggatcccggctgggtcgcacccagctaccgcaccgtgacctccgcgggctgtgccggctcccggcgcctctgcccgcagcgctcgccgtcgggctagggctccgccgccgccacgc

SEQ ID NO: 218791 - DNA, 120 bp, Artificial Sequence
  ENSG00000116819_2 (sequence is synthesized)
ctcgcgcccggcactcaccgccccatgctggtgcacacctactccgccatggagcgccccgacgggctgggagcagctgccggcggggcccgcctgtcgtctctgccccaggcggcctac

SEQ ID NO: 218792 - DNA, 120 bp, Artificial Sequence
  ENSG00000116819_3 (sequence is synthesized)
ctacgggccggcgcccccgctctgccacacgccggccgccacagctgccgccgaattccagccgccctacttcccgccgccctacccgcagccaccgctgccctacggtcaggcgcccga

SEQ ID NO: 218793 - DNA, 120 bp, Artificial Sequence
  ENSG00000116819_4 (sequence is synthesized)
cagccaccgctgccctacggtcaggcgcccgacgccgccgcagcctttccccacctggcaggggacccatatggcggcctggcgcccctggcgcagccgcagcctcctcaggccgcctgg

SEQ ID NO: 218794 - DNA, 120 bp, Artificial Sequence
  ENSG00000116819_5 (sequence is synthesized)
caccgcccgcccgcgccctgggccttgacccgcgccgtgactatgccactgccgtgccccggctcctgcacggcctggccgacggcgcgcacggcctggcagacgcacctctcggccttc

SEQ ID NO: 218795 - DNA, 120 bp, Artificial Sequence
  ENSG00000116819_6 (sequence is synthesized)
gcacctctcggccttccggggctggcggcggcccccggtctggaggacctgcaggcaatggacgagccgggaatgagcctcctagaccagtccgtgatcaagaaagtgcccatcccctcc

SEQ ID NO: 218796 - DNA, 120 bp, Artificial Sequence
  ENSG00000116819_7 (sequence is synthesized)
aaagccagcagcctctcagccctctccttggccaaagacagcctggtgggcggcatcacaaatcctggtgaggtcttctgctccgtgcccggccggctttcactgctcagctcaacgtcc

SEQ ID NO: 218797 - DNA, 120 bp, Artificial Sequence
  ENSG00000116819_8 (sequence is synthesized)
aagtacaaggtgacggtgggggaggtgcagcggcgactctcgcctcccgagtgcctcaacgcctccctcctggggggtgtcctccgcagggccaagtccaaaaatgggggccggtgtttg

SEQ ID NO: 218798 - DNA, 120 bp, Artificial Sequence
  ENSG00000116819_9 (sequence is synthesized)
aaggagaggccgtgcacctggcccgagacttcggttacgtctgtgagacggagttcccagccaaggcagctgccgagtacctgtgccgacagcacgctgacccgggggagctgcacagcc

SEQ ID NO: 218799 - DNA, 120 bp, Artificial Sequence
  ENSG00000116819_10 (sequence is synthesized)
gcaagagcatgctgctggctgccaagcagatctgcaaggagtttgcagacttgatggctcaggaccgctcaccgctgggcaacagccgcccagcactcatcctggagcccggagtacaga

SEQ ID NO: 218800 - DNA, 120 bp, Artificial Sequence
  ENSG00000116819_11 (sequence is synthesized)
gctgcttgacacactttagcctcatcacccatggcttcggtgggcctgccatctgtgctgccctcactgccttccagaactatttgctggagtcactcaaggggctggacaagatgtttc

SEQ ID NO: 218801 - DNA, 120 bp, Artificial Sequence
  ENSG00000116819_12 (sequence is synthesized)
taagcagtgtgggcagtgggcatggtgaaaccaaggcttcggagaaggatgccaagcatcggaaataactgcttctcccaccccatccctaaggggctcccaggccctgaaatagggact

SEQ ID NO: 218802 - DNA, 120 bp, Artificial Sequence
  ENSG00000116819_13 (sequence is synthesized)
tagctcttgggggtgggcctggaaggactgaaaggtgggattagagtcaggccagaaagagaacattcatccagagatcccagagttggggatctggcttggagtaagggagggtggcct

SEQ ID NO: 218803 - DNA, 120 bp, Artificial Sequence
  ENSG00000116819_14 (sequence is synthesized)
ctctgtggtggtgtgttggtaagttaagggcccaggtatttgtctcatgtgtgcaattttctgacctttgatggttgagaagggtttggacagaaaattgacatgaaaagatctggctca

SEQ ID NO: 218804 - DNA, 120 bp, Artificial Sequence
  ENSG00000116819_15 (sequence is synthesized)
tggggcagagccctttccattagcgtggctgggtggccgtgggtgcttctagaggccaaagcctttgtgtttttcactggtggcaggaggaaaattgataaatcagaggtgctactgagg

SEQ ID NO: 218805 - DNA, 120 bp, Artificial Sequence
  ENSG00000116819_16 (sequence is synthesized)
agttggtgcccctcattccagaatctcctacccccagaaaaggggtgctggaaggaggccccagtggactctttgtacccttcctactctcagagagaagtgggcaggaggggtcctcaa

SEQ ID NO: 218806 - DNA, 120 bp, Artificial Sequence
  ENSG00000116819_17 (sequence is synthesized)
ggaacaaagaagataaagcacaaatcgcagaacttgaatccaggctgctgctcatcatagtcctgttgctgtctgtcctatttatttatgtatgttgtaattaaatttgaaattttaaaa

SEQ ID NO: 218807 - DNA, 120 bp, Artificial Sequence
  ENSG00000116824_0 (sequence is synthesized)
agtctcacttcagttccttttgcatgaagagctcagaatcaaaagaggaaaccaacccctaagatgagctttccatgtaaatttgtagccagcttccttctgattttcaatgtttcttcc

SEQ ID NO: 218808 - DNA, 120 bp, Artificial Sequence
  ENSG00000116824_1 (sequence is synthesized)
aaaggtgcagtctccaaagagattacgaatgccttggaaacctggggtgccttgggtcaggacatcaacttggacattcctagttttcaaatgagtgatgatattgacgatataaaatgg

SEQ ID NO: 218809 - DNA, 120 bp, Artificial Sequence
  ENSG00000116824_2 (sequence is synthesized)
gaaaaaacttcagacaagaaaaagattgcacaattcagaaaagagaaagagactttcaaggaaaaagatacatataagctatttaaaaatggaactctgaaaattaagcatctgaagacc

SEQ ID NO: 218810 - DNA, 120 bp, Artificial Sequence
  ENSG00000116824_3 (sequence is synthesized)
gatgatcaggatatctacaaggtatcaatatatgatacaaaaggaaaaaatgtgttggaaaaaatatttgatttgaagattcaagagagggtctcaaaaccaaagatctcctggacttgt

SEQ ID NO: 218811 - DNA, 120 bp, Artificial Sequence
  ENSG00000116824_4 (sequence is synthesized)
atcaacacaaccctgacctgtgaggtaatgaatggaactgaccccgaattaaacctgtatcaagatgggaaacatctaaaactttctcagagggtcatcacacacaagtggaccaccagc

SEQ ID NO: 218812 - DNA, 120 bp, Artificial Sequence
  ENSG00000116824_5 (sequence is synthesized)
ctgagtgcaaaattcaagtgcacagcagggaacaaagtcagcaaggaatccagtgtcgagcctgtcagctgtccagagaaaggtctggacatctatctcatcattggcatatgtggagga

SEQ ID NO: 218813 - DNA, 120 bp, Artificial Sequence
  ENSG00000116824_6 (sequence is synthesized)
cctcttgatggtctttgtggcactgctcgttttctatatcaccaaaaggaaaaaacagaggagtcggagaaatgatgaggagctggagacaagagcccacagagtagctactgaagaaag

SEQ ID NO: 218814 - DNA, 120 bp, Artificial Sequence
  ENSG00000116824_7 (sequence is synthesized)
gggccggaagccccaccaaattccagcttcaacccctcagaatccagcaacttcccaacatcctcctccaccacctggtcatcgttcccaggcacctagtcatcgtcccccgcctcctgg

SEQ ID NO: 218815 - DNA, 120 bp, Artificial Sequence
  ENSG00000116824_8 (sequence is synthesized)
acaccgtgttcagcaccagcctcagaagaggcctcctgctccgtcgggcacacaagttcaccagcagaaaggcccgcccctccccagacctcgagttcagccaaaacctccccatggggc

SEQ ID NO: 218816 - DNA, 120 bp, Artificial Sequence
  ENSG00000116824_9 (sequence is synthesized)
agcagaaaactcattgtccccttcctctaattaaaaaagatagaaactgtctttttcaataaaaagcactgtggatttctgccctcctgatgtgcatatccgtacttccatgaggtgttt

SEQ ID NO: 218817 - DNA, 120 bp, Artificial Sequence
  ENSG00000116824_10 (sequence is synthesized)
tctgtgtgcagaacattgtcacctcctgaggctgtgggccacagccacctctgcatcttcgaactcagccatgtggtcaacatctggagtttttggtctcctcagagagctccatcacac

SEQ ID NO: 218818 - DNA, 120 bp, Artificial Sequence
  ENSG00000116824_11 (sequence is synthesized)
cagtaaggagaagcaatataagtgtgattgcaagaatggtagaggaccgagcacagaaatcttagagatttcttgtcccctctcaggtcatgtgtagatgcgataaatcaagtgattggt

SEQ ID NO: 218819 - DNA, 120 bp, Artificial Sequence
  ENSG00000116824_12 (sequence is synthesized)
gtgcctgggtctcactacaagcagcctatctgcttaagagactctggagtttcttatgtgccctggtggacacttgcccaccatcctgtgagtaaaagtgaaataaaagctttgactaga

SEQ ID NO: 218820 - DNA, 120 bp, Artificial Sequence
  ENSG00000116830_0 (sequence is synthesized)
gaacttgggggacccagcgaaatggaagaagttaggtgtccagagcacgggactttctgctttcttaagaccggcgtccgcgatggcccgaataaaggaaagagcttctacgtgtgccgg

SEQ ID NO: 218821 - DNA, 120 bp, Artificial Sequence
  ENSG00000116830_1 (sequence is synthesized)
gcagacacgtgcagcttcgtgcgggccaccgacattcctgtttcccattgcttattgcatgaggactttgtggtagagcttcagggtttgcttctgccacaggacaagaaagaatacaga

SEQ ID NO: 218822 - DNA, 120 bp, Artificial Sequence
  ENSG00000116830_2 (sequence is synthesized)
ttgttcttccgatgcattagaagtaaggcagaggggaaacgctggtgtggaagtattccatggcaggatcctgattccaaagaacattctgtatccaataagtctcagcatgcatctgag

SEQ ID NO: 218823 - DNA, 120 bp, Artificial Sequence
  ENSG00000116830_3 (sequence is synthesized)
acatttcatcattcttccaactggctgagaaatccattcaaggtacttgacaagaatcaagaaccagctctctggaaacagctcatcaaaggtgaaggtgaggaaaagaaggctgataag

SEQ ID NO: 218824 - DNA, 120 bp, Artificial Sequence
  ENSG00000116830_4 (sequence is synthesized)
aagcaaagagaaaagggagatcagcttttcgatcaaaagaaagaacagaagcctgaaatgatggagaaagacctctcatctggcctggtaccaaagaaaaaacaatctgtagttcaagag

SEQ ID NO: 218825 - DNA, 120 bp, Artificial Sequence
  ENSG00000116830_5 (sequence is synthesized)
aagaagcaagaagagggagcagagattcagtgtgaggcagagactggaggcacacacaaaagagacttttctgaaattaaatctcaacagtgccaaggtaatgagcttacaagaccatct

SEQ ID NO: 218826 - DNA, 120 bp, Artificial Sequence
  ENSG00000116830_6 (sequence is synthesized)
gcatcttctcaggagaaatcaagtggtaagagtcaagatgtccaaagagaatcagaacctctgagagaaaaggttacccagcttttgcctcaaaatgttcacagtcacaactcaataagc

SEQ ID NO: 218827 - DNA, 120 bp, Artificial Sequence
  ENSG00000116830_7 (sequence is synthesized)
aagccccagaaagggggacccctcaacaaggagtacacgaactgggaggctaaagaaacaaaggcaaaggatggccctagcatacaggccacccagaaaagcctgcctcaggggcatttc

SEQ ID NO: 218828 - DNA, 120 bp, Artificial Sequence
  ENSG00000116830_8 (sequence is synthesized)
caagagcggccggagacccacagtgtgcctgctcctggaggaccagcggctcaggctgcaccagcagcaccagggctttccctgggtgagggccgtgaagctgccacaagcagtgacgac

SEQ ID NO: 218829 - DNA, 120 bp, Artificial Sequence
  ENSG00000116830_9 (sequence is synthesized)
gaggaggaagatgatgttgtttttgtttcctctaagcctgggagccccctactctttgactcgactctggacttagagacgaaggaaaacctccaattccctgatcgaagtgtgcaaaga

SEQ ID NO: 218830 - DNA, 120 bp, Artificial Sequence
  ENSG00000116830_10 (sequence is synthesized)
aaggtgtctcctgcctcaggtgtttccaagaaggtagaaccctcagacccagtagcccggcgtgtctaccttacaacacaactgaaacaaaagaagagcacactggcatcagtgaacatc

SEQ ID NO: 218831 - DNA, 120 bp, Artificial Sequence
  ENSG00000116830_11 (sequence is synthesized)
caggctcttccagacaagggtcagaagttgatcaaacaaatccaggagctggaggaagtactcagtggtcttaccctttccccagagcaaggaactaatgagaagagtaacagtcaagta

SEQ ID NO: 218832 - DNA, 120 bp, Artificial Sequence
  ENSG00000116830_12 (sequence is synthesized)
ccacagcagagtcacttcaccaaaactaccactggccctccccacctggtgcctccccaaccccttcctcgtcgtggtacccaacctgtgggttctctagaactaaagtctgcctgccag

SEQ ID NO: 218833 - DNA, 120 bp, Artificial Sequence
  ENSG00000116830_13 (sequence is synthesized)
gtgactgctggaggatccagtcagtgctatcgaggccatacaaaccaagatcacgttcatgcagtgtggaaaatcacaagtgaagccatcggtcaactgcatcgctcacttgagtcatgt

SEQ ID NO: 218834 - DNA, 120 bp, Artificial Sequence
  ENSG00000116830_14 (sequence is synthesized)
cctggtgagacggttgtggcagaagatcccgccgggctgaaggtccctttgctactacaccagaagcaggcattggcttggttactatggcgagaaagtcagaagccacaaggaggaatt

SEQ ID NO: 218835 - DNA, 120 bp, Artificial Sequence
  ENSG00000116830_15 (sequence is synthesized)
ctggcagatgatatgggcttaggaaaaaccctgacaatgattgcgctcatcctgacccagaagaatcaagagaaaaaggaagaaaaggagaaaagcacagctttgacgtggctctccaaa

SEQ ID NO: 218836 - DNA, 120 bp, Artificial Sequence
  ENSG00000116830_16 (sequence is synthesized)
gatgactcttgtgactttacttcccatggaacactaatcatctgtcctgcctccctgatccatcattggaaaaatgaggtggagaaacgggtgaacagcaacaaactaagagtctatctc

SEQ ID NO: 218837 - DNA, 120 bp, Artificial Sequence
  ENSG00000116830_17 (sequence is synthesized)
taccatgggccaaaccgggattcacgtgccagagtcctctctacatatgacatcgtgatcactacctatagcctcgtggccaaggagattcccacaaacaagcaagaggcagagatccca

SEQ ID NO: 218838 - DNA, 120 bp, Artificial Sequence
  ENSG00000116830_18 (sequence is synthesized)
ggtgcaaacctcaatgtggagggcacctcaacacctttgcttcgaatagcctgggctcgaatcatattggatgaagctcacaatgttaagaatccccgagtgcagacttccatagctgtg

SEQ ID NO: 218839 - DNA, 120 bp, Artificial Sequence
  ENSG00000116830_19 (sequence is synthesized)
tgtaagctacaagcctgtgcccgttgggctgtcactggaacccccattcaaaacaacttattggatatgtattcgctgctgaagtttctccgttgctctccatttgatgagttcaatctg

SEQ ID NO: 218840 - DNA, 120 bp, Artificial Sequence
  ENSG00000116830_20 (sequence is synthesized)
tggaggagtcaggttgacaatggctcaaagaaaggaggagaacggttaagtattttaaccaagagccttttgctgaggagaacaaaagaccagctggactctactggcagacctttggtg

SEQ ID NO: 218841 - DNA, 120 bp, Artificial Sequence
  ENSG00000116830_21 (sequence is synthesized)
atactgccccagcgtaaatttcagttgcaccatttaaagctttctgaagatgaagagactgtttacaatgtgttttttgcaagatcaaggtcagctctgcaatcctatctaaaaagacat

SEQ ID NO: 218842 - DNA, 120 bp, Artificial Sequence
  ENSG00000116830_22 (sequence is synthesized)
gaaagtagaggcaaccaatctggaagaagccctaataatccattcagtagagtggcactggagtttgggtctgaggagcctagacactcggaggcagcagactcaccgagatccagcacc

SEQ ID NO: 218843 - DNA, 120 bp, Artificial Sequence
  ENSG00000116830_23 (sequence is synthesized)
gtccacatactgtcccagttgctgagactccgccagtgttgctgtcatctttctttactgaagtcggccctggatccaatggaactgaagggtgaaggtcttgtcctttccctggaagaa

SEQ ID NO: 218844 - DNA, 120 bp, Artificial Sequence
  ENSG00000116830_24 (sequence is synthesized)
cagctcagtgctttgaccttgtcagaactccgtgactcagagccatcttccactgtttcccttaacggcaccttcttcaagatggagctttttgaaggcatgcgagagagcaccaagatt

SEQ ID NO: 218845 - DNA, 120 bp, Artificial Sequence
  ENSG00000116830_25 (sequence is synthesized)
tcatctctgttggcagaattggaggcaattcaaagaaattcagcatcccaaaagagtgtcattgtctctcagtggaccaacatgctgaaagttgtagcattgcacctgaagaagcatgga

SEQ ID NO: 218846 - DNA, 120 bp, Artificial Sequence
  ENSG00000116830_26 (sequence is synthesized)
ctgacttatgccaccatcgatggctctgtcaatcccaagcagagaatggacttggtagaggcatttaaccactccagaggccctcaggtaatgctaatctctctcttggccggaggtgtt

SEQ ID NO: 218847 - DNA, 120 bp, Artificial Sequence
  ENSG00000116830_27 (sequence is synthesized)
ggtctaaacctgactggaggaaatcacctctttcttttggacatgcactggaatccatcacttgaagatcaagcttgtgaccgaatttaccgagtagggcagcagaaagatgttgtcata

SEQ ID NO: 218848 - DNA, 120 bp, Artificial Sequence
  ENSG00000116830_28 (sequence is synthesized)
cacagatttgtttgtgagggaacagtagaagaaaagatcttacagctccaagaaaaaaagaaagatttggccaaacaagttctatcagggtctggagaatctgtcaccaagctcaccttg

SEQ ID NO: 218849 - DNA, 120 bp, Artificial Sequence
  ENSG00000116830_29 (sequence is synthesized)
gctgacctcagagtcctttttggcatctaacctcctgtggataagggctcagaatagcaccattgctggtttgtattaggatctgggaataacaacctaaccatgagccttgaactctgt

SEQ ID NO: 218850 - DNA, 120 bp, Artificial Sequence
  ENSG00000116830_30 (sequence is synthesized)
tctttgcatttcaatttcaccgtcaagcctttcaccttcctcaaaatgaggcataatcttatccccagaattgaggaggggttgtgttaaccaattagttaaccaattatgttaataatt

SEQ ID NO: 218851 - DNA, 120 bp, Artificial Sequence
  ENSG00000116830_31 (sequence is synthesized)
tatttaatgagtggtatggaaaccaattgatttttttagataaaagaatatgttttagagttggatgattttggaaaacaactctggcagaattgtatataagcttcagtaaagttcaaa

SEQ ID NO: 218852 - DNA, 120 bp, Artificial Sequence
  ENSG00000116830_32 (sequence is synthesized)
ttgtgccactgttttccagcctgggcaatacagtgagaccctgtctcaaaaaaaggaaaaaaaagctcaaaaagttctgtgttgcctttctcttcttagctgatgatgggagaaccagtt

SEQ ID NO: 218853 - DNA, 120 bp, Artificial Sequence
  ENSG00000116830_33 (sequence is synthesized)
actaccttctctaacacaggctccatcctatctcttcatctcttcttgccagtgatgttgcacctgtaaccatctttttatgggtggagcagagagtcaatccctgcagccaccctgcag

SEQ ID NO: 218854 - DNA, 120 bp, Artificial Sequence
  ENSG00000116830_34 (sequence is synthesized)
ccagccatctctgcagttctctcagtgcaggcagttcttcctctcaggctgaagatcaaggagatgctttgtacatgaacagatgctgagtatctgttatcattgtattgtttagtgtca

SEQ ID NO: 218855 - DNA, 120 bp, Artificial Sequence
  ENSG00000116830_35 (sequence is synthesized)
gtgtatcatttagtatttgtatcactgtaccatttagtgttgtatatcactcagtcatttaatattggttatcaccatacagtttaatatttgtatcatttggttcattgtatcgtttag

SEQ ID NO: 218856 - DNA, 120 bp, Artificial Sequence
  ENSG00000116830_36 (sequence is synthesized)
aacatttctatttgtagtatttgtataatatttgtgtcatttttaatagtatttgtatttttacaaatttgcagtatttgtagcatttagtatcattgtttcatttagtatttggtacaa

SEQ ID NO: 218857 - DNA, 120 bp, Artificial Sequence
  ENSG00000116830_37 (sequence is synthesized)
aatactaataatactattggtacaatccaatactaataatactaacagtagtattgatacaatctaataaataatgtgtttgacagtgtagcagaaataatgctatgtgttcaccaaacc

SEQ ID NO: 218858 - DNA, 120 bp, Artificial Sequence
  ENSG00000116830_38 (sequence is synthesized)
cacttccttttcctcccgggcacccagagagactgtatttcccagtttttgctgcagtttgacggggtccatatcaatggactgtggagagaagcgattgatgtaagtcacttctaggtg

SEQ ID NO: 218859 - DNA, 120 bp, Artificial Sequence
  ENSG00000116830_39 (sequence is synthesized)
gccctctaccactttccaaaagatcattcatgctgtttcttccctcctcagcctatgggatgcaaaggaactgatggaagattacaaggccctagggaaggtgaagccactagctcagca

SEQ ID NO: 218860 - DNA, 120 bp, Artificial Sequence
  ENSG00000116830_40 (sequence is synthesized)
gttcttagcctagtttttggccatcagcccttctattagactagtgaagcctcagtcccaggatggctccccatgtacacttccctcctcgccccagctcacctacactggactatgaca

SEQ ID NO: 218861 - DNA, 120 bp, Artificial Sequence
  ENSG00000116830_41 (sequence is synthesized)
tgatcaaggaatctttttttttaagctactgagatttctgtgttgtttacatagcagtttgtaccctaaacaaacacttgagattttatacttcaggaaactattcagatttccttctca

SEQ ID NO: 218862 - DNA, 120 bp, Artificial Sequence
  ENSG00000116830_42 (sequence is synthesized)
ttagcaattgttccaaaaacacttactctgctaatttctgctagaaagaatcacagttcttctaacacagaaacatttctgtcccttgagttgggaaacaagaccctatgttaacccagt

SEQ ID NO: 218863 - DNA, 120 bp, Artificial Sequence
  ENSG00000116830_43 (sequence is synthesized)
cagagtgtggactgaggcattcggagcctatttaagcagaagttttctataaggacaagatttaaaggcttacaaaggtaaagacaatggcctggtgggaagaattctagtctagaacgt

SEQ ID NO: 218864 - DNA, 120 bp, Artificial Sequence
  ENSG00000116830_44 (sequence is synthesized)
agaattctagtctagaacgtttgagatttgactctagttctaggttcatcttagctgggtgtgtaacgttgaaaaaattggccgggtgcagtggctcaggcctgtcatcccagcactttg

SEQ ID NO: 218865 - DNA, 120 bp, Artificial Sequence
  ENSG00000116830_45 (sequence is synthesized)
agagagaaaaaaatccttactttctctacactctgatttcctcatttgtaaggtgggcagttttcagaacttagcagcaataaggtttctgataaaatcaagaagcaaaggaagtaacat

SEQ ID NO: 218866 - DNA, 120 bp, Artificial Sequence
  ENSG00000116830_46 (sequence is synthesized)
tgcctttttgaagttttgctataagattgacataccaaggtaaagattgagtcacctgagaagcagtggctcccaggccagcaagaatgtacaaacctggctctgccatttgctgattga

SEQ ID NO: 218867 - DNA, 120 bp, Artificial Sequence
  ENSG00000116830_47 (sequence is synthesized)
tattaggcaagttgcagattccttggacatctcaatcctttcatctgtaaaatgtgtggattagcatgtatctcatgctccactgggaatttcatagcaaatatatatactacaacatgg

SEQ ID NO: 218868 - DNA, 120 bp, Artificial Sequence
  ENSG00000116830_48 (sequence is synthesized)
ttgaccagatagatcagtaatgtcaactagaaggtattagatgaacattgtcagtctccaatcaagcattgtttaggggagaggaattctttcaggttcaagcattctggcttttagttt

SEQ ID NO: 218869 - DNA, 120 bp, Artificial Sequence
  ENSG00000116830_49 (sequence is synthesized)
ggagagggatgcagggattgtaacttaaaatcttcagatattgaggccattgacaagtaatctactgtaaggtagatgcctcctggtattttaaaacagcttttctaatttctcatgtta

SEQ ID NO: 218870 - DNA, 120 bp, Artificial Sequence
  ENSG00000116830_50 (sequence is synthesized)
ttgtacataagcaaagcaacctagttatgtcttgggtaggtgttcttatagccgtgagatgctactgacttgaggtggatgcagaaaaaaatggaaccactgccttaatgggatggaata

SEQ ID NO: 218871 - DNA, 120 bp, Artificial Sequence
  ENSG00000116830_51 (sequence is synthesized)
tactaaacatgcattcttaaatcctagtgctgggatggattacatgaattacattgtggagctgcatatgtgtctcccctcttccctccctgggggttaggctgggtttgtttggttttt

SEQ ID NO: 218872 - DNA, 120 bp, Artificial Sequence
  ENSG00000116830_52 (sequence is synthesized)
tttgttttgtcctcatgaggcttagcatctaagggagacaggcatgaattaacagaagtggcattctggtatctgtctcagcctcatattcattttagtgtaaatcagtttcgtcaagtc

SEQ ID NO: 218873 - DNA, 120 bp, Artificial Sequence
  ENSG00000116830_53 (sequence is synthesized)
taggtatgacaaggtgggtctttgcaccttctagcgatgggcagcatcccacaacacagtggtctaattgaggtgctgcactatgagtcctgcctgtgttaaccagccttccttcatgtc

SEQ ID NO: 218874 - DNA, 120 bp, Artificial Sequence
  ENSG00000116830_54 (sequence is synthesized)
acaatactgctgctggatttgctttttacatctgcctattgcacctgacttgggcatggatgatatgaggtaataaatgctttgaaaaccatgaagggccacacaagtgctagtgttatt

SEQ ID NO: 218875 - DNA, 120 bp, Artificial Sequence
  ENSG00000116830_55 (sequence is synthesized)
gctgtgggacaaggtctgggaatatgagaaccagcagcagcatgggtgcagctgagaaccagatggtgaacatctgtctccaaagtgcaacattcctgagcaccggatttataaggcatt

SEQ ID NO: 218876 - DNA, 120 bp, Artificial Sequence
  ENSG00000116830_56 (sequence is synthesized)
tcttactcgacagaattgacttcatggaaggtatgtagtttgactttgccttagccatgttgatcaaataggagtattgtgcatgccgcagctagacagagtcctgggccctttaaaaac

SEQ ID NO: 218877 - DNA, 89 bp, Artificial Sequence
  ENSG00000116830_57 (sequence is synthesized)
gcatgccgcagctagacagagtcctgggccctttaaaaaccttgtcagtgactcccattgcaggcccagcgggaggctgaggcaggcag

SEQ ID NO: 218878 - DNA, 120 bp, Artificial Sequence
  ENSG00000116830_58 (sequence is synthesized)
tcataccactgcactccagcctgggccacagagaaagaacggtgattctttctagcagaaattagcagagtaagtgtttttggaacaattgctaatgaaaagaaggaaaaacagaaaaaa

SEQ ID NO: 218879 - DNA, 120 bp, Artificial Sequence
  ENSG00000116830_59 (sequence is synthesized)
ggaaaaacagaaaaaaaaaattttctgtttatgggaggtgacttatttctctatcaatcctgtgagtgatttagcatggcaattcatgaacactgagttgtttccttgctctgattgtct

SEQ ID NO: 218880 - DNA, 120 bp, Artificial Sequence
  ENSG00000116830_60 (sequence is synthesized)
gttgctcaatgaaatggcttttagcagggctcaaaggtgaagccagattctcctgcactaataggataagcatggagacaccagtgttcagtgtggcctctggttgtctgaaattttgct

SEQ ID NO: 218881 - DNA, 120 bp, Artificial Sequence
  ENSG00000116830_61 (sequence is synthesized)
gtcaactctaataccttgaaagaattaggtttccaaagtgggatattgtgctgctgtttgtgatatagcatctagacttaggaaagggcaggaacaatttaaaagcacatctgtaggcac

SEQ ID NO: 218882 - DNA, 120 bp, Artificial Sequence
  ENSG00000116830_62 (sequence is synthesized)
aaagagaattataatagaaattcagaattcctaggcatatgacctagactaaaatgtcttcataactacaaatgaaatcagggtcatttatagtacaaactaccacagaagtcagtagtt

SEQ ID NO: 218883 - DNA, 120 bp, Artificial Sequence
  ENSG00000116830_63 (sequence is synthesized)
aggggatggagatagatatgaaaaaaaaaaaaagcaaacccagcctaactcccagggagggaagaggggcgacagatatgcagctacacaatgtttttactatcttgagttctttttacc

SEQ ID NO: 218884 - DNA, 120 bp, Artificial Sequence
  ENSG00000116830_64 (sequence is synthesized)
cagattccatagctaaatccagatgtattaataggtagagactacttcagaaaggatgagactattttcttgcttaattatccacacagtaattcagaaatgtatattgaacacttttta

SEQ ID NO: 218885 - DNA, 120 bp, Artificial Sequence
  ENSG00000116830_65 (sequence is synthesized)
tatgccaggcactgctgggcactggaaatataaaagtaagcaaaaatgaaaaactatcctgtcctcctgaggcttagcatctaagggagacaggcattagtcaaccccgtgtggctgtga

SEQ ID NO: 218886 - DNA, 120 bp, Artificial Sequence
  ENSG00000116830_66 (sequence is synthesized)
atcagccatgatgctgagtgctacaagagaggactgtgcggctgggagggcttataacaggatttgacctagttagggaagatctgaggaagtgatgaaagaatggaaatcaatatgtaa

SEQ ID NO: 218887 - DNA, 120 bp, Artificial Sequence
  ENSG00000116830_67 (sequence is synthesized)
gagctcacaagtcagagtgagatgtttcttcctatactgcctgcttctaatgagcatccacttcattgaaccacctcttcattgagccaaacctaccatacagggatacattctctggag

SEQ ID NO: 218888 - DNA, 120 bp, Artificial Sequence
  ENSG00000116830_68 (sequence is synthesized)
gaaagttgagcaactattgcatttgggacattagagtatgggtgggctgacaggtatgtgtatgtttattatccaagacagccaaggtgtttatcctgttacaacatcccagaggacaga

SEQ ID NO: 218889 - DNA, 120 bp, Artificial Sequence
  ENSG00000116830_69 (sequence is synthesized)
ggctcttatttgtgactcttttttcttacctgtaacaccagaggcataacgtacatcataatgctgcatcttgttgacgcttcaatgctcacaattcaaaggtgatttctgaagcacttt

SEQ ID NO: 218890 - DNA, 120 bp, Artificial Sequence
  ENSG00000116830_70 (sequence is synthesized)
gttacactggggacagctcctaaatcctcccactctttttttgcctcaccttggagtcttgggctctgttgatcactgactctgccaggtctttcagcaggcaagacagctcagttaaat

SEQ ID NO: 218891 - DNA, 120 bp, Artificial Sequence
  ENSG00000116830_71 (sequence is synthesized)
tgagtttggactccactgtagtgcatgcatgagacagcacccccaatccccaacacccacacacaaactttaaatatttgtaacagaattgttaccattaatattgcttaaaggctaaca

SEQ ID NO: 218892 - DNA, 120 bp, Artificial Sequence
  ENSG00000116830_72 (sequence is synthesized)
cattagccagaacctagatgtcttctggaaattttttattgcaatgttacttcatctacataaagttgtccaatcactgaaacctccaactgaaataaatggtaagctttttgttctcaa

SEQ ID NO: 218893 - DNA, 120 bp, Artificial Sequence
  ENSG00000116830_73 (sequence is synthesized)
ggtcttaccctttccccagagcaaggtaaagtggcttatgcctcagaactccgggtttgcatcgactttacaagagacattcgggaagcccttttaataaagaatgtgttgattcattca

SEQ ID NO: 218894 - DNA, 120 bp, Artificial Sequence
  ENSG00000116830_74 (sequence is synthesized)
tgtccagagcacgggactttctgctttcttaagaccggcgtccgcgatggcccgaataaaggaaagagcttctacgtgtgccgggcagacacgtgcagcttcgtgcgggccaccgagtag

SEQ ID NO: 218895 - DNA, 120 bp, Artificial Sequence
  ENSG00000116830_75 (sequence is synthesized)
gagaaactaatttggagttacaatgggaatcaataaagaaggaaacaaattaagtctccttaatcgaatcacagaatattcaagttgaaaaaggcagctagtcaagatcattagctggcc

SEQ ID NO: 218896 - DNA, 120 bp, Artificial Sequence
  ENSG00000116830_76 (sequence is synthesized)
cttcaatttccaagtagcaatctgaagcctagaggactgaggttaaataacttgcccaaggacatctagctacctagagaccagacctgagttttggtttcacctctgttacttaagagt

SEQ ID NO: 218897 - DNA, 120 bp, Artificial Sequence
  ENSG00000116830_77 (sequence is synthesized)
tgtcaactgatgatagtgctaagagctattattaacagtctgaccctagtttctcactagaaactaggcaagaaggtatctggcaccagcttgtcttaggccagtatagcttaggacagg

SEQ ID NO: 218898 - DNA, 120 bp, Artificial Sequence
  ENSG00000116830_78 (sequence is synthesized)
gatcgacagattttttttctttgaggcttttcaggccacatagttctctgtcacatgatgtgtgtgttttgttttgctttgctttcttttcttaaatccctttaaaactgtaacaataat

SEQ ID NO: 218899 - DNA, 120 bp, Artificial Sequence
  ENSG00000116830_79 (sequence is synthesized)
gggctggatttggcccatggcccatagtttgccatttctgatctagtatgtcagttcctttgagctttagctgtcttctaacaggaatccatcacttgaagatcaagcttgtgaccgaat

SEQ ID NO: 218900 - DNA, 120 bp, Artificial Sequence
  ENSG00000116833_0 (sequence is synthesized)
gctttttcttaactttcactaagggttactgtagtctgatgtgtccttcccaaggccacgaaatttgacaagctgcacttttcttttgctcaatgatttctgctttaagccaaagaactg

SEQ ID NO: 218901 - DNA, 120 bp, Artificial Sequence
  ENSG00000116833_1 (sequence is synthesized)
cctataatttcactaagaatgtcttctaattcagatactggggatttacaagagtctttaaagcacggacttacacctattggtgctgggcttccggaccgacacggatcccccatcccc

SEQ ID NO: 218902 - DNA, 120 bp, Artificial Sequence
  ENSG00000116833_2 (sequence is synthesized)
gcccgcggtcgccttgtcatgctgcccaaagtggagacggaagccctgggactggctcgatcgcatggggaacagggccagatgccggaaaacatgcaagtgtctcaatttaaaatggtg

SEQ ID NO: 218903 - DNA, 120 bp, Artificial Sequence
  ENSG00000116833_3 (sequence is synthesized)
aattactcctatgatgaagatctggaagagctttgtcccgtgtgtggagataaagtgtctgggtaccattatgggctcctcacctgtgaaagctgcaagggattttttaagcgaacagtc

SEQ ID NO: 218904 - DNA, 120 bp, Artificial Sequence
  ENSG00000116833_4 (sequence is synthesized)
caaaataataaaaggtacacatgtatagaaaaccagaactgccaaattgacaaaacacagagaaagcgttgtccttactgtcgttttcaaaaatgtctaagtgttggaatgaagctagaa

SEQ ID NO: 218905 - DNA, 120 bp, Artificial Sequence
  ENSG00000116833_5 (sequence is synthesized)
gctgtaagggccgaccgaatgcgtggaggaaggaataagtttgggccaatgtacaagagagacagggccctgaagcaacagaaaaaagccctcatccgagccaatggacttaagctagaa

SEQ ID NO: 218906 - DNA, 120 bp, Artificial Sequence
  ENSG00000116833_6 (sequence is synthesized)
gccatgtctcaggtgatccaagctatgccctctgacctgaccatttcctctgcaattcaaaacatccactctgcctccaaaggcctacctctgaaccatgctgccttgcctcctacagac

SEQ ID NO: 218907 - DNA, 120 bp, Artificial Sequence
  ENSG00000116833_7 (sequence is synthesized)
tatgacagaagtccctttgtaacatcccccattagcatgacaatgccccctcacggcagcctgcaaggttaccaaacatatggccactttcctagccgggccatcaagtctgagtaccca

SEQ ID NO: 218908 - DNA, 120 bp, Artificial Sequence
  ENSG00000116833_8 (sequence is synthesized)
gacccctataccagctcacccgagtccataatgggctattcatatatggatagttaccagacgagctctccagcaagcatcccacatctgatactggaacttttgaagtgtgagccagat

SEQ ID NO: 218909 - DNA, 120 bp, Artificial Sequence
  ENSG00000116833_9 (sequence is synthesized)
gagcctcaagtccaggctaaaatcatggcctatttgcagcaagagcaggctaaccgaagcaagcacgaaaagctgagcacctttgggcttatgtgcaaaatggcagatcaaactctcttc

SEQ ID NO: 218910 - DNA, 120 bp, Artificial Sequence
  ENSG00000116833_10 (sequence is synthesized)
tccattgtcgagtgggccaggagtagtatcttcttcagagaacttaaggttgatgaccaaatgaagctgcttcagaactgctggagtgagctcttaatcctcgaccacatttaccgacaa

SEQ ID NO: 218911 - DNA, 120 bp, Artificial Sequence
  ENSG00000116833_11 (sequence is synthesized)
gtggtacatggaaaggaaggatccatcttcctggttactgggcaacaagtggactattccataatagcatcacaagccggagccaccctcaacaacctcatgagtcatgcacaggagtta

SEQ ID NO: 218912 - DNA, 120 bp, Artificial Sequence
  ENSG00000116833_12 (sequence is synthesized)
gtggcaaaacttcgttctctccagtttgatcaacgagagttcgtatgtctgaaattcttggtgctctttagtttagatgtcaaaaaccttgaaaacttccagctggtagaaggtgtccag

SEQ ID NO: 218913 - DNA, 120 bp, Artificial Sequence
  ENSG00000116833_13 (sequence is synthesized)
gaacaagtcaatgccgccctgctggactacacaatgtgtaactacccgcagcagacagagaaatttggacagctacttcttcgactacccgaaatccgggccatcagtatgcaggctgaa

SEQ ID NO: 218914 - DNA, 120 bp, Artificial Sequence
  ENSG00000116833_14 (sequence is synthesized)
gaatacctctactacaagcacctgaacggggatgtgccctataataaccttctcattgaaatgttgcatgccaaaagagcataagttacaacccctaggagctctgctttcaaaacaaaa

SEQ ID NO: 218915 - DNA, 120 bp, Artificial Sequence
  ENSG00000116833_15 (sequence is synthesized)
agagattgggggagtggggagggggaagaagaacaggaagaaaaaaagtactctgaactgctccaagtaacgctaattaaaaacttgctttaaagatattgaatttaaaaaggcataata

SEQ ID NO: 218916 - DNA, 120 bp, Artificial Sequence
  ENSG00000116833_16 (sequence is synthesized)
atcaaatacttaatagcaaataaatgatgtatcagggtatttgtattgcaaactgtgaatcaaaggcttcacagccccagaggattccatataaaagacattgtaatggagtggattgaa

SEQ ID NO: 218917 - DNA, 120 bp, Artificial Sequence
  ENSG00000116833_17 (sequence is synthesized)
ctcacagatggataccaacacggtcagaagaaaaacggacagaacggttcttgtatatttaaactgatctccactatgaagaaatttaggaactaatcttattaattaggcttatacagc

SEQ ID NO: 218918 - DNA, 120 bp, Artificial Sequence
  ENSG00000116833_18 (sequence is synthesized)
gggggatttgagcttacaggattcctccatggtaaagctgaactgaaacaattctcaagaatgcatcagctgtacctacaatagcccctccctcttcctttgaaggccccagcacctctg

SEQ ID NO: 218919 - DNA, 120 bp, Artificial Sequence
  ENSG00000116833_19 (sequence is synthesized)
ccctgtggtcaccgaatctgtactaaggacctgtgttcagccacacccagtggtagctccaccaaatcatgaacagcctaattttgagtgtctgtgtcttagacctgcaaacagctaata

SEQ ID NO: 218920 - DNA, 120 bp, Artificial Sequence
  ENSG00000116833_20 (sequence is synthesized)
ttgttttgtctcgtgttcatgatgttaagaaaatgcaggcagtatccctcatcttatgtaagtgttaattaatattaagggaaatgactacaaactttcaaagcaaatgctccatagcta

SEQ ID NO: 218921 - DNA, 120 bp, Artificial Sequence
  ENSG00000116833_21 (sequence is synthesized)
aagcaacttagaccttatttctgctactgttgctgaaatgtggctttggcattgttggatttcataaaaaatttctggcaggaagtcttgttagtatacatcagtctttttcatcatcca

SEQ ID NO: 218922 - DNA, 120 bp, Artificial Sequence
  ENSG00000116833_22 (sequence is synthesized)
agtttgtagttcatttaaaaatacaacattaaacacattttgctaggatgtcaaatagtcacagttctaagtagttggaaacaaaattgacgcatgttaatctatgcaaagagaaaggaa

SEQ ID NO: 218923 - DNA, 120 bp, Artificial Sequence
  ENSG00000116833_23 (sequence is synthesized)
aggatgaggtgatgtattgactcaaggttcattcttgctgcaattgaacatcctcaagagttgggatggaaatggtgatttttacatgtgtcctggaaagatattaaagtaattcaaatc

SEQ ID NO: 218924 - DNA, 120 bp, Artificial Sequence
  ENSG00000116833_24 (sequence is synthesized)
ttccccaaaggggaaaggaagagagtgatactgacctttttaagtcatagaccaaagtctgctgtagaacaaatatgggaggacaaagaatcgcaaattcttcaaatgactattatcagt

SEQ ID NO: 218925 - DNA, 120 bp, Artificial Sequence
  ENSG00000116833_25 (sequence is synthesized)
attattaacatgcgatgccacaggtatgaaagtcttgccttatttcacaattttaaaaggtagctgtgcagatgtggatcaacatttgtttaaaataaagtattaatactttaaagtcaa

SEQ ID NO: 218926 - DNA, 120 bp, Artificial Sequence
  ENSG00000116833_26 (sequence is synthesized)
ataagatatagtgtttacattctttaggtcctgaggggcagggggatctgtgatataacaaaatagcaaaagcggtaatttccttaatgttatttttctgattggtaattatttttaaca

SEQ ID NO: 218927 - DNA, 120 bp, Artificial Sequence
  ENSG00000116833_27 (sequence is synthesized)
gtacttaattattctatgtcgtgagacactaaaatcaaaaacgggaatctcatttagactttaatttttttgagattatcggcggcacaatcactttgtagaaactgtaaaaaataaaag

SEQ ID NO: 218928 - DNA, 120 bp, Artificial Sequence
  ENSG00000116833_28 (sequence is synthesized)
tatctcctagtcccttaattttttcataaatatttctggcttttgagtagtgtatttatattgtatatcatactttcaactgtagacaattatgatgctaatttattgtttcttggtttc

SEQ ID NO: 218929 - DNA, 120 bp, Artificial Sequence
  ENSG00000116833_29 (sequence is synthesized)
acctttgtataagatatagccaagactgaagaaaccaaatatatgtgtttactgtagcatgtcttcaaattagtggaacttagttcagggacatagaagagtcttaatgaattaaaatca

SEQ ID NO: 218930 - DNA, 120 bp, Artificial Sequence
  ENSG00000116833_30 (sequence is synthesized)
ttcacttgattaaatgtctgtaaatcttcatcattcctactgtagtttatttaatatctattgtaaattatgtgacttgtagcttcctctggttttcaagtaaactcaacaaggtggagt

SEQ ID NO: 218931 - DNA, 120 bp, Artificial Sequence
  ENSG00000116833_31 (sequence is synthesized)
cttacctggttttcctttccaagcattgtaaattgtataccaaagatattagttattacttctgtgtgtacaaagaggattattttattatgtttattaatcacctctaatactcatcca

SEQ ID NO: 218932 - DNA, 120 bp, Artificial Sequence
  ENSG00000116833_32 (sequence is synthesized)
catgaagggtacacattaggtaagctgggcgttgactcatgcgcagtctcagtcacccgtgttatcttcgtggctcaaaggacaatgcaaaatcgccgatcagagctcatacccaaagca

SEQ ID NO: 218933 - DNA, 120 bp, Artificial Sequence
  ENSG00000116833_33 (sequence is synthesized)
ttacagagaacagcagcatcattgccctccccagctgaaaaacaagttggctagaagatacatggagaggaatggtgtggtcaacagttaatgaaacggttctatcatgcatgtgtaatg

SEQ ID NO: 218934 - DNA, 120 bp, Artificial Sequence
  ENSG00000116833_34 (sequence is synthesized)
tggatggagacaattataagatttgactataactatttggagggtctttaacattgccaaaaaaacaaatatgttgatttttattttattttattttttattttaagaggcgggatcttg

SEQ ID NO: 218935 - DNA, 120 bp, Artificial Sequence
  ENSG00000116833_35 (sequence is synthesized)
tggccttgaactcctgggctcaagcattcctcctgcctcagcctcccccatagctgggactaggggtgcatgccagcatacctggctacgttgactcttaaaatctatgttctcttattt

SEQ ID NO: 218936 - DNA, 120 bp, Artificial Sequence
  ENSG00000116833_36 (sequence is synthesized)
aaatctatgttctcttattttaaagatacagtgctccccactgaaaattaaacctaaaaaatgtcacatattggtatgttgttaacctggtagattaaatcatgagaatgattagaaaga

SEQ ID NO: 218937 - DNA, 120 bp, Artificial Sequence
  ENSG00000116833_37 (sequence is synthesized)
cgggcaacacagcgggttacatccacactgctgatcacaccaacgacaggagctgataagcaagaaagcgtcacagccagcgtctgttcacccaaggttgacaagtgaagtttctctaat

SEQ ID NO: 218938 - DNA, 120 bp, Artificial Sequence
  ENSG00000116833_38 (sequence is synthesized)
gttgattgttagccgatttgtaacctggcatttacttagcaactgccttatcaattacaggatttgccggtaaaagcagactcaaatataaaggtttttggcttaacttggtttattata

SEQ ID NO: 218939 - DNA, 120 bp, Artificial Sequence
  ENSG00000116833_39 (sequence is synthesized)
gttgctctatgtttgtaaacagacaatctctaatgtctgattatttgtatcacagatctgcagctgccttggacttgaatccatgcaatgtttagagtgtgaagtcagttacttgttgat

SEQ ID NO: 218940 - DNA, 120 bp, Artificial Sequence
  ENSG00000116833_40 (sequence is synthesized)
gttttcttactgtatcaatgaaatacatattgtcatgtcagttcttgccaggaacttctcaacaaaatggaattttttttttcagtatttcaataaatattgatatgcccagcctgataa

SEQ ID NO: 218941 - DNA, 120 bp, Artificial Sequence
  ENSG00000116833_41 (sequence is synthesized)
atagtttgtcatctttttagctgcgaagacgccttcgtgggtctgcgtccggagcaaggcggttacccgatcccggcagtgagccgcgccgcgcgtcgtggcggcctgatttctgtttaa

SEQ ID NO: 218942 - DNA, 120 bp, Artificial Sequence
  ENSG00000116833_42 (sequence is synthesized)
gacttacacctattgataacacagaaaatacaggcacaagaaagatgagagagcagcacacaaccatttcgcatctttttcgtcgggcagaaccgccgcggtgcgcaggcaaggagtcct

SEQ ID NO: 218943 - DNA, 120 bp, Artificial Sequence
  ENSG00000116833_43 (sequence is synthesized)
gcaaggagtccttcccggcagctccgcgcagctccggttccgcgtccggggccgcagctagagcgcgctcgggccggagacgcggactgcgcgcgcacgggggacgcgcgctcgggggct

SEQ ID NO: 218944 - DNA, 120 bp, Artificial Sequence
  ENSG00000116833_44 (sequence is synthesized)
ggcggtcttgggctcctgctgcgcgcagccccagctggccgctgccaaaatagagttgagctgggtcgggagaccacgcacgccgatccctcacagtctcccccacaccccatgggtgaa

SEQ ID NO: 218945 - DNA, 120 bp, Artificial Sequence
  ENSG00000116833_45 (sequence is synthesized)
ttaaagagggtaaggtaggggaaagagacgctgttgcacttttctctgcaaccctggaagaactgtgtttccagctaccgcacgcgcaactcacatcgcaagggaccgaggcggtacact

SEQ ID NO: 218946 - DNA, 120 bp, Artificial Sequence
  ENSG00000116833_46 (sequence is synthesized)
ctgagcgtaaacagagaacacctgcagctctggaatcggtcccaccgcagagggctgggaaccggaggactgtcggtccagcccataaggggctgctggggactaaacctcaagaaaagt

SEQ ID NO: 218947 - DNA, 120 bp, Artificial Sequence
  ENSG00000116833_47 (sequence is synthesized)
caaaataaaccagtggattacttcttttaagctaaatttaggctccttttttaaagactcaactaaaaatgagggagaaagagagagtcttagggagatgattcttagaagtgtgtgtct

SEQ ID NO: 218948 - DNA, 120 bp, Artificial Sequence
  ENSG00000116833_48 (sequence is synthesized)
gatttagttcaaaaggcaaagaaatttatgctgtttagaaaactttgccagtctcatggttctaaaatactttattgtagtaaagtgatatagctgtagaaagacttccatttctaacag

SEQ ID NO: 218949 - DNA, 120 bp, Artificial Sequence
  ENSG00000116833_49 (sequence is synthesized)
tcctaaatattgattttgcttgacttatatatatttaaagcatcgttgttcttgaaagggaatatgacaaactatttcccaaatacattttaacttcagagtatttctgtgctataagtc

SEQ ID NO: 218950 - DNA, 120 bp, Artificial Sequence
  ENSG00000116833_50 (sequence is synthesized)
taaacattctttatccacagacataaaagcctaaattcccaactgtgtgatttcatcttgatttattccaaaataattttaaggattttttgaaatttatatcataaagaccaagaaatc

SEQ ID NO: 218951 - DNA, 89 bp, Artificial Sequence
  ENSG00000116833_51 (sequence is synthesized)
tggccgtaattgtgcttttttttccttttttctttttttgagatggagttacactcttgttgcctgggctggggtgcaatggcacagtc

SEQ ID NO: 218952 - DNA, 63 bp, Artificial Sequence
  ENSG00000116833_52 (sequence is synthesized)
ttgtgcttttttttccttttttctttttttgagatggagttacactcttgttgcctgggctgg

SEQ ID NO: 218953 - DNA, 120 bp, Artificial Sequence
  ENSG00000116833_53 (sequence is synthesized)
tgggattacagatgtgagccaccacgctcagccaaattgtactttcagtaaagtactttactgtttacaaagaacttccatatacatttttttggtcctggtctctgtctttcattttgg

SEQ ID NO: 218954 - DNA, 120 bp, Artificial Sequence
  ENSG00000116833_54 (sequence is synthesized)
gagcatggatgtaactggcctttcatcaatggttcagtagtgttgttttttaaagcctacaacagaaccatctcctatgaattgactatcacctgtctaaatgccctgtttacagcatgt

SEQ ID NO: 218955 - DNA, 120 bp, Artificial Sequence
  ENSG00000116833_55 (sequence is synthesized)
tgtacctgcaagagcaggatatttaaagtactttataattgataattgccattatcaatatgctcacctctttaccatattccaacaggtcttaaaggacttgtattattttttaccgaa

SEQ ID NO: 218956 - DNA, 120 bp, Artificial Sequence
  ENSG00000116833_56 (sequence is synthesized)
gactagctgtgctgggcttccggaccgacacggatcccccatccccgcccgcggtcgccttgtcatgctgcccaaagtggagacggaagccctgggactggctcgatcgcatggggaaca

SEQ ID NO: 218957 - DNA, 80 bp, Artificial Sequence
  ENSG00000116852_0 (sequence is synthesized)
gggaggtggctgccgggtgggaggtgtgtgcgcgtgtgccgcgccgtagggagcggcgggtcgcgccgccggctgtcagc

SEQ ID NO: 218958 - DNA, 120 bp, Artificial Sequence
  ENSG00000116852_1 (sequence is synthesized)
gccgcagccgctgcctcgggcattggcccccagacccccgcctctgatccacgcccagaccctagctccagagggccatggccggccagggggactgctgcgtcaaggtggccgtcagga

SEQ ID NO: 218959 - DNA, 120 bp, Artificial Sequence
  ENSG00000116852_2 (sequence is synthesized)
tccggccccagctgtcgaaggagaagattgagggctgtcacatctgtacctctgttaccccgggagagccccaggtcctgctggggaaggacaaggccttcacctatgactttgtcttcg

SEQ ID NO: 218960 - DNA, 120 bp, Artificial Sequence
  ENSG00000116852_3 (sequence is synthesized)
acctggacacctggcaagaacagatctattccacctgtgtgagcaagctcatcgagggctgcttcgagggctataatgccacggtgctggcctatgggcagacgggggccgggaagacgt

SEQ ID NO: 218961 - DNA, 120 bp, Artificial Sequence
  ENSG00000116852_4 (sequence is synthesized)
acaccatgggcactggctttgacatggcaacgtcggaggaggagcagggcatcatcccgagggccatcgcacacctctttgggggcattgccgagcgcaagcgccgggcacaggagcagg

SEQ ID NO: 218962 - DNA, 120 bp, Artificial Sequence
  ENSG00000116852_5 (sequence is synthesized)
gcgtggctggacctgagttcaaagtcagcgcccagtttctggagctctacaacgaggagatccttgacctgtttgacagcacccgtgaccctgacacccgccaccgcaggtccaacatca

SEQ ID NO: 218963 - DNA, 120 bp, Artificial Sequence
  ENSG00000116852_6 (sequence is synthesized)
agatccacgaggacgcaaacggtggcatctacaccactggcgtcacttctcgcctcatccactcccaggaggagctgatccagtgcctgaagcagggggccctgtcccgcaccacagcca

SEQ ID NO: 218964 - DNA, 120 bp, Artificial Sequence
  ENSG00000116852_7 (sequence is synthesized)
gcacccagatgaacgtgcagagctcacgctcccacgccatcttcaccatccacctgtgccagatgcgcatgtgcacccagcccgacctggtgaatgaggcggtgactgggcttcctgatg

SEQ ID NO: 218965 - DNA, 120 bp, Artificial Sequence
  ENSG00000116852_8 (sequence is synthesized)
gtacacctccctcgagtgagtatgagacactcactgctaagtttcactttgtggacctggccggctcagagcggctgaagcggacaggggctactggcgagcgggccaaggagggcatct

SEQ ID NO: 218966 - DNA, 120 bp, Artificial Sequence
  ENSG00000116852_9 (sequence is synthesized)
ccatcaactgtggcctgctggccttgggcaatgtgatcagcgccttaggggaccagagcaagaaggtggtgcacgttccctacagggactccaagctcactcggctcctccaggattcgc

SEQ ID NO: 218967 - DNA, 120 bp, Artificial Sequence
  ENSG00000116852_10 (sequence is synthesized)
tggggggcaacagccagaccatcatgatcgcctgtgtgagcccctcagaccgagatttcatggagaccctcaacacactcaaatatgccaatcgggcccgcaacatcaagaacaaggtgg

SEQ ID NO: 218968 - DNA, 120 bp, Artificial Sequence
  ENSG00000116852_11 (sequence is synthesized)
tagtgaaccaggacaagaccagccagcaaatcagtgcactgcgggctgagattgctcggctgcagatggagctgatggagtataaggcgggcaagcgagtgataggagaggatggcgctg

SEQ ID NO: 218969 - DNA, 120 bp, Artificial Sequence
  ENSG00000116852_12 (sequence is synthesized)
agggctatagtgatctgttccgagagaatgccatgctacagaaggagaatggggccctgcggctgcgggtgaaagccatgcaggaggccatcgatgccatcaacaaccgcgtcacccagc

SEQ ID NO: 218970 - DNA, 120 bp, Artificial Sequence
  ENSG00000116852_13 (sequence is synthesized)
tcatgagccaggaggccaacctgctgctagccaaggccggcgatggcaatgaggccattggtgcgctgatccagaactacatccgggagatcgaggagctacggactaagcttctagaga

SEQ ID NO: 218971 - DNA, 120 bp, Artificial Sequence
  ENSG00000116852_14 (sequence is synthesized)
gtgaagccatgaacgagtccctgcgccgcagcctctcacgggcctcggctaggagcccctactccctgggtgcttctccagccgccccggccttcgggggcagccctgccagctccatgg

SEQ ID NO: 218972 - DNA, 120 bp, Artificial Sequence
  ENSG00000116852_15 (sequence is synthesized)
aggatgcctcggaggtgatccgcagggccaagcaggacctggagcggctaaagaagaaggaggtcaggcagcggaggaagagccccgagaaggaagccttcaaaaagagggcaaaactcc

SEQ ID NO: 218973 - DNA, 120 bp, Artificial Sequence
  ENSG00000116852_16 (sequence is synthesized)
aacaggagaacagcgaggagacggatgagaacgaggcggaggaggaggaggaagagcgagacgagagtggctgtgaggaggaggaagggcgcgaggatgaagatgaggactcgggcagtg

SEQ ID NO: 218974 - DNA, 120 bp, Artificial Sequence
  ENSG00000116852_17 (sequence is synthesized)
aagagagcctggtggactcagactcagaccccgaggagaaggaggtgaacttccaggcggacctggccgacctgacttgtgagatcgaaatcaagcagaagctgatcgacgagctggaga

SEQ ID NO: 218975 - DNA, 120 bp, Artificial Sequence
  ENSG00000116852_18 (sequence is synthesized)
acagccagcggcggttgcagacgctcaagcaccagtatgaggaaaagctgattctgctgcagaacaagatccgagacacacagctggagcgcgaccgtgtgctgcagaacctcagcacca

SEQ ID NO: 218976 - DNA, 120 bp, Artificial Sequence
  ENSG00000116852_19 (sequence is synthesized)
tggagtgctatactgaggagaaggccaacaagatcaaggcagactatgagaagaggctgcgggagatgaaccgggacctgcagaagctgcaggccgcccagaaagagcacgcccggctgc

SEQ ID NO: 218977 - DNA, 120 bp, Artificial Sequence
  ENSG00000116852_20 (sequence is synthesized)
ttaagaaccagtcgcgctacgagagggagctgaagaagctacaggccgaggtggctgagatgaagaaggccaaggtggccctgatgaagcagatgcgtgaggagcaacagcggcggcggc

SEQ ID NO: 218978 - DNA, 120 bp, Artificial Sequence
  ENSG00000116852_21 (sequence is synthesized)
tagtggagaccaagaggaaccgggagatcgcacagctcaagaaggagcagcggcgacaggagtttcagatccgagctctggagtcccagaagcggcagcaggagatggtcctgaggagga

SEQ ID NO: 218979 - DNA, 120 bp, Artificial Sequence
  ENSG00000116852_22 (sequence is synthesized)
agacccaggaggtttctgcactgaggcgcctggccaagcccatgtctgagcgggtggcagggcgtgcaggactaaagccacccatgctggactctggggctgaggtgtcggccagcacta

SEQ ID NO: 218980 - DNA, 120 bp, Artificial Sequence
  ENSG00000116852_23 (sequence is synthesized)
cctcatctgaggctgaatcaggggcccgctctgtctccagcatcgtgcgccagtggaaccgcaaaatcaaccacttcttgggggaccatcctgcgcccactgtcaatggcacccgtcctg

SEQ ID NO: 218981 - DNA, 120 bp, Artificial Sequence
  ENSG00000116852_24 (sequence is synthesized)
cccgaaagaagttccagaagaagggggccagccagagcttcagtaaggcggcaaggctcaagtggcagtccctggagcgacggatcattgacatcgtcatgcagagaatgaccattgtca

SEQ ID NO: 218982 - DNA, 120 bp, Artificial Sequence
  ENSG00000116852_25 (sequence is synthesized)
acctggaggctgacatggagcggctcatcaagaaaagggaggagctgttcctcctgcaggaggcactgcggaggaagcgggagcggctgcaggctgagagccccgaggaagagaaggggc

SEQ ID NO: 218983 - DNA, 120 bp, Artificial Sequence
  ENSG00000116852_26 (sequence is synthesized)
tgcaggagctggctgaggagatcgaggtgctggcagccaacattgactacatcaatgacggcatcaccgactgccaggccaccatcgtgcagctggaggagaccaaggaggagctggact

SEQ ID NO: 218984 - DNA, 120 bp, Artificial Sequence
  ENSG00000116852_27 (sequence is synthesized)
ccacagacacatccgtggtcatcagctcctgctccctggctgaagcccgcctcctgctagacaacttcctcaaggcatccattgacaaggggctgcaagtggcacaaaaggaagcccaga

SEQ ID NO: 218985 - DNA, 120 bp, Artificial Sequence
  ENSG00000116852_28 (sequence is synthesized)
tccggctgttggagggccgactgaggcagacggatatggcaggctcctcccagaaccatctgctcctggacgccctgcgtgagaaggctgaagctcaccccgagctgcaggccctcatct

SEQ ID NO: 218986 - DNA, 120 bp, Artificial Sequence
  ENSG00000116852_29 (sequence is synthesized)
acaatgtgcagcaggagaatggctacgccagcacagatgaggagatctcagagttctctgagggcagcttctcccagtcattcaccatgaaaggctccaccagccatgacgatttcaagt

SEQ ID NO: 218987 - DNA, 120 bp, Artificial Sequence
  ENSG00000116852_30 (sequence is synthesized)
tcaagagcgagcccaaactgtctgcccaaatgaaagctgtgtcggctgagtgcctgggccccccactggatatctccaccaagaacatcaccaagtccctggcctccctcgttgagatca

SEQ ID NO: 218988 - DNA, 120 bp, Artificial Sequence
  ENSG00000116852_31 (sequence is synthesized)
aagaggacggagtgggcttctctgtccgagacccctattaccgggacagggtctcgcgcaccgtcagtctgcctacccggggcagcactttccctaggcaatctcgagccacagagacgt

SEQ ID NO: 218989 - DNA, 120 bp, Artificial Sequence
  ENSG00000116852_32 (sequence is synthesized)
ccccgctgacgagaaggaagtcctacgaccgagggcagcccattaggtccacagatgtgggattcacacccccatcatcccctcccactcggccccgcaatgaccgcaatgtcttctctc

SEQ ID NO: 218990 - DNA, 120 bp, Artificial Sequence
  ENSG00000116852_33 (sequence is synthesized)
gtctcaccagtaatcagagccaggggtcagcgctggacaagggcatcatctccccggttggaggagccaagggtgcacggacggccccactgcagtgtgtctccatggccgaaggccaca

SEQ ID NO: 218991 - DNA, 120 bp, Artificial Sequence
  ENSG00000116852_34 (sequence is synthesized)
ccaagcccatcctctgcctggatgccacagatgagttgctattcacagggtccaaagaccgaagctgcaagatgtggaacttggttacgggacaggagatcgcagctctaaagggccacc

SEQ ID NO: 218992 - DNA, 120 bp, Artificial Sequence
  ENSG00000116852_35 (sequence is synthesized)
ccaacaacgtggtctccatcaagtactgcagccactcggggcttgtgttctccgtgtccacctcctacatcaaggtgtgggacatccgggactcagccaagtgcattcggactctcacgt

SEQ ID NO: 218993 - DNA, 120 bp, Artificial Sequence
  ENSG00000116852_36 (sequence is synthesized)
cctcgggccaggtgatctcaggggatgcctgtgccgccacatccacccgtgccatcaccagtgctcagggcgagcatcagatcaaccagatcgccctcagcccttcgggcaccatgctgt

SEQ ID NO: 218994 - DNA, 120 bp, Artificial Sequence
  ENSG00000116852_37 (sequence is synthesized)
acgccgcctcgggcaatgccgtccgcatctgggagcttagcaggttccagcctgtcggcaagctgactggccacatcggccctgtgatgtgcctgacggtcacccagacggccagccagc

SEQ ID NO: 218995 - DNA, 120 bp, Artificial Sequence
  ENSG00000116852_38 (sequence is synthesized)
atgacctcgtggtgactggctccaaggaccactacgttaagatgttcgagctgggcgagtgtgtgacgggcaccatcggccccactcacaacttcgagcccccgcactacgatggcatcg

SEQ ID NO: 218996 - DNA, 120 bp, Artificial Sequence
  ENSG00000116852_39 (sequence is synthesized)
agtgtctcgccatccagggagacatcctgttcagtggctcccgagataacggcatcaagaagtgggacctagaccagcaggagctcatccagcaaatccccaatgcgcacaaggactggg

SEQ ID NO: 218997 - DNA, 120 bp, Artificial Sequence
  ENSG00000116852_40 (sequence is synthesized)
gtgtcatcaaggtctggaacgtggacaacttcacacccatcggtgagatcaagggccacgacagtcccatcaatgccatctgcaccaatgccaagcatatcttcacagcctccagtgact

SEQ ID NO: 218998 - DNA, 120 bp, Artificial Sequence
  ENSG00000116852_41 (sequence is synthesized)
gccgggtaaagttgtggaattacgtccctggactcaccccctgccttcctcgccgagtcctggccataaagggccgcgccaccaccctgccctgaccctccccaactctccctgtctcct

SEQ ID NO: 218999 - DNA, 120 bp, Artificial Sequence
  ENSG00000116852_42 (sequence is synthesized)
ctttcattcttcccctctttccttttccctctctttccccacttcgatctgagctgcttcttaacggtatgagattattttactccttcttcttcctttcccttcctgtcctgcctggcc

SEQ ID NO: 219000 - DNA, 120 bp, Artificial Sequence
  ENSG00000116852_43 (sequence is synthesized)
tagagaggtgccctgcctgtccctcctgcacccaccgtccttttccaagcatgaacagtgggacaggccccaggagatgggtgccagggagcagaagggggagccttcaggcctggacaa

SEQ ID NO: 219001 - DNA, 120 bp, Artificial Sequence
  ENSG00000116852_44 (sequence is synthesized)
aacgaaacacccccccaaaaaaagaaaacccatgacaaagctcccctgggggcctctgagtgcacaggcctctccatctgcccagcaccccaccacctgcagtccacctccccgtaagcc

SEQ ID NO: 219002 - DNA, 120 bp, Artificial Sequence
  ENSG00000116852_45 (sequence is synthesized)
atgcttgcctcccagccccaaccacatttggggagtttggggaatccagttcatcctctacttttgggggcagccagccaagcccactgcaagagctgaccggcacccctccactttgtc

SEQ ID NO: 219003 - DNA, 120 bp, Artificial Sequence
  ENSG00000116852_46 (sequence is synthesized)
ctccaccccagtgacctgacggtgaagttctggagtgtccggcggttaccccacagcggcccaccctaggagtgaggtcagagggatgcccccggaccctcgaccccagcagcctggaca

SEQ ID NO: 219004 - DNA, 120 bp, Artificial Sequence
  ENSG00000116852_47 (sequence is synthesized)
ccatggaagggaagctgtgacccggccgatggggccagctgctctggggacagagggcgtggccccctctcctgccctcctccctctcccttggccttcccacaggacactgttccctca

SEQ ID NO: 219005 - DNA, 120 bp, Artificial Sequence
  ENSG00000116852_48 (sequence is synthesized)
tccctcccctgcctctcaggagcctctgggtgagagagaggctggggaggaaattaagctgtgaagccaaagggcattatcccttcttgttcccctcctggcagtcgtggccacattgtc

SEQ ID NO: 219006 - DNA, 120 bp, Artificial Sequence
  ENSG00000116852_49 (sequence is synthesized)
tcctgctgaaccggctctgcccctttctcaggcctttggcccagtggtggagccctgtggggaggtgcagcagcctggccccatcccacccttccgaggagctggcctccccgcttctcc

SEQ ID NO: 219007 - DNA, 120 bp, Artificial Sequence
  ENSG00000116852_50 (sequence is synthesized)
cagcccagcctctagagccactgcacctgcctctgagcccaaaaagataagtcctcaggtagctaaggaaaccaggtgtgggcggctgggccttgcagctaacccttaaccctctggcaa

SEQ ID NO: 219008 - DNA, 120 bp, Artificial Sequence
  ENSG00000116852_51 (sequence is synthesized)
cccgcagatagccccaactggccccaacagttccctggggtcccttttggatggggccaaggtggagctgctagaaagattcctttggggagatggtcagaaatacttcagttatttatt

SEQ ID NO: 219009 - DNA, 120 bp, Artificial Sequence
  ENSG00000116852_52 (sequence is synthesized)
attttgttatttttattttttgctgttgcctcctggaaacggacttgaagtttcttcccctatattctttccctcagctcttgggggccagaaatcccaaagggagtccgctgccccggc

SEQ ID NO: 219010 - DNA, 120 bp, Artificial Sequence
  ENSG00000116852_53 (sequence is synthesized)
cctccagggccgcctcctctgtttgctttgcagaggagggaactgctccttcgactctgcagctcaggcctgtccccgacacagcccccagggagtcttctagctacccctggcctctag

SEQ ID NO: 219011 - DNA, 120 bp, Artificial Sequence
  ENSG00000116852_54 (sequence is synthesized)
gccgcctgacgctcagtgccttcctccgttccggggcctggcacccgtgccgggcagccttacaccagccatgcccgcggcaccacatgtgtcttctcactcgcgaggtcttgtgcccag

SEQ ID NO: 219012 - DNA, 120 bp, Artificial Sequence
  ENSG00000116852_55 (sequence is synthesized)
cgcccccgggaaggcgggggcgctcaccccacagcccaggccccggggttctgccccacagtcctgcgtgggccacgtaggaagcagcatgggggctgtgtctgctgggaggtggcttgg

SEQ ID NO: 219013 - DNA, 120 bp, Artificial Sequence
  ENSG00000116852_56 (sequence is synthesized)
atggggaggacagcccggcaccctgacccccgcccctccccagccctgcagtcccccactgggccggggagtctctccagcttctctctctctggttattcaggagacacattttcggcc

SEQ ID NO: 219014 - DNA, 120 bp, Artificial Sequence
  ENSG00000116852_57 (sequence is synthesized)
ttaaaactggcatggagcgcaggccctcccttgcagaaaattatcaaggaagagggagttggcagagtttctctgccccggggctggggacgcggagctccggggaaattgttaaatcag

SEQ ID NO: 219015 - DNA, 120 bp, Artificial Sequence
  ENSG00000116852_58 (sequence is synthesized)
tgttctggcgccccctgttgggggaactctggaattacaggagtgggccttgggggggactgagctccatccctctcccccgccccacccccacccaaagttgcccaccctgtttttccg

SEQ ID NO: 219016 - DNA, 120 bp, Artificial Sequence
  ENSG00000116852_59 (sequence is synthesized)
ttgcatcgctggtcttgtgcttcccgcttcagtctgggagccaagagccagccccacctcccttcagaggacgcagtgacttttggactttccagaggtggttctgtgtttctgcccttg

SEQ ID NO: 219017 - DNA, 120 bp, Artificial Sequence
  ENSG00000116852_60 (sequence is synthesized)
gctcctctccgtcttgggctggggcacttggagccctctccatgtggcgcccagtgttggggggaggcaggctccagtggaggctgagtgaggcctggtcccttccccgtgccctcctcg

SEQ ID NO: 219018 - DNA, 120 bp, Artificial Sequence
  ENSG00000116852_61 (sequence is synthesized)
gagctgccacagaggctaagacggctgtcctgctggtgctggccctgctggatgtggtattgaagtctggggcagctgatagcaggaaggagacccccttggatgctggtctcctgggac

SEQ ID NO: 219019 - DNA, 120 bp, Artificial Sequence
  ENSG00000116852_62 (sequence is synthesized)
ctgaacagtctgtcagcaatggctggaaatccttcttcctctggccaccccgggggtgccgggcaacccccttagctctaagatgtggccacaaatctcttcccactcctccccgccaac

SEQ ID NO: 219020 - DNA, 120 bp, Artificial Sequence
  ENSG00000116852_63 (sequence is synthesized)
ctgaacagaaagttttgaccttgcaacctgtaagaaagaatccgtccgcatgactgtttacaagcgatagaaacacgtaagactctgtccccttgagctcccacccccgggccggggatg

SEQ ID NO: 219021 - DNA, 120 bp, Artificial Sequence
  ENSG00000116852_64 (sequence is synthesized)
ccccacctggggtgactgcactgtagctgcaaggcgtgttcttgcacgaagtgtgatcttatggccctgcgagaggtgctcatcatcatgcccattttctgctgtttctgatgggtcagc

SEQ ID NO: 219022 - DNA, 120 bp, Artificial Sequence
  ENSG00000116852_65 (sequence is synthesized)
tacctcacggcggggccagctctgctgtcctggcaagtgtcattgactctctaaacttgaagtccttcaggagccctgagcccaacatccatgagacaccccgagttgtgcttcatgaga

SEQ ID NO: 219023 - DNA, 120 bp, Artificial Sequence
  ENSG00000116852_66 (sequence is synthesized)
gttggattctctgcccactctttcagggatgtccaaggtccatgttagggggcaggcccccagctccactcactgcacaagcaccctaaatgttggaagcacaaaatggttgtgatttga

SEQ ID NO: 219024 - DNA, 120 bp, Artificial Sequence
  ENSG00000116852_67 (sequence is synthesized)
gcacaatggcagggtcccgcaggcagacttgacaggcccaggcccgggaggatccccccacgttggctctgtccaaagtgagattgggggtgcctgtgtctgggacagggggctgccctt

SEQ ID NO: 219025 - DNA, 120 bp, Artificial Sequence
  ENSG00000116852_68 (sequence is synthesized)
gctcagaccaggccttggctcatggcttgtcctaattctgggactcgtcatcttacttcttgcccttctgtgcccatcttaagactggaggctgagccttgtcaggcccagccacatctt

SEQ ID NO: 219026 - DNA, 120 bp, Artificial Sequence
  ENSG00000116852_69 (sequence is synthesized)
tacgccatgggaccaggagtaaagcgctctctaaaccccgcaccccaaatctctaaacgcctgagttcaggctgagtcctagccctagtgagcctgaagagcttggactgattcccagtc

SEQ ID NO: 219027 - DNA, 120 bp, Artificial Sequence
  ENSG00000116852_70 (sequence is synthesized)
tcctgggtcaagccccactttgtgctttcgaagcttatgagcgggttccctggatagaaggagtcttccatccccactgcccttgggcctcttcagcatagtcctgtgccagggccctgt

SEQ ID NO: 219028 - DNA, 120 bp, Artificial Sequence
  ENSG00000116852_71 (sequence is synthesized)
cctcactatcagtcagttcagtatttgctttcacgtgagtggcggactcttctgaagcagccagaactctcaaaggcagcgcatggagttgccttgcgagatttccaaggaaggaggaaa

SEQ ID NO: 219029 - DNA, 120 bp, Artificial Sequence
  ENSG00000116852_72 (sequence is synthesized)
gattaacaggcggagcctggcacacccaagcctttgaggtggtcagagtgccaccttcagccccttgggaagggacagcggtgggtctgggagtggcctcaccctggattcagcctagga

SEQ ID NO: 219030 - DNA, 120 bp, Artificial Sequence
  ENSG00000116852_73 (sequence is synthesized)
atctcttcaccctcagctgtccagccctgctgcctgtctggggatgtgtggcctgggcagagggcagtttaaagcacaaaaccacatggggaaaacacaaggttgcggggactttctcat

SEQ ID NO: 219031 - DNA, 120 bp, Artificial Sequence
  ENSG00000116852_74 (sequence is synthesized)
gtgcctgatgtggtggagggagacaccagcaggtggctgcagtgacgttagggaacataacacttctttgccctgctagctctcagctctggggggcatcccccgatgtggtctgggctg

SEQ ID NO: 219032 - DNA, 120 bp, Artificial Sequence
  ENSG00000116852_75 (sequence is synthesized)
ggagcaggcatatcccctggttgttgcctgtgcctggtctgttcaccatcgtgtttgtgtgggcagagcctgccctgcaggagcagtgactttcttcccactgtgtgtcccggacctgtg

SEQ ID NO: 219033 - DNA, 120 bp, Artificial Sequence
  ENSG00000116852_76 (sequence is synthesized)
gtatgtgtccctttgccatcccaaacaggcaactgcttgctgctctccttgcttggcatagcctcctggtcagtggccaatgccccacaggccttcctgggcctggccctcctctcctga

SEQ ID NO: 219034 - DNA, 120 bp, Artificial Sequence
  ENSG00000116852_77 (sequence is synthesized)
ctcccagatccttccctgccctcttgtgtgcaaggacagattttgcagggaaagttctgtttcttctttgatacctttgttctgtcccctgccccatccccagcactcatgatcttgaag

SEQ ID NO: 219035 - DNA, 120 bp, Artificial Sequence
  ENSG00000116852_78 (sequence is synthesized)
cccctatcacactctagttcagtcctgtgaaccatgtcctgagggccttgcagggaagtaggaaatagaaactcctccacaaagagccgaggatcagagaagacccctgagatgaatcag

SEQ ID NO: 219036 - DNA, 120 bp, Artificial Sequence
  ENSG00000116852_79 (sequence is synthesized)
ggccctgccctgcccaccaactcttttctagcaatcatgtcctgcccaggctgcaggcttcattaggctcctgctgtcctccatgatgtgactagcacaaggtgtatatatgttttgtac

SEQ ID NO: 219037 - DNA, 120 bp, Artificial Sequence
  ENSG00000116852_80 (sequence is synthesized)
ctctgccgatggctgtacatagtgtatgaaagttatttaagccccatgttgtacatttctgttcctagattggatgtgtgtgttctaagaagttgtcataaataaaacctgaatgaccaa

SEQ ID NO: 219038 - DNA, 120 bp, Artificial Sequence
  ENSG00000116852_81 (sequence is synthesized)
gtgggtcatcagccccagcacccacacagctcagtctcagacccctccaaggccctgcagtcctacacctgctgagtcctccttggacatcttgccaattagcccttcactctcaggcgt

SEQ ID NO: 219039 - DNA, 120 bp, Artificial Sequence
  ENSG00000116852_82 (sequence is synthesized)
ctcaccctaacttcctcagcatccctcccacctccctattaccatcatccactttggacatgactcttgagcatcagttgtgtgccaggcatgctgcttactattagggactcacccatg

SEQ ID NO: 219040 - DNA, 120 bp, Artificial Sequence
  ENSG00000116852_83 (sequence is synthesized)
tgaatcaagcatagtctgagccctcaagattttagaatactaagtccaagaaagaagggctccccagcttttgttgcatagatcttgtgcacagggcagacactctccagggtgttttca

SEQ ID NO: 219041 - DNA, 120 bp, Artificial Sequence
  ENSG00000116852_84 (sequence is synthesized)
tatctgctgaatgtgttgtgttggaacaggtaagactgctagactggcacagaatcgttgatagaggggcccacaggagtatccagtgtgctgcagaggggcagaggagagagttggcct

SEQ ID NO: 219042 - DNA, 120 bp, Artificial Sequence
  ENSG00000116852_85 (sequence is synthesized)
tacttgcatggatggtcagagagggcctcatggaaaaaggggccttttatatggattttgaagaatgaatgaggtaacagcaaaatgagatgggacagccattctaggtaaagaacaagc

SEQ ID NO: 219043 - DNA, 120 bp, Artificial Sequence
  ENSG00000116852_86 (sequence is synthesized)
taagacagaagtcaccaattggtagcccatggcccaaatctggcacatggatgagtttaggtttggcttgcacttgttttaaaagaatacaacgtagttgtcaacctttctgaaaatcag

SEQ ID NO: 219044 - DNA, 120 bp, Artificial Sequence
  ENSG00000116852_87 (sequence is synthesized)
ggagtttcagttttgctagaaaattttcaagatctaacaactcatggtaccaagttggctggagaggcataggggctgccccttctagactgagtctgggactctcttagttccagtctc

SEQ ID NO: 219045 - DNA, 120 bp, Artificial Sequence
  ENSG00000116852_88 (sequence is synthesized)
taccactccctattgtcttacaaccagcctgactcatttatgccaactgcctggcagagagggttttgacccttggactagactttatggagatatgaaaatacactgtggaaagttagg

SEQ ID NO: 219046 - DNA, 120 bp, Artificial Sequence
  ENSG00000116852_89 (sequence is synthesized)
tcaagtaagattgtgagaggccttcagtggctggttacaaaatttggactttttattgtcaaggagaactgtgtaaggtttttgatcactgggggccagtagctgtgttttaggaaacct

SEQ ID NO: 219047 - DNA, 120 bp, Artificial Sequence
  ENSG00000116852_90 (sequence is synthesized)
ggggcaggggagactggtgatgcgccatatccaggggaaggccagggcgctggcagagggaggggcatcatcagccccttacccccccaaccgcgagctctgctgcctgactgctcccct

SEQ ID NO: 219048 - DNA, 120 bp, Artificial Sequence
  ENSG00000116852_91 (sequence is synthesized)
caacgggctaggactccctcccccgacatccaccccagagtatcaggtggactaagccagccagtcaattcatagttcaactcatttatgcattttttttcacttgattttaaaacattt

SEQ ID NO: 219049 - DNA, 120 bp, Artificial Sequence
  ENSG00000116852_92 (sequence is synthesized)
ttgtatggcacaagtaatacatgaacacatccttcttgttcaacatgcaaacaatacatcactatatgaagtgaaagattaaaatcgcctctccctgaaccctccaccccaagccctctc

SEQ ID NO: 219050 - DNA, 120 bp, Artificial Sequence
  ENSG00000116852_93 (sequence is synthesized)
tacttctcagaaggaacctctatgagcagcttggtgtgtattttcccacacctttctcagtatttgtttcaagtatgaatatgtattcatatacattcttaaatgtgtgtatgatataga

SEQ ID NO: 219051 - DNA, 120 bp, Artificial Sequence
  ENSG00000116852_94 (sequence is synthesized)
ctactttttctatgtatgagattatatatattgctctaagacttccctttttcatttagcattatgttttataaatctttccatattaaacctacttctggttcacgcctgtaatcccag

SEQ ID NO: 219052 - DNA, 120 bp, Artificial Sequence
  ENSG00000116852_95 (sequence is synthesized)
tgcctgtagttcatgttacttgggaggctgagatggaaggattgcctgagcccgggaggctgaggctgcagtcagctgtgactctagcctgggcgacagagcaagaccttggctctaacc

SEQ ID NO: 219053 - DNA, 120 bp, Artificial Sequence
  ENSG00000116857_0 (sequence is synthesized)
gggtcttttgcggctgcagcgggcttgtaggttcgtggacgcggcattgggggaggggacgggggtcgcggggctattgggggtcccagtccggcttaagacctctgggcgtggtgggca

SEQ ID NO: 219054 - DNA, 120 bp, Artificial Sequence
  ENSG00000116857_1 (sequence is synthesized)
ccggccttcgccgtcggagcaggggtcccagactcgcacccaaaagttcccgtcgggcccgagcggggaggagctgcggggcgggcagaggcggagatggcggagggcggtgggacgtga

SEQ ID NO: 219055 - DNA, 120 bp, Artificial Sequence
  ENSG00000116857_2 (sequence is synthesized)
tgcgcgggtcagagccgggccttgagaaggaactggaggcccctggcagcggtgtcccctcgaggacccctctgccgggctcaccaggtggctggcggagagccggagagttgggcggga

SEQ ID NO: 219056 - DNA, 120 bp, Artificial Sequence
  ENSG00000116857_3 (sequence is synthesized)
gggaagcagggtttggcgaccaggtttagcaggccttggaatcctggagcccagcccccaaccccattcccacttggccggatggttaagggcctagcgtgctggctgcggtgtggccac

SEQ ID NO: 219057 - DNA, 120 bp, Artificial Sequence
  ENSG00000116857_4 (sequence is synthesized)
cttccccttctccgactccgtatctctttttccaggtgtccggctttgctggcccagcaagcctgataagcatgaagctcttatctttggtggctgtggtcgggtgtttgctggtgcccc

SEQ ID NO: 219058 - DNA, 120 bp, Artificial Sequence
  ENSG00000116857_5 (sequence is synthesized)
cagctgaagccaacaagagttctgaagatatccggtgcaaatgcatctgtccaccttatagaaacatcagtgggcacatttacaaccagaatgtatcccagaaggactgcaactgcctgc

SEQ ID NO: 219059 - DNA, 120 bp, Artificial Sequence
  ENSG00000116857_6 (sequence is synthesized)
acgtggtggagcccatgccagtgcctggccatgacgtggaggcctactgcctgctgtgcgagtgcaggtacgaggagcgcagcaccaccaccatcaaggtcatcattgtcatctacctgt

SEQ ID NO: 219060 - DNA, 120 bp, Artificial Sequence
  ENSG00000116857_7 (sequence is synthesized)
ccgtggtgggtgccctgttgctctacatggccttcctgatgctggtggaccctctgatccgaaagccggatgcatatactgagcaactgcacaatgaggaggagaatgaggatgctcgct

SEQ ID NO: 219061 - DNA, 120 bp, Artificial Sequence
  ENSG00000116857_8 (sequence is synthesized)
cagcggtggaagctgcaggtgcaggagcagcggaagacagtcttcgatcggcacaagatgctcagctagatgggctggtgtggttgggtcaaggccccaacaccatggctgccagcttcc

SEQ ID NO: 219062 - DNA, 120 bp, Artificial Sequence
  ENSG00000116857_9 (sequence is synthesized)
aggctggacaaagcagggggctacttctcccttccctcggttccagtcttccctttaaaagcctgtggcatttttcctccttctccctaactttagaaatgttgtacttggctattttga

SEQ ID NO: 219063 - DNA, 120 bp, Artificial Sequence
  ENSG00000116857_10 (sequence is synthesized)
ttagggaagagggatgtggtctctgatctctgttgtcttcttgggtctttggggttgaagggagggggaaggcaggccagaagggaatggagacattcgaggcggcctcaggagtggatg

SEQ ID NO: 219064 - DNA, 120 bp, Artificial Sequence
  ENSG00000116857_11 (sequence is synthesized)
cgatctgtctctcctggctccactcttgccgccttccagctctgagtcttgggaatgttgttacccttggaagataaagctgggtcttcaggaactcagtgtctgggaggaaagcatggc

SEQ ID NO: 219065 - DNA, 120 bp, Artificial Sequence
  ENSG00000116857_12 (sequence is synthesized)
ccagcattcagcatgtgttcctttctgcagtggttcttatcaccacctccctcccagccccagcgcctcagccccagccccagctccagccctgaggacagctctgatgggagagctggg

SEQ ID NO: 219066 - DNA, 120 bp, Artificial Sequence
  ENSG00000116857_13 (sequence is synthesized)
ccccctgagcccactgggtcttcagggtgcactggaagctggtgttcgctgtcccctgtgcacttctcgcactggggcatggagtgcccatgcatactctgctgccggtcccctcacctg

SEQ ID NO: 219067 - DNA, 120 bp, Artificial Sequence
  ENSG00000116857_14 (sequence is synthesized)
cacttgaggggtctgggcagtccctcctctccccagtgtccacagtcactgagccagacggtcggttggaacatgagactcgaggctgagcgtggatctgaacaccacagcccctgtact

SEQ ID NO: 219068 - DNA, 120 bp, Artificial Sequence
  ENSG00000116857_15 (sequence is synthesized)
tgggttgcctcttgtccctgaacttcgttgtaccagtgcatggagagaaaattttgtcctcttgtcttagagttgtgtgtaaatcaaggaagccatcattaaattgttttatttctctca

SEQ ID NO: 219069 - DNA, 120 bp, Artificial Sequence
  ENSG00000116857_16 (sequence is synthesized)
tcaccgctgctccctgtttggccgggagggaacttcctggcatggggacctcatcagatacaacttcctaatccctcgtgtttcccccagtcctcctacctaggaggctcccctcaactt

SEQ ID NO: 219070 - DNA, 120 bp, Artificial Sequence
  ENSG00000116857_17 (sequence is synthesized)
tttctgttccagtttgtagcatttttctgcttgtcctttgaagagtctataaatagcattggaaaataattctcatatttaaaggcactgctgggtcctccatcaggtttctcctttcga

SEQ ID NO: 219071 - DNA, 120 bp, Artificial Sequence
  ENSG00000116857_18 (sequence is synthesized)
ggcacatttagggggcggtggtcttcactgctgtccttcctgcctattccagggagccctgtgctgtagctcctctgtgttctcaccactcagggaaaaagcagctgtctgtccttcact

SEQ ID NO: 219072 - DNA, 120 bp, Artificial Sequence
  ENSG00000116857_19 (sequence is synthesized)
cccagccagtgccctgtgcagacccaactcctttcatccacctgaggcagcccctcctgcaactgtcattctccttctctgaacttgctccagtgggcctcaccctccagggaccagatg

SEQ ID NO: 219073 - DNA, 120 bp, Artificial Sequence
  ENSG00000116857_20 (sequence is synthesized)
gcggtgccccaatcaggtgggacattggtccagtggaacttggctattggctgagcggggcacccagcttgaaagtcctgaggttctttttttcactcttcttcacagtctaggtagggc

SEQ ID NO: 219074 - DNA, 120 bp, Artificial Sequence
  ENSG00000116857_21 (sequence is synthesized)
agggctgagatcagaagccggcaatggccaggcattgtggaattaggaaaagcatttgagagggagtcagcaagtctgggtttgagtcacacctccaccatctggtagccttgggatcac

SEQ ID NO: 219075 - DNA, 120 bp, Artificial Sequence
  ENSG00000116857_22 (sequence is synthesized)
aggtgatctagcccagcagttctcaatcagatgattacagcccccccagggggcatttagaggtgggtgaaggtgcttttgtggtcccaataacaggtgtattaccaacactgttacagg

SEQ ID NO: 219076 - DNA, 120 bp, Artificial Sequence
  ENSG00000116857_23 (sequence is synthesized)
gaccatggatgctaaatgtcccacccaaaatcccagagcacccacattgagaaacattgaatttgcctcattaaatctgtcttttctgtaaaaacaaaatgactccagcttgtgaagcac

SEQ ID NO: 219077 - DNA, 120 bp, Artificial Sequence
  ENSG00000116857_24 (sequence is synthesized)
tgtgtatgtaagagattcgtggagttgttgttctacccttggctttcccctccctgcagaggggctgatgggagggcaggcgtgaccttcacccccagcacacaccttcttaccagccct

SEQ ID NO: 219078 - DNA, 120 bp, Artificial Sequence
  ENSG00000116857_25 (sequence is synthesized)
agccactctgctcaggggcatgccatgagtgggccagcgcgccccatccgtcttgctctccacaggagcaatgagcccaccagcccaggtttacttttcctggccccagctttccagcct

SEQ ID NO: 219079 - DNA, 120 bp, Artificial Sequence
  ENSG00000116857_26 (sequence is synthesized)
ctccacagcctgttcttccttgctcttagtttctgattgctttccacccttcatcatgaactcttctacagccagggaggcccttgtgttcccatctctaccccgggagcctctcggcat

SEQ ID NO: 219080 - DNA, 120 bp, Artificial Sequence
  ENSG00000116857_27 (sequence is synthesized)
ttcttcctctgtcatctgcctgctgtcgtgatgcctgctgtgcagactccctcaagttaggacagagtgcttcctctgtggagtagggccctccctttcctttctgggcatgctttccct

SEQ ID NO: 219081 - DNA, 120 bp, Artificial Sequence
  ENSG00000116857_28 (sequence is synthesized)
ctgagcccacgttgcctccaagtcctttcttagtgcaccacttgaggagtcactgccagccggacacagatggcccaagactagcaacggatttctagccctggcctcagataatggttc

SEQ ID NO: 219082 - DNA, 120 bp, Artificial Sequence
  ENSG00000116863_0 (sequence is synthesized)
gatggccgcagcggcgatggcggcagcggcaggtggaggggctggcgcggcccgctccctctcgcgcttccgaggctgcctggctggcgcgctgctcggggactgcgtgggctccttcta

SEQ ID NO: 219083 - DNA, 120 bp, Artificial Sequence
  ENSG00000116863_1 (sequence is synthesized)
gggctccttctacgaggcccacgacaccgtcgacctgacgtcagtcctgcgtcatgtccagagtctggagccggaccccggcacgcccgggagtgagcggacagaagccttgtactacac

SEQ ID NO: 219084 - DNA, 120 bp, Artificial Sequence
  ENSG00000116863_2 (sequence is synthesized)
agatgacacagccatggccagggccctggtgcagtccctgctagccaaggaggcctttgacgaggtggacatggctcacagatttgctcaggagtacaagaaagaccctgacaggggcta

SEQ ID NO: 219085 - DNA, 120 bp, Artificial Sequence
  ENSG00000116863_3 (sequence is synthesized)
tggtgctggagtagtcactgtcttcaagaagctcctgaaccccaaatgtcgcgatgtctttgagcctgcccgggcccagtttaacgggaaaggctcctatggcaatggaggtgccatgcg

SEQ ID NO: 219086 - DNA, 120 bp, Artificial Sequence
  ENSG00000116863_4 (sequence is synthesized)
ggtggctggcatctccctggcctatagcagtgtccaggatgtgcagaagtttgcccggctctcggcccagctgacacacgcctcctccctgggttacaatggcgccatcctgcaggccct

SEQ ID NO: 219087 - DNA, 120 bp, Artificial Sequence
  ENSG00000116863_5 (sequence is synthesized)
ggctgtgcacctggccttgcagggcgagtcttccagcgagcactttctcaagcaactcctgggccacatggaggatctggagggtgatgcccagtccgtcttggatgccagggagttggg

SEQ ID NO: 219088 - DNA, 120 bp, Artificial Sequence
  ENSG00000116863_6 (sequence is synthesized)
ctagggaatggcattgctgcctttgagtcggtacccaccgccatctactgcttcctacgctgcatggagccagaccctgagatcccttctgccttcaatagcctccaaaggactctcatt

SEQ ID NO: 219089 - DNA, 120 bp, Artificial Sequence
  ENSG00000116863_7 (sequence is synthesized)
tattccatctcacttggtggggacacagacaccattgccaccatggctggggccattgctggtgcctactatgggatggatcaggtgccagagagctggcagcaaagctgtgaaggctac

SEQ ID NO: 219090 - DNA, 120 bp, Artificial Sequence
  ENSG00000116863_8 (sequence is synthesized)
gaggagacagacatcctggcccaaagcctgcaccgtgtcttccagaagagttgatgagggctacagctgttggggctctgccaggtcccctgggaccaactacagctccaatcagaaacc

SEQ ID NO: 219091 - DNA, 120 bp, Artificial Sequence
  ENSG00000116863_9 (sequence is synthesized)
ctgcgcttccttgagtgtggcttcccacttttcctgcattgtggagctgactgagtacaccggtgaggctggggtctctgcaggggaggtcactggaacagcgagcaagggactggtgcc

SEQ ID NO: 219092 - DNA, 120 bp, Artificial Sequence
  ENSG00000116863_10 (sequence is synthesized)
tcgctggtgctgggtctctggtttgctgcagagccgtaggacactcctggctcctcagtaggacagacagacgcaggcgggtttattttggaggggtacttgtggcattttcctgtattg

SEQ ID NO: 219093 - DNA, 120 bp, Artificial Sequence
  ENSG00000116863_11 (sequence is synthesized)
tcttggacatgggatgtggggaggtggaaatgatgagcagtagcatcatttctccctgttgggttttagccagtttgccagcaagcgcatcctagcagggtccccgagcagcaggttgtg

SEQ ID NO: 219094 - DNA, 120 bp, Artificial Sequence
  ENSG00000116863_12 (sequence is synthesized)
tggatgaagggacaggcacttgcatccagctgatctaggtcacacctggctcttggctgccatgtggcttattaacagcttccagtggaagtcgcaataaacagtttttggtaaatctca

SEQ ID NO: 219095 - DNA, 120 bp, Artificial Sequence
  ENSG00000116871_0 (sequence is synthesized)
gaacgggttcgcgaccgcagccgagagaccccgggcgaccggcacctccgagactcgcgggccacctgcctcgaccttccccggagcgcccccgcctccgagtcgctacttgccgggccg

SEQ ID NO: 219096 - DNA, 80 bp, Artificial Sequence
  ENSG00000116871_1 (sequence is synthesized)
gccactggccgccgccgccgccgccgctgagaccccgagacccccagtgacgccgcagccatggagagcggcccgcgtgc

SEQ ID NO: 219097 - DNA, 120 bp, Artificial Sequence
  ENSG00000116871_2 (sequence is synthesized)
ggagctgggggcgggcgcacccccagctgtggtcgccaggacccccccagagccaagaccttctccagaaggtgacccttcccccccaccaccaccaatgtcagccctggtccccgacac

SEQ ID NO: 219098 - DNA, 120 bp, Artificial Sequence
  ENSG00000116871_3 (sequence is synthesized)
tcccccggacacccctcctgccatgaagaatgccactagctctaagcagctcccactggaaccagagagcccctcagggcaggtcgggcctaggccagcccccccgcaggaagagtcccc

SEQ ID NO: 219099 - DNA, 120 bp, Artificial Sequence
  ENSG00000116871_4 (sequence is synthesized)
ttcctctgaagcaaagagcagaggacccaccccaccagccatgggcccacgggatgccagacctcctcgaaggagcagccagccatctccaacagcagtgccagcctccgacagccctcc

SEQ ID NO: 219100 - DNA, 120 bp, Artificial Sequence
  ENSG00000116871_5 (sequence is synthesized)
caccaagcaagaggtgaagaaggcaggagagagacacaagctggcaaaggagcggcgagaagagcgggccaagtacctggcggccaagaaggcagtgtggctggagaaggaggagaaggc

SEQ ID NO: 219101 - DNA, 120 bp, Artificial Sequence
  ENSG00000116871_6 (sequence is synthesized)
caaggcgctgcgggagaagcagctccaggagcgccggcgccggctggaggagcaacgtcttaaagccgagcaacgccgtgcagccctggaggaacggcagcggcagaagctcgagaaaaa

SEQ ID NO: 219102 - DNA, 120 bp, Artificial Sequence
  ENSG00000116871_7 (sequence is synthesized)
caaggagcgctatgaagcagccatccaacggtcagtgaagaagacgtgggccgaaatccggcagcagcgctggtcctgggcaggggccctgcaccacagctctccaggacataagaccag

SEQ ID NO: 219103 - DNA, 120 bp, Artificial Sequence
  ENSG00000116871_8 (sequence is synthesized)
tgggagcaggtgctccgtgtcggcagttaacctgcccaaacacgtggactctataatcaacaagcggctctcaaagtcctctgccacgctctggaactcccccagtagaaatcgcagcct

SEQ ID NO: 219104 - DNA, 120 bp, Artificial Sequence
  ENSG00000116871_9 (sequence is synthesized)
gcagctgagcgcatgggagagcagcatcgtggatcgtctgatgacgcccactctctccttccttgctcggagtcgcagcgcggtcacactgccccgcaacggccgggaccaggccgtgcc

SEQ ID NO: 219105 - DNA, 80 bp, Artificial Sequence
  ENSG00000116871_10 (sequence is synthesized)
ggtgtgcccgcgctcggcctccgccagccccctgacgccgtgcagcgtcacccgaagcgtgcaccgctgcgcccccgccg

SEQ ID NO: 219106 - DNA, 120 bp, Artificial Sequence
  ENSG00000116871_11 (sequence is synthesized)
ccccgctccggtgcgccgccggccggaggcctcgccggtgcagaaaaaggagaagaaggacaaggagcgggaaaacgagaaggagaagagtgccctagcccgggagcgcagcctcaagaa

SEQ ID NO: 219107 - DNA, 120 bp, Artificial Sequence
  ENSG00000116871_12 (sequence is synthesized)
gcgccagtcgctgcccgcctccccacgtgcccgcctctctgccagcaccgcctctgagctcagccccaaatccaaggccaggccatcctctccctccacatcctggcacaggcctgcctc

SEQ ID NO: 219108 - DNA, 120 bp, Artificial Sequence
  ENSG00000116871_13 (sequence is synthesized)
agcgccgcagggcccgaggacaagagccagagcaagcgcagggccagtaacgagaaggagtcagcagccccagcctcaccggcaccttcgccggcgccctcgcccaccccagccccgccc

SEQ ID NO: 219109 - DNA, 120 bp, Artificial Sequence
  ENSG00000116871_14 (sequence is synthesized)
cagaaggagcagccccccgcggagacccctacagacgctgctgtcttgacctcacccccagcccctgctcccccggtgacccctagcaaaccaatggccggcaccacagaccgagaagaa

SEQ ID NO: 219110 - DNA, 120 bp, Artificial Sequence
  ENSG00000116871_15 (sequence is synthesized)
gccactcggctcttggctgagaagcggcgccaggcccgggagcagcgggagcgcgaggagcaggagcggaggctgcaggcagaaagggacaagcgaatgcgagaggagcagctggcacgg

SEQ ID NO: 219111 - DNA, 120 bp, Artificial Sequence
  ENSG00000116871_16 (sequence is synthesized)
gaggccgaggcccgggcggagcgggaggcggaggcccggaggcgggaggagcaggaggcacgagagaaggcgcaggccgagcaggaggagcaggagcggctgcagaagcagaaagaggag

SEQ ID NO: 219112 - DNA, 120 bp, Artificial Sequence
  ENSG00000116871_17 (sequence is synthesized)
gccgaagctcggtcgcgggaagaggcggagcggcagcgtctggagcgggaaaagcacttccagcagcaggagcaagagcggcaagagcgcagaaagcgtctggaggagatcatgaagagg

SEQ ID NO: 219113 - DNA, 120 bp, Artificial Sequence
  ENSG00000116871_18 (sequence is synthesized)
actcggaagtcagaagtttctgaaaccaagaagcaggacagcaaggaggccaacgccaacggttccagcccagagcctgtgaaagctgtggaggctcggtccccagggctgcagaaggag

SEQ ID NO: 219114 - DNA, 120 bp, Artificial Sequence
  ENSG00000116871_19 (sequence is synthesized)
gctgtgcagaaagaggagcccatcccacaggagcctcagtggagtctcccaagcaaggagttgccagcgtccctggtgaatggcctgcagcctctcccagcacaccaggagaatggcttc

SEQ ID NO: 219115 - DNA, 120 bp, Artificial Sequence
  ENSG00000116871_20 (sequence is synthesized)
tccaccaacggaccctctggggacaagagtctgagccgaacaccagagacactcctgccctttgcagaggcagaagccttcctcaagaaagctgtggtgcagtccccgcaggtcacagaa

SEQ ID NO: 219116 - DNA, 120 bp, Artificial Sequence
  ENSG00000116871_21 (sequence is synthesized)
gtcctttaagagggtttgccttggatccgggcacagttgtgagggctcctctgcatcacctaccaggatgtctggaggagaaaaagacagaacaaagatggaagtggcctgggcccctgg

SEQ ID NO: 219117 - DNA, 120 bp, Artificial Sequence
  ENSG00000116871_22 (sequence is synthesized)
gggtgggtcctctctgttgtttttaatctgcaccttatagactgatgtctctttggccggagccagatctgcccctcagtgcattcgtgtgctcgcacgcgcagacatcccttctccccc

SEQ ID NO: 219118 - DNA, 120 bp, Artificial Sequence
  ENSG00000116871_23 (sequence is synthesized)
atacacacatatacactcacagcctctctggcctcttcccttggggaggggccacctgtagtatttgccttgatttggtggggtacagtggatgtgaatactgtaaatagcttgtgctca

SEQ ID NO: 219119 - DNA, 120 bp, Artificial Sequence
  ENSG00000116871_24 (sequence is synthesized)
gactcctctgcgtggagagggtgggtgcaggaggcagaccctccccccaaagccccctggggagatcttcctctctctatttaactgtaactgagggggatcccaggtctggggatgggg

SEQ ID NO: 219120 - DNA, 120 bp, Artificial Sequence
  ENSG00000116871_25 (sequence is synthesized)
gacaccttgggccacaggatactggttgcttcaggggtacccatgccccctgccctcgcctggaatcagtgttactgcatctgattaaatgtctccagaaataaagaataattctgccaa

SEQ ID NO: 219121 - DNA, 80 bp, Artificial Sequence
  ENSG00000116871_26 (sequence is synthesized)
gaacggcgcggacggcgcgggcgcggggggctgggtcccggggcgctgctggggtggacccccccgcctcgaacttggta

SEQ ID NO: 219122 - DNA, 120 bp, Artificial Sequence
  ENSG00000116871_27 (sequence is synthesized)
gaaaggtgtgcggacctgggcggggatttgtgggcggggcctgggcagggcgggccaggtgggcggggcctgggcttagagcggacaggacgggaaagcgctggggcaaattccagttcc

SEQ ID NO: 219123 - DNA, 120 bp, Artificial Sequence
  ENSG00000116871_28 (sequence is synthesized)
tgtcctggagagggctgctatgagctgggaggccctaagactccgaggccgggtctggctggtgggaggtttaggattaggggcggggctcgagcctaactgatctgcggcctccaaaca

SEQ ID NO: 219124 - DNA, 120 bp, Artificial Sequence
  ENSG00000116871_29 (sequence is synthesized)
gcgtctggaggagatcatgaagaggactcggaagtcagaagtttctgaaaccaaggtcagaattcccccgaagggcagtgctgggcgtggggggcagggtgtgaaaaggaggctgcggaa

SEQ ID NO: 219125 - DNA, 120 bp, Artificial Sequence
  ENSG00000116871_30 (sequence is synthesized)
ctgcaacacttaattatgtgcactgtgctaagagcaggacacacatctaatttaatcctcaacccattttgaggaggaaacagaggctcagagagatgaaatcatttgcttaagccacac

SEQ ID NO: 219126 - DNA, 120 bp, Artificial Sequence
  ENSG00000116871_31 (sequence is synthesized)
agctagtagagtagctgacattcagacccagaagcctcctgccaccccaaatcccatgctcttaatcacagtatgtggacatctgtctggtaggccccccaggtcagatggggatcttgc

SEQ ID NO: 219127 - DNA, 120 bp, Artificial Sequence
  ENSG00000116871_32 (sequence is synthesized)
actcaagcattcatttctccttcagccctgagagcccataaggccaatggaggagaaataggcctctcctgagtcctgtcttcagtaagcctctcaatttgagggggttgtctcagactg

SEQ ID NO: 219128 - DNA, 120 bp, Artificial Sequence
  ENSG00000116871_33 (sequence is synthesized)
tggccacttggaggaaatgtccttggcccaggccttctgcagaacccttcacacacgccactgggctcctttgtccacagcggccaagaaggcagtgtggctggagaaggaggagaaggc

SEQ ID NO: 219129 - DNA, 120 bp, Artificial Sequence
  ENSG00000116871_34 (sequence is synthesized)
acaagcgcagaatgccggagcaagggcggcagcaaggctcccagacctgtccccagcccagccatcagcaggggagagaaagcgaaaccctttcaggggtctccttgtgactctccttca

SEQ ID NO: 219130 - DNA, 120 bp, Artificial Sequence
  ENSG00000116871_35 (sequence is synthesized)
gaagagcgggccaagtacctgggtgagtgagcaggaagcctcatcatcttcttcatcgtcatcatcagcatcctattaataacaccaacaggctggggcgcagtggctcacgcctgtaat

SEQ ID NO: 219131 - DNA, 120 bp, Artificial Sequence
  ENSG00000116871_36 (sequence is synthesized)
atgtatgatgatgccactgcactccagcctgggggtcagccagattctgtcttaaaaacaacaacaacaacaacaacaaaacctgctgaatgaatggacctgtcagccccaaatccaagg

SEQ ID NO: 219132 - DNA, 120 bp, Artificial Sequence
  ENSG00000116874_0 (sequence is synthesized)
aaacaagacggctccgcccttctcaagatggcgctgcactcaatgcggaaagcgcgtgagcgctggagcttcatccgggcacttcataagggatccgcagctgctcccgctctccagaaa

SEQ ID NO: 219133 - DNA, 120 bp, Artificial Sequence
  ENSG00000116874_1 (sequence is synthesized)
gacagcaagaagcgagtattttccggcattcaacctacaggaatcctccacctgggcaattacctgggagccattgagagctgggtgaggttacaggatgaatatgactctgtattatac

SEQ ID NO: 219134 - DNA, 120 bp, Artificial Sequence
  ENSG00000116874_2 (sequence is synthesized)
agcattgttgacctccactccattactgtcccccaagacccagctgtccttcggcagagcatcctggacatgactgctgttcttcttgcctgtggcataaacccggaaaaaagcatcctt

SEQ ID NO: 219135 - DNA, 120 bp, Artificial Sequence
  ENSG00000116874_3 (sequence is synthesized)
ttccaacaatctcaggtgtctgaacacacacaattaagttggatcctttcctgcatggtcagactacctcgattacaacatttacatcagtggaaggcaaagactaccaagcagaagcac

SEQ ID NO: 219136 - DNA, 120 bp, Artificial Sequence
  ENSG00000116874_4 (sequence is synthesized)
gatggcacggtgggcctgctcacatacccagtactccaggcagccgacattctgttgtacaagtccacacacgttcctgttggggaggatcaagtccagcacatggaactagttcaggat

SEQ ID NO: 219137 - DNA, 120 bp, Artificial Sequence
  ENSG00000116874_5 (sequence is synthesized)
ctagcacaaggtttcaacaagaagtatggggagttctttccagtgcccgagtccattctcacatccatgaagaaggtaaaatccctacgtgatccttctgccaaaatgtcgaaatcagac

SEQ ID NO: 219138 - DNA, 120 bp, Artificial Sequence
  ENSG00000116874_6 (sequence is synthesized)
cctgacaaactggccaccgtccgaataacagacagcccagaggagatagtgcagaaattccgcaaggctgtgacagacttcacctcggaggtcacctatgacccggctggccgcgctggc

SEQ ID NO: 219139 - DNA, 120 bp, Artificial Sequence
  ENSG00000116874_7 (sequence is synthesized)
gtgtccaacatagtggcggtgcatgccgcggtgacggggctctccgtggaggaagtggtgcgccgcagcgcgggcatgaacactgctcgctacaagctggccgtggcagatgctgtgatt

SEQ ID NO: 219140 - DNA, 120 bp, Artificial Sequence
  ENSG00000116874_8 (sequence is synthesized)
gagaagtttgccccaattaagcgtgaaattgaaaaactgaagctggacaaggaccatttagagaaggttttacaaattggatcagcaaaagccaaagaattagcatacactgtgtgccag

SEQ ID NO: 219141 - DNA, 120 bp, Artificial Sequence
  ENSG00000116874_9 (sequence is synthesized)
gaggtgaagaaattggtgggttttctataggaagtttcaacgaatcacagcaaggcttttgtgccttgcactccatgcattctgataacggcagctttcctaaaaagaaaaagttatagt

SEQ ID NO: 219142 - DNA, 120 bp, Artificial Sequence
  ENSG00000116874_10 (sequence is synthesized)
tttgggacatttaatttggtatagctgattattggctttatttgatgaatattgctttgtagctttgaaatacgacagtgttccaaatcccatcaacaaaatgctgtgaacaacaacaac

SEQ ID NO: 219143 - DNA, 120 bp, Artificial Sequence
  ENSG00000116874_11 (sequence is synthesized)
ttattgaggcacactccttggcctgcagaaatgtgattgaagtaaggagtaatttgggaaatggagtatcatttgtgcttctctctggagtacttactgtaacagatgcacacgttatct

SEQ ID NO: 219144 - DNA, 120 bp, Artificial Sequence
  ENSG00000116874_12 (sequence is synthesized)
acttcaacccttttataaagcaatatatagaggtcttagatgtataatccttgagatgccatttgatcagatgccaatttgtattcagagctcataaaaacaagtccattcttatagttt

SEQ ID NO: 219145 - DNA, 120 bp, Artificial Sequence
  ENSG00000116874_13 (sequence is synthesized)
gtttgtcactgagacggtgcctgatttaatatatttaagctgcttaacttgttttccaagagataacaccaactgttccagcaataatttgttttttaattcagagatatgggatatgat

SEQ ID NO: 219146 - DNA, 120 bp, Artificial Sequence
  ENSG00000116874_14 (sequence is synthesized)
cttctaaggaggttgcattattttgacctgatttatttattgtacaagagcccaagtccctgaattatattcttaataagtgctttcttgcattcatttcagtttagtctcaccaacccc

SEQ ID NO: 219147 - DNA, 120 bp, Artificial Sequence
  ENSG00000116874_15 (sequence is synthesized)
ctatgaattaggagaattattgtcattttacacatgaggaaagtgaggctgagagaatccaattagcttgtacgatatcactccataagagaagcaaatctgagagtaaaacccttaccc

SEQ ID NO: 219148 - DNA, 120 bp, Artificial Sequence
  ENSG00000116874_16 (sequence is synthesized)
cttattcttaagaatagtgcttgtttattcagtacaaaaaaaatgctgaaaggcagcgttttttagactctaaacattctgattttgaaggtgggtgttggaacgactgatgatgttttt

SEQ ID NO: 219149 - DNA, 120 bp, Artificial Sequence
  ENSG00000116874_17 (sequence is synthesized)
tatatcatcaattcagccaatggatgcgaacttaaaatctggattcacagaaccgtggtcacatttccccatcaaaatccccaaggcgggtcccaagttctctcctctacgctcattgca

SEQ ID NO: 219150 - DNA, 120 bp, Artificial Sequence
  ENSG00000116874_18 (sequence is synthesized)
gaaatactttgaaataggttctgccagtctacaatagcagtgaagactgacaaatcagatattcccaatgactgacagcttctcatcttgcctctacctcagttaagtaatgtcaccctg

SEQ ID NO: 219151 - DNA, 120 bp, Artificial Sequence
  ENSG00000116874_19 (sequence is synthesized)
aaacctagcttttctgcacttccatttctgacacctgaaaatgaaaatgataatcctaacttatacaccaagacctgttagcaagatcgattttgtaacagaaattgcttataagttttt

SEQ ID NO: 219152 - DNA, 120 bp, Artificial Sequence
  ENSG00000116874_20 (sequence is synthesized)
tatcagtaaggaccatgatcaccatttgtacatacataactaggttgttgagcaaagcatttttgctcatgtttcttaaggaagtagagtagtccttgtgtcagaacacatgttaatcca

SEQ ID NO: 219153 - DNA, 120 bp, Artificial Sequence
  ENSG00000116874_21 (sequence is synthesized)
caaaacgccccatcccagattccaaattaaaacatcgtttttaggattcttggagctagcctggatcatgggtaaaggaaacattttgccttttgtatcttatactggaatgggatgtct

SEQ ID NO: 219154 - DNA, 120 bp, Artificial Sequence
  ENSG00000116874_22 (sequence is synthesized)
gtaagtcctagaacctctttgagcatatttcttacaagcctctgttttttcccctttaaaggaaactttgaaaggattgtgaatactggaaaatgacaaaactaaaggtagatctatcaa

SEQ ID NO: 219155 - DNA, 120 bp, Artificial Sequence
  ENSG00000116874_23 (sequence is synthesized)
agatctgactcacctgcctgtgactttatgcaggttatttaacttagcagtgtccttccctagaaaatgatgcctatgattcctaccttcactacatgagatgaagtacatgaaagggcc

SEQ ID NO: 219156 - DNA, 120 bp, Artificial Sequence
  ENSG00000116874_24 (sequence is synthesized)
gtatggggagttctttccagtgcccgagtccattctcagtatgtgtgtgttggtgtttttaacctagcatccatgaagaaggtaaaatccctacgtgatccttctgccaaaatgtcgaaa

SEQ ID NO: 219157 - DNA, 120 bp, Artificial Sequence
  ENSG00000116874_25 (sequence is synthesized)
ctgcactcaatgcggaaagcgcgtgagcgctggagcttcatccgggcacttcataagggatccgcagctgctcccgctctccagggaaagtacatgccttccctcgcctaaggtctactc

SEQ ID NO: 219158 - DNA, 120 bp, Artificial Sequence
  ENSG00000116874_26 (sequence is synthesized)
gtctatgactgtcggcctgctcagagcgtagtgacgttgcaaggatacgtgatgacgtaaaggtttcttggtggaaaaagcgcgccgctttctgacctcttgccgccacctccagttctg

SEQ ID NO: 219159 - DNA, 120 bp, Artificial Sequence
  ENSG00000116874_27 (sequence is synthesized)
ggagcggagcgccgccgctgttgccgggcaacgcggtgagcctaccccgcgtgtgatgttttcagagacgggttgttttagagactgctcttcttgtggtcttattactgtttttaccct

SEQ ID NO: 219160 - DNA, 120 bp, Artificial Sequence
  ENSG00000116874_28 (sequence is synthesized)
ggcattgggcagcttgggtcggggcagcaggttggcagtgtggtacttgagcaagtgtcagtgcatcttccattctggttgctcctggtggctccacagcactgctctatctagcaggct

SEQ ID NO: 219161 - DNA, 120 bp, Artificial Sequence
  ENSG00000116874_29 (sequence is synthesized)
gtgaaagagtgaccgcaagctgctacagagtttgtcctgtcctgcgcttgacaacactgctgttaccattaatctcgtcgtacggagaccatgtcgcggcctggtcttattgggaattgt

SEQ ID NO: 219162 - DNA, 120 bp, Artificial Sequence
  ENSG00000116874_30 (sequence is synthesized)
cttaaatatttggaattttaccctcatagcaaaaaagtcagggggaggggataccctttcagttattcaggattttaccaaacgtcttccaagtacagtctcagtggcaagcactttgac

SEQ ID NO: 219163 - DNA, 120 bp, Artificial Sequence
  ENSG00000116874_31 (sequence is synthesized)
atactttatctacgggagatatattctgggaactagagagaaaggagagaatgtgattttattaggtaatttcccggcatcatttgcatatgtattgccataatgagtaggtgtgaggat

SEQ ID NO: 219164 - DNA, 120 bp, Artificial Sequence
  ENSG00000116882_0 (sequence is synthesized)
gccaggctttgagtggctgcgtctaaacacttctttccctgaggactggaagacattagaataaggtccagaaatgtccttggtgtgtttgacagactttcaggcccatgcgcgagagca

SEQ ID NO: 219165 - DNA, 120 bp, Artificial Sequence
  ENSG00000116882_1 (sequence is synthesized)
gctgtctaagtcaactcgggattttattgaaggtggagcagatgacagcatcacgcgggatgacaacattgcagcatttaaaagaattcgcctccgtccgcggtacctgagagatgtgtc

SEQ ID NO: 219166 - DNA, 120 bp, Artificial Sequence
  ENSG00000116882_2 (sequence is synthesized)
tgaggtggacaccagaaccacaatccaaggggaggagatcagtgcccctatttgtatcgcacccacagggttccactgccttgtctggcctgatggggaaatgagcacagcaagagctgc

SEQ ID NO: 219167 - DNA, 120 bp, Artificial Sequence
  ENSG00000116882_3 (sequence is synthesized)
ccaagcggctggtatctgctacatcaccagcacatttgccagctgtagccttgaagacattgtcattgcagctcccgaaggcctccgatggttccaactctatgtgcatccagacctgca

SEQ ID NO: 219168 - DNA, 120 bp, Artificial Sequence
  ENSG00000116882_4 (sequence is synthesized)
gctgaacaaacagttgatccagagggtagaatccctaggtttcaaagctttggtaataactttggatacacctgtatgtggcaacaggcgacatgacattcgaaaccagttgaggaggaa

SEQ ID NO: 219169 - DNA, 120 bp, Artificial Sequence
  ENSG00000116882_5 (sequence is synthesized)
tcctggtttcagagcataactcgattgcccatcatcctgaaagggattttgacaaaagaggatgcagagttagctgtgaagcacaatgtccagggtatcattgtttccaaccatggtggg

SEQ ID NO: 219170 - DNA, 120 bp, Artificial Sequence
  ENSG00000116882_6 (sequence is synthesized)
aggcagcttgatgaggttcttgcttcaattgatgctttgacagaagtggtggctgctgtaaaggggaaaattgaagtctacctggatggcggggtccgaactggcaatgatgtgctgaag

SEQ ID NO: 219171 - DNA, 120 bp, Artificial Sequence
  ENSG00000116882_7 (sequence is synthesized)
gctctggcccttggagctaagtgcatttttcttgggagaccaatcctatggggccttgcctgcaagggtgaacatggtgttaaggaagttttgaacattttaacaaatgagttccacact

SEQ ID NO: 219172 - DNA, 120 bp, Artificial Sequence
  ENSG00000116882_8 (sequence is synthesized)
tccatggcccttacaggctgccggtcggtcgctgagatcaatcgaaacttggtccagttttccaggctgtaagaaaaaagggccaataaccagactgctgaggttgcccacaggaggatc

SEQ ID NO: 219173 - DNA, 120 bp, Artificial Sequence
  ENSG00000116882_9 (sequence is synthesized)
acaaactcacagcacagtgtgtgatgctgtccttcctggaccccattctgtccggaggctcatggcccatatttcccacatttctaataccaccacccctgtgcttcaggccctccaaac

SEQ ID NO: 219174 - DNA, 120 bp, Artificial Sequence
  ENSG00000116882_10 (sequence is synthesized)
ccctgtgttccccaaatgttccatgcccttctttgtatcactgactattatatgttgctctcttgcctaaatcttcctctgaagtaaaagatctcaaaaggacagatcattaatgactgg

SEQ ID NO: 219175 - DNA, 120 bp, Artificial Sequence
  ENSG00000116882_11 (sequence is synthesized)
taagctccagacaattcaaacattgagattcctgggaactaccagatagtagcatcagttcaccaagaaatgaagctggtgaggcagtgaaaatccagggcctagaaagctgggaatgcc

SEQ ID NO: 219176 - DNA, 120 bp, Artificial Sequence
  ENSG00000116882_12 (sequence is synthesized)
atgacgtgggcacattgaaagacaagaggcaggcatgatcagccttgaactttaggaagatcccaggaagctgatggaagacaagatgtggagtgaatgtgaaggtccagaaatgtcctt

SEQ ID NO: 219177 - DNA, 120 bp, Artificial Sequence
  ENSG00000116882_13 (sequence is synthesized)
agctttcatcccctatctttgtctctgtgctttcctttattcccaaggtaattctcacttcacagataatccccatctttcccattatagctctgactacatctagaatttatactagtg

SEQ ID NO: 219178 - DNA, 120 bp, Artificial Sequence
  ENSG00000116885_0 (sequence is synthesized)
attgggacgctgcggcctggccttcaggccactggctaccgaaccccggggctcttcaccagtccagctcgtttccagcaccatgtcggtgcggacgctaccgctgctcttcttgaactt

SEQ ID NO: 219179 - DNA, 120 bp, Artificial Sequence
  ENSG00000116885_1 (sequence is synthesized)
gggcggggagatgctttacatcctcgaccaacggctgcgggcccagaacatcccgggagacaaggcccgcaaagttctgaatgacatcatctccaccatgttcaatagaaagtttatgga

SEQ ID NO: 219180 - DNA, 120 bp, Artificial Sequence
  ENSG00000116885_2 (sequence is synthesized)
ggaattattcaagcctcaagagctctactccaagaaggccctgaggactgtctatgagcgcctggctcatgcctccattatgaaactgaaccaggccagcatggataagctctatgacct

SEQ ID NO: 219181 - DNA, 120 bp, Artificial Sequence
  ENSG00000116885_3 (sequence is synthesized)
gatgaccatggctttcaaatatcaagtattgctgtgtccccgacccaaggatgtgctgctggtcactttcaatcacttggataccatcaagggattcatccgagactccccaaccatcct

SEQ ID NO: 219182 - DNA, 120 bp, Artificial Sequence
  ENSG00000116885_4 (sequence is synthesized)
gcagcaagtggacgagactttgcggcagctgacagaaatatatggtggtctctctgcaggggagttccagctgatccggcagacactcctcatcttcttccaagacctgcacatccgagt

SEQ ID NO: 219183 - DNA, 120 bp, Artificial Sequence
  ENSG00000116885_5 (sequence is synthesized)
atccatgtttctaaaggacaaagttcagaataataacggtcgctttgtgttgccggtgtccgggcctgttccttggggaactgaagttccaggactcatcagaatgttcaacaacaaagg

SEQ ID NO: 219184 - DNA, 120 bp, Artificial Sequence
  ENSG00000116885_6 (sequence is synthesized)
gatagaattcaagcatggtggaaactatgtccctgcacccaaagaaggttcttttgaactttatggagaccgagtcctgaaactgggaactaacatgtacagcgtgaatcagcctgtgga

SEQ ID NO: 219185 - DNA, 120 bp, Artificial Sequence
  ENSG00000116885_7 (sequence is synthesized)
aactcatgtgtctggatcatcaaagaacttagcctcatggacccaggaaagcattgctccaaaccctcttgctaaagaagagctgaatttcttggccaggctgatgggagggatggagat

SEQ ID NO: 219186 - DNA, 120 bp, Artificial Sequence
  ENSG00000116885_8 (sequence is synthesized)
taagaaacccagtggccctgagcccggattccggttgaatctctttaccaccgatgaagaagaggaacaagcagcgctaaccaggccagaagagttatcctatgaagttatcaacataca

SEQ ID NO: 219187 - DNA, 120 bp, Artificial Sequence
  ENSG00000116885_9 (sequence is synthesized)
agccacccaggaccagcaacggagcgaggagctggctcgaatcatgggggagtttgagatcacggagcagccaaggctgagcaccagcaaaggggacgatttgctcgccatgatggatga

SEQ ID NO: 219188 - DNA, 120 bp, Artificial Sequence
  ENSG00000116885_10 (sequence is synthesized)
gttatagctgttctgaccaggcgtcctctgcccccagggagaggctgctggatggtgacccctggggaatgccccatggcccagaatgatgctgctagttttctactgagtgaagccatt

SEQ ID NO: 219189 - DNA, 120 bp, Artificial Sequence
  ENSG00000116885_11 (sequence is synthesized)
acgtctatttcttatttatgttgtaaggaactgtgtgagtctcccttgaggagcactcactcttgaaggcacacacatacacatattttcagtgaaatatattctgacttttaaacttga

SEQ ID NO: 219190 - DNA, 120 bp, Artificial Sequence
  ENSG00000116885_12 (sequence is synthesized)
taagctatttccctagctcctaataagggctcaaagaccccagagaaatgactcagcacctaggtgaatagcagccctttgtaagcattaacctaaccagagttgatgtgatgcttcaac

SEQ ID NO: 219191 - DNA, 120 bp, Artificial Sequence
  ENSG00000116885_13 (sequence is synthesized)
aaagacatataaaaatcccaagcatgacaagaacacaaaatgactattacaaaccagtggcacttataaatatttgtgtaaatatcacaaataaaataccaacaaatttaataatctaaa

SEQ ID NO: 219192 - DNA, 120 bp, Artificial Sequence
  ENSG00000116885_14 (sequence is synthesized)
aagcagaggaagggaagaaacattcttggcagggcttataatgtgcaaagtcacagagagataaaagaacttgactttctaggtcgtagggtacattggtgggagatggggtagaaagtt

SEQ ID NO: 219193 - DNA, 120 bp, Artificial Sequence
  ENSG00000116885_15 (sequence is synthesized)
taagagaaatggcagatgaggcagaaaaaataggttgccaactgatcaagagccagtttgccatgctggcagggaaagaaccctaatgttgcacccattttctttaccatctcatccaga

SEQ ID NO: 219194 - DNA, 120 bp, Artificial Sequence
  ENSG00000116885_16 (sequence is synthesized)
ccaggagtggggaactatatggaggacaggagaaggagactgactttccattatgtatacccttttgagaactttgagttttgtacctgggcaaaataaaattttaaaaaggggaagaaa

SEQ ID NO: 219195 - DNA, 120 bp, Artificial Sequence
  ENSG00000116885_17 (sequence is synthesized)
agaacatcccgggagacaaggcccgcaaagattttgactgagtgtcaaacactatgtgagatactatatggagcctgatgcagcccttctggacattcactggagttctgaatgacatca

SEQ ID NO: 219196 - DNA, 120 bp, Artificial Sequence
  ENSG00000116885_18 (sequence is synthesized)
cacagcttctctctagatacggaagtctacataaagagaggtgagaacgctttagatttcggatctagccaacatttcccctgttgtgtgcaatcttctccattccaccttacgagtaca

SEQ ID NO: 219197 - DNA, 120 bp, Artificial Sequence
  ENSG00000116885_19 (sequence is synthesized)
ggggggcctgactgggtgacagatgaatgggaaggttctgacctgttttgagtccggctcccaccttgctgtcacatatcagaatgtcactgctctgagtgtgtcccagggccttggagg

SEQ ID NO: 219198 - DNA, 120 bp, Artificial Sequence
  ENSG00000116885_20 (sequence is synthesized)
tgggccgtgaggtgccgagaagcagccgcagcctcctccctccacctatcccagagcgatgctggtgatttcaaacgtatctgtcctatcagtaaataaacaagatgcagatctctggta

SEQ ID NO: 219199 - DNA, 120 bp, Artificial Sequence
  ENSG00000116885_21 (sequence is synthesized)
cgctcagctcctgtacctgcacacaaagagcatttcgggataggcttgcttcagtactttgctcagctgtgttctctcttgtctctgcagttctgaatgacatcatctccaccatgttca

SEQ ID NO: 219200 - DNA, 120 bp, Artificial Sequence
  ENSG00000116898_0 (sequence is synthesized)
gcctcgattggtcgatcctgggccagcatggcggcgcccatgtaacccggtccgtgccgcaaagcgaacggcggccgcggcgcgggccccgcgggggttagaggtcaccatgctgagggt

SEQ ID NO: 219201 - DNA, 120 bp, Artificial Sequence
  ENSG00000116898_1 (sequence is synthesized)
cgcgtggaggacgctgagtttgattcggacccgggcagttacccaggtcctagtacccgggctgccgggcggtgggagcgccaagtttcctttcaaccagtggggcctgcagcctcgaag

SEQ ID NO: 219202 - DNA, 120 bp, Artificial Sequence
  ENSG00000116898_2 (sequence is synthesized)
tctcctcctccaggccgcgcgcggatatgtcgtccggaaaccagcccagtctaggctggatgatgacccacctccctctacgctgctcaaagactaccagaatgtccctggaattgagaa

SEQ ID NO: 219203 - DNA, 120 bp, Artificial Sequence
  ENSG00000116898_3 (sequence is synthesized)
ccagatccctggaggctcgaattattgccttgtctgtcaagatccgcagttatgaagaacacttggagaaacatcgaaaggacaaagcccacaaacgctatctgctaatgagcattgacc

SEQ ID NO: 219204 - DNA, 120 bp, Artificial Sequence
  ENSG00000116898_4 (sequence is synthesized)
agaggaaaaagatgctcaaaaacctccgtaacaccaactatgatgtctttgagaagatatgctgggggctgggaattgagtacaccttcccccctctgtattaccgaagagcccaccgcc

SEQ ID NO: 219205 - DNA, 120 bp, Artificial Sequence
  ENSG00000116898_5 (sequence is synthesized)
gattcgtgaccaagaaggctctgtgcattcgggttttccaggagactcaaaagctgaagaagcgaagaagagccttaaaggctgcagcagcagcccaaaaacaagcaaagcggaggaacc

SEQ ID NO: 219206 - DNA, 120 bp, Artificial Sequence
  ENSG00000116898_6 (sequence is synthesized)
cagacagccctgccaaagccataccaaagacactcaaagacagccaataaattctgttcaatcatttctttctgtcttgaagaatgataggagagatgatggggctctttttggcctgaa

SEQ ID NO: 219207 - DNA, 120 bp, Artificial Sequence
  ENSG00000116898_7 (sequence is synthesized)
atgtaacccggtccgtgccgcaaagcgaacggcggccgcggcgcgggccccgcgggggttagagtcaccacgcccagcccacagatgtcacttctgcctttccattattactcagttttc

SEQ ID NO: 219208 - DNA, 120 bp, Artificial Sequence
  ENSG00000116898_8 (sequence is synthesized)
tgaatgccagttgcttctagcatagtgcctgctctagagaacccctcaggaaccaaggcctatctttctgtgttgttccactctacacctaagttgctgtgatggagccatgtggtcggg

SEQ ID NO: 219209 - DNA, 120 bp, Artificial Sequence
  ENSG00000116898_9 (sequence is synthesized)
gtcagggttcccactgcactttctgcagtgctcccagaactcagtatgtactgggaagggcctgctgtcgtgacagcctctctttggggccagcttctgcttttgcccccatctttgcag

SEQ ID NO: 219210 - DNA, 120 bp, Artificial Sequence
  ENSG00000116898_10 (sequence is synthesized)
tacagggggtaaattaaacaagaggatgcctgaatgaacgatatcctgggttcttgagagacaagtgggagctgataattctgaaaattcattagtcaaagcatggagataaaggtggca

SEQ ID NO: 219211 - DNA, 120 bp, Artificial Sequence
  ENSG00000116898_11 (sequence is synthesized)
gcaggaaggggagaggcaaggagtagacccgtgacagttttagaatcttatttgtgccaaaatactttactgcattggcttggacctctaatacaatgttgaattgttaaccatgatagc

SEQ ID NO: 219212 - DNA, 120 bp, Artificial Sequence
  ENSG00000116898_12 (sequence is synthesized)
actgtatcctggtctaattcctgaattgaatggctagtcttaccattaagaatgctatttgcggccaggcacggtggctcacacctgtaaccccaccactttgggaggccaaggcaggtg

SEQ ID NO: 219213 - DNA, 120 bp, Artificial Sequence
  ENSG00000116898_13 (sequence is synthesized)
agcgagactccgtctcaaaaaaaagaatgctatttgctatgatttttggatgatatctttataatattaagggatgtcccttccttggattttgctttttaagggaaggtaatgtctaag

SEQ ID NO: 219214 - DNA, 120 bp, Artificial Sequence
  ENSG00000116898_14 (sequence is synthesized)
ttggattttgctttttaagggaaggtaatgtctaagataagcctttgaaatcttgaaattcagagtgatttgggatttatagagagctgtacagagcattggtgattgttattccttgag

SEQ ID NO: 219215 - DNA, 120 bp, Artificial Sequence
  ENSG00000116898_15 (sequence is synthesized)
catctttaaacctttgttttctcatctgtaaaatgggaataacaatgataatacctccttcagaattgcattaatatttgcataagattactgagaaatttcagtgaaatgataaaatga

SEQ ID NO: 219216 - DNA, 120 bp, Artificial Sequence
  ENSG00000116898_16 (sequence is synthesized)
ctctgccagggattaaagtctggtgagttcatcttggatactaaaaccccattgagaactggactcaagggtcctccatagcctcttttgagaagatgagtttcagcttcccttgccctg

SEQ ID NO: 219217 - DNA, 120 bp, Artificial Sequence
  ENSG00000116898_17 (sequence is synthesized)
ctaaagccctgggctagggaccagctcagccacaaaaggcctgcttatctttcctcacctgtttctgcattatcactactgaaatccccaggttggcaggaacaaatggcctggactggc

SEQ ID NO: 219218 - DNA, 120 bp, Artificial Sequence
  ENSG00000116898_18 (sequence is synthesized)
tctttttttttttttttttttttgagaccggatctcactctgtcactcaggctggaatgcagtcagtggcaggtgtgatcatggctcactacagcgcaacttctggggctccagcaattc

SEQ ID NO: 219219 - DNA, 120 bp, Artificial Sequence
  ENSG00000116898_19 (sequence is synthesized)
atggctcactacagcgcaacttctggggctccagcaattctcctacctcaggctcccaagtagctgggaccaaaggcatgcacaaccatgtcaagctaatttttgtgtttttggtagaga

SEQ ID NO: 219220 - DNA, 120 bp, Artificial Sequence
  ENSG00000116903_0 (sequence is synthesized)
attcctgcttcctcagcccaggagctcggttggccttgggtgggtctagacagccgcggcggctgcggcgccgatagtgacagtgagtgcgtgagacccggagagaaatggcgatggcga

SEQ ID NO: 219221 - DNA, 120 bp, Artificial Sequence
  ENSG00000116903_1 (sequence is synthesized)
tgtcggacagtggggcgagccgcctgcgtcggcagctggagtcagggggttttgaggcgcggctgtacgtgaagcagctctcgcagcagtcggatggggaccgggacctccaggagcacc

SEQ ID NO: 219222 - DNA, 120 bp, Artificial Sequence
  ENSG00000116903_2 (sequence is synthesized)
ggcagcgcatccaggcgctggcggaggagacggcgcagaacctgaagcgcaacgtctaccagaactaccggcagttcatagagacggcccgcgagatctcctacctggagagcgagatgt

SEQ ID NO: 219223 - DNA, 120 bp, Artificial Sequence
  ENSG00000116903_3 (sequence is synthesized)
accagctcagccatttgctgaccgagcagaaaagcagcctggagagcatcccgcttacgttgctgcctgccgctgctgccgccggagccgccgccgcctctggaggggaggagggagtcg

SEQ ID NO: 219224 - DNA, 120 bp, Artificial Sequence
  ENSG00000116903_4 (sequence is synthesized)
gtggggcggggggccgagaccacctccgaggccaggccggctttttctccacccccgggggtgcctcccgcgacggctccggtccaggcgaggaaggaaagcagcgcactctcaccaccc

SEQ ID NO: 219225 - DNA, 120 bp, Artificial Sequence
  ENSG00000116903_5 (sequence is synthesized)
tgcttgagaaggtggaaggctgcaggcatctgctggagacgccgggacagtacttggtgtacaatggggacctagtggaatacgatgcggaccacatggcccaactgcagcgggtgcacg

SEQ ID NO: 219226 - DNA, 120 bp, Artificial Sequence
  ENSG00000116903_6 (sequence is synthesized)
gctttctcatgaacgattgcttgttggtggctacctggctgcctcagcggcgtgggatgtatcgctacaacgctctctattccctagatggtttggccgtagtcaatgtcaaggacaacc

SEQ ID NO: 219227 - DNA, 120 bp, Artificial Sequence
  ENSG00000116903_7 (sequence is synthesized)
cgcccatgaaggacatgttcaagctgcttatgttccccgagagccgtattttccaggccgaaaatgctaaaatcaaacgagagtggctggaagtgctggaggacaccaagagggccctca

SEQ ID NO: 219228 - DNA, 120 bp, Artificial Sequence
  ENSG00000116903_8 (sequence is synthesized)
gtgagaaaaggcgaagggagcaggaggaggcagcggcccctcgagggccaccccaagtgacttccaaggccactaacccatttgaggatgacgaagaagaagaaccagctgttcctgagg

SEQ ID NO: 219229 - DNA, 120 bp, Artificial Sequence
  ENSG00000116903_9 (sequence is synthesized)
tagaggaagagaaggtggacctctccatggaatggatccaggagttacctgaagacctggatgtctgcattgcgcagagagactttgaaggggcggttgacctgctggataaattgaacc

SEQ ID NO: 219230 - DNA, 120 bp, Artificial Sequence
  ENSG00000116903_10 (sequence is synthesized)
attacctggaagataaacctagcccacctcctgtaaaagaactaagggccaaagtggaggagcgagttcgacagctcactgaggtgctagttttcgaactctccccagatcgttccctga

SEQ ID NO: 219231 - DNA, 120 bp, Artificial Sequence
  ENSG00000116903_11 (sequence is synthesized)
gaggtggtccgaaggctactcgcagagcagtttcgcaactgatccggctgggccagtgcacgaaggcctgtgagctatttttgagaaacagggcagccgctgttcatactgcaattcgtc

SEQ ID NO: 219232 - DNA, 120 bp, Artificial Sequence
  ENSG00000116903_12 (sequence is synthesized)
agcttcgcatcgaaggtgccactttactctatattcataagctgtgccatgtcttctttaccagccttctcgagactgcaagagaatttgagatcgattttgcaggcactgacagcggct

SEQ ID NO: 219233 - DNA, 120 bp, Artificial Sequence
  ENSG00000116903_13 (sequence is synthesized)
gctactctgcctttgtggtctgggcaagatcagccatgggcatgttcgtggatgcttttagcaagcaggtgtttgatagtaaggagagcctctctacagcagctgagtgtgtaaaagtgg

SEQ ID NO: 219234 - DNA, 120 bp, Artificial Sequence
  ENSG00000116903_14 (sequence is synthesized)
ctaaggagcattgccagcaactgggtgatatcggactggatctcaccttcatcatccatgcccttctggtgaaagacatccaaggggccttgcacagttacaaagaaatcatcattgaag

SEQ ID NO: 219235 - DNA, 120 bp, Artificial Sequence
  ENSG00000116903_15 (sequence is synthesized)
ccactaaacatcgcaactctgaagagatgtggaggaggatgaacttgatgacgccagaagccctgggtaagctcaaagaagagatgaaaagttgtggggtaagtaactttgagcagtaca

SEQ ID NO: 219236 - DNA, 120 bp, Artificial Sequence
  ENSG00000116903_16 (sequence is synthesized)
caggggatgactgctgggtgaacctaagttacacagtggttgctttcaccaaacagaccatgggcttcttggaagaggccctgaagctgtatttcccagagctgcacatggtacttttgg

SEQ ID NO: 219237 - DNA, 120 bp, Artificial Sequence
  ENSG00000116903_17 (sequence is synthesized)
agagcctggtggaaatcattttggttgctgttcagcatgtggattatagtcttcgatgtgagcaggatccagagaagaaagcttttatcagacagaatgcatcctttttatatgaaacag

SEQ ID NO: 219238 - DNA, 120 bp, Artificial Sequence
  ENSG00000116903_18 (sequence is synthesized)
tcctccctgtggtggagaaaaggtttgaagaaggtgtggggaaacctgccaagcaactccaagatctgaggaatgcatctagacttattcgtgtgaatcctgaaagtacaacatcagtgg

SEQ ID NO: 219239 - DNA, 120 bp, Artificial Sequence
  ENSG00000116903_19 (sequence is synthesized)
tctaatgcttgggtctgtttatatgtgtatatatgcagagagagagcttatatattatttatatttatattaagttgtattagcatactctatagtttcaaacacaacttgaaaattaaa

SEQ ID NO: 219240 - DNA, 120 bp, Artificial Sequence
  ENSG00000116903_20 (sequence is synthesized)
agtgccctcttaaaaatacaaaaatcaaaaagaggaaaataagttaaattaagcccaagtaacaaaaatactggaattattaaaacgtatagtatgctagctatccttttaaattatgct

SEQ ID NO: 219241 - DNA, 120 bp, Artificial Sequence
  ENSG00000116903_21 (sequence is synthesized)
tgataaaacttttcttttttcttttttttttttgagacagggtctcaccccgtcgcacaggctggagtgcagtggcaaagtctcgactcactgcagccttgacctcccgggcccaggtag

SEQ ID NO: 219242 - DNA, 82 bp, Artificial Sequence
  ENSG00000116903_22 (sequence is synthesized)
tctcgactcactgcagccttgacctcccgggcccaggtagtcctcccacctcagcctcccatgtagcaggaaccacaggcag

SEQ ID NO: 219243 - DNA, 120 bp, Artificial Sequence
  ENSG00000116903_23 (sequence is synthesized)
tcttctttttttttttccccacagtatatattatacagcagtcataatatctataaatacatagagtttatgttgtgaagtttcccagttcactgaaatgttaggtttcctaaagggtac

SEQ ID NO: 219244 - DNA, 120 bp, Artificial Sequence
  ENSG00000116903_24 (sequence is synthesized)
agtgccgtataaaacaacctgcctcatatatttctcctcaaaacgttggactatttgggaaaaggaaaagagttgggaaaattggttttaaggtaagttttagtcaaaagaattctttct

SEQ ID NO: 219245 - DNA, 120 bp, Artificial Sequence
  ENSG00000116903_25 (sequence is synthesized)
tgaaactagctggtttgtggattcagatactctgatccttacagaatccaagaggaagctttcataaaaacaattcagcaaatatttccaatataatttgaatggctaattttcagttgc

SEQ ID NO: 219246 - DNA, 120 bp, Artificial Sequence
  ENSG00000116903_26 (sequence is synthesized)
taattaattagcagctttgtaatacttgatttgggagcatttacttggaaatcctaaggactataataaaagttttcaacatatttctaaattgtgtgagtttccagctgtagcttttgt

SEQ ID NO: 219247 - DNA, 120 bp, Artificial Sequence
  ENSG00000116903_27 (sequence is synthesized)
ctttgtcacattttaaaaaataataagcaagacacattggggacactggcagcagttgccaggttttagctgccaccgcttcagtatgagatatagctgtcccatcttcccccattcagg

SEQ ID NO: 219248 - DNA, 120 bp, Artificial Sequence
  ENSG00000116903_28 (sequence is synthesized)
gtaggagatatagtgacccagacttcatgcaaatggaaaaaaagttttaactgaaatatttatttagatttcagggtctagatggatgggaaagtagaaaaacatatgcaaatctcagtg

SEQ ID NO: 219249 - DNA, 120 bp, Artificial Sequence
  ENSG00000116903_29 (sequence is synthesized)
ttctcactatgaccactctgagcagagatttggttttgtttccttttgtaacaaagtgaaaacaggtgagacaatgtgcccaaaacaaagggaagaagagaaccttctgtgactcctaaa

SEQ ID NO: 219250 - DNA, 120 bp, Artificial Sequence
  ENSG00000116903_30 (sequence is synthesized)
atgttccatgctgcatttttgtttcattttttatttttccttgctttgtttttaaacatgaatataatgcttacttcaaattgtttagtaaaacaaaataactaaagaaatgtgagcttc

SEQ ID NO: 219251 - DNA, 120 bp, Artificial Sequence
  ENSG00000116903_31 (sequence is synthesized)
ccaaggtttctaaactatcgctgttgtatattctatagcgttccttattctttgagggaaactgtgcttgctgtgatccattttgtctctagcttctagttgtgattcttgtccataagc

SEQ ID NO: 219252 - DNA, 120 bp, Artificial Sequence
  ENSG00000116903_32 (sequence is synthesized)
accaaatttgatgcccatgatttcaaaaggtcatttcttttatctgaatgaaaatggtggtactaagactgtgaaaattatgtgaaacctaaagtagttgccaaagtggctcagggttgt

SEQ ID NO: 219253 - DNA, 120 bp, Artificial Sequence
  ENSG00000116903_33 (sequence is synthesized)
aaaattcattgacttaattattcatgtgccagatcaacccctttattttctctttagctgtgcatatttaaaatattggaaagtatcagatttacagattttctttgactaatttttttc

SEQ ID NO: 219254 - DNA, 120 bp, Artificial Sequence
  ENSG00000116903_34 (sequence is synthesized)
acataactttaggattttcgaaagttgtaaccataactggatatcttagctgagcaaaggcggttataatttgtctttttaagatcactggaaattgataaaattttgtgataattatga

SEQ ID NO: 219255 - DNA, 120 bp, Artificial Sequence
  ENSG00000116903_35 (sequence is synthesized)
ttattctgtgccatttacagtttctaatactatactgtatgaaatatgtataaatatatgatgctgagtctgtggaatgatacttctgaaatcaaaattcctcataaggcatgaagttgt

SEQ ID NO: 219256 - DNA, 120 bp, Artificial Sequence
  ENSG00000116903_36 (sequence is synthesized)
aaaaacttgaatgtgtatagttagatatttaaatggttgcttcttcatagaattgtctgctttttaaaactggaagtacaggattttcttcaggtaaaatctgtgtgttccaattacagt

SEQ ID NO: 219257 - DNA, 120 bp, Artificial Sequence
  ENSG00000116903_37 (sequence is synthesized)
tgtagctgaaggaagtatgctttggtgagtcaattagtatgggaacttgactaaagacccccagtgttgtaacgtacctttgtacccagacaaaacaattatgttacattcctcaaagtg

SEQ ID NO: 219258 - DNA, 120 bp, Artificial Sequence
  ENSG00000116903_38 (sequence is synthesized)
gcatgggctttcttctctaattcttctgttttattagacccaagacaagttctaaaaattgaatgcaatgagagattgtccagaaatgtaatatatactaaaatataccacttaagcatt

SEQ ID NO: 219259 - DNA, 120 bp, Artificial Sequence
  ENSG00000116903_39 (sequence is synthesized)
gattgccttttcttgtttgcttcaagaatataaaacttgttacttgagcttggaatcatgggcttgattgaattaattactcttggggaaaaaagacaccttgtggcattaagtcttgct

SEQ ID NO: 219260 - DNA, 120 bp, Artificial Sequence
  ENSG00000116903_40 (sequence is synthesized)
ttggttaaagccttatttcacataattgctaaaaactcatttttgtttaatatactacctatagtttaattatcggcacttgtattttgtaacttgatatcttacctaggattgggaatt

SEQ ID NO: 219261 - DNA, 120 bp, Artificial Sequence
  ENSG00000116903_41 (sequence is synthesized)
tgggacatgacatgtactataaaagtcagtctatgtacatactgcttattgatgtgctgtgatatgagggaatctgaaatgtttcataaaaataaagcttaaaaattgtcttacactgga

SEQ ID NO: 219262 - DNA, 120 bp, Artificial Sequence
  ENSG00000116906_0 (sequence is synthesized)
ccgtcctggctgagatggcggcgcccgggatcctgtgtagcggctgcagagggtgccgccgccctaggcgaagtagggccgtcctgagcgaaagaaccgcccccagcaggagcaccacca

SEQ ID NO: 219263 - DNA, 120 bp, Artificial Sequence
  ENSG00000116906_1 (sequence is synthesized)
cggcttagcaaagaatcccagaccccgcccgggaaggcagccgcaccatggagtcttccagttcatctaactcttatttctccgttggcccaaccagtcccagcgctgtcgtgctcctct

SEQ ID NO: 219264 - DNA, 120 bp, Artificial Sequence
  ENSG00000116906_2 (sequence is synthesized)
actcgaaggagctcaaaaagtgggatgagtttgaagatattttagaagagaggaggcatgtcagtgacttgaaatttgcaatgaaatgctacacacctcttgtctataagggaattactc

SEQ ID NO: 219265 - DNA, 120 bp, Artificial Sequence
  ENSG00000116906_3 (sequence is synthesized)
catgtaaaccaattgatattaaatgtagtgttctcaattctgaggagattcattatgtcattaaacagctttccaaggaatcccttcaatctgtggatgtcctccgagaggaagtgagtg

SEQ ID NO: 219266 - DNA, 120 bp, Artificial Sequence
  ENSG00000116906_4 (sequence is synthesized)
agatcttagatgaaatgagtcacaaactgcgtcttggagccattcggttttgtgccttcaccctgagcaaagtatttaaacaaattttctcgaaggtgtgtgtaaatgaagaaggtattc

SEQ ID NO: 219267 - DNA, 120 bp, Artificial Sequence
  ENSG00000116906_5 (sequence is synthesized)
agaaactacaaagagccatccaggagcatcctgttgttctgctgcctagtcatcgaagttacattgacttcctcatgttgtcttttcttctatacaattatgatttgcctgtgccagtta

SEQ ID NO: 219268 - DNA, 120 bp, Artificial Sequence
  ENSG00000116906_6 (sequence is synthesized)
tagcagcaggaatggacttcctgggaatgaaaatggttggtgagctgctacgaatgtcgggtgcctttttcatgcggcgtacctttggtggcaataaactctactgggctgtattctctg

SEQ ID NO: 219269 - DNA, 120 bp, Artificial Sequence
  ENSG00000116906_7 (sequence is synthesized)
aatatgtaaaaactatgttacggaatggttatgctcctgttgaatttttcctcgaagggacaagaagccgctctgccaagacattgactcctaaatttggtcttctgaatattgtgatgg

SEQ ID NO: 219270 - DNA, 120 bp, Artificial Sequence
  ENSG00000116906_8 (sequence is synthesized)
agccattttttaaaagagaagtttttgatacctaccttgtcccaattagtatcagttatgataagatcttggaagaaactctttatgtgtatgagcttctaggggttcctaaaccaaaag

SEQ ID NO: 219271 - DNA, 120 bp, Artificial Sequence
  ENSG00000116906_9 (sequence is synthesized)
agtctacaactgggttgctgaaagccagaaagattctctctgaaaattttggaagcatccatgtgtactttggagatcctgtgtcacttcgatctttggcagctgggaggatgagtcgga

SEQ ID NO: 219272 - DNA, 120 bp, Artificial Sequence
  ENSG00000116906_10 (sequence is synthesized)
gctcatataacttggttccaagatacattcctcagaaacagtctgaggacatgcatgcctttgtcactgaagttgcctacaaaatggagcttctgcaaattgaaaacatggttttgagcc

SEQ ID NO: 219273 - DNA, 120 bp, Artificial Sequence
  ENSG00000116906_11 (sequence is synthesized)
ctggaccctaatagttgctgttctgcttcagaaccggccatccatggactttgatgctctggtggaaaagactttatggctaaaaggcttaacccaggcatttggagggtttctcatttg

SEQ ID NO: 219274 - DNA, 120 bp, Artificial Sequence
  ENSG00000116906_12 (sequence is synthesized)
gcctgataataaacctgctgaagaagttgtcccggccagcattcttctgcattccaacattgccagccttgtcaaagaccaggtgattctgaaagtggactccggagactcggaagtggt

SEQ ID NO: 219275 - DNA, 120 bp, Artificial Sequence
  ENSG00000116906_13 (sequence is synthesized)
cgatgggcttatgctccagcacatcactctcctcatgtgctcagcttataggaaccagctgctcaacatttttgtgcgcccatccttagtagcagtagcattgcagatgacaccagggtt

SEQ ID NO: 219276 - DNA, 120 bp, Artificial Sequence
  ENSG00000116906_14 (sequence is synthesized)
caggaaagaggatgtctacagttgctttcgcttcctacgtgatgtttttgcagatgagttcatcttccttccaggaaacacactaaaggactttgaagaaggctgttacctgctttgtaa

SEQ ID NO: 219277 - DNA, 120 bp, Artificial Sequence
  ENSG00000116906_15 (sequence is synthesized)
aagtgaagccatacaagtgactacgaaagacatcctagttacagagaaaggaaatactgtgttagaatttttagtaggactctttaaaccttttgtggaaagctatcagataatttgcaa

SEQ ID NO: 219278 - DNA, 120 bp, Artificial Sequence
  ENSG00000116906_16 (sequence is synthesized)
gtaccttttgagtgaagaagaggaccacttcagtgaggaacagtacttggctgcagtcagaaaattcacaagtcagcttctcgatcaaggtacctctcaatgttatgatgtattatcttc

SEQ ID NO: 219279 - DNA, 120 bp, Artificial Sequence
  ENSG00000116906_17 (sequence is synthesized)
tgatgtgcagaaaaacgccttagcagcctgtgtgaggctcggagtagtggagaagaagaagataaataataactgtatatttaatgtgaatgaacctgccacaaccaaattagaagaaat

SEQ ID NO: 219280 - DNA, 120 bp, Artificial Sequence
  ENSG00000116906_18 (sequence is synthesized)
gcttggttgtaagacaccaataggaaaaccagccactgcaaaactttaataatcaacaaatagttatggaaaattcggtcacgtaattactctcatcgaaggactcattacaacaaacag

SEQ ID NO: 219281 - DNA, 120 bp, Artificial Sequence
  ENSG00000116906_19 (sequence is synthesized)
ggaagtaaaggaagagacacatcctctcatactccctgagactctgagaacagtggacgcagagggaagagatgatcattggaagcaatcagtttactcttccccaccacagtggttaaa

SEQ ID NO: 219282 - DNA, 120 bp, Artificial Sequence
  ENSG00000116906_20 (sequence is synthesized)
aggcgtttgtatctgacactatgtgtgtgttttaaaataaacttttggaaacatgtttggaaaagcaaagctcagctcatttcactaacacttttcagcttactatatgtattaaacttt

SEQ ID NO: 219283 - DNA, 120 bp, Artificial Sequence
  ENSG00000116906_21 (sequence is synthesized)
tatgttgacttttgaattaaagtatgacaacactgaaagctctggatattaaaagaaaatgaaaagggcatatctacgttacttgtagcttgctttaattaaagttgcctcaaacaagta

SEQ ID NO: 219284 - DNA, 120 bp, Artificial Sequence
  ENSG00000116906_22 (sequence is synthesized)
attaaaatctgacccctctcttcccaagtagcataagagatacgaagctgatggtaattaacttgtaccccttgaagtgagaaattatactttaataaatgtcattattattttaaatct

SEQ ID NO: 219285 - DNA, 120 bp, Artificial Sequence
  ENSG00000116906_23 (sequence is synthesized)
ttttctaattgtaaaatgtaaactcaaaggagatgccctaaaaattctttggtttttctgggctcattccttggagggtctttatgctgctctcttgtgatatatccttctcttaagagg

SEQ ID NO: 219286 - DNA, 120 bp, Artificial Sequence
  ENSG00000116906_24 (sequence is synthesized)
agcaagctgagacaaggcaagttgttcaagaatgaatgtgatcaagtccaggaggaagccatacctctcacttgtccctgccttgaagcagtagcagaacttgccacccaacttgagcag

SEQ ID NO: 219287 - DNA, 120 bp, Artificial Sequence
  ENSG00000116918_0 (sequence is synthesized)
ccggccactgcgttgtagtcggcccggctgcaaagcgtttttctgcaggctgttttcccaggttccctcggcctgtacctcgcgcactcctcttgctccaggtccttcagtctccgctcg

SEQ ID NO: 219288 - DNA, 120 bp, Artificial Sequence
  ENSG00000116918_1 (sequence is synthesized)
tctcaccgtaggctgtgacgacatgagcaacaaagaaggatcaggagggttcaggaaaaggaagcatgacaatttcccacataaccaaagaagagaagggaaggatgttaattcatcttc

SEQ ID NO: 219289 - DNA, 120 bp, Artificial Sequence
  ENSG00000116918_2 (sequence is synthesized)
acccgtgatgttggcctttaaatcatttcagcaggaacttgatgcaaggcatgacaaatatgagagacttgtgaaacttagtcgggatataactgttgaaagtaaaaggacaatttttct

SEQ ID NO: 219290 - DNA, 120 bp, Artificial Sequence
  ENSG00000116918_3 (sequence is synthesized)
cctccataggattacaagtgctcctgatatggaagatatattgactgaatcagaaattaaattggatggtgtcagacaaaagatattccaggtagcccaagagctatcaggggaagatat

SEQ ID NO: 219291 - DNA, 120 bp, Artificial Sequence
  ENSG00000116918_4 (sequence is synthesized)
gcatcagttccatcgagccattactacaggactacaggaatatgtggaagctgtctcttttcaacacttcatcaaaacacgatcattaattagtatggatgaaattaataaacaattgat

SEQ ID NO: 219292 - DNA, 120 bp, Artificial Sequence
  ENSG00000116918_5 (sequence is synthesized)
atttacgactgaagacaatgggaaagaaaataaaactccctcctctgatgcacaggataagcagtttggtacttggagactgagagtcacacctgtcgattaccttctgggagtggctga

SEQ ID NO: 219293 - DNA, 120 bp, Artificial Sequence
  ENSG00000116918_6 (sequence is synthesized)
cttaactggagaattgatgcggatgtgtattaacagtgtggggaatggggacattgataccccctttgaagtgagccagtttttacgtcaggtttatgatgggttttcattcattggcaa

SEQ ID NO: 219294 - DNA, 120 bp, Artificial Sequence
  ENSG00000116918_7 (sequence is synthesized)
cactggaccttacgaggtttctaagaagctgtataccttgaaacaaagtttggccaaagtggagaatgcttgttatgccttgaaagtcagagggtcagaaattccaaaacatatgttggc

SEQ ID NO: 219295 - DNA, 120 bp, Artificial Sequence
  ENSG00000116918_8 (sequence is synthesized)
agatgtgttttcagttaaaacagaaatgatagatcaagaagagggcatttcttagaatctaacgttactcagttactaattcttttgagaactcctaagagaccaatttgtaagacttat

SEQ ID NO: 219296 - DNA, 120 bp, Artificial Sequence
  ENSG00000116918_9 (sequence is synthesized)
ttagtatttcatttaactttattgtggcttttacatagaaacatattcagttgtacttgttttaaattgtatacaagctgtacataaaattagccaaatgaatcatttcttatatcttat

SEQ ID NO: 219297 - DNA, 120 bp, Artificial Sequence
  ENSG00000116918_10 (sequence is synthesized)
aacctattttaatttactttttctgaagtttggagtgataatttttagtggaagcaatttgtaatttaagttggtagttatattatatatagaaaagattttttagttaaacttctggac

SEQ ID NO: 219298 - DNA, 120 bp, Artificial Sequence
  ENSG00000116918_11 (sequence is synthesized)
atgagcgtcctgtttaaatttcttgttaatatcgtgccaagcctcaaaaataggcttattccatggaacaagaattaaaaatgaataagctatcaatatataatttaagtacaagtttag

SEQ ID NO: 219299 - DNA, 120 bp, Artificial Sequence
  ENSG00000116918_12 (sequence is synthesized)
gcaagactccatctcaaaaaaagaaagaaagaaaaaagaaagtacaagtttataaagtattatagtgaaaaattcgcattctggctgattttaagccatttaaaatttatataaaacaac

SEQ ID NO: 219300 - DNA, 120 bp, Artificial Sequence
  ENSG00000116918_13 (sequence is synthesized)
catttaaaatttatataaaacaaccttccataaaaatttgacaggtgcccagatgttgctttctccatttattttttgtttttttttaatcacagtaggtctgatagagaattggagcta

SEQ ID NO: 219301 - DNA, 120 bp, Artificial Sequence
  ENSG00000116918_14 (sequence is synthesized)
aattataatatttttgttggtaaagttgagttatatacttgtacatacaatggaaatgcttttagtagtgattatttagcaatttttgtttttgttatattaggcatgtttggaggcttt

SEQ ID NO: 219302 - DNA, 120 bp, Artificial Sequence
  ENSG00000116918_15 (sequence is synthesized)
taaataatttaaatctagcatttaaatttaaataatttaagtctagcatttacttttaaataattataatgaagttttgaaatactaagttaatccagacctttagttgtcccatggtgt

SEQ ID NO: 219303 - DNA, 120 bp, Artificial Sequence
  ENSG00000116918_16 (sequence is synthesized)
ctaagttaatccagacctttagttgtcccatggtgttaataaagttgccaaagaagatgtattatgaacaattcagcaataagacaattgtcaacacagttgagaataacaatggtaatc

SEQ ID NO: 219304 - DNA, 120 bp, Artificial Sequence
  ENSG00000116918_17 (sequence is synthesized)
gttagtaatatttagaattggaatttgcctactgaaatagttatagatgattacttgtgatgtgaaactgaattgagcatgacaaccagacatttccagttggttttgtaagttttgaga

SEQ ID NO: 219305 - DNA, 120 bp, Artificial Sequence
  ENSG00000116918_18 (sequence is synthesized)
atctagatactgggttttattttttgaaagattagctctgtttgtaagggctgattccttgaaaatgtaattttccagaaaaacacctaaagaaaataaaacatggacatgcctagtaaa

SEQ ID NO: 219306 - DNA, 120 bp, Artificial Sequence
  ENSG00000116918_19 (sequence is synthesized)
taatagaatattcctcaacttagatttgattaatattttctcatggttagattcaggttatgcatccctggctggaatactacataaatgatggtttgttgatttgttctttttgggggt

SEQ ID NO: 219307 - DNA, 120 bp, Artificial Sequence
  ENSG00000116918_20 (sequence is synthesized)
attgcaagggaccaagtaatgtaaggcttcataaagagtttggagtttgttaaacgtaatgcagagtcattagagagtcttaaaaactaaagtatattttagaaatgtcactctggcagc

SEQ ID NO: 219308 - DNA, 120 bp, Artificial Sequence
  ENSG00000116918_21 (sequence is synthesized)
tacagaaaggcaaggtgggcagacgcagaccagacaagagactattttgtagttccggtacagtaaggtatttgtaaggtaacttagaggtaataaagtaataaggtaacttagatttgg

SEQ ID NO: 219309 - DNA, 120 bp, Artificial Sequence
  ENSG00000116918_22 (sequence is synthesized)
atgacagtaatgaagctgatgagacagattcaacagtgctttataaaattaacttatattactattatgagtaatttatactttattccaactgcattagcatacatttgaaaaagtaat

SEQ ID NO: 219310 - DNA, 120 bp, Artificial Sequence
  ENSG00000116918_23 (sequence is synthesized)
agcagcaaaataataagacattattccatgttaggggcagtgcttattgggcacatggatttgcagttccttttcaacaatttcttagttcccaggagattgcatacccttagtacgttt

SEQ ID NO: 219311 - DNA, 120 bp, Artificial Sequence
  ENSG00000116918_24 (sequence is synthesized)
atctcaaactacaacagatgctcttatccagtatgttatactgcttatgatttcaacaagcagttcagtcaggaaatgttttgtgaacacctgctgctagacatggatctatgctctgat

SEQ ID NO: 219312 - DNA, 120 bp, Artificial Sequence
  ENSG00000116918_25 (sequence is synthesized)
acagtggtgaaacaagtgcatttacaaataaataatataattttagctagcgaaggataaatgtaaatcagtgaagcgtggtaaggaatggagagtaagggaggagggaggcacgtgatt

SEQ ID NO: 219313 - DNA, 120 bp, Artificial Sequence
  ENSG00000116918_26 (sequence is synthesized)
cttaagcagtccttgagcagaatgatatctgaatgatgaaagtgaaatgtgagatgatgagaggcagtagcaaaaatagaggcatcaagaaaggtacaagcttagagaatcaggactagc

SEQ ID NO: 219314 - DNA, 120 bp, Artificial Sequence
  ENSG00000116918_27 (sequence is synthesized)
aagaagacatagtctgcctggctcatgagctaagggcaggacatgaggcagtttaatgtgttagaggcatgaatttactatgaaaagattctagattctgcgggttatttttcccatagg

SEQ ID NO: 219315 - DNA, 120 bp, Artificial Sequence
  ENSG00000116918_28 (sequence is synthesized)
taatgtaatctttatgtagactcccagttgttgtactgttttattaaatgttaggtatatacaacgttctgtaagtatagctttgtgttctggaaaaggtaaacagtctttcttcagtta

SEQ ID NO: 219316 - DNA, 120 bp, Artificial Sequence
  ENSG00000116918_29 (sequence is synthesized)
taataccttttgctctaagtatattcacaaaactttagatgtagtcttttaaacaataatacaaagtaattattttgttaactgttaagaattttagtaaggaaaaaattttgaggctga

SEQ ID NO: 219317 - DNA, 120 bp, Artificial Sequence
  ENSG00000116918_30 (sequence is synthesized)
gaggctgaaacatctgatagtggtataatgaaagcttgttctttaaaaaaacttaaaacactgtttttgtttggcagtctcaagttaggctttccgtaaaaagtttaccaaggtaaaatt

SEQ ID NO: 219318 - DNA, 120 bp, Artificial Sequence
  ENSG00000116918_31 (sequence is synthesized)
ctttgagtctcaatattcgagactaaaacaaattaagcagagtagatgaaacttaagttagcataaaaggtaagcagattggcagttatatgtaatagatagaaacaaaagtattccatt

SEQ ID NO: 219319 - DNA, 120 bp, Artificial Sequence
  ENSG00000116918_32 (sequence is synthesized)
cagcattaagtgctgatcgaatacaggtaaggagaaaacagtaactataaggaatcaaagtgctgacatttaaggagacaaatgtatgaaaattttcctgaaggcaagacatgttagaat

SEQ ID NO: 219320 - DNA, 120 bp, Artificial Sequence
  ENSG00000116918_33 (sequence is synthesized)
tgtgaaaatgctttgttctgtaaggaaaaggatgtatgaaagtggggaggaaatcttttcttaatgtaatattatgttatgggagatttgtgtccgtaacaatttgacaggttgaagatt

SEQ ID NO: 219321 - DNA, 120 bp, Artificial Sequence
  ENSG00000116918_34 (sequence is synthesized)
aattctatgtggaagtgttgagtcttcgaagatagtatgtaagaattggacaccacagcctgcgttcagcctttcatcgatctcaggaactcttcttcattttctcctactttcagttct

SEQ ID NO: 219322 - DNA, 120 bp, Artificial Sequence
  ENSG00000116918_35 (sequence is synthesized)
cttcctagatttctaacatcctgactaactcaattttcagctgacttttttccagcctaattaaattttgatgtttcttactgatcattttcagatgaactctgccacagctttctattg

SEQ ID NO: 219323 - DNA, 120 bp, Artificial Sequence
  ENSG00000116918_36 (sequence is synthesized)
attgcagaactactttatgatctagttctctagttataacaaaactaactcatgtagtgattgtctattttcagtcatttttccttttttcttctttactaatctttctgaaaataatat

SEQ ID NO: 219324 - DNA, 120 bp, Artificial Sequence
  ENSG00000116918_37 (sequence is synthesized)
ttctgaagtatattatgcttatgtatgcaatattactacatggtaaaacagtaaatttgagattatgtactttctaaaataaacgggctaactagatttttacttagtatttaaatgtga

SEQ ID NO: 219325 - DNA, 120 bp, Artificial Sequence
  ENSG00000116918_38 (sequence is synthesized)
tataatttggtagctttttaaaaaattaagatacaatacacatactgtggcactcacttttaagaagttgtttcatgttcattttaatatacacgtgctaccttactacaattgacagat

SEQ ID NO: 219326 - DNA, 120 bp, Artificial Sequence
  ENSG00000116918_39 (sequence is synthesized)
ttttagaaaatcttcaaggattcaggaatttgtgagctgctgtgcgttgttggcatttacagaaattattagatatttagttttaaaggtttagaaatctgggaacattaactggacctc

SEQ ID NO: 219327 - DNA, 120 bp, Artificial Sequence
  ENSG00000116918_40 (sequence is synthesized)
ttgagctactttagcgctgttagtgatgtatacctaggatatttgacaattaacactagagtcagtagatgctagagattgtttataatcacctttttgtgttttgagaattagtgtcat

SEQ ID NO: 219328 - DNA, 120 bp, Artificial Sequence
  ENSG00000116918_41 (sequence is synthesized)
ttgtgttttgagaattagtgtcattaccatcgtgttctacttctgaatgaagtcaggtgactgcagtcattgtctgcatttacattgtgacatctttttttttttttcttttttttgaga

SEQ ID NO: 219329 - DNA, 120 bp, Artificial Sequence
  ENSG00000116918_42 (sequence is synthesized)
gcgtgagccaccgcacccagcatatgtgacgtacatcttaaaaatattgtttggtaggctttgagtatagaatatacatgcttatgatcataatgtgtttttagcatttcagcaggaact

SEQ ID NO: 219330 - DNA, 120 bp, Artificial Sequence
  ENSG00000116918_43 (sequence is synthesized)
gaggaaactgaggtttagagagatgaaataacttgcccaagggcatacaccttatgaagcaaggtcctggaagaggtgggaggagatgggtcaaggtcatttggaagagttaacctcaaa

SEQ ID NO: 219331 - DNA, 120 bp, Artificial Sequence
  ENSG00000116918_44 (sequence is synthesized)
gcggccgcaatagtacgctcgcgcggcggtggcgggtggtggtccttggaccacgcggtgggcggagccagcggcgacggcctcccctcccctccggacgcaggccggaagtacgtgaga

SEQ ID NO: 219332 - DNA, 120 bp, Artificial Sequence
  ENSG00000116918_45 (sequence is synthesized)
aggtaagtctaggtttgtttcagggtaatatatattttaaatggtgtgctacatgattaacatgtgagttgcatgaattttaagtgacacctgatgaaataataatactggcttttaaag

SEQ ID NO: 219333 - DNA, 120 bp, Artificial Sequence
  ENSG00000116918_46 (sequence is synthesized)
aactgcaactttgtagtaatatagaagtaatccaaaggcaagttggctttatgttttttttaacagtgtagtgatggtcattgattgattttaataaagtatttgagaacacagatttaa

SEQ ID NO: 219334 - DNA, 120 bp, Artificial Sequence
  ENSG00000116922_0 (sequence is synthesized)
gagactgtgggcgcgtggtgcagtccctggagggttctcacgctttggctgtctggacttttaagtttttccgctttttcaggaaggcgaccggcagcctcgggcaggggagacaggact

SEQ ID NO: 219335 - DNA, 120 bp, Artificial Sequence
  ENSG00000116922_1 (sequence is synthesized)
gtatgtcagagaagagacggcgcttggacgccaggaatcctctgaagcaggagactgccctatccagaagatgactcaagaccggcctctgcttgccgtgcaggaggcgctgaagaagtg

SEQ ID NO: 219336 - DNA, 120 bp, Artificial Sequence
  ENSG00000116922_2 (sequence is synthesized)
cttccccgtggtggaggagcagcagggcctgtggcagagtgccctgcgggactgccagcccctcctgtcctccctcagcaacctggcggaacagctgcaggccgcacagaacctgcggtt

SEQ ID NO: 219337 - DNA, 120 bp, Artificial Sequence
  ENSG00000116922_3 (sequence is synthesized)
tgaggatgtgccggcgcttcgggccttcccagatttaaaagagcggctgaggcgtaagcagctggtggctggtgacatcgtcctggacaagctaggggaaaggctagccatcctcctcaa

SEQ ID NO: 219338 - DNA, 120 bp, Artificial Sequence
  ENSG00000116922_4 (sequence is synthesized)
ggtgcgagacatggtcagcagccatgtggagcgagtgtttcagatctatgagcaacacgcagacacagttggcattgatgctgtcctgcagccttcagcagtgagcccctctgtggctga

SEQ ID NO: 219339 - DNA, 120 bp, Artificial Sequence
  ENSG00000116922_5 (sequence is synthesized)
catgttggaatggttgcaggatattgagagacattatcgaaagtcgtacctgaagagaaagtatcttctttcgtctatccagtggggagacttggcaaacatacaagctttgcccaaggc

SEQ ID NO: 219340 - DNA, 120 bp, Artificial Sequence
  ENSG00000116922_6 (sequence is synthesized)
ctgggaccgaatttcaaaagacgaacaccaagatcttgtacaagatatcctattgaatgtttccttcttcctggaagagtaaggaagctatgcgtatctggagaccacgggtaccacagt

SEQ ID NO: 219341 - DNA, 120 bp, Artificial Sequence
  ENSG00000116922_7 (sequence is synthesized)
tgaagactgacattctgaaccctgatgtttctaaagaaacgtcagtatttcagtctgacatatttgaaacatcagtgccttgaaccttaggactgggtcttggggaggattagcgcctag

SEQ ID NO: 219342 - DNA, 120 bp, Artificial Sequence
  ENSG00000116922_8 (sequence is synthesized)
atgtctgattttggagctgcagcatgccaggccgtggctgagagtatgtgagccatgccttgcccttttctgaggctcagggaagtggatggagctagagagacaacaggaaagacggtg

SEQ ID NO: 219343 - DNA, 120 bp, Artificial Sequence
  ENSG00000116922_9 (sequence is synthesized)
actgcccttggcatcatccaaagcattgtctggttgacaccaggtcctggttttgtgtcttttgtcaatacctgaatccttgacaaaagaaaaagtggttttgatgatttaaagaaataa

SEQ ID NO: 219344 - DNA, 120 bp, Artificial Sequence
  ENSG00000116922_10 (sequence is synthesized)
gggtgattttgacagaaaatatattttaaaaattttgaccaattgcaatagttatcctcaagccaatttccagaacctgccaccagggggaggtggtgcagcatgaatcattctgaatgc

SEQ ID NO: 219345 - DNA, 120 bp, Artificial Sequence
  ENSG00000116922_11 (sequence is synthesized)
tttgtctttgaagtgttcccctattgctgttaccatctcagaggaagtaactgggcatggtgagactcctaaaatgacaggagtttttttggccaaagctggcatctgacttgccacatt

SEQ ID NO: 219346 - DNA, 120 bp, Artificial Sequence
  ENSG00000116922_12 (sequence is synthesized)
cctctgagtctggagtagccgcaggggtgggagaatgccagcccagagtcagtccatcggggttacatttccaaggtctgctgccttcatctatgtaatggccgtgttactttcagatct

SEQ ID NO: 219347 - DNA, 120 bp, Artificial Sequence
  ENSG00000116922_13 (sequence is synthesized)
ttcagcttcccagagtgttgtgggaatcttggtcattgaatgtaaagggacttagtaaagggtatagatatttttcaaaaatgaaaataactttttttcttataagtgataagcttttat

SEQ ID NO: 219348 - DNA, 120 bp, Artificial Sequence
  ENSG00000116922_14 (sequence is synthesized)
gcttttataaagatcataggaaaactagaaaaaatgtaaaatgtagaaaattgtaaaacaaacttcattagagatattttgatagataccttttcagtgtctatttacaaattttttctt

SEQ ID NO: 219349 - DNA, 120 bp, Artificial Sequence
  ENSG00000116922_15 (sequence is synthesized)
gatagggtctcactatattgcccagctcactcctgagctcaagggatcctcccaccatagcctcccaaaatattggaaatacaggcatgagccactgctcctgaccaattcacaaatttt

SEQ ID NO: 219350 - DNA, 120 bp, Artificial Sequence
  ENSG00000116922_16 (sequence is synthesized)
tttaaagaacaaacgtgctatcatcgatacatactgttaggttgtctttttttaaaaaacctaatgtaatttgttcatctttttatatctgtaaatatagctcaacacagttatattctt

SEQ ID NO: 219351 - DNA, 120 bp, Artificial Sequence
  ENSG00000116922_17 (sequence is synthesized)
tttgtgaatgtattatatctacaatttaccttttttcttagattttacatgcattttcccaaatctttgtgtttgcctatctgtaaaggtaatacattctgattacaaaaaatgaaaatg

SEQ ID NO: 219352 - DNA, 120 bp, Artificial Sequence
  ENSG00000116922_18 (sequence is synthesized)
ttacatagaaatgtaccgttatccatctaccagataactattattaataatgtgtatttatttttccaggaattaaaaaacatctatcatataagtattgcaaataaaacttaaaaagca

SEQ ID NO: 219353 - DNA, 120 bp, Artificial Sequence
  ENSG00000116922_19 (sequence is synthesized)
acggcgcttggacgccaggaatcctctgaagcaggagactgccctatccaggttacccttcccgaggggaaaccagggtctccttcagaaagctgaggcaggccgggcgcggtggctcac

SEQ ID NO: 219354 - DNA, 120 bp, Artificial Sequence
  ENSG00000116922_20 (sequence is synthesized)
ctttgattttccctctctgtccccatcccctctgttgcttacatggcttcttagctctcacttggactcttaattgcctcttgacagttttctctgtctagtttctttccttctaagctg

SEQ ID NO: 219355 - DNA, 120 bp, Artificial Sequence
  ENSG00000116922_21 (sequence is synthesized)
actccaatgaatgacctctatatctgcaggaagtctggttctgatcctgatagttaggatcagaattgttctgtactgtataggaatagctcctgttgctaatgggataaagttcagagc

SEQ ID NO: 219356 - DNA, 120 bp, Artificial Sequence
  ENSG00000116922_22 (sequence is synthesized)
cctgcgttggtacttggtgttctttctgttctggctcagcccacctttcagcctttctgactgctctccatgtggcgtccatgctgagcagactggaagatttgctttccctgaattcat

SEQ ID NO: 219357 - DNA, 120 bp, Artificial Sequence
  ENSG00000116922_23 (sequence is synthesized)
tctatgcatctccacctctgtgcctttgttcatgtttcctaccagctggggtgtccctgcttcctctgaattggatgtatttatcctctgaacctccgctagctttacctctcatgtccc

SEQ ID NO: 219358 - DNA, 120 bp, Artificial Sequence
  ENSG00000116922_24 (sequence is synthesized)
ttttgttctttcttttcaggatctgattttgtcctcaccatgctgagatcccagatttcagggatggtttcattcctctttccctgtagcacaaagccatgttagtaaacagttgctcag

SEQ ID NO: 219359 - DNA, 120 bp, Artificial Sequence
  ENSG00000116922_25 (sequence is synthesized)
gaaatatttgtagcataggtgaatcaggcccacctggtaaaatgtaaggatatctgcactttcacttttatggctccctctggttctcaccagggtgttttttttcacttcagcatactg

SEQ ID NO: 219360 - DNA, 120 bp, Artificial Sequence
  ENSG00000116922_26 (sequence is synthesized)
atttcaaaagacgaacaccaagatcttgtacaaggtactggtttgtgttcttcctttgtgtctcctctcctcctttctctccctgtggctcgcctctttggaagcattaggaaggtgccc

SEQ ID NO: 219361 - DNA, 76 bp, Artificial Sequence
  ENSG00000116922_27 (sequence is synthesized)
gaaaaaaaaacaaaaaaaaaaccctgcttctggagcagaagatgactcaagaccggcctctgcttgccgtgcagga

SEQ ID NO: 219362 - DNA, 120 bp, Artificial Sequence
  ENSG00000116922_28 (sequence is synthesized)
gtggcggctctgcaataccccaagctctggagggctgggggcctactaggtcaggtcggctgtaggattctgctccagggttggcggctgcttctttctggcctggctgccactgagtag

SEQ ID NO: 219363 - DNA, 120 bp, Artificial Sequence
  ENSG00000116922_29 (sequence is synthesized)
ccgaggggccgccgtgaccctctgactgattgactggctggctgcctacgtcggcgctcctcagggccccaagctcctcaggccgaacttcgggaaggcgaccggcagcctcgggcaggg

SEQ ID NO: 219364 - DNA, 120 bp, Artificial Sequence
  ENSG00000116922_30 (sequence is synthesized)
gacccagaaggctagaggctagtttcgaagctgtagctcaggctgagtctcaaggcgggcggcgactggacggccagaccggcgagctcttgacgggtttgtggcctgattgtttggatt

SEQ ID NO: 219365 - DNA, 120 bp, Artificial Sequence
  ENSG00000116922_31 (sequence is synthesized)
tgaagccatgtcagaggggttgtgtttaagcgtgcatgttataggctatgggagtgataatcttgcctctccccctctgagttgaggaacaatcgaagaaataagcaaaggtgccaagca

SEQ ID NO: 219366 - DNA, 120 bp, Artificial Sequence
  ENSG00000116922_32 (sequence is synthesized)
ggctcctgatgggcaccagcgagcttggggacagagcagtccaagcatagaagtcctggcaagcctggaccttcctggaaagtcctttctctctcttccaccctggtctgttgctccata

SEQ ID NO: 219367 - DNA, 120 bp, Artificial Sequence
  ENSG00000116922_33 (sequence is synthesized)
tgcaacaaatatttgaatgtcgctcttccgcccgaggtcagccctgggcagtgggtagtgggggtgacaccccagtctgctgggtgcctgaggatctccatcagtcagatggccaagatg

SEQ ID NO: 219368 - DNA, 80 bp, Artificial Sequence
  ENSG00000116954_0 (sequence is synthesized)
gaggcggactggggaggcggcggcctggctcggcctggcctggcctgtcagggcgcgggcggcggcggctccagcaccat

SEQ ID NO: 219369 - DNA, 120 bp, Artificial Sequence
  ENSG00000116954_1 (sequence is synthesized)
agcaccatgtccctgcagtacggggcggaggagacgcccctcgccggcagttacggcgcggccgattcgtttccaaaggacttcggctacggcgtggaggaggaggaagaggaggcggcg

SEQ ID NO: 219370 - DNA, 120 bp, Artificial Sequence
  ENSG00000116954_2 (sequence is synthesized)
gcggcgggcggaggggttggggcaggggcaggcggtggctgtggtccggggggcgctgacagctccaagccgaggattctgctcatgggactccggcgcagcggcaagtcctccatccag

SEQ ID NO: 219371 - DNA, 120 bp, Artificial Sequence
  ENSG00000116954_3 (sequence is synthesized)
aaggtggtgtttcataagatgtcacccaacgagaccctctttttggaaagtaccaacaagatttataaggatgacatttccaatagctcctttgtgaatttccagatatgggattttcct

SEQ ID NO: 219372 - DNA, 120 bp, Artificial Sequence
  ENSG00000116954_4 (sequence is synthesized)
gggcaaatggacttttttgacccaacctttgactatgagatgatcttcaggggaacaggagcattgatatacgtcattgacgcacaggatgactacatggaggctttaacaagacttcac

SEQ ID NO: 219373 - DNA, 120 bp, Artificial Sequence
  ENSG00000116954_5 (sequence is synthesized)
attactgtttctaaagcctacaaagttaacccagacatgaattttgaggtttttattcacaaagttgatggtctgtctgatgatcacaaaatagaaacacagagggacattcatcaaagg

SEQ ID NO: 219374 - DNA, 120 bp, Artificial Sequence
  ENSG00000116954_6 (sequence is synthesized)
gccaatgatgaccttgcagatgctgggctagaaaaactccatcttagcttttatctgactagtatctatgaccattcaatatttgaagcctttagtaaggtggtgcagaaactcattcca

SEQ ID NO: 219375 - DNA, 120 bp, Artificial Sequence
  ENSG00000116954_7 (sequence is synthesized)
caactgccgaccttggaaaacctattaaatatctttatatcaaattcaggtattgaaaaagcttttctctttgatgttgtcagcaaaatctacattgcaacagacagttcccctgtggat

SEQ ID NO: 219376 - DNA, 120 bp, Artificial Sequence
  ENSG00000116954_8 (sequence is synthesized)
atgcaatcttatgaactttgctgtgacatgatcgatgttgtaattgatgtgtcttgtatatatgggttaaaggaagatggaagtggaagtgcttatgacaaagaatctatggcaattatc

SEQ ID NO: 219377 - DNA, 120 bp, Artificial Sequence
  ENSG00000116954_9 (sequence is synthesized)
aagctgaataatacaactgtcctttatttaaaggaggtgactaaatttttggcactggtctgcattctaagggaagaaagctttgaaagaaaaggtttaatagactacaacttccactgt

SEQ ID NO: 219378 - DNA, 120 bp, Artificial Sequence
  ENSG00000116954_10 (sequence is synthesized)
ttccgaaaagctattcatgaggtttttgaggtgggtgtgacttctcacaggagctgtggtcaccagactagtgcctccagtctgaaagcgctgacacacaatggcacgccacgaaacgcc

SEQ ID NO: 219379 - DNA, 120 bp, Artificial Sequence
  ENSG00000116954_11 (sequence is synthesized)
ctcttcactccagggtcggatgccacgtgctacaggacatgggagctgctgcttgtgggaatctggtgcctgttccactagagacaaggggtagagtttctcatttggatgaaaacccct

SEQ ID NO: 219380 - DNA, 120 bp, Artificial Sequence
  ENSG00000116954_12 (sequence is synthesized)
tcaactggtggtgtacaactgaagctactatatcttttttgaaaatggcaaaaaaaaaaaaaaaaaattctggagaccacagaactcaagtgtgtgtttctcctcttttgggtccccttt

SEQ ID NO: 219381 - DNA, 120 bp, Artificial Sequence
  ENSG00000116954_13 (sequence is synthesized)
aagtagttgggatattttggacctggagataacaccagttacccatccttaccagggaatgttgccatcaattccagttgaaaataatagaaaagactgaatttttatatgcttcactta

SEQ ID NO: 219382 - DNA, 120 bp, Artificial Sequence
  ENSG00000116954_14 (sequence is synthesized)
ggctttcatttgagtagactctaaaaattctgccttgcttaagttctaacactgcctctcagatttcagttttggacattgcacaactaagaccttttaaatgcatttgcttgctaactc

SEQ ID NO: 219383 - DNA, 120 bp, Artificial Sequence
  ENSG00000116954_15 (sequence is synthesized)
ggaagacacatagtctgcagcaagacattcctatattgaagaaatgagagaaaattttatgctgcatcaggtggagagcaaggctcaacggtggttgcattagttccctcggaagtattg

SEQ ID NO: 219384 - DNA, 120 bp, Artificial Sequence
  ENSG00000116954_16 (sequence is synthesized)
aaaaaactttgaaatggaagaaaatttttgcacctatgttctgagtaccagatgtctgggttctttcttctgcattagataaatgatcatgctcagtgtaacaaagggaattaaaagttt

SEQ ID NO: 219385 - DNA, 120 bp, Artificial Sequence
  ENSG00000116954_17 (sequence is synthesized)
tcccacagtccccttctaggggagaaactcattgtgtcactgaaatgtttagcttactttaatcttgatatcagcctctacagaccttttattctaagctatcgagcttcttgattgcat

SEQ ID NO: 219386 - DNA, 120 bp, Artificial Sequence
  ENSG00000116954_18 (sequence is synthesized)
ttggttgaccacgagtgaccctaaggcattgggggactgtccactgggagttggagtgagcacgtggtgctgcaacaggcattgttttacatactttgtctctagtattctgacaccaag

SEQ ID NO: 219387 - DNA, 120 bp, Artificial Sequence
  ENSG00000116954_19 (sequence is synthesized)
tgtcaactgtggtactttctttgcctaggatatgaattcataattgttgcttttgttgatggttgataccctttccattgatttaaacctaacacattatttctattccacatgcccagt

SEQ ID NO: 219388 - DNA, 120 bp, Artificial Sequence
  ENSG00000116954_20 (sequence is synthesized)
agacatatattccaaagccactggaccacttgagtacataagtgccactgtttaatgcaatatgtatattcaggtctgtaaagctaacagtgtgacttggagtgcttcctgcaggtgatt

SEQ ID NO: 219389 - DNA, 120 bp, Artificial Sequence
  ENSG00000116954_21 (sequence is synthesized)
ctgacttgagtatttacatggaccatggtgatatccaaaagaaaaatgctttttatatttatagattatttcattgaactatatatgaaatgggtatcaataaatgtatttactccaaaa

SEQ ID NO: 219390 - DNA, 120 bp, Artificial Sequence
  ENSG00000116954_22 (sequence is synthesized)
gaaaaagatgtagaaacaaaggaaagttgtttatcttctttgtcatgtggttgcagcttatctctttggcagtagattccctaacagtgtaagagatgcagttgcagagtgctttgggag

SEQ ID NO: 219391 - DNA, 120 bp, Artificial Sequence
  ENSG00000116954_23 (sequence is synthesized)
ccccctgtgtaaatgcagtaaagagatgaagccaggtgggaaagtgtatttgtcatcttgagtgatgggtatggtagacaagataaagaggctttattgaactcactgaaatcaaatgtt

SEQ ID NO: 219392 - DNA, 120 bp, Artificial Sequence
  ENSG00000116954_24 (sequence is synthesized)
aagaaacttaaaattttatgtattataatagttgtcatagaacataaggtatttttcaaattaatcaagctatgttgtgtttttcagcttttatctgactagtatctatgaccattcaat

SEQ ID NO: 219393 - DNA, 120 bp, Artificial Sequence
  ENSG00000116954_25 (sequence is synthesized)
gtgtcttgtatatatgggtaagttatgtatatattcctgcaatatctcagacaggcggaaaactattaacttgatttgttcagaagactaatttctgaggcccctggcaagtggtactac

SEQ ID NO: 219394 - DNA, 83 bp, Artificial Sequence
  ENSG00000116954_26 (sequence is synthesized)
tttttttttttttgagatagggtctctgttgcccaagctggagtgcagtagtgaatgtcctccttcagcctcctgtgtagcca

SEQ ID NO: 219395 - DNA, 120 bp, Artificial Sequence
  ENSG00000116954_27 (sequence is synthesized)
tgtcctccttcagcctcctgtgtagccaggagcacaggcgtgtgccactgcacctggctaacttttggatatttttgtagagatggagtctcactttgttgcccagactggttttgaact

SEQ ID NO: 219396 - DNA, 120 bp, Artificial Sequence
  ENSG00000116954_28 (sequence is synthesized)
cccaaagtgttgggattacaggtgtatgccatgtgcctggcctctgtatcttttcaatgggcatagtcctcttgtatttatgtagtttactttcgcttgttgcagaaaggacataatgtg

SEQ ID NO: 219397 - DNA, 120 bp, Artificial Sequence
  ENSG00000116954_29 (sequence is synthesized)
tcgcttgttgcagaaaggacataatgtggttaaatagggctatagtaataattcgtgtcctcagggttgttgtgaggatcaaagaaatgtatgagaaggtaaactgcaaggttcagaata

SEQ ID NO: 219398 - DNA, 120 bp, Artificial Sequence
  ENSG00000116954_30 (sequence is synthesized)
gtaaaaataagcccccacttcatgaaaaaaaaaatacacggaaaatatagagaaatgaaaataggagtaaagagccactactcaagtcaaccactaacaactgttttagtgttatttctg

SEQ ID NO: 219399 - DNA, 80 bp, Artificial Sequence
  ENSG00000116954_31 (sequence is synthesized)
tatttctgtcaccttatgttgcctaggctggtcttgaattccaaagctcaagcattcctcccacctcagccttccaaagt

SEQ ID NO: 219400 - DNA, 120 bp, Artificial Sequence
  ENSG00000116954_32 (sequence is synthesized)
tacaggcatgggccaccatgccagaccccaaattttttttgacattatgcttatgctaccatatgagaacacaaattgtaaggcttggaatagtttaaaaagtaaacctcacccctattc

SEQ ID NO: 219401 - DNA, 120 bp, Artificial Sequence
  ENSG00000116954_33 (sequence is synthesized)
attaaaaactgcatggaaaatatagaaaagtgaaaataggagaaaaaagatacattgttttactgccaaagaaaattaccagttactcctgacattttcttttcctttttttcttttttt

SEQ ID NO: 219402 - DNA, 75 bp, Artificial Sequence
  ENSG00000116954_34 (sequence is synthesized)
ctacaggtgtgagccaccatgcccggctactttttattttttattttttagtagagatggggcaggtggcccgcc

SEQ ID NO: 219403 - DNA, 120 bp, Artificial Sequence
  ENSG00000116954_35 (sequence is synthesized)
tttttgaaggcaaatacttttaaaaaagcatttttaataactcttaattcgtaacaatagctagataacctttagatttttataggcaagtacatcagaaaagactcttgagtccgtatc

SEQ ID NO: 219404 - DNA, 120 bp, Artificial Sequence
  ENSG00000116954_36 (sequence is synthesized)
tctttttaaaagttgttgatttcaacatagtccctgctagtctctagctgagactgttcttgtttagtctaagtattttcttgcttttgtgaggaagcaaaaaatatgttttctgtgaaa

SEQ ID NO: 219405 - DNA, 120 bp, Artificial Sequence
  ENSG00000116954_37 (sequence is synthesized)
atgtgattgacctggcaaatagaatatgcctcgaaggagctcatctaagtgaggcggcaggtcccagaggtccctgttaccttagggcagtaaagagaggagacacctcagctgggttta

SEQ ID NO: 219406 - DNA, 120 bp, Artificial Sequence
  ENSG00000116954_38 (sequence is synthesized)
cagaacacagtctagggggtgagtagccccacctggtgagatgttggtaacgttgtcatttccctggttaagatatacatatgtttgcacctttttctccaaatgtctgattatctatat

SEQ ID NO: 219407 - DNA, 120 bp, Artificial Sequence
  ENSG00000116954_39 (sequence is synthesized)
taaaggatgtgtatggagttgttgtttttaataggtatccctgaaattctgtgtttaggaacactataccttaacaacactctctcccaatatgtttaagccagtattctttcccagaga

SEQ ID NO: 219408 - DNA, 120 bp, Artificial Sequence
  ENSG00000116954_40 (sequence is synthesized)
catttgggaaactgggtggatgtcattgtgcagattaaatgtggcagatgcctagatgggaaacctgtaatgaatagtactttcttttaaaataggttaaaggaagatggaagtggaagt

SEQ ID NO: 219409 - DNA, 120 bp, Artificial Sequence
  ENSG00000116962_0 (sequence is synthesized)
agttcgggaacatgttggcctcgagcagccggatccgggctgcgtggacgcgggcgctgctgctgccgctgctgctggcggggcctgtgggctgcctgagccgccaggagctctttccct

SEQ ID NO: 219410 - DNA, 120 bp, Artificial Sequence
  ENSG00000116962_1 (sequence is synthesized)
tcggccccggacagggggacctggagctggaggacggggatgacttcgtctctcctgccctggagctgagtggggcgctccgcttctacgacagatccgacatcgacgcagtctacgtca

SEQ ID NO: 219411 - DNA, 120 bp, Artificial Sequence
  ENSG00000116962_2 (sequence is synthesized)
ccacaaatggcatcattgctacgagtgaacccccggccaaagaatcccatcccgggctcttcccaccaacattcggtgcagtcgcccctttcctggcggacttggacacgaccgatggcc

SEQ ID NO: 219412 - DNA, 120 bp, Artificial Sequence
  ENSG00000116962_3 (sequence is synthesized)
tggggaaggtttattatcgagaagacttatccccctccatcactcagcgagcagcagagtgtgtccacagagggttcccggagatctctttccagcctagtagcgcggtggttgtcactt

SEQ ID NO: 219413 - DNA, 120 bp, Artificial Sequence
  ENSG00000116962_4 (sequence is synthesized)
gggaatccgtggccccctaccaagggcccagcagggacccagaccagaaaggcaagagaaacacgttccaggctgttctagcctcctctgattccagctcctatgccattttcctttatc

SEQ ID NO: 219414 - DNA, 120 bp, Artificial Sequence
  ENSG00000116962_5 (sequence is synthesized)
ctgaggatggtctgcagttccatacgacattctcaaagaaggaaaacaaccaagttcctgccgtggttgcattcagtcaaggttcagtgggattcttatggaagagcaacggagcttata

SEQ ID NO: 219415 - DNA, 120 bp, Artificial Sequence
  ENSG00000116962_6 (sequence is synthesized)
acatatttgctaatgacagggaatcagttgaaaatttggccaagagtagtaactctgggcagcagggtgtctgggtgtttgagattgggagtccagccaccaccaatggcgtggtgcctg

SEQ ID NO: 219416 - DNA, 120 bp, Artificial Sequence
  ENSG00000116962_7 (sequence is synthesized)
cagacgtgatcctcggaactgaagatggggcagagtatgatgatgaggatgaagattatgacctggcgaccactcgtctgggcctggaggatgtgggcaccacgcccttctcctacaagg

SEQ ID NO: 219417 - DNA, 120 bp, Artificial Sequence
  ENSG00000116962_8 (sequence is synthesized)
ctctgagaaggggaggtgctgacacatacagtgtgcccagcgtcctctccccgcgccgggcagctaccgaaaggccccttggacctcccacagagagaaccaggtctttccagttggcag

SEQ ID NO: 219418 - DNA, 120 bp, Artificial Sequence
  ENSG00000116962_9 (sequence is synthesized)
tggagacttttcaccagcagcaccctcaggtcatagatgtggatgaagttgaggaaacaggagttgttttcagctataacacggattcccgccagacgtgtgctaacaacagacaccagt

SEQ ID NO: 219419 - DNA, 120 bp, Artificial Sequence
  ENSG00000116962_10 (sequence is synthesized)
gctcggtgcacgcagagtgcagggactacgccacgggcttctgctgcagctgtgtcgctggctatacgggcaatggcaggcaatgtgttgcagaaggttccccccagcgagtcaatggca

SEQ ID NO: 219420 - DNA, 120 bp, Artificial Sequence
  ENSG00000116962_11 (sequence is synthesized)
aggtgaaaggaaggatctttgtggggagcagccaggtccccattgtctttgagaacactgacctccactcttacgtagtaatgaaccacgggcgctcctacacagccatcagcaccattc

SEQ ID NO: 219421 - DNA, 120 bp, Artificial Sequence
  ENSG00000116962_12 (sequence is synthesized)
ccgagaccgttggatattctctgcttccactggccccagttggaggcatcattggatggatgtttgcagtggagcaggacggattcaagaatgggttcagcatcaccgggggtgagttca

SEQ ID NO: 219422 - DNA, 120 bp, Artificial Sequence
  ENSG00000116962_13 (sequence is synthesized)
ctcgccaggctgaggtgaccttcgtggggcacccgggcaatctggtcattaagcagcggttcagcggcatcgatgagcatgggcacctgaccatcgacacggagctggagggccgcgtgc

SEQ ID NO: 219423 - DNA, 120 bp, Artificial Sequence
  ENSG00000116962_14 (sequence is synthesized)
cgcagattccgttcggctcctccgtgcacattgagccctacacggagctgtaccactactccacctcagtgatcacttcctcctccacccgggagtacacggtgactgagcccgagcgag

SEQ ID NO: 219424 - DNA, 120 bp, Artificial Sequence
  ENSG00000116962_15 (sequence is synthesized)
atggggcatctccttcacgcatctacacttaccagtggcgccagaccatcaccttccaggaatgcgtccacgatgactcccggccagccctgcccagcacccagcagctctcggtggaca

SEQ ID NO: 219425 - DNA, 120 bp, Artificial Sequence
  ENSG00000116962_16 (sequence is synthesized)
gcgtgttcgtcctgtacaaccaggaggagaagatcttgcgctatgctctcagcaactccattgggcctgtgagggaaggctcccctgatgctcttcagaatccctgctacatcggcactc

SEQ ID NO: 219426 - DNA, 120 bp, Artificial Sequence
  ENSG00000116962_17 (sequence is synthesized)
atgggtgtgacaccaacgcggcctgtcgccctggtcccaggacacagttcacctgcgagtgctccatcggcttccgaggagacgggcgaacctgctatgatattgatgaatgttcagaac

SEQ ID NO: 219427 - DNA, 120 bp, Artificial Sequence
  ENSG00000116962_18 (sequence is synthesized)
aaccctcagtgtgtgggagccacacaatctgcaataatcacccaggaaccttccgctgcgagtgtgtggagggctaccagttttcagatgagggaacgtgtgtggctgtcgtggaccagc

SEQ ID NO: 219428 - DNA, 120 bp, Artificial Sequence
  ENSG00000116962_19 (sequence is synthesized)
gccccatcaactactgtgaaactggccttcataactgcgacataccccagcgggcccagtgtatctacacaggaggctcctcctacacctgttcctgcttgccaggcttttctggggatg

SEQ ID NO: 219429 - DNA, 120 bp, Artificial Sequence
  ENSG00000116962_20 (sequence is synthesized)
gccaagcctgccaagatgtagatgaatgccagccaagccgatgtcaccctgacgccttctgctacaacactccaggctctttcacgtgccagtgcaaacctggttatcagggagacggct

SEQ ID NO: 219430 - DNA, 120 bp, Artificial Sequence
  ENSG00000116962_21 (sequence is synthesized)
tccgttgcgtgcccggagaggtggagaaaacccggtgccagcacgagcgagaacacattctcggggcagcgggggcgacagacccacagcgacccattcctccggggctgttcgttcctg

SEQ ID NO: 219431 - DNA, 120 bp, Artificial Sequence
  ENSG00000116962_22 (sequence is synthesized)
agtgcgatgcgcacgggcactacgcgcccacccagtgccacggcagcaccggctactgctggtgcgtggatcgcgacggccgcgaggtggagggcaccaggaccaggcccgggatgacgc

SEQ ID NO: 219432 - DNA, 120 bp, Artificial Sequence
  ENSG00000116962_23 (sequence is synthesized)
ccccgtgtctgagtacagtggctcccccgattcaccaaggacctgcggtgcctaccgccgtgatccccttgcctcctgggacccatttactctttgcccagactgggaagattgagcgcc

SEQ ID NO: 219433 - DNA, 120 bp, Artificial Sequence
  ENSG00000116962_24 (sequence is synthesized)
gaagcaaaggcgttccttcatgtcccggctaaagtcatcattggactggcctttgactgcgtggacaagatggtttactggacggacatcactgagccttccattgggagagctagtcta

SEQ ID NO: 219434 - DNA, 120 bp, Artificial Sequence
  ENSG00000116962_25 (sequence is synthesized)
catggtggagagccaaccaccatcattagacaagatcttggaagtccagaaggtatcgctgttgatcaccttggccgcaacatcttctggacagactctaacctggatcgaatagaagtg

SEQ ID NO: 219435 - DNA, 120 bp, Artificial Sequence
  ENSG00000116962_26 (sequence is synthesized)
gcgaagctggacggcacgcagcgccgggtgctctttgagactgacttggtgaatcccagaggcattgtaacggattccgtgagagggaacctttactggacagactggaacagagataac

SEQ ID NO: 219436 - DNA, 120 bp, Artificial Sequence
  ENSG00000116962_27 (sequence is synthesized)
cccaagattgaaacttcctacatggacggcacgaaccggaggatccttgtgcaggatgacctgggcttgcccaatggactgaccttcgatgcgttctcatctcagctctgctgggtggat

SEQ ID NO: 219437 - DNA, 120 bp, Artificial Sequence
  ENSG00000116962_28 (sequence is synthesized)
gcaggcaccaatcgggcggaatgcctgaaccccagtcagcccagcagacgcaaggctctcgaagggctccagtatccttttgctgtgacgagctacgggaagaatctgtatttcacagac

SEQ ID NO: 219438 - DNA, 120 bp, Artificial Sequence
  ENSG00000116962_29 (sequence is synthesized)
tggaagatgaattccgtggttgctctcgatcttgcaatttccaaggagacggatgctttccaaccccacaagcagacccggctgtatggcatcaccacggccctgtctcagtgtccgcaa

SEQ ID NO: 219439 - DNA, 120 bp, Artificial Sequence
  ENSG00000116962_30 (sequence is synthesized)
ggccataactactgctcagtgaacaatggcggctgcacccacctatgcttggccaccccagggagcaggacctgccgttgccctgacaacaccttgggagttgactgtatcgaacagaaa

SEQ ID NO: 219440 - DNA, 120 bp, Artificial Sequence
  ENSG00000116962_31 (sequence is synthesized)
tgaagacaagagtgccttatttcctttccaagtatttcacagcaacactctacttgaagcaacttggtccagattgaaaagtgtcctctggctgagtggccactaggcccagacccagcc

SEQ ID NO: 219441 - DNA, 120 bp, Artificial Sequence
  ENSG00000116962_32 (sequence is synthesized)
cagcctgagccccaacaacttttccctcactgttccccaaaacatgcaccctggacttctctaatagaaaagtctccacccctacacaaggacagaaccctccacccctacccccaaccc

SEQ ID NO: 219442 - DNA, 120 bp, Artificial Sequence
  ENSG00000116962_33 (sequence is synthesized)
tcagacagacttatacacccctgagtgaggattacatgcccatcccagtgtcctaggaccttttcccaatactagccccccagtggtgaacagaacctcccaaatttgagttgcaccctt

SEQ ID NO: 219443 - DNA, 120 bp, Artificial Sequence
  ENSG00000116962_34 (sequence is synthesized)
ccctgtggccttatgagctcagcctcgctttgaggtacccaccgtcctgtcagctccttgacctatgagccggggcctgactaggaaaagttgggagttaaggaggaaattagcattcct

SEQ ID NO: 219444 - DNA, 120 bp, Artificial Sequence
  ENSG00000116962_35 (sequence is synthesized)
taatgttttgttttggtgctctgaatttcttctttattatagtcctatagttttactcctcagttcctcaccatcatcatcttgtctaagacccccattataatattcatgcgctgcttt

SEQ ID NO: 219445 - DNA, 120 bp, Artificial Sequence
  ENSG00000116962_36 (sequence is synthesized)
ttcatcaaaacctaccctgtcctagagatctatgggcatttggtggatgataatgagcagcccctcccagatagaatgtcaatatttgagcagtaggatattggcatttgttagttaaag

SEQ ID NO: 219446 - DNA, 120 bp, Artificial Sequence
  ENSG00000116962_37 (sequence is synthesized)
gcttaaatcaaaagaatgtccaatggtaggaatttcaaggtgtaggtcagatatttgagaataggggatttttttgatgtgccttaaattataccaaagattactaattattcctctttg

SEQ ID NO: 219447 - DNA, 120 bp, Artificial Sequence
  ENSG00000116962_38 (sequence is synthesized)
cccaaaatacttgcatccaaggttctagtctctgttgctgtgctggtctttagccccactgcttgcactgatgtccctccttttcacggagacctatctgaggtacaggatggggctggc

SEQ ID NO: 219448 - DNA, 120 bp, Artificial Sequence
  ENSG00000116962_39 (sequence is synthesized)
accagatgatgtcccaccacagtccctcacctccggcctccacatgacagaaccaatttacactcaaccatgacctcacccctccttggtttctccctcgatctgtggccctttttggat

SEQ ID NO: 219449 - DNA, 120 bp, Artificial Sequence
  ENSG00000116962_40 (sequence is synthesized)
gtattcttatctaacaacacaatccggaaagactgaattgaatatttatactaatggttcatatcctttattgctcaatgatctaattaaagggatcattgccacatttcatgtttatat

SEQ ID NO: 219450 - DNA, 120 bp, Artificial Sequence
  ENSG00000116962_41 (sequence is synthesized)
ttctacaatttgtttagaaaacatctcctgaccatatcagtagctcgtgttatctttttatcaactgcttcccagagtcctaaaacaatagaaattttggattgaaaagttcagcataag

SEQ ID NO: 219451 - DNA, 120 bp, Artificial Sequence
  ENSG00000116962_42 (sequence is synthesized)
gagtttgagtcagtaaaggatgggataaaggagtcgagatgattcaatgaaaagtatcacaaaaaagagattgatcaacaagagaaataaaaaagcccaagaggaagtggtaggggaagg

SEQ ID NO: 219452 - DNA, 120 bp, Artificial Sequence
  ENSG00000116962_43 (sequence is synthesized)
aatttaagaacagcaataagtaaaactcttaagtaactccaaaaagaaaatggtacattttgccaaagaccacttatacttgagaacatggaagaatttgcctgatactctctttgggga

SEQ ID NO: 219453 - DNA, 120 bp, Artificial Sequence
  ENSG00000116962_44 (sequence is synthesized)
aaagagtctctcctcttttcctcaaaccccagtacactcagcctctctgccccaccttctcctgactttgtcctcacttgcttctgcagtacattggaacctgaattgaaagaaagtctt

SEQ ID NO: 219454 - DNA, 120 bp, Artificial Sequence
  ENSG00000116962_45 (sequence is synthesized)
ccttgaataattggagtttgtcttgagaggcaaatatagccccaagaatcacaagattcgaggaccatgtaggtcttttacgtagcccaaatccataaattagtctcactttttgtattt

SEQ ID NO: 219455 - DNA, 120 bp, Artificial Sequence
  ENSG00000116962_46 (sequence is synthesized)
ccctctatatcaaatgttcatcatgattttgtatgatttttataactattttattcattttattagatttattctaaaattttttaatggtaaattcttaaactgtggaaaccactgaag

SEQ ID NO: 219456 - DNA, 120 bp, Artificial Sequence
  ENSG00000116962_47 (sequence is synthesized)
gtggaaaccactgaaggtgcttattaactgttctcccagatttgtacaagtattggatgattccttgagtttacagctgtacaaatagtgtggaaaataaactttttttaaaaaagaaaa

SEQ ID NO: 219457 - DNA, 120 bp, Artificial Sequence
  ENSG00000116977_0 (sequence is synthesized)
gatcctgtagaacttcggagattggggaagataatcggaagaggtagaagacaccgtccatgacacttcctggggaagcagatgtatgtataaggatggccagtgcctcagtttcaatcc

SEQ ID NO: 219458 - DNA, 120 bp, Artificial Sequence
  ENSG00000116977_1 (sequence is synthesized)
aggtaacctttaaatgaaacttgcctaaaatcttaggtcatacacagaagagactccaatcgacaagaagctggaaaagaatgatgttgtccttaaacaacctacagaatatcatctata

SEQ ID NO: 219459 - DNA, 120 bp, Artificial Sequence
  ENSG00000116977_2 (sequence is synthesized)
acccggtaatcccgtttgttggcaccattcctgatcagctggatcctggaactttgattgtgatacgtgggcatgttcctagtgacgcagacagattccaggtggatctgcagaatggca

SEQ ID NO: 219460 - DNA, 120 bp, Artificial Sequence
  ENSG00000116977_3 (sequence is synthesized)
gcagcatgaaacctcgagccgatgtggcctttcatttcaatcctcgtttcaaaagggccggctgcattgtttgcaatactttgataaatgaaaaatggggacgggaagagatcacctatg

SEQ ID NO: 219461 - DNA, 120 bp, Artificial Sequence
  ENSG00000116977_4 (sequence is synthesized)
acacgcctttcaaaagagaaaagtcttttgagatcgtgattatggtgctgaaggacaaattccaggtggctgtaaatggaaaacatactctgctctatggccacaggatcggcccagaga

SEQ ID NO: 219462 - DNA, 120 bp, Artificial Sequence
  ENSG00000116977_5 (sequence is synthesized)
agcatctagtctggaactgacagagataagtagagaaaatgttccaaagtctggcacgccccagcttcctagtaatagaggaggagacatttctaaaatcgcacccagaactgtctacac

SEQ ID NO: 219463 - DNA, 120 bp, Artificial Sequence
  ENSG00000116977_6 (sequence is synthesized)
caagagcaaagattcgactgtcaatcacactttgacttgcaccaaaataccacctatgaactatgtgtcaaagaggctgccattcgctgcaaggttgaacacccccatgggccctggacg

SEQ ID NO: 219464 - DNA, 120 bp, Artificial Sequence
  ENSG00000116977_7 (sequence is synthesized)
aactgtcgtcgttaaaggagaagtgaatgcaaatgccaaaagctttaatgttgacctactagcaggaaaatcaaaggatattgctctacacttgaacccacgcctgaatattaaagcatt

SEQ ID NO: 219465 - DNA, 120 bp, Artificial Sequence
  ENSG00000116977_8 (sequence is synthesized)
tgtaagaaattcttttcttcaggagtcctggggagaagaagagagaaatattacctctttcccatttagtcctgggatgtactttgagatgataatttattgtgatgttagagaattcaa

SEQ ID NO: 219466 - DNA, 120 bp, Artificial Sequence
  ENSG00000116977_9 (sequence is synthesized)
ggttgcagtaaatggcgtacacagcctggagtacaaacacagatttaaagagctcagcagtattgacacgctggaaattaatggagacatccacttactggaagtaaggagctggtagcc

SEQ ID NO: 219467 - DNA, 120 bp, Artificial Sequence
  ENSG00000116977_10 (sequence is synthesized)
tacctacacagctgctacaaaaaccaaaatacagaatggcttctgtgatactggccttgctgaaacgcatctcactgtcattctattgtttatattgttaaaatgagcttgtgcaccatt

SEQ ID NO: 219468 - DNA, 120 bp, Artificial Sequence
  ENSG00000116977_11 (sequence is synthesized)
tggacttggatccgaggcagacgaggaagctgagaaaaccctggcgttgaccccgtggacctgggcgccccgggaaggccagcgcttggtccaggcaggcggggcctgtgcggtgaccac

SEQ ID NO: 219469 - DNA, 120 bp, Artificial Sequence
  ENSG00000116977_12 (sequence is synthesized)
cctggtcctgaaaagtcccagccccgagcgccctccctcctagacctggaggcctggaacagccagccgcccacggacgccagagccgggaaccctgacggcacttagctgctgacaaac

SEQ ID NO: 219470 - DNA, 120 bp, Artificial Sequence
  ENSG00000116977_13 (sequence is synthesized)
gccactctgccctctctcctactttggctgactcttcaagaatgccattcaacaagtatttatggagtacctactataatacagtagctaacatgtattgagcacagattttttttggta

SEQ ID NO: 219471 - DNA, 120 bp, Artificial Sequence
  ENSG00000116977_14 (sequence is synthesized)
aaactgtgaagagctaggatatatacttggtgaaacaaaccagtatgttccctgttctcttgagcttcgactcttctgtgcgctactgctgcgcactgctttttctacaggcattacatc

SEQ ID NO: 219472 - DNA, 120 bp, Artificial Sequence
  ENSG00000116977_15 (sequence is synthesized)
aactcctaaggggtcctctgggattagttatgcagatattaaatcacccgaagacactaacttacagaagacacaactccttccccagtgatcactgtcataaccagtgctctaccgtat

SEQ ID NO: 219473 - DNA, 120 bp, Artificial Sequence
  ENSG00000116977_16 (sequence is synthesized)
cccatcactgaggactgatgttgactgacatcattttctttatcgtaataaacatgtggctctattagctgcaagctttaccaagtaattggcatgacatctgagcacagaaattaaggc

SEQ ID NO: 219474 - DNA, 120 bp, Artificial Sequence
  ENSG00000116977_17 (sequence is synthesized)
aaaaaaccaaagcaaaacaaatacatggtgctgaaattaacttgatgccaagcccaaggcagctgatttctgtgtatttgaacttagggcaaatcagagtctacacagacgcctacagaa

SEQ ID NO: 219475 - DNA, 120 bp, Artificial Sequence
  ENSG00000116977_18 (sequence is synthesized)
agtttcaggaagaggcaagatgcattcaatttgaaagatatttatgggcaacaaagtaaggtcaggattagacttcaggcattcataaggcaggcactatcagaaagtgtacgccaacta

SEQ ID NO: 219476 - DNA, 120 bp, Artificial Sequence
  ENSG00000116977_19 (sequence is synthesized)
agggacccacaaagcaggcagaggtaatgcagaaatctgttttgttcccatgaaatcaccaatcaaggcctccgttcttctaaagattagtccatcatcattagcaactgagatcaaagc

SEQ ID NO: 219477 - DNA, 120 bp, Artificial Sequence
  ENSG00000116977_20 (sequence is synthesized)
actcttccactttacgtgattaaaatcaaacctgtatcagcaagttaaatggttccatttctgtgatttttctattatttgaggggagttggcagaagttccatgtatatgggatcttta

SEQ ID NO: 219478 - DNA, 120 bp, Artificial Sequence
  ENSG00000116977_21 (sequence is synthesized)
caggtcagatcttgttacaggaaatttcaaaggtttgggagtggggagggaaaaaagctcagtcagtgaggatcattttatcacattagactggggcagaactctgccaggatttaggaa

SEQ ID NO: 219479 - DNA, 120 bp, Artificial Sequence
  ENSG00000116977_22 (sequence is synthesized)
tattttcagaacagattttagatattatttctatccatatattgaaaagaataccattgtcaatcttatttttttaaaagtactcagtgtagaaatcgctagcccttaattcttttccag

SEQ ID NO: 219480 - DNA, 120 bp, Artificial Sequence
  ENSG00000116977_23 (sequence is synthesized)
cttttcatattaatgtatgcagagtctcaccaagctcaaagacactggttgggggtggagggtgccacagggaaagctgtagaaggcaagaagactcgagaatcccccagagttattttt

SEQ ID NO: 219481 - DNA, 120 bp, Artificial Sequence
  ENSG00000116977_24 (sequence is synthesized)
ctccataaagaccatcagagtgcttaactgagctgttggagactgtgaggcatttaggaaaaaaatagcccactcacatcattccttgtaagtcttaagttcattttcattttacgtgga

SEQ ID NO: 219482 - DNA, 120 bp, Artificial Sequence
  ENSG00000116977_25 (sequence is synthesized)
ttactgagacatttcttagaaatatgcacttctatactagcaagctctgtctctaaaatgcaagttggccttttgcttgccacatttctgcattaaacttctatattagcttcaaaggct

SEQ ID NO: 219483 - DNA, 120 bp, Artificial Sequence
  ENSG00000116977_26 (sequence is synthesized)
tttaaactcaatgcgaacattctacgggatgttcttagatgcctttaaaaagggggcagatctaattttatttgaaccctcactttccaacttcaccatgacccagtactagagattagg

SEQ ID NO: 219484 - DNA, 120 bp, Artificial Sequence
  ENSG00000116977_27 (sequence is synthesized)
gcacttcaaagcattgaaaaaaatctactgatacttactttcttagacaagtagttcttagttaaccaccaatggaactgggttcattctgaatcctggaggagcttcctcgtgccaccc

SEQ ID NO: 219485 - DNA, 120 bp, Artificial Sequence
  ENSG00000116977_28 (sequence is synthesized)
agtgtttctgggccctctgtgtgagcagccaggtgtgagctgttttagaagcagcgtgttgccttcatctctcccgtttcccaaaagaacaaaggataaaggtgacagtcacactcctgg

SEQ ID NO: 219486 - DNA, 120 bp, Artificial Sequence
  ENSG00000116977_29 (sequence is synthesized)
gttaaaaaaagcattccagaaccacttctctttatgggcacaacaaagaaacgaaggctgaagttcgcctacccaaaatgaaaagtaggctttacagtcaaaagtacttctgttgattgc

SEQ ID NO: 219487 - DNA, 120 bp, Artificial Sequence
  ENSG00000116977_30 (sequence is synthesized)
taaataacttcattttcttgaaatagagcaactttgagtgaaatctgcaacatggataccatgtatgtaagatactgctgtacagaagagttaaggcttacagtgcaaatgaggcgtcag

SEQ ID NO: 219488 - DNA, 120 bp, Artificial Sequence
  ENSG00000116977_31 (sequence is synthesized)
ctttgggtgctaaaattaacaagtctaatattattaccatcaatcaggaagagaataataaatgtttaaacaaacacagcagtctgtataaaaataccgtgtatcatttactctttctgc

SEQ ID NO: 219489 - DNA, 120 bp, Artificial Sequence
  ENSG00000116977_32 (sequence is synthesized)
agctctatacgataggcaggagaggcttatgtggcagcacaagccaggtggggattttgtaaagaagtgataaaacatttgtaagtaatccaagtaggtgtattaaggcaccaaaagtaa

SEQ ID NO: 219490 - DNA, 120 bp, Artificial Sequence
  ENSG00000116977_33 (sequence is synthesized)
catggcacccaacacccaaaaataaaaatatgaaatatgagtgtgaactctgagtagagtatgaaacaccacagaaagtcttagaaatagctctggagtggctctcccaggacagtttcc

SEQ ID NO: 219491 - DNA, 90 bp, Artificial Sequence
  ENSG00000116977_34 (sequence is synthesized)
ttagaaatagctctggagtggctctcccaggacagtttccagttgctgaatagtcttttggcactgatgttctacttcttcacattcatc

SEQ ID NO: 219492 - DNA, 120 bp, Artificial Sequence
  ENSG00000116977_35 (sequence is synthesized)
ttcttaatgccttgcactttccggcaatcattcaatcaaaagagtgaaatgaagcacattaacaaagcaggaggcgccacggaccgcctccctccacaccgctccttccgccttcattcc

SEQ ID NO: 219493 - DNA, 120 bp, Artificial Sequence
  ENSG00000116977_36 (sequence is synthesized)
ttgcccacaggcttgcactggaagctgaataagaatccccaaaactcaaacttcctagggatgccacccctttagtagctcacacctcccccctccaagagctaagaaacaaaggagaat

SEQ ID NO: 219494 - DNA, 120 bp, Artificial Sequence
  ENSG00000116977_37 (sequence is synthesized)
gtacttttgtagcttagataagcaatgaatcagtaaaggactgatctacttgctccaccacccctcccttaataataacatttactgttatttcctgggcctaagactctatgttccaga

SEQ ID NO: 219495 - DNA, 120 bp, Artificial Sequence
  ENSG00000116977_38 (sequence is synthesized)
actgtcacagctccccatgtcacactcactagcttgtgatctttgtcaaataactgaaatcttttaagcctctagtttcttcctttgtaaaacagagataaaatgttgtggtttttaagt

SEQ ID NO: 219496 - DNA, 120 bp, Artificial Sequence
  ENSG00000116977_39 (sequence is synthesized)
gagataatccaagtaaagcacctaacatggagtagtgaatgaacatcggttgctactaaaagtggacatcctactgcatccttaatgccactaggcatttccatacaatctggggaccaa

SEQ ID NO: 219497 - DNA, 120 bp, Artificial Sequence
  ENSG00000116977_40 (sequence is synthesized)
aacttcaatcatataaatgtatgaggttaattaaaaacactactgtaatctgcttgtatgatcacaaaccaccacaaaagaaaagatcgtgaagattacactgtaaacggactctcaaat

SEQ ID NO: 219498 - DNA, 120 bp, Artificial Sequence
  ENSG00000116977_41 (sequence is synthesized)
gatcaggaggtggtcacttcgcaacttgctccctccacccaactcaaaacaggagctcgagcctgcctgtatttgagactggagctgcctgtatgaggactggatcaactgctagtcacg

SEQ ID NO: 219499 - DNA, 120 bp, Artificial Sequence
  ENSG00000116977_42 (sequence is synthesized)
ttatatccaaatctgcattatcattgggcacattttcacagaattttactgaattattccttaattgtttaatggttgggaatagtttgggaattaccttccatcaactctgctaagaaa

SEQ ID NO: 219500 - DNA, 120 bp, Artificial Sequence
  ENSG00000116977_43 (sequence is synthesized)
ggaatggattctggtagcaagacaatataattctcctttagtttttcagccagtgctaacacagtaatcaaagcagcaaatcgaacctgaaagggataaaagagcaaagaaataaaaagt

SEQ ID NO: 219501 - DNA, 120 bp, Artificial Sequence
  ENSG00000116977_44 (sequence is synthesized)
agtgttactgtatttattatcttaagagctgtactgacttgagacaagctctaactttttaaacattagttcacatgcgtttattcacttcattatgttcattaagctttcatcttagaa

SEQ ID NO: 219502 - DNA, 120 bp, Artificial Sequence
  ENSG00000116977_45 (sequence is synthesized)
taccagtttcaccatttgggagctgtttgtaatatgtgcaaccttataaatagtgttttccaaactgtgtcccaggactgcaaatctttaatgtgaaatgtctttttataatctcttcct

SEQ ID NO: 219503 - DNA, 120 bp, Artificial Sequence
  ENSG00000116977_46 (sequence is synthesized)
ttaaaaaaaaccaataaaataaaatgccgcatgcaaactcaagtgtgtcaccagattttacttcattggcgctcgccagcccgccaggctggcaataaagtgcctccagccacctctggc

SEQ ID NO: 219504 - DNA, 120 bp, Artificial Sequence
  ENSG00000116977_47 (sequence is synthesized)
aggtctcctcacccacagcccctgactggtcaccactataattgtatgaggggccaggacagtcgcttgggataaactcccatctcagcactgaataaaaaacattctgtgtcacaatat

SEQ ID NO: 219505 - DNA, 120 bp, Artificial Sequence
  ENSG00000116977_48 (sequence is synthesized)
cctagttttggggctttaaaaacgtctaggtgttcctcacatgccttgtctataataaggaaagcaagcagtagttgggtattgttagcttttgaaacaaaagccctactggtcttctaa

SEQ ID NO: 219506 - DNA, 120 bp, Artificial Sequence
  ENSG00000116977_49 (sequence is synthesized)
ttttggatattttaattaaagaatatctggacagtacaaagtgaattattaaaaaaccatttgtaactacctagattcaatcaggatttccttgatttgtgcaaagtaaaatattacaat

SEQ ID NO: 219507 - DNA, 120 bp, Artificial Sequence
  ENSG00000116977_50 (sequence is synthesized)
aaatttgatactgctacttgtataaaaacctatggtttaaaatgtgggggttcatcataatagtctcattgttagcatatcctaataaagaatttgaactaataaatcctattaataaaa

SEQ ID NO: 219508 - DNA, 120 bp, Artificial Sequence
  ENSG00000116977_51 (sequence is synthesized)
agaacttcggagattggggaagataatcggaagaggtagaagacaccgtccatgacacttcctggggaagcagatgtatgtataaggataggtgtgtactgtcaaaaagcagcgcctcca

SEQ ID NO: 219509 - DNA, 120 bp, Artificial Sequence
  ENSG00000116977_52 (sequence is synthesized)
tagacctggaggcctggaacagccaggtggacgtcggcccacctttcttttctttccttcccattttcctaccacctcccaccccactccgccttccgggcaaaggcagccagatccacc

SEQ ID NO: 219510 - DNA, 120 bp, Artificial Sequence
  ENSG00000116977_53 (sequence is synthesized)
caggacacattctttgtccttatccctctgtgctcgtcccacagcaagccagtcgcggtccaaggctccagaggctgtgcaggaggccgagctgggtggcgatcagcggcgggtccctgt

SEQ ID NO: 219511 - DNA, 120 bp, Artificial Sequence
  ENSG00000116977_54 (sequence is synthesized)
ccaaaacccagcagagccgccagggacgccccagacacagaaggcggggcgcggggagggtggggagaccacagcagtgaggcgcgcgagccgggaagtgaacgaggactgactcctgtc

SEQ ID NO: 219512 - DNA, 120 bp, Artificial Sequence
  ENSG00000116977_55 (sequence is synthesized)
gacttcctttgaccgtacgtgaaacttaagtgatggctgcttgtgatgcatacgaagtgttcatgctggcgggacctgtccctggggatacttcgggggttgcgtgatttaatgcaagca

SEQ ID NO: 219513 - DNA, 120 bp, Artificial Sequence
  ENSG00000116977_56 (sequence is synthesized)
atagttctagaagcttgtttctcccacctgaaaagactggatttgggacatgatcctgtagaacttcggagattggggaagataatcggaagaggtagaagacaccgtccatgacacttc

SEQ ID NO: 219514 - DNA, 120 bp, Artificial Sequence
  ENSG00000116977_57 (sequence is synthesized)
agggacaggttgagtcctcattagtgagcaggagtgcacaggggtgcttttcacatttgtgagcccagccttatatttcctacacctgagatatagtttgtttggctttgtagtttttct

SEQ ID NO: 219515 - DNA, 120 bp, Artificial Sequence
  ENSG00000116977_58 (sequence is synthesized)
agatcatagggggtctggagggtgaaaaaaaagagtttggtgctcatggatggggctagtattggggtgtaggggagattaggtcaaagcaagaggattcaaaggagaaatgaattcctt

SEQ ID NO: 219516 - DNA, 120 bp, Artificial Sequence
  ENSG00000116977_59 (sequence is synthesized)
aatgaattcctttagattggggaagataatcggaagaggtagaagacaccgtccatgacacttcctggggaagcagatgtatgtataaggatatggagtctcgttctgttgcccaggctg

SEQ ID NO: 219517 - DNA, 120 bp, Artificial Sequence
  ENSG00000116977_60 (sequence is synthesized)
taatattctgtgatgtttgcacgatgacaaaagtcatgtaaggacacatttctcagaacatacccccttcgttaagcaacacatgactgtctttgcattgaaaattttgatagatactaa

SEQ ID NO: 219518 - DNA, 120 bp, Artificial Sequence
  ENSG00000116977_61 (sequence is synthesized)
ctcgcccttcacaagggtaaaaacagtttgcactctcaacagccatgctcccaccttcttgctgacattacatcttattctctgtaatgtttgccaatctgatggggggcggaaaggacc

SEQ ID NO: 219519 - DNA, 120 bp, Artificial Sequence
  ENSG00000116977_62 (sequence is synthesized)
ttataatttttttatatgtcaatataaaatatttagaaaatattttctactggatgttacaaattaatctttattatcttttctcaggacttacaaagtacccaagcatctagtctggaa

SEQ ID NO: 219520 - DNA, 120 bp, Artificial Sequence
  ENSG00000116977_63 (sequence is synthesized)
ctgacagagataagtagagaaaatgttccaaagtctggcacgccccagcttgtgagtatttttgcctgggttatttcatgtggaatattttataaagttgcatagaaaatgaacagttta

SEQ ID NO: 219521 - DNA, 120 bp, Artificial Sequence
  ENSG00000116977_64 (sequence is synthesized)
tccgcccacggacgccagagccgggaaccctgacggcacttagctgctgacaaacaacctgctccgtggagcgcctgaaacaccagtctttggatggagtctcgttctgttgcccaggct

SEQ ID NO: 219522 - DNA, 120 bp, Artificial Sequence
  ENSG00000116977_65 (sequence is synthesized)
tccaggcgaccttcgaacccagatgtctcacatgtatgcagaggcgcacacaagcacacgcacatatacttatgactgcctgtttgtctggggagagacagttcctggtgcttaatcaaa

SEQ ID NO: 219523 - DNA, 120 bp, Artificial Sequence
  ENSG00000116977_66 (sequence is synthesized)
tcaggaactcaaaagaagtttggaagcactgctagtgttttgggtgctttcggttaccatttggtcatgtgtgtggagacctgtgggaacaggtataaaactggacgcaaggaaacattt

SEQ ID NO: 219524 - DNA, 120 bp, Artificial Sequence
  ENSG00000116977_67 (sequence is synthesized)
aaatttggataataagttaatttattaactgtttttttttggtggcggggggggctctgtcttctgtatctctctaggtggctgtaaatggaaaacatactctgctctatggccacagga

SEQ ID NO: 219525 - DNA, 120 bp, Artificial Sequence
  ENSG00000116977_68 (sequence is synthesized)
attttgtctttacattttacataatttcagatacattttcctcatatcaaataattcagcattttttagtactaacatcatagtctgtaagccattcaaaaaatgtatttcacaaaatag

SEQ ID NO: 219526 - DNA, 120 bp, Artificial Sequence
  ENSG00000116977_69 (sequence is synthesized)
gctatctcatcctttgagctattgagatgaattaatttatactcctcctaagatccctctcgtcactaagattcttttattttatgacaaaaccatagttctagaagcttgtttctccca

SEQ ID NO: 219527 - DNA, 120 bp, Artificial Sequence
  ENSG00000116977_70 (sequence is synthesized)
caaaataccacctatgaactatgtgtcaaaggtttgaagagcaccaaattttcttaactctatataaaaattaagttgtaatgagctgttacgagtaacctgtatccacaatagaggccc

SEQ ID NO: 219528 - DNA, 120 bp, Artificial Sequence
  ENSG00000116977_71 (sequence is synthesized)
aaagcagccccctctgcatttgtgtgccgtccctggacggattcgagagtcaaccaggcctgcctctgagccattcctgtgtatttcctcagcacctccctgcttggctgcttccccttc

SEQ ID NO: 219529 - DNA, 120 bp, Artificial Sequence
  ENSG00000116977_72 (sequence is synthesized)
aggcagaacacagtactgcctcagaccccaggcacagggggccttcctggcgtgtttcactcatacagagggcatcgggtcccaccctgtcactcatttcatcgtctaaaatgtaatcat

SEQ ID NO: 219530 - DNA, 120 bp, Artificial Sequence
  ENSG00000116977_73 (sequence is synthesized)
gtgtgtttgcttcgagccagggacagtgctgctgcaggggacccagctgggaccaaggcagactgtctctcccctcctgggatttacagggtcatggctctgaaacattccgtagtgttc

SEQ ID NO: 219531 - DNA, 120 bp, Artificial Sequence
  ENSG00000116977_74 (sequence is synthesized)
gcaagaataaaagccagtgaacatatttaaagcacctactatgtaatagagatggtggtgggtgctgattacaaaacagctcttgtcctctagtggaggaagaagtcacaatgataatat

SEQ ID NO: 219532 - DNA, 120 bp, Artificial Sequence
  ENSG00000116977_75 (sequence is synthesized)
gacgtgatgaaacagtgttatgaacagggaacgtctgggtagagtggagggaatgccaacttttggtgatgggaggaggctcagctaatcataaattgtagtttttaaaggaaaatggat

SEQ ID NO: 219533 - DNA, 68 bp, Artificial Sequence
  ENSG00000116977_76 (sequence is synthesized)
aattatctgggcatggtggcgcatggctgtgatcccagctttgggtggctgaagtaggcggattccca

SEQ ID NO: 219534 - DNA, 120 bp, Artificial Sequence
  ENSG00000116977_77 (sequence is synthesized)
gtgtggatgacagagtaagaccctgtctcttaaaaaaatttcatatagttctatgaaaaattattaatttatggtggaggataaaggactcagatgaacagggatatcagactctcttct

SEQ ID NO: 219535 - DNA, 120 bp, Artificial Sequence
  ENSG00000116977_78 (sequence is synthesized)
agcaggaacatcccaggctccggccaggctcagctcagcacaaccaagacttcagattataaactataattcttccccttctaacattgttgtgttttgtttcttttccaataggttcca

SEQ ID NO: 219536 - DNA, 120 bp, Artificial Sequence
  ENSG00000116981_0 (sequence is synthesized)
atggaacctgggcagccccgggagccccaggagccccgcgagcccgggccaggagcggagaccgctgcggccccggtctgggaggaagccaagattttctacgacaacctcgcgcccaag

SEQ ID NO: 219537 - DNA, 120 bp, Artificial Sequence
  ENSG00000116981_1 (sequence is synthesized)
aagaaacccaaatcgcccaagcctcagaatgcagtcaccatcgctgtgtcctcccgagccttgtttcgcatggacgaggagcagcagatctacacggagcagggcgtggaggagtacgtg

SEQ ID NO: 219538 - DNA, 120 bp, Artificial Sequence
  ENSG00000116981_2 (sequence is synthesized)
cgctaccagctggaacatgagaacgaacccttcagtcccgggccagccttcccttttgtgaaggctctggaggccgtgaacaggcggctgcgggagctgtaccctgatagtgaggacgtc

SEQ ID NO: 219539 - DNA, 120 bp, Artificial Sequence
  ENSG00000116981_3 (sequence is synthesized)
ttcgacatcgtcctcatgactaacaaccatgctcaagtgggtgtccgcctcatcaacagtatcaaccactatgacctgttcatcgagaggttctgcatgacaggtgggaacagcccgatc

SEQ ID NO: 219540 - DNA, 120 bp, Artificial Sequence
  ENSG00000116981_4 (sequence is synthesized)
ctctacttgtcagccgatgcggaaaaagtgcgagaagccattgatgaggggatcgcagctgccaccatcttcagccccagcagggatgtggttgtgtcccagagtcagctgcgcgtggcc

SEQ ID NO: 219541 - DNA, 120 bp, Artificial Sequence
  ENSG00000116981_5 (sequence is synthesized)
ttcgatggggacgccgtgctcttctcggacgagtcggagcgcatcgtcaaggcccacgggctggaccgattcttcgagcatgagaaggcccacgagaacaaacctctggctcagggcccc

SEQ ID NO: 219542 - DNA, 120 bp, Artificial Sequence
  ENSG00000116981_6 (sequence is synthesized)
ttaaagggctttctggaggcactgggtaggttgcagaagaagttctactccaaaggcctgcggctggagtgcccaattcgtacctacttggtgacagcacgcagtgcagccagttccggg

SEQ ID NO: 219543 - DNA, 120 bp, Artificial Sequence
  ENSG00000116981_7 (sequence is synthesized)
gcccgggctctcaagaccctgcgcagctggggcctggagacagatgaagccttgttccttgctggagcgcccaagggccctctccttgagaagatccgcccacacatcttctttgatgac

SEQ ID NO: 219544 - DNA, 120 bp, Artificial Sequence
  ENSG00000116981_8 (sequence is synthesized)
cagatgttccatgtggctggggctcaggagatgggcactgtggccgcccatgtgccttatggtgtggcacagacaccccggcggactgcacctgcaaagcaggccccatctgcacagtag

SEQ ID NO: 219545 - DNA, 120 bp, Artificial Sequence
  ENSG00000116983_0 (sequence is synthesized)
gatacaagagctggaaggcggctccggcgcagaccttggagagcacagctgccggcccgcgagccagcctcggttcccgcggcccgccgaggctcggagccatccagcgacccggcgacc

SEQ ID NO: 219546 - DNA, 120 bp, Artificial Sequence
  ENSG00000116983_1 (sequence is synthesized)
ggcctcaggccccgccatggggaagaccaacagcaagctggcccccgaggtgctggaggaccttgttcagaacactgagttcagcgagcaggagctgaagcagtggtacaagggcttcct

SEQ ID NO: 219547 - DNA, 120 bp, Artificial Sequence
  ENSG00000116983_2 (sequence is synthesized)
gaaggactgccccagcggcatcctcaacctggaggagtttcagcagctctacatcaagttcttcccctacggcgacgcctccaagttcgcgcagcacgctttccgcaccttcgacaagaa

SEQ ID NO: 219548 - DNA, 120 bp, Artificial Sequence
  ENSG00000116983_3 (sequence is synthesized)
cggcgacggcaccatcgacttccgggagttcatctgcgccctgtcggtcacctcccgcggcagcttcgagcagaagctcaactgggcctttgagatgtacgacctggacggcgacgggcg

SEQ ID NO: 219549 - DNA, 120 bp, Artificial Sequence
  ENSG00000116983_4 (sequence is synthesized)
catcacgcgcctggagatgctggagatcatcgaggcaatctacaagatggtgggcaccgtgatcatgatgcgcatgaaccaggacgggctcacgccccagcagcgtgtggacaagatctt

SEQ ID NO: 219550 - DNA, 120 bp, Artificial Sequence
  ENSG00000116983_5 (sequence is synthesized)
caagaagatggaccaggataaggacgaccagattacattggaggagttcaaggaggcagccaagagtgacccatccattgtgttgctgctgcagtgtgacatgcagaagtagaagctggt

SEQ ID NO: 219551 - DNA, 120 bp, Artificial Sequence
  ENSG00000116983_6 (sequence is synthesized)
gaggggcagggtccctggccagaaggggcatggccacctcccaacctgatgacctctctggctggcctcccaggaggagggacactccagcccccctctctggcccacccagtcctctgc

SEQ ID NO: 219552 - DNA, 120 bp, Artificial Sequence
  ENSG00000116983_7 (sequence is synthesized)
ccaagcccttcctcccctccatcaagatctttgagggaccacctcaccctgcaaaagagacaggtcctccagtaccctgtcttctagccccacctcccacttggccagaaccaatgtcca

SEQ ID NO: 219553 - DNA, 120 bp, Artificial Sequence
  ENSG00000116983_8 (sequence is synthesized)
ttgggcataggggagttggcttttgccccaggaggtgaggttaaggagttgggggcctggggttctggttaggaattctcttgatcctgggattatgctttataggatgtggtcccacag

SEQ ID NO: 219554 - DNA, 120 bp, Artificial Sequence
  ENSG00000116983_9 (sequence is synthesized)
gcctgtcacagggccaaattgggtctgtccattcctgaggctccagatcccataaagggggtctcttccccatcccttctactctacctggcccttccagccccagcctttggagcgttc

SEQ ID NO: 219555 - DNA, 120 bp, Artificial Sequence
  ENSG00000116983_10 (sequence is synthesized)
attcagtcctttcttcagctaatgattactgagcacctgtttggtgctaaggatatggtcatttacaagacacatcttgtgccctctggaagctcatagggttgtgaggcaaacttccag

SEQ ID NO: 219556 - DNA, 120 bp, Artificial Sequence
  ENSG00000116983_11 (sequence is synthesized)
ccgtcagggtctcagctaagcagaaggtgctggaaggctggttagtctgggaggagctatttcatcttccagctcagctccacacaaagctgcagaaggacgaaatgaaaagcatttgga

SEQ ID NO: 219557 - DNA, 120 bp, Artificial Sequence
  ENSG00000116983_12 (sequence is synthesized)
agtttaggagccacgtgagtgaaagttttaagaaaaatgaaatttatgtcatacttatttttttagtaccctttaaaggagctacagtcattttattatttcaggaggttaaaatatact

SEQ ID NO: 219558 - DNA, 120 bp, Artificial Sequence
  ENSG00000116983_13 (sequence is synthesized)
ctatattacttggtttcttataaaatgattaaatgaatagagaaaatattaattttcaaggggaaaaaacctgagaagaaagggagaaaagaccatgaaatttaccagataacacttttt

SEQ ID NO: 219559 - DNA, 120 bp, Artificial Sequence
  ENSG00000116983_14 (sequence is synthesized)
aagactaagtcctgagctgccactctcagcagtttttgctgcttcagctcttcctttttattacctttttcaattcaacaagcaactttctgctacatacttactccggttgggtgctga

SEQ ID NO: 219560 - DNA, 120 bp, Artificial Sequence
  ENSG00000116983_15 (sequence is synthesized)
cttcagggacaggaaaaagcaaggtttgcaaagagtgaaactagtgtatattccgtatcttggtagttcgtttctggattgggtttagtttcagaactggacttgttccttcactgccac

SEQ ID NO: 219561 - DNA, 120 bp, Artificial Sequence
  ENSG00000116983_16 (sequence is synthesized)
agaatcagaaagagctagaagaaaaggctcacctggccactgtttaggcacccagacataatttatggacgaaatgcctaaaaatgtgccaggcatgctctgtttgagaggctttttcta

SEQ ID NO: 219562 - DNA, 120 bp, Artificial Sequence
  ENSG00000116983_17 (sequence is synthesized)
accccaaatcttagatctgccaggtagttcaacatcttccaagtgtgctggttctgctttccaatgcctgcttcccaattttggatccatgagctatacagctgcatgctttgactgccg

SEQ ID NO: 219563 - DNA, 120 bp, Artificial Sequence
  ENSG00000116983_18 (sequence is synthesized)
gaaaaattaatcttgcttcttcatcaggtctttctcctgtacttgtgatcagaaattacctttgacgtgcagtgacagttgatttcctcttgaactgccggtgaaaacagtctagtacac

SEQ ID NO: 219564 - DNA, 120 bp, Artificial Sequence
  ENSG00000116983_19 (sequence is synthesized)
gagcccggggcaggggaattgcatctgcaggaaagagatgcagcatgctcctcactcctgagtgcccacctgtcctgcttctctgcaggtgaaaactctgggggatgctgatcaatagag

SEQ ID NO: 219565 - DNA, 120 bp, Artificial Sequence
  ENSG00000116983_20 (sequence is synthesized)
cttggtcccaagctctactgggcccttggaggtagcaaggccactgggttgctatcctcttgctggggatagcaaccactggtttgcaaccactgggttgctatccttttgctatcctct

SEQ ID NO: 219566 - DNA, 120 bp, Artificial Sequence
  ENSG00000116983_21 (sequence is synthesized)
tgctcatgaccagccatatggtgaggctggggagttcacatcctcaggcaggaactagcagttgtttatccagcaatgcctcaaggatgttgcattgctcccaggaactggctattaggt

SEQ ID NO: 219567 - DNA, 120 bp, Artificial Sequence
  ENSG00000116983_22 (sequence is synthesized)
atgtcttgtgcggtcagtcagcatcacagacacatagatgctcaccagcctggcttagctgggacctaaatcttctggtgaaaagcttttcactaagtgaggttccttccctgcaaatgc

SEQ ID NO: 219568 - DNA, 120 bp, Artificial Sequence
  ENSG00000116983_23 (sequence is synthesized)
tgaatctagcctaattcgcaaccacacagaatttcatggctttcaaaggcttgccatgtgccccatctcattctatactcacatcccatggaggtgaggattttcacttcttttctctag

SEQ ID NO: 219569 - DNA, 120 bp, Artificial Sequence
  ENSG00000116983_24 (sequence is synthesized)
acttggaagctgagattcagagaggaagcatcccttgtgcaagatcacatagtcaggaggtgacacagggctaagacttgaaccaaggctctaagaggatttcttcttttcagagtctct

SEQ ID NO: 219570 - DNA, 120 bp, Artificial Sequence
  ENSG00000116983_25 (sequence is synthesized)
tccctgtccatttctgtgactaagctgtgcagaggttgacagcagggcaagttacattgatattcatcctttataggcttcctgctaaaaagcttctgagattgtggtcttccaaaaaaa

SEQ ID NO: 219571 - DNA, 120 bp, Artificial Sequence
  ENSG00000116983_26 (sequence is synthesized)
ataggagcttggttgaagtccccacattttcaagcactcagtgttctgcctctggcagctgtgctaacagctcagtgctgtcctgggagtcctctgactcagaaccctcgaagcatcctg

SEQ ID NO: 219572 - DNA, 120 bp, Artificial Sequence
  ENSG00000116983_27 (sequence is synthesized)
cattgtctttacccaccatcatcttcactaagagaaacatgcctacccatgaaggcgtgtttgattactccaggcttctggacacacatacccatgggtgatttttgctcctcaggccca

SEQ ID NO: 219573 - DNA, 120 bp, Artificial Sequence
  ENSG00000116983_28 (sequence is synthesized)
atattctcagacagcccagcagtgtgaacacacaatgccaggccaggaactgggaccaccatcttgctgatggaaggaacaacaggtggcccaggacatgctcctgcatactcctgggtg

SEQ ID NO: 219574 - DNA, 120 bp, Artificial Sequence
  ENSG00000116983_29 (sequence is synthesized)
tcccagggactgtgtgctcaggagcactgtggtagagcactggccctgccttgagaagagacacaggtctcccgtccctgcaccagctgagagagacttgccgcaaagcacaaggctggc

SEQ ID NO: 219575 - DNA, 120 bp, Artificial Sequence
  ENSG00000116983_30 (sequence is synthesized)
agagatttatgtatgacttgcacagacacaaaaatatacagacaatcaaaacattgatatattcaaactctcctttaaattccaatcttattgcaacaactctgtgaattgcaaggtccc

SEQ ID NO: 219576 - DNA, 120 bp, Artificial Sequence
  ENSG00000116983_31 (sequence is synthesized)
agaatctgccttctcacatactctaccctcattcatccttttgggctaattgatgagcatcttatttcttatctctaaaaattatcagcaaaggctacttcagatggccactttagtcct

SEQ ID NO: 219577 - DNA, 120 bp, Artificial Sequence
  ENSG00000116983_32 (sequence is synthesized)
ttcagctgtagtcaggattatttaacttacctgtatatcaaaagtgaagaaaaagttagttcataagtaaaggcactaaatcctttcctgacaatggcagagtctctagaggtagaaatt

SEQ ID NO: 219578 - DNA, 120 bp, Artificial Sequence
  ENSG00000116983_33 (sequence is synthesized)
tgccttgctgcagagagagaaggaatggcgtgggatgggggaaagaaaagaaagagaagaagctggggtctccaggcagggtagtaagctgacactaaatattttttacacaaaaatgta

SEQ ID NO: 219579 - DNA, 120 bp, Artificial Sequence
  ENSG00000116983_34 (sequence is synthesized)
ttgaagcaacaaatatttcctgaagatccaccctgggtgaggctttgagctgactttagagatcactgtggggtcaagaatgtcttacatgttttattcatcattcttgaaaaaagaaat

SEQ ID NO: 219580 - DNA, 120 bp, Artificial Sequence
  ENSG00000116983_35 (sequence is synthesized)
aattcaaaccttggaattaaaaagtcagaaaaatatgggattttctttctggaattttcgaggttttctttttacctttgccagagtgtgggggcaggactgggcctgccagggtgtata

SEQ ID NO: 219581 - DNA, 120 bp, Artificial Sequence
  ENSG00000116983_36 (sequence is synthesized)
gcccttcctgcttggtggaggccagtcaggcccagggccttctaagcagcagtagaaaggaggcttggggaagtggggggtctgggtagcaggggaaggaggccagttccagtgtagccc

SEQ ID NO: 219582 - DNA, 120 bp, Artificial Sequence
  ENSG00000116983_37 (sequence is synthesized)
cctatcccctccagatgtgctgcttctggctgtgcactcagtgactgccctcactgctcaaccctgtgctgtgtggtgtgtttctttccccactgacagtgaataaaaggtgcaactgtg

SEQ ID NO: 219583 - DNA, 120 bp, Artificial Sequence
  ENSG00000116984_0 (sequence is synthesized)
agaactaaccgcgctctgaaaggttctaaatgtctgcggggctcagagccggatgtcacgtcgtcctcctctgccggttttctcttgggtccttttccgtgccgtcccgcgactccgcct

SEQ ID NO: 219584 - DNA, 120 bp, Artificial Sequence
  ENSG00000116984_1 (sequence is synthesized)
ctggccgcgcgtgtctggctgctaggccgacaccaaggactggccgggtacccgggaagaaagcacgtgctccagcagttgccgcgcccagccccgagagaggccctagggcgctgcggg

SEQ ID NO: 219585 - DNA, 120 bp, Artificial Sequence
  ENSG00000116984_2 (sequence is synthesized)
ctttcggggtccgcagtccccccgcgacgcgagccaacgggaggcgtcaaaagacccgggccttgtgtggcaggctcgcctggcgctggctggcgtggcccttggccgtcgtcacctgtg

SEQ ID NO: 219586 - DNA, 120 bp, Artificial Sequence
  ENSG00000116984_3 (sequence is synthesized)
gagagcacgtcttctctgccgcgccctctgcgcaaggaggagactcgacaacatgtcacccgcgctccaagacctgtcgcaacccgaaggtctgaagaaaaccctgcgggatgagatcaa

SEQ ID NO: 219587 - DNA, 120 bp, Artificial Sequence
  ENSG00000116984_4 (sequence is synthesized)
tgccattctgcagaagaggattatggtgctggatggagggatggggaccatgatccagcgggagaagctaaacgaagaacacttccgaggtcaggaatttaaagatcatgccaggccgct

SEQ ID NO: 219588 - DNA, 120 bp, Artificial Sequence
  ENSG00000116984_5 (sequence is synthesized)
gaaaggcaacaatgacattttaagtataactcagcctgatgtcatttaccaaatccataaggaatacttgctggctggggcagatatcattgaaacaaatacttttagcagcactagtat

SEQ ID NO: 219589 - DNA, 120 bp, Artificial Sequence
  ENSG00000116984_6 (sequence is synthesized)
tgcccaagctgactatggccttgaacacttggcctaccggatgaacatgtgctctgcaggagtggccagaaaagctgccgaggaggtaactctccagacaggaattaagaggtttgtggc

SEQ ID NO: 219590 - DNA, 120 bp, Artificial Sequence
  ENSG00000116984_7 (sequence is synthesized)
aggggctctgggtccgactaataagacactctctgtgtccccatctgtggaaaggccggattataggaacatcacatttgatgagcttgttgaagcataccaagagcaggccaaaggact

SEQ ID NO: 219591 - DNA, 120 bp, Artificial Sequence
  ENSG00000116984_8 (sequence is synthesized)
tctggatggcggggttgatatcttactcattgaaactatttttgatactgccaatgccaaggcagccttgtttgcactccaaaatctttttgaggagaaatatgctccccggcctatctt

SEQ ID NO: 219592 - DNA, 120 bp, Artificial Sequence
  ENSG00000116984_9 (sequence is synthesized)
tatttcagggacgatcgttgataaaagtgggcggactctttccggacagacaggagagggatttgtcatcagcgtgtctcatggagaaccactctgcattggattaaattgtgctttggg

SEQ ID NO: 219593 - DNA, 120 bp, Artificial Sequence
  ENSG00000116984_10 (sequence is synthesized)
tgcagctgaaatgagaccttttattgaaataattggaaaatgtacaacagcctatgtcctctgttatcccaatgcaggtcttcccaacacctttggtgactatgatgaaacgccttctat

SEQ ID NO: 219594 - DNA, 120 bp, Artificial Sequence
  ENSG00000116984_11 (sequence is synthesized)
gatggccaagcacctaaaggattttgctatggatggcttggtcaatatagttggaggatgctgtgggtcaacaccagatcatatcagggaaattgctgaagctgtgaaaaattgtaagcc

SEQ ID NO: 219595 - DNA, 120 bp, Artificial Sequence
  ENSG00000116984_12 (sequence is synthesized)
tagagttccacctgccactgcttttgaaggacatatgttactgtctggtctagagcccttcaggattggaccgtacaccaactttgttaacattggagagcgctgtaatgttgcaggatc

SEQ ID NO: 219596 - DNA, 120 bp, Artificial Sequence
  ENSG00000116984_13 (sequence is synthesized)
aaggaagtttgctaaactcatcatggcaggaaactatgaagaagccttgtgtgttgccaaagtgcaggtggaaatgggagcccaggtgttggatgtcaacatggatgatggcatgctaga

SEQ ID NO: 219597 - DNA, 120 bp, Artificial Sequence
  ENSG00000116984_14 (sequence is synthesized)
tggtccaagtgcaatgaccagattttgcaacttaattgcttccgagccagacatcgcaaaggtacctttgtgcatcgactcctccaattttgctgtgattgaagctgggttaaagtgctg

SEQ ID NO: 219598 - DNA, 120 bp, Artificial Sequence
  ENSG00000116984_15 (sequence is synthesized)
ccaagggaagtgcattgtcaatagcattagtctgaaggaaggagaggacgacttcttggagaaggccaggaagattaaaaagtatggagctgctatggtggtcatggcttttgatgaaga

SEQ ID NO: 219599 - DNA, 120 bp, Artificial Sequence
  ENSG00000116984_16 (sequence is synthesized)
aggacaggcaacagaaacagacacaaaaatcagagtgtgcacccgggcctaccatctgcttgtgaaaaaactgggctttaatccaaatgacattatttttgaccctaatatcctaaccat

SEQ ID NO: 219600 - DNA, 120 bp, Artificial Sequence
  ENSG00000116984_17 (sequence is synthesized)
tgggactggaatggaggaacacaacttgtatgccattaattttatccatgcaacaaaagtcattaaagaaacattacctggagccagaataagtggaggtctttccaacttgtccttctc

SEQ ID NO: 219601 - DNA, 120 bp, Artificial Sequence
  ENSG00000116984_18 (sequence is synthesized)
cttccgaggaatggaagccattcgagaagcaatgcatggggttttcctttaccatgcaatcaagtctggcatggacatggggatagtgaatgctggaaacctccctgtgtatgatgatat

SEQ ID NO: 219602 - DNA, 120 bp, Artificial Sequence
  ENSG00000116984_19 (sequence is synthesized)
ccataaggaacttctgcagctctgtgaagatctcatctggaataaagaccctgaggccactgagaagctcttacgttatgcccagactcaaggcacaggagggaagaaagtcattcagac

SEQ ID NO: 219603 - DNA, 120 bp, Artificial Sequence
  ENSG00000116984_20 (sequence is synthesized)
tgatgagtggagaaatggccctgtcgaagaacgccttgagtatgcccttgtgaagggcattgaaaaacatattattgaggatactgaggaagccaggttaaaccaaaaaaaatatccccg

SEQ ID NO: 219604 - DNA, 120 bp, Artificial Sequence
  ENSG00000116984_21 (sequence is synthesized)
acctctcaatataattgaaggacccctgatgaatggaatgaaaattgttggtgatctttttggagctggaaaaatgtttctacctcaggttataaagtcagcccgggttatgaagaaggc

SEQ ID NO: 219605 - DNA, 120 bp, Artificial Sequence
  ENSG00000116984_22 (sequence is synthesized)
tgttggccaccttatccctttcatggaaaaagaaagagaagaaaccagagtgcttaacggcacagtagaagaagaggacccttaccagggcaccatcgtgctggccactgttaaaggcga

SEQ ID NO: 219606 - DNA, 120 bp, Artificial Sequence
  ENSG00000116984_23 (sequence is synthesized)
cgtgcacgacataggcaagaacatagttggagtagtccttggctgcaataatttccgagttattgatttaggagtcatgactccatgtgataagatactgaaagctgctcttgaccacaa

SEQ ID NO: 219607 - DNA, 120 bp, Artificial Sequence
  ENSG00000116984_24 (sequence is synthesized)
agcagatataattggcctgtcaggactcatcactccttccctggatgaaatgatttttgttgccaaggaaatggagagattagctataaggattccattgttgattggaggagcaaccac

SEQ ID NO: 219608 - DNA, 120 bp, Artificial Sequence
  ENSG00000116984_25 (sequence is synthesized)
ttcaaaaacccacacagcagttaaaatagctccgagatacagtgcacctgtaatccatgtcctggacgcgtccaagagtgtggtggtgtgttcccagctgttagatgaaaatctaaagga

SEQ ID NO: 219609 - DNA, 120 bp, Artificial Sequence
  ENSG00000116984_26 (sequence is synthesized)
tgaatactttgaggaaatcatggaagaatatgaagatattagacaggaccattatgagtctctcaaggagaggagatacttacccttaagtcaagccagaaaaagtggtttccaaatgga

SEQ ID NO: 219610 - DNA, 120 bp, Artificial Sequence
  ENSG00000116984_27 (sequence is synthesized)
ttggctgtctgaacctcacccagtgaagcccacgtttattgggacccaggtctttgaagactatgacctgcagaagctggtggactacattgactggaagcctttctttgatgtctggca

SEQ ID NO: 219611 - DNA, 120 bp, Artificial Sequence
  ENSG00000116984_28 (sequence is synthesized)
gctccggggcaagtacccgaatcgaggctttcccaagatatttaacgacaaaacagtaggtggagaggccaggaaggtctacgatgatgcccacaatatgctgaacacactgattagtca

SEQ ID NO: 219612 - DNA, 120 bp, Artificial Sequence
  ENSG00000116984_29 (sequence is synthesized)
aaagaaactccgggcccggggtgtggttgggttctggccagcacagagtatccaagacgacattcacctgtacgcagaggctgctgtgccccaggctgcagagcccatagccaccttcta

SEQ ID NO: 219613 - DNA, 120 bp, Artificial Sequence
  ENSG00000116984_30 (sequence is synthesized)
tgggttaaggcaacaggctgagaaggactctgccagcacggagccatactactgcctctcagacttcatcgctcccttgcattctggcatccgtgactacctgggcctgtttgccgttgc

SEQ ID NO: 219614 - DNA, 120 bp, Artificial Sequence
  ENSG00000116984_31 (sequence is synthesized)
ctgctttggggtagaagagctgagcaaggcctatgaggatgatggtgacgactacagcagcatcatggtcaaggcgctgggggaccggctggcagaggcctttgcagaagagctccatga

SEQ ID NO: 219615 - DNA, 120 bp, Artificial Sequence
  ENSG00000116984_32 (sequence is synthesized)
aagagttcgccgagaactgtgggcctactgtggcagtgagcagctggacgtcgcagacctgcgcaggctgcggtacaagggcatccgcccggctcctggctaccccagccagcccgacca

SEQ ID NO: 219616 - DNA, 120 bp, Artificial Sequence
  ENSG00000116984_33 (sequence is synthesized)
caccgagaagctcaccatgtggagactcgcagacatcgagcagtctacaggcattaggttaacagaatcattagcaatggcacctgcttcagcagtctcaggcctctacttctccaattt

SEQ ID NO: 219617 - DNA, 120 bp, Artificial Sequence
  ENSG00000116984_34 (sequence is synthesized)
gaagtccaaatattttgctgtggggaagatttccaaggatcaggttgaggattatgcattgaggaagaacatatctgtggctgaggttgagaaatggcttggacccattttgggatatga

SEQ ID NO: 219618 - DNA, 120 bp, Artificial Sequence
  ENSG00000116984_35 (sequence is synthesized)
ttttttttttttttgccttttttattcttgatgatcctcaaggaaatacaacctagggtgccttaaaaataacaacaacaaaaaacctgtgtgcatctggctgacacttacctgcttctg

SEQ ID NO: 219619 - DNA, 120 bp, Artificial Sequence
  ENSG00000116984_36 (sequence is synthesized)
tacctgcttctggttttcgaagactatttagtggaaccttgtagaggagcagggtcttcctgcagtgcctggaaaacaggcgctgtttttttgggaccttgcgtgaagagcagtgagcag

SEQ ID NO: 219620 - DNA, 120 bp, Artificial Sequence
  ENSG00000116984_37 (sequence is synthesized)
ggttcctgtggtttccctggtccctctgagatggggacagactgaagacagaggtcgtttgatttcaaagcaagtcaacctgcttttttctgtttttacagtggaatctaggaggccact

SEQ ID NO: 219621 - DNA, 120 bp, Artificial Sequence
  ENSG00000116984_38 (sequence is synthesized)
tagtcgtctttttttcctcttagaagaaaagcctgaaactgagttgaatagagaagtgtgaccctgtgacaaaatgatactgtgagaaatggggcattttaatctaagtggttataacag

SEQ ID NO: 219622 - DNA, 120 bp, Artificial Sequence
  ENSG00000116984_39 (sequence is synthesized)
tggattctgacggggaaggtgtagctctgttctcttcggaagacctcgttttctaaaggctggactaaatggctgcagaactccctttggcaaaaggcatgcgctcactgcttgcttgtc

SEQ ID NO: 219623 - DNA, 120 bp, Artificial Sequence
  ENSG00000116984_40 (sequence is synthesized)
agaaacactgaagccatttgccccagtgtggtcaagcagccatgctttctgggcattttcgtcctcccataatttcatatttccgtacccctgaggaaacaaaaaggaaatgaggagaga

SEQ ID NO: 219624 - DNA, 65 bp, Artificial Sequence
  ENSG00000116984_41 (sequence is synthesized)
ttccgtacccctgaggaaacaaaaaggaaatgaggagagaaagttactgttaagggtggttaaca

SEQ ID NO: 219625 - DNA, 120 bp, Artificial Sequence
  ENSG00000116984_42 (sequence is synthesized)
cgagcctggccggttaacatcttttaattgtttccaggattgagcaggttctcagctgggctctgatatcccgtgcggagttggacaagtgggcagcataaagtcactcatttcttacca

SEQ ID NO: 219626 - DNA, 120 bp, Artificial Sequence
  ENSG00000116984_43 (sequence is synthesized)
ttttattcccctcaattctcaatatattcagtaatgaagaatggtgccaccactcaagcaacaagcctcaaactcaaccatgtcatctttttcttggatgattgcagttatttcaaaaat

SEQ ID NO: 219627 - DNA, 120 bp, Artificial Sequence
  ENSG00000116984_44 (sequence is synthesized)
ttgcatgcaaaatatacactcatcctacttcaagatggtggtggcaatagtcaggagaaggtaacattggagtcctggtttgattcgaaggatgaagacgaagaagcaagggaggaacaa

SEQ ID NO: 219628 - DNA, 120 bp, Artificial Sequence
  ENSG00000116984_45 (sequence is synthesized)
atgaagaaccatctttgttcatgaataggaatattcaagattataaaggtatcaggtctcctaaaattgatctatggatttaataccattttcaatggaaattccaacagattttattga

SEQ ID NO: 219629 - DNA, 120 bp, Artificial Sequence
  ENSG00000116984_46 (sequence is synthesized)
atgaaacaagcaggtgtttatatggagtagcaaaggacttaaaattaccaaatgcttctaaatatgaaggagaggttggggacacgcaccctatgtgataccaagttttattgtcaagac

SEQ ID NO: 219630 - DNA, 120 bp, Artificial Sequence
  ENSG00000116984_47 (sequence is synthesized)
agtgtcatggtgcagaggtaggcattctgagcaggggaacaaaataagggcctagaaactcacccgtgcatatgttgacctttgcaaaatgacctggtgacatggcaagtcagtggggac

SEQ ID NO: 219631 - DNA, 120 bp, Artificial Sequence
  ENSG00000116984_48 (sequence is synthesized)
aggaaggaccactccctaagtaatcccagaacaatggctattcatgtgggaaaaaaagaaattttactttctctcaccttacctggtgataagttccaaatatgttaagggctttaatac

SEQ ID NO: 219632 - DNA, 120 bp, Artificial Sequence
  ENSG00000116984_49 (sequence is synthesized)
aaaaagcaaaaattgtcagtgtttggatgaaaaaagccttagggcaggaaagaatctcttgagacataaagtagtaatcataaaggacaagatggttaagtcaattctgttaaaactcaa

SEQ ID NO: 219633 - DNA, 120 bp, Artificial Sequence
  ENSG00000116984_50 (sequence is synthesized)
ggcttatattaagcaaacacttgaagtgagaagatgatccacaacttgagaagacatttataatacaaataactgatgaaggattcataatcacaaatatagagaattcctatttaaaaa

SEQ ID NO: 219634 - DNA, 120 bp, Artificial Sequence
  ENSG00000116984_51 (sequence is synthesized)
aatagaaaaatagtgaagactacacaagaggaaatagggcttttaaataaatagatgttctgtagcattggtcagggaaatatgaattaggaccacaatgagattccattttatatccat

SEQ ID NO: 219635 - DNA, 120 bp, Artificial Sequence
  ENSG00000116984_52 (sequence is synthesized)
aagatttgcaaaggttgggtctgacagtaccagttgttagatctgtagggacttgtacaacattgtggatgtgtaaacaggcaccactgctttaaaaaacaattatcccttacagacttg

SEQ ID NO: 219636 - DNA, 120 bp, Artificial Sequence
  ENSG00000116984_53 (sequence is synthesized)
aacatttgcagacgttatgatcttgcttccaactcccacctgtatgtccagcaaactcttgcatgtggccactaggaggaatgtgtaagaatgttcatagttacatatttataatagtta

SEQ ID NO: 219637 - DNA, 120 bp, Artificial Sequence
  ENSG00000116984_54 (sequence is synthesized)
ataactggaaaaagtgaaatgtatgtctgtctacaggaaaataggtgaataattagatatatatattcattctacgggatattattcagtagtggaaatgagtgaactacagctatacct

SEQ ID NO: 219638 - DNA, 120 bp, Artificial Sequence
  ENSG00000116984_55 (sequence is synthesized)
cacaataagaatgaatctcagaaaatattaaggaaaaaagcaagtttgaagagaccacatggggcgtactatttttattgagcccaaaaacaagcaaaaccaaagaatatgtagtctaag

SEQ ID NO: 219639 - DNA, 120 bp, Artificial Sequence
  ENSG00000116984_56 (sequence is synthesized)
catacgtatacaataaaactatgctattaaaaaaaaagaaggtaactgataaaccaaaattgagcatagtaattacccacagaaggaggaagtggaagggacaggagcacataggtagat

SEQ ID NO: 219640 - DNA, 120 bp, Artificial Sequence
  ENSG00000116984_57 (sequence is synthesized)
gccaagttatgcagctgttctggttcctcctggtaggcttacaagtgtttactatatgctattaatacattatactttataactaatagataacagttttttacatattaaatatgttct

SEQ ID NO: 219641 - DNA, 120 bp, Artificial Sequence
  ENSG00000116984_58 (sequence is synthesized)
acttaaatatattataaaaaataaaggcaaagtggaatgataacctaaaatctggtatggtgattttgtaggtaatgtttgtatatgtcaaatacagtttttaaggaaaggaagaacatc

SEQ ID NO: 219642 - DNA, 120 bp, Artificial Sequence
  ENSG00000116984_59 (sequence is synthesized)
ttagggtaaacagcagctagaaaggtgaggggcaggagagtggtgcatccttgctgctgccagcagtgcccagataccaggctttggggaatgagtggatggctggaccatttgctaaga

SEQ ID NO: 219643 - DNA, 120 bp, Artificial Sequence
  ENSG00000116984_60 (sequence is synthesized)
cagaggccaggggatgggagaaatgatgagttttggaaagattcgatgtgactagactgaatataggcagttggatactagactttggaatttaaaaagaatgtctggagttagaattga

SEQ ID NO: 219644 - DNA, 120 bp, Artificial Sequence
  ENSG00000116984_61 (sequence is synthesized)
gagacttgaacgtggagatggaggtcaggctgcagtgcgatgggatcatctatggagcatatgaggagaagagaatctggaggaggaggagggggagccagcaggggagcagctgtgggt

SEQ ID NO: 219645 - DNA, 120 bp, Artificial Sequence
  ENSG00000116984_62 (sequence is synthesized)
tggaggaagccaggagggagagtgcaatgccgagaaagcaatgaagagcgtttcgaagcatgccagcagaacccaatgctgcaaagaggcctgggaatgggattgctgagggcccttctc

SEQ ID NO: 219646 - DNA, 120 bp, Artificial Sequence
  ENSG00000116984_63 (sequence is synthesized)
acagtgagcccctcaagagcagcgtcaggggattgtggggactgttggcacacagctggctttgctaggttgaagacaatgggaggtgtggaagacttgttgactcatttaaagaagatt

SEQ ID NO: 219647 - DNA, 120 bp, Artificial Sequence
  ENSG00000116984_64 (sequence is synthesized)
ggagggaaaggtaggattgagagtgtttcagacagaaaaaggattatatgctgagggtaaagcacaagtacagagggttgcagatagtgcagaagtctttaaaaacaattattttaaccc

SEQ ID NO: 219648 - DNA, 120 bp, Artificial Sequence
  ENSG00000116984_65 (sequence is synthesized)
aacttccagggagactgaatttcttctgccagtcagtaacaccatcaacctgggagttgcccctgacccctccagtcttagctcctgctcctgtaacaaaataccacaaactggttagct

SEQ ID NO: 219649 - DNA, 120 bp, Artificial Sequence
  ENSG00000116984_66 (sequence is synthesized)
tatagagaacagatgtttatttcttacagttcaggagtctggaagtccaagatcatggtgccatcatggccgagttctggtgagggccctcttctgggatgcagcggccagcttctcatg

SEQ ID NO: 219650 - DNA, 120 bp, Artificial Sequence
  ENSG00000116984_67 (sequence is synthesized)
ttctcacagtgggtggagggtaagcttgctctctggcctcctcttaaaaaggcactaatcccattcatgagggctccaccttcatgacctaattacctcccaaagatgccatctccaaac

SEQ ID NO: 219651 - DNA, 120 bp, Artificial Sequence
  ENSG00000116984_68 (sequence is synthesized)
accatcattctggggattccatttcaacatgatttgggggatacatcagaccataacacttttctttttctcaaccttcacatccagttggttctcaagccctggcgattttacgcgcta

SEQ ID NO: 219652 - DNA, 120 bp, Artificial Sequence
  ENSG00000116984_69 (sequence is synthesized)
gataggtcttaagttcatctctacgcctgccctggttaaggttctcatcatttctcctctggattcatctgcaacacaggctgccgggttggttcccacctcctagagctggaagagtgg

SEQ ID NO: 219653 - DNA, 120 bp, Artificial Sequence
  ENSG00000116984_70 (sequence is synthesized)
gctctctgattctttacacccccgcctcaatcctcctgctgcctgaataaccatctccccgtgacctaggatatatcccagccccttagaggcatgcaaagccttccatgtctgaccctg

SEQ ID NO: 219654 - DNA, 120 bp, Artificial Sequence
  ENSG00000116984_71 (sequence is synthesized)
cctcatgtcttggaagccctagactgctgctgtaccctgaaggaggtacctgctcacattggcccctctgtctggaataaccccaccccggttccacccaagtcaggaaagcttcccaac

SEQ ID NO: 219655 - DNA, 120 bp, Artificial Sequence
  ENSG00000116984_72 (sequence is synthesized)
ccctccctcccaccaccccaaagctaagtgaagtgacccctcttcttgcctctgtaacaccgccatgcacatttcatacagcccttgctgaaacttcatctagttctctgttagacttaa

SEQ ID NO: 219656 - DNA, 120 bp, Artificial Sequence
  ENSG00000116984_73 (sequence is synthesized)
cattccctaagggcaggtttggaaccttactcatctttatatggcgtctaaaatagtgcttgctttatgataggtgctcagtaaaggttgtcttgaattgagcagatcctctagggacag

SEQ ID NO: 219657 - DNA, 120 bp, Artificial Sequence
  ENSG00000116984_74 (sequence is synthesized)
gagttggatggagagcagactgtaaagcctcatgagggcaggggccctgcctcttcctgagctcaggatacccagagcctagctcagtgcctgccatgaaattgttcactccatcaagcc

SEQ ID NO: 219658 - DNA, 120 bp, Artificial Sequence
  ENSG00000116984_75 (sequence is synthesized)
ttgttaaatgagttcggggcggggggagcatgatggttttctctctctcagaaagaaagcgctgtatcaaagccctagcaccctctctacacccaccttcagtatttcatattagatgcg

SEQ ID NO: 219659 - DNA, 120 bp, Artificial Sequence
  ENSG00000116984_76 (sequence is synthesized)
gcccaagtgatactttctttaccgtcccgtgaagacagcatattggcagccctgcaaaaacaaaacaaaacaaaaccctcagttcatggcatacttgctataaatcagctatgtgtattg

SEQ ID NO: 219660 - DNA, 120 bp, Artificial Sequence
  ENSG00000116984_77 (sequence is synthesized)
tcaaattgtagaactgaaagtatattctgattcggtgtgtgtataaggaaatatacaccagtatatgcattaaaacgtcaagaagagctgggcacagtgtcacatgcctgtaaacccagc

SEQ ID NO: 219661 - DNA, 89 bp, Artificial Sequence
  ENSG00000116984_78 (sequence is synthesized)
agctgcactccagcctgtgctgagacctcatctcttaaaaaataaaaaataaaaagtctaagaggatacacagaaatttttaagtggtt

SEQ ID NO: 219662 - DNA, 120 bp, Artificial Sequence
  ENSG00000116984_79 (sequence is synthesized)
taaaaagtctaagaggatacacagaaatttttaagtggttacctccacggaatgggattaggggatcagaggtgagggaactcatggtttggctatttctcgttctttctgcactgtttc

SEQ ID NO: 219663 - DNA, 120 bp, Artificial Sequence
  ENSG00000116984_80 (sequence is synthesized)
aaatttttacaagtgtatgttattgtacttttaaaaagattagcttggcaacaagtctagcctgaaatgggtgctattttgactagtctgagtgaaaagtgaggatttaaatgaagtaac

SEQ ID NO: 219664 - DNA, 120 bp, Artificial Sequence
  ENSG00000116984_81 (sequence is synthesized)
ccctaaactcagccagtcccatgtttttttaacacttggaatatctaattccatttacactgcattcttcaaatgtaattttcaaagatgccttttgcctcatcccttgcttttaagtat

SEQ ID NO: 219665 - DNA, 120 bp, Artificial Sequence
  ENSG00000116984_82 (sequence is synthesized)
tattatagacttttggagactcacgaaacaagcaatccctaaattctcgcccaggaaagtatcttggattaaatggtttttgagaaccttgagagtgtatattctatgaaatggaagaaa

SEQ ID NO: 219666 - DNA, 120 bp, Artificial Sequence
  ENSG00000116984_83 (sequence is synthesized)
caagaactagacagagtcacaaatgctgttgatcacagacaatctctgccatccataaggtaaatgtaatacatctggcgacctgctgagtgtgaacttgcagcaggtgaggaaggaact

SEQ ID NO: 219667 - DNA, 120 bp, Artificial Sequence
  ENSG00000116984_84 (sequence is synthesized)
ctgaactctcacaatcttgtttcttcatttcccagagagaaactcggcaaagagaaaaaggacatttccctccaggttatctgaaagaatttcaatgcttacctttaatcatgtgacatt

SEQ ID NO: 219668 - DNA, 120 bp, Artificial Sequence
  ENSG00000116984_85 (sequence is synthesized)
tcatgtgacattgtttatcttggattaaaagaaaagaaaatgtatttattttgtgcatattttcaataaaatatataaaatcgagttggtatatagtgccaaataccattaattaaaaat

SEQ ID NO: 219669 - DNA, 120 bp, Artificial Sequence
  ENSG00000116984_86 (sequence is synthesized)
ggggctgaggacagaggccaggcagtagggagcctggggtgggtgcctgaagactgatcagcccttagaaccagtgtctttttttttttttttcttgagatggatgctgctggctttaac

SEQ ID NO: 219670 - DNA, 120 bp, Artificial Sequence
  ENSG00000116984_87 (sequence is synthesized)
attatacgtattttaatattatgtatccccagattgcttgtgtacattatctttgaggcaaagaaaaaccttgaatggtgccacagttggctgttgctcttagagcctttatctctacct

SEQ ID NO: 219671 - DNA, 120 bp, Artificial Sequence
  ENSG00000116984_88 (sequence is synthesized)
tatctctgttgtctctctttgcttgttgtgatgtgacattttcctcagtaccccaaaaaattaaaaacaaatttttatttcagagcccctcgttgtaatgctggtgtcatctatagattc

SEQ ID NO: 219672 - DNA, 120 bp, Artificial Sequence
  ENSG00000116984_89 (sequence is synthesized)
ttcatcttcctctgcatggaatgagggtagtagcctttgccctggggagagcctctcccttttcctgcagtgaacagtggaggaactagcagctgtatggtcccagctgctctttctggc

SEQ ID NO: 219673 - DNA, 120 bp, Artificial Sequence
  ENSG00000116984_90 (sequence is synthesized)
ccgtggagctttggattgacctttagggaaatcgttaattttaaggtctaaaatctttaggtcattaagtatggtccttcagagctcaggttgaggccaaaattgagctgcagagcagca

SEQ ID NO: 219674 - DNA, 120 bp, Artificial Sequence
  ENSG00000116984_91 (sequence is synthesized)
gctgatgaaagtacaaaccaatcaagaatccagcctgtttcctcttgtcaaatttcccctggctgtggtccagatgagggagggtgtcctcatggttctaattcagggggtggaggctgc

SEQ ID NO: 219675 - DNA, 120 bp, Artificial Sequence
  ENSG00000116984_92 (sequence is synthesized)
ataattcacagacaactcataagccctgagctctggtctgtctctgccaattaaatgctgtggaacttttggaaatgaagatgagataaaggcttttcataccaacaaaagtggaaagaa

SEQ ID NO: 219676 - DNA, 120 bp, Artificial Sequence
  ENSG00000116984_93 (sequence is synthesized)
ttcatcataagaagacttgagtgagaagaaatgctaagaaagctcttcaagtagaagaaaatgataccagatggaaatctggatctccacaaaggaacaaaaagtattgagaatgggaac

SEQ ID NO: 219677 - DNA, 120 bp, Artificial Sequence
  ENSG00000116984_94 (sequence is synthesized)
tatcctatgtggtgctggggatgccagagttggaattcaagacccagggagaagggcttcagtcagcactccagtacctcagctgggaatcctggaggctataccctatgtatggggaaa

SEQ ID NO: 219678 - DNA, 120 bp, Artificial Sequence
  ENSG00000116984_95 (sequence is synthesized)
atgagaggtagatggaaactaaaaaacaaacaaacaaaccagtccctgattagttgtgactttatctgcctaccagaaaataggactagccctctctggaagatgatagcattatccaga

SEQ ID NO: 219679 - DNA, 120 bp, Artificial Sequence
  ENSG00000116984_96 (sequence is synthesized)
acctcatacacaaaatttacccaggacactcatgaagaggaggaagaaaagacaacataaacagacatacaggtcacctacttattggagttaacagatggatgttcaaatctgtattat

SEQ ID NO: 219680 - DNA, 120 bp, Artificial Sequence
  ENSG00000116984_97 (sequence is synthesized)
tcttatattcaagagaatgaatgacaaagagtagaattccactggagaactagttaaccaaggctagatggcttcattgaaagactttgtcaagcatgaataaagccactataaatattc

SEQ ID NO: 219681 - DNA, 120 bp, Artificial Sequence
  ENSG00000116984_98 (sequence is synthesized)
gcttagcctgatgaaccagtgtgctgtacaccactgttggaaacactggtacaaagttctggtacagaactctttctgaatattaatctcctgtattgctatgccagaatcagattctcc

SEQ ID NO: 219682 - DNA, 120 bp, Artificial Sequence
  ENSG00000116984_99 (sequence is synthesized)
atctgtggaaaggccggattataggaacatcaacctgccagtggggagctaacttacccttgctcttgggctgtacaaggtgaagtacgcatttgatgagcttgttgaagcataccaaga

SEQ ID NO: 219683 - DNA, 120 bp, Artificial Sequence
  ENSG00000116985_0 (sequence is synthesized)
agggactcgcgggaaccgcaccaagcgggtggctgcaggagctcgcccatcgcccctgcgctgctcggaccgcggccacagccggactggcgggtacggcggcgacagacggattggccg

SEQ ID NO: 219684 - DNA, 120 bp, Artificial Sequence
  ENSG00000116985_1 (sequence is synthesized)
agagtcccagtccgcagagtagccccggcctcgaggcggtggcgtccgcgtcctctcgtccaggagccaggacaggtgtcgcgcggcgggcgctccagggaccgcgctgaggccgcggtc

SEQ ID NO: 219685 - DNA, 80 bp, Artificial Sequence
  ENSG00000116985_2 (sequence is synthesized)
agcccagcctccttgccgtcggggcgtccccaggccctgggtcggccgcggagccgatgcgcgcccgctgagcgccccag

SEQ ID NO: 219686 - DNA, 80 bp, Artificial Sequence
  ENSG00000116985_3 (sequence is synthesized)
ctgagcgcccccggcctgccatgaccgcgctccccggcccgctctggctcctgggcctggcgctatgcgcgctgggcggg

SEQ ID NO: 219687 - DNA, 80 bp, Artificial Sequence
  ENSG00000116985_4 (sequence is synthesized)
gacgtctgggcgcgcgcgagcgccgggacgtgcagcgcgagatcctggcggtgctcgggctgcctgggcggccccggccc

SEQ ID NO: 219688 - DNA, 120 bp, Artificial Sequence
  ENSG00000116985_5 (sequence is synthesized)
cgctcttcatgctggacctgtaccacgccatggccggcgacgacgacgaggacggcgcgcccgcggagcggcgcctgggccgcgccgacctggtcatgagcttcgttaacatggtggagc

SEQ ID NO: 219689 - DNA, 120 bp, Artificial Sequence
  ENSG00000116985_6 (sequence is synthesized)
gagaccgtgccctgggccaccaggagccccattggaaggagttccgctttgacctgacccagatcccggctggggaggcggtcacagctgcggagttccggatttacaaggtgcccagca

SEQ ID NO: 219690 - DNA, 120 bp, Artificial Sequence
  ENSG00000116985_7 (sequence is synthesized)
tccacctgctcaacaggaccctccacgtcagcatgttccaggtggtccaggagcagtccaacagggagtctgacttgttctttttggatcttcagacgctccgagctggagacgagggct

SEQ ID NO: 219691 - DNA, 120 bp, Artificial Sequence
  ENSG00000116985_8 (sequence is synthesized)
ggctggtgctggatgtcacagcagccagtgactgctggttgctgaagcgtcacaaggacctgggactccgcctctatgtggagactgaggacgggcacagcgtggatcctggcctggccg

SEQ ID NO: 219692 - DNA, 120 bp, Artificial Sequence
  ENSG00000116985_9 (sequence is synthesized)
gcctgctgggtcaacgggccccacgctcccaacagcctttcgtggtcactttcttcagggccagtccgagtcccatccgcacccctcgggcagtgaggccactgaggaggaggcagccga

SEQ ID NO: 219693 - DNA, 120 bp, Artificial Sequence
  ENSG00000116985_10 (sequence is synthesized)
agaaaagcaacgagctgccgcaggccaaccgactcccagggatctttgatgacgtccacggctcccacggccggcaggtctgccgtcggcacgagctctacgtcagcttccaggacctcg

SEQ ID NO: 219694 - DNA, 120 bp, Artificial Sequence
  ENSG00000116985_11 (sequence is synthesized)
gctggctggactgggtcatcgctccccaaggctactcggcctattactgtgagggggagtgctccttcccactggactcctgcatgaatgccaccaaccacgccatcctgcagtccctgg

SEQ ID NO: 219695 - DNA, 120 bp, Artificial Sequence
  ENSG00000116985_12 (sequence is synthesized)
tgcacctgatgatgccagacgcagtccccaaggcgtgctgtgcacccaccaagctgagcgccacctctgtgctctactatgacagcagcaacaatgtcatcctgcgcaagcaccgcaaca

SEQ ID NO: 219696 - DNA, 120 bp, Artificial Sequence
  ENSG00000116985_13 (sequence is synthesized)
tggtggtcaaggcctgcggctgccactgagtccacccgcccggcccagctgcagccacccttctcatctggatcgggcccctcagaagcaggaaaccctcaaacccagccagaccccagg

SEQ ID NO: 219697 - DNA, 120 bp, Artificial Sequence
  ENSG00000116985_14 (sequence is synthesized)
ccggggcattgccagggaggaccctcacaaccacgtacatgaccctttctccttcatgccaggctcctatgctccccttgccctgccaggcatttgtgtgactgtcctgtttccagccca

SEQ ID NO: 219698 - DNA, 120 bp, Artificial Sequence
  ENSG00000116985_15 (sequence is synthesized)
ggtggtctcaatcatcaggcagtgttctacccaaatgcaaacgcctctcccggaggcatgtcctggctggttctttggggttggcacagaagtcctgtctgaggtcctatccatgcccct

SEQ ID NO: 219699 - DNA, 120 bp, Artificial Sequence
  ENSG00000116985_16 (sequence is synthesized)
tactggctcaggtcgtgagatagatgtggaatgacctgagaggcacctggagcccactgttggccaccttgagctcttcaccatccatcacagggtgtggtgtgtgtagtcagggtctgg

SEQ ID NO: 219700 - DNA, 120 bp, Artificial Sequence
  ENSG00000116985_17 (sequence is synthesized)
ttggctccccattgcctgcccgaggtgcaaggtggggtataaaactggataacccctgaagtattgtatattcatggatctgaagcactgatccactggtcacaggtagacatgtggagt

SEQ ID NO: 219701 - DNA, 120 bp, Artificial Sequence
  ENSG00000116985_18 (sequence is synthesized)
caactcaagaaaaagctgagtgaacagcatgatttagggctaaagccaatggcatttatcttcccttgtcttcctgctttgcatttgcctctgccatctaggaaagacatgtaagagcat

SEQ ID NO: 219702 - DNA, 120 bp, Artificial Sequence
  ENSG00000116985_19 (sequence is synthesized)
ggacattttactttggagaaacagaaaaatcttggggcttccaattgacccatctatctgccaccatgttgccccaccaggagctcagctctgtggagttttccctttgctgagcaagca

SEQ ID NO: 219703 - DNA, 120 bp, Artificial Sequence
  ENSG00000116985_20 (sequence is synthesized)
gacaatgcacagcacagatgccatcatttccctttcccctctgaatggcagacatcagtaatcaatctggaatgtttttcttccaaatctgagtggaattttcaaatgatcagcacagcc

SEQ ID NO: 219704 - DNA, 120 bp, Artificial Sequence
  ENSG00000116985_21 (sequence is synthesized)
actgccaacagatatgatgtaaagtgaaacctggttgccatcttctgccatgctgaggagcagtccatccctgcccgagcatgtatcggcaacatgggcagcctgtgaccgggtctgggg

SEQ ID NO: 219705 - DNA, 120 bp, Artificial Sequence
  ENSG00000116985_22 (sequence is synthesized)
cgaggccaggggccatcaaaaacaggctgatcaccaaagtcagtgtcaccctggatgcccagcagccctgtcctgtgtcttgggcctgtgagtcaaagaaaaggtccttttcagggagtg

SEQ ID NO: 219706 - DNA, 120 bp, Artificial Sequence
  ENSG00000116985_23 (sequence is synthesized)
acaagtagtaattaggctgagttgggtggagaggtttgtctcagcctctgctgttctcggaaactgctgttctccttggagcagccactgggagttggagtgtttatttgatttctgact

SEQ ID NO: 219707 - DNA, 120 bp, Artificial Sequence
  ENSG00000116985_24 (sequence is synthesized)
tgctaagcctgtaatttacctgctggaatagacagagtccagctgcccaaaccgtgtcattaaaagcagatcctgcgcccgccccatccacaggcacagcccggcagagtggttccacct

SEQ ID NO: 219708 - DNA, 120 bp, Artificial Sequence
  ENSG00000116985_25 (sequence is synthesized)
ccccatgggcccaaggatgcgcctctctggagttcacgtgctgcacccccagggaggggcctggggaaagctggtccagcagcaggggtggaggctggggccacactgcgggacagcagc

SEQ ID NO: 219709 - DNA, 120 bp, Artificial Sequence
  ENSG00000116985_26 (sequence is synthesized)
ccctccacctggaccagggagggcctccatgtgcaagcgcagaggaagagaccctcccatgtacgcaaagggcagccccaggctgtctggaagttggagaattccctatcagcacaggga

SEQ ID NO: 219710 - DNA, 120 bp, Artificial Sequence
  ENSG00000116985_27 (sequence is synthesized)
tctcagctctggcctggaggtgaagagacctgccttgtaggtggcttccttatctgcgcctccattttctatctgcactttttgatctccaaacaaccttcagccaaagaatctgtctac

SEQ ID NO: 219711 - DNA, 120 bp, Artificial Sequence
  ENSG00000116985_28 (sequence is synthesized)
caactcctcatagtgagccagaagcagcctcataaccctgaatgtggggctctggtggctgtcacgaagcagagttggcacataacatggaacctggccaggcatggtggctcacaccta

SEQ ID NO: 219712 - DNA, 69 bp, Artificial Sequence
  ENSG00000116985_29 (sequence is synthesized)
acattgcacttcagcctggtgacatgagcaaaactgttgtctcaacaaaatgaaattatggaacctgtt

SEQ ID NO: 219713 - DNA, 120 bp, Artificial Sequence
  ENSG00000116985_30 (sequence is synthesized)
aaaactgttgtctcaacaaaatgaaattatggaacctgtttgccatcctagtatttacttaattgttccttcttaacatcaaagatggtcttctaggcaattgtaaattttaaattagcc

SEQ ID NO: 219714 - DNA, 120 bp, Artificial Sequence
  ENSG00000116985_31 (sequence is synthesized)
agttattttgacaattaattttttactccacctgtatctttagtgcccagccaatgatctggcatagttaggggtgcaccaagaatgtctgtaaactacctgaaggtttgtagatatgga

SEQ ID NO: 219715 - DNA, 120 bp, Artificial Sequence
  ENSG00000116985_32 (sequence is synthesized)
gtacaccttacccattaatcaagctgtgcatagcaggaaccaatacgagccgtgatcctcctggttcatacagaacaatggaaaaacataaggctttgtctacctagttggccatcagac

SEQ ID NO: 219716 - DNA, 120 bp, Artificial Sequence
  ENSG00000116985_33 (sequence is synthesized)
tttcagcaacttttatcatccagatagtcaccaaatgaaataaaatagaaaaatcccttgagcaatgaaacaattgtgaatgaacacaaagtccatgaatttaatccttatccgtttgct

SEQ ID NO: 219717 - DNA, 120 bp, Artificial Sequence
  ENSG00000116985_34 (sequence is synthesized)
gagccaagcatgtgcatctgcagtgggtggcccaggctggcagcacagataccaccatttcccttttctttgctcagggcatggcctgtttatctcgttgcaccagatgagggttggaag

SEQ ID NO: 219718 - DNA, 120 bp, Artificial Sequence
  ENSG00000116985_35 (sequence is synthesized)
gatgatggtggtggttgtttcagatctactgacagcaatgagaaatcaatgacagttgacaggaagagaggacgcatacaacaggcaaaagaggaatgcccagcagtcttggtccttgcg

SEQ ID NO: 219719 - DNA, 120 bp, Artificial Sequence
  ENSG00000116985_36 (sequence is synthesized)
gtgcaatactggccttgaggccaagtcagcaggggattcgtagtcactaacttctaactgaggcagggaagtaacatgttctggaaaaggtccaaagaaacaggaatagaggcagtgtag

SEQ ID NO: 219720 - DNA, 120 bp, Artificial Sequence
  ENSG00000116985_37 (sequence is synthesized)
caagaggcagatttttggtgccaaatagatttgaatcctggttctgcttcttcctttgtagagtatgatattggttctttcctcccaaagctattataaagactaaatatgtacacaaat

SEQ ID NO: 219721 - DNA, 120 bp, Artificial Sequence
  ENSG00000116985_38 (sequence is synthesized)
ctttgggatgtctgacatataaatgcttaacaataggtatttgctggtattattacaaatgaatttgcttatttttgagccacttctatgtctgtccattaaaccaaaatgtgttctgca

SEQ ID NO: 219722 - DNA, 80 bp, Artificial Sequence
  ENSG00000116990_0 (sequence is synthesized)
gagtgcgggccgcgctctcggcggcgcgcatgtgcgtgtgtgctggctgccgggctgccccgagccggcggggagccggt

SEQ ID NO: 219723 - DNA, 120 bp, Artificial Sequence
  ENSG00000116990_1 (sequence is synthesized)
ggctggctgcaggctgccttctgggcacggcgcgcccccgcccggccccgccgggccctgggagctgcgctccgggcggcgctggcaaagtttgctttgaactcgctgcccacagtcggg

SEQ ID NO: 219724 - DNA, 120 bp, Artificial Sequence
  ENSG00000116990_2 (sequence is synthesized)
gcaaagtttgctttgaactcgctgcccacagtcgggtccgcgcgctgcgattggcttcccctaccactctgacccggggcccggcttcccgggacgcgaggactgggcgcaggctgcaag

SEQ ID NO: 219725 - DNA, 120 bp, Artificial Sequence
  ENSG00000116990_3 (sequence is synthesized)
ctggtggggttggggaggaacgagagcccggcagccgactgtgccgagggacccggggacacctccttcgcccggccggcacccggtcagcacgtccccccttccctcccgcagggagcg

SEQ ID NO: 219726 - DNA, 120 bp, Artificial Sequence
  ENSG00000116990_4 (sequence is synthesized)
gacatggactacgactcgtaccagcactatttctacgactatgactgcggggaggatttctaccgctccacggcgcccagcgaggacatctggaagaaattcgagctggtgccatcgccc

SEQ ID NO: 219727 - DNA, 120 bp, Artificial Sequence
  ENSG00000116990_5 (sequence is synthesized)
cgtcgccgccctggggcttgggtcccggcgcaggggacccggcccccgggattggtcccccggagccgtggcccggagggtgcaccggagacgaagcggaatcccggggccactcgaaag

SEQ ID NO: 219728 - DNA, 120 bp, Artificial Sequence
  ENSG00000116990_6 (sequence is synthesized)
aaaggctggggcaggaactacgcctccatcatacgccgtgactgcatgtggagcggcttctcggcccgggaacggctggagagagctgtgagcgaccggctcgctcctggcgcgccccgg

SEQ ID NO: 219729 - DNA, 120 bp, Artificial Sequence
  ENSG00000116990_7 (sequence is synthesized)
gcccaaggcgtccgccgccccggactgcactcccagcctcgaagccggcaacccggcgcccgccgccccctgtccgctgggcgaacccaagacccaggcctgctccgggtccgagagccc

SEQ ID NO: 219730 - DNA, 120 bp, Artificial Sequence
  ENSG00000116990_8 (sequence is synthesized)
gagagcccaagcgactcggagaatgaagaaattgatgttgtgacagtagagaagaggcagtctctgggtattcggaagccggtcaccatcacggtgcgagcagaccccctggatccctgc

SEQ ID NO: 219731 - DNA, 120 bp, Artificial Sequence
  ENSG00000116990_9 (sequence is synthesized)
atgaagcatttccacatctccatccatcagcaacagcacaactatgctgcccgttttcctccagaaagctgctcccaagaagaggcttcagagaggggtccccaagaagaggttctggag

SEQ ID NO: 219732 - DNA, 120 bp, Artificial Sequence
  ENSG00000116990_10 (sequence is synthesized)
agagatgctgcaggggaaaaggaagatgaggaggatgaagagattgtgagtcccccacctgtagaaagtgaggctgcccagtcctgccaccccaaacctgtcagttctgatactgaggat

SEQ ID NO: 219733 - DNA, 120 bp, Artificial Sequence
  ENSG00000116990_11 (sequence is synthesized)
gtgaccaagaggaagaatcacaacttcctggagcgcaagaggcggaatgacctgcgttcgcgattcttggcgctgagggaccaggtgcccaccctggccagctgctccaaggcccccaaa

SEQ ID NO: 219734 - DNA, 120 bp, Artificial Sequence
  ENSG00000116990_12 (sequence is synthesized)
gtagtgatcctaagcaaggccttggaatacttgcaagccctggtgggggctgagaagaggatggctacagagaaaagacagctccgatgccggcagcagcagttgcagaaaagaattgca

SEQ ID NO: 219735 - DNA, 120 bp, Artificial Sequence
  ENSG00000116990_13 (sequence is synthesized)
tacctcactggctactaactgaccaaaaagcctgacagttctgtcttacgaagacacaagtttattttttaacctccctctcccctttagtaatttgcacattttggttatggtgggaca

SEQ ID NO: 219736 - DNA, 120 bp, Artificial Sequence
  ENSG00000116990_14 (sequence is synthesized)
cacaataaaggcttgcattcttggaaaccttgaaacccagctctccctcttccctgactcatgggagtgctgtatgttctctggcgcctttggcttcccagcaggcagctgactgaggag

SEQ ID NO: 219737 - DNA, 120 bp, Artificial Sequence
  ENSG00000116990_15 (sequence is synthesized)
ccttggggtctgcctagctcactagctctgaagaaaaggctgacagatgctatgcaacaggtggtggatgttgtcaggggctccagcctgcatgaaatctcacactctgcatgagcttta

SEQ ID NO: 219738 - DNA, 120 bp, Artificial Sequence
  ENSG00000116990_16 (sequence is synthesized)
ggctaggaaaggatgctcccaactggtgtctctggggtgatgcaaggacagctgggcctggatgctctccctgaggctcctttttccagaagacacacgagctgtcttgggtgaagacaa

SEQ ID NO: 219739 - DNA, 120 bp, Artificial Sequence
  ENSG00000116990_17 (sequence is synthesized)
gcttgcagacttgatcaacattgaccattacctcactgtcagacactttacagtagccaaggagttggaaacctttatatattatgatgttagctgacccccttcctcccactcccaatg

SEQ ID NO: 219740 - DNA, 120 bp, Artificial Sequence
  ENSG00000116990_18 (sequence is synthesized)
ctgcgaccctgggaacacttaaaaagcttggcctctagattctttgtctcagagccctctgggctctctcctctgagggagggacctttctttcctcacaagggacttttttgttccatt

SEQ ID NO: 219741 - DNA, 120 bp, Artificial Sequence
  ENSG00000116990_19 (sequence is synthesized)
atgccttgttatgcaatgggctctacagcaccctttcccacaggtcagaaatatttccccaagacacagggaaatcggtcctagcctggggcctggggatagcttggagtcctggcccat

SEQ ID NO: 219742 - DNA, 120 bp, Artificial Sequence
  ENSG00000116990_20 (sequence is synthesized)
gaacttgatccctgcccaggtgttttccgaggggcacttgaggcccagtcttttctcaaggcaggtgtaagacacctcagagggagaactgtactgctgcctctttcccacctgcctcat

SEQ ID NO: 219743 - DNA, 120 bp, Artificial Sequence
  ENSG00000116990_21 (sequence is synthesized)
ctcaatccttgagcggcaagtttgaagttcttctggaaccatgcaaatctgtcctcctcatgcaattccaaggagcttgctggctctgcagccacccttgggccccttccagcctgccat

SEQ ID NO: 219744 - DNA, 120 bp, Artificial Sequence
  ENSG00000116990_22 (sequence is synthesized)
gaatcagatatctttcccagaatctgggcgtttctgaagttttggggagagctgttgggactcatccagtgctccagaaggtggacttgcttctggtgggttttaaaggagcctccagga

SEQ ID NO: 219745 - DNA, 120 bp, Artificial Sequence
  ENSG00000116990_23 (sequence is synthesized)
gatatgcttagccaaccatgatggattttaccccagctggactcggcagctccaagtggaatccacgtgcagcttctagtctgggaaagtcacccaacctagcagttgtcatgtgggtaa

SEQ ID NO: 219746 - DNA, 120 bp, Artificial Sequence
  ENSG00000116990_24 (sequence is synthesized)
cctcaggcacctctaagcctgtcctggaagaaggaccagcagcccctccagaactctgcccaggacagcaggtgcctgctggctctgggtttggaagttggggtgggtagggggtggtaa

SEQ ID NO: 219747 - DNA, 120 bp, Artificial Sequence
  ENSG00000116990_25 (sequence is synthesized)
gtactatatatggctctggaaaaccagctgctacttccaaatctattgtccataatggtttctttctgaggttgcttcttggcctcagaggaccccaggggatgtttggaaatagcctct

SEQ ID NO: 219748 - DNA, 120 bp, Artificial Sequence
  ENSG00000116990_26 (sequence is synthesized)
ctacccttctggagcatggtttacaaaagccagctgacttctggaattgtctatggaggacagtttgggtgtaggttactgatgtctcaactgaatagcttgtgttttataagctgctgt

SEQ ID NO: 219749 - DNA, 120 bp, Artificial Sequence
  ENSG00000116990_27 (sequence is synthesized)
tggctattatgctgggggagtcttttttttttatattgtatttttgtatgccttttgcaaagtggtgttaactgtttttgtacaaggaaaaaaactcttggggcaatttcctgttgcaag

SEQ ID NO: 219750 - DNA, 120 bp, Artificial Sequence
  ENSG00000116990_28 (sequence is synthesized)
ggtctgatttattttgaaaggcaagttcacctgaaattttgtatttagttgtgattactgattgcctgattttaaaatgttgccttctgggacatcttctaataaaagatttctcaaaca

SEQ ID NO: 219751 - DNA, 80 bp, Artificial Sequence
  ENSG00000116990_29 (sequence is synthesized)
cgagcgagggagggcgcgcgcgcggggggggcgcgcttgtgagtgcgggccgcgctctcggcggcgcgcatgtgcgtgtg

SEQ ID NO: 219752 - DNA, 120 bp, Artificial Sequence
  ENSG00000116990_30 (sequence is synthesized)
gagcccaagcgactcgggtaaggacctccccgagccatccaagagggggccaccccatgggtggccaaagctctgcccctgcctgaggtcaggcattggctcttctcaagctcttgggcc

SEQ ID NO: 219753 - DNA, 120 bp, Artificial Sequence
  ENSG00000116990_31 (sequence is synthesized)
atctccgcctctctttggctgaagctgcccgtgtagtccccaaccgtgtctgtctggcacgtgggtgtgttggtaaacagtttggaaaagtggcgtgggagccagcctccctttgatgat

SEQ ID NO: 219754 - DNA, 120 bp, Artificial Sequence
  ENSG00000116990_32 (sequence is synthesized)
tattggagccccaggggacaagggatttgaggtgagggttggcgcttagagaggacaatactggggttggactgtaagggattgaagggggtaccttaagagacactccaaacctgaagt

SEQ ID NO: 219755 - DNA, 120 bp, Artificial Sequence
  ENSG00000116990_33 (sequence is synthesized)
aggaaactcacactcccctagggggagaagaagccgagagccttttgtgcaaagccaaaaccttcgtccttttaaaaacctaggtctccagttggctttactttaaaatgccaataataa

SEQ ID NO: 219756 - DNA, 120 bp, Artificial Sequence
  ENSG00000116990_34 (sequence is synthesized)
atgccctcttctcgtgcctccccaccaccacttaccactcgtgcatccctgagacagggagggaagaatgaacactccccattaacagatggaaaaactgaggcttagagatagacaatc

SEQ ID NO: 219757 - DNA, 120 bp, Artificial Sequence
  ENSG00000116990_35 (sequence is synthesized)
actacaagtcagctccagctttctgccatctagccagcccctcttccccaatgctccatcccaaccaggcacctcttccttgatgtttggggtctttgtggtagcttatcttagaagcac

SEQ ID NO: 219758 - DNA, 120 bp, Artificial Sequence
  ENSG00000116990_36 (sequence is synthesized)
tacaccttgccttgctgtttgtcctgagatggaaaagtgtccttcttgctccccctcaatagatctccagcgtcagctgctccctggcattcaacaaatattcactggcccctactttgt

SEQ ID NO: 219759 - DNA, 120 bp, Artificial Sequence
  ENSG00000116990_37 (sequence is synthesized)
ggcaatctgtgggctacatgctggggtcaaggcagtagaactccaggccctcctctcccatccttgatgcaagtgcaacctcgctgagggcagactggggcatcctgtgccactaaacta

SEQ ID NO: 219760 - DNA, 120 bp, Artificial Sequence
  ENSG00000116990_38 (sequence is synthesized)
cattgttcttattctggcatcttagacctccacacccgtgagaaatcctggagagggtatttttgtagagtgtagactgtggctagtgacaaataaattaggaccaagaaagctcactgt

SEQ ID NO: 219761 - DNA, 120 bp, Artificial Sequence
  ENSG00000116990_39 (sequence is synthesized)
agcttttaggaataacttttacacgaccatttgatagggaactggggaatggggtatggaagttttcctacacttgagagaaaaaataggataacaaaaattaaaagtcttttttttcct

SEQ ID NO: 219762 - DNA, 120 bp, Artificial Sequence
  ENSG00000116990_40 (sequence is synthesized)
ggtccactgtgttaaggtcatttttaaccagcttgctttctacaccaagagtttatgtttgtttaatggctggaaagagaatcttgagatcaaaaaaccaataaagatgtatctctacaa

SEQ ID NO: 219763 - DNA, 120 bp, Artificial Sequence
  ENSG00000116990_41 (sequence is synthesized)
gcaccgccaagcggccgccgggccgcatcagccctcctcctgtttgcgctccccagcgtgcaatttatttggggggctaccggggattgaacggagcgggcgagcgctgccaggagggag

SEQ ID NO: 219764 - DNA, 120 bp, Artificial Sequence
  ENSG00000116991_0 (sequence is synthesized)
cttttgaaaagaacagaggcgtacaacattattacgacaacagagaagcaagttggctttgaagaaactgtattctgaggatgttgtttgctttgggctaagaaaagaaaaaatacaact

SEQ ID NO: 219765 - DNA, 120 bp, Artificial Sequence
  ENSG00000116991_1 (sequence is synthesized)
acagacaaagcctttatatctgcaagtattatggcgtggtcggtagcaatgtaattagatttacatcagtcttcctggtgagacttggaggctcttcctcggtagacatgagtgacccaa

SEQ ID NO: 219766 - DNA, 120 bp, Artificial Sequence
  ENSG00000116991_2 (sequence is synthesized)
ggcagtcacaagaagagaagcacaagctaggcagagcctcttcaaagttcaaggatccccctagaatcatgcagtcagatgattattttgctcggaaatttaaagccattaatggcaaca

SEQ ID NO: 219767 - DNA, 120 bp, Artificial Sequence
  ENSG00000116991_3 (sequence is synthesized)
tgggacccactacttctttaaatgcctcgaattccaatgagactggcggtggtggtccggctaatggtaccccagctgtgcccaagatgggtgtgagagcaagggtgtctgaatggcctc

SEQ ID NO: 219768 - DNA, 120 bp, Artificial Sequence
  ENSG00000116991_4 (sequence is synthesized)
ctaaaaaggactgttccaaggagctaacatgcaaggcactgtgggaaagccggtctcagaccagttatgaaagcatcacttctgtcctgcagaatgggcagagtgaccagagtgaaggtc

SEQ ID NO: 219769 - DNA, 120 bp, Artificial Sequence
  ENSG00000116991_5 (sequence is synthesized)
agcaagatgaacagctcgatctggacttcgtggaggccaagtacacaatcggagacatctttgtccattccccccaaagaggacttcaccccataagacagaggagcaatagtgatgtca

SEQ ID NO: 219770 - DNA, 120 bp, Artificial Sequence
  ENSG00000116991_6 (sequence is synthesized)
ctatcagtgacattgatgccgaagatgtcttagaccaaaatgcagtcaaccccaacaccggggctgccctgcacagggagtatggaagtacttcatccatcgacaggcaaggcttatctg

SEQ ID NO: 219771 - DNA, 120 bp, Artificial Sequence
  ENSG00000116991_7 (sequence is synthesized)
gtgaaaacttttttgctatgctcagagggtaccgagtagaaaattatgaccacaaagcaatggtcccttttgggttccctgaatttttccgctgtgaccctgcaatctctccgagccttc

SEQ ID NO: 219772 - DNA, 120 bp, Artificial Sequence
  ENSG00000116991_8 (sequence is synthesized)
atgcagcagcacagatttctaggggagaatttgtccgcatctcaggattagattatgtggacagtgccctcctgatggggagagacagggacaagcctttcaaacggaggttgaaatcag

SEQ ID NO: 219773 - DNA, 120 bp, Artificial Sequence
  ENSG00000116991_9 (sequence is synthesized)
agtcggtggaaacatctctcttccgaaagcttcgaactgttaaaagtgagcacgaaactttcaagttcacgtctgagctggaggagagccgactggagaggggcattcgcccttggaatt

SEQ ID NO: 219774 - DNA, 120 bp, Artificial Sequence
  ENSG00000116991_10 (sequence is synthesized)
gtcagcgatgttttgcacattatgatgtccagagcattttgtttaatatcaacgaagccatggctacgagggctaatgtggggaaaaggaaaaacataaccactggggcatctgcagcat

SEQ ID NO: 219775 - DNA, 120 bp, Artificial Sequence
  ENSG00000116991_11 (sequence is synthesized)
cccagactcagatgcctacgggccagacaggcaactgtgagtcccctttagggagcaaggaggacctcaactccaaagagaacctggatgccgatgagggtgatgggaaaagtaacgacc

SEQ ID NO: 219776 - DNA, 120 bp, Artificial Sequence
  ENSG00000116991_12 (sequence is synthesized)
tcgtccttagttgtccttactttagaaatgagactggaggggaaggcgacaggcggattgcgctctctcgagccaactcatcctctttcagttctggggaaagctgctctttcgaatcgt

SEQ ID NO: 219777 - DNA, 120 bp, Artificial Sequence
  ENSG00000116991_13 (sequence is synthesized)
cactcagctctcactgcacaaatgcaggtgtctccgtcttggaagtgcccagagaaaaccagcctattcacagggagaaagtgaagcgctacatcatagaacacattgaccttggggcct

SEQ ID NO: 219778 - DNA, 120 bp, Artificial Sequence
  ENSG00000116991_14 (sequence is synthesized)
attattaccgcaaattcttctatgggaaagagcaccaaaactactttggaatagatgaaaaccttggtccagtagcagtcagcatccggagagagaaggtggaagatgccaaggagaaag

SEQ ID NO: 219779 - DNA, 120 bp, Artificial Sequence
  ENSG00000116991_15 (sequence is synthesized)
aaggatcccagttcaactacagggtggctttcaggacaagtgagcttacaacactgagaggagcaattttagaagatgctataccctctactgctaggcatggtaccgcacgaggactac

SEQ ID NO: 219780 - DNA, 120 bp, Artificial Sequence
  ENSG00000116991_16 (sequence is synthesized)
ctctcaaagaagttttggaatacgtcattccagagctgagcattcagtgtttgcgacaggcttccaactcacccaaggtctcagagcagctgctcaagcttgatgaacaagggctgagct

SEQ ID NO: 219781 - DNA, 120 bp, Artificial Sequence
  ENSG00000116991_17 (sequence is synthesized)
ttcagcacaagatcgggatcctttattgcaaagcaggccagagcacagaggaagagatgtataacaatgagacggcgggaccagcttttgaagaattccttgatcttctgggccagagag

SEQ ID NO: 219782 - DNA, 120 bp, Artificial Sequence
  ENSG00000116991_18 (sequence is synthesized)
tccgactgaaaggatttagtaaatatcgagctcagctagacaataagactgattccacgggcacgcactctctctataccacatacaaagactacgaactcatgttccacgtgtcaaccc

SEQ ID NO: 219783 - DNA, 120 bp, Artificial Sequence
  ENSG00000116991_19 (sequence is synthesized)
tgcttccctacatgcccaacaacagacaacagctactgaggaaaaggcacataggaaatgacatcgtcaccatcgtcttccaggagcctggggcacttccttttactccaaaaagcatcc

SEQ ID NO: 219784 - DNA, 120 bp, Artificial Sequence
  ENSG00000116991_20 (sequence is synthesized)
ggtctcactttcagcatgtctttgtcatagtcaaagtgcataatccatgtaccgaaaatgtgtgttatagtgttggagtttccagatcaaaagatgtgccaccatttggcccaccgattc

SEQ ID NO: 219785 - DNA, 120 bp, Artificial Sequence
  ENSG00000116991_21 (sequence is synthesized)
ccaaaggtgtaacttttccaaagtcagccgtgttccgggacttccttttagccaaagtaatcaatgcagaaaatgcagcccataaatcagaaaagtttcgagcaatggccactcgaacga

SEQ ID NO: 219786 - DNA, 120 bp, Artificial Sequence
  ENSG00000116991_22 (sequence is synthesized)
ggcaggagtacttgaaagatctggcggagaactttgtcacaaccgccaccgtggatacctctgtgaagttcagcttcattacgctgggtgcgaagaaaaaggagaaggtaaagccaagga

SEQ ID NO: 219787 - DNA, 120 bp, Artificial Sequence
  ENSG00000116991_23 (sequence is synthesized)
aggatgcccacttgtttagcattggggccatcatgtggcacgtgatagcccgggacttcggccagtctgctgacattgaatgtcttctcgggatctccaatgagttcatcatgttgattg

SEQ ID NO: 219788 - DNA, 120 bp, Artificial Sequence
  ENSG00000116991_24 (sequence is synthesized)
aaaaggattccaagaatgttgtattcaactgttcctgcagggatgtgattgggtggacatctggattagtgagtatcaaagtgttttacgaaagaggagaatgtgtcctcctgtcctcgg

SEQ ID NO: 219789 - DNA, 120 bp, Artificial Sequence
  ENSG00000116991_25 (sequence is synthesized)
tagacaactgtgctgaagacatcagggaaattgttcagcgattagtaatagtgacgagaggctgcgagactgtggaaatgaccctgaggaggaacgggctgggccagcttggcttccatg

SEQ ID NO: 219790 - DNA, 120 bp, Artificial Sequence
  ENSG00000116991_26 (sequence is synthesized)
tgaattttgaaggaattgtcgcagatgtggaaccttttggctttgcctggaaggctggccttcgccaagggagccgcctcgtggagatctgcaaagtagccgtggccactctgacccacg

SEQ ID NO: 219791 - DNA, 120 bp, Artificial Sequence
  ENSG00000116991_27 (sequence is synthesized)
cccgaagagggtgttcagagctctgccggatccctatggtggaatataaactcgacagcgagggcaccccctgcgagtataaaacccccttcaggaggaacaccacgtggcaccgggtgc

SEQ ID NO: 219792 - DNA, 120 bp, Artificial Sequence
  ENSG00000116991_28 (sequence is synthesized)
ccactcctgccctgcagcccctctctagagcttcccccatccccggcacgcccgaccggctgccgtgccaacagctgctccagcaggcccaggctgccattcctcgaagcacctccttcg

SEQ ID NO: 219793 - DNA, 120 bp, Artificial Sequence
  ENSG00000116991_29 (sequence is synthesized)
accggaagctgcccgatggcacgagaagctcacccagcaaccagtcatcctccagcgaccctggacccggcgggagcggaccctggagaccacaagtgggctacgacgggtgccagtccc

SEQ ID NO: 219794 - DNA, 120 bp, Artificial Sequence
  ENSG00000116991_30 (sequence is synthesized)
ctctactgctcgaacaccagggctcaggccctttggaatgtgacggagccagggagagggaagacaccatggaagcaagcaggcacccggaaaccaaatggcatggcccaccttccaaag

SEQ ID NO: 219795 - DNA, 120 bp, Artificial Sequence
  ENSG00000116991_31 (sequence is synthesized)
tcctgggttcctataaagaaagagctctgcagaaagatggaagttgcaaagattcccccaataagctttctcacattggggataaaagttgctccagtcactccagcagcaacacgctct

SEQ ID NO: 219796 - DNA, 120 bp, Artificial Sequence
  ENSG00000116991_32 (sequence is synthesized)
ccagcaacacctccagcaacagtgacgacaagcactttgggtctggcgacctgatggaccccgaattactggggctgacctacatcaaaggggcctccaccgacagtggcatcgacacgg

SEQ ID NO: 219797 - DNA, 120 bp, Artificial Sequence
  ENSG00000116991_33 (sequence is synthesized)
ccccctgcatgcctgccaccatcctcggccctgtgcacctggcaggcagcaggtccctgatccacagccgggccgagcagtgggctgatgctgccgacgtctctgggcctgacgacgagc

SEQ ID NO: 219798 - DNA, 120 bp, Artificial Sequence
  ENSG00000116991_34 (sequence is synthesized)
cagccaagttatattctgtgcatggctacgcgtccaccatctccgccggcagtgctgcggaaggcagcatgggcgatctcagtgagatatcctctcattccagtggttctcaccattcag

SEQ ID NO: 219799 - DNA, 120 bp, Artificial Sequence
  ENSG00000116991_35 (sequence is synthesized)
gaagcccttcagctcactgttcaaaaagtagtgggtctctggattcatccaaagtctacatcgtgtctcacagcagcggacaacaggttcccgggtccatgtccaagccctaccacagac

SEQ ID NO: 219800 - DNA, 120 bp, Artificial Sequence
  ENSG00000116991_36 (sequence is synthesized)
aaggggcagtgaacaaatatgtcatcggctggaagaaatcggagggcagcccaccgcccgaggagcctgaagtgactgaatgtcccgggatgtatagtgagatggatgtcatgtccacag

SEQ ID NO: 219801 - DNA, 120 bp, Artificial Sequence
  ENSG00000116991_37 (sequence is synthesized)
caactcagcatcagacagtggtgggagatgctgttgcagagactcaacatgttctgtctaaagaagattttctgaaattgatgcttcctgacagccccttagtggaggaggggcgaagaa

SEQ ID NO: 219802 - DNA, 120 bp, Artificial Sequence
  ENSG00000116991_38 (sequence is synthesized)
agttttcgttctatgggaacctgtctccaaggaggtcgctttaccgcacgctgtctgacgagagcatctgcagcaacaggagggggtcctcctttggcagttcccggagttccgtgcttg

SEQ ID NO: 219803 - DNA, 120 bp, Artificial Sequence
  ENSG00000116991_39 (sequence is synthesized)
accaggccctgcccaacgacattctgttcagcaccaccccaccctaccacagcacgctgcctccgcgggcccaccccgcacccagcatggggagcctgagaaatgagttctggttctccg

SEQ ID NO: 219804 - DNA, 120 bp, Artificial Sequence
  ENSG00000116991_40 (sequence is synthesized)
atgggtccttatcagataagtccaagtgcgcagatcctggcctgatgcccctcccggacacagccacagggttagattggacccacctcgtggatgctgcacgggcatttgaaggtcttg

SEQ ID NO: 219805 - DNA, 120 bp, Artificial Sequence
  ENSG00000116991_41 (sequence is synthesized)
actcagatgaagaactggggctgctctgtcaccacacgtcctatctagaccagagggtggcatccttctgcaccctgacagatatgcagcatgggcaggacctggaaggggcccaagagc

SEQ ID NO: 219806 - DNA, 120 bp, Artificial Sequence
  ENSG00000116991_42 (sequence is synthesized)
tgcccttatgtgtagatccaggcagtggcaaagagttcatggacacaactggggagcgttctccatcaccactgaccgggaaagtcaatcagctggaattaattcttcgacaactccaga

SEQ ID NO: 219807 - DNA, 120 bp, Artificial Sequence
  ENSG00000116991_43 (sequence is synthesized)
ccgaccttcggaaggaaaaacaagacaaggccgttctccaagcagaagtgcagcacctgagacaggacaacatgagactgcaggaggagtcccagaccgcgacagctcagctgcggaaat

SEQ ID NO: 219808 - DNA, 120 bp, Artificial Sequence
  ENSG00000116991_44 (sequence is synthesized)
tcacagaatggtttttcaccaccatcgacaaaaaatcttagccaatccgcacctcatcaagggaccactgggaaatgccccttgtccctttgaagtcacaaacatgtggtttttctgtgt

SEQ ID NO: 219809 - DNA, 120 bp, Artificial Sequence
  ENSG00000116991_45 (sequence is synthesized)
gctttcaaccaatcgtagatgtttttgctgttccattctgtgtagcaccattcaccacagcaggatagggagcctcgactctttctcggtaaccacggcagagagcagcgccgatgtgaa

SEQ ID NO: 219810 - DNA, 120 bp, Artificial Sequence
  ENSG00000116991_46 (sequence is synthesized)
gatgaatgaatgtaactcctggtgtgaagatgaatgtaaaccctggcgacagttgagacctttttcttttagactctgctaaaacagtgctctggcttgggcttacctcaagagggaaga

SEQ ID NO: 219811 - DNA, 120 bp, Artificial Sequence
  ENSG00000116991_47 (sequence is synthesized)
tagttgagttttatttcctgtatatcaggtgacctggtagagatgtaaagcaatttaccatagtttgggctttagtattgtaaaataaacatgagaacaaataatcagacatatacttta

SEQ ID NO: 219812 - DNA, 120 bp, Artificial Sequence
  ENSG00000116991_48 (sequence is synthesized)
atgttaaaggtgctctatttttttggatgtacagtagttttatttccacagccacattaccatagcaataagaaaggaggcatagtacatagttggaaaagctttgtggggggattaaaa

SEQ ID NO: 219813 - DNA, 120 bp, Artificial Sequence
  ENSG00000116991_49 (sequence is synthesized)
aaaaaaaaaagcactgttgtgtttaacactagttcagatgcagttaccttagagacttatttatttgcaggaacaaatggtgcctgaatattaacagtgttctgattaaaaacaaaaaaa

SEQ ID NO: 219814 - DNA, 120 bp, Artificial Sequence
  ENSG00000116991_50 (sequence is synthesized)
agatacatatgccttgtaaatggctcaccgagtggtcagtagtcacttcaactcttagttcacttttgtatagttgctctgctggaaagaaatgagagtgaatctgcttactcactagaa

SEQ ID NO: 219815 - DNA, 120 bp, Artificial Sequence
  ENSG00000116991_51 (sequence is synthesized)
cttccctgtgtgctgtgagccagcggaaccacttgtacaatgccagatttgtttatctttgtacagaagctttgatgaagtgtcttgtatttaacacccttatttaagcttatttaacct

SEQ ID NO: 219816 - DNA, 120 bp, Artificial Sequence
  ENSG00000116991_52 (sequence is synthesized)
taaattgttaattttataaaatttggtttggcctgcactacgatgagggatggaggtagctgcaggctcagaagagactgagcttgcacagatcagaccgagaagcagggtgagagattc

SEQ ID NO: 219817 - DNA, 120 bp, Artificial Sequence
  ENSG00000116991_53 (sequence is synthesized)
taacgactggatgctgctagtaacacattgtttgtattgctttaccatttttaactgttagatttgagatgaacatacattttgcttttttaataaatgtttaaaagaagtccacataag

SEQ ID NO: 219818 - DNA, 120 bp, Artificial Sequence
  ENSG00000116991_54 (sequence is synthesized)
actaggggtgggcattgtgtgtggctcccctgtggtagagaaggacatcggatgaacatgtgatctgtgtatccagctccaacccaaaaggtgaaggaaatactcatgaccagccagatg

SEQ ID NO: 219819 - DNA, 120 bp, Artificial Sequence
  ENSG00000116991_55 (sequence is synthesized)
cccatccatctttcttgtaagatcatttattttaaatgccttagaacattttctctttagtttttcccaaatatgtttttatactagtttggaaacatgatgccattatagtataacaca

SEQ ID NO: 219820 - DNA, 120 bp, Artificial Sequence
  ENSG00000116991_56 (sequence is synthesized)
gggagggacagtggtgcccgtgttctgactgactctgggagggacagtggtgcccgtgttctgactgactgactctgggagggacagtggtgcccgtgttctgactgactctgggagggg

SEQ ID NO: 219821 - DNA, 120 bp, Artificial Sequence
  ENSG00000116991_57 (sequence is synthesized)
catttgggtcttccttgtctccattggataaaccaacttaaataatatatcttttgttttcctaccaactcgtatatctatagagtttctgcatctctttttaaatcagtaaagtcccag

SEQ ID NO: 219822 - DNA, 120 bp, Artificial Sequence
  ENSG00000116991_58 (sequence is synthesized)
aatgggctttccactagatcagcaatatggacactttcccattctgacataatataatatatctgcttgctgggctctaagcacatgaaataattttttcgagtgaaaacttgaccaaca

SEQ ID NO: 219823 - DNA, 120 bp, Artificial Sequence
  ENSG00000116991_59 (sequence is synthesized)
acttactgtcataggtcttattaaataggtatctatgtagtcagagcatgtttcatagaaatggagtgttcattaaactgaaacttcatacattgcctctgggcttttggggataggagt

SEQ ID NO: 219824 - DNA, 120 bp, Artificial Sequence
  ENSG00000116991_60 (sequence is synthesized)
atgatacctcccaacttgaaattcccacagataggtgaggtcatagtcatcgggtgatacttaatgagcccatgtttttctttcattggatgtaaactatgctcgatagtgacgagaggc

SEQ ID NO: 219825 - DNA, 120 bp, Artificial Sequence
  ENSG00000116996_0 (sequence is synthesized)
gaattcccctttctgaaggcatcccacctgagtgtcacaaagatgtgcagctgaaaacaagcctgacttctgtatataaaggaatctgggcaggcagaccctcggctcttgggagaggag

SEQ ID NO: 219826 - DNA, 120 bp, Artificial Sequence
  ENSG00000116996_1 (sequence is synthesized)
gcggagagtctgcagccggcaggaactcctggtagcattatgtggctgctgcggtgcgttttgctgtgtgtttcattatctcttgctgtgagtggccagcataagcctgaggcaccagat

SEQ ID NO: 219827 - DNA, 120 bp, Artificial Sequence
  ENSG00000116996_2 (sequence is synthesized)
tattccagtgtgctccactgtgggccgtggagcttccagtttgctgtaaacctcaaccaggaggcaacgtctcctcctgtactaatagcttgggacaaccaagggctgctgcacgagctg

SEQ ID NO: 219828 - DNA, 120 bp, Artificial Sequence
  ENSG00000116996_3 (sequence is synthesized)
cagaatgactccgactgtggcacctggataagaaaaggtccaggcagctccgtggtgttggaggcaacctatagcagctgctatgtcactgagtgggactcccactacatcatgccagtt

SEQ ID NO: 219829 - DNA, 120 bp, Artificial Sequence
  ENSG00000116996_4 (sequence is synthesized)
ggagttgaaggagcaggcgcggctgaacacaaggtggttacagagaggaagctgctcaagtgtcctatggatcttctagcccgagatgctccagatactgactggtgtgactccatccca

SEQ ID NO: 219830 - DNA, 120 bp, Artificial Sequence
  ENSG00000116996_5 (sequence is synthesized)
gcacgggacagactgccatgtgcaccttcacccatctctcgaggagactgtgaagggctaggctgttgttatagctctgaagaggtgaattcctgctactatggaaacactgtgaccttg

SEQ ID NO: 219831 - DNA, 120 bp, Artificial Sequence
  ENSG00000116996_6 (sequence is synthesized)
cattgtacccgagagggccatttctctattgctgtgtctcggaacgtgacctcgccaccactgctcttggattctgtgcgcttggcccttaggaatgacagtgcgtgtaaccctgtgatg

SEQ ID NO: 219832 - DNA, 120 bp, Artificial Sequence
  ENSG00000116996_7 (sequence is synthesized)
tgggagccgtggctctgtcactcgtgacagcatcttcaggctccatgtcagctgcagctactcagtaagtagcaactctctcccaatcaatgtccaggttttcactctcccaccaccctt

SEQ ID NO: 219833 - DNA, 120 bp, Artificial Sequence
  ENSG00000116996_8 (sequence is synthesized)
tcctgagacccagcctggacccctcactctggaacttcagattgccaaagataaaaactatggctcttactacggtgttggtgactacccagtggtgaagttgcttcgggatcccattta

SEQ ID NO: 219834 - DNA, 120 bp, Artificial Sequence
  ENSG00000116996_9 (sequence is synthesized)
cgtggaggtctccatccttcacagaacagacccctacctggggctgctcctacaacagtgttgggcaacacccagcactgaccccctgagtcagccacagtggcccatcctggtaaaggg

SEQ ID NO: 219835 - DNA, 120 bp, Artificial Sequence
  ENSG00000116996_10 (sequence is synthesized)
ctgcccctacattggagacaactatcagacccagctgatccctgtccagaaagccttggatcttccatttccctctcaccaccagcgcttcagcatcttcaccttcagctttgtgaaccc

SEQ ID NO: 219836 - DNA, 120 bp, Artificial Sequence
  ENSG00000116996_11 (sequence is synthesized)
tacagtggagaaacaggccctcaggggaccggtgcatctgcactgcagcgtgtcagtctgccagcctgctgagacaccatcctgtgtggtgacctgtcctgatctcagtcgaagaagaaa

SEQ ID NO: 219837 - DNA, 120 bp, Artificial Sequence
  ENSG00000116996_12 (sequence is synthesized)
ttttgacaacagttctcagaacactactgctagtgtttctagcaaaggccccatgattctactccaagccactaaggaccctccagaaaagctccgtgttcctgtagactcgaaagttct

SEQ ID NO: 219838 - DNA, 120 bp, Artificial Sequence
  ENSG00000116996_13 (sequence is synthesized)
gtgggtggcaggcctttctgggaccttaatccttggagccttgttagtatcctacttggctgtcaagaaacagaagagttgcccagaccaaatgtgtcaataaaaccagagtgtattccc

SEQ ID NO: 219839 - DNA, 120 bp, Artificial Sequence
  ENSG00000116996_14 (sequence is synthesized)
agctttctttccttcctttctgttagctaaaagttactacatttttcttgggctctgaagtctgcctggattgtggtatttaatgtgaggcagctgcagactgtgccccaaagcaaatga

SEQ ID NO: 219840 - DNA, 120 bp, Artificial Sequence
  ENSG00000116996_15 (sequence is synthesized)
aacctaaggaagctggcaggtgactggaaacagcatcttgactttaccctccatgtattgaaacattttattggatccttattttggacaaagttcccttttatattaggaaatgaagtc

SEQ ID NO: 219841 - DNA, 120 bp, Artificial Sequence
  ENSG00000116996_16 (sequence is synthesized)
agtactctggtccaacaaccaacaacatggaacttgtttacatggtctggtaacaagaataatggtaggaaaccagaagttgaagctgatgttatagcagccgtttggaaagaagcctat

SEQ ID NO: 219842 - DNA, 120 bp, Artificial Sequence
  ENSG00000116996_17 (sequence is synthesized)
tctaacaatgtcacgttccctgccactcccatcttcactcagaatattcagatcagaagagccagatacagacacagagatgtaatctctgtgaactcaactttctcacctctgaaatag

SEQ ID NO: 219843 - DNA, 120 bp, Artificial Sequence
  ENSG00000116996_18 (sequence is synthesized)
aaaactatcaattgtttctagctgtctggctctaaatttttggttcttagaaccttcttaatccccttcagtttttttccacgggtcttgatttgcagctgtcctttggaaactctactc

SEQ ID NO: 219844 - DNA, 120 bp, Artificial Sequence
  ENSG00000117000_0 (sequence is synthesized)
gggccgtgggaagatggcggacggaaagggagacgccgccgctgtcgccggggctggggctgaggctccggcggtagcgggagccggagatggagtcgagactgagtccatggttcgggg

SEQ ID NO: 219845 - DNA, 120 bp, Artificial Sequence
  ENSG00000117000_1 (sequence is synthesized)
tcatcgccccgtatctccagcgccgggagcctcgggactgcggccgtgtctgtggcagctggagacagagctgagggagcaagaggtgtcggaggtctcatctttgaactactgccggag

SEQ ID NO: 219846 - DNA, 120 bp, Artificial Sequence
  ENSG00000117000_2 (sequence is synthesized)
cttctgccagaccttattgcaatatgcaagcaacaagaatgcatcagaacatattgtgtatcttctggaggtatatcgacttgccatccaaagctttgccagtgcacgtccatacttaac

SEQ ID NO: 219847 - DNA, 120 bp, Artificial Sequence
  ENSG00000117000_3 (sequence is synthesized)
tactgaatgtgaagatgtcctcttagtgcttggcagattagtactgagttgtttcgaattactgctttcagtgtctgaaagtgaactgccatgtgaagtctggctaccattccttcagtc

SEQ ID NO: 219848 - DNA, 120 bp, Artificial Sequence
  ENSG00000117000_4 (sequence is synthesized)
tctacaggagtcacatgatgcattattggaatttgggaataataacctacaaatattggttcatgttaccaaggaaggggtgtggaaaaacccagttcttcttaaaattctgtctcaaca

SEQ ID NO: 219849 - DNA, 120 bp, Artificial Sequence
  ENSG00000117000_5 (sequence is synthesized)
gccagtagaaacggaggaagtcaataaattgattgcacaagaaggaccttcctttctgcaaatgcgaataaaacatttgttgaaatctaactgcatcccccaggctactgctttatcaaa

SEQ ID NO: 219850 - DNA, 120 bp, Artificial Sequence
  ENSG00000117000_6 (sequence is synthesized)
actatgtgcagaatctaaagaaatttcaaatgtgtcatcttttcagcaagcctatatcacatgtttatgttctatgctccctaatgaagatgctattaaggagattgcaaaggtcgactg

SEQ ID NO: 219851 - DNA, 120 bp, Artificial Sequence
  ENSG00000117000_7 (sequence is synthesized)
caaggaagtactagacatcatttgtaatctggaatctgaggggcaggataacacagcatttgttctttgtacgacttaccttacccagcagctccaaactgcaagtgtatattgttcttg

SEQ ID NO: 219852 - DNA, 120 bp, Artificial Sequence
  ENSG00000117000_8 (sequence is synthesized)
ggaactgactcttttttggagtaaactgcaaagaagaattgacccttctttagatacttttttggagcgctgtcgtcagtttggtgtcatagctaaaacgcagcagcatttattttgcct

SEQ ID NO: 219853 - DNA, 120 bp, Artificial Sequence
  ENSG00000117000_9 (sequence is synthesized)
cattagagttatacaaactgaagcacaagatgctggtcttggggtgtcaattttactgtgtgtcagagctcttcaactcagatcaagtgaagatgaggaaatgaaggcatcagtttgtaa

SEQ ID NO: 219854 - DNA, 120 bp, Artificial Sequence
  ENSG00000117000_10 (sequence is synthesized)
aacaattgcctgtcttttaccagaagatttagaagttagacgagcctgtcagcttacagaattcttaattgaacccagtttggatggatttaatatgttagaagaactatatttgcaacc

SEQ ID NO: 219855 - DNA, 120 bp, Artificial Sequence
  ENSG00000117000_11 (sequence is synthesized)
agatcaaaaatttgatgaagaaaatgcaccggttccaaattctcttcgatgtgagctcttactagctttaaaagcccactggccttttgatcctgagttttgggactggaaaactttaaa

SEQ ID NO: 219856 - DNA, 120 bp, Artificial Sequence
  ENSG00000117000_12 (sequence is synthesized)
acgacactgccaccaacttttaggacaagaagcctcagattctgatgatgatttaagtggctatgaaatgtccattaatgacacagatgttttagagtcatttctcagtgactatgatga

SEQ ID NO: 219857 - DNA, 120 bp, Artificial Sequence
  ENSG00000117000_13 (sequence is synthesized)
gggtaaagaagataaacaatatagaagaagagatttgacagatcagcataaggagaaaagagacaaaaaacctattggctcttctgaaagatatcagaggtggcttcagtacaagttttt

SEQ ID NO: 219858 - DNA, 120 bp, Artificial Sequence
  ENSG00000117000_14 (sequence is synthesized)
ctgtttgttatgtaagcgggaatgtatagaggctagaattcttcatcattctaagatgcatatggaagatggaatttacacctgtccagtttgtattaaaaaatttaagagaaaagaaat

SEQ ID NO: 219859 - DNA, 120 bp, Artificial Sequence
  ENSG00000117000_15 (sequence is synthesized)
gtttgttcctcatgtgatggagcatgttaaaatgccaccaagcagaagggaccgctctaaaaagaaattactgttaaaaggctctcaaaagggtatttgtcctaagagcccctctgcaat

SEQ ID NO: 219860 - DNA, 120 bp, Artificial Sequence
  ENSG00000117000_16 (sequence is synthesized)
cccagagcaaaaccattcattgaatgaccaagccaaaggagagtctcatgaatatgtcacattcagcaaattagaagattgccacctgcaagacagagatttgtatccatgtcccggtac

SEQ ID NO: 219861 - DNA, 120 bp, Artificial Sequence
  ENSG00000117000_17 (sequence is synthesized)
agactgttcccgtgtgtttaagcaatttaaatacttaagtgtgcatcttaaagctgaacaccaaaataatgatgaaaatgccaagcactacttggatatgaaaaatagaagagagaagtg

SEQ ID NO: 219862 - DNA, 120 bp, Artificial Sequence
  ENSG00000117000_18 (sequence is synthesized)
tacttactgtcgacgacattttatgtctgcttttcaccttcgagagcacgaacaagtgcattgtgggcctcagccttatatgtgtgtatctatagattgctatgctaggtttggatcagt

SEQ ID NO: 219863 - DNA, 120 bp, Artificial Sequence
  ENSG00000117000_19 (sequence is synthesized)
aaatgaactacttaaccataaacaaaagcatgacgatctgcgttacaaatgtgaattaaatggctgtaatattgttttcagtgacttgggacagctttaccaccatgaagcacaacactt

SEQ ID NO: 219864 - DNA, 120 bp, Artificial Sequence
  ENSG00000117000_20 (sequence is synthesized)
tagggatgcatcttacacatgcaacttccttggctgtaaaaagttctattactccaaaattgaataccagaatcacctctcaatgcataatgttgaaaattcaaatggagacataaagaa

SEQ ID NO: 219865 - DNA, 120 bp, Artificial Sequence
  ENSG00000117000_21 (sequence is synthesized)
atcagtgaaacttgaggagtctgcaacaggtgaaaagcaagattgtattaatcagccccatctacttaaccaaactgataaatcacatttacctgaagatcttttctgtgcagaatcagc

SEQ ID NO: 219866 - DNA, 120 bp, Artificial Sequence
  ENSG00000117000_22 (sequence is synthesized)
taattctcaaatagatacagaaactgcagaaaacctgaaagaaaacagtgacagtaattctagtgatcagttaagtcatagctcttcagcttcaatgaatgaagagctaattgacacact

SEQ ID NO: 219867 - DNA, 120 bp, Artificial Sequence
  ENSG00000117000_23 (sequence is synthesized)
agatcactctgaaactatgcaggatgtattgttatctaatgagaaagtctttgggccctccagtttaaaagaaaaatgttccagtatggcagtttgttttgacgggactaagtttacctg

SEQ ID NO: 219868 - DNA, 120 bp, Artificial Sequence
  ENSG00000117000_24 (sequence is synthesized)
tggttttgatggctgtggttccacatacaaaaatgcaagaggaatgcagaaacatttacggaaggttcatccataccatttcaagcccaaaaagataaagacgaaagatctgtttccctc

SEQ ID NO: 219869 - DNA, 120 bp, Artificial Sequence
  ENSG00000117000_25 (sequence is synthesized)
aaatgtaaacgagaacatcaaggttattcctcagaatcctccatttgtgcttctaaaaggccctgtacagaggataccatgttggaacttctgttacgcttgaaacatttaagcttgaaa

SEQ ID NO: 219870 - DNA, 120 bp, Artificial Sequence
  ENSG00000117000_26 (sequence is synthesized)
aactcaataacacatggatctttctcagggtcattgcaggggtacccatccagtggtgctaagtctcttcagtcagtttcatctatctcagaccttaattttcagaatcaagatgaaaac

SEQ ID NO: 219871 - DNA, 120 bp, Artificial Sequence
  ENSG00000117000_27 (sequence is synthesized)
atgccaagtcagtaccttgcacagttggcggctaagccgtttttctgtgagcttcaaggatgcaaatatgaatttgtgaccagagaggctctgttaatgcattatcttaaaaagcataat

SEQ ID NO: 219872 - DNA, 120 bp, Artificial Sequence
  ENSG00000117000_28 (sequence is synthesized)
tattcaaaagaaaaagtccttcagttaaccatgttccaacatcggtattccccatttcagtgtcatatttgccaaaggtcatttacaagaaaaacacaccttaggattcattataaaaat

SEQ ID NO: 219873 - DNA, 120 bp, Artificial Sequence
  ENSG00000117000_29 (sequence is synthesized)
aaacatcaaattggcagtgacagagcaactcacaaactattagataatgaaaagtgtgatcatgaaggcccatgttcagtagataggttgaaaggtgattgttctgcagaacttggaggt

SEQ ID NO: 219874 - DNA, 120 bp, Artificial Sequence
  ENSG00000117000_30 (sequence is synthesized)
gatcccagtagtaactctgagaaaccacactgtcatcctaaaaaggatgaatgtagttctgaaacagatttggaatcatcttgtgaagaaacagaaagtaaaacatctgacatttcatca

SEQ ID NO: 219875 - DNA, 120 bp, Artificial Sequence
  ENSG00000117000_31 (sequence is synthesized)
ccaataggcagccatagagaagaacaagaaggaagagagggcagaggtagcaggcgaactgttgctaaaggaaatctgtgttatattttgaataaataccacaaaccattccattgtatt

SEQ ID NO: 219876 - DNA, 120 bp, Artificial Sequence
  ENSG00000117000_32 (sequence is synthesized)
cataaaacttgcaactcctcattcaccaatctaaaaggcttaattcgccattacagaactgtacatcagtacaacaaagaacagttatgtttggagaaagacaaagcaagaaccaaaagg

SEQ ID NO: 219877 - DNA, 120 bp, Artificial Sequence
  ENSG00000117000_33 (sequence is synthesized)
gaacttgtcaaatgtaaaaagatatttgcttgcaaatataaggaatgtaataaacgcttcctgtgttccaaagctcttgctaagcactgtagtgattctcataacctagaccatattgaa

SEQ ID NO: 219878 - DNA, 120 bp, Artificial Sequence
  ENSG00000117000_34 (sequence is synthesized)
gagcctaaagtactttccgaagctggatctgcagcaaggttttcttgtaaccagcctcagtgccctgctgttttttatacattcaacaagttgaagcaccacttgatggaacagcataat

SEQ ID NO: 219879 - DNA, 120 bp, Artificial Sequence
  ENSG00000117000_35 (sequence is synthesized)
attgaaggggaaatacattcagattatgaaattcattgtgatcttaatggctgtggccagattttcacccatcgcagtaattactcacaacatgtatattaccgacataaagactattat

SEQ ID NO: 219880 - DNA, 120 bp, Artificial Sequence
  ENSG00000117000_36 (sequence is synthesized)
gatgatttgtttagaagccagaaagtagcaaatgagagactactaaggagtgaaaaggtatgtcaaacagctgatactcaggggcatgaacatcagaccaccaggagatcatttaatgct

SEQ ID NO: 219881 - DNA, 120 bp, Artificial Sequence
  ENSG00000117000_37 (sequence is synthesized)
aagtctaaaaaatgtggcttaatcaaagaaaagaaagccccaataagttttaaaaccagagctgaggccctccatatgtgtgtggagcactctgagcacacacagtacccctgcatggtt

SEQ ID NO: 219882 - DNA, 120 bp, Artificial Sequence
  ENSG00000117000_38 (sequence is synthesized)
caaggatgcttatctgtggtgaagttggagagcagcattgtgaggcattacaaacgcactcatcagatgagtagtgcctatttagagcaacagatggagaatcttgttgtttgcgttaag

SEQ ID NO: 219883 - DNA, 120 bp, Artificial Sequence
  ENSG00000117000_39 (sequence is synthesized)
tacggtaccaaaattaaggaggaacccccttctgaagcagatccctgtataaagaaagaagaaaatagaagctgtgaatcagagcgcacagaacacagccattccccgggtgacagtagt

SEQ ID NO: 219884 - DNA, 120 bp, Artificial Sequence
  ENSG00000117000_40 (sequence is synthesized)
gcacccatccagaacactgattgctgtcattcaagtgaaagggatggaggtcagaaagggtgcatagaaagcagctcagtatttgatgcagatactctgctctacaggggaactttgaaa

SEQ ID NO: 219885 - DNA, 120 bp, Artificial Sequence
  ENSG00000117000_41 (sequence is synthesized)
tgtaatcatagttccaaaaccacttccctagaacagtgtaatatagttcagcctcctcctccttgtaaaatagaaaattccatacctaatcccaatgggactgaaagtgggacttatttc

SEQ ID NO: 219886 - DNA, 120 bp, Artificial Sequence
  ENSG00000117000_42 (sequence is synthesized)
acaagtttccagctgcctttaccaaggatcaaagaatcagaaactaggcagcatagttcagggcaagaaaacactgtaaaaaatccaacccatgtcccaaaagagaattttaggaaacat

SEQ ID NO: 219887 - DNA, 120 bp, Artificial Sequence
  ENSG00000117000_43 (sequence is synthesized)
tcacagccccggtcatttgatttgaagacttacaaacctatgggatttgaatcttcatttctgaaatttattcaggaaagtgaagagaaagaagatgattttgatgattgggagccttca

SEQ ID NO: 219888 - DNA, 120 bp, Artificial Sequence
  ENSG00000117000_44 (sequence is synthesized)
gagcacttaacattaagtaattcttcacagtccagtaatgatttaacagggaatgttgtggcaaataatatggtgaatgacagtgaacctgaagttgacatacctcattcttccagtgac

SEQ ID NO: 219889 - DNA, 120 bp, Artificial Sequence
  ENSG00000117000_45 (sequence is synthesized)
tctacaattcatgagaacctgactgcaatcccacctttaatagtagctgaaacaacaacagttccttccttggaaaacctgagggttgtattggacaaagcattaacagactgtggagag

SEQ ID NO: 219890 - DNA, 120 bp, Artificial Sequence
  ENSG00000117000_46 (sequence is synthesized)
cttgccttaaaacagcttcattatcttcggccagtggtggttcttgaaagatctaagttttccacaccaattttagacttatttccaacaaaaaagacagatgagctttgtgtaggaagt

SEQ ID NO: 219891 - DNA, 120 bp, Artificial Sequence
  ENSG00000117000_47 (sequence is synthesized)
tcataagtagcaattttgttttagtaacagactggctccaacactgcaacatggggacatttgccaactcgaacaaaggctgagaagcagccacaccgttgtttagggtagaataggctg

SEQ ID NO: 219892 - DNA, 120 bp, Artificial Sequence
  ENSG00000117000_48 (sequence is synthesized)
tgtatttacatgaatgtataatatctatgtcagcagtattggctgagtccattagctctccagttggtttaatgattgggtttatttttgtttgtttgtttattaaaaaaatggaactgt

SEQ ID NO: 219893 - DNA, 120 bp, Artificial Sequence
  ENSG00000117000_49 (sequence is synthesized)
acacttgtttggtgctaattaatacatcaaaatatactggggcttcctttttcaaattaagtgtgcatgattgtatatggaacaaatactaaggtcccagggtgggagggctagggaaag

SEQ ID NO: 219894 - DNA, 120 bp, Artificial Sequence
  ENSG00000117000_50 (sequence is synthesized)
ggatatggagttcttacttgacttgaatgtgcacctgagggtgctttgtgtaatatattgtacactacagcatcttatattttttgagttgagtttcaataaattacaatttttcaccca

SEQ ID NO: 219895 - DNA, 120 bp, Artificial Sequence
  ENSG00000117009_0 (sequence is synthesized)
gagacacagaaatcagtgtcactcagtgacagaagcaacaataattgtgaaaaatacttcagcagttatggactcatctgtcattcaaaggaaaaaagtagctgtcattggtggtggctt

SEQ ID NO: 219896 - DNA, 120 bp, Artificial Sequence
  ENSG00000117009_1 (sequence is synthesized)
ggttggctcattacaagcatgctttcttgcaaagaggaatttccagattgatgtatatgaagctagggaagatactcgagtggctaccttcacacgtggaagaagcattaacttagccct

SEQ ID NO: 219897 - DNA, 120 bp, Artificial Sequence
  ENSG00000117009_2 (sequence is synthesized)
ttctcatagaggacgacaagccttgaaagctgttggcctggaagatcagattgtatcccaaggtattcccatgagagcaagaatgatccactctctttcaggaaaaaagtctgcaattcc

SEQ ID NO: 219898 - DNA, 120 bp, Artificial Sequence
  ENSG00000117009_3 (sequence is synthesized)
ctatgggacaaagtctcagtatattctttctgtaagcagagaaaatctaaacaaggatctattgactgctgctgagaaataccccaatgtgaaaatgcactttaaccacaggctgttgaa

SEQ ID NO: 219899 - DNA, 120 bp, Artificial Sequence
  ENSG00000117009_4 (sequence is synthesized)
atgtaatccagaggaaggaatgatcacagtgcttggatctgacaaagttcccaaagatgtcacttgtgacctcattgtaggatgtgatggagcctattcaactgtcagatctcacctgat

SEQ ID NO: 219900 - DNA, 120 bp, Artificial Sequence
  ENSG00000117009_5 (sequence is synthesized)
gaagaaacctcgctttgattacagtcagcagtacattcctcatgggtacatggagttgactattccacctaagaacggagattatgccatggaacctaattatctgcatatttggcctag

SEQ ID NO: 219901 - DNA, 120 bp, Artificial Sequence
  ENSG00000117009_6 (sequence is synthesized)
aaatacctttatgatgattgcacttcctaacatgaacaaatcattcacatgtactttgttcatgccctttgaagagtttgaaaaacttctaaccagtaatgatgtggtagatttcttcca

SEQ ID NO: 219902 - DNA, 120 bp, Artificial Sequence
  ENSG00000117009_7 (sequence is synthesized)
gaaatactttccggatgccatccctctaattggagagaaactcctagtgcaagatttcttcctgttgcctgcccagcccatgatatctgtaaagtgctcttcatttcactttaaatctca

SEQ ID NO: 219903 - DNA, 120 bp, Artificial Sequence
  ENSG00000117009_8 (sequence is synthesized)
ctgtgtactgctgggagatgcagctcatgctatagtgccgttttttgggcaaggaatgaatgcgggctttgaagactgcttggtatttgatgagttaatggataaattcagtaacgacct

SEQ ID NO: 219904 - DNA, 120 bp, Artificial Sequence
  ENSG00000117009_9 (sequence is synthesized)
tagtttgtgtcttcctgtgttctcaagattgagaatcccagatgatcacgcgatttcagacctatccatgtacaattacatagagatgcgagcacatgtcaactcaagctggttcatttt

SEQ ID NO: 219905 - DNA, 120 bp, Artificial Sequence
  ENSG00000117009_10 (sequence is synthesized)
tcagaagaacatggagagatttcttcatgcgattatgccatcgacctttatccctctctatacaatggtcactttttccagaataagataccatgaggctgtgcagcgttggcattggca

SEQ ID NO: 219906 - DNA, 120 bp, Artificial Sequence
  ENSG00000117009_11 (sequence is synthesized)
aaaaaaggtgataaacaaaggactctttttcttgggatcactgatagccatcagcagtacctacctacttatacactacatgtcaccacgatctttcctccgcttgagaagaccatggaa

SEQ ID NO: 219907 - DNA, 120 bp, Artificial Sequence
  ENSG00000117009_12 (sequence is synthesized)
ctggatagctcacttccggaatacaacatgtttccccgcaaaggccgtggactccctagaacaaatttccaatctcattagcaggtgatagaaaggttttgtggtagcaaatgcatgatt

SEQ ID NO: 219908 - DNA, 120 bp, Artificial Sequence
  ENSG00000117009_13 (sequence is synthesized)
tctctgtgaccaaaattaagcatgaaaaaaatgtttccattgccatatttgattcactagtggaagatagtgttctgcttataattaaactgaatgtagagtatctctgtatgttaattg

SEQ ID NO: 219909 - DNA, 120 bp, Artificial Sequence
  ENSG00000117009_14 (sequence is synthesized)
caattactggttggggggtgcattttaaaagatgaaacatgcagcttccctacattacacacactcaggttgagtcattctaactataaaagtgcaatgactaagatccttcacttctct

SEQ ID NO: 219910 - DNA, 120 bp, Artificial Sequence
  ENSG00000117009_15 (sequence is synthesized)
gaaagtaaggccctagatgcctcagggaagacagtaatcatgccttttctttaaaagacacaataggactcgcaacagcattgactcaacacctaggactaaaaatcacaacttaactag

SEQ ID NO: 219911 - DNA, 120 bp, Artificial Sequence
  ENSG00000117009_16 (sequence is synthesized)
catgttaactgcacttttcattacgtgaatggaacttacctaaccacagggctcagacttactagataaaaccagaaatggaaataaggaattcaggggagttccagagacttacaaaat

SEQ ID NO: 219912 - DNA, 120 bp, Artificial Sequence
  ENSG00000117009_17 (sequence is synthesized)
taaggaattcaggggagttccagagacttacaaaatgaactcattttattttcccaccttcaaatataagtattatcatctatctgtttatcgtctatctatctatcatctatctatcta

SEQ ID NO: 219913 - DNA, 120 bp, Artificial Sequence
  ENSG00000117009_18 (sequence is synthesized)
ctatctatctatctatctatctctatttatttatgtatttagagatcaggtctcactctgttgaccaggctggagtgcagtggtgagatctgggttcactgcaacctctgcctcctgggc

SEQ ID NO: 219914 - DNA, 120 bp, Artificial Sequence
  ENSG00000117009_19 (sequence is synthesized)
gcaatcctcccacttcagcctcccaaatagctggggctaccatggtatttttcagtagagaccgggtcttgccatgctgcccaggccagtctcaaactcctggcctcatgtgatctgccc

SEQ ID NO: 219915 - DNA, 120 bp, Artificial Sequence
  ENSG00000117009_20 (sequence is synthesized)
gtgaaggacaggaaagggttttattcataaattaaatgtctacatgtgccagaatggaaaggaaacaaggggagacaacttttatagaaatacaaagccattactttattcaatttcaga

SEQ ID NO: 219916 - DNA, 120 bp, Artificial Sequence
  ENSG00000117009_21 (sequence is synthesized)
ccctcagaagcaatttactaatttattcttcgactacatactgcagcagaaccagcaatacacttgatttttaaaagcacatttagtgaaatgttttctttggttcatccttctttaaca

SEQ ID NO: 219917 - DNA, 120 bp, Artificial Sequence
  ENSG00000117009_22 (sequence is synthesized)
ggctgctgagtcactcagaaatccttcaaacatgattaattatgaagatgaaacactagagtcatataagaaataaaaattgggcaataaaataaaatgattcagtgtttcttttctata

SEQ ID NO: 219918 - DNA, 120 bp, Artificial Sequence
  ENSG00000117009_23 (sequence is synthesized)
ttgtcaatgaaaaccttgagttctaataatccatgttcagtttgtagggaaagaaaaaataatttttccttctacccactttaggttccttggctggggcccctataacaaaagacagat

SEQ ID NO: 219919 - DNA, 120 bp, Artificial Sequence
  ENSG00000117009_24 (sequence is synthesized)
tgacaagagaaaaacaaacataaatttattagcgggtatatgtaatatatatgtgggaaatacaggggaatgagcaaatctcaaagagctggcgtcttagaactccctggcttatatagc

SEQ ID NO: 219920 - DNA, 120 bp, Artificial Sequence
  ENSG00000117009_25 (sequence is synthesized)
atcgacaaagaacagtaaatttttagagaaacaacaaaacaaagaaaaagagctttgagtctgtaggggcagcaatttgggggaagcaaatatatgggagtttgccttgtagattcctct

SEQ ID NO: 219921 - DNA, 120 bp, Artificial Sequence
  ENSG00000117009_26 (sequence is synthesized)
ggtgctggtctccaggctgacaaggattcaaagttgtctctgaaactcctctttgtcatactgcacatataaaacgtcttttgtttccaacaagaggattttctttttcattctagaatt

SEQ ID NO: 219922 - DNA, 120 bp, Artificial Sequence
  ENSG00000117009_27 (sequence is synthesized)
atctccttgataacttgatcagatataggacatgacactgaatagagtccaacagtacaaaaaaaattcagtatgttctagctacttcacacatgtgtacgcgacagttatttttacagt

SEQ ID NO: 219923 - DNA, 120 bp, Artificial Sequence
  ENSG00000117009_28 (sequence is synthesized)
aaggtattttcgagaaaaatgcattacgtgttttggaaaatagagtaatttaaaaaatatatttgaaatgaaaatctccaacacattagaagatgatgatgttagatgcccatcgtgtgc

SEQ ID NO: 219924 - DNA, 120 bp, Artificial Sequence
  ENSG00000117009_29 (sequence is synthesized)
cacaagtggttttttcattatgtaaagcacccgttgaattaaaagaatttgtttttgttcaacctcttcctgaggcccaagagcatatgggcaattcggatttcctgctggaccacaagg

SEQ ID NO: 219925 - DNA, 120 bp, Artificial Sequence
  ENSG00000117009_30 (sequence is synthesized)
ttctgttgatattacatagaacgggtattccagacacttcttatgatgaaagtccaaaagtggcatccaatttaaggccccatctttcgttgccattcttcattcctacaaaggacgaac

SEQ ID NO: 219926 - DNA, 120 bp, Artificial Sequence
  ENSG00000117009_31 (sequence is synthesized)
ttggattacatcaactttggacccattggttttgtcgctgtcgtcaactgacagtgattcatcactggtgatgataaaaatgatggaagaagagttgaaagtcacttttttctttggcct

SEQ ID NO: 219927 - DNA, 120 bp, Artificial Sequence
  ENSG00000117009_32 (sequence is synthesized)
gtccccatctttctgtgacatcacaatgggtctgatctgcatttcacttccagctgctggtaggtctttagcaggcctctggcacctcagcagtcggaggcacagaagctgcaaaaggga

SEQ ID NO: 219928 - DNA, 120 bp, Artificial Sequence
  ENSG00000117009_33 (sequence is synthesized)
tcttcgaaactgggcagagaaaaaataaagtggaatattaagtaaaagttgggcactaatctggattaacattcgaggaaatcagttgagctgaatttaagttgttttttgtttgttagc

SEQ ID NO: 219929 - DNA, 120 bp, Artificial Sequence
  ENSG00000117009_34 (sequence is synthesized)
aggtgtggatgtggggttatgtggtcatgctcagatctacctaaatcaccccagagctttatgtcttttattcattctaattcttattaaccggaatatgtaggaccatttcaatacctt

SEQ ID NO: 219930 - DNA, 120 bp, Artificial Sequence
  ENSG00000117009_35 (sequence is synthesized)
gtaatcctccaagcttcaatctgcacacactttctatgagggcaggtacaactattaagagattttgaacattaagttagtccacaaatattcagtgggcatctactaggtgacagccac

SEQ ID NO: 219931 - DNA, 120 bp, Artificial Sequence
  ENSG00000117009_36 (sequence is synthesized)
tgtgctataattagagactttttactataagcatcaaaaacagataaggctcttcctggcagagtttacagcctggtgtacttgctaatgtctctttaattaggtgaagaattttttttt

SEQ ID NO: 219932 - DNA, 120 bp, Artificial Sequence
  ENSG00000117009_37 (sequence is synthesized)
tctatcgaaattactaatcagttggggaaaaaaatactatagcagacagcactaatgtcatcaacaaacattgttcttctccgtgtcctgggtacaacatcgaataatatttcttggcct

SEQ ID NO: 219933 - DNA, 120 bp, Artificial Sequence
  ENSG00000117009_38 (sequence is synthesized)
cctttccgcttctcctctctgctgttcctctctacaagaacctgggaggccaacgcctaaagatcataatatcacacaatggaaggaacctagattcctaaatgactgcataggacagat

SEQ ID NO: 219934 - DNA, 120 bp, Artificial Sequence
  ENSG00000117009_39 (sequence is synthesized)
cccatctcctccacccaatacattattagactgaactgtgacctgaaatgagcaataaactctgtattaattcactgaaatgttggggttgcttgttatagtagtcggtccatcatgacc

SEQ ID NO: 219935 - DNA, 120 bp, Artificial Sequence
  ENSG00000117009_40 (sequence is synthesized)
agtaaaacataaatcaaaagttaatgtaattgttatcccattatttagagcgaaataaatgttgaatatatggactttctcagattaggaaataccaattaaaaatataataaatagcta

SEQ ID NO: 219936 - DNA, 120 bp, Artificial Sequence
  ENSG00000117009_41 (sequence is synthesized)
gcttaaaaatttctgtgtcttacacagaagatagaaaaaatagagtgtctccaattggatggattttttaaaaaatttggttattgtaatggatttattttttcttagagctgagctgat

SEQ ID NO: 219937 - DNA, 120 bp, Artificial Sequence
  ENSG00000117009_42 (sequence is synthesized)
tgtactttggccaactaatgggttaatactgtcaagggaaattagccctgactaaacattgccgctggctcatgaatgcactaggcttggggcagtataaaaactcagagaaatcagtgt

SEQ ID NO: 219938 - DNA, 120 bp, Artificial Sequence
  ENSG00000117009_43 (sequence is synthesized)
tcagttgtcattttgagtaaagcacatgacactaatcttgtcatatgatttattggatttgtttgctgctcctttttatgggttatgaagagcaagactatgtacactacaaagtccttc

SEQ ID NO: 219939 - DNA, 120 bp, Artificial Sequence
  ENSG00000117009_44 (sequence is synthesized)
gaaagtgagctttctaagttatctatggagccactacttctcatacccagaggtacatcatcattttcaccactagacatatttttcttttggatgttttgttctatttttcagatctga

SEQ ID NO: 219940 - DNA, 120 bp, Artificial Sequence
  ENSG00000117009_45 (sequence is synthesized)
cagtgacagaagcaacaataattgtgaaaaatacttcagcagttatggactcatctgtcattcaaaggaaaaaagtagctgtcattggtggtggcttgattgtatcccaaggtattccca

SEQ ID NO: 219941 - DNA, 120 bp, Artificial Sequence
  ENSG00000117009_46 (sequence is synthesized)
ctcatagaggacgacaagccttgaaagctgttggcctggaagatcaggtacttaatgtatctttcttacagaagataatacctggtatttttcaacaattgcatggtttgatttcatcct

SEQ ID NO: 219942 - DNA, 120 bp, Artificial Sequence
  ENSG00000117009_47 (sequence is synthesized)
ggcttaaaaagtaccatttaataccaagaatctctgcatgaaaactcattctactaaagcttttaaaattcgaaatttggcaagagggtgaacattggacactcgaggcacccgaggagg

SEQ ID NO: 219943 - DNA, 120 bp, Artificial Sequence
  ENSG00000117009_48 (sequence is synthesized)
accctgcaaccggatgattgcttctgatattgggttctcaacaggatggtgcgtcactgcctgtagaaagtgagagtcaagatggcatccaggataaaaggagccagattcctttttttt

SEQ ID NO: 219944 - DNA, 120 bp, Artificial Sequence
  ENSG00000117009_49 (sequence is synthesized)
acaaatttccaatctcattagcaggctgctgagtcactcagaaatccttcaaacatgattaattatgaagatgaaacactagagtcatataagaaataaaaattgggcaataaaataaaa

SEQ ID NO: 219945 - DNA, 120 bp, Artificial Sequence
  ENSG00000117010_0 (sequence is synthesized)
acacgcgtagtaggacggtagccggtattcaatcttcaaatcagcgccgcgggaagtgcgggcgggtgttgctcccctgtctctggacgacgctgtgactgatcccaggcttggagccgg

SEQ ID NO: 219946 - DNA, 120 bp, Artificial Sequence
  ENSG00000117010_1 (sequence is synthesized)
agctgcgagcgaggcagtgaaagggtggcagatttctgtgtaagagctgcagaaaatgatcagcttccaggaatcagtgacattccaggatgtggctgtggatttcactgcagaggagtg

SEQ ID NO: 219947 - DNA, 120 bp, Artificial Sequence
  ENSG00000117010_2 (sequence is synthesized)
gcagctgcttgattgtgctgagagaaccctgtattgggatgtgatgttggagaactatagaaacctcatctcagtgggatgtccaattaccaaaacaaaagtgatcctcaaggtagagca

SEQ ID NO: 219948 - DNA, 120 bp, Artificial Sequence
  ENSG00000117010_3 (sequence is synthesized)
aggacaagagccatggatggtggagggagcgaatccacacgagagctctccagaatctgactacccacttgttgatgaaccagggaagcatcgggaaagcaaagacaattttttgaagtc

SEQ ID NO: 219949 - DNA, 120 bp, Artificial Sequence
  ENSG00000117010_4 (sequence is synthesized)
agttttgctcacattcaataaaattctgactatggagagaatccaccattataatatgagcacaagtcttaatccaatgagaaaaaaatcatataaatcgtttgagaagtgtttgccacc

SEQ ID NO: 219950 - DNA, 120 bp, Artificial Sequence
  ENSG00000117010_5 (sequence is synthesized)
taatttagacttacttaaatataatagaagttatactgtagaaaacgcttatgaatgcagtgaatgcgggaaagccttcaaaaagaagtttcatttcattagacatgaaaaaaatcatac

SEQ ID NO: 219951 - DNA, 120 bp, Artificial Sequence
  ENSG00000117010_6 (sequence is synthesized)
aaggaaaaaaccttttgaatgcaatgactgtggaaaagcctatagcaggaaggcacaccttgcaactcatcagaaaattcataatggagagagaccctttgtgtgcaatgattgtgggaa

SEQ ID NO: 219952 - DNA, 120 bp, Artificial Sequence
  ENSG00000117010_7 (sequence is synthesized)
ggcgtttatgcataaagcccaactcgtggtccaccagagacttcacactggagagaagccttatgagtgcagtcaatgtgggaaaacattcacttggaactcctcatttaatcaacacgt

SEQ ID NO: 219953 - DNA, 120 bp, Artificial Sequence
  ENSG00000117010_8 (sequence is synthesized)
agagaaaccctaccagtgtatcatatgtggcaaagcttttggcaacacatccgtgcttgttacacaccaaagaattcatacaggagagaaaccttacagttgtattgaatgtggcaaagc

SEQ ID NO: 219954 - DNA, 120 bp, Artificial Sequence
  ENSG00000117010_9 (sequence is synthesized)
cttcatcaagaagtcccatctcctcagacatcagataactcatacaggagagaagccctatgaatgtaacagatgtgggaaagcattttcccagaagtcaaatcttattgtacatcagaa

SEQ ID NO: 219955 - DNA, 120 bp, Artificial Sequence
  ENSG00000117010_10 (sequence is synthesized)
aattcatacataatattcactttatgaatatgagaaggccttattaaatatttgctaaatcttattaaatactaaagaattcatggtgagaagtctacaatttaaatgaatttggaagag

SEQ ID NO: 219956 - DNA, 120 bp, Artificial Sequence
  ENSG00000117010_11 (sequence is synthesized)
tagattcccataaaaaacaaccaatgccaatcatgttctggaagtgataataaactttttacagaaaatatgacagaaaacaactataaataatagagcataaagcttggaaagtaagca

SEQ ID NO: 219957 - DNA, 120 bp, Artificial Sequence
  ENSG00000117010_12 (sequence is synthesized)
taacttaaaaaatcaaagaaccagtgaaaactacatttgccattcctgacttttaatttttataataaaataattatgcaagtgtgagtttaaaatatatgcttatacattatattaaag

SEQ ID NO: 219958 - DNA, 120 bp, Artificial Sequence
  ENSG00000117010_13 (sequence is synthesized)
tatgcctattaacagtttctgcagtaaataacattttttcttccagtctcaacatacataattaatcaagtgagaaaatgtgttttaatatgtcatatgaatttcagtgatattttcatc

SEQ ID NO: 219959 - DNA, 120 bp, Artificial Sequence
  ENSG00000117010_14 (sequence is synthesized)
catttgctggcacttttaatgggcatgacagtgtttctgaatctgagtctcctttaattatacaagtgaagacttcttattaaaattaatataaagatattttcctatgtatgtaaatac

SEQ ID NO: 219960 - DNA, 120 bp, Artificial Sequence
  ENSG00000117010_15 (sequence is synthesized)
cagaacaaaaaacaagacactaattgaggagagaaaggcacttgtattctgtattacagtaagtattcagttgaggaaaagaattatttaaatatgtaaataaataatttgcacttcaaa

SEQ ID NO: 219961 - DNA, 120 bp, Artificial Sequence
  ENSG00000117010_16 (sequence is synthesized)
gacgacgctgtgactgatcccaggcttggagccggagctgcgagcgaggcagtgaaagggtggcagatttctgtgtaagagctgcagaaaatgatcagcttccagaatctgactacccac

SEQ ID NO: 219962 - DNA, 83 bp, Artificial Sequence
  ENSG00000117010_17 (sequence is synthesized)
ctcaaggtagagcaaggacaagagccatggatggtggagggagcgaatccacacgagagcggttcaagtgattctcctacctc

SEQ ID NO: 219963 - DNA, 120 bp, Artificial Sequence
  ENSG00000117010_18 (sequence is synthesized)
aacgagtatgaaacatttcttcaatgcacattaacattgcagttttgttctaattaactgtcaaaatgacagacagcagcagtgactatcttagaaattcatagaaaatggagcttaaag

SEQ ID NO: 219964 - DNA, 120 bp, Artificial Sequence
  ENSG00000117010_19 (sequence is synthesized)
tttaaagtatgcaaaatttggagaagtcttttttttgaggtcatggaacagtggttcctccctaaagagtatctaagttctagataggacgagaggagataagggggggtgcaaatgaag

SEQ ID NO: 219965 - DNA, 120 bp, Artificial Sequence
  ENSG00000117010_20 (sequence is synthesized)
gtggacaacgaacatgagcaaaagattgaatttaggaatctagaatccatggagtagaaggtatttgttgaggactagtgaaatgcatgcttcccatgagtgaattcatatcttgcataa

SEQ ID NO: 219966 - DNA, 120 bp, Artificial Sequence
  ENSG00000117010_21 (sequence is synthesized)
caggcgtgagccaccgcgcccagcctgggtctgttctgttttaaaggctgcttgttatcctttaaaaatcctgagactcaaggaggtaacccaagttgtgagctggttgtttgcctagca

SEQ ID NO: 219967 - DNA, 120 bp, Artificial Sequence
  ENSG00000117013_0 (sequence is synthesized)
gacatgtgagcggcgcgcgccggtggcaggtggaaaggcgagcggcatggagcgcgtaataagagagttggagtcggaaagagcagccccagtcgccggggaagcgggaggtcagtgcgg

SEQ ID NO: 219968 - DNA, 80 bp, Artificial Sequence
  ENSG00000117013_1 (sequence is synthesized)
cgcgcggagctagtggcgctcacggccgtgcagagcgaacagggcgaggcgggcgggggcggctccccgcgccgcctcgg

SEQ ID NO: 219969 - DNA, 120 bp, Artificial Sequence
  ENSG00000117013_2 (sequence is synthesized)
ccctgggccgggctccggctcgggctccgcctgcggccagcgctcctcggccgcgcacaagcgctaccgccgcctgcagaactgggtctacaacgtgctggagcggccccgcggctgggc

SEQ ID NO: 219970 - DNA, 120 bp, Artificial Sequence
  ENSG00000117013_3 (sequence is synthesized)
cttcgtctaccacgtcttcatatttttgctggtcttcagctgcctggtgctgtctgtgctgtccactatccaggagcaccaggaacttgccaacgagtgtctcctcatcttggaattcgt

SEQ ID NO: 219971 - DNA, 120 bp, Artificial Sequence
  ENSG00000117013_4 (sequence is synthesized)
gatgatcgtggttttcggcttggagtacatcgtccgggtctggtccgccggatgctgctgccgctaccgaggatggcagggtcgcttccgctttgccagaaagcccttctgtgtcatcga

SEQ ID NO: 219972 - DNA, 120 bp, Artificial Sequence
  ENSG00000117013_5 (sequence is synthesized)
cttcatcgtgttcgtggcctcggtggccgtcatcgccgcgggtacccagggcaacatcttcgccacgtccgcgctgcgcagcatgcgcttcctgcagatcctgcgcatggtgcgcatgga

SEQ ID NO: 219973 - DNA, 120 bp, Artificial Sequence
  ENSG00000117013_6 (sequence is synthesized)
ccgccgcggcggcacctggaagctgctgggctcagtggtctacgcgcatagcaaggagctgatcaccgcctggtacatcgggttcctggtgctcatcttcgcctccttcctggtctacct

SEQ ID NO: 219974 - DNA, 120 bp, Artificial Sequence
  ENSG00000117013_7 (sequence is synthesized)
ggctgagaaggacgccaactccgacttctcctcctacgccgactcgctctggtgggggacgattacattgacaaccatcggctatggtgacaagacaccgcacacatggctgggcagggt

SEQ ID NO: 219975 - DNA, 120 bp, Artificial Sequence
  ENSG00000117013_8 (sequence is synthesized)
cctggctgctggcttcgccttactgggcatctctttctttgccctgcctgccggcatcctaggctccggctttgccctgaaggtccaggagcagcaccggcagaagcacttcgagaagcg

SEQ ID NO: 219976 - DNA, 120 bp, Artificial Sequence
  ENSG00000117013_9 (sequence is synthesized)
gaggatgccggcagccaacctcatccaggctgcctggcgcctgtactccaccgatatgagccgggcctacctgacagccacctggtactactatgacagtatcctcccatccttcagaga

SEQ ID NO: 219977 - DNA, 120 bp, Artificial Sequence
  ENSG00000117013_10 (sequence is synthesized)
gctggccctcttgtttgagcacgtgcaacgggcccgcaatgggggcctacggcccctggaggtgcggcgggcgccggtacccgacggagcaccctcccgttacccgcccgttgccacctg

SEQ ID NO: 219978 - DNA, 120 bp, Artificial Sequence
  ENSG00000117013_11 (sequence is synthesized)
ccaccggccgggcagcacctccttctgccctggggaaagcagccggatgggcatcaaagaccgcatccgcatgggcagctcccagcggcggacgggtccttccaagcagcatctggcacc

SEQ ID NO: 219979 - DNA, 120 bp, Artificial Sequence
  ENSG00000117013_12 (sequence is synthesized)
tccaacaatgcccacctccccaagcagcgagcaggtgggtgaggccaccagccccaccaaggtgcaaaagagctggagcttcaatgaccgcacccgcttccgggcatctctgagactcaa

SEQ ID NO: 219980 - DNA, 120 bp, Artificial Sequence
  ENSG00000117013_13 (sequence is synthesized)
accccgcacctctgctgaggatgccccctcagaggaagtagcagaggagaagagctaccagtgtgagctcacggtggacgacatcatgcctgctgtgaagacagtcatccgctccatcag

SEQ ID NO: 219981 - DNA, 120 bp, Artificial Sequence
  ENSG00000117013_14 (sequence is synthesized)
gattctcaagttcctggtggccaaaaggaaattcaaggagacactgcgaccgtacgacgtgaaggacgtcattgagcagtactcagcaggccacctggacatgctgggccggatcaagag

SEQ ID NO: 219982 - DNA, 120 bp, Artificial Sequence
  ENSG00000117013_15 (sequence is synthesized)
cctgcaaactcgggtggaccaaattgtgggtcgggggcccggggacaggaaggcccgggagaagggcgacaaggggccctccgacgcggaggtggtggatgaaatcagcatgatgggacg

SEQ ID NO: 219983 - DNA, 120 bp, Artificial Sequence
  ENSG00000117013_16 (sequence is synthesized)
gtcaaggtggagaagcaggtgcagtccatcgagcacaagctggacctgctgttgggcttctattcgcgctgcctgcgctctggcacctcggccagcctgggcgccgtgcaagtgccgctg

SEQ ID NO: 219984 - DNA, 120 bp, Artificial Sequence
  ENSG00000117013_17 (sequence is synthesized)
ttcgaccccgacatcacctccgactaccacagccctgtggaccacgaggacatctccgtctccgcacagacgctcagcatctcccgctcggtcagcaccaacatggactgagggacttct

SEQ ID NO: 219985 - DNA, 120 bp, Artificial Sequence
  ENSG00000117013_18 (sequence is synthesized)
cagaggcagggcagcacacggccagccccgcggcctggcgctccgactgccctctgaggcctccggactcctctcgtacttgaactcactccctcacggggagagagaccacacgcagta

SEQ ID NO: 219986 - DNA, 120 bp, Artificial Sequence
  ENSG00000117013_19 (sequence is synthesized)
ttgagctgcctgagtgggcgtggtacctgctgtgggtgccagcgccccttccccacctcaggagcgtgagatgccaggtcgcacagagggcagcagcagcggccgtcccgcggcctctgg

SEQ ID NO: 219987 - DNA, 120 bp, Artificial Sequence
  ENSG00000117013_20 (sequence is synthesized)
gccccccagtgccctgcccactccatcaaggccctatgtggcccacctggcaggggcacagccccgggagtgggagcgggcgctggggccctgggccctgacccagcttccagctatgca

SEQ ID NO: 219988 - DNA, 120 bp, Artificial Sequence
  ENSG00000117013_21 (sequence is synthesized)
aggtgaggtctctggcccacccttcggacacagcagggaagccctcccgccaagtccccgccccacttgggggtgggccaaggtgcccccacaggtacccacaaagcacaggaccctgcc

SEQ ID NO: 219989 - DNA, 120 bp, Artificial Sequence
  ENSG00000117013_22 (sequence is synthesized)
acaaggcaggtggacaccatatatgcaaaccatgttaaatatgcaactttggggacccccatggggtctctctgtccctcccccattgggagctgggcccccagcagtagctggtctcag

SEQ ID NO: 219990 - DNA, 120 bp, Artificial Sequence
  ENSG00000117013_23 (sequence is synthesized)
gctgcttggccaccaccctgtccctattctttggcttatcactccttcccctcccagcatggggcctgtttctcccctgccctctcctaagggcaatgcctgggcctttcttcccatttg

SEQ ID NO: 219991 - DNA, 120 bp, Artificial Sequence
  ENSG00000117013_24 (sequence is synthesized)
caagtgtcagctcccaggggctccctcctcctgctgggtggccactcccctccttggccctccagacaccactcatagtcagcacaggtttctgtatcctccccaaaactcccagacagt

SEQ ID NO: 219992 - DNA, 120 bp, Artificial Sequence
  ENSG00000117013_25 (sequence is synthesized)
gcttcgtggacgatcgcacaaacatagccttttagtttctccagacaggaagaaagcctctcacacttaaacatgcaatgacgtgacacacttggagacatgagtgcagagccactcagc

SEQ ID NO: 219993 - DNA, 120 bp, Artificial Sequence
  ENSG00000117013_26 (sequence is synthesized)
cgctcctgggcctctgcagcagatgccagtggactggccttgcagggtgacgaccactaagaggaagacccccaactccatctgagcaggagaaggagctttgaagtaacccgagagctc

SEQ ID NO: 219994 - DNA, 120 bp, Artificial Sequence
  ENSG00000117013_27 (sequence is synthesized)
tccaggccccacccagacctttacccgctccccttcttcaagaagatctcctcctctctggtccaggagccctaacccactgcctctgcctgtccccaagggcccgcctccgtgtctcca

SEQ ID NO: 219995 - DNA, 120 bp, Artificial Sequence
  ENSG00000117013_28 (sequence is synthesized)
cagcacaactcgggcccaggcctgacaccactggagagaccccaggcccacttctagccaggcctgtgccttcctagtcactctaactcccagagagaataagaatgcatgtaatagcta

SEQ ID NO: 219996 - DNA, 120 bp, Artificial Sequence
  ENSG00000117013_29 (sequence is synthesized)
taccaaccgcgcatccggctttcacatgcactgtctcccctccctccacaccccacttcttcacttcaattggcagcgccacatccaggcgtcagcccccattcactccaggaacacttt

SEQ ID NO: 219997 - DNA, 120 bp, Artificial Sequence
  ENSG00000117013_30 (sequence is synthesized)
cttatccccacccctttgctcctcttctgcaaagccaatgcaggtggcaggaaggtgaggggtagtggaccaatggcaaccctctgtgggaacaaggggccgaggccacgctgcctgcat

SEQ ID NO: 219998 - DNA, 120 bp, Artificial Sequence
  ENSG00000117013_31 (sequence is synthesized)
ctcgtgctggggacctgcatgcgccagcaccagggcttggactggatcttactcagtccatggtgcccagcctctgccccaacatgccctctgcatgtgaccgtcatgccctggatggag

SEQ ID NO: 219999 - DNA, 120 bp, Artificial Sequence
  ENSG00000117013_32 (sequence is synthesized)
ccactcctggctcaccccacctgcactgcactgtccccagagagccacccctccacccactcagagacagctgtggagagggccaggagaatgggattaccctatgaccaaggagacatg

SEQ ID NO: 220000 - DNA, 120 bp, Artificial Sequence
  ENSG00000117013_33 (sequence is synthesized)
ggaagaagccctccttccttccacgatcgaggttccgccatcaactcggttctcggatatgcaagtacctcactttgttaacttattaacttattggtttcattaaagttttcaagagga

SEQ ID NO: 220001 - DNA, 120 bp, Artificial Sequence
  ENSG00000117016_0 (sequence is synthesized)
gcctcggcctgtggaggccccctccctgtctggaccccggccccacctccggaagtcaattgaagccttgtgcaaatgccctaggggtgtgctgttgggaggcagccccctgtgatgcgg

SEQ ID NO: 220002 - DNA, 120 bp, Artificial Sequence
  ENSG00000117016_1 (sequence is synthesized)
aacaccaggctcagattcatcagttcgagctgcctgaggccctgccaccccggggaccatgtttaacggggagccaggtcctgcctcatctggggcctccaggaatgtggtgcggagctc

SEQ ID NO: 220003 - DNA, 120 bp, Artificial Sequence
  ENSG00000117016_2 (sequence is synthesized)
cagcattagcggtgaaatctgcggatcccagcaagccgggggcggggctgggaccaccaccgccaagaagcggcggagcagcctgggtgccaagatggtggccatcgtgggcctgactca

SEQ ID NO: 220004 - DNA, 120 bp, Artificial Sequence
  ENSG00000117016_3 (sequence is synthesized)
gtggagcaagagcacactccagcttccgcagcctgaaggggccaccaagaagctgcgcagcaacatccgccggagcacggagacaggcatcgcggtggagatgcggagccgggtcacacg

SEQ ID NO: 220005 - DNA, 120 bp, Artificial Sequence
  ENSG00000117016_4 (sequence is synthesized)
ccagggcagccgggagtccaccgatgggagcaccaacagcaacagctccgacggcacgttcatcttccccactacccggctaggggctgaaagccagttcagcgatttcctggatgggct

SEQ ID NO: 220006 - DNA, 120 bp, Artificial Sequence
  ENSG00000117016_5 (sequence is synthesized)
ctggaggtggaagtgattgaagctcggggcctgacccccaaaccaggctccaaatccctcccagccacctatatcaaggtttacctgctggagaatggggcctgcttggccaagaagaag

SEQ ID NO: 220007 - DNA, 120 bp, Artificial Sequence
  ENSG00000117016_6 (sequence is synthesized)
acaaagatgaccaagaagacctgtgatcccctgtaccagcaggctctgctctttgacgagggaccccagggcaaggtgctgcaggtgatcgtctggggagactatggccgcatggaccac

SEQ ID NO: 220008 - DNA, 120 bp, Artificial Sequence
  ENSG00000117016_7 (sequence is synthesized)
aagtgcttcatgggcatggcccagatcatgctggacgagctggacctcagcgccgcggtcaccggctggtacaaactcttccccacctcctcagtggcagactccacactcggatccctc

SEQ ID NO: 220009 - DNA, 120 bp, Artificial Sequence
  ENSG00000117016_8 (sequence is synthesized)
accaggcgcctgtcccagtcttccctggagagtgccaccagcccctcatgctcttaaggatgtcaggaagaggccaggatggtggtgtggggaggggtgcctgctggccccatgtcctcc

SEQ ID NO: 220010 - DNA, 120 bp, Artificial Sequence
  ENSG00000117016_9 (sequence is synthesized)
cctgtacatagtcttcgtgtctttctggaccccttgtcctgctgcatgcctgttggctactgggctcatcccagctggcagtggagactgtagtgtgtgcgtgtgtgcgtgcgtgtgtgt

SEQ ID NO: 220011 - DNA, 120 bp, Artificial Sequence
  ENSG00000117016_10 (sequence is synthesized)
gtgtgtgtacgtgaccacgttctatctgttcatttgtctgggtatagtcactcctggtgatgatatgggctgaaatgtctccacgtctctttgtgtcttgttgaaaagaaacccaaagga

SEQ ID NO: 220012 - DNA, 80 bp, Artificial Sequence
  ENSG00000117016_11 (sequence is synthesized)
gctttgcacccggcggcgactgaaaacggtggctgctgcggagccggcagcgcaggcgggcggagcggagctgcccccgt

SEQ ID NO: 220013 - DNA, 80 bp, Artificial Sequence
  ENSG00000117016_12 (sequence is synthesized)
tccccgccccgcgtgcctatccactcggagtccgcgccagcctggggccgggccgcgcctactgccgggttcgcggggcg

SEQ ID NO: 220014 - DNA, 120 bp, Artificial Sequence
  ENSG00000117016_13 (sequence is synthesized)
tcggcctgtggaggccccctccctgtctggaccccggccccacctccggacccttttatcacatcgcctcctctgggagcctgccctgattgccttcacctcatttcttgaaaattggtg

SEQ ID NO: 220015 - DNA, 120 bp, Artificial Sequence
  ENSG00000117016_14 (sequence is synthesized)
cctggtcctggcctggggcagagcctgtgtgttcttcacctgtgcctgctcctggtggtctctgctttgttttctgtcttgtcttttgttccactcttgactctcccggctctgccactg

SEQ ID NO: 220016 - DNA, 120 bp, Artificial Sequence
  ENSG00000117016_15 (sequence is synthesized)
ttttctgagaaatgtagcatccgctgcagctggccacactgagggccctctgggaaccccaccccactggagccgctccggcagctcttcctgccactgaatgcgttctgcagcatgtag

SEQ ID NO: 220017 - DNA, 120 bp, Artificial Sequence
  ENSG00000117016_16 (sequence is synthesized)
catgcccacctagctccctggccagggccctggggaggcagagggtacccaggggactgagggcttagaaatgactttctctatgaggctggaacctcctccttcttccagtgaagcacg

SEQ ID NO: 220018 - DNA, 120 bp, Artificial Sequence
  ENSG00000117016_17 (sequence is synthesized)
aggtcttggttccagggttcctggccaggtgcccccttagcatttgttcttcatctcctgtctcttcaagcctccccactccaccgtgccgaaggagctctgccagtgggcctgggcagg

SEQ ID NO: 220019 - DNA, 120 bp, Artificial Sequence
  ENSG00000117016_18 (sequence is synthesized)
cagccacagagggcatgttatctgctaaagcaaacagtcctcctgaggccctgagggtggccctgaccccctcagggctcattcctggtgggcatgactcggtaaggaggttctgtgggt

SEQ ID NO: 220020 - DNA, 120 bp, Artificial Sequence
  ENSG00000117016_19 (sequence is synthesized)
agggctgtttgctggaataaggagggctgaggctgagttgttccccgccactgttgaggatcccatctgacatttggggattcactgcatgaagttgttcatttggggctccagtttttg

SEQ ID NO: 220021 - DNA, 120 bp, Artificial Sequence
  ENSG00000117016_20 (sequence is synthesized)
tgcatttccagaccagggtccctgtctgggagctcagacttagctgggctccagcagcctggctccggactctcgtctgccaccatcaccagctctgtctaagcaatacttacccctccg

SEQ ID NO: 220022 - DNA, 120 bp, Artificial Sequence
  ENSG00000117016_21 (sequence is synthesized)
ggcttccctgctttcctgtgccccactgctgccctctgcagagccatctgctccaggcacccacctgcctctgcttgctttctcacccatgtctggttggagcttctcacagccactcaa

SEQ ID NO: 220023 - DNA, 120 bp, Artificial Sequence
  ENSG00000117016_22 (sequence is synthesized)
accctgacttgatttgacaactgggccctgttggtggagaccagtgcctgaactggaccctgtgaaatctgtcccgtgggaatcctgaagtctgactcaggaatgcccagacctgtccct

SEQ ID NO: 220024 - DNA, 120 bp, Artificial Sequence
  ENSG00000117016_23 (sequence is synthesized)
gtccctcctcagctctagggtgaaaggcgagaggttgcacaggacatggacagagcagcccttgggtttgtatctggtaggggagaaagcagcaggacagtggaggtgtgtggaaggcac

SEQ ID NO: 220025 - DNA, 120 bp, Artificial Sequence
  ENSG00000117016_24 (sequence is synthesized)
tctttccacctctctccaggcattatccccaggtgctgaaatggctgtggccccagcacctgaggcaggggtacgctacctggggtagcagtagaaaggtcttggggtctgaatgacttg

SEQ ID NO: 220026 - DNA, 120 bp, Artificial Sequence
  ENSG00000117016_25 (sequence is synthesized)
gggcctccattcataaccaaagttgtaggggcatggaggcagtggcgccttatggataggtcatctcagcccaaagggcctccttggctggcatggttctgtgttacgttgaagccagag

SEQ ID NO: 220027 - DNA, 120 bp, Artificial Sequence
  ENSG00000117016_26 (sequence is synthesized)
tcttataacacctcccaagaaagataggggaagaagccagaaccccacctggcctgcccacaggacaagaagtgggtaagggcaggaaggaaatgaacggagttagctcccaggctccta

SEQ ID NO: 220028 - DNA, 120 bp, Artificial Sequence
  ENSG00000117016_27 (sequence is synthesized)
tctctgcctgagcctctattcttatattatcagagaaagggaccattgggtgcatagagatggggaggaggccactgggctgaattttctctttaggcggaaatgctctccccaggccca

SEQ ID NO: 220029 - DNA, 120 bp, Artificial Sequence
  ENSG00000117016_28 (sequence is synthesized)
ttgcgttcgtcaagttcttggaaatggacaaagggctctgtcctcctcgaccctagtgggggatcaagaaggaaactccgttgcaaaagggtattttaatctcctgtttatgatatattc

SEQ ID NO: 220030 - DNA, 120 bp, Artificial Sequence
  ENSG00000117016_29 (sequence is synthesized)
gggttgttagtgacccacaggacagtatagatgtttgtggatgtagcactgagtggtgatacccagaccagcagtcaccccaggaagtgggggctacccataccctcattcctctggtgg

SEQ ID NO: 220031 - DNA, 120 bp, Artificial Sequence
  ENSG00000117016_30 (sequence is synthesized)
ggagctgcctgcagagaggcctgccactgggggttccaggccgtggtgacccttgcctctggggaagggttagcacaggggaggttctagctggaggaggggtctgatgtgctggtaact

SEQ ID NO: 220032 - DNA, 120 bp, Artificial Sequence
  ENSG00000117016_31 (sequence is synthesized)
tgggctgacctacctacagtccctggctgccaaaactgctcagcagttgggccactccactattccacctctctaaaagaaggtaatttcctccccaaattgaccttggggaattattct

SEQ ID NO: 220033 - DNA, 120 bp, Artificial Sequence
  ENSG00000117016_32 (sequence is synthesized)
tttaaccctttgcaccaaataagttactcatccccacctggattttaccccatgagggtaaagttgtgtgaggctgacacgtctgtgtgatgcagtgtggctgcacttaagggtctgttt

SEQ ID NO: 220034 - DNA, 120 bp, Artificial Sequence
  ENSG00000117016_33 (sequence is synthesized)
ctcagcatcatggatgcaggggcttgtctgaaaagccactctggacctagcctgtcccagaagaggagaatgcacaagtgtaactcctggttgtttgctggggtgggggagcatctgctg

SEQ ID NO: 220035 - DNA, 120 bp, Artificial Sequence
  ENSG00000117016_34 (sequence is synthesized)
tttgaggacggggggtggggaaggaaggaacatgatccctccagaagtctcccaccctggggccaactcactgccatgttcagtgtcccggctccaaatgcccccttgcccagatgaaac

SEQ ID NO: 220036 - DNA, 120 bp, Artificial Sequence
  ENSG00000117016_35 (sequence is synthesized)
cctgcagtggttacaggaatggagctctttgtcattccacctcctctggtcaggcgaggttcactgtgcatatggcagagacaggagtggccctgcagtgatgttgggttgtgggcaggg

SEQ ID NO: 220037 - DNA, 120 bp, Artificial Sequence
  ENSG00000117016_36 (sequence is synthesized)
acagtgatggatgactcagagcgtctgtctttgtatttctgctctgttcattctgtcccactttcttcatagactccttttccctgcaatgggtttttggtatgaaaaaggctccagtaa

SEQ ID NO: 220038 - DNA, 120 bp, Artificial Sequence
  ENSG00000117016_37 (sequence is synthesized)
atggagccaagtcttggtttgacaaggggaacttgatccttcagggaagaatcatctccaaaatgactccccatctggtttcttctaccacccaattctactaggaaaggagcacttagg

SEQ ID NO: 220039 - DNA, 120 bp, Artificial Sequence
  ENSG00000117016_38 (sequence is synthesized)
aggctcttgggatgcagcaagtcccaggcaatgccagcatttcatgggggctgaggcagaacccaggagctccaagaaaggccacccatagagctcatcctctgtggaatcactgccggt

SEQ ID NO: 220040 - DNA, 120 bp, Artificial Sequence
  ENSG00000117016_39 (sequence is synthesized)
tagaacactgaggtcaagccagtcctcccatggtcatgccacccaccagggaagcatgcctgatctcttctttactgccagccttgaggagagcagaagcctccatttttaaagacaata

SEQ ID NO: 220041 - DNA, 120 bp, Artificial Sequence
  ENSG00000117016_40 (sequence is synthesized)
aagacctccaagggtacttctttggaaatgaaatgtagcacaatcttagcctacgttaccaggagccctgacatgcaaccagggtccctcttccatgccctgctgcccaggagttgctga

SEQ ID NO: 220042 - DNA, 120 bp, Artificial Sequence
  ENSG00000117016_41 (sequence is synthesized)
gctcctcttcccctggggttccagccctcctaatacctcatattccccatcttcctcagcccagaaagcaatggggctttagtgatgctcctcttttgtgtctctctggttgcctctagc

SEQ ID NO: 220043 - DNA, 120 bp, Artificial Sequence
  ENSG00000117016_42 (sequence is synthesized)
actgtgcaaactctgcaagaaattgctgcctttgcttgatgttgtagatgagttgccctccacctggctggagagatggcacatcattcagggccagaaggttgtccagcagtgtttctg

SEQ ID NO: 220044 - DNA, 120 bp, Artificial Sequence
  ENSG00000117016_43 (sequence is synthesized)
cagtggctgcagggagatggaaaagaagagccctgcttccctgcctcctcctacctttctcttccactcctcagagttttcttctccagtatcctgacatgtaaagagattctttaaaat

SEQ ID NO: 220045 - DNA, 120 bp, Artificial Sequence
  ENSG00000117016_44 (sequence is synthesized)
gctgcttcttctactggactgtctttcactgagtagtcagggaggagatgaaaatgtggacacatccccccgccttctccctcaaccttttcactcacgtcagaagaggttggggcaaaa

SEQ ID NO: 220046 - DNA, 120 bp, Artificial Sequence
  ENSG00000117016_45 (sequence is synthesized)
caaaacaagcatgattgaagagcaggggaagcccacacaatcaggtgagccctgatgggggctggactggcctggtctggctgggaaaggattcttttaaaagcgtgcctgagcatctca

SEQ ID NO: 220047 - DNA, 120 bp, Artificial Sequence
  ENSG00000117016_46 (sequence is synthesized)
gagcaatgtcagtgatgccaaagagagcaacttggcctccttgggcaccaactctgatggctgagttgcacaaacgtggctcagatgttggcatgcccgatggtgggaccttgttctctg

SEQ ID NO: 220048 - DNA, 120 bp, Artificial Sequence
  ENSG00000117016_47 (sequence is synthesized)
ataaagggcttaatctttccatgtagcaaagcaactttccctccctcccctccccccgaaccctgagcttgggcttgtgtgggcccagcatggctgtgcctgtgagggaagccacatcag

SEQ ID NO: 220049 - DNA, 120 bp, Artificial Sequence
  ENSG00000117016_48 (sequence is synthesized)
tgagagaaagttgcattctctcaggggcctagattggcttggggcaggtgcttgttgaaaagcatgagtgtttctgctttgggaaacccttccagggctctggttggaaacttggccagt

SEQ ID NO: 220050 - DNA, 120 bp, Artificial Sequence
  ENSG00000117016_49 (sequence is synthesized)
aaggacagggccttgggcctcccaaggagttcacaatgatgccaggaagggtccctgagcctgggttccagtcagcttggctaacagaatggggcttgggaattccaggggcaactgagc

SEQ ID NO: 220051 - DNA, 120 bp, Artificial Sequence
  ENSG00000117016_50 (sequence is synthesized)
atccaccccattagccagtgatctggacagggacagctggctacagggaatcaaaggctgttctgtacagttttaccagaaactgtgaccttgggtaaggctcctcacttttctgggcct

SEQ ID NO: 220052 - DNA, 120 bp, Artificial Sequence
  ENSG00000117016_51 (sequence is synthesized)
caacttcctcatctgcaaaatcagagcattagctgctctccccatgattccctcccagttttaattaaaagtctctgatctggagcacatgagggttgcgagcctggtgcacctggttcc

SEQ ID NO: 220053 - DNA, 120 bp, Artificial Sequence
  ENSG00000117016_52 (sequence is synthesized)
tgtctccgtgggctggtttccttcagcccctgatgcccaggctgggtgcaggctctcatctggtccatgcccagatgctgcctcagacaagaactctgggaatcctaacagactctgctt

SEQ ID NO: 220054 - DNA, 120 bp, Artificial Sequence
  ENSG00000117016_53 (sequence is synthesized)
tcctctcttcgtggtttgtcctccctcttttattcttgtgtaatgatgagacataattaagggtcatctacaatggacaattttcaaggtgctgatgtgatgtcacaacctccgctacat

SEQ ID NO: 220055 - DNA, 120 bp, Artificial Sequence
  ENSG00000117016_54 (sequence is synthesized)
cctgagtaagtcagtgtccccaacagcagatgaggctgggtctttcctcatttctgcttctgggatgacatcagtgggagagttgaagatctgagaattctaaaggaaatgttctctgat

SEQ ID NO: 220056 - DNA, 120 bp, Artificial Sequence
  ENSG00000117016_55 (sequence is synthesized)
gggaggagagagggaacttatttcccttcaaagtagtttgcttcttaagaccactcctccctccagaatgtctttaaccagacatcatttcagaaggtggggcagctgcttccttaggaa

SEQ ID NO: 220057 - DNA, 120 bp, Artificial Sequence
  ENSG00000117016_56 (sequence is synthesized)
gagtgggcctgatagctcaaccaactcctttagcatgtaaactcacagaaggcaagaacccctttttttagactttccaaatgcatcctgcaaagagagagatagctgatagggactgac

SEQ ID NO: 220058 - DNA, 120 bp, Artificial Sequence
  ENSG00000117016_57 (sequence is synthesized)
aagcacactgtttagataagaagcaattagccttttatatctgtgctctatacattttctatgtgcagcatctttcctaacttgttgtggttcccgggtggcaggtgcacagctgggagg

SEQ ID NO: 220059 - DNA, 120 bp, Artificial Sequence
  ENSG00000117016_58 (sequence is synthesized)
gactgccggctgtttcgtacaacattcttgccaattcccttgaggagaaaattcttcacatggcttctgcatgtacagtatttgggcagcaaaacatgattaaagtcagtttgaaaatgg

SEQ ID NO: 220060 - DNA, 120 bp, Artificial Sequence
  ENSG00000117020_0 (sequence is synthesized)
gctgagtcatcactagagagtgggaagggcagcagcagcagagaatccaaaccctaaagctgatatcacaaagtaccatttctccaagttgggggctcagaggggagtcatcatgagcga

SEQ ID NO: 220061 - DNA, 120 bp, Artificial Sequence
  ENSG00000117020_1 (sequence is synthesized)
tgttaccattgtgaaagaaggttgggttcagaagaggggagaatatataaaaaactggaggccaagatacttccttttgaagacagatggctcattcataggatataaagagaaacctca

SEQ ID NO: 220062 - DNA, 120 bp, Artificial Sequence
  ENSG00000117020_2 (sequence is synthesized)
agatgtggatttaccttatcccctcaacaacttttcagtggcaaaatgccagttaatgaaaacagaacgaccaaagccaaacacatttataatcagatgtctccagtggactactgttat

SEQ ID NO: 220063 - DNA, 120 bp, Artificial Sequence
  ENSG00000117020_3 (sequence is synthesized)
agagagaacatttcatgtagatactccagaggaaagggaagaatggacagaagctatccaggctgtagcagacagactgcagaggcaagaagaggagagaatgaattgtagtccaacttc

SEQ ID NO: 220064 - DNA, 120 bp, Artificial Sequence
  ENSG00000117020_4 (sequence is synthesized)
acaaattgataatataggagaggaagagatggatgcctctacaacccatcataaaagaaagacaatgaatgattttgactatttgaaactactaggtaaaggcacttttgggaaagttat

SEQ ID NO: 220065 - DNA, 120 bp, Artificial Sequence
  ENSG00000117020_5 (sequence is synthesized)
tttggttcgagagaaggcaagtggaaaatactatgctatgaagattctgaagaaagaagtcattattgcaaaggatgaagtggcacacactctaactgaaagcagagtattaaagaacac

SEQ ID NO: 220066 - DNA, 120 bp, Artificial Sequence
  ENSG00000117020_6 (sequence is synthesized)
tagacatccctttttaacatccttgaaatattccttccagacaaaagaccgtttgtgttttgtgatggaatatgttaatgggggcgagctgtttttccatttgtcgagagagcgggtgtt

SEQ ID NO: 220067 - DNA, 120 bp, Artificial Sequence
  ENSG00000117020_7 (sequence is synthesized)
ctctgaggaccgcacacgtttctatggtgcagaaattgtctctgccttggactatctacattccggaaagattgtgtaccgtgatctcaagttggagaatctaatgctggacaaagatgg

SEQ ID NO: 220068 - DNA, 120 bp, Artificial Sequence
  ENSG00000117020_8 (sequence is synthesized)
ccacataaaaattacagattttggactttgcaaagaagggatcacagatgcagccaccatgaagacattctgtggcactccagaatatctggcaccagaggtgttagaagataatgacta

SEQ ID NO: 220069 - DNA, 120 bp, Artificial Sequence
  ENSG00000117020_9 (sequence is synthesized)
tggccgagcagtagactggtggggcctaggggttgtcatgtatgaaatgatgtgtgggaggttacctttctacaaccaggaccatgagaaactttttgaattaatattaatggaagacat

SEQ ID NO: 220070 - DNA, 120 bp, Artificial Sequence
  ENSG00000117020_10 (sequence is synthesized)
taaatttcctcgaacactctcttcagatgcaaaatcattgctttcagggctcttgataaaggatccaaataaacgccttggtggaggaccagatgatgcaaaagaaattatgagacacag

SEQ ID NO: 220071 - DNA, 120 bp, Artificial Sequence
  ENSG00000117020_11 (sequence is synthesized)
tttcttctctggagtaaactggcaagatgtatatgataaaaagcttgtacctccttttaaacctcaagtaacatctgagacagatactagatattttgatgaagaatttacagctcagac

SEQ ID NO: 220072 - DNA, 120 bp, Artificial Sequence
  ENSG00000117020_12 (sequence is synthesized)
tattacaataacaccacctgaaaaatatgatgaggatggtatggactgcatggacaatgagaggcggccgcatttccctcaattttcctactctgcaagtggacgagaataagtctcttt

SEQ ID NO: 220073 - DNA, 120 bp, Artificial Sequence
  ENSG00000117020_13 (sequence is synthesized)
cattctgctacttcactgtcatcttcaatttattactgaaaatgattcctggacatcaccagtcctagctcttacacatagcaggggcaccttccgacatcccagaccagccaagggtcc

SEQ ID NO: 220074 - DNA, 120 bp, Artificial Sequence
  ENSG00000117020_14 (sequence is synthesized)
tcacccctcgccacctttcaccctcatgaaaacacacatacacgcaaatacactccagtttttgtttttgcatgaaattgtatctcagtctaaggtctcatgctgttgctgctactgtct

SEQ ID NO: 220075 - DNA, 120 bp, Artificial Sequence
  ENSG00000117020_15 (sequence is synthesized)
tactattatagcaactttaagaagtaattttccaacctttggaagtcatgagcccaccattgttcatttgtgcaccaattatcatcttttgatcttttagtttttccctcagtgaaggct

SEQ ID NO: 220076 - DNA, 120 bp, Artificial Sequence
  ENSG00000117020_16 (sequence is synthesized)
aaatgagatacactgattctaggtacattttttaactttctagaagagaaaaactaactagactaagaagatttagtttataaattcagaacaagcaattgtggaagggtggtggcgtgc

SEQ ID NO: 220077 - DNA, 120 bp, Artificial Sequence
  ENSG00000117020_17 (sequence is synthesized)
atatgtaaagcacatcagatccgtgcgtgaagtaggcatatatcactaagctgtggctggaattgattaggaagcatttggtagaaggactgaacaactgttgggatatatatatatata

SEQ ID NO: 220078 - DNA, 120 bp, Artificial Sequence
  ENSG00000117020_18 (sequence is synthesized)
tataattttttttttttaaattcctggtggatactgtagaagaagcccatatcacatgtggatgtcgagacttcacgggcaatcatgagcaagtgaacactgttctaccaagaactgaag

SEQ ID NO: 220079 - DNA, 120 bp, Artificial Sequence
  ENSG00000117020_19 (sequence is synthesized)
gcatatgcacagtcaaggtcacttaaagggtcttatgaaacaatttgagccagagagcatctttcccctgtgcttggaaaccttttttccttcttgacatttatcacctctgatggctga

SEQ ID NO: 220080 - DNA, 120 bp, Artificial Sequence
  ENSG00000117020_20 (sequence is synthesized)
agaatgtagacaggtataatgatactgcttttcaccaaaatttctacaccaaggtaaacaggtgtttgccttatttaattttttactttcagttctacgtgaattagctttttctcagat

SEQ ID NO: 220081 - DNA, 120 bp, Artificial Sequence
  ENSG00000117020_21 (sequence is synthesized)
gttgaaactttgaatgtccttttatgattttgtttatattgcagtagtatttattttttagtgatgagaattgtatgtcatgttagcaaacgcagctccaacttatataaaatagactta

SEQ ID NO: 220082 - DNA, 120 bp, Artificial Sequence
  ENSG00000117020_22 (sequence is synthesized)
ctgcagttacttttgacccatgtgcaaggattgtacacgctgatgagaatcatgcactttttctcctctgttaaaaaaaatgataaggctctgaaatggaatatattggttagaatttgg

SEQ ID NO: 220083 - DNA, 120 bp, Artificial Sequence
  ENSG00000117020_23 (sequence is synthesized)
ctttgggagaagagatgctgccatttaaccccttggtactgaaaatgagaaaatccccaactatgcatgccaaggggttaatgaaacaaatagctgttgacgtttgctcatttaagaatt

SEQ ID NO: 220084 - DNA, 120 bp, Artificial Sequence
  ENSG00000117020_24 (sequence is synthesized)
tgaaacgttatgatgacctggcaacaaaaagtaatgaagaaaattgagacctgagtgaagataagaaatgatctttacgtggcaaaatgaacacatcttgagtatttaggaaatgggcag

SEQ ID NO: 220085 - DNA, 120 bp, Artificial Sequence
  ENSG00000117020_25 (sequence is synthesized)
tgaaggctaagaacctggtgtgtttcttgggatcatggtacatttatcactgaattaagccatcagggaaaaaacaacaaaaaaagagaacacctccagcttttctttttctgtatatac

SEQ ID NO: 220086 - DNA, 120 bp, Artificial Sequence
  ENSG00000117020_26 (sequence is synthesized)
tcatgtcccccagattccaacatttctcactgaaagggggcatgtatgcaaacctcatctttctccttcattaatgatgatcttcagattaaaccctttggtgctaggagctgacaattt

SEQ ID NO: 220087 - DNA, 120 bp, Artificial Sequence
  ENSG00000117020_27 (sequence is synthesized)
ccaaagcagcctgtgaagtcctaggggctgggggccactcttgcggcaagcagaaggccatcctactccgcggagtgatcatggaaatgtattttagttaaactctgacagctcccaaac

SEQ ID NO: 220088 - DNA, 120 bp, Artificial Sequence
  ENSG00000117020_28 (sequence is synthesized)
ggaagactacagcatgacgtagtattatgattgcattgtatgaaagagcaagtgactttctaagtaggatgaatcatattcatatgcagatgtcttagcctcttgacgctggaagtgtgg

SEQ ID NO: 220089 - DNA, 120 bp, Artificial Sequence
  ENSG00000117020_29 (sequence is synthesized)
tttatagctatgaaaccactgctggcagtgggtgggccactgggactgacgggggttaaagggcattttactaaggcagctaagacatattcagacatcaacgttatccttctttttcat

SEQ ID NO: 220090 - DNA, 120 bp, Artificial Sequence
  ENSG00000117020_30 (sequence is synthesized)
atttctacctgagtgaagttcatccttagtattgagtaggaagttacagtaaatggtagttcattcttacttacacacatagctaatcttttttttttcacttggaattatgttgaatgt

SEQ ID NO: 220091 - DNA, 120 bp, Artificial Sequence
  ENSG00000117020_31 (sequence is synthesized)
ttcattttgacaaaaaagtagactagaaggtatgttctttaagttgtcttgcatccattatataagaaagaaacaggtgagaggaagagcagaaagctgagactggctgatgttcagagc

SEQ ID NO: 220092 - DNA, 120 bp, Artificial Sequence
  ENSG00000117020_32 (sequence is synthesized)
acttactcctctagagggaaagcatgacaccgaacactaagcacacagctttttgttgttttggttttttctcccgcaaatcttaaagtgattcccatgaccttggccaaggacacttct

SEQ ID NO: 220093 - DNA, 120 bp, Artificial Sequence
  ENSG00000117020_33 (sequence is synthesized)
taaagattaatgactggcactgacattgccccaggcgggccactcctcacactggctctcagttcccagccatgcctggggctcagtcacttctattccaccctctgagactccattggt

SEQ ID NO: 220094 - DNA, 120 bp, Artificial Sequence
  ENSG00000117020_34 (sequence is synthesized)
gtcacacaaggtgtcttcttggctttgattttgagaatcccctattttcacttccagatctgtcagctgccatggaggaataatagaaaaccagaaatgcgtgtagagggagatttctaa

SEQ ID NO: 220095 - DNA, 120 bp, Artificial Sequence
  ENSG00000117020_35 (sequence is synthesized)
aacttcccttgtgtcgcccatagttgtagttttgggttctggcaggtggaacaccctgaaacctggaatcattctatgagaatacagttcagactttgcagactccagcccatactaact

SEQ ID NO: 220096 - DNA, 120 bp, Artificial Sequence
  ENSG00000117020_36 (sequence is synthesized)
gtcatgaagcttgacttcttgtcataatgcagccatcttggaggaaattggccatttctgcttagatggttggcagggtcgcgctcagctttgctttctacactaattacatagcattat

SEQ ID NO: 220097 - DNA, 120 bp, Artificial Sequence
  ENSG00000117020_37 (sequence is synthesized)
tcaagtattgttttccatttcccatccctgatttccagcttcttaaagctgactgttcttgcaggggccacttgcttctcctagagtacaaaagtaagggccttccttactaactgcagg

SEQ ID NO: 220098 - DNA, 120 bp, Artificial Sequence
  ENSG00000117020_38 (sequence is synthesized)
gtctctctattacacctcaacatacacactttgctgctactgtttgtactgtctacagtagaatttccttatcttgctcctggtagtgcattacaggcaagcatgaaatgtaaagtattt

SEQ ID NO: 220099 - DNA, 120 bp, Artificial Sequence
  ENSG00000117020_39 (sequence is synthesized)
atttaaataaaaagaaaacctctaaattggtaattgaattacctccctgtagctttatagtttgtgacatttcttgaccttgctagttctttcattagatctgcgcaagatctagtcatc

SEQ ID NO: 220100 - DNA, 120 bp, Artificial Sequence
  ENSG00000117020_40 (sequence is synthesized)
tggttaaggattttaagcagatgcaactataaacccaagaaactgtattactattactgttggtcatactaaacctgtctatttcctgaagtatatgacccacaaggatgtggaataact

SEQ ID NO: 220101 - DNA, 120 bp, Artificial Sequence
  ENSG00000117020_41 (sequence is synthesized)
aggagaaactgtttttgtacactgtacatccttagtatttttacacgtatatgatagggatgaacatgattttccttcgtacagacagcttaaataaagcactatgtcaatctgctactt

SEQ ID NO: 220102 - DNA, 120 bp, Artificial Sequence
  ENSG00000117020_42 (sequence is synthesized)
ctctgtttattgttgttggatgtggttctataatccccccaaattaaatcttctttaatgaaaacatgatttttaatagccccagctggtattaacctaccttgtataaaatgtgacagg

SEQ ID NO: 220103 - DNA, 120 bp, Artificial Sequence
  ENSG00000117020_43 (sequence is synthesized)
aaaatatagaaataattccttgtagctcacacacacacacataggggatcatttttacttcagtgaaatggcagtagtgcggttgtgcaaactttgatgaacggctgcttctgaggggaa

SEQ ID NO: 220104 - DNA, 120 bp, Artificial Sequence
  ENSG00000117020_44 (sequence is synthesized)
acgctgacctctcagcactggatttaggatggatgtactgtgaagccagggatgaaggaggtctcagaccctggggacattcagacccgaatcatctatacaacacacggtttggaccca

SEQ ID NO: 220105 - DNA, 120 bp, Artificial Sequence
  ENSG00000117020_45 (sequence is synthesized)
gaatctgaaggaatgtagcttttcattaacgtcttcctgataatgtactgctctgcatatttcctttcttagagtgtatttctaacaacatgtcatggcaaattaacaaacttagacgtg

SEQ ID NO: 220106 - DNA, 120 bp, Artificial Sequence
  ENSG00000117020_46 (sequence is synthesized)
ggtgatgtagatgggtaggatggctggactgcagtctgacttcacgttgaatcattctggatggggcctttttctgattttacctcataaagctactattgtagaaacttggctttgctc

SEQ ID NO: 220107 - DNA, 120 bp, Artificial Sequence
  ENSG00000117020_47 (sequence is synthesized)
ctgtgacgaagccagacagaggaatggcttttgggaccagagtgagtcaagcatgtatgtgtatgtcacacggccaaatttgagggcattctcacatgtgctcttctctcaaaaccactg

SEQ ID NO: 220108 - DNA, 120 bp, Artificial Sequence
  ENSG00000117020_48 (sequence is synthesized)
gggttgacagatccaggaggctaaaaaaaagtgacctctataattctttaaaggtgctatttttagaatattgtataatttattcacagtatatctaaaacagaattaaggacaattaaa

SEQ ID NO: 220109 - DNA, 120 bp, Artificial Sequence
  ENSG00000117020_49 (sequence is synthesized)
atatcttatgtgacagcctttatgtctagcacatttgatgaaataaaaaacttctgaatctgaatagaagttctactgtttcaggcttgaaccttttacatgctcaagagattcaaatgg

SEQ ID NO: 220110 - DNA, 120 bp, Artificial Sequence
  ENSG00000117020_50 (sequence is synthesized)
tctctgtgtgtagatcatgccaccgcctccaaagcctaatccacatcacttctgagaggcaaggctgagcatatggtgacatcagctctgtgttgagatggtgatgaggatgatggctcg

SEQ ID NO: 220111 - DNA, 120 bp, Artificial Sequence
  ENSG00000117020_51 (sequence is synthesized)
ctggccaggcagggcagccgaaggtcagggacctgtcctaactaactgcagccttgcctttagtgtttgtcattctcagatacaacacggtatgtccagtgtccgtttttattactttaa

SEQ ID NO: 220112 - DNA, 120 bp, Artificial Sequence
  ENSG00000117020_52 (sequence is synthesized)
agcatttgagggcttaattgtgtatagtagaaatactattttagacaaataattatctgtgtacagatatttgatatactctaagtaaattttctaatttcactaagtacgtttttaggc

SEQ ID NO: 220113 - DNA, 120 bp, Artificial Sequence
  ENSG00000117020_53 (sequence is synthesized)
tcctctcaaatactgcgtattgaagaaaaaaatctgacaccaccgagccaaagatgcttttttgtctgttttcgttgtttaacagaatggaaagagtaatgcatagtgcttcctggtgtc

SEQ ID NO: 220114 - DNA, 120 bp, Artificial Sequence
  ENSG00000117020_54 (sequence is synthesized)
tcctgattgattgattgtgcacaaagtaggacgataaataaataaaatggagtctgatgggacattgattaaaggtgaaggatgattgatatatagatcatgaaaagaaaaatgaatggc

SEQ ID NO: 220115 - DNA, 120 bp, Artificial Sequence
  ENSG00000117020_55 (sequence is synthesized)
aggaaaaaaagtttggtccttaatatactttggcctagttaaaatatgtgcctttttggtgtgttttgttcatcactacaagataaaaaggaaacattacaactcaagtctttaaaaagt

SEQ ID NO: 220116 - DNA, 120 bp, Artificial Sequence
  ENSG00000117020_56 (sequence is synthesized)
tcatttattgaaaatcatatgtataacctagcatacgaatgagcagatttaaacacataacttcaagccatttctgaaaacatacaccaggagctctgctcagctagagtcagactccag

SEQ ID NO: 220117 - DNA, 120 bp, Artificial Sequence
  ENSG00000117020_57 (sequence is synthesized)
ctccagcccgactgcgtgcggggacagcgcccgcgttgatgaggaccagccccactgcaggctgaggcggtgtcaccctgggaaggtcgtggtgcgttgtggcatattaagtctaaacca

SEQ ID NO: 220118 - DNA, 120 bp, Artificial Sequence
  ENSG00000117020_58 (sequence is synthesized)
gatgaatgtaaatatctctttgtaaatcatttatttcactctgttccatccaggtcagcaatcagattgtggcatgctgggtaactggaaaaaataataaaaagtaagtttcaatagctc

SEQ ID NO: 220119 - DNA, 120 bp, Artificial Sequence
  ENSG00000117020_59 (sequence is synthesized)
aaaatcgagatttgtataaagtgctgtggaagtgcagactaagcaggggttgactttctagaaagttaggggagtgatccagttttaatctgctctcaatcctacttcgtagtttccttg

SEQ ID NO: 220120 - DNA, 120 bp, Artificial Sequence
  ENSG00000117020_60 (sequence is synthesized)
tttccttgtgcatactctgagaagtttgattgtctgaagccttctgctctcaactcgtcaaagtcatcctccttccagctttgttccgttcctggtgaggagctgcgttcctttggagga

SEQ ID NO: 220121 - DNA, 120 bp, Artificial Sequence
  ENSG00000117020_61 (sequence is synthesized)
ctcatatcaactatgagaatgactggtgatgactgatagtaagagctggctactcatgctaacgtttgttgctaggttaactgtaaaacagtctcatgcaggtccttcaggaggtgttac

SEQ ID NO: 220122 - DNA, 120 bp, Artificial Sequence
  ENSG00000117020_62 (sequence is synthesized)
agaagaaggcgttgttattggagatggcagccccatgcacattattgcccccaaaagccctccactgggacaagatgtggaggaggacaatgatattgatgatcctgaccccgtgagaat

SEQ ID NO: 220123 - DNA, 120 bp, Artificial Sequence
  ENSG00000117020_63 (sequence is synthesized)
gggggaggggtgttcccggcctagcggtaccgtctgtgtctgggctgccccggcccggcgcctgctgtctgcgcaactctcgctccttcccctcgcccctccccgcccgggccgcgcggc

SEQ ID NO: 220124 - DNA, 120 bp, Artificial Sequence
  ENSG00000117020_64 (sequence is synthesized)
atctatatgactttagtgtaatatcattgaagacttagagagggttagtgtgagttagaaaaactctctatttttaatattctgcccagtctaaaatttttacctgtcataaactaaatc

SEQ ID NO: 220125 - DNA, 120 bp, Artificial Sequence
  ENSG00000117020_65 (sequence is synthesized)
tgtatatctctcacctgtcttatatttatttcagtacatgatataagggtggactctatttttttctcaatggcgagcccatcatctcatctccatttattagataatccatttttttct

SEQ ID NO: 220126 - DNA, 120 bp, Artificial Sequence
  ENSG00000117020_66 (sequence is synthesized)
cactgattgtggataacacatatacatatttgcgcttttaggatttagtctttttttcccctttgacctttctgtactctagcattaacaccacatggccttaattagagaaactataaa

SEQ ID NO: 220127 - DNA, 120 bp, Artificial Sequence
  ENSG00000117020_67 (sequence is synthesized)
atttttaactgttaatatagcaacatatcccttattttttttaacaaaaatgttcttagctacattagtgcattcttttaaaaaattatggtaaaaattacataatgtgaaatcctcttt

SEQ ID NO: 220128 - DNA, 120 bp, Artificial Sequence
  ENSG00000117020_68 (sequence is synthesized)
catttttaagggtataatagagtattgttaactatgtgcatattattgtacagcagatctctagaacgttttcatctggcatgactgaacctctgttcccattgaacagtagctctccat

SEQ ID NO: 220129 - DNA, 120 bp, Artificial Sequence
  ENSG00000117020_69 (sequence is synthesized)
ctactttagacacatcacataagtggaatcatacagtgtttgtcctgttactgtcttacttcccttagtataatgtcttcaaagttaatccatgttacagcatattagaggattttcttc

SEQ ID NO: 220130 - DNA, 88 bp, Artificial Sequence
  ENSG00000117020_70 (sequence is synthesized)
acaattgccttctttcgccaggctgtagtgcagtggtgtgatcatggcttactgcagcctggaactcaggcccaagggatcctcccag

SEQ ID NO: 220131 - DNA, 120 bp, Artificial Sequence
  ENSG00000117020_71 (sequence is synthesized)
tggcttactgcagcctggaactcaggcccaagggatcctcccagcttagcctccccagtagctgggactacagccacacacgcaactaagttaatttttttttttttttttttttgtaga

SEQ ID NO: 220132 - DNA, 120 bp, Artificial Sequence
  ENSG00000117020_72 (sequence is synthesized)
aggtttctctgtgttgccagggcttgtctggaactcctggcctcaagcaatactcctccctcggctggaattacaggcatgagccacactgccggccaatacattttctttattcattca

SEQ ID NO: 220133 - DNA, 120 bp, Artificial Sequence
  ENSG00000117020_73 (sequence is synthesized)
tctgctgatggatatttagattgtttccacctcttggctattgcgaatagtgcaacaatgagcatgagagggcagatatttgtttaagttcctcatttcactttgtttgaataaatatcc

SEQ ID NO: 220134 - DNA, 120 bp, Artificial Sequence
  ENSG00000117020_74 (sequence is synthesized)
agaaatgtgattgctggttcatttggtagttctacttttaagtttttgaagaatcttcatactgttttctgtagcagctacgttattttacattcccaacaatagtgtacaaggttttaa

SEQ ID NO: 220135 - DNA, 120 bp, Artificial Sequence
  ENSG00000117020_75 (sequence is synthesized)
tttctccacatccttgctgacacttacttatttattttttatgttgttgtttttttaaaaacaacagccatactagcaggtgtaaggtgatatttcatcgtggttttgatttgtacttcc

SEQ ID NO: 220136 - DNA, 120 bp, Artificial Sequence
  ENSG00000117020_76 (sequence is synthesized)
ctgataatttgtaatgctaagcatttttcaaatacctgtgtatcatttgtatgtctactttgaagaaatgtctattcaagtcttttgccaagtttttacttgtgtttctgttttttgttt

SEQ ID NO: 220137 - DNA, 120 bp, Artificial Sequence
  ENSG00000117020_77 (sequence is synthesized)
tcgctactgagttataggagttccctatacattttgaatattaagcccttatcagacatatggtttggaaatatattctctcattctgtagttttctgttttgttctgttgtttgctgtg

SEQ ID NO: 220138 - DNA, 120 bp, Artificial Sequence
  ENSG00000117020_78 (sequence is synthesized)
cagaagctttttattttgatatacttctactcatctattactgcttttgtcagcatcaagaaatcatttctaaagaccaaattatgaagcttttctcctgtggttttttcctaggagttt

SEQ ID NO: 220139 - DNA, 120 bp, Artificial Sequence
  ENSG00000117020_79 (sequence is synthesized)
gtagtttcatgtcttatatttattctttgatccattttgagttggttttgtgtgtggtgtaaaataaggctccacttttgttcttttgcatgttgatacccagttttctcagcagcatta

SEQ ID NO: 220140 - DNA, 120 bp, Artificial Sequence
  ENSG00000117020_80 (sequence is synthesized)
tatttccacattgtgttagttgtgacgcccttgtcaaagatcatttgactgtatatatatatggttttattacctgggctctctgttctgttccattagtctatatgtctttatgccagt

SEQ ID NO: 220141 - DNA, 120 bp, Artificial Sequence
  ENSG00000117020_81 (sequence is synthesized)
accaatctgttttaattactgaagctttagaatgcattttgaagtcaggaggtatgaagccctcagctttttgctttctcaagattgtttcagctgtttgggattctttatggtttccat

SEQ ID NO: 220142 - DNA, 120 bp, Artificial Sequence
  ENSG00000117020_82 (sequence is synthesized)
acgaattttaggattttttttttctgtttccgcaaaaatgctgtaggattttgaaaaggattgcattgaatctgtagcttactttgtggtgttgacatcttaacaatattaaacctttca

SEQ ID NO: 220143 - DNA, 120 bp, Artificial Sequence
  ENSG00000117020_83 (sequence is synthesized)
gcagcccttcgcttgccctcccgccggccgcaccgggctccaggaggccagaggctctgtggggtggggggaggacaggaggggaggaggagggaggggggacccccgagtcgccccctc

SEQ ID NO: 220144 - DNA, 120 bp, Artificial Sequence
  ENSG00000117020_84 (sequence is synthesized)
gctgataagatggcagcctggcaacagaggcaggtagtggggttgggggagaacatttgatgcagagtaaaaataagatttgtgattccaaaggtcatgaattgttaggatcatgggatg

SEQ ID NO: 220145 - DNA, 120 bp, Artificial Sequence
  ENSG00000117020_85 (sequence is synthesized)
ttgtgttttgtgatggaatatgttaatgggggcgagatggagtttcgctctgtcgtcaggctggagtgcagcagcacaatctaagcttactaccacctctgcctcccgggttcaagcgat

SEQ ID NO: 220146 - DNA, 120 bp, Artificial Sequence
  ENSG00000117020_86 (sequence is synthesized)
gagataaatttaatatttttattagcacatttcactcattcctttattccttctcctttctcttccttggttttgatcacagtcaatgtgagggaaaagtaaatttactggaaaagctaa

SEQ ID NO: 220147 - DNA, 120 bp, Artificial Sequence
  ENSG00000117020_87 (sequence is synthesized)
ctggaaatatttttattgtgggctttctgaaataaatttaattattaaatagggtcttgtttgtgtctcatgaacttaaaatattcttattttccaaaataaataattaaatatccttta

SEQ ID NO: 220148 - DNA, 120 bp, Artificial Sequence
  ENSG00000117020_88 (sequence is synthesized)
aaggctcagatgatccttaattaagaattcccagcaaccaaaagtaagcctgagtttgtaccaagtctaggttagaagaggcaaaaattgaagacctacatttgtactgttcaacaaagt

SEQ ID NO: 220149 - DNA, 120 bp, Artificial Sequence
  ENSG00000117020_89 (sequence is synthesized)
agccatgggccaaagtggctgttgagcacttgaaaggtgattgtggtgagcatgcacccacttttgcagctatctaataaaaagatggaaatagttggacaactcatatcaactatgaga

SEQ ID NO: 220150 - DNA, 120 bp, Artificial Sequence
  ENSG00000117020_90 (sequence is synthesized)
aagaaggaaataaggaaaccaacctttctttgagcgttactatgtatcaagccctttcacatatgttttctcattttatcttcacaacaacactgtgagaatgccagttaatgaaaacag

SEQ ID NO: 220151 - DNA, 120 bp, Artificial Sequence
  ENSG00000117020_91 (sequence is synthesized)
aaaattattttaaaatgagatcatttttaagaaaactataatgtaacaatgtcacatatttccttcttcaggctccaattcaaatcatactccaatttgaaaagaacaaaaattccacaa

SEQ ID NO: 220152 - DNA, 120 bp, Artificial Sequence
  ENSG00000117020_92 (sequence is synthesized)
aacgttcattctttcctactttttccttacgttgtacaacaaatgtggaaagaaaaaaaaaacagaaaaagtgtatcccatcttaatgaaaatgactgcggcagtcaagagtttcaaatc

SEQ ID NO: 220153 - DNA, 120 bp, Artificial Sequence
  ENSG00000117020_93 (sequence is synthesized)
cagctgccaggggtgaaagcaaccctctgcatctctgaaagatttcatcagtgttatctcctttataatcataacttttcatgtgtatcatctgagtttcttattaaataatctcactat

SEQ ID NO: 220154 - DNA, 120 bp, Artificial Sequence
  ENSG00000117020_94 (sequence is synthesized)
cctcaacaacttttcagtggcaagctccaattcaaatcatactccaatttgaaaagaacaaaaattccacaaaacgttcattctttcctactttttccttacgttgtacaacaaatgtgg

SEQ ID NO: 220155 - DNA, 120 bp, Artificial Sequence
  ENSG00000117020_95 (sequence is synthesized)
taactggaaaaaataataaaaatcggcttcctacagccagcagcacagtcacccatggaactgttggctttggattaaatgtggaattgaacgactacccagaagtgttctggaaagaag

SEQ ID NO: 220156 - DNA, 120 bp, Artificial Sequence
  ENSG00000117020_96 (sequence is synthesized)
cgagatgtgtggcctgcctcaccgtcctcacccatcaaaagcaccagcaggcacgttaactcgaattctcacaaggaaaaggccattaaagctcaaggtgcatttcaaactccaggctac

SEQ ID NO: 220157 - DNA, 120 bp, Artificial Sequence
  ENSG00000117036_0 (sequence is synthesized)
acttcctgctggggtggatgaggaggagccggagacgccgcggaggagaccggaccgaagacggaccgtgccgggaagagcaggcgggtgaaaatgaaagccggctgtagcatcgtggaa

SEQ ID NO: 220158 - DNA, 120 bp, Artificial Sequence
  ENSG00000117036_1 (sequence is synthesized)
aagccagaaggaggtggagggtatcagtttcctgactgggcctacaaaacagagtcatccccaggctcccggcagatccagctgtggcacttcatcctggagctgctgcagaaggaagag

SEQ ID NO: 220159 - DNA, 120 bp, Artificial Sequence
  ENSG00000117036_2 (sequence is synthesized)
ttccgccatgtcatcgcctggcagcagggagagtacggggaatttgtcatcaaggatccagatgaggtggcccgcctctggggccgcaggaaatgcaaaccacagatgaattatgacaag

SEQ ID NO: 220160 - DNA, 120 bp, Artificial Sequence
  ENSG00000117036_3 (sequence is synthesized)
ctgagccgggccctcagatactattacaacaagaggatccttcataaaacaaaagggaaaagatttacctataaatttaacttcaacaagctggtgatgcccaactacccattcatcaac

SEQ ID NO: 220161 - DNA, 120 bp, Artificial Sequence
  ENSG00000117036_4 (sequence is synthesized)
attcggtcaagtggtgtggttcctcagagtgcaccaccagtgccaacagcctcttcccggttccatttcccacctctggacacccattctccaaccaatgatgtgcagccgggacggttc

SEQ ID NO: 220162 - DNA, 120 bp, Artificial Sequence
  ENSG00000117036_5 (sequence is synthesized)
tctgctagctccctaactgcttctggccaggagtccagtaatggtactgatagaaagactgagctttcagagctggaggatggctcagctgctgactggcgccggggtgtggatcccgtg

SEQ ID NO: 220163 - DNA, 120 bp, Artificial Sequence
  ENSG00000117036_6 (sequence is synthesized)
tcctccaggaatgccattggtggaggagggattggccatcagaaacgcaagcctgacataatgcttcctctgtttgctaggccagggatgtaccctgacccccacagtcccttcgctgtc

SEQ ID NO: 220164 - DNA, 120 bp, Artificial Sequence
  ENSG00000117036_7 (sequence is synthesized)
tctccaatccctggccgcggaggtgtccttaatgtccccatttcaccagccctctccctgactcccaccatcttctcctatagcccatcaccaggcctgagccctttcaccagcagcagc

SEQ ID NO: 220165 - DNA, 120 bp, Artificial Sequence
  ENSG00000117036_8 (sequence is synthesized)
tgcttctccttcaaccctgaggaaatgaaacactaccttcattctcaagcttgttctgtgttcaactaccatctgagtcctcggacttttccccgttacccagggctcatggttccacca

SEQ ID NO: 220166 - DNA, 120 bp, Artificial Sequence
  ENSG00000117036_9 (sequence is synthesized)
ctgcagtgccaaatgcatcctgaggagtcaactcagttctccatcaagctgcagcccccaccagttgggcggaagaaccgggagagggttgagagcagcgaggagtcagcaccagtcacc

SEQ ID NO: 220167 - DNA, 120 bp, Artificial Sequence
  ENSG00000117036_10 (sequence is synthesized)
acgcccaccatggcttctattcccccaagaatcaaggtggaacctgcctctgaaaaggatcctgagagcctcaggcagtcggcacgagagaaggaggagcacactcaagaagagggcact

SEQ ID NO: 220168 - DNA, 120 bp, Artificial Sequence
  ENSG00000117036_11 (sequence is synthesized)
gtgccaagcaggaccattgaagaggaaaaaggcaccatctttgcccgtcctgctgcaccacccatctggccctctgtgcccattagcaccccaagtggagaacctctggaggtgactgaa

SEQ ID NO: 220169 - DNA, 120 bp, Artificial Sequence
  ENSG00000117036_12 (sequence is synthesized)
gacagtgaggataggcctggcaaagagcccagtgcacctgagaagaaagaagatgcactgatgccccccaagcttcggttgaagcggcgctggaatgatgaccctgaagcccgagagctg

SEQ ID NO: 220170 - DNA, 120 bp, Artificial Sequence
  ENSG00000117036_13 (sequence is synthesized)
agcaagagtggcaagtttctctggaatgggtcaggaccccagggcttggcaacagcagctgctgatgcttagaactggaagtggattaggagctgtttatactataatcaaatacataca

SEQ ID NO: 220171 - DNA, 120 bp, Artificial Sequence
  ENSG00000117036_14 (sequence is synthesized)
tgtatttatgtagcaagatttcagggtgggggggagggagttaaactggtttgatcattctaggggcatagacttgtatttttatgttttggggatgggatggggttatcttctgttgta

SEQ ID NO: 220172 - DNA, 120 bp, Artificial Sequence
  ENSG00000117036_15 (sequence is synthesized)
aattaggtgggatatgaacacacttattttcctggtgagtaggacacagggagggtattgaactcaaaggagaaggagcctctatttcctgttgaggcttatactttctgacaaggaaac

SEQ ID NO: 220173 - DNA, 120 bp, Artificial Sequence
  ENSG00000117036_16 (sequence is synthesized)
tcccaaagggccaagatactttttggtcccatgatagtcaggttccagacttctttcttttctattgtatttgtatgtggaaagccattaatgaatttattttactccaagagatacaca

SEQ ID NO: 220174 - DNA, 120 bp, Artificial Sequence
  ENSG00000117036_17 (sequence is synthesized)
taaaagggaaaagggcatggttgggaggttgagcagtaagagaccattaatactaagtattttgcctgaaatgcttctttataattatttcagggaaggaataagataatctcagactta

SEQ ID NO: 220175 - DNA, 76 bp, Artificial Sequence
  ENSG00000117036_18 (sequence is synthesized)
ataattatttcagggaaggaataagataatctcagacttactggggtggggcttggggaatgtttggatgttgctc

SEQ ID NO: 220176 - DNA, 120 bp, Artificial Sequence
  ENSG00000117036_19 (sequence is synthesized)
gttttcaggaaacatgaacaaacatactgccaattatagtggggctgggaaggcacaggagctggcgacctctcagctgcatagttgggacggcaaaccctgctgtgagcttctcagact

SEQ ID NO: 220177 - DNA, 120 bp, Artificial Sequence
  ENSG00000117036_20 (sequence is synthesized)
tttcacctacttcacctattaagaagccatgaggagttgtaaactcttgttcagggaagaaaagagggcaggaggaagtaacccaatgcctttaaatacaaaacagatgaaaaacaaaat

SEQ ID NO: 220178 - DNA, 120 bp, Artificial Sequence
  ENSG00000117036_21 (sequence is synthesized)
actcatttttccttttctattgtgggtttggggagccaaaccaagtgtgactgtgagcacgttcactgagaggcatgacaacattattgaagaggtctttccattatgtctggttctctt

SEQ ID NO: 220179 - DNA, 120 bp, Artificial Sequence
  ENSG00000117036_22 (sequence is synthesized)
tttcttaagtcaagccttaactatgaacatactttaagatgatacgggtctgtcaccataaacctgtaaaagggcatcgacagcttttcagataatccaggaatgttgagacatggctaa

SEQ ID NO: 220180 - DNA, 120 bp, Artificial Sequence
  ENSG00000117036_23 (sequence is synthesized)
gtttctagctgatacttagtcattccctcttgatattgttgggatgggtagccaaaaggcaggcttgtgggagttaagagccaatgatacctggaaacatgggaggtagctgggggtaca

SEQ ID NO: 220181 - DNA, 120 bp, Artificial Sequence
  ENSG00000117036_24 (sequence is synthesized)
agtggatgttgagactgaaggaagaggtggaaagaagacacagaaggcacccagatgccaaaaggcctggcatgaatgagagttggcatctgtcctgttgtggtgttcccattcttgcca

SEQ ID NO: 220182 - DNA, 120 bp, Artificial Sequence
  ENSG00000117036_25 (sequence is synthesized)
tacccatttgcccagattgttctgattctcatgttcaattgactatcccacatgagactacagtttataggcagtgaggaattgtttcttcctgggaaatgtccttccagcaacttcaga

SEQ ID NO: 220183 - DNA, 120 bp, Artificial Sequence
  ENSG00000117036_26 (sequence is synthesized)
ggaatgggaaagtgttaatcttacgtgaagcaaaggagcctggactaggggcagagagaaagaagcagcagcccaccttctttgtgtttgcacatgtgcctatgtcgtgtacattggtac

SEQ ID NO: 220184 - DNA, 120 bp, Artificial Sequence
  ENSG00000117036_27 (sequence is synthesized)
ctgactgtggctcagatctgcgtcgcagcagcgagagaagaaatcactccatatccgatgagaggaagggtggcacagagatggtgtctacaattagagacatttctgactccaccttag

SEQ ID NO: 220185 - DNA, 120 bp, Artificial Sequence
  ENSG00000117036_28 (sequence is synthesized)
cctaagcaaactttatatactgagtaacatttgaaggttgtcttttaatggtggggggtgttttttcctttttaaactacagtgcttgcacaagagagggagggactcagaaaaggttag

SEQ ID NO: 220186 - DNA, 120 bp, Artificial Sequence
  ENSG00000117036_29 (sequence is synthesized)
ggcaggtgagggagacagtagatggcctgggatgacttgagtccatcatactattgcttggcaggtgtcctcccccatgtttgattcaaattccatgagtgacctacctttccccaggaa

SEQ ID NO: 220187 - DNA, 120 bp, Artificial Sequence
  ENSG00000117036_30 (sequence is synthesized)
tgggactgagagggtagtctccagcaactcagtctgcacagggctccccgttcaggctgcctttggtggttgtgcttttgtaagtttctttctctgcacttcgacttacctctgaatcag

SEQ ID NO: 220188 - DNA, 120 bp, Artificial Sequence
  ENSG00000117036_31 (sequence is synthesized)
aaagcaagcccagcaggtgaatgagggatgtctgcttggcattgcccaatctaaccagggaggctggctggccacccactgtccgctagaggggagagctagcaggtgttggtatgaact

SEQ ID NO: 220189 - DNA, 120 bp, Artificial Sequence
  ENSG00000117036_32 (sequence is synthesized)
caggaatagaaacacgaggcctttttaaatacgagggagaagaatccatgatgcatacctgtaaccccctagaacccaagtgccagaattcctagatgctgcttctgtttgaacaaaatg

SEQ ID NO: 220190 - DNA, 120 bp, Artificial Sequence
  ENSG00000117036_33 (sequence is synthesized)
tcactgcttttacacttgaaaaaaacacactcgaaaaatgttcaactccatgaaaaatattttttggctttaagaaattgtttggtgtttaactgtttcctttgattgccattccaccag

SEQ ID NO: 220191 - DNA, 120 bp, Artificial Sequence
  ENSG00000117036_34 (sequence is synthesized)
taaattgttggttgatttgcactgcactctggggttggggttgggaggggagggtccttatacagagccgaacctggggttgctcaggaagtgggccagggaatgtggaagtcgttgaca

SEQ ID NO: 220192 - DNA, 120 bp, Artificial Sequence
  ENSG00000117036_35 (sequence is synthesized)
ttgcctgggccaaaagagtgggagatagtttttctcccctcagcccactcctggtagcacctgtcgccagcctggtacaaagccaggcctttttcttctgtgagcatctcatcactgtcc

SEQ ID NO: 220193 - DNA, 120 bp, Artificial Sequence
  ENSG00000117036_36 (sequence is synthesized)
agcagcaggtggaaaaagggggacaacaaccagacctattttttctcccccattttttccaaattttgctgtgccaaatgtttaaaattttataaatatgaatctattgaaatttcctta

SEQ ID NO: 220194 - DNA, 120 bp, Artificial Sequence
  ENSG00000117036_37 (sequence is synthesized)
atcaagagcttcttcgtgtaaagtttgcttttttagctatagaaaaagaaaacagtaaatatctcttaatggcatccagccttgctgagctcaccttttttcctgaagaatgggtaggag

SEQ ID NO: 220195 - DNA, 120 bp, Artificial Sequence
  ENSG00000117036_38 (sequence is synthesized)
tgaaatatttaatgtaaacatttcaccaagtccctttaccctaattttgaagctgcattaaacccaactcactaacacagggaatgattgcaccctagtcctctgtgggccaagaaactt

SEQ ID NO: 220196 - DNA, 120 bp, Artificial Sequence
  ENSG00000117036_39 (sequence is synthesized)
tcagaagcattaaaaaaatagttgaagtatatcacttctcaccaagtgggtagagtcagttggctgtttgtcccttgttttttatttattccataattatgtttgtgctttttgttttgt

SEQ ID NO: 220197 - DNA, 120 bp, Artificial Sequence
  ENSG00000117036_40 (sequence is synthesized)
aaacagtaatggaacgtacatttttattttgtttagaagacaactttgattcaatctttcaagaactgttccattcttggtttcttcttagggggataaaaagttaccagttaatttgtt

SEQ ID NO: 220198 - DNA, 120 bp, Artificial Sequence
  ENSG00000117036_41 (sequence is synthesized)
ttgagatatttaagcattctttgagttatagaattgtgatgcagggatttgtgaatgagacatttacatgtgaaaggtgacttcactagttacctgcttgagcagagtaaagtgtgtata

SEQ ID NO: 220199 - DNA, 120 bp, Artificial Sequence
  ENSG00000117036_42 (sequence is synthesized)
tgtacataaaatgtaagtaatcttaactccattgtgcagtgccttttagatgttccgctttctataaagtcttcaaatttttgcatatatattatatatatatgatgtaatgttatagaa

SEQ ID NO: 220200 - DNA, 120 bp, Artificial Sequence
  ENSG00000117036_43 (sequence is synthesized)
atatatgtataatatacatattttttccaggggtatctgatagctctgtattttgttatggaagttgaaagaaaaaagtattttacctcagaaattaaataaaaaaatacttttaagtaa

SEQ ID NO: 220201 - DNA, 120 bp, Artificial Sequence
  ENSG00000117036_44 (sequence is synthesized)
aatctgtgttaacagattggaaggagactaagctgtttggtgaatgctagataaaaagggtatcaggtaataaaagactacactatcttagtgaataatgtgtcactttaaagtgggagt

SEQ ID NO: 220202 - DNA, 120 bp, Artificial Sequence
  ENSG00000117036_45 (sequence is synthesized)
agaagagctgttgaatgtgagtagcataggcacaggaggagaaaaggcatatctttggttatacgtaggaggggattccaatgtggctggcactggatcctgacagacagctgattctgc

SEQ ID NO: 220203 - DNA, 120 bp, Artificial Sequence
  ENSG00000117036_46 (sequence is synthesized)
tctgtagtgggcgagagtatatggtgaaacatggattggagttcatttataatccaaaggattagtttagacttctctattagaatctgttagaatttctttctttgggcttccctgaaa

SEQ ID NO: 220204 - DNA, 120 bp, Artificial Sequence
  ENSG00000117036_47 (sequence is synthesized)
ttaattttgaattgaaaagaatttttaaaaatccaaatctaagacatggcatgtttaggaagattttagaaacactaaaataatgtgatcctttggattgcctcaatgttcttactcaag

SEQ ID NO: 220205 - DNA, 120 bp, Artificial Sequence
  ENSG00000117036_48 (sequence is synthesized)
cctagatactattacgctatcttgtttgggaatgatgtttcataggtttgtgatgatctttacgttcaggactcagttttaacacccagcccagtggttctttcatagatgggaacctgt

SEQ ID NO: 220206 - DNA, 120 bp, Artificial Sequence
  ENSG00000117036_49 (sequence is synthesized)
ttctacaaacacttccgattttctgtgaaactaccaagctctcccttatcaagtgaatatcatcaaaaccacagcatccttgatcagagaagggggaggttcacatgtttgcagtgaaaa

SEQ ID NO: 220207 - DNA, 120 bp, Artificial Sequence
  ENSG00000117036_50 (sequence is synthesized)
gcagtgtctttgatctgcaacagcaaatcctcagagaaaaagattctggggttacttgaccttctctcctgttaagtgcagtagggcttcccctcttgactttcctggttatagctttcc

SEQ ID NO: 220208 - DNA, 120 bp, Artificial Sequence
  ENSG00000117036_51 (sequence is synthesized)
atcacagctccccacattctctcttgatgttgaaagcagtctctcaaaagactttgttgttgtgtggttttttgtttgtgatttttttccttatgcaaatcatactcctgcccaagaaaa

SEQ ID NO: 220209 - DNA, 120 bp, Artificial Sequence
  ENSG00000117036_52 (sequence is synthesized)
tacagtagttccccttatctgagcagtatatgttctaagacccctagtagattcgcaaaccacagatagtaccaaactccattcatatatatgatgttttttcttcccttaaccccactc

SEQ ID NO: 220210 - DNA, 85 bp, Artificial Sequence
  ENSG00000117036_53 (sequence is synthesized)
ccccactcatatgtatctgtgataactgacaataataaaatagaaaaattataacaatatgctgtaataaacttaatgtggtctt

SEQ ID NO: 220211 - DNA, 120 bp, Artificial Sequence
  ENSG00000117054_0 (sequence is synthesized)
accgcgccgcaagtccccccaccgttcagcgcaaccgggccctcccagccccgccgccgtccccctcccccgccctggctctctttccgcgctgcggtcagcctcggcgtcccacagaga

SEQ ID NO: 220212 - DNA, 120 bp, Artificial Sequence
  ENSG00000117054_1 (sequence is synthesized)
gggccagaggtggaaacgcagaaaaccaaaccaggactatcagagattgcccggagaggggatgcgacccctccccaggtcgcagcgacggcgcacgcaagggtcacggagcatgcgttg

SEQ ID NO: 220213 - DNA, 120 bp, Artificial Sequence
  ENSG00000117054_2 (sequence is synthesized)
gagcatgcgttggctacccggcgccggggaccgctgccaccccgcctagcgcagcgccccgtccttccgcagcccaaccgcctcttcccgccccgccccatcccgcccacgggctccagt

SEQ ID NO: 220214 - DNA, 120 bp, Artificial Sequence
  ENSG00000117054_3 (sequence is synthesized)
aggagtcccgcgttcggggagtatgtcaaggccgtgacccgtgtattattgtccgagtggccggaacgggagccaacatggcagcggggttcgggcgatgctgcagggtcctgagaagta

SEQ ID NO: 220215 - DNA, 120 bp, Artificial Sequence
  ENSG00000117054_4 (sequence is synthesized)
tttctcgttttcattggagatcacagcatacaaaagccaatcgacaacgtgaaccaggattaggatttagttttgagttcaccgaacagcagaaagaatttcaagctactgctcgtaaat

SEQ ID NO: 220216 - DNA, 120 bp, Artificial Sequence
  ENSG00000117054_5 (sequence is synthesized)
ttgccagagaggaaatcatcccagtggctgcagaatatgataaaactggtgaatatccagtccccctaattagaagagcctgggaacttggtttaatgaacacacacattccagagaact

SEQ ID NO: 220217 - DNA, 120 bp, Artificial Sequence
  ENSG00000117054_6 (sequence is synthesized)
gtggaggtcttggacttggaacttttgatgcttgtttaattagtgaagaattggcttatggatgtacaggggttcagactgctattgaaggaaattctttggggcaaatgcctattatta

SEQ ID NO: 220218 - DNA, 120 bp, Artificial Sequence
  ENSG00000117054_7 (sequence is synthesized)
ttgctggaaatgatcaacaaaagaagaagtatttggggagaatgactgaggagccattgatgtgtgcttattgtgtaacagaacctggagcaggctctgatgtagctggtataaagacca

SEQ ID NO: 220219 - DNA, 120 bp, Artificial Sequence
  ENSG00000117054_8 (sequence is synthesized)
aagcagaaaagaaaggagatgagtatattattaatggtcagaagatgtggataaccaacggaggaaaagctaattggtattttttattggcacgttctgatccagatcctaaagctcctg

SEQ ID NO: 220220 - DNA, 120 bp, Artificial Sequence
  ENSG00000117054_9 (sequence is synthesized)
ctaataaagcctttactggattcattgtggaagcagataccccaggaattcagattgggagaaaggaattaaacatgggccagcgatgttcagatactagaggaattgtcttcgaagatg

SEQ ID NO: 220221 - DNA, 120 bp, Artificial Sequence
  ENSG00000117054_10 (sequence is synthesized)
ctgttggattagcacaaagagctttggatgaagctaccaagtatgccctggaaaggaaaactttcggaaagctacttgtagagcaccaagcaatatcatttatgctggctgaaatggcaa

SEQ ID NO: 220222 - DNA, 120 bp, Artificial Sequence
  ENSG00000117054_11 (sequence is synthesized)
tgaaagttgaactagctagaatgagttaccagagagcagcttgggaggttgattctggtcgtcgaaatacctattatgcttctattgcaaaggcatttgctggagatattgcaaatcagt

SEQ ID NO: 220223 - DNA, 120 bp, Artificial Sequence
  ENSG00000117054_12 (sequence is synthesized)
tagctactgatgctgtgcagatacttggaggcaatggatttaatacagaatatcctgtagaaaaactaatgagggatgccaaaatctatcagatttatgaaggtacttcacaaattcaaa

SEQ ID NO: 220224 - DNA, 120 bp, Artificial Sequence
  ENSG00000117054_13 (sequence is synthesized)
gacttattgtagcccgtgaacacattgacaagtacaaaaattaaaaaaattactgtagaaatattgaataactagaacacaagccactgtttcagctccagaaaaaagaaagggctttaa

SEQ ID NO: 220225 - DNA, 120 bp, Artificial Sequence
  ENSG00000117054_14 (sequence is synthesized)
cgttttttccagtgaaaacaaatcctcttatattaaatctaagcaactgcttattatagtagtttatacttttgcttaactctgttatgtctcttaagcaggtttggtttttattaaaat

SEQ ID NO: 220226 - DNA, 120 bp, Artificial Sequence
  ENSG00000117054_15 (sequence is synthesized)
gatgtgttttctttagtaccactttacttgaattacattaacctagaaaactacataggttattttgatctcttaagattaatgtagcagaaatttcttggaattttatttttgtaatga

SEQ ID NO: 220227 - DNA, 120 bp, Artificial Sequence
  ENSG00000117054_16 (sequence is synthesized)
cagaaaagtgggcttagaaagtattcaagatgttacaaaatttacatttagaaaatattgtagtatttgaatactgtcaacttgacagtaactttgtagacttaatggtattattaaagt

SEQ ID NO: 220228 - DNA, 120 bp, Artificial Sequence
  ENSG00000117054_17 (sequence is synthesized)
tctttttattgcagtttggaaagcatttgtgaaactttctgtttggcacagaaacagtcaaaattttgacattcatattctcctattttacagctacaagaactttcttgaaaatcttat

SEQ ID NO: 220229 - DNA, 120 bp, Artificial Sequence
  ENSG00000117054_18 (sequence is synthesized)
ttaattctgagcccatatttcacttaccttatttaaaataaatcaataaagcttgccttaaattatttttatatgactgttggtctctaggtagcctttggtctattgtacacaatctca

SEQ ID NO: 220230 - DNA, 120 bp, Artificial Sequence
  ENSG00000117054_19 (sequence is synthesized)
tttcatatgtttgcattttggcaaagaacttaataaaattgttcagtgcttattatcatatctttctgtattttttccaggaaatttcattacttcgtgtaatagtgtatatttcttgta

SEQ ID NO: 220231 - DNA, 120 bp, Artificial Sequence
  ENSG00000117054_20 (sequence is synthesized)
cttcgtgtaatagtgtatatttcttgtatttactatgatgaaaaaaggtcgttttaattttgaattgaataaagttacctgttcattttttattagatattttaaagacttcagaaaata

SEQ ID NO: 220232 - DNA, 120 bp, Artificial Sequence
  ENSG00000117054_21 (sequence is synthesized)
taatactggaatgcatatgagtaagaaaaattgtggaactctactcagtcatttttttcaaatatttcttgccattaaatgactttctacctttgtcttcctgctcagactacagtgttt

SEQ ID NO: 220233 - DNA, 120 bp, Artificial Sequence
  ENSG00000117054_22 (sequence is synthesized)
gcccacttttggaagcttgcactctatacctagatgcgtttttccttcttctaactggttccaaccttaacttgcacctaaaccttggtaacttccgtttctagagttggtcaatttgtt

SEQ ID NO: 220234 - DNA, 120 bp, Artificial Sequence
  ENSG00000117054_23 (sequence is synthesized)
ttatttcctcattctaacttagaggcaaggtataggccagttctttggacttacctgttaggtgaaaaatagttattttttcattttgaattatagcatctctgaatttacatatccaat

SEQ ID NO: 220235 - DNA, 120 bp, Artificial Sequence
  ENSG00000117054_24 (sequence is synthesized)
ctgtagtctgagtttctgataatcaaggatttaagtccccacaataaatacacatttctacatactgacttcataggacatttttccttgttatccagttttaacttttctaaataattt

SEQ ID NO: 220236 - DNA, 120 bp, Artificial Sequence
  ENSG00000117054_25 (sequence is synthesized)
gttaaagatgatttttttggtttgcaaggagagagaatattcataaatgacaacgtggatttctgattatttagaaattttatgtccctagtagcaataaatgactgtcatatatggctg

SEQ ID NO: 220237 - DNA, 120 bp, Artificial Sequence
  ENSG00000117054_26 (sequence is synthesized)
tgagccagtttttggaattaattaatagaaagaagaatgttatttgtgattaagtataagtctgaagagagaataggctaaaaaaaatggtacagacatgtgtattacgtttggattaga

SEQ ID NO: 220238 - DNA, 120 bp, Artificial Sequence
  ENSG00000117054_27 (sequence is synthesized)
gtcttttttgtgaaccatgattcttttcctcagacccagttttagagttgaattgagttttaacaaaatcaagttagaacaggaatacaggttcaaattacaaatagtaaaataattttt

SEQ ID NO: 220239 - DNA, 120 bp, Artificial Sequence
  ENSG00000117054_28 (sequence is synthesized)
ctgcgcctggcttggagggtcccacacccatggaacctcacccactgctagcacagcagtctgagatgaaactacaaggcggcagcaaggctcagggaggggcatccgccattgctgagg

SEQ ID NO: 220240 - DNA, 120 bp, Artificial Sequence
  ENSG00000117054_29 (sequence is synthesized)
gtagctgctggtgctgttggattagcacaaagagctttggatgaagctaccaagtatgccctggaaaggaaaactttcggaaagctacttgtagagatggagtctcgctctgttgctcag

SEQ ID NO: 220241 - DNA, 90 bp, Artificial Sequence
  ENSG00000117054_30 (sequence is synthesized)
ctacttgtaagagtgcagtggcacaatctcggttcaccacagtctccgcctcccgagttcgagtaattctcctgcctcagcctcccaagt

SEQ ID NO: 220242 - DNA, 120 bp, Artificial Sequence
  ENSG00000117054_31 (sequence is synthesized)
tttaaaacaaattttggtcatattgaaagcaattaaaatagtttacctttatttctattgtgatgtactacatattacaatgtgttgaaacattttgatactgtaggaggtcttggactt

SEQ ID NO: 220243 - DNA, 120 bp, Artificial Sequence
  ENSG00000117054_32 (sequence is synthesized)
tcttgtctaaaaaaaaaaagttatgtaaatgtcctctttgtctttcaaaatatcatatatactgtactgcgggtaactgaaaccacagaaagtgaaaccccatggaatgggggagggcct

SEQ ID NO: 220244 - DNA, 120 bp, Artificial Sequence
  ENSG00000117054_33 (sequence is synthesized)
actgtgttattaagacatagacctcaaatactagctcttccatatactaggtacgtgactaggcaagtttttaaacctgattatttatttcctcatttgtaaaatgtaggtaataataat

SEQ ID NO: 220245 - DNA, 120 bp, Artificial Sequence
  ENSG00000117054_34 (sequence is synthesized)
tgggattgttaagagaattaactgagagagcaatcaccatgtgttatttgccgatattatcaccattatccggtatgtgtatctcttaggtattttttattggcacgttctgatccagat

SEQ ID NO: 220246 - DNA, 120 bp, Artificial Sequence
  ENSG00000117054_35 (sequence is synthesized)
ggggtcctacggcagccgtggaactgctctgccttgcaggcgaaagtgtggtcagctatatcggagcgcgatgggggcctgagaggcgcatctgcgcaggcgcccggctcctaagtctac

SEQ ID NO: 220247 - DNA, 120 bp, Artificial Sequence
  ENSG00000117054_36 (sequence is synthesized)
ccaggaactgaccctgctctctcctttccctgttagacatgggcactccacagaaggatgttattatcaagtcagatgcaccggacactttgttattggagaaacatgcagattatatcg

SEQ ID NO: 220248 - DNA, 120 bp, Artificial Sequence
  ENSG00000117069_0 (sequence is synthesized)
agttttaattctgtctctaatctctgcaacagccgcgcttcccgggtcccgcggctcccgcgcgcgatctgccgcggccggctgctgggcaaaaatcagagccgcctccgccccattacc

SEQ ID NO: 220249 - DNA, 120 bp, Artificial Sequence
  ENSG00000117069_1 (sequence is synthesized)
catcatggaaaccctccaggaaaaagtggccccggacgcgcgagcctgaggattctgcacaaaagaggtgcccaaaatgaagaccctgatgcgccatggtctggcagtgtgtttagcgct

SEQ ID NO: 220250 - DNA, 120 bp, Artificial Sequence
  ENSG00000117069_2 (sequence is synthesized)
caccaccatgtgcaccagcttgttgctagtgtacagcagcctcggcggccagaaggagcggcccccgcagcagcagcagcagcagcagcaacagcagcagcaggcgtcggccaccggcag

SEQ ID NO: 220251 - DNA, 120 bp, Artificial Sequence
  ENSG00000117069_3 (sequence is synthesized)
ctcgcagccggcggcggagagcagcacccagcagcgccccggggtccccgcgggaccgcggccactggacggatacctcggagtggcggaccacaagcccctgaaaatgcactgcaggga

SEQ ID NO: 220252 - DNA, 120 bp, Artificial Sequence
  ENSG00000117069_4 (sequence is synthesized)
ctgtgccctggtgaccagctcagggcatctgctgcacagtcggcaaggctcccagattgaccagacagagtgtgtcatccgcatgaatgacgcccccacacgcggctatgggcgtgacgt

SEQ ID NO: 220253 - DNA, 120 bp, Artificial Sequence
  ENSG00000117069_5 (sequence is synthesized)
gggcaatcgcaccagcctgagggtcatcgcgcattccagcatccagaggatcctccgcaaccgccatgacctgctcaacgtgagccagggcaccgtgttcatcttctggggccccagcag

SEQ ID NO: 220254 - DNA, 120 bp, Artificial Sequence
  ENSG00000117069_6 (sequence is synthesized)
ctacatgcggcgggacggcaagggccaggtctacaacaacctgcatctcctgagccaggtgctgccccggctgaaggccttcatgattactcgccacaagatgctgcagtttgatgagct

SEQ ID NO: 220255 - DNA, 120 bp, Artificial Sequence
  ENSG00000117069_7 (sequence is synthesized)
cttcaagcaggagactggcaaagacaggaagatatccaacacttggctcagcactggctggtttacaatgacaattgcactggagctctgtgacaggatcaatgtttatggcatggtgcc

SEQ ID NO: 220256 - DNA, 120 bp, Artificial Sequence
  ENSG00000117069_8 (sequence is synthesized)
cccagacttctgcagggatcccaatcacccttcagtaccttatcattattatgaaccttttggacctgatgaatgtacaatgtacctctcccatgagcgaggacgcaagggcagtcatca

SEQ ID NO: 220257 - DNA, 120 bp, Artificial Sequence
  ENSG00000117069_9 (sequence is synthesized)
ccgctttatcacagagaaacgagtctttaagaactgggcacggacattcaatattcacttttttcaaccagactggaaaccagaatcacttgctataaatcatcctgagaataaacctgt

SEQ ID NO: 220258 - DNA, 120 bp, Artificial Sequence
  ENSG00000117069_10 (sequence is synthesized)
gttctaaggaatgagcatgccagactgtaatcccaggtattcactgcatcagacaccgagacactgaacttcctgagccaccagacaggaaagggtagcagaaaacagcttcactcctca

SEQ ID NO: 220259 - DNA, 120 bp, Artificial Sequence
  ENSG00000117069_11 (sequence is synthesized)
ggaagtaccatggacagacgcctaccaggggtgacaaagcagtgcagttggattgtaaggaaaaattccggaattaatgcatcctaatgaatgttgtccccttcaatggtgttaccttag

SEQ ID NO: 220260 - DNA, 120 bp, Artificial Sequence
  ENSG00000117069_12 (sequence is synthesized)
gagctgaacattcaattcagttacaccactatgactaaaaacagtttggatctcttagtattgcctttgaaactgcaacataagcaactcaacaatattagttgcattcctttatagaca

SEQ ID NO: 220261 - DNA, 120 bp, Artificial Sequence
  ENSG00000117069_13 (sequence is synthesized)
taccatgtcaaagacgtttttctatcaagttgtattctttcctgttctataacctttgtcatctgttagactctgtatgtgtgatttgtaaaaagcaggctgaaactatggacatgattt

SEQ ID NO: 220262 - DNA, 120 bp, Artificial Sequence
  ENSG00000117069_14 (sequence is synthesized)
ctgaagagcacatctccactgactttcataaagcaaatgtccaatatttatttattgagagttttttagtgcaatctgggccagtatttttatagattatgattatgtggtaatttatcc

SEQ ID NO: 220263 - DNA, 120 bp, Artificial Sequence
  ENSG00000117069_15 (sequence is synthesized)
ttcctaactctttaatcctgaatgatggttggaaatggcctagaattaggttactctgttcacaatgctcattgttagcatgcaattggtatttgacttggaagtgttgtgttgtatttt

SEQ ID NO: 220264 - DNA, 120 bp, Artificial Sequence
  ENSG00000117069_16 (sequence is synthesized)
ttgaacccctaggcttcaggaaaactgctcttttgtaaaaagaatagcgatgacattttctaatgtgcagaaatgttccaaaaggacaaaattgaaaaccaaaaactatgttattaaaac

SEQ ID NO: 220265 - DNA, 120 bp, Artificial Sequence
  ENSG00000117069_17 (sequence is synthesized)
aaaaaaatgctaacaagagaaatttaaaggtagttttctttagtaataatttatgtaagtgtcctctcttgagccctagtttcctttttggcagaatgatgtcactgtaccagacaacct

SEQ ID NO: 220266 - DNA, 120 bp, Artificial Sequence
  ENSG00000117069_18 (sequence is synthesized)
cttaggtttcatcccaaatctaaacttgtggcctcttcttgacccatttgaagactctgcacttggagtgatggggccccaacagtagcaggaactttattttggggagccttatctaca

SEQ ID NO: 220267 - DNA, 120 bp, Artificial Sequence
  ENSG00000117069_19 (sequence is synthesized)
ttcatattacttatatcactcttgtggttaaaactacacttcttcctgtgtccacatgggctaaaatctaccccctgcttctctcgaagcatcaccatccgcctcttccccagcctctca

SEQ ID NO: 220268 - DNA, 120 bp, Artificial Sequence
  ENSG00000117069_20 (sequence is synthesized)
acacaaaaacacaggatacacacacacacacacacacaaaagacatagctccaaggggttccctggctacaatagcaaacagctgcccttctgtgaggaaaagagactacaaggacatgc

SEQ ID NO: 220269 - DNA, 120 bp, Artificial Sequence
  ENSG00000117069_21 (sequence is synthesized)
cctatcattcaactcatttatgctatgaactgtttagactcactacaaatcttcttagattatattcattaccattccctggtctgaaggagtataaaggacttattttattcagagcca

SEQ ID NO: 220270 - DNA, 120 bp, Artificial Sequence
  ENSG00000117069_22 (sequence is synthesized)
agataaattcatattatagatttttatttaaacaagtaatattgttcaaaaatagtctcttataaatatactagtgttttctttacacatgacttagaaggcattagtttctctaatgcc

SEQ ID NO: 220271 - DNA, 120 bp, Artificial Sequence
  ENSG00000117069_23 (sequence is synthesized)
gtatgaagactgacattgttttacagacatgacctggcttatgataaaagaagttttatcgcattaccacttcttttcccttttcttaattagtacactaactagtactattaattacac

SEQ ID NO: 220272 - DNA, 120 bp, Artificial Sequence
  ENSG00000117069_24 (sequence is synthesized)
ggagtattgttgttaaaatgcaaacacaatcagggtactcacataacataaacaaagttgatattgatgtgtatggcttgggctgttcaaagccagtaagattgaaatggccgtccaaaa

SEQ ID NO: 220273 - DNA, 120 bp, Artificial Sequence
  ENSG00000117069_25 (sequence is synthesized)
catactggaatatgttctttaagttttctcatagtttttaaagggactatgaattttattccaacacattgtcttccacagcatggactctgaacacatcatactttatcaacatatgaa

SEQ ID NO: 220274 - DNA, 120 bp, Artificial Sequence
  ENSG00000117069_26 (sequence is synthesized)
aaagtgtattaattttatacaatttacttataggccacctttataatcacttgaagacgttatgttgctcaaacataagtggctcctttggcaatttctatatttgtggaaatttggaaa

SEQ ID NO: 220275 - DNA, 120 bp, Artificial Sequence
  ENSG00000117069_27 (sequence is synthesized)
ggcatagtttcaacatgcaagaatgtaattatattgcttcatctaataatatctcacatatctgtctatcttcagattttagattttctttattaaaaaaaccatcatggtagctccatc

SEQ ID NO: 220276 - DNA, 120 bp, Artificial Sequence
  ENSG00000117069_28 (sequence is synthesized)
tcgtttgtaacttctccctctcaaatactcagaagaatgaagaggccaaattcagaaaatcatggcttcactgggaaatgttttaaatctacatgtagctaggatatgtgatttcatatt

SEQ ID NO: 220277 - DNA, 120 bp, Artificial Sequence
  ENSG00000117069_29 (sequence is synthesized)
ttttaaaaatgtggtgtaaataagtgtaaaaaattaccacttgcaaagtggttttattacagcgttaaagaaaatgactagaattctgatagattgtgctgatgaacctggttgtgggca

SEQ ID NO: 220278 - DNA, 120 bp, Artificial Sequence
  ENSG00000117069_30 (sequence is synthesized)
attgaattcttgtcttcccactaccatttcatgactgtcgtctgaacactattcaacaccattaaatataaactctgatataaaagatgactacagaaccatgtttatagacctcggtga

SEQ ID NO: 220279 - DNA, 120 bp, Artificial Sequence
  ENSG00000117069_31 (sequence is synthesized)
tttcagtatctgattgtgtttgatgcctaagtcatactcgttatgttacatgcctttttcctctctcccagctgtgtcatcagctccctcctagcttttaagaccacagtaatacaatgc

SEQ ID NO: 220280 - DNA, 120 bp, Artificial Sequence
  ENSG00000117069_32 (sequence is synthesized)
cacagctggtcgatccatggcttctgttatttcaacacaagaacatttggcagaggccattacaatagatagccattatgggcaaagatacgggaatttgcaaacaaaatcaatcacttc

SEQ ID NO: 220281 - DNA, 120 bp, Artificial Sequence
  ENSG00000117069_33 (sequence is synthesized)
aaatggcccataaaaggaggaatctcagatttaatattctacggtaaatattcacccaagaaagcatacattaaaagaacattaggaggtaaatattcagcatgctgcatggagacttag

SEQ ID NO: 220282 - DNA, 120 bp, Artificial Sequence
  ENSG00000117069_34 (sequence is synthesized)
ctgtgtgatttccattaccgttaatgggcatttggcaactaagtccctgtgctttgctaaccctggtgtgtactcctaagggctacacataaaacctgagcaattcagagacttctgagg

SEQ ID NO: 220283 - DNA, 120 bp, Artificial Sequence
  ENSG00000117069_35 (sequence is synthesized)
tcatcagatttcagagtaagatcttttctttaaaaaaaaaaatagatgaaagcaaaacacaacgtattgtacctaaaagagaaatttgtgtggtctctcacaatccttaggttactacca

SEQ ID NO: 220284 - DNA, 120 bp, Artificial Sequence
  ENSG00000117069_36 (sequence is synthesized)
gatttgtgtatcctttgttttctgaagttctctccattactgatctatttgaatgacatgagaatggagggaaataatctcattttgaaataaaaactcccctcaaaaattaaaattacc

SEQ ID NO: 220285 - DNA, 120 bp, Artificial Sequence
  ENSG00000117069_37 (sequence is synthesized)
gacttagaagatgataaatgctaagtaaaagtagaaggagaaagttgaaattctattaggattaagacagtgttatttaaaggcacatgcacccatttagtacctgcctaaatatttgcc

SEQ ID NO: 220286 - DNA, 120 bp, Artificial Sequence
  ENSG00000117069_38 (sequence is synthesized)
cttgtgtaagagcaaactcatttcagaaatatatcctgaattccaccagggtgatggttcaaattgttaaataaacctactctgaaagaagggtccatgttcctattctctctctgcagt

SEQ ID NO: 220287 - DNA, 120 bp, Artificial Sequence
  ENSG00000117069_39 (sequence is synthesized)
gttgggaggtgatgttaacactctacatgttttgtatctgacccaatcatttcttccattctcattgcttctctcttaaacctcattgtatctctttactgtcattttctcccaattgtc

SEQ ID NO: 220288 - DNA, 120 bp, Artificial Sequence
  ENSG00000117069_40 (sequence is synthesized)
ttcttttgtctacagtgtgctcctaaaccagcagtctttggtgctgttaaggtcttccttgtaggtttttaaactaaagatctatctgggaaacagatttggggtaggtcctgccagagt

SEQ ID NO: 220289 - DNA, 120 bp, Artificial Sequence
  ENSG00000117069_41 (sequence is synthesized)
aatgaccatggtaggtgggaggaatatatctggctaccatacaaggtacttcagaagtaccattatggtttgcccagggccaagtggggagtgaagaagaggggtccccaagacacagac

SEQ ID NO: 220290 - DNA, 120 bp, Artificial Sequence
  ENSG00000117069_42 (sequence is synthesized)
ttcagtgctaaaaccagggaagtcctgggctccatgacagtggctcaccctatcagaaggccacgtcaaagagaactataataataagccctggggggcaggatgtgtgaaccaattgcc

SEQ ID NO: 220291 - DNA, 120 bp, Artificial Sequence
  ENSG00000117069_43 (sequence is synthesized)
taggtgttagcacatgccagaaggtactttggaatggaaagaggtgagagtgtctcaaggtttaaaaatgagcaagtgtagcccctcttttgtagctcactcatcccaccttctcagggt

SEQ ID NO: 220292 - DNA, 120 bp, Artificial Sequence
  ENSG00000117069_44 (sequence is synthesized)
gttgaaatgcaaatgcaaaaaggctgaaaccctgtttctttctactcagtgccctaatattatatactaccttgaattgtgcttcgtctttttatgcatgtgtcctgttagtctaattag

SEQ ID NO: 220293 - DNA, 120 bp, Artificial Sequence
  ENSG00000117069_45 (sequence is synthesized)
attgtaagctccttgagggcagagactctttctcctttgtctctgcagcctatacctagtatagtgccttgcacacaataggtgctcaataaatgtctgttgttgatcatgacctcttaa

SEQ ID NO: 220294 - DNA, 120 bp, Artificial Sequence
  ENSG00000117069_46 (sequence is synthesized)
agtaggtgccgttcgaaggctggaggggagtggacccgctggggtagggtgggctagttccaacttggtatgaattcttatttggagaaagacacaaagttttgtagaaaataggggtga

SEQ ID NO: 220295 - DNA, 120 bp, Artificial Sequence
  ENSG00000117069_47 (sequence is synthesized)
ggtgcgtggaccccaaagcctaatttcccagcagaaatcggccctggaactagaactccctgatccccagaattgcagctgcggatggaggtccggttcctgaagcctcgggtttggccg

SEQ ID NO: 220296 - DNA, 120 bp, Artificial Sequence
  ENSG00000117069_48 (sequence is synthesized)
caaggcctcaggaaaatgatggaatatgctggatgtgatgaccaccaagccatatgctgctgcgtattgaatcagaattccaacagccttttttatctgccattgttttacatagtctgg

SEQ ID NO: 220297 - DNA, 120 bp, Artificial Sequence
  ENSG00000117090_0 (sequence is synthesized)
agacagcctctgctgcatgacacgaagcttgcttctgcctggcatctgtgagcagctgccaggctccggccaggatcccttccttctcctcattggctgatggatcccaaggggctcctc

SEQ ID NO: 220298 - DNA, 120 bp, Artificial Sequence
  ENSG00000117090_1 (sequence is synthesized)
tccttgaccttcgtgctgtttctctccctggcttttggggcaagctacggaacaggtgggcgcatgatgaactgcccaaagattctccggcagttgggaagcaaagtgctgctgcccctg

SEQ ID NO: 220299 - DNA, 120 bp, Artificial Sequence
  ENSG00000117090_2 (sequence is synthesized)
acatatgaaaggataaataagagcatgaacaaaagcatccacattgtcgtcacaatggcaaaatcactggagaacagtgtcgagaacaaaatagtgtctcttgatccatccgaagcaggc

SEQ ID NO: 220300 - DNA, 120 bp, Artificial Sequence
  ENSG00000117090_3 (sequence is synthesized)
cctccacgttatctaggagatcgctacaagttttatctggagaatctcaccctggggatacgggaaagcaggaaggaggatgagggatggtaccttatgaccctggagaaaaatgtttca

SEQ ID NO: 220301 - DNA, 120 bp, Artificial Sequence
  ENSG00000117090_4 (sequence is synthesized)
gttcagcgcttttgcctgcagttgaggctttatgagcaggtctccactccagaaattaaagttttaaacaagacccaggagaacgggacctgcaccttgatactgggctgcacagtggag

SEQ ID NO: 220302 - DNA, 120 bp, Artificial Sequence
  ENSG00000117090_5 (sequence is synthesized)
aagggggaccatgtggcttacagctggagtgaaaaggcgggcacccacccactgaacccagccaacagctcccacctcctgtccctcaccctcggcccccagcatgctgacaatatctac

SEQ ID NO: 220303 - DNA, 120 bp, Artificial Sequence
  ENSG00000117090_6 (sequence is synthesized)
atctgcaccgtgagcaaccctatcagcaacaattcccagaccttcagcccgtggcccggatgcaggacagacccctcagaaacaaaaccatgggcagtgtatgctgggctgttagggggt

SEQ ID NO: 220304 - DNA, 120 bp, Artificial Sequence
  ENSG00000117090_7 (sequence is synthesized)
gtcatcatgattctcatcatggtggtaatactacagttgagaagaagaggtaaaacgaaccattaccagacaacagtggaaaaaaaaagccttacgatctatgcccaagtccagaaacca

SEQ ID NO: 220305 - DNA, 120 bp, Artificial Sequence
  ENSG00000117090_8 (sequence is synthesized)
ggtcctcttcagaagaaacttgactccttcccagctcaggacccttgcaccaccatatatgttgctgccacagagcctgtcccagagtctgtccaggaaacaaattccatcacagtctat

SEQ ID NO: 220306 - DNA, 120 bp, Artificial Sequence
  ENSG00000117090_9 (sequence is synthesized)
gctagtgtgacacttccagagagctgacaccagagaccaacaaagggactttctgaaggaaaatggaaaaaccaaaatgaacactgaacttggccacaggccccaagtttcctctggcag

SEQ ID NO: 220307 - DNA, 120 bp, Artificial Sequence
  ENSG00000117090_10 (sequence is synthesized)
acatgctgcacgtctgtacccttctcagatcaactccctggtgatgtttcttccacatacatctgtgaaatgaacaaggaagtgaggcttcccaagaatttagcttgctgtgcagtggct

SEQ ID NO: 220308 - DNA, 120 bp, Artificial Sequence
  ENSG00000117090_11 (sequence is synthesized)
gcaggcgcagaacagagcgttacttgataacagcgttccatctttgtgttgtagcagatgaaatggacagtaatgtgagttcagactttgggcatcttgctcttggctggaactggataa

SEQ ID NO: 220309 - DNA, 120 bp, Artificial Sequence
  ENSG00000117090_12 (sequence is synthesized)
taaaaatcagactgaaagccaggacatctgagtacctatctcacacactggaccaccagtcacaaagtctggaaaagtttacattttggctatctttactttgttctgggagctgatcat

SEQ ID NO: 220310 - DNA, 120 bp, Artificial Sequence
  ENSG00000117090_13 (sequence is synthesized)
gataacctgcagacctgatcaagcctctgtgcctcagtttctctctcaggataaagagtgaatagaggctgaagggtgaatttcttattatacataaaacactctgatattattgtataa

SEQ ID NO: 220311 - DNA, 120 bp, Artificial Sequence
  ENSG00000117090_14 (sequence is synthesized)
aggaagctaagaatattattttatttgcaaaacccagaagctaaaaagtcaataaacagaaagaatgattttgagatctctgagttttgaacagtggactggaaaccatgtaagagcctt

SEQ ID NO: 220312 - DNA, 120 bp, Artificial Sequence
  ENSG00000117090_15 (sequence is synthesized)
agttttaaagaaaaacgtagcaaatgtttgatggtgctgttacaaaggagcttggaatactcagaggaacttgtcccatggtgatttttcacttctcaaaatgatgtttaaatcccagtt

SEQ ID NO: 220313 - DNA, 120 bp, Artificial Sequence
  ENSG00000117090_16 (sequence is synthesized)
ctctgttgattcccttgaacaacaaacctggaacctcagctaagactctctgtgaccagattctgaacctcttatatccagggcttcaaggggtattgcaggtcaaggtctttcctaggc

SEQ ID NO: 220314 - DNA, 120 bp, Artificial Sequence
  ENSG00000117090_17 (sequence is synthesized)
actttctactccctgcatacctctcctcacactaaatttatcctctagtagaaaattaagttattttggtctaacagcttcaaatctttgaatgctcaataacttattttgcaagctgca

SEQ ID NO: 220315 - DNA, 120 bp, Artificial Sequence
  ENSG00000117090_18 (sequence is synthesized)
ggcagaaagagactttttaagtaaagtcctttgttttttcctattctctgcttttagacaggctgtcctcaatttaagccctgctttttcttattgtttcttatataaacttggtaagta

SEQ ID NO: 220316 - DNA, 120 bp, Artificial Sequence
  ENSG00000117090_19 (sequence is synthesized)
ctgtaagaaacagccactatcataccattgcataataaggagcaccaacttcccagctcaaaactcaggtccttattgccttgtatcttacctcctctatgaggtcaattcacattgtaa

SEQ ID NO: 220317 - DNA, 120 bp, Artificial Sequence
  ENSG00000117090_20 (sequence is synthesized)
gcctgttgcttagtgcatctcgtttcctggtaccagcttctttaatagagttcttagttgcaatcaacagaagctggctttggcttttttatgtagaaaaggaacctattgaaaagatac

SEQ ID NO: 220318 - DNA, 120 bp, Artificial Sequence
  ENSG00000117090_21 (sequence is synthesized)
tgattggttccaataactgctagaagtttctgcaaaaccatgctttgaaagtgagcaggaaaagaagagactaggctgtggctgggagcacagccaaaattacaaaaccagcccagggat

SEQ ID NO: 220319 - DNA, 120 bp, Artificial Sequence
  ENSG00000117090_22 (sequence is synthesized)
gatgatcctgttcatgcacagccactgtccccagcactaggcacagactctaccactgcctcactgtctctgctggacttggaaacttgatattactgttactgctgcactgtctgccat

SEQ ID NO: 220320 - DNA, 120 bp, Artificial Sequence
  ENSG00000117090_23 (sequence is synthesized)
gaaaatgaattctccagggtcccttcttcatcctttcatctctagcttataattcaaagtctgggattgagtggccaatcctaggtcacatgtccatgtcctatctccaaggggggctgg

SEQ ID NO: 220321 - DNA, 120 bp, Artificial Sequence
  ENSG00000117090_24 (sequence is synthesized)
gaattgaatatctggcattttccactttcacttcttatgaattaaggaattctacaaataatagaagtgggattcaggtggtaggcagacaaaaaagcctcacaattatccactacgcca

SEQ ID NO: 220322 - DNA, 120 bp, Artificial Sequence
  ENSG00000117090_25 (sequence is synthesized)
cccttgtataaccttaccctcattcactgtctactctcaaaactgtggagctactaatgaagatttgtaaacccgggcttatgagcacccattcctttactacaactcagattgctctag

SEQ ID NO: 220323 - DNA, 120 bp, Artificial Sequence
  ENSG00000117090_26 (sequence is synthesized)
aagctcagttcccagcacttggatttttccagtagctgaattctacctgaaggaagggcagaaacaaagggtgaagaagaggctatcacttccaagtatcctgcacccctgggctcaaga

SEQ ID NO: 220324 - DNA, 120 bp, Artificial Sequence
  ENSG00000117090_27 (sequence is synthesized)
cctcactggggagggagtcttttgggccacccaccaaacagcactggcattatgcctctcaccctagaccatggttacacgtggtaaaacaaccccttctggtgatacattcacaactct

SEQ ID NO: 220325 - DNA, 120 bp, Artificial Sequence
  ENSG00000117090_28 (sequence is synthesized)
ctagtttcccccaaatggcactatggggagcgggagcttgccttttcctcagacttaaaacaataagttttccccgtgtttcccctctaatgctgttttcttttgaccaagcatgtctga

SEQ ID NO: 220326 - DNA, 120 bp, Artificial Sequence
  ENSG00000117090_29 (sequence is synthesized)
attctagagaagtcaggaggaacacacccattctcggtttgaagggactgatgttctgaagtacaactgggcacagtcccaggctcttcaggacgcttcctccattcacacagcggggat

SEQ ID NO: 220327 - DNA, 120 bp, Artificial Sequence
  ENSG00000117090_30 (sequence is synthesized)
gtgattgttacagcgggtggtgtgtgctggctgagaagccactgtgaattgattcttcttctgaagtttatgtttctactttttggaaatgaataaattacagccagtccatcaaggaaa

SEQ ID NO: 220328 - DNA, 120 bp, Artificial Sequence
  ENSG00000117090_31 (sequence is synthesized)
tttaggtctctcttaaaagcaaagggtattcagaattggaagtaactagaatgatcttctagtttgggggtatttaaacctgctgcatggaagacgttttaaaggttgacattttttttt

SEQ ID NO: 220329 - DNA, 120 bp, Artificial Sequence
  ENSG00000117090_32 (sequence is synthesized)
ggagacagctaaggaaagaagctggggcgcatgtttctgcccaaagccgggttttggccgaggtgactacacaccccctttcctggctcccataggctaagtgcctggcttcttgagaag

SEQ ID NO: 220330 - DNA, 120 bp, Artificial Sequence
  ENSG00000117090_33 (sequence is synthesized)
cctgcttcttgagaacaaaaaagtgatttaaagcctcatgggagatgagcaatcctcaagacacaagcagaaaaagtcccagtgatacaggaagcgggttcaggaacctgctggttcctg

SEQ ID NO: 220331 - DNA, 120 bp, Artificial Sequence
  ENSG00000117091_0 (sequence is synthesized)
ctttttctagccaggctctcaactgtctcctgcgttgctgggaagttctggaaggaagcatgtgctccagaggttgggattcgtgtctggctctggaattgctactgctgcctctgtcac

SEQ ID NO: 220332 - DNA, 120 bp, Artificial Sequence
  ENSG00000117091_1 (sequence is synthesized)
tcctggtgaccagcattcaaggtcacttggtacatatgaccgtggtctccggcagcaacgtgactctgaacatctctgagagcctgcctgagaactacaaacaactaacctggttttata

SEQ ID NO: 220333 - DNA, 120 bp, Artificial Sequence
  ENSG00000117091_2 (sequence is synthesized)
ctttcgaccagaagattgtagaatgggattccagaaaatctaagtactttgaatccaaatttaaaggcagggtcagacttgatcctcagagtggcgcactgtacatctctaaggtccaga

SEQ ID NO: 220334 - DNA, 120 bp, Artificial Sequence
  ENSG00000117091_3 (sequence is synthesized)
aagaggacaacagcacctacatcatgagggtgttgaaaaagactgggaatgagcaagaatggaagatcaagctgcaagtgcttgaccctgtacccaagcctgtcatcaaaattgagaaga

SEQ ID NO: 220335 - DNA, 120 bp, Artificial Sequence
  ENSG00000117091_4 (sequence is synthesized)
aactgttatctgaaactgtcatgtgtgatacctggcgagtctgtaaactacacctggtatggggacaaaaggcccttcccaaaggagctccagaacagtgtgcttgaaaccacccttatg

SEQ ID NO: 220336 - DNA, 120 bp, Artificial Sequence
  ENSG00000117091_5 (sequence is synthesized)
ccacataattactccaggtgttatacttgccaagtcagcaattctgtgagcagcaagaatggcacggtctgcctcagtccaccctgtaccctggcccggtcctttggagtagaatggatt

SEQ ID NO: 220337 - DNA, 120 bp, Artificial Sequence
  ENSG00000117091_6 (sequence is synthesized)
gcaagttggctagtggtcacggtgcccaccattcttggcctgttacttacctgagatgagctcttttaactcaagcgaaacttcaaggccagaagatcttgcctgttggtgatcatgctc

SEQ ID NO: 220338 - DNA, 120 bp, Artificial Sequence
  ENSG00000117091_7 (sequence is synthesized)
ctcaccaggacagagactgtataggctgaccagaagcatgctgctgaattatcaacgaggattttcaagttaacttttaaatactggttattatttaattttatatccctttgttgtttt

SEQ ID NO: 220339 - DNA, 120 bp, Artificial Sequence
  ENSG00000117091_8 (sequence is synthesized)
ctagtacacagagatatagagatacacatgcttttttcccacccaaaattgtgacaacattatgtgaatgttttattattttttaaaataaacatttgatataattgtcaattaactgaa

SEQ ID NO: 220340 - DNA, 120 bp, Artificial Sequence
  ENSG00000117091_9 (sequence is synthesized)
gaaaggctgggggtcctattcagcctccttgcacagtgtggtggtgaatccctaaggtgtctgggagagctgggagacgtgggttctgccaccagctctaccaccacctcccagccagct

SEQ ID NO: 220341 - DNA, 120 bp, Artificial Sequence
  ENSG00000117091_10 (sequence is synthesized)
tacctcaacttcgtgggggctcagtgttctcacctgcaaaggacgtttgggagagatctctgatactcctcttccctctcccgctctaacaaagcatagtcctaacatctgaggccaggg

SEQ ID NO: 220342 - DNA, 120 bp, Artificial Sequence
  ENSG00000117091_11 (sequence is synthesized)
tcatcatagagtagactgaaacatcagggtgagcagggagaaggaagggcaagtgggcgagcagctgtctagaggggcttcattagacagccgaagtcagccaaggaaagagggaccgag

SEQ ID NO: 220343 - DNA, 120 bp, Artificial Sequence
  ENSG00000117091_12 (sequence is synthesized)
gtcattagaccgccaaagtcagccagggaaagagggactgaggagacgggcctgagagaggccgtcgaggaggcgtgagagcctgagcctcaggcgaagcttctcctccccagcctgatg

SEQ ID NO: 220344 - DNA, 120 bp, Artificial Sequence
  ENSG00000117091_13 (sequence is synthesized)
ttcctagatgaacttaggaagccagattcccctgtctcctgggaggatccactcatgagtgtcacacctggctctagatcaggcctacactggtgctagcatgggacagctaaggccatg

SEQ ID NO: 220345 - DNA, 120 bp, Artificial Sequence
  ENSG00000117091_14 (sequence is synthesized)
ggttttagagtcagtcatacctggggtcacttctaggactgtcacttactagctaaacaagttacttagcttccccaagtcatgttcttcctaaataaaggacaaaataacagttcctat

SEQ ID NO: 220346 - DNA, 120 bp, Artificial Sequence
  ENSG00000117091_15 (sequence is synthesized)
ctgtagggcttcctgggaggcatggggcactctcggggaggaggagagaaaaacctcaggacaggtttgattcatttttccttgatccaattctatttgggagtgagcctaggtcaacag

SEQ ID NO: 220347 - DNA, 120 bp, Artificial Sequence
  ENSG00000117091_16 (sequence is synthesized)
atatccaaattaacaatcttaggacatttaacacctcttctgaagttagtgagtctaagctttgaagagaaggaaaactagagatttttcctatttccttcattttgtcctgtgatcaac

SEQ ID NO: 220348 - DNA, 120 bp, Artificial Sequence
  ENSG00000117091_17 (sequence is synthesized)
ctaaatcagctcagctcatcttgattatatctccgaaattaggcttcattggacttaagaaaaaagagaatgtattaatataaagaatggggcaggagttatcaggagaatttttcaact

SEQ ID NO: 220349 - DNA, 120 bp, Artificial Sequence
  ENSG00000117091_18 (sequence is synthesized)
ggtcagttgctcactagctgtgcagccttgaaaaaagatcttcacatctctgtgcccatattaggtaagattcttttgatagcaaataacagaaactaattcaatgtacctttaccaaaa

SEQ ID NO: 220350 - DNA, 120 bp, Artificial Sequence
  ENSG00000117091_19 (sequence is synthesized)
aaggagaatttagtttaagaaactagggctatttaaagcaattcaaagagtttaaaagagctaggaagggcttaaggggagaagattgaaaaccaggttcgggccagaacccctagcttc

SEQ ID NO: 220351 - DNA, 120 bp, Artificial Sequence
  ENSG00000117091_20 (sequence is synthesized)
aggaatctgtggactgtgcctatggatttggattcctgccattttacacatgttatctctcaaaacttagacttttgctcctctgagtttcaattctcagggcaatttaaagagagagaa

SEQ ID NO: 220352 - DNA, 120 bp, Artificial Sequence
  ENSG00000117091_21 (sequence is synthesized)
actgatagtcccaatttagttcaggtgtgtgtacctgatctaaacatttttggtgaaaggatcagattatagggcagaaacatggatatggggaggggctccaggggttggggtatgcaa

SEQ ID NO: 220353 - DNA, 120 bp, Artificial Sequence
  ENSG00000117091_22 (sequence is synthesized)
ttcttgtagaagagcggggctaaataatccaagagtggtgttcccttgagagccttgggttcttcatcatattatgagaataattctacttacctttcaggatgttattagagtcaaagt

SEQ ID NO: 220354 - DNA, 120 bp, Artificial Sequence
  ENSG00000117091_23 (sequence is synthesized)
agataaggaaagtgaaaacattttttaaaatgtcaaaacatgcaaatgaagagtgttgtatacattcaagttccaccagccagacagtccctgatccaagcagtcagattccccttctaa

SEQ ID NO: 220355 - DNA, 120 bp, Artificial Sequence
  ENSG00000117091_24 (sequence is synthesized)
ctcttcttccatgtcatatgggctgaaaattcagaaagtcctgggaacaaaaagattcaaggtctcttacagtggtgttctggttaacaagctctacaagatttaaaaaaaaaaaaaaaa

SEQ ID NO: 220356 - DNA, 120 bp, Artificial Sequence
  ENSG00000117114_0 (sequence is synthesized)
ctctttctctctccctctcttgcgctgtccctcattcatgcactcttccatctttttgccattgtgccagctcaatttaaatgtatctgctctgtatctgttcaagtggagataatccat

SEQ ID NO: 220357 - DNA, 120 bp, Artificial Sequence
  ENSG00000117114_1 (sequence is synthesized)
gcaaatcaggagccgtggctctcaatgcctggttcacagagaggactcagcttgaggaggtcactcgttcacagccgctcctcccattatatttttccccttattgcagaactgctgtat

SEQ ID NO: 220358 - DNA, 120 bp, Artificial Sequence
  ENSG00000117114_2 (sequence is synthesized)
gtatacagtgactgaaaggactcaatttactgcaactgctgcctggctttacttacaacttttttttttttataaaggaacttacctccatctgtcttttcaagctctaaacttcacaaa

SEQ ID NO: 220359 - DNA, 120 bp, Artificial Sequence
  ENSG00000117114_3 (sequence is synthesized)
tggttctgaagagtatggagcctacgtagattcataagagcccaatgtttccaaaggacattaattttgatttctccaatgaaggcttgtggctgtccttatgctttacaaaacattacc

SEQ ID NO: 220360 - DNA, 120 bp, Artificial Sequence
  ENSG00000117114_4 (sequence is synthesized)
aaatcagagccgaaaagaaaactggtatttatggcacaatgaaaaatttcatctttcccagaatgatatgaagatcaatgatgcagactgatggttttgatgaagctgggcatttataac

SEQ ID NO: 220361 - DNA, 120 bp, Artificial Sequence
  ENSG00000117114_5 (sequence is synthesized)
tagattcattaaggaatacaaagaaaatacttaaagggatcaataatggtgtcttctggttgcagaatgcgaagtctgtggtttatcattgtaatcagcttcttaccaaatacagaaggt

SEQ ID NO: 220362 - DNA, 120 bp, Artificial Sequence
  ENSG00000117114_6 (sequence is synthesized)
ttcagcagagcagctttaccatttgggctggtgaggcgagaattatcctgtgaaggttattctatagatctgcgatgcccgggcagtgatgtcatcatgattgagagcgctaactatggt

SEQ ID NO: 220363 - DNA, 120 bp, Artificial Sequence
  ENSG00000117114_7 (sequence is synthesized)
cggacggatgacaagatttgtgatgctgacccatttcagatggagaatacagactgctacctccccgatgccttcaaaattatgactcaaaggtgcaacaatcgaacacagtgtatagta

SEQ ID NO: 220364 - DNA, 120 bp, Artificial Sequence
  ENSG00000117114_8 (sequence is synthesized)
gttactgggtcagatgtgtttcctgatccatgtcctggaacatacaaataccttgaagtccaatatgaatgtgtcccttacatttttgtgtgtcctgggaccttgaaagcaattgtggac

SEQ ID NO: 220365 - DNA, 120 bp, Artificial Sequence
  ENSG00000117114_9 (sequence is synthesized)
tcaccatgtatatatgaagctgaacaaaaggcgggtgcttggtgcaaggaccctcttcaggctgcagataaaatttatttcatgccctggactccctatcgtaccgatactttaatagaa

SEQ ID NO: 220366 - DNA, 120 bp, Artificial Sequence
  ENSG00000117114_10 (sequence is synthesized)
tatgcttctttagaagatttccaaaatagtcgccaaacaacaacatataaacttccaaatcgagtagatggtactggatttgtggtgtatgatggtgctgtcttctttaacaaagaaaga

SEQ ID NO: 220367 - DNA, 120 bp, Artificial Sequence
  ENSG00000117114_11 (sequence is synthesized)
acgaggaatattgtgaaatttgacttgaggactagaattaagagtggcgaggccataattaactatgccaactaccatgatacctcaccatacagatggggaggaaagactgatatcgac

SEQ ID NO: 220368 - DNA, 120 bp, Artificial Sequence
  ENSG00000117114_12 (sequence is synthesized)
ctagcagttgatgaaaatggtttatgggtcatttacgccactgaacagaacaatggaatgatagttattagccagctgaatccatacactcttcgatttgaagcaacgtgggagactgta

SEQ ID NO: 220369 - DNA, 120 bp, Artificial Sequence
  ENSG00000117114_13 (sequence is synthesized)
tacgacaaacgtgccgcatcaaatgcttttatgatatgcggagtcctctatgtggttaggtcagtttatcaagacaatgaaagtgaaacaggcaagaactcaattgattacatttataat

SEQ ID NO: 220370 - DNA, 120 bp, Artificial Sequence
  ENSG00000117114_14 (sequence is synthesized)
acccgattaaaccgaggagaatatgtagatgttcccttccccaaccagtatcagtatattgctgcagtggattacaatccaagagataaccaactttacgtgtggaacaataacttcatt

SEQ ID NO: 220371 - DNA, 120 bp, Artificial Sequence
  ENSG00000117114_15 (sequence is synthesized)
ttacgatattctctggagtttggtccacctgatcctgcccaagtgcctaccacagctgtgacaataacttcttcagctgagctgttcaaaaccataatatcaaccacaagcactacttca

SEQ ID NO: 220372 - DNA, 120 bp, Artificial Sequence
  ENSG00000117114_16 (sequence is synthesized)
cagaaaggccccatgagcacaactgtagctggatcacaggaaggaagcaaagggacaaaaccacctccagcagtttctacaaccaaaattccacctataacaaatatttttcccctgcca

SEQ ID NO: 220373 - DNA, 120 bp, Artificial Sequence
  ENSG00000117114_17 (sequence is synthesized)
gagagattctgtgaagcattagactccaaggggataaagtggcctcagacacaaaggggaatgatggttgaacgaccatgccctaagggaacaagaggaactgcctcatatctctgcatg

SEQ ID NO: 220374 - DNA, 120 bp, Artificial Sequence
  ENSG00000117114_18 (sequence is synthesized)
atttccactggaacatggaaccctaagggccccgatcttagcaactgtacctcacactgggtgaatcagctggctcagaagatcagaagcggagaaaatgctgctagtcttgccaatgaa

SEQ ID NO: 220375 - DNA, 120 bp, Artificial Sequence
  ENSG00000117114_19 (sequence is synthesized)
ctggctaaacataccaaagggccagtgtttgctggggatgtaagttcttcagtgagattgatggagcagttggtggacatccttgatgcacagctgcaggaactgaaacctagtgaaaaa

SEQ ID NO: 220376 - DNA, 120 bp, Artificial Sequence
  ENSG00000117114_20 (sequence is synthesized)
gattcagctggacggagttataacaagctccaaaaacgagagaagacatgcagggcttaccttaaggcaattgttgacacagtggacaaccttctgagacccgaagctttggaatcatgg

SEQ ID NO: 220377 - DNA, 120 bp, Artificial Sequence
  ENSG00000117114_21 (sequence is synthesized)
aaacatatgaattcttctgaacaagcacatactgcaacaatgttactcgatacattggaagaaggagcttttgtcctagctgacaatcttttagaaccaacaagggtctcaatgcccaca

SEQ ID NO: 220378 - DNA, 120 bp, Artificial Sequence
  ENSG00000117114_22 (sequence is synthesized)
gaaaatattgtcctggaagttgccgtactcagtacagaaggacagatccaagactttaaatttcctctgggcatcaaaggagcaggcagctcaatccaactgtccgcaaataccgtcaaa

SEQ ID NO: 220379 - DNA, 120 bp, Artificial Sequence
  ENSG00000117114_23 (sequence is synthesized)
cagaacagcaggaatgggcttgcaaagttggtgttcatcatttaccggagcctgggacagttccttagtacagaaaatgcaaccattaaactgggtgctgattttattggtcgtaatagc

SEQ ID NO: 220380 - DNA, 120 bp, Artificial Sequence
  ENSG00000117114_24 (sequence is synthesized)
accattgcagtgaactctcacgtcatttcagtttcaatcaataaagagtccagccgagtatacctgactgatcctgtgctttttaccctgccacacattgatcctgacaattatttcaat

SEQ ID NO: 220381 - DNA, 120 bp, Artificial Sequence
  ENSG00000117114_25 (sequence is synthesized)
tacccagggctgcaagctggttgacactaataaaactcgaacaacgtgtgcatgcagccacctaaccaattttgcaattctcatggcccacagggaaattgcatataaagatggcgttca

SEQ ID NO: 220382 - DNA, 120 bp, Artificial Sequence
  ENSG00000117114_26 (sequence is synthesized)
tgaattacttcttacagtcatcacctgggtgggaattgtcatttcccttgtttgcctggctatctgcatcttcaccttctgctttttccgtggcctacagagtgaccgaaatactattca

SEQ ID NO: 220383 - DNA, 120 bp, Artificial Sequence
  ENSG00000117114_27 (sequence is synthesized)
caagaacctttgtatcaaccttttcattgctgaatttattttcctaataggcattgataagacaaaatatgcgattgcatgcccaatatttgcaggacttctacactttttctttttggc

SEQ ID NO: 220384 - DNA, 120 bp, Artificial Sequence
  ENSG00000117114_28 (sequence is synthesized)
agcttttgcttggatgtgcctagaaggtgtgcagctctacctaatgttagttgaagtttttgaaagtgaatattcaaggaaaaaatattactatgttgctggttacttgtttcctgccac

SEQ ID NO: 220385 - DNA, 120 bp, Artificial Sequence
  ENSG00000117114_29 (sequence is synthesized)
agtggttggagtttcagctgctattgactataagagctatggaacagaaaaagcttgctggcttcatgttgataactactttatatggagcttcattggacctgttaccttcattattct

SEQ ID NO: 220386 - DNA, 120 bp, Artificial Sequence
  ENSG00000117114_30 (sequence is synthesized)
gctaaatattatcttcttggtgatcacattgtgcaaaatggtgaagcattcaaacactttgaaaccagattctagcaggttggaaaacattaagtcttgggtgcttggcgctttcgctct

SEQ ID NO: 220387 - DNA, 120 bp, Artificial Sequence
  ENSG00000117114_31 (sequence is synthesized)
tctgtgtcttcttggcctcacctggtcctttgggttgctttttattaatgaggagactattgtgatggcatatctcttcactatatttaatgctttccagggagtgttcattttcatctt

SEQ ID NO: 220388 - DNA, 120 bp, Artificial Sequence
  ENSG00000117114_32 (sequence is synthesized)
tcactgtgctctccaaaagaaagtacgaaaagaatatggcaagtgcttcagacactcatactgctgtggaggcctcccaactgagagtccccacagttcagtgaaggcatcaaccaccag

SEQ ID NO: 220389 - DNA, 120 bp, Artificial Sequence
  ENSG00000117114_33 (sequence is synthesized)
aaccagtgctcgctattcctctggcacacagagtcgtataagaagaatgtggaatgatactgtgagaaaacaatcagaatcttcttttatctcaggtgacatcaatagcacttcaacact

SEQ ID NO: 220390 - DNA, 120 bp, Artificial Sequence
  ENSG00000117114_34 (sequence is synthesized)
taatcaaggacattcactgaacaatgccagggatacaagtgccatggatactctaccgctaaatggtaattttaacaacagctactcgctgcacaagggtgactataatgacagcgtgca

SEQ ID NO: 220391 - DNA, 120 bp, Artificial Sequence
  ENSG00000117114_35 (sequence is synthesized)
agttgtggactgtggactaagtctgaatgatactgcttttgagaaaatgatcatttcagaattagtgcacaacaacttacggggcagcagcaagactcacaacctcgagctcacgctacc

SEQ ID NO: 220392 - DNA, 120 bp, Artificial Sequence
  ENSG00000117114_36 (sequence is synthesized)
agtcaaacctgtgattggaggtagcagcagtgaagatgatgctattgtggcagatgcttcatctttaatgcacagcgacaacccagggctggagctccatcacaaagaactcgaggcacc

SEQ ID NO: 220393 - DNA, 120 bp, Artificial Sequence
  ENSG00000117114_37 (sequence is synthesized)
acttattcctcagcggactcactcccttctgtaccaaccccagaagaaagtgaagtccgagggaactgacagctatgtctcccaactgacagcagaggctgaagatcacctacagtcccc

SEQ ID NO: 220394 - DNA, 120 bp, Artificial Sequence
  ENSG00000117114_38 (sequence is synthesized)
caacagagactctctttatacaagcatgcccaatcttagagactctccctatccggagagcagccctgacatggaagaagacctctctccctccaggaggagtgagaatgaggacattta

SEQ ID NO: 220395 - DNA, 120 bp, Artificial Sequence
  ENSG00000117114_39 (sequence is synthesized)
ctataaaagcatgccaaatcttggagctggccatcagcttcagatgtgctaccagatcagcaggggcaatagtgatggttatataatccccattaacaaagaagggtgtattccagaagg

SEQ ID NO: 220396 - DNA, 120 bp, Artificial Sequence
  ENSG00000117114_40 (sequence is synthesized)
agatgttagagaaggacaaatgcagctggttacaagtctttaatcatacagctaaggaattccaagggccacatgcgagtattaataaataaagacaccattggcctgacgcagctccct

SEQ ID NO: 220397 - DNA, 120 bp, Artificial Sequence
  ENSG00000117114_41 (sequence is synthesized)
caaactctgcttgaagagatgactcttgacctgtggttctctggtgtaaaaaagatgactgaaccttgcagttctgtgaatttttataaaacatacaaaaactttgtatatacacagagt

SEQ ID NO: 220398 - DNA, 120 bp, Artificial Sequence
  ENSG00000117114_42 (sequence is synthesized)
atactaaagtgaattatttgttacaaagaaaagagatgccagccaggtattttaagattctgctgctgtttagagaaattgtgaaacaagcaaaacaaaactttccagccattttactgc

SEQ ID NO: 220399 - DNA, 120 bp, Artificial Sequence
  ENSG00000117114_43 (sequence is synthesized)
agcagtctgtgaactaaatttgtaaatatggctgcaccatttttgtaggcctgcattgtattatatacaagacgtaggctttaaaatcctgtgggacaaatttactgtaccttactattc

SEQ ID NO: 220400 - DNA, 120 bp, Artificial Sequence
  ENSG00000117114_44 (sequence is synthesized)
ctgacaagacttggaaaagcaggagagatattctgcatcagtttgcagttcactgcaaatcttttacattaaggcaaagattgaaaacatgcttaaccactagcaatcaagccacaggcc

SEQ ID NO: 220401 - DNA, 120 bp, Artificial Sequence
  ENSG00000117114_45 (sequence is synthesized)
ttatttcatatgtttcctcaactgtacaatgaactattctcatgaaaaatggctaaagaaattatattttgttctattgctagggtaaaataaatacatttgtgtccaactgaaatataa

SEQ ID NO: 220402 - DNA, 120 bp, Artificial Sequence
  ENSG00000117114_46 (sequence is synthesized)
ttgtcattaaaataattttaaagagtgaagaaaatattgtgaaaagctcttggttgcacatgttatgaaatgttttttcttacactttgtcatggtaagttctactcattttcacttctt

SEQ ID NO: 220403 - DNA, 120 bp, Artificial Sequence
  ENSG00000117114_47 (sequence is synthesized)
ttccactgtatacagtgttctgctttgacaaagttggtctttattacttacatttaaatttcttattgccaaaagaacgtgttttatggggagaaacaaactctttgaagccagttatgt

SEQ ID NO: 220404 - DNA, 120 bp, Artificial Sequence
  ENSG00000117114_48 (sequence is synthesized)
catgccttgcacaaaagtgatgaaatctagaaaagattgtgtgtcacccctgtttattcttgaacagagggcaaagagggcactgggcacttctcacaaactttctagtgaacaaaaggt

SEQ ID NO: 220405 - DNA, 120 bp, Artificial Sequence
  ENSG00000117114_49 (sequence is synthesized)
aataaaacataaatattactcttccatattccttctgcctatatttagtaattaatttattttatgataaagttctaatgaaatgtaaattgtttcagcaaaattctgcttttttttcat

SEQ ID NO: 220406 - DNA, 120 bp, Artificial Sequence
  ENSG00000117114_50 (sequence is synthesized)
agcaaaattctgcttttttttcatccctttgtgtaaacctgttaataatgagcccatcactaatatccagtgtaaagtttaacacggtttgacagtaaataaatgtgaattttttcaagt

SEQ ID NO: 220407 - DNA, 120 bp, Artificial Sequence
  ENSG00000117114_51 (sequence is synthesized)
cggcgaacagacgttctttctcctccatgcagttacacaaaaggagggctacggaaactaaaagtttcggggcctctggctcggtgcgtggagaaaagagaaaacctggagacgggatat

SEQ ID NO: 220408 - DNA, 120 bp, Artificial Sequence
  ENSG00000117114_52 (sequence is synthesized)
aatgactggcaattacctactaacaaaccctcttcttcgaccccacggcactaacaacccctataacacattgctcgctgaaacagttgtatgtaatgccccttcagctcctgtatttaa

SEQ ID NO: 220409 - DNA, 120 bp, Artificial Sequence
  ENSG00000117114_53 (sequence is synthesized)
gctctacatagcacccttgccaaaagggttcggaaatgacttccagcttcccacagtaataaaatggcactgtttggcatcttcgaggtaataaaagtgaattttttccattctagtaaa

SEQ ID NO: 220410 - DNA, 120 bp, Artificial Sequence
  ENSG00000117114_54 (sequence is synthesized)
gaaagaaaagaaagaaaacatggaggggaaggtgataggaagatggaggcagagattggagtgatgcgtctacaagtcaagggaaaccaaggattgctaacagctgtacaaacttaggag

SEQ ID NO: 220411 - DNA, 120 bp, Artificial Sequence
  ENSG00000117114_55 (sequence is synthesized)
caaacttaggagagagacatggaacagattttccatcgaagcctcctgaagaaacaaaacttacaacttgattttggatttcttgcctccatgactgtgagagaataaatttctgttgtt

SEQ ID NO: 220412 - DNA, 120 bp, Artificial Sequence
  ENSG00000117114_56 (sequence is synthesized)
agcctacgtagattcataagttacaagatcactgtttggcaatacgaggggatgtgtatctaaaatgacaaactgatcctggcacttgctacttattacagagcccaatgtttccaaagg

SEQ ID NO: 220413 - DNA, 120 bp, Artificial Sequence
  ENSG00000117114_57 (sequence is synthesized)
atataataacaggatatagagtatgtctacatgttatatcacattttaaagactctactagccagtctagtggacagagatacttttctgattactatttcagtaattttaattgaactt

SEQ ID NO: 220414 - DNA, 120 bp, Artificial Sequence
  ENSG00000117114_58 (sequence is synthesized)
gattttgcaagttcaatttattttctccacggataagttttagtggaactttaattcttttcggttgtcttcactgttcatttaattagagagagagaagcaagtgtgttatattaatcc

SEQ ID NO: 220415 - DNA, 120 bp, Artificial Sequence
  ENSG00000117114_59 (sequence is synthesized)
taatcaaggactgacatcacatggtctgagagcccatcttcaagatttatatcatttagagctactcttaggccagatagcctgagcagacagacatgatgtgagttgtccaaagacatt

SEQ ID NO: 220416 - DNA, 120 bp, Artificial Sequence
  ENSG00000117114_60 (sequence is synthesized)
gagtaaatcatcatgacagataaatattacaattgtcactcatcagctactgaaaatcactttggttctaaaagcggtcaaaactaatgatagttttctaatggatacaggcaattgttg

SEQ ID NO: 220417 - DNA, 120 bp, Artificial Sequence
  ENSG00000117115_0 (sequence is synthesized)
aggctgctggagaaggcgcacctgctgcaggtgctcccggccgccccggaccagcgagcgcgggcactgcggcggggaggatgctgcgcgagcggaccgtgcggctgcagtacgggagcc

SEQ ID NO: 220418 - DNA, 120 bp, Artificial Sequence
  ENSG00000117115_1 (sequence is synthesized)
gcgtggaggcggtgtacgtgctgggcacctacctctggaccgatgtctacagcgcggccccagccggggcccaaaccttcagcctgaagcactcggaacacgtgtgggtggaggtggtgc

SEQ ID NO: 220419 - DNA, 120 bp, Artificial Sequence
  ENSG00000117115_2 (sequence is synthesized)
gtgatggggaggctgaggaggtggccaccaatggcaagcagcgctggcttctctcgcccagcaccaccctgcgggtcaccatgagccaggcgagcaccgaggccagcagtgacaaggtca

SEQ ID NO: 220420 - DNA, 120 bp, Artificial Sequence
  ENSG00000117115_3 (sequence is synthesized)
ccgtcaactactatgacgaggaagggagcattcccatcgaccaggcggggctcttcctcacagccattgagatctccctggatgtggacgcagaccgggatggtgtggtggagaagaaca

SEQ ID NO: 220421 - DNA, 120 bp, Artificial Sequence
  ENSG00000117115_4 (sequence is synthesized)
acccaaagaaggcatcctggacctggggccccgagggccagggggccatcctgctggtgaactgtgaccgagagacaccctggttgcccaaggaggactgccgtgatgagaaggtctaca

SEQ ID NO: 220422 - DNA, 120 bp, Artificial Sequence
  ENSG00000117115_5 (sequence is synthesized)
gcaaggaagatctcaaggacatgtcccagatgatcctgcggaccaaaggccccgaccgcctccccgccggatacgagatagttctgtacatttccatgtcagactcagacaaagtgggcg

SEQ ID NO: 220423 - DNA, 120 bp, Artificial Sequence
  ENSG00000117115_6 (sequence is synthesized)
tgttctacgtggagaacccgttcttcggccaacgctatatccacatcctgggccggcggaagctctaccatgtggtcaagtacacgggtggctccgcggagctgctgttcttcgtggaag

SEQ ID NO: 220424 - DNA, 120 bp, Artificial Sequence
  ENSG00000117115_7 (sequence is synthesized)
gcctctgtttccccgacgagggcttctcaggcctggtctccatccatgtcagcctgctggagtacatggcccaggacattcccctgactcccatcttcacggacaccgtgatattccgga

SEQ ID NO: 220425 - DNA, 120 bp, Artificial Sequence
  ENSG00000117115_8 (sequence is synthesized)
ttgctccgtggatcatgacccccaacatcctgcctcccgtgtcggtgtttgtgtgctgcatgaaggataattacctgttcctgaaagaggtgaagaaccttgtggagaaaaccaactgtg

SEQ ID NO: 220426 - DNA, 120 bp, Artificial Sequence
  ENSG00000117115_9 (sequence is synthesized)
agctgaaggtctgcttccagtacctaaaccgaggcgatcgctggatccaggatgaaattgagtttggctacatcgaggccccccataaaggcttccccgtggtgctggactctccccgag

SEQ ID NO: 220427 - DNA, 120 bp, Artificial Sequence
  ENSG00000117115_10 (sequence is synthesized)
atggaaacctaaaggacttccctgtgaaggagctcctgggcccagattttggctacgtgacccgggagcccctctttgagtctgtcaccagccttgactcatttggaaacctggaggtca

SEQ ID NO: 220428 - DNA, 120 bp, Artificial Sequence
  ENSG00000117115_11 (sequence is synthesized)
gtcccccagtgaccgtgaacggcaagacatacccgcttggccgcatcctcatcgggagcagctttcctctgtctggtggtcggaggatgaccaaggtggtgcgtgacttcctgaaggccc

SEQ ID NO: 220429 - DNA, 120 bp, Artificial Sequence
  ENSG00000117115_12 (sequence is synthesized)
agcaggtgcaggcgcccgtggagctctactcagactggctgactgtgggccacgtggatgagttcatgtcctttgtccccatccccggcacaaagaaattcctgctactcatggccagca

SEQ ID NO: 220430 - DNA, 120 bp, Artificial Sequence
  ENSG00000117115_13 (sequence is synthesized)
cctcggcctgctacaagctcttccgagagaagcagaaggacggccatggagaggccatcatgttcaaaggcttgggtgggatgagcagcaagcgaatcaccatcaacaagattctgtcca

SEQ ID NO: 220431 - DNA, 120 bp, Artificial Sequence
  ENSG00000117115_14 (sequence is synthesized)
acgagagccttgtgcaggagaacctgtacttccagcgctgcctagactggaaccgtgacatcctcaagaaggagctgggactgacagagcaggacatcattgacctgcccgctctgttca

SEQ ID NO: 220432 - DNA, 120 bp, Artificial Sequence
  ENSG00000117115_15 (sequence is synthesized)
agatggacgaggaccaccgtgccagagccttcttcccaaacatggtgaacatgatcgtgctggacaaggacctgggcatccccaagccattcgggccacaggttgaggaggaatgctgcc

SEQ ID NO: 220433 - DNA, 120 bp, Artificial Sequence
  ENSG00000117115_16 (sequence is synthesized)
tggagatgcacgtgcgtggcctcctggagcccctgggcctcgaatgcaccttcatcgacgacatttctgcctaccacaaatttctgggggaagtccactgtggcaccaacgtccgcagga

SEQ ID NO: 220434 - DNA, 120 bp, Artificial Sequence
  ENSG00000117115_17 (sequence is synthesized)
agcccttcaccttcaagtggtggcacatggtgccctgacctgccaggggccctggcgtttgcctccttcgcttagttctccagaccctccctcacacgcccagagccttctgctgacatg

SEQ ID NO: 220435 - DNA, 120 bp, Artificial Sequence
  ENSG00000117115_18 (sequence is synthesized)
gaatttggggtatctgtgccttgccctccctgagaggggcctcagtgtcctctgaagccatccccagtgagcctcgactctgtccctgctgaaaatagctgggccagtgtctctgtagcc

SEQ ID NO: 220436 - DNA, 120 bp, Artificial Sequence
  ENSG00000117115_19 (sequence is synthesized)
ctgacataaggaacagaacacaacaaaacacagcaaaccatgtgcccaaactgctccccaaagaattttgagtctctaatctgacactgaatgaggggagaagggaaggagattctggga

SEQ ID NO: 220437 - DNA, 120 bp, Artificial Sequence
  ENSG00000117115_20 (sequence is synthesized)
ttgccagttcttccagcagccatgctctgaaaatcaaggtagaatccatggaaagggaccccaggaccccgggaccctagacgtatcttgaactgccatcgtcatttcaaatacatctcc

SEQ ID NO: 220438 - DNA, 120 bp, Artificial Sequence
  ENSG00000117115_21 (sequence is synthesized)
ctcagggtttccaggtggccacccccaattattcattccttaccaacctctcaaatcctcttggctttctctctgcagtgtggacactgttggctagtcctccccactccctgagggtcc

SEQ ID NO: 220439 - DNA, 120 bp, Artificial Sequence
  ENSG00000117115_22 (sequence is synthesized)
agtaagttagcttagaaccttcctggaaacatttcatctgagcaggtttccccacgtgtgggatgctccttttgcctcatctgtctcagggatgcaggctcccccgcatgcatggggatt

SEQ ID NO: 220440 - DNA, 120 bp, Artificial Sequence
  ENSG00000117115_23 (sequence is synthesized)
tctccccagaccagcatacttgtgacctgagagttcaatgcgtaaagatgcccctggtcagccatatccatcttctcttgcctggtccttgattctctggccgctccctgaccttcctcc

SEQ ID NO: 220441 - DNA, 120 bp, Artificial Sequence
  ENSG00000117115_24 (sequence is synthesized)
ttccactgccttgactttcttcctttttattcctggtgccatctgtccaggcagctagacaagaacttgttcgccagcagccagattcaggccttcccaggggcataataagtgaccagc

SEQ ID NO: 220442 - DNA, 120 bp, Artificial Sequence
  ENSG00000117115_25 (sequence is synthesized)
ccctcctctccggacatcagatccaacacataaggaccctggcctaccctccagcccaacagccagttctgggtcagctgccaacttaggggtggtttgattatcccattgaaattcacc

SEQ ID NO: 220443 - DNA, 120 bp, Artificial Sequence
  ENSG00000117115_26 (sequence is synthesized)
agtgcctttgccaaagaccctctcatttggacatacccagattcattccctggctccaactgaaaagactcagtttcaatcgttaaaagttcctttagggccagaagaataaatgaatta

SEQ ID NO: 220444 - DNA, 120 bp, Artificial Sequence
  ENSG00000117115_27 (sequence is synthesized)
taatcccattttgaagaaccgatttataaccaatgaaaaggttataatgtaatttatattcttggaggaacaagattttcatttgggattatttccttcaaccattcaacaaacatttgt

SEQ ID NO: 220445 - DNA, 120 bp, Artificial Sequence
  ENSG00000117115_28 (sequence is synthesized)
tgtatgccactaagcgccaggcacggcgttgggctctgcaaacacagtggttagtagcagtctggacctggtccctactggcatggaacccatcactccccaacatgcaaagcccacatt

SEQ ID NO: 220446 - DNA, 120 bp, Artificial Sequence
  ENSG00000117115_29 (sequence is synthesized)
taaaggccagcctctgccccttcagtgatgcgctctttagaaatgccagtccactatattcagaaatccgcagggcacaaaacttccagcaagtcactgttgtggtgaaatgggcagtgg

SEQ ID NO: 220447 - DNA, 120 bp, Artificial Sequence
  ENSG00000117115_30 (sequence is synthesized)
gggtggggggtcttctttaaacaggcccccttcccatctacctagccagtacccatccaatgagtccccagagcctccagaagctgttgtctcctctctggggacagcagctcctgcctt

SEQ ID NO: 220448 - DNA, 120 bp, Artificial Sequence
  ENSG00000117115_31 (sequence is synthesized)
tggaggccaaagccccagatctctccagccccagagctgaaaacaccaagtgcctatttgagggtgtctgtctggagacttagagtttgtcatgtgtgtgtgtgtgtttggttaatgtgg

SEQ ID NO: 220449 - DNA, 120 bp, Artificial Sequence
  ENSG00000117115_32 (sequence is synthesized)
tctttcttttttttctttttttttttagtctacattagggggaagtgagcgcctcccatgtgcagacagtgtgtctttatagatttttctaaggctttccccaatgatgtcggtaatttc

SEQ ID NO: 220450 - DNA, 120 bp, Artificial Sequence
  ENSG00000117115_33 (sequence is synthesized)
gtcggtaatttctgatgtttctgaagttcccaggactcacacacccgttcccatctcacttgcccacccagtgtgacaaccctcggtgtggatatacccccgtggactcatggctcttcc

SEQ ID NO: 220451 - DNA, 120 bp, Artificial Sequence
  ENSG00000117115_34 (sequence is synthesized)
ccacccccactttctataaatgtaggcctagaatacgcttctctgttgcaaaactcagctaagttcctgcttccaccttgatgttgaaatatcttatgtaagagggcaggggatgtcgtg

SEQ ID NO: 220452 - DNA, 120 bp, Artificial Sequence
  ENSG00000117115_35 (sequence is synthesized)
aagatggcaagaagaacacagtttcaaatttctggaaaagagcctgtggtggagatctaaagatgtttagggaagagctcgactaaagaacaatgaaataaatggtccaaggggaagtca

SEQ ID NO: 220453 - DNA, 87 bp, Artificial Sequence
  ENSG00000117115_36 (sequence is synthesized)
aggatgtgcttcaagttaagttgttactcaacggaaaacatattcaggatgctgcttgctatttgtgtgttttgttttgtttgagac

SEQ ID NO: 220454 - DNA, 120 bp, Artificial Sequence
  ENSG00000117115_37 (sequence is synthesized)
acatgcttgggcaacatagcaagaccctgactccacaaaaaaaaatttaaaaattagcctggcatggtagtgcacacctgtagtcgtagctactcagaggctgaggcaggaggaccgctt

SEQ ID NO: 220455 - DNA, 65 bp, Artificial Sequence
  ENSG00000117115_38 (sequence is synthesized)
ggggctgatatcggtaagaaacctgcctgtgatgtgcagagactgcctatggacacctgtgctgc

SEQ ID NO: 220456 - DNA, 120 bp, Artificial Sequence
  ENSG00000117115_39 (sequence is synthesized)
cctgtgatgtgcagagactgcctatggacacctgtgctgccatcatcagtgtgaggggaggaggatgggggaccagggaatggggaacaagacagacgttcttcttcctttgtgctcttg

SEQ ID NO: 220457 - DNA, 120 bp, Artificial Sequence
  ENSG00000117115_40 (sequence is synthesized)
tgtttctcgagttttctgcccatgtgcacaaattgtcccctggattcgtctaacagttctccttggtgtccctgcaggatgaaattgagtttggctacatcgaggccccccataaaggct

SEQ ID NO: 220458 - DNA, 120 bp, Artificial Sequence
  ENSG00000117115_41 (sequence is synthesized)
aggtaagctagcctcccgaggctggagtgaatggggtagcagcaaaccaatatattacccgcccctgccagcagagggcaagagctagaggaactcgacagcataaaggaaggaggaagt

SEQ ID NO: 220459 - DNA, 120 bp, Artificial Sequence
  ENSG00000117115_42 (sequence is synthesized)
aggctgaagctggtttgcatgttgttgctgtggcaggtaaaattttaaccccataaatccaaaatgttagcattgcaacacataatcagcctaaaaattattaacgagagatttaaattc

SEQ ID NO: 220460 - DNA, 120 bp, Artificial Sequence
  ENSG00000117115_43 (sequence is synthesized)
ttttctcatactaaatcttcaaaatctggcaaagattttactcacatgacacacctaaattcagactagccacagctcaagtgttcaatagtcacataaggctagtggctattgtgttgg

SEQ ID NO: 220461 - DNA, 120 bp, Artificial Sequence
  ENSG00000117115_44 (sequence is synthesized)
tggtaatgctctagagagaaataggttatgcacctgtggcactggaaagaggttctttcattttcttatgggtacaacttcataccctggaaattctctgcaaattgtgtggctgcttgg

SEQ ID NO: 220462 - DNA, 120 bp, Artificial Sequence
  ENSG00000117115_45 (sequence is synthesized)
caacttggagatgtcctgtccaagtccacctttgactctgagccttgatctggtgacattgctgaggtagaggaaaggtgagaaatattcctctgaagcagagaacaccctccccgtcag

SEQ ID NO: 220463 - DNA, 120 bp, Artificial Sequence
  ENSG00000117115_46 (sequence is synthesized)
cctttgccactcggcatgggaggcctgaggcaatgagcaggcaaggcactgggtcctcagcgcagggcctccccgtgctccttgggtgccttcccactgctgactctgtccctctggact

SEQ ID NO: 220464 - DNA, 120 bp, Artificial Sequence
  ENSG00000117115_47 (sequence is synthesized)
ttcctctgtaagagaagccaggctggggctaggggctgtgggagtggggaagtcactgtttctcttttggggtggcctgggttgctcacacatggagcaagtggctgggggaattattcc

SEQ ID NO: 220465 - DNA, 120 bp, Artificial Sequence
  ENSG00000117115_48 (sequence is synthesized)
ctcccacgacttcctgttaagaggccgacactcttggaaagaaaatcaagctagcctttatatctttgtgtgatttaggatctaatatataactaaataaacaactcttttccccaagtg

SEQ ID NO: 220466 - DNA, 120 bp, Artificial Sequence
  ENSG00000117118_0 (sequence is synthesized)
acccgggaaaccggaagccgcctcccacttggttgctcgtacgcggctagtgggtcctcagtggatgtaggctgggcgccgcgatgttcgacgggacaccggcggagagcgacctcgggg

SEQ ID NO: 220467 - DNA, 120 bp, Artificial Sequence
  ENSG00000117118_1 (sequence is synthesized)
ttaaggggtggggctgacgtcaggagccaagatggcggcggtggtcgccctctccttgaggcgccggttgccggccacaacccttggcggagcctgcctgcaggcctcccgaggagccca

SEQ ID NO: 220468 - DNA, 120 bp, Artificial Sequence
  ENSG00000117118_2 (sequence is synthesized)
gacagctgcagccacagctccccgtatcaagaaatttgccatctatcgatgggacccagacaaggctggagacaaacctcatatgcagacttatgaagttgaccttaataaatgtggccc

SEQ ID NO: 220469 - DNA, 120 bp, Artificial Sequence
  ENSG00000117118_3 (sequence is synthesized)
catggtattggatgctttaatcaagattaagaatgaagttgactctactttgaccttccgaagatcatgcagagaaggcatctgtggctcttgtgcaatgaacatcaatggaggcaacac

SEQ ID NO: 220470 - DNA, 120 bp, Artificial Sequence
  ENSG00000117118_4 (sequence is synthesized)
gtgataaaggatcttgttcccgatttgagcaacttctatgcacagtacaaatccattgagccttatttgaagaagaaggatgaatctcaggaaggcaagcagcagtatctgcagtccata

SEQ ID NO: 220471 - DNA, 120 bp, Artificial Sequence
  ENSG00000117118_5 (sequence is synthesized)
gaagagcgtgagaaactggacgggctctacgagtgcattctctgtgcctgctgtagcaccagctgccccagctactggtggaacggagacaaatatctggggcctgcagttcttatgcag

SEQ ID NO: 220472 - DNA, 120 bp, Artificial Sequence
  ENSG00000117118_6 (sequence is synthesized)
gcctatcgctggatgattgactccagagatgacttcacagaggagcgcctggccaagctgcaggacccattctctctataccgctgccacaccatcatgaactgcacaaggacctgtcct

SEQ ID NO: 220473 - DNA, 120 bp, Artificial Sequence
  ENSG00000117118_7 (sequence is synthesized)
aagggtctgaatccagggaaagctattgcagagatcaagaaaatgatggcaacctataaggagaagaaagcttcagtttaactgtttccatgctaaacatgatttataaccagctcagag

SEQ ID NO: 220474 - DNA, 120 bp, Artificial Sequence
  ENSG00000117118_8 (sequence is synthesized)
agagctgaacataatttatatctaatttgagttcctttaaagatcttggttttccatgaatacagcatgtataataaaaattttaagaaataaatgttattctactttattaacaaaaaa

SEQ ID NO: 220475 - DNA, 120 bp, Artificial Sequence
  ENSG00000117118_9 (sequence is synthesized)
ataggtcatttttgtaattccaggcaaggtctttgcagggcctcctgagggcaacagaaaatagaagagccccaaggcctccccttccttgtgggaatgtacatgtatacccacaaaagc

SEQ ID NO: 220476 - DNA, 120 bp, Artificial Sequence
  ENSG00000117118_10 (sequence is synthesized)
cacctcaaaagaattcagtaatgagcttggtgtgttacctgtgggtaacattcaggttcaggttctgaattctttttatgcttatagtctgaccactgaaccacaattctgcctgcctcc

SEQ ID NO: 220477 - DNA, 120 bp, Artificial Sequence
  ENSG00000117118_11 (sequence is synthesized)
ggtgcaagttctggtttctgagtttactttccttcaggagcattctatcctgtggttactgcatctggcggtccctgtgagctgctccacgcttcaaggcctagctaggacctgctggct

SEQ ID NO: 220478 - DNA, 120 bp, Artificial Sequence
  ENSG00000117118_12 (sequence is synthesized)
ggcaccttccatgctgctgagctcttttattaagggagcagtggagagtttctgtctggcacttatgcttgtccagcaggggagatgtgtgagtctccctcagctcccagcatgacatgt

SEQ ID NO: 220479 - DNA, 120 bp, Artificial Sequence
  ENSG00000117118_13 (sequence is synthesized)
ccttggtagctgtgttctggattggctggtacagtgtctccctcagcatgtggttacttgtgctgctggtgccacatgagcccatttgaggcagtgtgcagactaacattttctacatga

SEQ ID NO: 220480 - DNA, 120 bp, Artificial Sequence
  ENSG00000117118_14 (sequence is synthesized)
tataagctgggtaggaagctattgagcaatgtgaaataattaggagatgatacccagtgtgtataattaagcacccgggtaccaggtgcagtatggatcaaaggtttgcagggaccatta

SEQ ID NO: 220481 - DNA, 120 bp, Artificial Sequence
  ENSG00000117118_15 (sequence is synthesized)
atcaagtgaagctacaagtgttgggaacctttccttgaaagatggacaagaattaaagagtatggagatgaggcatctaagctgagtgaattccctttcctctgcactcccagagctttg

SEQ ID NO: 220482 - DNA, 120 bp, Artificial Sequence
  ENSG00000117122_0 (sequence is synthesized)
ggactcggagcgggcggcggagtgacccggacagctgtcctctctgacaccaccccggcctgcctctttgttgccatgagagctgcctacctcttcctgctattcctgcctgcaggcttg

SEQ ID NO: 220483 - DNA, 120 bp, Artificial Sequence
  ENSG00000117122_1 (sequence is synthesized)
ctggctcagggccagtatgacctggacccgctgccgccgttccctgaccacgtccagtacacccactatagcgaccagatcgacaacccagactactatgattatcaagaggtgactcct

SEQ ID NO: 220484 - DNA, 120 bp, Artificial Sequence
  ENSG00000117122_2 (sequence is synthesized)
cggccctccgaggaacagttccagttccagtcccagcagcaagtccaacaggaagtcatcccagccccaaccccagaaccaggaaatgcagagctggagcccacagagcctgggcctctt

SEQ ID NO: 220485 - DNA, 120 bp, Artificial Sequence
  ENSG00000117122_3 (sequence is synthesized)
gactgccgtgaggaacagtacccgtgcacccgcctctactccatacacaggccttgcaaacagtgtctcaacgaggtctgcttctacagcctccgccgtgtgtacgtcattaacaaggag

SEQ ID NO: 220486 - DNA, 120 bp, Artificial Sequence
  ENSG00000117122_4 (sequence is synthesized)
ccagcagcggcctgtgccaatccgtggcggcctcctgtgccaggagctgtgggagctgctagggtggtgctggcatcctgagtcctggccctcctgggatctggggccctcgggccctgc

SEQ ID NO: 220487 - DNA, 120 bp, Artificial Sequence
  ENSG00000117122_5 (sequence is synthesized)
ctgacctggtgcttttttccccatccccatgttccttttattctgtaaaaagttagtggactgcagccctgggggttgcaggctgcggtgcctcaggcccctccttcagcctgtggccac

SEQ ID NO: 220488 - DNA, 120 bp, Artificial Sequence
  ENSG00000117122_6 (sequence is synthesized)
ctctggggcacaatgggggctccccactgcccagtctgcccctcgggttgggggagtatcccaggcctctctgtgggacctgggcccctgacgggccttctcagcccgttttgaggacag

SEQ ID NO: 220489 - DNA, 120 bp, Artificial Sequence
  ENSG00000117122_7 (sequence is synthesized)
acagtcccccgaggtaggctacatccccccaccccagctggtctgcttggatttcctacagcccccgtgggcatggaccacctttattttatacaaaattaaaaacaagtttttacaaaa

SEQ ID NO: 220490 - DNA, 120 bp, Artificial Sequence
  ENSG00000117122_8 (sequence is synthesized)
cggactcggagcgggcggcggagtgacccggacagctgtcctctctgacaccaccccggcctgcctctttgttgccatgagagctgcctacctcttcctgctattcctgcctggtaagtg

SEQ ID NO: 220491 - DNA, 120 bp, Artificial Sequence
  ENSG00000117122_9 (sequence is synthesized)
gctcctggggcagggggtagctcctcttatgtggggctgaggagtagggttagtagggggaattcatagtgagcctttgtcacgacttatgaccagaactcagctccccagctcccaggg

SEQ ID NO: 220492 - DNA, 120 bp, Artificial Sequence
  ENSG00000117122_10 (sequence is synthesized)
ccttctgcctgcttggaccacagactggaccagccaaccctggcagcatctggaggcagctcctggcccttcccccagccttccacagcagcaggcaggcagggttctggagggcacgtc

SEQ ID NO: 220493 - DNA, 120 bp, Artificial Sequence
  ENSG00000117122_11 (sequence is synthesized)
ccaggcacaaggactccgtgggcacaaggcacaaggcctctctgggagccgatgtgcaggtgcaggggcacccaaggcagggagtccggatgcttgagttctagatccattcagggccct

SEQ ID NO: 220494 - DNA, 120 bp, Artificial Sequence
  ENSG00000117122_12 (sequence is synthesized)
tctgctctatacagtcctgaccttgtgggggtccctactggccaaatgaagagaatcaatgaggaccacaaaagtcctagcagggccaacattcattcattcagcagcgatgtgttgagt

SEQ ID NO: 220495 - DNA, 120 bp, Artificial Sequence
  ENSG00000117122_13 (sequence is synthesized)
ccctaccacgtgccaagtgctgggctaggccctggggattcagcgatgaaccaggcagacacatcgttgctcctcatcatgctgccagtccagggaagggagacaaataggaaacaagca

SEQ ID NO: 220496 - DNA, 120 bp, Artificial Sequence
  ENSG00000117122_14 (sequence is synthesized)
gacatgagaaactccagcatgtgctgagtgctggacagaaatcagcaggagggctggtgggctggaggtggggcggcatcttggcacagctgaaattccagggaagacctgaaggagctg

SEQ ID NO: 220497 - DNA, 120 bp, Artificial Sequence
  ENSG00000117122_15 (sequence is synthesized)
agcaggcctcacaggcccagggagtgtcaggtgcaaaggctctgagggaggcaggagcatgtggagtcctaggagcagccaggaggccagcaacaggaaggggcagggtaaggtcaggga

SEQ ID NO: 220498 - DNA, 120 bp, Artificial Sequence
  ENSG00000117122_16 (sequence is synthesized)
ggtgacccatgaccagggtggggaagggtctttaccatcgaagaagagtctggatcctctaggaatctgcttgtggggtcctaggctcttatgggcctgaccttgtgacccccgcctcca

SEQ ID NO: 220499 - DNA, 120 bp, Artificial Sequence
  ENSG00000117122_17 (sequence is synthesized)
cagtatgacctggacccgctgccgccgttccctgaccacgtccagtacacccactatagcgaccagatcggtaagggccttgccgggtcaccgaggcctggctgctcagatgtgcctggc

SEQ ID NO: 220500 - DNA, 120 bp, Artificial Sequence
  ENSG00000117122_18 (sequence is synthesized)
tcagccagggaccgcactggacacgctgatgggaactctgggggttggtccctggctcaggagggaacttgtttgccccaggggctgggggattagccttactcccaccaattccacttt

SEQ ID NO: 220501 - DNA, 120 bp, Artificial Sequence
  ENSG00000117122_19 (sequence is synthesized)
gcccttgcccatgtgggctcttggcagtgtgggcagtatgactgccgtaggctggcatcaccaggccccccaggcagctccaggaggtcccacctgtccccagtgtgcctggctggaggc

SEQ ID NO: 220502 - DNA, 120 bp, Artificial Sequence
  ENSG00000117122_20 (sequence is synthesized)
taaattggcagcctaggaaggcccctgacctcacagatactgggaggggcagggagtgtgctgggggcttcctgccagccagagagactgagtggtgcacatgtggaggcgaggaagggc

SEQ ID NO: 220503 - DNA, 120 bp, Artificial Sequence
  ENSG00000117133_0 (sequence is synthesized)
caaaggagccaagaccatggcgaaagccggggataagagcagcagcagcgggaagaaaagtctaaaacggaaagccgctgccgaagaacttcaggaggctgcaggcgctggggatggggc

SEQ ID NO: 220504 - DNA, 120 bp, Artificial Sequence
  ENSG00000117133_1 (sequence is synthesized)
gacggaaaacggggtccaacccccgaaagcggctgcctttccgccaggctttagcatttcggagattaaaaacaaacagcggcgacacttaatgttcacgcggtggaaacagcagcagcg

SEQ ID NO: 220505 - DNA, 120 bp, Artificial Sequence
  ENSG00000117133_2 (sequence is synthesized)
gaaggaaaagttggcagctaagaaaaaacttaaaaaagaaagagaggctcttggcgataaggctccaccaaagcctgtacccaagaccattgacaaccagcgagtgtatgatgaaaccac

SEQ ID NO: 220506 - DNA, 120 bp, Artificial Sequence
  ENSG00000117133_3 (sequence is synthesized)
agtagaccctaatgatgaagaggtcgcttatgatgaagctacagatgaatttgcttcttacttcaacaaacagacttctcccaagattctcatcacaacatcagatagacctcatgggag

SEQ ID NO: 220507 - DNA, 120 bp, Artificial Sequence
  ENSG00000117133_4 (sequence is synthesized)
aacagtacgactctgtgaacagctctccacagttataccaaactcacatgtttattacagaagaggactggctctgaaaaaaattattccacagtgcatcgcaagagatttcacagacct

SEQ ID NO: 220508 - DNA, 120 bp, Artificial Sequence
  ENSG00000117133_5 (sequence is synthesized)
gattgttattaatgaagatcgtaaaaccccaaatggacttattttgagtcacttgccaaatggcccaactgctcattttaaaatgagcagtgttcgtcttcgtaaagaaattaagagaag

SEQ ID NO: 220509 - DNA, 120 bp, Artificial Sequence
  ENSG00000117133_6 (sequence is synthesized)
aggcaaggaccccacagaacacatacctgaaataattctgaataattttacaacacggctgggtcattcaattggacgtatgtttgcatctctctttcctcataatcctcaatttatcgg

SEQ ID NO: 220510 - DNA, 120 bp, Artificial Sequence
  ENSG00000117133_7 (sequence is synthesized)
aaggcaggttgccacattccacaatcaacgggattacatattcttcagatttcacagatacatattcaggagtgaaaagaaagtgggaattcaggaacttggaccacgttttaccttaaa

SEQ ID NO: 220511 - DNA, 120 bp, Artificial Sequence
  ENSG00000117133_8 (sequence is synthesized)
gattctaaatatggagagtatgaatgggtccataagccccgggaaatggatacaagtagaagaaaattccatttataaagtactgagagaatgatattggattttgctgaacaggcctat

SEQ ID NO: 220512 - DNA, 120 bp, Artificial Sequence
  ENSG00000117133_9 (sequence is synthesized)
cttgaactttggtaaattatttttgacagaatactcttttcaaaatggcatttgctgatttcataaacctttcacgtctggacgaattaccaaatgccatgaattgccactgtgtgttta

SEQ ID NO: 220513 - DNA, 120 bp, Artificial Sequence
  ENSG00000117133_10 (sequence is synthesized)
tgtagaaaatacaaataaaagttattttgatggcttaggtttccttaaacttagttctcttgtttttgggtaactgtgaataattaagttggaatcaagattcagattaactttcctatt

SEQ ID NO: 220514 - DNA, 120 bp, Artificial Sequence
  ENSG00000117133_11 (sequence is synthesized)
tgcatagaacacatgagaggaataaaatggttggtaaatattggctaacccttgatttttataccagattaaccttggattcccagtgtctggcacagttttaatagcttaaatggaggc

SEQ ID NO: 220515 - DNA, 120 bp, Artificial Sequence
  ENSG00000117133_12 (sequence is synthesized)
caggtttctggatgttttaacattctcttaagccttcagaagggtaaaaaatttaaagcaaaatgatctaccagggtttaaagcaaagttgcaaattactgaagctaatctttgcttcct

SEQ ID NO: 220516 - DNA, 120 bp, Artificial Sequence
  ENSG00000117133_13 (sequence is synthesized)
gattttgaggtttttggttttttgtgcccacgttgtggggagctcttttttacctcattacatggtgctgtagtactccattcaggcactgaaacaaagttaaccctataagtaactcat

SEQ ID NO: 220517 - DNA, 120 bp, Artificial Sequence
  ENSG00000117133_14 (sequence is synthesized)
ggatggaaacccgtagaacttaacagcctcctcctgaccttaaaagaataaaggttcacagtttacctttaattccctagcagtcttgccagatgtatggcataaagtcatgtgagaaga

SEQ ID NO: 220518 - DNA, 120 bp, Artificial Sequence
  ENSG00000117133_15 (sequence is synthesized)
gtaggtggaaaaaactgtacaaacttaaccccttcaggtgttcagaacagattaatataccatgtatttaataccaataataatgcaaaataaaagtttcatactaagttttattgtatg

SEQ ID NO: 220519 - DNA, 120 bp, Artificial Sequence
  ENSG00000117133_16 (sequence is synthesized)
tgcataatggactgattcagctaaaatgttggcatattatcttattatttggtgaagactatttcataattgaatttcccaataatgctatagaaaaattctataaaaattctaggtaaa

SEQ ID NO: 220520 - DNA, 120 bp, Artificial Sequence
  ENSG00000117133_17 (sequence is synthesized)
aattctataaaaattctaggtaaacttttacatttgtcatataatccctgaatggtattttggagggttttgtttttgtttttgtttttgattttgttgagacagagtcttgctctgtcg

SEQ ID NO: 220521 - DNA, 120 bp, Artificial Sequence
  ENSG00000117139_0 (sequence is synthesized)
ttcagtctgttgaaggataccccgttgtgtatttctacctgtatgtaccagagacacctcaaattcaaaatgtccagaaatgaacacagtatcttcttcccttgagtaactcgccttctg

SEQ ID NO: 220522 - DNA, 120 bp, Artificial Sequence
  ENSG00000117139_1 (sequence is synthesized)
tatataattggggtgaatgttccagcaatgccaacgggctagcatctactcaggcaggtacgccagacatctgaatcttaatacctcgtcgtcccccctcaatctgtcactatgtcctaa

SEQ ID NO: 220523 - DNA, 120 bp, Artificial Sequence
  ENSG00000117139_2 (sequence is synthesized)
ttttatttcctacctttgcatcccttcctcataattatcagcaccactgccttaatttagatcctatcattccttgtctggattatttcaagtctttcgcccctctcaagtctgacctcg

SEQ ID NO: 220524 - DNA, 120 bp, Artificial Sequence
  ENSG00000117139_3 (sequence is synthesized)
tcatagactgtttgtggatgattattttccctgcaacatctccacctcccaatagtctccatcacttattagccatgtgaattatggcaaattgcttaacctacctatgcctcactttcc

SEQ ID NO: 220525 - DNA, 120 bp, Artificial Sequence
  ENSG00000117139_4 (sequence is synthesized)
ttattgtaaagtggaaataagagtacctatctcatagggttgtgtgattaatcatgcgatgcaattagaacagtgcctaggatatgaaagtgccccaaaatgttacgttattattattat

SEQ ID NO: 220526 - DNA, 120 bp, Artificial Sequence
  ENSG00000117139_5 (sequence is synthesized)
tactactattgccttctcatgaacatgctatgtgtatgttcaagctgttatctctactggaaaatccttctccgtttccaatactctttccaaaaccccctcctgggttttactgcacct

SEQ ID NO: 220527 - DNA, 120 bp, Artificial Sequence
  ENSG00000117139_6 (sequence is synthesized)
accattgtgtactgacgtgattgaatgattggcttatgggactgatcctttctaccagacttaacttcttcagggcaggaactctgatacatagtaaatggtcaataaaagttggctcaa

SEQ ID NO: 220528 - DNA, 120 bp, Artificial Sequence
  ENSG00000117139_7 (sequence is synthesized)
ctgaaaccctaaggataaactccatccacagcggaaggcgcggccccgcccgattcgggggcggggcggggagccgcgcgcggagggtgggtcgatgggggtggggtgggactctttttc

SEQ ID NO: 220529 - DNA, 120 bp, Artificial Sequence
  ENSG00000117139_8 (sequence is synthesized)
ctcgccgtggcggcggaggcgcacggcgtgggcttgcggcgagacgtcgtcgtcggaggctgaaaaagcccaaggtgctgccgttgcccgtacaactcggacttgctgttgctcgagccg

SEQ ID NO: 220530 - DNA, 120 bp, Artificial Sequence
  ENSG00000117139_9 (sequence is synthesized)
cgtctgcacgggtctcggaccgagcggagctcgcagcctcggtcccggagcccaccttcgcctcgcccttgcccagcctgcggtgatggaggcggccaccacactgcacccaggcccgcg

SEQ ID NO: 220531 - DNA, 120 bp, Artificial Sequence
  ENSG00000117139_10 (sequence is synthesized)
cccggcgctgcccctcgggggcccgggcccgctgggcgagttcctgcctccacccgagtgcccggtcttcgaacccagctgggaagagttcgcggaccccttcgctttcatccacaagat

SEQ ID NO: 220532 - DNA, 120 bp, Artificial Sequence
  ENSG00000117139_11 (sequence is synthesized)
ccggcccatagccgagcagactggcatctgtaaggtgcggccgccgccggattggcagccaccatttgcatgtgatgttgataaacttcattttacgccacgtatccagagactgaatga

SEQ ID NO: 220533 - DNA, 120 bp, Artificial Sequence
  ENSG00000117139_12 (sequence is synthesized)
attggaggcccaaactcgtgtaaaattgaatttcttggaccagattgcaaagtactgggagttacagggaagtactctgaaaattccacatgtggagaggaagatcttggacttatttca

SEQ ID NO: 220534 - DNA, 120 bp, Artificial Sequence
  ENSG00000117139_13 (sequence is synthesized)
gcttaataagttagttgcagaagaaggtggatttgcagttgtttgcaaggatagaaaatggaccaaaattgctaccaagatggggtttgctcctggcaaagcagtgggctcacatatcag

SEQ ID NO: 220535 - DNA, 120 bp, Artificial Sequence
  ENSG00000117139_14 (sequence is synthesized)
agggcattatgaacgaattctcaacccctacaacttattcctgtccggagacagcctaaggtgtttgcagaagccaaacctgaccacagacactaaggacaaggagtacaaaccccatga

SEQ ID NO: 220536 - DNA, 120 bp, Artificial Sequence
  ENSG00000117139_15 (sequence is synthesized)
tattccccagaggcagtctgtgcagccttcggaaacgtgccccccagcccgacgagcaaaacgcatgagagcagaggccatgaatattaaaatagaacccgaggagacaacggaagccag

SEQ ID NO: 220537 - DNA, 120 bp, Artificial Sequence
  ENSG00000117139_16 (sequence is synthesized)
aactcataatctgagacgtcgaatgggttgtccaactccaaaatgtgaaaatgagaaagaaatgaagagtagcatcaagcaagaacctattgagaggaaagattatattgtagaaaatga

SEQ ID NO: 220538 - DNA, 120 bp, Artificial Sequence
  ENSG00000117139_17 (sequence is synthesized)
gaaggaaaagcccaagagtcgatctaaaaaagccaccaatgctgtggacctgtatgtctgtcttttatgtggcagtggcaatgatgaagaccggctactgttgtgtgatggctgtgatga

SEQ ID NO: 220539 - DNA, 120 bp, Artificial Sequence
  ENSG00000117139_18 (sequence is synthesized)
cagttaccataccttttgcttgatcccacctctccatgatgttcccaagggagactggaggtgtcctaagtgtttggctcaggaatgtagtaagccacaagaagcatttggctttgaaca

SEQ ID NO: 220540 - DNA, 120 bp, Artificial Sequence
  ENSG00000117139_19 (sequence is synthesized)
agcagccagggactataccctccgtacttttggggaaatggcagatgcgttcaaatctgattacttcaacatgccagtccatatggtccccacagagcttgttgagaaagaattttggag

SEQ ID NO: 220541 - DNA, 120 bp, Artificial Sequence
  ENSG00000117139_20 (sequence is synthesized)
actagtaagcactattgaggaggatgtcacagtggaatatggagctgacattgcctcaaaggaatttggcagtggctttcctgtccgagatgggaaaatcaaactctcacctgaggaaga

SEQ ID NO: 220542 - DNA, 120 bp, Artificial Sequence
  ENSG00000117139_21 (sequence is synthesized)
ggagtatcttgatagtggctggaatttgaacaacatgccagtgatggagcagtctgtccttgcacatattactgctgatatatgtggcatgaaacttccttggttgtatgtgggaatgtg

SEQ ID NO: 220543 - DNA, 120 bp, Artificial Sequence
  ENSG00000117139_22 (sequence is synthesized)
cttttcttcattctgttggcacattgaagaccactggagctattcaattaactacttgcactggggtgagccaaaaacctggtatggagtcccagggtatgctgctgagcagctagaaaa

SEQ ID NO: 220544 - DNA, 120 bp, Artificial Sequence
  ENSG00000117139_23 (sequence is synthesized)
tgtaatgaagaaactagctccagaactctttgtgtcccagccggatctcctccatcagcttgtgaccatcatgaaccccaataccctgatgactcatgaagtgcctgtttaccgaactaa

SEQ ID NO: 220545 - DNA, 120 bp, Artificial Sequence
  ENSG00000117139_24 (sequence is synthesized)
tcagtgtgctggggagtttgtgattacatttccaagagcctaccacagtggttttaaccagggttttaattttgctgaggctgttaacttctgcactgttgattggctgccattaggccg

SEQ ID NO: 220546 - DNA, 120 bp, Artificial Sequence
  ENSG00000117139_25 (sequence is synthesized)
acagtgtgtggagcattatcgcttgcttcatcgatattgtgtgttttcccacgatgagatgatctgcaagatggcttccaaggctgatgtattagatgttgtagtggcttcaactgttca

SEQ ID NO: 220547 - DNA, 120 bp, Artificial Sequence
  ENSG00000117139_26 (sequence is synthesized)
gaaagacatggccattatgattgaggatgagaaagctttaagagaaactgtccgtaaattgggagtgattgattcggaaagaatggattttgagctgttgccagatgatgaacgtcagtg

SEQ ID NO: 220548 - DNA, 120 bp, Artificial Sequence
  ENSG00000117139_27 (sequence is synthesized)
tgtaaaatgcaaaactacatgcttcatgtctgccatctcctgttcttgtaaacctggccttcttgtttgcctgcatcatgtaaaagaattgtgttcctgtcctccttacaaatataaatt

SEQ ID NO: 220549 - DNA, 120 bp, Artificial Sequence
  ENSG00000117139_28 (sequence is synthesized)
gcggtataggtacacgctggatgatctctaccctatgatgaatgcattgaagcttcgagcagaatcttacaacgaatgggccttgaatgtgaatgaagctttggaggcaaagatcaacaa

SEQ ID NO: 220550 - DNA, 120 bp, Artificial Sequence
  ENSG00000117139_29 (sequence is synthesized)
gaagaaaagccttgtcagcttcaaggctttaattgaagaatctgaaatgaagaaattcccagacaatgatcttttgcgacaccttcgcctagtcacacaggatgcagagaagtgtgcctc

SEQ ID NO: 220551 - DNA, 120 bp, Artificial Sequence
  ENSG00000117139_30 (sequence is synthesized)
tgttgcgcagcagttgcttaatggcaaaaggcaaactagatatcgatctggtggagggaaatcccaaaatcagttgacagtgaatgagctccggcagtttgtaacacagctgtatgctct

SEQ ID NO: 220552 - DNA, 120 bp, Artificial Sequence
  ENSG00000117139_31 (sequence is synthesized)
tccatgtgtcctcagtcagacaccattactaaaggatctcttgaatcgtgtagaagattttcaacagcatagtcagaaactactctctgaggaaacgcctagtgctgcggagctgcagga

SEQ ID NO: 220553 - DNA, 120 bp, Artificial Sequence
  ENSG00000117139_32 (sequence is synthesized)
cttgctagatgtcagctttgaatttgatgttgaacttccacagcttgctgagatgcgtatccgtttggaacaagcccgttggctagaagaggtgcagcaagcttgcctagaccccagctc

SEQ ID NO: 220554 - DNA, 120 bp, Artificial Sequence
  ENSG00000117139_33 (sequence is synthesized)
ccttactttagatgatatgagacgtctcatagacctaggggtagggctggccccgtattcagcagtggagaaagctatggcccggctgcaggaactgctcacagtgtcagagcactggga

SEQ ID NO: 220555 - DNA, 120 bp, Artificial Sequence
  ENSG00000117139_34 (sequence is synthesized)
cgacaaagccaagagtctcctcaaggccaggccacgacattcattgaatagccttgctacggcagtaaaggaaatcgaagagatccctgcatatctgcccaatggtgcggctctgaaaga

SEQ ID NO: 220556 - DNA, 120 bp, Artificial Sequence
  ENSG00000117139_35 (sequence is synthesized)
ctcagtgcagagagccagagactggcttcaggatgtagagggcctgcaggctggaggacgtgtgccagtgttagacacactcatagaacttgttacacgaggccgatctatccccgtaca

SEQ ID NO: 220557 - DNA, 120 bp, Artificial Sequence
  ENSG00000117139_36 (sequence is synthesized)
tctgaattctttgccaagactggaaaccctagtagctgaggttcaggcttggaaagaatgtgctgttaatacattcttgactgagaattctccatattctctcttagaggtgctgtgtcc

SEQ ID NO: 220558 - DNA, 120 bp, Artificial Sequence
  ENSG00000117139_37 (sequence is synthesized)
tcgatgtgatattggccttttgggattgaaaaggaagcagagaaagttaaaggagcccttgccaaatggaaagaaaaaaagcaccaaattagagagtctgagtgacctggagagagcttt

SEQ ID NO: 220559 - DNA, 120 bp, Artificial Sequence
  ENSG00000117139_38 (sequence is synthesized)
aactgaaagcaaggagactgcttcagctatggcaactcttggggaagctcgcctaagggaaatggaagccttgcagtctctcagactcgccaatgaagggaaattgctgtcgcctctcca

SEQ ID NO: 220560 - DNA, 120 bp, Artificial Sequence
  ENSG00000117139_39 (sequence is synthesized)
agatgtggatataaaaatctgcctatgtcagaaggccccagctgcccctatgattcaatgtgaactctgcagggatgctttccacaccagttgtgtggcggtacccagtatttcacaggg

SEQ ID NO: 220561 - DNA, 120 bp, Artificial Sequence
  ENSG00000117139_40 (sequence is synthesized)
cctgcgaatctggctttgtccccattgtcggaggtcagagaaacctccattagagaaaattctgcccctgctcgcctcccttcagcgtatccgagttcgccttcctgagggagatgcact

SEQ ID NO: 220562 - DNA, 120 bp, Artificial Sequence
  ENSG00000117139_41 (sequence is synthesized)
tcgatatatgattgaaagaaccgtgaactggcagcacagagcccagcaactgctttcgtcagggaatcttaaatttgtgcaagatcgagtgggctcaggactgttatatagcagatggca

SEQ ID NO: 220563 - DNA, 120 bp, Artificial Sequence
  ENSG00000117139_42 (sequence is synthesized)
agcctcagcaggacaggtgtcagacacaaacaaggtatctcaacctcctggcacaacatcattttctttgcctgatgactgggacaacagaacctcatatttgcactcccccttctcaac

SEQ ID NO: 220564 - DNA, 120 bp, Artificial Sequence
  ENSG00000117139_43 (sequence is synthesized)
ccatggtgttagtccagaagtgaatgaactattgatggaagcccagctgctccaggtatcccttcctgaaattcaggaactttaccagactttacttgcaaagccaagccctgctcagca

SEQ ID NO: 220565 - DNA, 120 bp, Artificial Sequence
  ENSG00000117139_44 (sequence is synthesized)
gactgaccgaagctcaccagtgagacccagcagtgagaagaatgactgttgccgagggaagcgagatggaattaacagtcttgagagaaaactgaagagacgcctggaaagagagggcct

SEQ ID NO: 220566 - DNA, 120 bp, Artificial Sequence
  ENSG00000117139_45 (sequence is synthesized)
ctccagtgagcggtgggaacgagttaagaaaatgcggacccccaaaaagaagaaaatcaaactgagccaccccaaggacatgaacaatttcaagttagagagagagcgtagctatgaatt

SEQ ID NO: 220567 - DNA, 120 bp, Artificial Sequence
  ENSG00000117139_46 (sequence is synthesized)
agttcgttctgctgaaactcattccctgccctcagacacatcctattccgaacaggaagactctgaggatgaagatgccatctgcccagctgtgagctgcctgcagccagaaggagatga

SEQ ID NO: 220568 - DNA, 120 bp, Artificial Sequence
  ENSG00000117139_47 (sequence is synthesized)
ggtggactgggtccagtgtgatggcagctgcaatcagtggtttcatcaggtctgtgttggtgtctccccagagatggcagagaaagaagactacatctgtgtgcgctgtactgtgaagga

SEQ ID NO: 220569 - DNA, 120 bp, Artificial Sequence
  ENSG00000117139_48 (sequence is synthesized)
cgcaccaagccgaaagtaaaaacacaaaaacagatacccccctacttaatgtaattcaggactccaaccaagaggatttcttcaaatctcagcaaagctacaggactggtactcaagcca

SEQ ID NO: 220570 - DNA, 120 bp, Artificial Sequence
  ENSG00000117139_49 (sequence is synthesized)
gcctgtaaacggtgctatttctattccttatgggatcatttttccaggactctttgaagaaaagaaaaaacaactaaaaaaatttttgacactttttgtattttttccttaagagctatt

SEQ ID NO: 220571 - DNA, 120 bp, Artificial Sequence
  ENSG00000117139_50 (sequence is synthesized)
tgtggttgttgaggtttgaaaagctgactgttttttttgcaggggttcccaccaatttggaaggcattgaagcttgcaccttttcatgtacagcattaaaattttacctctctctgggat

SEQ ID NO: 220572 - DNA, 120 bp, Artificial Sequence
  ENSG00000117139_51 (sequence is synthesized)
ttaccagcttaagagtccaactcacttccagtgcccaaaagggcacccaccagaaattccagtaaatcctcatttgaggaagctctcccttgtttactctgttaccacattggggaaatt

SEQ ID NO: 220573 - DNA, 120 bp, Artificial Sequence
  ENSG00000117139_52 (sequence is synthesized)
tttaagtttttcactttgggagtttttgtttgtttcttcttttcctttatccacttttcttcttcctggtagactaggtttatttatctgagcaataacttctatgttggtttcagtggc

SEQ ID NO: 220574 - DNA, 120 bp, Artificial Sequence
  ENSG00000117139_53 (sequence is synthesized)
tggaattaaaacaaaacaaaacaaacttccaaacagtgtgttggtgctttagcgattgattgatgtacagaacacaaatgtctagtttctagtgtcactgatgaactagtgatgtagaaa

SEQ ID NO: 220575 - DNA, 120 bp, Artificial Sequence
  ENSG00000117139_54 (sequence is synthesized)
agagacttctctgtaagtaattgccacagctgtattttggctttctccctgtcccttcctttctcccctattttttggtagcttgtatcaaatgttacagtttatattgtggaataaatc

SEQ ID NO: 220576 - DNA, 120 bp, Artificial Sequence
  ENSG00000117139_55 (sequence is synthesized)
cttcgtcctaacataacactaaatgctgattatttagagccattagagcacagcttcttctgcccctctactgttgcacagccagaaggggctgcttgcttttgcctctgcccaaccagg

SEQ ID NO: 220577 - DNA, 120 bp, Artificial Sequence
  ENSG00000117139_56 (sequence is synthesized)
ttgcagtagcagtggatgttagcctgcaaacaacattaggggattcttcttttgtgtcctgctctgtttggtgggccatatgcctacagccctcactaacaaagaacccctctgtcttca

SEQ ID NO: 220578 - DNA, 120 bp, Artificial Sequence
  ENSG00000117139_57 (sequence is synthesized)
aggactagaacctatctttaaagccgtgctcttttaaaataagctttctcagaatgttggcaaatcacttcaatcctcaaatcagtcttccttgtggaatgctgcctttattatatttga

SEQ ID NO: 220579 - DNA, 120 bp, Artificial Sequence
  ENSG00000117139_58 (sequence is synthesized)
attgacaggggaacttggtttagggttaagacgttggaaggaaatctaaggaaaattaatcctcacagaggtccgggtttagtatatgtcttgagaggagacttgtgaattcccagactc

SEQ ID NO: 220580 - DNA, 120 bp, Artificial Sequence
  ENSG00000117139_59 (sequence is synthesized)
tgcctcctggtttcctttctcatttctttctaactgtagctatcattactggctgtggatagcccatagctattttccttgcttttcttttttaaaggggtctgttctgcagtggagaag

SEQ ID NO: 220581 - DNA, 120 bp, Artificial Sequence
  ENSG00000117139_60 (sequence is synthesized)
acattctggtgaccagacttttgcttaccttttcctattctgttgccaatttttgttttccccacattctatagccataaacctgaagatgagtaaaactggtgggtctttaataaaaca

SEQ ID NO: 220582 - DNA, 120 bp, Artificial Sequence
  ENSG00000117139_61 (sequence is synthesized)
acaacaaaaacagcagtttgtgatatagcagaggtttaaatgtaccctccccttttatgcacttcaaataattaaatctctttaagaatgacttctagttgtctgcagttttctgcagtt

SEQ ID NO: 220583 - DNA, 120 bp, Artificial Sequence
  ENSG00000117139_62 (sequence is synthesized)
gttgtgatgtttctcttcgtctgatggtggttctggggccaatagagaagaatagtctccagagtacaatttggaatcatcgtggtttggccttgttagtattcaaattcttagaatccc

SEQ ID NO: 220584 - DNA, 120 bp, Artificial Sequence
  ENSG00000117139_63 (sequence is synthesized)
ctccatcacccccgactttgagataggatgccaactgtcccagtcctcaccttccattgagaaattaagcttaaaaggagaccctgctgctaatataaagccactgcctttagagagctt

SEQ ID NO: 220585 - DNA, 120 bp, Artificial Sequence
  ENSG00000117139_64 (sequence is synthesized)
ttgccatcttagtaagcacaacccctacccccatccccactagtttttcttcttcacctgtgggtggtggtacacagtccctgacaatagcatctttgaggaagtcagatctttgtatct

SEQ ID NO: 220586 - DNA, 120 bp, Artificial Sequence
  ENSG00000117139_65 (sequence is synthesized)
ctgagtgagttagaaaaggtaggcatgtgtgtatttgaaccactccctccctggatgagaaccactgatcattttatgtgtgatgatgctgaatttaaagagaatgtcagttgcccaaag

SEQ ID NO: 220587 - DNA, 120 bp, Artificial Sequence
  ENSG00000117139_66 (sequence is synthesized)
ctacactgtactactagtaaataacaaagcctgggttttatcttccagttttcctacagtattcctcctaccttgtacaccatcacactactaatgaacacagataacgtttactttcca

SEQ ID NO: 220588 - DNA, 120 bp, Artificial Sequence
  ENSG00000117139_67 (sequence is synthesized)
gtttatgcctttgttgtatccctaaaatgactacagactgatgtgatctaaaaaccatgtttcattgtgtgttagctgtgaagctggcctgtaccagagaaacctctgaacttgtagggg

SEQ ID NO: 220589 - DNA, 120 bp, Artificial Sequence
  ENSG00000117139_68 (sequence is synthesized)
aaaatgataaaatgcacatggaaactgacacttcagtttccatctcagtagtcctgcagctttgtgaggtgggagaggggaagggactgtgttaagttagagcctgaaccagaaggaggg

SEQ ID NO: 220590 - DNA, 120 bp, Artificial Sequence
  ENSG00000117139_69 (sequence is synthesized)
tcagtgggtaaagaaagaaagggtagatgaggtgtgccttccacctcacctaaatgaatactgtttgttttttgtttttccttccagattagactttgggggatttcttatatagaataa

SEQ ID NO: 220591 - DNA, 120 bp, Artificial Sequence
  ENSG00000117139_70 (sequence is synthesized)
agggcttgattatatgtagcctctatcctggagaaaggttatgtaatttggactatgtaaaggaagttgacttctttacagcttcgtttcagtatcctaggaggtgggattcatttttct

SEQ ID NO: 220592 - DNA, 120 bp, Artificial Sequence
  ENSG00000117139_71 (sequence is synthesized)
atcttaagttaacctaaaggagagatgccacttgtggtgatggaggttgttaaaaacctgaatttccctgcttcattctccagtgaagagcttaagaaaatgaggctttggatattttgg

SEQ ID NO: 220593 - DNA, 120 bp, Artificial Sequence
  ENSG00000117139_72 (sequence is synthesized)
cagaagtgtctgaaatgcacctgatttgccattatacccaccatcaaaagcaacatggccctttgggtattagtgcaagattagcctaagaatagagtagatctctacctggaagagggt

SEQ ID NO: 220594 - DNA, 120 bp, Artificial Sequence
  ENSG00000117139_73 (sequence is synthesized)
gaaacatggctctctactgatttgggttgtactctgaaggccctttgtaatgggtttctgcctctttgtatttcacttaaaaaatcttgatggatatttggcagtctgttaagacctgct

SEQ ID NO: 220595 - DNA, 120 bp, Artificial Sequence
  ENSG00000117139_74 (sequence is synthesized)
tctggcttggagcaggtattgattggtatttagtacccatgggtgtttttctgggctcagtcttgcctatgtttcttgccatatgacacataccggaatggattccagatgctatatacc

SEQ ID NO: 220596 - DNA, 120 bp, Artificial Sequence
  ENSG00000117139_75 (sequence is synthesized)
tgtaacaggagacagaattggacaacaaggattttaagagtcattgcccattgtaaagcattaagccagagctggttattcattatcagactaactacatactagtccatgctagtgtca

SEQ ID NO: 220597 - DNA, 120 bp, Artificial Sequence
  ENSG00000117139_76 (sequence is synthesized)
gcctatattaaaatagtctttccttgccatagtgctggcgaaaacccaatcccttctgatgaaacattgcttcttgggaagacaagctgaggaaagcaatgaagatcccagtgtcggcct

SEQ ID NO: 220598 - DNA, 120 bp, Artificial Sequence
  ENSG00000117139_77 (sequence is synthesized)
ttattgagctatgtatgagggtcagggtccctcaactcctagtgactatgaagcagcagtgtgatggcttcgccctctttgcccctctgtcatcaatcctttgcatgtggctattttaag

SEQ ID NO: 220599 - DNA, 120 bp, Artificial Sequence
  ENSG00000117139_78 (sequence is synthesized)
cttctcagctttcttttgggaggcttcatgtgtaacttattatagaaatgttactgaaaagctgcctaaacaaaaaattgtataaagtaggaatttgtataaagtaatactgttgtaaat

SEQ ID NO: 220600 - DNA, 120 bp, Artificial Sequence
  ENSG00000117139_79 (sequence is synthesized)
ccatcttcaagatgtaaagaatcaatttgtaaagtgtatattttcacttctcccttcaaatttatgtgaacaagtttttcatgtttcaatattgcttacataggaatacaccttacgttt

SEQ ID NO: 220601 - DNA, 120 bp, Artificial Sequence
  ENSG00000117139_80 (sequence is synthesized)
ttatcagtataaatggaacatttaaaaccagtcaacaacagaacagataatccagctccctgtttgtgttctgggttaattttgcaaggatgaagggctagaaagtggtgagtttcggtg

SEQ ID NO: 220602 - DNA, 120 bp, Artificial Sequence
  ENSG00000117139_81 (sequence is synthesized)
tgtttcttattttcaggataaccggctgcattgcagtagaggaatggaatggtgaggtcatttgacctgttccaggtgagtggaggccaaagaacattctttctgcctccccttggatgg

SEQ ID NO: 220603 - DNA, 120 bp, Artificial Sequence
  ENSG00000117139_82 (sequence is synthesized)
gaaaattgagaaattaaaaagttgcctttctgaggaaacaaaagttattttctctatttaaaataaatgtccaaaggcacccctctaaacaccaaaacttttagctcctggcaaacttac

SEQ ID NO: 220604 - DNA, 120 bp, Artificial Sequence
  ENSG00000117139_83 (sequence is synthesized)
ctagctagaagttggagaagagtgcggtttcaaaccatgcttcctttctgcccttgccaatacgttctcactgactgtgattctgctgtgaacacacacacacacacaaacacacacaca

SEQ ID NO: 220605 - DNA, 120 bp, Artificial Sequence
  ENSG00000117139_84 (sequence is synthesized)
agccccttctgtgtatgatcaggacaagtagttcaacagttaataaaaaagttaaattattggatgagaaagatatatttaacctaaatcataaatatgtatatccatttaataaacact

SEQ ID NO: 220606 - DNA, 120 bp, Artificial Sequence
  ENSG00000117139_85 (sequence is synthesized)
aaaattgagaaaaattagtttggggatgagggccttcattcataatagccataatgcattatctatgatgtgagcttgattgagcttctttaaaatgcataaagaatttgaacaacaaaa

SEQ ID NO: 220607 - DNA, 120 bp, Artificial Sequence
  ENSG00000117139_86 (sequence is synthesized)
tacaggtgtgagccactgcacccagccattaggattattttgcattaatattatgtagcagtcagtctattacccttcttagggttgaattataatagtaaggaggtttattttaagtat

SEQ ID NO: 220608 - DNA, 120 bp, Artificial Sequence
  ENSG00000117139_87 (sequence is synthesized)
agggttgaattataatagtaaggaggtttattttaagtatagcatggctataaaggtttgagtgcttttccacgtagctatgttacaacataaggatatctccatcaatgggaggttatt

SEQ ID NO: 220609 - DNA, 120 bp, Artificial Sequence
  ENSG00000117139_88 (sequence is synthesized)
aggcatgggacagggataaattatttaatacctcataatagggatgaccttatcaatggatctggaatattcaagtctattggctcacaaagatctaaggcagcttatactgcccctgtt

SEQ ID NO: 220610 - DNA, 120 bp, Artificial Sequence
  ENSG00000117139_89 (sequence is synthesized)
aactcccagtattaggttataatcaaatattgctggcctgagagccattctgtttccatcaagtggtttatctctattttgatctattgtatgttgattttatagttttaactcccagga

SEQ ID NO: 220611 - DNA, 120 bp, Artificial Sequence
  ENSG00000117139_90 (sequence is synthesized)
ggacattattgctctcattttcagtattgaaaacattatttgattttgaaggaagtcgagtctttagcctgcctcttataaatatataaatttatccaagttgtggttgttaaaattgac

SEQ ID NO: 220612 - DNA, 120 bp, Artificial Sequence
  ENSG00000117139_91 (sequence is synthesized)
attttatttgctcattagcaaataaataaaatgtatttcacttgcttattaaaataaccacatttttcaggcaggtttatttttataatgtagacctagcatagaagtaaaataaacaaa

SEQ ID NO: 220613 - DNA, 120 bp, Artificial Sequence
  ENSG00000117139_92 (sequence is synthesized)
ttaaagccttgttttttatctgccagcttgatgattgaccaagtatacttgatgttttcagtgtcacctagaacgtaattttctttattttcaggaatgtagtaagccacaagaagcatt

SEQ ID NO: 220614 - DNA, 120 bp, Artificial Sequence
  ENSG00000117139_93 (sequence is synthesized)
ggccattatgattgaggatgagaaagctttaagagaaactgtccgtaaattggtaaggcttatggaaatccaactgcatgttgtcattgggtattatttagtaaaatttttacgcacttt

SEQ ID NO: 220615 - DNA, 120 bp, Artificial Sequence
  ENSG00000117139_94 (sequence is synthesized)
aatatcattttaagcagtctttttaaagcctattttctttgaggccattgtaatagatgtatagtagtatctcgtggttttaatttttattcactatcttatttgccacatgtacatatg

SEQ ID NO: 220616 - DNA, 87 bp, Artificial Sequence
  ENSG00000117139_95 (sequence is synthesized)
taatttttattcactatcttatttgccacatgtacatatgtctctttgaagtagctgttcaaatgtcttgcccctttaaaaaaaatg

SEQ ID NO: 220617 - DNA, 120 bp, Artificial Sequence
  ENSG00000117139_96 (sequence is synthesized)
acaggcgtgagccaccacacccggcttgccctttatttttttaaaacatttggtttttgtaataattctttatgtattctgcataccagtttttttttttttaaatcagataggtgtttt

SEQ ID NO: 220618 - DNA, 120 bp, Artificial Sequence
  ENSG00000117139_97 (sequence is synthesized)
ttttttaaatcagataggtgttttgctaatgttttctcccagtctgtggcttgtctttgattttcctaccagtgtctttcagcaagcaggagtttttcattttgatgaagtccagtttgt

SEQ ID NO: 220619 - DNA, 120 bp, Artificial Sequence
  ENSG00000117139_98 (sequence is synthesized)
gcagaggtttccaccagctgtgatcacaccactgcacttaagcctgggcaacagagtgaaaccttatctcaaaaaaaaaaaattaaaaaagttaatgtgactggaaggttaaatgtgttt

SEQ ID NO: 220620 - DNA, 120 bp, Artificial Sequence
  ENSG00000117139_99 (sequence is synthesized)
tttaaagttatagacatatagctgttatataaaaaatgaggtatgtctatggtaatacagaagtcaaagtgtcttttgcctaaatgagtgttttttttttttttttttttacaggctcaa

SEQ ID NO: 220621 - DNA, 120 bp, Artificial Sequence
  ENSG00000117139_100 (sequence is synthesized)
tgacattgctcagtgggaaggtttgtggggagaggtgtatatgtgatatatcatttatttgggaaagggtgttcatacatattttgctgctctcatggacaaaaggttgagaaaccacta

SEQ ID NO: 220622 - DNA, 120 bp, Artificial Sequence
  ENSG00000117139_101 (sequence is synthesized)
ctctgtgttctattttgtttgattggttagaataagatttacctaacctgggttttaattttaaaacaaatttttgaatgtcaaatgcttataagttattctaataagagcctttgcttt

SEQ ID NO: 220623 - DNA, 120 bp, Artificial Sequence
  ENSG00000117139_102 (sequence is synthesized)
ggggacgcgcgggtccggggaggcccgaggcgcggggggcggggagccggtcgccccgccggcctcgtcaagtttggggctgcctagaaggattggcagccaccatttgcatgtgatgtt

SEQ ID NO: 220624 - DNA, 120 bp, Artificial Sequence
  ENSG00000117139_103 (sequence is synthesized)
gccatagaggacgtgctttcccttaactcagaaaccctgtaagctagacctcatctcgctgggtctttctcctctgcttatctgctttgagctgatctgaatggattgctcagcccttcc

SEQ ID NO: 220625 - DNA, 120 bp, Artificial Sequence
  ENSG00000117139_104 (sequence is synthesized)
cccactgatatctgtgctcttaccatcgttcctgggtctcctcccttttcttgaagaaactcttgttcttccctttttccttttcttgctcttccagctttcaccttcccggcgctaaga

SEQ ID NO: 220626 - DNA, 120 bp, Artificial Sequence
  ENSG00000117139_105 (sequence is synthesized)
aggtgggagggatgctgatgtgatgccctttggcttacttatcacagggcagcgctgtcttaaccccaaagcagacacgacttgaagaatgactttgactcggttgctttggctaggggg

SEQ ID NO: 220627 - DNA, 120 bp, Artificial Sequence
  ENSG00000117139_106 (sequence is synthesized)
ccagctacactcatttggcttagctgttgtgccagaggtcccagtggtgggacagtggctgttattggcaaacggcctgaatttcttgaggctggcctgcccaattttgaatccattttt

SEQ ID NO: 220628 - DNA, 120 bp, Artificial Sequence
  ENSG00000117139_107 (sequence is synthesized)
ttttttttttttttcccctggttgcctgcctgggtaatgcaagctactgtcattggactaatgggagtatttttaatcctgaagagattttattataaaacgttttccctccattaggta

SEQ ID NO: 220629 - DNA, 120 bp, Artificial Sequence
  ENSG00000117139_108 (sequence is synthesized)
gttattacgttgagggctggatagtaatgagtgatcttgtattactaggtttttattatagatgatcaagtaccataaaaaggactttatgctgaaatgtaggatataggctattatgta

SEQ ID NO: 220630 - DNA, 120 bp, Artificial Sequence
  ENSG00000117139_109 (sequence is synthesized)
tttgcaaaatagggaagggatcctatttgaaggcttataaatgcaaaggaacagagaggaagactttatatccattgtcctcagggatgaaagggttcatgccacaccagctgataaaca

SEQ ID NO: 220631 - DNA, 120 bp, Artificial Sequence
  ENSG00000117139_110 (sequence is synthesized)
ccaagcttttaagtcagatgctaagtcatgggctctcttgttgcttcattacttaggagacttgtggagaatcttagggataatccacatttgctagagtcctgatccttagtcatagca

SEQ ID NO: 220632 - DNA, 120 bp, Artificial Sequence
  ENSG00000117139_111 (sequence is synthesized)
tctcagtgtatgtctagtaatgtggttagagctccttgatctactcagactgttgacactgtggccatcagtctgtttctgtgctttctgttagaagtcatcaaggcagaagtacaatct

SEQ ID NO: 220633 - DNA, 120 bp, Artificial Sequence
  ENSG00000117139_112 (sequence is synthesized)
cttctgcattagcaataaggtaaatgagaagaggattcagtgtataattaatactagtaatcagaagacttaggaaatctagttttggctctgtttattatattgtggctttaggcacat

SEQ ID NO: 220634 - DNA, 120 bp, Artificial Sequence
  ENSG00000117139_113 (sequence is synthesized)
taaacctcacttcaactgaaggtaatttgtaatttaagaaggagagggtagtagtggtattaggggcagtccttctatttgtctcataaacccaaatgtgaatgtgaaacaccctttgtt

SEQ ID NO: 220635 - DNA, 120 bp, Artificial Sequence
  ENSG00000117139_114 (sequence is synthesized)
tggccttgtaagggtgcttcatctggtgaatcgtgatggatctgaaaggggatagatgtggtgattggaaatggttttttaactgtgacagattttttgagaacttgtttactatgtgcc

SEQ ID NO: 220636 - DNA, 120 bp, Artificial Sequence
  ENSG00000117139_115 (sequence is synthesized)
aggcaaagagtgtcctatcccacatctcttacttgtcatctcaccctgtaaggtgggcactattatcacctccattttacacatgcagaaatttagccacaatggaatacatggcaccag

SEQ ID NO: 220637 - DNA, 120 bp, Artificial Sequence
  ENSG00000117139_116 (sequence is synthesized)
gtcactcacagcttagtatgaggcagtcaggatttgaatacagatgatctactcaggatcccatgctcttaaccactaggactctgagttttaggggaaggccaagccatctcggacatc

SEQ ID NO: 220638 - DNA, 120 bp, Artificial Sequence
  ENSG00000117139_117 (sequence is synthesized)
cttctcctttctatgttattgggaagaataatttctaaccctttctgttttataggaatttggagaaggcaagtagagtaacttgaaagcgttcagttttactaaaaagactttttgaaa

SEQ ID NO: 220639 - DNA, 120 bp, Artificial Sequence
  ENSG00000117139_118 (sequence is synthesized)
attgtcaagtgttaagagttttgaatggtaagatgcatagaggtgggaaagattcagggtaggcttcccagtctcagggtcttgcaggcacagaaacagtcttgtttagtgcctgtgggt

SEQ ID NO: 220640 - DNA, 120 bp, Artificial Sequence
  ENSG00000117139_119 (sequence is synthesized)
taagagcctcatgaggttaatttaaaaggaattctcaagccctaataccaatggctgtctggcactggatttctctcatgtgtgtgctctttgtagttttgaaccttgttaatctcacaa

SEQ ID NO: 220641 - DNA, 120 bp, Artificial Sequence
  ENSG00000117139_120 (sequence is synthesized)
agggatgctgtttgtattccagcttttacacttgggtgaattgtaccatcaaaggggtaaggaatcgaataagtctttctaaatttatgctgcctggacagacagccgcttattaccagt

SEQ ID NO: 220642 - DNA, 120 bp, Artificial Sequence
  ENSG00000117139_121 (sequence is synthesized)
caaggccttagaagaattggtgttcctgtgttcctacttggattgcccattaccctcacaaaattggcgttgtttaatggagattaaggctagaaaacatgaagattaggagttttttta

SEQ ID NO: 220643 - DNA, 120 bp, Artificial Sequence
  ENSG00000117139_122 (sequence is synthesized)
taaggctagaaaacatgaagattaggagtttttttaaacagagtggttagaagacagttaaagccacttttctcagacttctttttttttttttagagacagagtctcgctgtgttgccc

SEQ ID NO: 220644 - DNA, 67 bp, Artificial Sequence
  ENSG00000117139_123 (sequence is synthesized)
acccagcctcttccttttataggtggtctcgctctttcacctagactggagtgcagtggcatgatca

SEQ ID NO: 220645 - DNA, 86 bp, Artificial Sequence
  ENSG00000117139_124 (sequence is synthesized)
tgcagtggcatgatcatagcttactgcaactttgaactcccaggctcaggtgatagctgtgcatgccatgcatgcctagctaatta

SEQ ID NO: 220646 - DNA, 120 bp, Artificial Sequence
  ENSG00000117139_125 (sequence is synthesized)
atgccatgcatgcctagctaattaaaaaaaaatttttaataaagacaaggtctcactgtgttgtccaggctagagaaggattatttgctttaagatttttctgctctgagaagctttccc

SEQ ID NO: 220647 - DNA, 120 bp, Artificial Sequence
  ENSG00000117139_126 (sequence is synthesized)
gagttttaggactcagagataatatatagggaactgtttagagctgggaagcctcatattgcattaatcatactaaatcagtaactggttttcaataattatcaaaaatgaaaaaaatca

SEQ ID NO: 220648 - DNA, 120 bp, Artificial Sequence
  ENSG00000117139_127 (sequence is synthesized)
gccattttgttttctgaagaaatagataaataagagaatagtttttcactttggtaagttggagataggaaaaaaatttagtgattcactttttctgaatgaaggagactgcccagaata

SEQ ID NO: 220649 - DNA, 120 bp, Artificial Sequence
  ENSG00000117139_128 (sequence is synthesized)
ggaaaatatggttatttgaagcccataagcatgtttaaagtaaattaatctatgaatcagttctttcttgagcatattcttgatcttatacatgtgtatataagaaatgccccagtgctg

SEQ ID NO: 220650 - DNA, 120 bp, Artificial Sequence
  ENSG00000117139_129 (sequence is synthesized)
tggatgcctacatctgccttgatgacacctgatagtaatgatattgcccatggaataaactcttttagcagtggacatcattaaaatgtatgaataaacacaggcaaagtgagaaagcac

SEQ ID NO: 220651 - DNA, 120 bp, Artificial Sequence
  ENSG00000117139_130 (sequence is synthesized)
agttccacagatacttcagtattaccacaaaaaatggttttatttgctttaccaataagtatcagcactttaagaaataatagaaactgagattggcttctataccctcaatgaggaagg

SEQ ID NO: 220652 - DNA, 120 bp, Artificial Sequence
  ENSG00000117139_131 (sequence is synthesized)
agcccttaatagtttagtgatgttagaagtgtgtagtttataataatagtttattaaaataatttatggaaaattattgtggaagcaaaattttctgtaaatactgacagaccttggaat

SEQ ID NO: 220653 - DNA, 120 bp, Artificial Sequence
  ENSG00000117139_132 (sequence is synthesized)
aggtcagcaaactcttagaggctaatggagttatgacatttatataactacttaggatttggcttattgcgatgattgaataaagcataaagcaaatagataagaaccaagaaccttcta

SEQ ID NO: 220654 - DNA, 120 bp, Artificial Sequence
  ENSG00000117139_133 (sequence is synthesized)
ggaggaaaataagaattgttcttccgaatttgaatagaaacacttctctttgttttgagacagagattggctcttgttgcccaggctggagtatagtggtgtggtcttggctcactgcaa

SEQ ID NO: 220655 - DNA, 120 bp, Artificial Sequence
  ENSG00000117139_134 (sequence is synthesized)
ggcctcaagtgatccacctgccttggcccccccaaaatgctgggattacaggtgtgaggcacctcgcccagccacaatttgttcttgatcctttgacttttccctatttgtttttttgtt

SEQ ID NO: 220656 - DNA, 71 bp, Artificial Sequence
  ENSG00000117139_135 (sequence is synthesized)
aggcacctcgcccagccacaatttgttcttgatcctttgacttttccctatttgtttttttgtttgtttgt

SEQ ID NO: 220657 - DNA, 120 bp, Artificial Sequence
  ENSG00000117139_136 (sequence is synthesized)
cccaaagtgctgcgattacaggtgtgaaccactgtgcctggccaacttttccctatttttaaatttctcattcatgctttaatagtagtttcaaaggtgagctctcttccttaggaagag

SEQ ID NO: 220658 - DNA, 120 bp, Artificial Sequence
  ENSG00000117139_137 (sequence is synthesized)
gtagtttcaaaggtgagctctcttccttaggaagagagagaagtatgttttgaatgccctgttaatagaggcaattggtaggatatagtcaccttgagattccagttggatttttaaaga

SEQ ID NO: 220659 - DNA, 120 bp, Artificial Sequence
  ENSG00000117139_138 (sequence is synthesized)
ttatttcttcttaaaggaaatattcatgtatatgacaatttttttaaggccatgaatattaaaatagaacccgaggagacaacggaagccagaactcataatctgagacgtcgaatgggt

SEQ ID NO: 220660 - DNA, 120 bp, Artificial Sequence
  ENSG00000117139_139 (sequence is synthesized)
taaagtcaacaaaacatttcttgaaacagcctgacctcatccttggttagcccctctacatagcccggtttacagagcaccggcagagaaggttttaaaaccaagagtggataaggcagt

SEQ ID NO: 220661 - DNA, 120 bp, Artificial Sequence
  ENSG00000117139_140 (sequence is synthesized)
tgcccttacatcccagtgaaattttgttatatgagttgtgcaacatcacttacttaacaaaaacgatattgttaggaaacctttatttttgtctcagaaataaaaatttcacatttctta

SEQ ID NO: 220662 - DNA, 120 bp, Artificial Sequence
  ENSG00000117139_141 (sequence is synthesized)
acccctacaacttattcctgtccggagacagcctaagggtaagtttgggggctagccttaacctgttttatcttactacttattggtacattgtcttttcagggaaatgaaaaagccttg

SEQ ID NO: 220663 - DNA, 82 bp, Artificial Sequence
  ENSG00000117139_142 (sequence is synthesized)
tattggtacattgtcttttcagggaaatgaaaaagccttgattgtgtttggaagaccttgttttagaagaccttattttggt

SEQ ID NO: 220664 - DNA, 120 bp, Artificial Sequence
  ENSG00000117139_143 (sequence is synthesized)
ggttgcagtgagccgagatggtgccacttcactcaagcctgggcaaagagcgagactctgagactccgtctgaaaaaaaaaaaaagaccttgttttgtgttttttcctctagtgtttttg

SEQ ID NO: 220665 - DNA, 120 bp, Artificial Sequence
  ENSG00000117139_144 (sequence is synthesized)
tcctctagtgtttttgttctgctttgagagcagctatacttagaagtttgtttctggaatgagtaagattgtggaggaaatttttttactgtccaaagctgaggagttgattattatcta

SEQ ID NO: 220666 - DNA, 120 bp, Artificial Sequence
  ENSG00000117139_145 (sequence is synthesized)
cttgttacaactttgcattctctttaaatttaaagtagctaaagtattcctggctgtcatatgaaggtataagctgtgaaataacttgcctacctgttctcttctgccagctgagatttt

SEQ ID NO: 220667 - DNA, 120 bp, Artificial Sequence
  ENSG00000117139_146 (sequence is synthesized)
tgaggagattgtcagaatgttgatatggtaaaaggggattttataatgctacatagctaacgggttcctcttctagtaattcctatgtagccaagttcatttctgacaaaatggtatttg

SEQ ID NO: 220668 - DNA, 120 bp, Artificial Sequence
  ENSG00000117139_147 (sequence is synthesized)
tgaaattattcacttaaaaacttttaggtaaaacagtactgtaaaagcttcccatttatttccaggccttggtagaaagaagaggggtgtcattatccattcacaccctttgagttattt

SEQ ID NO: 220669 - DNA, 120 bp, Artificial Sequence
  ENSG00000117139_148 (sequence is synthesized)
taggactacagcagtgagtcctataactttaagaattgttttctgtgctgtagagaggtaggaagagaataacatagtttttgaggggtaaatcactaaccaaagtcctgtcctaatact

SEQ ID NO: 220670 - DNA, 120 bp, Artificial Sequence
  ENSG00000117139_149 (sequence is synthesized)
ctcccttattgattccaggtgaacactttttagcctagaagaaagtagccaatctgacattcaaaacttttttttttaatacattatatgaatgtttagtgagcccatggatgaaattgt

SEQ ID NO: 220671 - DNA, 76 bp, Artificial Sequence
  ENSG00000117139_150 (sequence is synthesized)
tccagcctgggtgacagagcaagactcttctcaaaaaaaataaataaaataaacaaaaacttaaaaaaataaaaaa

SEQ ID NO: 220672 - DNA, 120 bp, Artificial Sequence
  ENSG00000117139_151 (sequence is synthesized)
ttgggaggctgaggcaggtggatccccagaggtcaggagttcgaggtcaggagttcgagatctggctggccaacatggcaaaaccccgcatttactaaaaatacaaaaaaaaaaaaaatt

SEQ ID NO: 220673 - DNA, 120 bp, Artificial Sequence
  ENSG00000117139_152 (sequence is synthesized)
cagcctgggtgacagaatgagactcagaatgagactgtctcaaaaaataaataaataaacaaacataaaaaataaaaaatagaatgttgaatgtggaacctttttgcctcttatagtcag

SEQ ID NO: 220674 - DNA, 120 bp, Artificial Sequence
  ENSG00000117139_153 (sequence is synthesized)
tgcctcttatagtcagatctagatacagttgcccatagtagattaattttctcttcttgaactcttcctaagtacggaagtgatagtgaataaagggagagagagtccctttaatgatgc

SEQ ID NO: 220675 - DNA, 120 bp, Artificial Sequence
  ENSG00000117139_154 (sequence is synthesized)
tttgtgggttgtaacattttagaaacatgtcacttatatacttaaaaaggcaatgtagttttatggttaaaaagcacttaagtatttatacaatcaaggagtctgaaaggaataagcatt

SEQ ID NO: 220676 - DNA, 120 bp, Artificial Sequence
  ENSG00000117139_155 (sequence is synthesized)
taaaggtacccttttgtaaacattgcatctacaatataggtagatatttgtgagggacttactctgtgccaagtatgttttaggaagtgatacacattctttgtagaaagtttaaaaaca

SEQ ID NO: 220677 - DNA, 120 bp, Artificial Sequence
  ENSG00000117139_156 (sequence is synthesized)
taggaaagtatggcaaaaataaaatcactcctgatccttccacctgttacttctctcacggctatttttatgcatacattcacaaattcaagtgtactgttcatatacatcattgcatct

SEQ ID NO: 220678 - DNA, 120 bp, Artificial Sequence
  ENSG00000117139_157 (sequence is synthesized)
taggtttttttactaatcatatgagcatttgctgtatcattgaatagtttttgaaaatgcaatttctaatgactgcggcaatccgttttttatagccagactttattttgatgtcttcta

SEQ ID NO: 220679 - DNA, 120 bp, Artificial Sequence
  ENSG00000117139_158 (sequence is synthesized)
ttgtagaatgtttaggtcagttctagttttttattataatactatgatgaatattccttgtatgtaaatttttacacctatttctgatttttgaaatagttattagggagagaagaattg

SEQ ID NO: 220680 - DNA, 120 bp, Artificial Sequence
  ENSG00000117139_159 (sequence is synthesized)
aagaacatatacttaagaaaaacagaggtgtacagtaaaggaattattgcaaaagggtgaagtagggtgtaagttaaatttcaggaagcttgagaaaagttgatgcactgttccagtgga

SEQ ID NO: 220681 - DNA, 120 bp, Artificial Sequence
  ENSG00000117139_160 (sequence is synthesized)
acagaggcctcaatcttgcatcatcatgttttctaaatgttttaagggattgctctgtctttgggatgatgtgattatggcatgatgatgatattaatcacctgtaagtcctggtttctc

SEQ ID NO: 220682 - DNA, 120 bp, Artificial Sequence
  ENSG00000117139_161 (sequence is synthesized)
aagtaaaggttaaaattagcgtctgtatgttaataacattagatataaaaccatatcgtgtgtatttttaattgtggtttggaacaaaataataaagctcttcatatttattctaaaaaa

SEQ ID NO: 220683 - DNA, 120 bp, Artificial Sequence
  ENSG00000117139_162 (sequence is synthesized)
atactgggtgctattgctactaaaatgtgaaaacacacatgaaattatgtttgtgtacagtatgtgctttgggagggagatgatgaggaagtggagaaaagcatcataaagagctaattt

SEQ ID NO: 220684 - DNA, 120 bp, Artificial Sequence
  ENSG00000117139_163 (sequence is synthesized)
gcatgctggataggaaaactttccttttcagtgcagatgtgtcttaactgtgtctgaagagcattgaactacttttttccctaaggtttttcacttctgttagaacaggcatcctgacaa

SEQ ID NO: 220685 - DNA, 120 bp, Artificial Sequence
  ENSG00000117139_164 (sequence is synthesized)
gttaagacagtggttcttaagattcctagagcatccatgaattccctgaaattgcacacacactactttgcaagaacaacgtaattctgggggaagggtagtttttatctgaagtaagga

SEQ ID NO: 220686 - DNA, 120 bp, Artificial Sequence
  ENSG00000117139_165 (sequence is synthesized)
ttttgagttgtagggattctgtttgtaatcgttatgttttggaaagctgttttcagggagatccctgaaaataaggcttcttaacccttccctgccccaaattaaaacacggacacctac

SEQ ID NO: 220687 - DNA, 120 bp, Artificial Sequence
  ENSG00000117139_166 (sequence is synthesized)
tttagtttttcttaagcaagtttgaaaatggagatgaaatacatgcttcagaaaataactggccagcgaatatgagggaaatgtttgaaaatagatccatttcttacagcgaagtgggca

SEQ ID NO: 220688 - DNA, 120 bp, Artificial Sequence
  ENSG00000117139_167 (sequence is synthesized)
atatgtgcctttttgggtagaatcctggaatattggctctctgcagcccatttacattttaacagcaggttacctaccttaccctcttatattttacagttgggggaaaatagtgcccag

SEQ ID NO: 220689 - DNA, 120 bp, Artificial Sequence
  ENSG00000117139_168 (sequence is synthesized)
agggtttaagtaacttaccaaagtcttacatcaaaaatggtagctcatttttagaactctgagactttttccatatatggaatttacaaattaaaattaggtatgaactacatgattgat

SEQ ID NO: 220690 - DNA, 120 bp, Artificial Sequence
  ENSG00000117139_169 (sequence is synthesized)
tctcaattaaaatccatggagttggtccttaatcttattttaaacaaaaatgttaactttctccatcccatgaagtcctttttaatgaccaattcaagaataaaaccaaaatctaattag

SEQ ID NO: 220691 - DNA, 120 bp, Artificial Sequence
  ENSG00000117139_170 (sequence is synthesized)
cattttccttaccttcctcatctttgttggcccatataattggcagatatgaaatagttaaaaggttaaaatacaggataacagaataaaagaaagaagcccagtagttcataaacgact

SEQ ID NO: 220692 - DNA, 120 bp, Artificial Sequence
  ENSG00000117139_171 (sequence is synthesized)
ggcattctcaaggctggattaggatccagttttagatagggagaaaaggtgatagaagtttggtctttaaatgacaaaaggtgtatccaagaagggttctctagatgttaggtggtacag

SEQ ID NO: 220693 - DNA, 120 bp, Artificial Sequence
  ENSG00000117139_172 (sequence is synthesized)
attatgttgaaatttactggttcaagaccttatttttcctgacagtcttttaggaggaaatgtttaattatgactttagtctttgctattgcacaaattttctaactattcagttaatga

SEQ ID NO: 220694 - DNA, 120 bp, Artificial Sequence
  ENSG00000117139_173 (sequence is synthesized)
tatcctttcatataacttcctgtaaaaggctgagagaccactcagcatcttcccaaactcaatttctgcacgatagtcttttccactcgtcccatcttctttccttttatttttgtcctt

SEQ ID NO: 220695 - DNA, 120 bp, Artificial Sequence
  ENSG00000117139_174 (sequence is synthesized)
ttaatagattctccatatttcctcagaagtaggaaacatattcctttcttttaatcttatctatacctcttatctatacccaaaatgtggacaaggctaatttgtagtagaacagataac

SEQ ID NO: 220696 - DNA, 120 bp, Artificial Sequence
  ENSG00000117139_175 (sequence is synthesized)
taatctcagtagttttacagtcctatggtgttcatactcagatcaaaatgaccaaacataaggacctgccttgtctgaaaaaggagatctccctagacaaatgaacttgcctgtatttgc

SEQ ID NO: 220697 - DNA, 120 bp, Artificial Sequence
  ENSG00000117139_176 (sequence is synthesized)
taggtcatttgtttctttgtatgccacacatttttaatcatgcatccctattttggtaaagcttttttttttttttcagactcaagtactactgcatgtttgtcttgggctggtggatta

SEQ ID NO: 220698 - DNA, 120 bp, Artificial Sequence
  ENSG00000117139_177 (sequence is synthesized)
tcgaaacataaccagacagctggtgtgaggactgggcgattagactgaggatgacccattttgaatgctgacttagttgaaggatactccttaatgtcctgtttcttaacatagttaagg

SEQ ID NO: 220699 - DNA, 120 bp, Artificial Sequence
  ENSG00000117139_178 (sequence is synthesized)
atactgcggctgctgccacttccttctagtgaactaactgacccatcacatttaaggcccctgagaatatagttaggatagaaatctactaggaagcctgaagccaaattagggaagaac

SEQ ID NO: 220700 - DNA, 120 bp, Artificial Sequence
  ENSG00000117139_179 (sequence is synthesized)
ttcactaaagatagcatgagggctgatgttggcatttagaatttcatttttcatggcaaatttcatttgccataccaagtagtatggcacaatcattgaatgtgttcagttaatgcgcct

SEQ ID NO: 220701 - DNA, 120 bp, Artificial Sequence
  ENSG00000117139_180 (sequence is synthesized)
tacacctataaggtgtgggggtgtacatccttcaagaaggaagattattagtgtggttcctcaggagcctgtaggtcacaggatagacataaacacctagacagaaactattatagtagt

SEQ ID NO: 220702 - DNA, 120 bp, Artificial Sequence
  ENSG00000117139_181 (sequence is synthesized)
tagtcattcagggatttggtgaaaggaagactcttagtgggcacctctccatcttctggtattggttggttaattggaagggtaatcacgtctttaacattcctttttccagtgatcctt

SEQ ID NO: 220703 - DNA, 120 bp, Artificial Sequence
  ENSG00000117139_182 (sequence is synthesized)
tggtagcattaacagtgataggggaaggaagtatgttaaacccaaactggttgtcttatacaagactgggaggggagtggttaagatgcagtatttttttcccgtgtagattgggggatc

SEQ ID NO: 220704 - DNA, 120 bp, Artificial Sequence
  ENSG00000117139_183 (sequence is synthesized)
atctgatttctaatttacatgttctctttagcttcattagttttagtaataggtgacccataggcgaaaattgaactttcctatcttccacccagaatgactgttgccgagggaagcgag

SEQ ID NO: 220705 - DNA, 120 bp, Artificial Sequence
  ENSG00000117139_184 (sequence is synthesized)
tttaacagatatgaagagtattttaagaggtgcagcctctggaagtagatcaaactcgaactcatgtggcatgctagatatgtttgtcaataaacttatgatgtgaaaaaaaaaaggagg

SEQ ID NO: 220706 - DNA, 120 bp, Artificial Sequence
  ENSG00000117139_185 (sequence is synthesized)
atgtacatatatactgctttgatttaggattttaatagcttttggagaaaagtgtacctgaagacccatttttagttgaggcctcactctagtaggcattgtcacacagaaagcagaatg

SEQ ID NO: 220707 - DNA, 120 bp, Artificial Sequence
  ENSG00000117139_186 (sequence is synthesized)
agtgcagtggcatggtcgtggctcaccgcagccttgaaatcctgggtttaagtaatcctcctgctttagtttgtcaaatagttgggactacagttgtgtgccaccatggctggctaagtt

SEQ ID NO: 220708 - DNA, 120 bp, Artificial Sequence
  ENSG00000117139_187 (sequence is synthesized)
gttgggactacagttgtgtgccaccatggctggctaagttctttaattttgtagagaggagatcttgcttgtgttgaccaggctggtgttaaactcctggcctcaagtgatcttcctgcc

SEQ ID NO: 220709 - DNA, 120 bp, Artificial Sequence
  ENSG00000117139_188 (sequence is synthesized)
tgtacccgccctaaaacatgtcaggtcttagcatttttatatttaagttcaactctaggcacttgtttaaaaaactccgtgttcagccaccaccctgcaaaaatcaaatcaacaaatttg

SEQ ID NO: 220710 - DNA, 120 bp, Artificial Sequence
  ENSG00000117139_189 (sequence is synthesized)
ttaataatttaaagcattgcaaacatttgtaagttacatttctagacaagaactgacaaaaccagtctcctctgaatttcataccagtagtaataaacataatgattacagaaaatatga

SEQ ID NO: 220711 - DNA, 120 bp, Artificial Sequence
  ENSG00000117139_190 (sequence is synthesized)
gtgttgctattcccttggtgtgatcactttactgttaacagcacccactttacctgtagcttcccacttcaagaccatgcaggtataacatattcttttaatttcctctgctcctattag

SEQ ID NO: 220712 - DNA, 120 bp, Artificial Sequence
  ENSG00000117139_191 (sequence is synthesized)
aagttgtttcccaggcactctttctatagagcacatatttagcttttcacagatacaaataattttttcatttatatgtatgctgacccatttatattttacatatacgtatatgatgta

SEQ ID NO: 220713 - DNA, 120 bp, Artificial Sequence
  ENSG00000117139_192 (sequence is synthesized)
tctttaagtctttgcttgactaaaaagttttttaccctgcttcttctcatgtaagtcaattagtagaaagggaaaacacttcctgccttttatcgctttttgccctttaagggaaaatat

SEQ ID NO: 220714 - DNA, 120 bp, Artificial Sequence
  ENSG00000117139_193 (sequence is synthesized)
tttttggaagaagtgtttgagcactgtgttatttcagaggaaagctcctgggttacacaccatttgcgatctttctgccaaaagctggattcttttgacatcactggatgggcagagttt

SEQ ID NO: 220715 - DNA, 120 bp, Artificial Sequence
  ENSG00000117139_194 (sequence is synthesized)
tctgttatcttccataggtggctgcagtaaaagaatgtgaagacaatagaaaagtacaatcaggaagacagtattcaatctttatgaggttaatctgatggtttttaaagttggtaaaca

SEQ ID NO: 220716 - DNA, 120 bp, Artificial Sequence
  ENSG00000117139_195 (sequence is synthesized)
agaccaaacaaaaaaaaaaacagtctgtcatatttgtttccttggttttttatttctttgcaggcttctgaaatacagtgcctgacacatagatgatgaattaaatatttgttgcataga

SEQ ID NO: 220717 - DNA, 120 bp, Artificial Sequence
  ENSG00000117139_196 (sequence is synthesized)
tgagttgtggcatttgtgcacactcccaaagtggagtcattggtgttctttacccaggatgtgctaggagtttacctttcttagtaaagggaaaggacacaactcttatattaattcatg

SEQ ID NO: 220718 - DNA, 120 bp, Artificial Sequence
  ENSG00000117139_197 (sequence is synthesized)
gtcaaaggagtgtttcccctagctcctttaataaaacactaaggaagataggaaagtggttatggatgatttctgacaggtcctcatttgatttactcaaaggggtacatatgtgttcat

SEQ ID NO: 220719 - DNA, 120 bp, Artificial Sequence
  ENSG00000117139_198 (sequence is synthesized)
cgtattttaatcttcaataaggagaattagaaaaggattaaaaggctgtatgatctgttctcacactgagaaagtggcttatttcccagtggccttctttacatctctgaaatcagtcca

SEQ ID NO: 220720 - DNA, 120 bp, Artificial Sequence
  ENSG00000117139_199 (sequence is synthesized)
atctgtaaggtgcggccgccgccggattggcagccaccatttgcatgtgatgttgataaacttcattttacgccacgtatccagagactgaatgaattggagtcccgctctgtcacccag

SEQ ID NO: 220721 - DNA, 120 bp, Artificial Sequence
  ENSG00000117139_200 (sequence is synthesized)
aggacgggcggcggtgggccccgatgcccgcccgcgctcccgaacgcgcacactcccggcttcttctggctcagccgctcggctccccggggaggcctgggctgtgctggtggggatggg

SEQ ID NO: 220722 - DNA, 120 bp, Artificial Sequence
  ENSG00000117139_201 (sequence is synthesized)
gtccgggcgaggccgtgtttgtaggggaacgtcagacggagagacctccgaagatttcgtgctcgtttcccccggccctcaggctccgggcactgaaaggcagtcacccaccgcagccct

SEQ ID NO: 220723 - DNA, 120 bp, Artificial Sequence
  ENSG00000117139_202 (sequence is synthesized)
tccagccctgtctacagcgcctcgggcctgggggcagtgagtgaggggtgggtgttgctgaaaccatccgtaacggctccaacgttcgctgaggagagcccggccaactccttcctccgt

SEQ ID NO: 220724 - DNA, 120 bp, Artificial Sequence
  ENSG00000117143_0 (sequence is synthesized)
cggccgcctccgcgtccgcgtcgtcgtctgtgctcccggcgctgacgtgtctgggcggtcggcttccactccttcaggcgtcggcagccactagtcgtggcgagaggggcggggtggccg

SEQ ID NO: 220725 - DNA, 120 bp, Artificial Sequence
  ENSG00000117143_1 (sequence is synthesized)
gggctggcgctccacttggcccccgctcccggcccgccccgccgccgcggccccccggatgagggtatatattcggagcgagcgcgggacgccgatgagtggccgcgcggaaggagctgg

SEQ ID NO: 220726 - DNA, 120 bp, Artificial Sequence
  ENSG00000117143_2 (sequence is synthesized)
agacggtcgtagctgcggtcgcgccgagaaaggtttacaggtacatacattacacccctatttctacaaagcttggctattagagcattatgaacattaatgacctcaaactcacgttgt

SEQ ID NO: 220727 - DNA, 120 bp, Artificial Sequence
  ENSG00000117143_3 (sequence is synthesized)
ccaaagctgggcaagagcacctactacgtttctggaatgagcttgaagaagcccaacaggtagaactttatgcagagctccaggccatgaactttgaggagctgaacttctttttccaaa

SEQ ID NO: 220728 - DNA, 120 bp, Artificial Sequence
  ENSG00000117143_4 (sequence is synthesized)
aggccattgaaggttttaaccagtcttctcaccaaaagaatgtggatgcacgaatggaacctgtgcctcgagaggtattaggcagtgctacaagggatcaagatcagctccaggcctggg

SEQ ID NO: 220729 - DNA, 120 bp, Artificial Sequence
  ENSG00000117143_5 (sequence is synthesized)
aaagtgaaggacttttccagatttctcagaataaagtagcagttcttcttctagctggtgggcaggggacaagactcggcgttgcatatcctaaggggatgtatgatgttggtttgccat

SEQ ID NO: 220730 - DNA, 120 bp, Artificial Sequence
  ENSG00000117143_6 (sequence is synthesized)
cccgtaagacactttttcagattcaagcagagcgtatcctgaagctacagcaggttgctgaaaaatattatggcaacaaatgcattattccatggtatataatgaccagtggcagaacaa

SEQ ID NO: 220731 - DNA, 120 bp, Artificial Sequence
  ENSG00000117143_7 (sequence is synthesized)
tggaatctacaaaggagttcttcaccaagcacaagtactttggtttaaaaaaagagaatgtaatcttttttcagcaaggaatgctccccgccatgagttttgatgggaaaattattttgg

SEQ ID NO: 220732 - DNA, 120 bp, Artificial Sequence
  ENSG00000117143_8 (sequence is synthesized)
aagagaagaacaaagtttctatggctccagatgggaatggtggtctttatcgggcacttgcagcccagaatattgtggaggatatggagcaaagaggcatttggagcattcatgtctatt

SEQ ID NO: 220733 - DNA, 120 bp, Artificial Sequence
  ENSG00000117143_9 (sequence is synthesized)
gaaccctacagaaccagttggagtggtttgccgagtggatggagtttaccaggtggtagaatatagtgagatttccctggcaacagctcaaaaacgaagctcagacggacgactgctgtt

SEQ ID NO: 220734 - DNA, 120 bp, Artificial Sequence
  ENSG00000117143_10 (sequence is synthesized)
caatgcggggaacattgccaaccatttcttcactgtaccatttctgagagatgttgtcaatgtttatgaacctcagttgcagcaccatgtggctcaaaagaagattccttatgtggatac

SEQ ID NO: 220735 - DNA, 120 bp, Artificial Sequence
  ENSG00000117143_11 (sequence is synthesized)
ccaaggacagttaattaagccagacaaacccaatggaataaagatggaaaaatttgtctttgacatcttccagtttgcaaagaagtttgtggtatatgaagtattgcgagaagatgagtt

SEQ ID NO: 220736 - DNA, 120 bp, Artificial Sequence
  ENSG00000117143_12 (sequence is synthesized)
ttccccactaaagaatgctgatagtcagaatgggaaagacaaccctactactgcaaggcatgctttgatgtcccttcatcattgctgggtcctcaatgcagggggccatttcatagatga

SEQ ID NO: 220737 - DNA, 120 bp, Artificial Sequence
  ENSG00000117143_13 (sequence is synthesized)
aaatggctctcgccttccagcaattccccgcagtgctacaaatgggaagtcagagaccatcacagctgatgtcaatcacaacttgaaggatgccaatgatgtaccaatccaatgtgaaat

SEQ ID NO: 220738 - DNA, 120 bp, Artificial Sequence
  ENSG00000117143_14 (sequence is synthesized)
ctctcctcttatctcctatgctggagaaggattagaaagttatgtggcagataaagaattccatgcacctctaatcatcgatgagaatggagttcatgagctggtgaaaaatggtatttg

SEQ ID NO: 220739 - DNA, 120 bp, Artificial Sequence
  ENSG00000117143_15 (sequence is synthesized)
aaccagataccaagttttgtttgccacgataggaatagcttttatttttgatagaccaactgtgaacctacaagacgtcttggacaactgaagtttaaatatccacagggttttattttg

SEQ ID NO: 220740 - DNA, 120 bp, Artificial Sequence
  ENSG00000117143_16 (sequence is synthesized)
cttgttgaactcttagagctattgcaaacttcccaagatccagatgactgaatttcagatagcatttttatgattcccaactcattgaaggtcttatttatataattttttccaagccaa

SEQ ID NO: 220741 - DNA, 120 bp, Artificial Sequence
  ENSG00000117143_17 (sequence is synthesized)
ggagaccattggccatccaggaaatttcgtacagctgaaatataggcaggatgttcaacatcagtttacttgcagctggaagcatttgtttttgaagttgtacatagtaataatatgtca

SEQ ID NO: 220742 - DNA, 120 bp, Artificial Sequence
  ENSG00000117143_18 (sequence is synthesized)
ttgtacatgttgaaaggtttctatggtactaaaagtttgttttattttatcaaacattaagcttttttaagaaaataattgggcagtgaaataaatgtatcttcttgtctctggagtgtc

SEQ ID NO: 220743 - DNA, 120 bp, Artificial Sequence
  ENSG00000117143_19 (sequence is synthesized)
gcgcggaaggagctggagacggtcgtagctgcggtcgcgccgagaaagaaggatggtattggagggctgagcacacgtatgctgaacatatggctgcttgaactttggcctgtcgctgtg

SEQ ID NO: 220744 - DNA, 120 bp, Artificial Sequence
  ENSG00000117143_20 (sequence is synthesized)
gtgattattatgactgagaaactgaattttaaattttaaattagttttaaaaattttaattaaatttaagtagccctgtgcagctattggcttctgtattggatagtacagctttagaat

SEQ ID NO: 220745 - DNA, 120 bp, Artificial Sequence
  ENSG00000117143_21 (sequence is synthesized)
gtttgtcaacattaatagtaccaaggtagtggtgaagattaaaatgcaatatgaaggcttcagagcacctagcattgggcttggcatatagtatatacctagtaagtagtcaccttttta

SEQ ID NO: 220746 - DNA, 120 bp, Artificial Sequence
  ENSG00000117143_22 (sequence is synthesized)
tcaaattgaaacttggaaatggttaaaaatgagatgtatgtaaggggacagtgtgtaaaaactagtgaagtgctgtaaagagctaccagtaattattggcacttgccccaaatagtgtcc

SEQ ID NO: 220747 - DNA, 120 bp, Artificial Sequence
  ENSG00000117143_23 (sequence is synthesized)
ttctgacctgagaatttcatattaacttaatcctcagggaatttagtgatcatcagggtagcatctattccatttgtttaactggaagaattatctgcaagcttctcagaggaaagttat

SEQ ID NO: 220748 - DNA, 120 bp, Artificial Sequence
  ENSG00000117143_24 (sequence is synthesized)
accccaagtccatatcccacagaattcatctttcctgaggatcacttatcaaatggacatttatctcatgttgtgattgtttttagtaagatgtattgtaaggtgggaatcatcggagcc

SEQ ID NO: 220749 - DNA, 120 bp, Artificial Sequence
  ENSG00000117143_25 (sequence is synthesized)
cattccccagcgcattaatgggaggccaaagcatttctcccttctcaccctcccacccccaactatgtgctaggttctgttgaagcaaagcataagaaatgaaactttctttaccacagc

SEQ ID NO: 220750 - DNA, 120 bp, Artificial Sequence
  ENSG00000117143_26 (sequence is synthesized)
tgtgagctttttaaaaatacagatgttcaccttacaccaactgaattagaatttcaggaggtgggttcggggcatctatatttttagaaagctgcccacaaagttctaattcagctgatt

SEQ ID NO: 220751 - DNA, 120 bp, Artificial Sequence
  ENSG00000117148_0 (sequence is synthesized)
acagagtaggctgcggcaccacgtgcagccgctctcgtgcaggcgtttgcagtgtgcagctgagttcggcagctcacacagcacccctttcaagttgttttgcagtgggtgcctcttgtg

SEQ ID NO: 220752 - DNA, 120 bp, Artificial Sequence
  ENSG00000117148_1 (sequence is synthesized)
agacactgtttctgagagcagcttttgtggcatcttacagggcagatttctggtcccacccacctctgcctccgccatggctgcaagaaccgttatcattgaccacgggtctggcttttt

SEQ ID NO: 220753 - DNA, 120 bp, Artificial Sequence
  ENSG00000117148_2 (sequence is synthesized)
gaaggctggcacggccggctggaatgagcctcagatggtcttcccgaacatcgtgaactacctaccgtgcaaggagaaccctggccccagctatgcccgtaggcgtgtgagcctgggcat

SEQ ID NO: 220754 - DNA, 120 bp, Artificial Sequence
  ENSG00000117148_3 (sequence is synthesized)
cgacatttgccatcctgacacctttagctaccccatcgagcggggccgcatcctcaactgggagggtgtgcagtacctctggtcatttgtgttggagaaccacagacgggagcaagaggt

SEQ ID NO: 220755 - DNA, 120 bp, Artificial Sequence
  ENSG00000117148_4 (sequence is synthesized)
cccccctgtgatcatcacggagacacccttgagggagcctgcggaccgaaagaagatgctggagatcctgtttgagttgctgcatgtcccatcggtcctcctggccgaccagctgcagat

SEQ ID NO: 220756 - DNA, 120 bp, Artificial Sequence
  ENSG00000117148_5 (sequence is synthesized)
gtccctgtatgcctctggcctcctgaccggagtggtggttgattctggctatggcctgacccgcgtgcagcctttccaccagggccgccccttgcccgccagcggcaagacgctggagtt

SEQ ID NO: 220757 - DNA, 120 bp, Artificial Sequence
  ENSG00000117148_6 (sequence is synthesized)
cgccggccaggatctctccgcctatctcctcaagagtctctttaaggaagattgcgatagacgctgcctgtttcagctggagacagtcgccgtgactcagatgaacaagtgctacgtgcc

SEQ ID NO: 220758 - DNA, 120 bp, Artificial Sequence
  ENSG00000117148_7 (sequence is synthesized)
agagtgccttggatgagagcaacacctatcagctcccagacggctcccgcgtggagctgacccccatgcagcgggtggctcctgagatgttctttagcccgcaggtgttcgagcagccgg

SEQ ID NO: 220759 - DNA, 120 bp, Artificial Sequence
  ENSG00000117148_8 (sequence is synthesized)
ggcccagcatcccacgggccattgtggaatccgtggagtcctgcgagatctccctgcgccccctgctggtctcccacgtgatggcctgcgggggcaacaccctctatcccgggttcacaa

SEQ ID NO: 220760 - DNA, 120 bp, Artificial Sequence
  ENSG00000117148_9 (sequence is synthesized)
agcgcctgttcagggagctgatgggggatcacgtctcctccaccaaggccacagtctgggagggttccaatagaaactttagtgtctggctaggagcgtccgtggtggctcacctttcta

SEQ ID NO: 220761 - DNA, 120 bp, Artificial Sequence
  ENSG00000117148_10 (sequence is synthesized)
cctaccagtctgagtggatgtcccgagaggagtatggtgagcatatgaggatgtgaccctactggctcactcctgagaatgggctcctgttagatgggcacgggcggattaattttagca

SEQ ID NO: 220762 - DNA, 120 bp, Artificial Sequence
  ENSG00000117148_11 (sequence is synthesized)
aaatgttctgggtgggggtagaatgaggtggggtggggtgagctggctttggaattctaggggcatgagggtattttttaggttctaaggttttatcttgttgcaagagtgggacctacc

SEQ ID NO: 220763 - DNA, 120 bp, Artificial Sequence
  ENSG00000117148_12 (sequence is synthesized)
caagggggaagacaagatgtcatccttggaaaccctgcaggggacagtttttccagggtggcctatcattggggtatgagtggctgactgccatctccatgcctgagagccactgatttt

SEQ ID NO: 220764 - DNA, 120 bp, Artificial Sequence
  ENSG00000117148_13 (sequence is synthesized)
tcattggcatttcccctggtttgtctcattcttcttggttgagtaggttttaactggggtagcactcctgctaggagtcccaattatttttgactaggggatgggggacagttgacattt

SEQ ID NO: 220765 - DNA, 120 bp, Artificial Sequence
  ENSG00000117148_14 (sequence is synthesized)
ctggtcctacaggccctttctggccagggaggcattgctgcaggtgagcctgggatgcccttgccacccgtggttggatcttgttttatatctgcaaataaatagcttgtttggaagcaa

SEQ ID NO: 220766 - DNA, 120 bp, Artificial Sequence
  ENSG00000117151_0 (sequence is synthesized)
actccggcccgctagacctgctgctatgtcccggccgcagcttcgacgctggcgcctcgtctctagcccgccgagcggcgtcccgggtctagcgctgctggcgctgctggcgctgctggc

SEQ ID NO: 220767 - DNA, 120 bp, Artificial Sequence
  ENSG00000117151_1 (sequence is synthesized)
gctgcggctcgcggccgggaccgactgcccatgcccggagcctgagctctgccgcccgattcgccaccatccagatttcgaggtctttgtgtttgatgttggacagaaaacttggaaatc

SEQ ID NO: 220768 - DNA, 120 bp, Artificial Sequence
  ENSG00000117151_2 (sequence is synthesized)
ttatgattggtcacagattacaactgtggcaacatttggaaaatatgactcagaacttatgtgctacgctcattcaaaaggagccagagtagtacttaaaggagatgtatccttaaagga

SEQ ID NO: 220769 - DNA, 120 bp, Artificial Sequence
  ENSG00000117151_3 (sequence is synthesized)
tatcattgatcctgctttcagagcatcctggatagctcaaaaacttaatttggccaaaacacaatatatggatggaattaatatagatatagagcaagaagttaattgtttatcacctga

SEQ ID NO: 220770 - DNA, 120 bp, Artificial Sequence
  ENSG00000117151_4 (sequence is synthesized)
atatgatgcattaactgctttagtcaaagaaactacagactctttccatcgtgaaattgagggatcacaggtaacctttgatgtagcttggtctccaaagaacatagacagaagatgcta

SEQ ID NO: 220771 - DNA, 120 bp, Artificial Sequence
  ENSG00000117151_5 (sequence is synthesized)
taattatactggaatcgcagatgcttgtgacttcctctttgtgatgtcttatgatgaacaaagtcagatctggtcagaatgtattgcagcagccaatgctccctataatcagacattaac

SEQ ID NO: 220772 - DNA, 120 bp, Artificial Sequence
  ENSG00000117151_6 (sequence is synthesized)
tggatataatgactacatcaagatgagcattaatcctaagaaacttgtaatgggtgttccttggtatggttatgattatacctgcctgaatctgtctgaggatcatgtttgtaccattgc

SEQ ID NO: 220773 - DNA, 120 bp, Artificial Sequence
  ENSG00000117151_7 (sequence is synthesized)
aaaagtccctttccggggggctccttgtagtgacgctgcaggacgtcaggtgccctacaaaacgatcatgaagcaaataaatagttctatttctggaaacctatgggataaagatcagcg

SEQ ID NO: 220774 - DNA, 120 bp, Artificial Sequence
  ENSG00000117151_8 (sequence is synthesized)
ggctccttattataactataaagatcctgctggccactttcatcaagtatggtatgataaccctcagagtatttctttaaaggcaacatatatacaaaactatcgcttacggggcattgg

SEQ ID NO: 220775 - DNA, 120 bp, Artificial Sequence
  ENSG00000117151_9 (sequence is synthesized)
catgtggaatgcaaactgtcttgactactctggagatgctgtagccaaacagcaaactgaagaaatgtgggaagtcttaaagccaaagctgttacagagatgaacatcttttgtcaaacc

SEQ ID NO: 220776 - DNA, 120 bp, Artificial Sequence
  ENSG00000117151_10 (sequence is synthesized)
attaagagttagaaagatgatctgtatcaacagatctagtttcttgcatttttattatgttgctatatacttttgttatccgtatactaaaaaaaaagaataaataaatgttttgattgt

SEQ ID NO: 220777 - DNA, 120 bp, Artificial Sequence
  ENSG00000117151_11 (sequence is synthesized)
ttgaatttgaaaaatacacacgaatgtcctcagtatccaggaacataaaggcaagaagcaagtcaacttacctattaaatattcctctattagatgtttcaacactataatttaattggg

SEQ ID NO: 220778 - DNA, 120 bp, Artificial Sequence
  ENSG00000117151_12 (sequence is synthesized)
aaaaattgctttcagaattttattatgccatatttcccttcattatagtaaaatatatgctcacgaatcaatgctgatttttaaaatatgtataatctgaagtggaaattgtttgcttag

SEQ ID NO: 220779 - DNA, 120 bp, Artificial Sequence
  ENSG00000117151_13 (sequence is synthesized)
agtttttaaaaacctagtctttgaaaagcagtttgtgctatacttttcccccaaccctccaataaatcttaaatttaaaacctacaatgtagtgtctcccctttaggttcatcaaactga

SEQ ID NO: 220780 - DNA, 120 bp, Artificial Sequence
  ENSG00000117151_14 (sequence is synthesized)
tgaaaataatttttctgcttcctgactccatatagtatttatgttctctgaggtacttgaactaaatctttggacagtgagtgagaattaaaaagaatccagaagattaaatgtattcac

SEQ ID NO: 220781 - DNA, 120 bp, Artificial Sequence
  ENSG00000117151_15 (sequence is synthesized)
aaaatagaagaatgtaacagtaatattttgaattggtaagttagaactacctaatattttccaactacattatttttatgaggctcatttgtaaaatttttaataataggaataacttgc

SEQ ID NO: 220782 - DNA, 120 bp, Artificial Sequence
  ENSG00000117151_16 (sequence is synthesized)
agttgaacttgattctgttcactgtcacacttctaattattcatttcttcatttatggacatatataatttatttcttggctagcttgcttacatggttaaatttttctttctacatctg

SEQ ID NO: 220783 - DNA, 120 bp, Artificial Sequence
  ENSG00000117151_17 (sequence is synthesized)
tttttattttttgtagagacagggtctcgctatgttgtccagatgggtctccaactcctgggctcaagcactcctcctgccttggcttcctaaagagctgggattacaggcatgagctgc

SEQ ID NO: 220784 - DNA, 120 bp, Artificial Sequence
  ENSG00000117151_18 (sequence is synthesized)
tacaggcatgagctgcattgtgcttttaatgatctaaagacactgattagcttctcaactagttctctttctaaaagatcaattttatacaaataagttttctaaatgtaataaagtctg

SEQ ID NO: 220785 - DNA, 120 bp, Artificial Sequence
  ENSG00000117151_19 (sequence is synthesized)
ttttctttctccagggaattaagaacaacattgtgctgcccttattagttcctaattacagattaaaaatctgtatctttgaactctagatttacataaatcctggcttccctgcacatt

SEQ ID NO: 220786 - DNA, 120 bp, Artificial Sequence
  ENSG00000117151_20 (sequence is synthesized)
ttgcccctgtaaattggaatacatgatgattgaaccatctgttatgagaatattacatttcctatttacacaattgtttgtgacagagtaaaaaccattttcatagtatatgttggatca

SEQ ID NO: 220787 - DNA, 120 bp, Artificial Sequence
  ENSG00000117151_21 (sequence is synthesized)
ctgttgtcttcatatttctaaaataaatgaattaaaaaatttaaattcttagatgcttatctctatcatagctcagaatgcaacttcaatacccccattcttttatatttccagatttct

SEQ ID NO: 220788 - DNA, 80 bp, Artificial Sequence
  ENSG00000117151_22 (sequence is synthesized)
atgtaaaggacttggaatgttaaaaataaccattcatcattttgctttatattacatctaatatttcctgaaacattttg

SEQ ID NO: 220789 - DNA, 120 bp, Artificial Sequence
  ENSG00000117151_23 (sequence is synthesized)
tttgctttatattacatctaatatttcctgaaacattttgtaatacccacatggaaagtggagaaagagaaaccttgtgctttttataaaacattgccaaggagaataatggttaaacaa

SEQ ID NO: 220790 - DNA, 120 bp, Artificial Sequence
  ENSG00000117151_24 (sequence is synthesized)
atctgttcaaatacatatttaaatttttttacaaataaaagttttaaattaacatacctaattgagattgtagagatgtattattttttttttctgtgccagttcagttttcaatgttcg

SEQ ID NO: 220791 - DNA, 120 bp, Artificial Sequence
  ENSG00000117151_25 (sequence is synthesized)
taaatctgaaactgcttgttttctcatctataaaaagaattacttttcaaaaatgaacttcatcatacccttctaaaagtacatcatagttgtcatgtaaacagggtttttgtaaccgct

SEQ ID NO: 220792 - DNA, 120 bp, Artificial Sequence
  ENSG00000117151_26 (sequence is synthesized)
atgcttatctactggtgagatatgctataaggtaaccttgtttatgagtagatagggacaatacaattgaactgttctaaaaactagagtgagaaagaattttatgttttgcttaaactt

SEQ ID NO: 220793 - DNA, 120 bp, Artificial Sequence
  ENSG00000117151_27 (sequence is synthesized)
caaaacctgttgttctcaatgtgtaaagaaaatagtgaaaacaacaagaaaacaaaatacaaaaaaaacccttaattcctagcccttaggaacggaatagatatttcagaaatatagtgt

SEQ ID NO: 220794 - DNA, 120 bp, Artificial Sequence
  ENSG00000117151_28 (sequence is synthesized)
ttactctgtggcaagcactcttctaagtgtattagtctcttatttttttttcaaaaattttacagaatcagatactagtatttatccccattttacagttgaaatggagacctttagagg

SEQ ID NO: 220795 - DNA, 120 bp, Artificial Sequence
  ENSG00000117151_29 (sequence is synthesized)
ctaagtaacttgctcaagataaaaaactagtaagtgaagtgggtacagccaggattcaaattcaaaccacctggtaccagagcccttactattccaagtgttgtctgtggacagcagcat

SEQ ID NO: 220796 - DNA, 120 bp, Artificial Sequence
  ENSG00000117151_30 (sequence is synthesized)
tagcatcagttgggagcttgttaggtaggaagaatctcaggctgcacccagacctactgagtcagatcctgcatttttaaacaggatcctcagatgatatattaaactttgagaagcact

SEQ ID NO: 220797 - DNA, 120 bp, Artificial Sequence
  ENSG00000117151_31 (sequence is synthesized)
acttatgctatactatcttgaataaatatggttgcaagagactcaggctgggttttttttgtcccttagttctgaatcttataggtagtgctgttttggggagatcattcagaaatcaat

SEQ ID NO: 220798 - DNA, 120 bp, Artificial Sequence
  ENSG00000117151_32 (sequence is synthesized)
aaaacttcttaaataatgtctgttatgtgtcaatcaggcactatggttaaatacaggattttttccccccagcctataagctgaaaactttgttctctttttttcctcttattccacttg

SEQ ID NO: 220799 - DNA, 120 bp, Artificial Sequence
  ENSG00000117151_33 (sequence is synthesized)
tccttactgtttttgtatgaacaattctaatttgagttcaaaccatgagtgacatttgtaatgttaaaatatacaaagattacaagtaatgtgcatgctttccagaagaaaacagcatga

SEQ ID NO: 220800 - DNA, 120 bp, Artificial Sequence
  ENSG00000117151_34 (sequence is synthesized)
ggggagtcataatccaagcctctgggggcatttttattactccttcctacctacccaattattaagtgtacaagtttacatattggctttatctccatatattgaatagacagttttcct

SEQ ID NO: 220801 - DNA, 120 bp, Artificial Sequence
  ENSG00000117151_35 (sequence is synthesized)
tcattgaacaaattattttttgagtgcatatttaactgatattttgttaaaaattatcctctgctcttttccttttctattttaagttttaagcttctcagtgccaaaccagggcttatt

SEQ ID NO: 220802 - DNA, 120 bp, Artificial Sequence
  ENSG00000117151_36 (sequence is synthesized)
tagcctcgagaatgctgcttgtaaaaagaatctagaactgcactgtccagtatagtagaagccagttgccatatgtaactactaaacttaaattaactaaaattaaataaaatttaaaat

SEQ ID NO: 220803 - DNA, 120 bp, Artificial Sequence
  ENSG00000117151_37 (sequence is synthesized)
tcagttcctcagtcacacaaactacatttcaagtgctcaatatcaataggtggctagtgggtaccaatctgacagtgcaggcatagaacatttctatcatcacataagttctgttggaca

SEQ ID NO: 220804 - DNA, 120 bp, Artificial Sequence
  ENSG00000117151_38 (sequence is synthesized)
gttggacagtgctaattctatttttttatttttaaattttatttatttttatttttatctgaaaccgaggacagtactgattttcttttttctttttaaaatttttttaaaaagagctaa

SEQ ID NO: 220805 - DNA, 120 bp, Artificial Sequence
  ENSG00000117151_39 (sequence is synthesized)
tgcagtcattattctgtgtcataaagctgtttctgataaagaaatgagagcattcatataattatcgttctcattttcctgccttgctgtgggtacttgtatgaaaatgtataatcttct

SEQ ID NO: 220806 - DNA, 120 bp, Artificial Sequence
  ENSG00000117151_40 (sequence is synthesized)
gttttctgttcaacaaaaaagctttttaatacatatgtacttcacagataatttctatgatgtaattagttgtacacaattctcaccaaatagagcatgcccagaagcctctactaagca

SEQ ID NO: 220807 - DNA, 120 bp, Artificial Sequence
  ENSG00000117151_41 (sequence is synthesized)
tctgctatacaaaaggtcccatgggagaaacaaagttaactaaggcatagtctctgccaggaaggaaacttaacatctagtagaagacacattattcatatttaaataatagaatacata

SEQ ID NO: 220808 - DNA, 120 bp, Artificial Sequence
  ENSG00000117151_42 (sequence is synthesized)
tgaaaataaccagaaaaaatgaaacgattacccataaaaaattaaatgtcagttcagaggagagctcagtggtttatcagacttaataattctaatacaggaaaactacttaaaattttt

SEQ ID NO: 220809 - DNA, 120 bp, Artificial Sequence
  ENSG00000117151_43 (sequence is synthesized)
tttgagaatatattgactcacaggttccttttcctttaattcttcctagtaaaattttactaaattttactttggctttattatatcatgtatcttttcacaggtttagtttttcttcct

SEQ ID NO: 220810 - DNA, 120 bp, Artificial Sequence
  ENSG00000117151_44 (sequence is synthesized)
gcattttttttttcacctatgctctttactgttaaggtaacaattttaatacagtcaatcctggctacccttatattattgacacccaaagttaaaacaccaaaatattttatttcaaga

SEQ ID NO: 220811 - DNA, 120 bp, Artificial Sequence
  ENSG00000117151_45 (sequence is synthesized)
taaatgttataataatctgattaggaaaaatgtaaattaccttaacttctactatgagtttcattttgtcagtatctagttttctcttaagctggtcaattgcatgctgtacctcagtga

SEQ ID NO: 220812 - DNA, 120 bp, Artificial Sequence
  ENSG00000117151_46 (sequence is synthesized)
tctggattattaggtaattctgtgtggatagatagatatttatttagtataacatataaacatttttatttttaactgccttgtgaacataaactatgaaatgataaagatcaaaagagt

SEQ ID NO: 220813 - DNA, 120 bp, Artificial Sequence
  ENSG00000117151_47 (sequence is synthesized)
aaatcatgaaaataacctattccgtaaagtaaactaaattgctttggagaaattactatttgtttctgttgatttcttgcattttagggaacactttctctaaagttaccattaaattag

SEQ ID NO: 220814 - DNA, 120 bp, Artificial Sequence
  ENSG00000117151_48 (sequence is synthesized)
catcgtaaaaaccaacaactattactatgaaaggaataatatcttagttattagcaagactttaaaattgtcataatgctttatcagctgaataagattagaattattttaaaatactta

SEQ ID NO: 220815 - DNA, 120 bp, Artificial Sequence
  ENSG00000117151_49 (sequence is synthesized)
ataatatgatactatattttatatgcaaaaactaatttaatacaagaaaacctatttaaaataagaagactttttggtttttgtccagaaaagtttatgagttatagtggtcctcgctaa

SEQ ID NO: 220816 - DNA, 120 bp, Artificial Sequence
  ENSG00000117151_50 (sequence is synthesized)
agaagttatttaagagttttaaactggctttgtgaaaaaattcttatattgaactgattaaacagtaagataaagtataagctatgctaaaaaaaaaagtaccaactactatggacaaac

SEQ ID NO: 220817 - DNA, 120 bp, Artificial Sequence
  ENSG00000117151_51 (sequence is synthesized)
accaactactatggacaaaccattacttgagcctatttggactttatattaaatttatttaaaataataaacttttaatatttcatcttgtctaaagttaaatccttacttttaatcata

SEQ ID NO: 220818 - DNA, 120 bp, Artificial Sequence
  ENSG00000117151_52 (sequence is synthesized)
cttttggataagtgggattgatccaacccaaatcaaattgttaaatgccctcttgaatttttttgtctgttatttaattatatggtggaattaataataaaataaacttcatgtctctga

SEQ ID NO: 220819 - DNA, 120 bp, Artificial Sequence
  ENSG00000117151_53 (sequence is synthesized)
ggtagaacggagccctaaggagaggtgccgtgggcgccgaaaccagctttgaccactcgatgagggccttcctgtttacggatccttcaatttatagatgaggaagctcgggctcagaga

SEQ ID NO: 220820 - DNA, 120 bp, Artificial Sequence
  ENSG00000117151_54 (sequence is synthesized)
agttgagtaactcctcaggcctcacagcctgtaagtgcctgcgtaggcaggcgagagttcaaaccagatctgcctcctaaggcaagctcctttcattcccctgctgtgcctctgcggaag

SEQ ID NO: 220821 - DNA, 120 bp, Artificial Sequence
  ENSG00000117152_0 (sequence is synthesized)
gacattgagtacattttttcccatatccctacttttcagaaggattttctctgctcgttcacttaacattgctgatgcgtcagtcttttcttcctcatctctttcaggggctggagaggc

SEQ ID NO: 220822 - DNA, 120 bp, Artificial Sequence
  ENSG00000117152_1 (sequence is synthesized)
agagggagacagaggagctggtactgcagagcggtcgtctgattggctggacggtcgtagctgggctataaaagagacccctacaggcttagcaggaagacgctcagaggattctgacaa

SEQ ID NO: 220823 - DNA, 120 bp, Artificial Sequence
  ENSG00000117152_2 (sequence is synthesized)
tatctttaccggagaagaggcaaagtacgctcaaagccgaagccacagctcctcctgccgcatttctttcctgcttgcgaattccaagctgttaaataagatgtgcaaagggcttgcagg

SEQ ID NO: 220824 - DNA, 120 bp, Artificial Sequence
  ENSG00000117152_3 (sequence is synthesized)
tctgccggcttcttgcttgaggagtgcaaaagatatgaaacatcggctaggtttcctgctgcaaaaatctgattcctgtgaacacaattcttcccacaacaagaaggacaaagtggttat

SEQ ID NO: 220825 - DNA, 120 bp, Artificial Sequence
  ENSG00000117152_4 (sequence is synthesized)
ttgccagagagtgagccaagaggaagtcaagaaatgggctgaatcactggaaaacctgattagtcatgaatgtgggctggcagctttcaaagctttcttgaagtctgaatatagtgagga

SEQ ID NO: 220826 - DNA, 120 bp, Artificial Sequence
  ENSG00000117152_5 (sequence is synthesized)
gaatattgacttctggatcagctgtgaagagtacaagaaaatcaaatcaccatctaaactaagtcccaaggccaaaaagatctataatgaattcatctcagtccaggcaaccaaagaggt

SEQ ID NO: 220827 - DNA, 120 bp, Artificial Sequence
  ENSG00000117152_6 (sequence is synthesized)
gaacctggattcttgcaccagggaagagacaagccggaacatgctagagcctacaataacctgctttgatgaggcccagaagaagattttcaacctgatggagaaggattcctaccgccg

SEQ ID NO: 220828 - DNA, 120 bp, Artificial Sequence
  ENSG00000117152_7 (sequence is synthesized)
cttcctcaagtctcgattctatcttgatttggtcaacccgtccagctgtggggcagaaaagcagaaaggagccaagagttcagcagactgtgcttccctggtccctcagtgtgcctaatt

SEQ ID NO: 220829 - DNA, 120 bp, Artificial Sequence
  ENSG00000117152_8 (sequence is synthesized)
ctcacctgaaggcagagggatgaaatgccaagactctatgctctggaaaacctgaggccaaatattgatctgtattaagctccagtgctttatccacattgtagcctaatattcatgctg

SEQ ID NO: 220830 - DNA, 120 bp, Artificial Sequence
  ENSG00000117152_9 (sequence is synthesized)
cctgccatgtgtgagtcacttctacgcataaactagatatagcttttggtgtttgagtgttcatcagggtgggaccccattccagtccaattttcctaagtttctttgagggttccatgg

SEQ ID NO: 220831 - DNA, 120 bp, Artificial Sequence
  ENSG00000117152_10 (sequence is synthesized)
gagcaaatatctaaataatggcctggtaggtctggattttcaaagattgttggcagtttcctcctcccaacagttttacctcgggatggttggttagtgcatgtcacatgacatccacat

SEQ ID NO: 220832 - DNA, 120 bp, Artificial Sequence
  ENSG00000117152_11 (sequence is synthesized)
gcacatgtattctgttggccagcacgttctccagactctagatgtttagatgaggttgagctatgatatgtgcttgtgtgtatgtctatgtgtatatattatatatacattagacacaca

SEQ ID NO: 220833 - DNA, 120 bp, Artificial Sequence
  ENSG00000117152_12 (sequence is synthesized)
tatgtctatgtgtatatattatatatacattagacacacatatacattatttctgtatatagatgtctgtgtatacatatgtatgtgtgagtgtatgtatacacacacacacacacacac

SEQ ID NO: 220834 - DNA, 120 bp, Artificial Sequence
  ENSG00000117152_13 (sequence is synthesized)
tgaactaactgccatgtaggctaagaaagaaatgctaacctgtggaaagttggttttgtaaaattccatggatcttgctggagaagcatccaaggaacttcatgcttgatttgaccactg

SEQ ID NO: 220835 - DNA, 120 bp, Artificial Sequence
  ENSG00000117152_14 (sequence is synthesized)
acagcctccaccttgagcactattctaaggagcaaataccttagctcccttgagctggttttctctgatggcacttttgagctcctaagctgccagccttcccttcttttcctgggtgct

SEQ ID NO: 220836 - DNA, 120 bp, Artificial Sequence
  ENSG00000117152_15 (sequence is synthesized)
cagggcatgcttattagcagctgggttggtatggagttggcagacaggatgttcaacttaatgaagaaatacagctaaggccttgccagcaacacctgccgtaagttactggctgagtga

SEQ ID NO: 220837 - DNA, 120 bp, Artificial Sequence
  ENSG00000117152_16 (sequence is synthesized)
gggcatagaagttaaaggttactgtttttatcctctatccttttttcctttcctgatcaaggtgctcttctcattttttcctgagaaccttagccatcagatgaggctccttagtttatt

SEQ ID NO: 220838 - DNA, 120 bp, Artificial Sequence
  ENSG00000117152_17 (sequence is synthesized)
gtggttggttgttttttctttataatggctctgggctatatgcctatatttataaaccagcagcaggggaaagattatattttataagagggaacaaattttcacaatttgaaaagccca

SEQ ID NO: 220839 - DNA, 120 bp, Artificial Sequence
  ENSG00000117152_18 (sequence is synthesized)
cataagttttctcttttaaggtagaatcttgttaatttcattccaaacatcggggctaacagagactggaggcatttctttttaggctctgagactaaatgagaggaaaagaaaagaaaa

SEQ ID NO: 220840 - DNA, 120 bp, Artificial Sequence
  ENSG00000117152_19 (sequence is synthesized)
aaaaaatgattgtctaaccaattgtgagaattactgtttgaaacttttcaaggcacattgaaatacttgaaaacttctcatttatgttatttatgatgttattttgtacgtgttattatt

SEQ ID NO: 220841 - DNA, 120 bp, Artificial Sequence
  ENSG00000117152_20 (sequence is synthesized)
attatattgttttataaatggaggtacaggatatcacctgaattattaatgaatgcccaggaagtaattttcttctcattcttctaaaactactgcctttcaaagtgcacacacacgcgt

SEQ ID NO: 220842 - DNA, 120 bp, Artificial Sequence
  ENSG00000117152_21 (sequence is synthesized)
ccacatacactgcattcgttgctccagtataaattacatgcatgagcacctttctggcttttaagccaatataatgggctgcaaaatgaagacaccagagtgtatgcatacaaatctcac

SEQ ID NO: 220843 - DNA, 120 bp, Artificial Sequence
  ENSG00000117152_22 (sequence is synthesized)
tgtattaaagatgcaggttttctaattgtacccttcttgtctctctggcaatcttgcccttaatatccctggagttcctcatcagtgtcattttctgttatacacagttccacaattttg

SEQ ID NO: 220844 - DNA, 120 bp, Artificial Sequence
  ENSG00000117152_23 (sequence is synthesized)
tctctagttgacttcaaatgtgtaactttattggtcttgccctattataattgtcatgactttcagattgtatctgaactcacagactgctgtcttactaataggtctggaaggtcacgc

SEQ ID NO: 220845 - DNA, 120 bp, Artificial Sequence
  ENSG00000117152_24 (sequence is synthesized)
tgaatgagaagtaaattattttatgtaatacatttttgagtgtgtttttcagttgtatttccctgttatttcatcactatttccaatggtgagcttgcctgctcatgctccctggacaga

SEQ ID NO: 220846 - DNA, 120 bp, Artificial Sequence
  ENSG00000117152_25 (sequence is synthesized)
atactccttccttttgcatgcctgtttctatcatgtgcttgataggcctcaaagctaatgcttccagtgaaacacacgcatcttaataataagggtaaataaacgctccatatgaaacta

SEQ ID NO: 220847 - DNA, 120 bp, Artificial Sequence
  ENSG00000117152_26 (sequence is synthesized)
aaactgaagggtcagaattccagttgtggatgaaggaaatggtgttatgactgcctcaaggttttgtagcaagtcatagggaaccaagaggaatcttgttttcctcagagtgcaaaagat

SEQ ID NO: 220848 - DNA, 120 bp, Artificial Sequence
  ENSG00000117152_27 (sequence is synthesized)
agtttctgtatgctgccgggcttataactgtctgtcatccagctatttctctccaccttcttgtttgcataacaaccaaggcaacttccgcaaatcactgcgtggagacgatgatcctgc

SEQ ID NO: 220849 - DNA, 120 bp, Artificial Sequence
  ENSG00000117152_28 (sequence is synthesized)
atcgatggcttctttaaaatgaagcaggagggtctggcagagagtatctatgaaataagttcctctgaccttcacgcttaattttctgaatggagtggagcaaattacttcaagcttcac

SEQ ID NO: 220850 - DNA, 120 bp, Artificial Sequence
  ENSG00000117152_29 (sequence is synthesized)
aagccagatttggatcaagatagcctccattttcatggagatcataactacatttgaaatttctatacatttagtgaaaaactgccctcatcaataacatattttgtcataacgatggaa

SEQ ID NO: 220851 - DNA, 120 bp, Artificial Sequence
  ENSG00000117152_30 (sequence is synthesized)
gatattttgatacatgcatacaatgtgataacaatcaaatcagggcaattgctatatacatatctcaaacatttattatttctacgtgttgagaacattccaaatctcctcttctagcta

SEQ ID NO: 220852 - DNA, 120 bp, Artificial Sequence
  ENSG00000117152_31 (sequence is synthesized)
tctcctcttctagctatcttaaaatatacaataaactattgataactatatcaccctaatgtgctatcaaacactagaacctattccctctacccaactttctatctattccttctaccc

SEQ ID NO: 220853 - DNA, 120 bp, Artificial Sequence
  ENSG00000117152_32 (sequence is synthesized)
attagccaacctgaccaaaaaggtaagcttttatggcagagaactctctggatcttagtgaaggttcctagaatagtggagctgactatcataatcttgacaaccccaaataaatcagtt

SEQ ID NO: 220854 - DNA, 120 bp, Artificial Sequence
  ENSG00000117152_33 (sequence is synthesized)
ttttaaaaaatctcttttatccatgtggcttaccataacctccctgcatgaatttttctgatgaatctccccaatttgttagacagaacagaagatcttgccctgctctctctaaagcag

SEQ ID NO: 220855 - DNA, 120 bp, Artificial Sequence
  ENSG00000117152_34 (sequence is synthesized)
aaaggttcattctgaacctttcatactctctcacatgtgccaaggaggaccccaatgtcacttttgttttttgcttctgaaatacagagggtgcactgccacttacaagtcactacaaag

SEQ ID NO: 220856 - DNA, 120 bp, Artificial Sequence
  ENSG00000117152_35 (sequence is synthesized)
atcaaatcaccatctaaactaagtcccaaggccaaatattgatctgtattaagctccagtgctttatccacattgtagcctaatattcatgctgcctgccatgtgtgagtcacttctacg

SEQ ID NO: 220857 - DNA, 120 bp, Artificial Sequence
  ENSG00000117153_0 (sequence is synthesized)
agacccggacggctccagagcctccagagcctccgggtctgggcggcgcttcggctcctcccgagccgcctgctagccccgcgccgcactccatccccacaggctggggacgggcccggt

SEQ ID NO: 220858 - DNA, 120 bp, Artificial Sequence
  ENSG00000117153_1 (sequence is synthesized)
gcggctgtgtgggttcgggagcggagttgcagaatccaaggacccattttgttctttctccgcactgctttatgggaggcattatggcccccaaagacataatgacaaatactcatgcta

SEQ ID NO: 220859 - DNA, 120 bp, Artificial Sequence
  ENSG00000117153_2 (sequence is synthesized)
aatccatcctcaattcaatgaactccctcaggaagagcaataccctctgtgatgtgacattgagagtagagcagaaagacttccctgcccatcggattgtgctggctgcctgtagtgatt

SEQ ID NO: 220860 - DNA, 120 bp, Artificial Sequence
  ENSG00000117153_3 (sequence is synthesized)
acttctgtgccatgttcactagtgagctctcagagaaggggaaaccttatgttgacatccaaggtttgactgcctctaccatggaaattttattggactttgtgtacacagaaacagtac

SEQ ID NO: 220861 - DNA, 120 bp, Artificial Sequence
  ENSG00000117153_4 (sequence is synthesized)
atgtgacagtggagaatgtacaagaactgcttcctgcagcctgtctgcttcagttgaaaggtgtgaaacaagcctgctgtgagttcttagaaagtcagttggacccttctaattgcctgg

SEQ ID NO: 220862 - DNA, 120 bp, Artificial Sequence
  ENSG00000117153_5 (sequence is synthesized)
gtattagggattttgctgaaacccacaattgtgttgacctgatgcaagcagctgaggtttttagccagaagcattttcctgaagtggtacagcatgaagagttcattcttctgagtcaag

SEQ ID NO: 220863 - DNA, 120 bp, Artificial Sequence
  ENSG00000117153_6 (sequence is synthesized)
gagaggtggaaaagctaatcaagtgcgacgaaattcaggtggattctgaagagccagtctttgaggctgtcatcaactgggtgaagcatgccaagaaagagcgggaagaatccttgccta

SEQ ID NO: 220864 - DNA, 120 bp, Artificial Sequence
  ENSG00000117153_7 (sequence is synthesized)
acctgctacagtatgtgcggatgcccctactaacccccaggtatatcacagatgtaatagatgctgagcctttcatccgctgtagtttacaatgcagggatctggttgatgaagcaaaga

SEQ ID NO: 220865 - DNA, 120 bp, Artificial Sequence
  ENSG00000117153_8 (sequence is synthesized)
agtttcatctgaggcctgaacttcggagtcagatgcagggacccaggacaagggctcgcctaggagccaatgaagtgcttttggtggttgggggctttggaagccagcagtctcccattg

SEQ ID NO: 220866 - DNA, 120 bp, Artificial Sequence
  ENSG00000117153_9 (sequence is synthesized)
atgtggtagagaaatatgaccccaagactcaggagtggagctttttgccaagcatcactcgtaagagacgttatgtggcctcagtgtcccttcatgaccggatctacgtcattggtggct

SEQ ID NO: 220867 - DNA, 120 bp, Artificial Sequence
  ENSG00000117153_10 (sequence is synthesized)
atgatggccgttcccgccttagttcagtggaatgtctagactacacagcagatgaggatggggtctggtattctgtggcccctatgaatgtccgacgaggtcttgctggagccaccaccc

SEQ ID NO: 220868 - DNA, 120 bp, Artificial Sequence
  ENSG00000117153_11 (sequence is synthesized)
tgggagatatgatctatgtctctggaggctttgatggaagcaggcgtcacaccagtatggagcgctatgatccaaacattgaccagtggagcatgctgggagatatgcagacagcccggg

SEQ ID NO: 220869 - DNA, 120 bp, Artificial Sequence
  ENSG00000117153_12 (sequence is synthesized)
aaggtgccggactcgtagtggccagtggagtgatctactgtctaggaggatatgacggcttgaatatcttaaattcagttgagaaatacgaccctcatacaggacattggactaatgtta

SEQ ID NO: 220870 - DNA, 120 bp, Artificial Sequence
  ENSG00000117153_13 (sequence is synthesized)
tttgatggtacagcccacctttcttccgttgaagcatacaacattcgcactgattcctggacaactgtcaccagtatgaccactccacgatgctatgtaggggccacagtgcttcggggg

SEQ ID NO: 220871 - DNA, 120 bp, Artificial Sequence
  ENSG00000117153_14 (sequence is synthesized)
agactctatgcaattgcaggatatgatggtaattccctgctaagtagcattgaatgttatgaccctatcatcgacagctgggaagtcgtgacatccatgggaacccagcgctgtgatgct

SEQ ID NO: 220872 - DNA, 120 bp, Artificial Sequence
  ENSG00000117153_15 (sequence is synthesized)
ggtgtttgtgttctccgcgagaagtgaccattgttggagcaccatccagagctagtgaccagtccagtggacagttagtgggagaatcaaaaatcctttccagaatgtctgtttctcact

SEQ ID NO: 220873 - DNA, 120 bp, Artificial Sequence
  ENSG00000117153_16 (sequence is synthesized)
atgtgcaccgggtgattacaggcaccagtgcagtgatgattgtacttatttgacacatactccccgtcgtcctggttcttgttcctgagaagggtgggtaacagatattccaggaaaaag

SEQ ID NO: 220874 - DNA, 120 bp, Artificial Sequence
  ENSG00000117153_17 (sequence is synthesized)
aatgcacattgaatggatgtgagagaccacattgcctctcccactgctttggggagcactttcctgtcatttctaacttaccacatgcttggtgtactatatgtatgttgtgcctcatat

SEQ ID NO: 220875 - DNA, 120 bp, Artificial Sequence
  ENSG00000117153_18 (sequence is synthesized)
gttgcaaagaactaaggtgagtatagcctactagatatgggcaatatccagcctagatgattggaaagataccagtttaagtaaacttggtaaaatccaagtctttttttttttttccag

SEQ ID NO: 220876 - DNA, 120 bp, Artificial Sequence
  ENSG00000117153_19 (sequence is synthesized)
gaacaactacattttctcatatacaggtagctaggggcaacacagttccattctagagggaaacaaaagggagagccccacaaaactttggggacaagggagagagagactcatctgaca

SEQ ID NO: 220877 - DNA, 120 bp, Artificial Sequence
  ENSG00000117153_20 (sequence is synthesized)
cttcttttggaggtcaggatttgtatatcagaattgaagttagaattaagtgaattaaactgaatttgattgtgagtgaacctagaacagcactgaagtattacataacctggaagactg

SEQ ID NO: 220878 - DNA, 120 bp, Artificial Sequence
  ENSG00000117153_21 (sequence is synthesized)
agaagggtatattatttgaaggatctttttatttccccgaggtctttcgcactggagacagcataaaagagtgaacaaatgttgggatgagagaagatgacatcaatgtgggagttcagt

SEQ ID NO: 220879 - DNA, 120 bp, Artificial Sequence
  ENSG00000117153_22 (sequence is synthesized)
ataactggggataaactagaagaacctgtgattttacagtcatcttattacctgccagggctcatctagccatggcaatgtttgccttgaatgggggtgaaagcctttctttgttggatc

SEQ ID NO: 220880 - DNA, 120 bp, Artificial Sequence
  ENSG00000117153_23 (sequence is synthesized)
aaatactactacactattacacttccacactatttatttggggatgggctgggagtgacagtagcctagtagttcagctacctgattactgccccattcttttagaagcacatgtctgcc

SEQ ID NO: 220881 - DNA, 120 bp, Artificial Sequence
  ENSG00000117153_24 (sequence is synthesized)
aaggagtggtttgtactgctgtgtttggtacatctagtcttttttctgctataagttttccttacctgtcctttagtgtagattttattcatcacaggacagaataatcaaggacaacca

SEQ ID NO: 220882 - DNA, 120 bp, Artificial Sequence
  ENSG00000117153_25 (sequence is synthesized)
aaatccttttgttagtttcagtacctcagctatcaacatttctgagctaccattcaatgttcctctgtgtcatggagtgaaattcttgttttgtgggtattaggagtgtgggaatgtgat

SEQ ID NO: 220883 - DNA, 120 bp, Artificial Sequence
  ENSG00000117153_26 (sequence is synthesized)
aacctaaacaacctttgctctgaaattccatttttccctctttccctgagttgtattgacctacagagttaatttcctttgtatttttttaagaaaatattaaaaatcaacggtctcaaa

SEQ ID NO: 220884 - DNA, 120 bp, Artificial Sequence
  ENSG00000117153_27 (sequence is synthesized)
gcagagtatatactgaggtctgtggatcctaaggctcagaggattctcgccgcagcgttgttcggcccgaaaaggccattgtggacaatggacgtgaataaatttgaggcctctgtgggt

SEQ ID NO: 220885 - DNA, 120 bp, Artificial Sequence
  ENSG00000117154_0 (sequence is synthesized)
gattcggctccaaactccggcgctgcagccgatcggactctgggccgcggtgggcaccgcgcgcagctagggagccgagaaccgcggcgagccccgaggacgcccagagcgcgagggtcg

SEQ ID NO: 220886 - DNA, 80 bp, Artificial Sequence
  ENSG00000117154_1 (sequence is synthesized)
cagagcgcgagggtcgctgcgcctcgcagagccggagccgagtcgagccgggcgcccgggctgcctggccgcggcggcat

SEQ ID NO: 220887 - DNA, 80 bp, Artificial Sequence
  ENSG00000117154_2 (sequence is synthesized)
ccagtggccggaggcaggagcgcgtctgagcccatggcgaggggacccgccgccaccgcctccacccccgccgccccgcc

SEQ ID NO: 220888 - DNA, 120 bp, Artificial Sequence
  ENSG00000117154_3 (sequence is synthesized)
cgtctgcctgctgctcgccgcgatcctggacctggcgcgcggctacctgacagtcaacattgagcctctcccccctgtggtggctggagacgccgtgactttgaagtgtaacttcaagac

SEQ ID NO: 220889 - DNA, 120 bp, Artificial Sequence
  ENSG00000117154_4 (sequence is synthesized)
agatgggcgcatgcgggagatcgtgtggtaccgggtgacggatggtggcaccatcaagcaaaagatcttcaccttcgacgccatgttctccaccaactactcacacatggagaactaccg

SEQ ID NO: 220890 - DNA, 120 bp, Artificial Sequence
  ENSG00000117154_5 (sequence is synthesized)
caagcgagaggacctggtgtaccagtccactgtgaggctgcccgaggtccggatctcagacaatggtccctatgagtgccatgtgggcatctacgaccgcgccaccagggagaaggtggt

SEQ ID NO: 220891 - DNA, 120 bp, Artificial Sequence
  ENSG00000117154_6 (sequence is synthesized)
cctggcatcaggcaacatcttcctcaacgtcatggctcctcccacctccattgaagtggtggctgctgacacaccagcccccttcagccgctaccaagcccagaacttcacgctggtctg

SEQ ID NO: 220892 - DNA, 120 bp, Artificial Sequence
  ENSG00000117154_7 (sequence is synthesized)
cgagctccggccccctacaggacagcaggcccttccgcagccttctgcaccgtgacctggatgacaccaagatgcagaagtcactgtccctcctggacgccgagaaccggggtgggcgac

SEQ ID NO: 220893 - DNA, 120 bp, Artificial Sequence
  ENSG00000117154_8 (sequence is synthesized)
cctacacggagcgcccctcccgtggcctgaccccagatcccaacatcctcctccagccaaccacagagaacataccagagacggtcgtgagccgtgagtttccccgctgggtccacagcg

SEQ ID NO: 220894 - DNA, 120 bp, Artificial Sequence
  ENSG00000117154_9 (sequence is synthesized)
ccgagcccacctacttcctgcgccacagccgcaccccgagcagtgacggcactgtggaagtacgtgccctgctcacctggaccctcaacccacagatcgacaacgaggccctcttcagct

SEQ ID NO: 220895 - DNA, 120 bp, Artificial Sequence
  ENSG00000117154_10 (sequence is synthesized)
gcgaggtcaagcacccagctctgtcgatgcccatgcaggcagaggtcacgctggttgcccccaaaggacccaaaattgtgatgacgcccagcagagcccgggtaggggacacagtgagga

SEQ ID NO: 220896 - DNA, 120 bp, Artificial Sequence
  ENSG00000117154_11 (sequence is synthesized)
ttctggtccatgggtttcagaacgaagtcttcccggagcccatgttcacgtggacgcgggttgggagccgcctcctggacggcagcgctgagttcgacgggaaggagctggtgctggagc

SEQ ID NO: 220897 - DNA, 120 bp, Artificial Sequence
  ENSG00000117154_12 (sequence is synthesized)
gggttcccgccgagctcaatggctccatgtatcgctgcaccgcccagaacccactgggctccaccgacacgcacacccggctcatcgtgtttgaaaacccaaatatcccaagaggaacgg

SEQ ID NO: 220898 - DNA, 120 bp, Artificial Sequence
  ENSG00000117154_13 (sequence is synthesized)
aggactctaatggttccattggccccactggtgcccggctcaccttggtgctcgccctgacagtgattctggagctgacgtgaaggcacccgccccggccactccatcaggcactgacat

SEQ ID NO: 220899 - DNA, 120 bp, Artificial Sequence
  ENSG00000117154_14 (sequence is synthesized)
ctccacgaccggttttcatttcttttctaaactatttccagtcttgttcttagtctctttccatctgtgtcttggcttcttcagtcggtttaattaaaacaaacagaacaattttcccca

SEQ ID NO: 220900 - DNA, 120 bp, Artificial Sequence
  ENSG00000117154_15 (sequence is synthesized)
ccccactgtccactgggcctctctgatcttgtccctcatggcactggcttgtacttgtctgttgtttgtctttcttccccactgatgtgtgaaccccccaagagcaggaatcatgtccta

SEQ ID NO: 220901 - DNA, 120 bp, Artificial Sequence
  ENSG00000117154_16 (sequence is synthesized)
tatacacccttgactccccaggtcctagagagcatctgattcattgcatgggcttagggaatatgtctgaatgaatgcagctgtgaatgagtgaatgaatgaatgagcacactgagcttc

SEQ ID NO: 220902 - DNA, 120 bp, Artificial Sequence
  ENSG00000117154_17 (sequence is synthesized)
tttttgtgatgtgaagatactcactgtgacaagttacaaacagttaaccgccggttcataaaattcctgaaaatgtcacaacctgctccagcatgccagttcaagtcataatccccctga

SEQ ID NO: 220903 - DNA, 120 bp, Artificial Sequence
  ENSG00000117154_18 (sequence is synthesized)
cagcacaccacgtgctctgtgccctgctcatatgcccagccccgctgggcaccgcattccccctggcctgccccgctctgtcctggccaacctactgcgggctctggcacaaaaataatc

SEQ ID NO: 220904 - DNA, 120 bp, Artificial Sequence
  ENSG00000117154_19 (sequence is synthesized)
cacacacctgtggtcccagctacttgagaggctgggaatctcaggacttgttaaaactcaaggtgttaaaactcaaagctccttctacctgccacgctgtctcccacccactcttgtgac

SEQ ID NO: 220905 - DNA, 120 bp, Artificial Sequence
  ENSG00000117154_20 (sequence is synthesized)
cactcttgtgacctcagatcacggcagcaatgtggctgcttcagcagcgtctgcccagaactcccaggctcgggcagagtcccctcaacacactgatgcctccggggatctgatgcactt

SEQ ID NO: 220906 - DNA, 120 bp, Artificial Sequence
  ENSG00000117154_21 (sequence is synthesized)
cacactttgatctgtgctatctcttgattcctgtgtgtcttctacactaaactgtaagctccaggaggggagggctcttgtctatattcccagcaaggacgtgttcctcactgtagtgga

SEQ ID NO: 220907 - DNA, 120 bp, Artificial Sequence
  ENSG00000117154_22 (sequence is synthesized)
taccaatggcaccccctggagtttggcaacacctgccctcccccacccccggcacccagcatggacgtggcccatcttaggtcatcagtgaactcttcctgaatctcccagttgagccct

SEQ ID NO: 220908 - DNA, 80 bp, Artificial Sequence
  ENSG00000117155_0 (sequence is synthesized)
cctcggaaacctgcggaggccgggaggcggctgcaaggggcggggaaggcgggagcccgcagcggaggaggggccgcggg

SEQ ID NO: 220909 - DNA, 120 bp, Artificial Sequence
  ENSG00000117155_1 (sequence is synthesized)
gagccgggctaggacgccgagcggtgactccccgccgctcccgggggccgtgacggagatgcctacatagaagagtgacagcagctagactaaatgtttaactgctgaactagttcctca

SEQ ID NO: 220910 - DNA, 120 bp, Artificial Sequence
  ENSG00000117155_2 (sequence is synthesized)
ggtatcctggctctagagattgctatgggagattggatgactgttacagatccaggtctgtcttcagaaagcaaaactatctctcaatatacctcagaaacaaagatgtctccatcaagt

SEQ ID NO: 220911 - DNA, 120 bp, Artificial Sequence
  ENSG00000117155_3 (sequence is synthesized)
ttatactcacagcaagtgctatgttcttcaatacctttatcgaaaaatgtgcacagttttttcagtgccttctgcacagaagataatattgaacagagtatctcatatcttgatcaggaa

SEQ ID NO: 220912 - DNA, 120 bp, Artificial Sequence
  ENSG00000117155_4 (sequence is synthesized)
ttgactacttttggttttccttcattatatgaagaatccaaaggtaaagagacaaagagagagttaaatatagtagctgtactaaattgtatgaatgagctgcttgtgcttcagcggaag

SEQ ID NO: 220913 - DNA, 120 bp, Artificial Sequence
  ENSG00000117155_5 (sequence is synthesized)
aaccttctagctcaggaaaatgtggagacacagaatttgaagctgggaagtgatatggaccatctacagagctgctactcaaaacttaaggaacaactggaaacctccaggagggaaatg

SEQ ID NO: 220914 - DNA, 120 bp, Artificial Sequence
  ENSG00000117155_6 (sequence is synthesized)
attgggcttcaggaaagagacagacagttacaatgtaagaacaggaatttgcatcagctactaaagaatgagaaagatgaggtgcaaaaattacaaaatatcattgcaagtcgagctact

SEQ ID NO: 220915 - DNA, 120 bp, Artificial Sequence
  ENSG00000117155_7 (sequence is synthesized)
cagtataatcatgatatgaagagaaaagagcgtgaatataataaactgaaggaacgtctacatcaacttgttatgaacaagaaagataagaaaatagctatggacattttgaattatgtc

SEQ ID NO: 220916 - DNA, 120 bp, Artificial Sequence
  ENSG00000117155_8 (sequence is synthesized)
gggagagctgatggaaaaagaggctcctggaggactggtaaaactgaagccaggaatgaagatgaaatgtataaaattctcttgaatgattatgaatatcgtcagaaacaaatcctaatg

SEQ ID NO: 220917 - DNA, 120 bp, Artificial Sequence
  ENSG00000117155_9 (sequence is synthesized)
gaaaatgcagaacttaagaaggttcttcaacaaatgaaaaaggaaatgatttctcttctttctccccaaaagaagaaacctagagaaagagtagatgatagtacaggaactgttatttcc

SEQ ID NO: 220918 - DNA, 120 bp, Artificial Sequence
  ENSG00000117155_10 (sequence is synthesized)
gatgttgaagaagatgccggggaactaagcagagagagtatgtgggacctttcctgtgaaactgtgagagagcagcttacaaacagcatcagaaaacagtggagaattttgaaaagtcat

SEQ ID NO: 220919 - DNA, 120 bp, Artificial Sequence
  ENSG00000117155_11 (sequence is synthesized)
gtagaaaagcttgataaccaagtttcaaaggtacacctggaaggttttaatgatgaagatgtaatctcacgacaagaccatgaacaagaaactgaaaaactcgagttagaaattcagcag

SEQ ID NO: 220920 - DNA, 120 bp, Artificial Sequence
  ENSG00000117155_12 (sequence is synthesized)
tgtaaagaaatgattaaaactcagcaacagcttttacagcagcagctcgctactgcatatgatgatgataccacttcactattacgagactgttatttgttggaagaaaaggaacgtctc

SEQ ID NO: 220921 - DNA, 120 bp, Artificial Sequence
  ENSG00000117155_13 (sequence is synthesized)
aaagaagaatggtccctttttaaagagcagaaaaagaattttgagagggagagacgaagctttacagaagccgctattcgcctgggattggagagaaaggcatttgaagaagaaagagcc

SEQ ID NO: 220922 - DNA, 120 bp, Artificial Sequence
  ENSG00000117155_14 (sequence is synthesized)
agttggttaaagcagcagtttctaaatatgactacctttgaccaccagaactcagaaaatgtgaaacttttcagtgccttctcaggaagttctgattgggacaatcttatagtgcactcg

SEQ ID NO: 220923 - DNA, 120 bp, Artificial Sequence
  ENSG00000117155_15 (sequence is synthesized)
aggcagccgcaaaagaagcctcacagtgtgtctaatgggtctccagtttgcatgtctaaacttactaaatctcttcctgcttcaccttccacttcagacttttgccagacacgttcctgc

SEQ ID NO: 220924 - DNA, 120 bp, Artificial Sequence
  ENSG00000117155_16 (sequence is synthesized)
atatctgaacatagttcaatcaatgtactgaatataactgctgaagaaattaaaccaaatcaggttggaggagaatgtacaaatcaaaaatggagtgtggcatcaagacctggatcacag

SEQ ID NO: 220925 - DNA, 120 bp, Artificial Sequence
  ENSG00000117155_17 (sequence is synthesized)
gaaggttgctatagtggatgctccttgagctacacaaattctcatgtagaaaaagatgacttaccttagacatgtggactggaatttttttcattaatgtgttcatcaagtttcacatct

SEQ ID NO: 220926 - DNA, 120 bp, Artificial Sequence
  ENSG00000117155_18 (sequence is synthesized)
aagttgaaacagggtgtgtcataaagtcagttatctctaataacttaagatggtctgagttgtttgtttggacttccctgtcttcccccaaagagttgaaatcttaaatctatttaaaag

SEQ ID NO: 220927 - DNA, 120 bp, Artificial Sequence
  ENSG00000117155_19 (sequence is synthesized)
gatataaaagctttggatatgtatttttagtaacagaagcatctggttctgtgaataaaggaatgtatagatgtttggatggaaacaaaagcactagactgagtttcctcttataggtat

SEQ ID NO: 220928 - DNA, 120 bp, Artificial Sequence
  ENSG00000117155_20 (sequence is synthesized)
taaaaatagcacttttaggaaactgattattgtaaatgtttaattttgtctcaaatatagttggcattggaagtttagcctttacttgaatgtatactgtagatttttaacaaagcgagt

SEQ ID NO: 220929 - DNA, 120 bp, Artificial Sequence
  ENSG00000117155_21 (sequence is synthesized)
tctatatttattatgtttagtgtggtttgaaattacctctttcatatgttttaaataaagtgaaatttatgtatgttttgtacatagatacacatgattatgttaagaggctttaagatt

SEQ ID NO: 220930 - DNA, 120 bp, Artificial Sequence
  ENSG00000117155_22 (sequence is synthesized)
taaaagtttcacacaaccataagtatagtatttcatgccagtaaaatttttttagtggtattctgtttacagatgtattaggaccattgatgcattacatttaagaattctctttaatac

SEQ ID NO: 220931 - DNA, 120 bp, Artificial Sequence
  ENSG00000117155_23 (sequence is synthesized)
atctgggcaataaatattgaaaggtattccatgaagctgagttctttagataatcaacactactaacattacatttttgagatttttatgacattagatttttattttgtatatgtagaa

SEQ ID NO: 220932 - DNA, 120 bp, Artificial Sequence
  ENSG00000117155_24 (sequence is synthesized)
atttaagaaattggtttaagatattggatgatagaagatatttaagatatctagatggtgatattttccttacaagatgggtaccagtatagtaatatctgtatactaactagggctttg

SEQ ID NO: 220933 - DNA, 120 bp, Artificial Sequence
  ENSG00000117155_25 (sequence is synthesized)
tttgtattgtcaataattttttaataattttttaatgaggtatttaccactgaagaaatatgataatataaaaccatcaaattttataattgagatgatactctggaaaaacatgtcatt

SEQ ID NO: 220934 - DNA, 120 bp, Artificial Sequence
  ENSG00000117155_26 (sequence is synthesized)
tttcagaaaactcttaagctctcttcagtctctgtaatgtttctgattgcatgtttcttcatgaaaagtatgttgttgttttgatagtaataataataaatgtaggctcagctctttccc

SEQ ID NO: 220935 - DNA, 120 bp, Artificial Sequence
  ENSG00000117155_27 (sequence is synthesized)
aggattttcatcaaaaagctttaagtgcctaaccctgcttgtctctgtacatagaagcctgcacagatccaacccttgctaggtatcatagtttaggcccatttaccttcccctgtactg

SEQ ID NO: 220936 - DNA, 120 bp, Artificial Sequence
  ENSG00000117155_28 (sequence is synthesized)
gcagttcagccgcttacatgcactcaccctgtttgtggctattttaaattcatattattaaaaaacaaaaaaaacccacctatttgtgttgtccattcactatacgtaactatgtaactc

SEQ ID NO: 220937 - DNA, 120 bp, Artificial Sequence
  ENSG00000117155_29 (sequence is synthesized)
tttggagttgcatagcagcagccattttttcagggctgataggatatcattaagagtgtcttatgagacattagtggatatactcatagtaaccatatttatagttttaaagagctagct

SEQ ID NO: 220938 - DNA, 120 bp, Artificial Sequence
  ENSG00000117155_30 (sequence is synthesized)
cttgagcattagtcactaccttcagcttgatgcatggtcacttctttactatttaaaatactacacattgtacaaaatatcgaagacactaccatatgctaaaggaagaaatctagctgg

SEQ ID NO: 220939 - DNA, 120 bp, Artificial Sequence
  ENSG00000117155_31 (sequence is synthesized)
gatataggatttttgttgtttttgtttttgtttgttttgctatttagcaataacatggtcaaaaaggcaatcagaaattttaaatacagttaatggatacatttggcaacaattttcccc

SEQ ID NO: 220940 - DNA, 120 bp, Artificial Sequence
  ENSG00000117155_32 (sequence is synthesized)
cgagggttttccatggtgtactttgcaagaaataagcactctaatttttaaagtaaatctcttattttagcaaatattatatttcatgacaatggagttctagaaagcagcatctgtttt

SEQ ID NO: 220941 - DNA, 120 bp, Artificial Sequence
  ENSG00000117155_33 (sequence is synthesized)
ttgttgcgtgtttccattttaaagtgagttgagttctcaaattggaaagaaagattccttgagacgtacttttaaaatctaaagtgtgaaagaaacagcagagtaaaagccagactcatt

SEQ ID NO: 220942 - DNA, 120 bp, Artificial Sequence
  ENSG00000117155_34 (sequence is synthesized)
gcaccttcaatgtctgcatagatccagaagttgtacattttacctaacaacatcacttttgttgaacattccaactccagaatgatccccaatcaccctaatctcagaatgctggaatga

SEQ ID NO: 220943 - DNA, 120 bp, Artificial Sequence
  ENSG00000117155_35 (sequence is synthesized)
tgtctgttggaaaacccaggactccacacacaaaactcctgggattttgtttcccatctctttctaggtgtttgcaatgtacaaataatacagctgtgctaatctcacatttagccatga

SEQ ID NO: 220944 - DNA, 120 bp, Artificial Sequence
  ENSG00000117155_36 (sequence is synthesized)
tagatgatggttctagagtgtacttccatttgtaagtcctcctgataagtgctttcttgtttatcactatgtaaatctgaaatattttgtacttcatttgtttttatccattctgaattt

SEQ ID NO: 220945 - DNA, 120 bp, Artificial Sequence
  ENSG00000117155_37 (sequence is synthesized)
tcaaagcataaaaatgtcaaagaaaaattgagataaacattttgttcaccattaaatgtttgcatctgcagtctatgatgagaaacaatgaaattatgactaaaatttaacaaatagtat

SEQ ID NO: 220946 - DNA, 120 bp, Artificial Sequence
  ENSG00000117155_38 (sequence is synthesized)
tttcttatagaagcaatgtattaaatgattagatacacaggacagttcacagcaaattgtttacttacatggcataattgaaatactgttatttgtaaagagttctatactgcctacctt

SEQ ID NO: 220947 - DNA, 120 bp, Artificial Sequence
  ENSG00000117155_39 (sequence is synthesized)
agctaaccagaattgttcatagacttgtgataatatggtgttatgggaaaacacattttgtgcgcatgatgaagagagcaccgtgaatctagtcttgactgcccctggtggaacatttga

SEQ ID NO: 220948 - DNA, 120 bp, Artificial Sequence
  ENSG00000117155_40 (sequence is synthesized)
aagcccttgggactccaggagagaggtttttgcagcatgtatgctaaatttgtgagttagcaagaccctgctgtgattactatgttgtacagatcttcaaagtatattgcctaatatgag

SEQ ID NO: 220949 - DNA, 120 bp, Artificial Sequence
  ENSG00000117155_41 (sequence is synthesized)
tcatgttatttctagattgaatttaaagtaagtatggattatggaagtctagtaaatatacttttccctatttttgtcctttttcagtcttttggtaagcatttattaagtacctgctgt

SEQ ID NO: 220950 - DNA, 120 bp, Artificial Sequence
  ENSG00000117155_42 (sequence is synthesized)
atgtcaaggcttactactgctttccaatccttggtgatatgaagacagataagcacgctgcctgctattaggaatctgagctgagtggaaggccaactattaaacctacattgtaataaa

SEQ ID NO: 220951 - DNA, 120 bp, Artificial Sequence
  ENSG00000117155_43 (sequence is synthesized)
caatggtggatgctacggacacattcagtctgttcataaaacatggactgatgggtctgctccaggccacatttgttttttaacagtaacgtggctaggcttccatttataagtcttagc

SEQ ID NO: 220952 - DNA, 120 bp, Artificial Sequence
  ENSG00000117155_44 (sequence is synthesized)
attatttcctttgtgaagtactatgtaacagatgattgtttgctagattttgttttctacaatcaaaatgttgacctgcaaagcagtgtaggattttctctcctcaagagcgtgtattat

SEQ ID NO: 220953 - DNA, 120 bp, Artificial Sequence
  ENSG00000117155_45 (sequence is synthesized)
tatctagtagaaaaagcattcccaaagacttggtccatgcagataaggataatgaaattgctcactctaatcctttttctaaatacagtgtttttcaagctggatgtaaattagagtggg

SEQ ID NO: 220954 - DNA, 120 bp, Artificial Sequence
  ENSG00000117155_46 (sequence is synthesized)
tggatattgattaaattatttgatttatatgaaatcaaatgactggttgaggtttttttgaacatttacaaataatggattcctgagagctcaggaagtactgtaatgtcagtgacatat

SEQ ID NO: 220955 - DNA, 120 bp, Artificial Sequence
  ENSG00000117155_47 (sequence is synthesized)
gaagctcctgataaagatccacctcattcatatatttgagcttcagaaatacatgtacctagtataatgcttaacagcacataatatttgttgatgagaaatacactgatgaaacaacac

SEQ ID NO: 220956 - DNA, 120 bp, Artificial Sequence
  ENSG00000117155_48 (sequence is synthesized)
cgcgcggaggtgagagccggcacctggctcagcgccccgttgttcggcgggaggctccgcgcggctgttggggccgttgcagggtgcgggcgagcgtcgacccgggccgctcctggagga

SEQ ID NO: 220957 - DNA, 120 bp, Artificial Sequence
  ENSG00000117155_49 (sequence is synthesized)
aaaaaacatggctctccaccctgggaaacccatatgttgctcttaattgctacattttggtgttttcctgtatctcaagttattatatcattttctaagataagatcaatactctgcttc

SEQ ID NO: 220958 - DNA, 120 bp, Artificial Sequence
  ENSG00000117155_50 (sequence is synthesized)
aacaggtgccgcagccgcagctgcgcccgcagcgcgcgcggaccgcagggataaggtcttctttttctccgggtttttttggagatgaggaaagtgaggcccaaagaagatttatgttca

SEQ ID NO: 220959 - DNA, 120 bp, Artificial Sequence
  ENSG00000117155_51 (sequence is synthesized)
agaagggggcggggagcagaaaacggccgggtgaatcactgggcgtaacaggtgccgcagccgcagctgcgcccgcagcgcgcgcggaccgcagggataaggtcttctttttctccgggt

SEQ ID NO: 220960 - DNA, 120 bp, Artificial Sequence
  ENSG00000117155_52 (sequence is synthesized)
cattctacaaatattgagtgtccagtatatatagacactgtgctagatgctggaaatacactagtgaacaggtagatctgttgtcttcttggaggtaaatcatatgatgtgtgtcttttt

SEQ ID NO: 220961 - DNA, 120 bp, Artificial Sequence
  ENSG00000117155_53 (sequence is synthesized)
atttcacatttaagatacaatttagaatgtagtcttaattataggagttaatattttaagcactttaattgtattaaatggaaggatattgttttgacagtttttgtagagtacatatct

SEQ ID NO: 220962 - DNA, 120 bp, Artificial Sequence
  ENSG00000117155_54 (sequence is synthesized)
aagattagttttaaacgaagaagaggaagcaggtagaacattcctagtaagacagagaggaatagaaaagatcagaggggtaagttggaaagtatggtggtaatctctttgctcttaatt

SEQ ID NO: 220963 - DNA, 120 bp, Artificial Sequence
  ENSG00000117155_55 (sequence is synthesized)
ttttttttttttttttttggagatacggtcttgccgtgtcacctaggctagagtgcagtggtgctatctcggctcacttcagcgtcaacttcccagcctctagccatcctccctcctcag

SEQ ID NO: 220964 - DNA, 120 bp, Artificial Sequence
  ENSG00000117155_56 (sequence is synthesized)
cctccaaagtagctgagactgtagtcctgtgccaccatgcccagctgatgtttgtatttcgtgtagagacagggttttgccgtgttgcctaggctggtttggaactcctcagttcaagtg

SEQ ID NO: 220965 - DNA, 120 bp, Artificial Sequence
  ENSG00000117155_57 (sequence is synthesized)
gctggccctcgggctgcgggagccgggctaggacgccgagcggtgactccccgccgctcccgggggccgtgacgaaagcaaaactatctctcaatatacctcagaaacaaagatgtctcc

SEQ ID NO: 220966 - DNA, 120 bp, Artificial Sequence
  ENSG00000117155_58 (sequence is synthesized)
tgtatcaaaattatgagaaaaacatttgtcaaacacaagtttgttgtttatgtagtgcccctgagacttagattttcagagaaccttggtgattatctcatctagagatagcaagtctaa

SEQ ID NO: 220967 - DNA, 120 bp, Artificial Sequence
  ENSG00000117155_59 (sequence is synthesized)
cttttttgtgtggagcaccttggcctcctcattgtcccaggggctcctccactgagagtccagccatcactttatggatgcagaaacccaagtgccttgctccatgtcacagatttatag

SEQ ID NO: 220968 - DNA, 120 bp, Artificial Sequence
  ENSG00000117155_60 (sequence is synthesized)
cagagactaaaagagccccgtcctcttaactctttgtcctttgggatattgaccattttcttaactatttcaagatagttttctatttttctaagaaaagatttctatcttttgattttt

SEQ ID NO: 220969 - DNA, 120 bp, Artificial Sequence
  ENSG00000117155_61 (sequence is synthesized)
tttttactaagttgcccagtaaccaaccttttaaaataattcacatttatttttaatttttgacaaaaattatatatatttgtcatgttcaacatgatgtttcataatacacattgtgaa

SEQ ID NO: 220970 - DNA, 120 bp, Artificial Sequence
  ENSG00000117155_62 (sequence is synthesized)
atggctcagtgtgcatacctcccatacttatatcattttttgtggtgagaatttacttgctcagcaatttcaggaatatagtacgtagttattagctgaggtcaccgtgttgtacaatag

SEQ ID NO: 220971 - DNA, 120 bp, Artificial Sequence
  ENSG00000117155_63 (sequence is synthesized)
ataaccaaggtaaccactgcttctatgcatgtaaagtgagttgtgacatttggtaaggtgttgatttttagtcacttagaaagccgcattataggctcagagctaaagtactatacttca

SEQ ID NO: 220972 - DNA, 120 bp, Artificial Sequence
  ENSG00000117155_64 (sequence is synthesized)
ggcgctgcgaggcgctgctggccctcgggctgcgggagccgggctaggacgccgagcggtgactccccgccgctcccgggggccgtgacggtgagcagcagcgcctcgcgtcggggattg

SEQ ID NO: 220973 - DNA, 120 bp, Artificial Sequence
  ENSG00000117155_65 (sequence is synthesized)
agaaatctcttttgggtatccatcattcatccacggtcagtaggtgtggtgtcagaagacagtgcaaccaagactatatttgctgtttaaaaaggaagtataataaaaaattaagttctc

SEQ ID NO: 220974 - DNA, 120 bp, Artificial Sequence
  ENSG00000117155_66 (sequence is synthesized)
ttctccccagtccatcattgttatatatacgctctacagcttgctttttttacttagcaatgtgtcatctacatattcccccttcaaaaattgtagcagtaatgtctgaataaggttaaa

SEQ ID NO: 220975 - DNA, 120 bp, Artificial Sequence
  ENSG00000117174_0 (sequence is synthesized)
agtcgcgtcaagcaggctattccgggtttgtggctgcttggctccacacgtgggccgccgtaggtattccgaccggtaattcctcctattggtgtgcagcagccacattgaaggatagag

SEQ ID NO: 220976 - DNA, 120 bp, Artificial Sequence
  ENSG00000117174_1 (sequence is synthesized)
tggcagcagaggccaaggatcgtgagttgatggagtttgctgctgaaaatgaagggaagtctgggggaggtctccacagcgtagctgagggggtgcggctaagtccagagcctggcaggg

SEQ ID NO: 220977 - DNA, 120 bp, Artificial Sequence
  ENSG00000117174_2 (sequence is synthesized)
agggagtaagggacttagcaggggcggaggagttcggcggcggagaggaggggacagggctgacagggataaaggagataggggatggagaggaaggaagtggacaaaggccagaggaaa

SEQ ID NO: 220978 - DNA, 120 bp, Artificial Sequence
  ENSG00000117174_3 (sequence is synthesized)
taccgatggacctaacggtagtgaagcaggaaattatagactggccaggtacagaaggcaggttggctggccagtgggtagaacaggaggtggaggataggcctgaggtgaaggatgaga

SEQ ID NO: 220979 - DNA, 120 bp, Artificial Sequence
  ENSG00000117174_4 (sequence is synthesized)
acgcaggcgtattggaggtgaagcaggagacggatagtagtttagtggtaaaagaagcgaaggtgggtgaaccagaggtaaaggaagagaaggtaaaggaagaggtaatggactggtcag

SEQ ID NO: 220980 - DNA, 120 bp, Artificial Sequence
  ENSG00000117174_5 (sequence is synthesized)
aagtgaaggaagagaaggataacttggagataaaacaggaggagaagtttgttggtcaatgcataaaagaggaattgatgcatggagagtgtgtaaaagaagagaaggatttcctgaaga

SEQ ID NO: 220981 - DNA, 120 bp, Artificial Sequence
  ENSG00000117174_6 (sequence is synthesized)
aagaaatcgtggatgatacaaaggtgaaagaagagcctccgataaatcacccggtgggctgcaagcggaaactggccatgtcaaggtgtgagacttgtggtacagaagaagcaaagtaca

SEQ ID NO: 220982 - DNA, 120 bp, Artificial Sequence
  ENSG00000117174_7 (sequence is synthesized)
gatgtccacgttgtatgcgatattcctgcagtttgccctgtgtaaagaaacacaaagcagaactgacatgtaatggagttcgagataaaactgcatacatttcaatacaacagtttactg

SEQ ID NO: 220983 - DNA, 120 bp, Artificial Sequence
  ENSG00000117174_8 (sequence is synthesized)
aaatgaatctcctaagtgattatcgatttttggaagatgtggcaagaacagcggaccatatttctagagatgcttttttgaagagaccaataagcaataaatatatgtactttatgaaaa

SEQ ID NO: 220984 - DNA, 120 bp, Artificial Sequence
  ENSG00000117174_9 (sequence is synthesized)
atcgtgcccggaggcaaggtattaacttaaaacttctacccaatggattcaccaagaggaaggagaattcaaccttttttgataagaaaaaacaacagttttgttggcatgtgaagctcc

SEQ ID NO: 220985 - DNA, 120 bp, Artificial Sequence
  ENSG00000117174_10 (sequence is synthesized)
agtttcctcaaagtcaagctgagtacatagaaaaaagagtaccagatgataaaactattaatgaaatcctaaaaccttacattgatcctgaaaagtctgatcctgtaattcgtcaaaggt

SEQ ID NO: 220986 - DNA, 120 bp, Artificial Sequence
  ENSG00000117174_11 (sequence is synthesized)
tgaaagcctacattcgctctcagactggggttcagattttaatgaagattgaatatatgcagcaaaatttagtaagatattatgaactagatccttataaaagtctcctagacaatttga

SEQ ID NO: 220987 - DNA, 120 bp, Artificial Sequence
  ENSG00000117174_12 (sequence is synthesized)
ggaacaaagtgatcattgagtatccaacattacatgtggtattgaaaggatccaataatgacatgaaagttcttcaccaagtgaagagtgaatctaccaagaacgttggcaatgaaaatt

SEQ ID NO: 220988 - DNA, 120 bp, Artificial Sequence
  ENSG00000117174_13 (sequence is synthesized)
gagcattttttctggaagaagaaagtgaaaacttccagacaactgcagcagactctgcattgatgggctgttggctgattggggtattgtcaatgggtgattggaattttttctttgtat

SEQ ID NO: 220989 - DNA, 120 bp, Artificial Sequence
  ENSG00000117174_14 (sequence is synthesized)
gaaaaataagcttaactcttttaaaaaatgtattttataacctcttgaattaattgacttgtaagacccatttattcatattaagaactctcctttgcacttgatcagcatagtacttat

SEQ ID NO: 220990 - DNA, 90 bp, Artificial Sequence
  ENSG00000117174_15 (sequence is synthesized)
ttaagaactctcctttgcacttgatcagcatagtacttattaggccctggctttttaatatgcttaattgcttaattccataaactgaaa

SEQ ID NO: 220991 - DNA, 120 bp, Artificial Sequence
  ENSG00000117174_16 (sequence is synthesized)
cctcaaattcctgggctcgaatggtcctctcactgcagcctcccaacaggctggtaccaccacactcagctaagttttttgttgttgtttttttttggtagagacagggttgcgctcttt

SEQ ID NO: 220992 - DNA, 120 bp, Artificial Sequence
  ENSG00000117174_17 (sequence is synthesized)
cgcccaggctggtctcaaatttgtggcctcaagcaatccttccacctcagactccaaagcattgggattacaggcatcagccaccacacctggccttgaacattttttatttgttaattt

SEQ ID NO: 220993 - DNA, 120 bp, Artificial Sequence
  ENSG00000117174_18 (sequence is synthesized)
catgcgtgacgaaacccaaggatcacccatgtcaaccacaaagttggcattccctttagtagaacctcactaaacggaaaggctgtacaacgcaccgtctagccacaggagaactaatct

SEQ ID NO: 220994 - DNA, 120 bp, Artificial Sequence
  ENSG00000117174_19 (sequence is synthesized)
tctatcagttgccctttcttctttggagtttttatgtaacttacccttgtgagacaagttttctacttgagaaactcctagtacaatgtcttatactagaagcctggataaatactatta

SEQ ID NO: 220995 - DNA, 120 bp, Artificial Sequence
  ENSG00000117174_20 (sequence is synthesized)
actactgtttcttatattcacttcagaaaatcagtggctccacattgtttgagccattagtgataacaaatttggatctacttactcaagtcttatgaattctgtgcctttcatcacatt

SEQ ID NO: 220996 - DNA, 120 bp, Artificial Sequence
  ENSG00000117174_21 (sequence is synthesized)
cctagcccactctcatcattactgcagaagggtgttgtgatgaccagttttatactgtgttttgatatgtctagcaataacttaaagaaaaaaaaacctgggaaatcttcaacatgttat

SEQ ID NO: 220997 - DNA, 120 bp, Artificial Sequence
  ENSG00000117174_22 (sequence is synthesized)
tggaacatatatgtatgtattaatgtatatacatggcttaacttatacgttatggcagctctgtatacagtttgatctcatgtactgaaaaaaaattcttaattttattggagtttatac

SEQ ID NO: 220998 - DNA, 120 bp, Artificial Sequence
  ENSG00000117174_23 (sequence is synthesized)
cactgtgaaactgcaatatgactgtaagagagtaaaaagattgttacatctatattgtatgtgtgtacttaatggttaaaaagcaatgataaaactggacattaatgaaattgattttta

SEQ ID NO: 220999 - DNA, 120 bp, Artificial Sequence
  ENSG00000117174_24 (sequence is synthesized)
gttacagttggaataagttttttaccaaaaagaaaccagagacgttagttaaggagacttaaaaagatctgaaatatgaaaagagaatgagaagatgagcagaagataaatttgtgggac

SEQ ID NO: 221000 - DNA, 120 bp, Artificial Sequence
  ENSG00000117174_25 (sequence is synthesized)
ggaatgtgattcatagaaagttcatagaaagtgagtccttgcaacttgagaaacatacatacatatatatttataatctctaaagcaacatcaggaatcttctaatatatgataaagaat

SEQ ID NO: 221001 - DNA, 120 bp, Artificial Sequence
  ENSG00000117174_26 (sequence is synthesized)
ttgtgtagaattacgttgttcacagtattattggagagacaaataagatttcaaggaattcatttataatcaaaagtgaaatgtgtcttcttgaaaccagcaagaaatagatgaattgag

SEQ ID NO: 221002 - DNA, 120 bp, Artificial Sequence
  ENSG00000117174_27 (sequence is synthesized)
tgaaacgtgttgttattaggagaagtgggataacgtatacaaaaagaacttgcgatctgaatatgatctgaatatgagggtggataggaattttttgacagtgaaatctgttatgatgta

SEQ ID NO: 221003 - DNA, 120 bp, Artificial Sequence
  ENSG00000117174_28 (sequence is synthesized)
gtctcatttccaagaaaagtcttgagttccatccccccttctgaatttaaattgaaacctggacagaaaacaaactatcctgtagtttccactgctcaggaggaaaaaaagaaatctata

SEQ ID NO: 221004 - DNA, 120 bp, Artificial Sequence
  ENSG00000117174_29 (sequence is synthesized)
ttatctaatgcatctttgccatctttattttctagaattctattagacttttcaattataggctattaggaaagaatataactcttagaattcccctaaatataattatcaactcatttg

SEQ ID NO: 221005 - DNA, 120 bp, Artificial Sequence
  ENSG00000117174_30 (sequence is synthesized)
attaatatgcatattttttcccgtaagatttacaatacacgtgtgttttagtgaattaccaatggcttggagagaatgaaattggaataactaactgaaaaccctagatgtttgtagcat

SEQ ID NO: 221006 - DNA, 120 bp, Artificial Sequence
  ENSG00000117174_31 (sequence is synthesized)
tgagacccaatatctttttggaggccctctccatgttagcttattgtcaaattctggtgtgtaaacaaactccttgacccatgttaagttcagcatcctgcattttgttcatgaatcaca

SEQ ID NO: 221007 - DNA, 120 bp, Artificial Sequence
  ENSG00000117174_32 (sequence is synthesized)
ttttaaaaggagaaaagctccacctggttttctttatttttttaaacagtgatttcaaagagaagataggcctttcataattgctaattatacatataggattaatagtcataaattata

SEQ ID NO: 221008 - DNA, 62 bp, Artificial Sequence
  ENSG00000117174_33 (sequence is synthesized)
agctggggcacgagaatcacttgaaccctggtggcagagtttgcagtgagctgagattgttc

SEQ ID NO: 221009 - DNA, 120 bp, Artificial Sequence
  ENSG00000117174_34 (sequence is synthesized)
gaaccctggtggcagagtttgcagtgagctgagattgttccactgcattcctgggcactgcctgggtgacagaatgagactctgcctcaaaaaaaaaaaaagttattaaaaatagatatt

SEQ ID NO: 221010 - DNA, 120 bp, Artificial Sequence
  ENSG00000117174_35 (sequence is synthesized)
taagattccaaaatgtagttgatccagtttgtttccctgtagcaagtagtgggatttgggtttcatgacatataattaaaatgttaatcacataactataatgccaacaattttctttat

SEQ ID NO: 221011 - DNA, 120 bp, Artificial Sequence
  ENSG00000117174_36 (sequence is synthesized)
acatttttgtttaattatgttgacatatactttgtgttgtaccttatttcatgttactaaattttacataaagatgctggtctatttttatttaatcatatactgttatggtttgaatat

SEQ ID NO: 221012 - DNA, 120 bp, Artificial Sequence
  ENSG00000117174_37 (sequence is synthesized)
agtttgttcctaccaaaactcatgttgaaattagattccccatgtgctagtgttgggaggcagagcctaatggaaggtgtttgggtcatgggggcagatagatcccacatgaataaacta

SEQ ID NO: 221013 - DNA, 120 bp, Artificial Sequence
  ENSG00000117174_38 (sequence is synthesized)
atgccctcctactggggtgagtgagttctcattcttgctgtcgtgggaatggattagttctcacaagcaagggttactaaagagtctggctttcttgattttctcctttttgcctcctgc

SEQ ID NO: 221014 - DNA, 120 bp, Artificial Sequence
  ENSG00000117174_39 (sequence is synthesized)
cttcccatgtgatctctttgcacatacctactcccctttcactttgtaccaagagtggaagcaacatgagaccctcaccagatacagctgcccaatcttgagccttccagccaccagaat

SEQ ID NO: 221015 - DNA, 120 bp, Artificial Sequence
  ENSG00000117174_40 (sequence is synthesized)
catgagccaaataaaactctttttaaaaataagttacccagtcttagatattctattatagcgacacaaaatggactaagctgtactctgttgcattaaaatgtgttgtttatatgcaag

SEQ ID NO: 221016 - DNA, 120 bp, Artificial Sequence
  ENSG00000117174_41 (sequence is synthesized)
tgacaaaaactcaaaatagtgtcagcatgaagggcagttcattggcttatatacagggaagtccaggcaatgactgggtcctgggtccaaacgtcaaaagcagtcatcttgccatcctac

SEQ ID NO: 221017 - DNA, 120 bp, Artificial Sequence
  ENSG00000117174_42 (sequence is synthesized)
acacttggctctgattattttcttctttatggattggttttcttttcagattttccctttggggatattctgtatgggatgaggaacagtgaggtgagaggatggtggataacagcaatt

SEQ ID NO: 221018 - DNA, 120 bp, Artificial Sequence
  ENSG00000117174_43 (sequence is synthesized)
gacattttcagcttaccttagcataacaaggctgaaagcttttataaagcaagctatgtaaaattttggagaagtacttttattttgcccagattggatcacattccgttcctgagctaa

SEQ ID NO: 221019 - DNA, 120 bp, Artificial Sequence
  ENSG00000117174_44 (sequence is synthesized)
tcaagagaggaattcacccaaaggagggggaaatttttagaagaaagccagaatgtagggagcaggtgaggaaaggtagttactgggaatacgaaagtaacacattcattgcaccctgtt

SEQ ID NO: 221020 - DNA, 120 bp, Artificial Sequence
  ENSG00000117174_45 (sequence is synthesized)
tgaatttgagtagcaagaagtttctgatttgtactaacagaaggagtaaagttcagatttaatctgcaagtcttgattgtttttaactagagattttaatctcttcttcttattattgct

SEQ ID NO: 221021 - DNA, 120 bp, Artificial Sequence
  ENSG00000117174_46 (sequence is synthesized)
gctttgagttgccattataggtttttggattttttttttaatgccatccatttttatttgacatcatgttgttgctagtttgagcagatgcacatagcatatgtttccattaccaatttg

SEQ ID NO: 221022 - DNA, 120 bp, Artificial Sequence
  ENSG00000117174_47 (sequence is synthesized)
gaaatttttcccagtggcatcagcatttgagagatactgattttgaaattagagtactaggggaaaatgcttcaaaaatgaagactacttaaataaaaattggctttaaataaacctttg

SEQ ID NO: 221023 - DNA, 120 bp, Artificial Sequence
  ENSG00000117174_48 (sequence is synthesized)
gggatctgtacttgactaaaaagtattttctttaaactttggtctttgaaaactaaagtgtgtgtgcatgtgttcattaaaatgacctataacatgaacattttccatactggagtgtga

SEQ ID NO: 221024 - DNA, 120 bp, Artificial Sequence
  ENSG00000117174_49 (sequence is synthesized)
tgtactgtactcattttgaactttagaaccaaatgcatcctttagcatttgatgagctgctatataattctatttccagttttattttcttgccaaataaagtaccaaagctcagcctga

SEQ ID NO: 221025 - DNA, 120 bp, Artificial Sequence
  ENSG00000117215_0 (sequence is synthesized)
actgccagcatctgcctccactgctctgtgctgggatcatggaacttgcactgctgtgtgggctggtggtgatggctggtgtgattccaatccagggcgggatcctgaacctgaacaaga

SEQ ID NO: 221026 - DNA, 120 bp, Artificial Sequence
  ENSG00000117215_1 (sequence is synthesized)
tggtcaagcaagtgactgggaaaatgcccatcctctcctactggccctacggctgtcactgcggactaggtggcagaggccaacccaaagatgccacggactggtgctgccagacccatg

SEQ ID NO: 221027 - DNA, 120 bp, Artificial Sequence
  ENSG00000117215_2 (sequence is synthesized)
actgctgctatgaccacctgaagacccaggggtgcagcatctacaaggactattacagatacaacttttcccaggggaacatccactgctctgacaagggaagctggtgtgagcagcagc

SEQ ID NO: 221028 - DNA, 120 bp, Artificial Sequence
  ENSG00000117215_3 (sequence is synthesized)
tgtgtgcctgtgacaaggaggtggccttctgcctgaagcgcaacctggacacctaccagaagcgactgcgtttctactggcggccccactgccgggggcagacccctgggtgctagaagc

SEQ ID NO: 221029 - DNA, 120 bp, Artificial Sequence
  ENSG00000117215_4 (sequence is synthesized)
ccacaccctctaccctgttcctcagcatggagctctggcatccccacctcagtatctaacctgaaccagcctggcttttcaaacactccggggggaggtagtcccagcctcccccggaac

SEQ ID NO: 221030 - DNA, 120 bp, Artificial Sequence
  ENSG00000117215_5 (sequence is synthesized)
cctctaccaatgccttctgaccttctgaagctttccgaatcctcccagttgaggcagtagctgtgtcctctgagggtggatgggaatcttgggagaagcccaagcaagggagccctcaga

SEQ ID NO: 221031 - DNA, 120 bp, Artificial Sequence
  ENSG00000117215_6 (sequence is synthesized)
ggtggtgtttggaccaaagcatcggggtgggggaggggtctgccgctgtcccccacctgctggcccccttgtccttcctcaccccctccaatatagtctcggagctacaaccgcagcagc

SEQ ID NO: 221032 - DNA, 120 bp, Artificial Sequence
  ENSG00000117215_7 (sequence is synthesized)
cactataaagggcaatattgatctttctgtccatgtggctctatcttttaaaacctcaaggccctccactgtcctaagataaagcctctcataggcactggggaccctgcacagtctggc

SEQ ID NO: 221033 - DNA, 120 bp, Artificial Sequence
  ENSG00000117215_8 (sequence is synthesized)
catgtgaccctctccccaggcaagctctgaagtccctgcaggtggaggccatgcctgtcttaaactcagttgcatccctggtgcccaaagcaacaccagaaccaagaaggagctccataa

SEQ ID NO: 221034 - DNA, 120 bp, Artificial Sequence
  ENSG00000117215_9 (sequence is synthesized)
atccttcttgggtgaagcctagacaaagccgccaggtcttgtggctccaggcaccagagccttgagtactttctcctgcctccaggcattggctcagggtgaattacaaggggctactga

SEQ ID NO: 221035 - DNA, 120 bp, Artificial Sequence
  ENSG00000117215_10 (sequence is synthesized)
atggctattactttcatcacgactgatccccacctcctcagggtcaaagggctactttctggaagtctccccaggctgactccttctccctgactgcaagggctcactccctcctccaag

SEQ ID NO: 221036 - DNA, 120 bp, Artificial Sequence
  ENSG00000117215_11 (sequence is synthesized)
cttcatggctctgccgcttacctagcttggcctagagtggcaaatggaacttctctgatctcccccaactagactggagcccccgaaggatggagaccatgtctgtgccatctctgtttc

SEQ ID NO: 221037 - DNA, 120 bp, Artificial Sequence
  ENSG00000117215_12 (sequence is synthesized)
ccctgttttcccacatactaggtgctcaattcatgcctgtgaatggcgtgagcccataatggatacacagaggttgcagcagatggtgtgggtacctcacccagatatcatccaggccca

SEQ ID NO: 221038 - DNA, 120 bp, Artificial Sequence
  ENSG00000117215_13 (sequence is synthesized)
aggcccctctccctgagtgaggccaggtgttggcagccaactgctccaatctgcctccttcccctaaatactgccctggtctagtgggagctgccttccccctgccccacctctcccacc

SEQ ID NO: 221039 - DNA, 120 bp, Artificial Sequence
  ENSG00000117215_14 (sequence is synthesized)
aagaggccacctgtcactcatggccaggagagtgacaccatggagggtacaattgccagctcccccgtgtctgtgcaggattgtctgggttgaatgacactctcaaattgttcctgggat

SEQ ID NO: 221040 - DNA, 120 bp, Artificial Sequence
  ENSG00000117215_15 (sequence is synthesized)
cgggctgaggccaggcctctcctggaaccacctctctgcttggtctgaccccttggcctatccagttttcctggttccctcacaggtttctccagaaagtactccctcagtaaagcattt

SEQ ID NO: 221041 - DNA, 120 bp, Artificial Sequence
  ENSG00000117215_16 (sequence is synthesized)
gcacaagaatccttgtctcaggctctgcttctaaggaaagagactgaagagggacaactttttcctatgaggactcccaatctgccatttgtgtgtggctagctgtttccagccaggggg

SEQ ID NO: 221042 - DNA, 120 bp, Artificial Sequence
  ENSG00000117215_17 (sequence is synthesized)
ctgaggcacctgcagtcacccacactctgggcctgtggcaccatctgtgcctcagctgactgagcagttctgagatgtggtgactcatgtgaagtggtgtcataggaatgaaggactgtg

SEQ ID NO: 221043 - DNA, 120 bp, Artificial Sequence
  ENSG00000117215_18 (sequence is synthesized)
ggcgctgggttcaaattccagttctatgcaccactccaggtagggatacccatgggggcagctgtgcctgtgtgggggaacagggtagggaaatctccataccttctcaattttgctgtg

SEQ ID NO: 221044 - DNA, 74 bp, Artificial Sequence
  ENSG00000117215_19 (sequence is synthesized)
cagggtagggaaatctccataccttctcaattttgctgtgaacctaaaactgccatataaagataaagttggct

SEQ ID NO: 221045 - DNA, 120 bp, Artificial Sequence
  ENSG00000117222_0 (sequence is synthesized)
gccagtctcttcgcggcgtccaccacttagacgcaagttgctgaagccggccggggagaaggtgttgttgccggagctgagaccgggcggccacagtccgcagggatgaacctcgagttg

SEQ ID NO: 221046 - DNA, 120 bp, Artificial Sequence
  ENSG00000117222_1 (sequence is synthesized)
ctggagtcctttgggcagaactatccagaggaagctgatggaactttggattgtatcagcatggctttgacttgcacctttaacaggtggggcacactgcttgcagttggctgtaatgat

SEQ ID NO: 221047 - DNA, 120 bp, Artificial Sequence
  ENSG00000117222_2 (sequence is synthesized)
ggccgaattgtcatctgggatttcttgacaagaggcattgctaaaataattagtgcacacatccatccagtgtgttctttatgctggagccgagatggtcataaactcgtgagtgcttcc

SEQ ID NO: 221048 - DNA, 120 bp, Artificial Sequence
  ENSG00000117222_3 (sequence is synthesized)
actgataacatagtgtcacagtgggatgttctttcaggcgactgtgaccagaggtttcgattcccttcacccatcttaaaagtccaatatcatccacgagatcagaacaaggttctcgtg

SEQ ID NO: 221049 - DNA, 120 bp, Artificial Sequence
  ENSG00000117222_4 (sequence is synthesized)
tgtcccatgaaatctgctcctgtcatgttgaccctttcagattccaaacatgttgttctgccggtggacgatgactccgatttgaacgttgtggcatcttttgataggcgaggggaatat

SEQ ID NO: 221050 - DNA, 120 bp, Artificial Sequence
  ENSG00000117222_5 (sequence is synthesized)
atttatacgggaaacgcaaaaggcaagattttggtcctaaaaacagattctcaggatcttgttgcttccttcagagtgacaactggaacaagcaataccacagccattaagtcaattgag

SEQ ID NO: 221051 - DNA, 120 bp, Artificial Sequence
  ENSG00000117222_6 (sequence is synthesized)
tttgcccggaaggggagttgctttttaattaacacggcagatcgaataatcagagtttatgatggcagagaaatcttaacatgtggaagagatggagagcctgaacctatgcagaaattg

SEQ ID NO: 221052 - DNA, 120 bp, Artificial Sequence
  ENSG00000117222_7 (sequence is synthesized)
caggatttggtgaataggaccccatggaagaaatgttgtttctctggggatggggaatacatcgtggcaggttctgcccggcagcatgccctgtacatctgggagaagagcattggcaac

SEQ ID NO: 221053 - DNA, 120 bp, Artificial Sequence
  ENSG00000117222_8 (sequence is synthesized)
ctggtgaagattctccatgggacgagaggagaactcctcttggatgtagcttggcatcctgttcgacccatcatagcatccatttccagtggagtggtatctatctgggcacagaatcaa

SEQ ID NO: 221054 - DNA, 120 bp, Artificial Sequence
  ENSG00000117222_9 (sequence is synthesized)
gtagaaaactggagtgcatttgcaccagacttcaaagaattggatgaaaatgtagaatacgaagaaagggaatcagagtttgatattgaagatgaagataagagtgagcctgagcagaca

SEQ ID NO: 221055 - DNA, 120 bp, Artificial Sequence
  ENSG00000117222_10 (sequence is synthesized)
ggggctgatgctgcagaagatgaggaagtggatgtcaccagcgtggaccctattgctgccttctgtagcagtgatgaagagctggaagattcaaaggctctattgtatttacccattgcc

SEQ ID NO: 221056 - DNA, 120 bp, Artificial Sequence
  ENSG00000117222_11 (sequence is synthesized)
cctgaggtagaagacccagaagaaaatccttacggccccccaccggatgcagtccaaacctccttgatggatgaaggggctagttcagagaagaagaggcagtcctcagcagatgggtcc

SEQ ID NO: 221057 - DNA, 120 bp, Artificial Sequence
  ENSG00000117222_12 (sequence is synthesized)
cagccacctaagaagaaacccaaaacaaccaatatagaacttcaaggagtaccaaatgatgaagtccatccactactgggtgtgaagggggatggcaaatccaagaagaagcaagcaggc

SEQ ID NO: 221058 - DNA, 120 bp, Artificial Sequence
  ENSG00000117222_13 (sequence is synthesized)
cggcctaaaggatcaaaaggtaaagagaaagattctccatttaaaccgaaactctacaaaggggacagaggtttacctctggaaggatcagcgaagggtaaagtgcaggcggaactcagc

SEQ ID NO: 221059 - DNA, 120 bp, Artificial Sequence
  ENSG00000117222_14 (sequence is synthesized)
cagcccttgacagcaggaggagcaatctcagaactgttatgaagaccttcgaagttcttcattctttctcactttgccatcatgtggcctctggacactgtggtcagtcatttgaaaatt

SEQ ID NO: 221060 - DNA, 120 bp, Artificial Sequence
  ENSG00000117222_15 (sequence is synthesized)
gactttaatttaaaacaaaggcctgtgcctcccacccaggaggtgggagggtgaattttatgtttaaatgaagaagtgaattatggaagaagagtatacgaccttcccttccctttcaag

SEQ ID NO: 221061 - DNA, 120 bp, Artificial Sequence
  ENSG00000117222_16 (sequence is synthesized)
cataagtccaaatagactctcaggaatgaagatttgtgaagacatcagataggaattttgactcatttaaactttgatgcttagttatgttgctggagaaaagatacttatgttttgctc

SEQ ID NO: 221062 - DNA, 120 bp, Artificial Sequence
  ENSG00000117222_17 (sequence is synthesized)
atctaacttcattgtacccagcgtcattttgacatgtcatttcctatctcccatttgccttcggtcctcaatgcatgtctttgagtgacttcttatctgaaattttgctactggtatcct

SEQ ID NO: 221063 - DNA, 120 bp, Artificial Sequence
  ENSG00000117222_18 (sequence is synthesized)
agatacctcctatatttccatattgtgtgcaaaggatgggcagaaaagaaagtgcttgaaagatttcaaattttcagaaagggaacaacgaaggccctctcttcctctcataccacgttt

SEQ ID NO: 221064 - DNA, 120 bp, Artificial Sequence
  ENSG00000117222_19 (sequence is synthesized)
tgctcaagaagctgggctgtaacaattcagggttttcccttgttttcctctcattgcatgtttccctccaatattggttcattgtcatcaatcatggtttttgaagatagctagttttat

SEQ ID NO: 221065 - DNA, 120 bp, Artificial Sequence
  ENSG00000117222_20 (sequence is synthesized)
ccatctccagcaaagaatcatcaatagtttatattgctttacctgtgctggcttccagagatggaaacaaacccaggtgtctctcaacaagctacttttttactggggtgggggaatcta

SEQ ID NO: 221066 - DNA, 120 bp, Artificial Sequence
  ENSG00000117222_21 (sequence is synthesized)
tgcaaggagtaaagtaaaaccatccagaatcaaagcagcaaccacatagttcaaatcaaagatcaaggtgaattttttgtatcactgcctgtggaaatctatcctcatcagtcattgcat

SEQ ID NO: 221067 - DNA, 120 bp, Artificial Sequence
  ENSG00000117222_22 (sequence is synthesized)
ttttccctgcctatacctgtgctcctttttcttactgtgttttcagtcacttcctttctgtgaaaggttgcttagctttttttttgacatttgttgttctttataaaaataacagattgg

SEQ ID NO: 221068 - DNA, 120 bp, Artificial Sequence
  ENSG00000117222_23 (sequence is synthesized)
atagatgtgtacatttggtgtttgaaattctctgaaaatcccattaggaaaccaggtgtgaaaagggctcagtagcttctctgagtggcgtttttagctgactggaagtgcttaatctgg

SEQ ID NO: 221069 - DNA, 86 bp, Artificial Sequence
  ENSG00000117222_24 (sequence is synthesized)
ctggatcgaaaggagaatttaaatactgtgcttactgtgaaatatatcagttggtgagccgggcgtggtgggtcacgcctgtaatc

SEQ ID NO: 221070 - DNA, 87 bp, Artificial Sequence
  ENSG00000117222_25 (sequence is synthesized)
gcctgtatctattaaaagacaaaaattagctgggcgtggtagtacatgcctgtaatcccagctacactggaggctgagtcaggagaa

SEQ ID NO: 221071 - DNA, 77 bp, Artificial Sequence
  ENSG00000117222_26 (sequence is synthesized)
tctattaaaagacaaaaattagctgggcgtggtagtacatgcctgtaatcccagctacactggaggctgagtggaga

SEQ ID NO: 221072 - DNA, 120 bp, Artificial Sequence
  ENSG00000117222_27 (sequence is synthesized)
ctatctcaaaaaaaaaaaaaaaatgatatcagttggtggatgctcctataggtagccaaacacattgattacctgttagattttaggatagaaatcaaagtagagcacgtcagcaagagc

SEQ ID NO: 221073 - DNA, 120 bp, Artificial Sequence
  ENSG00000117222_28 (sequence is synthesized)
ctctttgtctcactccatcatttaaaaccagtatattcagtagttgaagaaagagctctccctgagtcagttgcaaaacgtctatatttttagatgccactacttttttcttaaatattc

SEQ ID NO: 221074 - DNA, 120 bp, Artificial Sequence
  ENSG00000117222_29 (sequence is synthesized)
attttgagactgtcatgagttagaccagtggttgagattagtagatggctcactagacatgtttttgttttgcagacattatatccattccagtcctctgcactgtacactgcagcagtg

SEQ ID NO: 221075 - DNA, 120 bp, Artificial Sequence
  ENSG00000117222_30 (sequence is synthesized)
tgcaaactatgggacttagagggtttctgccatctttccacgtgtgaagtagcttggtttcctctgcctgtgcatttggatgtttgtgctatgtccacctcctaaactggctactgagaa

SEQ ID NO: 221076 - DNA, 120 bp, Artificial Sequence
  ENSG00000117222_31 (sequence is synthesized)
aatcatcttcagccctgtcagattgtctctggcagtagctcctaataattatttatgtttttggaatttttttttcaacttttaaaaaaccttctatccatttcaatttgaattatttga

SEQ ID NO: 221077 - DNA, 120 bp, Artificial Sequence
  ENSG00000117222_32 (sequence is synthesized)
tgaattatttgatttgtacaatatatgtatattctcttcttcctttttgtcatccctgccctgccacccccaaaattttgtttttaaaaatattctgggctgggcatggtggctcacacc

SEQ ID NO: 221078 - DNA, 90 bp, Artificial Sequence
  ENSG00000117222_33 (sequence is synthesized)
tgtagttttgtacaagatgagacttagccttgggtacttcttgctgaagctttaatgctttgtaaataaaatcggatgtttattaaagaa

SEQ ID NO: 221079 - DNA, 120 bp, Artificial Sequence
  ENSG00000117222_34 (sequence is synthesized)
gcggcgtccaccacttagacgcaagttgctgaagccggccggggagaaggtgttgttgccggagctgagaccgggcggccacagtccgcagggatgaacctcgagttgctgggaagctga

SEQ ID NO: 221080 - DNA, 120 bp, Artificial Sequence
  ENSG00000117226_0 (sequence is synthesized)
actttcagtttcattaggctctgaagccattacaaaggttgcttaacttctaattatttgatcactgaggaaaatccagaaagctacacaacactgaaggggtgaaataaaagtccagcg

SEQ ID NO: 221081 - DNA, 120 bp, Artificial Sequence
  ENSG00000117226_1 (sequence is synthesized)
atccagcgaaagaaaagagaagtgacagaaacaactttacctggactgaagataaaagcacagacaagagaacaatgccctggacatggctccagagatccacatgacaggcccaatgtg

SEQ ID NO: 221082 - DNA, 120 bp, Artificial Sequence
  ENSG00000117226_2 (sequence is synthesized)
cctcattgagaacactaatggggaactggtggcgaatccagaagctctgaaaatcctgtctgccattacacagcctgtggtggtggtggcaattgtgggcctctaccgcacaggaaaatc

SEQ ID NO: 221083 - DNA, 120 bp, Artificial Sequence
  ENSG00000117226_3 (sequence is synthesized)
ctacctgatgaacaagctagctgggaagaataagggcttctctctgggctccacagtgaaatctcacaccaaaggaatctggatgtggtgtgtgcctcaccccaaaaagccagaacacac

SEQ ID NO: 221084 - DNA, 120 bp, Artificial Sequence
  ENSG00000117226_4 (sequence is synthesized)
cttagtcctgcttgacactgagggcctgggagatgtaaagaagggtgacaaccagaatgactcctggatcttcaccctggccgtcctcctgagcagcactctcgtgtacaatagcatggg

SEQ ID NO: 221085 - DNA, 120 bp, Artificial Sequence
  ENSG00000117226_5 (sequence is synthesized)
aaccatcaaccagcaggctatggaccaactgtactatgtgacagagctgacacatcgaatccgatcaaaatcctcacctgatgagaatgagaatgaggattcagctgactttgtgagctt

SEQ ID NO: 221086 - DNA, 120 bp, Artificial Sequence
  ENSG00000117226_6 (sequence is synthesized)
cttcccagattttgtgtggacactgagagatttctccctggacttggaagcagatggacaacccctcacaccagatgagtacctggagtattccctgaagctaacgcaaggtaccagtca

SEQ ID NO: 221087 - DNA, 120 bp, Artificial Sequence
  ENSG00000117226_7 (sequence is synthesized)
aaaagataaaaattttaatctgccccgactctgtatccggaagttcttcccaaagaaaaaatgttttgtcttcgatctgcccattcaccgcaggaagcttgcccagcttgagaaactaca

SEQ ID NO: 221088 - DNA, 120 bp, Artificial Sequence
  ENSG00000117226_8 (sequence is synthesized)
agatgaagagctggaccctgaatttgtgcaacaagtagcagacttctgttcctacatctttagcaattccaaaactaaaactctttcaggaggcatcaaggtcaatgggcctcgtctaga

SEQ ID NO: 221089 - DNA, 120 bp, Artificial Sequence
  ENSG00000117226_9 (sequence is synthesized)
gagcctagtgctgacctatatcaatgctatcagcagaggggatctgccctgcatggagaacgcagtcctggccttggcccagatagagaactcagccgcagtgcaaaaggctattgccca

SEQ ID NO: 221090 - DNA, 120 bp, Artificial Sequence
  ENSG00000117226_10 (sequence is synthesized)
ctatgaccagcagatgggccagaaggtgcagctgcccgcagaaaccctccaggagctgctggacctgcacagggttagtgagagggaggccactgaagtctatatgaagaactctttcaa

SEQ ID NO: 221091 - DNA, 120 bp, Artificial Sequence
  ENSG00000117226_11 (sequence is synthesized)
ggatgtggaccatctgtttcaaaagaaattagcggcccagctagacaaaaagcgggatgacttttgtaaacagaatcaagaagcatcatcagatcgttgctcagctttacttcaggtcat

SEQ ID NO: 221092 - DNA, 120 bp, Artificial Sequence
  ENSG00000117226_12 (sequence is synthesized)
tattcgaaaccagggggctattgtctctttattcagaagctacaagacctggagaaaaagtactatgaggaaccaaggaaggggatacaggctgaagagattctgcagacatacttgaaa

SEQ ID NO: 221093 - DNA, 120 bp, Artificial Sequence
  ENSG00000117226_13 (sequence is synthesized)
tccaaggagtctgtgaccgatgcaattctacagacagaccagattctcacagaaaaggaaaaggagattgaagtggaatgtgtaaaagctgaatctgcacaggcttcagcaaaaatggtg

SEQ ID NO: 221094 - DNA, 120 bp, Artificial Sequence
  ENSG00000117226_14 (sequence is synthesized)
gaggaaatgcaaataaagtatcagcagatgatggaagagaaagagaagagttatcaagaacatgtgaaacaattgactgagaagatggagagggagagggcccagttgctggaagagcaa

SEQ ID NO: 221095 - DNA, 120 bp, Artificial Sequence
  ENSG00000117226_15 (sequence is synthesized)
gagaagaccctcactagtaaacttcaggaacaggcccgagtactaaaggagagatgccaaggtgaaagtacccaacttcaaaatgagatacaaaagctacagaagaccctgaaaaaaaaa

SEQ ID NO: 221096 - DNA, 120 bp, Artificial Sequence
  ENSG00000117226_16 (sequence is synthesized)
accaagagatatatgtcgcataagctaaagatctaaacaacagagcttttctgtcatcctaacccaaggcataactgaaacaattttagaatttggaacaagtgtcactatatttgataa

SEQ ID NO: 221097 - DNA, 120 bp, Artificial Sequence
  ENSG00000117226_17 (sequence is synthesized)
taattagatcttgcatcataacactaaaagtttacaagaacatgcagttcaatgatcaaaatcatgttttttccttaaaaagattgtaaattgtgcaacaaagatgcatttacctctgta

SEQ ID NO: 221098 - DNA, 120 bp, Artificial Sequence
  ENSG00000117226_18 (sequence is synthesized)
ccaacagaggagggatcatgagttgccaccactcagaagtttattcttccagacgaccagtggatactgaggaaagtcttaggtaaaaatcttgggacatatttgggcactggtttggcc

SEQ ID NO: 221099 - DNA, 120 bp, Artificial Sequence
  ENSG00000117226_19 (sequence is synthesized)
aagtgtacaatgggtcccaatatcagaaacaaccatcctagcttcctagggaagacagtgtacagttctccattatatcaaggctacaaggtctatgagcaataatgtgatttctggaca

SEQ ID NO: 221100 - DNA, 120 bp, Artificial Sequence
  ENSG00000117226_20 (sequence is synthesized)
ttgcccatggataattctcactgatggatctcaagctaaagcaaaccatcttatacagagatctagaatcttatattttccataggaaggtaaagaaatcattagcaagagtaggaattg

SEQ ID NO: 221101 - DNA, 120 bp, Artificial Sequence
  ENSG00000117226_21 (sequence is synthesized)
aatcataaacaaattggctaatgaagaaatcttttctttcttgttcaattcatctagattataaccttaatgtgacacctgagacctttagacagttgaccctgaattaaatagtcacat

SEQ ID NO: 221102 - DNA, 120 bp, Artificial Sequence
  ENSG00000117226_22 (sequence is synthesized)
ggtaacaattatgcactgtgtaattttagtaatgtataacatgcaatgatgcactttaactgaagatagagactatgttagaaaattgaactaatttaattatttgattgttttaatcct

SEQ ID NO: 221103 - DNA, 120 bp, Artificial Sequence
  ENSG00000117226_23 (sequence is synthesized)
aaagcataagttagtcttttcctgattcttaaaggtcatacttgaaatcctgccaattttccccaaagggaatatggaatttttttgactttcttttgagcaataaaataattgtcttgc

SEQ ID NO: 221104 - DNA, 120 bp, Artificial Sequence
  ENSG00000117226_24 (sequence is synthesized)
cattacttagtatatgtagacttcatcccaattgtcaaacatcctaggtaagtggttgacatttcttacagcaattacagattatttttgaactagaaataaactaaactagaaataaaa

SEQ ID NO: 221105 - DNA, 120 bp, Artificial Sequence
  ENSG00000117226_25 (sequence is synthesized)
gagcaaagctctgccaagtcccttctgtcccccaacacagtcagcatccattatgaggatgtgaggagagaaagctggcactgggaataagctaactttccattcacagttgggctcctt

SEQ ID NO: 221106 - DNA, 120 bp, Artificial Sequence
  ENSG00000117226_26 (sequence is synthesized)
atcttcactcttctaggggataagcatcagctcacagctgttctgagggcttctctctgggctccacagtgaaatctcacaccaaaggaatctggatgtggtgtgtgcctcaccccaaaa

SEQ ID NO: 221107 - DNA, 120 bp, Artificial Sequence
  ENSG00000117226_27 (sequence is synthesized)
caagatgaagagctggaccctgaatttgtgcaacaagtagcagacttctgttcctacatctttagcaattccaaaactaaaactctttcaggaggcatcaaggctgaagagattctgcag

SEQ ID NO: 221108 - DNA, 120 bp, Artificial Sequence
  ENSG00000117226_28 (sequence is synthesized)
tcactagtaaacttcaggtatccaaatgcatcaccttgtggttcgtttttctgttttctctctgttcttcctgatcacaaacttagtatggcagagcgaacataaagcccaggggaagga

SEQ ID NO: 221109 - DNA, 120 bp, Artificial Sequence
  ENSG00000117226_29 (sequence is synthesized)
tgaggacgacaaaacactagaaattatcattttttagtttactattgatagttttctcacatttacagttttctatatctctagcttgctattcttaagaattaatgcttgctattagca

SEQ ID NO: 221110 - DNA, 120 bp, Artificial Sequence
  ENSG00000117226_30 (sequence is synthesized)
atagaaaaggttttttgaaaaaaggaaaaaaggaatgaatgcttgctgaatatctaaattaatagattagattttaaattatattctcctgtgttctaaaataagtttctttttctttca

SEQ ID NO: 221111 - DNA, 120 bp, Artificial Sequence
  ENSG00000117226_31 (sequence is synthesized)
ttttttcctattttacaatttaggtaaattttatctccttatgtagggttcgtgattctgtatttacctgtaaaatatgaaggacaatggatatttacttaaagaacatagattgaacat

SEQ ID NO: 221112 - DNA, 120 bp, Artificial Sequence
  ENSG00000117226_32 (sequence is synthesized)
gaacagtgtactagtccaaatgctggcgaactgcagcctaagacaaatgatggccaattctgcctgccagctgtctttctaagtgaggttttttgggaagaatgctatgcccattcattt

SEQ ID NO: 221113 - DNA, 120 bp, Artificial Sequence
  ENSG00000117226_33 (sequence is synthesized)
acatattgtctaaagctgttgtcatgctccaataacaaagttgagtacttggaaaagagaccacctagcctgcagagcctaaaatatttactatttgacgctttacggaaacacttatat

SEQ ID NO: 221114 - DNA, 120 bp, Artificial Sequence
  ENSG00000117226_34 (sequence is synthesized)
caatcctctcacctcagcctcctgagcttctctctgggctccacagtgaaatctcacaccaaaggaatctggatgtggtgtgtgcctcaccccaaaaagccagaacacaccttagtcctg

SEQ ID NO: 221115 - DNA, 120 bp, Artificial Sequence
  ENSG00000117226_35 (sequence is synthesized)
ctgtagtatccttttgtgacccagaacagcaccaaggtcagaggggacacctgtattcataaaccagctgcctgactgtgaatcctgatgaatcaagctcaaaaggagaaaacaaaaaat

SEQ ID NO: 221116 - DNA, 120 bp, Artificial Sequence
  ENSG00000117228_0 (sequence is synthesized)
acagaagtgctagaagccagtgctcgtgaactaaggagaaaaagaacagacaagggaacagcctggacatggcatcagagatccacatgacaggcccaatgtgcctcattgagaacacta

SEQ ID NO: 221117 - DNA, 120 bp, Artificial Sequence
  ENSG00000117228_1 (sequence is synthesized)
atgggcgactgatggcgaatccagaagctctgaagatcctttctgccattacacagcctatggtggtggtggcaattgtgggcctctaccgcacaggcaaatcctacctgatgaacaagc

SEQ ID NO: 221118 - DNA, 120 bp, Artificial Sequence
  ENSG00000117228_2 (sequence is synthesized)
tggctggaaagaaaaagggcttctctctgggctccacggtgcagtctcacactaaaggaatctggatgtggtgtgtgccccaccccaagaagccaggccacatcctagttctgctggaca

SEQ ID NO: 221119 - DNA, 120 bp, Artificial Sequence
  ENSG00000117228_3 (sequence is synthesized)
ccgagggtctgggagatgtagagaagggtgacaaccagaatgactcctggatcttcgccctggccgtcctcctgagcagcaccttcgtgtacaatagcataggaaccatcaaccagcagg

SEQ ID NO: 221120 - DNA, 120 bp, Artificial Sequence
  ENSG00000117228_4 (sequence is synthesized)
ctatggaccaactgtactatgtgacagagctgacacatagaatccgatcaaaatcctcacctgatgagaatgagaatgaggttgaggattcagctgactttgtgagcttcttcccagact

SEQ ID NO: 221121 - DNA, 120 bp, Artificial Sequence
  ENSG00000117228_5 (sequence is synthesized)
ttgtgtggacactgagagatttctccctggacttggaagcagatggacaacccctcacaccagatgagtacctgacatactccctgaagctgaagaaaggtaccagtcaaaaagatgaaa

SEQ ID NO: 221122 - DNA, 120 bp, Artificial Sequence
  ENSG00000117228_6 (sequence is synthesized)
cttttaacctgcccagactctgtatccggaaattcttcccaaagaaaaaatgctttgtctttgatcggcccgttcaccgcaggaagcttgcccagctcgagaaactacaagatgaagagc

SEQ ID NO: 221123 - DNA, 120 bp, Artificial Sequence
  ENSG00000117228_7 (sequence is synthesized)
tggaccccgaatttgtgcaacaagtagcagacttctgttcctacatctttagtaattccaaaactaaaactctttcaggaggcatccaggtcaacgggcctcgtctagagagcctggtgc

SEQ ID NO: 221124 - DNA, 120 bp, Artificial Sequence
  ENSG00000117228_8 (sequence is synthesized)
tgacctacgtcaatgccatcagcagtggggatctgccgtgcatggagaacgcagtcctggccttggcccagatagagaactcagctgcagtgcaaaaggctattgcccactatgaacagc

SEQ ID NO: 221125 - DNA, 120 bp, Artificial Sequence
  ENSG00000117228_9 (sequence is synthesized)
agatgggccagaaggtgcagctgcccacagaaaccctccaggagctgctggacctgcacagggacagtgagagagaggccattgaagtcttcatcaggagttccttcaaagatgtggacc

SEQ ID NO: 221126 - DNA, 120 bp, Artificial Sequence
  ENSG00000117228_10 (sequence is synthesized)
atctatttcaaaaggagttagcggcccagctagaaaaaaagcgggatgacttttgtaaacagaatcaggaagcatcatcagatcgttgctcagctttacttcaggtcattttcagtcctc

SEQ ID NO: 221127 - DNA, 120 bp, Artificial Sequence
  ENSG00000117228_11 (sequence is synthesized)
tagaagaagaagtgaaggcgggaatttattcgaaaccagggggctatcgtctctttgttcagaagctacaagacctgaagaaaaagtactatgaggaaccgaggaaggggatacaggctg

SEQ ID NO: 221128 - DNA, 120 bp, Artificial Sequence
  ENSG00000117228_12 (sequence is synthesized)
agattctgcagacatacttgaaatccaaggagtctatgactgatgcaattctccagacagaccagactctcacagaaaaagaaaaggagattgaagtggaacgtgtgaaagctgagtctg

SEQ ID NO: 221129 - DNA, 120 bp, Artificial Sequence
  ENSG00000117228_13 (sequence is synthesized)
cacaggcttcagcaaaaatgttgcaggaaatgcaaagaaagaatgagcagatgatggaacagaaggagaggagttatcaggaacacttgaaacaactgactgagaagatggagaacgaca

SEQ ID NO: 221130 - DNA, 120 bp, Artificial Sequence
  ENSG00000117228_14 (sequence is synthesized)
gggtccagttgctgaaagagcaagagaggaccctcgctcttaaacttcaggaacaggagcaactactaaaagagggatttcaaaaagaaagcagaataatgaaaaatgagatacaggatc

SEQ ID NO: 221131 - DNA, 120 bp, Artificial Sequence
  ENSG00000117228_15 (sequence is synthesized)
tccagacgaaaatgagacgacgaaaggcatgtaccataagctaaagaccagagccttcctgtcacccctaaccaaggcataattgaaacaattttagaatttggaacaagcgtcactaca

SEQ ID NO: 221132 - DNA, 120 bp, Artificial Sequence
  ENSG00000117228_16 (sequence is synthesized)
tttgataataattagatcttgcatcataacaccaaaagtttataaaggcatgtggtacaatgatcaaaatcatgttttttcttaaaaaaaaaaaaagactgtaaattgtgcaacaaagat

SEQ ID NO: 221133 - DNA, 120 bp, Artificial Sequence
  ENSG00000117228_17 (sequence is synthesized)
gcatttacctctgtatcaactcaggaaatctcataagctggtaccactcaggagaagtttattcttccagatgaccagcagtagacaaatggatactgagcagagtcttaggtaaaagtc

SEQ ID NO: 221134 - DNA, 120 bp, Artificial Sequence
  ENSG00000117228_18 (sequence is synthesized)
ttgggaaatatttgggcattggtctggccaagtctacaatgtcccaatatcaaggacaaccaccctagcttcttagtgaagacaatgtacagttatccgttagatcaagactacacggtc

SEQ ID NO: 221135 - DNA, 120 bp, Artificial Sequence
  ENSG00000117228_19 (sequence is synthesized)
tatgagcaataatgtgatttctggacattgcccatgtataatcctcactgatgatttcaagctaaagcaaaccaccttatacagagatctagaatctctttatgttctccagaggaaggt

SEQ ID NO: 221136 - DNA, 120 bp, Artificial Sequence
  ENSG00000117228_20 (sequence is synthesized)
ggaagaaaccatgggcaggagtaggaattgagtgataaacaattgggctaatgaagaaaacttctcttattgttcagttcatccagattataacttcaatgggacactttagaccattag

SEQ ID NO: 221137 - DNA, 120 bp, Artificial Sequence
  ENSG00000117228_21 (sequence is synthesized)
acaattgacactggattaaacaaattcacataatgccaaatacacaatgtatttatagcaacgtataatttgcaaagatggactttaaaagatgctgtgtaactaaactgaaataattca

SEQ ID NO: 221138 - DNA, 120 bp, Artificial Sequence
  ENSG00000117228_22 (sequence is synthesized)
attacttattatttagaatgttaaagcttatgatagtcttttctaactcttaacactcatacttgaaaactttctgagtttccccagaagagaatatgggattttttttgacatttttga

SEQ ID NO: 221139 - DNA, 120 bp, Artificial Sequence
  ENSG00000117228_23 (sequence is synthesized)
ctcatttaataatgctcttgtgtttacctagtatatgtagactttgtcttatgtgtgaaaagtcctaggaaagtggttgatgtttcttatagcaattaaaaattatttttgaactgaaaa

SEQ ID NO: 221140 - DNA, 120 bp, Artificial Sequence
  ENSG00000117228_24 (sequence is synthesized)
gccaggagcatgtgtctgtcgctccgacagggaatttgaccaccaaggacaatagggccaagagaaagaattcccagaggagaaaggatggcaggaagacaaacaggaacacctgcttac

SEQ ID NO: 221141 - DNA, 120 bp, Artificial Sequence
  ENSG00000117228_25 (sequence is synthesized)
ggtgtgtcttacttgccgaggtcatctctgagtagggcatatgcagtcagcaacaacgacaggtaagtgtataaggaagaatgaggcaacaagataaccccacacaaatttttcttctgc

SEQ ID NO: 221142 - DNA, 120 bp, Artificial Sequence
  ENSG00000117228_26 (sequence is synthesized)
gtgcttttttgtttgcataacattcatgcttttattcaataacatatgcaaacaggctgttataccagatatgtcctaggtgctcatcaaagagagtgcagtcaattaactattaagtta

SEQ ID NO: 221143 - DNA, 120 bp, Artificial Sequence
  ENSG00000117228_27 (sequence is synthesized)
taaattcaattagcagatgaagcacaaagttattattgtcatcattacagctgggcttttcctgttgcaagagacaggaacccaatgatggctgcttaaacaaaaatgtaattcattgat

SEQ ID NO: 221144 - DNA, 120 bp, Artificial Sequence
  ENSG00000117228_28 (sequence is synthesized)
ttaggctgcaaactggctttacaggtcaggtgggtctaaggtttcaagtaacatcatgaactggctctctgtccagtgttcccccatccccacagttttctccctcccaccatccctcta

SEQ ID NO: 221145 - DNA, 120 bp, Artificial Sequence
  ENSG00000117228_29 (sequence is synthesized)
tactgaaagctaactttccattcacagtcgggctccttatcttcacgctgttctaggggataagaatcaattcattaattattcccatgataccttagtttccatttcaaaagcacaaat

SEQ ID NO: 221146 - DNA, 120 bp, Artificial Sequence
  ENSG00000117228_30 (sequence is synthesized)
tatgcctctcctaaaaggagtaagacagtaataaaaataattaatgtacataataataactataataaactatacaatgtttattacaatttttatgcaataacagagttcacagtgatc

SEQ ID NO: 221147 - DNA, 120 bp, Artificial Sequence
  ENSG00000117228_31 (sequence is synthesized)
aggtaacagagagcttcaactgataaatgaggatgagaaaacacaagaaattatcatttttcagtttactattgctagttttccagcatttgcagttttctatgtcttcagctggctatt

SEQ ID NO: 221148 - DNA, 120 bp, Artificial Sequence
  ENSG00000117228_32 (sequence is synthesized)
atatccaaattaatagatgttattttaaattacatttgtcattgttctagaacaagtttcttgttctttcacctttgtgtatgctgtgattaggttaattttatctccctgcctagggtt

SEQ ID NO: 221149 - DNA, 120 bp, Artificial Sequence
  ENSG00000117228_33 (sequence is synthesized)
tgtgatcttctacttagccatagagtatggagtacaatggatatttatttaaagaacatagactaaaacatgaaccgtgtgctagtccaagcattggcaaactacagcccaagacaaatc

SEQ ID NO: 221150 - DNA, 120 bp, Artificial Sequence
  ENSG00000117228_34 (sequence is synthesized)
atggcaaatcctgcctgccagctgtctttgtaaataaggtttttttggaataatgctatgcccattcatttacatattgtctaaagctgttgtcatgcttcaataacagagttgaatact

SEQ ID NO: 221151 - DNA, 120 bp, Artificial Sequence
  ENSG00000117228_35 (sequence is synthesized)
tcaagctcaaaaggagaaaacaaaaaataatgcaagtacagaggagagatcccatgtatccactttagaactgacactgacacttaggttaggagcaaaggaaaatggaaggtttgggta

SEQ ID NO: 221152 - DNA, 120 bp, Artificial Sequence
  ENSG00000117228_36 (sequence is synthesized)
tgtgttgaactaacatgggatgaggtccctgttcattttgtcacatttccttagttagctactcagctatgtgacagagctgacacatagaatccgatcaaaatcctcacctgatgagaa

SEQ ID NO: 221153 - DNA, 80 bp, Artificial Sequence
  ENSG00000117245_0 (sequence is synthesized)
gggcggctccgggctcgggttctgcggcggcgcctgcagcgcggatcccccacgtccccgctcgggccgggcctcagaaa

SEQ ID NO: 221154 - DNA, 120 bp, Artificial Sequence
  ENSG00000117245_1 (sequence is synthesized)
ggcccgggctgctgggagtccccggcggggcgggggtcagctctggtcccgttggtcctgggcgcggcgccatggcctccgaggcggtgaaggttgtcgtgcgctgccgtcccatgaacc

SEQ ID NO: 221155 - DNA, 120 bp, Artificial Sequence
  ENSG00000117245_2 (sequence is synthesized)
agcgggagcgagagctgcgctgccagcccgtggtgactgtggactgcgcgcgcgcccagtgctgcatccagaacccgggcgccgccgacgagccgcccaagcagttcaccttcgacggcg

SEQ ID NO: 221156 - DNA, 120 bp, Artificial Sequence
  ENSG00000117245_3 (sequence is synthesized)
cctaccacgtggaccacgtcaccgagcagatctacaacgagatcgcctatccgctggtggagggcgtcactgagggctacaatggcaccatctttgcctacggccagacaggcagcggga

SEQ ID NO: 221157 - DNA, 120 bp, Artificial Sequence
  ENSG00000117245_4 (sequence is synthesized)
agtccttcaccatgcagggcctgccggatccgccctcccagagaggcatcatccccagggccttcgagcacgtgttcgagagcgtccagtgtgcagagaacactaagttcctggtccggg

SEQ ID NO: 221158 - DNA, 120 bp, Artificial Sequence
  ENSG00000117245_5 (sequence is synthesized)
cctcctacctggagatctacaatgaagatgtccgggacctccttggggctgacaccaagcagaagctggagctgaaggagcacccagagaagggcgtgtacgtgaaggggctgtccatgc

SEQ ID NO: 221159 - DNA, 120 bp, Artificial Sequence
  ENSG00000117245_6 (sequence is synthesized)
acacggtgcacagcgtggcccagtgtgagcacatcatggagactggctggaagaaccgttcggtcggctacacgctgatgaacaaggattcctcacgctcgcactccatcttcaccatca

SEQ ID NO: 221160 - DNA, 120 bp, Artificial Sequence
  ENSG00000117245_7 (sequence is synthesized)
gcatcgagatgtctgccgtggatgagcggggcaaggaccacctccgggcgggcaagctgaacctggtggacctggcgggcagcgagcggcagtccaagaccggggccacgggcgagcggc

SEQ ID NO: 221161 - DNA, 120 bp, Artificial Sequence
  ENSG00000117245_8 (sequence is synthesized)
tcaaggaggccaccaagatcaacctgtcgctctcggcactgggcaatgtcatctcggcgctggtggacgggcgctgtaagcacgtcccctaccgtgactcgaagctgacgcggctgctgc

SEQ ID NO: 221162 - DNA, 120 bp, Artificial Sequence
  ENSG00000117245_9 (sequence is synthesized)
aggactcactgggcggcaacaccaagacgctcatggtggcctgcctgtcgcctgcggacaacaactacgatgagacactcagcacgctgcgctacgccaaccgggccaagaacatcagga

SEQ ID NO: 221163 - DNA, 120 bp, Artificial Sequence
  ENSG00000117245_10 (sequence is synthesized)
acaagccgcgcatcaatgaggaccccaaggatgcgctgcttcgcgagtaccaggaggagatcaagaagctcaaggccatcctgacacagcagatgagccccagcagcctgtcagccctgc

SEQ ID NO: 221164 - DNA, 120 bp, Artificial Sequence
  ENSG00000117245_11 (sequence is synthesized)
tgtccaggcaggtgcccccagaccctgtgcaggtggaggagaagctgttgccccaacctgtgatccagcatgacgtggaggccgagaagcagctgatccgggaggagtatgaagagcgcc

SEQ ID NO: 221165 - DNA, 120 bp, Artificial Sequence
  ENSG00000117245_12 (sequence is synthesized)
tggcccggctgaaagccgactataaggccgagcaggagtctcgggccaggctggaggaagacatcactgccatgcgcaactcatatgacgtcaggctgtccacgctggaggagaacctgc

SEQ ID NO: 221166 - DNA, 120 bp, Artificial Sequence
  ENSG00000117245_13 (sequence is synthesized)
ggaaggagacagaggctgtcctgcaggtgggagtcctctacaaggctgaggtcatgtccagggctgagtttgccagcagcgctgagtacccgcctgcttttcagtatgagacagtggtga

SEQ ID NO: 221167 - DNA, 120 bp, Artificial Sequence
  ENSG00000117245_14 (sequence is synthesized)
aacccaaggtcttctccacgactgacactctgcccagtgacgatgtctccaagactcaggtttcctccaggtttgcggagctgcccaaggtggaaccctccaaatctgagatttctctgg

SEQ ID NO: 221168 - DNA, 120 bp, Artificial Sequence
  ENSG00000117245_15 (sequence is synthesized)
agtcatcctcgctcgaagaaacctctgtgtccgaggctttccctgggcctgaggagccctccaacgtggaggtctccatgcccactgaggagtccaggagcagatacttcctggatgagt

SEQ ID NO: 221169 - DNA, 120 bp, Artificial Sequence
  ENSG00000117245_16 (sequence is synthesized)
gcctcgggcaggaggccgctgggcacctgctgggggaacagaactacctcccgcaagaggagccgcaggaggtgcccctgcaggggttactaggcctgcaggacccgtttgccgaggtgg

SEQ ID NO: 221170 - DNA, 120 bp, Artificial Sequence
  ENSG00000117245_17 (sequence is synthesized)
aagccaagctggccagactctcctccaccgtggccaggacagatgcaccccaggcagacgtccccaaggtccctgtgcaggtccctgcgccgacagacctgctggagcccagtgatgcca

SEQ ID NO: 221171 - DNA, 120 bp, Artificial Sequence
  ENSG00000117245_18 (sequence is synthesized)
ggcccgaagccgaggcggctgatgacttcccgcccaggcctgaggtagatctggcctcggaagtggccttagaggtggtgcggacagcagagcctggcgtgtggttggaggctcaggccc

SEQ ID NO: 221172 - DNA, 120 bp, Artificial Sequence
  ENSG00000117245_19 (sequence is synthesized)
cggtggccctggtggctcagcctgagcccctgccggccacagctggtgtgaagagggagagcgtgggcatggaggtggcagtgctgactgatgacccgctgcccgttgtggaccagcagc

SEQ ID NO: 221173 - DNA, 120 bp, Artificial Sequence
  ENSG00000117245_20 (sequence is synthesized)
aggtgctggcccgtctgcagctgttggagcagcaggttgtgggtggagagcaggccaagaacaaggacctgaaggagaagcacaagcggcgcaagcgctacgcagacgagcgcaggaagc

SEQ ID NO: 221174 - DNA, 120 bp, Artificial Sequence
  ENSG00000117245_21 (sequence is synthesized)
agctggtggctgccctgcagaactcggatgaggacagcggggactgggtgctgcttaacgtctacgactccatccaggaggaagtgcgggccaagagcaagctgctggagaagatgcaga

SEQ ID NO: 221175 - DNA, 120 bp, Artificial Sequence
  ENSG00000117245_22 (sequence is synthesized)
ggaagcttcgggcagcagaggtggagatcaaagatctgcagtccgagtttcagctggagaagatcgattacttggccaccatccgccggcaggagcgtgactccatgctcttgcagcagc

SEQ ID NO: 221176 - DNA, 120 bp, Artificial Sequence
  ENSG00000117245_23 (sequence is synthesized)
tcctggagcaggtgcagcccctgattcgcagggactgtaactacagcaacctggagaagattctgcgtgagtcctgctgggacgaagataacggcttctggaagatcccacatcccgtca

SEQ ID NO: 221177 - DNA, 120 bp, Artificial Sequence
  ENSG00000117245_24 (sequence is synthesized)
tcacaaaaaccagcctcccagtagcagtttcaactgggccacagaacaaaccagcccgcaaaacctctgcagcagacaatggcgagccgaacatggaggacgaccgctacaggctcatgc

SEQ ID NO: 221178 - DNA, 120 bp, Artificial Sequence
  ENSG00000117245_25 (sequence is synthesized)
tcagtcggagcaacagtgaaaacattgccagcaactacttccgatctaagcgggccagccagatcctcagcacagacgccaggaagagcctcacacatcacaactcgccaccaggcctca

SEQ ID NO: 221179 - DNA, 120 bp, Artificial Sequence
  ENSG00000117245_26 (sequence is synthesized)
gctgcccactcagcaacaactctgccatcccacccacccaggcccctgaaatgccccagccccggcccttccgcctcgagtccctcgacatccctttcaccaaggccaagcgtaagaaaa

SEQ ID NO: 221180 - DNA, 120 bp, Artificial Sequence
  ENSG00000117245_27 (sequence is synthesized)
gcaaaagcaactttggcagtgagcctctgtgagcacagctgcttgccattgcctgccttataggcatgtagagactgccaggccctcccagggcagccccaaccaggtctcctcccacct

SEQ ID NO: 221181 - DNA, 120 bp, Artificial Sequence
  ENSG00000117245_28 (sequence is synthesized)
gccacacagcgctccggggcctgagggctccctcagccctgggaagacacattcccttccctgttccccagagagcccacctccgccctgggcaggagcccctcggaggctgtatagtcc

SEQ ID NO: 221182 - DNA, 120 bp, Artificial Sequence
  ENSG00000117245_29 (sequence is synthesized)
tccttagagaggcctgctccagctgttcataccacatcagtgtttccgtctgctcacctgccacagagcccacacccatgcccaccagtgttggtctttgcctcaaagcctgagacctgc

SEQ ID NO: 221183 - DNA, 120 bp, Artificial Sequence
  ENSG00000117245_30 (sequence is synthesized)
ttcacggccttcaccagccctgatggagagggcagcagctgccacgtggaggaagctcaatatcagctgggaaggaactgtgcctctgtctgactggccccacttcctaagcactgccct

SEQ ID NO: 221184 - DNA, 120 bp, Artificial Sequence
  ENSG00000117245_31 (sequence is synthesized)
gccccatggggtggcacaggggtcccacagcaggtcttcctgcactgcccacccctggctggtctgtggcccaaggaaggccactccacattaagctgcccaataaactgcttttaagat

SEQ ID NO: 221185 - DNA, 120 bp, Artificial Sequence
  ENSG00000117245_32 (sequence is synthesized)
gaactcaacagggcgtgtttttgtgtcactggtgtccctgagctggaggtgatctgtcggggctgcagcaggcggaatggccccgtctgggattgagccacctgggagctgtcggcgggg

SEQ ID NO: 221186 - DNA, 120 bp, Artificial Sequence
  ENSG00000117245_33 (sequence is synthesized)
ctatccgctggtggaggtgagggcgcccggcaggccgccctgcaggcggcagggcatgaggccgccccgagagtccccagggggctgcgctgccccccagccaggaggaaaggccctcga

SEQ ID NO: 221187 - DNA, 81 bp, Artificial Sequence
  ENSG00000117245_34 (sequence is synthesized)
caaacatccttctttactaatcagactgtacctgctctttgaggaaacagactgtgcaccagcttcgggcagcagaggtgg

SEQ ID NO: 221188 - DNA, 120 bp, Artificial Sequence
  ENSG00000117262_0 (sequence is synthesized)
gcagcttgatggcgtcgggctggagagccgcagtcccggctgcagcacctgggagaaggcagaccgtgtgagggggcctgtggccccagcgtgctgtggcctcggggagtgggaagtgga

SEQ ID NO: 221189 - DNA, 120 bp, Artificial Sequence
  ENSG00000117262_1 (sequence is synthesized)
ggcaggagccttccttacacttcgccatgagtttcctcatcgactccagcatcatgattacctcccagatactattttttggatttgggtggcttttcttcatgcgccaattgtttaaag

SEQ ID NO: 221190 - DNA, 120 bp, Artificial Sequence
  ENSG00000117262_2 (sequence is synthesized)
actatgagatacgtcagtatgttgtacaggtgatcttctccgtgacgtttgcattttcttgcaccatgtttgagctcatcatctttgaaatcttaggagtattgaatagcagctcccgtt

SEQ ID NO: 221191 - DNA, 120 bp, Artificial Sequence
  ENSG00000117262_3 (sequence is synthesized)
attttcactggaaaatgaacctgtgtgtaattctgctgatcctggttttcatggtgcctttttacattggctattttattgtgagcaatatccgactactgcataaacaacgactgcttt

SEQ ID NO: 221192 - DNA, 120 bp, Artificial Sequence
  ENSG00000117262_4 (sequence is synthesized)
tttcctgtctcttatggctgacctttatgtatttcttctggaaactaggagatccctttcccattctcagcccaaaacatgggatcttatccatagaacagctcatcagccgggttggtg

SEQ ID NO: 221193 - DNA, 120 bp, Artificial Sequence
  ENSG00000117262_5 (sequence is synthesized)
tgattggagtgactctcatggctcttctttctggatttggtgctgtcaactgcccatacacttacatgtcttacttcctcaggaatgtgactgacacggatattctagccctggaacggc

SEQ ID NO: 221194 - DNA, 120 bp, Artificial Sequence
  ENSG00000117262_6 (sequence is synthesized)
gactgctgcaaaccatggatatgatcataagcaaaaagaaaaggatggcaatggcacggagaacaatgttccagaagggggaagtgcataacaaaccatcaggtttctggggaatgataa

SEQ ID NO: 221195 - DNA, 120 bp, Artificial Sequence
  ENSG00000117262_7 (sequence is synthesized)
aaagtgttaccacttcagcatcaggaagtgaaaatcttactcttattcaacaggaagtggatgctttggaagaattaagcaggcagctttttctggaaacagctgatctatatgctacca

SEQ ID NO: 221196 - DNA, 120 bp, Artificial Sequence
  ENSG00000117262_8 (sequence is synthesized)
aaattttcatggctaccatcaatattgtttttgatcgagttgggaaaacggatcctgtcacaagaggcattgagatcactgtgaattatctgggaatccaatttgatgtgaagttttggt

SEQ ID NO: 221197 - DNA, 120 bp, Artificial Sequence
  ENSG00000117262_9 (sequence is synthesized)
cccaacacatttccttcattcttgttggaataatcatcgtcacatccatcagaggattgctgatcactcttaccaagttcttttatgccatctctagcagtaagtcctccaatgtcattg

SEQ ID NO: 221198 - DNA, 120 bp, Artificial Sequence
  ENSG00000117262_10 (sequence is synthesized)
tcctgctattagcacagataatgggcatgtactttgtctcctctgtgctgctgatccgaatgagtatgcctttagaataccgcaccataatcactgaagtccttggagaactgcagttca

SEQ ID NO: 221199 - DNA, 120 bp, Artificial Sequence
  ENSG00000117262_11 (sequence is synthesized)
acttctatcaccgttggtttgatgtgatcttcctggtcagcgctctctctagcatactcttcctctatttggctcacaaacaggcaccagagaagcaaatggcaccttgaacttaagcct

SEQ ID NO: 221200 - DNA, 120 bp, Artificial Sequence
  ENSG00000117262_12 (sequence is synthesized)
actacagactgttagaggccagtggtttcaaaatttagatataagaggggggaaaaatggaaccagggcctgacattttataaacaaacaaaatgctatggtagcatttttcaccttcat

SEQ ID NO: 221201 - DNA, 120 bp, Artificial Sequence
  ENSG00000117262_13 (sequence is synthesized)
agcatactccttccccgtcaggtgatactatgaccatgagtagcatcagccagaacatgagagggagaactaactcaagacaatactcagcagagagcatcccgtgtggatatgaggctg

SEQ ID NO: 221202 - DNA, 120 bp, Artificial Sequence
  ENSG00000117262_14 (sequence is synthesized)
gtgtagaggcggagaggagccaagaaactaaaggtgaaaaatacactggaactctggggcaagacatgtctatggtagctgagccaaacacgtaggatttccgttttaaggttcacatgg

SEQ ID NO: 221203 - DNA, 120 bp, Artificial Sequence
  ENSG00000117262_15 (sequence is synthesized)
aaaaggttatagctttgccttgagattgactcattaaaatcagagactgtaacacttttgccttacgttcattttatcaagcatagcttggtatttattatgcttgtgtgatctaacatc

SEQ ID NO: 221204 - DNA, 120 bp, Artificial Sequence
  ENSG00000117262_16 (sequence is synthesized)
agttagcatcccacacctcctcatctgatcctgccccattaaaataaccaagaaagaggttatctgttcttttccgggaaaggggtggtatgcacctgaaatagattttaccaaaagaga

SEQ ID NO: 221205 - DNA, 120 bp, Artificial Sequence
  ENSG00000117262_17 (sequence is synthesized)
aatttgcttaggatgatggcctctagctgcatctatgttgctgcaaaggacataattttgttctgaaagtctttttaagcttttctttttcaatgtgaaaggaggccacaatgaaatatt

SEQ ID NO: 221206 - DNA, 120 bp, Artificial Sequence
  ENSG00000117262_18 (sequence is synthesized)
ggaagtgaaacttcactttccttatgtgcaaaatggataacaccatggcataagacaatcccatgaagataagatataaaagaagataatgtttgaaaagaaagaaggaagtggatgctt

SEQ ID NO: 221207 - DNA, 120 bp, Artificial Sequence
  ENSG00000117262_19 (sequence is synthesized)
tggaaacagctgatctatatgctaccaaggtacagagcaaggaaactgaagtgtggtttttaccaatattattaaagagagaacaagactaaatggctttttagatttctctgtggccaa

SEQ ID NO: 221208 - DNA, 120 bp, Artificial Sequence
  ENSG00000117262_20 (sequence is synthesized)
gcaagagatacctcacagcttctatatcagccatgaagcattagggataagggatcttcactcttcatgaaattgctcctgtcactagcaaaatccttaatggaacactctcaaaagtag

SEQ ID NO: 221209 - DNA, 120 bp, Artificial Sequence
  ENSG00000117262_21 (sequence is synthesized)
caattggtgggatagtcagaagaggcttttcaacatttaggaaggtggcacgtaccacctcctactaacctgggataaagatggtagctacttttattcctttataagttagtaatatta

SEQ ID NO: 221210 - DNA, 120 bp, Artificial Sequence
  ENSG00000117262_22 (sequence is synthesized)
taagagcagtagacacctatctgccatggatggcctagccctattttaaaggatccaggtcaataagtgtcgaaactgtaagaagtaactttcctatgtacacctaaaataaaatataat

SEQ ID NO: 221211 - DNA, 120 bp, Artificial Sequence
  ENSG00000117262_23 (sequence is synthesized)
ttaaatgtgcaaaatctgttagtgaagattacaaacttttaattctttttgaggataactttacaggagtaaccttataggacagaggttaacataggctttggaaacagataaacctga

SEQ ID NO: 221212 - DNA, 120 bp, Artificial Sequence
  ENSG00000117262_24 (sequence is synthesized)
gcctactcaccagctgtgtgactttgagcaagttatcgaacctctcaaagcctcaattttctcatctgtaaaattaagataatagaacgtatctcataagaattgttatgaagattaagt

SEQ ID NO: 221213 - DNA, 120 bp, Artificial Sequence
  ENSG00000117262_25 (sequence is synthesized)
ggataatgcatgtaagatgtttatcccagtctctagctaaaagcaagcattcagtaaatgctggccacaactactgttattagtttaatattattacaatgtatggttttttgacttagc

SEQ ID NO: 221214 - DNA, 120 bp, Artificial Sequence
  ENSG00000117262_26 (sequence is synthesized)
cctcccagccccggctgtcaggagactggcctgcggccgtccgcgtccccacccggcatccatccccggaatttcggtccacttttggaagcggtccgccgacctccaggctaagagccg

SEQ ID NO: 221215 - DNA, 120 bp, Artificial Sequence
  ENSG00000117262_27 (sequence is synthesized)
actggggaagcctgtgtggttctgggcgcgcggtgtgcgacgcgccaatactggatactgaggacacgtcagtgcaggctttgctgttagatgtcaaatcctgaatccgggtgtggagaa

SEQ ID NO: 221216 - DNA, 120 bp, Artificial Sequence
  ENSG00000117262_28 (sequence is synthesized)
atattcagataatgtaggagaaagctatgctttattatagttattattctgtaactatttacaatcttgaacattacatttgacttaatctaactagttaaatcaaaaaacaaatgaaac

SEQ ID NO: 221217 - DNA, 120 bp, Artificial Sequence
  ENSG00000117262_29 (sequence is synthesized)
ctcaactctggaccaagagcaaaagaaaaaaagtagtgttgggatagtcccttctaaggagagaatagaatactccaaaaccttcaaggggaaatattttaattttcttggttacttttt

SEQ ID NO: 221218 - DNA, 120 bp, Artificial Sequence
  ENSG00000117262_30 (sequence is synthesized)
gtccaaactcctaagagctaggcttaggaaataccatgtgtacagtcatctttccagcacctgcacaatatcataaaatcattgtctttgagctgaagtggtcctaaaaagtcagccttt

SEQ ID NO: 221219 - DNA, 120 bp, Artificial Sequence
  ENSG00000117262_31 (sequence is synthesized)
ccattttacagatgagaaaatagacccagagaggttaagtcacacggtggtttgtggcaaagctagaaacataactgtggtctcctcttcatagttctttccactacactattacatttc

SEQ ID NO: 221220 - DNA, 120 bp, Artificial Sequence
  ENSG00000117262_32 (sequence is synthesized)
tcaactctgaaaaaccaccataaagcataatggctacctaaaataaatggcccatttctaaagtaattagtattcctaaacaaattttaagtagctctgcttctccagtgacattttggt

SEQ ID NO: 221221 - DNA, 78 bp, Artificial Sequence
  ENSG00000117262_33 (sequence is synthesized)
tgtaatcccagcactttgcaaggccgaggtgggcagatcacttgaacccaggagttcaagacaagcctcggcaacatg

SEQ ID NO: 221222 - DNA, 62 bp, Artificial Sequence
  ENSG00000117262_34 (sequence is synthesized)
ccacttgggaggctgaggtaggagtgagcccagatcacgccactgcactcctgcctaggcaa

SEQ ID NO: 221223 - DNA, 120 bp, Artificial Sequence
  ENSG00000117262_35 (sequence is synthesized)
agtgagcccagatcacgccactgcactcctgcctaggcaacagagctagaccctgtctcaaaataaaaaagaaaggataaaggagatttgattaatagattaataaactgttctttcctg

SEQ ID NO: 221224 - DNA, 120 bp, Artificial Sequence
  ENSG00000117262_36 (sequence is synthesized)
attggttatgatgttgaactacttcccaaattatgtaaccaaatttctgtgtggctctggtgctattaggtcaaaactttggggaactaagcatgagatagcatactcctgtttccttct

SEQ ID NO: 221225 - DNA, 120 bp, Artificial Sequence
  ENSG00000117262_37 (sequence is synthesized)
ctgtcccagggaaatacaaattcccttttgcctcaattagagaaggatgtctattcttgctacaaattatgatttatgtcctggtgtcaaatgaagataagaataagatcaaagaaaggc

SEQ ID NO: 221226 - DNA, 120 bp, Artificial Sequence
  ENSG00000117262_38 (sequence is synthesized)
aagatgattgtggaagagaaagaaaaaggattaatttagatttatttaaccaagaaacatttatttcgtatctcctatttccaggctgagtgctaagaaataaaatgatgagtagagtat

SEQ ID NO: 221227 - DNA, 120 bp, Artificial Sequence
  ENSG00000117262_39 (sequence is synthesized)
agcctttctcctcaaggagcttaccctctaatcatgggagagacagacatgtaactagttaaaccatattgtttggtggcttgaaccatgccagtagtagccactattaaggaaggaact

SEQ ID NO: 221228 - DNA, 120 bp, Artificial Sequence
  ENSG00000117262_40 (sequence is synthesized)
gaagggcacttactgatttgggtaatagtgggaaaaatcagagaggagggaggatttagattgaagtatgtgcttctattttagaaggggctgtatttactatgtttattacttaaaagt

SEQ ID NO: 221229 - DNA, 120 bp, Artificial Sequence
  ENSG00000117262_41 (sequence is synthesized)
ggattatttaacctccctgagcccctgttctctaaatgggagaataataactctacctgattgagttcttggaaaataacatagtgtaatggaaagagcaggctttggaggaaaagagga

SEQ ID NO: 221230 - DNA, 120 bp, Artificial Sequence
  ENSG00000117266_0 (sequence is synthesized)
ccttcctcctcctcctcctcctcctcctccctcctcttccccaccttcctccactccctcccttcccctccccttctacctcctcctcggccagctcaggttgcagcttctctggggaac

SEQ ID NO: 221231 - DNA, 120 bp, Artificial Sequence
  ENSG00000117266_1 (sequence is synthesized)
tgctcacctttccggagcaggggaagctgccccgtgcccgggagggagcgggcgcaccgcggcccccaggacacgcgctgacccggctgcccagtccctcatgatcatgaacaagatgaa

SEQ ID NO: 221232 - DNA, 120 bp, Artificial Sequence
  ENSG00000117266_2 (sequence is synthesized)
gaactttaagcgccgtttctccctgtcagtgccccgcactgagaccattgaagaatccttggctgaattcacggagcaattcaaccagctccacaaccggcggaatgagaacttgcagct

SEQ ID NO: 221233 - DNA, 120 bp, Artificial Sequence
  ENSG00000117266_3 (sequence is synthesized)
cggtcctcttggcagagaccccccgcaggagtgcagcaccttctccccaacagacagcggggaggagccggggcagctctcccctggcgtgcagttccagcggcggcagaaccagcgccg

SEQ ID NO: 221234 - DNA, 120 bp, Artificial Sequence
  ENSG00000117266_4 (sequence is synthesized)
cttctccatggaggtaagggcctctggagctctgccccggcaggtggcaggatgcacgcacaagggtgtgcacaggagggcagctgccttacagccagactttgacgtcagcaagaggct

SEQ ID NO: 221235 - DNA, 120 bp, Artificial Sequence
  ENSG00000117266_5 (sequence is synthesized)
ctctctgcccatggatatccgcctgccccaggaattcctacagaagctacagatggagagcccagatctgcccaagccgctcagccgcatgtcccgccgggcctccctgtcagacattgg

SEQ ID NO: 221236 - DNA, 120 bp, Artificial Sequence
  ENSG00000117266_6 (sequence is synthesized)
ctttgggaaactggaaacatacgtgaaactggacaaactgggagagggcacctatgccacagtcttcaaagggcgcagcaaactgacggagaaccttgtggccctgaaagagatccggct

SEQ ID NO: 221237 - DNA, 120 bp, Artificial Sequence
  ENSG00000117266_7 (sequence is synthesized)
ggagcacgaggagggagcgccctgcactgccatccgagaggtgtctctgctgaagaacctgaagcacgccaatattgtgaccctgcatgacctcatccacacagatcggtccctcaccct

SEQ ID NO: 221238 - DNA, 120 bp, Artificial Sequence
  ENSG00000117266_8 (sequence is synthesized)
ggcctcgcctactgtcaccaccgcaagatcctgcaccgggacctgaagccccagaacctgctcatcaacgagaggggggagctgaagctggccgactttggactggccagggccaagtca

SEQ ID NO: 221239 - DNA, 120 bp, Artificial Sequence
  ENSG00000117266_9 (sequence is synthesized)
gtgcccacaaagacttactccaatgaggtggtgaccctgtggtacaggccccccgatgtgctgctgggatccacagagtactccacccccattgatatgtggggcgtgggctgcatccac

SEQ ID NO: 221240 - DNA, 120 bp, Artificial Sequence
  ENSG00000117266_10 (sequence is synthesized)
tacgagatggccacagggaggcccctcttcccgggctccacagtcaaggaggagctgcacctcatctttcgcctcctcgggacccccacagaagagacgtggcccggcgtgaccgccttc

SEQ ID NO: 221241 - DNA, 120 bp, Artificial Sequence
  ENSG00000117266_11 (sequence is synthesized)
tctgagttccgcacctacagcttcccctgctacctcccgcagccgctcatcaaccacgcgcccaggttggatacggatggcatccacctcctgagcagcctgctcctgtatgaatccaag

SEQ ID NO: 221242 - DNA, 120 bp, Artificial Sequence
  ENSG00000117266_12 (sequence is synthesized)
agtcgcatgtcagcagaggctgccctgagtcactcctacttccggtctctgggagagcgtgtgcaccagcttgaagacactgcctccatcttctccctgaaggagatccagctccagaag

SEQ ID NO: 221243 - DNA, 120 bp, Artificial Sequence
  ENSG00000117266_13 (sequence is synthesized)
gacccaggctaccgaggcttggccttccagcagccaggacgagggaagaacaggcggcagagcatcttctgagccacgcccaccttgctgtggccaagggacaagagatcacatggagca

SEQ ID NO: 221244 - DNA, 120 bp, Artificial Sequence
  ENSG00000117266_14 (sequence is synthesized)
caaattcgggtaggatggagcctgtgtggccctcggaggactgaagaacgagggctgacagccagcctggaagaccgcttggcagcccttctggccacggctgtttcttctttgtgcttc

SEQ ID NO: 221245 - DNA, 120 bp, Artificial Sequence
  ENSG00000117266_15 (sequence is synthesized)
ccgtgtgcctccccagtagccctcacctgcataccaacccctcctttacccacgttggggctggcataagctgcttccctgagaggacatgaggggggggcggtcctcgtaccctctccc

SEQ ID NO: 221246 - DNA, 120 bp, Artificial Sequence
  ENSG00000117266_16 (sequence is synthesized)
accctggtgtttgggcacctgcgtgggatgcacacggatgacagaatcaaggcgccaggatgggcactctgccctggatacaggctctaccctcctcccccaggacctgcctagtgccag

SEQ ID NO: 221247 - DNA, 120 bp, Artificial Sequence
  ENSG00000117266_17 (sequence is synthesized)
ctttttcccctctgagagcaagaagagacatggcatgttctctgggaccctggaatcctaggtacccacatgtgtgccaaagcctaccccacctggcaggtgtcccacagcaacagaagg

SEQ ID NO: 221248 - DNA, 120 bp, Artificial Sequence
  ENSG00000117266_18 (sequence is synthesized)
aatagtagtccccactctttccatcagccctaccctaccctcattccccgacaccctctggcttgaaccatggctgagcagtgccggcatacgctttgctggcatgcttggatgcccagc

SEQ ID NO: 221249 - DNA, 120 bp, Artificial Sequence
  ENSG00000117266_19 (sequence is synthesized)
tgtgtccagaggtggcctgggaccgccagttgcacgcctgccacctcagccagcccccgcccagctcatcagtctgaatggagttgccttaaattggcaggtggtaccgtactcactgcc

SEQ ID NO: 221250 - DNA, 120 bp, Artificial Sequence
  ENSG00000117266_20 (sequence is synthesized)
cttggagctgtgaccggctcctgcctgtccaccccttcccgaggtggctcctgcttaccttatcatcccagggctctgattagccaggcctggtcagggtcctggggacggcacccagat

SEQ ID NO: 221251 - DNA, 120 bp, Artificial Sequence
  ENSG00000117266_21 (sequence is synthesized)
atgcagagtcaccctgacactggtgccaggctgacctcagctcccgaaggctcgcacagcctccccatccttccttcccagcccttgtggctctgtccacctgatcccaataccagcttc

SEQ ID NO: 221252 - DNA, 120 bp, Artificial Sequence
  ENSG00000117266_22 (sequence is synthesized)
ccccagcccctgccaccccagagggcggccacgacagggagaggtgtagatgccaccatctgagggagaggaacgtggaacaggagcaggctctgatgctgagaggcttgcctccggggg

SEQ ID NO: 221253 - DNA, 120 bp, Artificial Sequence
  ENSG00000117266_23 (sequence is synthesized)
ctggaagcctgggtggccggggcccctgaagaaggctcccctctgtatcccccaggtctcctcaacactgggctgatcctgaatggcacaggccaaggggaggccagcctcgcctttcta

SEQ ID NO: 221254 - DNA, 120 bp, Artificial Sequence
  ENSG00000117266_24 (sequence is synthesized)
cccaggccccctgccctgcccacctcaggcccccaccctccactcctccccacggtactgtgaacgtcgtgtgactcagtgcagagacagataatatatttaattcatgtacagaaagga

SEQ ID NO: 221255 - DNA, 120 bp, Artificial Sequence
  ENSG00000117266_25 (sequence is synthesized)
gggaatcggggctttgttcaagaggaaggcaaagaggcttcttgaaggggtttgctgagagaagactccagtcctggccccaggagcttgagaagtgaagctgactttcccgccctccag

SEQ ID NO: 221256 - DNA, 120 bp, Artificial Sequence
  ENSG00000117266_26 (sequence is synthesized)
ccttccactgctcctgacctcctgtatttcagctggagagaaggtgcagctggccagctctgatgcactcttcccttcctcctctttttcccctcttgcctcctggggcatgccagagca

SEQ ID NO: 221257 - DNA, 120 bp, Artificial Sequence
  ENSG00000117266_27 (sequence is synthesized)
gagaccttcaggtgtcagtatcagaggtgaaatgaggtttggacccaatcatgtcccaagggtgttggccaagctgacattcagtttacgggccttggtcagtaagatttattggctgtt

SEQ ID NO: 221258 - DNA, 120 bp, Artificial Sequence
  ENSG00000117266_28 (sequence is synthesized)
gacacattcaggcccttggacacaagttggtaaatttctgctggtccaaggactgcctggttctggcaccctccctgccaccccagcccttcccccagaactctctagacctccagcagc

SEQ ID NO: 221259 - DNA, 120 bp, Artificial Sequence
  ENSG00000117266_29 (sequence is synthesized)
taaagggcttaggtctggggggccttcaggatcctctttgcacatcatgcctgctattatgaccaatactttgctggactaggtggtccatagagaactgcacagggcgtggcggggcgg

SEQ ID NO: 221260 - DNA, 120 bp, Artificial Sequence
  ENSG00000117266_30 (sequence is synthesized)
gcggtgggcagtggaggcagtgctgagggtcactgggaggaagaaggtgactgggaagaagagggtgaacacccaccctcagaggggtcaaactttgcagaagacacaaccctggctccc

SEQ ID NO: 221261 - DNA, 120 bp, Artificial Sequence
  ENSG00000117266_31 (sequence is synthesized)
agtgatggtggcatacagggcgacagagcttgatgagagagctgaattcccagtgggtggagacctggactggttgccttgttcttttcaactgctcttctcacacttcccatctcagga

SEQ ID NO: 221262 - DNA, 120 bp, Artificial Sequence
  ENSG00000117266_32 (sequence is synthesized)
tcccacctaccagacactccccagtcaccttcccctccccgcccaccccctccccactggccttaggggaggagcacagcgctgggggaggggggctacccttctctccctcaggacaga

SEQ ID NO: 221263 - DNA, 120 bp, Artificial Sequence
  ENSG00000117266_33 (sequence is synthesized)
ccgggcggggaccccctgtggcctcggccatctttgctcccacctcatacattgcatccctttcaagtcggccttggccctgggcctcacgcaggccctccccaccctctctcgtctccc

SEQ ID NO: 221264 - DNA, 120 bp, Artificial Sequence
  ENSG00000117266_34 (sequence is synthesized)
gcggccctggctctcccatccccaatcaggcacagcctgtgtccgcgccttctccttgcaggttggatacggatggcatccacctcctgagcagcctgctcctggtgagtgtcctcccgg

SEQ ID NO: 221265 - DNA, 120 bp, Artificial Sequence
  ENSG00000117266_35 (sequence is synthesized)
ccgtgcccgggagggagcgggcgcaccgcggcccccaggacacgcgcttgccccgcactgagaccattgaagaatccttggctgaattcacggagcaattcaaccagctccacaaccggc

SEQ ID NO: 221266 - DNA, 120 bp, Artificial Sequence
  ENSG00000117266_36 (sequence is synthesized)
ctgaagcagtatctggaccactgtgggaacctcatgagcatgcacaacgtcaaggtgaggcctcgggggcagggtccccccatcttggcagccacctgtccagaagcccagtgtggggac

SEQ ID NO: 221267 - DNA, 120 bp, Artificial Sequence
  ENSG00000117266_37 (sequence is synthesized)
ccactctcaccaccagggatccggctgctgaggtggctcagaccttcccacgtaggaaagagggagagggcaatgccatcaacgagtccaggaactgggttgagcgctttaccccaagaa

SEQ ID NO: 221268 - DNA, 120 bp, Artificial Sequence
  ENSG00000117266_38 (sequence is synthesized)
cagacacacactgtctgccactgtctagctgttggtataaaacccactctcaactctgaacatcagtttcccagtctgtcaaatgggagtgtgagctacctgccaaaatgcagggaggct

SEQ ID NO: 221269 - DNA, 120 bp, Artificial Sequence
  ENSG00000117266_39 (sequence is synthesized)
gtgtgagctacctgccaaaatgcagggaggcttctggggaagctcggggttatgaatgacctctcctggtgtttgttaaagaatcaaggctgggcatggtggcccacgcctgtaatccca

SEQ ID NO: 221270 - DNA, 120 bp, Artificial Sequence
  ENSG00000117266_40 (sequence is synthesized)
gcactccagcctgggtgacagagtaaaaccctgactctaaaagaaaaaaaaaaaaaaaagggatcaagcacatatgtctccacataggcgggcatcctgacccccgtgctcctgactgag

SEQ ID NO: 221271 - DNA, 120 bp, Artificial Sequence
  ENSG00000117266_41 (sequence is synthesized)
cgggcatcctgacccccgtgctcctgactgagacttcgctggcctcccccacactcactgcgtcctctgcacccctgctgtcctcccctctggatgggattccctggtgtgggtggggtc

SEQ ID NO: 221272 - DNA, 120 bp, Artificial Sequence
  ENSG00000117266_42 (sequence is synthesized)
caggatgggggctgcagggtgtgcaggagaatgaggggcttgtgctgacctcactgccaagcccctgcccccatcctggtcccagccttggagcagaggctcagggccaccttccacccc

SEQ ID NO: 221273 - DNA, 120 bp, Artificial Sequence
  ENSG00000117266_43 (sequence is synthesized)
ctgtggctcgtgtgcttacacgtctttgaaacatctcccctgtactctccacccccaaggccaaggggtggcctccatacacatcctctggagtctgtgcactgcgagcccaaacccgtt

SEQ ID NO: 221274 - DNA, 120 bp, Artificial Sequence
  ENSG00000117266_44 (sequence is synthesized)
acttagctgtgtagctctgggcaagttacagagctcctccatgcctcagtttcctcagctgcaaagtgggattaatacctattttataagatggccgtgaggatacattgagatgacggg

SEQ ID NO: 221275 - DNA, 120 bp, Artificial Sequence
  ENSG00000117266_45 (sequence is synthesized)
acacacttagtgtggtgcctgtcttgtaaggcacacgatgaagggttgttatcggcactacgcttcctgttacggatgttctccatctgatcatggttggtttgcatctgtatttctatc

SEQ ID NO: 221276 - DNA, 120 bp, Artificial Sequence
  ENSG00000117266_46 (sequence is synthesized)
ccaagagaaggtcactctcctgaagtttcatttctggtttttcctggtggctggagaccgaggagccttcccctgagtcttgagatggcctgaggttgggtttgtggtaggggctggagg

SEQ ID NO: 221277 - DNA, 120 bp, Artificial Sequence
  ENSG00000117266_47 (sequence is synthesized)
ctgacctggggcttctcctgttagcctcaagcctcacccaccttggtgctctaaccagcactggagtcctgctgcccagagggtttgcagccccccagccgggcccaatagccccaccct

SEQ ID NO: 221278 - DNA, 120 bp, Artificial Sequence
  ENSG00000117266_48 (sequence is synthesized)
atctttcgcctcctcggtcagtctcccgctgctccgtccctctcaccaccagggggcgccggaactcctccagcccaggcgcggagcgggacggggaggagcggctcggccgcctctctc

SEQ ID NO: 221279 - DNA, 120 bp, Artificial Sequence
  ENSG00000117266_49 (sequence is synthesized)
cggtctctgggagagcgtgtgcaccagcttgaagacagtgagtactgggggtccgggagcagggccacccagaaccaaggaaaggggttggtgagtgtgggcagaagaaccagaacaaag

SEQ ID NO: 221280 - DNA, 120 bp, Artificial Sequence
  ENSG00000117266_50 (sequence is synthesized)
aggccagaggccccagccccagcagagcagccccgggcaccttgcctcccctgctggggttctcattccaaattgagggggcaaacagtggaaatgagacgctgcctcgagggctcagtt

SEQ ID NO: 221281 - DNA, 120 bp, Artificial Sequence
  ENSG00000117266_51 (sequence is synthesized)
aggggactttcctcacagagtgaaagtcgcagctttcccgagcccagggaagccccccagagaggggctgtagtgggggctgggcagttctaggagcctccactgccctgggccacccct

SEQ ID NO: 221282 - DNA, 120 bp, Artificial Sequence
  ENSG00000117266_52 (sequence is synthesized)
ccgccgccagagccacgatccctgcagccgcctgtggcaggtcgtcattggtgccctggtggagcagccctaggaagggcggccgcccctgcctgatgccgaccctaccccttgctcctc

SEQ ID NO: 221283 - DNA, 120 bp, Artificial Sequence
  ENSG00000117280_0 (sequence is synthesized)
ggaggaaggggagagagaggcgcgcgggagggcgtctagggaatcgaggtgccggctgctccttcctcacaatttgcccagacaggcggtgggtgggaatgcctcacttcagtttgaaga

SEQ ID NO: 221284 - DNA, 120 bp, Artificial Sequence
  ENSG00000117280_1 (sequence is synthesized)
gggtccggatccaaaggggttaaaacgagcgacccccgatccccgaccacacttcccgcctccctaaaacgcacaccccgctagccatgggcagccgcgaccacctgttcaaagtgctgg

SEQ ID NO: 221285 - DNA, 120 bp, Artificial Sequence
  ENSG00000117280_2 (sequence is synthesized)
tggtgggggacgccgcagtgggcaagacgtcgctggtgcagcgatattcccaggacagcttcagcaaacactacaagtccacggtgggagtggattttgctctgaaggttctccagtggt

SEQ ID NO: 221286 - DNA, 120 bp, Artificial Sequence
  ENSG00000117280_3 (sequence is synthesized)
ctgactacgagatagtgcggcttcagctgtgggatattgcagggcaggagcgcttcacctctatgacacgattgtattatcgggatgcctctgcctgtgttattatgtttgacgttacca

SEQ ID NO: 221287 - DNA, 120 bp, Artificial Sequence
  ENSG00000117280_4 (sequence is synthesized)
atgccactaccttcagcaacagccagaggtggaaacaggacctagacagcaagctcacactacccaatggagagccggtgccctgcctgctcttggccaacaagtgtgatctgtcccctt

SEQ ID NO: 221288 - DNA, 120 bp, Artificial Sequence
  ENSG00000117280_5 (sequence is synthesized)
gggcagtgagccgggaccagattgaccggttcagtaaagagaacggtttcacaggttggacagaaacatcagtcaaggagaacaaaaatattaatgaggctatgagagtcctcattgaaa

SEQ ID NO: 221289 - DNA, 120 bp, Artificial Sequence
  ENSG00000117280_6 (sequence is synthesized)
agatgatgagaaattccacagaagatatcatgtctttgtccacccaaggggactacatcaatctacaaaccaagtcctccagctggtcctgctgctagtagtgtttggcttattttccat

SEQ ID NO: 221290 - DNA, 120 bp, Artificial Sequence
  ENSG00000117280_7 (sequence is synthesized)
cacctgacaattttattaagtacatttgaattgtctcctgactactgtccagtaaggaggcccattgtcacttagaaaagacacctggaacccatgtgcatttctgcatctcctggatta

SEQ ID NO: 221291 - DNA, 120 bp, Artificial Sequence
  ENSG00000117280_8 (sequence is synthesized)
gcctttcacatgttgctggctcacattagtgccagttagtgccttcggtgtaagatcttctcatcagccctcaatttgtgatccggaattttatgagaaggattagaaatcagcacctgc

SEQ ID NO: 221292 - DNA, 120 bp, Artificial Sequence
  ENSG00000117280_9 (sequence is synthesized)
gttttagagatcataattctcacctacttctgagcttatttttccatttgatattcattgatatcatgacttccaattgagaggaaaatgagatcaaatgtcatttcccaaatttcttgt

SEQ ID NO: 221293 - DNA, 120 bp, Artificial Sequence
  ENSG00000117280_10 (sequence is synthesized)
aggccgttgtttcagattctttctgtcttggaatgtaaacatctgattctggaatgcagaaggagggggtctgggcatctgtggatttttggctactagaagtgtcccagaagtcactgt

SEQ ID NO: 221294 - DNA, 120 bp, Artificial Sequence
  ENSG00000117280_11 (sequence is synthesized)
ttggctactagaagtgtcccagaagtcactgtatttttgaaacttctaacgtcataattaagtttctcttgtcttggcatcaagaatagtcaagttttttggccgggcatggtggctcat

SEQ ID NO: 221295 - DNA, 68 bp, Artificial Sequence
  ENSG00000117280_12 (sequence is synthesized)
cttggggaggccaaggcaggcggatcacatgaggccaggaattcgagaccaacctggtatggcacgtg

SEQ ID NO: 221296 - DNA, 80 bp, Artificial Sequence
  ENSG00000117280_13 (sequence is synthesized)
ctctggagactgaggtgggagaatcgcttgagcgcacttcagcctgggtgacagagaaggactccgtctcaaaaaaaaaa

SEQ ID NO: 221297 - DNA, 120 bp, Artificial Sequence
  ENSG00000117280_14 (sequence is synthesized)
agtgccacaggcaaccctgcacgtgacgcttgcggaggaaggggagagagaggcgcgcgggagggcgtctagggaatcgaggtgccggctgctccttcctcacaatttggtttgtgctgc

SEQ ID NO: 221298 - DNA, 120 bp, Artificial Sequence
  ENSG00000117280_15 (sequence is synthesized)
aaggggagggtccccatcatctggccccagtggtgtaaggagctgactgggattcagtcactgacttggagccgctcgggggaagtcccgcccagacaggcggtgggtgggaatgcctca

SEQ ID NO: 221299 - DNA, 120 bp, Artificial Sequence
  ENSG00000117280_16 (sequence is synthesized)
agtcatttttaaactacctatctcatgcaatgaaagcattttcttccacaaagagcttaatcctcatgataggattgcctagtgtctcccatttgcaggtttctgggttgatgtcttaat

SEQ ID NO: 221300 - DNA, 120 bp, Artificial Sequence
  ENSG00000117280_17 (sequence is synthesized)
gcataatactgcaagtgacatcagctggctgtgatgcttcgaaataggtctgctcctcacagctttgggaatctgaatggaagaagaaaagagagaagttaacaacctccactggggcaa

SEQ ID NO: 221301 - DNA, 120 bp, Artificial Sequence
  ENSG00000117280_18 (sequence is synthesized)
ctttgtgaacacgtaggcacttagtcataggaaacatattatgtgcaggtcctagcctgggggaggaaagtagatagacagaaaatcattaggtaatttaagtactaaattgggcagggc

SEQ ID NO: 221302 - DNA, 120 bp, Artificial Sequence
  ENSG00000117280_19 (sequence is synthesized)
tttttagtatcaaatcactactagaccatttaatttgttaaattatctctaggatggtgatttataacctacccaaagttatcgatattcttactaaactctgaggcctgaagttctgtg

SEQ ID NO: 221303 - DNA, 120 bp, Artificial Sequence
  ENSG00000117280_20 (sequence is synthesized)
atagaccttaaataagtgtcctaagtcagtggttcccaaatctggctggtcgggaatacctgggaagtttgttaaaattttttaaaaatgttttaagatttttgggtcctgagccagccg

SEQ ID NO: 221304 - DNA, 120 bp, Artificial Sequence
  ENSG00000117280_21 (sequence is synthesized)
gtgaaactccatctccaaaaaaaaaaaacaaaaagaaaaagatttttgggtcccgacctcaaacctactgaatcagaatttctagggatgaagcctaggaatgtgttgttgttttcagag

SEQ ID NO: 221305 - DNA, 120 bp, Artificial Sequence
  ENSG00000117280_22 (sequence is synthesized)
atgtgttgttgttttcagagcttccctggtgattgtgataagcctggtttggaaaccattgctggagaactttgtaaagatacagagacccagaccttttgtatttacatttaaatacaa

SEQ ID NO: 221306 - DNA, 120 bp, Artificial Sequence
  ENSG00000117280_23 (sequence is synthesized)
atacaaatcctgggtttctatatattctgttagcttttcaggtgattctgctacacagacgttgaaaaccactgccctaagaaagagatcagaggccacatatcagagagaaaagggacc

SEQ ID NO: 221307 - DNA, 120 bp, Artificial Sequence
  ENSG00000117280_24 (sequence is synthesized)
aaaccttcggtggtttgttgtgtgtcgttttaatgccaattattttaacttgcacagtcttctgaaaccttgtattaatagttctcttttgtattaccattttcaggtagggttttgatc

SEQ ID NO: 221308 - DNA, 120 bp, Artificial Sequence
  ENSG00000117280_25 (sequence is synthesized)
actatgattctgaagataatagtgaaatagtgaatttcattgatatgaagagataattgattttcattcattggtttgaacacctgcaaaatcacaaataaatgagaactaagtcttgta

SEQ ID NO: 221309 - DNA, 120 bp, Artificial Sequence
  ENSG00000117280_26 (sequence is synthesized)
ggggtggggaaggtgcgaacagccgggggctcggagctcgcgccctgcgccccacccaggttgcggccgcccggggaggaagcgcgtataggttgagtgcaaagtttccttttttgcttt

SEQ ID NO: 221310 - DNA, 120 bp, Artificial Sequence
  ENSG00000117280_27 (sequence is synthesized)
aaggaagtaaaatgctctctgattctgggcatccatttccccttcttaagttggcaaaatcatctctacctccttcaaaggatgttgagggtgagtgagactttctttcttttttttttt

SEQ ID NO: 221311 - DNA, 120 bp, Artificial Sequence
  ENSG00000117281_0 (sequence is synthesized)
ctgtgcttttaggagactgaagccaaggataccagcagagccaacatttgcttcaagttcctgggcctgctgacagcgtgcaggatgctgttggaacccggcagaggctgctgtgccctg

SEQ ID NO: 221312 - DNA, 120 bp, Artificial Sequence
  ENSG00000117281_1 (sequence is synthesized)
gccatcctgctggcaattgtggacatccagtctggtggatgcattaacatcaccagctcagcttcccaggaaggaacgcgactaaacttaatctgtactgtatggcataagaaagaagag

SEQ ID NO: 221313 - DNA, 120 bp, Artificial Sequence
  ENSG00000117281_2 (sequence is synthesized)
gctgaggggtttgtagtgtttttgtgcaaggacaggtctggagactgttctcctgagaccagtttaaaacagctgagacttaaaagggatcctgggatagatggtgttggtgaaatatca

SEQ ID NO: 221314 - DNA, 120 bp, Artificial Sequence
  ENSG00000117281_3 (sequence is synthesized)
tctcagttgatgttcaccataagccaagtcacaccgttgcacagtgggacctaccagtgttgtgccagaagccagaagtcaggtatccgccttcagggccattttttctccattctattc

SEQ ID NO: 221315 - DNA, 120 bp, Artificial Sequence
  ENSG00000117281_4 (sequence is synthesized)
acagagacagggaactacacagtgacgggattgaaacaaagacaacaccttgagttcagccataatgaaggcactctcagttcaggcttcctacaagaaaaggtctgggtaatgctggtc

SEQ ID NO: 221316 - DNA, 120 bp, Artificial Sequence
  ENSG00000117281_5 (sequence is synthesized)
caataggcacagagaagaatgcaacagggcacaggggaagagatgctaaatataccaagaatctgtggaaatataagctggggcaaatcagtgtaatccttgactttgctcctcaccatc

SEQ ID NO: 221317 - DNA, 120 bp, Artificial Sequence
  ENSG00000117281_6 (sequence is synthesized)
agggcaaacttgccttcttccctcctaagctccagtaaataaacagaacagctttcaccaaagtgggtagtatagtcctcaaatatcggataaatatatgcgtttttgtaccccagaaaa

SEQ ID NO: 221318 - DNA, 120 bp, Artificial Sequence
  ENSG00000117281_7 (sequence is synthesized)
acttttcctccctcttcatcaacatagtaaaataagtcaaacaaaatgagaacaccaaattttgggggaataaatttttatttaacactgcaaaggaaagagagagaaaacaagcaaaga

SEQ ID NO: 221319 - DNA, 120 bp, Artificial Sequence
  ENSG00000117281_8 (sequence is synthesized)
taggtaggacagaaaggaagacagccagatccagtgattgacttggcatgaaaatgagaaaatgcagacagacctcaacattcaacaacatccatacagcactgctggaggaagaggaag

SEQ ID NO: 221320 - DNA, 120 bp, Artificial Sequence
  ENSG00000117281_9 (sequence is synthesized)
atttgtgcagaccaagagcaccacagactacaactgcccagcttcatctaaatacttgttaacctctttggtcatttctctttttaaataaatgcccatagcagtatttggagtcttttc

SEQ ID NO: 221321 - DNA, 120 bp, Artificial Sequence
  ENSG00000117281_10 (sequence is synthesized)
ttttctcctaaatccacaaactctcttctttctctttggacagatgacctcttgtcatagttaagcagagagtgggcaggatattcctgataggaggaactacatgaataaaggggtaag

SEQ ID NO: 221322 - DNA, 120 bp, Artificial Sequence
  ENSG00000117281_11 (sequence is synthesized)
gagagccatttcaacgtgagcccccagtctgagaacaagaaagaagaacttctgtctcgagggtctcactgtcaaccaggccagagtgcagtgaagatcatacctcactacatccgtgaa

SEQ ID NO: 221323 - DNA, 120 bp, Artificial Sequence
  ENSG00000117281_12 (sequence is synthesized)
atatttctgccaccttggttattctccaggaggagaaggttggaaaggatgtccagggggagagaaaaatgttactcaagccctggctatccacaggaaagttcaaaccagtttcactga

SEQ ID NO: 221324 - DNA, 120 bp, Artificial Sequence
  ENSG00000117281_13 (sequence is synthesized)
ttaggaatgaaggcctgtgagagaggcaagttagtacaactacctctactcactgcatgaacagagggctacaagttgaagcaacagattttcagctattagaggaagaaaaggcaagag

SEQ ID NO: 221325 - DNA, 120 bp, Artificial Sequence
  ENSG00000117281_14 (sequence is synthesized)
acagacttggtttggagatgggttttgaacaatgcggctcctcagcaaaggctgatggccagattgagtatattaaacacatgtagctgagtcctctgaaaaccatttaccaatatagat

SEQ ID NO: 221326 - DNA, 120 bp, Artificial Sequence
  ENSG00000117281_15 (sequence is synthesized)
tagcgttttccctattagataacaaaaagtgaaacttccaataatttgtcataacgtttttgcataacaagcaactgattcaggtttttgcctggccttggcattcttaactccatttta

SEQ ID NO: 221327 - DNA, 120 bp, Artificial Sequence
  ENSG00000117281_16 (sequence is synthesized)
tttaggcattcctcaaatcaataactaccactgttttgaatggcatcagaatgtaagctctatatatatgtaaggactttgtcttctttaccccaacgaaaagtcccacacatatggcag

SEQ ID NO: 221328 - DNA, 120 bp, Artificial Sequence
  ENSG00000117281_17 (sequence is synthesized)
gctcttaataaatttgttaaaaaacctgtatgatgaatcagatgctttacacatgatgattctaaccttatacaacccttgcaagcaaacatcccctggttactcatcaggaaacagaca

SEQ ID NO: 221329 - DNA, 81 bp, Artificial Sequence
  ENSG00000117281_18 (sequence is synthesized)
tttgagcctaggagtttgaggccagtctgggcaacatggcaaaaccccaactatacaaaaaaatacaaaaattaggcatgg

SEQ ID NO: 221330 - DNA, 120 bp, Artificial Sequence
  ENSG00000117281_19 (sequence is synthesized)
aaaccccaactatacaaaaaaatacaaaaattaggcatggtggcacacaactgtagtcccaagctaaggcatgaggatcacctgagcccaggctggttgaggttgcagtgagccatgatc

SEQ ID NO: 221331 - DNA, 120 bp, Artificial Sequence
  ENSG00000117281_20 (sequence is synthesized)
atgccactgtactccagcctgggtgacagggtgagacactttctcaaaggaaaaaaaaaaaaaaaaagagttaattgttgcccgtcacagcaattaatacagatccttctcactctaaaa

SEQ ID NO: 221332 - DNA, 120 bp, Artificial Sequence
  ENSG00000117281_21 (sequence is synthesized)
ccttacactcagtaatgatctactatatgcaaagcacctcttacatccttcaccaccccattcattctgagattgactcctcccctttccagaaacaggaccacctaaacattccctatt

SEQ ID NO: 221333 - DNA, 120 bp, Artificial Sequence
  ENSG00000117281_22 (sequence is synthesized)
gaaaacagagatttcaaaaagaaaacagagaccttatctgtaatccttggtaaggatcttccaaatttaagcctatgccagttttcaggaggaaacatgaatatgaaacagtctgacctt

SEQ ID NO: 221334 - DNA, 120 bp, Artificial Sequence
  ENSG00000117281_23 (sequence is synthesized)
tagacataattttttgttgactttaaattcccttggttaggccactgtaaccagtaaaataaattttattttagaataaaaattataaaggggaaattgagtctagccatacaacctact

SEQ ID NO: 221335 - DNA, 120 bp, Artificial Sequence
  ENSG00000117281_24 (sequence is synthesized)
actagttactatctttgattcccaagtcatcctagagcaaaaaaaaaaaaaaaaaaatcatctctggcctttttttccttttccactcaggtgaagagaatgagcttttgaatccaattt

SEQ ID NO: 221336 - DNA, 120 bp, Artificial Sequence
  ENSG00000117281_25 (sequence is synthesized)
tttgttttctcctatattcaattcaagtagctttaaagttaaccaaaggaaaaaaccaaagctcaatatttgattaaacgagaaaatatacactacttagaagctttcttttctttatcc

SEQ ID NO: 221337 - DNA, 120 bp, Artificial Sequence
  ENSG00000117281_26 (sequence is synthesized)
ttcttccccaactcaaggcttagtagaattattgaaagaggtagtattcagtagaatagtacacatgctttttcaggtccagaaacaccacataggtcaagttatcatgcttacatgtgg

SEQ ID NO: 221338 - DNA, 120 bp, Artificial Sequence
  ENSG00000117281_27 (sequence is synthesized)
ggaaaaggaggagggagtttcctggacctctgtgcctctctcagctcatgaactagtttcagtgaatatccttgtcttaccactgtgccaacaattcagagctatacgtggaaaacctac

SEQ ID NO: 221339 - DNA, 120 bp, Artificial Sequence
  ENSG00000117281_28 (sequence is synthesized)
cttcaactttttgagtggcatctattgcttctttgattgttccttccagcaaggagcgatcaaaggctagcccccttcccactcccaccagaatcagatttgctcaagattacaacccta

SEQ ID NO: 221340 - DNA, 120 bp, Artificial Sequence
  ENSG00000117281_29 (sequence is synthesized)
atttagtaataagatgcaatacataaaatagttcccactttccttttccaatccctttacagtcatgagggcctatcacgcacgcatctcaggacaggtgagacttcattatatcaggta

SEQ ID NO: 221341 - DNA, 120 bp, Artificial Sequence
  ENSG00000117281_30 (sequence is synthesized)
ttttgttgctattctaagttataaggcagtaatacaaactttctttccacagctttgtaagccttgtgccaaaagaaacttttaaaacagctacagcaagatgagtctgactatggctta

SEQ ID NO: 221342 - DNA, 120 bp, Artificial Sequence
  ENSG00000117298_0 (sequence is synthesized)
atcccatcccggccacccgggcagcgggaccaggcgtctggggcacagcatgcggggcgtgtggccgcccccggtgtccgccctgctgtcggcgctggggatgtcgacgtacaagcgggc

SEQ ID NO: 221343 - DNA, 120 bp, Artificial Sequence
  ENSG00000117298_1 (sequence is synthesized)
cacgctggacgaggaggacctggtggactcgctctccgagggcgacgcataccccaacggcctgcaggtgaacttccacagcccccggagtggccagaggtgctgggctgcacggaccca

SEQ ID NO: 221344 - DNA, 120 bp, Artificial Sequence
  ENSG00000117298_2 (sequence is synthesized)
ggtggagaagcggctggtggtgttggtggtacttctggcggcaggactggtggcctgcttggcagcactgggcatccagtaccagacaagatccccctctgtgtgcctgagcgaagcttg

SEQ ID NO: 221345 - DNA, 120 bp, Artificial Sequence
  ENSG00000117298_3 (sequence is synthesized)
tgtctcagtgaccagctccatcttgagctccatggaccccacagtggacccctgccatgacttcttcagctacgcctgtgggggctggatcaaggccaacccagtccctgatggccactc

SEQ ID NO: 221346 - DNA, 120 bp, Artificial Sequence
  ENSG00000117298_4 (sequence is synthesized)
acgctgggggaccttcagcaacctctgggaacacaaccaagcaatcatcaagcacctcctcgaaaactccacggccagcgtgagcgaggcagagagaaaggcgcaagtatactaccgtgc

SEQ ID NO: 221347 - DNA, 120 bp, Artificial Sequence
  ENSG00000117298_5 (sequence is synthesized)
gtgcatgaacgagaccaggatcgaggagctcagggccaaacctctaatggagttgattgagaggctcgggggctggaacatcacaggtccctgggccaaggacaacttccaggacaccct

SEQ ID NO: 221348 - DNA, 120 bp, Artificial Sequence
  ENSG00000117298_6 (sequence is synthesized)
gcaggtggtcaccgcccactaccgcacctcacccttcttctctgtctatgtcagtgccgattccaagaactccaacagcaacgtgatccaggtggaccagtctggcctgggcttgccctc

SEQ ID NO: 221349 - DNA, 120 bp, Artificial Sequence
  ENSG00000117298_7 (sequence is synthesized)
gagagactattacctgaacaaaactgaaaacgagaaggtgctgaccggatatctgaactacatggtccagctggggaagctgctgggcggcggggacgaggaggccatccggccccagat

SEQ ID NO: 221350 - DNA, 120 bp, Artificial Sequence
  ENSG00000117298_8 (sequence is synthesized)
gcagcagatcttggactttgagacggcactggccaacatcaccatcccacaggagaagcgccgtgatgaggagctcatctaccacaaagtgacggcagccgagctgcagaccttggcacc

SEQ ID NO: 221351 - DNA, 120 bp, Artificial Sequence
  ENSG00000117298_9 (sequence is synthesized)
cgccatcaactggttgccttttctcaacaccatcttctaccccgtggagatcaatgaatccgagcctattgtggtctatgacaaggaataccttgagcagatctccactctcatcaacac

SEQ ID NO: 221352 - DNA, 120 bp, Artificial Sequence
  ENSG00000117298_10 (sequence is synthesized)
caccgacagatgcctgctcaacaactacatgatctggaacctggtgcggaaaacaagctccttccttgaccagcgctttcaggacgccgatgagaagttcatggaagtcatgtacgggac

SEQ ID NO: 221353 - DNA, 120 bp, Artificial Sequence
  ENSG00000117298_11 (sequence is synthesized)
caagaagacctgtcttcctcgctggaagttttgcgtgagtgacacagaaaacaacctgggctttgcgttgggccccatgtttgtcaaagcaaccttcgccgaggacagcaagagcatagc

SEQ ID NO: 221354 - DNA, 120 bp, Artificial Sequence
  ENSG00000117298_12 (sequence is synthesized)
caccgagatcatcctggagattaagaaggcatttgaggaaagcctgagcaccctgaagtggatggatgaggaaacccgaaaatcagccaaggaaaaggccgatgccatctacaacatgat

SEQ ID NO: 221355 - DNA, 120 bp, Artificial Sequence
  ENSG00000117298_13 (sequence is synthesized)
aggataccccaacttcatcatggatcccaaggagctggacaaagtgtttaatgactacactgcagttccagacctctactttgaaaatgccatgcggtttttcaacttctcatggagggt

SEQ ID NO: 221356 - DNA, 120 bp, Artificial Sequence
  ENSG00000117298_14 (sequence is synthesized)
cactgccgatcagctcaggaaagcccccaacagagatcagtggagcatgaccccgcccatggtgaacgcctactactcgcccaccaagaatgagattgtgtttccggccgggatcctgca

SEQ ID NO: 221357 - DNA, 120 bp, Artificial Sequence
  ENSG00000117298_15 (sequence is synthesized)
ggcaccattctacacacgctcctcacccaaggccttaaactttggtggcataggtgtcgtcgtgggccatgagctgactcatgcttttgatgatcaaggacgggagtatgacaaggacgg

SEQ ID NO: 221358 - DNA, 120 bp, Artificial Sequence
  ENSG00000117298_16 (sequence is synthesized)
gaacctccggccatggtggaagaactcatccgtggaggccttcaagcgtcagaccgagtgcatggtagagcagtacagcaactacagcgtgaacggggagccggtgaacgggcggcacac

SEQ ID NO: 221359 - DNA, 120 bp, Artificial Sequence
  ENSG00000117298_17 (sequence is synthesized)
cctgggggagaacatcgccgacaacgggggtctcaaggcggcctatcgggcttaccagaactgggtgaagaagaacggggctgagcactcgctccccaccctgggcctcaccaataacca

SEQ ID NO: 221360 - DNA, 120 bp, Artificial Sequence
  ENSG00000117298_18 (sequence is synthesized)
gctcttcttcctgggctttgcacaggtctggtgctccgtccgcacacctgagagctcccacgaaggcctcatcaccgatccccacagcccctctcgcttccgggtcatcggctccctctc

SEQ ID NO: 221361 - DNA, 120 bp, Artificial Sequence
  ENSG00000117298_19 (sequence is synthesized)
caattccaaggagttctcagaacacttccgctgcccacctggctcacccatgaacccgcctcacaagtgcgaagtctggtaaggacgaagcggagagagccaagacggaggaggggaagg

SEQ ID NO: 221362 - DNA, 120 bp, Artificial Sequence
  ENSG00000117298_20 (sequence is synthesized)
ggctgaggacgagacccccatccagcctccagggcattgctcagcccgcttggccacccggggccctgcttcctcacactggcgggttttcagccggaaccgagcccatggtgttggctc

SEQ ID NO: 221363 - DNA, 120 bp, Artificial Sequence
  ENSG00000117298_21 (sequence is synthesized)
gtgaagagccggacatcccaggcacacgtgtgcgccaccttcagcaggcattcgggtgctgggctggtggctcatcaggcctgggccccacactgacaagcgccagatacgccacaaata

SEQ ID NO: 221364 - DNA, 120 bp, Artificial Sequence
  ENSG00000117298_22 (sequence is synthesized)
ccactgtgtcaaatgctttcaagatatatttttggggaaactattttttaaacactgtggaatacactggaaatcttcagggaaaaacacatttaaacacttttttttttaaggaaagaa

SEQ ID NO: 221365 - DNA, 120 bp, Artificial Sequence
  ENSG00000117298_23 (sequence is synthesized)
ttggtatatttattatgttctgtttttctaaataacctgtggacaagggaagccccactgatttactccctctcttccccactccctgtgaggctgggctgaggcacggatccctgggcc

SEQ ID NO: 221366 - DNA, 120 bp, Artificial Sequence
  ENSG00000117298_24 (sequence is synthesized)
acagagcaagtctccaaatcagacagctgcctcagcccctgggatgtgtgatttcagctcctgtcacctcatgcaagggcgtggagaccagtagaggtgtggaggccaggcagagagagg

SEQ ID NO: 221367 - DNA, 120 bp, Artificial Sequence
  ENSG00000117298_25 (sequence is synthesized)
agcctgctctgcggggggcccagctcatgggcactgccccttcagctagcctgcctccgtcccctgagtccaacagtgggagccctagctgggaagttctgatccccaaagccacagcag

SEQ ID NO: 221368 - DNA, 120 bp, Artificial Sequence
  ENSG00000117298_26 (sequence is synthesized)
gggactgatggctatagcagaatgaggtcgggtcaggaccctcaaacaccatctgggaacaccaagcaccctgaatcgagactgcaggagccctgcggggtgagactgtgtcagagatac

SEQ ID NO: 221369 - DNA, 120 bp, Artificial Sequence
  ENSG00000117298_27 (sequence is synthesized)
actgctggccacaagtgtcccctctcagtcccaccttttcgggctgtcccatgtctatctcaggggcccgttacctctctgcagcagtcccccatcccagccacaccagggtctgtccgg

SEQ ID NO: 221370 - DNA, 88 bp, Artificial Sequence
  ENSG00000117298_28 (sequence is synthesized)
gcagcagtcccccatcccagccacaccagggtctgtccggccaaccctcttccccagggaaaggagaaaagagaaaacaggctgggcc

SEQ ID NO: 221371 - DNA, 77 bp, Artificial Sequence
  ENSG00000117298_29 (sequence is synthesized)
ccaaaaaaaagaaaagagaaacagctgtcacctcccgcaggacccaaatcctctctctgagcaccgtcatccaccac

SEQ ID NO: 221372 - DNA, 120 bp, Artificial Sequence
  ENSG00000117298_30 (sequence is synthesized)
caggacccaaatcctctctctgagcaccgtcatccaccacatggctgggcctggctcccaggaccagtccagtcctctagtgccttatctgaggctgcagccgccagtctccaccccaag

SEQ ID NO: 221373 - DNA, 120 bp, Artificial Sequence
  ENSG00000117298_31 (sequence is synthesized)
gagacagcccctgctcctagatgcccttggcctccgcagtgcagcccccaggtgtcctgactgaagcacaggccatagccccatttccccggtgcctgcagggctaacctccacgggagc

SEQ ID NO: 221374 - DNA, 120 bp, Artificial Sequence
  ENSG00000117298_32 (sequence is synthesized)
ccaggagctctggccggcaggtccatggcacagggcatcggaagactgcaaaactgctggacttaccctgggctgcagtccattgtcggcccctgggttgaatcaagatagtacttgcag

SEQ ID NO: 221375 - DNA, 120 bp, Artificial Sequence
  ENSG00000117298_33 (sequence is synthesized)
ctagatggatgcttttagccaggggacattgtgaggggaagattcctccacccagtctggcctgtggtgtctgtctcctccctgagaccacagcttctccagtagcagactcatgggcgc

SEQ ID NO: 221376 - DNA, 120 bp, Artificial Sequence
  ENSG00000117298_34 (sequence is synthesized)
caccaagtggaagcacctggagcggcctctgccatccagtggggaagccaggccccgagacggaggtgggggcagcacgtgccctccacagccaccgctttcccgcctcagcagcccagg

SEQ ID NO: 221377 - DNA, 120 bp, Artificial Sequence
  ENSG00000117298_35 (sequence is synthesized)
cctcctggcccagccctgcctggacagtgctctcccctcacccgggaagctggaatcctcctgcccgagaggaagcagacggcacagggacacccctgccaccttgggatctgcctccaa

SEQ ID NO: 221378 - DNA, 120 bp, Artificial Sequence
  ENSG00000117298_36 (sequence is synthesized)
gctggtgcagggtatcgagagtggattccagatggaggtcctggtcccagcacgcagcagtcctggtagctctgcagaggagacaggaacccgagaagtagctgaagcagaagccagccg

SEQ ID NO: 221379 - DNA, 120 bp, Artificial Sequence
  ENSG00000117298_37 (sequence is synthesized)
cagtccccttgccacatagaggcgggcttctcccagccatggtgtcccctctgcctcccctcccccgaccctcctgccttccgcgtggagggtggtggtcctgtagtgtcagcaccagca

SEQ ID NO: 221380 - DNA, 120 bp, Artificial Sequence
  ENSG00000117298_38 (sequence is synthesized)
ccatgggcttggaccccctccctggacacaggcaggtgtcctagggctgggggtgcagcccgagggaatggagaccacactcatggctcaggtctgccggggccggcagggggttgggga

SEQ ID NO: 221381 - DNA, 120 bp, Artificial Sequence
  ENSG00000117298_39 (sequence is synthesized)
agaagagggctcaggcccagcaggggtggaagcccctgccactgccactacccgctccagagctttaaggaaaatgaagtgagacccctccccttaggcctggggagccatagggctggc

SEQ ID NO: 221382 - DNA, 120 bp, Artificial Sequence
  ENSG00000117298_40 (sequence is synthesized)
ttctctgtgggtgcgtggacgtggggttgggagctgggaatctattttttgtattatgttttgagctactgtagttttggcgtggcactattgtaatggaaataaaatacttgtacggag

SEQ ID NO: 221383 - DNA, 120 bp, Artificial Sequence
  ENSG00000117298_41 (sequence is synthesized)
cgcctgggccaggcagccgagccgtccgagcagctgggctgggagcagggaacccggagctgggaatcgggagccgggcgcggggagctgcgcgaagccggggcggagcacgcgagctat

SEQ ID NO: 221384 - DNA, 120 bp, Artificial Sequence
  ENSG00000117298_42 (sequence is synthesized)
ggggcgcggcggcggcggcgccagggtcggggccgcttccccattcgggcgcgagagccatggaggcgctgagggagtccgtgctgcatttggccttgcagatgtcgacgtacaagcggg

SEQ ID NO: 221385 - DNA, 120 bp, Artificial Sequence
  ENSG00000117298_43 (sequence is synthesized)
tggtcccagccggatgtggggggctcggggtccccggttcgctttggggacggttgctgcggtctgttttgggttgttctgaagtccctggactcagcttggcttggagacccagggcag

SEQ ID NO: 221386 - DNA, 120 bp, Artificial Sequence
  ENSG00000117298_44 (sequence is synthesized)
gactctctgatgtttgggagcagatccgagcagctgagcagggtggctgttcctttcctggattagggctgaatctgtgggaaccagaccacccctgagacaggaggcagccctgatgcc

SEQ ID NO: 221387 - DNA, 120 bp, Artificial Sequence
  ENSG00000117298_45 (sequence is synthesized)
tctccagggcctgggcctgcagcggaaccccttcctccaagggaagcggggcccggggctcacgtcttccccgcccctcctgcctccttccctgcaggtgaacttccacagcccccggag

SEQ ID NO: 221388 - DNA, 120 bp, Artificial Sequence
  ENSG00000117298_46 (sequence is synthesized)
aggacatcacacaggagcacaggagcatgaggaggtgcaggggcatctgtgggtagccctggagtcaggaccagctgctttctggtctgctttgcagtttgtgcttggagaagatcagag

SEQ ID NO: 221389 - DNA, 120 bp, Artificial Sequence
  ENSG00000117298_47 (sequence is synthesized)
agattcaacccagatttctcctccacggctgcacagtgccaggaagggaactgagaagaccaaagtggaggttctttaccttccccaacacactcggggccaggcgtggcacccacaact

SEQ ID NO: 221390 - DNA, 120 bp, Artificial Sequence
  ENSG00000117298_48 (sequence is synthesized)
gcaaatgagacaattagggagaataagtgctggctgccctgtcagcccagagcctcagtctgcccagggcacccagactctgtgaggttcccacctgaagaagcagttccatcttccaca

SEQ ID NO: 221391 - DNA, 120 bp, Artificial Sequence
  ENSG00000117298_49 (sequence is synthesized)
gaagaggctggagcagaaggtgtaaatgtgagagccatcagtgcgtagaaggtattttaagccatagggctaaacgagtgcacatcaagaagagggctcccctaggctgagcccaggccc

SEQ ID NO: 221392 - DNA, 120 bp, Artificial Sequence
  ENSG00000117298_50 (sequence is synthesized)
agatccccagaaactagtccttgccccaacacgggggagctccctgagacctccataccagtcccctccttcaccacctgccatgggaacccctgagctttggttttctctcctcccagg

SEQ ID NO: 221393 - DNA, 120 bp, Artificial Sequence
  ENSG00000117298_51 (sequence is synthesized)
gctcaggaaagcccccaacagagatcagtgagttcccccaggccctgccggcaaggtgccagctccccacctgtgggcaagccttgggacgaactggccttcattgcaccctcactgtgc

SEQ ID NO: 221394 - DNA, 120 bp, Artificial Sequence
  ENSG00000117298_52 (sequence is synthesized)
acccgatcagctatcacgagagccgtctgaagagtggatgcccttgttatcccacttttcagatgaagaaaccaagggcaaaagaagtatggcccagctaggagctgggatgggcttgag

SEQ ID NO: 221395 - DNA, 120 bp, Artificial Sequence
  ENSG00000117298_53 (sequence is synthesized)
cctgcccagcctgttggcagggtgagcctggcctctggagcggagccgatctggcaccttgtctccgctccactgctttgggatttggagccttcatttcattttccgcagaataggatg

SEQ ID NO: 221396 - DNA, 120 bp, Artificial Sequence
  ENSG00000117298_54 (sequence is synthesized)
ggaggagctggttctggggtcctcatggcagtcaaatgtgaggacctctggggagcgccagaccccaaggaggccccagcaagagcagctttcccattgttcctcactaccacgaatggt

SEQ ID NO: 221397 - DNA, 120 bp, Artificial Sequence
  ENSG00000117298_55 (sequence is synthesized)
gtttagctagactgttaggctggagggatttttcctccctttcaggacctgaatggagctatttctccttgcatctctgccaacatctcccaggatccacctctgatccactggtgggct

SEQ ID NO: 221398 - DNA, 120 bp, Artificial Sequence
  ENSG00000117298_56 (sequence is synthesized)
cgggcatcaacagctttgggttccaatcccagctgtccccattcagctgggtggtgagaagccagggtctcacctctctggacctcagtttcctcacttgtaaaaagaaaaataacaagg

SEQ ID NO: 221399 - DNA, 120 bp, Artificial Sequence
  ENSG00000117305_0 (sequence is synthesized)
gattctgggccaagatggcagcaatgaggaaggcgcttccgcggcgactggtgggcttggcgtccctccgggctgtcagcacctcatctatgggcactttaccaaagcgggtgaaaattg

SEQ ID NO: 221400 - DNA, 120 bp, Artificial Sequence
  ENSG00000117305_1 (sequence is synthesized)
tggaagttggtccccgagatggactacaaaatgaaaagaatatcgtatctactccagtgaaaatcaagctgatagacatgctttctgaagcaggactctctgttatagaaaccaccagct

SEQ ID NO: 221401 - DNA, 120 bp, Artificial Sequence
  ENSG00000117305_2 (sequence is synthesized)
ttgtgtctcctaagtgggttccccagatgggtgaccacactgaagtcttgaagggcattcagaagtttcctggcatcaactacccagtcctgaccccaaatttgaaaggcttcgaggcag

SEQ ID NO: 221402 - DNA, 120 bp, Artificial Sequence
  ENSG00000117305_3 (sequence is synthesized)
cggttgctgctggagccaaggaagtagtcatctttggagctgcctcagagctcttcaccaagaagaacatcaattgttccatagaggagagttttcagaggtttgacgcaatcctgaagg

SEQ ID NO: 221403 - DNA, 120 bp, Artificial Sequence
  ENSG00000117305_4 (sequence is synthesized)
cagcgcagtcagccaatatttctgtgcgggggtacgtctcctgtgctcttggctgcccttatgaagggaagatctccccagctaaagtagctgaggtcaccaagaagttctactcaatgg

SEQ ID NO: 221404 - DNA, 120 bp, Artificial Sequence
  ENSG00000117305_5 (sequence is synthesized)
gctgctacgagatctccctgggggacaccattggtgtgggcaccccagggatcatgaaagacatgctatctgctgtcatgcaggaagtgcctctggctgccctggctgtccactgccatg

SEQ ID NO: 221405 - DNA, 120 bp, Artificial Sequence
  ENSG00000117305_6 (sequence is synthesized)
tcaagccctggccaacaccttgatggccctgcagatgggagtgagtgtcgtggactcttctgtggcaggacttggaggctgtccctacgcacagggggcatcaggaaacttggccacaga

SEQ ID NO: 221406 - DNA, 120 bp, Artificial Sequence
  ENSG00000117305_7 (sequence is synthesized)
agacctggtctacatgctagagggcttgggcattcacacgggtgtgaatctccagaagcttctggaagctggaaactttatctgtcaagccctgaacagaaaaactagctccaaagtggc

SEQ ID NO: 221407 - DNA, 120 bp, Artificial Sequence
  ENSG00000117305_8 (sequence is synthesized)
tcaggctacctgtaaactctgagccccttgcccacctgaagccctggggatgatgtggaaataggggcacacacagatgattcatggatggggacatggaaatgagaataggttaaatgg

SEQ ID NO: 221408 - DNA, 120 bp, Artificial Sequence
  ENSG00000117305_9 (sequence is synthesized)
tgcaggtacctcatagccagctctacacagaggtctctcctggcagaaagcaggcgaagggcaggaggagctgcttggcagaaggacctcctgcccagacctgaggagtgagaggctttg

SEQ ID NO: 221409 - DNA, 120 bp, Artificial Sequence
  ENSG00000117305_10 (sequence is synthesized)
agggctgaagtctccctttgttacggaccctggcccaggagttgaatgcctgaggacgtgtgggaaccccgttccctacttagcatgatccttgagtctcctctctggatggaatccgcg

SEQ ID NO: 221410 - DNA, 120 bp, Artificial Sequence
  ENSG00000117305_11 (sequence is synthesized)
agctggccacctggccaccctctacacggctccaccctgccatggccgtggggcccttgctctctgacttctcaggacacaggtcatggaggttcttcccaagctggcagaggccatttg

SEQ ID NO: 221411 - DNA, 120 bp, Artificial Sequence
  ENSG00000117305_12 (sequence is synthesized)
tggaaagtggagagctacgtggtggccgtctgccaactccagcatctctggaaaatctccacgctgaatgtgatttttgaaaacagcttatgtaattaaaggttgaatggcacatcataa

SEQ ID NO: 221412 - DNA, 120 bp, Artificial Sequence
  ENSG00000117305_13 (sequence is synthesized)
cacacctagacatcttttcccaaataagtgtggtcagaagaaatcctaggaagtactttctctcaaacctgaattttgggtcagtttaccagctagccatgatagcatgcgcctgtagtc

SEQ ID NO: 221413 - DNA, 79 bp, Artificial Sequence
  ENSG00000117305_14 (sequence is synthesized)
tcagtttaccagctagccatgatagcatgcgcctgtagtcctagcaacttgggagactgaggcagaggatggcttgaga

SEQ ID NO: 221414 - DNA, 120 bp, Artificial Sequence
  ENSG00000117305_15 (sequence is synthesized)
gcgcctcagtcccctgtcctgggatgtccatctgaatagcttgtctgtcagccagaccctggggcaaacctggccctgccactcactgctctgtgatcttgacaagttgacaagcctata

SEQ ID NO: 221415 - DNA, 120 bp, Artificial Sequence
  ENSG00000117305_16 (sequence is synthesized)
aaatagggctaaatgatagtacctgaagttgtgagcatttcagaagataggatgcatgtacattgcttagcaagagccagataaaaggtaactgcttaataaatgttagctcttttgatt

SEQ ID NO: 221416 - DNA, 120 bp, Artificial Sequence
  ENSG00000117305_17 (sequence is synthesized)
agtgccaggctgctcaaacctctaggggggcatacagacaggcagaggctgtgggcctccaaccccacggcagcatgtaggggtggatgcttacagctcctggagccccagtgggcgtgt

SEQ ID NO: 221417 - DNA, 120 bp, Artificial Sequence
  ENSG00000117305_18 (sequence is synthesized)
gttacagggtgctcttttagttttgctgtctataggcgacttgtgttagttaaccagctcgagtgggctctcaaccttgtcataggacagagagggctttctatatgccgggttcttgcc

SEQ ID NO: 221418 - DNA, 120 bp, Artificial Sequence
  ENSG00000117305_19 (sequence is synthesized)
ttggtgtaccagaagaattggatcacacctgggcttagagaatgggtgcaaggttttattgagtagaggtagctcttagcagatgttggaagccagaagagaatggagtaggaaggtttt

SEQ ID NO: 221419 - DNA, 120 bp, Artificial Sequence
  ENSG00000117305_20 (sequence is synthesized)
cccctggagtggggccactcagcagcccgggacccccttccacagtcccagccaaactctgcgtcgttctgctggtcagcggcctgctggcgtgccagtgcctgctgatgtgctcctctg

SEQ ID NO: 221420 - DNA, 120 bp, Artificial Sequence
  ENSG00000117305_21 (sequence is synthesized)
gacgtccagccgcctgtgtgttcctccactgatgtgctcctctccatgtccggctacctgtgtgtctgcctgctaaggtatgaaatctaaggatgccccctctctggagctgcctgcctg

SEQ ID NO: 221421 - DNA, 72 bp, Artificial Sequence
  ENSG00000117305_22 (sequence is synthesized)
gaagctgagaacaaaagtggatgggggtatttggggttgttaaggtgctgaggagtaaagagggaaagggtt

SEQ ID NO: 221422 - DNA, 120 bp, Artificial Sequence
  ENSG00000117305_23 (sequence is synthesized)
agtgagctatgatcctgccagtgtactccagcctgggtgaaacagcaagaccctatctcttcaaaacaaaacaaaagaggggaagggtgttggggattatggatatttgatctaatattt

SEQ ID NO: 221423 - DNA, 120 bp, Artificial Sequence
  ENSG00000117305_24 (sequence is synthesized)
taatgtttgtgagagtagggttgagtgaggccacacgcatgggcataagaaggctggagtgtcagggtgactttgacagttcagtcctaggagacaccaggaacatggaaggggccctgg

SEQ ID NO: 221424 - DNA, 120 bp, Artificial Sequence
  ENSG00000117305_25 (sequence is synthesized)
gaagggtcaggttcatgacctgaaatgagtcagttctctcttggctttgttttgttctctgtaaaatgaggacagtagcgttagacagctcaccagggatccgccagagtccaccagggc

SEQ ID NO: 221425 - DNA, 120 bp, Artificial Sequence
  ENSG00000117305_26 (sequence is synthesized)
cctcagtggcgggacggaagcagaatagcatctgtgcttaaagatcagatggaactgggtttaaagcctactcctgccactcccaggctatgagacctcagacaaattatttcatctctc

SEQ ID NO: 221426 - DNA, 120 bp, Artificial Sequence
  ENSG00000117305_27 (sequence is synthesized)
catctctctgaacctaagaaatgggaataataatgccatccatctcatggagccattgtgaggattaagtaagaaaacgtacgtagagggccaggcgcacgcctgtaatcccagcacttt

SEQ ID NO: 221427 - DNA, 120 bp, Artificial Sequence
  ENSG00000117305_28 (sequence is synthesized)
cctgcagcttactgtgataccctgccctggttcctgggctttccttcagctcatgcgtttcccagccaggcagacaggaagagtgacttcctctcctatgccttgccaggcaggtaaagg

SEQ ID NO: 221428 - DNA, 120 bp, Artificial Sequence
  ENSG00000117305_29 (sequence is synthesized)
ggaattctgcacagctgagggaacaggttgagctgtgtgacgtctggcagtagcttcctctgacctccctcttccatcagttacttcggaaatatggatcgatgtgccaggttaagtgct

SEQ ID NO: 221429 - DNA, 120 bp, Artificial Sequence
  ENSG00000117305_30 (sequence is synthesized)
gacttagacaatggtaacaagacccaatccctgccctctgggagctcatgttatggtgggtggggaagacagatggaagattacaggcgtgtaaatagcacattgtaagaccatttattc

SEQ ID NO: 221430 - DNA, 120 bp, Artificial Sequence
  ENSG00000117305_31 (sequence is synthesized)
acctattaaaacctaacctaacggtgcctagtgtgctaggcactgttctcagcattaaggattcagctgtgaccaaaacagagtctctgccctcatgaggctgacactctagtactatga

SEQ ID NO: 221431 - DNA, 120 bp, Artificial Sequence
  ENSG00000117305_32 (sequence is synthesized)
tggccaccttgtctgcccctgagcgcataggttcctctccccaccctttctggcaggttcctgacttcattcattcacccagctccttcattaagctcctgctgtgagcacagccctgca

SEQ ID NO: 221432 - DNA, 120 bp, Artificial Sequence
  ENSG00000117305_33 (sequence is synthesized)
cttgctccctagaggcccccctcctagccgaacatgtagtccttgaagcccctggcctctatccagcctgaaaacctccaattcagtttccagtctggtcgttgaggtgattctctgagg

SEQ ID NO: 221433 - DNA, 120 bp, Artificial Sequence
  ENSG00000117305_34 (sequence is synthesized)
aggggctccttacccaggagttcccatagttccttgtagtgattgaaaggccacaaccctgatgtcctctgaacagtcaccaggtcaacactgagaagaacatggcatgggaattgagtt

SEQ ID NO: 221434 - DNA, 120 bp, Artificial Sequence
  ENSG00000117305_35 (sequence is synthesized)
ctaaataacttgccacacaggttacaaatggtgaaatcaggtatcaaaccccattttttctctctccaaagcccacttcttcccaggatactttgtggcatccagataggtggaatggta

SEQ ID NO: 221435 - DNA, 120 bp, Artificial Sequence
  ENSG00000117305_36 (sequence is synthesized)
acagtagcaactgtttcttgagagcagctgccctgctccaggtcttagcctcagttgccacaatccttgccgtatgaccaaagggtcatcaccatttttcagaagcagaaattgaagctc

SEQ ID NO: 221436 - DNA, 120 bp, Artificial Sequence
  ENSG00000117305_37 (sequence is synthesized)
agaaaagtgaagttgcttgccaaggcccacagctagtgaacagcagaactaggactttaacccagcatctcgtgacttcaaaggcctgctccttcccctgcaccctgctgccccctaaag

SEQ ID NO: 221437 - DNA, 120 bp, Artificial Sequence
  ENSG00000117305_38 (sequence is synthesized)
gccagccactgccgccccacactctgcagggccactggggaagcgacgtcaccatttcatttatttagcagatcactggtgtcttctggtcccctttccctgccacatccctctgcacct

SEQ ID NO: 221438 - DNA, 120 bp, Artificial Sequence
  ENSG00000117305_39 (sequence is synthesized)
tgtccagcagccccgtgtgggcagcagctccttgggtgaggccatctttttttaagttcaccagtcgtatgggattaggggcccaccctattccagtatggcttattccaattggaccca

SEQ ID NO: 221439 - DNA, 120 bp, Artificial Sequence
  ENSG00000117305_40 (sequence is synthesized)
tattggacctattccaatatggacccattttgcagtggttttagagatgtgcaaatgggcttccaaaaatttaaatagtgatgtacctctattaaaaaatataactattggccgggcacg

SEQ ID NO: 221440 - DNA, 120 bp, Artificial Sequence
  ENSG00000117308_0 (sequence is synthesized)
gcgacggctgagcaaggactctccagtcctcagtcaccttggacaaagaagtgtggatcctcagattccatcttttccaactccaaggtgccatggcagagaaggtgctggtaacaggtg

SEQ ID NO: 221441 - DNA, 120 bp, Artificial Sequence
  ENSG00000117308_1 (sequence is synthesized)
gggctggctacattggcagccacacggtgctggagctgctggaggctggctacttgcctgtggtcatcgataacttccataatgccttccgtggagggggctccctgcctgagagcctgc

SEQ ID NO: 221442 - DNA, 120 bp, Artificial Sequence
  ENSG00000117308_2 (sequence is synthesized)
ggcgggtccaggagctgacaggccgctctgtggagtttgaggagatggacattttggaccagggagccctacagcgtctcttcaaaaagtacagctttatggcggtcatccactttgcgg

SEQ ID NO: 221443 - DNA, 120 bp, Artificial Sequence
  ENSG00000117308_3 (sequence is synthesized)
ggctcaaggccgtgggcgagtcggtgcagaagcctctggattattacagagttaacctgaccgggaccatccagcttctggagatcatgaaggcccacggggtgaagaacctggtgttca

SEQ ID NO: 221444 - DNA, 120 bp, Artificial Sequence
  ENSG00000117308_4 (sequence is synthesized)
gcagctcagccactgtgtacgggaacccccagtacctgccccttgatgaggcccaccccacgggtggttgtaccaacccttacggcaagtccaagttcttcatcgaggaaatgatccggg

SEQ ID NO: 221445 - DNA, 120 bp, Artificial Sequence
  ENSG00000117308_5 (sequence is synthesized)
acctgtgccaggcagacaagacttggaacgcagtgctgctgcgctatttcaaccccacaggtgcccatgcctctggctgcattggtgaggatccccagggcatacccaacaacctcatgc

SEQ ID NO: 221446 - DNA, 120 bp, Artificial Sequence
  ENSG00000117308_6 (sequence is synthesized)
ttggcaatgactatgacacagaggatggcacaggtgtccgggattacatccatgtcgtggatctggccaagggccacattgcagccttaaggaagctgaaagaacagtgtggctgccgga

SEQ ID NO: 221447 - DNA, 120 bp, Artificial Sequence
  ENSG00000117308_7 (sequence is synthesized)
tctacaacctgggcacgggcacaggctattcagtgctgcagatggtccaggctatggagaaggcctctgggaagaagatcccgtacaaggtggtggcacggcgggaaggtgatgtggcag

SEQ ID NO: 221448 - DNA, 120 bp, Artificial Sequence
  ENSG00000117308_8 (sequence is synthesized)
cctgttacgccaaccccagcctggcccaagaggagctggggtggacagcagccttagggctggacaggatgtgtgaggatctctggcgctggcagaagcagaatccttcaggctttggca

SEQ ID NO: 221449 - DNA, 120 bp, Artificial Sequence
  ENSG00000117308_9 (sequence is synthesized)
cgcaagcctgaggaccctcccctaccaaggaccaggaaaagcagcagctgcctgctctccagcctctggcaggaactcagggccctggagctgctggggccaagccaaggcctcccctac

SEQ ID NO: 221450 - DNA, 120 bp, Artificial Sequence
  ENSG00000117308_10 (sequence is synthesized)
ctcaaaccccagctgggcccgcttagcccaccaggcatgaggccaagggctccactgaccaggaggccgaggtctctaactcttatcttccacagggtccaagagttcatcaggaccccc

SEQ ID NO: 221451 - DNA, 120 bp, Artificial Sequence
  ENSG00000117308_11 (sequence is synthesized)
aagagtgagtgagggggcaaggctctggcacaaaacctcctcctcccaggcactcatttatattgctctgaaagagctttccaaagtatttaaaaataaaaacaagttttcttacactgg

SEQ ID NO: 221452 - DNA, 120 bp, Artificial Sequence
  ENSG00000117308_12 (sequence is synthesized)
aattccagcactttggaaggccgaggtgaggagatcacttgagcccaggtgttcaagaccagcctgctcaacacagtgaaaccccatctctacagaaaaatacaaaaattagctgggcat

SEQ ID NO: 221453 - DNA, 89 bp, Artificial Sequence
  ENSG00000117308_13 (sequence is synthesized)
acagtgaaaccccatctctacagccatacctgtggtcccagctactcgggaggctggcatgggaggatggcttgagcctgggaggtgga

SEQ ID NO: 221454 - DNA, 120 bp, Artificial Sequence
  ENSG00000117308_14 (sequence is synthesized)
attagtcactgcgcccaggagccagtttacacctagcgaaggcggaggcattggacaagcctgggtctgagcagacagaaccccttcctgcgaccctggagtcccaatcgtgctgccatt

SEQ ID NO: 221455 - DNA, 120 bp, Artificial Sequence
  ENSG00000117308_15 (sequence is synthesized)
ggtgcctctgcagcaagcgtggggcgcgggaacccgagcaggttcgggagacggaatgaagggccgggtgggctcgcgaggggccggggagtccgcggggagcgagggagtttccgaggg

SEQ ID NO: 221456 - DNA, 120 bp, Artificial Sequence
  ENSG00000117308_16 (sequence is synthesized)
gcgggtcgtgttcctggcagcgtccctccagggcaggcccgccccctttgtcccagttccccgctgcccgggctggggcggccggggttcattcattgccggcctgaggactcctagctc

SEQ ID NO: 221457 - DNA, 120 bp, Artificial Sequence
  ENSG00000117308_17 (sequence is synthesized)
ggccccgctccgcgctacagcccaaagcccagcctgagacccagccgccctcgtatgcccacggcctagctccccttccctccaacagacagactgggaaaaccgagtgggcgacggctg

SEQ ID NO: 221458 - DNA, 120 bp, Artificial Sequence
  ENSG00000117308_18 (sequence is synthesized)
agcaaggtcactccgctgtcgggggcgcagccggcctcagaccagctttcgtgcttcccagggcctctctgcgaccactttcggggtccgcgccaggcgcggggcgggggcgggggcggc

SEQ ID NO: 221459 - DNA, 120 bp, Artificial Sequence
  ENSG00000117308_19 (sequence is synthesized)
ttcggcgcggcgggcagagtccagcgggcagcggtgggggaagggcgagccgcctggggagagggccgggctgcgagcctggcgatccagattccagcccgctgtcgccagctgtgggac

SEQ ID NO: 221460 - DNA, 120 bp, Artificial Sequence
  ENSG00000117308_20 (sequence is synthesized)
cgaagggcaactgtttcacctctctggccctagtatctgtatctgtaaagtgccagtgataacacctgtctcaccgagatgctgggggaattcaggaaaatcatgcaaaagtgcctggta

SEQ ID NO: 221461 - DNA, 120 bp, Artificial Sequence
  ENSG00000117308_21 (sequence is synthesized)
cggagcctggcacgcagagggctcttggtcaagtgggttggagctgcgtgagcccagaaggggatagaggcagcgtggaggaaggcggcagcgggcccggtcgctgggaatgaaaggcct

SEQ ID NO: 221462 - DNA, 120 bp, Artificial Sequence
  ENSG00000117308_22 (sequence is synthesized)
cagtgtctggggcttcctccccgtactacccgcagagtttgttcagggtggaggtgcgcacctggccaagtccacgtctacacggcccacccagagtagcctaagttgggcgggattcct

SEQ ID NO: 221463 - DNA, 120 bp, Artificial Sequence
  ENSG00000117308_23 (sequence is synthesized)
gcatgggcagaggctgagcgggggttggggtggggccccctccaggaccaaccacggtgtggttgcccctgagctggcctcagcctgcctggcaaaggacctcacccttgaggccatgtg

SEQ ID NO: 221464 - DNA, 120 bp, Artificial Sequence
  ENSG00000117308_24 (sequence is synthesized)
cacccacctcaccccacccagctctcagcaacagagcagctttggcccttcccactcacctctctggagggtacctggcactgcccagtctcctcagcctgcctagcacccggtgcctgc

SEQ ID NO: 221465 - DNA, 120 bp, Artificial Sequence
  ENSG00000117308_25 (sequence is synthesized)
gggccagccgctgctctgcacttctgcttcttaaagacctggccagcagctgggccagggccggctcagctaagctccaactacctcctgtcttgcagatcccgtacaaggtggtggcac

SEQ ID NO: 221466 - DNA, 120 bp, Artificial Sequence
  ENSG00000117308_26 (sequence is synthesized)
aggggccagggaggggctaaatcagatctgggcatgcccacccagggcgggctgtggggtgggggaggctctgcattccaccgtgggccctgagcacacacctcgccgtgttgcaggtga

SEQ ID NO: 221467 - DNA, 120 bp, Artificial Sequence
  ENSG00000117308_27 (sequence is synthesized)
ccgcctccttccaaagcgagcttagggggcaggattccagtgggaaggaagctctgagcaggcagcctcagccacctctgagactctgtatcctgggccaggtgccatggcagagaaggt

SEQ ID NO: 221468 - DNA, 120 bp, Artificial Sequence
  ENSG00000117318_0 (sequence is synthesized)
gcgttgcaggtcactgtagcgggacttcttttggttttctttctctttggggcacctctggactcactccccagcatgaaggcgctgagcccggtgcgcggctgctacgaggcggtgtgc

SEQ ID NO: 221469 - DNA, 120 bp, Artificial Sequence
  ENSG00000117318_1 (sequence is synthesized)
tgcctgtcggaacgcagtctggccatcgcccggggccgagggaagggcccggcagctgaggagccgctgagcttgctggacgacatgaaccactgctactcccgcctgcgggaactggta

SEQ ID NO: 221470 - DNA, 120 bp, Artificial Sequence
  ENSG00000117318_2 (sequence is synthesized)
cccggagtcccgagaggcactcagcttagccaggtggaaatcctacagcgcgtcatcgactacattctcgacctgcaggtagtcctggccgagccagcccctggaccccctgatggcccc

SEQ ID NO: 221471 - DNA, 120 bp, Artificial Sequence
  ENSG00000117318_3 (sequence is synthesized)
ctggcgcccgttctgcctgggaccccgggaacctctcctgccggaagccggacggcagggatgggccccaacttcgccctgcccacttgacttcaccaaatcccttcctggagactaaac

SEQ ID NO: 221472 - DNA, 120 bp, Artificial Sequence
  ENSG00000117318_4 (sequence is synthesized)
ctggtgctcaggagcgaaggactgtgaacttgtggcctgaagagccagagctagctctggccaccagctgggcgacgtcaccctgctcccaccccacccccaagttctaaggtctcttca

SEQ ID NO: 221473 - DNA, 120 bp, Artificial Sequence
  ENSG00000117318_5 (sequence is synthesized)
gagcgtggaggtgtggaaggagtggctgctctccaaactatgccaaggcggcggcagagctggtcttctggtctccttggagaaaggttctgttgccctgatttatgaactctataatag

SEQ ID NO: 221474 - DNA, 120 bp, Artificial Sequence
  ENSG00000117318_6 (sequence is synthesized)
agtatataggttttgtaccttttttacaggaaggtgactttctgtaacaatgcgatgtatattaaactttttataaaagttaacattttgcataataaacgatttttaaacacttgtgta

SEQ ID NO: 221475 - DNA, 120 bp, Artificial Sequence
  ENSG00000117318_7 (sequence is synthesized)
cctctcttggagagggaggtttaaacggcaagtcctggagttggcagacgttttgaaaaattgccactcactcggtttagggaaactgaggccagagagggacaagtgacttgcccatgg

SEQ ID NO: 221476 - DNA, 120 bp, Artificial Sequence
  ENSG00000117318_8 (sequence is synthesized)
ttgcatcaaatgaatggcagagtcagtttccatgtgatgtgcatttaagccttaaatgcgcctgggccctgccctcccgcagtggccgagggtctggcaaagtagacatgggtccgacta

SEQ ID NO: 221477 - DNA, 120 bp, Artificial Sequence
  ENSG00000117318_9 (sequence is synthesized)
aatacaagtctttctgttccatgttgtatagggagctgtcttcggcagccccctcccagctagtgtcaattccaagtaggaggggtagcgcaagctccgcctgtggtctttggcgccaac

SEQ ID NO: 221478 - DNA, 120 bp, Artificial Sequence
  ENSG00000117318_10 (sequence is synthesized)
tgggtgggggcagcgtggggcgcggagttatcagctggaggtacagaccaagtttcctccctggcgccggccagtctgcggacggcccccgcctcggcacgctcggcggaaactgactgc

SEQ ID NO: 221479 - DNA, 120 bp, Artificial Sequence
  ENSG00000117318_11 (sequence is synthesized)
gaccctcggagctcccgattgcctcgcgtaactcttccctcttttcctctaatcagacagccgagctcactccggaacttgtcatctccaacgacaaaaggagcttttgccactgactcg

SEQ ID NO: 221480 - DNA, 120 bp, Artificial Sequence
  ENSG00000117322_0 (sequence is synthesized)
caccggcgccgcgtcagcccccaggccgcctgcaggtgtgcgctcagaactagcacgtgtgccggacactatttaagggcccgcctctcctggctcacagctgcttgctgctccagcctt

SEQ ID NO: 221481 - DNA, 120 bp, Artificial Sequence
  ENSG00000117322_1 (sequence is synthesized)
gccctcccagagctgccggacgctcgcgggtctcggaacgcatcccgccgcgggggcttcggccgtggcatgggcgccgcgggcctgctcggggttttcttggctctcgtcgcaccgggg

SEQ ID NO: 221482 - DNA, 120 bp, Artificial Sequence
  ENSG00000117322_2 (sequence is synthesized)
gtcctcgggatttcttgtggctctcctccgcctatcctaaatggccggattagttattattctacccccattgctgttggtaccgtgataaggtacagttgttcaggtaccttccgcctc

SEQ ID NO: 221483 - DNA, 120 bp, Artificial Sequence
  ENSG00000117322_3 (sequence is synthesized)
attggagaaaaaagtctattatgcataactaaagacaaagtggatggaacctgggataaacctgctcctaaatgtgaatatttcaataaatattcttcttgccctgagcccatagtacca

SEQ ID NO: 221484 - DNA, 120 bp, Artificial Sequence
  ENSG00000117322_4 (sequence is synthesized)
ggaggatacaaaattagaggctctacaccctacagacatggtgattctgtgacatttgcctgtaaaaccaacttctccatgaacggaaacaagtctgtttggtgtcaagcaaataatatg

SEQ ID NO: 221485 - DNA, 120 bp, Artificial Sequence
  ENSG00000117322_5 (sequence is synthesized)
tgggggccgacacgactaccaacctgtgtaagtgttttccctctcgagtgtccagcacttcctatgatccacaatggacatcacacaagtgagaatgttggctccattgctccaggattg

SEQ ID NO: 221486 - DNA, 120 bp, Artificial Sequence
  ENSG00000117322_6 (sequence is synthesized)
tctgtgacttacagctgtgaatctggttacttgcttgttggagaaaagatcattaactgtttgtcttcgggaaaatggagtgctgtcccccccacatgtgaagaggcacgctgtaaatct

SEQ ID NO: 221487 - DNA, 120 bp, Artificial Sequence
  ENSG00000117322_7 (sequence is synthesized)
ctaggacgatttcccaatgggaaggtaaaggagcctccaattctccgggttggtgtaactgcaaactttttctgtgatgaagggtatcgactgcaaggcccaccttctagtcggtgtgta

SEQ ID NO: 221488 - DNA, 120 bp, Artificial Sequence
  ENSG00000117322_8 (sequence is synthesized)
attgctggacagggagttgcttggaccaaaatgccagtatgtgaagaaattttttgcccatcacctccccctattctcaatggaagacatataggcaactcactagcaaatgtctcatat

SEQ ID NO: 221489 - DNA, 120 bp, Artificial Sequence
  ENSG00000117322_9 (sequence is synthesized)
ggaagcatagtcacttacacttgtgacccggacccagaggaaggagtgaacttcatccttattggagagagcactctccgttgtacagttgatagtcagaagactgggacctggagtggc

SEQ ID NO: 221490 - DNA, 120 bp, Artificial Sequence
  ENSG00000117322_10 (sequence is synthesized)
cctgccccacgctgtgaactttctacttctgcggttcagtgtccacatccccagatcctaagaggccgaatggtatctgggcagaaagatcgatatacctataacgacactgtgatattt

SEQ ID NO: 221491 - DNA, 120 bp, Artificial Sequence
  ENSG00000117322_11 (sequence is synthesized)
gcttgcatgtttggcttcaccttgaagggcagcaagcaaatccgatgcaatgcccaaggcacatgggagccatctgcaccagtctgtgaaaaggaatgccaggcccctcctaacatcctc

SEQ ID NO: 221492 - DNA, 120 bp, Artificial Sequence
  ENSG00000117322_12 (sequence is synthesized)
aatgggcaaaaggaagatagacacatggtccgctttgaccctggaacatctataaaatatagctgtaaccctggctatgtgctggtgggagaagaatccatacagtgtacctctgagggg

SEQ ID NO: 221493 - DNA, 120 bp, Artificial Sequence
  ENSG00000117322_13 (sequence is synthesized)
gtgtggacaccccctgtaccccaatgcaaagtggcagcgtgtgaagctacaggaaggcaactcttgacaaaaccccagcaccaatttgttagaccagatgtcaactcttcttgtggtgaa

SEQ ID NO: 221494 - DNA, 120 bp, Artificial Sequence
  ENSG00000117322_14 (sequence is synthesized)
gggtacaagttaagtgggagtgtttatcaggagtgtcaaggcacaattccttggtttatggagattcgtctttgtaaagaaatcacctgcccaccaccccctgttatctacaatggggca

SEQ ID NO: 221495 - DNA, 120 bp, Artificial Sequence
  ENSG00000117322_15 (sequence is synthesized)
cacaccgggagttccttagaagattttccatatggaaccacggtcacttacacatgtaaccctgggccagaaagaggagtggaattcagcctcattggagagagcaccatccgttgtaca

SEQ ID NO: 221496 - DNA, 120 bp, Artificial Sequence
  ENSG00000117322_16 (sequence is synthesized)
agatatctggcaaggaagccccatatttctacaatgacactgtgacattcaagtgttatagtggatttactttgaagggcagtagtcagattcgttgcaaagctgataacacctgggatc

SEQ ID NO: 221497 - DNA, 120 bp, Artificial Sequence
  ENSG00000117322_17 (sequence is synthesized)
ctgaaataccagtttgtgaaaaagaaacatgccagcatgtgagacagagtcttcaagaacttccagctggttcacgtgtggagctagttaatacgtcctgccaagatgggtaccagttga

SEQ ID NO: 221498 - DNA, 120 bp, Artificial Sequence
  ENSG00000117322_18 (sequence is synthesized)
ctggacatgcttatcagatgtgtcaagatgctgaaaatggaatttggttcaaaaagattccactttgtaaagttattcactgtcaccctccaccagtgattgtcaatgggaagcacacag

SEQ ID NO: 221499 - DNA, 120 bp, Artificial Sequence
  ENSG00000117322_19 (sequence is synthesized)
gcatgatggcagaaaactttctatatggaaatgaagtctcttatgaatgtgaccaaggattctatctcctgggagagaaaaaattgcagtgcagaagtgattctaaaggacatggatctt

SEQ ID NO: 221500 - DNA, 120 bp, Artificial Sequence
  ENSG00000117322_20 (sequence is synthesized)
ggagcgggccttccccacagtgcttacgatctcctcctgtgactcgctgccctaatccagaagtcaaacatgggtacaagctcaataaaacacattctgcatattcccacaatgacatag

SEQ ID NO: 221501 - DNA, 120 bp, Artificial Sequence
  ENSG00000117322_21 (sequence is synthesized)
tgtatgttgactgcaatcctggcttcatcatgaatggtagtcgcgtgattaggtgtcatactgataacacatgggtgccaggtgtgccaacttgtatcaaaaaagccttcatagggtgtc

SEQ ID NO: 221502 - DNA, 120 bp, Artificial Sequence
  ENSG00000117322_22 (sequence is synthesized)
cacctccgcctaagacccctaacgggaaccatactggtggaaacatagctcgattttctcctggaatgtcaatcctgtacagctgtgaccaaggctacctgctggtgggagaggcactcc

SEQ ID NO: 221503 - DNA, 120 bp, Artificial Sequence
  ENSG00000117322_23 (sequence is synthesized)
ttctttgcacacatgagggaacctggagccaacctgcccctcattgtaaagaggtaaactgtagctcaccagcagatatggatggaatccagaaagggctggaaccaaggaaaatgtatc

SEQ ID NO: 221504 - DNA, 120 bp, Artificial Sequence
  ENSG00000117322_24 (sequence is synthesized)
agtatggagctgttgtaactctggagtgtgaagatgggtatatgctggaaggcagtccccagagccagtgccaatcggatcaccaatggaaccctcccctggcggtttgcagatcccgtt

SEQ ID NO: 221505 - DNA, 120 bp, Artificial Sequence
  ENSG00000117322_25 (sequence is synthesized)
cacttgctcctgtcctttgtggtattgctgcaggtttgatacttcttaccttcttgattgtcattaccttatacgtgatatcaaaacacagagcacgcaattattatacagatacaagcc

SEQ ID NO: 221506 - DNA, 120 bp, Artificial Sequence
  ENSG00000117322_26 (sequence is synthesized)
agaaagaagcttttcatttagaagcacgagaagtatattctgttgatccatacaacccagccagctgatcagaagacaaactggtgtgtgcctcattgcttggaattcagcggaatattg

SEQ ID NO: 221507 - DNA, 120 bp, Artificial Sequence
  ENSG00000117322_27 (sequence is synthesized)
attagaaagaaactgctctaatatcagcaagtctctttatatggcctcaagatcaatgaaatgatgtcataagcgatcacttcctatatgcacttattctcaagaagaacatctttatgg

SEQ ID NO: 221508 - DNA, 120 bp, Artificial Sequence
  ENSG00000117322_28 (sequence is synthesized)
taaagatgggagcccagtttcactgccatatactcttcaaggactttctgaagcctcacttatgagatgcctgaagccaggccatggctataaacaattacatggctctaaaaagttttg

SEQ ID NO: 221509 - DNA, 120 bp, Artificial Sequence
  ENSG00000117322_29 (sequence is synthesized)
ccctttttaaggaaggcactaaaaagagctgtcctggtatctagacccatcttctttttgaaatcagcatactcaatgttactatctgcttttggttataatgtgtttttaattatctaa

SEQ ID NO: 221510 - DNA, 120 bp, Artificial Sequence
  ENSG00000117322_30 (sequence is synthesized)
agtatgaagcattttctggggttatgatggctttacctttattaggaagtatggttttattttgatagtagcttcctcctctggtggtgttaatcatttcatttttacccttacttggtt

SEQ ID NO: 221511 - DNA, 120 bp, Artificial Sequence
  ENSG00000117322_31 (sequence is synthesized)
tgagtttctctcacattactgtatatactttgcctttccataatcactcagtgattgcaatttgcacaagtttttttaaattatgggaatcaagatttaatcctagagatttggtgtaca

SEQ ID NO: 221512 - DNA, 120 bp, Artificial Sequence
  ENSG00000117322_32 (sequence is synthesized)
attcaggctttggatgtttctttagcagttttgtgataagttctagttgcttgtaaaatttcacttaataatgtgtacattagtcattcaataaattgtaattgtaaagaaaacatacaa

SEQ ID NO: 221513 - DNA, 120 bp, Artificial Sequence
  ENSG00000117322_33 (sequence is synthesized)
gtcatacaggtggaaatacggtcttctttgtctctgggatgactgtagactacacttgtgaccctggctatttgcttgtgggaaacaaatccattcactgtatgccttcaggaaattgga

SEQ ID NO: 221514 - DNA, 120 bp, Artificial Sequence
  ENSG00000117322_34 (sequence is synthesized)
cagaaattcataaactttcttaaaccattatgagattttttttttgcaatttttttagcttatcagctatcattagtgttagcgtatattatgtgtggcccaagacaatttttcttcttc

SEQ ID NO: 221515 - DNA, 120 bp, Artificial Sequence
  ENSG00000117322_35 (sequence is synthesized)
caatgttgcccagggaagccaaaagattggacccccttgattctagattgtgaaggatgcatcatctgacggcttttttttcctggtatgtgtgtgtaaagttttccctctcgagtgtcc

SEQ ID NO: 221516 - DNA, 120 bp, Artificial Sequence
  ENSG00000117322_36 (sequence is synthesized)
gtgtgagaccttggaccacttgtacaactcctctgaaactctagcctttcttctgtaaagttggcataagactacagactaggaggtccagagaatgtaaataaaaagtaaaaaggacca

SEQ ID NO: 221517 - DNA, 120 bp, Artificial Sequence
  ENSG00000117322_37 (sequence is synthesized)
cccactggcccctccgggagctgggacctccagaattggaggctgcgccacagaggggcgctgtctggtcggcccggtgtggctggcggcgtgcgggtgctcgcggtctcctgccgggct

SEQ ID NO: 221518 - DNA, 120 bp, Artificial Sequence
  ENSG00000117322_38 (sequence is synthesized)
ccccgcccccaggattctgcaggtgctcatcgctctctggccggcggtcagcgctaccgctcgccacgggaaacctacccactgcatgaggcaccagctagccacgtgaggctgtttctg

SEQ ID NO: 221519 - DNA, 120 bp, Artificial Sequence
  ENSG00000117335_0 (sequence is synthesized)
gctcgggccacgcccacctgtcctgcagcactggatgctttgtgagttggggattgttgcgtcccatatctggacccagaagggacttccctgctcggctggctctcggtttctctgctt

SEQ ID NO: 221520 - DNA, 120 bp, Artificial Sequence
  ENSG00000117335_1 (sequence is synthesized)
tcctccggagaaataacagcgtcttccgcgccgcgcatggagcctcccggccgccgcgagtgtccctttccttcctggcgctttcctgggttgcttctggcggccatggtgttgctgctg

SEQ ID NO: 221521 - DNA, 120 bp, Artificial Sequence
  ENSG00000117335_2 (sequence is synthesized)
tactccttctccgatgcctgtgaggagccaccaacatttgaagctatggagctcattggtaaaccaaaaccctactatgagattggtgaacgagtagattataagtgtaaaaaaggatac

SEQ ID NO: 221522 - DNA, 120 bp, Artificial Sequence
  ENSG00000117335_3 (sequence is synthesized)
ttctatatacctcctcttgccacccatactatttgtgatcggaatcatacatggctacctgtctcagatgacgcctgttatagagaaacatgtccatatatacgggatcctttaaatggc

SEQ ID NO: 221523 - DNA, 120 bp, Artificial Sequence
  ENSG00000117335_4 (sequence is synthesized)
caagcagtccctgcaaatgggacttacgagtttggttatcagatgcactttatttgtaatgagggttattacttaattggtgaagaaattctatattgtgaacttaaaggatcagtagca

SEQ ID NO: 221524 - DNA, 120 bp, Artificial Sequence
  ENSG00000117335_5 (sequence is synthesized)
atttggagcggtaagcccccaatatgtgaaaaggttttgtgtacaccacctccaaaaataaaaaatggaaaacacacctttagtgaagtagaagtatttgagtatcttgatgcagtaact

SEQ ID NO: 221525 - DNA, 120 bp, Artificial Sequence
  ENSG00000117335_6 (sequence is synthesized)
tatagttgtgatcctgcacctggaccagatccattttcacttattggagagagcacgatttattgtggtgacaattcagtgtggagtcgtgctgctccagagtgtaaagtggtcaaatgt

SEQ ID NO: 221526 - DNA, 120 bp, Artificial Sequence
  ENSG00000117335_7 (sequence is synthesized)
cgatttccagtagtcgaaaatggaaaacagatatcaggatttggaaaaaaattttactacaaagcaacagttatgtttgaatgcgataagggtttttacctcgatggcagcgacacaatt

SEQ ID NO: 221527 - DNA, 120 bp, Artificial Sequence
  ENSG00000117335_8 (sequence is synthesized)
gtctgtgacagtaacagtacttgggatcccccagttccaaagtgtcttaaagtgctgcctccatctagtacaaaacctccagctttgagtcattcagtgtcgacttcttccactacaaaa

SEQ ID NO: 221528 - DNA, 120 bp, Artificial Sequence
  ENSG00000117335_9 (sequence is synthesized)
tctccagcgtccagtgcctcaggtcctaggcctacttacaagcctccagtctcaaattatccaggatatcctaaacctgaggaaggaatacttgacagtttggatgtttgggtcattgct

SEQ ID NO: 221529 - DNA, 120 bp, Artificial Sequence
  ENSG00000117335_10 (sequence is synthesized)
gtgattgttattgccatagttgttggagttgcagtaatttgtgttgtcccgtacagatatcttcaaaggaggaagaagaaagggaaagcagatggtggagctgaatatgccacttaccag

SEQ ID NO: 221530 - DNA, 120 bp, Artificial Sequence
  ENSG00000117335_11 (sequence is synthesized)
actaaatcaaccactccagcagagcagagaggctgaatagattccacaacctggtttgccagttcatcttttgactctattaaaatcttcaatagttgttattctgtagtttcactctca

SEQ ID NO: 221531 - DNA, 120 bp, Artificial Sequence
  ENSG00000117335_12 (sequence is synthesized)
tgagtgcaactgtggcttagctaatattgcaatgtggcttgaatgtaggtagcatcctttgatgcttctttgaaacttgtatgaatttgggtatgaacagattgcctgctttcccttaaa

SEQ ID NO: 221532 - DNA, 120 bp, Artificial Sequence
  ENSG00000117335_13 (sequence is synthesized)
ctggttgtattaaagcagggatatgctgtattttataaaattggcaaaattagagaaatatagttcacaatgaaattatattttctttgtaaagaaagtggcttgaaatcttttttgttc

SEQ ID NO: 221533 - DNA, 120 bp, Artificial Sequence
  ENSG00000117335_14 (sequence is synthesized)
aaagattaatgccaactcttaagattattctttcaccaactatagaatgtattttatatatcgttcattgtaaaaagcccttaaaaatatgtgtatactactttggctcttgtgcataaa

SEQ ID NO: 221534 - DNA, 120 bp, Artificial Sequence
  ENSG00000117335_15 (sequence is synthesized)
aacaagaacactgaaaattgggaatatgcacaaacttggcttctttaaccaagaatattattggaaaattctctaaaagttaatagggtaaattctctattttttgtaatgtgttcggtg

SEQ ID NO: 221535 - DNA, 120 bp, Artificial Sequence
  ENSG00000117335_16 (sequence is synthesized)
atttcagaaagctagaaagtgtatgtgtggcatttgttttcactttttaaaacatccctaactgatcgaatatatcagtaatttcagaatcagatgcatcctttcataagaagtgagagg

SEQ ID NO: 221536 - DNA, 120 bp, Artificial Sequence
  ENSG00000117335_17 (sequence is synthesized)
actctgacagccataacaggagtgccacttcatggtgcgaagtgaacactgtagtcttgttgttttcccaaagagaactccgtatgttctcttaggttgagtaacccactctgaattctg

SEQ ID NO: 221537 - DNA, 120 bp, Artificial Sequence
  ENSG00000117335_18 (sequence is synthesized)
gttacatgtgtttttctctccctccttaaataaagagaggggttaaacatgccctctaaaagtaggtggttttgaagagaataaattcatcagataacctcaagtcacatgagaatctta

SEQ ID NO: 221538 - DNA, 120 bp, Artificial Sequence
  ENSG00000117335_19 (sequence is synthesized)
gtccatttacattgccttggctagtaaaagccatctatgtatatgtcttacctcatctcctaaaaggcagagtacaaagtaagccatgtatctcaggaaggtaacttcattttgtctatt

SEQ ID NO: 221539 - DNA, 120 bp, Artificial Sequence
  ENSG00000117335_20 (sequence is synthesized)
tgctgttgattgtaccaagggatggaagaagtaaatatagctcaggtagcactttatactcaggcagatctcagccctctactgagtcccttagccaagcagtttctttcaaagaagcca

SEQ ID NO: 221540 - DNA, 120 bp, Artificial Sequence
  ENSG00000117335_21 (sequence is synthesized)
gcaggcgaaaagcagggactgccactgcatttcatatcacactgttaaaagttgtgttttgaaattttatgtttagttgcacaaattgggccaaagaaacattgccttgaggaagatatg

SEQ ID NO: 221541 - DNA, 120 bp, Artificial Sequence
  ENSG00000117335_22 (sequence is synthesized)
attggaaaatcaagagtgtagaagaataaatactgttttactgtccaaagacatgtttatagtgctctgtaaatgttcctttcctttgtagtctctggcaagatgctttaggaagataaa

SEQ ID NO: 221542 - DNA, 120 bp, Artificial Sequence
  ENSG00000117335_23 (sequence is synthesized)
agtttgaggagaacaaacaggaattctgaattaagcacagagttgaagtttatacccgtttcacatgcttttcaagaatgtcgcaattactaagaagcagataatggtgttttttagaaa

SEQ ID NO: 221543 - DNA, 120 bp, Artificial Sequence
  ENSG00000117335_24 (sequence is synthesized)
tggtgttttttagaaacctaattgaagtatattcaaccaaatactttaatgtataaaataaatattatacaatatacttgtatagcagtttctgcttcacatttgattttttcaaattta

SEQ ID NO: 221544 - DNA, 120 bp, Artificial Sequence
  ENSG00000117335_25 (sequence is synthesized)
tctatatatgtataaatatgtattttgtcaaatttgttacttaaatatatagagaccagttttctctggaagtttgtttaaatgacagaagcgtatatgaattcaagaaaatttaagctg

SEQ ID NO: 221545 - DNA, 120 bp, Artificial Sequence
  ENSG00000117335_26 (sequence is synthesized)
caaaaatgtatttgctataaaatgagaagtctcactgatagaggttctttattgctcattttttaaaaaatggactcttgaaatctgttaaaataaaattgtacatttggagatgtttca

SEQ ID NO: 221546 - DNA, 120 bp, Artificial Sequence
  ENSG00000117335_27 (sequence is synthesized)
ctaactgatgagacccacagagaagtaaaatttacttctctctgagaaggagagatgagagaaaggtttgcttttatcattaaaaggaaagcagatggtggagctgaatatgccacttac

SEQ ID NO: 221547 - DNA, 120 bp, Artificial Sequence
  ENSG00000117335_28 (sequence is synthesized)
gtgacagtaacagtacttgggatcccccagttccaaagtgtcttaaagtgtcgacttcttccactacaaaatctccagcgtccagtgcctcaggatatcctaaacctgaggaaggaatac

SEQ ID NO: 221548 - DNA, 120 bp, Artificial Sequence
  ENSG00000117335_29 (sequence is synthesized)
taagcccccaatatgtgaaagtaagtaaattctttttttttaaatttagaccagtagtcctcaaagatttttgcctcctttacaccctttacactttaagattaacaaagatcccaaaga

SEQ ID NO: 221549 - DNA, 120 bp, Artificial Sequence
  ENSG00000117335_30 (sequence is synthesized)
ggtttcttttatgtgggttatatctattggtatttatcatattggaattcaaacggagaggtttttaaataattattgattctttttggttttgtttgtttttcctaagacacggtctca

SEQ ID NO: 221550 - DNA, 120 bp, Artificial Sequence
  ENSG00000117335_31 (sequence is synthesized)
ggctggggtgcagtggcacaatctcagctcattgcagcctcagcctctccagtagctggggcttcaggcatgtgccactatgcctggctttttgtaatttttgaagagacggggttttgc

SEQ ID NO: 221551 - DNA, 120 bp, Artificial Sequence
  ENSG00000117335_32 (sequence is synthesized)
acggggttttgccatgatgcccaggctggtcttgaaatcccatgctcaagcagtctgcccccgtgggcctcccaaagtgctgggattacaaatgtgagccaccccacctggcctgattaa

SEQ ID NO: 221552 - DNA, 120 bp, Artificial Sequence
  ENSG00000117335_33 (sequence is synthesized)
tttgtaagaataaatgcaatacaaattaacatatgtaacataatttttatgaaaaataataattttccaaatcaaaataaaattagtgagaatagtggcattgttcacattttttgcata

SEQ ID NO: 221553 - DNA, 120 bp, Artificial Sequence
  ENSG00000117335_34 (sequence is synthesized)
tctcttcaacatctggcttaaagcaagattgtatttggcctgttgtgttatcacacaatatgtagcctttggaaaaatatcactatattcttattaggatcagagtgaaaaaagacaata

SEQ ID NO: 221554 - DNA, 120 bp, Artificial Sequence
  ENSG00000117335_35 (sequence is synthesized)
atattttggtggtattgtgaatcaccaatttagaaaatggatatatttataaattgcaaaggatttcttaactagcaccgagttaagcatattttctcattaattgtcagcatttcttgt

SEQ ID NO: 221555 - DNA, 120 bp, Artificial Sequence
  ENSG00000117335_36 (sequence is synthesized)
tttctcattaattgtcagcatttcttgtgatgactagaacagaacttagcatggccttccaaataaatacaggcgtattaggccgttttcgtattgctctaaagaaatacctgagactgg

SEQ ID NO: 221556 - DNA, 120 bp, Artificial Sequence
  ENSG00000117335_37 (sequence is synthesized)
ggctcatgtttctacaagctgtacaggaagcatggtgctggcatctgctgggggtttgggtaggcctcgggaaacttaacaaccattgggaaagacagaaggagagcaaggtgtctcaca

SEQ ID NO: 221557 - DNA, 120 bp, Artificial Sequence
  ENSG00000117335_38 (sequence is synthesized)
tggcaggagcaggaggagcaaggtggggaggacgggaggtgttgcgcacttttaaataaccagatctcccaagcactcagtatcacgagaacagcaccaaggggacggtgctaaaccatt

SEQ ID NO: 221558 - DNA, 120 bp, Artificial Sequence
  ENSG00000117335_39 (sequence is synthesized)
catgagaaatccacccccatgattcagacccctcccaccaggccccacctccaacattgtggactacaatttgacatgcgatttggtggggacacagatccaaaccatatcaataggtat

SEQ ID NO: 221559 - DNA, 120 bp, Artificial Sequence
  ENSG00000117335_40 (sequence is synthesized)
ttacactttaagaaaatgagatttgttctgaaagttagttactacattaatggtttgaatttgggatgatatatttgctcatagaaaccttcttttaaatccatattgaattcacaaaca

SEQ ID NO: 221560 - DNA, 120 bp, Artificial Sequence
  ENSG00000117335_41 (sequence is synthesized)
gcttgtagaaaccctatattgacaaatttattgaagacacagaaattttactaatgctgtcttaatcttttacatttcctttcctctttttcttcatttttaagaggttttgtgtacacc

SEQ ID NO: 221561 - DNA, 120 bp, Artificial Sequence
  ENSG00000117335_42 (sequence is synthesized)
taaaggtacaaaggttatcttttttctgtcttggtttgttattgttgttgctgttcattttagactttatttctttgatattaactatcagtcatacaaaataactgaaaagaaacaatt

SEQ ID NO: 221562 - DNA, 120 bp, Artificial Sequence
  ENSG00000117335_43 (sequence is synthesized)
ttagtatttaactctgtcttgtattcatttctatgccagatgaatgacacgaaattcacataaaattctgctgttgtgattttttgtgcttttccagggttcttagcacgttatgtacat

SEQ ID NO: 221563 - DNA, 120 bp, Artificial Sequence
  ENSG00000117335_44 (sequence is synthesized)
tgcatgggtatatgcttttaatatttttatgtataaaaagtgaattacaacaactttttggaattgaaacatgggcatttttatctaagtaagtcaacaatggcataattcatataaatg

SEQ ID NO: 221564 - DNA, 120 bp, Artificial Sequence
  ENSG00000117335_45 (sequence is synthesized)
aaatgagagcaataactcccaagtggttgatcttctaacattattttgtttcctagtgctgcctccatctagtacaaaacctccagctttgagtcattcaggtttagtagcttcttcctt

SEQ ID NO: 221565 - DNA, 120 bp, Artificial Sequence
  ENSG00000117335_46 (sequence is synthesized)
atatgtcttcttccttatatgttacaagatataaggaattcctggagaaattgccagcaataactcccaagtgtttggtccaatctacattattattttgttttccagtgtcgacttctt

SEQ ID NO: 221566 - DNA, 120 bp, Artificial Sequence
  ENSG00000117335_47 (sequence is synthesized)
ccactacaaaatctccagcgtccagtgcctcaggtttagtaatttcctgcttatagtttttcaaaaatcctttaaattcctggtgattttttataaaatccttcaaatttctggtgatgt

SEQ ID NO: 221567 - DNA, 120 bp, Artificial Sequence
  ENSG00000117335_48 (sequence is synthesized)
tcacttatttttagtaatgaaaggagggaggacatttgtatagccattttagttgttatacatagtgattctaaaattatttgccataatctgatataaacaggaatatgaccttgggaa

SEQ ID NO: 221568 - DNA, 120 bp, Artificial Sequence
  ENSG00000117335_49 (sequence is synthesized)
agttgtataaattttgaatgtgtttatatatatatgtttacattatatatagagaaattgatttagtaccttccttattgggtattagtaaggtataagtgggatgcatttaaagcactt

SEQ ID NO: 221569 - DNA, 120 bp, Artificial Sequence
  ENSG00000117335_50 (sequence is synthesized)
agcacagtgcctggtgtagagaaagctcttagagctagccaatatgacttatcctacacttaaattaatgttagggaaggggaaggttcatgtatgtttgttagtatgtgtgtgtgttaa

SEQ ID NO: 221570 - DNA, 120 bp, Artificial Sequence
  ENSG00000117335_51 (sequence is synthesized)
tatgttaatatgtttgtttgttaatatgtatgttttgtgtcatcaactttgctattttattcttttcagaagtgatctgttgacacctttactgagtttgttcctattgcaggactcttt

SEQ ID NO: 221571 - DNA, 120 bp, Artificial Sequence
  ENSG00000117335_52 (sequence is synthesized)
catttcctggaatgcaactagtttgagtcttctgatgtaaaacatttaaacagggaaatttctgctgtcctcagaacaagatctgtatttctgcctcttccctacccacccctcttccac

SEQ ID NO: 221572 - DNA, 120 bp, Artificial Sequence
  ENSG00000117335_53 (sequence is synthesized)
ctctttagtgggcagttttatctggcaatagcaactcaattttatagcaactgaaaggcaggaaaagtccttatttactgaaataaaatagaagacttttgcagggactcctggtcaacc

SEQ ID NO: 221573 - DNA, 120 bp, Artificial Sequence
  ENSG00000117335_54 (sequence is synthesized)
actgtgcttatgactggagagattattttgatatgatggaaggaattatcctgatttcagcactaccatctctggtttcactttgcttccagcagaagcaagagacaatagtaattgtgg

SEQ ID NO: 221574 - DNA, 120 bp, Artificial Sequence
  ENSG00000117335_55 (sequence is synthesized)
gtagcacttcagtctgggcagactgtgcttagttaacatcatttctgtggtcttcagtttccctttagtataatgtgagtgttgaactgaaatctcaatcactggcttctaatttggtta

SEQ ID NO: 221575 - DNA, 120 bp, Artificial Sequence
  ENSG00000117335_56 (sequence is synthesized)
tatatttcctatctccctaatattttaaaggatcgaagagaattatgcatgttaacatagtaattaagataccttcttataggctgggtggggtagctcacacctgtaataccagaactt

SEQ ID NO: 221576 - DNA, 73 bp, Artificial Sequence
  ENSG00000117335_57 (sequence is synthesized)
agaccagcctggctaacggtggcaggcacttgtaatcccagctgctcgggaggccgaggcaggagaatcgctt

SEQ ID NO: 221577 - DNA, 120 bp, Artificial Sequence
  ENSG00000117335_58 (sequence is synthesized)
caaaacaaaaaccttcttataattcctgtaagagcttggtaactggtagcctcctgagttgagtgctgtagggtttgaggggcaggaagagatgagttttttagtggactgatacatgag

SEQ ID NO: 221578 - DNA, 120 bp, Artificial Sequence
  ENSG00000117335_59 (sequence is synthesized)
caaaacaagattgcatgtgaaatttatactcagtgaggcatccgggcttaactcacatgctcctagtgggtatatgcactaatactacgtttgttgatacagtcttttgaaagagttgat

SEQ ID NO: 221579 - DNA, 120 bp, Artificial Sequence
  ENSG00000117335_60 (sequence is synthesized)
gataagcatttcataaagtatttataaaacactggtatagcttagtgttggagagcagaagagagaattgcttgggattgtcaatgatttcttatcatctgctagaggaagactaaataa

SEQ ID NO: 221580 - DNA, 120 bp, Artificial Sequence
  ENSG00000117335_61 (sequence is synthesized)
caacatcatgatgttaaggtagatctaaatgtgttaacaagaagaaaagttgaggaagtcctaagtggaaaagagaaagatgtaaattatgtagtatcatactacttacagtttttaaaa

SEQ ID NO: 221581 - DNA, 72 bp, Artificial Sequence
  ENSG00000117335_62 (sequence is synthesized)
tgtaaattatgtagtatcatactacttacagtttttaaaaagatacatatgtttaccccaagcacattcgtg

SEQ ID NO: 221582 - DNA, 72 bp, Artificial Sequence
  ENSG00000117335_63 (sequence is synthesized)
gcctcccgggttcaagcggttctcctgccacctcagactcccaagtagctggtattacaggcacccaccact

SEQ ID NO: 221583 - DNA, 73 bp, Artificial Sequence
  ENSG00000117335_64 (sequence is synthesized)
cctcacattactttcatgatggttatcttctaagatttccattataaaatacagagtgtggtgagcattcttg

SEQ ID NO: 221584 - DNA, 120 bp, Artificial Sequence
  ENSG00000117335_65 (sequence is synthesized)
gatttccattataaaatacagagtgtggtgagcattcttgtacatacatcttacatacttgtgcaaatatatatgtaggttaaattctaagatgtggaattgcaaagtttgtaaagtgtg

SEQ ID NO: 221585 - DNA, 120 bp, Artificial Sequence
  ENSG00000117335_66 (sequence is synthesized)
tagttttcatttgataaacttaaaaaatcaatatcaaaattaaagtcataattttatattgataaggccctggtgaatttataaaatcaaacttatttttctaggtcctaggcctactta

SEQ ID NO: 221586 - DNA, 120 bp, Artificial Sequence
  ENSG00000117335_67 (sequence is synthesized)
gtgtagaaacgtgtaggtaattagtttttatgaggtgcccaaacataggatccttggtagggtaagataactttcttaaatgctgtgtttgtatgtaggttaaaatatataaaacacaat

SEQ ID NO: 221587 - DNA, 120 bp, Artificial Sequence
  ENSG00000117335_68 (sequence is synthesized)
tttctttccacattatattgttattttgtgatggtaatctgtcgataaattttctttctattcatatcttatatacatgaaccttaaagcaatctaagttgggtttattttttctgtaac

SEQ ID NO: 221588 - DNA, 120 bp, Artificial Sequence
  ENSG00000117335_69 (sequence is synthesized)
acgctgatttaacacacttgatgtaggcttacgcagtttacacaatgcatgttaaaaaaaaagatgaagtgcagttgtgatataggccaatgaaaaataaagatttcttaataagtaaaa

SEQ ID NO: 221589 - DNA, 120 bp, Artificial Sequence
  ENSG00000117335_70 (sequence is synthesized)
attgcatttctttgctaaaaatattttcagctacttctaacatcactgcaacataaaaacatctgtgcagagttcctacagctattatgactttaagaaaaatttcttttggatttgagg

SEQ ID NO: 221590 - DNA, 120 bp, Artificial Sequence
  ENSG00000117335_71 (sequence is synthesized)
tttaagttatttagcaaatcatggaccactcactatgaggccttctctaccctattccctatttccaaaattgcactaatggccaaaattaaatttaaagtatttcactgtggagacttt

SEQ ID NO: 221591 - DNA, 120 bp, Artificial Sequence
  ENSG00000117360_0 (sequence is synthesized)
agaaggtttccggttccggtgtaacgttcgggctccgtctcaggggctgaagtttgtgaggtgtagtattgagtcctgtttgagctattgttctctttttcctgaaaaatggcactgtca

SEQ ID NO: 221592 - DNA, 120 bp, Artificial Sequence
  ENSG00000117360_1 (sequence is synthesized)
aagagggagctggatgagctgaaaccatggatagagaagacagtgaagagggtcctgggtttctcagagcctacggtggtcacagcagcattgaactgtgtggggaagggcatggacaag

SEQ ID NO: 221593 - DNA, 120 bp, Artificial Sequence
  ENSG00000117360_2 (sequence is synthesized)
aagaaggcagccgatcatctgaaaccttttcttgatgattctactctccgatttgtggacaaactgtttgaggctgtggaggaaggccgaagctctaggcattccaagtctagcagtgac

SEQ ID NO: 221594 - DNA, 120 bp, Artificial Sequence
  ENSG00000117360_3 (sequence is synthesized)
aggagcagaaaacgagagctaaaggaggtgtttggtgatgactctgagatctctaaagaatcatcaggagtaaagaagcgacgaataccccgttttgaggaggtggaagaagagccagag

SEQ ID NO: 221595 - DNA, 120 bp, Artificial Sequence
  ENSG00000117360_4 (sequence is synthesized)
gtgatccctgggcctccatcagagagccctggcatgctgactaagctccagatcaaacagatgatggaggcagcaacacgacaaatcgaggagaggaaaaaacagctgagcttcattagc

SEQ ID NO: 221596 - DNA, 120 bp, Artificial Sequence
  ENSG00000117360_5 (sequence is synthesized)
ccccctacacctcagccaaagactccttcttcctcccaaccagaacgacttcctattggcaacactattcagccctcccaggctgccactttcatgaatgatgccattgagaaggcaagg

SEQ ID NO: 221597 - DNA, 120 bp, Artificial Sequence
  ENSG00000117360_6 (sequence is synthesized)
aaagcagctgaactgcaagctcgaatccaagcccagctggcactgaagccaggactcatcggcaatgccaacatggtgggcctggctaatctccatgccatgggcattgctcccccgaag

SEQ ID NO: 221598 - DNA, 120 bp, Artificial Sequence
  ENSG00000117360_7 (sequence is synthesized)
gtggagttaaaagaccaaacgaaacctacaccactgatcctggatgagcaagggcgcactgtagatgcaacaggcaaggagattgagctgacacaccgcatgcctactctgaaagccaat

SEQ ID NO: 221599 - DNA, 120 bp, Artificial Sequence
  ENSG00000117360_8 (sequence is synthesized)
attcgtgctgtgaagagggaacaattcaagcaacaactaaaggaaaagccatcagaagacatggaatccaataccttttttgacccccgagtctccattgccccttcccagcgccagaga

SEQ ID NO: 221600 - DNA, 120 bp, Artificial Sequence
  ENSG00000117360_9 (sequence is synthesized)
cgcacttttaaattccatgacaagggcaaatttgagaagattgctcagcgattacggacaaaggctcaactggagaagctacaggcagagatttcacaagcagctcgaaaaacaggcatc

SEQ ID NO: 221601 - DNA, 120 bp, Artificial Sequence
  ENSG00000117360_10 (sequence is synthesized)
gcttgccctcattgctcctaagaaggagctaaaggaaggagatattcctgaaattgagtggtgggactcttacataatccccaatggctttgatcttacagaggaaaatcccaagagaga

SEQ ID NO: 221602 - DNA, 120 bp, Artificial Sequence
  ENSG00000117360_11 (sequence is synthesized)
agattattttggaatcacaaatcttgttgaacatccagcccagctcaatcctccagttgacaatgacacaccagttactctgggagtatatcttaccaagaaggaacagaaaaaacttcg

SEQ ID NO: 221603 - DNA, 120 bp, Artificial Sequence
  ENSG00000117360_12 (sequence is synthesized)
gagacaaacaaggagggaagcacagaaggaactacaagaaaaagtcaggctgggcctgatgcctcctccagaacccaaagtgagaatttctaatttgatgcgagtattaggaacagaagc

SEQ ID NO: 221604 - DNA, 120 bp, Artificial Sequence
  ENSG00000117360_13 (sequence is synthesized)
tgttcaagaccccacgaaggtagaagcccacgtcagagctcagatggcaaaaagacagaaagcgcatgaagaggccaacgctgcccgaaaactcacagcagaacagagaaaggtcaagaa

SEQ ID NO: 221605 - DNA, 120 bp, Artificial Sequence
  ENSG00000117360_14 (sequence is synthesized)
aattaaaaagcttaaagaagacatttcacagggggtacacatatctgtatatagagttcgaaatttgagcaacccagccaagaagttcaagattgaagccaatgctgggcaactgtacct

SEQ ID NO: 221606 - DNA, 120 bp, Artificial Sequence
  ENSG00000117360_15 (sequence is synthesized)
gacaggggtggtggtactgcacaaggatgtcaacgtggtagtagtggaagggggccccaaggcccagaagaaatttaagcgtcttatgctgcatcggataaagtgggatgaacagacatc

SEQ ID NO: 221607 - DNA, 120 bp, Artificial Sequence
  ENSG00000117360_16 (sequence is synthesized)
taacacaaagggagatgatgatgaggagtctgatgaggaagctgtgaagaaaaccaacaaatgtgtactagtctgggagggtacagccaaagaccggagctttggagagatgaagtttaa

SEQ ID NO: 221608 - DNA, 120 bp, Artificial Sequence
  ENSG00000117360_17 (sequence is synthesized)
acagtgtcctacagagaacatggctcgtgagcatttcaaaaagcatggggctgaacactactgggaccttgcgctgagtgaatctgtgttagagtccactgattgagactactgcaagcc

SEQ ID NO: 221609 - DNA, 120 bp, Artificial Sequence
  ENSG00000117360_18 (sequence is synthesized)
cttgcctctcctcccttgcctttgtctcttcagtcctctcacttattctatttcccaaccccctcccacttgtttgtgtgatctcagaactgtgccaagcagacactgggacaaagggag

SEQ ID NO: 221610 - DNA, 120 bp, Artificial Sequence
  ENSG00000117360_19 (sequence is synthesized)
aatatcttgctcccctcctgagtcagcctggtgttgccctttattccccttatgtgcatatgattaaagagttatttttaaacttggtgtgatatttttcacacattcgtaagtattaga

SEQ ID NO: 221611 - DNA, 89 bp, Artificial Sequence
  ENSG00000117360_20 (sequence is synthesized)
gctggccgataattttgatttggtatatctgccctcctcctccattgggtgaaagttttttgagagtaatatatgatgttgacatatga

SEQ ID NO: 221612 - DNA, 120 bp, Artificial Sequence
  ENSG00000117360_21 (sequence is synthesized)
tgaaagttttttgagagtaatatatgatgttgacatatgaagcctgcctcccaaagtgcctaggacaagtttttattcttgactgcttgtcttttatttccttattcccagtacctggtg

SEQ ID NO: 221613 - DNA, 120 bp, Artificial Sequence
  ENSG00000117360_22 (sequence is synthesized)
gagctcttgattcataacaagtgctatgtaaatgctaattgtatcaattaatattactgcctacttggagcttcaagtctaatttggggaaaataaagagcaacagaaaagagaacactt

SEQ ID NO: 221614 - DNA, 120 bp, Artificial Sequence
  ENSG00000117360_23 (sequence is synthesized)
tggggattactgaagaagaaagagaaagcccctgtcctggaagagcttagacttagttgggaaaactatactaacattgaaatacttaacacttggcaaacagaatatcaacaatgtaat

SEQ ID NO: 221615 - DNA, 120 bp, Artificial Sequence
  ENSG00000117360_24 (sequence is synthesized)
ttaacctaatatgaaccaagctcttacacgctaagagaatgtgaaacaaaagtttaatcagagtgggataggttataatgaggaaaacttcttggaggaggtgagttttaggcaggattt

SEQ ID NO: 221616 - DNA, 120 bp, Artificial Sequence
  ENSG00000117360_25 (sequence is synthesized)
ggaacaggggttgtggaaaagttgagagaaatcattataaatgtgagcagtagcatttgcaaagaccttgagatgggaacatttataagaacatgggaatgaaatttgtttgactggatt

SEQ ID NO: 221617 - DNA, 120 bp, Artificial Sequence
  ENSG00000117360_26 (sequence is synthesized)
aggagaatgttgaagttgggtgagatggagagtctagtagaccctgcttctggcaggtggctatttgcaaggttgtgtcatattcccctgggaatagccagaaaatgctggtaggggcta

SEQ ID NO: 221618 - DNA, 120 bp, Artificial Sequence
  ENSG00000117360_27 (sequence is synthesized)
tagaagcccacgtcagagctcagatggcaaaaagacagaaccctgcctctgatcttcaatgcctttctcacttgtggatgtccttcctgtcacgacagagcgcatgaagaggccaacgct

SEQ ID NO: 221619 - DNA, 80 bp, Artificial Sequence
  ENSG00000117360_28 (sequence is synthesized)
aagaaatggattttttttgtgtgtgtgtgtgagatgttctctctgtcactcaggctggagcgcagtggtgcgatctcggt

SEQ ID NO: 221620 - DNA, 90 bp, Artificial Sequence
  ENSG00000117360_29 (sequence is synthesized)
gggattataggcgtgagccaccgtacctagcctgtttttgtttttcaggcaaggtctcacttttttgtccaggctggagttcagtggcga

SEQ ID NO: 221621 - DNA, 120 bp, Artificial Sequence
  ENSG00000117360_30 (sequence is synthesized)
ggcttactgcaacctctgcctcccgggcttgagtgatcctcccaccttggcttcccaagtagctgggactacaggtcaccatgcctggctgatttttgtattttttttaaagattgagtt

SEQ ID NO: 221622 - DNA, 88 bp, Artificial Sequence
  ENSG00000117360_31 (sequence is synthesized)
ttacaggcgtgagctaccacgcccagccaattattttcttttttggggggtgggggatggagtcttgctctgtcacttaggctggagt

SEQ ID NO: 221623 - DNA, 120 bp, Artificial Sequence
  ENSG00000117360_32 (sequence is synthesized)
gtgagctaccacgcccagccaattattttcttttttggggggtgggggatggagtcttgctctgtcacttaggctggagtacggtggcgcgttctcggctcactgcaacctctgcctccc

SEQ ID NO: 221624 - DNA, 120 bp, Artificial Sequence
  ENSG00000117360_33 (sequence is synthesized)
acagaagtaagtgccatgggattgggtggaaacctcgggcaagtacctttcccaaactcttctggggggtccatatttggagggaggggagagttctccgttgctctctctttccctcag

SEQ ID NO: 221625 - DNA, 120 bp, Artificial Sequence
  ENSG00000117360_34 (sequence is synthesized)
tattataagagtctaagggtctagaggacaaaaagtctgtaggtctttacattgtcaagaacaatgagattgtaagtatttttggatgatagtaaatacctctccctgactcttagagta

SEQ ID NO: 221626 - DNA, 120 bp, Artificial Sequence
  ENSG00000117360_35 (sequence is synthesized)
aactttggttagtaatgtaatggttaatgtaaagtgctagactttgaagaaatgtaagagtgtggaaatatttctagactcatcaactctaccttttaagcattcatctatttgtttact

SEQ ID NO: 221627 - DNA, 120 bp, Artificial Sequence
  ENSG00000117360_36 (sequence is synthesized)
ccagaggcctttgtttatagagaggaaaccattttggattcatctttttacttgccactccattcaggcagctgctgatgctaaaatggaagacataactaaactttcccttctccagag

SEQ ID NO: 221628 - DNA, 120 bp, Artificial Sequence
  ENSG00000117360_37 (sequence is synthesized)
tagagtgattagcattgtggggagaaaggagaaaaagatcgtattttagtgccatacctgatataatatgctaggtctctgcttctgtgttttttggagtagaaggccctaagatgtggt

SEQ ID NO: 221629 - DNA, 120 bp, Artificial Sequence
  ENSG00000117360_38 (sequence is synthesized)
tcctgagattgcttcaactaccacattaatgtctgagctcagaggttctttctaccccatcatcttccacagttctggcaaaattattcttctctgtttccaggccccaaggcccagaag

SEQ ID NO: 221630 - DNA, 120 bp, Artificial Sequence
  ENSG00000117362_0 (sequence is synthesized)
ctcttcggcttccgtagaggaagtggcgcggaccttcatttggggtttcggttcccccccttccccttccccggggtctgggggtgacattgcaccgcgcccctcgtggggtcgcgttgc

SEQ ID NO: 221631 - DNA, 120 bp, Artificial Sequence
  ENSG00000117362_1 (sequence is synthesized)
caccccacgcggactccccagctggcgcgcccctcccatttgcctgtcctggtcaggcccccaccccccttcccacctgaccagccatgggggctgcggtgtttttcggctgcactttcg

SEQ ID NO: 221632 - DNA, 120 bp, Artificial Sequence
  ENSG00000117362_2 (sequence is synthesized)
tcgcgttcggcccggccttcgcgcttttcttgatcactgtggctggggacccgcttcgcgttatcatcctggtcgcaggggcatttttctggctggtctccctgctcctggcctctgtgg

SEQ ID NO: 221633 - DNA, 120 bp, Artificial Sequence
  ENSG00000117362_3 (sequence is synthesized)
tctggttcatcttggtccatgtgaccgaccggtcagatgcccggctccagtacggcctcctgatttttggtgctgctgtctctgtccttctacaggaggtgttccgctttgcctactaca

SEQ ID NO: 221634 - DNA, 120 bp, Artificial Sequence
  ENSG00000117362_4 (sequence is synthesized)
agctgcttaagaaggcagatgaggggttagcatcgctgagtgaggacggaagatcacccatctccatccgccagatggcctatgtttctggtctctccttcggtatcatcagtggtgtct

SEQ ID NO: 221635 - DNA, 120 bp, Artificial Sequence
  ENSG00000117362_5 (sequence is synthesized)
tctctgttatcaatattttggctgatgcacttgggccaggtgtggttgggatccatggagactcaccctattacttcctgacttcagcctttctgacagcagccattatcctgctccata

SEQ ID NO: 221636 - DNA, 120 bp, Artificial Sequence
  ENSG00000117362_6 (sequence is synthesized)
ccttttggggagttgtgttctttgatgcctgtgagaggagacggtactgggctttgggcctggtggttgggagtcacctactgacatcgggactgacattcctgaacccctggtatgagg

SEQ ID NO: 221637 - DNA, 120 bp, Artificial Sequence
  ENSG00000117362_7 (sequence is synthesized)
ttcatcacagctggagggtccctccgaagtattcagcgcagcctcttgtgccgacggcaggaggacagtcgggtgatggtgtattctgccctgcgcatcccacccgaggactgagggaac

SEQ ID NO: 221638 - DNA, 120 bp, Artificial Sequence
  ENSG00000117362_8 (sequence is synthesized)
ctaggggggacccctgggcctggggtgccctcctgatgtcctcgccctgtatttctccatctccagttctggacagtgcaggttgccaagaaaagggacctagtttagccattgccctgg

SEQ ID NO: 221639 - DNA, 120 bp, Artificial Sequence
  ENSG00000117362_9 (sequence is synthesized)
agatgaaattaatggaggctcaaggatagatgagctctgagtttctcagtactccctcaagactggacatcttggtctttttctcaggcctgagggggaaccatttttggtgtgataaat

SEQ ID NO: 221640 - DNA, 120 bp, Artificial Sequence
  ENSG00000117362_10 (sequence is synthesized)
accctaaactgcctttttttcttttttgaggtggggggagggaggaggtatattggaactcttctaacctccttgggctatattttctctcctcgagttgctcctcatggctgggctcat

SEQ ID NO: 221641 - DNA, 120 bp, Artificial Sequence
  ENSG00000117362_11 (sequence is synthesized)
ttcggtccctttctccttggtcccagaccttgggggaaaggaaggaagtgcatgtttgggaactggcattactggaactaatggttttaacctccttaaccaccagcatccctcctctcc

SEQ ID NO: 221642 - DNA, 120 bp, Artificial Sequence
  ENSG00000117362_12 (sequence is synthesized)
ccaaggtgaagtggagggtgctgtggtgagctggccactccagagctgcagtgccactggaggagtcagactaccatgacatcgtagggaaggaggggagatttttttgtagtttttaat

SEQ ID NO: 221643 - DNA, 120 bp, Artificial Sequence
  ENSG00000117362_13 (sequence is synthesized)
tggggtgtgggaggggcggggaggttttctataaactgtatcattttctgctgagggtggagtgtcccatccttttaatcaaggtgattgtgattttgactaataaaaaagaatttgtaa

SEQ ID NO: 221644 - DNA, 120 bp, Artificial Sequence
  ENSG00000117362_14 (sequence is synthesized)
agcccttcaagaagaggtatgattgctaccacttttccccacaaagtgacgaaaggaaacagcgacggaagcgcaaccgaaccctggaattggtgtctcgactggtccattcccggccca

SEQ ID NO: 221645 - DNA, 120 bp, Artificial Sequence
  ENSG00000117362_15 (sequence is synthesized)
cccccattaaccggctcgagccactcccaggacgaagtcaaggcctcggaaggcgactacaactcccagcaggtcgagcagctccgcccgcgctgattctccattggccttccgggggtg

SEQ ID NO: 221646 - DNA, 120 bp, Artificial Sequence
  ENSG00000117362_16 (sequence is synthesized)
tgtccactgcccatgactgagcccagccccagcccgggtccattgcccacattctctgtctccttctcgtcggtctaccccactacctccagggttttgctttgtccttttgtgaccgtt

SEQ ID NO: 221647 - DNA, 120 bp, Artificial Sequence
  ENSG00000117362_17 (sequence is synthesized)
agtctctaagctttaccaggagcagcctgggttcagccagtcagtgactggtgggtttgaatctgcacttatccccaccacctggggacccccttgttgtgtccaggactccccctgtgt

SEQ ID NO: 221648 - DNA, 120 bp, Artificial Sequence
  ENSG00000117362_18 (sequence is synthesized)
ctggaggagggagttggacagccccctcctctagggaagtctctaaatatccacatgttctaagtggcttcttactttccttcatccgtcacttccaaagaaagttggtctggagggaga

SEQ ID NO: 221649 - DNA, 120 bp, Artificial Sequence
  ENSG00000117362_19 (sequence is synthesized)
ttcctaacatttctctccaggctccttttgcttctctccgattctcttgtcattacagatgaaggcttcattagcgatatactgtattccatgtttattatactagtctgtccgaagagc

SEQ ID NO: 221650 - DNA, 120 bp, Artificial Sequence
  ENSG00000117362_20 (sequence is synthesized)
ggggttgggtctgggagatttgtcctttcccgcagttggtttccaccttccaaggatctcacagattcctcctatattcctcccagcgacgtcagagaaggcccaaggccgagactcgtg

SEQ ID NO: 221651 - DNA, 120 bp, Artificial Sequence
  ENSG00000117362_21 (sequence is synthesized)
agggggctgtgctgacctaggcaggccgagtcaggtgccttaggggaggatccaggaacggatacctcgcccttccgtgctcgcacactctggctgtcatcgctctgaagactctttaat

SEQ ID NO: 221652 - DNA, 120 bp, Artificial Sequence
  ENSG00000117362_22 (sequence is synthesized)
tagatttctcccctttccagtgcgttcacttttctacagatgagtctcttggtggagacagttaccctacctggtccatgtctccctaaccatccggaaggctaacttccacttttcaag

SEQ ID NO: 221653 - DNA, 120 bp, Artificial Sequence
  ENSG00000117362_23 (sequence is synthesized)
ggtgagttggagacaggggcctgagttagggagaaaagcatttaatggtgagtgggatgtgggggaaagggtatcctcacttcttaacatttttaacttacctgggaggaggaggaaagg

SEQ ID NO: 221654 - DNA, 120 bp, Artificial Sequence
  ENSG00000117385_0 (sequence is synthesized)
actccggccttggtggcgggtggctggcggttccgttaggtctgagggagcgatggcggtacgcgcgttgaagctgctgaccacactgctggctgtcgtggccgctgcctcccaagccga

SEQ ID NO: 221655 - DNA, 120 bp, Artificial Sequence
  ENSG00000117385_1 (sequence is synthesized)
ggtcgagtccgaggcaggatggggcatggtgacgcctgatctgctcttcgccgaggggaccgcagcctacgcgcgcggggactggcccggggtggtcctgagcatggaacgggcgctgcg

SEQ ID NO: 221656 - DNA, 120 bp, Artificial Sequence
  ENSG00000117385_2 (sequence is synthesized)
agcatggaacgggcgctgcgctcccgggcagccctccgcgcccttcgcctgcgctgccgcacccagtgtgccgccgacttcccgtgggagctggaccccgactggtcccccagcccggcc

SEQ ID NO: 221657 - DNA, 120 bp, Artificial Sequence
  ENSG00000117385_3 (sequence is synthesized)
cctgcgcgacctgagcttcttcgggggccttctgcgtcgcgctgcctgcctgcgccgctgcctcgggccgccggccgcccactcgctcagcgaagagatggagctggagttccgcaagcg

SEQ ID NO: 221658 - DNA, 120 bp, Artificial Sequence
  ENSG00000117385_4 (sequence is synthesized)
gagcccctacaactacctgcaggtcgcctacttcaagatcaacaagttggagaaagctgttgctgcagcacacaccttcttcgtgggcaatcctgagcacatggaaatgcagcagaacct

SEQ ID NO: 221659 - DNA, 120 bp, Artificial Sequence
  ENSG00000117385_5 (sequence is synthesized)
agactattaccaaaccatgtctggagtgaaggaggccgacttcaaggatcttgagactcaaccccatatgcaagaatttcgactgggagtgcgactctactcagaggaacagccacagga

SEQ ID NO: 221660 - DNA, 120 bp, Artificial Sequence
  ENSG00000117385_6 (sequence is synthesized)
agctgtgccccacctagaggcggcgctgcaagaatactttgtggcctatgaggagtgccgtgccctctgcgaagggccctatgactacgatggctacaactaccttgagtacaacgctga

SEQ ID NO: 221661 - DNA, 120 bp, Artificial Sequence
  ENSG00000117385_7 (sequence is synthesized)
cctcttccaggccatcacagatcattacatccaggtcctcaactgtaagcagaactgtgtcacggagcttgcttcccacccaagtcgagagaagccctttgaagacttcctcccatcgca

SEQ ID NO: 221662 - DNA, 120 bp, Artificial Sequence
  ENSG00000117385_8 (sequence is synthesized)
ttataattatctgcagtttgcctactataacattgggaattatacacaggctgttgaatgtgccaagacctatcttctcttcttccccaatgacgaggtgatgaaccaaaatttggccta

SEQ ID NO: 221663 - DNA, 120 bp, Artificial Sequence
  ENSG00000117385_9 (sequence is synthesized)
ttatgcagctatgcttggagaagaacacaccagatccatcggcccccgtgagagtgccaaggagtaccgacagcgaagcctactggaaaaagaactgcttttcttcgcttatgatgtttt

SEQ ID NO: 221664 - DNA, 120 bp, Artificial Sequence
  ENSG00000117385_10 (sequence is synthesized)
agaaacagaagtcagaacgggaaacagccgtacgcatctcccaggagattgggaaccttatgaaggaaatcgagacccttgtggaagagaagaccaaggagtcactggatgtgagcagac

SEQ ID NO: 221665 - DNA, 120 bp, Artificial Sequence
  ENSG00000117385_11 (sequence is synthesized)
tgacccgggaaggtggccccctgctgtatgaaggcatcagtctcaccatgaactccaaactcctgaatggttcccagcgggtggtgatggacggcgtaatctctgaccacgagtgtcagg

SEQ ID NO: 221666 - DNA, 120 bp, Artificial Sequence
  ENSG00000117385_12 (sequence is synthesized)
agctgcagagactgaccaatgtggcagcaacctcaggagatggctaccggggtcagacctccccacatactcccaatgaaaagttctatggtgtcactgtcttcaaagccctcaagctgg

SEQ ID NO: 221667 - DNA, 120 bp, Artificial Sequence
  ENSG00000117385_13 (sequence is synthesized)
ggcaagaaggcaaagttcctctgcagagtgcccacctgtactacaacgtgacggagaaggtgcggcgcatcatggagtcctacttccgcctggatacgcccctctacttttcctactctc

SEQ ID NO: 221668 - DNA, 120 bp, Artificial Sequence
  ENSG00000117385_14 (sequence is synthesized)
atctggtgtgccgcactgccatcgaagaggtccaggcagagaggaaggatgatagtcatccagtccacgtggacaactgcatcctgaatgccgagaccctcgtgtgtgtcaaagagcccc

SEQ ID NO: 221669 - DNA, 120 bp, Artificial Sequence
  ENSG00000117385_15 (sequence is synthesized)
cagcctacaccttccgcgactacagcgccatcctttacctaaatggggacttcgatggcggaaacttttatttcactgaactggatgccaagaccgtgacggcagaggtgcagcctcagt

SEQ ID NO: 221670 - DNA, 120 bp, Artificial Sequence
  ENSG00000117385_16 (sequence is synthesized)
gtggaagagccgtgggattctcttcaggcactgaaaacccacatggagtgaaggctgtcaccagggggcagcgctgtgccatcgccctgtggttcaccctggaccctcgacacagcgagc

SEQ ID NO: 221671 - DNA, 120 bp, Artificial Sequence
  ENSG00000117385_17 (sequence is synthesized)
gggacagggtgcaggcagatgacctggtgaagatgctcttcagcccagaagagatggacctctcccaggagcagcccctggatgcccagcagggcccccccgaacctgcacaagagtctc

SEQ ID NO: 221672 - DNA, 120 bp, Artificial Sequence
  ENSG00000117385_18 (sequence is synthesized)
tctcaggcagtgaatcgaagcccaaggatgagctatgacagcgtccaggtcagacggatgggtgactagacccatggagaggaactcttctgcactctgagctggccagcccctcggggc

SEQ ID NO: 221673 - DNA, 120 bp, Artificial Sequence
  ENSG00000117385_19 (sequence is synthesized)
tgcagagcagtgagcctacatctgccactcagccgaggggaccctgctcacagccttctacatggtgctactgctcttggagtggacatgaccagacaccgcaccccctggatctggctg

SEQ ID NO: 221674 - DNA, 120 bp, Artificial Sequence
  ENSG00000117385_20 (sequence is synthesized)
agggctcaggacacaggcccagccacccccaggggcctccacaggccgctgcatgacagcgatacagtacttaagtgtctgtgtagacaaccaaagaataaatgattcatggtttttttt

SEQ ID NO: 221675 - DNA, 120 bp, Artificial Sequence
  ENSG00000117385_21 (sequence is synthesized)
ccatcactcctctaaccagtcaccctttctctttagttctggtcttagggaagccatactgaagagctgccctcggtcgtgagccctaatgagcccatgtctcttctgagagtggattac

SEQ ID NO: 221676 - DNA, 120 bp, Artificial Sequence
  ENSG00000117385_22 (sequence is synthesized)
tatgcagctatgcttggagaagaacacaccagatccatcggcccccgtgagcagggcacctagggaaagatgtgaccccggaaagtactcagtttccctgccctggagtgccaaggagta

SEQ ID NO: 221677 - DNA, 120 bp, Artificial Sequence
  ENSG00000117385_23 (sequence is synthesized)
gcacttgaggcttcctgagcccaggcagatgtgaactcctggcaaggggtgggcaggtccagtttgggaagtcggggtggagcccagggctggccctggaatgcagtcctcagagcggct

SEQ ID NO: 221678 - DNA, 90 bp, Artificial Sequence
  ENSG00000117385_24 (sequence is synthesized)
agtgcagtggcttgatcatagctcactgtaacctcaaattcccggactcaagagaccctctagtctcgcattcttttgtttttttttaaa

SEQ ID NO: 221679 - DNA, 120 bp, Artificial Sequence
  ENSG00000117385_25 (sequence is synthesized)
ggcatgcattcttttgtttttttttaaatgacattactaaggttgttttctaattacattacagaagtaatgaatgttcattgtataacattgtagaaatgtaggtaagtataaaataaa

SEQ ID NO: 221680 - DNA, 120 bp, Artificial Sequence
  ENSG00000117385_26 (sequence is synthesized)
aagtaatcatttgtaataccgccaccttaagaaaaccagtttatattttgccctattttttaagtcttccgtatataattttttcatctaatttggtgttatatcatgtatgcatttttt

SEQ ID NO: 221681 - DNA, 120 bp, Artificial Sequence
  ENSG00000117385_27 (sequence is synthesized)
ttttcatctaatttggtgttatatcatgtatgcattttttatcatcttttttattttttttgaggcagggtctcactttgttgtccaggctgcagtgcaatggtgtgatcatagctcact

SEQ ID NO: 221682 - DNA, 81 bp, Artificial Sequence
  ENSG00000117385_28 (sequence is synthesized)
gggctcaagtgatcctcccgcctcagccccacaaatagctgggactagaggcatgcaccaccatacccagctattgttttt

SEQ ID NO: 221683 - DNA, 120 bp, Artificial Sequence
  ENSG00000117385_29 (sequence is synthesized)
gctgggattgcaggtgtgagccaccatggccagccccatcatcattttttaactaacattattatcatgagtcttttctcatgtcttcagttttatttgaaaacataattgtttatggct

SEQ ID NO: 221684 - DNA, 120 bp, Artificial Sequence
  ENSG00000117385_30 (sequence is synthesized)
tatttgaaaacataattgtttatggctgcatgatagtccatcttatgcagagactatattaattcactagtcacatttttttggtcatgtatgtttttgattttcactacaataaatgtt

SEQ ID NO: 221685 - DNA, 120 bp, Artificial Sequence
  ENSG00000117385_31 (sequence is synthesized)
acagtatccttcaatgttctcattctatttgtttagcaggaaaagttccaaaggagggactgtctgtgatgatatagcattttatagagagtttatggttccttacattttaattataaa

SEQ ID NO: 221686 - DNA, 62 bp, Artificial Sequence
  ENSG00000117385_32 (sequence is synthesized)
cgtaatcccagctactcgacatggaggcaggagaatagcttgaacctggaaggtggaggttg

SEQ ID NO: 221687 - DNA, 120 bp, Artificial Sequence
  ENSG00000117385_33 (sequence is synthesized)
cactccagcctgggtgacagagcaacagtcaaaaaaaaaaaaaaaaaaagaatgacttttaaaagtaagttgtggccaggtgcagtgggtcacacctgtcatcccagcactttggaaggc

SEQ ID NO: 221688 - DNA, 62 bp, Artificial Sequence
  ENSG00000117385_34 (sequence is synthesized)
aaaaaaaaagaatgacttttaaaagtaagttgtggccaggtgcagtgggtcacacctgtgtc

SEQ ID NO: 221689 - DNA, 88 bp, Artificial Sequence
  ENSG00000117385_35 (sequence is synthesized)
tgtctcaaaaaagtaagttgtgtttatttgaaaactgttagccctacaaaaaagtgcaagaacctaggccaggcacggtggctcatgc

SEQ ID NO: 221690 - DNA, 120 bp, Artificial Sequence
  ENSG00000117385_36 (sequence is synthesized)
cagcagaacctagactattaccaaaccatgtctggagtgaaggaggccgacttcaaggatcttgagactcaaccccatatgtagcaagaatttcgactgggagtgcgactctactcagag

SEQ ID NO: 221691 - DNA, 120 bp, Artificial Sequence
  ENSG00000117385_37 (sequence is synthesized)
cgcccttggtttgcctttctcttccccaaatcccattgccagtggctgagacacgaaaggagcacttgggacaccagctccaacgccctgtcattatggtcacattgccttgtcctccct

SEQ ID NO: 221692 - DNA, 120 bp, Artificial Sequence
  ENSG00000117385_38 (sequence is synthesized)
gggcctgctgtgaacgggatccaggtggggaaagaggtcaagacagggagcgatgctgagttcttggttccctccttgggccccacttcagctgtccttttccagagagtaggacctgct

SEQ ID NO: 221693 - DNA, 120 bp, Artificial Sequence
  ENSG00000117385_39 (sequence is synthesized)
gggaaggagatgagcctggggccattaaggaaccttccttgtcccctgggaagtagcagctgagagatagcgagtgtctggagcggaggcctctctgaatgggcaggggtttgtccttgc

SEQ ID NO: 221694 - DNA, 120 bp, Artificial Sequence
  ENSG00000117385_40 (sequence is synthesized)
agccagctcttctctgccccacttcctgccactcagccccatctcctgcagtcctgatggaggactgacccactctgccctgcgtccgtcccacctcctgatccctcattctcacttccc

SEQ ID NO: 221695 - DNA, 120 bp, Artificial Sequence
  ENSG00000117385_41 (sequence is synthesized)
tgggcctttgtattttgtaaagtccagctacaaaccagggttgtgccattctgcccaggatctgcccttggttggagcccttcattcctgcttgccacaccctgctcacttctgccaaga

SEQ ID NO: 221696 - DNA, 120 bp, Artificial Sequence
  ENSG00000117385_42 (sequence is synthesized)
tcagctctgtgctggatgctgaagacacagagagaacaggatgcggtcccttttcttcagttggggaaccaatgtaaatacatgggtggcatcccagtgtgatgcatgccacagtagcat

SEQ ID NO: 221697 - DNA, 120 bp, Artificial Sequence
  ENSG00000117385_43 (sequence is synthesized)
ggaggaagttatagtcaacctacctggggatcaagaaggcttcccagagggaaatggggtgcagccagaaagggggccacccgtcacttgtcacacaacgcactttaatggggaagctgg

SEQ ID NO: 221698 - DNA, 120 bp, Artificial Sequence
  ENSG00000117394_0 (sequence is synthesized)
aagaggcaagaggtagcaacagcgagcgtgccggtcgctagtcgcgggtccccgagtgagcacgccagggagcaggagaccaaacgacgggggtcggagtcagagtcgcagtgggagtcc

SEQ ID NO: 221699 - DNA, 120 bp, Artificial Sequence
  ENSG00000117394_1 (sequence is synthesized)
ccggaccggagcacgagcctgagcgggagagcgccgctcgcacgcccgtcgccacccgcgtacccggcgcagccagagccaccagcgcagcgctgccatggagcccagcagcaagaagct

SEQ ID NO: 221700 - DNA, 120 bp, Artificial Sequence
  ENSG00000117394_2 (sequence is synthesized)
gacgggtcgcctcatgctggccgtgggaggagcagtgcttggctccctgcagtttggctacaacactggagtcatcaatgccccccagaaggtgatcgaggagttctacaaccagacatg

SEQ ID NO: 221701 - DNA, 120 bp, Artificial Sequence
  ENSG00000117394_3 (sequence is synthesized)
ggtccaccgctatggggagagcatcctgcccaccacgctcaccacgctctggtccctctcagtggccatcttttctgttgggggcatgattggctccttctctgtgggccttttcgttaa

SEQ ID NO: 221702 - DNA, 120 bp, Artificial Sequence
  ENSG00000117394_4 (sequence is synthesized)
ccgctttggccggcggaattcaatgctgatgatgaacctgctggccttcgtgtccgccgtgctcatgggcttctcgaaactgggcaagtcctttgagatgctgatcctgggccgcttcat

SEQ ID NO: 221703 - DNA, 120 bp, Artificial Sequence
  ENSG00000117394_5 (sequence is synthesized)
catcggtgtgtactgcggcctgaccacaggcttcgtgcccatgtatgtgggtgaagtgtcacccacagcccttcgtggggccctgggcaccctgcaccagctgggcatcgtcgtcggcat

SEQ ID NO: 221704 - DNA, 120 bp, Artificial Sequence
  ENSG00000117394_6 (sequence is synthesized)
cctcatcgcccaggtgttcggcctggactccatcatgggcaacaaggacctgtggcccctgctgctgagcatcatcttcatcccggccctgctgcagtgcatcgtgctgcccttctgccc

SEQ ID NO: 221705 - DNA, 120 bp, Artificial Sequence
  ENSG00000117394_7 (sequence is synthesized)
cgagagtccccgcttcctgctcatcaaccgcaacgaggagaaccgggccaagagtgtgctaaagaagctgcgcgggacagctgacgtgacccatgacctgcaggagatgaaggaagagag

SEQ ID NO: 221706 - DNA, 120 bp, Artificial Sequence
  ENSG00000117394_8 (sequence is synthesized)
tcggcagatgatgcgggagaagaaggtcaccatcctggagctgttccgctcccccgcctaccgccagcccatcctcatcgctgtggtgctgcagctgtcccagcagctgtctggcatcaa

SEQ ID NO: 221707 - DNA, 120 bp, Artificial Sequence
  ENSG00000117394_9 (sequence is synthesized)
cgctgtcttctattactccacgagcatcttcgagaaggcgggggtgcagcagcctgtgtatgccaccattggctccggtatcgtcaacacggccttcactgtcgtgtcgctgtttgtggt

SEQ ID NO: 221708 - DNA, 120 bp, Artificial Sequence
  ENSG00000117394_10 (sequence is synthesized)
ggagcgagcaggccggcggaccctgcacctcataggcctcgctggcatggcgggttgtgccatactcatgaccatcgcgctagcactgctggagcagctaccctggatgtcctatctgag

SEQ ID NO: 221709 - DNA, 120 bp, Artificial Sequence
  ENSG00000117394_11 (sequence is synthesized)
catcgtggccatctttggctttgtggccttctttgaagtgggtcctggccccatcccatggttcatcgtggctgaactcttcagccagggtccacgtccagctgccattgccgttgcagg

SEQ ID NO: 221710 - DNA, 120 bp, Artificial Sequence
  ENSG00000117394_12 (sequence is synthesized)
cttctccaactggacctcaaatttcattgtgggcatgtgcttccagtatgtggagcaactgtgtggtccctacgtcttcatcatcttcactgtgctcctggttctgttcttcatcttcac

SEQ ID NO: 221711 - DNA, 120 bp, Artificial Sequence
  ENSG00000117394_13 (sequence is synthesized)
ctacttcaaagttcctgagactaaaggccggaccttcgatgagatcgcttccggcttccggcaggggggagccagccaaagtgacaagacacccgaggagctgttccatcccctgggggc

SEQ ID NO: 221712 - DNA, 120 bp, Artificial Sequence
  ENSG00000117394_14 (sequence is synthesized)
attcccaagtgtgagtcgccccagatcaccagcccggcctgctcccagcagccctaaggatctctcaggagcacaggcagctggatgagacttccaaacctgacagatgtcagccgagcc

SEQ ID NO: 221713 - DNA, 120 bp, Artificial Sequence
  ENSG00000117394_15 (sequence is synthesized)
gggcctggggctcctttctccagccagcaatgatgtccagaagaatattcaggacttaacggctccaggattttaacaaaagcaagactgttgctcaaatctattcagacaagcaacagg

SEQ ID NO: 221714 - DNA, 120 bp, Artificial Sequence
  ENSG00000117394_16 (sequence is synthesized)
ttttataatttttttattactgattttgttatttttatatcagcctgagtctcctgtgcccacatcccaggcttcaccctgaatggttccatgcctgagggtggagactaagccctgtcg

SEQ ID NO: 221715 - DNA, 120 bp, Artificial Sequence
  ENSG00000117394_17 (sequence is synthesized)
agacacttgccttcttcacccagctaatctgtagggctggacctatgtcctaaggacacactaatcgaactatgaactacaaagcttctatcccaggaggtggctatggccacccgttct

SEQ ID NO: 221716 - DNA, 120 bp, Artificial Sequence
  ENSG00000117394_18 (sequence is synthesized)
gctggcctggatctccccactctaggggtcaggctccattaggatttgccccttcccatctcttcctacccaaccactcaaattaatctttctttacctgagaccagttgggagcactgg

SEQ ID NO: 221717 - DNA, 120 bp, Artificial Sequence
  ENSG00000117394_19 (sequence is synthesized)
agtgcagggaggagaggggaagggccagtctgggctgccgggttctagtctcctttgcactgagggccacactattaccatgagaagagggcctgtgggagcctgcaaactcactgctca

SEQ ID NO: 221718 - DNA, 120 bp, Artificial Sequence
  ENSG00000117394_20 (sequence is synthesized)
agaagacatggagactcctgccctgttgtgtatagatgcaagatatttatatatatttttggttgtcaatattaaatacagacactaagttatagtatatctggacaagccaacttgtaa

SEQ ID NO: 221719 - DNA, 120 bp, Artificial Sequence
  ENSG00000117394_21 (sequence is synthesized)
atacaccacctcactcctgttacttacctaaacagatataaatggctggtttttagaaacatggttttgaaatgcttgtggattgagggtaggaggtttggatgggagtgagacagaagt

SEQ ID NO: 221720 - DNA, 120 bp, Artificial Sequence
  ENSG00000117394_22 (sequence is synthesized)
aagtggggttgcaaccactgcaacggcttagacttcgactcaggatccagtcccttacacgtacctctcatcagtgtcctcttgctcaaaaatctgtttgatccctgttacccagagaat

SEQ ID NO: 221721 - DNA, 120 bp, Artificial Sequence
  ENSG00000117394_23 (sequence is synthesized)
atatacattctttatcttgacattcaaggcatttctatcacatatttgatagttggtgttcaaaaaaacactagttttgtgccagccgtgatgctcaggcttgaaatgcattattttgaa

SEQ ID NO: 221722 - DNA, 120 bp, Artificial Sequence
  ENSG00000117394_24 (sequence is synthesized)
tgtgaagtaaatactgtacctttattggacaggctcaaagaggttatgtgcctgaagtcgcacagtgaataagctaaaacacctgcttttaacaatggtaccatacaaccactactccat

SEQ ID NO: 221723 - DNA, 120 bp, Artificial Sequence
  ENSG00000117394_25 (sequence is synthesized)
taactccacccacctcctgcacccctccccacacacacaaaatgaaccacgttctttgtatgggcccaatgagctgtcaagctgccctgtgttcatttcatttggaattgccccctctgg

SEQ ID NO: 221724 - DNA, 120 bp, Artificial Sequence
  ENSG00000117394_26 (sequence is synthesized)
ttcctctgtatactactgcttcatctctaaagacagctcatcctcctccttcacccctgaatttccagagcacttcatctgctccttcatcacaagtccagttttctgccactagtctga

SEQ ID NO: 221725 - DNA, 120 bp, Artificial Sequence
  ENSG00000117394_27 (sequence is synthesized)
atttcatgagaagatgccgatttggttcctgtgggtcctcagcactattcagtacagtgcttgatgcacagcaggcactcagaaaatactggaggaaataaaacaccaaagatatttgtc

SEQ ID NO: 221726 - DNA, 120 bp, Artificial Sequence
  ENSG00000117394_28 (sequence is synthesized)
ccccctgaccagtgaggatgccccctcccatctagggtactctgcgtctaaggatgaattccagtgtaattttctctcttctgtaggtttatttatggaagattggacctgttcatacat

SEQ ID NO: 221727 - DNA, 120 bp, Artificial Sequence
  ENSG00000117394_29 (sequence is synthesized)
aaccacagtgttgcattgtggggttaccatgtggtctgacacttccttgcatgaactaccctcactccagccctggacagtccagggcctagcaggcagtgtgtggggcctaccaggtcc

SEQ ID NO: 221728 - DNA, 120 bp, Artificial Sequence
  ENSG00000117394_30 (sequence is synthesized)
tggcatccaagctgtgtccaataaagttcttagatgtgactggaaaaaaaattggattaaaaaaaagcttcagaagttacagagccaactacagagaagcataataaatgaaagagtgtc

SEQ ID NO: 221729 - DNA, 120 bp, Artificial Sequence
  ENSG00000117394_31 (sequence is synthesized)
gtgcccagcagggcagagtttctcttccgcccagcccccacagccttgcagaggacaactatggtacacaggtccagagaacacagcaccatggcctcccagttgacagcaagatgactt

SEQ ID NO: 221730 - DNA, 120 bp, Artificial Sequence
  ENSG00000117394_32 (sequence is synthesized)
gactcttctcagtccctttcttctcactctaggcttccaaccacagggcccgccttcccccaacatgccgcaggctgttatgcacagtaccctctctccaggaggcttccccttccctgt

SEQ ID NO: 221731 - DNA, 120 bp, Artificial Sequence
  ENSG00000117394_33 (sequence is synthesized)
caacgaggagaaccgggccaagagtggagatgaaggaagagagtcggcagatgatgcgggagaagaaggtcaccatcctggagctgttccgctcccccgcctaccgccagcccatcctca

SEQ ID NO: 221732 - DNA, 120 bp, Artificial Sequence
  ENSG00000117394_34 (sequence is synthesized)
ggcttatggacaccagcctgctctgttgcacatcacacatgcccacagtctcacgccaccacctgaattagagtcatttatatgaacgcactgtactgtctgcctctccagccagttttc

SEQ ID NO: 221733 - DNA, 120 bp, Artificial Sequence
  ENSG00000117394_35 (sequence is synthesized)
tggccctgatcatgtcagagactcttctcttgctttggaatcagggtggcagaattctagaatctcaggtcccacagaatcctggggtcttgtataggccctcttgaccaaccccccacc

SEQ ID NO: 221734 - DNA, 120 bp, Artificial Sequence
  ENSG00000117395_0 (sequence is synthesized)
gcgattcggtggcacgtggagccacggcgtgggagtagggggctgaaggcaggcagcagcggccagggccgccctctgctagccgcttgggtctcgggataccccgtttcttcctgtagg

SEQ ID NO: 221735 - DNA, 120 bp, Artificial Sequence
  ENSG00000117395_1 (sequence is synthesized)
tgtgggacgtgcgtgcggcgagatggacactcccccgctctcggattcggagtcggaatccgatgaatcccttgtcacagacagagagttgcaggatgcgttttcccgagggcttctgaa

SEQ ID NO: 221736 - DNA, 120 bp, Artificial Sequence
  ENSG00000117395_2 (sequence is synthesized)
gccaggcctcaatgtcgtgctagaggggccgaagaaggccgtgaacgacgtgaatggcctgaagcaatgtttggcagaattcaagcgggatctggaatgggttgaaaggctcgatgtgac

SEQ ID NO: 221737 - DNA, 120 bp, Artificial Sequence
  ENSG00000117395_3 (sequence is synthesized)
actgggtccggtaccggagatcggtggatctgaggcgccagcacctcagaacaaggaccagaaagctgttgatccagaagacgacttccagcgagagatgagtttctatcgccaagccca

SEQ ID NO: 221738 - DNA, 120 bp, Artificial Sequence
  ENSG00000117395_4 (sequence is synthesized)
ggccgcagtgcttgcagtcttaccccgcctccatcagctcaaagtccctacgaagcgacccactgattattttgcggaaatggccaaatctgatctgcagatgcagaagattcgacagaa

SEQ ID NO: 221739 - DNA, 120 bp, Artificial Sequence
  ENSG00000117395_5 (sequence is synthesized)
tgcagactaaacaggctgccatggagaggtctgaaaaagctaagcaactgcgagcacttaggaaatacgggaagaaggtgcaaacggaggttcttcagaagaggcagcaggagaaagccc

SEQ ID NO: 221740 - DNA, 120 bp, Artificial Sequence
  ENSG00000117395_6 (sequence is synthesized)
atatgatgaatgctattaagaaatatcagaaaggcttctctgataaactggatttccttgagggagatcagaaacctctggcacagcgcaagaaggcaggagccaaaggccagcagatga

SEQ ID NO: 221741 - DNA, 120 bp, Artificial Sequence
  ENSG00000117395_7 (sequence is synthesized)
ggaaggggcccagtgctaaacgacggtataaaaaccagaagtttggttttggtggaaagaagaaaggctcaaagtggaacactcgggagagctatgatgatgtatctagcttccgggcca

SEQ ID NO: 221742 - DNA, 120 bp, Artificial Sequence
  ENSG00000117395_8 (sequence is synthesized)
agacagctcatggcagaggcctcaagaggcctggcaagaaagggtcaaataagagacctggaaaacgaacaagagagaagatgaagaacagaacacactaaatagcatctttgaatacaa

SEQ ID NO: 221743 - DNA, 120 bp, Artificial Sequence
  ENSG00000117395_9 (sequence is synthesized)
agaaccaagaaaaaggaatgaagactcgcaatttcacgacacactttgatcccttctgttggtgtcatgttgtaaacatttctttcaataaactaaagaaaaattattaaaggaacacat

SEQ ID NO: 221744 - DNA, 120 bp, Artificial Sequence
  ENSG00000117395_10 (sequence is synthesized)
acctttggttaaatagtctagactaaaagattgagaagttactttccattgctatctattgataatttagacattgagttcaaattgccttcattttatgataaataatgatttaactga

SEQ ID NO: 221745 - DNA, 120 bp, Artificial Sequence
  ENSG00000117395_11 (sequence is synthesized)
cctcccccggggtcctcctccgcgccaccccacccccgcggctcctttttctgccttttcctttgtaccctcactgctaccagctccttctggcgacccccaggtaccccctcccacctt

SEQ ID NO: 221746 - DNA, 120 bp, Artificial Sequence
  ENSG00000117395_12 (sequence is synthesized)
tcgtttctctctgggtcagcagaccacgcatgtatccagaggcgctacctgtagggatcctaagcaacccggacactttcaaacgccgtagcggttcctatagcaacgacaaaccggaag

SEQ ID NO: 221747 - DNA, 120 bp, Artificial Sequence
  ENSG00000117395_13 (sequence is synthesized)
agaatgaagccacggacccttgcgtcacaagcacctcttcggcaaagcccacctccctctctcgcttgattccccggccatccttatcaaagaccttccaggttcaagcgattctcctgc

SEQ ID NO: 221748 - DNA, 120 bp, Artificial Sequence
  ENSG00000117395_14 (sequence is synthesized)
ctgaaggaaatataatgatctgttcatcgaagtagaagatattgttggccacgtgggatcgaagaccaaaaacatgcagcgtctgagctaccacggctgacatgatctcccgccaaacag

SEQ ID NO: 221749 - DNA, 120 bp, Artificial Sequence
  ENSG00000117395_15 (sequence is synthesized)
ggaaagatgcaccctgcgcctcgccaagagggtcaattacctgtctgggtattggggattagcactttgtcccttcgcctaacagcctgtgcttgggaaagacaaactcagagttccctt

SEQ ID NO: 221750 - DNA, 120 bp, Artificial Sequence
  ENSG00000117395_16 (sequence is synthesized)
ggaactgatcatcaaagccagtagacaagatttgactctggaggtgacgtctgagccaataggtatttggagtctggagaaaaagccatgctaataaatttctgaacttggaagtcaaaa

SEQ ID NO: 221751 - DNA, 120 bp, Artificial Sequence
  ENSG00000117395_17 (sequence is synthesized)
ctttagagtagtcattctcttaaactatttttagcaacacccctcccctttttaaaaactagtatacggctacatttcttttagatactaaatcagtgagacagtttttgtttgtttgtt

SEQ ID NO: 221752 - DNA, 120 bp, Artificial Sequence
  ENSG00000117395_18 (sequence is synthesized)
cttgctaatggaggtcagattttgagagtccttctgagcttggataactcatgattggcggtgaaaaggaacgtaaggcctcctccttcacctcattacacattttgtcctacgattctc

SEQ ID NO: 221753 - DNA, 120 bp, Artificial Sequence
  ENSG00000117395_19 (sequence is synthesized)
agtgttctttggagtccggggaagtttggcctttaaaaatcaaactgccatggacactgctttacccaaaattttggttcacattcttcactggattaactattggggcaaacaacgtat

SEQ ID NO: 221754 - DNA, 120 bp, Artificial Sequence
  ENSG00000117395_20 (sequence is synthesized)
aaccatgtaaaaccagtacgcttgtattggcatttcatggctagagttctaagtcacaagcacctcttcggcaaagcccacctccctctctcgcttgattccccggccatccttatcaaa

SEQ ID NO: 221755 - DNA, 120 bp, Artificial Sequence
  ENSG00000117395_21 (sequence is synthesized)
tctcgcttgattccccggccatccttatcaaagaccttccaggtgaacaggcagccatcctcagcagcagtcagcaggaactgatcatcaaagaatcttgctctgttgcccaggctggag

SEQ ID NO: 221756 - DNA, 120 bp, Artificial Sequence
  ENSG00000117395_22 (sequence is synthesized)
cagtctcccgagtagctgggactacagaaacttgcaaaaatagcacagagagagtggacttctggaatggcacggcaacaaaattccctacggcagcacccaaaggcttgaaattagcca

SEQ ID NO: 221757 - DNA, 120 bp, Artificial Sequence
  ENSG00000117395_23 (sequence is synthesized)
caaaggcttgaaattagccattccaagtgtgtccaaaaaactaaaggaaaccatgattaaacaagtaaaggtagaaatgatatgcatcaaatagagaagaataaaaggatcccatcaata

SEQ ID NO: 221758 - DNA, 120 bp, Artificial Sequence
  ENSG00000117395_24 (sequence is synthesized)
tagggatagaactgtaagaaaatagaaattctagagttaaaaactacaataactgaaatgaaaaatccactagaggtgctcaagaatagatctgaactggcagaagaattagtgaacttt

SEQ ID NO: 221759 - DNA, 120 bp, Artificial Sequence
  ENSG00000117395_25 (sequence is synthesized)
aaagaggggaaattagtaagtctgcactcagaataagcctaggagtagagagagcggcttcttttgactaagaatagctaggagattcttcctgtttgagagaagagctctttggtccac

SEQ ID NO: 221760 - DNA, 120 bp, Artificial Sequence
  ENSG00000117395_26 (sequence is synthesized)
ggtcacgatccaaaatccactttatgggctaatttgaaatattcatgttaaaactttttgtgcatgcttcagttattaggaaaacaaacaaacaaacattgcttatgggatgttcttgtg

SEQ ID NO: 221761 - DNA, 120 bp, Artificial Sequence
  ENSG00000117399_0 (sequence is synthesized)
cggtcggaactgctccggagggcacgggctccgtaggcaccaactgcaaggacccctccccctgcgggcgctcccatggcacagttcgcgttcgagagtgacctgcactcgctgcttcag

SEQ ID NO: 221762 - DNA, 120 bp, Artificial Sequence
  ENSG00000117399_1 (sequence is synthesized)
ctggatgcacccatccccaatgcaccccctgcgcgctggcagcgcaaagccaaggaagccgcaggcccggccccctcacccatgcgggccgccaaccgatcccacagcgccggcaggact

SEQ ID NO: 221763 - DNA, 120 bp, Artificial Sequence
  ENSG00000117399_2 (sequence is synthesized)
ccgggccgaactcctggcaaatccagttccaaggttcagaccactcctagcaaacctggcggtgaccgctatatcccccatcgcagtgctgcccagatggaggtggccagcttcctcctg

SEQ ID NO: 221764 - DNA, 120 bp, Artificial Sequence
  ENSG00000117399_3 (sequence is synthesized)
agcaaggagaaccagcctgaaaacagccagacgcccaccaagaaggaacatcagaaagcctgggctttgaacctgaacggttttgatgtagaggaagccaagatccttcggctcagtgga

SEQ ID NO: 221765 - DNA, 120 bp, Artificial Sequence
  ENSG00000117399_4 (sequence is synthesized)
aaaccacaaaatgcgccagagggttatcagaacagactgaaagtactctacagccaaaaggccactcctggctccagccggaagacctgccgttacattccttccctgccagaccgtatc

SEQ ID NO: 221766 - DNA, 120 bp, Artificial Sequence
  ENSG00000117399_5 (sequence is synthesized)
ctggatgcgcctgaaatccgaaatgactattacctgaaccttgtggattggagttctgggaatgtactggccgtggcactggacaacagtgtgtacctgtggagtgcaagctctggtgac

SEQ ID NO: 221767 - DNA, 120 bp, Artificial Sequence
  ENSG00000117399_6 (sequence is synthesized)
cagcagtgctgaggtgcagctatgggatgtgcagcagcagaaacggcttcgaaatatgaccagtcactctgcccgagtgggctccctaagctggaacagctatatcctgtccagtggttc

SEQ ID NO: 221768 - DNA, 120 bp, Artificial Sequence
  ENSG00000117399_7 (sequence is synthesized)
acgttctggccacatccaccaccatgatgttcgggtagcagaacaccatgtggccacactgagtggccacagccaggaagtgtgtgggctgcgctgggccccagatggacgacatttggc

SEQ ID NO: 221769 - DNA, 120 bp, Artificial Sequence
  ENSG00000117399_8 (sequence is synthesized)
cagtggtggtaatgataacttggtcaatgtgtggcctagtgctcctggagagggtggctgggttcctctgcagacattcacccagcatcaaggggctgtcaaggccgtagcatggtgtcc

SEQ ID NO: 221770 - DNA, 120 bp, Artificial Sequence
  ENSG00000117399_9 (sequence is synthesized)
ctggcagtccaatgtcctggcaacaggagggggcaccagtgatcgacacattcgcatctggaatgtgtgctctggggcctgtctgagtgccgtggatgcccattcccaggtgtgctccat

SEQ ID NO: 221771 - DNA, 120 bp, Artificial Sequence
  ENSG00000117399_10 (sequence is synthesized)
cctctggtctccccattacaaggagctcatctcaggccatggctttgcacagaaccagctagttatttggaagtacccaaccatggccaaggtggctgaactcaaaggtcacacatcccg

SEQ ID NO: 221772 - DNA, 120 bp, Artificial Sequence
  ENSG00000117399_11 (sequence is synthesized)
ggtcctgagtctgaccatgagcccagatggggccacagtggcatccgcagcagcagatgagaccctgaggctatggcgctgttttgagttggaccctgcgcggcggcgggagcgggagaa

SEQ ID NO: 221773 - DNA, 120 bp, Artificial Sequence
  ENSG00000117399_12 (sequence is synthesized)
ggccagtgcagccaaaagcagcctcatccaccaaggcatccgctgaagaccaacccatcacctcagttgttttttatttttctaataaagtcatgtctcccttcatgttttttttttaaa

SEQ ID NO: 221774 - DNA, 120 bp, Artificial Sequence
  ENSG00000117399_13 (sequence is synthesized)
ggtggtggggctgagccgaggtggggccgtggccagggggagggggtgctaggccggaaggggctgcagccgagggtggccctgattttgtggccggccaggagcgaaggggtccctttc

SEQ ID NO: 221775 - DNA, 120 bp, Artificial Sequence
  ENSG00000117399_14 (sequence is synthesized)
gtagaggaagccaagatccttcggctcagtggaaaaccacaaaatgcgccagagggtaagacccgaagttcctggttcctggagggaggtgtcagttcatctccagggctgagcacagat

SEQ ID NO: 221776 - DNA, 120 bp, Artificial Sequence
  ENSG00000117400_0 (sequence is synthesized)
atgccctcctgggccctcttcatggtcacctcctgcctcctcctggcccctcaaaacctggcccaagtcagcagccaagatgtctccttgctggcatcagactcagagcccctgaagtgt

SEQ ID NO: 221777 - DNA, 120 bp, Artificial Sequence
  ENSG00000117400_1 (sequence is synthesized)
ttctcccgaacatttgaggacctcacttgcttctgggatgaggaagaggcagcgcccagtgggacataccagctgctgtatgcctacccgcgggagaagccccgtgcttgccccctgagt

SEQ ID NO: 221778 - DNA, 120 bp, Artificial Sequence
  ENSG00000117400_2 (sequence is synthesized)
tcccagagcatgccccactttggaacccgatacgtgtgccagtttccagaccaggaggaagtgcgtctcttctttccgctgcacctctgggtgaagaatgtgttcctaaaccagactcgg

SEQ ID NO: 221779 - DNA, 120 bp, Artificial Sequence
  ENSG00000117400_3 (sequence is synthesized)
actcagcgagtcctctttgtggacagtgtaggcctgccggctccccccagtatcatcaaggccatgggtgggagccagccaggggaacttcagatcagctgggaggagccagctccagaa

SEQ ID NO: 221780 - DNA, 120 bp, Artificial Sequence
  ENSG00000117400_4 (sequence is synthesized)
atcagtgatttcctgaggtacgaactccgctatggccccagagatcccaagaactccactggtcccacggtcatacagctgattgccacagaaacctgctgccctgctctgcagaggcct

SEQ ID NO: 221781 - DNA, 120 bp, Artificial Sequence
  ENSG00000117400_5 (sequence is synthesized)
cactcagcctctgctctggaccagtctccatgtgctcagcccacaatgccctggcaagatggaccaaagcagacctccccaagtagagaagcttcagctctgacagcagagggtggaagc

SEQ ID NO: 221782 - DNA, 120 bp, Artificial Sequence
  ENSG00000117400_6 (sequence is synthesized)
tgcctcatctcaggactccagcctggcaactcctactggctgcagctgcgcagcgaacctgatgggatctccctcggtggctcctggggatcctggtccctccctgtgactgtggacctg

SEQ ID NO: 221783 - DNA, 120 bp, Artificial Sequence
  ENSG00000117400_7 (sequence is synthesized)
cacagcagggcacggtgctgccccagagacaggtaccccatctgggagaactgcgaagaggaagagaaaacaaatccaggactacagaccccacagttctctcgctgccacttcaagtca

SEQ ID NO: 221784 - DNA, 120 bp, Artificial Sequence
  ENSG00000117400_8 (sequence is synthesized)
cgaaatgacagcattattcacatccttgtggaggtgaccacagccccgggtactgttcacagctacctgggctcccctttctggatccaccaggctgtgcgcctccccaccccaaacttg

SEQ ID NO: 221785 - DNA, 120 bp, Artificial Sequence
  ENSG00000117400_9 (sequence is synthesized)
cactggagggagatctccagtgggcatctggaattggagtggcagcacccatcgtcctgggcagcccaagagacctgttatcaactccgatacacaggagaaggccatcaggactggaag

SEQ ID NO: 221786 - DNA, 120 bp, Artificial Sequence
  ENSG00000117400_10 (sequence is synthesized)
gtgctggagccgcctctcggggcccgaggagggaccctggagctgcgcccgcgatctcgctaccgtttacagctgcgcgccaggctcaacggccccacctaccaaggtccctggagctcg

SEQ ID NO: 221787 - DNA, 120 bp, Artificial Sequence
  ENSG00000117400_11 (sequence is synthesized)
tggtcggacccaactagggtggagaccgccaccgagaccgcctggatctccttggtgaccgctctgcatctagtgctgggcctcagcgccgtcctgggcctgctgctgctgaggtggcag

SEQ ID NO: 221788 - DNA, 120 bp, Artificial Sequence
  ENSG00000117400_12 (sequence is synthesized)
tttcctgcacactacaggagactgaggcatgccctgtggccctcacttccagacctgcaccgggtcctaggccagtaccttagggacactgcagccctgagcccgcccaaggccacagtc

SEQ ID NO: 221789 - DNA, 120 bp, Artificial Sequence
  ENSG00000117400_13 (sequence is synthesized)
tcagatacctgtgaagaagtggaacccagcctccttgaaatcctccccaagtcctcagagaggactcctttgcccctgtgttcctcccaggcccagatggactaccgaagattgcagcct

SEQ ID NO: 221790 - DNA, 120 bp, Artificial Sequence
  ENSG00000117400_14 (sequence is synthesized)
tcttgcctggggaccatgcccctgtctgtgtgcccacccatggctgagtcagggtcctgctgtaccacccacattgccaaccattcctacctaccactaagctattggcagcagccttga

SEQ ID NO: 221791 - DNA, 120 bp, Artificial Sequence
  ENSG00000117400_15 (sequence is synthesized)
aacaggcattcttggttcgctctgtgaccccagatctccgtccaccgcccgtgcgcacctacggcttcgccacttcctgcacgtcacctctgggactcgccgcggctccttacactctaa

SEQ ID NO: 221792 - DNA, 120 bp, Artificial Sequence
  ENSG00000117400_16 (sequence is synthesized)
cctggatctccttggtgaccgctctgcatctagtgctgggcctcagcgccgtcctgggcctgctgctgctgaggtggcagtttcctgcacactacagctcccaggatatagtccaggctc

SEQ ID NO: 221793 - DNA, 120 bp, Artificial Sequence
  ENSG00000117400_17 (sequence is synthesized)
cctatgatgacaagcgaggctctgcaaaatcggcccctgccagcaagcacttcagcctgttctaccctgtgcatcagcctttccaaactggttttctccacaagagactgaggcatgccc

SEQ ID NO: 221794 - DNA, 120 bp, Artificial Sequence
  ENSG00000117407_0 (sequence is synthesized)
actggccgctgagagaagaatcgggtggagcagagagcagctgctgcagggcagacagccggacccccaaatctgcacgtaccagcagtcagccgccccacgcagggaccggcttacccc

SEQ ID NO: 221795 - DNA, 120 bp, Artificial Sequence
  ENSG00000117407_1 (sequence is synthesized)
tcgctccccgccctcactcactttctcccgccctcggcccggcctcccagctctctacttcgcgagtctacaaactcaactcccggtttccgtgcctctccaccgctcgagttctctact

SEQ ID NO: 221796 - DNA, 120 bp, Artificial Sequence
  ENSG00000117407_2 (sequence is synthesized)
ctccatatccgaggggcccctcccagcatctacccccctcccaacctcgggggacctagccaagctaggggggactggatccgacgggtggagcagccaggtgagccccgaaaggtgggg

SEQ ID NO: 221797 - DNA, 120 bp, Artificial Sequence
  ENSG00000117407_3 (sequence is synthesized)
cggggcaggggcgctcccagccccaccccgggatctggtgacgctggggctggaatttgacaccggacggctgcggcggcgggcaggaggctgctgagggatggagttgggcccggcccc

SEQ ID NO: 221798 - DNA, 120 bp, Artificial Sequence
  ENSG00000117407_4 (sequence is synthesized)
cagacaaggcccgggggctccgccagcagcaggtccctcgggccccagccctcgctgccacccgggcctggagccccacacccgagggtgcagactggctgccaaggccacacttttggc

SEQ ID NO: 221799 - DNA, 120 bp, Artificial Sequence
  ENSG00000117407_5 (sequence is synthesized)
taaaagaggcactgccaggtgtacagtcctgggcatgcgctgtttgagcttcgggggagagcccagcactggtccccggaaaggtgcctagaagaacaaggtgcaggaccccgtgctgcc

SEQ ID NO: 221800 - DNA, 120 bp, Artificial Sequence
  ENSG00000117407_6 (sequence is synthesized)
tcaacaggagggtgggggaacagctcaacaatggctgatgggcgctcctggtgttgatagagatggaacttggacttggaggcctctccacgctgtcccactgcccctggcctaggcagc

SEQ ID NO: 221801 - DNA, 120 bp, Artificial Sequence
  ENSG00000117407_7 (sequence is synthesized)
aggctccacttggtctctccgcgcagcctgccctgtggcccaccctggccgctctggctctgctgagcagcgtcgcagaggcctccctgggctccgcgccccgcagccctgccccccgcg

SEQ ID NO: 221802 - DNA, 80 bp, Artificial Sequence
  ENSG00000117407_8 (sequence is synthesized)
ggtgcagtggaagagcccggcggccgccgccgcagccttctcggcccgcgcccccgccgcctgcacccccatctgctctt

SEQ ID NO: 221803 - DNA, 80 bp, Artificial Sequence
  ENSG00000117407_9 (sequence is synthesized)
gcgcggggctgccgcctgcgctcgcagctggtgccggtgcgcgcgctcggcctgggccaccgctccgacgagctggtgcg

SEQ ID NO: 221804 - DNA, 120 bp, Artificial Sequence
  ENSG00000117407_10 (sequence is synthesized)
cgctccgacgagctggtgcgtttccgcttctgcagcggctcctgccgccgcgcgcgctctccacacgacctcagcctggccagcctactgggcgccggggccctgcgaccgcccccgggc

SEQ ID NO: 221805 - DNA, 120 bp, Artificial Sequence
  ENSG00000117407_11 (sequence is synthesized)
tcccggcccgtcagccagccctgctgccgacccacgcgctacgaagcggtctccttcatggacgtcaacagcacctggagaaccgtggaccgcctctccgccaccgcctgcggctgcctg

SEQ ID NO: 221806 - DNA, 120 bp, Artificial Sequence
  ENSG00000117407_12 (sequence is synthesized)
ggctgagggctcgctccagggctttgcagactggacccttaccggtggctcttcctgcctgggaccctcccgcagagtcccactagccagcggcctcagccagggacgaaggcctcaaag

SEQ ID NO: 221807 - DNA, 120 bp, Artificial Sequence
  ENSG00000117407_13 (sequence is synthesized)
ctgagaggcccctgccggtgggtgatggatatcatccccgaacaggtgaagggacaactgactagcagccccagagccctcaccctgcggatcccagcctaaaagacaccagagacctca

SEQ ID NO: 221808 - DNA, 120 bp, Artificial Sequence
  ENSG00000117407_14 (sequence is synthesized)
gctatggagcccttcggacccacttctcacagactctggcactggccaggcctcgaacctgggacccctcctctgatgaacactacagtggctgaggcatcagcccccgcccaggccctg

SEQ ID NO: 221809 - DNA, 120 bp, Artificial Sequence
  ENSG00000117407_15 (sequence is synthesized)
tagggacagcatttgaaggacacatattgcagttgcttggttgaaagtgcctgtgctggaactggcctgtactcactcatgggagctggcccctatttattatttctaagttatttattt

SEQ ID NO: 221810 - DNA, 120 bp, Artificial Sequence
  ENSG00000117407_16 (sequence is synthesized)
ctctgagcttctctgagccttgtttgctcatctggaaaaaggggattaaaccatttacctcatggagttgtgaaagaatagctgcaaagcacctaacacatagtaaggttcccagtgcag

SEQ ID NO: 221811 - DNA, 120 bp, Artificial Sequence
  ENSG00000117407_17 (sequence is synthesized)
aggtgtgggagggaaaatggtcagggagggaccaggtgaatgggaggaggagcgggacttctctgaatggtcggtgcactcaggtgattcctcccctgggctcccagaggcagcaaaccc

SEQ ID NO: 221812 - DNA, 120 bp, Artificial Sequence
  ENSG00000117407_18 (sequence is synthesized)
attatactggaacctaggcccttcctgagtttcccctccacacagctaggagcccatgcccggcctgatctcagcccgaggacagcccctccttgaggtccttcctccccaagcccacct

SEQ ID NO: 221813 - DNA, 120 bp, Artificial Sequence
  ENSG00000117407_19 (sequence is synthesized)
gccgggtaggtgagagggcgagggggcggggcggggctggcccgggacaccgcgcgtgactgggtctcattccagggggacgcacggcccgctggtgcagtggaagagcccggcggccgc

SEQ ID NO: 221814 - DNA, 120 bp, Artificial Sequence
  ENSG00000117407_20 (sequence is synthesized)
gagggctcctaaggctgccctgcctgcctttccctccatcacggacaacagtcactggcctggctcggaggccttgattccacttagccaagaggcacacaccaggacctggaggacaac

SEQ ID NO: 221815 - DNA, 120 bp, Artificial Sequence
  ENSG00000117408_0 (sequence is synthesized)
gcttgtcttgtcagtcactggggcggaggcagcggctgtagcggggctgtagccgggcgttgagcacagcgcgggccaggccgaacggaagggacctgccacagcccctcaactccacgg

SEQ ID NO: 221816 - DNA, 120 bp, Artificial Sequence
  ENSG00000117408_1 (sequence is synthesized)
actcttcgccctagactagcggagctgcatctccgcgcttcgttggacgcctccgtaaccacgaagggctctctctctcccgtgaccctccagccccatgacctgttcatagcagccgag

SEQ ID NO: 221817 - DNA, 120 bp, Artificial Sequence
  ENSG00000117408_2 (sequence is synthesized)
agctcacccaggcgggggtgttgtgggtacaggccatcgaccctgtgacccctcaagagccagggactcggtttcccccgcaggcctccctcccctgtgactccctccacacagattctg

SEQ ID NO: 221818 - DNA, 120 bp, Artificial Sequence
  ENSG00000117408_3 (sequence is synthesized)
gggacagagctgttacctgccactaggatccccgcctgagagctcctcactgacggctccctcctcggagtccccttcattgggtctcctaagagcaccaattttggtctctggcaagcc

SEQ ID NO: 221819 - DNA, 120 bp, Artificial Sequence
  ENSG00000117408_4 (sequence is synthesized)
tcccacccccaaacgaggtggggaggcctcggcagccatgcccgccctgggccccccctcaccccaccactccctgggcacccaagccggggtctagcagggggccagcagccaaggggc

SEQ ID NO: 221820 - DNA, 120 bp, Artificial Sequence
  ENSG00000117408_5 (sequence is synthesized)
tggggcaggagacagatcagggcccacctccctgccagggagggagcaaagatggagcggcgggaggagcagccgggggctgcaggggctggagcagcaccagccttggacttcactgtg

SEQ ID NO: 221821 - DNA, 120 bp, Artificial Sequence
  ENSG00000117408_6 (sequence is synthesized)
gagaacgtggagaaggcgctgcaccagctctactatgatcccaacattgagaataagaacctggctcagaagtggctgatgcaggcccaggtctccccacaggcctggcacttcagctgg

SEQ ID NO: 221822 - DNA, 120 bp, Artificial Sequence
  ENSG00000117408_7 (sequence is synthesized)
cagctactgcagcccgacaaggtaccagagatccagtactttggggccagtgctcttcacatcaagatctctcgctactggagtgacatccccactgaccagtatgaaagcctaaaggca

SEQ ID NO: 221823 - DNA, 120 bp, Artificial Sequence
  ENSG00000117408_8 (sequence is synthesized)
cagctcttcacccagatcacccgctttgccagtggctccaagattgtactgactcggctgtgcgtggcactggcctcactggctctcagcatgatgcctgacgcttggccatgtgctgtg

SEQ ID NO: 221824 - DNA, 120 bp, Artificial Sequence
  ENSG00000117408_9 (sequence is synthesized)
gcagatatggtacgactcttccaggctgaggactcaccagtggatgggcagggccgctgcctagccctgttagagctgctgacagtgctgcctgaggagttccagaccagtcgcctaccc

SEQ ID NO: 221825 - DNA, 120 bp, Artificial Sequence
  ENSG00000117408_10 (sequence is synthesized)
cagtaccgcaaaggcctggtgcggaccagcctggcggtggaatgtggggctgtcttcccgctgctggagcagctgctacagcagcccagctcacccagctgtgtgcgtcagaaggtgctc

SEQ ID NO: 221826 - DNA, 120 bp, Artificial Sequence
  ENSG00000117408_11 (sequence is synthesized)
aagtgtttctccagctgggtgcagctggaggtgccgctgcaggactgtgaggcgctcattcaggctgcctttgctgctctgcaggactcggagctcttcgacagcagtgtggaggccatt

SEQ ID NO: 221827 - DNA, 120 bp, Artificial Sequence
  ENSG00000117408_12 (sequence is synthesized)
gtgaatgccatctcacagcctgatgcccagaggtacgtgaacacactcctgaaactcatcccgctggtgctgggtctgcaggaacaactgcggcaggcagtgcagaatggggacatggag

SEQ ID NO: 221828 - DNA, 120 bp, Artificial Sequence
  ENSG00000117408_13 (sequence is synthesized)
acctcccatggcatctgtcgcatcgctgtggccctgggcgagaaccactcccgggccttgctggaccaagtagagcactggcagagtttcctggcactcgtcaacatgattatgttctgc

SEQ ID NO: 221829 - DNA, 120 bp, Artificial Sequence
  ENSG00000117408_14 (sequence is synthesized)
acaggcatccctggccactatcctgtcaatgagaccaccagctccctaaccctcaccttctggtacacactgcaggatgatattctatcctttgaggcagagaagcaggctgtataccag

SEQ ID NO: 221830 - DNA, 120 bp, Artificial Sequence
  ENSG00000117408_15 (sequence is synthesized)
caggtgtaccggccagtctacttccagctggtggatgtgcttctgcacaaggcccagttcccttctgatgaggaatatggattctggtcctcagacgagaaggagcagttccgaatttac

SEQ ID NO: 221831 - DNA, 120 bp, Artificial Sequence
  ENSG00000117408_16 (sequence is synthesized)
tgggggccgagctgctcagcaacctctatgacaagctgggtcgtttgctcaccagctcagaggagccctactcctggcagcacacagaggccctcctctacggcttccaatccatcgcag

SEQ ID NO: 221832 - DNA, 120 bp, Artificial Sequence
  ENSG00000117408_17 (sequence is synthesized)
agaccattgacgtcaactattctgatgtggtgcctgggctcattggcctcatcccacggatcagcatcagcaacgtgcagctggcagacactgtcatgttcaccattggagctctgtctg

SEQ ID NO: 221833 - DNA, 120 bp, Artificial Sequence
  ENSG00000117408_18 (sequence is synthesized)
aatggctggctgaccaccccgtcatgatcaacagtgttctgcccttggtactgcatgccctaggcaatcctgagctgtctgtctcttctgtgtccaccctcaagaagatctgccgagagt

SEQ ID NO: 221834 - DNA, 120 bp, Artificial Sequence
  ENSG00000117408_19 (sequence is synthesized)
gcaagtatgacctgcctccctatgctgccaacattgtggctgtgtcccaggatgtgctgatgaaacagatccacaagacaagccagtgcatgtggctgatgcaggcgctgggcttcctgc

SEQ ID NO: 221835 - DNA, 120 bp, Artificial Sequence
  ENSG00000117408_20 (sequence is synthesized)
tgtcagctcttcaagtggaggagatccttaagaacctgcactcgcttatctcaccctatatccagcaactggagaagctggcagaggagatacccaatccctccaacaagctggccattg

SEQ ID NO: 221836 - DNA, 120 bp, Artificial Sequence
  ENSG00000117408_21 (sequence is synthesized)
ttcacatcttggggcttctctccaacctcttcaccacactggacatcagtcatcatgaggatgatcatgaaggccctgagcttcggaagctgccagtgccacagggacccaaccccgtgg

SEQ ID NO: 221837 - DNA, 120 bp, Artificial Sequence
  ENSG00000117408_22 (sequence is synthesized)
tggtggtgctgcagcaggtcttccagcttatccagaaggtgctgagcaaatggttgaatgatgcccaggttgtggaggcggtgtgcgctatctttgagaagtctgttaagacgctgctgg

SEQ ID NO: 221838 - DNA, 120 bp, Artificial Sequence
  ENSG00000117408_23 (sequence is synthesized)
atgactttgcccccatggtgccacagctgtgtgagatgctgggtcggatgtacagcaccatcccccaggcctctgctcttgacctcactcgacagctggtccacatctttgctcatgagc

SEQ ID NO: 221839 - DNA, 120 bp, Artificial Sequence
  ENSG00000117408_24 (sequence is synthesized)
ctgcccactttcccccaattgaggccctcttcctgctcgtcacctccgtcacactcactctcttccagcaagggcccagggatcatcctgatattgttgattcatttatgcaactcctgg

SEQ ID NO: 221840 - DNA, 120 bp, Artificial Sequence
  ENSG00000117408_25 (sequence is synthesized)
cacaggctctgaagcggaagccagatttgttcctgtgtgaacgattggatgtcaaagctgtgttccagtgtgctgtgctggccctcaagttccctgaggcacctactgtcaaggcctcct

SEQ ID NO: 221841 - DNA, 120 bp, Artificial Sequence
  ENSG00000117408_26 (sequence is synthesized)
gtggcttctttacagagctgctgcctcggtgtggggaagtagagtctgtgggaaaggtggtacaggaagacggtcgtatgctgctcatagcagtgctggaggccattgggggccaggcct

SEQ ID NO: 221842 - DNA, 120 bp, Artificial Sequence
  ENSG00000117408_27 (sequence is synthesized)
cccgcagcctcatggactgctttgccgatatcctgttcgccctgaacaagcactgcttcagcctcctgagcatgtggatcaaggaggccctgcagccacctggtttcccctctgcccgcc

SEQ ID NO: 221843 - DNA, 120 bp, Artificial Sequence
  ENSG00000117408_28 (sequence is synthesized)
tcagccctgaacagaaggataccttcagccagcagatccttcgcgagcgagtgaacaagaggcgggtgaaggagatggtgaaggagttcacactgctgtgccggggtctccatggcacag

SEQ ID NO: 221844 - DNA, 120 bp, Artificial Sequence
  ENSG00000117408_29 (sequence is synthesized)
attacacagctgactactgaggggtgcccccatcccatccaccccttctcttcatccttccctattcccaaagagtaaacctggaccctcactgctgtctctgcctcctttctgctgtca

SEQ ID NO: 221845 - DNA, 120 bp, Artificial Sequence
  ENSG00000117408_30 (sequence is synthesized)
ccaccacctaactgaaagcctgggtccagaaggcctgggggaaggatgggaggatgcttggacccaggccttgggagggaatggtgggaacatcctctagctcccaggttggaagagata

SEQ ID NO: 221846 - DNA, 120 bp, Artificial Sequence
  ENSG00000117408_31 (sequence is synthesized)
ctactgtagccaagccacctaggctggagcccttcagaatactgtcattgtccttggggcggggtggttgcagtagtgtcatcaacccccccatccccattaaattaatcccaacatgca

SEQ ID NO: 221847 - DNA, 120 bp, Artificial Sequence
  ENSG00000117408_32 (sequence is synthesized)
caaagctctaattgcaggtctgggctgagctccgtgtgagcagcagcagaggagtcccagcagccctgcctcggctacttgaactgaccgattggagccaggcctcttgaacccagcctc

SEQ ID NO: 221848 - DNA, 120 bp, Artificial Sequence
  ENSG00000117408_33 (sequence is synthesized)
agctgtggtcataaagacatcctccctgtctccttcccccaaacctagaaacctctgggacctcagacttgttcttctgtccactcacaggtcgcagacacaggtgctcaggtggtagga

SEQ ID NO: 221849 - DNA, 120 bp, Artificial Sequence
  ENSG00000117408_34 (sequence is synthesized)
aggattgctgtggggatcagctggctctcaaaaagcagcgctcactgtgatgtgcagtttggcttaggaactgtccagagggcagttaggcattcttgctgcagaagcggcggaaggggc

SEQ ID NO: 221850 - DNA, 120 bp, Artificial Sequence
  ENSG00000117408_35 (sequence is synthesized)
cttcacttcatctcttccccctcacccacagcagcactggctccttggtgtgtgtatggccgaagagggcctggacacagggtaccctgggtgaaagatggggctgaggctccaaggctc

SEQ ID NO: 221851 - DNA, 120 bp, Artificial Sequence
  ENSG00000117408_36 (sequence is synthesized)
ctgctgtacttttcttctttttgagcaggagctggagggtgcctcaggaatacaggagggacatgggaggagggctgttgggctgagggctccctgtctggctgccatctcttcttcctg

SEQ ID NO: 221852 - DNA, 120 bp, Artificial Sequence
  ENSG00000117408_37 (sequence is synthesized)
ctaccctgttcacaaactgggggtgcttaactccctctgtgaatcaacatgaagtcactgctggcaacctagagcctgcgagacatctggccctgatggagggggagggaaaggtgtctg

SEQ ID NO: 221853 - DNA, 120 bp, Artificial Sequence
  ENSG00000117408_38 (sequence is synthesized)
gaacccaaactttctgcattatgatccccacccccaacctctctcacgtacacctgcgtgttcatgtacacatacatgtacatagcatcccttgagctgtcctcacctgacctactgaac

SEQ ID NO: 221854 - DNA, 120 bp, Artificial Sequence
  ENSG00000117408_39 (sequence is synthesized)
tctgaggtggtccgggtcccccagagatggctgggtagctggttttggcagcctctacctgtgaggtgtgaagttgggggctggggtggcaggtgagtgggggggatggtccttggagct

SEQ ID NO: 221855 - DNA, 120 bp, Artificial Sequence
  ENSG00000117408_40 (sequence is synthesized)
ggcccacctccctgccagggagggagcaaagatggagcggcgggaggagcagccgggggctgcaggggctggagcagcaccagccttggacttcactgtggagaacgtggagaaggactc

SEQ ID NO: 221856 - DNA, 120 bp, Artificial Sequence
  ENSG00000117408_41 (sequence is synthesized)
ggggtactggggtaggctcctgggcttgggggcaggatccagggtcaggatccaggcagtataaaaggccttcatctgcttctcagggtggacatctcagacacgctcatgtatgtctat

SEQ ID NO: 221857 - DNA, 120 bp, Artificial Sequence
  ENSG00000117410_0 (sequence is synthesized)
agactgcgggacggacggtggacgctgggacgcgtttgtagctccggccccgccgttccgacccccgccgccgtcgccgccatgacggggctagcactgctctactccggggtcttcgtg

SEQ ID NO: 221858 - DNA, 120 bp, Artificial Sequence
  ENSG00000117410_1 (sequence is synthesized)
gccttctgggcctgcgcgctggccgtgggagtctgctacaccatttttgatttgggcttccgctttgatgtggcatggttcctgacggagacttcgcccttcatgtggtccaacctgggc

SEQ ID NO: 221859 - DNA, 120 bp, Artificial Sequence
  ENSG00000117410_2 (sequence is synthesized)
attggcctagctatctccctgtctgtggttggggcagcctggggcatctatattaccggctcctccatcattggtggaggagtgaaggcccccaggatcaagaccaagaacctggtcagc

SEQ ID NO: 221860 - DNA, 120 bp, Artificial Sequence
  ENSG00000117410_3 (sequence is synthesized)
atcatcttctgtgaggctgtggccatctacggcatcatcatggcaattgtcattagcaacatggctgagcctttcagtgccacagaccccaaggccatcggccatcggaactaccatgca

SEQ ID NO: 221861 - DNA, 120 bp, Artificial Sequence
  ENSG00000117410_4 (sequence is synthesized)
accgtaggcctgtctaacctcttctgtggagtctgcgtgggcatcgtgggcagtggggctgccctggccgatgctcagaaccccagcctctttgtaaagattctcatcgtggagatcttt

SEQ ID NO: 221862 - DNA, 120 bp, Artificial Sequence
  ENSG00000117410_5 (sequence is synthesized)
ggcagcgccattggcctctttggggtcatcgtcgcaattcttcagacctccagagtgaagatgggtgactagatgatatgtgtgggtggggccgtgcctcacttttatttattgctggtt

SEQ ID NO: 221863 - DNA, 120 bp, Artificial Sequence
  ENSG00000117410_6 (sequence is synthesized)
ttcctgggacagctggagctgtgtcccttagcctttcagaggcttggtgttcagggccctccctgcactcccctcttgctgcgtgttgatttggaggcactgcagtccaggccgagtcct

SEQ ID NO: 221864 - DNA, 120 bp, Artificial Sequence
  ENSG00000117410_7 (sequence is synthesized)
cagtgcggggagcaggctgctgctgctgactctgtgcagctgcgcacctgtgtcccccacctccaccctcaacccatcttcctagtgtttgtgaaataaacttggtatttgtctgggtca

SEQ ID NO: 221865 - DNA, 120 bp, Artificial Sequence
  ENSG00000117410_8 (sequence is synthesized)
tgatgtggcatggtaagggagggcagggggaggattccccttgaagcttcttccctgcagcctctcttcttttctctggtctgagtccctcccccacaccactgcctgcctgggacatgg

SEQ ID NO: 221866 - DNA, 120 bp, Artificial Sequence
  ENSG00000117410_9 (sequence is synthesized)
acctttgggaaatacgcggtcagttgttgcctgtagaactggtggtggggttgaagggggtttgaggggttaagattttgtgctccgcttccctgctagagctgaactgctttcttctct

SEQ ID NO: 221867 - DNA, 120 bp, Artificial Sequence
  ENSG00000117410_10 (sequence is synthesized)
ttggcgctgcctgtgtgtttgatctgacatactgtttctgacaagccaccttgtgggatgggatgttataggggaaagattgctggggacttactgggcaggaaggacggtttctttctc

SEQ ID NO: 221868 - DNA, 120 bp, Artificial Sequence
  ENSG00000117410_11 (sequence is synthesized)
ggccgtgggtgaggccgggtcctggcgggcgggagcagcatcgcggccgagctggccgggtcggaactcggcggggaagtggcctgcggggaatactggccccccgcgcgctctgcaccc

SEQ ID NO: 221869 - DNA, 120 bp, Artificial Sequence
  ENSG00000117410_12 (sequence is synthesized)
gccttctgggcctgcgcgctggccgtggctgtactgtcacctgggggcagcctgaggacgccccttcagggaggtggcccttcagctcggcagctactttaggttgaagaacttctctct

SEQ ID NO: 221870 - DNA, 120 bp, Artificial Sequence
  ENSG00000117410_13 (sequence is synthesized)
ttgtccccaacctagccttaccctccttctggagaagctgaagtgctctccttctctacctataactatagattcccccaaacagcttccacctcctcatttccatcttctggttttctc

SEQ ID NO: 221871 - DNA, 120 bp, Artificial Sequence
  ENSG00000117410_14 (sequence is synthesized)
ggggctctctatttttgtctctgatttggtgtcactgacaacagccctgttctttttcccccctttctaatgcgttgtatctgtatagcacttagtcctccctctttctgttctctcatt

SEQ ID NO: 221872 - DNA, 120 bp, Artificial Sequence
  ENSG00000117410_15 (sequence is synthesized)
ttatctgccatgcttttcatgtctccagtctgtatttgtgatctagactagaatggaattttgtctgtctatatcagtctgtcatggtgtgtttgactgtctctcggagctatgtgtatc

SEQ ID NO: 221873 - DNA, 120 bp, Artificial Sequence
  ENSG00000117410_16 (sequence is synthesized)
tccctctcacatgcctgtcagtaggacaccattgtctaaattgtgtgtgtctagtctgtctgacagtgtgtgagtttgtgactaaggatcagcctgagggtctgagtgtgactgtgggtg

SEQ ID NO: 221874 - DNA, 120 bp, Artificial Sequence
  ENSG00000117410_17 (sequence is synthesized)
cttgactgagttgattcttagtgactagctttatccatatgccacttctctccgtctgtcccacagcgtaactctgtggttgtctgtccctgtctgccttgtctgtcacagtgtgtccat

SEQ ID NO: 221875 - DNA, 120 bp, Artificial Sequence
  ENSG00000117410_18 (sequence is synthesized)
cctggttagtcatatatctcttgtggtctgtccatccaaccatgtgctagatgtcatcttctatcatttgtcactgccttacctattcctctgtccctgcctgatttctcctgttctttt

SEQ ID NO: 221876 - DNA, 120 bp, Artificial Sequence
  ENSG00000117410_19 (sequence is synthesized)
cccccgtcctgccactatcgctgtctcccctcgctcccacgtctcactgctgtcccccctttcttgctcctgaccggcccgctcggtcacaagccggctgctccggttcctcttttccca

SEQ ID NO: 221877 - DNA, 120 bp, Artificial Sequence
  ENSG00000117410_20 (sequence is synthesized)
gtcgctttgccctcccccacccacagcttgttgggtaaacagcggaacggactgggccggcgggatctggctggagcgcttgctccctcggtcccgcctcggattcgggcttgcgggtgg

SEQ ID NO: 221878 - DNA, 120 bp, Artificial Sequence
  ENSG00000117410_21 (sequence is synthesized)
cgaccctgcctgcgcaggtgcttggtctgggaggtggttttagcgagggaatggcagaaaatggaggcctaagcagaggaatctgtctacacagctgtactgtcacctgggggcagcctg

SEQ ID NO: 221879 - DNA, 120 bp, Artificial Sequence
  ENSG00000117410_22 (sequence is synthesized)
acgcgcttccctgccactgggttagggaaggcttgccggaaggacgatttcggaggacagcaggtgttagccaggcagcggagcgagcgccaacaggcgcactggggcggagagacgccg

SEQ ID NO: 221880 - DNA, 120 bp, Artificial Sequence
  ENSG00000117410_23 (sequence is synthesized)
ccactctcccccatcccagcttgggccatcattttgatattctctcacctactttttctgctttgcagagtggggatggtgattggccccattagcccatatctcccccattcctggctt

SEQ ID NO: 221881 - DNA, 120 bp, Artificial Sequence
  ENSG00000117410_24 (sequence is synthesized)
agcctcactgcacccctctctatcctcccaggctactccatgtttggggctggcctcaccgtaggcctgtctaacctcttctgtggagtctgcgtgggcatcgtgggcagtggggctgcc

SEQ ID NO: 221882 - DNA, 120 bp, Artificial Sequence
  ENSG00000117411_0 (sequence is synthesized)
gtgttcagcctgccagccccgcccaaacgcacccctcagcctggccgccagcctgacccagaacccctgcgccggagggagggtgggaatgtctgcacgtgggtctgggtgtgagctgtc

SEQ ID NO: 221883 - DNA, 120 bp, Artificial Sequence
  ENSG00000117411_1 (sequence is synthesized)
tgagagtctggatgtatggctgtggaagtccaggagcagtggccttgtttgtgagtgtgggacttagtgtgttactgtcacccgggtgtgtctgtgactgtagttctctgtgtgtctgag

SEQ ID NO: 221884 - DNA, 120 bp, Artificial Sequence
  ENSG00000117411_2 (sequence is synthesized)
tgtgggtgaccagctgggaccagggtgtccctgtgattctgtgtgcctgtgagactcaccctgctccctgaagcactgccagaagtggctgccgctctcttggaaccacagctggagcca

SEQ ID NO: 221885 - DNA, 120 bp, Artificial Sequence
  ENSG00000117411_3 (sequence is synthesized)
tcgcccaggcaagacccccttcctgccatgcccagtgctgtgcccatctccaggcccaagcatcccgttccgggaatcagaaccagctgtgctgggcaggacccagagtcttggtcccag

SEQ ID NO: 221886 - DNA, 120 bp, Artificial Sequence
  ENSG00000117411_4 (sequence is synthesized)
tcccaaggggctggctttgaggtcttaagtgaggggtgtcccctgccttgccccgtattttgacgttttgctccagtgggaagggattctgtaaacatccagtctgtatttgggcccccc

SEQ ID NO: 221887 - DNA, 120 bp, Artificial Sequence
  ENSG00000117411_5 (sequence is synthesized)
ggatgctgagggcaacttcccagcctggtcccagttggcctggcctgcttgtcgctgggatctgaatgaccaaaccacttcccaccatggctcctggaaggactaaatgaagtcatgagt

SEQ ID NO: 221888 - DNA, 120 bp, Artificial Sequence
  ENSG00000117411_6 (sequence is synthesized)
ataaagtgctcctgcatggccagcagccggatgcccgggcccactgggcgggccagtggccgcctgcgggatgagcagactgctgggggggacgctggagcgcgtctgcaaggctgtgct

SEQ ID NO: 221889 - DNA, 120 bp, Artificial Sequence
  ENSG00000117411_7 (sequence is synthesized)
ccttctctgcctgctgcacttcctcgtggccgtcatcctctactttgacgtctacgcccagcacctggccttcttcagccgcttcagtgcccgaggccctgcccatgccctccacccagc

SEQ ID NO: 221890 - DNA, 120 bp, Artificial Sequence
  ENSG00000117411_8 (sequence is synthesized)
tgctagcagcagcagcagcagcagcaactgctcccggcccaacgccaccgcctctagctccgggctccctgaggtccccagtgccctgcccggtcccacggctcccacgctgccaccctg

SEQ ID NO: 221891 - DNA, 120 bp, Artificial Sequence
  ENSG00000117411_9 (sequence is synthesized)
tcctgactcgccacctggtcttgtgggcagactgctgatcgagttcacctcacccatgcccctggagcgggtgcagagggagaacccaggcgtgctcatgggcggccgatacacaccgcc

SEQ ID NO: 221892 - DNA, 120 bp, Artificial Sequence
  ENSG00000117411_10 (sequence is synthesized)
ctgcgctacggcgtctatgtcatcaaccagcatggtgaggacaccttcaaccgggccaagctgcttaacgtgggcttcctagaggcgctgaaggaggatgccgcctatgactgcttcatc

SEQ ID NO: 221893 - DNA, 120 bp, Artificial Sequence
  ENSG00000117411_11 (sequence is synthesized)
ttcagcgatgtggacctggtccccatggatgaccgcaacctataccgctgcggcgaccaaccccgccactttgccattgccatggacaagtttggcttccggcttccctatgctggctac

SEQ ID NO: 221894 - DNA, 120 bp, Artificial Sequence
  ENSG00000117411_12 (sequence is synthesized)
tttggaggtgtgtcaggcctgagtaaggctcagtttctgagaatcaatggcttccccaatgagtactggggctggggtggcgaggatgatgacatcttcaaccggatctccctgactggg

SEQ ID NO: 221895 - DNA, 120 bp, Artificial Sequence
  ENSG00000117411_13 (sequence is synthesized)
atgaagatctcacgcccagacatccgaatcggccgctaccgcatgatcaagcacgaccgcgacaagcataacgaacctaaccctcagaggtttaccaagattcaaaacacgaagctgacc

SEQ ID NO: 221896 - DNA, 120 bp, Artificial Sequence
  ENSG00000117411_14 (sequence is synthesized)
atgaagcgggacggcattgggtcagtgcggtaccaggtcttggaggtgtctcggcaaccactcttcaccaatatcacagtggacattgggcggcctccgtcgtggccccctcggggctga

SEQ ID NO: 221897 - DNA, 120 bp, Artificial Sequence
  ENSG00000117411_15 (sequence is synthesized)
cactaatggacagaggctctcggtgccgaagattgcctgccagaggactgaccacagcctggctggcagctgctctgtggaggacctccaggactgagactgggctctgttttccaaggg

SEQ ID NO: 221898 - DNA, 120 bp, Artificial Sequence
  ENSG00000117411_16 (sequence is synthesized)
tcttcactaggccccctagctacacctggaagtttcagaacccactttggggggcctcctgcctgggcaggctcttcaagtgtggccctctttggagtcaaccctccttcccgaccccct

SEQ ID NO: 221899 - DNA, 120 bp, Artificial Sequence
  ENSG00000117411_17 (sequence is synthesized)
ccccctagcccagccccagtcactgtcagggtcgggccagcccctgcactgcctcgcagagtggcctgggctaggtcactccacctctctgtgcctcagtttcccccccttgagtcccct

SEQ ID NO: 221900 - DNA, 120 bp, Artificial Sequence
  ENSG00000117411_18 (sequence is synthesized)
agggcctggaagggtgggaggtatgtctagggggcagtgtctcttccagggggaattctcagctcttgggaacccccttgctcccaggggaggggaaacctttttcattcaacattgtag

SEQ ID NO: 221901 - DNA, 120 bp, Artificial Sequence
  ENSG00000117411_19 (sequence is synthesized)
ggggcaagctttggtgcgccccctgctgaggagcagccccaggaggggaccagaggggatgctgtgtcgctgcctgggatcttggggttggcctttgcatgggaggcaggtggggcttgg

SEQ ID NO: 221902 - DNA, 120 bp, Artificial Sequence
  ENSG00000117411_20 (sequence is synthesized)
atcagtaagtctggttcccgcctccctgtctgagagaggaggcaggagccccagggccggcttgtgtttgtacattgcacagaaacttgtgtgggtgctttagtaaaaaacgtgaatgga

SEQ ID NO: 221903 - DNA, 80 bp, Artificial Sequence
  ENSG00000117411_21 (sequence is synthesized)
ccgggcctgcccctccgaggcgccgtagcgcgggagggaggcggcggcgctgtggtccgtgggtccgccggtccgtgggt

SEQ ID NO: 221904 - DNA, 80 bp, Artificial Sequence
  ENSG00000117411_22 (sequence is synthesized)
ggcgggaggcggcggggccgggccatgggggacggaaccgtccgcagccgccggagccgggagccctgcccaagtcggag

SEQ ID NO: 221905 - DNA, 120 bp, Artificial Sequence
  ENSG00000117411_23 (sequence is synthesized)
agaacccctgcgccggagggagggtgggaatgtctgcacgtgggtctgggtgtgagctgtctgagagtctggatgtatggctgtggaagtccaggagcagtggccttgtttgccagcagc

SEQ ID NO: 221906 - DNA, 120 bp, Artificial Sequence
  ENSG00000117411_24 (sequence is synthesized)
aggtccccttcctggggagttcgcgctccaatgcaatccccactccccgctaagggactccacggtctgcacccgctcgccggtccgacctctaagcccaccctttggacgagcctgacc

SEQ ID NO: 221907 - DNA, 80 bp, Artificial Sequence
  ENSG00000117411_25 (sequence is synthesized)
cggagcggcgtcccctgctgagccccgagcgccgggtgagaggagggcgcgcgcggcccccacccagggccccgagattc

SEQ ID NO: 221908 - DNA, 120 bp, Artificial Sequence
  ENSG00000117411_26 (sequence is synthesized)
aagcatccttgactccaaaaaggtgactcccagtgccactgattccctgatgtgatccaaggcccctcaggactgctggcacccctgatcgttgtcccccaacccccagcccagcctcag

SEQ ID NO: 221909 - DNA, 120 bp, Artificial Sequence
  ENSG00000117411_27 (sequence is synthesized)
cccaatatctctgacctctggcctgattcctagaggtgaccagaatttaatgtcagggcctaaatagtcattgagtagattgcattcctattggtgccctcgaagacctcacttgtgcac

SEQ ID NO: 221910 - DNA, 120 bp, Artificial Sequence
  ENSG00000117411_28 (sequence is synthesized)
ctgtgggacccctgccggggcagataggacacgagctaatgggtgctgggcacagctcctgtggacctgacaaaggggacctgagcagtatgggaagggggtgtggaaagacagtgccca

SEQ ID NO: 221911 - DNA, 120 bp, Artificial Sequence
  ENSG00000117411_29 (sequence is synthesized)
cccctctgaaattgaaggaggtggatgtatctcttaggaggtagccacatttggtatcaggctggctgggagaagggcctaaagggtgtgtgaaatgtaaacaagggcttcctgacactg

SEQ ID NO: 221912 - DNA, 120 bp, Artificial Sequence
  ENSG00000117419_0 (sequence is synthesized)
gagtcggtgtgttgtggactcgtggtgctggctgccgctgttcaggcggccgggaacgggcggtggggagcgggcggagctggccctgcctctgcctggccggcgccgcagtcggcgcgg

SEQ ID NO: 221913 - DNA, 120 bp, Artificial Sequence
  ENSG00000117419_1 (sequence is synthesized)
gccgcgcccgccgccgccaactgccctgagcgcttgctgaggccgagggagacgtcggggcctgcacctggagggagcctgccgcgctggccccgaggagggggcgttgccatggcgaca

SEQ ID NO: 221914 - DNA, 120 bp, Artificial Sequence
  ENSG00000117419_2 (sequence is synthesized)
gcctctcccgctgctgacggggggcgggggcggccctgggaaggagggctggtctcctggccccccgcccctccccttactctcccctggacttggatgggcccgagttgggggcaacac

SEQ ID NO: 221915 - DNA, 120 bp, Artificial Sequence
  ENSG00000117419_3 (sequence is synthesized)
cccgggcattggggctttccagctctcacagaaccttcagcatccccagctgccggtcttggcatcttcgaagtaaggagagttttagatgcttctggatgttcaatgctagcaccttta

SEQ ID NO: 221916 - DNA, 120 bp, Artificial Sequence
  ENSG00000117419_4 (sequence is synthesized)
cagactggagcagctcgattttcttcgtatttactttcaagagcaagaaaagtgctgggctcccacttattttctccctgtggtgttccggagttctgctccatatccaccagaaagctg

SEQ ID NO: 221917 - DNA, 120 bp, Artificial Sequence
  ENSG00000117419_5 (sequence is synthesized)
gcggcccacggctttggcgcatccatggcggcaatggtgtccttccctccccagaggtatcactactttttagtgctggactttgaggccacgtgcgacaagccacagattcatcctcag

SEQ ID NO: 221918 - DNA, 120 bp, Artificial Sequence
  ENSG00000117419_6 (sequence is synthesized)
gaaatcatcgagttccccatcctaaagctaaatggccggaccatggagattgagtctacctttcacatgtatgtccagcctgtagtccatccacagcttaccccattctgtacagagctc

SEQ ID NO: 221919 - DNA, 120 bp, Artificial Sequence
  ENSG00000117419_7 (sequence is synthesized)
ggagagggtcgatgaatggatggcgaaggaaggcctcttagatccaaacgtcaagtcaatttttgtcacctgtggagactgggacttaaaagtcatgctcccaggccagtgccagtactt

SEQ ID NO: 221920 - DNA, 120 bp, Artificial Sequence
  ENSG00000117419_8 (sequence is synthesized)
gggcttgccagtggcggattacttcaagcagtggattaatctgaaaaaggcttacagcttcgccatgggctgctggcccaagaatggacttctagacatgaacaagggcctcagcctgca

SEQ ID NO: 221921 - DNA, 120 bp, Artificial Sequence
  ENSG00000117419_9 (sequence is synthesized)
acacataggccggccccacagcggcattgacgactgcaagaacattgccaacatcatgaagacactcgcctatcgaggcttcatcttcaagcagacatcgaagccgttctgattggccga

SEQ ID NO: 221922 - DNA, 120 bp, Artificial Sequence
  ENSG00000117419_10 (sequence is synthesized)
ggacaggatggggcaggacagggtagctgtttggcccagcccagaatcctcctctccctcaccagaggggaagagggagagtggcatagctctgtgtccagagtgtccccagctgccctg

SEQ ID NO: 221923 - DNA, 120 bp, Artificial Sequence
  ENSG00000117419_11 (sequence is synthesized)
tgggctcatgcccttggcgtgggcttgtgcccttgcaagggcttggccacttggcccttctggagcagacactttgtgccccccatccccacccctcaatctcagcccagtatcagcccc

SEQ ID NO: 221924 - DNA, 120 bp, Artificial Sequence
  ENSG00000117419_12 (sequence is synthesized)
tcccattgcgggcctgggctagggggacccaggcactcaccgcctcctccctggtacacaggcttctgtggggccaccaagcccctcctgtgccccctcccatccatagtgcatggtgtg

SEQ ID NO: 221925 - DNA, 120 bp, Artificial Sequence
  ENSG00000117419_13 (sequence is synthesized)
tggtgcccccagggctccaggacagatcaggccccaccttgtgtctacccccatccccgctgtgaacgtgccactgaataaagtcggggaaacgaggcactgggtgtgtgtgcaaagcca

SEQ ID NO: 221926 - DNA, 120 bp, Artificial Sequence
  ENSG00000117419_14 (sequence is synthesized)
ggacttctagacatgaacaagggcctcagcctgcaacacataggccggccccacagcggcattgggtctgcactggcctgcctggatagtgcctggggagagggtgctggctccttcctt

SEQ ID NO: 221927 - DNA, 120 bp, Artificial Sequence
  ENSG00000117419_15 (sequence is synthesized)
tgacccccttggagccccagagacatctgaggaattggttcttgccagacaccagactgttcttcagtagcaaccatagatggaagaatggctagatggatggacgactgcaagaacatt

SEQ ID NO: 221928 - DNA, 120 bp, Artificial Sequence
  ENSG00000117419_16 (sequence is synthesized)
cacataggccggccccacagcggcattggacccagaagactgatgaggctgccaggtatggcagatctgctcagctgttctcagtagccaacccctccctggctgggttcccttcacttg

SEQ ID NO: 221929 - DNA, 120 bp, Artificial Sequence
  ENSG00000117419_17 (sequence is synthesized)
gggactgaggcagcatggctcaggagctacttatcttattctcaacccagaaacttcactgtccccaaggcccctctgactcagcggtgaagccaagaaatctgagagcaagaaagagaa

SEQ ID NO: 221930 - DNA, 120 bp, Artificial Sequence
  ENSG00000117419_18 (sequence is synthesized)
gaaattggctgagagaaaaggtcagggtcaggaataacagtttcattatctgagcaactggacatagaggctggcacttgggcacattgtcacaaatctttgtgttgggattaatgccac

SEQ ID NO: 221931 - DNA, 120 bp, Artificial Sequence
  ENSG00000117419_19 (sequence is synthesized)
taacctgtagtgttggggttccatctctgatcattatcagctaaaaatcttcaaaatgtttgtcatgcttcaggtgccctggctgcagagttgtgccaacttggtgcagattggggcacc

SEQ ID NO: 221932 - DNA, 120 bp, Artificial Sequence
  ENSG00000117419_20 (sequence is synthesized)
acacataggccggccccacagcggcattgcctttttcctaacatagcctgtgtcctgagatacagcaagaaacaatttgatcaaatgtttcaagagagcaaaagaaaaaaacggttacca

SEQ ID NO: 221933 - DNA, 120 bp, Artificial Sequence
  ENSG00000117425_0 (sequence is synthesized)
gcagttgccacctcgagccctgctgtgcgtctcgggccagcaattccgcctgcgcgcgggacccattcctcctccagccgccgcggcccacggcccacggagcgggtgaatcccggcgcc

SEQ ID NO: 221934 - DNA, 120 bp, Artificial Sequence
  ENSG00000117425_1 (sequence is synthesized)
gcgccccggacccgcagctccctgcactcctccctcccagccgctttaacacccacaccccacagtctctcccacgcccgcgccttggcggccccactgaatccctacgcggggcccagc

SEQ ID NO: 221935 - DNA, 120 bp, Artificial Sequence
  ENSG00000117425_2 (sequence is synthesized)
ggtaccgggagaccgggctagcctatgggagcgcccagataacgcgggttgggggcgcccgcgccccccatccccgccagcatgactcgatcgccgcccctcagagagctgcccccgagt

SEQ ID NO: 221936 - DNA, 120 bp, Artificial Sequence
  ENSG00000117425_3 (sequence is synthesized)
tacacacccccagctcgaaccgcagcaccccagatcctagctgggagcctgaaggctccactctggcttcgtgcttacttccagggcctgctcttctctctgggatgcgggatccagaga

SEQ ID NO: 221937 - DNA, 120 bp, Artificial Sequence
  ENSG00000117425_4 (sequence is synthesized)
cattgtggcaaagtgctctttctgggactgttggcctttggggccctggcattaggtctccgcatggccattattgagacaaacttggaacagctctgggtagaagtgggcagccgggtg

SEQ ID NO: 221938 - DNA, 120 bp, Artificial Sequence
  ENSG00000117425_5 (sequence is synthesized)
agccaggagctgcattacaccaaggagaagctgggggaggaggctgcatacacctctcagatgctgatacagaccgcacgccaggagggagagaacatcctcacacccgaagcacttggc

SEQ ID NO: 221939 - DNA, 120 bp, Artificial Sequence
  ENSG00000117425_6 (sequence is synthesized)
ctccacctccaggcagccctcactgccagtaaagtccaagtatcactctatgggaagtcctgggatttgaacaaaatctgctacaagtcaggagttccccttattgaaaatggaatgatt

SEQ ID NO: 221940 - DNA, 120 bp, Artificial Sequence
  ENSG00000117425_7 (sequence is synthesized)
gagcggatgattgagaagctgtttccgtgcgtgatcctcacccccctcgactgcttctgggagggagccaaactccaagggggctccgcctacctgcccggccgcccggatatccagtgg

SEQ ID NO: 221941 - DNA, 120 bp, Artificial Sequence
  ENSG00000117425_8 (sequence is synthesized)
accaacctggatccagagcagctgctggaggagctgggtccctttgcctcccttgagggcttccgggagctgctagacaaggcacaggtgggccaggcctacgtggggcggccctgtctg

SEQ ID NO: 221942 - DNA, 120 bp, Artificial Sequence
  ENSG00000117425_9 (sequence is synthesized)
caccctgatgacctccactgcccacctagtgcccccaaccatcacagcaggcaggctcccaatgtggctcacgagctgagtgggggctgccatggcttctcccacaaattcatgcactgg

SEQ ID NO: 221943 - DNA, 120 bp, Artificial Sequence
  ENSG00000117425_10 (sequence is synthesized)
caggaggaattgctgctgggaggcatggccagagacccccaaggagagctgctgagggcagaggccctgcagagcaccttcttgctgatgagtccccgccagctgtacgagcatttccgg

SEQ ID NO: 221944 - DNA, 120 bp, Artificial Sequence
  ENSG00000117425_11 (sequence is synthesized)
ggtgactatcagacacatgacattggctggagtgaggagcaggccagcacagtgctacaagcctggcagcggcgctttgtgcagctggcccaggaggccctgcctgagaacgcttcccag

SEQ ID NO: 221945 - DNA, 120 bp, Artificial Sequence
  ENSG00000117425_12 (sequence is synthesized)
cagatccatgccttctcctccaccaccctggatgacatcctgcatgcgttctctgaagtcagtgctgcccgtgtggtgggaggctatctgctcatgctggcctatgcctgtgtgaccatg

SEQ ID NO: 221946 - DNA, 120 bp, Artificial Sequence
  ENSG00000117425_13 (sequence is synthesized)
ctgcggtgggactgcgcccagtcccagggttccgtgggccttgccggggtactgctggtggccctggcggtggcctcaggccttgggctctgtgccctgctcggcatcaccttcaatgct

SEQ ID NO: 221947 - DNA, 120 bp, Artificial Sequence
  ENSG00000117425_14 (sequence is synthesized)
gccactacccaggtgctgcccttcttggctctgggaatcggcgtggatgacgtattcctgctggcgcatgccttcacagaggctctgcctggcacccctctccaggagcgcatgggcgag

SEQ ID NO: 221948 - DNA, 120 bp, Artificial Sequence
  ENSG00000117425_15 (sequence is synthesized)
tgtctgcagcgcacgggcaccagtgtcgtactcacatccatcaacaacatggccgccttcctcatggctgccctcgttcccatccctgcgctgcgagccttctccctacaggcggccata

SEQ ID NO: 221949 - DNA, 120 bp, Artificial Sequence
  ENSG00000117425_16 (sequence is synthesized)
gtggttggctgcacctttgtagccgtgatgcttgtcttcccagccatcctcagcctggacctacggcggcgccactgccagcgccttgatgtgctctgctgcttctccagtccctgctct

SEQ ID NO: 221950 - DNA, 120 bp, Artificial Sequence
  ENSG00000117425_17 (sequence is synthesized)
gctcaggtgattcagatcctgccccaggagctgggggacgggacagtaccagtgggcattgcccacctcactgccacagttcaagcctttacccactgtgaagccagcagccagcatgtg

SEQ ID NO: 221951 - DNA, 120 bp, Artificial Sequence
  ENSG00000117425_18 (sequence is synthesized)
gaccttctaggccaggaggaggagacaaggcagaaggcagcctgcaagtccctgccctgtgcccgctggaatcttgcccatttcgcccgctatcagtttgccccgttgctgctccagtca

SEQ ID NO: 221952 - DNA, 120 bp, Artificial Sequence
  ENSG00000117425_19 (sequence is synthesized)
catgctaaggccatcgtgctggtgctctttggtgctcttctgggcctgagcctctacggagccaccttggtgcaagacggcctggccctgacggatgtggtgcctcggggcaccaaggag

SEQ ID NO: 221953 - DNA, 120 bp, Artificial Sequence
  ENSG00000117425_20 (sequence is synthesized)
catgccttcctgagcgcccagctcaggtacttctccctgtacgaggtggccctggtgacccagggtggctttgactacgcccactcccaacgcgccctctttgatctgcaccagcgcttc

SEQ ID NO: 221954 - DNA, 120 bp, Artificial Sequence
  ENSG00000117425_21 (sequence is synthesized)
agttccctcaaggcggtgctgcccccaccggccacccaggcaccccgcacctggctgcactattaccgcaactggctacagggaatccaggctgcctttgaccaggactgggcttctggg

SEQ ID NO: 221955 - DNA, 120 bp, Artificial Sequence
  ENSG00000117425_22 (sequence is synthesized)
cgcatcacccgccactcgtaccgcaatggctctgaggatggggccctggcctacaagctgctcatccagactggagacgcccaggagcctctggatttcagccagctgaccacaaggaag

SEQ ID NO: 221956 - DNA, 120 bp, Artificial Sequence
  ENSG00000117425_23 (sequence is synthesized)
ctggtggacagagagggactgattccacccgagctcttctacatggggctgaccgtgtgggtgagcagtgaccccctgggtctggcagcctcacaggccaacttctaccccccacctcct

SEQ ID NO: 221957 - DNA, 120 bp, Artificial Sequence
  ENSG00000117425_24 (sequence is synthesized)
gaatggctgcacgacaaatacgacaccacgggggagaaccttcgcatcccgccagctcagcccttggagtttgcccagttccccttcctgctgcgtggcctccagaagactgcagacttt

SEQ ID NO: 221958 - DNA, 120 bp, Artificial Sequence
  ENSG00000117425_25 (sequence is synthesized)
gtggaggccatcgagggggcccgggcagcatgcgcagaggccggccaggctggggtgcacgcctaccccagcggctcccccttcctcttctgggaacagtatctgggcctgcggcgctgc

SEQ ID NO: 221959 - DNA, 120 bp, Artificial Sequence
  ENSG00000117425_26 (sequence is synthesized)
ttcctgctggccgtctgcatcctgctggtgtgcactttcctcgtctgtgctctgctgctcctcaacccctggacggctggcctcatagtgctggtcctggcgatgatgacagtggaactc

SEQ ID NO: 221960 - DNA, 120 bp, Artificial Sequence
  ENSG00000117425_27 (sequence is synthesized)
tttggtatcatgggtttcctgggcatcaagctgagtgccatccccgtggtgatccttgtggcctctgtaggcattggcgttgagttcacagtccacgtggctctgggcttcctgaccacc

SEQ ID NO: 221961 - DNA, 120 bp, Artificial Sequence
  ENSG00000117425_28 (sequence is synthesized)
cagggcagccggaacctgcgggccgcccatgcccttgagcacacatttgcccccgtgaccgatggggccatctccacattgctgggtctgctcatgcttgctggttcccactttgacttc

SEQ ID NO: 221962 - DNA, 120 bp, Artificial Sequence
  ENSG00000117425_29 (sequence is synthesized)
attgtaaggtacttctttgcggcgctgacagtgctcacgctcctgggcctcctccatggactcgtgctgctgcctgtgctgctgtccatcctgggcccgccgccagaggtgatacagatg

SEQ ID NO: 221963 - DNA, 120 bp, Artificial Sequence
  ENSG00000117425_30 (sequence is synthesized)
tacaaggaaagcccagagatcctgagtccaccagctccacagggaggcgggcttaggtggggggcatcctcctccctgccccagagctttgccagagtgactacctccatgaccgtggcc

SEQ ID NO: 221964 - DNA, 120 bp, Artificial Sequence
  ENSG00000117425_31 (sequence is synthesized)
atccacccaccccccctgcctggtgcctacatccatccagcccctgatgagcccccttggtcccctgctgccactagctctggcaacctcagttccaggggaccaggtccagccactggg

SEQ ID NO: 221965 - DNA, 120 bp, Artificial Sequence
  ENSG00000117425_32 (sequence is synthesized)
tgaaagagcagctgaagcacagagaccatgtgtggggcgtgtggggtcactgggaagcactgggtctggtgttagacgcaggatggacccctggagggccctgctgctgctgcatcccct

SEQ ID NO: 221966 - DNA, 120 bp, Artificial Sequence
  ENSG00000117425_33 (sequence is synthesized)
ctcccgacccagctgtcatgggcctccctgatatccatacagaacagccaccgatttgcacatccaggcctgtgtgagcctgtatctgtgtcacttgagagtgaaagctggcacttgggg

SEQ ID NO: 221967 - DNA, 120 bp, Artificial Sequence
  ENSG00000117425_34 (sequence is synthesized)
ctgcagtgcagccctgtcccccttcccaccccacaccactgcctgcccagctgaccaagcctgagggaccctccagcacccttccgtctggtgactcctgggcaggctctccatatccct

SEQ ID NO: 221968 - DNA, 120 bp, Artificial Sequence
  ENSG00000117425_35 (sequence is synthesized)
gcccacctcctaccacatccattatttatatgaaaatgtctatttttgtagtatacatacatgttagctatgatgaaagttttattttttaaagaatgaaatatattctatgtgaactaa

SEQ ID NO: 221969 - DNA, 120 bp, Artificial Sequence
  ENSG00000117425_36 (sequence is synthesized)
gcctcccaccccagcaccccctcatcagacacacggagcgccactgtctggacaggctgaattggtcttcgggtccctaatttctcatacgccattccctctgcctagaacactttctca

SEQ ID NO: 221970 - DNA, 120 bp, Artificial Sequence
  ENSG00000117425_37 (sequence is synthesized)
cctccccttgatgtgaccccatatcacccttcgaggtgaattggatcggatgccatctcctccaggaggggtggggtcgtgcctcctgtgaggtcccagtgcccctgagtgtctgtgccc

SEQ ID NO: 221971 - DNA, 120 bp, Artificial Sequence
  ENSG00000117425_38 (sequence is synthesized)
gtctgtttccccgtccctctctctaagcccggaggcttactgcgggtaaggacggcgggacaggaccttaacccctgggacgaacaccagctccgcaaaggactccgcacccggcgccgc

SEQ ID NO: 221972 - DNA, 120 bp, Artificial Sequence
  ENSG00000117425_39 (sequence is synthesized)
ccacggggtgcgggtcccaggaggaccagcagagaggagcataggagagcaaaggagatcagtgacccatggcttccccggtggcgcggaacagcccggagccgcctgtgatttgcatac

SEQ ID NO: 221973 - DNA, 120 bp, Artificial Sequence
  ENSG00000117425_40 (sequence is synthesized)
ccatggtgcaccacgaaaagataccctcaagatgcttgcactccctctgtgcgcgcatttctgcactgttttagagcatgatgcctcttacacgcatctgtgtgcataaactacatatag

SEQ ID NO: 221974 - DNA, 120 bp, Artificial Sequence
  ENSG00000117425_41 (sequence is synthesized)
ggagtgcgtaccacgcaggcatccaacaaccataagtgtgttaagtgttagttctccctgcgaggttcgaagcggaagtcacgaatatactcgggtttctcttcaaagcgcataaatctt

SEQ ID NO: 221975 - DNA, 120 bp, Artificial Sequence
  ENSG00000117425_42 (sequence is synthesized)
tcgccttttactaaagatttccgtggagagaaagttgtgagtttttattcaattttttgaggcctcttatttcctgaggctacatttttaagtattaaaagttaggcaactacaaccaag

SEQ ID NO: 221976 - DNA, 120 bp, Artificial Sequence
  ENSG00000117448_0 (sequence is synthesized)
acttaagctgaggatcgttggatctctggcggggtgcagaactgagcccaggccacagtaccctattcacgctctgtgcttgtgccaagggggcaatggcggcttcctgtgttctactgc

SEQ ID NO: 221977 - DNA, 120 bp, Artificial Sequence
  ENSG00000117448_1 (sequence is synthesized)
acactgggcagaagatgcctctgattggtctgggtacctggaagagtgagcctggtcaggtaaaagcagctgttaagtatgcccttagcgtaggctaccgccacattgattgtgctgcta

SEQ ID NO: 221978 - DNA, 120 bp, Artificial Sequence
  ENSG00000117448_2 (sequence is synthesized)
tctacggcaatgagcctgagattggggaggccctgaaggaggacgtgggaccaggcaaggcggtgcctcgggaggagctgtttgtgacatccaagctgtggaacaccaagcaccaccccg

SEQ ID NO: 221979 - DNA, 120 bp, Artificial Sequence
  ENSG00000117448_3 (sequence is synthesized)
aggatgtggagcctgccctccggaagactctggctgacctccagctggagtatctggacctgtacctgatgcactggccttatgcctttgagcggggagacaaccccttccccaagaatg

SEQ ID NO: 221980 - DNA, 120 bp, Artificial Sequence
  ENSG00000117448_4 (sequence is synthesized)
gcgctgggcctgtccaacttcaacagtcggcagattgatgacatactcagtgtggcctccgtgcgtccagctgtcttgcaggtggaatgccacccatacttggctcaaaatgagctaatt

SEQ ID NO: 221981 - DNA, 120 bp, Artificial Sequence
  ENSG00000117448_5 (sequence is synthesized)
gcccactgccaagcacgtggcctggaggtaactgcttatagccctttgggctcctctgatcgtgcatggcgtgatcctgatgagcctgtcctgctggaggaaccagtagtcctggcattg

SEQ ID NO: 221982 - DNA, 120 bp, Artificial Sequence
  ENSG00000117448_6 (sequence is synthesized)
gctgaaaagtatggccgatctccagctcagatcttgctcaggtggcaggtccagcggaaagtgatctgcatccccaaaagtatcactccttctcgaatccttcagaacatcaaggtgttt

SEQ ID NO: 221983 - DNA, 120 bp, Artificial Sequence
  ENSG00000117448_7 (sequence is synthesized)
gacttcacctttagcccagaagagatgaagcagctaaatgccctgaacaaaaattggagatatattgtgcctatgcttacggtggatgggaagagagtcccaagggatgcagggcatcct

SEQ ID NO: 221984 - DNA, 120 bp, Artificial Sequence
  ENSG00000117448_8 (sequence is synthesized)
ctgtacccctttaatgacccgtactgagaccacagcttcttggcctcccttccagctctgcagctaatgaggtcctgccacaacggaaagagggagttaataaagccattggagcatcca

SEQ ID NO: 221985 - DNA, 120 bp, Artificial Sequence
  ENSG00000117448_9 (sequence is synthesized)
tcttggtgttgcagctgctctctgggcctcagtttgcttgaactaaatgtaacggggccaacttaggtgaactttgggaatccagccaacctgactttagggagagtatggagccacgga

SEQ ID NO: 221986 - DNA, 120 bp, Artificial Sequence
  ENSG00000117448_10 (sequence is synthesized)
tggcattgtgaatccggagggccgacaccagaagaacctgcaacgtggcatctgctaccttacttcccccggaaaagcgcctgcggcggcgcctaggcgcgcggtgcaatgtgggccagc

SEQ ID NO: 221987 - DNA, 120 bp, Artificial Sequence
  ENSG00000117448_11 (sequence is synthesized)
aaaaggcgaggctggccccgccccttgcaccgcccacgtggccagcgccacctgcctcattgtgcccaggagttctccaaacccgcgctgcggagtgagtgaccaagttccggccagttc

SEQ ID NO: 221988 - DNA, 120 bp, Artificial Sequence
  ENSG00000117448_12 (sequence is synthesized)
gacctcgaggatccagaggtggagacggtactacctcccagctctgttttccatccccttcaggtccttcctcgggaggcggcgaaggcggtccaccctgcgcgtgatcctttatgcccg

SEQ ID NO: 221989 - DNA, 120 bp, Artificial Sequence
  ENSG00000117448_13 (sequence is synthesized)
tgcttgtgccaaggtttcaagtgatcctcccgcctcagcctgcccaggtgctgagattacatgtatgagccactgcacctggaaaggagccagaaatgtgaagtgctagctgaaggatga

SEQ ID NO: 221990 - DNA, 120 bp, Artificial Sequence
  ENSG00000117448_14 (sequence is synthesized)
aaaaggcgaggctggccccgccccttgcaccgcccacgtggccagcgccacctgcctcattgtgcccaggagttctccaaacccgcgctgcggagtccttcctcgggaggcggcgaaggc

SEQ ID NO: 221991 - DNA, 120 bp, Artificial Sequence
  ENSG00000117448_15 (sequence is synthesized)
ctgctggaggaaccagtagtcctggcattggctgaaaagtatggccgatctccagctcagatcttgctcaggtatggggcagtcttagggagagggccctgggttgggaggcaagggtta

SEQ ID NO: 221992 - DNA, 120 bp, Artificial Sequence
  ENSG00000117448_16 (sequence is synthesized)
agggatttcttatttcagtgtctgggtgaggctgaggatcttgccttgtgatctggagggaggccactgtaggcatatttcccatttcagcagggctcaggtgctccaggagcttaggga

SEQ ID NO: 221993 - DNA, 120 bp, Artificial Sequence
  ENSG00000117448_17 (sequence is synthesized)
acagcagcagagcaggataggaacactcatttgcatgccaagctgaggagcttgacatgggatcttagcctcttctgctacagcagcttagctgtagctacaggagtttaactctggaaa

SEQ ID NO: 221994 - DNA, 120 bp, Artificial Sequence
  ENSG00000117448_18 (sequence is synthesized)
gcggggagacaaccccttccccaagaatgctgatgggactatatgctacgactccacccactacaaggagacttggaaggctctggaggcactggtggctaaggggctggtccagcggaa

SEQ ID NO: 221995 - DNA, 120 bp, Artificial Sequence
  ENSG00000117448_19 (sequence is synthesized)
catctcaaaaaaaaaaaaaaagaaaaagcatggctttttaaaaattcttggccctttgtcctctctgggattggagtttgggacatagagtggctggatgggcaggtagggtagaagcct

SEQ ID NO: 221996 - DNA, 120 bp, Artificial Sequence
  ENSG00000117448_20 (sequence is synthesized)
acatggtgtgtaccccagggtatgcacctgtaaccctcctgctccctttattcatttagaaaaggtgctgacttttctgttgagcacctggggttacagtaataagtaagtctcagcaga

SEQ ID NO: 221997 - DNA, 120 bp, Artificial Sequence
  ENSG00000117448_21 (sequence is synthesized)
agatgtgagaagagctcaccattagtgccgtgccctgtgctggaagaagggtggataactccctgaggatgagttaaggaagacttcctaggggagaggagatatctacgtctaggaaga

SEQ ID NO: 221998 - DNA, 120 bp, Artificial Sequence
  ENSG00000117448_22 (sequence is synthesized)
aggagatatctacgtctaggaagaggagggggcataggcattccatgtaaacttaacacctgggttacgatctggaaggatgaaaaagcatggctttttttggccaggcgcggtggctca

SEQ ID NO: 221999 - DNA, 120 bp, Artificial Sequence
  ENSG00000117450_0 (sequence is synthesized)
gactctcgcgagatccctactggctataaaggcagcgccccggagagctcttgcgcgtcttgttcttgcctggtgtcggtggttagtttctgcgacttgtgttgggactggtgagtgtgg

SEQ ID NO: 222000 - DNA, 120 bp, Artificial Sequence
  ENSG00000117450_1 (sequence is synthesized)
gcagtgcggcccctgcggagtgaggcgcggcgcgcccttcttgcctgttgcctcttcctcctcctgtccggggcccgcccgcgctcgggtgggggtgctgtgatgcgtgaggcagccggg

SEQ ID NO: 222001 - DNA, 120 bp, Artificial Sequence
  ENSG00000117450_2 (sequence is synthesized)
ggaggcccggagtccgagactgcttgagcgctgcgcacacccctctcgtgggccccccacgtaggtgcgggaacctggttgaaccccaagctgataggaagatgtcttcaggaaatgcta

SEQ ID NO: 222002 - DNA, 120 bp, Artificial Sequence
  ENSG00000117450_3 (sequence is synthesized)
aaattgggcaccctgcccccaacttcaaagccacagctgttatgccagatggtcagtttaaagatatcagcctgtctgactacaaaggaaaatatgttgtgttcttcttttaccctcttg

SEQ ID NO: 222003 - DNA, 120 bp, Artificial Sequence
  ENSG00000117450_4 (sequence is synthesized)
acttcacctttgtgtgccccacggagatcattgctttcagtgatagggcagaagaatttaagaaactcaactgccaagtgattggtgcttctgtggattctcacttctgtcatctagcat

SEQ ID NO: 222004 - DNA, 120 bp, Artificial Sequence
  ENSG00000117450_5 (sequence is synthesized)
acccatgaacattcctttggtatcagacccgaagcgcaccattgctcaggattatggggtcttaaaggctgatgaaggcatctcgttcaggggcctttttatcattgatgataagggtat

SEQ ID NO: 222005 - DNA, 120 bp, Artificial Sequence
  ENSG00000117450_6 (sequence is synthesized)
tcttcggcagatcactgtaaatgacctccctgttggccgctctgtggatgagactttgagactagttcaggccttccagttcactgacaaacatggggaagtgtgcccagctggctggaa

SEQ ID NO: 222006 - DNA, 120 bp, Artificial Sequence
  ENSG00000117450_7 (sequence is synthesized)
acctggcagtgataccatcaagcctgatgtccaaaagagcaaagaatatttctccaagcagaagtgagcgctgggctgttttagtgccaggctgcggtgggcagccatgagaacaaaacc

SEQ ID NO: 222007 - DNA, 120 bp, Artificial Sequence
  ENSG00000117450_8 (sequence is synthesized)
tcttctgtattttttttttccattagtaaaacacaagacttcagattcagccgaattgtggtgtcttacaaggcaggcctttcctacagggggtggagagaccagcctttcttcctttgg

SEQ ID NO: 222008 - DNA, 120 bp, Artificial Sequence
  ENSG00000117450_9 (sequence is synthesized)
taggaatggcctgagttggcgttgtgggcaggctactggtttgtatgatgtattagtagagcaacccattaatcttttgtagtttgtattaaacttgaactgagaccttgatgagtcttt

SEQ ID NO: 222009 - DNA, 72 bp, Artificial Sequence
  ENSG00000117450_10 (sequence is synthesized)
agaggccaggtgcggtggctcgcgcttacacgttggagaccagcctagccaacatgatgaaacctcgtctct

SEQ ID NO: 222010 - DNA, 84 bp, Artificial Sequence
  ENSG00000117450_11 (sequence is synthesized)
aaaaattagctgggcgtggtggtgcgtgcttgtagtcccagacactccggaggtgaggcggaagccaacaccgtgccactgcac

SEQ ID NO: 222011 - DNA, 120 bp, Artificial Sequence
  ENSG00000117450_12 (sequence is synthesized)
agtttctgcgacttgtgttgggactgctgataggaagatgtcttcaggaaatgctaaaattgggcaccctgcccccaacttcaaagccacagctgatgaaggcatctcgttcaggggcct

SEQ ID NO: 222012 - DNA, 120 bp, Artificial Sequence
  ENSG00000117461_0 (sequence is synthesized)
gggcagagcttgagggcagttggtgcggtcgggttggttcttacaccccggcgggagcgcccagacaagccgagctgactggacttctccggccggccccattcccgaggctgcggcagc

SEQ ID NO: 222013 - DNA, 120 bp, Artificial Sequence
  ENSG00000117461_1 (sequence is synthesized)
ttcggttccgagaccgaccggagaggagcccgagtcccggcctctgggggattcgctctctgcagaccagtgggaccccgaaacttgaacgcaatctccagcccccttttttgccttcct

SEQ ID NO: 222014 - DNA, 120 bp, Artificial Sequence
  ENSG00000117461_2 (sequence is synthesized)
ttgtcacttgcccgggtttctcccaacgtgttcttttttttcctcttcattctccctccttcgaaggacacaaaagtggcttccgcggaaagatttggaggcggtgggagcttttctccc

SEQ ID NO: 222015 - DNA, 120 bp, Artificial Sequence
  ENSG00000117461_3 (sequence is synthesized)
cggagagcgactgtgtagaaaggatttttgggaagccgctttttaacacctctgctctccgtcccccaagcctctgtgtaatcctctgaggagaaaagcccatagcttgaaagttcgggg

SEQ ID NO: 222016 - DNA, 120 bp, Artificial Sequence
  ENSG00000117461_4 (sequence is synthesized)
gcattttgttgtgttctgtaggagagagggggaggaccctgttcgggtagtttggccggactggtactggccgttggaaaacccgaagtacatttccgtgtggaacttttgcagatatat

SEQ ID NO: 222017 - DNA, 120 bp, Artificial Sequence
  ENSG00000117461_5 (sequence is synthesized)
atttttagatttttaaataccagataaaaaatatatgccttctatatatctcctggcgacctgcccctgacagcgcgatgtacaatacggtgtggagtatggaccgcgatgacgcagact

SEQ ID NO: 222018 - DNA, 120 bp, Artificial Sequence
  ENSG00000117461_6 (sequence is synthesized)
ggagggaggtgatgatgccctattcgacagaactgatattttatattgaaatggatcctccagctcttccaccaaagccacctaagccaatgacttcagcagttccaaatggaatgaagg

SEQ ID NO: 222019 - DNA, 120 bp, Artificial Sequence
  ENSG00000117461_7 (sequence is synthesized)
acagttctgtttctcttcaggatgcagaatggtactggggggatatttcaagggaggaggtaaatgacaaattgcgggatatgccagatgggaccttcttggtccgagatgcctcaacaa

SEQ ID NO: 222020 - DNA, 120 bp, Artificial Sequence
  ENSG00000117461_8 (sequence is synthesized)
aaatgcagggagattatactttgactttgcggaagggaggcaataataagttaataaagatctatcaccgggatggtaaatatggcttttctgatcctctgacatttaattccgtggtgg

SEQ ID NO: 222021 - DNA, 120 bp, Artificial Sequence
  ENSG00000117461_9 (sequence is synthesized)
agctcattaaccactatcaccatgaatctcttgctcagtacaatcccaaacttgatgtgaagctgatgtacccagtgtccagataccaacaggatcagttggtaaaagaagataatattg

SEQ ID NO: 222022 - DNA, 120 bp, Artificial Sequence
  ENSG00000117461_10 (sequence is synthesized)
atgcagtaggtaaaaaactgcaagaataccactctcagtatcaggagaagagtaaagagtatgataggctgtatgaagaatatactagaacatcccaggaaatacagatgaagaggactg

SEQ ID NO: 222023 - DNA, 120 bp, Artificial Sequence
  ENSG00000117461_11 (sequence is synthesized)
caatagaagcttttaatgaaacaattaaaatatttgaagagcagtgtcacacacaagaacaacatagcaaagaatatattgagcgatttcgcagagaggggaatgaaaaggagattgaac

SEQ ID NO: 222024 - DNA, 120 bp, Artificial Sequence
  ENSG00000117461_12 (sequence is synthesized)
gaattatgatgaattatgataaattgaaatcacgtctgggtgagattcatgatagcaaaatgcgtctagagcaggatttgaagaatcaagctttggacaaccgagaaatagataaaaaaa

SEQ ID NO: 222025 - DNA, 120 bp, Artificial Sequence
  ENSG00000117461_13 (sequence is synthesized)
tgaatagcatcaaacctgacctgatccagctgcgaaagatccgagatcaacaccttgtatggctcaatcacaaaggagtgagacagaaacgcctgaatgtctggctgggaattaagaatg

SEQ ID NO: 222026 - DNA, 120 bp, Artificial Sequence
  ENSG00000117461_14 (sequence is synthesized)
aggatgctgatgagaactattttatcaatgaggaagatgaaaacctgccccattatgatgagaaaacctggtttgttgaggatatcaatcgagtacaagcagaggacttgctttatggga

SEQ ID NO: 222027 - DNA, 120 bp, Artificial Sequence
  ENSG00000117461_15 (sequence is synthesized)
aacctgatggtgcattcttaattcgtgagagtagcaagaaaggatgctatgcttgctctgtggtggccgatggggaagtgaagcactgtgtgatctacagcactgctcggggctatggct

SEQ ID NO: 222028 - DNA, 120 bp, Artificial Sequence
  ENSG00000117461_16 (sequence is synthesized)
ttgcagagccctacaacctgtacagctctctgaaggagctagtgctccattaccagcagacatccttggttcagcacaacgactccctcaacgtcaggcttgcctaccctgttcatgcac

SEQ ID NO: 222029 - DNA, 120 bp, Artificial Sequence
  ENSG00000117461_17 (sequence is synthesized)
agatgccctcgctttgcagataaagaggaagtgggaagagaggtggttctctggcatttttttctacagtttttattagactacgatgagggcattctttctacatagactgcttgtttt

SEQ ID NO: 222030 - DNA, 120 bp, Artificial Sequence
  ENSG00000117461_18 (sequence is synthesized)
gcacaagaagtgattttgtgaatgtgaagtggagaggccgagcagcagccggccgggatgggggcattagaggcctgaggttctctaggactcagccatgccgctgcactgacatactaa

SEQ ID NO: 222031 - DNA, 120 bp, Artificial Sequence
  ENSG00000117461_19 (sequence is synthesized)
gctggaagcagatgttttttttgaaagtctgtttcattggggtttttgttttgtttagccagacaccctcaacagaatattaggcttgatggttatagcgggtggggttgtatttggaag

SEQ ID NO: 222032 - DNA, 120 bp, Artificial Sequence
  ENSG00000117461_20 (sequence is synthesized)
cctctgaagagaccatgtctttttaaaatctaactcttgagagtgcagcaggggcatggctctgctgggagttgtgttttgctttggcagtctctcttccccccacgaagaaggctgttt

SEQ ID NO: 222033 - DNA, 120 bp, Artificial Sequence
  ENSG00000117461_21 (sequence is synthesized)
aggttttgtgatagaatgggatttgatgaaaaagacaaccaaaggaaaatggggaggcttgggatttcatttaaataatctaagccaagatgataaaaaaaaccttcaactgaaggtatt

SEQ ID NO: 222034 - DNA, 120 bp, Artificial Sequence
  ENSG00000117461_22 (sequence is synthesized)
ttgtttcttaccaacataatttaggcttcagcatctcaccagcccctccctctgaagaagtattatgttcagaagccaacaaaacagtttgttgccagaccaatgtttgatgggaaaacg

SEQ ID NO: 222035 - DNA, 120 bp, Artificial Sequence
  ENSG00000117461_23 (sequence is synthesized)
acgctaaaattgatcactgtaactaaccccttctgtccttcctgcctgtttctctgagatgaggaatagcattctttttgtggggatggtgagctttgaatcataaaatgaagttggtgc

SEQ ID NO: 222036 - DNA, 120 bp, Artificial Sequence
  ENSG00000117461_24 (sequence is synthesized)
ttgtatggtgtttccttagcctaaagaatgatctgttgtttgaaacctttgtaacttgtttgtatgagtaaagaaaaggtgcaatgcagtgcttttagatggcttgatataccaaataac

SEQ ID NO: 222037 - DNA, 120 bp, Artificial Sequence
  ENSG00000117461_25 (sequence is synthesized)
aatatagaacaacattattatatgtgcttccccaagtttaaaggccctgcagaaatagtaaacatggtttaatttcccttcatttccccctcctttgctggatggggttttgggagctat

SEQ ID NO: 222038 - DNA, 120 bp, Artificial Sequence
  ENSG00000117461_26 (sequence is synthesized)
aggttgctaaggaggggagtcagattgtggtcaggtgcctcagtaaatcacagacccaggggccctgtggtccagggtgagagtcacaccacattacacatgtgcttccatacagtggtt

SEQ ID NO: 222039 - DNA, 120 bp, Artificial Sequence
  ENSG00000117461_27 (sequence is synthesized)
tctgaagcttttgcagggagagaagatggcttagtgtttagactgttagtagaagccatctggaagcttttctctttgcctttttttgtgatcctgccattaaggctatgtgcagtctgc

SEQ ID NO: 222040 - DNA, 120 bp, Artificial Sequence
  ENSG00000117461_28 (sequence is synthesized)
cctcctgctccagtggccttgattttaggccaggaatcttctgctccatgtggcttaagccttccagctgagtgaagctaggcaaatggagtgggggcaggcatctattcctgcccccat

SEQ ID NO: 222041 - DNA, 120 bp, Artificial Sequence
  ENSG00000117461_29 (sequence is synthesized)
catgccccacacccatcagtcaacactcatttgacaaatagagtccagctgcctctgagccaatcctgggaccataataggctcagagtgagtcagctgtttgaacccaaagctgtgcag

SEQ ID NO: 222042 - DNA, 120 bp, Artificial Sequence
  ENSG00000117461_30 (sequence is synthesized)
tcaggcaccctggctgagctagagaagccagtacctgcatcttggtttataaggcttacagctaggaaagctctagttctgggggtgaaagaaaaatattagtttacctgagcacttatt

SEQ ID NO: 222043 - DNA, 120 bp, Artificial Sequence
  ENSG00000117461_31 (sequence is synthesized)
tccatgacagggtctaaaatatggaccatgatgtagacacagatttttaattttggaaaaacctccagttactagtgacgaggatagaaagggaagtgcttctctttggctttttcttgg

SEQ ID NO: 222044 - DNA, 120 bp, Artificial Sequence
  ENSG00000117461_32 (sequence is synthesized)
ttacactgcagtttcaggattgggtgagacagagacaaatgaacccccctctaaagtcatttaactaatagccagcacatcccttccccaaactgtcaattgaaatcttaactgaaagtt

SEQ ID NO: 222045 - DNA, 120 bp, Artificial Sequence
  ENSG00000117461_33 (sequence is synthesized)
ttactgaataataccaagctaattgctgttgggcacacctggatggctttgcacctggtgttgaacctgctgaagcaggtggatgctcaagattacgtgcaaggaatccctcccatctgg

SEQ ID NO: 222046 - DNA, 120 bp, Artificial Sequence
  ENSG00000117461_34 (sequence is synthesized)
tactaaaatttcagtgtgttctgagtgtcttttaaaccaaaatggaaatacagatacagggctgtagtattcagtaatgtgtctgctccttgttgggcagacaccagcggtgtgcaggga

SEQ ID NO: 222047 - DNA, 120 bp, Artificial Sequence
  ENSG00000117461_35 (sequence is synthesized)
gagaccaagtaccatctttatctacacttgggctggcttgtggagaagggctgctttttttcagtcctacattccttcattttttttttcattcttgaattcattgttttgtgggatcta

SEQ ID NO: 222048 - DNA, 120 bp, Artificial Sequence
  ENSG00000117461_36 (sequence is synthesized)
agacccaggggtcatttgagaggtttgacagtatcttttctgaccagttgccacatgacttgcttgaccctgagcctgtggaaatggcatagggaccagtctactacccactgggcctgg

SEQ ID NO: 222049 - DNA, 120 bp, Artificial Sequence
  ENSG00000117461_37 (sequence is synthesized)
tgtgtagagggggagagggtagcaaggtgcttctctacgcccatgacttgggagcaggtcttggcctccttcatgagagtctagtgccatgtcctgtcccatgatctggaccctgggact

SEQ ID NO: 222050 - DNA, 120 bp, Artificial Sequence
  ENSG00000117461_38 (sequence is synthesized)
gtcttggcatcttaactgcagtttcaatgaggcagagggcaaagagagaccaagatcagaggggttcattatacccctggctagagaacccagctactgacatgcaagcagcttggggct

SEQ ID NO: 222051 - DNA, 120 bp, Artificial Sequence
  ENSG00000117461_39 (sequence is synthesized)
ggctggacacaggtactaggcccattgtttccaggtgaagctttcatcacagaacagtgttgtctccacctggccttagatggcacgccatgattcgggcctggatagactgcctgcgtc

SEQ ID NO: 222052 - DNA, 120 bp, Artificial Sequence
  ENSG00000117461_40 (sequence is synthesized)
cttaccactgatctggccaagaatgaggccctcccaacactttcactccctctccaagccttgatgggacctccacttatttaggcctcatgtgctttgaagaagctttgagagccaatg

SEQ ID NO: 222053 - DNA, 120 bp, Artificial Sequence
  ENSG00000117461_41 (sequence is synthesized)
tgtcttccacgggtctcttttttgctacaagtaatcagccccatgtgttctcttaaactgagaattgcacctgggcaattcctgttttctaaggtggtctctgctgctatttaacaaccc

SEQ ID NO: 222054 - DNA, 120 bp, Artificial Sequence
  ENSG00000117461_42 (sequence is synthesized)
agagtaggcctctgtgaggcttcagtggcctcagaaaccagagggtccagatagggggcctgcttgggccctctgctgccaactgctcaaacctgctttagctccagccacttgtggcaa

SEQ ID NO: 222055 - DNA, 120 bp, Artificial Sequence
  ENSG00000117461_43 (sequence is synthesized)
acaacctcgtttccttacaaattccagcatgtgactttggtgccgttacttgtgaaaaatctattctgttgtctttgatgtgtccaagaaaattcgtgtagtttacgtaaaaatatctga

SEQ ID NO: 222056 - DNA, 120 bp, Artificial Sequence
  ENSG00000117461_44 (sequence is synthesized)
ctcacaagaaagccaactgtatgtcttgtgatgggacagttcataatgtagttgctagaccactttacaaattgttcttgtcaccagatgtgttcagacattgctgtgcaattgttgggg

SEQ ID NO: 222057 - DNA, 120 bp, Artificial Sequence
  ENSG00000117461_45 (sequence is synthesized)
agggtagggggaaaggcgagaggagatacttattggtctttttgtttaataccttccccaagaggggacagtctggccaacttgctccagtaatgcaataaagacattgcaataaagtaa

SEQ ID NO: 222058 - DNA, 120 bp, Artificial Sequence
  ENSG00000117461_46 (sequence is synthesized)
acagaatcccggtacatcgaggcgggacggcgtggaaggggcggtggtgatgcctgctgtcccccctcccggcgcggttgggtggcgcctcagcggcgcgatgtacaatacggtgtggag

SEQ ID NO: 222059 - DNA, 120 bp, Artificial Sequence
  ENSG00000117461_47 (sequence is synthesized)
aaccggcctcagccaatcaccacccaccttgcctctcttccctcgccccactccctcctcgcctggctcgcgtgctcccggcactgactcctggagtgcggccagcgcccggatcgtacc

SEQ ID NO: 222060 - DNA, 120 bp, Artificial Sequence
  ENSG00000117461_48 (sequence is synthesized)
attctgattgaggctgggggagagcgcggatggctgattggggagccgaagcctagagagcggtggggagacgtgaaagtcgagatggagagcagctttttgaacatgttctcaggcact

SEQ ID NO: 222061 - DNA, 120 bp, Artificial Sequence
  ENSG00000117461_49 (sequence is synthesized)
tttaaggtcacttccccattttcgggtatcttttcagcagtgccccattctactagtactaatttactaaattagtccgttttcatgctgctgataaggaaatacccaagacagggcaat

SEQ ID NO: 222062 - DNA, 86 bp, Artificial Sequence
  ENSG00000117461_50 (sequence is synthesized)
tttcatgctgctgataaggaaatacccaagacagggcaatttacaaaaggaagaggcttaattaggcttacagttccacgtggctt

SEQ ID NO: 222063 - DNA, 89 bp, Artificial Sequence
  ENSG00000117461_51 (sequence is synthesized)
accatcagatcttgtgagaccccgcccccatgattcagttatctattcccgggtccttcctacaacatgtgggaattatgggagtacaa

SEQ ID NO: 222064 - DNA, 120 bp, Artificial Sequence
  ENSG00000117461_52 (sequence is synthesized)
acaattcaagatgagatttgggtgagggcacagccaaaccatatcaccattttaaacagatgaggaaatgaaggcactgagaagttaaataacttgcccatggccccacagcaagtgaca

SEQ ID NO: 222065 - DNA, 120 bp, Artificial Sequence
  ENSG00000117461_53 (sequence is synthesized)
ttaaataacttgcccatggccccacagcaagtgacagcagagattcagatgtaggtaggctaattgcaaaaccattgttcttaactgttgtgttatgctacctctggaatatcaaatgta

SEQ ID NO: 222066 - DNA, 120 bp, Artificial Sequence
  ENSG00000117461_54 (sequence is synthesized)
tagctttacttgttcagtcattgctggattcagggcccaaacaaggttattgggattctctctcatgttgtattttggctcagtttttctctgggttgattttatcctcaggcaggcatt

SEQ ID NO: 222067 - DNA, 120 bp, Artificial Sequence
  ENSG00000117461_55 (sequence is synthesized)
gccggtgaagtgacagtatagctgctgggatgagaactgcatattcataatttagcaatttgtgtggaaagagagaatttattttaacaatacagttctagcaaatgttctagaattgac

SEQ ID NO: 222068 - DNA, 120 bp, Artificial Sequence
  ENSG00000117461_56 (sequence is synthesized)
tctcattgggtcagtttgagttttattcctattcctgaaccgtcactgtggcctgagggtagggatgggatagagtggaatattcttattggccagtctgggccatgtgtgtttccatcc

SEQ ID NO: 222069 - DNA, 120 bp, Artificial Sequence
  ENSG00000117461_57 (sequence is synthesized)
ctggatctgagacgggggaatgaatccttacctccagggaacatcagggtgctaataccagaaatgggaatggatatgggccaggcaaaaacaaatgttcaccacgcttaagatattagg

SEQ ID NO: 222070 - DNA, 120 bp, Artificial Sequence
  ENSG00000117461_58 (sequence is synthesized)
tgggtgacagagcgagactcaatctcaagggaaaaaaaaaaaggatattaggaccgtgctcacccagtaggatctgtctgcttgatttctattttagccttaacatgtcaaatattttta

SEQ ID NO: 222071 - DNA, 120 bp, Artificial Sequence
  ENSG00000117472_0 (sequence is synthesized)
agacacacacaccagcagctacacctacacgctgaccatcacaggcacacagaggcacatccacctcacatccacctcatacttgtgtactctcagggttcagtctttcatcctatccct

SEQ ID NO: 222072 - DNA, 120 bp, Artificial Sequence
  ENSG00000117472_1 (sequence is synthesized)
ctctgatctgtgcctcccaataccttccaagatgtttacagagacccttctccctgtgcagttaggagtgtaaggcaagagagcccctacttcatggggcagatcaagagctgagaccaa

SEQ ID NO: 222073 - DNA, 120 bp, Artificial Sequence
  ENSG00000117472_2 (sequence is synthesized)
agatggtctatgttgctgaccttgtcctgtcctcctgctgtcttaaactatgatccctgctgcggtcactgaagcctttccctgtgagcagtggtgtgtgagagccaggcgtccctctgc

SEQ ID NO: 222074 - DNA, 120 bp, Artificial Sequence
  ENSG00000117472_3 (sequence is synthesized)
ctgcccactcagtggcaacacccgggagctgttttgtcctttgtggagcctcagcagttccctctttcagaactcactgccaagagccctgaacaggagccaccatgcagtgcttcagct

SEQ ID NO: 222075 - DNA, 120 bp, Artificial Sequence
  ENSG00000117472_4 (sequence is synthesized)
tcattaagaccatgatgatcctcttcaatttgctcatctttctgtgtggtgcagccctgttggcagtgggcatctgggtgtcaatcgatggggcatcctttctgaagatcttcgggccac

SEQ ID NO: 222076 - DNA, 120 bp, Artificial Sequence
  ENSG00000117472_5 (sequence is synthesized)
tgtcgtccagtgccatgcagtttgtcaacgtgggctacttcctcatcgcagccggcgttgtggtctttgctcttggtttcctgggctgctatggtgctaagactgagagcaagtgtgccc

SEQ ID NO: 222077 - DNA, 120 bp, Artificial Sequence
  ENSG00000117472_6 (sequence is synthesized)
gtcgccttggtgtacaccacaatggctgagcacttcctgacgttgctggtagtgcctgccatcaagaaagattatggttcccaggaagacttcactcaagtgtggaacaccaccatgaaa

SEQ ID NO: 222078 - DNA, 120 bp, Artificial Sequence
  ENSG00000117472_7 (sequence is synthesized)
gggctcaagtgctgtggcttcaccaactatacggattttgaggactcaccctacttcaaagagaacagtgcctttcccccattctgttgcaatgacaacgtcaccaacacagccaatgaa

SEQ ID NO: 222079 - DNA, 120 bp, Artificial Sequence
  ENSG00000117472_8 (sequence is synthesized)
acctgcaccaagcaaaaggctcacgaccaaaaagtagagggttgcttcaatcagcttttgtatgacatccgaactaatgcagtcaccgtgggtggtgtggcagctggaattgggggcctc

SEQ ID NO: 222080 - DNA, 120 bp, Artificial Sequence
  ENSG00000117472_9 (sequence is synthesized)
gagctggctgccatgattgtgtccatgtatctgtactgcaatctacaataagtccacttctgcctctgccactactgctgccacatgggaactgtgaagaggcaccctggcaagcagcag

SEQ ID NO: 222081 - DNA, 120 bp, Artificial Sequence
  ENSG00000117472_10 (sequence is synthesized)
tgattgggggaggggacaggatctaacaatgtcacttgggccagaatggacctgccctttctgctccagacttggggctagatagggaccactccttttaggcgatgcctgactttcctt

SEQ ID NO: 222082 - DNA, 120 bp, Artificial Sequence
  ENSG00000117472_11 (sequence is synthesized)
ccattggtgggtggatgggtggggggcattccagagcctctaaggtagccagttctgttgcccattcccccagtctattaaacccttgatatgccccctaggcctagtggtgatcccagt

SEQ ID NO: 222083 - DNA, 120 bp, Artificial Sequence
  ENSG00000117472_12 (sequence is synthesized)
gctctactgggggatgagagaaaggcattttatagcctgggcataagtgaaatcagcagagcctctgggtggatgtgtagaaggcacttcaaaatgcataaacctgttacaatgttgcca

SEQ ID NO: 222084 - DNA, 120 bp, Artificial Sequence
  ENSG00000117472_13 (sequence is synthesized)
gctgattcatccactgaagccctgggccgggaggctttcctctaagatctgtgggaactgcgcagggccctcctcaatctaggcctcagaattccccctgaggtttggagttgagctaga

SEQ ID NO: 222085 - DNA, 120 bp, Artificial Sequence
  ENSG00000117472_14 (sequence is synthesized)
cagcctttaagagaagctctggctgtattcccactggtacctcactttcctcttgtgaggcaaggaggtcttgtctacatgaggggcgggcctgaagttggattctggaggggagccaaa

SEQ ID NO: 222086 - DNA, 120 bp, Artificial Sequence
  ENSG00000117472_15 (sequence is synthesized)
acccagctccacaggctgatgaccaagagtcccctcgcccttgacaccaggccctgggattcccaaaccctgctttggacccccctaggctcaggcttctgtctcacttttccggggggg

SEQ ID NO: 222087 - DNA, 120 bp, Artificial Sequence
  ENSG00000117472_16 (sequence is synthesized)
gtggcaggaccctggcagcagtgagggaaagtcttgcccctctgcccaccctgaggatatttctagaacccctgatctcctttatatctgcccagctgtgtggtgcagccctgttggcag

SEQ ID NO: 222088 - DNA, 120 bp, Artificial Sequence
  ENSG00000117475_0 (sequence is synthesized)
ttgtttaacagctggcccggaagtttaagtgaatatgcggcttgggctccaaaagttgctgtacggtattttattttaaagtagaaatctgtccgcttttcacttacggaggccttacag

SEQ ID NO: 222089 - DNA, 120 bp, Artificial Sequence
  ENSG00000117475_1 (sequence is synthesized)
tgtgtgttctgtgttacttgagtttatacgcactgcagaatttgtttaccctgctcttttggaaacgtattccggaagcgaaaccctgagtaatcggaagtggttaggagtgagagagct

SEQ ID NO: 222090 - DNA, 120 bp, Artificial Sequence
  ENSG00000117475_2 (sequence is synthesized)
gctggatatgcggagggactgggcgggtcggcttccgaatggaagaggtctgtgagaagttaacctggtgataccgatccgaagagcctatcaagtgaagccccctgaaatacggagaat

SEQ ID NO: 222091 - DNA, 120 bp, Artificial Sequence
  ENSG00000117475_3 (sequence is synthesized)
aagaatcttagaggttgttcagcagaagtcttggagtgcattttcagtggttaaggtgaaaaaatgactactaaaaatttagaaaccaaagtcaccgttacttcatccccaatccgagga

SEQ ID NO: 222092 - DNA, 120 bp, Artificial Sequence
  ENSG00000117475_4 (sequence is synthesized)
gcaggagatggaatggaaactgaggaaccacctaaatctgttgaagttacctccggagtccaatctagaaagcatcatagtcttcagagtccatggaagaaagcagttccatcagagagc

SEQ ID NO: 222093 - DNA, 120 bp, Artificial Sequence
  ENSG00000117475_5 (sequence is synthesized)
ccaggagttcttcagctagggaaaatgctcactgaaaaagcaatggaagttaaagctgtaagaatattagttcccaaagctgctataactcatgatatccccaacaaaaatacaaaggtt

SEQ ID NO: 222094 - DNA, 120 bp, Artificial Sequence
  ENSG00000117475_6 (sequence is synthesized)
aagtctctgggacatcataaaggagaattccttggtcagtcagagggagttatagaacctaataaggaactctcagaggtaaagaatgtattggaaaagctcaagaattctgaaagaagg

SEQ ID NO: 222095 - DNA, 120 bp, Artificial Sequence
  ENSG00000117475_7 (sequence is synthesized)
ttactacaggacaaagaaggtctttcaaaccagctccgtgtacagacagaggtaaatcgtgagttaaaaaagttactggtggcttctgttggggatgatcttcagtatcactttgaacgt

SEQ ID NO: 222096 - DNA, 120 bp, Artificial Sequence
  ENSG00000117475_8 (sequence is synthesized)
ctagcccgtgagaaaaatcagcttattttagaaaatgaagccctaggtcgaaacacagctcagctttctgaacagttagaacgtatgtcaatacagtgtgatgtatggcgaagtaaattc

SEQ ID NO: 222097 - DNA, 120 bp, Artificial Sequence
  ENSG00000117475_9 (sequence is synthesized)
agatgagttaaccaactcaagagcagctttacagcgtcaaaaccgtgatgcacacggggctatacaagatctcctaagtgaacgggaacagtttcgtcaagaaatgatagctacccagaa

SEQ ID NO: 222098 - DNA, 120 bp, Artificial Sequence
  ENSG00000117475_10 (sequence is synthesized)
attattggaggagctcttagtttccttgcaatggggaagagagcaaacttactcccctagtgtacaaccccacagcacagcagagctagcattaacaaatcacaagttggcaaaagcagt

SEQ ID NO: 222099 - DNA, 120 bp, Artificial Sequence
  ENSG00000117475_11 (sequence is synthesized)
aaattctcatcttctgggaaatgttggcattaacaatcaaaaaaagattccatcaacagttgaattctgcagcaccccagctgagaaaatggctgaaacggttctaagaattttagatcc

SEQ ID NO: 222100 - DNA, 120 bp, Artificial Sequence
  ENSG00000117475_12 (sequence is synthesized)
agttacctgcaaagagagttcacctgataatccattttttgagtcttcaccaaccaccttacttgctacaaagaaaaatattggacgatttcatccctatactagatatgaaaatataac

SEQ ID NO: 222101 - DNA, 120 bp, Artificial Sequence
  ENSG00000117475_13 (sequence is synthesized)
tttcaattgctgcaatcactgccggggagaactgattgccctttaacagtcaatatgttggaggcatgctaagaataaacaactaaataactgtattagaaaaaaaagaaacttactaaa

SEQ ID NO: 222102 - DNA, 120 bp, Artificial Sequence
  ENSG00000117475_14 (sequence is synthesized)
tatcataatctgatgatatgtggtcctgaattggctactagtttaagcaaataaactgtaagtcatttatgggttagttggggaataaatggatatgggctggatattcggtaatatcat

SEQ ID NO: 222103 - DNA, 120 bp, Artificial Sequence
  ENSG00000117475_15 (sequence is synthesized)
taatgaaaagcagattgcagaaatacagtatgatctcagtattttgaaattgtaaatacatgtacagacaaatacttagacagtatgcatactggtgttaacagtcacaatttctgggtg

SEQ ID NO: 222104 - DNA, 120 bp, Artificial Sequence
  ENSG00000117475_16 (sequence is synthesized)
atgaaaatgtaacttgaaaccgctccatttctacaatgcacatttactgtttctgttataataaaagggtatgttagaaaaacaaaaaggaggctgggcatggtggctcatgcctctaat

SEQ ID NO: 222105 - DNA, 120 bp, Artificial Sequence
  ENSG00000117475_17 (sequence is synthesized)
caagagtcattattatttgggagctggggttcttacaatgctagaaataatatcacttcctatttacataatgtatacacccaaagatattttatgtactagactccagattaccctttc

SEQ ID NO: 222106 - DNA, 120 bp, Artificial Sequence
  ENSG00000117475_18 (sequence is synthesized)
ttaataaatatctcagggtaaggaaagaaagaaactgtatagatatatttaaaatagagaatactttccaagcaatacatgatacttttcctaaaagactctaaaagaaaaagattctgt

SEQ ID NO: 222107 - DNA, 120 bp, Artificial Sequence
  ENSG00000117475_19 (sequence is synthesized)
aactctcttttagcaccaaattattgtttatcttgctggatattttatatgaacagtgttaatttagatgcactaaagcaaaggtaggcaaactacaaccatgagtcaaacatggccaca

SEQ ID NO: 222108 - DNA, 120 bp, Artificial Sequence
  ENSG00000117475_20 (sequence is synthesized)
cccattcatgtgctattgtctaagctggttttgcactacaactgcagagttgaatagatgcagcagatcctttacagaaaaagttttctgacctcaattctaaagtaattgtagtaggga

SEQ ID NO: 222109 - DNA, 120 bp, Artificial Sequence
  ENSG00000117475_21 (sequence is synthesized)
gctggaggactttctttccctttatggtaattttttgagctacaaaagagccttgcagaaatgggtgaagggattaatcttttaaaaataaatgctatatattaggaaaataaaaaatat

SEQ ID NO: 222110 - DNA, 120 bp, Artificial Sequence
  ENSG00000117475_22 (sequence is synthesized)
tttagagccaagttaacaagtacttcagcaaaacatgctagttttatgcaggggattctgtattccaaatggatacaatccgacatatataaaagaaacagattcttaactattgactct

SEQ ID NO: 222111 - DNA, 120 bp, Artificial Sequence
  ENSG00000117475_23 (sequence is synthesized)
tatttagcaaatgcaacagacaagaatatccaacttgatatttataaaaggtagactttttccaaaagtgtataagctcaaagaaaaaatgcaacctgtcaattaatatatactatgtaa

SEQ ID NO: 222112 - DNA, 120 bp, Artificial Sequence
  ENSG00000117475_24 (sequence is synthesized)
tatatattattgtgtatttatgattagccatcataaatgcccattgcttggcctttaagaataatcacaaaatatttatattaaattatacaaatttgttgcagaagtgcctgtgagaga

SEQ ID NO: 222113 - DNA, 120 bp, Artificial Sequence
  ENSG00000117475_25 (sequence is synthesized)
aatcttcaaaagacaaacctggtcaaataataataattttaatgtcaatgattttttttgtctgactcatctgagttatatttagttttcaagtggcaataaatttatctaccttcttta

SEQ ID NO: 222114 - DNA, 120 bp, Artificial Sequence
  ENSG00000117475_26 (sequence is synthesized)
tcggcttccgaatggaagaggtctgtgagaagttaacctggtgataccgatccgaagagcctatcaagtgaagccccctgaaatacggagaataagaatcttagaggtaaatccgaggac

SEQ ID NO: 222115 - DNA, 120 bp, Artificial Sequence
  ENSG00000117475_27 (sequence is synthesized)
ctggaccttttaaacgtgcatgttagaaaactacatttctttatgggaatgtcattcatcctagcttgtcagttctctaaaatgcttcctcttaaatttctcattctttctcagttctct

SEQ ID NO: 222116 - DNA, 120 bp, Artificial Sequence
  ENSG00000117475_28 (sequence is synthesized)
agggatactttatattgggaacttatactctaaacctcattgaagatggaggtgtgaggtgctttggacaagaccaccaataagttgtaaaagtaggttacaattataaactgccagacc

SEQ ID NO: 222117 - DNA, 120 bp, Artificial Sequence
  ENSG00000117475_29 (sequence is synthesized)
aaagattgaccaagtcaggcatagtaattgaccagcagtccttgttttaaggatccgtaaattccaagtagttttgcttgtgtatacgggatacttggaataaagagaatggcgatataa

SEQ ID NO: 222118 - DNA, 120 bp, Artificial Sequence
  ENSG00000117477_0 (sequence is synthesized)
gctctcgtagttagagaggcccggatggaggacgcagaggcacgctgttgccatggcagtgtggtcctggctgccgcggaggcaggtgccggggtctcctttgcctcaatgtgaagagct

SEQ ID NO: 222119 - DNA, 120 bp, Artificial Sequence
  ENSG00000117477_1 (sequence is synthesized)
tagaaagaggaggagaggagaactcccccggccatctctgtgatcccagccgccgcattttacacagcatatttccttcacaaacagaaaatgaatgaaaataaagatactgattcaaag

SEQ ID NO: 222120 - DNA, 120 bp, Artificial Sequence
  ENSG00000117477_2 (sequence is synthesized)
aaaagtgaagaatacgaagatgactttgaaaaggacctggagtggttaattaatgaaaatgaaaaaagtgatgccagcataatagagatggcttgtgagaaggaagagaatattaaccaa

SEQ ID NO: 222121 - DNA, 120 bp, Artificial Sequence
  ENSG00000117477_3 (sequence is synthesized)
gacttaaaagagaatgagacagtaatggagcacaccaaacggcattctgatcctgacaaatctttgcaggatgaggtctcaccaagaagaaatgacatcatttctgtaccaggtattcaa

SEQ ID NO: 222122 - DNA, 120 bp, Artificial Sequence
  ENSG00000117477_4 (sequence is synthesized)
cctttggatcccatatcagattcagatagtgaaaactctttccaggaatccaaactagaaagccagaaagacttggaggaggaagaggatgaggaagtaaggagatatattatggagaaa

SEQ ID NO: 222123 - DNA, 120 bp, Artificial Sequence
  ENSG00000117477_5 (sequence is synthesized)
attgtacaagctaacaagcttctacagaatcaagaaccggtgaatgataaaagggagcgaaaacttaagttcaaggaccagttagttgatttggaagttcctccactagaagacactact

SEQ ID NO: 222124 - DNA, 120 bp, Artificial Sequence
  ENSG00000117477_6 (sequence is synthesized)
acttttaaaaattattttgaaaacgaaaggaatatgtttgggaaactgtcacaattatgtatttccaatgattttggacaagaagatgtgctcctgtcacttactaatggaagctgtgaa

SEQ ID NO: 222125 - DNA, 120 bp, Artificial Sequence
  ENSG00000117477_7 (sequence is synthesized)
gaaaatgaccctcagcagttgttacccagatcttccaactcctctgtcagtggcaccaagaaagaagattctacagcaaagattcatgctgtcactcactcatcaacaggagagccgctg

SEQ ID NO: 222126 - DNA, 120 bp, Artificial Sequence
  ENSG00000117477_8 (sequence is synthesized)
gcttatatcgctcagccaccactcaaccgcaagacttgtccaagctctgctgtcaactcagatcgaagtaaagggaatgggaaatctaatcacaggacacagtctgcacatatctcacca

SEQ ID NO: 222127 - DNA, 120 bp, Artificial Sequence
  ENSG00000117477_9 (sequence is synthesized)
gtgacttcaacatactgtctttcccctcgacagaaagaactacaaaaacaactagaagaaaagagagaaaaactgaaaagagaggaagagcgacgaaaaatagaagaagagaaagaaaaa

SEQ ID NO: 222128 - DNA, 120 bp, Artificial Sequence
  ENSG00000117477_10 (sequence is synthesized)
aagagagagaatgacatagtatttaaagcgtggttgcaaaagaaaagagagcaggtcttagaaatgaggagaattcagcgagcaaaggaaattgaagacatgaacagtagagaaaacaga

SEQ ID NO: 222129 - DNA, 120 bp, Artificial Sequence
  ENSG00000117477_11 (sequence is synthesized)
gatccacaacaagcttttcgattatggcttaaaaaaaagcacgaagagcagatgaaagaaagacagacagaagaactaagaaagcaagaggaatgtttattcttccttaaaggaacagaa

SEQ ID NO: 222130 - DNA, 120 bp, Artificial Sequence
  ENSG00000117477_12 (sequence is synthesized)
ggccgggaaagggcctttaaacaatggttaagaaggaaacggatggaaaaaatggcagagcaacaagctgtcagagagagaactagacagctccgactagaagctaagcgttctaaacag

SEQ ID NO: 222131 - DNA, 120 bp, Artificial Sequence
  ENSG00000117477_13 (sequence is synthesized)
ttacagcaccacctatatatgtcagaagccaaaccttttcgttttactgatcattataactgaaagtttctattaaatatttcagtgggcagctgctatcaaaattttggatatgatttc

SEQ ID NO: 222132 - DNA, 120 bp, Artificial Sequence
  ENSG00000117477_14 (sequence is synthesized)
ttagggtctgtgtactttggttgtattctaaattatggaaatggtatttatcttttattgacagtgaatttgtttttttaatactagaacaaaataaatttttttctcacagtgttgtaa

SEQ ID NO: 222133 - DNA, 120 bp, Artificial Sequence
  ENSG00000117477_15 (sequence is synthesized)
ggggtccaatttgtgcgcgtggagtgagacagaaaacctggagcccgatctcccggccagcgactccctccttctgggtgtgcggctgaagactggaagcaggttgccttgcctgctgca

SEQ ID NO: 222134 - DNA, 120 bp, Artificial Sequence
  ENSG00000117477_16 (sequence is synthesized)
agcccgccgtacctaccccttctccgcgtgcgcccctccctgtgcctgcgcattaccggctagccggcggcgggcgctgcagcccctacgtgattctgcggctcactcccctcggatggt

SEQ ID NO: 222135 - DNA, 120 bp, Artificial Sequence
  ENSG00000117477_17 (sequence is synthesized)
ctttccacccgagtttttcccgggaagaggctctcaagactagccagtgcaggaggaggagtcgaactctggatagcctgtttataaagccctaactgtgccgatgttgaccgttttctg

SEQ ID NO: 222136 - DNA, 120 bp, Artificial Sequence
  ENSG00000117477_18 (sequence is synthesized)
aaactcctcctccaaaacccacgccaaaccacaagatgaaggaaattcacacatcaggatgccaaaaaccatggaagacttctgatgttctgggagggttgacaaagatggaccttaaat

SEQ ID NO: 222137 - DNA, 120 bp, Artificial Sequence
  ENSG00000117477_19 (sequence is synthesized)
agttgttcaagaactacccttgcaaaagatgcaacatgcagataactacaattaggttctaagaggtcttgtgaaaataaaatgattcctattttgttcagactttgatggaacagaaaa

SEQ ID NO: 222138 - DNA, 120 bp, Artificial Sequence
  ENSG00000117477_20 (sequence is synthesized)
ctcccttcattgtaagttttttatttcttccttatgtctgattaatcccccaatataaacttcaattaattgagcagctctgcaaaatatatgaataaaacaccacatattaagatatta

SEQ ID NO: 222139 - DNA, 120 bp, Artificial Sequence
  ENSG00000117477_21 (sequence is synthesized)
aagtgtctgcagccaaccaaagagggaatgtttgatggacagaagttggaatggaaggagaaaatggcttattttagttaaaatgttttacttttggaaatttttttaaaaacttatttt

SEQ ID NO: 222140 - DNA, 120 bp, Artificial Sequence
  ENSG00000117477_22 (sequence is synthesized)
cacatatcacataaatacattgttaggacccctcccagggccatagaagtggcctgcacagacatctggttttaaagtggcagtacagaagcaagctggtttcactgtccccacagaaaa

SEQ ID NO: 222141 - DNA, 120 bp, Artificial Sequence
  ENSG00000117477_23 (sequence is synthesized)
ccaaaaatatacagagctgtgattttccccagcaacagtccagaactcatatatgaggatgagacagatcctagggccataaagaaaaaaacttctttggaaaaaaactccaagcagatg

SEQ ID NO: 222142 - DNA, 120 bp, Artificial Sequence
  ENSG00000117477_24 (sequence is synthesized)
actgcaggaaatccctttaaacttttgccttatggcaaatggacatatgctcaaaggtgctgaacacatgaaataaggctgtaaaaatctactaaacaaatgaaaataattacattgcaa

SEQ ID NO: 222143 - DNA, 120 bp, Artificial Sequence
  ENSG00000117477_25 (sequence is synthesized)
atgcttttttccttagagcacttgttttaagaaatgtatttctggaatacaagctagaagtggttttgtcctgctgctgagggttaaaggcaaacttaaggtctccagcctttggtgtga

SEQ ID NO: 222144 - DNA, 120 bp, Artificial Sequence
  ENSG00000117477_26 (sequence is synthesized)
cacatgagagcgaataacaaaaagaaggtcttgagttttttgatagttaggcatattttcattataatggtatccagatatgtgatatatctgatatataatacacatatagacacatat

SEQ ID NO: 222145 - DNA, 120 bp, Artificial Sequence
  ENSG00000117477_27 (sequence is synthesized)
atgtctctctatatatttgtatataggtagattttattatatgtgaaatctgcatataactataatgaaagtctcaactgttacctcaataacctttaacctgactacaatatttaaaag

SEQ ID NO: 222146 - DNA, 120 bp, Artificial Sequence
  ENSG00000117477_28 (sequence is synthesized)
ttcaatctcactaccagaacacaccctgacacttctgattctattttgctttatgttttgcatattgtttgtcaacttctatcatatgacttagtatgtttattatttattgtcctctct

SEQ ID NO: 222147 - DNA, 120 bp, Artificial Sequence
  ENSG00000117477_29 (sequence is synthesized)
ctccattgaagagaatttttgattccttaaagaaaatatttctcacatgatcagttttttaatttacaaaatatctcaatgtcaatgtacccatttcaaatatatgtgtgttaaacatta

SEQ ID NO: 222148 - DNA, 120 bp, Artificial Sequence
  ENSG00000117479_0 (sequence is synthesized)
agaggcgtctgtagggtaaagctgggggttctgtagccggaggcggcggcgagtccagaacgtcctggccttacagggagaaggcgtcactcgcggttacaagtgcctgaccctcactcc

SEQ ID NO: 222149 - DNA, 120 bp, Artificial Sequence
  ENSG00000117479_1 (sequence is synthesized)
ctcactccagttggcggaggaggagaaggaaggggccgggccgggtcccctcccctcgcgccccggatggatgtgcccggcccggtgtctcggcgggcggcggcggcggcggccactgtg

SEQ ID NO: 222150 - DNA, 120 bp, Artificial Sequence
  ENSG00000117479_2 (sequence is synthesized)
gaccgctcgggtccgtcgcgaatgctggttcttgccgaccgcgctgctctgcgcctacggcttcttcgccagcctcaggccgtccgagcccttcctgaccccgtacctgctggggccgga

SEQ ID NO: 222151 - DNA, 120 bp, Artificial Sequence
  ENSG00000117479_3 (sequence is synthesized)
caagaacctgaccgagagggaggtcttcaatgaaatttatccagtatggacttactcttacctggtgctactgtttcctgtgttccttgccacagactacctccgttataaacctgttgt

SEQ ID NO: 222152 - DNA, 120 bp, Artificial Sequence
  ENSG00000117479_4 (sequence is synthesized)
tctactgcaggggctcagccttattgttacatggtttatgctgctctatgcccagggactgctggccattcaatttctagaatttttttatggcatcgccacagccactgaaattgccta

SEQ ID NO: 222153 - DNA, 120 bp, Artificial Sequence
  ENSG00000117479_5 (sequence is synthesized)
ttactcttatatctacagtgtggtggacctgggcatgtaccagaaagtcacaagttactgtcgaagtgccactttggtgggctttacagtgggctctgtcctagggcaaatccttgtctc

SEQ ID NO: 222154 - DNA, 120 bp, Artificial Sequence
  ENSG00000117479_6 (sequence is synthesized)
agtggcaggctggtcgctgttcagcctgaatgtcatctctcttacctgtgtttcagtggcttttgctgtggcctggtttttacctatgccacagaagagcctcttctttcaccacattcc

SEQ ID NO: 222155 - DNA, 120 bp, Artificial Sequence
  ENSG00000117479_7 (sequence is synthesized)
ttctacctgccagagagtgaatggcatcaaggtacaaaatggtggcattgttactgacaccccagcttctaaccaccttcctggctgggaggacattgagtcaaaaatccctctaaatat

SEQ ID NO: 222156 - DNA, 120 bp, Artificial Sequence
  ENSG00000117479_8 (sequence is synthesized)
ggaggagcctcccgtggaggaaccggaacccaagccagaccgtctccttgtattgaaagtactatggaatgatttcctgatgtgctactcctctcgccctcttctctgctggtctgtgtg

SEQ ID NO: 222157 - DNA, 120 bp, Artificial Sequence
  ENSG00000117479_9 (sequence is synthesized)
gtgggccctctctacctgtggctattttcaagttgtgaactacacacagggcctgtgggagaaagtgatgccttctcgctatgctgctatctataatggtggcgtggaggccgtttcaac

SEQ ID NO: 222158 - DNA, 120 bp, Artificial Sequence
  ENSG00000117479_10 (sequence is synthesized)
cttactgggtgctgttgctgtgtttgcagttggttatataaaaatatcctggtcaacttggggagaaatgacattatctctcttttctctcctgattgctgctgcagtgtatatcatgga

SEQ ID NO: 222159 - DNA, 120 bp, Artificial Sequence
  ENSG00000117479_11 (sequence is synthesized)
cactgtgggtaacatttgggtgtgctatgcatcctatgttgtcttcagaatcatctacatgttactcatcacgatagcaacttttcaaattgctgcaaacctcagcatggaacgctatgc

SEQ ID NO: 222160 - DNA, 120 bp, Artificial Sequence
  ENSG00000117479_12 (sequence is synthesized)
cctagtatttggtgtaaataccttcattgccctggcactgcagacgctgctcactctaattgtggtagatgccagtggccttggattagaaattaccactcagtttttgatctatgccag

SEQ ID NO: 222161 - DNA, 120 bp, Artificial Sequence
  ENSG00000117479_13 (sequence is synthesized)
ttattttgcactcatcgctgtggttttcctggccagtggtgcagtcagtgttatgaagaaatgtagaaagctggaagatccacaatcaagttctcaagtaaccacttcataatatactgc

SEQ ID NO: 222162 - DNA, 120 bp, Artificial Sequence
  ENSG00000117479_14 (sequence is synthesized)
tgaagggcttcttcttatagcaagaactctgcacagcaactgcctggatgtgtttgattttttaaagcgtagacatatatttatgaatgtgcatttcttgacttcacagcagccacttga

SEQ ID NO: 222163 - DNA, 120 bp, Artificial Sequence
  ENSG00000117479_15 (sequence is synthesized)
gttccgggaataacatgatactattcagaggagccagaagtaaagtttatttcatggattatttatgagagctaatttaaggatgactttttttctgattcaaaagtgaacttgatttta

SEQ ID NO: 222164 - DNA, 120 bp, Artificial Sequence
  ENSG00000117479_16 (sequence is synthesized)
aaaaccagtcaagagcaatcaaagcagcacatggtgttgtatacttcattagcaagtgagtttggtgttttataggtcacatatgtctgtatctacttagccagatgcttggcctggtgg

SEQ ID NO: 222165 - DNA, 120 bp, Artificial Sequence
  ENSG00000117479_17 (sequence is synthesized)
gaccagggctccacagaggccacaaaatgttgcaagtcatgatggatggaaatatgttctaacagcatctgcctctattcaatttaattcttatttctgtgttactcatgtacattggtc

SEQ ID NO: 222166 - DNA, 120 bp, Artificial Sequence
  ENSG00000117479_18 (sequence is synthesized)
tttctacatagttattctatcactggcaatatttgttctggtttagtgttctgtattttaaggtgtacgtatcatttctaattttaagttattttaaaaaaattcatcatatgaatgttc

SEQ ID NO: 222167 - DNA, 120 bp, Artificial Sequence
  ENSG00000117479_19 (sequence is synthesized)
ttggttcccattgtgacgattatttatttctgtaaaatttgtttagaagtacgtttttgcattattcatatgcttcccagagaagctcatttagttagaaaataaggcaagttttgaagc

SEQ ID NO: 222168 - DNA, 120 bp, Artificial Sequence
  ENSG00000117479_20 (sequence is synthesized)
ctgctaaatgaagagacttaagaaagcttaaggtacgcttgcttgtctttaaatcttcaatatgaaggactattaattccaagattaaaagttcatatataggctaaagatgtaactagg

SEQ ID NO: 222169 - DNA, 120 bp, Artificial Sequence
  ENSG00000117479_21 (sequence is synthesized)
gatgtaactaggccatttgtatttgtattcccttttatttccaaaataaaatgaaaaatctttttttaataatttcatccctatttatagtttttatattaatttgtttttcttatccaa

SEQ ID NO: 222170 - DNA, 120 bp, Artificial Sequence
  ENSG00000117479_22 (sequence is synthesized)
ataggaattgcattagtccaaggcctttttcataaactgagcctcttttcaattatttcaatgggacaggaactaggatagatgtgattcctgcatttttttaccttaaatctgcctttg

SEQ ID NO: 222171 - DNA, 120 bp, Artificial Sequence
  ENSG00000117479_23 (sequence is synthesized)
tttctaaaggtagatcatcttgaatatttgcttaaaattgctagtgatttcattaccaagttacttgaaaaaatgttctatatgcatttaattctgaaatcagtctaccaaggggctgct

SEQ ID NO: 222172 - DNA, 120 bp, Artificial Sequence
  ENSG00000117479_24 (sequence is synthesized)
agtatatgtcagacatgaaaactattttaaagctgactttgttgccttatcttgaaaagaatctagataggtgcttttaactggggtattaacttttttagaatgacacagctgaacagt

SEQ ID NO: 222173 - DNA, 120 bp, Artificial Sequence
  ENSG00000117479_25 (sequence is synthesized)
gttaataatagtgtgtcaagattgcaaagtcgacatactcatttggtttaagcaggaatcctagaagcaaatggatggggataagaataggtcattttctattcaccatcctttactatt

SEQ ID NO: 222174 - DNA, 120 bp, Artificial Sequence
  ENSG00000117479_26 (sequence is synthesized)
aagggaaaggaaaagaacactagctaaggaagggaaagggaagtgatatcataaaagtagcaaccttcattttacattctgtctgtttttctttttttgctttgttttgtttgtgctaat

SEQ ID NO: 222175 - DNA, 120 bp, Artificial Sequence
  ENSG00000117479_27 (sequence is synthesized)
ttgggaattgtgtactccgaaacaagtagaaaagtgctgtttgagggattttattaaatctttttttaatggaatgtggtacaaattgttcatgttaccaaagcaatatttccctggaat

SEQ ID NO: 222176 - DNA, 120 bp, Artificial Sequence
  ENSG00000117479_28 (sequence is synthesized)
ttaattcaaagtttgtggcatacaacctgagccttttcttatataagacaagaatatgttcacatcttggtatgtggccatatttatagaatgctgaactcaatgtgcaagttgtactgt

SEQ ID NO: 222177 - DNA, 120 bp, Artificial Sequence
  ENSG00000117479_29 (sequence is synthesized)
gaatgctgaactcaatgtgcaagttgtactgtatgcagttttgtaaataagtgaaaataatttgttgtactttttattcaattctgtatagattataaaattatttttattaaataaata

SEQ ID NO: 222178 - DNA, 120 bp, Artificial Sequence
  ENSG00000117479_30 (sequence is synthesized)
gtttgaaggagagatgactcatcctgccatgatgccaaattagaagctatggttctttttgactcttgcctctgcttcagctgcagcattttttttccttagcaatgtccctgtgtcttt

SEQ ID NO: 222179 - DNA, 120 bp, Artificial Sequence
  ENSG00000117479_31 (sequence is synthesized)
gtcctgcattttcatctcattgccacctctcctaattcagtctgtcatctcagtggctccattttattgattccatcaagttcagaaatttctgtgtgagtttcaaggccctccataatc

SEQ ID NO: 222180 - DNA, 120 bp, Artificial Sequence
  ENSG00000117479_32 (sequence is synthesized)
ttgagctattctgtttataagtttgcagattttaaaatttaataatctaagctgagtttttaatttattgcaacagcatttgtgtagcaaaataattggattttttttgtttgttctgta

SEQ ID NO: 222181 - DNA, 120 bp, Artificial Sequence
  ENSG00000117479_33 (sequence is synthesized)
taaattttttggtttctttacaaaccaaaatattcaagtttctagttaaatgaggcaaatgggaggaagcattgtattatatgtgcattatcagtttttctcctgaggaagcatttaggc

SEQ ID NO: 222182 - DNA, 120 bp, Artificial Sequence
  ENSG00000117479_34 (sequence is synthesized)
aagttttgtttattcccatgtttgtatgttcctactgttttcagatgtttgcatgagatttatatcatttagttgcagaatgttttcatttggttggaaaggcaattgacagtagaaaga

SEQ ID NO: 222183 - DNA, 120 bp, Artificial Sequence
  ENSG00000117479_35 (sequence is synthesized)
aggactcttcatgtttaaagataaatgtttacttttatttagaataaatattataagtactccagaagtaattcttatttattcactcttttatttttttttaagttttcaaattgctgc

SEQ ID NO: 222184 - DNA, 120 bp, Artificial Sequence
  ENSG00000117480_0 (sequence is synthesized)
gtcgcggtaggcagcagcaggctgaagggatcatggtgcagtacgagctgtgggccgcgctgcctggcgcctccggggtcgccctggcctgctgcttcgtggcggcggccgtggccctgc

SEQ ID NO: 222185 - DNA, 120 bp, Artificial Sequence
  ENSG00000117480_1 (sequence is synthesized)
gctggtccgggcgccggacggcgcggggcgcggtggtccgggcgcgacagaggcagcgagcgggcctggagaacatggacagggcggcgcagcgcttccggctccagaacccagacctgg

SEQ ID NO: 222186 - DNA, 120 bp, Artificial Sequence
  ENSG00000117480_2 (sequence is synthesized)
actcagaggcgctgctagccctgcccctgcctcagctggtgcagaagttacacagtagagagctggcccctgaggccgtgctcttcacctatgtgggaaaggcctgggaagtgaacaaag

SEQ ID NO: 222187 - DNA, 120 bp, Artificial Sequence
  ENSG00000117480_3 (sequence is synthesized)
ggaccaactgtgtgacctcctatctggctgactgtgagactcagctgtctcaggccccaaggcagggcctgctctatggcgtccctgtgagcctcaaggagtgcttcacctacaagggcc

SEQ ID NO: 222188 - DNA, 120 bp, Artificial Sequence
  ENSG00000117480_4 (sequence is synthesized)
aggactccacgctgggcttgagcctgaatgaaggggtgccggcggagtgcgacagcgtagtggtgcatgtgctgaagctgcagggtgccgtgcccttcgtgcacaccaatgttccacagt

SEQ ID NO: 222189 - DNA, 120 bp, Artificial Sequence
  ENSG00000117480_5 (sequence is synthesized)
ccatgttcagctatgactgcagtaaccccctctttggccagaccgtgaacccatggaagtcctccaaaagcccagggggctcctcagggggtgaaggggccctcatcgggtctggaggct

SEQ ID NO: 222190 - DNA, 120 bp, Artificial Sequence
  ENSG00000117480_6 (sequence is synthesized)
cccccctgggcttaggcactgatatcggaggcagcatccgcttcccctcctccttctgcggcatctgcggcctcaagcccacagggaaccgcctcagcaagagtggcctgaagggctgtg

SEQ ID NO: 222191 - DNA, 120 bp, Artificial Sequence
  ENSG00000117480_7 (sequence is synthesized)
tctatggacaggaggcagtgcgtctctccgtgggccccatggcccgggacgtggagagcctggcactgtgcctgcgagccctgctgtgtgaggacatgttccgcttggaccccactgtgc

SEQ ID NO: 222192 - DNA, 120 bp, Artificial Sequence
  ENSG00000117480_8 (sequence is synthesized)
cccttgcccttcagagaagaggtctacaccagctctcagcccctgcgtgtggggtactatgagactgacaactataccatgccctccccggccatgaggcgggccgtgctggagaccaaa

SEQ ID NO: 222193 - DNA, 120 bp, Artificial Sequence
  ENSG00000117480_9 (sequence is synthesized)
cagagccttgaggctgcggggcacacgctggttcccttcttgccaagcaacataccccatgctctggagaccctgtcaacaggtgggctcttcagtgatggtggccacaccttcctacag

SEQ ID NO: 222194 - DNA, 120 bp, Artificial Sequence
  ENSG00000117480_10 (sequence is synthesized)
aacttcaaaggtgatttcgtggacccctgcctgggggacctggtctcaattctgaagcttccccaatggcttaaaggactgctggccttcctggtgaagcctctgctgccaaggctgtca

SEQ ID NO: 222195 - DNA, 120 bp, Artificial Sequence
  ENSG00000117480_11 (sequence is synthesized)
gctttcctcagcaacatgaagtctcgttcggctggaaaactctgggaactgcagcacgagatcgaggtgtaccgcaaaaccgtgattgcccagtggagggcgctggacctggatgtggtg

SEQ ID NO: 222196 - DNA, 120 bp, Artificial Sequence
  ENSG00000117480_12 (sequence is synthesized)
ctgacccccatgctggcccctgctctggacttgaatgccccaggcagggccacaggggccgtcagctacactatgctgtacaactgcctggacttccctgcaggggtggtgcctgtcacc

SEQ ID NO: 222197 - DNA, 120 bp, Artificial Sequence
  ENSG00000117480_13 (sequence is synthesized)
acggtgactgctgaggacgaggcccagatggaacattacaggggctactttggggatatctgggacaagatgctgcagaagggcatgaagaagagtgtggggctgccggtggccgtgcag

SEQ ID NO: 222198 - DNA, 120 bp, Artificial Sequence
  ENSG00000117480_14 (sequence is synthesized)
tgtgtggctctgccctggcaagaagagttgtgtctgcggttcatgcgggaggtggagcgactgatgacccctgaaaagcagtcatcctgatggctctggctccagaggacctgagactca

SEQ ID NO: 222199 - DNA, 120 bp, Artificial Sequence
  ENSG00000117480_15 (sequence is synthesized)
cactctctgcagcccagcctagtcagggcacagctgccctgctgccacagcaaggaaatgtcctgcatggggcagaggcttccgtgtcctctcccccaaccccctgcaagaagcgccgac

SEQ ID NO: 222200 - DNA, 120 bp, Artificial Sequence
  ENSG00000117480_16 (sequence is synthesized)
tccctgagtctggacctccatccctgctctggtcccctctcttcgtcctgatccctccacccccatgtggcagcccatgggtatgacataggccaaggcccaactaacagtcaagaaaca

SEQ ID NO: 222201 - DNA, 120 bp, Artificial Sequence
  ENSG00000117480_17 (sequence is synthesized)
gatttccccacctgtgcctccaggctgtacctccctaaggggaggtaccctcagggaggcctcatcagggagatgttgccctcagttcttagagctctgagctgggtttgctggagaggg

SEQ ID NO: 222202 - DNA, 120 bp, Artificial Sequence
  ENSG00000117480_18 (sequence is synthesized)
ataccctgagtcctgccttggggagctcccgtggatgtgggttgcagcccaggcatcccaaaggatcagcagaaacaaacggcatgtttggaaggagggagctgagtctggtgaggagga

SEQ ID NO: 222203 - DNA, 120 bp, Artificial Sequence
  ENSG00000117480_19 (sequence is synthesized)
gctgtgtgaccttggcctagcttccaacctctctgggctccaggcggggattcggtctccggggttttgctgggaggaagcattacagtaccactggccgggcgtgggtcctagtttcca

SEQ ID NO: 222204 - DNA, 120 bp, Artificial Sequence
  ENSG00000117481_0 (sequence is synthesized)
caggcgtgagccaccacgcccggccaggtcccgaaacttaagcttcatttgtttcactgcaaatctgcttctgcctacaagcctggtctcattttcctctacctaaggatcttcctccat

SEQ ID NO: 222205 - DNA, 120 bp, Artificial Sequence
  ENSG00000117481_1 (sequence is synthesized)
gcctggtctcattttcctctacctaaggatcttcctccatgcaatttcggcctaggaggcccttcccgccccttttcgcctagctaactctttcggtactcaaccaccaactcctaatcc

SEQ ID NO: 222206 - DNA, 120 bp, Artificial Sequence
  ENSG00000117481_2 (sequence is synthesized)
tccctggtcccccaagtgggctaggggcttcttgggagtccctcgcactgctctaagcatccaggcagagtcattattccgggtgccaggttgctctttttccagcagccttcaggggac

SEQ ID NO: 222207 - DNA, 120 bp, Artificial Sequence
  ENSG00000117481_3 (sequence is synthesized)
tcctggctgggcggagtctgtagaggcgcgcggagtcctgggagagcgtcagatgtatttcctttcccttttttcgctcgtgtcccgccgggtggcgctcaccacctccccggaacacgc

SEQ ID NO: 222208 - DNA, 120 bp, Artificial Sequence
  ENSG00000117481_4 (sequence is synthesized)
gagtctcctgtcgcggttccggtcggaattaccccgtggagcacgccgatatggctgcgctgacactgaggggtgtccgggagctgctgaagcgtgtggacctcgcgacggtcccgcgga

SEQ ID NO: 222209 - DNA, 120 bp, Artificial Sequence
  ENSG00000117481_5 (sequence is synthesized)
gacatcgatataagaagaaatgggctgccacagagcccaaattccctgctgttcgactggctttgcagaattttgacatgacttacagtgtgcagtttggagatctttggccatcaatcc

SEQ ID NO: 222210 - DNA, 120 bp, Artificial Sequence
  ENSG00000117481_6 (sequence is synthesized)
gtgtcagtctcctctcagagcagaagtatggtgcactggtcaataactttgctgcctgggatcatgtaagtgctaagctggagcagctgagtgccaaggattttgtgaatgaagccatct

SEQ ID NO: 222211 - DNA, 120 bp, Artificial Sequence
  ENSG00000117481_7 (sequence is synthesized)
cgcttccctcctgccagacctggcagcctgggtgtcatggagtactacctgatggatgctgcctccttgctgcctgttctggccctcggcctgcagcctggggacatcgtgcttgaccta

SEQ ID NO: 222212 - DNA, 120 bp, Artificial Sequence
  ENSG00000117481_8 (sequence is synthesized)
tgtgcagctcctgggggaaagacactagcgttgcttcagactggctgttgccgcaatcttgctgccaatgatctctccccgtcccgaatagccagactacagaagatccttcacagctat

SEQ ID NO: 222213 - DNA, 120 bp, Artificial Sequence
  ENSG00000117481_9 (sequence is synthesized)
gtgcctgaagagatcagggatggaaatcaagttcgagttacctcatgggatggcaggaaatggggagaactggagggggacacctatgaccgggtgctggtggatgtgccctgtaccaca

SEQ ID NO: 222214 - DNA, 120 bp, Artificial Sequence
  ENSG00000117481_10 (sequence is synthesized)
gaccgccactcccttcatgaggaggagaacaacatctttaagcggtcaaggaagaaggagcgacagatattgcctgtgctgcaagtgcagcttcttgcggctggactccttgccaccaaa

SEQ ID NO: 222215 - DNA, 120 bp, Artificial Sequence
  ENSG00000117481_11 (sequence is synthesized)
ccaggaggccatgttgtctattctacctgctcactctcacacttacagaacgagtatgtggtgcaaggtgccattgagctcctggccaatcaatacagcatccaggtacaggtggaagat

SEQ ID NO: 222216 - DNA, 120 bp, Artificial Sequence
  ENSG00000117481_12 (sequence is synthesized)
ctgactcacttccgaagggttttcatggacacattttgtttcttctcatcctgtcaggttggggagctggtaataccaaacctcatggccaattttggccccatgtacttctgcaaaatg

SEQ ID NO: 222217 - DNA, 120 bp, Artificial Sequence
  ENSG00000117481_13 (sequence is synthesized)
cgtaggctgacatagtatcacccaatccctgaagcaagaatacaaagggtatactctgttggatgcaccagaaactggaaactgggaccagtggcagagatgcactctcggtcctgtctc

SEQ ID NO: 222218 - DNA, 120 bp, Artificial Sequence
  ENSG00000117481_14 (sequence is synthesized)
catcctgttcgtgtctttctgcagttttcggcaataagaagtagaagatttgctgtcctgctgtccaattgtggagcatcagcaggtttccaactcactcattaacccctaccccatctc

SEQ ID NO: 222219 - DNA, 120 bp, Artificial Sequence
  ENSG00000117481_15 (sequence is synthesized)
caggcctgtactaaagtttgctgcccgcttaggggcttagaaggagaagccagtgagcaggctcacactaagttgtaaacataggagaagcatttggccaataaagttgttgaaactcta

SEQ ID NO: 222220 - DNA, 120 bp, Artificial Sequence
  ENSG00000117481_16 (sequence is synthesized)
ggctgcgctgacactgaggggtgtccgggagctgctgaagcgtgtggacctcgcgacggtcccgcggagacatcgatataagaagaaatggcccggtcgccctcacccctcggaaaatac

SEQ ID NO: 222221 - DNA, 120 bp, Artificial Sequence
  ENSG00000117481_17 (sequence is synthesized)
gcgaccttgcctgcactcctgggtctccgccgccttgcaggaaaggattcagccccttcctcaacctcgagctgcctctggcgaccgggcaaggttacagcgaccaccctgtccatactg

SEQ ID NO: 222222 - DNA, 120 bp, Artificial Sequence
  ENSG00000117481_18 (sequence is synthesized)
ccggcccaaaccctggcaaaaggtgcaacgaatcctctcatcctctggactctccttgcttctccagagaccctttttcttgcctcactggaagccctggaatttcttctatgaccggca

SEQ ID NO: 222223 - DNA, 120 bp, Artificial Sequence
  ENSG00000117481_19 (sequence is synthesized)
aagattgccagctatagcaagcatcccagctgcagcaaccaggaccgacttgtgcactcctcatctgaagtcttcatttctcttttactctgcctccttgttcttgtcctcttgtcccct

SEQ ID NO: 222224 - DNA, 120 bp, Artificial Sequence
  ENSG00000117481_20 (sequence is synthesized)
gctacccccatagcagtcatcctagaagtccctgttttggttcacacctcaagattctgtgggccctccttatccaacctttctggggtctgggaactctcccagcatgaccctcaaacc

SEQ ID NO: 222225 - DNA, 120 bp, Artificial Sequence
  ENSG00000117481_21 (sequence is synthesized)
ctcctgccaggtaggatctggagccatgactggagcggtcctgagtgtctgctggaagtagacatgttgagacccagcttctaccctctgtaataaggaccataatattgctaatattta

SEQ ID NO: 222226 - DNA, 120 bp, Artificial Sequence
  ENSG00000117481_22 (sequence is synthesized)
tggcatgtttatacagactaggcatttttttgaggtgctgtacatatgttatctctttttgttctgtcagcagccttatgaagtaggtaatattattgctgttttacatttggagaaact

SEQ ID NO: 222227 - DNA, 120 bp, Artificial Sequence
  ENSG00000117481_23 (sequence is synthesized)
tgtaccagccagttactgagcccctgtcacccttgaagtgagttccacctgaccagtcttgagcagccaacaggctcaattaagcccgcctggtttttccatatggctcatgatctaatt

SEQ ID NO: 222228 - DNA, 120 bp, Artificial Sequence
  ENSG00000117481_24 (sequence is synthesized)
taaggaacaagtaactaaaaatgttaagccagtgcaaaataatctgcttacctactcacattggaaaaaccctctgagctgaataattctggccattcctgctgtcaacaatactgctgc

SEQ ID NO: 222229 - DNA, 120 bp, Artificial Sequence
  ENSG00000117481_25 (sequence is synthesized)
ccaaatgtggcttaggaggctgcttctgccacaaaaccgtcatactcttgtgcgtgccttgttctttgttcattcatctagcaggtattcccagacctcgtgtatgacaggtagctaggg

SEQ ID NO: 222230 - DNA, 120 bp, Artificial Sequence
  ENSG00000117481_26 (sequence is synthesized)
agctcttggagatgtagcagttgggattgtgggagattactgggcttcctcatcctttagaatggtaactctccttttgctttctgaacacctaggaatttcctgatgttttgttttgtt

SEQ ID NO: 222231 - DNA, 120 bp, Artificial Sequence
  ENSG00000117481_27 (sequence is synthesized)
ggattccagactttttgttgtttctagtctgcagctgagctctggtgcctgttctttggcccaccccctaatccctaactcttccctcagcatcacagggcttcactgcacacactgtgt

SEQ ID NO: 222232 - DNA, 120 bp, Artificial Sequence
  ENSG00000117481_28 (sequence is synthesized)
tcagggcaagatttcatcatttactgactgcatactcgatatgttgtttttgtaactttagccaaaagaaagtaacctttagtggcagggatataaaaaattgctcagggtcacttgcag

SEQ ID NO: 222233 - DNA, 120 bp, Artificial Sequence
  ENSG00000117481_29 (sequence is synthesized)
ttttttcctggaaaacatcctgtgcagaaaagggtatataattttagaatacctgaaggcttcttggcttttccactttccttattcctcctcttcctgccactctttttgtcccttctg

SEQ ID NO: 222234 - DNA, 120 bp, Artificial Sequence
  ENSG00000117481_30 (sequence is synthesized)
tctttcctgctcatccttatttgggtattagaggtgtcagttgaggagggactttagctgaggttaagccttcttttgggatttgcattgtaattgagggccctggaagatctctgagac

SEQ ID NO: 222235 - DNA, 120 bp, Artificial Sequence
  ENSG00000117481_31 (sequence is synthesized)
tcaaaatcaggtgaagctaggaagatggagctttaaggagcatggctagtgctctgagtaggaccgtaaccgcctccgtgcgtggcatatggtccctgcatgctgttcactctgtatagt

SEQ ID NO: 222236 - DNA, 120 bp, Artificial Sequence
  ENSG00000117481_32 (sequence is synthesized)
acttagtattcgctgaggctaagaggcctcaggtgcctgggcttctgcccttggactcctggatatccagcctagtgctaattgaatgctaagcagtggtaattcaaaatgagagggtcc

SEQ ID NO: 222237 - DNA, 120 bp, Artificial Sequence
  ENSG00000117481_33 (sequence is synthesized)
cctgcctctagagtcatcatctaattggggacaggcagacctagataagaaaagcagagaactactttggaaaacagtttatctgctgtaattgaacattcagctaccctataacccagt

SEQ ID NO: 222238 - DNA, 120 bp, Artificial Sequence
  ENSG00000117481_34 (sequence is synthesized)
taatccaatactggggataaatcctagagaaactcatacatgtacaccaggagatgtgtacaagaatattcatagcaaccctattcacaaaagcaaaagcctagaaataacccagatgcc

SEQ ID NO: 222239 - DNA, 120 bp, Artificial Sequence
  ENSG00000117481_35 (sequence is synthesized)
catgagcaagagagtggacaagtaaactggaatattcacataatagaacattatacaattgtcaaatgaactataatgatacctaaccatatggatgaatctgagcaataaaataattaa

SEQ ID NO: 222240 - DNA, 120 bp, Artificial Sequence
  ENSG00000117481_36 (sequence is synthesized)
gtgaaaaaagtttaatcccagaagagtaaatgtagcatgatgccctttctaaatgaaaggttttttcttttctatggagttattctttacatacaatatagttcataaattttaaatata

SEQ ID NO: 222241 - DNA, 120 bp, Artificial Sequence
  ENSG00000117481_37 (sequence is synthesized)
tatagttcataaattttaaatatattgtttaataaattttgataattgtatataatagtatagtcaccatcaagatgtagaaaatagaaaataggctaggcacagtggctcacgcctgta

SEQ ID NO: 222242 - DNA, 90 bp, Artificial Sequence
  ENSG00000117481_38 (sequence is synthesized)
agatcacttgatcccaggaattctagatcagcttggacaatgtagtgagacctggtctttaccaaaaaaaaaaaaaaaaaaattagctgg

SEQ ID NO: 222243 - DNA, 77 bp, Artificial Sequence
  ENSG00000117481_39 (sequence is synthesized)
tctcaaaaaaaaaaaaaaaaaaaaaggcattgggatttataatgtgctgtttaaagtctgaagctaaggctgaggca

SEQ ID NO: 222244 - DNA, 73 bp, Artificial Sequence
  ENSG00000117481_40 (sequence is synthesized)
ggcaggtggatcacctgaggtcaggaaaagtacaaaagggcatgatggcaggtgcctgtaatctcagctactc

SEQ ID NO: 222245 - DNA, 87 bp, Artificial Sequence
  ENSG00000117481_41 (sequence is synthesized)
agcgccattgcactccagcgtgggcgacagcaagagacttcatttcgataaataagtaaataaataaataaagtctgaagctccact

SEQ ID NO: 222246 - DNA, 120 bp, Artificial Sequence
  ENSG00000117481_42 (sequence is synthesized)
ataaataagtaaataaataaataaagtctgaagctccactggtcactccttttattgattatttgcagctggtctaaccagttacgtatgtctggcttgattacatggccagagcaacat

SEQ ID NO: 222247 - DNA, 120 bp, Artificial Sequence
  ENSG00000117481_43 (sequence is synthesized)
aaaagccctgctgggaacttctgatttgagctcttccaaaaccaggatggatgcctcacatagatcatgatgattcaatccaaaggcactttgcagtgcagtccacatgtgcataaggac

SEQ ID NO: 222248 - DNA, 120 bp, Artificial Sequence
  ENSG00000117481_44 (sequence is synthesized)
catggggagcttgtatttgggaattctgagattcctgatgtttacctacctagtctttctcttgctgccctgtatcctttgcctttaaataaaaatcttaagtgattatgctctgtgaag

SEQ ID NO: 222249 - DNA, 120 bp, Artificial Sequence
  ENSG00000117481_45 (sequence is synthesized)
cctggataatcctttcaaatatttggtcttggaaaatttttgcatatatacatggaatcatacaatatgtagtctttggtgtttgacttctttgacttagtgtaatgtttttgagattca

SEQ ID NO: 222250 - DNA, 120 bp, Artificial Sequence
  ENSG00000117481_46 (sequence is synthesized)
actgtctcttgttccccagctgtgtccacctacctttctgtcccccactcccccttttacttccctccctcccctccccctttcccttgcccattcttcccccacatgacttctcctttc

SEQ ID NO: 222251 - DNA, 120 bp, Artificial Sequence
  ENSG00000117481_47 (sequence is synthesized)
cactcagggagatggtcttttgagtcctcttccccactcctggaaaggacctactgccgctagccctgccactcgggttccccactctccagcccttattttgagcagttcagcattccg

SEQ ID NO: 222252 - DNA, 120 bp, Artificial Sequence
  ENSG00000117481_48 (sequence is synthesized)
ctgtggcctctcaaggcccttgcaaagagcctctgcagatcccctacagctgccctttgccttcatccaaggattccagctgtagcaccaatcccagctgtagttcgactattattagca

SEQ ID NO: 222253 - DNA, 120 bp, Artificial Sequence
  ENSG00000117481_49 (sequence is synthesized)
aatgccagagtagtgacagcgagagcaggagttcccaccaaagccaaagccggagccaaagcaagagtccccatgatggcagaagtcagagctggagcaagaggcatcatctgagcagaa

SEQ ID NO: 222254 - DNA, 120 bp, Artificial Sequence
  ENSG00000117481_50 (sequence is synthesized)
gtccaagtcagaaaagcagtccctatcctagcagaagctggggccggagcagtaatcctcaacaaaacacaagtcagggccagagtgagagtccccaacttagcataaatgagcaccagg

SEQ ID NO: 222255 - DNA, 120 bp, Artificial Sequence
  ENSG00000117481_51 (sequence is synthesized)
gtgagagtccccaaattagcagaggtcagggcaagagcaagagtctatgatggcaaaagtcggaaccggagcaagagtccccaacatggcaaaggtcaaggccagagcaagagtccccaa

SEQ ID NO: 222256 - DNA, 120 bp, Artificial Sequence
  ENSG00000117481_52 (sequence is synthesized)
catagcaggagccagagcaagagtcccagcgaggcaaaagtcacagagcaagagtcctcaccataacaagaaatgagggccagagcaaaagttctgaccagaccaaaaatctaggccaga

SEQ ID NO: 222257 - DNA, 120 bp, Artificial Sequence
  ENSG00000117481_53 (sequence is synthesized)
gaattaccccgtggagcacgccgatatggctgcgctgacactgaggggtgtccgggagctgctgaagcgtgtggacctcgcgacggtcccgcggagacatcgatataagaagaaatggcc

SEQ ID NO: 222258 - DNA, 120 bp, Artificial Sequence
  ENSG00000117481_54 (sequence is synthesized)
cctccagaatgcggcgtccctgtcttcaaggcacgtactgtgaccagcacactaatctctgttactctagcggatggccttcagcttttggaaccagcccggcaacctcctttccccttg

SEQ ID NO: 222259 - DNA, 120 bp, Artificial Sequence
  ENSG00000117481_55 (sequence is synthesized)
ctcatcagtccccgggaacgagcccagtgacctcccctcagctcactcatgtacccttggaaactggacccatgatttcgcctcctcctacacataggaccccgggaacttgcctcacga

SEQ ID NO: 222260 - DNA, 120 bp, Artificial Sequence
  ENSG00000117481_56 (sequence is synthesized)
tttcacctcctcttgctcgccggccggtggaaactagtcctatggcctccccaaccctttctcacagagttttggaaactgggctgatgatctctctgccctctcactggttctcaggga

SEQ ID NO: 222261 - DNA, 120 bp, Artificial Sequence
  ENSG00000117481_57 (sequence is synthesized)
gaagttataatgacccccttctctccccagcatcttccccacctactggcagcttttaccatggcagccttaagcctctagactcttgtgaacccaaaccacagcttgacctgccccttg

SEQ ID NO: 222262 - DNA, 120 bp, Artificial Sequence
  ENSG00000117481_58 (sequence is synthesized)
agaaaaattgttgtggcttcccactctcttctcaggcaggcatgcctggctctcccagctcacctcaggagggctcttatcattactcccatctttcctcagaggcctacatacctaccc

SEQ ID NO: 222263 - DNA, 120 bp, Artificial Sequence
  ENSG00000117481_59 (sequence is synthesized)
ctgggagtccttgctatgccatctgcctgtgccccgggagtactgattctccttgctcaccccagtcccaggctcccaggaaggcttgcattgagtcccttctctcctgggaggcaactg

SEQ ID NO: 222264 - DNA, 120 bp, Artificial Sequence
  ENSG00000117481_60 (sequence is synthesized)
ggaactcttacctcatcctaaccccggacaccacaacttctggtcccccctgttcccaggaaccatctcgtccccatggtcctcattctgtcctttccttcccttcacccctgggcaacc

SEQ ID NO: 222265 - DNA, 120 bp, Artificial Sequence
  ENSG00000117481_61 (sequence is synthesized)
agtttatatctccaccccagtcacttccccgcagaagctataatgaaccccctcttcccactccagtttccccccaaccgaagtcccctaagtccccagagttaagacagtcacatactc

SEQ ID NO: 222266 - DNA, 120 bp, Artificial Sequence
  ENSG00000117481_62 (sequence is synthesized)
cccacaaatgtctctccctagtcaacactccccagcacaccccttctggccagcccaagcccgctaaggcccacacctgtcccccacctccctcctgcctctctggtccttcttgtatgc

SEQ ID NO: 222267 - DNA, 120 bp, Artificial Sequence
  ENSG00000117481_63 (sequence is synthesized)
agccatacatcacaactccttcaaattccagccccaaagaacttcccccagggactaccttactgactgtggtccctagagctctcaaaagtgttatccccacttcttttcccctctgcc

SEQ ID NO: 222268 - DNA, 120 bp, Artificial Sequence
  ENSG00000117481_64 (sequence is synthesized)
ttccttgtgatcctgtctcggccaatagttatgctcagagcagccgccatggaccctccatagggcccccctgcaatacccatatatgctctgtggttccctccaccccccatccctgcc

SEQ ID NO: 222269 - DNA, 120 bp, Artificial Sequence
  ENSG00000117481_65 (sequence is synthesized)
cactgtctggctccctcaatcattcgacaggcccccctcccattgtgcccctgtgtgacacctatagcactcccaggggcccaccccaacctcgttgtcagcctgtgatgcctccttgtt

SEQ ID NO: 222270 - DNA, 120 bp, Artificial Sequence
  ENSG00000117500_0 (sequence is synthesized)
ggagaactgcgcttctctttcggagggagtgttcgccgccgccgcggccgccacctggagtttcttcagactccagatttccctgtcaaccacgaggagtccagagaggaaacgcggagc

SEQ ID NO: 222271 - DNA, 120 bp, Artificial Sequence
  ENSG00000117500_1 (sequence is synthesized)
ggagacaacagtacctgacgcctctttcagcccgggatcgccccagcagggatgggcgacaagatctggctgcccttccccgtgctccttctggccgctctgcctccggtgctgctgcct

SEQ ID NO: 222272 - DNA, 120 bp, Artificial Sequence
  ENSG00000117500_2 (sequence is synthesized)
ggggcggccggcttcacaccttccctcgatagcgacttcacctttacccttcccgccggccagaaggagtgcttctaccagcccatgcccctgaaggcctcgctggagatcgagtaccaa

SEQ ID NO: 222273 - DNA, 120 bp, Artificial Sequence
  ENSG00000117500_3 (sequence is synthesized)
gttttagatggagcaggattagatattgatttccatcttgcctctccagaaggcaaaaccttagtttttgaacaaagaaaatcagatggagttcacactgtagagactgaagttggtgat

SEQ ID NO: 222274 - DNA, 120 bp, Artificial Sequence
  ENSG00000117500_4 (sequence is synthesized)
tacatgttctgctttgacaatacattcagcaccatttctgagaaggtgattttctttgaattaatcctggataatatgggagaacaggcacaagaacaagaagattggaagaaatatatt

SEQ ID NO: 222275 - DNA, 120 bp, Artificial Sequence
  ENSG00000117500_5 (sequence is synthesized)
actggcacagatatattggatatgaaactggaagacatcctggaatccatcaacagcatcaagtccagactaagcaaaagtgggcacatacaaactctgcttagagcatttgaagctcgt

SEQ ID NO: 222276 - DNA, 120 bp, Artificial Sequence
  ENSG00000117500_6 (sequence is synthesized)
gatcgaaacatacaagaaagcaactttgatagagtcaatttctggtctatggttaatttagtggtcatggtggtggtgtcagccattcaagtttatatgctgaagagtctgtttgaagat

SEQ ID NO: 222277 - DNA, 120 bp, Artificial Sequence
  ENSG00000117500_7 (sequence is synthesized)
aagaggaaaagtagaacttaaaactccaaactagagtacgtaacattgaaaaatgaggcataaaaatgcaataaactgttacagtcaagaccattaatggtcttctccaaaatattttga

SEQ ID NO: 222278 - DNA, 120 bp, Artificial Sequence
  ENSG00000117500_8 (sequence is synthesized)
gatataaaagtaggaaacaggtataattttaatgtgaaaattaagtcttcactttctgtgcaagtaatcctgctgatccagttgtacttaagtgtgtaacaggaatattttgcagaatat

SEQ ID NO: 222279 - DNA, 120 bp, Artificial Sequence
  ENSG00000117500_9 (sequence is synthesized)
aggtttaactgaatgaagccatattaataactgcattttcctaactttgaaaaattttgcaaatgtcttaggtgatttaaataaatgagtattgggcctaattgcaacaccagtctgttt

SEQ ID NO: 222280 - DNA, 120 bp, Artificial Sequence
  ENSG00000117500_10 (sequence is synthesized)
ttaacaggttctattacccagaacttttttgtaaatgcggcagttacaaattaactgtggaagttttcagttttaagttataaatcacctgagaattacctaatgatggattgaataaat

SEQ ID NO: 222281 - DNA, 120 bp, Artificial Sequence
  ENSG00000117500_11 (sequence is synthesized)
ctttagactacaaaagcccaacttttctctatttacatatgcatctctcctataatgtaaatagaataatagctttgaaatacaattaggtttttgagatttttataaccaaatacattt

SEQ ID NO: 222282 - DNA, 120 bp, Artificial Sequence
  ENSG00000117500_12 (sequence is synthesized)
cagtgtaacatattagcagaaagcattagtctttgtactttgcttacattcccaaaagctgacattttcacgattcttaaaaacacaaagttacacttactaaaattaggacatgttttc

SEQ ID NO: 222283 - DNA, 120 bp, Artificial Sequence
  ENSG00000117500_13 (sequence is synthesized)
tctttgaaatgaagaatatagtttaaaagcttcctcctccatagggacacattttctctaacccttaactaaagtgtaggattttaaaattaaatgtgaggtaaaataagtttattttta

SEQ ID NO: 222284 - DNA, 120 bp, Artificial Sequence
  ENSG00000117500_14 (sequence is synthesized)
atagtatctgtcaagttaatatctgtcaacagttaataatcatgttatgttaattttaacatgattgctgacttggataattcattattaccagcagttatgaaggaaatattgctaaaa

SEQ ID NO: 222285 - DNA, 120 bp, Artificial Sequence
  ENSG00000117500_15 (sequence is synthesized)
tgatctgggcctaccataaataaatatctccttttctgagctctaagaattatcagaaacaggaaagaatttagaaaaacttgagaaaacctaatccaaaataaaattcacttaagtaga

SEQ ID NO: 222286 - DNA, 120 bp, Artificial Sequence
  ENSG00000117500_16 (sequence is synthesized)
actataaataaatatctagaatctgactggctcatcatgacatcctactcataacataaatcaaaggagatgattaatttccagttagctggaagaaactttggctgtaggtttttattt

SEQ ID NO: 222287 - DNA, 120 bp, Artificial Sequence
  ENSG00000117500_17 (sequence is synthesized)
tctacaagaattctggtttgaattatttttgtaagcaggtacattttataaaatgtaagccctactgtaaggtttagcactgggtgtacatatttattaaaaatttttattataacaact

SEQ ID NO: 222288 - DNA, 120 bp, Artificial Sequence
  ENSG00000117500_18 (sequence is synthesized)
tttattaaaatggcctttctgaacactttatttattgatgttgaagtaaggattagaaacatagactcccaagttttaaacacctaaatgtgaataacccatatatacaacaaagtttct

SEQ ID NO: 222289 - DNA, 120 bp, Artificial Sequence
  ENSG00000117500_19 (sequence is synthesized)
gccatctagctttttgaagtctatgggggtcttactcaagtactagtaatttaacttcatcatgaatgaactataatttttaagttatgcccatttataacgttgtttatgactacattg

SEQ ID NO: 222290 - DNA, 120 bp, Artificial Sequence
  ENSG00000117500_20 (sequence is synthesized)
tgagttagaaacaaacttaaaatttggggtatagaacccctcaacaggttagtaatgctggaattcttgatgagcaataatgataaccagagagtgatttcatttacactcatagtagta

SEQ ID NO: 222291 - DNA, 120 bp, Artificial Sequence
  ENSG00000117500_21 (sequence is synthesized)
taaaaagagatacatttccctcttaggcccctgggagaagagcagcttagatttccctactggcaaggtttttaaaaatgaggtaaatgccgtatatgatcaattaccttaattggccaa

SEQ ID NO: 222292 - DNA, 120 bp, Artificial Sequence
  ENSG00000117500_22 (sequence is synthesized)
gaaaatgcttcaggtgtctaggggtatcctctgcaacacttgcagaacaaaggtcaataagatccttgcctatgaatacccctcccttttgcgctgttaaatttgcaatgagaagcaaat

SEQ ID NO: 222293 - DNA, 120 bp, Artificial Sequence
  ENSG00000117500_23 (sequence is synthesized)
ttacagtaccataactaataaagcagggtacagatataaactactgcatcttttctataaaactgtgattaagaattctacctctcctgtatggctgttactgtactgtactctctgact

SEQ ID NO: 222294 - DNA, 120 bp, Artificial Sequence
  ENSG00000117500_24 (sequence is synthesized)
tcttctacatgtatgatttgtgccactgatcttaaacctatgattcagtaacttcttaccatataaaaacgataattgctttatttggaaaagaatttaggaatactaaggacaattatt

SEQ ID NO: 222295 - DNA, 120 bp, Artificial Sequence
  ENSG00000117500_25 (sequence is synthesized)
tttatagacaaagtaaaaagacagatatttaagaggcataaccaaaaaagcaaaacttgtaaacagagtaaaaatctttaatatttctaaagacatactgtttatctgcttcatatgctt

SEQ ID NO: 222296 - DNA, 120 bp, Artificial Sequence
  ENSG00000117500_26 (sequence is synthesized)
tttttaatttcactattccatttctaaattaaagttatgctaaattgagtaagctgtttatcacttaacagctcattttgtctttttcaatatacaaattttaaaaatactacaatattt

SEQ ID NO: 222297 - DNA, 120 bp, Artificial Sequence
  ENSG00000117500_27 (sequence is synthesized)
aactaaggcccaaccgatttccataatgtagcagttaccgtgttcacctcacactaaggcctagagtttgctctgatatgcatttggatgattaatgttatgctgttctttcatgtgaat

SEQ ID NO: 222298 - DNA, 120 bp, Artificial Sequence
  ENSG00000117500_28 (sequence is synthesized)
gtcaagacatggagggtgtttgtaattttatggtaaaattaatccttcttacacataatggtgtcttaaaattgacaaaaaatgagcacttacaattgtatgtctcctcaaatgaaaatt

SEQ ID NO: 222299 - DNA, 120 bp, Artificial Sequence
  ENSG00000117500_29 (sequence is synthesized)
ctttatctgaaattttaaaagacattgattccacatgtaaggatttttcatctgaagtacaataatgcacaatcagtgttgctcaaactgctttatacttataaacagccatcttaaata

SEQ ID NO: 222300 - DNA, 120 bp, Artificial Sequence
  ENSG00000117500_30 (sequence is synthesized)
agcaacgtattgtgagtactgatatgtatataataaaaattatcaaagaaaattaactgccagtcatttgtaaatgctgtctactcctgaaagccttccttcatctctatttagttaata

SEQ ID NO: 222301 - DNA, 120 bp, Artificial Sequence
  ENSG00000117500_31 (sequence is synthesized)
atgtgctctctcctcctgttttgaaaccccatagctctctacacctcttattgtacatcactctactttgcattggagttctgtttctatatgtacttattcacctgttgcctaaacatg

SEQ ID NO: 222302 - DNA, 120 bp, Artificial Sequence
  ENSG00000117500_32 (sequence is synthesized)
cactgttcctaaaaggtacagtttttgctcaaaatatatgaaaggaaagataatcagttcttaaagtttggtatgctaaataagcacccagggaacttacctgctccacctcaccccaga

SEQ ID NO: 222303 - DNA, 120 bp, Artificial Sequence
  ENSG00000117500_33 (sequence is synthesized)
aattgattattcaggtctggaatatggctcaggattcttaattttcaaccaacacaatatagaatcctgtcagttatccttggatcatttgctaagtgatcttgcaaaatcaaaactcct

SEQ ID NO: 222304 - DNA, 120 bp, Artificial Sequence
  ENSG00000117500_34 (sequence is synthesized)
ttgagactatttcattttcagaaatattttaaaacttgttcagaaacatcttaaaacttgttagcatataggaaaagtacaatgcttggtgtaggtaggttattatttggtcatttccct

SEQ ID NO: 222305 - DNA, 120 bp, Artificial Sequence
  ENSG00000117500_35 (sequence is synthesized)
caaaccatccagacaagccactcttctaccacaagctggtagaaatccttaggcacctttctgcttctgcactgctatcactttcaggtgtctaaggcttctggaaggctgttgtcataa

SEQ ID NO: 222306 - DNA, 120 bp, Artificial Sequence
  ENSG00000117500_36 (sequence is synthesized)
cctggagccatacacctaatgtacgtctggggaaaggacaccaattaaagaatctagagctaggatgatgttacataagacagggcacaatggagatggactctggatccctgcatctga

SEQ ID NO: 222307 - DNA, 120 bp, Artificial Sequence
  ENSG00000117500_37 (sequence is synthesized)
aagaaaaaggcaagaaaatgcagggcagggaaaatcctgaaggtcttcactgaccatgaattaaaatcctaattgacagttttacaaacaaaaaccctcgttttagtacttgtgttgttt

SEQ ID NO: 222308 - DNA, 120 bp, Artificial Sequence
  ENSG00000117500_38 (sequence is synthesized)
ttgtttctgttttaacaagcttagatttattattgtgccttttatggaagatgaggaagaaataggaaagcagtaaaatgaacaatgagaatctgttacccaaactgatataaactccct

SEQ ID NO: 222309 - DNA, 120 bp, Artificial Sequence
  ENSG00000117500_39 (sequence is synthesized)
cagaaagaaagatactactccctaatcctggaagtgttaagtggcaataatgatcaaatgttgtaaaggggattgttactacagctaatatgaaatgggaggctggactaaatctaacct

SEQ ID NO: 222310 - DNA, 120 bp, Artificial Sequence
  ENSG00000117500_40 (sequence is synthesized)
ttctacccttgatttcaattctaaaaggacacgtaataccattgcagaaagaaaagacagttccaaatgataaattttagagttgttttgctaggatgcaagagaaattggataagtgga

SEQ ID NO: 222311 - DNA, 120 bp, Artificial Sequence
  ENSG00000117500_41 (sequence is synthesized)
ccactcatacgttgctggtgagatatgaaatagtagagccactgtggaaaatattcttggcagtttcttataaaactaaacatacatttaacatataactggcatttgtactacttgaca

SEQ ID NO: 222312 - DNA, 120 bp, Artificial Sequence
  ENSG00000117500_42 (sequence is synthesized)
gttatccctgagaagttaaaacttaacattcacaaatgttacatagcaccttcatttataatagccaaaacccggaaacaacctggatgtccttcaaaaagagtgaatggtttagtatgt

SEQ ID NO: 222313 - DNA, 120 bp, Artificial Sequence
  ENSG00000117500_43 (sequence is synthesized)
ccacaccatggaatactaaatagtaatatgaaggaacaaactactgatacatgtaacaaattgcatggacctcaagggaattatgcttgggtggtttggggggacaatcctaaagtttta

SEQ ID NO: 222314 - DNA, 120 bp, Artificial Sequence
  ENSG00000117500_44 (sequence is synthesized)
cacactgtatgattctgtttttgtaacattcttaaataataaagctatagagatgggaaacaagattcgtggttgccaggtcttgggactgaagggaaggagaatgtggctataaaggga

SEQ ID NO: 222315 - DNA, 120 bp, Artificial Sequence
  ENSG00000117500_45 (sequence is synthesized)
gccttgtggtggaaaagttctgtagtttgattgtggtgattacataaatatacatgtgaaatgttagaagtatttatagctgaaacatattagtatgttggtatatacatatttctgact

SEQ ID NO: 222316 - DNA, 79 bp, Artificial Sequence
  ENSG00000117500_46 (sequence is synthesized)
taagctcaagtgatgtgcccgcctcaacttccgttttttcctatgcatgcataattacgatcaagtttaatttgtaatt

SEQ ID NO: 222317 - DNA, 120 bp, Artificial Sequence
  ENSG00000117500_47 (sequence is synthesized)
cctatgcatgcataattacgatcaagtttaatttgtaattaggcacattaagagattaacaatagctaacaaaatggaacaattacaacaatatattgtaataaaagttatgcaaatgtg

SEQ ID NO: 222318 - DNA, 120 bp, Artificial Sequence
  ENSG00000117500_48 (sequence is synthesized)
aaataaaaattattaacagccagaggccttactatggtaataagttactgaactaagcattttatctgcattatccaggaaaatctgtttctaatattttatttttgccataaatacttt

SEQ ID NO: 222319 - DNA, 120 bp, Artificial Sequence
  ENSG00000117500_49 (sequence is synthesized)
gacctcaagtatcagcttaattttattttatattaatatagcccttttatagttttcaaataacttatcttccaggaccctattataaaaatagcttcagatgtgcaaataagactgcat

SEQ ID NO: 222320 - DNA, 120 bp, Artificial Sequence
  ENSG00000117500_50 (sequence is synthesized)
ttgcttgttttctgatttaatatatatattttttgtttttggagggtatccttgagtaattctttgagaatgttttgagtccttggatatctgaaaataactttatttatttattttaaa

SEQ ID NO: 222321 - DNA, 120 bp, Artificial Sequence
  ENSG00000117500_51 (sequence is synthesized)
attttattttagagatgggttttcactgtattgcccaggctggagtgcagtgactactcacaggcactttcatagaacactacaggctttaacgcctagcctcaagtggtcctcccacct

SEQ ID NO: 222322 - DNA, 120 bp, Artificial Sequence
  ENSG00000117500_52 (sequence is synthesized)
cagtctcccaagtagctgggaataccagtgcatgctaccacacctggcaaatggctttatttttgctttcatgtcagtaaatatctttttacttgggaacattgactacatggctccatt

SEQ ID NO: 222323 - DNA, 120 bp, Artificial Sequence
  ENSG00000117500_53 (sequence is synthesized)
atttttttccatctaatgttatatgtaagaattctgatgctaatcccaattcttgtattttgcagttctctactacttctgctacttctctttgatagaagattgtactttttaaatcct

SEQ ID NO: 222324 - DNA, 120 bp, Artificial Sequence
  ENSG00000117500_54 (sequence is synthesized)
ttggaaaactccatattttatggtcttttttcatttatcctgcttcacatttattagatcctttctgtctgaagattttcatcttttgaaacaggaatttttcttctttgtgggtttttt

SEQ ID NO: 222325 - DNA, 120 bp, Artificial Sequence
  ENSG00000117500_55 (sequence is synthesized)
atcttttgaaacaggaatttttcttctttgtgggttttttgtttttgtttgacgtggagtctcactcattcttttgcccaggctgaagtacggtggcatgatctctgctcactgcaacct

SEQ ID NO: 222326 - DNA, 120 bp, Artificial Sequence
  ENSG00000117500_56 (sequence is synthesized)
aggcatgagccaccgcacccagcctatagattttaattgttacatgtcttcttcatttcattgggatttaaagaagaaaattatgtacatttagccagccatttgaaaccagttctgttg

SEQ ID NO: 222327 - DNA, 120 bp, Artificial Sequence
  ENSG00000117500_57 (sequence is synthesized)
atttagccagccatttgaaaccagttctgttgaacaataaaagcacaggagtaggtaattttttatatcatcacattaaaactaccatgaaaaataaaatggagtgttaagaaaaagagt

SEQ ID NO: 222328 - DNA, 120 bp, Artificial Sequence
  ENSG00000117500_58 (sequence is synthesized)
agccattgagttaggtttttttttttttcagttaaaaggctgtactatatagtgttccaaatagattctttttaaaattttagcaaacactataaatacagaagagaaaacgcagggaaa

SEQ ID NO: 222329 - DNA, 120 bp, Artificial Sequence
  ENSG00000117500_59 (sequence is synthesized)
gaggaagacaggaagagaagtttgcagacagatctacagggaaaacactgagacactttaatttgtataggatgataaaaagatgcatttattaaatatttgcatctgtgacaaaaaatc

SEQ ID NO: 222330 - DNA, 120 bp, Artificial Sequence
  ENSG00000117500_60 (sequence is synthesized)
aaaatatggataataacattgttaggaccagtacccttggagttataaaaatagtgaacaaaattttcatccatcttatcatctatgttggatatgccacataggtgtccataaaggtac

SEQ ID NO: 222331 - DNA, 120 bp, Artificial Sequence
  ENSG00000117500_61 (sequence is synthesized)
ctacaagtttatgctaagtgaatcctacaaaaagatgcttagattccagagaacgtctcataagtgccaaagaggataggtgtgcaatctgtagtaatacaagagagagtgtgagagaac

SEQ ID NO: 222332 - DNA, 120 bp, Artificial Sequence
  ENSG00000117500_62 (sequence is synthesized)
gtgtgagagaactggacaggaggattcagaggagatttcaaaggacttgacccatttatgcaggaggttgcaattttttgaattgcaaaatgagaccttggcaatgaccttgagcagtag

SEQ ID NO: 222333 - DNA, 120 bp, Artificial Sequence
  ENSG00000117500_63 (sequence is synthesized)
tcctacatgcttagtgttccactaatggaacacaaggcataaatgggttaaactggctcttaaagaatgaatacaattggatgagtacctattcaggagaatggaacagaaatagaggca

SEQ ID NO: 222334 - DNA, 120 bp, Artificial Sequence
  ENSG00000117500_64 (sequence is synthesized)
acacagcatacttattaaaaattattctagaggcagattgctgagttcaaattttgaccatgtcacttatttgctgtatcactttggtttattttttacttattttttttaatgtggcct

SEQ ID NO: 222335 - DNA, 120 bp, Artificial Sequence
  ENSG00000117500_65 (sequence is synthesized)
ttaatccacataaagcatttaagacaatttatggcatcaactataattgttagttgccatgattatcatcatcatcttcatagaaggacattttggaattacaaatggatagattgtatt

SEQ ID NO: 222336 - DNA, 120 bp, Artificial Sequence
  ENSG00000117500_66 (sequence is synthesized)
cattggctagtaaatgaaccggcctgcttcgaatacacaattcatactgggaagtagtagaagaatgtgttgaagtcagttggagtccacaccatggtggtcttgaattccaggctaaga

SEQ ID NO: 222337 - DNA, 120 bp, Artificial Sequence
  ENSG00000117500_67 (sequence is synthesized)
aacagttaattattattcttttattgaagaggaaacaaaaaagttatatacaatgtctgaaattgcctaagtctttttttgggggggcaggggaggcagggggggcggggtaccgagtct

SEQ ID NO: 222338 - DNA, 120 bp, Artificial Sequence
  ENSG00000117500_68 (sequence is synthesized)
gcctaagttttaactaaaacgcccagcatttgaactgctctttgtgtttccgtccattctacagggattctgaatgaaaccactattttaggaagatttatttcagtaatatccataagg

SEQ ID NO: 222339 - DNA, 120 bp, Artificial Sequence
  ENSG00000117500_69 (sequence is synthesized)
cctaaatttaggtgatggtgagagaaatgggtaaggaagggacaagttccaaaaatgaatggaattgaactagatgatcttttggttcttttctagctcagacatcactgatgactttct

SEQ ID NO: 222340 - DNA, 120 bp, Artificial Sequence
  ENSG00000117501_0 (sequence is synthesized)
aatatactagagtttctcttcactactttgtctcaccgtgattacagagaagttacaaatatcattactagtagaagactttaatacacctctgtcagcatgttgacaaggaatccaaaa

SEQ ID NO: 222341 - DNA, 120 bp, Artificial Sequence
  ENSG00000117501_1 (sequence is synthesized)
acaaagagtagtctccagattctgcaagacagtgtgaaatggcaccacatggcacataaagttaacagcctattggatgcatactcaggcctgttaagtaatgaatccatgatcctggct

SEQ ID NO: 222342 - DNA, 120 bp, Artificial Sequence
  ENSG00000117501_2 (sequence is synthesized)
gtgaactccagctttgtggatcccttactgcagtttgaatctcagttgaagataatagagtcatcctttggaatgctagttgtcatgccaagtcttgacaaagtaaaagaaatggggagc

SEQ ID NO: 222343 - DNA, 120 bp, Artificial Sequence
  ENSG00000117501_3 (sequence is synthesized)
agttatgagtacattgaggacatggagaatttataccacaatattttaaatatatatgagaacattcttacgagcttggtgtctaaagacctctacaaactacagatcttaaaggaaatg

SEQ ID NO: 222344 - DNA, 120 bp, Artificial Sequence
  ENSG00000117501_4 (sequence is synthesized)
ctcgtgtggatgagtaaagatagctcatatctgcaagagagaataatggtgatcatcaacaaggtgttaagatttacagtcacaaaagtcagaaaatacataagtgttgatgctccatgt

SEQ ID NO: 222345 - DNA, 120 bp, Artificial Sequence
  ENSG00000117501_5 (sequence is synthesized)
ttgggtctcctggcagcagagctgtctcttttgtgttcccatgaagatccctcgattgtaaaacaagcatcattgggaatgtgtcacctcctctacattgcacggtgtcagaacgatatt

SEQ ID NO: 222346 - DNA, 120 bp, Artificial Sequence
  ENSG00000117501_6 (sequence is synthesized)
ggaacaaataagcctacaaacggtaaaagtcatagcctccagtttccttcttctgatgtagaatttctacccaaggagtttcaacaagacgaaagtaaaatagctcagagagtagggcaa

SEQ ID NO: 222347 - DNA, 120 bp, Artificial Sequence
  ENSG00000117501_7 (sequence is synthesized)
accttactgcctcccttgctgactgactttgtgcagagtctcctgatgaaactctcttcacctgatgataaaatcgcatctgatgcagcatccatactgatatttactctggaatttcat

SEQ ID NO: 222348 - DNA, 120 bp, Artificial Sequence
  ENSG00000117501_8 (sequence is synthesized)
gccgagaaggtcaccatggtgtctaagatcgtggatgctatttacaggcaactgtgtgataacaattgtatgaaggatgttatgttgcaggttatcactttgttgacatgcacttcaccc

SEQ ID NO: 222349 - DNA, 120 bp, Artificial Sequence
  ENSG00000117501_9 (sequence is synthesized)
aggcggcatgttctcaggcgagcgtggcccctcacgtgctgaagacaatcttattgatactgaaaggaaagcctggggaaatggaggacaccgtaacggaagggaaacgtttctctcttg

SEQ ID NO: 222350 - DNA, 120 bp, Artificial Sequence
  ENSG00000117501_10 (sequence is synthesized)
atattaccaacttgatgcctttggcggcatgccaggccctgtgcacctttctgcctcttggttcctacaggaaagcggtggcccagtatttcccccagctcttgacgactcttatgttcc

SEQ ID NO: 222351 - DNA, 120 bp, Artificial Sequence
  ENSG00000117501_11 (sequence is synthesized)
aagtcttctacaacagtgagctgaaaccgatactcaaggacagggctttgtatgcccaggatgccctgagagttctgctgaattgttctggactgcaacaggtggatattactctaatga

SEQ ID NO: 222352 - DNA, 120 bp, Artificial Sequence
  ENSG00000117501_12 (sequence is synthesized)
aggagaatttctgggaccagttatctgaagatctgtgttactatcatggagtctgctttattgctaaaactctcagtgaatataactttccacagtttccggagaccctgagttatctct

SEQ ID NO: 222353 - DNA, 120 bp, Artificial Sequence
  ENSG00000117501_13 (sequence is synthesized)
ataagctctcagtagaaggtcctagaaggtcagaagacactgtcatcgtattaatattcctcactgaagtgagttttgtagactgtgaacagctgtgttctcatttccttttcttaccca

SEQ ID NO: 222354 - DNA, 120 bp, Artificial Sequence
  ENSG00000117501_14 (sequence is synthesized)
aatttaaatcaaaattccagtttctcgtatctctccctctgaatgttggttcttaccaagacttaagatcatgaaagatatctgaagtcggatggggagaggtgtggagttagatctggg

SEQ ID NO: 222355 - DNA, 120 bp, Artificial Sequence
  ENSG00000117501_15 (sequence is synthesized)
ttatggaagagttgtcccttcagctttccccagcagttggtttttctctgtttctaggggtgtgaatttgtacaaaaactaattattttttaggaccagtttatatatttctgcatgatt

SEQ ID NO: 222356 - DNA, 120 bp, Artificial Sequence
  ENSG00000117501_16 (sequence is synthesized)
gttaaagtatattgagggataattgggtttaataaagatggtagttaacatctgggatctaggcagtacttctgaccatctagagggagaaaggaactggctgagtaactgggtaaaatg

SEQ ID NO: 222357 - DNA, 120 bp, Artificial Sequence
  ENSG00000117501_17 (sequence is synthesized)
aagatgtggaaccatattactttgtatatcaatattgtgccatgtattgtaatactataatggaatcaagcaaattgacaaacttttgtttacaaaaaataaaggctttataacctgaaa

SEQ ID NO: 222358 - DNA, 120 bp, Artificial Sequence
  ENSG00000117501_18 (sequence is synthesized)
catcgtattaatattcctcactgaacttctgaataacttcttcaaggaccctttaccagaagaatttttggtcctcttcataaactggatcaatgattccaatcctgtagttagcagact

SEQ ID NO: 222359 - DNA, 120 bp, Artificial Sequence
  ENSG00000117501_19 (sequence is synthesized)
gatccttcatagaattgtccacatgtcaccaattatcaataagacagaaaatgtcagcagtatattaatagccatcctggatgccttcctttccaaagacgataatgttgtacttcaggc

SEQ ID NO: 222360 - DNA, 120 bp, Artificial Sequence
  ENSG00000117501_20 (sequence is synthesized)
cttgctcacccttagaaggcttttaaacgaactggacaaagtgacctactctttgggtaccagaattggttccagctactgtactctgatggatcatattaatggaggcattcgaagtat

SEQ ID NO: 222361 - DNA, 120 bp, Artificial Sequence
  ENSG00000117501_21 (sequence is synthesized)
ggcaattcgacactttggtcaattagttagggatatgagacagtacacatggatggtgaatgatgtggttctagaaggcttggtgcccctaatcctatttttggaggatgatgataaaag

SEQ ID NO: 222362 - DNA, 120 bp, Artificial Sequence
  ENSG00000117501_22 (sequence is synthesized)
agtagctgaagcatgtaaatatacattaaaaatctgtacctcacaattaaagtggtcaacatcacgtttgctcaaagatgaaaattacagttttgagatggtggtgctcaatatctgtaa

SEQ ID NO: 222363 - DNA, 120 bp, Artificial Sequence
  ENSG00000117501_23 (sequence is synthesized)
caatcttattatttctcataggaactacattacagatttgacatctgataccttacgattcctgtggagccccagaacatatcttaagagggcatcggttattttgataggatatttggc

SEQ ID NO: 222364 - DNA, 120 bp, Artificial Sequence
  ENSG00000117501_24 (sequence is synthesized)
aaaatcaggtggtcatttactgcttagagatgaaatcgaagtcatgcttgatgttattgaacgactgctccgagatgaagaccctatgatcaaacagttggctgaaataacctatgatat

SEQ ID NO: 222365 - DNA, 120 bp, Artificial Sequence
  ENSG00000117501_25 (sequence is synthesized)
ttttaagaaaaaagcccataaactgacctctgcacctcttaaacaaaacttccaaaaattgcttaaattattctacatcaaaaaattgaagcctctttacaattataactcacccaatgg

SEQ ID NO: 222366 - DNA, 120 bp, Artificial Sequence
  ENSG00000117501_26 (sequence is synthesized)
ccagatagacagtcctacagacagtaaagatgtcaagaatgataaggccttatagaagagaatgatgatgacattcatcattcataaacaatgggaagtccaacaatgtcttggagctga

SEQ ID NO: 222367 - DNA, 120 bp, Artificial Sequence
  ENSG00000117501_27 (sequence is synthesized)
ccttagaagaagaatgatttttctttccctcctgacaacttgagtctgtttgtagatgcttttctgaaaaattctggaagcttttactgttacttcttaattctctattcaaatatagaa

SEQ ID NO: 222368 - DNA, 120 bp, Artificial Sequence
  ENSG00000117501_28 (sequence is synthesized)
atctgagagaactagtgcctctgtatgtctgacagtgatcagaagccctatttcatcaaaaccactaagacaattgaaaataacataagcaaagtgtttgatgagaagctctgggaactt

SEQ ID NO: 222369 - DNA, 120 bp, Artificial Sequence
  ENSG00000117501_29 (sequence is synthesized)
gattcagtccggaagctctactgagcaccttctaagtgccagatactgtgttaggcagtggggacatttggatgatatagacaaggttcctgatctcaggatgggcacagtctagtgaca

SEQ ID NO: 222370 - DNA, 120 bp, Artificial Sequence
  ENSG00000117501_30 (sequence is synthesized)
agcacgttccattttctgtaattctacactccaaagtatcttgcaaaatgctgacagtgcaaatgttctataaatcattacttttataatacatccaataataaatcgttgtttatctaa

SEQ ID NO: 222371 - DNA, 120 bp, Artificial Sequence
  ENSG00000117505_0 (sequence is synthesized)
aaaccttccctggcatctggagggaccaccgttgccgcgtcttcggcttccacgatctgcgttcgggctacgcggccacggcggcagccactgcgactcccactgtgcctggctctgtcc

SEQ ID NO: 222372 - DNA, 120 bp, Artificial Sequence
  ENSG00000117505_1 (sequence is synthesized)
atattagttcccaggcggccgtcgccgttccagcagcggcagcggcagcggcagcggcggacatgttgtgaggcggcggcgcgggtgtctgaaggatggtttggccgaggcggcggcaac

SEQ ID NO: 222373 - DNA, 120 bp, Artificial Sequence
  ENSG00000117505_2 (sequence is synthesized)
ggctgctggcggcggcgacagcgcccgcccctctgaggagacacgaaggtggttccccagccgctcaaatttccggaccaccgcgctttcccctcctcagcctgggctgtgctctctcta

SEQ ID NO: 222374 - DNA, 120 bp, Artificial Sequence
  ENSG00000117505_3 (sequence is synthesized)
gaatcctcgggcccccactttcttcccaaactcatcctaaatctctcacacacgcgagtgttcccagccctcaagccagctgctcctccgttcattttctgcaccctcttcgcaaagcac

SEQ ID NO: 222375 - DNA, 120 bp, Artificial Sequence
  ENSG00000117505_4 (sequence is synthesized)
cccccgggatcactctccgagggcgactttttgagaaatctcggtggagtagtggaccagagctggggagtttttaaaagccggggcgcgagaaacaggaaggtactatggcttcctcgt

SEQ ID NO: 222376 - DNA, 120 bp, Artificial Sequence
  ENSG00000117505_5 (sequence is synthesized)
ctggcaacgatgatgatctcactatccccagagctgctatcaataaaatgatcaaagagactcttcctaatgtccgggtggccaacgatgctcgagagctggtggtgaactgctgcactg

SEQ ID NO: 222377 - DNA, 120 bp, Artificial Sequence
  ENSG00000117505_6 (sequence is synthesized)
cactagaaagtttgggatttggctcttacatcagtgaagtaaaagaagtcttgcaagagtgtaaaacagtagcattaaaaagaagaaaggccagttctcgtttggaaaaccttggcattc

SEQ ID NO: 222378 - DNA, 120 bp, Artificial Sequence
  ENSG00000117505_7 (sequence is synthesized)
ctgaagaagagttattgagacagcaacaagaattatttgcaaaagctagacagcaacaagcagaattggcccaacaggaatggcttcaaatgcagcaagctgcccaacaagcccagcttg

SEQ ID NO: 222379 - DNA, 120 bp, Artificial Sequence
  ENSG00000117505_8 (sequence is synthesized)
ctgctgcctcagccagtgcatctaatcaggcgggatcttctcaggatgaagaagatgatgatgatatctgaaattcaccagctgagtttctatttcttctataaatgtttttccctgcac

SEQ ID NO: 222380 - DNA, 120 bp, Artificial Sequence
  ENSG00000117505_9 (sequence is synthesized)
aacaaaaacagtgaaagaaatgcttatctgtaattttgtatgcatcttggtggacttgtcattggtattctagggatgtctgctattaagtttcatctattgtgtgctatacatgtaaaa

SEQ ID NO: 222381 - DNA, 120 bp, Artificial Sequence
  ENSG00000117505_10 (sequence is synthesized)
actgtctctttgaactattgaaaatttaaggttcagtataatatcaattttgaatttttaatggtgtttatgaaattttagatagcagcgagtccttcgtttgatcaataaacagtgtta

SEQ ID NO: 222382 - DNA, 120 bp, Artificial Sequence
  ENSG00000117505_11 (sequence is synthesized)
cagataacttcaagtttataaaaatacagtgaaatttctacaaagctctaaatctgcatttgcatttcctctgcccttttaactaaactaaaacttgtgaattttaaattattaaggggg

SEQ ID NO: 222383 - DNA, 120 bp, Artificial Sequence
  ENSG00000117505_12 (sequence is synthesized)
gggtgctgtgtgaatcagtagacattggattgggttggtgaaagagttcagttctgtagtatctgaatttgtcttttaaaatgagtacatatataggcaataaatatatatgctcagatc

SEQ ID NO: 222384 - DNA, 120 bp, Artificial Sequence
  ENSG00000117505_13 (sequence is synthesized)
atatacttgtttagaaaaacttcaagacattcaaaaactaggaaggagtatgtttaatagtatttgtataaatttggtggttatgtttttttattttgtttctgttttgtgtagaggtaa

SEQ ID NO: 222385 - DNA, 120 bp, Artificial Sequence
  ENSG00000117505_14 (sequence is synthesized)
aaactatagttttattacagcataattcattttgagctccactatgacatttcaaagactgcccagtttggaagtctgtcatgatttttactctttcactccaattcagtaattgttgat

SEQ ID NO: 222386 - DNA, 120 bp, Artificial Sequence
  ENSG00000117505_15 (sequence is synthesized)
agtattacttacctagtccatccatactcatattattcaaatatataggtggtacttttgaaacaattacattggttctcttggtttaactgaggtttatgaatattcaaacctttgctg

SEQ ID NO: 222387 - DNA, 120 bp, Artificial Sequence
  ENSG00000117505_16 (sequence is synthesized)
ggggaaagaaatgaaagttaatgagcatgcttgctatgagagagggatttttaatttaacttgtagttatagtttacttattgtttttagaattacttttacattttcccaactagatgg

SEQ ID NO: 222388 - DNA, 120 bp, Artificial Sequence
  ENSG00000117505_17 (sequence is synthesized)
cctagagtccaacattaccttttgagatgacattattgtctccataattgagtgatagctttaaaaaaaagattagttttgcttaagaagttatgttacaactgatcagccctatatgaa

SEQ ID NO: 222389 - DNA, 120 bp, Artificial Sequence
  ENSG00000117505_18 (sequence is synthesized)
ttaactgatcagccctatatgaaacataagttgtgttataacttatcagccgtatatggaacataaatagtttctacctgcttgttagagaagctttaatttggttctaataaatacagt

SEQ ID NO: 222390 - DNA, 120 bp, Artificial Sequence
  ENSG00000117505_19 (sequence is synthesized)
atggtagtgtttataggaatccaggatgttgaagaaatggcataatgtctatattttggaaacagaaaggaaaagtcacttaagatagtattaagtaattaaattcctatgtcagttgcc

SEQ ID NO: 222391 - DNA, 120 bp, Artificial Sequence
  ENSG00000117505_20 (sequence is synthesized)
aaatcttttaaacttatgtattcaccaagcccaaaaatagattgtggctcccaggattccaattttaattggagagctaagtaagtaaagttttataactgttaggtttcttaatgatca

SEQ ID NO: 222392 - DNA, 120 bp, Artificial Sequence
  ENSG00000117505_21 (sequence is synthesized)
tattttgcagttttagtaaaagggaaatattgttatacatttattaaatatacttcccccatgaagtgaaaaggttaattttgctgaatgttttaagttgaagttacttcatggatgtca

SEQ ID NO: 222393 - DNA, 120 bp, Artificial Sequence
  ENSG00000117505_22 (sequence is synthesized)
tacccatgaagtgcatttggatgagatagaagaaattgttttttaaaaagtttaagtaccaaaggtagtctagtctagaacgataagttaatacgtgttggcttttctaatttgtactgt

SEQ ID NO: 222394 - DNA, 120 bp, Artificial Sequence
  ENSG00000117505_23 (sequence is synthesized)
aacatccttatactttctattttaagtatatctgtttcttaagtaaacaacttagatattttccacacctttttttttttttctgatgcagagttcaggttaatattttactgcatctga

SEQ ID NO: 222395 - DNA, 120 bp, Artificial Sequence
  ENSG00000117505_24 (sequence is synthesized)
taatgtattatacgtttgaagcctagtgacttttcattttgacattcttgtgatttcatatgctgtattcttcaagcaataaaattgtgatgtgttttataaatggtttttatatttaat

SEQ ID NO: 222396 - DNA, 120 bp, Artificial Sequence
  ENSG00000117505_25 (sequence is synthesized)
gttctatagagagatttctattattaccatttttactattttcaagaatcttaggcccaaaagacattttggtcatttggtatgtagtacctgccttttgtttttgtttactgttatttc

SEQ ID NO: 222397 - DNA, 120 bp, Artificial Sequence
  ENSG00000117505_26 (sequence is synthesized)
tgtttactgttatttcaaaaaatgtggttttacttgtatttttataatttacagtcctaagatcgaggcataacaaagcttacttatgcaatattttatttttaggttttttcttttttt

SEQ ID NO: 222398 - DNA, 120 bp, Artificial Sequence
  ENSG00000117505_27 (sequence is synthesized)
tttttagcatttaagagtcactattatgttttgccagttaaaattttttaaatcttttgaagagagaaacaaaatcttcagcgttcttgagaaataaaattattgttcagtaagtatttt

SEQ ID NO: 222399 - DNA, 120 bp, Artificial Sequence
  ENSG00000117505_28 (sequence is synthesized)
tccatccccttgaatatatgttatatattctttttcggcagattatcagattagtaagtgtttaaaaggcatcagtttttaaaactgcatataccacacacacacaaaacagtacacaaa

SEQ ID NO: 222400 - DNA, 120 bp, Artificial Sequence
  ENSG00000117505_29 (sequence is synthesized)
taaaggttttcacaaattaaacaaactcacatactagtcttcagatcaaaacacagagcattatgtgtaccccagaagccctcctctttccccatcttaacactgtcttctttcttgctg

SEQ ID NO: 222401 - DNA, 120 bp, Artificial Sequence
  ENSG00000117505_30 (sequence is synthesized)
aaagttactatcctgacttctaaaatcatagattagttttgcctgttttttattttatgtaaatgtaatcatacataatacactttttttcattcatcatttttgtgaatattttagttt

SEQ ID NO: 222402 - DNA, 120 bp, Artificial Sequence
  ENSG00000117505_31 (sequence is synthesized)
cttgttgccactgtaacaaactaccacaaacttagtgacttaaaacaacacagatttattcttttatagtcctggagatcagaagtccaaaaatcagtttcattaggcctaaatcaaagt

SEQ ID NO: 222403 - DNA, 120 bp, Artificial Sequence
  ENSG00000117505_32 (sequence is synthesized)
atcagcagggttggctctttattgaggttgtgagggagaatgttttcttcccttttttggcttccagtgacggcctgtatttatgggcttgtgaccccttcctctctatgatcaaagctt

SEQ ID NO: 222404 - DNA, 120 bp, Artificial Sequence
  ENSG00000117505_33 (sequence is synthesized)
gcttttgtcattatatcatcttctcttctgtagtcagatctttccctgcctctaagtttagggctcacctgcataaagcagggataatccccctatctcaagatccttaatttaatcaca

SEQ ID NO: 222405 - DNA, 120 bp, Artificial Sequence
  ENSG00000117505_34 (sequence is synthesized)
tctgcagaatctcttttgccatataagtgacattcacaggttccagggattcatacgctggctatctttggaggccgttattcaacctgccaaagtgagatccattcttattgttgcatg

SEQ ID NO: 222406 - DNA, 120 bp, Artificial Sequence
  ENSG00000117505_35 (sequence is synthesized)
tatttgtagttcattcattctcattgctgtatagtcttccgtttgtttatccatttttcattacatccaaaagttattcattctcccattaatagtcttttgagaatttttcaattctga

SEQ ID NO: 222407 - DNA, 120 bp, Artificial Sequence
  ENSG00000117505_36 (sequence is synthesized)
gctattatgaatagtactgtgtagaacattcttatacatgtcttttggtgagtgtatacatttccattgagtataaacctaagaatggaattgccaggttgtagggtgtgtatattttca

SEQ ID NO: 222408 - DNA, 120 bp, Artificial Sequence
  ENSG00000117505_37 (sequence is synthesized)
gttttagtatttactgtcaaacagttttccaaagtgactgtaagaaggcaccattttaatgtgtagcataaaaatgaattacgctaatgatcttagtgggttgaatttctcgaaacacct

SEQ ID NO: 222409 - DNA, 120 bp, Artificial Sequence
  ENSG00000117505_38 (sequence is synthesized)
aaattgtaccaaatgagttatattgcagcaggtatgttgttaatttcatataacaggaaaataagagcaaaagtaattgcccttattaactgacacattagtattacatactcattaggt

SEQ ID NO: 222410 - DNA, 120 bp, Artificial Sequence
  ENSG00000117505_39 (sequence is synthesized)
tattgctccttagaaaaaatgcaaattttaagtaatcgtaagtagtatgttgaattagtatgttgtgggaaaatctgtgatttaattttttaattgaattttaaattttgggttataacc

SEQ ID NO: 222411 - DNA, 120 bp, Artificial Sequence
  ENSG00000117505_40 (sequence is synthesized)
gtctgtccaactcatctatatccaaatggccattaggaagaattatccaattcagatggcataggcactgccttccaatttcttcatttgtatttttttgttgctgttttcttttttgcc

SEQ ID NO: 222412 - DNA, 120 bp, Artificial Sequence
  ENSG00000117505_41 (sequence is synthesized)
tctgtccccaacaatttgaccacaagtcctaccccacctcctctgtttttcaccatcccccaggatataaagtgtcatggttaggatcggccagggtgaagagaatgataacataagtag

SEQ ID NO: 222413 - DNA, 120 bp, Artificial Sequence
  ENSG00000117505_42 (sequence is synthesized)
cctcctttcacctaaagtattaccactggttcttatcctatttcctcaaaataaatgagaagagaaagtaaggaataagaggaagaaactttttttttttttttaaagaaacagggtctc

SEQ ID NO: 222414 - DNA, 120 bp, Artificial Sequence
  ENSG00000117505_43 (sequence is synthesized)
attgcagtggctagattacagtgactattcacaggcataatcataatgcaccatagcctcaaactcctgggctcaagcaatccaaaaggaggaaacttttaacttatgatcagtttctac

SEQ ID NO: 222415 - DNA, 120 bp, Artificial Sequence
  ENSG00000117505_44 (sequence is synthesized)
cataaatcaagcaacttagaaaaaccttagaacagggtttctcaaaccaagcattgttagtatttggggttggttaagtctttgtttgtgggagcctatcctgtgcattgtaggatttct

SEQ ID NO: 222416 - DNA, 120 bp, Artificial Sequence
  ENSG00000117505_45 (sequence is synthesized)
agcagcataattggcttatgcccacttgatgtcattagcaccactccccaccctacttccagttgtgacaacccaaaaatgtctccagacatagccaactgtccctgggtgttgcgagta

SEQ ID NO: 222417 - DNA, 120 bp, Artificial Sequence
  ENSG00000117505_46 (sequence is synthesized)
taggaggcaaaattgcaccctgttgaaaaccaccaccttagatcatctaggttttacttttaggataagacacttgagggaaaggctgtgaaactgaacctctgttagaagcaacacaca

SEQ ID NO: 222418 - DNA, 120 bp, Artificial Sequence
  ENSG00000117505_47 (sequence is synthesized)
gtatcactgcaaaaagactaaaagaaataggtgatttggaaagaggaggcccaggattaaaatatgtttccaagaaagtcaaatcttacaggagactcttgacttcacatctgctgatcc

SEQ ID NO: 222419 - DNA, 120 bp, Artificial Sequence
  ENSG00000117505_48 (sequence is synthesized)
ctttacccgataggacctagagcagccattataaatctctgtacctgcttgctgcttttctacctcattgttagccacacccagtttgaaacagatgaggtatgctatttcataactagt

SEQ ID NO: 222420 - DNA, 120 bp, Artificial Sequence
  ENSG00000117505_49 (sequence is synthesized)
acatcttttaataagcattttttattgtgattaaatatgcatatcgtaaaattcaccactttaaccagttttaagtgttcaattctgtggcattaagtatattcatactattgtgcaacc

SEQ ID NO: 222421 - DNA, 120 bp, Artificial Sequence
  ENSG00000117505_50 (sequence is synthesized)
accaccaccatccgtctacagaactcttcatcttcccaaactgaaattatgtattcattaaacaataaccacccattacctcctctctcctcagcctctggtaaccagcattcagtctct

SEQ ID NO: 222422 - DNA, 120 bp, Artificial Sequence
  ENSG00000117505_51 (sequence is synthesized)
atgaattgactactctggatatctaaatggattcattcttatttcatttaccataatgtcttcaaagttcattcatgttgtagcatgtattagaatttctttcctcttaaaggccaaata

SEQ ID NO: 222423 - DNA, 120 bp, Artificial Sequence
  ENSG00000117505_52 (sequence is synthesized)
tgccgtagtatgtaaataccgtattttgtttatcagttcatccattaatggacactgggttgcttctgctttttggctattgtgaataatgcttctgtgaacgtgggtatacaaataact

SEQ ID NO: 222424 - DNA, 120 bp, Artificial Sequence
  ENSG00000117505_53 (sequence is synthesized)
gtttgagtcctaataggcttgttatttttgagtgcacagatctgtatattcgcaattgaaatagggaaagtctttatattcatataaagataatttataatacaataagtcctcaatgtt

SEQ ID NO: 222425 - DNA, 120 bp, Artificial Sequence
  ENSG00000117505_54 (sequence is synthesized)
gttgataggttctgggaaactgcgagtttaagaaaaacaacatataatgaaatcaattttaccataggtgaactgatataaataagagttaagtccctatggcatatatttctggttaca

SEQ ID NO: 222426 - DNA, 120 bp, Artificial Sequence
  ENSG00000117505_55 (sequence is synthesized)
aaaacactaccaaatttctaataaagacccaaaacacttctaaaattaaacattgagattaatatgagctttatatacatttaaaaaggataaaaacaagtaagaattggctggacatgg

SEQ ID NO: 222427 - DNA, 120 bp, Artificial Sequence
  ENSG00000117505_56 (sequence is synthesized)
tggcttacgcctgtaatctcaacactgggaagtcgaggtgggcagatggcttgacctcaggagttcggaaccagcctgggtaatatggtgaaacccgtctctacagaaaaattcaaaaat

SEQ ID NO: 222428 - DNA, 89 bp, Artificial Sequence
  ENSG00000117505_57 (sequence is synthesized)
taatatggtgaaacccgtctctacagaaaaattcaaaaattagccagagcgggagcctgatgtgggaggatcccttgagcctgggaggt

SEQ ID NO: 222429 - DNA, 120 bp, Artificial Sequence
  ENSG00000117505_58 (sequence is synthesized)
tctgggcaacagagcaaaatcctatctcaaaaaaaatatatatattatccagccccaaatgtttatggggttgttattgataaaccctgcattaaacaatcccacagtcggtgctgcggt

SEQ ID NO: 222430 - DNA, 86 bp, Artificial Sequence
  ENSG00000117505_59 (sequence is synthesized)
taaaaattatttacccaatatttggcgaatcagtgagtgacagcagttgtagtgctagtgggttaaatcaaggaataactgttggg

SEQ ID NO: 222431 - DNA, 120 bp, Artificial Sequence
  ENSG00000117505_60 (sequence is synthesized)
ttgtagtgctagtgggttaaatcaaggaataactgttgggaagtgaaaattttaaggagcacctcctaccaccatgcagttcaaaaacaaaaaataagaaataaagtgggcttgctgagt

SEQ ID NO: 222432 - DNA, 120 bp, Artificial Sequence
  ENSG00000117505_61 (sequence is synthesized)
gctttcatactgcatcatttattgtgcatttgtatgattattatatactttacaaattttcgttttacagtaatttgtattcattcgtttttcaacctgcttatttcagttcagtgtctt

SEQ ID NO: 222433 - DNA, 120 bp, Artificial Sequence
  ENSG00000117505_62 (sequence is synthesized)
gggtagctggagcctatcccagcagctcagggagcaaagtgggagccaaccctggacaggatgccttttcatcacagggcgcactcacacggcacacacacgcatactgggaccatttag

SEQ ID NO: 222434 - DNA, 120 bp, Artificial Sequence
  ENSG00000117505_63 (sequence is synthesized)
ctgtaccaattcacctaacgtgcatctttgggaattgagaagaaaccagaatacccagagaaaactcatgcagatatgtggaggacatgcaaaattcacacagacagtggccctggttgt

SEQ ID NO: 222435 - DNA, 76 bp, Artificial Sequence
  ENSG00000117505_64 (sequence is synthesized)
gaggacatgcaaaattcacacagacagtggccctggttgtaaataattgtttttcatcaatgttataatgaaatta

SEQ ID NO: 222436 - DNA, 120 bp, Artificial Sequence
  ENSG00000117505_65 (sequence is synthesized)
cggaggttgcagtgagttgagatcgcgacactgcactccagcctgacaacagagcaagacttcgtctcaaaaaaacaaacaaaaaaagaaattacattagttgaggacctgctgtatgtg

SEQ ID NO: 222437 - DNA, 120 bp, Artificial Sequence
  ENSG00000117505_66 (sequence is synthesized)
tgtatgtgatatgaacaatgaggatcaactctttttgtaatagtttttttacatatgttatttcatttgtttatttcctctgtgagggtaagtattgatagtccagtcatagactggtaa

SEQ ID NO: 222438 - DNA, 120 bp, Artificial Sequence
  ENSG00000117505_67 (sequence is synthesized)
cacaggcacaccattaaaaataatagacatacagtatgcagtattttgttttacttatgaaactccgtattttatgtatgatgtattgagtatgaagaatagtacatactgtttcctttt

SEQ ID NO: 222439 - DNA, 120 bp, Artificial Sequence
  ENSG00000117505_68 (sequence is synthesized)
aactttatgtttcttgcctttgtatattttatatgaatagcacttgtcactaacatagaaagcagtagaggtggaagagggagacttgccagaataagtttttaatgtgaatcagagatt

SEQ ID NO: 222440 - DNA, 120 bp, Artificial Sequence
  ENSG00000117505_69 (sequence is synthesized)
tttattaggaattgggagtggaaggagagagatagtattagaaagtatgtatgcagcaaaggatggagaaactgtccttgttgttaaggcatctaaggatgctccaattactggggaaaa

SEQ ID NO: 222441 - DNA, 120 bp, Artificial Sequence
  ENSG00000117505_70 (sequence is synthesized)
cataccaggctcaaaatggtctgattatgcaaataccttctaatacgtttgtttcttttgttgtgcctataaaagatgccattaacttcatatttatgtcactaataaacttctagaatc

SEQ ID NO: 222442 - DNA, 120 bp, Artificial Sequence
  ENSG00000117505_71 (sequence is synthesized)
catgtagtagggtgtagtagtgtggttaagctatgaagaacaatggtatttatttccaaaacacttatttggtatattacataggatagagtatgttttctaagccaaatagtgttaggt

SEQ ID NO: 222443 - DNA, 120 bp, Artificial Sequence
  ENSG00000117505_72 (sequence is synthesized)
tttcatgtgcagttgccttacacatatactagtagcccttacaaaatttcgtctgtctttattataaacatgttgtaagtgaggaaactaagattccaagaaattaagtactgttggccc

SEQ ID NO: 222444 - DNA, 120 bp, Artificial Sequence
  ENSG00000117505_73 (sequence is synthesized)
tctgtgtctgggggttccacatctatagatcgaccaaccatggactgatggattgaaaacatttggggaaaaaacaaaaaataacccaacaatgaaatagtataaattttaaaaataata

SEQ ID NO: 222445 - DNA, 120 bp, Artificial Sequence
  ENSG00000117505_74 (sequence is synthesized)
taacaatatttatatatcatttacattatgttagatattataatctagagatgattagcatccttggattttggattttggtatccttggggtatcctggaaccaatccctggcggatac

SEQ ID NO: 222446 - DNA, 120 bp, Artificial Sequence
  ENSG00000117505_75 (sequence is synthesized)
caagggatgactgtaatataataacatctaacaagtgaaggatttgaaccccaatgtaagtaattatgaaaactatttttcttccactagaacttttttccccaaaaatactctggaaat

SEQ ID NO: 222447 - DNA, 120 bp, Artificial Sequence
  ENSG00000117505_76 (sequence is synthesized)
actggaacaaatactaaaataaatgacctttatttgaagatcttttaaaaaaattataagcctgcctgaggatagcaaaattgtgtgcttttgcaaggtaattgtagaactcattctaag

SEQ ID NO: 222448 - DNA, 120 bp, Artificial Sequence
  ENSG00000117505_77 (sequence is synthesized)
gaagcagaggtaatgtctgttactattttcagctccctttttctgtccactgttgtctaaatgattcactcagtgttatgcagaatatgagaagttattttataaagttgatttgtggta

SEQ ID NO: 222449 - DNA, 120 bp, Artificial Sequence
  ENSG00000117505_78 (sequence is synthesized)
aacctatcataggcactaaagaggaaaagcctttgaagcaggcgttagtacatgcaatgttataattcatatgaatatgaggtacaaaagaagaggtgttgatgttttaaaaacattaat

SEQ ID NO: 222450 - DNA, 120 bp, Artificial Sequence
  ENSG00000117505_79 (sequence is synthesized)
ggctatttattgatattgcagaccacctagagaatgctaaattgaacatttagtgacagaagattttctcctggatactttaaatacataaaaacttggcagagtttttatgaaatataa

SEQ ID NO: 222451 - DNA, 120 bp, Artificial Sequence
  ENSG00000117505_80 (sequence is synthesized)
attttattgtattcatttacatattaaaaaatagactcagaggcggaaaaacttccttgaaattgtttgtcatttgttctacagttacttactgaagtcattactatttaccaagcatca

SEQ ID NO: 222452 - DNA, 120 bp, Artificial Sequence
  ENSG00000117505_81 (sequence is synthesized)
tgctaggtgctaggcttacaagagtgaacaaggagacagggttcctgtcattatagagcttaatctactggggaagattgagtgggaaagattgacttaaataaaacagtaagttcagaa

SEQ ID NO: 222453 - DNA, 120 bp, Artificial Sequence
  ENSG00000117505_82 (sequence is synthesized)
agttaggaagtgttggagtctatatttaaacttaggtattttgacccaaaagcctgtactgtttctaacataccatgctgatgctctagcctccattttatatgcttaaacttattatgg

SEQ ID NO: 222454 - DNA, 120 bp, Artificial Sequence
  ENSG00000117505_83 (sequence is synthesized)
aaagaaataattgactgcctgctatatctgtcttcacctttctatccctattatctgtttttttattcctcttttttgtctcccttgtttcttaccctgacttatgtatgaagatctcta

SEQ ID NO: 222455 - DNA, 120 bp, Artificial Sequence
  ENSG00000117519_0 (sequence is synthesized)
agccgggtgcttcgcagcggagctcgaggctctgtagcacccagttggacccagtcgcccaggcaccgcccgcgccccgcggccgtctcctgcgcctcccagaggagggagttcgagcat

SEQ ID NO: 222456 - DNA, 120 bp, Artificial Sequence
  ENSG00000117519_1 (sequence is synthesized)
cccccgcggcggccactcctcggggccaggagcggggaagcgaagtgcgagagaccccggaccccagcgctgtctcttcccgccgcccgaaccaccatgacccacttcaacaagggccct

SEQ ID NO: 222457 - DNA, 120 bp, Artificial Sequence
  ENSG00000117519_2 (sequence is synthesized)
tcctatgggctctcggccgaagtcaagaacaagattgcttccaagtatgatcatcaggcagaagaagatcttcgcaattggatagaagaggtgacaggcatgagcattggccccaacttc

SEQ ID NO: 222458 - DNA, 120 bp, Artificial Sequence
  ENSG00000117519_3 (sequence is synthesized)
cagctgggcttaaaggatggcatcatcctctgcgaacttataaacaagctacagccaggctcagtgaagaaggtcaacgagtcctcactgaactggcctcagttggagaatattggcaac

SEQ ID NO: 222459 - DNA, 120 bp, Artificial Sequence
  ENSG00000117519_4 (sequence is synthesized)
tttattaaagctattcaggcttatggtatgaagccacatgacatattcgaagcaaatgatctttttgagaatggaaacatgacccaggttcagactactctggtggctctagcaggtctg

SEQ ID NO: 222460 - DNA, 120 bp, Artificial Sequence
  ENSG00000117519_5 (sequence is synthesized)
gctaaaacaaaaggattccatacaaccattgacattggagttaagtatgcagaaaaacaaacaagacgttttgatgaaggaaaattaaaagctggccaaagtgtaattggtctgcagatg

SEQ ID NO: 222461 - DNA, 120 bp, Artificial Sequence
  ENSG00000117519_6 (sequence is synthesized)
ggaaccaacaaatgtgccagccaggcaggtatgacagcttacgggactaggaggcatctttatgatcccaaaatgcaaactgacaaaccttttgaccagaccacaattagtctgcagatg

SEQ ID NO: 222462 - DNA, 120 bp, Artificial Sequence
  ENSG00000117519_7 (sequence is synthesized)
ggcactaataaaggagccagccaggcagggatgttagcaccaggtaccagaagagacatctatgatcagaagctaacattacagccggtggacaactcgacaatttccctacagatgggt

SEQ ID NO: 222463 - DNA, 120 bp, Artificial Sequence
  ENSG00000117519_8 (sequence is synthesized)
ctgtgctgctcctacagaacctgtcattcacaacggaagccaaggaacaggaacaaatggttcggaaatcagtgatagtgattatcaggcagaataccctgatgagtatcatggcgagta

SEQ ID NO: 222464 - DNA, 120 bp, Artificial Sequence
  ENSG00000117519_9 (sequence is synthesized)
ccaggatgactaccccagagattaccaatatagcgaccaaggcattgattattagatccacacagaaggagctcagtatttagtcctttgtttttattcagtgagaaccaagctagcctt

SEQ ID NO: 222465 - DNA, 120 bp, Artificial Sequence
  ENSG00000117519_10 (sequence is synthesized)
gagtaatttttatcttgtcttcctaaaacactattaagcttattgtacttttaagaaaaattgccttacgtacattcctttttcctttttctgcctcttccctcaatagttgccttttag

SEQ ID NO: 222466 - DNA, 120 bp, Artificial Sequence
  ENSG00000117519_11 (sequence is synthesized)
tgctgtaatagttaaatcctacagcataatcaataactcgcatatgaagtaaaaaggaatactgtgaaaggggagtactcttgtacagccagttcttttatgcaaaaatctatgcatttt

SEQ ID NO: 222467 - DNA, 88 bp, Artificial Sequence
  ENSG00000117519_12 (sequence is synthesized)
agtgtatctggtttctacatggaagactaaactcatgcttattgctaaatgtggtctttgccaactaaatttaagatgcagcatttta

SEQ ID NO: 222468 - DNA, 120 bp, Artificial Sequence
  ENSG00000117519_13 (sequence is synthesized)
atgtggtctttgccaactaaatttaagatgcagcattttagaaatttacatatcaatgtttctacagtattgtttgctaatttttaaataaagtcatgatcagtgtgcatttgtgattat

SEQ ID NO: 222469 - DNA, 120 bp, Artificial Sequence
  ENSG00000117519_14 (sequence is synthesized)
atgtgtactcattctcttacctagcgaacaagatcttttcagagtggtgtttctaaaagagcatgtacaaaagtggcctgtggacatttaggcctgggtgatgcatttgctcttcctgtt

SEQ ID NO: 222470 - DNA, 120 bp, Artificial Sequence
  ENSG00000117519_15 (sequence is synthesized)
tgtgccaatgtatcaatgtagagttgctctgttttcttcaactgtatttattgctgcatttctcagcataaacttatcccattgtattttttataaataaatattttttttgaactttca

SEQ ID NO: 222471 - DNA, 64 bp, Artificial Sequence
  ENSG00000117519_16 (sequence is synthesized)
tcaggtgattccccttcctcccatttttgctacccacctgtcacttcttgacattgtgattatt

SEQ ID NO: 222472 - DNA, 120 bp, Artificial Sequence
  ENSG00000117519_17 (sequence is synthesized)
ttttgctacccacctgtcacttcttgacattgtgattatttatgtcatactgtttctgatctgttctgggcctgggaatcaaatagccatgtttgctaggcctttgtatgagatgctgca

SEQ ID NO: 222473 - DNA, 120 bp, Artificial Sequence
  ENSG00000117519_18 (sequence is synthesized)
aaagcgccacaaaggagggctgcctgtggtttaattcccattaacctcccgggagcccaagcatgtcaggattgccaccgcaccgtccgaccgctggtggaaggcactggcattgtcaga

SEQ ID NO: 222474 - DNA, 120 bp, Artificial Sequence
  ENSG00000117519_19 (sequence is synthesized)
gggtgtcagaccttgatattctacagatatctttaatgctttcccttactgatgctaaagggagcaacttgatatttcaatccttgtttttgtgtgccagtaaataagatgtctctcata

SEQ ID NO: 222475 - DNA, 120 bp, Artificial Sequence
  ENSG00000117523_0 (sequence is synthesized)
ctcgctccccctcggaaagctgcgaaagtgctttggcggtttgtccatccgcagcttcggcttttccagtctggtggcccttccggccacccctttaaccccagctttccctcccccttc

SEQ ID NO: 222476 - DNA, 120 bp, Artificial Sequence
  ENSG00000117523_1 (sequence is synthesized)
tttcgatcagagatcggcggagaccctcgaagtgcgcaaacttgacactcaccctgaccggactggggttttaaggggtgtggcaggaggttttggactcgatgagtttccaccgaaatg

SEQ ID NO: 222477 - DNA, 120 bp, Artificial Sequence
  ENSG00000117523_2 (sequence is synthesized)
tcggagaagtcaggccagagcacaaaagcaaaggatgggaaaaagtatgcaacactcagtttatttaatacttacaaggggaaatcattagaaacacagaaaaccacagctcgacatgga

SEQ ID NO: 222478 - DNA, 120 bp, Artificial Sequence
  ENSG00000117523_3 (sequence is synthesized)
ttacagagtcttggaaaagtcggtatttcacggcgtatgcctccacctgctaacctcccaagtcttaaagcagaaaacaaaggcaatgatcctaatgtaaacattgtacctaaagatggc

SEQ ID NO: 222479 - DNA, 120 bp, Artificial Sequence
  ENSG00000117523_4 (sequence is synthesized)
acagggtgggcatcaaaacaagagcaacatgaagaagaaaaaacaccagaagtgccaccagcacagccaaaacctggggttgcagctcccccagaagtagcacctgctcccaaatcatgg

SEQ ID NO: 222480 - DNA, 120 bp, Artificial Sequence
  ENSG00000117523_5 (sequence is synthesized)
gccagtaacaagcaaggtgggcaaggagatggaatccaagtgaatagtcagtttcagcaagaatttcccagcctgcaggcagctggggatcaggaaaaaaaagaaaaggaaacaaatgat

SEQ ID NO: 222481 - DNA, 120 bp, Artificial Sequence
  ENSG00000117523_6 (sequence is synthesized)
gacaactatggacctggacccagtttacgtccaccaaatgttgcttgttggagagatggtggtaaggctgctggctcaccttcgtcatctgatcaagatgaaaagctccctggccaggat

SEQ ID NO: 222482 - DNA, 120 bp, Artificial Sequence
  ENSG00000117523_7 (sequence is synthesized)
gaaagcacagctggaacatcagagcaaaatgatatcctcaaagtggtggaaaagaggatagcttgtggtcctccacaggctaaactgaatggacagcaggctgctctcgcttcccagtat

SEQ ID NO: 222483 - DNA, 120 bp, Artificial Sequence
  ENSG00000117523_8 (sequence is synthesized)
agagctatgatgcctccttatatgttccaacagtatccgaggatgacatatcctcctctacatggtcccatgagattcccaccttctttatctgaaacaaacaaaggccttcgaggaaga

SEQ ID NO: 222484 - DNA, 120 bp, Artificial Sequence
  ENSG00000117523_9 (sequence is synthesized)
ggcccacctccttcatgggcctctgagcctgaacgcccatccattcttagtgcatcagaactgaaggagcttgataaatttgataacctagatgctgaagctgatgaaggttgggcaggt

SEQ ID NO: 222485 - DNA, 120 bp, Artificial Sequence
  ENSG00000117523_10 (sequence is synthesized)
gctcagatggaagtagattatacagagcaactgaatttcagtgatgatgatgaacaaggaagtaacagtcctaaagagaataacagtgaggatcaaggttcaaaagcctctgaaaacaac

SEQ ID NO: 222486 - DNA, 120 bp, Artificial Sequence
  ENSG00000117523_11 (sequence is synthesized)
gaaaacaaaaaagaaacagatgaagtttccaacactaaatcatcttcccaaatacctgcccaaccatcagtagcaaaagttccctatgggaaaggaccttcatttaatcaggaacgtgga

SEQ ID NO: 222487 - DNA, 120 bp, Artificial Sequence
  ENSG00000117523_12 (sequence is synthesized)
acatcttcacatctgccaccacctccaaagttgcttgcacagcagcatccacctccagatcgacaggcagtacctggaagaccaggcccctttccctccaagcagcaagtagctgatgaa

SEQ ID NO: 222488 - DNA, 120 bp, Artificial Sequence
  ENSG00000117523_13 (sequence is synthesized)
gatgaaatatggaagcaaagacgaagacaacaatcagaaatttctgcagcagtagaacgtgctcgtaaacggcgtgaagaggaagagcgaagaatggaagaacaaaggaaggcagcttgt

SEQ ID NO: 222489 - DNA, 120 bp, Artificial Sequence
  ENSG00000117523_14 (sequence is synthesized)
gcggagaaactgaaacgattggatgagaagcttggcatcctggaaaaacaaccatctccagaggaaattagggaaagggagcgagaaaaagaacgggagcgtgagaaagaacttgaaaaa

SEQ ID NO: 222490 - DNA, 120 bp, Artificial Sequence
  ENSG00000117523_15 (sequence is synthesized)
gaacaagaacaggagcgagagaaggagagggaaaaagacagagagagacagcaggaaaaggagaaagagctggagaaggagcaggaaaaacaaagagaaatggagaaagaaagaaagcaa

SEQ ID NO: 222491 - DNA, 120 bp, Artificial Sequence
  ENSG00000117523_16 (sequence is synthesized)
gaaaaagaaaaagaactagaacggcagaaagaaaaggaaaaagaactacaaaagatgaaagaacaagaaaaggaatgtgagctggagaaggaaagggaaaaattagaggagaaaattgaa

SEQ ID NO: 222492 - DNA, 120 bp, Artificial Sequence
  ENSG00000117523_17 (sequence is synthesized)
cccagagaacctaatttagagcccatggtagaaaaacaagaaagtgaaaacagctgtaataaagaggaggaacccgttttcactagacaagacagcaatcgcagtgaaaaggaagccaca

SEQ ID NO: 222493 - DNA, 120 bp, Artificial Sequence
  ENSG00000117523_18 (sequence is synthesized)
ccagtggtgcatgaaacagaaccagaatcagggtctcaacctcggccggctgtattatctggctatttcaaacagtttcagaagtctttacctccacgattccagcggcagcaggaacag

SEQ ID NO: 222494 - DNA, 120 bp, Artificial Sequence
  ENSG00000117523_19 (sequence is synthesized)
atgaaacagcagcagtggcagcagcagcaacagcaaggtgtacttccacagactgttccttcacaaccgtccagtagtactgtccctcctccaccacacagacctctttatcagcctatg

SEQ ID NO: 222495 - DNA, 120 bp, Artificial Sequence
  ENSG00000117523_20 (sequence is synthesized)
cagcctcatcctcagcatttggcttctatgggttttgatccaaggtggctcatgatgcagtcctacatggatcctcgaatgatgtcaggaagacctgctatggatattccacccattcat

SEQ ID NO: 222496 - DNA, 120 bp, Artificial Sequence
  ENSG00000117523_21 (sequence is synthesized)
cctggaatgattcctcctaaaccattaatgagaagagaccagatggaagggtcaccgaacagttctgagtcatttgagcatatagctcgatctgcaagagatcacgcaatttccctttct

SEQ ID NO: 222497 - DNA, 120 bp, Artificial Sequence
  ENSG00000117523_22 (sequence is synthesized)
gagcctcgtatgctgtgggggtcagatccctatcctcatgctgagcctcaacaagcaactactcccaaagcaacagaagagcctgaggatgtaaggtctgaagctgcgttggaccaggaa

SEQ ID NO: 222498 - DNA, 120 bp, Artificial Sequence
  ENSG00000117523_23 (sequence is synthesized)
cagattactgctgcttattctgtagaacataatcaattagaggctcacccaaaggcagactttatcagagaatcaagtgaggcacaagtacaaaagtttttaagcagatctgtggaagat

SEQ ID NO: 222499 - DNA, 120 bp, Artificial Sequence
  ENSG00000117523_24 (sequence is synthesized)
gttagacctcaccatactgatgcaaataatcagtctgcttgttttgaagcacctgatcaaaagaccttatccgctcctcaagaggagcggatttcagctgtagaaagtcagccttcccgg

SEQ ID NO: 222500 - DNA, 120 bp, Artificial Sequence
  ENSG00000117523_25 (sequence is synthesized)
aaaagaagtgtttcccatggatctaaccatacgcaaaaaccagacgagcagagaagtgaaccatctgcaggcattcctaaagtaaccagcagatgcattgattcaaaagaaccaatagaa

SEQ ID NO: 222501 - DNA, 120 bp, Artificial Sequence
  ENSG00000117523_26 (sequence is synthesized)
aggccagaggagaaaccaaaaaaggaaggctttatacgatcttctgaaggaccaaaacctgaaaaagtatataaatctaaatcagaaactcgttggggcccacgaccaagctctaacaga

SEQ ID NO: 222502 - DNA, 120 bp, Artificial Sequence
  ENSG00000117523_27 (sequence is synthesized)
agggaagaagttaatgatagacctgtgagaagatcaggtcccattaaaaaacctgtacttagagatatgaaagaggaacgggaacagaggaaggagaaagaaggagaaaaggccgaaaag

SEQ ID NO: 222503 - DNA, 120 bp, Artificial Sequence
  ENSG00000117523_28 (sequence is synthesized)
gtcactgaaaaagtagttgtaaagcctgaaaagacggaaaagaaggatcttcctcctcccccaccaccacctcagccaccagcaccaattcagccacagtcagttccaccaccaattcaa

SEQ ID NO: 222504 - DNA, 120 bp, Artificial Sequence
  ENSG00000117523_29 (sequence is synthesized)
ccagaagcagagaaatttccttcaacagaaactgcaactttggctcaaaaaccatctcaggatactgagaagcctctggaacctgtgagtactgttcaggtagagcctgcagttaagact

SEQ ID NO: 222505 - DNA, 120 bp, Artificial Sequence
  ENSG00000117523_30 (sequence is synthesized)
gtaaaccaacagactatggcagcaccagtagtcaaagaagaaaaacaacctgagaaagtcatcagcaaagaccttgttatagagaggcctcgaccagattcaagaccagcagttaaaaaa

SEQ ID NO: 222506 - DNA, 120 bp, Artificial Sequence
  ENSG00000117523_31 (sequence is synthesized)
gaatcaactttgcctcccaggacctattggaaagaagctagagagagagattggtttccagatcaaggatacagaggtcgaggccgaggtgaatattactccagaggtcgaagctataga

SEQ ID NO: 222507 - DNA, 120 bp, Artificial Sequence
  ENSG00000117523_32 (sequence is synthesized)
ggttcttatggagggcgtggcaggggtggtaggggacacactcgagattatcctcagtatagagacaataagccaagagcagagcatataccctcagggcctctcagacagcgagaagaa

SEQ ID NO: 222508 - DNA, 120 bp, Artificial Sequence
  ENSG00000117523_33 (sequence is synthesized)
agtgaaacacggagtgagagctctgattttgaagttgtccccaaaagaagacgacagcggggttcagagactgacacagacagtgaaattcatgaaagtgcaagtgacaaggacagttta

SEQ ID NO: 222509 - DNA, 120 bp, Artificial Sequence
  ENSG00000117523_34 (sequence is synthesized)
agtaaaggcaaacttcccaaaagagaggaacggcctgaaaacaaaaaacctgtaaagcctcattcttctttcaagcctgataatcatgttcgaatagataatagactgctagaaaagcct

SEQ ID NO: 222510 - DNA, 120 bp, Artificial Sequence
  ENSG00000117523_35 (sequence is synthesized)
tatgtaagggatgacgataaagctaaaccaggctttcttcctaaaggagagcctacaaggagaggcagagggggaacattcaggcgtggtggaagggatcctggaggccgtccatcacgc

SEQ ID NO: 222511 - DNA, 120 bp, Artificial Sequence
  ENSG00000117523_36 (sequence is synthesized)
ccttccactttacgaagaccagcttatcgggacaatcagtggaacccaaggcagtcagaagttcctaaaccagaagatggagagccgccaagaagacatgagcagtttattcctatagca

SEQ ID NO: 222512 - DNA, 120 bp, Artificial Sequence
  ENSG00000117523_37 (sequence is synthesized)
gcagataaacgacctccaaaatttgagcgaaaatttgacccagctagagaaaggcctcgaaggcagcgtcctactcgaccaccaaggcaagacaagccacctcgatttagacggctaaga

SEQ ID NO: 222513 - DNA, 120 bp, Artificial Sequence
  ENSG00000117523_38 (sequence is synthesized)
gagagggaggctgcttcaaaatcaaatgaggtggtagcagtgcccacaaatggcacagttaataatgtggctcaagaaccagttaatactcttggggatatttccgggaataagacacca

SEQ ID NO: 222514 - DNA, 120 bp, Artificial Sequence
  ENSG00000117523_39 (sequence is synthesized)
gatttatctaatcagaactcttcagatcaggcaaatgaagaatgggaaacagcttctgaaagcagtgatttcaatgagaggcgagagagggatgaaaaaaaaaatgctgacttgaatgca

SEQ ID NO: 222515 - DNA, 120 bp, Artificial Sequence
  ENSG00000117523_40 (sequence is synthesized)
caaacagttgtaaaggttggagagaatgttctacctccaaagagggaaattgcaaagagaagtttttctagtcagagaccagtagatcgtcagaatcgacgtggcaacaatggtccaccc

SEQ ID NO: 222516 - DNA, 120 bp, Artificial Sequence
  ENSG00000117523_41 (sequence is synthesized)
aaatcaggaaggaatttctcaggtcctagaaatgaaaggagaagtggcccaccatcaaaaagtgggaagagagggccatttgatgaccagcctgcaggcacaactggggttgacctcatc

SEQ ID NO: 222517 - DNA, 120 bp, Artificial Sequence
  ENSG00000117523_42 (sequence is synthesized)
aatggcagctctgcacaccatcaggaaggagtacctaatggtacaggacaaaagaactccaaagattctactgggaaaaaaagagaagaccccaaaccaggccctaaaaaaccaaaagag

SEQ ID NO: 222518 - DNA, 120 bp, Artificial Sequence
  ENSG00000117523_43 (sequence is synthesized)
ttatgcaagtgttgttataattgatgatcatcctgaagtaacagtaattgaagatccccagtcaaatttgaatgatgatggttttactgaagtggtatccaaaaaacaacaaaaacgttt

SEQ ID NO: 222519 - DNA, 120 bp, Artificial Sequence
  ENSG00000117523_44 (sequence is synthesized)
acaggatgaagaacgccgaaagaaggaagaacaagtcatacaggtctggaacaaaaagaatgcaaatgaaaaaggaagaagccagacttctaagcttcctccaagatttgccaaaaaaca

SEQ ID NO: 222520 - DNA, 120 bp, Artificial Sequence
  ENSG00000117523_45 (sequence is synthesized)
ggctacagggatccagcaagcacagtcttcagcctcagttccacctctagcttcggctccacttccaccttcaacctcagcttcagttccagcctcaacctcagctccacttccggcaac

SEQ ID NO: 222521 - DNA, 120 bp, Artificial Sequence
  ENSG00000117523_46 (sequence is synthesized)
cttaactccagttccagcctcaacctcagctccggttccagcctcaactttagctccagttctggcctcaacctcagctccagttccagcctcacccttagctccagtttcagcctcagc

SEQ ID NO: 222522 - DNA, 120 bp, Artificial Sequence
  ENSG00000117523_47 (sequence is synthesized)
ctcagtctcagcttcagttccagcctctacttcagctgcagctataacctcttcttcagctccagcctcagccccagctccaacccccatccttgcctcagtttcaaccccagcttctgt

SEQ ID NO: 222523 - DNA, 120 bp, Artificial Sequence
  ENSG00000117523_48 (sequence is synthesized)
caccattcttgcctcagcctcaattcccattcttgcttcagccctagcatcaacttcagctccaacgccagccccagcagcctcttccccagctgccccagtcatcacagcaccaactat

SEQ ID NO: 222524 - DNA, 120 bp, Artificial Sequence
  ENSG00000117523_49 (sequence is synthesized)
cccagcctcagccccaactgcctcagtcccacttgcccctgcctcagcttcagccccagccccagcccctaccccagtctcagccccaaatcctgccccacctgccccagcccagactca

SEQ ID NO: 222525 - DNA, 120 bp, Artificial Sequence
  ENSG00000117523_50 (sequence is synthesized)
ggcacagacccacaaaccagtccagaatccactacagactacatctcagtcttcaaaacaaccaccaccatcaattaggctgccttcagctcaaacacctaatggcacagattatgtagc

SEQ ID NO: 222526 - DNA, 120 bp, Artificial Sequence
  ENSG00000117523_51 (sequence is synthesized)
ctcaggaaaatccatccagaccccacagtcacatggcactctgacagctgaattatgggataacaaggtggccccaccagctgtgctgaatgatatctctaagaaattaggtcccattag

SEQ ID NO: 222527 - DNA, 120 bp, Artificial Sequence
  ENSG00000117523_52 (sequence is synthesized)
tccaccacagccaccttcagtcagtgcatggaataagcccttaacatcgtttggatcagctccttcatcagagggagcgaagaatggtcaagaaagtggactcgaaattggaactgacac

SEQ ID NO: 222528 - DNA, 120 bp, Artificial Sequence
  ENSG00000117523_53 (sequence is synthesized)
aattcagtttggtgctccagcctcaaatggaaatgaaaatgaagttgttcctgtgctttcggaaaaatctgctgacaaaatacctgaacctaaagaacagcggcagaagcagccacgagc

SEQ ID NO: 222529 - DNA, 120 bp, Artificial Sequence
  ENSG00000117523_54 (sequence is synthesized)
aggacctatcaaagcccagaagcttccagatttgagtccagtagaaaacaaagaacacaaacctggtcccattggaaaggaacgttcattaaaaaatagaaaagtaaaagatgcccaaca

SEQ ID NO: 222530 - DNA, 120 bp, Artificial Sequence
  ENSG00000117523_55 (sequence is synthesized)
ggtggagccagaaggacaagagaaaccaagcccagctacagtcagaagcacagatcctgtcacgacaaaggagactaaagcagtctcagaaatgtctactgaaataggaacaatgatctc

SEQ ID NO: 222531 - DNA, 120 bp, Artificial Sequence
  ENSG00000117523_56 (sequence is synthesized)
ggtatcatctgcagaatatggtactaatgcaaaggagtctgtaacagactatactacaccctcttcttctttgcctaacaccgtggctactaataatacaaagatggaggatactttggt

SEQ ID NO: 222532 - DNA, 120 bp, Artificial Sequence
  ENSG00000117523_57 (sequence is synthesized)
taataatgtgcccctgcccaacacccttcccctccctaagagggagactatacaacagagctccagcctaacttcagttcctcccactactttcagcctcaccttcaagatggagtctgc

SEQ ID NO: 222533 - DNA, 120 bp, Artificial Sequence
  ENSG00000117523_58 (sequence is synthesized)
acgcaaagcatgggagaattctccaaatgtaagggaaaaggggtctccagtaacttccacagcacctccaattgcaactggagtcagcagtagtgccagtggaccaagcactgctaatta

SEQ ID NO: 222534 - DNA, 120 bp, Artificial Sequence
  ENSG00000117523_59 (sequence is synthesized)
caattcgttctcaagtgcatccatgccccagattcctgttgcttcagtcactcctacagcatcactatcaggagctggtacatacactacctcttctttgagcacaaaatctacaaccac

SEQ ID NO: 222535 - DNA, 120 bp, Artificial Sequence
  ENSG00000117523_60 (sequence is synthesized)
atcggaccctccaaatatttgtaaagtgaaacctcagcagttacagacaagcagcctgccttctgcaagtcatttttcacagttaagctgtatgccttcccttattgcccagcagcaaca

SEQ ID NO: 222536 - DNA, 120 bp, Artificial Sequence
  ENSG00000117523_61 (sequence is synthesized)
gaatccgcaagtttatgtgtctcagtctgcagcagctcaaatcccagccttctatatggacacaagtcatttattcaatacccaacatgcacgattggctccgccatccttggctcaaca

SEQ ID NO: 222537 - DNA, 120 bp, Artificial Sequence
  ENSG00000117523_62 (sequence is synthesized)
acagggtttccaaccaggtctctctcagccaacttcagttcagcagattccaatccctatttatgcaccactgcaagggcagcatcaagcccaactgagtttgggggctggccctgctgt

SEQ ID NO: 222538 - DNA, 120 bp, Artificial Sequence
  ENSG00000117523_63 (sequence is synthesized)
ttcccaggctcaggaattgttcagctcctcacttcaaccatatagatctcagccagcttttatgcaaagcagtttatcccagccatctgtggtcctttctggtactgctattcacaactt

SEQ ID NO: 222539 - DNA, 120 bp, Artificial Sequence
  ENSG00000117523_64 (sequence is synthesized)
tccaactgtccaacaccaagaacttgccaaggcacaatccggtcttgcctttcagcaaacatcaaatactcagcccattcctatattgtatgaacatcaactggggcaggcatcaggact

SEQ ID NO: 222540 - DNA, 120 bp, Artificial Sequence
  ENSG00000117523_65 (sequence is synthesized)
aggaggttcccagctgattgacacacatcttctccaggccagagcaaatcttacccaggcctcaaatctttattctggacaagtacaacagcctggtcagacaaatttttataacactgc

SEQ ID NO: 222541 - DNA, 120 bp, Artificial Sequence
  ENSG00000117523_66 (sequence is synthesized)
ccagtcaccaagtgctctccagcaggttacagtacctttaccagcatcgcagctttccttgcctaattttggatctacagggcaacctctaattgctttgcctcagactcttcagccccc

SEQ ID NO: 222542 - DNA, 120 bp, Artificial Sequence
  ENSG00000117523_67 (sequence is synthesized)
attacagcataccactccccaagcacaggctcagagtctgagtcgtcctgcacaagtaagccagcctttcagaggattaattcctgctggaacacagcatagcatgattgcaaccacagg

SEQ ID NO: 222543 - DNA, 120 bp, Artificial Sequence
  ENSG00000117523_68 (sequence is synthesized)
aaaaatgtctgaaatggaactaaaagcctttggaagtggcattgatataaaaccaggcacacctccaatcgctggtagaagcaccacaccaacatctagtcccttccgggctacttctac

SEQ ID NO: 222544 - DNA, 120 bp, Artificial Sequence
  ENSG00000117523_69 (sequence is synthesized)
aagtccgaacagccagtccagcaaaatgaacagcattgtctaccagaagcagttccagtcagcccctgccactgtgagaatgacacaaccatttcctacacagtttgcaccccaggcaaa

SEQ ID NO: 222545 - DNA, 120 bp, Artificial Sequence
  ENSG00000117523_70 (sequence is synthesized)
gcagagagcagaggttcttcagtccacgcaacggttcttctctgaacagcaacagagcaaacagataggaggaggcaaagcccagaaagtggacagtgattcaagtaaacctcctgaaac

SEQ ID NO: 222546 - DNA, 120 bp, Artificial Sequence
  ENSG00000117523_71 (sequence is synthesized)
actgaccgaccctcctggggtctgtcaggaaaaagtagaagaaaagccaccccctgcaccctccatagccaccaaacctgttagaactggaccaatcaaacctcaggcgatcaaaaccga

SEQ ID NO: 222547 - DNA, 120 bp, Artificial Sequence
  ENSG00000117523_72 (sequence is synthesized)
agaaacaaaatcttaaaggctatggtttattgcaggggattgggaggggggcgggaaaacatggagaattaagtcagataatgctggcagccaaaggggcaaaatggcctgtgacattat

SEQ ID NO: 222548 - DNA, 120 bp, Artificial Sequence
  ENSG00000117523_73 (sequence is synthesized)
cctgttcagagcttggagatgtacaagggacataggagcaatttacactgacacacagctgctgtaccagtgaaaacgaggctttgcaagcttgtacctactatataacatgtgcttggt

SEQ ID NO: 222549 - DNA, 120 bp, Artificial Sequence
  ENSG00000117523_74 (sequence is synthesized)
tgatggccatgcatcttcagtcagaatttatatataaatgtatgcacccatttttttgagtgcatataatttagacctaaaaatccttatgattagatgaaacaccaaaaatataaggaa

SEQ ID NO: 222550 - DNA, 120 bp, Artificial Sequence
  ENSG00000117523_75 (sequence is synthesized)
aataacacagcagaggaatagctcagcctgaacagtgtgatggtcccagctactacatcagatgcggtttttttgctcccttatgttcttcggatatggttatggcatttgtaggcttgg

SEQ ID NO: 222551 - DNA, 120 bp, Artificial Sequence
  ENSG00000117523_76 (sequence is synthesized)
aggtaaagaactgaagataactggtgctggatagaggagccttattttttattatggcagcttgctatttttataacatggtgattgagttgaacacaatcaaagtacagtagtaactga

SEQ ID NO: 222552 - DNA, 120 bp, Artificial Sequence
  ENSG00000117523_77 (sequence is synthesized)
tgtccccttcttcctggatgaatgagcagataaatattgatgtcagcatccttgaaccatatcaaagtgagcagtgtttggctactgcttctatttgaaatggtgctgtgttttggttgt

SEQ ID NO: 222553 - DNA, 120 bp, Artificial Sequence
  ENSG00000117523_78 (sequence is synthesized)
ggtctgaagctttgaagcgctacttagcatctcctttcttccatggagctctcacgattcaaacatgacagatttggtaaaatgctggttaggttgagtcttccttgcccccactcagtc

SEQ ID NO: 222554 - DNA, 120 bp, Artificial Sequence
  ENSG00000117523_79 (sequence is synthesized)
atctttgtatgaatcccatgatttgggggtttttttctttttttttttataccagtttttagctggtgtttatgaagaacagtgagtacctagaactgtgccactaattaaaggaaatcc

SEQ ID NO: 222555 - DNA, 120 bp, Artificial Sequence
  ENSG00000117523_80 (sequence is synthesized)
taagaaggtgcatttctttacagagctgtgtcatgccatcctttgggccctctgctggaaaagtagaatcaagtctcaaataatgcctttttaattgtatcctctagtattatagatata

SEQ ID NO: 222556 - DNA, 120 bp, Artificial Sequence
  ENSG00000117523_81 (sequence is synthesized)
ggacagtactgtatcatacctctgtgaatgtaaaatatcttgtacctgctttatgatacgtagtagtgaccgtgctttatcagagctgtttttaatgatgttattctagaatgttttctt

SEQ ID NO: 222557 - DNA, 120 bp, Artificial Sequence
  ENSG00000117523_82 (sequence is synthesized)
tccagatgatgattcagaagctaattttaaaaaacggtgccaggtaccacaacagtaacagaactttgcaattttctggggttttgttttttacctttttccccccttttttttaaatgg

SEQ ID NO: 222558 - DNA, 120 bp, Artificial Sequence
  ENSG00000117523_83 (sequence is synthesized)
agtgtgctggatgtctctataattttattcagatgactgcagaacctggaaaagctgttgctgctattgatgcataacatactgctattggtctttttatataaatatatatatatatat

SEQ ID NO: 222559 - DNA, 120 bp, Artificial Sequence
  ENSG00000117523_84 (sequence is synthesized)
acatatatatatataatttgaatttttggaaactttagctgtgctgtcaactttggaaaaagtatcccggtttactgtgttgagttggcattgtacagaaattaacagccatattggtct

SEQ ID NO: 222560 - DNA, 120 bp, Artificial Sequence
  ENSG00000117523_85 (sequence is synthesized)
agaaacgttaaacttaatttttttccatttgtacaggggtaacgcactgtattaaatatgtaaggtcttatctacatgggtttgattacagaaactaataaagtattctctaaataatga

SEQ ID NO: 222561 - DNA, 120 bp, Artificial Sequence
  ENSG00000117523_86 (sequence is synthesized)
cagattctctcccagcctaacctggtccctccattggtaagagccccacatactaacaccttcccagcgcctgttcagaggccaccaatggcactggccagtcagatgcctcctccgctg

SEQ ID NO: 222562 - DNA, 120 bp, Artificial Sequence
  ENSG00000117523_87 (sequence is synthesized)
accacaggcctcatgagccatgctcgtttgccacatgtagccaggggtccttgtggatcactatctggagtcagaggtaatcaggcccaggctgcgttgaaggctgaacaagacatgaag

SEQ ID NO: 222563 - DNA, 120 bp, Artificial Sequence
  ENSG00000117523_88 (sequence is synthesized)
cctaggtgttggtaatgccacaatataagtgcttccttttcattttattgtagaccacatattgataactagaagttttaagtgttacatgtatgtttttagatttgcaagcaggttccc

SEQ ID NO: 222564 - DNA, 120 bp, Artificial Sequence
  ENSG00000117523_89 (sequence is synthesized)
ttttttttaaaaaagagttgatgcccagtttcccccctgcccccagatttgtatacagcaagagttgagaatcactgcttagaatatatctgcttataataagtcggtaggtcttaacat

SEQ ID NO: 222565 - DNA, 120 bp, Artificial Sequence
  ENSG00000117523_90 (sequence is synthesized)
ttttgtaagtcttagtcaatctggaagacttgctatagagtgctgggccccttcctcagagtttgattcagtaggtctgggttgggacctgagaattttcatttttatcctatttctaga

SEQ ID NO: 222566 - DNA, 75 bp, Artificial Sequence
  ENSG00000117523_91 (sequence is synthesized)
gttgggacctgagaattttcatttttatcctatttctagagaaacatggtttctctagaatcacatgtctcagaa

SEQ ID NO: 222567 - DNA, 61 bp, Artificial Sequence
  ENSG00000117523_92 (sequence is synthesized)
gacctcaggtgatgaaacatggttctgcgaaccgcagtagcagtaggtgtaggaaggaaag

SEQ ID NO: 222568 - DNA, 120 bp, Artificial Sequence
  ENSG00000117523_93 (sequence is synthesized)
gttctgcgaaccgcagtagcagtaggtgtaggaaggaaagtttggatgttagatacaggttggtttggagatttgctcctaggaagtttaaggagttcttttctcatgatgttgctttct

SEQ ID NO: 222569 - DNA, 120 bp, Artificial Sequence
  ENSG00000117523_94 (sequence is synthesized)
ctctaatatacagaaagggtcttcaccaagagtgctgcttgagtaataatggtgttcagaaaagtccaagatttcaggattcttagttaaataacttaagcaagttgactgtttttcttg

SEQ ID NO: 222570 - DNA, 120 bp, Artificial Sequence
  ENSG00000117523_95 (sequence is synthesized)
atacatcagttcctttttttttcacctgatgaaaaagctctttgaattttaattttgtcaggtagtgaatatttactgtcctcttttgtcactgtagatgaatattctttctatatcttt

SEQ ID NO: 222571 - DNA, 120 bp, Artificial Sequence
  ENSG00000117523_96 (sequence is synthesized)
gtacatgttactggtaaatttgccaataggatagattttggtagtacattctcttttcacaacatcatcatcattagcggtcttggggtaaaattaattgtatacattcttctacatata

SEQ ID NO: 222572 - DNA, 120 bp, Artificial Sequence
  ENSG00000117523_97 (sequence is synthesized)
gtagcaaattgtattagtgtagtcctattggttgtaggtcagtcttttttcaggttgtcggttgtctcaaggaaagatggtttattgtaaacgtatacgtgaaaagcgaaatggttatct

SEQ ID NO: 222573 - DNA, 120 bp, Artificial Sequence
  ENSG00000117523_98 (sequence is synthesized)
acactgttatgtgggaggaggcagcatagtgtaatggattgaacccgacaccctagtttcaaattcaatctgatttagtctttatgtgtaaaaatcaagacagtaactacattgtaaagt

SEQ ID NO: 222574 - DNA, 120 bp, Artificial Sequence
  ENSG00000117523_99 (sequence is synthesized)
tgtttgactgaaatgagataatagaggtgagaatgcctgataaattttatggaactatacaaacgttgggtggcattttacatgcatataaaatgacatctctgctgattctgtaattga

SEQ ID NO: 222575 - DNA, 120 bp, Artificial Sequence
  ENSG00000117523_100 (sequence is synthesized)
caaatataaaactaacggatgaaacgaaatttataaaagtaaagtggatataggctttactttgatgctttttgcttggtatacctattctatactatctttggctcctgtgtttcagtt

SEQ ID NO: 222576 - DNA, 120 bp, Artificial Sequence
  ENSG00000117523_101 (sequence is synthesized)
ctcaatgttttcagctattgatcgtttctatggtagaattagccatcttctaccctactgctacaataacccctcaaaaacaaaaacaaaaacaaccgttaggttgatatgtatctacaa

SEQ ID NO: 222577 - DNA, 120 bp, Artificial Sequence
  ENSG00000117523_102 (sequence is synthesized)
cttaattaaattgaagggaaatagcatgagacataatttttcttttttgcctatctattaatagactaagttagggtgcatcaccaagatgagggtacattagctctaaagatgaggatt

SEQ ID NO: 222578 - DNA, 120 bp, Artificial Sequence
  ENSG00000117523_103 (sequence is synthesized)
catatgtaagggaactttatatatgctttgaaaaaaatggatactattttttgaatatttagtcctcagtgatgaaataggttatttttatataccttgtgtttgtgagatgttttacct

SEQ ID NO: 222579 - DNA, 120 bp, Artificial Sequence
  ENSG00000117523_104 (sequence is synthesized)
tttacgaaatgaagagaacatagaacgttgtttctgttctaaactgttaaagttaatagagctttgttgggcacatactgcctgatgatgatacagggatgtaatatgtaggggaatgaa

SEQ ID NO: 222580 - DNA, 120 bp, Artificial Sequence
  ENSG00000117523_105 (sequence is synthesized)
gatgttgtcctgtcatttggattccatgtgcataggttgatgtgtcagtcatttcaagcatattaaattggataatatatctttttaaaatagacagtctcagtgggttcactgtgtttt

SEQ ID NO: 222581 - DNA, 120 bp, Artificial Sequence
  ENSG00000117523_106 (sequence is synthesized)
aactattcacgacagcatggaattataacccttattctctatgatagagttaagcagttataaccatatataactgatatgtttcacaagtgcatgatagcttattgtgatcaattttgt

SEQ ID NO: 222582 - DNA, 120 bp, Artificial Sequence
  ENSG00000117523_107 (sequence is synthesized)
tgtgtattggttattggaatttgacagttaaaaagttctatgaaattatcattgatatgggaagttttttcagaatttctgtgaacatttgaatttactgagtttttcatccttattttt

SEQ ID NO: 222583 - DNA, 120 bp, Artificial Sequence
  ENSG00000117523_108 (sequence is synthesized)
ataagtgatacacctgctgctatgagaagctaggatgtacccaagttaatacaatgctatttacatttgcgtttttatgcatgcacacatttttcagaggatatgtgataaacatcttat

SEQ ID NO: 222584 - DNA, 120 bp, Artificial Sequence
  ENSG00000117523_109 (sequence is synthesized)
aattgaaaatttatactttcatagagccctttaaaaatatttttgtttttctctgttgtcagcagaaaaaaggtagaactgtgtggctctaaaggggaaactcagtcaatgagattgata

SEQ ID NO: 222585 - DNA, 120 bp, Artificial Sequence
  ENSG00000117523_110 (sequence is synthesized)
ggcacagacctatatattagtgggaatttagtatctttttaattatagactagagaaagtcttatgtttcgtgtgtgggggtgtgtgtgtgtgtgtgttagatactgtgacctagtgaat

SEQ ID NO: 222586 - DNA, 120 bp, Artificial Sequence
  ENSG00000117523_111 (sequence is synthesized)
atagtgaaaactgaaaatcatgcatggcatattaacagtattctttatgaacatacagtcaatacatttattctctaacattctaagttttgagtttgaaatagattctctgaaaaaata

SEQ ID NO: 222587 - DNA, 120 bp, Artificial Sequence
  ENSG00000117523_112 (sequence is synthesized)
tcagtattatcaatgttttctgtagtgtgttgaattgcattgttaaattttttaaggaatctgttaaatgctgttaaatggcttgatttctacactgaaatgtgttgcaggtgtgtagct

SEQ ID NO: 222588 - DNA, 120 bp, Artificial Sequence
  ENSG00000117523_113 (sequence is synthesized)
tagttttaaaattattattttaaaatacatgaatgaaaatcattcagggattgcattaattcctattgtttttctatattgtttgaggaataaaatgggtaataaaatagatgttctaag

SEQ ID NO: 222589 - DNA, 120 bp, Artificial Sequence
  ENSG00000117525_0 (sequence is synthesized)
aagactgcgagctccccgcaccccctcgcactccctctggccggcccagggcgccttcagcccaacctccccagccccacgggcgccacggaacccgctcgatctcgccgccaactggta

SEQ ID NO: 222590 - DNA, 120 bp, Artificial Sequence
  ENSG00000117525_1 (sequence is synthesized)
gacatggagacccctgcctggccccgggtcccgcgccccgagaccgccgtcgctcggacgctcctgctcggctgggtcttcgcccaggtggccggcgcttcaggcactacaaatactgtg

SEQ ID NO: 222591 - DNA, 120 bp, Artificial Sequence
  ENSG00000117525_2 (sequence is synthesized)
gcagcatataatttaacttggaaatcaactaatttcaagacaattttggagtgggaacccaaacccgtcaatcaagtctacactgttcaaataagcactaagtcaggagattggaaaagc

SEQ ID NO: 222592 - DNA, 120 bp, Artificial Sequence
  ENSG00000117525_3 (sequence is synthesized)
aaatgcttttacacaacagacacagagtgtgacctcaccgacgagattgtgaaggatgtgaagcagacgtacttggcacgggtcttctcctacccggcagggaatgtggagagcaccggt

SEQ ID NO: 222593 - DNA, 120 bp, Artificial Sequence
  ENSG00000117525_4 (sequence is synthesized)
tctgctggggagcctctgtatgagaactccccagagttcacaccttacctggagacaaacctcggacagccaacaattcagagttttgaacaggtgggaacaaaagtgaatgtgaccgta

SEQ ID NO: 222594 - DNA, 120 bp, Artificial Sequence
  ENSG00000117525_5 (sequence is synthesized)
gaagatgaacggactttagtcagaaggaacaacactttcctaagcctccgggatgtttttggcaaggacttaatttatacactttattattggaaatcttcaagttcaggaaagaaaaca

SEQ ID NO: 222595 - DNA, 120 bp, Artificial Sequence
  ENSG00000117525_6 (sequence is synthesized)
gccaaaacaaacactaatgagtttttgattgatgtggataaaggagaaaactactgtttcagtgttcaagcagtgattccctcccgaacagttaaccggaagagtacagacagcccggta

SEQ ID NO: 222596 - DNA, 120 bp, Artificial Sequence
  ENSG00000117525_7 (sequence is synthesized)
gagtgtatgggccaggagaaaggggaattcagagaaatattctacatcattggagctgtggtatttgtggtcatcatccttgtcatcatcctggctatatctctacacaagtgtagaaag

SEQ ID NO: 222597 - DNA, 120 bp, Artificial Sequence
  ENSG00000117525_8 (sequence is synthesized)
gcaggagtggggcagagctggaaggagaactccccactgaatgtttcataaaggaagcactgttggagctactgcaaatgctatattgcactgtgaccgagaacttttaagaggatagaa

SEQ ID NO: 222598 - DNA, 120 bp, Artificial Sequence
  ENSG00000117525_9 (sequence is synthesized)
agtatttcggagcatgaagaccctggagttcaaaaaactcttgatatgacctgttattaccattagcattctggttttgacatcagcattagtcactttgaaatgtaacgaatggtacta

SEQ ID NO: 222599 - DNA, 120 bp, Artificial Sequence
  ENSG00000117525_10 (sequence is synthesized)
caaccaattccaagttttaatttttaacaccatggcaccttttgcacataacatgctttagattatatattccgcactcaaggagtaaccaggtcgtccaagcaaaaacaaatgggaaaa

SEQ ID NO: 222600 - DNA, 71 bp, Artificial Sequence
  ENSG00000117525_11 (sequence is synthesized)
aggagtaaccaggtcgtccaagcaaaaacaaatgggaaaatgtcttaaaaaatcctgggtggacttttgaa

SEQ ID NO: 222601 - DNA, 65 bp, Artificial Sequence
  ENSG00000117525_12 (sequence is synthesized)
gtgcagtagcacgatctcggctcactgcaccctccgtctctcggtaccacgccaagctaattttt

SEQ ID NO: 222602 - DNA, 89 bp, Artificial Sequence
  ENSG00000117525_13 (sequence is synthesized)
tattatgggcgtgaaccaccatgcccagccgaaaagcttttgaggggctgacttcaatccatgtaggaaagtaaaatggaaggaaattg

SEQ ID NO: 222603 - DNA, 120 bp, Artificial Sequence
  ENSG00000117525_14 (sequence is synthesized)
gacttcaatccatgtaggaaagtaaaatggaaggaaattgggtgcatttctaggacttttctaacatatgtctataatatagtgtttaggttcttttttttttcaggaatacatttggaa

SEQ ID NO: 222604 - DNA, 120 bp, Artificial Sequence
  ENSG00000117525_15 (sequence is synthesized)
attcaaaacaattggcaaactttgtattaatgtgttaagtgcaggagacattggtattctgggcaccttcctaatatgctttacaatctgcactttaactgacttaagtggcattaaaca

SEQ ID NO: 222605 - DNA, 120 bp, Artificial Sequence
  ENSG00000117525_16 (sequence is synthesized)
tttgagagctaactatatttttataagactactatacaaactacagagtttatgatttaaggtacttaaagcttctatggttgacattgtatatataattttttaaaaaggttttctata

SEQ ID NO: 222606 - DNA, 120 bp, Artificial Sequence
  ENSG00000117525_17 (sequence is synthesized)
tggggattttctatttatgtaggtaatattgttctatttgtatatattgagataatttatttaatatactttaaataaaggtgactgggaattgttactgttgtacttattctatcttcc

SEQ ID NO: 222607 - DNA, 120 bp, Artificial Sequence
  ENSG00000117525_18 (sequence is synthesized)
atttattatttatgtacaatttggtgtttgtattagctctactacagtaaatgactgtaaaattgtcagtggcttacaacaacgtatctttttcgcttataatacattttggtgactgta

SEQ ID NO: 222608 - DNA, 120 bp, Artificial Sequence
  ENSG00000117525_19 (sequence is synthesized)
ccaaaagggctggattgctgcttagattggagcaggtacaacgttgtgcatgccccgtatttctacgaggtgttcgggacggcgtagagactgggacctgctgcgtactggcaaagcaga

SEQ ID NO: 222609 - DNA, 120 bp, Artificial Sequence
  ENSG00000117525_20 (sequence is synthesized)
ccttcataagaaataatcctgatccaatacagccgacggtgtgacaggccacacgtccccgtgggtctctgtggaagtttcagtgtagcgacatttcagataaaagtggaaaaagtgaag

SEQ ID NO: 222610 - DNA, 120 bp, Artificial Sequence
  ENSG00000117525_21 (sequence is synthesized)
gctgagtcctggactggcacactgatggctctgggctcttcccggtcaagttataacaaggctttgcccatgaataatttcaaacgaaaatgtcaagatccttgccggtgtcctgggatt

SEQ ID NO: 222611 - DNA, 120 bp, Artificial Sequence
  ENSG00000117528_0 (sequence is synthesized)
cccagtctcccccgcgctgcgtgcagtaaggtagccgccgccgccgccgccgccgcgtcccctcgccggctcgctggtaccggcagtgccatggcggccttcagcaagtacttgacggcg

SEQ ID NO: 222612 - DNA, 120 bp, Artificial Sequence
  ENSG00000117528_1 (sequence is synthesized)
cgaaactcctcgctggctggtgccgcgttcctgctgctctgcctgctccacaagcggcgccgcgccctcggcctgcacggtaagaaaagtggaaaaccaccattacagaacaatgagaaa

SEQ ID NO: 222613 - DNA, 120 bp, Artificial Sequence
  ENSG00000117528_2 (sequence is synthesized)
gaggggaaaaaggagcgagctgtggtggacaaggtgtttttctcaaggctcatacagattctgaaaatcatggtccctagaacattttgtaaagagacaggttacttggtacttattgct

SEQ ID NO: 222614 - DNA, 120 bp, Artificial Sequence
  ENSG00000117528_3 (sequence is synthesized)
gttatgctggtgtctcgaacatattgtgatgtttggatgattcaaaatgggacactaattgaaagtggtatcattggtcgtagcaggaaagatttcaagagatacttactcaacttcatc

SEQ ID NO: 222615 - DNA, 120 bp, Artificial Sequence
  ENSG00000117528_4 (sequence is synthesized)
gctgccatgcctcttatctctctggttaataacttcttgaagtatgggttaaatgagcttaaactgtgcttccgagtaaggctcactaaatacctctatgaggagtatcttcaagctttc

SEQ ID NO: 222616 - DNA, 120 bp, Artificial Sequence
  ENSG00000117528_5 (sequence is synthesized)
acatattataaaatggggaatctggacaacagaatagctaatccagaccagctgcttacacaagatgtagaaaaattttgtaacagtgtagtcgatctgtattcaaatcttagtaagcca

SEQ ID NO: 222617 - DNA, 120 bp, Artificial Sequence
  ENSG00000117528_6 (sequence is synthesized)
tttttagacatagttttgtatatctttaagttaacgagtgcaattggagctcagggcccagcgagcatgatggcctacttggttgtttctgggctattcctaactcgacttcgaagaccc

SEQ ID NO: 222618 - DNA, 120 bp, Artificial Sequence
  ENSG00000117528_7 (sequence is synthesized)
attggtaagatgacaataactgagcaaaagtatgaaggagaatatagatatgttaattctcggctcatcacaaacagtgaagaaattgccttttacaatgggaataaaagagaaaagcag

SEQ ID NO: 222619 - DNA, 120 bp, Artificial Sequence
  ENSG00000117528_8 (sequence is synthesized)
acagtccactcagtcttccgaaaactggtggaacacctacataatttcattttgtttcggttttcaatgggcttcattgatagtattattgccaaataccttgccactgttgttggttac

SEQ ID NO: 222620 - DNA, 120 bp, Artificial Sequence
  ENSG00000117528_9 (sequence is synthesized)
ctagttgtcagtcgccctttcttagatttgtctcatcctcgacatctcaagagtacacattcggaacttctagaggattactaccaaagtggaagaatgcttttgcgaatgtctcaagct

SEQ ID NO: 222621 - DNA, 120 bp, Artificial Sequence
  ENSG00000117528_10 (sequence is synthesized)
ctgggtcgaatagttttggctgggcgtgaaatgactagattggccggttttactgctcggattacagaattaatgcaagtactgaaggatttaaatcatggcaaatatgagcgcacaatg

SEQ ID NO: 222622 - DNA, 120 bp, Artificial Sequence
  ENSG00000117528_11 (sequence is synthesized)
gtctcacaacaggaaaagggtattgaaggagtacaagtcattcccttgatacctggtgctggagaaatcattattgcagataacattataaagtttgatcatgttcctttagcaacgcca

SEQ ID NO: 222623 - DNA, 120 bp, Artificial Sequence
  ENSG00000117528_12 (sequence is synthesized)
aatggagatgttttgatccgagaccttaattttgaagttcgatctggggctaatgttctaatttgtggtccaaatggctgcggaaagagttcacttttccgtgttcttggtgaattatgg

SEQ ID NO: 222624 - DNA, 120 bp, Artificial Sequence
  ENSG00000117528_13 (sequence is synthesized)
cctctttttggaggacgtctaactaaacctgaaagaggaaaattattttatgttcctcagagaccttacatgacccttggaacacttcgagatcaagtgatatatccagatggacgagaa

SEQ ID NO: 222625 - DNA, 120 bp, Artificial Sequence
  ENSG00000117528_14 (sequence is synthesized)
gatcagaaaaggaagggaatttctgacctagtactgaaggaatacttagacaatgtccagttgggtcatatccttgaacgtgaaggaggctgggacagtgttcaggattggatggacgta

SEQ ID NO: 222626 - DNA, 120 bp, Artificial Sequence
  ENSG00000117528_15 (sequence is synthesized)
gtggtggagaaaagcaaagaatggcgatggcaagattattttatcataaaccccagtttgccattttggatgaatgcacaagtgcagttagtgtcgacgtggaaggctacatttatagtc

SEQ ID NO: 222627 - DNA, 120 bp, Artificial Sequence
  ENSG00000117528_16 (sequence is synthesized)
attgtcgaaaggttggcatcactctcttcactgtgtctcataggaaatctctttggaaacatcatgagtactacctgcatatggatggcagaggcaactatgaattcaaacagataacag

SEQ ID NO: 222628 - DNA, 120 bp, Artificial Sequence
  ENSG00000117528_17 (sequence is synthesized)
aagatacagttgagtttggctcttagagaaatctggagaactatacctgcttcagtgaaataattacagaatatacttagaaaggcaaagtacattgtaaaataaagttgagcttagttt

SEQ ID NO: 222629 - DNA, 120 bp, Artificial Sequence
  ENSG00000117528_18 (sequence is synthesized)
gttttttttaaaaaaaaaaacaaagcaacaaattaactagatacagaataatggagaacaagttgttaaaacatttaatattatataggatattgctaattgtgtatatgttggtttaat

SEQ ID NO: 222630 - DNA, 120 bp, Artificial Sequence
  ENSG00000117528_19 (sequence is synthesized)
aatatgtactaagaatgtccttattcttgtggttaaaaacctgcctaaattaaattgggcttcaatcactgtaacctgattcatcctgggatgtaaaccattcgaagtcagctaattgga

SEQ ID NO: 222631 - DNA, 120 bp, Artificial Sequence
  ENSG00000117528_20 (sequence is synthesized)
cttttatggctctatcttttccttcagtgaagaaccctatttaaaactgggtcatcatttgtcctgttctagcaagatagtcttcagtttcattttcctgtgccctgtggtagttggaaa

SEQ ID NO: 222632 - DNA, 120 bp, Artificial Sequence
  ENSG00000117528_21 (sequence is synthesized)
caaatcataatgtattatttaaatgtttaacatcattgcataacagcgtttattatacagtggcagatttctttagctgccacagtaatactcattccttgtgtgtgtcttggagtgcat

SEQ ID NO: 222633 - DNA, 120 bp, Artificial Sequence
  ENSG00000117528_22 (sequence is synthesized)
ttgactccaggaaaagccattttggttttccttaactaaatgataaatgtacccctctcagtctgcagtattgagttgtttaaagtatatgtgcagtcttgcttacaaggaggggttacc

SEQ ID NO: 222634 - DNA, 120 bp, Artificial Sequence
  ENSG00000117528_23 (sequence is synthesized)
atgtatcacacctaatcttcccaatgtttgggatattaaaacacaaagtccttaacatgccaggctcaaggtcttataagagttctagatttttaagagaattagacaaatttgtgtgtg

SEQ ID NO: 222635 - DNA, 120 bp, Artificial Sequence
  ENSG00000117528_24 (sequence is synthesized)
ttagaagcccattcattagaagtgtggtggttatttggtattaaactccaaatgagccataggaaggcactacatgaaataatgcactgagtatgcaatgctatcactgtctttgactgt

SEQ ID NO: 222636 - DNA, 120 bp, Artificial Sequence
  ENSG00000117528_25 (sequence is synthesized)
gattttatgtttaaaaagtatgttctaaaattattatatatacatgggtgaattatgtttccgaggcactgttttatctctgtgaatcttgaataacttttttatatttgggttatgatg

SEQ ID NO: 222637 - DNA, 120 bp, Artificial Sequence
  ENSG00000117528_26 (sequence is synthesized)
tcaaacgatcctaagcgaagatgatttcagttcatcaaatcatcattaatgactttatgtattatttgcacagggagaattgaaactgagtataatcaataagctagatacgaaatcagt

SEQ ID NO: 222638 - DNA, 120 bp, Artificial Sequence
  ENSG00000117528_27 (sequence is synthesized)
ttctcaaactgagcttcagaaaggggcattttgtactcttgtttttgcataactggttttgtttttttgcagaattaactataacaatcactggctaccgaagtaaactgatgtactgaa

SEQ ID NO: 222639 - DNA, 120 bp, Artificial Sequence
  ENSG00000117528_28 (sequence is synthesized)
ttccataatacataacattcaatttttaccacttctgtttagcgaacttgtatacttattttctgttcagattaaaaaaaaaaaaaaaaaactcagatatcctatacaacctttgcttgt

SEQ ID NO: 222640 - DNA, 120 bp, Artificial Sequence
  ENSG00000117528_29 (sequence is synthesized)
tctttttattctggtatctaaatactgagaagttcatttataattcagccttgacttgaaaacatagatagtttaatcttgacttgaaaaacacaaaaataaattcagaaaatgctttta

SEQ ID NO: 222641 - DNA, 120 bp, Artificial Sequence
  ENSG00000117528_30 (sequence is synthesized)
cgcgggcgaaccggcgcccagccagcactcaggcagcggcctccagttgggggtgggagggggatgcggtgtgtcccccacccccttccctacatcacccccttctgtgtcaactttctg

SEQ ID NO: 222642 - DNA, 120 bp, Artificial Sequence
  ENSG00000117528_31 (sequence is synthesized)
tttagacatagttttgtatatctttaagttaacgagtgcaattggagctcaggtacttggaaaaattttgtggcattaaaaaccagacaaatgtattggccaggcgtggtggctcatgcc

SEQ ID NO: 222643 - DNA, 86 bp, Artificial Sequence
  ENSG00000117528_32 (sequence is synthesized)
tccaggagttcgagacaagcctggacaaaaagcgagacccgcttctttaaaaaataataataaaacagaagttcttaaaccatgaa

SEQ ID NO: 222644 - DNA, 120 bp, Artificial Sequence
  ENSG00000117528_33 (sequence is synthesized)
tggctccagtaataagaacactcactgcttcacgtgagaacccttaagacagggcagttccaggtatggcattatcagggctctggctctctggtgttctcttggctctgccctgctttg

SEQ ID NO: 222645 - DNA, 120 bp, Artificial Sequence
  ENSG00000117528_34 (sequence is synthesized)
tatgctgccccattcctcgggctaattcttcttgtgaccacaagatggcgatagcagttacagatttcactagctcctctcccctgcagaaagctccagaaacaaaaaggggccatctcg

SEQ ID NO: 222646 - DNA, 120 bp, Artificial Sequence
  ENSG00000117528_35 (sequence is synthesized)
cctggtgtgtctttatgagagcaaagaaacctttcccaagagtcccacaactgactttccctcatatcttattggctggaatggttacttgaccatgcctaaagcaatcacagcaaagtg

SEQ ID NO: 222647 - DNA, 120 bp, Artificial Sequence
  ENSG00000117528_36 (sequence is synthesized)
attggcttagaccagttgggaccctaaatggggttgaggcattcctaaagcattagggtacatggaaaataatagataactttacaaaagttgggattattttaggaagaagaacaatga

SEQ ID NO: 222648 - DNA, 120 bp, Artificial Sequence
  ENSG00000117528_37 (sequence is synthesized)
agagaatagatgttggatgggcagccatcaatattccaggatgttttatcctttcagatttttcattaaggctaaaatgactcagttcaggaggagaatcctcacctcatcttcttccat

SEQ ID NO: 222649 - DNA, 120 bp, Artificial Sequence
  ENSG00000117528_38 (sequence is synthesized)
aggcttaggtgtggagaggagatagaaggaagtttttttaaaaagtaattagaggtatagaattgtaggcttcttatactcttgagtctctgtcattgtgtcaaggaaaccatgaaacgc

SEQ ID NO: 222650 - DNA, 120 bp, Artificial Sequence
  ENSG00000117528_39 (sequence is synthesized)
gtgacaaatgtgtcatatcttatgggaagttaattttacttgaagtggttgaggtaggtggtaccttgtttttatgaaaaacgcaggtccatttcaaaatagaaatataaaacataaatt

SEQ ID NO: 222651 - DNA, 120 bp, Artificial Sequence
  ENSG00000117528_40 (sequence is synthesized)
gtttaggggaaaaaagagactttaaagaaatatttcaaccttgccttctagacttctctataaatatttttctctgccataagaggtactttgctgggaaagcttacatcattcctgtgt

SEQ ID NO: 222652 - DNA, 120 bp, Artificial Sequence
  ENSG00000117528_41 (sequence is synthesized)
aatagaaagactataaatgttagggtcagataggagttatgatttcagctccctgacctgctggctctgcaacctttacaaatttacttaactacactgaacttctcttcatctataaaa

SEQ ID NO: 222653 - DNA, 120 bp, Artificial Sequence
  ENSG00000117528_42 (sequence is synthesized)
taccttttttttctagtcgtgatccctgtggcccttgtggacccatgcacatctgctcaggaaacgtggaattgttgtgaggatatgatggggttccagggtttcctcctgggagctggc

SEQ ID NO: 222654 - DNA, 120 bp, Artificial Sequence
  ENSG00000117528_43 (sequence is synthesized)
actttgaagccggtgggacttagcctgcttttctgtctttaaaaggctgtatgtcaagtcatcactatccatctttttctagctgttgctttttcatctctttcttgtttgggcctgtac

SEQ ID NO: 222655 - DNA, 120 bp, Artificial Sequence
  ENSG00000117528_44 (sequence is synthesized)
tttaacttgaagtctgcaatgttggtcccagccctgcctttctgtacatcacagcaacttctttctctaatttcgaatttctgagaattcgtgcagtatgtcttttgcagccaggatacc

SEQ ID NO: 222656 - DNA, 120 bp, Artificial Sequence
  ENSG00000117528_45 (sequence is synthesized)
tatgccataggttgcagtccagcatatgattcagtcaggagtgtattcctgtgctccgatcagctgagctaggaacagaatctcaggtatagactgtggcttgagatgcaccagataagc

SEQ ID NO: 222657 - DNA, 120 bp, Artificial Sequence
  ENSG00000117528_46 (sequence is synthesized)
tcttagtcacaaaatgtccatttaaatacaaacattcagccatcatatactgtatttcaattattttccaagcataggtaacattaaaattaattgctaaattattttctttaatagtga

SEQ ID NO: 222658 - DNA, 120 bp, Artificial Sequence
  ENSG00000117528_47 (sequence is synthesized)
tgagcaaaatgtaggagagctgagggataagctacagtggtaagaggaaaagcccatgagtagtaaaagtgtagaggctactgtgtactttttcagaaaaaaaacaaagggaaaaaatta

SEQ ID NO: 222659 - DNA, 120 bp, Artificial Sequence
  ENSG00000117528_48 (sequence is synthesized)
cccagtagggcaatttctttcagtcattgaggttaattataaaaattgtacatgtttgtatctaagtgaatttattattatatcccagaactttgtgtatctttctctcccaataataat

SEQ ID NO: 222660 - DNA, 120 bp, Artificial Sequence
  ENSG00000117528_49 (sequence is synthesized)
catgatgaggtgtgaattccttaagcttagagctcttttacagctacaaaactaatataaacttacacattaaatacattaaatacagacaaaacttaaatacagtttcaaatttacaac

SEQ ID NO: 222661 - DNA, 120 bp, Artificial Sequence
  ENSG00000117528_50 (sequence is synthesized)
attaaagagacctatgataccgtttagatgaaactaaaccagtggtttgggatttaattaaggaaagatagaatctgaggttcaaatttcattattttgcattttgctttttattttgac

SEQ ID NO: 222662 - DNA, 120 bp, Artificial Sequence
  ENSG00000117528_51 (sequence is synthesized)
ttatatacttcatatattttttatatcctcatgtaaagaatgtgtgcattaagtagatgtctaatccaattattgtagtatcataaacagagaaataatatcttaaatgagctctgaaaa

SEQ ID NO: 222663 - DNA, 120 bp, Artificial Sequence
  ENSG00000117528_52 (sequence is synthesized)
atcagaaaagtgtggtatggttgaaatatatgttttattaatactgataatatgcttattttattatgcaattcctaaccaatttaagaacctttttacagtgcagccaaacttattaca

SEQ ID NO: 222664 - DNA, 120 bp, Artificial Sequence
  ENSG00000117528_53 (sequence is synthesized)
cattagaagttttattttatatcactttggcaatcagaggtgtagatacaaaccgaggaacttgaatctcatggtaaaaatgatctagaatatacttataatgatcttttaaaaattatc

SEQ ID NO: 222665 - DNA, 120 bp, Artificial Sequence
  ENSG00000117528_54 (sequence is synthesized)
atcaaaatgaaaataaaattaagaaaccatggtggaaatttcccagatgccctaagcatgcatttgccagccttgagtgatccacttggaggaacagtgacccagagtggggtttctcag

SEQ ID NO: 222666 - DNA, 120 bp, Artificial Sequence
  ENSG00000117528_55 (sequence is synthesized)
tcctggcactattgaccttttcactgttaattcctagttgggcagggttgagggttgctgtgcactggaggatgtttagaaagcatccctggcctctgcccattagatggcagtagtgct

SEQ ID NO: 222667 - DNA, 120 bp, Artificial Sequence
  ENSG00000117528_56 (sequence is synthesized)
ttcagttgtgaaaataaaaatgcctccagtcattgccaaatgtccccctgagggacaaatatcactgacctccccaccttggttgagaaccactgatctagagcaactacagctattatc

SEQ ID NO: 222668 - DNA, 120 bp, Artificial Sequence
  ENSG00000117528_57 (sequence is synthesized)
tattaatgtttttttttttttgaaaatctgaagtacagatctataaatacgtattcacaatctgaaatccagaaagtgcttaaatttaaaacatttttcataattttgtagcaagctcac

SEQ ID NO: 222669 - DNA, 120 bp, Artificial Sequence
  ENSG00000117528_58 (sequence is synthesized)
tgggtaaaacttcgcctaagctaacaaaagatatttaaactctatatgtctcaatatcagtgtccatgtgtgttgctacagaaacatttatgtgtttaattataaaattctgcctcagaa

SEQ ID NO: 222670 - DNA, 120 bp, Artificial Sequence
  ENSG00000117528_59 (sequence is synthesized)
ctctctgggggtgttaaataatacattttcaaaatctgaattccaagacacattccaaaacagtagtttacggtaggggattatgaccctgtatttgaaaagcaagttgactgtcaacaa

SEQ ID NO: 222671 - DNA, 120 bp, Artificial Sequence
  ENSG00000117528_60 (sequence is synthesized)
tgctatactgatttaatttttcctgattttgacctttggctatttttatccttctcatattcctctcatatatttttcacaataaaataggagacatgataggagatatgttttttgccc

SEQ ID NO: 222672 - DNA, 120 bp, Artificial Sequence
  ENSG00000117528_61 (sequence is synthesized)
aaaagaaaataatacacttaatgccagtacctggtagtttttattatgtggttgatggccagtactttccattgctataaacattttgcatccagttgtaaattttttctcattgacatt

SEQ ID NO: 222673 - DNA, 120 bp, Artificial Sequence
  ENSG00000117533_0 (sequence is synthesized)
gatgagcggaggcgctgctgcggcgctgcggccgacgccgggtccgcaccaactgtctccccctcccagcttcttacctcggcttcctactccttcccccgcccgcccagcaccgccagc

SEQ ID NO: 222674 - DNA, 120 bp, Artificial Sequence
  ENSG00000117533_1 (sequence is synthesized)
ccgggagagctgccgggagttccccgggagcctcaggtggtgactatcctgttgagaagcaaaagatactttgcaagtaaaaaatatgcctcccaagtttaagcgccacctcaatgatga

SEQ ID NO: 222675 - DNA, 120 bp, Artificial Sequence
  ENSG00000117533_2 (sequence is synthesized)
tgatgtcacaggttctgtgaaaagtgaaaggagaaatcttttggaagatgattcagatgaagaagaggacttttttctaaggggaccatctggaccaagatttggacctagaaatgataa

SEQ ID NO: 222676 - DNA, 120 bp, Artificial Sequence
  ENSG00000117533_3 (sequence is synthesized)
aattaagcatgttcagaatcaagtggatgaagttattgatgtcatgcaagaaaatattacaaaggtaattgagagaggggagagactagatgaactacaggacaaatcagaaagcttatc

SEQ ID NO: 222677 - DNA, 120 bp, Artificial Sequence
  ENSG00000117533_4 (sequence is synthesized)
ggataatgcaacagcttttagcaacagatccaaacaacttcgaaggcaaatgtggtggcgtggatgcaaaataaaagccatcatggctttggttgctgctatccttttgctagtgattat

SEQ ID NO: 222678 - DNA, 120 bp, Artificial Sequence
  ENSG00000117533_5 (sequence is synthesized)
cattcttatagtcatgaaataccgtacttgatttgatgacagagatcttcattaaacaagatctgggacagtaataaaagattgctgcataatttaaatgaaacctatgtgtatataact

SEQ ID NO: 222679 - DNA, 120 bp, Artificial Sequence
  ENSG00000117533_6 (sequence is synthesized)
ttcaaaacttctttttcaagaaactaagaggcaagtatcacttcaaattggaacgttgagaatgtccaattatcttctccctttctaacaaaatgttcttttaataattatgtttaaggc

SEQ ID NO: 222680 - DNA, 120 bp, Artificial Sequence
  ENSG00000117533_7 (sequence is synthesized)
aaagagaactagcctctatttttccatatttcaaggatctaatttgaaactagatacttgccagttcattatttgtgtatataaacactgattataatatttcatattaatattttaatg

SEQ ID NO: 222681 - DNA, 120 bp, Artificial Sequence
  ENSG00000117533_8 (sequence is synthesized)
gcataaggacttgcattattgcattagggagcgggtcatgctgggggtcaggaagcctgtgtagagtaccaaattatatgctgaaagagatgcataaccattctgtcaatatttgcagaa

SEQ ID NO: 222682 - DNA, 120 bp, Artificial Sequence
  ENSG00000117533_9 (sequence is synthesized)
atatagttcctttcatattacagttgttttgcaagcaatttccacatttataggtgtaacaaaagctaaatgttgtaaatgttgttgccctcaggtataactaaaaacattccagtaaat

SEQ ID NO: 222683 - DNA, 120 bp, Artificial Sequence
  ENSG00000117533_10 (sequence is synthesized)
atatttttgactgtgtaagagaatgtgtagtaatttttttggcattggattatggaaatggaaatttttaaacagtgtgaaaaaacatggtatggcatcataaaactggagataataaag

SEQ ID NO: 222684 - DNA, 120 bp, Artificial Sequence
  ENSG00000117533_11 (sequence is synthesized)
ttattgaagagtgtcattggagtatttgaaaatgaccaatatatagctgccagtcatggtccagtctgttttctgttaaactccaataaagagagaccagtcagtcctaatgtgagtaaa

SEQ ID NO: 222685 - DNA, 120 bp, Artificial Sequence
  ENSG00000117533_12 (sequence is synthesized)
tgaaatttacaggtaacttacttactccttaattttattttagttaatagcctctaacttccaactatctcatttaccaaaagtacaaaaagtagcaaaaccatctattaatactttgaa

SEQ ID NO: 222686 - DNA, 120 bp, Artificial Sequence
  ENSG00000117533_13 (sequence is synthesized)
ttttatatctttgcatttcctgttcatccttgaggagatgtatgttgcacaatcaaattttgcatcagccaacagtaatgagtagtagaaagtcaggaacctatgtgtatatatatatat

SEQ ID NO: 222687 - DNA, 87 bp, Artificial Sequence
  ENSG00000117533_14 (sequence is synthesized)
tgataatcagtcagtcggtaaccaaatgctagagagtgaccattaacctaagcctgtttttataatgaaaaaatgtgttaactttaa

SEQ ID NO: 222688 - DNA, 120 bp, Artificial Sequence
  ENSG00000117533_15 (sequence is synthesized)
ctaagcctgtttttataatgaaaaaatgtgttaactttaaaatatgccaacctccttgtgtcttttaaacaagtcagagtgaaaatacattgtcccctaaggtgtggggagaggaagctt

SEQ ID NO: 222689 - DNA, 120 bp, Artificial Sequence
  ENSG00000117533_16 (sequence is synthesized)
tataataaaattagtgattctgcagaaacttgtgcactggatatcttgacaatatgaatataaaactccctaaattaaaaatagggttaatagaaattatcagtatttaaatagggaaaa

SEQ ID NO: 222690 - DNA, 120 bp, Artificial Sequence
  ENSG00000117533_17 (sequence is synthesized)
atgattttatgtttattttatttaggttttatttctttggtcatcttaatgcaaaatgaataaagcatagaatctgggtttggtgtttttttgtctgtttttaaaattctacaggattat

SEQ ID NO: 222691 - DNA, 120 bp, Artificial Sequence
  ENSG00000117533_18 (sequence is synthesized)
tactaggaggcaaaaaatgctgtttagaatggaaaaaatttgaagagagaaagcagactgagacactcaagacacctgcaagttatctaagaagatctaaatagaattactaaattttat

SEQ ID NO: 222692 - DNA, 120 bp, Artificial Sequence
  ENSG00000117533_19 (sequence is synthesized)
agtttgcttagagcatttagaaggagataaaggtcttacatactatagtgtatattgtctttggtctctatgctctttgtaaatgtcaattaatataaacagcatctgaacagctaataa

SEQ ID NO: 222693 - DNA, 120 bp, Artificial Sequence
  ENSG00000117533_20 (sequence is synthesized)
aattcaggaatggaaatattttaactgaatggacagaatcagtcctaacatttgtatgtatgtcctttatttgaattggaactaggctcataagtggttaattttccattagttgatgta

SEQ ID NO: 222694 - DNA, 120 bp, Artificial Sequence
  ENSG00000117533_21 (sequence is synthesized)
gaaatctggtttctccataatatctacaagtgaagatgaagattacttctcaaaaagtatccatatttccagtgttccttttaataaaatatgccacttttaaataaataattacaaaat

SEQ ID NO: 222695 - DNA, 120 bp, Artificial Sequence
  ENSG00000117533_22 (sequence is synthesized)
gtaaaattataaaatttttaaatttaaataataagtaacagtaaaattttttgacaatatatatgtcactgtctttgtaatttaaacatattgctgcctgggatatgggtaacagaatta

SEQ ID NO: 222696 - DNA, 120 bp, Artificial Sequence
  ENSG00000117533_23 (sequence is synthesized)
tcactcatggaactttgtagtagtgatggcttggtttgtaattcatcatttcatctttcttggtcttgattaatcctgaaatccttaaaatggctggcatggttatgactttattgtggt

SEQ ID NO: 222697 - DNA, 120 bp, Artificial Sequence
  ENSG00000117533_24 (sequence is synthesized)
aaccttggagatataagccctcttacgatcaaaaacagaagaaaaaaatatattgttcaaactgatgccaggcctacctttattccctcccttaattactttttttctcattcagctcag

SEQ ID NO: 222698 - DNA, 120 bp, Artificial Sequence
  ENSG00000117533_25 (sequence is synthesized)
atcatcctgcacttgaaaaatgaagttttaccaccatcaaaactatcattatttaacaacaagtgaagatcaacagaaaaattcaagtagctttgcaaatactagttgatactcagtgaa

SEQ ID NO: 222699 - DNA, 120 bp, Artificial Sequence
  ENSG00000117533_26 (sequence is synthesized)
atcacgtcactattttgatgcctgaatccatacctttgtgatttatgtttaattacagaagcctattgccttgcagcaattttgttgttataatactgattaattggttactccttctta

SEQ ID NO: 222700 - DNA, 120 bp, Artificial Sequence
  ENSG00000117533_27 (sequence is synthesized)
ttataactcagtaatacctgtggtcatttggttcctctatcctgacaaagttcactggaaattgccctcagattttataaactgggggatttcttaattagataaaagttcattactgaa

SEQ ID NO: 222701 - DNA, 120 bp, Artificial Sequence
  ENSG00000117533_28 (sequence is synthesized)
gatggaatattatataagatggaggaagggtaattaatagacatgagatatagaaatactttgttagccctgctatagattgcctattgtagtctttctgtgcatttcaatagtctgtat

SEQ ID NO: 222702 - DNA, 120 bp, Artificial Sequence
  ENSG00000117533_29 (sequence is synthesized)
taggaaattataacttcagcacttttgatagcaaaaattggcatctttcaattctgtatagtatgtgactatcctgtaaatgataatatgtgtacagactgagaaggcaggaatataaag

SEQ ID NO: 222703 - DNA, 120 bp, Artificial Sequence
  ENSG00000117533_30 (sequence is synthesized)
taattgaaatctctcattgccggtatactctaaaacatgcttgatgccttgtcagcatcattgcacacattgactctgtatttacatctgtatatacactatgattagaaaatatgcaag

SEQ ID NO: 222704 - DNA, 120 bp, Artificial Sequence
  ENSG00000117533_31 (sequence is synthesized)
aaattgtttttccatgttaagaacaaatgccattagaagatgtccccttaattgtattgtcagagtattactatgtcaaggatgactgttctgttaacctaattttgtgttttcacatgg

SEQ ID NO: 222705 - DNA, 120 bp, Artificial Sequence
  ENSG00000117533_32 (sequence is synthesized)
aaatgtgattggactccatttttctgtgagttgagagtaagagcataagtcagtttgaaagcatttacaagtttgttttagaatgtagtaagggctgaaaggtgctctacttcttaactt

SEQ ID NO: 222706 - DNA, 120 bp, Artificial Sequence
  ENSG00000117533_33 (sequence is synthesized)
gttttttccatgttgtagacaaatgaaatttgtctaaatgcttttgtctaaaaatgcatttgtctaaatgctttagattgatgtagggtttagatcctctttaatactttgagatagtct

SEQ ID NO: 222707 - DNA, 120 bp, Artificial Sequence
  ENSG00000117533_34 (sequence is synthesized)
tattctgattttttttttcttctggaaaccaagtagaattagggatgggaatacaaatgcatttattctggcttctgttttattccaagaagcttcttggaacaaatcagtaggaattga

SEQ ID NO: 222708 - DNA, 120 bp, Artificial Sequence
  ENSG00000117533_35 (sequence is synthesized)
aaagaaagcatgaccaacccaattacaggggataaatgtaagcttgttaaagtaagcaccacaccatgtttctgtctccccagcacccagcacagtgctgtgaaccttggcagatgctag

SEQ ID NO: 222709 - DNA, 120 bp, Artificial Sequence
  ENSG00000117533_36 (sequence is synthesized)
ataaatgtgtgttgaatgaatgtgcctatgaagccacaaagatgccacatgttagtatatcagtgagaggtgactccacagtgctctctggagaagcaatatgagtgactgaagagtggg

SEQ ID NO: 222710 - DNA, 120 bp, Artificial Sequence
  ENSG00000117533_37 (sequence is synthesized)
gccttttgcttttgcctggatataggggtgctcttctactgtaattgggtgtggaaaaactctggctttatggtattccattaggttcttttcatttaaagtagtcttaaaatcaaagta

SEQ ID NO: 222711 - DNA, 120 bp, Artificial Sequence
  ENSG00000117533_38 (sequence is synthesized)
tccaatattttaaagccacaaagtagattacataattagcagagattttagtcagtaaaatgttagaaatcaaactataagaaaattcaagtcctttattttgtgtcttgggtatatgtc

SEQ ID NO: 222712 - DNA, 120 bp, Artificial Sequence
  ENSG00000117533_39 (sequence is synthesized)
attattttaaattccacactcccttatttaatcactttggtaagtgcctttgatgttttgaaatgtatagtgggagatgagcaaatgtaaatgtcatgtgccctgttccctagcttctca

SEQ ID NO: 222713 - DNA, 120 bp, Artificial Sequence
  ENSG00000117533_40 (sequence is synthesized)
attcctcataaccatttttaccagtgttgcaaagtttagacctttgtgttaatatcagaagtgtatttgtagcccctccatagtgaacaatgaaataaactatttcatagaaaacaaaaa

SEQ ID NO: 222714 - DNA, 120 bp, Artificial Sequence
  ENSG00000117543_0 (sequence is synthesized)
cttttctctgcacggagccggcgcttttgcagttgcttctgcggaaaggtggtagttaagaatttgtaaaggccagagaactacctacgattctctcagcggtctctcttctcctcaagt

SEQ ID NO: 222715 - DNA, 120 bp, Artificial Sequence
  ENSG00000117543_1 (sequence is synthesized)
ttgaaatgctttatctcatcgggttgggcctgggagatgccaaggacatcacagtcaagggcctggaagttgttagacgctgcagtcgagtgtatctggaagcctacacctcagtcctaa

SEQ ID NO: 222716 - DNA, 120 bp, Artificial Sequence
  ENSG00000117543_2 (sequence is synthesized)
ctgtagggaaggaagccttggaagagttttatggaagaaaattggttgttgctgatagagaagaagtggaacaagaagcagataatattttaaaggatgctgatatcagtgatgttgcat

SEQ ID NO: 222717 - DNA, 120 bp, Artificial Sequence
  ENSG00000117543_3 (sequence is synthesized)
tccttgtggttggtgatccatttggggccacaacacacagtgatcttgttctaagagcaacaaagctgggaattccttatagagttattcacaatgcctccataatgaatgctgtaggct

SEQ ID NO: 222718 - DNA, 120 bp, Artificial Sequence
  ENSG00000117543_4 (sequence is synthesized)
gctgtggtttacagttatataagtttggagagacagtttctattgttttttggacagacacttggagaccagaaagcttctttgacaaagtgaagaagaacagacaaaatggcatgcaca

SEQ ID NO: 222719 - DNA, 120 bp, Artificial Sequence
  ENSG00000117543_5 (sequence is synthesized)
cattatgtttactagacatcaaagtaaaggagcagtctttggaaaatctaatcaagggaaggaagatctatgaacctccacggtatatgagtgtaaaccaagcagcccagcagcttctgg

SEQ ID NO: 222720 - DNA, 120 bp, Artificial Sequence
  ENSG00000117543_6 (sequence is synthesized)
agattgttcaaaatcaaagaatacgaggagaagaaccagcagttaccgaggagacactttgtgttggcttagccagggttggagccgacgaccagaaaattgcagcaggcactttaaggc

SEQ ID NO: 222721 - DNA, 120 bp, Artificial Sequence
  ENSG00000117543_7 (sequence is synthesized)
tctgttttccataccagaaaatagctcagaatctcaaagcatcaatggactttgaacatagatatttaccattgtctgatgtaaatttcagccatatatggattgatatggtttggatgt

SEQ ID NO: 222722 - DNA, 120 bp, Artificial Sequence
  ENSG00000117543_8 (sequence is synthesized)
atccccacccaagtctcatcttgaattttaatcctcataattcccaggtgttgtggtaggtaattgaatcatgggggcagtttccctcatgctattctcatgatagtgagctttcatgag

SEQ ID NO: 222723 - DNA, 120 bp, Artificial Sequence
  ENSG00000117543_9 (sequence is synthesized)
atctgatggttttataagtgcctggcatttcccctactggctctcattctcactcttgccgccctgtgaagaggtgccttccaccgtgattgttaagtttcctgaggccttcccagccat

SEQ ID NO: 222724 - DNA, 80 bp, Artificial Sequence
  ENSG00000117543_10 (sequence is synthesized)
ttaatacctggatgcatgcatgtttgtgtaacaaacaggtcttttggcttatctagtaagtataaaacaagtgaccaaaa

SEQ ID NO: 222725 - DNA, 120 bp, Artificial Sequence
  ENSG00000117543_11 (sequence is synthesized)
cttttggcttatctagtaagtataaaacaagtgaccaaaaagaagttgactcaacaatgcttggtttcttgtggcagtgagttttttccctatgatatcatcagttgttgctgctatttt

SEQ ID NO: 222726 - DNA, 120 bp, Artificial Sequence
  ENSG00000117543_12 (sequence is synthesized)
ggcaaattttcaggatgtacacataaagcagaccaggctggaaagcttgtggatagacatccactgacagaatcatttaagagcagtttttatttatgaaaccaatttatacaaggtggt

SEQ ID NO: 222727 - DNA, 120 bp, Artificial Sequence
  ENSG00000117543_13 (sequence is synthesized)
tgttaacagaatataacttagaggtaactggaatttgaatcacttgaatctgttttaaagggtaaaaaatgttatgagtgccaagaaaagcaaataaaagattagtaaatgttcacaaaa

SEQ ID NO: 222728 - DNA, 120 bp, Artificial Sequence
  ENSG00000117543_14 (sequence is synthesized)
ccggcgcttttgcagttgcttctgcggaaaggtggtagttaagaatttgtaaaggccagagaactacctacgattctctcagcgggtaattggctgctcctagtctctcttctcctcaag

SEQ ID NO: 222729 - DNA, 120 bp, Artificial Sequence
  ENSG00000117543_15 (sequence is synthesized)
agggaaggaagccttgggatagagaagttaacaaacttgcctaagttcatgcagatagtgaatgatagagccaggagatgaaccaaagcagtcctgagttgaagtctgccactcttttta

SEQ ID NO: 222730 - DNA, 120 bp, Artificial Sequence
  ENSG00000117543_16 (sequence is synthesized)
tttattattattattatttattatgtttttttattttgagacggagtcttgctatgttgcctaggctggaatgcagtggtgcgatctcggccccctgcaacctctgcctctcgggttcaa

SEQ ID NO: 222731 - DNA, 120 bp, Artificial Sequence
  ENSG00000117543_17 (sequence is synthesized)
cttttgcagttgcttctgcggaaaggtggtagttaagaatttgtaaaggccagagaactacctacgattctctcagcgggtaattggctgctcctaggtttgtgtaacaagaggcaaaac

SEQ ID NO: 222732 - DNA, 120 bp, Artificial Sequence
  ENSG00000117543_18 (sequence is synthesized)
tctcgagcgaagagctactgcacttacccaggcttaggaagcgggtgtttaagccatgggttagagggctcgtgagcacgcccgatcctttccctgaggctatgaaacggtggctccacg

SEQ ID NO: 222733 - DNA, 120 bp, Artificial Sequence
  ENSG00000117543_19 (sequence is synthesized)
gactcctctcggccgactgacctttcgccgccctgccccagcagccggcgggtttcttcagtggagccgggctctggtctccgcagcccagtagcccgctagcccggccccctcccgcta

SEQ ID NO: 222734 - DNA, 120 bp, Artificial Sequence
  ENSG00000117543_20 (sequence is synthesized)
accctttgaaacgcatcccttgttcattaatgatctgaggagcagaagaatggaaattttacaccaaccaagtgacttggaaaatgaaagggtgctttgtcctattttacaagtctaatt

SEQ ID NO: 222735 - DNA, 120 bp, Artificial Sequence
  ENSG00000117543_21 (sequence is synthesized)
ttgtggctttctccagtaaataggaaagctattttatactcctgggggatagttatcaaaaccccttatttcatgaggtagtcaagaaaccctttctgagttgagtgctaatgaggagct

SEQ ID NO: 222736 - DNA, 120 bp, Artificial Sequence
  ENSG00000117560_0 (sequence is synthesized)
agcagtcagcaacagggtcccgtccttgacacctcagcctctacaggactgagaagaagtaaaaccgtttgctggggctggcctgactcaccagctgccatgcagcagcccttcaattac

SEQ ID NO: 222737 - DNA, 120 bp, Artificial Sequence
  ENSG00000117560_1 (sequence is synthesized)
ccatatccccagatctactgggtggacagcagtgccagctctccctgggcccctccaggcacagttcttccctgtccaacctctgtgcccagaaggcctggtcaaaggaggccaccacca

SEQ ID NO: 222738 - DNA, 120 bp, Artificial Sequence
  ENSG00000117560_2 (sequence is synthesized)
ccaccgccaccgccaccactaccacctccgccgccgccgccaccactgcctccactaccgctgccacccctgaagaagagagggaaccacagcacaggcctgtgtctccttgtgatgttt

SEQ ID NO: 222739 - DNA, 120 bp, Artificial Sequence
  ENSG00000117560_3 (sequence is synthesized)
ttcatggttctggttgccttggtaggattgggcctggggatgtttcagctcttccacctacagaaggagctggcagaactccgagagtctaccagccagatgcacacagcatcatctttg

SEQ ID NO: 222740 - DNA, 120 bp, Artificial Sequence
  ENSG00000117560_4 (sequence is synthesized)
gagaagcaaataggccaccccagtccaccccctgaaaaaaaggagctgaggaaagtggcccatttaacaggcaagtccaactcaaggtccatgcctctggaatgggaagacacctatgga

SEQ ID NO: 222741 - DNA, 120 bp, Artificial Sequence
  ENSG00000117560_5 (sequence is synthesized)
attgtcctgctttctggagtgaagtataagaagggtggccttgtgatcaatgaaactgggctgtactttgtatattccaaagtatacttccggggtcaatcttgcaacaacctgcccctg

SEQ ID NO: 222742 - DNA, 120 bp, Artificial Sequence
  ENSG00000117560_6 (sequence is synthesized)
agccacaaggtctacatgaggaactctaagtatccccaggatctggtgatgatggaggggaagatgatgagctactgcactactgggcagatgtgggcccgcagcagctacctgggggca

SEQ ID NO: 222743 - DNA, 120 bp, Artificial Sequence
  ENSG00000117560_7 (sequence is synthesized)
caatcttaccagtgctgatcatttatatgtcaacgtatctgagctctctctggtcaattttgaggaatctcagacgtttttcggcttatataagctctaagagaagcactttgggattct

SEQ ID NO: 222744 - DNA, 120 bp, Artificial Sequence
  ENSG00000117560_8 (sequence is synthesized)
ttccattatgattctttgttacaggcaccgagaatgttgtattcagtgagggtcttcttacatgcatttgaggtcaagtaagaagacatgaaccaagtggaccttgagaccacagggttc

SEQ ID NO: 222745 - DNA, 120 bp, Artificial Sequence
  ENSG00000117560_9 (sequence is synthesized)
aaaatgtctgtagctcctcaactcacctaatgtttatgagccagacaaatggaggaatatgacggaagaacatagaactctgggctgccatgtgaagagggagaagcatgaaaaagcagc

SEQ ID NO: 222746 - DNA, 120 bp, Artificial Sequence
  ENSG00000117560_10 (sequence is synthesized)
taccaggtgttctacactcatcttagtgcctgagagtatttaggcagattgaaaaggacaccttttaactcacctctcaaggtgggccttgctacctcaagggggactgtctttcagata

SEQ ID NO: 222747 - DNA, 120 bp, Artificial Sequence
  ENSG00000117560_11 (sequence is synthesized)
catggttgtgacctgaggatttaagggatggaaaaggaagactagaggcttgcataataagctaaagaggctgaaagaggccaatgccccactggcagcatcttcacttctaaatgcata

SEQ ID NO: 222748 - DNA, 120 bp, Artificial Sequence
  ENSG00000117560_12 (sequence is synthesized)
tcctgagccatcggtgaaactaacagataagcaagagagatgttttggggactcatttcattcctaacacagcatgtgtatttccagtgcaattgtaggggtgtgtgtgtgtgtgtgtgt

SEQ ID NO: 222749 - DNA, 120 bp, Artificial Sequence
  ENSG00000117560_13 (sequence is synthesized)
gtgtgtgtgtgtatgactaaagagagaatgtagatattgtgaagtacatattaggaaaatatgggttgcatttggtcaagattttgaatgcttcctgacaatcaactctaatagtgctta

SEQ ID NO: 222750 - DNA, 120 bp, Artificial Sequence
  ENSG00000117560_14 (sequence is synthesized)
aaaatcattgattgtcagctactaatgatgttttcctataatataataaatatttatgtagatgtgcatttttgtgaaatgaaaacatgtaataaaaagtatatgttaggatacaaataa

SEQ ID NO: 222751 - DNA, 120 bp, Artificial Sequence
  ENSG00000117569_0 (sequence is synthesized)
gcgtggctcggttcttgtgagcgaagctttgtccggttcggcaatggacggaatcgtcactgaggttgcagttggcgtgaagagaggatctgacgaactactctcaggcagtgttctcag

SEQ ID NO: 222752 - DNA, 120 bp, Artificial Sequence
  ENSG00000117569_1 (sequence is synthesized)
tagtccgaactctaatatgagcagcatggtagttacagccaatggtaatgatagtaaaaaatttaaaggagaagataaaatggatggtgctccttctcgtgtacttcatattcgaaaatt

SEQ ID NO: 222753 - DNA, 120 bp, Artificial Sequence
  ENSG00000117569_2 (sequence is synthesized)
acctggggaagtaacagaaactgaagttattgctttaggcttaccttttggtaaggtgaccaacatccttatgctgaaaggaaaaaatcaggcatttttggaactagcaaccgaggaagc

SEQ ID NO: 222754 - DNA, 120 bp, Artificial Sequence
  ENSG00000117569_3 (sequence is synthesized)
agctattactatggttaattactattctgctgtgacacctcatcttcgtaaccaaccaatatatatccagtactcgaatcacaaagaactaaagacagataatacattaaaccaacgtgc

SEQ ID NO: 222755 - DNA, 120 bp, Artificial Sequence
  ENSG00000117569_4 (sequence is synthesized)
tcaggcagttcttcaagctgtgacagctgtccagacagcaaatactcctcttagtggcaccacagttagcgagagtgcagtgactccagcccagagtccagtacttagaataattattga

SEQ ID NO: 222756 - DNA, 120 bp, Artificial Sequence
  ENSG00000117569_5 (sequence is synthesized)
caacatgtactaccctgtaacacttgatgttcttcaccaaatattttctaagtttggtgctgtattgaagataatcacatttacaaaaaataaccagtttcaagctttgctccagtatgg

SEQ ID NO: 222757 - DNA, 120 bp, Artificial Sequence
  ENSG00000117569_6 (sequence is synthesized)
tgatccagtaaatgctcaacaagcaaaactagccctagatggtcagaatatttataatgcctgctgtaccctaaggattgatttttccaaacttgtgaatttgaatgtaaaatacaacaa

SEQ ID NO: 222758 - DNA, 120 bp, Artificial Sequence
  ENSG00000117569_7 (sequence is synthesized)
tgataaaagtagggattatactcgacctgatcttccatctggggatggacaacctgcattggacccagctattgctgcagcatttgccaaggagacatccctcttagctgttccaggagc

SEQ ID NO: 222759 - DNA, 120 bp, Artificial Sequence
  ENSG00000117569_8 (sequence is synthesized)
tctgagtcctttggccattccaaatgctgctgcagcagctgctgcagctgctgctggccgagtgggtatgcctggagtctcagctggtggcaatacagtcctgttggttagcaatttaaa

SEQ ID NO: 222760 - DNA, 120 bp, Artificial Sequence
  ENSG00000117569_9 (sequence is synthesized)
tgaagagatggttacgccccaaagtctgtttaccctcttcggtgtttatggagatgtgcagcgtgtgaagattttatacaataagaaagacagcgctctaatacagatggctgatggaaa

SEQ ID NO: 222761 - DNA, 120 bp, Artificial Sequence
  ENSG00000117569_10 (sequence is synthesized)
ccaatcacaacttgccatgaatcatcttaatggacagaaaatgtatggaaaaattattcgtgttactctgtctaaacatcagactgtacagctacctcgagagggacttgatgatcaagg

SEQ ID NO: 222762 - DNA, 120 bp, Artificial Sequence
  ENSG00000117569_11 (sequence is synthesized)
gctaacaaaagattttggtaattccccattgcatcgttttaagaaacctggatccaaaaattttcaaaacatttttcctccttctgccacccttcacctatctaatatccctccatcagt

SEQ ID NO: 222763 - DNA, 120 bp, Artificial Sequence
  ENSG00000117569_12 (sequence is synthesized)
cgctaacactgggggcactgtgaaagcatttaagttttttcaagatcacaaaatggctcttcttcagatggcaacagtggaagaagctattcaggccttgattgatcttcataattataa

SEQ ID NO: 222764 - DNA, 120 bp, Artificial Sequence
  ENSG00000117569_13 (sequence is synthesized)
ccttggagaaaaccatcatctgagagtgtctttctccaagtcaacaatttaaaaatgggaagatgaagattgggggtgaatcacattgttcaatgtcatcacctatttgactgttcagaa

SEQ ID NO: 222765 - DNA, 120 bp, Artificial Sequence
  ENSG00000117569_14 (sequence is synthesized)
aagtggggaccagagtttgattttttttgtttttgtttttttggggtttcttttttttttccatgctgttatcattccttggttataaaatgaaatggcatatgtaaaggcagagttgtt

SEQ ID NO: 222766 - DNA, 120 bp, Artificial Sequence
  ENSG00000117569_15 (sequence is synthesized)
ataaaatgaaatggcatatgtaaaggcagagttgttaactgctatatttcatctgttctatagggaagccattttgtctgtttaaaatttcagtttaattttgctttttttttttttttt

SEQ ID NO: 222767 - DNA, 120 bp, Artificial Sequence
  ENSG00000117569_16 (sequence is synthesized)
aaaggaaaactagtgttgctattgtgcatttactagaaaaaaggaattggttgtttagggcacactgttatatgggaattaaaatatgtttaggcaggggtgtgtaaaaaggttaagttt

SEQ ID NO: 222768 - DNA, 120 bp, Artificial Sequence
  ENSG00000117569_17 (sequence is synthesized)
ttgtttctcctgcttggaacttattttgaattactggcttgtcacctttttttctatttaatcaaataagatacatgatattgaaagaataaagcagcatttttagtttttactacctta

SEQ ID NO: 222769 - DNA, 120 bp, Artificial Sequence
  ENSG00000117569_18 (sequence is synthesized)
ggctttattgctttgaaaacaacattggccttttgtatctcacaattctggtctagattcagttatgaatgtaggcattagttaaaattaacaagatgcagagtattaatttcttaagac

SEQ ID NO: 222770 - DNA, 120 bp, Artificial Sequence
  ENSG00000117569_19 (sequence is synthesized)
aacaaagtgatttctgtaagtttgagccctatgtggaaagcattgtggaatcttaaccttttcgtacacactcttgtgggacgtatcatataaatgtcagcactaagtaatgtcttgttt

SEQ ID NO: 222771 - DNA, 120 bp, Artificial Sequence
  ENSG00000117569_20 (sequence is synthesized)
gtggctgaatatttttcgtagatgtttttgaagttgacatgacttacgtgcatttaaatatatattgccatccttagtttgtaattaagatttggaatatggttgtggatttctgagcat

SEQ ID NO: 222772 - DNA, 120 bp, Artificial Sequence
  ENSG00000117569_21 (sequence is synthesized)
gtgcagactggtctagctagttcaggaactggtgcatgtatttttcaaagataaagaaagtgtactgcgaaaatatgcaggaagattaattttgtggcagttttctaaaactgacaacca

SEQ ID NO: 222773 - DNA, 120 bp, Artificial Sequence
  ENSG00000117569_22 (sequence is synthesized)
ggtgggaccaaagtttatgtgcctttagtcttaatttaccttgcattgtaatattcagttttaataaatcttcaaaatattttgtatttaggaatagatctgactttaataaaaacatgg

SEQ ID NO: 222774 - DNA, 120 bp, Artificial Sequence
  ENSG00000117569_23 (sequence is synthesized)
ctcagaatctacaggtcaaattaatttgaacagttcttgtcaatccgaattgttgattctgtttaaatgaccaatactttttgaaattgatgtacttagtttcaagattcatagattctg

SEQ ID NO: 222775 - DNA, 120 bp, Artificial Sequence
  ENSG00000117569_24 (sequence is synthesized)
ttatctatgtagacagaatggtcatgtatattttctattagttgagtttttacatctttagaaatgtaaaattcagtatagtttgaaagcggcacaattaaaaattaattttctaacaaa

SEQ ID NO: 222776 - DNA, 120 bp, Artificial Sequence
  ENSG00000117569_25 (sequence is synthesized)
ccctgtagcatgctcaataaacacttctgtagctctatattcaccttttctgtctttctctgctgccttttctctctcctcttctttgttttcactccactgtgcttctgaattcatgtt

SEQ ID NO: 222777 - DNA, 120 bp, Artificial Sequence
  ENSG00000117569_26 (sequence is synthesized)
tattctctgccagggtgggaaaggagtaataatattacaattctatggctttataccataaataaatctagatgctgtgaaaatataccagctggttttttttaatttaaaagatggtaa

SEQ ID NO: 222778 - DNA, 120 bp, Artificial Sequence
  ENSG00000117569_27 (sequence is synthesized)
ctgcttttcaggaggacacatattaaacatttcccaccctgttataatctactgctttaaagacataacttttattgtagcttgttaattctatctcttttgttcttgttgttttttttt

SEQ ID NO: 222779 - DNA, 120 bp, Artificial Sequence
  ENSG00000117569_28 (sequence is synthesized)
tttttccagtagatttatgcactaatagatcttttggatttgccatgctctcttgctgcagtttcatctttcatcttttgtgtctgctaaagatttcttactaatcttagactaccttgt

SEQ ID NO: 222780 - DNA, 120 bp, Artificial Sequence
  ENSG00000117569_29 (sequence is synthesized)
gagttaacaaaaagaacttgatattactgggaagaaagagcagcatatctgcatatcagcatatctgcttttgccttgggtgggaagaatgatatacattcaagtatttaaaaacttaga

SEQ ID NO: 222781 - DNA, 120 bp, Artificial Sequence
  ENSG00000117569_30 (sequence is synthesized)
gtaatttgcatttaacaactgaggatgttactactgtaacttgttaagcagttacaattagggtgctatttatattcaaaatatttcggtcagtttttctaaacagatatattggtatca

SEQ ID NO: 222782 - DNA, 120 bp, Artificial Sequence
  ENSG00000117569_31 (sequence is synthesized)
aataactttggagttacacatgtttcttaggtttgttctgttataaaatatcccacacttatgcaaaacttacacataggataataaaaagtaaatgaaggaacataaaatatgttttac

SEQ ID NO: 222783 - DNA, 120 bp, Artificial Sequence
  ENSG00000117569_32 (sequence is synthesized)
tatacttaatgtagtaattcagttacctccaagaaagaagaatataataagtaaaataattttgtttacactagtgtcactgttgtcatctgaagaagaaccattagagtcaacagtctg

SEQ ID NO: 222784 - DNA, 120 bp, Artificial Sequence
  ENSG00000117569_33 (sequence is synthesized)
ggatgatttggaagctaggtgatctgtgtttttttcttaaaataacatcgtagcacagaggaactctaccagcatcagataagtctaaagtctaaaaaaccaataccagggttagtgaat

SEQ ID NO: 222785 - DNA, 120 bp, Artificial Sequence
  ENSG00000117569_34 (sequence is synthesized)
agtaattgaacaaagcttctcaaggtgaagtttttctcagtaattagtggtggctataatatttgaaagtaggttctgtcaccttttcaggtgctcattgtgggtgggattgccttggga

SEQ ID NO: 222786 - DNA, 120 bp, Artificial Sequence
  ENSG00000117569_35 (sequence is synthesized)
aggagaaactaagtcctgagctgtgtgtgtggacttagtttgtgccagttgctaagctggtgggagttcccagtctccctagtgggagataaccagaaaccagctcttcctgcctaagga

SEQ ID NO: 222787 - DNA, 120 bp, Artificial Sequence
  ENSG00000117569_36 (sequence is synthesized)
ctacagcagattctatactgtcttacagtatgccctaatacggccttccttccaaagcaccaagtcactaaagggggattttgacattctagaatatttttaattcagtacatcaaatta

SEQ ID NO: 222788 - DNA, 120 bp, Artificial Sequence
  ENSG00000117569_37 (sequence is synthesized)
acccaggccttggcatatagtgaattgcttattaaaagttaggtaaaaataaaaacagctttgtcgtatattagtactctatgactcttagagtgaacaagctaacaagtattcttagga

SEQ ID NO: 222789 - DNA, 120 bp, Artificial Sequence
  ENSG00000117569_38 (sequence is synthesized)
cttagctgctttgttaatagaggtcttaacttgaatatttagaaataatcagaaaaattattttttggtattgaagatgtattttggaaatgggttttaaagtacctacttaaggaagag

SEQ ID NO: 222790 - DNA, 120 bp, Artificial Sequence
  ENSG00000117569_39 (sequence is synthesized)
atatctacagtttatatttaacgttagcatttgaaagcaatgaagaaaatttttccttaaccaggaagtgtaatgaatcattatattagagattaaattaacactttggaagcattttag

SEQ ID NO: 222791 - DNA, 120 bp, Artificial Sequence
  ENSG00000117569_40 (sequence is synthesized)
ctcctagagttaaggttagtatagtgaaattatggtgattagcttaattcattcatgtacatctatttgtatcaccatataattactagggaaaggacaaatcacttttcaaagcctcaa

SEQ ID NO: 222792 - DNA, 120 bp, Artificial Sequence
  ENSG00000117569_41 (sequence is synthesized)
tgttatttgtaaaatggaggcaataagttctgctctgctcccctcacaggattattacagaggctcaaataggataagtgaaggaatgctatgcaattagttaactaatgccagttccca

SEQ ID NO: 222793 - DNA, 120 bp, Artificial Sequence
  ENSG00000117569_42 (sequence is synthesized)
gactgccagatttgcccacagtaaacttcattatccacaatacatgttatcctaatatgtctttttgctacaaagaaatactaatgttttaaaattatttactagtttcataaagcagaa

SEQ ID NO: 222794 - DNA, 120 bp, Artificial Sequence
  ENSG00000117569_43 (sequence is synthesized)
agatgtaaaatgcagttatagagagcatcccaagccagatgaaaagaaaccatggatttagctttatattttctgtttgaacttgatagcccaatcataaaatgcacatatttaattata

SEQ ID NO: 222795 - DNA, 120 bp, Artificial Sequence
  ENSG00000117569_44 (sequence is synthesized)
gactgcacttaagatttcatatgtataaaaaagttgctgtgaaacaggtaattttaacactcaggaatttcaaggctaaggaagaaagacatactctcatgagcagctctgaacttcaaa

SEQ ID NO: 222796 - DNA, 120 bp, Artificial Sequence
  ENSG00000117569_45 (sequence is synthesized)
caggattttctggctgccttaatatattaaaatggagcctaaatctgaaaacgtttttttcattcagaagaaagtacagaattcagtgaaattgagtatactaggaaatctgatggcaag

SEQ ID NO: 222797 - DNA, 120 bp, Artificial Sequence
  ENSG00000117569_46 (sequence is synthesized)
aattcagcagaaagtcttaattttaaaccgtaatattcattgattatgcaaaaccttagttttatagttattctttgttattttgaatagcttccctttaaattttctagtttcagattt

SEQ ID NO: 222798 - DNA, 120 bp, Artificial Sequence
  ENSG00000117569_47 (sequence is synthesized)
tgcaaataaaagtgtacatgttaaagttatagagtattagattattcacattaagaactgttcaaatacgcggaaaaataaaaccgtaatgaacacctatgcacttcactcaactatatc

SEQ ID NO: 222799 - DNA, 120 bp, Artificial Sequence
  ENSG00000117569_48 (sequence is synthesized)
actacctaacatattccatattttaaacgtaattatatattagttgaaagaaaacgttacagaatgaactgaaatcccatatgaacctctttctgatcttagttcaaaccttattctttc

SEQ ID NO: 222800 - DNA, 120 bp, Artificial Sequence
  ENSG00000117569_49 (sequence is synthesized)
ttaccttcagtttagtattttattattcagtggttgcttttcaagaggaatttgtcctatattctgtaggctaaatttcttgttttgcctagttataaaaatggcaaataatatgatatt

SEQ ID NO: 222801 - DNA, 120 bp, Artificial Sequence
  ENSG00000117569_50 (sequence is synthesized)
gggtgtttaaatagtacaatattgttcaaaacacactttataatttttaacagactgtttggacattgataattcccctatcaaatctcatgacatttaaccaatttttaacaaggattt

SEQ ID NO: 222802 - DNA, 120 bp, Artificial Sequence
  ENSG00000117569_51 (sequence is synthesized)
taaattgtgtttaagaaataagtcatttgggcctcaggtttctcttaaggatgtaaacaaggagctatatcattggtattttagacgctgaattatgtgtaaggtccttaaatacaaaca

SEQ ID NO: 222803 - DNA, 120 bp, Artificial Sequence
  ENSG00000117569_52 (sequence is synthesized)
taccctttgtagcttcacagagccacccgttttgcacttctctcgcttttcttcctccctctttggctcccatttcaatggacagaaagactatgtggcatctctattttcattcacttg

SEQ ID NO: 222804 - DNA, 120 bp, Artificial Sequence
  ENSG00000117569_53 (sequence is synthesized)
gtttattgtcttggtatgttgtataggtttttgaatcagaaaattttaacatttttagatatttcaaacatacaaaaaatagaagaatatttaacaaacccttgtcagcttcagttagca

SEQ ID NO: 222805 - DNA, 120 bp, Artificial Sequence
  ENSG00000117569_54 (sequence is synthesized)
acttagatcttcctcgtttcctccacccaattctcatctcctttattaatgcagatcccagatatattttatcaagaaattttgtagcatatatttgtgttgttttattcgtggtcatag

SEQ ID NO: 222806 - DNA, 120 bp, Artificial Sequence
  ENSG00000117569_55 (sequence is synthesized)
ttgctttctctaatatctagactagcctagctggtcaatactacttttcttcaaatcctagaacctccctattaaaaatatagtcaccagaccagtggcaaattagtatcacctaggagt

SEQ ID NO: 222807 - DNA, 120 bp, Artificial Sequence
  ENSG00000117569_56 (sequence is synthesized)
ttattagaaactcagtctatgagcctactgaatctacattttgacaagattggcaggtgatgcatttggacataagttggagaagcactcaatgcattttttcagttctataaaaatcag

SEQ ID NO: 222808 - DNA, 120 bp, Artificial Sequence
  ENSG00000117569_57 (sequence is synthesized)
cttcaaagttttttcctgagtgtggaaattatttcattagtaattttaagttatgcagatatagttaataccaagaaataattgaactgaaaaggaacccggatatctagttttaaccag

SEQ ID NO: 222809 - DNA, 120 bp, Artificial Sequence
  ENSG00000117569_58 (sequence is synthesized)
ctgttttaaagataaacagttctagagatcaaatgaatagtttagcaacatatttattgtaacttacctgtagttagaatccaagtccctggctttccaatccagtcttcaatgtataat

SEQ ID NO: 222810 - DNA, 120 bp, Artificial Sequence
  ENSG00000117569_59 (sequence is synthesized)
actgatcaaaagaaatacaggcctgctattattcataaatttaaactattatgtacaagttgatagcttataatagaaatcagtatgattagtgttaaaagtcaaatttagtctgacagg

SEQ ID NO: 222811 - DNA, 120 bp, Artificial Sequence
  ENSG00000117569_60 (sequence is synthesized)
gaaggaatgtccatgtgaactgattttttttaatagaatgcaaattaatactcaattcctgatttgtttattacattttgtggtttaatgaaatgatactcaggtcattttcataaatag

SEQ ID NO: 222812 - DNA, 120 bp, Artificial Sequence
  ENSG00000117569_61 (sequence is synthesized)
cttttctattaatgcttcctcagtcacattctctattcctattgcatagcacagtctaacagttgaaatgcctaagccttactgaatgatgactgatattctctgtgagagttagagctg

SEQ ID NO: 222813 - DNA, 120 bp, Artificial Sequence
  ENSG00000117569_62 (sequence is synthesized)
tactataaatatacattacctgtgcaaagtatgccttcaggggctattccccataaccttagcaaaattttaaaatattcttatggctagcaatcttatctattgtcatgtcttactatt

SEQ ID NO: 222814 - DNA, 120 bp, Artificial Sequence
  ENSG00000117569_63 (sequence is synthesized)
tcctgcttaccacccccatttctctctcaaccttgttgctgcattagctgtccatcacttaacactgtttatttctctgtttttcttccatcattctcttctttgcaactaaatgattta

SEQ ID NO: 222815 - DNA, 120 bp, Artificial Sequence
  ENSG00000117569_64 (sequence is synthesized)
gactttttataaccataatcaaccagttagattctttttatttgtggttattgagttgataaatgatagtgcattttatgtaatattcaggtgttatgctatttttatctggttcacttt

SEQ ID NO: 222816 - DNA, 120 bp, Artificial Sequence
  ENSG00000117569_65 (sequence is synthesized)
aaaacctccctccccccactccctttttttgtgggttttttttttattattattattttccagttttgtgttgttttgctttttaacttctgagattgcagtggttccagatggttgaaa

SEQ ID NO: 222817 - DNA, 120 bp, Artificial Sequence
  ENSG00000117569_66 (sequence is synthesized)
tcactagtagtgatttacatgaagcattcatgtatttattactggtatattcaactatggtggagggaaattggtcgaagaattacggttaaagagctcctttaaaaaggagatttgtag

SEQ ID NO: 222818 - DNA, 120 bp, Artificial Sequence
  ENSG00000117569_67 (sequence is synthesized)
aattctaaaatgtgattctgattcatatagtcatgattcttagaaattagctacaggaagagatagaaacattgctatagttgtctttgccctaagtttggagttttatagtgtaatata

SEQ ID NO: 222819 - DNA, 120 bp, Artificial Sequence
  ENSG00000117569_68 (sequence is synthesized)
tatataatagctctaattataaatacacttttactctggaaaaagcatagacattgacataagagacatttaaaaaccattattttctcatctgtaaaatggagagaattacttcatatg

SEQ ID NO: 222820 - DNA, 120 bp, Artificial Sequence
  ENSG00000117569_69 (sequence is synthesized)
ttcacttataaggattatgtgaaatactgttccattccattagtagtttttcttttcctctaattgggggtgggggcagtttttggcattctatttatggaaggtgtttttttccctaag

SEQ ID NO: 222821 - DNA, 120 bp, Artificial Sequence
  ENSG00000117569_70 (sequence is synthesized)
atcattttgatgtctcagaagacatttgctatgtacgttggacatttgccatgtacattgtagagaatacaaagataaacagaaccacagtacagctggttctattagacattgaaaatg

SEQ ID NO: 222822 - DNA, 120 bp, Artificial Sequence
  ENSG00000117569_71 (sequence is synthesized)
catattctagcatatttaatatattagggaacaatttaagcataatgtgaatttcatgtttactgaagatttcatcctgagaaacaaatgaaagcagaaaattacaaccaactgaaccag

SEQ ID NO: 222823 - DNA, 120 bp, Artificial Sequence
  ENSG00000117569_72 (sequence is synthesized)
ctgtgtaagaaatatatatatggtgtgcacacatgtacatacctcagacatctattagcattctcagttttccacaagttaaaagccacgctcatccatatctggtgctaataacttcct

SEQ ID NO: 222824 - DNA, 120 bp, Artificial Sequence
  ENSG00000117569_73 (sequence is synthesized)
atccaatttcagatagctgttttcaacacatctgacaccttctttttttcaagcaaacttcaggtctttttcaagataaagtcatttatagtagtgtctatatatttcttaaccatttaa

SEQ ID NO: 222825 - DNA, 120 bp, Artificial Sequence
  ENSG00000117569_74 (sequence is synthesized)
catgtaaactgtgctgccttttaagaaattaattctatcctttttagtgtcagagttgaagattttgagtgttgtgccctaaccttatcattttcctcataagtcctgtggtttttattg

SEQ ID NO: 222826 - DNA, 120 bp, Artificial Sequence
  ENSG00000117569_75 (sequence is synthesized)
tatgattttgcatagtgtggcaattcttggaaatgcttatgttgtgttatagtataactgacttactactttcaaatagcttctagtctgattcatgttatgacagtatacagtatagca

SEQ ID NO: 222827 - DNA, 120 bp, Artificial Sequence
  ENSG00000117569_76 (sequence is synthesized)
aaataaggacatcagggaacaggaggctgagcatatcaccatttaccaatggtagcttgagcaaggcacttcatttatcgaagtccattttctcatctgtacaatggaggtgatgatagt

SEQ ID NO: 222828 - DNA, 120 bp, Artificial Sequence
  ENSG00000117569_77 (sequence is synthesized)
acatgtcttttctgtcttgtgttatttgtagtttcaagtaagatatgaaatatgctgtagaaatacagggttgggaatatctagtggtacaaaaatcaacttttggcccaattttaaggt

SEQ ID NO: 222829 - DNA, 120 bp, Artificial Sequence
  ENSG00000117569_78 (sequence is synthesized)
gagataattatgagacatttttcgacctcaaagtctttgttcttttctctctacaccattgtgaataacacagtgtatatatgagattaatttattacctcgactttccatttttgtttt

SEQ ID NO: 222830 - DNA, 120 bp, Artificial Sequence
  ENSG00000117569_79 (sequence is synthesized)
gtaaagtagtttaattttttatatctatttataaagttaactgcaggagtgtacctgcagttaactttatacagttaagaagaggttggtttcagttttaaagattgtatgtcagtgtaa

SEQ ID NO: 222831 - DNA, 120 bp, Artificial Sequence
  ENSG00000117569_80 (sequence is synthesized)
aacatccattattatgctttcaagtaaaatagctcctaaaaatatggattactatcaactttcaaggaaaatagctcctaaaaatatggattactaccaactttcaaggaaaatagctcc

SEQ ID NO: 222832 - DNA, 120 bp, Artificial Sequence
  ENSG00000117569_81 (sequence is synthesized)
ccaactttcaaggaaaatagctcctagaaatatggattactagccacataaattgctaacatttgcttttattattattattattattattttagacacagtcttgctctgtcacccagg

SEQ ID NO: 222833 - DNA, 120 bp, Artificial Sequence
  ENSG00000117569_82 (sequence is synthesized)
atttaacctcttgagagtctttaattctttttttcaacaagtgttcattacctgctatgtgccagcttagatgctttggatgaaatacaggttggtgcgaaagtaattgcgatttttgcc

SEQ ID NO: 222834 - DNA, 120 bp, Artificial Sequence
  ENSG00000117569_83 (sequence is synthesized)
ccacaattacttttgcaccaacctaaataactaaaacacaatttcttcctatcatggggctttcagttcagtatgagataagtaaagaattatatgggttgataaattttctggaggaac

SEQ ID NO: 222835 - DNA, 120 bp, Artificial Sequence
  ENSG00000117569_84 (sequence is synthesized)
aattttctggaggaactattgggtgttattacagtgtgctcaatctttagcagttaggaaaggattcttgaaggtagttgtattacctgggttggaggtaagtgttggggacacaagtgt

SEQ ID NO: 222836 - DNA, 120 bp, Artificial Sequence
  ENSG00000117569_85 (sequence is synthesized)
tagaaacagaacagtttgtttaaaagttggggacaaaaaaggaccagaatcaagattacggcaccctggagaaagttaagcatggctcggtcataaattaggagacaaggaacaaataga

SEQ ID NO: 222837 - DNA, 120 bp, Artificial Sequence
  ENSG00000117569_86 (sequence is synthesized)
gaaatacgtttggatagaatagtcagattataggctgtgctaagttgtttgggctccactagggtttctaaatgcagttattggtaaactggacttaggagaagggacagggttgacatg

SEQ ID NO: 222838 - DNA, 120 bp, Artificial Sequence
  ENSG00000117569_87 (sequence is synthesized)
catgacaaatctagtgaatttatgttcattaaaatatcccttttgaattgatttagtttttgtatgtttcttttttataattccaaaaaatcatacaaataagttaaacttatccatcta

SEQ ID NO: 222839 - DNA, 120 bp, Artificial Sequence
  ENSG00000117569_88 (sequence is synthesized)
ctgcacacaaaacttgatgttagattcttttaaaattacaaaattaagacttccaaaagaatcttgttgaataagagtaaaagaaagacccttactcagtaaagctgcgtaatactttgg

SEQ ID NO: 222840 - DNA, 120 bp, Artificial Sequence
  ENSG00000117569_89 (sequence is synthesized)
cagtttgaacccatggccatgcctctctgtgtgataaggatttggcaaaaccatggaagaaacatgcatgtttttgaattgtctttccatggtaacttaaaacattttttcatgaaacat

SEQ ID NO: 222841 - DNA, 120 bp, Artificial Sequence
  ENSG00000117569_90 (sequence is synthesized)
tgaaacatggatatatatccttagaaaactgcaaaacataaagcttgtaagttataagacaagatttatctcttttttttttttttctgagagagagtcttgctctgttgcccaggccgg

SEQ ID NO: 222842 - DNA, 120 bp, Artificial Sequence
  ENSG00000117569_91 (sequence is synthesized)
ccaagatgaaatgtcaaggccattttagccactatgcttttaagactacttaaagctgtgctttcaggtctccccaggaatacttgttcactctatactattgctgctgctgttctggct

SEQ ID NO: 222843 - DNA, 120 bp, Artificial Sequence
  ENSG00000117569_92 (sequence is synthesized)
tgagaattttgagaatcactaagatacaattttaagttttgacatgtaaattatttggttgagtagaaagaattaatgtagataagcaaaaacccctttataaaaaatgcttacccttta

SEQ ID NO: 222844 - DNA, 120 bp, Artificial Sequence
  ENSG00000117569_93 (sequence is synthesized)
aaaaatgttgaatcctcacagtatgattaaatactacttgtaaaagtgtctgttaaccataatgtattttttagataatttgagtagaattatacgtgcaatatattcttgagtttgtga

SEQ ID NO: 222845 - DNA, 120 bp, Artificial Sequence
  ENSG00000117569_94 (sequence is synthesized)
ccaacaaagaaacagattaatgattgaaaattcaccatacattactacctatgtctctccacctgctatctacttccaattttttatatatataaaagtcattaaagtcatttgtaattg

SEQ ID NO: 222846 - DNA, 120 bp, Artificial Sequence
  ENSG00000117569_95 (sequence is synthesized)
aaaatggcctagaacatattatgaatctcataaacattaataggaaggaaatgtttacctgttcagatgttccttataggcattttcttgttatttttaaggtattttcatgcagaatgt

SEQ ID NO: 222847 - DNA, 120 bp, Artificial Sequence
  ENSG00000117569_96 (sequence is synthesized)
ttctaagtattaaatactatgtcattttgaattcctttaatcccctggtcaaatgttctttttcttgttgcaagttaaaatttttgtgtagaaacttatcaggtaggatttattattagc

SEQ ID NO: 222848 - DNA, 120 bp, Artificial Sequence
  ENSG00000117569_97 (sequence is synthesized)
ataaactgtttatacaactctcctgcttagaatttaaggtaagaagttcagtgcctttggttatttgattttttttataggtcttaatttcttacggaaaatttttttttgaagatgtgt

SEQ ID NO: 222849 - DNA, 120 bp, Artificial Sequence
  ENSG00000117569_98 (sequence is synthesized)
taatggttttcctggaaaagaaatcttaaggatgaagaatatgtgaatgtattgatgttttaaaaatgtaatatagaagatattgtttaaaattaatgtattcaaaaatagcattagaat

SEQ ID NO: 222850 - DNA, 120 bp, Artificial Sequence
  ENSG00000117569_99 (sequence is synthesized)
gttttccgacctacattataagactgctgtaatgatctaaaactttagctgttttaatatagttttaaaactaatgatatctttctctgtcagtaaaatacaaactttttcttaataaaa

SEQ ID NO: 222851 - DNA, 120 bp, Artificial Sequence
  ENSG00000117569_100 (sequence is synthesized)
ggtagcttttaagttcgagtttttgttgttgagttttattactaaaattatactttcactaatttttattttttgtttaagattgctgatatgctttattcacttttacaggccctagat

SEQ ID NO: 222852 - DNA, 120 bp, Artificial Sequence
  ENSG00000117569_101 (sequence is synthesized)
ctcgcctcccgctgccgggcgccggcgcgctcggctctttccgccgccgccgctgccgcgcggtggcccgtgcgcctcggcaccttcggcaatttccgtcgggccccagccgccattttc

SEQ ID NO: 222853 - DNA, 120 bp, Artificial Sequence
  ENSG00000117586_0 (sequence is synthesized)
caatcgccttttatctctggccctgggacctttgcctattttctgattgataggctttgttttgtctttacctccttctttctggggaaaacttcagttttatcgcacgttccccttttc

SEQ ID NO: 222854 - DNA, 120 bp, Artificial Sequence
  ENSG00000117586_1 (sequence is synthesized)
catatcttcatcttccctctacccagattgtgaagatggaaagggtccaacccctggaagagaatgtgggaaatgcagccaggccaagattcgagaggaacaagctattgctggtggcct

SEQ ID NO: 222855 - DNA, 120 bp, Artificial Sequence
  ENSG00000117586_2 (sequence is synthesized)
ctgtaattcagggactggggctgctcctgtgcttcacctacatctgcctgcacttctctgctcttcaggtatcacatcggtatcctcgaattcaaagtatcaaagtacaatttaccgaat

SEQ ID NO: 222856 - DNA, 120 bp, Artificial Sequence
  ENSG00000117586_3 (sequence is synthesized)
ataagaaggagaaaggtttcatcctcacttcccaaaaggaggatgaaatcatgaaggtgcagaacaactcagtcatcatcaactgtgatgggttttatctcatctccctgaagggctact

SEQ ID NO: 222857 - DNA, 120 bp, Artificial Sequence
  ENSG00000117586_4 (sequence is synthesized)
tctcccaggaagtcaacattagccttcattaccagaaggatgaggagcccctcttccaactgaagaaggtcaggtctgtcaactccttgatggtggcctctctgacttacaaagacaaag

SEQ ID NO: 222858 - DNA, 120 bp, Artificial Sequence
  ENSG00000117586_5 (sequence is synthesized)
tctacttgaatgtgaccactgacaatacctccctggatgacttccatgtgaatggcggagaactgattcttatccatcaaaatcctggtgaattctgtgtcctttgaggggctgatggca

SEQ ID NO: 222859 - DNA, 120 bp, Artificial Sequence
  ENSG00000117586_6 (sequence is synthesized)
atatctaaaaccaggcaccagcatgaacaccaagctgggggtggacagggcatggattcttcattgcaagtgaaggagcctcccagctcagccacgtgggatgtgacaagaagcagatcc

SEQ ID NO: 222860 - DNA, 120 bp, Artificial Sequence
  ENSG00000117586_7 (sequence is synthesized)
tggccctcccgcccccacccctcagggatatttaaaacttattttatataccagttaatcttatttatccttatattttctaaattgcctagccgtcacaccccaagattgccttgagcc

SEQ ID NO: 222861 - DNA, 120 bp, Artificial Sequence
  ENSG00000117586_8 (sequence is synthesized)
tactaggcacctttgtgagaaagaaaaaatagatgcctcttcttcaagatgcattgtttctattggtcaggcaattgtcataataaacttatgtcattgaaaacggtacctgactaccat

SEQ ID NO: 222862 - DNA, 120 bp, Artificial Sequence
  ENSG00000117586_9 (sequence is synthesized)
ttgctggaaatttgacatgtgtgtggcattatcaaaatgaagaggagcaaggagtgaaggagtggggttatgaatctgccaaaggtggtatgaaccaacccctggaagccaaagcggcct

SEQ ID NO: 222863 - DNA, 120 bp, Artificial Sequence
  ENSG00000117586_10 (sequence is synthesized)
ctccaaggttaaattgattgcagtttgcatattgcctaaatttaaactttctcatttggtgggggttcaaaagaagaatcagcttgtgaaaaatcaggacttgaagagagccgtctaaga

SEQ ID NO: 222864 - DNA, 120 bp, Artificial Sequence
  ENSG00000117586_11 (sequence is synthesized)
aataccacgtgctttttttctttaccattttgctttcccagcctccaaacatagttaatagaaatttcccttcaaagaactgtctggggatgtgatgctttgaaaaatctaatcagtgac

SEQ ID NO: 222865 - DNA, 120 bp, Artificial Sequence
  ENSG00000117586_12 (sequence is synthesized)
ttaagagagattttcttgtatacagggagagtgagataacttattgtgaagggttagctttactgtacaggatagcagggaactggacatctcagggtaaaagtcagtacggattttaat

SEQ ID NO: 222866 - DNA, 120 bp, Artificial Sequence
  ENSG00000117586_13 (sequence is synthesized)
agcctggggaggaaaacacattctttgccacagacaggcaaagcaacacatgctcatcctcctgcctatgctgagatacgcactcagctccatgtcttgtacacacagaaacattgctgg

SEQ ID NO: 222867 - DNA, 120 bp, Artificial Sequence
  ENSG00000117586_14 (sequence is synthesized)
aggtgatcctattatcaaattcaatctgatgtcaaatagcactaagaagttattgtgccttatgaaaaataatgatctctgtctagaaataccatagaccatatatagtctcacattgat

SEQ ID NO: 222868 - DNA, 120 bp, Artificial Sequence
  ENSG00000117586_15 (sequence is synthesized)
aattgaaactagaagggtctataatcagcctatgccagggcttcaatggaatagtatccccttatgtttagttgaaatgtccccttaacttgatataatgtgttatgcttatggcgctgt

SEQ ID NO: 222869 - DNA, 120 bp, Artificial Sequence
  ENSG00000117586_16 (sequence is synthesized)
ggacaatctgatttttcatgtcaactttccagatgatttgtaacttctctgtgccaaaccttttataaacataaatttttgagatatgtattttaaaattgtagcacatgtttccctgac

SEQ ID NO: 222870 - DNA, 120 bp, Artificial Sequence
  ENSG00000117586_17 (sequence is synthesized)
attttcaatagaggatacaacatcacagaatctttctggatgattctgtgttatcaaggaattgtactgtgctacaattatctctagaatctccagaaaggtggagggctgttcgccctt

SEQ ID NO: 222871 - DNA, 120 bp, Artificial Sequence
  ENSG00000117586_18 (sequence is synthesized)
acactaaatggtctcagttggatttttttttcctgttttctatttcctcttaagtacaccttcaactatattcccatccctctattttaatctgttatgaaggaaggtaaataaaaatgc

SEQ ID NO: 222872 - DNA, 120 bp, Artificial Sequence
  ENSG00000117586_19 (sequence is synthesized)
taaatagaagaaattgtaggtaaggtaagaggaatcaagttctgagtggctgccaaggcactcacagaatcataatcatggctaaatatttatggagggcctactgtggaccaggcactg

SEQ ID NO: 222873 - DNA, 120 bp, Artificial Sequence
  ENSG00000117586_20 (sequence is synthesized)
ctactgtggaccaggcactgggctaaatacttacatttacaagaatcattctgagacagatattcaatgatatctggcttcactactcagaagattgtgtgtgtgtttgtgtgtgtgtgt

SEQ ID NO: 222874 - DNA, 120 bp, Artificial Sequence
  ENSG00000117586_21 (sequence is synthesized)
gttattgaccatgttctgcaaaattgcagttactcagtgagtgatatccgaaaaagtaaacgtttatgactataggtaatatttaagaaaatgcatggttcatttttaagtttggaattt

SEQ ID NO: 222875 - DNA, 120 bp, Artificial Sequence
  ENSG00000117586_22 (sequence is synthesized)
ttatctatatttctcacagatgtgcagtgcacatgcaggcctaagtatatgttgtgtgtgttgtttgtctttgatgtcatggtcccctctcttaggtgctcactcgctttgggtgcacct

SEQ ID NO: 222876 - DNA, 120 bp, Artificial Sequence
  ENSG00000117586_23 (sequence is synthesized)
ggcctgctcttcccatgttggcctctgcaaccacacagggatatttctgctatgcaccagcctcactccaccttccttccatcaaaaatatgtgtgtgtgtctcagtccctgtaagtcat

SEQ ID NO: 222877 - DNA, 120 bp, Artificial Sequence
  ENSG00000117586_24 (sequence is synthesized)
gtccttcacagggagaattaacccttcgatatacatggcagagttttgtgggaaaagaattgaatgaaaagtcaggagatcagaattttaaatttgacttagccactaactagccatgta

SEQ ID NO: 222878 - DNA, 120 bp, Artificial Sequence
  ENSG00000117586_25 (sequence is synthesized)
accttgggaaagtcatttcccatttctgggtcttgcttttctttctgttaaatgagaggaatgttaaatatctaacagtttagaatcttatgcttacagtgttatctgtgaatgcacata

SEQ ID NO: 222879 - DNA, 120 bp, Artificial Sequence
  ENSG00000117586_26 (sequence is synthesized)
ttaaatgtctatgttcttgttgctatgagtcaaggagtgtaaccttctcctttactatgttgaatgtatttttttctggacaagcttacatcttcctcagccatctttgtgagtccttca

SEQ ID NO: 222880 - DNA, 120 bp, Artificial Sequence
  ENSG00000117586_27 (sequence is synthesized)
agagcagttatcaattgttagttagatattttctatttagagaatgcttaagggattccaatcccgatccaaatcataatttgttcttaagtatactgggcaggtcccctattttaagtc

SEQ ID NO: 222881 - DNA, 120 bp, Artificial Sequence
  ENSG00000117586_28 (sequence is synthesized)
ataattttgtatttagtgctttcctggctctcagagagtattaatattgatattaataatatagttaatagtaatattgctatttacatggaaacaaataaaagatctcagaattcacta

SEQ ID NO: 222882 - DNA, 120 bp, Artificial Sequence
  ENSG00000117586_29 (sequence is synthesized)
aaaacacaggacacatggctccattcaaggctaactgattgcacaacggctctgagcaggagagagcaaaaggtgaaccacagttgtacagcttgctggtggttggggtcacattggact

SEQ ID NO: 222883 - DNA, 120 bp, Artificial Sequence
  ENSG00000117586_30 (sequence is synthesized)
atcaatatccaggagatgttgagaaaaagaggggatcctttccaacaagtcatccagcaactctgggacagaaggaaagctgtgggaagaaaagcagggtgctggtttctaggacactaa

SEQ ID NO: 222884 - DNA, 120 bp, Artificial Sequence
  ENSG00000117586_31 (sequence is synthesized)
atcgaccggatgcccaagacatcaaccggaattaggctcttttgagaagaaaacaaagagagtaaccaaatatagaacagctgagtgcattcaccagtctgggagccctgagagtgcttt

SEQ ID NO: 222885 - DNA, 120 bp, Artificial Sequence
  ENSG00000117592_0 (sequence is synthesized)
gcttcttcgccagaaccaaccggttgcttgctgtcccagcggcgccccctcatcaccgtcgccatgcccggaggtctgcttctcggggacgtggctcccaactttgaggccaataccacc

SEQ ID NO: 222886 - DNA, 120 bp, Artificial Sequence
  ENSG00000117592_1 (sequence is synthesized)
gtcggccgcatccgtttccacgactttctgggagactcatggggcattctcttctcccaccctcgggactttaccccagtgtgcaccacagagcttggcagagctgcaaagctggcacca

SEQ ID NO: 222887 - DNA, 120 bp, Artificial Sequence
  ENSG00000117592_2 (sequence is synthesized)
gaatttgccaagaggaatgttaagttgattgccctttcaatagacagtgttgaggaccatcttgcctggagcaaggatatcaatgcttacaattgtgaagagcccacagaaaagttacct

SEQ ID NO: 222888 - DNA, 120 bp, Artificial Sequence
  ENSG00000117592_3 (sequence is synthesized)
tttcccatcatcgatgataggaatcgggagcttgccatcctgttgggcatgctggatccagcagagaaggatgaaaagggcatgcctgtgacagctcgtgtggtgtttgtttttggtcct

SEQ ID NO: 222889 - DNA, 120 bp, Artificial Sequence
  ENSG00000117592_4 (sequence is synthesized)
gataagaagctgaagctgtctatcctctacccagctaccactggcaggaactttgatgagattctcagggtagtcatctctctccagctgacagcagaaaaaagggttgccaccccagtt

SEQ ID NO: 222890 - DNA, 120 bp, Artificial Sequence
  ENSG00000117592_5 (sequence is synthesized)
gattggaaggatggggatagtgtgatggtccttccaaccatccctgaagaagaagccaaaaaacttttcccgaaaggagtcttcaccaaagagctcccatctggcaagaaatacctccgc

SEQ ID NO: 222891 - DNA, 120 bp, Artificial Sequence
  ENSG00000117592_6 (sequence is synthesized)
tacacaccccagccttaagtctcttggagaagctggtgctgtgagccagaggatgtcagctgccaattgtgttttcctgcagcaattccataaacacatcctggtgtcatcacagccaag

SEQ ID NO: 222892 - DNA, 120 bp, Artificial Sequence
  ENSG00000117592_7 (sequence is synthesized)
tgctataccaatggcttattaaatgaaaatggcactaaaagtttcttgagattctttatactctctgccttcagcaatcaattccattcatacatcagcactctgctggttctgtttgaa

SEQ ID NO: 222893 - DNA, 120 bp, Artificial Sequence
  ENSG00000117592_8 (sequence is synthesized)
atatgttctgtatttaaaactcaaatcttgttggatctctgcagggcttgtgaccaatgaagtcatatttgttgatggttgacaaagcttgcttcactccatcagagaatgactatcaat

SEQ ID NO: 222894 - DNA, 120 bp, Artificial Sequence
  ENSG00000117592_9 (sequence is synthesized)
ttttttttaactgtcctatcacgtcctctcctgtcacccattttgaagagtggcagaacttgaagttcaacttcctctgtaaatatccaagtataaagcccaggaacttctagaataacc

SEQ ID NO: 222895 - DNA, 120 bp, Artificial Sequence
  ENSG00000117592_10 (sequence is synthesized)
cagatgcgctttaattttttttaatatgttttgatcacagaacttctagaataacccagatgctctttcatattcttttaatacatcttgatcacagctgggggaaaaaaagctttttaa

SEQ ID NO: 222896 - DNA, 120 bp, Artificial Sequence
  ENSG00000117592_11 (sequence is synthesized)
ttctataccttcctagtagataagtgaagagcagggaaagagacctttaaatattttgctataaaaaaatttgtgataagtttctatcaaaatggggagattgcagaaaaggcttccctt

SEQ ID NO: 222897 - DNA, 120 bp, Artificial Sequence
  ENSG00000117592_12 (sequence is synthesized)
ggctcccaaggaggtgtagcaggtgtgagcaatattagtgccatgtgcctttcacacagggtttgcatttatcagtctgttttccgatgatgtgtacatgaaagagtacaccatgtgaag

SEQ ID NO: 222898 - DNA, 120 bp, Artificial Sequence
  ENSG00000117592_13 (sequence is synthesized)
agaagagagaatgattgaaaatgttttagtatagaactcttcttgcagtgggttgctattttctagattttactttttagggaacaaaataaaatcctttgttaaaactgggtcagagaa

SEQ ID NO: 222899 - DNA, 120 bp, Artificial Sequence
  ENSG00000117592_14 (sequence is synthesized)
aatatcatcataagcattcatttaaaaaagaaagcctgtttttgatccagaagttgtgacttttcattctctgtgatgttggtgataactcttaattcaattgtgaccttgtttttcttc

SEQ ID NO: 222900 - DNA, 120 bp, Artificial Sequence
  ENSG00000117592_15 (sequence is synthesized)
cagttgaaccacacagtgatcacattgctaaatccattggtcagtcaattctcagccctcctcttggcctgccagcagcattcaacccagctgatcactgtacctcctgaaactttttcc

SEQ ID NO: 222901 - DNA, 120 bp, Artificial Sequence
  ENSG00000117592_16 (sequence is synthesized)
tttcttgacttccaggacaccacattctagctgttcctgctcactgattcttcatctcccaactcctaatttatgctgaagttaccctgaacttatttcttggacctcatctcttttctg

SEQ ID NO: 222902 - DNA, 120 bp, Artificial Sequence
  ENSG00000117592_17 (sequence is synthesized)
tctgcactctttcccttggtgagctcatccactcacctttaaataccatctatgtgctgtgattctcaaattttcatctctatgccagactcttccaggttcatataaccactgcctacc

SEQ ID NO: 222903 - DNA, 120 bp, Artificial Sequence
  ENSG00000117593_0 (sequence is synthesized)
gaagggcgcttggaccccagcggcgatctgtgtttgggttcgcgctctgggagaattttggctttgctcgccttcctctttcagaagactcgaaatcggccagcaggtctgcgagatttg

SEQ ID NO: 222904 - DNA, 120 bp, Artificial Sequence
  ENSG00000117593_1 (sequence is synthesized)
aaacgcgactgttactccttgttttccggttctggccgcgggagcctctcgagaagcgtggaaagaggagaagggcgtataccttgtgaccgcctctggttgtcttgggctcgcgcctgg

SEQ ID NO: 222905 - DNA, 120 bp, Artificial Sequence
  ENSG00000117593_2 (sequence is synthesized)
cgccgctacgtggagtcgctctctcgtcgtcacttttggctgccgacttgttgagtagaagtgcagactgatgctttaagactcagggagaggtctttcccttatctccaccccagcaag

SEQ ID NO: 222906 - DNA, 120 bp, Artificial Sequence
  ENSG00000117593_3 (sequence is synthesized)
caccccagagaccttggagatttgtcttgtttctagacacgtgtactccaatgttgtgcggaggaggccttaaatattcgagaagagagtgggaactcctggaattttaagggatttctg

SEQ ID NO: 222907 - DNA, 120 bp, Artificial Sequence
  ENSG00000117593_4 (sequence is synthesized)
tgtatttccaaaactgacttttaactaccggcagcgtgggatttcgtgattgtttttcgccatcgtgtggctccaacatgtacttcccttcttggttaagtcagctgtacaggggtttat

SEQ ID NO: 222908 - DNA, 120 bp, Artificial Sequence
  ENSG00000117593_5 (sequence is synthesized)
ccagacccatcagaaggaccacccaaccgatctggggttctctctacagaagtctgttgcagagttcacagaggagaattccagaattcagtagctttgttgtccggaccaacacatgtg

SEQ ID NO: 222909 - DNA, 120 bp, Artificial Sequence
  ENSG00000117593_6 (sequence is synthesized)
gagagttgcgttcgtctcacttaggccaagaagtcaccttgtgtggatggattcagtaccgaaggcaaaacacattcttggtcctaagagatttcgatgggcttgttcaagttatcattc

SEQ ID NO: 222910 - DNA, 120 bp, Artificial Sequence
  ENSG00000117593_7 (sequence is synthesized)
cccaggatgagtcggcagcctctgtgaagaagattttatgtgaagcccctgtggaatctgtggtgcaagtgtctggtacagtcatttcccgtcctgcaggacaagagaatccaaaaatgc

SEQ ID NO: 222911 - DNA, 120 bp, Artificial Sequence
  ENSG00000117593_8 (sequence is synthesized)
caacaggtgagattgaaatcaaagttaaaacagctgagcttctgaatgcctgcaagaagctgccctttgaaattaagaacttcgtgaagaaaacagaggctcttcggttgcagtatcgct

SEQ ID NO: 222912 - DNA, 120 bp, Artificial Sequence
  ENSG00000117593_9 (sequence is synthesized)
acttagacttgcgtagtttccaaatgcagtataacctgcgactgaggtcccagatggtcatgaaaatgcgggaatatctctgtaatctgcatgggtttgtggatatagaaacccccacat

SEQ ID NO: 222913 - DNA, 120 bp, Artificial Sequence
  ENSG00000117593_10 (sequence is synthesized)
tgtttaagaggaccccagggggtgccaaagagtttttagtaccatccagggaacctggaaagttttattctctccctcagagtcctcaacagtttaagcaacttctgatggttggcggtt

SEQ ID NO: 222914 - DNA, 120 bp, Artificial Sequence
  ENSG00000117593_11 (sequence is synthesized)
tagacagatattttcaggttgcccgatgttatcgagatgaaggttcaagaccagacagacagcctgagtttactcagattgacatagagatgtcatttgtagaccagactgggatccaga

SEQ ID NO: 222915 - DNA, 120 bp, Artificial Sequence
  ENSG00000117593_12 (sequence is synthesized)
gtttaattgagggtttgctccagtattcctggcccaatgacaaagatcctgtggttgttccttttcctactatgacttttgctgaggtgctggccacctatggaactgataaacctgaca

SEQ ID NO: 222916 - DNA, 120 bp, Artificial Sequence
  ENSG00000117593_13 (sequence is synthesized)
tgaaagccatatgtatccctgaaggagcaaaatacttaaaaaggaaagacattgaatccattagaaactttgcagctgaccattttaatcaggaaatcttacctgtattccttaacgcca

SEQ ID NO: 222917 - DNA, 120 bp, Artificial Sequence
  ENSG00000117593_14 (sequence is synthesized)
atagaaactggaattctccagttgctaatttcataatggagtcacaaagactggaattaatcagactaatggagacccaagaggaagatgtggtcctactaactgctggagagcacaata

SEQ ID NO: 222918 - DNA, 120 bp, Artificial Sequence
  ENSG00000117593_15 (sequence is synthesized)
aagcatgctctttgttaggaaaattacgactggaatgtgctgaccttctagaaacaagaggagtggtgctccgtgaccccactctgttctctttcctttgggtggtagatttcccactct

SEQ ID NO: 222919 - DNA, 120 bp, Artificial Sequence
  ENSG00000117593_16 (sequence is synthesized)
tcctgcccaaggaggaaaatcccagagagctggaatcggcccaccacccatttactgctccccaccccagtgacatacatctcctgtacactgagcccaaaaaggcccgtagccaacact

SEQ ID NO: 222920 - DNA, 120 bp, Artificial Sequence
  ENSG00000117593_17 (sequence is synthesized)
atgacttggttttaaatggcaatgaaataggaggtggttcaattcgaattcacaatgcagagctgcagcgttatatcctggcaaccttactaaaggaggatgtgaaaatgctctcccatc

SEQ ID NO: 222921 - DNA, 120 bp, Artificial Sequence
  ENSG00000117593_18 (sequence is synthesized)
tgctccaggctttagattatggggcaccccctcatggaggaattgccttagggttagacagactgatatgccttgtcactggatctccaagcatcagagatgtcatagccttcccaaagt

SEQ ID NO: 222922 - DNA, 120 bp, Artificial Sequence
  ENSG00000117593_19 (sequence is synthesized)
ccttccggggacatgacctcatgagcaataccccagattctgtccctcctgaggaactgaagccctatcatatccgagtctccaagccaacagactccaaagcagaaagagctcattgaa

SEQ ID NO: 222923 - DNA, 120 bp, Artificial Sequence
  ENSG00000117593_20 (sequence is synthesized)
tcatgcataccatgcagaaagttgagcttttaggttttgtcctctttgcttccccaaggctaaagtcagatctagagttctgccacaggtctaacaatcaagtctttagatggaaggaat

SEQ ID NO: 222924 - DNA, 120 bp, Artificial Sequence
  ENSG00000117593_21 (sequence is synthesized)
ccaggcaacattcttcaccacaacgaagaaacagataaaagatacccaattttgacttgatttcatgcatcatttggattttttttggttaggactttttttgaagttcctttttactta

SEQ ID NO: 222925 - DNA, 120 bp, Artificial Sequence
  ENSG00000117593_22 (sequence is synthesized)
ggtgtgaaagatggttctttgttgaaataatatagtggtttagtgttttcaaatcatgtttctcatacccagatagtagattattcacttaggacagaggtaatcaaattatgtgtgaaa

SEQ ID NO: 222926 - DNA, 120 bp, Artificial Sequence
  ENSG00000117593_23 (sequence is synthesized)
tgtaggaaaatgcttgcccctgtaaactagtgagttgatggagcatttgcttcatcatcctcatcaagagaatcatataaattaagctttataatgacatttcaaccatcaacataatat

SEQ ID NO: 222927 - DNA, 120 bp, Artificial Sequence
  ENSG00000117593_24 (sequence is synthesized)
agtgaggagtagcataatattttttaataatgcagaaaacatcactgaaatgagagtcacaaatttttcttcagtgtttcagcctgagtaagttacataaacctcgcttagcctcccttc

SEQ ID NO: 222928 - DNA, 120 bp, Artificial Sequence
  ENSG00000117593_25 (sequence is synthesized)
ctgctaatgtgtaaaatacatacttgccctggctacctcaccgggctgttattgctggaatcagaggagataacatatatggaagataaagtgaataaaagtactttgaaaaactataaa

SEQ ID NO: 222929 - DNA, 120 bp, Artificial Sequence
  ENSG00000117593_26 (sequence is synthesized)
gcattccacaaatatgagatgatggtattatccatccataaataggtagatatatctctattttatagtttcagattaaacaaaactgatatcaatagtaaaagtcattttacttatcaa

SEQ ID NO: 222930 - DNA, 120 bp, Artificial Sequence
  ENSG00000117593_27 (sequence is synthesized)
attcagtaccgaaggtaaattgagaaagacagtctaagaatgcatggtggtggttttcccagggcaattccaaacctttactaatttacaaccagtccgaagaataaaacgttttgcaac

SEQ ID NO: 222931 - DNA, 120 bp, Artificial Sequence
  ENSG00000117593_28 (sequence is synthesized)
tcctgcaggattaagaacttactgaattttcaactttgttttagttttgaaagacccaagtgtcattctcagtagacattttgaaagacccaaatgtcattctcagtaggtacatctcag

SEQ ID NO: 222932 - DNA, 120 bp, Artificial Sequence
  ENSG00000117593_29 (sequence is synthesized)
taacatctgttgaagggtataacaacgaagcttgatccaccagtggactgaaatgatactgggcttactaagactgaagagttcctataaccagtaattaaaaatgggccagcctcctat

SEQ ID NO: 222933 - DNA, 120 bp, Artificial Sequence
  ENSG00000117593_30 (sequence is synthesized)
aaaccagctgttaaactccaatagcatgggggaaaagctcatcttattccatgtaggtagagaagaagcctagaaacataaacagtgattccttaagatcagagcccattttttgttgtt

SEQ ID NO: 222934 - DNA, 120 bp, Artificial Sequence
  ENSG00000117593_31 (sequence is synthesized)
gttcatctctctattccagaacatgcctgaatagaacattaattcacatggaagagattcaaaatacataggttatatgaccttcttaaagaatatgtcccagcctggcgtgtaagcctg

SEQ ID NO: 222935 - DNA, 75 bp, Artificial Sequence
  ENSG00000117593_32 (sequence is synthesized)
gaggttaggagttcgagaccagcccttcgccaggcggggtgatgctcgtctgtaattctagctactcaggaggct

SEQ ID NO: 222936 - DNA, 120 bp, Artificial Sequence
  ENSG00000117593_33 (sequence is synthesized)
agctgagattgcgccactgcactccactctgggcaacagaacgagactccgtctcaggaaaaaaaaaaaagtttgtcccaagtaggtggatatttttcccataagtttagtgactgtttc

SEQ ID NO: 222937 - DNA, 120 bp, Artificial Sequence
  ENSG00000117593_34 (sequence is synthesized)
actgtttcctgaacccaaatctgaagagggtttctgtacctgttcctgatgctgaggatagtatgagaaatagaggttggatgttaaaatgttggcatttctgggaccttttgatgattc

SEQ ID NO: 222938 - DNA, 120 bp, Artificial Sequence
  ENSG00000117593_35 (sequence is synthesized)
atagaggtattaaattagtagttggaactcttccagaaaatgttagattgtatctttttttagaaaaagactatattgctatatttcaaaaatgatccatcagatgtttctattatgcta

SEQ ID NO: 222939 - DNA, 120 bp, Artificial Sequence
  ENSG00000117593_36 (sequence is synthesized)
gctaaaatactatctttggattttactatatgcaaagtttccaaatttaataaaattttcttaaaaggacttaagccaatgaaatttcttttaattgttcatctataataatttttcatt

SEQ ID NO: 222940 - DNA, 120 bp, Artificial Sequence
  ENSG00000117593_37 (sequence is synthesized)
agccatctgtataagattaatataccaggtaagtagacaataaaaattgaaactgaaataaaaaacaatcttttttttggcaatgagctacatagataacaattgcatgaatgtaactaa

SEQ ID NO: 222941 - DNA, 120 bp, Artificial Sequence
  ENSG00000117593_38 (sequence is synthesized)
tgaaggtacataattatcataaaaaacatgaaaaattataattatcataaaaaagaaacatgaaaaattgcatggatttttgtttgctttttattttgtatgcttcaactttggacttag

SEQ ID NO: 222942 - DNA, 120 bp, Artificial Sequence
  ENSG00000117593_39 (sequence is synthesized)
aatttttgcttgtatgcatttgcaccatctgtgtacacattctggcaacacatgactggacattaggcactaaagttgaataaattctacaaatgaactgacagatttcaaaatcttgac

SEQ ID NO: 222943 - DNA, 120 bp, Artificial Sequence
  ENSG00000117593_40 (sequence is synthesized)
atgaactgacagatttcaaaatcttgactataaacaaacacatctatgtaaatatgcatgctaagtctcactctgtcaccaggctggagtacggtggcgtgatcttggctcactgcaacc

SEQ ID NO: 222944 - DNA, 63 bp, Artificial Sequence
  ENSG00000117593_41 (sequence is synthesized)
tgaagcagccactcgggaggctgaggcatgaggtttgcttgaacctgggagatggaggttgca

SEQ ID NO: 222945 - DNA, 120 bp, Artificial Sequence
  ENSG00000117593_42 (sequence is synthesized)
aattcaggttctcagtttgtgttggtagaggtggaaggatgagtccaagagttccatgagaatgtaagtttctgttgaaatttcagtaatatattttttaaatatatcttaacagttata

SEQ ID NO: 222946 - DNA, 120 bp, Artificial Sequence
  ENSG00000117593_43 (sequence is synthesized)
aagatataacttaactgataatttgcatttgaaagatcattaatagcttaaaactgcagatcttaagtcaatattgttcaaatccccatggcctcacatacgcactcattggagtctgga

SEQ ID NO: 222947 - DNA, 120 bp, Artificial Sequence
  ENSG00000117593_44 (sequence is synthesized)
aagcactgctccataatgttcagcttgtatgaaaacaggaagatgccagtgtccttctgattgccatggttactcactttgcttgttttgtcaaagcaaggaagagtaagaaattctagg

SEQ ID NO: 222948 - DNA, 120 bp, Artificial Sequence
  ENSG00000117593_45 (sequence is synthesized)
aagctcacctagattgtaggccccaacaacagggacttccttctgtgtttatggagttccctgccaagcaccaaatacactgttgaatctgttttagggcctttagtaagcctttactag

SEQ ID NO: 222949 - DNA, 120 bp, Artificial Sequence
  ENSG00000117593_46 (sequence is synthesized)
gaacactaatcgctgtgacaatccaagtagcatgtgaacattagtcctgaatacttttccagaatgagatagaaaagaacctctcaaacaaacaaaagttctctaaaaaggtagggaacg

SEQ ID NO: 222950 - DNA, 120 bp, Artificial Sequence
  ENSG00000117593_47 (sequence is synthesized)
atggttggctacagtttgttaaagattcttatttaaaagttttctacaacttttatagaaaaactaagttatttccaacattagattacatttctcatctgttatctttgtattttactc

SEQ ID NO: 222951 - DNA, 120 bp, Artificial Sequence
  ENSG00000117593_48 (sequence is synthesized)
aaatgcagtataacctgcgactgaggtcccagatggtcatgaaaatgcgggaatatctctgtaatctgcatgggtttgtggatatagaaacccccacattgtttaagaggaccccaggga

SEQ ID NO: 222952 - DNA, 120 bp, Artificial Sequence
  ENSG00000117593_49 (sequence is synthesized)
caatagtaaaatgaagaaagctatttatttccaaattttattatgaatgcatttcttaaaaaagaacatgggattttgttcctaactaatttggctattaaaccttctcttggtatgaac

SEQ ID NO: 222953 - DNA, 120 bp, Artificial Sequence
  ENSG00000117593_50 (sequence is synthesized)
ggtaccgtatctatacttccaaatcaaaaggaaatgtgtatataaaggcaaagaacttcagacttcaaggtctgatgaaagataggacccagttctggaagccccagaagaaattgtgga

SEQ ID NO: 222954 - DNA, 120 bp, Artificial Sequence
  ENSG00000117593_51 (sequence is synthesized)
gtttgagttagtagtaatacattgtctttaaaaatctacagggtcttcaacccgtagaacagaaaaccagacattttctctaacataaagtatctgtgaatcttctaggcccgtagccaa

SEQ ID NO: 222955 - DNA, 120 bp, Artificial Sequence
  ENSG00000117593_52 (sequence is synthesized)
cactatgacttggttttaaatggcaatgaaataggaggtggttcaattcgaattcacaatgcagagctgcagcgttatatcctggcaaccttactaaaggtaacaaacatcatctgctat

SEQ ID NO: 222956 - DNA, 120 bp, Artificial Sequence
  ENSG00000117593_53 (sequence is synthesized)
cctgggcttatttttttaccagaatatttttcagttttgtgttgttgttgttgtttgcttgtttgttttgtttttgagacattctgtcacccaggcaggtgtctactggtgcattcatag

SEQ ID NO: 222957 - DNA, 85 bp, Artificial Sequence
  ENSG00000117593_54 (sequence is synthesized)
catgccaccatgcccggcaaatttttttatttttttgaagagataagatttccctatgttgctcacactgctctcaaactcctgc

SEQ ID NO: 222958 - DNA, 89 bp, Artificial Sequence
  ENSG00000117593_55 (sequence is synthesized)
caccatgcccggcaaatttttttatttttttgaagagataagatttccctatgttgctcacactgctctcaaactcctgccctcaagca

SEQ ID NO: 222959 - DNA, 120 bp, Artificial Sequence
  ENSG00000117593_56 (sequence is synthesized)
tattttattaaacatttgttatgattggaggattcacaagatacaaaatagcatcagctatctctctacctttaatgtaggacttggaaaagtaaataataatattaaaagtaaataata

SEQ ID NO: 222960 - DNA, 120 bp, Artificial Sequence
  ENSG00000117593_57 (sequence is synthesized)
atattaaatgcttaaatagtatctggcacatagcactattaaacagtactatttaaatactaattaatagtgcatattaaatacccttattataatagtgcagataaatatccttattct

SEQ ID NO: 222961 - DNA, 120 bp, Artificial Sequence
  ENSG00000117593_58 (sequence is synthesized)
gcccactctaaagatgagatttactgaggcaacttacttaacttgccaaagtgacagtacaaaagtaagcagagtcaggatttgaatccaggtgaggtggctcttaagcccatgctccta

SEQ ID NO: 222962 - DNA, 120 bp, Artificial Sequence
  ENSG00000117594_0 (sequence is synthesized)
acaattcagaggctgctgcctgcttaggaggttgtagaaagctctgtaggttctctctgtgtgtcctacaggagtcttcaggccagctccctgtcggatggcttttatgaaaaaatatct

SEQ ID NO: 222963 - DNA, 120 bp, Artificial Sequence
  ENSG00000117594_1 (sequence is synthesized)
cctccccattctggggctcttcatggcctactactactattctgcaaacgaggaattcagaccagagatgctccaaggaaagaaagtgattgtcacaggggccagcaaagggatcggaag

SEQ ID NO: 222964 - DNA, 120 bp, Artificial Sequence
  ENSG00000117594_2 (sequence is synthesized)
agagatggcttatcatctggcgaagatgggagcccatgtggtggtgacagcgaggtcaaaagaaactctacagaaggtggtatcccactgcctggagcttggagcagcctcagcacacta

SEQ ID NO: 222965 - DNA, 120 bp, Artificial Sequence
  ENSG00000117594_3 (sequence is synthesized)
cattgctggcaccatggaagacatgaccttcgcagagcaatttgttgcccaagcaggaaagctcatgggaggactagacatgctcattctcaaccacatcaccaacacttctttgaatct

SEQ ID NO: 222966 - DNA, 120 bp, Artificial Sequence
  ENSG00000117594_4 (sequence is synthesized)
ttttcatgatgatattcaccatgtgcgcaaaagcatggaagtcaacttcctcagttacgtggtcctgactgtagctgccttgcccatgctgaagcagagcaatggaagcattgttgtcgt

SEQ ID NO: 222967 - DNA, 120 bp, Artificial Sequence
  ENSG00000117594_5 (sequence is synthesized)
ttggatgggttcttctcctccatcagaaaggaatattcagtgtccagggtcaatgtatcaatcactctctgtgttcttggcctcatagacacagaaacagccatgaaggcagtttctggg

SEQ ID NO: 222968 - DNA, 120 bp, Artificial Sequence
  ENSG00000117594_6 (sequence is synthesized)
atagtccatatgcaagcagctccaaaggaggaatgtgccctggagatcatcaaagggggagctctgcgccaagaagaagtgtattatgacagctcactctggaccactcttctgatcaga

SEQ ID NO: 222969 - DNA, 120 bp, Artificial Sequence
  ENSG00000117594_7 (sequence is synthesized)
aatccatgcaggaagatcctggaatttctctactcaacgagctataatatggacagattcataaacaagtaggaactccctgagggctgggcatgctgagggattttgggactgttctgt

SEQ ID NO: 222970 - DNA, 120 bp, Artificial Sequence
  ENSG00000117594_8 (sequence is synthesized)
ctcatgtttatctgagctcttatctatgaagacatcttcccagagtgtccccagagacatgcaagtcatgggtcacacctgacaaatggaaggagttcctctaacatttgcaaaatggaa

SEQ ID NO: 222971 - DNA, 120 bp, Artificial Sequence
  ENSG00000117594_9 (sequence is synthesized)
atgtaataataatgaatgtcatgcaccgctgcagccagcagttgtaaaattgttagtaaacataggtataattaccagatagttatattaaatttatatcttatatataataatatgtga

SEQ ID NO: 222972 - DNA, 120 bp, Artificial Sequence
  ENSG00000117594_10 (sequence is synthesized)
tgattaatacaatattaattataataaaggtcacataaactttataaattcataactggtagctataacttgagcttattcaggatggtttctttaaaaccataaactgtacaaatgaaa

SEQ ID NO: 222973 - DNA, 120 bp, Artificial Sequence
  ENSG00000117594_11 (sequence is synthesized)
gagatgaaacagaaggaaaggcagaggaggagggagagagagagaagagaagaaaaagaaaaaagaacatcaataaaaagaagtcagatttgttcgaaatcttgaggttctctctgtgtg

SEQ ID NO: 222974 - DNA, 120 bp, Artificial Sequence
  ENSG00000117594_12 (sequence is synthesized)
gagagatgaaacagaaggaaaggcagaggaggagggagagagagagaagagaagaaaaagaaaaaagaacatcaataaaaagaagtcagatttgttcgaaatcttgaggagtcttcaggc

SEQ ID NO: 222975 - DNA, 120 bp, Artificial Sequence
  ENSG00000117595_0 (sequence is synthesized)
gctgacgtgagctcggcgcacctgggctgggcaggtaagggctggtgcgggacggggagaggaacctgcagtccctacttgggtagagccaggcgccccttggctaagacgtcgaggagc

SEQ ID NO: 222976 - DNA, 120 bp, Artificial Sequence
  ENSG00000117595_1 (sequence is synthesized)
gtggtagcgacgggtgatcttcgctgcggacttggttcggagggacgtccgcttctggtggacagattgagcaaagaatctttgagcggtcaagggaaagacaagccgactcttcagatc

SEQ ID NO: 222977 - DNA, 120 bp, Artificial Sequence
  ENSG00000117595_2 (sequence is synthesized)
cctgtggacacactgcctgctcttccatatcatggccctccacccccgcagagtccggctaaagccctggctggtggcccaggtggatagtggcctctaccctgggctcatctggctaca

SEQ ID NO: 222978 - DNA, 120 bp, Artificial Sequence
  ENSG00000117595_3 (sequence is synthesized)
cagggactctaaacgcttccagattccctggaaacatgccacccggcatagccctcaacaagaagaggaaaataccatttttaaggcctgggctgtagagacagggaagtaccaggaagg

SEQ ID NO: 222979 - DNA, 120 bp, Artificial Sequence
  ENSG00000117595_4 (sequence is synthesized)
ggtggatgaccctgacccagctaaatggaaggcccagctgcgctgtgctctcaataagagcagagaattcaacctgatgtatgatggcaccaaggaggtgcccatgaacccagtgaagat

SEQ ID NO: 222980 - DNA, 120 bp, Artificial Sequence
  ENSG00000117595_5 (sequence is synthesized)
atatcaagtgtgtgacatccctcagccccagggctcgatcattaacccaggatccacagggtctgctccctgggatgagaaggataatgatgtggatgaagaagatgaggaagatgagct

SEQ ID NO: 222981 - DNA, 120 bp, Artificial Sequence
  ENSG00000117595_6 (sequence is synthesized)
ggatcagtcgcagcaccatgttcccatccaggacaccttccccttcctgaacatcaatggttctcccatggcgccagccagtgtgggcaattgcagtgtgggcaactgcagcccggaggc

SEQ ID NO: 222982 - DNA, 120 bp, Artificial Sequence
  ENSG00000117595_7 (sequence is synthesized)
agtgtggcccaaaactgaacccctggagatggaagtaccccaggcacctatacagcccttctatagctctccagaactgtggatcagctctctcccaatgactgacctggacatcaagtt

SEQ ID NO: 222983 - DNA, 120 bp, Artificial Sequence
  ENSG00000117595_8 (sequence is synthesized)
tcagtaccgtgggaaggagtacgggcagaccatgaccgtgagcaaccctcagggctgccgactcttctatggggacctgggtcccatgcctgaccaggaggagctctttggtcccgtcag

SEQ ID NO: 222984 - DNA, 120 bp, Artificial Sequence
  ENSG00000117595_9 (sequence is synthesized)
cctggagcaggtcaaattcccaggtcctgagcatattaccaatgagaagcagaagctgttcactagcaagctgctggacgtcatggacagaggactgatcctggaggtcagcggtcatgc

SEQ ID NO: 222985 - DNA, 120 bp, Artificial Sequence
  ENSG00000117595_10 (sequence is synthesized)
catttatgccatcaggctgtgccagtgcaaggtgtactggtctgggccatgtgccccatcacttgttgctcccaacctgattgagagacaaaagaaggtcaagctattttgtctggaaac

SEQ ID NO: 222986 - DNA, 120 bp, Artificial Sequence
  ENSG00000117595_11 (sequence is synthesized)
attccttagcgatctcattgcccaccagaaaggacagatagagaagcagccaccgtttgagatctacttatgctttggggaagaatggccagatgggaaaccattggaaaggaaactcat

SEQ ID NO: 222987 - DNA, 120 bp, Artificial Sequence
  ENSG00000117595_12 (sequence is synthesized)
cttggttcaggtcattccagtagtggctcggatgatctacgagatgttttctggtgatttcacacgatcctttgatagtggcagtgtccgcctgcagatctcaaccccagacatcaagga

SEQ ID NO: 222988 - DNA, 120 bp, Artificial Sequence
  ENSG00000117595_13 (sequence is synthesized)
taacatcgttgctcagctgaagcagctgtaccgcatccttcaaacccaggagagctggcagcccatgcagcccacccccagcatgcaactgccccctgccctgcctccccagtaattgtg

SEQ ID NO: 222989 - DNA, 120 bp, Artificial Sequence
  ENSG00000117595_14 (sequence is synthesized)
aatgccatcttcttccttctcttttttataatattgtacatatggatttttttattgtttagatttaaccagcttttaaatctctcttttctctaacagtgttagaagtttgtgattctc

SEQ ID NO: 222990 - DNA, 120 bp, Artificial Sequence
  ENSG00000117595_15 (sequence is synthesized)
caaatatgcctagatttaaagctgatttaatttatggaaaaatcacccttcagactttgcttttctttttcaaatctcctaatggtagtatgatatagcatagtagaaggagatttggcc

SEQ ID NO: 222991 - DNA, 120 bp, Artificial Sequence
  ENSG00000117595_16 (sequence is synthesized)
tgggagtttggacaccaaagttctagctgcagctttgcttccaatgtgaccttgaacaagtcctttaacctctgggcttcagatttattgcttataaagtgaagagattggagtagtgcc

SEQ ID NO: 222992 - DNA, 120 bp, Artificial Sequence
  ENSG00000117595_17 (sequence is synthesized)
tgaaattgcatccagctttagaacggactcaatgaccttcttctacttgtacaaggctaaactgcctggaacagaatccttctgcattgttcttgtaccacatttttccttggttttgtt

SEQ ID NO: 222993 - DNA, 120 bp, Artificial Sequence
  ENSG00000117595_18 (sequence is synthesized)
ctgtttgacctgttctgctagtatagtaagctggctccctgatgggggaagtgagagggagaggagctggctggctggttgcttagaaactatgcttgatatctaaatagaaatgggtgc

SEQ ID NO: 222994 - DNA, 120 bp, Artificial Sequence
  ENSG00000117595_19 (sequence is synthesized)
caaagtctgaaagtcacccagcctgtggagtgaaagctcacaaatttggcttctaaagggaagctgttgacacagaaagcctagggattctgtggaagaataggttgtcaggcatttacc

SEQ ID NO: 222995 - DNA, 120 bp, Artificial Sequence
  ENSG00000117595_20 (sequence is synthesized)
ttattaccactcaaataccagtgtgtgtgtgttgggggggcggcagggagagggggtaggtgacagtatgtgactcaggtgttagctttaagaggaaagagctctatttttcttgttttc

SEQ ID NO: 222996 - DNA, 120 bp, Artificial Sequence
  ENSG00000117595_21 (sequence is synthesized)
ttctctgagctagactgagctggggatctaagatgtacttctctgactacaaaagggacagtatcatttagattttttgcagttggaagaaatgggttgttgagtgtgttaaggctggga

SEQ ID NO: 222997 - DNA, 120 bp, Artificial Sequence
  ENSG00000117595_22 (sequence is synthesized)
tgaagaagggctgggcagtactcttctggaaaggctcacctagcacgaacctgcttgtctcccttactagtggaggtatctgagtgtgaacagtgaaggtaaagagtggtatagaacaat

SEQ ID NO: 222998 - DNA, 120 bp, Artificial Sequence
  ENSG00000117595_23 (sequence is synthesized)
aaagagtggtatagaacaatgcagctgtatctgtcacaaactggtcttatctagaaacatctgctgagtctctaaccctttcagctttctcttcttttttgagacagagtcttgctttgt

SEQ ID NO: 222999 - DNA, 120 bp, Artificial Sequence
  ENSG00000117595_24 (sequence is synthesized)
ggcaagtcaccacttactgcagctttaagctcctgggctcaagcaatcgtcctgccccagcctcctgagtagttgggacaacagtcgtgcactatgatgcttggctaattttttttttat

SEQ ID NO: 223000 - DNA, 120 bp, Artificial Sequence
  ENSG00000117595_25 (sequence is synthesized)
cttgaactcctgggctcaagcaatctgggacctaaatggcaaataagatgctaatctgtggttgcaagccccagtcctcttgaatagtgatgcctatctgtctgtgtcgggacatagtaa

SEQ ID NO: 223001 - DNA, 120 bp, Artificial Sequence
  ENSG00000117595_26 (sequence is synthesized)
tgaatagtgatgcctatctgtctgtgtcgggacatagtaaggaagcccatgtctagtctggtacctttaaaccaggccatctccaacttttcaaaatgactcaaaagttgagctagcctt

SEQ ID NO: 223002 - DNA, 120 bp, Artificial Sequence
  ENSG00000117595_27 (sequence is synthesized)
attttaaaaactaaaagttcaaaatcagtggtgacatgaggacttatttatttaaagtgcttaagccttggttttagagtttctaagagacctagtggaatttgctattatgaaaagcat

SEQ ID NO: 223003 - DNA, 120 bp, Artificial Sequence
  ENSG00000117595_28 (sequence is synthesized)
gaaaagattaagaaacctggctaaaggtcaggtgcccagcttcgaggaaaagttgggcttttagggaccgggaagcattaaaggcacagaaactttacattttgggggtcattttgttga

SEQ ID NO: 223004 - DNA, 120 bp, Artificial Sequence
  ENSG00000117595_29 (sequence is synthesized)
gtaggtgaagtgagggatttgggcttgatatttggctgccccatctctacgtgggaactcaaagttaaaaacccactgtaggtaaattagaagggcagctcttgaatctgggccagtcta

SEQ ID NO: 223005 - DNA, 120 bp, Artificial Sequence
  ENSG00000117595_30 (sequence is synthesized)
tatcccttctgtgaagtgctaacagccaggctatctgtagcctgggtgggagcccagataatgtgagctggtaaagggtattggaaaagtgccaagaaatgccaagcttttggttcgtaa

SEQ ID NO: 223006 - DNA, 120 bp, Artificial Sequence
  ENSG00000117595_31 (sequence is synthesized)
ccactataaaaagtttatgaacatgtcagaggaatggatgagtgatttgtgaggtcttaactagataccccggtttcttccttgttttggcttcttttcagaatgccgggagagtacatg

SEQ ID NO: 223007 - DNA, 120 bp, Artificial Sequence
  ENSG00000117595_32 (sequence is synthesized)
cagggattccatctaatcaccctcagcactctttctctggtcctgctggatagatttagatttcctttctttttttagggcctcagtctgctatctcctttggtggctaccaccactcac

SEQ ID NO: 223008 - DNA, 120 bp, Artificial Sequence
  ENSG00000117595_33 (sequence is synthesized)
tcccttgatatcttctactcccttgccttcaccttgcttaagactgagaagggagttagattttgtcactagctcttctttttcctcactgtgtaccccaccaaacaagattagttcaag

SEQ ID NO: 223009 - DNA, 120 bp, Artificial Sequence
  ENSG00000117595_34 (sequence is synthesized)
ttaaaaagaacctactggaggtaaactgggagagcaagtgttggatctgggctggtccctttcccataaaattaggtccctggttgtatgttcccatagcaccccatacttcctctctca

SEQ ID NO: 223010 - DNA, 120 bp, Artificial Sequence
  ENSG00000117595_35 (sequence is synthesized)
gaataatcatttcccttgtaatgctcagcatccgcatcctgcttgactgcaaacttgctgaaggtagggactgtttgtcttggacttcgctgccagtccttagaacagtgtctgggacac

SEQ ID NO: 223011 - DNA, 120 bp, Artificial Sequence
  ENSG00000117595_36 (sequence is synthesized)
agtgtgttctcaaatatttgttgctggaataaatgaatgaactaaatcagtcttttagggatttactgttaaccaccatgggaaaattaaataaatgcggggaaggaaaacgttctaaaa

SEQ ID NO: 223012 - DNA, 120 bp, Artificial Sequence
  ENSG00000117595_37 (sequence is synthesized)
tgtaatttaacctccagagaaaactcacatgtctatgttaatcttcagcaaacaaaggtttttaaaactatgaatttgtgggagaaataatatgactaggaagcaggagcaggggaacct

SEQ ID NO: 223013 - DNA, 120 bp, Artificial Sequence
  ENSG00000117595_38 (sequence is synthesized)
tatttcttattgcgttagttatgggaatcactgatgggctggaagatcacactgggtcagggttcagtgtttggttcttgtctactgaccttgtgagttctcagagcatcagcaagtgat

SEQ ID NO: 223014 - DNA, 120 bp, Artificial Sequence
  ENSG00000117595_39 (sequence is synthesized)
ctttaccagactcagtagtggagacgtgttctcagcctttgtcgccagtgttcccaagccttctcccagacactggattgttgtatggatagccagctgagacccctccttttctccata

SEQ ID NO: 223015 - DNA, 120 bp, Artificial Sequence
  ENSG00000117597_0 (sequence is synthesized)
gcagtcagcgagcccacgtgcttgtgttgactggacaacttcctggtggaaaaccgcgactcttgcaagtgggcaaacttgacgttttcgctatgggcaaacgcgggagccggagccaga

SEQ ID NO: 223016 - DNA, 120 bp, Artificial Sequence
  ENSG00000117597_1 (sequence is synthesized)
gccagctactcaacaccctaactaaaaagcagaagaaacatcttcgagatttcggcgaggagcatcccttctatgacagggtttccagaaaggaagcaaagccacagatttgtcaactgt

SEQ ID NO: 223017 - DNA, 120 bp, Artificial Sequence
  ENSG00000117597_2 (sequence is synthesized)
cagagagttcagattcttcagattctgaaagcgactcagagagtgaaccacaacaagtttctggctaccacagactacttgctacattaaagaatgtttctgaggaagaagaggaagatg

SEQ ID NO: 223018 - DNA, 120 bp, Artificial Sequence
  ENSG00000117597_3 (sequence is synthesized)
aggaggaggaagaggaagaagacagtattgtagatgatgcagaaatgaacgatgaagatggtggtagcgatgtcagtgtggaagaagagatggctgcagagtctactgaaagtccagaga

SEQ ID NO: 223019 - DNA, 120 bp, Artificial Sequence
  ENSG00000117597_4 (sequence is synthesized)
atgtagctttatctgctgaccctgagggaaaagaagatggggaagagccaccgggcacatcacaaacatcccccgaagagttcacagatgcaaaacacgagtcactgttcagcctggaaa

SEQ ID NO: 223020 - DNA, 120 bp, Artificial Sequence
  ENSG00000117597_5 (sequence is synthesized)
ccaattttctggaagaggaaagtggagacaactcttctttgaaagcctctcaagatccatttcttcaacatgtgaacaaagaactgaaagaaaaagcaattcaggctgttgccacaaatc

SEQ ID NO: 223021 - DNA, 120 bp, Artificial Sequence
  ENSG00000117597_6 (sequence is synthesized)
ccaaaactacccacgagcttaaatggcctattctgggccagcttttcttttcctctaagtttcagaagttggaaacatttaaacccccaaaggatattgacttaaagtcacttcatctcc

SEQ ID NO: 223022 - DNA, 120 bp, Artificial Sequence
  ENSG00000117597_7 (sequence is synthesized)
agaagcctctggaatccacctggactaagaccaacagccagttcctatctggtccccaaaaatcaagcagcccattcacccccctccagaaagaactcttcttaattatgaattcttacc

SEQ ID NO: 223023 - DNA, 120 bp, Artificial Sequence
  ENSG00000117597_8 (sequence is synthesized)
gggacctgttctacccggaaaggactgctctgaagaacggggaagagatccgccatgtgtattgcctgcatgtgataaatcacatcctcaaagccaatgcccaggtgcttggcaacaata

SEQ ID NO: 223024 - DNA, 120 bp, Artificial Sequence
  ENSG00000117597_9 (sequence is synthesized)
gcagacgccgaagccagaagtttggagtgggtgatgatgatgacttcagagaccaagggttaacaaggcccaaggtactgatagtggtgccattccgggaagctgctttgcgggtggtgc

SEQ ID NO: 223025 - DNA, 120 bp, Artificial Sequence
  ENSG00000117597_10 (sequence is synthesized)
agctcttcatcagcctcctcgagggtgacagcaagaagaaaatcattgtgagcaacaaaaagaggtttcagggagaatatggatcagatcccgaggagagaccacccaacttgaagaggc

SEQ ID NO: 223026 - DNA, 120 bp, Artificial Sequence
  ENSG00000117597_11 (sequence is synthesized)
ctgaggattatgaagccgtatttgtgggcaatattgatgaccacttcaggattggagtggcaatacttcagagaagcatccgactctatgccccgttttactcctcggatatcctcattg

SEQ ID NO: 223027 - DNA, 120 bp, Artificial Sequence
  ENSG00000117597_12 (sequence is synthesized)
cttcccccctgggcttgaggaccatcattggtggagaaggagagaagaagagagattttgactttctgtcttctatcgagcttctcatcattgatcaagctgacatttacctgatgcaga

SEQ ID NO: 223028 - DNA, 120 bp, Artificial Sequence
  ENSG00000117597_13 (sequence is synthesized)
actgggagcatgtcctgcatttgatgaatcacatgaacctactacccctggactcacatggggtagacttttctcgagtgcggatgtggagcctcaataattggtccaagtactatcgcc

SEQ ID NO: 223029 - DNA, 120 bp, Artificial Sequence
  ENSG00000117597_14 (sequence is synthesized)
agacactgctatttggggcccttcaggatgcccagatcaactcagtgttcaacaagtactgtgtcaacatgcaaggccaggtggccgtgaggaatgtcccaatgacaggctctatcagtc

SEQ ID NO: 223030 - DNA, 120 bp, Artificial Sequence
  ENSG00000117597_15 (sequence is synthesized)
atgtcctggtgcagctcccacatgtcttccagaggatggaagctgaaaacctagcttcagtgattgatgccaggtttaacttttttgtgaacaagattttgccacagtatcgtgatgcag

SEQ ID NO: 223031 - DNA, 120 bp, Artificial Sequence
  ENSG00000117597_16 (sequence is synthesized)
tcatgtctcacacgctcatctatatcccctcctactttgacttcgtgcgtcttcgaaattacttcaagaaggaggaattgaattttacccacatctgcgagtacacgcagaagtctggtg

SEQ ID NO: 223032 - DNA, 120 bp, Artificial Sequence
  ENSG00000117597_17 (sequence is synthesized)
tctccagggccagacacttcttccttcaaggagagaaacagtttctacttttcacagagcgcttccatttctacaaaaggtatacaataaaaggcatcaggaacctgattttctatgaac

SEQ ID NO: 223033 - DNA, 120 bp, Artificial Sequence
  ENSG00000117597_18 (sequence is synthesized)
tgccgacatatccacacttttacagtgaaatctgtaatatgctgagagccaccaacagaggagaagaggccacgtggacctgcactgttctctactccaaatatgatgcccagaggttag

SEQ ID NO: 223034 - DNA, 120 bp, Artificial Sequence
  ENSG00000117597_19 (sequence is synthesized)
ctgccgtggttggtgtggagcgggcggcacagatgctacagtccaacaagaatgtccacctcttcattactggagaaaaatgaaattttgttgggcaggaagtggtatttggcatgatac

SEQ ID NO: 223035 - DNA, 120 bp, Artificial Sequence
  ENSG00000117597_20 (sequence is synthesized)
ataatgtttgattctatgccatttggacccaattctgattacttacagaagaaggactgatacaaagaaagtgcatgaggcaatgtcagtattatctgacatctttcttttcaggtcatg

SEQ ID NO: 223036 - DNA, 120 bp, Artificial Sequence
  ENSG00000117597_21 (sequence is synthesized)
tgtccctgaaaagttaaatgtaaaccagattttggtaaatcccatctttcagaagtgaagagggggctagaaggactctgagaagttggtagaagaaaactcccacttgtgaatattttt

SEQ ID NO: 223037 - DNA, 120 bp, Artificial Sequence
  ENSG00000117597_22 (sequence is synthesized)
gtgagacataaattcttttattacgatttacctctaatttattacacttagtaaattcttccagatttttctatttgtttgacacttccttaaagtaaggaatacacattgcttgcgaga

SEQ ID NO: 223038 - DNA, 120 bp, Artificial Sequence
  ENSG00000117597_23 (sequence is synthesized)
actggttatgagacattggaatacttcttgctgctacatgtcatcttaattttggatggcatgggttttgtaaaacttattctgccccagccaaacttttttgaaaccttaaatagtcta

SEQ ID NO: 223039 - DNA, 120 bp, Artificial Sequence
  ENSG00000117597_24 (sequence is synthesized)
ccttaattcagcctagaagagtacattgatttactgatcttttttcatattcataatactaaatgttttagttttgttcaaatatatgcttaaaatcacgttatttaaaaaacacatcag

SEQ ID NO: 223040 - DNA, 120 bp, Artificial Sequence
  ENSG00000117597_25 (sequence is synthesized)
ctctgtctcaagaagtaattttgttgaaactccatgttaaaatatccatcttcaacagtagtgtcttcataataactagtcattttttcagtcataaacagatgcaaataaaaaggaaat

SEQ ID NO: 223041 - DNA, 120 bp, Artificial Sequence
  ENSG00000117597_26 (sequence is synthesized)
tacacttttaaaaacatttttattttgaaacattctcaaacagaaaaattccaagtacagaacctgaaccatttgagagtgagttgccaacccagtgggcctatcacctttaaatacttt

SEQ ID NO: 223042 - DNA, 120 bp, Artificial Sequence
  ENSG00000117597_27 (sequence is synthesized)
agtatatatttcctgtaaacaattaagggtattgtttgtgattaggaatgccccaccaataaggataatgtgaatatttcagaatccaaaaaaattcgaaacacgtctggtcccaagcat

SEQ ID NO: 223043 - DNA, 120 bp, Artificial Sequence
  ENSG00000117597_28 (sequence is synthesized)
ttcagataagagatattcaactcatcctagtatggactcgtagtttcttcttttattcaatgggttacggtttgttacatcattatttctttagatgcgtaactggtctcaaatatggcc

SEQ ID NO: 223044 - DNA, 120 bp, Artificial Sequence
  ENSG00000117597_29 (sequence is synthesized)
gctgggagcaccttcaggttagcccctgtgtacttttgacatgtcccccatctacttgggcactgctgtattttttgacaatgagacattccaggtttctctactccagccctgcttgct

SEQ ID NO: 223045 - DNA, 120 bp, Artificial Sequence
  ENSG00000117597_30 (sequence is synthesized)
tttagtaggaaattattataaaaggttagattggagtgcttactattgtggtgccactcatcccaggctcagtggtcagaacttgggaattgtgtacatgtatgcacacacatatgtaca

SEQ ID NO: 223046 - DNA, 120 bp, Artificial Sequence
  ENSG00000117597_31 (sequence is synthesized)
cacgttgtctaaatttgcttcacattaatatctaaatttactttcatatccatatattgaaaaccatgaattcacaccagtacctccaattctagtccaacaacacaggattgcttctca

SEQ ID NO: 223047 - DNA, 120 bp, Artificial Sequence
  ENSG00000117597_32 (sequence is synthesized)
ttttctttccatattgataactcctttctcagacagtggctcccattatcctcaatgtaataacccatgattggtacagattttttttatccttgggcacgcttaaaattacttagcaaa

SEQ ID NO: 223048 - DNA, 120 bp, Artificial Sequence
  ENSG00000117597_33 (sequence is synthesized)
aacaaaaagtaaaatcagttttgaagtaatatttctgctaaatatttagacatttttacttctttttcttcagcatggtaagtaaaaccatttattccatatttagatggttttctaaat

SEQ ID NO: 223049 - DNA, 120 bp, Artificial Sequence
  ENSG00000117597_34 (sequence is synthesized)
ttcagaaaatttagttagataaaagccgaccgaacccatgctacaaagaactttttgtatctataggcatgccctgtggttactggcgtaattgtgctgctgtttatcatagatcctgta

SEQ ID NO: 223050 - DNA, 89 bp, Artificial Sequence
  ENSG00000117597_35 (sequence is synthesized)
ctggcatgatcttggcttactgcaatctgtgcctcccgagttcaagcgattctcgtgcctccgcctcccaagtagctgggactacaggc

SEQ ID NO: 223051 - DNA, 120 bp, Artificial Sequence
  ENSG00000117597_36 (sequence is synthesized)
agcctcccaaagtgctggggttacaggcctgagccgccacgcctggccaattacctacatctttttctactgccatattcttttgcctgtgaattgtagttcatctcgtggtttccatta

SEQ ID NO: 223052 - DNA, 120 bp, Artificial Sequence
  ENSG00000117597_37 (sequence is synthesized)
attattactattcacacgactcccaaatctccagcttctctggctctccactcacatgtgagtctggatttcaaatccatgatgtagccccagaaataaccattttattaagcaccccta

SEQ ID NO: 223053 - DNA, 120 bp, Artificial Sequence
  ENSG00000117597_38 (sequence is synthesized)
gtgattttcatgctggcatagagccaaacccagccaactgcttcttgcctgcagagaacactgaggatttcaagtgtgaacaaagtagtgttgctttgttcctggctcagcacctgaaaa

SEQ ID NO: 223054 - DNA, 120 bp, Artificial Sequence
  ENSG00000117597_39 (sequence is synthesized)
gaaggtaagcctctgcagttagccctggctccttagtgcattgcagagtggagtctctgcaatggttttattaaaaggatgccttgaagatctggtctctctcaacacacaataagcgag

SEQ ID NO: 223055 - DNA, 120 bp, Artificial Sequence
  ENSG00000117597_40 (sequence is synthesized)
aagagaggctactgaaatacggatgcgtgagctggaattacacactaccttgatgttaacaaggctcatttgcagcaagcaagtgcctatatagggtctgaaatatagacaaaggatggt

SEQ ID NO: 223056 - DNA, 120 bp, Artificial Sequence
  ENSG00000117597_41 (sequence is synthesized)
cccaatcctggaaacagtggaattaaaaggtatggaaaggaacttacccagaaagtaacacttttaaatgttttttcttttcccatagttaaaacaaccagcttagcacttttctttttg

SEQ ID NO: 223057 - DNA, 120 bp, Artificial Sequence
  ENSG00000117597_42 (sequence is synthesized)
agagagaaaaagctttgaatcgtggatgcttctcacagctggctgcaccacgtgcagtgttcaaaaaacaagaacaagctaatcatagagaaccagcagcagctaaacagccctctgctt

SEQ ID NO: 223058 - DNA, 120 bp, Artificial Sequence
  ENSG00000117597_43 (sequence is synthesized)
gcttccaaagggcttataattgagcacagatggtcctagtggagatggggaatgtgtccctgctgactcctcataccccagaggaccaaggggggctcatgaaggctctcagccctgatt

SEQ ID NO: 223059 - DNA, 120 bp, Artificial Sequence
  ENSG00000117597_44 (sequence is synthesized)
gtgccctcgtgagggcaaggagctatgctgctgaaggaggaaagggaaaggcaggtggggccagaccctattggccatctgaccagccttcccaagcccacgtgagcagatctagggtct

SEQ ID NO: 223060 - DNA, 120 bp, Artificial Sequence
  ENSG00000117597_45 (sequence is synthesized)
caagattacagaaggcctggggtgagggagcaagagttggaagttctttatagttgtctgaagagcctcattgtccaactgcaggggcctgaggtgcccaaagcttcgtggaaaagtaat

SEQ ID NO: 223061 - DNA, 120 bp, Artificial Sequence
  ENSG00000117597_46 (sequence is synthesized)
gtcagtggaatgctcagaagtggctcttttcagggcacggcttctgaggagcgtggggccaccacagctagccctccctccgtctagccatcctctccttccagtccctttcccatcttt

SEQ ID NO: 223062 - DNA, 120 bp, Artificial Sequence
  ENSG00000117597_47 (sequence is synthesized)
tctctcaaaggagcatggtagtgatcttcattaccaaatttctactccacacttattttaaaaagcttttctgaaagcctggctacatagaattctaaacagatttcagtcaacttttaa

SEQ ID NO: 223063 - DNA, 120 bp, Artificial Sequence
  ENSG00000117597_48 (sequence is synthesized)
ttagagtcaatgaatggggagtaaatacacagataatccaaaattgatgtaagcattggaaggggaaagagggaacgcttctttccctctgggcttggtcatttcctcccaagcaaaccc

SEQ ID NO: 223064 - DNA, 120 bp, Artificial Sequence
  ENSG00000117597_49 (sequence is synthesized)
cgcgacgttcagccgtcttcctcctatgccacgtgctctcaccagaactgcagcaaaactgcattttatgtcctgtgtctaaagctaaacacatgttcctgtctacttttgctttgttcc

SEQ ID NO: 223065 - DNA, 120 bp, Artificial Sequence
  ENSG00000117597_50 (sequence is synthesized)
tgtttcccttctgtgaggaccttcccctcctcagatgtggggagttgccgcctccacttgcattacatgtatttcagagtaggtcctaggctccccttacacctctggtcacgttgccat

SEQ ID NO: 223066 - DNA, 120 bp, Artificial Sequence
  ENSG00000117597_51 (sequence is synthesized)
tattcctatggtagataaaggggatgagaaagaacagagctccaggcctttttcaaacaaactggttttctcagtatagccctatgctcaaaaggagtgaggacaggtatgtgactgcca

SEQ ID NO: 223067 - DNA, 120 bp, Artificial Sequence
  ENSG00000117597_52 (sequence is synthesized)
taaggagctgtttgctttgcacagagaaatctaatctttctcctgctgggcagctcagtacagatgtcccctcactgctggaagaaacacctgcccttgcttgttctcctgatggcccct

SEQ ID NO: 223068 - DNA, 120 bp, Artificial Sequence
  ENSG00000117597_53 (sequence is synthesized)
cacagtcaggtgtgggatggcacatttctaggtgctcctcgccgagctgtcatgggcttcagtcttgggcctctgcagctggctgtgaccaggtggaaactgtagccttggctgacccag

SEQ ID NO: 223069 - DNA, 120 bp, Artificial Sequence
  ENSG00000117597_54 (sequence is synthesized)
agaaggaaaggaggcagtctgccgcttggctgatttaggagttgtgctgaattcctgcccatctgttctcccagctgagccaaggccaaagctgtctaccttttgccaacctaaggaatg

SEQ ID NO: 223070 - DNA, 120 bp, Artificial Sequence
  ENSG00000117597_55 (sequence is synthesized)
acacagagcatggagcaccatcactgaaacatctgccccagtgccctgccaccttcgtcctcactgacctctgcagcctctctcatctgccagttttgattccgcaaggagaggtggccc

SEQ ID NO: 223071 - DNA, 120 bp, Artificial Sequence
  ENSG00000117597_56 (sequence is synthesized)
tgggctcacagctggtgtttgtccacagatgttcatgggtttctttgtgttctctcattttttcaaagctgggtgttgggaccaacatcaccactgacattctgtggctctaaacaagtc

SEQ ID NO: 223072 - DNA, 120 bp, Artificial Sequence
  ENSG00000117597_57 (sequence is synthesized)
ctcacgaccacttctcagttttctcatctttatgaagtatggagtaatccccactagccttatagagggactgtgtgagaagggaagagactgctattgtttgccctatatccacctact

SEQ ID NO: 223073 - DNA, 120 bp, Artificial Sequence
  ENSG00000117597_58 (sequence is synthesized)
tccctagttccagaacgctggactttaatgagataacaaagtacctagtaaaaacactgcatcattttccatcccccaccccttgcagtaaaatgtggcccatgagacagaagcactaac

SEQ ID NO: 223074 - DNA, 120 bp, Artificial Sequence
  ENSG00000117597_59 (sequence is synthesized)
tactgagcaggacttctaggggagttctttaaaactcagaggagcaccacttttaccttctgctcttccctttttcctgcctggaacgcagaagtgatggctgaagctcctgaggctata

SEQ ID NO: 223075 - DNA, 120 bp, Artificial Sequence
  ENSG00000117597_60 (sequence is synthesized)
agctctgtacgtaggagagtggtgaagaaaggagcttggttctgcaaggatgttgtagagctgccataccagtcctgcatggtattcctgtgcactactgttacgtgaacacacaaacac

SEQ ID NO: 223076 - DNA, 120 bp, Artificial Sequence
  ENSG00000117597_61 (sequence is synthesized)
ctaatttgtttaagccattaggccaggcctctattagccattcctgactgatacagaagacaaaaatggcatcacagactcctgaactccaaagacactgcctattctttcgtctgttct

SEQ ID NO: 223077 - DNA, 120 bp, Artificial Sequence
  ENSG00000117597_62 (sequence is synthesized)
tggcaagcaccaacattgagactgtacttcagggttgatgctggccatttggtggcgtgaggagtgggcactcacatgtctctgctagcagttctgacgtgtccattccacactggatcc

SEQ ID NO: 223078 - DNA, 120 bp, Artificial Sequence
  ENSG00000117597_63 (sequence is synthesized)
atagaacgagggaacacaagtgtcttctcataagatttatagaaacagtgatcgttgcagaaaaataattagcaagagaacagacttcagctctctgaaggctgatgaccacctgtttct

SEQ ID NO: 223079 - DNA, 120 bp, Artificial Sequence
  ENSG00000117597_64 (sequence is synthesized)
catctcttctagtgtatgtcaaagctaaattaggtcaaataggaaataagtcagaatccccaattcgatagaaacttacaggtcttgtgatctaatctgccacttgatccgtgaattacc

SEQ ID NO: 223080 - DNA, 120 bp, Artificial Sequence
  ENSG00000117597_65 (sequence is synthesized)
tataggtcatccctaagaggtggcctccagcttctgcttgaattccttcaaggatggggtgctcattgtggcttttctaatcatctctgattgttagaaacactgtgaaacttttatcca

SEQ ID NO: 223081 - DNA, 120 bp, Artificial Sequence
  ENSG00000117597_66 (sequence is synthesized)
tcagtcctgtttctgaagctgtacggtacaaattttttttttccccacttaaggctcaactattggaatacatctaccatgtctcctatgaaacttgcttctccaggccaatcatcctta

SEQ ID NO: 223082 - DNA, 120 bp, Artificial Sequence
  ENSG00000117597_67 (sequence is synthesized)
cttccttaaacttttttttttcctgaaaagttattcttttaatcttattaaaaaagcaacccatgcccattccacaaatacaagtgaaatagtgaaaaacaaaaatcaaactacatctat

SEQ ID NO: 223083 - DNA, 120 bp, Artificial Sequence
  ENSG00000117597_68 (sequence is synthesized)
ttggtgatcattattaatgtcttatgtttcctcccagattgttttctgcatgaataataaccaacaatgtgtgtgtatgtatatatatgcttttgcattaaaaggtggttttgaaggtaa

SEQ ID NO: 223084 - DNA, 120 bp, Artificial Sequence
  ENSG00000117597_69 (sequence is synthesized)
actgctctacatggagctttttagctccacttcctcagcagtttcacctcaagatcctgttccttcctcttaccccactaaggctgctgttgctgtctgcacaggtactgatagtggtgc

SEQ ID NO: 223085 - DNA, 120 bp, Artificial Sequence
  ENSG00000117597_70 (sequence is synthesized)
gtcttgtttcctcagtatcttcatgagcactgtttattgtttgggtcctgaggtagaaggaggcgatagcttctggtcaagaaggggatggctgtccacctaacgctcttgttgactact

SEQ ID NO: 223086 - DNA, 120 bp, Artificial Sequence
  ENSG00000117597_71 (sequence is synthesized)
ggcaggtggccgtgaggaatgtcccaatgacaggctctatcagtcatgtcctggtgcagctcccacatgtcttccagaggatggaagctgaaaacctagcttcagtgattgatgccaggt

SEQ ID NO: 223087 - DNA, 120 bp, Artificial Sequence
  ENSG00000117597_72 (sequence is synthesized)
aacccactcctcccagcaggcccctggggaccacatagagagatttgacttgggcatacaaacctagaattggattccattttgcttttattgataactaccaaatcagttgagataatt

SEQ ID NO: 223088 - DNA, 120 bp, Artificial Sequence
  ENSG00000117597_73 (sequence is synthesized)
gaacttaattatgtcatttgtcagaggaggaaactgaagcacagagagaaatagtgactttggcctaggtctcataactagttagtagcagggttattactataaatcaggactctttca

SEQ ID NO: 223089 - DNA, 120 bp, Artificial Sequence
  ENSG00000117597_74 (sequence is synthesized)
ctcttgactgtggcattttaaaattatacagctttatgctacaaagtgtctcatgtcagcaagttaattgtaagcccctcagggaaagaactatttttctaattgtataatttccccctt

SEQ ID NO: 223090 - DNA, 120 bp, Artificial Sequence
  ENSG00000117597_75 (sequence is synthesized)
tttcttcattgtgtttagttaggggaccccaaagaagcttagtgaggcttagtatatggtagatgttcagtgattatttgttgactgttggactgagtgactgagtgactgactgactga

SEQ ID NO: 223091 - DNA, 120 bp, Artificial Sequence
  ENSG00000117597_76 (sequence is synthesized)
tgtacttcctagagtaattctctgggatataatggtattacatctgttttttacaatgaatagtgttgacacttatttttttagtgtgcttatcaagttttatccttacataatctcttt

SEQ ID NO: 223092 - DNA, 120 bp, Artificial Sequence
  ENSG00000117597_77 (sequence is synthesized)
gagaggaggtaaatcatattggcctctggggaggtaatcttttaacacgagattgtaatttgctcagggtcacacagttaagagacaccataagcttagctctagacattaattttgccc

SEQ ID NO: 223093 - DNA, 120 bp, Artificial Sequence
  ENSG00000117597_78 (sequence is synthesized)
agagcgcttccatttctacaaaaggtaaagtggtgccaggtttcaagcctcctctctgaaggggaggtgcaggacaaatcatggcctgctctgaatgcatggcaggcttcgtggtgttga

SEQ ID NO: 223094 - DNA, 120 bp, Artificial Sequence
  ENSG00000117597_79 (sequence is synthesized)
gatcatccctcactctcgcactcttacaaagtagccagagagtttttggtttggacagactcttcttggttggttagttggttttctcccaaaatgggcattgctgaagaaggatgtaga

SEQ ID NO: 223095 - DNA, 120 bp, Artificial Sequence
  ENSG00000117597_80 (sequence is synthesized)
aaccaaagcataccctgtctatagacctggcatgtagctgtggttatacactgcaagaaggacattacaggacaactcaaatgaatacaaggaaggggagggaccttccctgtattcact

SEQ ID NO: 223096 - DNA, 120 bp, Artificial Sequence
  ENSG00000117597_81 (sequence is synthesized)
tgagttgtccctgtctagactttttccctctgtttgccctcagtgcacagacaaaagcattgagaactgtgttttctggggagatggaggctgagtacagtgtcagtttccagacagttg

SEQ ID NO: 223097 - DNA, 120 bp, Artificial Sequence
  ENSG00000117597_82 (sequence is synthesized)
cggtgttcctgaggtatgcacagatactccctaccaaggagaactaggaccgtgggctccttgacatttgcaggaggtaaaagggtaagggcttcaagttgaatgttgaagggtttcagc

SEQ ID NO: 223098 - DNA, 120 bp, Artificial Sequence
  ENSG00000117597_83 (sequence is synthesized)
gaatgttgaagggtttcagcgtttgcttagatttcctaccaggtgactttgacaaaataagttgattggtcttcatgttatttttttaaaaactcaggccaggtgcagtggctcacacct

SEQ ID NO: 223099 - DNA, 70 bp, Artificial Sequence
  ENSG00000117597_84 (sequence is synthesized)
aaggcaggcgaatcacctgtggtcaggagtaaaaaattagttgagcgtggtggtgtgtgcctataatccc

SEQ ID NO: 223100 - DNA, 80 bp, Artificial Sequence
  ENSG00000117598_0 (sequence is synthesized)
agcctgccggcgcctcgaagcccggacctgcctccgcctcttcctccagcggctccatcccgcctcccgtgcctcgtcct

SEQ ID NO: 223101 - DNA, 120 bp, Artificial Sequence
  ENSG00000117598_1 (sequence is synthesized)
cggaccggggagggggcccaccgcgtcgaccgcccgctcggctcggctcggcccggcccgggaggcgtgcatgcccctgctgcccgcggcgctcaccagcagcatgctctatttccagat

SEQ ID NO: 223102 - DNA, 120 bp, Artificial Sequence
  ENSG00000117598_2 (sequence is synthesized)
ggtgatcatggcagggacggtgatgctggcgtactacttcgagtatacggacacgttcaccgtgaacgtgcagggcttcttctgccacgacagcgcctaccgcaaaccctacccgggccc

SEQ ID NO: 223103 - DNA, 120 bp, Artificial Sequence
  ENSG00000117598_3 (sequence is synthesized)
ggaggacagcagcgccgtgccccccgtgctcctctactcgctggccgccggggtccccgtgctcgtgataatagttggagaaactgctgtcttttgcctacaactagccacaagggattt

SEQ ID NO: 223104 - DNA, 120 bp, Artificial Sequence
  ENSG00000117598_4 (sequence is synthesized)
tgaaaaccaggaaaaaactattttaactggagactgttgctatataaacccgctggtgcgccgaactgtccgatttcttggaatttatacatttggactgtttgctacagatatctttgt

SEQ ID NO: 223105 - DNA, 120 bp, Artificial Sequence
  ENSG00000117598_5 (sequence is synthesized)
aaatgctggacaagtagtcacaggaaatctggccccacatttccttgccctgtgtaagcccaattatacagcacttggatgtcagcagtatacacaattcatcagtggggaagaggcctg

SEQ ID NO: 223106 - DNA, 120 bp, Artificial Sequence
  ENSG00000117598_6 (sequence is synthesized)
tactggcaacccagatctcatcatgagagcccgaaaaacctttccatccaaagaagcagctctcagtgtctatgcagctatgtatctgaccatgtacatcaccaacacaatcaaagccaa

SEQ ID NO: 223107 - DNA, 120 bp, Artificial Sequence
  ENSG00000117598_7 (sequence is synthesized)
gggaaccagacttgctaagccagttctatgcttgggcttaatgtgtttggcatttcttactggactcaacagagtagcagaatatcgaaatcattggtcagatgttatagcaggctttct

SEQ ID NO: 223108 - DNA, 120 bp, Artificial Sequence
  ENSG00000117598_8 (sequence is synthesized)
ggttggaatatctatagcagtatttctggttgtgtgcgtggtgaataatttcaaagggagacaagcagaaaatgagcatatacacatggataatctggcacagatgccaatgatcagcat

SEQ ID NO: 223109 - DNA, 120 bp, Artificial Sequence
  ENSG00000117598_9 (sequence is synthesized)
tcctcgagtagaaagtcctttggaaaaggtaacatctgtacagaaccacatcactgccttcgcagaagtcacatgatatcgaagcagatggtttttcactgcattggacatcatcccttt

SEQ ID NO: 223110 - DNA, 120 bp, Artificial Sequence
  ENSG00000117598_10 (sequence is synthesized)
ttaccatccattcataacacccaaagtttgtttgattgcaagtgaagtttataaagttgtttaataatttttataattttaaaatcaatgtcaacctatctgtttcccccactagactgt

SEQ ID NO: 223111 - DNA, 120 bp, Artificial Sequence
  ENSG00000117598_11 (sequence is synthesized)
gagctcctcgagggcaggattgtctttttttttctgtgtccccagcacttacaacaaagcctagcacaaagtaggtgttcaacaaaaatgtgatgaccaaatgaacaaaattcttaaata

SEQ ID NO: 223112 - DNA, 120 bp, Artificial Sequence
  ENSG00000117598_12 (sequence is synthesized)
aaacattcactttagtttctcacagaatcattgcaattatgttaaaagaaatctctacataaatcgtatttgtgtatgaaaaccttctattttgggctagttatttttttaatcttcata

SEQ ID NO: 223113 - DNA, 120 bp, Artificial Sequence
  ENSG00000117598_13 (sequence is synthesized)
tatctattcagcagtatgccatatttaatttgaagtggactttgaaagtcatgggggtttttattttgttattcagcatgacattatttccattctaacatttcagtgtgtgaaattact

SEQ ID NO: 223114 - DNA, 120 bp, Artificial Sequence
  ENSG00000117598_14 (sequence is synthesized)
ttatttttagaaagtatgttctatagtaaaataatgtttccacattatattatgttatatttcacttaaaatactattcatactatacattctaagactggtgcttctgcttttgaaggg

SEQ ID NO: 223115 - DNA, 120 bp, Artificial Sequence
  ENSG00000117598_15 (sequence is synthesized)
gaaaatgccaatttttactgtaataagtaatgtatcataattaaaaattatttatttggacttcttctcctgacaattgtggcttaattcatgacttgtttttgaatgcaggcagtattt

SEQ ID NO: 223116 - DNA, 120 bp, Artificial Sequence
  ENSG00000117598_16 (sequence is synthesized)
cagcactggtaccttattattgagtaatttcccatgggtagcagtgtctcaagagtggtcaaaagctccactcttaggcttttttactactaaagattccacataatttaaatgggaaag

SEQ ID NO: 223117 - DNA, 120 bp, Artificial Sequence
  ENSG00000117598_17 (sequence is synthesized)
aactataccctgacacataatttaaattatataaatgctagaaatatggttaatgtattttactttgcatttgtgtagtactttatagtttacaaagcatatttacaccaattattttat

SEQ ID NO: 223118 - DNA, 120 bp, Artificial Sequence
  ENSG00000117598_18 (sequence is synthesized)
gtaatcctcataataacctggtataaacatgaagggtatggctttatttttatagataagaaaaatgaagccaagacagggtaaataacatgccaaatcacaaactagtaagagacatag

SEQ ID NO: 223119 - DNA, 120 bp, Artificial Sequence
  ENSG00000117598_19 (sequence is synthesized)
ttgaagcttaaattcaagttttctggccctgaactcatattcctttctaatatagcacagctgtcatctcattttggacactgaggcctttcagagctcagtagaatcctgggcaactac

SEQ ID NO: 223120 - DNA, 120 bp, Artificial Sequence
  ENSG00000117598_20 (sequence is synthesized)
ctacctatggttcaaaaaataaagaaatgccagaatacaaatatgaaagctctgctgtattttaaatgtttatgttttaagaatgaacacttttcaaatataaaactatataataattat

SEQ ID NO: 223121 - DNA, 120 bp, Artificial Sequence
  ENSG00000117598_21 (sequence is synthesized)
cagttttaagataatatcaagagtctagatgtgaggctttttgtgaaagagaagcctaaattcagcatctccccttccaccctcacccccaggtcccagcctcccactcagcagagtgcc

SEQ ID NO: 223122 - DNA, 120 bp, Artificial Sequence
  ENSG00000117598_22 (sequence is synthesized)
caagggacataccttacatttagcatgtagaattccagattacaatcgccataatataaggaaggtgagctcctcaacaataactttgcaataattaaaactaccctaagtaactttggc

SEQ ID NO: 223123 - DNA, 120 bp, Artificial Sequence
  ENSG00000117598_23 (sequence is synthesized)
ttatatggcaaagtaactttggcagtaattgactgaaatgaatctttctaaactttacagtactaaagaaagcaaacttttaatttcctctgtaatttcaacagagatcagcaaataaat

SEQ ID NO: 223124 - DNA, 120 bp, Artificial Sequence
  ENSG00000117598_24 (sequence is synthesized)
ataaccaaagattgtccattactccccaaatagatgttatttgcccatttctatcactgtggaagctaaaacacttctactagggccaaaaagagaaaagaaaagaaaatttctactaat

SEQ ID NO: 223125 - DNA, 120 bp, Artificial Sequence
  ENSG00000117598_25 (sequence is synthesized)
ttcagacctctagagcaattcagtcctgttggaaatttagaacatgaagaaactttgaatgtcttgaccctttttaaagattttttaggcaataacagtaatagggaattcacttattga

SEQ ID NO: 223126 - DNA, 120 bp, Artificial Sequence
  ENSG00000117598_26 (sequence is synthesized)
gaatgaaagtgaaggggatgatcctaatgtcttagaaagctagattactagtaaggcttccagacttctatcagttctattgattctacatcagacttccaagcagccaagcaggaatgt

SEQ ID NO: 223127 - DNA, 120 bp, Artificial Sequence
  ENSG00000117598_27 (sequence is synthesized)
ttttcctgttggaagccttagccatatattcttatgtcaaggttgcttctttgcaccttgctaaacctgatacgaatgcaggagttttaaattcttcaaaaactcagatttaacccagaa

SEQ ID NO: 223128 - DNA, 120 bp, Artificial Sequence
  ENSG00000117598_28 (sequence is synthesized)
ccagagtaaagtcacctctactatttacacatcataggctcaagattgtacagtgagtgatgctgtcatgaagaaaattcagatgaaaaaggcaagatacatgtgaataaggcaaaagcc

SEQ ID NO: 223129 - DNA, 120 bp, Artificial Sequence
  ENSG00000117598_29 (sequence is synthesized)
agaaaatagcccttattcatgatgctgttactgagaataatgaaaatcatatttcagaaaatattaccatgtaaatatgtacatatgtagtctagtaaaagcaggcaaacacatatcttt

SEQ ID NO: 223130 - DNA, 120 bp, Artificial Sequence
  ENSG00000117598_30 (sequence is synthesized)
ctgataaaaacatctcctttttattctacttacttggggcccaggtcagtataatttagtcaacttgaaaatttcggtagtctctgtttgcatggcagaaattctgcacatgttttatct

SEQ ID NO: 223131 - DNA, 120 bp, Artificial Sequence
  ENSG00000117598_31 (sequence is synthesized)
gattcctgtgataacttaaaaggctcttttatgttaaaagagaggtgaatcttctttgacagactttgtattttccacttctaactgggcctctcttttctcaggatctatcctagccaa

SEQ ID NO: 223132 - DNA, 120 bp, Artificial Sequence
  ENSG00000117598_32 (sequence is synthesized)
atatctcagttacatttaccatacagtttcctttgtgaaagaacagtaggggaggaaataattctctgctgtgtattgtatttttcaaataaaaatttaaaaattcaattgaaaactgaa

SEQ ID NO: 223133 - DNA, 80 bp, Artificial Sequence
  ENSG00000117598_33 (sequence is synthesized)
ccagcgccgctgcttctcgaatggtctcgtgcaggggcgcagcggccgctgcccgtcgcccgggactccccgccctccct

SEQ ID NO: 223134 - DNA, 120 bp, Artificial Sequence
  ENSG00000117598_34 (sequence is synthesized)
ttcacaggaaaggtcctttaaagactgtcttgccaggctcttcagctggataatgggaataagccactgtgaacaccttcaattaagaaccacatcactgccttcgcagaagtcacatga

SEQ ID NO: 223135 - DNA, 120 bp, Artificial Sequence
  ENSG00000117598_35 (sequence is synthesized)
tgccccccgtgctcctctactcgctggccgccggggtccccgtgctcgtggcaaaacacagtatggtgacactgtcctgcttcatgaacacagtaaatgttgctgagagatcatggcatt

SEQ ID NO: 223136 - DNA, 120 bp, Artificial Sequence
  ENSG00000117598_36 (sequence is synthesized)
ttccaattgtatgtagtatatatgatgtagtatactacatggttgtgcattatagttaattacatacacacatattttggctgtcaaaagattataaattcctatagactagcatatttg

SEQ ID NO: 223137 - DNA, 120 bp, Artificial Sequence
  ENSG00000117598_37 (sequence is synthesized)
tcttgcgtatttttgcttcttgctcaccacatcctgactaccataatgcctttaaaatggtagatataaataacgctaatatttgtgtatttaaaaaaataaaattaatagaaattaaaa

SEQ ID NO: 223138 - DNA, 120 bp, Artificial Sequence
  ENSG00000117600_0 (sequence is synthesized)
gagctgtcattcctgggtagcaacaagctgtcagttaatgcctacctcagcctacttttcagtatgggatccaagatctcatttcgtggaggtaggggttggttttcttgctatgggtca

SEQ ID NO: 223139 - DNA, 120 bp, Artificial Sequence
  ENSG00000117600_1 (sequence is synthesized)
gcgcgctggagcagggcttctgatccttagcattctttaatagcattcctagagtgacctaggaggctccccaggaggagactaggtggcttagctcctcagcctaactactgcagaaac

SEQ ID NO: 223140 - DNA, 120 bp, Artificial Sequence
  ENSG00000117600_2 (sequence is synthesized)
caggagtgcgtcctccttttcggattcttgacgtcaagctccgacagccttggagcgtcgcaagggcggtagagagctgagggagggtgacagggaggggaagccattgcagcaacagct

SEQ ID NO: 223141 - DNA, 120 bp, Artificial Sequence
  ENSG00000117600_3 (sequence is synthesized)
tggaggagggagctggacgtcgtctctcgccagaaaaacggggagcaggagccagactaggggaggaagaggactggcccgctcagggaatagctgggttgctgcaaaaaggggcgggga

SEQ ID NO: 223142 - DNA, 120 bp, Artificial Sequence
  ENSG00000117600_4 (sequence is synthesized)
gaaggcgggggcgctgcatgcagcgcgctggctccagcggtggccgcggggaatgtgacatcagcggcgccgggcgcttggggctggaggaggcagctcgcctcagctgcgctgtgcaca

SEQ ID NO: 223143 - DNA, 120 bp, Artificial Sequence
  ENSG00000117600_5 (sequence is synthesized)
cctcgcccgggggaggacgcagacccgggcaggcggcagggatgtcggcgaaggagaggccaaagggcaaagtgatcaaggacagcgtcaccctcctgccctgcttttatttcgtcgagt

SEQ ID NO: 223144 - DNA, 120 bp, Artificial Sequence
  ENSG00000117600_6 (sequence is synthesized)
tgcctatattggcatcatcggtggttagcctctatttcctcgaactcacagatgtcttcaaacctgtgcactctggatttagctgctatgaccggagtcttagcatgccgtacattgaac

SEQ ID NO: 223145 - DNA, 120 bp, Artificial Sequence
  ENSG00000117600_7 (sequence is synthesized)
caacccaggaggcaattccattcctcatgttgcttagcttggcttttgctggacctgcaattacgattatggtaggagaaggaattctctactgttgcctctccaaaagaagaaatgggg

SEQ ID NO: 223146 - DNA, 120 bp, Artificial Sequence
  ENSG00000117600_8 (sequence is synthesized)
tcggactagagcccaacattaatgctggaggctgcaacttcaattccttcctcagacgagctgtcagattcgttggtgttcatgtatttggattatgctctacagctctcattacagata

SEQ ID NO: 223147 - DNA, 120 bp, Artificial Sequence
  ENSG00000117600_9 (sequence is synthesized)
tcatacagctgtccacaggatatcaagcaccttactttctgactgtgtgcaaaccaaactatacctctctgaatgtatcttgcaaagaaaattcctacattgtggaagatatttgctcag

SEQ ID NO: 223148 - DNA, 120 bp, Artificial Sequence
  ENSG00000117600_10 (sequence is synthesized)
gatctgacctcacagttatcaacagtggcagaaagtccttcccttctcaacatgcaacccttgctgcctttgcagctgtgtatgtttcgatgtacttcaattccacattaacggattcct

SEQ ID NO: 223149 - DNA, 120 bp, Artificial Sequence
  ENSG00000117600_11 (sequence is synthesized)
ctaagcttctgaaacctctcttggtcttcacatttatcatctgtggaataatctgcgggctaacacggataactcagtataagaaccacccagttgatgtctattgtggctttttaatag

SEQ ID NO: 223150 - DNA, 120 bp, Artificial Sequence
  ENSG00000117600_12 (sequence is synthesized)
gaggaggaattgcactgtacttgggcttgtatgctgtggggaatttcctgcccagtgatgagagtatgtttcagcacagagacgccctcaggtctctgacagacctcaatcaagatccca

SEQ ID NO: 223151 - DNA, 120 bp, Artificial Sequence
  ENSG00000117600_13 (sequence is synthesized)
accgacttttatctgctaaaaatggtagcagcagtgatggaattgctcatacagaaggcatcctcaaccgaaaccacagagatgctagctctctgacaaatctcaaaagagcaaatgctg

SEQ ID NO: 223152 - DNA, 120 bp, Artificial Sequence
  ENSG00000117600_14 (sequence is synthesized)
atgtggaaatcattactccacggagccccatggggaaggagaacatggttaccttcagcaataccttgccgcgagccaataccccatctgtagaagaccctgtcagaagaaatgcgagca

SEQ ID NO: 223153 - DNA, 120 bp, Artificial Sequence
  ENSG00000117600_15 (sequence is synthesized)
ttcatgcctctatggattccgctcgatcaaagcagctcctcacccagtggaagaataagaatgaaagtcgaaagttgtccttgcaagttatagagcctgagcctgggcagtcaccaccca

SEQ ID NO: 223154 - DNA, 120 bp, Artificial Sequence
  ENSG00000117600_16 (sequence is synthesized)
gatccatagaaatgaggtcaagctcagagccatcgagggtaggggtgaatggagaccaccatggtcctggcaatcagtacctcaaaatccagcctggcgctgtccccggatgtaacaaca

SEQ ID NO: 223155 - DNA, 120 bp, Artificial Sequence
  ENSG00000117600_17 (sequence is synthesized)
gcatgcctggagggccaagagtgtccattcagtcccgtcctgggtcctcacagttggtgcacatccctgaggagactcaggaaaacataagcacctcccccaaaagcagctctgctcggg

SEQ ID NO: 223156 - DNA, 120 bp, Artificial Sequence
  ENSG00000117600_18 (sequence is synthesized)
ccaagtggttaaaagctgctgaaaagactgtggcctgtaacagaagcaacagccagccccgaatcatgcaagtcatagccatgtccaagcagcagggtgtcctccaaagcagccccaaga

SEQ ID NO: 223157 - DNA, 120 bp, Artificial Sequence
  ENSG00000117600_19 (sequence is synthesized)
acactgaaggcagcacggtctcctgcactggctccatccgctataaaaccttgacagaccatgagcccagtgggatagtgagggttgaggctcacccagagaacaacaggcccatcatac

SEQ ID NO: 223158 - DNA, 120 bp, Artificial Sequence
  ENSG00000117600_20 (sequence is synthesized)
agatcccgtccactgaaggtgaaggcagtggctcctggaagtggaaagcccctgaaaagggcagccttcgccaaacttacgagctcaacgatctcaacagggactcagaaagctgtgagt

SEQ ID NO: 223159 - DNA, 120 bp, Artificial Sequence
  ENSG00000117600_21 (sequence is synthesized)
ctctgaaagacagctttggttctggagatcgcaagagaagcaacattgatagcaatgagcatcaccaccacggaattaccaccatccgcgtcaccccagtagagggcagcgaaattggct

SEQ ID NO: 223160 - DNA, 120 bp, Artificial Sequence
  ENSG00000117600_22 (sequence is synthesized)
gaaaacactagaaatatcttctacaaaggaacctcccccacacgggcttataaggattgagtgatgtccattccatcattagggctactcgcaaaagaccatatgttgattctacctgtg

SEQ ID NO: 223161 - DNA, 120 bp, Artificial Sequence
  ENSG00000117600_23 (sequence is synthesized)
ttctgttccagcgaattgggaagtctcaccaagctagattgtctaccatcagcccagaactctgtaacttttcagaactgctatactcaaacttgcagatctcacatcaaggagagggaa

SEQ ID NO: 223162 - DNA, 120 bp, Artificial Sequence
  ENSG00000117600_24 (sequence is synthesized)
aagcacaatgcaagaacctaactaacgtgatgatatgaagagttttcttaagacctgtcgtcaaacttaaaaggttttgcagagggcagtatcaaaagaaagtggttttcttcaaatgta

SEQ ID NO: 223163 - DNA, 120 bp, Artificial Sequence
  ENSG00000117600_25 (sequence is synthesized)
tactattttacttcctgaatgtgccaactttggggatttttctttatagtgagctgtgggaacccagaacacacacgttttccctacagcagaggccatgcagtattatatattcatttt

SEQ ID NO: 223164 - DNA, 120 bp, Artificial Sequence
  ENSG00000117600_26 (sequence is synthesized)
aatctgcacctacagctcaatacgggtggtgctgattattatagtacatataccatgtaaactctcaaactctatttagctgtgaaatagtggtgtgcaattccttgttaaagaaatgct

SEQ ID NO: 223165 - DNA, 120 bp, Artificial Sequence
  ENSG00000117600_27 (sequence is synthesized)
tgctactttattaagaagatgctggctgctttgtgttagaataggacaccccgcagcttctctgtagtggctctgtcacagtcaaaaaatgaaaaggtttttgtgcgtttcttcaaaatt

SEQ ID NO: 223166 - DNA, 120 bp, Artificial Sequence
  ENSG00000117600_28 (sequence is synthesized)
ctgctttcttcaacatcaaaaattgtgtagaaatattttcagtgaaagggaataactagtacttttctgcatagtttttcttctgcttactttttatttaagtataggtactgctaatga

SEQ ID NO: 223167 - DNA, 120 bp, Artificial Sequence
  ENSG00000117600_29 (sequence is synthesized)
atctgttttcttagtgagtaaatttgcataattttataaatattattttagagaatcttttgaaattgttgtgatcatattttgctttctatggcttctccttaacttattgattaattt

SEQ ID NO: 223168 - DNA, 120 bp, Artificial Sequence
  ENSG00000117600_30 (sequence is synthesized)
tttgaagttatagatatgttctcctattttaaaagcaaaaataacaattgacattccttgagcaaaatatactgctgtgaatttgcaaacaagaaatctgagccaaaacttgacattgtg

SEQ ID NO: 223169 - DNA, 120 bp, Artificial Sequence
  ENSG00000117600_31 (sequence is synthesized)
ggttacattgccagaaatgttggtcaagtttgcccttagatgtctacaactagctggcataggttgccatcttaacaagtaatctaaaagtcccattcggttctacattattaacttttt

SEQ ID NO: 223170 - DNA, 120 bp, Artificial Sequence
  ENSG00000117600_32 (sequence is synthesized)
ttttctatatcctgatgaccagtaaattagagccacactggttaagtttgactcgtctctaaaacgtttttgttaattggacaccaagaggaagaatctgaaaaaaaaatgcatgttggt

SEQ ID NO: 223171 - DNA, 120 bp, Artificial Sequence
  ENSG00000117600_33 (sequence is synthesized)
aagtaaaagtatctcacggtacaaattaagaatgactttcttcaaaatatctgaataggtgcagttttagtttaacatgcaaacaaccattgttgctacctatcctgaatcaagccttga

SEQ ID NO: 223172 - DNA, 120 bp, Artificial Sequence
  ENSG00000117600_34 (sequence is synthesized)
gcctaaatcaaagcaaaccaataccattgataagaagaagataaaaacaaaatattttggagtgttttccaacttaaagtatgaagacatactcagttcttggaacttagtattaaacct

SEQ ID NO: 223173 - DNA, 120 bp, Artificial Sequence
  ENSG00000117600_35 (sequence is synthesized)
tttttatgccatttcataagaattccgatatatacttgatgattgccaaggggatgaaaggaaacaacagagatggttgatctgatcttagctcactttccaataacagaaggagttgtt

SEQ ID NO: 223174 - DNA, 120 bp, Artificial Sequence
  ENSG00000117600_36 (sequence is synthesized)
tacagatgaatagtatcacatcattatcaatttccacatgaaaaaggtggagctttctagaaaaaccaacctctaaggcattaggaatttagctgaaaccagcagaattgaaaactctgg

SEQ ID NO: 223175 - DNA, 120 bp, Artificial Sequence
  ENSG00000117600_37 (sequence is synthesized)
caataaaacatggactcaaccatatcccttctggcaatttccttctcagagaggggagtgggaataaaatgttgccttccccacttctcaccaccaccgccatcatgacgctcatactgg

SEQ ID NO: 223176 - DNA, 120 bp, Artificial Sequence
  ENSG00000117600_38 (sequence is synthesized)
cttttgcctgtttgtagaggaaaaggtgggctggttttagtactctgaaggacaaaaacaagcaaacaaaaacccctgctgcagcatttcaggtgcagtatgatatttcctaatctttcc

SEQ ID NO: 223177 - DNA, 120 bp, Artificial Sequence
  ENSG00000117600_39 (sequence is synthesized)
tatttcttaacaaaagattttaaagtacttctctagtcattgaagtttttttttctttacataaatattgatatattctttttctactcaaagtgccaaaggctacagtttttaatgact

SEQ ID NO: 223178 - DNA, 120 bp, Artificial Sequence
  ENSG00000117600_40 (sequence is synthesized)
taacaaattgtaccacattgttaaggacatataatgatagacactagaactcagacctctgcatgtatatttgataacatgtcttttgtaaaacaaaaattacaaaaaaatttgtttaca

SEQ ID NO: 223179 - DNA, 120 bp, Artificial Sequence
  ENSG00000117600_41 (sequence is synthesized)
ttccactggtaccttaatttaaaataaatcagactaaaaggtggtatctcttcttagtgttctatttatcttatttgctaatgggagcacttcttcctttgttaggctgtgctttactga

SEQ ID NO: 223180 - DNA, 120 bp, Artificial Sequence
  ENSG00000117600_42 (sequence is synthesized)
gagcacttcttcctttgttaggctgtgctttactgataaaaccaagtattgaataaagagagttaattatctttttaaagtaaataaaattatgaaaatatatatagtatatataaagta

SEQ ID NO: 223181 - DNA, 120 bp, Artificial Sequence
  ENSG00000117600_43 (sequence is synthesized)
ctgataaagtttgtaaagtgctataaatgtattttgttaagtacagataaaagctattgtgtgagtatattgtgctaaaatcatagaaataaagattagatttcttcatcaaaattggaa

SEQ ID NO: 223182 - DNA, 120 bp, Artificial Sequence
  ENSG00000117600_44 (sequence is synthesized)
cttaagtatctgtttagaagtttaggaattttctatactgtcttcttgaaatcaacttagagaaaatgaacacaatagattttaagatcttaattcactaatgtttaatgaatatgtttg

SEQ ID NO: 223183 - DNA, 120 bp, Artificial Sequence
  ENSG00000117601_0 (sequence is synthesized)
tctgccccaccctgtcctctggaacctctgcgagatttagaggaaagaaccagttttcaggcggattgcctcagatcacactatctccacttgcccagccctgtggaagattagcggcca

SEQ ID NO: 223184 - DNA, 120 bp, Artificial Sequence
  ENSG00000117601_1 (sequence is synthesized)
tgtattccaatgtgataggaactgtaacctctggaaaaaggaaggtttatcttttgtccttgctgctcattggcttctgggactgcgtgacctgtcacgggagccctgtggacatctgca

SEQ ID NO: 223185 - DNA, 120 bp, Artificial Sequence
  ENSG00000117601_2 (sequence is synthesized)
cagccaagccgcgggacattcccatgaatcccatgtgcatttaccgctccccggagaagaaggcaactgaggatgagggctcagaacagaagatcccggaggccaccaaccggcgtgtct

SEQ ID NO: 223186 - DNA, 120 bp, Artificial Sequence
  ENSG00000117601_3 (sequence is synthesized)
gggaactgtccaaggccaattcccgctttgctaccactttctatcagcacctggcagattccaagaatgacaatgataacattttcctgtcacccctgagtatctccacggcttttgcta

SEQ ID NO: 223187 - DNA, 120 bp, Artificial Sequence
  ENSG00000117601_4 (sequence is synthesized)
tgaccaagctgggtgcctgtaatgacaccctccagcaactgatggaggtatttaagtttgacaccatatctgagaaaacatctgatcagatccacttcttctttgccaaactgaactgcc

SEQ ID NO: 223188 - DNA, 120 bp, Artificial Sequence
  ENSG00000117601_5 (sequence is synthesized)
gactctatcgaaaagccaacaaatcctccaagttagtatcagccaatcgcctttttggagacaaatcccttaccttcaatgagacctaccaggacatcagtgagttggtatatggagcca

SEQ ID NO: 223189 - DNA, 120 bp, Artificial Sequence
  ENSG00000117601_6 (sequence is synthesized)
gcaatccagagcggccatcaacaaatgggtgtccaataagaccgaaggccgaatcaccgatgtcattccctcggaagccatcaatgagctcactgttctggtgctggttaacaccattta

SEQ ID NO: 223190 - DNA, 120 bp, Artificial Sequence
  ENSG00000117601_7 (sequence is synthesized)
cttcaagggcctgtggaagtcaaagttcagccctgagaacacaaggaaggaactgttctacaaggctgatggagagtcgtgttcagcatctatgatgtaccaggaaggcaagttccgtta

SEQ ID NO: 223191 - DNA, 120 bp, Artificial Sequence
  ENSG00000117601_8 (sequence is synthesized)
tcggcgcgtggctgaaggcacccaggtgcttgagttgcccttcaaaggtgatgacatcaccatggtcctcatcttgcccaagcctgagaagagcctggccaaggtagagaaggaactcac

SEQ ID NO: 223192 - DNA, 120 bp, Artificial Sequence
  ENSG00000117601_9 (sequence is synthesized)
cccagaggtgctgcaagagtggctggatgaattggaggagatgatgctggtggtccacatgccccgcttccgcattgaggacggcttcagtttgaaggagcagctgcaagacatgggcct

SEQ ID NO: 223193 - DNA, 120 bp, Artificial Sequence
  ENSG00000117601_10 (sequence is synthesized)
tgtcgatctgttcagccctgaaaagtccaaactcccaggtattgttgcagaaggccgagatgacctctatgtctcagatgcattccataaggcatttcttgaggtaaatgaagaaggcag

SEQ ID NO: 223194 - DNA, 120 bp, Artificial Sequence
  ENSG00000117601_11 (sequence is synthesized)
tgaagcagctgcaagtaccgctgttgtgattgctggccgttcgctaaaccccaacagggtgactttcaaggccaacaggcctttcctggtttttataagagaagttcctctgaacactat

SEQ ID NO: 223195 - DNA, 120 bp, Artificial Sequence
  ENSG00000117601_12 (sequence is synthesized)
tatcttcatgggcagagtagccaacccttgtgttaagtaaaatgttcttattctttgcacctcttcctatttttggtttgtgaacagaagtaaaaataaatacaaactacttccatctca

SEQ ID NO: 223196 - DNA, 120 bp, Artificial Sequence
  ENSG00000117601_13 (sequence is synthesized)
ggattgcctcagatcacactatctccacttgcccagccctgtggaagattagcggccatgtattccaatgtgataggaactgtaacctctggaaaaagcgtggggaattgagcacataat

SEQ ID NO: 223197 - DNA, 120 bp, Artificial Sequence
  ENSG00000117601_14 (sequence is synthesized)
actccaaataaccatcagatgattctaattccaacatgaccacgtccaggcaactgaactgtcccctggcaagaagtctaggactgaacctgtcccgggcccctgtacttggttcaaagg

SEQ ID NO: 223198 - DNA, 120 bp, Artificial Sequence
  ENSG00000117602_0 (sequence is synthesized)
ggcgccggcagcctagctcagccgggacaccgccctagtcccagcccagggggccgctctcgccggcgtcgagggcgtggcggcgaggctgctgctgcaggcggctcccggctctgcctt

SEQ ID NO: 223199 - DNA, 80 bp, Artificial Sequence
  ENSG00000117602_1 (sequence is synthesized)
ctgctgctgcaggcggctcccggctctgccttcggccccgcccgccgcccaccaggctcccagaggccccgcagctcgcg

SEQ ID NO: 223200 - DNA, 120 bp, Artificial Sequence
  ENSG00000117602_2 (sequence is synthesized)
gctgccctcccggctcccgtcctgcggcggcggggcgtgcaggtgaggccccacggcgcccggcctctccagcagtgggtgcctgatagacatcctaggactatacagaaggaaaaggcc

SEQ ID NO: 223201 - DNA, 120 bp, Artificial Sequence
  ENSG00000117602_3 (sequence is synthesized)
cactttgggggataatgctgagggacactatgaaatcttggaatgatagccagtcagatctgtgtagcactgaccaagaagaggaagaagagatgatttttggtgaaaatgaagatgatt

SEQ ID NO: 223202 - DNA, 120 bp, Artificial Sequence
  ENSG00000117602_4 (sequence is synthesized)
tggatgagatgatggatttaagtgatctgcctacctcactttttgcttgcagcgtccatgaagcagtgtttgaggcacgagagcagaaggaaagatttgaagcactcttcaccatctatg

SEQ ID NO: 223203 - DNA, 120 bp, Artificial Sequence
  ENSG00000117602_5 (sequence is synthesized)
atgaccaggttacttttcagctgtttaaaagctttagaagagtcagaataaatttcagcaaacctgaagcggcagcaagagcgcgaatagaactccacgaaacagacttcaatgggcaga

SEQ ID NO: 223204 - DNA, 120 bp, Artificial Sequence
  ENSG00000117602_6 (sequence is synthesized)
agctaaagctatattttgcacaggtgcagatgtccggcgaagtgcgggacaagtcctatctcctgccgccccagcctgtcaagcagttcctcatctcccctccagcctctcccccggtgg

SEQ ID NO: 223205 - DNA, 120 bp, Artificial Sequence
  ENSG00000117602_7 (sequence is synthesized)
ggtggaagcagagcgaagatgcgatgcctgttataaattatgatttactctgtgctgtttccaaattgggaccaggagagaaatatgaacttcacgcgggaacagagtcgacacccagcg

SEQ ID NO: 223206 - DNA, 120 bp, Artificial Sequence
  ENSG00000117602_8 (sequence is synthesized)
tggtggttcatgtctgtgaaagtgaaactgaagaggaagaagagacaaaaaaccccaaacagaaaattgcccagacgaggcgccccgaccctccgaccgcagcgttgaatgagccccaga

SEQ ID NO: 223207 - DNA, 120 bp, Artificial Sequence
  ENSG00000117602_9 (sequence is synthesized)
cctttgattgcgcgctgtgaggcccttggttgtggtgcgaggcggctgccctggtgggctctggccatggcgctctgtgcctgcggccgatgcgttgctgcgaacagcataggtgagact

SEQ ID NO: 223208 - DNA, 120 bp, Artificial Sequence
  ENSG00000117602_10 (sequence is synthesized)
ctgccgagtgaggtataggtcttctcaccacgcctgtactgcagacacggtcgtgtagagtagcagctgatttgacctgtcccagattttaagtgatattccaaaagggactttacatta

SEQ ID NO: 223209 - DNA, 120 bp, Artificial Sequence
  ENSG00000117602_11 (sequence is synthesized)
aaggagaagcccccaagatgtggccacccttaaccatttttaaatagtaacaaattaggaaaacagctcccctcccctccagccatgtaagtcctcctgattctgtatcacatgagacac

SEQ ID NO: 223210 - DNA, 120 bp, Artificial Sequence
  ENSG00000117602_12 (sequence is synthesized)
caaaaactggaaatgtagtcacacccagtacagtaccatttttatgaatttaaaaatagtcttataattttaattgtttgtgggtatttttctactggtataaatagcttctaattaata

SEQ ID NO: 223211 - DNA, 120 bp, Artificial Sequence
  ENSG00000117602_13 (sequence is synthesized)
aatcgatcaaaggttgttactcagtatacatgaaattttttgcaggaaaagaaaccagaaatacagaataattcatagaaatcatggttctcaagtatttgttcaattagctttggggaa

SEQ ID NO: 223212 - DNA, 120 bp, Artificial Sequence
  ENSG00000117602_14 (sequence is synthesized)
gaaatgccaaatccactttgaggatgagtcttacgacacagatccacccacatgttgctcttatctggaatttgggacaaagcaatgcacaggccctcattcctgatgtggcgccctcca

SEQ ID NO: 223213 - DNA, 120 bp, Artificial Sequence
  ENSG00000117602_15 (sequence is synthesized)
gacatggctgcccaggaaggacggccactttagaagtgggacgtatcaccagtaagcttgaatgattaggatcgcaggtggctactgcattctgccgttcgtgaccgtgttctagcctgt

SEQ ID NO: 223214 - DNA, 120 bp, Artificial Sequence
  ENSG00000117602_16 (sequence is synthesized)
agaccacccagctaccttcattcaccagtttttatccttcaccttttccagtatcttgttaaccactagttcttgagttttttggctatgatgtgtacgtttatgtatgtcattcatgga

SEQ ID NO: 223215 - DNA, 120 bp, Artificial Sequence
  ENSG00000117602_17 (sequence is synthesized)
ctttcaactagaaaaggtaatgataaggttttctgaagaccatttgtaaattgtccatttaaccatttttcagcttgctttgaaacaaaagtcacacctactatttttctatgaattagg

SEQ ID NO: 223216 - DNA, 120 bp, Artificial Sequence
  ENSG00000117602_18 (sequence is synthesized)
gaatgagggggagatcattcagttttacttttctttttgttgaaattttgtacccggattgcagttggcacttttcctaaaacagaattgtttcccacttaggtgtcagaatgtaccttt

SEQ ID NO: 223217 - DNA, 120 bp, Artificial Sequence
  ENSG00000117602_19 (sequence is synthesized)
gaacttccctaagaagcagcaggatctttttaactctctctggtctgtttagactttgaagtcccttctgtagaaaagtctcataactgagaaggctctgttttgggccgggtgggtctg

SEQ ID NO: 223218 - DNA, 120 bp, Artificial Sequence
  ENSG00000117602_20 (sequence is synthesized)
ctggcctccactcactgtgctgtttcctttgagtggcacacttgggaagctccggggcatgtgaaggagctgcaaacatgagaactaatgaaccaaggcggctgccaccaggaaggaaca

SEQ ID NO: 223219 - DNA, 120 bp, Artificial Sequence
  ENSG00000117602_21 (sequence is synthesized)
gaacgcaggcattcaaccatgacgtctgcacagtgttagtaacatgtcattgtggtttcgttctcactgtggtaaaatttatttctgagcacttaaactgtgttgcatacccctaatttt

SEQ ID NO: 223220 - DNA, 120 bp, Artificial Sequence
  ENSG00000117602_22 (sequence is synthesized)
ttttttttctgtatcttccttgccctcaaataccctgaggtgataaactgttccagttgtagccaactaccactgctaggcctcaatgtaaattcagttgaaatttgcaattctatcagc

SEQ ID NO: 223221 - DNA, 120 bp, Artificial Sequence
  ENSG00000117602_23 (sequence is synthesized)
aatttaatgtattgaattcagatcatcatttgtcattttaaccgacaaccacccaataaatttactctgcagttctgaactcagcattgtgcccattttttactgcaagatggaccctgt

SEQ ID NO: 223222 - DNA, 120 bp, Artificial Sequence
  ENSG00000117602_24 (sequence is synthesized)
atgccaggagacatgtattatcaacaattgggaattttttgaatttccttttaggtaatattgattcactgtaattttctaagtgatcaaaacccatgagattttgttatttggcttggc

SEQ ID NO: 223223 - DNA, 120 bp, Artificial Sequence
  ENSG00000117602_25 (sequence is synthesized)
tttcattctctgcctgcccattaaagaatattctattcctaacacataaaacattttacagtcaagcagtgcaaattacagtgcttttctattttttttttgagagccttgaataaattg

SEQ ID NO: 223224 - DNA, 120 bp, Artificial Sequence
  ENSG00000117602_26 (sequence is synthesized)
tttaaaccaaaattagagacgagtcatttaagcttttctgaatggaaagtattaatattttcatttttctagtataatataataaaatgaatttttttaaaaaagctactaagtacccat

SEQ ID NO: 223225 - DNA, 120 bp, Artificial Sequence
  ENSG00000117602_27 (sequence is synthesized)
gtacccatcaactttttcatattgtgaaatgaaccaggatcttaacagatactatcatcgctgtccttttttggctgtttaatatctagttcatgtaacaaatttacaagagataagtct

SEQ ID NO: 223226 - DNA, 120 bp, Artificial Sequence
  ENSG00000117602_28 (sequence is synthesized)
ttttttttcttttaataggcttttctgcaatttttttgaaattgagttattacttggatttaaccctgataggaccaggtgtggtggctcacaccataatcccagcactttgggaggcca

SEQ ID NO: 223227 - DNA, 120 bp, Artificial Sequence
  ENSG00000117602_29 (sequence is synthesized)
gattgatagtatagtagccatgttttctttagaaatcataacctcttcatgggaatcaaactatgttgaaaattgtgaggaaagataatggtgctttgtgttgggaaaaaaacatttgtg

SEQ ID NO: 223228 - DNA, 120 bp, Artificial Sequence
  ENSG00000117602_30 (sequence is synthesized)
aaggattagaaaaccgtaacacttaacaaggatagtcacagaaccgacgctgcattggctcttaggttctagatttttgtagcacactcacctgatgaaaccaaagacaaatccatgtaa

SEQ ID NO: 223229 - DNA, 120 bp, Artificial Sequence
  ENSG00000117602_31 (sequence is synthesized)
aaagtgttccagtgagcatctctgaggtttaaggtactaagaggcagaagtggatagcaacagttccattgccttcgagaactaaaactcagctggaaagcaaattagtcttttcacatt

SEQ ID NO: 223230 - DNA, 120 bp, Artificial Sequence
  ENSG00000117602_32 (sequence is synthesized)
ctgcttcttcaaaatgttgtactcaaaaacataccagtaattaagagccaaagcaaagcttcaaggaacttttaagttcaacataaaggtttaaataaaatattttttattttttatttt

SEQ ID NO: 223231 - DNA, 120 bp, Artificial Sequence
  ENSG00000117602_33 (sequence is synthesized)
ccttggcctcccaaagtgctgggattaaccaggcgtgagccactgcgcccggccttaaataaaatattgtagtcattaatggtgtgtttgaattgaagagataccaggagatagaggtga

SEQ ID NO: 223232 - DNA, 120 bp, Artificial Sequence
  ENSG00000117602_34 (sequence is synthesized)
ataccaggagatagaggtgaagtgcagtacttttattctttaagaatatagtctttagccaggtgcagtggtgtgtgcctgtagtctcagctatttgagaggctgaggtgagaggatcac

SEQ ID NO: 223233 - DNA, 120 bp, Artificial Sequence
  ENSG00000117602_35 (sequence is synthesized)
aagaccagcctgggcaacatagcaagtccctggctcaaaaaaaaaaaagtttcccattcatattaactccatcttttaaaaatgtcatgattacaaagtgaaaagatttggctttcttag

SEQ ID NO: 223234 - DNA, 120 bp, Artificial Sequence
  ENSG00000117602_36 (sequence is synthesized)
gatttggctttcttagaggctcaatcacagaggtgaaagtgaccttggaaatcatatactctatccccatgttacacagattagaaaaactgaggttatggcactgacttaggcaccccc

SEQ ID NO: 223235 - DNA, 120 bp, Artificial Sequence
  ENSG00000117602_37 (sequence is synthesized)
agcaaggcaacccagggactacaactggcaatcccaactcctgggctagggctttttctacctttttttgcattggcctcttaaagaggcaatgaatactaattcctggcatcagaaaaa

SEQ ID NO: 223236 - DNA, 120 bp, Artificial Sequence
  ENSG00000117602_38 (sequence is synthesized)
aaaaaaggcatgaggtgggaggattcttttttccctgatgggaaacagtgaataagaaaaatctcatcattcgatggaagaggtgacttaataattttattaatgaatttgatgtcccat

SEQ ID NO: 223237 - DNA, 120 bp, Artificial Sequence
  ENSG00000117602_39 (sequence is synthesized)
gttttgtagttttgttatcattgaaccattggggctggaatctgcctaaataattttatcttggtagccagcaattatgttggtattttatgtgggccttcccagattttcatattaatg

SEQ ID NO: 223238 - DNA, 120 bp, Artificial Sequence
  ENSG00000117602_40 (sequence is synthesized)
aaatgactaatagtcgtacttaagaggtaactctactaaagcagaatgagatctaatatgttgtggaaataaaagagtttgcagtggaatgatactctcactccgtgcttgtaaaattga

SEQ ID NO: 223239 - DNA, 120 bp, Artificial Sequence
  ENSG00000117602_41 (sequence is synthesized)
gttctattcaagacggaactgctatgactggcctattcaaggcttcatatttttatacagactatttcacagaccatagatttattttaaaagggaaaatctcacacataattaagcagt

SEQ ID NO: 223240 - DNA, 120 bp, Artificial Sequence
  ENSG00000117602_42 (sequence is synthesized)
ggaaaatgtgctcaatgctatggtgcgtcaggccctctgtctaccaggtttctcccctttctgcagagctgtggaccctgtacgtaccaaacaggtgaacttggtccatctttccttctt

SEQ ID NO: 223241 - DNA, 120 bp, Artificial Sequence
  ENSG00000117602_43 (sequence is synthesized)
cctttttttgcacatttgcatttatatcttcctgtactaaaagaaacaaattatttataattggggtgacaatataaaggaacaaaagatggggcaatagttgcttcctagctggagctg

SEQ ID NO: 223242 - DNA, 120 bp, Artificial Sequence
  ENSG00000117602_44 (sequence is synthesized)
taagtccatgttacagaaactcactatttaaaaagttttaaaagatttatgaaccttgtcctacaattcgctgaatacttatttgtcttttaaactcccctcggtgtatggatcatcttc

SEQ ID NO: 223243 - DNA, 120 bp, Artificial Sequence
  ENSG00000117602_45 (sequence is synthesized)
gtcagaatgccgttgtttcattgtgaatcaggggaaaatgttaatcatttggagactgttttcttattaccaaatgtacaatccataagacaactgaaagcaacaactgctgggttcact

SEQ ID NO: 223244 - DNA, 120 bp, Artificial Sequence
  ENSG00000117602_46 (sequence is synthesized)
gacaaagattataaaaatcatcacgttcaaagtagagtttttagccaaggtcaagaactaacctggggctgagtcagcgtctctacccacttaaataacagcgtaaagatctttcactaa

SEQ ID NO: 223245 - DNA, 120 bp, Artificial Sequence
  ENSG00000117602_47 (sequence is synthesized)
attcgttatgtggtctgtctggatgtaaacctatatatttccttttgaaacagaatcatatcctgcagactcttggcactcctgcatagctttgaccgaatgttcactctcatcgtaatg

SEQ ID NO: 223246 - DNA, 120 bp, Artificial Sequence
  ENSG00000117602_48 (sequence is synthesized)
gaagatttctatctatgcagataatacatgtttttaaatactgttttctgtttagtcctcaatcttcctaactcaaattggggactgaggagagagaaaggtggttacccctgttaccgt

SEQ ID NO: 223247 - DNA, 120 bp, Artificial Sequence
  ENSG00000117602_49 (sequence is synthesized)
gccatattcttcttgctgcttttcaaccccacgtgattgttgattgacggttctgctataatgtgcgtgcccttcaagtttcagaaaactttcccaatcatttcacttcaatcttaattg

SEQ ID NO: 223248 - DNA, 120 bp, Artificial Sequence
  ENSG00000117602_50 (sequence is synthesized)
aacccaagagtcaaagttattattttctccgaacgtgtttgtgatcttctgttatattttggggcatgttacctttatggtatataagctgtagtgcatactctttgtattgcaaaaaac

SEQ ID NO: 223249 - DNA, 120 bp, Artificial Sequence
  ENSG00000117602_51 (sequence is synthesized)
tggtcagtaatttatgtacatgtattccacattttagtgtgcttgaagtgacaatccatagtttgtagtagtttgttatttgtcaactttaccctgtgttttaaggacatctaaacattc

SEQ ID NO: 223250 - DNA, 120 bp, Artificial Sequence
  ENSG00000117602_52 (sequence is synthesized)
cttgtcctatcaagatgacaaaagcagaatgtaatttttttttggaagcttcgtgattacctgtaacaagttctgtttttaaaacgaatacaaataaagttagtaactatttttaaatca

SEQ ID NO: 223251 - DNA, 120 bp, Artificial Sequence
  ENSG00000117602_53 (sequence is synthesized)
gtgctagctccagctcagctacctgcggccgcctctcctcgggcaatgaggcgccgggaagcccacagcatctgataatatccgggccgccggttgccgggaggtgaaccgagtgggtgc

SEQ ID NO: 223252 - DNA, 120 bp, Artificial Sequence
  ENSG00000117602_54 (sequence is synthesized)
gtaagagctaagtccacctgacaactttgtcttgaagaaaagattaatgaaagccacagtgagatacactgtcactccctgccccgcttccgcagggcccctttccagattggagatttc

SEQ ID NO: 223253 - DNA, 120 bp, Artificial Sequence
  ENSG00000117602_55 (sequence is synthesized)
gtgctagctccagctcagctacctgcggccgcctctcctcgggcaatgaggcgccgggaagcccacagcatctgataatatccgggccgccggttgccgggaggtgaaccgaggaaagat

SEQ ID NO: 223254 - DNA, 120 bp, Artificial Sequence
  ENSG00000117614_0 (sequence is synthesized)
cttgttgccggaagtgggaagagagaaaggttgtgatggcggctatagctgcatccgaggtgctggtggacagcgcggaggaggggtccctcgctgcggcggcggagctggccgctcaga

SEQ ID NO: 223255 - DNA, 120 bp, Artificial Sequence
  ENSG00000117614_1 (sequence is synthesized)
agcgcgaacagagactgcgcaaattccgggagctgcacctgatgcggaatgaagctcgtaaattaaatcaccaggaagttgtggaagaagataaaagactaaaattacctgcaaattggg

SEQ ID NO: 223256 - DNA, 120 bp, Artificial Sequence
  ENSG00000117614_2 (sequence is synthesized)
aagccaaaaaagctcgtttggagtgggaactaaaggaagaggaaaagaaaaaggaatgtgcggcaagaggagaagactatgagaaagtgaagttgctggagatcagtgcagaagatgcag

SEQ ID NO: 223257 - DNA, 120 bp, Artificial Sequence
  ENSG00000117614_3 (sequence is synthesized)
aaagatgggagaggaaaaagaagaggaaaaaccctgatctgggattttcagattatgctgctgcccagttacgccagtatcatcggttgaccaagcagatcaaacctgacatggaaacat

SEQ ID NO: 223258 - DNA, 120 bp, Artificial Sequence
  ENSG00000117614_4 (sequence is synthesized)
atgagagactgagagaaaaacatggagaagagtttttcccaacatccaatagtcttcttcatggaacacatgtgccttccacagaggaaattgacaggatggtcatagatctggaaaaac

SEQ ID NO: 223259 - DNA, 120 bp, Artificial Sequence
  ENSG00000117614_5 (sequence is synthesized)
agattgaaaaacgagacaaatatagccggagacgtccttataatgatgatgcagatatcgactacattaatgaaaggaatgccaaattcaacaagaaagctgaaagattctatgggaaat

SEQ ID NO: 223260 - DNA, 120 bp, Artificial Sequence
  ENSG00000117614_6 (sequence is synthesized)
acacagctgaaattaaacagaatttggaaagaggaacagctgtctaatcccttcaagaactgtttatagaagcttgagaatggggtaaaaatttctgctagcaaaatcaagttctttttg

SEQ ID NO: 223261 - DNA, 120 bp, Artificial Sequence
  ENSG00000117614_7 (sequence is synthesized)
aacgtatatcctttcatgtatatttccacatttttgtgcttggatataagatgtatttcttgtagtgaagttgttttgtaatctactttgtatacattctaattatattatttttctatg

SEQ ID NO: 223262 - DNA, 120 bp, Artificial Sequence
  ENSG00000117614_8 (sequence is synthesized)
tattttaaatgtatatggctgtttaatctttgaagcattttgggcttaagattgccagcagcacacatcagatgcagtcattgttgctatcagtgtggaatttgatagagtctagactcg

SEQ ID NO: 223263 - DNA, 120 bp, Artificial Sequence
  ENSG00000117614_9 (sequence is synthesized)
ggccacttggagttgtgtactccaaagctaaggacagtgatgaggaagatggcagtggccaccggaggactggagcagtccctcctcatggcggcctgtgaccaaggtcggggaggagtg

SEQ ID NO: 223264 - DNA, 120 bp, Artificial Sequence
  ENSG00000117614_10 (sequence is synthesized)
gagctatccttccatgatctgatcatgtacagttccctttttaaaaagcaataaatgcttgggattagaatttctaacatttttagtctatcatttaaaacaaacatttgtatatataca

SEQ ID NO: 223265 - DNA, 120 bp, Artificial Sequence
  ENSG00000117614_11 (sequence is synthesized)
tttgtttatatacatacatgcttccattctacaaacactgaaagaatattttattatgggaaattccatacacccaatacccctggtgagtcccatatacccagtaccctgttcaacaat

SEQ ID NO: 223266 - DNA, 120 bp, Artificial Sequence
  ENSG00000117614_12 (sequence is synthesized)
cattaactcatggccagtcctgcttcatctttatttccatttactttcttcatgactcttattttgacgcatatactagatatataatttcatctataattattttagtatgtatctctg

SEQ ID NO: 223267 - DNA, 120 bp, Artificial Sequence
  ENSG00000117614_13 (sequence is synthesized)
aaagataaagacttaaatgaccacaatactattatcactgcaatagatttatttttataaaactccagagggaaaggttgttattttttctctatgttgaattaaatgctaaatatctaa

SEQ ID NO: 223268 - DNA, 120 bp, Artificial Sequence
  ENSG00000117614_14 (sequence is synthesized)
agcgcgaacagagactgcgcaaattccgggagctgcacctgatgcgggtgagtagtcttggaggccggcttagatccgtcatctggccaagcctgtgcgcttttgtagaggggacgagga

SEQ ID NO: 223269 - DNA, 120 bp, Artificial Sequence
  ENSG00000117614_15 (sequence is synthesized)
agccacaccactgcgtctgacagaccaacagagcaggatcatctgagaggaaagctctgttcggtggtactcaaccctggcagcacattgggatcattctgagaacatttgaaaatataa

SEQ ID NO: 223270 - DNA, 120 bp, Artificial Sequence
  ENSG00000117614_16 (sequence is synthesized)
ctgttcactccagcccctctcccacccacatccaatttaatgtatctgggttaggtttgggagtctccattactaacaacctccctgctccgtgattccaacaaattcttcattttacct

SEQ ID NO: 223271 - DNA, 120 bp, Artificial Sequence
  ENSG00000117614_17 (sequence is synthesized)
agggaaatatgtagagctagagacaggaagaaacttgtctagtgtcagtaagagacctggttcactttaaaaaataataatcttctgtcagaatctgtttgagtgaaaagaaaataatca

SEQ ID NO: 223272 - DNA, 120 bp, Artificial Sequence
  ENSG00000117614_18 (sequence is synthesized)
tctgtttttgggacttctgggggaaaagaataaaaagaaaataaaaaaaatggcaaacttttgaaagtctacagtgtggtagttcagccagttgatagggaatctgatgtttaagtgccc

SEQ ID NO: 223273 - DNA, 120 bp, Artificial Sequence
  ENSG00000117614_19 (sequence is synthesized)
tggaggtgcagaggaggagagaggaatgcagtttgtgggtctccagggggtgcctcatgtagtaggtgacacctaaactactgtttgaaagccagacaactaaaggagttagagaaagag

SEQ ID NO: 223274 - DNA, 120 bp, Artificial Sequence
  ENSG00000117614_20 (sequence is synthesized)
atatccaagcaaagggaacaaattcaaagaaagagaatttgtattagggataagagtccagcaaatagcttgctgcagttggagcagagaaagagaaaagcagcccctgtttcaccatgg

SEQ ID NO: 223275 - DNA, 120 bp, Artificial Sequence
  ENSG00000117614_21 (sequence is synthesized)
tcactctgactgttgtagtgagacaaaacaaagaagacttttcaaattacaagaatgaccacatatttctttcttctgactaacaccagtgactgttattaacaaatacagcattagtct

SEQ ID NO: 223276 - DNA, 78 bp, Artificial Sequence
  ENSG00000117614_22 (sequence is synthesized)
taacaccagtgactgttattaacaaatacagcattagtctcactccgttacttctgcctcctatataaaaatgtaaga

SEQ ID NO: 223277 - DNA, 69 bp, Artificial Sequence
  ENSG00000117614_23 (sequence is synthesized)
taagatacctaattgtagaaagcccctgctttctgacagtacccaatccacatccttaaccctcccctc

SEQ ID NO: 223278 - DNA, 120 bp, Artificial Sequence
  ENSG00000117614_24 (sequence is synthesized)
tttctgacagtacccaatccacatccttaaccctcccctcagtcacctgatacaaacccaaatcctggaacaagcccttcctaacaccctgtcactcaaatgcccacggttccccgtggt

SEQ ID NO: 223279 - DNA, 120 bp, Artificial Sequence
  ENSG00000117614_25 (sequence is synthesized)
ttgctctcttctgtgcaacagactcaactttgttgaccgtaggtatgttcttggcgtctttaattgcagggcttttccagggccaagaatatactagggatggtagttgggaggagtatc

SEQ ID NO: 223280 - DNA, 120 bp, Artificial Sequence
  ENSG00000117614_26 (sequence is synthesized)
tctctttgccgagggaaagttaatctaataaacaattaaaaagacatgcttaaatatttagagtgattgtgtaaggaacacatgtctggaaattaggaggcggggcttcctggacaaact

SEQ ID NO: 223281 - DNA, 120 bp, Artificial Sequence
  ENSG00000117614_27 (sequence is synthesized)
gccaccagcttatgacctaaggaatgtctaactcaagttttccttaagacgatacactcattttgctttatgcaattaagtttatttaaaaatagactcttctccctgctaccccagctc

SEQ ID NO: 223282 - DNA, 120 bp, Artificial Sequence
  ENSG00000117614_28 (sequence is synthesized)
ccaccgtacaccgggggttttgttggtgagggttccggggagcggcctggagagaggtggaggcgaagtctagtttcgcttcagggaggctcagacactgtggggtcaagtcggcggtgg

SEQ ID NO: 223283 - DNA, 120 bp, Artificial Sequence
  ENSG00000117616_0 (sequence is synthesized)
agtgcgcatccggacgtaggaggtggaggttgtggaattcgccgttcgaaagcagggactaaaagccccacttcgtcttacgttccgaaaggaaggcgtctgttgagcctttctctcagt

SEQ ID NO: 223284 - DNA, 120 bp, Artificial Sequence
  ENSG00000117616_1 (sequence is synthesized)
cgtgagggaggcgtcgacggcgtgcggaagtcctgagttgaggcttgcgggatcctttccggagaaagcgcaggctaaagccgcaggtgaagatgtccaactacgtgaacgacatgtggc

SEQ ID NO: 223285 - DNA, 120 bp, Artificial Sequence
  ENSG00000117616_2 (sequence is synthesized)
cgggctcgccgcaggagaaggattcgccctcgacctcgcggtcgggcgggtccagccggctgtcgtcgcggtctaggagccgctctttttccagaagctctcggtcccattcccgcgtct

SEQ ID NO: 223286 - DNA, 120 bp, Artificial Sequence
  ENSG00000117616_3 (sequence is synthesized)
cgagccggttttcgtccaggagtcggaggagcaagtccaggtcccgttcccgaaggcgccaccagcggaagtacaggcgctactcgcggtcatactcgcggagccggtcgcgatcccgca

SEQ ID NO: 223287 - DNA, 120 bp, Artificial Sequence
  ENSG00000117616_4 (sequence is synthesized)
gccgccgttaccgagagaggcgctacgggttcaccaggagatactaccggtctccttcgcggtaccggtcccggtcccgtagcaggtcgcgctctcggggaaggtcgtactgcggaaggg

SEQ ID NO: 223288 - DNA, 120 bp, Artificial Sequence
  ENSG00000117616_5 (sequence is synthesized)
gaaccccctttcgcttaagtgaaaaagatcgaatggagctgttagaaatagcaaaaaccaatgcagcgaaagctctaggaacaaccaacattgacttgccagctagtctcagaactgttc

SEQ ID NO: 223289 - DNA, 120 bp, Artificial Sequence
  ENSG00000117616_6 (sequence is synthesized)
cttcagccaaagaaacaagccgtggaataggtgtatcaagtaatggtgcaaagcctgaactgtcggaaaaggtaacagaagatggaactcgaaatcccaatgaaaaacctacccagcaaa

SEQ ID NO: 223290 - DNA, 120 bp, Artificial Sequence
  ENSG00000117616_7 (sequence is synthesized)
gaagcatagcttttagctctaataattctgtagcaaagccaatacaaaaatcagctaaagctgccacagaagaggcatcttcaagatcaccaaaaatagatcagaaaaaaagtccatatg

SEQ ID NO: 223291 - DNA, 120 bp, Artificial Sequence
  ENSG00000117616_8 (sequence is synthesized)
gactgtggatacctatctaaaagaagaaaactgatggctaagtttgcatgaaaactgcactttattgcaagttagtgtttctagcattatcccatccctttgagccattcaggggtactt

SEQ ID NO: 223292 - DNA, 120 bp, Artificial Sequence
  ENSG00000117616_9 (sequence is synthesized)
gtgcatttaaaaaccaacacaaaaagatgtaaatacttaacactcaaatattaacattttaggtttctcttgcagatatgagagatagcacagatggaccaaaggttatgcacaggtggg

SEQ ID NO: 223293 - DNA, 120 bp, Artificial Sequence
  ENSG00000117616_10 (sequence is synthesized)
agtcttttgtatatagttgtaaatattgtcttggttatgtaaaaatgaaattttttagacacagtaattgaactgtattcctgttttgtatatttaataaatttcttgttttcattctta

SEQ ID NO: 223294 - DNA, 120 bp, Artificial Sequence
  ENSG00000117616_11 (sequence is synthesized)
ggaataggtgtatcaagtaatggtgcaaagcctgaagtaagtattctaggtttgtcggaacaaaactttcagaaagccaactgtcaaatctgattagccacttatatcttagactatact

SEQ ID NO: 223295 - DNA, 120 bp, Artificial Sequence
  ENSG00000117616_12 (sequence is synthesized)
aattcaaagtagcaaatctgaagataggcaatgtcaaacccatgaaaatgggagattaatgagctttatttggccgtgcatggtgcctcatgcctgtaatgaggcagatggcttgagtcc

SEQ ID NO: 223296 - DNA, 83 bp, Artificial Sequence
  ENSG00000117616_13 (sequence is synthesized)
tggtgcctcatgcctgtaatgaggcagatggcttgagtccaggagttcaagactagcctgggcaatgtggcaaaaccgcgtgt

SEQ ID NO: 223297 - DNA, 87 bp, Artificial Sequence
  ENSG00000117616_14 (sequence is synthesized)
gatggcaccattgcactctaaatacatttatttttttcattttcagttaacagtgtactcttataacaccgttattagctggtactt

SEQ ID NO: 223298 - DNA, 120 bp, Artificial Sequence
  ENSG00000117616_15 (sequence is synthesized)
taacagtgtactcttataacaccgttattagctggtactttggtgatttctattactagtttttctaagctatttacagagtgtttgtagctttcatttgcagcattatgttcccacaaa

SEQ ID NO: 223299 - DNA, 120 bp, Artificial Sequence
  ENSG00000117616_16 (sequence is synthesized)
ttctgtactcagcatatacagtatagtttatctgctctatttctgtcttatagaaatcatgaatgtggtctgcagacattgatgaagaaaatctgttggtaattgatacatgggctaaag

SEQ ID NO: 223300 - DNA, 120 bp, Artificial Sequence
  ENSG00000117616_17 (sequence is synthesized)
catcagaggtttaatttgaagtttatgttcacacactgaaaacttagtttttttgttggtagatccatgtgcatgctagaatttgggacaggcactatttgcataaagtattaaagtcaa

SEQ ID NO: 223301 - DNA, 120 bp, Artificial Sequence
  ENSG00000117616_18 (sequence is synthesized)
tttttaaactaagcaaaggtacacgttgtaacggtggggcatctgtgaaaaagatgtccctttcataatatatgcaatatattccagatgttttgagagattacagaagaggaggcctgc

SEQ ID NO: 223302 - DNA, 120 bp, Artificial Sequence
  ENSG00000117616_19 (sequence is synthesized)
ttacagaagaggaggcctgcttcacttgcagataagtttattataattctccagaaatgtgcaggatgtgcattagcaaattgcactgtacttttcactccagcctgggtgacagagcaa

SEQ ID NO: 223303 - DNA, 120 bp, Artificial Sequence
  ENSG00000117616_20 (sequence is synthesized)
agccctccttggtgcctgtccggtagctggtcactctcgggggaaggtcgtgtgcagaagggcacatgcgatcacacagagacggcgttgctgcggctttgacccgatggtgcacccgaa

SEQ ID NO: 223304 - DNA, 120 bp, Artificial Sequence
  ENSG00000117616_21 (sequence is synthesized)
agaacacagagggtgaagggagagatccaggaagtggtcgcggagcagaaccccccttcacttcagttaaaaagggtttcaaagccagaggagataaaagaaatttgttccccttgcaaa

SEQ ID NO: 223305 - DNA, 89 bp, Artificial Sequence
  ENSG00000117616_22 (sequence is synthesized)
ccccttgcaaagatgaaaatcagatttgccctggttttggttaatcgaagtattgatacgtttttccttatttaattttattttttaat

SEQ ID NO: 223306 - DNA, 79 bp, Artificial Sequence
  ENSG00000117616_23 (sequence is synthesized)
ttgttctgtcgcccaggctggagtgccatggcacgatttcagctcactgcaagctctgtcgctaagatgacaggtgccc

SEQ ID NO: 223307 - DNA, 120 bp, Artificial Sequence
  ENSG00000117616_24 (sequence is synthesized)
gtcagtttgggtctcgcgtctggaatcaccgtcaaggagtcagatccagccccggagagggagcagggtcgaggtctccttgcagaaggcgccaccgcaggaagcacaggcgcaacgtgc

SEQ ID NO: 223308 - DNA, 120 bp, Artificial Sequence
  ENSG00000117616_25 (sequence is synthesized)
ttcagccaaagaaacaagccgtggaataggtgtatcaagtaatggtgcaaagcctgaaaaatcatgaatgtggtctgcagacattgatgaagaaaatctgttgctgtcggaaaaggtaac

SEQ ID NO: 223309 - DNA, 120 bp, Artificial Sequence
  ENSG00000117616_26 (sequence is synthesized)
gctgtatctaaatgaatctgtgtaattgggcccagatgtgggtttgctcagtattagtagacaaggtctttgttcagacgattaggtgcctaactggcaaatgccttagtttcttaaaac

SEQ ID NO: 223310 - DNA, 120 bp, Artificial Sequence
  ENSG00000117616_27 (sequence is synthesized)
gtattttctgatgtggctttacatttcaaaagtgaacttgattcaacctgagaaaactgattaaaaaattagtttaaatttgccagcagggaagtaaaataattatgggaagagtgtctt

SEQ ID NO: 223311 - DNA, 120 bp, Artificial Sequence
  ENSG00000117616_28 (sequence is synthesized)
aagcctaatattaaatcagttttgttaaggggaaaactcaatagttctgttacttaggctgttagatccaagttgatttttgtgtctacagctaaattttgtttacaattaggctatttt

SEQ ID NO: 223312 - DNA, 120 bp, Artificial Sequence
  ENSG00000117616_29 (sequence is synthesized)
ttaatataggatttagaaaccaagggtatgtgttttaaaattacactttttcttaacctgtctagctgtcggaaaaggtaacagaagatggaactcgaaatcccaatgaaaaacctaccc

SEQ ID NO: 223313 - DNA, 120 bp, Artificial Sequence
  ENSG00000117616_30 (sequence is synthesized)
gtctgcgcatgcccgggcgctgggttcaggggctttccgccgctctgggttcacagctggacgtcgggagtgctagtttggagtacgccatttgagagtaggcgtgagaagttgctctgt

SEQ ID NO: 223314 - DNA, 120 bp, Artificial Sequence
  ENSG00000117616_31 (sequence is synthesized)
gggtcggccgcgcagccctctcaggggtgggtggcaggaagagtgccgggtcccgcgtggtgcaaaaggtgggttcaggtttgcggccacacagcgctactcaggactttttagtcttgt

SEQ ID NO: 223315 - DNA, 120 bp, Artificial Sequence
  ENSG00000117616_32 (sequence is synthesized)
ttattttctccgtgcctgttcccgccccccgcagctccacctctgggagaggggcgggttcagctccaggaggcggggacttcccggcttggcgtggctggggtgtcccgtggaccccag

SEQ ID NO: 223316 - DNA, 120 bp, Artificial Sequence
  ENSG00000117616_33 (sequence is synthesized)
tctcggcgcggtgacccacttatgggacttggcctttctttgttgtttgtttaaggcagggtttctcagcctgggcactactgaggttttgggccggctaattctgtctgggttggggag

SEQ ID NO: 223317 - DNA, 120 bp, Artificial Sequence
  ENSG00000117616_34 (sequence is synthesized)
ggtgctgtcccgtgcttcgcaggttgtgtagctgcatcccccgcctctacccagtggatgcaagtagcagccccagtgaaccaaaaatgcccccagactttgccaaatatcccctcccgg

SEQ ID NO: 223318 - DNA, 120 bp, Artificial Sequence
  ENSG00000117616_35 (sequence is synthesized)
ggaagatcgcctcgcttgagaaccactgttggaggagagcctgggttttcgggaggtaaccgtttacaaaggggagaacggtaagaagccggaagcaacgatgacttagctacgtgaaag

SEQ ID NO: 223319 - DNA, 80 bp, Artificial Sequence
  ENSG00000117616_36 (sequence is synthesized)
tcctgatctcagatgatctgcccacttcggtctcccaaactgctgcaattacagggtttcaaagccagaggagataaaag

SEQ ID NO: 223320 - DNA, 64 bp, Artificial Sequence
  ENSG00000117616_37 (sequence is synthesized)
tcccatctctgctaaaaatacaaaaaatatagctgggcacggtggcacacacctgtaatcccaa

SEQ ID NO: 223321 - DNA, 80 bp, Artificial Sequence
  ENSG00000117616_38 (sequence is synthesized)
ggccaatgtggcaaaatcccatctctgctaaaaatacaaaaaatatagctgggcacagcacaaggattgtttgaacctgg

SEQ ID NO: 223322 - DNA, 120 bp, Artificial Sequence
  ENSG00000117616_39 (sequence is synthesized)
tggccttcgtacccgtcttgattgagctctcacactttggatacgctcctctaatcctgtctgaaagagctaagctgacccccaccaccgttggaggaaactcctggagcagtgctgggg

SEQ ID NO: 223323 - DNA, 120 bp, Artificial Sequence
  ENSG00000117616_40 (sequence is synthesized)
ttttcactgcaatcagctgctccaactttgtcttgtacatggctctttgaccttgggcttgtggattaggggcctgtggaggagctctgtgactgctctgatatctgtggatggttctga

SEQ ID NO: 223324 - DNA, 120 bp, Artificial Sequence
  ENSG00000117616_41 (sequence is synthesized)
gtgactgctctgatatctgtggatggttctgaggcattgtatttagtgaaaaaactggaaaccatatgcatgtccatgaataaaaaatggggcataggccgggcgccgtggctcacacct

SEQ ID NO: 223325 - DNA, 68 bp, Artificial Sequence
  ENSG00000117616_42 (sequence is synthesized)
gccgagaccgtgacaaaacaatgggatagaccaatttctagtacttctaaactatggaatacgataca

SEQ ID NO: 223326 - DNA, 120 bp, Artificial Sequence
  ENSG00000117616_43 (sequence is synthesized)
gaccaatttctagtacttctaaactatggaatacgatacagctgataaaccaaaacacattagatctatgtgatttctcttaaaggatgttgattataagtttcaacttgtttagaacga

SEQ ID NO: 223327 - DNA, 75 bp, Artificial Sequence
  ENSG00000117616_44 (sequence is synthesized)
taaaggatgttgattataagtttcaacttgtttagaacgagcccatattcatcaaaaattctgtatgcaccagtg

SEQ ID NO: 223328 - DNA, 120 bp, Artificial Sequence
  ENSG00000117616_45 (sequence is synthesized)
actctgtctcaaaaaaaaaaaaacaagtgtggattacagtatctgttgggcctactatcgtaaaacacatacacatgcatgtgcacacacaaacctccaggctatcacttcagtgccagc

SEQ ID NO: 223329 - DNA, 120 bp, Artificial Sequence
  ENSG00000117616_46 (sequence is synthesized)
ccaggctatcacttcagtgccagccagcagcatttcttactctaaccactgcaactgtgtccctgcttcatcttggggcttcattctcatatattttcttcacacagcagccacagagaa

SEQ ID NO: 223330 - DNA, 120 bp, Artificial Sequence
  ENSG00000117616_47 (sequence is synthesized)
tctcatatattttcttcacacagcagccacagagaagcttttacaatgtaaaccagagtctattacttctgttctccaactacttcagtggctaaattggtaccagtagagtggggtgct

SEQ ID NO: 223331 - DNA, 86 bp, Artificial Sequence
  ENSG00000117616_48 (sequence is synthesized)
tgctgccgtagatactcaaaaatgggtatgtgactttggaactgggtaacaggcagggtcaaatgtgggaaagtttggaacttcct

SEQ ID NO: 223332 - DNA, 120 bp, Artificial Sequence
  ENSG00000117620_0 (sequence is synthesized)
cgggaccgcgggaacccggaaacgcctgggctgcaccgagctggcggtggctacggcgacgggagccggcggcgctgcgggtcagcggtcgcgtaggacccagcggactcggcagcctgg

SEQ ID NO: 223333 - DNA, 120 bp, Artificial Sequence
  ENSG00000117620_1 (sequence is synthesized)
ggcgcccggcggagctgaaccgcggcccccggtggtgggctcagccggtcgagctgcgcgggagggtctcactgtcaccttggctggagtacagaggcgcaatctcagctcactgcaact

SEQ ID NO: 223334 - DNA, 120 bp, Artificial Sequence
  ENSG00000117620_2 (sequence is synthesized)
tccacctccctggctcaagtgatctcccaccttagcctcccaagcaaatgaagataaaacaatgttcgccaacctaaaatacgtttccctgggaattttggtctttcagactaccagttt

SEQ ID NO: 223335 - DNA, 120 bp, Artificial Sequence
  ENSG00000117620_3 (sequence is synthesized)
ggttctaacaatgcgttattccagaactttaaaagaagaaggacctcgttatctatcttctacagcagtggttgttgctgaacttttgaagataatggcctgcattttattggtctacaa

SEQ ID NO: 223336 - DNA, 120 bp, Artificial Sequence
  ENSG00000117620_4 (sequence is synthesized)
agacagcaaatgtagtctaagagcactgaatcgagtactacatgatgaaattcttaataaacctatggaaacacttaaacttgctattccatcagggatctatactcttcagaataattt

SEQ ID NO: 223337 - DNA, 120 bp, Artificial Sequence
  ENSG00000117620_5 (sequence is synthesized)
actgtatgtggcactatcaaatctagatgcagctacttatcaggtcacgtatcagttaaaaattcttacaacagcattattttctgtgtctatgcttagtaaaaaattgggtgtatacca

SEQ ID NO: 223338 - DNA, 120 bp, Artificial Sequence
  ENSG00000117620_6 (sequence is synthesized)
gtggctgtccctagtaattttgatgacaggagttgcttttgtacagtggccctcagattctcagcttgattctaaggaactttcagctggttctcaatttgtaggactcatggcagttct

SEQ ID NO: 223339 - DNA, 120 bp, Artificial Sequence
  ENSG00000117620_7 (sequence is synthesized)
cacagcatgtttttcaagtggctttgctggggtttactttgagaaaatcttaaaagaaacaaaacaatcagtgtggataagaaatattcagcttggtttctttggaagtatatttggatt

SEQ ID NO: 223340 - DNA, 120 bp, Artificial Sequence
  ENSG00000117620_8 (sequence is synthesized)
ggagaactggtatcaaagaatggattttttcagggatataaccgactgacctggatagtagttgttcttcaggcacttggaggccttgtaatagctgctgttattaagtatgcagataat

SEQ ID NO: 223341 - DNA, 120 bp, Artificial Sequence
  ENSG00000117620_9 (sequence is synthesized)
attttaaaaggatttgcaacctctttatcgataatattatcaacattgatctcctatttttggcttcaagattttgtgccaaccagtgtctttttccttggagccatccttgtaataaca

SEQ ID NO: 223342 - DNA, 120 bp, Artificial Sequence
  ENSG00000117620_10 (sequence is synthesized)
gctacttttttgtatggttatgatcccaaacctgcaggaaatcccactaaagcatagttgtatactatctttaactggtttttcacgatggggcactaggaatctcgacattaatcttgc

SEQ ID NO: 223343 - DNA, 120 bp, Artificial Sequence
  ENSG00000117620_11 (sequence is synthesized)
acagaggacttctacagagtctgagaagatatcatcatgctgaatctgatcatactgttttttaaaagtttaaggataagacatgtgtatatgtaacaaaacacattgcatctagaaatc

SEQ ID NO: 223344 - DNA, 120 bp, Artificial Sequence
  ENSG00000117620_12 (sequence is synthesized)
aaaacttgaaagtatttccagggattaggattagaaggaatattagaggaaacttgaaatctgagtttaaaaagattttacctttttgattgctgcagaaatgtcctatgcactctttgc

SEQ ID NO: 223345 - DNA, 120 bp, Artificial Sequence
  ENSG00000117620_13 (sequence is synthesized)
aagagcacacaacaaatgtcagataccaatttttgcaaattagatttaatcttattaaatgtttttatcttactctttctgtacagatatatcaaatcacatgaaatatttaaagtttga

SEQ ID NO: 223346 - DNA, 120 bp, Artificial Sequence
  ENSG00000117620_14 (sequence is synthesized)
tataattacctataaagctgtgaaaaatagaagtataatttgaaaaaacatttcacttatcagagatttttatatttatacaaaagattactaaatgaaggattgctaaatgtttttggt

SEQ ID NO: 223347 - DNA, 120 bp, Artificial Sequence
  ENSG00000117620_15 (sequence is synthesized)
tggttcaattacataaaaattaatattctgggtctgatctgtcagagaataaatatcaaatctaaatttaatgtagagatacatactatttctccatatgaattttaagatattttagtg

SEQ ID NO: 223348 - DNA, 120 bp, Artificial Sequence
  ENSG00000117620_16 (sequence is synthesized)
cttcaagactgctgaaagcaatccagttgctcctgtgctagatggtagccagagaattttatagtaatggaggttagcccttaatctcttcattgcatttcatttctgtaaatcagatta

SEQ ID NO: 223349 - DNA, 120 bp, Artificial Sequence
  ENSG00000117620_17 (sequence is synthesized)
gtgggctcagccggtcgagctgcgcgggaggtgagtcctcagcgcacctggggaggggcgggaaccaggaggctagcggctgcggggcggcccgggaagctcctggaggaggaggaagag

SEQ ID NO: 223350 - DNA, 120 bp, Artificial Sequence
  ENSG00000117620_18 (sequence is synthesized)
attattgtataatatctacatttggagaattttgaactatcaagcatatactgtatacagttagaaagttattaaatgaacattttactcattgatctgtaaaaacttctttaatctaca

SEQ ID NO: 223351 - DNA, 120 bp, Artificial Sequence
  ENSG00000117620_19 (sequence is synthesized)
aatctacaactgtttacaaaaacaacattcaaacaaatagtacagatgtcagtgacagaacaaaatgacttttcttggagacattccagattgccatattactttattttaaacagcgct

SEQ ID NO: 223352 - DNA, 120 bp, Artificial Sequence
  ENSG00000117620_20 (sequence is synthesized)
atgactttaaatccaaggctgctcggaagatttttttaggtctctcataagcctattcttccctgatcacatgagtgggagaggtagccaaattttgaattccctttctgtgttcccaca

SEQ ID NO: 223353 - DNA, 120 bp, Artificial Sequence
  ENSG00000117620_21 (sequence is synthesized)
aaaaaagaaaaaaaaaaaagctactgagaaggagccaccattttgctttaaaatagtgggtttttttcctttttaatgaacactggagctgaggatgcagattacatgagttatttaata

SEQ ID NO: 223354 - DNA, 120 bp, Artificial Sequence
  ENSG00000117620_22 (sequence is synthesized)
agttgattcaagagagagagagtatattagaaatggtaagatgatttggtgggcaaaaatgctttctataatttgaatatgggtttaatttaattattaactatagacagaattacttac

SEQ ID NO: 223355 - DNA, 79 bp, Artificial Sequence
  ENSG00000117620_23 (sequence is synthesized)
cacacacacacacacacacacccacagtatgaatgaaaaaaataaaatacttctttttttttttttttgagacagagtc

SEQ ID NO: 223356 - DNA, 66 bp, Artificial Sequence
  ENSG00000117620_24 (sequence is synthesized)
acacacacacacacacacacacccacagtatgaatgaaaaaaataaaatactgtggcgcgatctcg

SEQ ID NO: 223357 - DNA, 120 bp, Artificial Sequence
  ENSG00000117620_25 (sequence is synthesized)
gattgcaggcgtgagccactgcgcccggcctatactgtatatatttttaaagactgttctaatagatataaaaactgtaaaaaataagtatttttatatagctctcatggattttattaa

SEQ ID NO: 223358 - DNA, 120 bp, Artificial Sequence
  ENSG00000117620_26 (sequence is synthesized)
tatagctctcatggattttattaaacagaattggctcaaaaatactatgttacagactgttgggtacccttgcctaacgtgaactggcagtgttaccttgcttttgcagtaatagtctac

SEQ ID NO: 223359 - DNA, 120 bp, Artificial Sequence
  ENSG00000117620_27 (sequence is synthesized)
agattgcaggtctcatcaattccatccaaagtttaaaagcatttaaaattaccaaatctttaaaatcactttggtggtgattccaaattggtaccaagcaaactttctggatgcccaaca

SEQ ID NO: 223360 - DNA, 120 bp, Artificial Sequence
  ENSG00000117620_28 (sequence is synthesized)
tgattttcagtaaccaccctttagagtatttgtttactaagttcaccacattttgaacatggtagttttagactgcaataatatttagacttacattattacttactgctaagtaaaatc

SEQ ID NO: 223361 - DNA, 120 bp, Artificial Sequence
  ENSG00000117620_29 (sequence is synthesized)
taaatcctgcaaatgcacagaattcaagctgaaatataatgatttatgtttagctcacattgaagtattggttggttacttatgtattaatgcagtgtgcattcacatttaatcaggttt

SEQ ID NO: 223362 - DNA, 120 bp, Artificial Sequence
  ENSG00000117620_30 (sequence is synthesized)
agtctgtttctattttaataattttaaaaaattatacaagcaaattagatattagacatgttagttacaatggtaacacatttttaggtgtcgaaacacaattttcaaaattcctaatga

SEQ ID NO: 223363 - DNA, 120 bp, Artificial Sequence
  ENSG00000117620_31 (sequence is synthesized)
aagttataaaaatgtaaacaagaattgtaaaaatggacaaagtagtcaaatatattttcaaagcacaattttattagacaggcataatttacattttgcttttctagtgggtttgaaaat

SEQ ID NO: 223364 - DNA, 120 bp, Artificial Sequence
  ENSG00000117620_32 (sequence is synthesized)
gtttattggagattgggctatgtagtttataatttttaattcataaaaaagtaatcatacatgagaaggtagacctgtgccctaggatcatgtcacatatacagataatgccatttcctt

SEQ ID NO: 223365 - DNA, 120 bp, Artificial Sequence
  ENSG00000117620_33 (sequence is synthesized)
gtgtgtgtgatgtgtgttttgatgacctccacaggccttactgtatcaagcttttataatgatgactccttcattatttaaattcctatactttttatttgttatcacgcaactactttg

SEQ ID NO: 223366 - DNA, 120 bp, Artificial Sequence
  ENSG00000117620_34 (sequence is synthesized)
ttcaatgtgaaaatgtgctaactcatgggagaagagtgccaattgatagttcttttagcaattaagaatatggtatttgggaagaaaagtttgaaatgcaacaaatggatatttcaacac

SEQ ID NO: 223367 - DNA, 120 bp, Artificial Sequence
  ENSG00000117620_35 (sequence is synthesized)
agtagtattatattatcagttctttagtaagtgattttagagatgttgtaggctacttttacggtggaatatatagtatagagatgcaaaacttaaatgtttacatcaatttatattgaa

SEQ ID NO: 223368 - DNA, 120 bp, Artificial Sequence
  ENSG00000117620_36 (sequence is synthesized)
tgtcacataatttcatggaaggaaaggtagcttgatatttagattctaagatataatctgaaaggaaactaattatgttctctacacttactgtaatactgattattcttacatatcaaa

SEQ ID NO: 223369 - DNA, 120 bp, Artificial Sequence
  ENSG00000117620_37 (sequence is synthesized)
ttattgaactttaaaaatttcattgtatagtcattaaactgagttgggttttttcttaaagggtttagcatcactcatttgatttacacattcacattataatatttaattatcatgggt

SEQ ID NO: 223370 - DNA, 120 bp, Artificial Sequence
  ENSG00000117620_38 (sequence is synthesized)
gtatgctttacataaaaaaggtttataaaagttatttatgctatattgaaagtcatcttaagaatctccaggttatttaaagtagttataggagcagagaacaagcacctttatcaaaat

SEQ ID NO: 223371 - DNA, 120 bp, Artificial Sequence
  ENSG00000117620_39 (sequence is synthesized)
ctggtcctatgtgccttgctttaccaaatacctgatttttctggagggtgttcctgtaattcacaactgtagacacatgggcaaaattaggatttttaagaataaatacatttctatttt

SEQ ID NO: 223372 - DNA, 120 bp, Artificial Sequence
  ENSG00000117620_40 (sequence is synthesized)
tttggttgtttcaacattagctcttcaaattcattaacaaaattaaaataggtatattacaaaagcataaacatttgtgaacagtacttaaataaattgtgatactattgctccatcatt

SEQ ID NO: 223373 - DNA, 120 bp, Artificial Sequence
  ENSG00000117620_41 (sequence is synthesized)
gaactttttgaaactttaacaattgtataaaactgtcagtttgttgtttcatttgtaattacaaaataatttaaaaactttttaaaataatttggatcctgactttgtctatatctgtat

SEQ ID NO: 223374 - DNA, 120 bp, Artificial Sequence
  ENSG00000117620_42 (sequence is synthesized)
ttcatttgtttagaaagattcttttgggtttgataatgtaatttgtatatttaaattttttatggacataattcaaaggaatgtataaattggtcttttgttaaatggctttttaattga

SEQ ID NO: 223375 - DNA, 120 bp, Artificial Sequence
  ENSG00000117620_43 (sequence is synthesized)
tattttcataaagaactctatacaaatctttttctatatttccttattttcctatttacctgtgtctatgacctaacctatgaattagtcttctctctttatatatcaaaaatgaattac

SEQ ID NO: 223376 - DNA, 120 bp, Artificial Sequence
  ENSG00000117620_44 (sequence is synthesized)
tgatctttttctctggctctgtagtatctctatcactgtcacatgtgatctttcttccttttctctagcccatattctagcatgaaatactgggttggccaggtgcagtggctcattcct

SEQ ID NO: 223377 - DNA, 120 bp, Artificial Sequence
  ENSG00000117620_45 (sequence is synthesized)
gtaatcccaacactttaggaagccaaggcagaagaatcgcttgagcccatgaatttgaggccagcctgggcaacatagccttgtttctacaaaaaatcttaaaaataaaattagccaata

SEQ ID NO: 223378 - DNA, 90 bp, Artificial Sequence
  ENSG00000117620_46 (sequence is synthesized)
gctgaggcagaaggattgcttgagcccagcaatttgatgctgcagtaaaccatgatgacactactggactctagcctgagtgacacaaaa

SEQ ID NO: 223379 - DNA, 120 bp, Artificial Sequence
  ENSG00000117620_47 (sequence is synthesized)
agactctgtctcaaaaaacaaacaaaacaaaaactgaaacaacaaaaaaagactgggtttatttaagctagttagaatttatctttctatatgttaataacagcctaacagattttttgt

SEQ ID NO: 223380 - DNA, 120 bp, Artificial Sequence
  ENSG00000117620_48 (sequence is synthesized)
ttgttttaaatatctctaggctagcctcaaggttaagtaattatagaagtttggtatgtattttcttcataatttgaatataattgcttccattgtgactgtcaattgaatgcatggaga

SEQ ID NO: 223381 - DNA, 120 bp, Artificial Sequence
  ENSG00000117620_49 (sequence is synthesized)
tcaattgtgataatatacaggattttagtcctatctctactgctgaagtaaccttacacaaaatactttgtaaaaaaatcactaaagtgccagcatttttaaagtgtatatttttctttg

SEQ ID NO: 223382 - DNA, 120 bp, Artificial Sequence
  ENSG00000117620_50 (sequence is synthesized)
gcaacctctcatgaaaagcactaactaaaaatatttaataatcttttttgtattacagtgcttcttttgttggaaatatatcacaatcctcaagttccactgctatgcaaaagtatctta

SEQ ID NO: 223383 - DNA, 63 bp, Artificial Sequence
  ENSG00000117620_51 (sequence is synthesized)
tcacaatcctcaagttccactgctatgcaaaagtatcttagaatctgaatcttatagataata

SEQ ID NO: 223384 - DNA, 88 bp, Artificial Sequence
  ENSG00000117620_52 (sequence is synthesized)
gctgcgcccggccaatactgcctttcaaaagagactgatagtgaccagcattagtaatcatactggtggggttttttggggtgttttt

SEQ ID NO: 223385 - DNA, 120 bp, Artificial Sequence
  ENSG00000117620_53 (sequence is synthesized)
ctgttttgttttttgttttttgtttttgagacaaggtcttcctcccgttgcctaggctggagtgcggtgacacaatcttggctcactgcagccttgatagagcaagctcaagtgatcctc

SEQ ID NO: 223386 - DNA, 89 bp, Artificial Sequence
  ENSG00000117620_54 (sequence is synthesized)
ctcactgcagccttgatagagcaagctcaagtgatcctcccaggagcctcggcccccaagcagctgggaatacaggtgcgcttgtagag

SEQ ID NO: 223387 - DNA, 120 bp, Artificial Sequence
  ENSG00000117620_55 (sequence is synthesized)
caaagtgttgggattacaggcgtgagcgaccacacccagcccatattggtctttcttactgttcttaaaaagagaattcctttaaggcaggaccgattacatatacactctagaaaagaa

SEQ ID NO: 223388 - DNA, 120 bp, Artificial Sequence
  ENSG00000117620_56 (sequence is synthesized)
aggaccgattacatatacactctagaaaagaaaatagcaaggaagaaataaattgccttcaattaccaaagatttgagcttctgctatggctgagagtgttttggtcattgcaaattcag

SEQ ID NO: 223389 - DNA, 120 bp, Artificial Sequence
  ENSG00000117620_57 (sequence is synthesized)
gggtttcccaagttcaccctcagttctggctagaaagagaaaacttactaaaagctattatactcacagtcatatttattacagagaaaggaaatacaaattaaaaccagccaaaggaag

SEQ ID NO: 223390 - DNA, 120 bp, Artificial Sequence
  ENSG00000117620_58 (sequence is synthesized)
tgacacataaaacagagtctaggagtggtccaaacttgaggctttcggtgtccttttcttgtagcgtcatggaaggtgttatctactcctgaccacaatgtttgacagtacacacatagt

SEQ ID NO: 223391 - DNA, 120 bp, Artificial Sequence
  ENSG00000117620_59 (sequence is synthesized)
attgccattcagggaagctcacctaagctttggtgtccagatttttattgagagaggctctattagttggcatggttggttgatttttttgcccatgtagttgtcctctctttccaacat

SEQ ID NO: 223392 - DNA, 120 bp, Artificial Sequence
  ENSG00000117620_60 (sequence is synthesized)
ctgcccctccctggagatctggttgacatcaagacttcagggcctcaccataggttatctcgttagcataaactgtcaagtgttgtctaaggaacccacaatgaataataaagacattcc

SEQ ID NO: 223393 - DNA, 120 bp, Artificial Sequence
  ENSG00000117620_61 (sequence is synthesized)
tatcagtgagaactcccaaagacttacaccagaactttctttggatgggccaaatttcttactacacaaagaccattcatctctatacacttccttctgaattgatgaggatgatacaag

SEQ ID NO: 223394 - DNA, 63 bp, Artificial Sequence
  ENSG00000117620_62 (sequence is synthesized)
ctctatacacttccttctgaattgatgaggatgatacaagcaacgacaattcttcttttcaga

SEQ ID NO: 223395 - DNA, 120 bp, Artificial Sequence
  ENSG00000117620_63 (sequence is synthesized)
tcatttttaattttagaatatctgtcaaatgattctgaacataacatgaatctagtgtggaaaaatgtttataatcagatattgtgttaagaacatatatatatatatagagagagagag

SEQ ID NO: 223396 - DNA, 120 bp, Artificial Sequence
  ENSG00000117620_64 (sequence is synthesized)
agcatagtattgtcatttagttttcacttcttatgtttaatgacaactttataaatgctggactattttaaactacaaatttaaaacatggtttataaaccttttacctgtactgcatat

SEQ ID NO: 223397 - DNA, 120 bp, Artificial Sequence
  ENSG00000117620_65 (sequence is synthesized)
taataaacaattttgaactaattttaaattaggcattcctatcaccattataaggaagagctaaaacctgataccagttgttattttggctcacagtagggcttcactagtgttaggatc

SEQ ID NO: 223398 - DNA, 120 bp, Artificial Sequence
  ENSG00000117620_66 (sequence is synthesized)
acattttcctcccttggacctgagaatcaggtgtttttcgtttaatgcatttattttcattcattcatttaggatttctaaaatgttagaggtaatttgtttaaaacaaataacatggtg

SEQ ID NO: 223399 - DNA, 120 bp, Artificial Sequence
  ENSG00000117620_67 (sequence is synthesized)
ttcttttggaaatatacagtttatcttagatatacactttcctcattttaaaggtagaactcactgcaggtttaaaagaataatgaatattgttacagtgtttagtgataatcactgaaa

SEQ ID NO: 223400 - DNA, 120 bp, Artificial Sequence
  ENSG00000117620_68 (sequence is synthesized)
taatgaatattgttacagtgtttagtgataatcactgaaaattcacgttaaaatatactttaagcttgtccaacgcgcggcctgcaggctgcatgcagcccaggatggctttgaatgtgg

SEQ ID NO: 223401 - DNA, 120 bp, Artificial Sequence
  ENSG00000117620_69 (sequence is synthesized)
tttttttgcaattttttaaagctcatcagctattattagttactgtattttatatgtggcccaagacaattcttcttctttaagggtgacccagggaagccaaaagattggacaccccag

SEQ ID NO: 223402 - DNA, 120 bp, Artificial Sequence
  ENSG00000117620_70 (sequence is synthesized)
ctttaaatgtagagtatttaagaggttcagttaaatgtactaaatcagacttgtgtgatttagacacaaaatctgtgtgtgtgtgtgtttggtcttttaaaagatactgcatgtacaaac

SEQ ID NO: 223403 - DNA, 120 bp, Artificial Sequence
  ENSG00000117620_71 (sequence is synthesized)
atgatttctaataattgagggtttattaagtttttccctttaggctaaagttttattttattctgcttggatagtaaatacagcattttaaaatgatgatgctaagtgcttttttaatat

SEQ ID NO: 223404 - DNA, 120 bp, Artificial Sequence
  ENSG00000117620_72 (sequence is synthesized)
atgcatgctgcttcaataggtcttttaaatatagccaaggcagggtaatatttcctgagtgatgatagaattatagaaaatcatgaaagatgtgtgcccatgtttcattttataactgtt

SEQ ID NO: 223405 - DNA, 120 bp, Artificial Sequence
  ENSG00000117620_73 (sequence is synthesized)
ccagtcatattgctatgaattctagaattttaaaacctgccacacttattttggatgttatatacacataatgcctcaaatttccattatttcatattatttttctccatttccctcgtg

SEQ ID NO: 223406 - DNA, 120 bp, Artificial Sequence
  ENSG00000117620_74 (sequence is synthesized)
tcaagtttcattttgttttcaatgttttgtttttataatattgccattttaatggcttcaatcatgctatgacagattgtgccaatttagctttaaaaaactcatgggctacctccatga

SEQ ID NO: 223407 - DNA, 120 bp, Artificial Sequence
  ENSG00000117620_75 (sequence is synthesized)
actcacacatgcggcattgttaaagaaccttttttaaaattaaattttctccagcttttcattttgcagcatacaaaaaaattgaaaaattggtataccacctaaatccaaccattatta

SEQ ID NO: 223408 - DNA, 120 bp, Artificial Sequence
  ENSG00000117620_76 (sequence is synthesized)
acattttgccacactagctttatctctgttgggacactttacccctacatactccagcatgcgtgacctaaagatatggacatcttcttaattaacctcagtgccattatgacacctaag

SEQ ID NO: 223409 - DNA, 120 bp, Artificial Sequence
  ENSG00000117620_77 (sequence is synthesized)
aaaatttaaattaattcaggtcacttcatctaagttcaaattcaaatacaattgcccctctgtaaacgtgggggattggttccaggacccccacctcgtgtataccaaaatttgggcaca

SEQ ID NO: 223410 - DNA, 120 bp, Artificial Sequence
  ENSG00000117620_78 (sequence is synthesized)
ctcaagtccttaaggggaaaccgcgtataagaaaagtcagccctccctatgggtgggtttcacatcctgcaaataactgtgttttccatctgcatttggctgaaaaaaaatctgcatata

SEQ ID NO: 223411 - DNA, 120 bp, Artificial Sequence
  ENSG00000117620_79 (sequence is synthesized)
agtggacccatgcagttcaaatctgttgttcaagagtcaactgtattcccagttgtctcaaaaatgattttttatagcttttttgttttggaacgagggtaaaatcaaggttaatgcttt

SEQ ID NO: 223412 - DNA, 120 bp, Artificial Sequence
  ENSG00000117620_80 (sequence is synthesized)
gtatttgattgtctcctttggtcttgaagtccccttcctgcaccaccacctgcccctcaatggcttttttataccaagagactgaaaatgctacctctaatgacttttctccccatgata

SEQ ID NO: 223413 - DNA, 120 bp, Artificial Sequence
  ENSG00000117620_81 (sequence is synthesized)
gtactctttgaaggaccaaagttactttgctcctattatgtggtttgatttgttccctttattcctttcatgtcctttgaactggaagtcaagtctataggtttgattaccttcaggtta

SEQ ID NO: 223414 - DNA, 120 bp, Artificial Sequence
  ENSG00000117620_82 (sequence is synthesized)
aatgtattgggtaaaaatatttcacagattttatattgtatcatattaaaaggcacagataatctcattattaatgttggtaattatttggttaagatgatgactaccccattgtaaagg

SEQ ID NO: 223415 - DNA, 120 bp, Artificial Sequence
  ENSG00000117620_83 (sequence is synthesized)
ttattgtaaagttctccctgtggtaaaggtcatttgttcacccttagtaatctatggagtaatgttttagcaccaggagaatattctgtttcccaatgcctttagcatcaattgatgatt

SEQ ID NO: 223416 - DNA, 120 bp, Artificial Sequence
  ENSG00000117620_84 (sequence is synthesized)
cttgactgaatcatttattacactggggtgcaaaatggtgataaattttttttagtgctctaaatttcttctacatttattagtttatattcttttttaaaataaaaaagtatatttccc

SEQ ID NO: 223417 - DNA, 120 bp, Artificial Sequence
  ENSG00000117620_85 (sequence is synthesized)
tcctgtttctctaatatccctctttaaaaaaaagaccatgtcttcatgaatttaaaaaaaattactcaatatattatagccaatcggtcacagttctttttgatgctcatatatattgtg

SEQ ID NO: 223418 - DNA, 86 bp, Artificial Sequence
  ENSG00000117620_86 (sequence is synthesized)
caatcggtcacagttctttttgatgctcatatatattgtgagcctctagcccatgtaagtcacagcaagctagctcttgggagctg

SEQ ID NO: 223419 - DNA, 67 bp, Artificial Sequence
  ENSG00000117620_87 (sequence is synthesized)
cttgtgttttttaaacatgaccacattagtcttttagtccttatttgctttaggcacaagaaatctg

SEQ ID NO: 223420 - DNA, 120 bp, Artificial Sequence
  ENSG00000117620_88 (sequence is synthesized)
agtcttttagtccttatttgctttaggcacaagaaatctgaggcttaccttatatttgtcttgttccaaatttggattatcagctaattctccaaggagccctataccttttaaggggag

SEQ ID NO: 223421 - DNA, 120 bp, Artificial Sequence
  ENSG00000117620_89 (sequence is synthesized)
tgggatttatttaattttttctttggagtccttctagccagtgaatggaatttattatagaatccattgttactgagctgtcattgtttctaggccattttagtggacatagctaggaaa

SEQ ID NO: 223422 - DNA, 120 bp, Artificial Sequence
  ENSG00000117620_90 (sequence is synthesized)
atagctaggaaatacaattttaaaagatcatgaattcaaattaatatttacaactaaaatttagcaacatggccaggtgcagtggctcatccctgtaattccagcactttgggagtctga

SEQ ID NO: 223423 - DNA, 120 bp, Artificial Sequence
  ENSG00000117620_91 (sequence is synthesized)
tgggcaacagagtgagatcctgtctctacaaaaaaaaaaaaaaagataaattttttcgaaaagttttatatgaaaagtgtactctgaaaaaatctagctgtcatacctatccctccattc

SEQ ID NO: 223424 - DNA, 120 bp, Artificial Sequence
  ENSG00000117620_92 (sequence is synthesized)
tctagctgtcatacctatccctccattcctaaccatctcttataagtaattattatccatctcttataagtaattattataagtattttcttagttttccaatttatctttcatgtgttt

SEQ ID NO: 223425 - DNA, 120 bp, Artificial Sequence
  ENSG00000117620_93 (sequence is synthesized)
ctttttaaaaagcaaacaaatatgcatattgctgtacttactgtgcctctttcacaacatggggtctttataaaatttctttggatgtttagaaaggtttgtatgctctaatttatactg

SEQ ID NO: 223426 - DNA, 120 bp, Artificial Sequence
  ENSG00000117620_94 (sequence is synthesized)
ataacattttatataatgcatttagagtccccaatttgcttgtctaggcctctactatttaatttgacacctttaaatgatgttctttgactcttatctaattgtctatgtgaccgtcag

SEQ ID NO: 223427 - DNA, 120 bp, Artificial Sequence
  ENSG00000117620_95 (sequence is synthesized)
tgaatatattatctgttcatattttctgtagtcttatttctttttgattagaacatataatatttacacactattttcccatcctaatccccacctttgtaataaaattaattaaaattt

SEQ ID NO: 223428 - DNA, 120 bp, Artificial Sequence
  ENSG00000117620_96 (sequence is synthesized)
taaaaaagtatatttaataacctactgatacttacctgaagtctctctggtcaacttttggctggatgaagctcttctgtagagtattcaaggagggcttgtaagtactgtacaatattc

SEQ ID NO: 223429 - DNA, 120 bp, Artificial Sequence
  ENSG00000117620_97 (sequence is synthesized)
tctgagttgtgacatgtttaaaatttcttctggagcctagatacttaaagtacaccttggccatgtagaaaatccttgacaaacatttccttttcttgagtttgtctgaatttgtgcttc

SEQ ID NO: 223430 - DNA, 120 bp, Artificial Sequence
  ENSG00000117620_98 (sequence is synthesized)
actgttgggttgcttgatgttatcatcaagaagtgtggcaccacttgatttttttcccttttggaaatgacattttgtttgttgttttttacctagagacccagataattttttctatat

SEQ ID NO: 223431 - DNA, 120 bp, Artificial Sequence
  ENSG00000117620_99 (sequence is synthesized)
tattttatctatgatcctttttatctcatttttgttctcatagctgttttattcctcttctctgtatttcttactttacttttatttgtgtctctcaggtaccctgtgatttagttttca

SEQ ID NO: 223432 - DNA, 120 bp, Artificial Sequence
  ENSG00000117620_100 (sequence is synthesized)
tttttagatgattttatcttttcagtatattgcctatgtttgttcaactctcattttacatcttactattgagtttaaaaatttttatttgctgtgttcttttatatgtgcaattaatga

SEQ ID NO: 223433 - DNA, 120 bp, Artificial Sequence
  ENSG00000117620_101 (sequence is synthesized)
tattcatgttggagtgttgtatattatttgcctctgcttcatattgtctagagggtagtattttctattgattgaaaagttttcattttctgttttttataatagccttgtatggatttt

SEQ ID NO: 223434 - DNA, 120 bp, Artificial Sequence
  ENSG00000117620_102 (sequence is synthesized)
tggtggcttttctattcatgattaaatgtgtaggatcttcttcaatcagcaataacaggtggctctatagaatggagggtagaagggatgtgggtgacttactcagtttttagttaaaga

SEQ ID NO: 223435 - DNA, 120 bp, Artificial Sequence
  ENSG00000117620_103 (sequence is synthesized)
ggaccctcttctgttagcatggtgaagtgcagtttctttaataaattgtgcatggtgggggtgggatttggattctgtgatacaatcttgtttctttaggaatcttttacttttggccac

SEQ ID NO: 223436 - DNA, 120 bp, Artificial Sequence
  ENSG00000117620_104 (sequence is synthesized)
ttgcctttctttccaaggaatcccactccctttcaaggtgcctcatgaactgttttcatgaactttccaaacattggtttctgcttgtttctaagcctgattcttggccttctcattaat

SEQ ID NO: 223437 - DNA, 120 bp, Artificial Sequence
  ENSG00000117620_105 (sequence is synthesized)
tttcaaaacttccaatatccttccaaataattcccttttgcttacgttagcgagtactagtttgttagccagtgttagtttctgttgatcctaaccaaaaaaccctaactgagatatcag

SEQ ID NO: 223438 - DNA, 120 bp, Artificial Sequence
  ENSG00000117620_106 (sequence is synthesized)
tctcttagcgcaaagtttgtgaatacggtcatccctccatatgaggaggggagtgggaattggttgtgggacttccgtggatatccaaatcagtggatgctaaagtcccttacataaaat

SEQ ID NO: 223439 - DNA, 120 bp, Artificial Sequence
  ENSG00000117620_107 (sequence is synthesized)
ggcatagtatttggttatcatcctccccatacatcatctctagattatttatagtacttaatacaatgtaatgctgtgtagtcatactgtattttttacttgtatttttgttgttttgtg

SEQ ID NO: 223440 - DNA, 120 bp, Artificial Sequence
  ENSG00000117620_108 (sequence is synthesized)
ggatttaaaaaatatttttattctgaggatagttgaatccacaggatactgagggccagctgtattcacaacccaaatcacatacaaagcgacaagttcatacacaataggcctattaga

SEQ ID NO: 223441 - DNA, 120 bp, Artificial Sequence
  ENSG00000117620_109 (sequence is synthesized)
acaggactgttctctcttgtttatcattgcagcctttctagcacaaagcctgggacattctggacatttagtatgtgttaaatttctcttactacattatttccaacagtatttactgca

SEQ ID NO: 223442 - DNA, 120 bp, Artificial Sequence
  ENSG00000117620_110 (sequence is synthesized)
atctgcaattaccttccttttgttttgtaactgtgtcccccactagaatgtaagctctgtgcagatagtgtctcatttattgatgtatccctggcatctaataaaacactgacaacacaa

SEQ ID NO: 223443 - DNA, 120 bp, Artificial Sequence
  ENSG00000117620_111 (sequence is synthesized)
agtgtgtgcctcagcgcctggtgcgtgcggagctagtgacgggtgggcccggctggggcccgtcattccttcagtgaacatcccatgagctctcgctcggtgttgagccctgtggtaggc

SEQ ID NO: 223444 - DNA, 120 bp, Artificial Sequence
  ENSG00000117620_112 (sequence is synthesized)
acagatgcacccgaccagcacctggagctcaagaagccgcaggaacttaaagaaatggaaaggctgcccttgggtctcactgtcaccttggctggagtacagaggcgcaatctcagctca

SEQ ID NO: 223445 - DNA, 120 bp, Artificial Sequence
  ENSG00000117620_113 (sequence is synthesized)
ctgtattttaatataaagaatcaaagtagctcctgatatactgatgtgagggggaaaaggtccctcctgttagtgctctcgtatctagtttattcaaggaagtgaaaatagaagtgatct

SEQ ID NO: 223446 - DNA, 120 bp, Artificial Sequence
  ENSG00000117620_114 (sequence is synthesized)
taatgctgtaatgaaatcttattttgtacaggggtctttaatgaactttgtggttttaaatgtaacataatgaaaatacaagtttaagaataaaagagttgaagctaaaggcaaatataa

SEQ ID NO: 223447 - DNA, 120 bp, Artificial Sequence
  ENSG00000117620_115 (sequence is synthesized)
gttgcttttgtacaggtaactattcaagataagtatatatttttatctttattgtggtttcaaaaccttatttattttgtgtggagaaatatggttctattgattgttgaaaccaacaaa

SEQ ID NO: 223448 - DNA, 120 bp, Artificial Sequence
  ENSG00000117620_116 (sequence is synthesized)
tgtttttccccacaactaacatatgttttgagggcatcctttatgtgacatactacattgggagtgtaagtaatacagaggaattaatcaaaataaaattatattacctacagaagtgaa

SEQ ID NO: 223449 - DNA, 120 bp, Artificial Sequence
  ENSG00000117620_117 (sequence is synthesized)
cattctaattagggaaataagacactgcattttaaagaaagttgatttttgctggatatctgtagcatttgagattattagccactccctttttattttctatcggcttcacaataccat

SEQ ID NO: 223450 - DNA, 120 bp, Artificial Sequence
  ENSG00000117620_118 (sequence is synthesized)
tttttcctggttcttttatctttctaatgattccttattggttttcttcataggaatcttttctgtgagactccctttaaatactggggttgcttgcaggtttgttatttcttctaagtt

SEQ ID NO: 223451 - DNA, 120 bp, Artificial Sequence
  ENSG00000117620_119 (sequence is synthesized)
acatctttatttttggagatttcatctattcttggggggcggttaattttaattttttaaaaaaaatttataaagtgacggggtctcactgtgtttcccagactagtctctcaaacttct

SEQ ID NO: 223452 - DNA, 120 bp, Artificial Sequence
  ENSG00000117620_120 (sequence is synthesized)
gggctgaagtgatcatcctgcctcagcctcccaaagtgttagatgtgagccactgcacctggccttattatttattatgattattattatttttagtcctcagtgatacttgttctgatg

SEQ ID NO: 223453 - DNA, 120 bp, Artificial Sequence
  ENSG00000117620_121 (sequence is synthesized)
gatggaaggtttttttaatacttatatcctgataattcctcagttcatgccatcactttccctgaagtgtggtatttatatcataaataactttttaattttttttttttttttgagatg

SEQ ID NO: 223454 - DNA, 120 bp, Artificial Sequence
  ENSG00000117620_122 (sequence is synthesized)
ttttcatatttattttaaatgagtattacaaaagtttaagtggcatatcaaattcatattttcataaatattgcttagggtaagctaaagtaggcattgtttcaaacagttaggtatttt

SEQ ID NO: 223455 - DNA, 120 bp, Artificial Sequence
  ENSG00000117620_123 (sequence is synthesized)
aaattagaaagttattaatagttcaggtggaacataagtttgacaaaaccatgaaaatgataggcaaataactgaagcttcaggaacacagacctataggataaagctcagagtgattag

SEQ ID NO: 223456 - DNA, 120 bp, Artificial Sequence
  ENSG00000117620_124 (sequence is synthesized)
tgtgacacactggaccttctgaaatgtacctacagttctagactcatttctgctgctgcatacttcacactctgaattgctacaactgagctgcttgtaggggctattttgcacagctga

SEQ ID NO: 223457 - DNA, 120 bp, Artificial Sequence
  ENSG00000117620_125 (sequence is synthesized)
gcatttatccattctttctcttgtgcctacaatgccttctcccctttctttgcctggctaactcctacctttaagactcagctcagtcttaaagtctgcctctaccagaatatcttccta

SEQ ID NO: 223458 - DNA, 120 bp, Artificial Sequence
  ENSG00000117620_126 (sequence is synthesized)
acatcacaggcataacatttaaacatttgtgccttcttctgtaccaccatagtactttgtacatatcttttccaaagtacttatattatagttaaatgctcatttatatgtctgtttaca

SEQ ID NO: 223459 - DNA, 120 bp, Artificial Sequence
  ENSG00000117620_127 (sequence is synthesized)
cttacaacttaagttcctagaaggcagcagctgtgtttcaccgctcttccattcatagtgcctaattagcaagacttaaacaaatgatatttgtttttatgtgattggttgtcaactgat

SEQ ID NO: 223460 - DNA, 120 bp, Artificial Sequence
  ENSG00000117620_128 (sequence is synthesized)
tttatatcctgtaagtacagatgactcctgggaaatcttcagggatgatattggagttaaattaggtgttgaaaggtaataattataatgaaatttgcatactgagtacttatgtgccag

SEQ ID NO: 223461 - DNA, 120 bp, Artificial Sequence
  ENSG00000117620_129 (sequence is synthesized)
gtgcccacttggtacttatcttgtataatctcatgttatacccaactgtttaaggtagatattattcttcccaactttcaaaagagttattgaagctcagagaggttaatgaaattgctt

SEQ ID NO: 223462 - DNA, 120 bp, Artificial Sequence
  ENSG00000117620_130 (sequence is synthesized)
attgatcccaatctagtagtggcagagccagaaccaaatctccttaaaacttttcactatttgtgtttcagtaggtcggaaacagcagaaaaagcattacataaaaggtatgttaaaaaa

SEQ ID NO: 223463 - DNA, 120 bp, Artificial Sequence
  ENSG00000117620_131 (sequence is synthesized)
aatacagatgtcgatctgtggataagcacaaataagttaaggagtggtaatagtcttctttgattggaacaaataattgacaaagatatggcgagagatgaaattacaaaatacagattg

SEQ ID NO: 223464 - DNA, 120 bp, Artificial Sequence
  ENSG00000117620_132 (sequence is synthesized)
gtcctagattatatgtggtcttcagtattgagccaggagcttaggcttgactgcttttggctgtaagggctcactggagagttggaagggagagaggcatatcagagaaatcctataggc

SEQ ID NO: 223465 - DNA, 120 bp, Artificial Sequence
  ENSG00000117620_133 (sequence is synthesized)
acacttttaaaaggtaatgctgtgatccatgcagccaggaaggggttggtccctcataactctgcaatcctctgggcccagttttctttttcctctcccggttgatgacactaggcccat

SEQ ID NO: 223466 - DNA, 120 bp, Artificial Sequence
  ENSG00000117620_134 (sequence is synthesized)
tggtggtacggctttgggtttccttcagtctcaagatctcagtcagggtgggtgaagtggaagaacaagccttcttgcagaccactggttggttggcagcctttgccatagctaatctgg

SEQ ID NO: 223467 - DNA, 120 bp, Artificial Sequence
  ENSG00000117620_135 (sequence is synthesized)
ttgttttcaggtcagtgacagtcacttttaggagagggttcgtttgctttcaaaatccatctccccgttcctctcagggttctttgccccaaaggactttgcccttccttacgcagtgga

SEQ ID NO: 223468 - DNA, 120 bp, Artificial Sequence
  ENSG00000117620_136 (sequence is synthesized)
caccttggcaccctctgcaaacagacagtcccgcagaggccctcgacgagtgtcactccatctgtttcgcgctcctaggagaggtgtagcagaaagcagtgccccaggcctccacgcgac

SEQ ID NO: 223469 - DNA, 120 bp, Artificial Sequence
  ENSG00000117620_137 (sequence is synthesized)
ggtgaagcaggaaccaggggctgccagcagagcagcccaggtgcgtcgccttagggacagagctgccaagtgccgagctggggctgccagagccgagccgggaacggcatttgccagagc

SEQ ID NO: 223470 - DNA, 120 bp, Artificial Sequence
  ENSG00000117625_0 (sequence is synthesized)
ctcctcctccgccgccgccgccgtctcctcctcctcctcctttccctcccgcccgcgctctaagccatctccgccttcaccctgacgcctgcctcttcccctcacctttccccctcccct

SEQ ID NO: 223471 - DNA, 120 bp, Artificial Sequence
  ENSG00000117625_1 (sequence is synthesized)
gttctaccatgcccggcatgatggagaaagggcccgagttactggggaagaaccgatcggccaacggcagcgccaagagcccggcaggcggcggcggcagcggcgcctcgtccaccaacg

SEQ ID NO: 223472 - DNA, 120 bp, Artificial Sequence
  ENSG00000117625_2 (sequence is synthesized)
gcgggctgcactactcagagcccgagagcggctgcagcagcgacgacgagcacgatgttgggatgagagtcggagccgaataccaagctcggatccctgaatttgatccaggtgctacaa

SEQ ID NO: 223473 - DNA, 120 bp, Artificial Sequence
  ENSG00000117625_3 (sequence is synthesized)
agtacacagataaagacaatggagggatgcttgtatggtctccatatcacagtatcccagatgccaaattggatgaatacattgcaattgcaaaggaaaagcatggctacaatgtggaac

SEQ ID NO: 223474 - DNA, 120 bp, Artificial Sequence
  ENSG00000117625_4 (sequence is synthesized)
aggcacttggcatgttgttctggcataaacataacattgagaagtcccttgctgatctccctaatttcactccctttccggatgagtggacagtggaagataaagtcctatttgaacaag

SEQ ID NO: 223475 - DNA, 120 bp, Artificial Sequence
  ENSG00000117625_5 (sequence is synthesized)
cctttagttttcatggaaagagctttcacaggattcagcaaatgcttccagataagacaattgcaagccttgtaaaatattactattcttggaaaaaaactcgctctaggacaagtttga

SEQ ID NO: 223476 - DNA, 120 bp, Artificial Sequence
  ENSG00000117625_6 (sequence is synthesized)
tggatcgccaggctcgtaaactagctaatagacataatcagggtgacagtgatgatgatgtagaagaaacacatccaatggatgggaatgatagtgattatgatcccaaaaaagaagcca

SEQ ID NO: 223477 - DNA, 120 bp, Artificial Sequence
  ENSG00000117625_7 (sequence is synthesized)
aaaaagagggtaatactgaacaacctgtccaaactagcaagattggacttggaagaagagagtatcagagtttacaacatcgccatcattctcagcgttctaagtgccgtccacctaagg

SEQ ID NO: 223478 - DNA, 120 bp, Artificial Sequence
  ENSG00000117625_8 (sequence is synthesized)
catgtatttaacccaggaagatgtggtagcagtttcctgtagtcccaatgcagccaacaccatcctgaggcaactggacatggagttgatctctctaaaacgtcaggttcagaatgctaa

SEQ ID NO: 223479 - DNA, 120 bp, Artificial Sequence
  ENSG00000117625_9 (sequence is synthesized)
gcaagtaaacagtgcacttaaacagaaaatggaaggtggaattgaagaattcaaacctcctgagtcaaatcagaaaattaatgcccgttggaccacagaggagcagcttctagcagtgca

SEQ ID NO: 223480 - DNA, 120 bp, Artificial Sequence
  ENSG00000117625_10 (sequence is synthesized)
aggtgtccgcaaatatggtaaagattttcaagctattgcagatgtaattggcaacaagactgttggccaagtgaagaacttctttgtaaactacaggcgtcggtttaacttagaggaggt

SEQ ID NO: 223481 - DNA, 120 bp, Artificial Sequence
  ENSG00000117625_11 (sequence is synthesized)
attgcaggagtgggaagcagaacaaggaacccaggcttctaatggtgatgcttctactttaggggaggagacaaaaagtgcttctaatgtgccatcagggaagagcactgatgaagaaga

SEQ ID NO: 223482 - DNA, 120 bp, Artificial Sequence
  ENSG00000117625_12 (sequence is synthesized)
ggaggcacagaccccacaggctcctcggacactgggtccatcacctcctgccccatcatccactccaacaccaacagcccctattgccactctgaaccagcctccaccacttcttcgtcc

SEQ ID NO: 223483 - DNA, 120 bp, Artificial Sequence
  ENSG00000117625_13 (sequence is synthesized)
aacactgcctgctgccccggctcttcaccggcagcctcctccactccagcagcaggctcggttcatccagccccggccaactttaaatcagcctccaccacctcttattcgccctgctaa

SEQ ID NO: 223484 - DNA, 120 bp, Artificial Sequence
  ENSG00000117625_14 (sequence is synthesized)
ttccatgccaccccgtctaaacccaagaccggtgttgtccacggttggtggtcaacagccaccatcacttattggaattcagacagattcacagtcctcactgcactaaaaattaaattg

SEQ ID NO: 223485 - DNA, 120 bp, Artificial Sequence
  ENSG00000117625_15 (sequence is synthesized)
gacacagctgcagtaacttttcaccccatcattataccagtgctcatctgactgatgaaaaagaggaaagaataatcatttctagatactgaggctgcgaactagttctgtggcagtgga

SEQ ID NO: 223486 - DNA, 120 bp, Artificial Sequence
  ENSG00000117625_16 (sequence is synthesized)
ctagcataagtggatgtctaagaaatttttcagttcactagactaaaatgttttacaacaaaaagcctccagttagcctcctttctagagtatatgttcagcaatgttgatctcataaaa

SEQ ID NO: 223487 - DNA, 120 bp, Artificial Sequence
  ENSG00000117625_17 (sequence is synthesized)
gcattacagagcacaactccttccaggctggaaacgctgccagaaagcagctctcgcttcacctctgccgggggactccgccctctcccccagcgctccaagcggagaccgcaggtcagc

SEQ ID NO: 223488 - DNA, 120 bp, Artificial Sequence
  ENSG00000117625_18 (sequence is synthesized)
tttgtgtgaacttatcaaccttgatttttactacccttccaaaagtggatggcccttatcgtattttaatttagttaaatatcaccaactttccaggctatcacttcttactgacacaaa

SEQ ID NO: 223489 - DNA, 120 bp, Artificial Sequence
  ENSG00000117625_19 (sequence is synthesized)
tcccgttttcccttacatgtggattgccttcccattatttgcctttcagaagcttttcctattctaaaaccatctcagtctccaacctttccttgttctgtttccccacttaaatcattg

SEQ ID NO: 223490 - DNA, 120 bp, Artificial Sequence
  ENSG00000117625_20 (sequence is synthesized)
tgactttttctcccgtcttgaaattcccctgtatactctgtactttttaactttaaagttatttgtattcattcatcttctgatttgtaagctttctgaagtttagatgaaaaaaaattt

SEQ ID NO: 223491 - DNA, 120 bp, Artificial Sequence
  ENSG00000117625_21 (sequence is synthesized)
tcataatgcatgttttctttcattttgttaccttttcattaatgatacctttccctccagtttctttcagatttaataaacatgaattgatcaacttttatttgcttaggcagtgtgcca

SEQ ID NO: 223492 - DNA, 120 bp, Artificial Sequence
  ENSG00000117625_22 (sequence is synthesized)
gatgcctttttagatatagtctaaatatatcctcatatttagttatatttaatccttagagcaacctacaacatagttactgcaagttgtgtgtacagaagatcctcgatatccaactgg

SEQ ID NO: 223493 - DNA, 120 bp, Artificial Sequence
  ENSG00000117625_23 (sequence is synthesized)
tcattaatccatgtaatgcatggagaagcaaaaattgccaaacaagaacactgactaataaaccaatcatttataaaattaggctctactcaccaactcttcctaattagctgtagctgt

SEQ ID NO: 223494 - DNA, 120 bp, Artificial Sequence
  ENSG00000117625_24 (sequence is synthesized)
tatctgtcccattcactacatcattatccttctctgtcactctcttgctaatacaatgcaaatacaacacaaaccaaaatgaaattgcgtactttgcaaaagatgagaaacttcatgaag

SEQ ID NO: 223495 - DNA, 120 bp, Artificial Sequence
  ENSG00000117625_25 (sequence is synthesized)
tctgttaaactgcaagagaatgacattagtcacctacagaattgacagatgagtatccagcagaattaaccattaaagaaaaaagtgatcactcacaggcaagcacttcacaaaagaata

SEQ ID NO: 223496 - DNA, 120 bp, Artificial Sequence
  ENSG00000117625_26 (sequence is synthesized)
atttgagaacaaagtattaagagaggcccttgagaaaattatttcaataagcctttaaaacaaaaaatgacccattttatgatcatgtaaatttcaaagccaaaggatgttgcaccattg

SEQ ID NO: 223497 - DNA, 120 bp, Artificial Sequence
  ENSG00000117625_27 (sequence is synthesized)
tatagtcagaaaagatacgccaaaaaataaagtgtattaaacacgtcattaactatttttaaaaaaactaatttctacaggttttagtttcacatttcagattgaactgcaatcaacctt

SEQ ID NO: 223498 - DNA, 120 bp, Artificial Sequence
  ENSG00000117625_28 (sequence is synthesized)
ttattttcttaccatttactataaaatattttgacctgttttaaattgatttcagtaccagttatccttgggtaccaagggccttttttatccaccttccacagccaaggtagcatcaga

SEQ ID NO: 223499 - DNA, 120 bp, Artificial Sequence
  ENSG00000117625_29 (sequence is synthesized)
ttgcctgtgcatgaactcagtgtgaacttccttagtgtaaagttagggtctcaattaacaatatatatcccttctgaatagagttcctcctccattcttgttacttcccttttgggggaa

SEQ ID NO: 223500 - DNA, 120 bp, Artificial Sequence
  ENSG00000117625_30 (sequence is synthesized)
catatgtttacctaatttttcctatctcctttttcttttttaacttttttagatttgttgtgctcttttattactgtttctttatgtctctcatagtttttgtcctattctcccctttct

SEQ ID NO: 223501 - DNA, 120 bp, Artificial Sequence
  ENSG00000117625_31 (sequence is synthesized)
cttttcctttttactgtttttcctttgccttatcaccaggttcctaaccttgaggcgtatccactgtctactaccttgcctgccctgctgtccctttttaatctcctcatctggaataca

SEQ ID NO: 223502 - DNA, 120 bp, Artificial Sequence
  ENSG00000117625_32 (sequence is synthesized)
gtggttcgttttaggtttttctctccttaattctaactccgtttttttactttttcatttctcctctaacaaattttttttaactttgggtttttgtttcattcttcattctgagtactt

SEQ ID NO: 223503 - DNA, 120 bp, Artificial Sequence
  ENSG00000117625_33 (sequence is synthesized)
gcacctccttacttttggtgagaaagctggtgttacctagaacctctgtgtgctatagaaactcttattgctaagaccataagtgaggtaagacctaaacgccccttctcaaaggaagcc

SEQ ID NO: 223504 - DNA, 120 bp, Artificial Sequence
  ENSG00000117625_34 (sequence is synthesized)
ctctttctgttttgcccaacatgcctcggtattacaccaagccactttatcttggcagttccttctgcaaacccctgcatgctggtgtagttatttctgtccatctactgtcaaaggtcc

SEQ ID NO: 223505 - DNA, 120 bp, Artificial Sequence
  ENSG00000117625_35 (sequence is synthesized)
taccactcagtgggtatacactaatgaagtctgattagatatttgctgttgtaatattaccatactgaaaatcctaaatttaggatttttgtggggagaaatattgggggtgtctggaga

SEQ ID NO: 223506 - DNA, 89 bp, Artificial Sequence
  ENSG00000117625_36 (sequence is synthesized)
taggatttttgtggggagaaatattgggggtgtctggagaaaaaaatattcttaccaggatcactttctgcttcagaaattttaagaaa

SEQ ID NO: 223507 - DNA, 120 bp, Artificial Sequence
  ENSG00000117625_37 (sequence is synthesized)
tcctggctaacacagtgaaaccccgttgggaaatgggaaactaatagactttctcatgttttgatatctctaattagagcataaatgcgaatgttgttccttcttgcaaattggtacatt

SEQ ID NO: 223508 - DNA, 120 bp, Artificial Sequence
  ENSG00000117625_38 (sequence is synthesized)
ttcttgcaaattggtacatttccctttcattatctttctgcatgggtaaaaggtaactcagaatatatatttttaatctttctaaaaatggaatcttcatgaatcagagttgtagtaatc

SEQ ID NO: 223509 - DNA, 120 bp, Artificial Sequence
  ENSG00000117625_39 (sequence is synthesized)
tcatgtctgtgatttgatgaaaatttaaaaaaataagcgctttggaaaatgtctgtcttcatatcctcattaggaaacttctctttaattttgtagtcaaatcagaaaattaatgcccgt

SEQ ID NO: 223510 - DNA, 120 bp, Artificial Sequence
  ENSG00000117625_40 (sequence is synthesized)
cctcttcatagtcaaggctcttagtacaggaatattgacttaggaattgtgaaaactccttaagtttcttaagttaaggatgtttggcttttttctttaattttttaaaaaccattttcc

SEQ ID NO: 223511 - DNA, 120 bp, Artificial Sequence
  ENSG00000117625_41 (sequence is synthesized)
tatgttaggagtgcaagaatagccagcatttccgattttgacatatgttcattttatgcatatttaagaaattatagctgcatatcccttctttcaaaaaatgttgcttttttttttaaa

SEQ ID NO: 223512 - DNA, 120 bp, Artificial Sequence
  ENSG00000117625_42 (sequence is synthesized)
ggaattttaatatattcctttaaaagaaagcaatttaatcaattgcaaagcaattatataaaaccacaaagaatgtactgaacctactaaccctttaacatacagtttagggtcctagcg

SEQ ID NO: 223513 - DNA, 120 bp, Artificial Sequence
  ENSG00000117625_43 (sequence is synthesized)
cagagtccttgtttaaaggtcattgactcatcatctgtcagtaatgagaggattggaagaataattttgcatacaaatgaggacttaatttgttgaaatataatctctttaagttccttg

SEQ ID NO: 223514 - DNA, 89 bp, Artificial Sequence
  ENSG00000117625_44 (sequence is synthesized)
gagttgatatcttcccatccacccgccgcttctttcctccatctagcgatttttattttttaagtgtctcttccatatatattttttgg

SEQ ID NO: 223515 - DNA, 120 bp, Artificial Sequence
  ENSG00000117625_45 (sequence is synthesized)
ggaagcatttctttacagtaccctttacatgtttggtttctgaacttaaaattgccctcatacttaataatatggtctgcatttaatatgaaaggtgttttattgataaatctattgtac

SEQ ID NO: 223516 - DNA, 120 bp, Artificial Sequence
  ENSG00000117625_46 (sequence is synthesized)
tatttggatacatttgtgtattccttgcagccaacctgtattcgtgggattggtgtagggttaaatcatcaacattatttcataaaataagaatttgttctgtgttatctaaagatgtat

SEQ ID NO: 223517 - DNA, 120 bp, Artificial Sequence
  ENSG00000117625_47 (sequence is synthesized)
cagtatattgtcacagttgtgctgttaactaaaaatgctgagacccctttttatagaaaaacaaaaagacatcaagtcttcttaattcaacccataatcattaagtacttaacaaagaat

SEQ ID NO: 223518 - DNA, 120 bp, Artificial Sequence
  ENSG00000117625_48 (sequence is synthesized)
attttacaagtgatagtatttcaacaatgtgtaattaatatttttgatacagtgatttcatattggaatcattatttgtgcaaagggacagacagatcacttagattgctatactagtgg

SEQ ID NO: 223519 - DNA, 120 bp, Artificial Sequence
  ENSG00000117625_49 (sequence is synthesized)
acataggctacatgtttgcacattcacattcttatcacgtgtagaatacttcacaaaatagtcaacatctaaggccctaatttatgttttgaaagatcatgtgttcccaaagtattccct

SEQ ID NO: 223520 - DNA, 120 bp, Artificial Sequence
  ENSG00000117625_50 (sequence is synthesized)
attgttggctccacagccttaaagtgctatagatttaaattcattgattagttttaatttttaattttagactgtgtatttccataaataccctacgtactggcatatttgaaactcttt

SEQ ID NO: 223521 - DNA, 120 bp, Artificial Sequence
  ENSG00000117625_51 (sequence is synthesized)
ttccaggttaggtccttttctttctcattgaatcatcttaaatagttcttggccctgaatttagctgatttaaaattcttaatattcaagaatttatacttattttttccttaaaagcca

SEQ ID NO: 223522 - DNA, 120 bp, Artificial Sequence
  ENSG00000117625_52 (sequence is synthesized)
caggggacagttaaatatcttaaaatatctaaaacattttttaaagcacttagattgtcttacgtatgtgcatactatacctttacagcgtttattgtcttgtctcttgtcagtagacct

SEQ ID NO: 223523 - DNA, 120 bp, Artificial Sequence
  ENSG00000117625_53 (sequence is synthesized)
tcagtacacagtatgtgggatatgtcagtcaagttggtcagcaccagcatctgtccagctgttcagtatattgtgattcattaaaaaatctcttctatcccagacatgggccaaggtgct

SEQ ID NO: 223524 - DNA, 120 bp, Artificial Sequence
  ENSG00000117625_54 (sequence is synthesized)
gtatctgagggatgtgctgtaatttgatttacatgcattagagcacacagtagaaaaactttagcttcattagtaatatgacacatgtatatagtgagatgtctttattgtgtgctttgc

SEQ ID NO: 223525 - DNA, 120 bp, Artificial Sequence
  ENSG00000117625_55 (sequence is synthesized)
atattttgtaaatattttgcacgtcattatttttcttttttgtttaagcagtgtttggcctggaagagtgatatgcttgctgcttaatcaaaggattaaagatttaaagatgtctatgtc

SEQ ID NO: 223526 - DNA, 120 bp, Artificial Sequence
  ENSG00000117625_56 (sequence is synthesized)
ttctatttttatataatttcatgttctatgaggaatttagtacctcttcactgtgaaattcgaaataatgatttttataaaagcaaaactagaaatcttttaatgacaattttcattaat

SEQ ID NO: 223527 - DNA, 120 bp, Artificial Sequence
  ENSG00000117625_57 (sequence is synthesized)
ttcagggttatcatttttgagaaatctacaccaaagtggttttttaaaattacataactaaaaataaaccacactgtggatacatcttataaaactaatggaaacaatgtttttctatat

SEQ ID NO: 223528 - DNA, 120 bp, Artificial Sequence
  ENSG00000117625_58 (sequence is synthesized)
atatgatttaattctagtgtaatatggatgaggtaagagtaagttatgatcaaactttttatgttcttaataagcttgcaattgagtaaaatagaatataaaataaaggtgaaataatat

SEQ ID NO: 223529 - DNA, 120 bp, Artificial Sequence
  ENSG00000117625_59 (sequence is synthesized)
cccgggactgcgcggggcgggcggcggcggagggaggaggggagagaggcggggccggggcgggttgttgtgaggcgactgcgctactgccggagcggggcggttatggcggctccatat

SEQ ID NO: 223530 - DNA, 120 bp, Artificial Sequence
  ENSG00000117625_60 (sequence is synthesized)
gggattgggcgagagttccgcatatggaggcgcccttgctggagcctctcggagtggagcgcgtttccttctccccaccctgcctgagacccttctcagttaaggctttggacagacttt

SEQ ID NO: 223531 - DNA, 120 bp, Artificial Sequence
  ENSG00000117625_61 (sequence is synthesized)
gaaagggacccacctttttttttcctccttacagtttgtcaatttttgcccagtgcccataatattgcgtttgtgtcagacattggatttctatgttagatattaaagagcttacttgta

SEQ ID NO: 223532 - DNA, 120 bp, Artificial Sequence
  ENSG00000117625_62 (sequence is synthesized)
aaacgctgccagaaagcagctctcgcttcacctctgccgggggactccgccctctcccccagcgctccaagcggagaccgcagatgttgggatgagagtcggagccgaataccaagctcg

SEQ ID NO: 223533 - DNA, 120 bp, Artificial Sequence
  ENSG00000117625_63 (sequence is synthesized)
agttgaatgttaatgtcagcaggagtttatcagccaattcaaaatatgacttacgtttgtttttgggtcttatagattctcataagaaaacagttttgtctttgttttattttttatttt

SEQ ID NO: 223534 - DNA, 120 bp, Artificial Sequence
  ENSG00000117625_64 (sequence is synthesized)
ttttttaatggaggttgttatattagaatgtttttccttttggaagatagtgggttgatcattccaatttgtgtcaggcccatgaagaatgaaaaaacctaggatctgatggcattgctg

SEQ ID NO: 223535 - DNA, 120 bp, Artificial Sequence
  ENSG00000117625_65 (sequence is synthesized)
ttataatgcttttcttaatgggggaaccctaaggctactcactcagtccattgaggggataagagagatggctcattcccatccagttttgtttacaaacgatgttgctcaaatttaggt

SEQ ID NO: 223536 - DNA, 120 bp, Artificial Sequence
  ENSG00000117625_66 (sequence is synthesized)
gactggctactagggaaataaatgaatgtggaattgaggatggaacaaagaattcaatgctttacaataaatggactgtatttgagagttcaagagaggattggagaaaataactgagta

SEQ ID NO: 223537 - DNA, 120 bp, Artificial Sequence
  ENSG00000117625_67 (sequence is synthesized)
tgagcatgaaaggttgacaatacacttcttcagtggtgcatctctcgtgactcttaagtcataatgacatgctaagttctgattctagaagaatggagagtgtattgttctttcatagtc

SEQ ID NO: 223538 - DNA, 120 bp, Artificial Sequence
  ENSG00000117625_68 (sequence is synthesized)
ttatttttattttcagtgttaagctgtttacaaataaagatgcctgtttggtagcctcattggtttttggtttttggttttgttttgtttaaaataaaagaagcttgtgcttccaataaa

SEQ ID NO: 223539 - DNA, 120 bp, Artificial Sequence
  ENSG00000117625_69 (sequence is synthesized)
gggagttactatgtagacatctgcccaggcttttcctcagtatatggagcggtaaagacatgccttcaaacttcaaagagcccactatcattaccattttaaagaggaaaggggaaagaa

SEQ ID NO: 223540 - DNA, 120 bp, Artificial Sequence
  ENSG00000117625_70 (sequence is synthesized)
tcattgaccatgcacttcttgaatcatggtgtggctttagacttcaatgtgatgtagcggacctgatcctttgcggcacatcagatataggaaacgtgcagtggatgaatacattgcaat

SEQ ID NO: 223541 - DNA, 120 bp, Artificial Sequence
  ENSG00000117632_0 (sequence is synthesized)
cgccggtgtcggtgtagggtgccgggggcagggggccctgcaggggcgtggagtggcattgtgctgtcacaggggctcgggcgtcttaggcacccatgtgggtggcgcactagaaggggc

SEQ ID NO: 223542 - DNA, 120 bp, Artificial Sequence
  ENSG00000117632_1 (sequence is synthesized)
actgctctgtccgagtgctgcccttggggcgaggcgggcatgtggctctacaaggtggagtccaggcggccaaagtttggaaaggactttccttatcccagttgattgtgcagaatacac

SEQ ID NO: 223543 - DNA, 120 bp, Artificial Sequence
  ENSG00000117632_2 (sequence is synthesized)
tgcctgtcgcttgtcttctattcaccatggcttcttctgatatccaggtgaaagaactggagaagcgtgcctcaggccaggcttttgagctgattctcagccctcggtcaaaagaatctg

SEQ ID NO: 223544 - DNA, 120 bp, Artificial Sequence
  ENSG00000117632_3 (sequence is synthesized)
ttccagaattccccctttcccctccaaagaagaaggatctttccctggaggaaattcagaagaaattagaagctgcagaagaaagacgcaagtcccatgaagctgaggtcttgaagcagc

SEQ ID NO: 223545 - DNA, 120 bp, Artificial Sequence
  ENSG00000117632_4 (sequence is synthesized)
acaacttcagtaaaatggcagaagagaaactgacccacaaaatggaagctaataaagagaaccgagaggcacaaatggctgccaaactggaacgtttgcgagagaaggataagcacattg

SEQ ID NO: 223546 - DNA, 120 bp, Artificial Sequence
  ENSG00000117632_5 (sequence is synthesized)
aagaagtgcggaagaacaaagaatccaaagaccctgctgacgagactgaagctgactaatttgttctgagaactgactttctccccatccccttcctaaatatccaaagactgtactggc

SEQ ID NO: 223547 - DNA, 120 bp, Artificial Sequence
  ENSG00000117632_6 (sequence is synthesized)
cagtgtcattttattttttccctcctgacaaatattttagaagctaatgtaggactgtataggtagatccagatccagactgtaagatgttgttttaggggctaaaggggagaaactgaa

SEQ ID NO: 223548 - DNA, 120 bp, Artificial Sequence
  ENSG00000117632_7 (sequence is synthesized)
agtgttttactctttttctaaagtgttggtctttctaatgtagctatttttcttgttgcatcttttctacttcagtacacttggtgtactgggttaatggctagtactgtattggctctg

SEQ ID NO: 223549 - DNA, 120 bp, Artificial Sequence
  ENSG00000117632_8 (sequence is synthesized)
tgaaaacatatttgtgaaaagagtatgtagtggcttcttttgaactgttagatgctgaatatctgttcacttttcaatcccaattctgtcccaatcttaccagatgctactggacttgaa

SEQ ID NO: 223550 - DNA, 120 bp, Artificial Sequence
  ENSG00000117632_9 (sequence is synthesized)
atcaccgggcgtccgctccggggtgccgtcgaggagacaatagggggcgtgggccctcgtttacctccctccctccctcccttccctgcgggccccgccgggttccccattgtctgaagg

SEQ ID NO: 223551 - DNA, 120 bp, Artificial Sequence
  ENSG00000117632_10 (sequence is synthesized)
gacggggcggtgccccagggaccagcggctttaggaccaaactgcgggcagccagggccgcgaccctccctgcgaccgtcccctggcgaccgcagctggtgattgaggggcggcgctccc

SEQ ID NO: 223552 - DNA, 120 bp, Artificial Sequence
  ENSG00000117632_11 (sequence is synthesized)
tggtagaaatacccaacgcacaaatgaccgcacgttctctgccccgtttcttgccccagtgtggtttgcattgtctccttccacaatgactgctttgtttggatgcctcagcccaggtca

SEQ ID NO: 223553 - DNA, 120 bp, Artificial Sequence
  ENSG00000117632_12 (sequence is synthesized)
gctgttactttctttcagatgtttatttgcaaacaaccattttttgttctgtgtcccttttaaaaggcagattaaaagcacaagcgtgtttctagagaacagttgagagagaatctcaag

SEQ ID NO: 223554 - DNA, 120 bp, Artificial Sequence
  ENSG00000117632_13 (sequence is synthesized)
attctacttggtggtttgcttgctctacgttacaggtggggcatgtcctcatcctttcctgccataaaagctatgacacgagaatcagaatattaataaaactttatgtactgctgtagc

SEQ ID NO: 223555 - DNA, 120 bp, Artificial Sequence
  ENSG00000117632_14 (sequence is synthesized)
gaattgtagctacactgtgattattacatatgccagtgactggaaggaaataccagtcctcatttattgaactcctgttacatgcccgctcctttgtttatatttttctcctttaataca

SEQ ID NO: 223556 - DNA, 120 bp, Artificial Sequence
  ENSG00000117632_15 (sequence is synthesized)
tggtgttgcctcaaataatggaaattagaaacagtttcaggaatgttaagtcgtttttctgcagtcatacaactagtaagtgttggggtcagaattcaagccctggtctatcttaaacca

SEQ ID NO: 223557 - DNA, 120 bp, Artificial Sequence
  ENSG00000117632_16 (sequence is synthesized)
aagctcatgcttctctcatgcttcctctttgaaaagatttgttgccagatgattctttggcactttggttttgttttttgagagctgtacaataacattttaaattgctagtgtgattgt

SEQ ID NO: 223558 - DNA, 120 bp, Artificial Sequence
  ENSG00000117632_17 (sequence is synthesized)
gttgctcagctggtatcatggtagcttttctcttatctaaacaattctattataaagtaactatctttaaaagctaatcagaagaatcaataaatattaatatgctagttgtagaaaatt

SEQ ID NO: 223559 - DNA, 120 bp, Artificial Sequence
  ENSG00000117632_18 (sequence is synthesized)
tgggaaatacagaaatttataaatggaaattaaaagtattcattatcccgcttccgagaagcaaccagtgttaacattttggtgtgtttctttccattcaatgttactcattaacaactg

SEQ ID NO: 223560 - DNA, 120 bp, Artificial Sequence
  ENSG00000117632_19 (sequence is synthesized)
tacataacttttcatttaactccctttctcaacaaccctgataggattgattttaaagctggggcaagtgaggcacaaaaggtaaggtaataaccttccccagaccagcatagtgatttg

SEQ ID NO: 223561 - DNA, 120 bp, Artificial Sequence
  ENSG00000117632_20 (sequence is synthesized)
tagtatacacacacacccgcccgaagagcctcagtgcttacactaaggagtcgtcttctatgcaatagtgtgagttcatggagtaggaggaagcaatacaaccaaaggttggacagtgga

SEQ ID NO: 223562 - DNA, 120 bp, Artificial Sequence
  ENSG00000117632_21 (sequence is synthesized)
aagctttttagacatcaaccctggccctgtagtcattagcctgtgctttacatagtaactggctaaatataatgaaactcccatcatgactaggatttggcagaagagaatcaatagaac

SEQ ID NO: 223563 - DNA, 120 bp, Artificial Sequence
  ENSG00000117632_22 (sequence is synthesized)
cagtgtcagatgctctgtggttatcctgcaagtcagtggttccaatgtgttttgagaacaagctgttctgttgaaggggtcataccaaggtatggtctggtaattaatgcagtttcctga

SEQ ID NO: 223564 - DNA, 120 bp, Artificial Sequence
  ENSG00000117632_23 (sequence is synthesized)
gtcttgaatttcctatcattgttttatcagttatggttaaaatttttacaatgagctagttttctttgggtagcttttgaagttaaatagtgaaattctttacaataaaagtgccactcg

SEQ ID NO: 223565 - DNA, 120 bp, Artificial Sequence
  ENSG00000117632_24 (sequence is synthesized)
caagtacatattcctcaagtcatccagataccattaagcagtaaatcttacaaggatttccttaaggactaattgggtaagatttctgaacagataagcacttttccaaagttaaataca

SEQ ID NO: 223566 - DNA, 120 bp, Artificial Sequence
  ENSG00000117632_25 (sequence is synthesized)
aatactagaaaaagaatatcattttcacagtattttatgatagggataattcaggtcctaattttggtgttatttaaagggaccttattttctgccccttttcaatccccttagtaaatt

SEQ ID NO: 223567 - DNA, 120 bp, Artificial Sequence
  ENSG00000117632_26 (sequence is synthesized)
tttctgccccttttcaatccccttagtaaattatttttattgtaattttaacttatgctgaatacattttattttttgaggcagagtctctgtcacccagggtggagtgcagtggcacga

SEQ ID NO: 223568 - DNA, 73 bp, Artificial Sequence
  ENSG00000117632_27 (sequence is synthesized)
tacattttagagtgcctagcctattaaacttttttttccagtcccatgaagctgaggtcttgaagcagctggc

SEQ ID NO: 223569 - DNA, 120 bp, Artificial Sequence
  ENSG00000117632_28 (sequence is synthesized)
ggccacgcccatcctgggtccggtgctgcgtctaattctctgcttttcttaaatcttgtcgctgcctctgattttaattcctagcttttgggaacctgtcatcctacgtttttggtacta

SEQ ID NO: 223570 - DNA, 120 bp, Artificial Sequence
  ENSG00000117632_29 (sequence is synthesized)
gctggcgtctacaaaagtcataatgttaaaaagatcaacaagagatacagcatttttcatgacataacggcagcaaatataagtcaaaatctagaggttcataaacattttgcttgctgt

SEQ ID NO: 223571 - DNA, 120 bp, Artificial Sequence
  ENSG00000117632_30 (sequence is synthesized)
ctgttcctgccctttgcccagccctgggcctccaatctgcattgattacctggtctgatctctctcaccatcactaggtacttaataaatatttgctgttgatgatagcaatgaccttga

SEQ ID NO: 223572 - DNA, 120 bp, Artificial Sequence
  ENSG00000117632_31 (sequence is synthesized)
gactgatgaacagtctggccaagaggatccttgatgtggaagatagaaaaagcctttggggtcaggcagacttggattctaataccagccagttctgcttgctgtgtctgagcctcagtt

SEQ ID NO: 223573 - DNA, 120 bp, Artificial Sequence
  ENSG00000117632_32 (sequence is synthesized)
tactcatctgtgaagaggaggtagcaagaatgaaaatgcctgccttgtggtttgttgtaaggacagacactgccaacgtagagggcccagcagctcacagaccagttgctctgagagcag

SEQ ID NO: 223574 - DNA, 120 bp, Artificial Sequence
  ENSG00000117632_33 (sequence is synthesized)
aagaatctcagctccagctgggaggggaccctcagcggctcagcggctcagccgtggtggcatctaccctccctgtttaaagaaggaatctgagatgtacttctggactcacgggcctgg

SEQ ID NO: 223575 - DNA, 120 bp, Artificial Sequence
  ENSG00000117632_34 (sequence is synthesized)
gcttctgagaaggaccctacacaagggagtttcctcccagggcaggtgaatggagagggtggcagaagcctacgggaaggggtcacagggatcagctagagagtgccaccacccttcctg

SEQ ID NO: 223576 - DNA, 120 bp, Artificial Sequence
  ENSG00000117632_35 (sequence is synthesized)
gggaatgcagggcaaggtccctggtgggagttttcctgggaagccaaagaagcgcccaacaaagacagaatcaacatttgggtacctttggtacccagaggcagcaatgccaactacaac

SEQ ID NO: 223577 - DNA, 120 bp, Artificial Sequence
  ENSG00000117632_36 (sequence is synthesized)
gaatacaaccacttacagacttcacaacctcctcctgtagataccaaagggattttaggatcacattttatttctcacctgagcaagaaaagctacaggagcatctcaagcagagggcag

SEQ ID NO: 223578 - DNA, 120 bp, Artificial Sequence
  ENSG00000117632_37 (sequence is synthesized)
gagtctccagaggagttcaaggggctctggcaagaaaaatcaaggggctgtgttcaagaactggctcccttggtgattgtattacgaagcccatgtgtgctggatgctgatgaaattgct

SEQ ID NO: 223579 - DNA, 120 bp, Artificial Sequence
  ENSG00000117632_38 (sequence is synthesized)
attacgaagcccatgtgtgctggatgctgatgaaattgctgccaaatgcctgtgcagccttggcaaggccctttatttctctgggtctccatttctctctctcttttttttttttttttt

SEQ ID NO: 223580 - DNA, 120 bp, Artificial Sequence
  ENSG00000117632_39 (sequence is synthesized)
ccggcctgggtctccgtttctctagctgtgaaatgactgttctaaaagagccctgccggactttggcagtctgtaagaagacctgagttcttctctcagttccaagcaggaaaattgaac

SEQ ID NO: 223581 - DNA, 120 bp, Artificial Sequence
  ENSG00000117632_40 (sequence is synthesized)
ataccctgagcccagagcctgcaacaaactctgggcagcctcaggaagtcaggcagtgaagtcggaaaaatgatctcttctgtatagggagaaaataaaagtttaaaaatttgtagtttg

SEQ ID NO: 223582 - DNA, 120 bp, Artificial Sequence
  ENSG00000117640_0 (sequence is synthesized)
cagttatctagttcctctcgcgaggactccgagggacaggcagggtgctgcggagcgcacaggaaaggacctgaccctgtcgcagggaaggaaggtgatgcttaagctgagctctgagga

SEQ ID NO: 223583 - DNA, 120 bp, Artificial Sequence
  ENSG00000117640_1 (sequence is synthesized)
atgatgaagaatgagctcggcgaagggggtgctggtgtttgatgcagggctcagagatggcctgatatgaaggagtcacgcctcccgcctcccggagctgcccagtggctgccttgtcct

SEQ ID NO: 223584 - DNA, 120 bp, Artificial Sequence
  ENSG00000117640_2 (sequence is synthesized)
tcaagtgcaggagctggttcaaatgtcaggaatggaagccactgtgaccatcccaatctggcaaaacaagccacatggggctgctcgaagtgtagtaagaagaattgggaccaacctacc

SEQ ID NO: 223585 - DNA, 120 bp, Artificial Sequence
  ENSG00000117640_3 (sequence is synthesized)
cttgaagccgtgtgcccgggcgtcctttgagaccctgcccaacatctctgacctgtgtttgagagatgtgcccccagtccctaccctggctgacatcgcctggattgctgcggatgaaga

SEQ ID NO: 223586 - DNA, 120 bp, Artificial Sequence
  ENSG00000117640_4 (sequence is synthesized)
ggagacatatgcccgggtcaggagtgatacgcgccccctgaggcacacctggaaacccagccctctgattgtcatgcagcgcaatgcctctgttcccaacctgcgtgggtccgaggagag

SEQ ID NO: 223587 - DNA, 120 bp, Artificial Sequence
  ENSG00000117640_5 (sequence is synthesized)
gcttctggccctgaagaagccagctctgccagccctaagccgcactactgagctgcaggacgagctgagccacttgcgcagccagattgcaaagatagtggcagctgatgcagcttcggc

SEQ ID NO: 223588 - DNA, 120 bp, Artificial Sequence
  ENSG00000117640_6 (sequence is synthesized)
ttcattaacgccagatttcttatctccaggaagttcaaatgtctcttctcccttaccttgttttggatcctcattccactctacaacttcctttgtcattagtgacatcaccgaggagac

SEQ ID NO: 223589 - DNA, 120 bp, Artificial Sequence
  ENSG00000117640_7 (sequence is synthesized)
agaggtggaggtccctgagcttccatcagtccccctgctttgttctgccagccctgaatgttgcaaaccagaacacaaagctgcctgcagttcgtctgaagaggatgactgcgtctcttt

SEQ ID NO: 223590 - DNA, 120 bp, Artificial Sequence
  ENSG00000117640_8 (sequence is synthesized)
agctttgcagacatgatgggtatcctgaaggactttcaccgaatgaaacagagtcaagatctgaaccggagtttattgaaggaggaagaccctgctgtgcttatctctgaggtcctaagg

SEQ ID NO: 223591 - DNA, 120 bp, Artificial Sequence
  ENSG00000117640_9 (sequence is synthesized)
aggaagtttgctctaaaggaagaagatatcagtagaaaaggaaattgacaaccctcagctctgcaaactcagtctcatgctcctggaataccttcaatagctgccttcctcaccgcagat

SEQ ID NO: 223592 - DNA, 120 bp, Artificial Sequence
  ENSG00000117640_10 (sequence is synthesized)
gtttctgcctcttaaggatagatcttctgcaacagtcttgctgacaagctagagcttggactgaaagagaagagctggattatatatttcccagacttcaaaccctagcagaagctaagg

SEQ ID NO: 223593 - DNA, 120 bp, Artificial Sequence
  ENSG00000117640_11 (sequence is synthesized)
cttgtgatttgacctgagacatttgtttcaggtaatcgtgtagaatgaagtatcttagtttaaagggtaagagagaagttgtttctggtttttccttgcccctgtgtgaaaataggtcct

SEQ ID NO: 223594 - DNA, 120 bp, Artificial Sequence
  ENSG00000117640_12 (sequence is synthesized)
aaatgactgacttcactgcattagaccctatagctggtctcacaagacactttgtgcccagctgtcactcactcagcagcttccttgcagcagagcagggctgaggggaaggggctatga

SEQ ID NO: 223595 - DNA, 120 bp, Artificial Sequence
  ENSG00000117640_13 (sequence is synthesized)
atgtttgtatacatgttcacagggcacggaaaatcttatgctgctccgtcataaacctacaccaatgcccagcaatcaccctcctcacttccttgtctagatgtagaggtcaggctgctg

SEQ ID NO: 223596 - DNA, 120 bp, Artificial Sequence
  ENSG00000117640_14 (sequence is synthesized)
aaccagccaacacatgggctactgctgggaagcctgggctgttttttttcttaaacacattttatattactgaacaaccaaatctaccctccacggccctgaggccttatcagttccact

SEQ ID NO: 223597 - DNA, 120 bp, Artificial Sequence
  ENSG00000117640_15 (sequence is synthesized)
gattaaaaactttctcttccacggactttaagcccggtaggaaagagagaggaggagggggaaagagcaaaccatctttcttccaggcccttgactgctcctttgggctgggccaaggtt

SEQ ID NO: 223598 - DNA, 120 bp, Artificial Sequence
  ENSG00000117640_16 (sequence is synthesized)
tgtatgtaccacaccatgcatgactcagatgccctcaggtccctttctctatggtatgtatactgcttgtgtttgggttgaagcactacctgacattaaaggaaggacttggagagagaa

SEQ ID NO: 223599 - DNA, 120 bp, Artificial Sequence
  ENSG00000117640_17 (sequence is synthesized)
gagtccccgaagggtagttgctcgtcggagttccccagcaaacagtgaccaagccagacctcaggcttctagtttcggcttcgctgcttgacgggccgggctgccccgccgcgcattctg

SEQ ID NO: 223600 - DNA, 120 bp, Artificial Sequence
  ENSG00000117640_18 (sequence is synthesized)
agacctggccgcggctcggaggcttccgcgcactcgggtccgggtcctgtgggtccaagggccgctgggcaggcggcgagcacttggccgaccttggcccagatggcctgatatgaagga

SEQ ID NO: 223601 - DNA, 120 bp, Artificial Sequence
  ENSG00000117640_19 (sequence is synthesized)
agggcggttgaggctgggcggcccaaggtggaaggaggggccgtgaggtgagagagtccgggagcccgagcttgagatggcctgatatgaaggagtcacgcctcccgcctcccggagctg

SEQ ID NO: 223602 - DNA, 120 bp, Artificial Sequence
  ENSG00000117640_20 (sequence is synthesized)
gtttagttcagcgcgttgaagcgctcactgtgtcctaggcagacaccgtgctgtgcgcggggatcacagttatctagttcctctcgcgaggactccgagggacaggcagggtgctgcgga

SEQ ID NO: 223603 - DNA, 120 bp, Artificial Sequence
  ENSG00000117640_21 (sequence is synthesized)
gttcaaatgtcaggaatggaagccactgtgaggcctggaattggagcaaggccaccgtttcactccctccccctaagaagaaccaactatgatcctggggcacttcaggagtcagtacca

SEQ ID NO: 223604 - DNA, 120 bp, Artificial Sequence
  ENSG00000117640_22 (sequence is synthesized)
tccggggggcgggtcagcggaagtgagggcggttgaggctgggcggcccaaggtggaaggaggggccgtgaggtgagagagtccgggagcccgagcttgagagggaaatctggtgctcct

SEQ ID NO: 223605 - DNA, 120 bp, Artificial Sequence
  ENSG00000117640_23 (sequence is synthesized)
tgtagatctcaattagctatacaggattataaaaagctagtcaggaaaaatttcctattgctgtaacaggttgtggatgaccttgtacttgtattttcaccagagggcacagtggtttta

SEQ ID NO: 223606 - DNA, 120 bp, Artificial Sequence
  ENSG00000117640_24 (sequence is synthesized)
gacagttgccatctctactaaaaggtgactcaggccttttccactgaagacacagaactgtttgtaatcccatagactctcatgtgtcttgcctgtttttgtttttgaatgtggctctgt

SEQ ID NO: 223607 - DNA, 120 bp, Artificial Sequence
  ENSG00000117640_25 (sequence is synthesized)
caacctctgcctcccaggttcaagccatcttcccacctcagtctcctgaatagctgggactacaggcgtataccaccatacccagataatttttgtattttttggtagaggcagggtttt

SEQ ID NO: 223608 - DNA, 82 bp, Artificial Sequence
  ENSG00000117640_26 (sequence is synthesized)
gtctcctgaatagctgggactacaggcgtataccaccatacccagataatttttgtattttttggtagaggttggtctcaag

SEQ ID NO: 223609 - DNA, 120 bp, Artificial Sequence
  ENSG00000117640_27 (sequence is synthesized)
gtgtgagccaccatgcctgactgtcatctggcctctgttcaatgttttcgaccaggaaccttcttctgccccctctaggaagccttcctgacacccagtgccggattaggtacccctcct

SEQ ID NO: 223610 - DNA, 120 bp, Artificial Sequence
  ENSG00000117640_28 (sequence is synthesized)
gtgtattctgcagtttctgattggctcatcatggcatctgtaaatgttgatgacttttgcttctccatagaccctgcccaacatctctgacctgtgtttgagagatgtgcccccagtccc

SEQ ID NO: 223611 - DNA, 120 bp, Artificial Sequence
  ENSG00000117640_29 (sequence is synthesized)
taccctggctgacatcgcctggattgctgcggatgaagaggagacatatgcccgggtcaggtagttgaggcagtagctggtctgctaaggaatggagaacttcccagaagaggtggcagg

SEQ ID NO: 223612 - DNA, 120 bp, Artificial Sequence
  ENSG00000117640_30 (sequence is synthesized)
cagcaaggagagaggaatgagaactgtgggctcagagaggagcagaaccttactatactactctcacagaagtgggggaaggaaccttaggagcacagtggcctgctgtctctaactgat

SEQ ID NO: 223613 - DNA, 120 bp, Artificial Sequence
  ENSG00000117640_31 (sequence is synthesized)
ggtcagcggaagtgagggcggttgaggctgggcggcccaaggtggaaggaggggccgtgaggtgagagagtccgggagcccgagcttgagaccatcccaatctggcaaaacaagccacat

SEQ ID NO: 223614 - DNA, 120 bp, Artificial Sequence
  ENSG00000117640_32 (sequence is synthesized)
caggagctggttcaaatgtcaggaatggaagccactgtgaggacgggaaggaaagcctggataatctctacactcagctacttcctctccccttccctgaccctcccaacattgactgcc

SEQ ID NO: 223615 - DNA, 120 bp, Artificial Sequence
  ENSG00000117640_33 (sequence is synthesized)
agggtccgcgcgggtctccggccactgctgcgcgcggcaaagtttcactgagcgcggcggcctccgtgggggcccccgggaccaggggtgctgagcagggccctgcgctggaggagctcc

SEQ ID NO: 223616 - DNA, 120 bp, Artificial Sequence
  ENSG00000117640_34 (sequence is synthesized)
gggtcagcggaagtgagggcggttgaggctgggcggcccaaggtggaaggaggggccgtgaggtgagagagtccgggagcccgagcttgagctgtctccgtctctttgctccagaccatc

SEQ ID NO: 223617 - DNA, 120 bp, Artificial Sequence
  ENSG00000117640_35 (sequence is synthesized)
gtgaatgacacctcgtctcccaagggtagaagaggggaccctccacaggaggtctccagaaagagctgctttgtcagtctagtctatctcccattcagagcctgtccagggctccccagt

SEQ ID NO: 223618 - DNA, 120 bp, Artificial Sequence
  ENSG00000117640_36 (sequence is synthesized)
gacccggacctcatgacttgccccctacttttgtagctttatcatgctctgctcctctttccatgtccttcaccttcttgtgctggacctgtgctcttgctgttttgtcttcatttccta

SEQ ID NO: 223619 - DNA, 120 bp, Artificial Sequence
  ENSG00000117640_37 (sequence is synthesized)
ctccctcgcaacttactacagggcactagggccagagctctgacctcatctggccacctgcctaatgctactcagcctttgctagaagtatgtattcatgtcctatcactctgctggaca

SEQ ID NO: 223620 - DNA, 120 bp, Artificial Sequence
  ENSG00000117640_38 (sequence is synthesized)
gcgagttccttgagagcatgactgtgtcttactccttccatagcccctacggtgcccagcacaaggcctggcacaagtgggtactgttggtgtttgatgaacaagtgaatgaacgagcac

SEQ ID NO: 223621 - DNA, 120 bp, Artificial Sequence
  ENSG00000117640_39 (sequence is synthesized)
actgattgcatctgctcaccatgcaaggactgctgtgaagagcagtcagatgtcacctcacccatctgtgtcatgttttaacagttcattaagcactcaaccccatttcactcattgacc

SEQ ID NO: 223622 - DNA, 120 bp, Artificial Sequence
  ENSG00000117640_40 (sequence is synthesized)
cttaaggtagcctccagtggcagcttttcctgtctcctttttccagatggaaaaaccaacattcagaaaagttaaataacttgcctgtagctacaaagccagaaggtggctgagccagga

SEQ ID NO: 223623 - DNA, 120 bp, Artificial Sequence
  ENSG00000117640_41 (sequence is synthesized)
taaacttttttggctctttttctctgtagctcatgagactgagattggcatgagctggtgttcgttctcctattttctctgatctctccctttgcaagggcccagcagtgcttttacatc

SEQ ID NO: 223624 - DNA, 120 bp, Artificial Sequence
  ENSG00000117640_42 (sequence is synthesized)
tcatcttcaagaatgaatcctgggcttggatagtacttataatttggctagatgagctttgtagctaccaaggattctatttgcatctttagaagttttgcctcaagaaacctgagagcc

SEQ ID NO: 223625 - DNA, 74 bp, Artificial Sequence
  ENSG00000117640_43 (sequence is synthesized)
ttgcatctttagaagttttgcctcaagaaacctgagagcccaggaaggctcttgggttggccaagctcactagg

SEQ ID NO: 223626 - DNA, 120 bp, Artificial Sequence
  ENSG00000117640_44 (sequence is synthesized)
cctttaagagtctggacttagagctaagtgttgggtgagggcagcctcttgggctggttttctcccctgtgaagtcatggctctgcagggcctggttttttggggcttgtgtggtgacca

SEQ ID NO: 223627 - DNA, 120 bp, Artificial Sequence
  ENSG00000117640_45 (sequence is synthesized)
ttaaatccccactgtggggggttgtttcacaagagggaaatctggtgctcctccagatggcctgatatgaaggagtcacgcctcccgcctcccggagctgcccagtggctgccttgtcct

SEQ ID NO: 223628 - DNA, 120 bp, Artificial Sequence
  ENSG00000117640_46 (sequence is synthesized)
ctgaagtactgtaaaaggttctgagactctccagttgagcactcctttctccagaggcctggaattggagcaaggccaccgtttcactccctccccctaagaagaaccaactatgatcct

SEQ ID NO: 223629 - DNA, 120 bp, Artificial Sequence
  ENSG00000117640_47 (sequence is synthesized)
ttcctctccccttccctgaccctcccaacattgactgccttagcagcagcaggtattcccttgggtggctggccagggtgtaggctggcaactggggaacctgccctcactataattgag

SEQ ID NO: 223630 - DNA, 120 bp, Artificial Sequence
  ENSG00000117640_48 (sequence is synthesized)
agttgacttgcccctagagagtgccctgtccctaggtttgtggaattcagtctccacaaacctagagaggagaggacaaggacagtagttggattcattctctggggttgtagctgtctc

SEQ ID NO: 223631 - DNA, 120 bp, Artificial Sequence
  ENSG00000117640_49 (sequence is synthesized)
tggaagagctgtggggcataaaccacactgcagagctgaactggccttttggaccttttatcagtcattggcttgggaggtgaaggaaattcccaggtagggagctccgttcttcctgca

SEQ ID NO: 223632 - DNA, 120 bp, Artificial Sequence
  ENSG00000117640_50 (sequence is synthesized)
aggggatctgagtgggacaccaaatcagcatctacacccaggacagacagccagcgtggacttgcatgatccgccatcgcacaggagggaaagatggcctgatatgaaggagtcacgcct

SEQ ID NO: 223633 - DNA, 120 bp, Artificial Sequence
  ENSG00000117643_0 (sequence is synthesized)
gccgctgcgcccccgcctcctcgcgggaggactcgctccaaactccctgaacttcggggacagtcccccgaagcggcgaaactctcagggttggcaaccctgcccagggacccccatccc

SEQ ID NO: 223634 - DNA, 120 bp, Artificial Sequence
  ENSG00000117643_1 (sequence is synthesized)
gggcggcgctccggacgccctcccctcaccgcgcccccgcagacacgtgcctggactccgagggcttctggagccaccggccgggccacgatgctcatgaggaaagtgcccggcttcgtc

SEQ ID NO: 223635 - DNA, 120 bp, Artificial Sequence
  ENSG00000117643_2 (sequence is synthesized)
ccggcctccccgtgggggctgcggctgccgcagaagttcctcttcctcctcttcctctcgggcctggtcaccctgtgcttcggggccctcttcctgctgccccactcctctcgcctcaag

SEQ ID NO: 223636 - DNA, 120 bp, Artificial Sequence
  ENSG00000117643_3 (sequence is synthesized)
caagcgcctcttcctggccccccggacccagcagcctggtctggaagtggtggctgaaatcgccggccatgccccggcccgcgagcaggagccgcctcccaacccggcccccgccgcgcc

SEQ ID NO: 223637 - DNA, 120 bp, Artificial Sequence
  ENSG00000117643_4 (sequence is synthesized)
ggatgaccccagcagctgggccagtccccgccgcaggaaaggggggctgcggcgcacccgccccactggaccccgcgaggaggccacggcggcccggggcaatagcatcccggcctccag

SEQ ID NO: 223638 - DNA, 120 bp, Artificial Sequence
  ENSG00000117643_5 (sequence is synthesized)
gcctccaggcccggggacgagggcgtccctttccgctttgacttcaacgcattccggagccgtctccgccacccggtcctgggaacgagggccgatgagagtcaggagccccagagccaa

SEQ ID NO: 223639 - DNA, 120 bp, Artificial Sequence
  ENSG00000117643_6 (sequence is synthesized)
gtgcgagcccagcgggagaaaatcaaggagatgatgcagtttgcttggcagagctataagcgttatgcaatggggaaaaacgaactccgtccactaacaaaagatggctacgagggtaac

SEQ ID NO: 223640 - DNA, 120 bp, Artificial Sequence
  ENSG00000117643_7 (sequence is synthesized)
atgttcggaggcctcagcggggcaacagtcattgactccctcgataccctctacctcatggagctgaaggaggagttccaggaggccaaggcctgggtgggagagagcttccacctgaac

SEQ ID NO: 223641 - DNA, 120 bp, Artificial Sequence
  ENSG00000117643_8 (sequence is synthesized)
gtgagcggagaagcatccttgtttgaggtgaacatccgctacatcgggggactcctctcagccttctacctgacaggagaagaggtgttccgaataaaggccatcaggctgggagagaag

SEQ ID NO: 223642 - DNA, 120 bp, Artificial Sequence
  ENSG00000117643_9 (sequence is synthesized)
ctcctgccggcgttcaacacccccacgggaatcccaaagggcgtggtgagcttcaaaagtgggaactggggctgggccacagccggcagcagcagcatcttggcggagtttggatccctg

SEQ ID NO: 223643 - DNA, 120 bp, Artificial Sequence
  ENSG00000117643_10 (sequence is synthesized)
cacttggaattcttacacctcactgaactctctggcaaccaggtcttcgctgaaaaggtcaggaacatccgcaaggtcctcaggaagatcgaaaagccctttggcctctaccccaacttc

SEQ ID NO: 223644 - DNA, 120 bp, Artificial Sequence
  ENSG00000117643_11 (sequence is synthesized)
ctcagcccagtgagtgggaactgggtgcaacaccatgtctcagttggaggactcggggacagtttttatgaatatttgatcaaatcctggttgatgtcgggcaagacagatatggaggct

SEQ ID NO: 223645 - DNA, 120 bp, Artificial Sequence
  ENSG00000117643_12 (sequence is synthesized)
aaaaatatgtactacgaagccttggaggcgatagagacctacttgctgaatgtctctcccggggggctgacctacattgccgagtggcgaggggggattctggaccacaagatggggcac

SEQ ID NO: 223646 - DNA, 120 bp, Artificial Sequence
  ENSG00000117643_13 (sequence is synthesized)
ctggcctgtttctccgggggcatgatcgcccttggcgccgaggatgccaaggaagaaaagagggcccactaccgagagctcgcagcccagatcaccaagacgtgtcacgagtcatacgcc

SEQ ID NO: 223647 - DNA, 120 bp, Artificial Sequence
  ENSG00000117643_14 (sequence is synthesized)
cgctcagacaccaaacttgggcctgaggccttctggtttaactccggcagagaggccgtggccacccagctgagcgagagctactacatcctccggccagaggtggtggagagctacatg

SEQ ID NO: 223648 - DNA, 120 bp, Artificial Sequence
  ENSG00000117643_15 (sequence is synthesized)
tacctgtggcgacagacccacaaccccatctacagggagtggggctgggaggtggtgctggccttggagaaatactgtcggacagaagccggtttctctgggatccaagacgtgtacagt

SEQ ID NO: 223649 - DNA, 120 bp, Artificial Sequence
  ENSG00000117643_16 (sequence is synthesized)
agcacccccaaccacgacaacaagcagcagagcttctttctagcggagacactaaagtatctctatcttctgttctctgaagatgacttgctctccctggaagactgggtgttcaacacc

SEQ ID NO: 223650 - DNA, 120 bp, Artificial Sequence
  ENSG00000117643_17 (sequence is synthesized)
gaggcccacccactcccggtgaaccactcagacagctccggcagagcctggggcagacactgaccccatctcctgccgccgccctggggccgccgcagggatgccttgccttttcaggat

SEQ ID NO: 223651 - DNA, 120 bp, Artificial Sequence
  ENSG00000117643_18 (sequence is synthesized)
ttttcctctgtgaggagacaagacttggagactcagcgatgtcaggccagggccatggccacactggcccacacattcctttctacagagaatttctatgaagcccactcacttgccatt

SEQ ID NO: 223652 - DNA, 120 bp, Artificial Sequence
  ENSG00000117643_19 (sequence is synthesized)
ccagggccaaaggaccggaggtttgcatatccgccccttgtatttgatttgcttccttttggtttcttggtttttgtttttgcttgattttgtcttttctctacagtttagttttgtcac

SEQ ID NO: 223653 - DNA, 120 bp, Artificial Sequence
  ENSG00000117643_20 (sequence is synthesized)
aattacacatatagttttcaaaatcatgcactttctaaaatggtgtcatcctgaaaaacaaaacccagtgtttgcacacacacaaaatcttgaccccgttatctatattttaaatgcttt

SEQ ID NO: 223654 - DNA, 120 bp, Artificial Sequence
  ENSG00000117643_21 (sequence is synthesized)
ttgcccaacactgaccctatgttcaactttgtgtcatttaccttataatttgaggaggggtttccctttgggcctcagtgttacaaattactagtgctattttcattattattgtaatgg

SEQ ID NO: 223655 - DNA, 120 bp, Artificial Sequence
  ENSG00000117643_22 (sequence is synthesized)
aaaaatctgtggactagaataaaagagtttattgaataagaaatatgattgggctcattgcacatcagtgactcctagaaaaaccattgcaatgttaccatcagaaataataatcagcca

SEQ ID NO: 223656 - DNA, 120 bp, Artificial Sequence
  ENSG00000117643_23 (sequence is synthesized)
gcagttgatttaaggtataatttagtaaacgattccaacttctattacctcccctgaaatcggtcctgatatattcgagaagcatgaggccagcccttcagatgcagttgtttatttata

SEQ ID NO: 223657 - DNA, 120 bp, Artificial Sequence
  ENSG00000117643_24 (sequence is synthesized)
ctcaggtttagattgggaagaggcccagggaggagcagcaacttgcctgaggtcacacagcccaaaaaaggcaaaggagagtctcgcccctgccgtctcctggccaccccagttgagtgt

SEQ ID NO: 223658 - DNA, 120 bp, Artificial Sequence
  ENSG00000117643_25 (sequence is synthesized)
ccgtctgttccatcattcagcagatgcttggtgagtgcctgcaacggaccagacactgggctagaggccagggacaccgctgagagtgagacagtcataagccctgcagtcaaggggtca

SEQ ID NO: 223659 - DNA, 120 bp, Artificial Sequence
  ENSG00000117643_26 (sequence is synthesized)
agaggggagaaagcgatggtaagggaaactgacaagtaagtgaagtgactgcaggtcataggaaatgctacaaaggagatagatagacagctgaggacctaccctacggggtcagggagg

SEQ ID NO: 223660 - DNA, 120 bp, Artificial Sequence
  ENSG00000117643_27 (sequence is synthesized)
gcctctctgggcaggtgaccttcaagccaagacccagaagataaaaaggagcagccgaaagactatctggcagaagaatgaacttcccataacccagccccctttcccaccctccctgat

SEQ ID NO: 223661 - DNA, 120 bp, Artificial Sequence
  ENSG00000117643_28 (sequence is synthesized)
gccctccctgggagggggcctgaaacactggggctgttgtgcagagcaaggagctcaggtcctaacactgaagtgacagctcttcctcccctgacccttttttttttttgagacccagag

SEQ ID NO: 223662 - DNA, 120 bp, Artificial Sequence
  ENSG00000117643_29 (sequence is synthesized)
aggcatgagccaccacacccagtcctttcctggcacatttgcagcttgtcaacacagcggaaatcacgggagaatgttgagcccttccctgggctcagctgcttgctctgttcataagct

SEQ ID NO: 223663 - DNA, 120 bp, Artificial Sequence
  ENSG00000117643_30 (sequence is synthesized)
ttaatagcccccggggctctgggccaggtgacccggctttaaatccctgctgtgtgaacttaggcaggtacctcccctctctgggctcttcttttccatcaagcagacagaaaacctcaa

SEQ ID NO: 223664 - DNA, 120 bp, Artificial Sequence
  ENSG00000117643_31 (sequence is synthesized)
ccccacaaggttgctgtgagaagaagtgggaagctgctggttccctgggcacaggaagtgcttgttccttgttctggagactcaagacattcccagaatcttcttaagcagagctgctgg

SEQ ID NO: 223665 - DNA, 120 bp, Artificial Sequence
  ENSG00000117643_32 (sequence is synthesized)
ggagtagcccctgtagcaagtaccatgctcttgacaggcagcatgagagcgtgactcccatgacccacctgtgctcaaaaaaaaaaaaaaaaaaaagcaaaccaggaaaactgactacac

SEQ ID NO: 223666 - DNA, 120 bp, Artificial Sequence
  ENSG00000117643_33 (sequence is synthesized)
aaacattgtagaaagattagaaaatagaagcagaaagaagactcattggccatcccactctctggggtgaatactgttatattttcttctaggcctttttctatgaatatatagaatata

SEQ ID NO: 223667 - DNA, 120 bp, Artificial Sequence
  ENSG00000117643_34 (sequence is synthesized)
gattttgccaccgtggtatcctactatgcacactgttttcttataatctgcttttgcacttaactgtacattgtgaacctctttccatgtcaacaaatacatgtttatctcatcgctgta

SEQ ID NO: 223668 - DNA, 120 bp, Artificial Sequence
  ENSG00000117643_35 (sequence is synthesized)
tcaaggagacacagcggtcctggggttgccttccagatgaagatctatcaaagatttgaagtcttgtgtatgtggtcctagaggaccccaggctgttataccgatccatgaggcatctga

SEQ ID NO: 223669 - DNA, 120 bp, Artificial Sequence
  ENSG00000117643_36 (sequence is synthesized)
gtcctttaagttgcaagggcctggggtggcaggggtagaggaatgcatgaagattcctcaccaatgcctgatactgtcagtcttcgtaacgttagcctttctagcagaaggaaactctat

SEQ ID NO: 223670 - DNA, 78 bp, Artificial Sequence
  ENSG00000117643_37 (sequence is synthesized)
tcttcgtaacgttagcctttctagcagaaggaaactctatctatctatctatctatctatatttattactggagtgca

SEQ ID NO: 223671 - DNA, 77 bp, Artificial Sequence
  ENSG00000117643_38 (sequence is synthesized)
tggaaacactatattcttgttgagcccctggaagtttatttatatactcattctgcatttttgttcaatccatactc

SEQ ID NO: 223672 - DNA, 120 bp, Artificial Sequence
  ENSG00000117643_39 (sequence is synthesized)
accaccacctgcttggtgtctatgctttggctgatgtatcagagcccagagtgcagctagactgtgggctggcacccccaagggtggctgccagagtgagaccctcagctgtgtcttcct

SEQ ID NO: 223673 - DNA, 120 bp, Artificial Sequence
  ENSG00000117643_40 (sequence is synthesized)
tggacagtagaggtgacatgagaagtatgtccaagctggaagaggcctccttcagtggagcatccagttttgctccttctctttgtgtggatggaaaccaaggcctagagaggggaaggc

SEQ ID NO: 223674 - DNA, 120 bp, Artificial Sequence
  ENSG00000117643_41 (sequence is synthesized)
acttgcccaaggccacacagcacagagctggccaagctggcaccactgctggtctgtccgcggggtgtggaatgaacgagggctggaaggctgagagtggagtgcagtggtgcaatcttg

SEQ ID NO: 223675 - DNA, 120 bp, Artificial Sequence
  ENSG00000117643_42 (sequence is synthesized)
tcaggccttggagaaatactgtcggacagaagccggtttctctgggatccaagacgtgtacagtagcacccccaaccacgacaacaagcagcagagcttctttctagcggagacactaaa

SEQ ID NO: 223676 - DNA, 120 bp, Artificial Sequence
  ENSG00000117643_43 (sequence is synthesized)
cacttggaattcttacacctcactgaactctctggcaaccaggtcttcgctgaaaaggcaacagtcaggaacatccgcaaggtcctcaggaagatcgaaaagccctttggcctctacccc

SEQ ID NO: 223677 - DNA, 120 bp, Artificial Sequence
  ENSG00000117643_44 (sequence is synthesized)
catttccagtccccgagggtcttgttctgtccagcccaggccaagagggaagctgtgcatctgcccggtgcagccttacacagcagtccaggcaggggcaccccacacccacacacacct

SEQ ID NO: 223678 - DNA, 120 bp, Artificial Sequence
  ENSG00000117643_45 (sequence is synthesized)
gagggatgagcgtgcggctgccacagggttttcagaggcgagtgggtcctccctcatggatcagcaggagggcagtggggagcccgggagcccaagctaccactaaggtagcaaatagta

SEQ ID NO: 223679 - DNA, 120 bp, Artificial Sequence
  ENSG00000117643_46 (sequence is synthesized)
gctacctataccccaacgccaggtggcagggaaggtgagcacgcagagtcaataagattctacagagggaaaaggagagacaagattctgccggggaaaaggttctcactggtctgcgtg

SEQ ID NO: 223680 - DNA, 120 bp, Artificial Sequence
  ENSG00000117643_47 (sequence is synthesized)
agctcagtggcaaccacccatatgtgaaatctggagaaagtgcaactgaaatctaggcaccaccttgcattggcaggaattggccacccactgcagaagtcccctttccagagacattta

SEQ ID NO: 223681 - DNA, 120 bp, Artificial Sequence
  ENSG00000117643_48 (sequence is synthesized)
gcttttccatgtgagatctgcctgccttcttccctgtgcctgtttagctcatgccatcagcaggctggcatggcaataccctgccatggcagatgccctgactgttcattcctgctgttt

SEQ ID NO: 223682 - DNA, 120 bp, Artificial Sequence
  ENSG00000117643_49 (sequence is synthesized)
aaggccacatggggagcttagaacaccaatcagccctgacagctgctcatacctggccttgggcagtccccactagctagaagtgtcgctgtaggtctgacctcaaatccaaagaaggga

SEQ ID NO: 223683 - DNA, 120 bp, Artificial Sequence
  ENSG00000117643_50 (sequence is synthesized)
agtgctcacacctccctcatatggcactcaggctccagcagctacagtccctccctgagggctgcctggggagatggaagccctgcccatcctctggagccctccaaggagaactctgtg

SEQ ID NO: 223684 - DNA, 120 bp, Artificial Sequence
  ENSG00000117643_51 (sequence is synthesized)
gcagtgccactcccaaagccttgtcttccccctggaatgcccgcctcttagaccagtatgggagctgggagatgactgatagattcccacctctatgccacggctcccagcaggcaactg

SEQ ID NO: 223685 - DNA, 120 bp, Artificial Sequence
  ENSG00000117643_52 (sequence is synthesized)
ggagatgatagattcccacagctaccccatggctcccagtatcatgtcgccatccagcctcaaagcattacctggcacagctgtgaggaaacagatttctgggcttcactccagggccag

SEQ ID NO: 223686 - DNA, 120 bp, Artificial Sequence
  ENSG00000117643_53 (sequence is synthesized)
gcatctacatttttaatatgcattcatgtgctttttgacgcatggtttgggaccactacttactcaatgtaggagtccacctgagtgtccttaagaagctcaagaagagctgttcagcct

SEQ ID NO: 223687 - DNA, 120 bp, Artificial Sequence
  ENSG00000117643_54 (sequence is synthesized)
cttcttgattactttctctgacaaggagctcactgccgccacccttaaacagtccgtcctcctggcagcccttccttcaaaagtgttttccttacattgagagggactctgcctccctga

SEQ ID NO: 223688 - DNA, 120 bp, Artificial Sequence
  ENSG00000117643_55 (sequence is synthesized)
ttctgatcctttcccacctccaagtcccatcccccaacctccctgttgccattgctcttaaatcagactcctctaggaaggttctgaccagctccgaatggagtgggacagggagctcac

SEQ ID NO: 223689 - DNA, 120 bp, Artificial Sequence
  ENSG00000117643_56 (sequence is synthesized)
tccagtccctggttattctggagtaatagctacccctgcctgagcacccgctatgtgctgggcactttataatggctctactcttcccaacaaccctatgaggtgggtcttcctggagtt

SEQ ID NO: 223690 - DNA, 120 bp, Artificial Sequence
  ENSG00000117643_57 (sequence is synthesized)
cccatatttacagaggaggaaactaagactcagagaggtcaagtcacttgccctgggccttccagctggtcagtgataaagccgtgattcaagcccaggatgtgctggctccttccagac

SEQ ID NO: 223691 - DNA, 120 bp, Artificial Sequence
  ENSG00000117643_58 (sequence is synthesized)
cagattgatagagcaggctgcaggcttttgctctggagtccatccgtctatctctgtctcctctacatttacatactctggctattttcatcccccaatcatgcctcccacagaggcaat

SEQ ID NO: 223692 - DNA, 120 bp, Artificial Sequence
  ENSG00000117643_59 (sequence is synthesized)
tattggcagtcaacaaattggcccaaattctagaagcgcccgcaccctccaggggagctaatttggcctgcttcactgctcaccaccaggacagtcgagagtaacgcaggtacaagcaca

SEQ ID NO: 223693 - DNA, 120 bp, Artificial Sequence
  ENSG00000117643_60 (sequence is synthesized)
ttcctgtccccgtaatggacttcgttaacataaatggatatgaaatctgacgtggcaaagccaagtgctgtcacctggaaaggaaggtctgcctgcagaaaggtggctctcccgcactcc

SEQ ID NO: 223694 - DNA, 120 bp, Artificial Sequence
  ENSG00000117643_61 (sequence is synthesized)
cggccccgtacacacataactctatcaacatgagacagtgtggtcccaagggcctttctctcccaaggggtcttgtgctggctaggacgtgctgagtaggatttaaccactgtcggagag

SEQ ID NO: 223695 - DNA, 120 bp, Artificial Sequence
  ENSG00000117643_62 (sequence is synthesized)
caggcactatagataaagccctcttgaattccacttctcaccttcatagccccaaaggttgcaaacccagcctctttctgctccagctggggcaggctgtgctccatggtcacggccctg

SEQ ID NO: 223696 - DNA, 120 bp, Artificial Sequence
  ENSG00000117643_63 (sequence is synthesized)
atctgtgttggcccagtgctgccctgtgttgggcaggaatatgtatggtttatgttgtcagaattcattcacgtcctggctctgccacttaaggaccaggtggccatcagcaagtcacca

SEQ ID NO: 223697 - DNA, 120 bp, Artificial Sequence
  ENSG00000117643_64 (sequence is synthesized)
gacctctctgagattcaggtttcttgtctgttacactgagataatcccttgtcggttatgagggttggagataatgtatataacggatctggctcaaaggaactgaaaaaggataacaac

SEQ ID NO: 223698 - DNA, 120 bp, Artificial Sequence
  ENSG00000117643_65 (sequence is synthesized)
tgttattgctttttataattattattatttttattaaaacactgaaacgcctgttaggacatggggttattcaggagcccaagcctctcccccgaaataattccagggcatcagataaaa

SEQ ID NO: 223699 - DNA, 120 bp, Artificial Sequence
  ENSG00000117643_66 (sequence is synthesized)
tagcatattactagattgggccatatgaaactgccaatattggacctttttttgattgccttatatacttaactgttttttaaatggccagaatacttaagcattctgaatacttaagtt

SEQ ID NO: 223700 - DNA, 120 bp, Artificial Sequence
  ENSG00000117643_67 (sequence is synthesized)
agcaacacttagcactaagcagtttttaagaatacaatacattgttatgaactacagtcatcatgtcttataccatagatctcttgaacttattcctcctaactgaaattttatatcctt

SEQ ID NO: 223701 - DNA, 87 bp, Artificial Sequence
  ENSG00000117643_68 (sequence is synthesized)
ctcttgaacttattcctcctaactgaaattttatatcctttgatcagcatctccccaacccttggtaaccaccattctactctctac

SEQ ID NO: 223702 - DNA, 120 bp, Artificial Sequence
  ENSG00000117650_0 (sequence is synthesized)
aaacggggcccaaggcaggggtggcgggtcagtgctgctcgggggcttctccatccaggtccctggagttcctggtccctggagctccgcacttggcggcgcaacctgcgtgaggcagcg

SEQ ID NO: 223703 - DNA, 120 bp, Artificial Sequence
  ENSG00000117650_1 (sequence is synthesized)
cgactctggcgactggccggccatgccttcccgggctgaggactatgaagtgttgtacaccattggcacaggctcctacggccgctgccagaagatccggaggaagagtgatggcaagat

SEQ ID NO: 223704 - DNA, 120 bp, Artificial Sequence
  ENSG00000117650_2 (sequence is synthesized)
attagtttggaaagaacttgactatggctccatgacagaagctgagaaacagatgcttgtttctgaagtgaatttgcttcgtgaactgaaacatccaaacatcgttcgttactatgatcg

SEQ ID NO: 223705 - DNA, 120 bp, Artificial Sequence
  ENSG00000117650_3 (sequence is synthesized)
gattattgaccggaccaatacaacactgtacattgtaatggaatattgtgaaggaggggatctggctagtgtaattacaaagggaaccaaggaaaggcaatacttagatgaagagtttgt

SEQ ID NO: 223706 - DNA, 120 bp, Artificial Sequence
  ENSG00000117650_4 (sequence is synthesized)
tcttcgagtgatgactcagttgactctggccctgaaggaatgccacagacgaagtgatggtggtcataccgtattgcatcgggatctgaaaccagccaatgttttcctggatggcaagca

SEQ ID NO: 223707 - DNA, 120 bp, Artificial Sequence
  ENSG00000117650_5 (sequence is synthesized)
aaacgtcaagcttggagactttgggctagctagaatattaaaccatgacacgagttttgcaaaaacatttgttggcacaccttattacatgtctcctgaacaaatgaatcgcatgtccta

SEQ ID NO: 223708 - DNA, 120 bp, Artificial Sequence
  ENSG00000117650_6 (sequence is synthesized)
caatgagaaatcagatatctggtcattgggctgcttgctgtatgagttatgtgcattaatgcctccatttacagcttttagccagaaagaactcgctgggaaaatcagagaaggcaaatt

SEQ ID NO: 223709 - DNA, 120 bp, Artificial Sequence
  ENSG00000117650_7 (sequence is synthesized)
caggcgaattccataccgttactctgatgaattgaatgaaattattacgaggatgttaaacttaaaggattaccatcgaccttctgttgaagaaattcttgagaaccctttaatagcaga

SEQ ID NO: 223710 - DNA, 120 bp, Artificial Sequence
  ENSG00000117650_8 (sequence is synthesized)
gagctgaaactgaaggaaattcagttacaggagcgagagcgagctctcaaagcaagagaagaaagattggagcagaaagaacaggagctttgtgttcgtgagagactagcagaggacaaa

SEQ ID NO: 223711 - DNA, 120 bp, Artificial Sequence
  ENSG00000117650_9 (sequence is synthesized)
ctggctagagcagaaaatctgttgaagaactacagcttgctaaaggaacggaagttcctgtctctggcaagtaatccagaacttcttaatcttccatcctcagtaattaagaagaaagtt

SEQ ID NO: 223712 - DNA, 120 bp, Artificial Sequence
  ENSG00000117650_10 (sequence is synthesized)
catttcagtggggaaagtaaagagaacatcatgaggagtgagaattctgagagtcagctcacatctaagtccaagtgcaaggacctgaagaaaaggcttcacgctgcccagctgcgggct

SEQ ID NO: 223713 - DNA, 120 bp, Artificial Sequence
  ENSG00000117650_11 (sequence is synthesized)
caagccctgtcagatattgagaaaaattaccaactgaaaagcagacagatcctgggcatgcgctagccaggtagagagacacagagctgtgtacaggatgtaatattaccaacctttaaa

SEQ ID NO: 223714 - DNA, 120 bp, Artificial Sequence
  ENSG00000117650_12 (sequence is synthesized)
gactgatattcaaatgctgtagtgttgaatacttggttccatgagccatgcctttctgtatagtacacatgatatttcggaattggttttactgttcttcagcaactattgtacaaaatg

SEQ ID NO: 223715 - DNA, 120 bp, Artificial Sequence
  ENSG00000117650_13 (sequence is synthesized)
ttcacatttaatttttctttcttcttttaagaacatattataaaaagaatactttcttggttgggcttttaatcctgtgtgtgattactagtaggaacatgagatgtgacattctaaatc

SEQ ID NO: 223716 - DNA, 120 bp, Artificial Sequence
  ENSG00000117650_14 (sequence is synthesized)
ttgggagaaaaaataatgttaggaaaaaaatatttatgcaggaagagtagcactcactgaatagttttaaatgactgagtggtatgcttacaattgtcatgtctagatttaaattttaag

SEQ ID NO: 223717 - DNA, 120 bp, Artificial Sequence
  ENSG00000117650_15 (sequence is synthesized)
tctgagattttaaatgtttttgagcttagaaaacccagttagatgcaatttggtcattaataccatgacatcttgcttataaatattccattgctctgtagttcaaatctgttagctttg

SEQ ID NO: 223718 - DNA, 120 bp, Artificial Sequence
  ENSG00000117650_16 (sequence is synthesized)
tgaaaattcatcactgtgatgtttgtattctttttttttttctgtttaacagaatatgagctgtctgtcatttacctacttctttcccactaaataaaagaattcttcagtttccctgta

SEQ ID NO: 223719 - DNA, 120 bp, Artificial Sequence
  ENSG00000117650_17 (sequence is synthesized)
gtggacccagaacctcatgagttaaaaccaccagtgaacttatttttccaagtttttaagacctagccataaaggagtcctttcttttgtcttggaaacacatttttgtccttttatttt

SEQ ID NO: 223720 - DNA, 120 bp, Artificial Sequence
  ENSG00000117650_18 (sequence is synthesized)
aactgctgtcttaggaggactattctgttatgcaatctgactataatactgagtattttttccccaggattaccatcgaccttctgttgaagaaattcttgagaaccctttaatagcaga

SEQ ID NO: 223721 - DNA, 120 bp, Artificial Sequence
  ENSG00000117650_19 (sequence is synthesized)
cttaggtagcccttttcatttacaaatctcaaattttaagatggatttcattgaatatatgcatttcaatggaaacaaaattctgttatagcaatgatttatttcctgggttcatagacc

SEQ ID NO: 223722 - DNA, 120 bp, Artificial Sequence
  ENSG00000117650_20 (sequence is synthesized)
tgaggcaatgagtcatagaatttcatgtttgattttctttaccttatcaaactacatgtttagtaattgatacttatttttattatcattatttatttttttattttttttgagatggag

SEQ ID NO: 223723 - DNA, 120 bp, Artificial Sequence
  ENSG00000117650_21 (sequence is synthesized)
ggattacaggcatgagacaccgtgcccagccgatacttatttttaaaaattagggcatttacaaaactattgtatgtttcagatttcagagagataaactgcatttcaagtaaaaataaa

SEQ ID NO: 223724 - DNA, 120 bp, Artificial Sequence
  ENSG00000117650_22 (sequence is synthesized)
gaacaaatgaatcgcatgtcctacaatgagaaatcagatatctggtcattgggctgcttgctgtatgagttatgtgcattaatgtaagtatgatgaagacagattcctagtctaagcttt

SEQ ID NO: 223725 - DNA, 80 bp, Artificial Sequence
  ENSG00000117676_0 (sequence is synthesized)
ggacggcccagccggagcgcgaggggctcgggggggcgcggcggttcgggtcgcagagccagggaccccaggacccggga

SEQ ID NO: 223726 - DNA, 120 bp, Artificial Sequence
  ENSG00000117676_1 (sequence is synthesized)
ggggccgccggaggagcgcgggtgacctggcggcggcgagatgccgctcgcccagctcaaggagccctggccgctcatggagctagtgcctctggacccggagaatggacagacctcagg

SEQ ID NO: 223727 - DNA, 120 bp, Artificial Sequence
  ENSG00000117676_2 (sequence is synthesized)
ggaagaagctggacttcagccgtccaaggatgagggcgtcctcaaggagatctccatcacgcaccacgtcaaggctggctctgagaaggctgatccatcccatttcgagctcctcaaggt

SEQ ID NO: 223728 - DNA, 120 bp, Artificial Sequence
  ENSG00000117676_3 (sequence is synthesized)
tctgggccagggatcctttggcaaagtcttcctggtgcggaaagtcacccggcctgacagtgggcacctgtatgctatgaaggtgctgaagaaggcaacgctgaaagtacgtgaccgcgt

SEQ ID NO: 223729 - DNA, 120 bp, Artificial Sequence
  ENSG00000117676_4 (sequence is synthesized)
ccggaccaagatggagagagacatcctggctgatgtaaatcacccattcgtggtgaagctgcactatgccttccagaccgagggcaagctctatctcattctggacttcctgcgtggtgg

SEQ ID NO: 223730 - DNA, 120 bp, Artificial Sequence
  ENSG00000117676_5 (sequence is synthesized)
ggacctcttcacccggctctcaaaagaggtgatgttcacggaggaggatgtgaagttttacctggctgagctggctctgggcctggatcacctgcacagcctgggtatcatttacagaga

SEQ ID NO: 223731 - DNA, 120 bp, Artificial Sequence
  ENSG00000117676_6 (sequence is synthesized)
cctcaagcctgagaacatccttctggatgaggagggccacatcaaactcactgactttggcctgagcaaagaggccattgaccacgagaagaaggcctattctttctgcgggacagtgga

SEQ ID NO: 223732 - DNA, 120 bp, Artificial Sequence
  ENSG00000117676_7 (sequence is synthesized)
gtacatggcccctgaggtcgtcaaccgccagggccactcccatagtgcggactggtggtcctatggggtgttgatgtttgagatgctgacgggctccctgcccttccaggggaaggaccg

SEQ ID NO: 223733 - DNA, 120 bp, Artificial Sequence
  ENSG00000117676_8 (sequence is synthesized)
gaaggagaccatgacactgattctgaaggcgaagctaggcatgccccagtttctgagcactgaagcccagagcctcttgcgggccctgttcaagcggaatcctgccaaccggctcggctc

SEQ ID NO: 223734 - DNA, 120 bp, Artificial Sequence
  ENSG00000117676_9 (sequence is synthesized)
cggccctgatggggcagaggaaatcaagcggcatgtcttctactccaccattgactggaataagctataccgtcgtgagatcaagccacccttcaagccagcagtggctcagcctgatga

SEQ ID NO: 223735 - DNA, 120 bp, Artificial Sequence
  ENSG00000117676_10 (sequence is synthesized)
caccttctactttgacaccgagttcacgtcccgcacacccaaggattccccaggcatcccccccagcgctggggcccatcagctgttccggggcttcagcttcgtggccaccggcctgat

SEQ ID NO: 223736 - DNA, 120 bp, Artificial Sequence
  ENSG00000117676_11 (sequence is synthesized)
ggaagacgacggcaagcctcgtgccccgcaggcacccctgcactcggtggtacagcaactccatgggaagaacctggtttttagtgacggctacgtggtaaaggagacaattggtgtggg

SEQ ID NO: 223737 - DNA, 120 bp, Artificial Sequence
  ENSG00000117676_12 (sequence is synthesized)
ctcctactctgagtgcaagcgctgtgtccacaaggccaccaacatggagtatgctgtcaaggtcattgataagagcaagcgggatccttcagaagagattgagattcttctgcggtatgg

SEQ ID NO: 223738 - DNA, 120 bp, Artificial Sequence
  ENSG00000117676_13 (sequence is synthesized)
gatgcggggtggggagctgctggacaagatcctgcggcagaagttcttctcagagcgggaggccagctttgtcctgcacaccattggcaaaactgtggagtatctgcactcacagggggt

SEQ ID NO: 223739 - DNA, 120 bp, Artificial Sequence
  ENSG00000117676_14 (sequence is synthesized)
tgtgcacagggacctgaagcccagcaacatcctgtatgtggacgagtccgggaatcccgagtgcctgcgcatctgtgactttggttttgccaaacagctgcgggctgagaatgggctcct

SEQ ID NO: 223740 - DNA, 120 bp, Artificial Sequence
  ENSG00000117676_15 (sequence is synthesized)
catgacaccttgctacacagccaactttgtggcgcctgaggtgctgaagcgccagggctacgatgaaggctgcgacatctggagcctgggcattctgctgtacaccatgctggcaggata

SEQ ID NO: 223741 - DNA, 120 bp, Artificial Sequence
  ENSG00000117676_16 (sequence is synthesized)
tactccatttgccaacggtcccagtgacacaccagaggaaatcctaacccggatcggcagtgggaagtttaccctcagtgggggaaattggaacacagtttcagagacagccaaggacct

SEQ ID NO: 223742 - DNA, 120 bp, Artificial Sequence
  ENSG00000117676_17 (sequence is synthesized)
ggtgtccaagatgctacacgtggatccccaccagcgcctcacagctaagcaggttctgcagcatccatgggtcacccagaaagacaagcttccccaaagccagctgtcccaccaggacct

SEQ ID NO: 223743 - DNA, 120 bp, Artificial Sequence
  ENSG00000117676_18 (sequence is synthesized)
acagcttgtgaagggagccatggctgccacgtactccgcactcaacagctccaagcccaccccccagctgaagcccatcgagtcatccatcctggcccagcggcgagtgaggaagttgcc

SEQ ID NO: 223744 - DNA, 120 bp, Artificial Sequence
  ENSG00000117676_19 (sequence is synthesized)
atccaccaccctgtgaggcaccagggcattcgggccacagggcggtgctagcttgacacagtcagcatgcttcccagagggagcaggccggaaccacagggccagagggagctggaaccc

SEQ ID NO: 223745 - DNA, 120 bp, Artificial Sequence
  ENSG00000117676_20 (sequence is synthesized)
gaggggccggggaagctgccagcccagaacacccctaatgagggtgtgagaagtgccttctccttccccaggatggactcttctcggctcaggctctgctggtggaaagcgattcactgt

SEQ ID NO: 223746 - DNA, 120 bp, Artificial Sequence
  ENSG00000117676_21 (sequence is synthesized)
ataaacttttttttatgaaaaaaatggcatcaaccaccatggatttttacaagatccatttgcctttctgggagcagaaacagccattgcggccccaggaggggaactgagtcacgctgg

SEQ ID NO: 223747 - DNA, 120 bp, Artificial Sequence
  ENSG00000117676_22 (sequence is synthesized)
ggctctctgagactctttagagcagctttgggatcccaccctggggacccccacgattggccacctgtagccatctgcacacacctccgagacagtccagtgtcacctctctcagagcat

SEQ ID NO: 223748 - DNA, 120 bp, Artificial Sequence
  ENSG00000117676_23 (sequence is synthesized)
ctggctgtttagcagaactcattctatccccaatcagctccttttccgttctgttctgctgggagttctagaaccacttcctgctacaggaggggtctcatgtcctgctggcttccagct

SEQ ID NO: 223749 - DNA, 120 bp, Artificial Sequence
  ENSG00000117676_24 (sequence is synthesized)
tcaggcaccagcatccaccttggctctgccagtggatcccctgcggtcaggctgggcagccccagagagaggatgtggaaagcactttttggctgacttcatctggggttggcaacagga

SEQ ID NO: 223750 - DNA, 120 bp, Artificial Sequence
  ENSG00000117676_25 (sequence is synthesized)
cagagttcacaggaggccagtgggcgggccatgagggacagggtcttttttcatttcttcctcagctggttactcagggttcatctgtccatggcctttctaataaactgttgagttgaa

SEQ ID NO: 223751 - DNA, 120 bp, Artificial Sequence
  ENSG00000117676_26 (sequence is synthesized)
agaagtaggaagagtaacggggccctctggtcaccggcttgagccccaccatgcagaccccagcagatttccccagggttgagagagacttggttccctgtcccagaaaggatgagggcg

SEQ ID NO: 223752 - DNA, 120 bp, Artificial Sequence
  ENSG00000117676_27 (sequence is synthesized)
ccccggactctgcctgctcctgccatggtgccgtggccctgctgggcggatggagcaggatcccaagccgccccgtctgcggctctgggccctgatcccctggcttcccaggaagcagcg

SEQ ID NO: 223753 - DNA, 120 bp, Artificial Sequence
  ENSG00000117676_28 (sequence is synthesized)
ttttgacaggttaacttagagctacctgtagacacctacacagagtcagtagcagcagcaataagaccatcatttcagccccttccccttctctcggatgccaagtccatgcacccgtcc

SEQ ID NO: 223754 - DNA, 120 bp, Artificial Sequence
  ENSG00000117676_29 (sequence is synthesized)
gctgcactatggtaaagcttctggccctgcctgagctcctaccccacccatccttcgcccttgcctgtggtctgtacactgtcccaccgcctgcctggcaggccaagggagccagggccg

SEQ ID NO: 223755 - DNA, 120 bp, Artificial Sequence
  ENSG00000117676_30 (sequence is synthesized)
ggggccctctggtcaccggcttgagccccaccatgcagaccccagcagatttccccagggttgagagagacttggttccctgtcccagaaaggtacagcagcaagaacccacagctctgc

SEQ ID NO: 223756 - DNA, 120 bp, Artificial Sequence
  ENSG00000117676_31 (sequence is synthesized)
gagaccatgacactgattctgaaggcgaagctaggcatgccccagtttctgagcactgaagcccagagcctcttgcgggccctgttcaagcggaatcctgccaaccggctcggttcctcg

SEQ ID NO: 223757 - DNA, 120 bp, Artificial Sequence
  ENSG00000117676_32 (sequence is synthesized)
aacatgccggcatgtagctccggccctgatggggcagaggaaatcaagcggcatgtcttctactccaccattgactggaataagctataccgtcgtgagatcaagccacccttcaagcca

SEQ ID NO: 223758 - DNA, 120 bp, Artificial Sequence
  ENSG00000117676_33 (sequence is synthesized)
aaattgctctgggattcctgccatggggattttacaggcactgctaggctgctcagaggttctctcgctgactcaccctctgaggtgaggaacactgccctctgcagcccctgtactgcc

SEQ ID NO: 223759 - DNA, 120 bp, Artificial Sequence
  ENSG00000117676_34 (sequence is synthesized)
ctgataggaatggctcagccagccccgccccaggatggtctggaaatagggacatgctcctgcctccaggagctctaccttgggagtaccccatctgagggggagacacagtctcccacc

SEQ ID NO: 223760 - DNA, 120 bp, Artificial Sequence
  ENSG00000117676_35 (sequence is synthesized)
gcagccccagccccagtatggaggccagagtctgtacccagaccgtgcgggcttttctgcagatatactccatttgccaacggtcccagtgacacaccagaggaaatcctaacccggatc

SEQ ID NO: 223761 - DNA, 120 bp, Artificial Sequence
  ENSG00000117676_36 (sequence is synthesized)
aagggagacagctctgtcttcaggagcacctagttcaaaggtggagaaacaggcctatttctcagctatccctcgccagccaatcctcctccccctaagccaagtgctagtgactggctg

SEQ ID NO: 223762 - DNA, 120 bp, Artificial Sequence
  ENSG00000117676_37 (sequence is synthesized)
tgaaggtctggaaggtggtaatagggtaaatgcaatgtgtttgtcagggggcggggccctcaactaccaagctggtcaagcagaggcattctgactgttgatgctagaagagtctggggg

SEQ ID NO: 223763 - DNA, 120 bp, Artificial Sequence
  ENSG00000117676_38 (sequence is synthesized)
accccagcctccccaggggaggcctcttctaggacagggccatcctgaggtgggtgggcatggctttctccagaaacgtctccctctcttgggcaatctgagggatgggtgagtggggtg

SEQ ID NO: 223764 - DNA, 120 bp, Artificial Sequence
  ENSG00000117676_39 (sequence is synthesized)
cccagtcactaatgctaccattaccaagggccaggtactttgcatgcaggtaatgttgcccgtctttttttgctaatctagtgtgacatttgagatgccacctttagaggtctttccttg

SEQ ID NO: 223765 - DNA, 120 bp, Artificial Sequence
  ENSG00000117676_40 (sequence is synthesized)
ataaagccctatagaattttccctaatatctaactaccctcaaatgataactaaggagccaggggcaggtggtgagttggaataagatctggctttagtgttaggcagccctgtattcaa

SEQ ID NO: 223766 - DNA, 120 bp, Artificial Sequence
  ENSG00000117676_41 (sequence is synthesized)
atcctgtctccacctactagctagacttactagctcaatgactgtagagctacttaactgccctgagccttagttttcccattagcaaaacggggccctaatagtacttgcctcacacag

SEQ ID NO: 223767 - DNA, 120 bp, Artificial Sequence
  ENSG00000117676_42 (sequence is synthesized)
ttgcttcaaggattagcaaaaaagataggcaacacccctgcgtggtactgctaccaccctgcaacacccgcccagtcatcagagagaattgggtggagcacctcctctgggctgaaccca

SEQ ID NO: 223768 - DNA, 120 bp, Artificial Sequence
  ENSG00000117676_43 (sequence is synthesized)
tgagaacatccttctggatgaggagggccacatcaaactcactggtgagtggagggcgcctgccccctcgggacccaggggaggacaggacaaggtcatgataggtctcggctgagtgct

SEQ ID NO: 223769 - DNA, 120 bp, Artificial Sequence
  ENSG00000117676_44 (sequence is synthesized)
gggggctcattcttcccgagaagccgtgccagttacttggaagtggtcaaaaactcaggcctcagacttggaacaccctcagctggaatcccagcccctcattgtgtaacgttgagcaag

SEQ ID NO: 223770 - DNA, 120 bp, Artificial Sequence
  ENSG00000117682_0 (sequence is synthesized)
cgcgcccagcggagctaatcagattacctggctggtgtttgcttgttctggagtgatcttctgactggaaaagaactatgtcatggatcaaggaaggagagctgtcactttgggagcggt

SEQ ID NO: 223771 - DNA, 120 bp, Artificial Sequence
  ENSG00000117682_1 (sequence is synthesized)
tctgtgccaacatcataaaggcaggcccaatgccgaaacacattgcattcataatggacgggaaccgtcgctatgccaagaagtgccaggtggagcggcaggaaggccactcacagggct

SEQ ID NO: 223772 - DNA, 120 bp, Artificial Sequence
  ENSG00000117682_2 (sequence is synthesized)
tcaacaagctagctgagactctgcggtggtgtttgaacctgggcatcctagaggtgacagtctacgcattcagcattgagaacttcaaacgctccaagagtgaggtagacgggcttatgg

SEQ ID NO: 223773 - DNA, 120 bp, Artificial Sequence
  ENSG00000117682_3 (sequence is synthesized)
atctggcccggcagaagttcagccgcttgatggaagaaaaggagaaactgcagaagcatggggtgtgtatccgggtcctgggcgatctgcacttgttgcccttggatctccaggagctga

SEQ ID NO: 223774 - DNA, 120 bp, Artificial Sequence
  ENSG00000117682_4 (sequence is synthesized)
ttgcacaagctgtacaggccacgaagaactacaacaagtgtttcctgaatgtctgttttgcatacacatcccgtcatgagatcagcaatgctgtgagagagatggcctggggggtggagc

SEQ ID NO: 223775 - DNA, 120 bp, Artificial Sequence
  ENSG00000117682_5 (sequence is synthesized)
aaggcctgttggatcccagtgatatctctgagtctctgcttgataagtgcctctataccaaccgctctcctcatcctgacatcttgatacggacttctggagaagtgcggctgagtgact

SEQ ID NO: 223776 - DNA, 120 bp, Artificial Sequence
  ENSG00000117682_6 (sequence is synthesized)
tcttgctatggcagacctctcactcctgcctggtgttccaacccgttctgtggccagagtatacattttggaacctcttcgaggccatcctgcagttccagatgaaccatagcgtgcttc

SEQ ID NO: 223777 - DNA, 120 bp, Artificial Sequence
  ENSG00000117682_7 (sequence is synthesized)
agcagaaggcccgagacatgtatgcagaggagcggaagaggcagcagctggagagggaccaggctacagtgacagagcagctgctgcgagaggggctccaagccagtggggacgcccagc

SEQ ID NO: 223778 - DNA, 120 bp, Artificial Sequence
  ENSG00000117682_8 (sequence is synthesized)
tccgaaggacacgcttgcacaaactctcggccagacgggaagagcgagtccaaggcttcctgcaggccttggaactcaagcgagctgactggctggcccgtctgggcactgcatcagcct

SEQ ID NO: 223779 - DNA, 120 bp, Artificial Sequence
  ENSG00000117682_9 (sequence is synthesized)
gaatgaggctggccacctgccactttgccctgccctctgcctccagggctccactccccttccttttcttggtgaaaggcacctcctttcctgataatgaatggtgttccctttgcttgg

SEQ ID NO: 223780 - DNA, 120 bp, Artificial Sequence
  ENSG00000117682_10 (sequence is synthesized)
ctggggagccccccaggccaggtttgctggccatagatacctttgggctgcctgggacaggctcctgaggaggattgagggtgaaagtctcccacgagtacactaaacctaggtctggtc

SEQ ID NO: 223781 - DNA, 120 bp, Artificial Sequence
  ENSG00000117682_11 (sequence is synthesized)
accaatagggtttggagagcaaagggccacaactcatcagctgcctgtctcttagatgcactttctttttccaccagcacatccttcaacacacagaatttcagggaagagttctcccca

SEQ ID NO: 223782 - DNA, 120 bp, Artificial Sequence
  ENSG00000117682_12 (sequence is synthesized)
aaaccctagctctttacccttccattttagccttccacccagcttccacaaaagatttggctctaccttggatctgctagtaaataactaataggcaggcagttatttgggtaaggaaaa

SEQ ID NO: 223783 - DNA, 120 bp, Artificial Sequence
  ENSG00000117682_13 (sequence is synthesized)
gtgggagagacagaaaatttgcccatctgctgctcctcccccttggctctccacctgggatttgctattgaatctctaccctctcccaccacacagtactgattgctcactgaaagactc

SEQ ID NO: 223784 - DNA, 120 bp, Artificial Sequence
  ENSG00000117682_14 (sequence is synthesized)
agcacccccaatggtgcgcggaagccaggcgggcgattacaatccaattacctattgtcgactcagcccacacaagcttttctcctcctcttgcagggcatggggccaggctccactccc

SEQ ID NO: 223785 - DNA, 120 bp, Artificial Sequence
  ENSG00000117682_15 (sequence is synthesized)
aaatgagactggccccctccatggttcagggtaacagaagggcctgtaggccctggtgaactgaatccagcacaggcctcccctgtaacacaacaggactgagcagaaccaaacacttct

SEQ ID NO: 223786 - DNA, 120 bp, Artificial Sequence
  ENSG00000117682_16 (sequence is synthesized)
tccaactgactctgctccctgccctcaccatctcaaactctgattcccactccactcttcgaggtttctctcagctttttgacctggctccctaagtaggccctagatgatttattcttg

SEQ ID NO: 223787 - DNA, 120 bp, Artificial Sequence
  ENSG00000117682_17 (sequence is synthesized)
gcatggcaaagcttgttctaggtcctctgcttgtgagggtcaaagctgtgtcctttcccttacctccctctgccaggacttgctgcagagctgctgagaggattagtgcctttgaagagc

SEQ ID NO: 223788 - DNA, 120 bp, Artificial Sequence
  ENSG00000117682_18 (sequence is synthesized)
gagctgtctgcctgagcaactctatttcaggtgccccacaccggcaagtaccagccagcaacaccaaccaaatgctactctctttaaagtccattttccttcttcttttttttttttttt

SEQ ID NO: 223789 - DNA, 69 bp, Artificial Sequence
  ENSG00000117682_19 (sequence is synthesized)
gacctcaggtgatccgccacttcccattttactttctgcaagctgtttccctagcagctccctctaggg

SEQ ID NO: 223790 - DNA, 120 bp, Artificial Sequence
  ENSG00000117682_20 (sequence is synthesized)
tactttctgcaagctgtttccctagcagctccctctaggggagaggtgaaatcttgcaagttgtagcaagagcacacaggaaacccctaactttcctataccccacccgcctcttcccct

SEQ ID NO: 223791 - DNA, 120 bp, Artificial Sequence
  ENSG00000117682_21 (sequence is synthesized)
ttctgtcccgggatacctggcggcaagagacttcttggctattgtccatgctcccagaatcaagcataaatgccagacacggcgattgagaagccaatcagtgaaccctttggcaaagcc

SEQ ID NO: 223792 - DNA, 120 bp, Artificial Sequence
  ENSG00000117682_22 (sequence is synthesized)
cccatccacacctggcactcccctctaccaatccctggcacagggttcctggagagcaggtgctgtacattttacagctttacaatggggctgttgacagccataattagggaggcatga

SEQ ID NO: 223793 - DNA, 120 bp, Artificial Sequence
  ENSG00000117682_23 (sequence is synthesized)
attatgcggctataatgcagagccctacaattaaggcgggaatgaggggctggaggcagcaaacggaatctgccctatgagcgtggctgttgagtcctgtctcctgggtctgactttccg

SEQ ID NO: 223794 - DNA, 120 bp, Artificial Sequence
  ENSG00000117682_24 (sequence is synthesized)
taatatgattggggtacagtagaggtgattaatggggctggcatctctctttggcctgaggttctgtattctgggaaaggtacacagggtggagtagggagaagctgccccaggaggcga

SEQ ID NO: 223795 - DNA, 120 bp, Artificial Sequence
  ENSG00000117682_25 (sequence is synthesized)
tgtagtggtggaaagaagaggcagagaggtcgtcgtcgtcgcccagcagcaagggctgcaaaatagtagaactcgtggttgctttggacaggtgtgatttgtgcaagccaggttcaaccc

SEQ ID NO: 223796 - DNA, 120 bp, Artificial Sequence
  ENSG00000117682_26 (sequence is synthesized)
ttgcctcaagaaatcagatgggaccaatttagtgtccttccacctgtgagccaagcccccatttgaggacatctatcgtattcttgtgtgctgggtctcaaatagaatttttaaagattc

SEQ ID NO: 223797 - DNA, 120 bp, Artificial Sequence
  ENSG00000117682_27 (sequence is synthesized)
aatcaggtgccactgaactgaaggggtgaactagaggagaagagggtgactgggcggggagcagctgcgggagaagcaaagggacgactgagggaataatcaggagaccactgaggcgtg

SEQ ID NO: 223798 - DNA, 120 bp, Artificial Sequence
  ENSG00000117682_28 (sequence is synthesized)
aagtactaggcgtgcgataactgaaggagttagtaactgggagcacagagttggaaacagcttaggggaagatggagaaggaagaaacggggaatgatcaagatattacctggctggtgt

SEQ ID NO: 223799 - DNA, 120 bp, Artificial Sequence
  ENSG00000117682_29 (sequence is synthesized)
tagcagaagagaagtattcttgaatgcctgggattattcaggagccgggggggacagtccagaattctcatttgtcatccttattcatgcagtaaacctttattgctgagagacagcaaa

SEQ ID NO: 223800 - DNA, 120 bp, Artificial Sequence
  ENSG00000117682_30 (sequence is synthesized)
ccggcagaagttcagccgcttgatggaagaaaagtaagatgctatcagaggggagagcatgttcttccaccacccccagccttatcctaacccttgaaattctgttatctgaggcttact

SEQ ID NO: 223801 - DNA, 120 bp, Artificial Sequence
  ENSG00000117682_31 (sequence is synthesized)
taagggacttgcaactctttttaatgttagttagatatcttgggtggcaaatatcagaaatacaagatagtctttcattctttatttctaactttttaataaaaaagggggcatttattt

SEQ ID NO: 223802 - DNA, 120 bp, Artificial Sequence
  ENSG00000117682_32 (sequence is synthesized)
caggcgtgagtcaccatgcccagccgattcagggatttttcaaaaagaaaattattaattattgtcaacatagtggaatcctaattattaaaggtggagagacttttgaagccatttaaa

SEQ ID NO: 223803 - DNA, 120 bp, Artificial Sequence
  ENSG00000117682_33 (sequence is synthesized)
caatggcccagagcaccggttggccttctggtcagttggataatcttatataaaaacctgttattaaagttgatgatgttaagtgcaattcatgatgttaagtggaatttagcaaggaaa

SEQ ID NO: 223804 - DNA, 120 bp, Artificial Sequence
  ENSG00000117682_34 (sequence is synthesized)
aattgttaaggaaaacaggcctgggccagcatggcagctcacgcctgtaatcctagcacattaggaggccgaggtgggcagtccacttgaggcaggccaggagttcaagaccagcctggc

SEQ ID NO: 223805 - DNA, 120 bp, Artificial Sequence
  ENSG00000117682_35 (sequence is synthesized)
actccctcttttcaacaacaacaacaaaaaagcaggcctgtaccaaaccataaagcccctctgtgccatgtacttggccagaggtctaattaggggagcatgtggaaagatttaagggga

SEQ ID NO: 223806 - DNA, 120 bp, Artificial Sequence
  ENSG00000117682_36 (sequence is synthesized)
tctcccaaatttagagattaggattggcttattacaacctgcttcagaactagagttcaccacacaccaagaaaccccagagaaagagcaaagcagatgacaaagccatgttattattcc

SEQ ID NO: 223807 - DNA, 120 bp, Artificial Sequence
  ENSG00000117682_37 (sequence is synthesized)
tttacaaattataccctcctggccctttggtagtgtttttccaagaatgacttttcatgaatgcagtttgttggggctagagttctttaggtctctcatgttctagttccacacaagatt

SEQ ID NO: 223808 - DNA, 120 bp, Artificial Sequence
  ENSG00000117682_38 (sequence is synthesized)
cacattgcgttataaaactctgggtggtaaaagattataggcttagaccagtgtctttggattctaatgctggctgctctccatagtccatctgattccccagaagtcagttatagctct

SEQ ID NO: 223809 - DNA, 120 bp, Artificial Sequence
  ENSG00000117682_39 (sequence is synthesized)
gagtgttttttgtatctgtctctgtgttttattgtttgcttgctagctatagatctcatcttgacattggccagacgtggttgcttttgcctctaatcccacactttgggaggccaaggc

SEQ ID NO: 223810 - DNA, 78 bp, Artificial Sequence
  ENSG00000117682_40 (sequence is synthesized)
ttgcttttgcctctaatcccggttcaggactagcccgggtaacatagtcagaccctgtctctacaaaaaaatttaaaa

SEQ ID NO: 223811 - DNA, 120 bp, Artificial Sequence
  ENSG00000117682_41 (sequence is synthesized)
ctcaggaggctgaggtgggaggactatctgagcccaggaagcttgaggctgcagtgaatagagattgtgcccctgtactctagcctgggtgacagagtgacaccatctcaagaaaaaaaa

SEQ ID NO: 223812 - DNA, 120 bp, Artificial Sequence
  ENSG00000117691_0 (sequence is synthesized)
cagacaccgcgccctgccgagcgggggcccccagtgcggcttttcaccgaggaggagctggcccgctatggcggggaggaggaagatcagcccatctacttggcagtgaagggagtggtg

SEQ ID NO: 223813 - DNA, 120 bp, Artificial Sequence
  ENSG00000117691_1 (sequence is synthesized)
tttgatgtcacctccggaaaggagttttatggacgaggagccccctacaatgccttgacggggaaggactccactagaggggtagccaagatgtccttggatcctgcagacctcacccat

SEQ ID NO: 223814 - DNA, 120 bp, Artificial Sequence
  ENSG00000117691_2 (sequence is synthesized)
ccatcgtcggctacactgcccggagaattctcaatgaggatggcagccctaacctggacttcaagcctgaagaccagccccattttgacatcaaggatgagttctgatgttccccctgca

SEQ ID NO: 223815 - DNA, 120 bp, Artificial Sequence
  ENSG00000117691_3 (sequence is synthesized)
ggagcaggttcttgggagcgtgaggcaggaagacactaggtgctgaatctcctgcaaaactggctgcctggaggccctgagccacccagatctgaataaaacagatgcttaccctggaag

SEQ ID NO: 223816 - DNA, 120 bp, Artificial Sequence
  ENSG00000117691_4 (sequence is synthesized)
agcaaatgcctcctgttgtccttggtcaggggttctgtctacctggggacccctgtctgcacaccagggatcaataagagccaaagtgggacacctcctagatgtcagtatcagctggct

SEQ ID NO: 223817 - DNA, 120 bp, Artificial Sequence
  ENSG00000117691_5 (sequence is synthesized)
gggcagtggaattttgagcgacctttactttatacttttctgtgcttgacagattttcagccatgaccatgttcactttataatcaaaacaaaaataaaggtcccatttttacaaaagga

SEQ ID NO: 223818 - DNA, 120 bp, Artificial Sequence
  ENSG00000117691_6 (sequence is synthesized)
tgccagaactgcaagatgaggactgagaaaagacccttggttttttgatgttgatgttatagattgaaatttaactgagagagagaggaccttgagatggaaacaggggtaggaaacaat

SEQ ID NO: 223819 - DNA, 120 bp, Artificial Sequence
  ENSG00000117691_7 (sequence is synthesized)
tgttttgggagtggagcctgaggatctctgtaggtggaaggaaggagccagagagaggaggggagcgagggacgagagaggcagttgagtgcagtgggttcaagctgtgctgcgctgttg

SEQ ID NO: 223820 - DNA, 120 bp, Artificial Sequence
  ENSG00000117697_0 (sequence is synthesized)
agttccgacgaaaaatggcggggtctcctgagttggtggtccttgaccctccatgggacaaggagctcgcggctggcacagagagccaggccttggtctccgccactccccgagaagact

SEQ ID NO: 223821 - DNA, 120 bp, Artificial Sequence
  ENSG00000117697_1 (sequence is synthesized)
ttcgggtgcgctgcacctcgaagcgggctgtgaccgaaatgctacaactgtgcggccgcttcgtgcaaaagctcggggacgctctgccggaggagattcgggagcccgctctgcgagatg

SEQ ID NO: 223822 - DNA, 120 bp, Artificial Sequence
  ENSG00000117697_2 (sequence is synthesized)
cgcagtggacttttgaatcagctgtgcaagagaatatcagcattaatgggcaagcatggcaggaagcttcagataattgttttatggattctgacatcaaagtacttgaagatcagtttg

SEQ ID NO: 223823 - DNA, 120 bp, Artificial Sequence
  ENSG00000117697_3 (sequence is synthesized)
atgaaatcatagtagatatagccacaaaacgtaagcagtatcccagaaagatcctggaatgtgtcatcaaaaccataaaagcaaaacaagaaattctgaagcagtaccaccctgttgtac

SEQ ID NO: 223824 - DNA, 120 bp, Artificial Sequence
  ENSG00000117697_4 (sequence is synthesized)
atccactggacctaaaatatgaccctgatccagcccctcatatggaaaatttgaaatgcagaggggaaacagtagcaaaggagatcagtgaagccatgaagtccttgcctgcattaattg

SEQ ID NO: 223825 - DNA, 120 bp, Artificial Sequence
  ENSG00000117697_5 (sequence is synthesized)
aacaaggagagggattttcccaagttctcaggatgcagcctgttatccacctccagaggattcaccaagaagtcttttccagttgtcataggaaaccagatgctaaacctgagaacttta

SEQ ID NO: 223826 - DNA, 120 bp, Artificial Sequence
  ENSG00000117697_6 (sequence is synthesized)
taacacagatagaaaccacaccaacagagactgcttccaggaaaacctctgacatggtactgaaaagaaagcaaactaaagactgcccccagagaaaatggtatccattgcggccaaaga

SEQ ID NO: 223827 - DNA, 120 bp, Artificial Sequence
  ENSG00000117697_7 (sequence is synthesized)
aaattaatcttgatacatgagctctttctgtttattttgggagttgaaaataggcaccatcaacatttagattacagcctaattaatacctagataagacttcatttgaaataagaaata

SEQ ID NO: 223828 - DNA, 120 bp, Artificial Sequence
  ENSG00000117697_8 (sequence is synthesized)
actcttttactagtgattcatttatacagatatagtatctctgtgcggggatatgatataatattgtatttccttactgttttatctattgtaaataaaaagcattttaaaaagtattga

SEQ ID NO: 223829 - DNA, 120 bp, Artificial Sequence
  ENSG00000117697_9 (sequence is synthesized)
cacaaagcccatcagtgggcattaaaaatattaaaagtgcagacttttactgtccttaagtgccatcaactctcagctcccttgtagcttttgtgggatttaacaagtaacaaattctgt

SEQ ID NO: 223830 - DNA, 120 bp, Artificial Sequence
  ENSG00000117697_10 (sequence is synthesized)
tgtgtttccctggtatacatctttctaggaaaaaaaaaaaaaagagagagagctgtataatgatttttcgtttacatgctgaaaagtaattatcagttctgcacagcagcagatgcaggg

SEQ ID NO: 223831 - DNA, 120 bp, Artificial Sequence
  ENSG00000117697_11 (sequence is synthesized)
tttttttttaaagatgtagtttgatttatcaaattaatgtgctgatgataatactggctttgactttgttactccatgttcagctaatttaggtttgtgagattaactttaggatttttt

SEQ ID NO: 223832 - DNA, 120 bp, Artificial Sequence
  ENSG00000117697_12 (sequence is synthesized)
gttgtgtaagacaatgataactattatttgtgcaacattactctttgaaataaaaattggcatgtagccaatgtttcctgcccacactcacttttttctatagaccattaacataatttg

SEQ ID NO: 223833 - DNA, 120 bp, Artificial Sequence
  ENSG00000117697_13 (sequence is synthesized)
acttggaactaatggtttctttttagggtttcttatttatttctttacaaatcattccagttcaaaatatatatcagattaatacactggcaaagtgtcattgtgttattgaactatttc

SEQ ID NO: 223834 - DNA, 120 bp, Artificial Sequence
  ENSG00000117697_14 (sequence is synthesized)
acatttgaagatgtttatatatcaggtatataatcactgggagaagtctgagaaaacgatattggctttacttctaacatttaactatagtttcttatagctcttattgtgtgtcttaca

SEQ ID NO: 223835 - DNA, 120 bp, Artificial Sequence
  ENSG00000117697_15 (sequence is synthesized)
ttatacagtgtaggcagggccatcaaacttaccaactgtttccccttttgatgactctgataccttcattcatttttcaaaggaatttactgatcatgaggttggaaaatctgtatttct

SEQ ID NO: 223836 - DNA, 120 bp, Artificial Sequence
  ENSG00000117697_16 (sequence is synthesized)
cttgcttattatgtattaataatcataaatgtctagattcaccagaagtcaccagaaggtctgtctcagtgaagaaaacttataaagccactttgttgcattttgtgtttcagtgttaca

SEQ ID NO: 223837 - DNA, 120 bp, Artificial Sequence
  ENSG00000117697_17 (sequence is synthesized)
gtttgagatctgtatatttgtacacagctatgtgtttttcattgaaataatgtacaaagactgatcttgatgctgtgtatttttatgagttgtcttaggcattcctgagctcagcttcag

SEQ ID NO: 223838 - DNA, 120 bp, Artificial Sequence
  ENSG00000117697_18 (sequence is synthesized)
ttggatggtgggtcagcaccctgcgtttctgaacatactagacttcagtttaaaactgttttgaggctgtataatatgttgctgtttttacagtgctaatgtttttatagtattaaaatt

SEQ ID NO: 223839 - DNA, 120 bp, Artificial Sequence
  ENSG00000117697_19 (sequence is synthesized)
ctgtatgatttgtttcacttcagaggtccccaaacaaaagagttattgttaattctattagattatataagctacttgcattttgattatataagaacatggtccctcccttttaagaga

SEQ ID NO: 223840 - DNA, 120 bp, Artificial Sequence
  ENSG00000117697_20 (sequence is synthesized)
ggtatattgtgctacatagagtttttaaatgacatgatagatttgctctgaagtattcagcagagaaacaaggaatcgattaaggaaatgtgacaaaaatcctgttaatgttgaatctgt

SEQ ID NO: 223841 - DNA, 120 bp, Artificial Sequence
  ENSG00000117697_21 (sequence is synthesized)
gtaatgactatattctactttgtgttggaaatttttataagtttttaaaaaatggttatattttaaagtccccaggcagacagctgagatttgaaatcctcttgagagcccaaagtttta

SEQ ID NO: 223842 - DNA, 120 bp, Artificial Sequence
  ENSG00000117697_22 (sequence is synthesized)
ctccatagttatagcagagtttaaaatagaaataccactgggaaagacagtacgtattagcattattaactaagaaaagcatgaccaatagcagtaataatattgaataagtatactgtg

SEQ ID NO: 223843 - DNA, 120 bp, Artificial Sequence
  ENSG00000117697_23 (sequence is synthesized)
taagaggagaagttgcatttctgcataggccaagaactagtaagctaaggattaaaagcaagaaagtctgtagttttaaggaattggaaaggttgaaggaaaaaattgaaaatcaaatct

SEQ ID NO: 223844 - DNA, 120 bp, Artificial Sequence
  ENSG00000117697_24 (sequence is synthesized)
aaaaattgaaaatcaaatcttgctctatgataaaaagagtctggattgaatagggtcttaaaattatctttcagaaaagaaatagccaggcgcggtgggctcatgcctgtaatcccagca

SEQ ID NO: 223845 - DNA, 120 bp, Artificial Sequence
  ENSG00000117697_25 (sequence is synthesized)
cagattacttgagcccagcctgggcaacatagtgaaactccatttctacaaaaaatacaaaaattagcagggtgtgatggcacacacctgtagtcccagccacccaggaggctgaaatga

SEQ ID NO: 223846 - DNA, 82 bp, Artificial Sequence
  ENSG00000117697_26 (sequence is synthesized)
cacacacctgtagtcccagccacccaggaggctgaaatgagaggatcacttgagccctggaggcagaagttgcagtgagcca

SEQ ID NO: 223847 - DNA, 120 bp, Artificial Sequence
  ENSG00000117697_27 (sequence is synthesized)
gttaagtctagtcccaaagaagagagaacactgtcaaagctggtttctgaaaactggtaccaaaatctacatttgtttatttaggctactataacagaataccacaggctgggtggctta

SEQ ID NO: 223848 - DNA, 120 bp, Artificial Sequence
  ENSG00000117697_28 (sequence is synthesized)
aacaacagatacttacttctcacagttctggaggctagaagtccatgagaaggtgctggcaaatgcagtttctggtgagggctgtcttcccgacttgtagatgaccacctccttactatg

SEQ ID NO: 223849 - DNA, 120 bp, Artificial Sequence
  ENSG00000117697_29 (sequence is synthesized)
tcctcacatggcctttcctcagtgcatgcatgtggagagagggacagagtgcaagctctctggtgtctcttcttataaggacaccaattgtatcagatcagagccccacccttatggcct

SEQ ID NO: 223850 - DNA, 120 bp, Artificial Sequence
  ENSG00000117697_30 (sequence is synthesized)
catttaaccttaattatttccttagaggccccatctccaaatacagctataggcacatgggagttaaggcttcatcatacagattttagggggacacaaacattgagtccataacacaag

SEQ ID NO: 223851 - DNA, 120 bp, Artificial Sequence
  ENSG00000117697_31 (sequence is synthesized)
cccacagaaaatcttatcctagacctctttccctggccctttatggcttgggctccgtagaggacaaagtgaataaaaccaaattttttattgcttcaaacagtatgatttcatcttgta

SEQ ID NO: 223852 - DNA, 120 bp, Artificial Sequence
  ENSG00000117697_32 (sequence is synthesized)
agatgtactttttcttttctaaggctgaatttgtttgatttctggtgaacacctatcttctctatccaccttcattcatttattcatctgttcaacacatacagttggacacctactcgg

SEQ ID NO: 223853 - DNA, 120 bp, Artificial Sequence
  ENSG00000117697_33 (sequence is synthesized)
atcaaaagtcagagatcttaagagcacagcctctaagccagatcatctgagttcagatttcagttctaccattattagttcaatgatattggacaagttacttaacctgtctatgatcaa

SEQ ID NO: 223854 - DNA, 120 bp, Artificial Sequence
  ENSG00000117697_34 (sequence is synthesized)
aagtcagagatcttaaagagcatagtctctgagccagatcatctgggttcagattgcagttctaccattattagttcagtgacattgggcaagttacataacctgtctatgctgcagttt

SEQ ID NO: 223855 - DNA, 120 bp, Artificial Sequence
  ENSG00000117697_35 (sequence is synthesized)
tctcatgtgcaaaatggggataataattatgcctacctcatagcgttattctgagaagtaaatgagttcataatgtgaaggccttagactaataactggtgcatatgagtactctatgat

SEQ ID NO: 223856 - DNA, 120 bp, Artificial Sequence
  ENSG00000117697_36 (sequence is synthesized)
cactgttattacttcttttgataaaggaaatgaaaacactcaggacaagtgttgccttcaggaaggtcatattccagtgaagaggatgagtgtgcaaacaatgataatgccatgcagcaa

SEQ ID NO: 223857 - DNA, 120 bp, Artificial Sequence
  ENSG00000117697_37 (sequence is synthesized)
atggtatgatagatgtatgtgtggaacttaggggagtagtcatggaagtctttgtagaagaggtggcatttgagcagtcttgaatgttttaggcaaataatcagggaaggaatacaggaa

SEQ ID NO: 223858 - DNA, 120 bp, Artificial Sequence
  ENSG00000117697_38 (sequence is synthesized)
taaagaacaaattactgttataacaatgtggatcaatatcaaagatactatattgaataaaagaagcaaagccaggcacaagagaatacatcctgtgtatggaatcacagaatgggcaaa

SEQ ID NO: 223859 - DNA, 120 bp, Artificial Sequence
  ENSG00000117697_39 (sequence is synthesized)
actaagccatggtggttccctctggggagaggggagatattaactgggaatggcacgggaaacatttttgggtgagcaaaatgttctgtatcttgatctgagtggtgctcacatggctgt

SEQ ID NO: 223860 - DNA, 120 bp, Artificial Sequence
  ENSG00000117697_40 (sequence is synthesized)
atatgtatgtaaaattttgttgaactatacacttaaaatttctgcactttatttaagttttatattttaaaaatgcacaaaactgattcaccaaatatttgaggagcgtctccagcatca

SEQ ID NO: 223861 - DNA, 120 bp, Artificial Sequence
  ENSG00000117697_41 (sequence is synthesized)
aagacagacccaaaaactgtaagtcccttaatggcaggaatctttgttccatccacctggaataattgctggcacatgatgggccctcgatgcatagtggttaactgagtgaattaaaac

SEQ ID NO: 223862 - DNA, 120 bp, Artificial Sequence
  ENSG00000117697_42 (sequence is synthesized)
aaaaaccaaagagaataaaggacctcaaagaaaacagatacatacaaagcaaaatcccagaatgatgactgtactcccagaaagaagagaaaatcatacattttttggaaaatcggaatg

SEQ ID NO: 223863 - DNA, 120 bp, Artificial Sequence
  ENSG00000117697_43 (sequence is synthesized)
ctattaaataatgttcagtaaataagaaaaagtttttgaaaattaaaaatatgaaagttgaaataaaaattcagtgggagggctgggagataaaatgaaattttcccaaaaataaaacag

SEQ ID NO: 223864 - DNA, 120 bp, Artificial Sequence
  ENSG00000117697_44 (sequence is synthesized)
aaagattaagaaatggcaaattagaaaagtaagaataaagagaataagttcataaagttcaaagtctaatcgatacccattccagagatagcatgcagaaaaagcagcagagtcaaaatt

SEQ ID NO: 223865 - DNA, 120 bp, Artificial Sequence
  ENSG00000117697_45 (sequence is synthesized)
atcaaagagataatgcagttaccatatggcccagcaattttactccacgttctaaacctaagagaattgaaaacatgctcacacaataacttacacacaaatgtttgtagcagcaggttg

SEQ ID NO: 223866 - DNA, 120 bp, Artificial Sequence
  ENSG00000117697_46 (sequence is synthesized)
aactttcatgaactgatgaatggataaataaaatgtggactatccactcaatagaatattatttggcaataagaagaaatgaggtactggtaaatgccacagtgtagatgaaccttaaaa

SEQ ID NO: 223867 - DNA, 120 bp, Artificial Sequence
  ENSG00000117697_47 (sequence is synthesized)
catgccaagtgaaagaagcctctcacaaaagactgctgaattttgtagactccatgtaaatgaactgtccagaacaggcaaatctacagaaacaaaaaatagatctgtcactgcctaagg

SEQ ID NO: 223868 - DNA, 120 bp, Artificial Sequence
  ENSG00000117697_48 (sequence is synthesized)
ctggaaagatggagagggtggaaggaataggaagtgactgctaatgggtatgggatttttttttttttttttttgtgaaacaaggtcttgctgtgttgcccaagctggagtacagtggtg

SEQ ID NO: 223869 - DNA, 85 bp, Artificial Sequence
  ENSG00000117697_49 (sequence is synthesized)
caaggtcttgctgtgttgcccaagctggagtacagtggtgctatcttggcttactgcaacctctgcccccgcaagtgggactata

SEQ ID NO: 223870 - DNA, 64 bp, Artificial Sequence
  ENSG00000117697_50 (sequence is synthesized)
ttgtattttttgtagagacggagtttcgctatgtggctggtctcaaactcgtgagctcaagctg

SEQ ID NO: 223871 - DNA, 120 bp, Artificial Sequence
  ENSG00000117697_51 (sequence is synthesized)
ttttgagggtgatgaaaaccctctaaatttgattatggtgattcacgactgcttgttgaatatactgaaaaccattgaacaatacagtttaaaagggtgagtgagatggtaaagtatatc

SEQ ID NO: 223872 - DNA, 120 bp, Artificial Sequence
  ENSG00000117697_52 (sequence is synthesized)
tcaatttaaaaagagaataaagaaatagaaataacacaagaaacattcccagacctgaggaataccaagaggaattggaatggcatcagattactaaacaacaatcctaaaatctagaag

SEQ ID NO: 223873 - DNA, 120 bp, Artificial Sequence
  ENSG00000117697_53 (sequence is synthesized)
catctggagaaatattctcagcataaatgatatacaacctaggcttttatacacagtcaaactaataatcaagtgcatgattagctaaaagatatctcagatatgcaaagcgtcaaaaaa

SEQ ID NO: 223874 - DNA, 120 bp, Artificial Sequence
  ENSG00000117697_54 (sequence is synthesized)
caggggctgtgctctattccaaagggtaaaccaaaaaagcagcagccatgggatctgggaaactaaggctcccaaaacacagcacactcgagtctacaggctactaactaatcagcagat

SEQ ID NO: 223875 - DNA, 75 bp, Artificial Sequence
  ENSG00000117697_55 (sequence is synthesized)
agcacactcgagtctacaggctactaactaatcagcagatttggagactaggcagaccaggttggaataagacta

SEQ ID NO: 223876 - DNA, 120 bp, Artificial Sequence
  ENSG00000117697_56 (sequence is synthesized)
ctccagcctgggcaacaagaacgaaacttcatctcaaaaaaaaaaaaaggactatgtaggactccaaaagagatattttcagaaaaaaataaaagtgacaacacgagtgataatgttaac

SEQ ID NO: 223877 - DNA, 120 bp, Artificial Sequence
  ENSG00000117697_57 (sequence is synthesized)
aagtgacaacacgagtgataatgttaactatgcagaaaattgtataaaggagatgttttgtaatatgattaagatgttcaaagaaacaaaaaataaggcagttattcactacagtagagg

SEQ ID NO: 223878 - DNA, 120 bp, Artificial Sequence
  ENSG00000117697_58 (sequence is synthesized)
cagaaagctgtacaaaaaaagaaatgtaatcatggttacaaattagttctccagtgaacaatatttatatagccataataataaaaaccctgaatctgaattcagtaaaaaaaaaaaaaa

SEQ ID NO: 223879 - DNA, 120 bp, Artificial Sequence
  ENSG00000117697_59 (sequence is synthesized)
aaaattgggacagttacactgggaggctaaaggatgggaattagcaattagtacagcacaggcactgaacagttagatggacattggttaaagcagtaaggtggggtgtggaggccctta

SEQ ID NO: 223880 - DNA, 120 bp, Artificial Sequence
  ENSG00000117697_60 (sequence is synthesized)
tagctgctgggtcctggggcagggtagggtgtcccaggacatggagctggagcagccagagtggcagggatagtgaggaggcttctgtgccaaccagtacaatccatatgtttgtaacag

SEQ ID NO: 223881 - DNA, 120 bp, Artificial Sequence
  ENSG00000117697_61 (sequence is synthesized)
tgtgactgtctgaacaccagctttgacatggcagtggggagtgaaatcttcacccaccacaactggaagtcagtggatgtctaaaaagctgattcaagatcatacaatatggatataatt

SEQ ID NO: 223882 - DNA, 120 bp, Artificial Sequence
  ENSG00000117697_62 (sequence is synthesized)
tagtgcagcagaataaagagctgacgaagtgggaagtattaactctgtggatgaacttaggtgggggaactgggccagggactgataatttttgatagaagcctcatagatttgattttt

SEQ ID NO: 223883 - DNA, 120 bp, Artificial Sequence
  ENSG00000117697_63 (sequence is synthesized)
aaaattaaatgcatatagtaattaagggaaaataaatttggtttaagagacaaatcatcccctagaacctttctcggggtttcagtttttcagggtttcagaagctttctcagggtttca

SEQ ID NO: 223884 - DNA, 120 bp, Artificial Sequence
  ENSG00000117697_64 (sequence is synthesized)
gggtttcaaaacaggcgtgtgccaccatgcccggctagtttatttgttttagagatggggtctcgccatattgccccggctggtcttgaattcctgggctcaagccatcctcctgcctca

SEQ ID NO: 223885 - DNA, 120 bp, Artificial Sequence
  ENSG00000117697_65 (sequence is synthesized)
tacaggaatgagccactgcacctggcctatcacagtatatttcagataagacttactattctctgtttttggctgataattctagttttggtttcttcaggtttttttttttttctcccc

SEQ ID NO: 223886 - DNA, 120 bp, Artificial Sequence
  ENSG00000117697_66 (sequence is synthesized)
ttttttctcccctctgaccatttgttttgcaaatagattatattatgaaagtctctgaagaaaaaaatatctctctagagaaccactgaagggggttcttggggattttatatgaaagga

SEQ ID NO: 223887 - DNA, 120 bp, Artificial Sequence
  ENSG00000117697_67 (sequence is synthesized)
tttgagaaaattaatgttatattcatttgaagcttcaggggtaaagaatcccttgtaattcgttgctgtgtctctacattgctcatactttgcccatgggctgtaaactaatattcgttg

SEQ ID NO: 223888 - DNA, 120 bp, Artificial Sequence
  ENSG00000117697_68 (sequence is synthesized)
aatgaatgagttcatattgcaaatttctaacttgtcggtttccctggatcacaatctcacacattaatggcttgtggcatttatattcattattaattgaacttagaaggtgagtgtggg

SEQ ID NO: 223889 - DNA, 120 bp, Artificial Sequence
  ENSG00000117697_69 (sequence is synthesized)
gaggggagaggtaaaaaactgaggacagatcactgggaaactgacctgaattaggactccagagtctcctgtctactagaactacgtctactagaactaagtctaattcccatatccctg

SEQ ID NO: 223890 - DNA, 120 bp, Artificial Sequence
  ENSG00000117697_70 (sequence is synthesized)
caggacataagagcagaggatggcattgacatccctcagtgacatcactgtgctagcaggtatagttgccttctgatcaccttttcctttggtcacatcccctgacttctgggtggcctg

SEQ ID NO: 223891 - DNA, 120 bp, Artificial Sequence
  ENSG00000117697_71 (sequence is synthesized)
ggatagctagagaagaaaattcaacttctccctgcaggtcttctgctccagctgactcctgtgcctgtgtaaaagattgggcatttctatcatcaccttgactagccttactcagagaat

SEQ ID NO: 223892 - DNA, 120 bp, Artificial Sequence
  ENSG00000117697_72 (sequence is synthesized)
ggctccagtgcctttgggctcatacctagttgcagattttaagacctcccttggtgcccattcatgtagctctgtggcccacatcttctacaatgatgtcattggagttcttttgtccat

SEQ ID NO: 223893 - DNA, 120 bp, Artificial Sequence
  ENSG00000117697_73 (sequence is synthesized)
tcttttgtccatttctgcccctgatgccaccttgatgggaatgccaccctccacacaactcttcaccagtccataaatacctgagacttggcgcatttcttttttttttttttttttttt

SEQ ID NO: 223894 - DNA, 77 bp, Artificial Sequence
  ENSG00000117697_74 (sequence is synthesized)
tttttttttttttttttttgagactgtcacccaggctggagtgtagtggagttctcatgccttagcctcccgagtag

SEQ ID NO: 223895 - DNA, 65 bp, Artificial Sequence
  ENSG00000117697_75 (sequence is synthesized)
ccgagtagctgggattacaggcgcgtgctaccatgctgggctaatatttgcatttttatagagat

SEQ ID NO: 223896 - DNA, 120 bp, Artificial Sequence
  ENSG00000117697_76 (sequence is synthesized)
aggagtgagccgccacgcccggcccatttcattcttaaaaaaaaaaatccttccggaggtttagttcctccacaaggcagcttctggttacctgccccctcagggtccttgctgcctggg

SEQ ID NO: 223897 - DNA, 120 bp, Artificial Sequence
  ENSG00000117697_77 (sequence is synthesized)
tcaccccagcaaccccttcgtccacacatcactgccctttgcagcaccagctgattacattgctttttccatgttctagctgttcttttgagccgttttatagccgagcatctccaccag

SEQ ID NO: 223898 - DNA, 120 bp, Artificial Sequence
  ENSG00000117697_78 (sequence is synthesized)
aagagcggataggaaaaaggaaaagagaggaggatttgaccttggtatcttgcttcatttccttctctgacaaaaatttggtgaaaaggttaaaataagtgttcgaattctctctgactt

SEQ ID NO: 223899 - DNA, 120 bp, Artificial Sequence
  ENSG00000117697_79 (sequence is synthesized)
gtcatattctgtctatgccctgtgtgcctgcctctgatcctgaggaagtgtagaaatgaggggatgacactggcagaataataaaaatgggcaaagttgtagggcacccctgctccaggt

SEQ ID NO: 223900 - DNA, 120 bp, Artificial Sequence
  ENSG00000117697_80 (sequence is synthesized)
cccatacaccccagctccagagcctcaggatctttcccagccatgtgccagacaatattgtaaaatgatttttcgtagccacaccttttattacacacatactcgatgaatctaaatact

SEQ ID NO: 223901 - DNA, 120 bp, Artificial Sequence
  ENSG00000117697_81 (sequence is synthesized)
gtgctaagagctgtgtggatgtacacctgtaaaccaaggcacagaccctgcccacaagcaatttgccgtcagttaggggagccatcagtagcatctagggatccattagagggaaaagag

SEQ ID NO: 223902 - DNA, 120 bp, Artificial Sequence
  ENSG00000117697_82 (sequence is synthesized)
ggagctgagggagaggctaggagcccaagcaaacctgcacttctgctcctagagggaacctgagagtgaaactcatgggtttggaaacttctgtggaattacctgcttgcaagaaatgat

SEQ ID NO: 223903 - DNA, 120 bp, Artificial Sequence
  ENSG00000117697_83 (sequence is synthesized)
tttgtctggttttagaaactacgatggaacactaatatattcctgtaattgactggcaagttttaacacttactgcaatttatttttcttgtaagcccaacccaagtattcttcctttaa

SEQ ID NO: 223904 - DNA, 120 bp, Artificial Sequence
  ENSG00000117697_84 (sequence is synthesized)
aaaaaatttcagattgacaaatgactgcttctttagaaatcctccttactaaaattactcctcatttctttttctttcatattcaaagggaacaaacgttcaaacacacaaataaacact

SEQ ID NO: 223905 - DNA, 120 bp, Artificial Sequence
  ENSG00000117697_85 (sequence is synthesized)
gctctttgccagagtggtggactctggcctccccacccccagcactcccagtcttgccctcctgcaaacactagacttaattttctctgcgctgagggccctcctcgagtcagagtgaga

SEQ ID NO: 223906 - DNA, 120 bp, Artificial Sequence
  ENSG00000117697_86 (sequence is synthesized)
ggaaaaacagaagggagaagctgcgagatgtggcaacaaaggggacggtgatcaggtttatccctgatgttgtctgtgaaggtgttccattctccagagatctcaccaaatggtataagt

SEQ ID NO: 223907 - DNA, 120 bp, Artificial Sequence
  ENSG00000117697_87 (sequence is synthesized)
gatgtgcagataagcctgtggttcccttcactcatcagatcagagcctcagaattctcagaaaccatttttttcctaacataaaactccttttctcatttctatccctctgtaaatctga

SEQ ID NO: 223908 - DNA, 120 bp, Artificial Sequence
  ENSG00000117697_88 (sequence is synthesized)
tttgaaaaaattgtttgaacaaaccaacaatgtcagatttgttccagctatatgagctcacaattcatctactcttggtagttcaagataaaagattacccaaagaaaaggaagagattg

SEQ ID NO: 223909 - DNA, 120 bp, Artificial Sequence
  ENSG00000117697_89 (sequence is synthesized)
agtaaagccacaactgtaatagtgtcccagattgggtaaaaggccattaataaatagcgtgaattgtagaactgtttaaagcagcatatttttaaaacaggcatataaagaatccacttt

SEQ ID NO: 223910 - DNA, 120 bp, Artificial Sequence
  ENSG00000117697_90 (sequence is synthesized)
atgcctggaattgtacaaaaatactttaaataaatgtttacatatataatgttatcaacttatttgctgaaggtaatatcaatataatgctagtagttaccatgtattgagtgcttacta

SEQ ID NO: 223911 - DNA, 120 bp, Artificial Sequence
  ENSG00000117697_91 (sequence is synthesized)
catgccatgatcatgctaaaagcttcacatgcaccatctcttttaatcctcaagacaatccatgaattaagggctattaccacgcccatttcatgagaaagaggtggagatgagaaggga

SEQ ID NO: 223912 - DNA, 120 bp, Artificial Sequence
  ENSG00000117697_92 (sequence is synthesized)
agtgcctggccaccttcccagcggtctatagaccatgtagagcagagcgaggccttctgaccacaaactctgcttccaccttctccccgtggttcacagcaaaggccttgtccagagtct

SEQ ID NO: 223913 - DNA, 120 bp, Artificial Sequence
  ENSG00000117697_93 (sequence is synthesized)
cagacgctctcaccgctacaccacagcgacctcgttggttcttctcattttttttcaatgacacatagcaacagagagtatcaacaaacatttttaaatttcccagcagttaacgaatag

SEQ ID NO: 223914 - DNA, 120 bp, Artificial Sequence
  ENSG00000117697_94 (sequence is synthesized)
tgaatattactatgtaatactagtgtctaagaaagtgctcaaagttgtttaaagcaatttattatcttaatgaggttaaatatgaacttttgctgttaatttcttgggaaatataaatca

SEQ ID NO: 223915 - DNA, 120 bp, Artificial Sequence
  ENSG00000117697_95 (sequence is synthesized)
tcatagctagtcattctttcatcgtgggaagctaacagtcctgattgttcaggattataattatagtaaattctgaatttgtgacgtgtgaattttagaaggttacaaaacaacttccag

SEQ ID NO: 223916 - DNA, 120 bp, Artificial Sequence
  ENSG00000117697_96 (sequence is synthesized)
acaactgagtcataaagtttttgagagaagtatgtggcacacgtctaattcattgtcctttctctccagtggtatagttatgatattaacctaaattgcaaaaggaatcgttttagttga

SEQ ID NO: 223917 - DNA, 120 bp, Artificial Sequence
  ENSG00000117697_97 (sequence is synthesized)
ctgctgcttgaaattgtgtcacttttccaaatttaggtaatgtctgttacaaggagtatattttggaaacattaacttgactgatacttatttccctggttaagtgaccttcctgccatg

SEQ ID NO: 223918 - DNA, 120 bp, Artificial Sequence
  ENSG00000117697_98 (sequence is synthesized)
tgctgagtgccaggacttactgcccctcagtaatttggaaggggatcctgggccctgcctggaacaaagggttgtgaaacagctctgagtctcaaggcaagtcttgaaagccatatatag

SEQ ID NO: 223919 - DNA, 120 bp, Artificial Sequence
  ENSG00000117697_99 (sequence is synthesized)
ttttcagaaaaagagatcttctaaattccattcacccccatttaacacattaggagccaagcctggtggactagctctaggggcagtttaggagagaaggggatcggggaaccttcatcc

SEQ ID NO: 223920 - DNA, 120 bp, Artificial Sequence
  ENSG00000117697_100 (sequence is synthesized)
cttctgcctctggtgaactggcaagatgaagaggatgaagctgggtgacccagagcccgccctccctctctcggcagtcatctccaaggccggagtagactggactggagggcctctgag

SEQ ID NO: 223921 - DNA, 120 bp, Artificial Sequence
  ENSG00000117697_101 (sequence is synthesized)
aggacacagccaggaagcacactctccctgtgctcttcacccaccatgaagagacaggacgggaaagtccgtgctgtgctggtgtccatcagagggagggacaccatccagcccctggga

SEQ ID NO: 223922 - DNA, 120 bp, Artificial Sequence
  ENSG00000117697_102 (sequence is synthesized)
ccgggctcggctctgttgttgcacagaagtcatttggagatccccacgtgccacatggaggattgtgggaggaccccaccgaggtggctggcagcctctcatggacaccatggagagtga

SEQ ID NO: 223923 - DNA, 120 bp, Artificial Sequence
  ENSG00000117697_103 (sequence is synthesized)
cccaatcactctgcatttgaggactgcagagtggctcagcggtctggacattgaagaggagccaacctcaggggtaacacagtgccgctgggagctgagatgagccaggtggtcggtggg

SEQ ID NO: 223924 - DNA, 120 bp, Artificial Sequence
  ENSG00000117697_104 (sequence is synthesized)
ggacacaagcctagaacaaattcaataaaccagccacagacgttatcatcagatgtgcccagagacaaggtggacaggggcatttgctgtggagaccagagggccagagagagtacaggg

SEQ ID NO: 223925 - DNA, 120 bp, Artificial Sequence
  ENSG00000117697_105 (sequence is synthesized)
acctggatagatggctccagcacctcttcttctccctacacccatatgccatcttgataaacagcagggaaatctgaaaaataccaagtcttcccatagggacagtgttacctcccaaaa

SEQ ID NO: 223926 - DNA, 120 bp, Artificial Sequence
  ENSG00000117697_106 (sequence is synthesized)
actgtttgaataattggcttgaactggattttctgaactgaactaatgctattgttttgtgggtttttttcttcctactgagtagagtagttgtttatgggggacatctgatcctttcat

SEQ ID NO: 223927 - DNA, 120 bp, Artificial Sequence
  ENSG00000117697_107 (sequence is synthesized)
tttcttccagagagctaaccacctgttctgacaccatttattgaatagtacctcttttcccccactgatgtgagaggctgcatttttcatctaataaaatcgaatatatatttagatcta

SEQ ID NO: 223928 - DNA, 120 bp, Artificial Sequence
  ENSG00000117697_108 (sequence is synthesized)
cagcatcaaggatattctccctttgatgctttaacttcctaccagtcattcatgtttagcatttcatctagaattaagaggactagctttacacccattgactcagaattccaggggtgt

SEQ ID NO: 223929 - DNA, 120 bp, Artificial Sequence
  ENSG00000117697_109 (sequence is synthesized)
taccccggaatctgagcttttataaagttcttgcctgacccagactattataacacatacccatctctaacttctaataccctcctatctctgtcattgtactatctattctttgcatta

SEQ ID NO: 223930 - DNA, 120 bp, Artificial Sequence
  ENSG00000117697_110 (sequence is synthesized)
cagccaaagctatactattaaagcattctctcatagtgtcacacctggtgcagtaaccatcattggtttctcattatttctaaaatcaaataaaaatatattgaatttaagaagaaataa

SEQ ID NO: 223931 - DNA, 120 bp, Artificial Sequence
  ENSG00000117697_111 (sequence is synthesized)
gcaaaacaagaaattctggtaagatgatttgcctttaaaatgttatagtatattttaccacaataaaaacattaaaatataaggctctacgtggagataagtgacattttgttgtctttt

SEQ ID NO: 223932 - DNA, 120 bp, Artificial Sequence
  ENSG00000117697_112 (sequence is synthesized)
tctttcctgcctcaattagtattgtttgtctcttgtaagactttactcttctaagttgtactatgacatagtatagtcatactatactgtgttttgaacacactggttcaaaaatgaaaa

SEQ ID NO: 223933 - DNA, 120 bp, Artificial Sequence
  ENSG00000117707_0 (sequence is synthesized)
cccctcgtgagtccctccccttttccagaatcacttgcactgtcttgttcttgaatgagaaaggaagaaaagagcctcccattactcagacccgtgtaaacattattccccccaggagaa

SEQ ID NO: 223934 - DNA, 120 bp, Artificial Sequence
  ENSG00000117707_1 (sequence is synthesized)
aatggtgttattcaaatgaatcataataaaatagcctctaaacagtttctaagcgggagcctccgtggaactcagcgctccgctcctcccagttcctaagaggtcccgggattcttgagc

SEQ ID NO: 223935 - DNA, 120 bp, Artificial Sequence
  ENSG00000117707_2 (sequence is synthesized)
tgtgcccagctgacgagcttttgaagatggcacaataaccgtccagtgatgcctgaccatgacagcacagccctcttaagccggcaaaccaagaggagaagagttgacattggagtgaaa

SEQ ID NO: 223936 - DNA, 120 bp, Artificial Sequence
  ENSG00000117707_3 (sequence is synthesized)
aggacggtagggacagcatctgcattttttgctaaggcaagagcaacgttttttagtgccatgaatccccaaggttctgagcaggatgttgagtattcagtggtgcagcatgcagatggg

SEQ ID NO: 223937 - DNA, 120 bp, Artificial Sequence
  ENSG00000117707_4 (sequence is synthesized)
gaaaagtcaaatgtactccgcaagctgctgaagagggcgaactcgtatgaagatgccatgatgccttttccaggagcaaccataatttcccagctgttgaaaaataacatgaacaaaaat

SEQ ID NO: 223938 - DNA, 120 bp, Artificial Sequence
  ENSG00000117707_5 (sequence is synthesized)
ggtggcacggagcccagtttccaagccagcggtctctctagtacaggctccgaagtacatcaggaggatatatgcagcaactcttcaagagacagccccccagagtgtctttcccctttt

SEQ ID NO: 223939 - DNA, 120 bp, Artificial Sequence
  ENSG00000117707_6 (sequence is synthesized)
ggcaggcctactatgagccagtttgatatggatcgcttatgtgatgagcacctgagagcaaagcgcgcccgggttgagaatataattcggggtatgagccattcccccagtgtggcatta

SEQ ID NO: 223940 - DNA, 120 bp, Artificial Sequence
  ENSG00000117707_7 (sequence is synthesized)
aggggcaatgaaaatgaaagagagatggccccgcagtctgtgagtccccgagaaagttacagagaaaacaaacgcaagcaaaagcttccccagcagcagcaacagagtttccagcagctg

SEQ ID NO: 223941 - DNA, 120 bp, Artificial Sequence
  ENSG00000117707_8 (sequence is synthesized)
gtttcagcccgaaaagaacagaagcgagaggagcgccgacagctgaaacagcagctggaggacatgcagaaacagctgcgccagctgcaggaaaagttctaccaaatctatgacagcact

SEQ ID NO: 223942 - DNA, 120 bp, Artificial Sequence
  ENSG00000117707_9 (sequence is synthesized)
gattcggaaaatgatgaagatggtaacctgtctgaagacagcatgcgctcggagatcctggatgccagggcccaggactctgtcggaaggtcagataatgagatgtgcgagctagaccca

SEQ ID NO: 223943 - DNA, 120 bp, Artificial Sequence
  ENSG00000117707_10 (sequence is synthesized)
ggacagtttattgaccgagctcgagccctgatcagagagcaggaaatggctgaaaacaagccgaagcgagaaggcaacaacaaagaaagagaccatgggccaaactccttacaaccggaa

SEQ ID NO: 223944 - DNA, 120 bp, Artificial Sequence
  ENSG00000117707_11 (sequence is synthesized)
ggcaaacatttggctgagaccttgaaacaggaactgaacactgccatgtcgcaagttgtggacactgtggtcaaagtcttttcggccaagccctcccgccaggttcctcaggtcttccca

SEQ ID NO: 223945 - DNA, 120 bp, Artificial Sequence
  ENSG00000117707_12 (sequence is synthesized)
cctctccagatcccccaggccagatttgcagtcaatggggaaaaccacaatttccacaccgccaaccagcgcctgcagtgctttggcgacgtcatcattccgaaccccctggacaccttt

SEQ ID NO: 223946 - DNA, 120 bp, Artificial Sequence
  ENSG00000117707_13 (sequence is synthesized)
ggcaatgtgcagatggccagttccactgaccagacagaagcactgcccctggttgtccgcaaaaactcctctgaccagtctgcctccggccctgccgctggcggccaccaccagcccctg

SEQ ID NO: 223947 - DNA, 120 bp, Artificial Sequence
  ENSG00000117707_14 (sequence is synthesized)
caccagtcgcctctctctgccaccacgggcttcaccacgtccaccttccgccaccccttcccccttcccttgatggcctatccatttcagagcccattaggtgctccctccggctccttc

SEQ ID NO: 223948 - DNA, 120 bp, Artificial Sequence
  ENSG00000117707_15 (sequence is synthesized)
tctggaaaagacagagcctctcctgaatccttagacttaactagggataccacgagtctgaggaccaagatgtcatctcaccacctgagccaccacccttgttcaccagcacacccgccc

SEQ ID NO: 223949 - DNA, 120 bp, Artificial Sequence
  ENSG00000117707_16 (sequence is synthesized)
agcaccgccgaagggctctccttgtcgctcataaagtccgagtgcggcgatcttcaagatatgtctgaaatatcaccttattcgggaagtgcaatgcaggaaggattgtcacccaatcac

SEQ ID NO: 223950 - DNA, 120 bp, Artificial Sequence
  ENSG00000117707_17 (sequence is synthesized)
ttgaaaaaagcaaagctcatgtttttttatacccgttatcccagctccaatatgctgaagacctacttctccgacgtaaagttcaacagatgcattacctctcagctcatcaagtggttt

SEQ ID NO: 223951 - DNA, 120 bp, Artificial Sequence
  ENSG00000117707_18 (sequence is synthesized)
agcaatttccgtgagttttactacattcagatggagaagtacgcacgtcaagccatcaacgatggggtcaccagtactgaagagctgtctataaccagagactgtgagctgtacagggct

SEQ ID NO: 223952 - DNA, 120 bp, Artificial Sequence
  ENSG00000117707_19 (sequence is synthesized)
ctgaacatgcactacaataaagcaaatgactttgaggttccagagagattcctggaagttgctcagatcacattacgggagtttttcaatgccattatcgcaggcaaagatgttgatcct

SEQ ID NO: 223953 - DNA, 120 bp, Artificial Sequence
  ENSG00000117707_20 (sequence is synthesized)
tcctggaagaaggccatatacaaggtcatctgcaagctggatagtgaagtccctgagattttcaaatccccgaactgcctacaagagctgcttcatgagtagaaatttcaacaactcttt

SEQ ID NO: 223954 - DNA, 120 bp, Artificial Sequence
  ENSG00000117707_21 (sequence is synthesized)
ttgaatgtatgaagagtagcagtcccctttggatgtccaagttatatgtgtctagattttgatttcatatatatgtgtatgggaggcatggatatgttatgaaatcagctggtaattcct

SEQ ID NO: 223955 - DNA, 120 bp, Artificial Sequence
  ENSG00000117707_22 (sequence is synthesized)
cctcatcacgtttctctcattttcttttgttttccattgcaaggggatggttgttttctttctgcctttagtttgcttttgcccaaggcccttaacatttggacacttaaaatagggtta

SEQ ID NO: 223956 - DNA, 120 bp, Artificial Sequence
  ENSG00000117707_23 (sequence is synthesized)
attttcagggaaaaagaatgttggcgtgtgtaaagtctctattagcaatgaagggaatttgttaacgatgcatccacttgattgatgacttattgcaaatggcggttggctgaggaaaac

SEQ ID NO: 223957 - DNA, 120 bp, Artificial Sequence
  ENSG00000117707_24 (sequence is synthesized)
ccatgacacagcacaactctacagacagtgatgtgtctcttgtttctactgctaagaaggtctgaaaatttaatgaaaccacttcatacatttaagtattttgtttggtttgaactcaat

SEQ ID NO: 223958 - DNA, 120 bp, Artificial Sequence
  ENSG00000117707_25 (sequence is synthesized)
cagtagcttttccttacatgtttaaaaataattccaatgacagatgagcagctcacttttccaaagtaccccaaaaggccaaattaaaaaagaaaaataatcactctcaagccttgtcta

SEQ ID NO: 223959 - DNA, 120 bp, Artificial Sequence
  ENSG00000117707_26 (sequence is synthesized)
agaaaagaggcaaactctgaaagtcgtaccagtttcttctggaggcaaagcaattttgcacaaaaccagctctctcaagatgagactagaaattcatacctggtcttgtagccacctctc

SEQ ID NO: 223960 - DNA, 120 bp, Artificial Sequence
  ENSG00000117707_27 (sequence is synthesized)
taaacttgaaaataggttcttcttcataagtgagcttacatcattcttcataaagaaaaatcctataacttgttatcatttttgcttcagatactaaaaggcactaagtttccaatttac

SEQ ID NO: 223961 - DNA, 120 bp, Artificial Sequence
  ENSG00000117707_28 (sequence is synthesized)
gctgctcaactttgtttatatgcttaaaaggattctgtttacttaacaattttttcccctaaaatactattttctgaatacttccttccagtaaggaataaaggaaagcccaacttggcc

SEQ ID NO: 223962 - DNA, 120 bp, Artificial Sequence
  ENSG00000117707_29 (sequence is synthesized)
ataaaattcttgcctacactagaagtttgttgacagccattagctgacttgatcgtcatctcctaagaggaacacatatattttcacaagcaattccacactatcctgatgggtatgcaa

SEQ ID NO: 223963 - DNA, 120 bp, Artificial Sequence
  ENSG00000117707_30 (sequence is synthesized)
agtggtgacagtctaactcagtgtttcttcattttaggtataacattttaaagcaattgataatgcctcttccaattcagaagctagtattgaccaaaatgtgagaagagtgtatagcat

SEQ ID NO: 223964 - DNA, 120 bp, Artificial Sequence
  ENSG00000117707_31 (sequence is synthesized)
aggaaaatttggggttaacccaaaagacacaattccagcacacataagaaagctagctgctattttatgctttcttccatggttctcctcttttttcccttttatttttccctgtttttc

SEQ ID NO: 223965 - DNA, 120 bp, Artificial Sequence
  ENSG00000117707_32 (sequence is synthesized)
aatgatgtacagtgttccctacttgcattgaaaaaactcgtatggcattcacactttttttcttaggtgggtttttgtgtccagatgcagtaagaattcattgttcatcctaaaactgtt

SEQ ID NO: 223966 - DNA, 120 bp, Artificial Sequence
  ENSG00000117707_33 (sequence is synthesized)
ttccagacccttccttccccttaggtaatttgatatacacctcctaaaatgacacagtaacaaatctggtatttagaacatatagaacataaatgccattttttaattcaactttaataa

SEQ ID NO: 223967 - DNA, 120 bp, Artificial Sequence
  ENSG00000117707_34 (sequence is synthesized)
tgactttggagaatacaggtcttgacccatgtgactgactagctgacccgatcgctgtaatttaacgtcatttataaattctgctgatggacaggaatgtatgaactcaattattgtcag

SEQ ID NO: 223968 - DNA, 120 bp, Artificial Sequence
  ENSG00000117707_35 (sequence is synthesized)
cacaaagccttaaaacctgctgactttaaattaaatggtgcagtcctatgatgccctgcaccatccaggggactaacagggcctcgcagtgtagacagagggtgcagccacacgggcggg

SEQ ID NO: 223969 - DNA, 120 bp, Artificial Sequence
  ENSG00000117707_36 (sequence is synthesized)
ggcaccagccacctcactctgcacccgcggcctcacacatctcccagctcacactctactaatgcacagagtcattagatccaatttgttatttttctcacttgctttaaaaaaaagcag

SEQ ID NO: 223970 - DNA, 120 bp, Artificial Sequence
  ENSG00000117707_37 (sequence is synthesized)
tttggataatcatgacattggaataaagtgggaaggaaaaattccatcagcacaaaatagggaagtaatcccaacttgtagtcacagttttctgactggctttgttttaaaagaggatgg

SEQ ID NO: 223971 - DNA, 120 bp, Artificial Sequence
  ENSG00000117707_38 (sequence is synthesized)
cagtccttgttcgtgtcagtgtgccactgggtttttgctgttccgtgtaattcatatcaactttgtgttgccatttgcaaggtaaaaggcaaagctgtagtgtattcacctatgtagaca

SEQ ID NO: 223972 - DNA, 120 bp, Artificial Sequence
  ENSG00000117707_39 (sequence is synthesized)
gattgctagatatctttttgatctggggcgagttcaatattgattccagacttatttggatttttttagtattattttcccctccctttctaatttaaatagacaaattaagcaaaagtg

SEQ ID NO: 223973 - DNA, 120 bp, Artificial Sequence
  ENSG00000117707_40 (sequence is synthesized)
tgtgttcacaaccaaatgttgatgcccttatctactgataatatcctctcaatgttcactgaggcatagaaattatttcagagtagaaattgcagcatgaggataaactcacctctttgt

SEQ ID NO: 223974 - DNA, 120 bp, Artificial Sequence
  ENSG00000117707_41 (sequence is synthesized)
tctgaaaatagaactttatcactatgctttccggtggttttcccttttacaatcgaaatcttgtgcctcccaagtgcattggaaaatgacaaaagcctgtctctccaaattcctatttaa

SEQ ID NO: 223975 - DNA, 120 bp, Artificial Sequence
  ENSG00000117707_42 (sequence is synthesized)
cagtttgattttttttttttaatcaccatctttcaaatcttagctcaactctcaccaagtgaaaattggctacttgggagaaagttaactttctatggtgggatggtgaaggatgaggga

SEQ ID NO: 223976 - DNA, 120 bp, Artificial Sequence
  ENSG00000117707_43 (sequence is synthesized)
cagtttacataggaaaagaaaaaaaaaagtctaaagtccatgttgaaaaaccacactaccacttattttctgctaaccctaaattatttttgcgtatacgcttgaggttatagtctgtgc

SEQ ID NO: 223977 - DNA, 120 bp, Artificial Sequence
  ENSG00000117707_44 (sequence is synthesized)
ctagacctaaaatgcaccagcgggggggattttaaaaaatccttcaaaataccagttttttcccaacaagtacaattgttcttgtgccttctgtggctttcgatttcatctttttgactt

SEQ ID NO: 223978 - DNA, 120 bp, Artificial Sequence
  ENSG00000117707_45 (sequence is synthesized)
tatttccaattactacagctgcaataaacactagattttttttctggctgtttgacataacgttgatagctatgcatattttgtgtctttttaaaacaaagcgggagaatacgtttttga

SEQ ID NO: 223979 - DNA, 120 bp, Artificial Sequence
  ENSG00000117707_46 (sequence is synthesized)
agaagagaatttttagaacagtttgataccgcaaattattttttcctcaattgtttgagcagcattcgagttttgaaaattcttgtagaagccaattttttgtaactgtggtgcaaatct

SEQ ID NO: 223980 - DNA, 120 bp, Artificial Sequence
  ENSG00000117707_47 (sequence is synthesized)
tgtgttttcttagcctaatgaaaagtagtatagaagcaatatttcataccatgtgctatatatgtgtgcgcagatgtgtgaacataaaatcacatacacacatatacacacatgtaaaaa

SEQ ID NO: 223981 - DNA, 120 bp, Artificial Sequence
  ENSG00000117707_48 (sequence is synthesized)
tatacatatatatatatgcgtgtgaagtggaaagcttaccttttcctatctagatttaagaacctattttagacatttgttatgttttgtgaaaagaatgttctatttgcaacaaaacat

SEQ ID NO: 223982 - DNA, 120 bp, Artificial Sequence
  ENSG00000117707_49 (sequence is synthesized)
ttaattcttactgtatctctggctgtttaatgaggacgtttcacattaaatggtaaaacacatggaagatgttagaatgtagtaattatttaagtaaacgttcacccacatattcctgaa

SEQ ID NO: 223983 - DNA, 120 bp, Artificial Sequence
  ENSG00000117707_50 (sequence is synthesized)
gtttgctttgtgcctccgagtattatttaattaaagaagtgttttatgtttgcagaatctttgtcactgtactagggatgtgggtgaatatcatttaaaaaaatttaaaacaacaaaaaa

SEQ ID NO: 223984 - DNA, 120 bp, Artificial Sequence
  ENSG00000117707_51 (sequence is synthesized)
aaagcaaaacagaaacactaaagcaagaggggaacttttataaagcaatgtaaatatttaacctcatggctgtcattatgtaagacatgagattttaataaataactacattctcacgac

SEQ ID NO: 223985 - DNA, 120 bp, Artificial Sequence
  ENSG00000117707_52 (sequence is synthesized)
atctgttgaatttactaggaacactacagtgactgtatagacagttgaaagcattcttgaaaatcctgctctctccttttaaaagttaacaatctcttttatcagatgtcaagggcaagg

SEQ ID NO: 223986 - DNA, 120 bp, Artificial Sequence
  ENSG00000117707_53 (sequence is synthesized)
gtaatgcagtttctgtaaatttatgaaatttctttttctatgtacatgaagacatttagtaagtaacacccccccttcccatgcgcacatgtgcgcatacacacacacacacacacacac

SEQ ID NO: 223987 - DNA, 120 bp, Artificial Sequence
  ENSG00000117707_54 (sequence is synthesized)
acacacacaaacacacacactgtcataaagctaatgatttggggactttaaaaaataggatgtcctccaggaacaatcataaatttatgaaagaaagagtagtttacagactcccctgaa

SEQ ID NO: 223988 - DNA, 120 bp, Artificial Sequence
  ENSG00000117707_55 (sequence is synthesized)
agaagcagtgtatatgtgaagacagtgcaaaaatctctttgccatgtatattatagcgtattcattggtgtgaatagtacaaatgtttccttctggtacaaactctgtgtttgcaaattt

SEQ ID NO: 223989 - DNA, 120 bp, Artificial Sequence
  ENSG00000117707_56 (sequence is synthesized)
acaagaagcattgttttcaaaaagctccccttaaaaaatgtaactggtttatatgagtaagcagttaccgtattgcacttaaatgttatgttgaaggaaatgcagttttgttttctgtag

SEQ ID NO: 223990 - DNA, 120 bp, Artificial Sequence
  ENSG00000117707_57 (sequence is synthesized)
atctgttggttgtaaaccatctataaaactaaagctaaaatgctcatattcagagctgggatcaaaactggtatttaacctttgcatcttcttataattatccttctaagaatataacag

SEQ ID NO: 223991 - DNA, 120 bp, Artificial Sequence
  ENSG00000117707_58 (sequence is synthesized)
aatgtggaagtgtctggactttgagtcttttcaactgagccttctctcaaatctgacaccccctcagaatgcacaaacataagcagaaaaggcaaacaagcttaccttcttttgtgaaaa

SEQ ID NO: 223992 - DNA, 120 bp, Artificial Sequence
  ENSG00000117707_59 (sequence is synthesized)
cgtattcattctgtatttttttaaatattcaattcccctaaaaatggggagaaaatattttaaaattgtatattacgacttcaaatttagaactaagaaaaaaatgtatttgggattggt

SEQ ID NO: 223993 - DNA, 120 bp, Artificial Sequence
  ENSG00000117707_60 (sequence is synthesized)
ctcagcgctacctagaagaatcaaaggtcatggcttccctcaatattgtcccagccatttctcatatgtatatagtataaaccgtgacaaaacactgcctttatattatttagcaatatg

SEQ ID NO: 223994 - DNA, 120 bp, Artificial Sequence
  ENSG00000117707_61 (sequence is synthesized)
ttgtaaatagcattattaagctcttttttgtaataaagaccctttgatttgaatatagtacaataactgaactgataaagtcaatttttgatttttgtttgttttttttagctagaggca

SEQ ID NO: 223995 - DNA, 120 bp, Artificial Sequence
  ENSG00000117707_62 (sequence is synthesized)
atttcaattgtgaatttttgttgttgtctattgttctgaagactttgcataatttattggtttaatttatcctaatttatttgatgaaggtgtacaattttgtattaccaaggatgtact

SEQ ID NO: 223996 - DNA, 120 bp, Artificial Sequence
  ENSG00000117707_63 (sequence is synthesized)
gtaatattaattgatatgataaacacaatgagactccctgtccatattaaaaagaaaataaaaaggtgcagtagacaattgattttaaaggaaaagttaaaaaaattagtttggcagcta

SEQ ID NO: 223997 - DNA, 120 bp, Artificial Sequence
  ENSG00000117707_64 (sequence is synthesized)
ctaaattttaaaacaggaaaaaaaaaagttgttgtggggagggtgggaaaggggttttactttgtgtgttttaagcttttgtatactctccaaacttttaccttttgctttgtaccactt

SEQ ID NO: 223998 - DNA, 120 bp, Artificial Sequence
  ENSG00000117707_65 (sequence is synthesized)
aaaggatacagtagtccaattgccttgtgtgccttccatctcctcttaaactgaatgtatgtgcagtatatatgcaagcttgtgcaaaataaaatatacattacaagctcagtgccgttt

SEQ ID NO: 223999 - DNA, 120 bp, Artificial Sequence
  ENSG00000117707_66 (sequence is synthesized)
gattttcttaaagaaagagtgacttttaatttttggacctgtatccaattgtaggacagtaggctagttgtgccagtaatgtcaagtatggagattttctttcactacaattcttcattc

SEQ ID NO: 224000 - DNA, 120 bp, Artificial Sequence
  ENSG00000117707_67 (sequence is synthesized)
tgttagcctaacgtgcagctcctagaaacaacctcttttactttagatgcttggaataattgcttggatttctctctctgaaacatctttcaggcttaactttatttagccctgaaactt

SEQ ID NO: 224001 - DNA, 120 bp, Artificial Sequence
  ENSG00000117707_68 (sequence is synthesized)
agctgagggagcgctctgaaataatacaccattgcagccggggaaagcagagcggcgcaaaagagctctcgccgggtccgcctgctccctctccgcttcgctcctcttctcttctttacc

SEQ ID NO: 224002 - DNA, 120 bp, Artificial Sequence
  ENSG00000117707_69 (sequence is synthesized)
cttctcctctctcctcctctgctgctctctcctctcctcccgctcttctctctcctcctctcctgctctctcctcttcccttagctcctcttcttttcttctcctcttcttccctctcct

SEQ ID NO: 224003 - DNA, 120 bp, Artificial Sequence
  ENSG00000117707_70 (sequence is synthesized)
cgcctctcccctgctcctcttctctcgtctcccctcccctcccgcctctctctcccctctccctctcccactcgccccgctcgctcgctcgctgtcgcacagactcaccgtcccttgtcc

SEQ ID NO: 224004 - DNA, 120 bp, Artificial Sequence
  ENSG00000117707_71 (sequence is synthesized)
aattatcatattcatcacccgcaagatatcaccgtgtgtgcactcgcgtgttttcctctctctgccgggggaaaaaaaagagagagagagagatagagagagagagagagagagagagag

SEQ ID NO: 224005 - DNA, 120 bp, Artificial Sequence
  ENSG00000117707_72 (sequence is synthesized)
ctggagaggagattcccagccttcctgcccaacccgaaacttttccaacacacgcaggcgtattcctcgcaggattcggcggtcccgagtcgcagtcagggaggaggctcgggaagcaca

SEQ ID NO: 224006 - DNA, 120 bp, Artificial Sequence
  ENSG00000117713_0 (sequence is synthesized)
ctcctttctccggcagcagaaagcggagagtcacagcggggccaggccctggggagcggagcctccaccgcccccctcattcccaggcaagggcttggggggaatgagccgggagagccg

SEQ ID NO: 224007 - DNA, 120 bp, Artificial Sequence
  ENSG00000117713_1 (sequence is synthesized)
tcccaggcaagggcttggggggaatgagccgggagagccgggtcccgagcctacagagccgggagcagctgagccgccggcgcctcggccgccgccgccgcctcctcctcctccgccgcc

SEQ ID NO: 224008 - DNA, 120 bp, Artificial Sequence
  ENSG00000117713_2 (sequence is synthesized)
cgggcgggtggggagggcagcccgggggactgggccccggggcggggtgggagggggggagaagacgaagacagggccgggtctctccgcggacgagacagcggggatcatggccgcgca

SEQ ID NO: 224009 - DNA, 120 bp, Artificial Sequence
  ENSG00000117713_3 (sequence is synthesized)
gtctctccgcggacgagacagcggggatcatggccgcgcaggtcgcccccgccgccgccagcagcctgggcaacccgccgccgccgccgccctcggagctgaagaaagccgagcagcagc

SEQ ID NO: 224010 - DNA, 120 bp, Artificial Sequence
  ENSG00000117713_4 (sequence is synthesized)
agctgaagaaagccgagcagcagcagcgggaggaggcggggggcgaggcggcggcggcggcagcggccgagcgcggggaaatgaaggcagccgccgggcaggaaagcgagggccccgccg

SEQ ID NO: 224011 - DNA, 120 bp, Artificial Sequence
  ENSG00000117713_5 (sequence is synthesized)
ggaaaggagctgcaggacggggccgagagcaatgggggtggcggcggcggcggagccggcagcggcggcgggcccggcgcggagccggacctgaagaactcgaacgggaacgcgggccct

SEQ ID NO: 224012 - DNA, 120 bp, Artificial Sequence
  ENSG00000117713_6 (sequence is synthesized)
ccgccctgaacaataacctcacggagccgcccggcggcggcggtggcggcagcagcgatggggtgggggcgcctcctcactcagccgcggccgccttgccgcccccagcctacggcttcg

SEQ ID NO: 224013 - DNA, 120 bp, Artificial Sequence
  ENSG00000117713_7 (sequence is synthesized)
ggcaaccctacggccggagcccgtctgccgtcgccgccgccgcggccgccgtcttccaccaacaacatggcggacaacaaagccctggcctggcagcgctgcagagcggcggcggcgggg

SEQ ID NO: 224014 - DNA, 120 bp, Artificial Sequence
  ENSG00000117713_8 (sequence is synthesized)
gcctggagccctacgcggggccccagcagaactctcacgaccacggcttccccaaccaccagtacaactcctactaccccaaccgcagcgcctaccccccgcccgccccggcctacgcgc

SEQ ID NO: 224015 - DNA, 120 bp, Artificial Sequence
  ENSG00000117713_9 (sequence is synthesized)
tgagctccccgagaggtggcactccgggctccggcgcggcggcggctgccggctccaagccgcctccctcctccagcgcctccgcctcctcgtcgtcttcgtccttcgctcagcagcgct

SEQ ID NO: 224016 - DNA, 120 bp, Artificial Sequence
  ENSG00000117713_10 (sequence is synthesized)
ttcgctcagcagcgcttcggggccatggggggaggcggcccctccgcggccggcgggggaactccccagcccaccgccacccccaccctcaaccaactgctcacgtcgcccagctcggcc

SEQ ID NO: 224017 - DNA, 120 bp, Artificial Sequence
  ENSG00000117713_11 (sequence is synthesized)
ctgctcacgtcgcccagctcggcccggggctaccagggctaccccgggggcgactacagtggcgggccccaggacgggggcgccggcaagggcccggcggacatggcctcgcagtgttgg

SEQ ID NO: 224018 - DNA, 120 bp, Artificial Sequence
  ENSG00000117713_12 (sequence is synthesized)
gaggggcccaacaaaggagccaccacgcgcccatgagccccgggagcagcggcggcggggggcagccgctcgcccggacccctcagccatccagtccaatggatcagatgggcaagatga

SEQ ID NO: 224019 - DNA, 120 bp, Artificial Sequence
  ENSG00000117713_13 (sequence is synthesized)
gacctcagccatatggcgggactaacccatactcgcagcaacagggacctccgtcaggaccgcagcaaggacatgggtacccagggcagccatacgggtcccagaccccgcagcggtacc

SEQ ID NO: 224020 - DNA, 120 bp, Artificial Sequence
  ENSG00000117713_14 (sequence is synthesized)
cgatgaccatgcagggccgggcgcagagtgccatgggcggcctctcttatacacagcagattcctccttatggacaacaaggccccagcgggtatggtcaacagggccagactccatatt

SEQ ID NO: 224021 - DNA, 120 bp, Artificial Sequence
  ENSG00000117713_15 (sequence is synthesized)
acaaccagcaaagtcctcaccctcagcagcagcagccaccctactcccagcaaccaccgtcccagacccctcatgcccaaccttcgtatcagcagcagccacagtctcaaccaccacagc

SEQ ID NO: 224022 - DNA, 120 bp, Artificial Sequence
  ENSG00000117713_16 (sequence is synthesized)
tccagtcctctcagcctccatactcccagcagccatcccagcctccacatcagcagtccccggctccatacccctcccagcagtcgacgacacagcagcacccccagagccagcccccct

SEQ ID NO: 224023 - DNA, 120 bp, Artificial Sequence
  ENSG00000117713_17 (sequence is synthesized)
actcacagccacaggctcagtctccttaccagcagcagcaacctcagcagccagcaccctcgacgctctcccagcaggctgcgtatcctcagccccagtctcagcagtcccagcaaactg

SEQ ID NO: 224024 - DNA, 120 bp, Artificial Sequence
  ENSG00000117713_18 (sequence is synthesized)
cctattcccagcagcgcttccctccaccgcaggagctatctcaagattcatttgggtctcaggcatcctcagccccctcaatgacctccagtaagggagggcaagaagatatgaacctga

SEQ ID NO: 224025 - DNA, 120 bp, Artificial Sequence
  ENSG00000117713_19 (sequence is synthesized)
gccttcagtcaagaccctccagcttgcctgatctatctggttcaatagatgacctccccatggggacagaaggagctctgagtcctggagtgagcacatcagggatttccagcagccaag

SEQ ID NO: 224026 - DNA, 120 bp, Artificial Sequence
  ENSG00000117713_20 (sequence is synthesized)
gagagcagagtaatccagctcagtctcctttctctcctcatacctcccctcacctgcctggcatccgaggcccttccccgtcccctgttggctctcccgccagtgttgctcagtctcgct

SEQ ID NO: 224027 - DNA, 120 bp, Artificial Sequence
  ENSG00000117713_21 (sequence is synthesized)
caggaccactctcgcctgctgcagtgccaggcaaccagatgccacctcggccacccagtggccagtcggacagcatcatgcatccttccatgaaccaatcaagcattgcccaagatcgag

SEQ ID NO: 224028 - DNA, 120 bp, Artificial Sequence
  ENSG00000117713_22 (sequence is synthesized)
gttatatgcagaggaacccccagatgccccagtacagttccccccagcccggctcagccttatctccgcgtcagccttccggaggacagatacacacaggcatgggctcctaccagcaga

SEQ ID NO: 224029 - DNA, 120 bp, Artificial Sequence
  ENSG00000117713_23 (sequence is synthesized)
actccatggggagctatggtccccaggggggtcagtatggcccacaaggtggctaccccaggcagccaaactataatgccttgcccaatgccaactaccccagtgcaggcatggctggag

SEQ ID NO: 224030 - DNA, 120 bp, Artificial Sequence
  ENSG00000117713_24 (sequence is synthesized)
gcataaaccccatgggtgccggaggtcaaatgcatggacagcctggcatcccaccttatggcacactccctccagggaggatgagtcacgcctccatgggcaaccggccttatggcccta

SEQ ID NO: 224031 - DNA, 120 bp, Artificial Sequence
  ENSG00000117713_25 (sequence is synthesized)
acatggccaatatgccacctcaggttgggtcagggatgtgtcccccaccagggggcatgaaccggaaaacccaagaaactgctgtcgccatgcatgttgctgccaactctatccaaaaca

SEQ ID NO: 224032 - DNA, 120 bp, Artificial Sequence
  ENSG00000117713_26 (sequence is synthesized)
ggccgccaggctaccccaatatgaatcaagggggcatgatgggaactggacctccttatggacaagggattaatagtatggctggcatgatcaaccctcagggacccccatattccatgg

SEQ ID NO: 224033 - DNA, 120 bp, Artificial Sequence
  ENSG00000117713_27 (sequence is synthesized)
gtggaaccatggccaacaattctgcagggatggcagccagcccagagatgatgggccttggggatgtaaagttaactccagccaccaaaatgaacaacaaggcagatgggacacccaaga

SEQ ID NO: 224034 - DNA, 120 bp, Artificial Sequence
  ENSG00000117713_28 (sequence is synthesized)
cagaatccaaatccaagaaatccagttcttctactacaaccaatgagaagatcaccaagttgtatgagctgggtggtgagcctgagaggaagatgtgggtggaccgttatctggccttca

SEQ ID NO: 224035 - DNA, 120 bp, Artificial Sequence
  ENSG00000117713_29 (sequence is synthesized)
ctgaggagaaggccatgggcatgacaaatctgcctgctgtgggtaggaaacctctggacctctatcgcctctatgtgtctgtgaaggagattggtggattgactcaggtcaacaagaaca

SEQ ID NO: 224036 - DNA, 120 bp, Artificial Sequence
  ENSG00000117713_30 (sequence is synthesized)
aaaaatggcgggaacttgcaaccaacctcaatgtgggcacatcaagcagtgctgccagctccttgaaaaagcagtatatccagtgtctctatgcctttgaatgcaagattgaacggggag

SEQ ID NO: 224037 - DNA, 120 bp, Artificial Sequence
  ENSG00000117713_31 (sequence is synthesized)
aagaccctcccccagacatctttgcagctgctgattccaagaagtcccagcccaagatccagcctccctctcctgcgggatcaggatctatgcaggggccccagactccccagtcaacca

SEQ ID NO: 224038 - DNA, 120 bp, Artificial Sequence
  ENSG00000117713_32 (sequence is synthesized)
gcagttccatggcagaaggaggagacttaaagccaccaactccagcatccacaccacacagtcagatccccccattgccaggcatgagcaggagcaattcagttgggatccaggatgcct

SEQ ID NO: 224039 - DNA, 120 bp, Artificial Sequence
  ENSG00000117713_33 (sequence is synthesized)
ttaatgatggaagtgactccacattccagaagcggaattccatgactccaaaccctgggtatcagcccagtatgaatacctctgacatgatggggcgcatgtcctatgagccaaataagg

SEQ ID NO: 224040 - DNA, 120 bp, Artificial Sequence
  ENSG00000117713_34 (sequence is synthesized)
atccttatggcagcatgaggaaagctccagggagtgatcccttcatgtcctcagggcagggccccaacggcgggatgggtgacccctacagtcgtgctgccggccctgggctaggaaatg

SEQ ID NO: 224041 - DNA, 120 bp, Artificial Sequence
  ENSG00000117713_35 (sequence is synthesized)
ctgagggaaacatgagcactggggccccacagccgaatctcatgccttccaacccagactcggggatgtattctcctagccgctaccccccgcagcagcagcagcagcagcagcaacgac

SEQ ID NO: 224042 - DNA, 120 bp, Artificial Sequence
  ENSG00000117713_36 (sequence is synthesized)
atgattcctatggcaatcagttctccacccaaggcaccccttctggcagccccttccccagccagcagactacaatgtatcaacagcaacagcagaattacaagcggccaatggatggca

SEQ ID NO: 224043 - DNA, 120 bp, Artificial Sequence
  ENSG00000117713_37 (sequence is synthesized)
catatggccctcctgccaagcggcacgaaggggagatgtacagcgtgccatacagcactgggcaggggcagcctcagcagcagcagttgcccccagcccagccccagcctgccagccagc

SEQ ID NO: 224044 - DNA, 120 bp, Artificial Sequence
  ENSG00000117713_38 (sequence is synthesized)
aacaagctgcccagccttcccctcagcaagatgtatacaaccagtatggcaatgcctatcctgccactgccacagctgctactgagcgccgaccagcaggcggcccccagaaccaatttc

SEQ ID NO: 224045 - DNA, 120 bp, Artificial Sequence
  ENSG00000117713_39 (sequence is synthesized)
cattccagtttggccgagaccgtgtctctgcaccccctggcaccaatgcccagcaaaacatgccaccacaaatgatgggcggccccatacaggcatcagctgaggttgctcagcaaggca

SEQ ID NO: 224046 - DNA, 120 bp, Artificial Sequence
  ENSG00000117713_40 (sequence is synthesized)
ccatgtggcaggggcgtaatgacatgacctataattatgccaacaggcagagcacgggctctgccccccagggccccgcctatcatggcgtgaaccgaacagatgaaatgctgcacacag

SEQ ID NO: 224047 - DNA, 120 bp, Artificial Sequence
  ENSG00000117713_41 (sequence is synthesized)
atcagagggccaaccacgaaggctcgtggccttcccatggcacacgccagcccccatatggtccctctgcccctgtgccccccatgacaaggccccctccatctaactaccagcccccac

SEQ ID NO: 224048 - DNA, 120 bp, Artificial Sequence
  ENSG00000117713_42 (sequence is synthesized)
caagcatgcagaatcacattcctcaggtatccagccctgctcccctgccccggccaatggagaaccgcacctctcctagcaagtctccattcctgcactctgggatgaaaatgcagaagg

SEQ ID NO: 224049 - DNA, 120 bp, Artificial Sequence
  ENSG00000117713_43 (sequence is synthesized)
caggtcccccagtacctgcctcgcacatagcacctgcccctgtgcagccccccatgattcggcgggatatcaccttcccacctggctctgttgaagccacacagcctgtgttgaagcaga

SEQ ID NO: 224050 - DNA, 120 bp, Artificial Sequence
  ENSG00000117713_44 (sequence is synthesized)
ggaggcggctcacaatgaaagacattggaaccccggaggcatggcgggtaatgatgtccctcaagtctggtctcctggcagagagcacatgggcattagataccatcaacatcctgctgt

SEQ ID NO: 224051 - DNA, 120 bp, Artificial Sequence
  ENSG00000117713_45 (sequence is synthesized)
atgatgacaacagcatcatgaccttcaacctcagtcagctcccagggttgctagagctccttgtagaatatttccgacgatgcctgattgagatctttggcattttaaaggagtatgagg

SEQ ID NO: 224052 - DNA, 120 bp, Artificial Sequence
  ENSG00000117713_46 (sequence is synthesized)
tgggtgacccaggacagagaacgctactggatcctgggaggttcagcaaggtgtctagtccagctcccatggagggtggggaagaagaagaagaacttctaggtcctaaactagaagagg

SEQ ID NO: 224053 - DNA, 120 bp, Artificial Sequence
  ENSG00000117713_47 (sequence is synthesized)
aagaagaagaggaagtagttgaaaatgatgaggagatagccttttcaggcaaggacaagccagcttcagagaatagtgaggagaagctgatcagtaagtttgacaagcttccagtaaaga

SEQ ID NO: 224054 - DNA, 120 bp, Artificial Sequence
  ENSG00000117713_48 (sequence is synthesized)
tcgtacagaagaatgatccatttgtggtggactgctcagataagcttgggcgtgtgcaggagtttgacagtggcctgctgcactggcggattggtgggggggacaccactgagcatatcc

SEQ ID NO: 224055 - DNA, 120 bp, Artificial Sequence
  ENSG00000117713_49 (sequence is synthesized)
agacccacttcgagagcaagacagagctgctgccttcccggcctcacgcaccctgcccaccagcccctcggaagcatgtgacaacagcagagggtacaccagggacaacagaccaggagg

SEQ ID NO: 224056 - DNA, 120 bp, Artificial Sequence
  ENSG00000117713_50 (sequence is synthesized)
ggcccccacctgatggacctccagaaaaacggatcacagccactatggatgacatgttgtctactcggtctagcaccttgaccgaggatggagctaagagttcagaggccatcaaggaga

SEQ ID NO: 224057 - DNA, 120 bp, Artificial Sequence
  ENSG00000117713_51 (sequence is synthesized)
gcagcaagtttccatttggcattagcccagcacagagccaccggaacatcaagatcctagaggacgaaccccacagtaaggatgagaccccactgtgtacccttctggactggcaggatt

SEQ ID NO: 224058 - DNA, 120 bp, Artificial Sequence
  ENSG00000117713_52 (sequence is synthesized)
ctcttgccaagcgctgcgtctgtgtgtccaataccattcgaagcctgtcatttgtgccaggcaatgactttgagatgtccaaacacccagggctgctgctcatcctgggcaagctgatcc

SEQ ID NO: 224059 - DNA, 120 bp, Artificial Sequence
  ENSG00000117713_53 (sequence is synthesized)
tgctgcaccacaagcacccagaacggaagcaggcaccactaacttatgaaaaggaggaggaacaggaccaaggggtgagctgcaacaaagtggagtggtggtgggactgcttggagatgc

SEQ ID NO: 224060 - DNA, 120 bp, Artificial Sequence
  ENSG00000117713_54 (sequence is synthesized)
tccgggaaaacaccttggttacactcgccaacatctcggggcagttggacctatctccataccccgagagcatttgcctgcctgtcctggacggactcctacactgggcagtttgccctt

SEQ ID NO: 224061 - DNA, 120 bp, Artificial Sequence
  ENSG00000117713_55 (sequence is synthesized)
cagctgaagcccaggaccccttttccaccctgggccccaatgccgtcctttccccgcagagactggtcttggaaaccctcagcaaactcagcatccaggacaacaatgtggacctgattc

SEQ ID NO: 224062 - DNA, 120 bp, Artificial Sequence
  ENSG00000117713_56 (sequence is synthesized)
tggccacaccccccttcagccgcctggagaagttgtatagcactatggtgcgcttcctcagtgaccgaaagaacccggtgtgccgggagatggctgtggtactgctggccaacctggctc

SEQ ID NO: 224063 - DNA, 120 bp, Artificial Sequence
  ENSG00000117713_57 (sequence is synthesized)
agggggacagcctggcagctcgtgccattgcagtgcagaagggcagtatcggcaacctcctgggcttcctagaggacagccttgccgccacacagttccagcagagccaggccagcctcc

SEQ ID NO: 224064 - DNA, 120 bp, Artificial Sequence
  ENSG00000117713_58 (sequence is synthesized)
tccacatgcagaacccaccctttgagccaactagtgtggacatgatgcggcgggctgcccgcgcgctgcttgccttggccaaggtggacgagaaccactcagagtttactctgtacgaat

SEQ ID NO: 224065 - DNA, 120 bp, Artificial Sequence
  ENSG00000117713_59 (sequence is synthesized)
cacggctgttggacatctcggtatcaccgttgatgaactcattggtttcacaagtcatttgtgatgtactgtttttgattggccagtcatgacagccgtgggacacctcccccccccgtg

SEQ ID NO: 224066 - DNA, 120 bp, Artificial Sequence
  ENSG00000117713_60 (sequence is synthesized)
tgtgtgtgcgtgtgtggagaacttagaaactgactgttgccctttatttatgcaaaaccacctcagaatccagtttaccctgtgctgtccagcttctcccttgggaaaaagtctctcctg

SEQ ID NO: 224067 - DNA, 120 bp, Artificial Sequence
  ENSG00000117713_61 (sequence is synthesized)
tttctctctcctccttccacctcccctccctccatcacctcacgcctttctgttccttgtcctcaccttactcccctcaggaccctaccccaccctctttgaaaagacaaagctctgcct

SEQ ID NO: 224068 - DNA, 120 bp, Artificial Sequence
  ENSG00000117713_62 (sequence is synthesized)
acatagaagactttttttattttaaccaaagttactgttgtttacagtgagtttggggaaaaaaaataaaataaaaatggctttcccagtccttgcatcaacgggatgccacatttcata

SEQ ID NO: 224069 - DNA, 120 bp, Artificial Sequence
  ENSG00000117713_63 (sequence is synthesized)
aaaaaaaaaaaaatacaaaaaaaaattctgaaggacaaaaaaggtgactgctgaactgtgtgtggtttattgttgtacattcacaatcttgcaggagccaagaagttcgcagttgtgaac

SEQ ID NO: 224070 - DNA, 120 bp, Artificial Sequence
  ENSG00000117713_64 (sequence is synthesized)
agaagttcgcagttgtgaacagaccctgttcactggagaggcctgtgcagtagagtgtagaccctttcatgtactgtactgtacacctgatactgtaaacatactgtaataataatgtct

SEQ ID NO: 224071 - DNA, 120 bp, Artificial Sequence
  ENSG00000117713_65 (sequence is synthesized)
cacatggaaacagaaaacgctgggtcagcagcaagctgtagtttttaaaaatgtttttagttaaacgttgaggagaaaaaaaaaaaaggcttttcccccaaagtatcatgtgtgaaccta

SEQ ID NO: 224072 - DNA, 120 bp, Artificial Sequence
  ENSG00000117713_66 (sequence is synthesized)
caacaccctgacctctttctctcctccttgattgtatgaataaccctgagatcacctcttagaactggttttaacctttagctgcagcggctacgctgccacgtgtgtatatatatgacg

SEQ ID NO: 224073 - DNA, 120 bp, Artificial Sequence
  ENSG00000117713_67 (sequence is synthesized)
ttgtacattgcacatacccttggatccccacagtttggtcctcctcccagctacccctttatagtatgacgagttaacaagttggtgacctgcacaaagcgagacacagctatttaatct

SEQ ID NO: 224074 - DNA, 120 bp, Artificial Sequence
  ENSG00000117713_68 (sequence is synthesized)
cttgccagatatcgcccctcttggtgcgatgctgtacaggtctctgtaaaaagtccttgctgtctcagcagccaatcaacttatagtttatttttttctgggtttttgttttgttttgtt

SEQ ID NO: 224075 - DNA, 120 bp, Artificial Sequence
  ENSG00000117713_69 (sequence is synthesized)
ttctttctaatcgaggtgtgaaaaagttctaggttcagttgaagttctgatgaagaaacacaattgagattttttcagtgataaaatctgcatatttgtatttcaacaatgtagctaaaa

SEQ ID NO: 224076 - DNA, 120 bp, Artificial Sequence
  ENSG00000117713_70 (sequence is synthesized)
cttgatgtaaattcctcctttttttccttttttggcttaatgaatatcatttattcagtatgaaatctttatactatatgttccacgtgttaagaataaatgtacattaaatcttggtaa

SEQ ID NO: 224077 - DNA, 120 bp, Artificial Sequence
  ENSG00000117713_71 (sequence is synthesized)
attgaattttgagctttcattattggtgctagctgtacctctctgtcttcttgctcttttttttttaacttccatgacagcctaccattgaatcttcttgtctctcaaagagataaaagt

SEQ ID NO: 224078 - DNA, 120 bp, Artificial Sequence
  ENSG00000117713_72 (sequence is synthesized)
tctgttcttcttatatcttcaaactcttgaatattaaaggaaatgagcttttcagttgagatgcacaagactcttaattcagagttcccattccctcaactgtcacttagctgctttgct

SEQ ID NO: 224079 - DNA, 120 bp, Artificial Sequence
  ENSG00000117713_73 (sequence is synthesized)
tatttggaagaaagcataaatttaactgtgccatagtgcaaacaggctatagatgtgtaaggggagtttccactattggaagaatagaaacatctagatgtttgtgtatttgaattcccc

SEQ ID NO: 224080 - DNA, 120 bp, Artificial Sequence
  ENSG00000117713_74 (sequence is synthesized)
gtcatggtattgaagcatcaattttggtgtgtaacaaggtgatggcagtgcatagcagcaccgtcctctaccaactgaagggcctttgtttatacccggcctgtcccttggatctcaagc

SEQ ID NO: 224081 - DNA, 120 bp, Artificial Sequence
  ENSG00000117713_75 (sequence is synthesized)
agtaccacagttacaaagtagtttttagcttacaaggtgttttcacaaataggtggtattttcatttttcaaatgacaaaattagggttctgaggcgggtcagttgacttaaaggttact

SEQ ID NO: 224082 - DNA, 120 bp, Artificial Sequence
  ENSG00000117713_76 (sequence is synthesized)
aggttggtctcattgctctttcaaagtaactgtatttctttatagcatacagactaaaaaaacctgtgtacttgggttatatattcagtggccagaggccatcaaagctcaggttaatga

SEQ ID NO: 224083 - DNA, 120 bp, Artificial Sequence
  ENSG00000117713_77 (sequence is synthesized)
gctgttggccgaggtgctttcgcgagggtagcgctgtcctagtcctagttctccaatctgcgccgggattcctgagctgcctgggtgtggggttaaaaggcaggggccgtgggggaaaaa

SEQ ID NO: 224084 - DNA, 120 bp, Artificial Sequence
  ENSG00000117713_78 (sequence is synthesized)
actccaccgaagggaggacccactgcccccagccggggtctcgctgctcgggccagccacgtgcccagctcctcccctcccccgctttcccgttgccactgcccctagggaaagctgatg

SEQ ID NO: 224085 - DNA, 120 bp, Artificial Sequence
  ENSG00000117713_79 (sequence is synthesized)
ggccagtttctaaaaaagttccctcagcccaacatttcctgggatcgtggtgtggggctctaaaagtaaaagtggaagagaaccctagtgaattaaaaaaaaaaaaaagtagagaaattc

SEQ ID NO: 224086 - DNA, 120 bp, Artificial Sequence
  ENSG00000117713_80 (sequence is synthesized)
ttttttttttttttttaaatagagatggggtctcagtgtgttgccagggctaaagactgcttattttgatgtgcaaaataagtgttcagagtaggtggtttaacttctatcagtcaactt

SEQ ID NO: 224087 - DNA, 120 bp, Artificial Sequence
  ENSG00000117713_81 (sequence is synthesized)
tttggtttccaaaaggattcttaatgatacatatgtcttggatctttggtgttagaaatagcaaatggtaagcttgtggtttgccatttctcctactgttttatgtggtcctacgtgttg

SEQ ID NO: 224088 - DNA, 120 bp, Artificial Sequence
  ENSG00000117713_82 (sequence is synthesized)
actctggtgctagagtacagaaggctcatgtgattaggtttaacaacttctttagccactaaatcttactgagttgttgttgatgaaccaaggtagaatagggcgattgactataaagag

SEQ ID NO: 224089 - DNA, 120 bp, Artificial Sequence
  ENSG00000117713_83 (sequence is synthesized)
gtggatttggtagaacttcagaatgatggaagtgcaaagtttgcattgggcccctcaagaaataatgcaaagccacctctgggtgctatgctgagggttccagtctggttgggatttagc

SEQ ID NO: 224090 - DNA, 120 bp, Artificial Sequence
  ENSG00000117713_84 (sequence is synthesized)
atgacaaaaagtggtacagttcagcatttcatctatgccttttgccacagacagggcccttaaatggaaatacaacttgactttggaggtggctttgaggaaggcagtacttaaaggaca

SEQ ID NO: 224091 - DNA, 87 bp, Artificial Sequence
  ENSG00000117713_85 (sequence is synthesized)
ggaggtggctttgaggaaggcagtacttaaaggacacagcagggctctgcttcaaagaattacaccctttgaaattgagctattgtg

SEQ ID NO: 224092 - DNA, 61 bp, Artificial Sequence
  ENSG00000117713_86 (sequence is synthesized)
gatcgcgaactattgtttgctatctagagcttgaactctcttagtatctttcgtgggaggt

SEQ ID NO: 224093 - DNA, 120 bp, Artificial Sequence
  ENSG00000117713_87 (sequence is synthesized)
tgaactattgtttgctatctagagcttgaactctcttagtatctttcgtgggaggtagaagataagaaaatctgggtgttggccgggctcggtggctcatgcctgtaattccagcatttt

SEQ ID NO: 224094 - DNA, 86 bp, Artificial Sequence
  ENSG00000117713_88 (sequence is synthesized)
atctcaaaaaaaaaatccagcccctagatctaattcgaaagcccttatttttttttccatctgctctactgttcagccaaagattg

SEQ ID NO: 224095 - DNA, 120 bp, Artificial Sequence
  ENSG00000117713_89 (sequence is synthesized)
atttttttttccatctgctctactgttcagccaaagattgtgactggagaggagtgttttcttctagaggtaaataaatggcctatatattatccaaggtggaatttgggtctctgtagc

SEQ ID NO: 224096 - DNA, 120 bp, Artificial Sequence
  ENSG00000117713_90 (sequence is synthesized)
accagcttggaccagtgtttggagagctgaagcctcgtcccactccttatgctgcaagatccatggagttccagccccctggacttgtggggagcttggagaagagagccatgaacatct

SEQ ID NO: 224097 - DNA, 120 bp, Artificial Sequence
  ENSG00000117713_91 (sequence is synthesized)
gcccacatggcattctcttctcttagcttaagtcaccatgcctaagcttgggttccacttggcagtgagatggagagagtgtcctaaaagagataatggcaatgaccaccaggttgaaaa

SEQ ID NO: 224098 - DNA, 120 bp, Artificial Sequence
  ENSG00000117713_92 (sequence is synthesized)
ctggcctggtgaagaaaagcagaagattaattgggaaaagagaaggctaagagatgattggccctggtgggtgaggtgcaaagctgttggctagtgttcctggagataggcttacgtgaa

SEQ ID NO: 224099 - DNA, 120 bp, Artificial Sequence
  ENSG00000117713_93 (sequence is synthesized)
ggtaggttgggcagaagaaagaactttgtgttgggcatagaagagattaagatgaacaatttgctctgtggagaacctttgggaaaggagcaactctgcctctcccaactgatacagaag

SEQ ID NO: 224100 - DNA, 120 bp, Artificial Sequence
  ENSG00000117713_94 (sequence is synthesized)
gggattccccaaggatttagccagatttatgggaaaaccctaaatctgagcattgccatgagcctattctttatacttaacctgttgccatttaacctgctcagcaaaatgaactgatgt

SEQ ID NO: 224101 - DNA, 120 bp, Artificial Sequence
  ENSG00000117713_95 (sequence is synthesized)
catcctcatgtggctctattgggagataatttaaacttccctcctctaaccctgatctggtgtcttcctgcttaaaaatattcttcagtgggcagccaattcatcttagaacttgcagtt

SEQ ID NO: 224102 - DNA, 120 bp, Artificial Sequence
  ENSG00000117713_96 (sequence is synthesized)
gactgcccctcatgttgtggggagacctagactgacagagatacccagagcaggctgatctctttgttcaacaaaatagtctctccagttggaggccacatggacagcagctgcagtctg

SEQ ID NO: 224103 - DNA, 120 bp, Artificial Sequence
  ENSG00000117713_97 (sequence is synthesized)
atagggaaagggagcattgggttaggtttcgctcacttctgattgggtgggcttcagggttcactgaacctaggatgaggtacagagagaattctaatgcctgagcctgtcttccagatt

SEQ ID NO: 224104 - DNA, 120 bp, Artificial Sequence
  ENSG00000117713_98 (sequence is synthesized)
ggaaaaggatgcaaacctttaaaatgccgtgattgtaactgaacttttataaaggcagtgataattcaggggcaaaagagtgctatttataagttagtttgtgaaggctccaagaaagca

SEQ ID NO: 224105 - DNA, 120 bp, Artificial Sequence
  ENSG00000117713_99 (sequence is synthesized)
aagctgaatcttgagcttatctaaaggattagtagggtttaggtggaagagtggccaatccagtagactggcctagatgccacggagatgggagagagtctagatatttcccaccaaggc

SEQ ID NO: 224106 - DNA, 120 bp, Artificial Sequence
  ENSG00000117713_100 (sequence is synthesized)
catctccaaccatgaagacttagctcaggtgttacccactctaagaagtattcctagtcacctctgcccctctaggttgtccccctctgtgcctctttaaactcttctttctagtatcat

SEQ ID NO: 224107 - DNA, 120 bp, Artificial Sequence
  ENSG00000117713_101 (sequence is synthesized)
aggtatcatatcagcagacattacaacctattgaacttcctttgtgtatagggacttgaaaacccttgttcccaggccttgggggaacaggcttaccatatggtagatgaataagcataa

SEQ ID NO: 224108 - DNA, 120 bp, Artificial Sequence
  ENSG00000117713_102 (sequence is synthesized)
gaatacatgaagaaggagacctgtccagctagagcagaaagactaattgtagggagcatctggggaatgggcttggtcagtgtgccctgaagctgagggaaggaggcagaactgtaggtt

SEQ ID NO: 224109 - DNA, 76 bp, Artificial Sequence
  ENSG00000117713_103 (sequence is synthesized)
tgtgccctgaagctgagggaaggaggcagaactgtaggttggctgctcgggaggtacaaaagtcataataaggccc

SEQ ID NO: 224110 - DNA, 62 bp, Artificial Sequence
  ENSG00000117713_104 (sequence is synthesized)
accttgtctctactaaaaatataaaaatcagtggggtgtggtgacaggcacctgtggtccca

SEQ ID NO: 224111 - DNA, 78 bp, Artificial Sequence
  ENSG00000117713_105 (sequence is synthesized)
ctacactcgaccctgaacacccggaccatcaggacagtgactggtaagggaaagggacctgtggttatttgtcaatga

SEQ ID NO: 224112 - DNA, 120 bp, Artificial Sequence
  ENSG00000117713_106 (sequence is synthesized)
gactggtaagggaaagggacctgtggttatttgtcaatgagatatgtaggggagcagtggcacaagaatgtcaaatttgcagggagccaccaccccaagaaaaaaatatgagtaaatccc

SEQ ID NO: 224113 - DNA, 120 bp, Artificial Sequence
  ENSG00000117713_107 (sequence is synthesized)
aagtttgacaaagcaagtcaagcagggtggtcactgatattatcatgagtctccattttataaaatgttagtttttattagtgcatctaaaataggatttagggccaggcgcggtggctc

SEQ ID NO: 224114 - DNA, 120 bp, Artificial Sequence
  ENSG00000117713_108 (sequence is synthesized)
ggcgacagagcgagatttattttttctgtctcaaaaataaataaataaaataggatttagatatccagatgatttgtacaccactttttagcagcgtactaaaaaaccggactctgaatt

SEQ ID NO: 224115 - DNA, 120 bp, Artificial Sequence
  ENSG00000117713_109 (sequence is synthesized)
gctgcagatttaacacttcttgtggactatccaccaagcaagattaactttttcaattacctaagaactgtggttctacaaagatgaataccttacagcctgatggggcttggggcttat

SEQ ID NO: 224116 - DNA, 120 bp, Artificial Sequence
  ENSG00000117713_110 (sequence is synthesized)
caagatccagcctccctctcctggtaaggatggggtcagcggccccaccaaggctgagagggcctgttgccctggcctcttattcaggatatgaataagaggcttatccaacaggatatg

SEQ ID NO: 224117 - DNA, 120 bp, Artificial Sequence
  ENSG00000117713_111 (sequence is synthesized)
ccaaggatctgtgctctgccttgccctaccacagggcttaacaggttggctgactagagagtgggcagtggaaactcccttgggaggtactctacggcagctcttaagttttaatttttg

SEQ ID NO: 224118 - DNA, 120 bp, Artificial Sequence
  ENSG00000117713_112 (sequence is synthesized)
ttgtgcagctgacaacttgccaaatgtttgtaaactggtgaatgggaggggcacaagaggagtcggtggaacttataaatggcagcaaggcagggccatctgggagctttggcctattga

SEQ ID NO: 224119 - DNA, 120 bp, Artificial Sequence
  ENSG00000117713_113 (sequence is synthesized)
tgtcagcaccttagaatgcagctcagactagagccctgaattccccagggagctgagatggtaatgaatgggaaggagggagtggggaagggttatgaatggaactccctgatgggagtg

SEQ ID NO: 224120 - DNA, 120 bp, Artificial Sequence
  ENSG00000117713_114 (sequence is synthesized)
gctctgctcaccctcctttctgagaggaggctgaggcctagggtgagcctagagagggaagaaggccagggtgcctggaaggtgggtgtaaacacatgtgccctggtgttgacctctgag

SEQ ID NO: 224121 - DNA, 120 bp, Artificial Sequence
  ENSG00000117713_115 (sequence is synthesized)
ggtgtaatgagtgcctgagatgactcatcagctggggaggcctcagcagtgggatatctactgctgggaatggtaactattggaaacattaattactagtagttttgtactcatcagctt

SEQ ID NO: 224122 - DNA, 120 bp, Artificial Sequence
  ENSG00000117713_116 (sequence is synthesized)
agaagaacatttgaagttgaggagtgacaccatgctggatgctttagaacaggagctcctagactcctaaaatgcatcccagatttgggacccccttcccacccaggacttgggaggctc

SEQ ID NO: 224123 - DNA, 120 bp, Artificial Sequence
  ENSG00000117713_117 (sequence is synthesized)
tgactggagctcatgcaccagcattacagggtttagtaggttagacaaggtcctttggcggagtgaagagaaatagccagggaagctggcaatgactcagggaatcaccagcatggtgat

SEQ ID NO: 224124 - DNA, 120 bp, Artificial Sequence
  ENSG00000117713_118 (sequence is synthesized)
gtcatggccacatcactcctcttttctacacgtaaaacaaaaacaaagagctacaaaaccctcagattcccgtctttatgacctggccttgtagatcctctgctaagaagggtgatcagg

SEQ ID NO: 224125 - DNA, 120 bp, Artificial Sequence
  ENSG00000117713_119 (sequence is synthesized)
ctttaaaggccttaggaagaactttcccaaagagattctgggtcgttcgtgtgtttgtgtgagagttaaacactgtcatgccaagcaaactactcaacttgtatctctgtccacagcggg

SEQ ID NO: 224126 - DNA, 120 bp, Artificial Sequence
  ENSG00000117713_120 (sequence is synthesized)
cctccttatggacaagggattaatagtatggctggcatgatcaaccctcagggacccccatattccatgggtggaaccatggccaacaattctgcaggtaagtgctagtcattctcacta

SEQ ID NO: 224127 - DNA, 120 bp, Artificial Sequence
  ENSG00000117713_121 (sequence is synthesized)
agatatcttccatgccagtactttgcttcctttgcctctgggcacgggcccaggattttgacagcaataataatttgtttacatgataaccttaacacaggattgacttcaaaaggaatt

SEQ ID NO: 224128 - DNA, 120 bp, Artificial Sequence
  ENSG00000117724_0 (sequence is synthesized)
agaagcgggcgaattgggcaccggtggcggctgcgggcagtttgaattagactctgggctccagcccgccgaagccgcgccagaactgtactctccgagaggtcgttttcccgtccccga

SEQ ID NO: 224129 - DNA, 120 bp, Artificial Sequence
  ENSG00000117724_1 (sequence is synthesized)
gagcaagtttatttacaaatgttggagtaataaagaaggcagaacaaaatgagctgggctttggaagaatggaaagaagggctgcctacaagagctcttcagaaaattcaagagcttgaa

SEQ ID NO: 224130 - DNA, 120 bp, Artificial Sequence
  ENSG00000117724_2 (sequence is synthesized)
ggacagcttgacaaactgaagaaggaaaagcagcaaaggcagtttcagcttgacagtctcgaggctgcgctgcagaagcaaaaacagaaggttgaaaatgaaaaaaccgagggtacaaac

SEQ ID NO: 224131 - DNA, 120 bp, Artificial Sequence
  ENSG00000117724_3 (sequence is synthesized)
ctgaaaagggagaatcaaagattgatggaaatatgtgaaagtctggagaaaactaagcagaagatttctcatgaacttcaagtcaaggagtcacaagtgaatttccaggaaggacaactg

SEQ ID NO: 224132 - DNA, 120 bp, Artificial Sequence
  ENSG00000117724_4 (sequence is synthesized)
aattcaggcaaaaaacaaatagaaaaactggaacaggaacttaaaaggtgtaaatctgagcttgaaagaagccaacaagctgcgcagtctgcagatgtctctctgaatccatgcaataca

SEQ ID NO: 224133 - DNA, 120 bp, Artificial Sequence
  ENSG00000117724_5 (sequence is synthesized)
ccacaaaaaatttttacaactccactaacaccaagtcaatattatagtggttccaagtatgaagatctaaaagaaaaatataataaagaggttgaagaacgaaaaagattagaggcagag

SEQ ID NO: 224134 - DNA, 120 bp, Artificial Sequence
  ENSG00000117724_6 (sequence is synthesized)
gttaaagccttgcaggctaaaaaagcaagccagactcttccacaagccaccatgaatcaccgcgacattgcccggcatcaggcttcatcatctgtgttctcatggcagcaagagaagacc

SEQ ID NO: 224135 - DNA, 120 bp, Artificial Sequence
  ENSG00000117724_7 (sequence is synthesized)
ccaagtcatctttcatctaattctcaaagaactccaattaggagagatttctctgcatcttacttttctggggaacaagaggtgactccaagtcgatcaactttgcaaatagggaaaaga

SEQ ID NO: 224136 - DNA, 120 bp, Artificial Sequence
  ENSG00000117724_8 (sequence is synthesized)
gatgctaatagcagtttctttgacaattctagcagtcctcatcttttggatcaattaaaagcgcagaatcaagagctaagaaacaagattaatgagttggaactacgcctgcaaggacat

SEQ ID NO: 224137 - DNA, 120 bp, Artificial Sequence
  ENSG00000117724_9 (sequence is synthesized)
gaaaaagaaatgaaaggccaagtgaataagtttcaagaactccaactccaactggagaaagcaaaagtggaattaattgaaaaagagaaagttttgaacaaatgtagggatgaactagtg

SEQ ID NO: 224138 - DNA, 120 bp, Artificial Sequence
  ENSG00000117724_10 (sequence is synthesized)
agaacaacagcacaatacgaccaggcgtcaaccaagtatactgcattggaacaaaaactgaaaaaattgacggaagatttgagttgtcagcgacaaaatgcagaaagtgccagatgttct

SEQ ID NO: 224139 - DNA, 120 bp, Artificial Sequence
  ENSG00000117724_11 (sequence is synthesized)
ctggaacagaaaattaaggaaaaagaaaaggagtttcaagaggagctctcccgtcaacagcgttctttccaaacactggaccaggagtgcatccagatgaaggccagactcacccaggag

SEQ ID NO: 224140 - DNA, 120 bp, Artificial Sequence
  ENSG00000117724_12 (sequence is synthesized)
ttacagcaagccaagaatatgcacaacgtcctgcaggctgaactggataaactcacatcagtaaagcaacagctagaaaacaatttggaagagtttaagcaaaagttgtgcagagctgaa

SEQ ID NO: 224141 - DNA, 120 bp, Artificial Sequence
  ENSG00000117724_13 (sequence is synthesized)
caggcgttccaggcgagtcagatcaaggagaatgagctgaggagaagcatggaggaaatgaagaaggaaaacaacctccttaagagtcactctgagcaaaaggccagagaagtctgccac

SEQ ID NO: 224142 - DNA, 120 bp, Artificial Sequence
  ENSG00000117724_14 (sequence is synthesized)
ctggaggcagaactcaagaacatcaaacagtgtttaaatcagagccagaattttgcagaagaaatgaaagcgaagaatacctctcaggaaaccatgttaagagatcttcaagaaaaaata

SEQ ID NO: 224143 - DNA, 120 bp, Artificial Sequence
  ENSG00000117724_15 (sequence is synthesized)
aatcagcaagaaaactccttgactttagaaaaactgaagcttgctgtggctgatctggaaaagcagcgagattgttctcaagaccttttgaagaaaagagaacatcacattgaacaactt

SEQ ID NO: 224144 - DNA, 120 bp, Artificial Sequence
  ENSG00000117724_16 (sequence is synthesized)
aatgataagttaagcaagacagagaaagagtccaaagccttgctgagtgctttagagttaaaaaagaaagaatatgaagaattgaaagaagagaaaactctgttttcttgttggaaaagt

SEQ ID NO: 224145 - DNA, 120 bp, Artificial Sequence
  ENSG00000117724_17 (sequence is synthesized)
gaaaacgaaaaacttttaactcagatggaatcagaaaaggaaaacttgcagagtaaaattaatcacttggaaacttgtctgaagacacagcaaataaaaagtcatgaatacaacgagaga

SEQ ID NO: 224146 - DNA, 120 bp, Artificial Sequence
  ENSG00000117724_18 (sequence is synthesized)
gtaagaacgctggagatggacagagaaaacctaagtgtcgagatcagaaaccttcacaacgtgttagacagtaagtcagtggaggtagagacccagaaactagcttatatggagctacag

SEQ ID NO: 224147 - DNA, 120 bp, Artificial Sequence
  ENSG00000117724_19 (sequence is synthesized)
cagaaagctgagttctcagatcagaaacatcagaaggaaatagaaaatatgtgtttgaagacttctcagcttactgggcaagttgaagatctagaacacaagcttcagttactgtcaaat

SEQ ID NO: 224148 - DNA, 120 bp, Artificial Sequence
  ENSG00000117724_20 (sequence is synthesized)
gaaataatggacaaagaccggtgttaccaagacttgcatgccgaatatgagagcctcagggatctgctaaaatccaaagatgcttctctggtgacaaatgaagatcatcagagaagtctt

SEQ ID NO: 224149 - DNA, 120 bp, Artificial Sequence
  ENSG00000117724_21 (sequence is synthesized)
ttggcttttgatcagcagcctgccatgcatcattcctttgcaaatataattggagaacaaggaagcatgccttcagagaggagtgaatgtcgtttagaagcagaccaaagtccgaaaaat

SEQ ID NO: 224150 - DNA, 120 bp, Artificial Sequence
  ENSG00000117724_22 (sequence is synthesized)
tctgccatcctacaaaatagagttgattcacttgaattttcattagagtctcaaaaacagatgaactcagacctgcaaaagcagtgtgaagagttggtgcaaatcaaaggagaaatagaa

SEQ ID NO: 224151 - DNA, 120 bp, Artificial Sequence
  ENSG00000117724_23 (sequence is synthesized)
gaaaatctcatgaaagcagaacagatgcatcaaagttttgtggctgaaacaagtcagcgcattagtaagttacaggaagacacttctgctcaccagaatgttgttgctgaaaccttaagt

SEQ ID NO: 224152 - DNA, 120 bp, Artificial Sequence
  ENSG00000117724_24 (sequence is synthesized)
gcccttgagaacaaggaaaaagagctgcaacttttaaatgataaggtagaaactgagcaggcagagattcaagaattaaaaaagagcaaccatctacttgaagactctctaaaggagcta

SEQ ID NO: 224153 - DNA, 120 bp, Artificial Sequence
  ENSG00000117724_25 (sequence is synthesized)
caacttttatccgaaaccctaagcttggagaagaaagaaatgagttccatcatttctctaaataaaagggaaattgaagagctgacccaagagaatgggactcttaaggaaattaatgca

SEQ ID NO: 224154 - DNA, 120 bp, Artificial Sequence
  ENSG00000117724_26 (sequence is synthesized)
tccttaaatcaagagaagatgaacttaatccagaaaagtgagagttttgcaaactatatagatgaaagggagaaaagcatttcagagttatctgatcagtacaagcaagaaaaacttatt

SEQ ID NO: 224155 - DNA, 120 bp, Artificial Sequence
  ENSG00000117724_27 (sequence is synthesized)
ttactacaaagatgtgaagaaaccggaaatgcatatgaggatcttagtcaaaaatacaaagcagcacaggaaaagaattctaaattagaatgcttgctaaatgaatgcactagtctttgt

SEQ ID NO: 224156 - DNA, 120 bp, Artificial Sequence
  ENSG00000117724_28 (sequence is synthesized)
gaaaataggaaaaatgagttggaacagctaaaggaagcatttgcaaaggaacaccaagaattcttaacaaaattagcatttgctgaagaaagaaatcagaatctgatgctagagttggag

SEQ ID NO: 224157 - DNA, 120 bp, Artificial Sequence
  ENSG00000117724_29 (sequence is synthesized)
acagtgcagcaagctctgagatctgagatgacagataaccaaaacaattctaagagcgaggctggtggtttaaagcaagaaatcatgactttaaaggaagaacaaaacaaaatgcaaaag

SEQ ID NO: 224158 - DNA, 120 bp, Artificial Sequence
  ENSG00000117724_30 (sequence is synthesized)
gaagttaatgacttattacaagagaatgaacagctgatgaaggtaatgaagactaaacatgaatgtcaaaatctagaatcagaaccaattaggaactctgtgaaagaaagagagagtgag

SEQ ID NO: 224159 - DNA, 120 bp, Artificial Sequence
  ENSG00000117724_31 (sequence is synthesized)
agaaatcaatgtaattttaaacctcagatggatcttgaagttaaagaaatttctctagatagttataatgcgcagttggtgcaattagaagctatgctaagaaataaggaattaaaactt

SEQ ID NO: 224160 - DNA, 120 bp, Artificial Sequence
  ENSG00000117724_32 (sequence is synthesized)
caggaaagtgagaaggagaaggagtgcctgcagcatgaattacagacaattagaggagatcttgaaaccagcaatttgcaagacatgcagtcacaagaaattagtggccttaaagactgt

SEQ ID NO: 224161 - DNA, 120 bp, Artificial Sequence
  ENSG00000117724_33 (sequence is synthesized)
gaaatagatgcggaagaaaagtatatttcagggcctcatgagttgtcaacaagtcaaaacgacaatgcacaccttcagtgctctctgcaaacaacaatgaacaagctgaatgagctagag

SEQ ID NO: 224162 - DNA, 120 bp, Artificial Sequence
  ENSG00000117724_34 (sequence is synthesized)
aaaatatgtgaaatactgcaggctgaaaagtatgaactcgtaactgagctgaatgattcaaggtcagaatgtatcacagcaactaggaaaatggcagaagaggtagggaaactactaaat

SEQ ID NO: 224163 - DNA, 120 bp, Artificial Sequence
  ENSG00000117724_35 (sequence is synthesized)
gaagttaaaatattaaatgatgacagtggtcttctccatggtgagttagtggaagacataccaggaggtgaatttggtgaacaaccaaatgaacagcaccctgtgtctttggctccattg

SEQ ID NO: 224164 - DNA, 120 bp, Artificial Sequence
  ENSG00000117724_36 (sequence is synthesized)
gacgagagtaattcctacgagcacttgacattgtcagacaaagaagttcaaatgcactttgccgaattgcaagagaaattcttatctttacaaagtgaacacaaaattttacatgatcag

SEQ ID NO: 224165 - DNA, 120 bp, Artificial Sequence
  ENSG00000117724_37 (sequence is synthesized)
cactgtcagatgagctctaaaatgtcagagctgcagacctatgttgactcattaaaggccgaaaatttggtcttgtcaacgaatctgagaaactttcaaggtgacttggtgaaggagatg

SEQ ID NO: 224166 - DNA, 120 bp, Artificial Sequence
  ENSG00000117724_38 (sequence is synthesized)
cagctgggcttggaggaggggctcgttccatccctgtcatcctcttgtgtgcctgacagctctagtcttagcagtttgggagactcctccttttacagagctcttttagaacagacagga

SEQ ID NO: 224167 - DNA, 120 bp, Artificial Sequence
  ENSG00000117724_39 (sequence is synthesized)
gatatgtctcttttgagtaatttagaaggggctgtttcagcaaaccagtgcagtgtagatgaagtattttgcagcagtctgcaggaggagaatctgaccaggaaagaaaccccttcggcc

SEQ ID NO: 224168 - DNA, 120 bp, Artificial Sequence
  ENSG00000117724_40 (sequence is synthesized)
ccagcgaagggtgttgaagagcttgagtccctctgtgaggtgtaccggcagtccctcgagaagctagaagagaaaatggaaagtcaagggattatgaaaaataaggaaattcaagagctc

SEQ ID NO: 224169 - DNA, 120 bp, Artificial Sequence
  ENSG00000117724_41 (sequence is synthesized)
gagcagttattaagttctgaaaggcaagagcttgactgccttaggaagcagtatttgtcagaaaatgaacagtggcaacagaagctgacaagcgtgactctggagatggagtccaagttg

SEQ ID NO: 224170 - DNA, 120 bp, Artificial Sequence
  ENSG00000117724_42 (sequence is synthesized)
ttgcttggcatcgacacagaagatgctattcaaggccgaaatgagagctgtgacatatcaaaagaacatacttcagaaactacagaaagaacaccaaagcatgatgttcatcagatttgt

SEQ ID NO: 224171 - DNA, 120 bp, Artificial Sequence
  ENSG00000117724_43 (sequence is synthesized)
gataaagatgctcagcaggacctcaatctagacattgagaaaataactgagactggtgcagtgaaacccacaggagagtgctctggggaacagtccccagataccaattatgagcctcca

SEQ ID NO: 224172 - DNA, 120 bp, Artificial Sequence
  ENSG00000117724_44 (sequence is synthesized)
ggggaagataaaacccagggctcttcagaatgcatttctgaattgtcattttctggtcctaatgctttggtacctatggatttcctggggaatcaggaagatatccataatcttcaactg

SEQ ID NO: 224173 - DNA, 120 bp, Artificial Sequence
  ENSG00000117724_45 (sequence is synthesized)
cgggtaaaagagacatcaaatgagaatttgagattacttcatgtgatagaggaccgtgacagaaaagttgaaagtttgctaaatgaaatgaaagaattagactcaaaactccatttacag

SEQ ID NO: 224174 - DNA, 120 bp, Artificial Sequence
  ENSG00000117724_46 (sequence is synthesized)
gaggtacaactaatgaccaaaattgaagcatgcatagaattggaaaaaatagttggggaacttaagaaagaaaactcagatttaagtgaaaaattggaatatttttcttgtgatcaccag

SEQ ID NO: 224175 - DNA, 120 bp, Artificial Sequence
  ENSG00000117724_47 (sequence is synthesized)
gagttactccagagagtagaaacttctgaaggcctcaattctgatttagaaatgcatgcagataaatcatcacgtgaagatattggagataatgtggccaaggtgaatgacagctggaag

SEQ ID NO: 224176 - DNA, 120 bp, Artificial Sequence
  ENSG00000117724_48 (sequence is synthesized)
gagagatttcttgatgtggaaaatgagctgagtaggatcagatcggagaaagctagcattgagcatgaagccctctacctggaggctgacttagaggtagttcaaacagagaagctatgt

SEQ ID NO: 224177 - DNA, 120 bp, Artificial Sequence
  ENSG00000117724_49 (sequence is synthesized)
ttagaaaaagacaatgaaaataagcagaaggttattgtctgccttgaagaagaactctcagtggtcacaagtgagagaaaccagcttcgtggagaattagatactatgtcaaaaaaaacc

SEQ ID NO: 224178 - DNA, 120 bp, Artificial Sequence
  ENSG00000117724_50 (sequence is synthesized)
acggcactggatcagttgtctgaaaaaatgaaggagaaaacacaagagcttgagtctcatcaaagtgagtgtctccattgcattcaggtggcagaggcagaggtgaaggaaaagacggaa

SEQ ID NO: 224179 - DNA, 120 bp, Artificial Sequence
  ENSG00000117724_51 (sequence is synthesized)
ctccttcagactttgtcctctgatgtgagtgagctgttaaaagacaaaactcatctccaggaaaagctgcagagtttggaaaaggactcacaggcactgtctttgacaaaatgtgagctg

SEQ ID NO: 224180 - DNA, 120 bp, Artificial Sequence
  ENSG00000117724_52 (sequence is synthesized)
gaaaaccaaattgcacaactgaataaagagaaagaattgcttgtcaaggaatctgaaagcctgcaggccagactgagtgaatcagattatgaaaagctgaatgtctccaaggccttggag

SEQ ID NO: 224181 - DNA, 120 bp, Artificial Sequence
  ENSG00000117724_53 (sequence is synthesized)
gccgcactggtggagaaaggtgagttcgcattgaggctgagctcaacacaggaggaagtgcatcagctgagaagaggcatcgagaaactgagagttcgcattgaggccgatgaaaagaag

SEQ ID NO: 224182 - DNA, 120 bp, Artificial Sequence
  ENSG00000117724_54 (sequence is synthesized)
cagctgcacatcgcagagaaactgaaagaacgcgagcgggagaatgattcacttaaggataaagttgagaaccttgaaagggaattgcagatgtcagaagaaaaccaggagctagtgatt

SEQ ID NO: 224183 - DNA, 120 bp, Artificial Sequence
  ENSG00000117724_55 (sequence is synthesized)
cttgatgccgagaattccaaagcagaagtagagactctaaaaacacaaatagaagagatggccagaagcctgaaagtttttgaattagaccttgtcacgttaaggtctgaaaaagaaaat

SEQ ID NO: 224184 - DNA, 120 bp, Artificial Sequence
  ENSG00000117724_56 (sequence is synthesized)
ctgacaaaacaaatacaagaaaaacaaggtcagttgtcagaactagacaagttactctcttcatttaaaagtctgttagaagaaaaggagcaagcagagatacagatcaaagaagaatct

SEQ ID NO: 224185 - DNA, 120 bp, Artificial Sequence
  ENSG00000117724_57 (sequence is synthesized)
aaaactgcagtggagatgcttcagaatcagttaaaggagctaaatgaggcagtagcagccttgtgtggtgaccaagaaattatgaaggccacagaacagagtctagacccaccaatagag

SEQ ID NO: 224186 - DNA, 120 bp, Artificial Sequence
  ENSG00000117724_58 (sequence is synthesized)
gaagagcatcagctgagaaatagcattgaaaagctgagagcccgcctagaagctgatgaaaagaagcagctctgtgtcttacaacaactgaaggaaagtgagcatcatgcagatttactt

SEQ ID NO: 224187 - DNA, 120 bp, Artificial Sequence
  ENSG00000117724_59 (sequence is synthesized)
aagggtagagtggagaaccttgaaagagagctagagatagccaggacaaaccaagagcatgcagctcttgaggcagagaattccaaaggagaggtagagaccctaaaagcaaaaatagaa

SEQ ID NO: 224188 - DNA, 120 bp, Artificial Sequence
  ENSG00000117724_60 (sequence is synthesized)
gggatgacccaaagtctgagaggtctggaattagatgttgttactataaggtcagaaaaagaaaatctgacaaatgaattacaaaaagagcaagagcgaatatctgaattagaaataata

SEQ ID NO: 224189 - DNA, 120 bp, Artificial Sequence
  ENSG00000117724_61 (sequence is synthesized)
aattcatcatttgaaaatattttgcaagaaaaagagcaagagaaagtacagatgaaagaaaaatcaagcactgccatggagatgcttcaaacacaattaaaagagctcaatgagagagtg

SEQ ID NO: 224190 - DNA, 120 bp, Artificial Sequence
  ENSG00000117724_62 (sequence is synthesized)
gcagccctgcataatgaccaagaagcctgtaaggccaaagagcagaatcttagtagtcaagtagagtgtcttgaacttgagaaggctcagttgctacaaggccttgatgaggccaaaaat

SEQ ID NO: 224191 - DNA, 120 bp, Artificial Sequence
  ENSG00000117724_63 (sequence is synthesized)
aattatattgttttgcaatcttcagtgaatggcctcattcaagaagtagaagatggcaagcagaaactggagaagaaggatgaagaaatcagtagactgaaaaatcaaattcaagaccaa

SEQ ID NO: 224192 - DNA, 120 bp, Artificial Sequence
  ENSG00000117724_64 (sequence is synthesized)
gagcagcttgtctctaaactgtcccaggtggaaggagagcaccaactttggaaggagcaaaacttagaactgagaaatctgacagtggaattggagcagaagatccaagtgctacaatcc

SEQ ID NO: 224193 - DNA, 120 bp, Artificial Sequence
  ENSG00000117724_65 (sequence is synthesized)
aaaaatgcctctttgcaggacacattagaagtgctgcagagttcttacaagaatctagagaatgagcttgaattgacaaaaatggacaaaatgtcctttgttgaaaaagtaaacaaaatg

SEQ ID NO: 224194 - DNA, 120 bp, Artificial Sequence
  ENSG00000117724_66 (sequence is synthesized)
actgcaaaggaaactgagctgcagagggaaatgcatgagatggcacagaaaacagcagagctgcaagaagaactcagtggagagaaaaataggctagctggagagttgcagttactgttg

SEQ ID NO: 224195 - DNA, 120 bp, Artificial Sequence
  ENSG00000117724_67 (sequence is synthesized)
gaagaaataaagagcagcaaagatcaattgaaggagctcacactagaaaatagtgaattgaagaagagcctagattgcatgcacaaagaccaggtggaaaaggaagggaaagtgagagag

SEQ ID NO: 224196 - DNA, 120 bp, Artificial Sequence
  ENSG00000117724_68 (sequence is synthesized)
gaaatagctgaatatcagctacggcttcatgaagctgaaaagaaacaccaggctttgcttttggacacaaacaaacagtatgaagtagaaatccagacataccgagagaaattgacttct

SEQ ID NO: 224197 - DNA, 120 bp, Artificial Sequence
  ENSG00000117724_69 (sequence is synthesized)
aaagaagaatgtctcagttcacagaagctggagatagaccttttaaagtctagtaaagaagagctcaataattcattgaaagctactactcagattttggaagaattgaagaaaaccaag

SEQ ID NO: 224198 - DNA, 120 bp, Artificial Sequence
  ENSG00000117724_70 (sequence is synthesized)
atggacaatctaaaatatgtaaatcagttgaagaaggaaaatgaacgtgcccaggggaaaatgaagttgttgatcaaatcctgtaaacagctggaagaggaaaaggagatactgcagaaa

SEQ ID NO: 224199 - DNA, 120 bp, Artificial Sequence
  ENSG00000117724_71 (sequence is synthesized)
gaactctctcaacttcaagctgcacaggagaagcagaaaacaggtactgttatggataccaaggtcgatgaattaacaactgagatcaaagaactgaaagaaactcttgaagaaaaaacc

SEQ ID NO: 224200 - DNA, 120 bp, Artificial Sequence
  ENSG00000117724_72 (sequence is synthesized)
aaggaggcagatgaatacttggataagtactgttccttgcttataagccatgaaaagttagagaaagctaaagagatgttagagacacaagtggcccatctgtgttcacagcaatctaaa

SEQ ID NO: 224201 - DNA, 120 bp, Artificial Sequence
  ENSG00000117724_73 (sequence is synthesized)
caagattcccgagggtctcctttgctaggtccagttgttccaggaccatctccaatcccttctgttactgaaaagaggttatcatctggccaaaataaagcttcaggcaagaggcaaaga

SEQ ID NO: 224202 - DNA, 120 bp, Artificial Sequence
  ENSG00000117724_74 (sequence is synthesized)
tccagtggaatatgggagaatggtagaggaccaacacctgctaccccagagagcttttctaaaaaaagcaagaaagcagtcatgagtggtattcaccctgcagaagacacggaaggtact

SEQ ID NO: 224203 - DNA, 120 bp, Artificial Sequence
  ENSG00000117724_75 (sequence is synthesized)
gagtttgagccagagggacttccagaagttgtaaagaaagggtttgctgacatcccgacaggaaagactagcccatatatcctgcgaagaacaaccatggcaactcggaccagcccccgc

SEQ ID NO: 224204 - DNA, 120 bp, Artificial Sequence
  ENSG00000117724_76 (sequence is synthesized)
ctggctgcacagaagttagcgctatccccactgagtctcggcaaagaaaatcttgcagagtcctccaaaccaacagctggtggcagcagatcacaaaaggtcaaagttgctcagcggagc

SEQ ID NO: 224205 - DNA, 120 bp, Artificial Sequence
  ENSG00000117724_77 (sequence is synthesized)
ccagtagattcaggcaccatcctccgagaacccaccacgaaatccgtcccagtcaataatcttcctgagagaagtccgactgacagccccagagagggcctgagggtcaagcgaggccga

SEQ ID NO: 224206 - DNA, 120 bp, Artificial Sequence
  ENSG00000117724_78 (sequence is synthesized)
cttgtccccagccccaaagctggactggagtccaacggcagtgagaactgtaaggtccagtgaaggcactttgtgtgtcagtacccctgggaggtgccagtcattgaatagataaggctg

SEQ ID NO: 224207 - DNA, 120 bp, Artificial Sequence
  ENSG00000117724_79 (sequence is synthesized)
tgcctacaggacttctctttagtcagggcatgctttattagtgaggagaaaacaattccttagaagtcttaaatatattgtactctttagatctcccatgtgtaggtattgaaaaagttt

SEQ ID NO: 224208 - DNA, 120 bp, Artificial Sequence
  ENSG00000117724_80 (sequence is synthesized)
ggaagcactgatcacctgttagcattgccattcctctactgcaatgtaaatagtataaagctatgtatataaagctttttggtaatatgttacaattaaaatgacaagcactatatcaca

SEQ ID NO: 224209 - DNA, 120 bp, Artificial Sequence
  ENSG00000117724_81 (sequence is synthesized)
atctctgtttgtatgtgggttttacactaaaaaaatgcaaaacacattttattcttctaattaacagctcctaggaaaatgtagacttttgctttatgatattctatctgtagtatgagg

SEQ ID NO: 224210 - DNA, 120 bp, Artificial Sequence
  ENSG00000117724_82 (sequence is synthesized)
catggaatagttttgtatcgggaatttctcagagctgagtaaaatgaaggaaaagcatgttatgtgtttttaaggaaaatgtgcacacatatacatgtaggagtgtttatctttctctta

SEQ ID NO: 224211 - DNA, 120 bp, Artificial Sequence
  ENSG00000117724_83 (sequence is synthesized)
caatctgttttagacatctttgcttatgaaacctgtacatatgtgtgtgtgggtatgtgtttatttccagtgagggctgcaggcttcctagaggtgtgctataccatgcgtctgtcgttg

SEQ ID NO: 224212 - DNA, 120 bp, Artificial Sequence
  ENSG00000117724_84 (sequence is synthesized)
tgcttttttctgtttttagaccaattttttacagttctttggtaagcattgtcgtatctggtgatggattaacatatagcctttgttttctaataaaatagtcgccttcgttttctgtaa

SEQ ID NO: 224213 - DNA, 120 bp, Artificial Sequence
  ENSG00000117724_85 (sequence is synthesized)
gaccgaactggagaatccgccccgggatgtggttcgtaggggtgtctgcgcccttctgctcgggttcaaactggtctcggattagtgtcccagaccctactcggtcacggactcacactt

SEQ ID NO: 224214 - DNA, 120 bp, Artificial Sequence
  ENSG00000117724_86 (sequence is synthesized)
atatacaaacagaaaattaggtacaaatttattatgtttatggctcttatacaactatcaaggtaaaggaaatttaccaattaaatacaaagtagtaaaattcaaaatcacaataattaa

SEQ ID NO: 224215 - DNA, 120 bp, Artificial Sequence
  ENSG00000117724_87 (sequence is synthesized)
taatgttctgctgctacaaaatgagatgttgggtttaataatagaaggaagtagcactgttgaaatagaattaaatgggtcttgaattcatttgtgattggaatcagaagtcgcaagttc

SEQ ID NO: 224216 - DNA, 120 bp, Artificial Sequence
  ENSG00000117724_88 (sequence is synthesized)
tgaaagggtaaggtttactgcaacattgctaataaataatttcaagatgaaatatacaaagatgagatccaagctctaacatttacttgcaacatgaatatggtactgtgttcttctccg

SEQ ID NO: 224217 - DNA, 120 bp, Artificial Sequence
  ENSG00000117724_89 (sequence is synthesized)
tcccccatcctcattccccctcctcctcctgctgctgtttggtcttcctttggaaattcatgatgccatatcagatggttttagaattctgcactttaataatgtaatgcatatgccata

SEQ ID NO: 224218 - DNA, 120 bp, Artificial Sequence
  ENSG00000117724_90 (sequence is synthesized)
tataatatcccagagggatctgctataatattgcataatcgaattcatatttctgcagcaaaatgtgtggatactctcacaaggcaggataaatagagactatatatactgggccaggtg

SEQ ID NO: 224219 - DNA, 120 bp, Artificial Sequence
  ENSG00000117724_91 (sequence is synthesized)
tattaatcagatgcgtttgtcttttcctttaacaatataattattatactttgcaattttttttcctggtagaataagtaatgattcggtctctgtaccgtaacttgaaagagtggaaga

SEQ ID NO: 224220 - DNA, 120 bp, Artificial Sequence
  ENSG00000117748_0 (sequence is synthesized)
attcgcgggaaggcgtttgtggtgccagagaaaagtagccagagcggcgcagtggcggccgcgttctgtggttttccgctattcccccagacccgcaccttctcggcctctttgcggaga

SEQ ID NO: 224221 - DNA, 120 bp, Artificial Sequence
  ENSG00000117748_1 (sequence is synthesized)
atcgtgaccaagatgtggaacagtggattcgaaagctatggcagctcctcatacgggggagccggcggctacacgcagtccccggggggctttggatcgcccgcaccttctcaagccgaa

SEQ ID NO: 224222 - DNA, 120 bp, Artificial Sequence
  ENSG00000117748_2 (sequence is synthesized)
aagaaatcaagagcccgagcccagcacattgtgccctgtactatatctcagctgctttctgccactttggttgatgaagtgttcagaattgggaatgttgagatttcacaggtcactatt

SEQ ID NO: 224223 - DNA, 120 bp, Artificial Sequence
  ENSG00000117748_3 (sequence is synthesized)
gtggggatcatcagacatgcagagaaggctccaaccaacattgtttacaaaatagatgacatgacagctgcacccatggacgttcgccagtgggttgacacagatgacaccagcagtgaa

SEQ ID NO: 224224 - DNA, 120 bp, Artificial Sequence
  ENSG00000117748_4 (sequence is synthesized)
aacactgtggttcctccagaaacatatgtgaaagtggcaggccacctgagatcttttcagaacaaaaagagcctggtagcctttaagatcatgcccctggaggatatgaatgagttcacc

SEQ ID NO: 224225 - DNA, 120 bp, Artificial Sequence
  ENSG00000117748_5 (sequence is synthesized)
acacatattctggaagtgatcaatgcacacatggtactaagcaaagccaacagccagccctcagcagggagagcacctatcagcaatccaggaatgagtgaagcagggaactttggtggg

SEQ ID NO: 224226 - DNA, 120 bp, Artificial Sequence
  ENSG00000117748_6 (sequence is synthesized)
ctcactgtggcccaaaaccaggtgttgaatttgattaaggcttgtccaagacctgaagggttgaactttcaggatctcaagaaccagctgaaacacatgtctgtatcctcaatcaagcaa

SEQ ID NO: 224227 - DNA, 120 bp, Artificial Sequence
  ENSG00000117748_7 (sequence is synthesized)
gctgtggattttctgagcaatgaggggcacatctattctactgtggatgatgaccattttaaatccacagatgcagaataactggatctaactgggtacctgagatattttacagctgga

SEQ ID NO: 224228 - DNA, 120 bp, Artificial Sequence
  ENSG00000117748_8 (sequence is synthesized)
cctagtttcacaatctgttgtctccagctctgcatatgtctggccagggggcttctaggaagtaggtttcatctatcaaatgtctcctctgacttccttttgaaacttactgctcttctg

SEQ ID NO: 224229 - DNA, 120 bp, Artificial Sequence
  ENSG00000117748_9 (sequence is synthesized)
ttttattttgttttgtttgaagctcagagggagatgggcaattgacagggatgcaatccagggtgggatttcttgaggaagttacaaataagcttgttacaacatcaagatagatggaat

SEQ ID NO: 224230 - DNA, 120 bp, Artificial Sequence
  ENSG00000117748_10 (sequence is synthesized)
tggaaggatgctaccaggagagtacttacatagtgctcaggagtttctcttcttaaaatgtttactgctgaaagatgagcaggaccagggcgttataggcagagccctagccgagaaacc

SEQ ID NO: 224231 - DNA, 120 bp, Artificial Sequence
  ENSG00000117748_11 (sequence is synthesized)
tgctggcctctgcctgttttcatttcccactttggttgtgtggcattactttcagaattgcactttcctgcttgtcatgactttttgacacacttgccatgacgtgtgtttctgtgaaca

SEQ ID NO: 224232 - DNA, 120 bp, Artificial Sequence
  ENSG00000117748_12 (sequence is synthesized)
tgaagttctgcggtagtgcctccaggggcagaggaaaagaagaagtgttactgcattttgtacaaaataaatacagtcatatgtttaataaaacagttctattgtagtaacttgtaaaaa

SEQ ID NO: 224233 - DNA, 120 bp, Artificial Sequence
  ENSG00000117748_13 (sequence is synthesized)
gctagtgcggagggttttgcccttcgtaaagatggccgcggaggcttttggagccaactgggagcgcagtacgcgttttctggagcatgggcagaggagacaggaacaagcgtagcatcc

SEQ ID NO: 224234 - DNA, 120 bp, Artificial Sequence
  ENSG00000117748_14 (sequence is synthesized)
gttctgtggttttccgctattcccccagacccgcaccttctcggcctctttgcggagaatcgtgaccaagatgtggaacagtaatgatgggggtgcggggtggaggaggaagagaatcgc

SEQ ID NO: 224235 - DNA, 120 bp, Artificial Sequence
  ENSG00000117748_15 (sequence is synthesized)
aggaggttttagcaagagggcgagcctagggtccgagaggcgtgtggtagcgggagaggaagggcgggagcggagctggggcgtttgggggtcacccgcaggaaggcggcgaggaaggtt

SEQ ID NO: 224236 - DNA, 120 bp, Artificial Sequence
  ENSG00000117748_16 (sequence is synthesized)
agggagactcgggcagtgtttgaaggggcgaagcctccgggagcctgcgggtttctcggaggcgtgggacgtggcacaggcactaatcctgttgttcaaaacaggtggattcgaaagcta

SEQ ID NO: 224237 - DNA, 120 bp, Artificial Sequence
  ENSG00000117751_0 (sequence is synthesized)
cttccagtttcccggcgtgcttagggcgcgccaaatgggagggggagacgcaagatggcggcagccgcgaactccggctctagcctcccgctgttcgactgcccaacctgggcaggtaag

SEQ ID NO: 224238 - DNA, 120 bp, Artificial Sequence
  ENSG00000117751_1 (sequence is synthesized)
ccccctcccggtttacatctggatgtagtcaaaggagacaaactaattgagaaactgattattgatgagaagaagtattacttatttgggagaaaccctgatttgtgtgactttaccatt

SEQ ID NO: 224239 - DNA, 120 bp, Artificial Sequence
  ENSG00000117751_2 (sequence is synthesized)
gaccaccagtcttgctctcgggtccatgctgcacttgtctaccacaagcatctgaagagagttttcctgatagatctcaacagtacacacggcactttcttgggtcacattcggttggaa

SEQ ID NO: 224240 - DNA, 120 bp, Artificial Sequence
  ENSG00000117751_3 (sequence is synthesized)
cctcacaagcctcagcaaattcccatcgattccacggtctcatttggcgcatccacaagggcatacactctgcgcgagaagcctcagacattgccatcggctgtgaaaggagatgagaag

SEQ ID NO: 224241 - DNA, 120 bp, Artificial Sequence
  ENSG00000117751_4 (sequence is synthesized)
atgggtggagaggatgatgaactcaagggcttactggggcttccagaggaggaaactgagcttgataacctgacagagttcaacactgcccacaacaagcggatttctacccttaccatt

SEQ ID NO: 224242 - DNA, 120 bp, Artificial Sequence
  ENSG00000117751_5 (sequence is synthesized)
gaggagggaaatctggacattcaaagaccaaagaggaagaggaagaactcacgggtgacattcagtgaggatgatgagatcatcaacccagaggatgtggatccctcagttggtcgattc

SEQ ID NO: 224243 - DNA, 120 bp, Artificial Sequence
  ENSG00000117751_6 (sequence is synthesized)
aggaacatggtgcaaactgcagtggtcccagtcaagaagaagcgtgtggagggccctggctccctgggcctggaggaatcagggagcaggcgcatgcagaactttgccttcagcggagga

SEQ ID NO: 224244 - DNA, 120 bp, Artificial Sequence
  ENSG00000117751_7 (sequence is synthesized)
ctctacgggggcctgccccccacacacagtgaagcaggctcccagccacatggcatccatgggacagcactcatcggtggcttgcccatgccatacccaaaccttgcccctgatgtggac

SEQ ID NO: 224245 - DNA, 120 bp, Artificial Sequence
  ENSG00000117751_8 (sequence is synthesized)
ttgactcctgttgtgccgtcagcagtgaacatgaaccctgcaccaaaccctgcagtctataaccctgaagctgtaaatgaacccaagaagaagaaatatgcaaaagaggcttggccaggc

SEQ ID NO: 224246 - DNA, 120 bp, Artificial Sequence
  ENSG00000117751_9 (sequence is synthesized)
ggtgggaatggggtggaagggtgatggggagctaatgaactagggagaaaaactttccatgtgtgcggtatcgtctttcagaatgtctcctggcatcctaaccatgtaatatgacaattg

SEQ ID NO: 224247 - DNA, 120 bp, Artificial Sequence
  ENSG00000117751_10 (sequence is synthesized)
ggggtggggttgaaatagcccataaagacctgtcttcacaacacttgcattgtagagaaaggcttcttatatccttttcaatagactgccctggctctttcctaggccttccactacctc

SEQ ID NO: 224248 - DNA, 120 bp, Artificial Sequence
  ENSG00000117751_11 (sequence is synthesized)
ctttctttctcccactttctaggatcatttttatgtaaagtcacatatcccaggccctcaggttgaatccagagctgtagaggttacagtagcatcaccagccttgggggtccagagcct

SEQ ID NO: 224249 - DNA, 120 bp, Artificial Sequence
  ENSG00000117751_12 (sequence is synthesized)
aatttatattcactatccttccaagtcccgggtagcagaagggttgccatagatctcagtttgatcaaaaagaaggcttagaattctgcagttaagctgaggtttaaactaaaaaatgtt

SEQ ID NO: 224250 - DNA, 120 bp, Artificial Sequence
  ENSG00000117751_13 (sequence is synthesized)
tccttgggtcagtggttttgaggtccagtagctaggcttttctcttttgtccttcctgttggaatgaaaacatttcgattttccttcatctgtgactggtgccatagacacaggtttata

SEQ ID NO: 224251 - DNA, 120 bp, Artificial Sequence
  ENSG00000117751_14 (sequence is synthesized)
gttttaacttacagtattgtttgaaatttacctgtttttcttgtcaaacctgagcactcctcctgctgaagtttcttatttaattccagagtactgtcctctactctaaggcattacttt

SEQ ID NO: 224252 - DNA, 120 bp, Artificial Sequence
  ENSG00000117751_15 (sequence is synthesized)
taagtgtattatgaaggcagttttcaaaggatatgaccagttggggtaattcaaattaaaaaggaaaagatttgtttggaagtaactggtgtctctaagaggaatttttagatgtcagtt

SEQ ID NO: 224253 - DNA, 120 bp, Artificial Sequence
  ENSG00000117751_16 (sequence is synthesized)
tggaggctctttcccccctcaattgagagctcttgttattcagagctccaagactagacctggctaacaaacataggagacaaagttaggaaacattgatacaagctttgtacagagatt

SEQ ID NO: 224254 - DNA, 120 bp, Artificial Sequence
  ENSG00000117751_17 (sequence is synthesized)
tgtacatttgtgtaataggccttttcatgctttatgtgtagctttttacctgtaacctttattacattgtaaattaaacgtaacttttgtcatttgggtgcaggctgtgaatttgtctct

SEQ ID NO: 224255 - DNA, 120 bp, Artificial Sequence
  ENSG00000117751_18 (sequence is synthesized)
cagtcactgattgccactgccatctggaaatgtttgctaaaggcacagtcactgggcttgggaggcaatgctccatccccattatattacaaataaagatgccctaaatgagtgtggaaa

SEQ ID NO: 224256 - DNA, 120 bp, Artificial Sequence
  ENSG00000117751_19 (sequence is synthesized)
gggggagacgcaagatggcggcagccgcgaactccggctctagcctcccgctgttcgactgcccaacctggtgagtggcggggcggccagggctagagtggcccggccggagctagcctg

SEQ ID NO: 224257 - DNA, 120 bp, Artificial Sequence
  ENSG00000117751_20 (sequence is synthesized)
ggctggaagggcggctctttttttacttttctgctgcgagccgaacggctcagaaaccccggaatggttgaggaaaaactgtttgctgcaccgggccgggcgacgtgttgaagaaccgag

SEQ ID NO: 224258 - DNA, 120 bp, Artificial Sequence
  ENSG00000117751_21 (sequence is synthesized)
agcctggagcccaggcccaggaactgaagaaacccggggttgggggctcaaaggcgctcacttaggcagcccctttgagcgattagccagtcgccggagcgcttcgaggccttggcccga

SEQ ID NO: 224259 - DNA, 120 bp, Artificial Sequence
  ENSG00000117758_0 (sequence is synthesized)
cccagtttctccgtcagcctgcgggtcccggctggcggctgcttccggtaggagagcggtgtagagcgagcaggtctcagctcctcgtcatgtcatacggtcccttagacatgtaccgga

SEQ ID NO: 224260 - DNA, 120 bp, Artificial Sequence
  ENSG00000117758_1 (sequence is synthesized)
acccggggccctcggggccccagctccgggacttcagcagcatcatccagacgtgcagcggcaacatccagcggatcagccaagccactgctcagataaagaatttgatgagccagctag

SEQ ID NO: 224261 - DNA, 120 bp, Artificial Sequence
  ENSG00000117758_2 (sequence is synthesized)
gaactaagcaggactcaagcaagctacaggaaaatctgcaacagttacaacactccacaaatcagctcgccaaggaaacaaatgaattgctgaaagaattagggtccttgccccttccct

SEQ ID NO: 224262 - DNA, 120 bp, Artificial Sequence
  ENSG00000117758_3 (sequence is synthesized)
tatctacttcagaacagcgccagcagagacttcagaaggaacgcctcatgaatgacttctctgcagccttaaacaatttccaggctgtgcagagaagggtatctgaaaaggaaaaggaga

SEQ ID NO: 224263 - DNA, 120 bp, Artificial Sequence
  ENSG00000117758_4 (sequence is synthesized)
gtattgccagagcaagagctggatctcgtctttctgcagaagagaggcaaagagaggagcagctggtctcatttgacagccatgaggagtggaaccagatgcagagccaggaggatgagg

SEQ ID NO: 224264 - DNA, 120 bp, Artificial Sequence
  ENSG00000117758_5 (sequence is synthesized)
tggccatcactgagcaggatttggaacttattaaagaaagagaaacggcaattcggcagctggaggctgacattttggatgtcaatcagatatttaaagatttggccatgatgatccatg

SEQ ID NO: 224265 - DNA, 120 bp, Artificial Sequence
  ENSG00000117758_6 (sequence is synthesized)
accagggtgatctgattgatagcatagaagccaatgtggaaagctcagaggtgcacgtcgaaagagccactgaacagttacagcgagctgcttactatcagaaaaaatctcgcaagaaga

SEQ ID NO: 224266 - DNA, 120 bp, Artificial Sequence
  ENSG00000117758_7 (sequence is synthesized)
tgtgtatcctggtgcttgtcctgtcagtgattattctaatcttgggacttattatctggctagtttataaaacgaagtgattgcctccgatcgttctcccgctgagctgttttcaagggc

SEQ ID NO: 224267 - DNA, 120 bp, Artificial Sequence
  ENSG00000117758_8 (sequence is synthesized)
aagtgcttgttgaagtcttgccagaacaaactgatcacaagaagacagcatatatcagaacgtcctgtaatcatttagttagaaactaactactaactagtctttggaattcgtgaccta

SEQ ID NO: 224268 - DNA, 120 bp, Artificial Sequence
  ENSG00000117758_9 (sequence is synthesized)
tggagacagtaattatcaatttattgattctattgatttctcaaattaggaattaacttatgtggattttgcttcctcttgtattctgattgcccttcatcccaagtgtttactgaaaat

SEQ ID NO: 224269 - DNA, 120 bp, Artificial Sequence
  ENSG00000117758_10 (sequence is synthesized)
tccattctagatattcttgttttgacaaatgacactacagtctcgtaatattgtcttttatgtatatacaaaatttacctttttactagcatctgagatagagttactttctggtaccca

SEQ ID NO: 224270 - DNA, 120 bp, Artificial Sequence
  ENSG00000117758_11 (sequence is synthesized)
gtatattggagtctgtcagaaactctataataggccaccagtttttattatttaacatttttatttgaatttctaagaagcctattctctatctattttgaaagattttggcactatatt

SEQ ID NO: 224271 - DNA, 120 bp, Artificial Sequence
  ENSG00000117758_12 (sequence is synthesized)
gagtaaatgagaagtctctatctgagctggtcagttactggagtacatgttactaatctgggtttaaagtttacttcattatctgctagtgtcatccacagcagttcatcctcatccaca

SEQ ID NO: 224272 - DNA, 120 bp, Artificial Sequence
  ENSG00000117758_13 (sequence is synthesized)
ctaagccatcctgttagcttttaaaggaagttaatttaattaacattaatatactctatgggctccctctcccacctgtctgcatagaaaggcagaattagacatagcatgctttggaaa

SEQ ID NO: 224273 - DNA, 120 bp, Artificial Sequence
  ENSG00000117758_14 (sequence is synthesized)
agcaaataggaattgttgggaatgatttaatcttgttgttgttgttgttgttgttcacttgtggttctacattcctggtgaatgatgaatgttgctgtcaaagggctgccccctacctta

SEQ ID NO: 224274 - DNA, 120 bp, Artificial Sequence
  ENSG00000117758_15 (sequence is synthesized)
taagggttgctgggcatttgaaggcaggaagatttttaaagatagattgaggttggtttaaaattattcctgtaaaccaacaataaagcaaagaagaggttcatttttgtaaataacact

SEQ ID NO: 224275 - DNA, 120 bp, Artificial Sequence
  ENSG00000117758_16 (sequence is synthesized)
ggtttcaaatagtgatgttagacttaacctaatttataaacaagagattaatatctccatgcatagttttagacaaaaaaagatgtttcaataaaattactgtcttgtaatataaatgtt

SEQ ID NO: 224276 - DNA, 120 bp, Artificial Sequence
  ENSG00000117758_17 (sequence is synthesized)
gtccacttcccttttccacaggcctagaacagttaaagggaacataatttgtttaggctcccacataaatgtgaatctggccaacaactttggttcatcctttagtgaattagaggattt

SEQ ID NO: 224277 - DNA, 120 bp, Artificial Sequence
  ENSG00000117758_18 (sequence is synthesized)
ggctaccctgagtatatttatattcatttcttctgttctccttctgttattatacttaatcttctaaactaaactaatgtgaacagtagggaagcaagggcccaaatgcataagtttctt

SEQ ID NO: 224278 - DNA, 120 bp, Artificial Sequence
  ENSG00000117758_19 (sequence is synthesized)
tgcactgttgcacttacttaatacaaataaatgttttttaaagcttttgtagtatgtttttatgagttaacatcctaatgtggtaggtattaggtaatgtgctgtcatgagaaaaattga

SEQ ID NO: 224279 - DNA, 120 bp, Artificial Sequence
  ENSG00000117758_20 (sequence is synthesized)
gacttccaagaaaactggacaccaggtgagggttggtttggagacggaataggtgtagctgcctttccttgaaaaacagtgtgtagagatggctgagtgcaatggctcacacttgtaatc

SEQ ID NO: 224280 - DNA, 120 bp, Artificial Sequence
  ENSG00000117758_21 (sequence is synthesized)
ccaacactttggaaggctgaggcgggaggatcagtatatcggtacgtctgagcccaagagttcaagatcagcctgggcagtatagcaagaccccatctccattttttttttaatgatttt

SEQ ID NO: 224281 - DNA, 120 bp, Artificial Sequence
  ENSG00000117758_22 (sequence is synthesized)
ttaattaaaaaaaagaacaacaggatagagctgttggggtggcacagtggcccaaagagcagcttcagagataattccttggttctatgatccctgtttaactccaaattacagtcggac

SEQ ID NO: 224282 - DNA, 120 bp, Artificial Sequence
  ENSG00000117758_23 (sequence is synthesized)
ttggatacatcatttgtaacattgtaggaaagaaaaaagtcttggttgtgaaaaacgatttgcatttgggtaaaataaagtgaccatgcttttgttctgtaatactgtgtgacctgtggt

SEQ ID NO: 224283 - DNA, 120 bp, Artificial Sequence
  ENSG00000117758_24 (sequence is synthesized)
tgttgtaatggtgatcatggagagcaaatatgaacttggcctggattttaaatggcctagaatttgtggtagttgccaaagaggttctcctaggtggtcttaataaacctattcacagaa

SEQ ID NO: 224284 - DNA, 120 bp, Artificial Sequence
  ENSG00000117758_25 (sequence is synthesized)
cttgcaagtttatctacctccccctaaattttaaaatattttattgttgttatttttatttttagccctttctcctacgcatattattctccaccctgttcagtatggtttctgttcagg

SEQ ID NO: 224285 - DNA, 120 bp, Artificial Sequence
  ENSG00000117758_26 (sequence is synthesized)
atcttacagattctgtgggtgtcaaaggatgttgcttctttatactgtgctaaggaagcccttgttttgtgtgtctgtgatgtgtttctggatgacagcagcaataataccatctacttt

SEQ ID NO: 224286 - DNA, 120 bp, Artificial Sequence
  ENSG00000117758_27 (sequence is synthesized)
ctaggcagaagagaggcaaagagaggagcagctggtctcatttgacagccatgaggagtggaaccagatgcagagccaggaggatgaggtggccatcactgagcaggatttggaacttat

SEQ ID NO: 224287 - DNA, 120 bp, Artificial Sequence
  ENSG00000117758_28 (sequence is synthesized)
tggatctcgtctttctgtaagttgattcccaaaagaagacctttgcaatatcagaatgttcttttccaagtttgtgggtttttttctttttctctttgaccaataaacatgtaagttagc

SEQ ID NO: 224288 - DNA, 120 bp, Artificial Sequence
  ENSG00000117758_29 (sequence is synthesized)
tgctgtgaaaatggcaggttggtgtaacctatgtaaaaaacatatatgcatgtgatcaaagcctagaaaggaatctgaatgaaggttaagagatataggaggaagaactatgtctaattt

SEQ ID NO: 224289 - DNA, 120 bp, Artificial Sequence
  ENSG00000117758_30 (sequence is synthesized)
ggactggagccctgccatgaggagtggaaccagatgcagagccaggaggatgaggtggccatcactgagcaggatttggaacttattaaagaaagagaaacggcaattcggcagctggag

SEQ ID NO: 224290 - DNA, 79 bp, Artificial Sequence
  ENSG00000117758_31 (sequence is synthesized)
tgagttgatagtatttgaagcaccatctaggagtttgaagccaacctgggcaacataatgagaatttgtctcttaaaaa

SEQ ID NO: 224291 - DNA, 120 bp, Artificial Sequence
  ENSG00000117791_0 (sequence is synthesized)
cattaccgcgcaggcttggtcaccgcattaaggcattcccgctctccgcggaactgctctgccgtctcggcggtgaaagtgtgagagggtccgtagttgggtcaactttgactcctctcg

SEQ ID NO: 224292 - DNA, 120 bp, Artificial Sequence
  ENSG00000117791_1 (sequence is synthesized)
cctgcccggatccttaagggcctcctcgtcctcccggtctccggtcgctgccgggtctgtgcgccggtccgcgcccgccctcgctctgccatgggcgcttccagctcctccgcgctggcc

SEQ ID NO: 224293 - DNA, 120 bp, Artificial Sequence
  ENSG00000117791_2 (sequence is synthesized)
ctcggggtcgccgcgctaggactggccgccgtggccctggggactgtcgcctggcgccgcgcatggcccaggcggcgccggcggctgcagcaggtgggcaccgtggcgaagctctggatc

SEQ ID NO: 224294 - DNA, 120 bp, Artificial Sequence
  ENSG00000117791_3 (sequence is synthesized)
ctgcagcaggtgggcaccgtggcgaagctctggatctacccggtgaaatcctgcaaaggggtgccggtgagcgaggctgagtgcacggccatggggctgcgcagcggcaacctgcgggac

SEQ ID NO: 224295 - DNA, 120 bp, Artificial Sequence
  ENSG00000117791_4 (sequence is synthesized)
aggttttggctggtgattaaggaagatggacacatggtcactgcccgacaggagcctcgcctcgtgctcatctccatcatttatgagaataactgcctgatcttcagggctccagacatg

SEQ ID NO: 224296 - DNA, 120 bp, Artificial Sequence
  ENSG00000117791_5 (sequence is synthesized)
gaccagctggttttgcctagcaagcagccttcctcaaacaaactccacaactgcaggatatttggccttgacattaaaggcagagactgtggcaatgaggcagctaagtggttcaccaac

SEQ ID NO: 224297 - DNA, 120 bp, Artificial Sequence
  ENSG00000117791_6 (sequence is synthesized)
ttcttgaaaactgaagcgtatagattggttcaatttgagacaaacatgaagggaagaacatcaagaaaacttctccccactcttgatcagaatttccaggtggcctacccagactactgc

SEQ ID NO: 224298 - DNA, 120 bp, Artificial Sequence
  ENSG00000117791_7 (sequence is synthesized)
ccgctcctgatcatgacagatgcctccctggtagatttgaataccaggatggagaagaaaatgaaaatggagaatttcaggccaaatattgtggtgaccggctgtgatgcttttgaggag

SEQ ID NO: 224299 - DNA, 120 bp, Artificial Sequence
  ENSG00000117791_8 (sequence is synthesized)
ggaaacagccactggacaccctgaagagctaccgcctgtgtgatccttctgagagggaattgtacaagttgtctccactttttgggatctattattcagtggaaaaaattggaagcctga

SEQ ID NO: 224300 - DNA, 120 bp, Artificial Sequence
  ENSG00000117791_9 (sequence is synthesized)
gagttggtgaccctgtgtatcggatggtgtagtgatgagtgatggatccactagggtgatatggcttcagcaaccaggagggattgactgagatcttaacaacagcagcaacgatacatc

SEQ ID NO: 224301 - DNA, 120 bp, Artificial Sequence
  ENSG00000117791_10 (sequence is synthesized)
agcaaatccttattatccagccttcaactatctttaccctggaaaacaatctcgatttttgacttttcaaagttgtgtatgctccaggttaatgcaaggaaagtattagaggggggaata

SEQ ID NO: 224302 - DNA, 120 bp, Artificial Sequence
  ENSG00000117791_11 (sequence is synthesized)
tgaaagtatatatataaattttaggtactgaaggctttaaaaataattaagatcatcaaaaatgctattttgaatgttatcatggctattacacttttacttcctgactttaatattgat

SEQ ID NO: 224303 - DNA, 120 bp, Artificial Sequence
  ENSG00000117791_12 (sequence is synthesized)
gaataaagcaagtttaatgaatcaactaaaaagctgcaaaaatgtttttaaaatgtgtgccttttattacctatcagtctatgttttgggagaaatgggaagcaacagatcactgtgtcc

SEQ ID NO: 224304 - DNA, 120 bp, Artificial Sequence
  ENSG00000117791_13 (sequence is synthesized)
tgatgtgcaggacgcatgttaccacactcacaaatgcctaatattggtctttatgtggccattgagtcctgttgactttccactcatgtgctttttactctagcattatggaatctgggc

SEQ ID NO: 224305 - DNA, 120 bp, Artificial Sequence
  ENSG00000117791_14 (sequence is synthesized)
tgtacttgagtatggaaattctcttatagacttagttttagtactctattacacctttactaagccacataaaagtaatctgtttgtgtgtaactgccagatataccacctggaattcca

SEQ ID NO: 224306 - DNA, 120 bp, Artificial Sequence
  ENSG00000117791_15 (sequence is synthesized)
agtaagataaggaagaggatgacatttaaaagagaatggaattttgagagtaggaatgcaaggaagacagcatgaacatatttttttcagtgcaaataattttttcgtaacaaagaaacg

SEQ ID NO: 224307 - DNA, 120 bp, Artificial Sequence
  ENSG00000117791_16 (sequence is synthesized)
aacaactttggtatgatcttaagcaaaaatactcactgaaatagtatgtggatgaattcacctacttacaattttatggtttctttgtaaataataaatgtgaatctcaatcctgcttta

SEQ ID NO: 224308 - DNA, 120 bp, Artificial Sequence
  ENSG00000117791_17 (sequence is synthesized)
gccgcggttttggctggtgattaaggaagatggacacatggtcactgcccgacaggagcctcgcctcgtgctcatctccatcatttatgagaataactgcctgatcttcagggctccaga

SEQ ID NO: 224309 - DNA, 120 bp, Artificial Sequence
  ENSG00000117791_18 (sequence is synthesized)
agactcaaaggctaatgaagccaccatttaaaagataactttctcttttctcttaggatacctgggatgaactcctaattggtagtgtagaagtgaaaaaggtaatggcatgccccaggt

SEQ ID NO: 224310 - DNA, 120 bp, Artificial Sequence
  ENSG00000117791_19 (sequence is synthesized)
aaggagcctagctagaccccaggactgtggtgtggcccattcattggttcctaagcatcacctaacccttggttactgcataacaggtgtattttgacaacggtggacccagacactgga

SEQ ID NO: 224311 - DNA, 120 bp, Artificial Sequence
  ENSG00000117791_20 (sequence is synthesized)
ccagggctcagaggggagcctcagattactccgtgaactctcatcttacgctttttcaagcaaagcgtctaagctgaaatccacaactcatggttcccaattttcaaaagtctgaagcaa

SEQ ID NO: 224312 - DNA, 120 bp, Artificial Sequence
  ENSG00000117791_21 (sequence is synthesized)
ttcagtatttcaggatatttggccttgacattaaaggcagagactgtggcaatgaggcagctaagtggttcaccaacttcttgaaaactgaagcgtatagattggttcaatttgagacaa

SEQ ID NO: 224313 - DNA, 120 bp, Artificial Sequence
  ENSG00000117834_0 (sequence is synthesized)
atgaagccaggagcgcctcaaagtccagcctgctgttgaccaacactaacagatgagcaaggagctggcagcaatggggcctggagcttcaggggacggggtcaggactgagacagctcc

SEQ ID NO: 224314 - DNA, 120 bp, Artificial Sequence
  ENSG00000117834_1 (sequence is synthesized)
acacatagcactggactccagagttggtctgcacgcctacgacatcagcgtggtggtcatctactttgtcttcgtcattgctgtggggatctggtcgtccatccgtgcaagtcgagggac

SEQ ID NO: 224315 - DNA, 120 bp, Artificial Sequence
  ENSG00000117834_2 (sequence is synthesized)
cattggcggctatttcctggccgggaggtccatgagctggtggccaattggagcatctctgatgtccagcaatgtgggcagtggcttgttcatcggcctggctgggacaggggctgccgg

SEQ ID NO: 224316 - DNA, 120 bp, Artificial Sequence
  ENSG00000117834_3 (sequence is synthesized)
aggccttgccgtaggtggcttcgagtggaacgcaacctggctgctcctggcccttggctgggtcttcgtccctgtgtacatcgcagcaggtgtggtcacaatgccgcagtatctgaagaa

SEQ ID NO: 224317 - DNA, 120 bp, Artificial Sequence
  ENSG00000117834_4 (sequence is synthesized)
gcgatttgggggccagaggatccaggtgtacatgtctgtcctgtctctcatcctctacatcttcaccaagatctcgactgacatcttctctggagccctcttcatccagatggcattggg

SEQ ID NO: 224318 - DNA, 120 bp, Artificial Sequence
  ENSG00000117834_5 (sequence is synthesized)
ctggaacctgtacctctccacagggatcctgctggtggtgactgccgtctacaccattgcaggtggcctcatggccgtgatctacacagatgctctgcagacggtgatcatggtaggggg

SEQ ID NO: 224319 - DNA, 120 bp, Artificial Sequence
  ENSG00000117834_6 (sequence is synthesized)
agccctggtcctcatgtttctgggctttcaggacgtgggctggtacccaggcctggagcagcggtacaggcaggccatccctaatgtcacagtccccaacaccacctgtcacctcccacg

SEQ ID NO: 224320 - DNA, 120 bp, Artificial Sequence
  ENSG00000117834_7 (sequence is synthesized)
gcccgatgctttccacattcttcgggaccctgtgagcggggacatcccttggccaggtctcattttcgggctcacagtgctggccacctggtgttggtgcacagaccaggtcattgtgca

SEQ ID NO: 224321 - DNA, 120 bp, Artificial Sequence
  ENSG00000117834_8 (sequence is synthesized)
gcggtctctctcggccaagagtctgtctcatgccaagggaggctccgtgctggggggctacctgaagatcctccccatgttcttcatcgtcatgcctggcatgatcagccgggccctgtt

SEQ ID NO: 224322 - DNA, 120 bp, Artificial Sequence
  ENSG00000117834_9 (sequence is synthesized)
cccagacgaggtgggctgcgtggaccctgatgtctgccaaagaatctgtggggcccgagtgggatgttccaacattgcctaccctaagttggtcatggccctcatgcctgttggtctgcg

SEQ ID NO: 224323 - DNA, 120 bp, Artificial Sequence
  ENSG00000117834_10 (sequence is synthesized)
ggggctgatgattgccgtgatcatggccgctctcatgagctcactcacctccatcttcaacagcagcagcaccctgttcaccattgatgtgtggcagcgcttccgcaggaagtcaacaga

SEQ ID NO: 224324 - DNA, 120 bp, Artificial Sequence
  ENSG00000117834_11 (sequence is synthesized)
gcaggagctgatggtggtgggcagagtgtttgtggtgttcctggttgtcatcagcatcctctggatccccatcatccaaagctccaacagtgggcagctcttcgactacatccaggctgt

SEQ ID NO: 224325 - DNA, 120 bp, Artificial Sequence
  ENSG00000117834_12 (sequence is synthesized)
caccagttacctggccccacccatcaccgctctcttcctgctggccatcttctgcaagagggtcacagagcccggagctttctggggcctcgtgtttggcctgggagtggggcttctgcg

SEQ ID NO: 224326 - DNA, 120 bp, Artificial Sequence
  ENSG00000117834_13 (sequence is synthesized)
ccactacctgtactttgcaatcctcctctgcgggctcactgccatcgtcattgtcattgtcagcctctgtacaactcccatccctgaggaacagctcacacgcctcacatggtggactcg

SEQ ID NO: 224327 - DNA, 120 bp, Artificial Sequence
  ENSG00000117834_14 (sequence is synthesized)
gaactgccccctctctgagctggagaaggaggcccacgagagcacaccggagatatccgagaggccagccggggagtgccctgcaggaggtggagcggcagagaactcgagcctgggcca

SEQ ID NO: 224328 - DNA, 120 bp, Artificial Sequence
  ENSG00000117834_15 (sequence is synthesized)
ggagcagcctgaagccccaagcaggtcctggggaaagttgctctggagctggttctgtgggctctctggaacaccggagcaggccctgagcccagcagagaaggctgcgctagaacagaa

SEQ ID NO: 224329 - DNA, 120 bp, Artificial Sequence
  ENSG00000117834_16 (sequence is synthesized)
gctgacaagcattgaggaggagccactctggagacatgtctgcaacatcaatgctgtccttttgctggccatcaacatcttcctctggggctattttgcgtgattccacagacctggctt

SEQ ID NO: 224330 - DNA, 120 bp, Artificial Sequence
  ENSG00000117834_17 (sequence is synthesized)
cagtgtagacagattaaacaaagcccaagcctgtcagccacagaaacaggctctcctcttactttgctgtctaaactggagatcacagaagtcaagactgcaagctcccctgaagagaat

SEQ ID NO: 224331 - DNA, 120 bp, Artificial Sequence
  ENSG00000117834_18 (sequence is synthesized)
ccaactcaacctgcacacttgacaagtggagaaacagaagcccagagagagcactgggtttgttcaggaccacccagaaggtgtcacacggggtttccccactctttctgatatattgcc

SEQ ID NO: 224332 - DNA, 120 bp, Artificial Sequence
  ENSG00000117834_19 (sequence is synthesized)
ttacagacctacctcaaacacactgtttccaccctcttcttgaatgtattcagtagcctttactgaatgtgtgtcttgagagtagaaaaatggaggatacaagaaaaggagcaggaagaa

SEQ ID NO: 224333 - DNA, 120 bp, Artificial Sequence
  ENSG00000117834_20 (sequence is synthesized)
atttgcaaaaatccaagagcacctttgctcccccttatcctccttcctcttcccctttctagttcccctacctctctatctttctattctcaccaataatctctttgttgcatgaattta

SEQ ID NO: 224334 - DNA, 120 bp, Artificial Sequence
  ENSG00000117834_21 (sequence is synthesized)
cccaggagagtcctatatttccattggtggctccacagtggtggctgtcagacccgaaggggtggggagccaagggtggactttaagcatggtgacagatggtattttgggcagaaagct

SEQ ID NO: 224335 - DNA, 120 bp, Artificial Sequence
  ENSG00000117834_22 (sequence is synthesized)
cttagacaatggactatccaaagcactatttaaattctgcctcttcctactctctaacccaaatatgcacaaactctctatggccttgagaagcagttggagagacatgacttgttaaaa

SEQ ID NO: 224336 - DNA, 120 bp, Artificial Sequence
  ENSG00000117834_23 (sequence is synthesized)
cctcaaggaatcaagacatgttactctgtatttaagggtaagccccacagcgggcagcacaaacagcctgggagccactgtgcctgtgcttctctgtccttctccctttgcttgccatga

SEQ ID NO: 224337 - DNA, 120 bp, Artificial Sequence
  ENSG00000117834_24 (sequence is synthesized)
atccgcataccttggaatacactgtgaccccagttaagtgtcccttcgccaggaagctgccgcaacgtccagacctgggtcaagttcccactcctgctcccatagccttgacctgcttct

SEQ ID NO: 224338 - DNA, 120 bp, Artificial Sequence
  ENSG00000117834_25 (sequence is synthesized)
gtcacagcactgatcacactgagatggaagactccagggggcaaggaccaagggccatatcccaagtgactttgtacccagaaaataacagctgttcaataaatgtgtattgagttaatt

SEQ ID NO: 224339 - DNA, 120 bp, Artificial Sequence
  ENSG00000117834_26 (sequence is synthesized)
acaattgagaatccatttcacagatgaggaaatcaaggtctggaggagacagagggatccatccaaggtcacacgggaggactggggtcaggtcccaggtctcttatttctctgttcggg

SEQ ID NO: 224340 - DNA, 120 bp, Artificial Sequence
  ENSG00000117834_27 (sequence is synthesized)
ggcctcccacagcacagcactgcctctgggtgggaagccgcccctctgtctacatccaggacctggataccttcttcttctccccactctcccaggcaacctggctgctcctggcccttg

SEQ ID NO: 224341 - DNA, 120 bp, Artificial Sequence
  ENSG00000117834_28 (sequence is synthesized)
agtgccactgaaacctgacagaatctgggaggaagctagcggtaccccagggctggagccttggttactccccaggatagcctagaagagacaggctggctgtaccttgagaagctgagg

SEQ ID NO: 224342 - DNA, 120 bp, Artificial Sequence
  ENSG00000117834_29 (sequence is synthesized)
gagtggaacgtaaggaagctggcctggtttctccagaatactgagggtctaacccacctctgtctctggcattagtgctgggaggatccttagagatgcctgggaggctacatggtgaat

SEQ ID NO: 224343 - DNA, 120 bp, Artificial Sequence
  ENSG00000117834_30 (sequence is synthesized)
tttccagtgcatagagccatgtgagccatgtcccctctccaggctgcagctcccaaagagcagggttctcgctacttcaaaccaagggtcttgagcccaagccccatcttcctccttcac

SEQ ID NO: 224344 - DNA, 120 bp, Artificial Sequence
  ENSG00000117834_31 (sequence is synthesized)
ccccaatccccatgccagttccaacctgagggcccacatgaggctggggctgggcttgctgagtgacaggctcagtggggtttcagggctgcttcactcactgtctcctcacaggctttc

SEQ ID NO: 224345 - DNA, 120 bp, Artificial Sequence
  ENSG00000117834_32 (sequence is synthesized)
gccttgccgtaggtggcttcgagtggaacatgaggaaatcaaggtctggaggagacagagggatccatccaaggtcacacgggaggactggggtcaggtcccaggcaacctggctgctcc

SEQ ID NO: 224346 - DNA, 120 bp, Artificial Sequence
  ENSG00000117834_33 (sequence is synthesized)
cttacagtctatctgctgcttaaagtctgcagtgactctccattgcctacagggtttttgttctttaagctacgactcctcagcctgacctttgaagacttgttctcaagtgcctgcctc

SEQ ID NO: 224347 - DNA, 120 bp, Artificial Sequence
  ENSG00000117834_34 (sequence is synthesized)
attctgaggtactggcggttaggacttcgacacagaaattttgggaggacacaattcagcccataacagagcccatgctggaagacagtccctgaaacactgagtggacatcatggataa

SEQ ID NO: 224348 - DNA, 120 bp, Artificial Sequence
  ENSG00000117834_35 (sequence is synthesized)
tactcttttgatggatggcttctctatctgctcctgaaatatcagtgttccttaggaacccatctgtggcctataacctgtctcaccctacaacacccctgggctataaattcaacaact

SEQ ID NO: 224349 - DNA, 120 bp, Artificial Sequence
  ENSG00000117859_0 (sequence is synthesized)
gtcattggcggctcccaagatggcgtccatcatggaagggccgctgagcaaatggactaacgtgatgaagggctggcagtaccgttggttcgtgctggactacaatgcaggactgctctc

SEQ ID NO: 224350 - DNA, 120 bp, Artificial Sequence
  ENSG00000117859_1 (sequence is synthesized)
ctactacacgtccaaggacaaaatgatgagaggctctcgcagaggatgtgttagactcagaggagctgtgattggtatagacgatgaggacgacagcaccttcacaataactgttgatca

SEQ ID NO: 224351 - DNA, 120 bp, Artificial Sequence
  ENSG00000117859_2 (sequence is synthesized)
gaaaaccttccatttccaggcccgtgatgctgatgagcgagagaagtggatccatgccttagaagaaacaattcttcgacatactctccagcttcaaggtttggattcaggatttgttcc

SEQ ID NO: 224352 - DNA, 120 bp, Artificial Sequence
  ENSG00000117859_3 (sequence is synthesized)
tagtgtccaagattttgataagaaacttacagaagctgatgcttacctacaaatcttgattgaacaattaaagctttttgatgacaagcttcaaaactgcaaagaagatgaacagagaaa

SEQ ID NO: 224353 - DNA, 120 bp, Artificial Sequence
  ENSG00000117859_4 (sequence is synthesized)
gaaaattgaaactctcaaagagacaacaaatagcatggtagaatcaattaaacactgcattgtgttgctgcagattgccaaagaccagagtaatgcggagaagcacgcagatggaatgat

SEQ ID NO: 224354 - DNA, 120 bp, Artificial Sequence
  ENSG00000117859_5 (sequence is synthesized)
aagtactattaatcccgtagatgcaatatatcaacctagtcctttggaacctgtgatcagcacaatgccttcccagactgtgttacctccagaacctgttcagttgtgtaagtcagagca

SEQ ID NO: 224355 - DNA, 120 bp, Artificial Sequence
  ENSG00000117859_6 (sequence is synthesized)
gcgtccatcttccctaccagttggacctgtgttggctaccttgggacatcatcagactcctacaccaaatagtacaggcagtggccattcaccaccgagtagcagtctcacttctccaag

SEQ ID NO: 224356 - DNA, 120 bp, Artificial Sequence
  ENSG00000117859_7 (sequence is synthesized)
ccacgtgaacttgtctccaaatacagtcccagagttctcttactccagcagtgaagatgaattttatgatgctgatgaattccatcaaagtggctcatccccaaagcgcttaatagattc

SEQ ID NO: 224357 - DNA, 120 bp, Artificial Sequence
  ENSG00000117859_8 (sequence is synthesized)
ttctggatctgcctcagtcctgacacacagcagctcgggaaatagtctaaaacgcccagataccacagaatcacttaattcttccttgtccaatggaacaagtgatgctgacctgtttga

SEQ ID NO: 224358 - DNA, 120 bp, Artificial Sequence
  ENSG00000117859_9 (sequence is synthesized)
ttcacatgatgacagagatgatgatgcggaggcagggtctgtggaggagcacaagagcgttatcatgcatctcttgtcgcaggttagacttggaatggatcttactaaggtagttcttcc

SEQ ID NO: 224359 - DNA, 120 bp, Artificial Sequence
  ENSG00000117859_10 (sequence is synthesized)
aacgtttattcttgaaagaagatctcttttagaaatgtatgcagacttttttgcacatccggacctgtttgtgagcattagtgaccagaaggatcccaaggatcgaatggttcaggttgt

SEQ ID NO: 224360 - DNA, 120 bp, Artificial Sequence
  ENSG00000117859_11 (sequence is synthesized)
gaaatggtacctctcagcctttcatgcgggaaggaaaggatcagttgccaaaaagccatacaatcccattttgggcgagatttttcagtgtcattggacattaccaaatgatactgaaga

SEQ ID NO: 224361 - DNA, 120 bp, Artificial Sequence
  ENSG00000117859_12 (sequence is synthesized)
gaacacagaactagtttcagaaggaccagttccctgggtttccaaaaacagtgtaacatttgtggctgagcaggtttcccatcatccacccatttcagccttttatgctgagtgttttaa

SEQ ID NO: 224362 - DNA, 120 bp, Artificial Sequence
  ENSG00000117859_13 (sequence is synthesized)
caagaagatacaattcaatgctcatatctggaccaaatcaaaattccttgggatgtcaattggggtgcacaacatagggcagggctgtgtctcatgtctagactatgatgaacattacat

SEQ ID NO: 224363 - DNA, 120 bp, Artificial Sequence
  ENSG00000117859_14 (sequence is synthesized)
tctcacattccccaatggctatggaaggtctatcctcacagtgccctgggtggaattaggaggagaatgcaatattaattgttccaaaacaggctatagtgcaaatatcatcttccacac

SEQ ID NO: 224364 - DNA, 120 bp, Artificial Sequence
  ENSG00000117859_15 (sequence is synthesized)
caagaagtctttttgctcaattgaaggggaatggaatggtgtgatgtatgcaaaatatgcaacaggggaaaatacagtctttgtagataccaagaagttgcctataatcaagaagaaagt

SEQ ID NO: 224365 - DNA, 120 bp, Artificial Sequence
  ENSG00000117859_16 (sequence is synthesized)
gaggaagttggaagatcagaacgagtatgaatcccgcagcctttggaaggatgtcactttcaacttaaaaatcagagacattgatgcagcaactgaagcaaagcacaggcttgaagaaag

SEQ ID NO: 224366 - DNA, 120 bp, Artificial Sequence
  ENSG00000117859_17 (sequence is synthesized)
acaaagagcagaagcccgagaaaggaaggagaaggaaattcagtgggagacaaggttatttcatgaagatggagaatgctgggtttatgatgaaccattactgaaacgtcttggtgctgc

SEQ ID NO: 224367 - DNA, 120 bp, Artificial Sequence
  ENSG00000117859_18 (sequence is synthesized)
caagcattaggttggaagatgcaaagtttatacctgatgatcagggcagtaggcataattcagcaacaaacaatcttcctttgggagaaacctgttcattccaatcttctaattacagtg

SEQ ID NO: 224368 - DNA, 120 bp, Artificial Sequence
  ENSG00000117859_19 (sequence is synthesized)
gttcctatctcagggatactggactttctgacgcagatgaacaattaaggggaaaagcttcccttttccctctgtggcagttacgattttgacttcagtcctgagaaaaacttcaggttt

SEQ ID NO: 224369 - DNA, 120 bp, Artificial Sequence
  ENSG00000117859_20 (sequence is synthesized)
tgaaaatcagatgatgtcttctccttttccaaacaccacacgttgaaagcatttataaatccaagtctgaaactctgcgctctagtactgctgttaagatacacaacttgtttcttagtt

SEQ ID NO: 224370 - DNA, 120 bp, Artificial Sequence
  ENSG00000117859_21 (sequence is synthesized)
acacacacatatatatacacacacatacgtatacacacacatacatatatataaatatacctgatgccagatttttttcataaatattctgcctactgtaaatatgggttcctctgagtt

SEQ ID NO: 224371 - DNA, 120 bp, Artificial Sequence
  ENSG00000117859_22 (sequence is synthesized)
tgtaaatatgggttcctctgagttgttttagaaaattagcgcaatgtattaaaatcaagtgttaggaaatttcatggtcttacctacaataacttttattttggaattgaactattatta

SEQ ID NO: 224372 - DNA, 120 bp, Artificial Sequence
  ENSG00000117859_23 (sequence is synthesized)
aattgtatctaatcctggattacagtttaattaattattcttagtgcttaaggcttcataaagtaatttttccaaccttttttttaaaaatgtgcatcttttattatcttttatggttaa

SEQ ID NO: 224373 - DNA, 120 bp, Artificial Sequence
  ENSG00000117859_24 (sequence is synthesized)
acttggaagccaattatttggcaaccttgaatacaagagctagcttttcaaagaaagacacttgaaataatggaggatccattcttttcctctgtcagattgtatgttctgtctttagcc

SEQ ID NO: 224374 - DNA, 120 bp, Artificial Sequence
  ENSG00000117859_25 (sequence is synthesized)
cctgccaggcaattccccagaatcttcacttaactcatattgcacatgtagggctgcctaccaacattttatccaaaaatgttttattgccttagagggtttgggaagagtgtgtattta

SEQ ID NO: 224375 - DNA, 120 bp, Artificial Sequence
  ENSG00000117859_26 (sequence is synthesized)
tagatccccaccccacagtgaacaaaaatagatagatagatagaataaaatgaatgccacagcagcagatggctcattctgaagggaaatacagaactatatctatctatctatctatca

SEQ ID NO: 224376 - DNA, 120 bp, Artificial Sequence
  ENSG00000117859_27 (sequence is synthesized)
tcttttttatttaaaaatacattaaaaaaacaggtattagtacctagcatttagttagttattcaatatactggttacgtaaggcctttcaagaagtagattctcagtctgagaggacac

SEQ ID NO: 224377 - DNA, 120 bp, Artificial Sequence
  ENSG00000117859_28 (sequence is synthesized)
aggccagggcttctcaaagtgctgctgcaggctttctggtctcgcttggcccattctgctaattttcctttgccagctcctacagtaaccctgggtttattagtctcaacaaaggataaa

SEQ ID NO: 224378 - DNA, 120 bp, Artificial Sequence
  ENSG00000117859_29 (sequence is synthesized)
aagtaaatcaaatgctatgatgccagtgcaaaacttcaatggaagccctaaggcagtagtataactaactccataaaatacaaacaaacacattttaaaatacacattgcttcaggccaa

SEQ ID NO: 224379 - DNA, 120 bp, Artificial Sequence
  ENSG00000117859_30 (sequence is synthesized)
atgattataagcttcctgaggcctccctagaagctgagcagatggcagaaccatgcttcctgtaaatcctgcagaatcaagaaggaactgagtctctaagatggaggatatacaactgac

SEQ ID NO: 224380 - DNA, 120 bp, Artificial Sequence
  ENSG00000117859_31 (sequence is synthesized)
gaaggaactgagtctctaagatggaggatatacaactgacaagtagtaaagtcaagatacacagccagacagtgtctcagtctggcatccaactcaggctggagtgcagtgacatgatct

SEQ ID NO: 224381 - DNA, 120 bp, Artificial Sequence
  ENSG00000117859_32 (sequence is synthesized)
tcctgcctcagcttcctgagtagattataaataatcttaatagcagtattcacgtttgcattctcgcatccgtggcatggagtcctacacacaataggcgccctaagaaagcgtgtttga

SEQ ID NO: 224382 - DNA, 120 bp, Artificial Sequence
  ENSG00000117859_33 (sequence is synthesized)
cttgatcgctggagcatctgccggcaccgcccaggacccgcccaggacccgccccgccccctgcggccccgccccccgcatgctgaatgccatataggcgagtgacgtcaggccgtttgt

SEQ ID NO: 224383 - DNA, 120 bp, Artificial Sequence
  ENSG00000117859_34 (sequence is synthesized)
cggcccctacccctgagtccccggggtcccggccgccaggccggagcgcgaatgtcgtgctcaccctgcctccttcccgccgccccctgggctttttgatgacaagcttcaaaactgcaa

SEQ ID NO: 224384 - DNA, 120 bp, Artificial Sequence
  ENSG00000117859_35 (sequence is synthesized)
agatggcgtccatcatggaagggccgctgagcaaatggactaacgtgatgaagggctggcagtaccgttggttcgtgctggactacaatgcaggactgctctcctactacacgggagctg

SEQ ID NO: 224385 - DNA, 120 bp, Artificial Sequence
  ENSG00000117859_36 (sequence is synthesized)
gcattagggatgagttctcactgtgttgcctggactggtctcgaaatcctgaccttaagtaatgcttctgccttggcctcccaaaatgctgaaattacaggcgtgagccatcattcccag

SEQ ID NO: 224386 - DNA, 120 bp, Artificial Sequence
  ENSG00000117859_37 (sequence is synthesized)
cccagcagtcttcatcttaagaagaaagctgcccagcatcagaggggtcaggttcccttctaaacagaatatgataatgctggcctgccaaaactacagcttcccctttaggaaagaact

SEQ ID NO: 224387 - DNA, 120 bp, Artificial Sequence
  ENSG00000117859_38 (sequence is synthesized)
atggcaattccagagttcacaactgcattcagacctggcctacagagcatctcacactcactgtgcttgtgacattcccttgtaccaggccctccacaaagagctgggatttgaattctt

SEQ ID NO: 224388 - DNA, 120 bp, Artificial Sequence
  ENSG00000117859_39 (sequence is synthesized)
tgacgaagctcagcagagactcaagggaaaggccgtccatcaaagcctggtacttgtcaatcatagaccaacgggcatattccaagattaaaagccgtacatctctgtacagagggcaga

SEQ ID NO: 224389 - DNA, 120 bp, Artificial Sequence
  ENSG00000117859_40 (sequence is synthesized)
gaagggggtgaagggggtgtcccgggggacgggctgaacctcagtcaggaccgcctgcaccgcagtccggggatcgggtcgaggggagaagaaaaaggggtgctcgggagcagcccccgg

SEQ ID NO: 224390 - DNA, 120 bp, Artificial Sequence
  ENSG00000117859_41 (sequence is synthesized)
gaaaaccttccatttccagggtgagctgaaagaagagattctttctcttcatagtcccatctgcttcttttcttctcttttgggttgtttgctggatgacttgaatggttttgcaactga

SEQ ID NO: 224391 - DNA, 120 bp, Artificial Sequence
  ENSG00000117859_42 (sequence is synthesized)
tcctgcatgaacgagtgcataggaacattctggatgaagtggtactgcaggttaggcagggatttgtatctgcaatggatgtagatcgatttgaaacgactgtggatctggctgcagttg

SEQ ID NO: 224392 - DNA, 120 bp, Artificial Sequence
  ENSG00000117859_43 (sequence is synthesized)
tatcaggagaagcctgaattactactcatttttcaatgccaactactcactgctttttgttgttgactcttgcagtttcctttaagctcccttctttcagcaatcatttgcaggggaaat

SEQ ID NO: 224393 - DNA, 120 bp, Artificial Sequence
  ENSG00000117859_44 (sequence is synthesized)
gacaatcttaaaatttttctaagtgtgggttcagattgaatcactttgcatgtattaacttgaagggttaatcatggtatgaatactcagcttttacaattaaataatgcataactcagt

SEQ ID NO: 224394 - DNA, 120 bp, Artificial Sequence
  ENSG00000117859_45 (sequence is synthesized)
ggagaggggccggcccctacccctgagtccccggggtcccggccgccaggccggagcgcgaatgtcgtgctcaccctgcctccttcccgccgccccctgggggtttggattcaggatttg

SEQ ID NO: 224395 - DNA, 120 bp, Artificial Sequence
  ENSG00000117859_46 (sequence is synthesized)
cacttgtattagtctgcatgggctgccataacaaaataccatagactgggtggcttaaagaacagaagtttattttctcaccgttctggaagccagaagtccaagatcaacattctggcc

SEQ ID NO: 224396 - DNA, 120 bp, Artificial Sequence
  ENSG00000117859_47 (sequence is synthesized)
tgttcagtttctgatgagggtccttctcttggcctgtagatagccatgtcttcacatagtctttccttgagtactattaatcccgtagatgcaatatatcaacctagtcctttggaacct

SEQ ID NO: 224397 - DNA, 120 bp, Artificial Sequence
  ENSG00000117859_48 (sequence is synthesized)
atcaaaagggcccccttcctagtattaatgataatctttaattatagaatgaggacatagctttttgtttcatttatttaaaaggctgtgtcctcattttatatcatgatttgccatttt

SEQ ID NO: 224398 - DNA, 120 bp, Artificial Sequence
  ENSG00000117859_49 (sequence is synthesized)
ctgtgtggagtttaaatgttgattttctttataaatactgtagcgacttttacaaacttaaccaaactcttttttgattttagaaaagtctgctttgactccatctccctagtttcttct

SEQ ID NO: 224399 - DNA, 120 bp, Artificial Sequence
  ENSG00000117859_50 (sequence is synthesized)
gagaattttatgaaaatggctagactagatgtcattgttagcaactaagcattggtattgggggtgagagcaaagggtggggaactagataggttatccctaaattgaatggagtatcct

SEQ ID NO: 224400 - DNA, 120 bp, Artificial Sequence
  ENSG00000117859_51 (sequence is synthesized)
ggagtaaccatcagctcgacaagaaagccttgtggccacttggcactactcatcagagattctgtcccttctctccacaggctgtgtctcatgtctagactatgatgaacattacattct

SEQ ID NO: 224401 - DNA, 120 bp, Artificial Sequence
  ENSG00000117859_52 (sequence is synthesized)
cacattccccaatggctatggaaggcaagtgtgtccatttcctctgatcagcagtagactctgctgttccttgagacatgccccttccccctcttcctcttaactgtcaaccttacctaa

SEQ ID NO: 224402 - DNA, 120 bp, Artificial Sequence
  ENSG00000117859_53 (sequence is synthesized)
ctatgggggcaagaagcacagaattactgccgagattttgtaggtattttttctgccttagagctcttatgcttttctgaaataactgccttttgtcttgaactacagcttctggattag

SEQ ID NO: 224403 - DNA, 120 bp, Artificial Sequence
  ENSG00000117859_54 (sequence is synthesized)
gagtgtgaaagaatggttctgtctttgtaagcgtgtttcacattttatgtgtcatgtcttttgctgaagtcccatatcagaagaagacctaaaacatatattcagagcagtcagaggtca

SEQ ID NO: 224404 - DNA, 120 bp, Artificial Sequence
  ENSG00000117859_55 (sequence is synthesized)
ttgataggtttccttcctaaaaacctgacttgcaatgttgaactaaaagaggccttcctaggttgcctagctaaaccagattatggatccctaatttattcttgccagattgaatgatga

SEQ ID NO: 224405 - DNA, 120 bp, Artificial Sequence
  ENSG00000117859_56 (sequence is synthesized)
gctggtccttacagcagactttgtgacccctgcagcactgcctcctggtcctcacagctatccctttttctgtgcctttgctggggaaaaacagtaaccatcacattttgcacgcatctg

SEQ ID NO: 224406 - DNA, 120 bp, Artificial Sequence
  ENSG00000117859_57 (sequence is synthesized)
gcttgcttccacttgacactcttgggtcacgtgcagatgactgtgccagtcagtggaaagtctatagtgatggcaccatgactctctctgcctctggaacccttaactgggggggaaggg

SEQ ID NO: 224407 - DNA, 120 bp, Artificial Sequence
  ENSG00000117859_58 (sequence is synthesized)
ttcaatcctgtttatgccttgcccttcctaaccaggcctttgctgtgttgcttatcttctcacattccatagttgtgtgtccaagtagaggtctgttacggcttttgcagaatggatcct

SEQ ID NO: 224408 - DNA, 120 bp, Artificial Sequence
  ENSG00000117859_59 (sequence is synthesized)
tgctcagggaaagtattcacaccatctggcacagaggtccctttcaacctgaggatgaaagcctgcattatattcttaagcaaagccttccctgacccccagtgcccatgtaagctcacc

SEQ ID NO: 224409 - DNA, 120 bp, Artificial Sequence
  ENSG00000117859_60 (sequence is synthesized)
acagcacttaccacctagaatttcaatggtggttacgtctctctccactacgctgtgaacagcttgaggatagggaatttgccaactctgttatggtccttgcacccagaataggacgtt

SEQ ID NO: 224410 - DNA, 120 bp, Artificial Sequence
  ENSG00000117859_61 (sequence is synthesized)
cttgcccaaacccaccattcttgggatctcaagttcataagcgtcctgttgaaggccctcattcttatagttagccctggggagtccagttctgttaagatgctttcatcaaaaacttca

SEQ ID NO: 224411 - DNA, 120 bp, Artificial Sequence
  ENSG00000117859_62 (sequence is synthesized)
cagttgctcttctgtgctctactctgtagttgggccacactgagcagattctttggtagaattttcaacttgagactaacacaagtatttccttttctgttcagttctccaaatgacaag

SEQ ID NO: 224412 - DNA, 120 bp, Artificial Sequence
  ENSG00000117859_63 (sequence is synthesized)
aagtctttttgctcaattgaaggggaatggaatggtgtgatgtatgcaaaatatgcaacaggggtaagatcctctattttgccacttgttttaggctacattagattgtactctatccct

SEQ ID NO: 224413 - DNA, 120 bp, Artificial Sequence
  ENSG00000117859_64 (sequence is synthesized)
ttttctggcttccttcattagtacttccttcataatgcatttccttctacagtatattagagctggaactttaggacagctccagtgtatgtcatctcttcagggcaagctttttctttc

SEQ ID NO: 224414 - DNA, 120 bp, Artificial Sequence
  ENSG00000117859_65 (sequence is synthesized)
cttcccccaccttctcccagcagtataggtaattataatcatttttacttttctctctgctctcaaaacacttgagaataatatatgtaaaacaatgcctggcacatagtaagaacccag

SEQ ID NO: 224415 - DNA, 120 bp, Artificial Sequence
  ENSG00000117859_66 (sequence is synthesized)
taaatgttaggtatgtggcgtatgtttataaaatgaagcactaaactgtgtgtttccatacacacacagttgaagattttgtataataaaatttactgactgcctggcaccagagatacc

SEQ ID NO: 224416 - DNA, 120 bp, Artificial Sequence
  ENSG00000117859_67 (sequence is synthesized)
aaaatgagttaagatagacctttccttcaaagaacttgcactctgtactactgcccactcagtgttcttaaacagaggaaagatgttatgaaattaacaggaggagccagttaactgcat

SEQ ID NO: 224417 - DNA, 120 bp, Artificial Sequence
  ENSG00000117859_68 (sequence is synthesized)
tttggacctagagaatttgaagtgtcaaaagcactacaatgcatctaacattaggttaggggtttatgggtctagttcccatccacctctattgttttctaggaaaatacagtctttgta

SEQ ID NO: 224418 - DNA, 120 bp, Artificial Sequence
  ENSG00000117859_69 (sequence is synthesized)
aggaatgggagaactaaacagtgagaatatgaagttaacattaagggaagggaggaatgaactgaatgaaaaaggggaaaatagaagtaacctaggtgggttttgtttatgttcctttgt

SEQ ID NO: 224419 - DNA, 120 bp, Artificial Sequence
  ENSG00000117859_70 (sequence is synthesized)
taaattactgttgttctagtggtgactgggagccaattacagggtttgggggagataagaaagtgattctggagagaagagtaaatccaatttgagcagcagcatgtgtaactgctgaga

SEQ ID NO: 224420 - DNA, 120 bp, Artificial Sequence
  ENSG00000117859_71 (sequence is synthesized)
taatgaggaagattgatgtaccactgtttaaatagacctaactgttaaatagacctattatttgtgtcaaaatagaactgtattttaaaaattgaaatgtcttcatgtatgaagggaaaa

SEQ ID NO: 224421 - DNA, 120 bp, Artificial Sequence
  ENSG00000117859_72 (sequence is synthesized)
cttctaaatggtaaatgtaaactttgctgtggcaaagactttggtttaacatgtacacactcgcacccccctgctgccctatggagttttctttttaaaatgccttcatgctgtcagaat

SEQ ID NO: 224422 - DNA, 120 bp, Artificial Sequence
  ENSG00000117859_73 (sequence is synthesized)
aatttcttgacttagaatcagagaatcctagacttttctcccctctaaaattaactacatgtctgaatttttctccctctcttctgaatcctcagaaagcaagccctcttctctacactc

SEQ ID NO: 224423 - DNA, 120 bp, Artificial Sequence
  ENSG00000117859_74 (sequence is synthesized)
cccagttagaagatgcatctctttctctttagtgaccataaaactagacacacagtcagccttctgcatctgtggattcaaccaaccatggattcaaaatatttgaggaaaaaaaaagta

SEQ ID NO: 224424 - DNA, 120 bp, Artificial Sequence
  ENSG00000117859_75 (sequence is synthesized)
cctctttactgaatatgtatatactgttttccttgtcatgatttcctaaacaatacagtataatggtgatttatataatatttacataatattaggtgtcataagtaatttagagatgat

SEQ ID NO: 224425 - DNA, 120 bp, Artificial Sequence
  ENSG00000117859_76 (sequence is synthesized)
ttaacttatatgggagcgtatgtgtaggttgtatgcaaatactacacgatattttatcagggacttgagtgtctgtggattttggcatcctcggggggtgcttggaaccagtccccctgg

SEQ ID NO: 224426 - DNA, 120 bp, Artificial Sequence
  ENSG00000117859_77 (sequence is synthesized)
atacctgaggagtgactgtactgtgtgatagcagcagtatgggatggaaagatgagatcctagtggtgcaggtacatcagttggacatttggtgtaactcaccaaaagtgaaaaaaacag

SEQ ID NO: 224427 - DNA, 120 bp, Artificial Sequence
  ENSG00000117859_78 (sequence is synthesized)
agaaacaatatttgtggtgaattaagagattgagaagcaccgaattgaattgagaggtggttttgacttcctgaaatctccccacaccattttataactcctcagtttttccatttagct

SEQ ID NO: 224428 - DNA, 120 bp, Artificial Sequence
  ENSG00000117859_79 (sequence is synthesized)
ttaccttcttctgtgacagagattcattcattgtctttccttactatgctttaagcaactcttacacttctgtatagaaaaggtgtttcattccctcttttcattttgatcaacatatct

SEQ ID NO: 224429 - DNA, 120 bp, Artificial Sequence
  ENSG00000117859_80 (sequence is synthesized)
ggacgccctcccgccgctgcgcacccctcccgcgagctgccagctccctcggcctctccacccaaaactggcccaaccgccaatcgtctgcctctcacctcctacagcagggtttggatt

SEQ ID NO: 224430 - DNA, 120 bp, Artificial Sequence
  ENSG00000117859_81 (sequence is synthesized)
tgttagtatttcccagatggaaataaaagagtttgaagagtactattaatcccgtagatgcaatatatcaacctagtcctttggaacctgtgatcagcacaatgccttcccagactgtgt

SEQ ID NO: 224431 - DNA, 120 bp, Artificial Sequence
  ENSG00000117862_0 (sequence is synthesized)
agtgctagtggcggcaggtgcaggtggccgcgcggcatcctggggcttgcagtctcccgagcgttctgttgtgtccctgcctacaattttagggaacctaataaaagggtggtcggtatg

SEQ ID NO: 224432 - DNA, 120 bp, Artificial Sequence
  ENSG00000117862_1 (sequence is synthesized)
tttttatttgggtgtgtacttttgttaggtcgctttttcgctatgcattaagtacggactttaggactcaactagtaccaggaagaaaaagaccggacattttcacctgtttgttataca

SEQ ID NO: 224433 - DNA, 120 bp, Artificial Sequence
  ENSG00000117862_2 (sequence is synthesized)
gcgaaggggaaaaattgggaagaaatcctcaagctacaagaaaaataaccagaagctttacactttagcctgcagtgacttatatcctggtgtcctaagtccacctaagtcagttttgca

SEQ ID NO: 224434 - DNA, 120 bp, Artificial Sequence
  ENSG00000117862_3 (sequence is synthesized)
ataagaggtcccaagtttggttttcttggagcttgcatcagttggttgcatcatccctgagtagaagatttgcggttgcaaggaaaaataaggtacagagcttctccagcgggaaagtgc

SEQ ID NO: 224435 - DNA, 120 bp, Artificial Sequence
  ENSG00000117862_4 (sequence is synthesized)
atgtctgcacggcacgagcccacgcaccgcagaacaggcttgccaggtctcctcagagaccctcgcaggaacctaacaatgaaatccagttgtccagtcttgatttgtggaggggtaagg

SEQ ID NO: 224436 - DNA, 120 bp, Artificial Sequence
  ENSG00000117862_5 (sequence is synthesized)
agaatccgaggccagtgggcaatccgcccactgttgggagcgactgacctcacgaatcaataatttgcttttgactaggaagtgcagcggttcttggggggaggggctggactgggtggc

SEQ ID NO: 224437 - DNA, 120 bp, Artificial Sequence
  ENSG00000117862_6 (sequence is synthesized)
ggacgcgaggagcaacggttctcccgaacctctcccccgcccctactatcttggcctacattttcccgctccgtcccgggacctggacacccagaatccacgaaaagcaactcgcgctcg

SEQ ID NO: 224438 - DNA, 120 bp, Artificial Sequence
  ENSG00000117862_7 (sequence is synthesized)
agaacagctctcgtacccttctacgtgatctgcacctttaagctcactccatcccaaaccggaccccggaggcaccacccacatccgtctaacatcacttccttcagagtttgaaaaaaa

SEQ ID NO: 224439 - DNA, 120 bp, Artificial Sequence
  ENSG00000117862_8 (sequence is synthesized)
aaaatctgggaagtagaggtgttgtgctgagcggcgctcggcgaactgtgtggaccgtctgctgggactccggccctgcgtccgctcagccccgtggccccgcgcacctactgccatgga

SEQ ID NO: 224440 - DNA, 120 bp, Artificial Sequence
  ENSG00000117862_9 (sequence is synthesized)
ggacactggaagatgggaagaaagaagcagctgccagtggactgcccctgatggtgattattcataaatcctggtgtggagcttgcaaagctctaaagcccaaatttgcagaatctacgg

SEQ ID NO: 224441 - DNA, 120 bp, Artificial Sequence
  ENSG00000117862_10 (sequence is synthesized)
aaatttcagaactctcccataattttgttatggtaaatcttgaggatgaagaggaacccaaagatgaagatttcagccctgacgggggttatattccacgaatcctttttctggatccca

SEQ ID NO: 224442 - DNA, 120 bp, Artificial Sequence
  ENSG00000117862_11 (sequence is synthesized)
gtggcaaggtgcatcctgaaatcatcaatgagaatggaaaccccagctacaagtatttttatgtcagtgccgagcaagttgttcaggggatgaaggaagctcaggaaaggctgacgggtg

SEQ ID NO: 224443 - DNA, 120 bp, Artificial Sequence
  ENSG00000117862_12 (sequence is synthesized)
atgccttcagaaagaaacatcttgaagatgaattgtaacatgaatgtgccccttctttcatcagagttagtgttctggaaggaaagcagcagggaagggaatattgaggaatcatctaga

SEQ ID NO: 224444 - DNA, 120 bp, Artificial Sequence
  ENSG00000117862_13 (sequence is synthesized)
acaattaagccgaccaggaaacctcattcctacctacactggaaggagcgctctcactgtggaagagttctgctaacagaagctggtctgcatgtttgtggatccagcggagagtggcag

SEQ ID NO: 224445 - DNA, 120 bp, Artificial Sequence
  ENSG00000117862_14 (sequence is synthesized)
actttcttctccttttccctctcacctaaatgtcaacttgtcattgaatgtaaagaatgaaaccttctgacacaaaacttgagccacttggatgtttactcctcgcacttaagtatttga

SEQ ID NO: 224446 - DNA, 120 bp, Artificial Sequence
  ENSG00000117862_15 (sequence is synthesized)
gtcttttcccatttcctcccactttactcaccttagtggtgaaaggagactagtagcatcttttctacaacgttaaaattgcagaagtagcttatcattaaaaaacaacaacaacaacaa

SEQ ID NO: 224447 - DNA, 120 bp, Artificial Sequence
  ENSG00000117862_16 (sequence is synthesized)
taacaataaatcctaagtgtaaatcagttattctaccccctaccaaggatatcagcctgttttttcccttttttctcctgggaataattgtgggcttcttcccaaatttctacagcctct

SEQ ID NO: 224448 - DNA, 120 bp, Artificial Sequence
  ENSG00000117862_17 (sequence is synthesized)
ttcctcttctcatgcttgagcttccctgtttgcacgcatgcgtgtgcaggactggctgtgtgcttggactcggctccaggtggaagcatgctttcccttgttactgttggagaaactcaa

SEQ ID NO: 224449 - DNA, 120 bp, Artificial Sequence
  ENSG00000117862_18 (sequence is synthesized)
accttcaagccctaggtgtagccattttgtcaagtcatcaactgtatttttgtactggcattaacaaaaaaagagataaaatattgtaccattaaactttaataaaactttaaaaggaaa

SEQ ID NO: 224450 - DNA, 120 bp, Artificial Sequence
  ENSG00000117862_19 (sequence is synthesized)
aagcagctgccaggccttattaataaaatggacgggcagtctttcgctgcaggaagatcacattctcctgaggcctataacatttggcataaataactgatgccattatagtctctgtat

SEQ ID NO: 224451 - DNA, 120 bp, Artificial Sequence
  ENSG00000117862_20 (sequence is synthesized)
ctcctttctgagaaagctgaacctgggcctagctggcgtagaactcctgtttccatagaaacaagagggtctgtaaaagtcaagggagacaggaagagcagtttgcacttccggcttacg

SEQ ID NO: 224452 - DNA, 120 bp, Artificial Sequence
  ENSG00000117862_21 (sequence is synthesized)
aggatgccgctcgtggtgttttgcgggctgccgtacagcggcaagagccggcgtgctgaagagttgcgcgtggcgctggctgccgagggccgcgcggtgtacgtggtggacgacgcagct

SEQ ID NO: 224453 - DNA, 120 bp, Artificial Sequence
  ENSG00000117862_22 (sequence is synthesized)
gtcctgggcgcagaggacccagcggtgtacggcgattctgcccgtgagaaggcattgcgtggagctctgcgagcctccgtggaacggcgcctgagtcgccacgacgtggtcatcctggac

SEQ ID NO: 224454 - DNA, 120 bp, Artificial Sequence
  ENSG00000117862_23 (sequence is synthesized)
tcgcttaactacatcaaaggtttccgttacgagctctactgcctggcacgggcggcgcgcaccccgctctgcctggtctactgcgtacggcccggcggcccgatcgcgggacctcaggtg

SEQ ID NO: 224455 - DNA, 120 bp, Artificial Sequence
  ENSG00000117862_24 (sequence is synthesized)
gcgggcgcgaacgagaaccctggccggaacgtcagtgtgagttggcggccacgcgctgaggaggacgggagagcccaggcggcgggcagcagcgtcctcagggaactgcatactgcggac

SEQ ID NO: 224456 - DNA, 120 bp, Artificial Sequence
  ENSG00000117862_25 (sequence is synthesized)
ttcatgtgtgaaatggaagtctggatgaggcaaactcaaaaggctttttccaaccttcattaagttggttattgattgaattgggtctaaccatggattctggattaccattctaaattg

SEQ ID NO: 224457 - DNA, 120 bp, Artificial Sequence
  ENSG00000117862_26 (sequence is synthesized)
aggtctgtgataggaaagtaaattcagcatgttagctgagcatctcctgcatgtctatagcttttggccagatcctgtgtaggatataggaggaagatgagactgagccccttcccttgg

SEQ ID NO: 224458 - DNA, 120 bp, Artificial Sequence
  ENSG00000117862_27 (sequence is synthesized)
aagagctgactgacccacaggcagctgtgaagaactgaggcacacaagtgactgaggtagtcacttgcccatagtttcatagttaagtagcagagccagaatttgagtccagaacttagt

SEQ ID NO: 224459 - DNA, 120 bp, Artificial Sequence
  ENSG00000117862_28 (sequence is synthesized)
ttttttcctactgagctaatactgtttttcctatgaaaattcagtggaagaggaatagtgttaggtgaacaagtctaagaggttttatagatattaaacttaaataggccgagcacagtg

SEQ ID NO: 224460 - DNA, 80 bp, Artificial Sequence
  ENSG00000117868_0 (sequence is synthesized)
agtatccaccccgcccgctcccggtgacgtgccagccccaggcccacgccgctcccgccccgcgtgatgacgccaccgtc

SEQ ID NO: 224461 - DNA, 80 bp, Artificial Sequence
  ENSG00000117868_1 (sequence is synthesized)
ctcagaggggcgctggcgcggggctgagccgcccgggatcagcgcgagcacccagcccgcctcggccgggagggcagcgc

SEQ ID NO: 224462 - DNA, 120 bp, Artificial Sequence
  ENSG00000117868_2 (sequence is synthesized)
ctgggggccgcgcggcgcctgagaaccccgggggcgtgctgagcgtggagctgcccgggctgctggcgcagctggcgcggagcttcgcgctgctgctgcccgtgtacgcgctgggctacc

SEQ ID NO: 224463 - DNA, 120 bp, Artificial Sequence
  ENSG00000117868_3 (sequence is synthesized)
tacgcgctgggctacctggggctcagcttcagctgggttctcctcgcgctcgcgctgctcgcctggtgtcgccgcagccgcggcctcaaggccctgcgcctgtgccgcgcgctggcgctg

SEQ ID NO: 224464 - DNA, 120 bp, Artificial Sequence
  ENSG00000117868_4 (sequence is synthesized)
ctggaagacgaggagcgcgtcgtgcgcctgggggtgcgcgcctgcgacctgcccgcctgggttcattttccagacactgaaagagcagaatggctaaataagactgtaaaacacatgtgg

SEQ ID NO: 224465 - DNA, 120 bp, Artificial Sequence
  ENSG00000117868_5 (sequence is synthesized)
cctttcatttgccaatttatagagaagttgtttcgagaaactatagaaccagccgtgcggggagcaaacacccaccttagcacctttagtttcacgaaggtcgacgtgggccagcagccc

SEQ ID NO: 224466 - DNA, 120 bp, Artificial Sequence
  ENSG00000117868_6 (sequence is synthesized)
ctcaggatcaatggtgttaaggtatacactgaaaatgtagacaaaaggcaaattattttggaccttcagattagttttgtaggaaattgtgagattgatttggagatcaaacgatatttt

SEQ ID NO: 224467 - DNA, 120 bp, Artificial Sequence
  ENSG00000117868_7 (sequence is synthesized)
tgtagagctggtgtgaaaagtatccagattcatggtaccatgcgggtgatcctggaaccgttgattggagatatgcccttagttggagctttgtctatcttcttccttaggaaaccactt

SEQ ID NO: 224468 - DNA, 120 bp, Artificial Sequence
  ENSG00000117868_8 (sequence is synthesized)
ttagaaattaactggacaggactgacgaatcttctggatgtccctggattgaatggtttatcagatactatcattttggatataatatcaaactatctggtgcttcccaatcgaatcacc

SEQ ID NO: 224469 - DNA, 120 bp, Artificial Sequence
  ENSG00000117868_9 (sequence is synthesized)
gttccacttgtcagtgaagttcaaatagctcagttgcggtttcctgtaccaaagggtgttctaaggatacattttattgaagctcaggatcttcaggggaaagacacttaccttaaggga

SEQ ID NO: 224470 - DNA, 120 bp, Artificial Sequence
  ENSG00000117868_10 (sequence is synthesized)
cttgtcaagggaaagtcagacccctatggaatcattagagttggcaaccaaatcttccaaagcagagtcatcaaggagaacctcagtccaaagtggaatgaagtctatgaggctttagtg

SEQ ID NO: 224471 - DNA, 120 bp, Artificial Sequence
  ENSG00000117868_11 (sequence is synthesized)
tatgaacatcctggacaagaattagagattgagctctttgatgaagacccagacaaggatgactttttaggaagtcttatgattgacctcattgaagttgaaaaggagcgccttttagat

SEQ ID NO: 224472 - DNA, 120 bp, Artificial Sequence
  ENSG00000117868_12 (sequence is synthesized)
gaatggttcactctggacgaggttcccaaggggaagctacacttgagactggagtggctcacgttaatgccaaatgcgtcaaacctcgacaaggtgctaacagacatcaaagctgacaaa

SEQ ID NO: 224473 - DNA, 120 bp, Artificial Sequence
  ENSG00000117868_13 (sequence is synthesized)
gaccaagccaacgatggtctttcctctgcattgctgatcttgtacttggattcagcaaggaaccttccgtcagggaagaaaataagcagcaacccaaatcctgttgtccagatgtcagtt

SEQ ID NO: 224474 - DNA, 120 bp, Artificial Sequence
  ENSG00000117868_14 (sequence is synthesized)
gggcacaaggcccaggagagcaagattcgatacaaaaccaatgaacctgtgtgggaggaaaacttcactttcttcattcacaatcccaagcgccaggaccttgaagttgaggtcagagac

SEQ ID NO: 224475 - DNA, 120 bp, Artificial Sequence
  ENSG00000117868_15 (sequence is synthesized)
gagcagcaccagtgttccctggggaacctgaaggtccccctcagccagctgctcaccagtgaggacatgactgtgagccagcgcttccagctcagtaactcgggtccaaacagcaccatc

SEQ ID NO: 224476 - DNA, 120 bp, Artificial Sequence
  ENSG00000117868_16 (sequence is synthesized)
aagatgaagattgccctgcgggtgctccatctcgaaaagcgagaaaggcctccagaccaccaacactcagctcaagtcaaacgtccctctgtgtccaaagaggggaggaaaacatccatc

SEQ ID NO: 224477 - DNA, 120 bp, Artificial Sequence
  ENSG00000117868_17 (sequence is synthesized)
aaatctcatatgtctgggtctccaggccctggtggcagcaacacagctccatccacaccagtcattgggggcagtgataagcctggtatggaagaaaaggcccagccccctgaggccggc

SEQ ID NO: 224478 - DNA, 120 bp, Artificial Sequence
  ENSG00000117868_18 (sequence is synthesized)
cctcaggggctgcacgacctgggcagaagctcctccagcctcctggcctccccaggccacatctcagtcaaggagccgacccccagcatcgcctcggacatctcgctgcccatcgccacc

SEQ ID NO: 224479 - DNA, 120 bp, Artificial Sequence
  ENSG00000117868_19 (sequence is synthesized)
caggagctgcggcaaaggctgaggcagctggaaaacgggacgaccctgggacagtctccactggggcagatccagctgaccatccggcacagctcgcagagaaacaagcttatcgtggtc

SEQ ID NO: 224480 - DNA, 120 bp, Artificial Sequence
  ENSG00000117868_20 (sequence is synthesized)
gtgcatgcctgcagaaacctcattgccttctctgaagacggctctgacccctatgtccgcatgtatttattaccagacaagaggcggtcaggaaggaggaaaacacacgtgtcaaagaaa

SEQ ID NO: 224481 - DNA, 120 bp, Artificial Sequence
  ENSG00000117868_21 (sequence is synthesized)
acattaaatccagtgtttgatcaaagctttgatttcagtgtttcgttaccagaagtgcagaggagaacgctcgacgttgccgtgaagaacagtggcggcttcctgtccaaagacaaaggg

SEQ ID NO: 224482 - DNA, 120 bp, Artificial Sequence
  ENSG00000117868_22 (sequence is synthesized)
ctccttggcaaagtattggttgctctggcatctgaagaacttgccaaaggctggacccagtggtatgacctcacggaagatgggacgaggcctcaggcgatgacatagccgcagcaggca

SEQ ID NO: 224483 - DNA, 120 bp, Artificial Sequence
  ENSG00000117868_23 (sequence is synthesized)
ggaggcgtcctcttcagcgtagctctccacctctacccggaacacaccctctcacagacgtaccaatgttatttttataatttcatggatttagttatacataccttaatagttttataa

SEQ ID NO: 224484 - DNA, 120 bp, Artificial Sequence
  ENSG00000117868_24 (sequence is synthesized)
agttcctacaacgtgcagtagggcggcggtagctcttgtgtctgtggactctgctcagctgtgtccgtaggagtcggatgtgtctgtgctttattatggccttgtttatatatcactgag

SEQ ID NO: 224485 - DNA, 120 bp, Artificial Sequence
  ENSG00000117868_25 (sequence is synthesized)
gtatactatgccatgtaaatagactattttttataatctttacatgctggtttaaattcagaaggaaatagatcaaggaaatatatatattttcttctaaaacttattaaattcgtgtga

SEQ ID NO: 224486 - DNA, 120 bp, Artificial Sequence
  ENSG00000117868_26 (sequence is synthesized)
caaataatcattttcatcttggcagcaaaaagttctcagtgacctattttgtggtgtttctttttgaaaagaaaagctgaaatattattaaatgctagtatgtttctgcccattatgaaa

SEQ ID NO: 224487 - DNA, 120 bp, Artificial Sequence
  ENSG00000117868_27 (sequence is synthesized)
aaagtattcaaaatattaacattttcataaatataaggatgtattattgagaagtaagttgaagggcttataaggaaaaatgttttataactgagtaatatattaagagaattgtcatgg

SEQ ID NO: 224488 - DNA, 120 bp, Artificial Sequence
  ENSG00000117868_28 (sequence is synthesized)
tgtcatggttcataaatcacattatgctaatctgaaatttcttacataaaaatgaagtgtcttatgtttattttaattgctgttgtaacttactcatgaaacagtatacagacaccttgt

SEQ ID NO: 224489 - DNA, 120 bp, Artificial Sequence
  ENSG00000117868_29 (sequence is synthesized)
acttttcctcaactgtaagagcagactttcaatgttagcaattaagctgttgtcaaacaatcagtcatgagctttgttaattttcaatgttttcccagcctataaaaaaaggaaggtaca

SEQ ID NO: 224490 - DNA, 120 bp, Artificial Sequence
  ENSG00000117868_30 (sequence is synthesized)
cgttgtccttttaaaggttgtgaggtagattggagtgagtagacaggatattgcattaaaaattgaaagctcgatctcattattgtcaggaacccccagtgtgacctcacacataggatg

SEQ ID NO: 224491 - DNA, 120 bp, Artificial Sequence
  ENSG00000117868_31 (sequence is synthesized)
tgggacctttgagccgatgtgcactggccaccaccagggttgggggcgccacagctgcgagcccggcccctgctgttctcagcagccacttcccaggctgcctcactttatgccatgact

SEQ ID NO: 224492 - DNA, 120 bp, Artificial Sequence
  ENSG00000117868_32 (sequence is synthesized)
gaccttaatattgggatattgttatgcaatttttatcctgtttagactgttaaaagcaggtttctgtacttaagagtcccccagacctcctgtgaggtgaggctctgttgcagtgtcgta

SEQ ID NO: 224493 - DNA, 120 bp, Artificial Sequence
  ENSG00000117868_33 (sequence is synthesized)
ggctgtgtgtgtctgtaaagaaagaatgcacatatgtagacgattaagtgtatattataagctatatgctgaaaatggcttccatagccatgagaacatcttaaaactatgtgtaaatat

SEQ ID NO: 224494 - DNA, 120 bp, Artificial Sequence
  ENSG00000117868_34 (sequence is synthesized)
attaaggaaagtatagctttgtaatttaaattggagcttttagcttgtttcatggaactatacaacttgtgggtaactcacatgaccaaacaaaccaaagtgcctgtgacggggcgggtg

SEQ ID NO: 224495 - DNA, 120 bp, Artificial Sequence
  ENSG00000117868_35 (sequence is synthesized)
gcgtctacccaccctcccttctagcagattcttattttgtttgaatttataaacaaggctggtggctgtctacccaccctcccttctagcagattttgattttgtttcaatttataactt

SEQ ID NO: 224496 - DNA, 120 bp, Artificial Sequence
  ENSG00000117868_36 (sequence is synthesized)
acactttgaaccatgggtttacttataatggagtctgtagcttcacagcatatttcatgtaatcataaagaccagtatattccctcctgctgaatgacatgcgactgtaaagcctcttta

SEQ ID NO: 224497 - DNA, 120 bp, Artificial Sequence
  ENSG00000117868_37 (sequence is synthesized)
taaaccatttccaatgttagtatataggattatttgggaagcgtatcaatacctttatagacaaatacgaacatgtatgcacacaaaacatttaactatggtatttatggaagacaggta

SEQ ID NO: 224498 - DNA, 120 bp, Artificial Sequence
  ENSG00000117868_38 (sequence is synthesized)
acaacattaaatctagttgctttcccttagtattagatttgttgagggttttttaaaaatcaggtctgttgaaagtcttctgtcataatctataaagcagcagcactcatggaaattgta

SEQ ID NO: 224499 - DNA, 120 bp, Artificial Sequence
  ENSG00000117868_39 (sequence is synthesized)
gcatgccagtaatttttaccaacatcccatacatctgagttctgcagtccagtgtgtaatccgctccatgtgtattttgcttaatggaatgctttatttaagcacttaggcagagtagac

SEQ ID NO: 224500 - DNA, 120 bp, Artificial Sequence
  ENSG00000117868_40 (sequence is synthesized)
acaattaaaggtacaaagcccagaggaagtggtagagcagcaccgtgcctgccctgaggcagtggagtcagtagcgctgtccccagggccttgagtgcctggaggtgcttggcctccagt

SEQ ID NO: 224501 - DNA, 120 bp, Artificial Sequence
  ENSG00000117868_41 (sequence is synthesized)
agctgcctccattctcttttaaaaaaagggggtgattctgaggcactgaagtgcctcccagatgtggaggagtgaagccaccatcgaggccacactcagcactccaggatcccagcgatg

SEQ ID NO: 224502 - DNA, 120 bp, Artificial Sequence
  ENSG00000117868_42 (sequence is synthesized)
tcagacactcttgagttgtcaaaacgttaattttcagttttaaataatcagtttatctaagaaaagggaattttaacttttctaccttgagccaagccaatgaagggaaaattaattaac

SEQ ID NO: 224503 - DNA, 120 bp, Artificial Sequence
  ENSG00000117868_43 (sequence is synthesized)
ttagtaaatttgaagtgcagctctgttagctcgtacatgtgggttcttatcctgatcctgtgccttaaagtaggaaggtgtttccaagttcagattaaaatagaagcagctggccgggtg

SEQ ID NO: 224504 - DNA, 120 bp, Artificial Sequence
  ENSG00000117868_44 (sequence is synthesized)
tgagactccgtctcaaaaaataaataaaatagaagcagccttgtaactgtatttaccatgataatatattctgcacggtaagaattccttttacagacattctttatcaagaggtcggcc

SEQ ID NO: 224505 - DNA, 120 bp, Artificial Sequence
  ENSG00000117868_45 (sequence is synthesized)
acattctttatcaagaggtcggcccttctttttcaggcacataagccaaatgcaggcctgtgtgtagctgtgtgttttttctgtggttgccgcatttattccacctccagctggaccccc

SEQ ID NO: 224506 - DNA, 120 bp, Artificial Sequence
  ENSG00000117868_46 (sequence is synthesized)
cactgcaaatagagaacagcggtgggggatgggggttaaaaagtagagaacctcctttctgttcaactaatttcacgtgacagtgcatgtatttattcaataaaacctttatgttagctc

SEQ ID NO: 224507 - DNA, 120 bp, Artificial Sequence
  ENSG00000117868_47 (sequence is synthesized)
atgaccgcaaacagggacgccgccctctcatcccaccgccaccccggctgcgctcagcggccgcgcacccccacgtttgccagcagctcccagaggcggtcagcctttgggtttgacgac

SEQ ID NO: 224508 - DNA, 120 bp, Artificial Sequence
  ENSG00000117868_48 (sequence is synthesized)
cgacggcaacttcccgggcctcggcgagcgcagccacgcacccggaagccgcctcggggcgcgacgccgagccaaaaccgcccgcgggctccgaggccacaggcaaaggggcgctggcgc

SEQ ID NO: 224509 - DNA, 120 bp, Artificial Sequence
  ENSG00000117868_49 (sequence is synthesized)
aaaaccctgacaagcagggtgggaagggccccagaggcagcgttctcacgccggaatgcccgataacaagaccgtcccgagagactccgcaaaagccacaaccttgcacactggctaggc

SEQ ID NO: 224510 - DNA, 120 bp, Artificial Sequence
  ENSG00000117868_50 (sequence is synthesized)
atattgcaactggagtaagaatataatgtaaggagcttgggaatgtacagttctgccgatgcgtggtgagcatgagggagtcatatttggagaaccaaggttcattttccagacactgaa

SEQ ID NO: 224511 - DNA, 120 bp, Artificial Sequence
  ENSG00000117868_51 (sequence is synthesized)
tgtgtctttgttaggagatttcataccatgttaatcattatggaaacactacttaagagaatatggctgaaatatgtttgggtttttaaaaatatctttcttacagactaatattgtctg

SEQ ID NO: 224512 - DNA, 79 bp, Artificial Sequence
  ENSG00000117868_52 (sequence is synthesized)
ggtttttaaaaatatctttcttacagactaatattgtctgtggacctttctacatttgtttgtttgtttttgaaacagt

SEQ ID NO: 224513 - DNA, 120 bp, Artificial Sequence
  ENSG00000117868_53 (sequence is synthesized)
aagtgctgaaattacaggcgtgagccaccccacctggcccctttctacattttctaagttcctatctctgaggacaaagggtcaggagcgtagacaacgtagaaaggttctgcagacatg

SEQ ID NO: 224514 - DNA, 120 bp, Artificial Sequence
  ENSG00000117877_0 (sequence is synthesized)
aagttctgaacttgtgaggcatctgggcctccccagaagacatttaacacagaaagcacagccctactaactagtattcttacctgtctcttcaagaatttcagaccaatcgaccgtcct

SEQ ID NO: 224515 - DNA, 120 bp, Artificial Sequence
  ENSG00000117877_1 (sequence is synthesized)
gtctctttaaggcttaggaagagcagtgtggctgcccctttaaggaggcgttgcaacaaaccatattggacagacgatgggggcgacccatcgggacccgacgggcctctgactccagca

SEQ ID NO: 224516 - DNA, 120 bp, Artificial Sequence
  ENSG00000117877_2 (sequence is synthesized)
atacagcgaatcagcggctttcgggaatacatttttcggaaaaagacttcttcctcggttttctgctctgcacacgttgaaattttccccagtttttcctgcagatcgggagtcgagcaa

SEQ ID NO: 224517 - DNA, 120 bp, Artificial Sequence
  ENSG00000117877_3 (sequence is synthesized)
tgcctacccccgcgctcccgcaccagttgggcgctcccggatgatgccctacccctttggatccacgtggtctgcaacctggtgcgagcagcccgggctacagggttgcctgaggtgtgg

SEQ ID NO: 224518 - DNA, 120 bp, Artificial Sequence
  ENSG00000117877_4 (sequence is synthesized)
gtcccaggatggaggagccccaggccggcgatgctgctcggttctcttgtccccccaactttaccgcgaagcccccagcctcagagtcccctcgtttctccttggaggcgctgacgggtc

SEQ ID NO: 224519 - DNA, 120 bp, Artificial Sequence
  ENSG00000117877_5 (sequence is synthesized)
cagatacggagctgtggcttattcaggcccctgcagactttgccccagaatgcttcaatgggcggcatgtgcctctctctggctcccagatcgtcaagggcaaattggcaggcaagcggc

SEQ ID NO: 224520 - DNA, 120 bp, Artificial Sequence
  ENSG00000117877_6 (sequence is synthesized)
accgctatcgagtcctcagcagctgtccccaagctggagaagcgaccctgctggccccctcaacggaggcaggaggtggactcacctgtgcctcagccccccagggcaccctaaggatcc

SEQ ID NO: 224521 - DNA, 120 bp, Artificial Sequence
  ENSG00000117877_7 (sequence is synthesized)
ttgagggtccccagcaatccctgtcagggagccctctgcagcccatcccagcaagtcccccaccacagatccctcctggcctgaggcctcggttctgtgcctttgggggcaacccaccag

SEQ ID NO: 224522 - DNA, 120 bp, Artificial Sequence
  ENSG00000117877_8 (sequence is synthesized)
tcacagggcctaggtcagccttggcccccaacctgctcacctcagggaagaagaaaaaggagatgcaggtgacagaggccccagtcactcaggaggcagtgaatgggcacggggccctgg

SEQ ID NO: 224523 - DNA, 120 bp, Artificial Sequence
  ENSG00000117877_9 (sequence is synthesized)
aggtggacatggctttggggtcgccagaaatggatgtgcggaagaagaagaagaaaaaaaatcagcagctgaaagaaccagaggcagcagggcctgtggggacagagcccacagtggaga

SEQ ID NO: 224524 - DNA, 120 bp, Artificial Sequence
  ENSG00000117877_10 (sequence is synthesized)
cactggagcctctgggagtgctgttcccgtccaccaccaagaagaggaagaagcccaaagggaaagaaaccttcgagccagaagacaagacagtgaagcaggaacagattaacactgagc

SEQ ID NO: 224525 - DNA, 120 bp, Artificial Sequence
  ENSG00000117877_11 (sequence is synthesized)
ctctagaagacacagtcctgtccccgaccaaaaagagaaagaggcaaaaggggacggaagggatggagccagaggagggggtgacagttgagtctcagccacaggtgaaggtggagccac

SEQ ID NO: 224526 - DNA, 120 bp, Artificial Sequence
  ENSG00000117877_12 (sequence is synthesized)
tggaggaagccatccctctgccccctacgaagaagaggaaaaaagaaaagggacagatggcaatgatggagccagggacggaggcgatggagccagtggagccggagatgaagcctctgg

SEQ ID NO: 224527 - DNA, 120 bp, Artificial Sequence
  ENSG00000117877_13 (sequence is synthesized)
gcctcaggcccaggcagctctggcagctcccaaaaagaagacgaagaaagaaaaacagcaagatgccacagtggagccagagacagaggtggtggggcctgagctgccggatgaccttga

SEQ ID NO: 224528 - DNA, 120 bp, Artificial Sequence
  ENSG00000117877_14 (sequence is synthesized)
gcctcaggcagctcccacatccaccaagaagaagaagaagaagaaagagagaggtcacacagtgactgagccaattcagccactagagcctgaactgccaggggagggacagcctgaagc

SEQ ID NO: 224529 - DNA, 120 bp, Artificial Sequence
  ENSG00000117877_15 (sequence is synthesized)
cagggcaactccgggatccaccaagaagaggaagaagcagagtcaggaaagccggatgccagagacagtgccccaagaggagatgccagggccgccactgaattcagagtctggggagga

SEQ ID NO: 224530 - DNA, 120 bp, Artificial Sequence
  ENSG00000117877_16 (sequence is synthesized)
ggctcccacaggccgggacaagaagcggaagcagcagcagcagcagcctgtgtagtctgcccccgggaaactgaggaactaaagaaagctgaaggtgcccacctgggccaccagaaggtg

SEQ ID NO: 224531 - DNA, 120 bp, Artificial Sequence
  ENSG00000117877_17 (sequence is synthesized)
acacccccagaatccctccccagagactgcaccagcgcagccagcaggagcctggcctgggaggacgatttattattacactgggggtttccttggcagctggggtcatcagggtacttt

SEQ ID NO: 224532 - DNA, 120 bp, Artificial Sequence
  ENSG00000117877_18 (sequence is synthesized)
caagaagggctcgtgcaggacatcaaacagcctccgggcctggatgggagggagaaaaaaatgaggaaccagtcattaaaggagctgtttcctgggtaaatctagagtggggttttggtt

SEQ ID NO: 224533 - DNA, 120 bp, Artificial Sequence
  ENSG00000117877_19 (sequence is synthesized)
tctagagtggggttttggttctttattttcccctataccctcaagcatttatccattgagttacaaacaatccagttacaatctttttaagttattattattattattattttttttttt

SEQ ID NO: 224534 - DNA, 82 bp, Artificial Sequence
  ENSG00000117877_20 (sequence is synthesized)
tgcgcctgcctcagcctcccaagttattattatttttttgagacagtctcctggtgtcacccaggctggagtgcagtggtgt

SEQ ID NO: 224535 - DNA, 120 bp, Artificial Sequence
  ENSG00000117877_21 (sequence is synthesized)
tccacctgccttgacctcccaaagtgctaggataacaggtgtgagccaccgcaccctgccaagttattttaaaatgtaccattattattgactatagtcacctggttgtgttatcaaata

SEQ ID NO: 224536 - DNA, 86 bp, Artificial Sequence
  ENSG00000117877_22 (sequence is synthesized)
cccattaaccttccccatctccctgccagcccctaactaccctccccagcctccaggaactatccatccactcttatctccatgag

SEQ ID NO: 224537 - DNA, 85 bp, Artificial Sequence
  ENSG00000117877_23 (sequence is synthesized)
aaccttccccatctccctgccagcccctaactaccctccccagcctccaggaactatccatccactctacacaaataaataagaa

SEQ ID NO: 224538 - DNA, 120 bp, Artificial Sequence
  ENSG00000117877_24 (sequence is synthesized)
cgggctacagggttgcctgaggtgtgggtcccaggatggaggagccccaggccggcggtgagggtgcgggttgacggggtgcggagggtgcgttggtggaaggagaaaggggcgtccgag

SEQ ID NO: 224539 - DNA, 120 bp, Artificial Sequence
  ENSG00000117877_25 (sequence is synthesized)
agggttcgggcggaaaaggaggcgtacctgcaagcaggacttgcgaagagcgtgcattcccagtgggcgaacgggaattcgaacggagagagggttatcttgtggggggctacccgtgga

SEQ ID NO: 224540 - DNA, 120 bp, Artificial Sequence
  ENSG00000117877_26 (sequence is synthesized)
gagcaaggcgcccccaggggttggatcggtgaaattgaggtcgcccctggggaacaggtgggcagaaaggagaaaccaggttgaggggactggagtgctcacgaggttaagaccaatgga

SEQ ID NO: 224541 - DNA, 120 bp, Artificial Sequence
  ENSG00000117899_0 (sequence is synthesized)
gtctagggcgctgcgcggcgcagcgaaaatggcggcttccaggtgggcgcgcaaggccgtggtcctgctttgtgcctctgacctgctgctgctgctgctactgctaccaccgcctgggtc

SEQ ID NO: 224542 - DNA, 120 bp, Artificial Sequence
  ENSG00000117899_1 (sequence is synthesized)
ctgcgcggccgaaggctcgcccgggacgcccgacgagtctaccccacctccccggaagaagaagaaggatattcgcgattacaatgatgcagacatggcgcgtcttctggagcaatggga

SEQ ID NO: 224543 - DNA, 120 bp, Artificial Sequence
  ENSG00000117899_2 (sequence is synthesized)
gaaagatgatgacattgaagaaggagatcttccagagcacaagagaccttcagcacctgtcgacttctcaaagatagacccaagcaagcctgaaagcatattgaaaatgacgaaaaaagg

SEQ ID NO: 224544 - DNA, 120 bp, Artificial Sequence
  ENSG00000117899_3 (sequence is synthesized)
gaagactctcatgatgtttgtcactgtatcaggaagccctactgagaaggagacagaggaaattacgagcctctggcagggcagccttttcaatgccaactatgacgtccagaggttcat

SEQ ID NO: 224545 - DNA, 120 bp, Artificial Sequence
  ENSG00000117899_4 (sequence is synthesized)
tgtgggatcagaccgtgctatcttcatgcttcgcgatgggagctacgcctgggagatcaaggactttttggtcggtcaagacaggtgtgctgatgtaactctggagggccaggtgtaccc

SEQ ID NO: 224546 - DNA, 120 bp, Artificial Sequence
  ENSG00000117899_5 (sequence is synthesized)
cggcaaaggaggaggaagcaaagagaaaaataaaacaaagcaagacaagggcaaaaaaaagaaggaaggagatctgaaatctcggtcttccaaggaagaaaatcgagctgggaataaaag

SEQ ID NO: 224547 - DNA, 120 bp, Artificial Sequence
  ENSG00000117899_6 (sequence is synthesized)
agaagacctgtgatggggcagcagtgacgcgctgtggggggacaggtggacgtggagagctctttgcccagctcctggggtgggagtggtctcaggcaactgcacaccggatgacattct

SEQ ID NO: 224548 - DNA, 120 bp, Artificial Sequence
  ENSG00000117899_7 (sequence is synthesized)
agtgtcttctagaaagggtctgccacatgaccagtttgtggtcaaagaattactgcttaataggcttcaagtaagaagacagatgttttctaattaatactggacactgacaaattcatg

SEQ ID NO: 224549 - DNA, 120 bp, Artificial Sequence
  ENSG00000117899_8 (sequence is synthesized)
tttactataaaatctccttacatggaaatgtgactgtgttgctttttcccatttacacttggtgagtcatcaactctactgagattccactcccctccaagcacctgctgtgattgggtg

SEQ ID NO: 224550 - DNA, 120 bp, Artificial Sequence
  ENSG00000117899_9 (sequence is synthesized)
gcctgctctgatcagatagcaaattctgatcagagaagactttaaaactcttgacttaattgagtaaactcttcatgccatatacatcattttcattatgttaaaggtaaaatatgcttt

SEQ ID NO: 224551 - DNA, 120 bp, Artificial Sequence
  ENSG00000117899_10 (sequence is synthesized)
gtgaactcagatgtctgtagccaggaagccagggtgtgtaaatccaaaatctatgcaggaaatgcggagaatagaaaatatgtcacttgaaatcctaagtagttttgaatttctttgact

SEQ ID NO: 224552 - DNA, 120 bp, Artificial Sequence
  ENSG00000117899_11 (sequence is synthesized)
tgaatcttactcatcagtaagagaactcttggtgtctgtcaggttttatgtggtctgtaaagttaggggttctgttttgtttccttatttaggaaagagtactgctggtgtcgaggggtt

SEQ ID NO: 224553 - DNA, 120 bp, Artificial Sequence
  ENSG00000117899_12 (sequence is synthesized)
atatgttccatttaatgtgacagttttaaaggatttaagtagggaatcagagtcctttgcagagtgtgacagacgactcaataacctcatttgtttctaaacatttttctttgataaagt

SEQ ID NO: 224554 - DNA, 120 bp, Artificial Sequence
  ENSG00000117899_13 (sequence is synthesized)
gcctaaatctgtgctttcgtatagagtaacatgatgtgctactgttgatgtctgattttgccgttcatgttagagcctactgtgaataagagttagaacatttatatacagatgtcattt

SEQ ID NO: 224555 - DNA, 120 bp, Artificial Sequence
  ENSG00000117899_14 (sequence is synthesized)
ctaagaactaaaattctttgggaaaaaccctcaattgtgattttaataaattaaaagtagcacattacatggttagaaaatgtcagtgttaaagaatggtacaaagtgaaaagtgtatcc

SEQ ID NO: 224556 - DNA, 120 bp, Artificial Sequence
  ENSG00000117899_15 (sequence is synthesized)
ctctcttgccgccggtggtagcttgtcccagtggaagctgctgttaacaatttgtgcccccacatccccctccctgcccatccaccaaaaaaaagtacatttacttatgtaaatgtactt

SEQ ID NO: 224557 - DNA, 120 bp, Artificial Sequence
  ENSG00000117899_16 (sequence is synthesized)
atggtgatgtatgtttgttttggcctcacagcatctgtttccccttaatttggtagctgctcacatttccctcgaaagaaccacaccctctgcattctcagttctctgctttggatggga

SEQ ID NO: 224558 - DNA, 120 bp, Artificial Sequence
  ENSG00000117899_17 (sequence is synthesized)
catttgccctgcagtccccccaccctccaggccatgccctctccagggtgaggcctgtgtgatctaccgtactagggtactaggccctgaaagaggcttttcttgttcctcctgcatctt

SEQ ID NO: 224559 - DNA, 120 bp, Artificial Sequence
  ENSG00000117899_18 (sequence is synthesized)
gaacctggagcgggagctgttgtaggccccgcccttggagaagagaactgtctgacagtggggagagagcgccacaccctggtggcataaacgagtccctgaatcatgccgtggctgaac

SEQ ID NO: 224560 - DNA, 120 bp, Artificial Sequence
  ENSG00000117899_19 (sequence is synthesized)
caagccctgtctgtgggctttttctgttgtactcagggcagtttgatggggttactgtcctgcatagccataatggcccagtataaagcagctgttttgatgagataattgctttaatta

SEQ ID NO: 224561 - DNA, 120 bp, Artificial Sequence
  ENSG00000117899_20 (sequence is synthesized)
agcaaaaggtagcaaagctttcactccgccctgtaccttctgtttccacttaggagccttcccatgtcagaatgtgcagatctgtctcattgtttcctgtgcagtgtgcccccacttcac

SEQ ID NO: 224562 - DNA, 120 bp, Artificial Sequence
  ENSG00000117899_21 (sequence is synthesized)
ccagtagtttctgtgtgtctgttatgtactaggtactacaaggtgccaggacggtgtagatacagcctctgctatcgtaaaactcaatgattcggtgggggaagacaaatgtcagtaatg

SEQ ID NO: 224563 - DNA, 120 bp, Artificial Sequence
  ENSG00000117899_22 (sequence is synthesized)
tacaaagtaaaatggcagctgttagaagtatgaaaggggcagggtagggggaggtagaatcttccctgaccaggttaagaaaaccagaggccttctctgagggcaagaggaggagaggag

SEQ ID NO: 224564 - DNA, 120 bp, Artificial Sequence
  ENSG00000117899_23 (sequence is synthesized)
aaatagagtaaggcaggcagaggaaacagtctgagctaagaccctgtggctagaagtggcagagggagaggcagcaggaaggccagcggggaggctggggcccagtgcaggcccaggttg

SEQ ID NO: 224565 - DNA, 120 bp, Artificial Sequence
  ENSG00000117899_24 (sequence is synthesized)
gaggagcgtagcacatggagtttggtaggagtttgggacgccctggtggatcttaattgtgatggggtgggtgtgaaaggcagtccaggttgcactggttgcacaggagaagtgatcaga

SEQ ID NO: 224566 - DNA, 120 bp, Artificial Sequence
  ENSG00000117899_25 (sequence is synthesized)
agaggaccccagcaggtgtgagccgtgagctgggaggtgcttcagtagtgcaggccatagctgaaggtgtcctacatcagcagggtgatggtgaggtttgaaccactgtttcactgcata

SEQ ID NO: 224567 - DNA, 120 bp, Artificial Sequence
  ENSG00000117899_26 (sequence is synthesized)
gtccctgctgatggacacttgagtgttcagattttttgctggtatattcagtgctgcagtggacattttcatacaaaatatttcggtacacttttgtttatatctgaaaggtaaattcct

SEQ ID NO: 224568 - DNA, 120 bp, Artificial Sequence
  ENSG00000117899_27 (sequence is synthesized)
agcagtagaattattagagcaaacggaatttaacattttggtgtgtattgccaaattgccctcccaagtggtttagtcagcttacccttgccaacaatagatctatccttgccagccttg

SEQ ID NO: 224569 - DNA, 120 bp, Artificial Sequence
  ENSG00000117899_28 (sequence is synthesized)
ggcatcacatttaccagtttaatagattgtaaaaccatatcttaattggctaccctgaagccaccatactggagaggctgcgtacagtgtttcacgtagagagagggatacccaggaggc

SEQ ID NO: 224570 - DNA, 120 bp, Artificial Sequence
  ENSG00000117899_29 (sequence is synthesized)
ccacctgctccaaccccagctgcatgagtcttcccagcccaggcacagacatgtggataagatttaaacatttccagccccagccttcaagcaatcctagttgacactgaggggagccaa

SEQ ID NO: 224571 - DNA, 120 bp, Artificial Sequence
  ENSG00000117899_30 (sequence is synthesized)
aatcctagttgacactgaggggagccaacataagctgagctgagaaacagtctgcccagtctgcagattcatgagcaaaagaaatgttgggctgggtacagtggctcacgcctgtaatcc

SEQ ID NO: 224572 - DNA, 87 bp, Artificial Sequence
  ENSG00000117899_31 (sequence is synthesized)
tgacgggatgagactctgtctcaaaaaaacgaaacaaaaattttttaagagaaatgtcatttgtttttgtttttgagacagggtctc

SEQ ID NO: 224573 - DNA, 120 bp, Artificial Sequence
  ENSG00000117899_32 (sequence is synthesized)
tttgagacagggtctcactctgttgccctcactagagtgcagtaggatcacggctcactgaagtctctacctaccggctcaattgatcttcccaccacagcctcccaaatagctgggaga

SEQ ID NO: 224574 - DNA, 120 bp, Artificial Sequence
  ENSG00000117899_33 (sequence is synthesized)
acagcctcccaaatagctgggagaaatgtcctgtttttaatgaatttgtcttcctttttgtcttgtttgttttaatatctagtgatctaataaatttggatgatatcttttgactatcaa

SEQ ID NO: 224575 - DNA, 120 bp, Artificial Sequence
  ENSG00000117899_34 (sequence is synthesized)
cctctcgtctgccagtttgatttggacctgtttttcccacctcagcccccatgctcttgtcaaacgtgtttggcctccagccaaacagggcctgggaggaaaagagagtcctgcttctgc

SEQ ID NO: 224576 - DNA, 120 bp, Artificial Sequence
  ENSG00000117899_35 (sequence is synthesized)
ctggcttccccatcggggaggggagttgaagtgacagcctcctgacagcttagaaatgtggaggacgcagcaagttctggacatggccagccatatgaatgatatcttctctttctttga

SEQ ID NO: 224577 - DNA, 120 bp, Artificial Sequence
  ENSG00000117899_36 (sequence is synthesized)
accatctccacctgctcttatggacaccccgccttggggcaaggcaagggatgggcacaacttggaagattttggctttgtgatcctcagtgtccagtgtcacccagatgggccggaagc

SEQ ID NO: 224578 - DNA, 120 bp, Artificial Sequence
  ENSG00000117899_37 (sequence is synthesized)
aaaagccctatgagaggacggctgccccaccccgttccatggctccccatcgccagccccccacgcccaccaggtaccgcctagccacactgcactgtggccccttgggaagagctctgt

SEQ ID NO: 224579 - DNA, 120 bp, Artificial Sequence
  ENSG00000117899_38 (sequence is synthesized)
gctcagctactgatggtgcctgacatgtgtttgtatggggcaggcagggtctcacctgagcctcactgccacctaggcagggtgatggctttgttgtagacaggggagccatgcacagca

SEQ ID NO: 224580 - DNA, 120 bp, Artificial Sequence
  ENSG00000117899_39 (sequence is synthesized)
ggaaatggggcaaactgtaagggaggagacctcctaggaacctgcctacctttgagctgcccctaggacaaccagcaagtccctgcccctctctgaagcccagtgttcccatccatcaaa

SEQ ID NO: 224581 - DNA, 120 bp, Artificial Sequence
  ENSG00000117899_40 (sequence is synthesized)
tgatggcattgatctacaagatctccttccccactctatcactctgtggctctagaaagagttctgagaggtgaagaaatttgaccaagagtgtggagtaaatggtgcaccccagattag

SEQ ID NO: 224582 - DNA, 120 bp, Artificial Sequence
  ENSG00000117899_41 (sequence is synthesized)
aactctaaacccctgaaacccacacagcactctccatcttgcagttcacagcttgagcatccgaggggcatgggaatccacgtctatactcagcccatcttggcaggcaacatgcattta

SEQ ID NO: 224583 - DNA, 120 bp, Artificial Sequence
  ENSG00000117899_42 (sequence is synthesized)
tcaccaccgggaaagtgccattcaacttaggtcaccttacatacatcagcttttggcaaccgggatcttaatttaaaagacagaggctccaaaatgatttcaggactgggctggaaagga

SEQ ID NO: 224584 - DNA, 120 bp, Artificial Sequence
  ENSG00000117899_43 (sequence is synthesized)
tacttctcttttccttatgtcctcctttggctggtttgaagggtttgcattgcttctgatttttctcattgccccatatgatgggtttctgattttgatgttttccatagtgaggatggt

SEQ ID NO: 224585 - DNA, 120 bp, Artificial Sequence
  ENSG00000117899_44 (sequence is synthesized)
gtataactaagaagcccagctttgagttaggaagattaggatccaagtcctaaccttaagcaagtggcttggctgttaaattcttggtgtcctcatcttaaatggaaataatagtacctg

SEQ ID NO: 224586 - DNA, 120 bp, Artificial Sequence
  ENSG00000117899_45 (sequence is synthesized)
ctgcacaggttattaatgagtaagtgagataattataacatgttgtgcaaagtgcaaggctgaacattgaatagcaaccacaatgatcattatcattattgcccgtggagcttctctgcc

SEQ ID NO: 224587 - DNA, 120 bp, Artificial Sequence
  ENSG00000117899_46 (sequence is synthesized)
gcccatacagcctctctgaggactctccctgcacctagtttttgtgatgataatgggtgtcatgctgacatgtccctcctggatggcttcttccagcacagccagcaagcctgtgctagg

SEQ ID NO: 224588 - DNA, 120 bp, Artificial Sequence
  ENSG00000117899_47 (sequence is synthesized)
cttcaccaccgaagctgcctggccttggacaagccatgtaggttctctgggctttagttttctggaacaaataagagttttgcaagctgcaaaggactgtacaaacgctaggcatcagct

SEQ ID NO: 224589 - DNA, 120 bp, Artificial Sequence
  ENSG00000117899_48 (sequence is synthesized)
agaatgttgaagaagatgcaggacccctggccagtctgaatagcaggaattgggtaggagggtgagactaagccacttttcttatgatacttttgttgaataaagggccactttccaagc

SEQ ID NO: 224590 - DNA, 120 bp, Artificial Sequence
  ENSG00000117899_49 (sequence is synthesized)
attgagtaaactcttcatgccatatacatcattttcattatgttaaaggtctgagcgggaaagttccgaagaataggagtggctgagttagctacggagttcatttggggccgggaagca

SEQ ID NO: 224591 - DNA, 120 bp, Artificial Sequence
  ENSG00000117899_50 (sequence is synthesized)
gagaggaagacaacgataattatgatgaagaacacgtttttgatgtcagaaagtacaacacttcccattatgcactgcatgtgagcctcacacctgccctgcagtggaggagtagatagt

SEQ ID NO: 224592 - DNA, 120 bp, Artificial Sequence
  ENSG00000117899_51 (sequence is synthesized)
aaacaggtggcatcttgcccatccattccagtagaccactagttgtgtgggggattcttaggttgtacccacgtttagtacaaagcatgttctcaactcagcaaaagatgacagcaccct

SEQ ID NO: 224593 - DNA, 120 bp, Artificial Sequence
  ENSG00000117899_52 (sequence is synthesized)
ccatgccaggcatttgccttctctggttttggggtcagtttaaaccccagttcaaacccttacctttcaacttgagacccctgtctgccccaagcttttccagcactctggtccatgggc

SEQ ID NO: 224594 - DNA, 120 bp, Artificial Sequence
  ENSG00000117899_53 (sequence is synthesized)
ctctggagacgtatcttccctttgatgccataagcactatggaactgtgtgagaagaaaccaattagaccagagggagagagcaaactggagaaagtgggcatggggagggatgttggtt

SEQ ID NO: 224595 - DNA, 120 bp, Artificial Sequence
  ENSG00000117899_54 (sequence is synthesized)
tgtgcatggtgggactggagttagcagtgcccagaggcctgtccagggattcgggaaagggcagcctctcctgtgttctgagctgacgggctctttccatgtggtgacgaacatcctgag

SEQ ID NO: 224596 - DNA, 120 bp, Artificial Sequence
  ENSG00000117899_55 (sequence is synthesized)
ctccctcccacacatctggccacagttggtgcccacagccttctccaagcctggacttggctcaccgcgtttacatgtctctctccaaacagaggagaggatgtaagcagagcgtaccat

SEQ ID NO: 224597 - DNA, 120 bp, Artificial Sequence
  ENSG00000117899_56 (sequence is synthesized)
gccagggctcggcacacagtaggacttcgatatgtatctcttcccttgaatgttctcaaccctggttaggtaagaccagatagaaatgtggtgatggaggaaggaaggagaaagggaaga

SEQ ID NO: 224598 - DNA, 120 bp, Artificial Sequence
  ENSG00000117899_57 (sequence is synthesized)
gaaagagaggaggtgcgggaaggcggaggggagcatctgtcaaatcataaaaccatccaggagctcctgaaggttctagatcctgaaggttctagagaccagctccatttggcatcccct

SEQ ID NO: 224599 - DNA, 120 bp, Artificial Sequence
  ENSG00000117899_58 (sequence is synthesized)
gggatttcattagaaccacagaattcctccattgcagacttcctgaatcagaatctgcatttttacaagatctgcaggtgatcatgtatacattaaagctcgagaagccccatgctagaa

SEQ ID NO: 224600 - DNA, 80 bp, Artificial Sequence
  ENSG00000117906_0 (sequence is synthesized)
ctctctgtagccgcccgcggagcatcgcagccggcccgggcccccgccagcctccctcctcgcgtccctcggtgtcctcc

SEQ ID NO: 224601 - DNA, 120 bp, Artificial Sequence
  ENSG00000117906_1 (sequence is synthesized)
ttggggctgctgctgctgtgcgccgccgcggccggcgccggcaaggccgaggagctgcactacccgctgggcgagcgccgcagcgactacgaccgcgaggcgctgctgggcgtccaggaa

SEQ ID NO: 224602 - DNA, 120 bp, Artificial Sequence
  ENSG00000117906_2 (sequence is synthesized)
gatgtggatgaatatgttaaactcggccacgaagagcagcaaaaaagactgcaggcgatcataaagaaaatcgacttggactcagatggctttctcactgaaagtgaactcagttcatgg

SEQ ID NO: 224603 - DNA, 120 bp, Artificial Sequence
  ENSG00000117906_3 (sequence is synthesized)
attcagatgtcttttaagcattatgctatgcaagaagcaaaacaacagtttgttgaatatgataaaaacagtgatgatactgtgacttgggatgaatataacattcagatgtatgatcgt

SEQ ID NO: 224604 - DNA, 120 bp, Artificial Sequence
  ENSG00000117906_4 (sequence is synthesized)
gtgattgactttgatgagaacactgctctggatgatgcagaagaggagtcctttaggaagcttcacttaaaggacaagaagcgatttgaaaaagctaaccaggattcaggtcccggtttg

SEQ ID NO: 224605 - DNA, 120 bp, Artificial Sequence
  ENSG00000117906_5 (sequence is synthesized)
agtcttgaagaatttattgcttttgagcatcctgaagaagttgattatatgacggaatttgtcattcaagaagctttagaagaacatgacaaaaatggtgatggatttgttagtttggaa

SEQ ID NO: 224606 - DNA, 120 bp, Artificial Sequence
  ENSG00000117906_6 (sequence is synthesized)
gaatttcttggtgattacaggtgggatccaactgcaaatgaagatccagaatggatacttgttgagaaagacagattcgtgaatgattatgacaaagataacgatggcaggcttgatccc

SEQ ID NO: 224607 - DNA, 120 bp, Artificial Sequence
  ENSG00000117906_7 (sequence is synthesized)
caagagctgttaccttgggtagtacctaataatcagggcattgcacaagaggaggcgcttcatctaattgatgaaatggatttgaatggtgacaaaaagctctctgaagaagagattctg

SEQ ID NO: 224608 - DNA, 120 bp, Artificial Sequence
  ENSG00000117906_8 (sequence is synthesized)
gaaaacccggacttgtttctcaccagtgaagccacagattatggcagacagctccatgatgactatttctatcatgatgagctttaatctctgagcctgtctcagtagagtactggctcc

SEQ ID NO: 224609 - DNA, 120 bp, Artificial Sequence
  ENSG00000117906_9 (sequence is synthesized)
ttttataatttgttaccagctttacttttgtgataaaatattgatgttgtattttacactcttaagtcttaaccacagtcagaattatcttaatgtagattataattttggtcttttagg

SEQ ID NO: 224610 - DNA, 120 bp, Artificial Sequence
  ENSG00000117906_10 (sequence is synthesized)
aaaaaaaaacaaaaatctgatatttatttcaaaatgtattgaagcaacaaaatattaatattgtgccatatgacaacaaagtctttcctaaatactccatctgtttagtactgtattgtg

SEQ ID NO: 224611 - DNA, 120 bp, Artificial Sequence
  ENSG00000117906_11 (sequence is synthesized)
gaatatttgagttctatttccatacttgaaaacatggaggattttagagatgcctgaacaatattatttaagtagtatgtgaccgagctataaatttttgtttttgttctaagtagattt

SEQ ID NO: 224612 - DNA, 120 bp, Artificial Sequence
  ENSG00000117906_12 (sequence is synthesized)
aatttgggaactgacaggacaatgtttttaggtttagcattttgtttaaaaacctttaaagaaacctttagaaggacttagacctcacatattaatgttgagaagttctgcttaatttta

SEQ ID NO: 224613 - DNA, 120 bp, Artificial Sequence
  ENSG00000117906_13 (sequence is synthesized)
aaatggtttctataaagggttttattgtatgaaatagaactttatatttttgcatatgtatagatagtaattatatttaatgtataactatagcattatggtgagtggaatttgacattg

SEQ ID NO: 224614 - DNA, 120 bp, Artificial Sequence
  ENSG00000117906_14 (sequence is synthesized)
tccaaacctttttcatttttgagtgattaaaaatgaaatgtcctttgtatatgtttgtttgcttttctttaactttcagataaatattgaatttagcataggttttgtggtattgtacat

SEQ ID NO: 224615 - DNA, 120 bp, Artificial Sequence
  ENSG00000117906_15 (sequence is synthesized)
tatcttgcctcatccattcctttatgtggatagttcccaaaactgtcaaattattcttgctgcattttcttattttttttttaaataagagaatcatgttataatataattgaatgtgca

SEQ ID NO: 224616 - DNA, 120 bp, Artificial Sequence
  ENSG00000117906_16 (sequence is synthesized)
cctgacacattttaataattggtgttgtagcaaatgtggttttgctctttggggctataaataatcttgagtaacgcaggttggaattaccaatagagctggtcagttatcaacagtaga

SEQ ID NO: 224617 - DNA, 120 bp, Artificial Sequence
  ENSG00000117906_17 (sequence is synthesized)
gctcagtatcaattttactgaaattaaaatcatacttgataagcatgataatcaattttaacctaattcagcaggtcaacttatttaactttggtggaggtgggatagggaaaagtgaag

SEQ ID NO: 224618 - DNA, 77 bp, Artificial Sequence
  ENSG00000117906_18 (sequence is synthesized)
ttatttaactttggtggaggtgggatagggaaaagtgaagggaggaattaatttttttctagttctgatgtacagag

SEQ ID NO: 224619 - DNA, 120 bp, Artificial Sequence
  ENSG00000117906_19 (sequence is synthesized)
tttcattctttaaatcacttttatttgtgggtgaagaggtcagctatgcattctcttaatcactttccagcctaaagttgtctcatatacagcacactgggggctcaacaagtacctatg

SEQ ID NO: 224620 - DNA, 120 bp, Artificial Sequence
  ENSG00000117906_20 (sequence is synthesized)
actatttgagaagacatgaaactcttctctgatagaatcgactgcacctatatacctctctactgccgcatctttgctgatgtgaggtgtgcttgcaaattgtaagcttccacaccttaa

SEQ ID NO: 224621 - DNA, 120 bp, Artificial Sequence
  ENSG00000117906_21 (sequence is synthesized)
tgactgcttgcttgggtatctacatggttttcattttaacctacactatatgtctggctatagcagttttagaattacagatttaccactatcactcatctgtcatttgtcagactcact

SEQ ID NO: 224622 - DNA, 120 bp, Artificial Sequence
  ENSG00000117906_22 (sequence is synthesized)
gaagctggcatatttgaaatcaccagtttgactagttaactatttgtttttctctctagcttctccaaaatctatgccagaatagatcatcagatatggattatatttcaatcctttgca

SEQ ID NO: 224623 - DNA, 120 bp, Artificial Sequence
  ENSG00000117906_23 (sequence is synthesized)
catgggtggaagtagtgtgtgtcactatcagactatctcatgacaaacccttttcctctgccacagcactgtgcaggaggcctcagctgaaatggtgcagccacaagatgaaagtggctt

SEQ ID NO: 224624 - DNA, 120 bp, Artificial Sequence
  ENSG00000117906_24 (sequence is synthesized)
tgatcttgagtctgtgtaggtcagctggatccacagtgggctttgtatgatcaaaaaataagcttttaattatgttaagccactgagatttggttgtgcttttttgtttttaaccacagc

SEQ ID NO: 224625 - DNA, 120 bp, Artificial Sequence
  ENSG00000117906_25 (sequence is synthesized)
agagcccatcctgctgtgactgagtgaagatttcacatttaacaataggcttttaataagcatgcagagaaaaagaatcatctgcttgaacagagatgctatatctactgctgagtcaaa

SEQ ID NO: 224626 - DNA, 120 bp, Artificial Sequence
  ENSG00000117906_26 (sequence is synthesized)
aaggctttttttagatttgaattttaaataagacttttaaaataaagcttttattttggttttaatataattaggataatttgaatttatccttgagcatgagagtaaaaatagtttgag

SEQ ID NO: 224627 - DNA, 120 bp, Artificial Sequence
  ENSG00000117906_27 (sequence is synthesized)
aaatagtttgagactttctgaatcattggctgattctgcctgaaggacttaatgacttccattatttgagttcaggtacaacttcaaaggggaaaattgaatgggatgtgcacatgttgg

SEQ ID NO: 224628 - DNA, 120 bp, Artificial Sequence
  ENSG00000117906_28 (sequence is synthesized)
ctcatatgtagttctgattgggccaatttgcaggacagaaaatgatgtctagattatgatataaatttaaaggaagccaggacgttcagaggaaaagctagcatatcatgtttgccttac

SEQ ID NO: 224629 - DNA, 120 bp, Artificial Sequence
  ENSG00000117906_29 (sequence is synthesized)
ttagttctttcctttgcagttttaaaaataggctttttttttttttagtgtagttttatgttcacagcaaaattgagcaaaaagtagtatagagagtttcaatatgtcccctgccccaca

SEQ ID NO: 224630 - DNA, 120 bp, Artificial Sequence
  ENSG00000117906_30 (sequence is synthesized)
tacgtacagcctcccccactatcctatcctatatgtcatgagatagtacctaccagagtggtacatttgttaaaatcgatgaaactgttaacatatcattgtcacccaaagtgcatagtt

SEQ ID NO: 224631 - DNA, 120 bp, Artificial Sequence
  ENSG00000117906_31 (sequence is synthesized)
tacattagggttcactcttggtgctgcacatgctctgggtttggacaaatgtataattacatattcccaccattgtagtgtggtagaatatttcccttgccctaaagtctttctgctcca

SEQ ID NO: 224632 - DNA, 120 bp, Artificial Sequence
  ENSG00000117906_32 (sequence is synthesized)
cctattcatccctcccttccctgtaaccccaagcaatactgatctttttactgttcataattttttagattgtagtaaaatacacataacaaaattcatcttaacagtttttaattgtac

SEQ ID NO: 224633 - DNA, 120 bp, Artificial Sequence
  ENSG00000117906_33 (sequence is synthesized)
agttcggtggtatggtattaaatacagtcaaaatgtgaaactattaccaccttccatctccatgaacttcatttgtaaaacggaaatttatacccattaaacaataaagccccctttccc

SEQ ID NO: 224634 - DNA, 80 bp, Artificial Sequence
  ENSG00000117906_34 (sequence is synthesized)
cggaaatttatacccattaaacaataaagccccctttccccttcccttcagcacctggcaaacaccattctagttttttt

SEQ ID NO: 224635 - DNA, 81 bp, Artificial Sequence
  ENSG00000117906_35 (sequence is synthesized)
cctctgtctctgtgggattacaggcgggcaccaccatgccccctaattttttgtatttagtagaaatggggtttcaccatg

SEQ ID NO: 224636 - DNA, 72 bp, Artificial Sequence
  ENSG00000117906_36 (sequence is synthesized)
cattctagttttctttttctttcttttttgagacggagtctcactcttgtcatccaggctggagtgcagtgg

SEQ ID NO: 224637 - DNA, 120 bp, Artificial Sequence
  ENSG00000117906_37 (sequence is synthesized)
aaagtgctgagattacgggcatgagccaccgcgcccagccccattctagtttgtgtctattaaaatagactcatatagtatttgtctttttgtgagtggcttcacttagcataacgtccc

SEQ ID NO: 224638 - DNA, 120 bp, Artificial Sequence
  ENSG00000117906_38 (sequence is synthesized)
caaagttcacccatattgttaccagaatttctttcgtcaggctgaacaatactttattgtttgcatataccacattttgcttatccattcaccctttgatggacacaggttgcttccacc

SEQ ID NO: 224639 - DNA, 120 bp, Artificial Sequence
  ENSG00000117906_39 (sequence is synthesized)
ttttattgtgaataatgctgccatgaatatgggtgtacaaatatttctttgagatcctgcttttagttcttttggatatatattatacatagaagtgggattgctggatcatatagtaat

SEQ ID NO: 224640 - DNA, 120 bp, Artificial Sequence
  ENSG00000117906_40 (sequence is synthesized)
ctatttttaatattttgaggaactgccatagtgtttcccacagcagctgtgccattttgcatttccaccaatagtgcacaagagttccagtttctttacatccttaccaacacttgctat

SEQ ID NO: 224641 - DNA, 120 bp, Artificial Sequence
  ENSG00000117906_41 (sequence is synthesized)
tttttttcttttttttttttaatagtagccatcctgttgggtgagacgtggtatctcgttgtggctttgatttgcatttccctaatggtctgtctctacagttttgcctgttccagaata

SEQ ID NO: 224642 - DNA, 120 bp, Artificial Sequence
  ENSG00000117906_42 (sequence is synthesized)
tgttccagaatatcattcctttgcaatttaaatgtgaggataaatgtatgctattgtttctcaaacgtttttgtgttacaatacctccttttgagtgagaaatgtcaactcaaacttaca

SEQ ID NO: 224643 - DNA, 120 bp, Artificial Sequence
  ENSG00000117906_43 (sequence is synthesized)
ctttttcacttaggaagatgatttaggaaagccacttagagtaaaagtttttaaacaactgtaaaaactaatttgcttcattgcaacatttgagttctgtcgaataaatatttggccaga

SEQ ID NO: 224644 - DNA, 120 bp, Artificial Sequence
  ENSG00000117906_44 (sequence is synthesized)
ttctagtatcacacattatatatttcctcatgtagaatcattagtctaccaaaagatggcagttttgttcctcacaagtttctgttgtaatctaaaaataaatgattatggtagcttttt

SEQ ID NO: 224645 - DNA, 120 bp, Artificial Sequence
  ENSG00000117906_45 (sequence is synthesized)
tattactgtacctaacactttttaccctctactagaatacaaagtttttatatacaagaaaaaaaaagagtgttgaagttttatgaaactgaccatcttttttgttatttttttaggaat

SEQ ID NO: 224646 - DNA, 120 bp, Artificial Sequence
  ENSG00000117906_46 (sequence is synthesized)
ttgccatttgtaaaaaacagtctttctgtttttggcttcttcgatttaatgtgagctattcttattttgtgttcttcaaatggccgtgaaatgtgaaccagaaaaagctacccccttcac

SEQ ID NO: 224647 - DNA, 120 bp, Artificial Sequence
  ENSG00000117906_47 (sequence is synthesized)
tttttttttttttaaagaaatctcagcttgttgaaagagatcctttctttccataggcaaatttggccaaatttagctcttctcctgaaacatggacctttttgctccaaagtgaagggt

SEQ ID NO: 224648 - DNA, 120 bp, Artificial Sequence
  ENSG00000117906_48 (sequence is synthesized)
tctttcataaggaaatcaaagcacttggtattttgaataatggtttattcaaaaagaacttgattgactcagcaaagtacctcaaattcttgtttgtctgcttttaccatgttaaacctg

SEQ ID NO: 224649 - DNA, 120 bp, Artificial Sequence
  ENSG00000117906_49 (sequence is synthesized)
aacataaaatgcaaattatttggtctagttatttaaaattttgaaacattaagttaaaagctatttggaaacaagttattattttttcttttctgtcatgattgggtgaatataactggc

SEQ ID NO: 224650 - DNA, 120 bp, Artificial Sequence
  ENSG00000117906_50 (sequence is synthesized)
ttgtagagtctgatgttaataaaacaaattctttggggaaagaggtgagcctctccgctgtaaatcagtaattgtaaaagaactagtgtttaggtaaatgactgctacctgacctctatt

SEQ ID NO: 224651 - DNA, 120 bp, Artificial Sequence
  ENSG00000117906_51 (sequence is synthesized)
attctagaagactgaagagggtatttttattcagtagtgaaacacttaaaagcttctaaaatatttgaaattgtgctttaaaaaaatgcacagtttaatacatatcagtttataggaagg

SEQ ID NO: 224652 - DNA, 120 bp, Artificial Sequence
  ENSG00000117906_52 (sequence is synthesized)
aaagctattcccagaaattctcaaaacagaaattatgcaggattagcagtatagcattattggctcccaaggctcttggttacagaattaccattgaaaattttatcaaaagcagccttg

SEQ ID NO: 224653 - DNA, 120 bp, Artificial Sequence
  ENSG00000117906_53 (sequence is synthesized)
tccctgatagctgccgaatcatttttaaaaaggggggtggatgggaagatgggagagaaagtagaaaaggatatgtgtttattaaaccttaacatgggatccatttaaacttttgatgtt

SEQ ID NO: 224654 - DNA, 120 bp, Artificial Sequence
  ENSG00000117906_54 (sequence is synthesized)
tgttatttatatctgaatatacagaattaacactataaagagcctgctaagactagacttccaggctgagcacggtgactcatgcctgtagtcccagcattttgggaggctgaggcaggt

SEQ ID NO: 224655 - DNA, 120 bp, Artificial Sequence
  ENSG00000117906_55 (sequence is synthesized)
gctggggtgggaggatcacttgaacctgggcggtggaggtttcagtaagccgagattgcaccactgtactccaacctggatgacggagtgagacctcatctccccaccccccaaaaaaga

SEQ ID NO: 224656 - DNA, 120 bp, Artificial Sequence
  ENSG00000117906_56 (sequence is synthesized)
aaagatttccaaatattaggtacatatactaatattatgagattctcaacataagaagactgtttttctgaaacaataatgtatttttgaaaagtcacttagaggaccagaaacattttt

SEQ ID NO: 224657 - DNA, 120 bp, Artificial Sequence
  ENSG00000117906_57 (sequence is synthesized)
taaaagccctaccaagatttaatacatggtataaagttattgatttttgggcattcaaaaaagtattgagattaattattaaagtagacagtatagtactgtagaaagaatagggaggat

SEQ ID NO: 224658 - DNA, 120 bp, Artificial Sequence
  ENSG00000117906_58 (sequence is synthesized)
ccaagttcagtagttttgtttgttttttgagtcagggtcttgctatggtgtgaaggctggccttgaacttctgggctcatgcagtcttcccaagttgctggaactacaggcgtgcgccac

SEQ ID NO: 224659 - DNA, 120 bp, Artificial Sequence
  ENSG00000117906_59 (sequence is synthesized)
aaggtttattaatggtgtggtagggattctcatcccaattgcttattagagatttttatcccagtttgatagatgaggaaaccagagaggttaagcagtttgcgctgacaccacagctag

SEQ ID NO: 224660 - DNA, 120 bp, Artificial Sequence
  ENSG00000117906_60 (sequence is synthesized)
taagtggcattgctggaattcaggtctgggtctatatgactctagagcttgtgagtctatcctgcccctaatacatgtatttgtgtagcttaccttcaaagggacgatgtgaagataaat

SEQ ID NO: 224661 - DNA, 120 bp, Artificial Sequence
  ENSG00000117906_61 (sequence is synthesized)
gagataacggatgggaatgtactttaaatttcacatagtttgtatttttcaaagtatttaaaatgatgtggtatactaatgagaaattttaattttcaaagcttcacttaaaggacaaga

SEQ ID NO: 224662 - DNA, 120 bp, Artificial Sequence
  ENSG00000117906_62 (sequence is synthesized)
cattgaaagacagccttgctcattgaaagctctcttcaacaggaaatgtaatgaggatctgtgtctgatcctacttgtttcgttaactgtaatacaagttcaacaaatggatttatagct

SEQ ID NO: 224663 - DNA, 120 bp, Artificial Sequence
  ENSG00000117906_63 (sequence is synthesized)
tatctgagaacgctgtcttgcttacttttacttccgtgtctagagtcaaacatttttctttcttttcaaacaaatctaattttattatcagtttaaatggggaaggaagtaaggtagata

SEQ ID NO: 224664 - DNA, 120 bp, Artificial Sequence
  ENSG00000117906_64 (sequence is synthesized)
tttttaaacaaaatcctgtgctgttgcaggtggatcttaaaagagatagaaacataaaacactacaaatactggtgtaaacacagtatcagaagcttagtagaaggtgaataagtgtttg

SEQ ID NO: 224665 - DNA, 120 bp, Artificial Sequence
  ENSG00000117906_65 (sequence is synthesized)
aaattaagagtttgcttttatataagcagctgttttttcagaattgttgcttaaagacaccaaacaatgccatttttaaattggtcaccagttttacttattctgattgtcactttaaaa

SEQ ID NO: 224666 - DNA, 120 bp, Artificial Sequence
  ENSG00000117906_66 (sequence is synthesized)
ttacacatggcattactttgtgaaaacatgtaagaaactttgtatagaaacatgatatacagtaaaacattacccacctcacatctgggaaaactagatatcggaacaaatagcagttaa

SEQ ID NO: 224667 - DNA, 120 bp, Artificial Sequence
  ENSG00000117906_67 (sequence is synthesized)
caaaattactagtttgtgaaaacatccaatgattttaaaactgggttgtttagactcgtgtcacttttgaaaatgactatatatttgttcttatgtcaggacttttcagttaagtagttc

SEQ ID NO: 224668 - DNA, 120 bp, Artificial Sequence
  ENSG00000117906_68 (sequence is synthesized)
tgttttattgggctttctttagtaaactttaaattcacttcctttattctagggatataccaaacttcttattggatacatgtgatattcttgtgtatgtatatttgtgtttttttatat

SEQ ID NO: 224669 - DNA, 120 bp, Artificial Sequence
  ENSG00000117906_69 (sequence is synthesized)
aataatcagggcattgcacaagaggaggtaagtgttacagaacaactgtttctctccaccccctccccccgaatttggtgctgttgataggaaaagaagttcaaaatcttaagccaaaga

SEQ ID NO: 224670 - DNA, 120 bp, Artificial Sequence
  ENSG00000117906_70 (sequence is synthesized)
aagaagtaatggagttatttgggattgatgcattactatgttttgaatttacgaactgtttagattgtcagggagacgaggaagttaagattgtgtcatgtattaatttgagagtacagt

SEQ ID NO: 224671 - DNA, 120 bp, Artificial Sequence
  ENSG00000117906_71 (sequence is synthesized)
gaatagaataatagtttgtatttacctacagggactcaaaacaggttataataatttttcattgccttgatatatcctggattggatttgagtggagagagacagaacccagcagaaatg

SEQ ID NO: 224672 - DNA, 120 bp, Artificial Sequence
  ENSG00000117971_0 (sequence is synthesized)
actcgaccgcgcggctcacgggtgccctgtgaccccacagcggagctcgcggcggctgccacccggccccgccggccatgaggcgcgcgccttccctggtccttttcttcctggtcgccc

SEQ ID NO: 224673 - DNA, 120 bp, Artificial Sequence
  ENSG00000117971_1 (sequence is synthesized)
tttgcgggcgcgggaactgccgcgtggccaatgcggaggaaaagctgatggacgaccttctgaacaaaacccgttacaataacctgatccgcccagccaccagctcctcacagctcatct

SEQ ID NO: 224674 - DNA, 120 bp, Artificial Sequence
  ENSG00000117971_2 (sequence is synthesized)
ccatcaagctgcagctctccctggcccagcttatcagcgtgaatgagcgagagcagatcatgaccaccaatgtctggctgaaacaggaatggactgattaccgcctgacctggaacagct

SEQ ID NO: 224675 - DNA, 120 bp, Artificial Sequence
  ENSG00000117971_3 (sequence is synthesized)
cccgctacgagggtgtgaacatcctgaggatccctgcaaagcgcatctggttgcctgacatcgtgctttacaacaacgccgacgggacctatgaggtgtctgtctacaccaacttgatag

SEQ ID NO: 224676 - DNA, 120 bp, Artificial Sequence
  ENSG00000117971_4 (sequence is synthesized)
tccggtccaacggcagcgtcctgtggctgccccctgccatctacaagagcgcctgcaagattgaggtgaagtactttcccttcgaccagcagaactgcaccctcaagttccgctcctgga

SEQ ID NO: 224677 - DNA, 120 bp, Artificial Sequence
  ENSG00000117971_5 (sequence is synthesized)
cctatgaccacacggagatagacatggtcctcatgacgcccacagccagcatggatgactttactcccagtggtgagtgggacatagtggccctcccagggagaaggacagtgaacccac

SEQ ID NO: 224678 - DNA, 120 bp, Artificial Sequence
  ENSG00000117971_6 (sequence is synthesized)
aagaccccagctacgtggacgtgacttacgacttcatcatcaagcgcaagcctctgttctacaccatcaacctcatcatcccctgcgtgctcaccaccttgctggccatcctcgtcttct

SEQ ID NO: 224679 - DNA, 120 bp, Artificial Sequence
  ENSG00000117971_7 (sequence is synthesized)
acctgccatccgactgcggcgagaagatgacactgtgcatctcagtgctgctggcactgacattcttcctgctgctcatctccaagatcgtgccacccacctccctcgatgtgcctctca

SEQ ID NO: 224680 - DNA, 120 bp, Artificial Sequence
  ENSG00000117971_8 (sequence is synthesized)
tcggcaagtacctcatgttcaccatggtgctggtcaccttctccatcgtcaccagcgtctgtgtgctcaatgtgcaccaccgctcgcccagcacccacaccatggcaccctgggtcaagc

SEQ ID NO: 224681 - DNA, 120 bp, Artificial Sequence
  ENSG00000117971_9 (sequence is synthesized)
gctgcttcctgcacaagctgcctaccttcctcttcatgaagcgccctggccccgacagcagcccggccagagccttcccgcccagcaagtcatgcgtgaccaagcccgaggccaccgcca

SEQ ID NO: 224682 - DNA, 120 bp, Artificial Sequence
  ENSG00000117971_10 (sequence is synthesized)
agccggctctaccccggtggctatccccagggatttctggctgcggtcctctgggaggttccgacaggatgtgcaggaggcattagaaggtgtcagcttcatcgcccagcacatgaagaa

SEQ ID NO: 224683 - DNA, 120 bp, Artificial Sequence
  ENSG00000117971_11 (sequence is synthesized)
tgacgatgaagaccagagtgtcgttgaggactggaagtacgtggctatggtggtggaccggctgttcctgtgggtgttcatgtttgtgtgcgtcctgggcactgtggggctcttcctacc

SEQ ID NO: 224684 - DNA, 120 bp, Artificial Sequence
  ENSG00000117971_12 (sequence is synthesized)
gcccctcttccagacccatgcagcttctgaggggccctacgctgcccagcgtgactgagggccccctgggttgtggggtgagaggatgtgagtggccgggtgggcactttgctgcttctt

SEQ ID NO: 224685 - DNA, 120 bp, Artificial Sequence
  ENSG00000117971_13 (sequence is synthesized)
tctgggttgtggctgatgaggccctaagtaaatatgtgagcattggccatcaaccccatcaaaccagccacagccgtggaacaggcaaggatgggggcctgggctgtcctctctgaatgc

SEQ ID NO: 224686 - DNA, 120 bp, Artificial Sequence
  ENSG00000117971_14 (sequence is synthesized)
cttggagggatcccaggaagccccagtaggagggagcttcagacagttcaattctggcctgtcttccttccctgcaccgggcaatggggataaagatgacttcgtagcagcacctactat

SEQ ID NO: 224687 - DNA, 120 bp, Artificial Sequence
  ENSG00000117971_15 (sequence is synthesized)
gcttcaggcatggtgccggcctgcctctccatcaccatctctctccacttccccttgtccagttcctcacacacttctagattcttcccagctcagaggcttggcatttgccatatcatc

SEQ ID NO: 224688 - DNA, 87 bp, Artificial Sequence
  ENSG00000117971_16 (sequence is synthesized)
attcttcccagctcagaggcttggcatttgccatatcatcatctttttttttttcttttaaacggagtcttgctatatcgcccaggc

SEQ ID NO: 224689 - DNA, 67 bp, Artificial Sequence
  ENSG00000117971_17 (sequence is synthesized)
tcaaaatgcctggccttccctatcttctacctgaaccttcttcctcttcccccagggcttcccaagc

SEQ ID NO: 224690 - DNA, 120 bp, Artificial Sequence
  ENSG00000117971_18 (sequence is synthesized)
tacctgaaccttcttcctcttcccccagggcttcccaagctctttccacagccacatcagtcagggcatggctccaatccattctttgctccaatgtcacctcctctgagaggccttccc

SEQ ID NO: 224691 - DNA, 120 bp, Artificial Sequence
  ENSG00000117971_19 (sequence is synthesized)
taaccacccaatcattctaaagcagcctccctacagtcacgttaccctgcctccttcctcgagcactcctgtgtacctgtcgctcttatctggtggcatgtatgtcatccacagctcacc

SEQ ID NO: 224692 - DNA, 120 bp, Artificial Sequence
  ENSG00000117971_20 (sequence is synthesized)
cactagagtgtgagctccatgagaacagggacctgctccttcacattcgtggtagtatccccagggcctaggacagagcttggcacacagtaggtgctcaataaatgtttgttgaatgaa

SEQ ID NO: 224693 - DNA, 120 bp, Artificial Sequence
  ENSG00000117971_21 (sequence is synthesized)
agcagccctcactagactacaaacctgctggcgctttgatcttggacttcccacccaccagaacttgtctaacgaccacttaatgaaaatccaccgcctccagtgggagtatgtgacaac

SEQ ID NO: 224694 - DNA, 120 bp, Artificial Sequence
  ENSG00000117971_22 (sequence is synthesized)
caagagcctgagctttggaatcaaactgaacggagttggactcatgcctccaccataactagttttgtcaccttataaattaaccttctagagtagaagtcagtaaactcttcctataaa

SEQ ID NO: 224695 - DNA, 120 bp, Artificial Sequence
  ENSG00000117971_23 (sequence is synthesized)
tgtaaatggcagcagccatagacaacacatgaatgaatgaacaaggctatgttccagtaacaacgggcagtggctggatttggcccacaggctacagttaatcaatctctgctctcagtt

SEQ ID NO: 224696 - DNA, 120 bp, Artificial Sequence
  ENSG00000117971_24 (sequence is synthesized)
cccacatttgtaagatagggacaataatataactacctcatagggctgttgtgggaataaatggggcaatgtgtcaaattctttgctaaatgctttatgtataaaaagtaagccaataaa

SEQ ID NO: 224697 - DNA, 78 bp, Artificial Sequence
  ENSG00000117971_25 (sequence is synthesized)
tgcagtttgatctcagactgctgtggtagctttctcacctctggaggactcagcattcaaggtgccatcttggaagca

SEQ ID NO: 224698 - DNA, 120 bp, Artificial Sequence
  ENSG00000117971_26 (sequence is synthesized)
ctctggaggactcagcattcaaggtgccatcttggaagcagagagcagccctcactagactacaaacctgctggcgctttgatcttggacttcccacccaccagaactggtctcgctctg

SEQ ID NO: 224699 - DNA, 120 bp, Artificial Sequence
  ENSG00000117971_27 (sequence is synthesized)
acttcccacccaccagaactggtctcgctctgttgctcgagctggagtgtggtagcaccatcgtggctcactgcagccttgacctcccctggatcaagcgatcctcctacctcagcctcc

SEQ ID NO: 224700 - DNA, 120 bp, Artificial Sequence
  ENSG00000117971_28 (sequence is synthesized)
gatgtagggctgggacccaggtccacggagacaccagcccaaagagcccagggaggtcgggcttgggtcagcaggaggggagagcagagtctgcagcaggaagcccgaggagtcaccagc

SEQ ID NO: 224701 - DNA, 120 bp, Artificial Sequence
  ENSG00000117971_29 (sequence is synthesized)
ccaaagtcacccagggatgactgcgtttctcacctctggaggactcagcattcaaggtgccatcttggaagcagagagcagccctcactagactacaaacctgctggcgctttgatcttg

SEQ ID NO: 224702 - DNA, 120 bp, Artificial Sequence
  ENSG00000117971_30 (sequence is synthesized)
cggttctgggagtggggtggggtggatggagtgaactcagcaggcacccccagctctgctctcctgtggtgtgactggatctccaggagggacttcgacttttccaggtcttagcactga

SEQ ID NO: 224703 - DNA, 120 bp, Artificial Sequence
  ENSG00000117971_31 (sequence is synthesized)
agatgctttggtgcttctgcacaggggagaaaattcaaaataaaaacaaaaccataaaccatgcaatacaacttttatatggatgctaaaaataaaatgttgttttgttttcttaaagtt

SEQ ID NO: 224704 - DNA, 75 bp, Artificial Sequence
  ENSG00000117971_32 (sequence is synthesized)
agacctgatgggaaagcagaggactgagccaaggcccaggtgatatagaaataaacaaaggccaaggtgttgtgc

SEQ ID NO: 224705 - DNA, 120 bp, Artificial Sequence
  ENSG00000117971_33 (sequence is synthesized)
agctggtggaggaggttgccatttacagtaaaggaaacattggctttttgacatcttatcttctacagcgtttgccaatgagtgctgcaggaattccctgtatatctgggtgctcccaac

SEQ ID NO: 224706 - DNA, 120 bp, Artificial Sequence
  ENSG00000117971_34 (sequence is synthesized)
atccctgttgtgaaacgaaggagagttcatcataaaagtttttagcagcaaatttttttttttgctttgtgttactttattctacaagtgatttttatttacttacttgcacaaatttat

SEQ ID NO: 224707 - DNA, 120 bp, Artificial Sequence
  ENSG00000117971_35 (sequence is synthesized)
ggggcatgtgtgaaattttgttacgtgtatataatgcatagtgatcaagtcagtatttaggctgtccatctcatgagtgtagaacatttttgtttaaccctagtcaccctactatgctat

SEQ ID NO: 224708 - DNA, 120 bp, Artificial Sequence
  ENSG00000117971_36 (sequence is synthesized)
ggcctggtgacagccaggccagggcagcaggcccagccctaagagtcatccaggcctgagtccaaccctgagccccatctctgctttacccagccttccaggccatcaagctagaagaga

SEQ ID NO: 224709 - DNA, 120 bp, Artificial Sequence
  ENSG00000117983_0 (sequence is synthesized)
cggctccctccctgcccgtccccgtccccccacccgtgccagcccccaggatgggtgccccgagcgcgtgccggacgctggtgttggctctggcggccatgctcgtggtgccgcaggcag

SEQ ID NO: 224710 - DNA, 120 bp, Artificial Sequence
  ENSG00000117983_1 (sequence is synthesized)
gcaggcagagacccagggccctgtggagccgagctgggagaatgcagggcacaccatggatggcggtgccccgacgtcctcgcccacccggcgcgtgagctttgttccacccgtcactgt

SEQ ID NO: 224711 - DNA, 120 bp, Artificial Sequence
  ENSG00000117983_2 (sequence is synthesized)
cttccccagcctgagccccctgaacccggcgcacaatgggcgggtgtgcagcacctggggtgacttccactacaagaccttcgacggcgacgtcttccgcttccctggcctttgcaacta

SEQ ID NO: 224712 - DNA, 120 bp, Artificial Sequence
  ENSG00000117983_3 (sequence is synthesized)
cgtgttctctgagcactgccgcgccgcctacgaggacttcaacgtccagctacgccgaggcctagtgggctccaggcctgtggtcacccgtgttgtcatcaaggcccaggggctggtgct

SEQ ID NO: 224713 - DNA, 120 bp, Artificial Sequence
  ENSG00000117983_4 (sequence is synthesized)
ggaggcgtccaacggctccgtcctcatcaatgggcagcgggaggagctgccttacagccgcactggcctcctggtggagcagagcggggactacatcaaggtcagcatccggctggtgct

SEQ ID NO: 224714 - DNA, 120 bp, Artificial Sequence
  ENSG00000117983_5 (sequence is synthesized)
gacattcctgtggaacggagaggacagtgccctgctggagctggatcccaaatacgccaaccagacctgtggcctgtgtggggacttcaacggcctcccggccttcaacgagttctatgc

SEQ ID NO: 224715 - DNA, 120 bp, Artificial Sequence
  ENSG00000117983_6 (sequence is synthesized)
ccacaacgccaggctgaccccgctccagtttgggaacctgcagaagttggatgggcccacggagcagtgcccggacccgctgcccttgccggccggcaactgcacggacgaggagggcat

SEQ ID NO: 224716 - DNA, 120 bp, Artificial Sequence
  ENSG00000117983_7 (sequence is synthesized)
ctgccaccgcaccctgctggggccggcctttgcggagtgccacgcactggtggacagcactgcgtacctggccgcctgcgcccaggacctgtgccgctgccccacctgcccgtgtgccac

SEQ ID NO: 224717 - DNA, 120 bp, Artificial Sequence
  ENSG00000117983_8 (sequence is synthesized)
ctttgtggaatactcacgccagtgcgcccacgcggggggccagccgcggaactggaggtgccctgagctctgcccccggacctgccccctcaacatgcagcaccaggagtgtggctcacc

SEQ ID NO: 224718 - DNA, 120 bp, Artificial Sequence
  ENSG00000117983_9 (sequence is synthesized)
ctgcacggacacctgctccaacccccagcgcgcgcagctctgcgaggaccactgtgtggacggctgcttctgccccccaggcacggtgctggatgacatcacgcactctggctgcctgcc

SEQ ID NO: 224719 - DNA, 120 bp, Artificial Sequence
  ENSG00000117983_10 (sequence is synthesized)
cctcgggcagtgcccctgcacccacggcggccgcacctacagcccgggcacctccttcaacaccacctgcagctcctgcacctgctccggggggctatggcagtgccaggacctgccgtg

SEQ ID NO: 224720 - DNA, 120 bp, Artificial Sequence
  ENSG00000117983_11 (sequence is synthesized)
ccctggcacctgctctgtgcagggcggggcccacatctccacctatgatgagaaactctacgacctgcatggtgactgcagctacgttctgtccaagaaatgtgccgacagcagcttcac

SEQ ID NO: 224721 - DNA, 120 bp, Artificial Sequence
  ENSG00000117983_12 (sequence is synthesized)
cgtgctggctgagctgcggaagtgcggcctgacggacaacgagaactgcctgaaagcggtgacgctcagcctggacggcggggacacggccatccgggtccaagcggacggcggcgtgtt

SEQ ID NO: 224722 - DNA, 120 bp, Artificial Sequence
  ENSG00000117983_13 (sequence is synthesized)
cctcaactccatctacacgcagctgcccctgtcggcagccaacatcaccctgttcacaccctcgagcttcttcatcgtggtgcagacaggcctggggctgcagctgctggtgcagctggt

SEQ ID NO: 224723 - DNA, 120 bp, Artificial Sequence
  ENSG00000117983_14 (sequence is synthesized)
gccactcatgcaggtgtttgtcaggctggaccccgcccaccagggccagatgtgcggcctgtgtgggaacttcaaccagaaccaggctgacgacttcacggccctcagcggggtggtgga

SEQ ID NO: 224724 - DNA, 120 bp, Artificial Sequence
  ENSG00000117983_15 (sequence is synthesized)
ggccacgggcgcagccttcgccaacacctggaaggcccaggctgcctgtgccaatgccaggaacagctttgaggacccctgctccctcagtgtggagaatgagaactacgcccggcactg

SEQ ID NO: 224725 - DNA, 120 bp, Artificial Sequence
  ENSG00000117983_16 (sequence is synthesized)
gtgctcgcgcctgaccgatcccaacagtgccttctcgcgctgccactccatcatcaaccccaagcccttccactcgaactgcatgtttgacacctgcaactgtgagcggagcgaggactg

SEQ ID NO: 224726 - DNA, 120 bp, Artificial Sequence
  ENSG00000117983_17 (sequence is synthesized)
cctgtgcgccgcgctgtcctcctatgtgcacgcctgtgccgccaagggcgtacagctcagcgactggagggacggcgtctgcaccaagtacatgcagaactgccccaagtcccagcgcta

SEQ ID NO: 224727 - DNA, 120 bp, Artificial Sequence
  ENSG00000117983_18 (sequence is synthesized)
cgcctacgtggtggatgcctgccagcccacttgccgcggcctgagtgaggccgacgtcacctgcagcgtttccttcgtgcctgtggacggctgcacctgccccgcgggcaccttcctcaa

SEQ ID NO: 224728 - DNA, 120 bp, Artificial Sequence
  ENSG00000117983_19 (sequence is synthesized)
tgacgcgggcgcctgtgtgcccgcccaggagtgcccctgctacgctcacggcaccgtgctggctcctggagaggtggtgcacgacgagggcgccgtgtgttcatgtacgggtgggaagct

SEQ ID NO: 224729 - DNA, 120 bp, Artificial Sequence
  ENSG00000117983_20 (sequence is synthesized)
aagctgcctgggagcctctctgcagaaaagcacagggtgtgcagcccccatggtgtacctggactgcagcaacagctcggcgggcacccctggggccgagtgcctccggagctgccacac

SEQ ID NO: 224730 - DNA, 120 bp, Artificial Sequence
  ENSG00000117983_21 (sequence is synthesized)
gctggacgtgggctgtttcagcacacactgcgtgtccggctgtgtctgtcccccggggctggtgtcggatgggagtgggggctgcattgccgaggaggactgcccctgtgtgcacaacga

SEQ ID NO: 224731 - DNA, 120 bp, Artificial Sequence
  ENSG00000117983_22 (sequence is synthesized)
ggccacctacaagcctggagagaccatcagggtcgactgcaacacctgcacctgcaggaaccggaggtgggagtgcagccaccggctctgcctgggcacctgcgtggcctacggggatgg

SEQ ID NO: 224732 - DNA, 120 bp, Artificial Sequence
  ENSG00000117983_23 (sequence is synthesized)
ccacttcatcacctttgatggcgatcgctacagctttgaaggcagctgcgagtacatcttggcccaggactactgtggggacaacaccacccacgggaccttccgcatcgtcaccgagaa

SEQ ID NO: 224733 - DNA, 120 bp, Artificial Sequence
  ENSG00000117983_24 (sequence is synthesized)
catcccctgtgggaccaccggcaccacctgctccaaggccatcaagctcttcgtggagagctacgagctgatcctccaagaggggacctttaaggcggtggcgagagggccgggtgggga

SEQ ID NO: 224734 - DNA, 120 bp, Artificial Sequence
  ENSG00000117983_25 (sequence is synthesized)
cccaccctacaagatacgctacatggggatcttcctggtcatcgagacccacgggatggccgtgtcctgggaccggaagaccagcgtgttcatccgactgcaccaggactacaagggcag

SEQ ID NO: 224735 - DNA, 120 bp, Artificial Sequence
  ENSG00000117983_26 (sequence is synthesized)
ggtctgcggcctgtgcgggaacttcgacgacaatgccatcaatgactttgccacgcgtagccggtccgtggtgggggacgcactggagtttgggaacagctggaagctctccccctcctg

SEQ ID NO: 224736 - DNA, 120 bp, Artificial Sequence
  ENSG00000117983_27 (sequence is synthesized)
cccggacgccctggcacccaaggacccctgcacggccaaccccttccgcaagtcctgggcccagaagcagtgcagcatcctccacggccccaccttcgccgcctgccgctcccaggttga

SEQ ID NO: 224737 - DNA, 120 bp, Artificial Sequence
  ENSG00000117983_28 (sequence is synthesized)
ctccaccaagtactacgaggcctgcgtgaacgacgcgtgtgcctgcgactcgggtggcgactgcgagtgtttctgcacggctgtggctgcctacgcccaggcctgccacgacgcgggcct

SEQ ID NO: 224738 - DNA, 120 bp, Artificial Sequence
  ENSG00000117983_29 (sequence is synthesized)
gtgtgtgtcctggcggactccggacacctgccccttgttctgtgacttctacaacccacatgggggctgtgagtggcactaccagccctgcggggcaccctgcctaaaaacctgccggaa

SEQ ID NO: 224739 - DNA, 120 bp, Artificial Sequence
  ENSG00000117983_30 (sequence is synthesized)
ccccagtgggcactgcctggtggacctgcctggcctggaaggctgctacccgaagtgcccacccagccagcccttcttcaatgaggaccagatgaagtgcgtggcccagtgtggctgcta

SEQ ID NO: 224740 - DNA, 120 bp, Artificial Sequence
  ENSG00000117983_31 (sequence is synthesized)
cgacaaggacggaaactactatgacgtcggtgcaagggtccccacagcggagaactgccagagctgtaactgcacacccagtggcatccagtgcgctcacagccttgaggcctgcacctg

SEQ ID NO: 224741 - DNA, 120 bp, Artificial Sequence
  ENSG00000117983_32 (sequence is synthesized)
cacctatgaggacaggacctacagctaccaggacgtcatctacaacaccaccgatgggcttggcgcctgcttgatcgccatctgcggaagcaacggcaccatcatcaggaaggctgtggc

SEQ ID NO: 224742 - DNA, 120 bp, Artificial Sequence
  ENSG00000117983_33 (sequence is synthesized)
atgtcctggaactccagccacaacgccattcaccttcaccaccgcctgggtcccccactccacgacaagcccggccctcccggtctccaccgtgtgtgtccgcgaggtctgccgctggtc

SEQ ID NO: 224743 - DNA, 120 bp, Artificial Sequence
  ENSG00000117983_34 (sequence is synthesized)
cagctggtacaatgggcaccgcccagagcccggcctgggaggcggagactttgagacgtttgaaaacctgaggcagagagggtaccaggtatgccctgtgctggctgacatcgagtgccg

SEQ ID NO: 224744 - DNA, 120 bp, Artificial Sequence
  ENSG00000117983_35 (sequence is synthesized)
ggcggcgcagcttcccgacatgccgctggaggagctgggccagcaggtggactgtgaccgcatgcgggggctgatgtgcgccaacagccaacagagtcccccgctctgtcacgactacga

SEQ ID NO: 224745 - DNA, 120 bp, Artificial Sequence
  ENSG00000117983_36 (sequence is synthesized)
gctgcgggttctctgctgcgaatacgtgccctgtggcccctccccggccccaggcaccagccctcagccctccctcagtgccagcacggagcctgctgtgcctaccccaacccagaccac

SEQ ID NO: 224746 - DNA, 120 bp, Artificial Sequence
  ENSG00000117983_37 (sequence is synthesized)
agcaaccgaaaagaccaccctatgggtgaccccgagcatccggtcgacggcggccctcacctcgcagactgggtccagctcaggccccgtgacggtcaccccctcggccccaggtaccac

SEQ ID NO: 224747 - DNA, 120 bp, Artificial Sequence
  ENSG00000117983_38 (sequence is synthesized)
cacctgccagccccggtgtcagtggacagagtggtttgatgaggactaccccaagtctgaacaacttggaggggacgttgagtcctacgataagatcagggccgctggagggcacttatg

SEQ ID NO: 224748 - DNA, 120 bp, Artificial Sequence
  ENSG00000117983_39 (sequence is synthesized)
ccagcagcctaaggacatagagtgccaggccgagagcttccccaactggaccctggcacaggtggggcagaaggtgcactgtgacgtccacttcggcctggtgtgcaggaactgggagca

SEQ ID NO: 224749 - DNA, 120 bp, Artificial Sequence
  ENSG00000117983_40 (sequence is synthesized)
ggagggcgtcttcaagatgtgctacaactacaggatccgggtcctctgctgcagtgacgaccactgcaggggacgtgccacaaccccgccaccgaccacagagctggagacggccaccac

SEQ ID NO: 224750 - DNA, 120 bp, Artificial Sequence
  ENSG00000117983_41 (sequence is synthesized)
caccaccacccaggccctgttctcaacgccgcagcctacgagtagcccggggctgaccagggctcccccggccagcaccacagcagtccccaccctctcagaaggactgacatcccccag

SEQ ID NO: 224751 - DNA, 120 bp, Artificial Sequence
  ENSG00000117983_42 (sequence is synthesized)
atacacaagcacccttggtacagccaccacgggaggccccacgacgcctgcaggctccacagaacccactgtcccaggggtggccacatccacccttccaacacgctcagcccttccagg

SEQ ID NO: 224752 - DNA, 120 bp, Artificial Sequence
  ENSG00000117983_43 (sequence is synthesized)
gacgacggggagcttgggcacatggcgcccctcacagccacccacgctggccccaacaacaatggcaacctccagagctcgcccgacaggcacagccagcaccgcttccaaagagccgct

SEQ ID NO: 224753 - DNA, 120 bp, Artificial Sequence
  ENSG00000117983_44 (sequence is synthesized)
gaccacgagcctggcgccaacactcacgagcgagctgtccacctctcaggccgagaccagcacgcccaggacagagacgacaatgagccccttgactaacaccaccaccagccagggcac

SEQ ID NO: 224754 - DNA, 120 bp, Artificial Sequence
  ENSG00000117983_45 (sequence is synthesized)
gacccgctgtcaaccgaagtgtgagtggacagagtggtttgacgtggacttcccaacctcaggggttgcaggcggggacatggaaacttttgaaaacatcagggctgctgggggcaagat

SEQ ID NO: 224755 - DNA, 120 bp, Artificial Sequence
  ENSG00000117983_46 (sequence is synthesized)
gtgctgggcaccaaagagcatagagtgccgggcggagaactaccccgaggtaagcatcgaccaggtcgggcaggtgctgacctgcagcctggagacggggctgacctgcaagaacgaaga

SEQ ID NO: 224756 - DNA, 120 bp, Artificial Sequence
  ENSG00000117983_47 (sequence is synthesized)
ccagacaggcaggttcaacatgtgcttcaactacaacgtgcgtgtgctttgctgtgacgactacagccactgccccagtaccccagccaccagctccacggccacgccctcctcaactcc

SEQ ID NO: 224757 - DNA, 120 bp, Artificial Sequence
  ENSG00000117983_48 (sequence is synthesized)
ggggacgacctggatcctcacaaagccgaccacaacagccactacgactgcgtccactggatccacggccaccccgacctccaccctgagaacagctccccctcccaaagtgctgaccac

SEQ ID NO: 224758 - DNA, 120 bp, Artificial Sequence
  ENSG00000117983_49 (sequence is synthesized)
cacggccaccacacccacagtcaccagctccaaagccactccctcctccagtccagggactgcaaccgcccttccagcactgagaagcacagccaccacacccacagctaccagcgttac

SEQ ID NO: 224759 - DNA, 120 bp, Artificial Sequence
  ENSG00000117983_50 (sequence is synthesized)
acccatcccctcttcctccctgggcaccacctggacccgcctatcacagaccaccacacccacggccaccatgtccacagccacaccctcctccactccagagactgcccacacctccac

SEQ ID NO: 224760 - DNA, 120 bp, Artificial Sequence
  ENSG00000117983_51 (sequence is synthesized)
agtgcttaccgccacggccaccacaactggggccaccggctctgtggccaccccctcctccaccccaggaacagctcacactaccaaagtgccaactaccacaaccacgggcttcacagc

SEQ ID NO: 224761 - DNA, 120 bp, Artificial Sequence
  ENSG00000117983_52 (sequence is synthesized)
caccccctcctccagcccagggacggcactcacgcctccagtgtggatcagcacaaccaccacacccacaaccagaggctccacggtgaccccctcctccatcccggggaccacccacac

SEQ ID NO: 224762 - DNA, 120 bp, Artificial Sequence
  ENSG00000117983_53 (sequence is synthesized)
cgccacagtgctgaccaccaccaccacaactgtggccactggttctatggcaacaccctcctctagcacacagaccagtggtactcccccatcactgaccaccacggccactacgatcac

SEQ ID NO: 224763 - DNA, 120 bp, Artificial Sequence
  ENSG00000117983_54 (sequence is synthesized)
ggccaccggctccaccaccaacccctcctcaactcctgggacaactcccatccccccagtgctgaccaccaccgccaccacacctgcagccaccagcaacacagtgactccctcctctgc

SEQ ID NO: 224764 - DNA, 120 bp, Artificial Sequence
  ENSG00000117983_55 (sequence is synthesized)
cctagggaccacccacacacccccagtgccgaacaccatggccaccacacacgggcgatccctgccccccagcagtccccacacggtgcgcacagcctggacttcggccacctcgggcat

SEQ ID NO: 224765 - DNA, 120 bp, Artificial Sequence
  ENSG00000117983_56 (sequence is synthesized)
cttgggcaccacccacatcacagagccttccacggtgacttcccacaccctagcagcaaccaccggtaccacccagcactcgactccagccctttccagccctcaccctagcagcagaac

SEQ ID NO: 224766 - DNA, 120 bp, Artificial Sequence
  ENSG00000117983_57 (sequence is synthesized)
caccgagtcacccccttctccagggacgaccaccccgggccacaccacggccacctccaggaccacagccacggccacacccagcaagacccgcacctcgaccctgctgcccagcagccc

SEQ ID NO: 224767 - DNA, 120 bp, Artificial Sequence
  ENSG00000117983_58 (sequence is synthesized)
cacatcggcccccataaccacggtggtgaccatgggctgtgagccccagtgtgcctggtcagagtggctggactacagctaccccatgccggggccctctggcggggactttgacaccta

SEQ ID NO: 224768 - DNA, 120 bp, Artificial Sequence
  ENSG00000117983_59 (sequence is synthesized)
ctccaacatccgtgcggccggaggggccgtctgtgagcagcccctgggcctcgagtgccgtgcccaggcccagcctggtgtccccctgcgggagttgggccaggtcgtggaatgcagcct

SEQ ID NO: 224769 - DNA, 120 bp, Artificial Sequence
  ENSG00000117983_60 (sequence is synthesized)
ggactttggcctggtctgcaggaaccgtgagcaggtggggaagttcaagatgtgcttcaactatgaaatccgtgtgttctgctgcaactacggccactgccccagcaccccggccaccag

SEQ ID NO: 224770 - DNA, 120 bp, Artificial Sequence
  ENSG00000117983_61 (sequence is synthesized)
ctctacggccatgccctcctccactccggggacgacctggatcctcacagagctgaccacaacagccactacgactgagtccactggatccacggccaccccgtcctccaccccagggac

SEQ ID NO: 224771 - DNA, 120 bp, Artificial Sequence
  ENSG00000117983_62 (sequence is synthesized)
cacctggatcctcacagagccgagcactacagccaccgtgacggtgcccaccggatccacggccaccgcctcctccacccaggcaactgctggcaccccacatgtgagcaccacggccac

SEQ ID NO: 224772 - DNA, 120 bp, Artificial Sequence
  ENSG00000117983_63 (sequence is synthesized)
gacacccacagtcaccagctccaaagccactcccttctccagtccagggactgcaaccgcccttccagcactgagaagcacagccaccacacccacagctaccagctttacagccatccc

SEQ ID NO: 224773 - DNA, 120 bp, Artificial Sequence
  ENSG00000117983_64 (sequence is synthesized)
ctcctcctccctgggcaccacctggacccgcctatcacagaccaccacacccacggccaccatgtccacagccacaccctcctccactccagagactgtccacacctccacagtgcttac

SEQ ID NO: 224774 - DNA, 120 bp, Artificial Sequence
  ENSG00000117983_65 (sequence is synthesized)
caccacggccaccacaaccggggccaccggctctgtggccaccccctcctccaccccaggaacagctcacactaccaaagtgctgactaccacaaccacgggcttcacagccaccccctc

SEQ ID NO: 224775 - DNA, 120 bp, Artificial Sequence
  ENSG00000117983_66 (sequence is synthesized)
ctccagcccagggacggcacgcacgcttccagtgtggatcagcacaaccaccacacccacaaccagaggttccacggtgaccccctcctccatcccggggaccacccacacccccacagt

SEQ ID NO: 224776 - DNA, 120 bp, Artificial Sequence
  ENSG00000117983_67 (sequence is synthesized)
gctgaccaccaccaccacaactgtggccactggttctatggcaacaccctcctctagcacacagaccagtggtactcccccatcactgaccaccacggccactacgatcacggccaccgg

SEQ ID NO: 224777 - DNA, 120 bp, Artificial Sequence
  ENSG00000117983_68 (sequence is synthesized)
ctccaccaccaacccctcctcaactccagggacaacacctatccccccagtgctgaccaccaccgccaccacacctgcagccaccagcagcacagtgactccctcctctgccctagggac

SEQ ID NO: 224778 - DNA, 120 bp, Artificial Sequence
  ENSG00000117983_69 (sequence is synthesized)
cacccacacacccccagtgccgaacaccacggccaccacacacgggcgatccctgtcccccagcagtccccacacggtgcgcacagcctggacttcggccacctcaggcaccttgggcac

SEQ ID NO: 224779 - DNA, 120 bp, Artificial Sequence
  ENSG00000117983_70 (sequence is synthesized)
cacccacatcacagagccttccacggggacttcccacaccccagcagcaaccaccggtaccacccagcactcgactccagccctgtccagccctcaccctagcagcaggaccaccgagtc

SEQ ID NO: 224780 - DNA, 120 bp, Artificial Sequence
  ENSG00000117983_71 (sequence is synthesized)
acccccttctccagggacgaccaccccgggccacaccagggccacctccaggaccacggccacggccacacccagcaagacccgcacctcgaccctgctgcccagcagccccacatcggc

SEQ ID NO: 224781 - DNA, 120 bp, Artificial Sequence
  ENSG00000117983_72 (sequence is synthesized)
cccaataaccacggtggtgaccatgggctgtgagccccagtgtgcctggtcagagtggctggactacagctaccccatgccggggccctctggcggggactttgacacctactccaacat

SEQ ID NO: 224782 - DNA, 120 bp, Artificial Sequence
  ENSG00000117983_73 (sequence is synthesized)
ccgtgcggccggaggggccgtctgtgagcagcccctgggcctcgagtgccgtgcccaggcccagcctggtgtccccctgcgggagttgggccaggtcgtggaatgcagcctggactttgg

SEQ ID NO: 224783 - DNA, 120 bp, Artificial Sequence
  ENSG00000117983_74 (sequence is synthesized)
aagttcaagatgtgcttcaactatgaaatccgtgtgttctgctgcaactacggccactgccccagcaccccggccaccagctctacggccacgccctcctccactccagggacgacctgg

SEQ ID NO: 224784 - DNA, 120 bp, Artificial Sequence
  ENSG00000117983_75 (sequence is synthesized)
atcctcacagagcagaccacagcagccactacgaccgcaaccactggatccacggccatcccgtcctccaccccgggaacagctccccctcccaaagtgctgaccagcacggccaccaca

SEQ ID NO: 224785 - DNA, 120 bp, Artificial Sequence
  ENSG00000117983_76 (sequence is synthesized)
cccacagccaccagttccaaagccacttcctcctccagtccaaggactgcaaccacccttccagtgctgacaagcacagccaccaaatccacagctaccagctttacacccatcccctcc

SEQ ID NO: 224786 - DNA, 120 bp, Artificial Sequence
  ENSG00000117983_77 (sequence is synthesized)
ttcacccttgggaccaccgggaccctcccagaacagaccaccacacccatggccaccatgtccacaatccacccctcctccactccggagaccacccacacctccacagtgctgaccacg

SEQ ID NO: 224787 - DNA, 120 bp, Artificial Sequence
  ENSG00000117983_78 (sequence is synthesized)
aaggccaccacgacaagggccaccagttccatgtccaccccctcctccactccggggacgacctggatcctcacagagctgaccacagcagccactacaactgcagccactggccccacg

SEQ ID NO: 224788 - DNA, 120 bp, Artificial Sequence
  ENSG00000117983_79 (sequence is synthesized)
gccaccccgtcctccaccccagggaccacctggatcctcacagagcccagcactacagccaccgtgacggtgcccaccggatccacggccaccgcctcctccacccgggcaactgctggc

SEQ ID NO: 224789 - DNA, 120 bp, Artificial Sequence
  ENSG00000117983_80 (sequence is synthesized)
accctcaaagtgctgaccagcacggccaccacacccacagtcatcagctccagagccactccctcctccagtccagggactgcaaccgcccttccagcactgagaagcacagccaccaca

SEQ ID NO: 224790 - DNA, 120 bp, Artificial Sequence
  ENSG00000117983_81 (sequence is synthesized)
cccacagctaccagcgttacagccatcccctcttcctccctgggcaccgcctggacccgcctatcacagaccaccacacccacggccaccatgtccacagccacaccctcctctactcca

SEQ ID NO: 224791 - DNA, 120 bp, Artificial Sequence
  ENSG00000117983_82 (sequence is synthesized)
gagactgtccacacctccacagtgcttaccaccacgaccaccacaaccagggccaccggctctgtggccaccccctcctccaccccaggaacagctcacactaccaaagtgccgactacc

SEQ ID NO: 224792 - DNA, 120 bp, Artificial Sequence
  ENSG00000117983_83 (sequence is synthesized)
acaaccacgggcttcacagccaccccctcctccagcccagggacggcactcacgcctccagtgtggatcagcacaaccaccacacccacaaccagaggctccacggtgaccccctcctcc

SEQ ID NO: 224793 - DNA, 120 bp, Artificial Sequence
  ENSG00000117983_84 (sequence is synthesized)
atcccggggaccacccacaccgccacagtgctgaccaccaccaccacaactgtggccactggttctatggcaacaccctcctctagcacacagaccagtggtactcccccatcactgacc

SEQ ID NO: 224794 - DNA, 120 bp, Artificial Sequence
  ENSG00000117983_85 (sequence is synthesized)
accacggccactacgatcacagccaccggctccaccaccaacccctcctcaactccagggacaactcccatccccccagtgctgaccaccaccgccaccacacctgcagccaccagcagc

SEQ ID NO: 224795 - DNA, 120 bp, Artificial Sequence
  ENSG00000117983_86 (sequence is synthesized)
acagtgactccctcctctgccctagggaccacccacacacccccagtgccgaacaccacggccaccacacacgggcggtccctgccccccagcagtccccacacggtgcgcacagcctgg

SEQ ID NO: 224796 - DNA, 120 bp, Artificial Sequence
  ENSG00000117983_87 (sequence is synthesized)
acttcggccacctcgggcatcttgggcaccacccacatcacagagccttccacggtgacttcccacaccccagcagcaaccaccagtaccacccagcactcgactccagccctgtccagc

SEQ ID NO: 224797 - DNA, 120 bp, Artificial Sequence
  ENSG00000117983_88 (sequence is synthesized)
cctcaccctagcagcaggaccaccgagtcacccccttctccagggacgaccaccccgggccacaccaggggcacctccaggaccacagccacagccacacccagcaagacccgcacctcg

SEQ ID NO: 224798 - DNA, 120 bp, Artificial Sequence
  ENSG00000117983_89 (sequence is synthesized)
accctgctgcccagcagccccacatcggcccccataaccacggtggtgaccacgggctgtgagccccagtgtgcctggtcagagtggctggactacagctaccccatgccggggccctct

SEQ ID NO: 224799 - DNA, 120 bp, Artificial Sequence
  ENSG00000117983_90 (sequence is synthesized)
ggcggggactttgacacctactccaacatccgtgcggccggaggggcagtctgtgagcagcccctgggcctcgagtgccgtgcccaggcccagcctggtgtccccctgcgggagttgggc

SEQ ID NO: 224800 - DNA, 120 bp, Artificial Sequence
  ENSG00000117983_91 (sequence is synthesized)
caggtcgtggaatgcagcctggactttggcctggtctgcaggaaccgtgagcaggtggggaagttcaagatgtgcttcaactatgaaatccgtgtgttctgctgcaactacggccactgc

SEQ ID NO: 224801 - DNA, 120 bp, Artificial Sequence
  ENSG00000117983_92 (sequence is synthesized)
cccagcaccccggccaccagctctacggccacgccctcctcaactccggggacgacctggatcctcacaaagctgaccacaacagccactacgactgagtccactggatccacggccacc

SEQ ID NO: 224802 - DNA, 120 bp, Artificial Sequence
  ENSG00000117983_93 (sequence is synthesized)
ccgtcctccaccccagggaccacctggatcctcacagagccgagcactacagccaccgtgacggtgcccaccggatccacggccaccgcctcctccacccaggcaactgctggcacccca

SEQ ID NO: 224803 - DNA, 120 bp, Artificial Sequence
  ENSG00000117983_94 (sequence is synthesized)
catgtgagcaccacggccacgacacccacagtcaccagctccaaagccactcccttctccagtccagggactgcaaccgcccttccagcactgagaagcacagccaccacacccacagct

SEQ ID NO: 224804 - DNA, 120 bp, Artificial Sequence
  ENSG00000117983_95 (sequence is synthesized)
accagctttacagccatcccctcctcctccctgggcaccacctggacccgcctatcacagaccaccacacccacggccaccatgtccacagccacaccctcctccactccagagactgcc

SEQ ID NO: 224805 - DNA, 120 bp, Artificial Sequence
  ENSG00000117983_96 (sequence is synthesized)
cacacctccacagtgcttaccaccacggccaccacaaccagggccaccggctctgtggccaccccctcttccaccccaggaacagctcacactaccaaagtgccgactaccacaaccacg

SEQ ID NO: 224806 - DNA, 120 bp, Artificial Sequence
  ENSG00000117983_97 (sequence is synthesized)
ggcttcacagtcaccccctcctccagcccagggacggcacgcacgcctccagtgtggatcagcacaaccaccacacccacaaccagtggctccacggtgaccccctcctccgtcccgggg

SEQ ID NO: 224807 - DNA, 120 bp, Artificial Sequence
  ENSG00000117983_98 (sequence is synthesized)
accacccacacccccacagtgctgaccaccaccaccacaactgtggccactggttctatggcaacaccctcctctagcacacagaccagtggtactcccccatcactgatcaccacggcc

SEQ ID NO: 224808 - DNA, 120 bp, Artificial Sequence
  ENSG00000117983_99 (sequence is synthesized)
actacgatcacggccaccggctccaccaccaacccctcctcaactccagggacaacacctatccccccagtgctgaccaccaccgccaccacacctgcagccaccagcagcacagtgact

SEQ ID NO: 224809 - DNA, 120 bp, Artificial Sequence
  ENSG00000117983_100 (sequence is synthesized)
ccctcctctgccctagggaccacccacacacccccagtgccgaacaccacggccaccacacacgggcgatccctgtcccccagcagtccccacacggtgcgcacagcctggacttcggcc

SEQ ID NO: 224810 - DNA, 120 bp, Artificial Sequence
  ENSG00000117983_101 (sequence is synthesized)
acctcaggcaccttgggcaccacccacatcacagagccttccacggggacttcccacaccccagcagcaaccaccggtaccacccagcactcgactccagccctgtccagccctcaccct

SEQ ID NO: 224811 - DNA, 120 bp, Artificial Sequence
  ENSG00000117983_102 (sequence is synthesized)
agcagcaggaccaccgagtcacccccttccccagggacgaccaccccgggccacaccacggccacctccaggaccacggccacggccacacccagcaagacccgcacctcgaccctgctg

SEQ ID NO: 224812 - DNA, 120 bp, Artificial Sequence
  ENSG00000117983_103 (sequence is synthesized)
cccagcagccccacatcggcccccataaccacggtggtgaccacgggctgtgagccccagtgtgcctggtcagagtggctggactacagctaccccatgccggggccctctggcggggac

SEQ ID NO: 224813 - DNA, 120 bp, Artificial Sequence
  ENSG00000117983_104 (sequence is synthesized)
tttgacacctactccaacatccgtgcggccggaggggccgtctgtgagcagcccctgggcctcgagtgccgtgcccaggcccagcctggtgtccccctgggggagttgggccaggtcgtg

SEQ ID NO: 224814 - DNA, 120 bp, Artificial Sequence
  ENSG00000117983_105 (sequence is synthesized)
gaatgcagcctggactttggcctggtctgcaggaaccgtgagcaggtggggaagttcaagatgtgcttcaactatgaaatccgtgtgttctgctgcaactacggccactgccccagcacc

SEQ ID NO: 224815 - DNA, 120 bp, Artificial Sequence
  ENSG00000117983_106 (sequence is synthesized)
ccggccaccagctctacggccatgccctcctccactccggggacgacctggatcctcacagagctgaccacaacagccactacgactgcatccactggatccacggccaccccgtcctcc

SEQ ID NO: 224816 - DNA, 120 bp, Artificial Sequence
  ENSG00000117983_107 (sequence is synthesized)
accccgggaacagctccccctcccaaagtgctgaccagcccggccaccacacccacagccaccagttccaaagccacttcctcctccagtccaaggactgcaaccacccttccagtgctg

SEQ ID NO: 224817 - DNA, 120 bp, Artificial Sequence
  ENSG00000117983_108 (sequence is synthesized)
acaagcacagccaccaaatccacagctaccagcgttacacccatcccctcctccacccttgggaccaccgggaccctcccagaacagaccaccacacccgtggccaccatgtccacaatc

SEQ ID NO: 224818 - DNA, 120 bp, Artificial Sequence
  ENSG00000117983_109 (sequence is synthesized)
cacccctcctccactccggagaccacccacacctccacagtgctgaccacgaaggccaccacgacaagggccaccagttccacgtccaccccctcctccactccggggacgacctggatc

SEQ ID NO: 224819 - DNA, 120 bp, Artificial Sequence
  ENSG00000117983_110 (sequence is synthesized)
ctcacagagctgaccacagcagccactacaactgcagccactggccccacggccaccccgtcctccaccccagggaccacctggatcctcacagagctgaccacaacagccactacgact

SEQ ID NO: 224820 - DNA, 120 bp, Artificial Sequence
  ENSG00000117983_111 (sequence is synthesized)
gcgtccactggatccacggccaccccgtcctccaccccagggaccacctggatcctcacagagccgagcactacagccaccgtgacggtgcccaccggatccacggccaccgcctcctcc

SEQ ID NO: 224821 - DNA, 120 bp, Artificial Sequence
  ENSG00000117983_112 (sequence is synthesized)
acccaggcaactgctggcaccccacatgtgagcaccacggccacgacacccacagtcaccagctccaaagccactccctcctccagtccagggactgcaactgcccttccagcactgaga

SEQ ID NO: 224822 - DNA, 120 bp, Artificial Sequence
  ENSG00000117983_113 (sequence is synthesized)
agcacagccaccacacccacagctaccagctttacagccatcccctcctcctccctgggcaccacctggacccgcctatcacagaccaccacacccacggccaccatgtccacagccaca

SEQ ID NO: 224823 - DNA, 120 bp, Artificial Sequence
  ENSG00000117983_114 (sequence is synthesized)
ccctcctccactccagagactgtccacacctccacagtgcttaccgccacggccaccacaaccggggccaccggctctgtggccaccccctcctccaccccaggaacagctcacactacc

SEQ ID NO: 224824 - DNA, 120 bp, Artificial Sequence
  ENSG00000117983_115 (sequence is synthesized)
aaagtgccgactaccacaaccacgggcttcacagccaccccctcctccagcccagggacggcactcacgcctccagtgtggatcagcacaaccaccacacccacaaccaccacacccaca

SEQ ID NO: 224825 - DNA, 120 bp, Artificial Sequence
  ENSG00000117983_116 (sequence is synthesized)
accagtggctccacggtgaccccctcctccatcccggggaccacccacaccgccagagtgctgaccaccaccaccacaactgtggccactggttctatggcaacaccctcctctagcaca

SEQ ID NO: 224826 - DNA, 120 bp, Artificial Sequence
  ENSG00000117983_117 (sequence is synthesized)
cagaccagtggtactcccccatcactgaccaccacggccactacgatcacggccaccggctccaccaccaacccctcctcaactccagggacaacacccatcaccccagtgctgaccagc

SEQ ID NO: 224827 - DNA, 120 bp, Artificial Sequence
  ENSG00000117983_118 (sequence is synthesized)
acggccaccacacccgcagccaccagctccaaagccacttcctcctccagtccaaggactgcaaccacccttccagtgctgacaagcacagccacaaaatccacagctaccagctttaca

SEQ ID NO: 224828 - DNA, 120 bp, Artificial Sequence
  ENSG00000117983_119 (sequence is synthesized)
cccatcccctcctccaccctgtggaccacgtggaccgtcccagcacagaccaccacacccatgtccaccatgtccacaatccacacctcctctactccagagaccacccacacctccaca

SEQ ID NO: 224829 - DNA, 120 bp, Artificial Sequence
  ENSG00000117983_120 (sequence is synthesized)
gtgctgaccaccacagccaccatgacaagggccaccaattccacggccacaccctcctccactctggggacgacccggatcctcactgagctgaccacaacagccactacaactgcagcc

SEQ ID NO: 224830 - DNA, 120 bp, Artificial Sequence
  ENSG00000117983_121 (sequence is synthesized)
actggatccacggccaccctgtcctccaccccagggaccacctggatcctcacagagccgagcactatagccaccgtgatggtgcccaccggttccacggccaccgcctcctccactctg

SEQ ID NO: 224831 - DNA, 120 bp, Artificial Sequence
  ENSG00000117983_122 (sequence is synthesized)
ggaacagctcacacccccaaagtggtgaccaccatggccactatgcccacagccactgcctccacggttcccagctcgtccaccgtggggaccacccgcacccctgcagtgctccccagc

SEQ ID NO: 224832 - DNA, 120 bp, Artificial Sequence
  ENSG00000117983_123 (sequence is synthesized)
agcctgccaaccttcagcgtgtccactgtgtcctcctcagtcctcaccaccctgagacccactggcttccccagctcccacttctctactccctgcttctgcagggcatttggacagttt

SEQ ID NO: 224833 - DNA, 120 bp, Artificial Sequence
  ENSG00000117983_124 (sequence is synthesized)
ttctcgcccggggaagtcatctacaataagaccgaccgagccggctgccatttctacgcagtgtgcaatcagcactgtgacattgaccgcttccagggcgcctgtcccacctccccaccg

SEQ ID NO: 224834 - DNA, 120 bp, Artificial Sequence
  ENSG00000117983_125 (sequence is synthesized)
ccagtgtcctccgccccgctgtcctcgccctcccctgcccctggctgtgacaatgccatccctctccggcaggtgaatgagacctggaccctggagaactgcacggtggccaggtgcgtg

SEQ ID NO: 224835 - DNA, 120 bp, Artificial Sequence
  ENSG00000117983_126 (sequence is synthesized)
ggtgacaaccgtgtcgtcctgctggacccaaagcctgtggccaacgtcacctgcgtgaacaagcacctgcccatcaaagtgtcggacccgagccagccctgtgacttccactatgagtgc

SEQ ID NO: 224836 - DNA, 120 bp, Artificial Sequence
  ENSG00000117983_127 (sequence is synthesized)
gagtgcatctgcagcatgtggggcggctcccactattccacctttgacggcacctcttacaccttccggggcaactgcacctatgtcctcatgagagagatccatgcacgctttgggaat

SEQ ID NO: 224837 - DNA, 120 bp, Artificial Sequence
  ENSG00000117983_128 (sequence is synthesized)
ctcagcctctacctggacaaccactactgcacggcctctgccactgccgctgccgcccgctgcccccgcgccctcagcatccactacaagtccatggatatcgtcctcactgtcaccatg

SEQ ID NO: 224838 - DNA, 120 bp, Artificial Sequence
  ENSG00000117983_129 (sequence is synthesized)
gtgcatgggaaggaggagggcctgatcctgtttgaccaaattccggtgagcagcggtttcagcaagaacggcgtgcttgtgtctgtgctggggaccaccaccatgcgtgtggacattcct

SEQ ID NO: 224839 - DNA, 120 bp, Artificial Sequence
  ENSG00000117983_130 (sequence is synthesized)
gccctgggcgtgagcgtcaccttcaatggccaagtcttccaggcccggctgccctacagcctcttccacaacaacaccgagggccagtgcggcacctgcaccaacaaccagagggacgac

SEQ ID NO: 224840 - DNA, 120 bp, Artificial Sequence
  ENSG00000117983_131 (sequence is synthesized)
tgtctccagcgggacggaaccactgccgccagttgcaaggacatggccaagacgtggctggtccccgacagcagaaaggatggctgctgggccccgactggcacaccccccactgccagc

SEQ ID NO: 224841 - DNA, 120 bp, Artificial Sequence
  ENSG00000117983_132 (sequence is synthesized)
cccgcagccccggtgtctagcacacccacccccaccccatgcccaccacagccgctctgtgatctgatgctgagccaggtctttgctgagtgccacaaccttgtgcccccgggcccattc

SEQ ID NO: 224842 - DNA, 120 bp, Artificial Sequence
  ENSG00000117983_133 (sequence is synthesized)
ttcaacgcctgcatcagcgaccactgcaggggccgccttgaggtgccctgccagagcctggaggcttacgcagagctctgccgcgcccggggagtgtgcagtgactggcgaggtgcaacc

SEQ ID NO: 224843 - DNA, 120 bp, Artificial Sequence
  ENSG00000117983_134 (sequence is synthesized)
ggtggcctgtgcgacctcacctgcccacccaccaaagtgtacaagccatgcggccccatacagcctgccacctgcaactctaggaaccagagcccacagctggaggggatggcggagggc

SEQ ID NO: 224844 - DNA, 120 bp, Artificial Sequence
  ENSG00000117983_135 (sequence is synthesized)
tgcttctgccctgaggaccagatcctcttcaacgcacacatgggcatctgcgtgcaggcctgcccctgcgtgggacccgatgggtttcctaaatttcccggggagcggtgggtcagcaac

SEQ ID NO: 224845 - DNA, 120 bp, Artificial Sequence
  ENSG00000117983_136 (sequence is synthesized)
tgccagtcctgcgtgtgtgacgagggttcagtgtcggtgcagtgcaagcccctgccctgtgacgcccagggtcagcccccgccgtgcaaccgtcccggcttcgtaaccgtgaccaggccc

SEQ ID NO: 224846 - DNA, 120 bp, Artificial Sequence
  ENSG00000117983_137 (sequence is synthesized)
cgggccgagaacccctgctgccccgagacggtgtgcgtgtgcaacacaaccacctgcccccagagcctgcctgtgtgcccgccagggcaggagtccatctgcacccaggaggagggcgac

SEQ ID NO: 224847 - DNA, 120 bp, Artificial Sequence
  ENSG00000117983_138 (sequence is synthesized)
tgctgtcccaccttccgctgcagacctcagctgtgttcgtacaatggcaccttctacggggttggtgcaaccttcccaggcgcccttccctgccacatgtgtacctgcctctctggggac

SEQ ID NO: 224848 - DNA, 120 bp, Artificial Sequence
  ENSG00000117983_139 (sequence is synthesized)
acccaggacccaacggtgcaatgtcaggaggatgcctgcaacaatactacctgtccccagggctttgagtacaagagagtggccgggcagtgctgtggggagtgcgtccagaccgcctgc

SEQ ID NO: 224849 - DNA, 120 bp, Artificial Sequence
  ENSG00000117983_140 (sequence is synthesized)
ctcacgcccgatggccagccagtccagctgaatgaaacctgggtcaacagccatgtggacaactgcaccgtgtacctctgtgaggctgagggtggagtccatttgctgaccccacagcct

SEQ ID NO: 224850 - DNA, 120 bp, Artificial Sequence
  ENSG00000117983_141 (sequence is synthesized)
gcatcctgcccagatgtgtccagctgcagggggagcctcaggaaaaccggctgctgctactcctgtgaggaggactcctgtcaagtccgcatcaacacgaccatcctgtggcaccagggc

SEQ ID NO: 224851 - DNA, 120 bp, Artificial Sequence
  ENSG00000117983_142 (sequence is synthesized)
tgcgagaccgaggtcaacatcaccttctgcgagggctcctgccccggagcgtccaagtactcagcagaggcccaggccatgcagcaccagtgcacctgctgccaggagaggcgggtccac

SEQ ID NO: 224852 - DNA, 120 bp, Artificial Sequence
  ENSG00000117983_143 (sequence is synthesized)
gaggagacggtgcccttgcactgtcctaacggctcagccatcctgcacacctacacccacgtggatgagtgtggctgcacgcccttctgtgtccctgcgcccatggctcccccacacacc

SEQ ID NO: 224853 - DNA, 120 bp, Artificial Sequence
  ENSG00000117983_144 (sequence is synthesized)
cgtggcttcccggcccaggaggccactgctgtctgagaacgttctgcctccatccccatgctctgtccacctggagccaggatgtgcattgtctgatcatgaaaaccttgggcctcctct

SEQ ID NO: 224854 - DNA, 120 bp, Artificial Sequence
  ENSG00000117983_145 (sequence is synthesized)
gcggagccccccggcctgtgtgtggcaccccgcgctccgtgctcctgctgcccaccccgtgggtgaaaccggccccagaagggtgaggggccagcaggacccctttcgggagggcgccac

SEQ ID NO: 224855 - DNA, 120 bp, Artificial Sequence
  ENSG00000117983_146 (sequence is synthesized)
tcaggagtcctaccctgggagagcctgtggcccaccttggccttgcccctccctgatgtcactgggacgccctggaacaaactaagcatgtgcgggcctatgtgtccctgccacggccgg

SEQ ID NO: 224856 - DNA, 120 bp, Artificial Sequence
  ENSG00000117983_147 (sequence is synthesized)
agcgcccgcgcagcacggattccagctggccacgtccggccgctggggcagacaggctggtccaggcaaggccagctgctgccaggaagctgcgacaggcaaggcggccgcctgtccatg

SEQ ID NO: 224857 - DNA, 120 bp, Artificial Sequence
  ENSG00000117983_148 (sequence is synthesized)
cctgctgcagggtaactcagggctgaggtcgcaacggccaggtcagagaggggtcagcatcccaaagccccctctgctcaacccagcccagttttgcaaataaaccctgagcattgagta

SEQ ID NO: 224858 - DNA, 120 bp, Artificial Sequence
  ENSG00000117983_149 (sequence is synthesized)
gagctgctggggcaggggaggaggtgtggcagcctccgaaggtgcattgacctgggcctgagccgcacacagacatccaacacgcatgtgcctccatgtgagtgcacaagtttctatgca

SEQ ID NO: 224859 - DNA, 120 bp, Artificial Sequence
  ENSG00000117983_150 (sequence is synthesized)
cagaggaagacctgtgcaaaaccaccagacaggttgccccagcatgagacagctcctaggggacaagagttccaagggcagggctggggagtggaggggaaggtgaggcaccacccggcc

SEQ ID NO: 224860 - DNA, 120 bp, Artificial Sequence
  ENSG00000117983_151 (sequence is synthesized)
gaggccctgcatgtctgggacaagcccgggtctggctctggggacaccggcccccacgcccggggtaggggctgccctgcacaacaggggtgagggctggtgggcgcctccttagcctct

SEQ ID NO: 224861 - DNA, 120 bp, Artificial Sequence
  ENSG00000117983_152 (sequence is synthesized)
gccctctgtgccccagccttgttctgtgacttctacaacccacatgggggctgtgagtggcactaccagccctgcggggcaccctgcctaaaaacctgccggaaccccagtgggcactgc

SEQ ID NO: 224862 - DNA, 120 bp, Artificial Sequence
  ENSG00000117983_153 (sequence is synthesized)
caggggctgaggtcaggttccaggaaggcaggggtaggcagagagaaggtgctggaaactggggtgaggctgagccgggataactgagtgggggcaacttcttcgggtataggcccaggc

SEQ ID NO: 224863 - DNA, 120 bp, Artificial Sequence
  ENSG00000117984_0 (sequence is synthesized)
aactgcggcgtcatcccggctataagcgcacggcctcggcgaccctctccgacccggccgccgccgccatgcagccctccagccttctgccgctcgccctctgcctgctggctgcacccg

SEQ ID NO: 224864 - DNA, 120 bp, Artificial Sequence
  ENSG00000117984_1 (sequence is synthesized)
cctccgcgctcgtcaggatcccgctgcacaagttcacgtccatccgccggaccatgtcggaggttgggggctctgtggaggacctgattgccaaaggccccgtctcaaagtactcccagg

SEQ ID NO: 224865 - DNA, 120 bp, Artificial Sequence
  ENSG00000117984_2 (sequence is synthesized)
cggtgccagccgtgaccgaggggcccattcccgaggtgctcaagaactacatggacgcccagtactacggggagattggcatcgggacgcccccccagtgcttcacagtcgtcttcgaca

SEQ ID NO: 224866 - DNA, 120 bp, Artificial Sequence
  ENSG00000117984_3 (sequence is synthesized)
cgggctcctccaacctgtgggtcccctccatccactgcaaactgctggacatcgcttgctggatccaccacaagtacaacagcgacaagtccagcacctacgtgaagaatggtacctcgt

SEQ ID NO: 224867 - DNA, 120 bp, Artificial Sequence
  ENSG00000117984_4 (sequence is synthesized)
ttgacatccactatggctcgggcagcctctccgggtacctgagccaggacactgtgtcggtgccctgccagtcagcgtcgtcagcctctgccctgggcggtgtcaaagtggagaggcagg

SEQ ID NO: 224868 - DNA, 120 bp, Artificial Sequence
  ENSG00000117984_5 (sequence is synthesized)
tctttggggaggccaccaagcagccaggcatcaccttcatcgcagccaagttcgatggcatcctgggcatggcctacccccgcatctccgtcaacaacgtgctgcccgtcttcgacaacc

SEQ ID NO: 224869 - DNA, 120 bp, Artificial Sequence
  ENSG00000117984_6 (sequence is synthesized)
tgatgcagcagaagctggtggaccagaacatcttctccttctacctgagcagggacccagatgcgcagcctgggggtgagctgatgctgggtggcacagactccaagtattacaagggtt

SEQ ID NO: 224870 - DNA, 120 bp, Artificial Sequence
  ENSG00000117984_7 (sequence is synthesized)
ctctgtcctacctgaatgtcacccgcaaggcctactggcaggtccacctggaccaggtggaggtggccagcgggctgaccctgtgcaaggagggctgtgaggccattgtggacacaggca

SEQ ID NO: 224871 - DNA, 120 bp, Artificial Sequence
  ENSG00000117984_8 (sequence is synthesized)
gcccggtggatgaggtgcgcgagctgcagaaggccatcggggccgtgccgctgattcagggcgagtacatgatcccctgtgagaaggtgtccaccctgcccgcgatcacactgaagctgg

SEQ ID NO: 224872 - DNA, 120 bp, Artificial Sequence
  ENSG00000117984_9 (sequence is synthesized)
gaggcaaaggctacaagctgtccccagaggactacacgctcaaggtgtcgcaggccgggaagaccctctgcctgagcggcttcatgggcatggacatcccgccacccagcgggccactct

SEQ ID NO: 224873 - DNA, 120 bp, Artificial Sequence
  ENSG00000117984_10 (sequence is synthesized)
ggatcctgggcgacgtcttcatcggccgctactacactgtgtttgaccgtgacaacaacagggtgggcttcgccgaggctgcccgcctctagttcccaaggcgtccgcgcgccagcacag

SEQ ID NO: 224874 - DNA, 120 bp, Artificial Sequence
  ENSG00000117984_11 (sequence is synthesized)
aaacagaggagagtcccagagcaggaggcccctggcccagcggcccctcccacacacacccacacactcgcccgcccactgtcctgggcgccctggaagccggcggcccaagcccgactt

SEQ ID NO: 224875 - DNA, 120 bp, Artificial Sequence
  ENSG00000117984_12 (sequence is synthesized)
gctgttttgttctgtggttttcccctccctgggttcagaaatgctgcctgcctgtctgtctctccatctgtttggtgggggtagagctgatccagagcacagatctgtttcgtgcattgg

SEQ ID NO: 224876 - DNA, 120 bp, Artificial Sequence
  ENSG00000117984_13 (sequence is synthesized)
aagaccccacccaagcttggcagccgagctcgtgtatcctggggctcccttcatctccagggagtcccctccccggccctaccagcgcccgctgggctgagcccctaccccacaccaggc

SEQ ID NO: 224877 - DNA, 120 bp, Artificial Sequence
  ENSG00000117984_14 (sequence is synthesized)
cgtcctcccgggccctcccttggaaacctgccctgcctgagggcccctctgcccagcttgggcccagctgggctctgccaccctacctgttcagtgtcccgggcccgttgaggatgaggc

SEQ ID NO: 224878 - DNA, 120 bp, Artificial Sequence
  ENSG00000117984_15 (sequence is synthesized)
cgctagaggcctgaggatgagctggaaggagtgagaggggacaaaacccaccttgttggagcctgcagggtggtgctgggactgagccagtcccaggggcatgtattggcctggaggtgg

SEQ ID NO: 224879 - DNA, 120 bp, Artificial Sequence
  ENSG00000117984_16 (sequence is synthesized)
ggttgggattgggggctggtgccagccttcctctgcagctgacctctgttgtcctccccttgggcggctgagagccccagctgacatggaaatacagttgttggcctccggcctcccctc

SEQ ID NO: 224880 - DNA, 120 bp, Artificial Sequence
  ENSG00000117984_17 (sequence is synthesized)
ctctctctgcagcctcatccagggctgggggaggggacaggcagagaaggggaagggggcagtatggctgtgccctgccagtcagcgtcgtcagcctctgccctgggcggtgtcaaagtg

SEQ ID NO: 224881 - DNA, 120 bp, Artificial Sequence
  ENSG00000117984_18 (sequence is synthesized)
ttcacaccaaggggaaggccagtggccctgggggaggagcagggacccctctctctcttactcgcttcctgggtttagaactcaggaccccgatctcagtctggagctccctcctgcacc

SEQ ID NO: 224882 - DNA, 120 bp, Artificial Sequence
  ENSG00000117984_19 (sequence is synthesized)
ctggctggcggtgtgctgggtgacaggactctggaggggtaccctgagtgcagctgtcggaggaggcagggcggtggggggggcagcacagaagcctctaaggccccaggtgcagtcctg

SEQ ID NO: 224883 - DNA, 120 bp, Artificial Sequence
  ENSG00000117984_20 (sequence is synthesized)
aatgtcacccgcaaggcctactggcaggtccacctggaccagagccctgaggggaggagagtgcagcccagccaggggaggggctcccagggaggggcactgggcccccagggcacactc

SEQ ID NO: 224884 - DNA, 120 bp, Artificial Sequence
  ENSG00000117984_21 (sequence is synthesized)
ctggcactcacttccttgtctgccgctagccttgaccctgatgtctggctgaaccttggctcctgagcagaccaggagaacctgagggttgaggaaaacctcttctgggccaggctgggc

SEQ ID NO: 224885 - DNA, 120 bp, Artificial Sequence
  ENSG00000117984_22 (sequence is synthesized)
ccacgcagagcagccctaccccgggaagaagggagtctgtccctcctcctgccttctgggcctttccatccctgcagtttcagaaaggcccctccttcaggaagctctccctgattgcca

SEQ ID NO: 224886 - DNA, 120 bp, Artificial Sequence
  ENSG00000117984_23 (sequence is synthesized)
cattcaccctcttactcctgacctggcactcttgtgcttggggggtggcgtggcagctgactcctcccttttcctcctagggacccagatgcgcagcctgggggtgagctgatgctgggt

SEQ ID NO: 224887 - DNA, 120 bp, Artificial Sequence
  ENSG00000117984_24 (sequence is synthesized)
gagctgcagaaggccatcggggccgtgccgctgattcagggcgaggtgagcgccgggggctggggctggggctggggctggcagggggagccccaaggccaccactaccaccctgacact

SEQ ID NO: 224888 - DNA, 120 bp, Artificial Sequence
  ENSG00000117984_25 (sequence is synthesized)
gctgtgacccctcttagtacatgatcccctgtgagaaggtgtccaccctgcccgcgatcacactgaagctgggaggcaaaggctacaagctgtccccagaggactacacgctcaaggtga

SEQ ID NO: 224889 - DNA, 120 bp, Artificial Sequence
  ENSG00000118004_0 (sequence is synthesized)
gccatgaggcgcctgggggcagtgtcctcgcgggccagcgacgggcaggacgccccgttcgcctagcgcgtgctcaggagttggtgtcctgcctgcgctcaggatgagggggaatctggc

SEQ ID NO: 224890 - DNA, 120 bp, Artificial Sequence
  ENSG00000118004_1 (sequence is synthesized)
cctggtgggcgttctaatcagcctggccttcctgtcactgctgccatctggacatcctcagccggctggcgatgacgcctgctctgtgcagatcctcgtccctggcctcaaaggggatgc

SEQ ID NO: 224891 - DNA, 120 bp, Artificial Sequence
  ENSG00000118004_2 (sequence is synthesized)
gggagagaagggagacaaaggcgcccccggacggcctggaagagtcggccccacgggagaaaaaggagacatgggggacaaaggacagaaaggcagtgtgggtcgtcatggaaaaattgg

SEQ ID NO: 224892 - DNA, 120 bp, Artificial Sequence
  ENSG00000118004_3 (sequence is synthesized)
tcccattggctctaaaggtgagaaaggagattccggtgacataggaccccctggtcctaatggagaaccaggcctcccatgtgagtgcagccagctgcgcaaggccatcggggagatgga

SEQ ID NO: 224893 - DNA, 120 bp, Artificial Sequence
  ENSG00000118004_4 (sequence is synthesized)
caaccaggtctctcagctgaccagcgagctcaagttcatcaagaatgctgtcgccggtgtgcgcgagacggagagcaagatctacctgctggtgaaggaggagaagcgctacgcggacgc

SEQ ID NO: 224894 - DNA, 120 bp, Artificial Sequence
  ENSG00000118004_5 (sequence is synthesized)
atggcctgatggccgcatacctggcgcaagccggcctggcccgtgtcttcatcggcatcaacgacctggagaaggagggcgccttcgtgtactctgaccactcccccatgcggaccttca

SEQ ID NO: 224895 - DNA, 120 bp, Artificial Sequence
  ENSG00000118004_6 (sequence is synthesized)
acaagtggcgcagcggtgagcccaacaatgcctacgacgaggaggactgcgtggagatggtggcctcgggcggctggaacgacgtggcctgccacaccaccatgtacttcatgtgtgagt

SEQ ID NO: 224896 - DNA, 120 bp, Artificial Sequence
  ENSG00000118004_7 (sequence is synthesized)
ttgacaaggagaacatgtgagcctcaggctggggctgcccattgggggccccacatgtccctgcagggttggcagggacagagcccagaccatggtgccagccagggagctgtccctctg

SEQ ID NO: 224897 - DNA, 120 bp, Artificial Sequence
  ENSG00000118004_8 (sequence is synthesized)
tgaagggtggaggctcactgagtagagggctgttgtctaaactgagaaaatggcctatgcttaagaggaaaatgaaagtgttcctggggtgctgtctctgaagaagcagagtttcattac

SEQ ID NO: 224898 - DNA, 120 bp, Artificial Sequence
  ENSG00000118004_9 (sequence is synthesized)
ctgtattgtagccccaatgtcattatgtaattattacccagaattgctcttccataaagcttgtgcctttgtccaagctatacaataaaatctttaagtagtgcagtagttaagtccaaa

SEQ ID NO: 224899 - DNA, 120 bp, Artificial Sequence
  ENSG00000118004_10 (sequence is synthesized)
cagaagttttggtgaaagtggctttggccctgactttgtggtagcgtgtgtgggtttgtgagtggaaccttcagctttaggttggaaacggtggctgtggagagctggacttttggctgt

SEQ ID NO: 224900 - DNA, 120 bp, Artificial Sequence
  ENSG00000118004_11 (sequence is synthesized)
agatttgggagaaggatttcaaatgacttcccttcgagctgcagggctatcttgggcatcttgacctccacacatttctgggagaactcctcgtgcagcaggacatcaggtggcaaaggt

SEQ ID NO: 224901 - DNA, 120 bp, Artificial Sequence
  ENSG00000118004_12 (sequence is synthesized)
aattacaggtgtgagccactgcgcctggtcttgttttccaagttgtaacgcccttcacgatgaagaaacaaagaggagttggtgtcctgcctgcgctcaggatgagggggaatctggccc

SEQ ID NO: 224902 - DNA, 120 bp, Artificial Sequence
  ENSG00000118004_13 (sequence is synthesized)
acacttctgtaaattacattacaatataggttccttcacactattatccatgtaaaaacaattttgctttgcttcaaacccagatttcaggaaaacaacaacaaaattctccaaacttta

SEQ ID NO: 224903 - DNA, 120 bp, Artificial Sequence
  ENSG00000118004_14 (sequence is synthesized)
ggaggtcacgtccctgcccaatgtggtgggtgcctccgagtccctacggttgtcttccctgcgccctgccaggagacatgggggacaaaggacagaaaggcagtgtgggtcgtcatggaa

SEQ ID NO: 224904 - DNA, 120 bp, Artificial Sequence
  ENSG00000118004_15 (sequence is synthesized)
gagaaccagctccttcggcaccgcagagatgaggaggaacggctgcttggaaggtgtgcttgccggtgtgacttggctgagtgtgagtgcgctgagatcagtgtcactgactggccgagc

SEQ ID NO: 224905 - DNA, 120 bp, Artificial Sequence
  ENSG00000118004_16 (sequence is synthesized)
agcatccgctcagggcacctccaggcactcagccaacctgaggggcccggacaaagcctctgggagacagaaggacctggaggcctcccatgtgagtgcagccagctgcgcaaggccatc

SEQ ID NO: 224906 - DNA, 120 bp, Artificial Sequence
  ENSG00000118004_17 (sequence is synthesized)
aaaaaagaaacaaaattgggatgttcgggttggagagttagcaggggcatctccaggagggtcctgccccccaccccaaagccggcctcagggagttccaggcgttcccacactccccag

SEQ ID NO: 224907 - DNA, 120 bp, Artificial Sequence
  ENSG00000118004_18 (sequence is synthesized)
gcaggacggtggacgcagcgcagacaggaagctccccgagataacgctgcggccgggcggcctgatttgctgggctgtctgatggcccgggccgaggcttctccctgcgcctgggactgc

SEQ ID NO: 224908 - DNA, 120 bp, Artificial Sequence
  ENSG00000118004_19 (sequence is synthesized)
tgcggctctttttattgaaacattagagaaaagtagattcaaacccatgatcaaaacagtcaccacgaaagacaaaccctgctcagcccgtgttgtacaaaatgaaaaggtcagccctct

SEQ ID NO: 224909 - DNA, 120 bp, Artificial Sequence
  ENSG00000118004_20 (sequence is synthesized)
cccggggcacagggtccggacagctcggggccaccctgccaggctgtgcagctctggctgggggcttttttccggctgtgttagccctgctgttggaaaccaagtggactgtcctgcagc

SEQ ID NO: 224910 - DNA, 120 bp, Artificial Sequence
  ENSG00000118004_21 (sequence is synthesized)
gtcgtgacagcttctgacatctccaaaaggaagtgcacctcgtcctttgtagaaatgggatcacagggagacatgggggacaaaggacagaaaggcagtgtgggtcgtcatggaaaaatt

SEQ ID NO: 224911 - DNA, 120 bp, Artificial Sequence
  ENSG00000118007_0 (sequence is synthesized)
attggcgtgtggaaaatgccaccagatggcgggttaggattgcagctccgttgaaggcgcggcccccgctcccgaacccccggcgaccaccccgtaacaacccccccacatcgggaataa

SEQ ID NO: 224912 - DNA, 120 bp, Artificial Sequence
  ENSG00000118007_1 (sequence is synthesized)
cacaccggagacttttggggggaaactaggtcgatggtcggcggcgcccggatgggcagctgaggattgcctttgaggttattttaaaagttttgagttgtacagcacttgattattttg

SEQ ID NO: 224913 - DNA, 120 bp, Artificial Sequence
  ENSG00000118007_2 (sequence is synthesized)
ctgcattgtgaaaggacctctccagcaatgattacttcagaattaccagtgttacaggattcaactaatgaaactactgcccattccgatgctggcagcgagcttgaagaaacagaggtc

SEQ ID NO: 224914 - DNA, 120 bp, Artificial Sequence
  ENSG00000118007_3 (sequence is synthesized)
aaaggaaaaagaaaaaggggtcgtcctggccggcctccatctacaaataagaaacctcgaaaatctccaggtgagaagagcagaattgaagctggaattagaggagcaggccgtggaaga

SEQ ID NO: 224915 - DNA, 120 bp, Artificial Sequence
  ENSG00000118007_4 (sequence is synthesized)
gctaatggacaccctcaacagaatggggaaggggagcctgtcacattatttgaggtggtgaaactggggaaaagtgcaatgcagtccgtggtggatgactggattgaatcatataaacaa

SEQ ID NO: 224916 - DNA, 120 bp, Artificial Sequence
  ENSG00000118007_5 (sequence is synthesized)
gacagggacatcgcacttctggatttaatcaacttttttatccagtgttcaggatgtcgaggtactgtgagaatagagatgtttcgaaatatgcagaatgcagaaatcatcagaaaaatg

SEQ ID NO: 224917 - DNA, 120 bp, Artificial Sequence
  ENSG00000118007_6 (sequence is synthesized)
actgaagaatttgatgaggacagtggtgattatcctcttaccatgcctggacctcagtggaaaaaatttcgttcaaacttttgtgaatttattggagtcctgattcgacagtgtcagtat

SEQ ID NO: 224918 - DNA, 120 bp, Artificial Sequence
  ENSG00000118007_7 (sequence is synthesized)
agcataatttatgatgagtatatgatggacacagtaatctcccttttgacgggtttgtcagactcccaggtcagagcttttaggcatacaagtaccctggctgccatgaagctcatgact

SEQ ID NO: 224919 - DNA, 120 bp, Artificial Sequence
  ENSG00000118007_8 (sequence is synthesized)
gctctggtgaatgttgccttaaacctcagtattcatcaggataatacccagagacaatatgaagccgagagaaataaaatgattgggaagagagccaatgaaaggttggagttactactt

SEQ ID NO: 224920 - DNA, 120 bp, Artificial Sequence
  ENSG00000118007_9 (sequence is synthesized)
cagaaacgcaaagagctgcaagaaaatcaggatgaaatcgaaaatatgatgaactctatttttaagggtatatttgttcatagataccgtgatgctattgctgagattagagccatttgt

SEQ ID NO: 224921 - DNA, 120 bp, Artificial Sequence
  ENSG00000118007_10 (sequence is synthesized)
attgaagaaattggagtatggatgaaaatgtatagtgatgccttcctaaatgacagttacctaaaatatgttggctggactcttcatgacaggcaaggggaagtcaggctgaagtgtttg

SEQ ID NO: 224922 - DNA, 120 bp, Artificial Sequence
  ENSG00000118007_11 (sequence is synthesized)
aaagctctgcagagtctatataccaatagagaattattccccaaattggaactattcactaaccgattcaaggatcgcattgtatcaatgacacttgataaagaatatgatgttgctgtg

SEQ ID NO: 224923 - DNA, 120 bp, Artificial Sequence
  ENSG00000118007_12 (sequence is synthesized)
gaagctattcgattggttactctgatacttcatggaagtgaagaagctctttccaatgaagactgtgaaaatgtttaccacttggtgtactcggcacatcgccctgttgctgtggcagct

SEQ ID NO: 224924 - DNA, 120 bp, Artificial Sequence
  ENSG00000118007_13 (sequence is synthesized)
ggagagttccttcacaaaaagctatttagcagacatgacccacaagcagaagaagcattagcaaagaggaggggaagaaacagcccgaatggaaacctcattaggatgctggttcttttc

SEQ ID NO: 224925 - DNA, 120 bp, Artificial Sequence
  ENSG00000118007_14 (sequence is synthesized)
tttcttgaaagtgagttacatgaacatgcagcctacttggtggacagtttatgggagagctctcaagaactgttgaaagactgggaatgtatgacagagttgctattagaagaacctgtt

SEQ ID NO: 224926 - DNA, 120 bp, Artificial Sequence
  ENSG00000118007_15 (sequence is synthesized)
caaggagaggaagcaatgtctgatcgtcaagagagtgctcttatagagctaatggtttgtacaattcgtcaagctgctgaggcacatcctccagtgggaaggggtaccggcaagagagtg

SEQ ID NO: 224927 - DNA, 120 bp, Artificial Sequence
  ENSG00000118007_16 (sequence is synthesized)
ctaactgccaaagaaaggaaaactcaaattgatgatagaaacaaattgactgaacattttattattacacttcctatgttactgtcaaagtattctgcagatgcagagaaggtagcaaac

SEQ ID NO: 224928 - DNA, 120 bp, Artificial Sequence
  ENSG00000118007_17 (sequence is synthesized)
ttgctacaaatcccacagtattttgatttagaaatctacagcacaggtagaatggaaaagcatctggatgctttattaaaacagattaagtttgttgtggagaaacacgtagaatcagat

SEQ ID NO: 224929 - DNA, 120 bp, Artificial Sequence
  ENSG00000118007_18 (sequence is synthesized)
gttctagaagcctgcagtaaaacctatagtatcttatgcagtgaagaatataccatccagaacagagttgacatagctcgaagccagctgattgatgagtttgtagatcgattcaatcat

SEQ ID NO: 224930 - DNA, 120 bp, Artificial Sequence
  ENSG00000118007_19 (sequence is synthesized)
tctgtggaagacctattgcaagagggagaagaagctgatgatgatgacatttacaatgttctttctacattaaagcggttaacttcttttcacaatgcacatgatctcacaaaatgggat

SEQ ID NO: 224931 - DNA, 120 bp, Artificial Sequence
  ENSG00000118007_20 (sequence is synthesized)
ctctttggtaattgctacagattattgaagactggaattgaacatggagccatgccagaacagatagtcgtgcaagcactgcagtgttcccattattcgattctttggcagttggtgaaa

SEQ ID NO: 224932 - DNA, 120 bp, Artificial Sequence
  ENSG00000118007_21 (sequence is synthesized)
attactgatggctctccttccaaagaggatttgttggtattgaggaaaacggtgaaatcctttttggctgtttgccagcagtgcctgtctaatgttaatactccagtgaaagaacaggct

SEQ ID NO: 224933 - DNA, 120 bp, Artificial Sequence
  ENSG00000118007_22 (sequence is synthesized)
ttcatgttactctgtgatcttctgatgattttcagccaccaattaatgacaggtggcagagagggccttcagcctttggtgttcaatccagatactggactccaatctgaactcctcagt

SEQ ID NO: 224934 - DNA, 120 bp, Artificial Sequence
  ENSG00000118007_23 (sequence is synthesized)
tttgtgatggatcacgtttttattgaccaagacgaggagaaccagagcatggagggtgatgaagaagatgaagctaataaaattgaggccttacataaaagaaggaatctacttgctgct

SEQ ID NO: 224935 - DNA, 120 bp, Artificial Sequence
  ENSG00000118007_24 (sequence is synthesized)
ttcagcaaacttatcatttatgacattgttgacatgcatgcagctgcagacatcttcaaacactacatgaagtattacaatgactatggtgatattattaaggaaacactgagtaaaacc

SEQ ID NO: 224936 - DNA, 120 bp, Artificial Sequence
  ENSG00000118007_25 (sequence is synthesized)
tgaacttgttcaagagcaaggtcccaacctagataggacatctgcccatgtcagtggcattaaagaactggcacgtcgctttgcccttacatttggattggaccagattaagacacgaga

SEQ ID NO: 224937 - DNA, 120 bp, Artificial Sequence
  ENSG00000118007_26 (sequence is synthesized)
agcagttgccacacttcacaaggatggcatagagtttgcatttaaataccaaaatcagaaaggacaagagtatccacctcctaatctggcttttcttgaagtactaagtgaattttcttc

SEQ ID NO: 224938 - DNA, 120 bp, Artificial Sequence
  ENSG00000118007_27 (sequence is synthesized)
taaacttcttcgacaggacaaaaagacagttcattcatacctagagaaattccttaccgagcagatgatggaaaggagggaggatgtatggcttccactcatctcctatagaaattcatt

SEQ ID NO: 224939 - DNA, 120 bp, Artificial Sequence
  ENSG00000118007_28 (sequence is synthesized)
agtcactgggggtgaagatgatagaatgtctgtgaacagtggaagtagcagcagcaaaacctcatcagtaaggaataagaaaggacgacctccacttcataaaaaacgagtagaagatga

SEQ ID NO: 224940 - DNA, 120 bp, Artificial Sequence
  ENSG00000118007_29 (sequence is synthesized)
gagtctggataacacatggctaaacaggactgacaccatgattcagactcctggccccctgccagcaccacaactcacatccactgtactgcgggagaacagtcggcccatgggagacca

SEQ ID NO: 224941 - DNA, 120 bp, Artificial Sequence
  ENSG00000118007_30 (sequence is synthesized)
gattcaagaacctgagtctgaacatggttctgaaccagactttttacacaatcctcagatgcagatctcttggttaggccagccgaagttagaagacttaaatcggaaggacagaacagg

SEQ ID NO: 224942 - DNA, 120 bp, Artificial Sequence
  ENSG00000118007_31 (sequence is synthesized)
aatgaactacatgaaagtgagaactggagtgaggcatgctgttcggggtctaatggaggaagatgctgagcccatctttgaagatgtgatgatgtcatcccgaagccagttagaagatat

SEQ ID NO: 224943 - DNA, 120 bp, Artificial Sequence
  ENSG00000118007_32 (sequence is synthesized)
gaatgaagaatttgaggacaccatggttattgatctgcctccatcaagaaatcggcgagagagagctgagctaaggccagacttctttgactctgcagctatcatagaagatgattcagg

SEQ ID NO: 224944 - DNA, 120 bp, Artificial Sequence
  ENSG00000118007_33 (sequence is synthesized)
atttggaatgcctatgttctgaagtctgaagaaaatttacaaatctggaactctattatttagagctagaggcctatatactgtgatagcttgtatggggaaaaacacttttgatgtgat

SEQ ID NO: 224945 - DNA, 120 bp, Artificial Sequence
  ENSG00000118007_34 (sequence is synthesized)
ctgatttgttttttaatcaaatgattaaggtcaatccctttttgcagtgacagaagaggagcatgtaaattacccaagggaatgttggtgaatgtcaactcagaaagactgacctgaaaa

SEQ ID NO: 224946 - DNA, 120 bp, Artificial Sequence
  ENSG00000118007_35 (sequence is synthesized)
tcatttgtgtcctactattggacttatcccaatacagatgtgtgtgtttttctggagggaggaagaaattttaaatttttaaaacagctgtcaagataaacactgttatacacctgtttt

SEQ ID NO: 224947 - DNA, 120 bp, Artificial Sequence
  ENSG00000118007_36 (sequence is synthesized)
atgaaaactcaacattgagtaaaaaaaaacatatttttaactttattttcctgttgtacaatttaaaaaccgttttaacattttgcctttttatgttttaaaagctaaccatttttatta

SEQ ID NO: 224948 - DNA, 120 bp, Artificial Sequence
  ENSG00000118007_37 (sequence is synthesized)
aacctatgagtaagcagctcatcctaattgcgaagagtgttttggagttcactggatttggttgacctttgtggaacacaaataatgaaggagcagaacattgacaagctaagatgaaat

SEQ ID NO: 224949 - DNA, 120 bp, Artificial Sequence
  ENSG00000118007_38 (sequence is synthesized)
tctgacatagtacatctctgccaaaaaccacacaccctctgtggatatggatatgaattcccagattttatatactcttgaataaaaggtttatttttatttataagtgggcataaaata

SEQ ID NO: 224950 - DNA, 120 bp, Artificial Sequence
  ENSG00000118007_39 (sequence is synthesized)
agaaatgtccatgcagccatttttccaacagatgctgtacaccgttcattttatatagactagggagattcaaatacagtgcattttctattggtatttgttctgtgcatttttagcaac

SEQ ID NO: 224951 - DNA, 120 bp, Artificial Sequence
  ENSG00000118007_40 (sequence is synthesized)
ttctaccagcaaataaagtattctcagtaaaacgaaaatgattctcaagttatcagtttgctgtttttaccacttatttcatgccctgccaaattcaagttacacagacttccattttct

SEQ ID NO: 224952 - DNA, 120 bp, Artificial Sequence
  ENSG00000118007_41 (sequence is synthesized)
taagataatcaatcatgaagaaatcctttatcaatcattcaaaagtaattttaagtgtaacataactgtgtttacttcccatgcacttaatacccttatgcgctaattttgtgaattaag

SEQ ID NO: 224953 - DNA, 120 bp, Artificial Sequence
  ENSG00000118007_42 (sequence is synthesized)
tttactgattatagaagtatgtgctgcatagaagtctgtgcttagagggtgaagttcctaagcttaccttgaattacagctacatttcagtgttaaatgtgcatattaagaataattctt

SEQ ID NO: 224954 - DNA, 120 bp, Artificial Sequence
  ENSG00000118007_43 (sequence is synthesized)
ttggggaaagaaattatgaatcttcaggacagtctacaatggtttagagttacattctgcctagacttttatgacttgctgctattgttttaaaaaccccacttagtctctctcttcctt

SEQ ID NO: 224955 - DNA, 120 bp, Artificial Sequence
  ENSG00000118007_44 (sequence is synthesized)
tctgatttctaaagtaagcctcagaatttccaaaccaattcatccacagctgtttctgggctggtttttaaagtagctgcaacagaatcatgaggctttccctttttatcaaatacgaaa

SEQ ID NO: 224956 - DNA, 120 bp, Artificial Sequence
  ENSG00000118007_45 (sequence is synthesized)
aacattttttaaaattctgcacacccagtgatcatcttttgtgcgggaaagcaagatgatgatggatgattttattcatccttttagtaaagacacaaaacatttttctcaacatttgta

SEQ ID NO: 224957 - DNA, 120 bp, Artificial Sequence
  ENSG00000118007_46 (sequence is synthesized)
cagttctgaaaaaaacctggtcaccaaaaatatcttctctgctaattcagcaattcttgggctccagttaggggagctggggcctcactttctcccagaattgtgggcttcactggaagt

SEQ ID NO: 224958 - DNA, 120 bp, Artificial Sequence
  ENSG00000118007_47 (sequence is synthesized)
gaaggtgcaggaatgactggactgtccaccccagccctgcctgcctgtggttttggccagggagcaagccatgaggtgccctggcacatgcacaaattgatcctttgcgtgacagtcttg

SEQ ID NO: 224959 - DNA, 120 bp, Artificial Sequence
  ENSG00000118007_48 (sequence is synthesized)
tatggaaaacagatgctgacagaattgtagactaccatgccacacaaaaaggctaaatatctactccaatgggtttccagttcagtttgaagtcaatcaaatttttgtattttcggtgtc

SEQ ID NO: 224960 - DNA, 120 bp, Artificial Sequence
  ENSG00000118007_49 (sequence is synthesized)
tccttgattggttttgctagtaattctgtaaattgtacatttgcaatatgaggttttttttccttttgtacaatttgaaactgatgcttcacctttcctttaataaactattcaaaatca

SEQ ID NO: 224961 - DNA, 120 bp, Artificial Sequence
  ENSG00000118007_50 (sequence is synthesized)
gagagagaaagagaagcagtgtctacttcttagaagcctttggcccctctatttacattccattgatgggaacttaccacatactcagtccgtggtggatgactggattgaatcatataa

SEQ ID NO: 224962 - DNA, 120 bp, Artificial Sequence
  ENSG00000118007_51 (sequence is synthesized)
actggaattgaacatggagccatgccagaacaggtaggagtttattggtattccttctgtatgactctagaaagttgtttttctgaagtcatatgattatcagaagccttttatagaaag

SEQ ID NO: 224963 - DNA, 120 bp, Artificial Sequence
  ENSG00000118007_52 (sequence is synthesized)
taattgacgattcattagggcagctgcctcttttgagagaattattgctgtagtaattaaatgttattgataggtgtattatactggcttatgtgttaagagtagaaaaaacttttgcta

SEQ ID NO: 224964 - DNA, 120 bp, Artificial Sequence
  ENSG00000118007_53 (sequence is synthesized)
taacatatcttaaaaattttactgttaaggtagacttttctctattaggagaaataccattaatatctatggcagcaattttaaaactttggataatgaaaattgatgatgggtatattc

SEQ ID NO: 224965 - DNA, 120 bp, Artificial Sequence
  ENSG00000118007_54 (sequence is synthesized)
ggtatatttgttcatagataccggtaagagattttaaaaataattttgaaggcttttcacttaaacaattattgattttttttgtggcccaggctaactgtaaaactcactaattatgat

SEQ ID NO: 224966 - DNA, 120 bp, Artificial Sequence
  ENSG00000118007_55 (sequence is synthesized)
ttatgttttgttttctggaaaacaactttggctgtcagtgtcacactacaactatagaagaaattgtatgactgctgccactaccactgttatactcttccaaattcagaacatatgctg

SEQ ID NO: 224967 - DNA, 120 bp, Artificial Sequence
  ENSG00000118007_56 (sequence is synthesized)
ttggaagtagcttatgtacttggatttatactgatggaatattaattaataggatcataaactaatgtagctttaataagatattcttgttttcacatttaaaaaattaagtgccctact

SEQ ID NO: 224968 - DNA, 120 bp, Artificial Sequence
  ENSG00000118007_57 (sequence is synthesized)
tcttgctctgtggtactcattttgttccatgggcaaattaataatttaaaaaaaaaaaaaacctgtgtgaagctgggcgaaaagaggacagagaagggcaaccccgcagttaatgcaaca

SEQ ID NO: 224969 - DNA, 120 bp, Artificial Sequence
  ENSG00000118007_58 (sequence is synthesized)
ggcaggaacatttaatcctctgcttcaaagactatgtgcatggacagttacaaggcagttatggccagatatgattatcggctttggaataaaatgctccttgacattgcttaaatctta

SEQ ID NO: 224970 - DNA, 120 bp, Artificial Sequence
  ENSG00000118007_59 (sequence is synthesized)
tgttttccaaatatcccattttcctgttatgaattcaatatgtgtccctgttgtcagtgtttatgcattgcatttaattgtatacttttacatttttattaaaagttttttttatcatta

SEQ ID NO: 224971 - DNA, 120 bp, Artificial Sequence
  ENSG00000118007_60 (sequence is synthesized)
cctttacactataagaaacaatttgcctggttttaaagagataaagtagtaaataatcttttgaagcaagataatagtatcaggcacatgattttcttgtatattttattcacaatgaga

SEQ ID NO: 224972 - DNA, 120 bp, Artificial Sequence
  ENSG00000118007_61 (sequence is synthesized)
tgttaaggcaaaaaggttgaaacagatgaagtaagacagaaaagcatcaaggaaaaagaagttgaggaagcatggagcacaaaggaagacagcccaaaagaggaaaaaattagctaggtc

SEQ ID NO: 224973 - DNA, 120 bp, Artificial Sequence
  ENSG00000118007_62 (sequence is synthesized)
tataaaatcaatccccatactatatgcctctaatacattaaaatataaagtaagatagtcacaatgctattctattaaaattcttcctaatatagatgagatacaggtaatttgagggta

SEQ ID NO: 224974 - DNA, 120 bp, Artificial Sequence
  ENSG00000118017_0 (sequence is synthesized)
gtcatttctaagacctcaaatactggttaactgcatttgcagctagaagttaggctctgattcactgttttgtattttctaaaagggttatatgtaatttgaaagatagacctgccaaga

SEQ ID NO: 224975 - DNA, 120 bp, Artificial Sequence
  ENSG00000118017_1 (sequence is synthesized)
cgtgagatctgtgttctccttggttagagctaacatttttggtgaggaaagcactgcaggagcaggctggcacagagaagaggacatgcggaaggagctccagctctccctgtcagtcac

SEQ ID NO: 224976 - DNA, 120 bp, Artificial Sequence
  ENSG00000118017_2 (sequence is synthesized)
cttgctgcttgtctgtggcttcctctaccagttcaccctgaagtccagctgcctcttctgtttgccttctttcaagtcccaccaggggctggaagccctcctgagccacagacgtggcat

SEQ ID NO: 224977 - DNA, 120 bp, Artificial Sequence
  ENSG00000118017_3 (sequence is synthesized)
tgtgtttctagagacctcagagagaatggagccaccccatttggtctcctgttccgtagagtctgctgccaagatttatcctgagtggcctgtggtgttctttatgaagggtcttactga

SEQ ID NO: 224978 - DNA, 120 bp, Artificial Sequence
  ENSG00000118017_4 (sequence is synthesized)
ttccacaccgatgccctcaaactccacatacccagctttttccttcctgtcagcaatagacaacgttttcctcttccctttggatatgaaaaggctgcttgaagacacaccattgttttc

SEQ ID NO: 224979 - DNA, 120 bp, Artificial Sequence
  ENSG00000118017_5 (sequence is synthesized)
atggtacaatcaaatcaacgccagcgcagagagaaactggctccacatcagctcggatgcatcccgcctggccatcatctggaaatacggtggcatctacatggacaccgatgtcatctc

SEQ ID NO: 224980 - DNA, 120 bp, Artificial Sequence
  ENSG00000118017_6 (sequence is synthesized)
catcaggcccatccctgaggagaactttttggctgcgcaggcttctcggtactctagtaatggaatatttgggttcctcccccaccacccctttttgtgggaatgcatggaaaactttgt

SEQ ID NO: 224981 - DNA, 120 bp, Artificial Sequence
  ENSG00000118017_7 (sequence is synthesized)
cgacctcaggtgtctgaacatatccttcttacacccccaaagattttaccccatctcctatcgagagtggaggcgctactatgaagtgtgggatacagagccaagcttcaatgtctctta

SEQ ID NO: 224982 - DNA, 120 bp, Artificial Sequence
  ENSG00000118017_8 (sequence is synthesized)
tgccctgcatttgtggaaccacatgaaccaggaggggcgggctgtgattagaggaagcaacacactggtggaaaatctctatcgcaagcactgtcccaggacttacagggacctgattaa

SEQ ID NO: 224983 - DNA, 120 bp, Artificial Sequence
  ENSG00000118017_9 (sequence is synthesized)
aggcccagaggggtcagtgactggggagctgggtccaggtaacaaataaagctaacactcgtttgctgctgctgcagtgtggaaatggacatttcctggagtgccacattttcacttgat

SEQ ID NO: 224984 - DNA, 120 bp, Artificial Sequence
  ENSG00000118017_10 (sequence is synthesized)
ctccactgtctcttggcggggtgggcagagggttgcctctcaaatgtcagttaggattagctttctctgtctgtaatagaaaaatcccaaatgatactggctataaaacatacacccatg

SEQ ID NO: 224985 - DNA, 120 bp, Artificial Sequence
  ENSG00000118017_11 (sequence is synthesized)
gtccatttgactgcttgacctccaacccaccatgtttgcatttcaggcagtaggatgaagaaaagaggaaaggtgcacttgctttattttgtgaagacttcctgcaagtaccgtataaca

SEQ ID NO: 224986 - DNA, 120 bp, Artificial Sequence
  ENSG00000118017_12 (sequence is synthesized)
ctttctcttacattgcactgactgagatgtagctgcaagagaggctgggaagtttaaggaggaagaaaaaatgggtactgggataggcagctaacagttttgctacatgttctatttaat

SEQ ID NO: 224987 - DNA, 120 bp, Artificial Sequence
  ENSG00000118017_13 (sequence is synthesized)
acagtaagattaattccaggacctgttagagcattgactgaggtaaaaagagacttgatttctagtcctgattttgacattcattaatgcattcagtcaataaatattaactgagcctgg

SEQ ID NO: 224988 - DNA, 120 bp, Artificial Sequence
  ENSG00000118046_0 (sequence is synthesized)
ggcctgtgggatgggcggcccggagaagactgcgctcggccgtgttcatacttgtccgtgggcctgaggtccccggaggatgacctagcactgaaaagccccggccggcctccccagggt

SEQ ID NO: 224989 - DNA, 120 bp, Artificial Sequence
  ENSG00000118046_1 (sequence is synthesized)
ccccgaggacgaagttgaccctgaccgggccgtctcccagttctgaggcccgggtcccactggaactcgcgtctgagccgccgtcccggacccccggtgcccgccggtccgcagaccctg

SEQ ID NO: 224990 - DNA, 120 bp, Artificial Sequence
  ENSG00000118046_2 (sequence is synthesized)
caccgggcttggactcgcagccgggactgacgtgtagaacaatcgtttctgttggaagaagggtttttcccttccttttggggtttttgttgccttttttttttcttttttctttgtaaa

SEQ ID NO: 224991 - DNA, 120 bp, Artificial Sequence
  ENSG00000118046_3 (sequence is synthesized)
attttggagaagggaagtcggaacacaaggaaggaccgctcacccgcggactcagggctggcggcgggactccaggaccctgggtccagcatggaggtggtggacccgcagcagctgggc

SEQ ID NO: 224992 - DNA, 120 bp, Artificial Sequence
  ENSG00000118046_4 (sequence is synthesized)
atgttcacggagggcgagctgatgtcggtgggtatggacacgttcatccaccgcatcgactccaccgaggtcatctaccagccgcgccgcaagcgggccaagctcatcggcaagtacctg

SEQ ID NO: 224993 - DNA, 120 bp, Artificial Sequence
  ENSG00000118046_5 (sequence is synthesized)
atgggggacctgctgggggaaggctcttacggcaaggtgaaggaggtgctggactcggagacgctgtgcaggagggccgtcaagatcctcaagaagaagaagttgcgaaggatccccaac

SEQ ID NO: 224994 - DNA, 120 bp, Artificial Sequence
  ENSG00000118046_6 (sequence is synthesized)
ggggaggccaacgtgaagaaggaaattcaactactgaggaggttacggcacaaaaatgtcatccagctggtggatgtgttatacaacgaagagaagcagaaaatgtatatggtgatggag

SEQ ID NO: 224995 - DNA, 120 bp, Artificial Sequence
  ENSG00000118046_7 (sequence is synthesized)
tactgcgtgtgtggcatgcaggaaatgctggacagcgtgccggagaagcgtttcccagtgtgccaggcccacgggtacttctgtcagctgattgacggcctggagtacctgcatagccag

SEQ ID NO: 224996 - DNA, 120 bp, Artificial Sequence
  ENSG00000118046_8 (sequence is synthesized)
ggcattgtgcacaaggacatcaagccggggaacctgctgctcaccaccggtggcaccctcaaaatctccgacctgggcgtggccgaggcactgcacccgttcgcggcggacgacacctgc

SEQ ID NO: 224997 - DNA, 120 bp, Artificial Sequence
  ENSG00000118046_9 (sequence is synthesized)
cggaccagccagggctccccggctttccagccgcccgagattgccaacggcctggacaccttctccggcttcaaggtggacatctggtcggctggggtcaccctctacaacatcaccacg

SEQ ID NO: 224998 - DNA, 120 bp, Artificial Sequence
  ENSG00000118046_10 (sequence is synthesized)
cgctctctgacctgctgaaagggatgcttgagtacgaaccggccaagaggttctccatccggcagatccggcagcacagctggttccggaagaaacatcctccggctgaagcaccagtgc

SEQ ID NO: 224999 - DNA, 120 bp, Artificial Sequence
  ENSG00000118046_11 (sequence is synthesized)
ccatcccaccgagcccagacaccaaggaccggtggcgcagcatgactgtggtgccgtacttggaggacctgcacggcgcggacgaggacgaggacctcttcgacatcgaggatgacatca

SEQ ID NO: 225000 - DNA, 120 bp, Artificial Sequence
  ENSG00000118046_12 (sequence is synthesized)
tctacactcaggacttcacggtgcccggacaggtcccagaagaggaggccagtcacaatggacagcgccggggcctccccaaggccgtgtgtatgaacggcacagaggcggcgcagctga

SEQ ID NO: 225001 - DNA, 120 bp, Artificial Sequence
  ENSG00000118046_13 (sequence is synthesized)
gcaccaaatccagggcggagggccgggcccccaaccctgcccgcaaggcctgctccgccagcagcaagatccgccggctgtcggcctgcaagcagcagtgaggctggccgcctgcagccc

SEQ ID NO: 225002 - DNA, 120 bp, Artificial Sequence
  ENSG00000118046_14 (sequence is synthesized)
gtgtccaggagccccgccaggtgcccgcgccaggccctcagtcttcctgccggttccgcccgccctcccggagaggtggccgccatgcttctgtgccgaccacgccccaggacctccgga

SEQ ID NO: 225003 - DNA, 120 bp, Artificial Sequence
  ENSG00000118046_15 (sequence is synthesized)
cgaccacgccccaggacctccggagcgccctgcagggccgggcagggggacagcagggaccgggcgcagccctcccccctcggccgcccggcagtgcacgcggcttgttgacttcgcagc

SEQ ID NO: 225004 - DNA, 120 bp, Artificial Sequence
  ENSG00000118046_16 (sequence is synthesized)
gcgtgggaggagggaggcggcctccatgcactttatgtggagactactggccccgcccgtggcctcgtgctccgcagggcgcccagcgccgtccggcggccccgccgcagaccagctggc

SEQ ID NO: 225005 - DNA, 120 bp, Artificial Sequence
  ENSG00000118046_17 (sequence is synthesized)
gggtgtggagaccaggctcctgaccccgccatgcatgcagcgccacctggaagccgcgcggccgctttggttttttgtttggttggttccattttctttttttctttttttttttaagaa

SEQ ID NO: 225006 - DNA, 120 bp, Artificial Sequence
  ENSG00000118046_18 (sequence is synthesized)
aaaataaaaggtggatttgagctgtggctgtgaggggtgtttgggagctgctgggtggcaggggggctgtggggtcgggctcacgtcgcggccgcctttgcgctctcgggtcaccctgct

SEQ ID NO: 225007 - DNA, 120 bp, Artificial Sequence
  ENSG00000118046_19 (sequence is synthesized)
ttggcggcccggccggagggcaggaccctcacctctcccccaaggccactgcgctcttgggaccccagagaaaacccggagcaagcaggagtgtgcggtcaatatttatatcatccagaa

SEQ ID NO: 225008 - DNA, 120 bp, Artificial Sequence
  ENSG00000118046_20 (sequence is synthesized)
aagaaaaacacgagaaacgccatcgcgggatggtgcagacgcggcggggactcggagggtgccgtgcgggcgaggccgcccaaatttggcaataaataaagcttgggaagcttggacctg

SEQ ID NO: 225009 - DNA, 80 bp, Artificial Sequence
  ENSG00000118046_21 (sequence is synthesized)
gggcggcgaagggagcgcgggtggcggcacttgctgccgcggccttggatgggctgggcccccctcgccgctccgcctcc

SEQ ID NO: 225010 - DNA, 80 bp, Artificial Sequence
  ENSG00000118046_22 (sequence is synthesized)
gcggaccggacgctgagcggagctgttggccgcggcgggaggcctcccggacgcccccagccccccgaacgctcgcccgg

SEQ ID NO: 225011 - DNA, 120 bp, Artificial Sequence
  ENSG00000118046_23 (sequence is synthesized)
cggcgccccccgggaggtccgctcggtcgtccgcggcggagcgtttgctcctgggacaggcggtgggaccggggcgtcgccggagacgcccccagcgaagttgggctctccaggtgtggg

SEQ ID NO: 225012 - DNA, 120 bp, Artificial Sequence
  ENSG00000118046_24 (sequence is synthesized)
cccggtggcgaggaggcgtctgaggcagggcttagagcggagcgcggcttgcagaagagcgagggctcagacctttcaggagaggaagcctctcggccggcgccgcagtagtgcctgagg

SEQ ID NO: 225013 - DNA, 120 bp, Artificial Sequence
  ENSG00000118046_25 (sequence is synthesized)
aggagctcagggccttagcgtaggggcggcccacattggcagccagcccctccccgccatgctcccggcttggctgtgttcggcccagggctgggccgtgtcataaagagttttgcagtg

SEQ ID NO: 225014 - DNA, 120 bp, Artificial Sequence
  ENSG00000118046_26 (sequence is synthesized)
aaggggggtacgccaggcaggttgggatgtgaggacccagtgcacagggtccacccccgggcccgagggtcccagaatagtgggggccctgcagagagccccccattaggtccctcagca

SEQ ID NO: 225015 - DNA, 120 bp, Artificial Sequence
  ENSG00000118046_27 (sequence is synthesized)
ctcctgggcccctcatcaaacccctaggctcagctcagtagctggtccccaggagagtacagtgtgggggcccccgagagcacagtgtatgggggtccccggggggtacagtgtctgggg

SEQ ID NO: 225016 - DNA, 120 bp, Artificial Sequence
  ENSG00000118046_28 (sequence is synthesized)
gccccccaggaggatgcagcatgtgggggccccccaggagggtacagcgtgtgtggggcccccaggatcacagggtctcagctcctgggctcttggatttgcagcaccacgaccatcgcg

SEQ ID NO: 225017 - DNA, 120 bp, Artificial Sequence
  ENSG00000118046_29 (sequence is synthesized)
tctggtctgttggaacgggaggtgctgctgggtaccctggtcactagggtgtgctgggaggtgggggcccctcatggtgcccatccttggggcctggctgcaatttgaccccaggcccag

SEQ ID NO: 225018 - DNA, 120 bp, Artificial Sequence
  ENSG00000118046_30 (sequence is synthesized)
ggtcttctgcctttcagagccctggtgccctgagacgggcagccaggcaaatcccaggcaggagggccagttagggcagggccagcccaggcaggttgcgagagtccctactgggacgtg

SEQ ID NO: 225019 - DNA, 120 bp, Artificial Sequence
  ENSG00000118046_31 (sequence is synthesized)
gaccacacgctgacccccacggccgcccctgcaggccaggatccctgagccaggacccggcactggcttccctcctggggaccctcaggcctgtgtgagacctgggctgccctggggtga

SEQ ID NO: 225020 - DNA, 120 bp, Artificial Sequence
  ENSG00000118046_32 (sequence is synthesized)
ggtgcctgggaggagagcaggggctgggccacctttttcatgaccctgctaagcccactgtgggtggtgaggaggagtacccagcagggggaagggccgccagaccactcggcatggctg

SEQ ID NO: 225021 - DNA, 120 bp, Artificial Sequence
  ENSG00000118046_33 (sequence is synthesized)
aggcctcagtactcagtactgggtactcaggtggacgcccctcccactgctcagatgctggggacaggctcaacttcaggcttcagcgtgagccccgtccctgacctgcagagccccctt

SEQ ID NO: 225022 - DNA, 120 bp, Artificial Sequence
  ENSG00000118046_34 (sequence is synthesized)
gcgttggggcaggacagcccggcgccctcgggtcaggccatcctctgcgctctgccggggctgctgcatcggcctctgcgtgcctccactttggcctcacgtgtccctacccaggatgcg

SEQ ID NO: 225023 - DNA, 120 bp, Artificial Sequence
  ENSG00000118046_35 (sequence is synthesized)
ggtcctgctgccaacacccagatcccagggaaggggcttgggctagatcctgggcaccagtgcagacaggagtgtggggtggggcaagggcccagtggcggctgtgcccgctgatgcaga

SEQ ID NO: 225024 - DNA, 120 bp, Artificial Sequence
  ENSG00000118046_36 (sequence is synthesized)
gctggggcaccttgtccacagggtctgccccaccagagacgggctgggcccaagctcagacctatgggtgcaattggtgcctcctcaccaaggtcttttttatctttttttttttttgga

SEQ ID NO: 225025 - DNA, 85 bp, Artificial Sequence
  ENSG00000118046_37 (sequence is synthesized)
accggcccaaggtgcttttttaaagctagtgacttcctgtgcacatggggtgggtgtgtggcaagttctggaagctgctgagtca

SEQ ID NO: 225026 - DNA, 120 bp, Artificial Sequence
  ENSG00000118046_38 (sequence is synthesized)
tggggtgggtgtgtggcaagttctggaagctgctgagtcagccactggtccattctcggagctggggctctgcactgggcacatgagctctggggcagcccggggcggcctcccactgac

SEQ ID NO: 225027 - DNA, 120 bp, Artificial Sequence
  ENSG00000118046_39 (sequence is synthesized)
ttcgcccgggaggggcctcggggatggctcggcagccagtgtgttcgcggagtcctcgccaaccaccacggctcctcgcagggacagtacgtgggcagcttcctgcactttcccctgcca

SEQ ID NO: 225028 - DNA, 120 bp, Artificial Sequence
  ENSG00000118046_40 (sequence is synthesized)
ttgtgagaacagtgtccacctgggcagggtgggcagccccaggcctgtgggtttcaccagggtgctggtgatggttggtggctagcagggactgggggcagctgggggccctggcaggct

SEQ ID NO: 225029 - DNA, 120 bp, Artificial Sequence
  ENSG00000118046_41 (sequence is synthesized)
gagctctgctccccgcgtggttctgtgctggcatttcgcgtgcctggcctgagcctggcccgagcctggccctcctgtgtcctcacagatgagcatgtggcggctcctgggcctctagaa

SEQ ID NO: 225030 - DNA, 120 bp, Artificial Sequence
  ENSG00000118046_42 (sequence is synthesized)
ccaaccatgggccagggtgccccaggggagcacgggagggtcctgccttgtcagcttgcctcctactcgtgaggttcctgcagtcagtacctgggtggggtcccacctgcggccatggca

SEQ ID NO: 225031 - DNA, 120 bp, Artificial Sequence
  ENSG00000118046_43 (sequence is synthesized)
ggtgcaacagacgtggtggaggggacactcctgcccaggccatctgcgggaggctcagccccggggggtgcctcccagagctgctggggggcagcatttcaggctggatacacctgggcc

SEQ ID NO: 225032 - DNA, 120 bp, Artificial Sequence
  ENSG00000118046_44 (sequence is synthesized)
tgacccgggggcgggcatggcctgggcagcagctgtaagtgcgtccccgtggtgggggccagccaggtccctgtggctctggggttgcgcccctcagctcaggccacacttgccgtctcc

SEQ ID NO: 225033 - DNA, 120 bp, Artificial Sequence
  ENSG00000118046_45 (sequence is synthesized)
actctgaatccacttcctggctctggattggcttgtcctggatattgcatagaaatgggatcctgtcggccgggcgcggtgactcacgagagcaagagatccagaccatcctggccaaca

SEQ ID NO: 225034 - DNA, 120 bp, Artificial Sequence
  ENSG00000118046_46 (sequence is synthesized)
tgggaaattcaactactgaggaggttacggcacaaaaatgtcatccagctggtggatgtgttatacaacgaagagaagcagaaaatgtatatggtgatggagtactgcgtgtgtggcatg

SEQ ID NO: 225035 - DNA, 120 bp, Artificial Sequence
  ENSG00000118046_47 (sequence is synthesized)
ctcatccctctgcccgcagccccagggaggcggggcttttgtgcagaaatgtagggttgggggtgtcaggtggggggctattggccccgagaccccagcaggcattgagaggactgagtg

SEQ ID NO: 225036 - DNA, 120 bp, Artificial Sequence
  ENSG00000118046_48 (sequence is synthesized)
gagaggccgacctccccgcagggcctggtttgccaggtccctcagctccaccctgcttctgggccctgttcaccctccgaactcccaccccagagggcagtgctgccctgcgcctccccc

SEQ ID NO: 225037 - DNA, 120 bp, Artificial Sequence
  ENSG00000118046_49 (sequence is synthesized)
agccccaccctcgggggctccctggcttgcagggtctgtcagggttgtcctgctgcacttcctacgcatggcagcaggtggcactggccgtccgtccatctgcccagtggccttgggaga

SEQ ID NO: 225038 - DNA, 120 bp, Artificial Sequence
  ENSG00000118046_50 (sequence is synthesized)
acggaaccgccctggccgtccagcccagccctgtctccctgccagccgcgcacaggctgtccccggcatgtcccaggagtggagtggcctctgtcagggagaccgcctgtgcgcggggtc

SEQ ID NO: 225039 - DNA, 120 bp, Artificial Sequence
  ENSG00000118046_51 (sequence is synthesized)
ccccttaggagcgtccaggtatcacccagggcctgacaacagaggctgggcaggcggggacggttggtggggtctcaggcctgtgcccagctgacaggctcctcgccggcttctcctcag

SEQ ID NO: 225040 - DNA, 120 bp, Artificial Sequence
  ENSG00000118046_52 (sequence is synthesized)
tgtggggacaacgcctggatgccacagccagccgtgagcatagcccgcgctagtcagtcatggtgaccgtcacgtggctgcgcgtggttgccatgtggcctttgggtggcttggccacgt

SEQ ID NO: 225041 - DNA, 120 bp, Artificial Sequence
  ENSG00000118046_53 (sequence is synthesized)
agcgatccccgtggagggtgccgtctcggggcctggtgtctggccagcgtgctggtcatggaggcctacgtgtggcggggctctgggggggcgtgccgtcctcacagccacctctcagag

SEQ ID NO: 225042 - DNA, 120 bp, Artificial Sequence
  ENSG00000118046_54 (sequence is synthesized)
tgggtgcattccgaggaccctgccctgggcctggcgccccctccccatgcccgcgccgcttccaggaaaggcttatgctgggctcagcccagaggcttttgagcaccagtgggtggtggg

SEQ ID NO: 225043 - DNA, 120 bp, Artificial Sequence
  ENSG00000118046_55 (sequence is synthesized)
tggtggggaggggccgcggcctccatggctctgccggggtgccgcaggctctgagccagctgccaagtatggctgaggctgagtcgtgccggacgctgccctgtctctccctgtgtgcct

SEQ ID NO: 225044 - DNA, 120 bp, Artificial Sequence
  ENSG00000118046_56 (sequence is synthesized)
gcctcctctcccagccccagccccagccccgggtgggagacggagtcccagaggtgtcagagacccttaagtcacctgccgaggatgcggggtggatgggggcccgaggctgaagcccct

SEQ ID NO: 225045 - DNA, 120 bp, Artificial Sequence
  ENSG00000118046_57 (sequence is synthesized)
gccttgccacagcccctctcccaggttttgggggccaccgcctgagttacatgtctgtcccccaaatgggtgcccacagcccatccaccagcgtcagagcccgccaggccccactgcaaa

SEQ ID NO: 225046 - DNA, 120 bp, Artificial Sequence
  ENSG00000118046_58 (sequence is synthesized)
aggccacacaatgtaccccgggagtgactcaagggtggccttccctggcctcccctgctgccccccaggagtccggtagccccatgactgtacctcagcttctccatcctcccaggggcc

SEQ ID NO: 225047 - DNA, 120 bp, Artificial Sequence
  ENSG00000118046_59 (sequence is synthesized)
ggcaacagcaaagcatcacgctgagcgccgggaccttctgagtgcaggcggtgggcgaagccccgagtcacacacacccacgacgccggccctgctcccacagcggccctctggggtagc

SEQ ID NO: 225048 - DNA, 120 bp, Artificial Sequence
  ENSG00000118046_60 (sequence is synthesized)
gactggtattacctgcatttcacgagggaggaaactgaggcacgaactgttcagaagctgccctgaggtcaccaagtgagctaggaagaggcgtgggctcgatctctgccacatccacct

SEQ ID NO: 225049 - DNA, 120 bp, Artificial Sequence
  ENSG00000118046_61 (sequence is synthesized)
cgggaaaccacaaggtcctcctaaatgtcttcccagccccttcgagagaattgtggaagtggggttgccagatcaaacacaagacacccagttaaaattcaactgtaggcaaggattcag

SEQ ID NO: 225050 - DNA, 120 bp, Artificial Sequence
  ENSG00000118046_62 (sequence is synthesized)
gtcggtaaagtggtggtggacggcatggaggaactttagccctggaccagaaactttaggtcagtctatgtcagccattgttgctatcagccttcaggtcgtctgggctgggaggtctcc

SEQ ID NO: 225051 - DNA, 120 bp, Artificial Sequence
  ENSG00000118046_63 (sequence is synthesized)
tggatgcaggtctgtggcctcagagtcagggccccttgctgctgcaggaccacaggggcagggaggggcctgctgttccagcaagactttggggtgcagccggcctgtggcccacaggaa

SEQ ID NO: 225052 - DNA, 120 bp, Artificial Sequence
  ENSG00000118046_64 (sequence is synthesized)
aatgagacctgtggacatccggggccctgccagacgtggctcggccggacgagggtggccactgcaggcgcaggtgtggctccctgctggacctagcctttcctctgtcctgtgtgcctg

SEQ ID NO: 225053 - DNA, 120 bp, Artificial Sequence
  ENSG00000118046_65 (sequence is synthesized)
gacttctgtgacttcccagctgggcctgtggtgtttgggaggctcccaggcagctgcaaaggggacccctgtgaggggcagggaggcctcggccccaggacgggtgtgtgctgcccgcag

SEQ ID NO: 225054 - DNA, 80 bp, Artificial Sequence
  ENSG00000118058_0 (sequence is synthesized)
ctgcttcacttcacggggcgaacatggcgcacagctgtcggtggcgcttccccgcccgacccgggaccaccgggggcggc

SEQ ID NO: 225055 - DNA, 120 bp, Artificial Sequence
  ENSG00000118058_1 (sequence is synthesized)
gggttccagggggagcggccgccgcctcagcagcctcctcgtcgtccgcctcgtcttcgtcttcgtcatcgtcctcagcctcttcagggccggccctgctccgggtgggcccgggcttcg

SEQ ID NO: 225056 - DNA, 120 bp, Artificial Sequence
  ENSG00000118058_2 (sequence is synthesized)
acgcggcgctgcaggtctcggccgccatcggcaccaacctgcgccggttccgggccgtgtttggggagagcggcgggggaggcggcagcggagaggatgagcaattcttaggttttggct

SEQ ID NO: 225057 - DNA, 120 bp, Artificial Sequence
  ENSG00000118058_3 (sequence is synthesized)
cagatgaagaagtcagagtgcgaagtcccacaaggtctccttcagttaaaactagtcctcgaaaacctcgtgggagacctagaagtggctctgaccgaaattcagctatcctctcagatc

SEQ ID NO: 225058 - DNA, 120 bp, Artificial Sequence
  ENSG00000118058_4 (sequence is synthesized)
catctgtgttttcccctctaaataaatcagagaccaaatctggagataagatcaagaagaaagattctaaaagtatagaaaagaagagaggaagacctcccaccttccctggagtaaaaa

SEQ ID NO: 225059 - DNA, 120 bp, Artificial Sequence
  ENSG00000118058_5 (sequence is synthesized)
tcaaaataacacatggaaaggacatttcagagttaccaaagggaaacaaagaagatagcctgaaaaaaattaaaaggacaccttctgctacgtttcagcaagccacaaagattaaaaaat

SEQ ID NO: 225060 - DNA, 120 bp, Artificial Sequence
  ENSG00000118058_6 (sequence is synthesized)
taagagcaggtaaactctctcctctcaagtctaagtttaagacagggaagcttcaaataggaaggaagggggtacaaattgtacgacggagaggaaggcctccatcaacagaaaggataa

SEQ ID NO: 225061 - DNA, 120 bp, Artificial Sequence
  ENSG00000118058_7 (sequence is synthesized)
agaccccttcgggtctcctcattaattctgaactggaaaagccccagaaagtccggaaagacaaggaaggaacacctccacttacaaaagaagataagacagttgtcagacaaagccctc

SEQ ID NO: 225062 - DNA, 120 bp, Artificial Sequence
  ENSG00000118058_8 (sequence is synthesized)
gaaggattaagccagttaggattattccttcttcaaaaaggacagatgcaaccattgctaagcaactcttacagagggcaaaaaagggggctcaaaagaaaattgaaaaagaagcagctc

SEQ ID NO: 225063 - DNA, 120 bp, Artificial Sequence
  ENSG00000118058_9 (sequence is synthesized)
agctgcagggaagaaaggtgaagacacaggtcaaaaatattcgacagttcatcatgcctgttgtcagtgctatctcctcgcggatcattaagacccctcggcggtttatagaggatgagg

SEQ ID NO: 225064 - DNA, 120 bp, Artificial Sequence
  ENSG00000118058_10 (sequence is synthesized)
attatgaccctccaattaaaattgcccgattagagtctacaccgaatagtagattcagtgccccgtcctgtggatcttctgaaaaatcaagtgcagcttctcagcactcctctcaaatgt

SEQ ID NO: 225065 - DNA, 120 bp, Artificial Sequence
  ENSG00000118058_11 (sequence is synthesized)
cttcagactcctctcgatctagtagccccagtgttgatacctccacagactctcaggcttctgaggagattcaggtacttcctgaggagcggagcgatacccctgaagttcatcctccac

SEQ ID NO: 225066 - DNA, 120 bp, Artificial Sequence
  ENSG00000118058_12 (sequence is synthesized)
tgcccatttcccagtccccagaaaatgagagtaatgataggagaagcagaaggtattcagtgtcggagagaagttttggatctagaacgacgaaaaaattatcaactctacaaagtgccc

SEQ ID NO: 225067 - DNA, 120 bp, Artificial Sequence
  ENSG00000118058_13 (sequence is synthesized)
cccagcagcagacctcctcgtctccacctccacctctgctgactccaccgccaccactgcagccagcctccagtatctctgaccacacaccttggcttatgcctccaacaatccccttag

SEQ ID NO: 225068 - DNA, 120 bp, Artificial Sequence
  ENSG00000118058_14 (sequence is synthesized)
catcaccatttttgcctgcttccactgctcctatgcaagggaagcgaaaatctattttgcgagaaccgacatttaggtggacttctttaaagcattctaggtcagagccacaatactttt

SEQ ID NO: 225069 - DNA, 120 bp, Artificial Sequence
  ENSG00000118058_15 (sequence is synthesized)
cctcagcaaagtatgccaaagaaggtcttattcgcaaaccaatatttgataatttccgaccccctccactaactcccgaggacgttggctttgcatctggtttttctgcatctggtaccg

SEQ ID NO: 225070 - DNA, 120 bp, Artificial Sequence
  ENSG00000118058_16 (sequence is synthesized)
ctgcttcagcccgattgttttcgccactccattctggaacaaggtttgatatgcacaaaaggagccctcttctgagagctccaagatttactccaagtgaggctcactctagaatatttg

SEQ ID NO: 225071 - DNA, 120 bp, Artificial Sequence
  ENSG00000118058_17 (sequence is synthesized)
agtctgtaaccttgcctagtaatcgaacttctgctggaacatcttcttcaggagtatccaatagaaaaaggaaaagaaaagtgtttagtcctattcgatctgaaccaagatctccttctc

SEQ ID NO: 225072 - DNA, 120 bp, Artificial Sequence
  ENSG00000118058_18 (sequence is synthesized)
actccatgaggacaagaagtggaaggcttagtagttctgagctctcacctctcacccccccgtcttctgtctcttcctcgttaagcatttctgttagtcctcttgccactagtgccttaa

SEQ ID NO: 225073 - DNA, 120 bp, Artificial Sequence
  ENSG00000118058_19 (sequence is synthesized)
acccaacttttacttttccttctcattccctgactcagtctggggaatctgcagagaaaaatcagagaccaaggaagcagactagtgctccggcagagccattttcatcaagtagtccta

SEQ ID NO: 225074 - DNA, 120 bp, Artificial Sequence
  ENSG00000118058_20 (sequence is synthesized)
ctcctctcttcccttggtttaccccaggctctcagactgaaagagggagaaataaagacaaggcccccgaggagctgtccaaagatcgagatgctgacaagagcgtggagaaggacaaga

SEQ ID NO: 225075 - DNA, 120 bp, Artificial Sequence
  ENSG00000118058_21 (sequence is synthesized)
gtagagagagagaccgggagagagaaaaggagaataagcgggagtcaaggaaagagaaaaggaaaaagggatcagaaattcagagtagttctgctttgtatcctgtgggtagggtttcca

SEQ ID NO: 225076 - DNA, 120 bp, Artificial Sequence
  ENSG00000118058_22 (sequence is synthesized)
aagagaaggttgttggtgaagatgttgccacttcatcttctgccaaaaaagcaacagggcggaagaagtcttcatcacatgattctgggactgatattacttctgtgactcttggggata

SEQ ID NO: 225077 - DNA, 120 bp, Artificial Sequence
  ENSG00000118058_23 (sequence is synthesized)
caacagctgtcaaaaccaaaatacttataaagaaagggagaggaaatctggaaaaaaccaacttggacctcggcccaactgccccatccctggagaaggagaaaaccctctgcctttcca

SEQ ID NO: 225078 - DNA, 120 bp, Artificial Sequence
  ENSG00000118058_24 (sequence is synthesized)
ctccttcatctagcactgttaaacattccacttcctccataggctccatgttggctcaggcagacaagcttccaatgactgacaagagggttgccagcctcctaaaaaaggccaaagctc

SEQ ID NO: 225079 - DNA, 120 bp, Artificial Sequence
  ENSG00000118058_25 (sequence is synthesized)
agctctgcaagattgagaagagtaagagtcttaaacaaaccgaccagcccaaagcacagggtcaagaaagtgactcatcagagacctctgtgcgaggaccccggattaaacatgtctgca

SEQ ID NO: 225080 - DNA, 120 bp, Artificial Sequence
  ENSG00000118058_26 (sequence is synthesized)
gaagagcagctgttgcccttggccgaaaacgagctgtgtttcctgatgacatgcccaccctgagtgccttaccatgggaagaacgagaaaagattttgtcttccatggggaatgatgaca

SEQ ID NO: 225081 - DNA, 120 bp, Artificial Sequence
  ENSG00000118058_27 (sequence is synthesized)
agtcatcaattgctggctcagaagatgctgaacctcttgctccacccatcaaaccaattaaacctgtcactagaaacaaggcaccccaggaacctccagtaaagaaaggacgtcgatcga

SEQ ID NO: 225082 - DNA, 120 bp, Artificial Sequence
  ENSG00000118058_28 (sequence is synthesized)
ggcggtgtgggcagtgtcccggctgccaggtgcctgaggactgtggtgtttgtactaattgcttagataagcccaagtttggtggtcgcaatataaagaagcagtgctgcaagatgagaa

SEQ ID NO: 225083 - DNA, 120 bp, Artificial Sequence
  ENSG00000118058_29 (sequence is synthesized)
aatgtcagaatctacaatggatgccttccaaagcctacctgcagaagcaagctaaagctgtgaaaaagaaagagaaaaagtctaagaccagtgaaaagaaagacagcaaagagagcagtg

SEQ ID NO: 225084 - DNA, 120 bp, Artificial Sequence
  ENSG00000118058_30 (sequence is synthesized)
ttgtgaagaacgtggtggactctagtcagaaacctaccccatcagcaagagaggatcctgccccaaagaaaagcagtagtgagcctcctccacgaaagcccgtcgaggaaaagagtgaag

SEQ ID NO: 225085 - DNA, 120 bp, Artificial Sequence
  ENSG00000118058_31 (sequence is synthesized)
aagggaatgtctcggcccctgggcctgaatccaaacaggccaccactccagcttccaggaagtcaagcaagcaggtctcccagccagcactggtcatcccgcctcagccacctactacag

SEQ ID NO: 225086 - DNA, 120 bp, Artificial Sequence
  ENSG00000118058_32 (sequence is synthesized)
gaccgccaagaaaagaagttcccaaaaccactcctagtgagcccaagaaaaagcagcctccaccaccagaatcaggtccagagcagagcaaacagaaaaaagtggctccccgcccaagta

SEQ ID NO: 225087 - DNA, 120 bp, Artificial Sequence
  ENSG00000118058_33 (sequence is synthesized)
tccctgtaaaacaaaaaccaaaagaaaaggaaaaaccacctccggtcaataagcaggagaatgcaggcactttgaacatcctcagcactctctccaatggcaatagttctaagcaaaaaa

SEQ ID NO: 225088 - DNA, 120 bp, Artificial Sequence
  ENSG00000118058_34 (sequence is synthesized)
ttccagcagatggagtccacaggatcagagtggactttaaggaggattgtgaagcagaaaatgtgtgggagatgggaggcttaggaatcttgacttctgttcctataacacccagggtgg

SEQ ID NO: 225089 - DNA, 120 bp, Artificial Sequence
  ENSG00000118058_35 (sequence is synthesized)
tttgctttctctgtgccagtagtgggcatgtagagtttgtgtattgccaagtctgttgtgagcccttccacaagttttgtttagaggagaacgagcgccctctggaggaccagctggaaa

SEQ ID NO: 225090 - DNA, 120 bp, Artificial Sequence
  ENSG00000118058_36 (sequence is synthesized)
attggtgttgtcgtcgttgcaaattctgtcacgtttgtggaaggcaacatcaggctacaaagcagctgctggagtgtaataagtgccgaaacagctatcaccctgagtgcctgggaccaa

SEQ ID NO: 225091 - DNA, 120 bp, Artificial Sequence
  ENSG00000118058_37 (sequence is synthesized)
actaccccaccaaacccacaaagaagaagaaagtctggatctgtaccaagtgtgttcgctgtaagagctgtggatccacaactccaggcaaagggtgggatgcacagtggtctcatgatt

SEQ ID NO: 225092 - DNA, 120 bp, Artificial Sequence
  ENSG00000118058_38 (sequence is synthesized)
tctcactgtgtcatgattgcgccaagctctttgctaaaggaaacttctgccctctctgtgacaaatgttatgatgatgatgactatgagagtaagatgatgcaatgtggaaagtgtgatc

SEQ ID NO: 225093 - DNA, 120 bp, Artificial Sequence
  ENSG00000118058_39 (sequence is synthesized)
gctgggtccattccaaatgtgagaatctttcagatgagatgtatgagattctatctaatctgccagaaagtgtggcctacacttgtgtgaactgtactgagcggcaccctgcagagtggc

SEQ ID NO: 225094 - DNA, 120 bp, Artificial Sequence
  ENSG00000118058_40 (sequence is synthesized)
gactggcccttgaaaaagagctgcagatttctctgaagcaagttctgacagctttgttgaattctcggactaccagccatttgctacgctaccggcaggctgccaagcctccagacttaa

SEQ ID NO: 225095 - DNA, 120 bp, Artificial Sequence
  ENSG00000118058_41 (sequence is synthesized)
atcccgagacagaggagagtataccttcccgcagctcccccgaaggacctgatccaccagttcttactgaggtcagcaaacaggatgatcagcagcctttagatctagaaggagtcaaga

SEQ ID NO: 225096 - DNA, 120 bp, Artificial Sequence
  ENSG00000118058_42 (sequence is synthesized)
ggaagatggaccaagggaattacacatctgtgttggagttcagtgatgatattgtgaagatcattcaagcagccattaattcagatggaggacagccagaaattaaaaaagccaacagca

SEQ ID NO: 225097 - DNA, 120 bp, Artificial Sequence
  ENSG00000118058_43 (sequence is synthesized)
tggtcaagtccttcttcattcggcaaatggaacgtgtttttccatggttcagtgtcaaaaagtccaggttttgggagccaaataaagtatcaagcaacagtgggatgttaccaaacgcag

SEQ ID NO: 225098 - DNA, 120 bp, Artificial Sequence
  ENSG00000118058_44 (sequence is synthesized)
tgcttccaccttcacttgaccataattatgctcagtggcaggagcgagaggaaaacagccacactgagcagcctcctttaatgaagaaaatcattccagctcccaaacccaaaggtcctg

SEQ ID NO: 225099 - DNA, 120 bp, Artificial Sequence
  ENSG00000118058_45 (sequence is synthesized)
gagaaccagactcaccaactcctctgcatcctcctacaccaccaattttgagtactgataggagtcgagaagacagtccagagctgaacccacccccaggcatagaagacaatagacagt

SEQ ID NO: 225100 - DNA, 120 bp, Artificial Sequence
  ENSG00000118058_46 (sequence is synthesized)
gtgcgttatgtttgacttatggtgatgacagtgctaatgatgctggtcgtttactatatattggccaaaatgagtggacacatgtaaattgtgctttgtggtcagcggaagtgtttgaag

SEQ ID NO: 225101 - DNA, 120 bp, Artificial Sequence
  ENSG00000118058_47 (sequence is synthesized)
atgatgacggatcactaaagaatgtgcatatggctgtgatcaggggcaagcagctgagatgtgaattctgccaaaagccaggagccaccgtgggttgctgtctcacatcctgcaccagca

SEQ ID NO: 225102 - DNA, 120 bp, Artificial Sequence
  ENSG00000118058_48 (sequence is synthesized)
actatcacttcatgtgttcccgagccaagaactgtgtctttctggatgataaaaaagtatattgccaacgacatcgggatttgatcaaaggcgaagtggttcctgagaatggatttgaag

SEQ ID NO: 225103 - DNA, 120 bp, Artificial Sequence
  ENSG00000118058_49 (sequence is synthesized)
ttttcagaagagtgtttgtggactttgaaggaatcagcttgagaaggaagtttctcaatggcttggaaccagaaaatatccacatgatgattgggtctatgacaatcgactgcttaggaa

SEQ ID NO: 225104 - DNA, 120 bp, Artificial Sequence
  ENSG00000118058_50 (sequence is synthesized)
ttctaaatgatctctccgactgtgaagataagctctttcctattggatatcagtgttccagggtatactggagcaccacagatgctcgcaagcgctgtgtatatacatgcaagatagtgg

SEQ ID NO: 225105 - DNA, 120 bp, Artificial Sequence
  ENSG00000118058_51 (sequence is synthesized)
agtgccgtcctccagtcgtagagccggatatcaacagcactgttgaacatgatgaaaacaggaccattgcccatagtccaacatcttttacagaaagttcatcaaaagagagtcaaaaca

SEQ ID NO: 225106 - DNA, 120 bp, Artificial Sequence
  ENSG00000118058_52 (sequence is synthesized)
cagctgaaattataagtcctccatcaccagaccgacctcctcattcacaaacctctggctcctgttattatcatgtcatctcaaaggtccccaggattcgaacacccagttattctccaa

SEQ ID NO: 225107 - DNA, 120 bp, Artificial Sequence
  ENSG00000118058_53 (sequence is synthesized)
cacagagatcccctggctgtcgaccgttgccttctgcaggaagtcctaccccaaccactcatgaaatagtcacagtaggtgatcctttactctcctctggacttcgaagcattggctcca

SEQ ID NO: 225108 - DNA, 120 bp, Artificial Sequence
  ENSG00000118058_54 (sequence is synthesized)
ggcgtcacagtacctcttccttatcaccccagcggtccaaactccggataatgtctccaatgagaactgggaatacttactctaggaataatgtttcctcagtctccaccaccgggaccg

SEQ ID NO: 225109 - DNA, 120 bp, Artificial Sequence
  ENSG00000118058_55 (sequence is synthesized)
tgtaggcaataaaaacagtcacttggatggatcttcatcttcagaaatgaagcagtccagtgcttcagacttggtgtccaagagctcctctttaaagggagagaagaccaaagtgctgag

SEQ ID NO: 225110 - DNA, 120 bp, Artificial Sequence
  ENSG00000118058_56 (sequence is synthesized)
ttccaagagctcagagggatctgcacataatgtggcttaccctggaattcctaaactggccccacaggttcataacacaacatctagagaactgaatgttagtaaaatcggctcctttgc

SEQ ID NO: 225111 - DNA, 120 bp, Artificial Sequence
  ENSG00000118058_57 (sequence is synthesized)
tgaaccctcttcagtgtcgttttcttctaaagaggccctctccttcccacacctccatttgagagggcaaaggaatgatcgagaccaacacacagattctacccaatcagcaaactcctc

SEQ ID NO: 225112 - DNA, 120 bp, Artificial Sequence
  ENSG00000118058_58 (sequence is synthesized)
tccagatgaagatactgaagtcaaaaccttgaagctatctggaatgagcaacagatcatccattatcaacgaacatatgggatctagttccagagataggagacagaaagggaaaaaatc

SEQ ID NO: 225113 - DNA, 120 bp, Artificial Sequence
  ENSG00000118058_59 (sequence is synthesized)
ctgtaaagaaactttcaaagaaaagcattccagtaaatcttttttggaacctggtcaggtgacaactggtgaggaaggaaacttgaagccagagtttatggatgaggttttgactcctga

SEQ ID NO: 225114 - DNA, 120 bp, Artificial Sequence
  ENSG00000118058_60 (sequence is synthesized)
gtatatgggccaacgaccatgtaacaatgtttcttctgataagattggtgataaaggcctttctatgccaggagtccccaaagctccacccatgcaagtagaaggatctgccaaggaatt

SEQ ID NO: 225115 - DNA, 120 bp, Artificial Sequence
  ENSG00000118058_61 (sequence is synthesized)
acaggcaccacggaaacgcacagtcaaagtgacactgacacctctaaaaatggaaaatgagagtcaatccaaaaatgccctgaaagaaagtagtcctgcttcccctttgcaaatagagtc

SEQ ID NO: 225116 - DNA, 120 bp, Artificial Sequence
  ENSG00000118058_62 (sequence is synthesized)
aacatctcccacagaaccaatttcagcctctgaaaatccaggagatggtccagtggcccaaccaagccccaataatacctcatgccaggattctcaaagtaacaactatcagaatcttcc

SEQ ID NO: 225117 - DNA, 120 bp, Artificial Sequence
  ENSG00000118058_63 (sequence is synthesized)
agtacaggacagaaacctaatgcttccagatggccccaaacctcaggaggatggctcttttaaaaggaggtatccccgtcgcagtgcccgtgcacgttctaacatgttttttgggcttac

SEQ ID NO: 225118 - DNA, 120 bp, Artificial Sequence
  ENSG00000118058_64 (sequence is synthesized)
cccactctatggagtaagatcctatggtgaagaagacattccattctacagcagctcaactgggaagaagcgaggcaagagatcagctgaaggacaggtggatggggccgatgacttaag

SEQ ID NO: 225119 - DNA, 120 bp, Artificial Sequence
  ENSG00000118058_65 (sequence is synthesized)
cacttcagatgaagacgacttatactattacaacttcactagaacagtgatttcttcaggtggagaggaacgactggcatcccataatttatttcgggaggaggaacagtgtgatcttcc

SEQ ID NO: 225120 - DNA, 120 bp, Artificial Sequence
  ENSG00000118058_66 (sequence is synthesized)
aaaaatctcacagttggatggtgttgatgatgggacagagagtgatactagtgtcacagccacaacaaggaaaagcagccagattccaaaaagaaatggtaaagaaaatggaacagagaa

SEQ ID NO: 225121 - DNA, 120 bp, Artificial Sequence
  ENSG00000118058_67 (sequence is synthesized)
cttaaagattgatagacctgaagatgctggggagaaagaacatgtcactaagagttctgttggccacaaaaatgagccaaagatggataactgccattctgtaagcagagttaaaacaca

SEQ ID NO: 225122 - DNA, 120 bp, Artificial Sequence
  ENSG00000118058_68 (sequence is synthesized)
gggacaagattccttggaagctcagctcagctcattggagtcaagccgcagagtccacacaagtaccccctccgacaaaaatttactggacacctataatactgagctcctgaaatcaga

SEQ ID NO: 225123 - DNA, 120 bp, Artificial Sequence
  ENSG00000118058_69 (sequence is synthesized)
ttcagacaataacaacagtgatgactgtgggaatatcctgccttcagacattatggactttgtactaaagaatactccatccatgcaggctttgggtgagagcccagagtcatcttcatc

SEQ ID NO: 225124 - DNA, 120 bp, Artificial Sequence
  ENSG00000118058_70 (sequence is synthesized)
agaactcctgaatcttggtgaaggattgggtcttgacagtaatcgtgaaaaagacatgggtctttttgaagtattttctcagcagctgcctacaacagaacctgtggatagtagtgtctc

SEQ ID NO: 225125 - DNA, 120 bp, Artificial Sequence
  ENSG00000118058_71 (sequence is synthesized)
ttcctctatctcagcagaggaacagtttgagttgcctctagagctaccatctgatctgtctgtcttgaccacccggagtcccactgtccccagccagaatcccagtagactagctgttat

SEQ ID NO: 225126 - DNA, 120 bp, Artificial Sequence
  ENSG00000118058_72 (sequence is synthesized)
ctcagactcaggggagaagagagtaaccatcacagaaaaatctgtagcctcctctgaaagtgacccagcactgctgagcccaggagtagatccaactcctgaaggccacatgactcctga

SEQ ID NO: 225127 - DNA, 120 bp, Artificial Sequence
  ENSG00000118058_73 (sequence is synthesized)
tcattttatccaaggacacatggatgcagaccacatctctagccctccttgtggttcagtagagcaaggtcatggcaacaatcaggatttaactaggaacagtagcacccctggccttca

SEQ ID NO: 225128 - DNA, 120 bp, Artificial Sequence
  ENSG00000118058_74 (sequence is synthesized)
ggtacctgtttccccaactgttcccatccagaaccagaagtatgtgcccaattctactgatagtcctggcccgtctcagatttccaatgcagctgtccagaccactccaccccacctgaa

SEQ ID NO: 225129 - DNA, 120 bp, Artificial Sequence
  ENSG00000118058_75 (sequence is synthesized)
gccagccactgagaaactcatagttgttaaccagaacatgcagccactttatgttctccaaactcttccaaatggagtgacccaaaaaatccaattgacctcttctgttagttctacacc

SEQ ID NO: 225130 - DNA, 120 bp, Artificial Sequence
  ENSG00000118058_76 (sequence is synthesized)
cagtgtgatggagacaaatacttcagtattgggacccatgggaggtggtctcacccttaccacaggactaaatccaagcttgccaacttctcaatctttgttcccttctgctagcaaagg

SEQ ID NO: 225131 - DNA, 120 bp, Artificial Sequence
  ENSG00000118058_77 (sequence is synthesized)
attgctacccatgtctcatcaccagcacttacattccttccctgcagctactcaaagtagtttcccaccaaacatcagcaatcctccttcaggcctgcttattggggttcagcctcctcc

SEQ ID NO: 225132 - DNA, 120 bp, Artificial Sequence
  ENSG00000118058_78 (sequence is synthesized)
ggatccccaacttttggtttcagaatccagccagaggacagacctcagtaccacagtagccactccatcctctggactcaagaaaagacccatatctcgtctacagacccgaaagaataa

SEQ ID NO: 225133 - DNA, 120 bp, Artificial Sequence
  ENSG00000118058_79 (sequence is synthesized)
aaaacttgctccctctagtaccccttcaaacattgccccttctgatgtggtttctaatatgacattgattaacttcacaccctcccagcttcctaatcatccaagtctgttagatttggg

SEQ ID NO: 225134 - DNA, 120 bp, Artificial Sequence
  ENSG00000118058_80 (sequence is synthesized)
gtcacttaatacttcatctcaccgaactgtccccaacatcataaaaagatctaaatctagcatcatgtattttgaaccggcacccctgttaccacagagtgtgggaggaactgctgccac

SEQ ID NO: 225135 - DNA, 120 bp, Artificial Sequence
  ENSG00000118058_81 (sequence is synthesized)
agcggcaggcacatcaacaataagccaggatactagccacctcacatcagggtctgtgtctggcttggcatccagttcctctgtcttgaatgttgtatccatgcaaactaccacaacccc

SEQ ID NO: 225136 - DNA, 120 bp, Artificial Sequence
  ENSG00000118058_82 (sequence is synthesized)
tacaagtagtgcgtcagttccaggacacgtcaccttaaccaacccaaggttgcttggtaccccagatattggctcaataagcaatcttttaatcaaagctagccagcagagcctggggat

SEQ ID NO: 225137 - DNA, 120 bp, Artificial Sequence
  ENSG00000118058_83 (sequence is synthesized)
tcaggaccagcctgtggctttaccgccaagttcaggaatgtttccacaactggggacatcacagaccccctctactgctgcaataacagcggcatctagcatctgtgtgctcccctccac

SEQ ID NO: 225138 - DNA, 120 bp, Artificial Sequence
  ENSG00000118058_84 (sequence is synthesized)
tcagactacgggcataacagccgcttcaccttctggggaagcagacgaacactatcagcttcagcatgtgaaccagctccttgccagcaaaactgggattcattcttcccagcgtgatct

SEQ ID NO: 225139 - DNA, 120 bp, Artificial Sequence
  ENSG00000118058_85 (sequence is synthesized)
tgattctgcttcagggccccaggtatccaactttacccagacggtagacgctcctaatagcatgggactggagcagaacaaggctttatcctcagctgtgcaagccagccccacctctcc

SEQ ID NO: 225140 - DNA, 120 bp, Artificial Sequence
  ENSG00000118058_86 (sequence is synthesized)
tgggggttctccatcctctccatcttctggacagcggtcagcaagcccttcagtgccgggtcccactaaacccaaaccaaaaaccaaacggtttcagctgcctctagacaaagggaatgg

SEQ ID NO: 225141 - DNA, 120 bp, Artificial Sequence
  ENSG00000118058_87 (sequence is synthesized)
caagaagcacaaagtttcccatttgcggaccagttcttctgaagcacacattccagaccaagaaacgacatccctgacctcaggcacagggactccaggagcagaggctgagcagcagga

SEQ ID NO: 225142 - DNA, 120 bp, Artificial Sequence
  ENSG00000118058_88 (sequence is synthesized)
tacagctagcgtggagcagtcctcccagaaggagtgtgggcaacctgcagggcaagtcgctgttcttccggaagttcaggtgacccaaaatccagcaaatgaacaagaaagtgcagaacc

SEQ ID NO: 225143 - DNA, 120 bp, Artificial Sequence
  ENSG00000118058_89 (sequence is synthesized)
taaaacagtggaagaagaggaaagtaatttcagctccccactgatgctttggcttcagcaagaacaaaagcggaaggaaagcattactgagaaaaaacccaagaaaggacttgtttttga

SEQ ID NO: 225144 - DNA, 120 bp, Artificial Sequence
  ENSG00000118058_90 (sequence is synthesized)
aatttccagtgatgatggctttcagatctgtgcagaaagtattgaagatgcctggaagtcattgacagataaagtccaggaagctcgatcaaatgcccgcctaaagcagctctcatttgc

SEQ ID NO: 225145 - DNA, 120 bp, Artificial Sequence
  ENSG00000118058_91 (sequence is synthesized)
aggtgttaacggtttgaggatgctggggattctccatgatgcagttgtgttcctcattgagcagctgtctggtgccaagcactgtcgaaattacaaattccgtttccacaagccagagga

SEQ ID NO: 225146 - DNA, 120 bp, Artificial Sequence
  ENSG00000118058_92 (sequence is synthesized)
ggccaatgaaccccccttgaaccctcacggctcagccagggctgaagtccacctcaggaagtcagcatttgacatgtttaacttcctggcttctaaacatcgtcagcctcctgaatacaa

SEQ ID NO: 225147 - DNA, 120 bp, Artificial Sequence
  ENSG00000118058_93 (sequence is synthesized)
ccccaatgatgaagaagaggaggaggtacagctgaagtcagctcggagggcaactagcatggatctgccaatgcccatgcgcttccggcacttaaaaaagacttctaaggaggcagttgg

SEQ ID NO: 225148 - DNA, 120 bp, Artificial Sequence
  ENSG00000118058_94 (sequence is synthesized)
tgtctacaggtctcccatccatggccggggtcttttctgtaagagaaacattgatgcaggtgagatggtgattgagtatgccggcaacgtcatccgctccatccagactgacaagcggga

SEQ ID NO: 225149 - DNA, 120 bp, Artificial Sequence
  ENSG00000118058_95 (sequence is synthesized)
aaagtattacgacagcaagggcattggttgctatatgttccgaattgatgactcagaggtagtggatgccaccatgcatggaaatgctgcacgcttcatcaatcactcgtgtgagcctaa

SEQ ID NO: 225150 - DNA, 120 bp, Artificial Sequence
  ENSG00000118058_96 (sequence is synthesized)
ctgctattctcgggtcatcaatattgatgggcagaagcacattgtcatctttgccatgcgtaagatctaccgaggagaggaactcacttacgactataagttccccattgaggatgccag

SEQ ID NO: 225151 - DNA, 120 bp, Artificial Sequence
  ENSG00000118058_97 (sequence is synthesized)
caacaagctgccctgcaactgtggcgccaagaaatgccggaagttcctaaactaaagctgctcttctcccccagtgttggagtgcaaggaggcggggccatccaaagcaacgctgaaggc

SEQ ID NO: 225152 - DNA, 120 bp, Artificial Sequence
  ENSG00000118058_98 (sequence is synthesized)
cttttccagcagctgggagctcccggattgcgtggcacagctgaggggcctctgtgatggctgagctctcttatgtcctatactcacatcagacatgtgatcatagtcccagagacagag

SEQ ID NO: 225153 - DNA, 120 bp, Artificial Sequence
  ENSG00000118058_99 (sequence is synthesized)
ttgaggtctcgaagaaaagatccatgatcggctttctcctggggcccctccaattgtttactgttagaaagtgggaatggggtccctagcagacttgcctggaaggagcctattatagag

SEQ ID NO: 225154 - DNA, 120 bp, Artificial Sequence
  ENSG00000118058_100 (sequence is synthesized)
ggttggttatgttgggagattgggcctgaatttctccacagaaataagttgccatcctcaggttggccctttcccaagcactgtaagtgagtgggtcaggcaaagccccaaatggagggt

SEQ ID NO: 225155 - DNA, 120 bp, Artificial Sequence
  ENSG00000118058_101 (sequence is synthesized)
tggttagattcctgacagtttgccagccaggccccacctacagcgtctgtcgaacaaacagaggtctggtggttttccctactatcctcccactcgagagttcacttctggttgggagac

SEQ ID NO: 225156 - DNA, 120 bp, Artificial Sequence
  ENSG00000118058_102 (sequence is synthesized)
aggattcctagcacctccggtgtcaaaaggctgtcatggggttgtgccaattaattaccaaacattgagcctgcaggctttgagtgggagtgttgcccccaggagccttatctcagccaa

SEQ ID NO: 225157 - DNA, 120 bp, Artificial Sequence
  ENSG00000118058_103 (sequence is synthesized)
ttacctttcttgacagtaggagcggcttccctctcccattccctcttcactcccttttcttcctttcccctgtcttcatgccactgctttcccatgcttctttcgggttgtaggggagac

SEQ ID NO: 225158 - DNA, 120 bp, Artificial Sequence
  ENSG00000118058_104 (sequence is synthesized)
tgactgcctgctcaaggacactccctgctgggcataggatgtgcctgcaaaaagttccctgagcctgtaagcactccaggtggggaagtggacaggagccattggtcataaccagacaga

SEQ ID NO: 225159 - DNA, 120 bp, Artificial Sequence
  ENSG00000118058_105 (sequence is synthesized)
atttggaaacattttcataaagctccatggagagttttaaagaaacatatgtagcatgattttgtaggagaggaaaaagattatttaaataggatttaaatcatgcaacaacgagagtat

SEQ ID NO: 225160 - DNA, 120 bp, Artificial Sequence
  ENSG00000118058_106 (sequence is synthesized)
cacagccaggatgacccttgggtcccattcctaagacatggttactttattttccccttgttaagacataggaagacttaatttttaaacggtcagtgtccagttgaaggcagaacacta

SEQ ID NO: 225161 - DNA, 120 bp, Artificial Sequence
  ENSG00000118058_107 (sequence is synthesized)
atcagatttcaaggcccacaacttggggactagaccaccttatgttgagggaactctgccacctgcgtgcaacccacagctaaagtaaattcaatgacactactgccctgattactcctt

SEQ ID NO: 225162 - DNA, 120 bp, Artificial Sequence
  ENSG00000118058_108 (sequence is synthesized)
aggatgtggtcaaaacagcatcaaatgtttcttctcttcctttccccaagacagagtcctgaacctgttaaattaagtcattggattttactctgttctgtttacagtttactatttaag

SEQ ID NO: 225163 - DNA, 120 bp, Artificial Sequence
  ENSG00000118058_109 (sequence is synthesized)
gttttataaatgtaaatatattttgtatatttttctatgagaagcacttcatagggagaagcacttatgacaaggctattttttaaaccgcggtattatcctaatttaaaagaagatcgg

SEQ ID NO: 225164 - DNA, 120 bp, Artificial Sequence
  ENSG00000118058_110 (sequence is synthesized)
tttttaataattttttattttcataggatgaagttagagaaaatattcagctgtacacacaaagtctggtttttcctgcccaacttccccctggaaggtgtactttttgttgtttaatgt

SEQ ID NO: 225165 - DNA, 120 bp, Artificial Sequence
  ENSG00000118058_111 (sequence is synthesized)
gtagcttgtttgtgccctgttgacataaatgtttcctgggtttgctctttgacaataaatggagaaggaaggtcacccaactccattgggccactcccctccttcccctattgaagctcc

SEQ ID NO: 225166 - DNA, 120 bp, Artificial Sequence
  ENSG00000118058_112 (sequence is synthesized)
tctcttctttcccgcctctctcctttccggcgcaacttccagagtggtgggagacggcaatctttacatttccctcatctttcttacttcagagttagcaaacaacaagttgaatggcaa

SEQ ID NO: 225167 - DNA, 120 bp, Artificial Sequence
  ENSG00000118058_113 (sequence is synthesized)
cttgacatttttgcatcaccatctgcctcataggccactctttcctttccctctgcccaccaagtcctcatatctgcagagaacccattgatcaccttgtgccctcttttggggcagcct

SEQ ID NO: 225168 - DNA, 120 bp, Artificial Sequence
  ENSG00000118058_114 (sequence is synthesized)
gttgaaactgaagcacagtctgaccactcacgataaagcagatttttctctgcctctgccacaaggtttcagagtagtgtagtccaagtagagggtggggcacccttttctcgccgcaag

SEQ ID NO: 225169 - DNA, 120 bp, Artificial Sequence
  ENSG00000118058_115 (sequence is synthesized)
aagcccattcctatggaagtctagcaaagcaatacgactcagcccagcactctctgccccaggactcatggctctgctgtgccttccatcctgggctcccttctctcctgtgaccttaag

SEQ ID NO: 225170 - DNA, 120 bp, Artificial Sequence
  ENSG00000118058_116 (sequence is synthesized)
aactttgtctggtggctttgctggaacattgtcactgttttcactgtcatgcagggagcccagcactgtggccaggatggcagagacttccttgtcatcatggagaagtgccagcagggg

SEQ ID NO: 225171 - DNA, 120 bp, Artificial Sequence
  ENSG00000118058_117 (sequence is synthesized)
actgggaaaagcactctacccagacctcacctcccttcctccttttgcccatgaacaagatgcagtggccctaggggttccactagtgtctgctttcctttattattgcactgtgtgagg

SEQ ID NO: 225172 - DNA, 120 bp, Artificial Sequence
  ENSG00000118058_118 (sequence is synthesized)
tttttttgtaaatccttgtattcctattttttttaaagaaaaaaaaaaaaccttaagctgcatttgttactgaaatgattaatgcactgatgggtcctgaattcaccttgagaaagaccc

SEQ ID NO: 225173 - DNA, 120 bp, Artificial Sequence
  ENSG00000118058_119 (sequence is synthesized)
aaaggccagtcagggggtggggggaactcagctaaatagacctagttactgccctgctaggccatgctgtactgtgagcccctcctcactctctaccaaccctaaaccctgaggacaggg

SEQ ID NO: 225174 - DNA, 120 bp, Artificial Sequence
  ENSG00000118058_120 (sequence is synthesized)
gaggaacccacagcttccttctcctgccagctgcagatggtttgccttgcctttccaccccctaattgtcaaccacaaaaatgagaaattcctcttctagctcagccttgagtccattgc

SEQ ID NO: 225175 - DNA, 120 bp, Artificial Sequence
  ENSG00000118058_121 (sequence is synthesized)
caaattttcagcacacctgccagcaacttgggggaataagcgaaggtttccctacaagagggaaagaaggcaaaaacggcacagctatctccaaacacatctgagttcatttcaaaagtg

SEQ ID NO: 225176 - DNA, 120 bp, Artificial Sequence
  ENSG00000118058_122 (sequence is synthesized)
accaagggaatctccgcacaaaagtgcagattgaggaattgtgatgggtcattcccaagaatcccccaaggggcatcccaaatccctgaggagtaacagctgcaaacctggtcagttctc

SEQ ID NO: 225177 - DNA, 120 bp, Artificial Sequence
  ENSG00000118058_123 (sequence is synthesized)
agtgagagccagctcacttatagctttgctgctagaacctgttgtggctgcatttcctggtggccagtgacaactgtgtaaccagaatagctgcatggcgctgaccctttggccggaact

SEQ ID NO: 225178 - DNA, 120 bp, Artificial Sequence
  ENSG00000118058_124 (sequence is synthesized)
tggtctcttggctccctccttggccacccaccacctctcgcacagcccctctgtttttacaccaataacaagaattaagggggaagccctggcagctatacgttttcaaccagactcctt

SEQ ID NO: 225179 - DNA, 120 bp, Artificial Sequence
  ENSG00000118058_125 (sequence is synthesized)
ttcaaccagactcctttgccgggacccagcccgccaccctgctcgcctccgtcaaacccccggccaatgcagtgagcaccatgtagctcccttgatttaaaaaaaataaaaaataaaaaa

SEQ ID NO: 225180 - DNA, 120 bp, Artificial Sequence
  ENSG00000118058_126 (sequence is synthesized)
acaacacacacacaaaaataaaaaaaatattctaatgaatgtatctttctaaaggactgacgttcaatcaaatatctgaaaatactaaaggtcaaaaccttgtcagatgttaacttctaa

SEQ ID NO: 225181 - DNA, 120 bp, Artificial Sequence
  ENSG00000118058_127 (sequence is synthesized)
gttcggtttgggattttttttttttaatagaaatcaagttgtttttgtttttaaggaaaagcgggtcattgcaaagggctgggtgtaattttatgtttcatttccttcattttaaagcaa

SEQ ID NO: 225182 - DNA, 120 bp, Artificial Sequence
  ENSG00000118058_128 (sequence is synthesized)
tacaaggttatggagcagatggttttgtgccgaatcatgaatactagtcaagtcacacactctggaaacttgcaactttttgtttgttttggttttcaaataaatataaatatgatatat

SEQ ID NO: 225183 - DNA, 120 bp, Artificial Sequence
  ENSG00000118058_129 (sequence is synthesized)
ataggaactaatatagtaatgcaccatgtaacaaagcctagttcagtccatggcttttaattctcttaacactatagataaggattgtgttacagttgctagtagcggcaggaagatgtc

SEQ ID NO: 225184 - DNA, 120 bp, Artificial Sequence
  ENSG00000118058_130 (sequence is synthesized)
aggctcactttcctctgattcccgaaatggggggaacctctaaccataaaggaatggtagaacagtccattcctcggatcagagaaaaatgcagacatggtgtcacctggatttttttct

SEQ ID NO: 225185 - DNA, 120 bp, Artificial Sequence
  ENSG00000118058_131 (sequence is synthesized)
gcccatgaatgttgccagtcagtacctgtcctccttgtttctctatttttggttatgaatgttggggttaccacctgcatttaggggaaaattgtgttctgtgctttcctggtatcttgt

SEQ ID NO: 225186 - DNA, 120 bp, Artificial Sequence
  ENSG00000118058_132 (sequence is synthesized)
tccgaggtactctagttctgtctttcaaccaagaaaatagaattgtggtgtttcttttattgaacttttaacagtctctttagtaaatacaggtagttgaataattgtttcaagagctca

SEQ ID NO: 225187 - DNA, 120 bp, Artificial Sequence
  ENSG00000118058_133 (sequence is synthesized)
acagatgacaagcttcttttctagaaataagacattttttgacaactttatcatgtataacagatctgttttttttccttgtgttcttccaagcttctggttagagaaaaagagaaaaaa

SEQ ID NO: 225188 - DNA, 120 bp, Artificial Sequence
  ENSG00000118058_134 (sequence is synthesized)
aaaaaaggaaaatgtgtctaaagtccatcagtgttaactccctgtgacagggatgaaggaaaatactttaatagttcaaaaaataataatgctgaaagctctctacgaaagactgaatgt

SEQ ID NO: 225189 - DNA, 120 bp, Artificial Sequence
  ENSG00000118058_135 (sequence is synthesized)
aaaagtaaaaagtgtacatagttgtaaaaaaaaggagtttttaaacatgtttattttctatgcacttttttttatttaagtgatagtttaattaataaacatgtcaagtttattgctgca

SEQ ID NO: 225190 - DNA, 120 bp, Artificial Sequence
  ENSG00000118058_136 (sequence is synthesized)
cggcagcggagaggatgagcaattcttaggttttggctcagatgaagaagtcagagtgcgaagtcccacaaggtctccttcaggtacggccaattaagtgcatggtgccttttaagtttt

SEQ ID NO: 225191 - DNA, 120 bp, Artificial Sequence
  ENSG00000118058_137 (sequence is synthesized)
agatcccatgtagttggagaaccaaaggccacatacatgacaaaaagactgaaccgttcaggttacttgcatggagttggtgcttaaatgttcctcaacttaaaagggatgaggagacct

SEQ ID NO: 225192 - DNA, 120 bp, Artificial Sequence
  ENSG00000118058_138 (sequence is synthesized)
tggagacggttctgaggagactcaaaagatgattatatgattggaagtcagtcctatgaggaaaggttgagagaatgaaaggttaagaggcaacttaataactcttcaaaaaacatgaat

SEQ ID NO: 225193 - DNA, 120 bp, Artificial Sequence
  ENSG00000118058_139 (sequence is synthesized)
ccactgacagcagaataagagaaaataggtttaaaccgaaatcaggagtagttgtgtaaagaacttattggtaatgatggttgtcattacagtcatggtaaaaaggttaccaaaataatt

SEQ ID NO: 225194 - DNA, 120 bp, Artificial Sequence
  ENSG00000118058_140 (sequence is synthesized)
ttattatcttctctggaagtatattttaaaagtacagtcctgcctacatatgtataaaatgacctcttaagctaccttttccttctgtgaatcagtaaataaattcttattcagctcctc

SEQ ID NO: 225195 - DNA, 88 bp, Artificial Sequence
  ENSG00000118058_141 (sequence is synthesized)
tccagagcagagcaaacagaaaaaagtggctccccgcccaagtatccctgtaaaacaaaaaccaaaagaaactgaacctgcgaggcgg

SEQ ID NO: 225196 - DNA, 120 bp, Artificial Sequence
  ENSG00000118058_142 (sequence is synthesized)
gaggtgttattccactcctgtctcagaatattatggtaaattgttcgcctaaggcagagttgattctgtgaaaaaaaaatcagttaaaaatttttttcacagctttattgagatttaatt

SEQ ID NO: 225197 - DNA, 120 bp, Artificial Sequence
  ENSG00000118058_143 (sequence is synthesized)
catataccatacagttcacccatctaaagcatacaattcagtggtttttaatatattcagagttgtataaccaccactactctataattctagaacattctcatcatccctaaaagaaac

SEQ ID NO: 225198 - DNA, 120 bp, Artificial Sequence
  ENSG00000118058_144 (sequence is synthesized)
cccctattcattagcagtcattcctcagcccctggccaccacaaatctactttctgtctctatgtatttgattattctggacatttcatataaatgaaatcagacaatatgtagcctttt

SEQ ID NO: 225199 - DNA, 120 bp, Artificial Sequence
  ENSG00000118058_145 (sequence is synthesized)
gtgaccgtcttctttcactcaacagaatactttccaggttcttcccttctgttacatcttcccttccacatcagtacttcattcctttttattgccaaatattccattgtgtagatatac

SEQ ID NO: 225200 - DNA, 120 bp, Artificial Sequence
  ENSG00000118058_146 (sequence is synthesized)
catatgttgcttatccattcattagtcagtggacatttgggttttttctattttctgctacgaataatgttgccacaaatattcatgttcaagttattgtgtagacatgtttttattttt

SEQ ID NO: 225201 - DNA, 120 bp, Artificial Sequence
  ENSG00000118058_147 (sequence is synthesized)
taactctttaactttttgaagtactgccaggttttttttccaaagtggctataccattttacatttccacctgcaatgcacgagtgttcccatttctccacctttgccaacacttacctg

SEQ ID NO: 225202 - DNA, 120 bp, Artificial Sequence
  ENSG00000118058_148 (sequence is synthesized)
ttttttgtttttttttttttattttagacattgtagtgtgaaatgttatcttttcttaaagttgaaatcatttaccattggtattagacttcatattaaatttaggcagcatacaaactt

SEQ ID NO: 225203 - DNA, 87 bp, Artificial Sequence
  ENSG00000118058_149 (sequence is synthesized)
gtattagacttcatattaaatttaggcagcatacaaacttattaatacacttgttttgagcaaacactaaagattttaatcagtgga

SEQ ID NO: 225204 - DNA, 120 bp, Artificial Sequence
  ENSG00000118058_150 (sequence is synthesized)
gttcaagaccagcctgggcttcatacagagaatacatctttacaaaaaataaaaatatatattagccggcaccgtggcatgcacacctgtactcccagctactctggaggctgaggcagg

SEQ ID NO: 225205 - DNA, 120 bp, Artificial Sequence
  ENSG00000118058_151 (sequence is synthesized)
tcactggagcctaggagtatgagactgtattaagctatgatcttagcactgcactccagcctgaacgacagataaatactttgtcacaaaaaaaagaagaagaagaagaagaaggtttta

SEQ ID NO: 225206 - DNA, 120 bp, Artificial Sequence
  ENSG00000118058_152 (sequence is synthesized)
attaagctaaggtagaaaccttccattgactttgttttatccatatctacctctcctacctcctttcagattgctcctggaaaggtgggtgaatgggtacttacaggaattttaactttt

SEQ ID NO: 225207 - DNA, 120 bp, Artificial Sequence
  ENSG00000118058_153 (sequence is synthesized)
ttttttttaggaatttaattttatcagtgatgttcttcctttaagagggaagggaaggaaaatatttggatgcactttagaaaatactaacatttgttcattttatgtgacaggtacatg

SEQ ID NO: 225208 - DNA, 120 bp, Artificial Sequence
  ENSG00000118058_154 (sequence is synthesized)
catggctattataacaccctgtgtatttttttatacttaaaatttttcagaacttttttaattaaaaaaaagagaaaaagacccaacaggcagtttatctcccacaaaatacaaatggcc

SEQ ID NO: 225209 - DNA, 120 bp, Artificial Sequence
  ENSG00000118058_155 (sequence is synthesized)
catagcatgaaagggtactcaatctcagctggacacagtggctcacacctgaattccaacatcttgggaggattgtttgagtctaggagttcaagaccatcctgggcaatagagtgagac

SEQ ID NO: 225210 - DNA, 90 bp, Artificial Sequence
  ENSG00000118058_156 (sequence is synthesized)
gtctaggagttcaagaccatcctgggcaatagagtgagacctcatctctatataaaaaaaaattgtttaaattaggcaggcatgatggct

SEQ ID NO: 225211 - DNA, 82 bp, Artificial Sequence
  ENSG00000118058_157 (sequence is synthesized)
gggtaagctgaagaattcgtcttttaagactaagctctcagttttgtccacctcatttaaaaaatagttcttagtctgggag

SEQ ID NO: 225212 - DNA, 88 bp, Artificial Sequence
  ENSG00000118058_158 (sequence is synthesized)
ttccaaaaaaaaggtaaaaaatagttcttcctgattcacattgatttttgttttcttgccaaagttttttaaatgagaatagtacagg

SEQ ID NO: 225213 - DNA, 120 bp, Artificial Sequence
  ENSG00000118058_159 (sequence is synthesized)
tgttttcttgccaaagttttttaaatgagaatagtacaggcttgtaaacaagtaaacaaaaaatataacaagaattatttaaataatggataatagtttcctatttgtccccctcacccc

SEQ ID NO: 225214 - DNA, 120 bp, Artificial Sequence
  ENSG00000118058_160 (sequence is synthesized)
cgcccaatctactccctagaggtggtcattgctaataatttgtttttatctatgcagacatctctctgcatataaagatataacgtggtatatatatgaatatgtatacacttttttaca

SEQ ID NO: 225215 - DNA, 120 bp, Artificial Sequence
  ENSG00000118058_161 (sequence is synthesized)
taaaaggaataatactgtacatactgttctgtatttggtttttcacttatgtacatctttctgtgccaatatatgtaggtgtgcttcactttttaaatcgctgccgccaattctattgtg

SEQ ID NO: 225216 - DNA, 120 bp, Artificial Sequence
  ENSG00000118058_162 (sequence is synthesized)
tgtgtggatctacaatattttaatgagtcctctattgatatacatttggattgtttccagaatttatttagtttaaaaaagtgaaaactggggctggacacagtggctcatgcctgtaat

SEQ ID NO: 225217 - DNA, 120 bp, Artificial Sequence
  ENSG00000118058_163 (sequence is synthesized)
ttttgctcctctaaagcatttaaatttaagagatgaacctgctaatttgtcctaaaagttatatatgtcttttaatatagtcatggctgaaaaatggctaagacagttagcacctgactc

SEQ ID NO: 225218 - DNA, 120 bp, Artificial Sequence
  ENSG00000118058_164 (sequence is synthesized)
tagttttaaattaactgagaaaataatccttcagaaaatcattgatgttgtccacatacatgtgttcttacctctcgagaggaaaatgttaatgcttttgtcattggaactcagtttggg

SEQ ID NO: 225219 - DNA, 120 bp, Artificial Sequence
  ENSG00000118058_165 (sequence is synthesized)
acttaccactataaattggaggttccagaatgtctgttcttcattccttattttgttcttgttttatgtggattttgtttctggaatctgaaattctatcattctgtgtctgtctctgga

SEQ ID NO: 225220 - DNA, 120 bp, Artificial Sequence
  ENSG00000118058_166 (sequence is synthesized)
aagaactcaatctctgaatcattgaatttctattaatcagtttgtttaaatagaccatctttcttgagaacttgtgcaaaataggttaaacaaatcctttttttttttatagagcaggtt

SEQ ID NO: 225221 - DNA, 120 bp, Artificial Sequence
  ENSG00000118058_167 (sequence is synthesized)
aaaattagaggtaagcagaagcttttgctttttgtcctttccaactataactgaaaataggatgcttccctaagttttagtaaaggatttcatcctatatgcagtcaattcatgatccct

SEQ ID NO: 225222 - DNA, 120 bp, Artificial Sequence
  ENSG00000118058_168 (sequence is synthesized)
caaatgtacagaaatcacatctaaatgtcaattcctgagttaaggaactgacaattatggcactttcagtctctattaatatttagaaggcaagagattattatattgtttatattactc

SEQ ID NO: 225223 - DNA, 120 bp, Artificial Sequence
  ENSG00000118058_169 (sequence is synthesized)
cttatgtgtctgtagacttaaatactttttgaaaagcatttgtttgttgtattggggctgtatgtttctgccattatacttatttgcttacctgatttaaagttgtcctttaattgtttt

SEQ ID NO: 225224 - DNA, 120 bp, Artificial Sequence
  ENSG00000118058_170 (sequence is synthesized)
gggctgtatctatagtttgaaattaggactatcctctgtgtactatgcaccaaagatgacatttcaatgcattgttcagttactacacagctcctatttgtctgtaataaagctgtatgg

SEQ ID NO: 225225 - DNA, 120 bp, Artificial Sequence
  ENSG00000118058_171 (sequence is synthesized)
ctgggtccatttatttcaatattagttattttatagtatccattggaatgatgataattaatatataaaggcaacttttccaaattcatttgtgtctcctctgggcatttctttgggatg

SEQ ID NO: 225226 - DNA, 120 bp, Artificial Sequence
  ENSG00000118058_172 (sequence is synthesized)
gtcagattttggttacaataccagatacatctccatggcattttccatcagttctaatgaatttgattaggaaacaaatggtcacttcaagattagagagttctgggtataactctattg

SEQ ID NO: 225227 - DNA, 120 bp, Artificial Sequence
  ENSG00000118058_173 (sequence is synthesized)
aggacagttgcttattgaaaaactatcagatcgtcatactagaaattctaccacagagagcataacttcatgtaaaaaaaaatctggttttagtcaccactttctagcaatgacctaggc

SEQ ID NO: 225228 - DNA, 120 bp, Artificial Sequence
  ENSG00000118058_174 (sequence is synthesized)
aagctctttgagtcttgggtttgttatctataaatgggaataataaaccaactgtggaatgttgttaggcttagagatcatttatgtaaagtactctacatgtagtcagtgctcagtgag

SEQ ID NO: 225229 - DNA, 120 bp, Artificial Sequence
  ENSG00000118058_175 (sequence is synthesized)
ctttcatttttttctaatactgagtatgagaagaatttcaagggcgcaatttacaactttaaaaacagaaacttaatgtcagtatttggtaaagaatctcacaaaagagttttatgttat

SEQ ID NO: 225230 - DNA, 120 bp, Artificial Sequence
  ENSG00000118058_176 (sequence is synthesized)
gtaccatacagtggtgtggtggttgtattcattcaacaagttctacagaaagccccctgtggctcattttctagcagttattttgtataccacagctgtatagaaaattctgggtttttt

SEQ ID NO: 225231 - DNA, 120 bp, Artificial Sequence
  ENSG00000118058_177 (sequence is synthesized)
aaaaaactgagttttatagtagaagtttgtagttgaatgagcatgtagctcaaaatgaagttaaccacttaaacttgtcatatgggggaccaaaatttcttataataaaaagaactatat

SEQ ID NO: 225232 - DNA, 76 bp, Artificial Sequence
  ENSG00000118058_178 (sequence is synthesized)
cagctaatttttgtattttaatagagacggtgatccgcctgcctcaccctcccaaaagtgctgggattacaggcat

SEQ ID NO: 225233 - DNA, 120 bp, Artificial Sequence
  ENSG00000118058_179 (sequence is synthesized)
gcatgagccaccatgcccggcctcttttgagtttttgatagggttatcatttgtttcagcaagtttaaccaagagtcatatgttgagatattttttaaaatattgagttctgtgtacttc

SEQ ID NO: 225234 - DNA, 120 bp, Artificial Sequence
  ENSG00000118058_180 (sequence is synthesized)
cttcagcaattttcaaacgctgtgacttgttcttatattctgtgaatggctcctacatggggcaacaggtgatatcaagaatttattttatacagttctaggtatactgtaggagttcaa

SEQ ID NO: 225235 - DNA, 120 bp, Artificial Sequence
  ENSG00000118058_181 (sequence is synthesized)
gagtcgtcacccatttccctctagatgcagatgattgacttcgtgaatccaattcactaaaattagatatacttggatatcagaaaggaattttcaggtcatccttaaatgtaataccat

SEQ ID NO: 225236 - DNA, 120 bp, Artificial Sequence
  ENSG00000118058_182 (sequence is synthesized)
cattaattttgcttcacttgaggtgttaatgaggacttgatataaatactctggagtattgtaacatagatgatgaggtagcgtaactctgaacactttttgaaaagtggttattttata

SEQ ID NO: 225237 - DNA, 120 bp, Artificial Sequence
  ENSG00000118058_183 (sequence is synthesized)
ggctgtgggctatgtaagctgaattatttcttttttccttgaaatcagacatagtattgccaattttaactggatctcaaggtattgatgggagtcttttggatttcaaggtactgatag

SEQ ID NO: 225238 - DNA, 120 bp, Artificial Sequence
  ENSG00000118058_184 (sequence is synthesized)
gagtcgagaagacagtccagagctgaacccacccccaggcatagaagacaatagacagtgtgcgttatgtttgacttatggtgatgacagtgctaatgtaagtactttgcaacacagggc

SEQ ID NO: 225239 - DNA, 120 bp, Artificial Sequence
  ENSG00000118058_185 (sequence is synthesized)
cctagttaatacatactccaaaagaactgtttgtccttgtgtccatacttgatgactgggtgccatttatttaatgaacttacttataacttactaatttataacttttatttacctata

SEQ ID NO: 225240 - DNA, 120 bp, Artificial Sequence
  ENSG00000118058_186 (sequence is synthesized)
acttataacttattaatttgtaacttattttttgtcacttagttcatggcacttggagttttttaatgactgattttgttgattaaaaggtgactgatttgccttaaattaaacccttga

SEQ ID NO: 225241 - DNA, 120 bp, Artificial Sequence
  ENSG00000118058_187 (sequence is synthesized)
tgtctagtaatttctaatggaagttcctcaagaatattttgtgaaagttaataaaatctaagttgcatattaaaaagcttgtgtttcatataggatagcagaatcgttaagagcccgagt

SEQ ID NO: 225242 - DNA, 120 bp, Artificial Sequence
  ENSG00000118058_188 (sequence is synthesized)
tctgccgcctgcctgaatacatttctgtgcttaactgcctacttattgactttggcaagtagtttaacctctctgaccctcagtttcatctttaaaatgaagataataacgcttacctca

SEQ ID NO: 225243 - DNA, 120 bp, Artificial Sequence
  ENSG00000118058_189 (sequence is synthesized)
ctcagagtggctgtgaggattaaatgaaataatgtatgtaaagcctctatttggtgcctggcacacacagtaagctacaatttttttaaaagttttttgtgttttttgttttgttttgtt

SEQ ID NO: 225244 - DNA, 84 bp, Artificial Sequence
  ENSG00000118058_190 (sequence is synthesized)
gcttttaaataccatctgagagaactggctttgaaatacagtttatagatgtcactgcacatttttataaacttaccacctatt

SEQ ID NO: 225245 - DNA, 120 bp, Artificial Sequence
  ENSG00000118058_191 (sequence is synthesized)
atagatgtcactgcacatttttataaacttaccacctattgctctttttgtttgtttccttttgagaccaggtcttgctctgtcacccagactagagtacagtggcatgcttttggctca

SEQ ID NO: 225246 - DNA, 69 bp, Artificial Sequence
  ENSG00000118058_192 (sequence is synthesized)
tgtcacccagactagagtacagtggcatgcttttggctcactgcaatctcggcttccatgcgcaccacc

SEQ ID NO: 225247 - DNA, 120 bp, Artificial Sequence
  ENSG00000118058_193 (sequence is synthesized)
ctcaaactcttgggctcaagcgatcctaccacttcagcctccaaaagtgctgggattacagacgtgaaccaccatacccagctcatttttttattctctagatttgtaaaatagtttcag

SEQ ID NO: 225248 - DNA, 120 bp, Artificial Sequence
  ENSG00000118058_194 (sequence is synthesized)
tctagatttgtaaaatagtttcagtctatggaaaaagtaatcttgaaaagaaggaagtggaaacagagcaacgttgcaaaaagaattctgatttctgtgtgcctccctccattaaagaat

SEQ ID NO: 225249 - DNA, 120 bp, Artificial Sequence
  ENSG00000118058_195 (sequence is synthesized)
tatagttgctttcttgaggttatcttcactggaaaagctaatgccgaggaaaacctcctttggcattatattctttaggaaaaaagaaatctctttattttataggatgctggtcgttta

SEQ ID NO: 225250 - DNA, 120 bp, Artificial Sequence
  ENSG00000118058_196 (sequence is synthesized)
ggaaggtacagagatttcccatatgccccctgcacccacatatgcacagcctcccccatgatcagcatcccccaccagagtggtgcatttgttacagtggataaacctacactggacaca

SEQ ID NO: 225251 - DNA, 120 bp, Artificial Sequence
  ENSG00000118058_197 (sequence is synthesized)
tggttatcaccctgactcctgtagtttacatcagcattcactcttggtgttgtacattctgtgggtttggacaaatgtataatgatgtatatccaccattataccatcatatggagtatt

SEQ ID NO: 225252 - DNA, 120 bp, Artificial Sequence
  ENSG00000118058_198 (sequence is synthesized)
ttcgctgccttaaacatcctctgtgctctgcctattcatccctgcctctccccaaccctgggcaaccactgatgtttttactatctccatagtcttgccatttgcagagtttcacatagt

SEQ ID NO: 225253 - DNA, 120 bp, Artificial Sequence
  ENSG00000118058_199 (sequence is synthesized)
tggaatcatatagtacatagccttttcagactggcttcttctgcatagcatttaagtttccttcaagtcttttcatggcttatttagttgctttttgaattatttcgaaatgcaaaagaa

SEQ ID NO: 225254 - DNA, 120 bp, Artificial Sequence
  ENSG00000118058_200 (sequence is synthesized)
aaacaaaaatacagcaagatgataaactgttttgcttttctacttggtgttcctagaggcaccacctcttttgggaaatacagaagtgtcctgctaagtgaaacagaaggatgcttttga

SEQ ID NO: 225255 - DNA, 120 bp, Artificial Sequence
  ENSG00000118058_201 (sequence is synthesized)
gatatgctatgtgccttccactctgagacagtcaggatcataagtataatgtgcaaagggacagcctattaacagctaccatgggttttatttaaggtggttcctgagaatggatttgaa

SEQ ID NO: 225256 - DNA, 120 bp, Artificial Sequence
  ENSG00000118058_202 (sequence is synthesized)
gttttcagaagagtgtttgtggactttgaaggaatcagcttgagaaggaagtttctcaatggcttggaaccagaaaatatccacatgatgattggtatgacctagccttggttattgggg

SEQ ID NO: 225257 - DNA, 120 bp, Artificial Sequence
  ENSG00000118058_203 (sequence is synthesized)
atgatgattggtatgacctagccttggttattggggaaggctgtatatatcattggggaaatttctggtcctcagttataaaatgaccctcagccaggtgtggtgtctcacgcctgtaat

SEQ ID NO: 225258 - DNA, 84 bp, Artificial Sequence
  ENSG00000118058_204 (sequence is synthesized)
ggtgaaaccctgtctctactaaaaaaaattagctgggagtggtggtacatggaatcacttgaaccccggaggcagaggctgcag

SEQ ID NO: 225259 - DNA, 120 bp, Artificial Sequence
  ENSG00000118058_205 (sequence is synthesized)
tcttctctaatcggttcttctttccttggtcagggtctatgacaatcgactgcttaggaattctaaatgatctctccgactgtgaagataagctctttcctattggatatcagtaagtag

SEQ ID NO: 225260 - DNA, 120 bp, Artificial Sequence
  ENSG00000118058_206 (sequence is synthesized)
cactataaagagaagagagcagccccacaacctgaacacactgaagccatgtgcaggtcattaaatgtagaggcatacctgttagctactttaaactgctactaaaaattaatcacttat

SEQ ID NO: 225261 - DNA, 120 bp, Artificial Sequence
  ENSG00000118058_207 (sequence is synthesized)
tttgctagttctcggattcgtctgcttgtagattgggactatgttagcggaatccagttatagaaggaaagtattattgacataatttcagaattacttaaaaataaaaccttagtagaa

SEQ ID NO: 225262 - DNA, 120 bp, Artificial Sequence
  ENSG00000118058_208 (sequence is synthesized)
aacacaaggtcagtctcttaagattcctccaaattccattcatctccatgcagaagtgcagattgtttttatggataaaacagctcatgccctgttcccaactttacagtttataagtcc

SEQ ID NO: 225263 - DNA, 120 bp, Artificial Sequence
  ENSG00000118058_209 (sequence is synthesized)
ttctaaaactataaatccacacaataatgatcaaatttttcaataagaatttataatcttacctatatgaagtaagttgttaaaatgtctaacaagctaacaatataagttcaaaattcc

SEQ ID NO: 225264 - DNA, 120 bp, Artificial Sequence
  ENSG00000118058_210 (sequence is synthesized)
ccttctaccactcccgcgttggagtctcattttgcaatatatgctccaacttactctgtattcctattcctatgacacagtctgtgctccacatttagctggcagcttttcacacaaacc

SEQ ID NO: 225265 - DNA, 120 bp, Artificial Sequence
  ENSG00000118058_211 (sequence is synthesized)
agattccactagcattcagcagatttgaagcagttacatttctcttgtctcatggggctcttctcccaaaggaaacacctcaggtttgccctttgttttattttcaggccgtactttgta

SEQ ID NO: 225266 - DNA, 120 bp, Artificial Sequence
  ENSG00000118058_212 (sequence is synthesized)
tacattgtaaggcaatagttcggtcctgaaggccaaaactaatttttgtaatggttaatatttttctttctcttgcttttaggatgttttactatatttggtgcctgcttatggtacaag

SEQ ID NO: 225267 - DNA, 120 bp, Artificial Sequence
  ENSG00000118058_213 (sequence is synthesized)
aaaaaaagatcttaggctattttctgagaggctaagaaaaaccaaggacttcaaaaagcttggaacaacctaactaggggaatctatactaagaacccataaaataaagctaaactctgt

SEQ ID NO: 225268 - DNA, 120 bp, Artificial Sequence
  ENSG00000118058_214 (sequence is synthesized)
aattaagagggccagggaacctaggataaagagaggttttgaaaaatgctagtttctgcttctatcctctcccttatgatgattttcccaaatctgtttacccaggtgttccagggtata

SEQ ID NO: 225269 - DNA, 120 bp, Artificial Sequence
  ENSG00000118058_215 (sequence is synthesized)
gcctgggcgatagagcaagactccgtttccaaaaaaaaggcaagtcgctgttcttccggaagttcaggtgacccaaaatccagcaaatgaacaagaaagtgcagaacctaaaacagtgga

SEQ ID NO: 225270 - DNA, 120 bp, Artificial Sequence
  ENSG00000118058_216 (sequence is synthesized)
aatttttaagtggagctaagagagaaatcttaaacatcaagagaaaccaaggaaaacagtaggtgtggtatcaatataggaaacaaataagtatttgtagcttttatgtccattttcagt

SEQ ID NO: 225271 - DNA, 120 bp, Artificial Sequence
  ENSG00000118058_217 (sequence is synthesized)
tgtcatttaaagaggtatagttcagaatagctcttgttaaggctgtcactgcttgtggatacattgtaacaaatgcttataaatcatttccaaactaatagaagtttgcttcatgttagt

SEQ ID NO: 225272 - DNA, 120 bp, Artificial Sequence
  ENSG00000118058_218 (sequence is synthesized)
tagtattataaaagcctctgacccttggcttttgaggctgtgtagagggcttgcatcactcagaatgaaacctttttagatatgttgggttgcagaaagcatttcctgtacagtcagaat

SEQ ID NO: 225273 - DNA, 120 bp, Artificial Sequence
  ENSG00000118058_219 (sequence is synthesized)
gaaaacttgaattgggattattcatatagattaccaaaagtctgggcagagctgatattaccaccagccagttttcctactaactcttaactccaaaaccttcattgggttattgaagct

SEQ ID NO: 225274 - DNA, 120 bp, Artificial Sequence
  ENSG00000118058_220 (sequence is synthesized)
tgaactgatactagatttatttaagattagttatacatcttaagtattttttaagtggcatataatgaatggtctctacttttaaccagtctcataaaatgcctggggttcataggtgaa

SEQ ID NO: 225275 - DNA, 120 bp, Artificial Sequence
  ENSG00000118058_221 (sequence is synthesized)
gctggattgttgcaggaattctgcaattgttggcaaagcgaagggcagtttgactccttaattataaagttggatgtcatttgagaaactctgggaattggaagtagaacaaattcatac

SEQ ID NO: 225276 - DNA, 120 bp, Artificial Sequence
  ENSG00000118058_222 (sequence is synthesized)
tttccctataacttttaatttcttgtcatacattcagaaaacaagagatgtaaaattcataaaactgcttgtataaattcagaaaacgggattataaaagcaaagacaaattgtcttacg

SEQ ID NO: 225277 - DNA, 120 bp, Artificial Sequence
  ENSG00000118058_223 (sequence is synthesized)
attctttgttctacttgagagattcaagtgttggagtaataaaaaataccagggactttcttttttttaataggttaatgccacctaatgtgggcttctcagaatgtgatggcaaacttc

SEQ ID NO: 225278 - DNA, 120 bp, Artificial Sequence
  ENSG00000118058_224 (sequence is synthesized)
caaatatgatgtgggagccaaaagagaccaactggttttacaaaatattaagaacacaaaatttcccaactcatatatttgaatattcctaaaaaataataagtcaaaattgtgttggtg

SEQ ID NO: 225279 - DNA, 81 bp, Artificial Sequence
  ENSG00000118058_225 (sequence is synthesized)
gaatattcctaaaaaataataagtcaaaattgtgttggtgggctgggcacagtggctcacaactgtaatagccaggagttc

SEQ ID NO: 225280 - DNA, 120 bp, Artificial Sequence
  ENSG00000118058_226 (sequence is synthesized)
aaataaaaattttaaatttaaaaaattaaaaaaaaaaaattagccaagcatggtggcctggcgccttgtagtcccagctactcaggaagctgtgatgggaggattgcttgagcccaatgg

SEQ ID NO: 225281 - DNA, 120 bp, Artificial Sequence
  ENSG00000118058_227 (sequence is synthesized)
cttcagtgttattttgccaagaagaatgttcacttttgtcatctaattttacactgctccttcagcaaactgactttatggagagataaccctgtttacctttagaaagaaggaagttgt

SEQ ID NO: 225282 - DNA, 120 bp, Artificial Sequence
  ENSG00000118058_228 (sequence is synthesized)
caaatcccttggcacagaccccctcgccggggtttcccatcccgggactgaacccctcctccctttcacagattacctcatccgagcaagattcctccctccctccctcctagagacctg

SEQ ID NO: 225283 - DNA, 120 bp, Artificial Sequence
  ENSG00000118058_229 (sequence is synthesized)
atcccgccacatccccgcctccctctctgggcagatgtgttactcctagggcagttttcctctcgggcgtctctcgggtgatggcctcatccagggccacgttctcctggcccttgggga

SEQ ID NO: 225284 - DNA, 120 bp, Artificial Sequence
  ENSG00000118058_230 (sequence is synthesized)
tcgtgtcccttccagcaccttgctttcgaaaacccgatgaaccctcgcgccatccccgggccaggtccctatactgccagccactcccccttccttcacctccaccctctacccccaccc

SEQ ID NO: 225285 - DNA, 120 bp, Artificial Sequence
  ENSG00000118058_231 (sequence is synthesized)
caagcagaccgatcctcccccatcccgccctaccccaccggggaaaatctctcctctgcaccttgcctggtctcacctcctttccctctgaagataacggtgattcctcatacagcagtc

SEQ ID NO: 225286 - DNA, 120 bp, Artificial Sequence
  ENSG00000118058_232 (sequence is synthesized)
tcttcccccccccgccccgtcttacagggctacagtttctagcctattggtagccgggaattactctaccttcactccaccctttccctcctttagaatgaaggattagtggcatcttgg

SEQ ID NO: 225287 - DNA, 120 bp, Artificial Sequence
  ENSG00000118058_233 (sequence is synthesized)
aggggaaaatagtccactgtcccctaggcttagagaagagcagctttccaccactccccttggagaggaggcaggctttccctccagctctggggaagggggcccctgtgaggggaggtg

SEQ ID NO: 225288 - DNA, 120 bp, Artificial Sequence
  ENSG00000118058_234 (sequence is synthesized)
tttgttgggggactgaggcagcatcctcccaggggaagcagctgctctcctaccccacccactgcgcctgagagcacgcagtctccaacccgagctccctcccgcccttctcttctcgtc

SEQ ID NO: 225289 - DNA, 120 bp, Artificial Sequence
  ENSG00000118058_235 (sequence is synthesized)
atttcattattgatccaccttttcctaggccaatcctggggcttggaaggggtgggggaagccaggttggggtgaggagagtagataagggacagttatactttagtgtggtggcggtgg

SEQ ID NO: 225290 - DNA, 120 bp, Artificial Sequence
  ENSG00000118058_236 (sequence is synthesized)
ttgtctctgattcttgtaaggggacccaaggtggatgaagggtcagagcgttgccccttccccattagtactggggcaagaacggagttgcttctataaacattattcggcccccttcag

SEQ ID NO: 225291 - DNA, 120 bp, Artificial Sequence
  ENSG00000118058_237 (sequence is synthesized)
caaaaaggaaagttgcccaaggaagggaagttgagttcaggttcagccagtggcgttgcgcatttgttttccattggatgcagaaggggggagttcgaattgtagaggggggaggatggc

SEQ ID NO: 225292 - DNA, 120 bp, Artificial Sequence
  ENSG00000118058_238 (sequence is synthesized)
atgggggatgctaggaggaggaagagcagctgctaggggctgaagcgaaggggggtagggggttgctgctctggagtgctcttgattgaaacagaaagggaaagataacaaccagccgtt

SEQ ID NO: 225293 - DNA, 120 bp, Artificial Sequence
  ENSG00000118058_239 (sequence is synthesized)
tcctgcgtgctctgccgttggtgcacacaaaatatcctgggcaaaccccttgtcccctattgtgccccgcacccctttagatttacggaaagatcctgggaagaaggggagggaggagat

SEQ ID NO: 225294 - DNA, 120 bp, Artificial Sequence
  ENSG00000118058_240 (sequence is synthesized)
cccaaggaccctggcccctcctttcaaggagctggcattttttagttgttagtcttcctgcctccttttttttaatcgtttctaaggcagcctgatcaggagactgacaacaacccgcct

SEQ ID NO: 225295 - DNA, 120 bp, Artificial Sequence
  ENSG00000118058_241 (sequence is synthesized)
tctgacagagcaaggaggacatgatgggggcgtgttccttgctatgtagctagctgcagcgtcccctttccctgcctctttctgctctatctccacctccttttcccagccttcagaagg

SEQ ID NO: 225296 - DNA, 120 bp, Artificial Sequence
  ENSG00000118058_242 (sequence is synthesized)
cagctgcagtcagcagggttgtttgagactatttattggttgctgtagattattatttttttttgaaaggccaattctgtattttttaagctaacaacacagatcccatgtagttggaga

SEQ ID NO: 225297 - DNA, 120 bp, Artificial Sequence
  ENSG00000118058_243 (sequence is synthesized)
accaaaggccacatacatgacaaaaagactgaaccgttcaggttacttgcatggagttggtgcttaaatgtgagttgattttgcttttttaaaagatacagcagcaaaaaaaaaaaaaaa

SEQ ID NO: 225298 - DNA, 120 bp, Artificial Sequence
  ENSG00000118058_244 (sequence is synthesized)
gttgaaagaggaaatcagcaccaactgggggaatgaataagaactcccattagcaggtgggtttagcgctgggagagctttggtcagtgttgttaggtcactgtttgtgaactgactgca

SEQ ID NO: 225299 - DNA, 120 bp, Artificial Sequence
  ENSG00000118058_245 (sequence is synthesized)
gaacatacataatgaaacattcctatccatcctgagcagtatcagaggaagtaattccttcacatggaaagtatcaaaccatgatgattccttgagtcagcaaaactgtaagagaaattc

SEQ ID NO: 225300 - DNA, 120 bp, Artificial Sequence
  ENSG00000118058_246 (sequence is synthesized)
aatcccagtgtattttcgcaatatattcaatatgaattgaacaactaggtgagccttttaatagtccgtgtctgagattaaaactttttaaagcagcagttatttttggactcattgaaa

SEQ ID NO: 225301 - DNA, 120 bp, Artificial Sequence
  ENSG00000118058_247 (sequence is synthesized)
tgaaatactctgacattgtgatgtcacactaattttatgcttttcatccttattttccatccaaagttgtgtaattgtaaaactttcctaagtgacctttctctctccacaggaggattg

SEQ ID NO: 225302 - DNA, 120 bp, Artificial Sequence
  ENSG00000118094_0 (sequence is synthesized)
attcagtcacagtcacagccaccatgccagggaggacctgggagctgtgcctgctactgctgctggggctgggactggggtcccaggaggccctacccccaccctgtgagagtgagattt

SEQ ID NO: 225303 - DNA, 120 bp, Artificial Sequence
  ENSG00000118094_1 (sequence is synthesized)
actgccacggggagctcctaaaccaagttcaaatggccaagctctaccaggatgacaagcagtttgtggacatgccactgtctatagctccagaacaagtcctgcagaccttcactgagc

SEQ ID NO: 225304 - DNA, 120 bp, Artificial Sequence
  ENSG00000118094_2 (sequence is synthesized)
tgtccagggaccacaatcacagcatccccagggagcagctgcaggcgtttgtccacgaacacttccaggccaaggggcaggagctgcagccctggacccctgcagactggaaagacagcc

SEQ ID NO: 225305 - DNA, 120 bp, Artificial Sequence
  ENSG00000118094_3 (sequence is synthesized)
cccagttcctgcagaagatttcagatgccaaactgcgtgcctgggcagggcagctgcatcagctctggaagaagctggggaagaagatgaagccagaggttctcagccaccctgagcggt

SEQ ID NO: 225306 - DNA, 120 bp, Artificial Sequence
  ENSG00000118094_4 (sequence is synthesized)
tctctctcatctactcagaacatcccttcattgtgcctggcggtcgctttgttgagttctactactgggactcctactgggtcatggagggtctgctcctctcagagatggctgagacgg

SEQ ID NO: 225307 - DNA, 120 bp, Artificial Sequence
  ENSG00000118094_5 (sequence is synthesized)
tgaagggcatgctgcagaacttcttggacctggtgaaaacctatgggcatgtccccaatggtgggcgcgtgtactacctgcagcggagccagcccccactcttgaccctcatgatggatt

SEQ ID NO: 225308 - DNA, 120 bp, Artificial Sequence
  ENSG00000118094_6 (sequence is synthesized)
gctacttgactcacaccaatgacaccgcctttctacaggaaaacattgaaacactagccttggaattggacttttggaccaagaacaggactgtctctgtgagcttggagggaaagaact

SEQ ID NO: 225309 - DNA, 120 bp, Artificial Sequence
  ENSG00000118094_7 (sequence is synthesized)
acctcctgaatcgctattatgtcccttatgggggacccaggcctgagtcctacagcaaagatgtggagttggctgacaccttgccagaaggagaccgggaggctctgtgggctgagctca

SEQ ID NO: 225310 - DNA, 120 bp, Artificial Sequence
  ENSG00000118094_8 (sequence is synthesized)
aggctggggctgagtctggctgggacttctcttcacgctggctcattggaggcccaaaccccaactcgcttagcggcatccgaacaagcaaactggtgcctgttgacctgaatgccttcc

SEQ ID NO: 225311 - DNA, 120 bp, Artificial Sequence
  ENSG00000118094_9 (sequence is synthesized)
tatgccaagcagaggagctgatgagcaacttctattccaggctggggaacgactcccaggccacgaagtacagaatcctgcggtcgcagcgcttggccgccctgaacacagtcctgtggg

SEQ ID NO: 225312 - DNA, 120 bp, Artificial Sequence
  ENSG00000118094_10 (sequence is synthesized)
atgagcagaccggagcctggttcgattacgaccttgagaagaagaagaaaaaccgggagttttacccatccaacctcactccactctgggccgggtgtttctctgaccctggcgtggcgg

SEQ ID NO: 225313 - DNA, 120 bp, Artificial Sequence
  ENSG00000118094_11 (sequence is synthesized)
cccccctgcaggacctggtcatcagaggcctggccaaggcacctttacgtcgggcccaggaagtggctttccagctggctcagaattggatccgaaccaattttgatgtctactcgcaga

SEQ ID NO: 225314 - DNA, 120 bp, Artificial Sequence
  ENSG00000118094_12 (sequence is synthesized)
agtcagccatgtatgagaagtatgacgtcagcaacggtggacagcccggtgggggaggagaatatgaagttcaggagggatttggctggacgaatggcgtggtcctgatgctgctggacc

SEQ ID NO: 225315 - DNA, 120 bp, Artificial Sequence
  ENSG00000118094_13 (sequence is synthesized)
gctatggtgaccggctgacctcaggggccaagctggctttcctggagccccactgcctggcggccacccttctgcccagcctcctgctcagcctcctgccatggtgacagccctcctctc

SEQ ID NO: 225316 - DNA, 120 bp, Artificial Sequence
  ENSG00000118094_14 (sequence is synthesized)
ctcacctggccccagctcctgccccattaaacctctgcaccagttcctgccttcccctgcctcttcatgccctcctacctcccagcctgtcctcagagcgaagtggagggcagggtcacg

SEQ ID NO: 225317 - DNA, 120 bp, Artificial Sequence
  ENSG00000118094_15 (sequence is synthesized)
acctggaggtcatgggtaggggcctagctccctcctggaaccttgaatagggtggaaatcctgctctggagggaagacctatccccaagtgcctcagcgccaagccccacaccggccttc

SEQ ID NO: 225318 - DNA, 120 bp, Artificial Sequence
  ENSG00000118094_16 (sequence is synthesized)
cactcacttccgtagtccaaaggctttattgttctgctgaaatgcttacaaatactgaaaacccccagcctgggcccaggcaaccaagggctcaatgctgggaaggagagcaggggaggt

SEQ ID NO: 225319 - DNA, 120 bp, Artificial Sequence
  ENSG00000118094_17 (sequence is synthesized)
gggcttagtgttaaggcgtgaagggcgaggccagacagctggaggcctggtcctccactctccatttccatcacccttcggaggctgaaggaagggcggcggcaccacagggcccttccc

SEQ ID NO: 225320 - DNA, 120 bp, Artificial Sequence
  ENSG00000118094_18 (sequence is synthesized)
ctctgctgcatcatctcctgctcaggctttctctctaggagcattggaggaatcctctttccctgtcggaaactcaacactgtacagaactccaaccataacccttctagcttcctctcc

SEQ ID NO: 225321 - DNA, 120 bp, Artificial Sequence
  ENSG00000118094_19 (sequence is synthesized)
caactgcatcgctcctcctctgttccatagatcccccggcttcatcccttctggctctaagcaaggcaccagtggaagggagagggctggactggggggctggcagcctgtgcatcaggg

SEQ ID NO: 225322 - DNA, 120 bp, Artificial Sequence
  ENSG00000118094_20 (sequence is synthesized)
ctgaagacacaggcagggggaaggaaaaaggtattcagtcccttccccccagcatgagatgcccaggggcctgggctggagagatgatggcacgtaccctcagatggcccacagctgaag

SEQ ID NO: 225323 - DNA, 120 bp, Artificial Sequence
  ENSG00000118094_21 (sequence is synthesized)
cagtgggctgggccacagagctgcagcaattagtatgtaaccatggcaatgaagcagtcactatggtaaccatggtgatgagtctgcaactaggggatggagctgggacctcaaggttga

SEQ ID NO: 225324 - DNA, 120 bp, Artificial Sequence
  ENSG00000118094_22 (sequence is synthesized)
ctggttagagcatcacaatgccccgggcaggaggaggagtgacttagcctggcctctcagatggtgacaccgagagccctctgcaatcctgggctgtggggcccaagggcagctggatca

SEQ ID NO: 225325 - DNA, 120 bp, Artificial Sequence
  ENSG00000118094_23 (sequence is synthesized)
gcctgcccaaggcctgaccaagggaactgaagagaggaatgtgcctggggcccacagtgtcttcggagcacagatcagggactcctactgggtcatggagggtctgctcctctcagagat

SEQ ID NO: 225326 - DNA, 120 bp, Artificial Sequence
  ENSG00000118096_0 (sequence is synthesized)
gtgactccttgatcttcttcctgcgtggagagccttcgcgggtgaggcttaacgcgcaggaggtctcacgagagtggaagcaactctcgcgaattttaaaatttatctttttgcctagcg

SEQ ID NO: 225327 - DNA, 120 bp, Artificial Sequence
  ENSG00000118096_1 (sequence is synthesized)
actgacaacaggctggttgcttggcgtggaatcctaaagtggcctggctttgagactggagtgagaccccagccctaggctggggttctttccattatagaggagacggattcagaaggg

SEQ ID NO: 225328 - DNA, 120 bp, Artificial Sequence
  ENSG00000118096_2 (sequence is synthesized)
ctacagaccaaggttgttgaaaaccagacatatgatgagcgtctagagattaacgactccgaagaggttgcaagtatttatactccaaccccaagacaccaaggacttcctcgttctgcc

SEQ ID NO: 225329 - DNA, 120 bp, Artificial Sequence
  ENSG00000118096_3 (sequence is synthesized)
catcttcctaacaaggctatggctgataacagcagtgatgagtgtgaagaggaaaataacaaggtcctaagggagggcatgccacaggctccaggccacagaggcaaagacatggaccct

SEQ ID NO: 225330 - DNA, 120 bp, Artificial Sequence
  ENSG00000118096_4 (sequence is synthesized)
gttccacctgcccctgcaagtctcaagtgccaccagaccccttctcatgtacttgagagggtgggatggtacagagagagccagaagcacagaaaggagaagaagaagacctcacagttg

SEQ ID NO: 225331 - DNA, 120 bp, Artificial Sequence
  ENSG00000118096_5 (sequence is synthesized)
acacctcaacggggctttagtgaaaatgaggatgacgatgatgatgatgatgattcatctgaaactgattctgattctgatgatgatgatgaagagcatggagcccctctggaaggggcc

SEQ ID NO: 225332 - DNA, 120 bp, Artificial Sequence
  ENSG00000118096_6 (sequence is synthesized)
tatgaccctgcagactatgagcatttgccagtttctgctgaaattaaggaactcttccagtacatcagtaggtacacacctcagttgattgacctggaccacaaactgaagcctttcatt

SEQ ID NO: 225333 - DNA, 120 bp, Artificial Sequence
  ENSG00000118096_7 (sequence is synthesized)
tcggggatattgatgcattcttaaaggtcccacgtcctgatggaaagcctgacaaccttggcctattggtattggatgaaccttctacaaagcagtcagaccctacggtgctctcactct

SEQ ID NO: 225334 - DNA, 120 bp, Artificial Sequence
  ENSG00000118096_8 (sequence is synthesized)
ggttaacagagaattctaagcagcacaacatcacacaacatatgaaagtaaaaagcctagaagatgcagaaaagaatcccaaagccattgacacgtggattgagagcatctctgaattac

SEQ ID NO: 225335 - DNA, 120 bp, Artificial Sequence
  ENSG00000118096_9 (sequence is synthesized)
accgttctaagccccctgcgactgtgcactacaccaggcccatgcccgacattgacacgctgatgcaggaatggtccccggagtttgaagagcttttgggcaaggtaagcctgcccacgg

SEQ ID NO: 225336 - DNA, 120 bp, Artificial Sequence
  ENSG00000118096_10 (sequence is synthesized)
cagagattgattgcagcctggcagagtacattgacatgatctgtgccattctagacatccctgtctacaagagtcggatccagtccctccatctgctcttttccctctactcagaattca

SEQ ID NO: 225337 - DNA, 120 bp, Artificial Sequence
  ENSG00000118096_11 (sequence is synthesized)
agaactcacagcattttaaagctctcgctgaaggcaagaaagcattcactccttcatccaattccacctcccaagctggagacatggagacattaaccttcagctgagacacttcccaag

SEQ ID NO: 225338 - DNA, 120 bp, Artificial Sequence
  ENSG00000118096_12 (sequence is synthesized)
ctgctgtttcaaggctgagctggcccctctgccccagctgagatggacagatcgttgtcagctacttgatgtccttgcccatgccacagcttggctcaggggcagtgcatgtcctgctgc

SEQ ID NO: 225339 - DNA, 120 bp, Artificial Sequence
  ENSG00000118096_13 (sequence is synthesized)
cctctctgccagagggcacagaacatgtttgtttaatgaacctgcctgcctcagattgctgtccccggggagttaatgcatctacaccactgtggggatttgagttataagaattggaat

SEQ ID NO: 225340 - DNA, 120 bp, Artificial Sequence
  ENSG00000118096_14 (sequence is synthesized)
ttctgagatcccatggaggttagattgggaggaaagcttaaaagatgtcctttttgtgagagggatggaattgttttctttcattcgtaaagttagtgagtaaagattttataaatcaaa

SEQ ID NO: 225341 - DNA, 89 bp, Artificial Sequence
  ENSG00000118096_15 (sequence is synthesized)
tcactctgttgcccgggctggagtgcagcagcatgaacactggacactgctcactgcagcctcgaactcctgggtttaagcagaccaca

SEQ ID NO: 225342 - DNA, 120 bp, Artificial Sequence
  ENSG00000118096_16 (sequence is synthesized)
gctgggaccacaggcgcatggcatcacacccagctaattttttttctttttttttttttgtagatgggatcttgccatattgtccagtctaggctcaaactcctgggctcaagtgatcct

SEQ ID NO: 225343 - DNA, 120 bp, Artificial Sequence
  ENSG00000118096_17 (sequence is synthesized)
tgttgggattataggcatgagccactgcccctggccagagtttatattatttatgtaatggcagataatttgaatagtataatgtctaacccaatgccttaagcacagtaatgtttagta

SEQ ID NO: 225344 - DNA, 120 bp, Artificial Sequence
  ENSG00000118096_18 (sequence is synthesized)
acagtaatgtttagtaaatatatcttgaattgaactggcagagccatgactagaattcagtctcctgtctctttagccagatgttccaataaaccttgttttataaaatggttagagcat

SEQ ID NO: 225345 - DNA, 120 bp, Artificial Sequence
  ENSG00000118096_19 (sequence is synthesized)
gttctaccttttcttgtcatcctttcattaaaaaaaaggaaaaccatttatgctacattttaacatcaaaaaaatattatgttttggattttctgcacctctgtccttcagagtcagaga

SEQ ID NO: 225346 - DNA, 120 bp, Artificial Sequence
  ENSG00000118096_20 (sequence is synthesized)
taattgagagttaagtacaatcaaccttaaagttgccttgcaagccaccaggaaaggcagatattggagaggcagaagctagcttcaggatcatgtccctatagtcagtaacacaccagc

SEQ ID NO: 225347 - DNA, 120 bp, Artificial Sequence
  ENSG00000118096_21 (sequence is synthesized)
ggaagggaaatacagataggtcagatactccatgaagagaaatatcactgaacaaaaatggaaagtccatagtccctgggactgctggtttgatgggcacaaggttgattttgaactttc

SEQ ID NO: 225348 - DNA, 120 bp, Artificial Sequence
  ENSG00000118096_22 (sequence is synthesized)
ttcttttgatagtttcaagcagcttatgctgggcagtcttgcaaattaagtattagatttcctctctatggtctttgtgagtattaagacccctaaaatttctattcccacttcatattc

SEQ ID NO: 225349 - DNA, 120 bp, Artificial Sequence
  ENSG00000118096_23 (sequence is synthesized)
cctgattttcttccaaaataactagagttgccatcctcttctttgaaagtccatagcttttcgggccgaagctgtctaaagtgtacacagggccctgaagatctaagtaatatgtacaat

SEQ ID NO: 225350 - DNA, 120 bp, Artificial Sequence
  ENSG00000118096_24 (sequence is synthesized)
agataaaattagaatttataccccagcctcaagtagagaaatggaatagggttctagaaagtggagtccccatttgtagctgagcaggggcagaagaaggctctcaagccccttctggga

SEQ ID NO: 225351 - DNA, 120 bp, Artificial Sequence
  ENSG00000118096_25 (sequence is synthesized)
agtgcccccttctctttctggtgacgaggtgccaggtggttggtgtattggttagagcaatagagaactgggcataggtacatttgatttttttacttgaagctttctatgcctgccctg

SEQ ID NO: 225352 - DNA, 120 bp, Artificial Sequence
  ENSG00000118096_26 (sequence is synthesized)
gattaacagaaggaccagaacctccggagacaggcccagcctgctgagcctaagcgccagggaaccggcgggacagcatcagttccgaggtccgcagcctgggacccgcaccaccaccac

SEQ ID NO: 225353 - DNA, 120 bp, Artificial Sequence
  ENSG00000118096_27 (sequence is synthesized)
gaagttctcgcagagcaaaaacgccgggccgtctcaggggcaggtcccagcaaacgagggagtccagctggttggggggtggtgcggaagcgggcacgacgacagatggactggagtcag

SEQ ID NO: 225354 - DNA, 120 bp, Artificial Sequence
  ENSG00000118096_28 (sequence is synthesized)
ctccatcggatctccaggagaccgggcacaggaggccacactgctccccgagcccggagcaaaagcactctgccctagaccctcagggcggggctcctccggcccctgccccaggcccgc

SEQ ID NO: 225355 - DNA, 120 bp, Artificial Sequence
  ENSG00000118113_0 (sequence is synthesized)
gacacatgatgctgtgaacgtcagggtgctcgccagggaagggccctacccagagggacagaaagaaagccaggaggggtagagtttgaagagaagatcatgttctccctgaagacgctt

SEQ ID NO: 225356 - DNA, 120 bp, Artificial Sequence
  ENSG00000118113_1 (sequence is synthesized)
ccatttctgctcttactccatgtgcagatttccaaggcctttcctgtatcttctaaagagaaaaatacaaaaactgttcaggactacctggaaaagttctaccaattaccaagcaaccag

SEQ ID NO: 225357 - DNA, 120 bp, Artificial Sequence
  ENSG00000118113_2 (sequence is synthesized)
tatcagtctacaaggaagaatggcactaatgtgatcgttgaaaagcttaaagaaatgcagcgattttttgggttgaatgtgacggggaagccaaatgaggaaactctggacatgatgaaa

SEQ ID NO: 225358 - DNA, 120 bp, Artificial Sequence
  ENSG00000118113_3 (sequence is synthesized)
aagcctcgctgtggagtgcctgacagtggtggttttatgttaaccccaggaaaccccaagtgggaacgcactaacttgacctacaggattcgaaactataccccacagctgtcagaggct

SEQ ID NO: 225359 - DNA, 120 bp, Artificial Sequence
  ENSG00000118113_4 (sequence is synthesized)
gaggtagaaagagctatcaaggatgcctttgaactctggagtgttgcatcacctctcatcttcaccaggatctcacagggagaggcagatatcaacattgctttttaccaaagagatcac

SEQ ID NO: 225360 - DNA, 120 bp, Artificial Sequence
  ENSG00000118113_5 (sequence is synthesized)
ggtgacaattctccatttgatggacccaatggaatccttgctcatgcctttcagccaggccaaggtattggaggagatgctcattttgatgccgaagaaacatggaccaacacctccgca

SEQ ID NO: 225361 - DNA, 120 bp, Artificial Sequence
  ENSG00000118113_6 (sequence is synthesized)
aattacaacttgtttcttgttgctgctcatgaatttggccattctttggggctcgctcactcctctgaccctggtgccttgatgtatcccaactatgctttcagggaaaccagcaactac

SEQ ID NO: 225362 - DNA, 120 bp, Artificial Sequence
  ENSG00000118113_7 (sequence is synthesized)
tcactccctcaagatgacatcgatggcattcaggccatctatggactttcaagcaaccctatccaacctactggaccaagcacacccaaaccctgtgaccccagtttgacatttgatgct

SEQ ID NO: 225363 - DNA, 120 bp, Artificial Sequence
  ENSG00000118113_8 (sequence is synthesized)
atcaccacactccgtggagaaatacttttctttaaagacaggtacttctggagaaggcatcctcagctacaaagagtcgaaatgaattttatttctctattctggccatcccttccaact

SEQ ID NO: 225364 - DNA, 120 bp, Artificial Sequence
  ENSG00000118113_9 (sequence is synthesized)
ggtatacaggctgcttatgaagattttgacagagacctcattttcctatttaaaggcaaccaatactgggctctgagtggctatgatattctgcaaggttatcccaaggatatatcaaac

SEQ ID NO: 225365 - DNA, 120 bp, Artificial Sequence
  ENSG00000118113_10 (sequence is synthesized)
tatggcttccccagcagcgtccaagcaattgacgcagctgttttctacagaagtaaaacatacttctttgtaaatgaccaattctggagatatgataaccaaagacaattcatggagcca

SEQ ID NO: 225366 - DNA, 120 bp, Artificial Sequence
  ENSG00000118113_11 (sequence is synthesized)
ggttatcccaaaagcatatcaggtgcctttccaggaatagagagtaaagttgatgcagttttccagcaagaacatttcttccatgtcttcagtggaccaagatattacgcatttgatctt

SEQ ID NO: 225367 - DNA, 120 bp, Artificial Sequence
  ENSG00000118113_12 (sequence is synthesized)
atggctgaagcaaaatcaaatgtggctgtatccactttcagaatgttgaagggaagttcagcaagcattttcgttacattgtgtcctgcttatacttttctcaatattaagtcattgttt

SEQ ID NO: 225368 - DNA, 120 bp, Artificial Sequence
  ENSG00000118113_13 (sequence is synthesized)
cccatcactgtatccattctacctgtcctccgtgaaaatatgtttggaatattccactatttgcagaggcttattcagttcttacacattccatcttacattagtgattccatcaaagag

SEQ ID NO: 225369 - DNA, 120 bp, Artificial Sequence
  ENSG00000118113_14 (sequence is synthesized)
aaggaaagtaagcctttttgtcacctcaatatttactatttcaatacttacatatctgacttctaggatttattgttatattacttgcctatctgacttcatacatccctcagtttctta

SEQ ID NO: 225370 - DNA, 120 bp, Artificial Sequence
  ENSG00000118113_15 (sequence is synthesized)
aaatgtcctatgtatatcttctacatgcaatttagaactagattttggttagaagtaaggattataaacaacctagacagtacccttggcctttacagaaaatatggtgctgttttctac

SEQ ID NO: 225371 - DNA, 120 bp, Artificial Sequence
  ENSG00000118113_16 (sequence is synthesized)
ccttggaaagaaatgtagatgatatgtttcgtgggttgaattgtgtcccccataaaagatatgttgaagttctaaccccaggtacccatgaatgtgagcttaccagggtctttgcagatg

SEQ ID NO: 225372 - DNA, 120 bp, Artificial Sequence
  ENSG00000118113_17 (sequence is synthesized)
taattagttaagttaaggtgagatcacactgaattagggtgggctctaaatccattatgactgttgttcttataagaagaagagaggcatagtcacctaggggaggaggccgtatgaaga

SEQ ID NO: 225373 - DNA, 120 bp, Artificial Sequence
  ENSG00000118113_18 (sequence is synthesized)
cagaggcagagattggagtgacgcatctccaagccaaggaattccaaggactgtaagccaccagtagaagctttgaagaggcaaggaaggattccctccaatagccttcaagtgtgaccc

SEQ ID NO: 225374 - DNA, 120 bp, Artificial Sequence
  ENSG00000118113_19 (sequence is synthesized)
tgctgacacctgcagaattcggacttctatcctccaaaaccgtgagggaataaatttcctttgttttaagccaccaactttgcaatactttgttacagcaaccctagacatgaggtacta

SEQ ID NO: 225375 - DNA, 120 bp, Artificial Sequence
  ENSG00000118113_20 (sequence is synthesized)
gacacagtacatctacacatatgaaaatgaatcaacacagaatgcagaagtagaacccttgctaaggactactgggcatcttcccaggacagcagccaaaagagaaccaccacttcctct

SEQ ID NO: 225376 - DNA, 120 bp, Artificial Sequence
  ENSG00000118113_21 (sequence is synthesized)
cctgcctcctccttgctctctcctagagtccaaacccaaatgggccagttggatctgatgttcgtcagttctttacttctatttcctggggtactcaggagggcacacactatagataac

SEQ ID NO: 225377 - DNA, 120 bp, Artificial Sequence
  ENSG00000118113_22 (sequence is synthesized)
ttgggttagctgcataaaattcaatgtctcattaagttgcattaaactgagcttagatgtgtaagtttgctaacggatgggtttttttgttaagaactataggatttatgggaccaagtc

SEQ ID NO: 225378 - DNA, 120 bp, Artificial Sequence
  ENSG00000118113_23 (sequence is synthesized)
agtctagcgagtccagatatcaaaatcattataatgttatatttgctgttattagaatataatatagcttattatacaataaatatgtagactgtaaaatatatttctcactagtacctc

SEQ ID NO: 225379 - DNA, 120 bp, Artificial Sequence
  ENSG00000118113_24 (sequence is synthesized)
tttctttctctgttgaagtttttaaatcccacagataattaaattggcacctttatgcttgttcaaaaattaaaataatctattaaataagttcaaattaaagatttttacttcaaatga

SEQ ID NO: 225380 - DNA, 120 bp, Artificial Sequence
  ENSG00000118113_25 (sequence is synthesized)
gacttcccagcctccagaattaataaataagccttttctacagtagtgaagaggataaaaaagaggaactgcactgatgcaacaaatacctcaagagaagtcaattaatgactacctgga

SEQ ID NO: 225381 - DNA, 120 bp, Artificial Sequence
  ENSG00000118137_0 (sequence is synthesized)
cacaatggacaatggcaactgcccacacactcccatggaggggaaggggatgagtgcagggaaccccgaccccacccgggagacctgcaagcctgcagacactcccctcccgcccccact

SEQ ID NO: 225382 - DNA, 120 bp, Artificial Sequence
  ENSG00000118137_1 (sequence is synthesized)
gaacccttgacccctgccctgcagcccccgcagcttgctgtttgcccactctatttgcccagccccagggacagagctgatccttgaactcttaagttccacattgccaggaccagtgag

SEQ ID NO: 225383 - DNA, 120 bp, Artificial Sequence
  ENSG00000118137_2 (sequence is synthesized)
cagcaacagggccggggctgggcttatcagcctcccagcccagaccctggctgcagacataaataggccctgcaagagctggctgcttagagactgcgagaaggaggtcccccacggccc

SEQ ID NO: 225384 - DNA, 120 bp, Artificial Sequence
  ENSG00000118137_3 (sequence is synthesized)
ttcaggatgaaagctgcggtgctgaccttggccgtgctcttcctgacggggagccaggctcggcatttctggcagcaagatgaacccccccagagcccctgggatcgagtgaaggacctg

SEQ ID NO: 225385 - DNA, 120 bp, Artificial Sequence
  ENSG00000118137_4 (sequence is synthesized)
gccactgtgtacgtggatgtgctcaaagacagcggcagagactatgtgtcccagtttgaaggctccgccttgggaaaacagctaaacctaaagctccttgacaactgggacagcgtgacc

SEQ ID NO: 225386 - DNA, 120 bp, Artificial Sequence
  ENSG00000118137_5 (sequence is synthesized)
ctcggccctgtgacccaggagttctgggataacctggaaaaggagacagagggcctgaggcaggagatgagcaaggatctggaggaggtgaaggccaaggtgcagccctacctggacgac

SEQ ID NO: 225387 - DNA, 120 bp, Artificial Sequence
  ENSG00000118137_6 (sequence is synthesized)
ttccagaagaagtggcaggaggagatggagctctaccgccagaaggtggagccgctgcgcgcagagctccaagagggcgcgcgccagaagctgcacgagctgcaagagaagctgagccca

SEQ ID NO: 225388 - DNA, 120 bp, Artificial Sequence
  ENSG00000118137_7 (sequence is synthesized)
ctgggcgaggagatgcgcgaccgcgcgcgcgcccatgtggacgcgctgcgcacgcatctggccccctacagcgacgagctgcgccagcgcttggccgcgcgccttgaggctctcaaggag

SEQ ID NO: 225389 - DNA, 120 bp, Artificial Sequence
  ENSG00000118137_8 (sequence is synthesized)
aacggcggcgccagactggccgagtaccacgccaaggccaccgagcatctgagcacgctcagcgagaaggccaagcccgcgctcgaggacctccgccaaggcctgctgcccgtgctggag

SEQ ID NO: 225390 - DNA, 120 bp, Artificial Sequence
  ENSG00000118137_9 (sequence is synthesized)
agcttcaaggtcagcttcctgagcgctctcgaggagtacactaagaagctcaacacccagtgaggcgcccgccgccgccccccttcccggtgctcagaataaacgtttccaaagtgggaa

SEQ ID NO: 225391 - DNA, 120 bp, Artificial Sequence
  ENSG00000118137_10 (sequence is synthesized)
cgagaaggaggtgcgtcctgctgcctgccccggtcactctggctccccagctcaaggttcaggccttgccccaggccgggcctctgggtacctgaggtcttctcccgctctgtgcccttc

SEQ ID NO: 225392 - DNA, 120 bp, Artificial Sequence
  ENSG00000118156_0 (sequence is synthesized)
atggaccagtacagccttggagacgagggtgccctcccatcagaaatgcacctcccttcattttcagagagccaagggctcaactgcagcgacaccctcaaccgggatttgggtcccaac

SEQ ID NO: 225393 - DNA, 120 bp, Artificial Sequence
  ENSG00000118156_1 (sequence is synthesized)
acgcgaggctttctttatgctggcctgagtggtctggacccggaccccagcctcccaacgcctgacatgtccagcgaggtgctggaggacaacttagacaccttgtccctgtactccggg

SEQ ID NO: 225394 - DNA, 120 bp, Artificial Sequence
  ENSG00000118156_2 (sequence is synthesized)
aaggacagtgattctgtgaagctgctggaggagtacgcagattcggagtctcaggcatccttacaagacctggggctaggtgtgcttaaggctaaagaggctgacgaaggaggaagggcc

SEQ ID NO: 225395 - DNA, 120 bp, Artificial Sequence
  ENSG00000118156_3 (sequence is synthesized)
acctcggggagtgccaggaaaggaaagcggcagcacagttcccctcaaaacccacttctggactgcagcctgtgcgggaaggtgttcagcagcgccagttctctgagcaagcactacctg

SEQ ID NO: 225396 - DNA, 120 bp, Artificial Sequence
  ENSG00000118156_4 (sequence is synthesized)
acacacagccaggaaaggaagcacgtctgcaaaatctgcagcaaggcctttaagcgccaggaccacctgaccgggcacatgctcacccaccagaagacaaagcccttcgtgtgcatcgag

SEQ ID NO: 225397 - DNA, 120 bp, Artificial Sequence
  ENSG00000118156_5 (sequence is synthesized)
cagggctgcagcaagagctactgcgactaccgctctctgcgccggcactacgaggtccatcacggcctgtgcatcctgaaggaagcccccccggaggaagaggcctgcggggactccccc

SEQ ID NO: 225398 - DNA, 120 bp, Artificial Sequence
  ENSG00000118156_6 (sequence is synthesized)
cccacgagtcggccggccagccgccccccagcagcctgcggtccctggtgcccccagaggccaggtcccccggctccctcctgccccaccgggacctcctgcgccgcatcgtgagtagca

SEQ ID NO: 225399 - DNA, 120 bp, Artificial Sequence
  ENSG00000118156_7 (sequence is synthesized)
agcatcgtccaccagaagaccccttctcctggcccagccccggcgggggcttcagacagcgaagggaggaacactgcctgtccctgccccgcctcatcggggtcctcgtcctgcacccca

SEQ ID NO: 225400 - DNA, 120 bp, Artificial Sequence
  ENSG00000118156_8 (sequence is synthesized)
gccggcccccacgcggccccagcagcgctggacaccgagcttcccgaggagccttgcctcccacagaaagagccggccactgacgtgttcacagcccctaattccagggccgccgagaac

SEQ ID NO: 225401 - DNA, 120 bp, Artificial Sequence
  ENSG00000118156_9 (sequence is synthesized)
ggcgcccccgacccgccagagccggagccagataccgcgctgctccaggcccggtccaccgcggagtgctggcccgaaggcggctccgtgcctgcctgcctgcctctcttccgaggccag

SEQ ID NO: 225402 - DNA, 120 bp, Artificial Sequence
  ENSG00000118156_10 (sequence is synthesized)
acggtccctgccagttcccagccatcgagccacagcttccagtggctccggaacctgccgggctgtcccaaaagcaaaggcaacaacgtgtttgttgtccacaagccctcggccgtgccc

SEQ ID NO: 225403 - DNA, 120 bp, Artificial Sequence
  ENSG00000118156_11 (sequence is synthesized)
tcgcgggagggctccgagtctggcccgggacccagcagcggaagcccctcggaggagtccccgcccggccccggcggtggcctggaggatgctctgcccttccctgccgcgctcctcagg

SEQ ID NO: 225404 - DNA, 120 bp, Artificial Sequence
  ENSG00000118156_12 (sequence is synthesized)
gtccccgcggaggccccgagcgaccccaggtcggccagcggggaagatgacccctgcgcccccaagaaggtcaaggtcgactgcgactccttcctgtgccagaaccccggggagcccggc

SEQ ID NO: 225405 - DNA, 120 bp, Artificial Sequence
  ENSG00000118156_13 (sequence is synthesized)
ctccaggaggcccagaaggcaggcgggctccctgcggatgcctcgccgctcttccgccagctcttcctcaagtcgcaggaacctcttgtgagccacgagcagatgcaggtgttccagatg

SEQ ID NO: 225406 - DNA, 120 bp, Artificial Sequence
  ENSG00000118156_14 (sequence is synthesized)
atcaccaagtcccagcggatcttctcccatgcccaggtggcagcagtctcctcccagctccctgcgcccgagggcaaaccagccgccctgaggccgctgcaggggccgtggccgcagcag

SEQ ID NO: 225407 - DNA, 120 bp, Artificial Sequence
  ENSG00000118156_15 (sequence is synthesized)
cccccaccactggctcctgctgtggactctctccacgccggccctggaaaccccgaggcagagggctccccagcccgcaggagaaaaaccacacccggggttcccagagaggcctccccc

SEQ ID NO: 225408 - DNA, 120 bp, Artificial Sequence
  ENSG00000118156_16 (sequence is synthesized)
ggcagcacgagacgagacgcaaaggggggactgaaagtggccgcggttccaacgccccttgcagcaccgtctctggacccttccaggaatccagacatctcttctctggccaagcagctg

SEQ ID NO: 225409 - DNA, 120 bp, Artificial Sequence
  ENSG00000118156_17 (sequence is synthesized)
cgatcctctaaagggaccttggacctggaggacatcttcccctccacaggccaacggcagacccagttaggtggggaggagccaccaggagcctcgctgccagggaagcaggccccagcc

SEQ ID NO: 225410 - DNA, 120 bp, Artificial Sequence
  ENSG00000118156_18 (sequence is synthesized)
gagaatggcgcggcttcaaggatcacaaaaggtgaaaagggcccagcctgctcccggggtggaggctaccggctcttgggcaaccccagggccccgcgattctccggcttccggaaagag

SEQ ID NO: 225411 - DNA, 120 bp, Artificial Sequence
  ENSG00000118156_19 (sequence is synthesized)
ctgtgcggcttctccgagccaggtagccatggcctccttctcatcggccgggcccccggcagatccctccaagtccaagctgacaatattcagcagaatccagggtggaaacatctacag

SEQ ID NO: 225412 - DNA, 120 bp, Artificial Sequence
  ENSG00000118156_20 (sequence is synthesized)
gctcccccatccggtgaaggaagagaatgtggcaggcagaggtaaccagcaaaacggcagtcccacagactggacgaagcccaggagcacttttgtctgcaagaactgcagccagatgtt

SEQ ID NO: 225413 - DNA, 120 bp, Artificial Sequence
  ENSG00000118156_21 (sequence is synthesized)
ttatacggagaaagggctgagcagccacatgtgttttcacagcgaccagtggccgtcacctcgagggaagcaggaaccgcaggtgtttggcacagagttttgcaagccgctaagacaggt

SEQ ID NO: 225414 - DNA, 120 bp, Artificial Sequence
  ENSG00000118156_22 (sequence is synthesized)
gctgaggccagaaggggacaggcatagtcccccaggaaccaagaagcccttggaccccacagctgcagcccctttggtggtcccccaatcgatccccgtggttccagtgacccgacacat

SEQ ID NO: 225415 - DNA, 120 bp, Artificial Sequence
  ENSG00000118156_23 (sequence is synthesized)
agggagcatggccatgggacaagagaaagacggggaggagcgagacagcaaggagagcagccagcagagaaagcggaagaagcggcccccaccctccacggctggggagcctggccctgc

SEQ ID NO: 225416 - DNA, 120 bp, Artificial Sequence
  ENSG00000118156_24 (sequence is synthesized)
aggatgccaccagagccgcctgcggtcacccatgttcctggtggactgcctcctgaagggcttattccagtgctccccctacacaccacccccaatgctcagccccatccgggagggctc

SEQ ID NO: 225417 - DNA, 120 bp, Artificial Sequence
  ENSG00000118156_25 (sequence is synthesized)
tggggtgtacttcaacaccctctgttccacgtccactcaggccagccctgaccagctcatcagctccatgctcgatcaagtggatgggtcctttggcatctgtgtggtgaaggatgacac

SEQ ID NO: 225418 - DNA, 120 bp, Artificial Sequence
  ENSG00000118156_26 (sequence is synthesized)
caaaatcagcattgagccacatatcaatataggaagccggtttcaggcagagatcccggaactccaggagagatccctggctggaactgacgagcatgtagcttctctggtctggaagcc

SEQ ID NO: 225419 - DNA, 120 bp, Artificial Sequence
  ENSG00000118156_27 (sequence is synthesized)
atggggagatatgatgatcagctcagagacacaggatagagtgaccgagctctgcaatgtggcatgctccagcgtgatgccaggagggggcaccaacctggagctcgctctgcactgcct

SEQ ID NO: 225420 - DNA, 120 bp, Artificial Sequence
  ENSG00000118156_28 (sequence is synthesized)
gcacgaggctcagggcaacgttcaggtcgccctggagactcttctgctccgagggccccacaagccacggacacacctgctcgctgactatcgctacacaggttcagacgtctggacccc

SEQ ID NO: 225421 - DNA, 120 bp, Artificial Sequence
  ENSG00000118156_29 (sequence is synthesized)
tatagagaagaggctttttaagaaggcgttctatgcccacaagaaggacttctacttgatacacaagatgatccagacaaagacggtagctcagtgcgttgagtattattacatctggaa

SEQ ID NO: 225422 - DNA, 120 bp, Artificial Sequence
  ENSG00000118156_30 (sequence is synthesized)
aaaaatgatcaagtttgactgtggccgagccccagggctagaaaagagggtcaagagagagccggaggaagtggaaaggacagaggaaaaggtcccatgcagccctcgggagagacccag

SEQ ID NO: 225423 - DNA, 120 bp, Artificial Sequence
  ENSG00000118156_31 (sequence is synthesized)
ccaccatccaactcccaagttaaagaccaagagttataggagggagtccatcctcagctccagcccaaatgcaggctccaagcggacccccgagctgttgggaagtgcagagagccaggg

SEQ ID NO: 225424 - DNA, 120 bp, Artificial Sequence
  ENSG00000118156_32 (sequence is synthesized)
catttttccatgcagagagtgtgaaagggtgtttgacaagatcaagagtcgaaatgcccatatgaagcggcaccgccttcaggaccacgtggagcccatcatcagggtgaagtggccagt

SEQ ID NO: 225425 - DNA, 120 bp, Artificial Sequence
  ENSG00000118156_33 (sequence is synthesized)
gaagcccttccagctaaaggaagaggagctgggagctgacatcggccccctgcagtggtgactcccgtggcagcaagtccgaatggggcctccagtgctgcccctcctcccttcggcctc

SEQ ID NO: 225426 - DNA, 120 bp, Artificial Sequence
  ENSG00000118156_34 (sequence is synthesized)
tccagggcgtttggggcacccctctgcctccccccaccctccctgtcccctgttggccaacctgcctgcaaacatggagggcatttggccacagataggcaggaggagctcagttgtcgg

SEQ ID NO: 225427 - DNA, 120 bp, Artificial Sequence
  ENSG00000118156_35 (sequence is synthesized)
acagctatgcagtccctgtccggtggtgctggaggctccactctccttaggttcatagtctctccccttctttcccttccacttctagagcagggaggcttggggaggggaaaatttagc

SEQ ID NO: 225428 - DNA, 120 bp, Artificial Sequence
  ENSG00000118156_36 (sequence is synthesized)
tctgggtagctcttaaatcttagcctcagttgtggggtttggtttcatgtgttagataaggccaagacttagagaatcagtgggaaaaaaccttgagatctccaacacgctgggcccctc

SEQ ID NO: 225429 - DNA, 120 bp, Artificial Sequence
  ENSG00000118156_37 (sequence is synthesized)
cctggggcggggactctaccttccagattcagtccctagtcttgcgatgaattctgcattgttcggtgttttttgtacatgtcaactcgtaaatctgattaaattgggttcttgagctgc

SEQ ID NO: 225430 - DNA, 120 bp, Artificial Sequence
  ENSG00000118160_0 (sequence is synthesized)
agtctcaggcttttctctctctcaatctctctctctctttcgggcggagtcgcccaccactgccagcccagcgctggggggacctgctccaggctgtagccgcaggaccccaccaccccc

SEQ ID NO: 225431 - DNA, 120 bp, Artificial Sequence
  ENSG00000118160_1 (sequence is synthesized)
catggctcccctggccttggtgggggtcacactcctcctggcggctcccccatgctccggggcagccaccccaaccccctccctgccgcctcccccggccaatgacagcgacaccagcac

SEQ ID NO: 225432 - DNA, 120 bp, Artificial Sequence
  ENSG00000118160_2 (sequence is synthesized)
agggggctgccaggggtcctaccgctgccagccgggggtgctgctgcccgtgtgggagcccgacgacccgtcgctgggtgacaaggcggcacgggcagtggtgtactttgtggccatggt

SEQ ID NO: 225433 - DNA, 120 bp, Artificial Sequence
  ENSG00000118160_3 (sequence is synthesized)
ctacatgtttctgggagtgtccatcatcgccgaccgtttcatggcggccatcgaggtcatcacgtcaaaagagaaggagatcaccatcaccaaggccaacggtgagaccagcgtgggcac

SEQ ID NO: 225434 - DNA, 120 bp, Artificial Sequence
  ENSG00000118160_4 (sequence is synthesized)
cgttcgcatctggaatgagacggtgtccaacctcacgctcatggccctgggctcctccgcacctgagatcctgctgtcagtcatcgaagtctgcggccacaacttccaggcgggtgagct

SEQ ID NO: 225435 - DNA, 120 bp, Artificial Sequence
  ENSG00000118160_5 (sequence is synthesized)
gggcccaggcaccatcgtgggcagcgctgccttcaacatgtttgtggtcatcgccgtgtgcatctacgtcatcccagccggcgagagccgcaagatcaagcacctgagagtcttctttgt

SEQ ID NO: 225436 - DNA, 120 bp, Artificial Sequence
  ENSG00000118160_6 (sequence is synthesized)
cactgcctcttggagcatcttcgcctatgtctggctttatctcatccttgctgttttttcccccggtgtggtccaggtgtgggaggcgctgctgaccctggtcttcttcccggtgtgcgt

SEQ ID NO: 225437 - DNA, 120 bp, Artificial Sequence
  ENSG00000118160_7 (sequence is synthesized)
ggtattcgcctggatggccgacaagcggctgctcttctacaagtacgtgtacaagcgctaccgcaccgacccacgcagcggcatcatcataggcgccgagggcgaccccccgaagagcat

SEQ ID NO: 225438 - DNA, 120 bp, Artificial Sequence
  ENSG00000118160_8 (sequence is synthesized)
cgagctggacggcacgttcgtgggcgccgaggccccaggtgagctgggcggcctgggcccgggccccgccgaggcgcgcgagctggacgccagccgccgcgaggtcatccagatcctcaa

SEQ ID NO: 225439 - DNA, 120 bp, Artificial Sequence
  ENSG00000118160_9 (sequence is synthesized)
ggacctcaagcagaagcacccggacaaggatctggagcagctggtgggcatcgccaactactacgcgctgctgcaccagcagaagagccgcgccttctaccgcatccaggccacgcggct

SEQ ID NO: 225440 - DNA, 120 bp, Artificial Sequence
  ENSG00000118160_10 (sequence is synthesized)
gatgaccggcgccgggaacgtgctgcgcagacacgcggcggacgcctcgcgcagggcggcgccggccgagggcgcgggcgaggacgaagacgacggcgccagccgcatcttcttcgagcc

SEQ ID NO: 225441 - DNA, 120 bp, Artificial Sequence
  ENSG00000118160_11 (sequence is synthesized)
tagcctctaccactgcctggagaactgcggctccgtgctgctgtccgtcacgtgccagggcggcgagggcaacagcaccttctacgtggactaccgcactgaggacggctctgccaaggc

SEQ ID NO: 225442 - DNA, 120 bp, Artificial Sequence
  ENSG00000118160_12 (sequence is synthesized)
gggctccgactacgagtacagcgagggcacgctggtgttcaaaccaggcgagacgcagaaggagctgcgcatcggcatcatcgacgacgacatcttcgaggaggacgagcatttcttcgt

SEQ ID NO: 225443 - DNA, 120 bp, Artificial Sequence
  ENSG00000118160_13 (sequence is synthesized)
gcggctgctgaacctgcgcgtgggcgacgcgcagggcatgttcgagccggacggcggcgggcggcccaaggggcggctggtggcgccgctgctggccaccgtcaccatcctggacgacga

SEQ ID NO: 225444 - DNA, 120 bp, Artificial Sequence
  ENSG00000118160_14 (sequence is synthesized)
ccacgcaggcatcttctccttccaggaccgcctgctgcacgtgagcgagtgcatgggcaccgtggacgtgcgcgtcgtgcgcagctcgggcgcgcgcggcaccgtgcgccttccctaccg

SEQ ID NO: 225445 - DNA, 120 bp, Artificial Sequence
  ENSG00000118160_15 (sequence is synthesized)
cacggtggacggcacggcgcgcggcggcggcgtgcactacgaggacgcgtgcggagagctggagtttggcgacgacgagaccatgaaaactcttcaggtgaagatagttgatgacgagga

SEQ ID NO: 225446 - DNA, 120 bp, Artificial Sequence
  ENSG00000118160_16 (sequence is synthesized)
atatgagaaaaaggataatttcttcattgagctgggccagccccagtggcttaagcgagggatttcagctctgctactcaatcaaggggatggggacaggaagctaacagccgaggagga

SEQ ID NO: 225447 - DNA, 120 bp, Artificial Sequence
  ENSG00000118160_17 (sequence is synthesized)
ggaggctcggaggatagcagagatgggcaagccagttcttggggagaactgccggctggaggtcatcatcgaggagtcatatgattttaagaacacggtggataaactcatcaagaaaac

SEQ ID NO: 225448 - DNA, 120 bp, Artificial Sequence
  ENSG00000118160_18 (sequence is synthesized)
gaacttggccttggtaattgggacccattcatggagggagcagtttttagaggcaattacggtgagcgcaggggacgaggaggaggaggaggacgggtcccgggaggagcggctgccgtc

SEQ ID NO: 225449 - DNA, 120 bp, Artificial Sequence
  ENSG00000118160_19 (sequence is synthesized)
gtgctttgactacgtgatgcacttcctgacggtgttctggaaggtgctcttcgcctgtgtgccccccaccgagtactgccacggctgggcctgctttggtgtctccatcctggtcatcgg

SEQ ID NO: 225450 - DNA, 120 bp, Artificial Sequence
  ENSG00000118160_20 (sequence is synthesized)
cggctgcaccgttggcctcaaggactctgtcaatgctgttgtcttcgttgccctgggcacctccatccctgacacgttcgccagcaaggtggcggcgctgcaggaccagtgcgccgacgc

SEQ ID NO: 225451 - DNA, 120 bp, Artificial Sequence
  ENSG00000118160_21 (sequence is synthesized)
gtccatcggcaacgtgaccggctccaacgcggtgaacgtgttccttggcctgggcgtcgcctggtctgtggccgccgtgtactgggcggtgcagggccgccccttcgaggtgcgcactgg

SEQ ID NO: 225452 - DNA, 120 bp, Artificial Sequence
  ENSG00000118160_22 (sequence is synthesized)
cacgctggccttctccgtcacgctcttcaccgtcttcgccttcgtgggcattgccgtgctgctgtaccggcgccggccgcacatcggcggcgagctgggcggcccgcgcggacccaagct

SEQ ID NO: 225453 - DNA, 120 bp, Artificial Sequence
  ENSG00000118160_23 (sequence is synthesized)
cgccaccaccgcgctcttcctgggcctctggctcctgtacatcctcttcgccagcctggaggcgtactgccacatccggggcttctagggcctcgcgcagagactcgtccccaccgcccg

SEQ ID NO: 225454 - DNA, 120 bp, Artificial Sequence
  ENSG00000118160_24 (sequence is synthesized)
cccggggctagggactcggctgcacctgctcttggaccctggtctccttttccccccagactcggcctcctctcctgggactcggcctcccttctccgccccctcccctggctttgattg

SEQ ID NO: 225455 - DNA, 120 bp, Artificial Sequence
  ENSG00000118160_25 (sequence is synthesized)
ccctgttctgtgtccccagtagctcagccttccctcttcctctcgggagcctccccggttcctcccctgcggtgaccccaactccagcccatcctgttggtgaccgtctatatccctggg

SEQ ID NO: 225456 - DNA, 120 bp, Artificial Sequence
  ENSG00000118160_26 (sequence is synthesized)
gaaatttccaccccagtcccctccccagggaaccacccccagtaaccatcctggggagtttaaggtctctctccttggtcacccagcctggctttgcccccaaagtctcccttcccctag

SEQ ID NO: 225457 - DNA, 120 bp, Artificial Sequence
  ENSG00000118160_27 (sequence is synthesized)
tgaccccccccccacttcaccccatgtcccagagcctcagaacccaccctccctgggggaccctcgaaggaggctgtcagaggccgtctcagctcccagcccttccccccagccctcagg

SEQ ID NO: 225458 - DNA, 120 bp, Artificial Sequence
  ENSG00000118160_28 (sequence is synthesized)
gagctccgctcagccccggcggggaggagcgggtgggtgtgcgcgcaaggaggccgcacaccgttccttccaatccctccactcgggttcttgggaggacactcattctccaggctcgga

SEQ ID NO: 225459 - DNA, 120 bp, Artificial Sequence
  ENSG00000118160_29 (sequence is synthesized)
gacgaggggagaagtttggggtttcagtcccagggcttagccggaggaagcacattttgaacctgcaacttcagacattccagctcccccactcgccctccactacctctgagagcccag

SEQ ID NO: 225460 - DNA, 120 bp, Artificial Sequence
  ENSG00000118160_30 (sequence is synthesized)
ccacgccttggagggaggggcttgtgtgtgtatatagtgtgtttgggggaggggggacgcgggagggtgcatgtcttgggaaaagggggtgacagacaacttttgagagggcagcagact

SEQ ID NO: 225461 - DNA, 120 bp, Artificial Sequence
  ENSG00000118160_31 (sequence is synthesized)
ccctcagccatgagaaccagctttggggaggaggccgggaatcaaagcgagtccagttgatctcccctgacaatctggaaggttccttttgccctcagtgccagccaatccgggcaggac

SEQ ID NO: 225462 - DNA, 120 bp, Artificial Sequence
  ENSG00000118160_32 (sequence is synthesized)
cctcgaagaggagaccgagggtcccagaggaccaatgctacaagccagcaaatgctgccacatctctgcctgatggggggtggggatgggtggggggatgggactgggccaagggatctg

SEQ ID NO: 225463 - DNA, 120 bp, Artificial Sequence
  ENSG00000118160_33 (sequence is synthesized)
ggtgggcatttttaactttggaggccttccatctgtcggtaggccatctgcattttcttactgttgatgtttcctgcccaaaggacacatttgggcagtgccacccactccttgggcccc

SEQ ID NO: 225464 - DNA, 120 bp, Artificial Sequence
  ENSG00000118160_34 (sequence is synthesized)
taggatgacccaactacccccataactttctgcttcccacaggttttcagcattctatcgtcctgttgtgctcagccccaacatcccagacccgttacccactacccttctctcccccag

SEQ ID NO: 225465 - DNA, 120 bp, Artificial Sequence
  ENSG00000118160_35 (sequence is synthesized)
ctcatcatcagtcgctgtctcttttctgtgatttctgtaaaagttgccataaaactttgaaattctgcctgaaaaacagtcccgtgggaagctgggattcaggaggagggggctaataag

SEQ ID NO: 225466 - DNA, 120 bp, Artificial Sequence
  ENSG00000118160_36 (sequence is synthesized)
gtctctgactgagatttgggcaactgttaaaccaagtaatctgggtttttgcggcccgcggtcgtctgcgggacacacccacatatagcagcagcgccggggtccagccgccaagctctt

SEQ ID NO: 225467 - DNA, 120 bp, Artificial Sequence
  ENSG00000118160_37 (sequence is synthesized)
ccactcgccacgcccccatcagtaatgagcttccactagccacgcccccatccgtcagcctagctcttccactagccacacccccatccatcagtcatgggcttccacaagccacgcacc

SEQ ID NO: 225468 - DNA, 120 bp, Artificial Sequence
  ENSG00000118160_38 (sequence is synthesized)
tccactctccatgcccccattcgtcagtcgtgggtttccactaaccacgcccccattcatcagccaagctcctccacttgctacgcccgcatccgtcaattacgggtttccactaaccac

SEQ ID NO: 225469 - DNA, 120 bp, Artificial Sequence
  ENSG00000118160_39 (sequence is synthesized)
gcccccattcatcagcctagctcttccactaatcacacccccacttatcagtcgtgcttcagccacgccttcctgcttcagtcaggggcttccactagccacgcccccatgcatgagcca

SEQ ID NO: 225470 - DNA, 120 bp, Artificial Sequence
  ENSG00000118160_40 (sequence is synthesized)
caaactgtttctctttatgggcatcctgggaacacaaaagagagacgttcatttgcctgagccaaagagctggggttgatggggtttcctaaataaagcaagtaattttctcagatccta

SEQ ID NO: 225471 - DNA, 120 bp, Artificial Sequence
  ENSG00000118160_41 (sequence is synthesized)
aagggattctgggaaagaagttcattcaatgggacttgctgtcaggaagttagacaaaatggggcctctgtaggcaaggaaggaagtctgagtgtatgccccagctgggtcgtgtgccca

SEQ ID NO: 225472 - DNA, 120 bp, Artificial Sequence
  ENSG00000118160_42 (sequence is synthesized)
gacgtgggcggggcttcactgaacagctgggccctcaggaggagaggggcctgagtgaatcgttctccaaagtgggcttggcctcgggaggggcggggcctaggtgtgctgtgtctacca

SEQ ID NO: 225473 - DNA, 120 bp, Artificial Sequence
  ENSG00000118160_43 (sequence is synthesized)
tcaatctctctctctctttcgggcggagtcgcccaccactgccagcccagcgctggggggacctgctccaggctgtagccgcaggtgtgggaggcgctgctgaccctggtcttcttcccg

SEQ ID NO: 225474 - DNA, 120 bp, Artificial Sequence
  ENSG00000118160_44 (sequence is synthesized)
agtctcaggcttttctctctctcaatctctctctctctttcgggcggagtcgcccaccactgccagcccagcgctggggggacctgctccaggctgtagccgcaggcggcacgggcagtg

SEQ ID NO: 225475 - DNA, 120 bp, Artificial Sequence
  ENSG00000118162_0 (sequence is synthesized)
gtaggttgggtagtgcgggttggggcgggggctgcggagagggtgcttaactgaggggcatgatgggggaggcggccgtggccgcggggccttgtccgttgcgcgaggacagcttcacgc

SEQ ID NO: 225476 - DNA, 120 bp, Artificial Sequence
  ENSG00000118162_1 (sequence is synthesized)
gcttctcgtcgcagagcaatgtgtacgggctggcaggcggcgccggcgggcgcggggagctgctggccgccacccttaaaggcaaggtgctcggcttccgctaccaagacctccgacaga

SEQ ID NO: 225477 - DNA, 120 bp, Artificial Sequence
  ENSG00000118162_2 (sequence is synthesized)
aaatccggccagtggccaaggagctgcagttcaactacattcccgtggatgcggagattgtctccatcgacactttcaacaagtcaccccccaagcggggtctggttgtggggatcacgt

SEQ ID NO: 225478 - DNA, 120 bp, Artificial Sequence
  ENSG00000118162_3 (sequence is synthesized)
tcatcaaggattcaggggacaagggcagccccttcctgaacatttactgcgactacgagcccggctctgagtacaaccttgactctattgcccagagctgcctgaacctggagctccagt

SEQ ID NO: 225479 - DNA, 120 bp, Artificial Sequence
  ENSG00000118162_4 (sequence is synthesized)
tcactccgttccagctgtgccatgcggaggtccaggtcggggatcaacttgagactgtgtttctcttgagtgggaacgacccggccattcatctctacaaggagaacgaggggctgcatc

SEQ ID NO: 225480 - DNA, 120 bp, Artificial Sequence
  ENSG00000118162_5 (sequence is synthesized)
agtttgaggaacagcccgtggaaaacctcttcccagagctgacgaacctgaccagtagcgtcctctggctggacgtccacaacttccccggcacgtcccggcgcctctcagctctgggct

SEQ ID NO: 225481 - DNA, 120 bp, Artificial Sequence
  ENSG00000118162_6 (sequence is synthesized)
ggacggtcccatctcccgagtgattgtgttcagcctctcggccgccaaggagaccaaggacaggccactacaagatgagtacagcgtgctcgtggccagcatgttggagccagcagtggt

SEQ ID NO: 225482 - DNA, 120 bp, Artificial Sequence
  ENSG00000118162_7 (sequence is synthesized)
gtatcgggacctgctgaaccggggtcttgaagaccagcttctcctgcccggcagtgaccagtttgacagcgtcctctgcagcctggtcaccgatgtggatttggatgggcggccagaagt

SEQ ID NO: 225483 - DNA, 120 bp, Artificial Sequence
  ENSG00000118162_8 (sequence is synthesized)
cctggtggccacctatggacaggaactgctgtgttataagtaccggggcccagagtcggggcttcctgaggcccagcacgggttccatctgctgtggcagcggagcttctccagtcccct

SEQ ID NO: 225484 - DNA, 120 bp, Artificial Sequence
  ENSG00000118162_9 (sequence is synthesized)
gctggccatggctcacgtggacctgaccggggatgggctgcaggagcttgccgtggtctccctgaagggcgtgcacatcctgcagcacagcctgattcaggcctcagagctggtcttgac

SEQ ID NO: 225485 - DNA, 120 bp, Artificial Sequence
  ENSG00000118162_10 (sequence is synthesized)
ccggcttcgacatcaagtggagcagaggagacgtcggctacaggggttggaggacggggcaggtgcagggcctgctgagaatgcagcctcttaagcacccatgcacccactcttcccaga

SEQ ID NO: 225486 - DNA, 120 bp, Artificial Sequence
  ENSG00000118162_11 (sequence is synthesized)
cctggggcgactcatggcgtgctcacctccagccgctggtggggggtgtcctgaaggacaggatgctctccccagacctccccagggtggtgaagctgtgccctggggccccagctaacc

SEQ ID NO: 225487 - DNA, 120 bp, Artificial Sequence
  ENSG00000118162_12 (sequence is synthesized)
cactcctctctctgtacgtcaatgtccctatttgaaagcagggatgatcccattccaccctgtccactctggatgagaattggccacctgatggttatttatacgtccagaagaacatca

SEQ ID NO: 225488 - DNA, 120 bp, Artificial Sequence
  ENSG00000118162_13 (sequence is synthesized)
aaaacctcttcccagagctgacgaacctgaccagtaggtaggagaggccccgaaagaggccactggggaccggggcactgacatcagagaaatcgggcggtgagaccttagagaaattgg

SEQ ID NO: 225489 - DNA, 120 bp, Artificial Sequence
  ENSG00000118162_14 (sequence is synthesized)
tcaccggggaggagctcagaaaaatcagtccacggcatgacttcagagaaattgatcagcaggggtgaccccagaaaaaacaagaggtggactcagccctcgggtggtgagaattgacct

SEQ ID NO: 225490 - DNA, 120 bp, Artificial Sequence
  ENSG00000118181_0 (sequence is synthesized)
ctttttgtccgacatcttgacgaggctgcggtgtctgctgctattctccgagcttcgcaatgccgcctaaggacgacaagaagaagaaggacgctggaaagtcggccaagaaagacaaag

SEQ ID NO: 225491 - DNA, 120 bp, Artificial Sequence
  ENSG00000118181_1 (sequence is synthesized)
acccagtgaacaaatccgggggcaaggccaaaaagaagaagtggtccaaaggcaaagttcgggacaagctcaataacttagtcttgtttgacaaagctacctatgataaactctgtaagg

SEQ ID NO: 225492 - DNA, 120 bp, Artificial Sequence
  ENSG00000118181_2 (sequence is synthesized)
ttcccaactataaacttataaccccagctgtggtctctgagagactgaagattcgaggctccctggccagggcagcccttcaggagctccttagtaaaggacttatcaaactggtttcaa

SEQ ID NO: 225493 - DNA, 120 bp, Artificial Sequence
  ENSG00000118181_3 (sequence is synthesized)
agcacagagctcaagtaatttacaccagaaataccaagggtggagatgctccagctgctggtgaagatgcatgaataggtccaaccagctgtacatttggaaaaataaaactttattaaa

SEQ ID NO: 225494 - DNA, 120 bp, Artificial Sequence
  ENSG00000118181_4 (sequence is synthesized)
ggcaaggccaaaaagaaggatcatgaaaatgggtctgttgtgcgaagtgtctgccgctgtgcctgctgtgttatttttaactgatctagtggggctcggcccctgtttgaaggccaaaaa

SEQ ID NO: 225495 - DNA, 120 bp, Artificial Sequence
  ENSG00000118181_5 (sequence is synthesized)
tcccgcgccccccgtgcagccacctgctgcacttgcgcactgggagcgacacgctcgggcataagtagtgccggaaagttagctgccgagacctggtggattgcttttcgtttatcagtg

SEQ ID NO: 225496 - DNA, 120 bp, Artificial Sequence
  ENSG00000118181_6 (sequence is synthesized)
caggaaaacagcgctatagtatgcgtcacaactagcgcagactccggcagtatttaggcggtgcggcttgggaactagaatccacttcctgtcttccgcctcaggctagagggcgagcgc

SEQ ID NO: 225497 - DNA, 120 bp, Artificial Sequence
  ENSG00000118181_7 (sequence is synthesized)
catcttgacgaggctgcggtgtctgctgctattctccgagcttcgcaatggtaagcttcaggggtgtgaagtcgccggcgttcttgggtttgaggactcagtggggagagccttcggcgg

SEQ ID NO: 225498 - DNA, 120 bp, Artificial Sequence
  ENSG00000118181_8 (sequence is synthesized)
gagcgctccttggcctgccggcctcggttgcagggcgggcgcggttattgcttggcccatgtgctctggtggtggagtttgcgggggctgagggcgcagtattaggggactttggcgcta

SEQ ID NO: 225499 - DNA, 120 bp, Artificial Sequence
  ENSG00000118181_9 (sequence is synthesized)
aagacctctctgaaagagactaggggtaactctctcgtaatcctctagtaataggtaacttgtatagtaagtggtttttcaggtgtagatttctagagtcaaaatgtgagagtttatctt

SEQ ID NO: 225500 - DNA, 120 bp, Artificial Sequence
  ENSG00000118181_10 (sequence is synthesized)
cccgtcaccactcgttctttttcccattaggatcatgaaaatgggtctgttgtgcgaagtgtctgccgctgtgcctgctgtgttatttttaactgatctagtggggctcggcccctgttt

SEQ ID NO: 225501 - DNA, 120 bp, Artificial Sequence
  ENSG00000118181_11 (sequence is synthesized)
gaaggccaaaaacgtgtcggtgttttttttttgtttttgttttagtaatgtgtaatttatccttgataacggtggaacagatttctctgacgcagattactcgagagggaaagggtgctt

SEQ ID NO: 225502 - DNA, 120 bp, Artificial Sequence
  ENSG00000118193_0 (sequence is synthesized)
attcaaattgcggccttctggggagccggcgctggaggtggtgagtggcgtggggactgtgtcgagggggtccccaaggtgccggaccctgcggaggggcgaagtttcggcactggggag

SEQ ID NO: 225503 - DNA, 120 bp, Artificial Sequence
  ENSG00000118193_1 (sequence is synthesized)
ggcgtgcggacgctttccctacaggcgaccactgctctgcgggcgggtggtcttagctccagtcccccattcagttcctcagcattccaggtcggcggcgaaggggtccccgaacgaagg

SEQ ID NO: 225504 - DNA, 120 bp, Artificial Sequence
  ENSG00000118193_2 (sequence is synthesized)
gcgcaaggcagcgtctctgctgggaccgggaagccggacttcagggcctctcggcccgtgggcttctccccgagtctccccgagtcggttggcattaagagtttagcagatactttcaga

SEQ ID NO: 225505 - DNA, 120 bp, Artificial Sequence
  ENSG00000118193_3 (sequence is synthesized)
aatggatacataagaaatggctggaaatcaaatgaatgtccaaagaagagcttagggtcttagtaacattcttttttaaaataactgtctgccaaaatgtcattacacagtactcataat

SEQ ID NO: 225506 - DNA, 120 bp, Artificial Sequence
  ENSG00000118193_4 (sequence is synthesized)
agaaataacagcggtgatattcttgatattccttcttcccaaaatagttcatcactgaatgccctcacccacagtagccgacttaagctgcatttgaagtcggatatgtcagaatgtgaa

SEQ ID NO: 225507 - DNA, 120 bp, Artificial Sequence
  ENSG00000118193_5 (sequence is synthesized)
aatgatgatccattattgagatctgcaggtaaagtcagagacataaatagaacttatgttatttctgccagtagaaaaacagcagacatgccccttacccctaatcctgtaggtagattg

SEQ ID NO: 225508 - DNA, 120 bp, Artificial Sequence
  ENSG00000118193_6 (sequence is synthesized)
gcacttcagaggagaactacaaggaacaaagaatcatctttgcttgttagtgagttggaagacacaactgaaaaaacagcagaaacacgtcttacattacaacgtcgtgctaaaacagat

SEQ ID NO: 225509 - DNA, 120 bp, Artificial Sequence
  ENSG00000118193_7 (sequence is synthesized)
tctgcagaaaagtggaaaacagctgaaatagattctgtcaaaatgacactgaatgtgggaggtgaaacagaaaataatggtgtttctaaggaaagtagaacaaatgtaaggattgtaaat

SEQ ID NO: 225510 - DNA, 120 bp, Artificial Sequence
  ENSG00000118193_8 (sequence is synthesized)
aatgctaaaaactcttttgttgcctcttctgtacctttagatgaagatccacaggtcattgaaatgatggctgataagaaatacaaagaaacattttctgcccccagtagagcaaatgaa

SEQ ID NO: 225511 - DNA, 120 bp, Artificial Sequence
  ENSG00000118193_9 (sequence is synthesized)
aatgttgcacttaagtactcaagtaatagaccacccattgcttccctgagtcagactgaagttgttagatcaggacacttgacaacgaaacctactcagagcaagttggatatcaaagtg

SEQ ID NO: 225512 - DNA, 120 bp, Artificial Sequence
  ENSG00000118193_10 (sequence is synthesized)
ttgggaacaggaaacttgtatcatagaagtattgggaaggaaattgcaaaaacttcaaataaatttgggagcttagaaaaaagaacacctacaaaatgtacaacagaacacaaactgaca

SEQ ID NO: 225513 - DNA, 120 bp, Artificial Sequence
  ENSG00000118193_11 (sequence is synthesized)
acaaagtgcagcctgcctcagcttaagagcccagctccatcaatactgaagaatagaatgtctaaccttcaagttaaacaaagaccaaaaagttcctttcttgcaaataaacaggaaaga

SEQ ID NO: 225514 - DNA, 120 bp, Artificial Sequence
  ENSG00000118193_12 (sequence is synthesized)
tccgcagaaaatacaattcttcccgaagaagaaactgtagttcagaacacctctgcaggaaaagaccccttaaaagtagagaatagtcaagtgacagtggcagtacgcgtaagacctttc

SEQ ID NO: 225515 - DNA, 120 bp, Artificial Sequence
  ENSG00000118193_13 (sequence is synthesized)
accaagagagagaagattgaaaaagcatcccaggtagtcttcatgagtgggaaagaaataactgtggaacaccctgacacgaaacaagtttataattttatttatgatgtttcattctgg

SEQ ID NO: 225516 - DNA, 120 bp, Artificial Sequence
  ENSG00000118193_14 (sequence is synthesized)
tcttttgatgaatgtcatcctcactacgctagccagacaactgtctatgagaagctagcagcaccactcctagaaagagccttcgaaggcttcaatacctgtctttttgcttatggtcag

SEQ ID NO: 225517 - DNA, 120 bp, Artificial Sequence
  ENSG00000118193_15 (sequence is synthesized)
actggctctggaaaatcatatacgatgatgggatttagtgaagaaccaggaataattccaagattttgtgaagatcttttttctcaagtagccagaaaacaaacccaagaggtcagctat

SEQ ID NO: 225518 - DNA, 120 bp, Artificial Sequence
  ENSG00000118193_16 (sequence is synthesized)
cacattgaaatgagcttctttgaagtatataatgaaaaaattcacgaccttctggtttgtaaagatgaaaatgggcagagaaagcaaccactgagagtgagggaacatcctgtttatgga

SEQ ID NO: 225519 - DNA, 120 bp, Artificial Sequence
  ENSG00000118193_17 (sequence is synthesized)
ccatatgttgaagcactgtcaatgaacattgtcagttcttacgctgatatccagagttggctagaattgggaaataaacaaagagctactgctgctactggtatgaatgataaaagttcc

SEQ ID NO: 225520 - DNA, 120 bp, Artificial Sequence
  ENSG00000118193_18 (sequence is synthesized)
cgatctcattcagttttcaccctggtgatgacccagaccaagacagaatttgtggaaggggaagaacacgatcacagaataacaagtcgaattaacctaatagatctggcaggcagtgag

SEQ ID NO: 225521 - DNA, 120 bp, Artificial Sequence
  ENSG00000118193_19 (sequence is synthesized)
cgctgctctacggctcacactaatggagatcgactaaaggaaggtgtgagtattaataagtccttgctaactttgggaaaagttatatctgcactttcggaacaagcaaaccaaaggagt

SEQ ID NO: 225522 - DNA, 120 bp, Artificial Sequence
  ENSG00000118193_20 (sequence is synthesized)
gtttttattccttatcgtgaatctgttcttacatggctgttaaaagaaagtctgggtggaaattcaaaaactgcaatgattgctacgattagtcccgctgccagcaacatagaagaaaca

SEQ ID NO: 225523 - DNA, 120 bp, Artificial Sequence
  ENSG00000118193_21 (sequence is synthesized)
ttaagcacacttagatatgctaaccaagcccgtttaatagtcaacattgctaaagtaaatgaagatatgaacgctaagttaattagagaattgaaggcagaaattgcaaagctaaaagct

SEQ ID NO: 225524 - DNA, 120 bp, Artificial Sequence
  ENSG00000118193_22 (sequence is synthesized)
gctcagagaaacagtcggaatattgaccctgaacgatacaggctctgtcggcaagaaataacatccttaagaatgaaactgcatcaacaggagagagacatggcagaaatgcaaagagtg

SEQ ID NO: 225525 - DNA, 120 bp, Artificial Sequence
  ENSG00000118193_23 (sequence is synthesized)
tggaaagaaaagtttgaacaagctgaaaaaagaaaacttcaagaaacaaaagagttacagaaagcaggaattatgtttcaaatggacaatcatttaccaaaccttgttaatctgaatgaa

SEQ ID NO: 225526 - DNA, 120 bp, Artificial Sequence
  ENSG00000118193_24 (sequence is synthesized)
gatccacaactatctgagatgctgctatatatgataaaagaaggaacaactacagttggaaagtataaaccaaactcaagccatgatattcagttatctggggtgctgattgctgatgat

SEQ ID NO: 225527 - DNA, 120 bp, Artificial Sequence
  ENSG00000118193_25 (sequence is synthesized)
cattgtactatcaaaaattttggtgggacagtgagtattatcccagttggggaagcaaagacatatgtaaatggaaaacatattttggaaatcacagtattacgtcatggtgatcgagtg

SEQ ID NO: 225528 - DNA, 120 bp, Artificial Sequence
  ENSG00000118193_26 (sequence is synthesized)
attcttggtggagatcattattttagatttaatcatccagtagaagtccagaaaggaaaaaggccatctggaagagatactcctataagtgagggtccaaaagactttgaatttgcaaaa

SEQ ID NO: 225529 - DNA, 120 bp, Artificial Sequence
  ENSG00000118193_27 (sequence is synthesized)
aatgagttgctcatggcacagagatcacaacttgaagcagaaataaaagaggctcagttgaaggcaaaggaagaaatgatgcaaggaatccagattgcaaaagaaatggctcagcaagag

SEQ ID NO: 225530 - DNA, 120 bp, Artificial Sequence
  ENSG00000118193_28 (sequence is synthesized)
ctttcttctcaaaaagctgcatatgaaagcaaaataaaagcactggaagcagaactgagagaagagtctcaaaggaaaaaaatgcaggaaataaataaccagaaggctaatcacaaaatt

SEQ ID NO: 225531 - DNA, 120 bp, Artificial Sequence
  ENSG00000118193_29 (sequence is synthesized)
gaggaattagaaaaggcaaagcagcatcttgaacaggaaatatatgtcaacaaaaagcgattagaaatggaaacattggctacaaaacaggctttagaagaccatagcatccgccatgca

SEQ ID NO: 225532 - DNA, 120 bp, Artificial Sequence
  ENSG00000118193_30 (sequence is synthesized)
ttacagtgcagacaacttggagctctatgaaactctcaatgatgattcaggaagccaatgctatcagcagcaaattgaaaacatactatgtttttggcagacatgatatatcagataaaa

SEQ ID NO: 225533 - DNA, 120 bp, Artificial Sequence
  ENSG00000118193_31 (sequence is synthesized)
gtagttctgacacttctattcgggttcgtaacctgaaactaggaatctcaacattctggagtctggaaaagtttgaatctaaacttgcagcaatgaaagaactttatgagagtaatggta

SEQ ID NO: 225534 - DNA, 120 bp, Artificial Sequence
  ENSG00000118193_32 (sequence is synthesized)
gtaacaggggtgaagatgccttttgtgatcctgaagatgaatgggaacccgacattacagatgcaccagtttcttcactttctagaaggaggagtaggagtttgatgaagaacagaagaa

SEQ ID NO: 225535 - DNA, 120 bp, Artificial Sequence
  ENSG00000118193_33 (sequence is synthesized)
tttctggttgtttacatgacatacaagtccatccaattaagaatttgcattcttcacattcatcaggtttaatggacaaatcaagcactatttactcaaattcagcagagtcctttcttc

SEQ ID NO: 225536 - DNA, 120 bp, Artificial Sequence
  ENSG00000118193_34 (sequence is synthesized)
ctggaatttgcaaagaattgattggttcttcgttagatttttttggacagagttatgatgaagaaagaactatagcagacagcctaattaatagttttcttaaaatttataatgggctat

SEQ ID NO: 225537 - DNA, 120 bp, Artificial Sequence
  ENSG00000118193_35 (sequence is synthesized)
ttgccatttccaaggctcatgaagaacaagatgaagaaagtcaagataacttgttttcttctgatcgagcaatccagtcacttactattcagactgcatgtgcttttgagcagctagtag

SEQ ID NO: 225538 - DNA, 120 bp, Artificial Sequence
  ENSG00000118193_36 (sequence is synthesized)
tgctaatgaaacactggctgagtgatttactgccttgtaccaacatagcaagacttgaggatgagttgagacaagaagttaaaaaactgggaggctacttacagttatttttgcagggat

SEQ ID NO: 225539 - DNA, 120 bp, Artificial Sequence
  ENSG00000118193_37 (sequence is synthesized)
gctgtttggatatttcatcaatgataaaagaggctcaaaagaatgcaatccaaattgtacaacaagctgtaaagtatgtggggcagttagcagttctgaaagggagcaagctacattttc

SEQ ID NO: 225540 - DNA, 120 bp, Artificial Sequence
  ENSG00000118193_38 (sequence is synthesized)
tagaaaacggtaacaataaagctgccagtgtccaggaggaattcatggatgctgtttgtgatggtgtaggcttaggaatgaagattttattagattctggactggaaaaagcaaaagaac

SEQ ID NO: 225541 - DNA, 120 bp, Artificial Sequence
  ENSG00000118193_39 (sequence is synthesized)
ttcagcatgaactctttaggcagtgtacaaaaaatgaggttaccaaagaaatgaaaactaatgccatgggattgattagatctcttgaaaacatctttgctgaatcgaaaattaaaagtt

SEQ ID NO: 225542 - DNA, 120 bp, Artificial Sequence
  ENSG00000118193_40 (sequence is synthesized)
tcagaaggcaagtacaagaagaaaactttgaataccaagatttcaagaggatggttaatcgtgctccagaattcttaaagttaaaacattgcttagagaaagctattgaaattattattt

SEQ ID NO: 225543 - DNA, 120 bp, Artificial Sequence
  ENSG00000118193_41 (sequence is synthesized)
ctgcactgaaaggatgccatagtgatataaatcttctccagacttgtgttgaaagtattcgcaacttggccagtgatttttacagtgacttcagtgtgccttctacttctgttggcagct

SEQ ID NO: 225544 - DNA, 120 bp, Artificial Sequence
  ENSG00000118193_42 (sequence is synthesized)
atgagagtagagtaactcacattgtccaccaggaactagaatctctagctaagtctctcctcttttgttttgaatctgaagaaagccctgatttgttgaaaccctgggaaacttataatc

SEQ ID NO: 225545 - DNA, 120 bp, Artificial Sequence
  ENSG00000118193_43 (sequence is synthesized)
aaaataccaaagaagaacaccaacaatctaaatcaagcgggattgacggcagtaagaataaaggtgtaccaaagcgtgtctatgagctccatggctcatccccagcagtgagctcagagg

SEQ ID NO: 225546 - DNA, 120 bp, Artificial Sequence
  ENSG00000118193_44 (sequence is synthesized)
aatgcacacccagtaggattcagtgggtgtgaatactgatgtgtaggcacttttatgaccacccatgaaagaaaaagaacacttgctcggtaattttctttatgcaggagagtttaagag

SEQ ID NO: 225547 - DNA, 120 bp, Artificial Sequence
  ENSG00000118193_45 (sequence is synthesized)
ggtaattttctttatgcaggagagtttaagagaaatcagcacagatatttcaaaaaagtccatgtctttttatctttaaaatatctatttatcaaaggccagacacagtggctcacgcct

SEQ ID NO: 225548 - DNA, 67 bp, Artificial Sequence
  ENSG00000118193_46 (sequence is synthesized)
aggcaggagtactccagtctgagcaacagaacgagacttagtcaaaataaataaataaataaataaa

SEQ ID NO: 225549 - DNA, 120 bp, Artificial Sequence
  ENSG00000118193_47 (sequence is synthesized)
taaataaataaataaataaaatatatttttatctttaaagtgtttaacattggtatactgtctgtagttggttcattagtcgtttataaagggttattttctcatgagtggaaacctgaa

SEQ ID NO: 225550 - DNA, 120 bp, Artificial Sequence
  ENSG00000118193_48 (sequence is synthesized)
tgaacaatcagttacctttgtgcctatgccttctctctcctcagacagctgggatgtttatggtgaaatggcctgtacaagtttaactaagacaacttaacttgcattgttaatcaaaaa

SEQ ID NO: 225551 - DNA, 120 bp, Artificial Sequence
  ENSG00000118193_49 (sequence is synthesized)
ttcttttctcaaagggttaactggttgccattttgaatagtatgttcaagggtgtagcttcctgtttctttccaaattataagtagctacctaaatatagtataattatatattaataat

SEQ ID NO: 225552 - DNA, 120 bp, Artificial Sequence
  ENSG00000118193_50 (sequence is synthesized)
atggcttgctggcacagtagtttaccctgttatctgtgtttcataatgggggctgtatgaatattatttaaaactaataaaatgttgccagaattatactaaactgttggatgagattag

SEQ ID NO: 225553 - DNA, 120 bp, Artificial Sequence
  ENSG00000118193_51 (sequence is synthesized)
gagatcagaggctggaccttctcttgataatgcttgttttgttaaaggtataatgaaataatttgtatatgatttgatgaagattaaagacccttattttccacagctttaaaaaaaaac

SEQ ID NO: 225554 - DNA, 120 bp, Artificial Sequence
  ENSG00000118193_52 (sequence is synthesized)
ctttatttatgatcaagtaataaagataatattctacttgtgggatcttacattacggaaatagtttgacgtttttgacctcaagagtatgtataatttgaagagatactttgtaactat

SEQ ID NO: 225555 - DNA, 120 bp, Artificial Sequence
  ENSG00000118193_53 (sequence is synthesized)
gcttgggtgatattgagcagttcctaaagaataattcatttaaaaaaaaagaagaaaaaaaaagaagaattcatttaaataacctgatcctttcatttgcccttttcgaatttacagata

SEQ ID NO: 225556 - DNA, 120 bp, Artificial Sequence
  ENSG00000118193_54 (sequence is synthesized)
ctacttgtacatttggcataactagttgaaattggccattcgtaccatgaataaatctgatagtttccttgttaggaagagattgtaagtaaatacagtcattgcagtcagaacagtatt

SEQ ID NO: 225557 - DNA, 120 bp, Artificial Sequence
  ENSG00000118193_55 (sequence is synthesized)
agtgaaccttgtgtggtgttttcaagctctttaaaatggtacaatgtagcacatttgctttcatttctttttttatttttggcatttgaccttgtattctttctgaagctctatatgtgt

SEQ ID NO: 225558 - DNA, 120 bp, Artificial Sequence
  ENSG00000118193_56 (sequence is synthesized)
ttttattagtcaataatctggcaagtagcactttgcctgtgcagtttgctggagtgtagatgtacatatgaggatttcccgggaggtgcacttctttgaagaacttcctaaagtacctgt

SEQ ID NO: 225559 - DNA, 120 bp, Artificial Sequence
  ENSG00000118193_57 (sequence is synthesized)
atagtagttttcatcttaatattcagtatttaatcttcagtttgtgctttgtaaactcatgacttaattggtcagaaactttttagtgtctttataaaattttgtatacatatttatact

SEQ ID NO: 225560 - DNA, 120 bp, Artificial Sequence
  ENSG00000118193_58 (sequence is synthesized)
aaacacattgtgatactgtatttgaatgaatggtgaaaaaatatttgctattggaattatgtgcactgacaagaaatgttataaagagaatgcctttaataaatcttttcagcattagaa

SEQ ID NO: 225561 - DNA, 120 bp, Artificial Sequence
  ENSG00000118194_0 (sequence is synthesized)
agtccccgctgagactgagcagacgcctccaggatctgtcggcagctgctgttctgagggagagcagagaccatgtctgacatagaagaggtggtggaagagtacgaggaggaggagcag

SEQ ID NO: 225562 - DNA, 120 bp, Artificial Sequence
  ENSG00000118194_1 (sequence is synthesized)
gaagaagcagctgttgaagagcaggaggaggcagcggaagaggatgctgaagcagaggctgagaccgaggagaccagggcagaagaagatgaagaagaagaggaagcaaaggaggctgaa

SEQ ID NO: 225563 - DNA, 120 bp, Artificial Sequence
  ENSG00000118194_2 (sequence is synthesized)
gatggcccaatggaggagtccaaaccaaagcccaggtcgttcatgcccaacttggtgcctcccaagatccccgatggagagagagtggactttgatgacatccaccggaagcgcatggag

SEQ ID NO: 225564 - DNA, 120 bp, Artificial Sequence
  ENSG00000118194_3 (sequence is synthesized)
aaggacctgaatgagttgcaggcgctgatcgaggctcactttgagaacaggaagaaagaggaggaggagctcgtttctctcaaagacaggatcgagagacgtcgggcagagcgggccgag

SEQ ID NO: 225565 - DNA, 120 bp, Artificial Sequence
  ENSG00000118194_4 (sequence is synthesized)
agagggctcgacgagaggaggaggagaacaggaggaaggctgaggatgaggcccggaagaagaaggctttgtccaacatgatgcattttgggggttacatccagaagcaggcccagacag

SEQ ID NO: 225566 - DNA, 120 bp, Artificial Sequence
  ENSG00000118194_5 (sequence is synthesized)
agcggaaaagtgggaagaggcagactgagcgggaaaagaagaagaagattctggctgagaggaggaaggtgctggccattgaccacctgaatgaagatcagctgagggagaaggccaagg

SEQ ID NO: 225567 - DNA, 120 bp, Artificial Sequence
  ENSG00000118194_6 (sequence is synthesized)
agctgtggcagagcatctataacttggaggcagagaagttcgacctgcaggagaagttcaagcagcagaaatatgagatcaatgttctccgaaacaggatcaacgataaccagaaagtct

SEQ ID NO: 225568 - DNA, 120 bp, Artificial Sequence
  ENSG00000118194_7 (sequence is synthesized)
ccaagacccgcgggaaggctaaagtcaccgggcgctggaaatagagcctggcctccttcaccaaagatctgctcctcgctcgcacctgcctccggcctgcactcccccagttcccgggcc

SEQ ID NO: 225569 - DNA, 120 bp, Artificial Sequence
  ENSG00000118194_8 (sequence is synthesized)
ctcctgggcaccccaggcagctcctgtttggaaatggggagctggcctaggtgggagccaccactcctgcctgcccccacacccactccacaccagtaataaaaagccaccacacactga

SEQ ID NO: 225570 - DNA, 120 bp, Artificial Sequence
  ENSG00000118194_9 (sequence is synthesized)
acattcctccctccgcagggctggctcaccaggccccagcccacatgcctgcttaaagccctctccatcctctgcctcacccagtccccgctgagactgagcagacgcctccaggatctg

SEQ ID NO: 225571 - DNA, 120 bp, Artificial Sequence
  ENSG00000118194_10 (sequence is synthesized)
tcggcagctgctgttctgaggtcacacagctcatgaggggtggaactagattcaccctaggcctcgctgatctctgtacaacgggggccagagctcttctgaggaaggcaggcttccctt

SEQ ID NO: 225572 - DNA, 120 bp, Artificial Sequence
  ENSG00000118194_11 (sequence is synthesized)
ctccatcctctgcctcacccagtccccgctgagactgagcagacgcctccaggatctgtcggcagctgctgttctgagggagagcagagaccatgtctgacatagaagaggtggtggaag

SEQ ID NO: 225573 - DNA, 120 bp, Artificial Sequence
  ENSG00000118194_12 (sequence is synthesized)
cagcagaaatatgaggtgggccgccatgctgtccccgcccagcatctccatctcacactcctcctggttcactgggtccgatcaatgttctccgaaacaggatcaacgataaccagaaag

SEQ ID NO: 225574 - DNA, 120 bp, Artificial Sequence
  ENSG00000118194_13 (sequence is synthesized)
ggcaggcttccctttgtacctgcactgacttttttctccttttggagggagagcagagaccatgtctgacatagaagaggtggtggaagagtacgaggaggagtgagtatctggagcatc

SEQ ID NO: 225575 - DNA, 120 bp, Artificial Sequence
  ENSG00000118194_14 (sequence is synthesized)
ttgcctgagtggggtcctctcccgccgctgccctgacacctggtccaggagcctcccagctgtccctcggattctggggagcaggaaggtaagcgtaaacgtgtgtactcatttggatca

SEQ ID NO: 225576 - DNA, 120 bp, Artificial Sequence
  ENSG00000118194_15 (sequence is synthesized)
ggggctgggggatagggagcatttccctttttatgatgccaaccctgccagcagaggttgacccatggcacctctgcccactcacaggctcttcccatttcagtggggccttctgaaacc

SEQ ID NO: 225577 - DNA, 120 bp, Artificial Sequence
  ENSG00000118194_16 (sequence is synthesized)
agcccaagacatcccagatccatttatttgcccagtgccttcccccttcctggcctcttgtgcactgcggtatctcatttcagctccacacacctgagggcagatggggacatgaagaat

SEQ ID NO: 225578 - DNA, 120 bp, Artificial Sequence
  ENSG00000118194_17 (sequence is synthesized)
cagagaaccccctgggtctcagtatgtgttgggaccaggaccaaactgcaagactcccaggttcatggccagtttctgcggggtccaccaggggatttgaagtccaagaagcatggcatc

SEQ ID NO: 225579 - DNA, 120 bp, Artificial Sequence
  ENSG00000118194_18 (sequence is synthesized)
ttgtcacagcttctttgattccaagttgtgtggctttgagcaagtcattctacctccctgagcctcagttctcctaagtgagattaacggtacccacttcatgggcatatcatgagcatg

SEQ ID NO: 225580 - DNA, 120 bp, Artificial Sequence
  ENSG00000118194_19 (sequence is synthesized)
aagtgaaatagcatatgtgaaagagctttgtgtattcccaggtgctgagcaaggctgaggactgccattgttgacgtcagtgttactatcattgctgtggttggtcggggcagtgctgga

SEQ ID NO: 225581 - DNA, 120 bp, Artificial Sequence
  ENSG00000118194_20 (sequence is synthesized)
agattctctaggaaggatcagggccctgcctgtcctggacaccctcagtccctgggtccagaatggggctgatgctgactattcctctctccaacaggtcgttcatgcccaacttggtgc

SEQ ID NO: 225582 - DNA, 120 bp, Artificial Sequence
  ENSG00000118194_21 (sequence is synthesized)
ctgtccctattccccaacagcccccttcagctcctgcatctgcccctgctgcctggccttcagcagtgttccatgtccaccgcattgacgactgcttgctggaagtgtctgagagctcgc

SEQ ID NO: 225583 - DNA, 120 bp, Artificial Sequence
  ENSG00000118194_22 (sequence is synthesized)
tggggctgagcagagacactttcctggtgttccaaccctgggggtctccaacacgttgaggcagcagctcagtgatctgagctggttacaaggaccaggatgcaccaagccaggaccccc

SEQ ID NO: 225584 - DNA, 120 bp, Artificial Sequence
  ENSG00000118194_23 (sequence is synthesized)
agtggaaggggagtgctgccaacagagaggtgcttctccccacatacacccaaggtcctggtgtgggcacaattaggctgagcctcaagctcacagtctttcggagtcctatgtgcacta

SEQ ID NO: 225585 - DNA, 87 bp, Artificial Sequence
  ENSG00000118194_24 (sequence is synthesized)
acttatcaatatcaacctaggaagtgctgggcattgtcttggctctgataatacatcagcaaacaagacagaaatgcctgcgtcctt

SEQ ID NO: 225586 - DNA, 120 bp, Artificial Sequence
  ENSG00000118194_25 (sequence is synthesized)
ataatacatcagcaaacaagacagaaatgcctgcgtccttatgaacgtgttattttataagactctccagccctcatcccttccccagtgcagacttcgtgggaaccgaaggccccgtag

SEQ ID NO: 225587 - DNA, 120 bp, Artificial Sequence
  ENSG00000118194_26 (sequence is synthesized)
ctctcttcctgtgcagctgctgaaggcatttccagagcaacaggtcttccaggggcactcccagcttaaggggatgacgagacctcacatttgggaatcaggacctcattcaatcacgca

SEQ ID NO: 225588 - DNA, 120 bp, Artificial Sequence
  ENSG00000118194_27 (sequence is synthesized)
gtcatttctcagtcagtggactcctgtgggccagcactgtgctgggagctaccctctcagaaagctccttgctgagcggagagaaagctgaactcacccataaagaccacaagcttcagc

SEQ ID NO: 225589 - DNA, 120 bp, Artificial Sequence
  ENSG00000118194_28 (sequence is synthesized)
accggagcttagacctgggcgccagtccttccttacccaccacccccgagccccggtcccagggcctctttgctacctaagggaagaattcagcttcccctggaaggtctcctttgctgc

SEQ ID NO: 225590 - DNA, 120 bp, Artificial Sequence
  ENSG00000118194_29 (sequence is synthesized)
tcctgccaaaccactcctccctgggcaagaagcccctcgctgggcaggctcaggctgcagtggctacagggtactcccacctcccaatacggagagaggctgtattgcctggtgacagtg

SEQ ID NO: 225591 - DNA, 120 bp, Artificial Sequence
  ENSG00000118194_30 (sequence is synthesized)
gggagcagcggaaggaccactctgctgcagccatgcttgtttctaacccagcagaactggacataatgggaacagggtctgaagacaatcaatccagggctgcagtgggtgctgagtctg

SEQ ID NO: 225592 - DNA, 120 bp, Artificial Sequence
  ENSG00000118194_31 (sequence is synthesized)
gggaagcctccacctggaggggcagctgggcagtggcagctcccttggaatggctcagcctctggacatcaccccacccaaccagagccctggctcttgctggatgtccacagatgagtg

SEQ ID NO: 225593 - DNA, 120 bp, Artificial Sequence
  ENSG00000118194_32 (sequence is synthesized)
cctgggattggtctcagccactatgggggggatgtgcagggagaggtgatgagggagtgagcaggactgtctatgtgcctctgtcctcatcctgaggcttgggtctgaaattggtgctgc

SEQ ID NO: 225594 - DNA, 120 bp, Artificial Sequence
  ENSG00000118194_33 (sequence is synthesized)
agcactggcacgcgtgagtggggcaggaggtgggcagcaggggaggagcattggagggtggtcctgagcatcatttggattcttctcccgcctcactttagcctcactctcacatcaccc

SEQ ID NO: 225595 - DNA, 120 bp, Artificial Sequence
  ENSG00000118194_34 (sequence is synthesized)
tgtccattctctcccttggaagccaacatcaggaaggctgtggagctggcatattgcactataacagaggctgctgttcacgtttcaaacaacgtgattgtgtccctggagcagtgcact

SEQ ID NO: 225596 - DNA, 120 bp, Artificial Sequence
  ENSG00000118194_35 (sequence is synthesized)
gtcatggccccggagggttgggtcatagtagttattagctgaatgcctacacttcacactacctctgttcctcacacctacccaagaagagcagtaatttcacagcaaagagagctgaga

SEQ ID NO: 225597 - DNA, 120 bp, Artificial Sequence
  ENSG00000118194_36 (sequence is synthesized)
tgtggggaggttaagtgaccttgccaaggtcgcaggcaaacgcatgctggagccagcattcaaaacgagattagtctcacactcaagtgcttgctctctgccccctccctgtgattacat

SEQ ID NO: 225598 - DNA, 120 bp, Artificial Sequence
  ENSG00000118194_37 (sequence is synthesized)
gctcattgtaacacctgatgttgcctaatgccttccccttttgttaatgtcaactggagcctcgtaaagaccctgagtagccaggatgtgtacactttatctccatgagacagagaaagg

SEQ ID NO: 225599 - DNA, 120 bp, Artificial Sequence
  ENSG00000118194_38 (sequence is synthesized)
actgaggtttggagatgttaaaaagactcgcctaaacaccctcggcaagctaatggaagaggatctgaatctagattatctgttcccagtgcagtgagaagatgatctcagaatgagttc

SEQ ID NO: 225600 - DNA, 120 bp, Artificial Sequence
  ENSG00000118194_39 (sequence is synthesized)
cctgggggaacattttttaatcggaattttcattgacataattaaagactagtacacagttgtctttaataacgagcgtttacacacggtgcctagtttctcccgagggcaacatttgca

SEQ ID NO: 225601 - DNA, 120 bp, Artificial Sequence
  ENSG00000118194_40 (sequence is synthesized)
aaattagtactatatcaaaaccaagattggacatcaatacaatcaatctatgatcttattcagatttgcccacaattgcaccatgtgtatgtgaaactctaaacaactttaacctgtgga

SEQ ID NO: 225602 - DNA, 120 bp, Artificial Sequence
  ENSG00000118194_41 (sequence is synthesized)
ggttcacgtatccatcaccacagtctacatactgaaaagatcccaaaccacaaggatccccgctgtgtgctttgatttatttatttagagacaagttctcactcatttgtccaggccagt

SEQ ID NO: 225603 - DNA, 85 bp, Artificial Sequence
  ENSG00000118194_42 (sequence is synthesized)
gttctcactcatttgtccaggccagtctcttggggtgcccaaagaccttttgtccaggtctcacttttgtccagcacacatggaa

SEQ ID NO: 225604 - DNA, 80 bp, Artificial Sequence
  ENSG00000118194_43 (sequence is synthesized)
gaggctgaggcaggaggatcccttgagcctgggagttcgaaacagcctgggcaatgtggcaaaatcccagctaactatag

SEQ ID NO: 225605 - DNA, 120 bp, Artificial Sequence
  ENSG00000118194_44 (sequence is synthesized)
gcccagaaggttgaggctgcagtgaggctttgtgcagtgaagatttgtacagtgctgaacagatcctgtggagtgggggtgggcagagtggatggaaaggttgagaaactgcagacattg

SEQ ID NO: 225606 - DNA, 120 bp, Artificial Sequence
  ENSG00000118194_45 (sequence is synthesized)
attgtcttgagtgtcacaaatggaaatgcagcatcccaggcagtattgcctgttcaggggcaaggaacgaagtggacatcagcaggtggccttgctgccatgtgggtgtcactatctccc

SEQ ID NO: 225607 - DNA, 120 bp, Artificial Sequence
  ENSG00000118194_46 (sequence is synthesized)
gaggcaaaggaacccctcacagcagctttggaggagaatgcccacagtgctctttccagggaagtggatgtgcactgagagggtttgggagaggagaggacagaacttggtggcacttcc

SEQ ID NO: 225608 - DNA, 120 bp, Artificial Sequence
  ENSG00000118194_47 (sequence is synthesized)
aaagttttagatgttgagctttcaactttgccccttctcccagagaagttgcattggtggcacccagtgggagaggggaccattgtccagccccctggtctggacagagcaatgggaccc

SEQ ID NO: 225609 - DNA, 120 bp, Artificial Sequence
  ENSG00000118194_48 (sequence is synthesized)
agaagtcatatccacacatgaagctcctagagcttaggtgaaatcacttgtaggatgtggtgtccgtaggatgaaatcccaatgcatagatggtcatggtgggtcattgctgcagtcatc

SEQ ID NO: 225610 - DNA, 120 bp, Artificial Sequence
  ENSG00000118194_49 (sequence is synthesized)
gtcatgctgcagccttcaccagggttctaagtggtcccagtcacttctccaaaggggaggggacaaccagctggggcttggaatcatgtcatcagcttctgccctgtggccaccgggaag

SEQ ID NO: 225611 - DNA, 120 bp, Artificial Sequence
  ENSG00000118194_50 (sequence is synthesized)
tccaaggggtaacaaagaaggcaaagacctgggaggggattctagggccaggacccttggggacctttccaaaggccttgtcactgtgaagcacaagagaagcaaaattgctttgcccag

SEQ ID NO: 225612 - DNA, 120 bp, Artificial Sequence
  ENSG00000118194_51 (sequence is synthesized)
tctccttttggagggagagcagagaccatgtctgacatagaagaggtggtggaagagtacgaggaggaggagcaggaaggtaagcgtaaacgtgtgtactcatttggatcaaagacagcc

SEQ ID NO: 225613 - DNA, 120 bp, Artificial Sequence
  ENSG00000118194_52 (sequence is synthesized)
agtggacacgggctgggggtttggtgggcacagagcaccacagtacagttgtacaagttgtgtactgcacaagcgtctcttcctaagggagtgagtgagggctgaattccacccaacact

SEQ ID NO: 225614 - DNA, 120 bp, Artificial Sequence
  ENSG00000118194_53 (sequence is synthesized)
ccatcaccaatcgtgcaccctagcagggatggggctatgttcttctagaggaagggccctgaacggacactctcctctctcacagtatggccagaacaccctcctccatggccgaggtgg

SEQ ID NO: 225615 - DNA, 120 bp, Artificial Sequence
  ENSG00000118194_54 (sequence is synthesized)
gaccttgggattaagggaagcaaattgtggggagccaaacaatgaaaccgtgccagcataggcatggcggcttcagagagctgagagagggcaggacggcttggtgccacacacgtgaag

SEQ ID NO: 225616 - DNA, 120 bp, Artificial Sequence
  ENSG00000118194_55 (sequence is synthesized)
ctagcccaggcccatggaggccccccatgctcccagctcctgctgggcccccaggcccctctctattcatcaacatgaatgaaatcagtcaagagacaatattggccgggtgcggtggct

SEQ ID NO: 225617 - DNA, 60 bp, Artificial Sequence
  ENSG00000118194_56 (sequence is synthesized)
gccaaggcgggtagatcacttgaggttgggagttcgagaccatcctgaccggtcatccta

SEQ ID NO: 225618 - DNA, 120 bp, Artificial Sequence
  ENSG00000118194_57 (sequence is synthesized)
ccaggatctgtcggcagctgctgttctgagggagagcagagaccatgtctgacatagaagaggtggtggaagagtacgaggaggaggagcaggaagaagaggaggactggagagaggacg

SEQ ID NO: 225619 - DNA, 120 bp, Artificial Sequence
  ENSG00000118197_0 (sequence is synthesized)
gctccgctccgcaccaccaaccccgggccgcagtcctgacgagcgggtcagggcttgtcgggcggaagcctggcctggagcctggaagggggagacggcccgagcgggagcgggagcgga

SEQ ID NO: 225620 - DNA, 120 bp, Artificial Sequence
  ENSG00000118197_1 (sequence is synthesized)
cgcggcctcagtcctgcgcggaatattgaaggatgtttgttccaagatctctaaaaatcaagaggaatgctaatgatgatggcaaaagttgtgtggctaagataattaaaccagacccag

SEQ ID NO: 225621 - DNA, 120 bp, Artificial Sequence
  ENSG00000118197_2 (sequence is synthesized)
aagaccttcagttggacaaaagcagagatgttcccgttgatgctgtagctacagaagcagccacaatagacaggcacatcagcgaatcatgccctttccccagcccaggtggccagttgg

SEQ ID NO: 225622 - DNA, 120 bp, Artificial Sequence
  ENSG00000118197_3 (sequence is synthesized)
cagaggttcattcagtaagtcccgagcagggtgcgaaggacagccatccttctgaagagcccgttaagtcattttccaaaacacagcgctgggcagaaccaggggaacccatctgtgttg

SEQ ID NO: 225623 - DNA, 120 bp, Artificial Sequence
  ENSG00000118197_4 (sequence is synthesized)
tctgtggtcgttatggagagtatatctgtgataagacagatgaagatgtgtgtagtttggagtgtaaagcgaaacatcttctacaagttaaggaaaaggaagagaaatcaaaactcagca

SEQ ID NO: 225624 - DNA, 120 bp, Artificial Sequence
  ENSG00000118197_5 (sequence is synthesized)
atccacagaaggctgattctgagccagagtctccactgaatgcttcctatgtctacaaagagcacccctttattttgaaccttcaggaagaccagattgaaaatcttaaacagcagctgg

SEQ ID NO: 225625 - DNA, 120 bp, Artificial Sequence
  ENSG00000118197_6 (sequence is synthesized)
gaattttagttcaagggcaagaagtcaccaggcccattattgactttgaacattgtagtctccctgaggtcttaaatcacaacttgaagaaatcaggctatgaggtgccaactcccattc

SEQ ID NO: 225626 - DNA, 120 bp, Artificial Sequence
  ENSG00000118197_7 (sequence is synthesized)
aaatgcagatgattcctgtgggacttctgggaagagacattctggccagtgcagatactggctcaggaaaaacagctgcttttcttcttcctgttatcatgcgagctttattcgagagca

SEQ ID NO: 225627 - DNA, 120 bp, Artificial Sequence
  ENSG00000118197_8 (sequence is synthesized)
aaactccatctgcgctcattcttacaccaaccagagagttagccattcagatagagagacaagctaaagaattgatgagtggcctgccacgcatgaaaactgtgcttcttgtagggggct

SEQ ID NO: 225628 - DNA, 120 bp, Artificial Sequence
  ENSG00000118197_9 (sequence is synthesized)
ttctggatataataaagcagagctctgtagaactctgtggtgtaaagattgtggtagtagatgaagctgataccatgttaaagatgggttttcaacaacaagtgcttgacattttggaaa

SEQ ID NO: 225629 - DNA, 120 bp, Artificial Sequence
  ENSG00000118197_10 (sequence is synthesized)
acattcctaatgattgtcagaccattttggtttcagccacaattccaactagcatagaacagctagcaagccagcttctgcataatcctgtgagaattatcactggagaaaagaacctac

SEQ ID NO: 225630 - DNA, 120 bp, Artificial Sequence
  ENSG00000118197_11 (sequence is synthesized)
cttgtgccaatgtacgtcagattattttgtgggtagaagacccagccaaaaagaaaaaattatttgaaattttaaatgataagaaactctttaagcctccagtgttagtatttgtggact

SEQ ID NO: 225631 - DNA, 120 bp, Artificial Sequence
  ENSG00000118197_12 (sequence is synthesized)
gcaaactaggagcagatcttttgagtgaagccgttcagaaaatcacagggctgaaaagcatatctatacattcagagaagtcgcaaatagaaaggaaaaacatattgaagggattacttg

SEQ ID NO: 225632 - DNA, 120 bp, Artificial Sequence
  ENSG00000118197_13 (sequence is synthesized)
aaggagactatgaagttgtagtgagcacaggagtcttgggacgaggcctagacttgatcagtgtcaggctggttgtcaattttgatatgccttcaagtatggatgagtatgtccatcaga

SEQ ID NO: 225633 - DNA, 120 bp, Artificial Sequence
  ENSG00000118197_14 (sequence is synthesized)
ttggaagagtaggaagattaggtcaaaatggaacagcgattactttcatcaataataattcaaaaagactcttctgggatattgcaaaacgagtaaagcccacaggatccattcttcccc

SEQ ID NO: 225634 - DNA, 120 bp, Artificial Sequence
  ENSG00000118197_15 (sequence is synthesized)
ctcagttattaaattccccataccttcatgaccagaagagaaaggaacaacagaaagataaacagacacagaatgatctggttacaggagctaatcttatggatattatcagaaaacatg

SEQ ID NO: 225635 - DNA, 120 bp, Artificial Sequence
  ENSG00000118197_16 (sequence is synthesized)
ataaaagtaattctcagaaatgattttctctgccacttgaatatttttttttattgtatatagtcagcaaaaaattatggtttgcataaatggaaatgtacatgaattttaaaaatttta

SEQ ID NO: 225636 - DNA, 120 bp, Artificial Sequence
  ENSG00000118197_17 (sequence is synthesized)
gttggcaaagcacaatgggaagaagacaaccaattgaaggtcaaactaggccttaaaaaaaattgttcttcctaaatgaaactttatgtaagacccaagcttcctttatgtaaaaatagg

SEQ ID NO: 225637 - DNA, 120 bp, Artificial Sequence
  ENSG00000118197_18 (sequence is synthesized)
atactcactaggctttggggctgacaatggtttttaaatcttgctaatcttccctggaatgaaaccagcatgactcaaagagaaaaagagagtctataatattttctaatccctgagttc

SEQ ID NO: 225638 - DNA, 120 bp, Artificial Sequence
  ENSG00000118197_19 (sequence is synthesized)
caagagtgaaactctgtctcaaaataatattaatgataataataataataataatagggattacttgcataattgttcttttaaaattattggcagtattgctgaatgtatttagatttt

SEQ ID NO: 225639 - DNA, 120 bp, Artificial Sequence
  ENSG00000118197_20 (sequence is synthesized)
attggcagtattgctgaatgtatttagattttttcaccaagtgacaacaactgaattcataaagattcatcaacaagacctgataaaaaaaaatgtaagcatattatagtggatacttcc

SEQ ID NO: 225640 - DNA, 120 bp, Artificial Sequence
  ENSG00000118197_21 (sequence is synthesized)
ttccaagactcttggtctaacatgtattagaaagcagaaggagcccaggcacaggggctcccgccggtaatcccaaagctttgggaagccaaggcaggtggatcgcttgagctcaggagt

SEQ ID NO: 225641 - DNA, 68 bp, Artificial Sequence
  ENSG00000118197_22 (sequence is synthesized)
agcctgggcaacatggtgaaatcccgtcaccacaaaaaaatgcaaaaattaaaggggaatcacctgag

SEQ ID NO: 225642 - DNA, 120 bp, Artificial Sequence
  ENSG00000118197_23 (sequence is synthesized)
aggggaatcacctgagccgggggaatcacctgagcccagggaagttgaggctgctgtgagccatggtcatgacactgccctccagcctggacaacagattgagaccctgtctcaaaaaaa

SEQ ID NO: 225643 - DNA, 120 bp, Artificial Sequence
  ENSG00000118197_24 (sequence is synthesized)
tggggcgctaggccgcggcggcagaactggtgcccctgcgcggccttcctcccatccttacagttccccgtgtcccaggcctctacccggaaccggagccccgcccgtctcctagcagct

SEQ ID NO: 225644 - DNA, 120 bp, Artificial Sequence
  ENSG00000118197_25 (sequence is synthesized)
aaaataggcattggggagtccctctgagccttttctggctcaggaggttgccgataaaattttaaaaaataaaataggcatcggaatccatgaaacgtatggtttctctaagggaggcaa

SEQ ID NO: 225645 - DNA, 120 bp, Artificial Sequence
  ENSG00000118197_26 (sequence is synthesized)
gttagaaatgagcagaaacagaggcaggggctagggctaagggcctggcttgtggagtctgaagatgagtcagtaaaaaagctgcttgagacaccagagaggaactgagaatgaataata

SEQ ID NO: 225646 - DNA, 120 bp, Artificial Sequence
  ENSG00000118197_27 (sequence is synthesized)
atgcaaatagtcagaggagtcacctggcttgcttagtgaccatcagacgagaccagacctctcacttggatattctgattcagtaggtgtgagttggagccaggaatctctacaaactca

SEQ ID NO: 225647 - DNA, 120 bp, Artificial Sequence
  ENSG00000118197_28 (sequence is synthesized)
ctcaccacaatcaatatgaagtttactccataaacagaggtatggtacaagaggtaacgtgtcatccaaggtgactttcctggcagccaccagtaaactgactccggacagataggactc

SEQ ID NO: 225648 - DNA, 120 bp, Artificial Sequence
  ENSG00000118197_29 (sequence is synthesized)
ttttgttgccgccaaggcatacttacaatgacctcagaggctctagggccacagtgtgaaaaccaaccaatggataattaagtaaacacagttctcttgttctactgttagtgtgagaac

SEQ ID NO: 225649 - DNA, 120 bp, Artificial Sequence
  ENSG00000118197_30 (sequence is synthesized)
ctattttatattttataatgtgttgcacgtgtgatgatataggacaaaattacaaataaagcataagacgagtgtttatttttgtaatgtttacaaatagtaacttacaaataaatttta

SEQ ID NO: 225650 - DNA, 80 bp, Artificial Sequence
  ENSG00000118200_0 (sequence is synthesized)
acggggcggacctcgcgcggacggacggacggagacggcgccgccacattcctatgcccgggagcggcggcggcggcggc

SEQ ID NO: 225651 - DNA, 120 bp, Artificial Sequence
  ENSG00000118200_1 (sequence is synthesized)
gctgagcttctcctccgtcggcgcccgggcggacatcgcccgggccccgatggtttgagcttgcttctccctccctcccgacccccgtggtggcgaggccacgccatgtgaaggttaggg

SEQ ID NO: 225652 - DNA, 120 bp, Artificial Sequence
  ENSG00000118200_2 (sequence is synthesized)
ccgggacatcccgaggagccgcggtgaaagatgggggatgctgcagaccccagggagatgagaaagacgttcattgttccagccatcaagccttttgaccactatgatttctccagggcc

SEQ ID NO: 225653 - DNA, 120 bp, Artificial Sequence
  ENSG00000118200_3 (sequence is synthesized)
aaaatcgcctgcaatctggcctggctggtggccaaagcctttgggacagaaaatgtgccagaggaacttcaagaaccattttacacagatcagtatgaccaggaacacatcaaaccacct

SEQ ID NO: 225654 - DNA, 120 bp, Artificial Sequence
  ENSG00000118200_4 (sequence is synthesized)
gttgttaatttgcttctatcggctgaactatactgtcgtgctgggagtctcattctcaagagtgatgctgcaaaaccccttttgggccatgatgctgtaatccaggctttagcacagaaa

SEQ ID NO: 225655 - DNA, 120 bp, Artificial Sequence
  ENSG00000118200_5 (sequence is synthesized)
ggtctttatgtcactgaccaggaaaaattggtaactgaacgagatctccacaagaaacccatacagatgagtgcacatttggccatgatcgataccctcatgatggcttatactgtagaa

SEQ ID NO: 225656 - DNA, 120 bp, Artificial Sequence
  ENSG00000118200_6 (sequence is synthesized)
atggtcagtatagaaaaagtaattgcgtgtgctcagcagtattcagctttttttcaagccacagatctgccctatgatattgaggacgctgtcatgtactggataaataaggtaaatgaa

SEQ ID NO: 225657 - DNA, 120 bp, Artificial Sequence
  ENSG00000118200_7 (sequence is synthesized)
catttgaaagacataatggaacaagaacaaaaactgaaagaacatcacacagttgaagctccaggaggtcaaaaggctcgttatcggaaagagcaaacattgcttaagcaactgccttgc

SEQ ID NO: 225658 - DNA, 120 bp, Artificial Sequence
  ENSG00000118200_8 (sequence is synthesized)
attccattggtagaaaatttgttgaaggatgggacagatggctgtgcattagctgcccttattcatttttactgtcctgatgttgtcagattagaggatatttgtttgaaagaaactatg

SEQ ID NO: 225659 - DNA, 120 bp, Artificial Sequence
  ENSG00000118200_9 (sequence is synthesized)
tctttggctgatagcctgtataatctgcagctgattcaagaattttgccaagaatacttgaaccagtgttgccatttcactctggaagatatgctctatgctgcttcatccataaagagt

SEQ ID NO: 225660 - DNA, 120 bp, Artificial Sequence
  ENSG00000118200_10 (sequence is synthesized)
aattatttggtgttcatggcggaactgttctggtggtttgaagtggtgaagccgtcttttgtacagcctcgtgttgttcgtccacaaggagctgaacctgtaaaagatatgccttcaatt

SEQ ID NO: 225661 - DNA, 120 bp, Artificial Sequence
  ENSG00000118200_11 (sequence is synthesized)
cctgtcttgaatgctgccaaaagaaatgtcttagatagtagttctgacttcccttcaagtggggaaggagctacatttacacagtctcatcatcatttgccttctaggtattcacgtccc

SEQ ID NO: 225662 - DNA, 120 bp, Artificial Sequence
  ENSG00000118200_12 (sequence is synthesized)
caggctcattcttcagcctcaggaggaattagaaggtcttcatctatgtcttatgttgatggcttcatagggacatggcccaaagagaaaagatcatcagtgcatggcgtatcatttgat

SEQ ID NO: 225663 - DNA, 120 bp, Artificial Sequence
  ENSG00000118200_13 (sequence is synthesized)
atttcttttgataaagaagatagtgtacagagatccactccaaaccgaggaatcactcgttctattagtaatgaaggacttactctgaacaacagtcatgtatctaaacacattaggaaa

SEQ ID NO: 225664 - DNA, 120 bp, Artificial Sequence
  ENSG00000118200_14 (sequence is synthesized)
aatttgtccttcaagccaataaatggagaagaggaagcagagagcattgaagaagaacttaatatagattctcacagtgacctcaaatcttgtgtgccccttaacacaaatgaactaaat

SEQ ID NO: 225665 - DNA, 120 bp, Artificial Sequence
  ENSG00000118200_15 (sequence is synthesized)
tctaatgagaatattcattacaagcttccaaatggagctttacaaaatagaatacttcttgacgagtttggcaatcagatcgagacaccaagcattgaagaagcattacaaataattcat

SEQ ID NO: 225666 - DNA, 120 bp, Artificial Sequence
  ENSG00000118200_16 (sequence is synthesized)
gatactgaaaaatctcctcatacacctcagccagaccaaattgctaatggcttctttcttcatagtcaagaaatgagtatcttaaattcaaatatcaagttaaatcaatctagtcctgat

SEQ ID NO: 225667 - DNA, 120 bp, Artificial Sequence
  ENSG00000118200_17 (sequence is synthesized)
aatgtaactgatacgaaaggtgccttgagtcccataactgacaatactgaagtagacactggaattcacgttccttcagaagatattcctgaaactatggacgaagattcttcgttgaga

SEQ ID NO: 225668 - DNA, 120 bp, Artificial Sequence
  ENSG00000118200_18 (sequence is synthesized)
gattatactgtaagcttggactctgacatggatgatgcatctaaatttcttcaggattatgatattcgaactggcaacaccagggaagctttgagtccttgtccaagtactgtaagtacc

SEQ ID NO: 225669 - DNA, 120 bp, Artificial Sequence
  ENSG00000118200_19 (sequence is synthesized)
aagtctcagccaggcagcagtgcttcttctagttctggagttaaaatgaccagctttgctgaacaaaaattcaggaaactgaatcataccgatggaaaaagtagtggaagcagttctcaa

SEQ ID NO: 225670 - DNA, 120 bp, Artificial Sequence
  ENSG00000118200_20 (sequence is synthesized)
aaaactacaccagaaggctctgaacttaatattcctcatgtggttgcttgggcacaaattccagaagaaacagggcttccacagggacgggacactacccagctgttggcctctgaaatg

SEQ ID NO: 225671 - DNA, 120 bp, Artificial Sequence
  ENSG00000118200_21 (sequence is synthesized)
gtgcatcttaggatgaaactagaagaaaagaggcgtgctatagaagcccagaaaaagaaaatggaagctgcttttaccaaacagagacagaaaatgggaaggacagcattccttactgta

SEQ ID NO: 225672 - DNA, 120 bp, Artificial Sequence
  ENSG00000118200_22 (sequence is synthesized)
gtgaaaaagaaaggggatgggatatctcctctacgagaggaagcggcgggtgcagaagatgagaaagtatatactgatcgagcaaaagaaaaggaatcacaaaaaactgatggacaaagg

SEQ ID NO: 225673 - DNA, 120 bp, Artificial Sequence
  ENSG00000118200_23 (sequence is synthesized)
agcaagtcactggcagatataaaagagagcatggagaatcctcaagccaaatggctaaagtctccaactacacctattgatcctgagaagcagtggaacctggcaagcccctcagaagaa

SEQ ID NO: 225674 - DNA, 120 bp, Artificial Sequence
  ENSG00000118200_24 (sequence is synthesized)
actttaaatgaaggagagattttagaatataccaaatccattgaaaagttaaattcatccctgcattttctacaacaagaaatgcaacgcttgtcacttcagcaggagatgttaatgcag

SEQ ID NO: 225675 - DNA, 120 bp, Artificial Sequence
  ENSG00000118200_25 (sequence is synthesized)
atgagagagcaacaatcttgggtgatttcacctccacaaccctctccacagaaacagattcgagattttaagccttctaagcaggcaggcctgtcatcagccattgcaccattctcctca

SEQ ID NO: 225676 - DNA, 120 bp, Artificial Sequence
  ENSG00000118200_26 (sequence is synthesized)
gactcccctcgtcctactcacccatctccacagtcttctaacaggaaaagtgcatctttttctgttaaaagtcaaaggactcctaggccaaatgagttaaaaataacacctttgaatcga

SEQ ID NO: 225677 - DNA, 120 bp, Artificial Sequence
  ENSG00000118200_27 (sequence is synthesized)
accttgacacctcctcggtctgtggatagccttcctcggttaaggaggttttcaccaagtcaagttcctattcaaactaggtcatttgtatgttttggggatgatggagaacctcagtta

SEQ ID NO: 225678 - DNA, 120 bp, Artificial Sequence
  ENSG00000118200_28 (sequence is synthesized)
aaggaatccaaacctaaagaggaagttaaaaaggaggaattggaatccaaagggactttggaacagcgtggacataatccagaagaaaaggaaatcaaaccttttgagtcaacagtctct

SEQ ID NO: 225679 - DNA, 120 bp, Artificial Sequence
  ENSG00000118200_29 (sequence is synthesized)
gaagtcctatcactgcctgtcacagagactgtatgtctgacaccaaatgaggaccaattgaatcaacccacagaaccccctcctaaacccgttttcccacccactgctccaaaaaatgtt

SEQ ID NO: 225680 - DNA, 120 bp, Artificial Sequence
  ENSG00000118200_30 (sequence is synthesized)
accccctgaaaaggctgatgtacctgttgaaaaatatgatggagaaagtgataaagaacaatttgatgatgaccagaaagtatgctgtggattcttttttaaggatgatcaaaaagcaga

SEQ ID NO: 225681 - DNA, 120 bp, Artificial Sequence
  ENSG00000118200_31 (sequence is synthesized)
aaatgatatggcaatgaaacgggcagctttgttggagaaaagattaagaagggaaaaggaaactcagctccggaaacaacagttggaagcagaaatggagcataagaaggaggaaacaag

SEQ ID NO: 225682 - DNA, 120 bp, Artificial Sequence
  ENSG00000118200_32 (sequence is synthesized)
gcgtaaaactgaggaagaacgtcagaagaaagaagatgagagagcacgcagagaatttattaggcaagaatatatgaggcggaaacaactgaaactaatggaagatatggatacagtaat

SEQ ID NO: 225683 - DNA, 120 bp, Artificial Sequence
  ENSG00000118200_33 (sequence is synthesized)
taaaccccgtcctcaagtagtaaaacaaaaaaaacagcgaccaaaatctattcacagagatcatattgaatcccccaaaacaccaataaagggtcctccagtctctagcctttctttggc

SEQ ID NO: 225684 - DNA, 120 bp, Artificial Sequence
  ENSG00000118200_34 (sequence is synthesized)
atcgctgaacacgggtgataacgagagtgtacattcaggcaagaggacgccaagatcagagtctgtagaaggcttcttatctccaagtcgttgtggcagtcgaaatggagaaaaagactg

SEQ ID NO: 225685 - DNA, 120 bp, Artificial Sequence
  ENSG00000118200_35 (sequence is synthesized)
ggagaatgcatcaacaacttcttcagtggcttctggaacagaatatacaggaccaaagctctacaaagaacccagtgcaaaatccaataagcacataatacaaaatgctttagctcattg

SEQ ID NO: 225686 - DNA, 120 bp, Artificial Sequence
  ENSG00000118200_36 (sequence is synthesized)
ctgtttggctggaaaagtaaatgaaggtcagaagaaaaaaatactggaggaaatggagaaatcagatgccaacaacttcttaatcttgttccgggattcaggatgccagttcagatcttt

SEQ ID NO: 225687 - DNA, 120 bp, Artificial Sequence
  ENSG00000118200_37 (sequence is synthesized)
atacacttattgcccagaaactgaagaaatcaataaactgactgggataggccctaaatctatcactaaaaaaatgattgaaggactttacaaatataattctgacaggaaacagtttag

SEQ ID NO: 225688 - DNA, 120 bp, Artificial Sequence
  ENSG00000118200_38 (sequence is synthesized)
ccacatacccgctaaaactttatctgccagtgttgatgcaattaccattcatagccatttatggcagaccaaaagaccagtaacacccaaaaaacttttacccactaaggcatagaagtt

SEQ ID NO: 225689 - DNA, 120 bp, Artificial Sequence
  ENSG00000118200_39 (sequence is synthesized)
gggaaatacttgcttcagaacattcatggtaaatttgcacttcatctttcctgcctatagaaaatctttctaattgccaacaagacttttattaattaaaactggacattaagctctgtt

SEQ ID NO: 225690 - DNA, 120 bp, Artificial Sequence
  ENSG00000118200_40 (sequence is synthesized)
gtcatgaacaactggaatgtaaaccacagtattttggagtgcagaacattctcaattaagtgataagtccaaatgatgaaggaaatgttttaattcacaaatggagatttgtatgtgtta

SEQ ID NO: 225691 - DNA, 120 bp, Artificial Sequence
  ENSG00000118200_41 (sequence is synthesized)
tcaggttcacctgcttgatattagatacattaaagcactgaattttcatggatattagttggatttatcattgaaatatggttaagattacaaattatgtgttttatttgttgctttttt

SEQ ID NO: 225692 - DNA, 120 bp, Artificial Sequence
  ENSG00000118200_42 (sequence is synthesized)
ttaaccttttaatgtatattcttgtcttcagatggtttgctatttttctctcctgggggtttattctaagatacctttgtattttatttcatgtggagatcatgaaagtaggaaatatac

SEQ ID NO: 225693 - DNA, 120 bp, Artificial Sequence
  ENSG00000118200_43 (sequence is synthesized)
ctttagaagtaactcgcacctttcttatgatgttaagagaaacactagtgtttagttttacagtaaccctcatattttaatggtgttacagcatttgcaaaaattattctgctaagtatt

SEQ ID NO: 225694 - DNA, 120 bp, Artificial Sequence
  ENSG00000118200_44 (sequence is synthesized)
tacaactctatttattattcactcaagtattaacattctctattaaataagaggaggtgttgtaaagagctgctagtaggttcgctttaaaccacatgagcttaaccaagaatatgttat

SEQ ID NO: 225695 - DNA, 120 bp, Artificial Sequence
  ENSG00000118200_45 (sequence is synthesized)
gagaagttgctgattaaatcagtgctgtttttacaccacttctggccaactcagaataatttagattgttcttttaacaaaaaaggctttctatctcttttaaagtaagtcactttataa

SEQ ID NO: 225696 - DNA, 120 bp, Artificial Sequence
  ENSG00000118200_46 (sequence is synthesized)
gttggcagaagtgaatgacactttgagagtagtctttcaatctgaagatgtaagacttcctgaaacaagttctcaagaagtctttacattatatttataactcatataaaaattatattt

SEQ ID NO: 225697 - DNA, 120 bp, Artificial Sequence
  ENSG00000118200_47 (sequence is synthesized)
agaatttttaaacatgtacaaagggctacattttaattttaaaatagcttcacattattttacttatattgggtttttcttcattttaatccttttcaagtggaatggcttagaataagt

SEQ ID NO: 225698 - DNA, 120 bp, Artificial Sequence
  ENSG00000118200_48 (sequence is synthesized)
atacacttgaaatctcctctacatgatctttgttctttaacagtgtataccagagggttagttggggaaaaacttcattctcaggaaaagacttgaatgattatgtgaccctgttatatt

SEQ ID NO: 225699 - DNA, 120 bp, Artificial Sequence
  ENSG00000118200_49 (sequence is synthesized)
tcagtgttgtgacaaatgtgtaaactagcgggggaagacagtattgtatcataaatgagatgcgtagtttgttttctttcatgggaagtagagataaaaatatatacatttctctaattg

SEQ ID NO: 225700 - DNA, 120 bp, Artificial Sequence
  ENSG00000118200_50 (sequence is synthesized)
agttgtttagagaaagaactaatgtctcatatgatgtatttacttattttaaaaaaaagaataggaatgagatgtccctgagctgtacttttctattattataaggcctttaggcatcag

SEQ ID NO: 225701 - DNA, 120 bp, Artificial Sequence
  ENSG00000118200_51 (sequence is synthesized)
tgcatctgggttatcaacattttctcaaatgctgtcaatattttactgtaatttatgttcttatatttatgtatatttgttaaaactgtaaaaaaatttcacagatttttttccaatacc

SEQ ID NO: 225702 - DNA, 120 bp, Artificial Sequence
  ENSG00000118200_52 (sequence is synthesized)
tgtgcaagatacatgtgtagctcaaaactatttgtgatctactgtttgcatgtaagagaccaggatatgtaactcttatattttaagtgtatacatattgtgtatataacatatggatat

SEQ ID NO: 225703 - DNA, 120 bp, Artificial Sequence
  ENSG00000118200_53 (sequence is synthesized)
taaaaatggggaattgcacattttaccttttggacagtaatttctatcacagttagaaggaaatgatagtcaaatacacgtttagattaaaactagtttaaaaaattataaatgaatcta

SEQ ID NO: 225704 - DNA, 120 bp, Artificial Sequence
  ENSG00000118200_54 (sequence is synthesized)
atcaaaatgtgaatagtagtcaaaaggataatttaataagcattttacgttactaaatttgttcatttcaatattaactaaatttccctcatcaaagcaatctttgtgatattacttcgc

SEQ ID NO: 225705 - DNA, 120 bp, Artificial Sequence
  ENSG00000118200_55 (sequence is synthesized)
tattaaataaagaaaattggatgcaagacaatggagaaactttaaaactaaacaggaccaccctttattcttaaatttgtgtgtgtccaacagttgaattgaatgtctataaggtctaaa

SEQ ID NO: 225706 - DNA, 120 bp, Artificial Sequence
  ENSG00000118200_56 (sequence is synthesized)
ggtagaatgtgaatattgccacagagttcattgctctcagtataagattttactttattaatgcagaaggaatatggatatatttctttaagtctgcagatttttttattatggtgcagc

SEQ ID NO: 225707 - DNA, 120 bp, Artificial Sequence
  ENSG00000118200_57 (sequence is synthesized)
ttttttttaattatgtttttaaaattatacagttgaaaaatatgccatttcataaagtctgaggattttcgtcaaccttactgaaacacactggtgctttcatcatcagaggtcaaatta

SEQ ID NO: 225708 - DNA, 120 bp, Artificial Sequence
  ENSG00000118200_58 (sequence is synthesized)
ttatgataactattccattaagtttgccaaacatttgtcgtggttaccagtgcagcctgtcaaattctgctatttgacacagctttggaaagatttagttcttggtttttccgttttgta

SEQ ID NO: 225709 - DNA, 120 bp, Artificial Sequence
  ENSG00000118200_59 (sequence is synthesized)
ttagaatgactgttacagttttatttggctgtttaaagccaaattcagctatttaattatggtttcatggacactgttgagcaatgtacagtgtatggtgtgcttacctgtccactctag

SEQ ID NO: 225710 - DNA, 120 bp, Artificial Sequence
  ENSG00000118200_60 (sequence is synthesized)
agcattgcttacaggttttttgttttttaagatgctgtgctgtaaaatactgtcatacttgctatttcctggtacagtgtagtttttcccctttcatttgaataaaagcatggcaccaaa

SEQ ID NO: 225711 - DNA, 120 bp, Artificial Sequence
  ENSG00000118200_61 (sequence is synthesized)
gagaatgtactctcatgggcctagactttcaacagcatgtaaaaagatctgtagctagatgttttaattatcagatttagtttattttcacattaggttctggaagcctgcagattttat

SEQ ID NO: 225712 - DNA, 120 bp, Artificial Sequence
  ENSG00000118200_62 (sequence is synthesized)
taaagactagcaataggctttaagatttgtcattgaaataatgttataaaatgtgactaagaaacgtaacataattatataaactttattcagcaaaataaagggtttttattcgtgttg

SEQ ID NO: 225713 - DNA, 120 bp, Artificial Sequence
  ENSG00000118200_63 (sequence is synthesized)
tattactggtacattagaatttacagtactgatttttttcctatgcgttatttggtacttatttattttcatgtattttttttatatcgtaggctcgttatcggaaagagcaaacattgc

SEQ ID NO: 225714 - DNA, 120 bp, Artificial Sequence
  ENSG00000118217_0 (sequence is synthesized)
agatattaatcacggagttccagggagaaggaacttgtgaaatgggggagccggctggggttgccggcaccatggagtcaccttttagcccgggactctttcacaggctggatgaagatt

SEQ ID NO: 225715 - DNA, 120 bp, Artificial Sequence
  ENSG00000118217_1 (sequence is synthesized)
gggattctgctctctttgctgaactcggttatttcacagacactgatgagctgcaattggaagcagcaaatgagacgtatgaaaacaattttgataatcttgattttgatttggatttga

SEQ ID NO: 225716 - DNA, 120 bp, Artificial Sequence
  ENSG00000118217_2 (sequence is synthesized)
tgccttgggagtcagacatttgggacatcaacaaccaaatctgtacagttaaagatattaaggcagaacctcagccactttctccagcctcctcaagttattcagtctcgtctcctcggt

SEQ ID NO: 225717 - DNA, 120 bp, Artificial Sequence
  ENSG00000118217_3 (sequence is synthesized)
cagtggactcttattcttcaactcagcatgttcctgaggagttggatttgtcttctagttctcagatgtctcccctttccttatatggtgaaaactctaatagtctctcttcagcggagc

SEQ ID NO: 225718 - DNA, 120 bp, Artificial Sequence
  ENSG00000118217_4 (sequence is synthesized)
cactgaaggaagataagcctgtcactggtcctaggaacaagactgaaaatggactgactccaaagaaaaaaattcaggtgaattcaaaaccttcaattcagcccaagcctttattgcttc

SEQ ID NO: 225719 - DNA, 120 bp, Artificial Sequence
  ENSG00000118217_5 (sequence is synthesized)
cagcagcacccaagactcaaacaaactccagtgttccagcaaaaaccatcattattcagacagtaccaacgcttatgccattggcaaagcagcaaccaattatcagtttacaacctgcac

SEQ ID NO: 225720 - DNA, 120 bp, Artificial Sequence
  ENSG00000118217_6 (sequence is synthesized)
ccactaaaggccagacggttttgctgtctcagcctactgtggtacaacttcaagcacctggagttctgccctctgctcagccagtccttgctgttgctgggggagtcacacagctcccta

SEQ ID NO: 225721 - DNA, 120 bp, Artificial Sequence
  ENSG00000118217_7 (sequence is synthesized)
atcacgtggtgaatgtggtaccagccccttcagcgaatagcccagtgaatggaaaactttccgtgactaaacctgtcctacaaagtaccatgagaaatgtcggttcagatattgctgtgc

SEQ ID NO: 225722 - DNA, 120 bp, Artificial Sequence
  ENSG00000118217_8 (sequence is synthesized)
taaggagacagcaacgtatgataaaaaatcgagaatccgcttgtcagtctcgcaagaagaagaaagaatatatgctagggttagaggcgagattaaaggctgccctctcagaaaacgagc

SEQ ID NO: 225723 - DNA, 120 bp, Artificial Sequence
  ENSG00000118217_9 (sequence is synthesized)
aactgaagaaagaaaatggaacactgaagcggcagctggatgaagttgtgtcagagaaccagaggcttaaagtccctagtccaaagcgaagagttgtctgtgtgatgatagtattggcat

SEQ ID NO: 225724 - DNA, 120 bp, Artificial Sequence
  ENSG00000118217_10 (sequence is synthesized)
ttataatactgaactatggacctatgagcatgttggaacaggattccaggagaatgaaccctagtgtgagccctgcaaatcaaaggaggcaccttctaggattttctgctaaagaggcac

SEQ ID NO: 225725 - DNA, 120 bp, Artificial Sequence
  ENSG00000118217_11 (sequence is synthesized)
aggacacatcagatggtattatccagaaaaacagctacagatatgatcattctgtttcaaatgacaaagccctgatggtgctaactgaagaaccattgctttacattcctccacctcctt

SEQ ID NO: 225726 - DNA, 120 bp, Artificial Sequence
  ENSG00000118217_12 (sequence is synthesized)
gtcagcccctaattaacacaacagagtctctcaggttaaatcatgaacttcgaggatgggttcatagacatgaagtagaaaggaccaagtcaagaagaatgacaaataatcaacagaaaa

SEQ ID NO: 225727 - DNA, 120 bp, Artificial Sequence
  ENSG00000118217_13 (sequence is synthesized)
cccgtattcttcagggtgctctggaacagggctcaaattctcagctgatggctgttcaatacacagaaaccactagtagtatcagcaggaactcagggagtgagctacaagtgtattatg

SEQ ID NO: 225728 - DNA, 120 bp, Artificial Sequence
  ENSG00000118217_14 (sequence is synthesized)
cttcacccagaagttatcaagacttttttgaagccatccgcagaaggggagacacattttatgttgtgtcatttcgaagggatcacctgctgttaccagctaccacccataacaagacca

SEQ ID NO: 225729 - DNA, 120 bp, Artificial Sequence
  ENSG00000118217_15 (sequence is synthesized)
caagaccaaaaatgtcaattgtgttaccagcaataaacataaatgagaatgtgatcaatgggcaggactacgaagtgatgatgcagattgactgtcaggtgatggacaccaggatcctcc

SEQ ID NO: 225730 - DNA, 120 bp, Artificial Sequence
  ENSG00000118217_16 (sequence is synthesized)
atatcaaaagttcgtcagttcctccttacctccgagatcagcagaggaatcaaaccaacaccttctttggctcccctcccgcagccacagaggcaacccacgttgtcagcaccatccctg

SEQ ID NO: 225731 - DNA, 120 bp, Artificial Sequence
  ENSG00000118217_17 (sequence is synthesized)
agtcattacaatagcaccctgcagctatgctggaaaactgagcgtgggaccctgccagactgaagagcaggtgagcaaaatgctgctttctgccttggtggcaggcagagaactgtctcg

SEQ ID NO: 225732 - DNA, 120 bp, Artificial Sequence
  ENSG00000118217_18 (sequence is synthesized)
tactagaattcaaggaggaaagaagaagaaataaaagaagctgctccatttttcatcatctacccatctatttggaaagcactggaattcagatgcaagagaacaatgtttcttcagtgg

SEQ ID NO: 225733 - DNA, 120 bp, Artificial Sequence
  ENSG00000118217_19 (sequence is synthesized)
caaatgtagccctgcatcctccagtgttacctggtgtagatttttttttctgtacctttctaaacctctcttccctctgtgatggttttgtgtttaaacagtcatcttcttttaaataat

SEQ ID NO: 225734 - DNA, 120 bp, Artificial Sequence
  ENSG00000118217_20 (sequence is synthesized)
atccacctctcctttttgccatttcacttattgattcataaagtgaattttatttaaagctatgccacacatgcatgttcaaatggtttccactgattcgatttttcattcatttaatgc

SEQ ID NO: 225735 - DNA, 120 bp, Artificial Sequence
  ENSG00000118217_21 (sequence is synthesized)
aaacccattctggatattgtgcttatttgagaaaacacatttcaaaaccagaaaagccaaaaacactccaaaaacaagcaaaacaatttggagctttagataaaaggaaaaactcccagt

SEQ ID NO: 225736 - DNA, 120 bp, Artificial Sequence
  ENSG00000118217_22 (sequence is synthesized)
tggtaaagtttatctttacttaggatttgtggctcacacctaaacaaagggggtcagggagtgggtacaaatttgagaaaatagaagggtaagggaagggccagtggtggggtttggaga

SEQ ID NO: 225737 - DNA, 80 bp, Artificial Sequence
  ENSG00000118217_23 (sequence is synthesized)
atagaagggtaagggaagggccagtggtggggtttggagagaggagatagctccattaatacacatgtttaaaagatgga

SEQ ID NO: 225738 - DNA, 120 bp, Artificial Sequence
  ENSG00000118217_24 (sequence is synthesized)
atgagattaaagccacaactattgtttattttggggactctaggccaccaagtattagcacacatacttatgttttctctactaatctggtccaggtcctcatggaccacaggacaaagc

SEQ ID NO: 225739 - DNA, 120 bp, Artificial Sequence
  ENSG00000118217_25 (sequence is synthesized)
tttcattttcattcattcttctattgaaattataccaaattcagctgaggaatatggaagtaactttagacttaaacaagacaaaagttttttcactgaagaattgacaagtatttgctc

SEQ ID NO: 225740 - DNA, 120 bp, Artificial Sequence
  ENSG00000118217_26 (sequence is synthesized)
cttaaaacaacgcagattagtgaacgtggattcctgctgagggagtgcatcccataatatggcaataattttcagtttctccaacgaaaagatagtgaaggaattaaatcttttgtcctc

SEQ ID NO: 225741 - DNA, 120 bp, Artificial Sequence
  ENSG00000118217_27 (sequence is synthesized)
ccatggttaaaaaaaaaaaaaaagctgtgttcatttttactgtactatgcctcttttttcaccatagtagacaattatgtttcatttgatgaattcatagaactggatctcatacagcga

SEQ ID NO: 225742 - DNA, 120 bp, Artificial Sequence
  ENSG00000118217_28 (sequence is synthesized)
tgtcctctctaatgttctacctttcagtttctaaagtgagtcttcctccctctcctacaaaacttttcaattttttgatgtaactcatctacaaatactgtttcttaccccagttgactt

SEQ ID NO: 225743 - DNA, 120 bp, Artificial Sequence
  ENSG00000118217_29 (sequence is synthesized)
tatagcaatcaatttctcttcttccttacaagaaagggaacgagaaattgtagcaacctctcaaggattatatgcagctagttagttttctgcctgtgaaattaggtctggctcctaaat

SEQ ID NO: 225744 - DNA, 120 bp, Artificial Sequence
  ENSG00000118217_30 (sequence is synthesized)
aattttaaagaaccatcagcacttctaactctctggacaggtgcctctttgtccaagctagttaaatgctttccaaggaaatcagttcaacttttgtgagcggggaaaagcagggcttta

SEQ ID NO: 225745 - DNA, 120 bp, Artificial Sequence
  ENSG00000118217_31 (sequence is synthesized)
ttgttgtgttacctgggagtctggagtttgaaaagtgctaattaaccttcctctttttccacattacaaacctttttaagcagcgcagcactccccttagatttggctatcctgggtgat

SEQ ID NO: 225746 - DNA, 120 bp, Artificial Sequence
  ENSG00000118217_32 (sequence is synthesized)
tttcagacaagaaccattttctctggggaccattcttctgctgggtgccaaggaatataaggcaaatgcccagaagaccttcaggtgactgggcagtcttatcatgggatatttcttctg

SEQ ID NO: 225747 - DNA, 120 bp, Artificial Sequence
  ENSG00000118217_33 (sequence is synthesized)
gccctgccccttcccattctgtaatgtgaattagccacaccagaggctgtgaccatggctagtagacagtggcaacatagtcatccccaagatgctaatcttctgctggaactgtcatac

SEQ ID NO: 225748 - DNA, 120 bp, Artificial Sequence
  ENSG00000118217_34 (sequence is synthesized)
gttatcatggtcaatgtaaacctggtttgtgtggggtgattataaatagagtttccctcctctctgtgacagaatcacaggagaaggacccatctcgtggccttcttgttcttagcgctt

SEQ ID NO: 225749 - DNA, 120 bp, Artificial Sequence
  ENSG00000118217_35 (sequence is synthesized)
cacttttacttcatccctcgattcccagctttttctatcatcattttgccaactcctcagatgcaagactttggttatgtcatactcaccaacgttagtccctctcttccaggtgaaaag

SEQ ID NO: 225750 - DNA, 120 bp, Artificial Sequence
  ENSG00000118217_36 (sequence is synthesized)
gtgggtagcggttgggagggagtctccactgaagagcaggaaggtggtagcagggccggcagctctgccacagagctaggggtgcctgtaaggtgccgcctagagcagcctgggagcttt

SEQ ID NO: 225751 - DNA, 120 bp, Artificial Sequence
  ENSG00000118217_37 (sequence is synthesized)
gccttcttttgtctctcactagcccttctactctttgtcattgcctgttcttgagtggatctttgaaatgaggggacaggattctcctaagggtagagtttcaggaaatgagtgaaaggc

SEQ ID NO: 225752 - DNA, 120 bp, Artificial Sequence
  ENSG00000118217_38 (sequence is synthesized)
aattgacaaatgcaaagaagtagtcactttttaaattgctggcaaagctataattaatccctaggcacaattgtagtttttattttaatgtttgtatgcacaaggccctttaggaaatga

SEQ ID NO: 225753 - DNA, 120 bp, Artificial Sequence
  ENSG00000118217_39 (sequence is synthesized)
gaagttgccatgccagattaatttttttttttttttttggtgggattgccttttgggggttgcagccagaaattgtgggtaatgtgtgtatttttttatttattaaattttaaacaggat

SEQ ID NO: 225754 - DNA, 120 bp, Artificial Sequence
  ENSG00000118217_40 (sequence is synthesized)
tgtgcaagcttatgagacaattagataaactcatggaggaggcaggtcctcctgttattagatgattttgtgctcttggggctgacaataatacactcttgggaagtgatggtagagact

SEQ ID NO: 225755 - DNA, 120 bp, Artificial Sequence
  ENSG00000118217_41 (sequence is synthesized)
gatgggaatagtctttctgcctggttgcaagtcccaaatttttaagggttaatggaagtaagtggatgtttcctcatgttaactactgaatcagatgttaggagcttgtccctttggggt

SEQ ID NO: 225756 - DNA, 120 bp, Artificial Sequence
  ENSG00000118217_42 (sequence is synthesized)
tgacttatgcccagcagtacagggacacagcttcattagagtgttagtgtaaactaactccaaagttaggagttaatgtgaaaggatcatccttgaaacaaatctgctgtttgccatgct

SEQ ID NO: 225757 - DNA, 120 bp, Artificial Sequence
  ENSG00000118217_43 (sequence is synthesized)
tgtagtacagaaacttcacatggagttttgggtgggatttgtgttttcacaagtaaaaaatccctcacgattataaaactcagagcatcatctaatttttttttttaatgactacaagtt

SEQ ID NO: 225758 - DNA, 120 bp, Artificial Sequence
  ENSG00000118217_44 (sequence is synthesized)
ccagcacaaaactggcatttctttgccatttcttgccagtaagaagttgacacggaggtatttgaaagcaatgttatgtgagtcattcttaagtgttccaagtaagtttagaaacagaaa

SEQ ID NO: 225759 - DNA, 120 bp, Artificial Sequence
  ENSG00000118217_45 (sequence is synthesized)
aggaacttgggattcaaattgatttttcaaatcatttttaaagagacatcatcctgactaaatcttagcctgaaccttcctcccctgtgtgtattccccggtagtcaccgcagcgagatg

SEQ ID NO: 225760 - DNA, 120 bp, Artificial Sequence
  ENSG00000118217_46 (sequence is synthesized)
ctggtgagactgccgtggtggcatttagcatcgttaaaactggaaaactctcaagctctttgccactttcctactattttttgattcttgccattttaccaagcttaggttgtgaaactt

SEQ ID NO: 225761 - DNA, 120 bp, Artificial Sequence
  ENSG00000118217_47 (sequence is synthesized)
gacagaaatgtattacaggaaaaacttataattgtatttgactttctaacacattgcaaagtttcaaagtgactttcactttcaacaacatattagaagtaaccacttttgctttcacag

SEQ ID NO: 225762 - DNA, 120 bp, Artificial Sequence
  ENSG00000118217_48 (sequence is synthesized)
cctgaagagttagagcctgatctgatgccccctttcactctgaagtcatgggaaattttccagccatgaaagccctctttccactgcatactgatgggctgactcagcttccttcagccg

SEQ ID NO: 225763 - DNA, 120 bp, Artificial Sequence
  ENSG00000118217_49 (sequence is synthesized)
actgagatcttttcatactattggctatttcataccaattaacctcttaaataagattgtgaattgccaaaattgatagacacttattaccacctgtggactccatattccttaccacaa

SEQ ID NO: 225764 - DNA, 120 bp, Artificial Sequence
  ENSG00000118217_50 (sequence is synthesized)
atgttattttcatcagtcctgagtcattttaacttacagaaattaggattgttgctgctaatatgaataccaattataacttttagaaacaagaataaagcctaaaagagaatgaaatat

SEQ ID NO: 225765 - DNA, 120 bp, Artificial Sequence
  ENSG00000118217_51 (sequence is synthesized)
aagaaatgttcgttcccacccctaataacatttggaagtgaatattcccattttcttccacccacagggattgggattgatttttaatttcctaggaaacaatactagactacccaaaaa

SEQ ID NO: 225766 - DNA, 120 bp, Artificial Sequence
  ENSG00000118217_52 (sequence is synthesized)
gatgttgccagaatccaaaaggaactatgctcgtaaaagaaatgcagttttctcctacctaaaaaaaagaaagtaaagtgtgttctgttcttatctttttaatgactaagctttaaacag

SEQ ID NO: 225767 - DNA, 120 bp, Artificial Sequence
  ENSG00000118217_53 (sequence is synthesized)
tttattttgggtaagactagaactttcggccatttgttctaatatgtgtgttattagatgcaatagaatttatgaaaagaagaatgacaaaggtatctgattagaaaatttgatcttacg

SEQ ID NO: 225768 - DNA, 120 bp, Artificial Sequence
  ENSG00000118217_54 (sequence is synthesized)
catgaatccatgtcatggccagccactgtcacatagtgggtgccattctcaacatattggtttgctaactttaagcattagggatttagcacactaaaatacttttaattatattaggtt

SEQ ID NO: 225769 - DNA, 120 bp, Artificial Sequence
  ENSG00000118217_55 (sequence is synthesized)
tggtaactaaggagtaaataaatcataatttatcatttgccaaggccaacaaacaacactattgtgctgtttgctctcaatgaagttgaataaaccaggaggcttggcatatccccttta

SEQ ID NO: 225770 - DNA, 120 bp, Artificial Sequence
  ENSG00000118217_56 (sequence is synthesized)
tgttaatcccagctagagattagtaggttgactttcacagcaattgtatattgatccattttaactcatccttgccataatttccaggccagtcaccaggacagaggagatgatggggaa

SEQ ID NO: 225771 - DNA, 120 bp, Artificial Sequence
  ENSG00000118217_57 (sequence is synthesized)
acagagctttagatgaaaactactatgcactactagccttagaggcactggtttcctgttaccactttggcaagtatggatggtctaagtccagtagggcttcatccatggagccattag

SEQ ID NO: 225772 - DNA, 120 bp, Artificial Sequence
  ENSG00000118217_58 (sequence is synthesized)
aactgaggggggagtgttagagatgccatttcaccaggatctttttgctcaggttgtacccatgccaattgaagaacgtgttaaagatgaggaggagagatgtaccattctctcccttaa

SEQ ID NO: 225773 - DNA, 120 bp, Artificial Sequence
  ENSG00000118217_59 (sequence is synthesized)
taatgatgttggtttgcaaaacctaaagaaataataacaacagactatttcatactttcaagcaagtctttatactacctgttatttctctaaaattcaaataaagaatttttaaactta

SEQ ID NO: 225774 - DNA, 120 bp, Artificial Sequence
  ENSG00000118217_60 (sequence is synthesized)
caggaagacaagtgtcctgctctgtgtcatctttgggctttataaaccatgttccatctgttgtctcatttgaatctcaggaaaaccttgtgaaatatttgttatttttcatgttttaca

SEQ ID NO: 225775 - DNA, 120 bp, Artificial Sequence
  ENSG00000118217_61 (sequence is synthesized)
tgtgaggaattggaggcttagagaagttgaccaagtatcccagacatactcaagtgagcagtctcagagtaacatcttgaacccagatctcctgtctccaaattttgtgctcattccact

SEQ ID NO: 225776 - DNA, 120 bp, Artificial Sequence
  ENSG00000118217_62 (sequence is synthesized)
atttcacattaaaacctgaagatctccctgctcttttcatcttaacgtaatttcagctttttgtgtgtggctctccaagccacagagcagcagcagcttttgaggataagaagcagtttc

SEQ ID NO: 225777 - DNA, 120 bp, Artificial Sequence
  ENSG00000118231_0 (sequence is synthesized)
gctcagcgccgccgccccaccagctcagcaccgccgtgcgcccagccagccatggggaagatcaccctctacgaggaccggggcttccagggccgccactatgaatgcagcagcgaccac

SEQ ID NO: 225778 - DNA, 120 bp, Artificial Sequence
  ENSG00000118231_1 (sequence is synthesized)
cccaacctgcagccctacttgagccgctgcaactcggcgcgcgtggacagcggctgctggatgctctatgagcagcccaactactcgggcctccagtacttcctgcgccgcggcgactat

SEQ ID NO: 225779 - DNA, 120 bp, Artificial Sequence
  ENSG00000118231_2 (sequence is synthesized)
tcctgccgcctcatcccccactctggctctcacaggatcagactctatgagagagaggactacagaggccagatgatagagttcactgaggactgctcctgtcttcaggaccgcttccgc

SEQ ID NO: 225780 - DNA, 120 bp, Artificial Sequence
  ENSG00000118231_3 (sequence is synthesized)
ttcaatgaaatccactccctcaacgtgctggagggctcctgggtcctctacgagctgtccaactaccgaggacggcagtacctgctgatgccaggggactataggcgctaccaggactgg

SEQ ID NO: 225781 - DNA, 120 bp, Artificial Sequence
  ENSG00000118231_4 (sequence is synthesized)
ggggccacgaatgccagagtgggctctctgaggagagtcatagatttctcctgaaatatgtcctcttttgttgtttcttaatttggaaactaataaaatattttctgtgtgttcctggca

SEQ ID NO: 225782 - DNA, 120 bp, Artificial Sequence
  ENSG00000118242_0 (sequence is synthesized)
aaaactcacgccccaaacaaaacgcaaggagaggagggcgcgcggcctgcagccctcgcccgcgtccccggccgcggcgtgatgcgcgcggaccagcccgcgacgcccgggctgccgctg

SEQ ID NO: 225783 - DNA, 120 bp, Artificial Sequence
  ENSG00000118242_1 (sequence is synthesized)
cctggacgctggcgcggtggccgcgccccagcctcgatcgctcgccgcggcgactcggccccaggcttccggcgccggtgggggccctcgctctccatggggctgagggactggctgaga

SEQ ID NO: 225784 - DNA, 120 bp, Artificial Sequence
  ENSG00000118242_2 (sequence is synthesized)
ggctgagaaccgtgtgctgctgctgcgggtgcgagtgcttggaggagcgcgccctgcctgagaaggagcccctcgtcagtgataacaatccatattcctcatttggagcaactctggtga

SEQ ID NO: 225785 - DNA, 120 bp, Artificial Sequence
  ENSG00000118242_3 (sequence is synthesized)
gggatgatgagaagaatttatggagtatgccccatgatgtgtcccacacagaggcagacgacgacagaaccctgtacaatttgatagtcattcgtaatcagcaggccaaagactcagagg

SEQ ID NO: 225786 - DNA, 120 bp, Artificial Sequence
  ENSG00000118242_4 (sequence is synthesized)
agtggcagaagctcaactatgatatccataccctgcggcaggttcgaagggaagtaagaaacagatggaagtgcatcttagaagatttaggttttcaaaaggaagctgactctttgttgt

SEQ ID NO: 225787 - DNA, 120 bp, Artificial Sequence
  ENSG00000118242_5 (sequence is synthesized)
cagtgactaaactcagcaccatcagtgattctaaaaacacaaggaaagctcgagagatgttgttaaaactggctgaagaaaccaatattttcccaacaagttgggagctctcagagagat

SEQ ID NO: 225788 - DNA, 120 bp, Artificial Sequence
  ENSG00000118242_6 (sequence is synthesized)
atctctttgttgtggaccgtctcattgcacttgatgctgcagaagagttctttaagcttgctcgtcgaacttaccccaagaagcctggggttccatgcctggcagatggccagaaagaac

SEQ ID NO: 225789 - DNA, 120 bp, Artificial Sequence
  ENSG00000118242_7 (sequence is synthesized)
tgcactaccttccgtttccaagtccctaaaggagaggctcaggggcagaatgggaattcttccatgaggactcagcagtcaaccaaagttggacaattacatgtagaagagagtgagcaa

SEQ ID NO: 225790 - DNA, 120 bp, Artificial Sequence
  ENSG00000118242_8 (sequence is synthesized)
atagagtttgcttagtgaaaaatgatactgaattctacataaatgtaaagtctttaatctgaggaccctgccccatgaattgtgcaggctgcattgaaacgccttggtgatctcatattt

SEQ ID NO: 225791 - DNA, 120 bp, Artificial Sequence
  ENSG00000118242_9 (sequence is synthesized)
aggaagaaagttaaagagttggtcagatggatagttcataatgggtggttccattctgagagcccattgccccagctttggttttagttgtgtcataatctctgatcattaatcctactg

SEQ ID NO: 225792 - DNA, 120 bp, Artificial Sequence
  ENSG00000118242_10 (sequence is synthesized)
actgagtggactatttcagttaataaaacaatatgattaatagagagagctgtcattgagtcccaaaatggattgccagttttaaaataattattataaaatgtatgctaaccccaaaat

SEQ ID NO: 225793 - DNA, 120 bp, Artificial Sequence
  ENSG00000118242_11 (sequence is synthesized)
aatactaggcatgaggtgacctctctgatttggtcaccttgtagaaccttggagggtgtcagggcatctctttgagtatcagttatgattattcagaagtatagatgtatcaaatgatag

SEQ ID NO: 225794 - DNA, 85 bp, Artificial Sequence
  ENSG00000118242_12 (sequence is synthesized)
gcttgtaatcccagctacccaggaggctgaggtaggagaatcgcttgagcccgggcagtggaggttacagtgagccgagattgca

SEQ ID NO: 225795 - DNA, 120 bp, Artificial Sequence
  ENSG00000118242_13 (sequence is synthesized)
aaaaaaaaaaaaaaaaaaaaagagttatgtattcatgtgttgtacttgcattttaaattcccaacattattgatatctggttctctcatctttgtatattgtccatttctattccaaaag

SEQ ID NO: 225796 - DNA, 83 bp, Artificial Sequence
  ENSG00000118242_14 (sequence is synthesized)
cattttaaattcccaacattattgatatctggttctctcatctttgtatattgtccatttctattccaaaagcactctcgctc

SEQ ID NO: 225797 - DNA, 120 bp, Artificial Sequence
  ENSG00000118242_15 (sequence is synthesized)
atctggaatagcatctgtaaactgaagtgtttgacctctgttttcttctctcctctttcatctgtttctgattcgttggctggcagctgcacctgtggggggacctctcatgcagacttg

SEQ ID NO: 225798 - DNA, 120 bp, Artificial Sequence
  ENSG00000118242_16 (sequence is synthesized)
cacatatgcagggagtattgcactgaagatctttgctggaccttcttctcttcagaagataattttcaaaagggagcaatgctgtgaatgcagcttgcttctctctacagattgagaagt

SEQ ID NO: 225799 - DNA, 120 bp, Artificial Sequence
  ENSG00000118242_17 (sequence is synthesized)
ccagcttcaaaagttacttgccacttaagcaaggaacttgtcaagagatcatggttcatgttactgaaaagactttaaggatttgtaaggttaatccatagattgctgagaaaaatggaa

SEQ ID NO: 225800 - DNA, 120 bp, Artificial Sequence
  ENSG00000118242_18 (sequence is synthesized)
atatttttatttttacagattttgcacttctgaattcaggttaaaaactaacttgtatttagtctgcttagaggactgtgacttgaaaatttttatataccaatgagctttttggtagcg

SEQ ID NO: 225801 - DNA, 120 bp, Artificial Sequence
  ENSG00000118242_19 (sequence is synthesized)
tccacaatgtttaaaatatttcataggcgagatccgtgttctccatttattaatgcattgtagaccaatttaactgctgtgtttcaggaaaattcttcctagtttaataagcaagctaaa

SEQ ID NO: 225802 - DNA, 120 bp, Artificial Sequence
  ENSG00000118242_20 (sequence is synthesized)
agttttattttttatatttagtgcttaatctttgcctcatgttatgtaaaattagcctgcagatattttctctcaattctgtagactctcgcaagataaacattcaaacagtgaaacaaa

SEQ ID NO: 225803 - DNA, 120 bp, Artificial Sequence
  ENSG00000118242_21 (sequence is synthesized)
caataaaataaataaacctaaggatgtcgtattgttttactctcggtctcagaatttgtattttgcctttctgccttttttatgtcaaaatagatgagattgtgtgcatctataaattgt

SEQ ID NO: 225804 - DNA, 120 bp, Artificial Sequence
  ENSG00000118242_22 (sequence is synthesized)
taccacagtatttttgataatgaataaggataggactatctctgtgattattaaaatacatggaattatccaggaaattttccttacaaggaattaaaagactcctgtatttacttttca

SEQ ID NO: 225805 - DNA, 120 bp, Artificial Sequence
  ENSG00000118242_23 (sequence is synthesized)
ttcaacttgagctttagtttcttcctttggtatttcttctgcactccttgtttacaaggatttcatttcagcaaaggagccatctattgaaataagatcaaccagcgggaagattctaaa

SEQ ID NO: 225806 - DNA, 120 bp, Artificial Sequence
  ENSG00000118242_24 (sequence is synthesized)
agtctagtgagaggcagtcctgcgttctgcctggtgggagtcagagtcttaagatttgccaagtcctgatgccatcagcattcacattgccttacagaggtctcctccccactccaagat

SEQ ID NO: 225807 - DNA, 120 bp, Artificial Sequence
  ENSG00000118242_25 (sequence is synthesized)
agtgccttcttaggattcaagacctggttgcaaagcttcaacttgagctttagttttttgctttggtatttcttctgcactccttgtttacaaggatttcatttcagcaaagaaggcatc

SEQ ID NO: 225808 - DNA, 120 bp, Artificial Sequence
  ENSG00000118245_0 (sequence is synthesized)
gcaaagcccctcattttggcagaacttaccatgtcgaccagccgcaaattaaagagtcatggcatgaggaggagcaagagccgatctcctcacaagggagtcaagagaggtggcagcaaa

SEQ ID NO: 225809 - DNA, 120 bp, Artificial Sequence
  ENSG00000118245_1 (sequence is synthesized)
cgccaatcgcaattaccgctcccacttgtgagcccccagcgggctctgccctggtgcgcttcacacagcaccaagcagcaacaagaacagcagaaggggaactgccaaggagacctgatg

SEQ ID NO: 225810 - DNA, 120 bp, Artificial Sequence
  ENSG00000118245_2 (sequence is synthesized)
ttagatcaaagccagagaggagcctatggaatgtggatcaaatgccagttgtgacgaaatgaggaatgtatatgttggctgtttttccccaacatctcaataaaactttgaaagcagaaa

SEQ ID NO: 225811 - DNA, 120 bp, Artificial Sequence
  ENSG00000118246_0 (sequence is synthesized)
aaagtctggcgcccagcagaggttaggtgtttaaagttaggacctgaatgggttacgttgcgatacacgatcaaacatcgcccttataagctctgtggtatccccgagccccactcctgt

SEQ ID NO: 225812 - DNA, 120 bp, Artificial Sequence
  ENSG00000118246_1 (sequence is synthesized)
atgcagggaaattagtcattctccttggtaaactttcttcaagtaagtccttcagctacagccgcgaacatatgctttttgacctttgagggaatccgtaagatctcgtgagaagcgcag

SEQ ID NO: 225813 - DNA, 120 bp, Artificial Sequence
  ENSG00000118246_2 (sequence is synthesized)
cttctcggggaagctgtcatggctgctcctgtacgtagtcacggtcttgtgctctaaggaaaacgacagcacgtgttctttttcactagtagaagtgacgttggtttcatgttgacaact

SEQ ID NO: 225814 - DNA, 120 bp, Artificial Sequence
  ENSG00000118246_3 (sequence is synthesized)
ttgaagccatttggaagtgtttcagtggagagcaaaatgaataacaaagcgggctcctttttctggaaccttagacaattcagtacattagtttcaacaagcagaactatgaggctatgt

SEQ ID NO: 225815 - DNA, 120 bp, Artificial Sequence
  ENSG00000118246_4 (sequence is synthesized)
tgtttgggactttgcaaaccaaaaatagttcattcaaactggaacattttaaataactttcataacagaatgcaatcaactgatatcattagatatctctttcaggatgcattcattttt

SEQ ID NO: 225816 - DNA, 120 bp, Artificial Sequence
  ENSG00000118246_5 (sequence is synthesized)
aaatcagatgttggctttcaaacaaagggcataagcactctaacagcccttagaattgaaagactactttatgctaaaagactgttttttgactcaaagcagtctcttgtccctgttgat

SEQ ID NO: 225817 - DNA, 120 bp, Artificial Sequence
  ENSG00000118246_6 (sequence is synthesized)
aaatctgatgatgaattgaagaaagtaaaccttaatcatgaagtctccaatgaagatgttcttaccaaggaaacaaaaccaaaccgtatcagcagtagaaaactgtctgaggaatgtaat

SEQ ID NO: 225818 - DNA, 120 bp, Artificial Sequence
  ENSG00000118246_7 (sequence is synthesized)
tccctgagtgatgtgttagatgcattttcaaaagcgcccacatttcctagtagcaactatttcacagcaatgtggacaattgccaaaagactgtctgatgaccagaagcgctttgaaaaa

SEQ ID NO: 225819 - DNA, 120 bp, Artificial Sequence
  ENSG00000118246_8 (sequence is synthesized)
cgactgatgtttagccaccctgcatttaatcagctctgtgaacatatgatgagagaagccaagatcatgcagtataagtacctactgttcagtcttcacgccatagtgaagcttggaatc

SEQ ID NO: 225820 - DNA, 120 bp, Artificial Sequence
  ENSG00000118246_9 (sequence is synthesized)
cctcagaacactattttggtgcagactttgctgagggtgacccaggaacgtatcaatgagtgtgatgagatatgcctttcagttttgtcaactgttttagaggcaatggaaccatgcaag

SEQ ID NO: 225821 - DNA, 120 bp, Artificial Sequence
  ENSG00000118246_10 (sequence is synthesized)
aatgttcatgttctacgaacgggattcagaatactagttgatcagcaagtttggaaaatagaagatgtcttcacattacaagttgtgatgaagtgtattggaaaagatgcaccgattgct

SEQ ID NO: 225822 - DNA, 120 bp, Artificial Sequence
  ENSG00000118246_11 (sequence is synthesized)
cttaagaggaaactggagatgaaagccttgagggaattagacagattttctgttttgaatagccaacacatgtttgaagtactagctgccatgaatcaccgatctcttatactcctggat

SEQ ID NO: 225823 - DNA, 120 bp, Artificial Sequence
  ENSG00000118246_12 (sequence is synthesized)
gaatgcagtaaggtggtcctagataatatccatgggtgtcctttaagaataatgatcaacatattgcagtcctgcaaagacctccagtaccataatttggatctcttcaagggacttgca

SEQ ID NO: 225824 - DNA, 120 bp, Artificial Sequence
  ENSG00000118246_13 (sequence is synthesized)
aaaccttggctttcgacctgttggtttaatggacctgtttatgaagagaatagtagaggatcctgaatccctaaacatgaaaaacattctatctattcttcatacttactcttctctcaa

SEQ ID NO: 225825 - DNA, 120 bp, Artificial Sequence
  ENSG00000118246_14 (sequence is synthesized)
tcatgtctacaaatgccagaacaaagaacagttcgtggaagttatggctagtgctctgactggttatcttcacactatttcttctgaaaacttattggatgcagtatattcattttgctt

SEQ ID NO: 225826 - DNA, 120 bp, Artificial Sequence
  ENSG00000118246_15 (sequence is synthesized)
gatgaattactttcccctggctccttttaatcagcttctgcaaaaagacatcatcagtgagctgctgacatcagatgacatgaagaatgcttacaagctgcatactttggatacttgtct

SEQ ID NO: 225827 - DNA, 120 bp, Artificial Sequence
  ENSG00000118246_16 (sequence is synthesized)
aaaacttgatgatactgtctatctgagggacatagccttgtcactcccacagctgccgcgggagctgccatcgtcacatacaaatgcaaaggtggcagaggtgctgagcagccttctggg

SEQ ID NO: 225828 - DNA, 120 bp, Artificial Sequence
  ENSG00000118246_17 (sequence is synthesized)
aggtgaaggacacttctcaaaggatgtgcacttgccacacaattatcatattgattttgaaatcagaatggacactaacaggaatcaagtgctaccactttctgatgtggatacaacttc

SEQ ID NO: 225829 - DNA, 120 bp, Artificial Sequence
  ENSG00000118246_18 (sequence is synthesized)
tgctacagatattcaaagagtagctgtgctatgtgtttccagatctgcttattgtttgggttcaagccaccccagaggattccttgctatgaaaatgcggcatttgaatgcaatgggttt

SEQ ID NO: 225830 - DNA, 120 bp, Artificial Sequence
  ENSG00000118246_19 (sequence is synthesized)
tcatgtgatcttggtcaataactgggagatggacaaactagagatggaagatgcagtcacatttttgaagactaaaatctattcagtagaagctcttcctgttgctgctgtaaatgtgca

SEQ ID NO: 225831 - DNA, 120 bp, Artificial Sequence
  ENSG00000118246_20 (sequence is synthesized)
aagcacacaataaagtgaaaatcaaccttttcatattaggagacatgcatttgtaaaaattaataaagatgacaagtcagttgtcaatggaattgagctatctgctaagacaaaaaatgt

SEQ ID NO: 225832 - DNA, 120 bp, Artificial Sequence
  ENSG00000118246_21 (sequence is synthesized)
tacctcagttcactattaaaattaattttaggagtggaagaaatgttgttactgccatttaaaaatatgctgagaaaattccagaagggttatttttccaaccacacctattccctctag

SEQ ID NO: 225833 - DNA, 120 bp, Artificial Sequence
  ENSG00000118246_22 (sequence is synthesized)
tgcccagatatttgatttgtgagctgtacgtttcaccttttcatctttgatctactaaaaactggtttcttagttgtgaggtgtcacaggcaggttgatgtgggtagtagtccttgtctt

SEQ ID NO: 225834 - DNA, 120 bp, Artificial Sequence
  ENSG00000118246_23 (sequence is synthesized)
tggaatctgaatatttatactcctgctctaagctgttctaagacttggggttatgcctttaaatcattttcaagcattggccaaataataattggacaaagttctaaagttgtcaagtgt

SEQ ID NO: 225835 - DNA, 120 bp, Artificial Sequence
  ENSG00000118246_24 (sequence is synthesized)
gtaagaattagtgaggtagctgttgaaaatgagtgaggatggtatttgtatttgtaataagcactgcaggtagagatatttcatgggttataataagagaaacacagatgagatgtagat

SEQ ID NO: 225836 - DNA, 120 bp, Artificial Sequence
  ENSG00000118246_25 (sequence is synthesized)
ggtaaggagtcttactgttgttggggtccttcctttctctttcttttttcccccttacccctcccacaatttcatgaagtcttttaaattaaatatatagctgaattgtgttgtgaatca

SEQ ID NO: 225837 - DNA, 120 bp, Artificial Sequence
  ENSG00000118246_26 (sequence is synthesized)
gaagctgtcatggctgctcctgtacgtagtcacggtcttgtgctctaaggtgagtggaggacgagcttgggcttagcggcagcccgtatcacatcctagactttttacttcgaggagaag

SEQ ID NO: 225838 - DNA, 120 bp, Artificial Sequence
  ENSG00000118246_27 (sequence is synthesized)
tacctagtatttggctcgctggggatatagtgatgaataggcatggtctcttgtggaacttacagcatgggttccatgcaagttggtgttattctgcccccaagcacacagacatgcaat

SEQ ID NO: 225839 - DNA, 120 bp, Artificial Sequence
  ENSG00000118246_28 (sequence is synthesized)
cacttcctcatctctaaaatcaggataggtatttgcccaaggctacacagagtaggggagggctggagtttgaatgtgagctaacataggcttataagaaaatacaaaaactgggctggg

SEQ ID NO: 225840 - DNA, 83 bp, Artificial Sequence
  ENSG00000118246_29 (sequence is synthesized)
ctaacataggcttataagaaaatacaaaaactgggctgggcacggtggctcgtgcttgtcatcccagcacgtcaagacaatcc

SEQ ID NO: 225841 - DNA, 85 bp, Artificial Sequence
  ENSG00000118246_30 (sequence is synthesized)
gcaatatgacaacagctgccaggttgtatcaatttatccagcttgcatttagaaaaggttagagctgaaaggaaatttagtgatt

SEQ ID NO: 225842 - DNA, 120 bp, Artificial Sequence
  ENSG00000118246_31 (sequence is synthesized)
catttagaaaaggttagagctgaaaggaaatttagtgattatttaattgttacttccctcattttatggacgaggaagataaggctcaaagaattttcctttcctgaagtctcagctatg

SEQ ID NO: 225843 - DNA, 120 bp, Artificial Sequence
  ENSG00000118246_32 (sequence is synthesized)
ccattggttccacatcatttcatcctcacctgctcttcagcttgtgtcccaggagatcaggcttctggttccagattggacaacctctagttttgtatacttggccaagtgatttaacct

SEQ ID NO: 225844 - DNA, 120 bp, Artificial Sequence
  ENSG00000118246_33 (sequence is synthesized)
tataagcttcagaacaagatgcagatattctgttattaaaggaactaaggttttgtctttaaatgttgagtgtgcatcagttttgagtgtctaattatgactcctcttcaaaggatttga

SEQ ID NO: 225845 - DNA, 120 bp, Artificial Sequence
  ENSG00000118246_34 (sequence is synthesized)
caaatttgtgaatatttatgaccaccttttagggtagtaattttcagtttgtactagttaacctggcagataaaaaggcatccctcttttactagcattctagtgttagcattcttcatt

SEQ ID NO: 225846 - DNA, 120 bp, Artificial Sequence
  ENSG00000118246_35 (sequence is synthesized)
gctttgtgtcaatgaaagaaaaatgggcaaagagctgatgaacatgaaaaaagttcagtctacttgtaaagacatgcacattgaaacagaagagatggttttgcctttcaaattagcagt

SEQ ID NO: 225847 - DNA, 120 bp, Artificial Sequence
  ENSG00000118246_36 (sequence is synthesized)
tttttttcttttaagaattacagtgctgatgaaggtataatgaggcaagcacttgcataagctgttggtagactgtaaattaatacctttctggaatgtactttgtggggttttcttctc

SEQ ID NO: 225848 - DNA, 120 bp, Artificial Sequence
  ENSG00000118246_37 (sequence is synthesized)
ccataatttaaaaaatagctttattatagtataattgacatacagtaaactgcatatatttaaagtgtaccgttaggtcagttttgacgtacatacacacacacacacatctgtgaaacc

SEQ ID NO: 225849 - DNA, 120 bp, Artificial Sequence
  ENSG00000118246_38 (sequence is synthesized)
acaatcaagataatgaatatatctatcacctctaaaaggttcctgtctttgcttttttctctgtcccctaaacaaccactgatctatggcacacatagaaaaaaattaggaaatatatta

SEQ ID NO: 225850 - DNA, 120 bp, Artificial Sequence
  ENSG00000118246_39 (sequence is synthesized)
aatgctcattttgtgtgagatatccaaatatttttttcagaatccctaatgaaaaggttgatcttgctctagatacaagatataaaattgtattcttgaaatagctacatgcaattcttt

SEQ ID NO: 225851 - DNA, 120 bp, Artificial Sequence
  ENSG00000118246_40 (sequence is synthesized)
tgaaatagctacatgcaattcttttttattattttttaattttaatttttagatttttaaagatggggccctgctatgttacccaggctagcttcaaactcctgggctcaagggatcctc

SEQ ID NO: 225852 - DNA, 120 bp, Artificial Sequence
  ENSG00000118246_41 (sequence is synthesized)
ggactgattataggtacaggctactgtgcccagctcaattcttgattgagacatttaccagctctccgaattctcagtagttaccactgaatagaaactttctttacacaaagctgatta

SEQ ID NO: 225853 - DNA, 120 bp, Artificial Sequence
  ENSG00000118246_42 (sequence is synthesized)
aacagtttagaacttttaaaaaacattcaaaaattgaaaatttcatatatacatagcctaacaactcttcttgtcattgacaaaatgtgatggtattttttttgtgataatacacatgga

SEQ ID NO: 225854 - DNA, 120 bp, Artificial Sequence
  ENSG00000118246_43 (sequence is synthesized)
cctcaaatgcaattgaactattcatatcaagtatttccaaataacaatgacattccaatttatagaatgtcatgtgttgtgagggtagtcaccctgcaactggcttggacatctctaagc

SEQ ID NO: 225855 - DNA, 120 bp, Artificial Sequence
  ENSG00000118246_44 (sequence is synthesized)
aaatagaagtttctgtaagatagagatttggggcatctacttggaactacctatgaggagctggcattcctcaaatcccaactgactgcacttttccatgaaattacccagcagttatga

SEQ ID NO: 225856 - DNA, 120 bp, Artificial Sequence
  ENSG00000118246_45 (sequence is synthesized)
tggtcagtggctcactcagcagcaagccacttaggtagctggcgagggacgtggcacagccttgtcttcacacagcacatcacagccaggcagcaaaggacagatctctctcatactctt

SEQ ID NO: 225857 - DNA, 120 bp, Artificial Sequence
  ENSG00000118246_46 (sequence is synthesized)
cattcacagggcctgagaggtggaccatcagactccaccctgttttgcgctgacttgtagggagacctaggtgtggagcttcctggccaggagggcagtggctgcccagaaggcaggaga

SEQ ID NO: 225858 - DNA, 77 bp, Artificial Sequence
  ENSG00000118246_47 (sequence is synthesized)
tcctggccaggagggcagtggctgcccagaaggcaggagatggctatctctttttttttcctgagacggagtcgtgg

SEQ ID NO: 225859 - DNA, 120 bp, Artificial Sequence
  ENSG00000118246_48 (sequence is synthesized)
ggattataggcgtgagccaccacccccggtccaagatggctatctcttaacacacttgtaacccatttgtgcacacaggtgtgccgtgactcactggtggatccaaaaaaagctgaagcc

SEQ ID NO: 225860 - DNA, 120 bp, Artificial Sequence
  ENSG00000118246_49 (sequence is synthesized)
actcactggtggatccaaaaaaagctgaagcctacatttcccagagcccctttcagcttgaattccaaatgtgacttagcttcctctatgcagatgtacctacttgaaactgggaaggcc

SEQ ID NO: 225861 - DNA, 120 bp, Artificial Sequence
  ENSG00000118246_50 (sequence is synthesized)
aaatgagatagaggtaatgtttctgccaacaaacagccacagagcattttatttttctagaagagcaataacagagaccccagggtgtggtgtggcaggacgaggagcatccattttgct

SEQ ID NO: 225862 - DNA, 120 bp, Artificial Sequence
  ENSG00000118246_51 (sequence is synthesized)
ggtggggattgtggctaaaataatgtggctctggagccagcaatgggcagcatcttcatgactttccagcttccaggctgtaagcagagatagcatctcttctggacagccagttatgtg

SEQ ID NO: 225863 - DNA, 120 bp, Artificial Sequence
  ENSG00000118246_52 (sequence is synthesized)
atagtgttctgagagtcattcctggaagtcagactaaaggctgctccttcagcctttccattcatcttgtaagcaggaggcttctgtgcatggccagaaactaacaaaagcacattgtgt

SEQ ID NO: 225864 - DNA, 120 bp, Artificial Sequence
  ENSG00000118246_53 (sequence is synthesized)
ctaaactaggttgcagtggtttctgttatcagcaagtaaatcctgattgataaagatactacaatatatgcacatatatatgttatagaatcaataaaaattggatactttgctttaaaa

SEQ ID NO: 225865 - DNA, 120 bp, Artificial Sequence
  ENSG00000118246_54 (sequence is synthesized)
tctaagacttgatgtttgtatggagcctgcagcacaccaagagacttgtcatccatcaatgtactccttagaaagtgtaaatgtggacgttatggttgaatacaatggactacagtattg

SEQ ID NO: 225866 - DNA, 120 bp, Artificial Sequence
  ENSG00000118246_55 (sequence is synthesized)
gtcatttaatgagacagacatttttttaaaattaggttttgaagctatagttcaataaaacaatattaatataattgaaactatcaatgcagtgtagactttggacaagataatataata

SEQ ID NO: 225867 - DNA, 120 bp, Artificial Sequence
  ENSG00000118246_56 (sequence is synthesized)
gtgatcataaagaataaagactcgaggcttctacaaaaatcaaatacccaataaatattttgctctaccaccaagacttttccagaggtagagaaaccgtagttttttaattaaactgta

SEQ ID NO: 225868 - DNA, 120 bp, Artificial Sequence
  ENSG00000118246_57 (sequence is synthesized)
gagaaatatgatgctataccatgagagaacatcctgcctcttcagtagatgcataagatcatgccatcattgcacacacccgtgggtcagttaccctttatgtaaaagctctgctacatg

SEQ ID NO: 225869 - DNA, 120 bp, Artificial Sequence
  ENSG00000118246_58 (sequence is synthesized)
gatcctgaccccaaggaacttgtatcttctgttaactccactggacacacacacacacataaatatgatagaaacatacaaaaaaatctgtagggatccaagctcttatctgcccatccc

SEQ ID NO: 225870 - DNA, 120 bp, Artificial Sequence
  ENSG00000118246_59 (sequence is synthesized)
tcttcattcacacacagttctgtgactttcacctctttctgaatgcatctagcttatttcttggccatcttttcaaccgctgtctttcctattagtgctacccatctcccctcagaagag

SEQ ID NO: 225871 - DNA, 120 bp, Artificial Sequence
  ENSG00000118246_60 (sequence is synthesized)
gctttctctctgacctcattccaagatcagttttctttttcgggtactccgctattctggcataataaaataacagttgttctcagcataaagtcatgagaagtgaagaatgtgagcatt

SEQ ID NO: 225872 - DNA, 120 bp, Artificial Sequence
  ENSG00000118246_61 (sequence is synthesized)
cctttaaaaacataaaatttgtcttataacagccagagtataggtgaaggcagtaaggatataaatgtcttttttttttctttttttctcccagtaaacttagtatttccaaagtgccag

SEQ ID NO: 225873 - DNA, 120 bp, Artificial Sequence
  ENSG00000118246_62 (sequence is synthesized)
gaacaatgaaaaaacaaattacaccttccacattttcgttatatttacagattttattttaacagtcttgcctttctcttggtgttttctttcttgtatttaaactcctatttctgtttt

SEQ ID NO: 225874 - DNA, 120 bp, Artificial Sequence
  ENSG00000118246_63 (sequence is synthesized)
ttaaatgctgctttctctgggagatgatatgtgtaagaagagcatttactatttggtattatttacaccgttactactactggtagaataaataattatactcagatcagaaatcagcac

SEQ ID NO: 225875 - DNA, 120 bp, Artificial Sequence
  ENSG00000118246_64 (sequence is synthesized)
tacacagaaaacccttaaaattggtgctttcatgtctgaaaattttcctcttcaaaaatgtagccatccttaaagggaactgagaggtaactgtgtataatgttgtatatttttgattta

SEQ ID NO: 225876 - DNA, 120 bp, Artificial Sequence
  ENSG00000118246_65 (sequence is synthesized)
taaagtagccttgtatagtggaatatctgcagaggccaagtaaaagaagtgaaggactaagacaggaatatcaaggattgtggtcggtggagagctcaacttggaaatctccagagaaca

SEQ ID NO: 225877 - DNA, 120 bp, Artificial Sequence
  ENSG00000118246_66 (sequence is synthesized)
aggaatcttgtggttgagactggttactaggactagaggaattgtcagcattattggaatgagtgctttagttactgttttctttgaaaaagaacattgctagtacacgatttgggttct

SEQ ID NO: 225878 - DNA, 120 bp, Artificial Sequence
  ENSG00000118246_67 (sequence is synthesized)
gctcagctgattactgtcattactagagcttttacaaatgttgttctggtcagctttaatccttttttgctaagaagaagaatgcaaataatatattttcatatttaagatacacaaaac

SEQ ID NO: 225879 - DNA, 120 bp, Artificial Sequence
  ENSG00000118246_68 (sequence is synthesized)
catatttaatttccaggttatcttgaacaagggaaggaaagatgttaaagctttgttttcatggcctgtgtgaagctgttacaggatgtttgttgccagaaaaggctggatggttttaag

SEQ ID NO: 225880 - DNA, 120 bp, Artificial Sequence
  ENSG00000118246_69 (sequence is synthesized)
aagatgggtctttctcttccctcttatgcttcaattttattttgtaccccacagcttctcttgaacagcctcttctgatgtttctaggtagtaggaaccttacaaatacatttatatata

SEQ ID NO: 225881 - DNA, 120 bp, Artificial Sequence
  ENSG00000118246_70 (sequence is synthesized)
tgttgctgttggaatctatctaaatgccactcatttggtcctgcgcataatgtaagatgtaaacattccaagtcttctattattatactttagtattggaaatggattacgtgtggacta

SEQ ID NO: 225882 - DNA, 120 bp, Artificial Sequence
  ENSG00000118246_71 (sequence is synthesized)
ttgagattaagatgactcctttctcttagtgggctactatttaagactttgttttttatattgctgattatatatattctaaggaagattttctcaagaaagcagtttttgcaccattta

SEQ ID NO: 225883 - DNA, 120 bp, Artificial Sequence
  ENSG00000118246_72 (sequence is synthesized)
gaggacctttaaaatttgtataattttcacagttaaagctttcttaaaccctagcatgtagtcttattatgcctttaaaatatgagtagttataaggtcacatttgctttcaaaaagcta

SEQ ID NO: 225884 - DNA, 120 bp, Artificial Sequence
  ENSG00000118246_73 (sequence is synthesized)
ccagaatgatgtgtggatacttacttgcaaggctgattttcttatctcttttctttggaatcgttacagatattggccttctgtatatgttgggaaactgacttttctttgttccccaga

SEQ ID NO: 225885 - DNA, 120 bp, Artificial Sequence
  ENSG00000118257_0 (sequence is synthesized)
cagagatcgcgagcgaggcaccagcctgcagccggcccccagcacatcctcagccgcacagacactcggcgaggtggaggtgagggcgggcgccagcgaactcggagaggggctcgctca

SEQ ID NO: 225886 - DNA, 120 bp, Artificial Sequence
  ENSG00000118257_1 (sequence is synthesized)
ctcccaggcgatcccagccgccaccgccgccgcaccagcagcagcaacagcagcagcagcttccttcctcagactcccctcgagaggctggccaagcgggtgtagccgttgggggaggct

SEQ ID NO: 225887 - DNA, 120 bp, Artificial Sequence
  ENSG00000118257_2 (sequence is synthesized)
cccgccgggggaacccggcgaggacaagagcagggcggccgccttccactcgggctgtccggcggcggctgcctccgcccgtgtgtccgtcaagggtgccgcgggatgtgtgtcagttta

SEQ ID NO: 225888 - DNA, 120 bp, Artificial Sequence
  ENSG00000118257_3 (sequence is synthesized)
cgcctctgagatcacacagctgcctgggggccgtgtgatgcccaaggcaagtcttggttttaattattattattatcattattgttacgcttggctttcgggaaatactcgtgatatttg

SEQ ID NO: 225889 - DNA, 120 bp, Artificial Sequence
  ENSG00000118257_4 (sequence is synthesized)
taggataaaggaaatgacactttgaggaactggagagaacatatatgcgttttgtttttaagaggaaaaccgtgttctcttcccggcttgttccctctttgctgatttcaggagctactc

SEQ ID NO: 225890 - DNA, 120 bp, Artificial Sequence
  ENSG00000118257_5 (sequence is synthesized)
tcctcctggtgaggtggaaattccagcaagaatagaggtgaagacaagccaccaggactcaggagggaaacgctgaccattagaaacctctgcataagacgttgtaaggaggaaaataaa

SEQ ID NO: 225891 - DNA, 120 bp, Artificial Sequence
  ENSG00000118257_6 (sequence is synthesized)
agagagaaaaacacaaagatttaaacaagaaacctacgaacccagctctggaaagagccaccttctccaaaatggatatgtttcctctcacctgggttttcttagccctctacttttcaa

SEQ ID NO: 225892 - DNA, 120 bp, Artificial Sequence
  ENSG00000118257_7 (sequence is synthesized)
gacaccaagtgagaggccaaccagacccaccgtgcggaggtcgtttgaattccaaagatgctggctatatcacctctcccggttacccccaggactacccctcccaccagaactgcgagt

SEQ ID NO: 225893 - DNA, 120 bp, Artificial Sequence
  ENSG00000118257_8 (sequence is synthesized)
ggattgtttacgcccccgaacccaaccagaagattgtcctcaacttcaaccctcactttgaaatcgagaagcacgactgcaagtatgactttatcgagattcgggatggggacagtgaat

SEQ ID NO: 225894 - DNA, 120 bp, Artificial Sequence
  ENSG00000118257_9 (sequence is synthesized)
ccgcagacctcctgggcaaacactgtgggaacatcgccccgcccaccatcatctcctcgggctccatgctctacatcaagttcacctccgactacgcccggcagggggcaggcttctctc

SEQ ID NO: 225895 - DNA, 120 bp, Artificial Sequence
  ENSG00000118257_10 (sequence is synthesized)
tgcgctacgagatcttcaagacaggctctgaagattgctcaaaaaacttcacaagccccaacgggaccatcgaatctcctgggtttcctgagaagtatccacacaacttggactgcacct

SEQ ID NO: 225896 - DNA, 120 bp, Artificial Sequence
  ENSG00000118257_11 (sequence is synthesized)
ttaccatcctggccaaacccaagatggagatcatcctgcagttcctgatctttgacctggagcatgaccctttgcaggtgggagagggggactgcaagtacgattggctggacatctggg

SEQ ID NO: 225897 - DNA, 120 bp, Artificial Sequence
  ENSG00000118257_12 (sequence is synthesized)
atggcattccacatgttggccccctgattggcaagtactgtgggaccaaaacaccctctgaacttcgttcatcgacggggatcctctccctgacctttcacacggacatggcggtggcca

SEQ ID NO: 225898 - DNA, 120 bp, Artificial Sequence
  ENSG00000118257_13 (sequence is synthesized)
aggatggcttctctgcgcgttactacctggtccaccaagagccactagagaactttcagtgcaatgttcctctgggcatggagtctggccggattgctaatgaacagatcagtgcctcat

SEQ ID NO: 225899 - DNA, 120 bp, Artificial Sequence
  ENSG00000118257_14 (sequence is synthesized)
ctacctactctgatgggaggtggacccctcaacaaagccggctccatggtgatgacaatggctggacccccaacttggattccaacaaggagtatctccaggtggacctgcgctttttaa

SEQ ID NO: 225900 - DNA, 120 bp, Artificial Sequence
  ENSG00000118257_15 (sequence is synthesized)
ccatgctcacggccatcgcaacacagggagcgatttccagggaaacacagaatggctactatgtcaaatcctacaagctggaagtcagcactaatggagaggactggatggtgtaccggc

SEQ ID NO: 225901 - DNA, 120 bp, Artificial Sequence
  ENSG00000118257_16 (sequence is synthesized)
atggcaaaaaccacaaggtatttcaagccaacaacgatgcaactgaggtggttctgaacaagctccacgctccactgctgacaaggtttgttagaatccgccctcagacctggcactcag

SEQ ID NO: 225902 - DNA, 120 bp, Artificial Sequence
  ENSG00000118257_17 (sequence is synthesized)
gtatcgccctccggctggagctcttcggctgccgggtcacagatgctccctgctccaacatgctggggatgctctcaggcctcattgcagactcccagatctccgcctcttccacccagg

SEQ ID NO: 225903 - DNA, 120 bp, Artificial Sequence
  ENSG00000118257_18 (sequence is synthesized)
aatacctctggagccccagtgcagcccgcctggttagcagccgctcgggctggttccctcgaatccctcaggcccagcccggtgaggagtggcttcaggtagatctgggaacacccaaga

SEQ ID NO: 225904 - DNA, 120 bp, Artificial Sequence
  ENSG00000118257_19 (sequence is synthesized)
cagtgaaaggtgtcatcatccagggagcccgcggaggagacagtatcactgctgtggaagccagagcatttgtgcgcaagttcaaagtctcctacagcctaaacggcaaggactgggaat

SEQ ID NO: 225905 - DNA, 120 bp, Artificial Sequence
  ENSG00000118257_20 (sequence is synthesized)
acattcaggaccccaggacccagcagccaaagctgttcgaagggaacatgcactatgacacccctgacatccgaaggtttgaccccattccggcacagtatgtgcgggtatacccggaga

SEQ ID NO: 225906 - DNA, 120 bp, Artificial Sequence
  ENSG00000118257_21 (sequence is synthesized)
ggtggtcgccggcggggattgggatgcggctggaggtgctgggctgtgactggacagactccaagcccacggtagagacgctgggacccactgtgaagagcgaagagacaaccaccccct

SEQ ID NO: 225907 - DNA, 120 bp, Artificial Sequence
  ENSG00000118257_22 (sequence is synthesized)
accccaccgaagaggaggccacagagtgtggggagaactgcagctttgaggatgacaaagatttgcagctcccttcgggattcaattgcaacttcgatttcctcgaggagccctgtggtt

SEQ ID NO: 225908 - DNA, 120 bp, Artificial Sequence
  ENSG00000118257_23 (sequence is synthesized)
ggatgtatgaccatgccaagtggctccggaccacctgggccagcagctccagcccaaacgaccggacgtttccagatgacaggaatttcttgcggctgcagagtgacagccagagagagg

SEQ ID NO: 225909 - DNA, 120 bp, Artificial Sequence
  ENSG00000118257_24 (sequence is synthesized)
gccagtatgcccggctcatcagcccccctgtccacctgccccgaagcccggtgtgcatggagttccagtaccaggccacgggcggccgcggggtggcgctgcaggtggtgcgggaagcca

SEQ ID NO: 225910 - DNA, 120 bp, Artificial Sequence
  ENSG00000118257_25 (sequence is synthesized)
gccaggagagcaagttgctgtgggtcatccgtgaggaccagggcggcgagtggaagcacgggcggatcatcctgcccagctacgacatggagtaccagattgtgttcgagggagtgatag

SEQ ID NO: 225911 - DNA, 120 bp, Artificial Sequence
  ENSG00000118257_26 (sequence is synthesized)
ggaaaggacgttccggagagattgccattgatgacattcggataagcactgatgtcccactggagaactgcatggaacccatctcggcttttgcaggtgagaattttaaagtggacatcc

SEQ ID NO: 225912 - DNA, 120 bp, Artificial Sequence
  ENSG00000118257_27 (sequence is synthesized)
agcaattcttcttctgcaacctcagggtctggcgccccctcgaccgacaaagaaaagagctggctgtacaccctggatcccatcctcatcaccatcatcgccatgagctcactgggcgtc

SEQ ID NO: 225913 - DNA, 120 bp, Artificial Sequence
  ENSG00000118257_28 (sequence is synthesized)
ctcctgggggccacctgtgcaggcctcctgctctactgcacctgttcctactcgggcctgagctcccgaagctgcaccacactggagaactacaacttcgagctctacgatggccttaag

SEQ ID NO: 225914 - DNA, 120 bp, Artificial Sequence
  ENSG00000118257_29 (sequence is synthesized)
cacaaggtcaagatgaaccaccaaaagtgctgctccgaggcatgacggattgcacctgaatcctatctgacgtttcattccagcaagaggggctggggaagattacatttttttttcctt

SEQ ID NO: 225915 - DNA, 120 bp, Artificial Sequence
  ENSG00000118257_30 (sequence is synthesized)
tggaaactgaatgccataatctcgatcaaaccgatccagaataccgaaggtatggacaggacagaaaagcgagtcgcaggaggaagggagatgcagccgcacaggggatgattaccctcc

SEQ ID NO: 225916 - DNA, 120 bp, Artificial Sequence
  ENSG00000118257_31 (sequence is synthesized)
taggaccgcggtggctaagtcattgcaggaacggggctgtgttctctgctgggacaaaacaggagctcatctctttggggtcacagttctattttgtttgtgagtttgtattattattat

SEQ ID NO: 225917 - DNA, 120 bp, Artificial Sequence
  ENSG00000118257_32 (sequence is synthesized)
tattattattattattatattttatttctttggtctgtgagcaactcaaagaggcagaagaggagaatgacttttccagaatagaagtggagcagtgatcattattctccgctttctctt

SEQ ID NO: 225918 - DNA, 120 bp, Artificial Sequence
  ENSG00000118257_33 (sequence is synthesized)
tctaatcaacacttgaaaagcaaagtgtcttttcagcctttccatctttacaaataaaactcaaaaaagccgtccagcttatcccatcctctgattgtcttctgacttaagggatttact

SEQ ID NO: 225919 - DNA, 120 bp, Artificial Sequence
  ENSG00000118257_34 (sequence is synthesized)
gtggtgtaggttctgccagccaaccctacaagctgccatttccagtcctagcatttaagtaggatgttgttgcctttaacttttcttatccaggggaaaattgccattttagggtcagca

SEQ ID NO: 225920 - DNA, 120 bp, Artificial Sequence
  ENSG00000118257_35 (sequence is synthesized)
tgaacagctctttcttgtatgcgatttaaaacaaactggaaaggaaacttcacacgtcaaaatccatagaagcgcctggacgaggcttaaagtgctttgtgagtgaataggagccattcg

SEQ ID NO: 225921 - DNA, 120 bp, Artificial Sequence
  ENSG00000118257_36 (sequence is synthesized)
ctaattctagacccacagtgtctggtggtggggcttcccttgtggggcttctggtggtggttttgccttttcttttccctcctccatgttcttctaaaacatatacatatatacatacac

SEQ ID NO: 225922 - DNA, 120 bp, Artificial Sequence
  ENSG00000118257_37 (sequence is synthesized)
acatacacatattcttcaggtctctaagcccctggaagcagcattgtgtgatattctcagaggcaggggaaaatagagggaaaaatagagactattggtatgttctccccatcagcgagt

SEQ ID NO: 225923 - DNA, 120 bp, Artificial Sequence
  ENSG00000118257_38 (sequence is synthesized)
tattgtaactggtcaccactggacgggaaggagaacagaggagagggaaagagaagcccaacctctgtgatcatatgagggccaaggctgagcagtgtagacagagaccctttgaaatgc

SEQ ID NO: 225924 - DNA, 120 bp, Artificial Sequence
  ENSG00000118257_39 (sequence is synthesized)
atttgtctctcaaatagactagtaaacaccgacttctcctttgggttacaaacaccatttcaacctttcgggagagtcagagctaggatgtacaagaactgattctaaccagaagtccgc

SEQ ID NO: 225925 - DNA, 120 bp, Artificial Sequence
  ENSG00000118257_40 (sequence is synthesized)
aagtactgtggacaagaatgcttaaccatgctgcttcagccttgagagacctaggttcttacacatatgcacacacgcatacacacatgcacgcacacacacatacacacatgcacgcac

SEQ ID NO: 225926 - DNA, 120 bp, Artificial Sequence
  ENSG00000118257_41 (sequence is synthesized)
gcacgcatgcacaccaatttatgtttttattaagtgccttgaaaaaatgaagaaaaatgtattttccctttatgtaaaaattagtgaatatcttatgaattaaggcattcctctttccct

SEQ ID NO: 225927 - DNA, 120 bp, Artificial Sequence
  ENSG00000118257_42 (sequence is synthesized)
aaccccgatggctccattcccaagtaccccaactcactgctgatcctattaaaggaatgagtcctgctacccgagtggtagtcatagccctagatgactctcaactactcttcaaaggga

SEQ ID NO: 225928 - DNA, 120 bp, Artificial Sequence
  ENSG00000118257_43 (sequence is synthesized)
ggcatcaggaatagaatgaaactgtgtgaaggataagattgttcgcatcaagatccaaatcttgatttcatattaacgcctaaggattgcctgtgtgctggaaatatatttgaaactcaa

SEQ ID NO: 225929 - DNA, 120 bp, Artificial Sequence
  ENSG00000118257_44 (sequence is synthesized)
ccagtatgcccagcctattgcatatcattgtcagaccatttttgctgctgtggtcacccacgatttcatttgtcttatacccaggtgaaaggggaagggtgaatgggactggctggttcc

SEQ ID NO: 225930 - DNA, 120 bp, Artificial Sequence
  ENSG00000118257_45 (sequence is synthesized)
tttaaatgttaacttatggaaatgctagttcaaatggtaatgtcacagtgttttgtatgcagagagcaagagttcaaccaacagctgtttattcatgtgtgtgtgtctttgctgctttga

SEQ ID NO: 225931 - DNA, 120 bp, Artificial Sequence
  ENSG00000118257_46 (sequence is synthesized)
gttctctgtatctactgtgtatgtgaatggtcatgtgggactcagtggtggtgttgtgactttgacctagggtccgagtgtcacagctgatcttggcactcggcactcattggcacagtg

SEQ ID NO: 225932 - DNA, 120 bp, Artificial Sequence
  ENSG00000118257_47 (sequence is synthesized)
gtagttagaggtgaaaagtagagctgtcaagcccaagggcttagctttagggctcctcctgagttcggcccacagtagaagcaagattttaactagccccttttcctcttcaccctccca

SEQ ID NO: 225933 - DNA, 120 bp, Artificial Sequence
  ENSG00000118257_48 (sequence is synthesized)
tgatgcgcagtgttcagaaagctggtaagtcctagggatttccagaagtagcctgcagaagaaggtaagtttgaaagccactccaggggtcctgatgctgtcatgctcagtgagccattt

SEQ ID NO: 225934 - DNA, 120 bp, Artificial Sequence
  ENSG00000118257_49 (sequence is synthesized)
tacagttctccaaagtctagccctgtttcggacctgcacttcacctctaagttatgtacaactcaacctgcatccctctaaaagtcctatatccatattcaccattggctaatttgaggc

SEQ ID NO: 225935 - DNA, 120 bp, Artificial Sequence
  ENSG00000118257_50 (sequence is synthesized)
cctgagtgggccttgaatgctaaaaagaagcagggtacgcagggctacatgtagataccacaccaaggctggaggctggtctgtcataagacagaaagaaagacgctgggcccaattttg

SEQ ID NO: 225936 - DNA, 120 bp, Artificial Sequence
  ENSG00000118257_51 (sequence is synthesized)
acttggccaggggacaccttggtgtgtttgttatctttatctgtgggtaggctagctgacccatctccttgagtcattccctttgggaaaccccactgccagtattgatctcctttttgc

SEQ ID NO: 225937 - DNA, 120 bp, Artificial Sequence
  ENSG00000118257_52 (sequence is synthesized)
cttgtactgaatgacacattacctccacactctcccggactaggtggtcaacagggccacagggttgctttctgtctttggtggggcaggggagttgacagggatgagggtccaaggaat

SEQ ID NO: 225938 - DNA, 120 bp, Artificial Sequence
  ENSG00000118257_53 (sequence is synthesized)
aagcatgaatgacaagaaaacaagggaaagagttaacctgtcacatagcaggttaactttttcagggtttgcagttagaggtattcgaccattcactggctgagccagatcacgggaact

SEQ ID NO: 225939 - DNA, 120 bp, Artificial Sequence
  ENSG00000118257_54 (sequence is synthesized)
tgagagcttttactgtgattcttcaatgtaaaaaataaacaacaatgtcaaactgtgtttatatgatttgtataaagcctttttaagattactatttaaataaacattataccagagata

SEQ ID NO: 225940 - DNA, 120 bp, Artificial Sequence
  ENSG00000118257_55 (sequence is synthesized)
tattacgtaatggccgccgggggcgccgtgctggtgctggtctccgtcgcgctggccctggtgctccactaccaccggttccgctatgcggccaagaagaccgatcactccatcacctac

SEQ ID NO: 225941 - DNA, 120 bp, Artificial Sequence
  ENSG00000118257_56 (sequence is synthesized)
aaaacctcccactacaccaacggggcccctctggcggtggagcccaccctaaccattaagctagagcaagaccgtggctcgcactgctgagggccgaagcaagaacagcacccaaaacaa

SEQ ID NO: 225942 - DNA, 120 bp, Artificial Sequence
  ENSG00000118257_57 (sequence is synthesized)
acgagaaagactgcaaacatgttgcctcgattttgcacttttttctcctcgcctagtttctgtgtgaactctcagacatctctttcccggatccccaaccctgagcactcttatcaatcc

SEQ ID NO: 225943 - DNA, 120 bp, Artificial Sequence
  ENSG00000118257_58 (sequence is synthesized)
caaccatcctccttgggttcattttggtttctggtttttctttttcctttttgttgattccaaaccaacaaacccaactctaatgctgcatcttggactatccgaagagatccaccccca

SEQ ID NO: 225944 - DNA, 120 bp, Artificial Sequence
  ENSG00000118257_59 (sequence is synthesized)
agcactccacaactcaaggctcagctggttttgttccagagactggttcgcttgttttttccccttgccttatcccatacctcctctcagtgggcagtctgccaggagacgtgaggggaa

SEQ ID NO: 225945 - DNA, 120 bp, Artificial Sequence
  ENSG00000118257_60 (sequence is synthesized)
gcctggatctgtgtgtatgtacatagtagacatgtgtgtgtgtgaatagctctctgtgtgtgggtgtgtgagagagcggctggttcattgtgtgtgtgtttgggcgaggggtgagtgttc

SEQ ID NO: 225946 - DNA, 120 bp, Artificial Sequence
  ENSG00000118257_61 (sequence is synthesized)
agagagggcccctttaactcttatgttacttctcctggggtacattttacaagaaaataatatactgtacaagttttgtttacttggagaagagattgaagctttttgttgccttatcta

SEQ ID NO: 225947 - DNA, 120 bp, Artificial Sequence
  ENSG00000118257_62 (sequence is synthesized)
aaaaattttttttttgcatgctttttccttcccccatgtgatgtgaatttgatggggggaatcaacctccaaatttgtcaaatctcgcaagagaaaagagacgccacaccttcctgccgc

SEQ ID NO: 225948 - DNA, 120 bp, Artificial Sequence
  ENSG00000118257_63 (sequence is synthesized)
tagatggcactagcaacacctgtagatgcgggaaggggattgagagcctcactgtctcttgtttaattaaagtttagaaacctattaatagagacaaataggttacagataaacctttca

SEQ ID NO: 225949 - DNA, 120 bp, Artificial Sequence
  ENSG00000118257_64 (sequence is synthesized)
ctgtaacgttaccctcaacagggaggctaagtgtggtacagggagttgagactgatgatgtcccatctaaacagtcgtcatccaactcctgaaatccaataaaacaaatatcgtttgaga

SEQ ID NO: 225950 - DNA, 120 bp, Artificial Sequence
  ENSG00000118257_65 (sequence is synthesized)
ccgaggggcttctgtgtacagcctgcagtcagtacctgcagtcaccatacctcagtgaggtacggtggcaggctgcttgtaagagaaggaagttaggaaagagacacagaagtggtggcc

SEQ ID NO: 225951 - DNA, 120 bp, Artificial Sequence
  ENSG00000118257_66 (sequence is synthesized)
tcaggagaaagagttgccacatttaggacccggtgtccagtcaagggaataaggaggtgcattcgatgactggagctagagcactttaaatgcaggactgaaaatcagaaaggacgtgtt

SEQ ID NO: 225952 - DNA, 120 bp, Artificial Sequence
  ENSG00000118257_67 (sequence is synthesized)
ctcccccgagaaagcagagagagcagagcaaagtgagaagaattggggatgcttgcctcatccaggttataaaaaaaaaaaaaggcctccagccttgggtgatggcaatgttgtttgtgc

SEQ ID NO: 225953 - DNA, 120 bp, Artificial Sequence
  ENSG00000118257_68 (sequence is synthesized)
cagattttacattttgccctctttgcaaacctattagcggacactgctgaagttcccacaccggtttctaatgccaaacatttaggagccactctaaatgcgtcactgcagttggcctga

SEQ ID NO: 225954 - DNA, 120 bp, Artificial Sequence
  ENSG00000118257_69 (sequence is synthesized)
gtgtaaaagcacacacaaaaacaccctcaccaaatgatgggggttcttcatgacctgtttgatgccagcaattgtgaggattgctgtgccctctttgtactggctgggcttacccctaca

SEQ ID NO: 225955 - DNA, 120 bp, Artificial Sequence
  ENSG00000118257_70 (sequence is synthesized)
agtggcagcattgcagagataagggcagccatttttatatctgccgtctagactcgttatcttcactctcattaatctgtccagctctgggctagaaagagatgaattcctggtttgcca

SEQ ID NO: 225956 - DNA, 120 bp, Artificial Sequence
  ENSG00000118257_71 (sequence is synthesized)
cctagatatgctccctgactccaaatcatctcacccaatttgccactcatcagctctaagacagccagtgaggaacaaagctgcagacgacaggggaatgacagaccgacatagaatata

SEQ ID NO: 225957 - DNA, 120 bp, Artificial Sequence
  ENSG00000118257_72 (sequence is synthesized)
ttgcctttcttacccttcctcgtgtccctgaaccccatgcccactccctgtaccacagttctaaaagtattaagagtattcatgtgcatacactggtgctctctgggggtgaggtttatg

SEQ ID NO: 225958 - DNA, 120 bp, Artificial Sequence
  ENSG00000118257_73 (sequence is synthesized)
ttaatgtaaatccaaagtattggaggaaagctgagagccaaactgaacgactttggattacagtcgaattcgagttctaaccttcaggacccaaggtaatgcttatgttggtgaagtgaa

SEQ ID NO: 225959 - DNA, 120 bp, Artificial Sequence
  ENSG00000118257_74 (sequence is synthesized)
agctgtggatgttgtttcgcctgactctctttgggttgtggagactcacagctcccagaaaggctgggtaaagacgtgccagcagctgctgcagacactgttctgtgtgcacaccgtgtc

SEQ ID NO: 225960 - DNA, 120 bp, Artificial Sequence
  ENSG00000118257_75 (sequence is synthesized)
aaacaccgtacgccacccaactcctcttgtaacgccatcgcgcgtggcattgtgttgggttctgcgtgtgtggcatcggagtcgtggaatttagggggaacaaggcttttccccccgtcc

SEQ ID NO: 225961 - DNA, 120 bp, Artificial Sequence
  ENSG00000118257_76 (sequence is synthesized)
gcacccacaggctgtttgggggcctgtatagaagctgtgggcagaaaccagaggccactgtggtactgctggactcctgcagccaaaggacaaaagggcgagactacgggccgtctgggc

SEQ ID NO: 225962 - DNA, 120 bp, Artificial Sequence
  ENSG00000118257_77 (sequence is synthesized)
aaacagagagaagccactttattccctgtggagtggaggatgctaggatgttgctgctccggcagacagaggcctttcgcttgagtcatcagccaacagactgaatgttatggttttaga

SEQ ID NO: 225963 - DNA, 120 bp, Artificial Sequence
  ENSG00000118257_78 (sequence is synthesized)
aacccatacacaaagttgagtggttttttccatttctaaaatttaaaatgtatgtatttttaaaacacccacctgcatgtaatacacagcttgttcaggagttctcaaacagccccagca

SEQ ID NO: 225964 - DNA, 120 bp, Artificial Sequence
  ENSG00000118257_79 (sequence is synthesized)
cccaccccatcccagaggctcaaccaaataaaaccaaaaccaggaggctgggtccttttaagcactggtaatttctacctgtaattccagccctttgggaggccgaggcaggcaggtcac

SEQ ID NO: 225965 - DNA, 120 bp, Artificial Sequence
  ENSG00000118257_80 (sequence is synthesized)
cttgtcacttctatcacccctcaccccaagacctgctgctaaccagtggtggatcctggccccagaggaaaacctcaaggggcattccctttccagggaaataaaggtgtggctgatccc

SEQ ID NO: 225966 - DNA, 120 bp, Artificial Sequence
  ENSG00000118257_81 (sequence is synthesized)
aataattatgtagagcaagccagctgtgcctccctaatttatgagggcttgaaacgtgcatgtgaagagtatgttgcttcaagggccactccagtagcaacaaaaacctcaagagcaggg

SEQ ID NO: 225967 - DNA, 120 bp, Artificial Sequence
  ENSG00000118257_82 (sequence is synthesized)
ccttccaccagggcactggggagacattcttctctggcatttagggaacagcaattttcacatttgtctgctctccgaggtggacagaagaggctgattagagcctgaagccatttggta

SEQ ID NO: 225968 - DNA, 120 bp, Artificial Sequence
  ENSG00000118257_83 (sequence is synthesized)
gcctcattcataattgcttactatgggaaccactggcagacttggctttcatgcctgggaaggatgagaccaaagcctgacccgaaagccagcgatcgccaagatgagttaaatgaataa

SEQ ID NO: 225969 - DNA, 120 bp, Artificial Sequence
  ENSG00000118257_84 (sequence is synthesized)
tgccagccatttaaatagtaccactgtggctgttctctgaacccatttcatttgccttcctttgggttattgttttccccttttagacaaagatttgcagctcccttcgggattcaattg

SEQ ID NO: 225970 - DNA, 120 bp, Artificial Sequence
  ENSG00000118257_85 (sequence is synthesized)
caggtacctaaagaaatagaggccacatgggatgcagtgtggcttctcccatccctatccccaacccacctgacccaagagaaggttcccctagcacactcaaacaagacccccttgtct

SEQ ID NO: 225971 - DNA, 120 bp, Artificial Sequence
  ENSG00000118257_86 (sequence is synthesized)
tctggtgtctttgaaatgtcaagataacagccactgggtgtctgcggaaccacctctccagccctaaagcaaatctgtctcatgttgccttataaaagagaagctcataatgaatgttta

SEQ ID NO: 225972 - DNA, 120 bp, Artificial Sequence
  ENSG00000118257_87 (sequence is synthesized)
gcctttatcagttacatccaatcttggaataagtcatagagaataacaagtctgggactgacgtaggaaaaacagtagtctgtttaagttgagaggaggaggaggtggacgagagaaggg

SEQ ID NO: 225973 - DNA, 120 bp, Artificial Sequence
  ENSG00000118257_88 (sequence is synthesized)
aggagagggaagaactgaaatgtctcctcacccagggtggttattgggcccaacttgggatggggttgagtacgaaggttaaaaaacatatactttggtattatattggtcattgtaata

SEQ ID NO: 225974 - DNA, 120 bp, Artificial Sequence
  ENSG00000118257_89 (sequence is synthesized)
gcagttgtaaaatatggggggaaaagggatcatttgctttcctttcatggtgttaatgtgtgcctgaatctatagccgctaaaatgtaaggctgtccacctgacttatttaaatattatc

SEQ ID NO: 225975 - DNA, 120 bp, Artificial Sequence
  ENSG00000118257_90 (sequence is synthesized)
agagaatagaaagtaatcactttttaagtgtacctatgtgctgccccttaaaacattcatggcatctggcaaatagacccttgtaggctggcctggcatattcagatgttgccgcatcat

SEQ ID NO: 225976 - DNA, 120 bp, Artificial Sequence
  ENSG00000118257_91 (sequence is synthesized)
cacagagaaggtcaaatgaagatgtaaccattgctgctcatgtgtcttctctaagcaacaaggggagcgggatgtaagagagaagttgctaatgatactgtacaaaggatggattaaata

SEQ ID NO: 225977 - DNA, 120 bp, Artificial Sequence
  ENSG00000118257_92 (sequence is synthesized)
atgaagtcaatttcattgatagaaaatgcaaattttaagattctcagtgtatgaggtctcagcctcgggagcatttattttttactttcctgctaaaaatccactggggaggtataaaat

SEQ ID NO: 225978 - DNA, 120 bp, Artificial Sequence
  ENSG00000118257_93 (sequence is synthesized)
tcactccaaagaagtttgcctgggccaaaagcctccaggttccttctgagaacaaaatactaatgattttttttttttttttggctgcttgggagagactttcagcattctttcacgata

SEQ ID NO: 225979 - DNA, 120 bp, Artificial Sequence
  ENSG00000118257_94 (sequence is synthesized)
tccagatatgtcccttcagcacacacactcaactttctcatctggttcgtttcatcctcccgaaagaacggtgctctcccactcttactctatttcaaagagctactctgtctcaaccac

SEQ ID NO: 225980 - DNA, 120 bp, Artificial Sequence
  ENSG00000118257_95 (sequence is synthesized)
agcagccctgccaagaaaaggcaagatgaaaggctagagcatgtgctaccttgagatttcaagaagtgtcctacctcagctgaagatggagaaacggggagtggagaggggatcagccca

SEQ ID NO: 225981 - DNA, 120 bp, Artificial Sequence
  ENSG00000118257_96 (sequence is synthesized)
gggtaccatgtgatgactaatatgccactcattaagggcttttacctcggctgtccacatccagtcatgcatttggggccaggcatgcctgcgaaatgattgacattcctgtaggtgccc

SEQ ID NO: 225982 - DNA, 120 bp, Artificial Sequence
  ENSG00000118257_97 (sequence is synthesized)
catagaggtgtggcattgagaaattatgtctggaaaatacagccagtgtagtgaccagctgagttaccatataccctgatgattccccttctgtaacagaaggtgacaacaactttgtga

SEQ ID NO: 225983 - DNA, 120 bp, Artificial Sequence
  ENSG00000118257_98 (sequence is synthesized)
actttctatatctttatctgatgccccaagtggcatcatctttatgtacatgccttagttgagaatatgagactgctctaatctttgtgaatgccttcacacttcagctgaggatgtcac

SEQ ID NO: 225984 - DNA, 120 bp, Artificial Sequence
  ENSG00000118257_99 (sequence is synthesized)
cttctctgtcactccccatcctgcaacctctgcctttgctctgtctaccccagcaattttcatagtgttatccaggtactgtgctaaaaggtcagctcttctgtaaaatgccatgcttcg

SEQ ID NO: 225985 - DNA, 120 bp, Artificial Sequence
  ENSG00000118257_100 (sequence is synthesized)
cagcttcaaaaagcaaaattctgtatttcatggagggagggaagggtcattctcttctaagaaaaatagactggacaggcgaatgcatgcatgcatgtgtttagagttgcttctcagaag

SEQ ID NO: 225986 - DNA, 120 bp, Artificial Sequence
  ENSG00000118257_101 (sequence is synthesized)
acaaagagatgatagcaactattaaaatatgaatgaatgaatgagtgaatgagttgaaggcctagctcgggctgataaagcttttgccttagtagaggttttatgtcaacaccttcagga

SEQ ID NO: 225987 - DNA, 120 bp, Artificial Sequence
  ENSG00000118257_102 (sequence is synthesized)
gggaagcccttatttctgggttgaactccccttccatgatattatgctagcaattgccatcacttagttcctggcgaaggcagaaaaagaaaacaaaaaatcagcattgtcattgacaaa

SEQ ID NO: 225988 - DNA, 120 bp, Artificial Sequence
  ENSG00000118257_103 (sequence is synthesized)
actggatgctgaagataaagtaaaattgtcttttcccttgtcccacatttttgggattaaagccagaattgaataggaaatacagtactatttctgaagttgatagccgatctttaagaa

SEQ ID NO: 225989 - DNA, 120 bp, Artificial Sequence
  ENSG00000118257_104 (sequence is synthesized)
gaccctgtctttaaaatgaaactagcaggcaaacacctaaataatcgaaaattaccaaagaacaacaacgaaacaagaaaacctaaagatttttacttcctattcttattcctttcctta

SEQ ID NO: 225990 - DNA, 120 bp, Artificial Sequence
  ENSG00000118257_105 (sequence is synthesized)
ttactgtgacaccccttgcattgctcagttgcctgtgtgtcaaaataacttgtggacgttggaaattatttgaaaatgtattgtgtggaatgtaataaaatgatgatatttttatacaaa

SEQ ID NO: 225991 - DNA, 120 bp, Artificial Sequence
  ENSG00000118257_106 (sequence is synthesized)
ggcagcaagaacacaggaaggggagcgggggctgttggcgctcagtggccggcagacatgagaggctccagagtgagtgctctctctctctcaccagctcccggaatggagttctgttat

SEQ ID NO: 225992 - DNA, 120 bp, Artificial Sequence
  ENSG00000118260_0 (sequence is synthesized)
tgtttccgtgcgcggccgctgcgcactcggcactgggcggcgctggctggctccctggctgcggctcctcagtcggcggcggctgctgctgcctgtggcccgggcggctgggagaagcgg

SEQ ID NO: 225993 - DNA, 120 bp, Artificial Sequence
  ENSG00000118260_1 (sequence is synthesized)
agtgttggtgagtgacgcggcggaggtgtagtttgacgcggtgtgttacgtgggggagagaataaaactccagcgagatccgggccgtgaacgaaagcagtgacggaggagcttgtacca

SEQ ID NO: 225994 - DNA, 120 bp, Artificial Sequence
  ENSG00000118260_2 (sequence is synthesized)
ccggtaactaaatgaccatggaatctggagccgagaaccagcagagtggagatgcagctgtaacagaagctgaaaaccaacaaatgacagttcaagcccagccacagattgccacattag

SEQ ID NO: 225995 - DNA, 120 bp, Artificial Sequence
  ENSG00000118260_3 (sequence is synthesized)
cccaggtatctatgccagcagctcatgcaacatcatctgctcccaccgtaactctagtacagctgcccaatgggcagacagttcaagtccatggagtcattcaggcggcccagccatcag

SEQ ID NO: 225996 - DNA, 120 bp, Artificial Sequence
  ENSG00000118260_4 (sequence is synthesized)
ttattcagtctccacaagtccaaacagttcagtcttcctgtaaggacttaaaaagacttttctccggaacacagatttcaactattgcagaaagtgaagattcacaggagtcagtggata

SEQ ID NO: 225997 - DNA, 120 bp, Artificial Sequence
  ENSG00000118260_5 (sequence is synthesized)
gtgtaactgattcccaaaagcgaagggaaattctttcaaggaggccttcctacaggaaaattttgaatgacttatcttctgatgcaccaggagtgccaaggattgaagaagagaagtctg

SEQ ID NO: 225998 - DNA, 120 bp, Artificial Sequence
  ENSG00000118260_6 (sequence is synthesized)
aagaggagacttcagcacctgccatcaccactgtaacggtgccaactccaatttaccaaactagcagtggacagtatattgccattacccagggaggagcaatacagctggctaacaatg

SEQ ID NO: 225999 - DNA, 120 bp, Artificial Sequence
  ENSG00000118260_7 (sequence is synthesized)
gtaccgatggggtacagggcctgcaaacattaaccatgaccaatgcagcagccactcagccgggtactaccattctacagtatgcacagaccactgatggacagcagatcttagtgccca

SEQ ID NO: 226000 - DNA, 120 bp, Artificial Sequence
  ENSG00000118260_8 (sequence is synthesized)
gcaaccaagttgttgttcaagctgcctctggagacgtacaaacataccagattcgcacagcacccactagcactattgcccctggagttgttatggcatcctccccagcacttcctacac

SEQ ID NO: 226001 - DNA, 120 bp, Artificial Sequence
  ENSG00000118260_9 (sequence is synthesized)
agcctgctgaagaagcagcacgaaagagagaggtccgtctaatgaagaacagggaagcagctcgagagtgtcgtagaaagaagaaagaatatgtgaaatgtttagaaaacagagtggcag

SEQ ID NO: 226002 - DNA, 120 bp, Artificial Sequence
  ENSG00000118260_10 (sequence is synthesized)
tgcttgaaaatcaaaacaagacattgattgaggagctaaaagcacttaaggacctttactgccacaaatcagattaatttgggatttaaattttcacctgttaaggtggaaaatggactg

SEQ ID NO: 226003 - DNA, 120 bp, Artificial Sequence
  ENSG00000118260_11 (sequence is synthesized)
gcttggccacaacctgaaagacaaaataaacattttattttctaaacatttctttttttctatgcgcaaaactgcctgaaagcaactacagaatttcattcatttgtgcttttgcattaa

SEQ ID NO: 226004 - DNA, 120 bp, Artificial Sequence
  ENSG00000118260_12 (sequence is synthesized)
actgtgaatgttccaacacctgcctccacttctcccctcaagaaattttcaacgccaggaatcatgaagagacttctgcttttcaacccccaccctcctcaagaagtaataatttgttta

SEQ ID NO: 226005 - DNA, 120 bp, Artificial Sequence
  ENSG00000118260_13 (sequence is synthesized)
cttgtaaattgatgggagaaatgaggaaaagaaaatctttttaaaaatgatttcaaggtttgtgctgagctccttgattgccttagggacagaattaccccagcctcttgagctgaagta

SEQ ID NO: 226006 - DNA, 120 bp, Artificial Sequence
  ENSG00000118260_14 (sequence is synthesized)
atgtgtgggccgcatgcataaagtaagtaaggtgcaatgaagaagtgttgattgccaaattgacatgttgtcacattctcattgtgaattatgtaaagttgttaagagacataccctcta

SEQ ID NO: 226007 - DNA, 120 bp, Artificial Sequence
  ENSG00000118260_15 (sequence is synthesized)
aaaaagaactttagcatggtattgaaggaattagaaatgaatttggagtgctttttatgtatgttgtcttcttcaatactgaaaatttgtccttggttcttaaaagcattctgtactaat

SEQ ID NO: 226008 - DNA, 120 bp, Artificial Sequence
  ENSG00000118260_16 (sequence is synthesized)
acagctcttccatagggcagttgttgcttcttaattcagttctgtatgtgttcaacatttttgaatacattaaaagaagtaaccaactgaacgacaaagcatggtatttgaattttaaat

SEQ ID NO: 226009 - DNA, 120 bp, Artificial Sequence
  ENSG00000118260_17 (sequence is synthesized)
taaagcaaagtaaataaaagtacaaagcatattttagttagtactaaattcttagtaaaatgctgatcagtaaaccaatcccttgagttatataacaagatttttaaataaatgttattg

SEQ ID NO: 226010 - DNA, 120 bp, Artificial Sequence
  ENSG00000118260_18 (sequence is synthesized)
tcctcaccttcaaaaatatttatattgtcactcatttacgtaaaaagatatttctaatttactgttgcccattgcacttacataccaccaccaagaaagccttcaagatgtcaaataaag

SEQ ID NO: 226011 - DNA, 120 bp, Artificial Sequence
  ENSG00000118260_19 (sequence is synthesized)
cttcaagatgtcaaataaagcaaagtgatatatatttgtttatgaaatgttacatgtagaaaaatactgattttaaatattttccatattaacaatttaacagagaatctctagtgaatt

SEQ ID NO: 226012 - DNA, 120 bp, Artificial Sequence
  ENSG00000118260_20 (sequence is synthesized)
aaggatataaaaagtacagtgttagatgtgcacaaggaaagttattttcagacatatttgaatgactgctgtactgcaatatttggattgtcattcttacaaaacatttttttgttctct

SEQ ID NO: 226013 - DNA, 120 bp, Artificial Sequence
  ENSG00000118260_21 (sequence is synthesized)
tgtaaaaagagtagttattagttctgctttagctttccaatatgctgtatagcctttgtcattttataattttaattcctgattaaaacagtctgtatttgtgtatatcatacattgttt

SEQ ID NO: 226014 - DNA, 120 bp, Artificial Sequence
  ENSG00000118260_22 (sequence is synthesized)
tcaataccacttttaattgttactcattttattcactaagctcgataaatctaacagttactcttaaaaaaaaaaaaaaaagactaaggtggattttaaaaattggaaactgacataatg

SEQ ID NO: 226015 - DNA, 88 bp, Artificial Sequence
  ENSG00000118260_23 (sequence is synthesized)
tgggctgtctcatttgggaaggaaattccttttaaaaaagagttgagacacttagaaaactaatgttttatatttagtcaagagttat

SEQ ID NO: 226016 - DNA, 120 bp, Artificial Sequence
  ENSG00000118260_24 (sequence is synthesized)
cacttagaaaactaatgttttatatttagtcaagagttatttaagaaagtcaagcttgtttaacaacaaaatatgaagatttaagtgttaattgctggatccattttaaaataagatttt

SEQ ID NO: 226017 - DNA, 120 bp, Artificial Sequence
  ENSG00000118260_25 (sequence is synthesized)
aattaacatttgtaaatggtatattttcgtttgtaacaaaccattgtcttttttcaaggatgaacagagtttatgaaggagcatcattctaagaattaagtgatgtagtctttatgtttg

SEQ ID NO: 226018 - DNA, 120 bp, Artificial Sequence
  ENSG00000118260_26 (sequence is synthesized)
gacagttcaccagattctcaagaaggctttcaaacaactataaagtttgatgtttgtcctgctgagctaatggggaaagttatagcataaaaattgtgtaaccgcatagatatgtcattt

SEQ ID NO: 226019 - DNA, 120 bp, Artificial Sequence
  ENSG00000118260_27 (sequence is synthesized)
ttaaaaactggtttaacagaaatcaagcaaagtcacaaatatgttcacaagttggaattatttattgagtcaaaatgtcgaatcgaacattttgaatgaagtaagtgttataaatgaaaa

SEQ ID NO: 226020 - DNA, 120 bp, Artificial Sequence
  ENSG00000118260_28 (sequence is synthesized)
attgcctgatgtttagcagtttgtattctctaaagctttttttcaaaagttcaggctttctacttactgggaagttggtggtcctcttagtccctgataaatcaaggcaatcacattcat

SEQ ID NO: 226021 - DNA, 120 bp, Artificial Sequence
  ENSG00000118260_29 (sequence is synthesized)
gaggtgagaaatgtatcctgttgctaaatctgtcttagacccttggtgaaacttgaagatttcagtttataaagataaaatcaagcatcttttgtgcagttttctttttttaatgcaaga

SEQ ID NO: 226022 - DNA, 120 bp, Artificial Sequence
  ENSG00000118260_30 (sequence is synthesized)
atggtggggaggtttgtttgtaagcatgaaactttgagaatctttattaagaaaatgacataatttttaaaaaccttgtagccaagaacatatgtggccacattaccagtaataaatgtt

SEQ ID NO: 226023 - DNA, 120 bp, Artificial Sequence
  ENSG00000118260_31 (sequence is synthesized)
tttctctttatattggccaaaagggaataaaaatgtcatcataggaatttgtacatatgctactgatttgcctagaaaatagcaagtttgatattgctcactttgcaaatatagggccat

SEQ ID NO: 226024 - DNA, 120 bp, Artificial Sequence
  ENSG00000118260_32 (sequence is synthesized)
gtggcacttttatctataggacagattaataaaaatgaagtggggaggggtttatttttgatatattactcttatgagttttcaagctttgataatgtttaactgaaaagtggcttagaa

SEQ ID NO: 226025 - DNA, 120 bp, Artificial Sequence
  ENSG00000118260_33 (sequence is synthesized)
agggctagatccaatgtgttcattattaaataattgctatcagatacaattttaagttcattctttttcaaactcaagtaccatattggcaaccataatattgtcataggtgctctcttc

SEQ ID NO: 226026 - DNA, 82 bp, Artificial Sequence
  ENSG00000118260_34 (sequence is synthesized)
gtatataatctaaagctctgagagctcttaagtcaggaatgctgagtattatagtatattgaggtcagatgaaattttacat

SEQ ID NO: 226027 - DNA, 120 bp, Artificial Sequence
  ENSG00000118260_35 (sequence is synthesized)
tgagtattatagtatattgaggtcagatgaaattttacatttttgtgtgttctgttgcattccttctggtagtttctatgactgcattactccagcactcatgattgattttatcttcta

SEQ ID NO: 226028 - DNA, 120 bp, Artificial Sequence
  ENSG00000118260_36 (sequence is synthesized)
attttcttccaagtattttattttttattagttttctttggcttgatacttttaaatatgttactagtcacttgaaagcctctcccccaaaagtatttggtttgtatgctttgtctgtgg

SEQ ID NO: 226029 - DNA, 120 bp, Artificial Sequence
  ENSG00000118260_37 (sequence is synthesized)
cagctataacagtggtaagaacattttgaagatagctttttaaaggaaccactgattttttcaaaaatcatcctgggggaggaattttggcatttcatttgagcagggattttgtcagaa

SEQ ID NO: 226030 - DNA, 120 bp, Artificial Sequence
  ENSG00000118260_38 (sequence is synthesized)
aatgtgttttgatggtaggtcagcagcagtgctagtctctgaaagcacaataccagtcaggcagcctatcccatcagatgtcatctggctgaagtttatctctgtctctcaggataaatc

SEQ ID NO: 226031 - DNA, 120 bp, Artificial Sequence
  ENSG00000118260_39 (sequence is synthesized)
cctgtaggacaaatccctactatcatttctaccttttggggtgacatgtggaatcatacaaaggcttaggaagaaatacgtttgtttaaaccaggatgctttacttacttgaagtgactt

SEQ ID NO: 226032 - DNA, 120 bp, Artificial Sequence
  ENSG00000118260_40 (sequence is synthesized)
caatctagatttcttttaatatttaacaaatttttaattctatgatcagccacagtcagctattaccataaattggtctctgtttattttgaagatcacggctgcttcattttgcaggat

SEQ ID NO: 226033 - DNA, 120 bp, Artificial Sequence
  ENSG00000118260_41 (sequence is synthesized)
taagtagggctaatgtatcttaaagttaagatcttgaattaaagtgagttttagaaatagtgttacataccttttcagttgttttcaagaggctttatttttgttgcctttgtagccctg

SEQ ID NO: 226034 - DNA, 120 bp, Artificial Sequence
  ENSG00000118260_42 (sequence is synthesized)
aaagctgttggtatattttttccctcatggacccaatagaaaagttgtatatttatttggattatatttacattctgtcctttgtaaatgtttggtgtaacttgcacttttttaaatgac

SEQ ID NO: 226035 - DNA, 120 bp, Artificial Sequence
  ENSG00000118260_43 (sequence is synthesized)
ccagtttgggtattagcaacttaagaaattccctcatcaagtaattctcaactttttagtctttctcctctcttcaaatcatgtgactttttaaatggaagtttttcattgattaaaata

SEQ ID NO: 226036 - DNA, 120 bp, Artificial Sequence
  ENSG00000118260_44 (sequence is synthesized)
ttttagcacctaaaagctagccttaaaaacagctgtaaaagaaaaacatcaggaaattagatatgactagcccagttaattaaaagacgggctcaaaccttgttttattctttttcatct

SEQ ID NO: 226037 - DNA, 120 bp, Artificial Sequence
  ENSG00000118260_45 (sequence is synthesized)
tggatgaagattgaagggaaaataactcaagtgcataatatttattttcaatttttaatgagactttatcctcatcacaacattaatactgtacatagtatgccaaaatatccattaatt

SEQ ID NO: 226038 - DNA, 120 bp, Artificial Sequence
  ENSG00000118260_46 (sequence is synthesized)
tgtctagaatagtacaagactttttaaagcaattgtcctcacagagaccacatgtaatatactgaaatatgttcatttttaatggctttgttaacatcaaagaaatgctgcctaaatttg

SEQ ID NO: 226039 - DNA, 120 bp, Artificial Sequence
  ENSG00000118260_47 (sequence is synthesized)
atttcagatgaggaaggagaaagtaaagtgtgcatagtaaggctgtaggtgaagagttgtgagataaatagttcactcagttgtacaaagcacaactagaactttttgttgggaggctta

SEQ ID NO: 226040 - DNA, 120 bp, Artificial Sequence
  ENSG00000118260_48 (sequence is synthesized)
catacatcttgaatattcttaatgtaataatgttgactattaagttggctacacagtcactgtatgtactaggaactggtttccttgacattctagaatcaatggctaggagaggcatta

SEQ ID NO: 226041 - DNA, 120 bp, Artificial Sequence
  ENSG00000118260_49 (sequence is synthesized)
atctttgaggggctgaacatatcatgaagctgagtcagtatggaaaattttcaaataaacagggtgctgaagttccatctgtctcatctgcttatgataagttcttattgattagtgaat

SEQ ID NO: 226042 - DNA, 120 bp, Artificial Sequence
  ENSG00000118260_50 (sequence is synthesized)
gtagcttaagcctttgtatgtgtcctcagggggcagaccgactttaagagggaccagataacgtttgaatggagggattatatttcaggtgttttagcttgaaatttattttttaaaaaa

SEQ ID NO: 226043 - DNA, 120 bp, Artificial Sequence
  ENSG00000118260_51 (sequence is synthesized)
agaaaaatttaaaaaatatataaataaaatagaacaaagccggtgatgcaagttgatattataaacaggcagttttagcacagaaagaaaatactgacctgtctgcattctggtacggtg

SEQ ID NO: 226044 - DNA, 120 bp, Artificial Sequence
  ENSG00000118260_52 (sequence is synthesized)
ggtgcaggtcccagctgggtatgacatgatacatttttaattattctcaccagcaagtaaaaggaaaatgaacaatcttttggaattgtctttgaaaaggatcaaagagtaggaaattca

SEQ ID NO: 226045 - DNA, 120 bp, Artificial Sequence
  ENSG00000118260_53 (sequence is synthesized)
catttgacctaacattacttgcctatagaagtatggcatttccaagcttttgtctgaggagcatctcagagaagtgagagtaaatctgagttagcttaaaaattggtagggaggaagaaa

SEQ ID NO: 226046 - DNA, 120 bp, Artificial Sequence
  ENSG00000118260_54 (sequence is synthesized)
atctctgcaaataatgattttatgtttgttggccaagtgaaatgatctatcattgtgtttgggaggttttattttcttatgtttttaaaattggtaaatgctttatagatgtatttttat

SEQ ID NO: 226047 - DNA, 120 bp, Artificial Sequence
  ENSG00000118260_55 (sequence is synthesized)
ccaagtgccactccaatttgtgtatgtaataaaattatttatattaaaagtgggaaataattgtcaacattttttttgagtatagatttattaggggtggcaaagaagagtgctagttag

SEQ ID NO: 226048 - DNA, 120 bp, Artificial Sequence
  ENSG00000118260_56 (sequence is synthesized)
cagttttccatgtaaagttgtccttgactgatttgtccacatgtcagttgtaactcccccactccctgcaaaaggaattatttctaacccagatgtatcacttgaaactttttagaagca

SEQ ID NO: 226049 - DNA, 120 bp, Artificial Sequence
  ENSG00000118260_57 (sequence is synthesized)
aaataatcagggaagttcctagaaaggtgtttggctttttggtttttgagggttggggtaaagaagacttcccccacaactgtcagcacaaaacagggtattgatttttaactctgatgt

SEQ ID NO: 226050 - DNA, 120 bp, Artificial Sequence
  ENSG00000118260_58 (sequence is synthesized)
ttctattggagttgaatactaaataaataactataatgagggaaatacatttctaataaaattccctacattctagaaacatccctgttttaatttttttatctaaatctttttgtgctt

SEQ ID NO: 226051 - DNA, 120 bp, Artificial Sequence
  ENSG00000118260_59 (sequence is synthesized)
tatgtgtaaagaaaaaaatgtactgagttacaatgcattttattaacactatgtacataatagctgctttgtgttcagaatagtagcagttgctttgtatattaaagtgatccttgtgaa

SEQ ID NO: 226052 - DNA, 120 bp, Artificial Sequence
  ENSG00000118260_60 (sequence is synthesized)
tttgtgaaatattgtcataaagtgctttttcttactgtaatctttgtggtatcaactgtcataatgctctttttacacaaacatttatgtgcagtcacataaacatgcttttaaaaactc

SEQ ID NO: 226053 - DNA, 120 bp, Artificial Sequence
  ENSG00000118260_61 (sequence is synthesized)
tgttgggttttttttgctagtagtgtgaagccatgttttattggacttaaagttacaatatattacaagcttgtgttggaaggcagcaaaactaattcagacaacaacatgtcttcagtt

SEQ ID NO: 226054 - DNA, 120 bp, Artificial Sequence
  ENSG00000118260_62 (sequence is synthesized)
actggatccctaattttcaggacaaaacctgtttttcaataagattgaacagtgcctatttgtggatttggagatgttactgtcaagatgactaatggagacatacgaccagctgtgtct

SEQ ID NO: 226055 - DNA, 120 bp, Artificial Sequence
  ENSG00000118260_63 (sequence is synthesized)
gatgtcataaaacacgtgttcactgaaaggacaataagactatataccttctcaggtccccttgcaattctaaaactctgtgatcatataaattggaaggaaaggggaggggatatggtt

SEQ ID NO: 226056 - DNA, 120 bp, Artificial Sequence
  ENSG00000118260_64 (sequence is synthesized)
aatctttgcttaagctgtaagaataaaaaagttatctcctatactattaacttctgaaataagttctgagacgagacatctgaaaataagcagctgcattatttgtatgtttcttcactg

SEQ ID NO: 226057 - DNA, 120 bp, Artificial Sequence
  ENSG00000118260_65 (sequence is synthesized)
ccaagatgtgttcaagcctgctatacctgccattgtattggaaggcttaatgaatttcatttattttctgcaacaacgattacagaatttattgcacaaaatgagacattttgagagtga

SEQ ID NO: 226058 - DNA, 120 bp, Artificial Sequence
  ENSG00000118260_66 (sequence is synthesized)
tattaattacatgagggacaataggcatgaactaggattgttctaagcaaatcggaatcgggtcaccctgccacgttcaggtgcttggaccttcaggaaaagattgcccatcttgtcatt

SEQ ID NO: 226059 - DNA, 120 bp, Artificial Sequence
  ENSG00000118260_67 (sequence is synthesized)
tgaccaggcactgaagtgacaagaccatccttgagaagtcacatccaaagataaaattctgatccatttctagttttagtgtttcgccactgaagacttaacatatgtcttttacactca

SEQ ID NO: 226060 - DNA, 120 bp, Artificial Sequence
  ENSG00000118260_68 (sequence is synthesized)
ggttgcaaaacacaggcccaagacaaacttaacttctcccccaaatcttccttccgctggtttttccatctcgtaagtggtgccactatccatctgttaaattgtttaggggaaacctag

SEQ ID NO: 226061 - DNA, 120 bp, Artificial Sequence
  ENSG00000118260_69 (sequence is synthesized)
aaaagcactaccttaatcagtgttatccttcttcttaactgtgcgtcctaatttctccacatctttcttaagtgcagtgaccaaaccggatgagaattctaacacgggcctgacatcaaa

SEQ ID NO: 226062 - DNA, 120 bp, Artificial Sequence
  ENSG00000118260_70 (sequence is synthesized)
tggaaaggaaggataatgtccaggagttggaatgttatccttgtttttaattaagatgcaattcacataaattaactttttaagtgaacaattaagtggtagtacatccacaatggtgta

SEQ ID NO: 226063 - DNA, 120 bp, Artificial Sequence
  ENSG00000118260_71 (sequence is synthesized)
caaccaccacttctatctagctccaaaacattctcatcactccaaaagtaaagtcccgttactctccattttctcctcccaccgcccttgtccctggcaaccaccaatctgcttcctgtt

SEQ ID NO: 226064 - DNA, 120 bp, Artificial Sequence
  ENSG00000118260_72 (sequence is synthesized)
tctttggatttacatccgggtatttcatgtgagactcatacactgtgtattacttctttcgtctagctttaatgtgttgttgaggttgatccattgtaacatgttatcactacttcattc

SEQ ID NO: 226065 - DNA, 120 bp, Artificial Sequence
  ENSG00000118260_73 (sequence is synthesized)
ctttttatagctaagtatactttttatagtaagtatgccattgtagatatataccacaagtttatcgattcatccagttgagttgtttctactgtttggctaatgttcatagtgctgtta

SEQ ID NO: 226066 - DNA, 120 bp, Artificial Sequence
  ENSG00000118260_74 (sequence is synthesized)
tgaatgttcgtgtacaagtatttgagtccgtgttttcaattatttggggtatatgcctgggagtggagttgctgggtcatgttgaaatcgcacatttaactttttgaggaactgtcaaac

SEQ ID NO: 226067 - DNA, 120 bp, Artificial Sequence
  ENSG00000118260_75 (sequence is synthesized)
tttccctcagcagctgtaccgttttaccttccaccattgatgtatgagggttccaatttctccacaccttcaccaacacttattttgccattttaaaaattatagccatcctcatgggtg

SEQ ID NO: 226068 - DNA, 120 bp, Artificial Sequence
  ENSG00000118260_76 (sequence is synthesized)
gtggttttgatttgcatttccctgattactaatgatgtggagcatcttttgttgtctttggccatctgcgtatcttctttgaagaaatgtctgttgaggtcctttgttcattgaaatttt

SEQ ID NO: 226069 - DNA, 120 bp, Artificial Sequence
  ENSG00000118260_77 (sequence is synthesized)
cattgaaattttgttgttgggttctgagttccttatatattctgggtactaggcccttataatattttcgcctataagtttttgctttataatgtcctcattgttttcaaacttacttta

SEQ ID NO: 226070 - DNA, 120 bp, Artificial Sequence
  ENSG00000118260_78 (sequence is synthesized)
tgtaatatgtacacttctaaaaaaaagaaacatggaaaagggcaaactgtaagaagttttttgtgttatgttttttgtgacagtctgtgcatatatacacaaatataatgtatgttctct

SEQ ID NO: 226071 - DNA, 120 bp, Artificial Sequence
  ENSG00000118260_79 (sequence is synthesized)
cctcctccctctccctttttttacacaaaaggtaggtacaaacagtggtttataaactgctgccattgtacagatacagtttaaccagtcctcttctggggacatttggctgtttgaaat

SEQ ID NO: 226072 - DNA, 120 bp, Artificial Sequence
  ENSG00000118260_80 (sequence is synthesized)
tttttactgttacagatatacagaggttggtaactaggtctacacaagttgtatctccaggatactgagaagtaaaagttatttctgaattatggttttcttcatatttggatattgttt

SEQ ID NO: 226073 - DNA, 120 bp, Artificial Sequence
  ENSG00000118260_81 (sequence is synthesized)
cctaatgattattaggtatctgctaagcaatttttattaacttatgttgattactatttttatgtcaaactttacagtctaggcatttttttctggaattaaaattagaagtggcacaga

SEQ ID NO: 226074 - DNA, 120 bp, Artificial Sequence
  ENSG00000118260_82 (sequence is synthesized)
agaccactcctcccggcgccgggctcagcccgccttcgccttccctctccccgcggaaccccttctcgtcgcccgaagaaacccgaaggtcttcggcaagttccgtccccagcgcggggg

SEQ ID NO: 226075 - DNA, 120 bp, Artificial Sequence
  ENSG00000118260_83 (sequence is synthesized)
gatgtggaggaagtcttaggtagttgcagataaagagatgtcagaagaccagttagttgttcacgtcagttccttatagattacttttcttcatcttgagttatttgtctcaaataaagt

SEQ ID NO: 226076 - DNA, 120 bp, Artificial Sequence
  ENSG00000118260_84 (sequence is synthesized)
gaattcaggaggagttgcccacttgttagtgtgcagggaaatgtgtttttctcatttctagttgaggtcattctttttttttttttttttttaaaccatagcatgtgttccattagttat

SEQ ID NO: 226077 - DNA, 120 bp, Artificial Sequence
  ENSG00000118260_85 (sequence is synthesized)
gaatgtattatttctttagagtcaaaattcacaactcatttctttgaatattatctctgatcctagatgggatcaaaattgccctagatttaggagttttaaaagtttactaggttgtgg

SEQ ID NO: 226078 - DNA, 120 bp, Artificial Sequence
  ENSG00000118260_86 (sequence is synthesized)
atacatcatacagtaacacacttatgtgcaccattggtgctgagctgctggttatcccactctgccatgtgtgctgtttctctttgcttttgccactactccactctgtgcttgaaattc

SEQ ID NO: 226079 - DNA, 120 bp, Artificial Sequence
  ENSG00000118260_87 (sequence is synthesized)
attctgctggatgtgtatctttacatctactggtaataggatctttgcattgaattttttttttccagcagaattaatggatcttgctaaattttctttatttaataagctgcacttata

SEQ ID NO: 226080 - DNA, 120 bp, Artificial Sequence
  ENSG00000118260_88 (sequence is synthesized)
agatagctgtatgattatgggtcaatctttgatcgtggagtagttttctttcatgcagtttccccacaggagatttaatgcacaacttccctatgtctgcactccaaccagttagccagg

SEQ ID NO: 226081 - DNA, 120 bp, Artificial Sequence
  ENSG00000118260_89 (sequence is synthesized)
tagccaggttatttaaaaatggtttcttttcatgtatagtattgttcaagaagatcaagagtttcatatatgtatattaactgtgtgttaaattttatctatattaaatttacttgatat

SEQ ID NO: 226082 - DNA, 120 bp, Artificial Sequence
  ENSG00000118260_90 (sequence is synthesized)
tagactgtgctggctgtctttctgttaaaagtttggaatacagttgataaggttatagcattttttagttataagccaactctgaggctctgttatttatctacttagtaacacattgca

SEQ ID NO: 226083 - DNA, 120 bp, Artificial Sequence
  ENSG00000118260_91 (sequence is synthesized)
aaccattttttatgccatggtacttaacagatagctattaatttaataattgtctcagggagatgctttactaacatcccctaattttagcagtagcttactgtaatttttgtgttcagt

SEQ ID NO: 226084 - DNA, 120 bp, Artificial Sequence
  ENSG00000118260_92 (sequence is synthesized)
tatagatgttgcctagtccatgccttgcctccaaggtgaaccaaaaccattttttaatgtaaaaattagctccacattaaatatcttcaggaagggcagttccataaatcttgataagtt

SEQ ID NO: 226085 - DNA, 120 bp, Artificial Sequence
  ENSG00000118260_93 (sequence is synthesized)
caaaaattgtaaagcaggatgtcagtgaatttgaattctgaacgtcagtttgaagatgagtctacttgaaattttttaatatgaatttaccaatatcaaaggaagacactgaggactata

SEQ ID NO: 226086 - DNA, 120 bp, Artificial Sequence
  ENSG00000118263_0 (sequence is synthesized)
aacagcgctgcagaaatagatggcagcttcgtgtcagtgagtttgcatcccccttcctgatccacgagctggagtgattagagccctggaagggaattgttactcccgtggagaagtccc

SEQ ID NO: 226087 - DNA, 120 bp, Artificial Sequence
  ENSG00000118263_1 (sequence is synthesized)
cttttcctggcagtcgtctgcactgtacacgctggatgcctctctccatccaccccactcactcgctcctctctcacctcctctctccctctcctgcattgatttttttttttccttttt

SEQ ID NO: 226088 - DNA, 120 bp, Artificial Sequence
  ENSG00000118263_2 (sequence is synthesized)
agttgactgaaacaaaacaaaacaaaagggccactggatgtctgccttcttggggggtgagccagacagactgacaaacaaacagccccaactgtgttcgggggagggtttcgcctcccg

SEQ ID NO: 226089 - DNA, 120 bp, Artificial Sequence
  ENSG00000118263_3 (sequence is synthesized)
ttttgcccggcagcagcagcatggacgtgttggctagttatagtatattccaggagctacaacttgtccacgacaccggctacttctcagctttaccatccctggaggagacctggcagc

SEQ ID NO: 226090 - DNA, 120 bp, Artificial Sequence
  ENSG00000118263_4 (sequence is synthesized)
agacatgccttgaattggaacgctacctacagacggagccccggaggatctcagagacctttggtgaggacttggactgtttcctccacgcttcccctcccccgtgcattgaggaaagct

SEQ ID NO: 226091 - DNA, 120 bp, Artificial Sequence
  ENSG00000118263_5 (sequence is synthesized)
tccgtcgcttagaccccctgctgctccccgtggaagcggccatctgtgagaagagctcggcagtggacatcttgctctctcgggacaagttgctatctgagacctgcctcagcctccagc

SEQ ID NO: 226092 - DNA, 120 bp, Artificial Sequence
  ENSG00000118263_6 (sequence is synthesized)
cggccagctcttctctagacagctacacagccgtcaaccaggcccagctcaacgcagtgacctcattaacgcccccatcgtcccctgagctcagccgccatctggtcaaaacctcacaaa

SEQ ID NO: 226093 - DNA, 120 bp, Artificial Sequence
  ENSG00000118263_7 (sequence is synthesized)
ctctctctgccgtggatggcacggtgacgttgaaactggtggccaagaaggctgctctcagctccgtaaaggtgggaggggtcgcaacagctgcagcagccgtgacggctgcgggggccg

SEQ ID NO: 226094 - DNA, 120 bp, Artificial Sequence
  ENSG00000118263_8 (sequence is synthesized)
ttaagagtggacagagcgacagtgaccaaggagggctgggggctgaagcatgtcccgaaaacaagaagagggttcaccgctgtcagtttaacgggtgccggaaagtttatacaaaaagct

SEQ ID NO: 226095 - DNA, 120 bp, Artificial Sequence
  ENSG00000118263_9 (sequence is synthesized)
cccacttaaaggcccaccagaggactcacacaggtgagaagccttataagtgctcatgggagggatgtgagtggcgttttgcacgaagcgatgagctcacgaggcactacaggaaacaca

SEQ ID NO: 226096 - DNA, 120 bp, Artificial Sequence
  ENSG00000118263_10 (sequence is synthesized)
caggtgcaaagcccttcaaatgcaaccactgcgacaggtgtttttccaggtctgaccatcttgccctccacatgaagagacatatctaaaaaaccgaaaggccagagttgccatggcatc

SEQ ID NO: 226097 - DNA, 120 bp, Artificial Sequence
  ENSG00000118263_11 (sequence is synthesized)
ggctagtgtctaaaggaaacgccatgaggcagggggctggacttcaggcggggacccattgcctcgcagaagaaagttctcacttataaacctctgtacacacacacacacacacacaca

SEQ ID NO: 226098 - DNA, 120 bp, Artificial Sequence
  ENSG00000118263_12 (sequence is synthesized)
tatacacacactcacagacccacacacatacacactgtcatgcactcaactatatttaaaatatatacgtctattctttatgccttgccctagccagatggaagaagatgaagaaggaaa

SEQ ID NO: 226099 - DNA, 120 bp, Artificial Sequence
  ENSG00000118263_13 (sequence is synthesized)
ccaggtgaactcagcaaggcagactggctgcttacttcagcactattggaattatttcccgctgttgccaatggaaatcaaagaaaatggatgtgacgtctgtgcaggtggacggcagtc

SEQ ID NO: 226100 - DNA, 120 bp, Artificial Sequence
  ENSG00000118263_14 (sequence is synthesized)
cgaggggcttatttcacttgcttctcagtgcaacttgataggagaatccagcatcttaaagttgcatatgtgtagcactaatgtttctttttaaatagttgggggaaaatgacctagaaa

SEQ ID NO: 226101 - DNA, 120 bp, Artificial Sequence
  ENSG00000118263_15 (sequence is synthesized)
accaaattgcagtttggtagccaaaattaactcttggtttatttgtcctttgtgtgtgaaaagtcctactattccgtgcgtcagacttcctcacagaactgttgactggttttggttctt

SEQ ID NO: 226102 - DNA, 120 bp, Artificial Sequence
  ENSG00000118263_16 (sequence is synthesized)
agtactattgagatctttcgcgtcgatcccaacggccttagcggcggcagactggaataacaccttacacctttctggcctgcatttctgtagacttcactctcaagggaggagttttct

SEQ ID NO: 226103 - DNA, 120 bp, Artificial Sequence
  ENSG00000118263_17 (sequence is synthesized)
tttcttacgttttgacttttgcacaccatatgcactagggattctggaaacttctagcatgactgcaaagtggccaagagaataaagtccttgatgataaatcacagtatatcccttgag

SEQ ID NO: 226104 - DNA, 120 bp, Artificial Sequence
  ENSG00000118263_18 (sequence is synthesized)
cctcaccttattgccagtgctagattttttctttttaatctctccgtttttgctaacgaaaacttgaaaagcttatttggaagcttaaatgttttatcttttctccatggactaaacctc

SEQ ID NO: 226105 - DNA, 120 bp, Artificial Sequence
  ENSG00000118263_19 (sequence is synthesized)
tccaggactctctcggcacctggatgtccagctctcgaagcagccagtcagatgggacatcacagttctctcatcctccttgaggcatgatgacctcagctcatagtgatcaaccgttgt

SEQ ID NO: 226106 - DNA, 120 bp, Artificial Sequence
  ENSG00000118263_20 (sequence is synthesized)
gctgtgtgtcattgctaccccataaccagttacagcatagatgtcgctagtctcagagggcagctgcgtatttaatttaactctggtttatgacctgacaaaaagccaaaaatatcactc

SEQ ID NO: 226107 - DNA, 120 bp, Artificial Sequence
  ENSG00000118263_21 (sequence is synthesized)
tttccaggagtggggaaaactgaggatgcctcccaagtctagtggcttcacaaaagatcatcctgtcttctctgtcatgcccactgagctcctattcccctacgtgttacaatacacaat

SEQ ID NO: 226108 - DNA, 120 bp, Artificial Sequence
  ENSG00000118263_22 (sequence is synthesized)
ttaaaacgccattgtgggagtgaagggttgacatttaaggaaaaggttgaggtgtttctctcatgggctgtctaaaaggagagacacgtttctttctttccttttttttttggctaggcc

SEQ ID NO: 226109 - DNA, 120 bp, Artificial Sequence
  ENSG00000118263_23 (sequence is synthesized)
caccatgacttgtgacctagaacccccaggattaacagaggcctcacatttactctgcaagctgactccaaaggagtctacagtccttacttgtcatgccacactcacacatccagtagt

SEQ ID NO: 226110 - DNA, 120 bp, Artificial Sequence
  ENSG00000118263_24 (sequence is synthesized)
ggtctctatctacccgcattcctagctagctggcactggcctcaactccaaagactgcctttaggaccatcaaatggcctatgcaagcaagcggggtggttattaggacagattgtatat

SEQ ID NO: 226111 - DNA, 120 bp, Artificial Sequence
  ENSG00000118263_25 (sequence is synthesized)
tttgtatattctgggaccatcccttcaagacacgtctataaaacaaaaatggcgcttggtccacacacggttgctgctccctcctaccagctggctcccctcctgtcctcctttgactgt

SEQ ID NO: 226112 - DNA, 120 bp, Artificial Sequence
  ENSG00000118263_26 (sequence is synthesized)
ttgactcattgactgttaaaatgccaccccatacatatttgggatgcaaaactgaagtcaaaaggaaataatataagaaacacaaacacatatatgacagcaaccttcaagatctgggtt

SEQ ID NO: 226113 - DNA, 120 bp, Artificial Sequence
  ENSG00000118263_27 (sequence is synthesized)
ttcagctttctgcaacctttgttttcactgaaatgttgaaactactcgtctgagggcaaaggaacctcctcacaaatgctatagctgccaattggacacttggggcatttcgaggtctgg

SEQ ID NO: 226114 - DNA, 81 bp, Artificial Sequence
  ENSG00000118263_28 (sequence is synthesized)
atagctgccaattggacacttggggcatttcgaggtctggccctaagaatttactttctccttttccttttttctatttag

SEQ ID NO: 226115 - DNA, 120 bp, Artificial Sequence
  ENSG00000118263_29 (sequence is synthesized)
acacacgcgcacacacacacaaaatctgtccatttgccggaggcaattgtatgtatgttagttggagggtattaaaaatcagttttattccaaagatttaaaactagacatgacttaaaa

SEQ ID NO: 226116 - DNA, 120 bp, Artificial Sequence
  ENSG00000118263_30 (sequence is synthesized)
acaatttctggagcactgcttgctgacaatctcgtagttctctgctgcatttgagtgcattttgtggccagtccatcagggcgtaccatgggattatatttgaatgtgtggtgcatcctt

SEQ ID NO: 226117 - DNA, 120 bp, Artificial Sequence
  ENSG00000118263_31 (sequence is synthesized)
cctggatgaaggatgtgtgagggaccttgaacctcagctgtattaaactgtagcgcctccagtcagtgcactagatgaaacttttagacaccctgaattctgttggttcctttcttttcc

SEQ ID NO: 226118 - DNA, 120 bp, Artificial Sequence
  ENSG00000118263_32 (sequence is synthesized)
tttatgtagcagcctccagcatgaatgcacgcacacgccagtgatggcattaagccatggccaccacgatttgcaaatgttctctcccaagctggagctgctcttgcctctcgaatgcta

SEQ ID NO: 226119 - DNA, 120 bp, Artificial Sequence
  ENSG00000118263_33 (sequence is synthesized)
ttattaagggtttataatacttaatttaattttcgaactgaccaatgcaaggctctattaaaaagaaagtttaaaaaatgcaaaagagtaatcattgcttgtttgctccctattttcatc

SEQ ID NO: 226120 - DNA, 120 bp, Artificial Sequence
  ENSG00000118263_34 (sequence is synthesized)
atcagtgaggtcctttgtaatctgctcctgacctttcttggagcagggtgcattgaaactcaatggtggtgcttgcttgcttcagagtcatttgttgactgtgagaattggcctaagaat

SEQ ID NO: 226121 - DNA, 120 bp, Artificial Sequence
  ENSG00000118263_35 (sequence is synthesized)
ttggtgggtgctaagtggatggctttgaaactgttcttctttagccgagttgacacctgtgaatgatgaccagtcctgatcattttggaaatggatttgtaataaaacgtccatcacctc

SEQ ID NO: 226122 - DNA, 120 bp, Artificial Sequence
  ENSG00000118263_36 (sequence is synthesized)
tgcagtggcagagatggttactaagagccgctagagcgagcaggttttccaagaagtaacctgaagacattttgctcccaagaggactggttatttaaaacagtgcattaatggacattt

SEQ ID NO: 226123 - DNA, 120 bp, Artificial Sequence
  ENSG00000118263_37 (sequence is synthesized)
gaaacacattaaacccctttctcatttcagttgttacctcctaaccctccaggggatcccaaatttgaaaggaaaaacccggcctggtgtttctggtggtgtcctaacaagcacgctttt

SEQ ID NO: 226124 - DNA, 120 bp, Artificial Sequence
  ENSG00000118263_38 (sequence is synthesized)
atccagggttcagatttgttcatgtagaaaaagagtttctaagccactgacaattttttttttttgtaatttcaaattatacttctttctcctgccacatgactgtaagtcatagacatg

SEQ ID NO: 226125 - DNA, 120 bp, Artificial Sequence
  ENSG00000118263_39 (sequence is synthesized)
gaaacctgaaattataatgctgctcctagctactggcctcctgccccacccatggttaatggctcagctcaatgcctggtggtaatgagtattatgtccagaaaaagagatgttcagatt

SEQ ID NO: 226126 - DNA, 120 bp, Artificial Sequence
  ENSG00000118263_40 (sequence is synthesized)
ccatgacaaagctgcatttttgtaaaaatattggagaccccaaaatgaacttcatgctgaccatttcctcctctctgtgtgctttcccttgcaaagcccttcaaatatcctcttctctcg

SEQ ID NO: 226127 - DNA, 120 bp, Artificial Sequence
  ENSG00000118263_41 (sequence is synthesized)
acgccatctcctctccacctgcacctcttgtgccctttgtacatctttgattgcctgatgataacagggtaaaaggacagccaacctcatgcctgattagcagaactgaatcctagtttt

SEQ ID NO: 226128 - DNA, 120 bp, Artificial Sequence
  ENSG00000118263_42 (sequence is synthesized)
aaaaaatcttctctggcttcagagaagattttataaggacttttgtttgggataagctttccagattatccatgtctatttgcatcaaaggggaaagaaatggggcttttggatggctct

SEQ ID NO: 226129 - DNA, 120 bp, Artificial Sequence
  ENSG00000118263_43 (sequence is synthesized)
tccagtgcattcggaacattgcctcttgcctttattcctgcattttatggcaaagccaaaagaaactcaagttgcaagaacaaaacccagtgactcgttttgatggttcaaaatggtttc

SEQ ID NO: 226130 - DNA, 120 bp, Artificial Sequence
  ENSG00000118263_44 (sequence is synthesized)
ctttatggaagtcacttcataaaatgttaagtaaaaagtgggaagtgcttctgtcttctcttttgcatgagttgcttttaggagcaggaagaaggtaggcaaagtaagataaagatgcaa

SEQ ID NO: 226131 - DNA, 120 bp, Artificial Sequence
  ENSG00000118263_45 (sequence is synthesized)
cacatttaactacaaaaatcaggttcattttttagtttattagaatttttttgaaatcttaagagggccagcatttctggctacaattttgcacccagaacattgccaaaatgaacattc

SEQ ID NO: 226132 - DNA, 120 bp, Artificial Sequence
  ENSG00000118263_46 (sequence is synthesized)
agtaaatagaacctgattgaaatttactcctggaagctttcctttgcattttcgggaagtggccacctgccaagcgcaagagttggggggcaggaggggaggactcaaattcagggtgtc

SEQ ID NO: 226133 - DNA, 120 bp, Artificial Sequence
  ENSG00000118263_47 (sequence is synthesized)
tggattaaatttcggtgaacatggtgatatctcagtttgaaaactagagggcctatcctgagtatacatcaatgtctctttgatggcctactttcctcagtgaggatctttgggaatact

SEQ ID NO: 226134 - DNA, 120 bp, Artificial Sequence
  ENSG00000118263_48 (sequence is synthesized)
tgagatggaacaacagaaatgtgtgaaaggaagcagaaacttcttgtaaataacgtgacctcccacgacgaactgcctgaggcttcagggttttttcttgcttttaacactcttaaatct

SEQ ID NO: 226135 - DNA, 120 bp, Artificial Sequence
  ENSG00000118263_49 (sequence is synthesized)
cctctgttggttcctaatagatcccagaaaagggaaaaataaagctgcagttaactttcttatgtgcatccttccaatagagtactgtatttttcaggtgttttgcatttaacataaaag

SEQ ID NO: 226136 - DNA, 120 bp, Artificial Sequence
  ENSG00000118263_50 (sequence is synthesized)
tcctcgggaaacaggtgtcaaaaacagagagagaaatcctgggccatcacttcacaaatatcccaaacaagatattcttttcaaacagggctccctctcagtggtcatgagggaaggttg

SEQ ID NO: 226137 - DNA, 120 bp, Artificial Sequence
  ENSG00000118263_51 (sequence is synthesized)
ataatgttctttgttggggactgtttatacaattttttttcaactgtgagctttggaatcgtaacttgctgtgagtccagcttctgtctactgccataagatggaccccacgtcagcata

SEQ ID NO: 226138 - DNA, 120 bp, Artificial Sequence
  ENSG00000118263_52 (sequence is synthesized)
atgagggtggtatatatgctcgcacctagacatgcgcatatgtacctgtcgtaccttcacggaaggaaaacaggctactgacgtttcggaggagtagccaccagtgcctaatatcttttg

SEQ ID NO: 226139 - DNA, 120 bp, Artificial Sequence
  ENSG00000118263_53 (sequence is synthesized)
ggggggatggatgcttataattgccagtatatcgaaaccacactgggagttccacatagcggggaggggttgggggtgggcagaggggacattttaaacctaggcctttggactggaggc

SEQ ID NO: 226140 - DNA, 120 bp, Artificial Sequence
  ENSG00000118263_54 (sequence is synthesized)
agaacgatttctgcaaacctaggtcctgaaggctttggggcttattggctggttctcaacctttttgttttttcttcccagcatgcatttcctatctaaacccagacttagtttaatttc

SEQ ID NO: 226141 - DNA, 120 bp, Artificial Sequence
  ENSG00000118263_55 (sequence is synthesized)
cttatctttcacttctgcttcattccagggaggaaaaatacacctgttaatggccaagatctccttgctaacacagaggcaaaaataaatgtctaatgtttttgaagcctccccttcctt

SEQ ID NO: 226142 - DNA, 120 bp, Artificial Sequence
  ENSG00000118263_56 (sequence is synthesized)
tccacaagcccccacccgcccccgcgtcaagctccttctcccacttcctactcccacacaacttcccagccactgaaacttttctttcaaatctctattatcctcttaacagttgcttga

SEQ ID NO: 226143 - DNA, 120 bp, Artificial Sequence
  ENSG00000118263_57 (sequence is synthesized)
ataaatttatttttgcactatacattttctttttgccagatgtgtctaacaagtgtgtttggagagacctactcccagccccgtctccttccccgcctccccccgtcacattctctcagg

SEQ ID NO: 226144 - DNA, 120 bp, Artificial Sequence
  ENSG00000118263_58 (sequence is synthesized)
ccttctctggtatttataatatatcacagaagtacccagtcttatagccctcggttatgcctttttttgacattttattttttttaagctttttatatatatatatatataaatatatta

SEQ ID NO: 226145 - DNA, 120 bp, Artificial Sequence
  ENSG00000118263_59 (sequence is synthesized)
gtcaagtttttttgctgtacaaaagtcttaagatttaaaactattatttgtattatatgatggtggtatgttaatgttacaaaattattaatgaagaaaaaatttatttttgttactggt

SEQ ID NO: 226146 - DNA, 120 bp, Artificial Sequence
  ENSG00000118263_60 (sequence is synthesized)
tggtctgtttcataattcttttttaaattggtatattgtaagatatctatgcaaaaaatgttatgtgacgcatttttatttaagaatgtaatatgtgtaataaacagtagaatgtgtttg

SEQ ID NO: 226147 - DNA, 120 bp, Artificial Sequence
  ENSG00000118263_61 (sequence is synthesized)
gccttggaatactttactgtatttctccttagcttgtttcactggggaaaaaaatcttcgaaagacgcaagtgggtacttacatacttcgtgaaagttttctttcttggagaaagggaaa

SEQ ID NO: 226148 - DNA, 120 bp, Artificial Sequence
  ENSG00000118263_62 (sequence is synthesized)
gcaaaaggttgtattaggttatcttcgtttgggaagttgtgtgtgtgtgtgcgtatgtgtgtattttatagtttcattgaggcagctcaatgcccaaataagggtcactgagtttatttc

SEQ ID NO: 226149 - DNA, 120 bp, Artificial Sequence
  ENSG00000118263_63 (sequence is synthesized)
ttcaaggggaaaaagggagccaattgttggagattatgaaaagcaatattttagaatgatagagattacaagatgttatttgtttagggggttgggagaggcttattgaaagcggtttat

SEQ ID NO: 226150 - DNA, 120 bp, Artificial Sequence
  ENSG00000118263_64 (sequence is synthesized)
ttggcgagagaaggaggcagtttgttctgggatggtgtttaataggaacctattgggaaaggatctttgaagcagtctgtgaaggaggaagggtaaagatcagagggaataatttaggtg

SEQ ID NO: 226151 - DNA, 120 bp, Artificial Sequence
  ENSG00000118263_65 (sequence is synthesized)
aggggtagggggcagtaaaatgacaggaggtggttggagtggggaggaaatgggtaaccggaagccaggaaatccagctggctgtggagagtacaaaaaactagatggaaatacaagcag

SEQ ID NO: 226152 - DNA, 120 bp, Artificial Sequence
  ENSG00000118263_66 (sequence is synthesized)
cttcagacccagagaagagagggagatgaaagccccagggaaaattctcagaactgaaaagaaaagtactaaaatctctgccacacacgacttccaggaaagagcatcaccagtaaggag

SEQ ID NO: 226153 - DNA, 120 bp, Artificial Sequence
  ENSG00000118263_67 (sequence is synthesized)
gaaggtagagaacccagctggtggtgtcgcctcagcatcccgagctcagcgattccccgagagaagtggtgtcattcacaggaaacagcagtaaaacacatttgtcacatgggacacagc

SEQ ID NO: 226154 - DNA, 120 bp, Artificial Sequence
  ENSG00000118263_68 (sequence is synthesized)
agtagtcaagctttctttgcattctttggacttacagaagtggatacggtggtgaataacctctatccctaatcaaatgaatctgacaagaaactttccaataaatgtttactttagaaa

SEQ ID NO: 226155 - DNA, 120 bp, Artificial Sequence
  ENSG00000118263_69 (sequence is synthesized)
attgtgcagggttttcatctcagatgtaacagatctctctatgtctacatcccaactccagaaaacgagaaatcgagttcctcctctcaccatcgaagctctgcagacacctcgctggag

SEQ ID NO: 226156 - DNA, 120 bp, Artificial Sequence
  ENSG00000118263_70 (sequence is synthesized)
accccatggtgagcctcatcacgtaaaggccccctcgcaagctgccggctccagcttgcgccccacgtctacctaggctccctctagcctctttaacgcacagtcgagcaacaggcccct

SEQ ID NO: 226157 - DNA, 120 bp, Artificial Sequence
  ENSG00000118263_71 (sequence is synthesized)
acacgcggcctaatggacgccctcctcgagatcccacggctgcgcggagaaccgaacggagggagggagtttggggagggggaagagcaggaggaggagaaaagggagggggaagactac

SEQ ID NO: 226158 - DNA, 120 bp, Artificial Sequence
  ENSG00000118263_72 (sequence is synthesized)
aaactagcaaggatggggtggggggtggggagggaagggaaggggggggaagagaagcgatcgcgagagaaaaaaatgcaacctcccaaaataaagagcaaagattgcattaggagcgaa

SEQ ID NO: 226159 - DNA, 120 bp, Artificial Sequence
  ENSG00000118263_73 (sequence is synthesized)
acacaccagtttcttattattgactatgaaatcaacatgactgggtgggactggggaaaagacagatttatcagtccctaagagctgatggaaactgcatcctttaggtggaacacagag

SEQ ID NO: 226160 - DNA, 120 bp, Artificial Sequence
  ENSG00000118263_74 (sequence is synthesized)
ttggctgtaaggagacattcctttgtttttgttgtcttgaacaaaaggaaggacagtagatgacacagacatgccttgaattggaacgctacctacagacggagccccggaggatctcag

SEQ ID NO: 226161 - DNA, 120 bp, Artificial Sequence
  ENSG00000118271_0 (sequence is synthesized)
agacaaggttcatatttgtatgggttacttattctctctttgttgactaagtcaataatcagaatcagcaggtttgcagtcagattggcagggataagcagcctagctcaggagaagtga

SEQ ID NO: 226162 - DNA, 120 bp, Artificial Sequence
  ENSG00000118271_1 (sequence is synthesized)
gtataaaagccccaggctgggagcagccatcacagaagtccactcattcttggcaggatggcttctcatcgtctgctcctcctctgccttgctggactggtatttgtgtctgaggctggc

SEQ ID NO: 226163 - DNA, 120 bp, Artificial Sequence
  ENSG00000118271_2 (sequence is synthesized)
cctacgggcaccggtgaatccaagtgtcctctgatggtcaaagttctagatgctgtccgaggcagtcctgccatcaatgtggccgtgcatgtgttcagaaaggctgctgatgacacctgg

SEQ ID NO: 226164 - DNA, 120 bp, Artificial Sequence
  ENSG00000118271_3 (sequence is synthesized)
gcacttggcatctccccattccatgagcatgcagaggtggtattcacagccaacgactccggcccccgccgctacaccattgccgccctgctgagcccctactcctattccaccacggct

SEQ ID NO: 226165 - DNA, 120 bp, Artificial Sequence
  ENSG00000118271_4 (sequence is synthesized)
gtcgtcaccaatcccaaggaatgagggacttctcctccagtggacctgaaggacgagggatgggatttcatgtaaccaagagtattccatttttactaaagcagtgttttcacctcatat

SEQ ID NO: 226166 - DNA, 120 bp, Artificial Sequence
  ENSG00000118271_5 (sequence is synthesized)
gctatgttagaagtccaggcagagacaataaaacattcctgtgaaaggcacttttcattccactttaacttgattttttaaattcccttattgtcccttccaaaaaaaagagaatcaaaa

SEQ ID NO: 226167 - DNA, 120 bp, Artificial Sequence
  ENSG00000118271_6 (sequence is synthesized)
ttttacaaagaatcaaaggaattctagaaagtatctgggcagaacgctaggagagatccaaatttccattgtcttgcaagcaaagcacgtattaaatatgatctgcagccattaaaaaga

SEQ ID NO: 226168 - DNA, 87 bp, Artificial Sequence
  ENSG00000118271_7 (sequence is synthesized)
cttccgccaataattggcagcaccacacctctggttcacctgcagaaccttccaaggttgaaagaaaatagaagtagccaaaatcta

SEQ ID NO: 226169 - DNA, 120 bp, Artificial Sequence
  ENSG00000118271_8 (sequence is synthesized)
ccttccaaggttgaaagaaaatagaagtagccaaaatctatatcctgaaccacgcacaatggattatggccacagaatcagtacagctgatctaagggatatgatggcttctcatcgtct

SEQ ID NO: 226170 - DNA, 120 bp, Artificial Sequence
  ENSG00000118271_9 (sequence is synthesized)
aaccctcccacaggacttggttttatcttcccgtttgcccctcacttggtagagagaggctcacatcatctgctaaagaatttacaagtagattgaaaaacgtaggcagaggtcaagtat

SEQ ID NO: 226171 - DNA, 120 bp, Artificial Sequence
  ENSG00000118271_10 (sequence is synthesized)
gttttgcttagctaggaagtgaccaggaacctgagcatcatttaggggcagacagtagagaaaagaaggaatcagaactcctctcctctagctgtggtttgcaacccttttgggtcacag

SEQ ID NO: 226172 - DNA, 120 bp, Artificial Sequence
  ENSG00000118271_11 (sequence is synthesized)
aacactttatgtaggtgatgaaaagtaaacattctatgcccagaaaaaatgcacagatacacacacatacaaaatcatatatgtgattttaggagtttcacagattccctggtgtccctg

SEQ ID NO: 226173 - DNA, 120 bp, Artificial Sequence
  ENSG00000118271_12 (sequence is synthesized)
ggtaacaccaaagctaagtgtccttgtcttagaattttaggaaaaggtataatgtgtattaacccattaacaaaaggaaaggaattcagaaatattattaaccaggcatctgtctgtagt

SEQ ID NO: 226174 - DNA, 120 bp, Artificial Sequence
  ENSG00000118271_13 (sequence is synthesized)
tgaccaaaggttccctttcctattatacaagaaaaaattcacaacactctgagaagcaaatttctttttgactttgatgaaaatccacttagtaacatgacttgaacttacatgaaacta

SEQ ID NO: 226175 - DNA, 120 bp, Artificial Sequence
  ENSG00000118271_14 (sequence is synthesized)
ctcatagtctattcattccactttatatgaatattgatgtatctgctgttgaaataatagtttatgaggcagccctccagaccccacgtagagtgtatgtaacaagagatgcaccatttt

SEQ ID NO: 226176 - DNA, 120 bp, Artificial Sequence
  ENSG00000118271_15 (sequence is synthesized)
atttctcgaaaacccgtaacattcttcattccaaaacacatctggcttctcggaggtctggacaagtgattcttggcaacacatacctatagagacaataaaatcaaagtaataatggca

SEQ ID NO: 226177 - DNA, 120 bp, Artificial Sequence
  ENSG00000118271_16 (sequence is synthesized)
acacaatagataacatttaccaagcatacaccatgtggcagacacaattataagtgttttccatatttaacctacttaatcctcaggaataagccactgaggtcagtcctattattatcc

SEQ ID NO: 226178 - DNA, 120 bp, Artificial Sequence
  ENSG00000118276_0 (sequence is synthesized)
ccggctttcttccgtcctgccgtccccgggcccctagcccccagtcccctctcccccctccacctcttgtccctcggcctccgcgcctcccctcccccgactctctggcctcccattcat

SEQ ID NO: 226179 - DNA, 120 bp, Artificial Sequence
  ENSG00000118276_1 (sequence is synthesized)
tccgtccgctccctcccatttcctcttttccgctcgggccctctccccagagcctccccgcgcggaccccgctgcagtctcggggttctcagcacatttatggaagtttagggcctggac

SEQ ID NO: 226180 - DNA, 120 bp, Artificial Sequence
  ENSG00000118276_2 (sequence is synthesized)
agtggccccgagtccggcctgagagcgcagcctgggctgctggcagggaagaggaagatgtctgtgctcaggcggatgatgcgggtttccaatcgctctctcctcgccttcatcttcttc

SEQ ID NO: 226181 - DNA, 120 bp, Artificial Sequence
  ENSG00000118276_3 (sequence is synthesized)
ttctccctctcttcgtcctgtctgtacttcatctatgtggccccaggcatcgccaacacatatctctttatggtacaagctcgaggtataatgttgagagaaaatgtgaaaacaataggt

SEQ ID NO: 226182 - DNA, 120 bp, Artificial Sequence
  ENSG00000118276_4 (sequence is synthesized)
catatgatcaggctgtacacaaataaaaacagtacgctcaacggtacagattatcccgaaggcaataattcaagtgattatcttgttcaaacaacaacgtatctcccggaaaacttcaca

SEQ ID NO: 226183 - DNA, 120 bp, Artificial Sequence
  ENSG00000118276_5 (sequence is synthesized)
tactcaccatacctcccctgtccagaaaagctgccttatatgcgaggattcctcaatgtcaatgtaagcgaagtcagttttgatgaaattcatcaactcttctccaaggatttagatatt

SEQ ID NO: 226184 - DNA, 120 bp, Artificial Sequence
  ENSG00000118276_6 (sequence is synthesized)
gagccagggggtcattggaggccaaaagactgtaaacccagatggaaggtggcagttctcattcctttccgtaatcgccatgaacatcttccaatttttttcttacatctgattccaatg

SEQ ID NO: 226185 - DNA, 120 bp, Artificial Sequence
  ENSG00000118276_7 (sequence is synthesized)
ctccagaagcagcggctggaatttgcgttttatgtcattgaacagactggcacacaaccttttaaccgtgcgatgcttttcaatgtgggcttcaaagaggccatgaaagacagtgtctgg

SEQ ID NO: 226186 - DNA, 120 bp, Artificial Sequence
  ENSG00000118276_8 (sequence is synthesized)
gactgtgtaatcttccacgatgtggatcatctacctgaaaatgaccggaactattacggatgtggagaaatgccacgtcattttgctgcaaagctggataaatacatgtatattcttcca

SEQ ID NO: 226187 - DNA, 120 bp, Artificial Sequence
  ENSG00000118276_9 (sequence is synthesized)
tataaagaattttttggtggtgtaagtgggctgacagtggaacaatttagaaagatcaatggttttcctaatgccttctggggatggggaggagaagatgatgacctttggaacagagtt

SEQ ID NO: 226188 - DNA, 120 bp, Artificial Sequence
  ENSG00000118276_10 (sequence is synthesized)
cactatgctggatataatgtaaccagaccagagggagacttaggaaaatacaagtcaattcctcatcaccatagaggtgaagtccagtttttaggacggtataaattactaaggtattcc

SEQ ID NO: 226189 - DNA, 120 bp, Artificial Sequence
  ENSG00000118276_11 (sequence is synthesized)
aaggagcgtcagtacatcgatggactgaacaatttaatatataggccaaaaatactggttgataggttgtatacaaacatatctgtaaacctcatgccagagttagctccaatcgaagac

SEQ ID NO: 226190 - DNA, 120 bp, Artificial Sequence
  ENSG00000118276_12 (sequence is synthesized)
tattaaaagaagtggctgtcgtggcaaggtagaccacaatgctggatcataaacttggagcgcgctcttagtggaggtcagtgattggctgtgtcacagtgcccttttctctgagaagag

SEQ ID NO: 226191 - DNA, 120 bp, Artificial Sequence
  ENSG00000118276_13 (sequence is synthesized)
ccagcagtccacagtgtttacagagtgggactatatacagtcacccttctctcacccgtcctccctgctctgagacacacccctgtggcgagcaccgcagaaacgggaagccactactta

SEQ ID NO: 226192 - DNA, 120 bp, Artificial Sequence
  ENSG00000118276_14 (sequence is synthesized)
agatcggaagttaagagagctccctccgaagagaaaatttttatactaaaatctataatttaattcaagagaatgcttttatttccgtttaaacatattttgtatatatgtgatataaat

SEQ ID NO: 226193 - DNA, 120 bp, Artificial Sequence
  ENSG00000118276_15 (sequence is synthesized)
taatgtgtgcaaattgtttaaaaattagatgtgttgcagttttgcatgtaatcggttatacctttattggacttttatagacattttttatttgcatgaaaaaaactcactaaatttaca

SEQ ID NO: 226194 - DNA, 120 bp, Artificial Sequence
  ENSG00000118276_16 (sequence is synthesized)
gacagccaactaatacagtaaactgttatactagttttgagctttagacctcagccttttgtgtggaagaagtcacagctttcttaggctttaaaggaaaagaaggaaggacttaaatag

SEQ ID NO: 226195 - DNA, 120 bp, Artificial Sequence
  ENSG00000118276_17 (sequence is synthesized)
cttttcttcctaccgggattacctatgtttttccttgcttgcaatctcatctgattttgctagaaatcacaaccatattgtttatgcatattgcatgagtattaccaagaaaaatcttaa

SEQ ID NO: 226196 - DNA, 120 bp, Artificial Sequence
  ENSG00000118276_18 (sequence is synthesized)
aagttgtgatgtgacatgatataaaggatctctttatgttaaatgtctttccatgtacctctggtgtgtcagggattttgtgcctcaaaaaatgtttccaaggttgtgtgtttatactgt

SEQ ID NO: 226197 - DNA, 120 bp, Artificial Sequence
  ENSG00000118276_19 (sequence is synthesized)
gtattttttttaaattcacggtgaacagcacttttattatttccagttcagaagagccaaaaaaaagtatcttcatttaaaaagaaatcaagtcagtttttttaaaagaatgatctatgg

SEQ ID NO: 226198 - DNA, 120 bp, Artificial Sequence
  ENSG00000118276_20 (sequence is synthesized)
actattagataagaattaaatattctatttttataaagataaatacttagtagataaaaacaaattttaagtttagttttcagacatagaatttcacttttggaggggacccttgaatgt

SEQ ID NO: 226199 - DNA, 120 bp, Artificial Sequence
  ENSG00000118276_21 (sequence is synthesized)
cagacatagaatttcacttttggaggggacccttgaatgttagtttcattcaaactatattttgtttttttcacttttaagagattatatctctggtgttaattactaaaattttctttc

SEQ ID NO: 226200 - DNA, 120 bp, Artificial Sequence
  ENSG00000118276_22 (sequence is synthesized)
agtataatttaatagaattatcttaaaatacatgatcagtattcagtgcgctgatattataatgtcttctatatgtagtatctaaaagcataatttaatagcattgtcttaaaatacgtg

SEQ ID NO: 226201 - DNA, 120 bp, Artificial Sequence
  ENSG00000118276_23 (sequence is synthesized)
cgtgatgagttatttggtgcactgatgccataatgtcttctatatgtaatatcttacatgtttgcatgagtgtcagggctttgtccagttatcttcatatgactgttctctgaaaaaagg

SEQ ID NO: 226202 - DNA, 120 bp, Artificial Sequence
  ENSG00000118276_24 (sequence is synthesized)
tcttactacctgatatcaagtacatatcttaattttggatgaatttttccacagtaaagccgaacagtattcttttttgaaaattagcaattataaagattgtttaaaatatcttgatat

SEQ ID NO: 226203 - DNA, 120 bp, Artificial Sequence
  ENSG00000118276_25 (sequence is synthesized)
tttcacaaattttaaacaaaaaattaaatatctataaagtgaatgttcaacaacaatgatgagcaatagaaatctatatatgagaaacgtttggataatatttgcctcaaggattgttta

SEQ ID NO: 226204 - DNA, 120 bp, Artificial Sequence
  ENSG00000118276_26 (sequence is synthesized)
cctaaaacagaactatggttatttatctcagattgtaagttttattttgaagtgtcatttttatggcaatattgataacacaaatgaccacaaactaaatcataaaataattgaatcctt

SEQ ID NO: 226205 - DNA, 120 bp, Artificial Sequence
  ENSG00000118276_27 (sequence is synthesized)
acactttgagaaaatggatagcttctgtgttatgataccaaacaaaatattttcatatttatttcttagaactatttccaaaatatttatatttcagtttttttatggtactcgaaaaat

SEQ ID NO: 226206 - DNA, 120 bp, Artificial Sequence
  ENSG00000118276_28 (sequence is synthesized)
caaaccttctgaaaattatgatatttgtacttcatttgtgtattagttcattttctgtttctattacatagtttttaaagtcaatgaaagagattgagaatgttaacatttgttgatcaa

SEQ ID NO: 226207 - DNA, 120 bp, Artificial Sequence
  ENSG00000118276_29 (sequence is synthesized)
tgtggagctgtccacattcggtatcttttcatttttatatatattttacagtttcaagaaaacttagtactactagtatctgccttattttcttaagtctgatgttaatttttgtttcag

SEQ ID NO: 226208 - DNA, 120 bp, Artificial Sequence
  ENSG00000118276_30 (sequence is synthesized)
gagtgagatataaacattttgctttttttcagttttgaaatatagtttgtcatcctgtgaaaaccacctcgtttgctttttgtttgtttgttttgcttttttagtgtagacctaaaatta

SEQ ID NO: 226209 - DNA, 120 bp, Artificial Sequence
  ENSG00000118276_31 (sequence is synthesized)
tttttgcctataaacagtgaacttaatatgtttctgtgagagtgacagagctgtgcccgtttatcttcattgtattaattattacataaagattaacaaatacattgcaaatgcaaatta

SEQ ID NO: 226210 - DNA, 120 bp, Artificial Sequence
  ENSG00000118276_32 (sequence is synthesized)
cgcagcggtttggaacacccctggctgtgccatagtggaggggattccctggtgtactttcacactccctgtagatcgggctcagccaggggagggacgggagcaggtgttctcacatgg

SEQ ID NO: 226211 - DNA, 120 bp, Artificial Sequence
  ENSG00000118276_33 (sequence is synthesized)
ttgcaagtgggactgccatgtctgtgtgcaaggataagggtgtgctgctctctagatgtctcttgggaaatcatgctgagaggtctgttccccgcagcagtttgctgttctctagttcct

SEQ ID NO: 226212 - DNA, 120 bp, Artificial Sequence
  ENSG00000118276_34 (sequence is synthesized)
taaagataattgattttaagtacttctgtagattgtatattgtagttttctcccagtgatagtgacgtatttcattccagggagaaagcaaaaggccttttttttttttttgtaactctt

SEQ ID NO: 226213 - DNA, 120 bp, Artificial Sequence
  ENSG00000118276_35 (sequence is synthesized)
ttctctctttccaagattatcccgaaggcaataattcaagtgattatcttgttcaaacaacaacgtatctcccggaaaacttcacatactcaccatacctcccctgtccagaaaagctgc

SEQ ID NO: 226214 - DNA, 120 bp, Artificial Sequence
  ENSG00000118276_36 (sequence is synthesized)
ggagtattattacttcatttctaaacaaatgaagtcaagcaaattgagatctttctgaaattatgaagacatcttctgataacttatctgttgtatttcctagtctcaaagtcaagaaac

SEQ ID NO: 226215 - DNA, 120 bp, Artificial Sequence
  ENSG00000118276_37 (sequence is synthesized)
ccgtatatgtggacctagggctaataggaggtccctatggcactaactgggaaaattacatggtgcttttcaactacagaaagaagtaatgactaatgggcctgtctgtagagaagaaaa

SEQ ID NO: 226216 - DNA, 120 bp, Artificial Sequence
  ENSG00000118276_38 (sequence is synthesized)
ggagaagagtacacatttgctggaactatatataattcacagtggagatagttaattctttgctaaaactagggttttatgagtattttttaaatctacatttaagtttttgtttttgtg

SEQ ID NO: 226217 - DNA, 120 bp, Artificial Sequence
  ENSG00000118276_39 (sequence is synthesized)
aaaagttattcagtaagaaaactttataatattaagtagatacagttatgtattaaaaatttccttatatacccttttgccagccaagatactgatattttaaaacaaaatggaaaaatg

SEQ ID NO: 226218 - DNA, 120 bp, Artificial Sequence
  ENSG00000118276_40 (sequence is synthesized)
tccaatacaatattctctttctggaggcttcctacaagtgaaagcagattttgtcattttatttggcctttgcttgtctttgatatatttctttatgtgtttttcaaatacatactgttg

SEQ ID NO: 226219 - DNA, 120 bp, Artificial Sequence
  ENSG00000118276_41 (sequence is synthesized)
tagatttattgtcttgtatttgcaagtatgccggttgagagaactaaaatggttatagtattgtttatcagaaagaggaagtgtacttaagattattttatttatttagatgaaaggctt

SEQ ID NO: 226220 - DNA, 120 bp, Artificial Sequence
  ENSG00000118276_42 (sequence is synthesized)
ctacataaatgcactgaaataaatgctagtaatttcttgtatcccacttctttttttgcttctcatggaaatgtttgtacttttttatcattgtcttttatgaaatataatgttctaaag

SEQ ID NO: 226221 - DNA, 120 bp, Artificial Sequence
  ENSG00000118276_43 (sequence is synthesized)
aggggggattcattaatccaggtcggaaatacaccttgttcctcgaggattttggaaggaaattccacccgcgaagtccccttttggagatgcccttttcctttcagccaacacatatct

SEQ ID NO: 226222 - DNA, 120 bp, Artificial Sequence
  ENSG00000118292_0 (sequence is synthesized)
ctttcacagcaatagtgcagaatccagaatggatgtcctctttgtagccatctttgctgtgccacttatcctgggacaagaatatgaggatgaagaaagactgggagaggatgaatatta

SEQ ID NO: 226223 - DNA, 120 bp, Artificial Sequence
  ENSG00000118292_1 (sequence is synthesized)
tcaggtggtctattattatacagtcacccccagttatgatgactttagtgcagatttcaccattgattactccatatttgagtcagaggacaggctgaacaggttggataaggacataac

SEQ ID NO: 226224 - DNA, 120 bp, Artificial Sequence
  ENSG00000118292_2 (sequence is synthesized)
aaacagcacgtgcagaccatccgaagcctgtaactgtgaaaccagtaacaacggaacctagtccagatctgaacgatgccgtgtccagtttgcgaagtcctattcccctcctcctgtcgt

SEQ ID NO: 226225 - DNA, 120 bp, Artificial Sequence
  ENSG00000118292_3 (sequence is synthesized)
gtgcctttgttcaggtggggatgtatttcatgtagaaggtggaagaaggctgctatgactctttggatgggagtctggcaagaggaaattggaagataaaataaataataagtgaaataa

SEQ ID NO: 226226 - DNA, 120 bp, Artificial Sequence
  ENSG00000118292_4 (sequence is synthesized)
aaagctgcttgaaaagtggaagttagccttccggatggttagggagacatggaccaggtagggtaactgtctccaccaagagactcatctgtagaaaagtgaacgcactggaaaggggag

SEQ ID NO: 226227 - DNA, 120 bp, Artificial Sequence
  ENSG00000118292_5 (sequence is synthesized)
aaatctaattaaagagtcttcagagcgatgacagccagagtgtgcgagcacggaagggcgaggtatccgttcctggatcctcccctaaggcacctgactcggcctgcctaggtcagcaca

SEQ ID NO: 226228 - DNA, 120 bp, Artificial Sequence
  ENSG00000118292_6 (sequence is synthesized)
gccccctcacgagtctcggccttgggccttctctgacgtcgctgggaggaatataggaggaatctgtgagatccttggaaggtggaaaccaactgcgggaaaggacaaatctcccagacc

SEQ ID NO: 226229 - DNA, 120 bp, Artificial Sequence
  ENSG00000118292_7 (sequence is synthesized)
caacccctcacctccgcccaaacttcacctccgacttatcgtccccaattcaggctcccaggcttgccccagttcctccagccccttccgcacctctctcttcgacgctctcccgcgtct

SEQ ID NO: 226230 - DNA, 120 bp, Artificial Sequence
  ENSG00000118292_8 (sequence is synthesized)
cccgggccctctactcaccctgcgaccaggatgataacgcgaagcgggtccccagccacagtgatcaagaaaagcgcgaaggccgggccgaacgcgacgaaagtgcagccgaaaaacacc

SEQ ID NO: 226231 - DNA, 120 bp, Artificial Sequence
  ENSG00000118292_9 (sequence is synthesized)
tccgaagcctgtaactgtgaaaccagtaacaacggaacctgtggaagaaggctgctatgactctttggatgggagtctggcaagaggaaattggaagataaaataaataataagtgaaat

SEQ ID NO: 226232 - DNA, 120 bp, Artificial Sequence
  ENSG00000118298_0 (sequence is synthesized)
agcacccccgtccccacatacaccagttcagagccaccttaaaagcaggaggcagttgtaaagtcgctggccagctagtggagtggagactgcagagggagataaagagagagggcaaag

SEQ ID NO: 226233 - DNA, 120 bp, Artificial Sequence
  ENSG00000118298_1 (sequence is synthesized)
aggcagcaagagatttgtcctggggatccagaaacccatgataccctactgaacaccgaatcccctggaagcccacagagacagagacagcaagagaagcagagataaatacactcacgc

SEQ ID NO: 226234 - DNA, 120 bp, Artificial Sequence
  ENSG00000118298_2 (sequence is synthesized)
caggagctcgctcgctctctctctctctctctcactcctccctccctctctctctgcctgtcctagtcctctagtcctcaaattcccagtcccctgcaccccttcctgggacactatgtt

SEQ ID NO: 226235 - DNA, 120 bp, Artificial Sequence
  ENSG00000118298_3 (sequence is synthesized)
gttctccgccctcctgctggaggtgatttggatcctggctgcagatgggggtcaacactggacgtatgagggcccacatggtcaggaccattggccagcctcttaccctgagtgtggaaa

SEQ ID NO: 226236 - DNA, 120 bp, Artificial Sequence
  ENSG00000118298_4 (sequence is synthesized)
caatgcccagtcgcccatcgatattcagacagacagtgtgacatttgaccctgatttgcctgctctgcagccccacggatatgaccagcctggcaccgagcctttggacctgcacaacaa

SEQ ID NO: 226237 - DNA, 120 bp, Artificial Sequence
  ENSG00000118298_5 (sequence is synthesized)
tggccacacagtgcaactctctctgccctctaccctgtatctgggtggacttccccgaaaatatgtagctgcccagctccacctgcactggggtcagaaaggatccccaggggggtcaga

SEQ ID NO: 226238 - DNA, 120 bp, Artificial Sequence
  ENSG00000118298_6 (sequence is synthesized)
acaccagatcaacagtgaagccacatttgcagagctccacattgtacattatgactctgattcctatgacagcttgagtgaggctgctgagaggcctcagggcctggctgtcctgggcat

SEQ ID NO: 226239 - DNA, 120 bp, Artificial Sequence
  ENSG00000118298_7 (sequence is synthesized)
aagagagctgctccccaaacagctggggcagtacttccgctacaatggctcgctcacaactcccccttgctaccagagtgtgctctggacagttttttatagaaggtcccagatttcaat

SEQ ID NO: 226240 - DNA, 120 bp, Artificial Sequence
  ENSG00000118298_8 (sequence is synthesized)
ggaacagctggaaaagcttcaggggacattgttctccacagaagaggagccctctaagcttctggtacagaactaccgagcccttcagcctctcaatcagcgcatggtctttgcttcttt

SEQ ID NO: 226241 - DNA, 120 bp, Artificial Sequence
  ENSG00000118298_9 (sequence is synthesized)
catccaagcaggatcctcgtataccacaggtgaaatgctgagtctaggtgtaggaatcttggttggctgtctctgccttctcctggctgtttatttcattgctagaaagattcggaagaa

SEQ ID NO: 226242 - DNA, 120 bp, Artificial Sequence
  ENSG00000118298_10 (sequence is synthesized)
gaggctggaaaaccgaaagagtgtggtcttcacctcagcacaagccacgactgaggcataaattccttctcagataccatggatgtggatgacttcccttcatgcctatcaggaagcctc

SEQ ID NO: 226243 - DNA, 120 bp, Artificial Sequence
  ENSG00000118298_11 (sequence is synthesized)
taaaatggggtgtaggatctggccagaaacactgtaggagtagtaagcagatgtcctccttcccctggacatctcctagagaggaatggacccaggctgtcattccaggaagaactgcag

SEQ ID NO: 226244 - DNA, 120 bp, Artificial Sequence
  ENSG00000118298_12 (sequence is synthesized)
agccttcagcctctccaaacatgtaggaggaaatgaggaaatcgctgtgttgttaatgcagagaacaaactctgtttagttgcaggggaagtttgggatataccccaaagtcctctaccc

SEQ ID NO: 226245 - DNA, 120 bp, Artificial Sequence
  ENSG00000118298_13 (sequence is synthesized)
cctcacttttatggccctttccctagatatactgcgggatctctccttaggataaagagttgctgttgaagttgtatatttttgatcaatatatttggaaattaaagtttctgactttaa

SEQ ID NO: 226246 - DNA, 120 bp, Artificial Sequence
  ENSG00000118298_14 (sequence is synthesized)
ggcaggcacagaagagattgctccagatgagttctccttgcctcacttctcttccttagaacttaggacacaactcagtcctctagtcctcaaattcccagtcccctgcaccccttcctg

SEQ ID NO: 226247 - DNA, 120 bp, Artificial Sequence
  ENSG00000118298_15 (sequence is synthesized)
taaaaatctatagcaggaagtaagattagactttcaaaaactatccttaaaagccttgggatgaagcaattacatagagccaaggaattttgcttctgggagccctatctaggtaagcta

SEQ ID NO: 226248 - DNA, 120 bp, Artificial Sequence
  ENSG00000118298_16 (sequence is synthesized)
agatctcaaggcctcccgacaaccctttcacactgggacctcctcacctggcaggaagacacactgtgcgggtgggaggagacttcctttaccttctcaccctagctcctcccttctgga

SEQ ID NO: 226249 - DNA, 120 bp, Artificial Sequence
  ENSG00000118298_17 (sequence is synthesized)
tctcctcctgccttgagtttcacatatatggctcctagatcctgctctaatcatcaaatcctacacctcctgatttggcagaaaagctagttaagtcctcagtaaatcgtgtaggagtga

SEQ ID NO: 226250 - DNA, 120 bp, Artificial Sequence
  ENSG00000118298_18 (sequence is synthesized)
gggagctggggtggaaaggaagctgggtgggaactctgagcttagctgccaggtctccttctggctccgtctatcctaatccatcctacccctaacctgcatctgaaattgggacagagc

SEQ ID NO: 226251 - DNA, 120 bp, Artificial Sequence
  ENSG00000118298_19 (sequence is synthesized)
actactgattaatgacttaaccaaactcaagttcatgataaacggtcagtgtgagagcaagaagtgaatgatgagaagtcaggatatctgaatcccaaggccacttgataggggcctcca

SEQ ID NO: 226252 - DNA, 68 bp, Artificial Sequence
  ENSG00000118298_20 (sequence is synthesized)
taggatcattttatttctcccatttttctactcctactctctaatcccatctctcagggtattcaggt

SEQ ID NO: 226253 - DNA, 120 bp, Artificial Sequence
  ENSG00000118298_21 (sequence is synthesized)
tactcctactctctaatcccatctctcagggtattcaggttttctatgcatcccctctgccctcattcagctttcttgtcctcaaaatacaggtaagtaaaagagctaccactccccatt

SEQ ID NO: 226254 - DNA, 120 bp, Artificial Sequence
  ENSG00000118298_22 (sequence is synthesized)
catcaggatagttggggaatcatcactgcctctgggtagggaaggggaactgcagcatgagactcaacaggactcctacctcacccatccctatacaactggggtcttaacctgggtgga

SEQ ID NO: 226255 - DNA, 120 bp, Artificial Sequence
  ENSG00000118298_23 (sequence is synthesized)
aattcccagtcccctgcaccccttcctgggacactatgttgttctccgccctcctgctggaggtgatttggatcctggctgcagatgggggtcaacactggacgtatgaggctcctccct

SEQ ID NO: 226256 - DNA, 120 bp, Artificial Sequence
  ENSG00000118298_24 (sequence is synthesized)
tctggatctcctcctgccttgagtttcacatatatggctcctagatcctgctctaatcatcaaatcctacacctcctgatttggcagaaaagctaggcccacatggtcaggaccattggc

SEQ ID NO: 226257 - DNA, 120 bp, Artificial Sequence
  ENSG00000118307_0 (sequence is synthesized)
gtcgtccgggcaacccgggagcgtttgtccacacaatttctgctccgactctgcggactactgcagtggagcttgactcttaatgggtcccaaagcaaaaaagtctggcagtaagaaaaa

SEQ ID NO: 226258 - DNA, 120 bp, Artificial Sequence
  ENSG00000118307_1 (sequence is synthesized)
gaaagtcaccaaagctgaacgattgaagctgctacaagaggaggaggagagacgactgaaagaggaagaggaagcccgtttgaaatatgagaaagaagaaatggaaaggcttgaaataca

SEQ ID NO: 226259 - DNA, 120 bp, Artificial Sequence
  ENSG00000118307_2 (sequence is synthesized)
gcgaattgagaaagaaaaatggcatcgacttgaagcaaaagatctagaaaggagaaatgaagaacttgaagaactttatttattagagaggtgttttcctgaagcagagaaattgaaaca

SEQ ID NO: 226260 - DNA, 120 bp, Artificial Sequence
  ENSG00000118307_3 (sequence is synthesized)
ggaaactaaattgctttctcagtggaagcactacattcaatgtgatgggagtcctgatccttcagtagcccaagaaatgaacacgtttattagtttgtggaaagagaaaacaaatgagac

SEQ ID NO: 226261 - DNA, 120 bp, Artificial Sequence
  ENSG00000118307_4 (sequence is synthesized)
ttttgaggaagtgattgagaagagtaaagtagtgctaaatttaattgagaaattgaaatttattttactggaaactccaccatgtgatttgcaagataaaaatataatacagtaccaaga

SEQ ID NO: 226262 - DNA, 120 bp, Artificial Sequence
  ENSG00000118307_5 (sequence is synthesized)
atcaatactacaactgcaggagctccttcatcttaaattcggtgtagccacagaaatacttctcaaacaagctagtactttggcagatctggacagtggaaatatggaaaaagtcattaa

SEQ ID NO: 226263 - DNA, 120 bp, Artificial Sequence
  ENSG00000118307_6 (sequence is synthesized)
agatgaaaatgttactctgtatgtgtgggcaaacctcaagaagaatccaaggcacagaagtgttagattctctgaaacacaaattggatttgagattccaaggatattagcaacaagtga

SEQ ID NO: 226264 - DNA, 120 bp, Artificial Sequence
  ENSG00000118307_7 (sequence is synthesized)
cattgctgtacgactcctgcatacccactatgatcatgtttctgcactgcaccctgtttcaacaccatcaaaagaatacacttctgcagtaactgagcttgtcaaagatgatgttaagaa

SEQ ID NO: 226265 - DNA, 120 bp, Artificial Sequence
  ENSG00000118307_8 (sequence is synthesized)
tgtagaaaaagcaatcagcaaggaggtcgaagaagagtccaaacaacaagaaagagggtctcacttaattcaggaggaagaaataaaagttgaggaggaacaaggtgatattgaagtgaa

SEQ ID NO: 226266 - DNA, 120 bp, Artificial Sequence
  ENSG00000118307_9 (sequence is synthesized)
aatgagttctgctgaggaagaatctgaagccataaaatgtgaacgagagatgaaagtattaagtgaaactgtttcagcagcacagttgttgctggtagagaattcttctgaaaagccaga

SEQ ID NO: 226267 - DNA, 120 bp, Artificial Sequence
  ENSG00000118307_10 (sequence is synthesized)
tgattgtggaaatactcaaagaaggattacagaaatacacatatcctccggaaactacagaagagtttgagacagaaaatgctttcccacctatagaggtcacacttgaggttcatgaga

SEQ ID NO: 226268 - DNA, 120 bp, Artificial Sequence
  ENSG00000118307_11 (sequence is synthesized)
atgtaatcttttttgaggatcctgtggttgtaaggtgggatgctgaaggtaaacattggagaactgatggcatcagcaatgtatcctacaaaccaaaagaaagacttgtaacattcagcc

SEQ ID NO: 226269 - DNA, 120 bp, Artificial Sequence
  ENSG00000118307_12 (sequence is synthesized)
tggacacctttggccctgttaccttgattcaagatgctcatattaacatgccgtaccagtcatgggaactaagaccacttgatgtaaataaagtacttttaactgtgactacagtattta

SEQ ID NO: 226270 - DNA, 120 bp, Artificial Sequence
  ENSG00000118307_13 (sequence is synthesized)
ctgagattcaaatacaaattaaggaaaacctctgcatgttatcttcaatcaaactaaaagacaagaaacacatctctattttggaaggaacctggatgactcctattcctttcattattg

SEQ ID NO: 226271 - DNA, 120 bp, Artificial Sequence
  ENSG00000118307_14 (sequence is synthesized)
ctttgaaagaagctggactgaatatctttcctactagacactctcatttttatgttattataaacaataaggttcctttggtagaagtgaaagcttatcgacagatggccctactaagtt

SEQ ID NO: 226272 - DNA, 120 bp, Artificial Sequence
  ENSG00000118307_15 (sequence is synthesized)
ctgcttttgcatttggttggagcaagtggaacctactatgtaattctacaaaagtcgtatttaaggtgagggaacaccttactgaagcatgtactgagaatcctaattgggcccttttaa

SEQ ID NO: 226273 - DNA, 120 bp, Artificial Sequence
  ENSG00000118307_16 (sequence is synthesized)
tgtttagtggtgacagagcacaaagactgaagatcaaggaagagagtgaggcattttctgaagcacttaaagaagaaactgagtttcattctactttatatcacatggtgaaggattttg

SEQ ID NO: 226274 - DNA, 120 bp, Artificial Sequence
  ENSG00000118307_17 (sequence is synthesized)
cttctgaggaagcaatggagaaagtcaggagttccaactgtcagtttgtcaactctgtgtgccacatgctgctctctaccagattgctcagctactcctaacctccacttacaaactgta

SEQ ID NO: 226275 - DNA, 120 bp, Artificial Sequence
  ENSG00000118307_18 (sequence is synthesized)
ttgtaagtatgaagaaccaagcatggtgaaagacaggtatttctgcaacacaatgtaatgagtgaatgaatacatttcaaatcaactattaaaaattttctaatctgcattttctactca

SEQ ID NO: 226276 - DNA, 120 bp, Artificial Sequence
  ENSG00000118307_19 (sequence is synthesized)
agttttattttaaaaacagtatttttttttcctttgaatacttggcctgttaagaatttcagctttcactctatgaagatttaaatgattctttatttcaataaactttaacaaacaata

SEQ ID NO: 226277 - DNA, 120 bp, Artificial Sequence
  ENSG00000118307_20 (sequence is synthesized)
gcagtggagcttgactcttaatggtgagcaaggcaaatgaggcagacaggtggaggggcgaccactgattctgcttcaccagtgttaaataatgtaatcaagagccagtcatattttaca

SEQ ID NO: 226278 - DNA, 120 bp, Artificial Sequence
  ENSG00000118307_21 (sequence is synthesized)
gcgaagcgggtcggtttgggaaataactcataccttggggtgggtcggccctcttctcagcaatggctttccttacctggaccaggcggacagggtcccaaagcaaaaaagtctggcagt

SEQ ID NO: 226279 - DNA, 120 bp, Artificial Sequence
  ENSG00000118307_22 (sequence is synthesized)
gtcgtccgggcaacccgggagcgtttgtccacacaatttctgctccgactctgcggactactgcagtggagcttgactcttaatgggtcccaaagcaaaaaaggaacactgtcatcacaa

SEQ ID NO: 226280 - DNA, 120 bp, Artificial Sequence
  ENSG00000118307_23 (sequence is synthesized)
acgattgaagctgctacaagaggaggaggagagacgactgaaagaggaagttactgtcttgaagaaaggagaactgacacttttctcatatctaccataggaagcccgtttgaaatatga

SEQ ID NO: 226281 - DNA, 120 bp, Artificial Sequence
  ENSG00000118307_24 (sequence is synthesized)
caatttctgctccgactctgcggactactgcagtggagcttgactcttaatggtgagcaaggcaaatgagtctggcagtaagaaaaagaaagtcaccaaagctgaacgattgaagctgct

SEQ ID NO: 226282 - DNA, 81 bp, Artificial Sequence
  ENSG00000118307_25 (sequence is synthesized)
acacaatttctgctccgactctgcggactactgcagtggagcttgactcttaatgagtttcgcttactgaaacctctgcct

SEQ ID NO: 226283 - DNA, 120 bp, Artificial Sequence
  ENSG00000118307_26 (sequence is synthesized)
aagattccaccactacatcttgaaaatattaggagtaattttaagggcttaaaaatacagtgatctattcactgagaaaaaaattatttttggttctttagaggaagcccgtttgaaata

SEQ ID NO: 226284 - DNA, 120 bp, Artificial Sequence
  ENSG00000118308_0 (sequence is synthesized)
aaagggggagttgtaagagaggcggtatcaacagcctgctgatgaaagaggcgactctgcagaaagaggcaacttgacatatcaggactttaaccgctgtagaaatagctcaggcatacc

SEQ ID NO: 226285 - DNA, 120 bp, Artificial Sequence
  ENSG00000118308_1 (sequence is synthesized)
aagcccatgcaaacacagaattgcagaagttcaggagaggcttatcacttccctgagaagaaaaacacattttcagttttgcctgcatcataagagtgagcactccattgctttctttcc

SEQ ID NO: 226286 - DNA, 120 bp, Artificial Sequence
  ENSG00000118308_2 (sequence is synthesized)
tggccacactgctacaatccagcactaactatccatgtccagggtaaggatcgagatcgagaagcccacactgccagtgaaaaagctacgtctttactgcataaattagaggaagcaatt

SEQ ID NO: 226287 - DNA, 120 bp, Artificial Sequence
  ENSG00000118308_3 (sequence is synthesized)
tcggaacaacggaaccttcaaactataaatactgaattatcgaacacttgccaggcacttcagcagaagacaaggaaactgaagaagctttttagatgaggaatttcctcactatgattc

SEQ ID NO: 226288 - DNA, 120 bp, Artificial Sequence
  ENSG00000118308_4 (sequence is synthesized)
cctgtcctgcgcagatgcaattcaacaacctcttcaagaaaaattgaagcagtgttgccacaaactatatggtggtcaagaagcaagaatacatcagacacccctgaccttgaaacatac

SEQ ID NO: 226289 - DNA, 120 bp, Artificial Sequence
  ENSG00000118308_5 (sequence is synthesized)
gtgctggtacacacctctgctggatgccttatctctggatagttttacagcagttccaaccctggaatcaacacctttctcaggtgtagccaaccaaatccacactctgtgtgaaaggcc

SEQ ID NO: 226290 - DNA, 120 bp, Artificial Sequence
  ENSG00000118308_6 (sequence is synthesized)
cacatatggagaagtaaaggatggtgctttggatgtaaaaagacaacacaagtgcccaggccccacaagtggccccagcccaggaacgaatctctcaggctgcatcaggatgaatgatga

SEQ ID NO: 226291 - DNA, 120 bp, Artificial Sequence
  ENSG00000118308_7 (sequence is synthesized)
cccaagtatggaagagaatggtgttgaacgcgtgtgtcctgagagcctgctgcagtccagggaatattcctcactaccattacccagacacacttcatcgacagacggtactataacttc

SEQ ID NO: 226292 - DNA, 120 bp, Artificial Sequence
  ENSG00000118308_8 (sequence is synthesized)
aagtgatcctggattagaaattctgaatatggcttcttgtgaccttgacagaaactcgctctgtaagaaagaggaggatacaagatcagcttctcccacgatagaggcccaaggcacaag

SEQ ID NO: 226293 - DNA, 120 bp, Artificial Sequence
  ENSG00000118308_9 (sequence is synthesized)
tccagctcatgataatattgcattccaagactctacgagtaaggataaaaccatattaaatctggaagccaaagaggaaccagaaacaatagaagaacataaaaaagaacatgcttcagg

SEQ ID NO: 226294 - DNA, 120 bp, Artificial Sequence
  ENSG00000118308_10 (sequence is synthesized)
tcagattatctttgggatttaagtgtgactggtttaccttggagaagagagtgaagcttgaagagaggtcccgtgacttggcagaagaaaatttgaagaaagaaatcactaactgtttaa

SEQ ID NO: 226295 - DNA, 120 bp, Artificial Sequence
  ENSG00000118308_11 (sequence is synthesized)
aactattagagtctttaacacctctgtgtgaagatgacaaccaggcacaggaaatcattaagaagctggagaagagtataaagtttcttagccagtgtgcagcacgagtggccagtaggg

SEQ ID NO: 226296 - DNA, 120 bp, Artificial Sequence
  ENSG00000118308_12 (sequence is synthesized)
ctgagatgttgggagccatcaatcaggaaagccgggttagtaaagcagttgaagtgatgattcagcacgtagaaaacttgaagaggatgtatgccaaagagcacgctgaattagaagaac

SEQ ID NO: 226297 - DNA, 120 bp, Artificial Sequence
  ENSG00000118308_13 (sequence is synthesized)
tgaaacaggttcttctgcagaatgaaaggtctttcaatcctcttgaagatgatgatgactgccaaattaaaaaacgttcagcttctctaaactccaagccatcttctctacgaagagtga

SEQ ID NO: 226298 - DNA, 120 bp, Artificial Sequence
  ENSG00000118308_14 (sequence is synthesized)
ctattgcctctttacccagaaatattggaaatgcaggaatggtggctgggatggaaaataatgatcgattcagtagaaggtcaagcagttggcgtattttggggtcaaagcagagtgaac

SEQ ID NO: 226299 - DNA, 120 bp, Artificial Sequence
  ENSG00000118308_15 (sequence is synthesized)
accgtccctcattacctcgatttattagcacctattcctgggcagatgctgaagaagaaaaatgtgaactaaaaactaaagatgactcagagccatctggagaagaaacagtagaaagga

SEQ ID NO: 226300 - DNA, 120 bp, Artificial Sequence
  ENSG00000118308_16 (sequence is synthesized)
caaggaagccaagtctttctgaaaagaaaaataatccatcaaagtgggatgtctcttcagtttatgacacaatagcttcctgggcaacaaatctcaagtcctccatcagaaaggctaata

SEQ ID NO: 226301 - DNA, 120 bp, Artificial Sequence
  ENSG00000118308_17 (sequence is synthesized)
aggccctctggctctctattgcattcattgtactgtttgcagctttgatgagcttcctcacaggccaattattccagaagtctgtggatgccgctcccacacagcaagaggactcatgga

SEQ ID NO: 226302 - DNA, 120 bp, Artificial Sequence
  ENSG00000118308_18 (sequence is synthesized)
cgtctctagaacatatcttgtggccatttaccagactccgacacaatgggccaccaccagtgtgacagcaggacatcctaatatatggatcttgatttttaagtttcagtatctgaactt

SEQ ID NO: 226303 - DNA, 120 bp, Artificial Sequence
  ENSG00000118308_19 (sequence is synthesized)
cgtaaattagtaacttttagctgggaaagtatagcatgaaaccagaggttctcagaatgactgtaagatagcttacatttcctctttttgcctttatctccccaactaaaatacaatggg

SEQ ID NO: 226304 - DNA, 120 bp, Artificial Sequence
  ENSG00000118308_20 (sequence is synthesized)
atggcctctccaaggaaggtaactgagaagcggcataacccagtggaaagcatctgtagaaagatcagagccatccacaagagagaagcaatttcaaatccaattcagcagattatcaaa

SEQ ID NO: 226305 - DNA, 120 bp, Artificial Sequence
  ENSG00000118308_21 (sequence is synthesized)
taccaatctagcagttttgatagcccacagacgaacaccaagaaatattttgaagaggtactgaggaaaatgactgctgcttgtgttcctacgcccggctctcattggtcaagttctgag

SEQ ID NO: 226306 - DNA, 120 bp, Artificial Sequence
  ENSG00000118308_22 (sequence is synthesized)
gaagtcgatgccttcatttcatcgcctcaaataatatctccaagaaccccatccacctctcacctcagctcccctgagactgcaacatactctgttattctcacaagttctgaaaacgtc

SEQ ID NO: 226307 - DNA, 120 bp, Artificial Sequence
  ENSG00000118308_23 (sequence is synthesized)
tcaaagccgaagtcacagagcaacaagaattatacatctttgatgtcacagatcagaaaagcagagtttttctctaacaaggatttgaataactattgtagtgaaaataattttagtacc

SEQ ID NO: 226308 - DNA, 120 bp, Artificial Sequence
  ENSG00000118308_24 (sequence is synthesized)
ttaacacttgactttgattccacctttgttcaaagcttgaagtgttttgatcctcaggattcagtggtaaaaaaattatctctgaatgaagatggatggaaacaagaagctgatgatggt

SEQ ID NO: 226309 - DNA, 120 bp, Artificial Sequence
  ENSG00000118308_25 (sequence is synthesized)
aaagaagatgtaatatacagcatcaacagggcctgtaaagaagaggcactcacaagtatttttaatgcatgtgacatcaaacggaaagaactgatctgctcttctttttccaaaggctca

SEQ ID NO: 226310 - DNA, 120 bp, Artificial Sequence
  ENSG00000118308_26 (sequence is synthesized)
gtcggagtggccaaaataatcaatttcctgagacaaacaactagccaaaattctgaagacagtggccttgagcagttgtggaacatgcttgatcctgagaagagagacccacatgtggac

SEQ ID NO: 226311 - DNA, 120 bp, Artificial Sequence
  ENSG00000118308_27 (sequence is synthesized)
ctggaaactttccaggccatgatgaaagactggatggcttactgtggaaacacatgggaaggagtgaatcatagattaagcagcatcatcgatgattctgtttgtgaacaggatggcata

SEQ ID NO: 226312 - DNA, 120 bp, Artificial Sequence
  ENSG00000118308_28 (sequence is synthesized)
aaatcagatggaacaatgaagatgagcacagatataacagattctacattggggagcttcgaggctttgggaggagaaacatctaaaggagtcttagaggtgtctgatttgattgcctac

SEQ ID NO: 226313 - DNA, 120 bp, Artificial Sequence
  ENSG00000118308_29 (sequence is synthesized)
gtagcagaccttcatttcaacaaaagaaaacttgaggaagaaaataataagtttaagttggctttagaaaccctggaagaaactaacagccagttatcagaggactgtaccgaattgcgc

SEQ ID NO: 226314 - DNA, 120 bp, Artificial Sequence
  ENSG00000118308_30 (sequence is synthesized)
cttcaggtaaaaagtgcccaccaggctattatgagaacaaatctgttaaaagaagaactggaggaactgaaacttagtatgaatgcttcagaagagcagaagagcatgattgtagcccag

SEQ ID NO: 226315 - DNA, 120 bp, Artificial Sequence
  ENSG00000118308_31 (sequence is synthesized)
agcaaacaattagagacagaaaaccgggctctgattcttaagattcggattctacaggaagagaatttcaagaacatcatggatatagacagactggaaaagaagattgaagacttgtct

SEQ ID NO: 226316 - DNA, 120 bp, Artificial Sequence
  ENSG00000118308_32 (sequence is synthesized)
aaaactgagacagagcaccaaatgcagttacacacatatgagaacactttgcttaataaagatacaagtttgcagaagaaaggcttatatatagaagaacttaaatcaaccatcatagaa

SEQ ID NO: 226317 - DNA, 120 bp, Artificial Sequence
  ENSG00000118308_33 (sequence is synthesized)
tatggaagcattatagagaatttacgaggggaaaaaagtaaactggctcatgagttacagcacttgcaacaggcactcatcacaaatgggatccagttgaatgttaatggagagtgtaac

SEQ ID NO: 226318 - DNA, 120 bp, Artificial Sequence
  ENSG00000118308_34 (sequence is synthesized)
agtatcatctctgaaggagaaaagtctttacattacgaactcactcttgctcagtctgcagagaacactgaaacagaaaggcagcacaatgtaatcaacttgtcatctctggacgccatg

SEQ ID NO: 226319 - DNA, 120 bp, Artificial Sequence
  ENSG00000118308_35 (sequence is synthesized)
atggatcaggaaatgctgctattactaagagagcccgcacagaaggcagtggaattcacagccacgcttcagaagctgcacgaagaaatttctaaaattgcaaccctcattgaaaactct

SEQ ID NO: 226320 - DNA, 120 bp, Artificial Sequence
  ENSG00000118308_36 (sequence is synthesized)
cgacggtgggtaactaatccagaaattactgtgaaagaaaagtgggaggagcagcttactgaattcaacaatatcatggaagagaagctagatctttgcatattaatgctgaacatcttg

SEQ ID NO: 226321 - DNA, 120 bp, Artificial Sequence
  ENSG00000118308_37 (sequence is synthesized)
ggaaaccacaaagagtctcttgataaagaatttgccaaattaatagagattttgaagagattcaggcaggaatatttttatttcagaaaagaatttcttgccagtcagaaacaactagaa

SEQ ID NO: 226322 - DNA, 120 bp, Artificial Sequence
  ENSG00000118308_38 (sequence is synthesized)
gatgctgtcaaccaggaaggcatccttaggaagaggctccaagaaaccagccaacggctggaggatgtggaggagcaggtagggtggctcatggctacattagattcaggggacatctcc

SEQ ID NO: 226323 - DNA, 120 bp, Artificial Sequence
  ENSG00000118308_39 (sequence is synthesized)
tcagatgccctgcaaaccatgaaataaaaatggaggaggaacaacaacaacaaacaaaaaaaaaaagcaaagaggaactgcaagttcagtccctagcgactaacagtgagcagaggaagt

SEQ ID NO: 226324 - DNA, 120 bp, Artificial Sequence
  ENSG00000118308_40 (sequence is synthesized)
gagttcattgaaggggaacaccatggcttgctgtttcagagctttttagatgaggaatttcctcactatgattccctgtcctgcgcagatgcaattcaacaacctcttcaagaaaaattg

SEQ ID NO: 226325 - DNA, 120 bp, Artificial Sequence
  ENSG00000118308_41 (sequence is synthesized)
ttacagctttcagcctgatgttctgtgacctgctggggtgtgagcaaatgagaagaacataggcaaatactccttttgcatagtatagttaaatacactatatataatattatgtgcata

SEQ ID NO: 226326 - DNA, 120 bp, Artificial Sequence
  ENSG00000118308_42 (sequence is synthesized)
ccagagagaaaatatcaacagcttttttaggatgtaggagaatttcacaagactattgagaaccaaatgacaaggacaatgacattaactcatgagcatcatttttgttaagtgaaagta

SEQ ID NO: 226327 - DNA, 120 bp, Artificial Sequence
  ENSG00000118308_43 (sequence is synthesized)
ttaaacaactacaggaagatgctgtcaaccaggaaggcatccttaggaagaggctccaagaaaccagccaacggctggaggatgtggaggagcagggtaaggatcgagatcgagaagccc

SEQ ID NO: 226328 - DNA, 120 bp, Artificial Sequence
  ENSG00000118308_44 (sequence is synthesized)
aatcgagtctatttccatttatgattaactgaggaaagagaatggtaactgattcagtcttgcagatgatgggcaagcctgctgtagggtactgagagaagaatgggggtgcagaggagt

SEQ ID NO: 226329 - DNA, 120 bp, Artificial Sequence
  ENSG00000118308_45 (sequence is synthesized)
gtaacaactactattatccttccatatggtgaagttaccatacatttagagatgagctggaaaattagtaggcttagttttggatgaaggacattaaaattgagaaaccatggaaaagaa

SEQ ID NO: 226330 - DNA, 120 bp, Artificial Sequence
  ENSG00000118308_46 (sequence is synthesized)
caatcctcttgaagatgatgcagacacacatgtagtgcctaccctgtgctagctaggcattatggacatcacagtgacacagaggactgtattccattggttaagatgatgactgccaaa

SEQ ID NO: 226331 - DNA, 120 bp, Artificial Sequence
  ENSG00000118308_47 (sequence is synthesized)
ttcgtgataaatggaccctatattctgttgacttcaaacgtaatgttggaggcacacctaactagactattgtttttgtttttctcaagaaatgggatccagttgaatgttaatggagag

SEQ ID NO: 226332 - DNA, 120 bp, Artificial Sequence
  ENSG00000118308_48 (sequence is synthesized)
gtgtgcctggcagcatgaagaaagtcagtacaacaatggtttctctctgttgtgtaaaactgaagttggaagtgggtaacccgacaatggcacagcagcttcacaagatcctgagggatc

SEQ ID NO: 226333 - DNA, 120 bp, Artificial Sequence
  ENSG00000118308_49 (sequence is synthesized)
agcctcctcctttcgtgctgcctcactaccctcagcccttggcttctgcctcagagtctaagatggctactttagatccaggcaccaagccctcatcattacatcatctcattccaagaa

SEQ ID NO: 226334 - DNA, 120 bp, Artificial Sequence
  ENSG00000118308_50 (sequence is synthesized)
aaaaaaagaagcaatgacaagtattccctctccctgtaaagacaccccctagaagtccaaagtaacatttctctttccattctttgttacgaatgagactggaaaatacagcgtgtattt

SEQ ID NO: 226335 - DNA, 120 bp, Artificial Sequence
  ENSG00000118322_0 (sequence is synthesized)
ctttcactcttgggcctagcgaggcagcttatttttcctttttctttcattggtcacagttatttcttttcagtgtgtcatcttctctaagtttctgagggagtgttagcttgaggcctt

SEQ ID NO: 226336 - DNA, 120 bp, Artificial Sequence
  ENSG00000118322_1 (sequence is synthesized)
gccttgacataatcagatataatcagaaaaatgaaaaattccataggaaagagaactattttagccaaggtgtgcgagagaaataccgccactttcaagcactgttttcttctactggag

SEQ ID NO: 226337 - DNA, 120 bp, Artificial Sequence
  ENSG00000118322_2 (sequence is synthesized)
tctgctcaatagggacgtcagctttgctggggcttcctttgacaagagaatcagaaccgactggtgacatttgtttcaatgaaagcaacagtgtgaagagtaagtagtttttcctattat

SEQ ID NO: 226338 - DNA, 120 bp, Artificial Sequence
  ENSG00000118322_3 (sequence is synthesized)
tcatctcactcagtggagataatgaactcctctccactgccaagatgagaaactaccatttcttacacatggacacaaagatgagaacaataaacactgagacttcaaaaaggagggaag

SEQ ID NO: 226339 - DNA, 120 bp, Artificial Sequence
  ENSG00000118322_4 (sequence is synthesized)
gagaaagaggaacaagacttgaaatctacctatcagaacttgcaatttattctgatcaacaatttgcccagctaaagtactacatctgccccctcttcctgtggctgtaggggcacagca

SEQ ID NO: 226340 - DNA, 120 bp, Artificial Sequence
  ENSG00000118322_5 (sequence is synthesized)
aaggtcactggtctaacctccttaaagggactccgctaacagaaaccaccaaatggagtggagaaaaagaaaagggatcccctatccccaactccagccatctagattaagaaaagccag

SEQ ID NO: 226341 - DNA, 120 bp, Artificial Sequence
  ENSG00000118322_6 (sequence is synthesized)
ctgactggacagtagcacagcccagtcacctcatggacaaatttcctaggaaagaacctctcccatctattctacttatcactctcctttgaggttccggccacagatcttcgcctgctg

SEQ ID NO: 226342 - DNA, 120 bp, Artificial Sequence
  ENSG00000118322_7 (sequence is synthesized)
ctggaaatggccctctcagtggactcatcgtggcatcggtggcagtggagagtcagagatggcttcccccattgtccatcggaaaccacaccgctgctctctccagagaaagggagacag

SEQ ID NO: 226343 - DNA, 120 bp, Artificial Sequence
  ENSG00000118322_8 (sequence is synthesized)
agctacaacttgacacagcagcgggtcgtgttccccaacaacagcatattccatcaagattgggaagaggtctccaggagataccctggcaacagaacctgcacaaccaaatacaccctc

SEQ ID NO: 226344 - DNA, 120 bp, Artificial Sequence
  ENSG00000118322_9 (sequence is synthesized)
ttcaccttcctgccccggaatctctttgagcaatttcatagatgggctaacctctatttcctgttcctggtgattttgaactggatgccctccatggaagtcttccacagagaaatcacc

SEQ ID NO: 226345 - DNA, 120 bp, Artificial Sequence
  ENSG00000118322_10 (sequence is synthesized)
atgttaccattggccattgtcctgttcgtcatcatgatcaaggatggcatggaggacttcaagagacaccgctttgataaagcaataaactgctccaacattcgaatttatgaaagaaaa

SEQ ID NO: 226346 - DNA, 120 bp, Artificial Sequence
  ENSG00000118322_11 (sequence is synthesized)
gagcagacctatgtgcagaagtgctggaaggatgtgcgcgtgggagacttcatccaaatgaaatgcaatgagattgtcccagcagacatactcctccttttttcctctgaccccaatggg

SEQ ID NO: 226347 - DNA, 120 bp, Artificial Sequence
  ENSG00000118322_12 (sequence is synthesized)
atatgccatctggaaactgccagcttggatggagagacaaacctcaagcaaagatgtgtcgtgaagggcttctcacagcaggaggtacagttcgaaccagagcttttccacaataccatc

SEQ ID NO: 226348 - DNA, 120 bp, Artificial Sequence
  ENSG00000118322_13 (sequence is synthesized)
gtgtgtgagaaacccaacaaccacctcaacaaatttaagggttatatggagcatcctgaccagaccaggactggctttggctgtgagagtcttctgcttcgaggctgcaccatcagaaac

SEQ ID NO: 226349 - DNA, 120 bp, Artificial Sequence
  ENSG00000118322_14 (sequence is synthesized)
accgagatggctgttggcattgtcatctatgcaggccatgagacgaaagccatgctgaacaacagtggcccccggtacaaacgcagcaagattgagcggcgcatgaatatagacatcttc

SEQ ID NO: 226350 - DNA, 120 bp, Artificial Sequence
  ENSG00000118322_15 (sequence is synthesized)
ttctgcattgggatcctcatcctcatgtgccttattggagctgtaggtcacagcatctggaatgggacctttgaagaacaccctcccttcgatgtgccagatgccaatggcagcttcctt

SEQ ID NO: 226351 - DNA, 120 bp, Artificial Sequence
  ENSG00000118322_16 (sequence is synthesized)
cccagtgcccttgggggcttctacatgttcctcacaatgatcatcctgctccaggtgctgatccccatctctttgtatgtctccattgagctggtgaagctcgggcaagtgttcttcttg

SEQ ID NO: 226352 - DNA, 120 bp, Artificial Sequence
  ENSG00000118322_17 (sequence is synthesized)
agcaatgaccttgacctgtatgatgaagagaccgatttatccattcaatgtcgagccctcaacatcgcagaggacttgggccagatccagtacatcttctccgataagacggggaccctg

SEQ ID NO: 226353 - DNA, 120 bp, Artificial Sequence
  ENSG00000118322_18 (sequence is synthesized)
acagagaacaagatggtgttccgacgttgcaccatcatgggcagcgagtattctcaccaagaaaatgctaagcgactggagaccccaaaggagctggactcagatggtgaagagtggacc

SEQ ID NO: 226354 - DNA, 120 bp, Artificial Sequence
  ENSG00000118322_19 (sequence is synthesized)
caataccaatgcctgtccttctcggctagatgggcccaggatccagcaactatgagaagccaaaaaggtgctcagcctctgaggaggagccagagtgcccgggtgcccatccagggccac

SEQ ID NO: 226355 - DNA, 120 bp, Artificial Sequence
  ENSG00000118322_20 (sequence is synthesized)
taccggcaaaggtctatggggcaccgtgaaagctcacagcctcctgtggccttcagcagctccatagaaaaagatgtaactccagataaaaacctactgaccaaggttcgagatgctgcc

SEQ ID NO: 226356 - DNA, 120 bp, Artificial Sequence
  ENSG00000118322_21 (sequence is synthesized)
ctgtggttggagaccttgtcagacagcagacctgccaaggcttccctctccaccacctcctccattgctgatttcttccttgccttaaccatctgcaactctgtcatggtgtccacaacc

SEQ ID NO: 226357 - DNA, 120 bp, Artificial Sequence
  ENSG00000118322_22 (sequence is synthesized)
accgagcccaggcagagggtcaccatcaaaccctcaagcaaggctctggggacgtccctggagaagattcagcagctcttccagaagttgaagctattgagcctcagccagtcattctca

SEQ ID NO: 226358 - DNA, 120 bp, Artificial Sequence
  ENSG00000118322_23 (sequence is synthesized)
tccactgcaccctctgacacagacctcggggagagcttaggggccaacgtggccaccacagactcggatgagagagatgatgcatctgtgtgcagtggaggtgactccactgatgacggt

SEQ ID NO: 226359 - DNA, 120 bp, Artificial Sequence
  ENSG00000118322_24 (sequence is synthesized)
ggctacaggagcagcatgtgggaccagggcgacatcctggagtctgggtcaggcacttccttggaggaggcattggaggccccagccacagacctggccaggcctgagttctgttacgag

SEQ ID NO: 226360 - DNA, 120 bp, Artificial Sequence
  ENSG00000118322_25 (sequence is synthesized)
gctgagagccctgatgaggccgccctggtgcacgctgcccatgcctacagcttcacactagtgtcccggacacctgagcaggtgactgtgcgcctgccccagggcacctgcctcaccttc

SEQ ID NO: 226361 - DNA, 120 bp, Artificial Sequence
  ENSG00000118322_26 (sequence is synthesized)
agcctcctctgcaccctgggctttgactctgtcaggaagagaatgtctgtggttgtgaggcacccactgactggcgagattgttgtctacaccaagggtgctgactcggtcatcatggac

SEQ ID NO: 226362 - DNA, 120 bp, Artificial Sequence
  ENSG00000118322_27 (sequence is synthesized)
ctgctggaagacccagcctgcgtacctgacattaatatggaaaagaagctgagaaaaatccgagcccggacccaaaagcatctagacttgtatgcaagagatggcctgcgcacactatgc

SEQ ID NO: 226363 - DNA, 120 bp, Artificial Sequence
  ENSG00000118322_28 (sequence is synthesized)
attgccaagaaggttgtaagcgaagaggacttccggagatgggccagtttccggcgtgaggctgaggcatccctcgacaaccgagatgagcttctcatggaaactgcacagcatctggag

SEQ ID NO: 226364 - DNA, 120 bp, Artificial Sequence
  ENSG00000118322_29 (sequence is synthesized)
aatcaactcaccttacttggagccactgggatcgaagaccggctgcaggaaggagttccagatacgattgccactctgcgggaggctgggatccagctctgggtcctgactggagataag

SEQ ID NO: 226365 - DNA, 120 bp, Artificial Sequence
  ENSG00000118322_30 (sequence is synthesized)
caggagacagcggtcaacattgcccattcctgcagactgttaaatcagaccgacactgtttataccatcaatacagagaatcaggagacctgtgaatccatcctcaattgtgcattggaa

SEQ ID NO: 226366 - DNA, 120 bp, Artificial Sequence
  ENSG00000118322_31 (sequence is synthesized)
aaagcaatttcgtgaactacagaagccagaccgcaagctctttggattccgcttaccttccaagacaccatccatcacctcagaagctgtggttccagaagctggattggtcatcgatgg

SEQ ID NO: 226367 - DNA, 120 bp, Artificial Sequence
  ENSG00000118322_32 (sequence is synthesized)
gaagacattgaatgccatcttccagggaaagctagagaagaagtttctggaattgacccagtattgtcggtccgtcctgtgctgccgctccacgccactccagaagagtatgatagtcaa

SEQ ID NO: 226368 - DNA, 120 bp, Artificial Sequence
  ENSG00000118322_33 (sequence is synthesized)
gctggtgcgagacaagttgcgcgtcatgaccctttccataggtgatggagcaaatgatgtaagcatgattcaagctgctgatattggaattggaatatctggacaggaaggcatgcaggc

SEQ ID NO: 226369 - DNA, 120 bp, Artificial Sequence
  ENSG00000118322_34 (sequence is synthesized)
tgtcatgtccagcgactttgccatcacccgctttaagcatctcaagaagttgctgctcgtgcatggccactggtgttactcgcgcctggccaggatggtggtgtactacctctacaagaa

SEQ ID NO: 226370 - DNA, 120 bp, Artificial Sequence
  ENSG00000118322_35 (sequence is synthesized)
cgtgtgctacgtcaacctgctcttctggtatcagttcttctgtggtttctccagctccaccatgattgattactggcagatgatattcttcaatctcttctttacctccttgcctcctct

SEQ ID NO: 226371 - DNA, 120 bp, Artificial Sequence
  ENSG00000118322_36 (sequence is synthesized)
tgtctttggagtccttgacaaagacatctctgcagaaacactcctggcattgcctgagctatacaagagtggccagaactctgagtgctataacctgtcgactttctggatttctatggt

SEQ ID NO: 226372 - DNA, 120 bp, Artificial Sequence
  ENSG00000118322_37 (sequence is synthesized)
ggatgcattctaccagagcctcatctgtttctttatcccttacctggcctataagggctctgatatagatgtctttacctttgggacaccaatcaacaccatctccctcaccacaatcct

SEQ ID NO: 226373 - DNA, 120 bp, Artificial Sequence
  ENSG00000118322_38 (sequence is synthesized)
tttgcaccaggcaatggaaatgaagacatggaccattttccacggagtcgtgctcctcggcagcttcctgatgtactttctggtatccctcctgtacaatgccacctgcgtcatctgcaa

SEQ ID NO: 226374 - DNA, 120 bp, Artificial Sequence
  ENSG00000118322_39 (sequence is synthesized)
cagccccaccaatccctattgggtgatggaaggccagctctcaaaccccactttctacctcgtctgctttctcacaccagttgttgctcttctcccaagatactttttcctgtctctgca

SEQ ID NO: 226375 - DNA, 120 bp, Artificial Sequence
  ENSG00000118322_40 (sequence is synthesized)
aggaacttgtgggaagtctctaatctcaaaagctcagaaaattgacaaactccccccagacaaaagaaacctggaaatccagagttggagaagcagacagaggcctgcccctgtccccga

SEQ ID NO: 226376 - DNA, 120 bp, Artificial Sequence
  ENSG00000118322_41 (sequence is synthesized)
agtggctcgaccaactcaccacccagtgtcatctatcacaggacaggacttcagtgccagcaccccaaagagctctaaccctcccaagaggaagcatgtggaagagtcagtactccacga

SEQ ID NO: 226377 - DNA, 120 bp, Artificial Sequence
  ENSG00000118322_42 (sequence is synthesized)
acagagatgtggcacggagtgcatgagggatgactcatgctcaggggactcctcagctcaactctcatccggggagcacctgctgggacctaacaggataatggcctactcaagaggaca

SEQ ID NO: 226378 - DNA, 120 bp, Artificial Sequence
  ENSG00000118322_43 (sequence is synthesized)
gactgatatgtgccggtgctcaaagaggagcagccatcgccgatcccagagttcactgaccatatgaggagctgcagaaatctgtacaaactcaacagaggccacctagtcactggtcca

SEQ ID NO: 226379 - DNA, 120 bp, Artificial Sequence
  ENSG00000118322_44 (sequence is synthesized)
cataacccttgaccccttcttcttcatagaggaaacaatgtgccagtcttattcttttcttcaacaaccttgacttccatggaggaagtgctggccccaaggggtctgacacaaagacgg

SEQ ID NO: 226380 - DNA, 120 bp, Artificial Sequence
  ENSG00000118322_45 (sequence is synthesized)
gaaacccagtcggcctctagttttctgctgctctcaggcagcacatcttgcaaacagtttggagaaggaggctgtttttgttgaatcgagttctcaaatcggtttagaccaaagccattc

SEQ ID NO: 226381 - DNA, 120 bp, Artificial Sequence
  ENSG00000118322_46 (sequence is synthesized)
ttctgaccctctagataagcgtagcctacaacccagtgccgtaagtttccaagattcaagaagtgtatcaacccaggcaatatctcaggatatggaagtttctgggtttatttacccctc

SEQ ID NO: 226382 - DNA, 120 bp, Artificial Sequence
  ENSG00000118322_47 (sequence is synthesized)
agtgcccagagttaaagtttcagaagagacttgtgcacataagggcttcatctcaagtgtattgcagtaatggctgaatcggggttaacatcccttccaggcacagcgagttggttctgc

SEQ ID NO: 226383 - DNA, 120 bp, Artificial Sequence
  ENSG00000118322_48 (sequence is synthesized)
tttttgcctgtaagccaaagaaaagccacatctaaaaagctactactaaaagccagaaagaaaagtggatttgaactcagtgtcacagactcttctgagtgttttagggtcacagctagt

SEQ ID NO: 226384 - DNA, 120 bp, Artificial Sequence
  ENSG00000118322_49 (sequence is synthesized)
gtaagaggcatgaagaatagacatgcaaaagggaacgggtgcaccagagacccctgttttggctgacagaccatatgtcccaccagctggggaatctgacaagaggacataggtggcact

SEQ ID NO: 226385 - DNA, 120 bp, Artificial Sequence
  ENSG00000118322_50 (sequence is synthesized)
ctttttttaaagctatttattgtatctatttttaaataaaattgcccatcctcattcagctcttagaacaaaagcaaaaaaccctgtaaatcaggagatataagcacatctgcacccaga

SEQ ID NO: 226386 - DNA, 120 bp, Artificial Sequence
  ENSG00000118322_51 (sequence is synthesized)
ataggcccatatgatagggcaaccctgagcttaaacaatgacatcttcaagggtagaactaatctgaaaccccattcagcctattccagaatggggataggctgaaacccccttccagcc

SEQ ID NO: 226387 - DNA, 120 bp, Artificial Sequence
  ENSG00000118322_52 (sequence is synthesized)
tctggaagacactggcctgcatcagttagagtcagagcaagtgtcacttcacagggaaaagaaggattatatagacttcctatccctagagtttataaatgtcaactatataaaaaaagc

SEQ ID NO: 226388 - DNA, 120 bp, Artificial Sequence
  ENSG00000118322_53 (sequence is synthesized)
tcaaaacagtgttaaaggaatgaacagtagaattttaataggctgtccaaagaagccaggtctgctgtgggcaagtatagcctaaccctagtcttgtaaaataagccagaaagggttact

SEQ ID NO: 226389 - DNA, 120 bp, Artificial Sequence
  ENSG00000118322_54 (sequence is synthesized)
gagccaccttaagctagtacctatatagtaggcaaaaagtacagaaatagatgcaataagtgtggtgagtctttgagcctacgagtcatgccaccagccataagttgacctatcacttga

SEQ ID NO: 226390 - DNA, 120 bp, Artificial Sequence
  ENSG00000118322_55 (sequence is synthesized)
gaacctcctcagcaaagatgccagaaaacattcaatcaagttggcaaatgacacagggagctggccctctgaccatcttcctggcaaacctggactggaagggccatttgcagcactgtc

SEQ ID NO: 226391 - DNA, 120 bp, Artificial Sequence
  ENSG00000118322_56 (sequence is synthesized)
ctggagctaatacactgtttcactgcctctgccatataatgatgccagcactagccagctggtgggtatttggaggaatcctgcatgaggattgcccaataaggggcaggtacacatacc

SEQ ID NO: 226392 - DNA, 120 bp, Artificial Sequence
  ENSG00000118322_57 (sequence is synthesized)
tggcaaagtgatgatgatgtgaattgtttccagtgaggggattgagtcaaaacttggatctcaggtacctcaatttttcccccaatttctggctactactaaaagccagaaagaacagaa

SEQ ID NO: 226393 - DNA, 120 bp, Artificial Sequence
  ENSG00000118322_58 (sequence is synthesized)
cagtggcctcaggagatctgagtttgaatccttgctctctaggatgcaggtggcttgaagcagaatgccacacctgcaagttgattagaactgcctttcttcccaggcttgacataggta

SEQ ID NO: 226394 - DNA, 120 bp, Artificial Sequence
  ENSG00000118322_59 (sequence is synthesized)
ttaagtcaaaattacatgaaacccagtggtaaaaaagcctctgaaagctgtaacaccctcagtaataacaaaagggatttttatttcacagctaaagggaaaataggtggagaagttaaa

SEQ ID NO: 226395 - DNA, 120 bp, Artificial Sequence
  ENSG00000118322_60 (sequence is synthesized)
aaataatgtctgatcctgttcctaagttccaaactatagccaacactctgatgctgctctttttcttgtaggaccaaccgtcccagtttgcctgggactttctcatttttacagagtccc

SEQ ID NO: 226396 - DNA, 120 bp, Artificial Sequence
  ENSG00000118322_61 (sequence is synthesized)
aaatcctaggaaactggagcaactggtacaactggtcacctactcttgcccctctgtaaatcaagccaactgtgaccatccaatgtgccatcttacagggaaaagttataaccactattc

SEQ ID NO: 226397 - DNA, 120 bp, Artificial Sequence
  ENSG00000118322_62 (sequence is synthesized)
ccctataacataatgctaatgattgtacttagtacatttttatacttttatgatattttactgattggaaatgtcatcctttattaaaaataaacatggttttccatagttgcctgccaa

SEQ ID NO: 226398 - DNA, 120 bp, Artificial Sequence
  ENSG00000118322_63 (sequence is synthesized)
gttctctgcaggctctttccttgtcatgtttctcccctggggtttgcagcctggcttttcatttttagtatccttctgaaagaagagagaaaaattttcagcaaagaaggcaagtaaaag

SEQ ID NO: 226399 - DNA, 120 bp, Artificial Sequence
  ENSG00000118322_64 (sequence is synthesized)
atgaaaattaaattatgagaattaaaaagacaacattgagcagagatgaaaaaggaagggaggaaaaggtggaaaagaaaagaagacaagaagcgagtagtggtctctaacttgctcttt

SEQ ID NO: 226400 - DNA, 120 bp, Artificial Sequence
  ENSG00000118322_65 (sequence is synthesized)
gaaggatggtctcacaaagagaaccccaacagacatcatcgtgggaatcaaatcaagaccagcaagtacaccgtgttgtccttcgtccccaaaaacatttttgagcagctacaccggttt

SEQ ID NO: 226401 - DNA, 120 bp, Artificial Sequence
  ENSG00000118322_66 (sequence is synthesized)
gccaatctctattttgtgggcattgcggttctgaattttatccctgtggtcaatgctttccagcctgaggtgagcatgataccaatctgtgttatcctggcagtcactgccatcaaggac

SEQ ID NO: 226402 - DNA, 120 bp, Artificial Sequence
  ENSG00000118322_67 (sequence is synthesized)
tttagatggggaaactgaggcacagggaattagaccaaagtttataccaggacttataaacaggcatgttcagtgttcatgtttttaaaagagtactataaactgtgccttgttctgagt

SEQ ID NO: 226403 - DNA, 120 bp, Artificial Sequence
  ENSG00000118322_68 (sequence is synthesized)
aatcccaggggcagaagacatatttcagctccaggtaaaggaagagctgtcacttagctccatctgtgaatggagccaatggcctgactcagggggtggtgaaaggtgttcagaggattg

SEQ ID NO: 226404 - DNA, 120 bp, Artificial Sequence
  ENSG00000118322_69 (sequence is synthesized)
tatagaagctcccaagggctccatccctctttctaaaaggaaataccctgctctcctaagaaacgaggagataaaagacattctcctggctctcttagaggctgtgtggcatttccacaa

SEQ ID NO: 226405 - DNA, 120 bp, Artificial Sequence
  ENSG00000118322_70 (sequence is synthesized)
gttgcttcctgtatccctgtggtcttccttgtcacagatcagggctgttccaattacttgtaaactttcatttgtttacaaaggttagaagttatcccatatgtggttccccttcagctg

SEQ ID NO: 226406 - DNA, 120 bp, Artificial Sequence
  ENSG00000118322_71 (sequence is synthesized)
atctttgtctggtgccagacaaagcactttatgagacgagttttttatctgtcagcaatggattggagacatttcccaattgtgtgccagtcacacaaccaaggcttaggaatttctcag

SEQ ID NO: 226407 - DNA, 120 bp, Artificial Sequence
  ENSG00000118322_72 (sequence is synthesized)
gccaccttacctgacatgtcagggcaggtctgtgtctaggtgcatggtcagatttaatacatccagaagatgtcttctattctaacagatctcttagcttgtcactgaggcaaagttttg

SEQ ID NO: 226408 - DNA, 120 bp, Artificial Sequence
  ENSG00000118322_73 (sequence is synthesized)
atttaggagatagggctataaaatgcctggactgttaccttgcatggactgaatatgactcataaaactgatctgattccttcagccatcatctgcccaacttcgttcccctccccaccc

SEQ ID NO: 226409 - DNA, 120 bp, Artificial Sequence
  ENSG00000118322_74 (sequence is synthesized)
tatctgcagatatcaacgtgtagagcaacccctcaaccaagaggacacaggcttctaggtgggatttgggtacaccagggaagcacccaacccccaacagatcactgaatcttggagtct

SEQ ID NO: 226410 - DNA, 120 bp, Artificial Sequence
  ENSG00000118322_75 (sequence is synthesized)
agaggaccctggaagtcatccagcccaatatcctttatctcatccccacacatggctagctggtctcttttacattacttctggcactgcttgttagaaagttttacctctcccaaattc

SEQ ID NO: 226411 - DNA, 120 bp, Artificial Sequence
  ENSG00000118322_76 (sequence is synthesized)
tactattggtctagtctccccatttccccacagataaggaaactgaagactactggggctaagtctcttgctcaggtttaccctgcttatttctgataggtagaactaagtctagaactg

SEQ ID NO: 226412 - DNA, 120 bp, Artificial Sequence
  ENSG00000118322_77 (sequence is synthesized)
agctagtgctatttacattctaccacactgtttgcttatggaaactcaactgtcggtttcttactatttaagactaacttatccattgaaaaagtcccaattaaattgaaattattcaga

SEQ ID NO: 226413 - DNA, 72 bp, Artificial Sequence
  ENSG00000118322_78 (sequence is synthesized)
tgctatccctcccctagcccccaaccccccgatgggctccagtgtgtgatgttcccctcagcagtatttggt

SEQ ID NO: 226414 - DNA, 73 bp, Artificial Sequence
  ENSG00000118322_79 (sequence is synthesized)
tttatccagtctatcgctgatgggcactttacatgtgcatgtgtctttagtagaatgatttataatcctttgg

SEQ ID NO: 226415 - DNA, 120 bp, Artificial Sequence
  ENSG00000118322_80 (sequence is synthesized)
atttctggttctagatccttgaggaatctttgtcttccacaatggttgaactaatttgtactcccaccaacagtgtaaaagtattcctgtttctctacatcctcttcagcatctgttgtg

SEQ ID NO: 226416 - DNA, 120 bp, Artificial Sequence
  ENSG00000118322_81 (sequence is synthesized)
tgtactcccaccaacagtgtaaaagtattcctgtttctctacatcctcttcagcatctgttgtgtcctgacattttaatgatcactattctcactggtgtgagatgttatctcattgtgg

SEQ ID NO: 226417 - DNA, 67 bp, Artificial Sequence
  ENSG00000118322_82 (sequence is synthesized)
agaaaacaaactcttaagagagaagtattcattcttttgagtgtgagggatggagaaagagaaagat

SEQ ID NO: 226418 - DNA, 120 bp, Artificial Sequence
  ENSG00000118322_83 (sequence is synthesized)
ttcattcttttgagtgtgagggatggagaaagagaaagatggagagagtattataagcagctgtatcccctttgccatggtgatagcagaccattcacatgggagcttctggtctctttg

SEQ ID NO: 226419 - DNA, 120 bp, Artificial Sequence
  ENSG00000118322_84 (sequence is synthesized)
taataataataagagccacattaccagtacttagagtatgctagttattttaacacattgtatcattaaatcttcaaaacatccctatgagttagaaacctaaaaaaaaaaaaaaaaaaa

SEQ ID NO: 226420 - DNA, 120 bp, Artificial Sequence
  ENSG00000118322_85 (sequence is synthesized)
gggcactgagattgtgtgctcctatcagaaggaagcaggggttggattccatggaggatattaaccagaagagcactctactgcaggggtgtgggcgtagggcccgtagggcacctacac

SEQ ID NO: 226421 - DNA, 120 bp, Artificial Sequence
  ENSG00000118322_86 (sequence is synthesized)
caaagttgcaatgccctccataagcaatgacagacataaggacatttgaaatcattttgcaaatgtacactttcgtagtgtcaaaattcagcttggaagaagcaaactaacttgactgct

SEQ ID NO: 226422 - DNA, 120 bp, Artificial Sequence
  ENSG00000118322_87 (sequence is synthesized)
aaattttcccatttaaacagacattttgtgggttttgagccattaacaattgtatttccaccaccagtgtaaacatttggcactgcttaaatttgttgatgaggatagagagcattgact

SEQ ID NO: 226423 - DNA, 76 bp, Artificial Sequence
  ENSG00000118322_88 (sequence is synthesized)
aacttcgttcccctccccacccccccacaacacacacacacactttctaagaaaagaaaagaaattcttttttttc

SEQ ID NO: 226424 - DNA, 120 bp, Artificial Sequence
  ENSG00000118363_0 (sequence is synthesized)
gagacgcagaggcggacaagatggcggcggcagctgtacagggcgggagaagcggtggtagcggaggctgtagtggggctggtggtgcttccaactgcgggacaggaagtggccgtagcg

SEQ ID NO: 226425 - DNA, 120 bp, Artificial Sequence
  ENSG00000118363_1 (sequence is synthesized)
gcttgttggataagtggaagatagatgataagcctgtaaaaattgacaagtgggatggatcagctgtgaaaaactctttggatgattctgccaaaaaggtacttctggaaaaatacaaat

SEQ ID NO: 226426 - DNA, 120 bp, Artificial Sequence
  ENSG00000118363_2 (sequence is synthesized)
atgtggagaattttggtctaattgatggtcgcctcaccatctgtacaatctcctgtttctttgccatagtggctttgatttgggattatatgcacccctttccagagtccaaacccgttt

SEQ ID NO: 226427 - DNA, 120 bp, Artificial Sequence
  ENSG00000118363_3 (sequence is synthesized)
tggctttgtgtgtcatatcctattttgtgatgatggggattctgaccatttatacctcatataaggagaagagcatctttctcgtggcccacaggaaagatcctacaggaatggatcctg

SEQ ID NO: 226428 - DNA, 120 bp, Artificial Sequence
  ENSG00000118363_4 (sequence is synthesized)
atgatatttggcagctgtcctccagtcttaaaaggtttgatgacaaatacaccttgaagctgaccttcatcagtgggagaacaaagcagcagcgggaagccgagttcacaaagtccattg

SEQ ID NO: 226429 - DNA, 120 bp, Artificial Sequence
  ENSG00000118363_5 (sequence is synthesized)
ctaagttttttgaccacagtgggacactggtcatggatgcatatgagcctgaaatatccaggctccatgacagtcttgccatagaaagaaaaataaagtagccaattctaaaagtagccc

SEQ ID NO: 226430 - DNA, 120 bp, Artificial Sequence
  ENSG00000118363_6 (sequence is synthesized)
tctttctcctggatcttgctgaattagtggcttggggggtgggggagataaaaagaacttaaaatgggtaaagtaagaaatgttaaaaagtccctgttttgtcctgaaattttagtctat

SEQ ID NO: 226431 - DNA, 120 bp, Artificial Sequence
  ENSG00000118363_7 (sequence is synthesized)
tctgggtaaataggattttctgacacagatatgagaagttgtagctctgatgtctagctgtagtctccttgatctgctgattgcattattttaatttgcttttctgggaaagcagttttg

SEQ ID NO: 226432 - DNA, 120 bp, Artificial Sequence
  ENSG00000118363_8 (sequence is synthesized)
ctaaaagctgtacagactttttcttttgtacctagcagtactttatatagtatagctttgggccatgtagcattttaagactcaattttaaaaaattattaatctgttgctgactcttaa

SEQ ID NO: 226433 - DNA, 120 bp, Artificial Sequence
  ENSG00000118363_9 (sequence is synthesized)
ttcctatttcaatatgtgtttccttgaagaattcaggatacaacttcttgtgtatgacagctttccttcacacactatttttgtgggtgtgtatatatctgatttgggaagaatttaaaa

SEQ ID NO: 226434 - DNA, 120 bp, Artificial Sequence
  ENSG00000118363_10 (sequence is synthesized)
aacacatagctttttaatttgtttgaaacagactttctgcctgttacatttttgcttttaaccaattaaagaagccaatggcattttagttttatattgtgttttccactagtatatccc

SEQ ID NO: 226435 - DNA, 120 bp, Artificial Sequence
  ENSG00000118363_11 (sequence is synthesized)
aataaaaggaaggaagatgtgaaaaaaatggagtcatagttttgatggagagaacagagaaacaagtgttaacatctttctactataggtttttttcatttttaggctattttacttgtc

SEQ ID NO: 226436 - DNA, 120 bp, Artificial Sequence
  ENSG00000118363_12 (sequence is synthesized)
aaaggcccctgagaacctgtagctaaggaactcttagctttccagtgataataacaataataacaacattctgtacttactttgtgccagaaatgctccaagtactttacatgtgttaat

SEQ ID NO: 226437 - DNA, 120 bp, Artificial Sequence
  ENSG00000118363_13 (sequence is synthesized)
aatgctcacagcaatcctaagaggcaggtgctgttattatccccattttacacatgaggaaactgagatacaaaagttaaataattgtcacacagctagtgatagaactgggattcaaac

SEQ ID NO: 226438 - DNA, 120 bp, Artificial Sequence
  ENSG00000118363_14 (sequence is synthesized)
ctggggagtccggcttcagagtttgtggtcctgcagagacaaaacagccgcttttccagtattttcccagtatggtcagagaagacctgggtgcttgccaagatcctttgacctttagga

SEQ ID NO: 226439 - DNA, 120 bp, Artificial Sequence
  ENSG00000118363_15 (sequence is synthesized)
atatttccctacagccttacaaaacatcaattttggctgagcctagtacccaacactatattcagtttgtaagaaattaccattatcacatttcctgtttgtcttggagaggttgtccta

SEQ ID NO: 226440 - DNA, 120 bp, Artificial Sequence
  ENSG00000118363_16 (sequence is synthesized)
tctcgcaccacatggtagggaattgtgaacaacactggacagaaagttaaagccttggattctgtactcttcattcctgtaaaccttgggtaagtttcggaattctctgtgagcttctta

SEQ ID NO: 226441 - DNA, 120 bp, Artificial Sequence
  ENSG00000118363_17 (sequence is synthesized)
aagtttttgaaagcatgtaaccggataagtgtatttttacaatggaggagttacagtcatcttggtatttgtgggagattggttccaggatccccaagcataccaaaatccaaggatgct

SEQ ID NO: 226442 - DNA, 120 bp, Artificial Sequence
  ENSG00000118363_18 (sequence is synthesized)
caagtcccttatataaaatggtatagcatttgcatataacctacacacatcctcccatatacttttaatcacctctggattacctataatacctaatataatgtaaatgctatgtaaata

SEQ ID NO: 226443 - DNA, 120 bp, Artificial Sequence
  ENSG00000118363_19 (sequence is synthesized)
gttatactgcattggttttttaatttatattttttgttattttttaaaatatatttttaatccatggttggttaaatctgtagatatagagggccaactgtactgttagacacaagggtc

SEQ ID NO: 226444 - DNA, 120 bp, Artificial Sequence
  ENSG00000118363_20 (sequence is synthesized)
tcgaggcttgcagatagagactgaataaccctctccatgatgatcccttagagttcccccactgtgcctttttctttacatgtgcatgcaaacatgtgtctccacatacattttttttaa

SEQ ID NO: 226445 - DNA, 120 bp, Artificial Sequence
  ENSG00000118363_21 (sequence is synthesized)
caaaaattgaattatgttgatatatgtcctgtaatttgtgttttaaacttaatatatcttaggcattttccctgtgtgtgtgtataatgcagctattaaaaatgagtctgaggccaggca

SEQ ID NO: 226446 - DNA, 120 bp, Artificial Sequence
  ENSG00000118363_22 (sequence is synthesized)
atcacaaccctacgcacgcttggagcctgcccttgccctcatcacacttcaaacctggacccggtcctctttagaacttcttcttttctcgcaagtgttctggtcctggtcgccacacct

SEQ ID NO: 226447 - DNA, 120 bp, Artificial Sequence
  ENSG00000118369_0 (sequence is synthesized)
agccccggggccgcgccgcagagtcgggcttcctggatacatagaggcttgtgccaggcggggtgggaagactggattttgcagtggaagcagcatctcttccgtctgggacctggctga

SEQ ID NO: 226448 - DNA, 120 bp, Artificial Sequence
  ENSG00000118369_1 (sequence is synthesized)
ggacctggctgagggcgtccccaccctggggggagcagaggaccagccctgacctagccgggcccagcctcgtcctgcccggcctgagcgccccgcccagcagccggctctggcccaccg

SEQ ID NO: 226449 - DNA, 120 bp, Artificial Sequence
  ENSG00000118369_2 (sequence is synthesized)
gcgggcgccatggacaagatcttggaggcggtggtgacgtcgtcatacccggtcagcgtgaagcaggggctggttcggcgcgtgctggaggcggcgcggcagccgctggagcgtgagcag

SEQ ID NO: 226450 - DNA, 120 bp, Artificial Sequence
  ENSG00000118369_3 (sequence is synthesized)
gctgctggcgctgggcgcgcgcctctacgtgggcggcgcggaggagctgccgcgccgcgtgggctgccagctgctgcacgtggccggccgccaccaccccgacgtcttcgccgagttctt

SEQ ID NO: 226451 - DNA, 120 bp, Artificial Sequence
  ENSG00000118369_4 (sequence is synthesized)
gacgtcttcgccgagttcttcagcgcgcgtcgcgtgctgcgcctgctgcagggtggcgccggccccccgggcccccgcgcgctcgcctgcgtgcagctgggtctgcagctgctgcccgag

SEQ ID NO: 226452 - DNA, 120 bp, Artificial Sequence
  ENSG00000118369_5 (sequence is synthesized)
cgcaccgtgtgcgagcgcccgggccccgcggcctgcgcgcaggtggcacggctgctggctcgccacccgcgctgtgtgcccgacggaccccaccgcctgctcttctgccagcagctggtg

SEQ ID NO: 226453 - DNA, 120 bp, Artificial Sequence
  ENSG00000118369_6 (sequence is synthesized)
ggaccccaccgcctgctcttctgccagcagctggtgcgttgcctcggccgcttccgctgcccagccgaaggcgaggagggcgccgtggagttcctagagcaggcccagcaggtgagcggg

SEQ ID NO: 226454 - DNA, 120 bp, Artificial Sequence
  ENSG00000118369_7 (sequence is synthesized)
ctcctggcgcagctgtggcgcgcacagcccgccgccatcctgccctgcctcaaagagctgttcgcagtcatctcctgcgcagaggaggagccaccatctagcgccctggccagcgtggtc

SEQ ID NO: 226455 - DNA, 120 bp, Artificial Sequence
  ENSG00000118369_8 (sequence is synthesized)
cagcacctcccattggagctcatggatggtgttgtccggaacctcagcaatgatgacagtgtgacagactcgcagatgctgactgccattagcaggatgattgactgggtgtcctggccc

SEQ ID NO: 226456 - DNA, 120 bp, Artificial Sequence
  ENSG00000118369_9 (sequence is synthesized)
ctggggaagaatattgacaagtggatcattgcactgctgaagggcctggctgctgttaagaagttcagcatcttgatcgaggtttcgctcaccaaaattgagaaggttttctctaagctg

SEQ ID NO: 226457 - DNA, 120 bp, Artificial Sequence
  ENSG00000118369_10 (sequence is synthesized)
ctgtaccccatcgtccggggagctgccttgtctgtgctcaagtacatgctcctgaccttccagcactcccacgaagccttccacctgctcctccctcacatcccccccatggtggcctct

SEQ ID NO: 226458 - DNA, 120 bp, Artificial Sequence
  ENSG00000118369_11 (sequence is synthesized)
ctggtcaaggaggactcgaactcggggaccagctgcctggagcagctggcggagctggtccactgcatggtgttccggttcccgggcttcccggatctgtatgagcctgtcatggaggcc

SEQ ID NO: 226459 - DNA, 120 bp, Artificial Sequence
  ENSG00000118369_12 (sequence is synthesized)
atcaaggacctccatgttcccaatgaggaccgcatcaagcagctgctggggcaggatgcctggacttcgcagaagagcgagctggcgggtttctatccccggctcatggccaagtcagac

SEQ ID NO: 226460 - DNA, 120 bp, Artificial Sequence
  ENSG00000118369_13 (sequence is synthesized)
acgggcaagattggtctcatcaacctgggcaacacatgctatgtcaacagcatccttcaggccttattcatggcgtctgacttcagacattgtgtgctccgcttgactgagaacaactca

SEQ ID NO: 226461 - DNA, 120 bp, Artificial Sequence
  ENSG00000118369_14 (sequence is synthesized)
cagcccctgatgaccaagctgcagtggctctttggcttcctagaacacagccagcggcctgccatttccccagagaacttcctctccgcatcctggacgccctggttcagccctggcacc

SEQ ID NO: 226462 - DNA, 120 bp, Artificial Sequence
  ENSG00000118369_15 (sequence is synthesized)
cagcaggactgctcggagtatctgaagtacctgctggatcggctgcacgaagaggagaaaacgggcacaaggatctgccagaaactcaagcagtccagctcgccctctccgcccgaggag

SEQ ID NO: 226463 - DNA, 120 bp, Artificial Sequence
  ENSG00000118369_16 (sequence is synthesized)
cccccggccccaagttcaacctctgtggaaaaaatgtttggaggcaagatagtgactcggatctgctgtctctgctgcctcaacgtctcctcccgggaggaggccttcacggacctctct

SEQ ID NO: 226464 - DNA, 120 bp, Artificial Sequence
  ENSG00000118369_17 (sequence is synthesized)
ctcgccttccctcctcctgagcgctgtcgccgccgccgcctgggctctgtgatgcgccccacagaagacatcacagcccgggagttgcccccaccaaccagtgcacaggggccaggcagg

SEQ ID NO: 226465 - DNA, 120 bp, Artificial Sequence
  ENSG00000118369_18 (sequence is synthesized)
gtgggtcctcggaggcaaaggaaacactgcatcacagaggacaccccccccaccagcctgtacatcgaaggcctggactccaaggaagctggtgggcagagcagtcaggaggaaaggata

SEQ ID NO: 226466 - DNA, 120 bp, Artificial Sequence
  ENSG00000118369_19 (sequence is synthesized)
gtgggggaggaggaggaaagcaccagaggggaaggagagagggagaaagaggaggaggtggaagaggaagaagagaaggtggagaaggagacagaaaaggaggctgagcaggaaaaggaa

SEQ ID NO: 226467 - DNA, 120 bp, Artificial Sequence
  ENSG00000118369_20 (sequence is synthesized)
gaagacagcctgggagcggggacccacccggatgctgccatcccctccggggagcggacatgtggctctgagggctcccgctccgtcctggacctggttaactacttcctgtcccccgag

SEQ ID NO: 226468 - DNA, 120 bp, Artificial Sequence
  ENSG00000118369_21 (sequence is synthesized)
aagctgacagcagaaaaccgctactactgcgagtcgtgtgcctccctgcaggatgccgagaaggtggtggagctgagccaagggccgtgctacctcatcctcacactgctgcgcttctct

SEQ ID NO: 226469 - DNA, 120 bp, Artificial Sequence
  ENSG00000118369_22 (sequence is synthesized)
ttcgacctgcgcaccatgcggcgccgcaagatcctggatgacgtctccatccccctgctgctccgcctgccactggctggtggccgtggccaggcctatgacctctgcagtgtggtggtg

SEQ ID NO: 226470 - DNA, 120 bp, Artificial Sequence
  ENSG00000118369_23 (sequence is synthesized)
cactctggagtgtcttcggagagtggtcactactactgctatgcccgtgagggcgctgcccgccctgccgcttctctgggaactgccgataggccagagcccgagaaccagtggtacctg

SEQ ID NO: 226471 - DNA, 120 bp, Artificial Sequence
  ENSG00000118369_24 (sequence is synthesized)
ttcaatgacactcgggtgtccttctcttccttcgaatctgtcagcaacgtcacctccttcttccctaaggacacagcctatgtgctgttttaccggcagcggcccagggaggggcccgag

SEQ ID NO: 226472 - DNA, 120 bp, Artificial Sequence
  ENSG00000118369_25 (sequence is synthesized)
gctgagttgggctcttctagagtccggacagagcccaccctgcacaaggacttgatggaagccatttccaaagacaacatcctttacctacaggagcaggagaaggaggcccggagcagg

SEQ ID NO: 226473 - DNA, 120 bp, Artificial Sequence
  ENSG00000118369_26 (sequence is synthesized)
gcggcctacatctctgcactccccacatctccgcactgggggaggggctttgatgaagacaaggatgaggatgaaggctctccagggggctgcaatcctgcaggtggcaatggtggtgac

SEQ ID NO: 226474 - DNA, 120 bp, Artificial Sequence
  ENSG00000118369_27 (sequence is synthesized)
ttccacagactggtcttctaatgtgaacctgctgccaacctgaccccttccctccaggagccaggtagggcctgagggaagctgtggaggcaggccctaccaagaggaaggatggtacag

SEQ ID NO: 226475 - DNA, 120 bp, Artificial Sequence
  ENSG00000118369_28 (sequence is synthesized)
ctcatggcaccttagtcctcagcctgatgaagggtacacagagattctctcagatatggaagtaagacctaagtccctttcattggggatcagtcccattaaaactttacacccaagtgt

SEQ ID NO: 226476 - DNA, 120 bp, Artificial Sequence
  ENSG00000118369_29 (sequence is synthesized)
cctggttaacttgaagcagccgagatgggcacacacgggtctttgcctccccctccttccctagcaggctccccatgcgggaagatctgatgatgttcaggaaacaggctagacctcagc

SEQ ID NO: 226477 - DNA, 120 bp, Artificial Sequence
  ENSG00000118369_30 (sequence is synthesized)
tccaatgttttgacatcaagtactattttccttccgactgctgtacggtataaagcacagcaggatccaagccttgcacaaaggggtggggggggcagtgtctcctctggctgtcctgtt

SEQ ID NO: 226478 - DNA, 120 bp, Artificial Sequence
  ENSG00000118369_31 (sequence is synthesized)
tgtttgtttctcatatgggggtggggggtacctgcactgtctgtacctttctgagaagaacagagaccgagacctgcccccttaccaagcgccactgcatggttttgggggggggggcgg

SEQ ID NO: 226479 - DNA, 120 bp, Artificial Sequence
  ENSG00000118369_32 (sequence is synthesized)
ggggctagcttctcacagcaggaggcctttgcccccacagcccctccacgcctgcctcagggcctgagaagccaccacttgtatcccccttgtggttagagtcctgattttactgcaaag

SEQ ID NO: 226480 - DNA, 120 bp, Artificial Sequence
  ENSG00000118369_33 (sequence is synthesized)
gtgttcatgttccttgtgaagtgtgggctcttaggaagcctgtgggctcctctgagcagttggcctttgtagctgcaacagcagccacctgcaggttgggtgaagtgccctgacactgct

SEQ ID NO: 226481 - DNA, 120 bp, Artificial Sequence
  ENSG00000118369_34 (sequence is synthesized)
gtagcccccttctaacttctaaccgaagacaagacagacacccatgttcataaataaataaaagtaagcctaagcaagagattgttcttccttggactcaggggctgtgatggccactgg

SEQ ID NO: 226482 - DNA, 120 bp, Artificial Sequence
  ENSG00000118369_35 (sequence is synthesized)
gttttgctcacggggtctggggaggccaggactcagcctgccccccagtgacgtgtgagatgccacagggagccaagagccctctactgaatctactgaagtggggtgtaagtaaacgtg

SEQ ID NO: 226483 - DNA, 120 bp, Artificial Sequence
  ENSG00000118369_36 (sequence is synthesized)
tggactgactgacttacttaccttactgagggctgggtgatgctgcccgtggagaggatgcacctgggaggcagctctcaagcctttacctacctccttccccaggggctgcctgctgtg

SEQ ID NO: 226484 - DNA, 120 bp, Artificial Sequence
  ENSG00000118369_37 (sequence is synthesized)
atggtggtgtggagtttgggcccaatgtcacagaccctcaagatgtcacatctaagtgacctgtgaaagcagcagacagacacgcccagaacccatctctagacgcctaagaaagctgga

SEQ ID NO: 226485 - DNA, 120 bp, Artificial Sequence
  ENSG00000118369_38 (sequence is synthesized)
tgggtaaatgctagtatgatttccactttacaacagacgctgaggtagagagcatttgttcttattcacagccaagaaaaatacccaattatttccaaataaagcaaaaattggaacaga

SEQ ID NO: 226486 - DNA, 120 bp, Artificial Sequence
  ENSG00000118369_39 (sequence is synthesized)
cagtctgctgagtctaggctgttttcctcagcactgactgcatggcagctgtgtgctcagcccgcacaggcaggctgtgttgtggggtccagaggggctgatacatgtaaagttgatgga

SEQ ID NO: 226487 - DNA, 120 bp, Artificial Sequence
  ENSG00000118369_40 (sequence is synthesized)
atatcctgctcaatggtgaatacgacctaagtgttagctgctgttatctcctttaatccatacaagaaccctctgagggaggtattatccccattttacagaggaagaaactgaggccca

SEQ ID NO: 226488 - DNA, 120 bp, Artificial Sequence
  ENSG00000118369_41 (sequence is synthesized)
gagcggggaagtggcttgctctgggtcacacagcaaggacttgctggagccaaagcttctggcccaggggcagtgcccttccaggcagaagcagctgaaagccttgttctggcattgcag

SEQ ID NO: 226489 - DNA, 120 bp, Artificial Sequence
  ENSG00000118369_42 (sequence is synthesized)
cccagtgtggaggggcgagacttggggtgctgagagggcctggctcccttcttggtgggctgggagcctcagtgtctggcaggtggctgtgctgggcttgtgcatttcccagccatgtct

SEQ ID NO: 226490 - DNA, 120 bp, Artificial Sequence
  ENSG00000118369_43 (sequence is synthesized)
ggttcagcccacagaccccggggctgccctttgcaggtgtgagtcaatgtgggaacccaggacattacggatagcccctgggctgccctcaccccagcattttgggtgtcccttgtccct

SEQ ID NO: 226491 - DNA, 120 bp, Artificial Sequence
  ENSG00000118369_44 (sequence is synthesized)
tttgaatctttaagtcctgaacgtaggtctcagagctggaaggggctacaagggtcacctttgtacccttcattgtctaaaacatgtctattgttgtgttcctgacctcagataccccag

SEQ ID NO: 226492 - DNA, 120 bp, Artificial Sequence
  ENSG00000118369_45 (sequence is synthesized)
gctgagttgttcacctgctcctcctccccagcccctggcttctggctccgtcttggggcagaaatgtctgttctgcctttggcctagaggctctgggctgcctgtgacatgggtgactag

SEQ ID NO: 226493 - DNA, 120 bp, Artificial Sequence
  ENSG00000118402_0 (sequence is synthesized)
gcagactggtgcagcgcactgtgctggcggctgggcctcctccacctcctcgtctttctcccgggaaccttgacgacgccttccgcttggccctgccttctgccgcatccccgccgccgc

SEQ ID NO: 226494 - DNA, 120 bp, Artificial Sequence
  ENSG00000118402_1 (sequence is synthesized)
ggcgccttgaggagcaggagaagacgcagccgggccgccgccgttagaggggttcccggccgccgctcgccccgtcggccgccaccgcctccggggtcagccctctctctgggtctccgc

SEQ ID NO: 226495 - DNA, 120 bp, Artificial Sequence
  ENSG00000118402_2 (sequence is synthesized)
tttctcctgccgccagcgcccgctcatcgccgcgatggggctcctggactcggagccgggtagtgtcctaaacgtagtgtccacggcactcaacgacacggtagagttctaccgctggac

SEQ ID NO: 226496 - DNA, 120 bp, Artificial Sequence
  ENSG00000118402_3 (sequence is synthesized)
ctggtccatcgcagataagcgtgtggaaaattggcctctgatgcagtctccttggcctacactaagtataagcactctttatctcctgtttgtgtggctgggtccaaaatggatgaagga

SEQ ID NO: 226497 - DNA, 120 bp, Artificial Sequence
  ENSG00000118402_4 (sequence is synthesized)
ccgagaaccttttcagatgcgtctagtgctcattatctataattttgggatggttttgcttaacctctttatcttcagagagttattcatgggatcatataatgcgggatatagctatat

SEQ ID NO: 226498 - DNA, 120 bp, Artificial Sequence
  ENSG00000118402_5 (sequence is synthesized)
ttgccagagtgtggattattctaataatgttcatgaagtcaggatagctgctgctctgtggtggtactttgtatctaaaggagttgagtatttggacacagtgttttttattctgagaaa

SEQ ID NO: 226499 - DNA, 120 bp, Artificial Sequence
  ENSG00000118402_6 (sequence is synthesized)
gaaaaacaaccaagtttctttccttcatgtgtatcatcactgtacgatgtttaccttgtggtggattggaattaagtgggttgcaggaggacaagcattttttggagcccagttgaattc

SEQ ID NO: 226500 - DNA, 120 bp, Artificial Sequence
  ENSG00000118402_7 (sequence is synthesized)
ctttatccatgtgattatgtactcatactatgggttaactgcatttggcccatggattcagaaatatctttggtggaaacgatacctgactatgttgcaactgattcaattccatgtgac

SEQ ID NO: 226501 - DNA, 120 bp, Artificial Sequence
  ENSG00000118402_8 (sequence is synthesized)
cattgggcacacggcactgtctctttacactgactgccccttccccaaatggatgcactgggctctaattgcctatgcaatcagcttcatatttctctttcttaacttctacattcggac

SEQ ID NO: 226502 - DNA, 120 bp, Artificial Sequence
  ENSG00000118402_9 (sequence is synthesized)
atacaaagagcctaagaaaccaaaagctggaaaaacagccatgaatggtatttcagcaaatggtgtgagcaaatcagaaaaacaactcatgatagaaaatggaaaaaagcagaaaaatgg

SEQ ID NO: 226503 - DNA, 120 bp, Artificial Sequence
  ENSG00000118402_10 (sequence is synthesized)
aaaagcaaaaggagattaaattgaactgggccttaactgttgttgacagtgaggaaaaactcccatatcatataaaatttcagggaaaacagaagcaaaggagagcttgggggtggggag

SEQ ID NO: 226504 - DNA, 120 bp, Artificial Sequence
  ENSG00000118402_11 (sequence is synthesized)
aaaagacaaatgtgctctatgtcctagtaactcttagactgagtaaagtgttaataccatacccagatgttttatttatgaagtttttattttaaacattttttttaaaaattagccttg

SEQ ID NO: 226505 - DNA, 120 bp, Artificial Sequence
  ENSG00000118402_12 (sequence is synthesized)
caaagcaatcattaagtgactttggggattctccccctgttcacatccagttgtctaaaggatgagatttttcatgtatcttatagtcactcattcttcggtctgaattttagacgatca

SEQ ID NO: 226506 - DNA, 120 bp, Artificial Sequence
  ENSG00000118402_13 (sequence is synthesized)
cagaaacggtctttatgaattattttgataaattactaattatcttatctactgactgaaatcagtggtgttacattttcttgtccaaagctgaaaatgtgtatacacttaaacttgcac

SEQ ID NO: 226507 - DNA, 120 bp, Artificial Sequence
  ENSG00000118402_14 (sequence is synthesized)
atttgaattcatttgctgaccggaatggtcaaatctctccacctctagtcagagtataattttggttgtaattaaatttttaaaatctgctgatctctgtagaatcttagaggcttgatg

SEQ ID NO: 226508 - DNA, 120 bp, Artificial Sequence
  ENSG00000118402_15 (sequence is synthesized)
atgatggtgttggtgaaaataagaaagaattgcagtaaagtcttgtctggtgacccagagatcaccatgacttgaggcacaaatcactgtggggaaacaattttttgtgatgaaaaggca

SEQ ID NO: 226509 - DNA, 120 bp, Artificial Sequence
  ENSG00000118402_16 (sequence is synthesized)
gcatttgaatactcctgttagtagcagaaatatattatgaaaattaagattattgtctgattgaaacatgaaacaactcatgtctttattagtaacatcataagatagttacatttatgt

SEQ ID NO: 226510 - DNA, 120 bp, Artificial Sequence
  ENSG00000118402_17 (sequence is synthesized)
gctgttagaatatgttgatttttatcaggctttccttgttttgatttatggctgttcctgatttttcatatgtggaaatatacctacctcttccgttggaaagaacatttaaaattaaat

SEQ ID NO: 226511 - DNA, 120 bp, Artificial Sequence
  ENSG00000118402_18 (sequence is synthesized)
aaattttaattaaaaaatcaaggagtcttctaatgtaaattttaatgttaactttcaaatccactagtattttttttgcttttatgacaaatagcatacaccaaacatttctgtgaaact

SEQ ID NO: 226512 - DNA, 120 bp, Artificial Sequence
  ENSG00000118402_19 (sequence is synthesized)
atccttctctttcaatgtgtttaattttggagtaacgttttccttgtgactaagttgcaagatcttatttattaactaggtatgaagtataaacccattttggtgcaatattcttgactc

SEQ ID NO: 226513 - DNA, 120 bp, Artificial Sequence
  ENSG00000118402_20 (sequence is synthesized)
cttggtgctaaagattgttaaattcaatgcttgatgttacaaggtgttgttaaaacacaaaatgaataaaagtgagagtagtcagaactataacattcaatttgctatttacaaatgaag

SEQ ID NO: 226514 - DNA, 120 bp, Artificial Sequence
  ENSG00000118402_21 (sequence is synthesized)
tatttcatgtaatataagtgaacaactggaaataaagtaggaaagaatttgtatcatgttttactacataggttaattttttaagggatgttgcaaagggattactagagaaagacaaaa

SEQ ID NO: 226515 - DNA, 120 bp, Artificial Sequence
  ENSG00000118402_22 (sequence is synthesized)
tgtgaccaaaaaaaagcatgaatatttcttaagtatctcaacaacatgtcaaagctgcatgtgtaggatgtatgctgtttgtacaaactatttcagaatattttgtaagctataacatat

SEQ ID NO: 226516 - DNA, 120 bp, Artificial Sequence
  ENSG00000118402_23 (sequence is synthesized)
ttattgtgcattaaaattaaatactttttccccaaaggcatgcagtcatgagaattacagaaaatttgcaacatataaagtagtttgatctaagaggattcaacacctttgttttgttgc

SEQ ID NO: 226517 - DNA, 120 bp, Artificial Sequence
  ENSG00000118402_24 (sequence is synthesized)
tcagtgtgtaatgactgagatttgtaaatctttgtgaacattctgtactggttcccaagagctattcattccctgctacctgatttcagcacaataaatatacttctgctgtgggaaaaa

SEQ ID NO: 226518 - DNA, 120 bp, Artificial Sequence
  ENSG00000118407_0 (sequence is synthesized)
aacatagccattgctctgacagtgttgtgaagggagcagaagaggagaaacctaatctccgaacccaacaacacctagcaacagtagaaaaaacttttaaacaaaagtctgggtgggaga

SEQ ID NO: 226519 - DNA, 120 bp, Artificial Sequence
  ENSG00000118407_1 (sequence is synthesized)
tatacaacaacttccaatttctgctgatcgggatttcagggagaagaagctgctttccctcctctctactctgtttcctgcatgacttcagctattggctggtcctgggaaagaaagtgg

SEQ ID NO: 226520 - DNA, 120 bp, Artificial Sequence
  ENSG00000118407_2 (sequence is synthesized)
gaaaagctttttcctctgtattcttttgggctggatagtttttgagaactcgaatctgtcttgggctgtgagacaagccactgggttcttcaaaggataaactacctacatagaggacat

SEQ ID NO: 226521 - DNA, 120 bp, Artificial Sequence
  ENSG00000118407_3 (sequence is synthesized)
acctttggttaaaggagctgccgtcaggtgggaatgagatctcgaaaccaaggtggtgaaagtgcatctgatgggcatatctcctgtcccaagccctccatcatcggcaatgctggtgaa

SEQ ID NO: 226522 - DNA, 120 bp, Artificial Sequence
  ENSG00000118407_4 (sequence is synthesized)
aaaagtctctcagaagatgcaaaaaagaagaagaaatcaaataggaaggaggatgatgtcatggcctcaggaactgtcaaacgacacctaaaaacatctggagaatgtgaacgaaaaact

SEQ ID NO: 226523 - DNA, 120 bp, Artificial Sequence
  ENSG00000118407_5 (sequence is synthesized)
aagaaatccctggagttatccaaagaagacctcatccaactactcagtataatggaaggggagttgcaggccagagaagatgtgatccacatgctgaagacagagaaaaccaagcctgag

SEQ ID NO: 226524 - DNA, 120 bp, Artificial Sequence
  ENSG00000118407_6 (sequence is synthesized)
gttctggaggctcattacgggtctgcggagccagagaaagtgctgcgggtcctgcaccgagatgccattcttgcccaggagaaatccataggagaagatgtctatgagaaaccgatttca

SEQ ID NO: 226525 - DNA, 120 bp, Artificial Sequence
  ENSG00000118407_7 (sequence is synthesized)
gagctggacagacttgaggaaaaacagaaagaaacctaccggcgcatgctagagcagctgttgctggccgagaagtgtcataggcgcaccgtatacgagttagagaacgagaagcataaa

SEQ ID NO: 226526 - DNA, 120 bp, Artificial Sequence
  ENSG00000118407_8 (sequence is synthesized)
cacactgactacatgaacaagagcgacgacttcaccaacctgctggagcaggagcgggagaggttaaaaaagctccttgaacaagaaaaggcttatcaagcccgcaaagaaaaggaaaat

SEQ ID NO: 226527 - DNA, 120 bp, Artificial Sequence
  ENSG00000118407_9 (sequence is synthesized)
gctaaacgactcaataaactaagagatgagcttgttaaactcaaatcctttgcactcatgctggtggatgaaagacaaatgcacattgaacaacttggcctgcaaagccagaaagtacag

SEQ ID NO: 226528 - DNA, 120 bp, Artificial Sequence
  ENSG00000118407_10 (sequence is synthesized)
gatcttactcagaagctgagggaagaagaagagaagctcaaagccattacttccaaatccaaagaagacagacagaaattgctcaagttagaagtggactttgaacacaaggcttcgagg

SEQ ID NO: 226529 - DNA, 120 bp, Artificial Sequence
  ENSG00000118407_11 (sequence is synthesized)
ttttctcaagagcatgaagagatgaacgctaaactggctaatcaagagtctcacaataggcaacttagactcaagctggttggcttaacccaaagaatcgaggagctagaagagaccaac

SEQ ID NO: 226530 - DNA, 120 bp, Artificial Sequence
  ENSG00000118407_12 (sequence is synthesized)
aaaaatctgcagaaggcagaggaagaacttcaagaattaagagataaaattgccaaaggagaatgtggaaactctagcctcatggcagaagtggaaaatcttcgaaagcgtgtgcttgaa

SEQ ID NO: 226531 - DNA, 120 bp, Artificial Sequence
  ENSG00000118407_13 (sequence is synthesized)
atggaaggtaaagatgaggagatcactaaaactgaatcccagtgtagggaattgaggaagaagctgcaagaggaagaacaccatagtaaggagctcagacttgaagttgagaagctacag

SEQ ID NO: 226532 - DNA, 120 bp, Artificial Sequence
  ENSG00000118407_14 (sequence is synthesized)
aagagaatgtctgaactagagaaattggaagaagcatttagcaagagtaaatctgagtgcacccagctacatttaaatctggagaaagaaaagaacttaaccaaagacctgctaaatgaa

SEQ ID NO: 226533 - DNA, 120 bp, Artificial Sequence
  ENSG00000118407_15 (sequence is synthesized)
ttggaggtggtcaagagtcgagttaaagaattggaatgttctgaaagtagattggaaaaggctgaattaagcctaaaagatgatcttaccaagttgaagtcatttaccgtgatgctggtt

SEQ ID NO: 226534 - DNA, 120 bp, Artificial Sequence
  ENSG00000118407_16 (sequence is synthesized)
gatgaaaggaaaaatatgatggaaaaaataaaacaagaagagagaaaagtggatggactcaataaaaattttaaggtggaacaaggaaaagttatggatgtaactgaaaaactaattgaa

SEQ ID NO: 226535 - DNA, 120 bp, Artificial Sequence
  ENSG00000118407_17 (sequence is synthesized)
gaaagtaagaaacttttaaaactaaaatctgaaatggaggaaaaagtatacaacttgacaagagaaagagatgagttgataggcaaattgaaaagtgaagaagaaaaatcctctgaatta

SEQ ID NO: 226536 - DNA, 120 bp, Artificial Sequence
  ENSG00000118407_18 (sequence is synthesized)
agctgcagtgttgacttactaaagaagagacttgatggtatagaggaagtggaaagagaaataacaagaggaaggtcacgaaaagggtctgagctcacctgcccggaagataataagatt

SEQ ID NO: 226537 - DNA, 120 bp, Artificial Sequence
  ENSG00000118407_19 (sequence is synthesized)
agacagaagatgagtatgatcagctggaacagaaatttagaactgagcaggataaggctaacttcctctctcaacaactagaggagatcaagcaccaaattgccaagaataaagcaatag

SEQ ID NO: 226538 - DNA, 120 bp, Artificial Sequence
  ENSG00000118407_20 (sequence is synthesized)
agaagggtgaggttgtgagccaggaagctgaactgagacacagatttcggttggaagaagctaaaagtcgagacttaaaagccgaagtacaagctcttaaagagaagattcacgaattaa

SEQ ID NO: 226539 - DNA, 120 bp, Artificial Sequence
  ENSG00000118407_21 (sequence is synthesized)
tgaacaaagaagatcagctttctcagctccaggtagattattctgtacttcaacaaagatttatggaagaagaaaataagaacaaaaacatggggcaggaggttctcaatctgaccaaag

SEQ ID NO: 226540 - DNA, 120 bp, Artificial Sequence
  ENSG00000118407_22 (sequence is synthesized)
agttggagctttccaagcgctacagcagagctcttaggcccagtgtgaatggaagaagaatggtggatgttcctgtgacgtcaactggagtccaaactgatgcagtcagcggtgaagcag

SEQ ID NO: 226541 - DNA, 120 bp, Artificial Sequence
  ENSG00000118407_23 (sequence is synthesized)
cagaggaagaaacgccagctgtattcatacggaaatccttccaggaagaaaatcatattatgagtaatcttcggcaggtgggattgaagaaacccgtggaaagatcttctgttctagaca

SEQ ID NO: 226542 - DNA, 120 bp, Artificial Sequence
  ENSG00000118407_24 (sequence is synthesized)
ggtatcctccagcagcaaatgagctcactatgagaaagtcttggattccatggatgagaaagagggaaaacggcccctccatcactcaggagaaagggccccgaacaaattccagtccag

SEQ ID NO: 226543 - DNA, 120 bp, Artificial Sequence
  ENSG00000118407_25 (sequence is synthesized)
ggcacccaggagaggtagtcctttcaccaaagcagggccagcccctgcatattcgagtgacaccagaccacgagaacagcactgcgactttggagataacaagcccgacatctgaagaat

SEQ ID NO: 226544 - DNA, 120 bp, Artificial Sequence
  ENSG00000118407_26 (sequence is synthesized)
ttttttctagtaccactgtcattcctaccttagggaatcagaaaccaagaataaccattattccatcaccaaacgttatgcctcaaaaacaaaaaagtggagatactactcttggcccag

SEQ ID NO: 226545 - DNA, 120 bp, Artificial Sequence
  ENSG00000118407_27 (sequence is synthesized)
aacgagccatgtccccagtcacaattactacattttccagagagaagactccagaaagtggaagaggcgcatttgcagacaggcccacatcccctattcagataatgacggtgtctacat

SEQ ID NO: 226546 - DNA, 120 bp, Artificial Sequence
  ENSG00000118407_28 (sequence is synthesized)
cagcagcaccagctgagattgcagtttctcccgaatcccaggaaatgcccatgggacggacaatcctcaaagtcaccccagaaaaacagactgttccaactccagtacggaaatacaact

SEQ ID NO: 226547 - DNA, 120 bp, Artificial Sequence
  ENSG00000118407_29 (sequence is synthesized)
ccaatgccaatatcataaccacagaggacaataaaattcacattcacttagggtctcagtttaaacggtcccctgggacttcaggtgaaggagtcagtccagttattactgtccgaccag

SEQ ID NO: 226548 - DNA, 120 bp, Artificial Sequence
  ENSG00000118407_30 (sequence is synthesized)
taaacgtgacagccgaaaaggaggtttccaccggcactgtccttcgctctcccaggaatcacctctcctcacggcctggtgcaagcaaagtgacgagcactatcaccataacaccggtca

SEQ ID NO: 226549 - DNA, 120 bp, Artificial Sequence
  ENSG00000118407_31 (sequence is synthesized)
caacgtcatctgctcgaggaacccagtcagtgtcaggacaagacgggtcatcccagcggcctacacccacccgcattcctatgtcaaaaggtatgaaagcaggaaagccagtagtggcag

SEQ ID NO: 226550 - DNA, 120 bp, Artificial Sequence
  ENSG00000118407_32 (sequence is synthesized)
ccccaggagcaggaaatctgaccaaattcgagcctcgagctgagactcagtctatgaaaatagagctgaagaaatctgcagccagcagcaccacctctctcggaggggggaagggctgag

SEQ ID NO: 226551 - DNA, 120 bp, Artificial Sequence
  ENSG00000118407_33 (sequence is synthesized)
ggcagtggctaagggggtatgttgtgcagatgctactgctgccgtgaaagtgaaccttcatctgtttgtgccagttctttacatgtactaatttaagttttaaatattgtgtttataaaa

SEQ ID NO: 226552 - DNA, 120 bp, Artificial Sequence
  ENSG00000118407_34 (sequence is synthesized)
taaccaactaataaccatttgtctttcccattttgtgcatttgttttgatgctggggaacaaaattagcaaaactattgcttgctgcctagaagccagggcgtggtttctagttccagtt

SEQ ID NO: 226553 - DNA, 120 bp, Artificial Sequence
  ENSG00000118407_35 (sequence is synthesized)
ttgcttctagcaagtggacccatcaatagacccatctgagcctgtttcctcatcagttagatgtggggactcaatcacacgctcttcaagtccggctcccatatttcctaattgcaagcc

SEQ ID NO: 226554 - DNA, 120 bp, Artificial Sequence
  ENSG00000118407_36 (sequence is synthesized)
aaatttaatgtaccttgttccacaataattttttattaaaaaaatcctattacaaaataagacatactttaactattgtcatttgcctctttcacatcatgaatttgctttatgtgctgg

SEQ ID NO: 226555 - DNA, 120 bp, Artificial Sequence
  ENSG00000118407_37 (sequence is synthesized)
aaaaaacatcacatagctatcacagggcctggacctctaaaattttgcaaaaacaaaaggttctaagatgatttcaggaaataatgtgaacatgtaataaaatggaaatgaaatatggaa

SEQ ID NO: 226556 - DNA, 120 bp, Artificial Sequence
  ENSG00000118407_38 (sequence is synthesized)
attcaataagctctctgttgattttttgagcccagtatgcgatttacattgtcagtcgtctgatcttgctgcactttctattacaggccagagaagatgtgatccacatgctgaagacag

SEQ ID NO: 226557 - DNA, 120 bp, Artificial Sequence
  ENSG00000118407_39 (sequence is synthesized)
attgttctgatgacagggctggaatgtgacggttaattccctgtggagtagggggctgagcaaggcctgctgctgttgaacaaacttcagtacccccttataaaaaaacaaaaacaaaaa

SEQ ID NO: 226558 - DNA, 120 bp, Artificial Sequence
  ENSG00000118407_40 (sequence is synthesized)
atcatcattcaccagttacgaatgaactccagatgaaatggtaaaccaagcacatactgggtgtgtgtacgacctctgaatccctattgaatggacagccctcaatcatgactaaggtcc

SEQ ID NO: 226559 - DNA, 120 bp, Artificial Sequence
  ENSG00000118407_41 (sequence is synthesized)
tactgatcactactggaaatattttactacttccagtgatttttttttaaggatataatgtaaaaagctgaaaatggccttgctgataatatgaaaatatgtagcaagagcaattcaatc

SEQ ID NO: 226560 - DNA, 120 bp, Artificial Sequence
  ENSG00000118407_42 (sequence is synthesized)
tatgtgccaaaagaaatttctttttgcaaagctttcaggtctatgggcacatgctgtataacttatattttataatacattttgtaatgtgattttttttgctaaagtgtttcccttttt

SEQ ID NO: 226561 - DNA, 120 bp, Artificial Sequence
  ENSG00000118407_43 (sequence is synthesized)
catagtctctggcacatatatctatggaatacgctgtcagttcttcaaagtactggtattgttgcattcaaaatggtaatctataattattttctttttatcaatttgttaattctgaaa

SEQ ID NO: 226562 - DNA, 120 bp, Artificial Sequence
  ENSG00000118407_44 (sequence is synthesized)
aaaagaaagtacaactatatttcctgaggtaaattcaagaggtaaaacttagaagcaggagactctggaagaggttttactattgcttgtacaatgctatggttctgatcatggttcaat

SEQ ID NO: 226563 - DNA, 120 bp, Artificial Sequence
  ENSG00000118407_45 (sequence is synthesized)
gctaacaaataatgctctgacttaaaagcttaattttaaatactaaaaatcagtttctaaagttgctctttctggtgttctgggccaaaaaccttggatgaaatgatttttatatagaac

SEQ ID NO: 226564 - DNA, 120 bp, Artificial Sequence
  ENSG00000118407_46 (sequence is synthesized)
aaattcataaaaggagatgtaccagtttaaccagtaagggcaataagaacagcttcgactgacagttcaattatacttctgattgcattatttacttgtatgtataagacttataataag

SEQ ID NO: 226565 - DNA, 120 bp, Artificial Sequence
  ENSG00000118407_47 (sequence is synthesized)
gactgtgaaataaagatagttctcacaatctaatccaatcaaaacttgaatataaaaacagacctaaaatgtcaggatcttttttaaaaaataagactgggcatggtgggtcgtgcctgt

SEQ ID NO: 226566 - DNA, 77 bp, Artificial Sequence
  ENSG00000118407_48 (sequence is synthesized)
cactttgggaggccaaggcgggagaatcgcttaagcccaggagttcaggatcagcctgggcaacacagtgagctggg

SEQ ID NO: 226567 - DNA, 120 bp, Artificial Sequence
  ENSG00000118407_49 (sequence is synthesized)
acagagtgagactctgtctcaaaacaaagacaaacccacacacacacaaaaacccccaaaacccagaaggaaaaagtagtacaagaaatctcaggatcgataacttttttccccttgatt

SEQ ID NO: 226568 - DNA, 120 bp, Artificial Sequence
  ENSG00000118407_50 (sequence is synthesized)
ccttgattttgaaagattttcgtaactacaggtaggtcagagaatatattctttgaagataaaaagcacaacgtgcattactcaaatctcaacgtcagagctactgttgaatttaggttt

SEQ ID NO: 226569 - DNA, 120 bp, Artificial Sequence
  ENSG00000118407_51 (sequence is synthesized)
atgtgaaaatgtgcatctaaagtctacttgaaaccctggtaatatacttttttttttaaagactgttaatatggacatgtttttagtaaggtctttaaagataactttaaagataaatta

SEQ ID NO: 226570 - DNA, 120 bp, Artificial Sequence
  ENSG00000118407_52 (sequence is synthesized)
agagttgacacatcagtttctgaatgtggaagtcatttatcatgtaactttactgaaattaaagagagaatgcttctgagtgtcacaaggataactaaaagccacacaaggaggactgct

SEQ ID NO: 226571 - DNA, 120 bp, Artificial Sequence
  ENSG00000118407_53 (sequence is synthesized)
ggcccatttctctagttcacaggttgtgctcagctttagaagcccacacacgggcatccaaactgagtctctggaatagaaaaattaatgatggacttcctcccctatgtaaccttggaa

SEQ ID NO: 226572 - DNA, 120 bp, Artificial Sequence
  ENSG00000118407_54 (sequence is synthesized)
ggttttaagttacaccttggggaattggcaaatcattttcaacatgtattataaattatatgatgttaaaattatttttaattttttaaagtaaaagaaatgttacagtaggcttgccat

SEQ ID NO: 226573 - DNA, 120 bp, Artificial Sequence
  ENSG00000118407_55 (sequence is synthesized)
agcttgaatgattgtgaaaacatcacataaacttccagaattttggttactaagaaaactggagtgtgtatgtgtgattttttagaattgttactgggttttgttttctgaaaatgttga

SEQ ID NO: 226574 - DNA, 120 bp, Artificial Sequence
  ENSG00000118407_56 (sequence is synthesized)
ctgtaatgacattttcaattagaaaagtgttttagttagtactgttatattttttgactcacagttaagtatcctatttgccaatgtttgtacctctgatggcaaaattatttgatatat

SEQ ID NO: 226575 - DNA, 120 bp, Artificial Sequence
  ENSG00000118407_57 (sequence is synthesized)
ggcaaaattatttgatatattagattagtatttgaagcaaataactttctcaacttgtgggaattttattatactaatagtgaaaatgttagaggataagattttaaatacttcttgatt

SEQ ID NO: 226576 - DNA, 120 bp, Artificial Sequence
  ENSG00000118407_58 (sequence is synthesized)
aatgtatgtatatttggatttgaagattttttttccccagatttataatgaatttggaacttacaagaacaatgaggatgatggtgcaatcagagtcatttagatagatggtgagccttt

SEQ ID NO: 226577 - DNA, 120 bp, Artificial Sequence
  ENSG00000118407_59 (sequence is synthesized)
tctgtccatgctatgattaagtcctctgtttaaacccaaatgcaatctgagtgacacatgaataaaattaattagattaattttgaaataagagaatatgcaaaattaaccaaaaaaccc

SEQ ID NO: 226578 - DNA, 120 bp, Artificial Sequence
  ENSG00000118407_60 (sequence is synthesized)
ccagaaaacactggtcatctccttctctaatgaataaggaaataagatcataaatagtcccatctcaacatgcatatgcaattgaaaaaactgccctcacaggcaatcctggcacaatcc

SEQ ID NO: 226579 - DNA, 120 bp, Artificial Sequence
  ENSG00000118407_61 (sequence is synthesized)
taggctcataaaatttctctatcttttcttgtaaataagtctccagtcatcattctaaatgggaatcatttttaatgaaataattataactgttttctgaaatataatcataatcagtgt

SEQ ID NO: 226580 - DNA, 120 bp, Artificial Sequence
  ENSG00000118407_62 (sequence is synthesized)
ttctagttcaaggtacaattgaactaatccataattttacccttttctttttgataagagagtgtttcatgagggtatctttggtagagatcttttctcaagtattttataaaatattcg

SEQ ID NO: 226581 - DNA, 120 bp, Artificial Sequence
  ENSG00000118407_63 (sequence is synthesized)
agtttgatgaagatggtagataaatacaccagctgtcagatgcctataattttcacaaaatgtgaagaattcattgtatcttaggatgaccataaaaaaattcatggtgtggaatctcta

SEQ ID NO: 226582 - DNA, 120 bp, Artificial Sequence
  ENSG00000118407_64 (sequence is synthesized)
agcattaatagagacaacagcgctactgcagtaatacacagctactacaaatcagtggcagagcaagaataagtggtgtatcaggcaatgtgaagtttttgccttttctcctaatgctgt

SEQ ID NO: 226583 - DNA, 120 bp, Artificial Sequence
  ENSG00000118407_65 (sequence is synthesized)
ggttgagttttcctggaaatgaaggaaaaaaacatagcaaaagtagggtgtgttaatgaatctgatgagcaacaagtctaaaaatagcaaaagtgcaaaatggaagttaaaaaacgcaac

SEQ ID NO: 226584 - DNA, 120 bp, Artificial Sequence
  ENSG00000118407_66 (sequence is synthesized)
tggcacctgaagcatatttccccttctttatctccagtgctatgcctctgctaaaaatatgaatcacaaagcaaaggaaaaagagaaaaaaagtgttgtaatacagtaaaaatcactata

SEQ ID NO: 226585 - DNA, 120 bp, Artificial Sequence
  ENSG00000118407_67 (sequence is synthesized)
ataaaagtttataagaattgagttttttggaattgactttggcctagtaaccattagtatttcttaatttttcagcatttattccatactaatgtgataacaactgtgtgtgttacctag

SEQ ID NO: 226586 - DNA, 120 bp, Artificial Sequence
  ENSG00000118407_68 (sequence is synthesized)
agaaaatgctgtagatccacacatttgaacagaaatgtttatcgatgccataacgtgatacatttgctttccggtgttgttttttgtttatattatttagggaaattttaccttaccatc

SEQ ID NO: 226587 - DNA, 120 bp, Artificial Sequence
  ENSG00000118407_69 (sequence is synthesized)
acagattttgttactttaataatgcagaactatatttatttaatctagattttgttttaaaattatcaagtgttagcttttacaaataagaggcttataatgtggccagatattcttaga

SEQ ID NO: 226588 - DNA, 120 bp, Artificial Sequence
  ENSG00000118407_70 (sequence is synthesized)
attcttttaggtctaagtgttttcaaaactttaagaaatacattctatttttgcaccatttaaaattttgtttccttttaagttttattaagtacacgagaagtttattatttttcattg

SEQ ID NO: 226589 - DNA, 120 bp, Artificial Sequence
  ENSG00000118407_71 (sequence is synthesized)
aatccaagtgaatttatggatatgtacttatcttttatatgaatgtaatagcttgctttcagttcctcacaggtcattgaaattatttaaccaatgaaaacattctctgttacttccaaa

SEQ ID NO: 226590 - DNA, 120 bp, Artificial Sequence
  ENSG00000118407_72 (sequence is synthesized)
gtcaactatgtttatcaaaatctcactagtgtgagaaaaataacaagtgtaatattaaagcattgtgcaatatcttgagttggaacataatattcagaaaattaaaatcatttaaaatga

SEQ ID NO: 226591 - DNA, 120 bp, Artificial Sequence
  ENSG00000118412_0 (sequence is synthesized)
aaaggaaccgggttgtcttgggccgggcagggcgggtaagttgtcgtaggggcccggtccgtgagggactgctaaggaagaggctgcatggcgcggtagtcccccgagtggaggtcggct

SEQ ID NO: 226592 - DNA, 120 bp, Artificial Sequence
  ENSG00000118412_1 (sequence is synthesized)
gcccctgggaaaccagagagtcggagggagtccatctggagcggccaagtaggtcggggaagggccgcgcctgacgtctggccgcaggtggtgactctcaaaaggaaataggatcatggc

SEQ ID NO: 226593 - DNA, 120 bp, Artificial Sequence
  ENSG00000118412_2 (sequence is synthesized)
agcagatgatgacaatggtgatggaacaagtttatttgatgtcttttctgcttctcctcttaagaacaatgatgaaggctcactggacatatacgctgggttggacagtgctgtttctga

SEQ ID NO: 226594 - DNA, 120 bp, Artificial Sequence
  ENSG00000118412_3 (sequence is synthesized)
cagcgcttccaaatcctgtgtaccatcaagaaattgtttggacttatatgaagagatcctgactgaagaaggaactgcaaaggaggcaacatataatgatttgcaagtagaatatggaaa

SEQ ID NO: 226595 - DNA, 120 bp, Artificial Sequence
  ENSG00000118412_4 (sequence is synthesized)
atgtcaactacaaatgaaagagctgatgaaaaaatttaaagaaatacagacacagaatttcagcttaataaacgaaaaccagtctcttaagaagaatatttcagcacttatcaaaactgc

SEQ ID NO: 226596 - DNA, 120 bp, Artificial Sequence
  ENSG00000118412_5 (sequence is synthesized)
cagagtggaaataaaccgcaaggatgaagaaataagtaatcttcaccaaagattgtctgagtttccacattttcgaaataatcataaaactgcaaggacatttgatacagttaaaacaaa

SEQ ID NO: 226597 - DNA, 120 bp, Artificial Sequence
  ENSG00000118412_6 (sequence is synthesized)
agatcttaaatctagatctccacatttggatgattgttcaaagactgatcacagagctaaaagtgatgtttctaaagatgtacatcatagcacttcactgccaaatctggaaaaggaagg

SEQ ID NO: 226598 - DNA, 120 bp, Artificial Sequence
  ENSG00000118412_7 (sequence is synthesized)
aaaaccacattctgataaaaggagtacttcacatttacctacatctgttgagaaacactgcactaatggtgtttggtcacgttctcattatcaggttggcgagggtagctcaaatgagga

SEQ ID NO: 226599 - DNA, 120 bp, Artificial Sequence
  ENSG00000118412_8 (sequence is synthesized)
tagtagaagaggaagaaaagatattagacatagccagtttaacagaggaactgaaagagtacgaaaagacttaagtactggctgtggtgatggtgaaccaaggatattggaggctagtca

SEQ ID NO: 226600 - DNA, 120 bp, Artificial Sequence
  ENSG00000118412_9 (sequence is synthesized)
aaggctacaaggacatcctgagaaatatggtaaaggtgaaccaaagactgaaagcaaaagttcgaagtttaaaagtaactcagattctgactataaaggtgaacgcattaactcttcttg

SEQ ID NO: 226601 - DNA, 120 bp, Artificial Sequence
  ENSG00000118412_10 (sequence is synthesized)
ggagaaagagacccctggagaaaggtcacacagtcgagtagactctcaaagtgacaaaaaactagaaagacaaagtgaaagatcacaaaatataaataggaaagaagttaaatcacaaga

SEQ ID NO: 226602 - DNA, 120 bp, Artificial Sequence
  ENSG00000118412_11 (sequence is synthesized)
caaagaagaaagaaaagttgatcaaaaacctaaatcagtagtaaaggaccaagatcactggagaagatctgaacgagcatcacttcctcattccaagaatgaaataacattttctcataa

SEQ ID NO: 226603 - DNA, 120 bp, Artificial Sequence
  ENSG00000118412_12 (sequence is synthesized)
ttcaagtaaataccatctagaagagagaagaggatgggaagattgtaaaagagacaagagtgtaaacagtcatagttttcaagatggaagatgtccatcttctctttcaaacagtagaac

SEQ ID NO: 226604 - DNA, 120 bp, Artificial Sequence
  ENSG00000118412_13 (sequence is synthesized)
tcacaaaaacattgactctaaggaagttgatgccatgcatcagtgggaaaatacacctttaaaagcagaaagacatagaactgaagataagaggaaaagagaacaagaaagcaaagaaga

SEQ ID NO: 226605 - DNA, 120 bp, Artificial Sequence
  ENSG00000118412_14 (sequence is synthesized)
aaataggcatattagaaatgaaaaaagagtacctacagaacatttgcagaagactaataaggaaactaagaaaaccactactgatttaaagaaacagaatgaaccaaagactgataaggg

SEQ ID NO: 226606 - DNA, 120 bp, Artificial Sequence
  ENSG00000118412_15 (sequence is synthesized)
agaagtccttgataatggtgtttctgaaggagcagataataaagagcttgcaatgaaagctgagagtggtccaaatgaaacaaaaaacaaggacctaaaattgagttttatgaaaaaatt

SEQ ID NO: 226607 - DNA, 120 bp, Artificial Sequence
  ENSG00000118412_16 (sequence is synthesized)
gaacttaactctttctcctgctaaaaagcaacctgtttcccaggataatcagcataaaataactgatattcccaagtccagtggtgtatgtgattcagagtcttcaatgcaagttaaaac

SEQ ID NO: 226608 - DNA, 120 bp, Artificial Sequence
  ENSG00000118412_17 (sequence is synthesized)
agtggcatatgttccctccataagtgaacatatcttgggggaagcagctgtcagtgaacataccatgggggaaaccaagtcaacgttattggaaccaaaggttgctcttctagcagtgac

SEQ ID NO: 226609 - DNA, 120 bp, Artificial Sequence
  ENSG00000118412_18 (sequence is synthesized)
tgaacccaggatcggtatctcagaaaccaacaaggaagacgaaaatagtttgttagttaggtctgttgacaatactatgcattgtgaagagcccatttgtggtacagagacttccttccc

SEQ ID NO: 226610 - DNA, 120 bp, Artificial Sequence
  ENSG00000118412_19 (sequence is synthesized)
atctcctatggaaatacaacagacagaatccttgtttccatcaacaggaatgaaacaaaccattaataatggaagggcagcagctcctgtggtaatggatgtattacaaacagatgtgtc

SEQ ID NO: 226611 - DNA, 120 bp, Artificial Sequence
  ENSG00000118412_20 (sequence is synthesized)
tcaaaactttggcttggaattggataccaaaagaaatgataattcagattattgtggtatttctgaaggtatggagatgaaggtggcactttcaacaacagtgagtgaaaccactgaaag

SEQ ID NO: 226612 - DNA, 120 bp, Artificial Sequence
  ENSG00000118412_21 (sequence is synthesized)
cattttgcagccttcaattgaggaagctgatattttgccaataatgctttcagaagataataacccaaaatttgagccttctgttatagttacaccactggttgagagtaagtcgtgtca

SEQ ID NO: 226613 - DNA, 120 bp, Artificial Sequence
  ENSG00000118412_22 (sequence is synthesized)
tctggagccttgcttacctaaagagactctagattcttcacttcagcagactgagttaatggaccacagaatggcaactggtgaaacaaactcagtatatcatgatgatgataactcggt

SEQ ID NO: 226614 - DNA, 120 bp, Artificial Sequence
  ENSG00000118412_23 (sequence is synthesized)
tttgagcattgaccttaatcacctgagacctattccagaagccatcagtcctctgaatagtccagtgagacctgtagcaaaagttcttagaaatgaaagcccacctcaagttccagtgta

SEQ ID NO: 226615 - DNA, 120 bp, Artificial Sequence
  ENSG00000118412_24 (sequence is synthesized)
taataacagtcataaagatgtgtttttaccaaattcagctcattctacctctaagagtcagtctgatctcaataaggaaaatcaaaagccaatttacaaatctgacaaatgtacagaagc

SEQ ID NO: 226616 - DNA, 120 bp, Artificial Sequence
  ENSG00000118412_25 (sequence is synthesized)
ttagaagaaggagaaattagaagtgatagtgaaacatctaaaccacaagaaagttttgaaaaaaattccaaacgtagagtgtcagctgatgtgcggaagtcaaagactatcccacgacgt

SEQ ID NO: 226617 - DNA, 120 bp, Artificial Sequence
  ENSG00000118412_26 (sequence is synthesized)
gggaaaagtactgtgtgtttagataaagacagtaggaaaacacatgtaagaatccatcagaccaataacaaatggaataaaagacctgataaatctagcagatcttcaaaaacagagaag

SEQ ID NO: 226618 - DNA, 120 bp, Artificial Sequence
  ENSG00000118412_27 (sequence is synthesized)
aaagataaagtgatgagcacttccagcttggaaaaaatagttccaattattgctgtaccctcttctgaacaagagatcatgcacatgttacgaatgataagaaaacatgtaagaaaaaat

SEQ ID NO: 226619 - DNA, 120 bp, Artificial Sequence
  ENSG00000118412_28 (sequence is synthesized)
tatatgaaattcaaggcaaaattttcattaatacaatttcacagaattattgagtcagcaattttgagttttacatctttaattaaacatctcaacttacacaaaatctctaagtcagtg

SEQ ID NO: 226620 - DNA, 120 bp, Artificial Sequence
  ENSG00000118412_29 (sequence is synthesized)
actaccttacagaagaatctctgtgatattatagagtctaaacttaagcaagttaaaaagaatggcatagttgatcgtttatttgaacagcaactaccagatatgaaaaaaaaattgtgg

SEQ ID NO: 226621 - DNA, 120 bp, Artificial Sequence
  ENSG00000118412_30 (sequence is synthesized)
aagtttgtagatgaccaacttgattatttgtttgcaaagcttaagaaaatcttagtatgtgattccaaaagctttggaagagatagtgatgaaggcaaacttgaaaaaacaagtaaacag

SEQ ID NO: 226622 - DNA, 120 bp, Artificial Sequence
  ENSG00000118412_31 (sequence is synthesized)
aatgcacagtattcaaatagtcagaaaaggagtgtggacaactccaacagagaattgctgaaagaaaaattatcaaaatcagaagaccctgttcattataagtctttagtgggatgtaaa

SEQ ID NO: 226623 - DNA, 120 bp, Artificial Sequence
  ENSG00000118412_32 (sequence is synthesized)
aaatctgaggaaaattatcaagaccaaaataactccagtattaacactgtaaagcatgacattaaaaaaaattttaacatctgctttgataatataaagaactctcaatccgaagagcgc

SEQ ID NO: 226624 - DNA, 120 bp, Artificial Sequence
  ENSG00000118412_33 (sequence is synthesized)
tccttggaagtacactgtccaagcaccccaaagtcagaaaaaaacgaaggaagcagcatagaggatgcacagacatcccagcatgcaactttgaagccagaacgaagtttcgagattctt

SEQ ID NO: 226625 - DNA, 120 bp, Artificial Sequence
  ENSG00000118412_34 (sequence is synthesized)
accgaacagcaagcatcgagccttacttttaatttagtgagtgatgcacaaatgggtgaaatatttaaaagtttgttgcaaggttctgatcttttagacagcagtgttaactgtactgaa

SEQ ID NO: 226626 - DNA, 120 bp, Artificial Sequence
  ENSG00000118412_35 (sequence is synthesized)
aaaagtgagtgggagttaaagactccagagaagcagctgctagagactcttaagtgcgagtctataccagcttgtacaacagaagagctagtttcaggggtggcttctccatgtcctaaa

SEQ ID NO: 226627 - DNA, 120 bp, Artificial Sequence
  ENSG00000118412_36 (sequence is synthesized)
atgattagtgatgataattggtcattattatcatctgaaaaaggtccatctctgtcttcagggctttcattgccggttcatcctgatgtgttggatgaaagttgtatgtttgaagtgtct

SEQ ID NO: 226628 - DNA, 120 bp, Artificial Sequence
  ENSG00000118412_37 (sequence is synthesized)
actaacctacctttaagtaaagataatgtgtgtagtgtagaaaagagcaagccctgcgtttcttccatacttcttgaagatctagcagtctctttaacagtaccatcgcctctgaagtca

SEQ ID NO: 226629 - DNA, 120 bp, Artificial Sequence
  ENSG00000118412_38 (sequence is synthesized)
gatggtcatctcagttttttaaagcctgatatgtcgtccagttcaactcctgaagaagtcattagtgctcattttagtgaagatgccttacttgaggaagaggatgcatctgagcaagat

SEQ ID NO: 226630 - DNA, 120 bp, Artificial Sequence
  ENSG00000118412_39 (sequence is synthesized)
attcatttagctctggagtctgataattcaagcagtaaatcaagttgttcttcttcctggacaagccgatctgttgctccaggctttcagtaccaccctaatctacctatgcatgccgtc

SEQ ID NO: 226631 - DNA, 120 bp, Artificial Sequence
  ENSG00000118412_40 (sequence is synthesized)
ataatggaaaagtccaatgatcatttcattgtgaaaatacgacgtgcaacaccatctacctcttctggccttaaacagagtatgatgcctgatgaattattgacatctttgcccagacat

SEQ ID NO: 226632 - DNA, 120 bp, Artificial Sequence
  ENSG00000118412_41 (sequence is synthesized)
ggaaaggaagctgatgaaggaccagagaaagaatatatttcatgtcagaacacagtttttaaatctgtggaggaattggaaaactccaacaaaaatgttgatggcagcaagtcaactcat

SEQ ID NO: 226633 - DNA, 120 bp, Artificial Sequence
  ENSG00000118412_42 (sequence is synthesized)
gaagaacagagctctatgatacaaacacaggttcctgatatatatgaatttcttaaagatgcttcagataagatgggtcatagtgatgaagtggctgatgaatgtttcaaattgcatcaa

SEQ ID NO: 226634 - DNA, 120 bp, Artificial Sequence
  ENSG00000118412_43 (sequence is synthesized)
gtatgggaaacaaaagtgcctgaaagcattgaagaattgccttcaatggaagaaatctcacactctgttggggaacatcttccaaacacatacgtagatctaacgaaagatccagtcact

SEQ ID NO: 226635 - DNA, 120 bp, Artificial Sequence
  ENSG00000118412_44 (sequence is synthesized)
gaaaccaaaaacttgggggaattcatagaagtaacagttttacatattgatcagttgggatgttctggaggcaatttaaatcagagtgctcaaatattagacaattctttgcaggctgat

SEQ ID NO: 226636 - DNA, 120 bp, Artificial Sequence
  ENSG00000118412_45 (sequence is synthesized)
actgtaggtgcttttattgatttgacacaagatgcttcaagtgaggctaaaagtgaaggtaatcatcctgcattagctgtggaagacttgggatgtggggtgatacaggtagatgaagat

SEQ ID NO: 226637 - DNA, 120 bp, Artificial Sequence
  ENSG00000118412_46 (sequence is synthesized)
aattgtaaggaagaaaaggcacaagtggcaaacaggcctttaaaatgcattgttgaggaaacctatatcgacttgaccacagaatctcccagttcatgtgaagtaaaaaaagatgagtta

SEQ ID NO: 226638 - DNA, 120 bp, Artificial Sequence
  ENSG00000118412_47 (sequence is synthesized)
aaatcagagccaggatcaaattgtgataactcggagttgcctgggactttgcataattctcacaaaaagagaagaaacatttctgatctaaatcatcctcataaaaaacaaagaaaggaa

SEQ ID NO: 226639 - DNA, 120 bp, Artificial Sequence
  ENSG00000118412_48 (sequence is synthesized)
acagacttaactaataaggaaaagaccaagaaacctacccaagattcttgtgagaatactgaagctcaccaaaagaaagccagtaagaagaaggcccctcctgtgactaaagatccctca

SEQ ID NO: 226640 - DNA, 120 bp, Artificial Sequence
  ENSG00000118412_49 (sequence is synthesized)
tcattaaaggcaaccccagggattaaggattcatcagcagcacttgccacttctacaagtctttctgcaaaaaatgttattaaaaagaagggagaaattatcattttatggacaagaaat

SEQ ID NO: 226641 - DNA, 120 bp, Artificial Sequence
  ENSG00000118412_50 (sequence is synthesized)
gatgaccgggaaattttattggagtgtcagaaaagagggccatcatttaaaacatttgcatatttagccgccaagttggataaaaatccaaatcaggtaactacccaatttttacatctc

SEQ ID NO: 226642 - DNA, 120 bp, Artificial Sequence
  ENSG00000118412_51 (sequence is synthesized)
gatattgcatactacacagaagcttcaaattcctcatgttttaaatgagcactagagggaggtttatcacctttttggttaccagatgataatctatatttgttattactcagtgactct

SEQ ID NO: 226643 - DNA, 120 bp, Artificial Sequence
  ENSG00000118412_52 (sequence is synthesized)
ctaatttcacatcagcatgttcagcttgtgctagtcatcattctgatttgcttatctgtttttggtcaaaatatttatttttaaacatgttagaacttaccaaaatgaaagcaacagtga

SEQ ID NO: 226644 - DNA, 120 bp, Artificial Sequence
  ENSG00000118412_53 (sequence is synthesized)
tgtattgaaatcttagttttgatattttaaagaaatgactttctagattaaaaaaatagttttgtagcattttaaacttagtgactatttagttcaattgttcatccattttttatttgc

SEQ ID NO: 226645 - DNA, 120 bp, Artificial Sequence
  ENSG00000118412_54 (sequence is synthesized)
ttgcttttataattgcctccttgttttggtatattgtaaaataatttaaataatgtatttataaatatgtataattatgatgtaaaataccgtgtgtatatgtatgtatgtgtgtttctg

SEQ ID NO: 226646 - DNA, 120 bp, Artificial Sequence
  ENSG00000118412_55 (sequence is synthesized)
tgcacacacataaacggctttgcctagccaaggattttttttatctgtataaaactttttgtataaagtttgctttcaataacagtaatgtataataaaaccatgtaaagttttgttgta

SEQ ID NO: 226647 - DNA, 120 bp, Artificial Sequence
  ENSG00000118412_56 (sequence is synthesized)
cttcgagagggtctgggcggggactatgggtgggcgcgcccaggaattgtcccttcggcctctcgtcctgcccctcccccccaccatccagtctctccttggaatatactcttaaaatct

SEQ ID NO: 226648 - DNA, 120 bp, Artificial Sequence
  ENSG00000118412_57 (sequence is synthesized)
ttcggatggagttctttggagaaatgggtttcctggagtgtcaggtgatcattgatgttgattgtttctgaaatgtttatttaggcatcaaaccaacatgcctaaataagtttttcattt

SEQ ID NO: 226649 - DNA, 120 bp, Artificial Sequence
  ENSG00000118412_58 (sequence is synthesized)
ctacagcgcctagattcattcctagcacatagtaggccctaactcagatgtgaatgtaggattcgtaggagctgagcatttgtgcttcaggcatcaagttgtctttgactcttcgactct

SEQ ID NO: 226650 - DNA, 120 bp, Artificial Sequence
  ENSG00000118412_59 (sequence is synthesized)
tccttggtctttttccattctccacacctccagcagcaaacctttcgcctctcctcaaggcctttcccccccatctccctcagcgcctctttgactggagggggacagaggctttcatgg

SEQ ID NO: 226651 - DNA, 120 bp, Artificial Sequence
  ENSG00000118412_60 (sequence is synthesized)
cagggattctcccatctcccttcctatccccgctatgccctccaattatcttttcctggcgttccgttttacaagagatggccttctttccaaaaacatttatattgtattgaatattct

SEQ ID NO: 226652 - DNA, 120 bp, Artificial Sequence
  ENSG00000118412_61 (sequence is synthesized)
tgattttggccatcttgctttacagacagacctggggtctaatttcagctctgccacttaccaggtggttgccttgtgcaaatttcttgatcgtctgtgttttcctcatctgtaaaatgg

SEQ ID NO: 226653 - DNA, 120 bp, Artificial Sequence
  ENSG00000118412_62 (sequence is synthesized)
cctggaacatagtaaatgtgccgtatatgatagcttttgttagtatttgccccttacctcttcttctggggtcttgctgtattagcctttcccatgagtgtaaaaatacactgtcttctc

SEQ ID NO: 226654 - DNA, 120 bp, Artificial Sequence
  ENSG00000118412_63 (sequence is synthesized)
tggctttttcctgtttttctctacaaatgcttgtgtttttctctaaattttattttttgtcttttagcgtctacattaaggacacattctcagtttcgtaatgatttttctttttctttt

SEQ ID NO: 226655 - DNA, 79 bp, Artificial Sequence
  ENSG00000118412_64 (sequence is synthesized)
gctggagtgcaatggcaagatctcggcttactacaggtttgacctcctgaactacaggtggtgactctcaaaaggaaat

SEQ ID NO: 226656 - DNA, 120 bp, Artificial Sequence
  ENSG00000118412_65 (sequence is synthesized)
ccaaaggtattactgagcggtgtagctgttataaattacgtgggtattgatatgtggaatatttttaacttttagaggaaagatgaaaataatgtatttttattttttattttttaattt

SEQ ID NO: 226657 - DNA, 120 bp, Artificial Sequence
  ENSG00000118418_0 (sequence is synthesized)
gcaggtcgaagaggccgggctacgtcgtgccctgcgcgtgagcagctgcagaggcagaggcagcatccagcggcggcgccagcagttccagtccgttgctttactttttgcttcaccgac

SEQ ID NO: 226658 - DNA, 120 bp, Artificial Sequence
  ENSG00000118418_1 (sequence is synthesized)
atagtcattatgccgaagagaaagtctccagagaatacagagggcaaagatggatccaaagtaactaaacaggagcccacaagacggtctgccagattgtcagcgaaacctgctccacca

SEQ ID NO: 226659 - DNA, 120 bp, Artificial Sequence
  ENSG00000118418_2 (sequence is synthesized)
aaacctgaacccaaaccaagaaaaacatctgctaagaaagaacctggagcaaagattagcagaggtgctaaagggaagaaggaggaaaagcaggaagctggaaaggaaggtactgcacca

SEQ ID NO: 226660 - DNA, 120 bp, Artificial Sequence
  ENSG00000118418_3 (sequence is synthesized)
acagaaaactgaatctgtagataacgagggagaatgaattgtcatgaaaaattggggttgattttatgtatctcttgggacaacttttaaaagctatttttaccaagtattttgtaaatg

SEQ ID NO: 226661 - DNA, 120 bp, Artificial Sequence
  ENSG00000118418_4 (sequence is synthesized)
ctaattttttaggactctactagttggcatacgaaaatatataaggatggacattttatcgtctcatagtcatgctttttggaaatttacatcatcctcaagtaaaataaatatcagtta

SEQ ID NO: 226662 - DNA, 120 bp, Artificial Sequence
  ENSG00000118418_5 (sequence is synthesized)
aatattggaagctgtgtgtaagattgattcagcattccatgcacttgctttaaaatttagtcctgtgcatactgtggtgtttttactgtgcatatttgaatttttcatgcagtttttcta

SEQ ID NO: 226663 - DNA, 120 bp, Artificial Sequence
  ENSG00000118418_6 (sequence is synthesized)
gagcaataatcagtggtgcttttgtacctaggttttatgtgattttaatgaaacatggatagttgtggccacctgctgactatttgtggtttaaaataaaaggtttacttgtctgcagaa

SEQ ID NO: 226664 - DNA, 120 bp, Artificial Sequence
  ENSG00000118420_0 (sequence is synthesized)
acaggcgcctgcgccgcagcggggctgccgctggttggtccgcacgtggaacctctcctggtcctgttgacccgggcccctcggaacctccagcttggtccggtctgggactggaagcct

SEQ ID NO: 226665 - DNA, 120 bp, Artificial Sequence
  ENSG00000118420_1 (sequence is synthesized)
gccatggcggcttctgcggcggagacgcgcgtgtttctggaggtgcggggacagctgcagagcgcgcttctgatcctgggagaaccgaaagaaggaggtatgcccatgaatatttccata

SEQ ID NO: 226666 - DNA, 120 bp, Artificial Sequence
  ENSG00000118420_2 (sequence is synthesized)
atgccatcttcactccagatgaaaacccctgaaggctgcacagaaatccagcttccagcagaggtcaggcttgtaccttcctcttgccgtgggctacagtttgttgttggagatggactg

SEQ ID NO: 226667 - DNA, 120 bp, Artificial Sequence
  ENSG00000118420_3 (sequence is synthesized)
cacctgcgactgcagacgcaagcaaaattaggcacaaaactgatttcaatgtttaatcaaagctcgcaaacccaagaatgttgcacgttttattgccaatcctgcggtgaagtcataata

SEQ ID NO: 226668 - DNA, 120 bp, Artificial Sequence
  ENSG00000118420_4 (sequence is synthesized)
aaagacaggaagctcctcagggtgctcccactgccgagtgagaactggggagctctagttggagaatggtgttgtcatcctgacccctttgctaataaatcacttcatccgcaagagaat

SEQ ID NO: 226669 - DNA, 120 bp, Artificial Sequence
  ENSG00000118420_5 (sequence is synthesized)
gactgttttattggagactctttcttcttggtgaatttaagaaccagtttgtggcagcaaagacctgaactatccccagtggagatgtgctgtgtttcttctgacaaccattgtaaattg

SEQ ID NO: 226670 - DNA, 120 bp, Artificial Sequence
  ENSG00000118420_6 (sequence is synthesized)
gaaccaaaggcaaataccaaagtaatttgtaagcgttgcaaggtaatgttgggagagaccgtgtcatcagaaaccaccaagttttatatgacagagataattattcagtcatctgagagg

SEQ ID NO: 226671 - DNA, 120 bp, Artificial Sequence
  ENSG00000118420_7 (sequence is synthesized)
agttttcctatcataccaaggtcttggtttgtccagagcgtgatcgcccagtgtctggtgcagctctcctctgctagaagcacttttagattcacgattcaaggtcaggatgacaaagtg

SEQ ID NO: 226672 - DNA, 120 bp, Artificial Sequence
  ENSG00000118420_8 (sequence is synthesized)
cttgctatggcttttaaattcagacagtttggtgattgaatctttgagaaattccaaatatatcaaaaaattccccttgttggaaaacacattcaaagccgattctagttctgcctggag

SEQ ID NO: 226673 - DNA, 120 bp, Artificial Sequence
  ENSG00000118420_9 (sequence is synthesized)
tgctgtcaaggtcctctaccagccatgcatcaaaagcaggaatgaaaaacttgtcagcttgtgggaaagtgacatcagcgtccacccgctaaccctgccctctgcaacctgcttggagct

SEQ ID NO: 226674 - DNA, 120 bp, Artificial Sequence
  ENSG00000118420_10 (sequence is synthesized)
gctgttgatattgtcaaagagtaatgccaatctgccttcatcccttcgccgtgtgaattcctttcaggtggcctttttgaagatgtaactattagagctgggcattctcctcccccggca

SEQ ID NO: 226675 - DNA, 120 bp, Artificial Sequence
  ENSG00000118420_11 (sequence is synthesized)
gacagctctcaagcaggagcacaccgaggccagcagtcagctcaggaggcatcaattacaaagacaagaaccagagctatgggataagagcattgcattgaagttttaagtttacttgtt

SEQ ID NO: 226676 - DNA, 120 bp, Artificial Sequence
  ENSG00000118420_12 (sequence is synthesized)
tgcatgtattctctaagagaagagttaactttagatctttgaaaacccaggactgtgaagaaagtcatagtagcaggttgaggcaagtgtagaagttacatctctatttcccacagagag

SEQ ID NO: 226677 - DNA, 120 bp, Artificial Sequence
  ENSG00000118420_13 (sequence is synthesized)
gaatattcacatatgtgcagtgtcagcaccacctggaaggttattacctaatggagatccatctgtcctgtgtggaatccagtgaggaattttattggtggaactgaatgttaactgctg

SEQ ID NO: 226678 - DNA, 120 bp, Artificial Sequence
  ENSG00000118420_14 (sequence is synthesized)
taaatcctaggaaataaacttttaaagagtttctcaggatgatttaaaacaaattttaaaaaagaaaagtagaaaacattttatactttattcagaggagatgctcaatagatgtttgtt

SEQ ID NO: 226679 - DNA, 120 bp, Artificial Sequence
  ENSG00000118420_15 (sequence is synthesized)
gaatgaatgattatcaaattaaaggatttcctatttatgcaaatctgcatgtttcttttgttatttcctttaccatacattattgcaaattaataaatatacctcactagcatcccgtta

SEQ ID NO: 226680 - DNA, 120 bp, Artificial Sequence
  ENSG00000118420_16 (sequence is synthesized)
atgttgggagagaccgtgtcatcaggtaagaatttcataacaagaagccaaaatgattggcttcttgcttaaaagccagaatgatattttatagtaaatatataggaaagatagatgatt

SEQ ID NO: 226681 - DNA, 120 bp, Artificial Sequence
  ENSG00000118420_17 (sequence is synthesized)
aatatatgttgtggaattggtgcttttcaaaatagaccccaagtaacataccatccaatataccaagaagtttgtatattttgaccttcataaatacagagtattgaattttaagtatta

SEQ ID NO: 226682 - DNA, 120 bp, Artificial Sequence
  ENSG00000118420_18 (sequence is synthesized)
agaagttgagtcattttcagagtttcatagcctctttgtagatataaagcaatagtataaagtttgttcttgggcctatttcaagaaaattggagcttttttctctctttgtttccttct

SEQ ID NO: 226683 - DNA, 120 bp, Artificial Sequence
  ENSG00000118420_19 (sequence is synthesized)
cttcttttttttttttttttaattttaccttcctggtaactcacgaaacagagcttttttcttaatacacctcctcagttagaagaattggtgcccagagatggagaagttgtttttctt

SEQ ID NO: 226684 - DNA, 120 bp, Artificial Sequence
  ENSG00000118420_20 (sequence is synthesized)
tttttcttggctgccatctggctcggggctgtattttggggctggggatgggagaggacctgttgaaatggaagaaaaaaaattccgaattttgtactttgtcccttattcttttggttc

SEQ ID NO: 226685 - DNA, 120 bp, Artificial Sequence
  ENSG00000118420_21 (sequence is synthesized)
cccagtagcattgattatattttatgtaaactctgttatactactttaaaatataataatgaaaatcctgataattaaaatgcattgctgtttaaagatatggtttatagtgtctagaga

SEQ ID NO: 226686 - DNA, 120 bp, Artificial Sequence
  ENSG00000118420_22 (sequence is synthesized)
gttagctttggatgatgaataattacttttaatacagttaattagaagatgtgatttacatgaagcaattgtacttaagggaaggcagatgatggtattttttgtttatttgtttgttta

SEQ ID NO: 226687 - DNA, 120 bp, Artificial Sequence
  ENSG00000118420_23 (sequence is synthesized)
atcgtcaaaatcttgtaagaagttacttgttcacagtgagccagaaaggaaaaatgagttagtaaaaggtaccatccttaacgtcatttttggaaaatgaaagcaagcctctgaagcaac

SEQ ID NO: 226688 - DNA, 120 bp, Artificial Sequence
  ENSG00000118420_24 (sequence is synthesized)
accttagaaaaagttaagccttctggttaaataaggtgaattgatttttaaattattttctccctgaagtcctgttaaaatgtcagttaaggaatgaaaagatatatatctacaaaggca

SEQ ID NO: 226689 - DNA, 120 bp, Artificial Sequence
  ENSG00000118420_25 (sequence is synthesized)
aagagaaatggagaggagatgacaatgacataaacaagagatgtaaacaaacttttttggaacacacttggcagcctggagggagctgcagctttggtgtctgtagatcatttggataag

SEQ ID NO: 226690 - DNA, 120 bp, Artificial Sequence
  ENSG00000118420_26 (sequence is synthesized)
gagtgggccaataatctctgtagagccccaaaacaagtcagaatttggaggcagcaggtgacagggaaggcagtctgaggcaaggggctggaagcaggatgattggttcaaagtgtatat

SEQ ID NO: 226691 - DNA, 120 bp, Artificial Sequence
  ENSG00000118420_27 (sequence is synthesized)
atacagctactagacttctaggtttcccacttcattttcaacttgcttctgtaatcctcaaggttggagattggaagacctcccccacaccctttttttttgaataatggaagaatacca

SEQ ID NO: 226692 - DNA, 120 bp, Artificial Sequence
  ENSG00000118420_28 (sequence is synthesized)
actagagaaaagacttgcagacactgattctttggggacattcaaccaaaaatgaggttatgtcgttgttcaacaaaaatgaggttaaactgagcacagtggtgcatgcctatagtccca

SEQ ID NO: 226693 - DNA, 120 bp, Artificial Sequence
  ENSG00000118420_29 (sequence is synthesized)
aggcaggagggtcacttgagcccaggggttcaaggctgtggtgcactattattgcacctatgaatagccactgcacttcagcctggagaacatagggagactctatctcttaaaaaaaaa

SEQ ID NO: 226694 - DNA, 120 bp, Artificial Sequence
  ENSG00000118420_30 (sequence is synthesized)
atctcttaaaaaaaaaaaaaaagagagagcttatattcactcatcctacagtcaacaaaccttgtacctatacccaagaactttctctcagcatttcactgccttacactaaaattgaaa

SEQ ID NO: 226695 - DNA, 120 bp, Artificial Sequence
  ENSG00000118420_31 (sequence is synthesized)
tgaattgttgagaatcaccaaatatttgagtaaatcaacaaaaaagaaaccaaggcaaataaatgattaagcaagcaaattaaaagcactgagaagaaacacattatgtatacagcagaa

SEQ ID NO: 226696 - DNA, 120 bp, Artificial Sequence
  ENSG00000118420_32 (sequence is synthesized)
gtaaatctttaaaaaaaaaatgcccttgaagaaataaactaatattgcttccataattcagagaatgtggaatttaaaaatgtaatagcttcagaaaaaaaaaattaaagaattggaaga

SEQ ID NO: 226697 - DNA, 120 bp, Artificial Sequence
  ENSG00000118420_33 (sequence is synthesized)
cttcagaaaaaaaaaattaaagaattggaagataaaagtaaagaattaggccagaaattaaaaccaaaagacagagattgaaaattaaagaagaggccgggcacggaggctcacgcctgt

SEQ ID NO: 226698 - DNA, 120 bp, Artificial Sequence
  ENSG00000118420_34 (sequence is synthesized)
atttgttttctctttccacattatgttttagcttttgttgtcatgttggtgttaagaaattaatgaattaaatgccactataccatttccctacttgaagcttctaggagccaatactgc

SEQ ID NO: 226699 - DNA, 120 bp, Artificial Sequence
  ENSG00000118420_35 (sequence is synthesized)
taaatattatatgtttaaaataggttgaattattacagatgattcatgttaatatgcagaaagcttgcttttaccaaaaattattgtttttttcttgtaatctaagctgtctgtacatat

SEQ ID NO: 226700 - DNA, 120 bp, Artificial Sequence
  ENSG00000118420_36 (sequence is synthesized)
ggctgcagtgctaaatcagacttcaacagtgatgaatatttaccaataagcactttccaggcatcaggatacaataatgaacaaaccccagcccctacctcttagcattgttgttctaat

SEQ ID NO: 226701 - DNA, 120 bp, Artificial Sequence
  ENSG00000118420_37 (sequence is synthesized)
ctgtgtggtatgtaccattatcatccccactttaaagataagcacactaagacactggtagtaaatcactctagtgaaaaatgaagcaaggtaaggtagttggcgaggggtaggatggga

SEQ ID NO: 226702 - DNA, 120 bp, Artificial Sequence
  ENSG00000118420_38 (sequence is synthesized)
gtaggatgtcattttatattgcaaagtcagggaagattctttagataaggtgatatttaagcaggtaacttgaaggaagtgaagtggtgagccatatctgatggaagatcattcccagaa

SEQ ID NO: 226703 - DNA, 120 bp, Artificial Sequence
  ENSG00000118420_39 (sequence is synthesized)
aaggaaacagcaggttattttaattgtaacagaatcaaagtttgtacttgtcctgtactcttagatgggtttgatcaaatttatcctaagaacggaagggtcttagtctttttctggaaa

SEQ ID NO: 226704 - DNA, 120 bp, Artificial Sequence
  ENSG00000118420_40 (sequence is synthesized)
gtaaataagacattgaaaaaattaattaggtttcttatgcaagtagtaccagtcataaaatattcaaacactaagagatatatacaaggtaaaattatatcccgctccagaagtaaaacg

SEQ ID NO: 226705 - DNA, 120 bp, Artificial Sequence
  ENSG00000118420_41 (sequence is synthesized)
tttgttgtctactcttccacttccttttctgttcattttgcacctaaacatgtgtattttttacacttaaaaaaagcccatgtcttagagattctttccattgtgagtgcttgacatttt

SEQ ID NO: 226706 - DNA, 120 bp, Artificial Sequence
  ENSG00000118420_42 (sequence is synthesized)
atgaaatggaggtactataaattatttagccagttttcttttaatggatatttggtttattacttttttgctgttataattagtgttgtgatcttgtatgtttgttttctgattataagt

SEQ ID NO: 226707 - DNA, 120 bp, Artificial Sequence
  ENSG00000118420_43 (sequence is synthesized)
tttttatattagaggaatttctagaggtacaattgttgagtcaaagggtatggacatttaaaattttgagaggtaatatcaaagtattttgtaaaaaggcatcatgaatttatattccca

SEQ ID NO: 226708 - DNA, 120 bp, Artificial Sequence
  ENSG00000118420_44 (sequence is synthesized)
cctgaagtttttataaatgtccattaccctgcactctcacccaaatttccatttagatttttgcctatctgatgtgattctaaaggaaacaggtttacttgacactatccttatatttta

SEQ ID NO: 226709 - DNA, 120 bp, Artificial Sequence
  ENSG00000118420_45 (sequence is synthesized)
ttgagacatgttcaatggatgcatctcagttttatgcttttgagactctttttgagggcttgggtttttttttgtgtgtgtgcccttatgcatagtcaactagtaagctgtacattgatt

SEQ ID NO: 226710 - DNA, 120 bp, Artificial Sequence
  ENSG00000118420_46 (sequence is synthesized)
atattctcttttgatgtatgtgtttgtgtgtatctttatatatttaggtttatatcatcaaatttattaaaaccctttatattcatcttttctgtttattaaaatgtggacttttgtgac

SEQ ID NO: 226711 - DNA, 120 bp, Artificial Sequence
  ENSG00000118420_47 (sequence is synthesized)
aggtatgttgaatcttatattatgattatgtaagtaattttcttctgttttgatactagttttcacattatgtattttaaagctgtgttattagaggaataaaagtttgtggcatgacaa

SEQ ID NO: 226712 - DNA, 120 bp, Artificial Sequence
  ENSG00000118420_48 (sequence is synthesized)
atagagaaactcagcaggaagttgatatggaaactcagcaggtgcctttctcaccagcaccgtatgaagggtggcctttttgaagatgtaactattagagctgggcattctcctcccccg

SEQ ID NO: 226713 - DNA, 120 bp, Artificial Sequence
  ENSG00000118432_0 (sequence is synthesized)
ttagcttatcaggagaacttactgtaaaccgactctttttgtttcaaagatgtctcccactccaggcgaggagcgctcttggctgaggattgccccctgtgggtcactttctcagtcatt

SEQ ID NO: 226714 - DNA, 120 bp, Artificial Sequence
  ENSG00000118432_1 (sequence is synthesized)
ttgagctcagcctaatcaaagactgaggttatgaagtcgatcctagatggccttgcagataccaccttccgcaccatcaccactgacctcctgtacgtgggctcaaatgacattcagtac

SEQ ID NO: 226715 - DNA, 120 bp, Artificial Sequence
  ENSG00000118432_2 (sequence is synthesized)
gaagacatcaaaggtgacatggcatccaaattagggtacttcccacagaaattccctttaacttcctttaggggaagtcccttccaagagaagatgactgcgggagacaacccccagcta

SEQ ID NO: 226716 - DNA, 120 bp, Artificial Sequence
  ENSG00000118432_3 (sequence is synthesized)
gtcccagcagaccaggtgaacattacagaattttacaacaagtctctctcgtccttcaaggagaatgaggagaacatccagtgtggggagaacttcatggacatagagtgtttcatggtc

SEQ ID NO: 226717 - DNA, 120 bp, Artificial Sequence
  ENSG00000118432_4 (sequence is synthesized)
ctgaaccccagccagcagctggccattgcagtcctgtccctcacgctgggcaccttcacggtcctggagaacctcctggtgctgtgcgtcatcctccactcccgcagcctccgctgcagg

SEQ ID NO: 226718 - DNA, 120 bp, Artificial Sequence
  ENSG00000118432_5 (sequence is synthesized)
ccttcctaccacttcatcggcagcctggcggtggcagacctcctggggagtgtcatttttgtctacagcttcattgacttccacgtgttccaccgcaaagatagccgcaacgtgtttctg

SEQ ID NO: 226719 - DNA, 120 bp, Artificial Sequence
  ENSG00000118432_6 (sequence is synthesized)
ttcaaactgggtggggtcacggcctccttcactgcctccgtgggcagcctgttcctcacagccatcgacaggtacatatccattcacaggcccctggcctataagaggattgtcaccagg

SEQ ID NO: 226720 - DNA, 120 bp, Artificial Sequence
  ENSG00000118432_7 (sequence is synthesized)
cccaaggccgtggtggcgttttgcctgatgtggaccatagccattgtgatcgccgtgctgcctctcctgggctggaactgcgagaaactgcaatctgtttgctcagacattttcccacac

SEQ ID NO: 226721 - DNA, 120 bp, Artificial Sequence
  ENSG00000118432_8 (sequence is synthesized)
attgatgaaacctacctgatgttctggatcggggtcaccagcgtactgcttctgttcatcgtgtatgcgtacatgtatattctctggaaggctcacagccacgccgtccgcatgattcag

SEQ ID NO: 226722 - DNA, 120 bp, Artificial Sequence
  ENSG00000118432_9 (sequence is synthesized)
cgtggcacccagaagagcatcatcatccacacgtctgaggatgggaaggtacaggtgacccggccagaccaagcccgcatggacattaggttagccaagaccctggtcctgatcctggtg

SEQ ID NO: 226723 - DNA, 120 bp, Artificial Sequence
  ENSG00000118432_10 (sequence is synthesized)
gtgttgatcatctgctggggccctctgcttgcaatcatggtgtatgatgtctttgggaagatgaacaagctcattaagacggtgtttgcattctgcagtatgctctgcctgctgaactcc

SEQ ID NO: 226724 - DNA, 120 bp, Artificial Sequence
  ENSG00000118432_11 (sequence is synthesized)
accgtgaaccccatcatctatgctctgaggagtaaggacctgcgacacgctttccggagcatgtttccctcttgtgaaggcactgcgcagcctctggataacagcatgggggactcggac

SEQ ID NO: 226725 - DNA, 120 bp, Artificial Sequence
  ENSG00000118432_12 (sequence is synthesized)
tgcctgcacaaacacgcaaacaatgcagccagtgttcacagggccgcagaaagctgcatcaagagcacggtcaagattgccaaggtaaccatgtctgtgtccacagacacgtctgccgag

SEQ ID NO: 226726 - DNA, 120 bp, Artificial Sequence
  ENSG00000118432_13 (sequence is synthesized)
gctctgtgagcctgatgcctccctggcagcacaggaaaagaatttttttttttaagctcaaaatctagaagagtctattgtctccttggttatatttttttaactttaccatgctcaatg

SEQ ID NO: 226727 - DNA, 120 bp, Artificial Sequence
  ENSG00000118432_14 (sequence is synthesized)
aaaaggtgattgtcaccatgatcacttatcagtttgctaatgtttccatagtttaggtactcaaactccattctccaggggtttacagtgaagaaagcctgttgtttaagtgactgaacg

SEQ ID NO: 226728 - DNA, 120 bp, Artificial Sequence
  ENSG00000118432_15 (sequence is synthesized)
atccttcaaagtctcaatgaaataggagggaaacctttggctacacaattggaagtctaagaacccatggaaaaatgccatcaaatgaataatgcctttgtaaccacaactttcactata

SEQ ID NO: 226729 - DNA, 120 bp, Artificial Sequence
  ENSG00000118432_16 (sequence is synthesized)
atgtgaaatgtaactgtccgtagtatcagagatgtccatttttacaagttatagtactagagatattttgtaaaatgtattatgtcctgtgagatgtgtatcagtgtttatgtgctatta

SEQ ID NO: 226730 - DNA, 120 bp, Artificial Sequence
  ENSG00000118432_17 (sequence is synthesized)
atatttgtttagttcagcaaaactgaaaggtagacttttatgagaacaatggacaagcagtggatacgtgtcaatgtgtgcactttttttctatattattgcccatgatataactttaga

SEQ ID NO: 226731 - DNA, 120 bp, Artificial Sequence
  ENSG00000118432_18 (sequence is synthesized)
aataaaccttaatatttcttcaaatatctctatttaattttgacactgaaataaccgtaaaggtttatttttctgttacctcaacaagaagaatttgaagacttcaaaatattgagcaga

SEQ ID NO: 226732 - DNA, 120 bp, Artificial Sequence
  ENSG00000118432_19 (sequence is synthesized)
attcattcatacttaaaaatttattagccctgcattttcataggaagacacattatcttctggactatagctgttctaatggattataatcagaatggaagagagaaagcatattgactt

SEQ ID NO: 226733 - DNA, 120 bp, Artificial Sequence
  ENSG00000118432_20 (sequence is synthesized)
tttttgagcgacatctctgactttctttagtctttagctattactggatctcttaagacagcatgtgttaatcttaatgtatatcgttatcactgtgcagttgctgtttacttgaatagt

SEQ ID NO: 226734 - DNA, 120 bp, Artificial Sequence
  ENSG00000118432_21 (sequence is synthesized)
attgtgttcctatattccaggtttaagtagatttcatgcctgggtggccaaacaacagtcttcattttttttaattgaaaagaagtagtgtctggatcagtaaaattatactgtgtgtga

SEQ ID NO: 226735 - DNA, 120 bp, Artificial Sequence
  ENSG00000118432_22 (sequence is synthesized)
gtgtgaatataaatgtgtgtatgtgtgtttctgtcctgtaactgttacagtaatgtcataaagtgagaaaactgtgaccaagtataaacttttaccacttgctgcactcttgcacatgga

SEQ ID NO: 226736 - DNA, 120 bp, Artificial Sequence
  ENSG00000118432_23 (sequence is synthesized)
aatcttgttgataaaaatactgactccaaccattcaaaaatttcaccccatccctccttaagagattggatcaagtattactaaattgacctttaggtattacacaagaccagtgcttag

SEQ ID NO: 226737 - DNA, 120 bp, Artificial Sequence
  ENSG00000118432_24 (sequence is synthesized)
caaaaaataatgacaggcatccaaggaagggatgtatttgtagtgttattgccaggaaaggagagtactttggtttctgagcaccgaatattgagcaatatgtcagtcactaaaaggaag

SEQ ID NO: 226738 - DNA, 120 bp, Artificial Sequence
  ENSG00000118432_25 (sequence is synthesized)
acagttctacagaaaaacaatggtaacatttttcaatagcgtgtgtagatagtatgcactatatacatcacgttaaagtaggactatcacacccagcccatgtggctaaaaaagctgaat

SEQ ID NO: 226739 - DNA, 120 bp, Artificial Sequence
  ENSG00000118432_26 (sequence is synthesized)
cagacagtggatgagacacacaacggcagtgaagaaccgatacacttggcattgacgtctagctatgctgtatctgtgctttgcccacatgcccttggtgacagctgagcacccagctct

SEQ ID NO: 226740 - DNA, 120 bp, Artificial Sequence
  ENSG00000118432_27 (sequence is synthesized)
gtcttggtaggtttgggctaaggaacaaatctctcctttgctcgtggttagcaagatacactcaagcatgaagataaacacagctgctttcttcttacaccccggtctcatgctccttaa

SEQ ID NO: 226741 - DNA, 120 bp, Artificial Sequence
  ENSG00000118432_28 (sequence is synthesized)
tggcgccatgggtgcttgttgggcctttttccagtaaggaatgatattgctgaagaatctacttaaccctgacaaattttaattataatctcttcttatacagataaaacatgactccta

SEQ ID NO: 226742 - DNA, 120 bp, Artificial Sequence
  ENSG00000118432_29 (sequence is synthesized)
caaggccccaaggtttacatagtctgaagtgaagtacagagctggcatctatctggtgatttctagctctcgagatacccaagcagcctgatggggcagttccccttcttacggttcacg

SEQ ID NO: 226743 - DNA, 120 bp, Artificial Sequence
  ENSG00000118432_30 (sequence is synthesized)
ctctaaggcaggatgtggcttatgagatactttgcattgtctgtctgcacaccttgaatctgcctgctggctcccttactttacctctctgtcatgtgcagatgaaggctcagggtgcta

SEQ ID NO: 226744 - DNA, 120 bp, Artificial Sequence
  ENSG00000118432_31 (sequence is synthesized)
gaggattagtaagatctctttctaaagacaggagagattatttacaagaagaactcaccagggtttagtttgcatttaagaattgccagtcttttgtcctgcatcatcttgaacattaat

SEQ ID NO: 226745 - DNA, 120 bp, Artificial Sequence
  ENSG00000118432_32 (sequence is synthesized)
ccacatgtttcagagctcaccaggcagtaccaatgctcttttcacagctatgaagagctagagaaattcttgttatggtagaaaaatttcacgattcatttttgaaactgcatttgtgcg

SEQ ID NO: 226746 - DNA, 120 bp, Artificial Sequence
  ENSG00000118432_33 (sequence is synthesized)
tatgcagtgtagattttatagtgtgttgtgctttcaagatctaaatcatatataataaattaagggacaatggggctgacagcactaaacttggtgcttattgatattctaagaaatatc

SEQ ID NO: 226747 - DNA, 120 bp, Artificial Sequence
  ENSG00000118432_34 (sequence is synthesized)
tgtgaaatatcatcacgtatgttatacaaccttcatttaaaaaggtttaaaactagttagattcactttgacacttttcatatcatttcttaacccaagtgacgaaaacattgtccccaa

SEQ ID NO: 226748 - DNA, 120 bp, Artificial Sequence
  ENSG00000118432_35 (sequence is synthesized)
tgaatatactcattagaattaccatttgttaatatcactcattaattaaccccataattagatccattaatttaaatgatttaaatttaagtaagttttataaggtctgacatcagaggt

SEQ ID NO: 226749 - DNA, 120 bp, Artificial Sequence
  ENSG00000118432_36 (sequence is synthesized)
atcttactttcctctgaggatgatgtacttgccctgaccatgcattttaccatcacacatgttcagaaagggccaaattcccaacctgctcattttttttttatcagagtcatgatgaat

SEQ ID NO: 226750 - DNA, 120 bp, Artificial Sequence
  ENSG00000118432_37 (sequence is synthesized)
cagtcctagaatgtttcatttgcacaagtagggctgcctccaagaggaacctctgatttattttgtatgaaatatatgtgaaaggatatgaatctgagagatgctgtagacatctgtcct

SEQ ID NO: 226751 - DNA, 120 bp, Artificial Sequence
  ENSG00000118432_38 (sequence is synthesized)
acacttgagatgatttccaagcctctctggcactttgagttaagtctatctggtattaaatgccaaggaccttttgctgcctaaatccactctgcaggaaataggcccaaccaccagatg

SEQ ID NO: 226752 - DNA, 120 bp, Artificial Sequence
  ENSG00000118432_39 (sequence is synthesized)
agaattaggccctggatgagtagcgctatagttactgtcctgttgattaatttctgccatttcatgtccataaaagagaccacccatatcatgcacacaattagatttctcacactctaa

SEQ ID NO: 226753 - DNA, 120 bp, Artificial Sequence
  ENSG00000118432_40 (sequence is synthesized)
ctgtatatttgtatgatattttaaaatctcctaaatgctgggcaatggctattaacaattaattgtcttgcactggccttctgatgaaatgttaacaatgcctattgtaatatagaaaaa

SEQ ID NO: 226754 - DNA, 120 bp, Artificial Sequence
  ENSG00000118432_41 (sequence is synthesized)
aacattctatctactgatttgggctgaatgtatgtaaataggtttctaaaaagtcagatgtttgagcagtggcctacaaatcagtaattttcggatgggagagtttctttacattgccgt

SEQ ID NO: 226755 - DNA, 120 bp, Artificial Sequence
  ENSG00000118432_42 (sequence is synthesized)
ggcatcttaaaagctatcttcatgtaaattgactgtactaggcctactggggatcagagttcccaagaaaggaaaccttttcttgtatctggattcaaatttatttccaatgtttcaagc

SEQ ID NO: 226756 - DNA, 120 bp, Artificial Sequence
  ENSG00000118432_43 (sequence is synthesized)
gggaaacatgactctttattgtctgtaaatctaacattattacttttcctcttagaagaatattgtattgttagatgtttgttgagctggtaacatcgttgcaaccactgcaatatcttc

SEQ ID NO: 226757 - DNA, 120 bp, Artificial Sequence
  ENSG00000118432_44 (sequence is synthesized)
gttagtaatctgtataatactttgtatacaagtactggtaagattgttattaaatgtagcttcagtcattaaattactatagcaaagtagtacttcttctgtaatatttacaatgtatta

SEQ ID NO: 226758 - DNA, 120 bp, Artificial Sequence
  ENSG00000118432_45 (sequence is synthesized)
agcccacagtatattttatttcaatgtaattaaactgttaacttattcaaagagaaaacatctcatcatgtctattgtccaaagttacctggaatcaaataaaaattctagattaccatg

SEQ ID NO: 226759 - DNA, 80 bp, Artificial Sequence
  ENSG00000118432_46 (sequence is synthesized)
cgagagggagccagagacagcgcgagcggagggagcggcagggactgcgcgagcgggacgaggcgacgggcgcccgggct

SEQ ID NO: 226760 - DNA, 120 bp, Artificial Sequence
  ENSG00000118432_47 (sequence is synthesized)
gaggacccagtgaagagcctgggaaggggcgaggctcgccggcggtcggagcagcggggcgccagtcccggtcgctgtcgcgggcgggcgctggagaccgggacgccggcgctcggacgg

SEQ ID NO: 226761 - DNA, 120 bp, Artificial Sequence
  ENSG00000118432_48 (sequence is synthesized)
acggactgacttgctgaccgcccgccggaggcacaccccactccaccccaccccgcctcgccagcagcccggcgccggcgccgcctcccgcacgctactccctctgccaccccttccttc

SEQ ID NO: 226762 - DNA, 120 bp, Artificial Sequence
  ENSG00000118432_49 (sequence is synthesized)
tccacttcttttccgcctccgcctcttcttgtctcccgcggcgccagcgccttcccttggcccgggcgggggcctcggctccctgcagagctctccgtagtcagtgggggatatttcgtt

SEQ ID NO: 226763 - DNA, 120 bp, Artificial Sequence
  ENSG00000118432_50 (sequence is synthesized)
atgaagtcgatcctagatggccttgcagataccaccttccgcaccatcaccactgacctcctgtacgtgggctcaaatgacattcagtacgaagacatcaaaggagaatgaggagaacat

SEQ ID NO: 226764 - DNA, 120 bp, Artificial Sequence
  ENSG00000118432_51 (sequence is synthesized)
gcagagctctccgtagtcagtgggggatatttcgttctagcggacaaccagcccctgagctgggcgagaggtgccaagggagcttctgtcccgaggaccaggggatgcgaaggatgtctc

SEQ ID NO: 226765 - DNA, 120 bp, Artificial Sequence
  ENSG00000118432_52 (sequence is synthesized)
ccactccaggcgaggagcgctcttggctgagggcaaagagattgaaagaggggagtcacataatcagcatacgtttatgaagattacccccacagctgtgtggcaagtgatcaaaaagga

SEQ ID NO: 226766 - DNA, 120 bp, Artificial Sequence
  ENSG00000118434_0 (sequence is synthesized)
gacgtacctgtcctcaggagccgcggcggcgactgcgcctcggacggccgtcggggccgagaaccatgagccccaggggcacgggctgctccgccgggctgctgatgactgtcggctggc

SEQ ID NO: 226767 - DNA, 120 bp, Artificial Sequence
  ENSG00000118434_1 (sequence is synthesized)
tgcttctggcgggcctccagtccgcgcgcgggaccaacgtcaccgctgccgtccaggatgccggcctggcccacgaaggcgagggcgaggaggagaccgaaaacaacgacagcgagaccg

SEQ ID NO: 226768 - DNA, 120 bp, Artificial Sequence
  ENSG00000118434_2 (sequence is synthesized)
cggagaactacgctccgcctgaaaccgaggatgtttcaaataggaatgtcgtcaaagaagtagaattcggaatgtgcaccgttacatgtggtattggtgttagagaagttatattaacaa

SEQ ID NO: 226769 - DNA, 120 bp, Artificial Sequence
  ENSG00000118434_3 (sequence is synthesized)
atggatgccctggtggtgaatccaagtgtgttgtacgggtagaagaatgccgtggaccaacagattgtggctggggtaaaccaatttcagaaagtcttgaaagtgttagattggcatgta

SEQ ID NO: 226770 - DNA, 120 bp, Artificial Sequence
  ENSG00000118434_4 (sequence is synthesized)
ttcacacatctcccttaaatcgtttcaaatatatgtggaaacttctaagacaagaccaacaatccattatacttgtaaatgattcagcaatcctagaagtacgcaaggaaagtcacccct

SEQ ID NO: 226771 - DNA, 120 bp, Artificial Sequence
  ENSG00000118434_5 (sequence is synthesized)
tggctttcgagtgtgacacactggataataatgaaatagtagcaactattaaattcacagtctatacgagcagtgaattgcagatgagaagatcaagcctaccagccactgatgcagccc

SEQ ID NO: 226772 - DNA, 120 bp, Artificial Sequence
  ENSG00000118434_6 (sequence is synthesized)
gaccataggagtcattatctgtgtatttataattttcttattgatcttcataatcataaattgggcagcagtcaaggctttctggggggcaaaagcctctacacctgaggtacaatccga

SEQ ID NO: 226773 - DNA, 120 bp, Artificial Sequence
  ENSG00000118434_7 (sequence is synthesized)
gcagagttctgtgagatacaaagattcaacttctcttgaccaattaccaacagaaatgcctggtgaagatgatgctttaagtgaatggaatgaatgatgtttgaatgatatataacaaac

SEQ ID NO: 226774 - DNA, 120 bp, Artificial Sequence
  ENSG00000118434_8 (sequence is synthesized)
caaaggatattacagaatattagattcattattacaaaaataaaatacacattgaaatactttaataatgttgcgatggattgccacagtgtgaaggaaatgcagtgtggggataggact

SEQ ID NO: 226775 - DNA, 120 bp, Artificial Sequence
  ENSG00000118434_9 (sequence is synthesized)
attttatcagtgcatttttccagtacagttatcaaatattacttttaatttgttctcaacacttatttcaggtaatagcttggggatatttatctaaaggtacccccaacaaatcttcta

SEQ ID NO: 226776 - DNA, 120 bp, Artificial Sequence
  ENSG00000118434_10 (sequence is synthesized)
agtgcatttttgatcactttgataacttcttaggtgatttgcctgttttgtcttaaataagaacaatgtaatatagaaatgctttacatattagactttctctcccctggaagcactggg

SEQ ID NO: 226777 - DNA, 120 bp, Artificial Sequence
  ENSG00000118434_11 (sequence is synthesized)
ttgaacttgctaaagtaaatcatactttagaatctcttcagggaatgtgacatacaaagtttgtaagacatgaagtaataacgataatgataacaataaatgcttacttagtgactacta

SEQ ID NO: 226778 - DNA, 120 bp, Artificial Sequence
  ENSG00000118434_12 (sequence is synthesized)
gtctatacgagcagtgtgaattgcaaagccctgtccgtgatgtctcctacatgttgccttgaaactgtccatcgcctttcattactcctgtgactgccctagttcaggctgccccgtctc

SEQ ID NO: 226779 - DNA, 120 bp, Artificial Sequence
  ENSG00000118434_13 (sequence is synthesized)
tttatgtagatgctttttaaaacaatctcatgacttgcttctccaactatgagagagcttttaaatgcaacttttacaattttacacgggcagcagtcaaggctttctggggggcaaaag

SEQ ID NO: 226780 - DNA, 120 bp, Artificial Sequence
  ENSG00000118454_0 (sequence is synthesized)
gagcaagaggaagatggccgtgccctgtttttcggtgtaaggcagcgacggcggctgcgacggcgagactgagatcctggtgtcgtgggcacctgagttctagcttcccccagcgagcgc

SEQ ID NO: 226781 - DNA, 120 bp, Artificial Sequence
  ENSG00000118454_1 (sequence is synthesized)
gcgtcccttcgtgcctaggcgagagccggctcttccccgggagatgcgtttgtcccaggctcgggggctcagtgggagttcatgctgcgctggaggctcttggccaccgctctaatcgcc

SEQ ID NO: 226782 - DNA, 120 bp, Artificial Sequence
  ENSG00000118454_2 (sequence is synthesized)
ttgtgccgccgcagcgccagctccgtcgccagcggtgagcctcccgattcccccccttgcccctggcggcggcgatgaccggggagaagatccgctcactgcggagggaccacaagccca

SEQ ID NO: 226783 - DNA, 120 bp, Artificial Sequence
  ENSG00000118454_3 (sequence is synthesized)
gcaaagaagaaggggacctgctggagcccggggatgaggaagcggcggctgccctcggcggtacctttaccagaagcaggattggcaagggcggcaaagcttgtcataagatcttcagta

SEQ ID NO: 226784 - DNA, 120 bp, Artificial Sequence
  ENSG00000118454_4 (sequence is synthesized)
accatcaccaccggctacagctgaaggcagctccggcctcctccaatccccccggcgccccggctctgccgctgcacaattcctccgtgactgccaactcccagtccccggcccttctgg

SEQ ID NO: 226785 - DNA, 120 bp, Artificial Sequence
  ENSG00000118454_5 (sequence is synthesized)
ccggcaccaaccccgttgctgtcgtcgcggatggaggcagttgccccgcacactacccggtgcacgagtgcgtcttcaagggggatgtgaggagactctcctctctcatccgcacgcaca

SEQ ID NO: 226786 - DNA, 120 bp, Artificial Sequence
  ENSG00000118454_6 (sequence is synthesized)
atatcgggcagaaagataatcacggaaatactcctttacaccttgctgtgatgttaggaaataaagaatgtgcccatttacttttggctcacaatgctccagtcaaggtgaaaaatgctc

SEQ ID NO: 226787 - DNA, 120 bp, Artificial Sequence
  ENSG00000118454_7 (sequence is synthesized)
agggatggagccctctggcggaagccatcagctatggagataggcagatgattacagctcttttgaggaagcttaagcagcaatccagggaaagtgttgaagaaaaacgacctcgattat

SEQ ID NO: 226788 - DNA, 120 bp, Artificial Sequence
  ENSG00000118454_8 (sequence is synthesized)
taaaagccctgaaagagctaggtgacttttatctagaacttcactgggattttcaaagctgggtgcctttactttcccgaattctgccttccgatgcatgtaaaatatacaaacaaggta

SEQ ID NO: 226789 - DNA, 120 bp, Artificial Sequence
  ENSG00000118454_9 (sequence is synthesized)
tcaatatcaggcttgacacaactctcatagactttactgacatgaagtgccaacgaggggatctaagcttcattttcaatggggatgcggcgccctctgaatcttttgtagtattagaca

SEQ ID NO: 226790 - DNA, 120 bp, Artificial Sequence
  ENSG00000118454_10 (sequence is synthesized)
atgaacaaaaagtttatcagcgaatacatcatgaggaatcagagatggaaacagaagaagaggtggatattttaatgagcagtgatatttactctgcaactttatcaacaaaatcaattt

SEQ ID NO: 226791 - DNA, 120 bp, Artificial Sequence
  ENSG00000118454_11 (sequence is synthesized)
ctttcacgcgtgcccagacaggatggctttttcgggaagataaaacagaaagagtaggaaactttttggcagacttttacctggtgaatggacttgttttagaatcaaggaaaagaagag

SEQ ID NO: 226792 - DNA, 120 bp, Artificial Sequence
  ENSG00000118454_12 (sequence is synthesized)
aacatctcagtgaagaggatattcttcgaaataaggccatcatggagagtttgagtaaaggtggaaacataatggaacagaattttgagccgattcgaagacagtctcttacacctcctc

SEQ ID NO: 226793 - DNA, 120 bp, Artificial Sequence
  ENSG00000118454_13 (sequence is synthesized)
ctcagaacactattacatgggaagaatatatatctgctgaaaatggaaaagctcctcatctgggtagagaattggtgtgcaaagagagtaagaaaacgtttaaagctacgatagccatga

SEQ ID NO: 226794 - DNA, 120 bp, Artificial Sequence
  ENSG00000118454_14 (sequence is synthesized)
gccaggaatttcccttagggatagagttattattgaatgttttagaagtagtagctcccttcaagcactttaacaagcttagagaatttgttcagatgaagcttcctccaggctttcctg

SEQ ID NO: 226795 - DNA, 120 bp, Artificial Sequence
  ENSG00000118454_15 (sequence is synthesized)
taaaattagatatacctgtgtttcccacaatcacagccactgtgacttttcaggagtttcgatacgatgaatttgatggctccatctttactatacctgatgactacaaggaagacccaa

SEQ ID NO: 226796 - DNA, 120 bp, Artificial Sequence
  ENSG00000118454_16 (sequence is synthesized)
gccgttttcctgatctttaactgacgtggaaaaggatgccgtctaaccaaggaaagaaaatacagagaccctagaagtggatccaaatagaagggacaaatgctttcagtgaagaaaagg

SEQ ID NO: 226797 - DNA, 120 bp, Artificial Sequence
  ENSG00000118454_17 (sequence is synthesized)
gaattacacattgaatcgacacatcagtaatacgatacagtgaaatgggcctctaataagaatttcagcgagttttctgatgtgccattttttgtctttttaaaaatatacatattataa

SEQ ID NO: 226798 - DNA, 120 bp, Artificial Sequence
  ENSG00000118454_18 (sequence is synthesized)
atgtaatagtttgacacattaatgaccctaagacctgcgtatgtgaagcagctatgagtgctgtgatttgtttttaaaaatttttacacttcttgttgaaatatatatgcatataaatat

SEQ ID NO: 226799 - DNA, 120 bp, Artificial Sequence
  ENSG00000118454_19 (sequence is synthesized)
atctatatctatatctatatctaaaacactcctggaccattaacgtaaattaaatgtcttaagagatatggagcccttttaaacttgtcatctttatgcaaggtgacatttataaatatt

SEQ ID NO: 226800 - DNA, 120 bp, Artificial Sequence
  ENSG00000118454_20 (sequence is synthesized)
ccttcgagctttgttttcataaaatgtaaactatgtaacattatgtatagttcagtaatttgaatgtttgttcaatataatgaactagaaggaatgcaattttctgtagatgaatgaacc

SEQ ID NO: 226801 - DNA, 120 bp, Artificial Sequence
  ENSG00000118454_21 (sequence is synthesized)
aaatggtaaccattaaacaattgcatttatatgttgcaatacatttcagaaggagcgttcactctgcagggaataaggtacctcctttagcaccttagtgcaattcattgtggtgctatt

SEQ ID NO: 226802 - DNA, 120 bp, Artificial Sequence
  ENSG00000118454_22 (sequence is synthesized)
tgtttttacctgaatgtttgttactaatcttcctttcatagaacctctattttttttttttctaaacttgagtttgagtccttgttatggtcatcataaggtaatggttagcatgtttaa

SEQ ID NO: 226803 - DNA, 120 bp, Artificial Sequence
  ENSG00000118454_23 (sequence is synthesized)
tctcagcactttaaaaaaaaatccaaatttttaaacttgcttcctaataagtacacatcggtctgattattttgtttgtttttagtagaatatggatgcattggtgtcagttttaaaaaa

SEQ ID NO: 226804 - DNA, 120 bp, Artificial Sequence
  ENSG00000118454_24 (sequence is synthesized)
caatacacatattttggacaaccctacatatttaatcctttcaaaataagataaaaacattttatatgctaacagaatatatttgttacaagttaaagtccagaagtatacacaagattg

SEQ ID NO: 226805 - DNA, 120 bp, Artificial Sequence
  ENSG00000118454_25 (sequence is synthesized)
attactcctattattttttttaaatcacaggaaaatattgatttcattgtctccaaagtgataaaatcatgtattactcatttttgcacttaaaatttttcttatttattccaaggtggt

SEQ ID NO: 226806 - DNA, 120 bp, Artificial Sequence
  ENSG00000118454_26 (sequence is synthesized)
ttgaaggtccaagtatgaaaataaattagggggattaatgtataacagttataaagtatcatgttgtattaaagagcttacttagattgatgtttttaaaatgtatcctgatgaatgtct

SEQ ID NO: 226807 - DNA, 120 bp, Artificial Sequence
  ENSG00000118454_27 (sequence is synthesized)
caagaatgcatctgtcaagttttttagactgaccagtagcttaaacttttttcaggattttaggtaatttgaaaggagtttagagacccttattgaaaatatgatttaaaaatccaaagc

SEQ ID NO: 226808 - DNA, 120 bp, Artificial Sequence
  ENSG00000118454_28 (sequence is synthesized)
ataaaccgtaagaaaaattttaaataaacatctttaaagctgcatcttccatactgatacatgcattgcgtatgttgacattaaatacattttataatgaagaaaaataatcatagtaaa

SEQ ID NO: 226809 - DNA, 120 bp, Artificial Sequence
  ENSG00000118454_29 (sequence is synthesized)
aaattgaaagacctaattactacgttacatggacctattgaattttgggggaacgtgttagtaaacccagactagctttgttgaatagaagttgatcgctgttatttaggaaatgggtag

SEQ ID NO: 226810 - DNA, 120 bp, Artificial Sequence
  ENSG00000118454_30 (sequence is synthesized)
atcaaatgacttagagactgaattatcctatcagtggttacatggggttggagacactgaaaggcagtgatcactgttgcttctaggctcccttactttgtaggaatatggtatactttc

SEQ ID NO: 226811 - DNA, 120 bp, Artificial Sequence
  ENSG00000118454_31 (sequence is synthesized)
aggaatatgctatatatgttttcataagtacagacaccttagggaagaaaaaaagtgggtaattgaagcttatggttgattaatttcctaacagcacagctatgaatattttgctggggt

SEQ ID NO: 226812 - DNA, 120 bp, Artificial Sequence
  ENSG00000118454_32 (sequence is synthesized)
acactggaggtaggaagactactggaaatttttgcacttgaattttgtttttaaagcttttttctttaaagaatggtagaaacagattatccattccaaaatgtcttttctctgatcaca

SEQ ID NO: 226813 - DNA, 120 bp, Artificial Sequence
  ENSG00000118454_33 (sequence is synthesized)
aagagcaaacaaatgtcaatatctcttatgatggtgaaaaaaaggaattaatcgatgcaaataaacttttcacagtattacttttaatgaagatttttcgaaatgtgccttttaatccag

SEQ ID NO: 226814 - DNA, 120 bp, Artificial Sequence
  ENSG00000118454_34 (sequence is synthesized)
ttaatgaatgaagctatatgcagtgtttcaaatgaataagtcaaaacaccatatgttttcataataccacatgaaaaatcaagattttgcaatgtaggtacacaaaattctatatgttct

SEQ ID NO: 226815 - DNA, 120 bp, Artificial Sequence
  ENSG00000118454_35 (sequence is synthesized)
tctccatttgtgattttgaaactgtttaaattggtagggggacaatcgtatagtcatcttcaatagccatttagaaatggttaatattcttgcccactggtatggtatccagagaagata

SEQ ID NO: 226816 - DNA, 120 bp, Artificial Sequence
  ENSG00000118454_36 (sequence is synthesized)
tggtttccatctttgagaaaataattctctgatgagacaatttgccctctgtagatattcacatacagagaattgccaaacttcataaaagggtagtatgaagtagatgccctgattttt

SEQ ID NO: 226817 - DNA, 120 bp, Artificial Sequence
  ENSG00000118454_37 (sequence is synthesized)
gtgagtataagaagtacagatgatggtttggaaactgtcacatctgtctgctgatacatgttagtagatgaaaaactgtttccttctgctcagaactggaattaagccccactcatgcta

SEQ ID NO: 226818 - DNA, 120 bp, Artificial Sequence
  ENSG00000118454_38 (sequence is synthesized)
ataaaaatgggtttttatagtagtattcacatacagtttattattcacacactgggggagggtgatgaataatgattatttaatgagccctcttcctagttttccctaagtctgcagaag

SEQ ID NO: 226819 - DNA, 120 bp, Artificial Sequence
  ENSG00000118454_39 (sequence is synthesized)
acaaagatcctgtttccaggccatgaaaggactgaagtaaatattgtaaataagtacagctgacccttgaacaacatggaggttaggggttcagttgaaaatctgcatgtaagtggacct

SEQ ID NO: 226820 - DNA, 120 bp, Artificial Sequence
  ENSG00000118454_40 (sequence is synthesized)
gtgcagtccaaacctgtgtttaactgctgaattaaaggtgcttccttctgctcattgatattacccatatttacaaacatgctagagaaaagcaactggtgtaaaacttgcccccactag

SEQ ID NO: 226821 - DNA, 120 bp, Artificial Sequence
  ENSG00000118454_41 (sequence is synthesized)
agaaatggacaggaggtattaagtcacttgtaaagatagatagcagaactaagcttggtaaaagcccatgattgtttgtatactataaattagccaaaactactcttgcaaagcatttta

SEQ ID NO: 226822 - DNA, 120 bp, Artificial Sequence
  ENSG00000118454_42 (sequence is synthesized)
tgtcagaaatctggggcaatagtaactaactctggttgccacctaaaaatttcataacatgttaagaatcacattttttacatcatgcaaaccatccttacagagtgagcttaccttgtg

SEQ ID NO: 226823 - DNA, 120 bp, Artificial Sequence
  ENSG00000118454_43 (sequence is synthesized)
atgagctttttaattgttacagttcattttagaagagtaatactttcagtcataatggtacctatggtacatagaattacaattttgctttttccacacactgaaaaatattgaagcaaa

SEQ ID NO: 226824 - DNA, 120 bp, Artificial Sequence
  ENSG00000118454_44 (sequence is synthesized)
atcttaagaacttctaagaaaggtgcttgttaatcattcttggttttcatcatgttttgcggtgaaaatgactttaattagagtagaaatattgtctaacataaaaccaaaaagataaaa

SEQ ID NO: 226825 - DNA, 120 bp, Artificial Sequence
  ENSG00000118454_45 (sequence is synthesized)
cccaccacttatttacctgtacctcccatacatagagttcttgatgactaaagaaggatgacagtaattgggatgttctaaatacagttgtgtgtcacttaatgatgggtacatgttctg

SEQ ID NO: 226826 - DNA, 120 bp, Artificial Sequence
  ENSG00000118454_46 (sequence is synthesized)
tggaatgcatcaggtgattttgtcattgtgagaaccatattgggtgtacttacacaaacctaggtggtatagcataccactcacctagactatacaataaagcctattgctccgagacca

SEQ ID NO: 226827 - DNA, 120 bp, Artificial Sequence
  ENSG00000118454_47 (sequence is synthesized)
ataatttttaattcttctaatttgtagttttctaagaagagaggggatagatttcattcttggtggcattcagtaagtatataaatgtactcacagcttttatttactgtgtgttacctt

SEQ ID NO: 226828 - DNA, 120 bp, Artificial Sequence
  ENSG00000118454_48 (sequence is synthesized)
tttctgtgaatcttcatttcgttgatgtcattattatgaagacaaaaaaatgtcttttgggatttttttgtgaatctgtactttatctttgagtcttcattaataaatagattaaaagcg

SEQ ID NO: 226829 - DNA, 120 bp, Artificial Sequence
  ENSG00000118454_49 (sequence is synthesized)
tgtaatattaagaagatttacagtggttaccttcctgatcctggatttattaaggaataagggacacataaggaagacccaattcttgcctttttctccatctctttcatgtctttcctt

SEQ ID NO: 226830 - DNA, 120 bp, Artificial Sequence
  ENSG00000118454_50 (sequence is synthesized)
cccctgtttactaatccgtgtatccgttcatctgttcattcattgatctatccaatccagtgaatattttgaggctaattttaattttcctcattctgttccttttataactaagattaa

SEQ ID NO: 226831 - DNA, 120 bp, Artificial Sequence
  ENSG00000118473_0 (sequence is synthesized)
atcttcttggtagcctgcctgtaggtgaagaagcaccagcagcatccatggcctgtcttttggcttaacacttatctcctttggctttgacagcggacggaatagacctcagcagcggcg

SEQ ID NO: 226832 - DNA, 120 bp, Artificial Sequence
  ENSG00000118473_1 (sequence is synthesized)
tggtgaggacttagctgggacctggaatcgtatcctcctgtgttttttcagactccttggaaattaaggaatgcaattctgccaccatgatggaaggattgaaaaaacgtacaaggaagg

SEQ ID NO: 226833 - DNA, 120 bp, Artificial Sequence
  ENSG00000118473_2 (sequence is synthesized)
cctttggaatacggaagaaagaaaaggacactgattctacaggttcaccagatagagatggaattcagcccagcccacacgaaccaccctacaatagcaaagcagagtgtgcgcgtgaag

SEQ ID NO: 226834 - DNA, 120 bp, Artificial Sequence
  ENSG00000118473_3 (sequence is synthesized)
gaggaaaaaaagtttcgaagaaaagcaatggggcaccaaatggattttatgcggaaattgattgggaaagatataactcacctgagctggatgaagaaggctacagcatcagacccgagg

SEQ ID NO: 226835 - DNA, 120 bp, Artificial Sequence
  ENSG00000118473_4 (sequence is synthesized)
aacccggctctaccaaaggaaagcacttttattcttcaagtgaatcggaagaagaagaagaatcacataagaaatttaatatcaagattaaaccattgcaatctaaagacattcttaaga

SEQ ID NO: 226836 - DNA, 120 bp, Artificial Sequence
  ENSG00000118473_5 (sequence is synthesized)
atgctgcaactgtagatgaattgaaggcatcaataggcaacatcgcactttccccatcaccagtgaggaaaagtccgaggcgcagcccgggtgcaattaaaaggaacttatccagtgaag

SEQ ID NO: 226837 - DNA, 120 bp, Artificial Sequence
  ENSG00000118473_6 (sequence is synthesized)
aagtggcaagacccaggcgttccacaccaactccagaacttataagcaaaaagcctccagatgacactacggcccttgctcctctctttggcccaccactagaatcagcttttgatgaac

SEQ ID NO: 226838 - DNA, 120 bp, Artificial Sequence
  ENSG00000118473_7 (sequence is synthesized)
agaagacagaagttcttttagatcagcctgagatatggggttcaggccaaccaattaatccaagcatggagtcgccaaagttaacaaggccttttcccactggaacacctccaccactgc

SEQ ID NO: 226839 - DNA, 120 bp, Artificial Sequence
  ENSG00000118473_8 (sequence is synthesized)
ctccaaaaaatgtaccagctaccccaccccgaacaggatcccccttaacaattggaccaggaaatgaccagtcagccacagaggtcaaaattgaaaaactaccatccatcaatgacttgg

SEQ ID NO: 226840 - DNA, 120 bp, Artificial Sequence
  ENSG00000118473_9 (sequence is synthesized)
acagcatttttgggccagtattgtcccccaagtctgttgctgttaatgctgaagaaaagtgggtccatttttctgatacatccccggaacatgttactccggagttgactccaagggaaa

SEQ ID NO: 226841 - DNA, 120 bp, Artificial Sequence
  ENSG00000118473_10 (sequence is synthesized)
aagtggtgtccccaccagctacaccagacaacccagctgactccccagctccaggccctctcggccccccaggtcccacaggccccccagggcctcctgggcctcctcgcaatgtactat

SEQ ID NO: 226842 - DNA, 120 bp, Artificial Sequence
  ENSG00000118473_11 (sequence is synthesized)
cgccgctcaatttagaagaagtccagaagaaagtcgctgagcagaccttcattaaagatgattacttagaaacaatctcatctcctaaagattttgggttgggacaaagagcaactccac

SEQ ID NO: 226843 - DNA, 120 bp, Artificial Sequence
  ENSG00000118473_12 (sequence is synthesized)
ctcccccaccaccacccacctacaggactgtggtttcgtcccccggacctggctcgggccctggtccggggaccaccagtggtgcatcatcccctgctcgaccagccactcctttggttc

SEQ ID NO: 226844 - DNA, 120 bp, Artificial Sequence
  ENSG00000118473_13 (sequence is synthesized)
cttgcagaagtaccactccacctccacctcctccccggcctccatcccggccaaagctacctccaggaaaacctggagttggagatgtgtccagaccttttagccctcccattcattctt

SEQ ID NO: 226845 - DNA, 120 bp, Artificial Sequence
  ENSG00000118473_14 (sequence is synthesized)
ccagccctcctccaatagcacccttagcgcgggctgaaagcacttcttcaatatcgtcaaccaattccttgagcgcagccaccactcccacagttgagaatgaacagccttccctcgttt

SEQ ID NO: 226846 - DNA, 120 bp, Artificial Sequence
  ENSG00000118473_15 (sequence is synthesized)
ggtttgacagaggaaagttttatttgacttttgaaggttcttccaggggacccagccccctaaccatgggagctcaggacactctccctgttgcagcagcatttacagaaacagtcaatg

SEQ ID NO: 226847 - DNA, 120 bp, Artificial Sequence
  ENSG00000118473_16 (sequence is synthesized)
cctatttcaaaggagcagacccaagcaaatgtatcgttaagattaccggagaaatggtgttgtcatttcctgctggcatcaccagacactttgccaacaacccgtccccagctgctctga

SEQ ID NO: 226848 - DNA, 120 bp, Artificial Sequence
  ENSG00000118473_17 (sequence is synthesized)
cttttcgggtgataaatttcagcaggttagaacacgtcctgccaaacccccaacttctctgctgtgataatacacaaaatgatgccaataccaaggaattctgggtaaacatgccaaatt

SEQ ID NO: 226849 - DNA, 120 bp, Artificial Sequence
  ENSG00000118473_18 (sequence is synthesized)
tgatgactcacctaaagaaagtgtctgaacaaaaaccccaggctacatattataacgttgacatgctcaaatatcaggtgtctgcccagggcattcagtccacacctctgaacctggcag

SEQ ID NO: 226850 - DNA, 120 bp, Artificial Sequence
  ENSG00000118473_19 (sequence is synthesized)
tgaattggcgatgtgagccttcaagcactgacctgcgcatagattacaaatataatacagatgcaatgacgactgctgtggccctcaacaatgtgcagttcctggtccccatcgacggag

SEQ ID NO: 226851 - DNA, 120 bp, Artificial Sequence
  ENSG00000118473_20 (sequence is synthesized)
gagtcaccaagctccaggcagtgctcccaccagcagtctggaatgctgaacaacagagaatattgtggaagattcctgatatctctcagaagtcagaaaatggaggggtgggttctttgt

SEQ ID NO: 226852 - DNA, 120 bp, Artificial Sequence
  ENSG00000118473_21 (sequence is synthesized)
tggcaagatttcagttatctgaaggcccaagcaaaccttctccattggttgtgcagttcacaagtgaaggaagcaccctttctggctgtgacattgaacttgttggagcagggtatcgat

SEQ ID NO: 226853 - DNA, 120 bp, Artificial Sequence
  ENSG00000118473_22 (sequence is synthesized)
tttcactcatcaagaaaaggtttgctgcaggaaaatacttggcagataactaatgaaatcttatgcaaggatttggaggattcatataatggagaactgatgtatgagaaacagatttta

SEQ ID NO: 226854 - DNA, 120 bp, Artificial Sequence
  ENSG00000118473_23 (sequence is synthesized)
attttggtttgatgaaaacaaaccaatatctgcacttgggatatatcaggtggaaagtcaatgactttcatctgtgatttccctcacacactaccatgatgaccagtcctacagtattta

SEQ ID NO: 226855 - DNA, 120 bp, Artificial Sequence
  ENSG00000118473_24 (sequence is synthesized)
cttctaggtgtaatattgttaatggttttaaaatgtaattattgtatttgtaaattgtactctcattccagtaaggcagttagacacttgagttttagcattttaccattcctgaaatgg

SEQ ID NO: 226856 - DNA, 120 bp, Artificial Sequence
  ENSG00000118473_25 (sequence is synthesized)
atgtaatttaaactgtggtatgtaaatttaatagtagtattgttgaatggcacaatgcttacagaggtagattgcattttgtcaatatataaaatttaaatataatattgatagctgtca

SEQ ID NO: 226857 - DNA, 120 bp, Artificial Sequence
  ENSG00000118473_26 (sequence is synthesized)
taaagggggtgccacatattaaagaaacttaagtggaaccagaagaaaaagaaacaaacttacttttcttcaatgcttagtatgttttactctagtgctaaataaaaactctatcttcaa

SEQ ID NO: 226858 - DNA, 120 bp, Artificial Sequence
  ENSG00000118473_27 (sequence is synthesized)
atgtttagtgggttaaattgagaaactatttcagaaaaaaattctaaggttacagcatattcaaagaaaagcattagttaccactttttaaaaagcttttttttcaaactgcaaatttca

SEQ ID NO: 226859 - DNA, 120 bp, Artificial Sequence
  ENSG00000118473_28 (sequence is synthesized)
taaaaatgcaaactgtgtaaacagggcctcttatttttataacttgtgtaaaaagggaaagcaattcatatttaaagtttaagtatattaaattataatcaagagtaaagaagatgttga

SEQ ID NO: 226860 - DNA, 120 bp, Artificial Sequence
  ENSG00000118473_29 (sequence is synthesized)
agtcttaactacttgcccctctctacagtttcgcaaatgtggggattgctgaataatcagtcagactaaaaccaaaattgtgattttaagatttcaagactttccgtagttgaactggtt

SEQ ID NO: 226861 - DNA, 120 bp, Artificial Sequence
  ENSG00000118473_30 (sequence is synthesized)
aagaatttttgcttagttactctgaatagatgatcttactcatccagtatgggggaatgatacctcacgtcttcctctttacccacaggaatcaaaacgctgagactgagaattttaggg

SEQ ID NO: 226862 - DNA, 120 bp, Artificial Sequence
  ENSG00000118473_31 (sequence is synthesized)
aaaaaaaagtccactgtttagatccagaaggagagttttaatcattgtttatatcatttgagaatgaaaaaataagcttcataaatgaaattctattcacattactgtgtaataaatttc

SEQ ID NO: 226863 - DNA, 120 bp, Artificial Sequence
  ENSG00000118473_32 (sequence is synthesized)
cttttggatgattaggattcattgtataaaactgtaaatctttgccattcttggagaagcaaaaggagagttatcaaaaatgtatgtcgtttcatcgttgcaaggtataataaaaactgt

SEQ ID NO: 226864 - DNA, 120 bp, Artificial Sequence
  ENSG00000118473_33 (sequence is synthesized)
aattattcaatctggccctgccatatgaacatttagaaagacaaacttcttcgggagtctcagttgtaaaaccttccctcattaatatctgaaaatgttagtcttcctttaagtcataga

SEQ ID NO: 226865 - DNA, 120 bp, Artificial Sequence
  ENSG00000118473_34 (sequence is synthesized)
accaatttctattacaggttatgctattaaatagctgtaattattaagttattatttttataattagttgttaaatttcattttacacccactcaaatttaacaaagaatctttagcccc

SEQ ID NO: 226866 - DNA, 120 bp, Artificial Sequence
  ENSG00000118473_35 (sequence is synthesized)
aagaatctttagcccctttaaattttagaattaaattaaatttttaaagttttacttctaaaatgagattgtgactggcaattgtttatagtgaaactttttaaattaatctttgtactc

SEQ ID NO: 226867 - DNA, 120 bp, Artificial Sequence
  ENSG00000118473_36 (sequence is synthesized)
ctctatcagtgcttgctaccaagagaatgtccaaaatgatttgttttaccatgggaaaattcttactattcaacaaactctcagttggccccctacagcagtctggtgttgaagtttctt

SEQ ID NO: 226868 - DNA, 120 bp, Artificial Sequence
  ENSG00000118473_37 (sequence is synthesized)
tgaacgaactaaatatactcattttatgtaaaggtatccaatttgattttgaaaccaaaatagaaaatgcaaaattctaaattccatgaaacatggaatttatgacaccaaaatcaatgg

SEQ ID NO: 226869 - DNA, 120 bp, Artificial Sequence
  ENSG00000118473_38 (sequence is synthesized)
agagtaagcagcagcaaactgagaattatccagcatatgaatataacaatgtgtttttaagtaatcaattcatttaaaaaattgaatattaatacaaagcatattaaaaacatgtaaata

SEQ ID NO: 226870 - DNA, 120 bp, Artificial Sequence
  ENSG00000118473_39 (sequence is synthesized)
ttactggttctcatgtctttgtatttatattttattttgttttattttgtatagatctagaatgaattagtaattaaacacaagggtttttttcccaaaaaataattttactgattttta

SEQ ID NO: 226871 - DNA, 120 bp, Artificial Sequence
  ENSG00000118473_40 (sequence is synthesized)
aaaatttaattaaaaacatagattacagtaatctctaacattattcaaatctttctagggattaaattagaaactatgaagaaatcctataatctcttaactggtctttatggaacagaa

SEQ ID NO: 226872 - DNA, 120 bp, Artificial Sequence
  ENSG00000118473_41 (sequence is synthesized)
tgggagtcaacaatttcaaaatgattgaactatgagtaaccagaacctcaatagaaaatgtatcccttcacctttcagaaaagagatcaaataataacacaataagctggtatcagggat

SEQ ID NO: 226873 - DNA, 120 bp, Artificial Sequence
  ENSG00000118473_42 (sequence is synthesized)
ttgcattttgacattttgttgtttctttttaattttgtagattataatctcctgttacatctatatccacagtactgtagaataagaattcatgtcctgaaaatggtcccaggcaatgaa

SEQ ID NO: 226874 - DNA, 120 bp, Artificial Sequence
  ENSG00000118473_43 (sequence is synthesized)
agagtctcagttatcaaagacattaagtcagattcatttattcattttattcccaagtcagaacaaaatgaactagtaggtaataaaactattttcagtactaggggttaaaacaaaaag

SEQ ID NO: 226875 - DNA, 120 bp, Artificial Sequence
  ENSG00000118473_44 (sequence is synthesized)
ctgctttagcaagataaaaagtataaatgatgctactttattttggcaacatggaaattttgtttttcttttccaataaaatccatattttcgtgaaatttttaaaaataaatttgtatc

SEQ ID NO: 226876 - DNA, 120 bp, Artificial Sequence
  ENSG00000118473_45 (sequence is synthesized)
aaggattagtctgaattttatcataatagaaatttataattactaagaattaaatttttaatcatttttaaagctgtgttcttctctacacccacagccaaaatggaaattcactgtatg

SEQ ID NO: 226877 - DNA, 120 bp, Artificial Sequence
  ENSG00000118473_46 (sequence is synthesized)
gtatttgggaatatatttcacctgtaaaagaaagaatgtccacaattcaaacggttttgagttaatagataggaatccctcagtcaaactacagaattttttttgttttatatattctta

SEQ ID NO: 226878 - DNA, 120 bp, Artificial Sequence
  ENSG00000118473_47 (sequence is synthesized)
gtcagcagagtgtttgagctataattacaagtatttccacttctaaatcttcttttagaaaagcagataactataataccttggctctgccactgactcctgccgtatgatattggacaa

SEQ ID NO: 226879 - DNA, 120 bp, Artificial Sequence
  ENSG00000118473_48 (sequence is synthesized)
atcactgcccttttcagtttctcatctttagaatggggagttgggattgccagtggttttcaagcttttcttaacagcagggctttttttctaataaaattgcacatggaatcctggtag

SEQ ID NO: 226880 - DNA, 120 bp, Artificial Sequence
  ENSG00000118473_49 (sequence is synthesized)
gcaaaacagctcaaagcaatgcaggagtttctccaacagtttaaattggggctccccagagcatggtttaaataccataacagtacacaatgatctatcatgtgtcttccaactctgaag

SEQ ID NO: 226881 - DNA, 120 bp, Artificial Sequence
  ENSG00000118473_50 (sequence is synthesized)
ttccacagttgtaatttactcagataaaccaccttttgaggctttataagcaaacttgtaaaaacacagtaattgaatgatatacaataaaaactgacagagtgtttaccatgtaccagt

SEQ ID NO: 226882 - DNA, 120 bp, Artificial Sequence
  ENSG00000118473_51 (sequence is synthesized)
cactagagatattagctcatttaattctcttatcaatcaaaaaattgtaagtactctttttaattcctgttttacaagtgatgacactgaggcttaaatagaataatctccccaaaatga

SEQ ID NO: 226883 - DNA, 120 bp, Artificial Sequence
  ENSG00000118473_52 (sequence is synthesized)
cacggcagctgaaagtaacccagctattctgactgcaaaggaaacgccttaattgctttgtccaccctgaacaaaacaatctgttttatgtcactatacgtactccatttgaatgccaag

SEQ ID NO: 226884 - DNA, 120 bp, Artificial Sequence
  ENSG00000118473_53 (sequence is synthesized)
gtagaaggcaccatgaaaaaccattaccaaaataaggataattccaataacaaaactgtcaaaaaagaatcactgcttctcaaaatatgattggtatcatcacttattaatgttttgtat

SEQ ID NO: 226885 - DNA, 120 bp, Artificial Sequence
  ENSG00000118473_54 (sequence is synthesized)
catcacttattaatgattttggcttggtcaccactatgcctggaagatagtaggcactgataaacattgttaaacaccgtaacaacacaaaatgatctaccacatatcaatgtcttccat

SEQ ID NO: 226886 - DNA, 120 bp, Artificial Sequence
  ENSG00000118473_55 (sequence is synthesized)
ctctgaaattccatgattctactttactcagatataccaccttttgtggcattataaggaaacatgtataatcaagttcatacaagctatacacagtaggcatcgataaatttgtattga

SEQ ID NO: 226887 - DNA, 120 bp, Artificial Sequence
  ENSG00000118473_56 (sequence is synthesized)
cagcataaacttctagggatgagatttgggaatatacattttgataagtgctccaaatttgagaatcattgctctagtagatctctaaggtccttcttagttctgacattatatcagatt

SEQ ID NO: 226888 - DNA, 120 bp, Artificial Sequence
  ENSG00000118473_57 (sequence is synthesized)
ttaagcattaaattctaagatgaaaaccatttttctagtcagtttatttttcattcagtccacttaatttcctccaatcttaaaaaatttttttccctaggaaaatccctatctttttct

SEQ ID NO: 226889 - DNA, 120 bp, Artificial Sequence
  ENSG00000118473_58 (sequence is synthesized)
taaagttactctgttatactatctcagtctcaaagtagcctgaaatgcattttctcattttcatatttctgtccttttcttcaatgtcttaaaagacttgaagtagaagggaagttgcaa

SEQ ID NO: 226890 - DNA, 120 bp, Artificial Sequence
  ENSG00000118473_59 (sequence is synthesized)
gctgttatttattcaaatacaaaatcctaatcaatgtttccttctttgcaagggacattcagatctctaacttgtgagttgaacctatttattttgtaagcttttgactttacaaacatg

SEQ ID NO: 226891 - DNA, 120 bp, Artificial Sequence
  ENSG00000118473_60 (sequence is synthesized)
tggtagcctcattctaaaagagttgcacgaatattttttctcaaaataaccacaggctgtaaattaaattgaacaatacagtagaatatgcagatacatactaaacagatgagtgtgtgt

SEQ ID NO: 226892 - DNA, 120 bp, Artificial Sequence
  ENSG00000118473_61 (sequence is synthesized)
gtatgtgtctgtgtttaagcttttccttttccaaaagattatacatttgagcaaaatcccattcagtctaaatgtactcattttgccacatggttttctgatcagcaatttttttaaaaa

SEQ ID NO: 226893 - DNA, 120 bp, Artificial Sequence
  ENSG00000118473_62 (sequence is synthesized)
atggaagtgttacattatatttaataatatcaaaacaagagtgatctctaaatatagctttgaaagttaatataatatgatgtgtccatgcaatgagtcaaattagattgttgatataaa

SEQ ID NO: 226894 - DNA, 120 bp, Artificial Sequence
  ENSG00000118473_63 (sequence is synthesized)
tgaacaaatcaatccaagttacattgattaaagggactatttggatgaccagcctcaccatcttttactgtgtgcactttcctcttaaggttttattgtattttccctgctcctttaggc

SEQ ID NO: 226895 - DNA, 120 bp, Artificial Sequence
  ENSG00000118473_64 (sequence is synthesized)
ttttttttcatgtggaaaacagtatctaaatgccattctctcacttatgaattaaatatggctaccattaatgttcctttttgtcagtggagtgtatggaaggaaaatgagataggagta

SEQ ID NO: 226896 - DNA, 120 bp, Artificial Sequence
  ENSG00000118473_65 (sequence is synthesized)
cattgcttaagtctctaaatattaaaaacaacaacaaaacacttgcctttctcttgtgtcattgcttcaatgttctgtcatcttctgcaagctagagttgcactgctgacatctaattaa

SEQ ID NO: 226897 - DNA, 120 bp, Artificial Sequence
  ENSG00000118473_66 (sequence is synthesized)
gatctaaatatatttcatgaaggaatgtcaaatgtaaagtctgttgagttgaccatggtgaacctcttgattggccctcacatttaatatctgatttctctcctaaatgggtatgtctat

SEQ ID NO: 226898 - DNA, 120 bp, Artificial Sequence
  ENSG00000118473_67 (sequence is synthesized)
gaggaaaagacacctatttgttggcattgaccatgggtataataatttattctctaggtttaacttctaaaattatttttcctttgatttctaactgcctccttctatccctagagtaat

SEQ ID NO: 226899 - DNA, 120 bp, Artificial Sequence
  ENSG00000118473_68 (sequence is synthesized)
accttgcctaccttaaatacatctttatccttgtaaaaaatgttttggcaaaaaacaaatatatttttaaatgtcccgtaatgttttaaagaaaagaagtaaagtgtatttgggctatgc

SEQ ID NO: 226900 - DNA, 120 bp, Artificial Sequence
  ENSG00000118473_69 (sequence is synthesized)
tcaccaatattccagtattttacaaattgtgttctggaagatgttcattgtggtctgagaacaaatggtcctatactataattctctctccttggacattgacaataaatgttagtgttt

SEQ ID NO: 226901 - DNA, 120 bp, Artificial Sequence
  ENSG00000118473_70 (sequence is synthesized)
taatgaagcttaagaaagttattgaatcaggtaaaaaaaattttttctaagcacaccttgagaaacctttggaaaagttttcttttaacactagtttatatatccttcaataattgtaaa

SEQ ID NO: 226902 - DNA, 120 bp, Artificial Sequence
  ENSG00000118473_71 (sequence is synthesized)
taaaataaccaggaatgctttgaaaaaaatgcttctggaattttgttttaattttaagagaattcctgtcatttcaaatgaattgttatctattttaaatttcattagtatctcttagtg

SEQ ID NO: 226903 - DNA, 120 bp, Artificial Sequence
  ENSG00000118473_72 (sequence is synthesized)
aatttaactttatcatctaaaatattcaaaacaaaacaataaaattattttaatttttgtattatttttaaggcttgcacctatgaccagcatatcagacccctatctgttgaagatgtt

SEQ ID NO: 226904 - DNA, 120 bp, Artificial Sequence
  ENSG00000118473_73 (sequence is synthesized)
tccaattctttgccgtgtggaattaatgccagtgaataatctccagtaacgttttactaaacagctttaggaaactgaatcatgatagatcaatgttgacagtatttttacatcagcttg

SEQ ID NO: 226905 - DNA, 120 bp, Artificial Sequence
  ENSG00000118473_74 (sequence is synthesized)
tcagaaattatattaaaaacactttggggaaagctaagagcagtgcactgtttagcacagattttgtgagattctatactcttttaatgagcatttcatagggttttttttttgctgttt

SEQ ID NO: 226906 - DNA, 120 bp, Artificial Sequence
  ENSG00000118473_75 (sequence is synthesized)
ttttttctttttttgctttgctttactttgccaatcagttacttttataccaaattaacgaagtttctttaaaaacttcctggttaaattgtctgttatcatatagaaaagaatcaaact

SEQ ID NO: 226907 - DNA, 120 bp, Artificial Sequence
  ENSG00000118473_76 (sequence is synthesized)
gaatcactttacatttctctaaagatagttcagtttttaatccatccagagtttgtgaatcagcctgatagatcataagccatttataatttttaaacgttccattgaatgagtatatca

SEQ ID NO: 226908 - DNA, 120 bp, Artificial Sequence
  ENSG00000118473_77 (sequence is synthesized)
tacaaatgttaattccatctcgctcattcagttttacattacttttatgaattttttttctcgcaaagtaaatgcttgatgttattcattcaccatcactctaaggtattttaaatcata

SEQ ID NO: 226909 - DNA, 120 bp, Artificial Sequence
  ENSG00000118473_78 (sequence is synthesized)
caacaagtaactatcacaagaaccactgtcccaagatccaaagtcagatttttttcccttttcaagttgctagaatgataattcatatagctgtgttgatttttcaggtcagaatttagt

SEQ ID NO: 226910 - DNA, 120 bp, Artificial Sequence
  ENSG00000118473_79 (sequence is synthesized)
aatttagttcttgctttgttaaatggacatacatgaaagagattggctcctatctaattcatattctctctctctctctctctctttctctgtgtgtgtgtgggggtgtgtgtgtgtgtg

SEQ ID NO: 226911 - DNA, 120 bp, Artificial Sequence
  ENSG00000118473_80 (sequence is synthesized)
tgtgtgtgtctctttcctctctgtctaaggggaattggaaaattgctgctgaataatttttcttgaaaaagccaagtgttgatatgatgatatattaatcttatctatgaacagagcttc

SEQ ID NO: 226912 - DNA, 120 bp, Artificial Sequence
  ENSG00000118473_81 (sequence is synthesized)
accacaggccaagcagtaatgtatacagctggctttttaagctgtttgaacactattgttttcgattaaaaagagtttttgtttgtttttcacttgtatagtaaaagatcatatgaatta

SEQ ID NO: 226913 - DNA, 120 bp, Artificial Sequence
  ENSG00000118473_82 (sequence is synthesized)
aatactcggatattaattttcattcttactaagtggccatgtaaggcattgattttttttaaacttgaacaatgcaagaatctaggaatctcagaaagattttgctgtgtttctataggt

SEQ ID NO: 226914 - DNA, 120 bp, Artificial Sequence
  ENSG00000118473_83 (sequence is synthesized)
aatgaaatcctgtcaattaaggaaaatgctgtgtgtaatttgatttggtggtagcctttatttagagctctctttgatctatgtagcaaaaatacactaaatttctttttaatcttgtac

SEQ ID NO: 226915 - DNA, 120 bp, Artificial Sequence
  ENSG00000118473_84 (sequence is synthesized)
taagtacataatttcacaaaaataccttgggcataaaatacttacaaaactgtgaattaaaatactcaagatactttcaaaatttagtcaaaatgttgattcccagcctttttcctacac

SEQ ID NO: 226916 - DNA, 120 bp, Artificial Sequence
  ENSG00000118473_85 (sequence is synthesized)
gtctatttcaaaagagtatacttttttctgacagccattactgcttagtctgtaatgaaagctttactgcttctatgctgtgctcaagagaaaaccaacaacggaagcgaagacttactt

SEQ ID NO: 226917 - DNA, 120 bp, Artificial Sequence
  ENSG00000118473_86 (sequence is synthesized)
gctccttcacagaattgcagcaaagctctctgctgggcaatggtgacaggaaagtgtgtaattgacttgttgaagataatcatgagaccatcttaacattacttgccttataagttagaa

SEQ ID NO: 226918 - DNA, 120 bp, Artificial Sequence
  ENSG00000118473_87 (sequence is synthesized)
atagtatggatatcactctttgtaaataataatttttgtaaatgttttttgttcataattttcccaatcacctatttcacaaaatcctgaatatgcaattatttattatgacacgttact

SEQ ID NO: 226919 - DNA, 120 bp, Artificial Sequence
  ENSG00000118473_88 (sequence is synthesized)
gcaactagggctcccattccagaacaaagtttaattctatatgtaagttgttactgaaatgtgatttctttttctggaaaataaatgaaaaatatgaaaataaattgaattgtgaatatc

SEQ ID NO: 226920 - DNA, 120 bp, Artificial Sequence
  ENSG00000118473_89 (sequence is synthesized)
ttgttttgctgtgtgttttgctactattacctgactcttcttttaaaaccaccttctcagcaaaggaggcaaagtgctttacctaagcaaatgaacaaataaaagaacattaacacctgt

SEQ ID NO: 226921 - DNA, 120 bp, Artificial Sequence
  ENSG00000118473_90 (sequence is synthesized)
aaaaacagcaggttgcatgacagtttctcagtgaagaggttcaaaaaaggtgagatgctattgctttgtgaatttacaaaggaaagaataatttaactgctcagaattacatgtccggtc

SEQ ID NO: 226922 - DNA, 120 bp, Artificial Sequence
  ENSG00000118473_91 (sequence is synthesized)
actgctttttaatttaaaaaataatagagcatcattagtaatcttgttttctctttgatacataggtaaagggtgttttgtgtctggatgcctaaggtgattccaagggaggggatggaa

SEQ ID NO: 226923 - DNA, 120 bp, Artificial Sequence
  ENSG00000118473_92 (sequence is synthesized)
gatatgtgacatcttccctgaaatttatattgatatgcaatgctttgtcatttaaaacctaagctaatgttttctacaatccataactctgagtttatctttttggaaacatagaagggg

SEQ ID NO: 226924 - DNA, 120 bp, Artificial Sequence
  ENSG00000118473_93 (sequence is synthesized)
atgacattgaagatgaaatggatacagcaattgctgaatgacagtttgcccaaattagtgcagttaaaatatgctgacgcccctgcatggccaggaagacttctgctccatgcacacaag

SEQ ID NO: 226925 - DNA, 120 bp, Artificial Sequence
  ENSG00000118473_94 (sequence is synthesized)
caccaagtatcaagcgaccaccaacacattcccattcctttaggcctccatagctttgcttttgctttctgtttcctgaactaaaaaaaaaaaaaaaagtgtagattgccagccttccct

SEQ ID NO: 226926 - DNA, 120 bp, Artificial Sequence
  ENSG00000118473_95 (sequence is synthesized)
ttttcctgcacgctaatggcatgtagtgcctccacccttccctatagtgagattaatgacctgctctgtaactcacattgtgtccttctctctccctttccttaacccttcccatcccgc

SEQ ID NO: 226927 - DNA, 120 bp, Artificial Sequence
  ENSG00000118473_96 (sequence is synthesized)
ggccctggtccggggaccaccagtgatgggaaaactgaggctcagagatatcaagtaatttgcccaagtttacaagctggaggcaatgaactggattcatactcaggtgcatcatcccct

SEQ ID NO: 226928 - DNA, 120 bp, Artificial Sequence
  ENSG00000118473_97 (sequence is synthesized)
gaagctatttgcataagagatgctcttatcacagtcaatataagatggccacagttttctcggatattgtgtactatttgctttcctcatttctgagtaaattgtaattattcaatataa

SEQ ID NO: 226929 - DNA, 120 bp, Artificial Sequence
  ENSG00000118473_98 (sequence is synthesized)
gctaggcaggaaactccaaattctgtgatatctctaacccaagtagaaggagcactgacctactttcagatcacaatggaaagaccaactgatcaattgaagtttgtaacagacctgcac

SEQ ID NO: 226930 - DNA, 120 bp, Artificial Sequence
  ENSG00000118473_99 (sequence is synthesized)
gagaatgaacagccttccctcgtttggtttgacagaggaaagttttatttgacttttgaaggatttgtaaatcatagcatttctgccaatttgacatataatttcaaacttcctgagaaa

SEQ ID NO: 226931 - DNA, 120 bp, Artificial Sequence
  ENSG00000118473_100 (sequence is synthesized)
gacctctatagcgtttgtttctattatgtcttttgagaagagctgtccacagactttggctgcctaccctatttcaaaatactgttcttattaacctctgacataaatgaatgaagaaag

SEQ ID NO: 226932 - DNA, 120 bp, Artificial Sequence
  ENSG00000118473_101 (sequence is synthesized)
ttctgcctatatgcattaagtcaatcagaaactccttaaattgaagcctgcatatggtcaccatatcatgaattctataaatctaagaagctcattctagcttgagaaaattgtacttat

SEQ ID NO: 226933 - DNA, 120 bp, Artificial Sequence
  ENSG00000118473_102 (sequence is synthesized)
tttatattgcagtccttgtgcttttcaaaaaggtgaaaaatatatggaaccacattttcttttgacttattttcctgcaagcattttaaaaagaaaaaaaaataaaaagattatccagaa

SEQ ID NO: 226934 - DNA, 120 bp, Artificial Sequence
  ENSG00000118473_103 (sequence is synthesized)
gtagcttgccaaaacttggaagcaaccatgatgtccttagtaggattgaaaaaacgtacaaggaaggcctttggaatacggaagaaagaaaaggacactgattctacgtatgtactttag

SEQ ID NO: 226935 - DNA, 120 bp, Artificial Sequence
  ENSG00000118473_104 (sequence is synthesized)
aagcagggatgataagcagtgttttctctgctggtacggagcaagacaatgatttggaagcatcatgccactgcgttgctgtacaccctttgcctctaccagagcccattattaaagctg

SEQ ID NO: 226936 - DNA, 120 bp, Artificial Sequence
  ENSG00000118473_105 (sequence is synthesized)
acttgttgagactaatggtctgcctgccagtgtactcctgggggttctgtgtcaacactgatgggagatgtggcagaaaatcttttatcctctcttttattaaaggatttgtaaatcata

SEQ ID NO: 226937 - DNA, 120 bp, Artificial Sequence
  ENSG00000118482_0 (sequence is synthesized)
ccgcgccgccgccgcacgccgatggctgcggggtctcgcgccgtcgcaccgtccccacgcggcaagcgaccttcgggctcagggcggcggcggctgcaacgaggattaggagggcggcgc

SEQ ID NO: 226938 - DNA, 120 bp, Artificial Sequence
  ENSG00000118482_1 (sequence is synthesized)
ggaagccaagaatagtgtcgtcagcagcagccatttggtcccaggaggaaaagaggctgtggcagcgacgccgacgtcctgcgcgtaccccctctccgcggcacccaccgggccccctcc

SEQ ID NO: 226939 - DNA, 120 bp, Artificial Sequence
  ENSG00000118482_2 (sequence is synthesized)
tcctcctcttcggcggcggcagcgtccaccatcttcctcttgctgccagtggtagcgctcgtctggcggagctggggctgaaagacacacagaagtcttcatggatatagttgatacatt

SEQ ID NO: 226940 - DNA, 120 bp, Artificial Sequence
  ENSG00000118482_3 (sequence is synthesized)
taatcatttaattcctactgaacacttagatgatgccctatttctaggatccaacctggagaatgaagtctgtgaggattttagtgcaagtcaaaatgtcttagaggactcgctgaagaa

SEQ ID NO: 226941 - DNA, 120 bp, Artificial Sequence
  ENSG00000118482_4 (sequence is synthesized)
catgctcagcgataaggatcctatgctaggatctgcaagtaaccagttctgtttgcctgttttggatagcaatgatcccaatttccagatgccttgttcaacagttgttggtcttgacga

SEQ ID NO: 226942 - DNA, 120 bp, Artificial Sequence
  ENSG00000118482_5 (sequence is synthesized)
tattatggatgaaggagttgttaaagaaagtggcaatgataccattgatgaagaagaactgattttacctaacaggaacttaagggacaaggtagaagaaaattcagtgagatctccaag

SEQ ID NO: 226943 - DNA, 120 bp, Artificial Sequence
  ENSG00000118482_6 (sequence is synthesized)
aaaatcacctcgtttaatggcacaagaacaagtaagaagtttgcgacagagcactattgccaagcgttcaaatgcagcaccattaagtaacacaaaaaaagcatctgggaagactgtatc

SEQ ID NO: 226944 - DNA, 120 bp, Artificial Sequence
  ENSG00000118482_7 (sequence is synthesized)
tactgctaaagcaggagtgaaacaaccagaaaggagtcaggttaaagaagaagtatgtatgtcactgaaacctgagtaccataaggagaatagaaggtgcagccgaaatagcggacaaat

SEQ ID NO: 226945 - DNA, 120 bp, Artificial Sequence
  ENSG00000118482_8 (sequence is synthesized)
tgaagtggtacctgaagtatcagtgtcttcaagtcattcttcagtgtcatcttgtcttgaaatgaaggatgaagatggattagattctaagcataagtgtaataatccgggagaaataga

SEQ ID NO: 226946 - DNA, 120 bp, Artificial Sequence
  ENSG00000118482_9 (sequence is synthesized)
tgtgccatctcatgaattaaattgttcacttctttcagagacttgtgttactattggagaaaagaaaaatgaagctttgatggaatgtaaagccaagcctgttggtagtccattgtttaa

SEQ ID NO: 226947 - DNA, 120 bp, Artificial Sequence
  ENSG00000118482_10 (sequence is synthesized)
gttttcagataaagaagaacatgaacaaaatgattccatttcaggtaaaacgggtgagactgttgttgaagaaatgatagcaacaagaaaagttgaacaagattcaaaggagacagtaaa

SEQ ID NO: 226948 - DNA, 120 bp, Artificial Sequence
  ENSG00000118482_11 (sequence is synthesized)
attatcccatgaagatgaccatattcttgaggacgctggatcttctgatatttctagtgatgctgcttgtacaaatccaaataagacagaaaacagccttgtaggtttgcctagttgtgt

SEQ ID NO: 226949 - DNA, 120 bp, Artificial Sequence
  ENSG00000118482_12 (sequence is synthesized)
agatgaagtgactgaatgtaatttggaattgaaggataccatgggtattgctgataaaactgagaacacccttgaaagaaataaaattgaaccgttgggttattgtgaagatgcggagtc

SEQ ID NO: 226950 - DNA, 120 bp, Artificial Sequence
  ENSG00000118482_13 (sequence is synthesized)
taataggcagttggagagcactgagtttaataaatcaaacttagaggtggttgatactagtacttttggaccggaaagtaatatcttggaaaatgctatttgtgatgtgcctgaccaaaa

SEQ ID NO: 226951 - DNA, 120 bp, Artificial Sequence
  ENSG00000118482_14 (sequence is synthesized)
ttcaaaacagttgaatgctatagaaagtactaaaatagagtcccatgaaacagcaaaccttcaggatgacagaaacagccagtcaagtagcgtttcttacttagagtcaaaaagtgtaaa

SEQ ID NO: 226952 - DNA, 120 bp, Artificial Sequence
  ENSG00000118482_15 (sequence is synthesized)
atccaaacatacaaaacctgtaattcattctaagcaaaacatgaccacagatgctccgaagaaaattgttgcagcaaagtatgaagtaatacatagcaaaactaaagttaatgtcaaaag

SEQ ID NO: 226953 - DNA, 120 bp, Artificial Sequence
  ENSG00000118482_16 (sequence is synthesized)
tgtgaaacgaaatactgatgtaccagaatctcagcaaaattttcataggccagtcaaagtcagaaaaaaacaaattgataaggagccaaagattcagagttgcaattctggggttaaatc

SEQ ID NO: 226954 - DNA, 120 bp, Artificial Sequence
  ENSG00000118482_17 (sequence is synthesized)
tgtgaaaaaccaagctcattctgtactgaaaaaaacattacaggatcaaactttagtacaaattttcaagcccttaactcattctttgagtgataagtcacacgctcatcctggttgctt

SEQ ID NO: 226955 - DNA, 120 bp, Artificial Sequence
  ENSG00000118482_18 (sequence is synthesized)
gaaagaacctcatcatcctgcacaaactggacatgtatcacattctagccagaaacagtgtcataagcctcagcaacaggccccagcaatgaaaaccaatagtcacgtgaaggaagagct

SEQ ID NO: 226956 - DNA, 120 bp, Artificial Sequence
  ENSG00000118482_19 (sequence is synthesized)
tgaacacccaggcgttgagcattttaaggaagaggataaactgaaactgaaaaaacctgagaagaacctacaaccccgccaaagaagaagcagcaaaagtttttctttagatgagccacc

SEQ ID NO: 226957 - DNA, 120 bp, Artificial Sequence
  ENSG00000118482_20 (sequence is synthesized)
attgttcattccagataacatagctaccataagaagagaaggctctgatcatagctcctcatttgaaagcaaatatatgtggactcccagcaagcagtgtgggttttgcaaaaaaccaca

SEQ ID NO: 226958 - DNA, 120 bp, Artificial Sequence
  ENSG00000118482_21 (sequence is synthesized)
tggcaacaggtttatggttggctgtgggagatgtgatgactggtttcatggtgattgtgttgggttaagtctttctcaagcacagcagatgggcgaggaagacaaagaatatgtctgtgt

SEQ ID NO: 226959 - DNA, 120 bp, Artificial Sequence
  ENSG00000118482_22 (sequence is synthesized)
aaaatgttgtgctgaagaagacaaaaagactgaaatactagatccagatactttggaaaaccaagctacagttgaattccatagtggagataaaacaatggagtgtgaaaagcttggatt

SEQ ID NO: 226960 - DNA, 120 bp, Artificial Sequence
  ENSG00000118482_23 (sequence is synthesized)
atcaaaacacacaacaaatgatagaaccaaatatatagatgatacagtgaagcacaaggtcaaaattttaaaacgggagtctggtgaaggcagaaattcatcagactgtagagataatga

SEQ ID NO: 226961 - DNA, 120 bp, Artificial Sequence
  ENSG00000118482_24 (sequence is synthesized)
aattaaaaaatggcagctagctcctcttcgtaagatgggacaaccagttttacctcggagatcctcagaagaaaaaagtgaaaaaataccgaaagagtctacaactgttacttgcacagg

SEQ ID NO: 226962 - DNA, 120 bp, Artificial Sequence
  ENSG00000118482_25 (sequence is synthesized)
agaaaaagcttcaaaaccaggtactcatgagaagcaagagatgaaaaagaagaaagttgaaaaaggagtgcttaatgtacatcctgctgcttctgcttccaagccttctgcagatcagat

SEQ ID NO: 226963 - DNA, 120 bp, Artificial Sequence
  ENSG00000118482_26 (sequence is synthesized)
caggcaaagtgtcagacattctctcaaagacattcttatgaagagacttacagactcaaatttgaaggtaccagaggaaaaggcagcaaaagttgccacaaaaattgagaaagagctttt

SEQ ID NO: 226964 - DNA, 120 bp, Artificial Sequence
  ENSG00000118482_27 (sequence is synthesized)
ctctttttttcgggacacagatgctaaatataagaacaaatatagaagtttgatgtttaatttgaaagatcctaaaaacaatatattatttaaaaaagtactgaaaggagaagtaactcc

SEQ ID NO: 226965 - DNA, 120 bp, Artificial Sequence
  ENSG00000118482_28 (sequence is synthesized)
tgatcatcttatcagaatgagtccagaagaactagcttctaaagagttagctgcttggagacgaagagaaaacagacataccatagaaatgattgagaaagagcagagagaagtggaacg

SEQ ID NO: 226966 - DNA, 120 bp, Artificial Sequence
  ENSG00000118482_29 (sequence is synthesized)
acggccaatcaccaaaataactcataaaggtgaaatagaaattgagagtgatgccccaatgaaagaacaggaagcagccatggagattcaggaaccagccgccaataagtcattggagaa

SEQ ID NO: 226967 - DNA, 120 bp, Artificial Sequence
  ENSG00000118482_30 (sequence is synthesized)
gccagaaggatctgaaaaacaaaaagaggaggttgactctatgtctaaagataccactagtcaacacagacagcatctttttgatctcaactgcaaaatctgcataggtcgaatggcacc

SEQ ID NO: 226968 - DNA, 120 bp, Artificial Sequence
  ENSG00000118482_31 (sequence is synthesized)
acctgtagatgatctttctccaaaaaaagtaaaagttgttgtaggagtagctcgcaaacattcagacaatgaagcagaaagtatagcagatgcattatcttcaacctcaaatattttggc

SEQ ID NO: 226969 - DNA, 120 bp, Artificial Sequence
  ENSG00000118482_32 (sequence is synthesized)
ttctgaattctttgaggaggagaaacaggagtctccaaagtcaacgttctctcctgctccacgtccagagatgcctggaactgttgaagttgagtctacctttctggctcgattgaactt

SEQ ID NO: 226970 - DNA, 120 bp, Artificial Sequence
  ENSG00000118482_33 (sequence is synthesized)
catctggaaaggttttatcaacatgccttctgtggcaaaatttgttaccaaagcctatccagtatctggctccccagaatacctgacagaggacctaccagatagtattcaagtaggtgg

SEQ ID NO: 226971 - DNA, 120 bp, Artificial Sequence
  ENSG00000118482_34 (sequence is synthesized)
gttcgcttcacaccagtaactgaagaagatcaaatttcttatactttgctctttgcatacttcagtagcagaaagcgctatggagtagctgctaacaacatgaagcaggttaaagatatg

SEQ ID NO: 226972 - DNA, 120 bp, Artificial Sequence
  ENSG00000118482_35 (sequence is synthesized)
taccttattcctttgggtgccacagataaaattccacaccctcttgtgccttttgatggacctgggcttgaactgcatagacctaatctattgttgggcttaattattcgtcagaaactg

SEQ ID NO: 226973 - DNA, 120 bp, Artificial Sequence
  ENSG00000118482_36 (sequence is synthesized)
aagcgacagcacagtgcctgtgctagtactagtcatatagctgagactcctgaaagtgcaccaccaatagcattgccacctgataaaaaaagtaaaatagaagtttctacagaagaagca

SEQ ID NO: 226974 - DNA, 120 bp, Artificial Sequence
  ENSG00000118482_37 (sequence is synthesized)
ccagaggaagaaaatgacttttttaattcttttacaactgtattacacaagcagagaaataaacctcagcagaatcttcaggaagaccttccaacagcagttgaacctttaatggaagtc

SEQ ID NO: 226975 - DNA, 120 bp, Artificial Sequence
  ENSG00000118482_38 (sequence is synthesized)
accaaacaggagccaccaaaacctttaagatttcttcctggcgtgttgattggctgggagaatcaacctactactctggaattagcaaataaacctcttcctgtggatgatatacttcaa

SEQ ID NO: 226976 - DNA, 120 bp, Artificial Sequence
  ENSG00000118482_39 (sequence is synthesized)
agccttttgggcaccactggtcaagtatatgaccaggcccagtcagtgatggaacaaaacactgttaaagaaattccatttttaaatgagcagaccaactcaaaaatagagaaaacagat

SEQ ID NO: 226977 - DNA, 120 bp, Artificial Sequence
  ENSG00000118482_40 (sequence is synthesized)
aatgtggaagtaactgatggtgaaaacaaggagataaaagttaaagtagataatatttcagaatctacagataagtcagcagaaatagaaacatcagtagtagggtcctcttccatttct

SEQ ID NO: 226978 - DNA, 120 bp, Artificial Sequence
  ENSG00000118482_41 (sequence is synthesized)
gcagggtctttgacgagtcttagtctcagaggtaagccaccagatgtttctacagaagcatttttaacaaatttatcaattcagtcaaaacaagaggaaactgtggagagtaaagagaaa

SEQ ID NO: 226979 - DNA, 120 bp, Artificial Sequence
  ENSG00000118482_42 (sequence is synthesized)
acattaaaaagacagcttcaggaagatcaagagaataatttgcaagataaccagacttcaaatagttctccatgcagatctaatgtaggaaaaggaaacatagatggtaatgtgagctgt

SEQ ID NO: 226980 - DNA, 120 bp, Artificial Sequence
  ENSG00000118482_43 (sequence is synthesized)
agtgaaaaccttgttgctaatacagcgaggtctccacagtttatcaacctgaaaagggatcctaggcaagcagcaggacgaagtcagcctgtaactacttcagaaagcaaagatggagat

SEQ ID NO: 226981 - DNA, 120 bp, Artificial Sequence
  ENSG00000118482_44 (sequence is synthesized)
agttgccggaatggagaaaaacacatgctgcctggcctgtcacacaacaaggagcacttaacagaacaaatcaatgtagaggaaaagttgtgttctgcagagaaaaactcgtgtgttcag

SEQ ID NO: 226982 - DNA, 120 bp, Artificial Sequence
  ENSG00000118482_45 (sequence is synthesized)
cagagtgacaatttaaaagttgcacaaaactcaccatcagtagaaaacatacagacttctcaagcagaacaagcaaaacccttacaggaggatattttaatgcaaaatattgaaactgtg

SEQ ID NO: 226983 - DNA, 120 bp, Artificial Sequence
  ENSG00000118482_46 (sequence is synthesized)
cacccatttcgaagaggatcagcagtagcgacatctcattttgaagttggaaacacatgtccatcagaatttccttctaaaagcatcacctttacttccagaagcaccagccccagaaca

SEQ ID NO: 226984 - DNA, 120 bp, Artificial Sequence
  ENSG00000118482_47 (sequence is synthesized)
agtacaaacttttcacccatgaggccacagcagcccaaccttcagcatctcaagtctagcccacctggatttccatttccagggcctcctaattttcccccacaaagcatgtttggattt

SEQ ID NO: 226985 - DNA, 120 bp, Artificial Sequence
  ENSG00000118482_48 (sequence is synthesized)
ccaccacatttgccacctccattacttccccctccaggctttggctttgctcaaaatcccatggttccctggccacctgttgttcatctcccaggtcagccacagcgtatgatgggtcct

SEQ ID NO: 226986 - DNA, 120 bp, Artificial Sequence
  ENSG00000118482_49 (sequence is synthesized)
ctctcacaagcatcaaggtatataggcccgcagaatttttaccaggttaaagacattcggaggccagaaaggcgccatagtgacccttggggtaggcaagaccaacagcaactggatagg

SEQ ID NO: 226987 - DNA, 120 bp, Artificial Sequence
  ENSG00000118482_50 (sequence is synthesized)
ccatttaataggggtaaaggggaccgccagagattttatagtgattcacaccatttgaaaagagagcgacatgaaaaggaatgggagcaagaatctgaaaggcatagacgcagagacaga

SEQ ID NO: 226988 - DNA, 120 bp, Artificial Sequence
  ENSG00000118482_51 (sequence is synthesized)
agccaagacaaggacagagacagaaaaagcagggaggaagggcacaaagataaagagagggcacggttatcacatggtgatcgaggaacagatggaaaagcaagcagagatagtaggaat

SEQ ID NO: 226989 - DNA, 120 bp, Artificial Sequence
  ENSG00000118482_52 (sequence is synthesized)
gtagacaagaagccagataaacctaaaagtgaagactatgagaaggacaaagaacgagagaaaagtaaacacagagaaggagaaaaggacagggataggtaccacaaagatagggaccac

SEQ ID NO: 226990 - DNA, 120 bp, Artificial Sequence
  ENSG00000118482_53 (sequence is synthesized)
actgacagaactaaaagcaaaaggtaaaatttgcaggctgcttcaggattacatttaaataactgttaaaatgttgtatcttgtaaacaaaagaaagattgcctgctaggattgtgccat

SEQ ID NO: 226991 - DNA, 120 bp, Artificial Sequence
  ENSG00000118482_54 (sequence is synthesized)
ctttaaaatttttactattggtcatttgcagaacagtaaattctgtgtgttggtacagagtgctctgtaccagtgctcatcatcccttcttcataccaacggtccctagttataggaatt

SEQ ID NO: 226992 - DNA, 120 bp, Artificial Sequence
  ENSG00000118482_55 (sequence is synthesized)
aagttttacattgctgtatattcaaagatttgttttattaatatgcaataaaggcttagaaattttagttttattccttaattggtaaatatggttaactatggaatatatttacttcct

SEQ ID NO: 226993 - DNA, 120 bp, Artificial Sequence
  ENSG00000118482_56 (sequence is synthesized)
tatttacttcctctagtgaatgtcctttatataatgactaatttgggagtaatgtgtgctctgtaagtttgttttaaattgcactgtttttaaagaaactgtagaggagcaacaaaaatc

SEQ ID NO: 226994 - DNA, 120 bp, Artificial Sequence
  ENSG00000118482_57 (sequence is synthesized)
caagcaacttcataatcagattatgctaatcatttagttgagcagtttttgaccaagaatcagaagcccaaggggtacatttattgctttaatctgcactcattgaagtcatttattacc

SEQ ID NO: 226995 - DNA, 120 bp, Artificial Sequence
  ENSG00000118482_58 (sequence is synthesized)
atatactacagctttgtggtaggccattattttcattttcatttttggctcttcagaaacttgaatacttaagcttgtacatgatcttgtgttttgctatcctttttactgtaaaatgta

SEQ ID NO: 226996 - DNA, 120 bp, Artificial Sequence
  ENSG00000118482_59 (sequence is synthesized)
aatattttaagggatattttgattctaaatatgataaaataatttctcacctattttgtgtgtgtgacttgaaattcagtagtaaaagaatttcttctttaaagctttaattaccttcag

SEQ ID NO: 226997 - DNA, 120 bp, Artificial Sequence
  ENSG00000118482_60 (sequence is synthesized)
acattgattttttgttactcagccaagaacatatagaaatagctatctatgtcaggcattagatgaggggaaaaacaatttttttaaaatcttaaattgtaggctgagatgaattgtgta

SEQ ID NO: 226998 - DNA, 120 bp, Artificial Sequence
  ENSG00000118482_61 (sequence is synthesized)
gttctaaagaggctagaatttagaactacctgtgaaacactgtgcagctatagcccactttataggtaagtttctgaaaacttttacaccatcgcaatttggtactctgactcactaatc

SEQ ID NO: 226999 - DNA, 120 bp, Artificial Sequence
  ENSG00000118482_62 (sequence is synthesized)
attaaaattaaagaccgcagaacttgaagagaaatatgttttgaatccttttataaaatgtgcgatttagcctaattcgtaaagtaactgtacagtttcatatgccagttttacttgaaa

SEQ ID NO: 227000 - DNA, 120 bp, Artificial Sequence
  ENSG00000118482_63 (sequence is synthesized)
aaaaaatatgaaaactattgttaattcaaatctaaatttatttaaaccctaaaacacatggttttgatggctgtaatttaaagtaagagctatcaaatgatgctgacaaaagaaaaacct

SEQ ID NO: 227001 - DNA, 120 bp, Artificial Sequence
  ENSG00000118482_64 (sequence is synthesized)
tccaaaatacaaaagaaagagaactctattatttacttacctgtattaatgaagaaaaatataaataattccacaaaattgattgttttcctaaagagcttaaagattagagttaaaaat

SEQ ID NO: 227002 - DNA, 120 bp, Artificial Sequence
  ENSG00000118482_65 (sequence is synthesized)
tggttttgaaacagaattatccttgttatttttgctggagagaagggaggaaattcagaaccaaacattctatttaatttgcaatgacttgcagtacttttttccctatccttatcctgt

SEQ ID NO: 227003 - DNA, 120 bp, Artificial Sequence
  ENSG00000118482_66 (sequence is synthesized)
gaaacttactatcataaggttctaaaacagagaacttgtgtttaaataaagcccgtttaactttggtccacttttcttttggaaattaacttgttagaaaacaaagttagttcccaaaca

SEQ ID NO: 227004 - DNA, 120 bp, Artificial Sequence
  ENSG00000118482_67 (sequence is synthesized)
aaacaaaatctaagttataatttgcaccattacaaagaaattgctgtcagggttttacacattttaaaaacatttcaatttcaaatgtgtatatcgtcaataaatctacctttactgata

SEQ ID NO: 227005 - DNA, 120 bp, Artificial Sequence
  ENSG00000118482_68 (sequence is synthesized)
gctgaggcgcgggcgcgcaggcccgaggcacggcgggcgctgcctggaaggcccgtctcgcaggcccccggatccggccgttggggcctcttccttctcagggagccccagcatggagct

SEQ ID NO: 227006 - DNA, 120 bp, Artificial Sequence
  ENSG00000118482_69 (sequence is synthesized)
ttgggccttggtttcgggaaactgggactggccctggctgctaggctgctccctgctgctgctttttggagatgagagttgctcttccatttatcctccagttaccgcgcgcttttgtgc

SEQ ID NO: 227007 - DNA, 120 bp, Artificial Sequence
  ENSG00000118482_70 (sequence is synthesized)
ccgggactcaaactgtggactccttttgcttagtttgaaatgagaagcctagactcttgccttccgataatacatgtaatttaatgaaccacttgtcgatacggctgaaagacacacaga

SEQ ID NO: 227008 - DNA, 120 bp, Artificial Sequence
  ENSG00000118482_71 (sequence is synthesized)
ttgggggtgggattaatgtgagaattgttttaaagacattatttgatacacagagacctgtgcaaaaacaaaaagcttcatcagtcttggataaatgatagaaagatggatctactgaat

SEQ ID NO: 227009 - DNA, 120 bp, Artificial Sequence
  ENSG00000118482_72 (sequence is synthesized)
ttacaaatatatcatcctagaacatttaaaaaagcatagtctggccaacagctgacatacatggaaatattttgtcattgtcacaggttagacagtgtaatttagccactgcatctgcaa

SEQ ID NO: 227010 - DNA, 120 bp, Artificial Sequence
  ENSG00000118482_73 (sequence is synthesized)
aaaagccaaacacttcctggtaattggaaaattgttatactgctttgggtctgtaagttatatattaattcatttggtgtgagaagaactagtaataaagtatgaaggtcataatggaaa

SEQ ID NO: 227011 - DNA, 120 bp, Artificial Sequence
  ENSG00000118482_74 (sequence is synthesized)
aaagatgaggactagataactccttgaggttccttctaacccctaggatgaagataataactaacatttgtatagtgctctaaagtttacagagtgagttctcatacatcatctcacttg

SEQ ID NO: 227012 - DNA, 120 bp, Artificial Sequence
  ENSG00000118482_75 (sequence is synthesized)
gtatagtcacctatgtctttcacaaggggtcagcaagtaataaatggaagtgatatttgaggctaaatcaggaaagagtataatatagctaatactctctttgactaattactttacaag

SEQ ID NO: 227013 - DNA, 120 bp, Artificial Sequence
  ENSG00000118482_76 (sequence is synthesized)
gaggtacggggtctaattcttataaccgcagtacttaaaactgtctctggcatataaaagtactcagaatatgtttgttatatgagacattaccttaagattaaaagtcatctgtggtga

SEQ ID NO: 227014 - DNA, 120 bp, Artificial Sequence
  ENSG00000118482_77 (sequence is synthesized)
tgacactggccaacactgcgtccagcatttgggtggccctcaggatttcccagtcctctgaaatggccatccttctcagtgcgaacttgaagagtgaaaatacagccttgaagaaatgca

SEQ ID NO: 227015 - DNA, 120 bp, Artificial Sequence
  ENSG00000118482_78 (sequence is synthesized)
tgcaaaaacacttcgtgttaacaaacagaagaaatagaaaaaacaagaagaagagattttgcctttctatacatctttagaaagaacttctcggccgggaacggtggctcatgcctgtaa

SEQ ID NO: 227016 - DNA, 120 bp, Artificial Sequence
  ENSG00000118482_79 (sequence is synthesized)
gtagttcagaagtcaaattgtgtagctttactattgccctttctaaaggggctcaaacctacatatgaaagcaaatcccaatatgtaagcctttgtgtggttaacatttctgtctactct

SEQ ID NO: 227017 - DNA, 120 bp, Artificial Sequence
  ENSG00000118482_80 (sequence is synthesized)
ctcaatagtatggatttaagtgatatttttcatggtgcctggaatgagatgtagtgattcactgtcattgtttcacagaactaagatggcataaatgctgtgctgatcctatttttagtt

SEQ ID NO: 227018 - DNA, 120 bp, Artificial Sequence
  ENSG00000118482_81 (sequence is synthesized)
gccttcacctgtcctcccatcatgtaacaagtctacataagaacattttaaatatgtgcatctgtttgtgttcctagtttgtacaagtggaatgacagagtggagtaccagttagagtgc

SEQ ID NO: 227019 - DNA, 120 bp, Artificial Sequence
  ENSG00000118491_0 (sequence is synthesized)
agtatgatgttatctggactgggctgtaaaaatctgtgaacactgttgctctgagttaggaacagaatggctggggcagaaccatttttggcagatggcaatcaggaattgtttccctgt

SEQ ID NO: 227020 - DNA, 120 bp, Artificial Sequence
  ENSG00000118491_1 (sequence is synthesized)
gaagtctgtggaagacgttttgcagcagatgttctggaaaggcatggaccaatatgtaagaaactcttcaacagaaagcgtaaacctttcagttctttgaagcaaagattacagggcact

SEQ ID NO: 227021 - DNA, 120 bp, Artificial Sequence
  ENSG00000118491_2 (sequence is synthesized)
gacattcctactgtgaagaagactccacaatccaagtctccacctgtgaggaagtctaactggagacaacaacatgaagactttattaatgcaatccgatcagcaaagcagtgtatgcta

SEQ ID NO: 227022 - DNA, 120 bp, Artificial Sequence
  ENSG00000118491_3 (sequence is synthesized)
catactaatttctgcaaggatcagtcttctcgccgagtctttaatccagctcagacagcagccaaattggcatccagagctcagggtagggctcagatgggtccaaaaaaagaaccaact

SEQ ID NO: 227023 - DNA, 120 bp, Artificial Sequence
  ENSG00000118491_4 (sequence is synthesized)
gttaccagtgctgtgggagctttgctgcagaacagggtcctggtggccacgaatgaagtcccaaccaagtcaggattagctatggaccctgcttctggagcaaaactcagacaaggattt

SEQ ID NO: 227024 - DNA, 120 bp, Artificial Sequence
  ENSG00000118491_5 (sequence is synthesized)
agtaaatcttctaaaaaagattaactcctagaagccagactgcctccctgaaacccatcagcctggatggttgcgtacccgagaatgccacctaaggggaaggaacggtagatgtgatgt

SEQ ID NO: 227025 - DNA, 120 bp, Artificial Sequence
  ENSG00000118491_6 (sequence is synthesized)
ctgtttttacacccttgattcttcttgaagcatcacttagaacaagtaaaacttgcttcagatttttatttactccctttgaagttttcaaaacaaaagcattaaacacatcaacctgta

SEQ ID NO: 227026 - DNA, 120 bp, Artificial Sequence
  ENSG00000118491_7 (sequence is synthesized)
ttgcaacagattagtggtcctggtttatgttcttgactagtatgatgttatctggactgggctgtaaaaatctgtgaacactgttgctctgagttaggaacagaatggctggggcagaac

SEQ ID NO: 227027 - DNA, 120 bp, Artificial Sequence
  ENSG00000118491_8 (sequence is synthesized)
catttttggcagcaatcacatattccatgtgattcaatacacagaaacaaacactgcagaccacattgatctccctgtttgattcagctggctagatggcaatcaggaattgtttccctg

SEQ ID NO: 227028 - DNA, 120 bp, Artificial Sequence
  ENSG00000118492_0 (sequence is synthesized)
agacgcggagccgagcgcgcccgcaggctctttgctcagagctcagccctacatagatcggcttctgccatggcctccaaacaaaccaaaaagaaagaggtgcatcgtatcaactcggcg

SEQ ID NO: 227029 - DNA, 120 bp, Artificial Sequence
  ENSG00000118492_1 (sequence is synthesized)
cacggatcggataaatcgaaagatttctatccttttggcagtaatgtacaatctggttctactgaacaaaagaaggggaaattcccactctggccagagtggagtgaagctgacataaat

SEQ ID NO: 227030 - DNA, 120 bp, Artificial Sequence
  ENSG00000118492_2 (sequence is synthesized)
tcagaaaagtgggatgcaggcaaaggtgcaaaagaaaaggacaaaacaggaaaaagccctgtatttcatttttttgaggaccctgaaggaaagattgagttaccaccatccttgaaaatt

SEQ ID NO: 227031 - DNA, 120 bp, Artificial Sequence
  ENSG00000118492_3 (sequence is synthesized)
tattcctggaaacgtccacaagatattttatttagtcagactccagtagttgtgaaaaatgaaatcacgtttgacttattttcagcaaatgaacatttactctgcagcgagctgatgaga

SEQ ID NO: 227032 - DNA, 120 bp, Artificial Sequence
  ENSG00000118492_4 (sequence is synthesized)
tggattatcagtgaaatctatgcagtgtggaagatcttcaatggaggaattttgagcaattattttaaggggacttcaggggaacctcctcttctcccctggaagccctgggaacacata

SEQ ID NO: 227033 - DNA, 120 bp, Artificial Sequence
  ENSG00000118492_5 (sequence is synthesized)
tactctctgtgcaaggctgtgaagggtcatatgcctttgttcaatagctatggaaagtatgttgtgaaactttactggatgggttgctggagaaagataacaattgatgactttttgcct

SEQ ID NO: 227034 - DNA, 120 bp, Artificial Sequence
  ENSG00000118492_6 (sequence is synthesized)
tttgatgaagataacaatctattgcttccagctacaacttatgaatttgaactgtggccaatgcttttgtctaaagctattatcaagctggcaaatattgacatccatgtagcagacagg

SEQ ID NO: 227035 - DNA, 120 bp, Artificial Sequence
  ENSG00000118492_7 (sequence is synthesized)
agagagctgggggagttcacggttattcatgcgctcacaggatggttaccagaagtcatttctcttcacccgggatatatggacaaagtttgggagctcctgaaagaaatattgcctgag

SEQ ID NO: 227036 - DNA, 120 bp, Artificial Sequence
  ENSG00000118492_8 (sequence is synthesized)
tttaagctgtcagatgaggccagctctgaaagcaaaatagcagtgttagattctaaattaaaagaaccagggaaagaagggaaggagggaaaagaaataaaggatggaaaggaagtaaaa

SEQ ID NO: 227037 - DNA, 120 bp, Artificial Sequence
  ENSG00000118492_9 (sequence is synthesized)
gacgtgaaggaattcaaacctgaaagttctttgacaacactaaaggctcctgagaaaagcgacaaagttccaaaggagaaagcagatgcaagagacattggaaagaagagaagcaaagat

SEQ ID NO: 227038 - DNA, 120 bp, Artificial Sequence
  ENSG00000118492_10 (sequence is synthesized)
ggagaaaaagaaaaattcaaattctcacttcatggttcaagaccctcatcagaagtgcagtactctgtgcagtccctatcagattgttcttctgcaatacagacctctcatatggtcgta

SEQ ID NO: 227039 - DNA, 120 bp, Artificial Sequence
  ENSG00000118492_11 (sequence is synthesized)
tatgcgacatttacacctctttatttgtttgaaaacaagatcttttcattagagaagatggcagattctgctgagaaacttagagaatatgggctttcccacatctgtagccatcctgtg

SEQ ID NO: 227040 - DNA, 120 bp, Artificial Sequence
  ENSG00000118492_12 (sequence is synthesized)
ctggtgactagaagtaggtcttgtcctctggtagcaccaccaaaaccacctcctctacctccctggaaactcattcgtcaaaaaaaggaaactgttataacagatgaagctcaagagtta

SEQ ID NO: 227041 - DNA, 120 bp, Artificial Sequence
  ENSG00000118492_13 (sequence is synthesized)
atagtaaagaagcctgaacggttccttgagatttcaagtccatttttgaattatagaatgactccatttacaattccaacagaaatgcattttgtgcgctccttaattaagaaaggaata

SEQ ID NO: 227042 - DNA, 120 bp, Artificial Sequence
  ENSG00000118492_14 (sequence is synthesized)
cctccaggatctgatttaccttccgtcagtgaaactgatgaaactgcaacacatagccagacagacttgagtcaaataacaaaagctacatctcagggaaatactgcttcacaagttata

SEQ ID NO: 227043 - DNA, 120 bp, Artificial Sequence
  ENSG00000118492_15 (sequence is synthesized)
cttggaaaaggcacagatgaacaaacagactttggattgggtgatgctcatcagagtgatggattaaacttggaaagagagatagtcagccagaccacagcaacacaggaaaagtcacag

SEQ ID NO: 227044 - DNA, 120 bp, Artificial Sequence
  ENSG00000118492_16 (sequence is synthesized)
gaagaacttccaacaacaaataatagtgtttctaaagaaatatggttagattttgaagatttctgtgtatgctttcaaaatatatatattttccacaagccaagttcatattgccttaac

SEQ ID NO: 227045 - DNA, 120 bp, Artificial Sequence
  ENSG00000118492_17 (sequence is synthesized)
tttcaaaaatcagaatttaagttctcagaagaacgagtgtcctactatctatttgtagatagtctaaaacctattgaactactggtttgcttttctgcattggtacgctggggggagtat

SEQ ID NO: 227046 - DNA, 120 bp, Artificial Sequence
  ENSG00000118492_18 (sequence is synthesized)
ggagccttaacaaaagacagtcctcccatagagcctggacttctcacagctgaaacgttttcttggaaatccctgaaaccaggcagtcttgttctgaagattcacacatatgctaccaag

SEQ ID NO: 227047 - DNA, 120 bp, Artificial Sequence
  ENSG00000118492_19 (sequence is synthesized)
gctacagtggttcgtctgcctgttgggagacacatgctactcttcaacgcatactccccagtaggacactccatacacatctgcagcatggtgtcatttgtcattggggatgaacacgtt

SEQ ID NO: 227048 - DNA, 120 bp, Artificial Sequence
  ENSG00000118492_20 (sequence is synthesized)
gtactgcccaactttgaaccagagagctgccgatttacggaacagtctctgttgattatgaaagctattggaaatgtgattgctaatttcaaagataagggtaaactctctgcagctttg

SEQ ID NO: 227049 - DNA, 120 bp, Artificial Sequence
  ENSG00000118492_21 (sequence is synthesized)
aaggatctgcaaacagctcactaccctgtccccttccatgataaagaactaactgcacagcacttcagggtttttcatctttccttatggcgtttaatgaaaaaagttcaaataacaaaa

SEQ ID NO: 227050 - DNA, 120 bp, Artificial Sequence
  ENSG00000118492_22 (sequence is synthesized)
tttggacttggagttactcaattcctccttggaagaggtttctttagtggaatggctggacgttaaatattgtatgcccacaagtgataaagagtattctgctgaggaagtagcagcagc

SEQ ID NO: 227051 - DNA, 120 bp, Artificial Sequence
  ENSG00000118492_23 (sequence is synthesized)
aattaaaattcaagccatgtggagaggaacttacgttagattgcttatgaaagccagaataccagacacaaaagaaaatatcagtgttgcagatactcttcaaaaagtttgggctgtatt

SEQ ID NO: 227052 - DNA, 120 bp, Artificial Sequence
  ENSG00000118492_24 (sequence is synthesized)
ggaaatgaatttagaacagtatgcagtttctctcttaagactaatgtttaaaagcaagtgcaagtctttggaatcttatccatgctatcaagatgaagaaactaagattgcttttgcaga

SEQ ID NO: 227053 - DNA, 120 bp, Artificial Sequence
  ENSG00000118492_25 (sequence is synthesized)
ttatactgtgacttatcaagaacagccaccaaattcttggtttatagtattcagagaaacatttttggttcatcaagacatgattttggttcccaaagtatatactacacttccaatctg

SEQ ID NO: 227054 - DNA, 120 bp, Artificial Sequence
  ENSG00000118492_26 (sequence is synthesized)
tatcctacacattgttaataatgacacaatggagcaagtgccaaaggtgttccaaaaagtggtgccttatctttataccaagaataagaagggatacacttttgtggcggaagcatttac

SEQ ID NO: 227055 - DNA, 120 bp, Artificial Sequence
  ENSG00000118492_27 (sequence is synthesized)
aggcgacacatatgtagcagcctcacgatggaaactgcgtctcatcggttcttctgctccactgccatgcctctctcgagactctccatgcaattcctttgccataaaggaaatccgaga

SEQ ID NO: 227056 - DNA, 120 bp, Artificial Sequence
  ENSG00000118492_28 (sequence is synthesized)
ttactacatacccaatgataagaaaattttattcaggtattcggttaaagttctaacaccacaacctgctacaatacaggtacgcacatccaaaccagatgcattcatcaagctgcaggt

SEQ ID NO: 227057 - DNA, 120 bp, Artificial Sequence
  ENSG00000118492_29 (sequence is synthesized)
cctagaaaatgaagaaactatggtgagctccactggaaaaggccaagctataatcccagcatttcacttcttgaagagtgagaaaggtttgagctcccagtctagcaagcacattctttc

SEQ ID NO: 227058 - DNA, 120 bp, Artificial Sequence
  ENSG00000118492_30 (sequence is synthesized)
atttcactctgcatccaagaaagagcaagaagtgtatgttaagaagaaagctgctcagggaattcagaaatcccccaagggtagagctgtaagtgcaatacaagacattggtctacccct

SEQ ID NO: 227059 - DNA, 120 bp, Artificial Sequence
  ENSG00000118492_31 (sequence is synthesized)
tgtggaggaggaaactaccagtacacccactagagaagacagttccagcacaccactgcagaattacaagtatattatacagtgttcggtgttgtataacagttggcctctcactgaaag

SEQ ID NO: 227060 - DNA, 120 bp, Artificial Sequence
  ENSG00000118492_32 (sequence is synthesized)
ccagctgacatttgttcaagcactgaaagacttaaagaaaagtaataccaaagcttatggtgaaagacacgaggagttaattaacttaggaagcccagactcccacactattagtgaggg

SEQ ID NO: 227061 - DNA, 120 bp, Artificial Sequence
  ENSG00000118492_33 (sequence is synthesized)
acaaaaatcttcagtaacttccaaaacaacaaggaaaggcaaagaaaagtcttctgagaaagaaaagacagccaaagaaaaacaagcacctcgctttgagcctcagatatccactgttca

SEQ ID NO: 227062 - DNA, 120 bp, Artificial Sequence
  ENSG00000118492_34 (sequence is synthesized)
ccctcaacaagaagacccaaataaaccctactggattttgaggttggtcactgaacacaatgaatcagaattatttgaagtgaaaaaggatacagaaagggcagatgaaatccgagccat

SEQ ID NO: 227063 - DNA, 120 bp, Artificial Sequence
  ENSG00000118492_35 (sequence is synthesized)
gaaacaagcctgggagacaactgagccaggaagagcaatcaaggcttctcaggctcgtttgcattaccttagcgggttcattaagaaaacatctgatgctgagagtccgcctatatctga

SEQ ID NO: 227064 - DNA, 120 bp, Artificial Sequence
  ENSG00000118492_36 (sequence is synthesized)
aagccaaactaaaccaaaagaagaagtagaaacagctgcacgtggcgtaaaagaaccaaactcaaagaattctgcaggttcagagagcaaagagatgacacaaacaggatcagggagtgc

SEQ ID NO: 227065 - DNA, 120 bp, Artificial Sequence
  ENSG00000118492_37 (sequence is synthesized)
ggtgtggaagaagtggcaattgaccaaaggcttgagggatgtggcaaaatccacgagtagcgaaagtggaggagtgtcttcaccagggaaagaagagcgcgagcagagcacacggaagga

SEQ ID NO: 227066 - DNA, 120 bp, Artificial Sequence
  ENSG00000118492_38 (sequence is synthesized)
aaacattcaaacaggacctcgtacacgatctccaacaattttggaaacatctccacgacttattcgaaaagcactagaatttatggatttaagtcaatatgttcggaaaacagatacaga

SEQ ID NO: 227067 - DNA, 120 bp, Artificial Sequence
  ENSG00000118492_39 (sequence is synthesized)
tcctctgctgcaaacagatgaattgaatcagcagcaggcaatgcaaaaggcggaagaaattcatcagtttcgacagcataggaccagagtccttagcattcgaaacattgaccaagaaga

SEQ ID NO: 227068 - DNA, 120 bp, Artificial Sequence
  ENSG00000118492_40 (sequence is synthesized)
gcggttgaagttaaaggatgaagtcctggatatgtataaggaaatgcaggactccttagatgaagcccgacagaaaattttcgacatccgggaagagtacagaaacaaattgctggaagc

SEQ ID NO: 227069 - DNA, 120 bp, Artificial Sequence
  ENSG00000118492_41 (sequence is synthesized)
tgagcacctaaagctggaaactctggctgctcaggaagcagccatgaagctggagacagaaaagatgaccccagctcctgacacacagaaaaaaaagaaaggaaagaaaaagtaaccagg

SEQ ID NO: 227070 - DNA, 120 bp, Artificial Sequence
  ENSG00000118492_42 (sequence is synthesized)
ggatgtccaatactaccctgcttctggagagaaaaaatctatttgtaatgatctttaactgcctgctgttaagatattaggccaaatgaaaatagaaatttctctttcttagaaatattt

SEQ ID NO: 227071 - DNA, 120 bp, Artificial Sequence
  ENSG00000118492_43 (sequence is synthesized)
taatgctaacttgttagttttcctcagaaagctagtatttgaagccatttgagtttaagatgctctaatttcaataaaatagcttccaaatatttaataaaatatgtttgacactctaaa

SEQ ID NO: 227072 - DNA, 120 bp, Artificial Sequence
  ENSG00000118492_44 (sequence is synthesized)
ccaataccaccctgcttctggagagaaaaaatttatttgtaatgatctttaactgcctgctgataagatattgggccaactgaaaatagaaattgttctttcttagaaatattttaatgc

SEQ ID NO: 227073 - DNA, 120 bp, Artificial Sequence
  ENSG00000118492_45 (sequence is synthesized)
taacttgttagttttcctcagaaagctagtatttgaagccattcgagtttaagatgctctaatttcaataaaatagcttccaaatatttaaaatgtaataaaatatatgtttgacactct

SEQ ID NO: 227074 - DNA, 120 bp, Artificial Sequence
  ENSG00000118492_46 (sequence is synthesized)
gaaattccaacggcatcgcactgtgcggcctcttctgaggttcctctctcattgggcagggatgtgttcttcctcggtctcatcattgcatctctagcactagtgggagatgtcaataag

SEQ ID NO: 227075 - DNA, 120 bp, Artificial Sequence
  ENSG00000118492_47 (sequence is synthesized)
taaaaattgtttgaaggcttgcaaattgttggttactaaagaagtaaacaatatggactctaagacattgtttctcaaagcaatttctcaaggcataggtccatgattattattcttgag

SEQ ID NO: 227076 - DNA, 120 bp, Artificial Sequence
  ENSG00000118492_48 (sequence is synthesized)
aaaaatatttccaaaaaactacattgagaaatactgtacaatgaatatccctttgggagattcataattgtcaaagattctgggaatatatttagtcaacaatactgcttgagcttgttt

SEQ ID NO: 227077 - DNA, 120 bp, Artificial Sequence
  ENSG00000118492_49 (sequence is synthesized)
ctgcttgagcttgtttaacccagcattttctaaaattaatttataaatattatacacataacatttataatactttagtatgaattttctcataaatatttcttataagttttctcacca

SEQ ID NO: 227078 - DNA, 120 bp, Artificial Sequence
  ENSG00000118492_50 (sequence is synthesized)
aaaccttgattttatttaaatgcaaattgagaaatatgcattttcccctaccaatctagattttcttgtggcttatttttgttagatattatttttaattcagataaagctggttaaaca

SEQ ID NO: 227079 - DNA, 120 bp, Artificial Sequence
  ENSG00000118492_51 (sequence is synthesized)
aacacattagtttcaattttaaagaaaatacatataatggaaaagattttattttgatgaataaaattcaaaatattacctcaaatttcagaagaaatattttcactaggctttgaaata

SEQ ID NO: 227080 - DNA, 120 bp, Artificial Sequence
  ENSG00000118492_52 (sequence is synthesized)
ttttcactagcttttacttttttcccaagatcaatcatgctaattctatgtgatcaatgaaaagctatgtctcttatgcaaaaagcaaagcctcagcaacaaatgctaaaataattgtgt

SEQ ID NO: 227081 - DNA, 120 bp, Artificial Sequence
  ENSG00000118492_53 (sequence is synthesized)
caagcatctagtacttctacaaaatactacattttgaaactctgacatttctcacatctcccctttatactccagcaaatcaaattactctgtctgagtgcttattcatttgagacaacc

SEQ ID NO: 227082 - DNA, 120 bp, Artificial Sequence
  ENSG00000118492_54 (sequence is synthesized)
aaggacaaggaatttaataaagattcttcttatatccgcttttccccccacagaacctaaaccatcaacatgtatgttttgaacatgctctaaatctgcagtccccaactccagagccat

SEQ ID NO: 227083 - DNA, 120 bp, Artificial Sequence
  ENSG00000118492_55 (sequence is synthesized)
atgctctaaatctgcagtccccaactccagagccatggactggtcctggtccgaggcctgttaggaactgggccatgcagcaggaggttagcggtgcctgagctctgcctcctgtcagat

SEQ ID NO: 227084 - DNA, 86 bp, Artificial Sequence
  ENSG00000118492_56 (sequence is synthesized)
agatcagcagcagcattagagtctcataggagcgggaatcctattgtgaactgcatatgcaagggatccaggttggacactcctta

SEQ ID NO: 227085 - DNA, 120 bp, Artificial Sequence
  ENSG00000118492_57 (sequence is synthesized)
atattgtcttttgtgaaaccagtccttggtgccaaaaagaatggggatggctgctctaaatgctcaataactggaggaccatgaatatccctgctctcacgatacgacaacctggtagag

SEQ ID NO: 227086 - DNA, 120 bp, Artificial Sequence
  ENSG00000118492_58 (sequence is synthesized)
acagccctatacctgcttgagtttttcttgttgttagggagaaatcaagactagtcttcacaccatgactgcagtgtgtgggaggtcactccagcatgtactgcagagaagtttggtatt

SEQ ID NO: 227087 - DNA, 120 bp, Artificial Sequence
  ENSG00000118492_59 (sequence is synthesized)
tagcctaactatttttgtcctacataataagtaaagcgtagatttcatgatcccgtagggttcttatagagtgcaaattcaaagatccttatctcatctgtgttaaaaattgaactcttc

SEQ ID NO: 227088 - DNA, 120 bp, Artificial Sequence
  ENSG00000118492_60 (sequence is synthesized)
cctaaccttttacttcatttgagttccaaagtgtgaataagcaactcacaggtcaaatgccaccacccaggaagcactcggttatcatccggcatcccttctctttaggagacacatgct

SEQ ID NO: 227089 - DNA, 120 bp, Artificial Sequence
  ENSG00000118495_0 (sequence is synthesized)
ccgagccccgcctgcgcgcggcctcctcggcgcagccatcctcttggctgccgcgggcggcaaagcccacggcatctgccatttgtcattcagcccgtcggtaccgccccgagccttgat

SEQ ID NO: 227090 - DNA, 120 bp, Artificial Sequence
  ENSG00000118495_1 (sequence is synthesized)
ttagacacggctggggcgtgctctggcctcactctccgggcgggtgctggacggacggacggacggggcagccgtgctcacagctcagcagcgcggggccttggcgcgcggggcgcttcc

SEQ ID NO: 227091 - DNA, 120 bp, Artificial Sequence
  ENSG00000118495_2 (sequence is synthesized)
ccgggtcgccgtcatggccgcggaggtggcacgcccgagcggcctcgcctgagctccgggggtcgtcgccccgcaggattgttcctgcctgattcataaacatcgtgattggcttttgat

SEQ ID NO: 227092 - DNA, 120 bp, Artificial Sequence
  ENSG00000118495_3 (sequence is synthesized)
tgctgtcacgtctaatgtggctgctgcctcgtgtcacatctgaaactcatctgtacctcacttagaaagtttctttctataacacaagcctgaacatattgctctcctgattaacaactt

SEQ ID NO: 227093 - DNA, 120 bp, Artificial Sequence
  ENSG00000118495_4 (sequence is synthesized)
tcagtggttctgattagacaagacttttcgttgcagtcgacagaaacctaatgggaccattgaagaattccaaacagggtctttataagcttcttctgaaggtctcagacattcagccac

SEQ ID NO: 227094 - DNA, 120 bp, Artificial Sequence
  ENSG00000118495_5 (sequence is synthesized)
ggaactcaagtggaatttgtttggataacgtgactgatttcaaagcccggaccccttagacgtgcccatttggtgctgcaagtatttgcataggaatcagaggagttaatcttcttcatt

SEQ ID NO: 227095 - DNA, 120 bp, Artificial Sequence
  ENSG00000118495_6 (sequence is synthesized)
ccctgacgatgtacaaggtctcttctcacaggtttgaatcttcagacaaacttctgggaggactcggtccctgcctcgcagcagatgttccctgtcactcagtagccaatccgggggacc

SEQ ID NO: 227096 - DNA, 120 bp, Artificial Sequence
  ENSG00000118495_7 (sequence is synthesized)
caggacatgccccagctatagtgatgcagattacctttctgctcctgaatcgcacctgtgcctcagactttctcccctcagcttgagactgcatgtaaactgggatgtgtgaaagcagga

SEQ ID NO: 227097 - DNA, 120 bp, Artificial Sequence
  ENSG00000118495_8 (sequence is synthesized)
agcaaagctagtgacagctgagaggtccatgtctgggtagaaccaggcccacgatgctgcctctcccgtggtctggagttcagctgcagggactctgctgatgtgcccagcaccatcgtt

SEQ ID NO: 227098 - DNA, 120 bp, Artificial Sequence
  ENSG00000118495_9 (sequence is synthesized)
ctgtttgtgcttaaatggcacagcatttggtcagcacatctgaaaaggaaggtgtgagaagcaaagcccatggccacgttcccctgccagttatgtggcaagacgttcctcaccctggag

SEQ ID NO: 227099 - DNA, 120 bp, Artificial Sequence
  ENSG00000118495_10 (sequence is synthesized)
aagttcacgattcacaattattcccactccagggagcggccgtacaagtgtgtgcagcctgactgtggcaaagcctttgtttccagatataaattgatgaggcatatggctacccattct

SEQ ID NO: 227100 - DNA, 120 bp, Artificial Sequence
  ENSG00000118495_11 (sequence is synthesized)
ccccagaaatctcaccagtgtgctcactgtgagaagacgttcaaccggaaagaccacctgaaaaaccacctccagacccacgaccccaacaaaatggcctttgggtgtgaggagtgtggg

SEQ ID NO: 227101 - DNA, 120 bp, Artificial Sequence
  ENSG00000118495_12 (sequence is synthesized)
aagaagtacaacaccatgctgggctataagaggcacctggccctccatgcggccagcagtggggacctcacctgtggggtctgtgccctggagctagggagcaccgaggtgctactggac

SEQ ID NO: 227102 - DNA, 120 bp, Artificial Sequence
  ENSG00000118495_13 (sequence is synthesized)
cacctcaaagcccatgcggaagagaagccccctagcggaaccaaggaaaagaagcaccagtgcgaccactgtgaaagatgcttctacacccggaaggatgtgcgacgccacctggtggtc

SEQ ID NO: 227103 - DNA, 120 bp, Artificial Sequence
  ENSG00000118495_14 (sequence is synthesized)
cacacaggatgcaaggacttcctgtgccagttctgtgcccagagatttgggcgcaaggatcacctcacccggcataccaagaagacccactcacaggagctgatgaaagagagcttgcag

SEQ ID NO: 227104 - DNA, 120 bp, Artificial Sequence
  ENSG00000118495_15 (sequence is synthesized)
ttgcctcctttccctttaggagcttctgcccagaacgggcttgcaagtagcttgccagctgaggtccatagcctcaccctcagtcccccagaacaagccgcccagcctatgcagccgctg

SEQ ID NO: 227105 - DNA, 120 bp, Artificial Sequence
  ENSG00000118495_16 (sequence is synthesized)
ccagagtccctggcctccctccacccctcggtatcccctggctctcctccgccaccccttcccaatcacaagtacaacaccacttctacctcatactccccacttgcaagcctgcccctc

SEQ ID NO: 227106 - DNA, 120 bp, Artificial Sequence
  ENSG00000118495_17 (sequence is synthesized)
aaagcagatactaaaggtttttgcaatatcagtttgtttgaggacttgcctctgcaagagcctcagtcacctcaaaagctcaacccaggttttgatctggctaagggaaatgctggtaaa

SEQ ID NO: 227107 - DNA, 120 bp, Artificial Sequence
  ENSG00000118495_18 (sequence is synthesized)
gtaaacctgcccaaggagctgcctgcagatgctgtgaacctaacaatacctgcctctctggacctgtcccccctgttgggcttctggcagctgccccctcctgctacccaaaataccttt

SEQ ID NO: 227108 - DNA, 120 bp, Artificial Sequence
  ENSG00000118495_19 (sequence is synthesized)
gggaatagcactcttgccctggggcctggggaatctttgccccacaggttaagctgtctggggcagcagcagcaagaacccccacttgccatgggcactgtgagcctgggccagctcccc

SEQ ID NO: 227109 - DNA, 120 bp, Artificial Sequence
  ENSG00000118495_20 (sequence is synthesized)
ctgccccccatccctcatgtgttctcagctggcactggctctgccatcctgcctcatttccatcatgcattcagataattgatttttaaagtgtatttttcgtattctggaagatgtttt

SEQ ID NO: 227110 - DNA, 120 bp, Artificial Sequence
  ENSG00000118495_21 (sequence is synthesized)
aagaagcattttaaatgtcagttacaatatgagaaagatttggaaaacgagactgggactatggcttattcagtgatgactggcttgagatgataagagaattctcgaactgcatgtatt

SEQ ID NO: 227111 - DNA, 120 bp, Artificial Sequence
  ENSG00000118495_22 (sequence is synthesized)
gtgccaatctgtcctgagtgttcatgctttgtaccaaatttaatgaacgcgtgttctgtaatcaaactgcaaatattgtcataaccaacatccaaaatgacggctgctatatataagtgt

SEQ ID NO: 227112 - DNA, 120 bp, Artificial Sequence
  ENSG00000118495_23 (sequence is synthesized)
ttgtcatatggaatttaatcgtaagccatgatcataatgttaactaaataactttatgtggcactgcctagtaagggaactatggaaaggtttggatttctccaaatctgggagaatttt

SEQ ID NO: 227113 - DNA, 120 bp, Artificial Sequence
  ENSG00000118495_24 (sequence is synthesized)
caaaataagaaaataacctttatatgatatactatgactaggctgtgtatttcttttcagggatttttctaccttcagggttggatgtagtttagttactattaccatagccaacctgta

SEQ ID NO: 227114 - DNA, 120 bp, Artificial Sequence
  ENSG00000118495_25 (sequence is synthesized)
gttttacatatacattttcttgtggagcaatagagttctccattttacagaagcattttaaatgtagtttgaatattttccacaagatgctgcaatgtgagttatcacttcatttatctt

SEQ ID NO: 227115 - DNA, 120 bp, Artificial Sequence
  ENSG00000118495_26 (sequence is synthesized)
aaagaaagactaaactggttgtcagttacatctgacagaaaaaaaaaaaaaatcactgtgtaaccaggttaagtggtaaaataatccaggcgtcagtcaaaggcattttgctgactttaa

SEQ ID NO: 227116 - DNA, 120 bp, Artificial Sequence
  ENSG00000118495_27 (sequence is synthesized)
tattgattatatttttaacaggaatttaagaaaatattactggaattaaaaatatatatatattaaacaagaattttctttgctctgtctagcttaaactactactcaagctgcttaagt

SEQ ID NO: 227117 - DNA, 120 bp, Artificial Sequence
  ENSG00000118495_28 (sequence is synthesized)
tcttaagtattgtttgtaatcaccaataaataagtgcatttgtaattcatcagtcattattagcttttattaaaagaagattacgttttacaatgtaactataatctcttgaatttggta

SEQ ID NO: 227118 - DNA, 120 bp, Artificial Sequence
  ENSG00000118495_29 (sequence is synthesized)
tcttattaatgagttttaaagatgtaaaacctaaccttttttaaagctccattgtcttatgtttttagaggcttttccgtaaacatatatcttacatataataaacttttcaaatcttgc

SEQ ID NO: 227119 - DNA, 120 bp, Artificial Sequence
  ENSG00000118495_30 (sequence is synthesized)
gattgctgtcacgtctaatgtggctgctgcctcgtgtcacatctgaaactcatctgtacctcacttagaaagtggttctgattagacaagacttttcgttgcagtcgacagaaacctaat

SEQ ID NO: 227120 - DNA, 120 bp, Artificial Sequence
  ENSG00000118495_31 (sequence is synthesized)
gggaccattgaagaattccaaacaggcaagtgacaggaacatatttgcatgttagaagaatcagcctggcagcagcattgtgattagaatgaaggggaaccgtccaaaaacagactgggg

SEQ ID NO: 227121 - DNA, 120 bp, Artificial Sequence
  ENSG00000118495_32 (sequence is synthesized)
aaccaatatggatctgcctctagcatgcggaaatatctctctacactgacctaactgactcactaagcttgtggtttgtttaaaggaagccacatgaaaattgagtttgggccaatagag

SEQ ID NO: 227122 - DNA, 120 bp, Artificial Sequence
  ENSG00000118495_33 (sequence is synthesized)
tgaactcgttctccattctctagcatccctccccatgcaaccaccctatccctgccaagtttctgggcaccacagattggaaagtagcctcctgtaggtatttgcccatgttaagtggtg

SEQ ID NO: 227123 - DNA, 120 bp, Artificial Sequence
  ENSG00000118495_34 (sequence is synthesized)
gggtctctttctgtcttcccttcttggtctcacctgtctggtgtgacaagggaagcatgtgccaaccaaggctagacccttgtgagaccagagcagccccactttcggtaaagcaagcaa

SEQ ID NO: 227124 - DNA, 120 bp, Artificial Sequence
  ENSG00000118495_35 (sequence is synthesized)
cctctgcttacttgcccaacacaccctagcttccgtgttccttgccttgtgagttatcttcttgggtacaatttaacacagcgttcccacctccttataactaaaatagctagagggggc

SEQ ID NO: 227125 - DNA, 120 bp, Artificial Sequence
  ENSG00000118495_36 (sequence is synthesized)
tttgtgcctcaaaccccaaggagaccatcttggcaatctctgcctctgcaacagggcacttgctccctgggcaactcctttcccaggtcatcttctcccttgacatgcccatcagattta

SEQ ID NO: 227126 - DNA, 120 bp, Artificial Sequence
  ENSG00000118495_37 (sequence is synthesized)
atagtgtgcctatttggcagaaaaatggggtcccttggttgctgattcttaggaatgtgaggttctcccagccagagctctcagcactaaaagttctagtctctgcgtaatggccggcat

SEQ ID NO: 227127 - DNA, 120 bp, Artificial Sequence
  ENSG00000118495_38 (sequence is synthesized)
gatcttctctcccctaaagcatctcagtttccagcatgcaatcatttccatcttatggaaatcagccatcccgctccgtgccagcatgctaccctgggaggcacatccaggcttgggaaa

SEQ ID NO: 227128 - DNA, 120 bp, Artificial Sequence
  ENSG00000118495_39 (sequence is synthesized)
cgggggtgtcctggatctcatgactccagcagcaccagctgctctctttcctcttccaagtagacttccgttccccccccacttgggtgtttttgtttgttttagcaattcagagctcaa

SEQ ID NO: 227129 - DNA, 120 bp, Artificial Sequence
  ENSG00000118495_40 (sequence is synthesized)
tgaataaatcacttaggcgagatataaattggctttgttccatagcagatttgcctttgtactagttaagaaaatcctgaaaagctttccctgtaagaggatcagttggttggaatagcc

SEQ ID NO: 227130 - DNA, 120 bp, Artificial Sequence
  ENSG00000118495_41 (sequence is synthesized)
ttggtaggaagaagccaagtttgataattacttggtgaacggaaatgctggtttccaaatgctcatcagggttcagtggcacaaagctggctgtagacttggcttctgtagatttggtaa

SEQ ID NO: 227131 - DNA, 120 bp, Artificial Sequence
  ENSG00000118495_42 (sequence is synthesized)
aaacgtaaattcctggggtcccagtgatgctgttttagtctgtactgatttgccctgtggccacccaggaatctgtatttttaaaagttttccatgctgattctaatgcatagccaggtt

SEQ ID NO: 227132 - DNA, 120 bp, Artificial Sequence
  ENSG00000118495_43 (sequence is synthesized)
tagtaaccatttaattcagtattcaacttagagacttcaaccttcttgcactgcaaatttgataaatctttgtttatatgaatctcctttgttgagtgccaactggttatttgctgactt

SEQ ID NO: 227133 - DNA, 120 bp, Artificial Sequence
  ENSG00000118495_44 (sequence is synthesized)
tctttcaattcagaatttgttttaggttctgttattgcatagatttgcatacctgttttatggtattttaatactgttggttttaaaaaataccatttcctctgagtgctgttctgaata

SEQ ID NO: 227134 - DNA, 120 bp, Artificial Sequence
  ENSG00000118495_45 (sequence is synthesized)
tattatgtaagcaattttgtgtgttcttttttttccacttgcataaagcaggggaaaagttgagagtttttcttaatccagttgcaagtaggacaaaggatatgagtgtttaaagatcat

SEQ ID NO: 227135 - DNA, 120 bp, Artificial Sequence
  ENSG00000118495_46 (sequence is synthesized)
ccttttccgcgccgccgagtcggagctgcgccgcacgcccagcggccgcccggacccgccggccggagctgacccagtgggccacgggctccggactccagaactttccaagcgggggaa

SEQ ID NO: 227136 - DNA, 120 bp, Artificial Sequence
  ENSG00000118495_47 (sequence is synthesized)
acttggcggcggattgttcctgcctgattcataaacatcgtgattggcttttgattgctgtcacgtctaatgtggctgctgcctcgtgtcacatctgaaactcatctgtacctcacttag

SEQ ID NO: 227137 - DNA, 120 bp, Artificial Sequence
  ENSG00000118495_48 (sequence is synthesized)
aaagtcgacagaaacctaatgggaccattgaagaattccaaacaggtttgaatcttcagacaaacttctgggaggactcggtccctgcctcgcagcagatgttccctgtcactcagtagc

SEQ ID NO: 227138 - DNA, 120 bp, Artificial Sequence
  ENSG00000118495_49 (sequence is synthesized)
gtggctgctgcctcgtgtcacatctgaaactcatctgtacctcacttagaaagacttttcgttgcagtcgacagaaacctaatgggaccattgaagaattccaaacaggtctcagacatt

SEQ ID NO: 227139 - DNA, 120 bp, Artificial Sequence
  ENSG00000118495_50 (sequence is synthesized)
ccccttagacgtgcccatttggtgctgcaagtactgaccattactacaacatcttacagtcaacaaatttgacacattaaagatttatatcctttcttttgggtatttgcataggaatca

SEQ ID NO: 227140 - DNA, 120 bp, Artificial Sequence
  ENSG00000118495_51 (sequence is synthesized)
cggccggagctgacccagtgggccacgggctccggactccagaactttccaagcgggggaaacttggcggcggtaatttttatttttgtttgcagattgttcctgcctgattcataaaca

SEQ ID NO: 227141 - DNA, 120 bp, Artificial Sequence
  ENSG00000118495_52 (sequence is synthesized)
tcgtgattggcttttgattgctgtcacgtctaatgtggctgctgcctcgtgtcacatctgaaactcatctgtacctcacttagaaaggtaaatacgtctatgcggaaccctccaactcct

SEQ ID NO: 227142 - DNA, 120 bp, Artificial Sequence
  ENSG00000118495_53 (sequence is synthesized)
catggctctgtattcttattctctcctcgcattacagcacaaaccagagccttcgcctcctccatggtagaggggcttatgtcccagaaaagactttgtgagagaatttacatttgagga

SEQ ID NO: 227143 - DNA, 120 bp, Artificial Sequence
  ENSG00000118495_54 (sequence is synthesized)
acttcaggccttgagggggaaaataaggttgggggattaagatgtggacttaatgaaagcctgtttttcactctaaaaattcaagaggacacgctaagaacgatcattgctatttatctg

SEQ ID NO: 227144 - DNA, 120 bp, Artificial Sequence
  ENSG00000118495_55 (sequence is synthesized)
gaaatcatgggcattgtacagttgatttttacttatcatgacttgctcactagaaacttcgtgatctctttctgttatattttaaaaagatgtttttaaatggttttatcttaaagaaat

SEQ ID NO: 227145 - DNA, 120 bp, Artificial Sequence
  ENSG00000118495_56 (sequence is synthesized)
attaggaaaaaaaaaactgaggtagggtccaccatttagaatcagatatctagaatgtaacgtatgttacaattcagagtctctaaaccactctcctaaaatcataatatgagatgattc

SEQ ID NO: 227146 - DNA, 120 bp, Artificial Sequence
  ENSG00000118495_57 (sequence is synthesized)
tcagcttgccaaattttctagagttgtgaaataggttatgtcactcaaccagtgtttatttgagggaattcatggttggcagggtccccattatacatcagaagtttttatttcttattt

SEQ ID NO: 227147 - DNA, 120 bp, Artificial Sequence
  ENSG00000118495_58 (sequence is synthesized)
tctatcactcatgtaaagattaggatttgtttgaactgcctatttcaagataatgattccaaatcccagccttaaatttcatatctaacatgtttgttgtttttccctgtcccatacatt

SEQ ID NO: 227148 - DNA, 120 bp, Artificial Sequence
  ENSG00000118495_59 (sequence is synthesized)
aattctaggttcaaggccatgtcaccctaaagcagccctcacttcttttgcagctgcagtgctgttgcttaaccataactcttggcctctctccagactgtttttttttttttttttttt

SEQ ID NO: 227149 - DNA, 120 bp, Artificial Sequence
  ENSG00000118495_60 (sequence is synthesized)
tgcaaaatgtccttgatggtcataatggtgtattttttaaaaattccagttgtttttgtaagttttcttatatcccatcttacattcaattccccctgcaaacctcccactagataaacc

SEQ ID NO: 227150 - DNA, 120 bp, Artificial Sequence
  ENSG00000118495_61 (sequence is synthesized)
acttcccgctctattctttgtcttgagactgacttctaggaaggctgtccacagctgcctcaggccgaaggctaactaggagaatattaggtcgtgtgcttggattcctgttctccaaac

SEQ ID NO: 227151 - DNA, 120 bp, Artificial Sequence
  ENSG00000118495_62 (sequence is synthesized)
gattctaattaaaactagtccactacccccaccaacacgttcagaaggaaaaaaatgtagcagaatccccaaatgccctcatcacttcattataccatttgggtagctttatggcacctg

SEQ ID NO: 227152 - DNA, 120 bp, Artificial Sequence
  ENSG00000118495_63 (sequence is synthesized)
taggactagttcatgccaggcccatttgtaactgttttctctagttaaacatgatattgccattaacagcacattaaataggattacactgcttaagaatctaggaatttctcaaatata

SEQ ID NO: 227153 - DNA, 120 bp, Artificial Sequence
  ENSG00000118495_64 (sequence is synthesized)
tgagaaaatgtgaaagcacagggataatagaaatttattttataaacacatgctaggagatggaattgtgtcatgatgatccacattaaagaaacatgattgaagtgaatccattattta

SEQ ID NO: 227154 - DNA, 120 bp, Artificial Sequence
  ENSG00000118495_65 (sequence is synthesized)
tactctgactttccattatatatatatattactccaaaagaagttattcatgtttcctaattgtgagcttacccatcgtgtaaaattggccctaacacttattcacaggccacatctact

SEQ ID NO: 227155 - DNA, 120 bp, Artificial Sequence
  ENSG00000118495_66 (sequence is synthesized)
tcgtacatgtactttgcctctgtatgtacacgtgtaacgcataaccgtatatcagctctgcaagatacatagatatccccattttatggtgacggagactgaggcttagagaagttatgc

SEQ ID NO: 227156 - DNA, 120 bp, Artificial Sequence
  ENSG00000118495_67 (sequence is synthesized)
aacttacctaaagttacacaccttccaagcagcagagccagcattcgaacttagacccatctgactccaaagccagtgccctctacactagaccacactgtctttcttaggttggatcta

SEQ ID NO: 227157 - DNA, 120 bp, Artificial Sequence
  ENSG00000118495_68 (sequence is synthesized)
aaaaaatactaccagctggttggttttttaactaactgtaggaacacaacctagtattaagtagagtatgcatgctgcatagtggactgaggtagagtaaaacccattattgtaccactt

SEQ ID NO: 227158 - DNA, 120 bp, Artificial Sequence
  ENSG00000118495_69 (sequence is synthesized)
ttaggtaagaaaatgtattatctaaggaatatcattaaaatttccttacttccctccatgaacaaacaaaaaattaaaatgaaagcagtgggggatgaagggaggcggggatcataacat

SEQ ID NO: 227159 - DNA, 120 bp, Artificial Sequence
  ENSG00000118495_70 (sequence is synthesized)
aggagtgttaaatattaaaattagaaaagaaaataatttctctatcaatgtttaaaatgctagaaattatgcatgcttatactataacaaagaatactttatttggggaataacttaatt

SEQ ID NO: 227160 - DNA, 120 bp, Artificial Sequence
  ENSG00000118495_71 (sequence is synthesized)
gatccatgatgtggcatttaccaaggtaatttttccctttttgttccagcagtaggaattagaggtggttcataaaacacacaatcaccatgtaaattgaaaccgcattaagatcatagt

SEQ ID NO: 227161 - DNA, 120 bp, Artificial Sequence
  ENSG00000118495_72 (sequence is synthesized)
catcttatgttgtttccctaaaatggttctcatttgccccacatattcaaatcagagtgcacaaagatgttgtgctgagtcagggaagatttagaatgctctgtgaacagttttatactg

SEQ ID NO: 227162 - DNA, 120 bp, Artificial Sequence
  ENSG00000118495_73 (sequence is synthesized)
aacttcagagttcagttattgtacttattttttggtgtgtgtgtgtgcacagttgggttttttgtttgttttgctatttgaattactgtttggccattttaatgtatataactgataaat

SEQ ID NO: 227163 - DNA, 120 bp, Artificial Sequence
  ENSG00000118495_74 (sequence is synthesized)
acttggcggcgggattgctgtcacgtctaatgtggctgctgcctcgtgtcacatctgaaactcatctgtacctcacttagaaaggtttgaatcttcagacaaacttctgggaggactcgg

SEQ ID NO: 227164 - DNA, 120 bp, Artificial Sequence
  ENSG00000118495_75 (sequence is synthesized)
ccgggtgctttctggggcctcactgaggtcctggtcccctaagtcctcccccgcagcccctccgcgtattaacccaccggtctcgctgggctcagagattgcttacttagcacatggatt

SEQ ID NO: 227165 - DNA, 120 bp, Artificial Sequence
  ENSG00000118496_0 (sequence is synthesized)
gcgcgaggagggtggctgcctctggagcaggccgggagaagagaaaaggcggcggcccggctggggaagaggggcggaggaggcggttcggacggctgtgtggggtacggagcgtcgccg

SEQ ID NO: 227166 - DNA, 120 bp, Artificial Sequence
  ENSG00000118496_1 (sequence is synthesized)
ggacagagcggagcagctgggcacggcgtccagggcagctagggcctgggccgcggttcggccgcgccggccgagctggactggccattatggaggaggagctgcagcattcccattgtg

SEQ ID NO: 227167 - DNA, 120 bp, Artificial Sequence
  ENSG00000118496_2 (sequence is synthesized)
tgaattgtgtcagtagacggtgcatgaccaggccagagccagggatttcctgtgatttgattggttgtccattggtttgtggtgcagttttccattcttgtaaagctgatgagcatcgac

SEQ ID NO: 227168 - DNA, 120 bp, Artificial Sequence
  ENSG00000118496_3 (sequence is synthesized)
ttttatgtccatttgaacgagtgccttgcttaaatagtgactttggatgtccatttaccatggcccgaaataaagttgctgaacatctagaaatgtgtcctgcaagtgtggtgtgctgta

SEQ ID NO: 227169 - DNA, 120 bp, Artificial Sequence
  ENSG00000118496_4 (sequence is synthesized)
ctatggaatggaatcgatggccagttagttatgcagaccggaaatcatatgaaaatctaagcagagatgtcgatgaagtggcacaattggatatggccttggctcttcaagaccaaagga

SEQ ID NO: 227170 - DNA, 120 bp, Artificial Sequence
  ENSG00000118496_5 (sequence is synthesized)
tgctcttagaatccctcaaagtagccaccatgatgtcaaaagcaactgataaagtatccaaacctagagaacaaatctcagttaaatcaagtgtcccagaaataccacatgctaatggtt

SEQ ID NO: 227171 - DNA, 120 bp, Artificial Sequence
  ENSG00000118496_6 (sequence is synthesized)
tagtgtctgttgatgaagaatcttatggtgcactttatcaagctactgtagaaacaaccagaagtttggctgctgctttggatatcctgaatactgctacaagagacattggcatgttaa

SEQ ID NO: 227172 - DNA, 120 bp, Artificial Sequence
  ENSG00000118496_7 (sequence is synthesized)
atacaagtgtcccaaatgacatggatgaacagcaaaatgcgagagaaagcttagaggatcaaaacttgaaagaccaagatcatctttatgaggaggaaataggagcagtaggtggaattg

SEQ ID NO: 227173 - DNA, 120 bp, Artificial Sequence
  ENSG00000118496_8 (sequence is synthesized)
actacaatgacacaaatcagaatgcccagtctgaacaaaatggttcaagtgatttattatgtgacttgaatacaagttcttatgacacttctgctctttgtaatggctttcctttggaaa

SEQ ID NO: 227174 - DNA, 120 bp, Artificial Sequence
  ENSG00000118496_9 (sequence is synthesized)
atatatgtacccaggtcatagaccagaatcagaatttacatggtgattcaaaacaaagtaacttaacaaatggagactgtgtggcatcatcagatggcacttcaaaaccttccagctcac

SEQ ID NO: 227175 - DNA, 120 bp, Artificial Sequence
  ENSG00000118496_10 (sequence is synthesized)
ttgcggtggcagcacaacttagggaaataataccatccagtgctttgcctaatggcacagttcagcatatcctcatgccagatgatgaaggtgaaggtgaattgtgttggaaaaaagtag

SEQ ID NO: 227176 - DNA, 120 bp, Artificial Sequence
  ENSG00000118496_11 (sequence is synthesized)
acttaggggacgtgaagaatgtggatgtcttatctttcagtcatgctccttcattcaattttctttctaattcatgttggtctaaaccaaaggaagataaagcagtagatacatcagatt

SEQ ID NO: 227177 - DNA, 120 bp, Artificial Sequence
  ENSG00000118496_12 (sequence is synthesized)
tggaagttgcagaagatcctatgggcctccaaggaatagatctgatcacagcagcattgcttttttgtctaggagattctccaggagggaggggtatatctgatagccgcatggctgata

SEQ ID NO: 227178 - DNA, 120 bp, Artificial Sequence
  ENSG00000118496_13 (sequence is synthesized)
tttatcacattgacgttgggactcagactttttcacttccatctgcaatattagctacaagtacaatggttggggagatagcttcagcttcagcttgtgatcatgccaatccacagcttt

SEQ ID NO: 227179 - DNA, 120 bp, Artificial Sequence
  ENSG00000118496_14 (sequence is synthesized)
caaatccaagtccgtttcagacacttgggctggatttagtattggaatgtgtcgctaggtaccaacccaagcagcgttcaatgtttacctttgtgtgtggacagttatttagaaggaaag

SEQ ID NO: 227180 - DNA, 120 bp, Artificial Sequence
  ENSG00000118496_15 (sequence is synthesized)
aattttcttcccactttaagaatgtgcatggtgacattcatgctggactcaatggctggatggaacagaggtgccctttagcttactatggttgtacctattctcagcgtagattttgtc

SEQ ID NO: 227181 - DNA, 120 bp, Artificial Sequence
  ENSG00000118496_16 (sequence is synthesized)
catcaatacaaggagcaaagattatacatgaccgccatttgaggtcatttggagttcagccatgtgtatctacagtattagtggagcctgctagaaactgtgtgttgggattacataatg

SEQ ID NO: 227182 - DNA, 120 bp, Artificial Sequence
  ENSG00000118496_17 (sequence is synthesized)
accatctaagtagtcttccttttgaggtcctgcagcatattgcaggctttctcgatggcttcagcttatgtcagctctcatgtgtatccaagttaatgagggatgtgtgtggcagcctgc

SEQ ID NO: 227183 - DNA, 120 bp, Artificial Sequence
  ENSG00000118496_18 (sequence is synthesized)
ttcagtctcgtggcatggtcatactgcagtgggggaaaaggaagtatccagaaggaaattcatcatggcagataaaagaaaaggtatggcgatttagtactgcattttgttctgttaatg

SEQ ID NO: 227184 - DNA, 120 bp, Artificial Sequence
  ENSG00000118496_19 (sequence is synthesized)
aatggaaatttgctgacatcctaagcatggcagaccacttgaagaaatgcagttacaatgttgtcgagaaacgggaggaagcaatccctttgccatgtatgtgtgtgacacgagaactca

SEQ ID NO: 227185 - DNA, 120 bp, Artificial Sequence
  ENSG00000118496_20 (sequence is synthesized)
ctaaagaaggacgttcactacgctcagttttaaaacctgtactttaaaagttgtaatattactagcacatatatgcaagcacctagtataatttctttgtaatatgtgaaactttattaa

SEQ ID NO: 227186 - DNA, 120 bp, Artificial Sequence
  ENSG00000118496_21 (sequence is synthesized)
tgtattaaatattacaactagctaaatttattgtcactgtgtatataatgttttgaagtgacatctatttttataaagtactgtttagttggaaaaagttgccttaatgtttgaaatgtg

SEQ ID NO: 227187 - DNA, 120 bp, Artificial Sequence
  ENSG00000118496_22 (sequence is synthesized)
tgaaatttttggaacttgctggacagggtgatttaatttttagctacataattttaagaattagtattttcagtggtgtgcatattttggttcttaaatttttgcttcttaaactaaaaa

SEQ ID NO: 227188 - DNA, 120 bp, Artificial Sequence
  ENSG00000118496_23 (sequence is synthesized)
aatcctgaccaatttatttgttgttttctgtgggttgcgacccatgcaatcaaaaagcaaaattttgattgagattttttacagcataggtttttcatataaaaatattctgaatttgtt

SEQ ID NO: 227189 - DNA, 120 bp, Artificial Sequence
  ENSG00000118496_24 (sequence is synthesized)
aagcactgccataatatcattataatgtttttgtcttttagtgcttccctatacaattgttaatgcacaaatgatctctaatatatacttacatacgtaaaatcataaagtttggtaatg

SEQ ID NO: 227190 - DNA, 120 bp, Artificial Sequence
  ENSG00000118496_25 (sequence is synthesized)
cagtttatcgttttaaaaataatccacaaagatgtttttatctcacatacttacaactcaacacacagagtgaccatgtgcagctttcttttttgttagatgccacatccgaagactcat

SEQ ID NO: 227191 - DNA, 120 bp, Artificial Sequence
  ENSG00000118496_26 (sequence is synthesized)
cgcagtgtgttatatgacaggacaaagcaaaaacaaacaaaaagcaagcctgtgaatataatttaatttgaaactgctcctggtattatatatttgctagttatctaatgttttaaaaga

SEQ ID NO: 227192 - DNA, 120 bp, Artificial Sequence
  ENSG00000118496_27 (sequence is synthesized)
aaatatacctcatttaggtttgaattgggcgtattgtgtaaatttcaaatattcagaatgcaaagggcttgactattaaatgtttgcctttgatgtttataaacattacaactatgttgt

SEQ ID NO: 227193 - DNA, 120 bp, Artificial Sequence
  ENSG00000118496_28 (sequence is synthesized)
tttaagacatttaaaaacgtgaaatttgttatctttgtaaaatgacaatcatgtagaaacctgtcttggttgacaatctctttgaaacatttccgagttaatttcccataggcttcacca

SEQ ID NO: 227194 - DNA, 120 bp, Artificial Sequence
  ENSG00000118496_29 (sequence is synthesized)
ccaagaaagtaagaattgcatctttacataatgatcaaggtataatggaaaaatatacctattcttgaagtagtttattatagttttcaaattgatttataccattattaacctgatgtg

SEQ ID NO: 227195 - DNA, 120 bp, Artificial Sequence
  ENSG00000118496_30 (sequence is synthesized)
gtctgcttaaaaaatgaatatatcagtatttagaaataaattgcaaaggtgggaatatatacttaaataatttgtcttaagtaaattagcatttggtagtctgaaatggtgacagattac

SEQ ID NO: 227196 - DNA, 120 bp, Artificial Sequence
  ENSG00000118496_31 (sequence is synthesized)
ttgttaaaattgtgaaaactctgttgtgtcctctcttcctacatttgtccctgagagtactccacgattactaggttcttgattcccttatatggcaatcaggcagaggcgttccttaag

SEQ ID NO: 227197 - DNA, 120 bp, Artificial Sequence
  ENSG00000118496_32 (sequence is synthesized)
cattagagagttctgaagcttaagatttgttttggttggatgaagtccttagtacagttgaaaaacagagcattaaagactaatcaattgttttgcctcaccagtcattttaaatagtag

SEQ ID NO: 227198 - DNA, 120 bp, Artificial Sequence
  ENSG00000118496_33 (sequence is synthesized)
aatacttatttctcagtgcttaaaatttctttttcaactgtgagattgaataaacagtctctatttctgtggaaaaaacaacagaaaagagatattaaataccataaaatgtaactctgc

SEQ ID NO: 227199 - DNA, 120 bp, Artificial Sequence
  ENSG00000118496_34 (sequence is synthesized)
cttttaaagttttgctgaagaatgtgtctgtggttaggatagcacaagcattaacttttgttttatagttatgctttttaaaattcattgtttttaaatttagacttcttatttccacac

SEQ ID NO: 227200 - DNA, 120 bp, Artificial Sequence
  ENSG00000118496_35 (sequence is synthesized)
tggattatgagatacttaacaatttttccaccttatatttcttttacacattttgctgttctcttttttgttattgttatgccaccataccattttgttaaaatgttttctttgtgaaac

SEQ ID NO: 227201 - DNA, 120 bp, Artificial Sequence
  ENSG00000118496_36 (sequence is synthesized)
atttgttcaagttctaataaaattaatgttttcccttaacatggctcaataacttaaaaacgttcatttaaataaaattttaatacttgtttgacaaattccaacacaatcatattgttt

SEQ ID NO: 227202 - DNA, 120 bp, Artificial Sequence
  ENSG00000118496_37 (sequence is synthesized)
ctcacccatgttttactagtgaaccttaatttttttaaaatttgagacacgcattagttagctttctctgatccttcagtgtctcgaaagtaataccacctaggtgcactgaaaggcgga

SEQ ID NO: 227203 - DNA, 120 bp, Artificial Sequence
  ENSG00000118496_38 (sequence is synthesized)
agagtttctagcatggttatagctctaaaagttgtcatggaaaccatctctctctcctcttaagtatgaaaaggtttttatgttggcctaatagattgtactttgagaagtcatcattga

SEQ ID NO: 227204 - DNA, 120 bp, Artificial Sequence
  ENSG00000118496_39 (sequence is synthesized)
ttccttagtctttgctaaatagcaaggtaaaaggcaagcatcgggatggagggaagtatttgaattcacttttgtcctctgcctccttcctcaatactgcctgttagcttaatctttctc

SEQ ID NO: 227205 - DNA, 120 bp, Artificial Sequence
  ENSG00000118496_40 (sequence is synthesized)
cctctccctttcccttctccctctctcactcttttttctagattttgagactcacagatcttacagcagtggttcctaaagtgtggtccttggaccagcaggaacatcaacacctaggaa

SEQ ID NO: 227206 - DNA, 120 bp, Artificial Sequence
  ENSG00000118496_41 (sequence is synthesized)
tttgttagaaatgcagattattaggcttctctccagacttagtgaatcaggaactctggggtgggacccaacaatctgttttaacaagatctctaggtgattctaacgcacagtaaagta

SEQ ID NO: 227207 - DNA, 120 bp, Artificial Sequence
  ENSG00000118496_42 (sequence is synthesized)
ttagaacttagagggaagactgggtcatgccagctaccctctggtgcattactggagtggatatatgtgtgtacctgtgtgtgtttgtataaatatatgtgtaatccaaaagtcagtaat

SEQ ID NO: 227208 - DNA, 120 bp, Artificial Sequence
  ENSG00000118496_43 (sequence is synthesized)
ggtaatttattaatggttaaactatatatgttgtctcaattttacagccatatgacaaaatacactgggtactgtagttgttggacttgtattctttaaattagtatttactagtattta

SEQ ID NO: 227209 - DNA, 120 bp, Artificial Sequence
  ENSG00000118496_44 (sequence is synthesized)
aaattttactaaaattttactagtgtttcttctgttcaaggtaaattgcagtgcaaattttagttcattagcagtaacatttagcctagtcatctcattctcttgtttagtggttgtaga

SEQ ID NO: 227210 - DNA, 120 bp, Artificial Sequence
  ENSG00000118496_45 (sequence is synthesized)
gtcgtgaacatattcaaattgtagggtaatcaaagagtagaagtagacaaatattggattaaatcctacaaaaaatatttttagggatcttttcaaccctatcaataagatgttatgaaa

SEQ ID NO: 227211 - DNA, 120 bp, Artificial Sequence
  ENSG00000118496_46 (sequence is synthesized)
gattggatctcttgtttacaagtagtatagaatcttttttgatctttgactctgtgctgcctatctcatcaatgttgttgctattaatatctgtcctttaacactggatgttgggatctt

SEQ ID NO: 227212 - DNA, 120 bp, Artificial Sequence
  ENSG00000118496_47 (sequence is synthesized)
agtaatgttgctgataataggattttcagcaaaacttccatatcccttgaagatatggtagtttatattactatatcgataacagttttgcctgtggagatttgactagttttaggtgtt

SEQ ID NO: 227213 - DNA, 120 bp, Artificial Sequence
  ENSG00000118496_48 (sequence is synthesized)
tggaagcaaaacagatttcttcatgttttgcatcccaacctgaaaagacatggggtttattaattttaaaatttcctaaggaaaagttattcaaatattttaaaatgtgtttgtttcatg

SEQ ID NO: 227214 - DNA, 120 bp, Artificial Sequence
  ENSG00000118496_49 (sequence is synthesized)
catgacatgccacattggtgatgtgattggagcttgcagagttggttgtttagaagtgcagtagagagaaagcaattggccctcattctctggacagacttttgatggaaagaatttctc

SEQ ID NO: 227215 - DNA, 120 bp, Artificial Sequence
  ENSG00000118496_50 (sequence is synthesized)
tgataggtgtttgactggttatctaaacgttgctgttaagtagtcttacttaagatgctcataaggtctaggaagcagagaatattagttatacctttatcaactcatcagtgacttgtt

SEQ ID NO: 227216 - DNA, 120 bp, Artificial Sequence
  ENSG00000118496_51 (sequence is synthesized)
tgatggtgtttaagataatttaataatggggtttgacaggatttgtctgatttccaaaaaagcaaagttcgaattcagaaaagatcaactctaatgaagtcctttctaaataagggaaaa

SEQ ID NO: 227217 - DNA, 120 bp, Artificial Sequence
  ENSG00000118496_52 (sequence is synthesized)
ggaaagatggtttgcttttgaagtcatcttttacataattatttccctttatttaaaagattaaagtgagatcaagagataaaacctttcaaatttgaattttatggatgagaaaatagg

SEQ ID NO: 227218 - DNA, 120 bp, Artificial Sequence
  ENSG00000118496_53 (sequence is synthesized)
tactcaaaatttaggcagtgattagtgtactgggatatttgagagagaattatgtccttacatagatcactttttcactttacgaatgcaggaagaaaagagatgtttagatgtaaggaa

SEQ ID NO: 227219 - DNA, 120 bp, Artificial Sequence
  ENSG00000118496_54 (sequence is synthesized)
atttggaaaatgttgcctaggatatttgattcctactgctttggaaagcattttggagcaataccaaaaggaaactaactaaccaagtgtgatatgttgctctgaaaatctttgcgaaat

SEQ ID NO: 227220 - DNA, 120 bp, Artificial Sequence
  ENSG00000118496_55 (sequence is synthesized)
gagggcctcttgctgaattttacaagtaggttattgcatctatgattaaacttttttaaataaattgcttatacatgtttatttgacatatataatcttcataattggccagtacacctt

SEQ ID NO: 227221 - DNA, 120 bp, Artificial Sequence
  ENSG00000118496_56 (sequence is synthesized)
gagatgtattaatggcgatacatcttgaggtgctttgttaccttagcacatttcaaaactggcattttgtattcagattgttttatatttcaatgtattatgtggagagtgacttttcat

SEQ ID NO: 227222 - DNA, 120 bp, Artificial Sequence
  ENSG00000118496_57 (sequence is synthesized)
taataaactacaaagaaatgggttataaggaatattcatgaacatgctctatagaaatataataaaaattcattgatgcaaagtccttttttaaaaataattttcaatctttttgataag

SEQ ID NO: 227223 - DNA, 120 bp, Artificial Sequence
  ENSG00000118496_58 (sequence is synthesized)
ctggacggaagcatctgtcttttactatgaagaaaacatttttgaagtgaactgacaacataaggcaaatactgggtaaaaatttaagcatctccaaaatcattttattaacccatttgc

SEQ ID NO: 227224 - DNA, 120 bp, Artificial Sequence
  ENSG00000118496_59 (sequence is synthesized)
atgcaaatactagggaatggttcttcaatatgtagctagttcttgtggtggttaatagttcttcgtgtatttgaaagtaacaaaactgcatttgtgttgaactcttaagaccaattaatc

SEQ ID NO: 227225 - DNA, 120 bp, Artificial Sequence
  ENSG00000118496_60 (sequence is synthesized)
aggtcaaattgctcttaagaccaataaattaggtcagttgctcctaacaaaggcaaattcatcagatttaatttctacccttttctaatataaatttttagaaattttgtttctcagatg

SEQ ID NO: 227226 - DNA, 120 bp, Artificial Sequence
  ENSG00000118496_61 (sequence is synthesized)
tgaggcaaataggttgatctatttgtttattctttgacagagagactgactagagttagacagctttttaataccccttccagtcaaaaagtaacattgttatattagtatttagtagtt

SEQ ID NO: 227227 - DNA, 120 bp, Artificial Sequence
  ENSG00000118496_62 (sequence is synthesized)
ttaaagtctgatgacataagaacagtaacaatttgttaatattcaaaagattgaaattgaaaaaaaggggtcctgcattctgctgtcctagaatttttttttgtgttgaaatcttctttt

SEQ ID NO: 227228 - DNA, 120 bp, Artificial Sequence
  ENSG00000118496_63 (sequence is synthesized)
ccatattgtcattattgcttctttatcccatgacattaattttctggtgaggtgaccctgaatttagtcattttcgtcagtaattttagatttaagtaacttatcatgcttgttttaaag

SEQ ID NO: 227229 - DNA, 120 bp, Artificial Sequence
  ENSG00000118496_64 (sequence is synthesized)
tctctctcagctcacccgtgaagaaacaaattttttttcatttttttcttcaaaaatcagcaagtattgctgaatctaacaagtatcagcattcaggtttaaccgtgttatttgattgaa

SEQ ID NO: 227230 - DNA, 120 bp, Artificial Sequence
  ENSG00000118496_65 (sequence is synthesized)
ataaatcaaaccatggaaataatgggcactgtgtctgctcaagagtaaaattacccaatgaatgattatgtcaactggatgtcttttatatcaattgatgactttttaaaaaatctgtat

SEQ ID NO: 227231 - DNA, 120 bp, Artificial Sequence
  ENSG00000118496_66 (sequence is synthesized)
tttaaataaaatatggagagaacagtattggtccctacaacattccaatagctttgtcatgacagccatgtcatatgaaataacttactctgaatggctaataattcagtggagatgaat

SEQ ID NO: 227232 - DNA, 120 bp, Artificial Sequence
  ENSG00000118496_67 (sequence is synthesized)
tctaaagatttttatttgcacttaaaatgttaaagtagtattgttcatttgatcaatgtttgaatactactcagtattgaaaactttaactgcattctgaaaggtcattgcgccgattgg

SEQ ID NO: 227233 - DNA, 120 bp, Artificial Sequence
  ENSG00000118496_68 (sequence is synthesized)
cttacctaagatgtcatttagcttccttttctcatgatttacataaatgttgttaccttaaatgcagaaagatgtgatattctttggaggataaaaaacctaagtgaatgaagctagaca

SEQ ID NO: 227234 - DNA, 120 bp, Artificial Sequence
  ENSG00000118496_69 (sequence is synthesized)
caaaaggctacatattatatgatttcatttatatgaaatatgcagaataggtaaattcatagagataaatcagattcatggttgctgggggaatgggagtgactgcttcatgggtatggg

SEQ ID NO: 227235 - DNA, 120 bp, Artificial Sequence
  ENSG00000118496_70 (sequence is synthesized)
gttttcttttggattgatgaaaatattgtagaacaagatagtggggatagttgcacattgtgaatgtgccaaaatgccagtgaattgtatactttaaaatggtgtatttgatgtgtattt

SEQ ID NO: 227236 - DNA, 120 bp, Artificial Sequence
  ENSG00000118496_71 (sequence is synthesized)
tattacaattaaaaagaaaagaatttgatatttgcaatcattaccaaagccaaaaactagtgttctcaacgtttgtgaaatgcccaaaccgtggtttagaattaatttatagcattagta

SEQ ID NO: 227237 - DNA, 120 bp, Artificial Sequence
  ENSG00000118496_72 (sequence is synthesized)
acatgacaaatctattcagcttaaagttctagtaaaatttgtgaatcccatcatagaagtactcctgacagcagcagaaataaagctgtaattcatcaaaatttccttatatttaaaact

SEQ ID NO: 227238 - DNA, 120 bp, Artificial Sequence
  ENSG00000118496_73 (sequence is synthesized)
tctgtgactgagtgattgacttctgtgtcaatgtttattttttatcttttgaaatttattatgattccttgtggcacatcccaatcacgctttttaaagatgtgtttttaaaaccatgct

SEQ ID NO: 227239 - DNA, 120 bp, Artificial Sequence
  ENSG00000118496_74 (sequence is synthesized)
ttgaaaaaaatttgtataattttcaaggtttttttttatagttttatactttgtttcttttaaagaacaaatgcaacttgttgtattagagtaagactaaataaattgtactgatgtgta

SEQ ID NO: 227240 - DNA, 120 bp, Artificial Sequence
  ENSG00000118503_0 (sequence is synthesized)
tgccttgaccaggacttgggactttgcgaaaggatcgcggggcccggagaggtgttggagagcacaatggctgaacaagtccttcctcaggctttgtatttgagcaatatgcggaaagct

SEQ ID NO: 227241 - DNA, 120 bp, Artificial Sequence
  ENSG00000118503_1 (sequence is synthesized)
gtgaagatacgggagagaactccagaagacatttttaaacctactaatgggatcattcatcattttaaaaccatgcaccgatacacactggaaatgttcagaacttgccagttttgtcct

SEQ ID NO: 227242 - DNA, 120 bp, Artificial Sequence
  ENSG00000118503_2 (sequence is synthesized)
cagtttcgggagatcatccacaaagccctcatcgacagaaacatccaggccaccctggaaagccagaagaaactcaactggtgtcgagaagtccggaagcttgtggcgctgaaaacgaac

SEQ ID NO: 227243 - DNA, 120 bp, Artificial Sequence
  ENSG00000118503_3 (sequence is synthesized)
ggtgacggcaattgcctcatgcatgccacttctcagtacatgtggggcgttcaggacacagacttggtactgaggaaggcgctgttcagcacgctcaaggaaacagacacacgcaacttt

SEQ ID NO: 227244 - DNA, 120 bp, Artificial Sequence
  ENSG00000118503_4 (sequence is synthesized)
aaattccgctggcaactggagtctctcaaatctcaggaatttgttgaaacggggctttgctatgatactcggaactggaatgatgaatgggacaatcttatcaaaatggcttccacagac

SEQ ID NO: 227245 - DNA, 120 bp, Artificial Sequence
  ENSG00000118503_5 (sequence is synthesized)
acacccatggcccgaagtggacttcagtacaactcactggaagaaatacacatatttgtcctttgcaacatcctcagaaggccaatcattgtcatttcagacaaaatgctaagaagtttg

SEQ ID NO: 227246 - DNA, 120 bp, Artificial Sequence
  ENSG00000118503_6 (sequence is synthesized)
gaatcaggttccaatttcgcccctttgaaagtgggtggaatttacttgcctctccactggcctgcccaggaatgctacagataccccattgttctcggctatgacagccatcattttgta

SEQ ID NO: 227247 - DNA, 120 bp, Artificial Sequence
  ENSG00000118503_7 (sequence is synthesized)
cccttggtgaccctgaaggacagtgggcctgaaatccgagctgttccacttgttaacagagaccggggaagatttgaagacttaaaagttcactttttgacagatcctgaaaatgagatg

SEQ ID NO: 227248 - DNA, 120 bp, Artificial Sequence
  ENSG00000118503_8 (sequence is synthesized)
aaggagaagctcttaaaagagtacttaatggtgatagaaatccccgtccaaggctgggaccatggcacaactcatctcatcaatgccgcaaagttggatgaagctaacttaccaaaagaa

SEQ ID NO: 227249 - DNA, 120 bp, Artificial Sequence
  ENSG00000118503_9 (sequence is synthesized)
atcaatctggtagatgattactttgaacttgttcagcatgagtacaagaaatggcaggaaaacagcgagcaggggaggagagaggggcacgcccagaatcccatggaaccttccgtgccc

SEQ ID NO: 227250 - DNA, 120 bp, Artificial Sequence
  ENSG00000118503_10 (sequence is synthesized)
cagctttctctcatggatgtaaaatgtgaaacgcccaactgccccttcttcatgtctgtgaacacccagcctttatgccatgagtgctcagagaggcggcaaaagaatcaaaacaaactc

SEQ ID NO: 227251 - DNA, 120 bp, Artificial Sequence
  ENSG00000118503_11 (sequence is synthesized)
ccaaagctgaactccaagccgggccctgaggggctccctggcatggcgctcggggcctctcggggagaagcctatgagcccttggcgtggaaccctgaggagtccactggggggcctcat

SEQ ID NO: 227252 - DNA, 120 bp, Artificial Sequence
  ENSG00000118503_12 (sequence is synthesized)
tcggccccaccgacagcacccagcccttttctgttcagtgagaccactgccatgaagtgcaggagccccggctgccccttcacactgaatgtgcagcacaacggattttgtgaacgttgc

SEQ ID NO: 227253 - DNA, 120 bp, Artificial Sequence
  ENSG00000118503_13 (sequence is synthesized)
cacaacgcccggcaacttcacgccagccacgccccagaccacacaaggcacttggatcccgggaagtgccaagcctgcctccaggatgttaccaggacatttaatgggatctgcagtact

SEQ ID NO: 227254 - DNA, 120 bp, Artificial Sequence
  ENSG00000118503_14 (sequence is synthesized)
tgcttcaaaaggactacagcagaggcctcctccagcctcagcaccagcctccctccttcctgtcaccagcgttccaagtcagatccctcgcggctcgtccggagcccctccccgcattct

SEQ ID NO: 227255 - DNA, 120 bp, Artificial Sequence
  ENSG00000118503_15 (sequence is synthesized)
tgccacagagctggaaacgacgcccctgctggctgcctgtctcaagctgcacggactcctggggacaggacggggacgagcaagtgcagaaaagccggctgcgtgtattttgggactcca

SEQ ID NO: 227256 - DNA, 120 bp, Artificial Sequence
  ENSG00000118503_16 (sequence is synthesized)
gaaaacaagggcttttgcacactgtgtttcatcgagtacagagaaaacaaacattttgctgctgcctcagggaaagtcagtcccacagcgtccaggttccagaacaccattccgtgcctg

SEQ ID NO: 227257 - DNA, 120 bp, Artificial Sequence
  ENSG00000118503_17 (sequence is synthesized)
gggagggaatgcggcacccttggaagcaccatgtttgaaggatactgccagaagtgtttcattgaagctcagaatcagagatttcatgaggccaaaaggacagaagagcaactgagatcg

SEQ ID NO: 227258 - DNA, 120 bp, Artificial Sequence
  ENSG00000118503_18 (sequence is synthesized)
gtcagcatcccaaccagaggatgggccctggggcccaccggggtgagcctgcccccgaagacccccccaagcagcgttgccgggcccccgcctgtgatcattttggcaatgccaagtgca

SEQ ID NO: 227259 - DNA, 120 bp, Artificial Sequence
  ENSG00000118503_19 (sequence is synthesized)
acggctactgcaacgaatgctttcagttcaagcagatgtatggctaaccggaaacaggtgggtcacctcctgcaagaagtggggcctcgagctgtcagtcatcatggtgctatcctctga

SEQ ID NO: 227260 - DNA, 120 bp, Artificial Sequence
  ENSG00000118503_20 (sequence is synthesized)
acccctcagctgccactgcaacagtgggcttaagggtgtctgagcaggagaggaaagataagctcttcgtggtgcccacgatgctcaggtttggtaacccgggagtgttcccaggtggcc

SEQ ID NO: 227261 - DNA, 120 bp, Artificial Sequence
  ENSG00000118503_21 (sequence is synthesized)
ttagaaagcaaagcttgtaactggcaagggatgatgtcagattcagcccaaggttcctcctctcctaccaagcaggaggccaggaacttctttggacttggaaggtgtgcggggactggc

SEQ ID NO: 227262 - DNA, 120 bp, Artificial Sequence
  ENSG00000118503_22 (sequence is synthesized)
cgaggcccctgcaccctgcgcatcaggactgcttcatcgtcttggctgagaaagggaaaagacacacaagtcgcgtgggttggagaagccagagccattccacctcccctcccccagcat

SEQ ID NO: 227263 - DNA, 120 bp, Artificial Sequence
  ENSG00000118503_23 (sequence is synthesized)
ctctcagagatgtgaagccagatcctcatggcagcgaggccctctgcaagaagctcaaggaagctcagggaaaatggacgtattcagagagtgtttgtagttcatggtttttccctacct

SEQ ID NO: 227264 - DNA, 120 bp, Artificial Sequence
  ENSG00000118503_24 (sequence is synthesized)
gcccggttcctttcctgaggacccggcagaaatgcagaaccatccatggactgtgattctgaggctgctgagactgaacatgttcacattgacagaaaaacaagctgctctttataatat

SEQ ID NO: 227265 - DNA, 120 bp, Artificial Sequence
  ENSG00000118503_25 (sequence is synthesized)
gcaccttttaaaaaattagaatattttactgggaagacgtgtaactctttgggttattactgtctttacttctaaagaagttagcttgaactgaggagtaaaagtgtgtacatatataat

SEQ ID NO: 227266 - DNA, 120 bp, Artificial Sequence
  ENSG00000118503_26 (sequence is synthesized)
atacccttacattatgtatgagggatttttttaaattatattgaaatgctgccctagaagtacaataggaaggctaaataataataacctgttttctggttgttgttggggcatgagctt

SEQ ID NO: 227267 - DNA, 120 bp, Artificial Sequence
  ENSG00000118503_27 (sequence is synthesized)
gtgtatacactgcttgcataaactcaaccagctgcctttttaaagggagctctagtcctttttgtgtaattcactttatttattttattacaaacttcaagattatttaagtgaagatat

SEQ ID NO: 227268 - DNA, 120 bp, Artificial Sequence
  ENSG00000118503_28 (sequence is synthesized)
ttcttcagctctggggaaaatgccacagtgttctcctgagagaacatccttgctttgagtcaggctgtgggcaagttcctgaccacagggagtaaattggcctctttgatacacttttgc

SEQ ID NO: 227269 - DNA, 120 bp, Artificial Sequence
  ENSG00000118503_29 (sequence is synthesized)
ttgcctccccaggaaagaaggaattgcatccaaggtatacatacatattcatcgatgtttcgtgcttctccttatgaaactccagctatgtaataaaaaactatactctgtgttctgtta

SEQ ID NO: 227270 - DNA, 120 bp, Artificial Sequence
  ENSG00000118503_30 (sequence is synthesized)
atgcctctgagtgtcctacctccttggagatgagatagggaaggagcagggatgagactggcaatggtcacagggaaagatgtggccttttgtgatggttttattttctgttaacactgt

SEQ ID NO: 227271 - DNA, 120 bp, Artificial Sequence
  ENSG00000118503_31 (sequence is synthesized)
gtcctgggggggctgggaagtcccctgcatcccatggtaccctggtattgggacagcaaaagccagtaaccatgagtatgaggaaatctctttctgttgctggcttacagtttctctgtg

SEQ ID NO: 227272 - DNA, 120 bp, Artificial Sequence
  ENSG00000118503_32 (sequence is synthesized)
tgctttgtggttgctgtcatatttgctctagaagaaaaaaaaaaaaggaggggaaatgcattttccccagagataaaggctgccattttgggggtctgtacttatggcctgaaaatattt

SEQ ID NO: 227273 - DNA, 120 bp, Artificial Sequence
  ENSG00000118503_33 (sequence is synthesized)
gtgatccataactctacacagcctttactcatactattaggcacactttccccttagagccccctaagtttttcccagacgaatctttataatttctttccaaagataccaaataaactt

SEQ ID NO: 227274 - DNA, 120 bp, Artificial Sequence
  ENSG00000118503_34 (sequence is synthesized)
tttccaaagataccaaataaacttcagtgttttcatctaattctcttaaagttgatatcttaatattttgtgttgatcattatttccattcttaatgtgaaaaaaagtaattatttatac

SEQ ID NO: 227275 - DNA, 120 bp, Artificial Sequence
  ENSG00000118503_35 (sequence is synthesized)
tgcacatttaattgtccctaatagaaagccacctattctttgttggatttcttcaagtttttctaaataaatgtaacttttcacaagagtcaacattaaaaaataaattatttaagaaca

SEQ ID NO: 227276 - DNA, 120 bp, Artificial Sequence
  ENSG00000118503_36 (sequence is synthesized)
gcagtctgcagtcttcgtggcgggccaagcgagcttggagcccgcgggggcggagcggtgagagcggccgccaagagagatcacacccccagccgaccctgccagcgagcgagcccgacc

SEQ ID NO: 227277 - DNA, 120 bp, Artificial Sequence
  ENSG00000118503_37 (sequence is synthesized)
ccaggcgtccatggagcgtcgcctccgcccggtccctgccccgacccccgcctgcggcgcgctcctgccttgaccaggacttgggactttgcgaaaggatcgcggggcccggagaggtaa

SEQ ID NO: 227278 - DNA, 120 bp, Artificial Sequence
  ENSG00000118503_38 (sequence is synthesized)
acctcaaggcccaagtgcgcccgggcctcctgcaagaacatcctggcctgccgcagcgaggagctctgcatggagtgtcagcatcaaccagaggatgggccctggggcccaccggggtga

SEQ ID NO: 227279 - DNA, 120 bp, Artificial Sequence
  ENSG00000118503_39 (sequence is synthesized)
gagatgcctgcagatcacggatctgtacttaaatgctttcagccttatgccttggctcctggagaaaaccacactgccaaagttcaggtaacagagttcaatggaatttgatgaaagtca

SEQ ID NO: 227280 - DNA, 120 bp, Artificial Sequence
  ENSG00000118503_40 (sequence is synthesized)
accgcagtcaagggctgcgggtgcatgttgggcagcgacccccgggctggcaccgtctacctggcgttggttttgcagcgctcctggactgggagtttgttggacgtttctgtctgggtt

SEQ ID NO: 227281 - DNA, 80 bp, Artificial Sequence
  ENSG00000118507_0 (sequence is synthesized)
ctggcttgttccggcgtccggcctggcatgcgggtgctgcggctgctgcggctgccgccgccgctgctgccgctgccgcg

SEQ ID NO: 227282 - DNA, 80 bp, Artificial Sequence
  ENSG00000118507_1 (sequence is synthesized)
ggcttgggaagctccgcgcttccgcaggcctggcctccgccgcccgggcccccgcagcctgtcgctggaccccgcgccgg

SEQ ID NO: 227283 - DNA, 120 bp, Artificial Sequence
  ENSG00000118507_2 (sequence is synthesized)
cggcccgccaccgccgctgccgccagcccagacgcgccgcccgcatgcgccgcgaccatggagcgccccgaagcgggaggaattaattccaatgagtgtgaaaatgtatcaagaaaaaag

SEQ ID NO: 227284 - DNA, 120 bp, Artificial Sequence
  ENSG00000118507_3 (sequence is synthesized)
aaaatgtcagaggaatttgaagccaatactatggattctctggtagacatgccatttgctactgtagatattcaggatgactgtggaatcactgatgaacctcaaataaatttgaagaga

SEQ ID NO: 227285 - DNA, 120 bp, Artificial Sequence
  ENSG00000118507_4 (sequence is synthesized)
agtcaagaaaatgaatgggtcaagagtgatcaagtaaagaagaggaaaaaaaagagaaaagattatcaacccaactatttcctgtccattccaatcaccaacaaagagattataaaagga

SEQ ID NO: 227286 - DNA, 120 bp, Artificial Sequence
  ENSG00000118507_5 (sequence is synthesized)
attaagatcctgcagaatgcaataatacaacaagatgagcgactggccaaagcaatggtcagtgatggttcctttcatattaccctgctggtgatgcaattattaaatgaagatgaagta

SEQ ID NO: 227287 - DNA, 120 bp, Artificial Sequence
  ENSG00000118507_6 (sequence is synthesized)
aacattggtattgatgctcttttggaattgaaaccattcatagaagaactcctccagggaaaacatttgactttgccctttcaagggattggtacttttggaaatcaggttggatttgtg

SEQ ID NO: 227288 - DNA, 120 bp, Artificial Sequence
  ENSG00000118507_7 (sequence is synthesized)
aagctggcagaaggagatcatgtaaactcacttttggagatagcagagactgcaaataggacatttcaagaaaaaggcatcctggtaggagagagcagaagttttaaacctcatttgacc

SEQ ID NO: 227289 - DNA, 120 bp, Artificial Sequence
  ENSG00000118507_8 (sequence is synthesized)
ttcatgaagttgtcaaaatcaccgtggctccgtaagaatggagtgaaaaaaatagatcctgatttatatgaaaagtttatcagtcacagatttggagaagaaatattatatcgcatagat

SEQ ID NO: 227290 - DNA, 120 bp, Artificial Sequence
  ENSG00000118507_9 (sequence is synthesized)
ctttgctccatgctgaagaaaaaacaaagtaatggttattatcactgtgaatcttccattgtgattggtgaaaagaacggaggggagcccgatgacgctgaactagtaaggctcagtaag

SEQ ID NO: 227291 - DNA, 120 bp, Artificial Sequence
  ENSG00000118507_10 (sequence is synthesized)
aggctggtggagaacgcggtgctcaaggctgtccagcagtatctggaggaaacacagaataaaaacaagccgggggaggggagctctgtgaaaaccgaagcagctgatcagaatggcaat

SEQ ID NO: 227292 - DNA, 120 bp, Artificial Sequence
  ENSG00000118507_11 (sequence is synthesized)
gacaatgagaacaacaggaaatgagcccggaacgcaggcccccatgtctctgtgcaaagcctccctgcttccctctgctgagtctagggactgacttgcagcgtgctgtttaagttaagt

SEQ ID NO: 227293 - DNA, 120 bp, Artificial Sequence
  ENSG00000118507_12 (sequence is synthesized)
ttctctggtgcaatctgtgaagattgcctaatacttttcatgatcgatgtgttcgcattgctgaaacacaacagaagaaaaatggagtgctgggactggcagaggaaattaattgatgaa

SEQ ID NO: 227294 - DNA, 120 bp, Artificial Sequence
  ENSG00000118507_13 (sequence is synthesized)
agccacgcacaagggaaagggaactttgggttatgcctcctggacgcaaattaaaggccgagaaagaggccttgccatcaatggaatactgccatttatattgcttagcagggcatttga

SEQ ID NO: 227295 - DNA, 120 bp, Artificial Sequence
  ENSG00000118507_14 (sequence is synthesized)
ctactttatctgaggccagaactctcacacacagctatcaagtgctaagtttaaaataatcactgttggaattgtcatctgtacaattagtccataatgtttcatgtttgtcctaagtgt

SEQ ID NO: 227296 - DNA, 120 bp, Artificial Sequence
  ENSG00000118507_15 (sequence is synthesized)
gctgttgctatgcagtgtgatctttatttatagtaaattatgtttcatgtaaatgatatatttttggtgaaatgcaaccttttctataaaatgtgggcaacattttaaagtttttttaaa

SEQ ID NO: 227297 - DNA, 120 bp, Artificial Sequence
  ENSG00000118507_16 (sequence is synthesized)
atcctattttgataagtcagtatgccatatttaatgaaatgttattatataatttttttttcttaggcaagaaacctattggaattcgagacttaattaatgaagctttgcatcgagaaa

SEQ ID NO: 227298 - DNA, 120 bp, Artificial Sequence
  ENSG00000118507_17 (sequence is synthesized)
cgatgggtctgaagtccaaagtgaaacagataaaggaacttttattaaagcctgagactcaggccagaattaggagggagctttttgaaggaagacttattaacaacagtaattcagcaa

SEQ ID NO: 227299 - DNA, 120 bp, Artificial Sequence
  ENSG00000118507_18 (sequence is synthesized)
atgacgttgatttcagcacaactttgacataagctctacattgcgattgtgacaacatagcttatgaaatcttttcagcttattaagtagctctttggtaaacaccaaagaagtttctga

SEQ ID NO: 227300 - DNA, 120 bp, Artificial Sequence
  ENSG00000118507_19 (sequence is synthesized)
tagtgtctgcacaacagcaaaccaacatttggtgaggaattagcaatttcttgccaaagaaaattgattctgcccaattattttttgagctacacttgtgttttagaatatctgtttctg

SEQ ID NO: 227301 - DNA, 120 bp, Artificial Sequence
  ENSG00000118507_20 (sequence is synthesized)
taatattgagagttattttatagaaatgatttcttaattagctgttgtgagatatttctcgggtccttgcagaaaaaaacatacagactgtgaacaaatcattcacaaacagaataaaac

SEQ ID NO: 227302 - DNA, 120 bp, Artificial Sequence
  ENSG00000118507_21 (sequence is synthesized)
agagccaacaacagtattttaagggtcacttgcctcctgttgacacaattgttgctaaatcaaaagaagcgttgtccaggtgtgtctacatctagtgttacttttaatgagaatttgaat

SEQ ID NO: 227303 - DNA, 120 bp, Artificial Sequence
  ENSG00000118507_22 (sequence is synthesized)
gtttattgaacaatagtacttgaatgaacatttataaatgtaattattgcgatcactggttaagaatgttttatatatccttataatatttttcactgatcaaaatgttgttctgctttt

SEQ ID NO: 227304 - DNA, 120 bp, Artificial Sequence
  ENSG00000118507_23 (sequence is synthesized)
tcatttcttaaggaatacatgtttgggatttttattttttacgtgtccgaagataagctccaggtcttatcgtatcccttgccatctgaacttgtttgcactgcttctgtttgaaagagc

SEQ ID NO: 227305 - DNA, 120 bp, Artificial Sequence
  ENSG00000118507_24 (sequence is synthesized)
atcttgaaaaacttccccggtatgatgattgttggtaacaactttttctatagtcattgatggagtagatcatgatggaggggaaatcactggagatcaaatatgtaaaatcatttcaaa

SEQ ID NO: 227306 - DNA, 120 bp, Artificial Sequence
  ENSG00000118507_25 (sequence is synthesized)
tataaaatccagtttactcatggattttagctattttttcactgggtaaattatactacatttatttacaaatgagtttatgcattttcatggctcttaataaacatattgttttccctt

SEQ ID NO: 227307 - DNA, 120 bp, Artificial Sequence
  ENSG00000118507_26 (sequence is synthesized)
attggctcttcaagctgcctgtgctgctccgtggagtgaaaaaggcagggtgtgctcgcagactgtgctataaactgcaatttctatttggggtcctcacggagaagaacaccaggaaag

SEQ ID NO: 227308 - DNA, 120 bp, Artificial Sequence
  ENSG00000118507_27 (sequence is synthesized)
acagacaggaccagtgccatgggccagctttgctgctttcctttctcaagagatgaaggaaaaatcagtgagttggaaagctcgtcctctgcagtcctacagagatacagcaaggatata

SEQ ID NO: 227309 - DNA, 120 bp, Artificial Sequence
  ENSG00000118507_28 (sequence is synthesized)
aattactgcagttgtctgtaggagaaagggctcattgtggtttttctcgactacctttcttaaagacatatgcaaatagccagacagaacacatggcactgacctatggccagggactca

SEQ ID NO: 227310 - DNA, 120 bp, Artificial Sequence
  ENSG00000118507_29 (sequence is synthesized)
cagttttgtgagaatacgggagcgtatagccacttccttcactgaatgccagtcccagagcagttgcattaggctggaggactggaggtggagccttttttgctcacggcagcaagttcc

SEQ ID NO: 227311 - DNA, 120 bp, Artificial Sequence
  ENSG00000118507_30 (sequence is synthesized)
atcatgtaaactcacttttggagatagcagggagtgaaaaaaatagatcctgatttatatgaaaagtttatcagtcacagatttggagaagaaatattatatcgcatagatctttgctcc

SEQ ID NO: 227312 - DNA, 120 bp, Artificial Sequence
  ENSG00000118507_31 (sequence is synthesized)
tatctttcttgttttgctttcaaatggattgtcctcttccaagtggtttcaaacttaatcacagaatgacaatcagtggtgaagggagtgaaaaaaatagatcctgatttatatgaaaag

SEQ ID NO: 227313 - DNA, 120 bp, Artificial Sequence
  ENSG00000118507_32 (sequence is synthesized)
ttacaggtgtgagccacctcacccggcccaccctgttggcctgtttttgatgaaggcatttgcttcacctgtatttgaatatttgcatatatttaaaggaggaattaattccaatgagtg

SEQ ID NO: 227314 - DNA, 120 bp, Artificial Sequence
  ENSG00000118507_33 (sequence is synthesized)
aagatcctgcagaatgcaataatacaacaagatgagcgactggccaaagcaatggtccagacacaggtggcacctccaacttccttcagggggctcagatatggacggagtgagacagta

SEQ ID NO: 227315 - DNA, 120 bp, Artificial Sequence
  ENSG00000118507_34 (sequence is synthesized)
catttcgtagccatgatcgcagcatcacaaaagcccagctggtcatcatcttcagaggtgccgcagatatcgcaacatttgtgctcgatgcattgccagcagtatgtcttcactgcccca

SEQ ID NO: 227316 - DNA, 120 bp, Artificial Sequence
  ENSG00000118507_35 (sequence is synthesized)
ctagaattgcatctaactggaagtggaggagggaagatgcatcattcctctccctgtttcagaggagcaggtgctgagagaggaagggagatggtggaccaggtctgtggggatttctcc

SEQ ID NO: 227317 - DNA, 120 bp, Artificial Sequence
  ENSG00000118508_0 (sequence is synthesized)
acagccgcagcgctcatggcgggcggaggagccggggaccccggcctgggggcggccgccgccccagcgcccgagacccgcgagcacctcttcaaggtgctggtgatcggcgagcttggc

SEQ ID NO: 227318 - DNA, 120 bp, Artificial Sequence
  ENSG00000118508_1 (sequence is synthesized)
gtgctggtgatcggcgagcttggcgtgggcaagaccagcatcatcaagcgctacgtccaccagctcttctcccagcactaccgggccaccatcggggtggacttcgccctcaaggtcctc

SEQ ID NO: 227319 - DNA, 120 bp, Artificial Sequence
  ENSG00000118508_2 (sequence is synthesized)
aactgggacagcaggactctggtgcgcctgcagctgtgggacatcgcggggcaggagcgatttggcaacatgacccgagtatactacaaggaagctgttggtgcttttgtagtctttgat

SEQ ID NO: 227320 - DNA, 120 bp, Artificial Sequence
  ENSG00000118508_3 (sequence is synthesized)
atatcaagaagttccacatttgaggcagtcttaaaatggaaaagtgatctggatagtaaagttcatcttccaaatggcagccctatccctgctgtcctcttggctaacaaatgtgaccag

SEQ ID NO: 227321 - DNA, 120 bp, Artificial Sequence
  ENSG00000118508_4 (sequence is synthesized)
gaagctgcccggttcctagtggagaagattcttgtaaaccaccaaagctttcctaatgaagaaaacgatgtggacaaaattaagctagatcaagagaccttgagagcagagaacaaatcc

SEQ ID NO: 227322 - DNA, 120 bp, Artificial Sequence
  ENSG00000118508_5 (sequence is synthesized)
cagtgttgctgatatatggcttctgcttctcttgtgtgtgcctcagctctgaagaagttcctgagaatgggttacagatgtcatgttagctgggagtcttcccacatgtggcacttcaaa

SEQ ID NO: 227323 - DNA, 120 bp, Artificial Sequence
  ENSG00000118508_6 (sequence is synthesized)
aggcagcaccactgggcgcctgcacttatttgaaaatggaactttgggagaagtatccctgctagtggctctgtaacttaacagatgacaattaggcttttgtcattgttgccatcatat

SEQ ID NO: 227324 - DNA, 120 bp, Artificial Sequence
  ENSG00000118508_7 (sequence is synthesized)
ggaagataatgtttacatccttttaaacatttttatatgacaattcctcaggatttggtaaggcttccaagttgtagcttttagtgtaagtgctggggtggtaataaaatgttacctcca

SEQ ID NO: 227325 - DNA, 120 bp, Artificial Sequence
  ENSG00000118513_0 (sequence is synthesized)
ttcctcctcctccttctcctcctcctccgtgacctcctcctcctctttctcctgagaaacttcgccccagcggtgcggagcgccgctgcgcagccggggagggacgcaggcaggcggcgg

SEQ ID NO: 227326 - DNA, 120 bp, Artificial Sequence
  ENSG00000118513_1 (sequence is synthesized)
gcagcgggaggcggcagcccggtgcggtccccgcggctctcggcggagccccgcgcccgccgcgccatggcccgaagaccccggcacagcatatatagcagtgacgaggatgatgaggac

SEQ ID NO: 227327 - DNA, 120 bp, Artificial Sequence
  ENSG00000118513_2 (sequence is synthesized)
tttgagatgtgtgaccatgactatgatgggctgcttcccaagtctggaaagcgtcacttggggaaaacaaggtggacccgggaagaggatgaaaaactgaagaagctggtggaacagaat

SEQ ID NO: 227328 - DNA, 120 bp, Artificial Sequence
  ENSG00000118513_3 (sequence is synthesized)
ggaacagatgactggaaagttattgccaattatctcccgaatcgaacagatgtgcagtgccagcaccgatggcagaaagtactaaaccctgagctcatcaagggtccttggaccaaagaa

SEQ ID NO: 227329 - DNA, 120 bp, Artificial Sequence
  ENSG00000118513_4 (sequence is synthesized)
gaagatcagagagtgatagagcttgtacagaaatacggtccgaaacgttggtctgttattgccaagcacttaaaggggagaattggaaaacaatgtagggagaggtggcataaccacttg

SEQ ID NO: 227330 - DNA, 120 bp, Artificial Sequence
  ENSG00000118513_5 (sequence is synthesized)
aatccagaagttaagaaaacctcctggacagaagaggaagacagaattatttaccaggcacacaagagactggggaacagatgggcagaaatcgcaaagctactgcctggacgaactgat

SEQ ID NO: 227331 - DNA, 120 bp, Artificial Sequence
  ENSG00000118513_6 (sequence is synthesized)
aatgctatcaagaaccactggaattctacaatgcgtcggaaggtcgaacaggaaggttatctgcaggagtcttcaaaagccagccagccagcagtggccacaagcttccagaagaacagt

SEQ ID NO: 227332 - DNA, 120 bp, Artificial Sequence
  ENSG00000118513_7 (sequence is synthesized)
catttgatgggttttgctcaggctccgcctacagctcaactccctgccactggccagcccactgttaacaacgactattcctattaccacatttctgaagcacaaaatgtctccagtcat

SEQ ID NO: 227333 - DNA, 120 bp, Artificial Sequence
  ENSG00000118513_8 (sequence is synthesized)
gttccataccctgtagcgttacatgtaaatatagtcaatgtccctcagccagctgccgcagccattcagagacactataatgatgaagaccctgagaaggaaaagcgaataaaggaatta

SEQ ID NO: 227334 - DNA, 120 bp, Artificial Sequence
  ENSG00000118513_9 (sequence is synthesized)
gaattgctcctaatgtcaaccgagaatgagctaaaaggacagcaggtgctaccaacacagaaccacacatgcagctaccccgggtggcacagcaccaccattgccgaccacaccagacct

SEQ ID NO: 227335 - DNA, 120 bp, Artificial Sequence
  ENSG00000118513_10 (sequence is synthesized)
catggagacagtgcacctgtttcctgtttgggagaacaccactccactccatctctgccagcggatcctggctccctacctgaagaaagcgcctcgccagcaaggtgcatgatcgtccac

SEQ ID NO: 227336 - DNA, 120 bp, Artificial Sequence
  ENSG00000118513_11 (sequence is synthesized)
cagggcaccattctggataatgttaagaacctcttagaatttgcagaaacactccaatttatagattctttcttaaacacttccagtaaccatgaaaactcagacttggaaatgccttct

SEQ ID NO: 227337 - DNA, 120 bp, Artificial Sequence
  ENSG00000118513_12 (sequence is synthesized)
ttaacttccacccccctcattggtcacaaattgactgttacaacaccatttcatagagaccagactgtgaaaactcaaaaggaaaatactgtttttagaaccccagctatcaaaaggtca

SEQ ID NO: 227338 - DNA, 120 bp, Artificial Sequence
  ENSG00000118513_13 (sequence is synthesized)
taaatacggtcccctgaagatgctacctcagacaccctctcatctagtagaagatctgcaggatgtgatcaaacaggaatctgatgaatctggaattgttgctgagtttcaagaaaatgg

SEQ ID NO: 227339 - DNA, 120 bp, Artificial Sequence
  ENSG00000118513_14 (sequence is synthesized)
accacccttactgaagaaaatcaaacaagaggtggaatctccaactgataaatcaggaaacttcttctgctcacaccactgggaaggggacagtctgaatacccaactgttcacgcagac

SEQ ID NO: 227340 - DNA, 120 bp, Artificial Sequence
  ENSG00000118513_15 (sequence is synthesized)
ctcgcctgtggcagatgcaccgaatattcttacaagctccgttttaatggcaccagcatcagaagatgaagacaatgttctcaaagcatttacagtacctaaaaacaggtccctggcgag

SEQ ID NO: 227341 - DNA, 120 bp, Artificial Sequence
  ENSG00000118513_16 (sequence is synthesized)
ccccttgcagccttgtagcagtacctgggaacctgcatcctgtggaaagatggaggagcagatgacatcttccagtcaagctcgtaaatacgtgaatgcattctcagcccggacgctggt

SEQ ID NO: 227342 - DNA, 120 bp, Artificial Sequence
  ENSG00000118513_17 (sequence is synthesized)
catgtgagacatttccagaaaagcattatggttttcagaacacttcaagttgacttgggatatatcattcctcaacatgaaacttttcatgaatgggagaagaacctatttttgttgtgg

SEQ ID NO: 227343 - DNA, 120 bp, Artificial Sequence
  ENSG00000118513_18 (sequence is synthesized)
tacaacagttgagagcagcaccaagtgcatttagttgaatgaagtcttcttggatttcacccaactaaaaggatttttaaaaataaataacagtcttacctaaattattaggtaatgaat

SEQ ID NO: 227344 - DNA, 120 bp, Artificial Sequence
  ENSG00000118513_19 (sequence is synthesized)
tgtagccagttgttaatatcttaatgcagatttttttaaaaaaaacataaaatgatttatctgtattttaaaggatccaacagatcagtattttttcctgtgatgggttttttgaaattt

SEQ ID NO: 227345 - DNA, 120 bp, Artificial Sequence
  ENSG00000118513_20 (sequence is synthesized)
gacacattaaaaggtactccagtatttcacttttctcgatcactaaacatatgcatatatttttaaaaatcagtaaaagcattactctaagtgtagacttaataccatgtgacatttaat

SEQ ID NO: 227346 - DNA, 120 bp, Artificial Sequence
  ENSG00000118513_21 (sequence is synthesized)
ccagattgtaaatgctcatttatggttaatgacattgaaggtacatttattgtaccaaaccattttatgagttttctgttagcttgctttaaaaattattactgtaagaaatagttttat

SEQ ID NO: 227347 - DNA, 120 bp, Artificial Sequence
  ENSG00000118513_22 (sequence is synthesized)
aaaaaattatatttttattcagtaatttaattttgtaaatgccaaatgaaaaacgttttttgctgctatggtcttagcctgtagacatgctgctagtatcagaggggcagtagagcttgg

SEQ ID NO: 227348 - DNA, 120 bp, Artificial Sequence
  ENSG00000118513_23 (sequence is synthesized)
acagaaagaaaagaaacttggtgttaggtaattgactatgcactagtatttcagactttttaattttatatatatatacattttttttccttctgcaatacatttgaaaacttgtttggg

SEQ ID NO: 227349 - DNA, 120 bp, Artificial Sequence
  ENSG00000118513_24 (sequence is synthesized)
agactctgcattttttattgtggtttttttgttattgttggtttatacaagcatgcgttgcacttcttttttgggagatgtgtgttgttgatgttctatgttttgttttgagtgtagcct

SEQ ID NO: 227350 - DNA, 120 bp, Artificial Sequence
  ENSG00000118513_25 (sequence is synthesized)
gactgttttataatttgggagttctgcatttgatccgcatcccctgtggtttctaagtgtatggtctcagaactgttgcatggatcctgtgtttgcaactggggagacagaaactgtggt

SEQ ID NO: 227351 - DNA, 120 bp, Artificial Sequence
  ENSG00000118513_26 (sequence is synthesized)
tgatagccagtcactgccttaagaacatttgatgcaagatggccagcactgaacttttgagatatgacggtgtacttactgccttgtagcaaaataaagatgtgcccttattttacctac

SEQ ID NO: 227352 - DNA, 120 bp, Artificial Sequence
  ENSG00000118513_27 (sequence is synthesized)
ttgaattctttgaagaagcagatttttcacctagccaacatcacacaggcaaagccctacagcttcagcaaagagagggcaatgggactaaacctgcaggagaacctagcccaagggtga

SEQ ID NO: 227353 - DNA, 120 bp, Artificial Sequence
  ENSG00000118513_28 (sequence is synthesized)
acaaacgtatgttgagtgagagttcacttgacccacccaaggtcttacctcctgcaaggcacagcacaattccactggtcatccttcgaaaaaaacggggccaggccagccccttagcca

SEQ ID NO: 227354 - DNA, 120 bp, Artificial Sequence
  ENSG00000118513_29 (sequence is synthesized)
ctggagactgtagctccttcatatttgctgacgtcagcagttcaactcccaagcgttcccctgtcaaaagcctacccttctctccctcgcagttcttaaacacttccagtaaccatgaaa

SEQ ID NO: 227355 - DNA, 120 bp, Artificial Sequence
  ENSG00000118513_30 (sequence is synthesized)
aggccgatctgaagttgaccatctgctgtcaggttttaatatcaaaagagatttcccttgtaaccctaaagtgggtgtgtgttgatgaaatataaccaattccaaattaatcctgagcca

SEQ ID NO: 227356 - DNA, 120 bp, Artificial Sequence
  ENSG00000118513_31 (sequence is synthesized)
tctatgtagagtgtcgggaggtccctgcagcacatcagagggccagccttgaggcagcccactagaccctgctctactgcagtataatagagcaactgctcatcttgaagctgttgctca

SEQ ID NO: 227357 - DNA, 120 bp, Artificial Sequence
  ENSG00000118513_32 (sequence is synthesized)
cccaggaatattatatgattagaagccaagggatgattttagaaccccagctatcaaaaggtcaatcttagaaagctctccaagaactcctacaccattcaaacatgcacttgcagctca

SEQ ID NO: 227358 - DNA, 120 bp, Artificial Sequence
  ENSG00000118513_33 (sequence is synthesized)
gaagccaaaccaacgggcctagtgtttgctttgcgttgagcatctctctctcagtgctgtttcaggtgatgatggcacacactatctcaaagttctgtgcctcccacattgtttcaggat

SEQ ID NO: 227359 - DNA, 120 bp, Artificial Sequence
  ENSG00000118513_34 (sequence is synthesized)
aacaagctgagaatcctgccccctttattccttgtgtgcagcttgatgtgtctgccattggcactgtgcaacaccacgacttttcgtgcaagattttcatacaaggtgcagcgaaaaggt

SEQ ID NO: 227360 - DNA, 120 bp, Artificial Sequence
  ENSG00000118513_35 (sequence is synthesized)
accgagaatgagctaaaaggacagcaggtgctaccattatgtgggccattactgaattctgacatctttagcgactgggcagccaactgggatggctccttgtgctttgcaacatacata

SEQ ID NO: 227361 - DNA, 120 bp, Artificial Sequence
  ENSG00000118513_36 (sequence is synthesized)
agcaggtgctaccagtaagactgtcatcatgtgcttgaatgaggggatagcagctttgcctcagtttacctaagcgctcttctcttctaaatattacacttagcaaggctccatatatcc

SEQ ID NO: 227362 - DNA, 120 bp, Artificial Sequence
  ENSG00000118513_37 (sequence is synthesized)
attcagaatgtctcaacacaagaagttgcttgtagtaaaatgtagttggtatcagattatatgctgattaaattggaagcagtctttttgtaattgcaataaaaatgcaatatccactta

SEQ ID NO: 227363 - DNA, 120 bp, Artificial Sequence
  ENSG00000118513_38 (sequence is synthesized)
tggtagtgctggtggtctgtttttcgttttcaacattttagacataggggagtaatgcttttatacaattcttgatgtctagaaaaatccaataattcctttttgctactcatatgagac

SEQ ID NO: 227364 - DNA, 120 bp, Artificial Sequence
  ENSG00000118513_39 (sequence is synthesized)
atgctagaaatttttatcagtgcagattccccaaagcatgatgaaatgaaacatttcttactgtgactgagactaagatgtattacacgtgtgtcactatcttcttctgccctcaaatgt

SEQ ID NO: 227365 - DNA, 120 bp, Artificial Sequence
  ENSG00000118513_40 (sequence is synthesized)
tttataaaaatatatcaatatagtttactttatgttccaaattttttattttttatgctgtatccctaggcaaccaaagctcagagactgttccaattttaaatgaagtctgaaattagt

SEQ ID NO: 227366 - DNA, 120 bp, Artificial Sequence
  ENSG00000118514_0 (sequence is synthesized)
aacctgagtgctcagtcgtaaagaggaaaggcagaatttttccttgctatggctggaacaaacgcacttttgatgctggaaaacttcatagatggaaaatttttaccttgtagctcatat

SEQ ID NO: 227367 - DNA, 120 bp, Artificial Sequence
  ENSG00000118514_1 (sequence is synthesized)
atagattcttacgacccatcaacaggggaagtgtattgcagagtgccaaatagtggaaaagacgagatcgaagccgcggtcaaggccgccagagaagcctttcccagctggtcatcccgc

SEQ ID NO: 227368 - DNA, 120 bp, Artificial Sequence
  ENSG00000118514_2 (sequence is synthesized)
agcccccaggagcgctcacgggtcctgaaccaggtggcggatttgctggagcagtccctggaggagtttgcccaggccgagtctaaagaccaagggaaaaccttagcactggcaagaacc

SEQ ID NO: 227369 - DNA, 120 bp, Artificial Sequence
  ENSG00000118514_3 (sequence is synthesized)
atggacattccccggtctgtgcagaacttcaggttcttcgcttcctccagcctgcaccacacgtcagagtgcacgcagatggaccacctgggctgcatgcactacacggtgcgggccccg

SEQ ID NO: 227370 - DNA, 120 bp, Artificial Sequence
  ENSG00000118514_4 (sequence is synthesized)
gtgggagtcgctggtctgatcagcccctggaatttgccactctacttgctgacctggaagatagctccagcgatggctgcagggaacactgtgatagccaagcccagtgagctgacttca

SEQ ID NO: 227371 - DNA, 120 bp, Artificial Sequence
  ENSG00000118514_5 (sequence is synthesized)
gtgactgcgtggatgttgtgcaaactcctggataaagcaggtgttccaccaggtgtggtcaatattgtgtttggaaccgggcccagggtgggtgaggccctggtgtcccacccagaggtg

SEQ ID NO: 227372 - DNA, 120 bp, Artificial Sequence
  ENSG00000118514_6 (sequence is synthesized)
cccctgatctccttcaccgggagccagcccaccgctgagcggatcacccagctgagcgctccccactgcaaaaagctctccctggagctggggggcaagaatcctgccatcatctttgag

SEQ ID NO: 227373 - DNA, 120 bp, Artificial Sequence
  ENSG00000118514_7 (sequence is synthesized)
gacgccaacctggatgagtgcattccggcaaccgtcaggtccagctttgccaaccagggtgaaatctgtctctgtaccagcaggatctttgtccagaagagcatctatagtgaattttta

SEQ ID NO: 227374 - DNA, 120 bp, Artificial Sequence
  ENSG00000118514_8 (sequence is synthesized)
aagagatttgtagaagctaccagaaagtggaaagtcggcattccctctgatccactggtgagcataggtgctctgataagtaaagcacatttggagaaagtcagaagttacgtcaagaga

SEQ ID NO: 227375 - DNA, 120 bp, Artificial Sequence
  ENSG00000118514_9 (sequence is synthesized)
gctcttgctgaaggtgcccaaatttggtgcggtgagggagtggataagttgagcctccctgccaggaaccaggcaggctactttatgcttcccacggtgataacagacattaaggatgaa

SEQ ID NO: 227376 - DNA, 120 bp, Artificial Sequence
  ENSG00000118514_10 (sequence is synthesized)
ggaagagatatttggtccagtgacgtgtgtcgtcccctttgatagtgaagaggaggtgattgaaagagccaacaacgttaagtatgggctggcggctaccgtgtggtccagcaatgtggg

SEQ ID NO: 227377 - DNA, 120 bp, Artificial Sequence
  ENSG00000118514_11 (sequence is synthesized)
gcgcgtccaccgggtggctaagaagctgcagtctggcttggtctggaccaactgctggctcatcagggagctgaaccttcctttcggggggatgaagagttctggaataggtagagaggg

SEQ ID NO: 227378 - DNA, 120 bp, Artificial Sequence
  ENSG00000118514_12 (sequence is synthesized)
agccaaggactcttacgacttcttcactgagatcaaaaccatcaccgttaaacactgatctttgctaatggtggagccactatggccaatgcctggctgcaggcatcagttgttcaatgt

SEQ ID NO: 227379 - DNA, 120 bp, Artificial Sequence
  ENSG00000118514_13 (sequence is synthesized)
ggtagatgaaaatcatggcatgaattccagctatgccttgacttggcagaaggttatctctagcttatcctcagttcttagtaactttacccactagtgaagagatactgtctattttca

SEQ ID NO: 227380 - DNA, 120 bp, Artificial Sequence
  ENSG00000118514_14 (sequence is synthesized)
atgtggactcggaaaaaaagacttataagtaggaagatagaacaatgatgccagttgtcaggctcctcccaggttatgttttcatagtgtttctttcatcatcttcattgaactcttggg

SEQ ID NO: 227381 - DNA, 120 bp, Artificial Sequence
  ENSG00000118514_15 (sequence is synthesized)
gtttctttcatcatcttcattgaactcttgggaatctccagataatcagattatttcatttggtaaattttaaaaaatatgcaatcaggcacagtgcctcatgcctataatcccagcact

SEQ ID NO: 227382 - DNA, 120 bp, Artificial Sequence
  ENSG00000118514_16 (sequence is synthesized)
gagttcaggagttcgagatcagcctaggcaacatggtgaaatcctgtctttaccaaaagtttaaaaattagcttggtgtggtgccctctgcctatagccccagctacttgggaggctgag

SEQ ID NO: 227383 - DNA, 120 bp, Artificial Sequence
  ENSG00000118514_17 (sequence is synthesized)
gaggatcgcttgagcccaggcggttgaggctgcagtgagccatgatcattccactgcatttcagcctgggggatacagtgagaccttgtctttaaaaaaaaaatgctgcaaaaccaaaaa

SEQ ID NO: 227384 - DNA, 120 bp, Artificial Sequence
  ENSG00000118514_18 (sequence is synthesized)
taaatagccataatttgccatctttggagagattatggagataatctccttgtctattagccactagcatggctaattgatcattgattggacctcattacataagggggctgtggacgt

SEQ ID NO: 227385 - DNA, 120 bp, Artificial Sequence
  ENSG00000118514_19 (sequence is synthesized)
ctttggaatttgttaggggaaggctatgtggtaagctctactaaatgtatctgtacaaggatgaagaaaaacaaaataactactacttttggaggaaacttggaacaagaagagtacata

SEQ ID NO: 227386 - DNA, 120 bp, Artificial Sequence
  ENSG00000118514_20 (sequence is synthesized)
gtttgatccattcctacggtcgagtctaatcaattccatttcttagtgtatgcatctaatgaggcttacaacttgctaaccccaaaagaagcaataaatgttaagcaattttagtaacca

SEQ ID NO: 227387 - DNA, 120 bp, Artificial Sequence
  ENSG00000118514_21 (sequence is synthesized)
aggctgggctacagagtgagaatccatctaaaaaacaaaacaaaacaaaacaaaaatgaggtgtgtggagacctgaggattctggttttgtccatcccccaaggactaacagctttaagg

SEQ ID NO: 227388 - DNA, 120 bp, Artificial Sequence
  ENSG00000118515_0 (sequence is synthesized)
ttttttataaggccgagcgcgcggcctggcgcagcatacgccgagccggtctttgagcgctaacgtctttctgtctccccgcggtggtgatgacggtgaaaactgaggctgctaagggca

SEQ ID NO: 227389 - DNA, 120 bp, Artificial Sequence
  ENSG00000118515_1 (sequence is synthesized)
ccctcacttactccaggatgaggggcatggtggcaattctcatcgctttcatgaagcagaggaggatgggtctgaacgactttattcagaagattgccaataactcctatgcatgcaaac

SEQ ID NO: 227390 - DNA, 120 bp, Artificial Sequence
  ENSG00000118515_2 (sequence is synthesized)
accctgaagttcagtccatcttgaagatctcccaacctcaggagcctgagcttatgaatgccaacccttctcctccaccaagtccttctcagcaaatcaaccttggcccgtcgtccaatc

SEQ ID NO: 227391 - DNA, 120 bp, Artificial Sequence
  ENSG00000118515_3 (sequence is synthesized)
ctcatgctaaaccatctgactttcacttcttgaaagtgatcggaaagggcagttttggaaaggttcttctagcaagacacaaggcagaagaagtgttctatgcagtcaaagttttacaga

SEQ ID NO: 227392 - DNA, 120 bp, Artificial Sequence
  ENSG00000118515_4 (sequence is synthesized)
agaaagcaatcctgaaaaagaaagaggagaagcatattatgtcggagcggaatgttctgttgaagaatgtgaagcaccctttcctggtgggccttcacttctctttccagactgctgaca

SEQ ID NO: 227393 - DNA, 120 bp, Artificial Sequence
  ENSG00000118515_5 (sequence is synthesized)
aattgtactttgtcctagactacattaatggtggagagttgttctaccatctccagagggaacgctgcttcctggaaccacgggctcgtttctatgctgctgaaatagccagtgccttgg

SEQ ID NO: 227394 - DNA, 120 bp, Artificial Sequence
  ENSG00000118515_6 (sequence is synthesized)
gctacctgcattcactgaacatcgtttatagagacttaaaaccagagaatattttgctagattcacagggacacattgtccttactgacttcggactctgcaaggagaacattgaacaca

SEQ ID NO: 227395 - DNA, 120 bp, Artificial Sequence
  ENSG00000118515_7 (sequence is synthesized)
acagcacaacatccaccttctgtggcacgccggagtatctcgcacctgaggtgcttcataagcagccttatgacaggactgtggactggtggtgcctgggagctgtcttgtatgagatgc

SEQ ID NO: 227396 - DNA, 120 bp, Artificial Sequence
  ENSG00000118515_8 (sequence is synthesized)
tgtatggcctgccgcctttttatagccgaaacacagctgaaatgtacgacaacattctgaacaagcctctccagctgaaaccaaatattacaaattccgcaagacacctcctggagggcc

SEQ ID NO: 227397 - DNA, 120 bp, Artificial Sequence
  ENSG00000118515_9 (sequence is synthesized)
tcctgcagaaggacaggacaaagcggctcggggccaaggatgacttcatggagattaagagtcatgtcttcttctccttaattaactgggatgatctcattaataagaagattactcccc

SEQ ID NO: 227398 - DNA, 120 bp, Artificial Sequence
  ENSG00000118515_10 (sequence is synthesized)
ttttaacccaaatgtgagtgggcccaacgacctacggcactttgaccccgagtttaccgaagagcctgtccccaactccattggcaagtcccctgacagcgtcctcgtcacagccagcgt

SEQ ID NO: 227399 - DNA, 120 bp, Artificial Sequence
  ENSG00000118515_11 (sequence is synthesized)
caaggaagctgccgaggctttcctaggcttttcctatgcgcctcccacggactctttcctctgaaccctgttagggcttggttttaaaggattttatgtgtgtttccgaatgttttagtt

SEQ ID NO: 227400 - DNA, 120 bp, Artificial Sequence
  ENSG00000118515_12 (sequence is synthesized)
agccttttggtggagccgccagctgacaggacatcttacaagagaatttgcacatctctggaagcttagcaatcttattgcacactgttcgctggaagctttttgaagagcacattctcc

SEQ ID NO: 227401 - DNA, 120 bp, Artificial Sequence
  ENSG00000118515_13 (sequence is synthesized)
tcagtgagctcatgaggttttcatttttattcttccttccaacgtggtgctatctctgaaacgagcgttagagtgccgccttagacggaggcaggagtttcgttagaaagcggacgctgt

SEQ ID NO: 227402 - DNA, 120 bp, Artificial Sequence
  ENSG00000118515_14 (sequence is synthesized)
tctaaaaaaggtctcctgcagatctgtctgggctgtgatgacgaatattatgaaatgtgccttttctgaagagattgtgttagctccaaagcttttcctatcgcagtgtttcagttcttt

SEQ ID NO: 227403 - DNA, 120 bp, Artificial Sequence
  ENSG00000118515_15 (sequence is synthesized)
attttcccttgtggatatgctgtgtgaaccgtcgtgtgagtgtggtatgcctgatcacagatggattttgttataagcatcaatgtgacacttgcaggacactacaacgtgggacattgt

SEQ ID NO: 227404 - DNA, 120 bp, Artificial Sequence
  ENSG00000118515_16 (sequence is synthesized)
ttgtttcttccatatttggaagataaatttatgtgtagacttttttgtaagatacggttaataactaaaatttattgaaatggtcttgcaatgactcgtattcagatgcttaaagaaagc

SEQ ID NO: 227405 - DNA, 120 bp, Artificial Sequence
  ENSG00000118515_17 (sequence is synthesized)
attgctgctacaaatatttctatttttagaaagggtttttatggaccaatgccccagttgtcagtcagagccgttggtgtttttcattgtttaaaatgtcacctgtaaaatgggcattat

SEQ ID NO: 227406 - DNA, 120 bp, Artificial Sequence
  ENSG00000118515_18 (sequence is synthesized)
ttatgtttttttttttgcattcctgataattgtatgtattgtataaagaacgtctgtacattgggttataacactagtatatttaaacttacaggcttatttgtaatgtaaaccaccatt

SEQ ID NO: 227407 - DNA, 120 bp, Artificial Sequence
  ENSG00000118515_19 (sequence is synthesized)
ttaatgtactgtaattaacatggttataatacgtacaatccttccctcatcccatcacacaactttttttgtgtgtgataaactgattttggtttgcaataaaaccttgaaaaatattta

SEQ ID NO: 227408 - DNA, 120 bp, Artificial Sequence
  ENSG00000118515_20 (sequence is synthesized)
agatattcatgaaccgttgcttcttccagcctcgccttctcgctccctctgcctttctggcgctgttctccctccctccctctggcttctgctctttcttactccttctctcagctgctt

SEQ ID NO: 227409 - DNA, 120 bp, Artificial Sequence
  ENSG00000118515_21 (sequence is synthesized)
aactacagctcccactggaacttgcacaatcaaaaacaactctcctctctcaagccgcctccaggagcgcatcacctggagaagagcgactcgctccccgcgccggccgcggaagagcag

SEQ ID NO: 227410 - DNA, 120 bp, Artificial Sequence
  ENSG00000118515_22 (sequence is synthesized)
ccaggtagctgggggcggggaggcgtacccttctcccgctcggtaagagccacagcatctccccggagattggccgtatcccaccgtccggcccccagggtcctgcagcggtgatgcata

SEQ ID NO: 227411 - DNA, 120 bp, Artificial Sequence
  ENSG00000118515_23 (sequence is synthesized)
tgtttcggagcaatgatggaaggagaaaagccgctgtcggtggcaactgaaagtggggagaggttgctgcagtagctggtgctgcagaatgcgcgagtgaagaactgagccccgctagat

SEQ ID NO: 227412 - DNA, 120 bp, Artificial Sequence
  ENSG00000118515_24 (sequence is synthesized)
tctccatcccgctcagtcttcattaactgtctgcaggaggtaaaccggggaaacagatatgcactaaccaggcgggtgccaacctggatctataactgtgaattccccacggtggaaaat

SEQ ID NO: 227413 - DNA, 120 bp, Artificial Sequence
  ENSG00000118515_25 (sequence is synthesized)
ggtaaacaaagacatgaatggattcccagtcaagaaatgctcagccttccaattttttaagaagcgggtacgaaggtggatcaagagcccaatggtcagtgtggacaagcatcagagtcc

SEQ ID NO: 227414 - DNA, 120 bp, Artificial Sequence
  ENSG00000118515_26 (sequence is synthesized)
cagcctgaagtacaccggctcctccatggtgcacatccctccaggggagccagacttcgagtcttccttgtgtcaaacatgcctgggtgaacatgctttccaaagaggggttctccctca

SEQ ID NO: 227415 - DNA, 120 bp, Artificial Sequence
  ENSG00000118515_27 (sequence is synthesized)
ggagaacgagtcatgttcatgggaaactcaatctgggtgtgaagtgagagagccatgtaatcatgccaacatcctgaccaagcccgatccaagaaccttctggactaatgatgatccagc

SEQ ID NO: 227416 - DNA, 120 bp, Artificial Sequence
  ENSG00000118515_28 (sequence is synthesized)
gcagattgtacttcttcctttagtgcagagacgacttttatttccgccccctcccctccacattcctgacctctccctcccccttttccctctttctttccttccttcctcctcttccaa

SEQ ID NO: 227417 - DNA, 120 bp, Artificial Sequence
  ENSG00000118515_29 (sequence is synthesized)
gttctgggatttttcagccttgcttggttttggccaaaagcacaaaaaaggcgttttcggaagcgacccgaccgtgcacaagggccatttgtttgttttgggactcggggcaggaaatct

SEQ ID NO: 227418 - DNA, 120 bp, Artificial Sequence
  ENSG00000118515_30 (sequence is synthesized)
tgcccggcctgagtcacggcggctccttcaaggaaacgtcagtgctcgccggtcgctctcgtctgccgcgcgccccgccgcccgctgcccatgggggagatgcagggcgcgctggccaga

SEQ ID NO: 227419 - DNA, 120 bp, Artificial Sequence
  ENSG00000118515_31 (sequence is synthesized)
gcccggctcgagtccctgctgcggccccgccacaaaaagagggccgaggcgcagaaaaggagcgagtccttcctgctgagcggactggctttcatgaagcagaggaggatgggtctgaac

SEQ ID NO: 227420 - DNA, 120 bp, Artificial Sequence
  ENSG00000118515_32 (sequence is synthesized)
atagctgacgatgtaggggccagtgaaggcttctcagcagaagagaaatctaagctaagaagtgaaggatgagtaagttagtaaggtgagagagccatgtaatcatgccaacatcctgac

SEQ ID NO: 227421 - DNA, 120 bp, Artificial Sequence
  ENSG00000118515_33 (sequence is synthesized)
taacagaacagggatagccgtctctggctcgtgctctcatgtcatctcagagttccagcttatcagaggcatgtagcagggaggcttattccagccataactgggctctacctccagcct

SEQ ID NO: 227422 - DNA, 120 bp, Artificial Sequence
  ENSG00000118515_34 (sequence is synthesized)
ccagaagtaatccccaacctgcatatccttgggcaacccgaagaatgaaagaagaagctataaaaccccctttgaaagctttcatgaagcagaggaggatgggtctgaacgactttattc

SEQ ID NO: 227423 - DNA, 120 bp, Artificial Sequence
  ENSG00000118515_35 (sequence is synthesized)
tttccttcaacctgtcaggtttatagttaatagattacttggggccacttcctgcagttgttcttttgctgtgtatgtcaaaactaattaaattcatttgcaacccagaatgactttgtt

SEQ ID NO: 227424 - DNA, 120 bp, Artificial Sequence
  ENSG00000118515_36 (sequence is synthesized)
gggccaaggatgacttcgtgagtgatgttttcctgtcctcctgggccggccgggacgtgcactagacctccctgcccttattgaatgcacctgtctaaattaatcttgggtttcttatca

SEQ ID NO: 227425 - DNA, 120 bp, Artificial Sequence
  ENSG00000118515_37 (sequence is synthesized)
ttctcctggaaaaattctgggcctttgtttttcttgtatttctgccagagtatacccaaaaaataattttttaatgcatatttataaagcttctgaggaagacctagaattgtggtcttt

SEQ ID NO: 227426 - DNA, 120 bp, Artificial Sequence
  ENSG00000118515_38 (sequence is synthesized)
gttagctcattatgttatttttttaaagtaggctttatattttagagcagctttaagttcacagcaacattgagcagaaggtacagagattacccatatacgcttgtccccatgcacgta

SEQ ID NO: 227427 - DNA, 120 bp, Artificial Sequence
  ENSG00000118515_39 (sequence is synthesized)
taacctactttgccatcaacattccctagcagagttttatgttagagttcactcttggtgttatacattctatgggtttggactaatgtataataacatgcatccaccattacagtatca

SEQ ID NO: 227428 - DNA, 120 bp, Artificial Sequence
  ENSG00000118515_40 (sequence is synthesized)
tacagttaagtttcactgccctaaaaatcctctgccctccactattcatcccctccttaccctgacccctagcaaccactgatctttttactgtctccatagatttgccttttccagaat

SEQ ID NO: 227429 - DNA, 120 bp, Artificial Sequence
  ENSG00000118515_41 (sequence is synthesized)
gtcatctagctgaatcatgcagtatgttgtattaatgttttacgtgggtccaagactgatacagcaatgtgttggtaaactggcaattcctcagaagtggtttgatcacacaggagatca

SEQ ID NO: 227430 - DNA, 120 bp, Artificial Sequence
  ENSG00000118515_42 (sequence is synthesized)
agtcttagatgatacaacgattgtaatagtcatctacatgttcgtagcttccattgaaatatttagttcaacacgatttgatccatttacagagcactatgtatacttttcattattttt

SEQ ID NO: 227431 - DNA, 120 bp, Artificial Sequence
  ENSG00000118515_43 (sequence is synthesized)
tttgttaatccaagaaaaccagataactgattcatcttgcagtttctaagatttcaaaaatttaagattatatttttaacttataacttaattaggcccatatttattttgatttttaaa

SEQ ID NO: 227432 - DNA, 120 bp, Artificial Sequence
  ENSG00000118515_44 (sequence is synthesized)
accattatataaaatgcttatattatttttaccatcatactgacataaaaatacaatatttagaagacagaacatgttattacaaagtacagttaattgtaagtgatcttccaagtcagt

SEQ ID NO: 227433 - DNA, 120 bp, Artificial Sequence
  ENSG00000118515_45 (sequence is synthesized)
gcatcatagaatgataaacgttaataaccgctcaccttttttatttttagcaaggtaaccattttccagagataaaataatcatttagctgctaaaagactgaagacattaaatctgagt

SEQ ID NO: 227434 - DNA, 120 bp, Artificial Sequence
  ENSG00000118515_46 (sequence is synthesized)
ttagctgctaaaagactgaagacattaaatctgagttccttttcactctgagttatcacgcaatgtcgctgaatctgtttcataatttgtctactttctttctttctttttttttttttt

SEQ ID NO: 227435 - DNA, 90 bp, Artificial Sequence
  ENSG00000118515_47 (sequence is synthesized)
aatttttgtatttttaatagaagtcaaactcccaacctcaggtaatccacctgcgtcggctttccaaattgctgggattacaggcatgag

SEQ ID NO: 227436 - DNA, 120 bp, Artificial Sequence
  ENSG00000118515_48 (sequence is synthesized)
ccctttttttggggggggtgggggtcggggacagggagacagggggacagagtcttgctctgtaaccctgacttgagtgcagtagtgcaatcataactcactgttacctcaaactcctag

SEQ ID NO: 227437 - DNA, 120 bp, Artificial Sequence
  ENSG00000118515_49 (sequence is synthesized)
gttcaagtgatcctcccacctcaaccctcccaagtaaataagaccacaggcatacgccaacaaacctggctaattaaaaaaaaaaaattttttttgtagaaacagggtgttgtcatactg

SEQ ID NO: 227438 - DNA, 120 bp, Artificial Sequence
  ENSG00000118515_50 (sequence is synthesized)
actcctggcttcaagtgatcctcccaaaatgctgggattataggtatgaggcacaatgcccagcctacttgtctactttctacggttattggaaaaatcaaatgagattgatatgaaatg

SEQ ID NO: 227439 - DNA, 120 bp, Artificial Sequence
  ENSG00000118515_51 (sequence is synthesized)
agattgatatgaaatgtttcataatctatagaatgccatgcaaatataaatcattattgctcatgtttgctgatttacatattagctaagcctgtgactctgtaacactatattagactt

SEQ ID NO: 227440 - DNA, 120 bp, Artificial Sequence
  ENSG00000118515_52 (sequence is synthesized)
ccataactgggttagcactttgctgatccatgaacatttgtcatggtgcatttgctttttagccagatgttggttcaactctaggtttgtcatgaaaaacaataaagacgctaaatgcaa

SEQ ID NO: 227441 - DNA, 120 bp, Artificial Sequence
  ENSG00000118515_53 (sequence is synthesized)
cttgtgaggaaggcatcttgcttcccctttgcctcctgacatgattgtgaatttcctgaggcctctccagccatgatgaactcacccacctcaactaccagcatcagaaaacaagttctg

SEQ ID NO: 227442 - DNA, 120 bp, Artificial Sequence
  ENSG00000118515_54 (sequence is synthesized)
atctccctaaatgtgatattctcatacacccccatcttctgatgtttaaattgtaacctatgacaatacttctagatgtcaaaacaatagtgattaaacattcaacggttaccttctaaa

SEQ ID NO: 227443 - DNA, 120 bp, Artificial Sequence
  ENSG00000118515_55 (sequence is synthesized)
ggcaattctcatcggtgagtgcaggaatcttgcgggacttctgctccaggagacgcaaagtggaaattttttgaaagtcccggatcagattagtgtgtgtggcgccggacgttatgaagc

SEQ ID NO: 227444 - DNA, 120 bp, Artificial Sequence
  ENSG00000118515_56 (sequence is synthesized)
aatctgaagatcttttggtacacttccttcatgtcctcttttgtattctccctggatgaggatagaaaaatgatttttttaaattgaaatttcaggttcttctagcaagacacaaggcag

SEQ ID NO: 227445 - DNA, 120 bp, Artificial Sequence
  ENSG00000118515_57 (sequence is synthesized)
tggggctggcattggcggtagacactccttgaataatcttgattctggaatgttggtgccaagttgaaacatgccactaaatctgaatcgtcattttcctaggagaagcatattatgtcg

SEQ ID NO: 227446 - DNA, 120 bp, Artificial Sequence
  ENSG00000118515_58 (sequence is synthesized)
taatggattaaaatagcatttctagaaattagtatcaaggcaggaatgcttcattatggcataacaagtgatataaatatttaagtattgagtcagagtattattttatttttttcctgg

SEQ ID NO: 227447 - DNA, 120 bp, Artificial Sequence
  ENSG00000118515_59 (sequence is synthesized)
gcatattttacctccaaagtggttattttaaaaggcatatttcataaaaaggttttatctgtctgaaacaacatgactgtgtgcagtttccatactcatttgaaatgtgatgaaatgtag

SEQ ID NO: 227448 - DNA, 120 bp, Artificial Sequence
  ENSG00000118515_60 (sequence is synthesized)
aatcaaaaacaactctcctctctcaagccgcctccaggagcgcatcacctggagaagagcgactcgctccccgcgccggccgcggaagagcagccaggtacgaaggtggatcaagagccc

SEQ ID NO: 227449 - DNA, 120 bp, Artificial Sequence
  ENSG00000118515_61 (sequence is synthesized)
ttaatggggtttattattttctttaactgactaatgtattggggtattttcagtttaaacagtgaattatccgggtagaagtcggtagagccagaaactcacttttgatgttggtgtgcc

SEQ ID NO: 227450 - DNA, 120 bp, Artificial Sequence
  ENSG00000118515_62 (sequence is synthesized)
caatcatgcacttaactaccaaaaagagtaaactcctctcagagacttcttaatacagttcagtgcaaataaaatacatttgctgtttgatgtagcatgagaaatcccaagtccttctgt

SEQ ID NO: 227451 - DNA, 120 bp, Artificial Sequence
  ENSG00000118515_63 (sequence is synthesized)
tcctttactgaaaagtagctgtttgtaagtaagatctgcatcataaaaactttctaaatccctaagtaagagatatcaagtgcccagcagtttcctaaatgtcagtacacataggtagcc

SEQ ID NO: 227452 - DNA, 120 bp, Artificial Sequence
  ENSG00000118515_64 (sequence is synthesized)
cctgctccctacaatattgccttcacacagcccatgcttggccatggtgtcttgcccttaccagtacgcttatcaaaagcagctaagaggcatattggttattttatagttcataagaat

SEQ ID NO: 227453 - DNA, 120 bp, Artificial Sequence
  ENSG00000118515_65 (sequence is synthesized)
aatcacttacctggttcttttgtgcatttcacattttactagataggaccacattgaacctgtgtggtggtgaaaaactaccacttattaacatctaccccctcaccctccacacacaca

SEQ ID NO: 227454 - DNA, 120 bp, Artificial Sequence
  ENSG00000118515_66 (sequence is synthesized)
tagtatagtttgaatttgccagcggtaaacattctcatcacggcgtttatcgggaaggcgaagacttcttctggggtggggatctcatttctccttaaattctaatatatttgacacatt

SEQ ID NO: 227455 - DNA, 120 bp, Artificial Sequence
  ENSG00000118515_67 (sequence is synthesized)
tctacatcgtttatgttatagatgtcttcctttgaagcaatggtattaaaagaaattctttttttttttttctagccaagtccttctcagcaaatcaaccttggcccgtcgtccaatcct

SEQ ID NO: 227456 - DNA, 120 bp, Artificial Sequence
  ENSG00000118515_68 (sequence is synthesized)
ctacattaatggtggagaggtgagcaggggggatagaagtcaactcttagtgtctctgcacagcctgctttgttttagtttgagaaaaaagttttcaaagatttttggtggggagaatgt

SEQ ID NO: 227457 - DNA, 120 bp, Artificial Sequence
  ENSG00000118515_69 (sequence is synthesized)
tcactgaacatcgtttataggtaagcctgagagctcttcaggctaccagttttggtataaaggagacgtagcactggctgtttcatagggccttaaaataatttgtgtttatttgcaact

SEQ ID NO: 227458 - DNA, 120 bp, Artificial Sequence
  ENSG00000118515_70 (sequence is synthesized)
tggttgcctaaaaccagatcccctagcacgtgagctggcttgacttaagtgccaagggggaaccagccaagtaggattgtgcctaatccagaatagatgagcagaacaagggctcccttt

SEQ ID NO: 227459 - DNA, 120 bp, Artificial Sequence
  ENSG00000118515_71 (sequence is synthesized)
tttcttcactacacaactacagtgaacctaaaatgcctctaatacctttagcaattatctttaagaggatatcttatgaagtgaaattaacttgtgcaactacttttctattcacttttt

SEQ ID NO: 227460 - DNA, 120 bp, Artificial Sequence
  ENSG00000118515_72 (sequence is synthesized)
ctcaaaaagtccagcagttttatcaggaaggaatctaaagatatctatcttccaagctggctctgggtctctcagctttttcaaactaaatgtgtggtcgtgggattgcttgctttcgca

SEQ ID NO: 227461 - DNA, 120 bp, Artificial Sequence
  ENSG00000118515_73 (sequence is synthesized)
tctaagtatagagaagcccaaagggcatttattttaattcagaattgtctgggggagggttggaaggaatacattggcagatgttttctccataaacctgttattttacctacataaaaa

SEQ ID NO: 227462 - DNA, 120 bp, Artificial Sequence
  ENSG00000118515_74 (sequence is synthesized)
gcacatttttgtgtcccaacaaggctcccataatttttagacacatttatcaattcgaagcaccaaaaggcaacaagtgaacattattcttatgtttaactgtgtgtagccttttgagat

SEQ ID NO: 227463 - DNA, 120 bp, Artificial Sequence
  ENSG00000118515_75 (sequence is synthesized)
tttgtgcttgaagtgggtgattatggaagttgatataagacttaaacttggtatttaaagcctggtcaagatttccctgtcctgtgtctagtgtgagttcttgacaagagtgtttttccc

SEQ ID NO: 227464 - DNA, 120 bp, Artificial Sequence
  ENSG00000118518_0 (sequence is synthesized)
gagacaggggcagaacgatgaggcgccggagttagctcgccggtgcgggtgcgggtgcgcggcgcgtcgcggcccctcctccgcgacgcgccgggtggtcacgtgacggccgcgcgcgtt

SEQ ID NO: 227465 - DNA, 120 bp, Artificial Sequence
  ENSG00000118518_1 (sequence is synthesized)
cccggcagctgcgggctccgaggccagagagaaaagactgcgaggtggccgcagctgtggccggagaggtgggagtcggagcgaggccctctcgggggagcagggtgaacgccggccact

SEQ ID NO: 227466 - DNA, 120 bp, Artificial Sequence
  ENSG00000118518_2 (sequence is synthesized)
ctaggatcctcactcggggagaggaggcatagctcgcggtgtcacctccagccgcaacgtactccgggtcggccttgcgctcggggcctgagaggggcggcggcggggtcaggggccgca

SEQ ID NO: 227467 - DNA, 120 bp, Artificial Sequence
  ENSG00000118518_3 (sequence is synthesized)
caaagaatgaaccagcagtggaagagaaaatactgtaagctggctgactgctggtgaagaaaatgctttatttttgtggcaggcatctgtgggatctgtaatagaaatatttccaagtct

SEQ ID NO: 227468 - DNA, 120 bp, Artificial Sequence
  ENSG00000118518_4 (sequence is synthesized)
cctcaaaaggaaaagtctctataagaaaaactgaagacacaggagtttgctcaaagaatgctgaaatagatctccaggggatcttcaatattcatgttattttctcctttggtcttatat

SEQ ID NO: 227469 - DNA, 120 bp, Artificial Sequence
  ENSG00000118518_5 (sequence is synthesized)
gattgttacctttatgaagctttagtgattacaaagcactttttttgtccatttttacctgagctttgtaaactctgatttgcaggatggctggctgtggtgaaattgatcattcaataa

SEQ ID NO: 227470 - DNA, 120 bp, Artificial Sequence
  ENSG00000118518_6 (sequence is synthesized)
acatgcttcctacaaacaggaaagcgaacgagtcctgttctaatactgcaccttctttaaccgtccctgaatgtgccatttgtctgcaaacatgtgttcatccagtcagtctgccctgta

SEQ ID NO: 227471 - DNA, 120 bp, Artificial Sequence
  ENSG00000118518_7 (sequence is synthesized)
agcacgttttctgctatctatgtgtaaaaggagcttcatggcttggaaagcggtgtgctctttgtcgacaagaaattcccgaggatttccttgacaagccaaccttgttgtcaccagaag

SEQ ID NO: 227472 - DNA, 120 bp, Artificial Sequence
  ENSG00000118518_8 (sequence is synthesized)
aactcaaggcagcaagtagaggaaatggtgaatatgcatggtattatgaaggaagaaatgggtggtggcagtacgatgagcgcactagtagagagctggaagatgctttttccaaaggta

SEQ ID NO: 227473 - DNA, 120 bp, Artificial Sequence
  ENSG00000118518_9 (sequence is synthesized)
aaaagaacactgaaatgttaattgctggctttctgtatgtcgctgatcttgaaaacatggttcaatataggagaaatgaacatggacgtcgcaggaagattaagcgagatataatagata

SEQ ID NO: 227474 - DNA, 120 bp, Artificial Sequence
  ENSG00000118518_10 (sequence is synthesized)
agtggagcttctgttcagcccctagtgtcttctgtaaggcccctaacatcagtagatggtcagttaacaagccctgcaacaccatcccctgatgcaagcacttctctggaagactctttt

SEQ ID NO: 227475 - DNA, 120 bp, Artificial Sequence
  ENSG00000118518_11 (sequence is synthesized)
gctcatttacaactcagtggagacaacacagctgaaaggagtcataggggagaaggagaagaagatcatgaatcaccatcttcaggcagggtaccagcaccagacacctccattgaagaa

SEQ ID NO: 227476 - DNA, 120 bp, Artificial Sequence
  ENSG00000118518_12 (sequence is synthesized)
actgaatcagatgccagtagtgatagtgaggatgtatctgcagttgttgcacagcactccttgacccaacagagacttttggtttctaatgcaaaccagacagtacccgatcgatcagat

SEQ ID NO: 227477 - DNA, 120 bp, Artificial Sequence
  ENSG00000118518_13 (sequence is synthesized)
cgatcgggaactgatcgatcagtagcagggggtggaacagtgagtgtcagtgtcagatctagaaggcctgatggacagtgcacagtaactgaagtttaaataaaaatgtcttcagctcca

SEQ ID NO: 227478 - DNA, 120 bp, Artificial Sequence
  ENSG00000118518_14 (sequence is synthesized)
tgctcaaggttgaaagggttacctgtaaatttctgcccacataacattatactcatccctagtagtgcattttgggagttggggtgggaaggggtatgggaaggatagactcataattaa

SEQ ID NO: 227479 - DNA, 120 bp, Artificial Sequence
  ENSG00000118518_15 (sequence is synthesized)
aatgtctaacatgtctctgttgagaaatttatttaatgtaaggaacttgggtgttaatagttgagagctgtttagtaataacccagttttcttgaggtctgtttactttatactttttaa

SEQ ID NO: 227480 - DNA, 120 bp, Artificial Sequence
  ENSG00000118518_16 (sequence is synthesized)
aaacttctgtagttcttttggccagtgtgtttgtattatctgtgcattaatggtcctcatctgactcctgcattgtgtcttatttttctgcatggattggcataagaccattactaaaat

SEQ ID NO: 227481 - DNA, 120 bp, Artificial Sequence
  ENSG00000118518_17 (sequence is synthesized)
ttggcacctgtgagatgtttgatattatgaacaggaaacataatttaatgtatgaatagatgtgaatttgggatttcaaaatagatgaataacaactattttatagtaaagttattgaaa

SEQ ID NO: 227482 - DNA, 120 bp, Artificial Sequence
  ENSG00000118518_18 (sequence is synthesized)
tggaaatgaaaacagccagtaacttatgtttcagaatgtttgtaacacacttcatggtgttcccataggctttgctgtctagtcttatagtttgaggtttttttggtctgcatttttctt

SEQ ID NO: 227483 - DNA, 120 bp, Artificial Sequence
  ENSG00000118518_19 (sequence is synthesized)
tttgattacaaaatttataatttaataaatactagagtttatcaaaaacagtttgtctcttgtttgagggtggaaagggtgtggaaacattttgacatttgtgaccaaaggtcacttaaa

SEQ ID NO: 227484 - DNA, 120 bp, Artificial Sequence
  ENSG00000118518_20 (sequence is synthesized)
aagtggtggttttaattggttgttttcagcttaatcacctgctcagaaaagtttgatttttttcttagagattatttaaacagaatctataggcagtgtgtatataataaacatgtatgg

SEQ ID NO: 227485 - DNA, 120 bp, Artificial Sequence
  ENSG00000118518_21 (sequence is synthesized)
tggaactgcactctttcagagcctctgggccctaatacaaagcaagcacactctaaagaagccagaagaatgcaagcagcgaagtcgccgctccccacaggcaagagagtaccggcagac

SEQ ID NO: 227486 - DNA, 120 bp, Artificial Sequence
  ENSG00000118518_22 (sequence is synthesized)
aaaggactctaaaactcagatttttagatttcttgtctagcattcatttcactgtataatagctgccatgattcaaggtatccttttcccctcactggatgcagcttttcattatatagt

SEQ ID NO: 227487 - DNA, 120 bp, Artificial Sequence
  ENSG00000118518_23 (sequence is synthesized)
aatgtagatttccaagtctcctcaaaaggaaaagtctctataagaaaaactgaagacacaggagtttgctcaaagaatgctgaaatagatctccaggtcctctgggttctaccttctttt

SEQ ID NO: 227488 - DNA, 120 bp, Artificial Sequence
  ENSG00000118518_24 (sequence is synthesized)
tacataataattttcttaaataactaagctaggcaagtagtactagcttttgtaaataagacagactactaggttataaaaactctagttactaaaaacttgtttcactaaattaaagga

SEQ ID NO: 227489 - DNA, 120 bp, Artificial Sequence
  ENSG00000118518_25 (sequence is synthesized)
tggttggcccttttgactgctctctctacaggtttaatttgggcatttactcattttcatggctccaaggaccatgtatgtgttggggatcttcaatattcatgttattttctcctttgg

SEQ ID NO: 227490 - DNA, 120 bp, Artificial Sequence
  ENSG00000118520_0 (sequence is synthesized)
gtcactgagggttgactgactggagagctcaagtgcagcaaagagaagtgtcagagcatgagcgccaagtccagaaccatagggattattggagctcctttctcaaagggacagccacga

SEQ ID NO: 227491 - DNA, 120 bp, Artificial Sequence
  ENSG00000118520_1 (sequence is synthesized)
ggaggggtggaagaaggccctacagtattgagaaaggctggtctgcttgagaaacttaaagaacaagagtgtgatgtgaaggattatggggacctgccctttgctgacatccctaatgac

SEQ ID NO: 227492 - DNA, 120 bp, Artificial Sequence
  ENSG00000118520_2 (sequence is synthesized)
agtccctttcaaattgtgaagaatccaaggtctgtgggaaaagcaagcgagcagctggctggcaaggtggcagaagtcaagaagaacggaagaatcagcctggtgctgggcggagaccac

SEQ ID NO: 227493 - DNA, 120 bp, Artificial Sequence
  ENSG00000118520_3 (sequence is synthesized)
agtttggcaattggaagcatctctggccatgccagggtccaccctgatcttggagtcatctgggtggatgctcacactgatatcaacactccactgacaaccacaagtggaaacttgcat

SEQ ID NO: 227494 - DNA, 120 bp, Artificial Sequence
  ENSG00000118520_4 (sequence is synthesized)
ggacaacctgtatctttcctcctgaaggaactaaaaggaaagattcccgatgtgccaggattctcctgggtgactccctgtatatctgccaaggatattgtgtatattggcttgagagac

SEQ ID NO: 227495 - DNA, 120 bp, Artificial Sequence
  ENSG00000118520_5 (sequence is synthesized)
gtggaccctggggaacactacattttgaaaactctaggcattaaatacttttcaatgactgaagtggacagactaggaattggcaaggtgatggaagaaacactcagctatctactagga

SEQ ID NO: 227496 - DNA, 120 bp, Artificial Sequence
  ENSG00000118520_6 (sequence is synthesized)
aaaggccaattcatctaagttttgatgttgacggactggacccatctttcacaccagctactggcacaccagtcgtgggaggtctgacatacagagaaggtctctacatcacagaagaaa

SEQ ID NO: 227497 - DNA, 120 bp, Artificial Sequence
  ENSG00000118520_7 (sequence is synthesized)
tctacaaaacagggctactctcaggattagatataatggaagtgaacccatccctggggaagacaccagaagaagtaactcgaacagtgaacacagcagttgcaataaccttggcttgtt

SEQ ID NO: 227498 - DNA, 120 bp, Artificial Sequence
  ENSG00000118520_8 (sequence is synthesized)
tcggacttgctcgggagggtaatcacaagcctattgactaccttaacccacctaagtaaatgtggaaacatccgatataaatctcatagttaatggcataattagaaagctaatcatttt

SEQ ID NO: 227499 - DNA, 120 bp, Artificial Sequence
  ENSG00000118520_9 (sequence is synthesized)
cttaagcatagagttatccttctaaagacttgttctttcagaaaaatgtttttccaattagtataaactctacaaattccctcttggtgtaaaattcaagatgtggaaattctaactttt

SEQ ID NO: 227500 - DNA, 120 bp, Artificial Sequence
  ENSG00000118520_10 (sequence is synthesized)
ttgaaatttaaaagcttatattttctaacttggcaaaagacttatccttagaaagagaagtgtacattgatttccaattaaaaatttgctggcattaaaaataagcacacttacataagc

SEQ ID NO: 227501 - DNA, 120 bp, Artificial Sequence
  ENSG00000118520_11 (sequence is synthesized)
ccccatacatagagtgggactcttggaatcaggagacaaagctaccacatgtggaaaggtactatgtgtccatgtcattcaaaaaatgtgattttttataataaactctttataacaaga

SEQ ID NO: 227502 - DNA, 120 bp, Artificial Sequence
  ENSG00000118520_12 (sequence is synthesized)
aagtataaatggaaaaaaaagatgcgccctctgtcactgagggttgactgactggagagctcaagtgcagcaaagagaagtgtcagagcatgagcgccaagtccagaaccatagggatta

SEQ ID NO: 227503 - DNA, 120 bp, Artificial Sequence
  ENSG00000118520_13 (sequence is synthesized)
aaaggaagtaaccaaggccataagaagagagaaaatttagaaatatagacagaaaagcattgacctatattttatatcaaattttctgcctttaaaaaaattttataggttacttttatt

SEQ ID NO: 227504 - DNA, 120 bp, Artificial Sequence
  ENSG00000118520_14 (sequence is synthesized)
ctagaaattaacaacaacaatgagaagaaatgaaaaggggcagtgactagcagaagctctacaatgatgattcattcatgttcttactctgttgtccaggctagagtacagtggcacgat

SEQ ID NO: 227505 - DNA, 120 bp, Artificial Sequence
  ENSG00000118520_15 (sequence is synthesized)
cctctagctatttttgatttattacctaatctttagacactagaaattaacaacaacaatgagaagaaatgaaaaggggcagtgactagcagaagctctacaatgatgattcattcatga

SEQ ID NO: 227506 - DNA, 120 bp, Artificial Sequence
  ENSG00000118520_16 (sequence is synthesized)
actctcacgtgaaaatcaacgtgtaagcagggagaggcagtgctgctctgatccaaggcagcgaaggttcttactctgttgtccaggctagagtacagtggcacgatcatggctcactac

SEQ ID NO: 227507 - DNA, 120 bp, Artificial Sequence
  ENSG00000118520_17 (sequence is synthesized)
tcacaagcttacatttctaaataagtatgtgaggcaattcatagcttatttgttcttaattgccgataatatatacaactcatataggtcaacaatttcaaagcatgtgtttttcattat

SEQ ID NO: 227508 - DNA, 120 bp, Artificial Sequence
  ENSG00000118520_18 (sequence is synthesized)
tacttttcaatgactgaagtaactcgaacagtgaacacagcagttgcaataaccttggcttgtttcggacttgctcgggagggtaatcacaagcctattgactaccttaacccacctaag

SEQ ID NO: 227509 - DNA, 120 bp, Artificial Sequence
  ENSG00000118523_0 (sequence is synthesized)
acacaacaactcttccccgctgagaggagacagccagtgcgactccaccctccagctcgacggcagccgccccggccgacagccccgagacgacagcccggcgcgtcccggtccccacct

SEQ ID NO: 227510 - DNA, 120 bp, Artificial Sequence
  ENSG00000118523_1 (sequence is synthesized)
agcgctccaggccccgccgctccccgctcgccgccaccgcgccctccgctccgcccgcagtgccaaccatgaccgccgccagtatgggccccgtccgcgtcgccttcgtggtcctcctcg

SEQ ID NO: 227511 - DNA, 120 bp, Artificial Sequence
  ENSG00000118523_2 (sequence is synthesized)
cgccagtatgggccccgtccgcgtcgccttcgtggtcctcctcgccctctgcagccggccggccgtcggccagaactgcagcgggccgtgccggtgcccggacgagccggcgccgcgctg

SEQ ID NO: 227512 - DNA, 120 bp, Artificial Sequence
  ENSG00000118523_3 (sequence is synthesized)
gcggctgctgccgcgtctgcgccaagcagctgggcgagctgtgcaccgagcgcgacccatgcgacccgcacaagggcctattctgtcacttcggctccccggccaaccgcaagatcggcg

SEQ ID NO: 227513 - DNA, 120 bp, Artificial Sequence
  ENSG00000118523_4 (sequence is synthesized)
tgtgcaccgccaaagatggtgctccctgcatcttcggtggtacggtgtaccgcagcggagagtccttccagagcagctgcaagtaccagtgcacgtgcctggacggggcggtgggctgca

SEQ ID NO: 227514 - DNA, 120 bp, Artificial Sequence
  ENSG00000118523_5 (sequence is synthesized)
tgcccctgtgcagcatggacgttcgtctgcccagccctgactgccccttcccgaggagggtcaagctgcccgggaaatgctgcgaggagtgggtgtgtgacgagcccaaggaccaaaccg

SEQ ID NO: 227515 - DNA, 120 bp, Artificial Sequence
  ENSG00000118523_6 (sequence is synthesized)
tggttgggcctgccctcgcggcttaccgactggaagacacgtttggcccagacccaactatgattagagccaactgcctggtccagaccacagagtggagcgcctgttccaagacctgtg

SEQ ID NO: 227516 - DNA, 120 bp, Artificial Sequence
  ENSG00000118523_7 (sequence is synthesized)
ggatgggcatctccacccgggttaccaatgacaacgcctcctgcaggctagagaagcagagccgcctgtgcatggtcaggccttgcgaagctgacctggaagagaacattaagaagggca

SEQ ID NO: 227517 - DNA, 120 bp, Artificial Sequence
  ENSG00000118523_8 (sequence is synthesized)
aaaagtgcatccgtactcccaaaatctccaagcctatcaagtttgagctttctggctgcaccagcatgaagacataccgagctaaattctgtggagtatgtaccgacggccgatgctgca

SEQ ID NO: 227518 - DNA, 120 bp, Artificial Sequence
  ENSG00000118523_9 (sequence is synthesized)
gaagaagaacatgatgttcatcaagacctgtgcctgccattacaactgtcccggagacaatgacatctttgaatcgctgtactacaggaagatgtacggagacatggcatgaagccagag

SEQ ID NO: 227519 - DNA, 120 bp, Artificial Sequence
  ENSG00000118523_10 (sequence is synthesized)
agtgagagacattaactcattagactggaacttgaactgattcacatctcatttttccgtaaaaatgatttcagtagcacaagttatttaaatctgtttttctaactgggggaaaagatt

SEQ ID NO: 227520 - DNA, 120 bp, Artificial Sequence
  ENSG00000118523_11 (sequence is synthesized)
cccacccaattcaaaacattgtgccatgtcaaacaaatagtctatcaaccccagacactggtttgaagaatgttaagacttgacagtggaactacattagtacacagcaccagaatgtat

SEQ ID NO: 227521 - DNA, 120 bp, Artificial Sequence
  ENSG00000118523_12 (sequence is synthesized)
attaaggtgtggctttaggagcagtgggagggtaccagcagaaaggttagtatcatcagatagcatcttatacgagtaatatgcctgctatttgaagtgtaattgagaaggaaaatttta

SEQ ID NO: 227522 - DNA, 120 bp, Artificial Sequence
  ENSG00000118523_13 (sequence is synthesized)
gcgtgctcactgacctgcctgtagccccagtgacagctaggatgtgcattctccagccatcaagagactgagtcaagttgttccttaagtcagaacagcagactcagctctgacattctg

SEQ ID NO: 227523 - DNA, 120 bp, Artificial Sequence
  ENSG00000118523_14 (sequence is synthesized)
attcgaatgacactgttcaggaatcggaatcctgtcgattagactggacagcttgtggcaagtgaatttgcctgtaacaagccagattttttaaaatttatattgtaaatattgtgtgtg

SEQ ID NO: 227524 - DNA, 120 bp, Artificial Sequence
  ENSG00000118523_15 (sequence is synthesized)
tgtgtgtgtgtgtatatatatatatatgtacagttatctaagttaatttaaagttgtttgtgcctttttatttttgtttttaatgctttgatatttcaatgttagcctcaatttctgaac

SEQ ID NO: 227525 - DNA, 120 bp, Artificial Sequence
  ENSG00000118523_16 (sequence is synthesized)
accataggtagaatgtaaagcttgtctgatcgttcaaagcatgaaatggatacttatatggaaattctgctcagatagaatgacagtccgtcaaaacagattgtttgcaaaggggaggca

SEQ ID NO: 227526 - DNA, 120 bp, Artificial Sequence
  ENSG00000118523_17 (sequence is synthesized)
tcagtgtccttggcaggctgatttctaggtaggaaatgtggtagcctcacttttaatgaacaaatggcctttattaaaaactgagtgactctatatagctgatcagttttttcacctgga

SEQ ID NO: 227527 - DNA, 120 bp, Artificial Sequence
  ENSG00000118523_18 (sequence is synthesized)
agcatttgtttctactttgatatgactgtttttcggacagtttatttgttgagagtgtgaccaaaagttacatgtttgcacctttctagttgaaaataaagtgtatattttttctataaa

SEQ ID NO: 227528 - DNA, 120 bp, Artificial Sequence
  ENSG00000118526_0 (sequence is synthesized)
gtctctctgtctctctctctctctctccctcgtccactcccccaaacatgtccaccggctccctcagcgatgtggaggaccttcaagaggtggagatgttggaatgtgacgggttgaaaa

SEQ ID NO: 227529 - DNA, 120 bp, Artificial Sequence
  ENSG00000118526_1 (sequence is synthesized)
tgtgacgggttgaaaatggattcgaacaaggaatttgtgacttccaacgagagcaccgaggagagctccaactgcgagaatgggtctccccagaagggccgcggcggcctgggcaagagg

SEQ ID NO: 227530 - DNA, 120 bp, Artificial Sequence
  ENSG00000118526_2 (sequence is synthesized)
aggaaggcgcccaccaagaagagccccctgagcggggtcagccaggaggggaagcaggtccagcgcaacgccgccaacgcgcgagagcgggcccgcatgcgagtgctgagcaaggccttc

SEQ ID NO: 227531 - DNA, 120 bp, Artificial Sequence
  ENSG00000118526_3 (sequence is synthesized)
tccagactcaagaccaccctgccctgggtgccccccgacaccaagctctccaagctggacacgctcaggctggcgtccagctacatcgcccacttgaggcagatcctggctaacgacaaa

SEQ ID NO: 227532 - DNA, 120 bp, Artificial Sequence
  ENSG00000118526_4 (sequence is synthesized)
tacgagaacgggtacattcacccggtcaacctgacgtggccctttatggtggccgggaaacccgagagtgacctgaaagaagtggtgaccgcgagccgcttatgtggaaccaccgcgtcc

SEQ ID NO: 227533 - DNA, 120 bp, Artificial Sequence
  ENSG00000118526_5 (sequence is synthesized)
tgaccttggagtttggtacctggagcgagagcttctccgcccttccaccaaccccacaggccgcttcgcgggtggagccctctgcctggccatggaggaaggatcccgctaggctggtcc

SEQ ID NO: 227534 - DNA, 120 bp, Artificial Sequence
  ENSG00000118526_6 (sequence is synthesized)
cgactggagaagctgctctgccaggtgtgctctctgtcagcaatagtgacctcattaccaaggggtggcgaccacattaccaagcgcaattccccattctccaagggctgagaacttcgg

SEQ ID NO: 227535 - DNA, 120 bp, Artificial Sequence
  ENSG00000118526_7 (sequence is synthesized)
tgacttcatccacctgtctatttgcacatggaggacttttcaagatgtcaggatacccttccatcaccccaccaccgccaccccaacttgactttcaagaacacatttcaagctctggcc

SEQ ID NO: 227536 - DNA, 120 bp, Artificial Sequence
  ENSG00000118526_8 (sequence is synthesized)
agagtcccgttcctcaaattcatgtgttctctcctttctaccagagggatagagcccatgcctcaacctatccagagttcaaatcaaagagtccccagtgtgattcaattgattgccttt

SEQ ID NO: 227537 - DNA, 120 bp, Artificial Sequence
  ENSG00000118526_9 (sequence is synthesized)
cacgtttcgcaaattttccaatctcccactcacgtttttacaaaacgaatgctctaaattctgaggattccaggcaggccatccatagagaaataactttttcttgctcattcccttaca

SEQ ID NO: 227538 - DNA, 120 bp, Artificial Sequence
  ENSG00000118526_10 (sequence is synthesized)
accccaatctatacatggatttttagaaagtcttcatggctatctatagttccctaccaataatttgaagcctttgctttaggcaggaggcatgtggctatgaatagggaacacgtagat

SEQ ID NO: 227539 - DNA, 120 bp, Artificial Sequence
  ENSG00000118526_11 (sequence is synthesized)
ttgaccctggttctgcatccaactagctgtttcttgaaagagcctggatcctcagttttcccatctctgcaagcagggataacggtaatgagaatgataataatcattatatgcagacct

SEQ ID NO: 227540 - DNA, 120 bp, Artificial Sequence
  ENSG00000118526_12 (sequence is synthesized)
tcttacagaggcttagtgaggctcagatgagattatatctgtaaaatcccttggtaaaggaaaagctccgtgaaaatgtcagttacttttactaagtggcgggtagtgaattatctgtgc

SEQ ID NO: 227541 - DNA, 120 bp, Artificial Sequence
  ENSG00000118526_13 (sequence is synthesized)
ctagacccaaactgaaagtgtctcaggcaggaagttccaagggatgtatgtttatagcatccaggcaatgatctttttttttccacgaactaaaatacctctttttggtatctattgact

SEQ ID NO: 227542 - DNA, 120 bp, Artificial Sequence
  ENSG00000118526_14 (sequence is synthesized)
ctttctctctctctttctgtctctctttcaccttgcacctctccctaatgctctctaaatttgtccagagctttctttttcctagaaatccagagagcaaagtcagagcctggcacctgc

SEQ ID NO: 227543 - DNA, 120 bp, Artificial Sequence
  ENSG00000118526_15 (sequence is synthesized)
agataggataacactggtgtctgatggtgaggctgcccagtcccatcaggagcctcagccaaggaggggcctgggcacactcaggtccccatggttgtccattgaatggagtgaggatca

SEQ ID NO: 227544 - DNA, 120 bp, Artificial Sequence
  ENSG00000118526_16 (sequence is synthesized)
aggtgggaatgactgggtggtggctgccactagcccaggaacatgacaacgtgaccacaccacacatgcctccaacacacacccacagtctaaacatctctccttctcagtgagcccttc

SEQ ID NO: 227545 - DNA, 120 bp, Artificial Sequence
  ENSG00000118526_17 (sequence is synthesized)
tcccattccagatcatcagcacacccacacccaccataggtctctctcctccggtcttcccagaagggtaaaactcccagcctaccctgctccagcttcagcccaggtagttggtgtgtc

SEQ ID NO: 227546 - DNA, 120 bp, Artificial Sequence
  ENSG00000118526_18 (sequence is synthesized)
tcaatatgaatagggggtgagtagcttcatagaaagaatggggaactcccttggcctcaagccagtatagtttggaagttgggggtcggggatgttaagggtggggagtatcctgcctgt

SEQ ID NO: 227547 - DNA, 120 bp, Artificial Sequence
  ENSG00000118526_19 (sequence is synthesized)
gacctctaggttatgaaaactatcttagaaggtgcttttagaaagaaccaggagaacaaccaaagcagcttacagacgcctgaacggagaatgaagtgtttcaagtaagcgagtctgcaa

SEQ ID NO: 227548 - DNA, 89 bp, Artificial Sequence
  ENSG00000118526_20 (sequence is synthesized)
tgaacggagaatgaagtgtttcaagtaagcgagtctgcaagttctcagaagcagacagatatccaatctggactgcagccagggaagtc

SEQ ID NO: 227549 - DNA, 120 bp, Artificial Sequence
  ENSG00000118526_21 (sequence is synthesized)
attctagcaggctttcccactgtcaaacagagacttcattctaaaaagagaagtgataaacagagctccagctctgctagctctatatatttactgattagtggaaagcactgaccaagg

SEQ ID NO: 227550 - DNA, 120 bp, Artificial Sequence
  ENSG00000118526_22 (sequence is synthesized)
agacttttaagccagtggttcttcagaatcacctagatgcctccaccctccagagatcctgagtccaggagtctgaagtggggccccaggtgatgtcattgctgctggtcccaggaccac

SEQ ID NO: 227551 - DNA, 120 bp, Artificial Sequence
  ENSG00000118526_23 (sequence is synthesized)
attttaacaatcaatgttttcaggtgtctcatgaggaacactacttaatgcagtgggaaagaaaatatttcagaggagaattttttcttaaagaagctgcatattctggactctaattta

SEQ ID NO: 227552 - DNA, 120 bp, Artificial Sequence
  ENSG00000118526_24 (sequence is synthesized)
gtttaattcactccaggatggcacgcaggattcctaattcttaaatgccattcagtctggacttcaaatcacttgtcttcagaaaataaaagatttgttccacccgggtgtgtggacatg

SEQ ID NO: 227553 - DNA, 120 bp, Artificial Sequence
  ENSG00000118526_25 (sequence is synthesized)
ccacgactctgggagtggggaaacagagagccggttcctctgctgcagaagtcctcggggttccttctcacaactctgcgaaggggaaagggttgtgagacccaaccagaccccaactcc

SEQ ID NO: 227554 - DNA, 120 bp, Artificial Sequence
  ENSG00000118526_26 (sequence is synthesized)
gagcgggccccgggaaggcgacccctgccctcagtgctctctgtctctgcttccccctcgcaatgctcctctctctgtcccaccccgcgagaacactttacaacgacgaggagattcgtt

SEQ ID NO: 227555 - DNA, 120 bp, Artificial Sequence
  ENSG00000118526_27 (sequence is synthesized)
tccaaaccagaggagatcaattgtacttacaaagattcccatctatttaactttattaacttctaccgtgaatgactctgcaagccttgctggtccaagtgcaatatgtaattataaata

SEQ ID NO: 227556 - DNA, 120 bp, Artificial Sequence
  ENSG00000118526_28 (sequence is synthesized)
tataaatagataagagcctatcaatgtatcttttgtacaatatgttgtaaaatgtagatcataggatagctgactttgacagtcacatttataaagtaattcacttaaagatatatattt

SEQ ID NO: 227557 - DNA, 120 bp, Artificial Sequence
  ENSG00000118526_29 (sequence is synthesized)
ttttcaaacaagttttgctacttttgaaaataaatctttctttatattgctaaaagctctgatatttggagtgatttttaaaaatatttggaataagaaagtgggaaactatggggaagc

SEQ ID NO: 227558 - DNA, 120 bp, Artificial Sequence
  ENSG00000118526_30 (sequence is synthesized)
ttgataatgaaaatggttcttttaaacctcaatctaaacttctagagatagaagaaaattgcatatgagtttcataatgaagatgcagattatgttttatactgaaaccttaaaaaagaa

SEQ ID NO: 227559 - DNA, 120 bp, Artificial Sequence
  ENSG00000118526_31 (sequence is synthesized)
atatatcggttacttttaaggctaatagaaattatataactgaaaacaaagaatgggcagtattaaagttatccacagttatacagttcaagagtaaaacgcaccagaaaaaggaaatcc

SEQ ID NO: 227560 - DNA, 120 bp, Artificial Sequence
  ENSG00000118526_32 (sequence is synthesized)
aattttcatggattccaccgtatgactgctgacacgggcgagaaagtaaactccaccttttgtcaccttccaggtgtgagcatagctgcaaactagtgaagaaataatagaagctatgaa

SEQ ID NO: 227561 - DNA, 120 bp, Artificial Sequence
  ENSG00000118526_33 (sequence is synthesized)
agatgtaaattccataacccttagggtgtgtttcaggattttcaaagctctgcagcatacattatctacatttcttattaatagtccattaattaattctaacaataaacccgcatgcct

SEQ ID NO: 227562 - DNA, 120 bp, Artificial Sequence
  ENSG00000118526_34 (sequence is synthesized)
gccttttggttgctgttagcgggtgcgtttagctcccgccacgacttccggcggactgggtttaatttaaacattttccaggctacggaacagctcctaagggaagattaagttgagata

SEQ ID NO: 227563 - DNA, 120 bp, Artificial Sequence
  ENSG00000118526_35 (sequence is synthesized)
aacagagaagcaaggccgaggagcctgcgacccggctccctcactgccccagcgcagcccgcggcggccgatgcgccagatgccaccggggctgtttaatgttcggggttatgaccgcag

SEQ ID NO: 227564 - DNA, 120 bp, Artificial Sequence
  ENSG00000118557_0 (sequence is synthesized)
aacattctttcttcctcttggcttatattagggataggggatgtggtttgttacaaaggatgagtattttgatagcttctcattccttgaactattctgcaggtttataacaaagctcag

SEQ ID NO: 227565 - DNA, 120 bp, Artificial Sequence
  ENSG00000118557_1 (sequence is synthesized)
aaaatactaaaggttaaaggagaattgagagctgccaaggaaatgaaagatgaggcgggggagagagacagagaagtgagcagcctgaacagcaagctgttaagcctgcaacttgacatc

SEQ ID NO: 227566 - DNA, 120 bp, Artificial Sequence
  ENSG00000118557_2 (sequence is synthesized)
aagaatctgcacgatgtctgcaagagacagaggaagaccttgcaggacaatcagctctgcatggaggaggcaatgaacagcagccacgacaagaagcaagcacaggcattagcattcgag

SEQ ID NO: 227567 - DNA, 120 bp, Artificial Sequence
  ENSG00000118557_3 (sequence is synthesized)
gagtcagaggtggaatttgggtccagtaaacagtgtcatctgagacaactccagcaactgaagaaaaaattgctggtccttcaacaagaactggagtttcacacagaggagttgcagact

SEQ ID NO: 227568 - DNA, 120 bp, Artificial Sequence
  ENSG00000118557_4 (sequence is synthesized)
tcttactattctctccgccagtatcagtccatcctagagaagcagacttccgacctggttcttctgcaccatcactgcaaactgaaagaagatgaggtgattctctatgaggaggaaatg

SEQ ID NO: 227569 - DNA, 120 bp, Artificial Sequence
  ENSG00000118557_5 (sequence is synthesized)
ggaaatcacaacgagaacacaggggagaagctccatttggcgcaggagcaactcgccttggccggggacaagatcgcctctctagagaggagcttaaacctctacagggataaataccag

SEQ ID NO: 227570 - DNA, 120 bp, Artificial Sequence
  ENSG00000118557_6 (sequence is synthesized)
tcttccctgagcaacatcgagttactagaatgccaagtgaagatgttgcagggggaactcggcgggatcatgggtcaggagcctgagaacaagggtgatcattcaaaggtacggatatac

SEQ ID NO: 227571 - DNA, 120 bp, Artificial Sequence
  ENSG00000118557_7 (sequence is synthesized)
acttctccttgcatgattcaagagcatcaggagactcagaaacgactgtctgaagtctggcaaaaggtctctcaacaggatgatctcattcaagaacttcgaaataagctggcctgcagt

SEQ ID NO: 227572 - DNA, 120 bp, Artificial Sequence
  ENSG00000118557_8 (sequence is synthesized)
aacgctttggttctggagcgtgaaaaggctttgataaaactacaagccgattttgcttcctgtacagccacccacagataccctcctagctcctcagaagagtgtgaagacatcaaaaag

SEQ ID NO: 227573 - DNA, 120 bp, Artificial Sequence
  ENSG00000118557_9 (sequence is synthesized)
atactgaagcacttgcaggagcagaaagacagccagtgcctgcatgtggaggagtaccagaacctggtgaaggatctgcgcgtggaactagaggccgtgtcggaacagaagagaaacatc

SEQ ID NO: 227574 - DNA, 120 bp, Artificial Sequence
  ENSG00000118557_10 (sequence is synthesized)
atgaaggacatgatgaagctggagctggacctgcacggactgcgggaggagacatctgcccacattgagaggaaggataaggacatcaccatcctgcagtgccggctgcaggagctgcag

SEQ ID NO: 227575 - DNA, 120 bp, Artificial Sequence
  ENSG00000118557_11 (sequence is synthesized)
ctggagttcaccgagacccaaaagctcactttgaagaaagacaagttcctccaagagaaagatgagatgctgcaagagctggagaagaaactgacacaggttcagaacagcctcctgaaa

SEQ ID NO: 227576 - DNA, 120 bp, Artificial Sequence
  ENSG00000118557_12 (sequence is synthesized)
aaggagaaggagctggagaagcagcagtgcatggccacagaacttgaaatgacagtcaaggaggctaagcaggacaagtccaaggaggcggagtgcaaggccctgcaggctgaggtccag

SEQ ID NO: 227577 - DNA, 120 bp, Artificial Sequence
  ENSG00000118557_13 (sequence is synthesized)
aagctgaagaacagtctcgaagaggccaagcagcaggagaggctggctgctcagcaagcagcccagtgcaaagaagaggctgcactggcaggctgtcacctggaggacacccagaggaaa

SEQ ID NO: 227578 - DNA, 120 bp, Artificial Sequence
  ENSG00000118557_14 (sequence is synthesized)
agatgctgcagaaggagtcctcgatggctgagaaggaacaaacctccaacagaaaacgggtggaggagctgtcattagaactctctgaagccctgaggaagcttgaaaattcagacaagg

SEQ ID NO: 227579 - DNA, 120 bp, Artificial Sequence
  ENSG00000118557_15 (sequence is synthesized)
aaaagaggcagcttcagaagacagtggctgagcaggatatgaaaatgaatgacatgcttgatcgtatcaagcaccagcacagggagcaaggctccatcaaatgcaagttagaagaagatc

SEQ ID NO: 227580 - DNA, 120 bp, Artificial Sequence
  ENSG00000118557_16 (sequence is synthesized)
ttcaggaggccacaaagcttctggaggacaaacgggagcagttgaagaagagcaaagagcatgagaagctgatggagggagaacttgaagctttgcggcaggaatttaaaaagaaagaca

SEQ ID NO: 227581 - DNA, 120 bp, Artificial Sequence
  ENSG00000118557_17 (sequence is synthesized)
agacgttgaaagagaattccagaaagttggaggaagaaaatgagaatctccgagcagagctacagtgttgttctacacaactggaatcctctctcaacaaatacaacaccagccagcaag

SEQ ID NO: 227582 - DNA, 120 bp, Artificial Sequence
  ENSG00000118557_18 (sequence is synthesized)
tcatccaagacttgaataaagagatagcccttcagaaggagtccttaatgagcctgcaggcccagctggacaaagctctgcagaaggagaagcactatctccagactaccatcaccaaag

SEQ ID NO: 227583 - DNA, 120 bp, Artificial Sequence
  ENSG00000118557_19 (sequence is synthesized)
aagcctatgatgcattatcccggaagtcagccgcctgccaggatgacctgacacaagccctcgagaagctcaatcacgtgacctcagagacaaagagcctgcagcaaagcttgacacaga

SEQ ID NO: 227584 - DNA, 120 bp, Artificial Sequence
  ENSG00000118557_20 (sequence is synthesized)
cccaagagaagaaagctcagctggaagaggaaatcattgcttatgaggaaaggatgaaaaagctcaatacggaattaagaaaactgcggggcttccaccaggagagtgagctggaggtgc

SEQ ID NO: 227585 - DNA, 120 bp, Artificial Sequence
  ENSG00000118557_21 (sequence is synthesized)
acgcctttgacaagaagctagaggagatgagctgccaggtgctgcagtggcagaagcaacaccagaatgacctcaagatgctggcagccaaagaggagcagctcagggagttccaggagg

SEQ ID NO: 227586 - DNA, 120 bp, Artificial Sequence
  ENSG00000118557_22 (sequence is synthesized)
agatggccgccttaaaagagaacctccttgaggacgataaggagccctgctgcctgccccagtggtctgtgcccaaagacacctgtaggctctaccgagggaatgatcagattatgacca

SEQ ID NO: 227587 - DNA, 120 bp, Artificial Sequence
  ENSG00000118557_23 (sequence is synthesized)
acttggagcaatgggcaaaacagcagaaggtcgccaatgagaaactaggaaaccagctccgagagcaggtgaaatacattgccaagctgagtggcgaaaaggaccacctccacagtgtaa

SEQ ID NO: 227588 - DNA, 120 bp, Artificial Sequence
  ENSG00000118557_24 (sequence is synthesized)
tggtccacttgcagcaggaaaacaagaagctgaagaaggagatagaagagaagaagatgaaagccgagaacacaaggctatgcaccaaagccctaggcccgagcagaacggagtccacac

SEQ ID NO: 227589 - DNA, 120 bp, Artificial Sequence
  ENSG00000118557_25 (sequence is synthesized)
agagggagaaagtgtgcggcaccttgggctggaaggggttgccccaggatatgggtcaaagaatggacctcaccaagtacatcgggatgccccactgcccgggttcctcatactgctaga

SEQ ID NO: 227590 - DNA, 120 bp, Artificial Sequence
  ENSG00000118557_26 (sequence is synthesized)
atccacatctagccctgagcagcatttccacgggtgtttcttcagaggacagtgagttcccagccctccctctctcttgacctggatcagctcttacaggagtatatcacggtcccagcc

SEQ ID NO: 227591 - DNA, 120 bp, Artificial Sequence
  ENSG00000118557_27 (sequence is synthesized)
tattttgcaagacactaacttttgttgagttttgtccacttcctgccatggagtgagctttagaaccatactaccatctccaggcccaaactctgaaataaagacatgagcatgagcaca

SEQ ID NO: 227592 - DNA, 120 bp, Artificial Sequence
  ENSG00000118557_28 (sequence is synthesized)
aaaatatcagatcatagtgatacaaggggagcagcgtctgctatggatctcagacaaacttctaagtcaaccatgaaaataaaaaccatcacacctgctctaaggacaagaagcaagcac

SEQ ID NO: 227593 - DNA, 120 bp, Artificial Sequence
  ENSG00000118557_29 (sequence is synthesized)
tttttttctttaaatcactggattgagaattcaagtaggaagaagaaaataggccttttgtggcctcaagtcattttcttagcgactttggaccaaagatcgttgttttcacatctgtaa

SEQ ID NO: 227594 - DNA, 120 bp, Artificial Sequence
  ENSG00000118557_30 (sequence is synthesized)
agggaggaggcaaattaagaccccttctgatctaagaacatctgaagcatacccaagtgcctcacatctcagacctgccccctcccctgacccagacccattttagggaacaggtagaag

SEQ ID NO: 227595 - DNA, 120 bp, Artificial Sequence
  ENSG00000118557_31 (sequence is synthesized)
aggcatcttccttctacgtctggaaaccccgtaagagcaccccagccacctacccagcctgggtccacagccgcctttcctgccacctgtaaactccatgttaccccagaggcaagaagt

SEQ ID NO: 227596 - DNA, 120 bp, Artificial Sequence
  ENSG00000118557_32 (sequence is synthesized)
caccctgcagcagagctgcctggccatgcggccagcccttgaggaatcacctcgttaatttctcctcgaatcaaaactctcatttcctccctgttccctcaggttcctcatactgctaga

SEQ ID NO: 227597 - DNA, 120 bp, Artificial Sequence
  ENSG00000118557_33 (sequence is synthesized)
gcaggaactgccctggggggccgtgatatgcacagatgaaagtcctcagatgaaagggctttgtccgcagcctcagggctcccgccagaaggctgaggacccaatacctgctgccatcct

SEQ ID NO: 227598 - DNA, 120 bp, Artificial Sequence
  ENSG00000118557_34 (sequence is synthesized)
ctctggggacagcctcagctcacagaccaaagcgggctggcgtgcggcgaggggtcatgggctccccttgctctttccggcctggagtgtagatcttcgtagacctggagacacagcagg

SEQ ID NO: 227599 - DNA, 120 bp, Artificial Sequence
  ENSG00000118557_35 (sequence is synthesized)
agagatcaggaaacaccgtgccctcacccacagccaggagggcaggaggatgcagagccccaggacttactgttcctaacccatggtggggagctctgggccgagggatctcctccccgg

SEQ ID NO: 227600 - DNA, 120 bp, Artificial Sequence
  ENSG00000118557_36 (sequence is synthesized)
cacattctcactcctctgccgtccccatgttcgactggcgatgtaatcaaggaagctcactcattccgatatgctttagatcggattttaacaactcctcccacagtccctaggggagct

SEQ ID NO: 227601 - DNA, 120 bp, Artificial Sequence
  ENSG00000118557_37 (sequence is synthesized)
tgaaacaggggttccaaaatgtagagtataagcaactagtggaggtgctagaaacggcacagctgtcaccaagagaagtcctactttgaaaagcagatggcaggagttttgaatacaaaa

SEQ ID NO: 227602 - DNA, 120 bp, Artificial Sequence
  ENSG00000118557_38 (sequence is synthesized)
agctagataagtctcagcacttcacatgtttcctaactttatgagcatcaacattatggcaagctgatgcttcaaaaacaccatatcatcagatatttcatatgaatagttacaaaatta

SEQ ID NO: 227603 - DNA, 120 bp, Artificial Sequence
  ENSG00000118557_39 (sequence is synthesized)
aatagaagttcaccagctgaggactacgaggatattgaggacaatgtggagcagagccccagctgactcataaaggacatgtagcatgagtaaaaaataaaccttcacggtcgtaagcca

SEQ ID NO: 227604 - DNA, 120 bp, Artificial Sequence
  ENSG00000118557_40 (sequence is synthesized)
cccattggcacctggttgctgagccagagaaatgtttcttccatatgtggaaggtctcatctcatatctggtggagccccaagctatttgggctttggcatcaagtcttccaatgttaca

SEQ ID NO: 227605 - DNA, 120 bp, Artificial Sequence
  ENSG00000118564_0 (sequence is synthesized)
gccccgcggcgagggtgtctatggagaggcggcggccgcggctgctgaggcggaggctgaggcagtggcgatggcgccctttcctgaagaagtggacgtcttcaccgccccacactggcg

SEQ ID NO: 227606 - DNA, 120 bp, Artificial Sequence
  ENSG00000118564_1 (sequence is synthesized)
gatgaagcagctggtggggctctactgcgacaagctttctaaaaccaatttttccaacaacaacgatttccgtgctcttctgcagtctttgtatgctactttcaaggagttcaaaatgca

SEQ ID NO: 227607 - DNA, 120 bp, Artificial Sequence
  ENSG00000118564_2 (sequence is synthesized)
tgagcagattgaaaatgaatacattattggtttgcttcaacaacgcagccagaccatttataatgtacattctgacaataaactctccgagatgcttagcctctttgaaaagggactgaa

SEQ ID NO: 227608 - DNA, 120 bp, Artificial Sequence
  ENSG00000118564_3 (sequence is synthesized)
gaatgttaagaatgaatatgaacagttaaattatgcaaaacaactgaaagagagattggaggcttttacaagagattttcttcctcacatgaaagaggaagaggaggtttttcagcccat

SEQ ID NO: 227609 - DNA, 120 bp, Artificial Sequence
  ENSG00000118564_4 (sequence is synthesized)
gttaatggaatattttacctatgaagagcttaaggatattaaaaagaaagtgattgcacaacactgctctcagaaggatactgcagaactccttagaggtcttagcctatggaatcatgc

SEQ ID NO: 227610 - DNA, 120 bp, Artificial Sequence
  ENSG00000118564_5 (sequence is synthesized)
tgaagagcgacagaagttttttaaatattccgtggatgaaaagtcagataaagaagcagaagtgtcagaacactccacaggtataacccatcttcctcctgaggtaatgctgtcaatttt

SEQ ID NO: 227611 - DNA, 120 bp, Artificial Sequence
  ENSG00000118564_6 (sequence is synthesized)
cagctatcttaatcctcaagagttatgtcgatgcagtcaagtaagcatgaaatggtctcagctgacaaaaacgggatcgctttggaaacatctttaccctgttcattgggccagaggtga

SEQ ID NO: 227612 - DNA, 120 bp, Artificial Sequence
  ENSG00000118564_7 (sequence is synthesized)
ctggtatagtggtcccgcaactgaacttgatactgaacctgatgatgaatgggtgaaaaataggaaagatgaaagtcgtgcttttcatgagtgggatgaagatgctgacattgatgaatc

SEQ ID NO: 227613 - DNA, 120 bp, Artificial Sequence
  ENSG00000118564_8 (sequence is synthesized)
tgaagagtctgcggaggaatcaattgctatcagcattgcacaaatggaaaaacgtttactccatggcttaattcataacgttctaccatatgttggtacttctgtaaaaaccttagtatt

SEQ ID NO: 227614 - DNA, 120 bp, Artificial Sequence
  ENSG00000118564_9 (sequence is synthesized)
agcatacagctctgcagtttccagcaaaatggttaggcagattttagagctttgtcctaacctggagcatctggatcttacccagactgacatttcagattctgcatttgacagttggtc

SEQ ID NO: 227615 - DNA, 120 bp, Artificial Sequence
  ENSG00000118564_10 (sequence is synthesized)
ttggcttggttgctgccagagtcttcggcatcttgatctgtctggttgtgagaaaatcacagatgtggccctagagaagatttccagagctcttggaattctgacatctcatcaaagtgg

SEQ ID NO: 227616 - DNA, 120 bp, Artificial Sequence
  ENSG00000118564_11 (sequence is synthesized)
ctttttgaaaacatctacaagcaaaattacttcaactgcgtggaaaaataaagacattaccatgcagtccaccaagcagtatgcctgtttgcacgatttaactaacaagggcattggaga

SEQ ID NO: 227617 - DNA, 120 bp, Artificial Sequence
  ENSG00000118564_12 (sequence is synthesized)
agaaatagataatgaacacccctggactaagcctgtttcttctgagaatttcacttctccttatgtgtggatgttagatgctgaagatttggctgatattgaagatactgtggaatggag

SEQ ID NO: 227618 - DNA, 120 bp, Artificial Sequence
  ENSG00000118564_13 (sequence is synthesized)
acatagaaatgttgaaagtctttgtgtaatggaaacagcatccaactttagttgttccacctctggttgttttagtaaggacattgttggactaaggactagtgtctgttggcagcagca

SEQ ID NO: 227619 - DNA, 120 bp, Artificial Sequence
  ENSG00000118564_14 (sequence is synthesized)
ctccagcctttgcgtattgtggtcactcattttgttgtacaggaacagctttaagaactatgtcatcactcccagaatcttctgcaatgtgtagaaaagcagcaaggactagattgccta

SEQ ID NO: 227620 - DNA, 120 bp, Artificial Sequence
  ENSG00000118564_15 (sequence is synthesized)
ggggaaaagacttaatttactttgggagtgaaaaatctgatcaagagactggacgtgtacttctgtttctcagtttatctggatgttatcagatcacagaccatggtctcagggttttga

SEQ ID NO: 227621 - DNA, 120 bp, Artificial Sequence
  ENSG00000118564_16 (sequence is synthesized)
ctctgggaggagggctgccttatttggagcaccttaatctctctggttgtcttactataactggtgcaggcctgcaggatttggtttcagcatgtccttctctgaatgatgaatactttt

SEQ ID NO: 227622 - DNA, 120 bp, Artificial Sequence
  ENSG00000118564_17 (sequence is synthesized)
actactgtgacaacattaacggtcctcatgctgataccgccagtggatgccagaatttgcagtgtggttttcgagcctgctgccgctctggcgaatgacccttgacttctgatctttgtc

SEQ ID NO: 227623 - DNA, 120 bp, Artificial Sequence
  ENSG00000118564_18 (sequence is synthesized)
tacttcatttagctgagcaggctttctttcatgcactttactcatagcacatttcttgtgttaaccatccctttttgagcgtgacttgttttggccccatttcttacaacttcagaaatc

SEQ ID NO: 227624 - DNA, 120 bp, Artificial Sequence
  ENSG00000118564_19 (sequence is synthesized)
ttaatttaccagtgaattgtaatgttgtttctcttgcaaattatacttttggtttagaaagggattaggtcttttcaaaagggtgagaacagtcttacatttttcttttaaatgaaatgc

SEQ ID NO: 227625 - DNA, 120 bp, Artificial Sequence
  ENSG00000118564_20 (sequence is synthesized)
tttaaagaatgttggtaatgccatgtcatttaaagtatttcatagataattttgagttttaaagtccatggaggtgattggttctctttacacattaacactgtaccaagctttgcagat

SEQ ID NO: 227626 - DNA, 120 bp, Artificial Sequence
  ENSG00000118564_21 (sequence is synthesized)
cttttccgacacacatgtctgaagacttattttcaaagacagcacatttttggaaactaatctcttttccgtaatatttcctttatttcaatgattctcagaaggccaattcaaacaaac

SEQ ID NO: 227627 - DNA, 120 bp, Artificial Sequence
  ENSG00000118564_22 (sequence is synthesized)
ccacatttaaggttctttaggattatagaataaattggcttctgagtgttagctcagtgagctaggaaagcaccaatcgatatttgtttcctttagggatactttgttctcaccactgtc

SEQ ID NO: 227628 - DNA, 120 bp, Artificial Sequence
  ENSG00000118564_23 (sequence is synthesized)
cctatgtcatcaaatttgggagagattttttaaaataccacaatcatttgaagaaatgtataaataaaatctactttgaggactttaccaagtaatactgttgtgttgtgatttttatta

SEQ ID NO: 227629 - DNA, 120 bp, Artificial Sequence
  ENSG00000118564_24 (sequence is synthesized)
taaatctcaatccaggtttactttagtatagaataggactacatactttgtctttggacctcccatgaacttattaccctgacaaatagttttagacagatactgaattttattgagctg

SEQ ID NO: 227630 - DNA, 120 bp, Artificial Sequence
  ENSG00000118564_25 (sequence is synthesized)
aattttctttttgaaatgagttattcagtagtcaaaatttgaatccgtaagtatatctactttgctttgttaaaacatcatgagagtggaggcctgccacccagaaaggcacatactagt

SEQ ID NO: 227631 - DNA, 120 bp, Artificial Sequence
  ENSG00000118564_26 (sequence is synthesized)
gccttttagtacaattttatgtcatgtagaagaaaatggcaatgttcctcctattgatacagatacaggcatatgtcatcttattgcgttttgctttattgcactttgcaaataatgcat

SEQ ID NO: 227632 - DNA, 120 bp, Artificial Sequence
  ENSG00000118564_27 (sequence is synthesized)
tttttacaaatggaaggtttatggcaactctgcgttgagccagtctattggtgccatgtttccaataaaacttctcctttcatgtctcgtatattgtgataattcttggagtatttcata

SEQ ID NO: 227633 - DNA, 120 bp, Artificial Sequence
  ENSG00000118564_28 (sequence is synthesized)
gtttttcactattattaaatctgttgtggtgatctgtggccagtgattgttgttactattgtaattgctttggaatgccatgaactgtgccctaataagacagagaacttaattgataaa

SEQ ID NO: 227634 - DNA, 120 bp, Artificial Sequence
  ENSG00000118564_29 (sequence is synthesized)
agtagccacctttccctcaggccatacacatggaaccattctttctccctacaagtcagcccataatagagcctctggttgaaaatcaagattttggtgttcacttggcaatatttacta

SEQ ID NO: 227635 - DNA, 120 bp, Artificial Sequence
  ENSG00000118564_30 (sequence is synthesized)
ttatttgaatgccagggcggtaacgactccctaggcgcctggggccctctgacaagaaaccctaggagacaccgcggagaactctgcctctgagctggtgggcgggccggatgtagccga

SEQ ID NO: 227636 - DNA, 120 bp, Artificial Sequence
  ENSG00000118564_31 (sequence is synthesized)
gcgcggacagggctagtccggacagagtcccagagccatgggagcgaaaagagactgctgcggattaaggaggcctttcggttggcgcagcagccacaccacaaccaggcgaagcaggta

SEQ ID NO: 227637 - DNA, 120 bp, Artificial Sequence
  ENSG00000118564_32 (sequence is synthesized)
acagtgcgataattttgaaggaattaatttaaaattttttttagcagttctaataatttttccatttagttttctagatttctaattcccagactatcttactttcagatttagttaaat

SEQ ID NO: 227638 - DNA, 120 bp, Artificial Sequence
  ENSG00000118564_33 (sequence is synthesized)
ttgataaaattttaaaattacattttcattaattaacatcttgaaaggtaagtttttcttgcagatgtatattctaaatatccattgtgtcagatttttgagggatgtaatagtgtaatc

SEQ ID NO: 227639 - DNA, 120 bp, Artificial Sequence
  ENSG00000118564_34 (sequence is synthesized)
taggtaaatgggtttttaaaatattttcatgtatttttctagatgaatattcatttacattaatgagcaaggccagagagagaaactctgagaggtcaatcaaaaagtagattttatagt

SEQ ID NO: 227640 - DNA, 120 bp, Artificial Sequence
  ENSG00000118564_35 (sequence is synthesized)
aaccaatctaagactgaccggcgtgagcagagaacagagtctccaggaggtctgtggccagggccaggcgatttatgggaaagaggcagacattttcctggctttctaaaaccaattttt

SEQ ID NO: 227641 - DNA, 120 bp, Artificial Sequence
  ENSG00000118564_36 (sequence is synthesized)
agttttttaaatattccgtggatgaaaagtcagataaagaagtgtcagaacactccacaggtataacccatcttcctcctgaggtaatgctgtcaattttcagctatcttaatcctcaag

SEQ ID NO: 227642 - DNA, 120 bp, Artificial Sequence
  ENSG00000118579_0 (sequence is synthesized)
gcgccattccaaacatggcggctccactagggggtatgttttctgggcagccacccggtccccctcaggccccgccgggccttccgggccaagcttcgcttcttcaggcagctccaggcg

SEQ ID NO: 227643 - DNA, 120 bp, Artificial Sequence
  ENSG00000118579_1 (sequence is synthesized)
ctcctagaccttccagcagtactttggtggacgagttggagtcatctttcgaggcttgctttgcatctctggtgagtcaggactatgtcaatggcaccgatcaggaagaaattcgaaccg

SEQ ID NO: 227644 - DNA, 120 bp, Artificial Sequence
  ENSG00000118579_2 (sequence is synthesized)
gtgttgatcagtgtatccagaagtttctggatattgcaagacagacagaatgttttttcttacaaaaaagattgcagttatctgtccagaaaccagagcaagttatcaaagaggatgtgt

SEQ ID NO: 227645 - DNA, 120 bp, Artificial Sequence
  ENSG00000118579_3 (sequence is synthesized)
cagaactaaggaatgaattacagcggaaagatgcactagtccagaagcacttgacaaagctgaggcattggcagcaggtgctggaggacatcaacgtgcagcacaaaaagcccgccgaca

SEQ ID NO: 227646 - DNA, 120 bp, Artificial Sequence
  ENSG00000118579_4 (sequence is synthesized)
tccctcagggctccttggcctacctggagcaggcatctgccaacatccctgcacctctgaagccaacgtgagcaaagggcagaggcagttggcctatgagtgggctgatgcgtgaggttg

SEQ ID NO: 227647 - DNA, 120 bp, Artificial Sequence
  ENSG00000118579_5 (sequence is synthesized)
gccacacattccttcctgtggacttgacattttggaagaactctttgccagataatgagttcattttagttttatgctcccattgaaaaattttccactatttttataagctgttaattt

SEQ ID NO: 227648 - DNA, 120 bp, Artificial Sequence
  ENSG00000118579_6 (sequence is synthesized)
cttgagtactttataacatgtctgtagcttggataaaccaagtaagtattttttttttgtctttagcaaagtttagactgtgaatatgatgacacagattcttttttatggtggctttgc

SEQ ID NO: 227649 - DNA, 120 bp, Artificial Sequence
  ENSG00000118579_7 (sequence is synthesized)
ttgttttaaatttttgcatgacttttcatctttttatgtgtgtttcctgtagtttgatccgaaggaaaagagtatagtagcctgagaatcaggagatgggagttttagtcgtaggcctta

SEQ ID NO: 227650 - DNA, 120 bp, Artificial Sequence
  ENSG00000118579_8 (sequence is synthesized)
tgataattaccccgcggtggtgtgtagaaaagtatgtaaatttgctctgttttaagactttgaactacctcaagaagaggaatctaatacaatatttgtaatgtttccagagctctcaga

SEQ ID NO: 227651 - DNA, 120 bp, Artificial Sequence
  ENSG00000118579_9 (sequence is synthesized)
atgaggatttttttgtaaataggtcagaagacgatggaactgtcctgggttagtatagtaatcttacagtaggatccttaggttgatgctgacttctgtttggggtatgtttatatttta

SEQ ID NO: 227652 - DNA, 120 bp, Artificial Sequence
  ENSG00000118579_10 (sequence is synthesized)
tgtggtgtttactttttttttttgacatagaaggatatagtgggagcagtgatacgctaacattcattacattctgcagtaatgaatctgtttaatgggtcagtcactgttttcagtagc

SEQ ID NO: 227653 - DNA, 120 bp, Artificial Sequence
  ENSG00000118579_11 (sequence is synthesized)
atgacagtggggtcataggtgagctgtgaggggctaaatcttgctctgattgtctctttctgttttgagttttgtttgcgtgtatcatttttgttctacattttgggaggggaaacattt

SEQ ID NO: 227654 - DNA, 120 bp, Artificial Sequence
  ENSG00000118579_12 (sequence is synthesized)
tccgttaaggaaggttgttgccagtggatttgactccaagggactagagtgtcgtggtgggggtggggaggggctgcagggtgatcattggctactgagcctccacagagagcatgtggt

SEQ ID NO: 227655 - DNA, 120 bp, Artificial Sequence
  ENSG00000118579_13 (sequence is synthesized)
gccctgcctttgggagggtattttgctctcgttagttttgtgggcagcctcagattccctgttgagttgctgttaagaaatggagatttctggctctcattgggtaaggttttctgagtt

SEQ ID NO: 227656 - DNA, 120 bp, Artificial Sequence
  ENSG00000118579_14 (sequence is synthesized)
ttatatcttattagatcacatccctttacccagaacaaatgcttcactgtcttctgattggcagtactcctgtggctttgtgccttgactcattttgttgtcttcagccttgaaggcccc

SEQ ID NO: 227657 - DNA, 120 bp, Artificial Sequence
  ENSG00000118579_15 (sequence is synthesized)
ttcccacatggactgacatccactcatgtgcctgatccctgaagcctcccagcacccattcagttgcatccccagggcacaggactttgatctcttctgttgccctcgctaggttctccc

SEQ ID NO: 227658 - DNA, 120 bp, Artificial Sequence
  ENSG00000118579_16 (sequence is synthesized)
tggtgggttagtgctttgtatctgtctctctgcccctcactaattctacacccatgagaattagacattattctccttaaatatataaggaccatataatctgtatctttttggtgtgtg

SEQ ID NO: 227659 - DNA, 120 bp, Artificial Sequence
  ENSG00000118579_17 (sequence is synthesized)
tatatggtatctggcacatggatctctgattaccagcctgacatcaacaaatcccctcagttacaacgtataggttaaacaaagcttttaaaagctcatgtggtatgacctcaaggttgc

SEQ ID NO: 227660 - DNA, 120 bp, Artificial Sequence
  ENSG00000118579_18 (sequence is synthesized)
taacctggtcactcatggtaattagaaactctgattggcagctttgtatttcttgactaaaaacctaaataaactgattaggttttaggcgttctttcaaagaggttcttgagaagattg

SEQ ID NO: 227661 - DNA, 120 bp, Artificial Sequence
  ENSG00000118579_19 (sequence is synthesized)
agaactatcctatttggtgcttagtgaaaagattttgaattactgtacgtaccagttgttgccatttctttattaaattcagaagtttttttgccaaataacaatttttcaatcttctct

SEQ ID NO: 227662 - DNA, 120 bp, Artificial Sequence
  ENSG00000118579_20 (sequence is synthesized)
gtttgtagacatcttactgggtgatgaataatcctctaagaaaccctctgagctgctaactttttcagggagaaaatcacaagccatcttctcaagttcccctagaaacctgtggaatgc

SEQ ID NO: 227663 - DNA, 120 bp, Artificial Sequence
  ENSG00000118579_21 (sequence is synthesized)
cctctgccaagcactgctctggtactggggagtggagtattatgtcttggaagagactcctgctgtgattgtccaggggtacgttctggtctggcttggtgcttgaccttaggtctgccc

SEQ ID NO: 227664 - DNA, 120 bp, Artificial Sequence
  ENSG00000118579_22 (sequence is synthesized)
acaggcttcaggctttcaactttgaaacaaacatctgtgccacacacattttgtaaatgatcccattcagtcttctagaagccttataacagaatcaatattgtttttcccattttcaca

SEQ ID NO: 227665 - DNA, 120 bp, Artificial Sequence
  ENSG00000118579_23 (sequence is synthesized)
ttttcccattttcacagatggataataaatctgtaaaatagggataagactaggacctattccccaggattacttctgcagattaaaggagatgttgaggccaggtgcagtggctcacgc

SEQ ID NO: 227666 - DNA, 81 bp, Artificial Sequence
  ENSG00000118579_24 (sequence is synthesized)
gcttgaacctgggaggcagaggttgtgatgagccaagatcgtgccattgcactccataaggagatgttgaatgggaagtca

SEQ ID NO: 227667 - DNA, 120 bp, Artificial Sequence
  ENSG00000118579_25 (sequence is synthesized)
aaggagatgttgaatgggaagtcagcaagggtgctagaatgtagcaagtattcttcaggtgttagtgatttctgttgttcgggaagaggagggttatggaggaagagtatgggatttagg

SEQ ID NO: 227668 - DNA, 120 bp, Artificial Sequence
  ENSG00000118579_26 (sequence is synthesized)
tgggttaagtgatttgcccaaagtcaagaggttagtctttaacctttggcagaagcaggatttgaagtgagttttcacacccctcttccctggtcagtgtgttgataacagcccacccac

SEQ ID NO: 227669 - DNA, 120 bp, Artificial Sequence
  ENSG00000118579_27 (sequence is synthesized)
ctgtggttccagggtgttcttaagaagccaaggttgtcttgggtgtggtagctctttgaaaggtagaaagttccaccaagaaggccttttttcttgaatactgcttagcttccttgtcag

SEQ ID NO: 227670 - DNA, 120 bp, Artificial Sequence
  ENSG00000118579_28 (sequence is synthesized)
cttgtcaggctccaagatgcagattgcctgtgggctatctctctccacagataaacctactcacatcttcaggacagccttttttttttgagacaggagtcttgctctgttgcccaggct

SEQ ID NO: 227671 - DNA, 120 bp, Artificial Sequence
  ENSG00000118579_29 (sequence is synthesized)
gtggcacaacggggtcccacaggcaagtgctggggaaaggcccacccagccatcaggtagcctgtgtgttctacaaacagcagctggcagcactgtctcctgccggacattcctgccacc

SEQ ID NO: 227672 - DNA, 120 bp, Artificial Sequence
  ENSG00000118579_30 (sequence is synthesized)
tgccggacattcctgccacccgacatcaaagctggtgggtgaccttttcagccatttgacattcctcccagaagaacctctgcctcccagaggtttaagcagttctcctgcctcagcctc

SEQ ID NO: 227673 - DNA, 68 bp, Artificial Sequence
  ENSG00000118579_31 (sequence is synthesized)
ctgcctcccgggttcaagtaattttcctacgtcagcctcccgagtagctgtcaggtgcacaccactac

SEQ ID NO: 227674 - DNA, 120 bp, Artificial Sequence
  ENSG00000118579_32 (sequence is synthesized)
acaggcatgagccaccgtgcccagcccatcttcatcttctttacttgaacttaattctttttcatgcatcttcccttctttcctcttttctcctccacccaaatgtcttaactgttaaca

SEQ ID NO: 227675 - DNA, 120 bp, Artificial Sequence
  ENSG00000118579_33 (sequence is synthesized)
cttttctcctccacccaaatgtcttaactgttaacattcccaggtgtttggtcctgggcctctggaggttgtgaaggagcactgctcagtcctcccttcaagaaagcagcttcaaggagt

SEQ ID NO: 227676 - DNA, 120 bp, Artificial Sequence
  ENSG00000118579_34 (sequence is synthesized)
tcaattacaaaagctcctggcattggggacctgccgccatgttcctgcccagggcatgctggtcctggctgtcaccaagcacagtggaggtcaggtgctaggccatttctgcccgacaca

SEQ ID NO: 227677 - DNA, 70 bp, Artificial Sequence
  ENSG00000118579_35 (sequence is synthesized)
acagtggaggtcaggtgctaggccatttctgcccgacacaggcctcctctaatgagcagtctgaggccag

SEQ ID NO: 227678 - DNA, 120 bp, Artificial Sequence
  ENSG00000118579_36 (sequence is synthesized)
gacagagtaagacttcgtctcaaaaaataaaaaataaaaaaatactgagcagtctgcttgggcgcttccatcagcctggccatgacatctttggagctgtcctgccctcttttgccccgg

SEQ ID NO: 227679 - DNA, 120 bp, Artificial Sequence
  ENSG00000118579_37 (sequence is synthesized)
tgttccttggcccacctgtcagacctacatcataggctcttcctgtcttctgtttcctctcccctttctctaacataggtgtttctcctgagaaagaaaaaaaccacctgtccctgacat

SEQ ID NO: 227680 - DNA, 120 bp, Artificial Sequence
  ENSG00000118579_38 (sequence is synthesized)
tcagaagctgacaacactgttcggtcatgccattctcctgttggacataaacagtctctgaatgccaaccccaaagttgctctcaggccatgataaaataaaccacttaataattttgtc

SEQ ID NO: 227681 - DNA, 120 bp, Artificial Sequence
  ENSG00000118579_39 (sequence is synthesized)
aataattttgtctaagcacgtacaaagaaaattcaaggtcagtttaccactcacaaaataccaaacatccttctgctggttaaaacgagtgacagctgccgtgtgtgtgtgtgtgtgtgt

SEQ ID NO: 227682 - DNA, 88 bp, Artificial Sequence
  ENSG00000118579_40 (sequence is synthesized)
gcaattatacctttatccctactctagtccaccttcctataaataagatgtattgagatgctcagtgcccccattctgacagcatcca

SEQ ID NO: 227683 - DNA, 120 bp, Artificial Sequence
  ENSG00000118579_41 (sequence is synthesized)
tgtattgagatgctcagtgcccccattctgacagcatccaatcgagtgaatcctcacttccttgaaatcacccaaccagggccagaatcctaaaagaggttctttgtgacaccctctgtc

SEQ ID NO: 227684 - DNA, 120 bp, Artificial Sequence
  ENSG00000118579_42 (sequence is synthesized)
tgagaagtcctatggttctctgtgatgaatagacccaacttgttcaaatacaggcatttctggtgggctttggctgaaggcattcacaccccccagtgaatgtcttgcacttctaattgt

SEQ ID NO: 227685 - DNA, 120 bp, Artificial Sequence
  ENSG00000118579_43 (sequence is synthesized)
gagagcaggcagtaggatgaggcttggggactggctcactcactgcccaactggtagcaaaacccatctggagcagcgtgtgaggtatggacactcactcacacgagggggtggcccagt

SEQ ID NO: 227686 - DNA, 120 bp, Artificial Sequence
  ENSG00000118579_44 (sequence is synthesized)
tgctgaggattccaccagtggtaccctgggaaaatatccctgtggaggggaatgggaggagtcaaactgtggaagataagaggagtactgcacacaaggacagtagagtgtctgttccct

SEQ ID NO: 227687 - DNA, 120 bp, Artificial Sequence
  ENSG00000118579_45 (sequence is synthesized)
cagtagagtgtctgttccctgcagagggatagtgaggaactgatgaggtgactgtgagtgcccggggcctctgtcgttatcttggaggatcactttgaggtcaggagttcatgaccagcc

SEQ ID NO: 227688 - DNA, 120 bp, Artificial Sequence
  ENSG00000118579_46 (sequence is synthesized)
gcaagactccgtctcaaaaacaaacacacagtactgcatcctgggggtggaggtgaggtgacggtagagatcagtgctacccttggaaatctgacagatacagtaagatggtccctatca

SEQ ID NO: 227689 - DNA, 120 bp, Artificial Sequence
  ENSG00000118579_47 (sequence is synthesized)
atctgacagatacagtaagatggtccctatcatagttccatttaatttgccagcctcatctgcagaatccagatggatcctggagaaaaattaaccaagtagcctcaatcacaaatgttg

SEQ ID NO: 227690 - DNA, 120 bp, Artificial Sequence
  ENSG00000118579_48 (sequence is synthesized)
ggttggatattacatcagtgttagagcagttaagggctcaggtatgtggtgtgcagccattgactgggtgaatccatttttacctaccccaattacaaaacagtttgctttcatgtggaa

SEQ ID NO: 227691 - DNA, 120 bp, Artificial Sequence
  ENSG00000118579_49 (sequence is synthesized)
cagatagtattcctttcagttttgctgcaggaacatattaactcttccacccctgtcataatacagcctgaagagatttaccattaaatactgtttttttctctctcttaacttaatccc

SEQ ID NO: 227692 - DNA, 120 bp, Artificial Sequence
  ENSG00000118579_50 (sequence is synthesized)
gaattggataatttctcttcatcttcactgtcacctctacgccatcactgtcatctctagaccgctctgctgttgagagattgatggaatcattatgcaaactaaaatagaatgttttat

SEQ ID NO: 227693 - DNA, 120 bp, Artificial Sequence
  ENSG00000118579_51 (sequence is synthesized)
ctatcaaattgtatttctttgtcaatagtgttagggcacagtaggttcatttactgctggtaagggtgtaaattgttagaaactttctgaatggcagtttggtaataacaaacaaaaagc

SEQ ID NO: 227694 - DNA, 120 bp, Artificial Sequence
  ENSG00000118579_52 (sequence is synthesized)
ttaagtttgtgtccttaaatgccttacttcaatacccaaggcatatggcctcaataaaaaattatggaagcatgcaaagattttgttaacaaagatataatcattgcagggtagaattta

SEQ ID NO: 227695 - DNA, 120 bp, Artificial Sequence
  ENSG00000118579_53 (sequence is synthesized)
gaaatttaagactgaaagatcttttcagtcacctgcagcaagaaaggagtcaaaacctatgtacgatctcaactagtaaaattttctccttgcccagggatcatgctgagtttaaggaca

SEQ ID NO: 227696 - DNA, 120 bp, Artificial Sequence
  ENSG00000118579_54 (sequence is synthesized)
gaaatgcaaagtgcagcctgggaaagtgtttcaacacacaaaaatagaaccacctgtatgtagtctttttgaaagcacaaaataaagagcagtcctacagggttcactgctatgtcctga

SEQ ID NO: 227697 - DNA, 120 bp, Artificial Sequence
  ENSG00000118579_55 (sequence is synthesized)
atgttgatgtcccttccaaaattcatatgttggaacctaatgtcaatgtaatagtattaagaggtggggcttttgggaagcaatggagtcatgagggcttcaccctcatgagtaggataa

SEQ ID NO: 227698 - DNA, 120 bp, Artificial Sequence
  ENSG00000118579_56 (sequence is synthesized)
gtacccttacaaaagaggctcagggaggcgctcttgcctcttccaccatgtaaggacacgtagcaggcacccatttctgaagaatgggccctccccagactccatatctgctggtgcctt

SEQ ID NO: 227699 - DNA, 120 bp, Artificial Sequence
  ENSG00000118579_57 (sequence is synthesized)
gatcttggacttagcctctaggactgtgagtgacatatttctattgtttataaattatccagtataagtaagatattttgttagagcagcctgaacgaactaagacactctaagcgggaa

SEQ ID NO: 227700 - DNA, 120 bp, Artificial Sequence
  ENSG00000118579_58 (sequence is synthesized)
actcacaaaaaatatttggtagtgaaaaacagtatggtgtgttaatgtatggtgacaagtgtttgtttgcatttaaaaatgcattggagcctcgttttgattaggcagtaaatttacctt

SEQ ID NO: 227701 - DNA, 120 bp, Artificial Sequence
  ENSG00000118579_59 (sequence is synthesized)
taatacgtaagtttgacagttatatgtaatcagcttttttttttttaagatggtgtgattgaggttaatgtgaactgaactttctatttctaagctgtcttcatctaattttacctttct

SEQ ID NO: 227702 - DNA, 120 bp, Artificial Sequence
  ENSG00000118579_60 (sequence is synthesized)
gtggaaaatcaatacaagtcaaccatttttattgcccagttattcaaagttttattcaaagagcaaagatttgacaatgcatagaattaacattggtttgtgggccaccttctgggccag

SEQ ID NO: 227703 - DNA, 120 bp, Artificial Sequence
  ENSG00000118579_61 (sequence is synthesized)
caccaaagactgaaaaaatattttgccccctaaaagttgttattgagtcttgtcaaatcacattgctctgtcagaaggtaagacaaatcagtgtggactgagagcaaggtcagcaccgtg

SEQ ID NO: 227704 - DNA, 120 bp, Artificial Sequence
  ENSG00000118579_62 (sequence is synthesized)
aacagccattgcggttcctttaacccactgggaattcatgcagtgaagaagcaacacaccatgaggcaaatggctcaaacccaaagaccagaggttcaggggatatatatatatattttt

SEQ ID NO: 227705 - DNA, 120 bp, Artificial Sequence
  ENSG00000118579_63 (sequence is synthesized)
cccaggctggtctcgaactcttgggctcatgctgtcctacctcagacttccaagtagctgggttttctttgggctaattatttttttgtagagatggaggtctcgctgtgttgcccaggc

SEQ ID NO: 227706 - DNA, 72 bp, Artificial Sequence
  ENSG00000118579_64 (sequence is synthesized)
tccaagtagctgggttttctttgggctaattatttttttgtagagatggactcctcccatctcagcctccca

SEQ ID NO: 227707 - DNA, 120 bp, Artificial Sequence
  ENSG00000118579_65 (sequence is synthesized)
gaagatctttgacttcaaagaacagataatctagagaccttcacaagtgatcatgttggcactatggtcattacactgagacctataactgggctaggattggttatttacagaaaaacc

SEQ ID NO: 227708 - DNA, 120 bp, Artificial Sequence
  ENSG00000118579_66 (sequence is synthesized)
ttgtggtacttaattccaattcatgttaatttatgttatcttgcttaatccttgcaaagcccttttagaggtgggtgttatcccatctataatctgctgcttgtcttagaccaaggaagt

SEQ ID NO: 227709 - DNA, 120 bp, Artificial Sequence
  ENSG00000118579_67 (sequence is synthesized)
gaaagtattcagtccaagcatgctaccatccatttctggtaggtttggtttgtttttagttggctttcctgtttaactgttatttgtcttcctattgaggttagatgtgcattttggaat

SEQ ID NO: 227710 - DNA, 120 bp, Artificial Sequence
  ENSG00000118579_68 (sequence is synthesized)
tgcatcattttacatagaaacagctttccagtggagttgactagcatcctaaggacaagtacaaccacttttgaaatagatcatggaaatcacaaagtctgatgttccacaaaatggagt

SEQ ID NO: 227711 - DNA, 120 bp, Artificial Sequence
  ENSG00000118579_69 (sequence is synthesized)
atgatgttatggacactagaaatacaaggtatgggtcattagtaacgctaataacattttcctatagatgacttttaataacactggtttaatgtcaatttttttttttttttttttttt

SEQ ID NO: 227712 - DNA, 78 bp, Artificial Sequence
  ENSG00000118579_70 (sequence is synthesized)
agggtctccctctgtcacccaggctggttggaatgcaggagttcgactcccgcctcagtcccccaagtacctgggacc

SEQ ID NO: 227713 - DNA, 79 bp, Artificial Sequence
  ENSG00000118579_71 (sequence is synthesized)
aacctctgcctcctaggttcaagtgatcctcccgcctcagtcccccaagtacctgggacctgtagagatggggtttcac

SEQ ID NO: 227714 - DNA, 120 bp, Artificial Sequence
  ENSG00000118579_72 (sequence is synthesized)
caaagtgatgggattacaggcgtgagctgctgtgcctggcagaacagtatgaagtgttaacgccaaaatttgttttagctatcatatataaatcataagcatattatttggttggttggt

SEQ ID NO: 227715 - DNA, 120 bp, Artificial Sequence
  ENSG00000118579_73 (sequence is synthesized)
tcataagcatattatttggttggttggtgttagttcattccttcaatcggatgatttaaaataaatgtttttcaagtatcctctgtgatgtatcccaaaggttagcttagaaagaaaagt

SEQ ID NO: 227716 - DNA, 120 bp, Artificial Sequence
  ENSG00000118579_74 (sequence is synthesized)
acttggtgaaccattcctggtgcggagagccctgtttctgctggacttctttggcttgggccgtttcaccatctggggtcctaaaagcaaaaaaaggtttttttatatggttttgaaaac

SEQ ID NO: 227717 - DNA, 120 bp, Artificial Sequence
  ENSG00000118579_75 (sequence is synthesized)
tatgcaagaagcagcttaatacccaccatcttttcagggaaagataactgcttgtttactcttcaaaaacacccaaatgggactggccaacattagtagtgggaaacaaattgtaaagga

SEQ ID NO: 227718 - DNA, 120 bp, Artificial Sequence
  ENSG00000118579_76 (sequence is synthesized)
tggggctggggagggagtacctaatcctcatttggaaaacagaaggttcaccattgtttggttctccattgttcctttgagacttagtggttgtagctctaataatgcaggattaaccaa

SEQ ID NO: 227719 - DNA, 75 bp, Artificial Sequence
  ENSG00000118579_77 (sequence is synthesized)
gacttagtggttgtagctctaataatgcaggattaaccaaacctacagatcaagagactttgtttttattttttg

SEQ ID NO: 227720 - DNA, 77 bp, Artificial Sequence
  ENSG00000118579_78 (sequence is synthesized)
atctcggctcactgcaacctccagcctcctgcgttcaagcgatcattgtgcctcagcctcccggggagctggaatta

SEQ ID NO: 227721 - DNA, 69 bp, Artificial Sequence
  ENSG00000118579_79 (sequence is synthesized)
ccgattaagagactttagaattccaaggtgatagagtaaatcttgaggaataatgttagtaataatact

SEQ ID NO: 227722 - DNA, 120 bp, Artificial Sequence
  ENSG00000118579_80 (sequence is synthesized)
aggaataatgttagtaataatactgaaactatattgaagatttttgtgccaagtcctgtgctaagcacatcctatggattaattcctttagtctcacgtcagtctgatgagataggtgct

SEQ ID NO: 227723 - DNA, 120 bp, Artificial Sequence
  ENSG00000118579_81 (sequence is synthesized)
gtattatcttaattttaaaggcaaggtatatggagacctggagaggtcaagtgacctgtccaaggccacagagctaagaatgaggaagactgtaatttgaattcagacctccaggccaga

SEQ ID NO: 227724 - DNA, 120 bp, Artificial Sequence
  ENSG00000118579_82 (sequence is synthesized)
tggagtccaccttttgtataacccatgctgaagttttcaggtaagtgattcagtgtcccttgtctaatcatccatgaaaaaaggccttctggaatttggtaccaggtgctagaaagaatc

SEQ ID NO: 227725 - DNA, 120 bp, Artificial Sequence
  ENSG00000118579_83 (sequence is synthesized)
ctacttcccctcttatctacagggaaatagaataagggcccctgtccccaacatcccccaaaccttgtggcagtttttgcatctgtagactggttgggtttgtaggtccggccacagctg

SEQ ID NO: 227726 - DNA, 120 bp, Artificial Sequence
  ENSG00000118579_84 (sequence is synthesized)
gggcttgggtccaagctgggtgatgtagttattggaggggcattaatcctggaactcagatcgccactcagaaagttctttgcataggaggcgaggttcggcacgctgaccacgcggctg

SEQ ID NO: 227727 - DNA, 120 bp, Artificial Sequence
  ENSG00000118579_85 (sequence is synthesized)
ggcacgtcctccaccttctttttctgtttgtattaatggacaggttagtgcaatgcaatgcaaaaaacaaaataaagcattattgtaaaagcaaataatgctcacccaatcaaaattgta

SEQ ID NO: 227728 - DNA, 120 bp, Artificial Sequence
  ENSG00000118579_86 (sequence is synthesized)
tcggagaagaagcaacaatttcatttatacacttacatgctattttttaaagcacttttccctccaatcttcattttgtattataaataaatatgtatgttcacaacctcttaaccaaaa

SEQ ID NO: 227729 - DNA, 120 bp, Artificial Sequence
  ENSG00000118596_0 (sequence is synthesized)
gtatgttcaggattctaaaaagagcaatggttcacaaggaaacttctgcctcaggtggggagaggagtccatagatcagggaaacttatgtcttggtgaaatggaagaccatgtttctaa

SEQ ID NO: 227730 - DNA, 120 bp, Artificial Sequence
  ENSG00000118596_1 (sequence is synthesized)
acacctgtcgccaggttacttgaatttccactagaggagcagaaatgccaccaatgccaagtgccccacctgtgcatccacctccagatggaggatggggttggattgtggttggagcag

SEQ ID NO: 227731 - DNA, 120 bp, Artificial Sequence
  ENSG00000118596_2 (sequence is synthesized)
cttttatctccattggattttcctatgcattccccaaagctgtcaccgtattcttcaaagaaattcagcaaatattccacactacctacagtgaaatagcatggatttcatccattatgc

SEQ ID NO: 227732 - DNA, 120 bp, Artificial Sequence
  ENSG00000118596_3 (sequence is synthesized)
tggctgttatgtacgcaggaggtcctgtaagtagtgttttggtgaataaatacggcagccggccggtggtgatagcaggaggcttattatgctgtcttggaatggtgttggcctccttta

SEQ ID NO: 227733 - DNA, 120 bp, Artificial Sequence
  ENSG00000118596_4 (sequence is synthesized)
gtagcagcgtggtacagctgtacctcactatgggattcattacaggtttaggtttagccttcaacctgcaacccgccttaaccataattggcaaatacttctataggaagcgacccatgg

SEQ ID NO: 227734 - DNA, 120 bp, Artificial Sequence
  ENSG00000118596_5 (sequence is synthesized)
caaatggattggccatggcaggaagtcctgttttcttaagttcattggctcctttcaatcagtacctttttaatacttttggctggaaaggaagcttcctgattttgggaagtctacttt

SEQ ID NO: 227735 - DNA, 120 bp, Artificial Sequence
  ENSG00000118596_6 (sequence is synthesized)
tgaatgcctgtgtggctggttccctcatgagaccccttggacccaatcaaaccacttctaagtctaaaaataagactggcaaaacagaagatgattcaagcccaaagaaaatcaaaacga

SEQ ID NO: 227736 - DNA, 120 bp, Artificial Sequence
  ENSG00000118596_7 (sequence is synthesized)
agaaatcaacttgggaaaaagttaataagtatttagatttctccctttttaagcatagaggatttctgatatatctgtctggaaatgtcattatgttcctaggtttttttgcccccatta

SEQ ID NO: 227737 - DNA, 120 bp, Artificial Sequence
  ENSG00000118596_8 (sequence is synthesized)
tattcttggctccatatgctaaagaccaaggaattgatgagtactcggcagcttttctgctatctgttatggctttcgttgatatgtttgctaggccttctgtaggattaattgcaaact

SEQ ID NO: 227738 - DNA, 120 bp, Artificial Sequence
  ENSG00000118596_9 (sequence is synthesized)
ccaaatatattcgacctcgaattcagtacttcttcagttttgcaatcatgttcaatggagtgtgtcacctcttgtgcccactggcacaggactacacaagcctggtattatatgctgtat

SEQ ID NO: 227739 - DNA, 120 bp, Artificial Sequence
  ENSG00000118596_10 (sequence is synthesized)
tttttggccttggatttgggagtgttagcagtgttctctttgaaactctcatggacctcgtgggtgcaccaagattttccagtgccgtcggacttgtcacaattgtggagtgtggcccag

SEQ ID NO: 227740 - DNA, 120 bp, Artificial Sequence
  ENSG00000118596_11 (sequence is synthesized)
ttcttcttggccctcctcttgcaggtaaattggtggatttaactggagaatataaatacatgtacatgtcctgtggggctattgtggtagcagcaagcgtgtggctgctcattggcaatg

SEQ ID NO: 227741 - DNA, 120 bp, Artificial Sequence
  ENSG00000118596_12 (sequence is synthesized)
ctatcaactatagattgcttgcaaaggaaaggaaggaggaaaatgcaaggcagaagaccagagaatctgaacccttgagcaaatctaaacattcggaagatgttaacgtcaaagtttcaa

SEQ ID NO: 227742 - DNA, 120 bp, Artificial Sequence
  ENSG00000118596_13 (sequence is synthesized)
atgcacagagtgtaacctcagaaagagaaactaacatttaacaagaatcacatctctgatttcagtgtttatgactttatctaggagtttgtttttcattttgtttttttaaagtattag

SEQ ID NO: 227743 - DNA, 120 bp, Artificial Sequence
  ENSG00000118596_14 (sequence is synthesized)
aaaaggttttagctgaaatgaggagtcacaattaaggatggaggtgatattttcctcaatggcaaattttaaattagtttttaaaaacttacttatttgggtagttaaattttgagatta

SEQ ID NO: 227744 - DNA, 120 bp, Artificial Sequence
  ENSG00000118596_15 (sequence is synthesized)
tgcatagaaagaatccatgctataggtttatttccatacctgactctgggtgtggtggttaaaatactaattttaaagtcttccagtgactttcggtcttggttatatggagaattctga

SEQ ID NO: 227745 - DNA, 120 bp, Artificial Sequence
  ENSG00000118596_16 (sequence is synthesized)
atcccaaacccctggtttaagtaggtagaaggaggatgcctaatcctacaaagtgaccctttatacatttcattttttatttgatattaaagtatgagatagagttgagagacaattaat

SEQ ID NO: 227746 - DNA, 120 bp, Artificial Sequence
  ENSG00000118596_17 (sequence is synthesized)
tatcccctcttacacacaaacacacatactcccacatacttacccacatgtacacagagtatctggagaataaaacccaaattcaaaaaaaaaaatgataatttatttttaaggtaaaaa

SEQ ID NO: 227747 - DNA, 120 bp, Artificial Sequence
  ENSG00000118596_18 (sequence is synthesized)
taatccatgaagataaaagaaacatatgtctgcgtgctactttacaatgttggttttaaagataagcacatgggtaaaaatgagggtgatccttattcaaaaataacatctgactactat

SEQ ID NO: 227748 - DNA, 120 bp, Artificial Sequence
  ENSG00000118596_19 (sequence is synthesized)
aaaaatatttgcatatataagtttgacaaagaaaagaaaatcaatgttaaaccattaaatctgagcactgttagacttgattaatccatgcacatgattttttttgagtagggagcatta

SEQ ID NO: 227749 - DNA, 120 bp, Artificial Sequence
  ENSG00000118596_20 (sequence is synthesized)
gtacctggtgctagagaatagaaccctcaaataatttttagaattcttacctaatatgtaaaagtctgcatgactcttaacaatgagtcacatccattgattttacagggattttagttc

SEQ ID NO: 227750 - DNA, 120 bp, Artificial Sequence
  ENSG00000118596_21 (sequence is synthesized)
gtaatccagaaagtaataatcagggattttattttaatcaggcatcaatccagattcactgttatactgaaatatcaaagtaaaatcctagttggcaggattgtaagtagaccgaattct

SEQ ID NO: 227751 - DNA, 120 bp, Artificial Sequence
  ENSG00000118596_22 (sequence is synthesized)
aatttttcccaacacatagtggtaattggaggttactgttatgaatactccatctgactacgactaagagagtgaggggtggttttaatgaaccctctaagctctctcagttccttccct

SEQ ID NO: 227752 - DNA, 120 bp, Artificial Sequence
  ENSG00000118596_23 (sequence is synthesized)
tccacaaaatgcaagagcaaaagcaaactacaaacaggccttgtgctcaaccactggaaatgcctcctgggataagaatggcagcacttgaaaattctgccctctactgatgagacttcc

SEQ ID NO: 227753 - DNA, 120 bp, Artificial Sequence
  ENSG00000118596_24 (sequence is synthesized)
tgctgcctttggacataactaagccaggaaactttaaaagccttctagaaatagaggcactgtatgacttgcaatcgtaggtatagtttataacctgatagcaaaaaacttgaaatattg

SEQ ID NO: 227754 - DNA, 120 bp, Artificial Sequence
  ENSG00000118596_25 (sequence is synthesized)
cagcccagtttaattcagcactttcccattttcataactatgtgaaaacatctgggaatttgaatcactcctgaatacagaggcatattctttttaaactataaataccattttgagtga

SEQ ID NO: 227755 - DNA, 120 bp, Artificial Sequence
  ENSG00000118596_26 (sequence is synthesized)
aattgtacattatgactaaagttataaatacaatatttatatctataaatctgaagtttaacatgattaatttaaaaagtatttagtgcttgacaaagtagtgtcactcttaagatgtca

SEQ ID NO: 227756 - DNA, 120 bp, Artificial Sequence
  ENSG00000118596_27 (sequence is synthesized)
agtagtgtcactcttaagatgtcaaagggaattagccattttttttattgtaataaaggcaggtgctatttttttctggtgagattgcacctggataccaggcttttgtaatagttaaca

SEQ ID NO: 227757 - DNA, 120 bp, Artificial Sequence
  ENSG00000118596_28 (sequence is synthesized)
ttaaacatttgattcataaagttaattcactgcttaagcatgtggctcatatttaggaagctatataaaattcagtttttcatttaacatttgctcttttgcatatgaagagatatttgt

SEQ ID NO: 227758 - DNA, 120 bp, Artificial Sequence
  ENSG00000118596_29 (sequence is synthesized)
atttttcaaatgttaagtaaaacaagatgtgccaatatcataggtaaataaattagggaaaatgtgggactttatggctgtttttaatttagtttcacccgatcttgattcttgaattag

SEQ ID NO: 227759 - DNA, 120 bp, Artificial Sequence
  ENSG00000118596_30 (sequence is synthesized)
ctatgtttatatttttagttcttttttattcaactcagatttgtcaagaaatgtaacctctaaattgtgtagtacctctccaatcataaattttcaaaaaaaaattctactttccaaaaa

SEQ ID NO: 227760 - DNA, 120 bp, Artificial Sequence
  ENSG00000118596_31 (sequence is synthesized)
gtgtcttgaattctctgaaaaggcacattaaactaatatgaacatcagataccagggggaaataaatggcaaagtaataatcatgaggttttaggtcaaagactacattatatatatttt

SEQ ID NO: 227761 - DNA, 120 bp, Artificial Sequence
  ENSG00000118596_32 (sequence is synthesized)
ttattaccttctagtagagacatcctcctgggtgcatttcagtggccttctccagggaggaggtttatttacttactgatgagtttctcgtcacgtcaaaaccagttcacatttgtctgg

SEQ ID NO: 227762 - DNA, 120 bp, Artificial Sequence
  ENSG00000118596_33 (sequence is synthesized)
ctgctctttggttgtcttcattcgttatttatttctaacactgtattaaattgttagaaaagaaagtaaaacttgcacattcaaagcacatgatttgtacagtcacacctggcagtagca

SEQ ID NO: 227763 - DNA, 120 bp, Artificial Sequence
  ENSG00000118596_34 (sequence is synthesized)
ctgcacagttacaaatatgcacacacgttaactgctatgcataaatattgacagttaaaccagaacacaattgaaacagtgacataaatacctacaggattcagaattgttccagggtaa

SEQ ID NO: 227764 - DNA, 120 bp, Artificial Sequence
  ENSG00000118596_35 (sequence is synthesized)
tataaattattctacttgttcactctccccaccctcttgaacttgttagaagatttgctgctttagcagaatctttccaagattgagaaaagtgtatcaacctaggattttcattactat

SEQ ID NO: 227765 - DNA, 120 bp, Artificial Sequence
  ENSG00000118596_36 (sequence is synthesized)
atagtcacataaatggaggaggagatatatttggcttctgcctctgcaacaattagtatgaacatatttctttctctagggaataataggttttaaacatttgagatatcatgaagcaaa

SEQ ID NO: 227766 - DNA, 120 bp, Artificial Sequence
  ENSG00000118596_37 (sequence is synthesized)
gtcagggtataccactacaatccccactaatctctattcccacattatgaaattgtacagaagaaagggtgtcattaaatcaaggtatccagataattcatggctactttaactattttt

SEQ ID NO: 227767 - DNA, 120 bp, Artificial Sequence
  ENSG00000118596_38 (sequence is synthesized)
tcattcgtgttaactgagccccccatattttttactacttaaccttaaatatgccatcactaatttatgaatagaacattgtgtttgcacttttcctgacctatcctcaccccctttcct

SEQ ID NO: 227768 - DNA, 120 bp, Artificial Sequence
  ENSG00000118596_39 (sequence is synthesized)
gatcctttttgcattcacctagcacaccttaagagacaaaaaatcaggttttagtgtatttcacattggaagacatgatgttttctcagtataaatctacaggactcataaacaatcact

SEQ ID NO: 227769 - DNA, 120 bp, Artificial Sequence
  ENSG00000118596_40 (sequence is synthesized)
tttttggtgccaagtttcaaccctttagctcatggactcattggcctcagcctaatactaagaaacaagtaaaataattagattttctatgtttgaatgtgcactttaaaaaatctagat

SEQ ID NO: 227770 - DNA, 120 bp, Artificial Sequence
  ENSG00000118596_41 (sequence is synthesized)
aatttatactcattcttttctggctgtacaacatgacaatcaagaatatagaaaagaagactaaaagatatatgatataaatgtaagtttttatgtagatgacataaatatgaagagata

SEQ ID NO: 227771 - DNA, 120 bp, Artificial Sequence
  ENSG00000118596_42 (sequence is synthesized)
ttcttggtcagttggttgaaacattttttatctaaaacacctttaaaaaatccctttcatatgtagaatgtggaaggcttttaataaaacaaaaattattatttttaggcttaatttaat

SEQ ID NO: 227772 - DNA, 120 bp, Artificial Sequence
  ENSG00000118596_43 (sequence is synthesized)
agggagattggatgcatagtggaaagggaactaatatttatatgttatgcattttgcttatgtaatgcctttcaatatgaaaaccaaaaccatggcagaattattactagcttgatatga

SEQ ID NO: 227773 - DNA, 120 bp, Artificial Sequence
  ENSG00000118596_44 (sequence is synthesized)
cagatgagtgaaaacaaaaaacaagctcagcagactacccaaagttaaaaggtagtatgaaccaaaattaaaactcaggtttacgtaaccagaaagatccccgaggtgttcactaccgtg

SEQ ID NO: 227774 - DNA, 120 bp, Artificial Sequence
  ENSG00000118596_45 (sequence is synthesized)
ctgcctcccaatagaggccagagaagcaaaggaagataaaatataggtacaaaaaagatacatcctatatagtaaaacaattaggtttaactgtaacttgtattatgatttatttagtgt

SEQ ID NO: 227775 - DNA, 83 bp, Artificial Sequence
  ENSG00000118596_46 (sequence is synthesized)
ttaggtttaactgtaacttgtattatgatttatttagtgtttattagagaactgcatttgctagaacctgaatatgtatgagt

SEQ ID NO: 227776 - DNA, 120 bp, Artificial Sequence
  ENSG00000118596_47 (sequence is synthesized)
gccttgaatatgtaatttctgattgcctgcttttctccccaatgcaaattatctcaaataatgataattattacatatagacataattacttcaatatgactctttttctcataaaaata

SEQ ID NO: 227777 - DNA, 120 bp, Artificial Sequence
  ENSG00000118596_48 (sequence is synthesized)
atgacatatttgagtcaggcataatacattttttctgaggttggagttagcaggaaaatgttatcttttatgaataaataattcccagattggttgctacatatcatgattcaaaaagta

SEQ ID NO: 227778 - DNA, 120 bp, Artificial Sequence
  ENSG00000118596_49 (sequence is synthesized)
tcccagctactcgggaggctgagacgagagggtcatttgagcccaggaagttgaggcttcagtgagctataatggccccacttgcagtccagcctaggcaatagagtgagaatctgtctc

SEQ ID NO: 227779 - DNA, 120 bp, Artificial Sequence
  ENSG00000118596_50 (sequence is synthesized)
cagtccagcctaggcaatagagtgagaatctgtctctattaaaaaaaaaataaaatgttcttactagaaaacattatatttagaattttagtgattattccatttataatattatccgta

SEQ ID NO: 227780 - DNA, 120 bp, Artificial Sequence
  ENSG00000118596_51 (sequence is synthesized)
gctaccaaaaaaaagattataagatacaaatgatttggtttacccatacagttacatattaattttcatcatttaatacaacttaccctacaccgtagcttatttttcaagtttctctga

SEQ ID NO: 227781 - DNA, 120 bp, Artificial Sequence
  ENSG00000118596_52 (sequence is synthesized)
acatctttgttgtcattcacctctttgtctatttgttctgtagagaaaacaagtgtcattgcttttgtcttctccatctagacttttgcagtccttagactatagttctccttagctcta

SEQ ID NO: 227782 - DNA, 120 bp, Artificial Sequence
  ENSG00000118596_53 (sequence is synthesized)
ttcaaatagtgcacttgcaaggcgctgcattcttctcaaagtcagccatgatgcacatatttataattacatacacatataattgaatatgattttagagtcttgaaaaactgatcttct

SEQ ID NO: 227783 - DNA, 120 bp, Artificial Sequence
  ENSG00000118596_54 (sequence is synthesized)
ttggcactatcctgaatgtttctgattttcttaaagtgcctgacaatattgagtaacaaagcttaccatcaccacattgcaccattatgtattattctgtctccatcaatgcagtgacat

SEQ ID NO: 227784 - DNA, 120 bp, Artificial Sequence
  ENSG00000118596_55 (sequence is synthesized)
cactgatacatcataccaacaagatttctaaccacaaccattcagagcactaattagcatctatattgagaatataagattaatattacaaacttgactttactcatctctctttaagat

SEQ ID NO: 227785 - DNA, 120 bp, Artificial Sequence
  ENSG00000118596_56 (sequence is synthesized)
tttgatttctgcacaaccatatgcagaactcatgtttgagaaggcacttaaaagctgaaaggcccaattatcagtaattataatgcttgcatgatcaaaattacaaattatctttgttga

SEQ ID NO: 227786 - DNA, 120 bp, Artificial Sequence
  ENSG00000118596_57 (sequence is synthesized)
tacaattaaaaatgagtaattttctgagcttatgtcacttttttatagttctgattttctcttctttcctatcagttgtttgtacactggagattttagctctttacagggtgctacaat

SEQ ID NO: 227787 - DNA, 120 bp, Artificial Sequence
  ENSG00000118596_58 (sequence is synthesized)
ctggtttattttagtcttctctcctctactgctttttcttcactttaattcatttatgtgcaaatcagggaagaattgctgtagtattgagaatggtcattttaaaagtctctaccttaa

SEQ ID NO: 227788 - DNA, 120 bp, Artificial Sequence
  ENSG00000118596_59 (sequence is synthesized)
gagcaaaattaatattgcaaaatgaatttttgattttacagaagcatatgggaatttagatcaaattacatctcccatcccaatctcctgcttcttcatcatctcctaaatgttttcctt

SEQ ID NO: 227789 - DNA, 120 bp, Artificial Sequence
  ENSG00000118596_60 (sequence is synthesized)
tctatgtttttataatatctaggtaaaacttgtttagcattttttatttaattatggacatatttagtatggacttttgtttctttggtatagttagttacacttgtttgcatgatctac

SEQ ID NO: 227790 - DNA, 120 bp, Artificial Sequence
  ENSG00000118596_61 (sequence is synthesized)
atgtttttcagtctccatatatacttgttaataaggtgagcaatattcaggaatatttcagtaggcaattaatgatcataaatttattcacatttcagtaaatatttttcacatgatcaa

SEQ ID NO: 227791 - DNA, 120 bp, Artificial Sequence
  ENSG00000118596_62 (sequence is synthesized)
acaggattttttgtttctttttaatttaaatatggcaaaataagctagagaatctcagtgtgaaaacactgatactgaacattctattaaaatagaataagttcgtgtagggacatggat

SEQ ID NO: 227792 - DNA, 80 bp, Artificial Sequence
  ENSG00000118596_63 (sequence is synthesized)
ataaaaataaaaataaaatagaataagttgataaaagctcctctgttcagaaaaacaaaagaatggcattttatctcaca

SEQ ID NO: 227793 - DNA, 120 bp, Artificial Sequence
  ENSG00000118596_64 (sequence is synthesized)
gttcagaaaaacaaaagaatggcattttatctcacataaatttaggatgaaattttaaaacattcttttgactaagactttaattcttatatgcatctaaaataaatgttttgagttaga

SEQ ID NO: 227794 - DNA, 120 bp, Artificial Sequence
  ENSG00000118596_65 (sequence is synthesized)
ctcagtttatatagcttcctcgttagagtacacattttttttctcatcctccgaatctcaagagtacatatttctgacaagcttttcaatggtacgatggattttatttttctatcatca

SEQ ID NO: 227795 - DNA, 120 bp, Artificial Sequence
  ENSG00000118596_66 (sequence is synthesized)
atgtctcagaagatatgtttaatgaattcatttcatcctctcaaccctcagttttgataggtatccacatttttaccatataaaactagactggattaaggattttgcctaaacctatac

SEQ ID NO: 227796 - DNA, 120 bp, Artificial Sequence
  ENSG00000118596_67 (sequence is synthesized)
caatactctgaataaatgcagggttggagatagaattcaggtcttttaacttctaacacacttttttctccattgcactacagaagccgtaaggtcataatgatgatctttgtagagtaa

SEQ ID NO: 227797 - DNA, 120 bp, Artificial Sequence
  ENSG00000118596_68 (sequence is synthesized)
ataaaatattttcctagaaatatatataacaaccctacttgatagtttatagcccaaatgaatatatttttccaatcatggtttgcaaaatcatgtttgcaaacttactttgaagactat

SEQ ID NO: 227798 - DNA, 120 bp, Artificial Sequence
  ENSG00000118596_69 (sequence is synthesized)
ttcctgattgccacggcagataattcgtggcaaatcagaaataatatttagtgagattaattattttgcacaatatatgttgttatagcaatatcaaaatcatttaaaacatcaatattg

SEQ ID NO: 227799 - DNA, 120 bp, Artificial Sequence
  ENSG00000118596_70 (sequence is synthesized)
tattaatagaaaacatgtcaatatctcattaattccttttttattttatgttcctttttattttagaagcagtgttcatttttttctgaagtagaacgccagagcacagaacacacagtt

SEQ ID NO: 227800 - DNA, 120 bp, Artificial Sequence
  ENSG00000118596_71 (sequence is synthesized)
caagtttaaattattaaattgtatgcaagaaattattgccatagcatagtcttgaggagaacacctctacagtatttcttgatctaagaacctgaacatatgttaatgaaattattagag

SEQ ID NO: 227801 - DNA, 120 bp, Artificial Sequence
  ENSG00000118596_72 (sequence is synthesized)
taagttctatctcaaaaatttcttattttatgaatgttttcttcacctaataaacaatactaaaatccataacagctgtctggcaacagtgtaattagagcttcttttatgttagagatt

SEQ ID NO: 227802 - DNA, 120 bp, Artificial Sequence
  ENSG00000118596_73 (sequence is synthesized)
ccatctacctctgcatcttatctagctagatacagtctttctaaactttctcctttattcccatgtagagaacaaacaaaaatcacacctaaattaaagatctgtggtgaaggggaagag

SEQ ID NO: 227803 - DNA, 120 bp, Artificial Sequence
  ENSG00000118596_74 (sequence is synthesized)
gggttgctattaggagttttcccggtaaaactgtaaaaacagtaatctgcattcagtatttgtttgcctagttcatcaagatatttaccctaaaaacacattttaataaaaatttgggta

SEQ ID NO: 227804 - DNA, 120 bp, Artificial Sequence
  ENSG00000118596_75 (sequence is synthesized)
aactcatgtatcgcagtaaaatcttttatgaattgggtgggccctaaaaacatctgtagtacgtgatgtgtttggttagattcagccaaaccgacacccgtatgctaagactgcattgtc

SEQ ID NO: 227805 - DNA, 120 bp, Artificial Sequence
  ENSG00000118596_76 (sequence is synthesized)
attctgacaggaggcaggcctcagtagttgcagtgagtgcatttactaatataaggatccttctttgtagtgacaacaaaaatgagattgtaacttaatcaaatatgagtcagatatagt

SEQ ID NO: 227806 - DNA, 120 bp, Artificial Sequence
  ENSG00000118596_77 (sequence is synthesized)
aattcctgatattgcagatgaaagagcagggtcttttcaagtgcttgctacaactgactaaatttgaagctttttatgtaaaagttcttctcccagatattttaaaccagtatgttaatt

SEQ ID NO: 227807 - DNA, 120 bp, Artificial Sequence
  ENSG00000118596_78 (sequence is synthesized)
atttcctagaatgaataattctccttttttgatagatttttgaaattgttttacttactacttacatactttgaacaaatatgtttttctaatcccagcattaaattgaaacaaatattt

SEQ ID NO: 227808 - DNA, 120 bp, Artificial Sequence
  ENSG00000118596_79 (sequence is synthesized)
aaaataagattgttggaataaaagttatagatagtcacttgttgctaataaaagacattccttggcaacagccacatccagctaacttttgcaagaattttttaagggattagatttagg

SEQ ID NO: 227809 - DNA, 120 bp, Artificial Sequence
  ENSG00000118596_80 (sequence is synthesized)
aaatataaattatattttaggctgtatttttgtgatttttaagtgaaaaaaataaaatgtagttgtcttgtttattctatagatatcttaatgaccactgaacaaatgatcatattgcca

SEQ ID NO: 227810 - DNA, 120 bp, Artificial Sequence
  ENSG00000118596_81 (sequence is synthesized)
actgaacaaatgatcatattgccacatggtctatcaactatggttactatgatagtgaaataaagaggatagttttgcttgacacctaaatgatccaaacagttgtttttacatgactta

SEQ ID NO: 227811 - DNA, 120 bp, Artificial Sequence
  ENSG00000118596_82 (sequence is synthesized)
aatcatggctgtattatttcatttttaaagaaaataaagtataaaataatacatttaaaatacctgtcaaagttttaaaatataagatagaaccttctttttttgccttcttacacatga

SEQ ID NO: 227812 - DNA, 120 bp, Artificial Sequence
  ENSG00000118596_83 (sequence is synthesized)
atgtacttaaagtattgttatgtgatcttgggatacttatttatttttgaaatttttgtatatatagcatttctgaacttagcaaataatatgtgtaaaggaattaaccaaaaatgaaag

SEQ ID NO: 227813 - DNA, 120 bp, Artificial Sequence
  ENSG00000118596_84 (sequence is synthesized)
aaagaactggcattttcatatggatacatattttgcttaaactaaataaaataacttagatttatttaaatcaggaatattttacgttgttgatcatttttaaagtatattttgttcaaa

SEQ ID NO: 227814 - DNA, 120 bp, Artificial Sequence
  ENSG00000118596_85 (sequence is synthesized)
cctaatttgtttttcagcacacttgtttaagttcttgcctttcaggtatactacagcgttatatgaacataatgttttaaaaaaatcttggttgtagtttctaattttcactgcataaca

SEQ ID NO: 227815 - DNA, 120 bp, Artificial Sequence
  ENSG00000118596_86 (sequence is synthesized)
aatttgaaaccaaatgttgaatttctctgtgagggtacttattttgcctacagtttcaaatatattttcaaattcatctctttcttactagactgtgagctccttgtggacaaggatgtt

SEQ ID NO: 227816 - DNA, 120 bp, Artificial Sequence
  ENSG00000118596_87 (sequence is synthesized)
attttagttataatgacaactttaatatctagcaaagtgccaggcatagagtattcctttattgaaatgaattgatagatattgattattaaaatgctactacagtattctacgatgcag

SEQ ID NO: 227817 - DNA, 120 bp, Artificial Sequence
  ENSG00000118596_88 (sequence is synthesized)
gctgaatgtatattacagtaattctctggctaattttaaaagtaagacatagaaaacaaaacacctgtagcattttctttatttaaaattgaaactctgttttgaatcctttttattttg

SEQ ID NO: 227818 - DNA, 120 bp, Artificial Sequence
  ENSG00000118596_89 (sequence is synthesized)
tcaaacattctatgcaaatattgaaatatgcaacagctaaactttatggtacatattaattagttttattttcttttcaaaatcagaaatgctgtatttaagcttcctggaaatgtcgac

SEQ ID NO: 227819 - DNA, 120 bp, Artificial Sequence
  ENSG00000118596_90 (sequence is synthesized)
aatcattttaatgaccaaaggtgctacttatttttcaacattgaccttgatcataagtgcttctatctgctgagctttatttattgtttttggacagaaagtttggtgggaaggttgcaa

SEQ ID NO: 227820 - DNA, 120 bp, Artificial Sequence
  ENSG00000118596_91 (sequence is synthesized)
taaaatcagaatctctcttgtctgaattatgcagtttaaccctgtccatgttcctctgtactctattcttactgtattttagttattgtttcttacttatcactaatttttactgcaggt

SEQ ID NO: 227821 - DNA, 120 bp, Artificial Sequence
  ENSG00000118596_92 (sequence is synthesized)
ctgcaggtctgtgctgtttcttagaaagtacatgcatatatatttctataatatgtaagaaaaaacctgtattgcttattaaattaaaattaaaataaaaaaattcatgttaaatttttg

SEQ ID NO: 227822 - DNA, 120 bp, Artificial Sequence
  ENSG00000118596_93 (sequence is synthesized)
gctcctccgcacccacaagggcgttcagcagccgcgcctccccttcccgccaccgcctccttctccgctggctgtggcgggcgaggacacgtcaggggccataaataaataaataattcc

SEQ ID NO: 227823 - DNA, 120 bp, Artificial Sequence
  ENSG00000118596_94 (sequence is synthesized)
attcacccgttgacagcgaggcgaatcggctgcggtttgctgggaacggagggctgcagcgcccaccctgcgccagagaccagataaagagtcaatcttaagatgtgatactttcctgtg

SEQ ID NO: 227824 - DNA, 120 bp, Artificial Sequence
  ENSG00000118596_95 (sequence is synthesized)
agcggatgctgcatcgcggcgcccttctccacccccttttctcctctacttccgcgaaaaggattgcagactgccttggaaagggcggtcgtgcccagtgccactttcccggagtcaatc

SEQ ID NO: 227825 - DNA, 120 bp, Artificial Sequence
  ENSG00000118596_96 (sequence is synthesized)
ttaagatgtgatactttcctgtgaaacctgaaacaaggtgatctggggaaccaaagactctgggactcttggtgccaacagagttactctataatccaaaatctactctacatcttttcc

SEQ ID NO: 227826 - DNA, 120 bp, Artificial Sequence
  ENSG00000118596_97 (sequence is synthesized)
aggaggaaaaaaggagaagcggaatgcatcattcaccctttaaagagatcaccatctacttgaggtagaatatttgaaagctttttgatcttcacatccttgaggattcagtgcagcttt

SEQ ID NO: 227827 - DNA, 120 bp, Artificial Sequence
  ENSG00000118596_98 (sequence is synthesized)
actcaatcaggatcatgcctagctgccgtacataatgactcctctgatgaatctgggaaaaggagatggaaaatcttctggaaaggatttgctattctagataacatcacgatcattcac

SEQ ID NO: 227828 - DNA, 120 bp, Artificial Sequence
  ENSG00000118596_99 (sequence is synthesized)
gaatgaagcacatggacaaccggagagcgagcaaggcagagaggagcttcactgagcaacaaaacaactcttaggagagccacgactacccagaactgacagtctgacccccaggcctca

SEQ ID NO: 227829 - DNA, 120 bp, Artificial Sequence
  ENSG00000118596_100 (sequence is synthesized)
ctctctactgtctgagatacaacagtattgaaattaggccacttaataaacctacagtggcttctaagtgttcaagtgaaaggaagagttgcaagtctctcatttgaaatcaaaagctag

SEQ ID NO: 227830 - DNA, 120 bp, Artificial Sequence
  ENSG00000118596_101 (sequence is synthesized)
accttctttgacccatgatataatttaagccaagcttactttagactctgaaaagtatgaactaatagtgcacgtcaaagcaggttcttgaaaaagagaaataactaactttgccctatt

SEQ ID NO: 227831 - DNA, 120 bp, Artificial Sequence
  ENSG00000118596_102 (sequence is synthesized)
tgagagaagagagaggggagggcaaagcagagtctctggagatatgtatgtaagtttgcttgtggctaaaagttaatgatcagttgcctctcttcttagccctgagcctggagaaaagtg

SEQ ID NO: 227832 - DNA, 120 bp, Artificial Sequence
  ENSG00000118596_103 (sequence is synthesized)
agtcagcagccatcaacatcaaaacaggaccctccaccagcaaaaagactgaaaatcactgaaggctgagatgatcattaacattttttagcaataaaatatttttaattgttatgcaca

SEQ ID NO: 227833 - DNA, 120 bp, Artificial Sequence
  ENSG00000118596_104 (sequence is synthesized)
ctttttagatataattcaatgcacacttaatatagtgtgtaaagtgtaaacgtaacttttatatgcactgagaaaccaaaaaatttgtgactcactttattgcaatattcactttatcaa

SEQ ID NO: 227834 - DNA, 120 bp, Artificial Sequence
  ENSG00000118596_105 (sequence is synthesized)
gatccacccctttctgcccaggaatctgtctgcctcccaccatcaacatgccctccatggcacccaggaaaaaaggagaagcggaatgcatcattcaccctttaaagagatcaccatcta

SEQ ID NO: 227835 - DNA, 120 bp, Artificial Sequence
  ENSG00000118596_106 (sequence is synthesized)
gcttcactgagcaacaaaacaactcttaggagagccacggaaaaaaggagaagcggaatgcatcattcaccctttaaagagatcaccatctacttgaggtagaatatttgaaagcttttt

SEQ ID NO: 227836 - DNA, 120 bp, Artificial Sequence
  ENSG00000118596_107 (sequence is synthesized)
ggaggttggtatcatatgcaatagctgtatattccatcagttgattgacgtgttattatgggatcgctgtctaaagaacacaattggaaagataataaatttgttccagtttggaatctt

SEQ ID NO: 227837 - DNA, 120 bp, Artificial Sequence
  ENSG00000118600_0 (sequence is synthesized)
ctctttccgcccgctccatggcggtggatgcctgactggaagcccgagtgggatgcggctgacgcggaagcggctctgctcgtttcttatcgccctgtactgcctattctccctctacgc

SEQ ID NO: 227838 - DNA, 120 bp, Artificial Sequence
  ENSG00000118600_1 (sequence is synthesized)
tgcctaccacgtcttcttcgggcgccgccgccaggcgccggccgggtccccgcggggcctcaggaagggggcggcccccgcgcgggagagacgcggccgagaacagtccactttggaaag

SEQ ID NO: 227839 - DNA, 120 bp, Artificial Sequence
  ENSG00000118600_2 (sequence is synthesized)
tgaagaatggaatccttgggaaggagatgaaaaaaatgagcaacaacacagatttaaaactagccttcaaatattagataaatccacgaaaggaaaaacagatctcagtgtacaaatctg

SEQ ID NO: 227840 - DNA, 120 bp, Artificial Sequence
  ENSG00000118600_3 (sequence is synthesized)
gggcaaagctgccattggcttgtatctctgggagcatatttttgaaggcttacttgatcccagcgatgtgactgctcaatggagagaaggaaagtcaatcgtaggaagaacacagtacag

SEQ ID NO: 227841 - DNA, 120 bp, Artificial Sequence
  ENSG00000118600_4 (sequence is synthesized)
cttcatcactggtccagctgtaataccagggtacttctccgttgatgtgaataatgtggtactcattttaaatggaagagaaaaagcaaagatcttttatgccacccagtggttacttta

SEQ ID NO: 227842 - DNA, 120 bp, Artificial Sequence
  ENSG00000118600_5 (sequence is synthesized)
tgcacaaaatttagtgcaaattcaaaaactccagcatcttgctgttgttttgctcggaaatgaacattgtgataatgagtggataaacccattcctcaaaagaaatggaggcttcgtgga

SEQ ID NO: 227843 - DNA, 120 bp, Artificial Sequence
  ENSG00000118600_6 (sequence is synthesized)
gctgcttttcataatatatgacagcccctggattaatgacgtggatgtttttcagtggcctttaggagtagcaacatacaggaattttcctgtggtggaggcaagttggtcaatgctgca

SEQ ID NO: 227844 - DNA, 120 bp, Artificial Sequence
  ENSG00000118600_7 (sequence is synthesized)
cagacaggcactaatgaacattttgaaaaaagatgggaacgataagctttgttgggtttcagcaagagaacactggcagcctcaggaaacaaatgaaagtcttaagaattaccaagatgc

SEQ ID NO: 227845 - DNA, 120 bp, Artificial Sequence
  ENSG00000118600_8 (sequence is synthesized)
cttgcttcagagtgatctcacattgtgcccggtcggagtaaacacagaatgctatcgaatctatgaggcttgctcctatggctccattcctgtggtggaagacgtgatgacagctggcaa

SEQ ID NO: 227846 - DNA, 120 bp, Artificial Sequence
  ENSG00000118600_9 (sequence is synthesized)
ctgtgggaatacatctgtgcaccacggtgctcctctgcagttactcaagtccatgggtgctccctttatctttatcaagaactggaaggaactccctgctgttttagaaaaagagaaaac

SEQ ID NO: 227847 - DNA, 120 bp, Artificial Sequence
  ENSG00000118600_10 (sequence is synthesized)
tataattttacaagaaaaaattgaaagaagaaaaatgttacttcagtggtatcagcacttcaagacagagcttaaaatgaaatttactaatattttagaaagctcatttttaatgaataa

SEQ ID NO: 227848 - DNA, 120 bp, Artificial Sequence
  ENSG00000118600_11 (sequence is synthesized)
taaaagttaattatctttttgagctaacatgtgatttttaaaatcattttgactactgggtgtataaatgtgtttgtgtgtgtatgtatttatagatgttctttaaggtacccttgaaaa

SEQ ID NO: 227849 - DNA, 120 bp, Artificial Sequence
  ENSG00000118600_12 (sequence is synthesized)
tagatgttctttaaggtacccttgaaaactctacattatgtatgccacataatgacatttcagtcagtggtagactacatatatgatagtggtcccataagattataatggagctgaaaa

SEQ ID NO: 227850 - DNA, 120 bp, Artificial Sequence
  ENSG00000118600_13 (sequence is synthesized)
tagtgatgacatatgtattgcaatacatcactcacgtgtttgtggtgatactggtgtaaacaaatctattgcactgccagtcaagtaaaagtacagcaattatgtcctgtacataatatt

SEQ ID NO: 227851 - DNA, 71 bp, Artificial Sequence
  ENSG00000118600_14 (sequence is synthesized)
tcctgtacataatatttaataatgacacaatttgtattagttcttgcattgctatgaataaatgcctgaga

SEQ ID NO: 227852 - DNA, 120 bp, Artificial Sequence
  ENSG00000118600_15 (sequence is synthesized)
gcttgtatctctgggagcatatttttgaaggcttacttgatcccagcgatgtgactgctcaatggagagaaggaaagtcaatcgtaggaagaacacagtacagaaagaaagacagaaata

SEQ ID NO: 227853 - DNA, 120 bp, Artificial Sequence
  ENSG00000118600_16 (sequence is synthesized)
agcctgatgaagccctgtcacctctgggcagtgtagcatgtgactcagttattgagagtacagactctggagccagactatctttgttcaaattcttttatttttttcagacagagtctt

SEQ ID NO: 227854 - DNA, 120 bp, Artificial Sequence
  ENSG00000118600_17 (sequence is synthesized)
atttataaaaatacttctatttcaacttgtaaagaatagagaagtaaatctcatgaatatgtattcataattaagcttacttggaccttatgaaattgtatattacagaatactcctttt

SEQ ID NO: 227855 - DNA, 120 bp, Artificial Sequence
  ENSG00000118600_18 (sequence is synthesized)
acagaatactcctttttggcatcatatgtctgttttatttttacctaattatatagaaaagttcatactccacatcttacagcgtttgaatggtgacagccattgaaaacattctgtatc

SEQ ID NO: 227856 - DNA, 120 bp, Artificial Sequence
  ENSG00000118600_19 (sequence is synthesized)
tgtaaaatgttttcatatagtataagatggaacctcttggtaatcatgatgttgttgcactaggccagtatatttcttatataggtctgtggttctcaaccaggggcaattttgcccacc

SEQ ID NO: 227857 - DNA, 74 bp, Artificial Sequence
  ENSG00000118600_20 (sequence is synthesized)
ataggtctgtggttctcaaccaggggcaattttgcccaccgggaggcatttggcagtgtctggagacagctgga

SEQ ID NO: 227858 - DNA, 70 bp, Artificial Sequence
  ENSG00000118600_21 (sequence is synthesized)
cctcccaggttcttcaccactcctggctaattttgtattttttatagagagggggtttcgccatgttggc

SEQ ID NO: 227859 - DNA, 82 bp, Artificial Sequence
  ENSG00000118600_22 (sequence is synthesized)
ggactcccactggagacgtttttgattgtcacaactggaggaaagaggttgtcacaactggtatctagcagatagagcccag

SEQ ID NO: 227860 - DNA, 120 bp, Artificial Sequence
  ENSG00000118600_23 (sequence is synthesized)
aagaggttgtcacaactggtatctagcagatagagcccagggatacagctgaacaccccacaatgtataggacagcctccacaagaaaaaattaacccaaaatgtcagtaatgctgaggc

SEQ ID NO: 227861 - DNA, 120 bp, Artificial Sequence
  ENSG00000118600_24 (sequence is synthesized)
taagaaaccctgttatatacaaactgttaggtaaaattttgttctcgtgtgaaagttacatttcaggtacacagtttaatccctggtatttccaaatgctcataaaaataggtaactttt

SEQ ID NO: 227862 - DNA, 120 bp, Artificial Sequence
  ENSG00000118600_25 (sequence is synthesized)
cctgtatggcataccatggttttatctgtcagtttgttttaatctacttgaaaagcccttgggattaatttttcagagccctttgcaatagcaaaatatataatctttccttttttttaa

SEQ ID NO: 227863 - DNA, 120 bp, Artificial Sequence
  ENSG00000118600_26 (sequence is synthesized)
ttgacaaatagtaatggtatatgataatggggtacaaatgatgttttgaaatatatttacaacgtagaatgcttaaatcagactaacaaatccgtaaccttatatacttaacaatttttg

SEQ ID NO: 227864 - DNA, 120 bp, Artificial Sequence
  ENSG00000118600_27 (sequence is synthesized)
tgatagatcactaaagcttattcctcctgtccaactgaaacttcatacccttcgatcaacatcttccttttccccatccatctccctcccctggagtattctgtaatcttttcatcacct

SEQ ID NO: 227865 - DNA, 120 bp, Artificial Sequence
  ENSG00000118600_28 (sequence is synthesized)
ggttaaaatgttgcttaaatcgtgatcattatgaatagagaagagtctttatactttgaaggttttgaatgtaacatgcctaacagctgcagatgagtaatgcaagttaaagaatgtcaa

SEQ ID NO: 227866 - DNA, 120 bp, Artificial Sequence
  ENSG00000118600_29 (sequence is synthesized)
aaacaaataactttaggcacaacatctctgtaacacttttgtaagagatgtcagtgtgaaattcaatttttttaagtcagtagattcagggagttttccaaagtattcatggaaaattac

SEQ ID NO: 227867 - DNA, 120 bp, Artificial Sequence
  ENSG00000118600_30 (sequence is synthesized)
aatttgagatttagaaatcacattttaaacctcttctgtatacttcttgctacctaagagattgggttatggggaatttttgccaattctatatcatatgttaattcatgtgtatttatt

SEQ ID NO: 227868 - DNA, 120 bp, Artificial Sequence
  ENSG00000118600_31 (sequence is synthesized)
tatgtcacaggattcactccattagatgggaagctcctctgcagatcttttctgagtaatcccatctccatttctggcttctgctgagatggctgaggagacctgcttgtatctctggga

SEQ ID NO: 227869 - DNA, 120 bp, Artificial Sequence
  ENSG00000118600_32 (sequence is synthesized)
agacgcggccgaggtaggactgggtcggcggcttccttccggctctgcgctcctggctggggctgctgggcggctggggccgggtccccgcacccggctctcaagtccgggattacccgc

SEQ ID NO: 227870 - DNA, 120 bp, Artificial Sequence
  ENSG00000118600_33 (sequence is synthesized)
agggcctgagaagcgctttgccccctacagcctctcgagccagcccttggctcggaattggagaatggtcctcattcttacccagatctcacacgccgtccccgctcccgatcccagggg

SEQ ID NO: 227871 - DNA, 120 bp, Artificial Sequence
  ENSG00000118600_34 (sequence is synthesized)
gtgacaggcgcgcacgcctttcaaacacgtgttaaaatccaagacgtcgtctcaaatgccagagatttgcgggaatgctcctggaaggcctcaaaatcgccgcaagaacagtccactttg

SEQ ID NO: 227872 - DNA, 120 bp, Artificial Sequence
  ENSG00000118600_35 (sequence is synthesized)
tcattttgttctccagtctgagagttgctttatgtagaaacacaggtttccaaagaggcattgttaactctatttgtaccaatctttccccagaagatacattagtaattaaaactgtga

SEQ ID NO: 227873 - DNA, 120 bp, Artificial Sequence
  ENSG00000118600_36 (sequence is synthesized)
aaagactgggttgtacacatttagaatagagagaaccgcctatgactgtagtccatcttgaagaggaacactggtaactgtcatttgcaaatttcagttgttagggtttcctcaataata

SEQ ID NO: 227874 - DNA, 120 bp, Artificial Sequence
  ENSG00000118600_37 (sequence is synthesized)
tttgttagtcacacaggagattatagatgctaatgagatacttaggttcatcactgagatgttgtgcagtggaccaattcagtgttccaagaccggtgtgcaggtctcacaaattcagga

SEQ ID NO: 227875 - DNA, 120 bp, Artificial Sequence
  ENSG00000118600_38 (sequence is synthesized)
attcaggaacctgacaccatcttcaggacatggaccttgtattcttctgtgaatccccagatctaacataggaccttgcacaaagtagacctaggataaatggtgagtggatgaatggtt

SEQ ID NO: 227876 - DNA, 120 bp, Artificial Sequence
  ENSG00000118600_39 (sequence is synthesized)
ggatagggagactcaatagggttaaatgtcttcttttatgtagtaaccaggaaacaggtgttcatgttgtgaaggaagtaaatttgcaatcatttattttgtttttaaatagacaaatca

SEQ ID NO: 227877 - DNA, 120 bp, Artificial Sequence
  ENSG00000118600_40 (sequence is synthesized)
agttttcaaataaacaaagcataatgcagagtcatcagggaagtaatgccttaaaaatgtccagttaggtctggaattttactttttaaattatagcaggtactctttattgctaatgta

SEQ ID NO: 227878 - DNA, 120 bp, Artificial Sequence
  ENSG00000118600_41 (sequence is synthesized)
accatatcatattcgttcagtcagtgtttaccaagcaattgctctatgccagaaacttgtttacccacagtaaatacagcagtgaacaaaacaaagtccatgccctcctggcacttaaat

SEQ ID NO: 227879 - DNA, 120 bp, Artificial Sequence
  ENSG00000118600_42 (sequence is synthesized)
gcttgttggagtagacaagcaagtaaaatatattgtgtgtcagaagatgataaatgccctgtaaaaaattaagcagaagaatggcatagaaagagcttgggtgttggtggtggagcattt

SEQ ID NO: 227880 - DNA, 120 bp, Artificial Sequence
  ENSG00000118600_43 (sequence is synthesized)
gctattttggaatagccaagaaaggcattcattagaaggttacatttatgcacaggccttaagaatgtgcatgggtgagtcttgtgtatatttgggagaagactattccagacgtaggga

SEQ ID NO: 227881 - DNA, 120 bp, Artificial Sequence
  ENSG00000118600_44 (sequence is synthesized)
agagcaaaggccctgaggcaggcaggaatgtgcttactatgttacaggaacaacagggccagtatgtctggagtggaatgaatgaggacagtgtaaaataacaaaggttattatgggaat

SEQ ID NO: 227882 - DNA, 120 bp, Artificial Sequence
  ENSG00000118600_45 (sequence is synthesized)
aattcttgtaactcctctcataccattgagccagaggtttgagtagatgttttccttgtttctcattgttgcttctagactattctcccctttccctccctaataatcccaattttgaaa

SEQ ID NO: 227883 - DNA, 120 bp, Artificial Sequence
  ENSG00000118600_46 (sequence is synthesized)
ctcatgtcagcagacaaaaccatccatcacccttactctctgaaatcatgcacttacccttgggtttctccccctacttcttcgaagagtttagctcctggtactctctagctctgtctg

SEQ ID NO: 227884 - DNA, 120 bp, Artificial Sequence
  ENSG00000118600_47 (sequence is synthesized)
acactactctgttctcaattcttagtgactggcaaatctacatagatggtctttctgtcattttggtctttgcagttccttcacctcccctcctccaataatctgggcttccacctgacc

SEQ ID NO: 227885 - DNA, 120 bp, Artificial Sequence
  ENSG00000118600_48 (sequence is synthesized)
tcagccattctctctcatggttatttcctagactttgtcattacacatactgcaccttctgaacatgatctcaagtcccagcatctctttctacaaccaccatcatctgtcattccagct

SEQ ID NO: 227886 - DNA, 120 bp, Artificial Sequence
  ENSG00000118600_49 (sequence is synthesized)
ttcattttattcttcacctaacttaaatttcattgtcaatcataattgcctataccttcagctccctaattccctaatctggcaaaccataactctggttaaatccagctctctgcctac

SEQ ID NO: 227887 - DNA, 120 bp, Artificial Sequence
  ENSG00000118600_50 (sequence is synthesized)
tccatgcctgcacccatgcaactacacataattggagaaaggtgctaattgacctttatttaaacacgtgactttgaacctcaggtgcccagcagtcttatatttcccttgtccatatat

SEQ ID NO: 227888 - DNA, 120 bp, Artificial Sequence
  ENSG00000118600_51 (sequence is synthesized)
tctcccactctcctagaaggctgttttataccttcttctctcctacactctaacacctccgcctttcttactttatgaccctattgcttatttcactgagaatagtcaggagaaagcatc

SEQ ID NO: 227889 - DNA, 120 bp, Artificial Sequence
  ENSG00000118600_52 (sequence is synthesized)
tcactgagaatagtcaggagaaagcatctatctttttttttttcttttgagactgagtttcactcttattgcccaggctgtagtgcagtgacaggatctcggctcactgcaacctctacc

SEQ ID NO: 227890 - DNA, 120 bp, Artificial Sequence
  ENSG00000118600_53 (sequence is synthesized)
ttcttctgcctcagcctcccgtgtagttgggattacaggtgcacgccatcacgcccggctaattattgtatttagtagagacggggttttaccttgttggccaggttggtctcgaactcc

SEQ ID NO: 227891 - DNA, 120 bp, Artificial Sequence
  ENSG00000118600_54 (sequence is synthesized)
caggcgtgagccaccgcacccagccgcgtctatctttctttactgatctttcagtttctacccttgcccctgtacagtccattctcaacacaatagccagattgattctgatgaaaccta

SEQ ID NO: 227892 - DNA, 120 bp, Artificial Sequence
  ENSG00000118600_55 (sequence is synthesized)
tcaacacaatagccagattgattctgatgaaacctacatcacgtcatgtcaccccatgatcaaaagcctgcatgatagagtcccgtgtgaccattcagactttatcttctgcgcctgttc

SEQ ID NO: 227893 - DNA, 120 bp, Artificial Sequence
  ENSG00000118600_56 (sequence is synthesized)
cctcagttaccctacctcagccaccctggcttccccgcagctccttgaacatgccaggcacatgctgtctcatggccttcactcttgcttgctcttttatcccgccagatctacgtggct

SEQ ID NO: 227894 - DNA, 120 bp, Artificial Sequence
  ENSG00000118600_57 (sequence is synthesized)
tgctccttcatccccaactctgtgctcagatgctgccgcagtaagacagtccctcatcacttatttaagattgcaaccctacccccttagaaactcctgctctacttactcctttgctct

SEQ ID NO: 227895 - DNA, 120 bp, Artificial Sequence
  ENSG00000118600_58 (sequence is synthesized)
tttctcacagtattctaccccatctaaataatttactgacttcacttggtcactatccatctccaccactagaactagaatatatgctccatgagggcaaggtagggaagagaggaccta

SEQ ID NO: 227896 - DNA, 120 bp, Artificial Sequence
  ENSG00000118600_59 (sequence is synthesized)
gcactcccaaagtatcggttgaattattattatccattcagaagtgttacggtgactcctagattttataaatgtacaactgtaaaatgttccaattcttcaacatttttaagaaatctg

SEQ ID NO: 227897 - DNA, 120 bp, Artificial Sequence
  ENSG00000118600_60 (sequence is synthesized)
tttgggccaggattttggatatctcttatgcctatcatctctataaagtttcaccatttcctgaaactgattttattaaaagataaggtatttttgttcacaaactatatacttagtaaa

SEQ ID NO: 227898 - DNA, 120 bp, Artificial Sequence
  ENSG00000118620_0 (sequence is synthesized)
gtccctcgctgtggcctgagctccaggtctcgtcttcagcgctctgtgtcctctgctcctagaggtccaggctctgtggccctgtgacccgcaggtattgggagatctacagctaagacg

SEQ ID NO: 227899 - DNA, 120 bp, Artificial Sequence
  ENSG00000118620_1 (sequence is synthesized)
ccaggaacccctggaagcctagaaatggagaacctgaagtctggagtgtatcctctcaaggaagcaagtggatgccctggggctgacaggaatcttctggtgtactctttttatgaaaag

SEQ ID NO: 227900 - DNA, 120 bp, Artificial Sequence
  ENSG00000118620_2 (sequence is synthesized)
gggccattgacatttagggatgtggccatagaattttctctggaggagtggcaatgcctggacactgctcagcaggatttgtatagaaaagtgatgttagagaactacagaaacctggtc

SEQ ID NO: 227901 - DNA, 120 bp, Artificial Sequence
  ENSG00000118620_3 (sequence is synthesized)
ttcttggcaggtattgctgtttctaagccagacctgatcacctgtctagagcaaggaaaagagccctggaatatgaagagacatgcgatggtagatcaacccccagttacatattctcat

SEQ ID NO: 227902 - DNA, 120 bp, Artificial Sequence
  ENSG00000118620_4 (sequence is synthesized)
tttgcccaagacctttggccagagcagggcataaaagattctttccaagaagtcatattgagaagatatggaaaatgtggacatgaagatttacagttaagaacaggctgtaaaagtgtg

SEQ ID NO: 227903 - DNA, 120 bp, Artificial Sequence
  ENSG00000118620_5 (sequence is synthesized)
gatgagtgtaatctgcacaaagaatgttatgatgaactaaaccagtgtttgacaactacccagagtgaaatatttcaatatgataaatatgtgaatgtcttttataaattttcaaatcca

SEQ ID NO: 227904 - DNA, 120 bp, Artificial Sequence
  ENSG00000118620_6 (sequence is synthesized)
aatatacaaaagataagacatactggaaagaagcctttcaaatgtaaaaaatgtgacaaatcgttttgcatgcttttacacctaactcaacataaaagaattcatattagggaaaattct

SEQ ID NO: 227905 - DNA, 120 bp, Artificial Sequence
  ENSG00000118620_7 (sequence is synthesized)
aacataaaagaattcatattagggaaaattcttaccaatgtgaagaatgtggtaaagtctttaactggttctcaacccttactagacacagaagaattcatactggagagaaaccctaca

SEQ ID NO: 227906 - DNA, 85 bp, Artificial Sequence
  ENSG00000118620_8 (sequence is synthesized)
ataattcatactggagagaaaccctacagatgtgaagaatgtggcaaaacctttaaccggtcctcacaccttactacgatgtgaa

SEQ ID NO: 227907 - DNA, 86 bp, Artificial Sequence
  ENSG00000118620_9 (sequence is synthesized)
agaattcatactggagagaaaccctacagatgtgaagaatgtggcagagcttttaaccggtcctcacaccttactacacataagat

SEQ ID NO: 227908 - DNA, 74 bp, Artificial Sequence
  ENSG00000118620_10 (sequence is synthesized)
caacccttactacacataagataattcataccgattctcataccttactaaacataagataattcatactggag

SEQ ID NO: 227909 - DNA, 77 bp, Artificial Sequence
  ENSG00000118620_11 (sequence is synthesized)
tacaaatgtgaagaatgtggcaaaggctttaattggtcctcgacccttactaacaatgtggcaaagcttttaatgag

SEQ ID NO: 227910 - DNA, 67 bp, Artificial Sequence
  ENSG00000118620_12 (sequence is synthesized)
tactggagagaaaccctacaaatgtgaacaatgtggcaaagcttttaatgagtcctcaaaccttact

SEQ ID NO: 227911 - DNA, 88 bp, Artificial Sequence
  ENSG00000118620_13 (sequence is synthesized)
ttctcaaaccttactaaacataagataactcatattggagatacatcttacaaatacctagaatgtgataaagcctttagccagtctt

SEQ ID NO: 227912 - DNA, 87 bp, Artificial Sequence
  ENSG00000118620_14 (sequence is synthesized)
ccttactaaacataagataactcatattggagatacatcttacaaatacctagaatgtgataaagcctttagccagtcttcaactct

SEQ ID NO: 227913 - DNA, 120 bp, Artificial Sequence
  ENSG00000118620_15 (sequence is synthesized)
ctggagagaaaccctacaaatgtgaagattgtggcaaagcctctaacccgtcctgaattcttactaaacataagaacattcatactgaagaggaaccctatgagtgtgaagaatatggca

SEQ ID NO: 227914 - DNA, 68 bp, Artificial Sequence
  ENSG00000118620_16 (sequence is synthesized)
accctatgagtgtgaagaatatggcaaagccttcaacaagtcctcaattcttaccagacataagataa

SEQ ID NO: 227915 - DNA, 120 bp, Artificial Sequence
  ENSG00000118620_17 (sequence is synthesized)
gcactccagcctgggcaacaagagtggcactccatctcagaaaaaaaaaaaaaagataattcatactgaaaagaaactctacaaacttgaaagatgtgacagtgcttttgacaacaccta

SEQ ID NO: 227916 - DNA, 120 bp, Artificial Sequence
  ENSG00000118620_18 (sequence is synthesized)
acttgaaagatgtgacagtgcttttgacaacacctaaaacttttaaacataaaaaatcatactggtgagaaatcctagaaatgtaaagaatgtgacaaggcctttaaatggttgtcacac

SEQ ID NO: 227917 - DNA, 120 bp, Artificial Sequence
  ENSG00000118620_19 (sequence is synthesized)
ttcattataggtaagatagttcatactgaagaaaacttctacaagtgtgaacagtgtggcaaaacttttaatgaatgctcacaccttattgcacaggagagcatttatacttgaaaaaaa

SEQ ID NO: 227918 - DNA, 120 bp, Artificial Sequence
  ENSG00000118620_20 (sequence is synthesized)
ttgtacaaatataaagaccatgaaaaagccattaatatctattcacatcttaccactggagagttcatacttaataaaaggaatataagtgcaattactgtcaaaagatctttcagaaaa

SEQ ID NO: 227919 - DNA, 120 bp, Artificial Sequence
  ENSG00000118620_21 (sequence is synthesized)
tataaacctttaaagcgaagaaggtatttattttgaagatgaacactacaaatgtgaagagggttgtagtacctttatttgtatcacagattttattgtacacattttgtactagaagaa

SEQ ID NO: 227920 - DNA, 120 bp, Artificial Sequence
  ENSG00000118620_22 (sequence is synthesized)
aactctgaagtagttgctcaaactttgttcaacatcagggaatttatattgaagaaaaactttgcaaatttaataaattttaaaaaacactttttcaaaaagtacagcttagaagacacc

SEQ ID NO: 227921 - DNA, 120 bp, Artificial Sequence
  ENSG00000118620_23 (sequence is synthesized)
agagttcatactaaaatatatttttgcagatgcagtaaaaatgaaaatatttaatccaaaattaagtctatgtaaatatcagagaatttactgtagaaatatataaggcactgagacttc

SEQ ID NO: 227922 - DNA, 90 bp, Artificial Sequence
  ENSG00000118620_24 (sequence is synthesized)
agagaatttactgtagaaatatataaggcactgagacttcagatattatactaaatcagagtgctgagtatagaaaataaaactgaagtt

SEQ ID NO: 227923 - DNA, 86 bp, Artificial Sequence
  ENSG00000118620_25 (sequence is synthesized)
acacggctctactaaaaatacaaaattagccagctgtggtggtgtatgcctgtaatcacagctactcgagaggctgaggcaggaga

SEQ ID NO: 227924 - DNA, 120 bp, Artificial Sequence
  ENSG00000118620_26 (sequence is synthesized)
gttggtagaaaaattatttgtatataactttaaaaggagtagaagggctttttgcagagttattacgtttgaagtatactttatttcttgaaaaaattacagattttttgtaaataatga

SEQ ID NO: 227925 - DNA, 120 bp, Artificial Sequence
  ENSG00000118620_27 (sequence is synthesized)
tgtaattcaactctcaaaatatttcctactgtttctttattccagttgtattcacatgtgaaagcatgtgatcagttattgctgcattaaaaacatgagtcttttttattaggtggccat

SEQ ID NO: 227926 - DNA, 120 bp, Artificial Sequence
  ENSG00000118620_28 (sequence is synthesized)
tatttatgatcttttctatgaaagagtaaggacattaaaatgtaagatgcatgatgaaaaattaagtgaagaggctctttatggttaatttatattgaataatgcattaggtaggtgttc

SEQ ID NO: 227927 - DNA, 80 bp, Artificial Sequence
  ENSG00000118620_29 (sequence is synthesized)
atggttaatttatattgaataatgcattaggtaggtgttcagagtaatattttgcgttgtgagaacatttttaattttat

SEQ ID NO: 227928 - DNA, 120 bp, Artificial Sequence
  ENSG00000118620_30 (sequence is synthesized)
ccctggaatatgaagagacatgcgatggtagatcaacccccaggtaggtgagagtgaacacaacagacgacatgaatgagaggtccaaaaaagaagaaagccaatgcttaaaatgttatt

SEQ ID NO: 227929 - DNA, 120 bp, Artificial Sequence
  ENSG00000118620_31 (sequence is synthesized)
tgagaatctgtgttccaaagcaaatattttctgggaagcctgagtttttttttttaattttgccctcgcatagggtcatcttctgtcttatgcttttaaattcaaggattctttcccctt

SEQ ID NO: 227930 - DNA, 120 bp, Artificial Sequence
  ENSG00000118620_32 (sequence is synthesized)
ggtgatctcccttcaagtttgctatcagaaccaaagtcctcttcatggcatgcgagactcacaatctgactgcttttccattgttttgggggacacacaaatatctacatgattttgaga

SEQ ID NO: 227931 - DNA, 77 bp, Artificial Sequence
  ENSG00000118620_33 (sequence is synthesized)
ttgttttgggggacacacaaatatctacatgattttgagaaactctatgttaaactgagtttcatgctcgttgccca

SEQ ID NO: 227932 - DNA, 64 bp, Artificial Sequence
  ENSG00000118620_34 (sequence is synthesized)
accactattttcttagttctctttttgcatcatgtctgaaatgtgtaatagtagtggtttctgt

SEQ ID NO: 227933 - DNA, 120 bp, Artificial Sequence
  ENSG00000118620_35 (sequence is synthesized)
ttgcatcatgtctgaaatgtgtaatagtagtggtttctgttccactgttttttgttgttgttgttaacttttctgcacactccattctgttcttattactatattctcgaaatatagttt

SEQ ID NO: 227934 - DNA, 120 bp, Artificial Sequence
  ENSG00000118620_36 (sequence is synthesized)
gaaattataaagcatcatgtctttctactttgttctttttcctcacgattgctttggctatttgaagtttattgttgtttcttgtaaattttagaattgtattttccattactgtgaaga

SEQ ID NO: 227935 - DNA, 120 bp, Artificial Sequence
  ENSG00000118620_37 (sequence is synthesized)
aaaatgccactgaaattttgatagggaatttattgaatctatagattacttagataataggacactttaacaatatttattttttcaatctgtagacatgcaatatttttaaatttgtgt

SEQ ID NO: 227936 - DNA, 120 bp, Artificial Sequence
  ENSG00000118620_38 (sequence is synthesized)
ataacatatctttcgttgtaaagattttttacttccttgttctcagaaatttatcattttaatgctattttaaattgttttctttctctgttaaagtgtatggaacaataacttcatact

SEQ ID NO: 227937 - DNA, 120 bp, Artificial Sequence
  ENSG00000118620_39 (sequence is synthesized)
tgtgtgttaattttatgttttgctaatttactgagtgtattaattcagacaaatttcaatgtagtgttcatggttttttatatataaaatcatatgatccacaaacagcaactttttact

SEQ ID NO: 227938 - DNA, 120 bp, Artificial Sequence
  ENSG00000118620_40 (sequence is synthesized)
tgtgttcaatttcagtggctttttaaaaatgtttttgactcattattctgccacatacttccagtgctatgttaaaatagaagcattgacaatgggcacaatgtagttttgcattagtgt

SEQ ID NO: 227939 - DNA, 120 bp, Artificial Sequence
  ENSG00000118620_41 (sequence is synthesized)
ctgtgaatttgaaggagcaaacaactcctcaagcttctataaactggtttcagtaggtaaagatctttttctgtcatgtctccagggtcatagaatgctctctgggtttgtagtggagag

SEQ ID NO: 227940 - DNA, 120 bp, Artificial Sequence
  ENSG00000118620_42 (sequence is synthesized)
ggggtgtagcttggtcacaaggctgctgggtctgcactagggtccacctttagttggcttgttacaggggcttgggtagtggtaattcccattttatttttggacagactgaatatcctt

SEQ ID NO: 227941 - DNA, 120 bp, Artificial Sequence
  ENSG00000118620_43 (sequence is synthesized)
caacactttgatctgtagagcagacaatagggcaggtttctgcagtcaggttcatatataatggtccttatatcaggatgtgaatgagtatggcgtttattgagtaccggagaggattac

SEQ ID NO: 227942 - DNA, 120 bp, Artificial Sequence
  ENSG00000118620_44 (sequence is synthesized)
tgtagttatgcagacaaattcttttttaatggtatatcagtgttgcacagcagattttatgagtaaatatgtcacttactattactgcgcagtttcatatcagtgttttgttagtgtagg

SEQ ID NO: 227943 - DNA, 120 bp, Artificial Sequence
  ENSG00000118620_45 (sequence is synthesized)
tttcttaacattgagttattgtgtttttttgtttcacttttgtattataattttagacagtttgcaattcggtttatctcttataattaagagataaatcagccatatgtctgtcacaat

SEQ ID NO: 227944 - DNA, 120 bp, Artificial Sequence
  ENSG00000118620_46 (sequence is synthesized)
tagatatatatgtgtgtgtgtgtttatctataaatatgaccccaatattggttatggcttatcttgtatatattctttcttagccaattttcagtggttgttttatctcacctaagtgag

SEQ ID NO: 227945 - DNA, 120 bp, Artificial Sequence
  ENSG00000118620_47 (sequence is synthesized)
tagtcatggaaatattttcaccatctcttattttcaccatgtgtttaatgatgatgtttctctcacctttgtgtgagagaaacacttttgtaatttgaaggtaatttttgaaaagattta

SEQ ID NO: 227946 - DNA, 120 bp, Artificial Sequence
  ENSG00000118620_48 (sequence is synthesized)
taaatctgtatttttttcagtttttcctttagaaaaattaattgttgtaaaaacacataatatttaccatcttaaatctatttaggtgtaccttttagggccagacatggtggtggctca

SEQ ID NO: 227947 - DNA, 120 bp, Artificial Sequence
  ENSG00000118620_49 (sequence is synthesized)
catctgtaatccaggattatttgagctcaaaagtttgagaccaacctgggaaacatatggagagtccctctctacaaaatgttttttaaaaatagccaggcatagtgttgtgcatctgtg

SEQ ID NO: 227948 - DNA, 120 bp, Artificial Sequence
  ENSG00000118620_50 (sequence is synthesized)
gttcaggctacttgcaagactgaggtgggagggttacttgagcctcagagtttgaggccgaagtgagccataattgtaccactgcactccagctttttgacagagtgagactgtgtctcc

SEQ ID NO: 227949 - DNA, 120 bp, Artificial Sequence
  ENSG00000118620_51 (sequence is synthesized)
gtacacaattactagtataccctaaaggtttcatttctcattttttgagaataatttttggtaatttatgctttgcataaatgagtttctgatacttgttcttaagaaaaccttgaggat

SEQ ID NO: 227950 - DNA, 84 bp, Artificial Sequence
  ENSG00000118620_52 (sequence is synthesized)
aaggaaaagagccctggaatatgaagagacatgcgatggtagatcaagctgaaacttccgccttccaggttcaagtgattctcc

SEQ ID NO: 227951 - DNA, 120 bp, Artificial Sequence
  ENSG00000118620_53 (sequence is synthesized)
ccttactaaacataagataactcatattggagatacatcttacaaatacctagaatgtgataaagcctttagccagtcttcaactcttactaaacataagaacattcatactgaagagga

SEQ ID NO: 227952 - DNA, 120 bp, Artificial Sequence
  ENSG00000118640_0 (sequence is synthesized)
accctgggaggaagccgactaggcgaattcacttactgaccggcctgggctgctctgagacatggaggaagccagtgaaggtggaggaaatgatcgtgtgcggaacctgcaaagtgaggt

SEQ ID NO: 227953 - DNA, 120 bp, Artificial Sequence
  ENSG00000118640_1 (sequence is synthesized)
ggagggagttaagaatattatgacccagaatgtggagcggatcctggcccggggggaaaacttggaacatctccgcaacaagacagaggatctggaagccacatctgagcacttcaagac

SEQ ID NO: 227954 - DNA, 120 bp, Artificial Sequence
  ENSG00000118640_2 (sequence is synthesized)
atcatcctcttcattgtgctctttgccactggtgccttctcttaagtaacagggaacctctcccacctgcccttctcttcagggacaaccctccataaatgtgtgccaagagggtctcct

SEQ ID NO: 227955 - DNA, 120 bp, Artificial Sequence
  ENSG00000118640_3 (sequence is synthesized)
ttcctgtcttcctctacagagaatgctgctcggtcctcctacccctcttcccgaggccctgctgccatgttgtatgccccagaaggtaccttggtcccccggaaggagagaaaaaagaga

SEQ ID NO: 227956 - DNA, 120 bp, Artificial Sequence
  ENSG00000118640_4 (sequence is synthesized)
gatggactgtggctgcatttcttgggtccttagagtgggctggagagacctagagggcccagcatgtggctgggaaactgttggtggccagtgggtaataaagacctttcagtatcccta

SEQ ID NO: 227957 - DNA, 120 bp, Artificial Sequence
  ENSG00000118640_5 (sequence is synthesized)
agggaggaagtaactccaaagttgagcaaagtctggagcctcaagttctgtgttcagcggggaggctggctctggctttctgagtcctgtgtgaactcttggctcttggtctgagcactt

SEQ ID NO: 227958 - DNA, 120 bp, Artificial Sequence
  ENSG00000118640_6 (sequence is synthesized)
gtaaatactacccacgaccggcggcgccggattccttgcttggcggcagggggcggaacaaggagccttggagcggggcaaaggaggaagccagtgaaggtggaggaaatgatcgtgtgc

SEQ ID NO: 227959 - DNA, 120 bp, Artificial Sequence
  ENSG00000118655_0 (sequence is synthesized)
gctttgagtgcccggctcggcctccgctcccgcgcggttgggagtgtccagcgccctccgcgatttgggctccagcgggcagggtgacttcctttttctgcccactctggtaacttattg

SEQ ID NO: 227960 - DNA, 120 bp, Artificial Sequence
  ENSG00000118655_1 (sequence is synthesized)
ctctgctgggctctttcccttagggtctctggccctgttcttgccccagcatgacttttatcgggacgccgttgtggaagcctcacgcaggagccctgcccccgtggagaagatcccact

SEQ ID NO: 227961 - DNA, 120 bp, Artificial Sequence
  ENSG00000118655_2 (sequence is synthesized)
ggtgactccaaccctaccaccatgaatggggtcctgatcccccatacgcccatcgcagtggacttctggagcctgcgccgggctggcaccgcacgtctcttcttcttgtctcacatgcac

SEQ ID NO: 227962 - DNA, 120 bp, Artificial Sequence
  ENSG00000118655_3 (sequence is synthesized)
tcggaccacaccgtgggcctgtctagcacctgggcccggcccctctactgctccccaattacagcccacctcttgcatcgtcacctacaggtatctaagcaatggatccaagccctggag

SEQ ID NO: 227963 - DNA, 120 bp, Artificial Sequence
  ENSG00000118655_4 (sequence is synthesized)
gttggtgagagccatgtattacccctagatgaaattggacaagagaccatgaccgtaaccctcctcgatgccaatcactgtcctggttctgtcatgtttctctttgaaggatattttgga

SEQ ID NO: 227964 - DNA, 120 bp, Artificial Sequence
  ENSG00000118655_5 (sequence is synthesized)
accatcctctacacaggtgattttcgatacacaccatccatgctaaaggagccagccctgacactggggaaacagatccatactttatacctagacaacaccaattgcaatccagccctg

SEQ ID NO: 227965 - DNA, 120 bp, Artificial Sequence
  ENSG00000118655_6 (sequence is synthesized)
gttcttccttcccgacaagaagctgcccaccagattgtccagctcattcgaaaacacccacaacataacataaagattggactctacagcctgggaaaggaatcactgctggagcagctg

SEQ ID NO: 227966 - DNA, 120 bp, Artificial Sequence
  ENSG00000118655_7 (sequence is synthesized)
gccctggagtttcagacctgggtggtattgagtcctcggcgcctggagttggtacagctactgggcctggcagatgtgttcacagtggaggagaaggctggccgcatccatgcagtagac

SEQ ID NO: 227967 - DNA, 120 bp, Artificial Sequence
  ENSG00000118655_8 (sequence is synthesized)
catatggagatctgccattccaacatgctgcgttggaaccagacccaccctacgattgctatccttcccacaagccgaaaaatccacagctcccaccctgatatccacgtcatcccttac

SEQ ID NO: 227968 - DNA, 120 bp, Artificial Sequence
  ENSG00000118655_9 (sequence is synthesized)
tctgaccattcctcttactccgagcttcgtgcctttgtcgcagcactgaagccttgccaggtggtgcccattgtaagtcggcggccctgtggaggctttcaggacagtctgagccccagg

SEQ ID NO: 227969 - DNA, 120 bp, Artificial Sequence
  ENSG00000118655_10 (sequence is synthesized)
atctccgtgcccctgattccggactctgtacagcaatacatgagttcttcctctagaaaaccaagccttctctggctgttagaaaggaggctaaagaggccgagaacccaaggtgttgtg

SEQ ID NO: 227970 - DNA, 120 bp, Artificial Sequence
  ENSG00000118655_11 (sequence is synthesized)
tttgaatcccctgaggaaagtgctgatcaatctcaagctgacagagactcaaagaaggccaagaaagagaaactttctccctggcctgcggaccttgaaaagcagccttcccaccatcct

SEQ ID NO: 227971 - DNA, 120 bp, Artificial Sequence
  ENSG00000118655_12 (sequence is synthesized)
ttgcggatcaagaagcagttgttcccagatctctatagcaaagaatggaacaaggcagtgcctttctgtgagtctcaaaagagggtgactatgttgacggccccactgggattttcagtg

SEQ ID NO: 227972 - DNA, 120 bp, Artificial Sequence
  ENSG00000118655_13 (sequence is synthesized)
cacttaaggtctacagatgaggagtttatttctcaaaaaaccagggaggaaattggtttagggtcccccttggtacccatgggagatgatgatggaggtccagaagccacagggaatcag

SEQ ID NO: 227973 - DNA, 120 bp, Artificial Sequence
  ENSG00000118655_14 (sequence is synthesized)
agtgcctggatgggccatggttctcccctgtcccacagcagcaagggcacccctcttctagctactgaattcaggggtctagcactcaaatatcttctgactccagtgaactttttccag

SEQ ID NO: 227974 - DNA, 120 bp, Artificial Sequence
  ENSG00000118655_15 (sequence is synthesized)
ggaaaaataccataaaccctgctgaagacaggagagtacagaatgacaacattgagcccacactgcagttttgaagatagtaactgatggctggtgggaaagagtttgtttttggggcct

SEQ ID NO: 227975 - DNA, 120 bp, Artificial Sequence
  ENSG00000118655_16 (sequence is synthesized)
acttttctatctttacaagactcttatgggcccaccgtggagcagcacttcccaaaacttgttcactggggtcctcgtgcctatggaatccttctttttataactaagtttaagaaatac

SEQ ID NO: 227976 - DNA, 120 bp, Artificial Sequence
  ENSG00000118655_17 (sequence is synthesized)
tttttttataaaatctttggagtatgcgtgagcaaattaaaagttctttgaagtcctacagtaacttaatctgtttaaccttgtttaacccagtatttctcaaacttttgtgaacatgca

SEQ ID NO: 227977 - DNA, 120 bp, Artificial Sequence
  ENSG00000118655_18 (sequence is synthesized)
atcatcttatgtgggtacagaaagaggtaaagagtctgaatcaaaaaggaccaggttattgctgttgctgttttgtggtgtcatgagccattctccatgtccccttctccctcttctcag

SEQ ID NO: 227978 - DNA, 120 bp, Artificial Sequence
  ENSG00000118655_19 (sequence is synthesized)
atcaaaatccctagggagttctatttttaaaattatgaactatggcgctgcatgcttcaatcctgaacgtcactgacttgctgtgaccatccaaataattttcctgtctctgcctctggg

SEQ ID NO: 227979 - DNA, 120 bp, Artificial Sequence
  ENSG00000118655_20 (sequence is synthesized)
agggaacaggaagcgatgaagaggtcttggaacagtagtgaaaattctacctctatgtccttcatgaggatgtgcagtatcccagtatcactgggatccatgtggaacagagccagctgg

SEQ ID NO: 227980 - DNA, 120 bp, Artificial Sequence
  ENSG00000118655_21 (sequence is synthesized)
ggggttgggcagctctctccaaggcagtacctagagcccagctgaacaacaaggctttgggtgtgaagggactccccagcctggagaccctatttggctgaaacagttacaaaatatcaa

SEQ ID NO: 227981 - DNA, 120 bp, Artificial Sequence
  ENSG00000118655_22 (sequence is synthesized)
atgtgttgtcagatattcctccaattgttcacatagctgggatatttgttgctcccctcaccccttggattatgtagggagccagtgcacacagcctgtttgttttagtatccaaggaag

SEQ ID NO: 227982 - DNA, 120 bp, Artificial Sequence
  ENSG00000118655_23 (sequence is synthesized)
agaccaaggagccagctggcgggaaggggtgggggtgtgcagtctgccctgtccttctgctcataacctgacaaaatgccaaactagtaagcaggatagctgataccacggctatgaggg

SEQ ID NO: 227983 - DNA, 120 bp, Artificial Sequence
  ENSG00000118655_24 (sequence is synthesized)
agtaggctctgagagggcacagacttgtggagctgggcgtctggatcaaaactgctttgggatggaacctcgagccctagcagtgaagaagattccatttcttgtccaggggatttaaaa

SEQ ID NO: 227984 - DNA, 120 bp, Artificial Sequence
  ENSG00000118655_25 (sequence is synthesized)
gagttttctgctttgagagagaaatagagagtttagaaagcaattgctcttgggaaagctatacacagctctgttttgtcaatgacctttgttgtaagtctcccaacgtcctattaggag

SEQ ID NO: 227985 - DNA, 120 bp, Artificial Sequence
  ENSG00000118655_26 (sequence is synthesized)
ccacagcaggtgaggcatttggtgcagcaggaaacatggggactgcctaggctcgaatctgtggcaccctgagcaattacttaaattgtggagcctagttcctcatctgtaagatggact

SEQ ID NO: 227986 - DNA, 120 bp, Artificial Sequence
  ENSG00000118655_27 (sequence is synthesized)
tgagattcctacctctcatgattactatggagattgaataattggtaaaattctcctagctcagtgactgccacaggatgggtctttcagattttggttctctttagcttctggttcttg

SEQ ID NO: 227987 - DNA, 120 bp, Artificial Sequence
  ENSG00000118655_28 (sequence is synthesized)
aaagaaattaatctgtatataacataagaaactttgaaagtcaaaaaaacaaaaaattttaattcctcgtagattaattgatttgctatcttttagtttttttttctatgcatgtagatg

SEQ ID NO: 227988 - DNA, 120 bp, Artificial Sequence
  ENSG00000118655_29 (sequence is synthesized)
tattaaatatgtaaatgtttttcaaagttgaggtaatattgtatagaattttatagcctacattttaatttcttgatatcttaagcatttcacttattagatattgttcaaaaatgccat

SEQ ID NO: 227989 - DNA, 120 bp, Artificial Sequence
  ENSG00000118655_30 (sequence is synthesized)
ttttaatatttgtataataccctatcatgtgagtataccttaactaagccattcccatattcaacattttgtgtactgtttttctaattacatatattacaatgaacaaccttatgcata

SEQ ID NO: 227990 - DNA, 120 bp, Artificial Sequence
  ENSG00000118680_0 (sequence is synthesized)
cgcagcgcaggccgcgatatcgcagcggatcggagcaggccggaggggcaattaagaccccggccgtgtgcgtccggcctcagcagccccgccgctcggcggacacgcagaccccgccgg

SEQ ID NO: 227991 - DNA, 120 bp, Artificial Sequence
  ENSG00000118680_1 (sequence is synthesized)
cccgggcgcgaacactcagcgcacccccgttccacttggtcccgccgcgccttccggtgcgccttccggtgcgccttccggtgcgccttccgctccgccccttcaggcaggaagtgtcgg

SEQ ID NO: 227992 - DNA, 120 bp, Artificial Sequence
  ENSG00000118680_2 (sequence is synthesized)
cgccgccactgtccggccacagcctaacgctcttcgctgtcgtttgtggtctcgcgcagggcggccccggttctggtgtttggcgtcggaattaaacaaccaccatgtcgagcaaaaagg

SEQ ID NO: 227993 - DNA, 120 bp, Artificial Sequence
  ENSG00000118680_3 (sequence is synthesized)
caaagaccaagaccaccaagaagcgccctcagcgtgcaacatccaatgtgtttgccatgtttgaccagtcacagattcaggagttcaaagaggccttcaacatgattgatcagaacagag

SEQ ID NO: 227994 - DNA, 120 bp, Artificial Sequence
  ENSG00000118680_4 (sequence is synthesized)
atggcttcatcgacaaggaagatttgcatgatatgcttgcttctctagggaagaatcccactgatgcataccttgatgccatgatgaatgaggccccagggcccatcaatttcaccatgt

SEQ ID NO: 227995 - DNA, 120 bp, Artificial Sequence
  ENSG00000118680_5 (sequence is synthesized)
gtttggtgagaagttaaatggcacagatcctgaagatgtcatcagaaacgcctttgcttgctttgatgaagaagcaacaggcaccattcaggaagattacctaagagagctgctgacaac

SEQ ID NO: 227996 - DNA, 120 bp, Artificial Sequence
  ENSG00000118680_6 (sequence is synthesized)
catgggggatcggtttacagatgaggaagtggatgagctgtacagagaagcacctattgacaaaaaggggaatttcaattacatcgagttcacacgcatcctgaaacatggagccaaaga

SEQ ID NO: 227997 - DNA, 120 bp, Artificial Sequence
  ENSG00000118680_7 (sequence is synthesized)
caaagatgactgaaagaactttagctaaaatcttccagttacattgtcttactctcttttacttctcagacacttcccccaccctcatagaacctgttgcatgcaacttagtttcacagc

SEQ ID NO: 227998 - DNA, 120 bp, Artificial Sequence
  ENSG00000118680_8 (sequence is synthesized)
tttgcctcttctttttgatgtatttattccagacctttctgccacttagcacttgtataatcagactggaaatggggatgagggtgtaaattgtattgaaaaagatcgcgaataaaaatc

SEQ ID NO: 227999 - DNA, 120 bp, Artificial Sequence
  ENSG00000118680_9 (sequence is synthesized)
aacaaatgtgaaagcccagaaaaatatattcgtatttctggttttgctggatttttacatttttatataataaaaatgttattttgaaataaagattatgctgactcaaatgcaatgtaa

SEQ ID NO: 228000 - DNA, 120 bp, Artificial Sequence
  ENSG00000118680_10 (sequence is synthesized)
ctgccctcccggcgccgcggcgggtcctggcggtggattggggccgacccgggcgtgttcgtgtggagcacctgccctgtgcccaacactatcctagatgctttggagggtggaggagcc

SEQ ID NO: 228001 - DNA, 120 bp, Artificial Sequence
  ENSG00000118680_11 (sequence is synthesized)
ggcgggaggagggttggtggcgaggccctggcccggacgtccaggggccgggaggctgcaggcgatggagccggtatggggagacgccctgctggagaagtggccgggtcccggccgtgc

SEQ ID NO: 228002 - DNA, 120 bp, Artificial Sequence
  ENSG00000118680_12 (sequence is synthesized)
actgaaggccttggattcaaccttaagagggagaacttagcgtttccggctagatgtgtgggaggtggtaacgagcaaaactcaaaagctgggaattgtgtcctgtgaaaagcaggccgt

SEQ ID NO: 228003 - DNA, 120 bp, Artificial Sequence
  ENSG00000118680_13 (sequence is synthesized)
tgggggtagtccttttttcaggttttcaacttcatatgattcaggttttatggtaaaattgatttttcacatatatgggacagtgttcttcagaacttttaagtaccctttaacattatt

SEQ ID NO: 228004 - DNA, 120 bp, Artificial Sequence
  ENSG00000118689_0 (sequence is synthesized)
gggaggaggaggaatgtggaaggtggcggcgcgcgagctgacaggcggttcctcgggcgggctgcggcgacggcccgagcgcttctccttcgccgaggttgcgcgccccctcctcgccgt

SEQ ID NO: 228005 - DNA, 80 bp, Artificial Sequence
  ENSG00000118689_1 (sequence is synthesized)
gccccgggcccgcgcgggatcgtgcgtcgtcccgccgcgtccctgaagggaaggaagcgaggcggcggcggcggcgcccg

SEQ ID NO: 228006 - DNA, 120 bp, Artificial Sequence
  ENSG00000118689_2 (sequence is synthesized)
gcaccccgccccggcgcgagaggagagcgcgagagccccagccgcgggcgggcgggcggcgaagatggcagaggcaccggcttccccggccccgctctctccgctcgaagtggagctgga

SEQ ID NO: 228007 - DNA, 120 bp, Artificial Sequence
  ENSG00000118689_3 (sequence is synthesized)
cccggagttcgagccccagagccgtccgcgatcctgtacgtggcccctgcaaaggccggagctccaagcgagccctgccaagccctcgggggagacggccgccgactccatgatccccga

SEQ ID NO: 228008 - DNA, 120 bp, Artificial Sequence
  ENSG00000118689_4 (sequence is synthesized)
ggaggaggacgatgaagacgacgaggacggcgggggacgggccggctcggccatggcgatcggcggcggcggcgggagcggcacgctgggctccgggctgctccttgaggactcggcccg

SEQ ID NO: 228009 - DNA, 120 bp, Artificial Sequence
  ENSG00000118689_5 (sequence is synthesized)
ggactcggcccgggtgctggcacccggagggcaagaccccgggtctgggccagccaccgcggcgggcgggctgagcgggggtacacaggcgctgctgcagcctcagcaaccgctgccacc

SEQ ID NO: 228010 - DNA, 120 bp, Artificial Sequence
  ENSG00000118689_6 (sequence is synthesized)
ggcggctgggggctccgggcagccgaggaaatgttcgtcgcggcggaacgcctggggaaacctgtcctacgcggacctgatcacccgcgccatcgagagctccccggacaaacggctcac

SEQ ID NO: 228011 - DNA, 120 bp, Artificial Sequence
  ENSG00000118689_7 (sequence is synthesized)
tctgtcccagatctacgagtggatggtgcgttgcgtgccctacttcaaggataagggcgacagcaacagctctgccggctggaagaactccatccggcacaacctgtcactgcatagtcg

SEQ ID NO: 228012 - DNA, 120 bp, Artificial Sequence
  ENSG00000118689_8 (sequence is synthesized)
attcatgcgggtccagaatgagggaactggcaagagctcttggtggatcatcaaccctgatggggggaagagcggaaaagccccccggcggcgggctgtctccatggacaatagcaacaa

SEQ ID NO: 228013 - DNA, 120 bp, Artificial Sequence
  ENSG00000118689_9 (sequence is synthesized)
gtataccaagagccgtggccgcgcagccaagaagaaggcagccctgcagacagcccccgaatcagctgacgacagtccctcccagctctccaagtggcctggcagccccacgtcacgcag

SEQ ID NO: 228014 - DNA, 120 bp, Artificial Sequence
  ENSG00000118689_10 (sequence is synthesized)
cagtgatgagctggatgcgtggacggacttccgttcacgcaccaattctaacgccagcacagtcagtggccgcctgtcgcccatcatggcaagcacagagttggatgaagtccaggacga

SEQ ID NO: 228015 - DNA, 120 bp, Artificial Sequence
  ENSG00000118689_11 (sequence is synthesized)
tgatgcgcctctctcgcccatgctctacagcagctcagccagcctgtcaccttcagtaagcaagccgtgcacggtggaactgccacggctgactgatatggcaggcaccatgaatctgaa

SEQ ID NO: 228016 - DNA, 120 bp, Artificial Sequence
  ENSG00000118689_12 (sequence is synthesized)
tgatgggctgactgaaaacctcatggacgacctgctggataacatcacgctcccgccatcccagccatcgcccactgggggactcatgcagcggagctctagcttcccgtataccaccaa

SEQ ID NO: 228017 - DNA, 120 bp, Artificial Sequence
  ENSG00000118689_13 (sequence is synthesized)
gggctcgggcctgggctccccaaccagctcctttaacagcacggtgttcggaccttcatctctgaactccctacgccagtctcccatgcagaccatccaagagaacaagccagctacctt

SEQ ID NO: 228018 - DNA, 120 bp, Artificial Sequence
  ENSG00000118689_14 (sequence is synthesized)
ctcttccatgtcacactatggtaaccagacactccaggacctgctcacttcggactcacttagccacagcgatgtcatgatgacacagtcggaccccttgatgtctcaggccagcaccgc

SEQ ID NO: 228019 - DNA, 120 bp, Artificial Sequence
  ENSG00000118689_15 (sequence is synthesized)
tgtgtctgcccagaattcccgccggaacgtgatgcttcgcaatgatccgatgatgtcctttgctgcccagcctaaccagggaagtttggtcaatcagaacttgctccaccaccagcacca

SEQ ID NO: 228020 - DNA, 120 bp, Artificial Sequence
  ENSG00000118689_16 (sequence is synthesized)
aacccagggcgctcttggtggcagccgtgccttgtcgaattctgtcagcaacatgggcttgagtgagtccagcagccttgggtcagccaaacaccagcagcagtctcctgtcagccagtc

SEQ ID NO: 228021 - DNA, 120 bp, Artificial Sequence
  ENSG00000118689_17 (sequence is synthesized)
tatgcaaaccctctcggactctctctcaggctcctccttgtactcaactagtgcaaacctgcccgtcatgggccatgagaagttccccagcgacttggacctggacatgttcaatgggag

SEQ ID NO: 228022 - DNA, 120 bp, Artificial Sequence
  ENSG00000118689_18 (sequence is synthesized)
cttggaatgtgacatggagtccattatccgtagtgaactcatggatgctgatgggttggattttaactttgattccctcatctccacacagaatgttgttggtttgaacgtggggaactt

SEQ ID NO: 228023 - DNA, 120 bp, Artificial Sequence
  ENSG00000118689_19 (sequence is synthesized)
cactggtgctaagcaggcctcatctcagagctgggtgccaggctgaaggatcactgaggaaggggaagtgggcaaagcagaccctcaaactgacacaagacctacagagaaaaccctttg

SEQ ID NO: 228024 - DNA, 120 bp, Artificial Sequence
  ENSG00000118689_20 (sequence is synthesized)
ccaaatctgctctcagcaagtggacagtgataccgtttacagcttaacacctttgtgaatcccacgccattttcctaacccagcagagactgttaatggccccttaccctgggtgaagca

SEQ ID NO: 228025 - DNA, 120 bp, Artificial Sequence
  ENSG00000118689_21 (sequence is synthesized)
cttacccttggaacagaactctaaaaagtatgcaaaatcttccttgtacagggtggtgagccgcctgccagtggaggacagcacccctcagcaccacccaccctcattcagagcacaccg

SEQ ID NO: 228026 - DNA, 120 bp, Artificial Sequence
  ENSG00000118689_22 (sequence is synthesized)
tgagcccccgtcggccattctgtggtgttttaatattgcgatggtttatgggacgttttaagtgttgttcttgtgtttgttttcctttgactttctgagtttttcacatgcattaacttg

SEQ ID NO: 228027 - DNA, 120 bp, Artificial Sequence
  ENSG00000118689_23 (sequence is synthesized)
cggtatttttctgttaaaatgttaaccgtccttcccctagcaaatttaaaaacagaaagaaaatgttgtaccagttaccattccgggttcgagcatcacaagcttttgagcgcatggaac

SEQ ID NO: 228028 - DNA, 120 bp, Artificial Sequence
  ENSG00000118689_24 (sequence is synthesized)
tccataaactaacaaattacataaactaaagggggattttctttcttcttttgtttggtagaaaattatccttttctaaaaactgaacaatggcacaattgtttgctatgtgcacccgtc

SEQ ID NO: 228029 - DNA, 120 bp, Artificial Sequence
  ENSG00000118689_25 (sequence is synthesized)
caggacagaaccgtgcataggcaaaaggagtggagcacagcgtccggcccagtgtgtttccggttctgagtcagggtgatctgtggacgggaccccagcaccaagtctacgggtgccaga

SEQ ID NO: 228030 - DNA, 120 bp, Artificial Sequence
  ENSG00000118689_26 (sequence is synthesized)
tcagtagggcctgtgatttcctgtcagtgtcctcagctaatgtgaacagtgttggtctgctggttagaaactagaatattgatattttcaggaaagaaatcagctcagctctccactcat

SEQ ID NO: 228031 - DNA, 120 bp, Artificial Sequence
  ENSG00000118689_27 (sequence is synthesized)
aaaggaaaaaaaaaaaaaacaaaaaagtcctgttttgctttgcagaacaaatgaacttacaggtgagcattaagcttgcagtgagaaatgtgcgaagagtaaaaacccaagtcaatgctg

SEQ ID NO: 228032 - DNA, 120 bp, Artificial Sequence
  ENSG00000118689_28 (sequence is synthesized)
gtgagaaatgtgcgaagagtaaaaacccaagtcaatgctgaggcagttctaacttcactgttttcctaaatacacatccttgattattttcagccttgctatataatctgatctgctaga

SEQ ID NO: 228033 - DNA, 120 bp, Artificial Sequence
  ENSG00000118689_29 (sequence is synthesized)
agtgtatgagtgagaggcaatagcatacaaactgattttttaaatataagcttaggttgtaattgtacaagtgactcaatggaagtacaaaatagggcagttttaacttttttttctgct

SEQ ID NO: 228034 - DNA, 120 bp, Artificial Sequence
  ENSG00000118689_30 (sequence is synthesized)
aatagttgggaccacctttggtacataagaaattggtataacgatgctctgattagcacagtatatgcatacttctccaaagtgatatatgaagactcttttctttgcataaaaagcatt

SEQ ID NO: 228035 - DNA, 120 bp, Artificial Sequence
  ENSG00000118689_31 (sequence is synthesized)
aggcatataaatgtataaatatattttatcatgtacagtacaaaaatggaaccttatgcatgggccttaggaatacaggctagtatttcagcacagacttccctgcttgagttcttgctg

SEQ ID NO: 228036 - DNA, 120 bp, Artificial Sequence
  ENSG00000118689_32 (sequence is synthesized)
atgcttgcaccgtgacagtgggcaccaacacagacgtgccacccaaccccctgcacacaccaccggccaccaggggcccccttgtgcgccttggctttataactcctctgggggtgatat

SEQ ID NO: 228037 - DNA, 120 bp, Artificial Sequence
  ENSG00000118689_33 (sequence is synthesized)
tggtggtgatcacagctcctagcataatgagagttccatttggtattgtcacacgtctcctgcctcgcttgggttgccatgtttgagcgatggccctgttgatttcaccctgccttttac

SEQ ID NO: 228038 - DNA, 120 bp, Artificial Sequence
  ENSG00000118689_34 (sequence is synthesized)
tgaatctgtaaattgttgtgcaattgtggttatagtagactgtagcacattgccttttctaaactgctacatgtttataatcttcatttttaaagtatgtgtaatttttttaagtatgta

SEQ ID NO: 228039 - DNA, 120 bp, Artificial Sequence
  ENSG00000118689_35 (sequence is synthesized)
ttctattcatatggtctgcttgtcagtgagccagacttgcttactatattcctttataataatgctagccacttcctggattctttagtaatgtgctgtatgcaagaactttccagtagc

SEQ ID NO: 228040 - DNA, 120 bp, Artificial Sequence
  ENSG00000118689_36 (sequence is synthesized)
agtgaaggagggttgcctctccaagcttcctaagggatgctgccctgtgtggggatgcattgcagaggcactagtagcatgggggctagagtggggagcgagatgtaaaagggtgggggg

SEQ ID NO: 228041 - DNA, 120 bp, Artificial Sequence
  ENSG00000118689_37 (sequence is synthesized)
ataggagaattccagagtgcttccagcattagggtcctgagaacttctgagttcagagaaacatgcaaagtgactaacaaaatagctacttacctttgcagttttacagaccctgggagc

SEQ ID NO: 228042 - DNA, 120 bp, Artificial Sequence
  ENSG00000118689_38 (sequence is synthesized)
tgctttgggagtgagaaaggcaaccctccaatgtgtttcaactttaaaatgttgaattcttttcagacatggtatctcatttattctccttttctagcgtttgttgaatttcaggcagaa

SEQ ID NO: 228043 - DNA, 120 bp, Artificial Sequence
  ENSG00000118689_39 (sequence is synthesized)
tgtcttacagaatgtcctagaaccagattatcatttaatctgaaacagctgaggaagggacagagaaggtacaagggcaaggcagcacaaaacagatcaggagaatgaagagggaatgct

SEQ ID NO: 228044 - DNA, 120 bp, Artificial Sequence
  ENSG00000118689_40 (sequence is synthesized)
ttgttttgttttgttttttctttttcaagtaactaaaacagcatctacatgtagagtgttgtggagagctgagaccagggtaaagtcaagtgcagcatcagtactgcgagacccaccagc

SEQ ID NO: 228045 - DNA, 120 bp, Artificial Sequence
  ENSG00000118689_41 (sequence is synthesized)
ccaccagcccctggagagggtcagccgagaatctggtagtgaagcctgtctagggtcccggcaccctcaccctcagccacctgcagagaggccagggccccagagactagcctggttctg

SEQ ID NO: 228046 - DNA, 120 bp, Artificial Sequence
  ENSG00000118689_42 (sequence is synthesized)
aagtgggcaggggtgctgccagagccctctgccccttatgttgagaccctgctttcaggacaggccagccgttggccaccatgtcacattctgagtgagtgtcacaggtccctaacaata

SEQ ID NO: 228047 - DNA, 120 bp, Artificial Sequence
  ENSG00000118689_43 (sequence is synthesized)
attttctgatctggagcatatcagcagaatgcttagcctcaaggggcctggcagctgtaatgtttgatttatgatgagaactatccgaggccacccttggcctctaaataagctgctcta

SEQ ID NO: 228048 - DNA, 120 bp, Artificial Sequence
  ENSG00000118689_44 (sequence is synthesized)
gggagccgcctactttttgatgagaaattagaagagtacctaatgttgaaaacatgacatgcgctcttgggatctgctgttctctccagggctccagaacctgatacctgttaccaaagc

SEQ ID NO: 228049 - DNA, 120 bp, Artificial Sequence
  ENSG00000118689_45 (sequence is synthesized)
taggaaagagctttatcacaagccttcactgtcctggcatgagaactggctgccaggctcagtgtaccccattaactgtgaatgaatctgagcttggtttcctttattgcttcctctgca

SEQ ID NO: 228050 - DNA, 120 bp, Artificial Sequence
  ENSG00000118689_46 (sequence is synthesized)
atatgattgctgaaacacattttaaaaattcagaagcttgtcactcctgttaatgggaggatcagtcacacatgtgtagtacaaggcggactttgtgtttgtttttggtgttaattttta

SEQ ID NO: 228051 - DNA, 120 bp, Artificial Sequence
  ENSG00000118689_47 (sequence is synthesized)
gcattgtgtgtgttgcttccccaccctgaggagaggacaccatggcttactactcaggacaagtatgccccgctcagggtgtgatttcaggtggcttccaaacttgtacgcagtttaaag

SEQ ID NO: 228052 - DNA, 120 bp, Artificial Sequence
  ENSG00000118689_48 (sequence is synthesized)
atggtggggacagactttgcctctacctagtgaaccccacttaaagaataaggagcatttgaatctcttggaaaaggccatgaagaataaagcagtcaaaaagaagtcctccatgttggt

SEQ ID NO: 228053 - DNA, 86 bp, Artificial Sequence
  ENSG00000118689_49 (sequence is synthesized)
tgaagaataaagcagtcaaaaagaagtcctccatgttggtgccaaggacttgcgaggggaaataaaaatgttatttaaaaatacaa

SEQ ID NO: 228054 - DNA, 60 bp, Artificial Sequence
  ENSG00000118689_50 (sequence is synthesized)
ggcggaggtgtcaaaaaaaaaaaaaaaatgttactcatcctctctgaaagcaaaaaggaa

SEQ ID NO: 228055 - DNA, 120 bp, Artificial Sequence
  ENSG00000118689_51 (sequence is synthesized)
aaaaaaaatgttactcatcctctctgaaagcaaaaaggaaaccctaacagctctgaactctggttttatttttcttgctgtatttgggtgaacattgtatgattaggcataatgttaaaa

SEQ ID NO: 228056 - DNA, 120 bp, Artificial Sequence
  ENSG00000118689_52 (sequence is synthesized)
aaaaaaatttttttttggtagaaatgcaatcaccagtaaagaggtacgaaaaagctagcctctctcagagaccggggaggcagagtactactagaggaagtgaagttctgatggaatcat

SEQ ID NO: 228057 - DNA, 120 bp, Artificial Sequence
  ENSG00000118689_53 (sequence is synthesized)
gcctgtcaaatgaggtcttgaagcggatgcccaaataaaagagtatattttatctaaatcttaagtgggtaacattttatgcagtttaaatgaatggaatattttcctcttgtttagttg

SEQ ID NO: 228058 - DNA, 120 bp, Artificial Sequence
  ENSG00000118689_54 (sequence is synthesized)
tatctgtttgtatttttctttgatgaatgattggtcatgaggcctcttgccacactccagaaatacgtgtgcggctgcttttaagaactatgtgtctggtcacttatttctctaaaatta

SEQ ID NO: 228059 - DNA, 120 bp, Artificial Sequence
  ENSG00000118689_55 (sequence is synthesized)
tctcattgcctggcaatcagtcttctcttgtatacttgtcctagcacattatgtacatgggaaatgtaaacaaatgtgaaggaggaccagaaaaattagttaatatttaaaaaaatgtat

SEQ ID NO: 228060 - DNA, 120 bp, Artificial Sequence
  ENSG00000118689_56 (sequence is synthesized)
tgtgcattttggcttcacatgtttaactttttttaagaaaaaagttgcatgaatggaaaaaaaaatctgtatacagtatctgtaaaaactatcttatctgtttcaattccttgctcatat

SEQ ID NO: 228061 - DNA, 120 bp, Artificial Sequence
  ENSG00000118689_57 (sequence is synthesized)
cccatataatctagaactaaatatggtgtgtggccatatttaaacacctgagagtcaagcagttgagactttgatttgaagcacctcatccttctttcaatgcgaacactatcatatggc

SEQ ID NO: 228062 - DNA, 120 bp, Artificial Sequence
  ENSG00000118689_58 (sequence is synthesized)
attcttactgaggattttgtctaaccatatgttgccatgaattaactctgccgcctttcttaaggatcaaaaccagtttgatttgggaatcttcccctttccaaatgaaatagagatgca

SEQ ID NO: 228063 - DNA, 120 bp, Artificial Sequence
  ENSG00000118689_59 (sequence is synthesized)
gtacttaactttccttggtgtttgtagatattgccttgtgtattccacttaaaaccgtaatctagtttgtaaaagagatggtgacgcatgtaaataaagcatcagtgacactctatctta

SEQ ID NO: 228064 - DNA, 120 bp, Artificial Sequence
  ENSG00000118689_60 (sequence is synthesized)
ggtgtctgctgcgccaggttcgctggccgcacgtcttcaggtcctcctgttcctgggaggcgggcgcggcaggactgggaggtggcggcagcgggcgaggactcgccgaggacggggctc

SEQ ID NO: 228065 - DNA, 120 bp, Artificial Sequence
  ENSG00000118689_61 (sequence is synthesized)
gagtggacagtctccacaaggtaaacatggtttggaagggctgaagcggacgtagggtacaaaatttaagaaattaccagttacttctgactggcacggcacctctgaaatactttttta

SEQ ID NO: 228066 - DNA, 120 bp, Artificial Sequence
  ENSG00000118690_0 (sequence is synthesized)
agtggccgagcggcgtcgtggggttaccccgcccgcgccagcgctgcatccctggccgctacccggggagagccggaggatgaattgaacctcgcagccgctgctatctccagtgctcat

SEQ ID NO: 228067 - DNA, 120 bp, Artificial Sequence
  ENSG00000118690_1 (sequence is synthesized)
cacagggtgtggtgtctatctgaagaatattttactttcaaaggaaagatgctgtctccaaatgataaaatgttaggaaaactggatccattttatcaaccttcagtgtccaagcagaag

SEQ ID NO: 228068 - DNA, 120 bp, Artificial Sequence
  ENSG00000118690_2 (sequence is synthesized)
accagtgcagaaatcataagtgaagcaagaaatgcattaagaacagttagaacccaaagaccatttacaccacaggaggctcaaagaaaactattcggacctgcatcctcaagaacatca

SEQ ID NO: 228069 - DNA, 120 bp, Artificial Sequence
  ENSG00000118690_3 (sequence is synthesized)
gaaaatagacctccttcctccttcagcctccatgcatccagttttgagtcatctgattccaggcctatctctggcacacgtcttagtccactagagctgaaaccgaaagttccagcatct

SEQ ID NO: 228070 - DNA, 120 bp, Artificial Sequence
  ENSG00000118690_4 (sequence is synthesized)
cccaccagagaggaggattcctgcttttcctttcctaagcccccagtggaccctgcgaagattagaagagtaagcaacgccagggctcgcttattcagggctgcctcccagcgggccctt

SEQ ID NO: 228071 - DNA, 120 bp, Artificial Sequence
  ENSG00000118690_5 (sequence is synthesized)
ctgccggacagatcccttcctccctccgactcaaagaagacagtggaatccaaagaaacagttatgatgggggactctatggtgaaaataaatgggatttatttaacaaaatcaaatgct

SEQ ID NO: 228072 - DNA, 120 bp, Artificial Sequence
  ENSG00000118690_6 (sequence is synthesized)
atttgccacttaaagagtcacccacttcagctaactgatgatggaggcttcagtgaaataaaggagcaagaaatgttcaaaggaacaacatctttaccatctcatctcaagaatggaggg

SEQ ID NO: 228073 - DNA, 120 bp, Artificial Sequence
  ENSG00000118690_7 (sequence is synthesized)
gaccaggggaagagacatgcgagggcctcatcatgccccagtagctcagacctgagcaggctgcaaaccaaagcagtcccaaaagctgacctgcaagaagaggacgcagaaatagaagta

SEQ ID NO: 228074 - DNA, 120 bp, Artificial Sequence
  ENSG00000118690_8 (sequence is synthesized)
gacgaagtcttttggaatacaaggattgtaccgattttgcgtgaattagaaaaggaagaaaacattgaaacggtttgtgctgcttgcacacaacttcatcatgctttagaggaaggaaac

SEQ ID NO: 228075 - DNA, 120 bp, Artificial Sequence
  ENSG00000118690_9 (sequence is synthesized)
atgcttggaaataaatttaagggaagaagtattctcctgaagaccctgtgtaaactagttgatgttggttcagactcgctcagccttaaacttgcaaaaataattctagcacttaaagtg

SEQ ID NO: 228076 - DNA, 120 bp, Artificial Sequence
  ENSG00000118690_10 (sequence is synthesized)
agtagaaagaatcttcttaatgtctgcaaacttatatttaaaattagcaggaatgagaagaatgattctttgattcaaaatgacagcattctggaatcattattggaggtactaagaagt

SEQ ID NO: 228077 - DNA, 120 bp, Artificial Sequence
  ENSG00000118690_11 (sequence is synthesized)
gaagacctgcaaactaacatggaagcttttttatactgtatggggtctataaagttcatttctggaaatctgggatttcttaatgaaatgatcagcaaaggtgctgtggaaatactgata

SEQ ID NO: 228078 - DNA, 120 bp, Artificial Sequence
  ENSG00000118690_12 (sequence is synthesized)
aatttgataaaacaaataaatgagaacatcaagaaatgtggtacatttttgcctaattcgggccacttgctagtccaggtgactgctacattgagaaacttggttgattcatcattagta

SEQ ID NO: 228079 - DNA, 120 bp, Artificial Sequence
  ENSG00000118690_13 (sequence is synthesized)
agaagtaagttcctaaacatcagtgcccttccccagctctgcacggcaatggaacagtacaagggtgacaaggacgtctgtaccaatattgccagaatattcagcaaacttacttcttac

SEQ ID NO: 228080 - DNA, 120 bp, Artificial Sequence
  ENSG00000118690_14 (sequence is synthesized)
cgtgactgctgcacagccttggccagctattccagatgttatgccttatttctgaatctaattaacaaataccagaagaagcaggatttagtcgtccgtgttgtttttattcttggcaac

SEQ ID NO: 228081 - DNA, 120 bp, Artificial Sequence
  ENSG00000118690_15 (sequence is synthesized)
taaccaggctcgtgaacaattttccaaagagaaagggagcatccaaactctgctgtcattattccagacgttccatcagctggatctgcattcccagaagccggtgggccaacgaggcga

SEQ ID NO: 228082 - DNA, 120 bp, Artificial Sequence
  ENSG00000118690_16 (sequence is synthesized)
gcagcacagggcgcagaggccgccgtcagaggcagaggacgtgctcatcaagctgactcgtgtgctggccaacattgccatccacccgggcgtgggcccggtgctggccgccaacccggg

SEQ ID NO: 228083 - DNA, 120 bp, Artificial Sequence
  ENSG00000118690_17 (sequence is synthesized)
gatagtgggcctgctcctgaccacgctggaatacaagtcacttgatgattgtgaggagctggtgatcaatgctacagcgacaatcaacaatttatcttactaccaagtgaagaattccat

SEQ ID NO: 228084 - DNA, 120 bp, Artificial Sequence
  ENSG00000118690_18 (sequence is synthesized)
aattcaagacaaaaagctatatattgctgaattgctcttaaagcttcttgtcagtaacaacatggatggaatcctggaggctgtgcgtgttttcggaaatctctcccaggaccatgatgt

SEQ ID NO: 228085 - DNA, 120 bp, Artificial Sequence
  ENSG00000118690_19 (sequence is synthesized)
ctgcgatttcattgtgcagaacaatgtccacaggttcatgatggcgctgctggatgctcagcatcaggatatctgcttttctgcctgtggtgttctcctcaatctcactgtggataaaga

SEQ ID NO: 228086 - DNA, 120 bp, Artificial Sequence
  ENSG00000118690_20 (sequence is synthesized)
caagcgtgtcatcttgaaagaaggaggtggcattaaaaagttagtggactgtttaagagatttgggtcctactgattggcagctggcctgcttggtttgtaaaactttatggaacttcag

SEQ ID NO: 228087 - DNA, 120 bp, Artificial Sequence
  ENSG00000118690_21 (sequence is synthesized)
tgaaaacatcactaatgcttcgtcatgttttggaaatgaagacaccaacacactcttactcttgctctcatcatttttagatgaagaactagcactggatggcagttttgatccagacct

SEQ ID NO: 228088 - DNA, 120 bp, Artificial Sequence
  ENSG00000118690_22 (sequence is synthesized)
aaaaaactatcacaaactccattgggaaacagaattcaaacctgtggcacagcagcttctaaaccgaattcagagacatcacaccttcctggaacccctgcccattccctctttctaaca

SEQ ID NO: 228089 - DNA, 120 bp, Artificial Sequence
  ENSG00000118690_23 (sequence is synthesized)
tgatgcagattaacagtagaaacgagaactcacgtctccctcattcttaagaactggtaacaaacgtgaacatttttttcagcattaacaaatgtggaaagtttttcaagaactggtttt

SEQ ID NO: 228090 - DNA, 120 bp, Artificial Sequence
  ENSG00000118690_24 (sequence is synthesized)
agtgagtagctgaagtattttttaaaattaagcatttcttcttgttaggtattatggaaaaatgaatatacacattatatttcctgttgagagaaatgtaagatgaaaatatgtgcattt

SEQ ID NO: 228091 - DNA, 120 bp, Artificial Sequence
  ENSG00000118690_25 (sequence is synthesized)
tcaagtaaatgactttttcttctattctctattaaacaatttagttctagtcttaaaatcttgatttaacaattttggaattgaagtgttcataagttaaatgaactgtgcaatgaaggc

SEQ ID NO: 228092 - DNA, 120 bp, Artificial Sequence
  ENSG00000118690_26 (sequence is synthesized)
tgttagattatatagaaagaagggtaggcaacatgagtggaacacgttacaacataggatctgtactaattcttactatgtcaaataataaatgctctcattaggtaccagtattttttt

SEQ ID NO: 228093 - DNA, 120 bp, Artificial Sequence
  ENSG00000118690_27 (sequence is synthesized)
ggtctttatattaagagaaggagtaagcagaaaaacttaaagaaaactgctttgggccatctgttctttattaaataagtaaaatagataaaatgagagtatattttcatttgaaataaa

SEQ ID NO: 228094 - DNA, 120 bp, Artificial Sequence
  ENSG00000118690_28 (sequence is synthesized)
atgactggactaagacagtccttctaattgtaactctctgtgtttgacaggtgaggtaatgtattagaaagaatgcaggcttaggtgaatggtatacctgaatctgaatccatgctctcc

SEQ ID NO: 228095 - DNA, 120 bp, Artificial Sequence
  ENSG00000118690_29 (sequence is synthesized)
cctgctagctttgtgggcctggagcaagtaacttaatttcttgagctgcaactgcaaaatgggaatcatatcaattttactgtagtgtagtttggaacaaaccattaaatgggcaaatgg

SEQ ID NO: 228096 - DNA, 120 bp, Artificial Sequence
  ENSG00000118690_30 (sequence is synthesized)
cccagtccagtgtatcatgtggagtgggtgttcaagaacattatgatggcaagcactttcttagcttgccatcctttgtaggatgagtttggcctttgaataaatgattaaagagcaaaa

SEQ ID NO: 228097 - DNA, 120 bp, Artificial Sequence
  ENSG00000118690_31 (sequence is synthesized)
gcgaagtgggagggtggccgggcggggtgaggatgctgctgcgccctgccctggccgggaccgtggaggagcgggcactgccgtgggtgggggagccgctgtccgagcgggagggtgtgg

SEQ ID NO: 228098 - DNA, 120 bp, Artificial Sequence
  ENSG00000118690_32 (sequence is synthesized)
taagaaaagagggcttctggttaaaggcacaaaggcattctccagtaatccaatgaaagcagcaaagaatgaaaaacagagaagtaaatttcatcaatgaaacaacaacaaaaaaatggc

SEQ ID NO: 228099 - DNA, 120 bp, Artificial Sequence
  ENSG00000118690_33 (sequence is synthesized)
tacgaccctgaactacacaacatgaagcaaactttacactgcagtataggcttgatttttgttggtctgtctagcaaacaggccttctcacattgtgtaataaatgctgctcagtccgta

SEQ ID NO: 228100 - DNA, 120 bp, Artificial Sequence
  ENSG00000118702_0 (sequence is synthesized)
gtgaaggatgccactctgggtgttcttctttgtgatcctcaccctcagcaacagctcccactgctccccacctccccctttgaccctcaggatgcggcggtatgcagatgccatcttcac

SEQ ID NO: 228101 - DNA, 120 bp, Artificial Sequence
  ENSG00000118702_1 (sequence is synthesized)
gggcacggcttggtcgtcaggtagacagcatgtgggcagaacaaaagcaaatggaattggagagcatcctggtggccctgctgcagaagcacagcaggaactcccagggatgaagattcc

SEQ ID NO: 228102 - DNA, 120 bp, Artificial Sequence
  ENSG00000118702_2 (sequence is synthesized)
tcctgtgacccgggctacctgtagccaaaatgcaactggatccagttaatcctctcatttctgacccactttttcctttgaaaatacaataaaattcccccataccggtgtgcatttaaa

SEQ ID NO: 228103 - DNA, 120 bp, Artificial Sequence
  ENSG00000118705_0 (sequence is synthesized)
ggactccggcgggacctgctcggaggaatggcgccgccgggttcaagcactgtcttcctgttggccctgacaatcatagccagcacctgggctctgacgcccactcactacctcaccaag

SEQ ID NO: 228104 - DNA, 120 bp, Artificial Sequence
  ENSG00000118705_1 (sequence is synthesized)
catgacgtggagagactaaaagcctcgctggatcgccctttcacaaatttggaatctgccttctactccatcgtgggactcagcagccttggtgctcaggtgccagatgcaaagaaagca

SEQ ID NO: 228105 - DNA, 120 bp, Artificial Sequence
  ENSG00000118705_2 (sequence is synthesized)
tgtacctacatcagatctaaccttgatcccagcaatgtggattccctcttctacgctgcccaggccagccaggccctctcaggatgtgagatctctatttcaaatgagaccaaagatctg

SEQ ID NO: 228106 - DNA, 120 bp, Artificial Sequence
  ENSG00000118705_3 (sequence is synthesized)
cttctggcagctgtcagtgaggactcatctgttacccagatctaccatgcagttgcagctctaagtggctttggccttcccttggcatcccaagaagcactcagtgcccttactgctcgt

SEQ ID NO: 228107 - DNA, 120 bp, Artificial Sequence
  ENSG00000118705_4 (sequence is synthesized)
ctcagcaaggaggagactgtgctggcaacagtccaggctctgcagacagcatcccacctgtcccagcaggctgacctgaggagcatcgtggaggagattgaggaccttgttgctcgcctg

SEQ ID NO: 228108 - DNA, 120 bp, Artificial Sequence
  ENSG00000118705_5 (sequence is synthesized)
gatgaactcgggggcgtgtatctccagtttgaagaaggactggaaacaacagcgttatttgtggctgccacctacaagctcatggatcatgtggggactgagccatccattaaggaggat

SEQ ID NO: 228109 - DNA, 120 bp, Artificial Sequence
  ENSG00000118705_6 (sequence is synthesized)
caggtcatccagctgatgaacgcgatcttcagcaagaagaactttgagtccctctccgaagccttcagcgtggcctctgcagctgctgtgctctcgcataatcgctaccacgtgccagtt

SEQ ID NO: 228110 - DNA, 120 bp, Artificial Sequence
  ENSG00000118705_7 (sequence is synthesized)
gtggttgtgcctgagggctctgcttccgacactcatgaacaggctatcttgcggttgcaagtcaccaatgttctgtctcagcctctgactcaggccactgttaaactagaacatgctaaa

SEQ ID NO: 228111 - DNA, 120 bp, Artificial Sequence
  ENSG00000118705_8 (sequence is synthesized)
tctgttgcttccagagccactgtcctccagaagacatccttcacccctgtaggggatgtttttgaactaaatttcatgaacgtcaaattttccagtggttattatgacttccttgtcgaa

SEQ ID NO: 228112 - DNA, 120 bp, Artificial Sequence
  ENSG00000118705_9 (sequence is synthesized)
gcatcacaaatgttgatctttccaccgtggataaggatcagagcattgcacccaaaactacccgggtgacatacccagccaaagccaagggcacattcatcgcagacagccaccagaact

SEQ ID NO: 228113 - DNA, 120 bp, Artificial Sequence
  ENSG00000118705_10 (sequence is synthesized)
tcgccttgttcttccagctggtagatgtgaacactggtgctgaactcactcctcaccagacatttgtccgactccataaccagaagactggccaggaagtggtgtttgttgccgagccag

SEQ ID NO: 228114 - DNA, 120 bp, Artificial Sequence
  ENSG00000118705_11 (sequence is synthesized)
acaacaagaacgtgtacaagtttgaactggatacctctgaaagaaagattgaatttgactctgcctctggcacctacactctctacttaatcattggagatgccactttgaagaacccaa

SEQ ID NO: 228115 - DNA, 120 bp, Artificial Sequence
  ENSG00000118705_12 (sequence is synthesized)
tcctctggaatgtggctgatgtggtcatcaagttccctgaggaagaagctccctcgactgtcttgtcccagaaccttttcactccaaaacaggaaattcagcacctgttccgcgagcctg

SEQ ID NO: 228116 - DNA, 120 bp, Artificial Sequence
  ENSG00000118705_13 (sequence is synthesized)
agaagaggccccccaccgtggtgtccaatacattcactgccctgatcctctcgccgttgcttctgctcttcgctctgtggatccggattggtgccaatgtctccaacttcacttttgctc

SEQ ID NO: 228117 - DNA, 120 bp, Artificial Sequence
  ENSG00000118705_14 (sequence is synthesized)
ctagcacgattatatttcacctgggacatgctgctatgctgggactcatgtatgtctactggactcagctcaacatgttccagaccttgaagtacctggccatcctgggcagtgtgacgt

SEQ ID NO: 228118 - DNA, 120 bp, Artificial Sequence
  ENSG00000118705_15 (sequence is synthesized)
ttctggctggcaatcggatgctggcccagcaggcagtcaagagaacagcacattagttccagaagaaagatggaaattctgaaaactgaatgtcaagaaaaggagtcaagaacaattcac

SEQ ID NO: 228119 - DNA, 120 bp, Artificial Sequence
  ENSG00000118705_16 (sequence is synthesized)
agtatgagaagaaaaatggaaaaaaaaaactttatttaaaaaagaaaaaagtccagattgtagttatacttttgcttgtttttcagtttccccaacacacagcagatacctggtgagctc

SEQ ID NO: 228120 - DNA, 120 bp, Artificial Sequence
  ENSG00000118705_17 (sequence is synthesized)
agatagtctctttctctgacactgtgtaagaagctgtgaatattcctaacttacccagatgttgcttttgaaaagttgaaatgtgtaattgttttggaataaagagggtaacaataggaa

SEQ ID NO: 228121 - DNA, 120 bp, Artificial Sequence
  ENSG00000118705_18 (sequence is synthesized)
gactgggatcccggccgcggctgctggaagcgtcgaagctcagcggggccgcggacactgacctgtgcttagaactcatcctggcccgcagagcctgccgcgagtccctggcgtcccctg

SEQ ID NO: 228122 - DNA, 120 bp, Artificial Sequence
  ENSG00000118705_19 (sequence is synthesized)
ttttttcagttatggtcttagatgtgagtcagagaatattatctattgagtttcacccacttctctgcccctgtgcttttacagactgtccttatttttctaggctgatgtggtcatcaa

SEQ ID NO: 228123 - DNA, 120 bp, Artificial Sequence
  ENSG00000118705_20 (sequence is synthesized)
tgttcctggatgagccacctccatgttgagcctgtaaaactggcctaatatgttctctatgagtcactgcattgctctgcaaatcagataaaacgtcactcgtaggttcaagcactgtct

SEQ ID NO: 228124 - DNA, 80 bp, Artificial Sequence
  ENSG00000118707_0 (sequence is synthesized)
gtgctttccagccgcgagctgtcaggccgagtgtcaggccgggcaggtacgcggcgcgcgcccccggcgccccccgctcc

SEQ ID NO: 228125 - DNA, 120 bp, Artificial Sequence
  ENSG00000118707_1 (sequence is synthesized)
ccgaaagccgctgggaaaagtttacccaaggtccagcctagcccctaggcaccatgtcggacagtgatctaggtgaggacgaaggcctcctctccctggcgggcaaaaggaagcgcaggg

SEQ ID NO: 228126 - DNA, 120 bp, Artificial Sequence
  ENSG00000118707_2 (sequence is synthesized)
ggaacctgcccaaggagtcggtgaagatcctccgggactggctgtacttgcaccgctacaacgcctacccctcagagcaggagaagctgagcctttctggacagaccaacctgtcagtgc

SEQ ID NO: 228127 - DNA, 120 bp, Artificial Sequence
  ENSG00000118707_3 (sequence is synthesized)
tgcaaatatgtaactggttcatcaatgcccggcggcggcttctcccagacatgcttcggaaggatggcaaagaccctaatcagtttaccatttcccgccgcgggggtaaggcctcagatg

SEQ ID NO: 228128 - DNA, 120 bp, Artificial Sequence
  ENSG00000118707_4 (sequence is synthesized)
tggccctcccccgtggcagcagcccctcagtgctggctgtgtctgtcccagcccccaccaatgtgctctccctgtctgtgtgctccatgccgcttcactcaggccagggggaaaagccag

SEQ ID NO: 228129 - DNA, 120 bp, Artificial Sequence
  ENSG00000118707_5 (sequence is synthesized)
cagcccctttcccacgtggggagctggagtctcccaagcccctggtgacccctggtagcacacttactctgctgaccagggctgaggctggaagccccacaggtggactcttcaacacgc

SEQ ID NO: 228130 - DNA, 120 bp, Artificial Sequence
  ENSG00000118707_6 (sequence is synthesized)
caccacccacacccccagagcaggacaaagaggacttcagcagcttccagctgctggtggaggtggcgctacagagggctgctgagatggagcttcagaagcagcaggacccatcactcc

SEQ ID NO: 228131 - DNA, 120 bp, Artificial Sequence
  ENSG00000118707_7 (sequence is synthesized)
cattactgcacactcccatccctttagtctctgaaaatccccagtaggcatctgccaagaagggtgctgaaggctccagccagctgtcctgggtttccgttttggttccctttcatacag

SEQ ID NO: 228132 - DNA, 120 bp, Artificial Sequence
  ENSG00000118707_8 (sequence is synthesized)
agggttttctatggatcactgccaaacattgggatcatctcctctgtccagaggtcttcaacaggaagatgccagctggcaccactgcactgtgatgggggccctctcctctgctgactc

SEQ ID NO: 228133 - DNA, 120 bp, Artificial Sequence
  ENSG00000118707_9 (sequence is synthesized)
tgccgtttctccaggcctccgctcagtgatgagaccaagagatcggagacaagcatggtgctgctgcttctgctgcttctccagaaaatccctgggacacctttgttccagcctggtttc

SEQ ID NO: 228134 - DNA, 120 bp, Artificial Sequence
  ENSG00000118707_10 (sequence is synthesized)
ctgggctgggctcaggaaagctgccaaattcagtcctatgttgggtccaagctgcccctgtgctgtttctgtcaagccaggtgtggacattccaagttcatatgcgtgaacaaaagaaaa

SEQ ID NO: 228135 - DNA, 120 bp, Artificial Sequence
  ENSG00000118707_11 (sequence is synthesized)
gaggaacccagtggatgtaacagaaccgactccagttgaatgtttagatttttgctaaactgttttctttttcccttttttgctgtggtttgcattcacggcagtagttagcccaggtgt

SEQ ID NO: 228136 - DNA, 120 bp, Artificial Sequence
  ENSG00000118707_12 (sequence is synthesized)
ggggaacgagagtgcactgcatgatagcgttctggtgagctgggaaggacccaccactgccactgaggattgttttggaagaaaggaatatttttatcttggggaccagctaagtctctg

SEQ ID NO: 228137 - DNA, 120 bp, Artificial Sequence
  ENSG00000118707_13 (sequence is synthesized)
cagtagtgtgaaattccaaatggttgttttatcattggtttggtttaccaaaaaaaaggcagggaaaaaaaaaaaaaacaaccgtatgagcgcattggcttgtctgccgcaggcacagaa

SEQ ID NO: 228138 - DNA, 120 bp, Artificial Sequence
  ENSG00000118707_14 (sequence is synthesized)
ctttctaggcacctagcagagaaagataagatcaaaaggtgtttggtttttcttttaatttttattgtagtttttttgggtgggtgggggaagtaaactagactgaagcgatggattttt

SEQ ID NO: 228139 - DNA, 120 bp, Artificial Sequence
  ENSG00000118707_15 (sequence is synthesized)
tttttcttttttttctttagtgtttttccctttgttcttgaacacttttgccctgcagcctcagttttgaattcttttagcaacttggattagaggggcccatatgtcagaagctcccag

SEQ ID NO: 228140 - DNA, 120 bp, Artificial Sequence
  ENSG00000118707_16 (sequence is synthesized)
cacctcctacttgggagaaaagtgagccatctgctggtcaggaagtcctccagagaggcagcttttcccacaatggtggcaggaaactttggggaaagcaggaatggtgtccactgctgc

SEQ ID NO: 228141 - DNA, 120 bp, Artificial Sequence
  ENSG00000118707_17 (sequence is synthesized)
ggaggaactgccttcagagaaggtggggctggaaaagggttagaagcctcctagctgggattgtctttgtttcacctttctttaaattagaattacagaagcccctgcccagtgaacaga

SEQ ID NO: 228142 - DNA, 90 bp, Artificial Sequence
  ENSG00000118707_18 (sequence is synthesized)
tttaaattagaattacagaagcccctgcccagtgaacagataacgattggtcttatgctcctccctttcccccattttttcttttgctgg

SEQ ID NO: 228143 - DNA, 120 bp, Artificial Sequence
  ENSG00000118707_19 (sequence is synthesized)
caccatcttggccaggctggtcttggaactcctgacctcgtgagccaccacgcccagcctcttttgctgtttcattgctgacagtgttcaacaatatgccccatctttatatatcctaag

SEQ ID NO: 228144 - DNA, 120 bp, Artificial Sequence
  ENSG00000118707_20 (sequence is synthesized)
atatatcctaagaaacactaatcctaggttattgctagccaaaatatttttgtcctgagtagtgtcactgggccaaaagatagatcaggacgacagcctttagttttcctgaaatcacca

SEQ ID NO: 228145 - DNA, 120 bp, Artificial Sequence
  ENSG00000118707_21 (sequence is synthesized)
ggtcaggcacaaggagaaaaggttcctggatactgactaacttgggtgggtggatctagccaggagaaagacagtaacatgtgttctgtactttctgggaagatccctgaagccatcaca

SEQ ID NO: 228146 - DNA, 120 bp, Artificial Sequence
  ENSG00000118707_22 (sequence is synthesized)
gaggctccccaacttctgagtcgcccatctgttgctgtgggagtgtgaacggatcgctgaaggagagggagctttgctctctctaggtgggcaagtttcctgggctctctgtgttgcctc

SEQ ID NO: 228147 - DNA, 120 bp, Artificial Sequence
  ENSG00000118707_23 (sequence is synthesized)
cctctggcttcttcctcccgtgccctctccccgtgtgccccagggggatcagggatcctcaccctcctgaggcccagtggggaagaatgaacatggcttcatccaggttaactgatgctg

SEQ ID NO: 228148 - DNA, 120 bp, Artificial Sequence
  ENSG00000118707_24 (sequence is synthesized)
ccatttgcccagcctcttccatcccagccctgtcagtgagcccaggtctggtgcaactgctgcaggatgcctgtagtagggaactctggaagtgtattgggctgaggtgggattttccct

SEQ ID NO: 228149 - DNA, 120 bp, Artificial Sequence
  ENSG00000118707_25 (sequence is synthesized)
ccccacagtgcactgagcaatggagggtggtgagggagccatgctgctgaattctggttggcatttccccattatgtaaaatggggtgttgggtagggcagactctgcttgggtttggtt

SEQ ID NO: 228150 - DNA, 120 bp, Artificial Sequence
  ENSG00000118707_26 (sequence is synthesized)
gtaagataaacctggaggagaagcacagttgtcccattgaattatttgagcaaaaactactgtaaataacttttttgtcttttgtcaaataaaatttttttttgtttttttaagcagaaa

SEQ ID NO: 228151 - DNA, 120 bp, Artificial Sequence
  ENSG00000118707_27 (sequence is synthesized)
gcggggggtgggcgcagctcgtcgcgctccgcacaaagtttgttttctccctccgggcgggtgggggagggcgcagagggcgcggggggaggagaggggatctgacgtcaggccgcgagg

SEQ ID NO: 228152 - DNA, 120 bp, Artificial Sequence
  ENSG00000118707_28 (sequence is synthesized)
ggacccgaaagccgctgggaaaagtgaagaggggactcaagcccagaaaggggaggatccttgtccaagttacagtgccaagtggagggtgggccttgctcattcacctggattttgagt

SEQ ID NO: 228153 - DNA, 120 bp, Artificial Sequence
  ENSG00000118707_29 (sequence is synthesized)
ggatggcgggcccgcgcgggagctggtgcgcggagtcggcccggggtgtggggactgtggggtgcaagcgccccgagcgccggacgattcctcgccgacccaggagccatgtgctccgac

SEQ ID NO: 228154 - DNA, 120 bp, Artificial Sequence
  ENSG00000118729_0 (sequence is synthesized)
tgcgtgcgtgcgtgcgtgcgtgtgtgtgtgtgtgtgcctctgctctttgtcctgagcccacgattccagagctggctggacccaaggaggtgaagagtcacttttcagccccaggaaggg

SEQ ID NO: 228155 - DNA, 120 bp, Artificial Sequence
  ENSG00000118729_1 (sequence is synthesized)
caaagaagagagaaaatcagcctgtctgctctctccttggctcaacaaggcctctaacagtcttctgtcctctattctgcacacagcatatttgggaacgagaaacaaaagttttcccaa

SEQ ID NO: 228156 - DNA, 120 bp, Artificial Sequence
  ENSG00000118729_2 (sequence is synthesized)
atgaagagaactcacttgtttattgtggggatttattttctgtcctcttgcagggcagaagaggggcttaatttccccacatatgatgggaaggaccgagtggtaagtctttccgagaag

SEQ ID NO: 228157 - DNA, 120 bp, Artificial Sequence
  ENSG00000118729_3 (sequence is synthesized)
aacttcaagcaggttttaaagaaatatgacttgctttgcctctactaccatgagccggtgtcttcagataaggtcacgcaaaaacagttccaactgaaagaaatcgtgcttgagcttgtg

SEQ ID NO: 228158 - DNA, 120 bp, Artificial Sequence
  ENSG00000118729_4 (sequence is synthesized)
gcccaggtccttgaacataaagctataggctttgtgatggtggatgccaagaaagaagccaagcttgccaagaaactgggttttgatgaagaaggaagcctgtatattcttaagggtgat

SEQ ID NO: 228159 - DNA, 120 bp, Artificial Sequence
  ENSG00000118729_5 (sequence is synthesized)
cgcacaatagagtttgatggcgagtttgcagctgatgtcttggtggagttcctcttggatctaattgaagacccagtggagatcatcagcagcaaactggaagtccaagccttcgaacgc

SEQ ID NO: 228160 - DNA, 120 bp, Artificial Sequence
  ENSG00000118729_6 (sequence is synthesized)
attgaagactacatcaaactcattggctttttcaagagtgaggactcagaatactacaaggcttttgaagaagcagctgaacacttccagccttacatcaaattctttgccacctttgac

SEQ ID NO: 228161 - DNA, 120 bp, Artificial Sequence
  ENSG00000118729_7 (sequence is synthesized)
aaaggggttgcaaagaaattatctttgaagatgaatgaggttgacttctatgagccatttatggatgagcccattgccatccccaacaaaccttacacagaagaggagctggtggagttt

SEQ ID NO: 228162 - DNA, 120 bp, Artificial Sequence
  ENSG00000118729_8 (sequence is synthesized)
gtgaaggaacaccaaagacccactctacgtcgcctgcgcccagaagaaatgtttgaaacatgggaagatgatttgaatgggatccacattgtggcctttgcagagaagagtgatccagat

SEQ ID NO: 228163 - DNA, 120 bp, Artificial Sequence
  ENSG00000118729_9 (sequence is synthesized)
ggctacgaattcctggagatcctgaaacaggttgcccgggacaatactgacaaccccgatctgagcatcctgtggatcgacccggacgactttcctctgctcgttgcctactgggagaag

SEQ ID NO: 228164 - DNA, 120 bp, Artificial Sequence
  ENSG00000118729_10 (sequence is synthesized)
actttcaagattgacctattcaggccacagattggggtggtgaatgtcacagatgctgacagtgtctggatggagattccagatgatgacgatcttccaactgctgaggagctggaggac

SEQ ID NO: 228165 - DNA, 120 bp, Artificial Sequence
  ENSG00000118729_11 (sequence is synthesized)
ctgaagatgatgatgaagatgatgatgatgatgataattctgatgaagaggataatgatgacagtgatgacgatgatgatgaatagcccaactccaaacaattctgatgaaaacaaaatc

SEQ ID NO: 228166 - DNA, 120 bp, Artificial Sequence
  ENSG00000118729_12 (sequence is synthesized)
acagcacccactaccatacagacagcacaaggtggcagcaagcaattctgccccacacccagccagctcctttcccttttccatcatctcttttcccactccctttgcgtcaggagcagc

SEQ ID NO: 228167 - DNA, 120 bp, Artificial Sequence
  ENSG00000118729_13 (sequence is synthesized)
atcattcagcaaatgccttttcaaatgcagcaatcccacttagcagggacaggagaaaaattattcccatgttgactgtcttgactgtcacggaacagatcttgttctttgctggaccat

SEQ ID NO: 228168 - DNA, 120 bp, Artificial Sequence
  ENSG00000118729_14 (sequence is synthesized)
caagggtcatggcagtgcctgaacatggcagtctagggtgaacaatcccctaacacaagtttacttgtctttgattatgacagtaacaaaattgacagctttctaactcacaggcataga

SEQ ID NO: 228169 - DNA, 120 bp, Artificial Sequence
  ENSG00000118729_15 (sequence is synthesized)
gtgaccttttaatcagagcccagggaagacacatgattaatgatttagctccctccatacctcgaacatcagttgggatccctcctccagccaagatgatccttcttagagaaggctcag

SEQ ID NO: 228170 - DNA, 120 bp, Artificial Sequence
  ENSG00000118729_16 (sequence is synthesized)
ccttggaagcaaacttataaatcatattctcatggctttgttaaacttatttcaagtgatggtcattcatatcactatgaacttggatattcaagcctttggatggctatggagagggct

SEQ ID NO: 228171 - DNA, 120 bp, Artificial Sequence
  ENSG00000118729_17 (sequence is synthesized)
tgaaatgtgtacaggtgtcaccatcatttctagtatattaggaaactgggatgggaggttgatttgctctctaaacttccctctagttggcaagtctcacatattcatcagcaggagtgg

SEQ ID NO: 228172 - DNA, 120 bp, Artificial Sequence
  ENSG00000118729_18 (sequence is synthesized)
agggtgggggaaaactagaaagatgaaaacttttacatttttctgatgggttcatgtctctgattgggtcagctggcttcctagcctaagctgggatctgaataccccttctctgtagct

SEQ ID NO: 228173 - DNA, 120 bp, Artificial Sequence
  ENSG00000118729_19 (sequence is synthesized)
gctagtgagccttcccatttagattaaagattgctttatccagcagtcaattaactctccagttatcagtactcccacaattggccagggcaacaataattggagttcatactgatgccc

SEQ ID NO: 228174 - DNA, 120 bp, Artificial Sequence
  ENSG00000118729_20 (sequence is synthesized)
tgaggcactgaaaaaaaaaaaaatcccaaagtgccttctgagctgtctaaaagttacattgtgcttggtagatttagtgttaagtgtgcagtataattttctaatttattttctcaatct

SEQ ID NO: 228175 - DNA, 120 bp, Artificial Sequence
  ENSG00000118729_21 (sequence is synthesized)
tttagcacatgtgtaagacactgtgcaaattttttgaaaatagagcaatactttttgtggaatactagctaactaattctgtcattaaactcatattttgaaaatattcagacaatgttg

SEQ ID NO: 228176 - DNA, 120 bp, Artificial Sequence
  ENSG00000118729_22 (sequence is synthesized)
ggagaccagcctgggcaacatggttgcaaagaaattatctttgaagatgaatgaggttgacttctatgagccatttatggatgagcccattgccatccccaacaaaccttacacagaaga

SEQ ID NO: 228177 - DNA, 120 bp, Artificial Sequence
  ENSG00000118733_0 (sequence is synthesized)
tcctagctctgagaatgcctgcggaatgatcgccccccagggcggctgccgccgctgccgctgctgctgttattgctactgctgctgccgccgcctctgcttccactcggctctgactgg

SEQ ID NO: 228178 - DNA, 120 bp, Artificial Sequence
  ENSG00000118733_1 (sequence is synthesized)
caggcagaaagtgcaactgacgagggaaaggtctctgcagtgagtggagagcctacataaaagagagtaaagaggggcaaaaacccagatcagaatgcaggcgacgtccaaccttctcaa

SEQ ID NO: 228179 - DNA, 120 bp, Artificial Sequence
  ENSG00000118733_2 (sequence is synthesized)
cctcctgctgctgtctttgtttgccggattagatccttccaagactcagattagtcctaaagaagggtggcaggtgtacagctcagctcaggatcctgatgggcggtgcatttgcacagt

SEQ ID NO: 228180 - DNA, 120 bp, Artificial Sequence
  ENSG00000118733_3 (sequence is synthesized)
tgttgctccagaacaaaacctgtgttcccgggatgccaaaagcaggcaacttcgccaactactggaaaaggttcagaacatgtcccagtctattgaagtcttaaacttgagaactcagag

SEQ ID NO: 228181 - DNA, 120 bp, Artificial Sequence
  ENSG00000118733_4 (sequence is synthesized)
agatttccaatatgttttaaaaatggaaacccaaatgaaagggctgaaggcaaaatttcggcagattgaagatgatcgaaagacacttatgaccaagcattttcaggagttgaaagagaa

SEQ ID NO: 228182 - DNA, 120 bp, Artificial Sequence
  ENSG00000118733_5 (sequence is synthesized)
aatggacgagctcctgcctttgatccccgtgctggaacagtacaaaacagatgctaagttaatcacccagttcaaggaggaaataaggaatctgtctgctgtcctcactggtattcagga

SEQ ID NO: 228183 - DNA, 120 bp, Artificial Sequence
  ENSG00000118733_6 (sequence is synthesized)
ggaaattggtgcctatgactacgaggaactacaccaaagagtgctgagcttggaaacaagacttcgtgactgcatgaaaaagctaacatgtggcaaactgatgaaaatcacaggcccagt

SEQ ID NO: 228184 - DNA, 120 bp, Artificial Sequence
  ENSG00000118733_7 (sequence is synthesized)
tacagtcaagacatctggaacccgatttggtgcttggatgacagaccctttagcatctgagaaaaacaacagagtctggtacatggacagttatactaacaataaaattgttcgtgaata

SEQ ID NO: 228185 - DNA, 120 bp, Artificial Sequence
  ENSG00000118733_8 (sequence is synthesized)
caaatcaattgcagactttgtcagtggggctgaatcaaggacatacaaccttcctttcaagtgggcaggaactaaccatgttgtctacaatggctcactctattttaacaagtatcagag

SEQ ID NO: 228186 - DNA, 120 bp, Artificial Sequence
  ENSG00000118733_9 (sequence is synthesized)
taatatcatcatcaaatacagctttgatatggggagagtgcttgcccaacgaagcctggagtatgctggttttcataatgtttacccctacacatggggtggattctctgacatcgacct

SEQ ID NO: 228187 - DNA, 120 bp, Artificial Sequence
  ENSG00000118733_10 (sequence is synthesized)
aatggctgatgaaatcgggctgtgggctgtgtatgcaactaaccagaatgcaggcaatattgtcatcagccaacttaaccaagataccttggaggtgatgaagagctggagcactggcta

SEQ ID NO: 228188 - DNA, 120 bp, Artificial Sequence
  ENSG00000118733_11 (sequence is synthesized)
ccccaagagaagtgcaggggaatctttcatgatctgtgggacactgtatgtcaccaactcccacttaactggagccaaggtgtattattcctattccaccaaaacctccacatatgagta

SEQ ID NO: 228189 - DNA, 120 bp, Artificial Sequence
  ENSG00000118733_12 (sequence is synthesized)
cacagacattcccttccataaccaatactttcacatatccatgcttgactacaatgcaagagatcgagctctctatgcctggaacaatggccaccaggtgctgttcaatgtcaccctttt

SEQ ID NO: 228190 - DNA, 120 bp, Artificial Sequence
  ENSG00000118733_13 (sequence is synthesized)
agaggatgacacataggcaaatgtgacatgttttcattgatttaaacagtgtgatttgtgataaactctataagaccccttccgtttttttcttcactattatttttcatcatttctcca

SEQ ID NO: 228191 - DNA, 120 bp, Artificial Sequence
  ENSG00000118733_14 (sequence is synthesized)
aagcaaagcatttttattgtaaagttggtgtttcaaaaacatagctgagcttgtctaacttaccatgttggaaacacatcttaacttctaaatttacaaggcctatcatgtccttgtcat

SEQ ID NO: 228192 - DNA, 120 bp, Artificial Sequence
  ENSG00000118733_15 (sequence is synthesized)
gaaaagcactaaaaaaaaaaagagtttaagtggctaaagtcatagttttgcaagagattaatgatctgccttatattagagtcagagactaatggtggcttaaatgcacgaatgtctttt

SEQ ID NO: 228193 - DNA, 120 bp, Artificial Sequence
  ENSG00000118733_16 (sequence is synthesized)
tttttaaaactgtcattttttactgtcttttgctccatatcaggaaatattttggtaggaattaggagaacaaaaagcacttttatcccatttatttctttaaaaaatgtaaggatttca

SEQ ID NO: 228194 - DNA, 120 bp, Artificial Sequence
  ENSG00000118733_17 (sequence is synthesized)
tttatattgaaaaataatattaatcattttgctgttaacacaattctctgatgcggtgctgtacagtcatttttaaatctcttgctaacattttattggcagtatgtatttctaccattg

SEQ ID NO: 228195 - DNA, 120 bp, Artificial Sequence
  ENSG00000118733_18 (sequence is synthesized)
taaccaccattgtgctattgtatctcttcacttctgtgaaagtaatattttttataaaatacactgaaatttaacctcagtaattgagtccattttcaagtgtggtcaagaataatcttc

SEQ ID NO: 228196 - DNA, 120 bp, Artificial Sequence
  ENSG00000118733_19 (sequence is synthesized)
ttggcttacccctttacataagcattataaactaaaatgaaaaccaaaccagacacctgacatagagtctttattttaccccaagttttttgggccactgacattgaatgcaacaactga

SEQ ID NO: 228197 - DNA, 120 bp, Artificial Sequence
  ENSG00000118733_20 (sequence is synthesized)
tttcatacaactgagttactctgttcactccactgaatgcaacccatatagtttcttgcacaaggtgcatctggattccaaatattggatttgagttgactctactcatttattatacac

SEQ ID NO: 228198 - DNA, 120 bp, Artificial Sequence
  ENSG00000118733_21 (sequence is synthesized)
taaagaaattttgttcttcatagttaaatgtactagcatttaatttatattttacatacaacttgcaataatgaaattccttatgtcaggaccctgaaaataagcacatttgaaaactct

SEQ ID NO: 228199 - DNA, 120 bp, Artificial Sequence
  ENSG00000118733_22 (sequence is synthesized)
tagaaaaaaaaaattctgtaatgtcctctagatttagattatgagccctgaggagttattggcaagatttgtgcaaaataaaatatggggagacttgggagttgtctttgtggtttcaaa

SEQ ID NO: 228200 - DNA, 120 bp, Artificial Sequence
  ENSG00000118733_23 (sequence is synthesized)
agtgtaaataaccaattcagaaaacaaaatggaaaaacgaccccttgttaccttgattcactgtatgtggaaaaataatgtaaccaaaagggaagagctttaataatacttatgttaata

SEQ ID NO: 228201 - DNA, 120 bp, Artificial Sequence
  ENSG00000118733_24 (sequence is synthesized)
actctatgaaacatataagctaactatatatcaaacatttcattgagtttggatgtattttccacatattaaaaaaatagttccctaaggcagctttatggaaactaatataggttggtt

SEQ ID NO: 228202 - DNA, 120 bp, Artificial Sequence
  ENSG00000118733_25 (sequence is synthesized)
ggttggttttacaatttaaaaagtatattctataataaataataaaacaaattgttttaaatgtttagtttcacacatacatagtaccatgattttctttgaaagataaggatgtaatga

SEQ ID NO: 228203 - DNA, 120 bp, Artificial Sequence
  ENSG00000118733_26 (sequence is synthesized)
aagcatcatgtaaagaaatcctaacatttaagtgtaattcatttcaaatgtcacaagtaaagcatcatcctcaaatatctcactgtcaaaattgtagaattaaataacccaatcttgaaa

SEQ ID NO: 228204 - DNA, 120 bp, Artificial Sequence
  ENSG00000118733_27 (sequence is synthesized)
atgagtcctccactgctgaagcttggcgctgtgcttagtaccatggcaatgatctcaaactggatgtcccaaactctcccatccttggtgggactgaacaccacgaggctgtcgactccg

SEQ ID NO: 228205 - DNA, 120 bp, Artificial Sequence
  ENSG00000118733_28 (sequence is synthesized)
cgataaacatcttgtgatgatgaagaggattatttaactgtaaagctgaagcttctctgagacaagggatatgaagaagcagaaggaggaaagcaggaggaggagaatggaggggaaagg

SEQ ID NO: 228206 - DNA, 120 bp, Artificial Sequence
  ENSG00000118733_29 (sequence is synthesized)
tagaaatcacaagggctgaataaattcatggtttataaaggaggcattccaagcaggaaaaatgaaatgagcgacataaaaagacatgaatcaacatggcatgcttgcacgacgcacaca

SEQ ID NO: 228207 - DNA, 120 bp, Artificial Sequence
  ENSG00000118733_30 (sequence is synthesized)
gaccgatttggttaaaggtttctgttggatggtacagaagataaatctagaagcataaattgcagaaaaactacagtagaactggaataccaccccttcacacttgagttctaagaagac

SEQ ID NO: 228208 - DNA, 120 bp, Artificial Sequence
  ENSG00000118733_31 (sequence is synthesized)
agaaaggagaagcataagcaatagtattttgggaagctataacacgcgacttgcctccctgttcacctttgtattctcagcacctagaatagttctggtacaaaataagttcacagtaaa

SEQ ID NO: 228209 - DNA, 120 bp, Artificial Sequence
  ENSG00000118733_32 (sequence is synthesized)
tggttgtcaaatgaataaattaattattatatctttaaatagtaactattgtttttaccctctaacatatttcagagaaatgcttagtgctacaagaaagtaaagtttgctttctaaggt

SEQ ID NO: 228210 - DNA, 120 bp, Artificial Sequence
  ENSG00000118733_33 (sequence is synthesized)
atgattgactggagtaagaatcaattttcctcacaaaaccaggtacaaaataaaagagtcaactagccaaaagaccactttaccatggtcacccaatgtttagtttaagagccagaagct

SEQ ID NO: 228211 - DNA, 120 bp, Artificial Sequence
  ENSG00000118733_34 (sequence is synthesized)
tttaacctccggtacaaattctgtcctaagttttggccgaaacaacctaagactcagcagtatccctttgccatagagatgcaaggctggattagattcaagcaccatcgaagccaaaga

SEQ ID NO: 228212 - DNA, 120 bp, Artificial Sequence
  ENSG00000118733_35 (sequence is synthesized)
caccccaagccagtgatgtgctgtgggttgtttggaaatgtcgattagataaggctcatggtatgattcagagctccaaggacagttcttgttcaggtttcaactaatcaacatcggatt

SEQ ID NO: 228213 - DNA, 120 bp, Artificial Sequence
  ENSG00000118733_36 (sequence is synthesized)
atgcacacctcaacatctgaaatatgcagacatttgagacaaataccagaattgtgtcttcttgctttgtacaaatcatgcttcagtctggcaataagcatgtggcaaactgatgaaaat

SEQ ID NO: 228214 - DNA, 120 bp, Artificial Sequence
  ENSG00000118762_0 (sequence is synthesized)
aggcggcggcgggcgccgggaagaaaggaacatggctcctgaggcgcacagcgccgagcgcggcgccgcgcacccgcgcgccggacgccagtgaccgcgatggtgaactccagtcgcgtg

SEQ ID NO: 228215 - DNA, 80 bp, Artificial Sequence
  ENSG00000118762_1 (sequence is synthesized)
tggtgaactccagtcgcgtgcagcctcagcagcccggggacgccaagcggccgcccgcgccccgcgcgccggacccgggc

SEQ ID NO: 228216 - DNA, 120 bp, Artificial Sequence
  ENSG00000118762_2 (sequence is synthesized)
gagcagcggggcctggagatcgagatgcagcgcatccggcaggcggccgcgcgggaccccccggccggagccgcggcctccccttctcctccgctctcgtcgtgctcccggcaggcgtgg

SEQ ID NO: 228217 - DNA, 120 bp, Artificial Sequence
  ENSG00000118762_3 (sequence is synthesized)
agccgcgataaccccggcttcgaggccgaggaggaggaggaggaggtggaaggggaagaaggcggaatggtggtggagatggacgtagagtggcgcccgggcagccggaggtcggccgcc

SEQ ID NO: 228218 - DNA, 80 bp, Artificial Sequence
  ENSG00000118762_4 (sequence is synthesized)
tcctcggccgtgagctccgtgggcgcgcggagccgggggcttgggggctaccacggcgcgggccacccgagcgggaggcg

SEQ ID NO: 228219 - DNA, 120 bp, Artificial Sequence
  ENSG00000118762_5 (sequence is synthesized)
gtcggcggcggggacccgctgcatcgccacctccccctggaagggcagccgccccgagtggcctgggcggagaggctggttcgcgggctgcgaggtctctggggaacaagactcatggag

SEQ ID NO: 228220 - DNA, 120 bp, Artificial Sequence
  ENSG00000118762_6 (sequence is synthesized)
gaaagcagcactaaccgagagaaataccttaaaagtgttttacgggaactggtcacatacctcctttttctcatagtcttgtgcatcttgacctacggcatgatgagctccaatgtgtac

SEQ ID NO: 228221 - DNA, 120 bp, Artificial Sequence
  ENSG00000118762_7 (sequence is synthesized)
tactacacccggatgatgtcacagctcttcctagacacccccgtgtccaaaacggagaaaactaactttaaaactctgtcttccatggaagacttctggaagttcacagaaggctcctta

SEQ ID NO: 228222 - DNA, 120 bp, Artificial Sequence
  ENSG00000118762_8 (sequence is synthesized)
ttggatgggctgtactggaagatgcagcccagcaaccagactgaagctgacaaccgaagtttcatcttctatgagaacctgctgttaggggttccacgaatacggcaactccgagtcaga

SEQ ID NO: 228223 - DNA, 120 bp, Artificial Sequence
  ENSG00000118762_9 (sequence is synthesized)
aatggatcctgctctatcccccaggacttgagagatgaaattaaagagtgctatgatgtctactctgtcagtagtgaagatagggctccctttgggccccgaaatggaaccgcttggatc

SEQ ID NO: 228224 - DNA, 120 bp, Artificial Sequence
  ENSG00000118762_10 (sequence is synthesized)
tacacaagtgaaaaagacttgaatggtagtagccactggggaatcattgcaacttatagtggagctggctattatctggatttgtcaagaacaagagaggaaacagctgcacaagttgct

SEQ ID NO: 228225 - DNA, 120 bp, Artificial Sequence
  ENSG00000118762_11 (sequence is synthesized)
agcctcaagaaaaatgtctggctggaccgaggaaccagggcaacttttattgacttctcagtgtacaacgccaacattaacctgttctgtgtggtcaggttattggttgaattcccagca

SEQ ID NO: 228226 - DNA, 120 bp, Artificial Sequence
  ENSG00000118762_12 (sequence is synthesized)
acaggtggtgtgattccatcttggcaatttcagcctttaaagctgatccgatatgtcacaacttttgatttcttcctggcagcctgtgagattatcttttgtttctttatcttttactat

SEQ ID NO: 228227 - DNA, 120 bp, Artificial Sequence
  ENSG00000118762_13 (sequence is synthesized)
gtggtggaagagatattggaaattcgcattcacaaactacactatttcaggagtttctggaattgtctggatgttgtgatcgttgtgctgtcagtggtagctataggaattaacatatac

SEQ ID NO: 228228 - DNA, 120 bp, Artificial Sequence
  ENSG00000118762_14 (sequence is synthesized)
agaacatcaaatgtggaggtgctactacagtttctggaagatcaaaatactttccccaactttgagcatctggcatattggcagatacagttcaacaatatagctgctgtcacagtattt

SEQ ID NO: 228229 - DNA, 120 bp, Artificial Sequence
  ENSG00000118762_15 (sequence is synthesized)
tttgtctggattaagctcttcaaattcatcaattttaacaggaccatgagccagctctcgacaaccatgtctcgatgtgccaaagacctgtttggctttgctattatgttcttcattatt

SEQ ID NO: 228230 - DNA, 120 bp, Artificial Sequence
  ENSG00000118762_16 (sequence is synthesized)
ttcctagcgtatgctcagttggcataccttgtctttggcactcaggtcgatgacttcagtactttccaagagtgtatcttcactcaattccgtatcattttgggcgatatcaactttgca

SEQ ID NO: 228231 - DNA, 120 bp, Artificial Sequence
  ENSG00000118762_17 (sequence is synthesized)
gagattgaggaagctaatcgagttttgggaccaatttatttcactacatttgtgttctttatgttcttcattcttttgaatatgtttttggctatcatcaatgatacttactctgaagtg

SEQ ID NO: 228232 - DNA, 120 bp, Artificial Sequence
  ENSG00000118762_18 (sequence is synthesized)
aaatctgacttggcacagcagaaagctgaaatggaactctcagatcttatcagaaagggctaccataaagctttggtcaaactaaaactgaaaaaaaataccgtggatgacatttcagag

SEQ ID NO: 228233 - DNA, 120 bp, Artificial Sequence
  ENSG00000118762_19 (sequence is synthesized)
agtctgcggcaaggaggaggcaagttaaactttgacgaacttcgacaagatctcaaagggaagggccatactgatgcagagattgaggcaatattcacaaagtacgaccaagatggagac

SEQ ID NO: 228234 - DNA, 120 bp, Artificial Sequence
  ENSG00000118762_20 (sequence is synthesized)
caagaactgaccgaacatgaacatcagcagatgagagacgacttggagaaagagagggaggacctggatttggatcacagttctttaccacgtcccatgagcagccgaagtttccctcga

SEQ ID NO: 228235 - DNA, 120 bp, Artificial Sequence
  ENSG00000118762_21 (sequence is synthesized)
ccagaaggaggggaagcatttctagtggcgtttcttacgaagagtttcaagtcctggtgagacgagtggaccggatggagcattccatcggcagcatagtgtccaagattgacgccgtga

SEQ ID NO: 228236 - DNA, 120 bp, Artificial Sequence
  ENSG00000118762_22 (sequence is synthesized)
tcgtgaagctagagattatggagcgagccaaactgaagaggagggaggtgctgggaaggctgttggatggggtggccgaggatgaaaggctgggtcgtgacagtgaaatccatagggaac

SEQ ID NO: 228237 - DNA, 120 bp, Artificial Sequence
  ENSG00000118762_23 (sequence is synthesized)
agatggaacggctagtacgtgaagagttggaacgctgggaatccgatgatgcagcttcccagatcagtcatggtttaggcacgccagtgggactaaatggtcaacctcgccccagaagct

SEQ ID NO: 228238 - DNA, 120 bp, Artificial Sequence
  ENSG00000118762_24 (sequence is synthesized)
cccgcccatcttcctcccaatctacagaaggcatggaaggtgcaggtggaaatgggagttctaatgtccacgtatgatatgtgtgtttcagtatgtgtgtttctaataagtgaggaagtg

SEQ ID NO: 228239 - DNA, 120 bp, Artificial Sequence
  ENSG00000118762_25 (sequence is synthesized)
gctgtcctgaattgctgtaacaagcacactatttatatgccctgaccaccataggatgctagtctttgtgaccgattgctaatcttctgcactttaatttattttatataaactttaccc

SEQ ID NO: 228240 - DNA, 120 bp, Artificial Sequence
  ENSG00000118762_26 (sequence is synthesized)
atggttcaaagatttttttttctttttctcatataagaaatctaggtgtaaatattgagtacagaaaaaaaatcttcatgatgtgtattgagcggtacgcccagttgccaccatgactga

SEQ ID NO: 228241 - DNA, 120 bp, Artificial Sequence
  ENSG00000118762_27 (sequence is synthesized)
gtcttctcagttgacaatgaagtagccttttaaagctagaaaactgtcaaagggcttctgagtttcatttccagtcacaaaaatcagtattgttatttttttccaagagtgtgaaggaaa

SEQ ID NO: 228242 - DNA, 120 bp, Artificial Sequence
  ENSG00000118762_28 (sequence is synthesized)
atggggcattcctttccactctggcatagttcatgagcttaatacatagctttcttttaagaaaggagccttttttttcaactagcttcctggggtaaacttttctaaaagataaaatgg

SEQ ID NO: 228243 - DNA, 120 bp, Artificial Sequence
  ENSG00000118762_29 (sequence is synthesized)
aaaggaactccaaactatgatagaatctgtgtgaatggttaagatgaatgttaaatactatgcttttttgtaagttgatcgtatctgatgtctgtgggactaactgtatcacttaatttt

SEQ ID NO: 228244 - DNA, 120 bp, Artificial Sequence
  ENSG00000118762_30 (sequence is synthesized)
taccttattttggctctaatttgaataagctgagtaaaaccaccaaagatcagttataggataaaatggcatctctaaccataacacaggagaattggaaggagccctaagttgtcactc

SEQ ID NO: 228245 - DNA, 120 bp, Artificial Sequence
  ENSG00000118762_31 (sequence is synthesized)
agtttaatttcttttaatggttagtttagcctaaagatttatctgcatattctttttcccatgtggctctactcatttgcaactgaatttaatgttataactcatctagtgagaccaact

SEQ ID NO: 228246 - DNA, 120 bp, Artificial Sequence
  ENSG00000118762_32 (sequence is synthesized)
tactaaatttttagtatgcactgaaagtttttatccaacaattatgttcattttaagcaaaattttaagaaagttttgaaattcataaagcatttggttttaaactattttaagaatata

SEQ ID NO: 228247 - DNA, 90 bp, Artificial Sequence
  ENSG00000118762_33 (sequence is synthesized)
cactttgggaggccgaaacaggcacatgggcaatgtggcgaaactccatctctacaaaaaatgcaaaaataaaaaatatagtactcaagt

SEQ ID NO: 228248 - DNA, 120 bp, Artificial Sequence
  ENSG00000118762_34 (sequence is synthesized)
tctacaaaaaatgcaaaaataaaaaatatagtactcaagtattcttgatcctgtgtttcaaaactagaatttgtaatgcaaatggagctcagtctaataaaaaagaggttttggtattaa

SEQ ID NO: 228249 - DNA, 120 bp, Artificial Sequence
  ENSG00000118762_35 (sequence is synthesized)
aagttcatacattagacagtatcagccaaaatttgagttagcaacactgttttctttacgagagggtctcacccaaatttatggggagaaatctatttctcaaaaaaaaaaatcttcttt

SEQ ID NO: 228250 - DNA, 120 bp, Artificial Sequence
  ENSG00000118762_36 (sequence is synthesized)
tacagaaatgttgagtaaggtgacattttgagcgctaataagcaaaagagcatgcagtgctgttgaataaccctcacttggagaaccaagagaatcctgtcgtttaatgctatattttaa

SEQ ID NO: 228251 - DNA, 120 bp, Artificial Sequence
  ENSG00000118762_37 (sequence is synthesized)
tttcacaagttgttcatttaactggtagaatgtcagtccaatctccaatgagaacatgagcaaatagacctttccaggttgaaagtgaaacatactgggtttctgtaagtttttcctcat

SEQ ID NO: 228252 - DNA, 120 bp, Artificial Sequence
  ENSG00000118762_38 (sequence is synthesized)
ggcttcatctctatctttactttctcttgaatatgctacacaaagttctttattactacatactaaagtttgcattccagggatattgactgtacatatttatgtatatgtaccatgttg

SEQ ID NO: 228253 - DNA, 120 bp, Artificial Sequence
  ENSG00000118762_39 (sequence is synthesized)
ttacatgtaaacaaacttcaatttgaagtgcagctattatgtggtatccatgtgtatcgaccatgtgccatatatcaattatggtcactagaaagtctctttatgatactttttattgta

SEQ ID NO: 228254 - DNA, 120 bp, Artificial Sequence
  ENSG00000118762_40 (sequence is synthesized)
ctgtttttcatttcacttgcaaaattttgcagaattcctcctttctacccataaattacatatatttttcttctttagtcatggagaactccccccctcatctcttccctattatctttc

SEQ ID NO: 228255 - DNA, 120 bp, Artificial Sequence
  ENSG00000118762_41 (sequence is synthesized)
cctgtgtactggtattattaaaaagacattacatacgcaagtctttctcgacaatcaagaatgttattaatgtgtaatactgagcactttacttcttaataaaaacttgatatagtagca

SEQ ID NO: 228256 - DNA, 120 bp, Artificial Sequence
  ENSG00000118762_42 (sequence is synthesized)
aaaattcctgcttctaaagataaattcctggtgataagagtatttctagcccaagggctcatacagatactttttttttttttttccagaggcaggtatctttctggaacatgttataag

SEQ ID NO: 228257 - DNA, 120 bp, Artificial Sequence
  ENSG00000118762_43 (sequence is synthesized)
aggaaaacttgcccccatttggtgatttctcctttcctcctgcattttgatgtctctgtgttgagggtgaactgggtacaaggaatgatttttatctgtatcctctctctaatttcagga

SEQ ID NO: 228258 - DNA, 120 bp, Artificial Sequence
  ENSG00000118762_44 (sequence is synthesized)
gaatgataggggaaaggaaggcaagggtgagagaagaccttgtgtgaatttgtccaaaatgtttatccacaggaacaatccctttgtgaaggctgctggtatgtgaatgtgtgccggttc

SEQ ID NO: 228259 - DNA, 120 bp, Artificial Sequence
  ENSG00000118777_0 (sequence is synthesized)
agtgcccgccactcccactgagattgagagacgcggcaaggaggcagcctgtggaggaactgggtaggatttaggaacgcaccgtgcacatgcttggtggtcttgttaagtggaaactgc

SEQ ID NO: 228260 - DNA, 120 bp, Artificial Sequence
  ENSG00000118777_1 (sequence is synthesized)
tgctttagagtttgtttggaaggtccgggtgactcatcccaacatttacatccttaattgttaaagcgctgcctccgagcgcacgcatcctgagatcctgagcctttggttaagaccgag

SEQ ID NO: 228261 - DNA, 120 bp, Artificial Sequence
  ENSG00000118777_2 (sequence is synthesized)
ctctattaagctgaaaagataaaaactctccagatgtcttccagtaatgtcgaagtttttatcccagtgtcacaaggaaacaccaatggcttccccgcgacagcttccaatgacctgaag

SEQ ID NO: 228262 - DNA, 120 bp, Artificial Sequence
  ENSG00000118777_3 (sequence is synthesized)
gcatttactgaaggagctgtgttaagttttcataacatctgctatcgagtaaaactgaagagtggctttctaccttgtcgaaaaccagttgagaaagaaatattatcgaatatcaatggg

SEQ ID NO: 228263 - DNA, 120 bp, Artificial Sequence
  ENSG00000118777_4 (sequence is synthesized)
atcatgaaacctggtctcaacgccatcctgggacccacaggtggaggcaaatcttcgttattagatgtcttagctgcaaggaaagatccaagtggattatctggagatgttctgataaat

SEQ ID NO: 228264 - DNA, 120 bp, Artificial Sequence
  ENSG00000118777_5 (sequence is synthesized)
ggagcaccgcgacctgccaatttcaaatgtaattcaggttacgtggtacaagatgatgttgtgatgggcactctgacggtgagagaaaacttacagttctcagcagctcttcggcttgca

SEQ ID NO: 228265 - DNA, 120 bp, Artificial Sequence
  ENSG00000118777_6 (sequence is synthesized)
acaactatgacgaatcatgaaaaaaacgaacggattaacagggtcattcaagagttaggtctggataaagtggcagactccaaggttggaactcagtttatccgtggtgtgtctggagga

SEQ ID NO: 228266 - DNA, 120 bp, Artificial Sequence
  ENSG00000118777_7 (sequence is synthesized)
gaaagaaaaaggactagtataggaatggagcttatcactgatccttccatcttgttcttggatgagcctacaactggcttagactcaagcacagcaaatgctgtccttttgctcctgaaa

SEQ ID NO: 228267 - DNA, 120 bp, Artificial Sequence
  ENSG00000118777_8 (sequence is synthesized)
aggatgtctaagcagggacgaacaatcatcttctccattcatcagcctcgatattccatcttcaagttgtttgatagcctcaccttattggcctcaggaagacttatgttccacgggcct

SEQ ID NO: 228268 - DNA, 120 bp, Artificial Sequence
  ENSG00000118777_9 (sequence is synthesized)
gctcaggaggccttgggatactttgaatcagctggttatcactgtgaggcctataataaccctgcagacttcttcttggacatcattaatggagattccactgctgtggcattaaacaga

SEQ ID NO: 228269 - DNA, 120 bp, Artificial Sequence
  ENSG00000118777_10 (sequence is synthesized)
gaagaagactttaaagccacagagatcatagagccttccaagcaggataagccactcatagaaaaattagcggagatttatgtcaactcctccttctacaaagagacaaaagctgaatta

SEQ ID NO: 228270 - DNA, 120 bp, Artificial Sequence
  ENSG00000118777_11 (sequence is synthesized)
catcaactttccgggggtgagaagaagaagaagatcacagtcttcaaggagatcagctacaccacctccttctgtcatcaactcagatgggtttccaagcgttcattcaaaaacttgctg

SEQ ID NO: 228271 - DNA, 120 bp, Artificial Sequence
  ENSG00000118777_12 (sequence is synthesized)
ggtaatccccaggcctctatagctcagatcattgtcacagtcgtactgggactggttataggtgccatttactttgggctaaaaaatgattctactggaatccagaacagagctggggtt

SEQ ID NO: 228272 - DNA, 120 bp, Artificial Sequence
  ENSG00000118777_13 (sequence is synthesized)
ctcttcttcctgacgaccaaccagtgtttcagcagtgtttcagccgtggaactctttgtggtagagaagaagctcttcatacatgaatacatcagcggatactacagagtgtcatcttat

SEQ ID NO: 228273 - DNA, 120 bp, Artificial Sequence
  ENSG00000118777_14 (sequence is synthesized)
ttccttggaaaactgttatctgatttattacccatgaggatgttaccaagtattatatttacctgtatagtgtacttcatgttaggattgaagccaaaggcagatgccttcttcgttatg

SEQ ID NO: 228274 - DNA, 120 bp, Artificial Sequence
  ENSG00000118777_15 (sequence is synthesized)
atgtttacccttatgatggtggcttattcagccagttccatggcactggccatagcagcaggtcagagtgtggtttctgtagcaacacttctcatgaccatctgttttgtgtttatgatg

SEQ ID NO: 228275 - DNA, 120 bp, Artificial Sequence
  ENSG00000118777_16 (sequence is synthesized)
attttttcaggtctgttggtcaatctcacaaccattgcatcttggctgtcatggcttcagtacttcagcattccacgatatggatttacggctttgcagcataatgaatttttgggacaa

SEQ ID NO: 228276 - DNA, 120 bp, Artificial Sequence
  ENSG00000118777_17 (sequence is synthesized)
tgcccaggactcaatgcaacaggaaacaatccttgtaactatgcaacatgtactggcgaagaatatttggtaaagcagggcatcgatctctcaccctggggcttgtggaagaatcacgtg

SEQ ID NO: 228277 - DNA, 120 bp, Artificial Sequence
  ENSG00000118777_18 (sequence is synthesized)
gccttggcttgtatgattgttattttcctcacaattgcctacctgaaattgttatttcttaaaaaatattcttaaatttccccttaattcagtatgatttatcctcacataaaaaagaag

SEQ ID NO: 228278 - DNA, 120 bp, Artificial Sequence
  ENSG00000118777_19 (sequence is synthesized)
cactttgattgaagtattcaatcaagtttttttgttgttttctgttcccttgccatcacactgttgcacagcagcaattgttttaaagagatacatttttagaaatcacaacaaactgaa

SEQ ID NO: 228279 - DNA, 120 bp, Artificial Sequence
  ENSG00000118777_20 (sequence is synthesized)
ttaaacatgaaagaacccaagacatcatgtatcgcatattagttaatctcctcagacagtaaccatggggaagaaatctggtctaatttattaatctaaaaaaggagaattgaattctgg

SEQ ID NO: 228280 - DNA, 120 bp, Artificial Sequence
  ENSG00000118777_21 (sequence is synthesized)
aaactcctgacaagttattactgtctctggcatttgtttcctcatctttaaaatgaataggtaggttagtagcccttcagtcttaatactttatgatgctatggtttgccattatttaat

SEQ ID NO: 228281 - DNA, 120 bp, Artificial Sequence
  ENSG00000118777_22 (sequence is synthesized)
aaatgacaaatgtattaatgctatactggaaatgtaaaattgaaaatatgttggaaaaaagattctgtcttatagggtaaaaaaagccaccgtgatagaaaaaaaatctttttgataagc

SEQ ID NO: 228282 - DNA, 120 bp, Artificial Sequence
  ENSG00000118777_23 (sequence is synthesized)
acattaaagttaatagaacttactgatattcctgtctagtggtataatatctcaggaatcttggctgagggtttggaactgtgggtagagtagagggccaggagtccagtaatagaattc

SEQ ID NO: 228283 - DNA, 120 bp, Artificial Sequence
  ENSG00000118777_24 (sequence is synthesized)
ttgcaccatttctggaacattctagctctgggaggtcacgtaaccttcttggggtagttcagtggtttagtggtttataatccaggtgtgcgtcagaatcatctgaggaactttgctaaa

SEQ ID NO: 228284 - DNA, 120 bp, Artificial Sequence
  ENSG00000118777_25 (sequence is synthesized)
atacaaaaatctggcctaagtagctccagatctaccttcataaaggaatctgaccactcctggatttggtaatttccaagttctgaaaattttacttaggatttaataactattaacatc

SEQ ID NO: 228285 - DNA, 120 bp, Artificial Sequence
  ENSG00000118777_26 (sequence is synthesized)
tgtccctacataggttttctttcctacttatataccttatgttctcttcattctaaccttcatcagtaatagggaaatgttttaattttatttttttagttgaagggtaatgtaccaaaa

SEQ ID NO: 228286 - DNA, 120 bp, Artificial Sequence
  ENSG00000118777_27 (sequence is synthesized)
aatatagttcagtgaattaaaatgaacacacatgtgcaaccatcaattcaggtcaagaaatagaagattgtagcacacaaaagcctactcagccattctcccagtcactacttccttcct

SEQ ID NO: 228287 - DNA, 120 bp, Artificial Sequence
  ENSG00000118777_28 (sequence is synthesized)
tacccctgggttatttttgaaatgacacttgatgtatttccctctgttgctgttatgagaacattgctacagccaagtgttgtgtttctgtgtgcataggttgatacttaattatctccc

SEQ ID NO: 228288 - DNA, 120 bp, Artificial Sequence
  ENSG00000118777_29 (sequence is synthesized)
cactttttaataaacttttaatttggaaataattttagattgacagaaaagttgcaaagatagtgaggaaagttcctgtctactctttgctcagcttcccttaatgttaacattttatat

SEQ ID NO: 228289 - DNA, 120 bp, Artificial Sequence
  ENSG00000118777_30 (sequence is synthesized)
agcaagatgcatttgtcaaagctaacaagttaacattggtacaatcactgttaattaaactgcacacaatattcagatttcaccacttttccactaatattctttcattgttctaggatt

SEQ ID NO: 228290 - DNA, 120 bp, Artificial Sequence
  ENSG00000118777_31 (sequence is synthesized)
caattcaggagaccacatttcatctagccctcttttttaaaagtaaatacttttcagcacttacaggagttaactgagctggggcatcatggtgtatagacgccctgacactggtcatct

SEQ ID NO: 228291 - DNA, 120 bp, Artificial Sequence
  ENSG00000118777_32 (sequence is synthesized)
tggaattcatttagtttgtcagtgggtgccctgacattctgtcacaacatcaatttgggaacatggcattatatttttatctttgaacttttttctttttggatgacatttgattaatgc

SEQ ID NO: 228292 - DNA, 120 bp, Artificial Sequence
  ENSG00000118777_33 (sequence is synthesized)
gtcatcttggaacacattatcttttttcttggttatgtgatcaggaagattaatcagtttttcctgttcttggtataattcctgcttttcacatacctgtcccttacagttctctatata

SEQ ID NO: 228293 - DNA, 120 bp, Artificial Sequence
  ENSG00000118777_34 (sequence is synthesized)
tacccttcccttattacacagagagaaatatctatctatactttttacacaaaatatacttcaaaagaaacaaaacagccacaattattaactttttaaataaatgagaatttaattata

SEQ ID NO: 228294 - DNA, 120 bp, Artificial Sequence
  ENSG00000118777_35 (sequence is synthesized)
agttacatcagggttaaaaaagcacaggaagtttacgcacagagcaaagccatttgctagaattggtttttatccttccatttcgaaaataaagttgctgtttgtgttggagatgctgtc

SEQ ID NO: 228295 - DNA, 120 bp, Artificial Sequence
  ENSG00000118777_36 (sequence is synthesized)
atcagaattccgcggcacaaagagaaagatacaaaaatatctctctgacatgtaactttcccccttcttctagccccttgctaggaatgccagaagaggatcccacgctgactggaacca

SEQ ID NO: 228296 - DNA, 120 bp, Artificial Sequence
  ENSG00000118777_37 (sequence is synthesized)
ttaggtcttttgtttgaatcccagtgatcgagaaagaaatgtggttcataatcagctagtagtggagaaaaaaggaacccaaggagataggagagctgttaatttcactcgggacatttc

SEQ ID NO: 228297 - DNA, 120 bp, Artificial Sequence
  ENSG00000118777_38 (sequence is synthesized)
ctcgaggctagtttactcggaaagcctcaatgttccctggtagctgcaggatctactttgggggctgccaagtttcctctctcattctttctcctgccccaagagcaggcaggaaggaaa

SEQ ID NO: 228298 - DNA, 120 bp, Artificial Sequence
  ENSG00000118777_39 (sequence is synthesized)
gttcctggactgatactcgtctgtttagtaggcgtgggtcctggttgaagtctgtctaggaaaactcctaagtgtagaaatcttcttcgtattaccactgtctctgcactgagatttggg

SEQ ID NO: 228299 - DNA, 120 bp, Artificial Sequence
  ENSG00000118777_40 (sequence is synthesized)
ctgctttgcttccagcgtcacacatcataactgagtgcagtaccggtttgactgtatcttcaagttaagagaattgctgtattccccaaaatatcttggtcatttgaaagtaaagagttc

SEQ ID NO: 228300 - DNA, 120 bp, Artificial Sequence
  ENSG00000118777_41 (sequence is synthesized)
ccatttaacttgctctgggtgcgagcagcgcttgtgactgggcaacctgtgcgtcagcgtccccggtgcttcggcgctccggccagtgacggcgaccaaacccagctaggtcagacgaga

SEQ ID NO: 228301 - DNA, 120 bp, Artificial Sequence
  ENSG00000118777_42 (sequence is synthesized)
tgcgctttcagccgggtcgcagggcgcttatcgcggcccggcagtcggggccacgcctcacccccgcccgcgaaccccgacctggggaaacccggggcgctggggaggggccactgcgtt

SEQ ID NO: 228302 - DNA, 120 bp, Artificial Sequence
  ENSG00000118777_43 (sequence is synthesized)
cagctctggcggtccacagcccgaagcgcggcttaggaagttcgtgtcagcgctgcctgagctcgtcccctggatgtccgggtctccccaggcggccacccgccggctcccatcgtgacc

SEQ ID NO: 228303 - DNA, 120 bp, Artificial Sequence
  ENSG00000118777_44 (sequence is synthesized)
ggccgccgcgcgaggggagcgctcgggcgcgccgggtgtggttgggggaaggggttgtgccgcgcgcgggctgcgtgctgtgcccactcaaaaggttccgggcgcgcaggagggaagagg

SEQ ID NO: 228304 - DNA, 120 bp, Artificial Sequence
  ENSG00000118785_0 (sequence is synthesized)
ggatgtctgcagcagcatttaaattctgggagggcttggttgtcagcagcagcaggaggaggcagagcacagcatcgtcgggaccagactcgtctcaggccagttgcagccttctcagcc

SEQ ID NO: 228305 - DNA, 120 bp, Artificial Sequence
  ENSG00000118785_1 (sequence is synthesized)
aaacgccgaccaaggaaaactcactaccatgagaattgcagtgatttgcttttgcctcctaggcatcacctgtgccataccagttaaacaggctgattctggaagttctgaggaaaagca

SEQ ID NO: 228306 - DNA, 120 bp, Artificial Sequence
  ENSG00000118785_2 (sequence is synthesized)
gctttacaacaaatacccagatgctgtggccacatggctaaaccctgacccatctcagaagcagaatctcctagccccacagacccttccaagtaagtccaacgaaagccatgaccacat

SEQ ID NO: 228307 - DNA, 120 bp, Artificial Sequence
  ENSG00000118785_3 (sequence is synthesized)
ggatgatatggatgatgaagatgatgatgaccatgtggacagccaggactccattgactcgaacgactctgatgatgtagatgacactgatgattctcaccagtctgatgagtctcacca

SEQ ID NO: 228308 - DNA, 120 bp, Artificial Sequence
  ENSG00000118785_4 (sequence is synthesized)
ttctgatgaatctgatgaactggtcactgattttcccacggacctgccagcaaccgaagttttcactccagttgtccccacagtagacacatatgatggccgaggtgatagtgtggttta

SEQ ID NO: 228309 - DNA, 120 bp, Artificial Sequence
  ENSG00000118785_5 (sequence is synthesized)
tggactgaggtcaaaatctaagaagtttcgcagacctgacatccagtaccctgatgctacagacgaggacatcacctcacacatggaaagcgaggagttgaatggtgcatacaaggccat

SEQ ID NO: 228310 - DNA, 120 bp, Artificial Sequence
  ENSG00000118785_6 (sequence is synthesized)
cgcgccttctgattgggacagccgtgggaaggacagttatgaaacgagtcagctggatgaccagagtgctgaaacccacagccacaagcagtccagattatataagcggaaagccaatga

SEQ ID NO: 228311 - DNA, 120 bp, Artificial Sequence
  ENSG00000118785_7 (sequence is synthesized)
tgagagcaatgagcattccgatgtgattgatagtcaggaactttccaaagtcagccgtgaattccacagccatgaatttcacagccatgaagatatgctggttgtagaccccaaaagtaa

SEQ ID NO: 228312 - DNA, 120 bp, Artificial Sequence
  ENSG00000118785_8 (sequence is synthesized)
ggaagaagataaacacctgaaatttcgtatttctcatgaattagatagtgcatcttctgaggtcaattaaaaggagaaaaaatacaatttctcactttgcatttagtcaaaagaaaaaat

SEQ ID NO: 228313 - DNA, 120 bp, Artificial Sequence
  ENSG00000118785_9 (sequence is synthesized)
gctttatagcaaaatgaaagagaacatgaaatgcttctttctcagtttattggttgaatgtgtatctatttgagtctggaaataactaatgtgtttgataattagtttagtttgtggctt

SEQ ID NO: 228314 - DNA, 120 bp, Artificial Sequence
  ENSG00000118785_10 (sequence is synthesized)
catggaaactccctgtaaactaaaagcttcagggttatgtctatgttcattctatagaagaaatgcaaactatcactgtattttaatatttgttattctctcatgaatagaaatttatgt

SEQ ID NO: 228315 - DNA, 120 bp, Artificial Sequence
  ENSG00000118785_11 (sequence is synthesized)
agaagcaaacaaaatacttttacccacttaaaaagagaatataacattttatgtcactataatcttttgttttttaagttagtgtatattttgttgtgattatctttttgtggtgtgaat

SEQ ID NO: 228316 - DNA, 120 bp, Artificial Sequence
  ENSG00000118785_12 (sequence is synthesized)
aaatcttttatcttgaatgtaataagaatttggtggtgtcaattgcttatttgttttcccacggttgtccagcaattaataaaacataaccttttttactgcctatataatgtttttaaa

SEQ ID NO: 228317 - DNA, 120 bp, Artificial Sequence
  ENSG00000118785_13 (sequence is synthesized)
ccaaacaacaaatgggcattgtccccagaagcttggacaaaaaggcacacagagttcaattccagttgaacagaataaaggccaaaatagagctgccttgggggtcactgcaattagact

SEQ ID NO: 228318 - DNA, 120 bp, Artificial Sequence
  ENSG00000118785_14 (sequence is synthesized)
tcaatcagaggcccatcatgccttgaagagatgaaagaaggcattgcctggattctcttctgatgaaatttcattagcaagttttccagctaattggcagtctaaaacttgctcataaat

SEQ ID NO: 228319 - DNA, 120 bp, Artificial Sequence
  ENSG00000118785_15 (sequence is synthesized)
aaaacatgtatttactaaatatcagaaatactaggtttcctcggataagtttagcattacagaagatgtttattaatgcctgttatttgaaacattaatctgcttgcaatttatttaagg

SEQ ID NO: 228320 - DNA, 120 bp, Artificial Sequence
  ENSG00000118785_16 (sequence is synthesized)
tttgaaaatacaggtgttgaatcctaataataaaccagaaaaattaacatctccagagaagatagaggtcatactatttgaggcaagaattagcgtctttttaataaacgaaaatatggc

SEQ ID NO: 228321 - DNA, 120 bp, Artificial Sequence
  ENSG00000118804_0 (sequence is synthesized)
gagctgactggcatctttagatggatggtcctcagtccagtccttccattttacaggcgaggaggcggaagcttggggaggctaagcgcgctgagctggcggcggagcggagcttccact

SEQ ID NO: 228322 - DNA, 120 bp, Artificial Sequence
  ENSG00000118804_1 (sequence is synthesized)
cactagggctcccagtttccccgcaccgcgcccgccgtcctccgggccacccatcccacccgaacgcgccaccgctctagcccgcgctccagcccgcgcgtcaccgacgcccgcggcctc

SEQ ID NO: 228323 - DNA, 120 bp, Artificial Sequence
  ENSG00000118804_2 (sequence is synthesized)
acctctaagttccaggaagctctcggcctctagctgaccgcgttgctgctgagcttccctggggagaaggcgccgaggtgcccggtgcgggccgaggcagggctgggcctcgcgggcagc

SEQ ID NO: 228324 - DNA, 120 bp, Artificial Sequence
  ENSG00000118804_3 (sequence is synthesized)
aggcggaagaaggaagggcggtggggcaggtcccggctgcgcggggcagttgtgcgcacttgggttcttcacgcgggacacacgtggaacgccgacccctgcgcccctggccgctggcaa

SEQ ID NO: 228325 - DNA, 120 bp, Artificial Sequence
  ENSG00000118804_4 (sequence is synthesized)
ctggcaaggccgggaacagaaagtgtagggacagaagagcgctggagtcttccccgggagggagcccggggctgcagcccaggggcggggagcggggcggggctgggaaagttgagtact

SEQ ID NO: 228326 - DNA, 120 bp, Artificial Sequence
  ENSG00000118804_5 (sequence is synthesized)
ggtcgctcagggccgggctccgccggagtgcccggcgcagaaaccgtaaaaggctggagcgggcggggtaggtgtggctctgtgtgcgtgacctgagccccggtcccagtccctgtagtc

SEQ ID NO: 228327 - DNA, 120 bp, Artificial Sequence
  ENSG00000118804_6 (sequence is synthesized)
tcctgcggccgcggcctctcagccatgggcgccgtctggtccgccctgctggttggagggggtctggccggagcacttttcgtttggctgctgcggggcggccctggcgacaccgggaag

SEQ ID NO: 228328 - DNA, 120 bp, Artificial Sequence
  ENSG00000118804_7 (sequence is synthesized)
gacggggatgcggagcaggagaaagacgcccctcttgggggagctgcgattccgggaggccatcagagtggcagcagcggactgagccctggaccttccgggcaggagctggtcaccaaa

SEQ ID NO: 228329 - DNA, 120 bp, Artificial Sequence
  ENSG00000118804_8 (sequence is synthesized)
ccagagcatcttcaagaaagcaatggacatttgatttctaagaccaaagaccttggtaaactgcaagcagcatcatggagattgcagaatccttccagggaagtctgtgacaattcaaga

SEQ ID NO: 228330 - DNA, 120 bp, Artificial Sequence
  ENSG00000118804_9 (sequence is synthesized)
gaacatgttccttctggacagtttccagacacagaagctccagctacctctgagaccagtaactctaggagttactctgaagtttcaagaaatgaaagccttgaatctcctatgggagaa

SEQ ID NO: 228331 - DNA, 120 bp, Artificial Sequence
  ENSG00000118804_10 (sequence is synthesized)
tggggattccaaaaaggacaagagatatctgctaaagcagctacatgttttgcagagaagttgccttctagcaacctgctcaagaacagagctaaagaagaaatgagcctctctgatttg

SEQ ID NO: 228332 - DNA, 120 bp, Artificial Sequence
  ENSG00000118804_11 (sequence is synthesized)
aacagtcaggaccgggttgaccacgaggagtgggaaatggtgcctaggcactcatcttggggggatgttggtgtgggtggcagtcttaaggctccagtgttaaacctaaaccagggaatg

SEQ ID NO: 228333 - DNA, 120 bp, Artificial Sequence
  ENSG00000118804_12 (sequence is synthesized)
gacaatggaagaagcactttggtggaagcaagaggtcagcaagtgcatgggaaaatggaaagggtagcagtgatgcctgcagggtctcagcaagttagtgtcaggttccaggtccattat

SEQ ID NO: 228334 - DNA, 120 bp, Artificial Sequence
  ENSG00000118804_13 (sequence is synthesized)
gtcacaagcactgatgtgcaattcattgcagtaactggagaccatgagtgtcttgggagatggaacacttacatcccactccactataacaaggatgggttctggtctcattccattttc

SEQ ID NO: 228335 - DNA, 120 bp, Artificial Sequence
  ENSG00000118804_14 (sequence is synthesized)
cgctgggaagaatgcagcaatagattcctagaaactggccatgaggataaagtggttcacgcatggtgggggattcactgattcagtttgcaaagtaatggagaagctgtagaacaatgt

SEQ ID NO: 228336 - DNA, 120 bp, Artificial Sequence
  ENSG00000118804_15 (sequence is synthesized)
ggaagaggctgaggttgtggaacacactgaataaaataaaggcagtgtgactccaaattcagccatctgaattgtttaaatttgctagtggattttgtctaatgtgcagaaatatatatg

SEQ ID NO: 228337 - DNA, 120 bp, Artificial Sequence
  ENSG00000118804_16 (sequence is synthesized)
tctaatgtgcagaaatatatatgtgtgtatgtgtgtatatatatgcacacacacacagataatgcttccagtgaatgtgaacttcttttccctgtggcactgattgacagacttgtgctg

SEQ ID NO: 228338 - DNA, 120 bp, Artificial Sequence
  ENSG00000118804_17 (sequence is synthesized)
atccattattactttagggcttgattctcttggggagtgacttggctaagcttcaggtgtaaactgtggtcacggagcaaaaacattaaccagctgcccagggttcaagcttgagccttt

SEQ ID NO: 228339 - DNA, 120 bp, Artificial Sequence
  ENSG00000118804_18 (sequence is synthesized)
aggtgatctttaaactatggtagtaaaataagcctcactcaaacatagctgacttcctattggtacagcttgaaaagcactttttactacatacacattttatgcttaaaaagttaacat

SEQ ID NO: 228340 - DNA, 120 bp, Artificial Sequence
  ENSG00000118804_19 (sequence is synthesized)
gatacgaaactgtgattagaaaatatctggtctggatgtgattagtaaggatacaagataatgttctaagactgcctaatgctttttgtttgattttcatctgccaggcgttgttatgtg

SEQ ID NO: 228341 - DNA, 120 bp, Artificial Sequence
  ENSG00000118804_20 (sequence is synthesized)
ctatgagggtagcaagtacgtctttgtcttaatgatctaaggctggtgtagaaacaaagggcctaatgagaaccaatcatcatggaagtcagttgcgggggcagcccataaggaaaggga

SEQ ID NO: 228342 - DNA, 120 bp, Artificial Sequence
  ENSG00000118804_21 (sequence is synthesized)
aagtgagtggggttgggcataggctgagtgaggtggcctgaatgacacctcttagaggactgtgaagtacaggcacagcccgactgcagggagggatgcacccatcatttacccatggga

SEQ ID NO: 228343 - DNA, 120 bp, Artificial Sequence
  ENSG00000118804_22 (sequence is synthesized)
gcatctgtaggaccatctctctcccacttcttctcccctcccccaccgcatctggccagatggactgtcctacagcaatcgtttccatctgtcaccctcttccctctcctttcataccag

SEQ ID NO: 228344 - DNA, 120 bp, Artificial Sequence
  ENSG00000118804_23 (sequence is synthesized)
tcactatcttgggtaacaaatttatacaggacagtggtacagaaatacatctttgctctgagaatacagcaaatattaacttaaattattataactgaacaaataataaaacctgaattt

SEQ ID NO: 228345 - DNA, 120 bp, Artificial Sequence
  ENSG00000118804_24 (sequence is synthesized)
taatatcttcatttgatgtctgaattatttgtctaaattttagtatcacaatagcctagatgtaaaataaaatacaaatattttcctccactaataagagacatatacagaaaagcaaac

SEQ ID NO: 228346 - DNA, 120 bp, Artificial Sequence
  ENSG00000118804_25 (sequence is synthesized)
atcaaaaggtacagaagacatgaagattctgtttttctcctccctttggagaaaaagttgacaatatttattctcaaagttcacctttgactggagggaaattcagcacgcctgtacttg

SEQ ID NO: 228347 - DNA, 120 bp, Artificial Sequence
  ENSG00000118804_26 (sequence is synthesized)
aaaatgaattcttacatgttaaaataacttttaataagtttaacatctatcagtgaaataatgtttaatccttttaaacagatggtctttgctgaaaagaataaacccaactgaaaatag

SEQ ID NO: 228348 - DNA, 120 bp, Artificial Sequence
  ENSG00000118804_27 (sequence is synthesized)
cattagaaagtacttaaaagaactatgtttgacagtttttggctcatagcacttttatgttaaattcatgtatactgtttacagacttcataatgaattttatattgtaccagtaagctc

SEQ ID NO: 228349 - DNA, 89 bp, Artificial Sequence
  ENSG00000118816_0 (sequence is synthesized)
ctccctccccagccttccccgcgagcggacgcggcagcgcctctgtctcgctttttcttatttttcccccctttcccccctccccccct

SEQ ID NO: 228350 - DNA, 120 bp, Artificial Sequence
  ENSG00000118816_1 (sequence is synthesized)
ttcaccatttcccctcggaggcgctttccccgggcaggggcagagccggtctcaccccccgcctctccccggcccccgccgccctatggcgagagggagccccctcccaacccgggctcg

SEQ ID NO: 228351 - DNA, 120 bp, Artificial Sequence
  ENSG00000118816_2 (sequence is synthesized)
agcggcggcggcctcaggccgggggtcatcatggaactaattcgctgaccgacccagcggccgcagccgtgcgtcccgctcgagcgccagcgcccgcgcccgcgccccccgatccgcttc

SEQ ID NO: 228352 - DNA, 120 bp, Artificial Sequence
  ENSG00000118816_3 (sequence is synthesized)
ccctttctccctcctcagttggccgagtcgtcccgcgcgcaccgcctccgcgcgcctatgagaatgaggtggtaacgggcccccggatgaccccgcgtcaccactgtgaggcctacagct

SEQ ID NO: 228353 - DNA, 120 bp, Artificial Sequence
  ENSG00000118816_4 (sequence is synthesized)
ctgccggggaggaggaggaggaggaagaggaggagaaggtagctacagcaagctgggtagcaggcagatccaaaggatatcatgaagtttccagggcctttggaaaaccagagattgtct

SEQ ID NO: 228354 - DNA, 120 bp, Artificial Sequence
  ENSG00000118816_5 (sequence is synthesized)
ttcctgttggaaaaggcaatcactagggaagcacagatgtggaaagtgaatgtgcggaaaatgccttcaaatcagaatgtttctccatcccagagagatgaagtaattcaatggctggcc

SEQ ID NO: 228355 - DNA, 120 bp, Artificial Sequence
  ENSG00000118816_6 (sequence is synthesized)
aaactcaagtaccaattcaacctttacccagaaacatttgctctggctagcagtcttttggataggtttttagctaccgtaaaggctcatccaaaatacttgagttgtattgcaatcagc

SEQ ID NO: 228356 - DNA, 120 bp, Artificial Sequence
  ENSG00000118816_7 (sequence is synthesized)
tgttttttcctagctgccaagactgttgaggaagatgagagaattccagtactaaaggtattggcaagagacagtttctgtggatgttcctcatctgaaattttgagaatggagagaatt

SEQ ID NO: 228357 - DNA, 120 bp, Artificial Sequence
  ENSG00000118816_8 (sequence is synthesized)
attctggataagttgaattgggatcttcacacagccacaccattggattttcttcatattttccatgccattgcagtgtcaactaggcctcagttacttttcagtttgcccaaattgagc

SEQ ID NO: 228358 - DNA, 120 bp, Artificial Sequence
  ENSG00000118816_9 (sequence is synthesized)
ccatctcaacatttggcagtccttaccaagcaactacttcactgtatggcctgcaaccaacttctgcaattcagaggatccatgcttgctctggccatggttagtctggaaatggagaaa

SEQ ID NO: 228359 - DNA, 120 bp, Artificial Sequence
  ENSG00000118816_10 (sequence is synthesized)
ctcattcctgattggctttctcttacaattgaactgcttcagaaagcacagatggatagctcccagttgatccattgtcgggagcttgtggcacatcacctttctactctgcagtcttcc

SEQ ID NO: 228360 - DNA, 120 bp, Artificial Sequence
  ENSG00000118816_11 (sequence is synthesized)
cagcaagccagaagtgccagtcagaggtacagcagccttttaccatcatctcccagctgccagtgggtgcaagcagacctctactaaacgcaaagtagaggaaatggaagtggatgactt

SEQ ID NO: 228361 - DNA, 120 bp, Artificial Sequence
  ENSG00000118816_12 (sequence is synthesized)
ctatgatggaatcaaacggctctataatgaagataatgtctcagaaaatgtgggttctgtgtgtggcactgatttatcaagacaagagggacatgcttccccttgtccacctttgcagcc

SEQ ID NO: 228362 - DNA, 120 bp, Artificial Sequence
  ENSG00000118816_13 (sequence is synthesized)
tgtttctgtcatgtagtttcaacaagtgctacctttgagtgtaaactaaggtagactactttgggaatgagaacatgcaaaatcaggaaaggctgtagaaggaaatataccttaacaggc

SEQ ID NO: 228363 - DNA, 120 bp, Artificial Sequence
  ENSG00000118816_14 (sequence is synthesized)
tgatttggagtgagccagaaaaaaaaaataaaactctcattatttgtgtggctaattataattcagcgttatttaagcacataaagaccaaaaaaaaaaaaaagaaatccaaaagatcca

SEQ ID NO: 228364 - DNA, 120 bp, Artificial Sequence
  ENSG00000118816_15 (sequence is synthesized)
aactttttttaaacttaaaaaatctctttgtagtatgtcagttgcactttttttctgccataatgtaacgtagcttgccccgtcaaaaattcaattaaaattcatggccagcaatcctgt

SEQ ID NO: 228365 - DNA, 120 bp, Artificial Sequence
  ENSG00000118816_16 (sequence is synthesized)
tccccctcagcatcctgatttaattttcctgttgcttttgcttgcttctccatttaatagttactgaactttatgcatgttgatctatattgattttcactgcagttgaatgaacaaatt

SEQ ID NO: 228366 - DNA, 120 bp, Artificial Sequence
  ENSG00000118816_17 (sequence is synthesized)
atttcagtgtgacagccatgactcaagttccaattagtctgaaaagggtactttggaattgtcccatattaatcagagatggcaaaagaaaaagttctcatattaccaggttgattttgt

SEQ ID NO: 228367 - DNA, 120 bp, Artificial Sequence
  ENSG00000118816_18 (sequence is synthesized)
gtctcatttcaaattttaatttaaaattatggttttcatttttgtttaccttaaagtgatgcttaaaagtggcatgtaattaggacacttaggtttgttgaaagcattttcgacatttgt

SEQ ID NO: 228368 - DNA, 120 bp, Artificial Sequence
  ENSG00000118816_19 (sequence is synthesized)
ataaaagaatttgtgataaatatatccaggtgctcaccaaagaaacatgtattaacaacttaaattagatttttctaactgatagttttcactcatttataatcagtaggagagactgtc

SEQ ID NO: 228369 - DNA, 120 bp, Artificial Sequence
  ENSG00000118816_20 (sequence is synthesized)
tagatgttggggcagctctatgatttaagtctgtaacatgttataactgaatttagtaccctagttttgttaagctattaggattttctaatagaacttactccccctgcctccccagcc

SEQ ID NO: 228370 - DNA, 120 bp, Artificial Sequence
  ENSG00000118816_21 (sequence is synthesized)
ttatgtttcttttaatgacttctggatcctgagctccctttgcagtctgaaaaaggtattgcagtcagaactgtgtactgatgataaaagcctctggtagcaataaaaagttgtccttaa

SEQ ID NO: 228371 - DNA, 120 bp, Artificial Sequence
  ENSG00000118816_22 (sequence is synthesized)
aaataactggaatttgaaaggaggacagaggagcctccgctggagctagggggctccgttacagatccttttggcagaagttgacaattgggtatcaaaacagtggaaggtgtttcggga

SEQ ID NO: 228372 - DNA, 120 bp, Artificial Sequence
  ENSG00000118816_23 (sequence is synthesized)
tatatatgctatctcatttaatatctcatttaattctttgaaaaagtactcagtagtcccaatttgctcaagactttaataagtaatagaatgataatttgggctggacgcagtggctca

SEQ ID NO: 228373 - DNA, 120 bp, Artificial Sequence
  ENSG00000118816_24 (sequence is synthesized)
gcatcccccagcccggggaacctcggggccgccctcttcgtcctctccggcccagacagacccgtcacctgcccacttgaaaacggcactactgtgttccttttcgggccagtttttctg

SEQ ID NO: 228374 - DNA, 120 bp, Artificial Sequence
  ENSG00000118816_25 (sequence is synthesized)
tcagcgagtaacttttttttgtggcagcggcaaattagctactctatagtgcgtgttggaggctctacgagcccgtgttaatacacaaagaaggggacacacccccaccctcaggtagct

SEQ ID NO: 228375 - DNA, 120 bp, Artificial Sequence
  ENSG00000118816_26 (sequence is synthesized)
atctgaaattttgagaatggagagaattattctggataagttgaattgggatcttcacacagccacaccattggattttcttcatattatggatagctcccagttgatccattgtcggga

SEQ ID NO: 228376 - DNA, 120 bp, Artificial Sequence
  ENSG00000118816_27 (sequence is synthesized)
tggaaagtgaatgtgcggaaaatgccttcaaatcaggtaatgatttttctcttaagacagatgaattttattagaaataaacatactactgccatacataataatatcttgacactacat

SEQ ID NO: 228377 - DNA, 120 bp, Artificial Sequence
  ENSG00000118816_28 (sequence is synthesized)
tctgatctaaaaagtaatgagtggcagtcacattaattgaattccatagtattttgtgtatacctgtctcatctgcatatctaggtttttaaaacagttacaaaaagttaaattgttttt

SEQ ID NO: 228378 - DNA, 120 bp, Artificial Sequence
  ENSG00000118849_0 (sequence is synthesized)
gagcccgtgtctgtcgggtgccgagccaactttcctgcgtccatgcagccccgccggcaacggctgcctgctccctggtccgggcccaggggcccgcgccccaccgccccgctgctcgcg

SEQ ID NO: 228379 - DNA, 120 bp, Artificial Sequence
  ENSG00000118849_1 (sequence is synthesized)
ccccggtggcggcgcccgcggggtccggggaccccgacgaccctgggcagcctcaggatgctggggtcccgcgcaggctcctgcagcaggcggcgcgcgcggcgcttcacttcttcaact

SEQ ID NO: 228380 - DNA, 120 bp, Artificial Sequence
  ENSG00000118849_2 (sequence is synthesized)
cttcacttcttcaacttccggtccggctcgcccagcgcgctacgagtgctggccgaggtgcaggagggccgcgcgtggattaatccaaaagagggatgtaaagttcacgtggtcttcagc

SEQ ID NO: 228381 - DNA, 120 bp, Artificial Sequence
  ENSG00000118849_3 (sequence is synthesized)
acagagcgctacaacccagagtctttacttcaggaaggtgagggacgtttggggaaatgttctgctcgagtgtttttcaagaatcagaaacccagaccaaccatcaatgtaacttgtaca

SEQ ID NO: 228382 - DNA, 120 bp, Artificial Sequence
  ENSG00000118849_4 (sequence is synthesized)
cggctcatcgagaaaaagaaaagacaacaagaggattacctgctttacaagcaaatgaagcaactgaaaaaccccttggaaatagtcagcatacctgataatcatggacatattgatccc

SEQ ID NO: 228383 - DNA, 120 bp, Artificial Sequence
  ENSG00000118849_5 (sequence is synthesized)
tctctgagactcatctgggatttggctttccttggaagctcttacgtgatgtgggaaatgacaacacaggtgtcacactactacttggcacagctcactagtgtgaggcagtggaaaact

SEQ ID NO: 228384 - DNA, 120 bp, Artificial Sequence
  ENSG00000118849_6 (sequence is synthesized)
aatgatgatacaattgattttgattatactgttctacttcatgaattatcaacacaggaaataattccctgtcgcattcacttggtctggtaccctggcaaacctcttaaagtgaagtac

SEQ ID NO: 228385 - DNA, 120 bp, Artificial Sequence
  ENSG00000118849_7 (sequence is synthesized)
tccggaactgaagaaggatcagctgtagtaccaacagagcttagtaatttctaaaaagaaaaaatgatctttttccgacttctaaacaagtgactatactagcataaatcattcttctag

SEQ ID NO: 228386 - DNA, 120 bp, Artificial Sequence
  ENSG00000118849_8 (sequence is synthesized)
taaaacagctaaggtatagacattctaataatttgggaaaacctatgattacaagtaaaaactcagaaatgcaaagatgttggttttttgtttctcagtctgctttagcttttaactctg

SEQ ID NO: 228387 - DNA, 120 bp, Artificial Sequence
  ENSG00000118849_9 (sequence is synthesized)
gaagcgcatgcacactgaactctgctcagtgctaaacagtcaccagcaggttcctcagggtttcagccctaaaatgtaaaacctggataatcagtgtatgttgcaccagaatcagcattt

SEQ ID NO: 228388 - DNA, 120 bp, Artificial Sequence
  ENSG00000118849_10 (sequence is synthesized)
tttttttaactgcaaaaaatgatggtctcatctctgaatttatatttctcattcttttgaacatactatagctaatatattttatgttgctaaattgcttctatctagcatgttaaacaa

SEQ ID NO: 228389 - DNA, 120 bp, Artificial Sequence
  ENSG00000118849_11 (sequence is synthesized)
agataatatactttcgatgaaagtaaattataggaaaaaaattaactgttttaaaaagaacttgattatgttttatgatttcaggcaagtattcatttttaacttgctacctacttttaa

SEQ ID NO: 228390 - DNA, 120 bp, Artificial Sequence
  ENSG00000118849_12 (sequence is synthesized)
ataaatgtttacatttctaaataatgaaatgtgttgaatgttctcgtgaagatttgtatacaaaggaaaaatttgtgctaaactggaattaaatgaaatggtaatattgcttaacttaaa

SEQ ID NO: 228391 - DNA, 120 bp, Artificial Sequence
  ENSG00000118849_13 (sequence is synthesized)
ttttacaaataatagaacgtctgtctcaccagataaagctgtctgcaaacatgcatcaaaagaaacactgatgtaactgaaagtatattaaatatttacaattttcatttacaaggacaa

SEQ ID NO: 228392 - DNA, 120 bp, Artificial Sequence
  ENSG00000118849_14 (sequence is synthesized)
aacttgtgccacaagagttacaatcaaagtggtctccttagactgaattcatgcgaacttctaatttcatatcaagagttgtaatcacatttatttcaataaatatgtgagttcctgcaa

SEQ ID NO: 228393 - DNA, 120 bp, Artificial Sequence
  ENSG00000118855_0 (sequence is synthesized)
agtcacccaggaaaagcgaaccgcgccaggccctgtcatcgaccgctgggtccgtcctcccagcgctcgcggccgctcacatgggcgtggccctgcgtgacctgccggggcgtcacgtga

SEQ ID NO: 228394 - DNA, 120 bp, Artificial Sequence
  ENSG00000118855_1 (sequence is synthesized)
gctcccggagtcatgtgaccgccgtcttgacagtgttccacgggcgctgcttcctgcctgggtttggagttgtcaccactttcccctctccgtctcctgcgggcgcaatggaggaggagg

SEQ ID NO: 228395 - DNA, 120 bp, Artificial Sequence
  ENSG00000118855_2 (sequence is synthesized)
atgaggaagcgcgggcgctcctggcaggcggccctgacgaggccgacagaggtgccccggccgcccctggagccctgccggccctctgcgaccccagtcgcctggcgcaccggcttttgg

SEQ ID NO: 228396 - DNA, 120 bp, Artificial Sequence
  ENSG00000118855_3 (sequence is synthesized)
tgctgttactgatgtgcttccttggctttggcagctatttttgctatgataatcctgctgcccttcagactcaagttaaacgagatatgcaagtgaataccacgaaattcatgctgctgt

SEQ ID NO: 228397 - DNA, 120 bp, Artificial Sequence
  ENSG00000118855_4 (sequence is synthesized)
atgcctggtattcttggcccaatgtagttttgtgtttctttggtggctttttgatagaccgagtatttggaatacgatggggcacaatcatttttagctgctttgtttgcattggacagg

SEQ ID NO: 228398 - DNA, 120 bp, Artificial Sequence
  ENSG00000118855_5 (sequence is synthesized)
ttgtttttgccctgggtggaatatttaatgctttttggctgatggaatttggaagatttgtatttgggattggtggcgagtccttagcagttgcccagaatacatatgctgtgagctggt

SEQ ID NO: 228399 - DNA, 120 bp, Artificial Sequence
  ENSG00000118855_6 (sequence is synthesized)
ttaaaggcaaagaattaaacctggtgtttggacttcaacttagcatggctagaattggaagtacagtaaacatgaacctcatgggatggctgtattctaagattgaagctttgttaggtt

SEQ ID NO: 228400 - DNA, 120 bp, Artificial Sequence
  ENSG00000118855_7 (sequence is synthesized)
ctgctggtcacacaaccctcgggatcacacttatgattgggggtataacgtgtattctttcactaatctgtgccttggctcttgcctacttggatcagagagcagagagaatccttcata

SEQ ID NO: 228401 - DNA, 120 bp, Artificial Sequence
  ENSG00000118855_8 (sequence is synthesized)
aagaacaaggaaaaacaggtgaagttattaaattaactgatgtaaaggacttctccttacccctgtggcttatatttatcatctgtgtctgctattatgttgctgtgttcccttttattg

SEQ ID NO: 228402 - DNA, 120 bp, Artificial Sequence
  ENSG00000118855_9 (sequence is synthesized)
tatcagctcccatgtccccggtgtttgggctcctggtggataaaacagggaagaacatcatctgggttctttgcgcagtagcagccactcttgtgtcccacatgatgctggcctttacga

SEQ ID NO: 228403 - DNA, 120 bp, Artificial Sequence
  ENSG00000118855_10 (sequence is synthesized)
tgtggaacccttggattgctatgtgtcttctgggactctcctactcattgcttgcctgtgcattgtggccaatggtggcatttgtagttcctgaacatcagctgggaactgcatatggct

SEQ ID NO: 228404 - DNA, 120 bp, Artificial Sequence
  ENSG00000118855_11 (sequence is synthesized)
tcatgcagtccattcagaatcttgggttggccatcatttccatcattgctggtatgatactggattctcgggggtatttgtttttggaagtgttcttcattgcctgtgtttctttgtcac

SEQ ID NO: 228405 - DNA, 120 bp, Artificial Sequence
  ENSG00000118855_12 (sequence is synthesized)
ttttatctgtggtcttactctatttggtgaatcgtgcccagggtgggaacctaaattattctgcaagacaaagggaagaaataaaattttcccatactgaatgagaagttaaaatgaatg

SEQ ID NO: 228406 - DNA, 120 bp, Artificial Sequence
  ENSG00000118855_13 (sequence is synthesized)
tgtcatgagaatgggcttaacacatcgttggtttgaaaacttccatttttaaaaatttagagtttagtcattagaaaaaataatggactggaaagttatatttatatccaaatataccta

SEQ ID NO: 228407 - DNA, 120 bp, Artificial Sequence
  ENSG00000118855_14 (sequence is synthesized)
tttcaaagtgtatttgtgaggcctgttttagcctgtgtcttttgtattgtgtgttgctaaagaattctacttttagtaggctaatcaacaatgaaagggttagaaaattgctgtggaaca

SEQ ID NO: 228408 - DNA, 120 bp, Artificial Sequence
  ENSG00000118855_15 (sequence is synthesized)
tccaggtgaacttcaggaaagacagtgaaaaatggaaaacgttggagcttctgttgagataatcttcattaggtatatatcttagggatacagccttttctttatcttatagcaggaaaa

SEQ ID NO: 228409 - DNA, 120 bp, Artificial Sequence
  ENSG00000118855_16 (sequence is synthesized)
aaaaacttttgagggaaatagaagggctgcgttacacaaaataaacaatggcattgtcataggccttccttttactagtagggcataatgctagggaatatgtgaagatgtttttatgaa

SEQ ID NO: 228410 - DNA, 120 bp, Artificial Sequence
  ENSG00000118855_17 (sequence is synthesized)
gtctctttctgatcacgaacaatagcttgcgctctactctgtagttatgtggattgccgagcaatgacccttttcaatttcttatttctgtgttactgaggaccctaatcacttagggat

SEQ ID NO: 228411 - DNA, 120 bp, Artificial Sequence
  ENSG00000118855_18 (sequence is synthesized)
gtaattttatagtataaactttctgtacagtttttcttatagtctaataagtaaaaagtgtccttcaaattatgataattgcctatgtacatggataaattaaaacactgcacacggagt

SEQ ID NO: 228412 - DNA, 120 bp, Artificial Sequence
  ENSG00000118855_19 (sequence is synthesized)
tgctgttactgatgtgcttccttggctttgctatttttgctatgataatcctgctgcccttcagactcaagttaaacgaatggggcacaatcatttttagctgctttgtttgcattggac

SEQ ID NO: 228413 - DNA, 120 bp, Artificial Sequence
  ENSG00000118855_20 (sequence is synthesized)
tttccaccatattctattggttgaagtagtcacaagcccacctggattcaaggggaggggacagaggccccatctcttgataggagaagtgccaacattttaaacctgctgcattgctaa

SEQ ID NO: 228414 - DNA, 120 bp, Artificial Sequence
  ENSG00000118855_21 (sequence is synthesized)
cggaagttgaagaagtgaagcgccgcgcgcgccgcctgctgcaggagcctgcgcgggaccccagcatcctgaggctgcccagggtcgtcggggtccccggaccccgcgggcgccgccacc

SEQ ID NO: 228415 - DNA, 120 bp, Artificial Sequence
  ENSG00000118855_22 (sequence is synthesized)
ggggcgagcaacagcagcagcgcgagcagcggggcggtggggcgcgggcccctgggcccggaccagggagcaggcagccgttgccggcggggctgcatggacgcaggaaagttggctcgg

SEQ ID NO: 228416 - DNA, 120 bp, Artificial Sequence
  ENSG00000118855_23 (sequence is synthesized)
atgttgctagttactccgcgtccggaacgtggaggtcgagggactgagctgggcgagttttgtggcactcctttgctcttcagtaagtcccaggggctagcgactcgccctagaggcgat

SEQ ID NO: 228417 - DNA, 120 bp, Artificial Sequence
  ENSG00000118855_24 (sequence is synthesized)
aatatgatgacaaatgaaaatggttaagacagcatgtatcttgtcgctaaaaggatactcttagggcagagacttgttttgtatattttgaatacgaattttagcctaataacaacaaaa

SEQ ID NO: 228418 - DNA, 120 bp, Artificial Sequence
  ENSG00000118855_25 (sequence is synthesized)
tttgcttgaatatatatatattaactactctgtcacttttgctaatctgcattaaaggaaaatcaccttttggttaatgtaagactgtgaccttttctgcgttgctttctgtagtgtctt

SEQ ID NO: 228419 - DNA, 120 bp, Artificial Sequence
  ENSG00000118855_26 (sequence is synthesized)
gtgagtattccgtatgacaacattttgtttcttttactacataacagaatgttcttatttttacttaggcatagctcccagatttgcctaattctcacctgtgaattagaatttcatagc

SEQ ID NO: 228420 - DNA, 120 bp, Artificial Sequence
  ENSG00000118855_27 (sequence is synthesized)
tggtgactttctagccctctgaagattcacaggcattttttaggagattcctatccttaaaggcagtgattgagttggtttcatattctgttttaactatttacagtttaaaaaaaaaaa

SEQ ID NO: 228421 - DNA, 120 bp, Artificial Sequence
  ENSG00000118855_28 (sequence is synthesized)
tttgtctctgtcacccagactggaatgcagtggagcagtcacagctcaatgtaactttgaactgcggagttcaggtgatcctcccacctcagcctccgtgatagctaagactacagtgtc

SEQ ID NO: 228422 - DNA, 120 bp, Artificial Sequence
  ENSG00000118855_29 (sequence is synthesized)
ccaggccctgggggaatgagggtgaacaatcttaaacatctctgccttcctggagcacaccttctaggcagctatttttgctatgataatcctgctgcccttcagactcaagttaaacga

SEQ ID NO: 228423 - DNA, 120 bp, Artificial Sequence
  ENSG00000118855_30 (sequence is synthesized)
atcgtcatcgtggtcactggtgccacggggcctcagcgcagcttctgtcttaagctcctgggcctccttattttcccctttgcgatcgattccagccacacctgtggatgttgctagtta

SEQ ID NO: 228424 - DNA, 120 bp, Artificial Sequence
  ENSG00000118855_31 (sequence is synthesized)
aaataggtgacttaaaagaaggcattccatcatagatggcaaaaaaccaaaaatctgttggaccagtaactcttctttttctttgacttgcttagtaggttaaaaagtgataatgaattc

SEQ ID NO: 228425 - DNA, 120 bp, Artificial Sequence
  ENSG00000118855_32 (sequence is synthesized)
aagtttttgttattgttgttcaaaacatcatttttaagacccgaggctctagtgctgcatttcctacctgttaataaaggaatatctggaacataaatatttgtgcagtgagtgggcatt

SEQ ID NO: 228426 - DNA, 120 bp, Artificial Sequence
  ENSG00000118855_33 (sequence is synthesized)
tctctagaagtgtttcaacagatacagtacagactcctagaagtagagatgctacagcagtgggtttgcgtatttaacatcttggttgagattgtgaaactttctccgataactttctac

SEQ ID NO: 228427 - DNA, 120 bp, Artificial Sequence
  ENSG00000118855_34 (sequence is synthesized)
ccatttataactttagtaatatacaatgtgactttttttagtatccttgctagtattgggcattgtcattgttttaatctttgccaatctgatagttataagtgatactcatttaaattt

SEQ ID NO: 228428 - DNA, 120 bp, Artificial Sequence
  ENSG00000118855_35 (sequence is synthesized)
aaatcacaatatttcttttttaattgaagaaaaaatcagcattaggtgaggtttaccaagcattggtggtgattactgggtattggtggctcagacgtaggatgatggactgttggcatg

SEQ ID NO: 228429 - DNA, 120 bp, Artificial Sequence
  ENSG00000118855_36 (sequence is synthesized)
atattgccttgattgcctaatctgtaactcctaataaatactggaaaattagcttgcctgaaacattggtaagaactttttaaaaattacctttattttcttacttggtccttgactgca

SEQ ID NO: 228430 - DNA, 120 bp, Artificial Sequence
  ENSG00000118855_37 (sequence is synthesized)
cttgtcaaggctcagccccgtggcctgcactcacctctcctcctgatggccttagcctcctgattgagactgcacactcagaccatgctgttaggactgagggatttttagtcccccaag

SEQ ID NO: 228431 - DNA, 120 bp, Artificial Sequence
  ENSG00000118855_38 (sequence is synthesized)
taccaatgagagctggagaagtgacaagtggatgtgtccagagaaggaggccgaggcagaccgtgctctctgtttccacagtatcccttctccatttctcccttactgtgatggtctgag

SEQ ID NO: 228432 - DNA, 120 bp, Artificial Sequence
  ENSG00000118855_39 (sequence is synthesized)
actcaaagtgatggattaggaggtagggcctttgaggggtgattagtggctgtatgaaagaggcccgagagtggcacctcatcttttccatcacgcgaggacacagcaaaaaggccctgt

SEQ ID NO: 228433 - DNA, 87 bp, Artificial Sequence
  ENSG00000118855_40 (sequence is synthesized)
agttgctgtttttgctgtttatgtaatgtacttctccttaggaaccttctgtttggttctcttttcaaaggggtataacgtgtattc

SEQ ID NO: 228434 - DNA, 120 bp, Artificial Sequence
  ENSG00000118873_0 (sequence is synthesized)
gtttctccgccttctgcttggctagagctattggggctcggtggcggccgcagtggggtggagggggcagggcgtggtgaggtaaggtgagtgccgtagtggggttccctggagccatgg

SEQ ID NO: 228435 - DNA, 120 bp, Artificial Sequence
  ENSG00000118873_1 (sequence is synthesized)
cctgctccattgtccagttctgctacttccaggacctccaggccgcccgggacttcctctttcctcacctgcgggaggagatcctcagcggcgccttgcggagggaccccagtaaatcaa

SEQ ID NO: 228436 - DNA, 120 bp, Artificial Sequence
  ENSG00000118873_2 (sequence is synthesized)
cagactgggaagatgatggttggggagcatgggaagaaaatgaaccacaagaacctgaagaagaaggaaatacttgcaaaacacaaaaaacttcctggctccaagattgtgttttatcct

SEQ ID NO: 228437 - DNA, 120 bp, Artificial Sequence
  ENSG00000118873_3 (sequence is synthesized)
tatctccaaccaatgatcttatggtgatagctcgagagcaaaaagctgtatttctagtgccaaaatggaaatatagtgataaaggaaaggaagaaatgcaatttgctgttggctggagtg

SEQ ID NO: 228438 - DNA, 120 bp, Artificial Sequence
  ENSG00000118873_4 (sequence is synthesized)
gttccttaaatgtcgaagaaggggaatgtgtaaccagtgctctatgtatcccactagcaagccaaaagaggagttccactgggcgtcctgactggacctgcattgtggtgggttttactt

SEQ ID NO: 228439 - DNA, 120 bp, Artificial Sequence
  ENSG00000118873_5 (sequence is synthesized)
caggttatgtacgcttctacactgagaatggtgtgctcttgcttgcacagcttttgaatgaggacccagtacttcaacttaaatgcagaacctatgaaataccacgacatcccggcgtga

SEQ ID NO: 228440 - DNA, 120 bp, Artificial Sequence
  ENSG00000118873_6 (sequence is synthesized)
ctgagcagaatgaagagttgagtatcttatatccagctgccattgtgactattgatggatttagcctttttcaatctcttcgtgcttgtcgaaatcaggtagcaaaagctgcagcatcag

SEQ ID NO: 228441 - DNA, 120 bp, Artificial Sequence
  ENSG00000118873_7 (sequence is synthesized)
gcaatgagaacatacaaccaccaccattagcttataagaaatggggtctacaagatattgacactattattgatcatgctagtgttggtattatgactctgtccccctttgatcaaatga

SEQ ID NO: 228442 - DNA, 120 bp, Artificial Sequence
  ENSG00000118873_8 (sequence is synthesized)
agactgcctccaatataggtggatttaatgcagcaattaaaaatagtccacctgccatgtctcagtatatcactgtagggtccaatccatttactggcttcttctatgctttagagggaa

SEQ ID NO: 228443 - DNA, 120 bp, Artificial Sequence
  ENSG00000118873_9 (sequence is synthesized)
gcacacaaccattattatcccatgttgcactagcagttgcaagtaaactcacttctgctttatttaatgctgccagtggttggcttggttggaaaagtaagcacgaagaagaagctgtcc

SEQ ID NO: 228444 - DNA, 120 bp, Artificial Sequence
  ENSG00000118873_10 (sequence is synthesized)
aaaagcaaaagccgaaggttgagccagctaccccattagctgtaagatttggacttccagattctagacgccatggtgaaagcatatgtctgtctccatgtaacacactggcagcagtaa

SEQ ID NO: 228445 - DNA, 120 bp, Artificial Sequence
  ENSG00000118873_11 (sequence is synthesized)
cagatgatttcggcagagttattttattggatgtagctagaggaattgcaatacgcatgtggaaagggtaccgcgacgcacaaattggatggattcaaactgtagaggacctccatgaaa

SEQ ID NO: 228446 - DNA, 120 bp, Artificial Sequence
  ENSG00000118873_12 (sequence is synthesized)
gagtgccagaaaaggcagatttttccccctttggaaattctcagggtccaagtcgagtagctcaattccttgtgatctatgcgccaagaaggggaattttagaagtgtggagcacacagc

SEQ ID NO: 228447 - DNA, 120 bp, Artificial Sequence
  ENSG00000118873_13 (sequence is synthesized)
agggacctagagtaggagctttcaatgtggggaagcactgcaggctgctgtatcctggctataaaataatgggtttaaataatgttaccagtcagagttggcagccacagacttatcaga

SEQ ID NO: 228448 - DNA, 120 bp, Artificial Sequence
  ENSG00000118873_14 (sequence is synthesized)
tctgtctggttgatccagtgtctggaagtgtgaaaacagtgaacgttcccttccatttagcactgagtgataagaagagtgaacgagccaaggatatgcacctagtgaagaaactagcag

SEQ ID NO: 228449 - DNA, 120 bp, Artificial Sequence
  ENSG00000118873_15 (sequence is synthesized)
ccttactgaaaacaaaatctcccaatcttgatttggttgaaacagaaataaaggaattaattcttgatattaaataccctgcaaccaaaaaacaagctttggaaagcattttggcaagtg

SEQ ID NO: 228450 - DNA, 120 bp, Artificial Sequence
  ENSG00000118873_16 (sequence is synthesized)
aacgtttaccattttcttgccttagaaacatcactcagactttaatggacactttaaaaagtcaagaacttgagtctgttgatgaaggattgctacagttttgtgccaataaactaaaac

SEQ ID NO: 228451 - DNA, 120 bp, Artificial Sequence
  ENSG00000118873_17 (sequence is synthesized)
tgctgcaactctatgagtctgtcagtcaattaaattcccttgattttcatttagacacaccattctctgataatgacttggctctgttactaaggcttgatgaaaaagaactgcttaagc

SEQ ID NO: 228452 - DNA, 120 bp, Artificial Sequence
  ENSG00000118873_18 (sequence is synthesized)
tccaggcattactagagaaatataagcaagagaacaccaggacaaatgttcgattttctgatgataaagatggtgtgttgcctgtaaaaacattcttggaatatttagaatatgaaaagg

SEQ ID NO: 228453 - DNA, 120 bp, Artificial Sequence
  ENSG00000118873_19 (sequence is synthesized)
atgtgctcaacataaagaaaataagtgaagaggaatatgtggctttaggtagtttctttttttggaagtgtttgcatggagaaagctccactgaggatatgtgtcacactttggagtcgg

SEQ ID NO: 228454 - DNA, 120 bp, Artificial Sequence
  ENSG00000118873_20 (sequence is synthesized)
ctggtcttagccctcagctgttgttgtctctgctcctgagtgtttggctttcaaaggaaaaggatattttggataaaccacagtcaatctgctgtcttcataccatgctgtccctcctga

SEQ ID NO: 228455 - DNA, 120 bp, Artificial Sequence
  ENSG00000118873_21 (sequence is synthesized)
gcaagatgaaagtggccatcgatgagacctgggattctcagtctgtgtccccatggtggcagcagatgcgcacagcctgtattcagtctgagaacaatggagccgctctgttgtctgcgc

SEQ ID NO: 228456 - DNA, 120 bp, Artificial Sequence
  ENSG00000118873_22 (sequence is synthesized)
atgttgggcattctgttgctgcacagatatcaaacaacatgacagagaaaaaattttcccaaacagttttgggtgctgattcagaggccctcactgattcctgggaggcactttctcttg

SEQ ID NO: 228457 - DNA, 120 bp, Artificial Sequence
  ENSG00000118873_23 (sequence is synthesized)
acactgagtactggaaactccttctgaaacagctggaggattgtctcatacttcagactctgcttcacagcaaagggaacactcagacctccaaagtgtcatcactgcaggctgagccac

SEQ ID NO: 228458 - DNA, 120 bp, Artificial Sequence
  ENSG00000118873_24 (sequence is synthesized)
ttccaaggctttctgttaaaaagttattagaaggaggaaaaggtggcattgcagacagtgtagccaagtggatatttaaacaggacttcagccctgaagtattaaaactggctaatgaag

SEQ ID NO: 228459 - DNA, 120 bp, Artificial Sequence
  ENSG00000118873_25 (sequence is synthesized)
aaagagatgcagaaaacccagatgaacccaaagaaggtgttaacagaagtttccttgaggtatcagagatggagatggacttaggagccataccagacttactgcatttagcctatgagc

SEQ ID NO: 228460 - DNA, 120 bp, Artificial Sequence
  ENSG00000118873_26 (sequence is synthesized)
agtttccttgtagccttgagctcgatgtcttgcatgcacattgctgctgggagtacgttgttcagtggaataaagatccagaggaagcacgtttttttgttaggtcaatagaacacttga

SEQ ID NO: 228461 - DNA, 120 bp, Artificial Sequence
  ENSG00000118873_27 (sequence is synthesized)
agcaaatatttaatgcacatgttcaaaatggcattgcactgatgatgtggaatacgttcttagttaaaagattttctgctgctacatacttaatggataaggttggaaaatcaccaaaag

SEQ ID NO: 228462 - DNA, 120 bp, Artificial Sequence
  ENSG00000118873_28 (sequence is synthesized)
ataggttatgccgaagggatgtgggaatgagtgacacagcaatgacatctttcctcggctcctgtttggatcttcttcagatcttaatggaggcagatgttagcagggatgaaatacagg

SEQ ID NO: 228463 - DNA, 120 bp, Artificial Sequence
  ENSG00000118873_29 (sequence is synthesized)
tgcctgtgctggatactgaggatgcgtggctctccgtggaaggaccaatctccatagtggaactggcccttgaacagaagcacatccactacccactggtggagcaccactccatcctgt

SEQ ID NO: 228464 - DNA, 120 bp, Artificial Sequence
  ENSG00000118873_30 (sequence is synthesized)
ctttttgacagtaagggaaaaaatgcatttttcaaagacctaacttcaattcagttattacctagtggggaaatggatccaaattttatttctgtacgacaacagttcttattgaaagtt

SEQ ID NO: 228465 - DNA, 120 bp, Artificial Sequence
  ENSG00000118873_31 (sequence is synthesized)
gtcagtgcagctgtccaggcccaacattcagccacaaaggtcaaagatcccacagaagaggccacacccactccttttgggaaagaccaagattggccagctctagctgtggatttagcc

SEQ ID NO: 228466 - DNA, 120 bp, Artificial Sequence
  ENSG00000118873_32 (sequence is synthesized)
catcaccttcaagttagtgaagatgttgttagaaggcattatgtgggggaactatacaactatggagttgaccacttaggagaagaggccattctacaggttcatgacaaagaggtcctt

SEQ ID NO: 228467 - DNA, 120 bp, Artificial Sequence
  ENSG00000118873_33 (sequence is synthesized)
gcctctcagctgctggtgctcacggggcaaaggctggctcatgcgcttctccacacccagacaaaagaaggaatggagctgcttgccagacttccacccacactgtgtacttggctgaaa

SEQ ID NO: 228468 - DNA, 120 bp, Artificial Sequence
  ENSG00000118873_34 (sequence is synthesized)
gcaatggacccccaggaccttcaaaacactgaagtgccaattgcaacaacagctaaactagtaaataaagtaattgagcttttaccagaaaaacatgggcaatatggtctagccttacac

SEQ ID NO: 228469 - DNA, 120 bp, Artificial Sequence
  ENSG00000118873_35 (sequence is synthesized)
ctcattgaagctgtggaagccatatctcttccttctttatgacacttacctactggaaatagtctaaaattatgattataacatgaagtagtgcatggttattttacatagtaagacctg

SEQ ID NO: 228470 - DNA, 120 bp, Artificial Sequence
  ENSG00000118873_36 (sequence is synthesized)
gaattttatgggaaaagtatgtctttttttttccttttgtaaaataaataaaagtatatacaacttttaaaaagtgcaaccctggctaaattccactcctttggttaatactgaagataa

SEQ ID NO: 228471 - DNA, 120 bp, Artificial Sequence
  ENSG00000118873_37 (sequence is synthesized)
caaatgtcaactctgttataattaatacagatgttttactgtttatttctaattcaaacacttaagtagctttattgttaaactttgctatttaaaattggttataatttagattatgtt

SEQ ID NO: 228472 - DNA, 120 bp, Artificial Sequence
  ENSG00000118873_38 (sequence is synthesized)
attatgttcttataagattctatatttcctatctaaaatgttgttgtaattcaatttaaatgtgttcatgtacagtccccatcagtagcgtatagaacaccccactctcctttagtaaat

SEQ ID NO: 228473 - DNA, 120 bp, Artificial Sequence
  ENSG00000118873_39 (sequence is synthesized)
gttgagaaaatgcctttgttgtcatgctccaaatcccacactgggctgccacctgggagttctggataccgaaaggttcctttcccagaggttctgctgttgccatcagaggaggatgac

SEQ ID NO: 228474 - DNA, 120 bp, Artificial Sequence
  ENSG00000118873_40 (sequence is synthesized)
cgtgcttgaggaggaagaatgggttcaagatcatcatattcatcagaaggggacactaaatagaacccttaacctgttgtacttgccaaaattgagaatcagagatgtgtaaaatgcagc

SEQ ID NO: 228475 - DNA, 120 bp, Artificial Sequence
  ENSG00000118873_41 (sequence is synthesized)
aaattaattataatgtaagttaagatttgctttttgccaagttgcaaagttgtatccacatcaggtcactgtaaaaatgtattatcttgtaaaacttatgtaaaaaaaaaaaaaaaaaaa

SEQ ID NO: 228476 - DNA, 120 bp, Artificial Sequence
  ENSG00000118873_42 (sequence is synthesized)
aggcaaagatactaaaaattttaagtccgactttatttttcctacaagtgtttagaaatgcttctgggatttgctaatattatctgtccttgggaacagtattgaaaaaactgcttagtg

SEQ ID NO: 228477 - DNA, 120 bp, Artificial Sequence
  ENSG00000118873_43 (sequence is synthesized)
gtattacagctttagcaaacctacctcacagctgggatgagaggataaaatacaactaattttgtaccctatagtgcctagagcagtccaagtgctaaataaatatttactgattaaaac

SEQ ID NO: 228478 - DNA, 88 bp, Artificial Sequence
  ENSG00000118873_44 (sequence is synthesized)
gagcagtccaagtgctaaataaatatttactgattaaaaccaaactatagctactcgggaggctggcattctgggcaatatagcaaga

SEQ ID NO: 228479 - DNA, 120 bp, Artificial Sequence
  ENSG00000118873_45 (sequence is synthesized)
aaccaaaactctgtaaaagagtgctttgagctctacaaataccaagtatttattgtggtatatttttagaatgtagccatacagtgtaattatgggtatctgtcatggatcacaattatt

SEQ ID NO: 228480 - DNA, 120 bp, Artificial Sequence
  ENSG00000118873_46 (sequence is synthesized)
attcatagtaagtcattgtgatacagaagtttgtttcttcacttccccttaagaagccaactatagtaatcatgcaaagttgaggagtatgtccttcagggatataaaaagaaaaacaaa

SEQ ID NO: 228481 - DNA, 120 bp, Artificial Sequence
  ENSG00000118873_47 (sequence is synthesized)
tctgttttttgagctaaaagagcacatccaaacaagaatttaactggctaaaatttagtaattactgttaagtaactatcaaacttgaaatcttacaagataaatggttaagatgtcttg

SEQ ID NO: 228482 - DNA, 120 bp, Artificial Sequence
  ENSG00000118873_48 (sequence is synthesized)
agtatttgggatgggggcctgtgagtctgattgagacatacattttacagagtagcagcactggaaagggctagtccaacctcccagcctctgcttgggtctccgctgccccagccacac

SEQ ID NO: 228483 - DNA, 120 bp, Artificial Sequence
  ENSG00000118873_49 (sequence is synthesized)
acatcctagaattcttgtaaacatatctggctctgtgttaacagtcacttgttatatgttttctaagagattagttcttcctgtgatttttccaagtacgctgaaagtagtagtatgaac

SEQ ID NO: 228484 - DNA, 120 bp, Artificial Sequence
  ENSG00000118873_50 (sequence is synthesized)
ttaaggaggctagtcaaagaaacttggagttataggtatttttaaagaataaatcctcaattccatcatcacttggcggggagggggcacttattaagcattttagataataaaactggt

SEQ ID NO: 228485 - DNA, 120 bp, Artificial Sequence
  ENSG00000118873_51 (sequence is synthesized)
taagcttactctggtagaacagacaatcaaatctggggattgctgagaacaataataagctgaagtatggctcacagaatcctaacacaaatcattaagtctctagttagatttgttatc

SEQ ID NO: 228486 - DNA, 120 bp, Artificial Sequence
  ENSG00000118873_52 (sequence is synthesized)
ctaaaatttttcatagaattttaaaatctaattctgacttgtatggttaagaaaagcagttaaatattttactacttatcaagggcttttaaaataaataaatctgattgataggaagaa

SEQ ID NO: 228487 - DNA, 120 bp, Artificial Sequence
  ENSG00000118873_53 (sequence is synthesized)
aggcaaataaatacctatgtagacattctataataacaaagagccatagatgataaaggaattagattttaatgtagaatgggtggtttctgaaacaaaggtatgtggtactttgtagtt

SEQ ID NO: 228488 - DNA, 120 bp, Artificial Sequence
  ENSG00000118873_54 (sequence is synthesized)
attgatgagaagccagtaaccagtagtgttttcctagatatatgcccaccctcacacaactttcttcattaacaaacattaaatatgcatttgtatcttattaaattatattgtataatg

SEQ ID NO: 228489 - DNA, 120 bp, Artificial Sequence
  ENSG00000118873_55 (sequence is synthesized)
ctgaaggaaaacaaaaagtgttcaaataatcataacttctacattacaggttctgtttagatgcagaactagaggggccagggtaaatgtagataaagagatatatagcaccatgcttct

SEQ ID NO: 228490 - DNA, 120 bp, Artificial Sequence
  ENSG00000118873_56 (sequence is synthesized)
taatgcttcatacttttgcaaacagaaaaaaaaagttttacttttattataaaacttcatctatggtcaaagtaaacactgttacatttaaattgctttttaaaaacaattgcgatctaa

SEQ ID NO: 228491 - DNA, 120 bp, Artificial Sequence
  ENSG00000118873_57 (sequence is synthesized)
aaagtcaaaaatctgaaatttaataatatgagacttacactgaatataatgttcatttagaagttgctgtggtccacttcatttataaggaacaaatatttttacagtacactatagcaa

SEQ ID NO: 228492 - DNA, 120 bp, Artificial Sequence
  ENSG00000118873_58 (sequence is synthesized)
cagcaaaagccctctctcaccctgataggaatgggtttgctgggtgtctagaagttagattcctgctgaatagaattagccatccttaaaagattttaatccaatactgaactgtttata

SEQ ID NO: 228493 - DNA, 120 bp, Artificial Sequence
  ENSG00000118873_59 (sequence is synthesized)
aaatgctttctctattgtaatgtactgtaagtagtgaaattctgtatatactgctattttctgtctgttcattgttgtgaacttcttatgtatattagtgaaataaattttcagctttca

SEQ ID NO: 228494 - DNA, 120 bp, Artificial Sequence
  ENSG00000118873_60 (sequence is synthesized)
taataatatttaaaaaagaccaatttcaaagtattcttgagagctagttgtttaaatgatgtgttccttttttgataactaaacaatttaatggaaaagccactataagtgacagaaaag

SEQ ID NO: 228495 - DNA, 120 bp, Artificial Sequence
  ENSG00000118873_61 (sequence is synthesized)
taacagttatgaagaaaatttgacaagtttaattcacctagttacaaagaaaagcatttttatgtaataactcttaagtcaataacaattattgtttagttgtctataataggttatttt

SEQ ID NO: 228496 - DNA, 120 bp, Artificial Sequence
  ENSG00000118873_62 (sequence is synthesized)
caggccactgaataacacccaaaacagcaagcagtccccgctgtcggcacctgaaaataatcctgaggaggaactggcatcaaaacagaaaaatgaagaatcaaaaagaggcaatgggct

SEQ ID NO: 228497 - DNA, 120 bp, Artificial Sequence
  ENSG00000118873_63 (sequence is synthesized)
ttggaagaccttgaaattggtcgccctccgggtaaaggaaagtttggtaatgtttatttggcaagagaaaaacaaagcaagtttattctggctcttagggtgttatttaaagctcagctg

SEQ ID NO: 228498 - DNA, 120 bp, Artificial Sequence
  ENSG00000118873_64 (sequence is synthesized)
gagaaagcaggagtggagcatcaactcagaagagaagtagaaatacagtcccacctccaacatcctaatataatcagactgtatggttatttccatgatgccaccagagtctacctaatt

SEQ ID NO: 228499 - DNA, 120 bp, Artificial Sequence
  ENSG00000118873_65 (sequence is synthesized)
ctggaatatacaccacttgaaacagtcaatacagaacttcagaaactttcaaagtttgatgagcagagaactgctacttatatcacagaattggcaagtgccctgtcttactgtcattca

SEQ ID NO: 228500 - DNA, 120 bp, Artificial Sequence
  ENSG00000118873_66 (sequence is synthesized)
aaaacagttattcatagagacattaagccagagaacttacttcttggatcagctggagagcttgaaattgcaaattttgggtggtcagaacatgctccatcttccaggaggaccactctc

SEQ ID NO: 228501 - DNA, 120 bp, Artificial Sequence
  ENSG00000118873_67 (sequence is synthesized)
ggaagcctccttttgaggcaaatacataccaagagacctacaaaagaatatcacgggttgagaattcacattccctgactttgtaacagagggagccagggacctcatttcaagactgtt

SEQ ID NO: 228502 - DNA, 120 bp, Artificial Sequence
  ENSG00000118873_68 (sequence is synthesized)
gaagcatgttcccagccagaggccaatgctcagagaagtacttgaatacccctggatcacagcaaattcatcaaaaccatcaaattgccaaaacaaagaatcaactagcaagtattctta

SEQ ID NO: 228503 - DNA, 120 bp, Artificial Sequence
  ENSG00000118873_69 (sequence is synthesized)
ggaatcgtgcagggggagaaatccttgagccagggctgctgtataacctctcaggaacatgctaccaaaatttattttaccattgactgctgccctcaatctagaacactaaaagaaata

SEQ ID NO: 228504 - DNA, 120 bp, Artificial Sequence
  ENSG00000118873_70 (sequence is synthesized)
tttgttttactgagcaggtgtgccttaacctccctactcagaaagctccacatcaataaacatgacactctgaagtgaaagtagccacgagaattgtgctacttatactggttcataatc

SEQ ID NO: 228505 - DNA, 120 bp, Artificial Sequence
  ENSG00000118873_71 (sequence is synthesized)
tggaggcaaggttcgactgcagccaccccatcagtctgtgccaggcatggtgtcctcccaggaggcaaatccagagtctggctatggggaaagtgaccactttgtgctgactcgatcggt

SEQ ID NO: 228506 - DNA, 120 bp, Artificial Sequence
  ENSG00000118873_72 (sequence is synthesized)
taaggagctgtccaataaccttccaagtacctgagtgagtgtgtaacttattgggttggccaagcctggtaaagctgttggactgagtacgtgattctttttaagtaggaaaataaagat

SEQ ID NO: 228507 - DNA, 120 bp, Artificial Sequence
  ENSG00000118873_73 (sequence is synthesized)
atttgtacagaaaaaaaagtacttttattttactgtggacagctgctagagatatagtgataccactctcttctatatttgaattatcaaagtatgactttatgttactttgtatattta

SEQ ID NO: 228508 - DNA, 120 bp, Artificial Sequence
  ENSG00000118873_74 (sequence is synthesized)
attacaaaagaagactgtcctctgtagctttaaaagatgctgaaccctaccctttcccaatgtttacattaatgacaactgttaaattttgtttttataaagtaaatactatctacttaa

SEQ ID NO: 228509 - DNA, 120 bp, Artificial Sequence
  ENSG00000118873_75 (sequence is synthesized)
gcttcctgcagaacaagtgagagtgaatatgagtgcctcaaggcagaagaagcagtcttttggaacgtggtcttggaagtaacatgtatcacctctacctgcttctgttgctagaagcaa

SEQ ID NO: 228510 - DNA, 120 bp, Artificial Sequence
  ENSG00000118873_76 (sequence is synthesized)
gtcatcagcctccatgcaaggagaggagactataggaaacacgaataccaggaggaggggatcactgggtttcatcttaaaggctgtctactatatactagataattgttataaaaatta

SEQ ID NO: 228511 - DNA, 120 bp, Artificial Sequence
  ENSG00000118873_77 (sequence is synthesized)
ttctaaaatcttactgttcaaggagaaataaaaatcaaccataagttattattaagttttaaacaaatctttctccctctccccccttaataatccacactcatcagttttcttgctctc

SEQ ID NO: 228512 - DNA, 120 bp, Artificial Sequence
  ENSG00000118873_78 (sequence is synthesized)
gatgatggttggggagcatgggaagaaaatgaaccacaagaacctcccttctggagcaatactgtggcagtgttgtacaggatacattaaagcagagagagagagatatgagaacatcga

SEQ ID NO: 228513 - DNA, 120 bp, Artificial Sequence
  ENSG00000118873_79 (sequence is synthesized)
gggtctagtctttctcatggattctgacccacaggccatttcctcattcttcctcagacccctgattttagaagtgaaggaccagagttcctctgtaaattgtccagggactgtgtgaat

SEQ ID NO: 228514 - DNA, 120 bp, Artificial Sequence
  ENSG00000118894_0 (sequence is synthesized)
agtccaggccgggcttccgcccggtctgccggcaacgctgcggccccgcccacgtcatggcgcccgaggagaacgcggggaccgaactcttgctgcagagtttcgagcgccgcttcctgg

SEQ ID NO: 228515 - DNA, 120 bp, Artificial Sequence
  ENSG00000118894_1 (sequence is synthesized)
cggcacgcacactgcgctccttcccctggcagagcttagaagcaaagttaagagactcatcagattctgagctgctgcgggatattttgcacaagactgtgaagcatcctgtgtgtgtga

SEQ ID NO: 228516 - DNA, 120 bp, Artificial Sequence
  ENSG00000118894_2 (sequence is synthesized)
agcacccgccgtccgtcaaatatgcccggtgctttctctcagaactcatcaaaaagcacgaggctgtccacacagagcctttggacgagctgtatgaagcgctggcggagaccctgatgg

SEQ ID NO: 228517 - DNA, 120 bp, Artificial Sequence
  ENSG00000118894_3 (sequence is synthesized)
ccaaggagtccacccagggccaccggagctatttgctgccctcgggaggctcggtcacactctccgagagcacggccatcatctcctacggtaccacaggcctggtcacatgggacgccg

SEQ ID NO: 228518 - DNA, 120 bp, Artificial Sequence
  ENSG00000118894_4 (sequence is synthesized)
ccctctaccttgcagaatgggccatcgagaacccggcagtcttcactaacaggactgtcctagagcttggcagtggtgctggcctcacaggcctggccatctgcaagatgtgccgccccc

SEQ ID NO: 228519 - DNA, 120 bp, Artificial Sequence
  ENSG00000118894_5 (sequence is synthesized)
gggcatacatcttcagcgactgtcacagccgggtccttgagcagctccgagggaatgtccttctcaatggcctctcattagaggcagacatcactgccaagttagacagccccagggtga

SEQ ID NO: 228520 - DNA, 120 bp, Artificial Sequence
  ENSG00000118894_6 (sequence is synthesized)
cagtggcccagctggactgggacgtcgcgacggtccatcagctctctgccttccagccagatgttgtcattgcagcagatgtgctgtattgcccagaagccatcatgtcgctggtcgggg

SEQ ID NO: 228521 - DNA, 120 bp, Artificial Sequence
  ENSG00000118894_7 (sequence is synthesized)
tcctgcggaggctggctgcctgccgggagcaccagcgggctcctgaggtctacgtggcctttaccgtccgcaacccagagacgtgccagctgttcaccaccgagctaggccgggccggga

SEQ ID NO: 228522 - DNA, 120 bp, Artificial Sequence
  ENSG00000118894_8 (sequence is synthesized)
tcagatgggaagtggaacctcgtcatgagcagaaactgtttccctacgaagagcacttggagatggcaatgctgaatctcaccctgtaggactcacacacgactccaacgggattgtgag

SEQ ID NO: 228523 - DNA, 120 bp, Artificial Sequence
  ENSG00000118894_9 (sequence is synthesized)
taagacatcggctatctaagcgtgtgggtgccccctttctgccagcagttctggttcttaagaaaatcaccataaatcagacatgaaaattctggctccaaaaatagcattttctttgtg

SEQ ID NO: 228524 - DNA, 120 bp, Artificial Sequence
  ENSG00000118894_10 (sequence is synthesized)
caaataaaaacgtgtgtatcaagtatgatgttcccccaacgtggacacactcagttcctcacaaagccaagcccactgcagctgccacatccctgggcttacggtgcagcaggtgctttt

SEQ ID NO: 228525 - DNA, 120 bp, Artificial Sequence
  ENSG00000118894_11 (sequence is synthesized)
ttcaagacaggaatcaaaatgttaggaacacggcagaaaggggacacctggagaccaaacgcaggatgaggagttctgcagaggtcacagggaagtcacagaacagtaatacgctagcag

SEQ ID NO: 228526 - DNA, 120 bp, Artificial Sequence
  ENSG00000118894_12 (sequence is synthesized)
gggcatggggcgtgaagaacagaagaagagaggaagcgtttccaagcctccagagaagaaatcaaggccaaccaaagcttcccgggtcacagaaccaattcttttaccaggcagtaccac

SEQ ID NO: 228527 - DNA, 120 bp, Artificial Sequence
  ENSG00000118894_13 (sequence is synthesized)
tgctgtcatttcagcttctggccactgggaggtgctgctcgaaagggtttgccctgagactccaagaagaagctgcgggaaggacagcaggggtcctggggttttagcctctggcccagg

SEQ ID NO: 228528 - DNA, 120 bp, Artificial Sequence
  ENSG00000118894_14 (sequence is synthesized)
agggagcacagtctgcacccagctctcatcccatcggagctgctgcgactcccgcaggttcttccggaactggtttagcttgcccgcaggatcaggaaagtttgagaaaagcatctgcaa

SEQ ID NO: 228529 - DNA, 120 bp, Artificial Sequence
  ENSG00000118894_15 (sequence is synthesized)
tttgagaaaagcatctgcaaaaaaataaagagcagagcttacctcattgcctgtccccaccccatcccaggtcaccacctggctgaccccaggtccccgacccaacaacaacccctccca

SEQ ID NO: 228530 - DNA, 120 bp, Artificial Sequence
  ENSG00000118894_16 (sequence is synthesized)
agtccctaactccctcacttggactcgagacccttcacaccccagcagcactccgcctccaacttgacatcacagtttctggaaacttccccgcatgtcccactttcccacacttggtgc

SEQ ID NO: 228531 - DNA, 120 bp, Artificial Sequence
  ENSG00000118894_17 (sequence is synthesized)
cctggagcacctcccggcctctacgtgctgcccattcccctgtgagcaccctcctctcggcctctggccaacgcagtctcacccatctgtgggtaacaagggggtgtcggtgttctttgc

SEQ ID NO: 228532 - DNA, 120 bp, Artificial Sequence
  ENSG00000118894_18 (sequence is synthesized)
cctctaccttgcagaatgggccatcgagaacccggcagtcttcactaacaggtgacctcggggcgcagggcagggcaccgaggcaggcttaccctggtgcagtcgcagacacggtcccct

SEQ ID NO: 228533 - DNA, 120 bp, Artificial Sequence
  ENSG00000118894_19 (sequence is synthesized)
gttctcctttttcacccaagtaattgcctttccatctaatggcccaaatggtcaaatggcatctactagtctcatatgaccgctgcctctctggcctcgccctgctgctgacgtcagcat

SEQ ID NO: 228534 - DNA, 120 bp, Artificial Sequence
  ENSG00000118894_20 (sequence is synthesized)
tccacacagagcctttggacgagctgtatgaagcgctggcggagaccctgatggccaaggagtccacccagggccaccggagctatttgctgatgtgctgtattgcccagaagccatcat

SEQ ID NO: 228535 - DNA, 120 bp, Artificial Sequence
  ENSG00000118894_21 (sequence is synthesized)
cactgcgctccttcccctggcaggtgggcggcggggcgagcggagaggcccgcggggctcgcgggagtccaggggcagacgggacgggtctccgtgctgaagcccctggcgctcccgcca

SEQ ID NO: 228536 - DNA, 120 bp, Artificial Sequence
  ENSG00000118894_22 (sequence is synthesized)
cgtgagttcctgggctcccgccggtcagggccgcgcgacccggtccccgtccctggggcctggccagagtcgctcgcacccctcctgccccgcgagctggcgggggaagctgggggcgtc

SEQ ID NO: 228537 - DNA, 120 bp, Artificial Sequence
  ENSG00000118894_23 (sequence is synthesized)
tccacagccttggggggcagacgcgcgctcggtgtggggtacagttcacgatcattttcacgactttttaaaggcagtaatcgttctggtcactgggacacagctgccctcgcccattct

SEQ ID NO: 228538 - DNA, 120 bp, Artificial Sequence
  ENSG00000118898_0 (sequence is synthesized)
ccgcgccgccgctcgctcacctgcgctcccgcccgcccctcggtgcgcgcccggcccgccagccgccgccgcccgcaccccgagcgccaccatgaactcgctcttcaggaagagaaacaa

SEQ ID NO: 228539 - DNA, 120 bp, Artificial Sequence
  ENSG00000118898_1 (sequence is synthesized)
gaagagaaacaaaggcaaatacagccccactgtgcagacccggagcatctctaacaaggagctctcggagctgatcgagcagctgcagaagaatgccgaccaggtggagaagaacatcgt

SEQ ID NO: 228540 - DNA, 120 bp, Artificial Sequence
  ENSG00000118898_2 (sequence is synthesized)
ggacacagaggccaagatgcagagtgacctggctcggctgcaggagggtcggcagcctgagcaccgggacgtgaccctgcagaaggtgttggactctgagaagctgctctatgtgctaga

SEQ ID NO: 228541 - DNA, 120 bp, Artificial Sequence
  ENSG00000118898_3 (sequence is synthesized)
ggcggatgcggccattgccaagcacatgaagcacccacagggggacatgatcgccgaggatatccgccagctgaaggagcgtgtgaccaacctgcgcgggaaacacaagcagatctacag

SEQ ID NO: 228542 - DNA, 120 bp, Artificial Sequence
  ENSG00000118898_4 (sequence is synthesized)
gctggcggtgaaggaagtggatccacaggtcaactgggcggcactggtggaggagaagctggacaagctgaacaaccagagctttgggactgacctgccgctggtggaccaccaagtgga

SEQ ID NO: 228543 - DNA, 120 bp, Artificial Sequence
  ENSG00000118898_5 (sequence is synthesized)
ggagcataacatcttccacaatgaggtcaaggccatcgggccccacctggccaaggacggggacaaggagcagaacagcgaactccgggccaagtaccagaaactgctggcagcatcaca

SEQ ID NO: 228544 - DNA, 120 bp, Artificial Sequence
  ENSG00000118898_6 (sequence is synthesized)
ggcccggcagcagcacctgagttcgctgcaggactacatgcagcgctgcaccaatgagctgtactggctggaccagcaggccaagggccgcatgcagtacgactggagtgaccgcaacct

SEQ ID NO: 228545 - DNA, 120 bp, Artificial Sequence
  ENSG00000118898_7 (sequence is synthesized)
cgactaccccagccgccggcgccagtatgagaatttcatcaaccggaacctggaggccaaagaggagagaatcaacaaactgcacagcgagggcgaccagctgctggcggccgagcaccc

SEQ ID NO: 228546 - DNA, 120 bp, Artificial Sequence
  ENSG00000118898_8 (sequence is synthesized)
cgggaggaactccattgaggcgcacatggaggctgtgcacgcagactggaaggagtacctgaacctgctcatctgcgaggagagccacctcaagtacatggaggactaccaccagtttca

SEQ ID NO: 228547 - DNA, 120 bp, Artificial Sequence
  ENSG00000118898_9 (sequence is synthesized)
cgaagacgtgaaggacgctcaggagctgctgcgcaaggtggactcggacctgaaccagaagtatggccctgacttcaaggaccggtaccagattgagctgctgctgcgggagctggatga

SEQ ID NO: 228548 - DNA, 120 bp, Artificial Sequence
  ENSG00000118898_10 (sequence is synthesized)
ccaggagaaggtgctggacaagtatgaggacgtggtgcaggggctgcagaagcgaggccagcaggtggtgcccctcaagtaccgccgggagactccgctcaagcccatccccgtggaggc

SEQ ID NO: 228549 - DNA, 120 bp, Artificial Sequence
  ENSG00000118898_11 (sequence is synthesized)
actctgtgactttgagggggagcagggcctgatctcgcggggctacagctacaccctgcagaagaacaacggggagagctgggagctcatggacagcgctgggaacaagctgattgctcc

SEQ ID NO: 228550 - DNA, 120 bp, Artificial Sequence
  ENSG00000118898_12 (sequence is synthesized)
ggccgtgtgttttgtgatcccccccacagaccctgaggccctggctctggctgacagcctgggcagccagtaccggagcgtgcggcagaaggcagctgggagcaaacgcacgctgcagca

SEQ ID NO: 228551 - DNA, 120 bp, Artificial Sequence
  ENSG00000118898_13 (sequence is synthesized)
gcggtatgaggtgctgaagaccgagaatcccggagatgcctctgacctacaggggcggcagctgctggctggcttggacaaggtggccagcgacctggaccggcaggagaaggccatcac

SEQ ID NO: 228552 - DNA, 120 bp, Artificial Sequence
  ENSG00000118898_14 (sequence is synthesized)
agggatcctgcggccaccactggagcaaggccgggctgtgcaggacagtgccgagcgggccaaggacctcaagaacatcaccaacgagctactgcggattgaacctgagaagacgcggag

SEQ ID NO: 228553 - DNA, 120 bp, Artificial Sequence
  ENSG00000118898_15 (sequence is synthesized)
cacggctgagggcgaagccttcatccaggccctcccaggcagtggcaccacacccctgctgaggacccgggtggaggacaccaaccggaaatacgagcacctcctgcagctgctggactt

SEQ ID NO: 228554 - DNA, 120 bp, Artificial Sequence
  ENSG00000118898_16 (sequence is synthesized)
ggcccaggagaaggttgatgtggccaaccgcctggagaagagcctgcagcagagctgggagttgctggccacacacgagaaccatctgaatcaggatgacacagtgcctgagagcagccg

SEQ ID NO: 228555 - DNA, 120 bp, Artificial Sequence
  ENSG00000118898_17 (sequence is synthesized)
tgtcctggacagcaaggggcaggagctggcggccatggcctgtgagttacaggcccagaagtccctcctgggtgaggtggagcagaacttgcaggcggccaagcagtgctcgagcacact

SEQ ID NO: 228556 - DNA, 120 bp, Artificial Sequence
  ENSG00000118898_18 (sequence is synthesized)
ggccagccgcttccaggagcactgtccggacctggagcgccaggaggccgaggtgcacaagctgggccagcgtttcaacaacctgcgccagcaggtggaacgcagggcgcagagcctaca

SEQ ID NO: 228557 - DNA, 120 bp, Artificial Sequence
  ENSG00000118898_19 (sequence is synthesized)
gagcgccaaggcagcctacgagcacttccaccgcggccatgaccacgtgctgcagttcctagtcagcatccccagttacgagccccaggagacagacagcctcagccagatggagaccaa

SEQ ID NO: 228558 - DNA, 120 bp, Artificial Sequence
  ENSG00000118898_20 (sequence is synthesized)
gctgaagaaccagaagaacctgctagatgagatagcaagtagggagcaggaagtacagaagatctgtgccaattcccagcagtaccagcaagctgtaaaggactatgagttagaagcaga

SEQ ID NO: 228559 - DNA, 120 bp, Artificial Sequence
  ENSG00000118898_21 (sequence is synthesized)
aaaactaaggtctcttctcgacttggagaatggaaggagaagccacgtgagcaagagagccaggctccaatctcctgccaccaaagtgaaggaagaggaagcagcacttgccgccaagtt

SEQ ID NO: 228560 - DNA, 120 bp, Artificial Sequence
  ENSG00000118898_22 (sequence is synthesized)
cactgaagtttatgccatcaacagacagaggctgcagaatctggagtttgctctgaatctcctcagacagcagccggaagtagaagtgacccatgagaccctgcaaaggaataggccgga

SEQ ID NO: 228561 - DNA, 120 bp, Artificial Sequence
  ENSG00000118898_23 (sequence is synthesized)
ctctggagtggaggaggcgtggaagatcaggaaggaactggatgaggagactgagcggaggcggcagctggagaacgaggtcaagagcacccaggaagaaatctggaccttgaggaatca

SEQ ID NO: 228562 - DNA, 120 bp, Artificial Sequence
  ENSG00000118898_24 (sequence is synthesized)
ggggcctcaggaatcggtggtgaggaaggaggtgctcaagaaggtgccggatcccgtgctggaggagagcttccagcagctgcagcggacgctggcagaggagcagcacaagaaccagct

SEQ ID NO: 228563 - DNA, 120 bp, Artificial Sequence
  ENSG00000118898_25 (sequence is synthesized)
gctgcaggaggagctggaggcactgcagctgcagctgcgtgccctggagcaggagaccagagacggggggcaggagtacgtggtcaaggaggtcctgcgcatcgagcctgacagggccca

SEQ ID NO: 228564 - DNA, 120 bp, Artificial Sequence
  ENSG00000118898_26 (sequence is synthesized)
tcttgcagctgcgggaggagctggaggcactgaggcggcagaagggcgcccgggaggcagaggtgctcctcctgcagcagcgtgtggccgccctggctgaagagaagagccgggcgcagg

SEQ ID NO: 228565 - DNA, 120 bp, Artificial Sequence
  ENSG00000118898_27 (sequence is synthesized)
agaaggtcacagagaaagaggtggtgaaactgcagaatgacccccagctggaggcagagtaccagcagctgcaggaggaccaccagcgccaggaccagctcagggagaagcaggaggagg

SEQ ID NO: 228566 - DNA, 120 bp, Artificial Sequence
  ENSG00000118898_28 (sequence is synthesized)
agctgagcttcctccaggacaagctcaagaggctagagaaggagcgggccatggccgagggcaagatcaccgtcaaggaggtgctcaaggtggagaaggacgcggccaccgagagggagg

SEQ ID NO: 228567 - DNA, 120 bp, Artificial Sequence
  ENSG00000118898_29 (sequence is synthesized)
tcagcgatctcacccgccaatatgaggacgaggctgccaaggctcgcgctagccagagggagaagacggagctgctccgaaagatatgggccttggaggaggagaacgccaaagtggtgg

SEQ ID NO: 228568 - DNA, 120 bp, Artificial Sequence
  ENSG00000118898_30 (sequence is synthesized)
tgcaggagaaggtgcgggagatcgtgcggccagaccccaaggcggaaagtgaagtggcgaacctccgcctggagcttgtggagcaggagcgaaagtaccggggtgccgaggagcagctcc

SEQ ID NO: 228569 - DNA, 120 bp, Artificial Sequence
  ENSG00000118898_31 (sequence is synthesized)
ggagctaccagagtgagctggaggccctcaggaggcgaggcccccaggtggaagtcaaagaggtgactaaggaagtcattaagtacaagactgaccctgagatggagaaggagcttcagc

SEQ ID NO: 228570 - DNA, 120 bp, Artificial Sequence
  ENSG00000118898_32 (sequence is synthesized)
ggctcagggaggagatcgtggacaagaccagactgatcgaaaggtgtgatttagagatctaccagctgaaaaaggaaatccaggccctgaaagacaccaaaccccaggtccagaccaaag

SEQ ID NO: 228571 - DNA, 120 bp, Artificial Sequence
  ENSG00000118898_33 (sequence is synthesized)
aggtggtccaggagatcctccaattccaagaagaccctcaaaccaaggaggaggtggcgtctctgagggcaaagctctcagaggagcagaagaaacaagtggatctggagagggaaagag

SEQ ID NO: 228572 - DNA, 120 bp, Artificial Sequence
  ENSG00000118898_34 (sequence is synthesized)
cttcccaggaagagcagatcgcccggaaagaggaggagctctcgcgggtgaaggaaagggtggtgcagcaggaggtggtcaggtatgaggaggagccaggcctgcgggccgaggcgagcg

SEQ ID NO: 228573 - DNA, 120 bp, Artificial Sequence
  ENSG00000118898_35 (sequence is synthesized)
cctttgccgagagcatcgatgtggagctgcggcagattgacaagctgcgggcagagctgcggcggctgcagcgccggcgcaccgagcttgagcggcagctggaggagctagagcgcgagc

SEQ ID NO: 228574 - DNA, 120 bp, Artificial Sequence
  ENSG00000118898_36 (sequence is synthesized)
ggcaggcccgcagggaggccgagcgcgaggtacagcggttgcagcagcggctggcagcgctggagcaggaagaagctgaggcccgtgagaaggtaacccatacgcagaaggtggtgctgc

SEQ ID NO: 228575 - DNA, 120 bp, Artificial Sequence
  ENSG00000118898_37 (sequence is synthesized)
agcaggacccgcagcaggcgcgagagcatgccctgctccgactccagctggaagaagagcagcaccggcggcagctcctggagggggagctcgagaccctccggaggaaactggctgcac

SEQ ID NO: 228576 - DNA, 120 bp, Artificial Sequence
  ENSG00000118898_38 (sequence is synthesized)
tggagaaggcggaggtcaaggagaaggtggtgctctccgagagtgtccaggtggagaagggcgacaccgagcaagagatccagaggctcaagagcagcctggaggaggagagccgcagca

SEQ ID NO: 228577 - DNA, 120 bp, Artificial Sequence
  ENSG00000118898_39 (sequence is synthesized)
agcgcgagctggacgtcgaggtgagccggctggaagccaggctttcggagctggaattccataactccaagtcatccaaggaactagactttctgagggaagagaaccacaaattacagc

SEQ ID NO: 228578 - DNA, 120 bp, Artificial Sequence
  ENSG00000118898_40 (sequence is synthesized)
tggagaggcaaaacctgcagctggagacccgaaggctccaatcggaaatcaacatggcagcgacggaaacacgagacctgcggaacatgaccgtggcggactctgggaccaaccatgact

SEQ ID NO: 228579 - DNA, 120 bp, Artificial Sequence
  ENSG00000118898_41 (sequence is synthesized)
ccagactgtggtccctggagagggaactggatgacctcaagaggctctccaaggacaaagacctcgagatcgacgagctgcagaagcgcctgggctccgtggccgtcaagcgggagcagc

SEQ ID NO: 228580 - DNA, 120 bp, Artificial Sequence
  ENSG00000118898_42 (sequence is synthesized)
gggagaaccacctgcggcgctccatcgtagtcatccaccctgacacaggccgcgagctgtccccggaggaagcccaccgtgccgggctcattgactggaacatgttcgtgaaactcagaa

SEQ ID NO: 228581 - DNA, 120 bp, Artificial Sequence
  ENSG00000118898_43 (sequence is synthesized)
gccaggagtgcgactgggaggagatctcagtgaagggtcccaatggggagtcctcagtgatacacgacaggaagtctggcaagaagttctccatcgaagaggccctgcagagtggcaggc

SEQ ID NO: 228582 - DNA, 120 bp, Artificial Sequence
  ENSG00000118898_44 (sequence is synthesized)
tgacccctgctcagtatgaccgctatgtcaacaaggatatgtccatccaggagctggcggtcttggtatctgggcagaagtaggcacagctcttgcaactcttcgtaacggcagacgctg

SEQ ID NO: 228583 - DNA, 120 bp, Artificial Sequence
  ENSG00000118898_45 (sequence is synthesized)
gccctctcctacgacgcagtgacctccttggtgtcgtcctctcccttgccctggtgcaggccaagcattttatacataccctcgctgccaggctgctcagagtcccgcccacatatgaga

SEQ ID NO: 228584 - DNA, 120 bp, Artificial Sequence
  ENSG00000118898_46 (sequence is synthesized)
caggcactggctgaagacaggcaactctcgtcccaaccatcattcaccctgagtgacgtacttcatcctccaatgactggacaactgcgatgccttttcctcccttttcctgtacactcc

SEQ ID NO: 228585 - DNA, 120 bp, Artificial Sequence
  ENSG00000118898_47 (sequence is synthesized)
cagcaacaaactcctcatgataactgcacacaatctgaaaaccactgaaggacaagccaaccacagcagccaagcccactccttgcagcatgggtactggtggcacaccagacagtgaca

SEQ ID NO: 228586 - DNA, 120 bp, Artificial Sequence
  ENSG00000118898_48 (sequence is synthesized)
ctgccccacaaaggcctgggcccgtgggggctgctgcctggcatgacatctctccagatttctggcttaaaaccaactttccatccgagaagcctcctcagtagttactctgctcatgag

SEQ ID NO: 228587 - DNA, 120 bp, Artificial Sequence
  ENSG00000118898_49 (sequence is synthesized)
acagatctgggctccaagccaggaaaggtgaacagaaaccacaagtgtccagccctcggtgctggagtggacgttaattgtcagccaccagactgtcccggcacctacagagaatgtttc

SEQ ID NO: 228588 - DNA, 120 bp, Artificial Sequence
  ENSG00000118898_50 (sequence is synthesized)
acagttctggcatttaaatcctttgatagtggattgtgctgctgttagccttagtttcagtgctttacaagtctcgcttattatctcactggtatttaggtatacaaaacagttgattat

SEQ ID NO: 228589 - DNA, 120 bp, Artificial Sequence
  ENSG00000118898_51 (sequence is synthesized)
tcaccacgccaatatctgggtctctgtatctcatgtagaacataagaaaatgggaactaatagggaaatttatttatagcatgaaaataaacctggtggctggagtctgcttgtacggtc

SEQ ID NO: 228590 - DNA, 120 bp, Artificial Sequence
  ENSG00000118898_52 (sequence is synthesized)
ggagaagagctctgagcccaggagcacagaaaggccagtgccacagtgagcacttgctgtccgcatctaaggagctgtcaggctcctctggggtgtctgcccagccagagtccgcagtcc

SEQ ID NO: 228591 - DNA, 120 bp, Artificial Sequence
  ENSG00000118898_53 (sequence is synthesized)
cgagcgggccaaggacctcaaggtacctgcgggtcaggagcacaggtggggccgggggagccctgcactggccccctggggcccctatttgaggtcttttccccatggagtcttgggata

SEQ ID NO: 228592 - DNA, 120 bp, Artificial Sequence
  ENSG00000118898_54 (sequence is synthesized)
ttcactgcagctgtctgtcagggacagcctgctgcatgtaaaagggtcccaagtcatggaggtggcagggctgctgtcattacctccccaggagaaagagctggcaggacttgcattgtt

SEQ ID NO: 228593 - DNA, 120 bp, Artificial Sequence
  ENSG00000118898_55 (sequence is synthesized)
cctgcacggcttgtcgatctgacgcctggcatggcacatgggctgtggaattccgcaggactgggtcaccggctggcttgactgcaaacacgttagcgtttgtatttataaactccaggc

SEQ ID NO: 228594 - DNA, 120 bp, Artificial Sequence
  ENSG00000118898_56 (sequence is synthesized)
ctcagtgtcttcagtaggatgggttggccctgctcacagggcagtggcgaggacagggtgagctgatgccaggggggacgtggaggggccacctccccccacctcctttcctatacaaag

SEQ ID NO: 228595 - DNA, 120 bp, Artificial Sequence
  ENSG00000118898_57 (sequence is synthesized)
atgacaccaggatttggaagccaggagattcccattggtgatggggagtggaggctcatggaggtgaagtgacttgccccacagtcactcagctcgtcaattggggagctagaatatgac

SEQ ID NO: 228596 - DNA, 120 bp, Artificial Sequence
  ENSG00000118898_58 (sequence is synthesized)
agggcccaagtcctgggagtccttctctgagcaggtgagagcatctggcacatccacccgcccgtctggatagatgaggacaccagcatccagtctccccaggtttggaatgcccaaatt

SEQ ID NO: 228597 - DNA, 120 bp, Artificial Sequence
  ENSG00000118898_59 (sequence is synthesized)
gggaactgcaaatggaggcccacagcacaaatccaagctattcacgggatctgtgtgacttacgggatttcgggtgccagcattttaagatcaaatatctgcaatagccagtgtagtggc

SEQ ID NO: 228598 - DNA, 120 bp, Artificial Sequence
  ENSG00000118898_60 (sequence is synthesized)
acatgcctgtaacaccagccattcaggaggctggggcaggattgcttgagccttggagtttaagtccagccgcctggacaacgttgcaagaccctatctcttaaaaaaaaaaaaaaaaaa

SEQ ID NO: 228599 - DNA, 120 bp, Artificial Sequence
  ENSG00000118898_61 (sequence is synthesized)
cccaaagcacaaacagcaggggtcttattccaccgtgccctggtcagagaagcagcaagcaccggccctggcacatgggggtggagctggccatccgaggcactgccggctgctgtgcaa

SEQ ID NO: 228600 - DNA, 120 bp, Artificial Sequence
  ENSG00000118898_62 (sequence is synthesized)
actggcacaggcttttgggaaaacagcatggtactagacatggaatgctgtaaaagggttttatactctgaagcagtaaacactttgggggaatttatccttaaggaaaaagtacaaaaa

SEQ ID NO: 228601 - DNA, 120 bp, Artificial Sequence
  ENSG00000118900_0 (sequence is synthesized)
ggctccttccccctcccttcggctcgtgacaacgaagcgcccgcggtctgaggcggcggcggcggcgacggtgcgaccggctgagcgcgagagggagccggcctcgcggctcgccccgcc

SEQ ID NO: 228602 - DNA, 120 bp, Artificial Sequence
  ENSG00000118900_1 (sequence is synthesized)
cccgggtcttggactccgcgcccctcccctctcggcgcttccgttacgcccgttggtccggcgcgggccccggggccattcccgagcccgaggcgctggtcggccccgtcgcagcgccag

SEQ ID NO: 228603 - DNA, 120 bp, Artificial Sequence
  ENSG00000118900_2 (sequence is synthesized)
tgagctaccctgacggagctcggcgcggcctggaactcagcctccgccgggtctgggctcccgcgcccggcaactctgcttggccgcaggccgggaggccccggtgtccgcgcccgtccg

SEQ ID NO: 228604 - DNA, 120 bp, Artificial Sequence
  ENSG00000118900_3 (sequence is synthesized)
ctcccgccgcccgtgttctttggagcgctcctcccgacggccgctttcggaggcgccgtctgagcgcggggtcccgcgccgcaagttctcctggggcgaccggaggctgctcccccgacc

SEQ ID NO: 228605 - DNA, 120 bp, Artificial Sequence
  ENSG00000118900_4 (sequence is synthesized)
ccctggtgtccccggagtggctgcgcggacgtcgagttggcatttcttcgcttcctcctgggccggcgcgcggcgcggcacaccaggctcccctgggctcggggacccggccatgggccg

SEQ ID NO: 228606 - DNA, 120 bp, Artificial Sequence
  ENSG00000118900_5 (sequence is synthesized)
cccgcccgctgggagccacggcttagcagccgaccgctagctgcgccgccgcccggggaccggcatgaggaccgccgcggggggacgtctgcggcccgcgtcggcgctggggacaaagaa

SEQ ID NO: 228607 - DNA, 120 bp, Artificial Sequence
  ENSG00000118900_6 (sequence is synthesized)
ggggacaaagaagccatgcagtgacacccgctaagacttgttggtagccatgtcggagccccacagggtccagttcacctctctcccaggttccctgaatcctgcgtttttgaagaagtc

SEQ ID NO: 228608 - DNA, 120 bp, Artificial Sequence
  ENSG00000118900_7 (sequence is synthesized)
ccggaaggaggaggctggggcaggagaacagcatcaggactgtgagccggctgcagcagctgttcggattacactcaccctctttgaaccagatcacaaacgctgcccagagttcttcta

SEQ ID NO: 228609 - DNA, 120 bp, Artificial Sequence
  ENSG00000118900_8 (sequence is synthesized)
cccagagctggtgaagaatatccgagggaaggtaaaaggccttcagcctggagataagaagaaagatctgtcagatcctttcaatgacgaagaaaaggaaaggcataaagtagaggccct

SEQ ID NO: 228610 - DNA, 120 bp, Artificial Sequence
  ENSG00000118900_9 (sequence is synthesized)
tgcccgaaaatttgaagaaaaatacggtggaaagaaacgtagaaaagaccgaatacaggacttgatcgatatggggtatggttatgatgaatccgactccttcatcgataactctgaggc

SEQ ID NO: 228611 - DNA, 120 bp, Artificial Sequence
  ENSG00000118900_10 (sequence is synthesized)
gtatgatgagcttgttcctgcttctttgactacgaagtatggaggattttacattaactcgggaaccctgcagtttagacaagcatcagagtctgaagatgacttcattaaagaaaagaa

SEQ ID NO: 228612 - DNA, 120 bp, Artificial Sequence
  ENSG00000118900_11 (sequence is synthesized)
gaaaaaatctccaaagaagcggaagttgaaggaaggtggtgagaagataaagaagaagaaaaaagatgacacttatgacaaggagaagaaatcgaaaaagtccaagttttccaaagccgg

SEQ ID NO: 228613 - DNA, 120 bp, Artificial Sequence
  ENSG00000118900_12 (sequence is synthesized)
cttcacagccctcaatgccagtaaggagaagaagaagaagaaatattctggggctttaagcgttaaagagatgctaaagaaatttcagaaagagaaagaggctcagaaaaaaagggagga

SEQ ID NO: 228614 - DNA, 120 bp, Artificial Sequence
  ENSG00000118900_13 (sequence is synthesized)
ggagcataagcctgttgcggtcccatcagcggaagctcagggcctgcgggaactggagggtgcctctgaccccttgctctcactctttggctctacttctgacaacgacttgctccaggc

SEQ ID NO: 228615 - DNA, 120 bp, Artificial Sequence
  ENSG00000118900_14 (sequence is synthesized)
ggccactgccatggactcgctgacggatttggacttggagcatctgctcagtgagtctccagaaggaagtcccttccgagatatggatgatggaagtgattcccttggggtgggattgga

SEQ ID NO: 228616 - DNA, 120 bp, Artificial Sequence
  ENSG00000118900_15 (sequence is synthesized)
ccaggaattcaggcagccctcttctctccccgaaggcctgccagcacccctggagaagcgcgttaaggagctggctcaggctgccagagctgctgagggggagagcagacagaagttctt

SEQ ID NO: 228617 - DNA, 120 bp, Artificial Sequence
  ENSG00000118900_16 (sequence is synthesized)
cacccaggatattaatggaatcctattagacatagaggcgcagactcgggagctgagcagtcaggtccgctctggggtgtatgcctatcttgcgtcattcctgccctgcagcaaggatgc

SEQ ID NO: 228618 - DNA, 120 bp, Artificial Sequence
  ENSG00000118900_17 (sequence is synthesized)
cctgctcaagcgtgctcggaaacttcacctctatgaacaggggggccgtctgaaggagcctctccagaagctcaaggaagccattggcagggcgatgccagagcagatggccaagtacca

SEQ ID NO: 228619 - DNA, 120 bp, Artificial Sequence
  ENSG00000118900_18 (sequence is synthesized)
ggacgaatgccaggcacacacgcaggcaaaggttgccaagatgctggaagaggagaaagacaaggagcagagggaccggatttgttcggatgaggaagaagatgaagaaaaagggggcag

SEQ ID NO: 228620 - DNA, 120 bp, Artificial Sequence
  ENSG00000118900_19 (sequence is synthesized)
gaggataatgggacctcggaagaagttccaatggaatgatgagatcagggagctactgtgccaggtggtgaagatcaaactggagagccaggacctggagaggaacaacaaagcccaggc

SEQ ID NO: 228621 - DNA, 120 bp, Artificial Sequence
  ENSG00000118900_20 (sequence is synthesized)
ttgggaggactgtgtgaagggctttctggatgcggaagtcaagcccctctggcccaaaggctggatgcaggccagaactctgtttaaggagagcagacgaggccatgggcacctgacttc

SEQ ID NO: 228622 - DNA, 120 bp, Artificial Sequence
  ENSG00000118900_21 (sequence is synthesized)
aatcctggccaagaagaaagttatggccccttctaaaatcaaggtgaaggaatcgtctacgaagcctgataaaaaggtttctgtcccatcaggacagattggtggccccattgctttgcc

SEQ ID NO: 228623 - DNA, 120 bp, Artificial Sequence
  ENSG00000118900_22 (sequence is synthesized)
ctcagatcaccaaacaggaggcctgagtattggggcctcgagcagggagctcccatcccaggcatcgggcggccttgctaaccctcctcctgtcaacctggaggactcattggatgaaga

SEQ ID NO: 228624 - DNA, 120 bp, Artificial Sequence
  ENSG00000118900_23 (sequence is synthesized)
cttgatccgcaatccagcctcctcggtggaagccgtgtccaaggaattggctgcattgaatagcagagcagctgggaactctgaattcacactgcctgcaccctcaaaagcacctgcaga

SEQ ID NO: 228625 - DNA, 120 bp, Artificial Sequence
  ENSG00000118900_24 (sequence is synthesized)
aaaagttggaggcgttttatgtacagaagaaaaaaggaactttgcgaagcctagtccttctgctccaccaccagctagctctctgcagtcacccctcaattttctggcagaacaggctct

SEQ ID NO: 228626 - DNA, 120 bp, Artificial Sequence
  ENSG00000118900_25 (sequence is synthesized)
ggcactggggcagtcctctcaggagaaaaaaccagagagttctggctacaaagagctgtcctgccaggctcccctcaataagggcctgccagaagtacatcagtccaaagctaagcacca

SEQ ID NO: 228627 - DNA, 120 bp, Artificial Sequence
  ENSG00000118900_26 (sequence is synthesized)
agcagcagaaaaacttcacgcccccatctccatttgccaataagctccaaggcccaaaggcttctcccacacagtgtcatcgttccctcctgcagttagtgaagacagcggccaaaggcc

SEQ ID NO: 228628 - DNA, 120 bp, Artificial Sequence
  ENSG00000118900_27 (sequence is synthesized)
agggcttccatccctctgcaccagccacctcaggaggcctgtcagcctccagcagcagctctcacaagaccccagcctcgtcctcttctgccctgagccatccagcaaagccacattcag

SEQ ID NO: 228629 - DNA, 120 bp, Artificial Sequence
  ENSG00000118900_28 (sequence is synthesized)
tcagctctgcaggctcatcttacaagaataatccctttgccagctcaatctccaaacatggggtttcttctggcagctcttcctcgggaggaacaccagtccagagttctgtttctggga

SEQ ID NO: 228630 - DNA, 120 bp, Artificial Sequence
  ENSG00000118900_29 (sequence is synthesized)
gcctggtccctggcatacagcctccctccgtgggacaggccaccagccgacccgtcccaagttcagcagggaaaaaaatgcctgtttcccagaagttgactctggtagcccctccaggcg

SEQ ID NO: 228631 - DNA, 120 bp, Artificial Sequence
  ENSG00000118900_30 (sequence is synthesized)
gtccaaacggagattccagtggtgggacccagggagtggcaaagttgctgacctcgccgtccctaaagccctctgcagttagtagtgtgacatcgtctacctccttgtcaaaaggagcga

SEQ ID NO: 228632 - DNA, 120 bp, Artificial Sequence
  ENSG00000118900_31 (sequence is synthesized)
gtgggactgtgctgctggccggctcctctttgatggcttcaccctacaaatccagcagcccaaagctgtctggggccatgagctcgaactccttgggaattataacccctgtccctattc

SEQ ID NO: 228633 - DNA, 120 bp, Artificial Sequence
  ENSG00000118900_32 (sequence is synthesized)
ctgtccatgtgctctccttcagcgctgactcctctgccaaagcaggggtctccaaggatgccatcgtcacaggccctgcccccgggtccttccaccatggccttggccacagtcttctgg

SEQ ID NO: 228634 - DNA, 120 bp, Artificial Sequence
  ENSG00000118900_33 (sequence is synthesized)
ctggcttgcactccagcccgccccatgcagcgcctctcccacacgctgcggtgcccacccatatcccgcagagtctgccaggtgcttctcagcttcacgggaaagggcctgctgtaccac

SEQ ID NO: 228635 - DNA, 120 bp, Artificial Sequence
  ENSG00000118900_34 (sequence is synthesized)
ggaaattgtgaccgcttcagaggcaaggcttgccacttgggtctgggtggaatcagaacgtgcaggtctcccaggatgtacactcactgcgccctttctgctgcttggtgttcttctgga

SEQ ID NO: 228636 - DNA, 120 bp, Artificial Sequence
  ENSG00000118900_35 (sequence is synthesized)
ggagcgtgagttctcagcggagcgcttctcggcacttctgatgtgcctcccatggagggagccgggcccttgctgctcaggaggtgcagactgccccgtgctctgggccttgcagctctg

SEQ ID NO: 228637 - DNA, 120 bp, Artificial Sequence
  ENSG00000118900_36 (sequence is synthesized)
tcgctagacggttgttagaggggcagctctaggctggggcttgcgctgggccgtggtgggaggcacagtgtttacaggctctggtggcagagcagttggcacacctgtgggtgaatctgc

SEQ ID NO: 228638 - DNA, 120 bp, Artificial Sequence
  ENSG00000118900_37 (sequence is synthesized)
ctgatcccctggcatttggtcagagtacctcagagcaccccactgctcaggggctccttctggctgcagtaagctccctggatggtcacagtgccgccccatccccaggctgtgtgctca

SEQ ID NO: 228639 - DNA, 120 bp, Artificial Sequence
  ENSG00000118900_38 (sequence is synthesized)
aagcggacaaaactcaggccagagccacagctgggagacctgcactgtccctgcgaaatactaagaacacctagggtgtgctcactgtgggggccagtttctcctcggaacatgacaatg

SEQ ID NO: 228640 - DNA, 120 bp, Artificial Sequence
  ENSG00000118900_39 (sequence is synthesized)
aagctcttttagagaaaagacctttgtagattcaacaattatgataggatttttacagacacctattttgggctcagttttcatcattaccattaaatgcattggatagaaggggactgt

SEQ ID NO: 228641 - DNA, 120 bp, Artificial Sequence
  ENSG00000118900_40 (sequence is synthesized)
tcttcacacatcatattataggaagacataattccagtgcctttatggtggagcagaattcgacaacacatgtccattcagccctctgaatggatctgagacgaagacctttttaaagat

SEQ ID NO: 228642 - DNA, 120 bp, Artificial Sequence
  ENSG00000118900_41 (sequence is synthesized)
atgtctgtattgaagagaaagccagttttgagttttttacacttgcacatcattatctgtgccgtcctgactagaaggttgtctgggcccccaaattccaagtcccagtatagccagggc

SEQ ID NO: 228643 - DNA, 120 bp, Artificial Sequence
  ENSG00000118900_42 (sequence is synthesized)
tcccattttgtttttccagagttcgtggaggtggactgcagagcccagagcccttcatctctctgagggtcaaggataccaggggtcccaagtcacagatagacattccagtttgtattc

SEQ ID NO: 228644 - DNA, 120 bp, Artificial Sequence
  ENSG00000118900_43 (sequence is synthesized)
ttaggaatcattcttaggcagtgcggcagaagcaggcctctgtgaagtgtctgccgggtagaaataggccttgaagtcctggggctctccaggcagtggggttatgtgtcgactgaaggg

SEQ ID NO: 228645 - DNA, 120 bp, Artificial Sequence
  ENSG00000118900_44 (sequence is synthesized)
tgatgtgcagaagagcttggagagtggatcagagagactaggacagttactgcagagctcctaagtcaccactcaaccagtggctgtttcacaaggatttgagggcacttgcctgtcttg

SEQ ID NO: 228646 - DNA, 120 bp, Artificial Sequence
  ENSG00000118900_45 (sequence is synthesized)
tgaggtctgtgccacaaggtgagtctgaactgactgctccagctaagtgatcaggcacgttgagagtatacggtgtcctcagcacatacacctgtgggaaaacggaccgctcttggctcc

SEQ ID NO: 228647 - DNA, 120 bp, Artificial Sequence
  ENSG00000118900_46 (sequence is synthesized)
tgactcccagggtacagcgcccagtaactcatccttcattcagaggtttgctggccttcccggtttcccaaggagcaagacctctgtccgccctttggcccggcctctgctctgtctcct

SEQ ID NO: 228648 - DNA, 120 bp, Artificial Sequence
  ENSG00000118900_47 (sequence is synthesized)
ttttttacataagaaccaatccgtgtttcacattgggctaagtggattccttatccctttgttatatatattttttgcaacttggatttccagtttgtttacagagtagtcttaggtagt

SEQ ID NO: 228649 - DNA, 120 bp, Artificial Sequence
  ENSG00000118900_48 (sequence is synthesized)
agcaaaagagccaaagaagagatttgtattgctgagctcaaagccaagcagaggccggcagtggaggctgagcagggactctccaggcttctctgcccataaacacccgggtcccaggcc

SEQ ID NO: 228650 - DNA, 120 bp, Artificial Sequence
  ENSG00000118900_49 (sequence is synthesized)
ctccttcctttccctttggtgctccctcctccccacgtaccattgcgcgtgcagctggagcagaataccctcatttttaggaatctagtgatgcctcttgcctcagggaaacgtttcttt

SEQ ID NO: 228651 - DNA, 120 bp, Artificial Sequence
  ENSG00000118900_50 (sequence is synthesized)
gatggggagtttgagatttcttttccttgtttatgctttatttgtggtaatgaaagagcgaatgactgaacagccatggcaaggcagacctacaggcgaggccgcagcagagggtggggc

SEQ ID NO: 228652 - DNA, 120 bp, Artificial Sequence
  ENSG00000118900_51 (sequence is synthesized)
agagcagcctcggggtctgggggctgcaggggtttccctggcgcagcgaaagtctctgagcacttaccgggcgtgaccgtttcttaggtgtgagaggggctgtggcttttgtgcagcgac

SEQ ID NO: 228653 - DNA, 120 bp, Artificial Sequence
  ENSG00000118900_52 (sequence is synthesized)
tatgttggtgttaggggtggtgtggagattgttaatcttgtataaagcaattcaataaattgtttcaaggtttccaaaacattttttctcactcttttctttctaccatgtggaagtaag

SEQ ID NO: 228654 - DNA, 120 bp, Artificial Sequence
  ENSG00000118900_53 (sequence is synthesized)
ttctgtgaacatttggaattctgtattcaaaatctattttgaccattcccaagtgattttgaaggtctttggcatgtcataatttgttattttgtcaaggccagtgtttgggtgtgagag

SEQ ID NO: 228655 - DNA, 120 bp, Artificial Sequence
  ENSG00000118900_54 (sequence is synthesized)
tggtgcacagggcaggagtgtgtaactttgttaggaagtgagcctagccacaccctcctgagtcactggttctttactatcctggggtaggcaatatcttttgttcagctgataaaagct

SEQ ID NO: 228656 - DNA, 120 bp, Artificial Sequence
  ENSG00000118900_55 (sequence is synthesized)
ttgtcattgtgaagattggctcccaatgataggaaactgctggtgatgaaaataaaggggtcttaaagattattctcagccagaaaaaataagtgttagacaaattaaatggaaaataat

SEQ ID NO: 228657 - DNA, 120 bp, Artificial Sequence
  ENSG00000118900_56 (sequence is synthesized)
taatattttagtagtctttacaatttggaggtctaaggctctgtcagcatgggttctttaaggtcaaggatctaggatacacatgcacaggaaaaaagactggaagtatgctaagcagtg

SEQ ID NO: 228658 - DNA, 120 bp, Artificial Sequence
  ENSG00000118900_57 (sequence is synthesized)
actatctctgaatgattgtgaaaaaattttaggatgaataagcagaaaaaaacaataaatgacaaaatataacaatggagttttcttgacaatgaaattctcttaaacttaaatctcttt

SEQ ID NO: 228659 - DNA, 120 bp, Artificial Sequence
  ENSG00000118900_58 (sequence is synthesized)
aagaaacgtagaaaagaccgaatacaggacttgatcgatatggggtatggttatgatgaatccgactccttcatcgataactctgaggcgctcagacattcatgtttgaccagaggatgt

SEQ ID NO: 228660 - DNA, 120 bp, Artificial Sequence
  ENSG00000118900_59 (sequence is synthesized)
gccactgccatggactcgctgacggatttggacttggagcatctgctcagctgccagagctgctgagggggagagcagacagaagttcttcacccaggatattaatggaatcctattaga

SEQ ID NO: 228661 - DNA, 120 bp, Artificial Sequence
  ENSG00000118900_60 (sequence is synthesized)
gcagaccgcgggaggcacccaagcgtgcactggtcactgccaagccatcggttgtaaaggagaagtccccccgccgtttcttcgcggggcaacgccagcagtccggtttagacaaccccg

SEQ ID NO: 228662 - DNA, 120 bp, Artificial Sequence
  ENSG00000118900_61 (sequence is synthesized)
gctgagccggccgcacaggtcggctgcatcgcaacctgggctttgaccgaatggcaccggccagatctcgcaggtccggtccccggcgcttctgctttctgggaagccccaacaagaccc

SEQ ID NO: 228663 - DNA, 120 bp, Artificial Sequence
  ENSG00000118900_62 (sequence is synthesized)
cggggaccggtcgtccggggaagcctcgcggcaccggcggctcccttcacgggggccgccagtatctgggccccgagtgcagaccccacccggccggcctcggggatcaaagccggtgcc

SEQ ID NO: 228664 - DNA, 120 bp, Artificial Sequence
  ENSG00000118900_63 (sequence is synthesized)
cgacgtggccaccctcggcctcggtcccccgggactggactgccccttccgcctggcgccgctcgcaagcgccggcaccttctcttcccctctctccgcgacctggagcgcataaaaagg

SEQ ID NO: 228665 - DNA, 120 bp, Artificial Sequence
  ENSG00000118900_64 (sequence is synthesized)
cagctccagggccggcagcgaaccccgcgcccaggcgggtagctccccggcgcgtctcggttggcccggccgctcggactcaccacaccaagtcgccgagccgcagactcacagccgcca

SEQ ID NO: 228666 - DNA, 120 bp, Artificial Sequence
  ENSG00000118900_65 (sequence is synthesized)
tcttaccacccaaccaccgccgacgcacgggccgccgggaacagcaagtcgccccggcgccgcccattggagtgggcccgaccacgtgacgggggccggctgtcactggccacgccgcta

SEQ ID NO: 228667 - DNA, 120 bp, Artificial Sequence
  ENSG00000118900_66 (sequence is synthesized)
tgccctagttttgcacttttgaaaaagttgtgacaacaggaagacagatgccgggcgtagtttggacactttaaaactgaaccatgaactgggaagtgttaactgcagttgagcgcagcg

SEQ ID NO: 228668 - DNA, 120 bp, Artificial Sequence
  ENSG00000118900_67 (sequence is synthesized)
tgacgctgttgttgttttggtttgtcctttgaggctgtgctttgtcagtactcagggtgacacgcacttctactcttggggtttcctctggtccccacttggagctgccgccaggtcagc

SEQ ID NO: 228669 - DNA, 120 bp, Artificial Sequence
  ENSG00000118900_68 (sequence is synthesized)
ctcagcctgtgtgatcacagggaaagttgcggggggcagggtggtgcgcttttgtgtgcggtggaggagttcctaaccctcggcttgtttttttctcttcagtttaaaaaaaaaaaaaaa

SEQ ID NO: 228670 - DNA, 120 bp, Artificial Sequence
  ENSG00000118900_69 (sequence is synthesized)
gttcggatgaggaagaagatgaagaaaaagggggcaggaggataatgggacctcggaagaagttccaatggaatgatgagatcagaactctgtttaaggagagcagacgaggccatgggc

SEQ ID NO: 228671 - DNA, 120 bp, Artificial Sequence
  ENSG00000118922_0 (sequence is synthesized)
aatgtgactctaagaacaaatggatgaatgaatatccatatgaagagaaaaacaataaagaatatcaacacctttgagaacagaatgttaatgcttgatgggatgccggcagtcagagtc

SEQ ID NO: 228672 - DNA, 120 bp, Artificial Sequence
  ENSG00000118922_1 (sequence is synthesized)
aaaacagagcttttggaatctgaacaagggtctccaaacgtccacaactatcccgatatggaagccgttcccctgttgctaaataatgtgaaaggggagcccccggaggactcgttatct

SEQ ID NO: 228673 - DNA, 120 bp, Artificial Sequence
  ENSG00000118922_2 (sequence is synthesized)
gtagatcacttccaaacacaaactgagccagtggacttgtcaataaacaaagccaggacgtcccctactgccgtttcatcctccccagtttccatgacagcatctgcctcctcaccttct

SEQ ID NO: 228674 - DNA, 120 bp, Artificial Sequence
  ENSG00000118922_3 (sequence is synthesized)
tcaacttcaacctcttcatcgtcttctagtcgtctagcctcatccccaactgttatcacatcagtatcttcagcgtcatcttcgtcaacagtattaactccagggccccttgtggcctct

SEQ ID NO: 228675 - DNA, 120 bp, Artificial Sequence
  ENSG00000118922_4 (sequence is synthesized)
gcatctggtgttggaggccagcagtttttgcacattatccatcccgtaccgccttcaagtcccatgaatttacagtctaacaaactgagtcatgttcaccgcatccccgtggtggtacag

SEQ ID NO: 228676 - DNA, 120 bp, Artificial Sequence
  ENSG00000118922_5 (sequence is synthesized)
tcggtgcctgttgtctacacagctgtaaggtcacctggaaatgtgaacaacactattgtcgtgccgcttttggaggatgggagaggccatggcaaagcacaaatggacccccgaggccta

SEQ ID NO: 228677 - DNA, 120 bp, Artificial Sequence
  ENSG00000118922_6 (sequence is synthesized)
tctcccagacaaagtaaaagtgacagtgatgatgatgacctgccaaatgtgaccttagatagcgttaatgaaactggatctacggccctttccatagccagagcagtacaagaggtacat

SEQ ID NO: 228678 - DNA, 120 bp, Artificial Sequence
  ENSG00000118922_7 (sequence is synthesized)
ccgtccccagtatcaagggtccggggcaatcgaatgaataatcaaaagtttccttgttcaatttcaccatttagtattgagagcacaagacgccagagacggtctgaatccccagactcc

SEQ ID NO: 228679 - DNA, 120 bp, Artificial Sequence
  ENSG00000118922_8 (sequence is synthesized)
agaaaacggcgtatccacagatgtgattttgagggatgcaacaaagtgtacacaaaaagttctcacctgaaggctcaccggaggacacatacaggagagaaaccttacaagtgtacctgg

SEQ ID NO: 228680 - DNA, 120 bp, Artificial Sequence
  ENSG00000118922_9 (sequence is synthesized)
gaaggctgcacctggaagttcgctcgttcagatgaactgacgaggcattaccgcaaacatacgggagtgaagccattcaagtgcgcggactgtgatcgcagcttttcccggtcagatcat

SEQ ID NO: 228681 - DNA, 120 bp, Artificial Sequence
  ENSG00000118922_10 (sequence is synthesized)
ttggccctgcaccgccggaggcatatgttggtgtgaggaatgctacctgtccagctgagcgtaagagctggatctcttagcggcacccaattcagcagggctgaatccccttcacagtgt

SEQ ID NO: 228682 - DNA, 120 bp, Artificial Sequence
  ENSG00000118922_11 (sequence is synthesized)
taacacaaaagggcatcaccatcccacgatgtctgaaaccagagcaggaaaaagaaggcacacttcttttggtctgaaggtaacccccatcatgactagacgagaaccgtctttacccgg

SEQ ID NO: 228683 - DNA, 120 bp, Artificial Sequence
  ENSG00000118922_12 (sequence is synthesized)
gcctgggagctcagtgacataaatgctgaagagacaggcattgttttccgtgctgtgtcctctgccatttaaagatgtttgtagcttgtacattttctgagctgtcagacattttgttat

SEQ ID NO: 228684 - DNA, 120 bp, Artificial Sequence
  ENSG00000118922_13 (sequence is synthesized)
tgataccttaaaggtcacctaccacaaattgatggctagagcaagaccttttaaatttggatgaatctcccatcatcccatcccttaacccctttttacagaaattttagttacaatctg

SEQ ID NO: 228685 - DNA, 120 bp, Artificial Sequence
  ENSG00000118922_14 (sequence is synthesized)
agtaagctagaacacacatccaatctgttaccagcaagcagcatgaaagtagaaacgaagaagcagatggagaggtcccattacctgcaaagaaagggcactcaggcagccctttgcaat

SEQ ID NO: 228686 - DNA, 120 bp, Artificial Sequence
  ENSG00000118922_15 (sequence is synthesized)
cgcgatggcagccactagatatcactctcaacttgtcattctgccatgccctgaagaaaaccaacattgaatctttcatttgtttgtcgttgattgtttttgttttgtttcgattctgtt

SEQ ID NO: 228687 - DNA, 120 bp, Artificial Sequence
  ENSG00000118922_16 (sequence is synthesized)
ttgttcatctgttcgagcagaggggcagttgaagtctcgtcctggtctctgccctggcatggactggcacagaggtgttctgtagttgaataggaagagcctgtctaaaaaactactgcc

SEQ ID NO: 228688 - DNA, 120 bp, Artificial Sequence
  ENSG00000118922_17 (sequence is synthesized)
ccacttcaaattgcagtgttctgtcacctaggcatcatctcttcctgcccctagtatttgattacaaggaaccaggggaaaaaaactttcttagacacactggcaccaaggtaagaggtg

SEQ ID NO: 228689 - DNA, 120 bp, Artificial Sequence
  ENSG00000118922_18 (sequence is synthesized)
gggctgcccaggcaaagtcagtgaacatgaaaactcagacaaagcagagatggaaataatgcgcctcttgaggagaaaagcaataatgaataaaaggactttcctacaataacttcactg

SEQ ID NO: 228690 - DNA, 120 bp, Artificial Sequence
  ENSG00000118922_19 (sequence is synthesized)
aggactcacgttaccaattttcatacttactaaagggattgtaaaaaacaccccagcattttaggtgtcttggttccatttacagcactgaggtaatctttctgctgtttgttgtcctgc

SEQ ID NO: 228691 - DNA, 120 bp, Artificial Sequence
  ENSG00000118922_20 (sequence is synthesized)
ttggttgagtaccacaattaaagattatgctccccttttcttgtttgaaaacagttatttggtgactagaaaggcaagggaggcatagccgggaattaactcttcggttaatgggtcagt

SEQ ID NO: 228692 - DNA, 120 bp, Artificial Sequence
  ENSG00000118922_21 (sequence is synthesized)
tctccttggaactgaatcagtggaaagagaatgcttcccatagaaagcccgacatggtgctagtttcctctcttggagagccaaggataagtgactctccaataggttcttctataccga

SEQ ID NO: 228693 - DNA, 120 bp, Artificial Sequence
  ENSG00000118922_22 (sequence is synthesized)
tttcattttctaaactgtatcaggacccaggtgtcctgcattggcatctgcagggatattgaacccactcatcctgtgcagaggatgagaggaaggtgttagttccatcagccccataaa

SEQ ID NO: 228694 - DNA, 120 bp, Artificial Sequence
  ENSG00000118922_23 (sequence is synthesized)
attatgaacctttttgcaactaggaacatatacagtaaacaagcaatacatcaccaacgagcattctttcagaaaaattaccatatttttgtccccaccacaagctgggtttttttccag

SEQ ID NO: 228695 - DNA, 120 bp, Artificial Sequence
  ENSG00000118922_24 (sequence is synthesized)
ctttctgtggctgaggggctggtgagattttttgttgttattgttgttgttgctagaattttttatagcttagatataaaaggtctccaacaaagacctttgcaatatattttaattaca

SEQ ID NO: 228696 - DNA, 120 bp, Artificial Sequence
  ENSG00000118922_25 (sequence is synthesized)
aacacttgattttgggaattgcacatattaacctcacaatattactagctcatttttaaatgtctggacattctgaaataatttccggttacagaattaccctttttaggatcatcttct

SEQ ID NO: 228697 - DNA, 120 bp, Artificial Sequence
  ENSG00000118922_26 (sequence is synthesized)
aattcagataatcttattctgatgaagcgagaactatgaacgttgaaacaaggacaatttgtgttggatggtattcaaaaggaattttttaaaacattaagcaacagtgtaatgattttc

SEQ ID NO: 228698 - DNA, 120 bp, Artificial Sequence
  ENSG00000118922_27 (sequence is synthesized)
aggtcaaattatggcttcacaaatatgtgctctatattgtctgccaggtctcaaaaattcatcaagcaatttccctccaacaagggctgcagttctagtgataaatagcatctttagctg

SEQ ID NO: 228699 - DNA, 120 bp, Artificial Sequence
  ENSG00000118922_28 (sequence is synthesized)
cacagtctactactcatcaaccagtgggttttttttagcacctggaaagtttttttgtactatatgcaactcctacttcacattgcctgtgaccattcagaatagaaaaaggtctgttga

SEQ ID NO: 228700 - DNA, 120 bp, Artificial Sequence
  ENSG00000118922_29 (sequence is synthesized)
tgcatgccagtgctggttactagtcagtgacagagaacacagagagggacaaacacagccatgaaccccctggcactagtaccagcacctagttggcaagtagtgggtgcatctctcaag

SEQ ID NO: 228701 - DNA, 120 bp, Artificial Sequence
  ENSG00000118922_30 (sequence is synthesized)
tgaagtgtagatttgtatttagtcctgcttgctctcataaaaagagccagttcttttctctgctgaaagatgtcttgagagtattacaggtagacttggtttttagaattcataaaactg

SEQ ID NO: 228702 - DNA, 120 bp, Artificial Sequence
  ENSG00000118922_31 (sequence is synthesized)
acaggcaggggaatcttcctgagtgacagcttggtttaaatttagcacagaactagatgagttgcacttttctaataacataggatggatttggggaagggaacattttccctcatcctc

SEQ ID NO: 228703 - DNA, 120 bp, Artificial Sequence
  ENSG00000118922_32 (sequence is synthesized)
tgaaagtggaaaccagactgagatggtaagttaactgataaaacctgtcagcattccatcattttccccttttgacgtatcagtacttctaagaagggatctaagcacaattaagtgaat

SEQ ID NO: 228704 - DNA, 120 bp, Artificial Sequence
  ENSG00000118922_33 (sequence is synthesized)
tgagtccctggtctagcctcaggaactgaaacttctttggggcttgtcttgagacgtggcaaattctccttggtgagttttctaaaagtatttccccatggaaaggagaaagtggtttgg

SEQ ID NO: 228705 - DNA, 120 bp, Artificial Sequence
  ENSG00000118922_34 (sequence is synthesized)
gacagaaagaaatggaatgtcttcagtcatggaagagcctccatttcatctcatgtccatttctagcctctttcaaaaagcacagtgcatcatgagcaacagaaaagcagtagaatccta

SEQ ID NO: 228706 - DNA, 120 bp, Artificial Sequence
  ENSG00000118922_35 (sequence is synthesized)
aaggacataacagttgttccgtaactagaagcattctttgattttaaatttgaagctgttcagtttgcagctggggatatgtgcatggttgggaacttatacacatagagccattaacta

SEQ ID NO: 228707 - DNA, 120 bp, Artificial Sequence
  ENSG00000118922_36 (sequence is synthesized)
cttaagcagctgcagtagacctgattttctgtttgcagtatagagattgatttcaagggagttacattatttgaaaagttatgactttcagcctttgaggttttaagaatcccttttcat

SEQ ID NO: 228708 - DNA, 120 bp, Artificial Sequence
  ENSG00000118922_37 (sequence is synthesized)
ggtctgatcttaagttgtttgaaaaaagattcacgcttctgcatccacctctgccctcattctgtcaattgtgtgtggactctgagaagcctgcttgataacttgtcttaagttctatta

SEQ ID NO: 228709 - DNA, 120 bp, Artificial Sequence
  ENSG00000118922_38 (sequence is synthesized)
aggcagttagactgagatttctaatgacttcaccataaagattatacttctgcctggcgtcgtttctataaaacactataggacatttgttttcaaaagcagttgagtaacagcaacata

SEQ ID NO: 228710 - DNA, 120 bp, Artificial Sequence
  ENSG00000118922_39 (sequence is synthesized)
aaccacattttttaaaaaaatgagcacttttcattcacttgaaagcttaagtgggaaaaaggaagatgattgtcaggggaaaaacttacaaaatgctacagtgtttacaaatgccagttc

SEQ ID NO: 228711 - DNA, 120 bp, Artificial Sequence
  ENSG00000118922_40 (sequence is synthesized)
caggtgattagaaaggccgttttcattatggttcagatttggaatagcttatgcaaagattgtgttcatttttatacaattctttttaactttaaattgccatctgtgttttaaacataa

SEQ ID NO: 228712 - DNA, 120 bp, Artificial Sequence
  ENSG00000118922_41 (sequence is synthesized)
ttctgcactttggaatcagttcattagaatgataacatttatatggataaagatgcagtattccttattctgtacttgatttattatacttaccaaagctgcaactgaataaatctggtg

SEQ ID NO: 228713 - DNA, 120 bp, Artificial Sequence
  ENSG00000118922_42 (sequence is synthesized)
aggtgaggccttcaaaatgtattaatacgcctttgttatgttgttatgactgcttagaaatgtagccatgatgttgttctaaagatgtcttaacatttatagtgaggattgacagaaatt

SEQ ID NO: 228714 - DNA, 120 bp, Artificial Sequence
  ENSG00000118922_43 (sequence is synthesized)
aagcagtgttaagaataccagcatccatgttacagtctgcgtataagggactgaatgtgaggtaactcttatgaatcataataggcccagaaagccttaatattcatagttcataatcca

SEQ ID NO: 228715 - DNA, 120 bp, Artificial Sequence
  ENSG00000118922_44 (sequence is synthesized)
atctcttcctttagtttttctgaggtagtgcatcccattaaaaaagtctcttcaattagatttggctttagtttagaaaggggtttggtaagtcatgtcttccatatgacatttctactc

SEQ ID NO: 228716 - DNA, 120 bp, Artificial Sequence
  ENSG00000118922_45 (sequence is synthesized)
atccccacactgccttccacttaacctgtacagacagccccaacacatgcacatgtgtgtacacaactgtatatgcagcagccagtgggctaacaaatatcagcaaagaacttttttaaa

SEQ ID NO: 228717 - DNA, 120 bp, Artificial Sequence
  ENSG00000118922_46 (sequence is synthesized)
aagaatttgtaataatccgtgctgtctagaaatgtgagttacttaccttattaggaaaccggcttataatactatatatgactctgcctgcattttatagttaagaaatgtacataaaaa

SEQ ID NO: 228718 - DNA, 120 bp, Artificial Sequence
  ENSG00000118922_47 (sequence is synthesized)
ttgctatattttcacagtttcattataatgtctgtttagtaacccatgtccactgatactttaaatatgctaattactgagcaattgcaatagaaatccagattttcataagaaaatgaa

SEQ ID NO: 228719 - DNA, 120 bp, Artificial Sequence
  ENSG00000118922_48 (sequence is synthesized)
atagaaggatactgcatctttaaaaaatagagtgaagatattttactgtattcgtaacatatgtgatagtggaaaaagtattttcaaactcacaaattttacagaggttgtaaatagttt

SEQ ID NO: 228720 - DNA, 120 bp, Artificial Sequence
  ENSG00000118922_49 (sequence is synthesized)
gatgaagtatgttgggaaagagagcttctagttttcatcacaataaaaagaaaaaacttgttcagatatgccttgtatatcttacacacaatgagtgaaattgccatgggaactctgtcc

SEQ ID NO: 228721 - DNA, 120 bp, Artificial Sequence
  ENSG00000118922_50 (sequence is synthesized)
aactttgtcagagcatgctcttcgtgttctgttcaaaatagagtggccacttgtcatggtttagccaggatggtttaaaatataatgaagtcattttaagttgcagacaactgattccaa

SEQ ID NO: 228722 - DNA, 120 bp, Artificial Sequence
  ENSG00000118922_51 (sequence is synthesized)
actagtaatgtcttttcctgaaaagggcaaaacagctgcacaggattttgcttgtactaaagaggagcatcttacaattgttctcttttctcagttatctccctcctcaacagagtgtga

SEQ ID NO: 228723 - DNA, 120 bp, Artificial Sequence
  ENSG00000118922_52 (sequence is synthesized)
acaaccatacaggtgtttattcttgttttattccagggagactgcttttaggtataactacatgttgacaagattaagtgctgtggatatggccacgtgttaaaggaatctatactcgca

SEQ ID NO: 228724 - DNA, 120 bp, Artificial Sequence
  ENSG00000118922_53 (sequence is synthesized)
ataggaataagctaatgcccattttcagaaataaattaaatgctgaaagtgcctgtcagtaaaccttatgaccaatgagatattcctatacttttacacagcaataattcttaataagac

SEQ ID NO: 228725 - DNA, 120 bp, Artificial Sequence
  ENSG00000118922_54 (sequence is synthesized)
tgggttttttcctgcacatgtgaacacacacacacatacacacagagagagtaaatacatacacatagtaaatcaaatctgttcacatgcccacaaaaaacgcttttatagctttcaaat

SEQ ID NO: 228726 - DNA, 120 bp, Artificial Sequence
  ENSG00000118922_55 (sequence is synthesized)
atacctaatcttgtttacattaacatttcttaatttgatctttctaacttgcagaacgttaagaacacaaatctgaacattaagtttatcttcagtgaacactattgcatatggtaatta

SEQ ID NO: 228727 - DNA, 120 bp, Artificial Sequence
  ENSG00000118922_56 (sequence is synthesized)
taatttccagataaaaagttgactgtcatttgccccaaacttatgaaacagtatgtatgattcaaaaagttttgctcagttaaaaacaccaatttatttggcgcaaaagactgaaggata

SEQ ID NO: 228728 - DNA, 120 bp, Artificial Sequence
  ENSG00000118922_57 (sequence is synthesized)
tttgtttgcttgttcattttatccactcatatcaaacgcacaaattcatctttacatttcttcattcccctttcccctaatatttcctattatcatcttaagaatcattttggaatgaat

SEQ ID NO: 228729 - DNA, 120 bp, Artificial Sequence
  ENSG00000118922_58 (sequence is synthesized)
attgacagaatcatttctccccaaaaagtctgttgaagtaccactgacacttagtaagcctagcctttaaccatctttgcagttagtcctaaaaattaccagatgcacattcagaagctc

SEQ ID NO: 228730 - DNA, 120 bp, Artificial Sequence
  ENSG00000118922_59 (sequence is synthesized)
acaggttttttcctgtaattactgtactgctaaaagtggagtcatggatagaaatatacaatgagactatatgaatagacatgaaccctggaaattctccaaccctgccatctcagagca

SEQ ID NO: 228731 - DNA, 120 bp, Artificial Sequence
  ENSG00000118922_60 (sequence is synthesized)
caaattcacccaaacaagctactgaggctatcagtaaaattatactcatggagagtcacacatcgggtaagggcaattttaaaagtaggactgtgattaaacattcaggctttagacttc

SEQ ID NO: 228732 - DNA, 120 bp, Artificial Sequence
  ENSG00000118922_61 (sequence is synthesized)
catgatggactcagaccacaggcctcaaaaaaacatccactgttttctcctcccaatgttagaaagaagaaaagggagacggaaatgtaccaggataagggggtaaaataaccaattaag

SEQ ID NO: 228733 - DNA, 120 bp, Artificial Sequence
  ENSG00000118922_62 (sequence is synthesized)
tgtcaaaggaaagctgctgggttccttaatctcactgaagtcaagtcttctgactgggcttcttaccatgtgttgtctgaaaaaactaaagtaccttgaaaggttacacattcagcaaac

SEQ ID NO: 228734 - DNA, 120 bp, Artificial Sequence
  ENSG00000118922_63 (sequence is synthesized)
catgaagataatagctattctttattaaacactgtgtgccaagcaatagactaggcaatttttagatacgttacctgcaacctgtacaacatttctacactttatggatgggaaacggag

SEQ ID NO: 228735 - DNA, 120 bp, Artificial Sequence
  ENSG00000118922_64 (sequence is synthesized)
acatgggaagtgtggctgagttgttcatggatgtagaaatagtaaacggcagagtaggaaagtgaaaccgcctatctctgacctggaggtctgcctgtatctttcccactccaccacact

SEQ ID NO: 228736 - DNA, 120 bp, Artificial Sequence
  ENSG00000118922_65 (sequence is synthesized)
gcacgtgggtgtcccgaaaccaccttcccagattcctgactctcagtaattttattatggacaacatgcatgagtagtcatcatatttttcaagtgaaatatcgggacatgatataacac

SEQ ID NO: 228737 - DNA, 120 bp, Artificial Sequence
  ENSG00000118922_66 (sequence is synthesized)
atgacttaacaatggtactgaatatttgaaatcaggcctttcccggaaaatcatgcatgaaggatcattataaacaaacaatagcaaccagttgtctccccgaacttgtcacttttctca

SEQ ID NO: 228738 - DNA, 120 bp, Artificial Sequence
  ENSG00000118922_67 (sequence is synthesized)
taaatgtctggcctggagctccaaaatcatccaaatacttagtagcattttagcctgagtacactttctcagttcctcaactctttgtatacctttccaccaatatagacattctagaat

SEQ ID NO: 228739 - DNA, 120 bp, Artificial Sequence
  ENSG00000118922_68 (sequence is synthesized)
ctgcttcagatgcatttgaaattttcacccccatggaactagtgattaatatcagagcccactcttgcagttggtaatggggtggcaatcaaacgttcagatgatgataaaggagagata

SEQ ID NO: 228740 - DNA, 120 bp, Artificial Sequence
  ENSG00000118922_69 (sequence is synthesized)
atggataattctttttcagagttctcacttaacagctctgttgtggaatgttttaaatagtcttataaataatttgtttatagtattgttgttagtttaattgaattttatgtaagaagc

SEQ ID NO: 228741 - DNA, 120 bp, Artificial Sequence
  ENSG00000118922_70 (sequence is synthesized)
tgtccaacatcagagaaatgaaattcctcccactttctgtgtagaacaaggtctctgacagtattgattcatggaagtactaatggacttagaaaacattaagagaatgtcatttctcat

SEQ ID NO: 228742 - DNA, 120 bp, Artificial Sequence
  ENSG00000118922_71 (sequence is synthesized)
agtgtttctgtttctgaaaatgaatctcctgaattattatctttctccctgttacttggctggggaaagagatagaagctgtataaacaaattctcttccatgctcaaagcaagtgttcc

SEQ ID NO: 228743 - DNA, 120 bp, Artificial Sequence
  ENSG00000118922_72 (sequence is synthesized)
atgtgcacaacctgctgcagactggggcccttctcagttaattgggtttcacaagcaataatttctccacaacaaaaaccacaacttgaagtgagttgaaaagagatcaatagtggaaac

SEQ ID NO: 228744 - DNA, 120 bp, Artificial Sequence
  ENSG00000118922_73 (sequence is synthesized)
agtcgcctcagtactttttctttctggatttcatctctagaaatttgaagtgtttgagacagagtccaccctttgtgcaaggcgagaaccaatgaatggactccttgtgtgaattattgc

SEQ ID NO: 228745 - DNA, 120 bp, Artificial Sequence
  ENSG00000118922_74 (sequence is synthesized)
atcttcttccaaagcaggttcatcaagactttcacagagattcatttttgttgagaagtaagggttaataggaggatagaatttggatccaaatctagtgataaaagtgtccaagcaatc

SEQ ID NO: 228746 - DNA, 120 bp, Artificial Sequence
  ENSG00000118922_75 (sequence is synthesized)
aaaaagtaagatattttagggacataccaacatcttccctttctgctaatttcatgctccaaagatatggcaaaaaaaaaaatcataaaaagtgcttttgccctacttgtgttctagttt

SEQ ID NO: 228747 - DNA, 120 bp, Artificial Sequence
  ENSG00000118922_76 (sequence is synthesized)
tcccatggcagaattttgtaattacatccagaatatagtgtatattttgttcctcaaactttattacattggatggatattgttgaactggggcactggtgcctatattcaaggctcttt

SEQ ID NO: 228748 - DNA, 120 bp, Artificial Sequence
  ENSG00000118922_77 (sequence is synthesized)
cctatcaacgtgtctgtccacgatttgttgtgtttaaagcttcattttgaaaaatcactgtccccctgtggggtagtgactgtattgttttgttcatgtctatgtgggacacattgcatc

SEQ ID NO: 228749 - DNA, 120 bp, Artificial Sequence
  ENSG00000118922_78 (sequence is synthesized)
acatggcaaaccaactctctgtggatgtgagataagtacttataaaaccagcttgaaaacatcgtcttatgtattatgtcatcctgcatcataatgcaattatgtgtatcataacatgct

SEQ ID NO: 228750 - DNA, 120 bp, Artificial Sequence
  ENSG00000118922_79 (sequence is synthesized)
catttaaaaaaagagaaaccagcaaattcatgtttgtccatagaagaatgtactcagaactttgtgttgtgaaacgatgagaacagaccacctttaagatacccacctgccacttaaaat

SEQ ID NO: 228751 - DNA, 120 bp, Artificial Sequence
  ENSG00000118922_80 (sequence is synthesized)
gacttagttataattagtagtagtctagacgttgttcttggtgtgtgggggtcaattctaacgtcatgttcttttgaataaatctctcagtcatatttgaaaaaaaaatacatgggaata

SEQ ID NO: 228752 - DNA, 120 bp, Artificial Sequence
  ENSG00000118922_81 (sequence is synthesized)
aagaaaaatatcatctttggccaaatcaagcaggcatcttttttcttttccttgacgtttagctcattatacgtggtgattggatcacgagatctgtccgtgtgaaaatacagaaacatc

SEQ ID NO: 228753 - DNA, 120 bp, Artificial Sequence
  ENSG00000118922_82 (sequence is synthesized)
ctttagtttacaaaacagttattctaggcttgaagcctctgaacagcaaattgaatagatgggctgcatctgatttgctttatggatgtaattttacaaaacactcttgggtctctgacc

SEQ ID NO: 228754 - DNA, 120 bp, Artificial Sequence
  ENSG00000118922_83 (sequence is synthesized)
ccagggagttaagagtgcccagaggaggtcctacacattaaaggataaagccccccagtgatgctggcaagcaaatgtgttgagttcttaaatcttcatttggttttctgttcaggattt

SEQ ID NO: 228755 - DNA, 120 bp, Artificial Sequence
  ENSG00000118922_84 (sequence is synthesized)
taattgcaaatgaatttatttctccagtttatctaaagacctaatttcccaatagtttcctctgcatttatatactctgtagtgtttaggcaaccctgttataagtttattaatattatg

SEQ ID NO: 228756 - DNA, 120 bp, Artificial Sequence
  ENSG00000118922_85 (sequence is synthesized)
taagtgttgttcttgtatttatgtatagtgtatgtattgtaaatatactcagagcttttttccttttactgtaaaatggtgatttttttgccctatgataatgtaaagggagaccctcct

SEQ ID NO: 228757 - DNA, 120 bp, Artificial Sequence
  ENSG00000118922_86 (sequence is synthesized)
aatgagattctctcagaggatgattattccagtctattctcagagatttaaatgaacaagtgttattgtttttaatggtgtctcagacatattctgttggtgcattgcttttctgtattc

SEQ ID NO: 228758 - DNA, 120 bp, Artificial Sequence
  ENSG00000118922_87 (sequence is synthesized)
aactttcctatgaattgagctgtgaactgaaatagagtttaaacctttaactgtatgcatttgtataattatctgaatgaaggcatgaaggttaaataaagcattttgtatggaacaaaa

SEQ ID NO: 228759 - DNA, 120 bp, Artificial Sequence
  ENSG00000118922_88 (sequence is synthesized)
ggtgttcaatggataatggaaactgcagcatctcctgtcccccagccatgtcattctagctgtgaactggcacgaatgtcagcagcttttcattcagctgaatgctctttgggagattag

SEQ ID NO: 228760 - DNA, 120 bp, Artificial Sequence
  ENSG00000118922_89 (sequence is synthesized)
ggcagagaatggagtgttttaatgagttggaaattcatgctttgatgagatataagacctatgtgcatcttttctaatacctcctgcacccttctcctgaactctgcaaaaaaaaaaaaa

SEQ ID NO: 228761 - DNA, 120 bp, Artificial Sequence
  ENSG00000118939_0 (sequence is synthesized)
gtcagagctggagggccgggcaccgcggccatggagggtcaacgctggctgccgctggaggccaatcccgaggtcaccaaccagtttcttaaacaattaggtctacatcctaactggcaa

SEQ ID NO: 228762 - DNA, 120 bp, Artificial Sequence
  ENSG00000118939_1 (sequence is synthesized)
ttcgttgatgtatatggaatggatcctgaactccttagcatggtaccaagaccagtctgtgcagtcttacttctctttcctattacagaaaagtatgaagtattcagaacagaagaggaa

SEQ ID NO: 228763 - DNA, 120 bp, Artificial Sequence
  ENSG00000118939_2 (sequence is synthesized)
gaaaaaataaaatctcagggacaagatgttacatcatcagtatatttcatgaagcaaacaatcagcaatgcctgtggaacaattggactgattcatgctattgcaaacaataaagacaag

SEQ ID NO: 228764 - DNA, 120 bp, Artificial Sequence
  ENSG00000118939_3 (sequence is synthesized)
actttgaatctggatcaaccttgaaaaaattcctggaggaatctgtgtcaatgagccctgaagaacgagccagatacctggagaactatgatgccatccgagttactcatgagaccagtg

SEQ ID NO: 228765 - DNA, 120 bp, Artificial Sequence
  ENSG00000118939_4 (sequence is synthesized)
cccatgaaggtcagactgaggcaccaagtatagatgagaaagtagatcttcattttattgcattagttcatgtagatgggcatctctatgaattagatgggcggaagccatttccaatta

SEQ ID NO: 228766 - DNA, 120 bp, Artificial Sequence
  ENSG00000118939_5 (sequence is synthesized)
accatggtgaaactagtgatgaaactttattagaggatgccatagaagtttgcaagaagtttatggagcgcgaccctgatgaactaagatttaatgcgattgctctttctgcagcatagc

SEQ ID NO: 228767 - DNA, 120 bp, Artificial Sequence
  ENSG00000118939_6 (sequence is synthesized)
ttgtcaataatggaaacaccaaaaactgtattatttgcaactaaattttctctgccatacactaactcaaaaattttgatattttcattaacttgatgattaaactttatgtgagttaaa

SEQ ID NO: 228768 - DNA, 120 bp, Artificial Sequence
  ENSG00000118939_7 (sequence is synthesized)
aaatgcttactttattctagtctcaattgaataaagtgttaagtgttagttctaacaactgaataagttaaatggcccctacttagagcctggaaattacaaataatcagatattcaatt

SEQ ID NO: 228769 - DNA, 120 bp, Artificial Sequence
  ENSG00000118939_8 (sequence is synthesized)
tcctaagttttcagagatttacgggttacacagtacagcaattcatttgattacccagatatcattcttaaatatctagtactaagcttttcttaaatttccttcaatttgttgtttctt

SEQ ID NO: 228770 - DNA, 120 bp, Artificial Sequence
  ENSG00000118939_9 (sequence is synthesized)
tagaagactttaggtgttaaaatttagctttgttgtcttcatttaaaaagttgagtataggcattttttccaatgaatacctttattcttattacaggccatccgagttactcatgagac

SEQ ID NO: 228771 - DNA, 120 bp, Artificial Sequence
  ENSG00000118939_10 (sequence is synthesized)
gcatgcgtagaacgcgagcgctcggcaaggctcggctcggaagagtccaagcgtgaggggagagggctgtggattcagatactgtttttctcccgaaataggaaattggcttattttttt

SEQ ID NO: 228772 - DNA, 120 bp, Artificial Sequence
  ENSG00000118939_11 (sequence is synthesized)
cattgtaataaattccgttcatgaagataatttaggctttcaaatatggaagcaaagttctaactaataacctttaataaaaaatattcatggtagcacattaaaacatttgttttagga

SEQ ID NO: 228773 - DNA, 120 bp, Artificial Sequence
  ENSG00000118939_12 (sequence is synthesized)
tatattattgaaaatggcttttaacttttcttgcctcactgggggaagaggaaaatggaagttgaaagcacattatcctgtaaaaacagctaagcattcaattgtttgtctgttttccac

SEQ ID NO: 228774 - DNA, 120 bp, Artificial Sequence
  ENSG00000118946_0 (sequence is synthesized)
gcatttcctcccctccctttggctgctcggaaaggagagagaggaaaaaaaaaatacgcttggctggtagatgcagtccgccgccgccgctgcctcagccagcaatgcaagattagatct

SEQ ID NO: 228775 - DNA, 120 bp, Artificial Sequence
  ENSG00000118946_1 (sequence is synthesized)
ctaaatgcagcaaaacactgcctgaaaacagaccggcccgcgcagcaagcagacatttcacggtgcgctggggaagcttcaaaatatatctgtgactctgtcttcgttgctcttcatccc

SEQ ID NO: 228776 - DNA, 120 bp, Artificial Sequence
  ENSG00000118946_2 (sequence is synthesized)
catcaatttcatcacgggaggcgagcagcaagtaagaatttcactttcggatctgcctagagacacacctccctgctccctcccccactcgatgtgaagagtattccggagtctccgggc

SEQ ID NO: 228777 - DNA, 120 bp, Artificial Sequence
  ENSG00000118946_3 (sequence is synthesized)
gggagtagatttgcagcaccctagcgggagcgaggaaaacctactgattctttagctcattatcatctctcccagacgagatttccttcttatcgcctgcctcatcgctcaagtttgagc

SEQ ID NO: 228778 - DNA, 120 bp, Artificial Sequence
  ENSG00000118946_4 (sequence is synthesized)
ctcccgaagtccgggcgggagagacgaaacccctggctcacccccagccgcaggaagccaccgccttgctccaagcccctgcagctctgctgcaccgcagcttctcacccagtgcggatg

SEQ ID NO: 228779 - DNA, 120 bp, Artificial Sequence
  ENSG00000118946_5 (sequence is synthesized)
ctgtagatcaacaggttcagggaacttgagcagaataaggagagaccaccgggtgccgcagctcgggtgcagagggaaaaaaggacccatagacttgtggctcgcgtcgcgcgcgcacgc

SEQ ID NO: 228780 - DNA, 120 bp, Artificial Sequence
  ENSG00000118946_6 (sequence is synthesized)
tgcgccagggccccaggctggcgcgcactccctctctggctcctccagtccgattgctcctgcccccaccttacaggtctgggatgtacctttccatctgttgctgctttcttctatggg

SEQ ID NO: 228781 - DNA, 120 bp, Artificial Sequence
  ENSG00000118946_7 (sequence is synthesized)
cccctgccctcactctcaagaacctcaactactccgtgccggaggagcaaggggccggcacggtgatcgggaacatcggcagggatgctcgactgcagcctgggcttccgcctgcagagc

SEQ ID NO: 228782 - DNA, 120 bp, Artificial Sequence
  ENSG00000118946_8 (sequence is synthesized)
gcggcggcggagggcgcagcaagtcgggtagctaccgggtgctggagaactccgcaccgcacctgctggacgtggacgcagacagcgggctcctctacaccaagcagcgcatcgaccgcg

SEQ ID NO: 228783 - DNA, 120 bp, Artificial Sequence
  ENSG00000118946_9 (sequence is synthesized)
agtccctgtgccgccacaatgccaagtgccagctgtccctcgaggtgttcgccaacgacaaggagatctgcatgatcaaggtagagatccaggacatcaacgacaacgcgccctccttct

SEQ ID NO: 228784 - DNA, 120 bp, Artificial Sequence
  ENSG00000118946_10 (sequence is synthesized)
cctcggaccagatcgaaatggacatctcggagaacgctgctccgggcacccgcttccccctcaccagcgcacatgaccccgacgccggcgagaatgggctccgcacctacctgctcacgc

SEQ ID NO: 228785 - DNA, 120 bp, Artificial Sequence
  ENSG00000118946_11 (sequence is synthesized)
gcgacgatcacggcctctttggactggacgttaagtcccgcggcgacggcaccaagttcccagaactggtcatccagaaggctctggaccgcgagcaacagaatcaccatacgctcgtgc

SEQ ID NO: 228786 - DNA, 120 bp, Artificial Sequence
  ENSG00000118946_12 (sequence is synthesized)
tgactgccctggacggtggcgagcctccacgttccgccaccgtacagatcaacgtgaaggtgattgactccaacgacaacagcccggtcttcgaggcgccatcctacttggtggaactgc

SEQ ID NO: 228787 - DNA, 120 bp, Artificial Sequence
  ENSG00000118946_13 (sequence is synthesized)
ccgagaacgctccgctgggtacagtggtcatcgatctgaacgccaccgacgccgatgaaggtcccaatggtgaagtgctctactctttcagcagctacgtgcctgaccgcgtgcgggagc

SEQ ID NO: 228788 - DNA, 120 bp, Artificial Sequence
  ENSG00000118946_14 (sequence is synthesized)
tcttctccatcgaccccaagaccggcctaatccgtgtgaagggcaatctggactatgaggaaaacgggatgctggagattgacgtgcaggcccgagacctggggcctaaccctatcccag

SEQ ID NO: 228789 - DNA, 120 bp, Artificial Sequence
  ENSG00000118946_15 (sequence is synthesized)
cccactgcaaagtcacggtcaagctcatcgaccgcaacgacaatgcgccgtccatcggtttcgtctccgtgcgccagggggcgctgagcgaggccgcccctcccggcaccgtcatcgccc

SEQ ID NO: 228790 - DNA, 120 bp, Artificial Sequence
  ENSG00000118946_16 (sequence is synthesized)
tggtgcgggtcactgaccgggactctggcaagaacggacagctgcagtgtcgggtcctaggcggaggagggacgggcggcggcgggggcctgggcgggcccgggggttccgtccccttca

SEQ ID NO: 228791 - DNA, 120 bp, Artificial Sequence
  ENSG00000118946_17 (sequence is synthesized)
agcttgaggagaactacgacaacttctacacggtggtgactgaccgcccgctggaccgcgagacacaagacgagtacaacgtgaccatcgtggcgcgggacgggggctctcctcccctca

SEQ ID NO: 228792 - DNA, 120 bp, Artificial Sequence
  ENSG00000118946_18 (sequence is synthesized)
actccaccaagtcgttcgcgatcaagattctagacgagaacgacaacccgcctcggttcaccaaagggctctacgtgcttcaggtgcacgagaacaacatcccgggagagtacctgggct

SEQ ID NO: 228793 - DNA, 120 bp, Artificial Sequence
  ENSG00000118946_19 (sequence is synthesized)
ctgtgctcgcccaggatcccgacctgggccagaacggcaccgtatcctactctatcctgccctcgcacatcggcgacgtgtctatctacacctatgtgtctgtgaatcccacgaacgggg

SEQ ID NO: 228794 - DNA, 120 bp, Artificial Sequence
  ENSG00000118946_20 (sequence is synthesized)
ccatctacgccctgcgctcctttaacttcgagcagaccaaggcttttgagttcaaggtgcttgctaaggactcgggggcgcccgcgcacttggagagcaacgccacggtgagggtgacag

SEQ ID NO: 228795 - DNA, 120 bp, Artificial Sequence
  ENSG00000118946_21 (sequence is synthesized)
tgctagacgtgaatgacaacgcgccagtgatcgtgctccccacgctgcagaacgacaccgcggagctgcaggtgccgcgcaacgctggcctgggctatctggtgagcactgtgcgcgccc

SEQ ID NO: 228796 - DNA, 120 bp, Artificial Sequence
  ENSG00000118946_22 (sequence is synthesized)
tagacagcgacttcggcgagagcgggcgtctcacctacgagatcgtggacggcaacgacgaccacctgtttgagatcgacccgtccagcggcgagatccgcacgctgcaccctttctggg

SEQ ID NO: 228797 - DNA, 120 bp, Artificial Sequence
  ENSG00000118946_23 (sequence is synthesized)
aggacgtgacgcccgtggtggagctggtggtgaaggtgaccgaccacggcaagcctaccctgtccgcagtggccaagctcatcatccgctcggtgagcggatcccttcccgagggggtac

SEQ ID NO: 228798 - DNA, 120 bp, Artificial Sequence
  ENSG00000118946_24 (sequence is synthesized)
cacgggtgaatggcgagcagcaccactgggacatgtcgctgccgctcatcgtgactctgagcactatctccatcatcctcctagcggccatgatcaccatcgccgtcaagtgcaagcgcg

SEQ ID NO: 228799 - DNA, 120 bp, Artificial Sequence
  ENSG00000118946_25 (sequence is synthesized)
agaacaaggagatccgcacttacaactgccgcatcgccgagtacagccacccgcagctgggtgggggcaagggcaagaagaagaagatcaacaaaaatgatatcatgctggtgcagagcg

SEQ ID NO: 228800 - DNA, 120 bp, Artificial Sequence
  ENSG00000118946_26 (sequence is synthesized)
aagtggaggagaggaacgccatgaacgtcatgaacgtggtgagcagcccctccctggccacctcccccatgtacttcgactaccagacccgcctgcccctcagctcgccccggtcggagg

SEQ ID NO: 228801 - DNA, 120 bp, Artificial Sequence
  ENSG00000118946_27 (sequence is synthesized)
tgatgtatctcaaaccggcctccaacaacctgactgtccctcaggggcacgcgggctgccacaccagcttcaccggacaagggactaatgcaagcgagacccctgccactcggatgtcca

SEQ ID NO: 228802 - DNA, 120 bp, Artificial Sequence
  ENSG00000118946_28 (sequence is synthesized)
taattcagacagacaattttcccgcagagcccaattacatgggcagcaggcagcagtttgttcaaagtagctccacgtttaaggacccagaaagagccagcctgagagacagtgggcacg

SEQ ID NO: 228803 - DNA, 120 bp, Artificial Sequence
  ENSG00000118946_29 (sequence is synthesized)
gggacagtgatcaggctgacagtgaccaagacactaacaaaggctcctgctgtgacatgtctgttagggaggcactcaagatgaaaactacttcaactaaaagccaaccacttgaacaag

SEQ ID NO: 228804 - DNA, 120 bp, Artificial Sequence
  ENSG00000118946_30 (sequence is synthesized)
aaccagaagagtgtgttaattgcacagatgaatgccgagtgcttggtcattctgacaggtgctggatgccacagttccctgcagccaatcaggctgaaaatgcagattaccgcacaaatc

SEQ ID NO: 228805 - DNA, 120 bp, Artificial Sequence
  ENSG00000118946_31 (sequence is synthesized)
tctttgtacctacagttgaagctaatgttgagactgagacttacgaaactgtgaatcccactgggaaaaagactttttgtacatttggaaaagacaagcgagagcacactattctcattg

SEQ ID NO: 228806 - DNA, 120 bp, Artificial Sequence
  ENSG00000118946_32 (sequence is synthesized)
ccaacgttaaaccttatttaaaagccaaacgtgccctgagccctctcctccaagaggtcccctcagcatcaagcagcccaaccaaggcgtgcatcgagccttgcacctcaacaaaaggct

SEQ ID NO: 228807 - DNA, 120 bp, Artificial Sequence
  ENSG00000118946_33 (sequence is synthesized)
ccctggatggctgtgaagcaaaaccaggagccctggctgaagcaagcagtcagtacttgcccactgacagtcaatatctgtcacctagtaagcaaccaagagaccctcccttcatggctt

SEQ ID NO: 228808 - DNA, 120 bp, Artificial Sequence
  ENSG00000118946_34 (sequence is synthesized)
tttgcagatgtgcattccagagccagccgggattccagtgagatgggtgctgttcttgagcagcttgaccaccccaacagggatctgggcagagagtctgtggatgcagaggaagttgtg

SEQ ID NO: 228809 - DNA, 120 bp, Artificial Sequence
  ENSG00000118946_35 (sequence is synthesized)
agagaaattgataagcttttgcaagactgccggggaaacgaccctgtggctgtgagaaagtgaaaaaagaaaaaaaaaaaggcattggcattttcttgtctcttctgttgatttaaaaat

SEQ ID NO: 228810 - DNA, 120 bp, Artificial Sequence
  ENSG00000118946_36 (sequence is synthesized)
gatccctcctggtgataacccattttacagggatgaagaaagaccaatgctgctttaaggcttttagtgaacatctgaagtgcccacaagtatgttctttccactgctgatttctttttc

SEQ ID NO: 228811 - DNA, 120 bp, Artificial Sequence
  ENSG00000118946_37 (sequence is synthesized)
agagataacaatggtttcgttttgaccaaacttgtattaggacagaattaatgatgcttaaagagaaaagaaaaaaagagagaagaaaaaggagagatgaaaaaggaggatgaggagaag

SEQ ID NO: 228812 - DNA, 120 bp, Artificial Sequence
  ENSG00000118946_38 (sequence is synthesized)
aattaccttttgacaatctgttaggaaggtatgcagtgtgagaactgaagtatttctgatcactctcagactgtcctccgtgatttatgctgacttaactgtttacctataaaccccata

SEQ ID NO: 228813 - DNA, 120 bp, Artificial Sequence
  ENSG00000118946_39 (sequence is synthesized)
caaagcagggtcataatttgtgatctgtggtggatttctagcagtcatcacaggcttctactgaaagtcctgaaaagaccttgcagtagtccaagctacaccaaacattaacacatattt

SEQ ID NO: 228814 - DNA, 120 bp, Artificial Sequence
  ENSG00000118946_40 (sequence is synthesized)
gtggtaaacatttctgtataaagttacctgacacacatataaacacaaggaacattccatatcattagtcgaaaacaaaaacaaaaaaaaaacctttggtcatttgtaagacatctcatg

SEQ ID NO: 228815 - DNA, 120 bp, Artificial Sequence
  ENSG00000118946_41 (sequence is synthesized)
tcatataaaagttaaatgtaaaaagatacagtccattttgtcctgcacacacgtagactaattcacgtcattaaagaagaagaaaacttaaagatttaaaatgcctatttagcattttag

SEQ ID NO: 228816 - DNA, 120 bp, Artificial Sequence
  ENSG00000118946_42 (sequence is synthesized)
tgtccaacaaagatttaaacaatgatgaatatgttttaaatttgacatagaaaagttctaaaaaatagttaccattgagtggtaagattcagagaaaattaacttgattaatatgtttta

SEQ ID NO: 228817 - DNA, 120 bp, Artificial Sequence
  ENSG00000118946_43 (sequence is synthesized)
ttcatttgtggacactaaaatagctcaggaaagtgaaaatgtcttagacatacgcaagtcacatgaccatttaaatgtgcaaatgtaagaagattcaatgtgtttacatcaaatgacata

SEQ ID NO: 228818 - DNA, 120 bp, Artificial Sequence
  ENSG00000118946_44 (sequence is synthesized)
ttttattgatttattgcagattcagtgcatatgagccaaattgttgagtgtgtaagagctatattgtgtattttattaaattaatatatagttgtgttgcaaaaatatttgggcttatat

SEQ ID NO: 228819 - DNA, 120 bp, Artificial Sequence
  ENSG00000118946_45 (sequence is synthesized)
tgtaaatggcaagtgttgccttggtagctgtcgaactctatgagttttgttttttcctgcttccttttccccatggagtgtgggaagcagtgcctcagagcaaagtctcttgtttaatgt

SEQ ID NO: 228820 - DNA, 120 bp, Artificial Sequence
  ENSG00000118946_46 (sequence is synthesized)
atagtctaccaagtactacagtacataatctgttcaaaatgtgtttgagtgagctgatggagctaactgaaaggtcaaaaattacatccatcagtcatggttatgtgcaagtccttgtag

SEQ ID NO: 228821 - DNA, 120 bp, Artificial Sequence
  ENSG00000118946_47 (sequence is synthesized)
aagcttttattaaagtcatgctaaatcacaagaattgacatttgtaccaatatctgaaacttcttcatgttttttcaataacatacagcttctgcctgtgtagatattatgccatcagtt

SEQ ID NO: 228822 - DNA, 120 bp, Artificial Sequence
  ENSG00000118946_48 (sequence is synthesized)
ggttctcaaaagtattttaagtgcttcagatgtgtgttcccattatattttgaaaacatgaaaaatgctttaatgcatgtatgtaccagcagtggttacttgcattgtgtagtgtttttc

SEQ ID NO: 228823 - DNA, 120 bp, Artificial Sequence
  ENSG00000118946_49 (sequence is synthesized)
aagaggtctgggtcttaacaaaatgttttcctttatctcagtgctcttctgcctctttttgttggtgtcctttgagaacaatacaccttctattccttcatttggttacacctttccttg

SEQ ID NO: 228824 - DNA, 120 bp, Artificial Sequence
  ENSG00000118946_50 (sequence is synthesized)
tgacatttagcgagtttcaaacttacttccatatgaggctaagaaacctcaaatttcaggaattgggaaaaataaaattagcacttgcagaagtagcagcagatgggaaaatgccttgat

SEQ ID NO: 228825 - DNA, 120 bp, Artificial Sequence
  ENSG00000118946_51 (sequence is synthesized)
tgacattttctttcagcatttaaaatttttggcattttacagcttcatgacaaacagttttgtgcccataccttagaaaatgtggtgctgagttaaataaaggctgtttgagcactggag

SEQ ID NO: 228826 - DNA, 120 bp, Artificial Sequence
  ENSG00000118946_52 (sequence is synthesized)
cagaaaaatgcattatttgcaaactggtggataattttgtgccttctcttctggccaccaagccagtgtagaaacagcaaaaatgtcataaaaattcttatatttaaaacaaaaacaaaa

SEQ ID NO: 228827 - DNA, 120 bp, Artificial Sequence
  ENSG00000118946_53 (sequence is synthesized)
gcaaaaacaaacattgaattaaattaagttttgtaattttaaactttaaaaacttctactgaaaatatttccgccaaatgccatcaatattttagactgtacctcgtttgcaaaactgct

SEQ ID NO: 228828 - DNA, 120 bp, Artificial Sequence
  ENSG00000118946_54 (sequence is synthesized)
ttgagagggaagagtggacaactcccatcagccttattctcttgagaactatattttggttcctagtaacagcctttccaaagctctactcttggtttttattactcataaatgtttaaa

SEQ ID NO: 228829 - DNA, 120 bp, Artificial Sequence
  ENSG00000118946_55 (sequence is synthesized)
ttagaaaagaagggaccttgtacatgtgaaacctaattgactctctatattttggacaatttatgtatctgaaatgtgttgtctctgttatatgatgttatttttgccaggagactacag

SEQ ID NO: 228830 - DNA, 120 bp, Artificial Sequence
  ENSG00000118946_56 (sequence is synthesized)
gttgatttagcttgatagctgaaatttgatggaaaactgatttccatttagtcttaccaagtgttgcttctctcttactagacagatatccacttagtaaaatctaaagcagtatgtaaa

SEQ ID NO: 228831 - DNA, 120 bp, Artificial Sequence
  ENSG00000118946_57 (sequence is synthesized)
tgaaaccagcaaagagagtagggtttattttataaacattcttaatgctaagtaaccagttgttcaatttattatatgtgtctgaggacattaaaacaccataaggttgtaataattggt

SEQ ID NO: 228832 - DNA, 120 bp, Artificial Sequence
  ENSG00000118946_58 (sequence is synthesized)
tgtgccaatgtgtgagggatttacctttaggctctctgtcaccagtgatttactagtgttagctgtttaacacattatctgtatttagtagtgattatttatttacaagttggtggtaat

SEQ ID NO: 228833 - DNA, 120 bp, Artificial Sequence
  ENSG00000118946_59 (sequence is synthesized)
tcagcagtcaggactctaagcttttatagttgaattgaggaaatctcgcttttattcatttagctggcaactgcctttattgcagacctctggtgcttggctttcaaggaagcctatgag

SEQ ID NO: 228834 - DNA, 120 bp, Artificial Sequence
  ENSG00000118946_60 (sequence is synthesized)
atgccaaaatcacacctttagagagcaccttgctctaataggtgatgcatgagcaaacagtgagatttgaaggggttttaacataatttagaatgtgaaaaaaatatcaattcatatctt

SEQ ID NO: 228835 - DNA, 120 bp, Artificial Sequence
  ENSG00000118946_61 (sequence is synthesized)
tcaagtactaacccctcaaaaaagcccacacatacaaaatatgtgatgtgataccactttgtcttttaggtctttaagtaactgaagttaagcacagaaaaaaaaatcacttcatggaaa

SEQ ID NO: 228836 - DNA, 79 bp, Artificial Sequence
  ENSG00000118946_62 (sequence is synthesized)
actgaagttaagcacagaaaaaaaaatcacttcatggaaatttcagtaagaaacccaaacttctaaaaattgcttgcag

SEQ ID NO: 228837 - DNA, 120 bp, Artificial Sequence
  ENSG00000118946_63 (sequence is synthesized)
tatacgtataccaaagtaaacattaaagagacatatcatgcaatttcaaagaattctttcatgctatttcttaacctgacatttctaactttattgcaggcaatatacaaagattggctc

SEQ ID NO: 228838 - DNA, 120 bp, Artificial Sequence
  ENSG00000118946_64 (sequence is synthesized)
actactccataggttaattgaattcctggttgagaaactaacttgttttgttttccaaaattagctgaaatcttgtaaaacatgacttccctttaaaggatctagatattgttcaattta

SEQ ID NO: 228839 - DNA, 120 bp, Artificial Sequence
  ENSG00000118946_65 (sequence is synthesized)
aaatatggcaccataaaaaagtcatgtagtaatagagcatatgcttttttagaaccaggttaaaagctgtttgttatctaatagagtaaaagttactgaggtcaacagatagacaggtct

SEQ ID NO: 228840 - DNA, 120 bp, Artificial Sequence
  ENSG00000118946_66 (sequence is synthesized)
ggcataatatatgcccagtcataatagtctaattatattcttttgacaacagacagcattcatcagagcactaattcgaatgagagttttggctatcaagatgtgttgattctaaatatt

SEQ ID NO: 228841 - DNA, 120 bp, Artificial Sequence
  ENSG00000118946_67 (sequence is synthesized)
attgaatgagacctgattaaagtctgactttcctggccccagtgttttgcaggttggctatttccattatcagcccatcactccataaagttcttagctgcaccaagtgattggtgaaca

SEQ ID NO: 228842 - DNA, 120 bp, Artificial Sequence
  ENSG00000118946_68 (sequence is synthesized)
aggacaacaacaaaagcagcatacattgtatggatttatctcaacgctattgtttaatggctgtgtttaatgtgatctatctggaaaatgaggactccgaataaaaagctattactaata

SEQ ID NO: 228843 - DNA, 120 bp, Artificial Sequence
  ENSG00000118960_0 (sequence is synthesized)
gactgcgcgccccgcccggagtccccgccgccgtcatgcagtccccggcggtgctcgtcacctccaggcgacttcagaatgcccacactggcctcgacctgactgtgccccagcaccagg

SEQ ID NO: 228844 - DNA, 120 bp, Artificial Sequence
  ENSG00000118960_1 (sequence is synthesized)
aggtacggggcaagatgatgtctggacacgtggagtaccagatcctggtggtgacccgtctggctgcgttcaagtcggccaagcacaggcccgaggatgtcgtccagttcttggtctcca

SEQ ID NO: 228845 - DNA, 120 bp, Artificial Sequence
  ENSG00000118960_2 (sequence is synthesized)
aaaagtacagcgagattgaggagttttaccagaaactgagcagtcgttatgcagcagccagcctccccccactacccaggaaggtcctgtttgttggggagtctgacatccgggagagga

SEQ ID NO: 228846 - DNA, 120 bp, Artificial Sequence
  ENSG00000118960_3 (sequence is synthesized)
gagccgtgttcaatgagatcctgcgctgtgtctccaaggatgccgagttggcaggcagcccagagctgctagagttcttaggtaccagatccccaggggctgcagggctcaccagcagag

SEQ ID NO: 228847 - DNA, 120 bp, Artificial Sequence
  ENSG00000118960_4 (sequence is synthesized)
attcctctgtcctggatggcacagacagtcagacagggaatgatgaagaggctttcgacttttttgaggagcaagaccaagtggcagaagagggtccgcccgtccagagcctgaagggcg

SEQ ID NO: 228848 - DNA, 120 bp, Artificial Sequence
  ENSG00000118960_5 (sequence is synthesized)
aggatgctgaggaatccttggaggaggaggaggcgctggaccctctgggcattatgcgctccaagaagcccaagaaacatcccaaagtggccgtgaaagccaagccctcgccccggctca

SEQ ID NO: 228849 - DNA, 120 bp, Artificial Sequence
  ENSG00000118960_6 (sequence is synthesized)
ccatctttgacgaggaggtggaccctgatgaggggctctttggcccgggcaggaagctgtctccacaggacccctcggaggacgtgtcatccgtggaccccctgaagctatttgatgatc

SEQ ID NO: 228850 - DNA, 120 bp, Artificial Sequence
  ENSG00000118960_7 (sequence is synthesized)
ctgacctcggcggggccatccccctgggtgactccctcctgctgccagccgcctgtgagagtggagggcccacacccagcctcagccacagggacgcctccaaggaactgttcagagttg

SEQ ID NO: 228851 - DNA, 120 bp, Artificial Sequence
  ENSG00000118960_8 (sequence is synthesized)
aagaggacttggaccagattctgaacctgggagctgagcccaaacccaagccccagcttaagcccaagccaccagtggcagctaagccggtgatacccagaaaaccagctgttcccccca

SEQ ID NO: 228852 - DNA, 120 bp, Artificial Sequence
  ENSG00000118960_9 (sequence is synthesized)
accagcccaggccgcccccagcctcttctgacccttccatgctggcccctggcccagcaggcctgtctgtggggacatcggtgtgaagggaagggactgggccctgcagggtcagaacct

SEQ ID NO: 228853 - DNA, 120 bp, Artificial Sequence
  ENSG00000118960_10 (sequence is synthesized)
ccccacccccaggggaggccaggcagaagcctgggtcacagcacccagaactgcatggttccattttctccggggctgtggggccaaagtagaagcctgcgggctgcgggagcggctctc

SEQ ID NO: 228854 - DNA, 120 bp, Artificial Sequence
  ENSG00000118960_11 (sequence is synthesized)
accctaggagccagagcccaatgtgtcttattccccgtggacatgaaggggagggagggtgtggggatgccttgccaaccagaagcccagccccaaggatgaagcaagacatgtggggcc

SEQ ID NO: 228855 - DNA, 120 bp, Artificial Sequence
  ENSG00000118960_12 (sequence is synthesized)
gtagcgaggtgtcacatggggcagggaagcttcatgcccacgggttctgccagccccagcacagacccaaactggggctgggcctctatccctcctctgcctctgttcgcatagtaagaa

SEQ ID NO: 228856 - DNA, 120 bp, Artificial Sequence
  ENSG00000118960_13 (sequence is synthesized)
ggagtgaccggtatcctccccttcccctaccctaagctgtagcctgggtgactgactggcctgggcctggggtggggacgtccccaagccaaattactccagggcctctgctcctcgtgg

SEQ ID NO: 228857 - DNA, 120 bp, Artificial Sequence
  ENSG00000118960_14 (sequence is synthesized)
ctgccaggggcctgcagggtctgggtgggtctcccaggagaggaatactgagtgggagatcggctgtctggagtgttctgatgcaagtctctctctcctgagcctcctcttgatgcaagc

SEQ ID NO: 228858 - DNA, 120 bp, Artificial Sequence
  ENSG00000118960_15 (sequence is synthesized)
tctaaagggagaagtcaggccctgcctctccagggtatagacggccctgctaggccccagttcttcctccttccccctttcccaggaaaggccagcccagtccatggccttcttgggcct

SEQ ID NO: 228859 - DNA, 120 bp, Artificial Sequence
  ENSG00000118960_16 (sequence is synthesized)
ctgggcacagagccaatgttcgtcattgcagctctcagcaaactgggtcatagctttccccacagctcagcctggggcctgggcagggctcccagcctgcaccgcctcccactgccagtg

SEQ ID NO: 228860 - DNA, 120 bp, Artificial Sequence
  ENSG00000118960_17 (sequence is synthesized)
gggcatgattctctcaggcttctgccccgaggccttcgtcgtcctcagggtctggacttggtcagtggcctttcaccagtggagctgccttcccagggagaaggagccgtgcgccagggc

SEQ ID NO: 228861 - DNA, 120 bp, Artificial Sequence
  ENSG00000118960_18 (sequence is synthesized)
agggcccgtgccttagacttctcccgacccccagagcgctggtacacaggtctaggcaccacacagtgctttggaaattctcagtgaatgatgtttaataaagcaaaaaatgtcaaggtg

SEQ ID NO: 228862 - DNA, 120 bp, Artificial Sequence
  ENSG00000118960_19 (sequence is synthesized)
gaggaggaggaggcgctggaccctctgggcattatgcggttggtctcctgttgttgagagggcccctttggtgtattccaggctttctggagatgacgtcccccttccctggaatctgag

SEQ ID NO: 228863 - DNA, 120 bp, Artificial Sequence
  ENSG00000118960_20 (sequence is synthesized)
aaaagccctgagcatcccaggtcgccccctcgcagggatctgggccacgaggccttggcctggtgtgttgggggaagtagctctctgcgtgcccttggtggtgtgcatgtctctgggact

SEQ ID NO: 228864 - DNA, 120 bp, Artificial Sequence
  ENSG00000118960_21 (sequence is synthesized)
gggcttaggtgtcgcctcccttctcgggtcacaggatgtcctccacttgtggctccgcactggggcttggtagagtcctccgtgacagctcagtagtgcaggctgcgggcctgtccggct

SEQ ID NO: 228865 - DNA, 120 bp, Artificial Sequence
  ENSG00000118960_22 (sequence is synthesized)
agtgtgggaggactgggtgctccttccagctgtgggactcgcagaggtggctgcggctctctgggctgcatcatctgcatagcaggagcattcaccttggccctgcctccacacagggcc

SEQ ID NO: 228866 - DNA, 120 bp, Artificial Sequence
  ENSG00000118960_23 (sequence is synthesized)
attcaccagccatacatctctggccatttacaatctcttttcttcggttttcctcagtgaaaatggactcatggtcgtatcaacctcttagggctcctgtgacgatgaactgagttatgt

SEQ ID NO: 228867 - DNA, 120 bp, Artificial Sequence
  ENSG00000118960_24 (sequence is synthesized)
aaatttagcaatcagctaccatcatggccccatctttcagtggaatcagaccaggccaggggtgctgtcctccccgctctctaccacaacgaatgtctcttagccgtttaccaaagccct

SEQ ID NO: 228868 - DNA, 120 bp, Artificial Sequence
  ENSG00000118960_25 (sequence is synthesized)
cgggcgccagatgagtgtaggtcctgccgcagaaaggaattagagcccagtagaaattaggcagaagcaagttcaacttcatcagcatgtagaattctctcctaaaatcacagcccactc

SEQ ID NO: 228869 - DNA, 120 bp, Artificial Sequence
  ENSG00000118960_26 (sequence is synthesized)
tggaaaggccttcttcgtggggagggttatgggagggtgggctgcagggtggccatgagaccagcgtccaggggtgaggatttgcactgggaaagggtacgcggcgctcagggagctgca

SEQ ID NO: 228870 - DNA, 120 bp, Artificial Sequence
  ENSG00000118960_27 (sequence is synthesized)
gcagaaacaggcctgagatctggggtcctgcggcacctgggcacagcaagtgccctgcagtcgctcctcctggccctccgtggctggccttgtccctgagtggggtcagcggccctgagg

SEQ ID NO: 228871 - DNA, 120 bp, Artificial Sequence
  ENSG00000118960_28 (sequence is synthesized)
gagaggcagccagagtagtgggtgatatggggacaagcctgtaatagtcactccttatcagcctggcccaacgcggcaggcctttcttgggctttattttggtaagggtgaggctttgtt

SEQ ID NO: 228872 - DNA, 120 bp, Artificial Sequence
  ENSG00000118960_29 (sequence is synthesized)
tgaactcacattctctgttgttctgagtaaccacacgtagtgccaaaccgagatggactttggtggtctgtgccaacctttggctgaagaacacacttagccgagcggctccttttttgg

SEQ ID NO: 228873 - DNA, 120 bp, Artificial Sequence
  ENSG00000118960_30 (sequence is synthesized)
gtaggaaaatgttctttgtggctggcaagtgctgccttgaacttcctacttacttcattagcagattgtcaggggagatgtgtcagctatcctgggaccccttggcggggcggggggggc

SEQ ID NO: 228874 - DNA, 120 bp, Artificial Sequence
  ENSG00000118960_31 (sequence is synthesized)
gggggcagccccctccccagctctgtactctggggccctcacccctgaatcctgggaaagcttagcacctaagagtaatcctgccggcttaagaccctcccctgctggggtttcttttta

SEQ ID NO: 228875 - DNA, 120 bp, Artificial Sequence
  ENSG00000118960_32 (sequence is synthesized)
cacctctgtcaggaataataagtaaattttttgagagtttatgaaatgctgggaactaagttagcatttgcttgcatgatctcattatatctgtaagacagcatttctgaaactacttgc

SEQ ID NO: 228876 - DNA, 120 bp, Artificial Sequence
  ENSG00000118960_33 (sequence is synthesized)
tacaacccatagtaaaaactatatggtacgccatgacccaggacacacatgtataaacatcccataaaactgaagcaaaagttcccagaactcatacaaaaccttactaagtgtattgta

SEQ ID NO: 228877 - DNA, 120 bp, Artificial Sequence
  ENSG00000118960_34 (sequence is synthesized)
ctgggatattttctattctatttcaacgtttggaaaggtcatgactcgccaaactgctttcaggatccactgtgggcacaggtcaagaaacggagccctggaggcctgcactggcatcag

SEQ ID NO: 228878 - DNA, 120 bp, Artificial Sequence
  ENSG00000118960_35 (sequence is synthesized)
cctcttctgtgtggtgggaaactcaagttcagggtcaggtggttcgtccacgttcctgcagcctgcagatggcagagccaggaccccacgccatctccagtccagtctttatcagcctgg

SEQ ID NO: 228879 - DNA, 120 bp, Artificial Sequence
  ENSG00000118960_36 (sequence is synthesized)
gaggtgggcagggccccaggattatccccctttcacagatggtaaaatcgaggaaggagttgagcaggatcttggccagagccgtgtgtgttccagagctgtgtgtgtggcagagccgta

SEQ ID NO: 228880 - DNA, 120 bp, Artificial Sequence
  ENSG00000118960_37 (sequence is synthesized)
ccttgaagttgggtttccacctcggcctttcacagacacccaggtgggcttgttgatctctcttggtgccacccacctgccctttggtgggggactttctgttcttctcgggaggctgtt

SEQ ID NO: 228881 - DNA, 120 bp, Artificial Sequence
  ENSG00000118960_38 (sequence is synthesized)
tgtgcacccctctccctcccgtgcgcttggttcctgtgcagatgcagcggcacccgtttcccagcttgccctgccccatgtctgggcttagctctgggctctcctggagcggccaccatt

SEQ ID NO: 228882 - DNA, 120 bp, Artificial Sequence
  ENSG00000118960_39 (sequence is synthesized)
tccatgcaaccagcctcggtccttccccgccgtggccgcggcgaggcgctgctgctctgctgaagggctgctccacggcagggctgctgggagggtgggagtcgccagcacaaagccgga

SEQ ID NO: 228883 - DNA, 120 bp, Artificial Sequence
  ENSG00000118960_40 (sequence is synthesized)
gcccaggccggcctggcttttctttgtcttttaaacctggttttgattagggacaagagagcgttattacaccattagagagcaattaaagatagaaaaagccctcacctcggcccatcc

SEQ ID NO: 228884 - DNA, 120 bp, Artificial Sequence
  ENSG00000118960_41 (sequence is synthesized)
caacaccaccgctctctccatctgctggggctctcttctgaccccgtcccagcagcatccatgcaaccgcaggcacaatgcacgtgccttttcgtactctgcttttccaccctatggtct

SEQ ID NO: 228885 - DNA, 120 bp, Artificial Sequence
  ENSG00000118960_42 (sequence is synthesized)
gtcccgattgctgctccatgtcgcccctgttttgtatttaagtttctattttagaatgtcacggtgctgagaaaattgacattctaccctaatagttctgccttatgctggaaatcctct

SEQ ID NO: 228886 - DNA, 120 bp, Artificial Sequence
  ENSG00000118960_43 (sequence is synthesized)
gcgggaaacctttttcattgtgactcaaataacacacaattagtatagaaaaattgcaaacacagataaaagtcctttccctgtgaatttctgaatgcacctttgaatattcacatctta

SEQ ID NO: 228887 - DNA, 120 bp, Artificial Sequence
  ENSG00000118960_44 (sequence is synthesized)
ctgccaaaatgagattgtcttgtgtgccgttctggaatttgcttttttccagcttacatgttctaggtccttccagatcaatagctgcactctccctccttcctctgctggtttctcagc

SEQ ID NO: 228888 - DNA, 120 bp, Artificial Sequence
  ENSG00000118960_45 (sequence is synthesized)
tcgatgggctgtaagtggcattaccaggcccttgcttgtgggcgtggcggggttttctgtaggtttttgctattacaggcaataacctgaggaacttctacatatacaaagcttttattc

SEQ ID NO: 228889 - DNA, 120 bp, Artificial Sequence
  ENSG00000118960_46 (sequence is synthesized)
tatggagccttcccctatatacgtgccccagagcaaggtccctgaagctgcttctgggggctttggggtaccattccagtaaaaggttctctaagggctgaagcccctctgttgggaggc

SEQ ID NO: 228890 - DNA, 120 bp, Artificial Sequence
  ENSG00000118960_47 (sequence is synthesized)
ccctctgcttttctaagccctgcccacccccgccctcagggcccactcctcccacctcttcttttgcacacagggaccccctccaggccctgggtccctgaggactcacagcgtccttgg

SEQ ID NO: 228891 - DNA, 120 bp, Artificial Sequence
  ENSG00000118960_48 (sequence is synthesized)
gacaggctggctcctgtatgaacaaatgcacctgcctgcaaagctggtcttcccagactccctggaagggggagcccacacccgggtccccgtgctgtggcctccgtggtgaagctggat

SEQ ID NO: 228892 - DNA, 120 bp, Artificial Sequence
  ENSG00000118960_49 (sequence is synthesized)
gtttctctggaatgccacgttttatggttgttttttaatatggattttgcttcatctttcataaaacaaccacatgtattttagtataaaaataatatcttactctatatttggatgaaa

SEQ ID NO: 228893 - DNA, 120 bp, Artificial Sequence
  ENSG00000118960_50 (sequence is synthesized)
gtagttttaaaggaaatgcaaccactattgctccttggccctgtcctgcctggcagaagcattgagcgggtgggactaggacctcagacccttttctgatagacaccaaagccagccctg

SEQ ID NO: 228894 - DNA, 120 bp, Artificial Sequence
  ENSG00000118960_51 (sequence is synthesized)
agggagcccccggctgatggtgcgggtggtttgcagccatcagtgttgagtgtctcagctcctggcccgtgccaggacctgtctgctctgtcctgcatctgatcacgtccctctccagct

SEQ ID NO: 228895 - DNA, 120 bp, Artificial Sequence
  ENSG00000118960_52 (sequence is synthesized)
gtggcgccctgtcctgagcagcttcccctccaccagtgctagagtgagaggaaacaggtggttttggggtcgagagctgactccctcctcctccgtcttaacccaggctcagagggtcag

SEQ ID NO: 228896 - DNA, 120 bp, Artificial Sequence
  ENSG00000118960_53 (sequence is synthesized)
ctccctccccagggctctgagccagctctgggacagctccagcaccggctccacccatttgccttcccccttcacacccgcccctccttcccagcactcagccccgggccctgcatccct

SEQ ID NO: 228897 - DNA, 120 bp, Artificial Sequence
  ENSG00000118960_54 (sequence is synthesized)
tgctgactgcagcggaaggtctcagtaggagtggggaggggatggggccaggtcttcctccgagaggtggctccagctctcctctgggctttgtcccctccctgccctttctgcaccctg

SEQ ID NO: 228898 - DNA, 120 bp, Artificial Sequence
  ENSG00000118960_55 (sequence is synthesized)
atgctggctccctgcctcctgctccccacctgctttgggtcaagtgacataggagcagagggcacagcggggtaggtggccacaggggctggtgctctgcttggggtcactggcagaacc

SEQ ID NO: 228899 - DNA, 120 bp, Artificial Sequence
  ENSG00000118960_56 (sequence is synthesized)
tggcctgcccgttgtgtattcatccactgtggacgccacctcctcagtggtctggactctctggacaccatcacaaagacccccagatattgatgctccagtatctgtggcttgttcttc

SEQ ID NO: 228900 - DNA, 120 bp, Artificial Sequence
  ENSG00000118960_57 (sequence is synthesized)
acccacaggactgcgactcatggccaatcaatgatccttgtcgcctgataaagcctgtgcctgtgacccattccagcctgtgttagtgatgttcttttctgtgcctaggctgatggcaga

SEQ ID NO: 228901 - DNA, 120 bp, Artificial Sequence
  ENSG00000118960_58 (sequence is synthesized)
ccaccagggaggggagagggggagaggattgtcctttaaaacaatggactcagccagggaagctgccctgccccagtcacccaggctgctgcttagggtaggggaaggggaggattctgg

SEQ ID NO: 228902 - DNA, 120 bp, Artificial Sequence
  ENSG00000118960_59 (sequence is synthesized)
tcactcctcactatgccaaccaaggcagaggaggcatagagtcccaggcccagtgtggtcatcgggccagtaactgcacagccaagacccatgtagaaagaaagaggacccctttctgtc

SEQ ID NO: 228903 - DNA, 120 bp, Artificial Sequence
  ENSG00000118960_60 (sequence is synthesized)
tccagacctaccccctattctcccacagtggagatggtctaggcttggactggccctggggccctttcaggtctgacatcagatggccctgcgcctctgtcagcaaacccgccctggcct

SEQ ID NO: 228904 - DNA, 120 bp, Artificial Sequence
  ENSG00000118960_61 (sequence is synthesized)
tcagggctcaggttcttagatgcagcttcagccctgggacccagggatgctgaagtagagagttctgtcaactgaaatccactagagaactagaaacaggttctcagggagcctgagagg

SEQ ID NO: 228905 - DNA, 120 bp, Artificial Sequence
  ENSG00000118960_62 (sequence is synthesized)
cctcctgcagggacagaatgtggcctctatcccccccaagattttggttggagtcttgtagctaagattgagctggagtcctggctcctgaggacaggcactttggccattctgagaagg

SEQ ID NO: 228906 - DNA, 120 bp, Artificial Sequence
  ENSG00000118960_63 (sequence is synthesized)
acagaagtttaactggggacaacaacacttgtttatttcgaagcctgttgtgagcccatggacaggatgtactgtctatggctggggtcccactgctcccttcctcccggcattgttcct

SEQ ID NO: 228907 - DNA, 120 bp, Artificial Sequence
  ENSG00000118960_64 (sequence is synthesized)
cttaggaagccgggaactcaggccagttctggaaagtccctagggccttccctggccaggcctgtgtcatgggcccccctggagagcacctacctgttgagtactggtgtcccatgacca

SEQ ID NO: 228908 - DNA, 120 bp, Artificial Sequence
  ENSG00000118960_65 (sequence is synthesized)
cgtccatacaatgtatctgggactaagttcacctccatgtgccccacgggctcctctgagtctcaagctctcacacaaggtacagacgagacagcaaagtccagccactctctggggccc

SEQ ID NO: 228909 - DNA, 120 bp, Artificial Sequence
  ENSG00000118960_66 (sequence is synthesized)
tgtggccttattgtccagcggccacctgggcgttgtgttgacatacttggtgcagtgatttaatacccggtgtcaggctgatgtggagggtcattcccatttctctagctcaccagctgc

SEQ ID NO: 228910 - DNA, 120 bp, Artificial Sequence
  ENSG00000118960_67 (sequence is synthesized)
ctagctgagccaatcctgggaaacagagagggtaacagagctaccagcatgtccccacatagtggtcctgcctgctgctattggcttcatgtgggttcacagctgcccagagcaaacata

SEQ ID NO: 228911 - DNA, 120 bp, Artificial Sequence
  ENSG00000118960_68 (sequence is synthesized)
gtcaatgctcagagcctcctcaaggagctgaagtctcagcatcaagctatgaatggtcccactcactacaaactctgatcgctccaaaccattccctgctcagcaccctaaggccttgca

SEQ ID NO: 228912 - DNA, 120 bp, Artificial Sequence
  ENSG00000118960_69 (sequence is synthesized)
gttggggaagctgactgaggggccggtggggaagcagatccaggggccggtggaggagcagtagggactggcccttgagttctcatgcagcccacagcatcctgtgaagcagcagccagg

SEQ ID NO: 228913 - DNA, 120 bp, Artificial Sequence
  ENSG00000118960_70 (sequence is synthesized)
ttctgtgggcacaaacggccagggttccagtccagcttggctgtgtgatatcccctcaccccacagtgccaagtgaagagacttacccaccctgggtcctgggaggaagccaggtagact

SEQ ID NO: 228914 - DNA, 120 bp, Artificial Sequence
  ENSG00000118960_71 (sequence is synthesized)
ataaagtcctctacgtgcctgaaggaatttcagtggactggtcatgctagatcctcacagagggacttccctgcccggtaccagctagctcctaacaggaggtggcaggccactgggcaa

SEQ ID NO: 228915 - DNA, 120 bp, Artificial Sequence
  ENSG00000118960_72 (sequence is synthesized)
gtgatcaacaggcctgtcaacagctcagtcaagtccccagccccagtgctgaccactgacttctatgccaggcctggcgctgcgacacacagaatcccacgcggtacacagatatccacc

SEQ ID NO: 228916 - DNA, 120 bp, Artificial Sequence
  ENSG00000118960_73 (sequence is synthesized)
ctcctctgtggctggcctctcactcctgtgctccgtggctctggctactgggaagagccaagcaatttcatgtgtcgggtcatgctcaggctaaagctacagcttctgaagtgggattat

SEQ ID NO: 228917 - DNA, 120 bp, Artificial Sequence
  ENSG00000118960_74 (sequence is synthesized)
gggctcagcatgtggcctcggtaagccgactctttattgctgactttcagaggcctgatgcttctctgccaactcagcacatagcagccgcctctgaatggctttttaaataaagctggg

SEQ ID NO: 228918 - DNA, 120 bp, Artificial Sequence
  ENSG00000118960_75 (sequence is synthesized)
ctagctctctccaggccaactggccaatcatgtcgtttgttttcccacatgcagagctcatccataaacactaagcacgtaatgggcacctaccgtgtgcagtacctgttccaggcaagt

SEQ ID NO: 228919 - DNA, 120 bp, Artificial Sequence
  ENSG00000118960_76 (sequence is synthesized)
tggaggaagcaaagatgaaaaaacttgagccattaaagccaattctaccaggagccatgctgagcctctagtttcacttctgttctctgggccttctgcctgaacctcaggcacaactaa

SEQ ID NO: 228920 - DNA, 120 bp, Artificial Sequence
  ENSG00000118960_77 (sequence is synthesized)
aggaggtgcctcctccatgcggccctctctgcctgtccttccccctctgccacctgccagcatggacagtttgttacctgcagcctgggctcagcttttgttccatttcctggagctgcc

SEQ ID NO: 228921 - DNA, 120 bp, Artificial Sequence
  ENSG00000118960_78 (sequence is synthesized)
ttggcaaagcaccataaactgggtggctttaaaccacaggaatgtattatctcacagttctgggggtcacgagtctaaaatcaaggtgttagtagggccatggtccctctgaaatctcta

SEQ ID NO: 228922 - DNA, 120 bp, Artificial Sequence
  ENSG00000118960_79 (sequence is synthesized)
gggaaggatcctactttgttttgtcctggcttctgggggtttcctggcaacacttggggtcccttggtttatagctgtatcaccccagcctctgcctttgtcttcatatgagtttctctc

SEQ ID NO: 228923 - DNA, 120 bp, Artificial Sequence
  ENSG00000118960_80 (sequence is synthesized)
ctctgtgtctgtgtcttcacacggtgtcttctctgtgtctgtgcccaaatttccctcttataggaaagaataccagtcattggattacggcccactgtaatctgatatgacctcatttcc

SEQ ID NO: 228924 - DNA, 120 bp, Artificial Sequence
  ENSG00000118960_81 (sequence is synthesized)
ctttaattatacctgcaaaggccctatttccaaataggagcaccttcacagcgtccttgtggacatgaatttgaagggacgcaattcgacccagtacagttaccacctgtcctgagcacg

SEQ ID NO: 228925 - DNA, 120 bp, Artificial Sequence
  ENSG00000118960_82 (sequence is synthesized)
tggcattcagcagcaagcagaggcccattccattctgcaaggcatgccccctgtgccatccctgtgtactctgtgtgtttcagcagtgccatgtcggtttcactcccatgtgaggggacg

SEQ ID NO: 228926 - DNA, 120 bp, Artificial Sequence
  ENSG00000118960_83 (sequence is synthesized)
tgtcaggaggaagctgggcaggcagttgtgtgtgtagacacccaccacgggccatcattataaagttctgtcctttgcagctgctgccagacatgtcaaattctctctatcaaaagctgg

SEQ ID NO: 228927 - DNA, 120 bp, Artificial Sequence
  ENSG00000118960_84 (sequence is synthesized)
atctctttattaaatagtgaaatgactccttagataacatgtggcacaaactggagagctggtgacactcagagctatcctggctggcaggcgggcagcggcgttccttccttccttcct

SEQ ID NO: 228928 - DNA, 120 bp, Artificial Sequence
  ENSG00000118960_85 (sequence is synthesized)
ccagcagtgcccctctggagaaggccttccctggctggaccagcactgtctgttcagagccataggcagctgagtcctggggctcccccttgccatcaccccattatcctctcgctggcc

SEQ ID NO: 228929 - DNA, 120 bp, Artificial Sequence
  ENSG00000118960_86 (sequence is synthesized)
tccgaggtagtcggaaagggctctgaggatgctggcagtgggaactaaaggcttccggagcatgggagctgcaggccaactgcctttactgctgccttctcaagctggttttcttccttt

SEQ ID NO: 228930 - DNA, 120 bp, Artificial Sequence
  ENSG00000118960_87 (sequence is synthesized)
gctgagatcgcccttgacgtctccacagtgtgtttctgtttttccttttggtgttatcgccactttgctgattttcccctaacaagtgctctaggtcccagagggcaatgtttttctgga

SEQ ID NO: 228931 - DNA, 120 bp, Artificial Sequence
  ENSG00000118960_88 (sequence is synthesized)
ttagaaagtagaacagctgatttcttgcccacctgtttctcagacatcagaagctgcagagaggctgagcttgactcagtcccccccatccccagatggcttcattttacacctaggttg

SEQ ID NO: 228932 - DNA, 120 bp, Artificial Sequence
  ENSG00000118960_89 (sequence is synthesized)
gttccaggaccctaaattgggctctgtctgcttgtatgggtggccctaggatttgcatcgggacctcacagtctataaaatccatggctgtggaatggaaaatggtgcagcactttggga

SEQ ID NO: 228933 - DNA, 120 bp, Artificial Sequence
  ENSG00000118960_90 (sequence is synthesized)
aatagatttagcagtttttacaacaagtaaacataaatgtaccacacaaatcagcaattccactcctaggcatatacctaaagagaaagagaaatatatgtccagtcaaaggcttgtaca

SEQ ID NO: 228934 - DNA, 120 bp, Artificial Sequence
  ENSG00000118960_91 (sequence is synthesized)
cagatgttcatagcagctttatttatcacagccaaaaagtggaaacaatggaaaagcctctcggctggtgaatggataaactaaatgcagtaaatccatataatggaatattattagatc

SEQ ID NO: 228935 - DNA, 120 bp, Artificial Sequence
  ENSG00000118960_92 (sequence is synthesized)
acaaaaacgaatggagtgatacatgctgcaatatggatctacctcaaatacatcatgttaagtgacagaagctagactcaaaagaccacgtattgtatgattctatgtataggaaatttc

SEQ ID NO: 228936 - DNA, 120 bp, Artificial Sequence
  ENSG00000118960_93 (sequence is synthesized)
caggacaaatctacagagacagaaagattaatggttgcttcaagcagaggttggaactaacagtgactgcaaaagggcacaaagaatctttcccagggtgatagaaatgctctaaagttg

SEQ ID NO: 228937 - DNA, 120 bp, Artificial Sequence
  ENSG00000118960_94 (sequence is synthesized)
gcttgttgtgatggttgcacaatttgataagtttactaaaattgttcaattgtacacttaaaatgggtgatgtttacggtatataaattatatctcaataaaactgttaggataatttaa

SEQ ID NO: 228938 - DNA, 120 bp, Artificial Sequence
  ENSG00000118960_95 (sequence is synthesized)
cccgctgccgtgccccagtgggagcatgtccacagctgcctctgcagcctggaggcttcagccaggctggtgaggcaggtggcctcgctgacatccttggctggatggtgggcagaagga

SEQ ID NO: 228939 - DNA, 120 bp, Artificial Sequence
  ENSG00000118960_96 (sequence is synthesized)
gcattctccatagtgtgaccccatccatggccttcctggccagccccattcctagagcttgcccgacaccccccgactgaccatgcaccacatacaaccccctgacacacaccccacact

SEQ ID NO: 228940 - DNA, 120 bp, Artificial Sequence
  ENSG00000118960_97 (sequence is synthesized)
cccctctgcctcctccaaccagccctagggacctgcagtatcccgggaaagctgtgttctcacagcctggctggtgacctgcccctggggacatgtgcttctcacctgtgcccccacaga

SEQ ID NO: 228941 - DNA, 120 bp, Artificial Sequence
  ENSG00000118960_98 (sequence is synthesized)
gagggtcatggggacagctccgggctgaggaattgatccagcacccctgcccccagtggtggagacgtcaagcccttcccatgggtgtcctggccctgtcttctctcctcagttttctca

SEQ ID NO: 228942 - DNA, 120 bp, Artificial Sequence
  ENSG00000118960_99 (sequence is synthesized)
tctgtaaggtgggagtagcctggctgataggccgttatgagaatttacagagctaacacatgcaaagtccttagaacagaaacaaccacagtaaatagtggctacaattttaccccactc

SEQ ID NO: 228943 - DNA, 120 bp, Artificial Sequence
  ENSG00000118960_100 (sequence is synthesized)
ctcggttagtcctgtcaacccagaacccccgtggggcaggccctggtctcacagatgcccccaggacaaggcaggttctcaccactgctggtgccggactcccaccccttctcccctctt

SEQ ID NO: 228944 - DNA, 120 bp, Artificial Sequence
  ENSG00000118960_101 (sequence is synthesized)
tacatccgtctgcttaactccttcccagctactgtggatctcctagttccacaagacagaagggaagttttcaaaagaaagttgaccgtaaataaaacaaattatttaaagtgaaaggtg

SEQ ID NO: 228945 - DNA, 120 bp, Artificial Sequence
  ENSG00000118960_102 (sequence is synthesized)
acactgggattagcttcttgagagcaggaaccacattcattctttgtgtctgccctgtgactatccagggagtagttggacttcctcataataaagaatgttctgatagccattcattca

SEQ ID NO: 228946 - DNA, 120 bp, Artificial Sequence
  ENSG00000118960_103 (sequence is synthesized)
cggctcattgcccagtctcagccccagcctcctctgaggggaggaccccaggcctgtgaaaagtagaagcctgtgggtgcacattgggtgagaggcggtgaagggggctgagggggagga

SEQ ID NO: 228947 - DNA, 120 bp, Artificial Sequence
  ENSG00000118960_104 (sequence is synthesized)
tccgcagcccagggctgctcagctagttccagaaagagagaactttgtgtgcacaaccagtctttcttttcacaatcatattttaacagtttatgtaaagaataattaaattatataatt

SEQ ID NO: 228948 - DNA, 120 bp, Artificial Sequence
  ENSG00000118960_105 (sequence is synthesized)
gcaagagcaggtataactggcataagcaagtttgggaacaaattaaacggactcatggcagcatgcagcccacccagcgagggggcaaagtgcagatgtcttggtgatggcctctctgcc

SEQ ID NO: 228949 - DNA, 120 bp, Artificial Sequence
  ENSG00000118960_106 (sequence is synthesized)
ggagggcccggtcggcagctttcacagaaggaagggagaatgaggcctcagctgtcacatggaggtcaattggcagaacctgtgccggtgacagctcctatttcctgagtccttgctgtg

SEQ ID NO: 228950 - DNA, 120 bp, Artificial Sequence
  ENSG00000118960_107 (sequence is synthesized)
tacgcagtaagccagactccttacacgctctcttatgtaatcttcacgacagccccctaaggtggatgctattttctccatattataagaaatcaagtgtgggacgccacctggctaaga

SEQ ID NO: 228951 - DNA, 120 bp, Artificial Sequence
  ENSG00000118960_108 (sequence is synthesized)
cccccagttctccccaggcctttacctccactggccacattctcagcagactcagtgttgtgcgtgtctccagctcccactccatgctccaggacacaggactgtgcctgggattcagag

SEQ ID NO: 228952 - DNA, 120 bp, Artificial Sequence
  ENSG00000118960_109 (sequence is synthesized)
gaagccaggccgcctctttccaggaacggcttatgtgacaccaaggcatgcaggccctggaggctgtcatctgtacccctcattagcagcctcgggctattagacagccctgcaagtgcc

SEQ ID NO: 228953 - DNA, 120 bp, Artificial Sequence
  ENSG00000118960_110 (sequence is synthesized)
cgccaagcctgagtcaccgtgacggcttctggtatttacatgtccccaaggcccctggcatctgttcactctcatcctgtgtcctcgctcctgacatcccagcgggctggaagaaaccag

SEQ ID NO: 228954 - DNA, 120 bp, Artificial Sequence
  ENSG00000118960_111 (sequence is synthesized)
gattgttattttattagagggaaaccgaggcacagggaaatgaaatactagagtctgcctgcggagcagcagggccaggccgagcatgtctaggagtccatgtgtcccagtggggtggct

SEQ ID NO: 228955 - DNA, 120 bp, Artificial Sequence
  ENSG00000118960_112 (sequence is synthesized)
ctcgtgggacctttctggcctagtttattctaaatccgttacttcccaacctgtgttctgcagaacgtggtacagtggggtggtcaaaggctatcttcaaaggggctctgtggctgatga

SEQ ID NO: 228956 - DNA, 120 bp, Artificial Sequence
  ENSG00000118960_113 (sequence is synthesized)
attggggaaatgccacaaaaagcagggctcgtagtgcgcgggccagcaccacatggcacttcacgttctcattcatccctgggccccccactctgtggtgccccttagcatcccgcagag

SEQ ID NO: 228957 - DNA, 120 bp, Artificial Sequence
  ENSG00000118960_114 (sequence is synthesized)
cgcttggggagtccctgctcaaaaagtgtgggtcccgcacccccaccttcactttagcagacatctgctaatgaaaggattaactgcttttcttttttttaaattcagacaaattcaaaa

SEQ ID NO: 228958 - DNA, 120 bp, Artificial Sequence
  ENSG00000118960_115 (sequence is synthesized)
ctcccactgattctacattatggtgtttctgtaagagacacacagtggagaagagaaggccacgtgaaggctgaggcagggatgggcgtggtgctgccaccagcgggggaacgccaggaa

SEQ ID NO: 228959 - DNA, 120 bp, Artificial Sequence
  ENSG00000118960_116 (sequence is synthesized)
gatgggcgtggtgctgccaccagcgggggaacgccaggaactggaagaggcaaagaaggaccctctgagggcgcagggtcctgctgacacctcaacttcagacttctggcctccagggct

SEQ ID NO: 228960 - DNA, 120 bp, Artificial Sequence
  ENSG00000118961_0 (sequence is synthesized)
acttccggtctcgtgccgccttcccaggaccctcagggagagcgggcagccttccaggtggacagaaatggactcagaactcaaggaagaaattcctgtgcatgaggaattcattttgtg

SEQ ID NO: 228961 - DNA, 120 bp, Artificial Sequence
  ENSG00000118961_1 (sequence is synthesized)
tggtggagccgaaacccaggttctaaaatgtgggccctggacagacctctttcatgatcaaagtgtcaaaaggcctaagctgcttattttcattattcctggtaacccaggtttttctgc

SEQ ID NO: 228962 - DNA, 120 bp, Artificial Sequence
  ENSG00000118961_2 (sequence is synthesized)
cttttatgtgccatttgcaaaggctttatactctttgacaaacagacgctttccagtttggactatcagtcatgctgggcatgcgttggctcccaaagacaagaagattcttacaacatc

SEQ ID NO: 228963 - DNA, 120 bp, Artificial Sequence
  ENSG00000118961_3 (sequence is synthesized)
agaggattcaaacgctcaagaaattaaggacatttatggactaaatggacaaatagagcacaaactagctttcctgagaactcatgtgccaaaggacatgaaacttgtgctcattggcca

SEQ ID NO: 228964 - DNA, 120 bp, Artificial Sequence
  ENSG00000118961_4 (sequence is synthesized)
ttcaataggcagctatttcacacttcagatgctgaagcgagtccctgagctcccggtaattcgtgcctttctgctctttccaacaattgaacgaatgtctgagtcacccaatggcagaat

SEQ ID NO: 228965 - DNA, 120 bp, Artificial Sequence
  ENSG00000118961_5 (sequence is synthesized)
tgccactccacttttgtgctggtttcgatatgttctctatgttactggctacttattattgaaaccgtgtcctgagacaatcaagtccttgctaatcagaaggggccttcaagtaatgaa

SEQ ID NO: 228966 - DNA, 120 bp, Artificial Sequence
  ENSG00000118961_6 (sequence is synthesized)
cctagagaatgaattttcaccattgaatatattagaaccattctgccttgctaatgctgcctaccttgggggccaagaaatgatggaggtggtgaagagagatgacgaaaccataaagga

SEQ ID NO: 228967 - DNA, 120 bp, Artificial Sequence
  ENSG00000118961_7 (sequence is synthesized)
gcatttatgtaagcttacattttattatggtactatagatccttggtgtccaaaagagtactatgaagacattaagaaggattttccagaaggagacattcgactctgtgagaaaaacat

SEQ ID NO: 228968 - DNA, 120 bp, Artificial Sequence
  ENSG00000118961_8 (sequence is synthesized)
acctcatgctttcatcacccattttaaccaggaaatggcagacatgattgctgactccctaaaggatgacttgtccaaaatgtaaattggcctgaggaacaagcccccactgccagtaca

SEQ ID NO: 228969 - DNA, 120 bp, Artificial Sequence
  ENSG00000118961_9 (sequence is synthesized)
tggaggcagtcagtgtactagacttagtaggtaaatgtttaattttgaagactgatattagaaatgaagaaagtgagaacctttgtcttacaaaccaactctccgctcgccatgttatag

SEQ ID NO: 228970 - DNA, 120 bp, Artificial Sequence
  ENSG00000118961_10 (sequence is synthesized)
gctgaagtaaacacagttgatgaatcattccataggtttaaccatacattttccaagactcagggaacacagtgatctacacagagtcttgtgtttgcacaagatgcccagtggcaccat

SEQ ID NO: 228971 - DNA, 120 bp, Artificial Sequence
  ENSG00000118961_11 (sequence is synthesized)
atggtttattttggtaggcaggatctttgcagatgaaaaaaaaatctacatgtacttgattttaattgagttacattgtagaataggctcctctggaggaaattatgaaatacctactag

SEQ ID NO: 228972 - DNA, 120 bp, Artificial Sequence
  ENSG00000118961_12 (sequence is synthesized)
aaaatgtaaaataaatcagtgaatgttaagagtatagttagatatgtgaagtgtatgagattatgacaaggatacactcatgttccaggagcaggaagtgaacctgggtctcctgtaaga

SEQ ID NO: 228973 - DNA, 120 bp, Artificial Sequence
  ENSG00000118961_13 (sequence is synthesized)
cagaagatgaagatgagcccaggctaacttagcacagatcttggctgagatcatcaatgtgacgtctaatgtacctgcactagacagagaataaagttcaccagacattactctggtcag

SEQ ID NO: 228974 - DNA, 120 bp, Artificial Sequence
  ENSG00000118961_14 (sequence is synthesized)
ctaaccagataaagaattgttgaaggaccccaactgtgcctcctgccacaggacaaccagcaagttctatgctgagccttagcctcccaggttataagctccctgcaggctcctcctctc

SEQ ID NO: 228975 - DNA, 120 bp, Artificial Sequence
  ENSG00000118961_15 (sequence is synthesized)
cagagccaggatggagaggcactgggctgtcccaaagcaggcttggatgtgccaacgtacagttgctccttctgtaattcttgcactaaaactccattaaagaccatcaatgagccaaat

SEQ ID NO: 228976 - DNA, 120 bp, Artificial Sequence
  ENSG00000118961_16 (sequence is synthesized)
tttaaaagcttcttttaaactgctcagtaaaacattgccatacattaactctccatttctgcattaacttcatttgctggaaagaaattattttgttaatgaaccaaacccagccattaa

SEQ ID NO: 228977 - DNA, 120 bp, Artificial Sequence
  ENSG00000118961_17 (sequence is synthesized)
gttatgtgaattcaccttctctagacacattgaggtatggcagagaagacacatattccctggcctagagtgggctgacaatattgctgcctcccctaaattgactcaatcttgagaacc

SEQ ID NO: 228978 - DNA, 120 bp, Artificial Sequence
  ENSG00000118961_18 (sequence is synthesized)
acatactgcagtgacagttgatcatggatcagaaatattcctttttctcctagaggaaatccctcatggcattatcattccctaaggacaatgagatgtccctccgctcaaatcctaaag

SEQ ID NO: 228979 - DNA, 120 bp, Artificial Sequence
  ENSG00000118961_19 (sequence is synthesized)
ccccctgatgaaagatttggctctgatttgctgccaacttattggtaagtgctgaatgagttactgtgctttggcatagcttctacatcacagcaagtgacttctcagaggggaaaagcc

SEQ ID NO: 228980 - DNA, 120 bp, Artificial Sequence
  ENSG00000118961_20 (sequence is synthesized)
aagctccagacaaggagtgctgttagcccaaggggaagagctaatagatacataggccgtaagcacagggctgtacacagatcctttattggcatctgcatgagaggcctagaaatcgga

SEQ ID NO: 228981 - DNA, 120 bp, Artificial Sequence
  ENSG00000118961_21 (sequence is synthesized)
tgttagaagctaggaatcatggctctgagcgccttgcatacaggagatactcactgatactaaatcaaggcatgtaaacaatactgggtaaatcatacctaccagaataaagagtaacat

SEQ ID NO: 228982 - DNA, 120 bp, Artificial Sequence
  ENSG00000118961_22 (sequence is synthesized)
tcagagcttttcttttatctgttattttaaatgttactccatatttcaaaagtctgcacgtatgaaattgtgtcttatttctggtttttagagcctaagaaagatactcattcttaattc

SEQ ID NO: 228983 - DNA, 120 bp, Artificial Sequence
  ENSG00000118961_23 (sequence is synthesized)
ctatttatcatctgaaaaccaaatgaatttttgaaataaatgttttaccagcatttctgacctggtctggcctgatctctgtgttgggcaagagagggtacaatttgagcagttctcctg

SEQ ID NO: 228984 - DNA, 120 bp, Artificial Sequence
  ENSG00000118961_24 (sequence is synthesized)
agttagactcggctcaaagtctctcttttaaagtgaaaagccacctttctcattgcttttttcataggtggaagaatcagatttcaagagactgaagttcattctgtttcattagggatt

SEQ ID NO: 228985 - DNA, 120 bp, Artificial Sequence
  ENSG00000118961_25 (sequence is synthesized)
agactaaaatggacaaacagtggaagaaatccattttccagaagcagctctgcctgtatgtcccagtcaaccacatggatggtctttgtgaaagttttaacttcctgcagagttaccgag

SEQ ID NO: 228986 - DNA, 120 bp, Artificial Sequence
  ENSG00000118961_26 (sequence is synthesized)
tgctcagcgattgagctttgaccacacccgtgtttgttcctagtctgttcccagccataagcatctccacaagccctctgtggcttgtgtggcctgatgtccatggccaccaagggcctc

SEQ ID NO: 228987 - DNA, 120 bp, Artificial Sequence
  ENSG00000118961_27 (sequence is synthesized)
tcaccatacgcttctccactcaacctttggagagacacggaccaccaaaggcttgatttttcttcatcctacattatattcaaaacaaacaggctgggtgccgtagctcacacctgtgat

SEQ ID NO: 228988 - DNA, 120 bp, Artificial Sequence
  ENSG00000118961_28 (sequence is synthesized)
cccagcaccttgggaggatgagctgggaagatcgtttgaggctaggagtttgagaccagcccgtgcaaaaaacgagacctcgtgtctaaaataatttttaaaaaagagcaaaaaaaaaaa

SEQ ID NO: 228989 - DNA, 120 bp, Artificial Sequence
  ENSG00000118961_29 (sequence is synthesized)
gcaatttcagattaaaggagactgaagagacatgacaattggacacaacatctgattctgaattggatgtttttgttataaaagacattgttgagacaatttgcacaacttgaatgaggt

SEQ ID NO: 228990 - DNA, 120 bp, Artificial Sequence
  ENSG00000118961_30 (sequence is synthesized)
ctgaagattagctgggagtaagatgccactgttaattttctgatttcagtggttgtactgggaagaagtaagagagtgtccttgtttgtactggagacactgaggtatctgggggtgagg

SEQ ID NO: 228991 - DNA, 120 bp, Artificial Sequence
  ENSG00000118961_31 (sequence is synthesized)
ggcatcatgtctgtttactgtcagatggttgaggggaaaataatgttctttgtacttgcagattttttggaagtttgagatgttttagaatttgtaaaaataattatttttaaaacccca

SEQ ID NO: 228992 - DNA, 120 bp, Artificial Sequence
  ENSG00000118961_32 (sequence is synthesized)
aggacaatgagatgtccctccgctcaaatcctaaagccccctgatgaaagatttggctctgatttgctgccaacttattggtggaagaatcagatttcaagagactgaagttcattctgt

SEQ ID NO: 228993 - DNA, 120 bp, Artificial Sequence
  ENSG00000118961_33 (sequence is synthesized)
aattacttcccaaagacccctctccacctcttaatagcatttgggcatagggtttcacctatggatttgggggccatataagcattcagaccattacagctggttttcacaattgaataa

SEQ ID NO: 228994 - DNA, 120 bp, Artificial Sequence
  ENSG00000118961_34 (sequence is synthesized)
aatttggatttagggcatggaggtgggtgcagaggtacaacagacagaaagagtagcacagaagggagcaagatttaatagcgatgttactgctaagcagggccagtttgagagggactt

SEQ ID NO: 228995 - DNA, 120 bp, Artificial Sequence
  ENSG00000118961_35 (sequence is synthesized)
tgagagctggagagagagccaggactccatgctggaaggtttctaaatggaagaagtaataccatggagatgcaaactacctcctttaaatctgtgagaattctagcatgttcactgttc

SEQ ID NO: 228996 - DNA, 120 bp, Artificial Sequence
  ENSG00000118965_0 (sequence is synthesized)
agggcgacgggagctttccggagctgctggtactcccgattggagacgtagaaccgttacttgtcgagggccttagcggccgccgtgaccctctcggggatcccacgatgttcttctacc

SEQ ID NO: 228997 - DNA, 120 bp, Artificial Sequence
  ENSG00000118965_1 (sequence is synthesized)
tgagcaagaaaatttccattcccaataacgtgaagctgcagtgtgtatcctggaacaaggaacaagggttcatagcatgcggtggtgaagatggattactgaaagttttgaaattagaga

SEQ ID NO: 228998 - DNA, 120 bp, Artificial Sequence
  ENSG00000118965_2 (sequence is synthesized)
cgcagacagatgatgcaaaattgaggggccttgcagcccccagtaacctttctatgaatcagactcttgaaggtcatagtggttctgttcaagttgtaacatggaatgagcagtatcaga

SEQ ID NO: 228999 - DNA, 120 bp, Artificial Sequence
  ENSG00000118965_3 (sequence is synthesized)
agttgactaccagtgatgaaaacgggcttatcattgtgtggatgttatataaaggctcttggattgaggagatgatcaacaatcgaaataaatcagttgttcgcagtatgagctggaatg

SEQ ID NO: 229000 - DNA, 120 bp, Artificial Sequence
  ENSG00000118965_4 (sequence is synthesized)
ctgacggacagaagatctgcattgtatatgaagatggggctgtgatagttggttcagtggatggcaatcgtatttggggaaaagacctgaagggtatacagctatcccatgtaacatggt

SEQ ID NO: 229001 - DNA, 120 bp, Artificial Sequence
  ENSG00000118965_5 (sequence is synthesized)
ctgcggacagtaaagtcttactttttggaatggcaaatggggaaatacacatttacgataatcaaggaaattttatgataaaaatgaaactgagttgtttggtgaatgtcactggagcta

SEQ ID NO: 229002 - DNA, 120 bp, Artificial Sequence
  ENSG00000118965_6 (sequence is synthesized)
tcagcattgctggaattcattggtaccatggcacagaaggctacgtggagcctgattgcccttgccttgctgtttgctttgataatggaagatgccaaataatgagacatgagaatgacc

SEQ ID NO: 229003 - DNA, 120 bp, Artificial Sequence
  ENSG00000118965_7 (sequence is synthesized)
aaaatcccgttttgattgacactggcatgtacgtagtaggcatccagtggaaccacatgggcagcgtgttagctgtggcaggcttccagaaggcagccatgcaggacaaagatgtgaaca

SEQ ID NO: 229004 - DNA, 120 bp, Artificial Sequence
  ENSG00000118965_8 (sequence is synthesized)
ttgtgcagttttacactccgtttggtgagcatctgggtactttgaaagttcctggaaaggaaatatctgcactatcttgggaaggaggtggactgaaaattgcactagctgttgattcct

SEQ ID NO: 229005 - DNA, 120 bp, Artificial Sequence
  ENSG00000118965_9 (sequence is synthesized)
ttatatattttgcaaacattcgacctaattataagtggggttattgctcaaacactgtagtttatgcatataccagacctgatcgtccagaatattgtgttgtcttctgggatacgaaaa

SEQ ID NO: 229006 - DNA, 120 bp, Artificial Sequence
  ENSG00000118965_10 (sequence is synthesized)
acaatgaaaaatatgttaaatatgtgaagggtctcatttctattactacctgtggagatttctgcattttggctacaaaagctgatgaaaatcatcctcagtttgtactagttctttgta

SEQ ID NO: 229007 - DNA, 120 bp, Artificial Sequence
  ENSG00000118965_11 (sequence is synthesized)
attctattggtacacccttggatcccaaatacattgatattgtaccattgtttgttgcaatgaccaaaacccatgtgatagcagcctcgaaagaagcattttatacctggcaatatcgtg

SEQ ID NO: 229008 - DNA, 120 bp, Artificial Sequence
  ENSG00000118965_12 (sequence is synthesized)
tggcaaagaagctcacagcattggaaattaatcagatcacacggtctcgaaaagaagggagagaaagaatttatcatgttgatgataccccttctggatcaatggatggtgtgcttgatt

SEQ ID NO: 229009 - DNA, 120 bp, Artificial Sequence
  ENSG00000118965_13 (sequence is synthesized)
atagtaaaaccattcaaggcacaagggatccaatttgtgccataactgcatcagataagatattgattgtgggtcgtgaatctggcaccattcagagatacagtctacctaatgttggtt

SEQ ID NO: 229010 - DNA, 120 bp, Artificial Sequence
  ENSG00000118965_14 (sequence is synthesized)
tgattcaaaaatattcccttaattgtcgagcctaccagttatccttgaattgcaactctagccgtcttgctatcatagacatctcaggagttctgactttctttgacttggatgctcgag

SEQ ID NO: 229011 - DNA, 120 bp, Artificial Sequence
  ENSG00000118965_15 (sequence is synthesized)
taacggacagtacgggacagcaagtagttggagagttgttaaaattggaacgaagagatgtctgggatatgaagtgggccaaagataatcctgatttgtttgcaatgatggagaagacaa

SEQ ID NO: 229012 - DNA, 120 bp, Artificial Sequence
  ENSG00000118965_16 (sequence is synthesized)
gaatgtatgttttcagaaacttggatcctgaggaacccattcagacctctggatatatttgtaattttgaggatttagaaattaaatctgttcttttggatgagatattaaaggatccag

SEQ ID NO: 229013 - DNA, 120 bp, Artificial Sequence
  ENSG00000118965_17 (sequence is synthesized)
aacatccaaacaaggattacctaattaactttgagattcggtctctgcgagatagccgagcactgattgagaaggttggaattaaagatgcatctcagttcatagaggacaatccacacc

SEQ ID NO: 229014 - DNA, 120 bp, Artificial Sequence
  ENSG00000118965_18 (sequence is synthesized)
cccgactttggcgcctactggctgaagcagctcttcagaaactggatctatacactgcagagcaagcatttgtgcgctgcaaagattaccaaggcattaagtttgtgaagcgcttgggca

SEQ ID NO: 229015 - DNA, 120 bp, Artificial Sequence
  ENSG00000118965_19 (sequence is synthesized)
aactactgagtgagtcaatgaaacaggctgaagttgttggctacttcggcaggtttgaagaggctgaaagaacgtatctcgagatggacagaagggatcttgctattggcctccggctga

SEQ ID NO: 229016 - DNA, 120 bp, Artificial Sequence
  ENSG00000118965_20 (sequence is synthesized)
aattgggggattggtttagagtactccagctcctgaaaactggatctggtgatgcagatgacagtctcctggaacaagccaacaatgccattggagactactttgctgatcgacaaaagt

SEQ ID NO: 229017 - DNA, 120 bp, Artificial Sequence
  ENSG00000118965_21 (sequence is synthesized)
ggttgaatgctgtacaatattatgtacaaggacggaaccaggaacgcttagctgaatgttactatatgttagaggattatgaagggttagagaaccttgccatttcacttccagaaaacc

SEQ ID NO: 229018 - DNA, 120 bp, Artificial Sequence
  ENSG00000118965_22 (sequence is synthesized)
acaagttacttccagaaatagcacaaatgtttgtcagagttggaatgtgtgaacaagcagtgactgcatttttgaaatgtagtcaaccaaaggcagcagtagatacctgcgtacatctca

SEQ ID NO: 229019 - DNA, 120 bp, Artificial Sequence
  ENSG00000118965_23 (sequence is synthesized)
accaatggaacaaagctgttgaattggctaaaaatcatagtatgaaagaaattggatctctgttagctaggtatgcatctcatttactggaaaagaataaaactcttgatgccatagaac

SEQ ID NO: 229020 - DNA, 120 bp, Artificial Sequence
  ENSG00000118965_24 (sequence is synthesized)
tctatcggaaagccaattacttttttgatgcagctaaactgatgtttaagattgcagatgaagaggcaaagaaaggaagtaaacctttacgtgtcaagaagctctatgtactgtcagcct

SEQ ID NO: 229021 - DNA, 120 bp, Artificial Sequence
  ENSG00000118965_25 (sequence is synthesized)
tacttatagagcaataccatgaacagatgaagaatgcccagcgaggaaaagttaaaggaaaaagttcagaggccacttctgccttggctggtttgctggaagaagaagttctgtctacaa

SEQ ID NO: 229022 - DNA, 120 bp, Artificial Sequence
  ENSG00000118965_26 (sequence is synthesized)
cagatcgtttcacagataatgcatggagaggggcagaggcttaccacttctttatacttgcacagaggcagctctatgagggatgtgtggacactgcactgaagacagctcttcacctga

SEQ ID NO: 229023 - DNA, 120 bp, Artificial Sequence
  ENSG00000118965_27 (sequence is synthesized)
aagactatgaagacatcatccctcctgtggagatctactctctgctagcactctgcgcatgcgccagcagagcctttgggacttgttcaaaagctttcattaaacttaaatctttagaga

SEQ ID NO: 229024 - DNA, 120 bp, Artificial Sequence
  ENSG00000118965_28 (sequence is synthesized)
gaaaacctgaattggacagccttatggaaggtggagaagggaaactgccaacatgcgttgccacaggaagcccaatcactgagtatcaattctggatgtgcagtgtatgcaaacacggtg

SEQ ID NO: 229025 - DNA, 120 bp, Artificial Sequence
  ENSG00000118965_29 (sequence is synthesized)
tccttgctcaggaaataagccactacagcttctgccccttatgccatagtccagtgggataaaggaatgataaactgtatataactgtaaaatatatgtagcatatatacatggctatat

SEQ ID NO: 229026 - DNA, 120 bp, Artificial Sequence
  ENSG00000118965_30 (sequence is synthesized)
gctgtatatgtaataaggtttatttctgtgagttttgtatgaaaatcagcctcattatttatagttgaatttttgcacaaaatatatgttaataaaataatttttatggcaatacaactg

SEQ ID NO: 229027 - DNA, 120 bp, Artificial Sequence
  ENSG00000118965_31 (sequence is synthesized)
tgaaataataaggccgattttcatataaatgtatgaaaatcaaccatgttttctctcaccctctctcttttgtttatcttgtttttggttacatgataccatggaaatattccaaataaa

SEQ ID NO: 229028 - DNA, 120 bp, Artificial Sequence
  ENSG00000118965_32 (sequence is synthesized)
tttttttctcacagtgtcaaggtaactgaattcattaaaaaatcttgaagggagtagggagtgggggaagcatgggagtggggcaaagttgaatttagagaatttttataacccatgtta

SEQ ID NO: 229029 - DNA, 120 bp, Artificial Sequence
  ENSG00000118965_33 (sequence is synthesized)
caaggaagttaaacaattgtaataatgaaatgagctttctctatagccatatttaattaaataagtgtcgaatgtcttctttattgtattttcagaagtgaggcgatggcattttaagac

SEQ ID NO: 229030 - DNA, 120 bp, Artificial Sequence
  ENSG00000118965_34 (sequence is synthesized)
attttttacaatctgaattgtttctaatagccctattcttctattttaaaacctgtccttttagtctcatttaagagatggcatttggaatttacactttcatatgattgtgcagaaaac

SEQ ID NO: 229031 - DNA, 120 bp, Artificial Sequence
  ENSG00000118965_35 (sequence is synthesized)
ttgcctctatttataatgaagataacttaaacagaaatatccattttgtagttatagcttctgttgaaacattgtcactaagttggaccgtttatttacacaagtattgttgagggagtg

SEQ ID NO: 229032 - DNA, 120 bp, Artificial Sequence
  ENSG00000118965_36 (sequence is synthesized)
attttttcttgatatgcgtctgttttcatttattattaatttgaaagataaacagttgtgatccataatggatcatttcttatgtcttttacatagctaataatgttctctgtttatttc

SEQ ID NO: 229033 - DNA, 120 bp, Artificial Sequence
  ENSG00000118965_37 (sequence is synthesized)
tcatgaattcccattttgtggctaaagaccagacctttgcactatttcatcaagattattttattgaggtttggcttacatatagtagaggcaatacatagagatacgcaactttgtttt

SEQ ID NO: 229034 - DNA, 120 bp, Artificial Sequence
  ENSG00000118965_38 (sequence is synthesized)
tgcagctacaatacactttctcaatctcatatgtttttgtcttgtagagacagagacaagttcagcatgttgcagattgggaatagtgagctatgagaagagatttagagcctagatgag

SEQ ID NO: 229035 - DNA, 120 bp, Artificial Sequence
  ENSG00000118965_39 (sequence is synthesized)
cttaggatagagagtgggctcattggcctaaataaaaagagaagaccagaagtctttgaggtctctgtctctattcatgcgcctcgtggaaaattaccttggtacaatggtagcctctaa

SEQ ID NO: 229036 - DNA, 120 bp, Artificial Sequence
  ENSG00000118965_40 (sequence is synthesized)
atagactgcctcgcaagctattccagaggtcatggaacagaaagccttataaaccaaataaaaattctcaaaatacattggtttattgaaccaatttgcaatacacagtgaggaacaagg

SEQ ID NO: 229037 - DNA, 120 bp, Artificial Sequence
  ENSG00000118965_41 (sequence is synthesized)
agaaagcaatgatagattaacactgttagtgtaacgtgccagtggagtggaaagaccgcaacacctgaatcctgggttttgtaatgtttttatgtcctgactcacattctgtcacatacg

SEQ ID NO: 229038 - DNA, 120 bp, Artificial Sequence
  ENSG00000118965_42 (sequence is synthesized)
ctttcccctaatagtcgggttacaaaaaggaccagagtggccgcttgagccagatgactcaatcagatgaaatgtgcctgaggccaacgatgtacacttgctctatagaagggtgtcagg

SEQ ID NO: 229039 - DNA, 120 bp, Artificial Sequence
  ENSG00000118965_43 (sequence is synthesized)
ggcaagtacacttcaccacagcaatagcttgcctattagtctgctgagcagtcatgaattttattgtatttcttgggtaaggacaggccagaatgagtgtcaccagtgggtaattgaatc

SEQ ID NO: 229040 - DNA, 120 bp, Artificial Sequence
  ENSG00000118965_44 (sequence is synthesized)
aacttctcacacatactgaaggctttatatgtctcatgcatacttagtgtatcatgaatatttggtatctttgtggcttttcatatttttagtgcttcatgaatatttggtatctcttgc

SEQ ID NO: 229041 - DNA, 120 bp, Artificial Sequence
  ENSG00000118965_45 (sequence is synthesized)
tcctttctatctgtggtcacacatacacgctctattaactttgcctaataagtctcctaggttactaacttacttacctaaatgtaacacaatgaattccagctttctcatttgttctat

SEQ ID NO: 229042 - DNA, 120 bp, Artificial Sequence
  ENSG00000118965_46 (sequence is synthesized)
accagaatgggaaatttccccaaatcagaaaatcacatcctaacaaagaagtctgtctaagacagtacatctcctgttgaacttgcatctttccacaggactttctgtttttagggatga

SEQ ID NO: 229043 - DNA, 120 bp, Artificial Sequence
  ENSG00000118965_47 (sequence is synthesized)
gactattctctgcttcatcaaggaaagagaaatgttcagggttgtagggatggcacacttattagttctgcctgtctgaaaggttcctgcaggacagtttggtcagagctgcaattctta

SEQ ID NO: 229044 - DNA, 120 bp, Artificial Sequence
  ENSG00000118965_48 (sequence is synthesized)
gtccatggtctaatgcttgagtatctcttctttccctttcctgtctcaggaatcagctgagaattcattcgattgtcatgcctctagccccttactgtgatttgttggttgcactttcat

SEQ ID NO: 229045 - DNA, 120 bp, Artificial Sequence
  ENSG00000118965_49 (sequence is synthesized)
ttgctttagttctagaatcacctgttgactcctcagacttcacctaactttggaaactctcttttggaggcttctcatttccccctaattctgtgctgcctgagccctagaattttccca

SEQ ID NO: 229046 - DNA, 120 bp, Artificial Sequence
  ENSG00000118965_50 (sequence is synthesized)
ccaacgaattattccaggtagatcctaagttgctggatctagttgatatttaaacaatatctagttgatatttctcattcagttggatccagaaaccagtatctctaaaaacaacctctc

SEQ ID NO: 229047 - DNA, 120 bp, Artificial Sequence
  ENSG00000118965_51 (sequence is synthesized)
ataccttgtggacctaattttgtgtgcgtgtgtgtgtgcgcgcatatgtatatagacaggcacatcttttttacttttgtaaaagcttatgcctctttggtatctatatctgtgaaagtt

SEQ ID NO: 229048 - DNA, 120 bp, Artificial Sequence
  ENSG00000118965_52 (sequence is synthesized)
ttaatgatctgccataatgtcttggggacctttgtcttctgtgtaaatggtactagagaaaacacctatattatgagtcaatctagttggttttattcgacatgaaggaaatttccagat

SEQ ID NO: 229049 - DNA, 120 bp, Artificial Sequence
  ENSG00000118965_53 (sequence is synthesized)
aacaacactaacaaactctcccttgactagggggacaaagaaaagcaaaactgaccataaaaaacaattacctggtgagaagttgcataaacagaattaggtagtatattgaagacagca

SEQ ID NO: 229050 - DNA, 120 bp, Artificial Sequence
  ENSG00000118965_54 (sequence is synthesized)
tcattaaacagttatgttgttctccttgcaaaaaacatgtactgacttcccgttgagtaatgccaagttgttttttttattataaaacttgcccttcattacatgtttcaaagtggtgtg

SEQ ID NO: 229051 - DNA, 120 bp, Artificial Sequence
  ENSG00000118965_55 (sequence is synthesized)
gtgggccaaaatattgaaatgatggaactgactgataaagctgtacaaataagcagtgtgcctaacaagcaacacagtaatgttgacatgcttaattcacaaatgctaatttcattataa

SEQ ID NO: 229052 - DNA, 120 bp, Artificial Sequence
  ENSG00000118965_56 (sequence is synthesized)
attgttttgctaaaatacactttgaaactatttttctgtattccaagagctgagatcttagattttatgtagtattaagtgaaaaaatacgaaaataataaacattgaagaaaaaaataa

SEQ ID NO: 229053 - DNA, 120 bp, Artificial Sequence
  ENSG00000118965_57 (sequence is synthesized)
gcagaagttgcattaattagaacctcctaaatccacttaaattttacttttattaaacacattgatagaagagaaattatggagaaacaacagagaaagttagtgaattagatgttactc

SEQ ID NO: 229054 - DNA, 120 bp, Artificial Sequence
  ENSG00000118965_58 (sequence is synthesized)
tttactgatgttcaagtggagggtaaggtaaaatgtctctctgggcttaatgaaattcatcgggaatatatgatgaaatgttcagatatgtttttggtacagctttcaggaacgtatcat

SEQ ID NO: 229055 - DNA, 120 bp, Artificial Sequence
  ENSG00000118965_59 (sequence is synthesized)
atcagaatttttatattaaataacagtattaattgatgttgtccaatcgtttattctagagattatgaaatagtataaactatacttaaactttctttgaaattctgatcttttttgcag

SEQ ID NO: 229056 - DNA, 120 bp, Artificial Sequence
  ENSG00000118965_60 (sequence is synthesized)
gcagaatttatcatgttgatgataccccttctggatcaatggatggtgtgcttgattatagtaaaaccattcaaggcacaagggatccaatttgtgccataactgcatcagataagatat

SEQ ID NO: 229057 - DNA, 120 bp, Artificial Sequence
  ENSG00000118965_61 (sequence is synthesized)
acaataaagaaaattaaaaatctataatgttacagtttcttagacatggaatgatgcttttaattataaagtaatatataaataatatagaatgcttgaaaatggaggaggaaaagtcag

SEQ ID NO: 229058 - DNA, 120 bp, Artificial Sequence
  ENSG00000118965_62 (sequence is synthesized)
tcacattcttactactttaatatgatcacagtcttgtgtagtctgttaagatttataaagttactttttaaatgttagctgaatacatgaaatatttacagatgaaatgatatgttgcta

SEQ ID NO: 229059 - DNA, 120 bp, Artificial Sequence
  ENSG00000118965_63 (sequence is synthesized)
gggatttgcttcaaaataatctgaaattgtttgaaatttgctataacttaagtttaaaaagatagctcaacttttattatgttatattaacaataaagtatttcaagttaaaagagaaat

SEQ ID NO: 229060 - DNA, 120 bp, Artificial Sequence
  ENSG00000118971_0 (sequence is synthesized)
agagcggagaagagcgagcaggggagagcgagaccagttttaaggggaggaccggtgcgagtgaggcagccccgaggctctgctcgcccaccacccaatcctcgcctcccttctgctcca

SEQ ID NO: 229061 - DNA, 120 bp, Artificial Sequence
  ENSG00000118971_1 (sequence is synthesized)
ccttctctctctgccctcacctctcccccgaaaaccccctatttagccaaaggaaggaggtcaggggaacgctctcccctccccttccaaaaaacaaaaacagaaaaacctttttccagg

SEQ ID NO: 229062 - DNA, 120 bp, Artificial Sequence
  ENSG00000118971_2 (sequence is synthesized)
ccggggaaagcaggagggagaggggccgccgggctggccatggagctgctgtgccacgaggtggacccggtccgcagggccgtgcgggaccgcaacctgctccgagacgaccgcgtcctg

SEQ ID NO: 229063 - DNA, 120 bp, Artificial Sequence
  ENSG00000118971_3 (sequence is synthesized)
cagaacctgctcaccatcgaggagcgctaccttccgcagtgctcctacttcaagtgcgtgcagaaggacatccaaccctacatgcgcagaatggtggccacctggatgctggaggtctgt

SEQ ID NO: 229064 - DNA, 120 bp, Artificial Sequence
  ENSG00000118971_4 (sequence is synthesized)
gaggaacagaagtgcgaagaagaggtcttccctctggccatgaattacctggaccgtttcttggctggggtcccgactccgaagtcccatctgcaactcctgggtgctgtctgcatgttc

SEQ ID NO: 229065 - DNA, 120 bp, Artificial Sequence
  ENSG00000118971_5 (sequence is synthesized)
ctggcctccaaactcaaagagaccagcccgctgaccgcggagaagctgtgcatttacaccgacaactccatcaagcctcaggagctgctggagtgggaactggtggtgctggggaagttg

SEQ ID NO: 229066 - DNA, 120 bp, Artificial Sequence
  ENSG00000118971_6 (sequence is synthesized)
aagtggaacctggcagctgtcactcctcatgacttcattgagcacatcttgcgcaagctgccccagcagcgggagaagctgtctctgatccgcaagcatgctcagaccttcattgctctg

SEQ ID NO: 229067 - DNA, 120 bp, Artificial Sequence
  ENSG00000118971_7 (sequence is synthesized)
tgtgccaccgactttaagtttgccatgtacccaccgtcgatgatcgcaactggaagtgtgggagcagccatctgtgggctccagcaggatgaggaagtgagctcgctcacttgtgatgcc

SEQ ID NO: 229068 - DNA, 120 bp, Artificial Sequence
  ENSG00000118971_8 (sequence is synthesized)
ctgactgagctgctggctaagatcaccaacacagacgtggattgtctcaaagcttgccaggagcagattgaggcggtgctcctcaatagcctgcagcagtaccgtcaggaccaacgtgac

SEQ ID NO: 229069 - DNA, 120 bp, Artificial Sequence
  ENSG00000118971_9 (sequence is synthesized)
ggatccaagtcggaggatgaactggaccaagccagcacccctacagacgtgcgggatatcgacctgtgaggatgccagttgggccgaaagagagagacgcgtccataatctggtctcttc

SEQ ID NO: 229070 - DNA, 120 bp, Artificial Sequence
  ENSG00000118971_10 (sequence is synthesized)
ttctttctggttgtttttgttctttgtgttttagggtgaaacttaaaaaaaaaattctgcccccacctagatcatatttaaagatcttttagaagtgagagaaaaaggtcctacgaaaac

SEQ ID NO: 229071 - DNA, 120 bp, Artificial Sequence
  ENSG00000118971_11 (sequence is synthesized)
ggaataataaaaagcatttggtgcctatttgaagtacagcataagggaatcccttgtatatgcgaacagttattgtttgattatgtaaaagtaatagtaaaatgcttacaggaaaacctg

SEQ ID NO: 229072 - DNA, 120 bp, Artificial Sequence
  ENSG00000118971_12 (sequence is synthesized)
cagagtagttagagaatatgtatgcctgcaatatgggaacaaattagaggagacttttttttttcatgttatgagctagcacatacacccccttgtagtataatttcaaggaactgtgta

SEQ ID NO: 229073 - DNA, 120 bp, Artificial Sequence
  ENSG00000118971_13 (sequence is synthesized)
cgccatttatggcatgattagattgcaaagcaatgaactcaagaaggaattgaaataaggagggacatgatggggaaggagtacaaaacaatctctcaacatgattgaaccatttgggat

SEQ ID NO: 229074 - DNA, 120 bp, Artificial Sequence
  ENSG00000118971_14 (sequence is synthesized)
ggagaagcacctttgctctcagccacctgttactaagtcaggagtgtagttggatctctacattaatgtcctcttgctgtctacagtagctgctacctaaaaaaagatgttttattttgc

SEQ ID NO: 229075 - DNA, 120 bp, Artificial Sequence
  ENSG00000118971_15 (sequence is synthesized)
cagttggacacaggtgattggctcctgggtttcatgttctgtgacatcctgcttcttcttccaaatgcagttcattgcagacaccaccatattgctatctaatggggaaatgtagctatg

SEQ ID NO: 229076 - DNA, 120 bp, Artificial Sequence
  ENSG00000118971_16 (sequence is synthesized)
ggccataaccaaaactcacatgaaacggaggcagatggagaccaagggtgggatccagaatggagtcttttctgttattgtatttaaaagggtaatgtggccttggcatttcttcttaga

SEQ ID NO: 229077 - DNA, 120 bp, Artificial Sequence
  ENSG00000118971_17 (sequence is synthesized)
aaaaaactaatttttggtgctgattggcatgtctggttcacagtttagcattgttataaaccattccattcgaaaagcactttgaaaaattgttcccgagcgatagatgggatggtttat

SEQ ID NO: 229078 - DNA, 120 bp, Artificial Sequence
  ENSG00000118971_18 (sequence is synthesized)
gcaagtcatgctgaatactcctcccctcttctcttttgccccctcccttcctgcccccagtctgggttactcttcgcttctggtatctggcgttctttggtacacagttctggtgttcct

SEQ ID NO: 229079 - DNA, 120 bp, Artificial Sequence
  ENSG00000118971_19 (sequence is synthesized)
accaggactcaagagacaccccttcctgctgacattcccatcacaacattcctcagacaagcctgtaaactaaaatctgttaccattctgatggcacagaaggatcttaattcccatctc

SEQ ID NO: 229080 - DNA, 120 bp, Artificial Sequence
  ENSG00000118971_20 (sequence is synthesized)
tatacttctcctttggacatggaaagaaaagttattgctggtgcaaagatagatggctgaacatcagggtgtggcattttgttcccttttccgtttttttttttttattgttgttgttaa

SEQ ID NO: 229081 - DNA, 120 bp, Artificial Sequence
  ENSG00000118971_21 (sequence is synthesized)
ttttattgcaaagttgtattcagcgtacttgaatttttcttcctctccacttcttagaggcattcagttagcaaagaggttggagcaacaacttttttttttttttttgcacaattgtaa

SEQ ID NO: 229082 - DNA, 120 bp, Artificial Sequence
  ENSG00000118971_22 (sequence is synthesized)
ttgacaggtaatgaagctatttgttaaaatatttgcctttttaagtaaaaaagaaaaatcagaacagggctatttgaagaattattttatacacagattctgccttgtttcatagtatga

SEQ ID NO: 229083 - DNA, 120 bp, Artificial Sequence
  ENSG00000118971_23 (sequence is synthesized)
gggttgaagacggaaaacaatctaagggtctctcatttttttaattttgttttgttcagtttggtttttttttttttttgcgctgctaagaagctaaagtcatccatccttattcacgtt

SEQ ID NO: 229084 - DNA, 120 bp, Artificial Sequence
  ENSG00000118971_24 (sequence is synthesized)
gacagtacctagctgtaatgtttcacagagtgtgctgctattttataaacatttttataatatattattttactgcttaaattccaagtcctgaagtagatggttgagatatgagttctt

SEQ ID NO: 229085 - DNA, 120 bp, Artificial Sequence
  ENSG00000118971_25 (sequence is synthesized)
attccaagtcctgaagtagatggttgagatatgagttcttcgtactggaaaagcccttccgtagtttgttttcttctggtagcatattcatggttgtttttttttttcttttttggtttt

SEQ ID NO: 229086 - DNA, 120 bp, Artificial Sequence
  ENSG00000118971_26 (sequence is synthesized)
ggagtattctttacctcaggtttactggacaaaatcaataactacaaaaggcaatgattcacgcttttgttttcataatacctcacaaccgtacagtttctgcttgggagcccattcgca

SEQ ID NO: 229087 - DNA, 120 bp, Artificial Sequence
  ENSG00000118971_27 (sequence is synthesized)
agcagtgtgagcagggctgactccctctcaggtggaaggcagggcggtctcactcccagggacctttttggtcatggaggccatcgggctcccagttagaccctggtatcctcatcatga

SEQ ID NO: 229088 - DNA, 120 bp, Artificial Sequence
  ENSG00000118971_28 (sequence is synthesized)
tggaaaaaatacattgaaccaagggatcctccctccccttcaaggcagacgttcagtacaaacatttatgcggtaggctcagatgtcgtaatttgcacttaggtaccaggtgtcaggaaa

SEQ ID NO: 229089 - DNA, 120 bp, Artificial Sequence
  ENSG00000118971_29 (sequence is synthesized)
cagactaaaaagaattccaccaggctgtttggagatcctcatcttggagctttttcaaaagcggggcttcatctgcaaagggccctttcatcttgaagtttttcccctccgtctttcccc

SEQ ID NO: 229090 - DNA, 120 bp, Artificial Sequence
  ENSG00000118971_30 (sequence is synthesized)
tcccctggcatggacaccttgtgtttaggatcatctctgcaggtttcctaggtctgaatctgcgagtagatgaacctgcagcaagcagcgtttatggtgcttccttctccctcctctgtc

SEQ ID NO: 229091 - DNA, 120 bp, Artificial Sequence
  ENSG00000118971_31 (sequence is synthesized)
tcaaactgcgcaggcaagcactatgcaagcccaggccctctgctgagcggtactaaacggtcgggttttcaatcacactgaattggcaggataagaaaaataggtcagataagtatggga

SEQ ID NO: 229092 - DNA, 120 bp, Artificial Sequence
  ENSG00000118971_32 (sequence is synthesized)
tgatagttgaagggaggtgaagaggctgcttctctacagaggtgaaattccagatgagtcagtctcttgggaagtgtgtttagaagggttcaggactttgtgagttagcatgaccctaaa

SEQ ID NO: 229093 - DNA, 120 bp, Artificial Sequence
  ENSG00000118971_33 (sequence is synthesized)
attctaggggatttctggtgggacaatgggtggtgaattctgaagttttggagagggaagtggagcagccagcaagtaagctagccagagttttctcaagagccagctttgctcagcaca

SEQ ID NO: 229094 - DNA, 120 bp, Artificial Sequence
  ENSG00000118971_34 (sequence is synthesized)
ctctcctgggccccaaggagtcccacggaatggggaaagcgggaaccctggagttcttgggaatcttggagcctaaagagaaaccgaggtgcaaattcatttcatggtgactgacccttg

SEQ ID NO: 229095 - DNA, 120 bp, Artificial Sequence
  ENSG00000118971_35 (sequence is synthesized)
agcttaaacagaagcagcaaatgaaagaaccggacaaataaggaagggcacaagcctacccgactctatttacagtctgtaactttccactcttcctgtagtcccgaggcccctgggtcc

SEQ ID NO: 229096 - DNA, 120 bp, Artificial Sequence
  ENSG00000118971_36 (sequence is synthesized)
ttctagcttttctctttcccatccttggggccttgtgtgatgatgggtgtggggctgccgatgggaaagtcgggggttgttaggcttttctgcctgctcctgcttaaacacaagaaggaa

SEQ ID NO: 229097 - DNA, 120 bp, Artificial Sequence
  ENSG00000118971_37 (sequence is synthesized)
tcctggattttgccctctccttagctcttagtctctttggtaggagttttgttccagaggagctctcccccttggatttgaacttgctctttttgttgttgttgttctttctcttctttt

SEQ ID NO: 229098 - DNA, 120 bp, Artificial Sequence
  ENSG00000118971_38 (sequence is synthesized)
tcttacctcccactaaaggggttccaaattatcctggtctttttctaccttgttgtgtttctatctcgtctttacttccatctgtttgtttttttctccatcagtgggggccgagttgtt

SEQ ID NO: 229099 - DNA, 120 bp, Artificial Sequence
  ENSG00000118971_39 (sequence is synthesized)
cccccagcctgccaaattttgatccttcccctcttttggccaaatcctagggggaagaaatcctagtatgccaaaaatatatgctaagcataattaaactccatgcgggtccataacagc

SEQ ID NO: 229100 - DNA, 120 bp, Artificial Sequence
  ENSG00000118971_40 (sequence is synthesized)
caagaagcctgcaggagaaagccaagggcagttccctccgcagaacaccccatgcgtgctgagaggcgagctccttgaagaaggggctgttcttccaggaggccttattttgaactgcct

SEQ ID NO: 229101 - DNA, 120 bp, Artificial Sequence
  ENSG00000118971_41 (sequence is synthesized)
caggaccccactggagagcacagcatgccttactactgggtcatccttggtctatgtgctctgtactggaggctctgttctgcctcttatcagccaggtcaggggcacacatggcttaag

SEQ ID NO: 229102 - DNA, 120 bp, Artificial Sequence
  ENSG00000118971_42 (sequence is synthesized)
tgacaaagccagaggagaagacaaccctgacagcatcacgctgcatcccattgctagcaggattggcaactcttcagacggagctgcgcttccctgcagtctagcacctctagggcctct

SEQ ID NO: 229103 - DNA, 120 bp, Artificial Sequence
  ENSG00000118971_43 (sequence is synthesized)
ccagactgtgccctgggagctctgggactgaaaggttaagaacataaggcaggatcagatgactctctccaagagggcaggggaattttctctccatgggccacaggggacagggctggg

SEQ ID NO: 229104 - DNA, 120 bp, Artificial Sequence
  ENSG00000118971_44 (sequence is synthesized)
agaagaaatagacttgcaccttatgtcatgtaaataattgattttctagttcaagaagataatattggtagtgtgggaattggaggtaggaaggggaggaagtctgagtaagccagttgg

SEQ ID NO: 229105 - DNA, 120 bp, Artificial Sequence
  ENSG00000118971_45 (sequence is synthesized)
cttctaagccaaaaggattcctctttgtttatctctgagacagtccaaccttgagaatagctttaaaagggaaattaatgctgagatgataaagtccccttaagccaacaaaccctctgt

SEQ ID NO: 229106 - DNA, 120 bp, Artificial Sequence
  ENSG00000118971_46 (sequence is synthesized)
agctatagaatgagtgcaggtttctattggtgtggactcagagcaatttacaagagctgttcatgcagccatccatttgtgcaaaatagggtaagaagattcaagaggatatttattact

SEQ ID NO: 229107 - DNA, 120 bp, Artificial Sequence
  ENSG00000118971_47 (sequence is synthesized)
tcctcataccacatggcttttgatgattctggattctaaacaacccagaatggtcatttcaggcacaacgatactacattcgtgtgtgtctgcttttaaacttggctgggctatcagacc

SEQ ID NO: 229108 - DNA, 120 bp, Artificial Sequence
  ENSG00000118971_48 (sequence is synthesized)
ctattctcggctcaggttttgagaagccatcagcaaatgtgtacgtgcatgctgtagctgcagcctgcatcccttcgcctgcagcctactttggggaaataaagtgccttactgactgta

SEQ ID NO: 229109 - DNA, 120 bp, Artificial Sequence
  ENSG00000118971_49 (sequence is synthesized)
gccattacagtatccaatgtcttttgacaggtgcctgtccttgaaaaacaaagtttctatttttatttttaattggtttagttcttaactgctggccaactcttacatccccagcaaatc

SEQ ID NO: 229110 - DNA, 120 bp, Artificial Sequence
  ENSG00000118971_50 (sequence is synthesized)
atcgggccattggattttttccattatgttcatcacccttatatcatgtacctcagatctctctctctctcctctctctcagttatgtagtttcttgtcttggacttttttttttctttt

SEQ ID NO: 229111 - DNA, 120 bp, Artificial Sequence
  ENSG00000118971_51 (sequence is synthesized)
ctttttctttttttttttgctttaaaacaagtgtgatgccatatcaagtccatgttattctctcacagtgtactctataagaggtgtgggtgtctgtttggtcaggatgttagaaagtgc

SEQ ID NO: 229112 - DNA, 120 bp, Artificial Sequence
  ENSG00000118971_52 (sequence is synthesized)
tgataagtagcatgatcagtgtatgcgaaaaggtttttaggaagtatggcaaaaatgttgtattggctatgatggtgacatgatatagtcagctgccttttaagaggtcttatctgttca

SEQ ID NO: 229113 - DNA, 120 bp, Artificial Sequence
  ENSG00000118971_53 (sequence is synthesized)
gtgttaagtgatttaaaaaaataataacctgttttctgactagtttaaagatggatttgaaaatggttttgaatgcaattaggttatgctatttggacaataaactcaccttgacctaaa

SEQ ID NO: 229114 - DNA, 120 bp, Artificial Sequence
  ENSG00000118971_54 (sequence is synthesized)
aaaactggtctggagcccaacccccagccccctacaccaggtcagcctgtggaatttagattctcctcttctcttcctgccttcccctccaggagtgggaactggtggtgctggggaagt

SEQ ID NO: 229115 - DNA, 120 bp, Artificial Sequence
  ENSG00000118971_55 (sequence is synthesized)
gggaaggagacgacggatttgattatgttgtgtcagaggtatttttctggtttgtttcctaagatcgacatccaagggagtgcaaagttcagcaggtgacaccccctcttaaggttctga

SEQ ID NO: 229116 - DNA, 120 bp, Artificial Sequence
  ENSG00000118971_56 (sequence is synthesized)
agcgtgccttctgcaccagcatattgcttgttggcatttttgatcaagagacttaacagactgctgagaaatttgtacctggtttttatttgttaaaataatattacgtacaaattttac

SEQ ID NO: 229117 - DNA, 120 bp, Artificial Sequence
  ENSG00000118971_57 (sequence is synthesized)
cccgactccatttcagcctcgttcagggtggcacggagactcctgctgctgcgtcacgtctgtcatgttcagcactcttcccagacacacagtcttgactaaagattgtcaggatcttga

SEQ ID NO: 229118 - DNA, 120 bp, Artificial Sequence
  ENSG00000118972_0 (sequence is synthesized)
atccagtctaggatcctcacaccagctacttgcaagggagaaggaaaaggccagtaaggcctgggccaggagagtcccgacaggagtgtcaggtttcaatctcagcaccagccactcaga

SEQ ID NO: 229119 - DNA, 120 bp, Artificial Sequence
  ENSG00000118972_1 (sequence is synthesized)
gcagggcacgatgttgggggcccgcctcaggctctgggtctgtgccttgtgcagcgtctgcagcatgagcgtcctcagagcctatcccaatgcctccccactgctcggctccagctgggg

SEQ ID NO: 229120 - DNA, 120 bp, Artificial Sequence
  ENSG00000118972_2 (sequence is synthesized)
tggcctgatccacctgtacacagccacagccaggaacagctaccacctgcagatccacaagaatggccatgtggatggcgcaccccatcagaccatctacagtgccctgatgatcagatc

SEQ ID NO: 229121 - DNA, 120 bp, Artificial Sequence
  ENSG00000118972_3 (sequence is synthesized)
agaggatgctggctttgtggtgattacaggtgtgatgagcagaagatacctctgcatggatttcagaggcaacatttttggatcacactatttcgacccggagaactgcaggttccaaca

SEQ ID NO: 229122 - DNA, 120 bp, Artificial Sequence
  ENSG00000118972_4 (sequence is synthesized)
ccagacgctggaaaacgggtacgacgtctaccactctcctcagtatcacttcctggtcagtctgggccgggcgaagagagccttcctgccaggcatgaacccacccccgtactcccagtt

SEQ ID NO: 229123 - DNA, 120 bp, Artificial Sequence
  ENSG00000118972_5 (sequence is synthesized)
cctgtcccggaggaacgagatccccctaattcacttcaacacccccataccacggcggcacacccggagcgccgaggacgactcggagcgggaccccctgaacgtgctgaagccccgggc

SEQ ID NO: 229124 - DNA, 120 bp, Artificial Sequence
  ENSG00000118972_6 (sequence is synthesized)
ccggatgaccccggccccggcctcctgttcacaggagctcccgagcgccgaggacaacagcccgatggccagtgacccattaggggtggtcaggggcggtcgagtgaacacgcacgctgg

SEQ ID NO: 229125 - DNA, 120 bp, Artificial Sequence
  ENSG00000118972_7 (sequence is synthesized)
gggaacgggcccggaaggctgccgccccttcgccaagttcatctagggtcgctggaagggcaccctctttaacccatccctcagcaaacgcagctcttcccaaggaccaggtcccttgac

SEQ ID NO: 229126 - DNA, 120 bp, Artificial Sequence
  ENSG00000118972_8 (sequence is synthesized)
gttccgaggatgggaaaggtgacaggggcatgtatggaatttgctgcttctctggggtcccttccacaggaggtcctgtgagaaccaacctttgaggcccaagtcatggggtttcaccgc

SEQ ID NO: 229127 - DNA, 120 bp, Artificial Sequence
  ENSG00000118972_9 (sequence is synthesized)
cttcctcactccatatagaacacctttcccaataggaaaccccaacaggtaaactagaaatttccccttcatgaaggtagagagaaggggtctctcccaacatatttctcttccttgtgc

SEQ ID NO: 229128 - DNA, 120 bp, Artificial Sequence
  ENSG00000118972_10 (sequence is synthesized)
aaaaaaaaaaaaaaaaaaaaaagcagtgggttcctgagctcaagactttgaaggtgtagggaagaggaaatcggagatcccagaagcttctccactgccctatgcatttatgttagatgc

SEQ ID NO: 229129 - DNA, 120 bp, Artificial Sequence
  ENSG00000118972_11 (sequence is synthesized)
agcttctccactgccctatgcatttatgttagatgccccgatcccactggcatttgagtgtgcaaaccttgacattaacagctgaatggggcaagttgatgaaaacactactttcaagcc

SEQ ID NO: 229130 - DNA, 120 bp, Artificial Sequence
  ENSG00000118972_12 (sequence is synthesized)
cgttcttccttgagcatctctggggaagagctgtcaaaagactggtggtaggctggtgaaaacttgacagctagacttgatgcttgctgaaatgaggcaggaatcataatagaaaactca

SEQ ID NO: 229131 - DNA, 120 bp, Artificial Sequence
  ENSG00000118972_13 (sequence is synthesized)
gcctccctacagggtgagcaccttctgtctcgctgtctccctctgtgcagccacagccagagggcccagaatggccccactctgttcccaagcagttcatgatacagcctcaccttttgg

SEQ ID NO: 229132 - DNA, 120 bp, Artificial Sequence
  ENSG00000118972_14 (sequence is synthesized)
ccccatctctggtttttgaaaatttggtctaaggaataaatagcttttacactggctcacgaaaatctgccctgctagaatttgcttttcaaaatggaaataaattccaactctcctaag

SEQ ID NO: 229133 - DNA, 120 bp, Artificial Sequence
  ENSG00000118972_15 (sequence is synthesized)
aggcatttaattaaggctctacttccaggttgagtaggaatccattctgaacaaactacaaaaatgtgactgggaagggggctttgagagactgggactgctctgggttaggttttctgt

SEQ ID NO: 229134 - DNA, 120 bp, Artificial Sequence
  ENSG00000118972_16 (sequence is synthesized)
ggactgaaaaatcgtgtccttttctctaaatgaagtggcatcaaggactcagggggaaagaaatcaggggacatgttatagaagttatgaaaagacaaccacatggtcaggctcttgtct

SEQ ID NO: 229135 - DNA, 120 bp, Artificial Sequence
  ENSG00000118972_17 (sequence is synthesized)
gtggtctctagggctctgcagcagcagtggctcttcgattagttaaaactctcctaggctgacacatctgggtctcaatccccttggaaattcttggtgcattaaatgaagccttacccc

SEQ ID NO: 229136 - DNA, 120 bp, Artificial Sequence
  ENSG00000118972_18 (sequence is synthesized)
attactgcggttcttcctgtaagggggctccattttcctccctctctttaaatgaccacctaaaggacagtatattaacaagcaaagtcgattcaacaacagcttcttcccagtcacttt

SEQ ID NO: 229137 - DNA, 120 bp, Artificial Sequence
  ENSG00000118972_19 (sequence is synthesized)
tttttttctcactgccatcacatactaaccttatactttgatctattctttttggttatgagagaaatgttgggcaactgtttttacctgatggttttaagctgaacttgaaggactggt

SEQ ID NO: 229138 - DNA, 120 bp, Artificial Sequence
  ENSG00000118972_20 (sequence is synthesized)
tcctattctgaaacagtaaaactatgtataatagtatatagccatgcatggcaaatattttaatatttctgttttcatttcctgttggaaatattatcctgcataatagctattggaggc

SEQ ID NO: 229139 - DNA, 120 bp, Artificial Sequence
  ENSG00000118972_21 (sequence is synthesized)
tcctcagtgaaagatcccaaaaggattttggtggaaaactagttgtaatctcacaaactcaacactaccatcaggggttttctttatggcaaagccaaaatagctcctacaatttcttat

SEQ ID NO: 229140 - DNA, 120 bp, Artificial Sequence
  ENSG00000118972_22 (sequence is synthesized)
atccctcgtcatgtggcagtatttatttatttatttggaagtttgcctatccttctatatttatagatatttataaaaatgtaacccctttttcctttcttctgtttaaaataaaaataa

SEQ ID NO: 229141 - DNA, 120 bp, Artificial Sequence
  ENSG00000118972_23 (sequence is synthesized)
aatttatctcagcttctgttagcttatcctctttgtagtactacttaaaagcatgtcggaatataagaataaaaaggattatgggaggggaacattagggaaatccagagaaggcaaaat

SEQ ID NO: 229142 - DNA, 120 bp, Artificial Sequence
  ENSG00000118972_24 (sequence is synthesized)
tgaaaaaaagattttagaattttaaaattttcaaagatttcttccattcataaggagactcaatgattttaattgatctagacagaattatttaagttttatcaatattggatttctggt

SEQ ID NO: 229143 - DNA, 120 bp, Artificial Sequence
  ENSG00000118972_25 (sequence is synthesized)
attacaggcatgagccaccgcacccagtcgaaaccatttcttacacgttccttatatttctccaaaggtttaccacaaaactagccatacatttgagacacataggcagacaccactgtg

SEQ ID NO: 229144 - DNA, 120 bp, Artificial Sequence
  ENSG00000118972_26 (sequence is synthesized)
gacaccactgtggaggaatttaagcatcctttgcgcctgtcataccccagtccactttctgggaagctttcctcaaggttcccctcagccaaactttgaaacaaattaacttctctcttt

SEQ ID NO: 229145 - DNA, 120 bp, Artificial Sequence
  ENSG00000118972_27 (sequence is synthesized)
ggccctcttcctttctcacctttctggggcttgtctccaccctcattccctctgttccgcgtcagtccaatttcagtccctatcatgatttctactcagctagtacctaattattgctgc

SEQ ID NO: 229146 - DNA, 120 bp, Artificial Sequence
  ENSG00000118972_28 (sequence is synthesized)
ttattttcctcaaaggtccttgtattgagcctgcatgggataggagaagagctttggcctttaaatcacccccacaaggctccatcacttgctaggcacaaacattgggcatttacaacc

SEQ ID NO: 229147 - DNA, 120 bp, Artificial Sequence
  ENSG00000118972_29 (sequence is synthesized)
tctccaagctacagttgcagaagaggaattagaatccctgcatgggattctagctgcctccctggaggctatgaggtcagatgagatgcacctagaaattctgtgataggcaactggaag

SEQ ID NO: 229148 - DNA, 120 bp, Artificial Sequence
  ENSG00000118972_30 (sequence is synthesized)
tagccccaaagacctaaagtaatgatttttaacagaaaatgtcaggtaattaaataacatgtggggaagaaatctcgctgaattatcacgcatgttacaccagtatatgatctaattgtg

SEQ ID NO: 229149 - DNA, 120 bp, Artificial Sequence
  ENSG00000118972_31 (sequence is synthesized)
cctttgccacaaaacagtaatttaaagccattatcaattacttaagaggtaggtcgtgtgaatgggtttcaggcccttgtcggagactagtttttgagaggggacactgaaagtccatga

SEQ ID NO: 229150 - DNA, 120 bp, Artificial Sequence
  ENSG00000118972_32 (sequence is synthesized)
ggggctgcacctggagaggtcaccaccaagtgagaaaatgacaaagaaccaacccaagaagagccaagaagaaaattccatccgtcacttatattgattcaacataaacagttataccct

SEQ ID NO: 229151 - DNA, 120 bp, Artificial Sequence
  ENSG00000118972_33 (sequence is synthesized)
taggtaaactcagctaaagcaagttaaatggaatacatgctgtaatagaggtgaaggcattgtcctgaggagctgagaaggaagaacaactgattttgaatggaaagatgaggaaagtct

SEQ ID NO: 229152 - DNA, 120 bp, Artificial Sequence
  ENSG00000118972_34 (sequence is synthesized)
tcatagagatggtgacgcctgagcctggtcttgaagagtgagtgacttcaataagtagagaaggaagagggagatcaactctactaccattctgtacacatactgggtgttgactgatgt

SEQ ID NO: 229153 - DNA, 120 bp, Artificial Sequence
  ENSG00000118972_35 (sequence is synthesized)
attagacaattacacagacatccaggaggagaatcagactctatggcaagctggatccttgaaagacatctcagcatagatttaaaaatcacaaagtagaaggcatggaagaatgtgact

SEQ ID NO: 229154 - DNA, 120 bp, Artificial Sequence
  ENSG00000118972_36 (sequence is synthesized)
atcaccacaaacattcaaaggtattagtaaggcaaaagggaaaataaagacggtccaggtagagagagagaaacatgtgttcagcacaggtagaagaattccaggagctcagagtgcccc

SEQ ID NO: 229155 - DNA, 120 bp, Artificial Sequence
  ENSG00000118972_37 (sequence is synthesized)
atacaggcaacaagatgaagcaggaggtgaatgactgtatgtgtgttgggggcaagagaggatgtcagaagaaacgctgaatatgcagaaatgaggctgaatttaagagtgctgaagtta

SEQ ID NO: 229156 - DNA, 120 bp, Artificial Sequence
  ENSG00000118972_38 (sequence is synthesized)
tcaccacccttaaaatcaatccagggaggtttcatgaaggtaggttttcaggaggtgcttgaaggtgggaattggatggcaatgagtctttgccctgcctgtttttctccataggtgccc

SEQ ID NO: 229157 - DNA, 120 bp, Artificial Sequence
  ENSG00000118985_0 (sequence is synthesized)
agtatatgacagtacgtcagcagcgggatggccctagcagtggcggcggctgcagaagcccaagcagccgcggccgcagtggaggctagagccggagcggcggcggcggcggcaccccgg

SEQ ID NO: 229158 - DNA, 120 bp, Artificial Sequence
  ENSG00000118985_1 (sequence is synthesized)
ggagtttaagatggcggcgggggggacagggggcctgcgggaggagcagcgctatgggctgtcgtgcggacggctggggcaggacaacatcaccgtactgcatgtgaagctcaccgagac

SEQ ID NO: 229159 - DNA, 120 bp, Artificial Sequence
  ENSG00000118985_2 (sequence is synthesized)
ggcgatccgggcgctcgagacttaccagagccacaagaatttaattccttttcgaccttcaatccagttccaaggactccacgggcttgtcaaaattcccaaaaatgatcccctcaatga

SEQ ID NO: 229160 - DNA, 120 bp, Artificial Sequence
  ENSG00000118985_3 (sequence is synthesized)
agttcataactttaacttttatttgtcaaatgtgggcaaagacaaccctcagggcagctttgactgcatccagcaaacattctccagctctggagcctcccagctcaattgcctgggatt

SEQ ID NO: 229161 - DNA, 120 bp, Artificial Sequence
  ENSG00000118985_4 (sequence is synthesized)
tatacaagataaaattacagtgtgtgcaacaaacgactcgtatcagatgacacgagaaagaatgacccaggcagaggaggaatcccgcaaccgaagcacaaaagttatcaaacccggtgg

SEQ ID NO: 229162 - DNA, 120 bp, Artificial Sequence
  ENSG00000118985_5 (sequence is synthesized)
accatatgtagggaaaagagtgcaaattcggaaagcacctcaagctgtttcagatacagttcctgagaggaaaaggtcaacccccatgaaccctgcaaatacaattcgaaagacacatag

SEQ ID NO: 229163 - DNA, 120 bp, Artificial Sequence
  ENSG00000118985_6 (sequence is synthesized)
cagcagcaccatctctcagaggccatacagggacagggtgattcacttactggccctgaaggcctacaagaaaccggagctacttgctagactccagaaagatggtgtcaatcaaaaaga

SEQ ID NO: 229164 - DNA, 120 bp, Artificial Sequence
  ENSG00000118985_7 (sequence is synthesized)
caagaactccctgggagcaattctgcaacaggtagccaatctgaattctaaggacctctcatataccttaaaggattatgtttttaaagagcttcaaagagactggcctggatacagtga

SEQ ID NO: 229165 - DNA, 120 bp, Artificial Sequence
  ENSG00000118985_8 (sequence is synthesized)
aatagacagacggtcattggagtcagtgctctctagaaaactaaatccgtctcagaatgctgcaggcaccagccgttcagaatctcctgtatgttctagtagagacgctgtatcttctcc

SEQ ID NO: 229166 - DNA, 120 bp, Artificial Sequence
  ENSG00000118985_9 (sequence is synthesized)
tcagaaacggcttttggattcagagtttattgatcctttaatgaataaaaaagcccgaatatctcacctgacgaacagagtaccaccaacactaaatggtcatttgaatcccaccagtga

SEQ ID NO: 229167 - DNA, 120 bp, Artificial Sequence
  ENSG00000118985_10 (sequence is synthesized)
aaaatctgctgcaggcctcccgctgccccctgcggctgctgccatccctacccctccaccgctgccttcaacctatctgcccatctcacatcctcctcagattgtaaattctaactccaa

SEQ ID NO: 229168 - DNA, 120 bp, Artificial Sequence
  ENSG00000118985_11 (sequence is synthesized)
ctcccctagcactccagaaggccgggggactcaagacctacctgttgacagttttagtcaaaacgatagtatctatgaggaccagcaagacaaatatacctctaggacttctctggaaac

SEQ ID NO: 229169 - DNA, 120 bp, Artificial Sequence
  ENSG00000118985_12 (sequence is synthesized)
cttaccccctggttccgttctactaaagtgtccaaagcctatggaagaaaaccattcaatgtctcacaaaaagtccaaaaagaagtctaaaaaacataaggaaaaggaccaaataaaaaa

SEQ ID NO: 229170 - DNA, 120 bp, Artificial Sequence
  ENSG00000118985_13 (sequence is synthesized)
gcacgacattgagactattgaggaaaaggaggaagatcttaagagagaagaggaaattgccaagctaaataactccagtccaaattccagtggaggagttaaagaggattgcactgcctc

SEQ ID NO: 229171 - DNA, 120 bp, Artificial Sequence
  ENSG00000118985_14 (sequence is synthesized)
catggaaccttcagcaattgaactcccagattatttgataaaatatatcgctatcgtctcctatgagcaacgccagaattataaggatgacttcaatgcagagtatgatgagtacagagc

SEQ ID NO: 229172 - DNA, 120 bp, Artificial Sequence
  ENSG00000118985_15 (sequence is synthesized)
tttgcatgccaggatggagactgtagctagaagatttatcaaactagatgcacaaagaaagcgcctttctccaggctcaaaagagtatcagaatgttcatgaagaagtcttacaagaata

SEQ ID NO: 229173 - DNA, 120 bp, Artificial Sequence
  ENSG00000118985_16 (sequence is synthesized)
tcagaagataaagcagtctagtcccaattaccatgaagaaaaatacagatgtgaatatcttcataacaagctggctcacatcaaaaggctaataggtgaatttgaccaacagcaagcaga

SEQ ID NO: 229174 - DNA, 120 bp, Artificial Sequence
  ENSG00000118985_17 (sequence is synthesized)
gtcatggtcctagaactctgcttggaccagaagatgtgaataaacttaagcttatttatttaaaattccaaatgagttgctctagattctaaaaaggtgaaactttggctgttgaaagtt

SEQ ID NO: 229175 - DNA, 120 bp, Artificial Sequence
  ENSG00000118985_18 (sequence is synthesized)
tcagtattagtaaacttgagttactttttcttttccattttactttgcttccctgcatttcgaagctgctctttctggtcctccccaccaccccacccccaagacttgtgtttgttaata

SEQ ID NO: 229176 - DNA, 120 bp, Artificial Sequence
  ENSG00000118985_19 (sequence is synthesized)
gaaataatttttttaggtattggggatccattgtctatatttcaaatcagttttttttcctcaaaaacttgtgtttgttattagaaatgattttttagatattggggatccagtgtccac

SEQ ID NO: 229177 - DNA, 120 bp, Artificial Sequence
  ENSG00000118985_20 (sequence is synthesized)
acttaaaagttgtatgtgtttaaaaaacaacaacagtaatgtgcaaggtgaaatgcttttggataaacgtaagcctattttctgacgtttcttaatgcaaactctttgccttaaatggta

SEQ ID NO: 229178 - DNA, 120 bp, Artificial Sequence
  ENSG00000118985_21 (sequence is synthesized)
gaatatttagaaatttgcacaaaattaaaaaaataaacattgtcttggagggttaaaaaatagaaaggtgtatgtgtatagattcacatacacatatgtatatacaggctgacttgatct

SEQ ID NO: 229179 - DNA, 120 bp, Artificial Sequence
  ENSG00000118985_22 (sequence is synthesized)
agaacattaaatccgccctgcaagttaaccccccattgcaatggttgccttaaggtgtttgctagttgtgtacatagtgtggttaatcattagctacactgcttcccacttgattagagc

SEQ ID NO: 229180 - DNA, 120 bp, Artificial Sequence
  ENSG00000118985_23 (sequence is synthesized)
aatgggaagcatactgtggcctaccagcatctggaagtgtgtgctcgatctgtatgtgtgcagaggtggtgtggatgtgagcgtgcatgaaggaaaaaaagctgctactcctagtaggcc

SEQ ID NO: 229181 - DNA, 120 bp, Artificial Sequence
  ENSG00000118985_24 (sequence is synthesized)
cttctatcaaattgctacttttgttgtggaagacaaaagcatttccatttcaacgagtttgtcagctttattaatgttgggcaaaaattgatatgtcatgaaaatgaaacagatctatag

SEQ ID NO: 229182 - DNA, 120 bp, Artificial Sequence
  ENSG00000118985_25 (sequence is synthesized)
ttttgggacaaaattataaaatgaaatgtgtaggtaacctatttatatactgctataaagtattttttgaagagagatatgcaaagaagctattacctacataagaggtatatttaaaga

SEQ ID NO: 229183 - DNA, 120 bp, Artificial Sequence
  ENSG00000118985_26 (sequence is synthesized)
ttttttttttcatcctggtgccaggaatataaaaaagagtggatatatttaaccataacatactgtgattcatcaaacagcacaaactttcatttcatggagtttatctgttgacattga

SEQ ID NO: 229184 - DNA, 120 bp, Artificial Sequence
  ENSG00000118985_27 (sequence is synthesized)
tttaaactgtcacttgttttatcatgtgggaacataagttatgtggtcaaaaatataaggattttgaattaatgttgattcaagttgtattgtcttattgtattgtcttttcaaagtgct

SEQ ID NO: 229185 - DNA, 120 bp, Artificial Sequence
  ENSG00000118985_28 (sequence is synthesized)
gccagttgaaaagggaagcattatgtttacaaatctgttttgaaatgtttgccaaaattttggtagtgtctttaataaagatgtttgtctccagcatccagaaaaataaatgaataactt

SEQ ID NO: 229186 - DNA, 120 bp, Artificial Sequence
  ENSG00000118985_29 (sequence is synthesized)
tgttgtgtatcactgtaaaccagaaaaatgttggttatctagaaaacttgagagagcatgtagattaacttttctctttggagttctaaaacattaactggaaagattagataatatact

SEQ ID NO: 229187 - DNA, 120 bp, Artificial Sequence
  ENSG00000118985_30 (sequence is synthesized)
aaatgtatacagaagtatacagactatacaaagactgaaacaagtcccttttgcactacaactctataacattaccgcagaaattttggttctatgtagcatggacctcctaaggaattc

SEQ ID NO: 229188 - DNA, 120 bp, Artificial Sequence
  ENSG00000118985_31 (sequence is synthesized)
tgtttcttttagcattgagatccctggtgctctttttttacctcagaattggtacaatcattattaaacgttaatttatttcaaactttttaattgaaaaaaggaaagggaaacttaatt

SEQ ID NO: 229189 - DNA, 120 bp, Artificial Sequence
  ENSG00000118985_32 (sequence is synthesized)
ggggataaattcaggcatcatattattatgatagagtctcctgagtggttcgtctataggtaatgaactcattggtgttatttcttggacatcttggccttttaatcaaagactgtgtgc

SEQ ID NO: 229190 - DNA, 120 bp, Artificial Sequence
  ENSG00000118985_33 (sequence is synthesized)
tgctatttgctatgagcaaggtttctcaaaagcaaaaggtgcttggaccatttggatcacctgagttagaatctctaggtatagggcccaagtatctgcattttcacaggtttcttgtag

SEQ ID NO: 229191 - DNA, 120 bp, Artificial Sequence
  ENSG00000118985_34 (sequence is synthesized)
gtgactttctgcaagctaaagtatgagaaccattggcttggatgtagttctaaacttttaggtctgtaaatcttgaaatcttgaactgaaggtcaactattggcttttttttttttttaa

SEQ ID NO: 229192 - DNA, 120 bp, Artificial Sequence
  ENSG00000118985_35 (sequence is synthesized)
tgtccatcatgtcagcaggtgcaaatcacttttcccctttgcatgatctgaggcacctcctcagttgtttcactgccaactcttgtttcagaacctgtttacaaacaagccttccagttg

SEQ ID NO: 229193 - DNA, 120 bp, Artificial Sequence
  ENSG00000118985_36 (sequence is synthesized)
gtgaatggttagccattggagctcctaccctgtacatcagcacatcttctggtttacaagttgggtaacaatgaaagctggagatgctaaatggaaatccagcattgcatacccttagac

SEQ ID NO: 229194 - DNA, 120 bp, Artificial Sequence
  ENSG00000118985_37 (sequence is synthesized)
ctgatcacataccagtaaaagccttaatttagatgttagttgtatgtgttggacagatccttgcaaaagtgtgtctgtctattagttgtaaatttgaaaattataaatctctgaatctgc

SEQ ID NO: 229195 - DNA, 120 bp, Artificial Sequence
  ENSG00000118985_38 (sequence is synthesized)
tactatccaagtttcatcccttttgaagatgaggcatgagcctattaaaatatttataatcatttttcgtcccctactgcaagacttttagattcttacaaatgattactacaggaatag

SEQ ID NO: 229196 - DNA, 120 bp, Artificial Sequence
  ENSG00000118985_39 (sequence is synthesized)
tggccacttaatgtcagttactccggtggaagaatttatctagttttttttcttttcttttttggaaggatggtgtgaaaaatagcaagattagagaatgagttgtatagttttttctat

SEQ ID NO: 229197 - DNA, 120 bp, Artificial Sequence
  ENSG00000118985_40 (sequence is synthesized)
cacatttcatctaaaatgatttgaaggacttttgaagatttttaccaacatccttaaatcaactccaggttggatgaacaactgatttaaaacaaactaagagaacattaactagatgtg

SEQ ID NO: 229198 - DNA, 120 bp, Artificial Sequence
  ENSG00000118985_41 (sequence is synthesized)
ggctttttaaaatatataggtattgcatttcctaccttgttatttattccactttgaatactttagagggcttaactttcaactctttaaggtagtaatggatagttttatacttgttct

SEQ ID NO: 229199 - DNA, 120 bp, Artificial Sequence
  ENSG00000118985_42 (sequence is synthesized)
cacaaaattgttatggtcagtttatatcattgctccatgcattgattataaaaattcagtattaattttttctgatcttataagctttataggagttttcttttctcttataaagtgttt

SEQ ID NO: 229200 - DNA, 120 bp, Artificial Sequence
  ENSG00000118985_43 (sequence is synthesized)
caccttatgtaaaacaaatgcctgcttgcatattggaagatgttgaaattagttttagacaaaagtggtccatcaattcagacactctgcttggatgccttacccttttcattagtgcat

SEQ ID NO: 229201 - DNA, 120 bp, Artificial Sequence
  ENSG00000118985_44 (sequence is synthesized)
tctttgcttctgaaacttggcagaaactcgttagccagtccactgcctttctgacaatgtgtggagtcacgtatgcttggtatatgcctttactacttttaaagttctacagtttattac

SEQ ID NO: 229202 - DNA, 120 bp, Artificial Sequence
  ENSG00000118985_45 (sequence is synthesized)
ttgcccaagtgttactaaatccttttcttatgtgtactggatggagaaaaaattatagccagcactttgagaggaaagttttcagaaacaatattaactggcactactaactgaaggcca

SEQ ID NO: 229203 - DNA, 120 bp, Artificial Sequence
  ENSG00000118985_46 (sequence is synthesized)
caggagatgctatcaatgttatttgtaatctgaagattgaacaaggctgtgaggctcatttcaaactattttgaggtgttaaaatatatatatgctgtttctcagctgttccactcaaac

SEQ ID NO: 229204 - DNA, 120 bp, Artificial Sequence
  ENSG00000118985_47 (sequence is synthesized)
cgtgttaggactctcaaaggtaaaatgtcacaggggcttttcagttgttacagagctcagcagctgtggttgcccctgttctacaccaatttcagttcaataaaaatgttaactttgcaa

SEQ ID NO: 229205 - DNA, 120 bp, Artificial Sequence
  ENSG00000118985_48 (sequence is synthesized)
atattttaccttctttctttccctgccctgctcaacctcagccatcacagtggcctttagagtaagtactcttgcagaccagcctcgctgctgctttaggaaactaaatatttgaaatag

SEQ ID NO: 229206 - DNA, 120 bp, Artificial Sequence
  ENSG00000118985_49 (sequence is synthesized)
atgaaaacacagaaactagttttcagaacattttggataacatggtgagaaaaacaaagttatttgttctcttcagactgccagtaaattgaagagcatattttaaagttctatgacttt

SEQ ID NO: 229207 - DNA, 120 bp, Artificial Sequence
  ENSG00000118985_50 (sequence is synthesized)
cctaaatcctgaatcttcgttggctacttactattattttatagtactgggatctggtcacattactgcgtgaagttgcaatcgtggtaccgttgtgttttctttgtcactagatgatgt

SEQ ID NO: 229208 - DNA, 120 bp, Artificial Sequence
  ENSG00000118985_51 (sequence is synthesized)
aatttcagtgatggatactatggttcttgttttgcctttttgtagggctatttttatagtaaaatctattagtagaatttatgggttgataatctcattgttgtagattttgcttacatt

SEQ ID NO: 229209 - DNA, 120 bp, Artificial Sequence
  ENSG00000118985_52 (sequence is synthesized)
gcttgcctgcccaaagccatctggttatggctgagcttagcctagaatttaggtcttggcttccagcccagaactttctccactacacagcactgcttgtcagagtacttaatgtctacc

SEQ ID NO: 229210 - DNA, 120 bp, Artificial Sequence
  ENSG00000118985_53 (sequence is synthesized)
ttgctttccatttttaaagtttacattttgttgtaagattatctactttccaatttggtcactaactagaagacttacccagtcccaaacaattatcagattatatggaaaattgaagat

SEQ ID NO: 229211 - DNA, 120 bp, Artificial Sequence
  ENSG00000118985_54 (sequence is synthesized)
acttaattttgtctgtcaacatgttccagaagaatattttttggggaaaatggatttacaatcaacaaataaacaaaaatgatggcatgtttccatgttttctttttaattggatcctta

SEQ ID NO: 229212 - DNA, 120 bp, Artificial Sequence
  ENSG00000118997_0 (sequence is synthesized)
agacggctctggtgcggagggagctgagaccgctgcaagtcccggggccctgcctctatcgtcctaggggttccgcgggcaggagcaacccagaagcaccggtgaggccagcgcgtcctc

SEQ ID NO: 229213 - DNA, 120 bp, Artificial Sequence
  ENSG00000118997_1 (sequence is synthesized)
gcagccatgagcagtgagcaggataaatcggccagcaaagaaaaatccaagaaaccagtaagatttctaccacagctgtctatggagaaattagccagcaaagaaaagttcaaggcacca

SEQ ID NO: 229214 - DNA, 120 bp, Artificial Sequence
  ENSG00000118997_2 (sequence is synthesized)
gcaagagctttaccacagctgtctatggtgagtacaaagccccactggcagcaggcagctccatcattccatttgagtgtaaagcaggatgatgagagtccagaaccatttagtgttaaa

SEQ ID NO: 229215 - DNA, 120 bp, Artificial Sequence
  ENSG00000118997_3 (sequence is synthesized)
aatgaacagtcccatgctgaatacatggaacgttttggaaaaaagggcaaattaccccaccaagttgatgatagttatgttggaccatctacttccaaatcaaagggcaaatctccacat

SEQ ID NO: 229216 - DNA, 120 bp, Artificial Sequence
  ENSG00000118997_4 (sequence is synthesized)
aaagaacgagaaaactttagaagtactcttgttaatgtcattatgcaacaagatgctgacttagactcagctgtccctgatggaagcacaattccaaaaccgaccgcttctgctatagag

SEQ ID NO: 229217 - DNA, 120 bp, Artificial Sequence
  ENSG00000118997_5 (sequence is synthesized)
aaagacatcttgagatattactattatattcaccatggaattgatacagaccatgtagccccaatggaagattcttggctagaacacgtactggatttagttccacaacatctgaaagtc

SEQ ID NO: 229218 - DNA, 120 bp, Artificial Sequence
  ENSG00000118997_6 (sequence is synthesized)
ttcactgacagcatagttacattatctgatgaaatgagagaggattatcttcttagtgtaaggaaatccatagttgattttgttttaaaagatcctcgagagaaaggagatgataagaag

SEQ ID NO: 229219 - DNA, 120 bp, Artificial Sequence
  ENSG00000118997_7 (sequence is synthesized)
acagatgaacttccagcccatcgtgctgaaatggaaattctgccaaaaccttggaggaaatcttttttagctgcaagcagttatattagggatcacttgaatgcaatgaaccccacaatg

SEQ ID NO: 229220 - DNA, 120 bp, Artificial Sequence
  ENSG00000118997_8 (sequence is synthesized)
ctggctgtactagatttgtggcacactaattttaaaaaattacgtttagttgatatcaaagaatttcataattgccaggatgcattagagctgtcaagttttcagaacattatcatgaga

SEQ ID NO: 229221 - DNA, 120 bp, Artificial Sequence
  ENSG00000118997_9 (sequence is synthesized)
cacatggactctgccaaagagactctacttaaaatgtggtttccagaagtgcagaatatttattaccaaggtaataaaaaaaagcaattgccaactggtgacagcagtgccaaattggaa

SEQ ID NO: 229222 - DNA, 120 bp, Artificial Sequence
  ENSG00000118997_10 (sequence is synthesized)
tcttttttcaactgtgctgctgcacttatgactttacagctgcaggacctcactttagtctccatgcaagatttcacggacttaattgcacaacccccagattctgttagagcttttgaa

SEQ ID NO: 229223 - DNA, 120 bp, Artificial Sequence
  ENSG00000118997_11 (sequence is synthesized)
catccaggtttcatcatgaggctgattcttgataatgacaccattaagtttgaacctgagttgagtgactatatagatatctttctaaatgtttatgacgtcatgattaaagctgtcagt

SEQ ID NO: 229224 - DNA, 120 bp, Artificial Sequence
  ENSG00000118997_12 (sequence is synthesized)
tttgtgccaagagttgagacaaaattgtattccaagtgggaaagtaagtctaaaccaacaaccttgaagcccataattctgaatgaaattgtagatgctcacaaagaaaagatcaaggaa

SEQ ID NO: 229225 - DNA, 120 bp, Artificial Sequence
  ENSG00000118997_13 (sequence is synthesized)
gttattatgaaagagagtgtggcacctactgagcacctcagactctatgacaagtatgactttttaattaccagaaaagctgagcgagatgttgataacttcctcgcagaaaatcatagt

SEQ ID NO: 229226 - DNA, 120 bp, Artificial Sequence
  ENSG00000118997_14 (sequence is synthesized)
tatgaaaaaataatagatgaaatttgcaaataccagaaactaatagaggaaatacagtacacatccataaagactattcgtttaggaatgtttgaaatgcactgtgaggaattaatcaga

SEQ ID NO: 229227 - DNA, 120 bp, Artificial Sequence
  ENSG00000118997_15 (sequence is synthesized)
gctttggtgaagcgagcagatattatttgtgggaaacttctagctaaaatgttcagagatcatcaggaagtaaatacaagattatgcgatgaatttgagaggatagctgaaaaagctctt

SEQ ID NO: 229228 - DNA, 120 bp, Artificial Sequence
  ENSG00000118997_16 (sequence is synthesized)
agcactcctccaaatacagcagaactaatggaaatgaaggcttacattcagaaagtggaggtaactgatatgattgaactagaacagagattagtggattccaaaaactgcctcgccttc

SEQ ID NO: 229229 - DNA, 120 bp, Artificial Sequence
  ENSG00000118997_17 (sequence is synthesized)
ctcatcgagtatgtcaacttttctccagcagacatgaggctaaataatagtgttttccagtggtatggaaggatgggagaaatttttgaagaacacaggaaaatcattaaagagaaaata

SEQ ID NO: 229230 - DNA, 120 bp, Artificial Sequence
  ENSG00000118997_18 (sequence is synthesized)
gaacaatatcaagaaggtctgaagttacggtgtgaacggtttgtggaggaattggagagttatgctaagcaatcagaagaattttattcatttggagatcttcaggatgttcagcggtac

SEQ ID NO: 229231 - DNA, 120 bp, Artificial Sequence
  ENSG00000118997_19 (sequence is synthesized)
ctaaaaaaggctcaaatactgaatggaaagttggatttagctgcagataagattgagcagtttaatgctgaagaggaagcatttggttggctaccatctgtatatcctcaacgtaaaaaa

SEQ ID NO: 229232 - DNA, 120 bp, Artificial Sequence
  ENSG00000118997_20 (sequence is synthesized)
atccaagatggcttgaacccttatcttcgtctttatgaaactgctgtcgaatttagcagcaactatagagcatggacagaagggccatatcataaagtgaatccagaccaagtagaagca

SEQ ID NO: 229233 - DNA, 120 bp, Artificial Sequence
  ENSG00000118997_21 (sequence is synthesized)
gatattggaaattactggagaggattatataaactggagaaaacctttcatgattctccatatgcattggcaatgacaaaaaaagtaagatcaaaggtggaagatttcaagcagcacatt

SEQ ID NO: 229234 - DNA, 120 bp, Artificial Sequence
  ENSG00000118997_22 (sequence is synthesized)
cctctcattcaagtgatctgtaatcctggtttgcgccccaggcactgggaggccatgtctgccattgttggttaccctttgcagccatcagatgactccacagtctcctcttttttagac

SEQ ID NO: 229235 - DNA, 120 bp, Artificial Sequence
  ENSG00000118997_23 (sequence is synthesized)
atgaatctggaaccatatatagaccgatttgaaggtattagtgaagcagctagcaaagaatattctcttgaaaaggcgatggagaagatgattactgagtgggatgcagtggaatttgtc

SEQ ID NO: 229236 - DNA, 120 bp, Artificial Sequence
  ENSG00000118997_24 (sequence is synthesized)
atccattcttatagagaaactgggacatttattttggcatcagttgatgaaattcagatgttgttggatgaccatattattaaaacacaaactatgcgaggatctcctttcattaagcct

SEQ ID NO: 229237 - DNA, 120 bp, Artificial Sequence
  ENSG00000118997_25 (sequence is synthesized)
tatgaaaaacaaatgagagaatgggagggcaagctcctactgcttcaggagattctggatgaatggctcaaagtccaagccacgtggctgtatctggagcccattttcagctctccagac

SEQ ID NO: 229238 - DNA, 120 bp, Artificial Sequence
  ENSG00000118997_26 (sequence is synthesized)
attatgtctcaaatgcctgaggaaggcagacgatttacagctgtggataagacatggagagatataatgagaagtgtcatgcaggataaacatgttctgacagttgtaaccattgacaga

SEQ ID NO: 229239 - DNA, 120 bp, Artificial Sequence
  ENSG00000118997_27 (sequence is synthesized)
atgctggaaaggctgaaaaaatctaatgaacttttggagctcattcttaaaggacttaatgaatatttggaaaagaaacgcctctttttccccagattcttttttttgtccaatgatgaa

SEQ ID NO: 229240 - DNA, 120 bp, Artificial Sequence
  ENSG00000118997_28 (sequence is synthesized)
cttcttgagatactatctgagactaaagatcccactagggtgcaacctcacttgaagaaatgttttgaaggaatcgcaaaggtagaatttacggaaactttagacattactcacatgaag

SEQ ID NO: 229241 - DNA, 120 bp, Artificial Sequence
  ENSG00000118997_29 (sequence is synthesized)
agcagcgaaggagaggttgtagaactcatagagattatttcaacagccaaagccagaggtcaagtggagaagtggttggttgaattagagagagttatgattaactccatccacaaggta

SEQ ID NO: 229242 - DNA, 120 bp, Artificial Sequence
  ENSG00000118997_30 (sequence is synthesized)
actggagatgcaacttttgcctatacaaaatatgaacgaattaactgggtaagggattggcctggacagactgttctctgtgtatcccaaatcttttggacaaaagaagtacaaacagct

SEQ ID NO: 229243 - DNA, 120 bp, Artificial Sequence
  ENSG00000118997_31 (sequence is synthesized)
attccaatggggataaaggctcttgagcaatacttgaaaacatgtaacagacaaattgatgatattgtcactttggtgcgtggcaaattgtccatgcagaatcgcgtaactctgggagca

SEQ ID NO: 229244 - DNA, 120 bp, Artificial Sequence
  ENSG00000118997_32 (sequence is synthesized)
cttgtggtactggatgtccatgctagagatgtcctctcatcacttgtaaaaaaaaatattagcgatgactctgactttgaatggttaagtcagcttaggtactactggcaagaaaatcat

SEQ ID NO: 229245 - DNA, 120 bp, Artificial Sequence
  ENSG00000118997_33 (sequence is synthesized)
ttagaaacaaaaatgatcaatgctggtttgcgatatggatatgaatatctgggtaattcccctaggctggttattacaccactcacggatagatgttacagaaccttatttggagccctt

SEQ ID NO: 229246 - DNA, 120 bp, Artificial Sequence
  ENSG00000118997_34 (sequence is synthesized)
catttgcaccttggaggagcacctgagggtccagctggcactgggaagactgaaactaccaaggatttggcaaaagctgtagccaaacaatgtgttgttttcaactgctctgatgggttg

SEQ ID NO: 229247 - DNA, 120 bp, Artificial Sequence
  ENSG00000118997_35 (sequence is synthesized)
gattatttggctttgggaaaattctttaagggactgttatcttgtggagcctgggcttgctttgatgagtttaacagaattgatttggaagtactctctgtggttgctcaacaaatcctt

SEQ ID NO: 229248 - DNA, 120 bp, Artificial Sequence
  ENSG00000118997_36 (sequence is synthesized)
actatccaaagaggtattaatgcaggtgctgatatactgatgtttgaaggaactgaactaaaacttgaccccacatgtgctgtctttataacaatgaaccctgggtatgctgggcgatca

SEQ ID NO: 229249 - DNA, 120 bp, Artificial Sequence
  ENSG00000118997_37 (sequence is synthesized)
gaactgccagataacctgaaggctctctttcggacagtagcaatgatggtacctgactatgccatgattgctgaaatagtcctatactcctgtgggtttgtcactgctcgaccactgtct

SEQ ID NO: 229250 - DNA, 120 bp, Artificial Sequence
  ENSG00000118997_38 (sequence is synthesized)
gtaaaaattgtggctacgtatcgcttgtgttcagagcagctgtcatctcaacatcactacgactatggaatgagagccgtgaagtcagttcttactgctgctgggaatctgaagctgaaa

SEQ ID NO: 229251 - DNA, 120 bp, Artificial Sequence
  ENSG00000118997_39 (sequence is synthesized)
tatccaaatgaaaatgaagaaattttgctgcttagatctatcattgatgtaaatctgccaaaatttttatcccatgatttaccactctttgagggaattacttcggatttgtttcctggg

SEQ ID NO: 229252 - DNA, 120 bp, Artificial Sequence
  ENSG00000118997_40 (sequence is synthesized)
gtaaaattaccaaaaccagattacaatgatttgctggcagctatcaaagacaattgtgcctccatgaatttgcaaatgactgcattcttttccgagaagattcttcaagtatatgaaatg

SEQ ID NO: 229253 - DNA, 120 bp, Artificial Sequence
  ENSG00000118997_41 (sequence is synthesized)
atgattgtgcgtcatggttttatgattgttggagaaccatttggaggaaaaactagtgcatatcgtgtcttagctggagcactaaatgatatatgtgaaaaggggctaatggaagaaaac

SEQ ID NO: 229254 - DNA, 120 bp, Artificial Sequence
  ENSG00000118997_42 (sequence is synthesized)
aaagttcaaataactgttttaaatcctaagtctgtcaccatgggccaactgtacggacagtttgattcagtgtcccatgaatggtctgatggggtccttgctgtcagttttagagcattt

SEQ ID NO: 229255 - DNA, 120 bp, Artificial Sequence
  ENSG00000118997_43 (sequence is synthesized)
gcctcttcagtgactccagataggaaatggttaatttttgatggcccagtagatgcagtgtggattgagaatatgaacactgtgctggatgacaacaagaagctatgtctgatgagtggg

SEQ ID NO: 229256 - DNA, 120 bp, Artificial Sequence
  ENSG00000118997_44 (sequence is synthesized)
gagattattcagatgtcaccacaaatgaatctaatttttgagccaatggatttagaagttgcttcccctgccactgtttccagatgtggcatgatttacatggagcctcacatgttaggc

SEQ ID NO: 229257 - DNA, 120 bp, Artificial Sequence
  ENSG00000118997_45 (sequence is synthesized)
tggagaccactgatgttgtcctgggtgaatctgttacctgcgtcagtcagtgttattcaaaaggaattcataatgggcttatttgacagaatggtccctgtttcggttgaatttattaga

SEQ ID NO: 229258 - DNA, 120 bp, Artificial Sequence
  ENSG00000118997_46 (sequence is synthesized)
aagcatacaaaggaattatctcctacttccgatacaaacttggtccggtccttaatgaatctaatagactgttttatggatgattttgctgatgaagtcaaactaaaggagagaaatgat

SEQ ID NO: 229259 - DNA, 120 bp, Artificial Sequence
  ENSG00000118997_47 (sequence is synthesized)
cgagaaacttactctttgcttgagggcatttttctgttttcattgatctggtccgttggtgcttcttgtacagatgatgatcgattgaaatttaataagattcttcgagaactaatggaa

SEQ ID NO: 229260 - DNA, 120 bp, Artificial Sequence
  ENSG00000118997_48 (sequence is synthesized)
agtccaatttcagatcgaactcgaaatacgtttaaattacagagtggtactgagcaaacatcctcaaaggcactaactgtcccatttcctgaaaaaggaacaatttatgattatcaattt

SEQ ID NO: 229261 - DNA, 120 bp, Artificial Sequence
  ENSG00000118997_49 (sequence is synthesized)
gtcactgagggaataggaaaatgggaaccatggataaagaaattgaaagaagctcctccaattcctaaagatgtaatgtttaatgaaatcattgtgccaactctggacacaattcgatac

SEQ ID NO: 229262 - DNA, 120 bp, Artificial Sequence
  ENSG00000118997_50 (sequence is synthesized)
tctgcattaatggaattgctgaccacccatcaaaagccttcaatatttgtaggaccaacaggaactgggaaaagtgtttacattacgaattttcttttaaatcaactaaataaggaaatc

SEQ ID NO: 229263 - DNA, 120 bp, Artificial Sequence
  ENSG00000118997_51 (sequence is synthesized)
tgtcatgtcaaaattggacaagagaagaaagggagtttttggtcctcctttgggcaagagaatggttgtctttgtagatgatgtcaatatgcctgctcgggaggtatatggggctcaacc

SEQ ID NO: 229264 - DNA, 120 bp, Artificial Sequence
  ENSG00000118997_52 (sequence is synthesized)
tcccattgagttacttagacagtggttagaccactggaactggtatgatctaaaagattgttccatgattaaactagtggacattcagatcatgtgtgctatgggacctccaggtggtgg

SEQ ID NO: 229265 - DNA, 120 bp, Artificial Sequence
  ENSG00000118997_53 (sequence is synthesized)
tcgaaatccagtaactcctcgatacatgcgacatttcaatattataacaatcaatgagtttagtgataaatccatgtatacaatcttctctagaatcttaacttggcatttagaaatctg

SEQ ID NO: 229266 - DNA, 120 bp, Artificial Sequence
  ENSG00000118997_54 (sequence is synthesized)
ttataaatttccagatgaatttctagatttgaccacacaaatcgtaaatggcacaatgactctgtataaagaagcaatgaagaatctcttgcctactccagctaaatctcactacttgtt

SEQ ID NO: 229267 - DNA, 120 bp, Artificial Sequence
  ENSG00000118997_55 (sequence is synthesized)
caacctccgtgatttctcccgtgtcattcaaggtgtttgtttgtcaagaccagaaacaacagaaaccacagaagtgattaaacgtctttgggttcatgaggtccttcgagtgtattatga

SEQ ID NO: 229268 - DNA, 120 bp, Artificial Sequence
  ENSG00000118997_56 (sequence is synthesized)
ccgccttctggacaatacagacagaagctggctcatcaactacattcaagaaattttgagaaactacatgtatgaagattttcatgagctttttcagcgtttggattttgataatgatgg

SEQ ID NO: 229269 - DNA, 120 bp, Artificial Sequence
  ENSG00000118997_57 (sequence is synthesized)
catggtggaagcagatgacttacgcagcttaatgttttgtgatttccatgatcccaagagggaggataccaactacagagaaatcgcagatgtggataatcttcgaatgatagtagaaat

SEQ ID NO: 229270 - DNA, 120 bp, Artificial Sequence
  ENSG00000118997_58 (sequence is synthesized)
tcacctagaagaatacaacaatataagcaaaaaacccatgaaccttgtcttgtttcgatttgccatagagcacatcagcagaatttccaggatcctgaagcagcctcgcagccatgctct

SEQ ID NO: 229271 - DNA, 120 bp, Artificial Sequence
  ENSG00000118997_59 (sequence is synthesized)
cctagtaggggttggagggagtggaaggcagtctgtcaccagattagctgcccacatggctgattattcagttttccaagttgaaatctctaaggggtatgatactactgaatggcatga

SEQ ID NO: 229272 - DNA, 120 bp, Artificial Sequence
  ENSG00000118997_60 (sequence is synthesized)
agatttaaaagtgatcttaaggaaatgtgcggaaggtgagatgcagggtgtcttcctgtttacagatactcaaattaaagaagagtcttttctggaagatgtcagtaatctgctaaatgc

SEQ ID NO: 229273 - DNA, 120 bp, Artificial Sequence
  ENSG00000118997_61 (sequence is synthesized)
tggggagattccaaatctctttgcattagatgagaagcaagagatatgtgataagatgcgtcagttagatcgccagcgggataaaaccaagcaaacagatggcagccccatagccctttt

SEQ ID NO: 229274 - DNA, 120 bp, Artificial Sequence
  ENSG00000118997_62 (sequence is synthesized)
caacatgtttattgatcattgccgcagccaactgcatgtggtccttgccatgagtcccattggagatgcatttcggaatcgtcttagaaagttccctgctcttgttaactgctgtaccat

SEQ ID NO: 229275 - DNA, 120 bp, Artificial Sequence
  ENSG00000118997_63 (sequence is synthesized)
tgactggtttcagtcatggcctgaagatgcactccaggcagttgcctcacgattcttggaagaaattgaaatgtcagaggaaatacgagatggctgtatcgacatgtgtaaaagcttcca

SEQ ID NO: 229276 - DNA, 120 bp, Artificial Sequence
  ENSG00000118997_64 (sequence is synthesized)
cacttctactatagatttatccaaatctttctttgttgaacttcaaagatacaattatgtgactcctacctcttacctcgaattaatctccaccttcaaactgttgttagaaaagaaaag

SEQ ID NO: 229277 - DNA, 120 bp, Artificial Sequence
  ENSG00000118997_65 (sequence is synthesized)
aagtgaagtaatgaaaatgaaaaagagatatgaagtgggtttggagaaactggattctgcttcatctcaagtagccacaatgcagatggagttggaggcactacatcctcaattaaaagt

SEQ ID NO: 229278 - DNA, 120 bp, Artificial Sequence
  ENSG00000118997_66 (sequence is synthesized)
tgctagcaaagaggttgatgaaatgatgataatgattgagaaagagtctgtagaagttgccaaaactgaaaaaatagtgaaagctgatgaaacaatagcgaatgaacaagctatggcttc

SEQ ID NO: 229279 - DNA, 120 bp, Artificial Sequence
  ENSG00000118997_67 (sequence is synthesized)
caaagccatcaaagatgagtgcgatgctgacctggcaggtgccttgccaatattagagtcagcactggccgcccttgatactcttactgcacaggatattacagtggtaaaatccatgaa

SEQ ID NO: 229280 - DNA, 120 bp, Artificial Sequence
  ENSG00000118997_68 (sequence is synthesized)
gagtcctcctgctggtgtcaagcttgttatggaagctatatgcatcttgaaaggaatcaaagctgacaaaatccctgacccaacaggttcagggaaaaaaattgaggatttctggggccc

SEQ ID NO: 229281 - DNA, 120 bp, Artificial Sequence
  ENSG00000118997_69 (sequence is synthesized)
agctaagagacttcttggtgacatgaggtttctgcagtcacttcatgaatatgacaaggacaatattcctccagcttatatgaatatcataagaaaaaattatattccaaatccagattt

SEQ ID NO: 229282 - DNA, 120 bp, Artificial Sequence
  ENSG00000118997_70 (sequence is synthesized)
tgtaccagaaaaaatcagaaatgcttctacagcggccgaaggtctgtgcaaatgggtcatagcaatggattcatatgataaagtggcaaaaatagtagctcccaaaaagataaaactggc

SEQ ID NO: 229283 - DNA, 120 bp, Artificial Sequence
  ENSG00000118997_71 (sequence is synthesized)
tgcagctgaaggggagcttaaaattgccatggatggtcttagaaagaagcaggcagcccttaaggaagttcaggacaagctggccaggcttcaagacacacttgaattaaataaacaaaa

SEQ ID NO: 229284 - DNA, 120 bp, Artificial Sequence
  ENSG00000118997_72 (sequence is synthesized)
gaaggctgacctggaaaaccaggttgacctttgcagcaaaaaactagaacgagctgaacagttgattggaggccttggaggtgagaaaactcgatggagccacacagctctggagctagg

SEQ ID NO: 229285 - DNA, 120 bp, Artificial Sequence
  ENSG00000118997_73 (sequence is synthesized)
tcagctgtacatcaacttgactggggatatcctcatttcctccggagtggttgcttacctcggagccttcacatccacctatagacagaatcaaactaaagagtggacaactttgtgcaa

SEQ ID NO: 229286 - DNA, 120 bp, Artificial Sequence
  ENSG00000118997_74 (sequence is synthesized)
aggaagagatatcccctgctcagatgattgctctcttatgggtaccctgggagaagctgtgacaattcgaacttggaatattgctggattaccttctgactcattttccattgataatgg

SEQ ID NO: 229287 - DNA, 120 bp, Artificial Sequence
  ENSG00000118997_75 (sequence is synthesized)
gataatcataatgaatgcaagaaggtggcctctgatgatagatcctcaaagtcaggctaataaatggatcaagaacatggaaaaagccaatagtctttatgtgattaaacttagtgaacc

SEQ ID NO: 229288 - DNA, 120 bp, Artificial Sequence
  ENSG00000118997_76 (sequence is synthesized)
tgactatgtcaggactctggaaaattgcatccagtttggtactcctgtgttgctagaaaatgttggcgaagaactagatcctattttggaacctcttctactaaaacaaacctttaagca

SEQ ID NO: 229289 - DNA, 120 bp, Artificial Sequence
  ENSG00000118997_77 (sequence is synthesized)
gggtgggagtacatgtatccggcttggggactccacaattgaatatgcacctgacttccgcttctatattactaccaagttaagaaatcctcattatcttcctgaaacatcagtaaaggt

SEQ ID NO: 229290 - DNA, 120 bp, Artificial Sequence
  ENSG00000118997_78 (sequence is synthesized)
aacattattaaacttcatgataacccctgagggaatgcaagatcagcttctgggaattgtggtggcacaagaaaggccagaccttgaagaagaaaagcaagccttgatattacaaggagc

SEQ ID NO: 229291 - DNA, 120 bp, Artificial Sequence
  ENSG00000118997_79 (sequence is synthesized)
tgaaaataaaaggcagttaaaagaaatagaagacaagattttagaagttctttcatcttcggaaggcaatatattagaagatgaaactgctattaagatattatcttcctccaaggcctt

SEQ ID NO: 229292 - DNA, 120 bp, Artificial Sequence
  ENSG00000118997_80 (sequence is synthesized)
ggctaatgagatttctcagaagcaggaagtagccgaagagacagagaaaaagattgacaccacccgcatgggctatcgtcctattgccatccattcttccatcctatttttttctcttgc

SEQ ID NO: 229293 - DNA, 120 bp, Artificial Sequence
  ENSG00000118997_81 (sequence is synthesized)
tgatttagccaacattgagcccatgtaccagtattcactgacctggtttattaaccttttcatcctgtctattgaaaattcagagaaatcagaaattttggcaaaaaggcttcagattct

SEQ ID NO: 229294 - DNA, 120 bp, Artificial Sequence
  ENSG00000118997_82 (sequence is synthesized)
caaggatcactttacttattcactgtatgttaatgtctgccggtcactctttgaaaaggataagctgctcttttccttttgtctaaccataaatctactgctgcatgagcgggcgattaa

SEQ ID NO: 229295 - DNA, 120 bp, Artificial Sequence
  ENSG00000118997_83 (sequence is synthesized)
taaagctgagtggagatttctgctaactggtggcattggactggataatccttatgccaacctttgtacatggcttcctcagaaatcctgggatgaaatatgtcgattagatgatttgcc

SEQ ID NO: 229296 - DNA, 120 bp, Artificial Sequence
  ENSG00000118997_84 (sequence is synthesized)
tgccttcaaaaccattcgtagagagtttatgcgcttaaaggatggatggaagaaagtatatgatagtttggaaccacaccatgaggttttccctgaagaatgggaagataaagcaaatga

SEQ ID NO: 229297 - DNA, 120 bp, Artificial Sequence
  ENSG00000118997_85 (sequence is synthesized)
gtttcaaaggatgcttattattcgttgcttgaggccagacaaggttattccaatgttgcaggaatttataatcaacagattgggacgtgcattcattgaaccacccccctttgatttagc

SEQ ID NO: 229298 - DNA, 120 bp, Artificial Sequence
  ENSG00000118997_86 (sequence is synthesized)
caaggcatttggagacagtaactgctgtgcaccactgattttcgtgctctctcctggagcagatcccatggctgcccttctaaaatttgctgatgaccagggatatgggggatcaaaact

SEQ ID NO: 229299 - DNA, 120 bp, Artificial Sequence
  ENSG00000118997_87 (sequence is synthesized)
tagctctttatctcttggtcaaggccaagggcccattgctatgaagatgttagaaaaagctgtcaaggaaggaacatgggttgttcttcagaattgtcaccttgccacctcttggatgcc

SEQ ID NO: 229300 - DNA, 120 bp, Artificial Sequence
  ENSG00000118997_88 (sequence is synthesized)
aacccttgagaaagtctgtgaggagttaagcccagagtcaacacatccagatttccgaatgtggctaacgagttacccatctccaaatttccctgtgtcagtactgcagaatggagtgaa

SEQ ID NO: 229301 - DNA, 120 bp, Artificial Sequence
  ENSG00000118997_89 (sequence is synthesized)
aatgaccaatgaagcaccaaaaggtttacgggctaatatcattcgatcatacctcatggacccgatctctgatccggagttctttggcagctgcaaaaagcctgaggaattcaagaaatt

SEQ ID NO: 229302 - DNA, 120 bp, Artificial Sequence
  ENSG00000118997_90 (sequence is synthesized)
gctttatggcctgtgtttctttcatgctttggtacaagaaagacggaaatttggacccctagggtggaatattccttatgagttcaatgagacagatctgagaatcagcgtacagcagct

SEQ ID NO: 229303 - DNA, 120 bp, Artificial Sequence
  ENSG00000118997_91 (sequence is synthesized)
ccacatgttcctgaaccagtatgaggaactgccgtatgaggctctgcggtacatgactggcgaatgcaattacggaggcagagtgaccgatgactgggaccggcgcacgctgcgcagcat

SEQ ID NO: 229304 - DNA, 120 bp, Artificial Sequence
  ENSG00000118997_92 (sequence is synthesized)
tctaaacaaattcttcaatcccgaattagttgaaaattcagactataagttcgactcaagtggcatctattttgttcctccttctggtgatcacaaaagctacatcgaatacacaaagac

SEQ ID NO: 229305 - DNA, 120 bp, Artificial Sequence
  ENSG00000118997_93 (sequence is synthesized)
tctgccactgaccccagcaccagaaatctttgggatgaatgccaatgcagatatcactaaggatcagtcagaaactcagctgctatttgataacattcttcttacacagtctcgttcagc

SEQ ID NO: 229306 - DNA, 120 bp, Artificial Sequence
  ENSG00000118997_94 (sequence is synthesized)
aggtgctggtgcaaaatcatcagatgaagtagtgaatgaggtcgctagtgacatcttgggcaaacttccaaacaacttcgacatcgaggctgccatgaggaggtacccaacaacttatac

SEQ ID NO: 229307 - DNA, 120 bp, Artificial Sequence
  ENSG00000118997_95 (sequence is synthesized)
tcagagcatgaacactgtacttgtccaagagatgggacggttcaataagttactgaagaccataagagattcgtgcgtaaatattcaaaaagcaatcaaggggcttgcagtcatgtctac

SEQ ID NO: 229308 - DNA, 120 bp, Artificial Sequence
  ENSG00000118997_96 (sequence is synthesized)
agatcttgaagaagtggttagcagcattttgaatgtcaaaattccagaaatgtggatgggtaaatcctacccaagccttaaaccacttggcagctatgtgaatgacttccttgcaagact

SEQ ID NO: 229309 - DNA, 120 bp, Artificial Sequence
  ENSG00000118997_97 (sequence is synthesized)
aaaattcttgcagcaatggtatgaggttggtcctcctccagtcttctggctttctggcttcttcttcacacaagccttcctgaccggtgcccagcagaactacgccaggaaatacacaat

SEQ ID NO: 229310 - DNA, 120 bp, Artificial Sequence
  ENSG00000118997_98 (sequence is synthesized)
tcctattgatcttcttgggtttgactatgaagtgatggaagacaaagaatacaagcatcctcctgaggatggtgttttcattcacggattatttctggatggagcttcctggaatagaaa

SEQ ID NO: 229311 - DNA, 120 bp, Artificial Sequence
  ENSG00000118997_99 (sequence is synthesized)
gatcaagaaacttgcagaatcgcatcccaaaattctttatgatacagtgcctgtgatgtggctaaagccctgtaagagggcagatataccaaaacggccaagttatgttgctccattgta

SEQ ID NO: 229312 - DNA, 120 bp, Artificial Sequence
  ENSG00000118997_100 (sequence is synthesized)
taagacaagtgagcggagaggagtattatccaccactggccattccacgaattttgtgattgccatgactcttccctctgaccaacccaaggaacactggattggacgaggtgtagcact

SEQ ID NO: 229313 - DNA, 120 bp, Artificial Sequence
  ENSG00000118997_101 (sequence is synthesized)
gttatgtcaacttaattcataaccagaagacatcatttccttgttcctatttcttgttggctggctgagtagagaaagcatattttactacttaaacctttttttttgtttgtttaaata

SEQ ID NO: 229314 - DNA, 120 bp, Artificial Sequence
  ENSG00000118997_102 (sequence is synthesized)
catttgactaaagttataattatgaatttacttatgagcaaatgcagctaaacttaatatgactcatacttaaatgtaaggaaatgttctgaaataaagactaaagaaaacacactggca

SEQ ID NO: 229315 - DNA, 120 bp, Artificial Sequence
  ENSG00000118997_103 (sequence is synthesized)
cttcccatagacctgtttaaaatttctttcctctcgtcttccacacctaattttactattgtcttatttcactaggcaaagtttcaatgttcttgaaatatggatgttaaaacactcagg

SEQ ID NO: 229316 - DNA, 120 bp, Artificial Sequence
  ENSG00000118997_104 (sequence is synthesized)
agattgctttcattggagaacaaatcttaggctgcaaatctagtatcacctgcatagtacttacatgtagaaatttcagattcagaactcaatcaaaatgcatatttcaagtgttatatt

SEQ ID NO: 229317 - DNA, 120 bp, Artificial Sequence
  ENSG00000118997_105 (sequence is synthesized)
aattgaccagactttactttaaaaaaaaacacaccattttctttgattattagtaaaatatgacattttccccatattttggttaaccattttatatccttttctgatgaattgcatatg

SEQ ID NO: 229318 - DNA, 120 bp, Artificial Sequence
  ENSG00000118997_106 (sequence is synthesized)
tatggcacatatacagacagcaatgttgaagaataatgcaatagtaattgtggatccaaaaccaaatctcctgactagatcctatattacttccacacttcacatgcttagactgacagc

SEQ ID NO: 229319 - DNA, 120 bp, Artificial Sequence
  ENSG00000118997_107 (sequence is synthesized)
ttcccagactaaatgagcagtttttcttttccaccaaaaagacttgatatgactaattgctgccaagtgtttttgtatttccatttcatgcccctttatatgttaagtcttatgttttag

SEQ ID NO: 229320 - DNA, 120 bp, Artificial Sequence
  ENSG00000118997_108 (sequence is synthesized)
gattttgctttagtgaaggaaggcatgattaacaaatgaaaaatggtaaatcctcttctatctaagaaacattttacaagttttatttggcattttcttttggaaagcctttcttgttgt

SEQ ID NO: 229321 - DNA, 120 bp, Artificial Sequence
  ENSG00000118997_109 (sequence is synthesized)
tgttgcagttcttgtatttgttcgctatgttattcatttatttggtaggatcaatctgaatatgtaaatttgcaaaggtaggaaaagcaaaaatctgtgagtagcttgttatagaaagct

SEQ ID NO: 229322 - DNA, 120 bp, Artificial Sequence
  ENSG00000118997_110 (sequence is synthesized)
gggagccattattggttgagtttgttaatgccctctgcagacttttccatggttttatttactgtgcaggttgaaacagtgctaacatattcacctggtagttcttggggataatgtatt

SEQ ID NO: 229323 - DNA, 120 bp, Artificial Sequence
  ENSG00000118997_111 (sequence is synthesized)
ttccttctacatgaggccaaaagctgttctcaattctcatagcttctcctattgtgcagccttcttggttcaagcttctacagagcatctgttttcaggtatatatggaaataccaatta

SEQ ID NO: 229324 - DNA, 120 bp, Artificial Sequence
  ENSG00000118997_112 (sequence is synthesized)
cctaacaagtctgaaatgaaagagttacatattccttaaaaaataataaaagcctgatggggcccagaaagtatcattaccagttttcggaatcattctcaaaaactccctctgtttcac

SEQ ID NO: 229325 - DNA, 120 bp, Artificial Sequence
  ENSG00000118997_113 (sequence is synthesized)
ctggtgattcagtcagtcaccaagcccagggtttccatttcacacaactcctacaatccctgctgtactgacctggtccccctgccacaccttgctgctccctgccttctgtcttctccc

SEQ ID NO: 229326 - DNA, 120 bp, Artificial Sequence
  ENSG00000118997_114 (sequence is synthesized)
atatgtcttattgcaatagttcacttgtcatcaatttcttctctattgaaattcattataatgaattccccatcacagtgctaccagtgttatctatcaaaagaaatctaatcatataat

SEQ ID NO: 229327 - DNA, 120 bp, Artificial Sequence
  ENSG00000118997_115 (sequence is synthesized)
cttcagctttaaaaaactgctgggctcctttttgtccatggactaaagttcacatttcttagtacaatctacaagagccttggcataaggactcagttgcatctgtcctgccatttccct

SEQ ID NO: 229328 - DNA, 120 bp, Artificial Sequence
  ENSG00000118997_116 (sequence is synthesized)
gcctctgtctgttacactgggcctcactagcctctgaaggtcccttgcctttctacatgctattttctctctctcaagtgctcctctaagcctcctctttcctgtctgacaaattcatgg

SEQ ID NO: 229329 - DNA, 120 bp, Artificial Sequence
  ENSG00000118997_117 (sequence is synthesized)
tcatcctttaaactagcagtaaacgctaaacatatgtacagttcagatctgaccttctgggtgaagtccctggacttggctgagatttatagctgagttctgtcatgtgcatgtccatgg

SEQ ID NO: 229330 - DNA, 120 bp, Artificial Sequence
  ENSG00000118997_118 (sequence is synthesized)
gttcttcagagactctcccattaggaggagtctacttgtaattcctgaggcttgagtgatggattctgtttctccagttgtcattgccttctctttgcctggatctctgtggtcaactcc

SEQ ID NO: 229331 - DNA, 120 bp, Artificial Sequence
  ENSG00000118997_119 (sequence is synthesized)
atgtaaacttcactgttggagagctctcactctgccagaaggtatgtagggcagcacttatagagcttcagtgtggcccttctttgttgtgtaccgctcataaatccttttcccaataaa

SEQ ID NO: 229332 - DNA, 120 bp, Artificial Sequence
  ENSG00000118997_120 (sequence is synthesized)
ccctgggtattaatcctgctaccacaggtcactatcctttttcagacatgagtcaggcaccagtccatgtctcccgaaatgcaggagtatctaccaagctctcacagaacttgggtgtag

SEQ ID NO: 229333 - DNA, 120 bp, Artificial Sequence
  ENSG00000118997_121 (sequence is synthesized)
tgaggagggttgtggggactcagagcataacgacagctcccttcaaagggaatattttcacaactccttcctctctcaagtattttgtaatctacaagtagacgagagggttcaaggttg

SEQ ID NO: 229334 - DNA, 120 bp, Artificial Sequence
  ENSG00000118997_122 (sequence is synthesized)
tagacatttcctttgcagattttgtatattgagaagatcatacttactgtagtaactgatgtatcatatcatacagaaagagtcccattttgacatcctgttacatttagacaaaatctg

SEQ ID NO: 229335 - DNA, 120 bp, Artificial Sequence
  ENSG00000118997_123 (sequence is synthesized)
cataataaagcaatttattaaatacatcttcactttagagaagctatattttagatttaaactattctgaagaatcagtagtcaatgatcattttagaatagtttgttagaagccacggt

SEQ ID NO: 229336 - DNA, 120 bp, Artificial Sequence
  ENSG00000118997_124 (sequence is synthesized)
aaaatagacacattctagatctcctaatgtcacaaagccaataaagtgatacatagcttttcagagtatatgtagggtgaaacactaatagtattgaggggaaaaaaacaaagtagatcc

SEQ ID NO: 229337 - DNA, 120 bp, Artificial Sequence
  ENSG00000118997_125 (sequence is synthesized)
taaatcctccatttcattcaactaaaatccagcttgttcctgaacagatcaaaatatttataaaatcgatttgcagttccttaaaagtaaatggtaaaaagttattgcttaatttttttt

SEQ ID NO: 229338 - DNA, 120 bp, Artificial Sequence
  ENSG00000118997_126 (sequence is synthesized)
ttattgtaccaatatgtagtcctttgaaagcatgctccagaaagtatacacatttccttatgtaccaccccccttcctccaccaatagagcagaagcagtagaacagctattcttgatca

SEQ ID NO: 229339 - DNA, 120 bp, Artificial Sequence
  ENSG00000118997_127 (sequence is synthesized)
tttatttttgctgagataaacatgaagattatgttcacatggattacatgcactggaatttactcaagtcttggcatgttacctggctctgtaccctctttgttttcacactcaacaaac

SEQ ID NO: 229340 - DNA, 120 bp, Artificial Sequence
  ENSG00000118997_128 (sequence is synthesized)
tatgtcactggttaagctagaatccaatttaatttttttaacaaagcactaaattatcttcaaacttactgctattaccaacaaattatttctggtacatccaaaatcgaaccacattat

SEQ ID NO: 229341 - DNA, 120 bp, Artificial Sequence
  ENSG00000118997_129 (sequence is synthesized)
aacattatatctgtatgctgcacaacctgtttgagaatcactggtttaggcttaaaaaatatttcaatcaggatgtttttcattgtgttaagtatcattgttcaatcgttggtggaggac

SEQ ID NO: 229342 - DNA, 120 bp, Artificial Sequence
  ENSG00000118997_130 (sequence is synthesized)
tcctaataaatggaatatcatgataccccttgacacttgtttacctcactttattttttgttctactagtcagaaatatgtctgcttcatcattttccacaaccgtattgctaacagtgc

SEQ ID NO: 229343 - DNA, 120 bp, Artificial Sequence
  ENSG00000118997_131 (sequence is synthesized)
taagaggtgaataggatatttgtgaagtaactagggtggtcaaagggaaacctacaacacacagtcctggatgttgacctcaaactagtaggaatttgtgctattgtagaaaaactttac

SEQ ID NO: 229344 - DNA, 120 bp, Artificial Sequence
  ENSG00000118997_132 (sequence is synthesized)
caccctaaccccattgactggctgactgatttgttagttcagtcattcttttattctttaaaaaagtagttgttgagaacctaccctttaaaagagataccaactgtatagcaattctca

SEQ ID NO: 229345 - DNA, 120 bp, Artificial Sequence
  ENSG00000118997_133 (sequence is synthesized)
tgctcttttttccctgatgtgtgtagtggttagaacacttgcttaagcttttttatttcaagttatttgctcaaattatattttttaaacattttattctttccattctttaatggtaac

SEQ ID NO: 229346 - DNA, 120 bp, Artificial Sequence
  ENSG00000118997_134 (sequence is synthesized)
cttattgataaaatagcagcactatggcctctaactagtaattaacacaacacattagaaggttcttacttgatacaaatcttcgaattgttctcaacttagaagagtcataacagatca

SEQ ID NO: 229347 - DNA, 120 bp, Artificial Sequence
  ENSG00000118997_135 (sequence is synthesized)
tttaaacaagatgttcttattttctatctaccttgagtttttggtaattcaactaattcccagaatgtacttatgaactatctgactatgattgtcattcactagaataacttctttttc

SEQ ID NO: 229348 - DNA, 120 bp, Artificial Sequence
  ENSG00000118997_136 (sequence is synthesized)
ccttagaatattgctgtcttccatattttgtacaagaaagccatgttttaatacatgagctattgaagtgagtcctcatacatactaatattctatacctaaattcttatttattctttc

SEQ ID NO: 229349 - DNA, 120 bp, Artificial Sequence
  ENSG00000118997_137 (sequence is synthesized)
tacttaccatcaaaaacatcatataacctcagtattttaaatatcatgagaaaaagttatctttacaatttgtaaaattgatttatctctaataataattgtgtattacttatttccggt

SEQ ID NO: 229350 - DNA, 120 bp, Artificial Sequence
  ENSG00000118997_138 (sequence is synthesized)
gtgtattacttatttccggttttctttcctttattatgcttgttgaaagactgacattgtgacttcagattcaaaaaagttaaaaatatctcaaaatggataatttgtctaacactaaca

SEQ ID NO: 229351 - DNA, 120 bp, Artificial Sequence
  ENSG00000118997_139 (sequence is synthesized)
gcctcgcttgaagccaggtctcccaacgtggggacactcagcagcccagatgagaaacccaacttttgaacatcctgggagagtctgaggttctgtaacatgttgcttcccatgaagaat

SEQ ID NO: 229352 - DNA, 120 bp, Artificial Sequence
  ENSG00000118997_140 (sequence is synthesized)
ataatgtaattgaaattgaacacttagacgaaaaagaattgatacaaaaagctaatgatatatttattatatacacaacaggaaattgattttttaagttgctttttatctatatgattt

SEQ ID NO: 229353 - DNA, 120 bp, Artificial Sequence
  ENSG00000118997_141 (sequence is synthesized)
gaacattaaaatttattttattttatattttcagaagccaggaatttgtctgtttatttgtttactttttaaacttccaggtcaatgatttttttattgaagtatgattgacaaacataa

SEQ ID NO: 229354 - DNA, 120 bp, Artificial Sequence
  ENSG00000118997_142 (sequence is synthesized)
tacatatttaaggtgtacaatgtgatgttttgatatacatatacatcgtgtaacaatacccctaatcaagccaatcaacttacccaccacctcacatatatactttttctgttttctttc

SEQ ID NO: 229355 - DNA, 120 bp, Artificial Sequence
  ENSG00000118997_143 (sequence is synthesized)
tgttggtaacacttaagatctactctcttggcaaatttcaagaatataatacattattattaatggactatgaacattaaaatttaatgctattgtagaaaaggtataaagtcataacat

SEQ ID NO: 229356 - DNA, 120 bp, Artificial Sequence
  ENSG00000118997_144 (sequence is synthesized)
aagtcataacattatgaaataaagagcatgattatctttacaatggtctttttatttaattccctaacctctttatttatatatttttgccttttaaaattattcttaatgacatacaat

SEQ ID NO: 229357 - DNA, 120 bp, Artificial Sequence
  ENSG00000118997_145 (sequence is synthesized)
ttattgagtagagagtgatagtttgatgcatgtaaacgatgtgtaatgatcaaatcagggtatagtgtatctatcacctcaaatatttatcatttatttgtgttggaaacattcaaattc

SEQ ID NO: 229358 - DNA, 120 bp, Artificial Sequence
  ENSG00000118997_146 (sequence is synthesized)
ttctcttttagctatttaaaaatatagaataaattatttttaactatagtcaccccacagtgctacagtacactagaatttatttcttttatgtacctgaaattttgcatttgttaacca

SEQ ID NO: 229359 - DNA, 120 bp, Artificial Sequence
  ENSG00000118997_147 (sequence is synthesized)
gcctctccccattgccccacctcacctttcccagcctctagttaccactattttactctctacttctatgagataaacttttttagcctccacatattagtgagagcgtgtggtatttat

SEQ ID NO: 229360 - DNA, 120 bp, Artificial Sequence
  ENSG00000118997_148 (sequence is synthesized)
aaatcatgagaaaaatgagtcaaagagaaaataaagttttagaaaagtaaaatgaagcaaataggaagttcagcatataaagggtatgccacaaacttgctttcgaccttttatttcttt

SEQ ID NO: 229361 - DNA, 120 bp, Artificial Sequence
  ENSG00000118997_149 (sequence is synthesized)
tttaaaaaaattattaaagtaatacatgtctcttgtagaaaaaagtctgaaaacagaaaaatctgaaggttttcctgcaatactttcagaggagtcttttttattttctagatagatttg

SEQ ID NO: 229362 - DNA, 120 bp, Artificial Sequence
  ENSG00000118997_150 (sequence is synthesized)
taatgcaagcttctgttattggctgctagtggtattgaactgaaatgtgtatatgtgcatatgtgcacacatatataatgacacattcagaattcttatacacatcacattttgattgac

SEQ ID NO: 229363 - DNA, 120 bp, Artificial Sequence
  ENSG00000118997_151 (sequence is synthesized)
tttgaaatgctgaaggagtggggctgttttaaatacttcaactaatattgcatttctatttacctctccttatagatatttcaaatagttttcactttataaatttcaatgttcatatcc

SEQ ID NO: 229364 - DNA, 120 bp, Artificial Sequence
  ENSG00000118997_152 (sequence is synthesized)
tatatgaggtttgtgatgattatatctttacttgaagagtctccctttcaatcaatatgaaattacttacttttctgttatttgttgtgatctactttgtctaatttcaatattgctacc

SEQ ID NO: 229365 - DNA, 120 bp, Artificial Sequence
  ENSG00000118997_153 (sequence is synthesized)
cctactttctccctgtatgtatatttgcccatgtcattaattatatccttgggtgtcactgtgatttactttctatagagaataaatagcttgacttttgttttctacagatcagtggtc

SEQ ID NO: 229366 - DNA, 120 bp, Artificial Sequence
  ENSG00000118997_154 (sequence is synthesized)
tttatcttttcaaagataagtttaaagtcatttgtatttattatacaaactgatacgctacttattcctgccatctgtttcttctgcttttacacttccatgctgttttgtttctttact

SEQ ID NO: 229367 - DNA, 120 bp, Artificial Sequence
  ENSG00000118997_155 (sequence is synthesized)
tcccttctcttttttcttccattttttcacttcttaattgtcttctgcattctttatcttatttatggctcatttgtatttttcctgttttgttattttattgtcataggaactgatctt

SEQ ID NO: 229368 - DNA, 120 bp, Artificial Sequence
  ENSG00000118997_156 (sequence is synthesized)
ttatatatatatacatatataaaataaagtctccaaaagaacccaacaggtcactgctcaaagagtagaaggagatgaagatatgagcatgtattctggtccacttgtaaagtctaaatg

SEQ ID NO: 229369 - DNA, 120 bp, Artificial Sequence
  ENSG00000118997_157 (sequence is synthesized)
gctcattaccagggaattctaagggtgacattgtgattatgtcatagggcagtcttccttagccaaccaagctatcgcttcacactagccttgctgcatttaggataaaaacttttcttt

SEQ ID NO: 229370 - DNA, 120 bp, Artificial Sequence
  ENSG00000118997_158 (sequence is synthesized)
ggtgacagcaactttgttctgattaagaagataatagagatttcctatacttcttaatttaggaagatacattgttatcgccttcctggcacacaaaagaaagcaaagatattgagcttg

SEQ ID NO: 229371 - DNA, 61 bp, Artificial Sequence
  ENSG00000118997_159 (sequence is synthesized)
ccttcctggcacacaaaagaaagcaaagatattgagcttgttttattgtttaagattacta

SEQ ID NO: 229372 - DNA, 78 bp, Artificial Sequence
  ENSG00000118997_160 (sequence is synthesized)
ctccagcctgggtgacagagtgagaagattactattctgccgggagtggtggctcattcctgtaatcttggcccctag

SEQ ID NO: 229373 - DNA, 81 bp, Artificial Sequence
  ENSG00000118997_161 (sequence is synthesized)
gcaggcggatcacttgagcccaggagtcctagaccagcctggataaaagtagaaaccctgtttctactttaaaaatgtgta

SEQ ID NO: 229374 - DNA, 120 bp, Artificial Sequence
  ENSG00000118997_162 (sequence is synthesized)
aaaaagaaaaaaaaaggttaatattctcacttttttttttttttttccagtttggtagtttgtgtcccaagctcgggagtgccaggcagaaggcaatattagaaagagttgaacttgtta

SEQ ID NO: 229375 - DNA, 120 bp, Artificial Sequence
  ENSG00000118997_163 (sequence is synthesized)
tgtttttatatataaaaaataaatgattgccaataggtggagcacaggatttttaggggagtgaaagtgttctgtatggtactataatgggggataatgatactacacacttggcaaaac

SEQ ID NO: 229376 - DNA, 120 bp, Artificial Sequence
  ENSG00000118997_164 (sequence is synthesized)
ccatataattatgcaacacaaagagtgaacccttagtgtaaactatagactttagttaatagtaatgcattaatatgaattcatcagccataacaatgtaccacaccaattcaagatgtt

SEQ ID NO: 229377 - DNA, 120 bp, Artificial Sequence
  ENSG00000118997_165 (sequence is synthesized)
aataataaggaaaactgttgtgtcttggtagtagagagagtatctggaatcttcgtactttctgctcaatttttctgtaaacctttttttaaaaagccagttaattaaaaaaaaaaaaaa

SEQ ID NO: 229378 - DNA, 120 bp, Artificial Sequence
  ENSG00000118997_166 (sequence is synthesized)
aacaaagcaaaaccaggacatttttacttttctcatattcaaaggtctgtcacctttcagcattctgaagtttcgtctcctcagaactctcattttaagattgtgtcacccttcagtgtt

SEQ ID NO: 229379 - DNA, 120 bp, Artificial Sequence
  ENSG00000118997_167 (sequence is synthesized)
cttggctttacatggagatgccaattatgacttccaactttgctcgaccttgaggctttgtttcctggcagcccctcccatgcatccaccttgccggaaactcattaaagcaaagcttag

SEQ ID NO: 229380 - DNA, 120 bp, Artificial Sequence
  ENSG00000118997_168 (sequence is synthesized)
accaccaaggatcagcagggtccccagggcagctgctcacttctgcacataatgacctttcaactcatgctttctctcattttggtcccttagacttttttttttgttgttatttcctta

SEQ ID NO: 229381 - DNA, 120 bp, Artificial Sequence
  ENSG00000118997_169 (sequence is synthesized)
gctatacgttataaaagataaagtcagctttattatcctggcatatttatgtgttttgaattgagtagttgttttctggatatctattcctcatactaccatgaatagaagtctctcaag

SEQ ID NO: 229382 - DNA, 120 bp, Artificial Sequence
  ENSG00000118997_170 (sequence is synthesized)
ataacaaccaaacctagccgcctagcggcgcgccagcagggggagccacagcccagagcacccccagagtgctaatggcggtgtgcttgggtgagaggcggctctgcgaggagttgcagc

SEQ ID NO: 229383 - DNA, 120 bp, Artificial Sequence
  ENSG00000119004_0 (sequence is synthesized)
gcccgttggtttccgggtcccgcggggtgcccccgcccacacgctatgccttaaattgggccaggctgaggcgctgctgctggagcggccgatccgagacgtggctccctgggcggcaga

SEQ ID NO: 229384 - DNA, 120 bp, Artificial Sequence
  ENSG00000119004_1 (sequence is synthesized)
accatgttggacttcgcgatcttcgccgttaccttcttgctggcgttggtgggagccgtgctctacctctatccggcttccagacaagctgcaggaattccagggattactccaactgaa

SEQ ID NO: 229385 - DNA, 120 bp, Artificial Sequence
  ENSG00000119004_2 (sequence is synthesized)
gaaaaagatggtaatcttccagatattgtgaatagtggaagtttgcatgagttcctggttaatttgcatgagagatatgggcctgtggtctccttctggtttggcaggcgcctcgtggtt

SEQ ID NO: 229386 - DNA, 120 bp, Artificial Sequence
  ENSG00000119004_3 (sequence is synthesized)
agtttgggcactgttgatgtactgaagcagcatatcaatcccaataagacatcggacccttttgaaaccatgctgaagtcattattaaggtatcaatctggtggtggcagtgtgagtgaa

SEQ ID NO: 229387 - DNA, 120 bp, Artificial Sequence
  ENSG00000119004_4 (sequence is synthesized)
aaccacatgaggaaaaaattgtatgaaaatggtgtgactgattctctgaagagtaactttgccctcctcctaaagctttcagaagaattattagataaatggctctcctacccagagacc

SEQ ID NO: 229388 - DNA, 120 bp, Artificial Sequence
  ENSG00000119004_5 (sequence is synthesized)
cagcacgtgcccctcagccagcatatgcttggttttgctatgaagtctgttacacagatggtaatgggtagtacatttgaagatgatcaggaagtcattcgcttccagaagaatcatggc

SEQ ID NO: 229389 - DNA, 120 bp, Artificial Sequence
  ENSG00000119004_6 (sequence is synthesized)
acagtttggtctgagattggaaaaggctttctagatgggtcacttgataaaaacatgactcggaaaaaacaatatgaagatgccctcatgcaactggagtctgttttaaggaacatcata

SEQ ID NO: 229390 - DNA, 120 bp, Artificial Sequence
  ENSG00000119004_7 (sequence is synthesized)
aaagaacgaaaaggaaggaacttcagtcaacatattttcattgactccttagtacaagggaaccttaatgaccaacagatcctagaagacagtatgatattttctctggccagttgcata

SEQ ID NO: 229391 - DNA, 120 bp, Artificial Sequence
  ENSG00000119004_8 (sequence is synthesized)
ctgttttttaaccacctctgaagaagttcaaaaaaaattatatgaagagataaaccaagtttttggaaatggtcctgttactccagagaaaattgagcagctcagatattgtcagcatgt

SEQ ID NO: 229392 - DNA, 120 bp, Artificial Sequence
  ENSG00000119004_9 (sequence is synthesized)
gctttgtgaaactgttcgaactgccaaactgactccagtttctgcccagcttcaagatattgaaggaaaaattgaccgatttattattcctagagagaccctcgtcctttatgcccttgg

SEQ ID NO: 229393 - DNA, 120 bp, Artificial Sequence
  ENSG00000119004_10 (sequence is synthesized)
tgtggtacttcaggatcctaatacttggccatctccacacaagtttgatccagatcggtttgatgatgaattagtaatgaaaactttttcctcacttggattctcaggcacacaggagtg

SEQ ID NO: 229394 - DNA, 120 bp, Artificial Sequence
  ENSG00000119004_11 (sequence is synthesized)
tccagagttgaggtttgcatatatggtgaccacagtacttcttagtgtattggtgaagagactgcacctactttctgtggagggacaggttattgaaacaaagtatgaactggtaacatc

SEQ ID NO: 229395 - DNA, 120 bp, Artificial Sequence
  ENSG00000119004_12 (sequence is synthesized)
atcaagggaagaagcttggatcactgtctcaaagagatattaaaattttatacatttaaaatcattgttaaattgattgaggaaaacaaccatttaaaaaaaatctatgttgaatccttt

SEQ ID NO: 229396 - DNA, 120 bp, Artificial Sequence
  ENSG00000119004_13 (sequence is synthesized)
tataaaccagtatcactttgtaatataaacacctatttgtacttaattttgtaaatttggatttttatatatcatattttcttaattcattgtacacatttgacttactgcacagtatat

SEQ ID NO: 229397 - DNA, 120 bp, Artificial Sequence
  ENSG00000119004_14 (sequence is synthesized)
tgatcattttaatgggaaactttagctttctactttttatttttgttttttcactttctatgccattatttttgtattctttttcttagtgtgagctctaaaatcaatgttcttgaaaaa

SEQ ID NO: 229398 - DNA, 120 bp, Artificial Sequence
  ENSG00000119004_15 (sequence is synthesized)
cttagtgtgagctctaaaatcaatgttcttgaaaaagaaattattttgcagaagttggggaatcatgtttgttgaatatgtataaaatagaaacataggctgggcgcggtggctcacacc

SEQ ID NO: 229399 - DNA, 120 bp, Artificial Sequence
  ENSG00000119004_16 (sequence is synthesized)
aggtcgaggcgggtggatcacctgaggtccgaagttcgaggccagcctggccaacaggatgaaaccctgtctctattaaaaatacagaaaattggccgggtgcggtggctcacccctgta

SEQ ID NO: 229400 - DNA, 120 bp, Artificial Sequence
  ENSG00000119004_17 (sequence is synthesized)
tgggccacagagcaagactctgtctcaagaaaaacaaaaaaaaagataaatggacaaaagacatgaacaaacagcttttataggatagtatggctaacaaacttttagaaaagtgtttag

SEQ ID NO: 229401 - DNA, 120 bp, Artificial Sequence
  ENSG00000119004_18 (sequence is synthesized)
tatggctaacaaacttttagaaaagtgtttagtctcactagtaagtaacaaaatattggggcagggcacagtggctcatgcgtataatcctagaactttggaaggccaaagctggtggat

SEQ ID NO: 229402 - DNA, 81 bp, Artificial Sequence
  ENSG00000119004_19 (sequence is synthesized)
tgggagaccctgcctctacaaatatacaaaaaaattactgggcatggtgacacacacctgtagtcccagctgttctgaagg

SEQ ID NO: 229403 - DNA, 120 bp, Artificial Sequence
  ENSG00000119004_20 (sequence is synthesized)
gcccggcccgttggcttgctttctagatactgggaatagatcttgttatagtatgtgataaatagatcttgttatagtatgtgataaaatgccatgatcaaataaattacttatatcctg

SEQ ID NO: 229404 - DNA, 120 bp, Artificial Sequence
  ENSG00000119013_0 (sequence is synthesized)
cgtttccggttggctccggttgcagagttgagtgtcctgagaggtcagattgctgtcagacatggcccatgaacatggacatgagcatggacatcataaaatggaacttccagattatag

SEQ ID NO: 229405 - DNA, 120 bp, Artificial Sequence
  ENSG00000119013_1 (sequence is synthesized)
acaatggaagatagaagggacaccattagaaactatccagaagaagctggctgcaaaagggctaagggatccatggggccgcaatgaagcttggagatacatgggtggctttgcaaagag

SEQ ID NO: 229406 - DNA, 120 bp, Artificial Sequence
  ENSG00000119013_2 (sequence is synthesized)
gatgtattctttaaaggattcaaatggggatttgctgcatttgtggtagctgtaggagctgaatattacctggagtccctgaataaagataagaagcatcactgaagataatacctggaa

SEQ ID NO: 229407 - DNA, 120 bp, Artificial Sequence
  ENSG00000119013_3 (sequence is synthesized)
gcatcatagtggtttcttaactctccaaaataagatttcttctctgtagcctacttgtctggtttatcccttacagaatattagtaagatttaatcaattaaaatatatatatatgccaa

SEQ ID NO: 229408 - DNA, 120 bp, Artificial Sequence
  ENSG00000119013_4 (sequence is synthesized)
ggttggctccggttgcagagttgagtgtcctgagaggtcagattgctgtcaggcagaagaacagcatcactaaaaacatggcccatgaacatggacatgagcatggacatcataaaatgg

SEQ ID NO: 229409 - DNA, 120 bp, Artificial Sequence
  ENSG00000119013_5 (sequence is synthesized)
gagtgtcctgagaggtcagattgctgtcaggtgcttgttcccgcttctgccacacgcaaaattgtctttgtttgcctttggatcgcaaaggcagaagaacagcatcactaaaaacatggc

SEQ ID NO: 229410 - DNA, 120 bp, Artificial Sequence
  ENSG00000119013_6 (sequence is synthesized)
acgaccctcccaagatgctacctggtttacgagaggttccgggaccaccaacacaccggctaccgcctttccagaccaccctcgccagctcccgtctgtagtttccgcggccgaaggaga

SEQ ID NO: 229411 - DNA, 120 bp, Artificial Sequence
  ENSG00000119041_0 (sequence is synthesized)
agcttctggaaggcgctgctcttccggttctctgtcccggttcctggggttgcacagacagaccctgtaaacatgtcagggttcagtccggaactcatcgactacttggaagggaaaatc

SEQ ID NO: 229412 - DNA, 120 bp, Artificial Sequence
  ENSG00000119041_1 (sequence is synthesized)
tcctttgaggagttcgaacggcggagagaagagagaaaaacccgcgagaagaaaagtcttcaggaaaaaggcaagttatcagctgaagaaaatcccgatgactctgaagttccatcatca

SEQ ID NO: 229413 - DNA, 120 bp, Artificial Sequence
  ENSG00000119041_2 (sequence is synthesized)
tcaggaattaactctaccaaatcccaagacaaagatgtcaatgaaggagaaacatcagatggagtgaggaagtcagttcacaaggtctttgcttccatgcttggagagaatgaagatgat

SEQ ID NO: 229414 - DNA, 120 bp, Artificial Sequence
  ENSG00000119041_3 (sequence is synthesized)
gaggaggaagaggaagaagaggaggaggaggaggaggaggaagaaacacctgagcaacccactgcgggcgatgtatttgtattggagatggttctcaatcgtgaaaccaagaaaatgatg

SEQ ID NO: 229415 - DNA, 120 bp, Artificial Sequence
  ENSG00000119041_4 (sequence is synthesized)
aaagagaaaaggcctcggagtaaacttcccagagctctgagaggtctcatgggtgaagccaacattcgttttgctcgaggagaacgtgaagaggcgatattgatgtgcatggaaatcata

SEQ ID NO: 229416 - DNA, 120 bp, Artificial Sequence
  ENSG00000119041_5 (sequence is synthesized)
agacaagctcctctggcttatgagccattctctactctagccatgatatatgaggaccaaggtgacatggaaaaatcattgcagtttgagttgattgctgcgcatttaaatcccagtgac

SEQ ID NO: 229417 - DNA, 120 bp, Artificial Sequence
  ENSG00000119041_6 (sequence is synthesized)
acagaagaatgggttagactggcagaaatgtctctggaacaagacaatattaagcaggctattttttgctatacaaaagctcttaaatatgaacctactaatgtccgttatctgtgggag

SEQ ID NO: 229418 - DNA, 120 bp, Artificial Sequence
  ENSG00000119041_7 (sequence is synthesized)
cgatcaagcctttatgaacagatgggtgatcataaaatggccatggatggttataggcgtattttaaaccttttgtctccatctgatggcgaacgttttatgcagctggctagagatatg

SEQ ID NO: 229419 - DNA, 120 bp, Artificial Sequence
  ENSG00000119041_8 (sequence is synthesized)
gcaaagagttactatgaagccaatgatgttacttctgctattaacataattgatgaagctttctcaaaacaccagggcctagtctccatggaagatgttaacatagcagctgaactatat

SEQ ID NO: 229420 - DNA, 120 bp, Artificial Sequence
  ENSG00000119041_9 (sequence is synthesized)
atttctaacaaacagtatgacaaagctttggagataattacagatttttctggaattgtgctggaaaaaaaaacttcagaagaaggcacctcagaagagaataaagctcctgagaatgtt

SEQ ID NO: 229421 - DNA, 120 bp, Artificial Sequence
  ENSG00000119041_10 (sequence is synthesized)
acctgcactatacctgatggcgtgccaatagatatcacagtgaagttgatggtctgccttgtacatctcaacattcttgaaccacttaatcctctcttgacaacactagtagaacagaat

SEQ ID NO: 229422 - DNA, 120 bp, Artificial Sequence
  ENSG00000119041_11 (sequence is synthesized)
cctgaagatatgggagacctatacctagatgttgctgaagcttttctggatgttggtgaatataattctgcacttcccctcctcagtgctcttgtttgctctgaaagatacaaccttgca

SEQ ID NO: 229423 - DNA, 120 bp, Artificial Sequence
  ENSG00000119041_12 (sequence is synthesized)
gtagtttggcttcgtcatgcagaatgtttaaaggccttaggctatatggagcgagctgctgaaagctatggcaaggtggttgatctggccccactccatttggatgcaaggatttcactt

SEQ ID NO: 229424 - DNA, 120 bp, Artificial Sequence
  ENSG00000119041_13 (sequence is synthesized)
tctacccttcagcagcagctgggccagcctgagaaagctctggaagctctggaaccaatgtatgatccagatactttagcacaggatgcaaatgctgcacagcaggaactgaagttattg

SEQ ID NO: 229425 - DNA, 120 bp, Artificial Sequence
  ENSG00000119041_14 (sequence is synthesized)
cttcatcgttctactctgttgttttcacaaggcaaaatgtatggttatgtggataccttacttactatgttagccatgcttttaaaggtagcaatgaatcgagcccaagtttgtttgata

SEQ ID NO: 229426 - DNA, 120 bp, Artificial Sequence
  ENSG00000119041_15 (sequence is synthesized)
tccagttccaagtctggagagaggcatctttatcttattaaagtatcgagagacaaaatatcagacagcaatgaccaagagtcagcaaattgtgatgcaaaagcaatatttgctgtgctc

SEQ ID NO: 229427 - DNA, 120 bp, Artificial Sequence
  ENSG00000119041_16 (sequence is synthesized)
acaagcgtcttgacaaaggatgactggtggaatcttctgttgaaggccatatactccttatgtgacctatcccgatttcaagaggctgagttgcttgtagattcctcattggaatattac

SEQ ID NO: 229428 - DNA, 120 bp, Artificial Sequence
  ENSG00000119041_17 (sequence is synthesized)
ttctggacaaaaatttcagaaaggcatacaactatatcaggataatggtaatggaaaatgtcaataaaccccagctctggaacattttcaatcaagttaccatgcactcccaagatgtac

SEQ ID NO: 229429 - DNA, 120 bp, Artificial Sequence
  ENSG00000119041_18 (sequence is synthesized)
gacatcatcgcttctgtctccgtttgatgctgaaaaacccagaaaatcatgccctatgtgtcttaaatggacacaatgcatttgtatctggtagttttaagcatgcgcttggacagtatg

SEQ ID NO: 229430 - DNA, 120 bp, Artificial Sequence
  ENSG00000119041_19 (sequence is synthesized)
tgcaagcctttcgcactcaccctgacgaacctctctatagcttctgtataggcctaacctttattcatatggcatctcagaagtatgtgttacggagacatgctcttattgtacagggct

SEQ ID NO: 229431 - DNA, 120 bp, Artificial Sequence
  ENSG00000119041_20 (sequence is synthesized)
tttcctttcttaatcgatacctcagtttacgtgggccctgccaggaatcattctacaatttgggccgtggccttcatcagttggggctgattcatcttgcaatccactattatcagaagg

SEQ ID NO: 229432 - DNA, 120 bp, Artificial Sequence
  ENSG00000119041_21 (sequence is synthesized)
ccctggagctccctccacttgtggtagagggtatagaacttgaccagttagacttacgaagagatattgcctacaacttgtctctcatctatcagagcagtgggaataccggaatggctc

SEQ ID NO: 229433 - DNA, 120 bp, Artificial Sequence
  ENSG00000119041_22 (sequence is synthesized)
aaacgcttttgtatacctattgttctatataaagcaccgcaactgagaacagagcaatggcagctgctgtgtgaggaccagtgtcttctgtctcagggcttattatttgtaactccaaaa

SEQ ID NO: 229434 - DNA, 120 bp, Artificial Sequence
  ENSG00000119041_23 (sequence is synthesized)
tagaaatgacaatttcagaattacctaacaaacagtgtatttatttttaatatgtgataatgatcttgtggtatatatgcaaaattattcctacaaaaatttgtatattggtctgtcatt

SEQ ID NO: 229435 - DNA, 120 bp, Artificial Sequence
  ENSG00000119041_24 (sequence is synthesized)
ttcctttcacattctatagtgaattgttcccaatgttgaaatggacgtgtaagcctttgagctagcttggagtcgaatacactatttttcactcacaccatttattcatctttgtattta

SEQ ID NO: 229436 - DNA, 120 bp, Artificial Sequence
  ENSG00000119041_25 (sequence is synthesized)
atactatagctctgtcaatatcacatgaggcagtttttcaaatacgtataaacagaggttgcttattattaaaggaaagacaaagtgggactctttatgatgtcatgaccatgataacta

SEQ ID NO: 229437 - DNA, 120 bp, Artificial Sequence
  ENSG00000119041_26 (sequence is synthesized)
agcacctaagaaaattatttaaaatagttatgtggtaggcagaaagacaaataatttagttttttacttttcaccagcatgtatcttagctacctaaactgaaacatgggaggctgggct

SEQ ID NO: 229438 - DNA, 120 bp, Artificial Sequence
  ENSG00000119041_27 (sequence is synthesized)
taattcaaaatatattgctccaaggcaaataaaaaaatgctttatctatatttgtggctttctgatgaaaaaatagagaagagcttgttcaataacaggacatggtttccatttcaagat

SEQ ID NO: 229439 - DNA, 120 bp, Artificial Sequence
  ENSG00000119041_28 (sequence is synthesized)
cacaagtaatataagactgggcaagtagtacgtatggaataaaggacatactgctgattgataaagtaaaaaactttttttttgtttgtttactcatctccactatttattatatgttct

SEQ ID NO: 229440 - DNA, 120 bp, Artificial Sequence
  ENSG00000119041_29 (sequence is synthesized)
tgaatttaagttaacagtactttttagatgatatactgttagcttaataacaactttttagggaaaaataaatgctgtaattaatgtgcacatgggttagtaacacccagcccaattgtg

SEQ ID NO: 229441 - DNA, 120 bp, Artificial Sequence
  ENSG00000119041_30 (sequence is synthesized)
ggagggaaacaagtagaggcttaggatcaaagaaataaaattgggacttattagaaattcttaccactgtttctactgtacacaaaactttctagttgagcagaatttgtatgcaataag

SEQ ID NO: 229442 - DNA, 120 bp, Artificial Sequence
  ENSG00000119041_31 (sequence is synthesized)
taaatatattgtatactccatgtgtataatttaaatgcattttatttttataattgaggttaactgtttcacatgcttaatttttactttatgccatttataggtaatggtagaggtaac

SEQ ID NO: 229443 - DNA, 120 bp, Artificial Sequence
  ENSG00000119041_32 (sequence is synthesized)
tgagatacagtaataagttagacttgtgtgttggaattctgtggaactgagcattctgtgctccgagtttctctcttaaattagctcactggactgtggctccagtgtctactaaatagc

SEQ ID NO: 229444 - DNA, 120 bp, Artificial Sequence
  ENSG00000119041_33 (sequence is synthesized)
cgtggaggaaataagtctccctaagggaaaaaaaaaccagctgatattgtatagttttgtttagcttttaaaatcatagcttccatttgctgagtttttactctgctactgtatgctaag

SEQ ID NO: 229445 - DNA, 120 bp, Artificial Sequence
  ENSG00000119041_34 (sequence is synthesized)
tatggtgctaaacactttggatatgttatctctgattctctcagggaactgcaaggtagttattattgatattgtcatcaccactttgtatctagagattaaatagcatgttcaagatca

SEQ ID NO: 229446 - DNA, 120 bp, Artificial Sequence
  ENSG00000119041_35 (sequence is synthesized)
aagaaagtgaggcgatgctaggccacggtgcccttcactcttgttgccttcatacccttagggtagcttaacgctgagtcttcaggaaaaaggcaagttatcagctgaagaaaatcccga

SEQ ID NO: 229447 - DNA, 120 bp, Artificial Sequence
  ENSG00000119041_36 (sequence is synthesized)
tttaaaagttttgtgtatttgtagattatgaatctctggtaactacttgtaacatttggctctgttttctgtgaatatttatccctagctaaaaaaaattcttacatcttcagaagagct

SEQ ID NO: 229448 - DNA, 120 bp, Artificial Sequence
  ENSG00000119041_37 (sequence is synthesized)
ataatgttgacacctaactacactgtaatactacacagtaataggacactaagcagatagataggtttttaaaaaatatttgtattttcagcacctggtaatacagtggtctagtacata

SEQ ID NO: 229449 - DNA, 120 bp, Artificial Sequence
  ENSG00000119041_38 (sequence is synthesized)
accacttaatgtatgtaacaagatctgcacttgagatacttcagatcaaatgcaccatctcttttctttagatgtcaagaaattataacttgaccctagagtttcacatttcttaataac

SEQ ID NO: 229450 - DNA, 120 bp, Artificial Sequence
  ENSG00000119041_39 (sequence is synthesized)
caaggaggtaacaataagcatcaaataattttgtatgaatatcttataaaaactaaaattgttttgcaattgggcttacagtaatttatttttcttttaaaataacaatctaaagatcat

SEQ ID NO: 229451 - DNA, 120 bp, Artificial Sequence
  ENSG00000119041_40 (sequence is synthesized)
aatttgagattgtctttagaccatttgagattgtcattagataattggtaataattctgacagctattcttttttgcggactttggaccaagtatattattgaaaaaaaaaaagtactta

SEQ ID NO: 229452 - DNA, 120 bp, Artificial Sequence
  ENSG00000119041_41 (sequence is synthesized)
gcatctactttgtaaaccttaggataagatattgagtaaaatatacaaatccataccctcatgggttgggatgcttttttgttttaatgggattagataataaaataaatacataacata

SEQ ID NO: 229453 - DNA, 120 bp, Artificial Sequence
  ENSG00000119041_42 (sequence is synthesized)
agtagaaggtgtgaaagtaagttttggataagtacataaggtattagaaatcgaataggaagcatacttgctaccaaaggacagactgagagagatataagaacttattaatagagttgg

SEQ ID NO: 229454 - DNA, 120 bp, Artificial Sequence
  ENSG00000119041_43 (sequence is synthesized)
cttcatttgcattatgttatataaaatttggctgaattgaaaaagactcatgaagtaacactggacagcaatctaattgaaaatatacttttcaaataaaatgaaattttccaatctaaa

SEQ ID NO: 229455 - DNA, 120 bp, Artificial Sequence
  ENSG00000119041_44 (sequence is synthesized)
aatctcaaagtatgaatttgaagtattttgctgagcaaacatttgaatgcctgtatgtacgtaatcctctatcactggggtccccaaccccggtaccagcccgtggcctgctagggactg

SEQ ID NO: 229456 - DNA, 120 bp, Artificial Sequence
  ENSG00000119041_45 (sequence is synthesized)
atataagcagccaagaacttactttcccaagatggtaataattattatagtgcaagtgtttctggtttcaggggagttttttgaaagtcagtattttaaattgtcttgctaggctactaa

SEQ ID NO: 229457 - DNA, 120 bp, Artificial Sequence
  ENSG00000119041_46 (sequence is synthesized)
gtgatttccccatcactaatgctttggaggaatgatttacttaatgatgccagagtgaagttgaaggactcacatttcccttagatgcctgtcttgaacctctcttaaccatagggtctg

SEQ ID NO: 229458 - DNA, 120 bp, Artificial Sequence
  ENSG00000119041_47 (sequence is synthesized)
gtttctagcaaaggattgtcagacttggggcaaaatctaattttgaagagtttttatagatttatatttaatatgttatattgggaaaaattaatatatttttcaatgctctttgagcca

SEQ ID NO: 229459 - DNA, 120 bp, Artificial Sequence
  ENSG00000119041_48 (sequence is synthesized)
atcagccgtttattacactgtgcctaagtccatagtaatctgcagtgaatcatttagactggaaaaaatagcttaagaaacatgactaaatcttttgaagaaatacatgaaagcaaaaag

SEQ ID NO: 229460 - DNA, 120 bp, Artificial Sequence
  ENSG00000119041_49 (sequence is synthesized)
tattctaataggatttcttatagagtcaacataaaagatgcattaaaaatcgaatagtcttggtttcaaatactgtgtgatggcagaaaactctagtggctcttacatgaaagcaaaaag

SEQ ID NO: 229461 - DNA, 120 bp, Artificial Sequence
  ENSG00000119041_50 (sequence is synthesized)
tattctaatagggtttcttattgagtcaacataaaagacgcattaaagatcgaatagtcttggtttcaaatactatgtgatggcagaaaactaatggctcttaagtattatatgatgaca

SEQ ID NO: 229462 - DNA, 120 bp, Artificial Sequence
  ENSG00000119041_51 (sequence is synthesized)
gaactctataattagagaagcattgattggcattttggggcagtagtgcactcacatcacagatatgagctaggaaagagagcacttaatgattaagataacacttttctgtttagatga

SEQ ID NO: 229463 - DNA, 120 bp, Artificial Sequence
  ENSG00000119041_52 (sequence is synthesized)
ataaatatgaatacaaatgtaataccatcgtaaaaagctgcattatttgtgagatttgaattttaaagatatgagcaggatatcttagtttgtattgcctttctacttagggctgtgata

SEQ ID NO: 229464 - DNA, 120 bp, Artificial Sequence
  ENSG00000119041_53 (sequence is synthesized)
ttgaaactgctcctgtgttactaatagtgtatactttaaaaatcctatttaatcatgattctgatcaatgctgtttccattttgagcccatgtggcttgagatgaatgaaagataaaatc

SEQ ID NO: 229465 - DNA, 120 bp, Artificial Sequence
  ENSG00000119041_54 (sequence is synthesized)
tcagagtcatctaaaaatgataaagaaatttgggatcagtatataagaaagataattagaggaattcagttatttcagtaacaaaataacaaaatgtttttaaagtgaaaaatgagaaaa

SEQ ID NO: 229466 - DNA, 120 bp, Artificial Sequence
  ENSG00000119041_55 (sequence is synthesized)
cccttcactcttgttgccttcatacccttaggtgtgggggacccagacgaccgctttcactgtgatggggcgggctgggaactttcagcagcttcttccttatcttacagaaactccggt

SEQ ID NO: 229467 - DNA, 120 bp, Artificial Sequence
  ENSG00000119042_0 (sequence is synthesized)
gagagagagagagagagactgagaaagtcgaactcgagcttaggtaaccaacaaacccaattactaggctttattgatactaaaaggaaaagttcccctcgtaaaatttctctgagctta

SEQ ID NO: 229468 - DNA, 120 bp, Artificial Sequence
  ENSG00000119042_1 (sequence is synthesized)
ttagttatttaaatcagccccagggttggacgcgtgacgccgaaggcaccttctgtcggctcctggaggtgagcagccagcgtccctgcgccgacccacagcccctcgctccgtcctggg

SEQ ID NO: 229469 - DNA, 120 bp, Artificial Sequence
  ENSG00000119042_2 (sequence is synthesized)
cacttggggcgaaggcgggcgcagcgagccgagaagtactgaactcctaatatcaccaattcttctaagttcctggacattgatccggaggaggattcgcagttcaacatcaaggtccct

SEQ ID NO: 229470 - DNA, 120 bp, Artificial Sequence
  ENSG00000119042_3 (sequence is synthesized)
gtgcgttttattgcgacctgccggtgggaactttgtctccgagtcggagcagcatggagcggcggagcgagagcccgtgtctgcgggacagccccgaccggcggagcggcagcccggacg

SEQ ID NO: 229471 - DNA, 120 bp, Artificial Sequence
  ENSG00000119042_4 (sequence is synthesized)
tcaaggggcctcccccagtgaaggtggcccggctggagcagaacggcagccccatgggagcccgcgggaggcccaacggcgccgtggccaaggccgtgggaggtttgatgattcctgtct

SEQ ID NO: 229472 - DNA, 120 bp, Artificial Sequence
  ENSG00000119042_5 (sequence is synthesized)
tttgtgtcgtggagcagttggacggctctcttgaatatgacaacagagaagaacacgccgagtttgtcctggtgcggaaagatgtgctttttagccagctggtggagactgcgctcctgg

SEQ ID NO: 229473 - DNA, 120 bp, Artificial Sequence
  ENSG00000119042_6 (sequence is synthesized)
ccctggggtattctcacagctctgcggcccaggcccaaggaataatcaagctgggaaggtggaaccctctccccctcagttatgtgacagatgcacccgacgcgacagtggccgacatgc

SEQ ID NO: 229474 - DNA, 120 bp, Artificial Sequence
  ENSG00000119042_7 (sequence is synthesized)
tacaagatgtctatcatgttgtgacgttgaaaatccaattacaaagttgttcaaagttggaagacttgcctgcggagcagtggaaccatgccacagtccgcaatgccttaaaggaactgc

SEQ ID NO: 229475 - DNA, 120 bp, Artificial Sequence
  ENSG00000119042_8 (sequence is synthesized)
tcaaagagatgaaccagagcacattagccaaagaatgccctctctcccagagtatgatttcatccattgtaaatagcacatattatgccaatgtgtcagcaaccaagtgccaggagtttg

SEQ ID NO: 229476 - DNA, 120 bp, Artificial Sequence
  ENSG00000119042_9 (sequence is synthesized)
ggagatggtataaaaagtacaagaagattaaagtggaaagagtggaacgagaaaacctttcagactattgtgttctgggccagcgtccaatgcatttaccaaatatgaaccagctggcat

SEQ ID NO: 229477 - DNA, 120 bp, Artificial Sequence
  ENSG00000119042_10 (sequence is synthesized)
ccctggggaaaaccaacgaacagtctcctcacagccaaattcaccacagtactccaatccgaaaccaagtgcccgcattacagcccatcatgagccctggtcttctttctccccagctta

SEQ ID NO: 229478 - DNA, 120 bp, Artificial Sequence
  ENSG00000119042_11 (sequence is synthesized)
gtccacaacttgtaaggcaacaaatagccatggcccatctgataaaccaacagattgccgttagccggctcctggctcaccagcatcctcaagccatcaaccagcagttcctgaaccatc

SEQ ID NO: 229479 - DNA, 120 bp, Artificial Sequence
  ENSG00000119042_12 (sequence is synthesized)
cacccatccccagagcagttaagccagagccaaccaactcttccgtggaagtctctccagatatctaccagcaagtcagagatgagctgaagagggccagtgtgtcccaagctgtctttg

SEQ ID NO: 229480 - DNA, 120 bp, Artificial Sequence
  ENSG00000119042_13 (sequence is synthesized)
caagagtggcattcaaccgcacacagggattgttgtctgagattctgcgtaaggaagaagaccctcggacagcctctcagtctcttctagtaaacctgagggccatgcagaatttcctca

SEQ ID NO: 229481 - DNA, 120 bp, Artificial Sequence
  ENSG00000119042_14 (sequence is synthesized)
atctgccagaagtggagcgagatcgcatctaccaggatgagagggagcggagcatgaatcccaatgtgagcatggtctcctcggcctccagcagtcccagctcctcccgaacccctcagg

SEQ ID NO: 229482 - DNA, 120 bp, Artificial Sequence
  ENSG00000119042_15 (sequence is synthesized)
ccaaaacctcgacaccgacaacagacctccctattaaggtggacggcgccaacatcaacatcacagctgccatttatgacgagatccaacaggagatgaaaagggccaaggtgtctcaag

SEQ ID NO: 229483 - DNA, 120 bp, Artificial Sequence
  ENSG00000119042_16 (sequence is synthesized)
ccctgtttgccaaagtggctgcaaataaaagtcagggctggctgtgtgaactgctccgctggaaggagaacccaagcccagaaaaccgcaccctctgggaaaacctctgtaccatccgtc

SEQ ID NO: 229484 - DNA, 120 bp, Artificial Sequence
  ENSG00000119042_17 (sequence is synthesized)
gcttcctgaaccttccccagcatgagagggatgtcatctatgaggaggagtcaaggcatcaccacagcgaacgcatgcaacacgtggtccagcttccccctgagccggtgcaggtacttc

SEQ ID NO: 229485 - DNA, 120 bp, Artificial Sequence
  ENSG00000119042_18 (sequence is synthesized)
atagacagcagtctcagccagccaaggagagttcccctcccagagaagaagcgcctcccccacctcctccgactgaagacagttgtgccaaaaagccccggtctcgcacaaagatctcct

SEQ ID NO: 229486 - DNA, 120 bp, Artificial Sequence
  ENSG00000119042_19 (sequence is synthesized)
tagaagccctggggatcctccaaagctttattcatgatgtaggcctgtacccagaccaggaagccatccacactctttcggctcagctggatctccccaaacacaccatcatcaagttct

SEQ ID NO: 229487 - DNA, 120 bp, Artificial Sequence
  ENSG00000119042_20 (sequence is synthesized)
tccagaaccagcggtaccacgtgaagcaccacgggaagctgaaagagcacctgggctccgcggtggacgtggctgaatataaggacgaggagctgctgaccgagtcagaggagaacgaca

SEQ ID NO: 229488 - DNA, 120 bp, Artificial Sequence
  ENSG00000119042_21 (sequence is synthesized)
gcgaggaaggctccgaggagatgtacaaagtggaggctgaggaggaaaatgctgacaaaagcaaggcagcacctgccgaaattgaccagagataatgtgaacttctactaggcaaagcaa

SEQ ID NO: 229489 - DNA, 120 bp, Artificial Sequence
  ENSG00000119042_22 (sequence is synthesized)
aagttttttgttagtttgttttttgtttttgtttttgggtttttttggctttatttttgtctttttatgtctgttttgtttttcttacccttttggacatttctttgttgcacaggatac

SEQ ID NO: 229490 - DNA, 120 bp, Artificial Sequence
  ENSG00000119042_23 (sequence is synthesized)
acctatagactgaataagttcagtatttccgaatcagacatcgccttggcaaagacactaaagcgttacactttatcccgtctctatgactggatcatagtcattataatcacaggagac

SEQ ID NO: 229491 - DNA, 120 bp, Artificial Sequence
  ENSG00000119042_24 (sequence is synthesized)
tctgccttcattatccttgcacttaacggaagttacatcaggcaagtaccaggatgaaaagaactatgaaataaatgaaggaagctacaagtgtgtgtgtatatgtatatgtatatatct

SEQ ID NO: 229492 - DNA, 120 bp, Artificial Sequence
  ENSG00000119042_25 (sequence is synthesized)
ctatatttacatatatatattaaaattgcatgggacagagactttgcaatccgaaagaatagactgtgaaatgagttcttaaagaaaagacttgtttatgtattaaaaaaaccacttcac

SEQ ID NO: 229493 - DNA, 120 bp, Artificial Sequence
  ENSG00000119042_26 (sequence is synthesized)
agtgagtcgctttggctttttgataaactgcggcctgctctcagggtggggtgactatttttgaattcctatttattttttgtgtttgtccctgattttttttttttaattctatggctt

SEQ ID NO: 229494 - DNA, 120 bp, Artificial Sequence
  ENSG00000119042_27 (sequence is synthesized)
cctatctggcagcttaatgggtaatttttgaggtatgtatttaacaaaataaacgacactgccgaaaaaaaaaaaagtgaagtgaaaacaatcagggcacattaaaatgatacaagtcaa

SEQ ID NO: 229495 - DNA, 120 bp, Artificial Sequence
  ENSG00000119042_28 (sequence is synthesized)
ataaatcttaaagacacaatgcacacttaaaatgactcaataaaatgacttgctacgttccgttattcaatttgtcattactgtagtgaacagatgcatttctgtggaattccaaataag

SEQ ID NO: 229496 - DNA, 120 bp, Artificial Sequence
  ENSG00000119042_29 (sequence is synthesized)
taaaactgaaattcagtgcagagaaaactttgtccactagtgcaagtcttgatcaaatgacattttgacattggacatatggaattcatagtatgagccacattttgttgtgaaatttat

SEQ ID NO: 229497 - DNA, 120 bp, Artificial Sequence
  ENSG00000119042_30 (sequence is synthesized)
ttacctgcttgtggcttcaaatctgaaaattaataagcctgctcgtttaaaagttgtttgttgttgctgtttttttgtctttttgttttttactagaaaatagttcagtgtaatattaag

SEQ ID NO: 229498 - DNA, 120 bp, Artificial Sequence
  ENSG00000119042_31 (sequence is synthesized)
ttagaaaagaagttgctgcccagttaaaggggctccctctcaaataaatctccatccttccctctcccaaaagacatttctgatttctgcttcactttgggcttcctcttcttcgtacac

SEQ ID NO: 229499 - DNA, 120 bp, Artificial Sequence
  ENSG00000119042_32 (sequence is synthesized)
attccatctacctaatcaaacattttcagtccctgatctctcctgtcccttttcctgggatgacagccctaacaagaactgtttttgaatcgttgtgcagctccaggcaatagagtatgt

SEQ ID NO: 229500 - DNA, 120 bp, Artificial Sequence
  ENSG00000119042_33 (sequence is synthesized)
gaagcgatttcagtagaatcacttactcatcctaaaagaaaacattatcccagttacctacatcgcaattaccttatgtaaagcagaactaatgctgactggatgtttaatgggatgagc

SEQ ID NO: 229501 - DNA, 120 bp, Artificial Sequence
  ENSG00000119042_34 (sequence is synthesized)
attaaagctgcaatctactatagtactccagatctctttcggcttcctatgagaaacaccagaagcattactttccacttctacttacagtaattgcaagaggagacctcacattcagga

SEQ ID NO: 229502 - DNA, 120 bp, Artificial Sequence
  ENSG00000119042_35 (sequence is synthesized)
ctggcctagtgaacgtaatccatgctttaaactggccattaaacagtcccacatggttggattttttttttttttttgagttgtgctttcacaaaaccttgtcaaagacctcatgcaata

SEQ ID NO: 229503 - DNA, 120 bp, Artificial Sequence
  ENSG00000119042_36 (sequence is synthesized)
tcactttgaaagttattttctgtttactacacaaacattgtaatataactgttaatactatttatatatttgaaaggtataaaaggtaggagttaaaaaaaaaacctctatgtgtagata

SEQ ID NO: 229504 - DNA, 120 bp, Artificial Sequence
  ENSG00000119042_37 (sequence is synthesized)
ttaactcagaacttacaatatacagggagaagacatgttgcaatacaagctaattctagctgctcagtaacctctggagtttttaaagggacattttcctgtactttttcaaataatgat

SEQ ID NO: 229505 - DNA, 120 bp, Artificial Sequence
  ENSG00000119042_38 (sequence is synthesized)
gtttaaaaattatcttgacataagcgtcatatacctttgcaaaaggatggttgtttgcagttagccctggccccatccttcctatttctgtagtatgctgcagctttaatcagaaagtcc

SEQ ID NO: 229506 - DNA, 120 bp, Artificial Sequence
  ENSG00000119042_39 (sequence is synthesized)
atggttgctgcttcctgatctccgagttactctttccaaattgtcttcttacactgttgctgaaggtcactctgtacacgtaatggaaactgattttgccaagctcttacaaggtggttc

SEQ ID NO: 229507 - DNA, 120 bp, Artificial Sequence
  ENSG00000119042_40 (sequence is synthesized)
atctatcgatggcatccgcatttggtatcttttacacttcaaccaaaaatttattaggtatttttcaatgctaagtcttgccttttattttttaatttcactgccaagtttgcagtggtt

SEQ ID NO: 229508 - DNA, 120 bp, Artificial Sequence
  ENSG00000119042_41 (sequence is synthesized)
ctaagtgaatctgtgggcattttagcctgtggtcttgccagatctttgcgaattacaatgcatatatgtctatttattcaatatctgtcatataatatctatttggaagaagaaactttc

SEQ ID NO: 229509 - DNA, 120 bp, Artificial Sequence
  ENSG00000119042_42 (sequence is synthesized)
tcttgtagtgcctcttgacaaagcacaatttcccgcctttttttttttttgtgaaatgaaaaaaacaaattgtgttttattgcggtatcaacaatgtgaataaggattaacatattgtaa

SEQ ID NO: 229510 - DNA, 120 bp, Artificial Sequence
  ENSG00000119042_43 (sequence is synthesized)
atgttcttttttccatgtaaatcaactatctttgttatcactaagtgataattaatttttaacttatgtgcattgttaggctgttagaattttttggttgttaaaataaacgcattcaat

SEQ ID NO: 229511 - DNA, 120 bp, Artificial Sequence
  ENSG00000119042_44 (sequence is synthesized)
gagtccggctctggctgctggcagaggcggccgagaggggagaggctggaggtgacagcttgggcggccgccgcgtttcctcccgcgcgcggtcccgggtccctgcgtcttctcggctct

SEQ ID NO: 229512 - DNA, 120 bp, Artificial Sequence
  ENSG00000119042_45 (sequence is synthesized)
tggtgttaccggtcccaccgctctggccgcgcctcctcgcgagctagccgccctgcgaaccagcagccccggctcgccgccgccgccgccgcctccgggttctcagccctttctctccag

SEQ ID NO: 229513 - DNA, 120 bp, Artificial Sequence
  ENSG00000119042_46 (sequence is synthesized)
aacgggtctccttcccgaaggtgtgaaaaggctctttcagcctccttctcttcccccctcctccgccgtcccctcccccgctcgctcgggtgtccctttggaggagtcctttccctctcc

SEQ ID NO: 229514 - DNA, 120 bp, Artificial Sequence
  ENSG00000119042_47 (sequence is synthesized)
tcctcctccccctcctccctccccccatcatcatcataacaaccatctccgcaccagaagaagacaccctgacccaggaccttaaacattaggacctggggaagagggaaggggaaggag

SEQ ID NO: 229515 - DNA, 120 bp, Artificial Sequence
  ENSG00000119042_48 (sequence is synthesized)
taaagaggaagactaggagaacactgcaaagccaagcaccagaaactttccaccctggattctctacttttgctccatggacagagccccagtcagccaagtttcagacagaccgtgagc

SEQ ID NO: 229516 - DNA, 120 bp, Artificial Sequence
  ENSG00000119042_49 (sequence is synthesized)
agaggcgcttaagttaccaagggattagggctgatctcaggagaggtaaacgaccatccttggaacacggagcccttcttccctgcccggtatctgcgcgtgccttgggtagtccgcaca

SEQ ID NO: 229517 - DNA, 120 bp, Artificial Sequence
  ENSG00000119042_50 (sequence is synthesized)
accctccccagctccggatgccctgggatacccggacccaggagagagcgcgtcagcggggcgcagctactttgcactcgccgattctgacacaacagatagttaattggggccttcgaa

SEQ ID NO: 229518 - DNA, 120 bp, Artificial Sequence
  ENSG00000119042_51 (sequence is synthesized)
gtgaggttcttgacatcacagcgagctggttaaaccaaacaaaggaggagaggggtggaagacagaaaccacacacatatacctgcaaatgtgacttggtctgtttttttcccccattta

SEQ ID NO: 229519 - DNA, 120 bp, Artificial Sequence
  ENSG00000119042_52 (sequence is synthesized)
tctttctgtcagttttataaatcagagaataggatgctgaaaatctcctagaacatttaaaaccttggccttcaatgatttggctgctcaggtctaataatctccctggtaaaagcctac

SEQ ID NO: 229520 - DNA, 120 bp, Artificial Sequence
  ENSG00000119042_53 (sequence is synthesized)
catcatgggagctgagctaagagggcagcctgttcttgattgaaagccctcaccagcctcaccaacttcaaatggtggttcttcttgagaatctatgctccagagccatggaataatcaa

SEQ ID NO: 229521 - DNA, 120 bp, Artificial Sequence
  ENSG00000119042_54 (sequence is synthesized)
tccattgttgacattgccccagggttggctttttggagaaagcactatcattgtataaattaaagggatggtaaattcaggtaatcgtgtttgatgttaatagttcagtttacaggagag

SEQ ID NO: 229522 - DNA, 120 bp, Artificial Sequence
  ENSG00000119042_55 (sequence is synthesized)
tgactgttttaagtttaaaagaaaaaagaggttagtgcaggttataaagtgctctttcttgtccctaaaaagaagtagtcatattttgaaaaaataactataattttttttttcagagta

SEQ ID NO: 229523 - DNA, 120 bp, Artificial Sequence
  ENSG00000119042_56 (sequence is synthesized)
acagtaatactggggacagaattgagataggttataattatttttatctctttaaaaagctttatggatctcaggacatagaattagattaattaataatccttagttaatgaaacgcta

SEQ ID NO: 229524 - DNA, 120 bp, Artificial Sequence
  ENSG00000119042_57 (sequence is synthesized)
ttaccattgatccatgcatgaccatgattaattaactaattgattaattttgatgaggtaatggacatctttgaacccaacatgcaactcaggaccccaaatgttactaatgacttgggt

SEQ ID NO: 229525 - DNA, 120 bp, Artificial Sequence
  ENSG00000119042_58 (sequence is synthesized)
atgtactctctcatcctctccatttactgtttgcagatgtaaccctgatcttgaattttgtgattatcagtctcttgccattttttaaaacaaattataaaactatgcatgcccagacaa

SEQ ID NO: 229526 - DNA, 120 bp, Artificial Sequence
  ENSG00000119042_59 (sequence is synthesized)
atgcatgcccagacaatctatttttttcccttggttttgaacgttataaaagaaataaaattatgttttataattttataagtaaagttttatttaaaaatttataaaaatccttcaaaa

SEQ ID NO: 229527 - DNA, 120 bp, Artificial Sequence
  ENSG00000119042_60 (sequence is synthesized)
tgataaaatgataatggatagtttacttttatttttaatgtttgagagaattatatgccaattataacactaaatgttgaaaatgtaaacagttaattcacacgtcttatttttattgag

SEQ ID NO: 229528 - DNA, 120 bp, Artificial Sequence
  ENSG00000119042_61 (sequence is synthesized)
ggtgcttatatgtaagacattcttttctgctagtagttcttaaactggagtgtgcatcagaatcacctggagggctgtgaaacacagactgctgggcctcatcccatagtttctgattga

SEQ ID NO: 229529 - DNA, 120 bp, Artificial Sequence
  ENSG00000119042_62 (sequence is synthesized)
gtaagtctgaggttggactcagaaatggacatttctaacaagatcccaggtgattatgatggtactgatccggggccgcatgttgagaaaaacttacctagcccttatatgagtaagaac

SEQ ID NO: 229530 - DNA, 120 bp, Artificial Sequence
  ENSG00000119042_63 (sequence is synthesized)
aaagcagatgtgcataatctcggggagctaacgatctagtggtgaaaaccaggtaaccagataattagagtaaaatgtgaagtgttatgagtaatgttggagagtgtaagcaatagttgt

SEQ ID NO: 229531 - DNA, 120 bp, Artificial Sequence
  ENSG00000119042_64 (sequence is synthesized)
ggtggaggttcatggtgagctggaggtgaggaatacttccaggagaatgaatatggtaagccttcaagaaaacagtagattaaaatttcagcaccctcgtaaatgcaaggcaggaagcta

SEQ ID NO: 229532 - DNA, 120 bp, Artificial Sequence
  ENSG00000119042_65 (sequence is synthesized)
agctctatgtgggtgcaaagaggaaaaagataatgggcaagcacatatgtaaacaacactctagagtattaggttgtcaatgggttagaccttgaaggattaataaagtacagcaggcaa

SEQ ID NO: 229533 - DNA, 120 bp, Artificial Sequence
  ENSG00000119042_66 (sequence is synthesized)
agatgatgaagaagaagattattattttaaggtaaagacattcataggaaagatgttgagttaaaaaatgcaggaataatttgaagacataaaacaactgatttctgagaaaaaccctgt

SEQ ID NO: 229534 - DNA, 120 bp, Artificial Sequence
  ENSG00000119042_67 (sequence is synthesized)
gaacgtacagaatgtaggaatgctttcatttatctgatacctgttcagagacacatgataacacacgctgtagatggaccttacaaatgaaagaaagcatgctggattgaaacctcaata

SEQ ID NO: 229535 - DNA, 120 bp, Artificial Sequence
  ENSG00000119042_68 (sequence is synthesized)
gattgaaacctcaataatttggaaaatacaggaatgtttccaaatttaatgattacttcagaagttaaggggctgggcacagtggctcatgtctgtagtcctagcactttgggaggccaa

SEQ ID NO: 229536 - DNA, 84 bp, Artificial Sequence
  ENSG00000119042_69 (sequence is synthesized)
gagttcaagaccagcctgggcaagatggtaaaacaccatctctactaaaacagaacaaaacaaaaaaattagctgggcgtggtg

SEQ ID NO: 229537 - DNA, 120 bp, Artificial Sequence
  ENSG00000119042_70 (sequence is synthesized)
cgatcgccctcctatctccaaagtcgaaagtactccgcgcagttaacagagctgggagccgaggcagccgcggtcgcctcttgcgcgtcggtctgcgtctccgccggcagacgcggcacc

SEQ ID NO: 229538 - DNA, 120 bp, Artificial Sequence
  ENSG00000119042_71 (sequence is synthesized)
cacccagcgactgccttgtcgccgccgcctccgcgccgggacgagtgcgcctaggggctgggcgaggcggccgcgccctggacccgccacaaggaggaggaccagaccctgggccccggt

SEQ ID NO: 229539 - DNA, 120 bp, Artificial Sequence
  ENSG00000119042_72 (sequence is synthesized)
gcctgcgcccagacgcacccacccgctggccgcggccaccgcctcgcgccgcactcggttctctgccatcggtccttcgccgcctcgtgcatgaggtcctcgtcaccccgctccgaccgc

SEQ ID NO: 229540 - DNA, 120 bp, Artificial Sequence
  ENSG00000119042_73 (sequence is synthesized)
cgactctccccttcctcttccctcctccctgcctcccacccgcccctcgcctgtccctctgcctccttcgcagccccgccgccgttgggtcgccgtgctcacagcgattgattgattgat

SEQ ID NO: 229541 - DNA, 120 bp, Artificial Sequence
  ENSG00000119042_74 (sequence is synthesized)
gtttaatttcctgccaggcggggcccccctccccccgcaacctccccagccctcctccccgccccccactcccctcttttcttgcggtggaccagtctggcttgggtttagatccatccc

SEQ ID NO: 229542 - DNA, 120 bp, Artificial Sequence
  ENSG00000119042_75 (sequence is synthesized)
ccccacccccatcccgaaataatccagagacttcccctacccccaccccaaattattattttgaaggcgctagatctggggaccgaaagggggagggggagaaatcggaaaccgaggaca

SEQ ID NO: 229543 - DNA, 88 bp, Artificial Sequence
  ENSG00000119042_76 (sequence is synthesized)
atttaaggaaatccagcagcacgccaccatgcctggcttatttccgtatttttagtagtaatagggtttcactatattggccaggctg

SEQ ID NO: 229544 - DNA, 87 bp, Artificial Sequence
  ENSG00000119042_77 (sequence is synthesized)
atctttcatatatctttctaaagcaaaaaaagccaaattcttccatcatggtttcctttgggacttctagacctatagtaaacagcc

SEQ ID NO: 229545 - DNA, 120 bp, Artificial Sequence
  ENSG00000119042_78 (sequence is synthesized)
atggtttcctttgggacttctagacctatagtaaacagccattcaggaagatggtttgtgcaaaaagaatgaaaataaaggcatgaaggaaaatgtatgcactagcatcttctgtctctc

SEQ ID NO: 229546 - DNA, 120 bp, Artificial Sequence
  ENSG00000119042_79 (sequence is synthesized)
agattttatgctctgcttcaaaaaccagtttaaaaataaaaaagatgagggcggttgcaatctgcttcattttatgcagattaggtatggccctcgggtacctgccaaattgctaatatg

SEQ ID NO: 229547 - DNA, 120 bp, Artificial Sequence
  ENSG00000119042_80 (sequence is synthesized)
gccttccgttgggcctgattagtgtgaacccggatcttttccattaaagcagaaatgaatttgttgggaataaggtaacaacaaaagtgatattttcactaataaccgtgggtcaggtta

SEQ ID NO: 229548 - DNA, 120 bp, Artificial Sequence
  ENSG00000119042_81 (sequence is synthesized)
cattaaagcagtttctcagtgtgtacctgaggcagactaccctcagcatttatgatttcctccatcctcacttggctcctctctgaggacatcgtggtttttagagaccagtgggaccgt

SEQ ID NO: 229549 - DNA, 120 bp, Artificial Sequence
  ENSG00000119042_82 (sequence is synthesized)
gacctccttttataccgaagctactttgagaggtcattttcttctacattccaaatgcaaaatgttattctcatttttgtaaacacatctgtaggccttacacttgtaataacaagtatc

SEQ ID NO: 229550 - DNA, 120 bp, Artificial Sequence
  ENSG00000119042_83 (sequence is synthesized)
ttaaattatccagaatgaatgtttatataaggatatccactctgggcaattgaatttttggataattccaatagccattttgagtgcccctgggtgaagcattaattatcttccaaaaag

SEQ ID NO: 229551 - DNA, 120 bp, Artificial Sequence
  ENSG00000119042_84 (sequence is synthesized)
ataatggagacaataaatatggaactatcaagcatctcttatgactctattagaatacatttttaagaaaatattttggtaccaatgattgtattttgtgggaaaagaattagaggtttg

SEQ ID NO: 229552 - DNA, 120 bp, Artificial Sequence
  ENSG00000119042_85 (sequence is synthesized)
tatgaactaagcagcaactggaagttcaaaaagacaaattgggccctatctgcagatttgggtgcctaaagacttatacaaagtaaagtcagctttgtcagttgcctaatttagcccata

SEQ ID NO: 229553 - DNA, 120 bp, Artificial Sequence
  ENSG00000119042_86 (sequence is synthesized)
ttgaaaatcactggagctttagcacgagcagtgtttcatgtgaagtcattttgtaacccaaattatttcttgcccatggaggagtaagaaacacatttaacagttgacattctgcatcat

SEQ ID NO: 229554 - DNA, 120 bp, Artificial Sequence
  ENSG00000119042_87 (sequence is synthesized)
catggacagaccagagagagaagtagctacacccaaaatacatacgaaagtcttttacgtgggtttgcttcccattaagtggtttatggatgaataaaatatttatttttaaaggcctta

SEQ ID NO: 229555 - DNA, 120 bp, Artificial Sequence
  ENSG00000119048_0 (sequence is synthesized)
agactgaccgcggggcagctgcggagcatgtcgaccccggcccggaggaggctcatgcgggatttcaagcggttacaagaggacccacctgtgggtgtcagtggcgcaccatctgaaaac

SEQ ID NO: 229556 - DNA, 120 bp, Artificial Sequence
  ENSG00000119048_1 (sequence is synthesized)
aacatcatgcagtggaatgcagttatatttggaccagaagggacaccttttgaagatggtacttttaaactagtaatagaattttctgaagaatatccaaataaaccaccaactgttagg

SEQ ID NO: 229557 - DNA, 120 bp, Artificial Sequence
  ENSG00000119048_2 (sequence is synthesized)
tttttatccaaaatgtttcatccaaatgtgtatgctgatggtagcatatgtttagatatccttcagaatcgatggagtccaacatatgatgtatcttctatcttaacatcaattcagtct

SEQ ID NO: 229558 - DNA, 120 bp, Artificial Sequence
  ENSG00000119048_3 (sequence is synthesized)
ctgctggatgaaccgaatcctaacagtccagccaatagccaggcagcacagctttatcaggaaaacaaacgagaatatgagaaaagagtttcggccattgttgaacaaagctggaatgat

SEQ ID NO: 229559 - DNA, 120 bp, Artificial Sequence
  ENSG00000119048_4 (sequence is synthesized)
tcataatagacaactggtctgttaatctttttcatcattgttgtgtataatttacctctcattagaaaggctaacaaattttaagtgccacaggttttaaggattctgcagaaaaaaaag

SEQ ID NO: 229560 - DNA, 120 bp, Artificial Sequence
  ENSG00000119048_5 (sequence is synthesized)
aaaaaagtccttcagtttagaacctacaaaagcttgtgtatcttgattaatgtactttttattgcatggtgtgaactaagttattgctgcataaatttgtaatatatcctgtttgtattt

SEQ ID NO: 229561 - DNA, 120 bp, Artificial Sequence
  ENSG00000119048_6 (sequence is synthesized)
ttttccaagtgtataatgttggtgtggagttttcatgacagaatatacacattttgtaaatctgtacttttttcaaatattgaatgccttatttttgaattctttagatttttaaattgg

SEQ ID NO: 229562 - DNA, 120 bp, Artificial Sequence
  ENSG00000119048_7 (sequence is synthesized)
agaaaagcacttaaagttttttatatatgaatattacatgtaaagctgttaaaatacataacttcagtgcaagagactttgtcacttatttccttatgtgtgtaggaggggttaataagt

SEQ ID NO: 229563 - DNA, 120 bp, Artificial Sequence
  ENSG00000119048_8 (sequence is synthesized)
ctctagctctccatctattgatagtttcatttacaatttcaaaagaacattcttatattttatcaaggaagtcttcaaatttgattctaaatagcgattataatctccaactttattttg

SEQ ID NO: 229564 - DNA, 120 bp, Artificial Sequence
  ENSG00000119048_9 (sequence is synthesized)
ttacagtttcttcatgcattacttactgttaaaactgtaccttttgcgatttcacagttggcacttctgccatgagcagagaactgatgcgacttgttttgctgcttggtagcactttaa

SEQ ID NO: 229565 - DNA, 120 bp, Artificial Sequence
  ENSG00000119048_10 (sequence is synthesized)
aaaattttttgattaatgaagaaagtaaaaccataaacatttgccaaaaattcatgccccagtattagcaatgaattagttgcattggtttgagaaaggcacatattggagggaaatctt

SEQ ID NO: 229566 - DNA, 120 bp, Artificial Sequence
  ENSG00000119048_11 (sequence is synthesized)
ggtgtaacttaaatatttgaaaattacctttaatgcaatgcatatctgtttattctgggaaatgttttaatgccagggcctgctgagttgcttcttcttgtggagattttttttttaatc

SEQ ID NO: 229567 - DNA, 120 bp, Artificial Sequence
  ENSG00000119048_12 (sequence is synthesized)
tcctgagttgtataaaagttgtactgcatcttagtttactggataaatttaaaacacagtattgtagaaagctaatacaaaactatcctatgccttcaaatagtatagaaaatggaaaat

SEQ ID NO: 229568 - DNA, 120 bp, Artificial Sequence
  ENSG00000119048_13 (sequence is synthesized)
atacaagtaaattctgttgaaccacctgtgtagtctctctagtagttaaaacagctattttagtaaccccaagagtttcttctcatatccataaaattggattacagtatggcaatatct

SEQ ID NO: 229569 - DNA, 120 bp, Artificial Sequence
  ENSG00000119048_14 (sequence is synthesized)
acagcttctattcattatgcaacgtttaacattgattggataaatgcttataggctgggccaggtggctcccacctgtagtcccagcactttgggaggcaaaggcgggaggatcacttga

SEQ ID NO: 229570 - DNA, 120 bp, Artificial Sequence
  ENSG00000119048_15 (sequence is synthesized)
ggccaggactttgagaccagccagggcaacataataagacttttctctactttaaattttttaaaaaattagttgggcatagtggcacttgcctgtagtctcagctacttaggaggctga

SEQ ID NO: 229571 - DNA, 79 bp, Artificial Sequence
  ENSG00000119048_16 (sequence is synthesized)
tgagctgtcctgtctttaaaaataaaagctattacttggcaaattctgaggtaagtgtatgatcttagggaactttgat

SEQ ID NO: 229572 - DNA, 120 bp, Artificial Sequence
  ENSG00000119048_17 (sequence is synthesized)
caaattctgaggtaagtgtatgatcttagggaactttgatacaaatgggaattcactcactggaatcgtggctcccaaaaagatgctttaattgtgtggtgcttttatagtttagctcca

SEQ ID NO: 229573 - DNA, 120 bp, Artificial Sequence
  ENSG00000119048_18 (sequence is synthesized)
gtgagttgaaaggtttaacaaataataggtgtgtgctgaatctttaagaaaagtaaacatataacaactgtctaggaaaagaaactgaggtggaatgagagatcttaaggactaaaactg

SEQ ID NO: 229574 - DNA, 120 bp, Artificial Sequence
  ENSG00000119048_19 (sequence is synthesized)
acattcaaaccatagcaggtgcaaaataagagaccttagttttaagacaggttatcctgtgatacagaagaatttagttattacctaatatttaaaacttctaagccaagcattctgttt

SEQ ID NO: 229575 - DNA, 120 bp, Artificial Sequence
  ENSG00000119048_20 (sequence is synthesized)
caacctctgcctcccgggttcaatctctgctggatgaaccgaatcctaacagtccagccaatagccaggcagcacagctttatcaggaaaacaaacgagaatatgagaaaagagtttcgg

SEQ ID NO: 229576 - DNA, 87 bp, Artificial Sequence
  ENSG00000119048_21 (sequence is synthesized)
ggaatgcagttatatttgggtgagttgaaaggtttaacaaataatagaaacagggtctccctatgttgcccaggctgggcttgaact

SEQ ID NO: 229577 - DNA, 120 bp, Artificial Sequence
  ENSG00000119048_22 (sequence is synthesized)
aagtatttagacccaaaattatatgacatgttaatctctgaagtaatttgttgttttgtataacttttctgtaatatattccatatctgacccctgttggtataaagaacaactatgcaa

SEQ ID NO: 229578 - DNA, 120 bp, Artificial Sequence
  ENSG00000119121_0 (sequence is synthesized)
agagtttctgcctccacagttaaaagctcagacagggctttgggagcagggcctgcaaatcaaagatgaaagaacaacctgtcttggagcgcttgcagtcccagaaatcctggattaaag

SEQ ID NO: 229579 - DNA, 120 bp, Artificial Sequence
  ENSG00000119121_1 (sequence is synthesized)
gagtatttgacaagagagaatgtagcacaatcatacccagctcaaaaaatcctcacagatgtactccagtatgccaagtctgccagaatttaatcaggtgttactgtggccgactgattg

SEQ ID NO: 229580 - DNA, 120 bp, Artificial Sequence
  ENSG00000119121_2 (sequence is synthesized)
gagaccatgctgggatagattattcctggaccatctcagctgccaagggtaaagaaagtgaacaatggtctgttgaaaagcacacaacgaaaagcccaacagatacttttggcacgatta

SEQ ID NO: 229581 - DNA, 120 bp, Artificial Sequence
  ENSG00000119121_3 (sequence is synthesized)
atttccaagatggagagcacacccatcatgccaagtatattagaacttcttatgatacaaaactggatcatctgttacatttaatgttgaaagagtggaaaatggaactgcccaagcttg

SEQ ID NO: 229582 - DNA, 120 bp, Artificial Sequence
  ENSG00000119121_4 (sequence is synthesized)
tgatctcagtccatgggggcatccagaactttactatgccctctaaatttaaagagattttcagccaaggtttggttaaagctgcagagacaacaggagcgtggataataactgaaggca

SEQ ID NO: 229583 - DNA, 120 bp, Artificial Sequence
  ENSG00000119121_5 (sequence is synthesized)
tcaatacaggagtgtccaagcatgttggggatgccttgaaatcccattcctctcattccttgagaaaaatctggacagttggaatccctccttggggtgtcattgagaaccagagagacc

SEQ ID NO: 229584 - DNA, 120 bp, Artificial Sequence
  ENSG00000119121_6 (sequence is synthesized)
ttattggaaaagatgtggtgtgcctgtaccagactctggataaccccctcagcaagctcacaacactcaacagcatgcactcgcacttcatcctgtctgatgatgggaccgtgggcaagt

SEQ ID NO: 229585 - DNA, 120 bp, Artificial Sequence
  ENSG00000119121_7 (sequence is synthesized)
atggaaatgaaatgaagctcagaaggaacctggagaagtacctctctctgcagaaaatacactgccgctcaagacaaggcgtgccggtcgtggggctggtggtggaaggcggtcccaacg

SEQ ID NO: 229586 - DNA, 120 bp, Artificial Sequence
  ENSG00000119121_8 (sequence is synthesized)
tcatcctgtcagtgtgggagactgtcaaggacaaggacccagtggtggtgtgtgagggcacaggtagggcggctgacctcctggccttcacacacaaacacctggcagatgaagggatgc

SEQ ID NO: 229587 - DNA, 120 bp, Artificial Sequence
  ENSG00000119121_9 (sequence is synthesized)
tgcgacctcaggtgaaagaggagatcatctgcatgattcagaacactttcaactttagtcttaaacagtccaagcaccttttccaaattctaatggagtgtatggttcacagggattgta

SEQ ID NO: 229588 - DNA, 120 bp, Artificial Sequence
  ENSG00000119121_10 (sequence is synthesized)
ttaccatatttgatgctgactctgaagagcagcaagacctggacttagcaatcctaacagctttgctgaagggcacaaatttatcagcgtcagagcaattaaatctggcaatggcttggg

SEQ ID NO: 229589 - DNA, 120 bp, Artificial Sequence
  ENSG00000119121_11 (sequence is synthesized)
acagggtggacattgccaagaaacatatcctaatttatgaacaacactggaagcctgatgccctggaacaagcaatgtcagatgctttagtgatggatcgggtggattttgtgaagctct

SEQ ID NO: 229590 - DNA, 120 bp, Artificial Sequence
  ENSG00000119121_12 (sequence is synthesized)
taatagaatatggagtgaacctccatcgctttcttaccatccctcgactggaagagctctacaatacaaaacaaggacctactaatacactcttgcatcatctcgtccaagatgtgaaac

SEQ ID NO: 229591 - DNA, 120 bp, Artificial Sequence
  ENSG00000119121_13 (sequence is synthesized)
agcatacccttctttcaggctaccgaataaccttgattgacattggattagtagtagaatacctcattggtagagcatatcgcagcaactacactagaaaacatttcagagccctctaca

SEQ ID NO: 229592 - DNA, 120 bp, Artificial Sequence
  ENSG00000119121_14 (sequence is synthesized)
acaacctctacagaaaatacaagcaccagagacactcctcaggaaatagaaatgagtctgcagaaagtacgctgcactcccagttcattagaactgcacagccatacaaattcaaggaaa

SEQ ID NO: 229593 - DNA, 120 bp, Artificial Sequence
  ENSG00000119121_15 (sequence is synthesized)
agtctatagtccttcataaatcaaggaagaagtcaaaagaacaaaatgtatcagatgaccctgagtctactggctttctttacccttacaatgacctgctggtttgggctgtgctgatga

SEQ ID NO: 229594 - DNA, 120 bp, Artificial Sequence
  ENSG00000119121_16 (sequence is synthesized)
aaaggcagaagatggctatgttcttctggcagcatggagaggaggccacggttaaagccgtgattgcgtgtatcctctaccgggcaatggcccatgaagctaaggagagtcacatggtgg

SEQ ID NO: 229595 - DNA, 120 bp, Artificial Sequence
  ENSG00000119121_17 (sequence is synthesized)
atgatgcctcagaagagttgaagaattactcaaaacagtttggccagctggctctggacttgttggagaaggcattcaagcagaatgagcgcatggccatgacgctgttgacgtatgaac

SEQ ID NO: 229596 - DNA, 120 bp, Artificial Sequence
  ENSG00000119121_18 (sequence is synthesized)
tcaggaactggagcaattcgacctgccttaaactggccgtgtcgggaggattacgaccctttgtttcacatacttgtacccagatgctactgacagacatgtggatggggaggctgaaaa

SEQ ID NO: 229597 - DNA, 120 bp, Artificial Sequence
  ENSG00000119121_19 (sequence is synthesized)
tgaggaaaaactcttggttaaagattattataagcattattttaccacccaccattttgacactggaatttaaaagcaaagctgagatgtcacatgttccccagtcccaggacttccaat

SEQ ID NO: 229598 - DNA, 120 bp, Artificial Sequence
  ENSG00000119121_20 (sequence is synthesized)
ttatgtggtattacagtgaccagaacgccagcagttccaaagaaagtgcttctgtgaaagagtatgatttggaaaggggccatgatgagaaactggatgaaaatcagcattttggtttgg

SEQ ID NO: 229599 - DNA, 120 bp, Artificial Sequence
  ENSG00000119121_21 (sequence is synthesized)
aaagtgggcaccaacaccttccgtggaccaggaaagtctatgagttctacagtgctccaattgtcaagttttggttttatacgatggcgtatttggcattcctcatgctgttcacttaca

SEQ ID NO: 229600 - DNA, 120 bp, Artificial Sequence
  ENSG00000119121_22 (sequence is synthesized)
ccgtgttggtggagatgcagccccagcccagcgtgcaggagtggcttgttagcatttacatcttcaccaatgctattgaggtggtcagggagatctgtatttcagaacctgggaagttta

SEQ ID NO: 229601 - DNA, 120 bp, Artificial Sequence
  ENSG00000119121_23 (sequence is synthesized)
cccaaaaggtgaaggtatggattagtgagtactggaacttaacagaaactgtggccattggcctgttttcagctggcttcgtccttcgatggggtgaccctccttttcacacagcgggaa

SEQ ID NO: 229602 - DNA, 120 bp, Artificial Sequence
  ENSG00000119121_24 (sequence is synthesized)
gactgatctactgcatagacatcatattctggttctcacggctcctggacttctttgctgtgaatcaacatgcaggtccatatgtgaccatgattgcaaaaatgacagcaaacatgttct

SEQ ID NO: 229603 - DNA, 120 bp, Artificial Sequence
  ENSG00000119121_25 (sequence is synthesized)
atattgtgatcatcatggccatagtcctgctgagctttggagtggcacgcaaggccatcctttcgccaaaagagccaccatcttggagtctagctcgagatattgtatttgagccatact

SEQ ID NO: 229604 - DNA, 120 bp, Artificial Sequence
  ENSG00000119121_26 (sequence is synthesized)
ggatgatatacggagaagtctatgctggagaaatagatgtttgttcaagccagccatcctgccctcctggttcttttcttactccattcttgcaagctgtctacctcttcgtgcaatata

SEQ ID NO: 229605 - DNA, 120 bp, Artificial Sequence
  ENSG00000119121_27 (sequence is synthesized)
tcatcatggtgaacctgttgattgctttcttcaacaacgtttacttagatatggaatccatttcaaataacctgtggaaatacaaccgctatcgctacatcatgacctaccacgagaagc

SEQ ID NO: 229606 - DNA, 120 bp, Artificial Sequence
  ENSG00000119121_28 (sequence is synthesized)
cctggctgcccccacctctcatcctgctgagccacgtgggccttctcctccgccgcctgtgctgtcatcgagctcctcacgaccaagaagagggtgacgttggattaaaactctacctca

SEQ ID NO: 229607 - DNA, 120 bp, Artificial Sequence
  ENSG00000119121_29 (sequence is synthesized)
gtaaggaggatctgaaaaaacttcatgattttgaggagcagtgcgtggaaaaatacttccatgagaagatggaagatgtgaattgtagttgtgaggaacgaatccgagtgacatcagaaa

SEQ ID NO: 229608 - DNA, 120 bp, Artificial Sequence
  ENSG00000119121_30 (sequence is synthesized)
gggttacagagatgtacttccagctgaaagaaatgaatgaaaaggtgtcttttataaaggactccttactgtctttggacagccaggtgggacacctgcaggatctctctgccctgactg

SEQ ID NO: 229609 - DNA, 120 bp, Artificial Sequence
  ENSG00000119121_31 (sequence is synthesized)
tggataccctgaaagtcctttctgctgttgacactttgcaagaggatgaggctctcctggccaagagaaagcattctacttgcaaaaaacttccccacagctggagcaatgtcatctgtg

SEQ ID NO: 229610 - DNA, 120 bp, Artificial Sequence
  ENSG00000119121_32 (sequence is synthesized)
cagaggttctaggcagcatggagatcgctggagagaagaaataccagtattatagcatgccctcttctttgctgaggagcctggctggaggccggcatcccccaagagtgcagagggggg

SEQ ID NO: 229611 - DNA, 120 bp, Artificial Sequence
  ENSG00000119121_33 (sequence is synthesized)
cacttcttgagattacaaacagtaaaagagaggctacaaatgtaagaaatgaccaggaaaggcaagaaacacaaagtagtatagtggtttctggggtgtctcctaacaggcaagcacact

SEQ ID NO: 229612 - DNA, 120 bp, Artificial Sequence
  ENSG00000119121_34 (sequence is synthesized)
ccagatgtgctggcaactgaacaggacatccagactgaggttcttgttcatctgactgggcagaccccagttgtctctgactgggcatcagtggatgaacccaaggaaaagcacgagcct

SEQ ID NO: 229613 - DNA, 120 bp, Artificial Sequence
  ENSG00000119121_35 (sequence is synthesized)
attgctcacttactggatggacaagacaaggcagagcaagtgctacccactttgagttgcacacctgaacccatgacaatgagctcccctctttcccaagccaagatcatgcaaactgga

SEQ ID NO: 229614 - DNA, 120 bp, Artificial Sequence
  ENSG00000119121_36 (sequence is synthesized)
ggtggatatgtaaactgggcattttcagaaggtgatgaaactggtgtgtttagcatcaagaaaaagtggcaaacctgcttgccctccacttgtgacagtgattcctctcggagtgaacag

SEQ ID NO: 229615 - DNA, 120 bp, Artificial Sequence
  ENSG00000119121_37 (sequence is synthesized)
caccagaagcaggcccaggacagctccctatctgataactcaacaagatcggcccagagtagtgaatgctcagaggtgggaccatggcttcagccaaacacatccttttggatcaatcct

SEQ ID NO: 229616 - DNA, 120 bp, Artificial Sequence
  ENSG00000119121_38 (sequence is synthesized)
ctccgcagatacaggcccttcgctaggagtcatagttttagattccataaggaggagaaattgatgaagatctgtaagattaaaaatctttcaggctcttcagaaatagggcagggagca

SEQ ID NO: 229617 - DNA, 120 bp, Artificial Sequence
  ENSG00000119121_39 (sequence is synthesized)
tgggtcaaagcgaaaatgctaaccaaagacaggagactgtcaaagaaaaagaagaatactcaaggactccaggtgccaatcataacagtcaatgcctgctctcagagtgaccagttgaat

SEQ ID NO: 229618 - DNA, 120 bp, Artificial Sequence
  ENSG00000119121_40 (sequence is synthesized)
ccagagccaggagaaaacagcatctctgaagaggagtacagcaagaactggttcacagtgtccaaatttagtcacacaggtgtagaaccttacatacatcagaaaatgaaaactaaagaa

SEQ ID NO: 229619 - DNA, 120 bp, Artificial Sequence
  ENSG00000119121_41 (sequence is synthesized)
attggacaatgtgctatacaaatcagtgattacctaaagcagtctcaagaggatctcagcaaaaactctttgtggaattccaggagcaccaacctcaataggaactccctgctgaaaagt

SEQ ID NO: 229620 - DNA, 120 bp, Artificial Sequence
  ENSG00000119121_42 (sequence is synthesized)
tcaattggagttgacaagatctcagcctccttaaaaagccctcaagagcctcaccatcattattcagccattgaaaggaataatttaatgaggctttctcagaccataccatttacacca

SEQ ID NO: 229621 - DNA, 120 bp, Artificial Sequence
  ENSG00000119121_43 (sequence is synthesized)
gtccaactgtttgcaggagaagaaataactgtctacaggttggaggagagttcccctttaaaccttgataaaagcatgtcctcttggtctcagcgtgggagagcggcaatgatccaggta

SEQ ID NO: 229622 - DNA, 120 bp, Artificial Sequence
  ENSG00000119121_44 (sequence is synthesized)
ttgtcccgagaggagatggatgggggcctccgtaaagctatgagagtcgtcagcacttggtctgaggatgacattctcaagccgggacaagttttcattgtcaagtcctttcttcctgag

SEQ ID NO: 229623 - DNA, 120 bp, Artificial Sequence
  ENSG00000119121_45 (sequence is synthesized)
gttgtgcggacatggcataaaatcttccaggagagcactgtgcttcatctttgcctcagggaaattcaacaacaaagagctgctcaaaaattgatctataccttcaaccaagtgaaacca

SEQ ID NO: 229624 - DNA, 120 bp, Artificial Sequence
  ENSG00000119121_46 (sequence is synthesized)
caaaccataccctacacaccaaggttcctggaagttttcttaatctactgccattcagccaaccagtggttgaccattgagaagtatatgacaggggagttccggaagtataacaacaac

SEQ ID NO: 229625 - DNA, 120 bp, Artificial Sequence
  ENSG00000119121_47 (sequence is synthesized)
aatggtgatgaaatcacccccaccaacaccctggaggagctgatgttggctttctctcactggacctatgagtacactcggggagagctgctggttttagatttgcaaggtgttggagaa

SEQ ID NO: 229626 - DNA, 120 bp, Artificial Sequence
  ENSG00000119121_48 (sequence is synthesized)
aatttgacagatccatctgttataaaacctgaagtcaaacaatcaagaggaatggtgtttggaccggccaatttgggggaagatgcaattagaaacttcattgcaaaacatcattgtaac

SEQ ID NO: 229627 - DNA, 120 bp, Artificial Sequence
  ENSG00000119121_49 (sequence is synthesized)
tcctgctgccggaagctcaaactcccggatttaaaaagaaatgactattcccctgaaaggataaattccacctttggacttgagataaaaatagaatcagctgaggagcctccagcaagg

SEQ ID NO: 229628 - DNA, 120 bp, Artificial Sequence
  ENSG00000119121_50 (sequence is synthesized)
gagacgggtagaaattccccagaagatgatatgcaactataaaaagggaggagcaagaagatcccagtgcttgccctgcctgccaggaactctgtgataacatagattgatcaacgtgat

SEQ ID NO: 229629 - DNA, 120 bp, Artificial Sequence
  ENSG00000119121_51 (sequence is synthesized)
gttgattacatcagcgtctccttgggacacgccttctgagcctcacatctccttctgttcaaaggcctcattggtatatgatcaatgggttctcctagacactgacctctgtccagggca

SEQ ID NO: 229630 - DNA, 120 bp, Artificial Sequence
  ENSG00000119121_52 (sequence is synthesized)
ctttgcagctccatcctcaagttccacacgaagatgcttggatgagtcagctgggaatattgttcttgtgtacctcattgctttagctggtcacttggaactttggagcagaatcctgca

SEQ ID NO: 229631 - DNA, 120 bp, Artificial Sequence
  ENSG00000119121_53 (sequence is synthesized)
cattaaaggatggggttgggggggatacatttattttattttctcactatgtatgcagactggaccccctactactatttgtcacctcacccacagattgtatttatgtctatatatatg

SEQ ID NO: 229632 - DNA, 120 bp, Artificial Sequence
  ENSG00000119121_54 (sequence is synthesized)
ttcataaaaagttatgtgatttcctcctctgtcttttccacaacataggactttgaatagcaatgataggaaaaacaatggaacaagggtgggtttgcacagattggagcacattcctgc

SEQ ID NO: 229633 - DNA, 120 bp, Artificial Sequence
  ENSG00000119121_55 (sequence is synthesized)
acaaactaccaagtatactggtgaaatctcgatgggtttcagatattgtcagtgaatcatatgatgcctggatatttcaggtttctgtaaaagaaagggaaacctaaaacaaataccctt

SEQ ID NO: 229634 - DNA, 90 bp, Artificial Sequence
  ENSG00000119121_56 (sequence is synthesized)
tcactctttttactgcaacctctgcctcccgggcttgagcgattcttgtgtctcagtcttccgggtagctgggactacaggtgtgcacca

SEQ ID NO: 229635 - DNA, 89 bp, Artificial Sequence
  ENSG00000119121_57 (sequence is synthesized)
aaacgagaacaagaatatgaagaactggaaatcattaagaaagggtttcccttccttaaagctcaggggtactattagttaggagttga

SEQ ID NO: 229636 - DNA, 120 bp, Artificial Sequence
  ENSG00000119121_58 (sequence is synthesized)
ccttccttaaagctcaggggtactattagttaggagttgactaactcaacctgtaaaacaccactcctccttccaaagttgtatatataatattgcaggttaaattactttatgtcaggt

SEQ ID NO: 229637 - DNA, 120 bp, Artificial Sequence
  ENSG00000119121_59 (sequence is synthesized)
cctatgaagaaagatacggtttcagactgaaaacatgtttcacaggtgtttgcttccttccagagcagagttccctattcccctggcataaagaatgtatatatattttgaaatatggct

SEQ ID NO: 229638 - DNA, 120 bp, Artificial Sequence
  ENSG00000119121_60 (sequence is synthesized)
gagaacatgtcattggtttgtgaggcctaaggtgaagcactcctggcagccacactgtgtagtgtatttgagggatcagtcatccctcttgtatgctgggcctggttgccctacctcgaa

SEQ ID NO: 229639 - DNA, 120 bp, Artificial Sequence
  ENSG00000119121_61 (sequence is synthesized)
caagcaccagcttttcacacaaggagagatgtggggctgggagtcctctccccatcctattgcatctcctttcttattataagctgttccagttcacaggcagcaaacctcctgggtttg

SEQ ID NO: 229640 - DNA, 120 bp, Artificial Sequence
  ENSG00000119121_62 (sequence is synthesized)
aaaaattccaacttatttttatctttaatcctgacattagctgacttgctagtgagcttgctttaaaaatctacactcttgcattcttaggcatacaggggaaatgttgaaaaggaaggt

SEQ ID NO: 229641 - DNA, 120 bp, Artificial Sequence
  ENSG00000119121_63 (sequence is synthesized)
ggaaaaccaagaatttagtttgccaatgattgcctctgattcttgtaagtttgagttccacaagggctaatttattccccttttacttgggttttggggtggtggaaagcgggaaatttg

SEQ ID NO: 229642 - DNA, 120 bp, Artificial Sequence
  ENSG00000119121_64 (sequence is synthesized)
ggtgatttgttgattggcaatgaggataaaatgttaatacttttttggggacttaacaactttatcctattctacaagtcagtaaaggaacaattggtactcacctcagtgctgcactca

SEQ ID NO: 229643 - DNA, 120 bp, Artificial Sequence
  ENSG00000119121_65 (sequence is synthesized)
actatggaaagaggcagagtttgcttgcccaattgccaaactaaagacatcagttcattggtcaaatatttgttacctggaatggaacttgaaagcaaatacatttggatttcaaatttc

SEQ ID NO: 229644 - DNA, 120 bp, Artificial Sequence
  ENSG00000119121_66 (sequence is synthesized)
gctttccgaggcggctggagaagtgcccagacggccgtccctccgcgcccctgcgcgtccccgtgcgcccagtgttccccgtgcaggagtcccggagcgatgacagcgccggttacgtcc

SEQ ID NO: 229645 - DNA, 120 bp, Artificial Sequence
  ENSG00000119121_67 (sequence is synthesized)
actacaaaggatgtctgtgatgacagtggccatcccatttgatcctcgttattcttcttttatcgaaggaaactgagagtcaccttcttttctaggcagttaggtaactgaagccgaaag

SEQ ID NO: 229646 - DNA, 120 bp, Artificial Sequence
  ENSG00000119121_68 (sequence is synthesized)
acaggggctcagtcacccagtctggttgcaggcctgctgaggtctttcatggtcttccctgaccatcagagctagcttgaggggactaggggtgtgagctttgatggtcagggaagatga

SEQ ID NO: 229647 - DNA, 120 bp, Artificial Sequence
  ENSG00000119121_69 (sequence is synthesized)
tggtcagggaagatgacatttcatgtgttggtggggtggccctaggcagggaaggggttaagaccagacaggatttttagaaatagggaccttggggctgggtgtggtggctcacgcctg

SEQ ID NO: 229648 - DNA, 72 bp, Artificial Sequence
  ENSG00000119121_70 (sequence is synthesized)
gtgtagaggttacagtgagctgagatcgccccactgcacttcagcccaggtgacagagcaagactctgtctc

SEQ ID NO: 229649 - DNA, 120 bp, Artificial Sequence
  ENSG00000119125_0 (sequence is synthesized)
cggcagccgcccgcagctgcagagagtcccgctgcgtctccgccgcgtgcgccctcctcgaccagcagacccgcgctgcgctccgccgctgacatgtgtgccgctcagatgccgcccctg

SEQ ID NO: 229650 - DNA, 120 bp, Artificial Sequence
  ENSG00000119125_1 (sequence is synthesized)
gcgcacatcttccgagggacgttcgtccactccacctggacctgccccatggaggtgctgcgggatcacctcctcggcgtgagcgacagcggcaaaatagtgtttttagaagaagcatct

SEQ ID NO: 229651 - DNA, 120 bp, Artificial Sequence
  ENSG00000119125_2 (sequence is synthesized)
caacaggaaaaactggccaaagaatggtgcttcaagccgtgtgaaataagagaactgagccaccatgagttcttcatgcctgggctggttgatacacacatccatgcctctcagtattcc

SEQ ID NO: 229652 - DNA, 120 bp, Artificial Sequence
  ENSG00000119125_3 (sequence is synthesized)
tttgctggaagtagcatagacctgccactcttggagtggctgaccaagtacacatttcctgcagaacacagattccagaacatcgactttgcagaagaagtatataccagagttgtcagg

SEQ ID NO: 229653 - DNA, 120 bp, Artificial Sequence
  ENSG00000119125_4 (sequence is synthesized)
agaacactaaagaatggaacaaccacagcttgttactttgcaacaattcacactgactcatctctgctccttgccgacattacagataaatttggacagcgggcatttgtgggcaaagtt

SEQ ID NO: 229654 - DNA, 120 bp, Artificial Sequence
  ENSG00000119125_5 (sequence is synthesized)
tgcatggatttgaatgacacttttccagaatacaaggagaccactgaggaatcgatcaaggaaactgagagatttgtgtcagaaatgctccaaaagaactattctagagtgaagcccata

SEQ ID NO: 229655 - DNA, 120 bp, Artificial Sequence
  ENSG00000119125_6 (sequence is synthesized)
gtgacaccacgtttttccctctcctgctctgagactttgatgggtgaactgggcaacattgctaaaacccgtgatttgcacattcagagccatataagtgaaaatcgtgatgaagttgaa

SEQ ID NO: 229656 - DNA, 120 bp, Artificial Sequence
  ENSG00000119125_7 (sequence is synthesized)
gctgtgaaaaacttataccccagttataaaaactacacatctgtgtatgataaaaacaatcttttgacaaataagacagtgatggcacacggctgctacctctctgcagaagaactgaac

SEQ ID NO: 229657 - DNA, 120 bp, Artificial Sequence
  ENSG00000119125_8 (sequence is synthesized)
gtattccatgaacgaggagcatccatcgcacactgtcccaattctaatttatcgctcagcagtggatttctaaatgtgctagaagtcctgaaacatgaagtcaagatagggctgggtaca

SEQ ID NO: 229658 - DNA, 120 bp, Artificial Sequence
  ENSG00000119125_9 (sequence is synthesized)
gacgtggctggtggctattcatattccatgcttgatgcaatcagaagagcagtgatggtttccaatatccttttaattaataaggtaaatgagaaaagcctcaccctcaaagaagtcttc

SEQ ID NO: 229659 - DNA, 120 bp, Artificial Sequence
  ENSG00000119125_10 (sequence is synthesized)
agactagctactcttggaggaagccaagccctggggctggatggtgagattggaaactttgaagtgggcaaggaatttgatgccatcctgatcaaccccaaagcatccgactctcccatt

SEQ ID NO: 229660 - DNA, 120 bp, Artificial Sequence
  ENSG00000119125_11 (sequence is synthesized)
gacctgttttatggggacttttttggtgatatttctgaggctgttatccagaagttcctctatctaggagatgatcgaaatattgaagaggtttatgtgggcggaaagcaggtggttccg

SEQ ID NO: 229661 - DNA, 120 bp, Artificial Sequence
  ENSG00000119125_12 (sequence is synthesized)
ttttccagctcagtgtaagaccctcgggcgtctacaaagttctcctgggattagcgtggttctgcatctcccttgtgcccaggtggagttagaaagtcaaaaaatagtaccttgttcttg

SEQ ID NO: 229662 - DNA, 120 bp, Artificial Sequence
  ENSG00000119125_13 (sequence is synthesized)
ggatgactatccctttctgtgtctagttacagtattcacttgacaaatagttcgaaggaagttgcactaattctcaactctggttgagagggttcataaatttcatgaaaatatctccct

SEQ ID NO: 229663 - DNA, 120 bp, Artificial Sequence
  ENSG00000119125_14 (sequence is synthesized)
ttggagctgctcagacttactttaagctcaaacagaagggaatgctattactggtggtgttcctacggtaagacttaagcaaagcctttttcatatttgaaaatgtggaaagaaaagatg

SEQ ID NO: 229664 - DNA, 120 bp, Artificial Sequence
  ENSG00000119125_15 (sequence is synthesized)
ttcctaaaaggttagatattttgagctaataattgcaaaaattagaagactgaaaatggacccatgagagtatatttttatgagggagcaaaagttagactgagaacaaacgttagaaaa

SEQ ID NO: 229665 - DNA, 120 bp, Artificial Sequence
  ENSG00000119125_16 (sequence is synthesized)
tcacttcagattgtgtttgaaaattatatactgagcatactaatttaaaaagagaacttgttgaaatttaaaacgtgtttctaggttgaccttgtgttttagaaatttgcacttaatgga

SEQ ID NO: 229666 - DNA, 120 bp, Artificial Sequence
  ENSG00000119125_17 (sequence is synthesized)
atttgcatttcagagatgtgttagtgttgtgctttgccttctttggcgatgaatgtcagaaattgaatgccacatgctttcataatatagttttgtgcttcaaagtgtttgacagaagtt

SEQ ID NO: 229667 - DNA, 120 bp, Artificial Sequence
  ENSG00000119125_18 (sequence is synthesized)
gggtattaaagatttaaagtctcttaggaatattattcatgtaactccatggcataaatagttgtatttttgtgtactttaaaatcaacttataactgtgagatgttattgcttccattt

SEQ ID NO: 229668 - DNA, 120 bp, Artificial Sequence
  ENSG00000119125_19 (sequence is synthesized)
tattagaagagaaacaaattccatgctttatggaatttatgtagactggagtcttcgtgaactggggcaaatgctggcatccaggagccgccaatactaacaggacaggttccattgcca

SEQ ID NO: 229669 - DNA, 120 bp, Artificial Sequence
  ENSG00000119125_20 (sequence is synthesized)
tggcctattccacccaaacaatatgttgtagtttctggaaattccatactcagatatcagtctgctagaactttaaaatgaaggacaaatcctgttaaagaaatattgttaaaaatcttt

SEQ ID NO: 229670 - DNA, 120 bp, Artificial Sequence
  ENSG00000119125_21 (sequence is synthesized)
aaaccctgtgtattgaaagcactctattttctaattttatccagttttctgtttaactccttataatgtttaggatattaaaattttaggataatgaagagtacataatgtcctacttaa

SEQ ID NO: 229671 - DNA, 120 bp, Artificial Sequence
  ENSG00000119125_22 (sequence is synthesized)
gcaaagactatttttatgcttccataacctagaattaaaaccaaattatgaccttatgataaatctttaagtattggtgtgaatgttatttaaattctatatttttcttatttaattaca

SEQ ID NO: 229672 - DNA, 120 bp, Artificial Sequence
  ENSG00000119125_23 (sequence is synthesized)
aaatgagcaaggaaaaggaatagactttcttaatatattataacactcattcctagagcttaggggtgactctttaatattaccttatagtagaaactttatgtaatatagctaactccg

SEQ ID NO: 229673 - DNA, 120 bp, Artificial Sequence
  ENSG00000119125_24 (sequence is synthesized)
tatttacagaacaaaaaaacacagttccccctcctgtagtataaattttattttcacatacttagctaatttagcagtaattggcccagttttttccctaatagaaatacttttagattt

SEQ ID NO: 229674 - DNA, 120 bp, Artificial Sequence
  ENSG00000119125_25 (sequence is synthesized)
gattatgtatacatgacacctaaagagggaacaaaagttagttttatttttttaataaacaacagagtttgttttgtgagataagtatcttagtaaacccaatttccagtcttagtctgt

SEQ ID NO: 229675 - DNA, 120 bp, Artificial Sequence
  ENSG00000119125_26 (sequence is synthesized)
atttccaatatttctaattcctgagccacgtcaaagatgccttgccaaatttctccccatttctctacggggctagcaaaaatcttcagctttatcactcaacccctgccaaaggaactt

SEQ ID NO: 229676 - DNA, 120 bp, Artificial Sequence
  ENSG00000119125_27 (sequence is synthesized)
gattacatggtgtctaaccaaatgagcaggcttaggaatttagatgagatgtgtaagattcacttacaggcagtagctgcttctagcatttgcaagatcctacacttttaccttctttaa

SEQ ID NO: 229677 - DNA, 120 bp, Artificial Sequence
  ENSG00000119125_28 (sequence is synthesized)
gggtgtacattttgatgttgaacatcagttttcatgtagacttaggactcatgtgcagtaaatataaataagtgtagcatcagaagcagtaggaatggccgtatacaaccatcctgttaa

SEQ ID NO: 229678 - DNA, 120 bp, Artificial Sequence
  ENSG00000119125_29 (sequence is synthesized)
acatttaaatttagctctgatagtgtgttaagacctgaatatctttcctagtaaaaataggatgtgttgaaatatttatatgtactttgatctctccacatcacttataacttatgtgtt

SEQ ID NO: 229679 - DNA, 120 bp, Artificial Sequence
  ENSG00000119125_30 (sequence is synthesized)
ttatttctccaagtgcggtgttcctgaatgttatgtatgcttttttttctgtaccacaggcattatctatacctggggccagattttctgcactttgaaatgttgcctttgcctaatgta

SEQ ID NO: 229680 - DNA, 120 bp, Artificial Sequence
  ENSG00000119125_31 (sequence is synthesized)
ggttgactttctgaattgtggagaggcacttttccaagccaatcttatttgtcactttttgttttaatatcttgctctctgacaggaaagaaacaattcacttaccagcctcctcacccc

SEQ ID NO: 229681 - DNA, 120 bp, Artificial Sequence
  ENSG00000119125_32 (sequence is synthesized)
atcctccaccatttccttaatgttccatggtattttcaacggaatacactttgaaaggtaaaaacaattcaaaagtatcgattatcataaattcacaaaatatttttgcaaccagaacac

SEQ ID NO: 229682 - DNA, 120 bp, Artificial Sequence
  ENSG00000119125_33 (sequence is synthesized)
aaaagcaggctagtcagctaaggtaaatttcattttcaaacgagagggaaacatgggaagtaaaagattaggatgtgaaaggttgtcctaaacagaccaaggagactgttccctaattta

SEQ ID NO: 229683 - DNA, 120 bp, Artificial Sequence
  ENSG00000119125_34 (sequence is synthesized)
ttctcttggctggttctctcattgaattatcagaccccaagaggagatattggaacaggctcccttcatgccaagggtctttctaagttaatactgtgagcattgagcccccattaaaac

SEQ ID NO: 229684 - DNA, 120 bp, Artificial Sequence
  ENSG00000119125_35 (sequence is synthesized)
tcttttttacttcagaaagaattttacaggttaaagggaaagaaatggtgggaaactctccccgtaatgcttagccaactttaaagtgtacccttcaatatccccattggcaactgcagc

SEQ ID NO: 229685 - DNA, 120 bp, Artificial Sequence
  ENSG00000119125_36 (sequence is synthesized)
tgagatcttagagaggaaatataaccggtgtgagatctagcaatgcattttgaatcttcactccctaccaggctcttcctatttttaatctcttcacctcagaactagacatatggagag

SEQ ID NO: 229686 - DNA, 120 bp, Artificial Sequence
  ENSG00000119125_37 (sequence is synthesized)
ctttaaaggcaagctggaaggcacattgtatcaattctaccttgtgctatacgtaggagagatccaaaatttggatgcttctggagactcttagacatcttttcattgttgtccattttt

SEQ ID NO: 229687 - DNA, 120 bp, Artificial Sequence
  ENSG00000119125_38 (sequence is synthesized)
aaagttgatgattgctggaaacattcacacgcttaaaagcaatggtgtgagttattaatgggtaaactaagaagtgttataggcaatgacttgaaatggtttttaaattgtatggattgt

SEQ ID NO: 229688 - DNA, 120 bp, Artificial Sequence
  ENSG00000119125_39 (sequence is synthesized)
taagaattgttgaaaaaaaattttttttttttggacagcttcaaggagatgttagcaatttcagatatactagccagtttaggtatgactttggaagtgcagaaacagaaggatactgtt

SEQ ID NO: 229689 - DNA, 120 bp, Artificial Sequence
  ENSG00000119125_40 (sequence is synthesized)
agaaaatcctaacattggtctccgtgcatgtgttcacacctggtctcactgcctttccttcccacagacctgagtgtgaaagactgagagttgaggagttactttgtggatcttgtccaa

SEQ ID NO: 229690 - DNA, 120 bp, Artificial Sequence
  ENSG00000119125_41 (sequence is synthesized)
atttagtgaaatgtggaagtcaaccagaccaatgatggaattaaatgtaaattccaagagggctttcacagtccacagggttcaaatgacttgggtaacagaagttattcttagcttacc

SEQ ID NO: 229691 - DNA, 120 bp, Artificial Sequence
  ENSG00000119125_42 (sequence is synthesized)
tgttatgtgacagtgatttacctgtccatttccaacccaaaagcctgtcagaaagcattctttagagaaaaccactttacatttgttgttaaactcctgatcgctactcttaagaatata

SEQ ID NO: 229692 - DNA, 120 bp, Artificial Sequence
  ENSG00000119125_43 (sequence is synthesized)
catgtatgtattcataggaacattttttctcaatatttgtatgattcgcttactgttattgtgctgagtgagctcctgtgtgcttcagacaaaaataaatgagactttgtgtttacgtta

SEQ ID NO: 229693 - DNA, 120 bp, Artificial Sequence
  ENSG00000119125_44 (sequence is synthesized)
ctcctcaccccatcctccaccatttccttaatgttccatggtattttcaacggaatacactttgaaagacctgagtgtgaaagactgagagttgaggagttactttgtggatcttgtcca

SEQ ID NO: 229694 - DNA, 120 bp, Artificial Sequence
  ENSG00000119125_45 (sequence is synthesized)
attgtactgtggctgggctgaactcaaaccacaagatacagtccttcccactcttccttcccctttttgaaggtggaggagccttaccttgtgtccactgccaccacaggtcccctggaa

SEQ ID NO: 229695 - DNA, 120 bp, Artificial Sequence
  ENSG00000119125_46 (sequence is synthesized)
gtcctgccagactactgcctatgttcccttaaagcccaaggattcttagtcaacttgtgaattctgcctggcctgggataaactcttcagagcagtgggcttccctttggcccagggcag

SEQ ID NO: 229696 - DNA, 120 bp, Artificial Sequence
  ENSG00000119125_47 (sequence is synthesized)
atccataaatgctgtgtaagagccaagttctggaactggggactccaggagcctgcttgatgttttattcttctgtggccgaactggtacctaaagttgtttttagaagaagcatctcaa

SEQ ID NO: 229697 - DNA, 120 bp, Artificial Sequence
  ENSG00000119125_48 (sequence is synthesized)
caggaaaaactggccaaagaatggtgcttcaagccgtgtgaaataagagaactgagccaccagattagaagaaggcttggaagcagttgaagtagaggctgagatgggatgagagaatgg

SEQ ID NO: 229698 - DNA, 120 bp, Artificial Sequence
  ENSG00000119125_49 (sequence is synthesized)
agcagccaaatgcctttgtttcctctgtcattcctccaggatctcccctctattctgtgtttggcaggacccagatagatagacatttactcgtgctgttgaggagtaaaagagaacacg

SEQ ID NO: 229699 - DNA, 120 bp, Artificial Sequence
  ENSG00000119125_50 (sequence is synthesized)
taagaggacatttatctcagaggacacgtgaagagcacagcatcttctgaaatctctgagtttgtacaaaaaaaggacaatagggaatacaacataaaaaatttacagtgaaagtactga

SEQ ID NO: 229700 - DNA, 120 bp, Artificial Sequence
  ENSG00000119125_51 (sequence is synthesized)
aagaacccatatgtcagccaggaaatccagaagagggtagtcactcccattactgtttgtgctgtagtgtgagaaggaaacacagcaataccaaagcaaatgcactatgatgtatgttac

SEQ ID NO: 229701 - DNA, 120 bp, Artificial Sequence
  ENSG00000119125_52 (sequence is synthesized)
cctgttggacctgacggaatgccagcccacacaggcaagcccaggaggaccttgtcctattataattccccagaatacagaggtgttatttattaactggttcttaaccttttgaaaggt

SEQ ID NO: 229702 - DNA, 79 bp, Artificial Sequence
  ENSG00000119125_53 (sequence is synthesized)
aggtgttatttattaactggttcttaaccttttgaaaggtgatggatccgtaaatgaataaaatgaaagttattgccag

SEQ ID NO: 229703 - DNA, 77 bp, Artificial Sequence
  ENSG00000119125_54 (sequence is synthesized)
taaataagttatagcctgtaatttcaggggaaaaaagcccatggatattacaagtgttgcatctaatttcagggaat

SEQ ID NO: 229704 - DNA, 120 bp, Artificial Sequence
  ENSG00000119125_55 (sequence is synthesized)
cccatggatattacaagtgttgcatctaatttcagggaattcatagatctcatgatgccagtccatggatgctaggttaaaaacccatgcttgtggctgtaatctcagaaaacaacttca

SEQ ID NO: 229705 - DNA, 120 bp, Artificial Sequence
  ENSG00000119125_56 (sequence is synthesized)
attctcccgcctcagtctcctgagtagccgggactacaggcacccgctacaacgcccggctaattttttttgtatttccccttccttctttgctttcaaaatccaggcttaggggtacaa

SEQ ID NO: 229706 - DNA, 120 bp, Artificial Sequence
  ENSG00000119125_57 (sequence is synthesized)
aaacctatattgtctgagacaggaagcactccgaagtttgaagaagagggcagcagcccaactcagaagaactggactccccagcactataaggagagagggtggtggttccaccagaga

SEQ ID NO: 229707 - DNA, 120 bp, Artificial Sequence
  ENSG00000119125_58 (sequence is synthesized)
acttaccagcctcctcaccccatcctccaccatttccttaatgttccatggtattttcaacggaatacactttgaaaggctgatcttgatatcctggtctcaagtgatcctcccacctca

SEQ ID NO: 229708 - DNA, 120 bp, Artificial Sequence
  ENSG00000119125_59 (sequence is synthesized)
cccagccaattggaggccttgccccagcaggtggggaaggaaatgccagccaagttcccaccacatgcagaaacctgagagggtgaaccctacccatcaacacctggagaccttttcctg

SEQ ID NO: 229709 - DNA, 120 bp, Artificial Sequence
  ENSG00000119125_60 (sequence is synthesized)
tgttccatggtattttcaacggaatacactttgaaagttctcagaataactgtagaatgtgctggaaatggaacattctcagataaggaggaactggccagatcaaactaagctgtgttc

SEQ ID NO: 229710 - DNA, 120 bp, Artificial Sequence
  ENSG00000119125_61 (sequence is synthesized)
ccatccctcctgaaacaggatcttatggtgctttagcccaggacgtcaagtatcccctaggtatgaaacccagagtggagcatgctttgaaggtccctcagctacatgcagactagactg

SEQ ID NO: 229711 - DNA, 120 bp, Artificial Sequence
  ENSG00000119125_62 (sequence is synthesized)
catgtagctgactctaactgccctgggaaactatcctgagctttgacagacctgccatgaatcttaagcttttattgtcccttgctgcctatctgtgaggaataaagttgcttcacttac

SEQ ID NO: 229712 - DNA, 89 bp, Artificial Sequence
  ENSG00000119125_63 (sequence is synthesized)
tttgtgggcaaagtttgcatggatttgaatgacacttttccagaatacaaggagaccactgaggaatcgatcaaggaaactgagagact

SEQ ID NO: 229713 - DNA, 120 bp, Artificial Sequence
  ENSG00000119138_0 (sequence is synthesized)
tgacataatggggtttttttaattatagattcacactgcatttattcatcacccctgtcctctcatccataactcaaatttactaccagcaacacaaaatacaaagatgtgtccagtttc

SEQ ID NO: 229714 - DNA, 120 bp, Artificial Sequence
  ENSG00000119138_1 (sequence is synthesized)
actacagctcttcgcgtttacaagtgtcgagcgcttgctttcggaacgcccttgtgattggccgagccaatgccagtgacatcaaccaacttacttttgattggaaggctggttgctggg

SEQ ID NO: 229715 - DNA, 120 bp, Artificial Sequence
  ENSG00000119138_2 (sequence is synthesized)
actgtagcgtttgcaggaagtcacttaactgtttgggagctggaaaaccgaagctgaagttctcttttgccataggaacgagcgcaactgactaggaaagatgtgtcccaaagctccgca

SEQ ID NO: 229716 - DNA, 120 bp, Artificial Sequence
  ENSG00000119138_3 (sequence is synthesized)
agctggaacgtgagccaggaggcccggaccggccacgggaccgcgaggcactccgaaagtgtgcggctgccccttccctgcctcccagctgttacccttttaaatgtcagtgttcgaggc

SEQ ID NO: 229717 - DNA, 120 bp, Artificial Sequence
  ENSG00000119138_4 (sequence is synthesized)
tgtaggggtagcacgaggcagcgaaacggaacagtcggattggccgcacgcctcagttctagacgcacctctccaccgaaggccgttctgactggcagggggagaaagtaaacagagttg

SEQ ID NO: 229718 - DNA, 120 bp, Artificial Sequence
  ENSG00000119138_5 (sequence is synthesized)
aatcaccctccccactggccaattggagggggtttggtttgtgacgtgatgggattctgcgaaattgttactgagcaagagaatgccggaacggtgcggaccggccggagcaggggttca

SEQ ID NO: 229719 - DNA, 120 bp, Artificial Sequence
  ENSG00000119138_6 (sequence is synthesized)
gaagccgtcagtggactcgggaaaaagtgtctcttagacctggcgctcggcgggaccctcgccacccgcgtcggggtgatcgggtgaatgtcctggggctttggctcgacggcgaggcgg

SEQ ID NO: 229720 - DNA, 120 bp, Artificial Sequence
  ENSG00000119138_7 (sequence is synthesized)
ccgagggcgtgcacctctcttgcagtttcctctcccagcgcctcgggggcgttttcagtcgaataaacttgcgaccgccacgtgtggcatctttccaagggagccggctcagaggggccg

SEQ ID NO: 229721 - DNA, 120 bp, Artificial Sequence
  ENSG00000119138_8 (sequence is synthesized)
atcgcggccggcgcggggcaggggcggcggctagaggcggcggcgcggcggagcccggggccgtggatgctgcgtgcggaggcgctgccggttacgtaaagatgaggggctgaggtcgcc

SEQ ID NO: 229722 - DNA, 120 bp, Artificial Sequence
  ENSG00000119138_9 (sequence is synthesized)
tacgtaaagatgaggggctgaggtcgcctcggcgctcctgcgagtcggaagcgccccgcgcccccgcccccttggccgccgcgccgtgccgcgccgcgccgcgctcgtcgtccgaggcca

SEQ ID NO: 229723 - DNA, 120 bp, Artificial Sequence
  ENSG00000119138_10 (sequence is synthesized)
ccgaacctccgcagccaccgccaagtttgtccgcgccgcctgggctgccgtcgcccgcaccatgtccgcggccgcctacatggacttcgtggctgcccagtgtctggtttccatttcgaa

SEQ ID NO: 229724 - DNA, 120 bp, Artificial Sequence
  ENSG00000119138_11 (sequence is synthesized)
ccgcgctgcggtgccggagcatggggtcgctccggacgccgagcggctgcgactacctgagcgcgaggtgaccaaggagcacggtgacccgggggacacctggaaggattactgcacact

SEQ ID NO: 229725 - DNA, 120 bp, Artificial Sequence
  ENSG00000119138_12 (sequence is synthesized)
ggtcaccatcgccaagagcttgttggacctgaacaagtaccgacccatccagaccccctccgtgtgcagcgacagtctggaaagtccagatgaggatatgggatccgacagcgacgtgac

SEQ ID NO: 229726 - DNA, 120 bp, Artificial Sequence
  ENSG00000119138_13 (sequence is synthesized)
caccgaatctgggtcgagtccttcccacagcccggaggagagacaggatcctggcagcgcgcccagcccgctctccctcctccatcctggagtggctgcgaaggggaaacacgcctccga

SEQ ID NO: 229727 - DNA, 120 bp, Artificial Sequence
  ENSG00000119138_14 (sequence is synthesized)
aaagaggcacaagtgcccctacagtggctgtgggaaagtctatggaaaatcctcccatctcaaagcccattacagagtgcatacaggtgaacggccctttccctgcacgtggccagactg

SEQ ID NO: 229728 - DNA, 120 bp, Artificial Sequence
  ENSG00000119138_15 (sequence is synthesized)
ccttaaaaagttctcccgctcagacgagctgacccgccactaccggacccacactggggaaaagcagttccgctgtccgctgtgtgagaagcgcttcatgaggagtgaccacctcacaaa

SEQ ID NO: 229729 - DNA, 120 bp, Artificial Sequence
  ENSG00000119138_16 (sequence is synthesized)
gcacgcccggcggcacaccgagttccaccccagcatgatcaagcgatcgaaaaaggcgctggccaacgctttgtgaggtgctgcccgtggaagccagggagggatggaccccgaaaggag

SEQ ID NO: 229730 - DNA, 120 bp, Artificial Sequence
  ENSG00000119138_17 (sequence is synthesized)
aaaagtactcccaggaaacagacgcgtgaaaactgagccccagaagaggcacacttgacggcacaggaagtcactgctctttggtcaatattctgattttcctctccctgcattgttttt

SEQ ID NO: 229731 - DNA, 120 bp, Artificial Sequence
  ENSG00000119138_18 (sequence is synthesized)
aaaaagcacattgtagcctaagatcaaagtcaacaacactcggtccccttgaagaggcaactctctgaacccgtctctgactgttggagggaaggcaaatgcttttgggttttttggttt

SEQ ID NO: 229732 - DNA, 120 bp, Artificial Sequence
  ENSG00000119138_19 (sequence is synthesized)
gtttttttttctccttttatttttttgcgggggagggtagggagtgggtgggggggaggggggtaaggccaagactggggtagaattttaaagattcaacactggtgtacatatgtccgc

SEQ ID NO: 229733 - DNA, 120 bp, Artificial Sequence
  ENSG00000119138_20 (sequence is synthesized)
atgtccgctgggtgagttgacctgtggcctcgcacagtgattctgggccctttatgcttgctgtctctcagaattgttttcttaccttttaatgtaatgacgagtgtgcttcagtttgtt

SEQ ID NO: 229734 - DNA, 120 bp, Artificial Sequence
  ENSG00000119138_21 (sequence is synthesized)
cttgaatcacgttaacttttgagattaaaaaaaaaaacgccatagcacagctgtctttatgcaagcaagagcacatctactccagcatgatctgtcatctaaagacttgaaaacaaaaaa

SEQ ID NO: 229735 - DNA, 120 bp, Artificial Sequence
  ENSG00000119138_22 (sequence is synthesized)
cagttacttatagtcaatgggtaagcagagtctgaatttatactaatcaagacaaacctttgaaaggttacactaagtacagaacttttaaaccttgctttgtatgagttgtactttttg

SEQ ID NO: 229736 - DNA, 120 bp, Artificial Sequence
  ENSG00000119138_23 (sequence is synthesized)
aacataagctgcacttttattttctaatgcagaggatgaataagttaaatacatgctttgaggatagaagcagatgttctgtttggcaccacgttataatctgcttattttacaatatac

SEQ ID NO: 229737 - DNA, 120 bp, Artificial Sequence
  ENSG00000119138_24 (sequence is synthesized)
acgtttccctaagaaatcatggcagagatgtgagggcagaatatacacaacagatgctgaaggagaaggagggtagtgttttgcaaaagaaaaagaaaagaaccaacagaattttaactc

SEQ ID NO: 229738 - DNA, 120 bp, Artificial Sequence
  ENSG00000119138_25 (sequence is synthesized)
tattaacttttccaaattttcctatgcttttagttaacatcattattgtatcctaatgccactaggggagagagcttttgactctgttgggttttatttgaatgtgtgcataacagtaat

SEQ ID NO: 229739 - DNA, 120 bp, Artificial Sequence
  ENSG00000119138_26 (sequence is synthesized)
gagatctggaaacacctattttttggggaaaaaggtttgttggtctccttcctgtgttcctacaaaactcccactctcaggtgcaagagttatgtagaaggaaagggagctgaaatagga

SEQ ID NO: 229740 - DNA, 120 bp, Artificial Sequence
  ENSG00000119138_27 (sequence is synthesized)
acagaaaaatcaacccctataactagtgaacaccaagggaaaataccacaatgatttcagaggagactctgcaaaatcgtcccttgtggagaatgcaggcaacatggaatactaggaatg

SEQ ID NO: 229741 - DNA, 120 bp, Artificial Sequence
  ENSG00000119138_28 (sequence is synthesized)
aaatcacatcactgtatcttttacatcaatagcctcaccactaatatatcttgtatctaggtgtctataatggctgaaaccactacatccatctatgccatttacctgaaaacttaactg

SEQ ID NO: 229742 - DNA, 120 bp, Artificial Sequence
  ENSG00000119138_29 (sequence is synthesized)
tggcctttatgaggccagaaaagtgaactgagttttcgtagttaagacctcaaatgaggggagtcagcagtgatcatgggggaaatgtttacattttttttttcttcagaagtaacgctt

SEQ ID NO: 229743 - DNA, 120 bp, Artificial Sequence
  ENSG00000119138_30 (sequence is synthesized)
tctgatgattttatctgatatttaaaacagggagctatggtgcactctagtttatacttgcgctctgaaatgtgtaaacatagggtgcctacctatttcacctgacccatactcgtttct

SEQ ID NO: 229744 - DNA, 120 bp, Artificial Sequence
  ENSG00000119138_31 (sequence is synthesized)
gattcagaatcagtgtgggctcctgcagtgggcgcgggtcacggctgactccaacttccaatacaacagccatcactagcacagtgtttttttgtttaaccaacgtagttgtattagtag

SEQ ID NO: 229745 - DNA, 120 bp, Artificial Sequence
  ENSG00000119138_32 (sequence is synthesized)
ttctataaagagaactgcttttaacattagggactgggagcagtccatgggataaaaaggaaagtgttttctcacgagaaaacatgtcaggaaaaataaagaacactttctacctctgtt

SEQ ID NO: 229746 - DNA, 120 bp, Artificial Sequence
  ENSG00000119138_33 (sequence is synthesized)
tcagatttttgaaacacttattttaaaccaaattttaatttctgtgtccaaaataagttttaaggacatctgttcttccatacgaaataggttaggctgcctatttctcactgagctcat

SEQ ID NO: 229747 - DNA, 120 bp, Artificial Sequence
  ENSG00000119138_34 (sequence is synthesized)
ggaatggttctgcttatgatactctgcacgctgccttttagtgagtgaggagtttggggttgcctagcaacttgctaacttgtaaaaagtcatctttccctcacagaaagaaacgaaaga

SEQ ID NO: 229748 - DNA, 120 bp, Artificial Sequence
  ENSG00000119138_35 (sequence is synthesized)
aagcaaagcaaagtcagtgaaagacaatctttatagtttcaggagtaaatctaaatgtggcttttgtcaagcacttagatggatataaatgcagcaacttgttttaaaaaaatgcacaat

SEQ ID NO: 229749 - DNA, 120 bp, Artificial Sequence
  ENSG00000119138_36 (sequence is synthesized)
ttacttcccaaaaaagttgttacttgccttttcaagttgttgacaaacacacatttgatattctcttatatgttatagtaatgtaacgtataaactcaagcctttttattctttgtgatt

SEQ ID NO: 229750 - DNA, 120 bp, Artificial Sequence
  ENSG00000119138_37 (sequence is synthesized)
aaatcctgttttaaaatgtcacaaaacaggaaccagcattctaattagatttactatatcaagatatggttcaaataggactactagagttcattgaacactaaaactatgaaacaatta

SEQ ID NO: 229751 - DNA, 120 bp, Artificial Sequence
  ENSG00000119138_38 (sequence is synthesized)
ctttttatattaaaaagaccatggatttaacttatgaaaatccaaatgcaggatagtaatttttgtttacttttttaaccaaactgaatttttgaaagactattgcaggtgtttaaaaag

SEQ ID NO: 229752 - DNA, 120 bp, Artificial Sequence
  ENSG00000119138_39 (sequence is synthesized)
aaagaaaagttgttttatctaatactgtaagtagttgtcatattctggaaaatttaatagttttagagttaagatatctcctctctttggttagggaagaagaaagcccttcaccattgt

SEQ ID NO: 229753 - DNA, 120 bp, Artificial Sequence
  ENSG00000119138_40 (sequence is synthesized)
ggaatgatgccctggctttaaggtttagctccacatcatgcttctcttgagaattctatttggtagttacaattacagaaactgattagtttgtcagtttgcagatagatttagcacagt

SEQ ID NO: 229754 - DNA, 120 bp, Artificial Sequence
  ENSG00000119138_41 (sequence is synthesized)
actcatcactcggatagattgagatgttctttcacatcagatgatctgtaacactgtaagatactgatctttacaactgtttaatcagttttatttttgtacagtattagtgacctaagt

SEQ ID NO: 229755 - DNA, 120 bp, Artificial Sequence
  ENSG00000119138_42 (sequence is synthesized)
tattttgctgtcccgtttttgtaaatcaaatgaaattataaaagaggattctgacagtaggtattttgtacatatgtatatatgttgtccaaataaaaataataaatgataaagactgaa

SEQ ID NO: 229756 - DNA, 120 bp, Artificial Sequence
  ENSG00000119139_0 (sequence is synthesized)
agagcactgtccggtggtgcccaggaggagtaggagcaggagcagaagcagaagcggggtccggagctgcgcgcctacgcgggacctgtgtccgaaatgccggtgcgaggagaccgcggg

SEQ ID NO: 229757 - DNA, 120 bp, Artificial Sequence
  ENSG00000119139_1 (sequence is synthesized)
tttccaccccggcgggagctgtcaggttggctccgcgccccaggcatggaagagctgatatgggaacagtacactgtgaccctacaaaaggattccaaaagaggatttggaattgcagtg

SEQ ID NO: 229758 - DNA, 120 bp, Artificial Sequence
  ENSG00000119139_2 (sequence is synthesized)
tccggaggcagagacaacccccactttgaaaatggagaaacgtcaattgtcatttctgatgtgctcccgggtgggcctgctgatgggctgctccaagaaaatgacagagtggtcatggtc

SEQ ID NO: 229759 - DNA, 120 bp, Artificial Sequence
  ENSG00000119139_3 (sequence is synthesized)
aatggcacccccatggaggatgtgcttcattcgtttgcagttcagcagctcagaaaaagtgggaaggtcgctgctattgtggtcaagaggccccggaaggtccaggtggccgcacttcag

SEQ ID NO: 229760 - DNA, 120 bp, Artificial Sequence
  ENSG00000119139_4 (sequence is synthesized)
gccagccctcccctggatcaggatgaccgggcttttgaggtgatggacgagtttgatggcagaagtttccggagtggctacagcgagaggagccggctgaacagccatggggggcgcagc

SEQ ID NO: 229761 - DNA, 120 bp, Artificial Sequence
  ENSG00000119139_5 (sequence is synthesized)
cgcagctgggaggacagcccggaaagggggcgtccccatgagcgggcccggagccgggagcgggacctcagccgggaccggagccgtggccggagcctggagcggggcctggaccaagac

SEQ ID NO: 229762 - DNA, 120 bp, Artificial Sequence
  ENSG00000119139_6 (sequence is synthesized)
catgcgcgcacccgagaccgcagccgtggccggagcctggagcggggcctggaccacgactttgggccatcccgggaccgggaccgtgaccgcagccgcggccggagcattgaccaggac

SEQ ID NO: 229763 - DNA, 120 bp, Artificial Sequence
  ENSG00000119139_7 (sequence is synthesized)
tacgagcgagcctatcaccgggcctacgacccagactacgagcgggcctacagcccggagtacaggcgcggggcccgccacgatgcccgctctcggggaccccgaagccgcagccgcgag

SEQ ID NO: 229764 - DNA, 120 bp, Artificial Sequence
  ENSG00000119139_8 (sequence is synthesized)
cacccgcactcacggagccccagccccgagcctagggggcggccggggcccatcggggtcctcctgatgaaaagcagagcgaacgaagagtatggtctccggcttgggagtcagatcttc

SEQ ID NO: 229765 - DNA, 120 bp, Artificial Sequence
  ENSG00000119139_9 (sequence is synthesized)
gtaaaggaaatgacccgaacgggtctggcaactaaagatggcaaccttcacgaaggagacataattctcaagatcaatgggactgtaactgagaacatgtctttaacggatgctcgaaaa

SEQ ID NO: 229766 - DNA, 120 bp, Artificial Sequence
  ENSG00000119139_10 (sequence is synthesized)
ttgatagaaaagtcaagaggaaaactacagctagtggtgttgagagacagccagcagaccctcatcaacatcccgtcattaaatgacagtgactcagaaatagaagatatttcagaaata

SEQ ID NO: 229767 - DNA, 120 bp, Artificial Sequence
  ENSG00000119139_11 (sequence is synthesized)
gagtcaaaccgatcattttctccagaggagagacgtcatcagtattctgattatgattatcattcctcaagtgagaagctgaaggaaaggccaagttccagagaggacacgccgagcaga

SEQ ID NO: 229768 - DNA, 120 bp, Artificial Sequence
  ENSG00000119139_12 (sequence is synthesized)
ttgtccaggatgggtgcgacacccactccctttaagtccacaggggatattgcaggcacagttgtcccagagaccaacaaggaacccagataccaagaggaccccccagctcctcaacca

SEQ ID NO: 229769 - DNA, 120 bp, Artificial Sequence
  ENSG00000119139_13 (sequence is synthesized)
aaagcagccccgagaacttttcttcgtcctagtcctgaagatgaagcaatatatggccctaataccaaaatggtaaggttcaagaagggagacagcgtgggcctccggttggctggtggc

SEQ ID NO: 229770 - DNA, 120 bp, Artificial Sequence
  ENSG00000119139_14 (sequence is synthesized)
aatgatgtcgggatatttgttgctggcattcaagaagggacctcggcggagcaggagggccttcaagaaggagaccagattctgaaggtgaacacacaggatttcagaggattagtgcgg

SEQ ID NO: 229771 - DNA, 120 bp, Artificial Sequence
  ENSG00000119139_15 (sequence is synthesized)
gaggatgccgttctctacctgttagaaatccctaaaggtgaaatggtgaccattttagctcagagccgagccgatgtgtatagagacatcctggcttgtggcagaggggattcgtttttt

SEQ ID NO: 229772 - DNA, 120 bp, Artificial Sequence
  ENSG00000119139_16 (sequence is synthesized)
ataagaagccactttgaatgtgagaaggaaactccacagagcctggccttcaccagaggggaggtcttccgagtggtagacacactgtatgacggcaagctgggcaactggctggctgtg

SEQ ID NO: 229773 - DNA, 120 bp, Artificial Sequence
  ENSG00000119139_17 (sequence is synthesized)
aggattgggaacgagttggagaaaggcttaatccccaacaagagcagagctgaacaaatggccagtgttcaaaatgcccagagagacaacgctggggaccgggcagatttctggagaatg

SEQ ID NO: 229774 - DNA, 120 bp, Artificial Sequence
  ENSG00000119139_18 (sequence is synthesized)
gtgtctgtcagcaccaagttcccagcttatgagagggttttgctgcgagaagctggtttcaagagacctgtggtcttattcggccccatagctgatatagcaatggaaaaattggctaat

SEQ ID NO: 229775 - DNA, 120 bp, Artificial Sequence
  ENSG00000119139_19 (sequence is synthesized)
gagttacctgactggtttcaaactgctaaaacggaaccaaaagatgcaggatctgagaaatccactggagtggtccggttaaataccgtgaggcaaattattgaacaggataagcatgca

SEQ ID NO: 229776 - DNA, 120 bp, Artificial Sequence
  ENSG00000119139_20 (sequence is synthesized)
ctactggatgtgactccgaaagctgtggacctgttgaattacacccagtggttcccaattgtgatttttttcaacccagactccagacaaggtgtcaaaaccatgagacaaaggttaaat

SEQ ID NO: 229777 - DNA, 120 bp, Artificial Sequence
  ENSG00000119139_21 (sequence is synthesized)
ccaacgtccaacaaaagttctcgaaagttatttgatcaagccaacaagcttaaaaaaacgtgtgcacacctttttacagctacaatcaacctaaattcagccaatgatagctggtttggc

SEQ ID NO: 229778 - DNA, 120 bp, Artificial Sequence
  ENSG00000119139_22 (sequence is synthesized)
agcttaaaggacactattcagcatcagcaaggagaagcggtttgggtctctgaaggaaagatggaagggatggatgatgaccccgaagaccgcatgtcctacttaaccgccatgggcgcg

SEQ ID NO: 229779 - DNA, 120 bp, Artificial Sequence
  ENSG00000119139_23 (sequence is synthesized)
gactatctgagttgcgacagccgcctcatcagtgactttgaagacacggacggtgaaggaggcgcctacactgacaatgagctggatgagccagccgaggagccgctggtgtcgtccatc

SEQ ID NO: 229780 - DNA, 120 bp, Artificial Sequence
  ENSG00000119139_24 (sequence is synthesized)
acccgctcctcggagccggtgcagcacgaggagagcataaggaaacccagcccagagccacgagctcagatgaggagggctgctagcagcgatcaacttagggacaatagcccgccccca

SEQ ID NO: 229781 - DNA, 120 bp, Artificial Sequence
  ENSG00000119139_25 (sequence is synthesized)
gcattcaagccagagccgcccaaggccaaaacccagaacaaagaagaatcctatgacttctccaaatcctatgaatataagtcaaacccctctgccgttgctggtaatgaaactcctggg

SEQ ID NO: 229782 - DNA, 120 bp, Artificial Sequence
  ENSG00000119139_26 (sequence is synthesized)
gcatctaccaaaggttatcctcctcctgttgcagcaaaacctacctttgggcggtctatactgaagccctccactcccatccctcctcaagagggtgaggaggtgggagagagcagtgag

SEQ ID NO: 229783 - DNA, 120 bp, Artificial Sequence
  ENSG00000119139_27 (sequence is synthesized)
gagcaagataatgctcccaaatcagtcctgggcaaagtcaaaatatttgagaagatggatcacaaggccaggttacagagaatgcaggagctccaggaagcacagaatgcaaggatcgaa

SEQ ID NO: 229784 - DNA, 120 bp, Artificial Sequence
  ENSG00000119139_28 (sequence is synthesized)
attgcccagaagcatcctgatatctatgcagttccaatcaaaacgcacaagccagaccctggcacgccccagcacacgagttccagaccccctgagccacagaaagctccttccagacct

SEQ ID NO: 229785 - DNA, 120 bp, Artificial Sequence
  ENSG00000119139_29 (sequence is synthesized)
tatcaggataccagaggaagttatggcagtgatgccgaggaggaggagtaccgccagcagctgtcagaacactccaagcgcggttactatggccagtctgcccgataccgggacacagaa

SEQ ID NO: 229786 - DNA, 120 bp, Artificial Sequence
  ENSG00000119139_30 (sequence is synthesized)
ttatagatgtctgagcacggactctcccaggcctgcctgcatggcatcagactagccactcctgccaggccgccgggatggttcttctccagttagaatgcaccatggagacgtggtggg

SEQ ID NO: 229787 - DNA, 120 bp, Artificial Sequence
  ENSG00000119139_31 (sequence is synthesized)
actccagctcgtgtgtcctcatggagaacccaggggacagctggtgcaaattcagaactgagggctctgtttgtgggactgggttagaggagtctgtggctttttgttcagaattaagca

SEQ ID NO: 229788 - DNA, 120 bp, Artificial Sequence
  ENSG00000119139_32 (sequence is synthesized)
gaacactgcagtcagatcctgttacttgcttcagtggaccgaaatctgtattctgtttgcgtacttgtaatatgtatattaagaagcaataactatttttcctcattaatagctgccttc

SEQ ID NO: 229789 - DNA, 120 bp, Artificial Sequence
  ENSG00000119139_33 (sequence is synthesized)
aaggactgtttcagtgtgagtcagaatgtgaaaaaggaataaaaaatactgttgggctcaaactaaattcaaagaagtactttattgcaactcttttaagtgccttggatgagaagtgtc

SEQ ID NO: 229790 - DNA, 120 bp, Artificial Sequence
  ENSG00000119139_34 (sequence is synthesized)
ttaaattttcttcctttgaagctttaggcagagccataatggactaaaacattttgactaagtttttataccagcttaatagctgtagttttccctgcactgtgtcatcttttcaaggca

SEQ ID NO: 229791 - DNA, 120 bp, Artificial Sequence
  ENSG00000119139_35 (sequence is synthesized)
tttgtctttgtaatattttccataaatttggactgtctatatcataactatacttgatagtttggctataagtgctcaatagcttgaagcccaagaagttggtatcgaaatttgttgttt

SEQ ID NO: 229792 - DNA, 120 bp, Artificial Sequence
  ENSG00000119139_36 (sequence is synthesized)
gtttaaacccaagtgctgcacaaaagcagatacttgaggaaaacactatttccaaaagcacatgtattgacaacagttttataatttaataaaaaggaatacattgcaatccgtaatttt

SEQ ID NO: 229793 - DNA, 120 bp, Artificial Sequence
  ENSG00000119139_37 (sequence is synthesized)
caccctctccgcctttcccgacaccccaaagtagcgctgcgagcagctgcgtctccctcccggggctcgcgcgcccagaaccctccggtctcaaggaagcagggtgcgaagtaccacatt

SEQ ID NO: 229794 - DNA, 120 bp, Artificial Sequence
  ENSG00000119139_38 (sequence is synthesized)
actgtcatctccctgtgagtgggattggcaccccggctgcagctccaggagcaagtactccaggaagcacagagctgtaccagtacacggcccacgttgccaggccccaggcatggaaga

SEQ ID NO: 229795 - DNA, 120 bp, Artificial Sequence
  ENSG00000119139_39 (sequence is synthesized)
ataatgttgctctaaagtgtctcatttactcaattctgtcaacttagatgctgaatcattttatgtgcttaaaagaaatatctactcggatgctctagttccctggcaagggagagagag

SEQ ID NO: 229796 - DNA, 120 bp, Artificial Sequence
  ENSG00000119139_40 (sequence is synthesized)
ggagagaaagaaagctgttgaagtggtgcaaatccaaactgctttcttttttgctcataagtagtgcttttcaaagcgtttggcatccctgccatatggatgtgtcactgtgtgagatga

SEQ ID NO: 229797 - DNA, 120 bp, Artificial Sequence
  ENSG00000119139_41 (sequence is synthesized)
caacaggatttgctggaaatgtgggccactattgtatccgccttacgtaaccacatggagtgatggaaatgggtgagcagcccggaatgtaggcggtggcctggcccatgcatctccaga

SEQ ID NO: 229798 - DNA, 120 bp, Artificial Sequence
  ENSG00000119139_42 (sequence is synthesized)
atgaagactgctcaagccctacataggatgtggatccaggctgttaaaaagttgaggagatggaaaggccgtgtgagtccctctgcaagctctccccttgttttccccaacctttcttca

SEQ ID NO: 229799 - DNA, 120 bp, Artificial Sequence
  ENSG00000119139_43 (sequence is synthesized)
ctagggctacatagagaacatccaaaggaacagcagcttccattaaagattagttcagttgcttcaggtgaacagtgactgaaatttacaggaccttgtaccgagagagacaagatgagg

SEQ ID NO: 229800 - DNA, 120 bp, Artificial Sequence
  ENSG00000119139_44 (sequence is synthesized)
tacaagaaatatatcggtattctggaagcagcagttggtattaccccacttaacaaaagagaacttctacctgagagcagaagacacgtgaacctttggcaacaacctggggtgcgaagt

SEQ ID NO: 229801 - DNA, 120 bp, Artificial Sequence
  ENSG00000119139_45 (sequence is synthesized)
ctgcctagtgggtacaggtctaaggcggggacttctcaaggactgggacttgaagaaagaatttcctttacccaaatttcagagtaacaggaggattttttccccacagattgactgttt

SEQ ID NO: 229802 - DNA, 120 bp, Artificial Sequence
  ENSG00000119139_46 (sequence is synthesized)
gccttactcattccatcaaatttaattgtaaagattacagagtcaaaacttaagcatagtttgcttgtgtgctaaaactctgacaaagtgtaatcattgatgtttccagccagtacattt

SEQ ID NO: 229803 - DNA, 120 bp, Artificial Sequence
  ENSG00000119139_47 (sequence is synthesized)
gacacattggagcctggttatgttacattgcacatggttagcacatgagcagaattcctacggcttagacctgttttgtcttgtttgctgactctcagccaaacttcttaattcctttgc

SEQ ID NO: 229804 - DNA, 120 bp, Artificial Sequence
  ENSG00000119139_48 (sequence is synthesized)
atcatccagcaaagtcagaccgcttgtgctgccctggggtctaaagggaccgtgacaagcaaatgagcagtcttggtaaatgccacacaaacagtaggaatgttcacagtgtcttcctgt

SEQ ID NO: 229805 - DNA, 120 bp, Artificial Sequence
  ENSG00000119139_49 (sequence is synthesized)
tgaagttttatactggattgcttcctgcttccgagaatagaaaaaaaaaagtcacattttcttgtggccattcttttgttttttttggagacagagtgactgtcgcccaggctgaagtgc

SEQ ID NO: 229806 - DNA, 68 bp, Artificial Sequence
  ENSG00000119139_50 (sequence is synthesized)
gtctcaaactcctgaccacccagcctcttgtggccattctgactggaagctgaagtctagttttccag

SEQ ID NO: 229807 - DNA, 120 bp, Artificial Sequence
  ENSG00000119139_51 (sequence is synthesized)
tgtggccattctgactggaagctgaagtctagttttccagtgatagaaaactggaaacaaatttcttctttaccagctgagtggtaacacagtcaaccaggttgcctctggcaacaaaga

SEQ ID NO: 229808 - DNA, 120 bp, Artificial Sequence
  ENSG00000119139_52 (sequence is synthesized)
gttcttggttatgatggactgaaactggcagagacctcgctgctgggtgagactagccagggagcttaggggtaaggagggcaccccctgtccaacagggagattcttaggtcagggagc

SEQ ID NO: 229809 - DNA, 120 bp, Artificial Sequence
  ENSG00000119139_53 (sequence is synthesized)
acctggctggcttcctcactcaccgccgaagtgggcattggatttgacctattacgaacctggagcaggaccagggatgccctggttgctctgcagaatgtggctcagaggtaagtgatc

SEQ ID NO: 229810 - DNA, 120 bp, Artificial Sequence
  ENSG00000119139_54 (sequence is synthesized)
tgctcgggatacccagtcactgtgctcagagccatgcctccccgggcagccggaggacatggatgtgctctggaatgtctttaacaccctttttttgttagttccagaccccctgagcca

SEQ ID NO: 229811 - DNA, 120 bp, Artificial Sequence
  ENSG00000119139_55 (sequence is synthesized)
agccagaccctggcacgccccagcacacgagcaaaccaaggaagaaggactggatgtgcatgagttgcaggaggccttaagggaagccaaaagctggaggtgataaagcacagaggtatg

SEQ ID NO: 229812 - DNA, 120 bp, Artificial Sequence
  ENSG00000119139_56 (sequence is synthesized)
gactgattcaaactccccataccccaaataccttctgttctttctttaaaaaaaaaaagtgtgtgcgtttgtgtgtttgtgtatgttagggggattataaaataccaatgcccaaaacag

SEQ ID NO: 229813 - DNA, 68 bp, Artificial Sequence
  ENSG00000119139_57 (sequence is synthesized)
gaaagtatggtctccggcttgggagtcagatcttcgtaaaggaaatgacccgaacgggtctggcaact

SEQ ID NO: 229814 - DNA, 120 bp, Artificial Sequence
  ENSG00000119139_58 (sequence is synthesized)
gtggcagggatgcactgcaccaaaggcaggtgctgtgtatgtcacttcagattgccagctcccagcacgtcccttgttcttccaaagaagaaaacttgacaatataggggaagaagattc

SEQ ID NO: 229815 - DNA, 120 bp, Artificial Sequence
  ENSG00000119139_59 (sequence is synthesized)
tgctctttatacacagaactttgtatagagttctggaatgaggaagtgtgaggagggaatcagtgcctctcggaagtcgttttaattagaatgtgatttttttttcttaaacgtgtcttc

SEQ ID NO: 229816 - DNA, 120 bp, Artificial Sequence
  ENSG00000119139_60 (sequence is synthesized)
attggctcccagatttgccgtagaaaccaagcaaactgggtgctaaaacagaaaggcccatagattgtactttttgagctgtttgaatttgtataccatatgcacatagaacttttcaaa

SEQ ID NO: 229817 - DNA, 120 bp, Artificial Sequence
  ENSG00000119139_61 (sequence is synthesized)
caaagaagaatttaactaaaggtctgtggagtatatttgcccagtagatgtgggagttttctttcaggtctagcacaacagcagcagtacatctgagcatttttcttttcttgtcgtaaa

SEQ ID NO: 229818 - DNA, 83 bp, Artificial Sequence
  ENSG00000119139_62 (sequence is synthesized)
cttttatttacctctgtcaccccggctggagtgtagcagtgtgatcacagctcgcagcagcctccacctctcaggctcaggag

SEQ ID NO: 229819 - DNA, 120 bp, Artificial Sequence
  ENSG00000119139_63 (sequence is synthesized)
atcacagctcgcagcagcctccacctctcaggctcaggagatactcccacctcagcctcctgaatagctgtaaccacaggcacatgccactgcacccagctaatttttcgtattttttga

SEQ ID NO: 229820 - DNA, 84 bp, Artificial Sequence
  ENSG00000119139_64 (sequence is synthesized)
aatgtcatgagtcactgcacccagcctcaaccattttaaaacgttcggttcagcggcattaagtaccttcacattgctgttcag

SEQ ID NO: 229821 - DNA, 120 bp, Artificial Sequence
  ENSG00000119139_65 (sequence is synthesized)
tcggttcagcggcattaagtaccttcacattgctgttcagccatcaccaccatccatccccaaaacttttttatccttcccacgtgaaactccgtacccataaaatactaactcaccact

SEQ ID NO: 229822 - DNA, 120 bp, Artificial Sequence
  ENSG00000119139_66 (sequence is synthesized)
ctcctctccccgcagtccctggcacccactcctttactttctgttttttgtgaattggacagtgtaggaacctcctataagtagaatcatacactatttgtctttttgtgattggcttat

SEQ ID NO: 229823 - DNA, 120 bp, Artificial Sequence
  ENSG00000119139_67 (sequence is synthesized)
ttcccttagcatgatgtcctcaaggttcatccaggttgtagcatgtgtcagagtttcattccttttaaatagttttcctgtctgacgtgtaccgcacataaccatggaaatgaggaggcc

SEQ ID NO: 229824 - DNA, 120 bp, Artificial Sequence
  ENSG00000119139_68 (sequence is synthesized)
gcttctgtgtttcctcttcttgaaatgggatgggaaaataagtaggatatggggaaagggtgggaccagcaggaaaccagcaagcagagtgcccagtggttcattctttcactcttattc

SEQ ID NO: 229825 - DNA, 120 bp, Artificial Sequence
  ENSG00000119139_69 (sequence is synthesized)
tccttgcactctcgtggacagctgtgtgttcagggtgctgtggaaggcattcctaagggttggagcagatgacttccagggagtctctcgctttgagtccacgctggcatggttgcagtc

SEQ ID NO: 229826 - DNA, 120 bp, Artificial Sequence
  ENSG00000119139_70 (sequence is synthesized)
tgtgggaaagtggggcaggcaggtggacttcagaagagcttgaggggtcagcactccgcacacccatgccctcaggtgcgatggataaacagaatggctttaggtgccgtctgtccaaat

SEQ ID NO: 229827 - DNA, 120 bp, Artificial Sequence
  ENSG00000119139_71 (sequence is synthesized)
taccagcggaaccttccttcccatgcagtattgttgtatgtacttgtaacctttgattaggtttctctctgtactcttagatgtccttgcttttcttccccatcctgcctttaacctttc

SEQ ID NO: 229828 - DNA, 120 bp, Artificial Sequence
  ENSG00000119139_72 (sequence is synthesized)
taatcttgccaaagctcttgagtgtttccccatcagtttccttctctcttatatttcagttttttaattgagttcatgatcaaaccttcatctgatcacatcacatgtactgtgcatcca

SEQ ID NO: 229829 - DNA, 120 bp, Artificial Sequence
  ENSG00000119139_73 (sequence is synthesized)
ctgtgattagatagcttatgggatccttgaaatcacattgacaggcactgtaaagtcacagccaagttagcaattattagttgcacctcagagaatgttggaataatgatctttgaagat

SEQ ID NO: 229830 - DNA, 120 bp, Artificial Sequence
  ENSG00000119139_74 (sequence is synthesized)
gggattgttcatatatttggataattattgctgtggatttctctctagcattttagctcattccagtaaatgatttttttctttatgaaatagaactaccaaaaaaaaaaaaaaaaaaaa

SEQ ID NO: 229831 - DNA, 120 bp, Artificial Sequence
  ENSG00000119139_75 (sequence is synthesized)
aaacctctaaacaggaaatagcccgaatcacaataatatacgggagcagccgcggaggccgctggcgccctcccattcccggggagcttcccgcactccggcttgggtgaagtgcagcca

SEQ ID NO: 229832 - DNA, 120 bp, Artificial Sequence
  ENSG00000119139_76 (sequence is synthesized)
gcttgggtgaagtgcagccagcgacgcgcgcagggagcgcagggggacaccagcccagcagctagcgccgcgccgcccagcgccccggagagccgccttcgccctcgcccagcgcccgac

SEQ ID NO: 229833 - DNA, 120 bp, Artificial Sequence
  ENSG00000119139_77 (sequence is synthesized)
ggacactattcagcatcagcaaggagaagcggtttgggtctctgaaggaaaggtatgtggcatagatatgctgctatgaggtgagagtccctgttctgaaacttttctcaagagggcagt

SEQ ID NO: 229834 - DNA, 120 bp, Artificial Sequence
  ENSG00000119139_78 (sequence is synthesized)
gaatgtagtcaagccatgcccatttgaagtgatgctcacatgtgtgctaatcaagtttgaaatttcgtaaattctctgaccaagtaataaaaatgaagggacttttaaaagaagagcaga

SEQ ID NO: 229835 - DNA, 120 bp, Artificial Sequence
  ENSG00000119139_79 (sequence is synthesized)
atgtgacatgtgcagccctacattcacttccctttcacttttaatgtagtaactagtgttatattccaagtacactaatcagagcttacaagatctcatgctgagctccacagcttacta

SEQ ID NO: 229836 - DNA, 120 bp, Artificial Sequence
  ENSG00000119139_80 (sequence is synthesized)
aggacgtgggaaacttagagtgcagatgagaggtgaggttgagcaacttggagaatacggctaaacattaataaaaagaaaagctaatggagttagaattacttagaaaataaggttggt

SEQ ID NO: 229837 - DNA, 120 bp, Artificial Sequence
  ENSG00000119139_81 (sequence is synthesized)
tgagaatgtgccatcgttctgggagtttgaatgggtgatatgagaacgttagggaatttgtctaggcctctagaattggatcgcttctccctcggggagatagctcacacacagctgtgc

SEQ ID NO: 229838 - DNA, 120 bp, Artificial Sequence
  ENSG00000119139_82 (sequence is synthesized)
tgcagggaggagagagggagattctattacctgtggccgcttttattttagaagcttttggtgttagtatcctgttcaccagctgaactgaggtagttttgtgagacttgacagtgacta

SEQ ID NO: 229839 - DNA, 120 bp, Artificial Sequence
  ENSG00000119139_83 (sequence is synthesized)
ttttgttgcagaattgactaagttttgctctttgagaactagatgtgtagtcaaagtatctggcatctatggagtgcttccagtttggaagggggatgcaagcttccctggggaggacag

SEQ ID NO: 229840 - DNA, 120 bp, Artificial Sequence
  ENSG00000119139_84 (sequence is synthesized)
gttgaacaggacatagcttctgcctttgagggtctgagaatcttgtagaggcatggatgtgagtgtagcacaaggcagcgtgcaatgtgttgatattactaggagagtggtaccaggaga

SEQ ID NO: 229841 - DNA, 120 bp, Artificial Sequence
  ENSG00000119139_85 (sequence is synthesized)
acaggctgcagaggagctggattcagaagaaaagcaagacagactgagaaagtgtggcttagccgcggtatggaggatggatggtagcacagataggctgcagggcccctaatttgagtt

SEQ ID NO: 229842 - DNA, 120 bp, Artificial Sequence
  ENSG00000119139_86 (sequence is synthesized)
cctgcacaaaaacgaccataatatcaacattgtaccaaagccaagtgatctcagggagaaaaataaaagatgccttccctggcgagcacatcaaggtttcagtcgcttggctgtgtcctt

SEQ ID NO: 229843 - DNA, 120 bp, Artificial Sequence
  ENSG00000119139_87 (sequence is synthesized)
gggaattttcttgagtccccactcccaggagccacatcagaccccactgaccgtccaacacaaattcctctagatggaagggatggatgatgaccccgaagaccgcatgtcctacttaac

SEQ ID NO: 229844 - DNA, 120 bp, Artificial Sequence
  ENSG00000119139_88 (sequence is synthesized)
caagggaaggcagcttcatgtctgtgcacctgcctgttaaaaagaggtcaagtgcatgagttggatgttacttttatatgcagcttaggaagttagctactgtgaagctctcaattttta

SEQ ID NO: 229845 - DNA, 120 bp, Artificial Sequence
  ENSG00000119139_89 (sequence is synthesized)
ttcataaacttgactgttaatgtgaattcagtaagagcttttgtgattttctttattttatcaaggggcaagaacatatttcctgcatctcacaaaatgccgttttaactttaggttttc

SEQ ID NO: 229846 - DNA, 120 bp, Artificial Sequence
  ENSG00000119139_90 (sequence is synthesized)
tttatgatgaatgcagaccatacttatctcagacagctgcaacataaagctttaaaagactgcttaacattttgtatatatttagtgtaaatcactcattttgtctctggggtacaaaat

SEQ ID NO: 229847 - DNA, 120 bp, Artificial Sequence
  ENSG00000119139_91 (sequence is synthesized)
ctcacttctatttttaagtatcatattttagctatgagatgagcacagtaatctttgcagagtaccataataggaatagagaagtccgtggaatcaaagttaattttcttcgggttgtct

SEQ ID NO: 229848 - DNA, 120 bp, Artificial Sequence
  ENSG00000119139_92 (sequence is synthesized)
aatggatcagtttatttcagtgctgtaaataattaataaccaaggaaattgtaagctcattcaggattttctaaggtcactgttagaacttcttaaacagaagaaagctatgttacttgg

SEQ ID NO: 229849 - DNA, 120 bp, Artificial Sequence
  ENSG00000119139_93 (sequence is synthesized)
aggaaaacctgaagcatcattgcttacaaaatttgcttaatggttctttttggctttagaagtgatagtacaataagaggccatggcaatgtagtttaaaagaaatcctaatttacctgc

SEQ ID NO: 229850 - DNA, 120 bp, Artificial Sequence
  ENSG00000119139_94 (sequence is synthesized)
agtctgataattttaggggtacaatttgttattttggactaacttgcttgtctaatttatctccattaggtccataatacatattgctgaagaaatgacatatgttgtactttgttggta

SEQ ID NO: 229851 - DNA, 120 bp, Artificial Sequence
  ENSG00000119139_95 (sequence is synthesized)
ttttatatctgtgctctaaatttctgtttttagatgggccatgtagtgtggtggctgagaccataggctctgaaagcagttttctgagcttgcatccaagcttcacacttgcttggtgtg

SEQ ID NO: 229852 - DNA, 120 bp, Artificial Sequence
  ENSG00000119139_96 (sequence is synthesized)
tggccttgggctagttaatttcactactttaccttggtttctcatctataagatgggcatcatagcaacacctaccttgcaaagtttgtgtagtcgtgaaatgagctaatccaggtaagg

SEQ ID NO: 229853 - DNA, 120 bp, Artificial Sequence
  ENSG00000119139_97 (sequence is synthesized)
tacttggaaagtaactggttgatgcatagtaagtgctattatgtaagatatactttgttctgagtagaaaatgtatattctttgaatacacactggttgggtttgtttaatctatatgta

SEQ ID NO: 229854 - DNA, 120 bp, Artificial Sequence
  ENSG00000119139_98 (sequence is synthesized)
tattctaaaatgtgtaagtctatcaaagtgatatacagtcagctctccatgtctgtggtttccacattcatgaattcaactagccgtgtataggaaatatttgaggggtaaaatggatgg

SEQ ID NO: 229855 - DNA, 120 bp, Artificial Sequence
  ENSG00000119139_99 (sequence is synthesized)
attccctaaacaatatagtataacaacgatttgcgtagcatttacattgtattaggaattataagtaatccagagatgatttaaagtatataagaggatgtacataagtcatatgcaaat

SEQ ID NO: 229856 - DNA, 120 bp, Artificial Sequence
  ENSG00000119139_100 (sequence is synthesized)
agtatataagaggatgtacataagtcatatgcaaatactgtgtcattttgtatcagatactcggcatctgtggattttggtatccaagtggggggtgtcccggaaccaatcctctacaga

SEQ ID NO: 229857 - DNA, 120 bp, Artificial Sequence
  ENSG00000119139_101 (sequence is synthesized)
taccaagggacaactttatgtttaagtgttacttttagtattttattggaggtagccaatacagtatattagtgtatactaattagtgtatacacctcagcctcccagagtgctgagatt

SEQ ID NO: 229858 - DNA, 120 bp, Artificial Sequence
  ENSG00000119139_102 (sequence is synthesized)
acaggcatgagccaccacacctggccgaaaacacatgttcttaaaaacatttttaaaagttagcctttctgaaaataaacattctaaaaatctatttttagctttatcacatccacctat

SEQ ID NO: 229859 - DNA, 120 bp, Artificial Sequence
  ENSG00000119139_103 (sequence is synthesized)
aatgtgaactcaaacagctacatgattagtagttttaattgcattcattaaaagggttttaatattcaaagatgtgcaaacatcttcttgcgtctgccatagtcttaaatatcacagaaa

SEQ ID NO: 229860 - DNA, 120 bp, Artificial Sequence
  ENSG00000119139_104 (sequence is synthesized)
tgagtgtaaattatgtcaaatagcatccttaataaacatgcctctggaaattaatgcagacctttttgtttatatttctatagctacaatcaacctaaattcagccaatgatagctggtt

SEQ ID NO: 229861 - DNA, 120 bp, Artificial Sequence
  ENSG00000119139_105 (sequence is synthesized)
aaattaccccttgcttttaagcatttgacagaattacataacctagggaccgctgttcttggatcctcagtacttttggaggggtgtgaagatatgtgtaagttatcttcctacttttcc

SEQ ID NO: 229862 - DNA, 120 bp, Artificial Sequence
  ENSG00000119139_106 (sequence is synthesized)
ggcgcgaattcgcgctggtgccctgggtcgtttgtgcaggcggggtgaggggcagcgcgagtaaacgggttgacatcccctaggtttctctgcagagtgcgctgtgtacttcatcgggca

SEQ ID NO: 229863 - DNA, 120 bp, Artificial Sequence
  ENSG00000119139_107 (sequence is synthesized)
tttactttttcactgcttcctcatcgcccccggggcggcagcgcctcacagggtctctctgggggaatcatcaacaggtgtgcctgaacacgcacctgcggcagccacaggtgtctggga

SEQ ID NO: 229864 - DNA, 120 bp, Artificial Sequence
  ENSG00000119139_108 (sequence is synthesized)
gccaccttttttcttctccctggcctggcaccctttcactcaagggatggaaactgtttcactttctgctgagcttctcttttacccgattaaaagggcctttgaatttctgttggcgca

SEQ ID NO: 229865 - DNA, 120 bp, Artificial Sequence
  ENSG00000119139_109 (sequence is synthesized)
agactgtgtctttatttgacaagaatgcagtgcaagcgggccttcctttggaagaattttagccctaactctgccctttatttgctttctcatcttgaaagagttgctgtaaagattcta

SEQ ID NO: 229866 - DNA, 120 bp, Artificial Sequence
  ENSG00000119139_110 (sequence is synthesized)
taattctatgtcttcaccagtaaccagggacctactgatactcatctcatggtcccaagaaagataaaattgtaggatatatgagatagatgagaaaaatgagagggctttgtaaactat

SEQ ID NO: 229867 - DNA, 120 bp, Artificial Sequence
  ENSG00000119139_111 (sequence is synthesized)
tagctagaagaaattaaatctctcatttgctaatgttgttctcccttttaaaaaatatctcccatctttcctttctgaaacggaacctattgcagccctaataccaaaatggtaaggttc

SEQ ID NO: 229868 - DNA, 120 bp, Artificial Sequence
  ENSG00000119139_112 (sequence is synthesized)
tcacagtgagtcctttatcctcagattgatttgtgcttctggcatctttcagcaacaaattgtgagattgtaggttgtagtcactggtgggtttttaaaaatacttgtattaattttagc

SEQ ID NO: 229869 - DNA, 120 bp, Artificial Sequence
  ENSG00000119139_113 (sequence is synthesized)
agatctatgtgaaactgatagcctcttactggatctgtggatcaaaggctgctgttttccatgtgctaggaatctgtaatggttttgcttcctgggtagagcttaacatactggcttttg

SEQ ID NO: 229870 - DNA, 120 bp, Artificial Sequence
  ENSG00000119139_114 (sequence is synthesized)
tgtttgttcatgtttgagaatttcttgttttgggataaaactttttgctttcttacactgcagaaatctatattcttattatgtctaggcttctaacttagaagaaaaagtgtttttcac

SEQ ID NO: 229871 - DNA, 120 bp, Artificial Sequence
  ENSG00000119139_115 (sequence is synthesized)
atgttcttttttcctcttacagtttgaacatgtgtgagtgtttactttgatggcttgagacttttatgaagcatgtcccttacgtggacagcttgcgattaatctttggttttagctttg

SEQ ID NO: 229872 - DNA, 120 bp, Artificial Sequence
  ENSG00000119139_116 (sequence is synthesized)
acctccatcactgggcagcagcagtctgtggatacagaatctaaaagccgcctgttcagggggactttgggcagtgaacacttcggtatctgttttggggttggcttttaacatgtttct

SEQ ID NO: 229873 - DNA, 120 bp, Artificial Sequence
  ENSG00000119139_117 (sequence is synthesized)
aagatttttcaaaggaaaaaagctttataaaaagattaaaaaaaaacacaataagtaactatttgccttagttcctttctcttcttttgtcacacaaaaaccttactgttaatgcattaa

SEQ ID NO: 229874 - DNA, 120 bp, Artificial Sequence
  ENSG00000119139_118 (sequence is synthesized)
gttttttgtttatggtagaaaagttagctcacttttaactttccatgaggtcttaagaatgacctgttagatataaagggggttgtcatgaacactacttacgtgaaaagtaaaagtgat

SEQ ID NO: 229875 - DNA, 120 bp, Artificial Sequence
  ENSG00000119139_119 (sequence is synthesized)
gtttctagtttcatttcattgaaggagagtgtgtttgaaaataggtagcataatgaacagatattaactcttttttggtatagaaagtgccccaggcatggaagagctgatatgggaaca

SEQ ID NO: 229876 - DNA, 120 bp, Artificial Sequence
  ENSG00000119139_120 (sequence is synthesized)
tggggagagaccatgaagactgctcaagccctacataggatgtggatccaggctgttaaaaagttgaggagatggaaaggccgtgccccaggcatggaagagctgatatgggaacagtac

SEQ ID NO: 229877 - DNA, 120 bp, Artificial Sequence
  ENSG00000119139_121 (sequence is synthesized)
caactaaagatggcaaccttcacgaaggagacataattctcaaggtgggtagatgggggcagagaacggtagtgtgcatactgccgttcatcgcctgcatgtccacattcagcacccaca

SEQ ID NO: 229878 - DNA, 120 bp, Artificial Sequence
  ENSG00000119139_122 (sequence is synthesized)
cagtgagacttagatccagtgagagtcagtggtaagacagaggtggcaagagcagcataatgagacgatttttatcagaaaaaccagacattgagggtcgtaacagtttaatgtcagttt

SEQ ID NO: 229879 - DNA, 120 bp, Artificial Sequence
  ENSG00000119147_0 (sequence is synthesized)
cggttctccctcgcagcacctcgaagtgcgcccctcgccctcctgctcgcgccccgccgccatggctgcctcccccgcgcggcctgctgtcctggccctgaccgggctggcgctgctcct

SEQ ID NO: 229880 - DNA, 120 bp, Artificial Sequence
  ENSG00000119147_1 (sequence is synthesized)
ggctggcgctgctcctgctcctgtgctggggcccaggtggcataagtggaaataaactcaagctgatgcttcaaaaacgagaagcacctgttccaactaagactaaagtggccgttgatg

SEQ ID NO: 229881 - DNA, 120 bp, Artificial Sequence
  ENSG00000119147_2 (sequence is synthesized)
agaataaagccaaagaattccttggcagcctgaagcgccagaagcggcagctgtgggaccggactcggcccgaggtgcagcagtggtaccagcagtttctctacatgggctttgacgaag

SEQ ID NO: 229882 - DNA, 120 bp, Artificial Sequence
  ENSG00000119147_3 (sequence is synthesized)
acagagatcgaaatggacatgaatactatggcgattactaccaacgtcactatgatgaagactctgcaattggtccccggagcccctacggctttaggcatggagccagcgtcaactacg

SEQ ID NO: 229883 - DNA, 120 bp, Artificial Sequence
  ENSG00000119147_4 (sequence is synthesized)
atgactactaaccatgacttgccacacgctgtacaagaagcaaatagcgattctcttcatgtatctcctaatgccttacactacttggtttctgatttgctctatttcagcagatctttt

SEQ ID NO: 229884 - DNA, 120 bp, Artificial Sequence
  ENSG00000119147_5 (sequence is synthesized)
ctacctactttgtgtgatcaaaaaagaagagttaaaacaacacatgtaaatgccttttgatatttcatgggaatgcctctcatttaaaaatagaaataaagcattttgttaaaaagaaaa

SEQ ID NO: 229885 - DNA, 120 bp, Artificial Sequence
  ENSG00000119147_6 (sequence is synthesized)
atctaggaagcaggaagcagggcctgaccagacaccaaatctgctggggccttagtcttgaatttccagcctccataactgtgcaaaatccatttctgttgcttataagctacccagctt

SEQ ID NO: 229886 - DNA, 120 bp, Artificial Sequence
  ENSG00000119147_7 (sequence is synthesized)
ggaagcagaaaattcagctttgctgttcattcctagagtaagagccccatcatatgccaagtgctatcaggcactggatcatgttacctatggtgtaagggcgatggctggaagtttcca

SEQ ID NO: 229887 - DNA, 120 bp, Artificial Sequence
  ENSG00000119147_8 (sequence is synthesized)
cctgaccgggctggcgctgctcctgctcctgtgctggggcccagaccccctggagcctgtccatggaaggagaggctaagaaccctgctgagaaagtggtcaccattacctccatcctgg

SEQ ID NO: 229888 - DNA, 120 bp, Artificial Sequence
  ENSG00000119147_9 (sequence is synthesized)
ggcctgactccagttccttacacccgaagttgctctactcactacttacgatgtcatgcaacagttaagggtcagaggctcctataggtctgcaagccagttcgctgggtggaggcgtgt

SEQ ID NO: 229889 - DNA, 120 bp, Artificial Sequence
  ENSG00000119147_10 (sequence is synthesized)
tgcttcaaaaacgagaaggaccatggagcactttagagactatctttggaacacataatcctcagttggtggggcaggcgtggaacagcagtgttgcggtagtccgtgtatccaaagagc

SEQ ID NO: 229890 - DNA, 120 bp, Artificial Sequence
  ENSG00000119147_11 (sequence is synthesized)
tcttggggaagggtttcaaacaggaaagcctttcttgttattagcctctgttttgaataatgcatctaagataaatgtgacagcaacaaaatgtcatagaaattgaacagtctgggggtc

SEQ ID NO: 229891 - DNA, 120 bp, Artificial Sequence
  ENSG00000119185_0 (sequence is synthesized)
gtcaggactgcgcctgcgcatagtcttggaggcgcggcccggcggacgtgggcaggagggctggaaaagccggcgctggagcgggaacgggagtagctgcctgggcgccaaaggccgcgg

SEQ ID NO: 229892 - DNA, 120 bp, Artificial Sequence
  ENSG00000119185_1 (sequence is synthesized)
cactcccacgcggaccccgaagtccgcaacccggggatgggcccgcggctgcgaggggatcttctctggatcaagcaatggtggtgaaaaatgtttcgcaagggcaaaaaacgacacagt

SEQ ID NO: 229893 - DNA, 120 bp, Artificial Sequence
  ENSG00000119185_2 (sequence is synthesized)
agtagcagttcccaaagtagcgaaatcagtactaagagcaagtctgtggattctagccttgggggtctttcacgatccagcactgtggccagcctcgacacagattccaccaaaagctca

SEQ ID NO: 229894 - DNA, 120 bp, Artificial Sequence
  ENSG00000119185_3 (sequence is synthesized)
ggacaaagcaacaataattcagatacctgtgcagaatttcgaataaaatatgttggtgccattgagaaactgaaactctccgagggaaaaggccttgaagggccattagacctgataaat

SEQ ID NO: 229895 - DNA, 120 bp, Artificial Sequence
  ENSG00000119185_4 (sequence is synthesized)
tatatagacgttgcccagcaagatggaaagttgccttttgttcctccggaggaagaatttattatgggagtttccaagtatggcataaaagtatcaacatcagatcaatatgatgttttg

SEQ ID NO: 229896 - DNA, 120 bp, Artificial Sequence
  ENSG00000119185_5 (sequence is synthesized)
cacaggcatgctctctacttaataatccggatggtgtgttacgatgacggtctgggggcgggaaaaagcttactggctctgaagaccacagatgcaagcaatgaggaatacagcctgtgg

SEQ ID NO: 229897 - DNA, 120 bp, Artificial Sequence
  ENSG00000119185_6 (sequence is synthesized)
gtttatcagtgcaacagcctggaacaagcacaagccatttgcaaggttttatccaccgcttttgactctgtattaacatctgagaaaccctgaatcctgcaatcaagtagaagtcaactt

SEQ ID NO: 229898 - DNA, 120 bp, Artificial Sequence
  ENSG00000119185_7 (sequence is synthesized)
catctgaaagttcagctgttttcaaactgcaatgctgaaatgttatgcaaataatgaagttatcccttgctctagattttctgaagaaaatggattgtgtaaaatgctgatcatttgttt

SEQ ID NO: 229899 - DNA, 120 bp, Artificial Sequence
  ENSG00000119185_8 (sequence is synthesized)
gtcatctattttctgggctaaaaaacttcatttgtctttttcaacttctaataagcttaacctaagtgtcacagaagcctaggtgtcacagaggtccactcagtgacaaacacacactga

SEQ ID NO: 229900 - DNA, 120 bp, Artificial Sequence
  ENSG00000119185_9 (sequence is synthesized)
aggcctgaggaagacgagatgtcacagaggtccactcagtgacaaacacacactgaaggcctgaggaagactagatgtcacagaggtccactcagtgacaaacacacactgaaggcctga

SEQ ID NO: 229901 - DNA, 120 bp, Artificial Sequence
  ENSG00000119185_10 (sequence is synthesized)
ggaagacgagatgtcacagaggtccactcagtgacaaacacacactgaaggcctgaggaagactagatgtcacagaggtccactcagtgacaaacacacactgaaggcctgaggaagacg

SEQ ID NO: 229902 - DNA, 120 bp, Artificial Sequence
  ENSG00000119185_11 (sequence is synthesized)
agatgtcacagaggtccactcagtgacaaacacacactgaaggcctgaggaagacgagatgtcacagaggtccactcagtgacaaacacacactgaaggcctgaggaagactagatgtca

SEQ ID NO: 229903 - DNA, 120 bp, Artificial Sequence
  ENSG00000119185_12 (sequence is synthesized)
cagaggtccactcagtgacaaacacacactgaaggcctgaggaagacgagatgtcacagaggtccactcagtgacaaacacacactgaaggcctgaggaagacgagatgtcacagaggtc

SEQ ID NO: 229904 - DNA, 120 bp, Artificial Sequence
  ENSG00000119185_13 (sequence is synthesized)
cactcagtgacacacactgaaggcctgaggaagactgaggacatgggctcagtggtggcttcccagtcatggtatcactggcatggacctctgtccggcagaggtgtggactggagacca

SEQ ID NO: 229905 - DNA, 120 bp, Artificial Sequence
  ENSG00000119185_14 (sequence is synthesized)
ggattcatgctggtctggaacagtgacattgccaacttaagacacacaaagcagattttcagaagtgtctggtcaagataacatgctggccaaccacaattcctagagttaagagaacct

SEQ ID NO: 229906 - DNA, 120 bp, Artificial Sequence
  ENSG00000119185_15 (sequence is synthesized)
taaaagattaccgctcatgctaaaagtatgtaaagatcccatgtacagtatgatagtgtactttttttaaaggactgtcaatatacaaaactttaaagattaaaaacattaaaaataaaa

SEQ ID NO: 229907 - DNA, 120 bp, Artificial Sequence
  ENSG00000119185_16 (sequence is synthesized)
ttccgggcggggccgcgctcccggggcgcgggtggaggagcttggaaccacgcagatcgggcgtgggcttgcggactgcagcttcccgagccgctgtcgccccggaggggcggcaaggcg

SEQ ID NO: 229908 - DNA, 120 bp, Artificial Sequence
  ENSG00000119185_17 (sequence is synthesized)
ggcggccgcgggccgtttccttgcctcttcctctgccccgcttcggccgcctcccgcctctcagggtcggggttgtctgtccccttcgctgtcacatcctccgcacccagcgcttggaag

SEQ ID NO: 229909 - DNA, 120 bp, Artificial Sequence
  ENSG00000119185_18 (sequence is synthesized)
gtgctccatcacggtgacagacaggtgccaagcaggctggcgtctgggaggaacttcggagccggctctccctaggccccgagcttggccgcatccgtccttactctggtgaccctgggc

SEQ ID NO: 229910 - DNA, 120 bp, Artificial Sequence
  ENSG00000119185_19 (sequence is synthesized)
aggtcactgactcttcgggcgctttggcatcctcgtttgaaaggggctgttatcctgcagccttgctggtcggtgagggtgagggtgagagggatctgtgcacctagcaccgtgcatggc

SEQ ID NO: 229911 - DNA, 120 bp, Artificial Sequence
  ENSG00000119185_20 (sequence is synthesized)
acgtggtaggcgtttggtacatgggaatcgctgttggggtgtcacctccccagaaagttctcggcttcagtaagcgcgtcccctgccaggcgccctggcaatgcagaggagtcaccgagc

SEQ ID NO: 229912 - DNA, 120 bp, Artificial Sequence
  ENSG00000119185_21 (sequence is synthesized)
tccgcctttgaccagcgtgcagctgggagagtgagatcagagaccacagcagatcgtggcgctgtgatcagggggtacactcaagctgtgggtcccttaccccagccttgagatcccagg

SEQ ID NO: 229913 - DNA, 120 bp, Artificial Sequence
  ENSG00000119185_22 (sequence is synthesized)
aaggcctgcagcctgaaacgggccttgaaaggtgcgtagtttctctgaaaagcatcacccaggtcagaatgaaaggaaactctctgtgcagaccgctgtatgtgggacctttgaagacag

SEQ ID NO: 229914 - DNA, 120 bp, Artificial Sequence
  ENSG00000119185_23 (sequence is synthesized)
aacaagaagagtaaacttattaaacatgctctaattataaatcactgcattaaggacaatgaaaataatcaatttcggttatacaatatatacagttgtgctgcaaccaaagtaatcagg

SEQ ID NO: 229915 - DNA, 120 bp, Artificial Sequence
  ENSG00000119185_24 (sequence is synthesized)
tgaatgaactgaatatcatacatctcaaaatagcatcctaagctgcatattatgttatccaccccttaacagatcacacagttactcttagtctgtgtacatgttctgagccatcatccc

SEQ ID NO: 229916 - DNA, 120 bp, Artificial Sequence
  ENSG00000119185_25 (sequence is synthesized)
agatctgatggagaatggcatgcaaaatgccagaatcctgcagctgcagttcatgaaacataaactttaaatataaatagatatctacaatgtttttctttctcttagttgcttttttaa

SEQ ID NO: 229917 - DNA, 120 bp, Artificial Sequence
  ENSG00000119185_26 (sequence is synthesized)
tttgcaaggagcaaataactaagaaaggatattagcagggtcgttaatataatttctcctctggtaagagtactattagttactgcacaatagcaccaaattgtagactggaaaaatatt

SEQ ID NO: 229918 - DNA, 120 bp, Artificial Sequence
  ENSG00000119185_27 (sequence is synthesized)
tcctaggtatttatgtaccagtgaacctgacagattagtttgggactggagttctaatgttgatatgaatcaactttattccttatatagctggcaccaggtggtcaaaaggctgactat

SEQ ID NO: 229919 - DNA, 120 bp, Artificial Sequence
  ENSG00000119185_28 (sequence is synthesized)
aaaatacagatgcaggaggattgttaaaatagacataagtgcactgtgcaaaatacatctgtttacttaaatctatgagaaaattaaatgaagggttcaaacagaaattaacaattagtg

SEQ ID NO: 229920 - DNA, 120 bp, Artificial Sequence
  ENSG00000119185_29 (sequence is synthesized)
aaaacagatgtagtgctttaaaaaaaaacaaaaacaaaaaactacagatataacacatttttacccggaactttgaaaggtaaaaagcgattgctatacaacatcataaaacattccagt

SEQ ID NO: 229921 - DNA, 120 bp, Artificial Sequence
  ENSG00000119185_30 (sequence is synthesized)
ttgttctgtcttcctttataacaaaaacaaaaagtacaatgccaaaaaaaaaaaaaactctacacagtcttgcataataaagacaagctgcttcaatcaaatgcaccatcacaacaaatg

SEQ ID NO: 229922 - DNA, 120 bp, Artificial Sequence
  ENSG00000119185_31 (sequence is synthesized)
cagttaacagcattgctgcctcactttccaagcctatatgcaaatttattcctttacttttgttaaaagtccaagtgggtatcatatgcctatttattctcagagtgccaaaatttccaa

SEQ ID NO: 229923 - DNA, 120 bp, Artificial Sequence
  ENSG00000119185_32 (sequence is synthesized)
tattcctactatgaatcttaccctcgcaattactaaatagaggtatgacagtcaagttcattaaacgaatgagttttggttttataatagacaacctaatcctctactaccaccccaagt

SEQ ID NO: 229924 - DNA, 120 bp, Artificial Sequence
  ENSG00000119185_33 (sequence is synthesized)
agcttaagaatgatatgatggcctgaaacagtaaaaagtgggatgtttgggagtattacctgggacctatatatttctgatatgttcttgattataaacagatggacagattcaatttca

SEQ ID NO: 229925 - DNA, 120 bp, Artificial Sequence
  ENSG00000119185_34 (sequence is synthesized)
agacagtgtgactaccattcctgttggagtattatagaaatacaagacactaaactgagtaaacattctcctgggctagaagggaaggcagtggtacactcagtaggaaacagcaagtga

SEQ ID NO: 229926 - DNA, 120 bp, Artificial Sequence
  ENSG00000119185_35 (sequence is synthesized)
tgtgttaatacagcatggtctgcgccacagaattctactgtgtacagttgctttctgtgtgactcaggaagttcaagaaggcaaattccaaaacacctaaagcatataaactaatttaaa

SEQ ID NO: 229927 - DNA, 120 bp, Artificial Sequence
  ENSG00000119185_36 (sequence is synthesized)
agaactgttttgcaatccatcatccttagtttttaaccaaattcaggaaatgcagttttatataacctggaacagaatgaactgtagttaccctacgttgtcataaaccatcagtagttt

SEQ ID NO: 229928 - DNA, 120 bp, Artificial Sequence
  ENSG00000119185_37 (sequence is synthesized)
tgttaagtatgattgttcacaacaggttatacatacatgcagaatataatgatagctgcaacctcacaaattagggctagaaagtacaatgctaatgtgtaaatttccaagttgcttttt

SEQ ID NO: 229929 - DNA, 120 bp, Artificial Sequence
  ENSG00000119185_38 (sequence is synthesized)
aaacactgggtggatttcaaaggaatgtgtgtctttaaaggtgaactgatggcattttatcgagaaagttcagagctgggctatggacttctgaagcagcagttcactggccgcctaaaa

SEQ ID NO: 229930 - DNA, 120 bp, Artificial Sequence
  ENSG00000119185_39 (sequence is synthesized)
taataattgtgataaaggtcaccaactccagaactgggccaaggaatgcaggaagaatttattcattaatgcaaacatttttaggtttagctaattccgtagaggcaggatcttgattat

SEQ ID NO: 229931 - DNA, 120 bp, Artificial Sequence
  ENSG00000119185_40 (sequence is synthesized)
gtataatagttaaaataacttttcagttcacctgttgggaaattcagtttttcctaataaatgcatagcaatgtttcatgaaaaccacaaattataaaaacaattactgatatgtaaaaa

SEQ ID NO: 229932 - DNA, 120 bp, Artificial Sequence
  ENSG00000119185_41 (sequence is synthesized)
aaatatagaagtaaattggatgatgaggctgattaaaaagcttgggctcagtggtcagacttgggcaagtggcctaatgtcgtcccctagtaagtggacttagagtggggtctccaaata

SEQ ID NO: 229933 - DNA, 120 bp, Artificial Sequence
  ENSG00000119185_42 (sequence is synthesized)
aaaataaaaataacctttttgtaaatggggggaaatgtttcttctgcctctgggagagagactcttgcctggctaatgtgtaccccacattctttaaagggtttgggcttgcgatggcca

SEQ ID NO: 229934 - DNA, 120 bp, Artificial Sequence
  ENSG00000119185_43 (sequence is synthesized)
aaggctgaagaaatacaatccattatatatggaatatcttggcctggggatagtgaatgaatattaggccggaggtcagccggctggcaagacagtgcaggtttgtgaaatatttgttag

SEQ ID NO: 229935 - DNA, 120 bp, Artificial Sequence
  ENSG00000119185_44 (sequence is synthesized)
ggccagtggcagcactcgcttgtgccgggatttaaaaggtaaacaaagcagctgaggaaaaatgtatcctccaggggccgaaggcttcttccatttccgaacgttgttgccctcctagac

SEQ ID NO: 229936 - DNA, 120 bp, Artificial Sequence
  ENSG00000119185_45 (sequence is synthesized)
tgcgtgatcagcctttgcaggctgcagtcgctgtttgctttcctctgaaggagggcagaaagggcccacgtgcagggaagctcatagtatgggttccactgacccaggcaggcatgtgtg

SEQ ID NO: 229937 - DNA, 120 bp, Artificial Sequence
  ENSG00000119185_46 (sequence is synthesized)
gtcggcttgcttaggagaggtcttaagagggtcaggtgtgtgcctctgctagccaaattaagttcacgaagagacagatgaatgttgctcttactctatctttcatgtaatgtaggaaca

SEQ ID NO: 229938 - DNA, 120 bp, Artificial Sequence
  ENSG00000119185_47 (sequence is synthesized)
agccggcgctggagcgggaacgggagtagctgcctgggcgccaaaggccgcggcactcccacgcggaccccgaagtccgcaacccggggatgggcccgcggctgcgaggtgcgtagtttc

SEQ ID NO: 229939 - DNA, 120 bp, Artificial Sequence
  ENSG00000119185_48 (sequence is synthesized)
gctcactcctcgggtccactgggtgccgctccgcttgctctcgactgaagtccccgcatcaccaccgcacatgtgcgtgagcgctgagctgcatgggaacacaggcgctgttcctccctt

SEQ ID NO: 229940 - DNA, 120 bp, Artificial Sequence
  ENSG00000119185_49 (sequence is synthesized)
ataccatgcgtcataaaggtaatcattatgtagtaaccttttctttactgtttgttttgaagggaaggttaatatatttattcctattattgagacctttgtatactatatttagtatac

SEQ ID NO: 229941 - DNA, 120 bp, Artificial Sequence
  ENSG00000119185_50 (sequence is synthesized)
catgagtcactgaggaaaaggttagtgaaattttaagttcttccccattacataaaaatattgtgtattataaaatttgtaattagtggttatgttctaatgacagtctggtttttattt

SEQ ID NO: 229942 - DNA, 120 bp, Artificial Sequence
  ENSG00000119203_0 (sequence is synthesized)
ggaagttgtgctcttggtgaatggggttcttccttttttatttaccggtggctgtgcttccaatttaggaagaccccggcgacctgttcctcacccccgcttcgccctcacactttcggg

SEQ ID NO: 229943 - DNA, 120 bp, Artificial Sequence
  ENSG00000119203_1 (sequence is synthesized)
atgtctgcgattcctgctgaggagagcgaccagctgctgatccgaccccttggagctgggcaagaagtaggaagatcatgtattattctcgagttcaaaggaagaaaaataatgctcgac

SEQ ID NO: 229944 - DNA, 120 bp, Artificial Sequence
  ENSG00000119203_2 (sequence is synthesized)
tgtgggatccaccctggcctagaaggaatggatgctcttccttatattgatttaattgacccagctgagattgatctcctattaattagtcatttccatttggatcactgtggagctctg

SEQ ID NO: 229945 - DNA, 120 bp, Artificial Sequence
  ENSG00000119203_3 (sequence is synthesized)
ccctggtttctacagaagacaagtttcaaaggaagaacatttatgactcatgccacaaaagctatttatagatggcttctttctgattatgtcaaagttagtaacatatcagcagacgac

SEQ ID NO: 229946 - DNA, 120 bp, Artificial Sequence
  ENSG00000119203_4 (sequence is synthesized)
atgctgtataccgagacagatttggaagaaagcatggacaaaattgaaactatcaactttcatgaagttaaggaagttgcgggaatcaagttttggtgttaccatgcaggtcacgtccta

SEQ ID NO: 229947 - DNA, 120 bp, Artificial Sequence
  ENSG00000119203_5 (sequence is synthesized)
ggagccgccatgttcatgattgagatcgcaggcgtgaagcttttgtacactggtgatttctcaagacaagaagataggcacttaatggcagctgaaattcctaatattaagcctgatatt

SEQ ID NO: 229948 - DNA, 120 bp, Artificial Sequence
  ENSG00000119203_6 (sequence is synthesized)
cttatcattgaatctacttatgggacccatatccatgagaaacgtgaagagcgagaagcaagattctgtaacactgtccacgatattgtaaacagaggaggcaggggtctcattcctgtc

SEQ ID NO: 229949 - DNA, 120 bp, Artificial Sequence
  ENSG00000119203_7 (sequence is synthesized)
tttgctcttggaagggctcaggagctgctcttgattctagatgagtactggcagaatcacccagaactacatgacattccaatatactatgcatcatctttggccaagaagtgtatggca

SEQ ID NO: 229950 - DNA, 120 bp, Artificial Sequence
  ENSG00000119203_8 (sequence is synthesized)
gtgtaccagacatatgtaaatgccatgaatgacaaaatccgcaaacagatcaacatcaataatccctttgttttcaaacacattagtaacctcaagagcatggatcattttgatgacatt

SEQ ID NO: 229951 - DNA, 120 bp, Artificial Sequence
  ENSG00000119203_9 (sequence is synthesized)
atagcgggatactgtgtagaagggacacttgccaagcacatcatgtctgaacctgaagaaatcactactatgtctggacagaagttaccactgaaaatgtctgttgattacatttctttc

SEQ ID NO: 229952 - DNA, 120 bp, Artificial Sequence
  ENSG00000119203_10 (sequence is synthesized)
tcagctcacacggattaccagcaaaccagtgaatttattcgtgctttgaaaccgcctcatgtgattttagtccatggagaacagaatgaaatggccagattgaaagcagcactgattcga

SEQ ID NO: 229953 - DNA, 120 bp, Artificial Sequence
  ENSG00000119203_11 (sequence is synthesized)
gaatatgaagataacgatgaagttcacatagaggttcataatcctcggaatacagaagcagtgaccttaaacttcagaggagaaaaactagccaaggttatgggatttttagcagacaaa

SEQ ID NO: 229954 - DNA, 120 bp, Artificial Sequence
  ENSG00000119203_12 (sequence is synthesized)
aaaccagaacaaggccagcgggtctcaggaatacttgttaaaagaaactttaattatcacatactttctccttgcgacctgtccaattatactgacctggccatgagcacggtgaagcag

SEQ ID NO: 229955 - DNA, 120 bp, Artificial Sequence
  ENSG00000119203_13 (sequence is synthesized)
acccaagccattccatatactggtccctttaatttgctctgttaccagctgcagaaattgacaggtgatgtggaagaattagaaattcaagaaaaacctgctctgaaagtgttcaaaaat

SEQ ID NO: 229956 - DNA, 120 bp, Artificial Sequence
  ENSG00000119203_14 (sequence is synthesized)
attactgtaatacaagaaccaggcatggtggtattagaatggctggcaaacccttctaatgatatgtatgcagatacagtaacaactgtgatattggaagttcagtcaaatcccaaaata

SEQ ID NO: 229957 - DNA, 120 bp, Artificial Sequence
  ENSG00000119203_15 (sequence is synthesized)
agaaaaggtgcagtacagaaggtttctaaaaaattagaaatgcacgtttacagcaagaggttggagatcatgctccaggacatatttggagaagactgtgtaagtgtaaaggatgactct

SEQ ID NO: 229958 - DNA, 120 bp, Artificial Sequence
  ENSG00000119203_16 (sequence is synthesized)
attcttagcgtcacagtggacgggaaaactgccaaccttaacttggagacacggactgtagaatgtgaagagggaagtgaagacgatgaatccctccgagaaatggtggagctggctgca

SEQ ID NO: 229959 - DNA, 120 bp, Artificial Sequence
  ENSG00000119203_17 (sequence is synthesized)
cagagactgtacgaggccctgacgccagttcactgagactgtgcctgtatatgaactttgaaaaaatacttgactctacttttgttacctaaaataaaatgcattcgtttctctggggga

SEQ ID NO: 229960 - DNA, 120 bp, Artificial Sequence
  ENSG00000119203_18 (sequence is synthesized)
ttagccttttgttattctttaaaaagaaagaatgctttgtcagctgctggtagctaacatacttttcccattctgttttctctcttagagcatggatcattttgatgacattggtcccag

SEQ ID NO: 229961 - DNA, 120 bp, Artificial Sequence
  ENSG00000119203_19 (sequence is synthesized)
cggaggcctgcttctctgttaggaaagagaggggctggaaccgttccctgccagctctgcactcacctgtgacctgctagggacatatttggagaagactgtgtaagtgtaaaggatgac

SEQ ID NO: 229962 - DNA, 120 bp, Artificial Sequence
  ENSG00000119203_20 (sequence is synthesized)
ggagactggcctcctccgtcgcccgcgctcccacctaccccggcagcctgcctttggtccgcgcttgcgggccaggcttctcaggctcgaggggttggaggaccgttgatcggaaggggc

SEQ ID NO: 229963 - DNA, 120 bp, Artificial Sequence
  ENSG00000119203_21 (sequence is synthesized)
ctgctatagagtgaacgggattttgctttttcatcagtttcaggggagggtatgttggagtcggaaaaaaaaaagttttacggggccaccgctcgctttcgtacacgctaagaagcgttt

SEQ ID NO: 229964 - DNA, 120 bp, Artificial Sequence
  ENSG00000119203_22 (sequence is synthesized)
tcacttagcacaagcacggatctctgcgcgtcagggcaagctgtgagggagccggtgaagcttatgaccgacaggatgagaggaggacctgaatgaggctacagccgtgcagggaagaat

SEQ ID NO: 229965 - DNA, 120 bp, Artificial Sequence
  ENSG00000119203_23 (sequence is synthesized)
taagtctgtttcttaacaccagggcttcacatgtgccagaagttagaaaatattagggacttgccgtgagtttcgatcttctcagctcaggccctagtagaataaggaaggtgtaaagct

SEQ ID NO: 229966 - DNA, 120 bp, Artificial Sequence
  ENSG00000119203_24 (sequence is synthesized)
ggagaagagaaagtgcagaggtgttagggacaaaaactcagccctcgactgtccataaggagagtggcctttcagtggacacgatcctcatcagtcgggaatgctgctgaaggggagatg

SEQ ID NO: 229967 - DNA, 120 bp, Artificial Sequence
  ENSG00000119203_25 (sequence is synthesized)
caaatgtagagaacttgaattcctacagatgagcatttcgaacccacaacatgtttattgttagatactagttggcacaacatgaatatacgctttccaaaaggtagaaagtatctcctt

SEQ ID NO: 229968 - DNA, 120 bp, Artificial Sequence
  ENSG00000119203_26 (sequence is synthesized)
tacacaatcattcagtaaggcttcattgagcacctgcttgggacatagtccgtttccttctgcttagttcacacctgtcatgtcttcctgtgatgagcaaacactgagcaagtgtcaagc

SEQ ID NO: 229969 - DNA, 120 bp, Artificial Sequence
  ENSG00000119203_27 (sequence is synthesized)
accacacatggggatatagacgcaacagagggcccagttaattgctctcgctcttttggagagaattacagtgcacagtgggaaatattggagagatactttggaataataggagactat

SEQ ID NO: 229970 - DNA, 120 bp, Artificial Sequence
  ENSG00000119203_28 (sequence is synthesized)
tactttgaagtcagacctgaagtccattatctacttgaccaattagtaggacaacaatctcactgaacccgttttctcatatggaaataagataaaacttgaagagtgaacatcgcgtgg

SEQ ID NO: 229971 - DNA, 80 bp, Artificial Sequence
  ENSG00000119227_0 (sequence is synthesized)
cctgcggtcccgccgcctccggggcctcctgggaccctggccctcgccgggcaggacgccgccagcgctgaaggcgcagc

SEQ ID NO: 229972 - DNA, 120 bp, Artificial Sequence
  ENSG00000119227_1 (sequence is synthesized)
tgaaggcgcagcccggaggccgcgcggatgcagatctgtggatccagcgtagcatctgtagcagctgggacatcattccaggttttgggcccggtgtgttggcaacaactggatctgaag

SEQ ID NO: 229973 - DNA, 120 bp, Artificial Sequence
  ENSG00000119227_2 (sequence is synthesized)
atggcagtcagggtgctttggggtggtctcagcctgctccgagtgctgtggtgtctccttccgcagacgggctatgtgcacccagatgagttcttccagtcccctgaggtgatggcagag

SEQ ID NO: 229974 - DNA, 120 bp, Artificial Sequence
  ENSG00000119227_3 (sequence is synthesized)
gacatcctgggcgttcaggccgcgcggccctgggagttttaccccagcagctcctgccgctcggtgctcttccccctgctgatctctggttccaccttctggctgctcaggctctgggag

SEQ ID NO: 229975 - DNA, 120 bp, Artificial Sequence
  ENSG00000119227_4 (sequence is synthesized)
gagctggggccgtggcctggcctggtgagcggctatgcgctgctggtggggcctcgactcctcctcactgccctttcctttgctctggacggggccgtgtaccacctggccccgccgatg

SEQ ID NO: 229976 - DNA, 120 bp, Artificial Sequence
  ENSG00000119227_5 (sequence is synthesized)
ggggcggatcgctggaacgccctggccctgctgtctggttcctacgtcaccctggtcttctacacaaggaccttctccaacaccattgagggactcctcttcacgtggctgctggtgctg

SEQ ID NO: 229977 - DNA, 120 bp, Artificial Sequence
  ENSG00000119227_6 (sequence is synthesized)
gtatcctcccatgtaacgtggggccctacacgcaaggagccggcgccgggtccacggtggcgcagctggcttcttggaggcattgtggctgctggcttcttcaaccggcccacctttctg

SEQ ID NO: 229978 - DNA, 120 bp, Artificial Sequence
  ENSG00000119227_7 (sequence is synthesized)
gcctttgctgtggtccccctctacctctggggcactcgtggagccacaaaccctggtttgaagtctctgacccgggaggccctggtgctgctccctggggcagccctcacagcagcggtg

SEQ ID NO: 229979 - DNA, 120 bp, Artificial Sequence
  ENSG00000119227_8 (sequence is synthesized)
tttgtggccacggacagctggtatttctccagccccgctacatccaggaaccttgtcctgacacctgtcaacttcttgcactacaacctgaatccccaaaacctggcgagacatggcacg

SEQ ID NO: 229980 - DNA, 120 bp, Artificial Sequence
  ENSG00000119227_9 (sequence is synthesized)
cacgcgcggctcactcacctggcagtcaacggcttcctgctcttcggggtgctgcatgcccaggccctgcaggctgcgtggcaacggctgcaagtcggcctccaggcctctgcacaaatg

SEQ ID NO: 229981 - DNA, 120 bp, Artificial Sequence
  ENSG00000119227_10 (sequence is synthesized)
ggcctcctgagggcactgggtgcccggagcctgctgtccagccccaggtcctatctccttctcctctacttcatgcctctggccctgctatctgcctttagccaccaggaggctcggttc

SEQ ID NO: 229982 - DNA, 120 bp, Artificial Sequence
  ENSG00000119227_11 (sequence is synthesized)
cagcctgtgccttggaagggcactgtggtcctcttcaacgccctcggtgccctcctcttcggctgcctgcatcaggggggcctggtgcctggcctggagtacctggagcaggtggtccat

SEQ ID NO: 229983 - DNA, 120 bp, Artificial Sequence
  ENSG00000119227_12 (sequence is synthesized)
gcccctgtgctcccaagcacacccacccactacacactcctcttcactcacacctacatgcccccccggcacctcctacacctcccaggcctgggggcaccagtggaggtggtggacatg

SEQ ID NO: 229984 - DNA, 120 bp, Artificial Sequence
  ENSG00000119227_13 (sequence is synthesized)
ggggggactgaggactgggccctgtgccaaaccctgaaaagcttcaccagacaaccagcctgccaagtggctggtgggccatggctctgccgcctctttgtggtaacccctggcaccacc

SEQ ID NO: 229985 - DNA, 120 bp, Artificial Sequence
  ENSG00000119227_14 (sequence is synthesized)
aggcgtgccgtggagaagtgcagcttccccttcaagaatgaaacacttttatttccccatctgaccctggaggatccaccagccctgtcctccttgctgagtggggcttggagggaccac

SEQ ID NO: 229986 - DNA, 120 bp, Artificial Sequence
  ENSG00000119227_15 (sequence is synthesized)
ctcagtcttcacattgtggagctgggggaagaaacctgacaatatgacagagcacccactgcccaagactcagccatagaagatgccgccccaccttctacttgggtagctgggctggga

SEQ ID NO: 229987 - DNA, 120 bp, Artificial Sequence
  ENSG00000119227_16 (sequence is synthesized)
cgctgggacaggaccccgtcctccttcatgactcccactgctgcctctcctgggcatggctgttagctgttctgccttctgggtgagctggcactcttctccctgagaccaaagatttga

SEQ ID NO: 229988 - DNA, 120 bp, Artificial Sequence
  ENSG00000119227_17 (sequence is synthesized)
cctgtcggtcttgatgtcaaggtccccaaagaccaggttaagtgacgacacctgtctgttcctgccctgttgcttccagccactgtgatgtttgaaatatgtgatagtacctggttgtga

SEQ ID NO: 229989 - DNA, 120 bp, Artificial Sequence
  ENSG00000119227_18 (sequence is synthesized)
aaaaagacaatgaactgctagtgacattcctcaatgacctctcccaaacctcccatgatgccttacccttgctgtcatgacaaccctctggcttcctaagacccatctgcctatcgaaat

SEQ ID NO: 229990 - DNA, 120 bp, Artificial Sequence
  ENSG00000119227_19 (sequence is synthesized)
atgtgcaagtcagtgagacgaagtatagagaacaggtggcccagatccaggggacccaacttctggccccttggtctgtcacctcctcgctgtgtgatcttgagaaagctccttccactc

SEQ ID NO: 229991 - DNA, 120 bp, Artificial Sequence
  ENSG00000119227_20 (sequence is synthesized)
acccaccccacttcccagtctgttgggatcagaggaactttgaggtgtctgccggctaacattgtgtcattcctggagtccacagtacacgtcccctgcctcaacaggcacagctctcac

SEQ ID NO: 229992 - DNA, 120 bp, Artificial Sequence
  ENSG00000119227_21 (sequence is synthesized)
aaagctcttcaagcatggaagtgggagttgtgttgtacttcatggcactctgatgcctgctgtctcagtgtttggttattatgcaaacaagtaatgtttgaaatatataatagcactgga

SEQ ID NO: 229993 - DNA, 120 bp, Artificial Sequence
  ENSG00000119227_22 (sequence is synthesized)
cagggtgctttggggtggtctcagcctgctccgagtgctgtggtgtctccttccgcagacgggctatgtgcacccagatgagttcttccagtcccctgaggtgatggcaggctctgggag

SEQ ID NO: 229994 - DNA, 120 bp, Artificial Sequence
  ENSG00000119227_23 (sequence is synthesized)
tgcttgagaagctgacgggagactttgtggggagggagtagcatgtctgggtagatgagtagtaaatccacaagcagagcagcagcctctctctctggggtaagaacttggaagtgggga

SEQ ID NO: 229995 - DNA, 120 bp, Artificial Sequence
  ENSG00000119227_24 (sequence is synthesized)
cttcatatctccttcccgagtggtgacactgaccttctgggtaatgctaataaaccaccagtctctttgatgtatccctgcttggaccaacaatacaggtcattcagaatgagagctgtg

SEQ ID NO: 229996 - DNA, 120 bp, Artificial Sequence
  ENSG00000119231_0 (sequence is synthesized)
agaggaagctcggcggctgtggccgcggcgaacaggccggacgcctcgtcgctggcggggcttcccttggagctgacgaaggcggggtccgcggtccaggctgctgccgcgacggggccg

SEQ ID NO: 229997 - DNA, 120 bp, Artificial Sequence
  ENSG00000119231_1 (sequence is synthesized)
gcggcggggcagctgccaggaacgagggtagcagctgcatccagatctcattatgcatcagaaaaatgaaaaaacagaggaaaattctatggaggaaaggaatccacttagccttttctg

SEQ ID NO: 229998 - DNA, 120 bp, Artificial Sequence
  ENSG00000119231_2 (sequence is synthesized)
agaaatggaatactgggtttggaggctttaagaagttttattttcaccaacacttgtgcattctgaaagctaagctgggaaggccagttacttggaatagacagttgagacatttccagg

SEQ ID NO: 229999 - DNA, 120 bp, Artificial Sequence
  ENSG00000119231_3 (sequence is synthesized)
gtagaaagaaagctcttcaaatccagaaaacgtggatcaaggatgaacccctttgtgctaagaccaagttcaatgtggctactcaaaatgttagtactttgtcctctaaagtgaaaagaa

SEQ ID NO: 230000 - DNA, 120 bp, Artificial Sequence
  ENSG00000119231_4 (sequence is synthesized)
aggacgctaaacacttcatttcctcctcaaagactctcctgagactccaagcagagaagctgttgtcatcagcaaagaattctgaccatgaatactgcagagagaaaaatctcttgaagg

SEQ ID NO: 230001 - DNA, 120 bp, Artificial Sequence
  ENSG00000119231_5 (sequence is synthesized)
cagttactgactttccatcaaatagtgctttaggtcaggccaatggtcacagacctaggacagacccacaaccttctgactttcccatgaagttcaatggggagagccaaagtccaggtg

SEQ ID NO: 230002 - DNA, 120 bp, Artificial Sequence
  ENSG00000119231_6 (sequence is synthesized)
agagtggcacgattgtggtcaccttgaacaaccataagagaaagggcttttgttacggctgctgccaagggccggagcaccacaggaatgggggacccttgattccaaaaaagttccaac

SEQ ID NO: 230003 - DNA, 120 bp, Artificial Sequence
  ENSG00000119231_7 (sequence is synthesized)
ttaaccaacatagaaggataaaattatctcctcttatgatgtatgagaaattatccatgattagatttcggtacaggattctcagatcccagcacttcagaaccaaaagcaaggtttgca

SEQ ID NO: 230004 - DNA, 120 bp, Artificial Sequence
  ENSG00000119231_8 (sequence is synthesized)
agctaagaaaagcccagcgaagctgggtacagaaagtcactggggaccatcaagagacccgtagggagaacggtgagggtggcagttgcagcccatttccttccccagaacctaaagacc

SEQ ID NO: 230005 - DNA, 120 bp, Artificial Sequence
  ENSG00000119231_9 (sequence is synthesized)
cttcttgtcggcatcagccgtactttccagatatggacagcagtgctgtggtgaaggggacgaactctcatgtgcctgattgccacactaaaggaagctctttcttgggcaaggagctta

SEQ ID NO: 230006 - DNA, 120 bp, Artificial Sequence
  ENSG00000119231_10 (sequence is synthesized)
gtttagacgaagcattccctgaccaacagaatggcagtgccacaaacgcctgggaccagtcatcctgttcttctcctaagtgggagtgtacagagctgattcatgacatccccttaccag

SEQ ID NO: 230007 - DNA, 120 bp, Artificial Sequence
  ENSG00000119231_11 (sequence is synthesized)
aacatcgttctaataccatgttcatttcagaaactgaaagagaaattatgactctgggtcaggaaaatcagacaagttctgtcagtgatgacagagtaaaactgtcagtgtctggagcag

SEQ ID NO: 230008 - DNA, 120 bp, Artificial Sequence
  ENSG00000119231_12 (sequence is synthesized)
atacatctgtgagtagcgtagatgggcctgtgtcccaaaaggctgttcaaaatgagaactcataccagatggaggaggatggatctctcaagcagagcattcttagttctgagttgctgg

SEQ ID NO: 230009 - DNA, 120 bp, Artificial Sequence
  ENSG00000119231_13 (sequence is synthesized)
accacccttactgtaaaagtccactggaggctcccttggtgtgcagtggactcaaactagaaaatcaagtaggaggtggaaagaacagtcagaaagcctctccagtggatgatgaacagc

SEQ ID NO: 230010 - DNA, 120 bp, Artificial Sequence
  ENSG00000119231_14 (sequence is synthesized)
tgtcagtctgtctttctggattcctagatgaggttatgaagaagtatggcagtttggttccactcagtgaaaaagaagtccttggaagattaaaagatgtctttaatgaagacttttcta

SEQ ID NO: 230011 - DNA, 120 bp, Artificial Sequence
  ENSG00000119231_15 (sequence is synthesized)
atagaaaaccatttatcaatagggaaataacaaactatcgggccagacatcaaaaatgtaacttccgtatcttctataataaacacatgctggatatggacgacctggcgactctggatg

SEQ ID NO: 230012 - DNA, 120 bp, Artificial Sequence
  ENSG00000119231_16 (sequence is synthesized)
gtcagaactggctgaatgaccaggtcattaatatgtatggtgagctgataatggatgcagtcccagacaaagttcacttcttcaacagcttttttcatagacagctggtaaccaaaggat

SEQ ID NO: 230013 - DNA, 120 bp, Artificial Sequence
  ENSG00000119231_17 (sequence is synthesized)
ataatggagtaaaaagatggactaaaaaggtggatttgtttaaaaagagtcttctgttgattcctattcacctggaagtccactggtctctcattactgtgacactctctaatcgaatta

SEQ ID NO: 230014 - DNA, 120 bp, Artificial Sequence
  ENSG00000119231_18 (sequence is synthesized)
tttcattttatgattcccaaggcattcattttaagttttgtgtagagaatataagaaagtatttgctgactgaagccagagaaaaaaatagacctgaatttcttcagggttggcagactg

SEQ ID NO: 230015 - DNA, 120 bp, Artificial Sequence
  ENSG00000119231_19 (sequence is synthesized)
ctgttacgaagtgtattccacaacagaaaaacgacagtgactgtggagtctttgtgctccagtactgcaagtgcctcgccttagagcagcctttccagttttcacaagaagacatgcccc

SEQ ID NO: 230016 - DNA, 120 bp, Artificial Sequence
  ENSG00000119231_20 (sequence is synthesized)
gagtgcggaagaggatttacaaggagctatgtgagtgccggctcatggactgaaactcagcagggactctgggaagtctgaccaagttggagcagatggtttgttacttgaatctccaaa

SEQ ID NO: 230017 - DNA, 120 bp, Artificial Sequence
  ENSG00000119231_21 (sequence is synthesized)
cacttagttgaatttttacagatatttcagatcagtggtgttgggccactattgttacctcaaatttattttttgcccttattcatttctccagctaccatgtactattgtttaatgttc

SEQ ID NO: 230018 - DNA, 120 bp, Artificial Sequence
  ENSG00000119231_22 (sequence is synthesized)
agtttggtttcatttttaattttatggttctgtgcgtcccccatatttaatatttattattcaaacgcatgcatatagacagagcatgcagtgaagagtattaaaaaaaaaagcttagta

SEQ ID NO: 230019 - DNA, 120 bp, Artificial Sequence
  ENSG00000119231_23 (sequence is synthesized)
gatttggtgcagcttttgaaacttagttagacgtgaactgaatacaggtttcaaatttactcccagaacctaaaaatgcaagatgtttttgatacaacataactctgagaatagtaagtg

SEQ ID NO: 230020 - DNA, 120 bp, Artificial Sequence
  ENSG00000119231_24 (sequence is synthesized)
ttccctggggcattaagggtagctgggggtggttttgacaaatccagtcctgttttactttaccagcggcaactttcaccaacttccctctccaagtgagtcttagagagtgcagtccat

SEQ ID NO: 230021 - DNA, 120 bp, Artificial Sequence
  ENSG00000119231_25 (sequence is synthesized)
tccttttgaagggtgagatggaagtggtcgtaaactgactggtgtcttctgtttctggaggcacacttgtaagcacagtggctgctttgggaggagtaaggtgtgagaaaaagcaacctt

SEQ ID NO: 230022 - DNA, 120 bp, Artificial Sequence
  ENSG00000119231_26 (sequence is synthesized)
gccagtaacaatgacagatttcaatcgtggttttaggaattataatacgtggcatacatctcataaaggcttttgctgggatattgaattccctgaatttttctgttttcgacctgttaa

SEQ ID NO: 230023 - DNA, 120 bp, Artificial Sequence
  ENSG00000119231_27 (sequence is synthesized)
aaaaatcttaacatccatcaaactagtggtcaaacaaatgagaatgcagctgttctcagagtaatttttaagttgtcatttccctgtgttgcctcccaattggaagaagttaaggtttac

SEQ ID NO: 230024 - DNA, 120 bp, Artificial Sequence
  ENSG00000119231_28 (sequence is synthesized)
caaatgcatttctatttcaagggtatctgaaacgtaaacattcaaaactgaaggctgactgacttgagatgttttgcaggtggctggagagaagagggaaggtaatagagacaacttagt

SEQ ID NO: 230025 - DNA, 120 bp, Artificial Sequence
  ENSG00000119231_29 (sequence is synthesized)
cccatgggagcgcagcaaccgtgtcaggttctttctcctgtcccattagtgacctcagtaacatgcagggtacgtctggcttctgcatggccagtgctgacactagcacagctgttcttc

SEQ ID NO: 230026 - DNA, 120 bp, Artificial Sequence
  ENSG00000119231_30 (sequence is synthesized)
tccttctgttgaacctcatcttctgaagaaaggccaagtggcccttgtccatacacttagctgcattaggatgaatatcacgcgtctcacatctttaatccagcctttcgtgacatgttg

SEQ ID NO: 230027 - DNA, 120 bp, Artificial Sequence
  ENSG00000119231_31 (sequence is synthesized)
gaaagatacatgtgaaacctacccagttaccctttctgaattgggaggaaaaccaaccaatgtatgtatgagaaactcagaagtctgaatagaaaaacaaagtaaatggcagaagattct

SEQ ID NO: 230028 - DNA, 120 bp, Artificial Sequence
  ENSG00000119231_32 (sequence is synthesized)
cgagtttatgcccgcgtaggtttggagtgttgaaaaagctaaaatgtttagtttcacttggccctgaggtatggttgagaaggctgactgccagcagttgaggattgagtccgaccatgt

SEQ ID NO: 230029 - DNA, 120 bp, Artificial Sequence
  ENSG00000119231_33 (sequence is synthesized)
ttacatgcagggttcccaacaccagtggtgacactgggaagcagccccagcactttcctctcctgagtcctccagacccaaaatccttaatgtcaaaccaggtcagtgtttcttactgtg

SEQ ID NO: 230030 - DNA, 120 bp, Artificial Sequence
  ENSG00000119231_34 (sequence is synthesized)
tttcaagtcgttaaaaagactgagagtagaggcactttatgctgctataggtggggttctgtcagcgttaggaaaaaatgacagtttagggtaaggaagatctcataatgagtttttcaa

SEQ ID NO: 230031 - DNA, 87 bp, Artificial Sequence
  ENSG00000119231_35 (sequence is synthesized)
acagtttagggtaaggaagatctcataatgagtttttcaaacataattatgcaaacatgagatttttcaaaacatgccagaaatttg

SEQ ID NO: 230032 - DNA, 120 bp, Artificial Sequence
  ENSG00000119231_36 (sequence is synthesized)
tgtcagttcaaaatgtcttgtacttcagagtgaggaagtgtttcagttcctcagtgacagaacctggcatgcagaagagacagaattgttcctgtaagaaaatcaacgccgagagagagc

SEQ ID NO: 230033 - DNA, 120 bp, Artificial Sequence
  ENSG00000119231_37 (sequence is synthesized)
tgcccaaatccagtgactcttccacttccagtctcatgcttcatagggcaccttgaggtgtgctgcccagtgtggcttagactaaatgttgagtttgggttttttgtttttttttttttt

SEQ ID NO: 230034 - DNA, 90 bp, Artificial Sequence
  ENSG00000119231_38 (sequence is synthesized)
actaaatgttgagtttgggttttttgtttttttttttttttgagtcagagtctcactgtcccctcactgcaacctccacctcccaggttc

SEQ ID NO: 230035 - DNA, 120 bp, Artificial Sequence
  ENSG00000119231_39 (sequence is synthesized)
attacaggcgggagccaccgtgcctggccaatgttaagtattttaaaagtcattttaaaatatttgtcattgatgaaacttggtttcagcacacgtaattgctttccctctcttcttgtg

SEQ ID NO: 230036 - DNA, 120 bp, Artificial Sequence
  ENSG00000119231_40 (sequence is synthesized)
tctcttcttgtgattaggtgtaaacctctatttaactcaagtcctagattagaatgtcctttgtcctgatgtttgcagtaattgcttccttggttaataaagatatttttgaaatatact

SEQ ID NO: 230037 - DNA, 120 bp, Artificial Sequence
  ENSG00000119231_41 (sequence is synthesized)
ctggactgttggtgaaagaggcaggcatggctttactggtactagtttggcactgaactgtttgggtgcccatgaggtaggcagaccttatgctttttttttttgagacggagtcttgct

SEQ ID NO: 230038 - DNA, 120 bp, Artificial Sequence
  ENSG00000119231_42 (sequence is synthesized)
tacaggcatgagctaccgtgcctggcctaaaccttacgcttttgaggttgagtgcaggccttgtgataactaagcgctacttttgacgagccttcaacaagctgcccagtcctctcctca

SEQ ID NO: 230039 - DNA, 120 bp, Artificial Sequence
  ENSG00000119231_43 (sequence is synthesized)
gcagacgcatcaggttgtagttgcatctttacagtggtctttccttttattaaatctatagcagtgaatatagatttgattcaacttttagttacgttctctcaagaatcctaatcaact

SEQ ID NO: 230040 - DNA, 120 bp, Artificial Sequence
  ENSG00000119231_44 (sequence is synthesized)
ttcagttagcctcttaagaaagggaaaaaaaggtgctgccagtcatccccaaattatgtttttggctgtgcattctattttctacatagcactgaatctgagtaacagtcatcctggatt

SEQ ID NO: 230041 - DNA, 120 bp, Artificial Sequence
  ENSG00000119231_45 (sequence is synthesized)
tatagttggaacagaacagtaacagacctaactgggactcagccagcactagcctcatcttagctgccccttttctctgctttgcagtttactgcttccctgggctagccataacggggt

SEQ ID NO: 230042 - DNA, 120 bp, Artificial Sequence
  ENSG00000119231_46 (sequence is synthesized)
tctgggcaggtcagactcttcagcaagacagtgtattaatagtgtgaattagatacactgatgacctgctctgcctagttaagaaactgaattaatcagcagttacaaagcacatacttt

SEQ ID NO: 230043 - DNA, 120 bp, Artificial Sequence
  ENSG00000119231_47 (sequence is synthesized)
gttacgtgctaggctttgcctcctggcctctagataattaagacggcccagggaataccagcagagaagtgctaattgtatttgggtgttacaaaagcagacctagacgagctgttcact

SEQ ID NO: 230044 - DNA, 120 bp, Artificial Sequence
  ENSG00000119231_48 (sequence is synthesized)
taactggtacctgttggtcagaaaaagaatttatttagagattatgatcatgtaaaattacagtactcaacccttctagcaaagtatttttttgaaaaataaactaaatgcctttataaa

SEQ ID NO: 230045 - DNA, 85 bp, Artificial Sequence
  ENSG00000119231_49 (sequence is synthesized)
tcaagcgattctcctgcttcagcctcctgtgcagctgggattacagtcacctgccaccgtacccggctaattcttgtatttttaa

SEQ ID NO: 230046 - DNA, 120 bp, Artificial Sequence
  ENSG00000119231_50 (sequence is synthesized)
ccttcacgatttctttcaaagaataggacagggtcgtgtgatgtgagatcagaagtgaagactgctcagcggagttgtcgccatcctagcatccagaggctgggcctttgttctcccagg

SEQ ID NO: 230047 - DNA, 120 bp, Artificial Sequence
  ENSG00000119231_51 (sequence is synthesized)
cacagttccattttgactccactgtcaatgaattgatagcagagctcagtatccaaatgcatgttttaaaacaggtttttacatttgatttcccatttctcatatttaggtaaaacattg

SEQ ID NO: 230048 - DNA, 120 bp, Artificial Sequence
  ENSG00000119231_52 (sequence is synthesized)
tcctataaattggggttgccacctgatagctctttttatgtggccaggtgcctccataaaattagatgcttgagatatcagatataccagctgtcctggagagagaaaagtttcctatct

SEQ ID NO: 230049 - DNA, 120 bp, Artificial Sequence
  ENSG00000119242_0 (sequence is synthesized)
gtcacttctcagaagcacctaaataggaagcccatggaaacaaaagcttttcaaccctgaagcccttacattcctctggcaccacagctgcactcaacagactggcaccaggcccattcg

SEQ ID NO: 230050 - DNA, 120 bp, Artificial Sequence
  ENSG00000119242_1 (sequence is synthesized)
tgggcctccagggtgccaggcactgtgctagggcttagggtgcagcagtgaacaatctggagtctgtgcgaggaggcgggaaacagacccacacttacagaccctcacagagacacaaag

SEQ ID NO: 230051 - DNA, 120 bp, Artificial Sequence
  ENSG00000119242_2 (sequence is synthesized)
actagaactggggacagggtggtaatgcacccgagtctgggggccagggcttccgggaggaagtaaacttgtactgagacctaaaggataagtagacagtggagacccaggagaggtggg

SEQ ID NO: 230052 - DNA, 120 bp, Artificial Sequence
  ENSG00000119242_3 (sequence is synthesized)
tgggagagaggcctaagaagagtgttctgggcagaggaggagccatgagagggcaccagggtgggagaagcacagcccagcagggcacccggaggaaagctcgtgccacctggagccctg

SEQ ID NO: 230053 - DNA, 120 bp, Artificial Sequence
  ENSG00000119242_4 (sequence is synthesized)
ggggtaggagaagggccagcgagggtggcggggccagttgcagggccgggcagaccagtctgattctcagagcagtgggaaccattggaggtttttaagtagtctcaatttaaaaacaag

SEQ ID NO: 230054 - DNA, 120 bp, Artificial Sequence
  ENSG00000119242_5 (sequence is synthesized)
atcactctgctgccacgtggagagcagaatggagcaggtaggagaggacagagggaggctttctggcagggatttgggtgagggtgaggacggcctcagcagcggagacggggagagttg

SEQ ID NO: 230055 - DNA, 120 bp, Artificial Sequence
  ENSG00000119242_6 (sequence is synthesized)
aacggatctgagagctgctttcaaagcaggatgccagcaagatcatcatggactggaaatggatggcgggggatgccagcgtcaaggccacccccaggttgtgcagctggggacagtgct

SEQ ID NO: 230056 - DNA, 120 bp, Artificial Sequence
  ENSG00000119242_7 (sequence is synthesized)
tgtgaggggtaggacactaggcctagggcagctctcctgtcatccaagacccactaaattctggatcacatttaaatggttctttctctttgacagcaagccactaacatatgggctctg

SEQ ID NO: 230057 - DNA, 120 bp, Artificial Sequence
  ENSG00000119242_8 (sequence is synthesized)
cttcttccatcagccaacagaatcctggatttgagtctgtcctttgaaagcatctctgctagagttcccacttccaaacccctttcagctcttcgggattcagcctccaggtgaggtgct

SEQ ID NO: 230058 - DNA, 120 bp, Artificial Sequence
  ENSG00000119242_9 (sequence is synthesized)
ggaattgatgccagagtgaacgactccggattgctgagtggaaggaaaacgtaggcaccgctactgacagctctcaggcgctcctgggattttccttcctttgacgctgaggctgttccg

SEQ ID NO: 230059 - DNA, 120 bp, Artificial Sequence
  ENSG00000119242_10 (sequence is synthesized)
ctttcaagcgttctgctttgtgagggaagggcaaggtcagaaggtgctcaccctttccacagcaagcacgcggcacacgtgtgccacacgctgaacctgccttggttgtagctggctcct

SEQ ID NO: 230060 - DNA, 120 bp, Artificial Sequence
  ENSG00000119242_11 (sequence is synthesized)
ttgttaaggtcagcgccccccaagaccacgtgctgtgcagacagtgttgggatctcgggaactgtggggttccacttagaaactagtgtctggcccagcagcctacacaggagagtttgc

SEQ ID NO: 230061 - DNA, 120 bp, Artificial Sequence
  ENSG00000119242_12 (sequence is synthesized)
ggttacagcacagagacggtttcggggacagaaacatcctttctcactcctgccggaatgctgctcacggctccactgaggaaagccctgcttgatggaaactcaactctgccatcatct

SEQ ID NO: 230062 - DNA, 120 bp, Artificial Sequence
  ENSG00000119242_13 (sequence is synthesized)
gcagcccagtgcgacggcagtcaaaggccagggagagctatgctttgttttatagaaacatgcctagaaatggtcgccttaagttatttaacccactccctattgtcgggttttgagttt

SEQ ID NO: 230063 - DNA, 120 bp, Artificial Sequence
  ENSG00000119242_14 (sequence is synthesized)
gtttctagtcttttccaactgcaaactgcactgtagtgaccattctcacagctacctcttttcacacaaaagtaataatttccctttggtagatttctaaaaataaattgctagttcaga

SEQ ID NO: 230064 - DNA, 120 bp, Artificial Sequence
  ENSG00000119242_15 (sequence is synthesized)
gagatgaccaattccaaggcttctgatcagctctgcccaatcactgcccgtggtgaggtgccccccgagactgtacttgccgtgtcctggggccactgccctctcctgccagtttttgtc

SEQ ID NO: 230065 - DNA, 120 bp, Artificial Sequence
  ENSG00000119242_16 (sequence is synthesized)
cccaactgaaagggcctcttgtttctctttttcttggtcctttttaggatgtatcattgttcattccccttcgtgagctccgtcgtgttttatttccttctctgcgttctcaggttgccc

SEQ ID NO: 230066 - DNA, 120 bp, Artificial Sequence
  ENSG00000119242_17 (sequence is synthesized)
tcggagtggagtctgtggctttccaccggagcagcgcccaggaagtgttttcgtgtgatgaaagtgtatgtctgaagttcgttatgaactcgtcctagctccagagctagtgtgcatgca

SEQ ID NO: 230067 - DNA, 120 bp, Artificial Sequence
  ENSG00000119242_18 (sequence is synthesized)
tgtcactggtcgtacagataattgatgagcaattggtgtcgtctgaagcagtgacagcctgggtgtgtcagtgtctccaaaacggttccactgtggcatcctacaaatgggctgcgtcct

SEQ ID NO: 230068 - DNA, 120 bp, Artificial Sequence
  ENSG00000119242_19 (sequence is synthesized)
gggagccattgagaagttgtacctcctttacggagggttctctggaatagcaaattagggaaaatgcattctgaggttctgtatttacaataataatttataagcaaataactcacattt

SEQ ID NO: 230069 - DNA, 120 bp, Artificial Sequence
  ENSG00000119242_20 (sequence is synthesized)
ttctcgagttacgatgaaggtagagtctggggccctgagtgagcatcagatgctggaagctggggctgggaggggccaagcattggggacagactccagacacctgcaccaccccctggc

SEQ ID NO: 230070 - DNA, 120 bp, Artificial Sequence
  ENSG00000119242_21 (sequence is synthesized)
cccatgagatacgttctcagaccttcccaagaaggatctgtggctcctctcagtgctgtgaagtgcagggggcttccctctggaattcagcccatctctccctcctactttggctggctc

SEQ ID NO: 230071 - DNA, 120 bp, Artificial Sequence
  ENSG00000119242_22 (sequence is synthesized)
cagatgccatttagaggaaatgtttggcccatttcccaggtgccagcttttcccatgaggaagctgtcagtgcttcctggtcagggaaatcttttgggcgtgatttggtcagtcacagtc

SEQ ID NO: 230072 - DNA, 120 bp, Artificial Sequence
  ENSG00000119242_23 (sequence is synthesized)
tgttggggtgaggtggtgcgtggagaggacaggatttggaaccaagggtccctggattagaatccctgctccatacctcactggctgtgtgaccccaggctcgcgaatctgcctctcttg

SEQ ID NO: 230073 - DNA, 120 bp, Artificial Sequence
  ENSG00000119242_24 (sequence is synthesized)
atctgtttcctcatgagtaaagggaaatgactttgtactctggagtgggcctcactcattcatgtgccaggcatcgtgctaggtgctagggcacaccccaaggcgttcgggaagcagagg

SEQ ID NO: 230074 - DNA, 120 bp, Artificial Sequence
  ENSG00000119242_25 (sequence is synthesized)
ctgccgtccctggcctggggcctccctgcagtgatgggaatgtagccctggtgcccccacaccctgcccttcaggagccgtggtttccttctgctctctcctgggaggcgcacacccctc

SEQ ID NO: 230075 - DNA, 120 bp, Artificial Sequence
  ENSG00000119242_26 (sequence is synthesized)
tgcacccagagccaaggagggcaggcagccctgggaccctcttcaggcaccgcagccagggtctgtgttacccacaggtcctctggatgtcagcatggcagccacaaacctggagaacca

SEQ ID NO: 230076 - DNA, 120 bp, Artificial Sequence
  ENSG00000119242_27 (sequence is synthesized)
gctgcacagcgcacagaagaacctcctgttccttcagcgggagcatgccagcacgctcaaggggctgcactccgagatcaggcggctgcagcagcactgcacagatttaacatatgagct

SEQ ID NO: 230077 - DNA, 120 bp, Artificial Sequence
  ENSG00000119242_28 (sequence is synthesized)
gacagtcaaaagttcggaacagacaggagacgggacttctaaaagcagtgaattaaagaaaagatgtgaagagctggaagcccaactgaaagtgaaagagaacgaaaatgctgagttgtt

SEQ ID NO: 230078 - DNA, 120 bp, Artificial Sequence
  ENSG00000119242_29 (sequence is synthesized)
gaaagaactggagcagaaaaacgcgatgatcacagtgctggagaacaccatcaaggagcgagagaagaagtacctggaggagctgaaggccaagagtcacaagctgaccctgctgtctag

SEQ ID NO: 230079 - DNA, 120 bp, Artificial Sequence
  ENSG00000119242_30 (sequence is synthesized)
cgagctggagcagcgggccagcaccatcgcctacctgacctcccagctgcacgccgccaagaagaagctcatgagctccagcgggacctcagatgccagcccgtcagggagccccgtgct

SEQ ID NO: 230080 - DNA, 120 bp, Artificial Sequence
  ENSG00000119242_31 (sequence is synthesized)
ggccagctacaagccagcgccccccaaagacaagctacccgaaacgcctcgccgccgcatgaaaaagagcctctcagcccccttgcacccggaatttgaagaggtctacagattcggggc

SEQ ID NO: 230081 - DNA, 120 bp, Artificial Sequence
  ENSG00000119242_32 (sequence is synthesized)
agagagcaggaaactccttttgcgggaaccagtggatgctatgcccgaccccaccccatttctgctggctagggagtccgccgaggtccacctcatcaaagagaggcccctcgtcatccc

SEQ ID NO: 230082 - DNA, 120 bp, Artificial Sequence
  ENSG00000119242_33 (sequence is synthesized)
ccccatcgcctccgaccgaagcggcgagcagcacagcccggcccgcgaaaagccgcacaaggcccacgtcggggtggcacatcggatccaccacgccaccccgccgcaggcccagcccga

SEQ ID NO: 230083 - DNA, 120 bp, Artificial Sequence
  ENSG00000119242_34 (sequence is synthesized)
ggtgaagaccctggcggtcgaccaggtgaacggaggcaaggtggtgaggaagcactcagggacggacagaactgtgtgaagcccgccgtgccccaccccgcgctgtccatgcactgtgag

SEQ ID NO: 230084 - DNA, 120 bp, Artificial Sequence
  ENSG00000119242_35 (sequence is synthesized)
caccactgggaaatctcagccacaccttttctgtttaatcccatgcatgccaaacacttttcacacctaccgacccattctccttctgcttctcttgccctcttcttcacaccaaaatat

SEQ ID NO: 230085 - DNA, 120 bp, Artificial Sequence
  ENSG00000119242_36 (sequence is synthesized)
gatcgtgtccctgccgcagaatatgtatttcctaattgctgtggccaaacgcctgtgtgccgaatcgcttgcttctgatcccgctccgtgtaacctaagtgcgctgcaggcaaagcccag

SEQ ID NO: 230086 - DNA, 120 bp, Artificial Sequence
  ENSG00000119242_37 (sequence is synthesized)
gccacggctgcgtcactactgatgttcacgatgccacacagtcacacacctaattcattctcaagtcggagcaacacataccaaccttgaccttatcctcaagctccagggcagcctggc

SEQ ID NO: 230087 - DNA, 120 bp, Artificial Sequence
  ENSG00000119242_38 (sequence is synthesized)
cgagcagcccctgctccctcctggagacccttgtcacctcccgagctcctcctggagacccctgtcacctcctgaccaacctttcccagggcggcaccgatcaccgagcagccgtgcgtg

SEQ ID NO: 230088 - DNA, 120 bp, Artificial Sequence
  ENSG00000119242_39 (sequence is synthesized)
tatctcaaggaactaaataagatgacgctactcctcatagcaccacaacctgaatgtgtgttcatatttttttgttagttttatccaaaatgtttaagatcccaacaaactttattttct

SEQ ID NO: 230089 - DNA, 120 bp, Artificial Sequence
  ENSG00000119242_40 (sequence is synthesized)
gggccacgggcccccaccgccgcccgccgggaggaccgagcctaagagggcagccgcctgaaggaacgcgacggcggcgcccgcaggtcctctggatgtcagcatggcagccacaaacct

SEQ ID NO: 230090 - DNA, 80 bp, Artificial Sequence
  ENSG00000119242_41 (sequence is synthesized)
gtcagcgcggccaggcctcgccgccggccccgctcccagggtgcaccgcggctagcgctggggtgggagcgggcgagatg

SEQ ID NO: 230091 - DNA, 120 bp, Artificial Sequence
  ENSG00000119242_42 (sequence is synthesized)
agaggacgcttgaactgaataatccacgctggagctctcagatcactagatggaaagtcagaggtcaaacacccttacatggacgtgctgaagccatcaaaaaacaaaacagaaaaaaac

SEQ ID NO: 230092 - DNA, 120 bp, Artificial Sequence
  ENSG00000119242_43 (sequence is synthesized)
ctctaggaaatgatctaggaaaatgtatttttcagtgctgtacaagcgtcttgaattactctggtagcttttccagaaagacccatgacttcaccacatttctcgagttacgatgaaggt

SEQ ID NO: 230093 - DNA, 120 bp, Artificial Sequence
  ENSG00000119242_44 (sequence is synthesized)
gtgggatcgcagggcgagggatccgcattgcaggtgcaccaggagcgccccggggcctagcccggctttgtctgggatgctgtggggaggaggccgtctgaatccacatcgcctttttaa

SEQ ID NO: 230094 - DNA, 120 bp, Artificial Sequence
  ENSG00000119242_45 (sequence is synthesized)
atgcttgttaccacccggggaaccttagagaccctccctgacaagttgtatcgcctcccgtcctggtagcctttccgtaagtacactaccttgccagccccttcctgaagctttgatgcg

SEQ ID NO: 230095 - DNA, 120 bp, Artificial Sequence
  ENSG00000119242_46 (sequence is synthesized)
gctttagtttactctgagtaacgatttgcctgtgattcgtgaaacggagcagaatgcacaaacgcagcagagctccaggcttggctactgggctgccgtctgctacggcgacacaggaag

SEQ ID NO: 230096 - DNA, 120 bp, Artificial Sequence
  ENSG00000119242_47 (sequence is synthesized)
gagcaatcacaggtcccagaagcgactccggcctcctcccggcccagagctagtccttagaatgtgctgcgctcctgagcttctgtgggaagctgcttttgcctctgatggcccctgccc

SEQ ID NO: 230097 - DNA, 120 bp, Artificial Sequence
  ENSG00000119242_48 (sequence is synthesized)
actgtgctgcccgtgctagcccctctcctccctcatggagtgaagccacccctcacctccaggtggccagccagggctccaggccagcctcatggtgcacagagggaaggggtgcccagt

SEQ ID NO: 230098 - DNA, 120 bp, Artificial Sequence
  ENSG00000119242_49 (sequence is synthesized)
gaccactggtcctggaggttctgtgtccttacctgaccccacacagacccaggcaggctgggggtagaagctcatgcaggaactaaacactaagctcaacaacttcacagtcgccgtagc

SEQ ID NO: 230099 - DNA, 120 bp, Artificial Sequence
  ENSG00000119242_50 (sequence is synthesized)
aggtcagagccaaagaagctagggccagagagttctggaagggggagaagtggctccaggtgactggtcacttctgctctgtgcccgacatcatcagcccttcttgccaaaaaggagcat

SEQ ID NO: 230100 - DNA, 120 bp, Artificial Sequence
  ENSG00000119242_51 (sequence is synthesized)
ctgctgaaacagacctggatcatcgaaaacacacctttggaaattacattaggattctcacttgtgccaatgctatgtatgccaggcacttttgcctaatcaagtgttttctctgagaag

SEQ ID NO: 230101 - DNA, 120 bp, Artificial Sequence
  ENSG00000119242_52 (sequence is synthesized)
gaaaagaaaactccacacatcttaaaatactctccaatatttactttttgattatataaattccttttaaaaagtagtattaaaaacaaaaccattcaggttaatttgtatggaaagaga

SEQ ID NO: 230102 - DNA, 120 bp, Artificial Sequence
  ENSG00000119242_53 (sequence is synthesized)
gacaagttgtatcgcctcccgtcctggtagcctttccccaacagaatcctggatttgagtctgtcctttgaaagcatctctgctagagttcccacttccaaacccctttcagctcttcgg

SEQ ID NO: 230103 - DNA, 120 bp, Artificial Sequence
  ENSG00000119242_54 (sequence is synthesized)
cttcgacttctcccacttttgggaaaagtccacttttcaagaaggagactggaaacaggaagtggcccaggcttgccctcgtcaccgccagtgacaccaaccaggcgctcagtgcagcat

SEQ ID NO: 230104 - DNA, 120 bp, Artificial Sequence
  ENSG00000119242_55 (sequence is synthesized)
ccagcttccagcctcaggatggccccgagacagaggctggctgctccgatttcaaccagagccatttctgaggctggaatgatcaactggaatagtgaaaaatgcagtgctgttggaagc

SEQ ID NO: 230105 - DNA, 120 bp, Artificial Sequence
  ENSG00000119242_56 (sequence is synthesized)
caagttttaaggagaatttttgttattgtttgtttcaacagacaaacttatatacatgtatcatgtgggcaaggagatgggaggaatgaagctaggcaaattcattaccttttaaaaaga

SEQ ID NO: 230106 - DNA, 120 bp, Artificial Sequence
  ENSG00000119242_57 (sequence is synthesized)
tggagggaaacatcagatgagtattgatttcttaaaattcatttttaaaaaactgagtttcttatgcacactgtgcttaaacgtaagataaatgaaacactcgaactgtatggctgcatt

SEQ ID NO: 230107 - DNA, 120 bp, Artificial Sequence
  ENSG00000119242_58 (sequence is synthesized)
tacccctctttgcacctaatgtccatgaatatctaagttcaagagagatgagctcagttcctaggtcatgccccagtctgtagtgacatgctcctgtatgtaacggaaatggccatgtct

SEQ ID NO: 230108 - DNA, 120 bp, Artificial Sequence
  ENSG00000119242_59 (sequence is synthesized)
acaggaggtaaaatcacaccaacctgggaagaggaaaagccagtgaggggcagtacagcaggggcagccctctccactgaaggcaggttgtttgcctgactccatggcatttgtgtccat

SEQ ID NO: 230109 - DNA, 120 bp, Artificial Sequence
  ENSG00000119242_60 (sequence is synthesized)
tagagtctagaagaggtgttggcaaactttctacaaagggccagatagtaaatatttttggctttggaagctagatggtctctgtcataaccactcaactccgccattgtagtgcaaaag

SEQ ID NO: 230110 - DNA, 120 bp, Artificial Sequence
  ENSG00000119242_61 (sequence is synthesized)
caaccatagacaatatgtatacaaatggatatggccctgttccaataaaactttatttacaaaagcaggcagtgggccagatttggatgctggctagggggttgccaacctctattgcag

SEQ ID NO: 230111 - DNA, 120 bp, Artificial Sequence
  ENSG00000119242_62 (sequence is synthesized)
aggacacacactccatcaacagactctttattaatggatgcaaaataccagcgttcttcttttttgctttttaacagaagacatgtgttcctggaaaaaaaaattgtttaagtcaaaatt

SEQ ID NO: 230112 - DNA, 120 bp, Artificial Sequence
  ENSG00000119242_63 (sequence is synthesized)
tgtaatttgaattctactttatatgtgttaggagggttggctacttaagtgagccctatagaaacaatctcttttctgcccaactgttaagggctaaattatatttctccaaacttccta

SEQ ID NO: 230113 - DNA, 120 bp, Artificial Sequence
  ENSG00000119242_64 (sequence is synthesized)
ctcaggcgtttcatgaggatggaatcaggcagcgacttcttcagtgacagcctgaagacctctaagaaggcaatcagggagtactggtacatggagttcaccagggccatctcagacagg

SEQ ID NO: 230114 - DNA, 120 bp, Artificial Sequence
  ENSG00000119242_65 (sequence is synthesized)
acgaagaacaggatggcccccctcctggctgctggccggtagccatcccgcagcctgtcgatgtccaaggctgtcttctccgccagcttgagtttctctgagacctgaagaaaagcacag

SEQ ID NO: 230115 - DNA, 80 bp, Artificial Sequence
  ENSG00000119280_0 (sequence is synthesized)
tgggttggcttggagacccgggtacgcggcggtgcagggcggggttcccggagggggcggggctccgggtggcgcggggc

SEQ ID NO: 230116 - DNA, 120 bp, Artificial Sequence
  ENSG00000119280_1 (sequence is synthesized)
ggagcggcgggcaggccgggcatggcgtccatggcggcggcgatcgcggcttcgcgctcggcggtcatgagcgggaaccggcctctggacgaccgggagcgaaagcgcttcacttacttc

SEQ ID NO: 230117 - DNA, 120 bp, Artificial Sequence
  ENSG00000119280_2 (sequence is synthesized)
tcgtcgctgagccccatggccaggaagatcatgcaggacaaggagaagatccgcgagaagtacgggcccgagtgggcgcggctgccgcccgcgcagcaggacgagatcatcgaccggtgc

SEQ ID NO: 230118 - DNA, 120 bp, Artificial Sequence
  ENSG00000119280_3 (sequence is synthesized)
ctggtggggccgcgcgccccggcgccccgagaccccggggactcggaggagctcacgcgcttccccggcttgcgcgggcccacgggccagaaggtggtgcgcttcggggacgaggatcta

SEQ ID NO: 230119 - DNA, 120 bp, Artificial Sequence
  ENSG00000119280_4 (sequence is synthesized)
acttggcaagatgagcactctgcccctttctcctgggaaacaaagagtcagatggagttcagtatctccgccctatccatccaggagccgagcaacggcaccgccgccagcgagcccaga

SEQ ID NO: 230120 - DNA, 120 bp, Artificial Sequence
  ENSG00000119280_5 (sequence is synthesized)
ccactgtccaaagcttcccagggctcccaggccctcaagtcctcccaaggcagcaggtcctccagcctggacgccctgggccccaccaggaaggaggaggaagcgtcattctggaagatc

SEQ ID NO: 230121 - DNA, 120 bp, Artificial Sequence
  ENSG00000119280_6 (sequence is synthesized)
aatgctgagcggtcccgaggggaggggcctgaggccgagttccagtcgctgacccctagccagatcaagtccatggagaagggggaaaaggtcttgcctccctgctaccggcaggaacct

SEQ ID NO: 230122 - DNA, 120 bp, Artificial Sequence
  ENSG00000119280_7 (sequence is synthesized)
gccccgaaggacagggaggccaaggtggaaaggcccagcaccctccgtcaggagcagcgtcctcttcccaacgtgagcaccgaacgtgagagaccccagcctgtccaggccttcagcagt

SEQ ID NO: 230123 - DNA, 120 bp, Artificial Sequence
  ENSG00000119280_8 (sequence is synthesized)
gcactgcacgaggctgccccctcccagctcgaggggaagctgccatctcctgatgtcaggcaggacgatggggaagacaccctgttctcggaacccaagtttgcacaggtcagctcaagt

SEQ ID NO: 230124 - DNA, 120 bp, Artificial Sequence
  ENSG00000119280_9 (sequence is synthesized)
aatgtcgtcttgaagacgggatttgattttctggacaattggtaaaatgtattagaaaaatacaatgaagaaccctaaaatgttttccaaagtggtgtggtggaggaggataaaaagggc

SEQ ID NO: 230125 - DNA, 120 bp, Artificial Sequence
  ENSG00000119280_10 (sequence is synthesized)
caccttttcctatgtattttactggtttcttgacactcttttcttaatcatttggaaactggtcaatattgccagatttttttcttttttggtagaaccagatatatatgctattttcag

SEQ ID NO: 230126 - DNA, 120 bp, Artificial Sequence
  ENSG00000119280_11 (sequence is synthesized)
tgatttgataacagaagttttccatttggaatttttaaggtctgttaataattcaggagatcttgtaaataaaacttctgttcccagctccacccaactttccccctcctcaaaggatgt

SEQ ID NO: 230127 - DNA, 120 bp, Artificial Sequence
  ENSG00000119280_12 (sequence is synthesized)
gtttcaaccatgtcacaaaaatcatataagtgatttccatctccttctccattattccccctcccccctccgctttttaccgtatgggttccttttggtgggtgattgagggtgatgtta

SEQ ID NO: 230128 - DNA, 120 bp, Artificial Sequence
  ENSG00000119280_13 (sequence is synthesized)
tcagccatgacatcagcatgctggctgtgaccccggaaagactggcccccagcgacgttctcagccagcgctcgcagctgtccggggcttctctggcagaagccatgtctctcacatcat

SEQ ID NO: 230129 - DNA, 120 bp, Artificial Sequence
  ENSG00000119280_14 (sequence is synthesized)
gtgccagcctccaccctcacgccatttccagggaacagactgcgggtatgtagcagtgtagtctttaacctgctctgatacatattcagagtatggattgttgtttaaaaagagttgcat

SEQ ID NO: 230130 - DNA, 120 bp, Artificial Sequence
  ENSG00000119280_15 (sequence is synthesized)
gtttaaagagttttgtactagcttttcattattttgtatctagattatcaacaatggggctaccactttccttggttttatatccatttcctcttggaagttcttgttgcttatgtgacc

SEQ ID NO: 230131 - DNA, 120 bp, Artificial Sequence
  ENSG00000119280_16 (sequence is synthesized)
ctgggcacctacaggagtcagggcagacggcagatgtggctggaggtcagggctcttctgcttagttgtgttagagtcttccagcatgggactgatgggagcagtgggcattctttatcc

SEQ ID NO: 230132 - DNA, 120 bp, Artificial Sequence
  ENSG00000119280_17 (sequence is synthesized)
caagggctagccaggttgcgtcatgacggaccttccccagccctgaccaccaccagaagtggaagagtggagtttgcggtcaactcagcagtgcccatggagacctgcgtggtgtcagag

SEQ ID NO: 230133 - DNA, 120 bp, Artificial Sequence
  ENSG00000119280_18 (sequence is synthesized)
cagcagtatctcttggagctggtgcagacaccaaggctgcccagtggtacaacgtggtccacctcccctagggaagctgctgcactcagaggctgtcctgcccagtggcccctgagccgt

SEQ ID NO: 230134 - DNA, 120 bp, Artificial Sequence
  ENSG00000119280_19 (sequence is synthesized)
gtgagcctgcaggaggcgtctgagcagagcctcaagcccggtatggcgccatctccatgttgccatcactgcgttctcacctgaagccttaatctttgcgacacctgccagtgagcgctc

SEQ ID NO: 230135 - DNA, 120 bp, Artificial Sequence
  ENSG00000119280_20 (sequence is synthesized)
ggtttcaataccaaagtgtgtcttcttcttttttttttttttttaaatgcctgtttcataggaccttctgaaatgatttccagaatattttatctggctccaaaataaagcacatagcaa

SEQ ID NO: 230136 - DNA, 120 bp, Artificial Sequence
  ENSG00000119280_21 (sequence is synthesized)
ctcacctcaacccctcatcatctccaggaaagtttctgccaaagctgtggcatagccaacttttgatttggttcttgccaattgttttatgtccctaaacctcatttggatccttggggt

SEQ ID NO: 230137 - DNA, 120 bp, Artificial Sequence
  ENSG00000119280_22 (sequence is synthesized)
atagttttatctttctgcttcagtgatttactgtaacttttcaaatattggttctttctgtaccatttaagtatagttgatatatgtgaggcaaaaaaaggtttcagcatggtggtgagg

SEQ ID NO: 230138 - DNA, 120 bp, Artificial Sequence
  ENSG00000119280_23 (sequence is synthesized)
gaaaaaggagcttagaaatcccagttggcacagcctgggcaagcgccagctcccctcagggctaacggcactgttcacacagggatcctcagaatcagcggccacctgcctccaccttct

SEQ ID NO: 230139 - DNA, 120 bp, Artificial Sequence
  ENSG00000119280_24 (sequence is synthesized)
gcctggagggcatggggctgttgtagaacctatggtagcaaatgtatatgtatgagtttgtattctgtagtgttggtgtagcacagaagaaagacctgtgtcctagagagtaggccaagg

SEQ ID NO: 230140 - DNA, 120 bp, Artificial Sequence
  ENSG00000119280_25 (sequence is synthesized)
tgatctgcctcttctattgggagaaattctaatttctttcccactttctcaacaagcccaatattccctccaagttcttcttggtgctgagggctgtaggaattattgaaagcttctgcc

SEQ ID NO: 230141 - DNA, 120 bp, Artificial Sequence
  ENSG00000119280_26 (sequence is synthesized)
tcacttagtatcgtctggggcccagcacccagcaataactctaataatgtttcttaatggtatagcctcctgagattaaatgtaaaatcaaaaattaggaaatcttggagggagtcctca

SEQ ID NO: 230142 - DNA, 120 bp, Artificial Sequence
  ENSG00000119280_27 (sequence is synthesized)
agttgtattgctttgctgtgcttttggaagaagggacgacctggaggacacaggctcctgtgtgggtcttcatcctgcctgaccggcagatcttcctctacaccttgggcaaagtctatg

SEQ ID NO: 230143 - DNA, 120 bp, Artificial Sequence
  ENSG00000119280_28 (sequence is synthesized)
cgaagatggtttcttagctctccatttgccatgattttcctcccattcatcatgagggagtttctcaaaccaggagtttatatttattttttagaaaatacacacttttcaggagaaacc

SEQ ID NO: 230144 - DNA, 120 bp, Artificial Sequence
  ENSG00000119280_29 (sequence is synthesized)
tgagcatgattttggattctccacctccccccagtctctgcacctgggattcagctcaaggattcagtgtcttcatttttacaaaagttcccccaagaaatcagcaaccagcctctgttt

SEQ ID NO: 230145 - DNA, 120 bp, Artificial Sequence
  ENSG00000119280_30 (sequence is synthesized)
catctgggagcccctcccttggccccctgggtttgggggtgctgccctactgggaacagcgggggtctgtcacccgtctgagccgcacccccctgtgtggatttcaggaagagcctccct

SEQ ID NO: 230146 - DNA, 120 bp, Artificial Sequence
  ENSG00000119280_31 (sequence is synthesized)
ttctttgcgtctccctttctttaattaacattttcaaaagtaataaattcttactgacgacttgtaacttagtcatattttatacttgtagcctttaataaagccatttaaaaaatgcta

SEQ ID NO: 230147 - DNA, 120 bp, Artificial Sequence
  ENSG00000119280_32 (sequence is synthesized)
ttttgtgttcagaactatccaggcaaagaccctggataacagctgaaatgctggtttttgtttttgtttttttattttacgagtggacacaattctcacctgagtccttggccacgtggc

SEQ ID NO: 230148 - DNA, 120 bp, Artificial Sequence
  ENSG00000119280_33 (sequence is synthesized)
caggcaaagaccctggataacagctgaaatgctggtttttgtttttgtttttttattttacgagtggacacaattctcacctgagtcctgttagtcttgttaaaatcagtcagatggaga

SEQ ID NO: 230149 - DNA, 120 bp, Artificial Sequence
  ENSG00000119280_34 (sequence is synthesized)
gaggggcttgggggaagtgggggctcgctataattttaattttgtggtctgtctgggacacacctcaaaattacaaaccctggccccctacctgttgggatgtcgcctctgagtctgaaa

SEQ ID NO: 230150 - DNA, 120 bp, Artificial Sequence
  ENSG00000119280_35 (sequence is synthesized)
actttctgctcctctttggtttgtttgcaaacgtcgaactgccaagagttctgagctccttgggttggggaaaggcacctgggccaccgggtacttcatgcacccacctggccccgaggg

SEQ ID NO: 230151 - DNA, 120 bp, Artificial Sequence
  ENSG00000119280_36 (sequence is synthesized)
gcggcgggagctgactttccttgagcaccagatgccccgaaccggtccagccttccaggtcgccctccagcctccgggctgccctgcgcccccggctatctgcagctcaccgcgccaggc

SEQ ID NO: 230152 - DNA, 120 bp, Artificial Sequence
  ENSG00000119280_37 (sequence is synthesized)
agagaagtggccacgtggcgctatggcggtcactaccgggaattaaccacggccaccctctcagagcgccgggcgcggactcagggacacgccggctaccacctgagccgggtaagggga

SEQ ID NO: 230153 - DNA, 120 bp, Artificial Sequence
  ENSG00000119280_38 (sequence is synthesized)
gcccgaaacctgcgggcaccgcggtaatccactatggaggcgtaaagggggactcgtggggtccgcgagggggtggcgggggggggcccggagggaggagctcccggggagggggccacg

SEQ ID NO: 230154 - DNA, 120 bp, Artificial Sequence
  ENSG00000119280_39 (sequence is synthesized)
ccaggcagccagcggcttggcctgaaatgctggggctttcttaggctcactggaggttgaaaaaagtttcctttgtcaagcagtggccacgtggcgctatggcggtcactaccgggaatt

SEQ ID NO: 230155 - DNA, 120 bp, Artificial Sequence
  ENSG00000119280_40 (sequence is synthesized)
attctgctgagaccatcaagccctcatccactcctactcatctcatctgtctgagtccattggggggcctcaccggcattccctgttgtctgtttggctggggaggggagtgtctggcag

SEQ ID NO: 230156 - DNA, 120 bp, Artificial Sequence
  ENSG00000119280_41 (sequence is synthesized)
atcaggcttgtttagagccaggagttgggattattcctaagttttggttcccccacggtcctgggtggatatttgcatggggtatgtctgggtttgaatttcagacttattctcgatttt

SEQ ID NO: 230157 - DNA, 120 bp, Artificial Sequence
  ENSG00000119280_42 (sequence is synthesized)
ttatttcaggatctaacttggcaagatgagcactctgcccctttctcctgggaaacaaagagtcagatggagttcagtatctccgccctatccatccaggagccgagcaacggcaccgcc

SEQ ID NO: 230158 - DNA, 120 bp, Artificial Sequence
  ENSG00000119283_0 (sequence is synthesized)
atggaggaagagctgaagtgtcccgtgtgcggctctctgtttcgggagcctatcatcctgccctgttcccacaatgtctgcctgccttgcgctcgcaccatcgcggtgcagaccccggac

SEQ ID NO: 230159 - DNA, 120 bp, Artificial Sequence
  ENSG00000119283_1 (sequence is synthesized)
cagaccccggacggtgagcagcacctgccccagccgctcctgctttcccggggatcggggctgcaggcgggcgccgccgccgctgcctctctggagcacgacgctgcggctggcccggcc

SEQ ID NO: 230160 - DNA, 120 bp, Artificial Sequence
  ENSG00000119283_2 (sequence is synthesized)
ggcgggagtgcagctggcggcctcggcggcggtgcgggaggtggcggagaccacgcggacaagctcagcttgtacagcgagacagacagcggctacgggtcctacaccccgagcctcaag

SEQ ID NO: 230161 - DNA, 120 bp, Artificial Sequence
  ENSG00000119283_3 (sequence is synthesized)
tcccccaacggggttcgcgtgctgcccatggtgcccgcaccacccggctcctcggctgcggcggctcggggtgccgcctgctcctcgctgtcctcgtcttcgagctccatcacgtgcccg

SEQ ID NO: 230162 - DNA, 120 bp, Artificial Sequence
  ENSG00000119283_4 (sequence is synthesized)
cagtgccaccgcagcgcatccctggaccaccgcggcctgcgcggcttccagcgcaaccggctgctcgaggccatcgtgcagcggtaccagcagggccgcggggccgtgccggggacgtct

SEQ ID NO: 230163 - DNA, 120 bp, Artificial Sequence
  ENSG00000119283_5 (sequence is synthesized)
gcagccgcggcggtggccatctgccagctgtgcgaccgcaccccgccagagccagcagccacgctctgcgagcagtgcgacgtcctctactgctctgcctgccagctcaagtgccatcca

SEQ ID NO: 230164 - DNA, 120 bp, Artificial Sequence
  ENSG00000119283_6 (sequence is synthesized)
ctctgcctgccagctcaagtgccatccatcccggggacccttcgccaagcatcgcctggtgcagccgccgccgccgccgccgccgcccgccgaggcagcctccgggcccactggcaccgc

SEQ ID NO: 230165 - DNA, 120 bp, Artificial Sequence
  ENSG00000119283_7 (sequence is synthesized)
tgcaagagcccgggaggcgcgggggcgggggcgactgggggcagcacggcccgcaagttccccacgtgtcccgagcatgaaatggagaactacagcatgtactgcgtgagctgtcgaacc

SEQ ID NO: 230166 - DNA, 120 bp, Artificial Sequence
  ENSG00000119283_8 (sequence is synthesized)
ccggtgtgttatctgtgcctggaggagggccggcacgccaagcacgaggtgaagccgctgggggccatgtggaagcagcacaaggcacaactatctcaggccttaaatggagtttcagat

SEQ ID NO: 230167 - DNA, 120 bp, Artificial Sequence
  ENSG00000119283_9 (sequence is synthesized)
aaggcaaaggaagcaaaggagtttctggttcagctaaagaacatattgcagcagatccaggaaaacggactggactacgaagcctgcctcgttgctcagtgtgatgcccttgtggatgct

SEQ ID NO: 230168 - DNA, 120 bp, Artificial Sequence
  ENSG00000119283_10 (sequence is synthesized)
ttaactcgtcagaaagccaagctgctcaccaaggtgactaaagagagggaacacaagttgaagatggtttgggaccagatcaatcactgcacattgaagctgcgtcagtccaccggactg

SEQ ID NO: 230169 - DNA, 120 bp, Artificial Sequence
  ENSG00000119283_11 (sequence is synthesized)
atggagtactgcctggaggtgatcaaggagaacgacccctccgggttcttacagatctcagatgctctgatcaagcgcgtccaggtgtctcaggagcagtgggtcaaaggcgccctggag

SEQ ID NO: 230170 - DNA, 120 bp, Artificial Sequence
  ENSG00000119283_12 (sequence is synthesized)
ccgaaagtgtctgcggagtttgatctgactttggacagcgagccgctgctgcaggccatccaccagctggacttcattcagatgaaatgtagggtgccacccgtccccctactgcagctg

SEQ ID NO: 230171 - DNA, 120 bp, Artificial Sequence
  ENSG00000119283_13 (sequence is synthesized)
gagaaatgctgcacccgtaacaacagcgtcacgctggcctggaggatgccacccttcacccacagccccgtggacggctacatcctggagctggacgacggtgccgggggacagttccgg

SEQ ID NO: 230172 - DNA, 120 bp, Artificial Sequence
  ENSG00000119283_14 (sequence is synthesized)
gaagtgtacgtcggtaaggagactttgtgtaccatcgacggtcttcacttcaacagcacctacaacgcccgagtcaaagctttcaactcttctggtgtcgggccttacagtaaaactgtc

SEQ ID NO: 230173 - DNA, 120 bp, Artificial Sequence
  ENSG00000119283_15 (sequence is synthesized)
gtcctgcagacatccgatgtggcctggttcacatttgaccccaactctgggcatcgggacatcattttatccaatgacaaccagacagccacctgcagcagctatgacgaccgggtggtg

SEQ ID NO: 230174 - DNA, 120 bp, Artificial Sequence
  ENSG00000119283_16 (sequence is synthesized)
gccagcgtggtcaaggacatgatgctgggcaaggatgacaaggcctgggccatgtatgtggacaacaaccgcagctggttcatgcactgcaactcccacaccaacaggacggaaggtggc

SEQ ID NO: 230175 - DNA, 120 bp, Artificial Sequence
  ENSG00000119283_17 (sequence is synthesized)
gtgtgcaagggggccaccgtgggcgtgctgctggacctgaataagcacactctcaccttcttcatcaacgggcagcagcagggccccacagccttcagccacgtggacggggtcttcatg

SEQ ID NO: 230176 - DNA, 120 bp, Artificial Sequence
  ENSG00000119283_18 (sequence is synthesized)
ccagccctcagcctcaaccgcaacgtgcaggtcaccctgcacacaggattggaagtgccgactaacctggggcggccaaagctgtcaggcaattagccccgctccagctcggcactgtgc

SEQ ID NO: 230177 - DNA, 120 bp, Artificial Sequence
  ENSG00000119283_19 (sequence is synthesized)
ctgtgacagtgacattcacaggcaaaacgcccaccattctcactaagctcaaataacccacaaaagcaggatatgcaaatcatgggtgcaacctggcagcgtggagtgtcatagaaacac

SEQ ID NO: 230178 - DNA, 120 bp, Artificial Sequence
  ENSG00000119283_20 (sequence is synthesized)
attttcttggggacgcagggaatgggtccacgggccatgctcacagctgccactgtcagtggcaaaggaaggtacgtgtgtcacccttattccacccagacattacgaacactccccaag

SEQ ID NO: 230179 - DNA, 120 bp, Artificial Sequence
  ENSG00000119283_21 (sequence is synthesized)
aaggacctttctcaagggagtcagcattcgggcttcatgtctatgtttcctgccatctgttttcaaagcttgtctttttttggagggagaggaaggtagactttgagactggcctcctga

SEQ ID NO: 230180 - DNA, 120 bp, Artificial Sequence
  ENSG00000119283_22 (sequence is synthesized)
gagcggcagtcaggagctgcgctgtaatcccacgccccgggtgttggccctccgtggggaccttgcctcctcagagtcccgagattgcagattctcatcatgctgagaaagttatctttt

SEQ ID NO: 230181 - DNA, 120 bp, Artificial Sequence
  ENSG00000119283_23 (sequence is synthesized)
agcttcttggtcctagagtctttagtagcacctgccacttgcagacccaatgcaggattgatagaaagggacattaatcattcatgcttgacttttgcctctctcactgaagtgttagaa

SEQ ID NO: 230182 - DNA, 120 bp, Artificial Sequence
  ENSG00000119283_24 (sequence is synthesized)
ccttttaaaatggcttcctttattaatcagccaattgtgttctctctctctcttcctccatccttcatttcttctccctccctccttctctttctctcttcttctctctctccttccttc

SEQ ID NO: 230183 - DNA, 120 bp, Artificial Sequence
  ENSG00000119283_25 (sequence is synthesized)
cctcctttgctctctctttcttcctttcctccttctctcttactttcctccatccctgcctctttcttccctctttcgctctctttccctccctccttctctctctctctcacacacaca

SEQ ID NO: 230184 - DNA, 120 bp, Artificial Sequence
  ENSG00000119283_26 (sequence is synthesized)
caggcatgacagtctcctaaaattaattcactcagttcttagttcttaaatccacgtgaaaacacaagaattttaacaactatgtcataggtcttcgcctggtgatggctcctttctgaa

SEQ ID NO: 230185 - DNA, 120 bp, Artificial Sequence
  ENSG00000119283_27 (sequence is synthesized)
actggcagcccaagaagttaactgaaaatgcatccagattgctcttctgagctgaaccactctcagactcataagcatttaaaatgggagaccctgggaaagcctgttctagtcagtcca

SEQ ID NO: 230186 - DNA, 120 bp, Artificial Sequence
  ENSG00000119283_28 (sequence is synthesized)
ccctattgtcattatgaaagcatcatgaacacaagtggcccctgtggcaggccgggacggctctgccctgatgcagtgggcgggatctctggggaaggcaggaaatagaagggcagtatc

SEQ ID NO: 230187 - DNA, 120 bp, Artificial Sequence
  ENSG00000119283_29 (sequence is synthesized)
aggtaccttgtctcccagcttcccactgtgagactgggtgtgccgagtctgacctgccagggcaggactctggaaacaccaggcttctcccttgagatccacattgattcatccacacct

SEQ ID NO: 230188 - DNA, 120 bp, Artificial Sequence
  ENSG00000119283_30 (sequence is synthesized)
ctcagagacagctcatggcaggggttttgagcctgccaggctcttgttcccagggaacccttcctctcctccctcctctcatcttcccagtcacctgccacctccagctccacctggtag

SEQ ID NO: 230189 - DNA, 120 bp, Artificial Sequence
  ENSG00000119283_31 (sequence is synthesized)
taacatttctctctccttttaaaaagaatatattttgtcaagcattttatttctgaggctgagaagtgacttgtcaatttgctggactggatttttataaaattcgcccattcaccagca

SEQ ID NO: 230190 - DNA, 120 bp, Artificial Sequence
  ENSG00000119283_32 (sequence is synthesized)
gggaggggattcccgagccagccggacgctcgccctccgcccgccggctgcagcgtcgcgcggcccaaggtcagaggcgccgcaggagcagcagctgggaaccagggaagcgggtcaatc

SEQ ID NO: 230191 - DNA, 120 bp, Artificial Sequence
  ENSG00000119283_33 (sequence is synthesized)
ccggccgcagggagaaagccccagggcgcagtcagccggcgtccacagccgcccaggagtagggtgagcggctgtctccgggccggtcgggtcccgccgaggtggccgcggccccagcga

SEQ ID NO: 230192 - DNA, 120 bp, Artificial Sequence
  ENSG00000119283_34 (sequence is synthesized)
gcgggtggcggcccaggggtcggcgagcaggcagctggagccccaccttcggctcccgggcgctgtccgccgcctcgtggtgctgatcccagccccacggctgagcggccttcgcacctg

SEQ ID NO: 230193 - DNA, 120 bp, Artificial Sequence
  ENSG00000119283_35 (sequence is synthesized)
cctgcctgtctcacctcgctatcaccccgataaggagttgggccggggcagaaggggggcctcggggtagccgcccaccggagccaggggctgaagcagcgagcgcacagcagcccggcc

SEQ ID NO: 230194 - DNA, 120 bp, Artificial Sequence
  ENSG00000119283_36 (sequence is synthesized)
gctggtcctggggtggagaggaggcgcgcgctgcagccggcggcggcgctggtgctgattcatcacctaaagctcctcgcaggccaccgcgagggcagccgaccggctccggaatctggc

SEQ ID NO: 230195 - DNA, 120 bp, Artificial Sequence
  ENSG00000119283_37 (sequence is synthesized)
cgcaggttgaagccgctggtgcgggaccctcgggcaggaggtgaggaccccctcccttctctcgcccctcaatcatcttagggcggtggctacaggacagagagaggggcgtgcccctcg

SEQ ID NO: 230196 - DNA, 120 bp, Artificial Sequence
  ENSG00000119283_38 (sequence is synthesized)
gctgtgaagtgggcatgcccgtgtgatgcccccgcccgtcgtctcaccggggcgcaccgcgctggtcctcctccgccagtctcccgagctccggccattcatccccagcgcagagcagcg

SEQ ID NO: 230197 - DNA, 120 bp, Artificial Sequence
  ENSG00000119283_39 (sequence is synthesized)
ccactcagcaggcccgacaatcctacctcaaagctcatgctcttggtctgcaaggctgcttggtccgctgtctctgcagatgtggccggcaaggccagctgccccgtctccaggagctgc

SEQ ID NO: 230198 - DNA, 120 bp, Artificial Sequence
  ENSG00000119283_40 (sequence is synthesized)
tcggtgctgtgttgcagtctctgctgcggagcctgggagctatctgcttcatggaagtctaggtcttgcctcttccttgtcatctcaccaagcggtttctgggtctcctcctcccatccc

SEQ ID NO: 230199 - DNA, 120 bp, Artificial Sequence
  ENSG00000119283_41 (sequence is synthesized)
agagccctgtccagagctcttggtggtgacacacaagacctgggaccctgtgtccttgcccgcacctctgcctctgtctcccatatccctgcagcttcatccttagccatagctctgggt

SEQ ID NO: 230200 - DNA, 120 bp, Artificial Sequence
  ENSG00000119283_42 (sequence is synthesized)
ggcctttgcttggagcatggagacgatccctaaagattgaggatgaagaggagccaccactttcctggggccaaggaagccatcagctttgggaagtgtctagctctcttctgaaaaaaa

SEQ ID NO: 230201 - DNA, 120 bp, Artificial Sequence
  ENSG00000119283_43 (sequence is synthesized)
aacaggcctacaccctgcccccagaatgagagtgggctaggcagggctgcctggtgacagcagcttctcacaggggagccctggggaaggctgtggagcctccaccatcaccacagccca

SEQ ID NO: 230202 - DNA, 120 bp, Artificial Sequence
  ENSG00000119283_44 (sequence is synthesized)
ggtcaccaggtggccccagctctgcagaagaatcgcccatcattggagcacaagttgcctggggctaccctgaacctaacccctttgagggagcagcatccaggtcaggagagaagtgga

SEQ ID NO: 230203 - DNA, 120 bp, Artificial Sequence
  ENSG00000119283_45 (sequence is synthesized)
aagtgcaggagggtaatgccctcaaatccggtggcctctttcagaaaaaagttccctgaagtccagagaggtgcagccaggactccctcctccccactgccaccctgagcttgggggctg

SEQ ID NO: 230204 - DNA, 120 bp, Artificial Sequence
  ENSG00000119283_46 (sequence is synthesized)
ggattctcccttttctgactcctccaggagcccagaagcaatacggccgatgccagggacagcatccagctctccttcacagacacctctcctgtcttcagcacaaaacaccttcaatgt

SEQ ID NO: 230205 - DNA, 120 bp, Artificial Sequence
  ENSG00000119283_47 (sequence is synthesized)
tctgacttcaaagagaacgacaggtccgtgccacacacttgtgtttttgagggatcagaaaagtgaagaaggaacttatcaattcctcatggccaggaaggtcccgggtttcagagtaga

SEQ ID NO: 230206 - DNA, 120 bp, Artificial Sequence
  ENSG00000119283_48 (sequence is synthesized)
aatgacagacaggtcatggaattctcatccaccatcgaattccataacacgttacatcatggtggcacatttgtacatacatataaatgatatcaagatgaggcttttgttgggctggct

SEQ ID NO: 230207 - DNA, 120 bp, Artificial Sequence
  ENSG00000119283_49 (sequence is synthesized)
gaggagtaacttggtgtaaatctatcaagcagtttcagtgaaaaaggaattcaaagtagtttaaaaatgtcgagttccattgcattgtaaatagtgcctctgtaatgtggttctgcagtt

SEQ ID NO: 230208 - DNA, 120 bp, Artificial Sequence
  ENSG00000119283_50 (sequence is synthesized)
gttctttgctagtgagcaagcttggtcaaagtgtatgccttttccttttaaaattaatctcttccgaaaatatccactagcacctcactgcatacatagcatcccagctcctaattcaaa

SEQ ID NO: 230209 - DNA, 120 bp, Artificial Sequence
  ENSG00000119283_51 (sequence is synthesized)
gcaggggaaggtatttccccaaagcctgcttttcctctctctgttctccttgggaaaataatgattccaattaaagaggacaccagtaatactgacccacaaggtaactgacctaaacac

SEQ ID NO: 230210 - DNA, 120 bp, Artificial Sequence
  ENSG00000119283_52 (sequence is synthesized)
tataaaactgtatatatttccaggctgcatcttcagcctgatatgtactttgtagttgcaacagcgccctaggtgccctatggcccaccaagtttgaggagggtggtgctttccggattg

SEQ ID NO: 230211 - DNA, 120 bp, Artificial Sequence
  ENSG00000119283_53 (sequence is synthesized)
agcctgggcaggctctgtggagctcaccaagagagctgggggcaggcccaccctcctctttgcgccctttctctccctcttggtgcccctgccctccgccccaccacagcactctcagga

SEQ ID NO: 230212 - DNA, 120 bp, Artificial Sequence
  ENSG00000119283_54 (sequence is synthesized)
aaggatcagaatgcaggatctttgtgtatttcttccagggatatttgcatttaagccttaattctcattgcaagcgaaaggcttggtccccctgggaaggcgggtttcggcaccggtggg

SEQ ID NO: 230213 - DNA, 120 bp, Artificial Sequence
  ENSG00000119283_55 (sequence is synthesized)
caggtggttcagtgtcaaggaggctgctgctggtcccatggccacctgctggctttgaggtagtgagggagggtcaatccttagggggagtcaacatgtgaatgctaaagaacactgctg

SEQ ID NO: 230214 - DNA, 120 bp, Artificial Sequence
  ENSG00000119283_56 (sequence is synthesized)
cacagcccgtggggtggcgccagggtttctcaacctctactgacattttgcgataggttctgtatgccgtaggatgtttagcaacatccctggtctctacccatcatctgccagtagcaa

SEQ ID NO: 230215 - DNA, 120 bp, Artificial Sequence
  ENSG00000119283_57 (sequence is synthesized)
cccccaagttaggtgtgacaaccaaaagtatctgtcgacattgctaggtatctcctgggggcctccacaagttgagaaccaccaggttatgccagtggtttgtcatgcatggatctgtag

SEQ ID NO: 230216 - DNA, 120 bp, Artificial Sequence
  ENSG00000119283_58 (sequence is synthesized)
agggactgtggcgctccggctgctttgttccatagaaagcctgtatgtgacaaagctgccagcctttatcttgatacccaagcccaggattttccatgtgtcttcagggggcaggtaggg

SEQ ID NO: 230217 - DNA, 120 bp, Artificial Sequence
  ENSG00000119283_59 (sequence is synthesized)
gaaaatggggtgagccacctccaacagatgccaacctgttgggtcttgaattttcactcactgaagatgccccctgcccgctccccacttcctagaaagcaaaactcgttacctttgttt

SEQ ID NO: 230218 - DNA, 120 bp, Artificial Sequence
  ENSG00000119283_60 (sequence is synthesized)
tccttggccacattttactggaagcaacaggaacttcttaatgggtttgtggccctcaattggtttttaaaaaaatctaacagatcttattggcaaatattcaagatggtgatgctggaa

SEQ ID NO: 230219 - DNA, 120 bp, Artificial Sequence
  ENSG00000119283_61 (sequence is synthesized)
aatttcaggacttttcttttgcaagtgagccggtagctgtgtttgttgaccacattctttggcagttcctcccagaagatcaaaggatcctgcagctttaacctaatatctaggctgtaa

SEQ ID NO: 230220 - DNA, 120 bp, Artificial Sequence
  ENSG00000119283_62 (sequence is synthesized)
aaatatgagggcaggtttcgggcaggatgtattgatcagacaccaagttcagccctcggttacttccctcttttaacctggctttaatagtgattcatggtatgagtgggggccaatctc

SEQ ID NO: 230221 - DNA, 120 bp, Artificial Sequence
  ENSG00000119283_63 (sequence is synthesized)
ttatcctttctgtgcctcagtatccccacctgaaatgagactagtcatactaacctacctcctctgatgtattgtgaggattatacaataacatttttaaagaaaaaaagtgcagtcttt

SEQ ID NO: 230222 - DNA, 120 bp, Artificial Sequence
  ENSG00000119283_64 (sequence is synthesized)
catctctggcatctaagctaatgattcccattcagtgactcaaacctgtggggggcgttccagtgttctctgaccagtgtcttccatccaagcctccttgtgaccagggcaaggagctgc

SEQ ID NO: 230223 - DNA, 120 bp, Artificial Sequence
  ENSG00000119283_65 (sequence is synthesized)
ctggcctccagtgggtaaaatagacctttaagacaggtttcctatgaccatagaaagtaacaccccatatgtttccattcccggcgaggcctgtttgaatggcgctctgtgtgagtgcta

SEQ ID NO: 230224 - DNA, 120 bp, Artificial Sequence
  ENSG00000119283_66 (sequence is synthesized)
tgaacaggctacctgtcagcagtctcactgcgaggcctcaaggcctctgtgagcagaagcccctttaaaccaaggaaggacactaacccaggcctctgccttctttgttacctaagttct

SEQ ID NO: 230225 - DNA, 120 bp, Artificial Sequence
  ENSG00000119283_67 (sequence is synthesized)
ggtatctaaggggtctctcatctcacagcttgcctcctttgtttcgaggggtctctgcagtgtgaatgggtttgaaatccagtgtggatagcacgaagagatgcaactgagccgaagttt

SEQ ID NO: 230226 - DNA, 120 bp, Artificial Sequence
  ENSG00000119283_68 (sequence is synthesized)
tgaaggctggttgggctagtgggtcatcatgtcactttcagatgactgataaccgctgggactgctggggcttcaccagcacgagctatgcaggttgggggaggccctggctttttcaat

SEQ ID NO: 230227 - DNA, 120 bp, Artificial Sequence
  ENSG00000119283_69 (sequence is synthesized)
gattgacgttgacatcagtcaggagctgggagttgagacctccagggaagtctcgtccggatccatcgctcttctctcaaggagcacagtcctgggaaaggcctagggacctgtgggccg

SEQ ID NO: 230228 - DNA, 120 bp, Artificial Sequence
  ENSG00000119283_70 (sequence is synthesized)
gtgatgcgggcactgcagaccaggccaggccctcgggtaaagctctgaggagaggccaaaaccaggcttcaggttcgggaaggtgactgcttgcaactgcagtagcaggaacatgtcagg

SEQ ID NO: 230229 - DNA, 120 bp, Artificial Sequence
  ENSG00000119283_71 (sequence is synthesized)
tgcttactgggtgagacccagccggggaagcctctccaactcctcctagccctggaaaccagacacccagagccccaggctttctcggcacccagaagaagtggggagcgggcaaagcag

SEQ ID NO: 230230 - DNA, 120 bp, Artificial Sequence
  ENSG00000119283_72 (sequence is synthesized)
aaaacattcaatgcatgatgtaggattgctgcgttggcactaagctgttgtattaagcatgagaggtgtttgtttaacgttggcaaagggatttaacaagaaacaaaaagcttcgcgtcc

SEQ ID NO: 230231 - DNA, 120 bp, Artificial Sequence
  ENSG00000119283_73 (sequence is synthesized)
ttgttttgaccgtcgacagaagtccaattttcttgcctttctttatccccatttctcctccctccccttcccccatcacatccactttcggtcactcgttgttggtatttggtggcagct

SEQ ID NO: 230232 - DNA, 120 bp, Artificial Sequence
  ENSG00000119283_74 (sequence is synthesized)
cttggtcctattgctgtggatgttccactgaaaacacggggggtagcggggagtggtaaggaaagcaacttttttctaatttttgtattggtatccacaagcgtttgtattttttgaatt

SEQ ID NO: 230233 - DNA, 120 bp, Artificial Sequence
  ENSG00000119283_75 (sequence is synthesized)
gcaaacactgtgttttctggtctttgggggttagttgaactttctgtattaccttttggaaaacctgagttttaccacagtcttaagcagatttgaaataaattcttttgacactgccaa

SEQ ID NO: 230234 - DNA, 120 bp, Artificial Sequence
  ENSG00000119285_0 (sequence is synthesized)
aggtttccgggtgagggttgggctccttggtaccatgtgggaagcgctgtgaagagttgttgccttccaagatatacccaaattcccagttccagcccgtgtcattaaaactccgctggc

SEQ ID NO: 230235 - DNA, 120 bp, Artificial Sequence
  ENSG00000119285_1 (sequence is synthesized)
gtgaaagatgacgtccttagcccagcagctgcaacgactcgccctccctcaaagtgatgccagcctcttatctagagatgaagttgcttctttgttatttgaccctaaggaagcggccac

SEQ ID NO: 230236 - DNA, 120 bp, Artificial Sequence
  ENSG00000119285_2 (sequence is synthesized)
aatcgacagggacaccgccttcgccattggatgtactggcctggaagagttgcttggaattgatccttcctttgagcagtttgaagcaccgttgttcagtcagctagcaaaaaccttgga

SEQ ID NO: 230237 - DNA, 120 bp, Artificial Sequence
  ENSG00000119285_3 (sequence is synthesized)
gcgaagtgttcagaccaaagcagtaaacaaacagttggatgaaaacatttcattattccttattcacttgtcgccttacttcctgcttaagccagcacagaagtgtctggagtggttgat

SEQ ID NO: 230238 - DNA, 120 bp, Artificial Sequence
  ENSG00000119285_4 (sequence is synthesized)
tcacaggttccatatacatctctataatcaagatagcctcattgcttgtgttctgccataccacgagacaagaatatttgtgcgagtcatacagcttctaaaaattaataattcaaagca

SEQ ID NO: 230239 - DNA, 120 bp, Artificial Sequence
  ENSG00000119285_5 (sequence is synthesized)
cagatggttctggttgttgccagttaagcaatctggagtgccgttagctaaaggaactttgattacccactgctacaaagatcttggattcatggatttcatttgcagtttggtgacaaa

SEQ ID NO: 230240 - DNA, 120 bp, Artificial Sequence
  ENSG00000119285_6 (sequence is synthesized)
atctgtgaaggtttttgctgagtacccgggcagctcagctcagttgagggtgctcttggctttctatgcttctaccatagtgtcggcgctggtagctgcagaggacgtatcagacaatat

SEQ ID NO: 230241 - DNA, 120 bp, Artificial Sequence
  ENSG00000119285_7 (sequence is synthesized)
catcgccaaactatttccctatatccaaaagggattgaaatcatctttaccagattacagagctgcaacatacatgataatatgtcagatttctgtgaaagtgaccatggaaaatacctt

SEQ ID NO: 230242 - DNA, 120 bp, Artificial Sequence
  ENSG00000119285_8 (sequence is synthesized)
tgtgaattcattggcatcacagatcatcaaaacattgaccaagattccctctttgatcaaggatgggttaagttgcttgatagtgctcctgcagagacagaagccagagagccttgggaa

SEQ ID NO: 230243 - DNA, 120 bp, Artificial Sequence
  ENSG00000119285_9 (sequence is synthesized)
aaagccattccctcacttatgtaatgttcctgatcttattacaatacttcatgggatttctgaaacttacgatgtcagtcctcttctgcattacatgcttccccatctggtcgtctccat

SEQ ID NO: 230244 - DNA, 120 bp, Artificial Sequence
  ENSG00000119285_10 (sequence is synthesized)
cattcatcatgttacaggagaagaaactgaaggaatggatggtcaaatctacaagagacacttagaagctatacttacaaaaatatcactgaagaacaacttagaccatttgttggctag

SEQ ID NO: 230245 - DNA, 120 bp, Artificial Sequence
  ENSG00000119285_11 (sequence is synthesized)
ccttctatttgaagagtatatttcatatagttcacaggaagaaatggattctaataaagtgtctttgcttaatgaacaatttcttccactcattaggcttttagaaagcaaataccccag

SEQ ID NO: 230246 - DNA, 120 bp, Artificial Sequence
  ENSG00000119285_12 (sequence is synthesized)
aacattagatgttgtattagaggaacacttaaaggaaattgcagatctgaaaaaacaagagcttttccatcagtttgtttctctttctacaagtggaggaaagtatcagtttttagcaga

SEQ ID NO: 230247 - DNA, 120 bp, Artificial Sequence
  ENSG00000119285_13 (sequence is synthesized)
ttctgatacttctttgatgctcagcctgaatcatccacttgctcctgtgagaattctggccatgaatcatttgaaaaagatcatgaaaacatcaaaggagggtgttgatgaatctttcat

SEQ ID NO: 230248 - DNA, 120 bp, Artificial Sequence
  ENSG00000119285_14 (sequence is synthesized)
aaaagaagctgttttagcccgattaggtgatgataatatagatgttgttttgtcggctataagtgcttttgagattttcaaagaacacttcagttcagaagtgacgatttcaaatcttct

SEQ ID NO: 230249 - DNA, 120 bp, Artificial Sequence
  ENSG00000119285_15 (sequence is synthesized)
gaatctctttcaaagagcagaactttcaaagaatggagaatggtacgaggtacttaagatagccgctgacatattaattaaagaagagatactgagtgaaaatgatcagttgtcaaatca

SEQ ID NO: 230250 - DNA, 120 bp, Artificial Sequence
  ENSG00000119285_16 (sequence is synthesized)
ggtggttgtatgtttgctgccatttatggttatcaataatgatgatacggaatctgctgagatgaaaattgctatatatttatcaaaatcaggaatctgctccctgcaccctctattaag

SEQ ID NO: 230251 - DNA, 120 bp, Artificial Sequence
  ENSG00000119285_17 (sequence is synthesized)
aggctgggaagaagctcttgaaaatgtaattaaaagcacaaagccaggaaaactaatcggtgtagcaaatcagaagatgattgagttgttggctgataatataaatttaggagatccttc

SEQ ID NO: 230252 - DNA, 120 bp, Artificial Sequence
  ENSG00000119285_18 (sequence is synthesized)
ttcaatgttaaagatggtggaggatttaataagcgtgggtgaggaggagtcctttaacctgaagcagaaagtaacgtttcatgtgatcctgtctgtgctcgtctcttgttgttcatcttt

SEQ ID NO: 230253 - DNA, 120 bp, Artificial Sequence
  ENSG00000119285_19 (sequence is synthesized)
aaaagaaacccactttccatttgcgataagagtcttcagtttgttgcagaaaaaaataaagaagcttgaaagtgtcattactgcagtggaaatcccctcagaatggcacattgaactgat

SEQ ID NO: 230254 - DNA, 120 bp, Artificial Sequence
  ENSG00000119285_20 (sequence is synthesized)
gttagacagagggatcccagtggagctgtgggcacattatgtagaagagctcaacagcactcagagggtggccgtggaggactcggtttttcttgtattttccttgaaaaaatttattta

SEQ ID NO: 230255 - DNA, 120 bp, Artificial Sequence
  ENSG00000119285_21 (sequence is synthesized)
tgcactgaaagctcctaaatcttttcctaaaggtgatatatggtggaatcctgaacaactgaaagaagacagcagggactatctgcacttgctcattgggctgtttgagatgatgctcaa

SEQ ID NO: 230256 - DNA, 120 bp, Artificial Sequence
  ENSG00000119285_22 (sequence is synthesized)
tggtgccgatgctgttcatttcagagttctgatgaaacttttcataaaggtgcatctagaagatgtttttcagttattcaagttctgttctgttttatggacctatggttctagcctttc

SEQ ID NO: 230257 - DNA, 120 bp, Artificial Sequence
  ENSG00000119285_23 (sequence is synthesized)
aaatccactaaactgcagtgtgaaaacagtgctgcagactcaagctctttatgtgggctgtgcaatgctttcttctcagaagacacagtgtaaacaccaactggcatccatatcttctcc

SEQ ID NO: 230258 - DNA, 120 bp, Artificial Sequence
  ENSG00000119285_24 (sequence is synthesized)
agtggtgacatctttactcattaacctgggaagccccgtaaaagaagttcgtagggctgccattcagtgtctccaggccctcagtggagtggcatccccgttttatctgataatagatca

SEQ ID NO: 230259 - DNA, 120 bp, Artificial Sequence
  ENSG00000119285_25 (sequence is synthesized)
tttgatttctaaagcagaggagatcacttcagatgctgcctatgttattcaggatttggctactttatttgaggaactacagagagaaaagaaactgaaatctcatcagaagttgtctga

SEQ ID NO: 230260 - DNA, 120 bp, Artificial Sequence
  ENSG00000119285_26 (sequence is synthesized)
aactttgaaaaacttacttagttgtgtgtatagttgcccatcttatatagcaaaagatttgatgaaagtacttcagggagtcaacggtgagatggtgctttctcagctattgcctatggc

SEQ ID NO: 230261 - DNA, 120 bp, Artificial Sequence
  ENSG00000119285_27 (sequence is synthesized)
tgaacaactgctagaaaagatccagaaggagcccacagctgtgctgaaagatgaggccatggttctgcatctcactctgggaaagtataatgaattttcagtttcccttttaaatgagga

SEQ ID NO: 230262 - DNA, 120 bp, Artificial Sequence
  ENSG00000119285_28 (sequence is synthesized)
tccgaagagtctagatatatttataaaagctgtgcacacaacaaaggaactttacgcgggaatgccaaccattcagatcacagcccttgaaaagattacaaaaccattttttgcagccat

SEQ ID NO: 230263 - DNA, 120 bp, Artificial Sequence
  ENSG00000119285_29 (sequence is synthesized)
atcagatgaaaaagttcagcagaagcttttaagaatgttgtttgatttattggtgaactgtaaaaactcacattgtgctcagactgtcagcagtgtttttaaagggatttccgttaatgc

SEQ ID NO: 230264 - DNA, 120 bp, Artificial Sequence
  ENSG00000119285_30 (sequence is synthesized)
tgaacaagtccgaatagaactggagccaccagataaagctaaacccttgggcacagttcagcaaaaaagaaggcaaaaaatgcagcagaaaaaatcacaagatctagaatctgttcagga

SEQ ID NO: 230265 - DNA, 120 bp, Artificial Sequence
  ENSG00000119285_31 (sequence is synthesized)
agttggaggttcttactggcaaagagtaactctcatcctggaattactgcagcacaaaaagaagctcagaagtcctcagatattggtgccaactctttttaacttgctatcaagatgttt

SEQ ID NO: 230266 - DNA, 120 bp, Artificial Sequence
  ENSG00000119285_32 (sequence is synthesized)
agaacccttgccacaagagcagggaaatatggaatacaccaaacaattaattcttagttgtctgctcaacatctgccaaaaactatctccagatggtggcaaaatacccaaagatatttt

SEQ ID NO: 230267 - DNA, 120 bp, Artificial Sequence
  ENSG00000119285_33 (sequence is synthesized)
agatgaggagaagttcaacgtggagttgatagttcagtgcatccgcctttcggagatgccgcagacccatcaccatgcccttttacttttgggcactgttgctggaatatttccggataa

SEQ ID NO: 230268 - DNA, 120 bp, Artificial Sequence
  ENSG00000119285_34 (sequence is synthesized)
agttttacacaatatcatgtctatttttacatttatgggagccaatgtcatgcgcctagatgatacttacagttttcaagttattaacaagacagtgaaaatggttattcccgcacttat

SEQ ID NO: 230269 - DNA, 120 bp, Artificial Sequence
  ENSG00000119285_35 (sequence is synthesized)
aaatcattagtgtatttgtggatgcgctgccacacgtcccggagcacaggcgcctgcccatccttgttcaacttgttgatacactgggtgcagagaaattcctctggattctcctcatct

SEQ ID NO: 230270 - DNA, 120 bp, Artificial Sequence
  ENSG00000119285_36 (sequence is synthesized)
tgctttttgaacagtatgtcacaaaaacagtgctggcggctgcctatggcgaaaaggatgctattttagaagcagacactgaattttggttttcagtctgttgtgagtttagtgtccagc

SEQ ID NO: 230271 - DNA, 120 bp, Artificial Sequence
  ENSG00000119285_37 (sequence is synthesized)
atcagatacaaagcttgatgaatatcctccagtacttactaaagctgccagaggaaaaagaagaaaccattcccaaagcagtgtcatttaataagagtgaatcacaagaagaaatgctac

SEQ ID NO: 230272 - DNA, 120 bp, Artificial Sequence
  ENSG00000119285_38 (sequence is synthesized)
aggtttttaatgtagagactcacactagcaagcaactgcggcattttaaatttttgtcagtgtccttcatgtctcagctcctgtcttccaataattttctgaaaaaggtagttgagagtg

SEQ ID NO: 230273 - DNA, 120 bp, Artificial Sequence
  ENSG00000119285_39 (sequence is synthesized)
gtggtcctgagattttaaaaggccttgaagagaggttgctggagaccgttctcggctatatcagtgcagttgcacagtccatggaaaggaacgcagacaaactcaccgtgaagttctggc

SEQ ID NO: 230274 - DNA, 120 bp, Artificial Sequence
  ENSG00000119285_40 (sequence is synthesized)
gcgcgctccttagtaaagcttacgacctgttagataaggtcaatgccttgctgcccacagagacattcattcctgtgatcagagggctggtgggcaatcccctgccatctgttcgccgca

SEQ ID NO: 230275 - DNA, 120 bp, Artificial Sequence
  ENSG00000119285_41 (sequence is synthesized)
aagcgctggaccttttgaataacaagctgcagcaaaatatatcctggaagaagacaatagttacccgtttcctaaaactggttccagaccttttggccattgtgcagcgtaagaaaaagg

SEQ ID NO: 230276 - DNA, 120 bp, Artificial Sequence
  ENSG00000119285_42 (sequence is synthesized)
aaggggaagaagaacaagcaatcaacagacagacagcgttgtataccttaaagcttttatgcaagaattttggtgcagaaaatccagatccttttgtcccagtgctgaacactgctgtga

SEQ ID NO: 230277 - DNA, 120 bp, Artificial Sequence
  ENSG00000119285_43 (sequence is synthesized)
aactgattgctccagagagaaaggaggagaagaatgtcctgggaagcgcgctgctgtgcatagcagaggtgacctccaccctggaggcgctggccatcccccagcttcccagcctgatgc

SEQ ID NO: 230278 - DNA, 120 bp, Artificial Sequence
  ENSG00000119285_44 (sequence is synthesized)
catcgttgctgacaacaatgaagaacaccagcgagctggtctccagcgaggtctacctgctcagtgccttggctgctctgcagaaggttgtggagactctcccgcacttcatcagcccct

SEQ ID NO: 230279 - DNA, 120 bp, Artificial Sequence
  ENSG00000119285_45 (sequence is synthesized)
atctggaaggcattctctcccaggtgattcatctggagaaaatcactagtgaaatgggttctgcgtcacaggctaatatccgtctcacatctcttaaaaagacactggctaccacacttg

SEQ ID NO: 230280 - DNA, 120 bp, Artificial Sequence
  ENSG00000119285_46 (sequence is synthesized)
caccccgagtcctgttgcccgccatcaaaaaaacttacaagcagattgagaagaactggaagaatcacatgggtccgtttatgagcatcttgcaagagcatattggggtgatgaagaagg

SEQ ID NO: 230281 - DNA, 120 bp, Artificial Sequence
  ENSG00000119285_47 (sequence is synthesized)
aagagctcacctcccatcagtctcagctaaccgcctttttcctggaagccctggacttccgagcccagcactctgagaacgatctggaggaagttggaaaaacggaaaattgtatcattg

SEQ ID NO: 230282 - DNA, 120 bp, Artificial Sequence
  ENSG00000119285_48 (sequence is synthesized)
actgtctagtagccatggttgtcaaactttccgaggtcacattcaggcccctgttcttcaagctgtttgattgggctaaaacagaagatgccccaaaggacaggttgttgacattttaca

SEQ ID NO: 230283 - DNA, 120 bp, Artificial Sequence
  ENSG00000119285_49 (sequence is synthesized)
acttggcagattgcattgctgaaaagctgaaagggctttttactctgtttgccggccacttagtgaagccttttgctgacaccttgaaccaggtgaacatctccaaaacagatgaagcat

SEQ ID NO: 230284 - DNA, 120 bp, Artificial Sequence
  ENSG00000119285_50 (sequence is synthesized)
tttttgactctgaaaatgaccctgaaaagtgctgcttgctgttgcagtttattttgaactgtttatacaaaatcttcctttttgatacccagcattttataagtaaagagagagcagaag

SEQ ID NO: 230285 - DNA, 120 bp, Artificial Sequence
  ENSG00000119285_51 (sequence is synthesized)
ccttgatgatgcctctggtggatcagctggaaaacaggcttgggggagaagagaaattccaggaacgggtgacaaagcacctgataccatgcatcgcacagttttcggtggccatggcgg

SEQ ID NO: 230286 - DNA, 120 bp, Artificial Sequence
  ENSG00000119285_52 (sequence is synthesized)
atgactctctttggaaaccactgaactaccagattctgctaaagacgagagactcctcgcctaaggttcgatttgctgctttgattactgtgttagcactggctgaaaaactaaaggaga

SEQ ID NO: 230287 - DNA, 120 bp, Artificial Sequence
  ENSG00000119285_53 (sequence is synthesized)
attatattgtcttgctaccagaatccattcctttcttagcagagttgatggaagatgaatgtgaagaagtagaacatcagtgccaaaagactattcagcaactggaaactgtcctgggag

SEQ ID NO: 230288 - DNA, 120 bp, Artificial Sequence
  ENSG00000119285_54 (sequence is synthesized)
agccactccagagctatttctaagactttctgtggtgtttcatactctactcagagttcacactcatatttcatatttttatttttgggtgttgggtgccatgttacttttggtgcctta

SEQ ID NO: 230289 - DNA, 120 bp, Artificial Sequence
  ENSG00000119285_55 (sequence is synthesized)
atacacctacttggattacttacaaatgttttatcacttctttacaaaatccccacctggcttgtgctgccacataagcctctcctgcctatcgtatagagctgcagaaagagtaaatga

SEQ ID NO: 230290 - DNA, 120 bp, Artificial Sequence
  ENSG00000119285_56 (sequence is synthesized)
tacacggtatttttatacagactgctgtgtttgtttaaacatttattattctcttcctgattgatggtaataatattagacttgttaattttagcacccaaagctgacgcctcatttgca

SEQ ID NO: 230291 - DNA, 120 bp, Artificial Sequence
  ENSG00000119285_57 (sequence is synthesized)
ctgtaagccttaactcttctgtacagcagtatcttacatacatggtatccatgttgcagatttcactcaaagttgctctatttcaagaaaatgaagttatttagcaatcaacagaagtac

SEQ ID NO: 230292 - DNA, 120 bp, Artificial Sequence
  ENSG00000119285_58 (sequence is synthesized)
ttttgactgtaaagcctacttttcattttgggtaggcgaacttcagccttcgtttctttgttgtgcccataaagagaagtggttctggaatgctttttttaacccaggagtgtgactgtc

SEQ ID NO: 230293 - DNA, 120 bp, Artificial Sequence
  ENSG00000119285_59 (sequence is synthesized)
acctttatcctttgttcttttgggaaacgggagagatgaaggcaacacgctgcttctaaaacagctcacacctggctgctcacacagagggcccagaaacactgggtggcacgaggaagc

SEQ ID NO: 230294 - DNA, 120 bp, Artificial Sequence
  ENSG00000119285_60 (sequence is synthesized)
tcctccaggattcagaatgaacccagttccattggtggttaactaagaactacttgtctaagaaagtaagtatcagtagatttttttcaatgctttgaagtgccctaatctctagtactg

SEQ ID NO: 230295 - DNA, 120 bp, Artificial Sequence
  ENSG00000119285_61 (sequence is synthesized)
ggtcatggtgaagttggaaagtgagggttcaaataaaattagatctgccccctttttaaaggcatctaagaacatcccgtagaatgttcgcattgagtttaaaagcctttgaagctaata

SEQ ID NO: 230296 - DNA, 120 bp, Artificial Sequence
  ENSG00000119285_62 (sequence is synthesized)
tagaagtttaatgcagaaatgtggcaagcaaaaggccaacttgcattttagagacagagcttgctagtatagaagtgcatatttctaagaaatgtctcagtaaaattcattaataaatac

SEQ ID NO: 230297 - DNA, 120 bp, Artificial Sequence
  ENSG00000119285_63 (sequence is synthesized)
taatagctttttaaatttttttcctccacgtaaaatgaaaatgaacttaagacttacaaggaatgatgtgagtgggctatttttttcctaaatgcctcacagtctccaacagctcagtta

SEQ ID NO: 230298 - DNA, 120 bp, Artificial Sequence
  ENSG00000119285_64 (sequence is synthesized)
agcactctgatggtctttatggagaaaaataactctgggggattctcgagtcttcttgccttctacagctttccctgtggcaccctccacccccaaccagtgtctttgagcttggtgaga

SEQ ID NO: 230299 - DNA, 120 bp, Artificial Sequence
  ENSG00000119285_65 (sequence is synthesized)
ctctgcatacattaatatgaaaagctggaaaagaattaagggctagcgatttctacactgagtacttttaaaaaaataagattgacaatggtattcttttcaatatatggatagaaataa

SEQ ID NO: 230300 - DNA, 120 bp, Artificial Sequence
  ENSG00000119285_66 (sequence is synthesized)
tatctaaaatctgttctgaaaatattcctaaatcctggcagagttctgccccagtctaatgtgataaaatgatcctcactgactgagcttttttccctccccactcccaaacctttgaaa

SEQ ID NO: 230301 - DNA, 120 bp, Artificial Sequence
  ENSG00000119285_67 (sequence is synthesized)
tttcctgtaacaagatctgacctgtaaagatcccatatacatggaacttctgccaactcccctcaaataatagaaaaatcacagaaatggaaccatttaacttgctgatacaggtttgat

SEQ ID NO: 230302 - DNA, 120 bp, Artificial Sequence
  ENSG00000119285_68 (sequence is synthesized)
tttaatcacgtaaagtggaagagtgctttgatctcagttgctaatgatgatggactaatctttagaagaacggaggccttgattggtgatttcatgggaacaaaacagatttctgcatta

SEQ ID NO: 230303 - DNA, 120 bp, Artificial Sequence
  ENSG00000119285_69 (sequence is synthesized)
cctctgcctgctttgtgggtcccttagttggcgtacactttctgatagtgcctgccttatgaatgcctgaagtctaatcctgaccttactttgttgcccataaatatctttcaaattgaa

SEQ ID NO: 230304 - DNA, 120 bp, Artificial Sequence
  ENSG00000119285_70 (sequence is synthesized)
agtgcttgtaagaggtcagatgttaccattaacaaaaatcatggaaaagtaagtcagagagaggcataaaataaaaattttaaatctttaccattattttattttatgaagtatttgttg

SEQ ID NO: 230305 - DNA, 120 bp, Artificial Sequence
  ENSG00000119285_71 (sequence is synthesized)
ttaggtatattaagagattgatacaatgtccattgtgtgagataagcatgctcttctgcctttaaattcttttttgttgatagtgaaaagtagaactactggtgattttgagtaaatggt

SEQ ID NO: 230306 - DNA, 120 bp, Artificial Sequence
  ENSG00000119285_72 (sequence is synthesized)
gaactactggtgattttgagtaaatggtctaacctcattagtttttttttgagatagagtcttgctgggcactcaggctggagtgcaatattgaaatcttggctcactgcaacctctgcc

SEQ ID NO: 230307 - DNA, 120 bp, Artificial Sequence
  ENSG00000119314_0 (sequence is synthesized)
gttcccactctccttccacctcggaccggccggggctccgcagagccaaagctcgcttgtccccggaaccgccctgctgccgccgcctgcttcctctgctcgcggttagcccgtcagtcc

SEQ ID NO: 230308 - DNA, 120 bp, Artificial Sequence
  ENSG00000119314_1 (sequence is synthesized)
ctgctctgtgcgcgcctccatctgggccatggatggtgttgttacagatcttataacagtcggtttaaagcggggatctgatgagcttctttcttctggcatcattaacggaccttttac

SEQ ID NO: 230309 - DNA, 120 bp, Artificial Sequence
  ENSG00000119314_2 (sequence is synthesized)
catgaatagttctactccttctacagctaatgggaatgacagcaagaaatttaaacgagatagacctccctgttcgccttcccgtgttctccatcttcgaaaaattccatgtgatgtcac

SEQ ID NO: 230310 - DNA, 120 bp, Artificial Sequence
  ENSG00000119314_3 (sequence is synthesized)
cgaagcagagatcatatcattaggtctaccatttggcaaagtaactaatcttttgatgttgaaaggaaaaagccaggctttcttagaaatggcttctgaggaagctgccgttactatggt

SEQ ID NO: 230311 - DNA, 120 bp, Artificial Sequence
  ENSG00000119314_4 (sequence is synthesized)
gaattattacactcctattactcctcaccttcgaagccagcctgtttatattcagtattccaatcacagagaacttaagactgacaatctacctaatcaagctcgagcccaagctgcact

SEQ ID NO: 230312 - DNA, 120 bp, Artificial Sequence
  ENSG00000119314_5 (sequence is synthesized)
gcaggctgtcagtgccgtccaatcaggaagcctggccctttctggaggtccttccaatgaaggcacagtcctacctgggcagagccctgtgcttcgaataattattgaaaacctctttta

SEQ ID NO: 230313 - DNA, 120 bp, Artificial Sequence
  ENSG00000119314_6 (sequence is synthesized)
ccctgttaccctggaagttcttcatcagatattttctaaatttggcacagtcttgaagattatcacctttacaaagaataatcagtttcaagccttgcttcagtatgctgacccagtaaa

SEQ ID NO: 230314 - DNA, 120 bp, Artificial Sequence
  ENSG00000119314_7 (sequence is synthesized)
tgcacattatgccaaaatggctctggatggccagaatatctataatgcatgctgcactctgcgcattgacttctccaagctcaccagccttaatgtgaaatataataatgacaaaagcag

SEQ ID NO: 230315 - DNA, 120 bp, Artificial Sequence
  ENSG00000119314_8 (sequence is synthesized)
agacttcactcgcttagaccttcctactggtgatggccagccatcccttgaaccccctatggctgctgcttttggtgcaccgggtataatttcttcaccatatgcaggggctgctggatt

SEQ ID NO: 230316 - DNA, 120 bp, Artificial Sequence
  ENSG00000119314_9 (sequence is synthesized)
tgccccagccattggatttcctcaagctacaggtctatcagttccagctgttcctggagctcttggtcctctcacaatcacctcttctgctgtcactggaaggatggccattcctggggc

SEQ ID NO: 230317 - DNA, 120 bp, Artificial Sequence
  ENSG00000119314_10 (sequence is synthesized)
tagtggtataccaggaaattctgttctactcgtcacaaatctcaatcctgatcttatcacaccacatgggctttttatcctatttggagtctatggtgatgtacatcgagtgaagattat

SEQ ID NO: 230318 - DNA, 120 bp, Artificial Sequence
  ENSG00000119314_11 (sequence is synthesized)
gtttaataagaaagaaaatgccttggttcagatggcggatgcaaatcaagctcagctagcaatgaaccatctaagtggtcagagactttatgggaaagtgcttcgtgctacactgtccaa

SEQ ID NO: 230319 - DNA, 120 bp, Artificial Sequence
  ENSG00000119314_12 (sequence is synthesized)
acatcaagcagtacagcttcctcgagagggacaagaagaccaaggtctgactaaggatttcagcaatagtcctttgcatcgctttaaaaagccgggctctaaaaacttccagaatatctt

SEQ ID NO: 230320 - DNA, 120 bp, Artificial Sequence
  ENSG00000119314_13 (sequence is synthesized)
tccaccatcagccactctgcatctttccaacattcccccttctgttacagtggatgatctgaagaaccttttcatagaagctggatgttcagtgaaggcttttaaattctttcagaaaga

SEQ ID NO: 230321 - DNA, 120 bp, Artificial Sequence
  ENSG00000119314_14 (sequence is synthesized)
tcattgagcttcataaccatgaccttggagaaaatcaccacctcagagtttccttctcaaaatctacaatctgacttttctgtgaatttttctcctaaaactggaccataatttcagtaa

SEQ ID NO: 230322 - DNA, 120 bp, Artificial Sequence
  ENSG00000119314_15 (sequence is synthesized)
aaccttcagacatagactgaagcagctcaagaccaattttgcctctttcacaaaaataactctgagtttgatattcaagtatattttaaaaatcaagggattttttttttttgtattccc

SEQ ID NO: 230323 - DNA, 120 bp, Artificial Sequence
  ENSG00000119314_16 (sequence is synthesized)
cctgcccccgccagtcaaaggtttcttttccctttttaccatggtttctacaaaaataaccttcaggaaaaagaaaatcaggaaaaaaattttttttcaataatcttattccctatatta

SEQ ID NO: 230324 - DNA, 120 bp, Artificial Sequence
  ENSG00000119314_17 (sequence is synthesized)
aattagatttgaagaggattaacgttgttttagtttgggtccagatcagccttatacaacatttctaaactcatttgtacttttaaaaaatttaaacacagacttctaaaattacttgat

SEQ ID NO: 230325 - DNA, 120 bp, Artificial Sequence
  ENSG00000119314_18 (sequence is synthesized)
gtaagtaatttaaatcacttatgaccaagttattaaccttatgaatcagaagtctgacccttgtaggaaattatattcacatataaagtacatcagatctttgccatatattgatggtta

SEQ ID NO: 230326 - DNA, 120 bp, Artificial Sequence
  ENSG00000119314_19 (sequence is synthesized)
ttatgcataaacacattgagttgtgttggaagcagatttataaacctgcatgttttctttgaatgatttctttttttcactgtaagacactcctttaaataatgcctatctttaactttt

SEQ ID NO: 230327 - DNA, 120 bp, Artificial Sequence
  ENSG00000119314_20 (sequence is synthesized)
taagactatttggaaaaatgcagtgtctcagctgtccccagggaaattaagtggaattcaactaagatctgttaataagatgtcagaataactaataattttattaggaaaaaatcatgt

SEQ ID NO: 230328 - DNA, 120 bp, Artificial Sequence
  ENSG00000119314_21 (sequence is synthesized)
tcaaaatgacacttatttgtcaagtaatatgatcttggaaaattttaaagaaaaataatcctacttataaactacttttttataattgttttcagaaaaaaagtttacagtcttaaggaa

SEQ ID NO: 230329 - DNA, 120 bp, Artificial Sequence
  ENSG00000119314_22 (sequence is synthesized)
ttaaggaaaatattcaggtctatcatatggtttgacagattttttaaaagttatttttggtaaggtcttcttttagaaaaaaattaatctcaagggttttttgtaccactataatctcta

SEQ ID NO: 230330 - DNA, 120 bp, Artificial Sequence
  ENSG00000119314_23 (sequence is synthesized)
atacttactcagaattactgtgtatttacttaatttcttattatgtgccttattatgtgcttaagatacaataggttagagtttaatctaaatatcttgaaagctatattgtgggcttgg

SEQ ID NO: 230331 - DNA, 120 bp, Artificial Sequence
  ENSG00000119314_24 (sequence is synthesized)
taagcattttgttttttctttctctgttttggtaaggatttaaaatttttttcattgcaattttaagtggttttcaataagtaatagtttttatcaaatttttggtgcttggtgcagaga

SEQ ID NO: 230332 - DNA, 120 bp, Artificial Sequence
  ENSG00000119314_25 (sequence is synthesized)
cggtgtggggaagggtgaatggttttgggaataattcagtgcacacctgtaggcctctttacattgtgactgataggggttattgcatatcaatttggggctgtagagtgcaatctcagt

SEQ ID NO: 230333 - DNA, 120 bp, Artificial Sequence
  ENSG00000119314_26 (sequence is synthesized)
ttcatctttttcacccatcagaatttgtctcaggattacttggtttttctcagtcctcaagcgagaacttgcttttctttgttaatgtgactttcattactgagtacccacgtatttgga

SEQ ID NO: 230334 - DNA, 120 bp, Artificial Sequence
  ENSG00000119314_27 (sequence is synthesized)
gtatgagaaggtgggttatttctcatactctgtccctctctttttcattgaatgtaagagtacattttaatgttgcttcagtgattgtataatgtaaaattgtttctttttaataagaaa

SEQ ID NO: 230335 - DNA, 120 bp, Artificial Sequence
  ENSG00000119314_28 (sequence is synthesized)
attgttgatcagaattttttaaagcagaatttgtcaaaagggtcatttttttgtctaccccttttacacttttcagattctcaaagtgtctcatctcaacttttaaaagaataaagaata

SEQ ID NO: 230336 - DNA, 120 bp, Artificial Sequence
  ENSG00000119314_29 (sequence is synthesized)
aaaagaataaagaatatcttgctgggcatggtggtgtgcgcctgtgcgcctgtagtcccagctacaggctgagcctgtaggcaggaggctacaggcaggaggatcacttgagcccaggag

SEQ ID NO: 230337 - DNA, 120 bp, Artificial Sequence
  ENSG00000119314_30 (sequence is synthesized)
gctatgatcacatttgtgaatagccacttcactccagccctggaacatagtgtgaccccttctcttaaaagtaaaaattaagaaaatctcaatctctttgctgtattccagtgattaatt

SEQ ID NO: 230338 - DNA, 120 bp, Artificial Sequence
  ENSG00000119314_31 (sequence is synthesized)
tgaacatagggaggtttttacagaagaaattttaccaaaaaatagagactgcaagagatgatacagattgtttaaaaagcagaattcactcaccactgagcaacacttagttggtagaat

SEQ ID NO: 230339 - DNA, 120 bp, Artificial Sequence
  ENSG00000119314_32 (sequence is synthesized)
tatgtagttgtgggagtttttagttttttgtttttttacttatgaaataagttttgacctagacacaaggggtatatgaaggaggaaaaaaatttctttgcaaaatctcccaaaacttgc

SEQ ID NO: 230340 - DNA, 120 bp, Artificial Sequence
  ENSG00000119314_33 (sequence is synthesized)
ttttttttcccttccacacaggcactattataattttcagtgccatgttaaattggattatttcatttactttaagttaggaattactgtgtaatttattaattcatgattctcataaca

SEQ ID NO: 230341 - DNA, 120 bp, Artificial Sequence
  ENSG00000119314_34 (sequence is synthesized)
ttcagcataagtgtagcaaagttgctaataacggaaggggatcatagtggtgttgaatgtaactttgaagtagggaatggccttttaagtctgagagagaacatttgaatccttttcagg

SEQ ID NO: 230342 - DNA, 120 bp, Artificial Sequence
  ENSG00000119314_35 (sequence is synthesized)
gatttgtgtaggggtgtgtttgtgtgtgtgtgtgaatgtgtgtgtgtgtagataagtgtatatacataaatacactcttctaaagttgtatatacatatgcacattacatacattttaat

SEQ ID NO: 230343 - DNA, 120 bp, Artificial Sequence
  ENSG00000119314_36 (sequence is synthesized)
ttattgacaaaattaaccaaattaagatttggagatgtgggatgttcttgttttaaaatagcatgtttgaaaccatcagtttgtgtctaaaattagctgtagcacatggatgttgtccat

SEQ ID NO: 230344 - DNA, 120 bp, Artificial Sequence
  ENSG00000119314_37 (sequence is synthesized)
attaagctatttgctgtttgaattatagaggtctacagtatttgtgttggcatagtttttgtaaaaaaaagattaaaaaatatcaggatggtggaaaaactagatctgtgtatctctgtt

SEQ ID NO: 230345 - DNA, 120 bp, Artificial Sequence
  ENSG00000119314_38 (sequence is synthesized)
ttggcatgcatttattcagtatcttctagcaatggtttttctctgttgatctaccgtagtatcctatttttaagtttattttatttttaaggagtattgtcatcacttttcaaggtgtct

SEQ ID NO: 230346 - DNA, 120 bp, Artificial Sequence
  ENSG00000119314_39 (sequence is synthesized)
tgacttctacacaaagtatatatattcaggactttaaaaaatagcagtacacatttaacagtagcgaattacaccaaaatgatttactttgagatttgaataatttgcatagcagtaaaa

SEQ ID NO: 230347 - DNA, 120 bp, Artificial Sequence
  ENSG00000119314_40 (sequence is synthesized)
tgtgttttgtgtaacatacaaatagaaaaatgacccagtatcttaattgatacttactggagagtatcagaattacccagcagctcttacagaatgccataaattctttaagactaaata

SEQ ID NO: 230348 - DNA, 120 bp, Artificial Sequence
  ENSG00000119314_41 (sequence is synthesized)
ttgaaatcaattatttgaagtaatgtttctgatttactgttaaaagttgctgagctcagtttttggagatatcatttatgcctgcctgttcccttatgacagtgaggccttctttggctc

SEQ ID NO: 230349 - DNA, 120 bp, Artificial Sequence
  ENSG00000119314_42 (sequence is synthesized)
cacctagtatgataatcatgggttctgttttagttgatgagaagtggctcctatgaatgcctctgctcaatttctttttattttactttattttatttttaggggtctcgccaactcctg

SEQ ID NO: 230350 - DNA, 86 bp, Artificial Sequence
  ENSG00000119314_43 (sequence is synthesized)
ctgttcttttcagtgtctccgtgccatcagtcagcagtgcttacatgtttagcatattgtcatgcagtttctcttctgttcccacg

SEQ ID NO: 230351 - DNA, 120 bp, Artificial Sequence
  ENSG00000119314_44 (sequence is synthesized)
gtttagcatattgtcatgcagtttctcttctgttcccacgagatatttttggacaaaaaattgacaaaagtacatgtgtttttccccacctatcccttagaaaacctaatgtgtactgct

SEQ ID NO: 230352 - DNA, 120 bp, Artificial Sequence
  ENSG00000119314_45 (sequence is synthesized)
atttttaaaaccaaaaagagacagcgtgacgatgcgtaaagcatttttcttagcctttcctttgtcttgatctgttaatgagaacaaaactgccagactcaaaatactctactattgtgc

SEQ ID NO: 230353 - DNA, 120 bp, Artificial Sequence
  ENSG00000119314_46 (sequence is synthesized)
tgaaagaaatacaatttagattgcacaaaatttgaaaatataactcagctgtcttttaaaagagttgtgttgttatctacaagactattagcagtcttttttcagagcaaattttaacag

SEQ ID NO: 230354 - DNA, 120 bp, Artificial Sequence
  ENSG00000119314_47 (sequence is synthesized)
ctagttgtgagtggtttaaaatatagaaaattattaaaatcttagtttgaggggttttatagtgggagaaaaaacaggaccaaagtttatgtgccttcttcagtagtcttaattgacctt

SEQ ID NO: 230355 - DNA, 120 bp, Artificial Sequence
  ENSG00000119314_48 (sequence is synthesized)
ttcttcctatttgagactaaagtagtatcagtattctggttttcaggaaatatgtactatatagttttaaaagaatgttgtcccaccaactattcatccaagcaaagaattgtaactata

SEQ ID NO: 230356 - DNA, 120 bp, Artificial Sequence
  ENSG00000119314_49 (sequence is synthesized)
aataaagtctcagttacacttttgcctttatcacataatattcattgtagagcattgtgcaggtccaagaatagagctgctcaaaatctttgtggtagtttccttagtttttgtaacctg

SEQ ID NO: 230357 - DNA, 120 bp, Artificial Sequence
  ENSG00000119314_50 (sequence is synthesized)
aggcatatgttccagagaacagggatatttgtctggtccagtgaccttggtgatcatagtcataattgaaagatgcctatggcatgcttaaatcagcattgtcaactgatttgttgttgt

SEQ ID NO: 230358 - DNA, 120 bp, Artificial Sequence
  ENSG00000119314_51 (sequence is synthesized)
attattttcacttcttggatctatgtagtagttgtaataacaaatatttaaatagctatttttttgatgccattaaaaaaatcatactctggccttttttcccccttactgttgtttccc

SEQ ID NO: 230359 - DNA, 120 bp, Artificial Sequence
  ENSG00000119314_52 (sequence is synthesized)
agatcttttaaaaattcatcccatatccagaaagtaccagttataaagattgctgaccaagcaaagttttgcatcaaagtgtcacctcattgctctgaccaaagactgactgttgtggtt

SEQ ID NO: 230360 - DNA, 120 bp, Artificial Sequence
  ENSG00000119314_53 (sequence is synthesized)
ttaactcctctctgtaaagcattttgcattttccccaagctcctttctgaaagaagaaccagtgcagagcggcctttactttcaatttctactgctgaatagactacttagagaaaatgt

SEQ ID NO: 230361 - DNA, 120 bp, Artificial Sequence
  ENSG00000119314_54 (sequence is synthesized)
gagtttcagtgtgaacagaatggattaggatgacgagtttgatgggcattttcagtactgtatctaagaaaaaaaaaatagcacagctaggagcctctgacattgtctggtgttttacgt

SEQ ID NO: 230362 - DNA, 120 bp, Artificial Sequence
  ENSG00000119314_55 (sequence is synthesized)
ggtctgttcatcaaaattccccttttcagtttttaagaatgttcgtctaacagaagaaaatgctgtaaatatttgtaacaacattttttttaacaaggccaaaaaagaaaaaaaggtttt

SEQ ID NO: 230363 - DNA, 120 bp, Artificial Sequence
  ENSG00000119314_56 (sequence is synthesized)
tgggaacaaatgaacttataaagtggttttatataaaacatcaattgtcttgtatattttggataagcagcagtaccagctttcatttgtaacagtctgtggcattggaaaaaaaggagt

SEQ ID NO: 230364 - DNA, 120 bp, Artificial Sequence
  ENSG00000119314_57 (sequence is synthesized)
ctgtgattgttgaagtgaattatgttataaatgcaaagagaagataaaatattaaaaaacatattttctaaatgcgtagtgcatggttaattcaagcttctgtacactacagtatattcc

SEQ ID NO: 230365 - DNA, 120 bp, Artificial Sequence
  ENSG00000119314_58 (sequence is synthesized)
attttcgttcagtttgtatatttgctgactattacttgatatctctaatctcttttcctaacaaatatagcattgtagcatgccttttaataaatgtcatgacatctgtactctcttaaa

SEQ ID NO: 230366 - DNA, 120 bp, Artificial Sequence
  ENSG00000119314_59 (sequence is synthesized)
atttttctgtgttcttgtctgtactttgggtttccctttgtcttacctgtaattctaatgatgtcctattttcttttcttttccatagccatccatctaaacgtgtcatggttagtgaat

SEQ ID NO: 230367 - DNA, 120 bp, Artificial Sequence
  ENSG00000119314_60 (sequence is synthesized)
agtgagcacatattcaaacaatgttcaaaatgggaaaaacacaaaatctattaactgtctctgtcttcatttaggaataattctcgttttgaggagcaaagtgctttcctaatcttccta

SEQ ID NO: 230368 - DNA, 120 bp, Artificial Sequence
  ENSG00000119314_61 (sequence is synthesized)
tgatgcaccttctctggcactgccccgtaatgcaggggcatggcggcatgctttcttgcttgcacactcactctcctttttctttctctctttctccccatatgtgcagtgccaaactac

SEQ ID NO: 230369 - DNA, 120 bp, Artificial Sequence
  ENSG00000119314_62 (sequence is synthesized)
agttggaacactatttccagttttgttcagtatttggcttccctacggcattagtatacatacactttgagacacaaggtgtgatctcaaaccaaatttgtgtcctctttaaaaaggtag

SEQ ID NO: 230370 - DNA, 120 bp, Artificial Sequence
  ENSG00000119314_63 (sequence is synthesized)
cacagatactagctgatgctacattccttttccttagacaaacgttttacttctcagatctttaaagaattgttggattgcagaagtctagacttagcgttcattgtatattttagtctc

SEQ ID NO: 230371 - DNA, 120 bp, Artificial Sequence
  ENSG00000119314_64 (sequence is synthesized)
ctggaagtgggaatttattttgaatggaatagaaaattaggtaatcactactaatctttgctggcttacctgtaaaatctgtggtctccataaatactgggaaaataaataggtattttt

SEQ ID NO: 230372 - DNA, 120 bp, Artificial Sequence
  ENSG00000119314_65 (sequence is synthesized)
ccgccgcctgcttcctctgctcgcggttagcccgtcagtccctgctctgtgcgcgcctccatctgggccatggatgggctttcttagaaatggcttctgaggaagctgccgttactatgg

SEQ ID NO: 230373 - DNA, 120 bp, Artificial Sequence
  ENSG00000119314_66 (sequence is synthesized)
ggcgaggtggggcgagcggccgacggcgggtgcacgcgtcggtacacgtctgggcggcgacctggtcgcaagccatggtcccacgcggggtcccagggccgccgcgggacttggccgagg

SEQ ID NO: 230374 - DNA, 120 bp, Artificial Sequence
  ENSG00000119314_67 (sequence is synthesized)
tctcccgacttgtgctgtgagatacgttaacgctttctcgacaccaggggtctggacttagtgaccatggacgcttccccctcacctttctctctccccaagaaacttaatgaattatct

SEQ ID NO: 230375 - DNA, 120 bp, Artificial Sequence
  ENSG00000119318_0 (sequence is synthesized)
gagtcacgatgatggcggccaccatcctgtggtgagctagcggattccctgcttgtctcgccgaccccctcgcgccttctgcagactccgtggctggcgctcggcgcgtgaggaagcacg

SEQ ID NO: 230376 - DNA, 120 bp, Artificial Sequence
  ENSG00000119318_1 (sequence is synthesized)
gcggcccgagttcgcggggaaggccgcagtcgcggaggcagcggcgcggtccggggcacgggctgggggagaggccgctccgctgggcgaatgtgacaagcccccacccccaccgccttc

SEQ ID NO: 230377 - DNA, 120 bp, Artificial Sequence
  ENSG00000119318_2 (sequence is synthesized)
ggggccccgccaggccacagaccccgcccagcggccagcacccggcgcaggcccggcagccgagctgcgcggcggcaccatgcaggtcaccctgaagaccctccagcagcagaccttcaa

SEQ ID NO: 230378 - DNA, 120 bp, Artificial Sequence
  ENSG00000119318_3 (sequence is synthesized)
accctgaagaccctccagcagcagaccttcaagatagacattgaccccgaggagacggtgaaagcactgaaagagaagattgaatctgaaaaggggaaagatgcctttccagtagcaggt

SEQ ID NO: 230379 - DNA, 120 bp, Artificial Sequence
  ENSG00000119318_4 (sequence is synthesized)
caaaaattaatttatgcaggcaaaatcctcaatgatgatactgctctcaaagaatataaaattgatgagaaaaactttgtggtggttatggtgaccaaacccaaagcagtgtccacacca

SEQ ID NO: 230380 - DNA, 120 bp, Artificial Sequence
  ENSG00000119318_5 (sequence is synthesized)
gcaccagctacaactcagcagtcagctcctgccagcactacagcagttacttcctccaccaccacaactgtggctcaggctccaacccctgtccctgccttggcccccacttccacacct

SEQ ID NO: 230381 - DNA, 120 bp, Artificial Sequence
  ENSG00000119318_6 (sequence is synthesized)
gcatccatcactccagcatcagcgacagcatcttctgaacctgcacctgctagtgcagctaaacaagagaagcctgcagaaaagccagcagagacaccagtggctactagcccaacagca

SEQ ID NO: 230382 - DNA, 120 bp, Artificial Sequence
  ENSG00000119318_7 (sequence is synthesized)
actgacagtacatcgggtgattcttctcggtcaaacctttttgaagatgcaacgagtgcacttgtgacgggtcagtcttacgagaatatggtaactgagatcatgtcaatgggctatgaa

SEQ ID NO: 230383 - DNA, 120 bp, Artificial Sequence
  ENSG00000119318_8 (sequence is synthesized)
cgagagcaagtaattgcagccctgagagccagtttcaacaaccctgacagagcagtggagtatcttttaatgggaatccctggagatagagaaagtcaggctgtggttgacccccctcaa

SEQ ID NO: 230384 - DNA, 120 bp, Artificial Sequence
  ENSG00000119318_9 (sequence is synthesized)
gcagctagtactggggctcctcagtcttcagcagtggctgcagctgcagcaactacgacagcaacaactacaacaacaagttctggaggacatccccttgaatttttacggaatcagcct

SEQ ID NO: 230385 - DNA, 120 bp, Artificial Sequence
  ENSG00000119318_10 (sequence is synthesized)
cagtttcaacagatgagacaaattattcagcagaatccttccttgcttccagcgttactacagcagataggtcgagagaatcctcaattacttcagcaaattagccaacaccaggagcat

SEQ ID NO: 230386 - DNA, 120 bp, Artificial Sequence
  ENSG00000119318_11 (sequence is synthesized)
tttattcagatgttaaatgaaccagttcaagaagctggtggtcaaggaggaggaggtggaggtggcagtggaggaattgcagaagctggaagtggtcatatgaactacattcaagtaaca

SEQ ID NO: 230387 - DNA, 120 bp, Artificial Sequence
  ENSG00000119318_12 (sequence is synthesized)
cctcaggaaaaagaagctatagaaaggttaaaggcattaggatttcctgaaggacttgtgatacaagcgtattttgcttgtgagaagaatgagaatttggctgccaattttcttctacag

SEQ ID NO: 230388 - DNA, 120 bp, Artificial Sequence
  ENSG00000119318_13 (sequence is synthesized)
cagaactttgatgaagattgaaagggacttttttatatctcacacttcacaccagtgcattacactaacttgttcactggattgtctgggatgacttgggctcatatccacaatacttgg

SEQ ID NO: 230389 - DNA, 120 bp, Artificial Sequence
  ENSG00000119318_14 (sequence is synthesized)
tataaggtagtagattgttgggggtggggagggagggatctaggatacagggcagggataaatacagtgcatgtctgcttcaattagcagatgccgcaactccacacagtgtgtaaaata

SEQ ID NO: 230390 - DNA, 120 bp, Artificial Sequence
  ENSG00000119318_15 (sequence is synthesized)
tatacaaccaaaaatcagcttttgcaggtctttatttcttctgtaaaacagtaggtaacttttcctaggtttcactctttttagtgtactagatccagaaacttagtgtaatgccctgct

SEQ ID NO: 230391 - DNA, 120 bp, Artificial Sequence
  ENSG00000119318_16 (sequence is synthesized)
ttatatttctttgacttaacattggtttcagaaagaatcttagctacctagaatttacagtctctgtttcatggcaacactggataatggctttgtgaaatttaaaaaatttttgtagcg

SEQ ID NO: 230392 - DNA, 120 bp, Artificial Sequence
  ENSG00000119318_17 (sequence is synthesized)
gttgctgcttcaaaaataagtataaaattaatatgtaaggaagcccattctttcatgttaaatacttggggtgggaggggagaaagggaaccttttcttaaaatgaaaataattactgct

SEQ ID NO: 230393 - DNA, 120 bp, Artificial Sequence
  ENSG00000119318_18 (sequence is synthesized)
attttaaaatttcttgatcattgaatgtgagacccttctaacatgatttgagaagctgtacaagtataggcagagttattttcctgtttacattttttttttgttttggggaaaaaattg

SEQ ID NO: 230394 - DNA, 120 bp, Artificial Sequence
  ENSG00000119318_19 (sequence is synthesized)
gtaggtgtctaattactgtttacttcattgttatattgcagtaaaagttttaaaacaaccattgcatgtttgcttttgatgtatccctttgtgaaattagcacttttggggccaatggag

SEQ ID NO: 230395 - DNA, 120 bp, Artificial Sequence
  ENSG00000119318_20 (sequence is synthesized)
aaatgcagcattcactctccctgtcttttccccttccctcagcagaaacgtgtttatcagcaagtcgtgagtcaaactgctgccttttaaaaaacccacaaaatgctgattcagttcaaa

SEQ ID NO: 230396 - DNA, 120 bp, Artificial Sequence
  ENSG00000119318_21 (sequence is synthesized)
attaatgcaaatgtttcaaaactgggtttctgatatttgtaaatgtgtttctttattagataagagtgtattaccattaaagtcattagtataatattgctttcaaaaagaaatggtaga

SEQ ID NO: 230397 - DNA, 120 bp, Artificial Sequence
  ENSG00000119318_22 (sequence is synthesized)
caaaactataatccagcatcttttattgcattggaaagactggcaaagtcttttggatgggttgggagatgtggctggaaagtactttggaaaatatacaatcaagatatctcatggcat

SEQ ID NO: 230398 - DNA, 120 bp, Artificial Sequence
  ENSG00000119318_23 (sequence is synthesized)
attaaaagaaaaatcttaatagcagtgttggcttttatttggattttttcatctcagttttttctgtggaatctccttcattggcattgttatttaatcataaacggggcagatgtctac

SEQ ID NO: 230399 - DNA, 120 bp, Artificial Sequence
  ENSG00000119318_24 (sequence is synthesized)
ttgttcagtttttcaaatctgttttcctgagtataaataagagtatttaaagaaataatttggattgcttttgttttttgtttccttttttttaaccatctgatactaagaagatgaatt

SEQ ID NO: 230400 - DNA, 120 bp, Artificial Sequence
  ENSG00000119318_25 (sequence is synthesized)
tgcacagatttctctgcataatttctcaatatctttagcacagtatggtgatgatgacttttaagcatttacatcacgtactcataacctattatgaaaataaatgaaactggctgggta

SEQ ID NO: 230401 - DNA, 71 bp, Artificial Sequence
  ENSG00000119318_26 (sequence is synthesized)
aggtgggcagatcacttgaggccaggagattgagaccagcctgaccgtgtggcgcacgcctgtggtcccag

SEQ ID NO: 230402 - DNA, 120 bp, Artificial Sequence
  ENSG00000119318_27 (sequence is synthesized)
taaacatgacaggcttttggactttgtattacctgtatgttttataatggatcatgcataatttctcaggagaataaaatgagaattcatatatacgttcatctttcaagtcagagcaat

SEQ ID NO: 230403 - DNA, 120 bp, Artificial Sequence
  ENSG00000119318_28 (sequence is synthesized)
gagttgggaaaagaggtggcatttctgatcggataatggaatactctcatttattttatgacattctctgtctactcagatcatagtgaaaactggaaacaaaaaaaaaaaacagcctct

SEQ ID NO: 230404 - DNA, 120 bp, Artificial Sequence
  ENSG00000119318_29 (sequence is synthesized)
tcttggaaagtgacagcagaaggtggcatggagcttgtgtccttggacaacaaatctggatatactaggattaattatcagaagacagctcaggccaagttttgatcgttccatacagta

SEQ ID NO: 230405 - DNA, 120 bp, Artificial Sequence
  ENSG00000119318_30 (sequence is synthesized)
ccttgtttatctgcttcttaaagaatcagccgagacaccataaaagaaataggctttttgtgccttttgctgttaatgtttaatttacaaactgttttggtaaatctcttaatgtaagta

SEQ ID NO: 230406 - DNA, 120 bp, Artificial Sequence
  ENSG00000119318_31 (sequence is synthesized)
gctatttgactttggaattttgcattcgaggtatactgtcatttcttgaaatctttttctcgtttagttgctctgtgggaaatgtgaggaagcctaagtttgtatttgtaaatttcttat

SEQ ID NO: 230407 - DNA, 120 bp, Artificial Sequence
  ENSG00000119318_32 (sequence is synthesized)
gccatcctctagtcaaattttttttcattgtttaaaaatacggaagtgttccaatataattttttcctgtactggatggctaggattctagagaattgattataaaatattttcaataca

SEQ ID NO: 230408 - DNA, 120 bp, Artificial Sequence
  ENSG00000119318_33 (sequence is synthesized)
ccaattctggggcggagtcctcggccgcgccggcgcaaagcgtcgccgcaccccacgcctgcgcgcttcgcccgcccggccccatccccccaggtttttcgcgtgggggagggggcacgt

SEQ ID NO: 230409 - DNA, 120 bp, Artificial Sequence
  ENSG00000119318_34 (sequence is synthesized)
ataatactaagtttaaaccagcagctttctgcccaactctatttttaaaagtagttgattctattttgggtggagatcaggggctttggtgttaagtagacctgagttccatttgtggtt

SEQ ID NO: 230410 - DNA, 120 bp, Artificial Sequence
  ENSG00000119318_35 (sequence is synthesized)
ggtgggggagggagacgtaggcgtcgccactacccctgtgtggacctggttagccgcttagttcccagagttggtaacccgagaagatgagccttaagaaaaaaaaaagtatcaggttcc

SEQ ID NO: 230411 - DNA, 120 bp, Artificial Sequence
  ENSG00000119321_0 (sequence is synthesized)
gcttcctccccgcaacccggtgaaagccaacgcaatgttcggtgcgggggacgaggacgacaccgatttcctctcgccgagcggcggtgccagattggcctcactttttggactggatca

SEQ ID NO: 230412 - DNA, 120 bp, Artificial Sequence
  ENSG00000119321_1 (sequence is synthesized)
ggcagctgctggccatggaaatgaatttttccagtacacagccccaaaacagcctaagaaaggccagggaacggcagcaacaggaaatcaggcaacaccaaaaacagcaccagccaccat

SEQ ID NO: 230413 - DNA, 120 bp, Artificial Sequence
  ENSG00000119321_2 (sequence is synthesized)
gagcactcccacaatactggtcgcaacagcagtccatgcatatcgatacacaaatggtcaatatgtaaagcagggcaaatttggtgctgcagttctggggaaccacacagccagagagta

SEQ ID NO: 230414 - DNA, 120 bp, Artificial Sequence
  ENSG00000119321_3 (sequence is synthesized)
taggattcttctttatatcagtcaacaacagccagttacggttgctaggattcatgtgaactttgagctaatggttcggcccaataactatagcaccttttatgatgaccagagacagaa

SEQ ID NO: 230415 - DNA, 120 bp, Artificial Sequence
  ENSG00000119321_4 (sequence is synthesized)
ctggtccatcatgtttgagtcggaaaaggctgctgtggagttcaataagcaggtgtgcattgctaagtgcaacagtacctcttccctggatgcagtgctctcccaggacctcattgtggc

SEQ ID NO: 230416 - DNA, 120 bp, Artificial Sequence
  ENSG00000119321_5 (sequence is synthesized)
agacggccctgctgtagaagttggagattctttggaagtggcctataccggctggctctttcagaatcatgtgctgggccaggttttcgactccactgctaacaaagataagttgcttcg

SEQ ID NO: 230417 - DNA, 120 bp, Artificial Sequence
  ENSG00000119321_6 (sequence is synthesized)
cttgaagttaggatcaggaaaagtcatcaagggctgggaggatggaatgctgggcatgaaaaaaggaggaaagcgattgcttattgtccctccagcctgtgctgttggctcagaaggggt

SEQ ID NO: 230418 - DNA, 120 bp, Artificial Sequence
  ENSG00000119321_7 (sequence is synthesized)
aataggctggactcaagcaacggactcgatcctggtgttcgaggtggaggttaggcgggtgaagtttgccagagattctggctctgatggtcacagtgttagttcccgcgattctgcagc

SEQ ID NO: 230419 - DNA, 120 bp, Artificial Sequence
  ENSG00000119321_8 (sequence is synthesized)
tccgtctcccatccctggtgctgacaacctctctgctgatcctgttgtgtcaccacccacatcaatacctttcaaatcaggggagccagctcttcgtaccaaatctaactccctcagtga

SEQ ID NO: 230420 - DNA, 120 bp, Artificial Sequence
  ENSG00000119321_9 (sequence is synthesized)
acaacttgcaataaatacaagtcccgatgcagtcaaagccaagttgatctctcggatggctaaaatgggccagcccatgctgcccatccttccaccacagctggattccaatgattcaga

SEQ ID NO: 230421 - DNA, 120 bp, Artificial Sequence
  ENSG00000119321_10 (sequence is synthesized)
aatcgaagatgtgaacactctgcaaggaggtgggcagcctgtggtgactccgtccgtccagccctctcttcatccggcccatccagcgttaccacagatgacctcacaggcacctcagcc

SEQ ID NO: 230422 - DNA, 120 bp, Artificial Sequence
  ENSG00000119321_11 (sequence is synthesized)
atctgttactgggctccaggcaccttctgctgccttaatgcaagtgtcatctctcgattcccactcagctgtatctggaaatgcccaatcctttcagccctatgcaggtatgcaagccta

SEQ ID NO: 230423 - DNA, 120 bp, Artificial Sequence
  ENSG00000119321_12 (sequence is synthesized)
cgcttatccccaggcatctgccgtcacctcccagctgcagcccgttcggcctttgtacccagcaccgctctctcagcctccccatttccaaggatcaggtgatatggcttcatttctcat

SEQ ID NO: 230424 - DNA, 120 bp, Artificial Sequence
  ENSG00000119321_13 (sequence is synthesized)
gactgaagcccggcaacataacactgaaattcgaatggcagtcagcaaagtggctgataaaatggatcatctcatgactaaggttgaagagttacagaaacatagtgctggcaattccat

SEQ ID NO: 230425 - DNA, 120 bp, Artificial Sequence
  ENSG00000119321_14 (sequence is synthesized)
gcttattcctagcatgtcagttacaatggaaacaagcatgattatgagcaacatccagcgaatcattcaggaaaatgaaagattgaagcaagagatccttgaaaagagcaatcggataga

SEQ ID NO: 230426 - DNA, 120 bp, Artificial Sequence
  ENSG00000119321_15 (sequence is synthesized)
agaacagaatgacaagattagtgaactaattgaacgaaatcagaggtatgttgagcagagtaacctgatgatggagaagaggaacaactcacttcagacagccacagaaaacacacaggc

SEQ ID NO: 230427 - DNA, 120 bp, Artificial Sequence
  ENSG00000119321_16 (sequence is synthesized)
aagagtattgcatgctgaacaagagaaggccaaggtgacagaggagttagcagcggccactgcacaggtctctcatctgcagctgaaaatgactgctcaccaaaaaaaggaaacagagct

SEQ ID NO: 230428 - DNA, 120 bp, Artificial Sequence
  ENSG00000119321_17 (sequence is synthesized)
gcagatgcagctgacagaaagcctgaaggagacagatcttctcaggggccagctcaccaaagtgcaggcaaagctctcagagctccaagaaacctctgagcaagcacagtccaaattcaa

SEQ ID NO: 230429 - DNA, 120 bp, Artificial Sequence
  ENSG00000119321_18 (sequence is synthesized)
aagtgaaaagcagaaccggaaacaactggaactcaaggtgacatccctggaggaggaactgactgaccttcgagttgagaaggagtccttggaaaagaacctctcagaaaggaaaaagaa

SEQ ID NO: 230430 - DNA, 120 bp, Artificial Sequence
  ENSG00000119321_19 (sequence is synthesized)
gtcagctcaagagcgttctcaggccgaggaggagatagatgaaattcgcaagtcataccaggaggaattggacaaacttcgacagctcttgaaaaagactcgagtgtccacagaccaagc

SEQ ID NO: 230431 - DNA, 120 bp, Artificial Sequence
  ENSG00000119321_20 (sequence is synthesized)
agctgcagagcagctgtctttagtacaggctgagctacagacccagtgggaagcaaaatgtgaacatttgttggcctccgccaaggatgagcacctgcagcagtaccaggaggtgtgcgc

SEQ ID NO: 230432 - DNA, 120 bp, Artificial Sequence
  ENSG00000119321_21 (sequence is synthesized)
acagagagatgcctaccagcagaagctggtacaacttcaggaaaagtgtttagccctccaggcccaaatcacagctctcaccaagcaaaatgaacagcacatcaaggaactagagaagaa

SEQ ID NO: 230433 - DNA, 120 bp, Artificial Sequence
  ENSG00000119321_22 (sequence is synthesized)
caagtcccagatgtctggggttgaagctgctgcatctgacccctcagagaaggtcaagaagatcatgaaccaggtgttccagtccttacggagagagtttgagctggaggaatcttacaa

SEQ ID NO: 230434 - DNA, 120 bp, Artificial Sequence
  ENSG00000119321_23 (sequence is synthesized)
tggcaggaccattctgggaaccatcatgaatacgatcaagatggtgactcttcagctgttaaaccaacaggagcaagagaaggaagagagcagcagtgaagaagaagaagaaaaagcaga

SEQ ID NO: 230435 - DNA, 120 bp, Artificial Sequence
  ENSG00000119321_24 (sequence is synthesized)
agagcggccacgaagaccttcccaggagcagtcagcctcagccagttctgggcagcctcaagcacccctgaatagggagaggccagagtcccccatggtgccctcagagcaggtggtcga

SEQ ID NO: 230436 - DNA, 120 bp, Artificial Sequence
  ENSG00000119321_25 (sequence is synthesized)
ggaagctgtcccgttgcctcctcaggccctcaccacttcccaggatggacacagaaggaaaggggactcagaagctgaggcactctcagagataaaagatggttcccttccacccgaact

SEQ ID NO: 230437 - DNA, 120 bp, Artificial Sequence
  ENSG00000119321_26 (sequence is synthesized)
gtcttgcatcccatcccacagagttctagggcccccgacttcaattccacctgagcccctaggccctgtatccatggactctgagtgtgaggagtcacttgctgccagcccaatggcagc

SEQ ID NO: 230438 - DNA, 120 bp, Artificial Sequence
  ENSG00000119321_27 (sequence is synthesized)
taagcccgacaacccatcaggaaaggtctgtgtcagggaagtagcaccagatggcccactacaagaaagctccacaagactgtccctgacttcagaccccgaggagggggacccactggc

SEQ ID NO: 230439 - DNA, 120 bp, Artificial Sequence
  ENSG00000119321_28 (sequence is synthesized)
cttagggcctgaaagcccaggagagcctcagcctccacagctcaagaaagatgatgtcactagctccaccggtccccacaaggagctgtcaagcacagaggcaggttccacagttgcagg

SEQ ID NO: 230440 - DNA, 120 bp, Artificial Sequence
  ENSG00000119321_29 (sequence is synthesized)
agcagccctcagacccagccatcattcccagcgttccagtctctctggggatgaagaggatgaactgtttaaaggggcaactctgaaagctctgaggcccaaagcacagcctgaggagga

SEQ ID NO: 230441 - DNA, 120 bp, Artificial Sequence
  ENSG00000119321_30 (sequence is synthesized)
ggatgaagacgaggtgagcatgaagggacgcccgcccccaacgcccctttttggagatgatgatgatgacgatgacattgactggctgggatgaagacccaggaaactggtgcaaaggtt

SEQ ID NO: 230442 - DNA, 120 bp, Artificial Sequence
  ENSG00000119321_31 (sequence is synthesized)
tctctgcaacccttccctaagcatgattttgcacagccaaccctgggtctaggcgaaccacagggtgaggtcaaggtgagcattctgggaacaatatttgggctcagagggtgggttggc

SEQ ID NO: 230443 - DNA, 120 bp, Artificial Sequence
  ENSG00000119321_32 (sequence is synthesized)
caccttctgagccccacccccgccagacctggtgaagaggatcataaccctgtcttcaagaacactgggatttcagcagcaagttggaagaaggactggtaggttcccctccaagccagt

SEQ ID NO: 230444 - DNA, 120 bp, Artificial Sequence
  ENSG00000119321_33 (sequence is synthesized)
cacctgtaagagtcctgtcctctgccagactttttaatctcttcattaactctcagactgacctgggagccctcctctacctgaatccagtgctcaactgtgccccggcaacaagacctg

SEQ ID NO: 230445 - DNA, 120 bp, Artificial Sequence
  ENSG00000119321_34 (sequence is synthesized)
ggctgaggtctccctggtagaactaagggagattacaccatctaaatcccagtgcagtcaacagcctggcctatagtcctgggacatgtatcttcttctttgccttaaatctgatacaag

SEQ ID NO: 230446 - DNA, 120 bp, Artificial Sequence
  ENSG00000119321_35 (sequence is synthesized)
aggtcaatgactttgaaaataaaactaaaataaatgtctataatgaaacttgacccaagcccttggagaaaaattgagtttggttccaagggctgtctgtgctcttttgggaatctaagg

SEQ ID NO: 230447 - DNA, 120 bp, Artificial Sequence
  ENSG00000119321_36 (sequence is synthesized)
gtcttacagatctgggtcagttaatgtgcacaaaacgttgtggcatatttactccctttgatacctaaccctggaacttttaggctttcaaagaaagtcaccactgtagtcctagctcat

SEQ ID NO: 230448 - DNA, 120 bp, Artificial Sequence
  ENSG00000119321_37 (sequence is synthesized)
ccctggggcatgatggttctgtgaggaccagtccagtcatcctcttgctcctgcaggcttagtcctgcagtctaggaagccatgcaaagaaggtgagagggtcccttctttccattgttc

SEQ ID NO: 230449 - DNA, 120 bp, Artificial Sequence
  ENSG00000119321_38 (sequence is synthesized)
atggcacctgagggattcttcactttgagagcagcttccattcccttagaactcatgggaccaggacttatgcagagaacagtagtgagaaaatacttgtggtcattttcttgattccag

SEQ ID NO: 230450 - DNA, 120 bp, Artificial Sequence
  ENSG00000119321_39 (sequence is synthesized)
gatcttccaaagattatgcaatcagtctttaaaaaaacagaataattaattttaataaaaaatgtttcttgattttaaatgttttaaaagataggacccaaaattccacttcatctggcc

SEQ ID NO: 230451 - DNA, 120 bp, Artificial Sequence
  ENSG00000119321_40 (sequence is synthesized)
tggcatcatccttgcaggctttggatatgtctcccgtgtgcggacctgggaggcagtgagaactaattatttctttgttgcttaacaaaaggcggtgctgtttggcactttcacagactg

SEQ ID NO: 230452 - DNA, 120 bp, Artificial Sequence
  ENSG00000119321_41 (sequence is synthesized)
gcttatctccagcaaccactgcagaagacagtgttatcaccattttatagaggagaaaactgagacttagagaggtaaagtaatttgcccaaagttacatatctaggaagcctcagcaca

SEQ ID NO: 230453 - DNA, 120 bp, Artificial Sequence
  ENSG00000119321_42 (sequence is synthesized)
agaattcaaatcctggccatctgattccagagcctgggctcttggccagcacagcctgactgtcactggttgggggaaggggcggtgatgcttttagaaacaggcttcttgagacaccag

SEQ ID NO: 230454 - DNA, 120 bp, Artificial Sequence
  ENSG00000119321_43 (sequence is synthesized)
gcagctttccagttccctgcaaacatgggggaatgccctgatcagtcctaaaggtgtgacatagtctactttctagggcagttatttcttattgtaaattaactagtggctattatattt

SEQ ID NO: 230455 - DNA, 120 bp, Artificial Sequence
  ENSG00000119321_44 (sequence is synthesized)
gcttctgcccgcagggagagaagatgctgagtaattgtgccaacacaggtgcttaaagtccgtgtgacagttacttttcttatagcatgtactcaattaatacttgttacatgaatgaag

SEQ ID NO: 230456 - DNA, 120 bp, Artificial Sequence
  ENSG00000119321_45 (sequence is synthesized)
aatgacttgacttgcctcagttggcattctggggtgtctacctgggtgcagcatttcagggctgggtttccctgagcagagttgtctttgtagcagatggatggactctgtcctcagaca

SEQ ID NO: 230457 - DNA, 120 bp, Artificial Sequence
  ENSG00000119321_46 (sequence is synthesized)
ggcttataaagagtactaccagttctattagccccactcagcccctgcagttgttacaagggttcatgtgctttctgttggaattaggagaacagaacagtcatagactatttaaaaata

SEQ ID NO: 230458 - DNA, 120 bp, Artificial Sequence
  ENSG00000119321_47 (sequence is synthesized)
tatatttactaaaatgtatttgtttgtttttaattcccaaagcttacaaccatcttttcatctaatctgtgaggtatttagtatacagcagtgattttctctctttccttttttataaag

SEQ ID NO: 230459 - DNA, 120 bp, Artificial Sequence
  ENSG00000119321_48 (sequence is synthesized)
tgaagaggttcaactatccagagagtcccatctaactcaaaaaatgtaatggctttggttggattgcatcttcagtcagtacctgcccatggcttaatcagtattttaagtgaatgaatc

SEQ ID NO: 230460 - DNA, 120 bp, Artificial Sequence
  ENSG00000119321_49 (sequence is synthesized)
atgtttccccactagatcattacgagtaagcagtaagtaataaatagagaatattaagtattgaacattattagatgcagctttttgttctgcatagaagaaagatgaggataaaggagg

SEQ ID NO: 230461 - DNA, 120 bp, Artificial Sequence
  ENSG00000119321_50 (sequence is synthesized)
gcattgaggccacgaagagcttcccagacacccacggccatcagatcatcttcttcctgcaggcagtgccttctggtggaaggagctcagtctatcagagaataaaccaggagcctgaaa

SEQ ID NO: 230462 - DNA, 120 bp, Artificial Sequence
  ENSG00000119321_51 (sequence is synthesized)
gcagtcctgtgtctctgcctttaatcagctgtcacttattctctccccaagaaagggaaataggtctcagcagtttctgccatccatcatgaatcaatgaaatcatttcattaaaaattt

SEQ ID NO: 230463 - DNA, 120 bp, Artificial Sequence
  ENSG00000119321_52 (sequence is synthesized)
ttttgtatgaatgtgcaaaattgccaactaggagttcaatgggaaaaataaaaaaaacttagtttgtcaacatgatccatagacgagatgatcttcatgtgttccaaaggcagaaaggtg

SEQ ID NO: 230464 - DNA, 120 bp, Artificial Sequence
  ENSG00000119321_53 (sequence is synthesized)
agaaaaaggatctagcttggtctctgtccctcaaagacagaagaggtcaggaagtccaatgggcgatgctcctgtagataaggcacaaagcaggagagctgagggtgtccaggttccatg

SEQ ID NO: 230465 - DNA, 120 bp, Artificial Sequence
  ENSG00000119321_54 (sequence is synthesized)
ccctgcatcaccaagaacccttctccctggcttgaaatctttggaaattcctggtttgagtcacagagaagcattgtcatgggctcagtaaccctgccacccctgttatctccattctcc

SEQ ID NO: 230466 - DNA, 120 bp, Artificial Sequence
  ENSG00000119321_55 (sequence is synthesized)
ctttggtcacagcagctgtcttaagacacaagaccatgcctgggccctacgtaggctggctgagaaggaaggttgctgcaatggcttccgaactccagggagcaagtgctggcttcagct

SEQ ID NO: 230467 - DNA, 120 bp, Artificial Sequence
  ENSG00000119321_56 (sequence is synthesized)
caaagtttccaggggctgggaataaggtggaggaatagccatcagaagaaagggcagttggaagtatagtgtctggaagagggggctccatgtccctccagcctcagtgcctgcacgttc

SEQ ID NO: 230468 - DNA, 120 bp, Artificial Sequence
  ENSG00000119321_57 (sequence is synthesized)
ctcaccagctaagctgtgctgagaagtgggtaagctaggtagtagcccacagcagagcccaagaccacaccaaggaaaatccaggtgttgtaggacattacggccagcatgatgaagtag

SEQ ID NO: 230469 - DNA, 120 bp, Artificial Sequence
  ENSG00000119321_58 (sequence is synthesized)
ccgatgaccacctggatgacatggattagagactggccaaagtgacacaaataccacctagataaaaaggagaagcaagttaatcctggtaatgagctggtaatgaggaagctgggagta

SEQ ID NO: 230470 - DNA, 120 bp, Artificial Sequence
  ENSG00000119321_59 (sequence is synthesized)
gatatcagggagtagaaagctgttgagttacgtgacccgattgatttataacttgtatgcttaacccaggagtgatttctttctgcccctcccacccccgcccccagaaaaaactcgaga

SEQ ID NO: 230471 - DNA, 120 bp, Artificial Sequence
  ENSG00000119321_60 (sequence is synthesized)
tttatttttaaagagacatatcttcactacatttggtttcaagcttcctggcatcctaggcaaaggggaaaatgagggtatctataatctgtctttctgataaggaataagagaaaatca

SEQ ID NO: 230472 - DNA, 120 bp, Artificial Sequence
  ENSG00000119321_61 (sequence is synthesized)
tcagtaaggcatatttcccccctgaatctacttcgggaggcagtatgacaatggaaagaaaaagcatggtcttaggtgacattatcagttcctagacctgccactaactaaaagtggcct

SEQ ID NO: 230473 - DNA, 120 bp, Artificial Sequence
  ENSG00000119321_62 (sequence is synthesized)
agacaaatgtcttaacctctctgaacgtaagattccttatcagtaaaacaggaatgagaatacttcccttgcagtgcagttgtgaagatctgagacacccatgtagggtggctagtgatg

SEQ ID NO: 230474 - DNA, 120 bp, Artificial Sequence
  ENSG00000119321_63 (sequence is synthesized)
gagcgggcaggcttattaagcacaggtgaggctggggctggacagagggcagaacagggaccctaaatggttgcctgattcgagtgggaagggaggagaggagagcttgtcatcctcctc

SEQ ID NO: 230475 - DNA, 120 bp, Artificial Sequence
  ENSG00000119321_64 (sequence is synthesized)
ccaccaagtgggatacattgcttcaggacagctgcagatcccctcctggatatgggagcctagtgacccatggaactggtgagatttgggggagggtgggtggccacctcatttgctaga

SEQ ID NO: 230476 - DNA, 120 bp, Artificial Sequence
  ENSG00000119321_65 (sequence is synthesized)
taggggcctgcacctgaagatcactgttccctaaagaaagccttctgagcctctcaagtggctggctgttcacagagtgctttggcctgggcatcaggagacatgagctctagttcactt

SEQ ID NO: 230477 - DNA, 120 bp, Artificial Sequence
  ENSG00000119321_66 (sequence is synthesized)
ggctatgtgtagccactttggcaagtcctggtccttccctgggcctcgctgtcctctctgtgaagtggggctaatgctgtctgggccagcctgtctctcagggtgaatgtgaggcttctg

SEQ ID NO: 230478 - DNA, 120 bp, Artificial Sequence
  ENSG00000119321_67 (sequence is synthesized)
cccctttcccatacccactgcctgtacctgtggtgggttctgccaacagggaatgaatctgagcctgcagagtccccgtctgtctctgcgatggtctgctggctgatggaggttggcagg

SEQ ID NO: 230479 - DNA, 120 bp, Artificial Sequence
  ENSG00000119321_68 (sequence is synthesized)
ttcaccagtacctggttgagcagcttggctttgccaaccttgatgccttcatacagtacagccagaagcaggagcaccaacaccgaaagggccatgcctgtcaaaggaggcagagttgtg

SEQ ID NO: 230480 - DNA, 120 bp, Artificial Sequence
  ENSG00000119321_69 (sequence is synthesized)
gagacctggccaggccagcactgtttcccttccagcacctccacctgttcatggaatccactccatccacctctatcctgcaccttcttccccacccttgctgagttccgaacttcttca

SEQ ID NO: 230481 - DNA, 120 bp, Artificial Sequence
  ENSG00000119321_70 (sequence is synthesized)
ctgtcttcaccagacttttcttagctggagtgtggctttgagatcaggaagagaagccacctgaaaaatccaggggctgagggtgaagaagccacgtaccattaccccacccactccccc

SEQ ID NO: 230482 - DNA, 120 bp, Artificial Sequence
  ENSG00000119321_71 (sequence is synthesized)
agcaggctgcacaaatctgtcgtgacttcttgttaagtgatgagtactgcaaggtcctatttatatgtaagtatgcaaaaaatgtctggaaggaaagataaatagcacaagagtaatagt

SEQ ID NO: 230483 - DNA, 120 bp, Artificial Sequence
  ENSG00000119321_72 (sequence is synthesized)
tatctcagcaaagtaggatacaggtggtttttatgttcttgcctaactttctaaggtttcttttatatatattacttttataataggggaaaaacccaataaattattttaccaaaacta

SEQ ID NO: 230484 - DNA, 120 bp, Artificial Sequence
  ENSG00000119321_73 (sequence is synthesized)
ttgctgtggttctagtcagtctcttttcttcttcctgtacatttcatacagtagcagttccccaaagtcagagtttgtaatttttttcccttccttggttaccactttctcatctctaaa

SEQ ID NO: 230485 - DNA, 120 bp, Artificial Sequence
  ENSG00000119321_74 (sequence is synthesized)
ccaggcaaaggataacctacgttccagtgtcataaagattaaatgcaagaacaagtagagcccctagtacaacgtagtaaagatgcaatcaatgtttgtttccttttcttttcacacata

SEQ ID NO: 230486 - DNA, 120 bp, Artificial Sequence
  ENSG00000119321_75 (sequence is synthesized)
tccagttgaagcgtgtatattcgcgttcttctgtattcttttctactaaaagttggcaggctaacattctgcagtatattcagcagaatggtatggtttaaaagtggaaccatgtggaaa

SEQ ID NO: 230487 - DNA, 120 bp, Artificial Sequence
  ENSG00000119321_76 (sequence is synthesized)
atgtagcttgactctgctatctagtaaacttttcttaaagaaggcctttttcctgttatcacagaaaacaatggcagcagcctgtttgccaggggtagcagaccctttcttctgcctcaa

SEQ ID NO: 230488 - DNA, 120 bp, Artificial Sequence
  ENSG00000119321_77 (sequence is synthesized)
cacacttggtggataaggcatactgtcactgggaacagctgctcactccttgtgatgcttaatggaggtgtgggaatgatggtggataggctatgcctcattaacatggggagtctcgaa

SEQ ID NO: 230489 - DNA, 120 bp, Artificial Sequence
  ENSG00000119321_78 (sequence is synthesized)
actggaaaaagtcccactgttgccctctttctccccatccctcctctcctccatggagaattactatgctgtagactaagaattttttttaagtggatgcgtagttatatctatccctgg

SEQ ID NO: 230490 - DNA, 120 bp, Artificial Sequence
  ENSG00000119321_79 (sequence is synthesized)
aaatgagctagacttccttatttcaaggaagaattaccatcctcattaaaataaaagctgctgtttattaagcgcttactatctgtcaggcctgtaacttactagcttttcagaacttta

SEQ ID NO: 230491 - DNA, 120 bp, Artificial Sequence
  ENSG00000119321_80 (sequence is synthesized)
cctatctcacttcatttagtccacagaacagccctatgaagtgatattattatcttcctcttacagttgaggtgaccgagactcaaaggaacatgagagctcttggtctcgtggattagc

SEQ ID NO: 230492 - DNA, 120 bp, Artificial Sequence
  ENSG00000119321_81 (sequence is synthesized)
ttcagaatctagcaggggagaggcatccttggaaattggcagatttggtttggaatctcagtgagcacttcttctttaaactcaatggaagctaagcagagtttattaatctaaaaactt

SEQ ID NO: 230493 - DNA, 120 bp, Artificial Sequence
  ENSG00000119321_82 (sequence is synthesized)
cttagacaataggcctgataatggggaatgaatccctgcttaattatctcaccagatgactgggtagtgacctaagatacactttcttcagtttctgggtaggattttagtgactggttt

SEQ ID NO: 230494 - DNA, 120 bp, Artificial Sequence
  ENSG00000119321_83 (sequence is synthesized)
cccctgggatacatagataactctcctgctgcagtccttaccaactgccaaacccagatctcacccatctctagcttcagtaagtttgagtctcctcccagctcatccactttattccac

SEQ ID NO: 230495 - DNA, 120 bp, Artificial Sequence
  ENSG00000119321_84 (sequence is synthesized)
caagcatatagtaaatgatcacattttgcttactattgtgcgttaaaacaaatccaaccattcaaaattgttaaatttgacctttgtgatatgatcctagcttaagaatttgggcatttt

SEQ ID NO: 230496 - DNA, 120 bp, Artificial Sequence
  ENSG00000119321_85 (sequence is synthesized)
tttgtttgtttgttgttcaattgtggggtgcgtgtgtacacacacatacacaaatacacacatatatatacacatacatatgtatatataagataaaatttgccatttaaccatttttaa

SEQ ID NO: 230497 - DNA, 120 bp, Artificial Sequence
  ENSG00000119321_86 (sequence is synthesized)
gtgcataatccagtgccattaattgcattcacagtattgattgagcaaccatcactactatccatttcccaaacagaaagtgtaaccattaagcaataactctacttcttcctttttccc

SEQ ID NO: 230498 - DNA, 120 bp, Artificial Sequence
  ENSG00000119321_87 (sequence is synthesized)
gtgcagttaagctactttttctcgaaaaacctctgtttgttgcaaaacggttatttagcccttccacggacaaaatatcagtagaacttttaacatctgaattggagatttctgtggtaa

SEQ ID NO: 230499 - DNA, 120 bp, Artificial Sequence
  ENSG00000119321_88 (sequence is synthesized)
aacttgaaaagccattatcttgtctactgtctttagggagtgcttgtaccctcaacagctgtcaaatgctcaaagaaagcctctccactgagatagcatgaatgatagatatttatattt

SEQ ID NO: 230500 - DNA, 120 bp, Artificial Sequence
  ENSG00000119326_0 (sequence is synthesized)
gactggcggcaggctcgccgcggcgcggagtcccggctgcgggatagaccgagggccatggccgcctctcccggacccgccggcgttggcggcgccggagcagtctacggctccggctct

SEQ ID NO: 230501 - DNA, 120 bp, Artificial Sequence
  ENSG00000119326_1 (sequence is synthesized)
tcgggcttcgccctcgactcgggactggagatcaaaactcgctcggtggagcagacgctactcccgctggtttctcagatcaccacgcttattaatcataaagataataccaaaaagtct

SEQ ID NO: 230502 - DNA, 120 bp, Artificial Sequence
  ENSG00000119326_2 (sequence is synthesized)
gataaaactctgcaagcaattcagcgtgtaggacaagctgtcaacttggcagttggaagatttgttaaagtaggagaagctatagccaatgaaaactgggatttgaaagaagaaataaat

SEQ ID NO: 230503 - DNA, 120 bp, Artificial Sequence
  ENSG00000119326_3 (sequence is synthesized)
attgcttgtattgaagctaaacaagcaggagaaacaattgcagcacttacagacataaccaacttgaaccatctggaatctgatgggcagatcacaatttttacagacaaaacaggagtg

SEQ ID NO: 230504 - DNA, 120 bp, Artificial Sequence
  ENSG00000119326_4 (sequence is synthesized)
ataaaggctgcaagattacttctttcttcagtgacaaaagtgttgttgctggcagaccgagtagtcattaaacagataataacatcaagaaataaggttctcgcaactatggaaagacta

SEQ ID NO: 230505 - DNA, 120 bp, Artificial Sequence
  ENSG00000119326_5 (sequence is synthesized)
gagaaagtgaatagctttcaagagtttgtccaaatattcagtcaatttggaaatgaaatggtggagtttgcacatctgagtggagatagacaaaatgatttgaaagatgaaaagaaaaag

SEQ ID NO: 230506 - DNA, 120 bp, Artificial Sequence
  ENSG00000119326_6 (sequence is synthesized)
gcaaaaatggcagcagctagggcagttcttgaaaagtgtacaatgatgcttctcacagcttcaaagacatgtctgaggcatcctaactgcgaatcagcccataaaaacaaagaaggagta

SEQ ID NO: 230507 - DNA, 120 bp, Artificial Sequence
  ENSG00000119326_7 (sequence is synthesized)
tttgaccgtatgaaagtggcattggataaggtcattgaaattgtgactgactgtaaaccgaatggagagactgacatttcatctatcagtatttttactggaattaaggaattcaagatg

SEQ ID NO: 230508 - DNA, 120 bp, Artificial Sequence
  ENSG00000119326_8 (sequence is synthesized)
aatattgaagctcttcgggagaatctttattttcagtccaaagagaacctttctgtgacattggaagtcatcttggagcgtatggaggactttactgattctgcctacaccagccatgag

SEQ ID NO: 230509 - DNA, 120 bp, Artificial Sequence
  ENSG00000119326_9 (sequence is synthesized)
cacagagaacgcatcttggaactgtcaactcaggcgagaatggaactgcagcagttaatttctgtgtggattcaagctcaaagcaagaaaacaaaaagcatcgctgaagaactggaactc

SEQ ID NO: 230510 - DNA, 120 bp, Artificial Sequence
  ENSG00000119326_10 (sequence is synthesized)
acagcgacacagctggcagcagatctattaaaataccatgctgatcatgtggttctaaaagcattaaaacttactggagtagaaggaaatttagaagctttggctgaatatgcctgtaaa

SEQ ID NO: 230511 - DNA, 120 bp, Artificial Sequence
  ENSG00000119326_11 (sequence is synthesized)
ctctctgaacagaaagagcagcttgttgagacctgtcgattgttacgacacatatctgggacagaacctctggaaataacctgtatacatgcagaggagacatttcaggtgactggccaa

SEQ ID NO: 230512 - DNA, 120 bp, Artificial Sequence
  ENSG00000119326_12 (sequence is synthesized)
cagataatttctgctgctgaaacattgacattgcatccatctagtaaaattgctaaagaaaacctagatgtattttgtgaagcttgggaatcccaaattagtgacatgtcaacactgctg

SEQ ID NO: 230513 - DNA, 120 bp, Artificial Sequence
  ENSG00000119326_13 (sequence is synthesized)
agagaaatcaatgacgtgtttgaaggaagacgaggagagaagtatggctacctttcacttccaaagccaatgaagaataatgcaaacctgaaatcattaaagccagacaagcctgactct

SEQ ID NO: 230514 - DNA, 120 bp, Artificial Sequence
  ENSG00000119326_14 (sequence is synthesized)
gaggagcaagccaagatagcaaagcttggacttaagctgggtttgctcacctctgacgctgactgcgaaattgagaagtgggaagatcaggagaatgagattgttcaatatggacggaac

SEQ ID NO: 230515 - DNA, 120 bp, Artificial Sequence
  ENSG00000119326_15 (sequence is synthesized)
atgtccagtatggcctattctctgtatttatttactagaggagaggggccactgaaaacttcccaggatttaattcatcaactagaggtttttgctgcagagggtttaaagcttacttcc

SEQ ID NO: 230516 - DNA, 120 bp, Artificial Sequence
  ENSG00000119326_16 (sequence is synthesized)
agtgttcaagctttttcaaaacagctgaaagacgatgacaagcttatgcttctcctggaaataaacaagctaattcctctatgccaccagctccagacagtaactaagacttctttgcag

SEQ ID NO: 230517 - DNA, 120 bp, Artificial Sequence
  ENSG00000119326_17 (sequence is synthesized)
aataaagtatttctaaaggttgacaagtgtattacgaagacaagatccatgatggctctcttagtccaacttctttcactttgttataaactgctgaagaagcttcagatggaaaataac

SEQ ID NO: 230518 - DNA, 120 bp, Artificial Sequence
  ENSG00000119326_18 (sequence is synthesized)
ggatgggtctcagttacaaataaggacactatggatagtaaaacttgagaagcttttggggtcagatctctggaacatcatgtgatgaagctgacatttttaaaaatcaaatgatccttt

SEQ ID NO: 230519 - DNA, 120 bp, Artificial Sequence
  ENSG00000119326_19 (sequence is synthesized)
atcttttcagaaattcatcaattttataaagaaaacaatattgaaattttgctctattttctgatcatgaaactgattgtaaagctttttgacaactaataaatgtcttggtaattgcta

SEQ ID NO: 230520 - DNA, 120 bp, Artificial Sequence
  ENSG00000119326_20 (sequence is synthesized)
atccacaactacaaaatttctgtactcagagtccctaaatgttactgaataatctcaaaacttacagaacagatttaaactcttccagtccagaagttaatctctcagatgatggtcatg

SEQ ID NO: 230521 - DNA, 120 bp, Artificial Sequence
  ENSG00000119326_21 (sequence is synthesized)
ttaatttttaactaggttaggagtgaaagcatggacattctaggcagaaaataaaagagattaattttagacttgagtttattaaagaaaattagattttaaaagttcacctttcaatat

SEQ ID NO: 230522 - DNA, 120 bp, Artificial Sequence
  ENSG00000119326_22 (sequence is synthesized)
aatccataggttcacagaaaaataaataaataaaaaaacagaagttcatctatttgtagttagcattgaaaaatataactaaactgaaattttattttccactgtaacttaaacaggtaa

SEQ ID NO: 230523 - DNA, 120 bp, Artificial Sequence
  ENSG00000119326_23 (sequence is synthesized)
tatagttcacagaatagtattaaaatttattacaatttacagtccaaacaaaattgtaattaacagattaaagagatgcggtaacattacatgtatactttttaaaatttttagcaaagc

SEQ ID NO: 230524 - DNA, 120 bp, Artificial Sequence
  ENSG00000119328_0 (sequence is synthesized)
gtgcgccggaagagcacgcccagtccgggctgcgcggaggaagcgctggggtcccggagggcgggggtggcggcgccggaggtcgccatggctaccgagcccgaagccgcggagccggtg

SEQ ID NO: 230525 - DNA, 120 bp, Artificial Sequence
  ENSG00000119328_1 (sequence is synthesized)
gtgccttcgctcgtggatcgatacttcactcgctggtacaaaccggatgtcaaaggaaaattttgtgaggaccactgtatactacagcactctaaccgaatatgtgtcatcacattggca

SEQ ID NO: 230526 - DNA, 120 bp, Artificial Sequence
  ENSG00000119328_2 (sequence is synthesized)
gaatctcatccagttcttcaaagtggaaaaacaattaaaagcatttcctatcagatcagtaccaactgtagcagacttcagaacaaggtctctgggaaatttaagcggggggcacagttt

SEQ ID NO: 230527 - DNA, 120 bp, Artificial Sequence
  ENSG00000119328_3 (sequence is synthesized)
ctaacagagcttgcacctctctgtaagatttactgctcagatggtgaagaatatactgtgtctagttgtgttagaggacgtttgatggaagtgaatgaaaacatcctccataagccatct

SEQ ID NO: 230528 - DNA, 120 bp, Artificial Sequence
  ENSG00000119328_4 (sequence is synthesized)
attcttcaagaaaagccatctactgaaggctacattgcagttgtgttacccaaatttgaagaaagtaaaagcataacagaagggttactgacacaaaaacaatatgaagaagtcatggtg

SEQ ID NO: 230529 - DNA, 120 bp, Artificial Sequence
  ENSG00000119328_5 (sequence is synthesized)
aaacgcattaatgccacaacagctacgtcatgaggattgacatggaacaaaaagcaaagtgggattcttgttacctggcctaaaccatcagggtactaaaggagaagaaccagtatatgt

SEQ ID NO: 230530 - DNA, 120 bp, Artificial Sequence
  ENSG00000119328_6 (sequence is synthesized)
aaagcatacctaacagccagccatatgcaggggaggcctagtgcttcacttagttttccctctctgtcttcataatgagccttggttcccatttgtctacagcctgccagatctggcctg

SEQ ID NO: 230531 - DNA, 120 bp, Artificial Sequence
  ENSG00000119328_7 (sequence is synthesized)
aaatacagaagagttttaagtagccaagtaaaaataatttacccatcatcccataatccagaagtaaatacatttgacccttgagcaacataggtttgaactgcaagggtccacttatgc

SEQ ID NO: 230532 - DNA, 120 bp, Artificial Sequence
  ENSG00000119328_8 (sequence is synthesized)
atggactattttcaactataaacgagtcaaaaatatatcattaaccaaacacgaaacccacttatagagcaggttcatatactcaggttccaaagggccaactgcaggacttgagttctc

SEQ ID NO: 230533 - DNA, 120 bp, Artificial Sequence
  ENSG00000119328_9 (sequence is synthesized)
acgtatggatttgggtatatgtggaagttcctggaaccaatcccctatgtaaaccaagggataactactacattttaacctacttctgtttgaacatatggtatggttattgcttttgcc

SEQ ID NO: 230534 - DNA, 120 bp, Artificial Sequence
  ENSG00000119328_10 (sequence is synthesized)
tcgttttcctaacagtttgaagtttaaaaaaacctaacccacctttcttacccagtcttctataatgtgcctaccaaaaagcctagtcctagcccatctgcctcaactcctctccctttt

SEQ ID NO: 230535 - DNA, 120 bp, Artificial Sequence
  ENSG00000119328_11 (sequence is synthesized)
aggttgtagggaagaggccggagtgtagagtatattatatcttctgtcccccttatgccaacaagatggccttcccctctgaaacaaagtaaaactgcaacactgtgacttcttaaatga

SEQ ID NO: 230536 - DNA, 120 bp, Artificial Sequence
  ENSG00000119328_12 (sequence is synthesized)
gggatatgtgaaaaggctatgaaaaatacaaaggctttcctaggaaatgtgttataatgcagcgggaagctaattcttgaaatatgcacattatagttactcagtctcacatactctagt

SEQ ID NO: 230537 - DNA, 120 bp, Artificial Sequence
  ENSG00000119328_13 (sequence is synthesized)
tactggcaaagaagttactgagaatatgtcattcaaaggcataggggcctttgaatggaacaaatgctttcacatcatttaaagtaaaaaaaaacctccaacaactgtgaatttatagtt

SEQ ID NO: 230538 - DNA, 120 bp, Artificial Sequence
  ENSG00000119328_14 (sequence is synthesized)
taagagtgatttacactgaatttcaaataaaaggactataaaacgtgttatttttctgtaagggctataacatacatgtcaatatcactgtttttaaataaaatatacttttatacagaa

SEQ ID NO: 230539 - DNA, 120 bp, Artificial Sequence
  ENSG00000119328_15 (sequence is synthesized)
taggagtttgtttggcaagaatgagtattccagtgcctggccactctgaacatataaatttgattactcaaacatccaaatggaggaccacatcatcagctgctacttgaagtggccagt

SEQ ID NO: 230540 - DNA, 120 bp, Artificial Sequence
  ENSG00000119328_16 (sequence is synthesized)
ctgtgcccaactactgaactgttcagagcccacagaaagggctacggtagagacatgtatggtatctcgtatacacaggcatgccttatttctttgtcttctaccccagtgctacctacc

SEQ ID NO: 230541 - DNA, 120 bp, Artificial Sequence
  ENSG00000119328_17 (sequence is synthesized)
ggagaattatctatctagaaaaggtagaagacgtcatcaagaggaaaatgatgcctctaagcttgggactgcatcttccccactcttaatcctccttctataggaaggaatcttcacgag

SEQ ID NO: 230542 - DNA, 120 bp, Artificial Sequence
  ENSG00000119328_18 (sequence is synthesized)
cacaggatccctcacttctgtctgctgcctcacctatcccatcccataaaaggaggtggatgctcatcttttcagtctttctggtgactttgcaaaaataaattgaacacattaaccctt

SEQ ID NO: 230543 - DNA, 120 bp, Artificial Sequence
  ENSG00000119333_0 (sequence is synthesized)
ggcggcgtaggggcggaggtcgcgcctgagtgcgtccgcacgagagggcggaaccgtctccatggcaacccgcgcgcagccggggccactcagccaggcgggaagcgctggtgttgcggc

SEQ ID NO: 230544 - DNA, 120 bp, Artificial Sequence
  ENSG00000119333_1 (sequence is synthesized)
gctggcgacagtcggggttgcgagcggcccggggccggggcggccagggccgctgcaggacgagaccctgggtgtggcgtccgtgccctcgcagtggagggccgtccagggcatccgctg

SEQ ID NO: 230545 - DNA, 120 bp, Artificial Sequence
  ENSG00000119333_2 (sequence is synthesized)
ggagacgaaaagttgccagacggccagcattgccactgccagtgcatccgcccaggccaggaatcatgtggacgcccaggtgcagacggaggcccccgtgcctgtcagcgtgcagccccc

SEQ ID NO: 230546 - DNA, 120 bp, Artificial Sequence
  ENSG00000119333_3 (sequence is synthesized)
gtcccagtatgacatacccaggctcgcagcctttcttcggagagtggaggccatggtcatccgagagctgaacaagaattggcagagccacgcgtttgatggcttcgaggtgaactggac

SEQ ID NO: 230547 - DNA, 120 bp, Artificial Sequence
  ENSG00000119333_4 (sequence is synthesized)
cgagcagcagcagatggtgtcttgtctgtataccctgggctacccgccagcccaagcgcagggtctgcatgtgaccagcatctcctggaactccactggctctgtggtggcctgtgccta

SEQ ID NO: 230548 - DNA, 120 bp, Artificial Sequence
  ENSG00000119333_5 (sequence is synthesized)
cggccggctggaccatggggactggagcacgcttaagtccttcgtgtgtgcctggaacctggaccggcgagacctgcgtccccagcagccgtcggccgtggtggaggtccccagcgctgt

SEQ ID NO: 230549 - DNA, 120 bp, Artificial Sequence
  ENSG00000119333_6 (sequence is synthesized)
cctgtgtctggccttccaccccacgcagccctcccacgtcgcaggagggctgtacagtggtgaggtgttggtgtgggacctgagccgtcttgaggacccgctgctgtggcgcacaggcct

SEQ ID NO: 230550 - DNA, 120 bp, Artificial Sequence
  ENSG00000119333_7 (sequence is synthesized)
ggtgctgagtgtggccaccgacgggaaggtgctactctggcagggcatcggggtaggccagctgcagctcacagagggcttcgccctggtcatgcagcagctgccacggagcaccaagct

SEQ ID NO: 230551 - DNA, 120 bp, Artificial Sequence
  ENSG00000119333_8 (sequence is synthesized)
caagaagcatccccgcggggagaccgaggtgggcgccacggcagtggccttctccagctttgaccctaggctgttcattctgggcacggaaggcggcttcccgctcaagtgttccctggc

SEQ ID NO: 230552 - DNA, 120 bp, Artificial Sequence
  ENSG00000119333_9 (sequence is synthesized)
agctggagaggcagccctcacgcggatgcccagctccgtgcccctgcgggccccagcacagtttaccttctccccccacggcggtcccatctactctgtgagctgttcccccttccacag

SEQ ID NO: 230553 - DNA, 120 bp, Artificial Sequence
  ENSG00000119333_10 (sequence is synthesized)
gaatctcttcctgagcgctgggactgacgggcatgtccacctgtactccatgctgcaggcccctcccttgacttcgctgcagctctccctcaagtatctgtttgctgtgcgctggtcccc

SEQ ID NO: 230554 - DNA, 120 bp, Artificial Sequence
  ENSG00000119333_11 (sequence is synthesized)
agtgcggcccttggtttttgcagctgcctctgggaaaggtgacgtgcagctgtttgatctccagaaaagctcccagaaacccacagttttgatcaagcaaacccaggatgaaagccctgt

SEQ ID NO: 230555 - DNA, 120 bp, Artificial Sequence
  ENSG00000119333_12 (sequence is synthesized)
ctactgtctggagttcaacagccagcagactcagctcttggctgcgggcgatgcccagggcacagtgaaggtgtggcagctgagcacagagttcacggaacaagggccccgggaagctga

SEQ ID NO: 230556 - DNA, 120 bp, Artificial Sequence
  ENSG00000119333_13 (sequence is synthesized)
ggacctggactgcctggcagcagaggtggcggcctgaggggtcccgggaggcgggtgcaagccttcgctgtgccgagccttgtgtttctgacgcaagccaaatgaagaaaagcaaagctt

SEQ ID NO: 230557 - DNA, 120 bp, Artificial Sequence
  ENSG00000119333_14 (sequence is synthesized)
ctgtgtctggccttccaccccacgcagccctcccacgtcgcaggtgagctgcctgctgtgtccgcctcctctcctctcaggactcagcttcccgccctgcagagggcacaagggagcttt

SEQ ID NO: 230558 - DNA, 120 bp, Artificial Sequence
  ENSG00000119333_15 (sequence is synthesized)
ccatgggccctttggcccggagacaggaaggcgggccctgaccctctcagtctggagcccaggtgaaggtctgcagtgagccctgaggggtggaactcgggggaggagtctggaaggggg

SEQ ID NO: 230559 - DNA, 120 bp, Artificial Sequence
  ENSG00000119333_16 (sequence is synthesized)
gggggctgtggagaggccagaagaggcaggtgcccttgggaagccgtcagtggtagggggcaggcaacgctggagggagctgccaggtgcagggcaggggtgtccggcaaagctccctgg

SEQ ID NO: 230560 - DNA, 120 bp, Artificial Sequence
  ENSG00000119333_17 (sequence is synthesized)
ggtacaacaggggagctgggggctaggactctccctctgtggggatgacttccagccaagtggctctgccgcctggccctggccctggccctgtaggtgggctggggcgggtgtttggcc

SEQ ID NO: 230561 - DNA, 120 bp, Artificial Sequence
  ENSG00000119333_18 (sequence is synthesized)
cacccacacagaccctgtgtcccaggtcagggcaggggctgccgggcggggtgggccctgaggcagagctggggagagggcgcccactctcctaggaaggtcacccgggcgttggcagtt

SEQ ID NO: 230562 - DNA, 120 bp, Artificial Sequence
  ENSG00000119333_19 (sequence is synthesized)
ggacagctgcctcctgcattctcggagctcccgcagcatgagtcacccccctcaggagccactcccagggccctgtggccattcccagcctcctctgcaggcaccgagtgagcagcgctg

SEQ ID NO: 230563 - DNA, 120 bp, Artificial Sequence
  ENSG00000119333_20 (sequence is synthesized)
ggattctgggactggagagggccctgggaaccctccaggcctgccccctggtgggtgagcctggttctggggcctcccggagaatttttttttttcctggaagagagggagggtaggggt

SEQ ID NO: 230564 - DNA, 120 bp, Artificial Sequence
  ENSG00000119335_0 (sequence is synthesized)
cgccgtaggaggaggtggaggaggaggcggctcgggagagcgagcagcgagctggctggatcgccgagcgcgagtgagggagccgagccgcccgccgccgccgcctccgcctcccctccg

SEQ ID NO: 230565 - DNA, 80 bp, Artificial Sequence
  ENSG00000119335_1 (sequence is synthesized)
cccgtccctcggcgtcaggccgcgagggtagcgcgcgcgagcgagcgagggggagggagagcgagcgagcgccgggagga

SEQ ID NO: 230566 - DNA, 120 bp, Artificial Sequence
  ENSG00000119335_2 (sequence is synthesized)
gccggaccgagcgggcgcccgcgcgtgtggcgtgaggggaagccgcttgcccgcccccttcgccttcccttctctccccctccccgctccccccccgaccgcggagcagcaccatgtcgg

SEQ ID NO: 230567 - DNA, 120 bp, Artificial Sequence
  ENSG00000119335_3 (sequence is synthesized)
tcggcgccggcggccaaagtcagtaaaaaggagctcaactccaaccacgacggggccgacgagacctcagaaaaagaacagcaagaagcgattgaacacattgatgaagtacaaaatgaa

SEQ ID NO: 230568 - DNA, 120 bp, Artificial Sequence
  ENSG00000119335_4 (sequence is synthesized)
atagacagacttaatgaacaagccagtgaggagattttgaaagtagaacagaaatataacaaactccgccaaccattttttcagaagaggtcagaattgatcgccaaaatcccaaatttt

SEQ ID NO: 230569 - DNA, 120 bp, Artificial Sequence
  ENSG00000119335_5 (sequence is synthesized)
tgggtaacaacatttgtcaaccatccacaagtgtctgcactgcttggggaggaagatgaagaggcactgcattatttgaccagagttgaagtgacagaatttgaagatattaaatcaggt

SEQ ID NO: 230570 - DNA, 120 bp, Artificial Sequence
  ENSG00000119335_6 (sequence is synthesized)
tacagaatagatttttattttgatgaaaatccttactttgaaaataaagttctctccaaagaatttcatctgaatgagagtggtgatccatcttcgaagtccaccgaaatcaaatggaaa

SEQ ID NO: 230571 - DNA, 120 bp, Artificial Sequence
  ENSG00000119335_7 (sequence is synthesized)
tctggaaaggatttgacgaaacgttcgagtcaaacgcagaataaagccagcaggaagaggcagcatgaggaaccagagagcttctttacctggtttactgaccattctgatgcaggtgct

SEQ ID NO: 230572 - DNA, 120 bp, Artificial Sequence
  ENSG00000119335_8 (sequence is synthesized)
gatgagttaggagaggtcatcaaagatgatatttggccaaacccattacagtactacttggttcccgatatggatgatgaagaaggagaaggagaagaagatgatgatgatgatgaagag

SEQ ID NO: 230573 - DNA, 120 bp, Artificial Sequence
  ENSG00000119335_9 (sequence is synthesized)
gaggaaggattagaagatattgacgaagaaggggatgaggatgaaggtgaagaagatgaagatgatgatgaaggggaggaaggagaggaggatgaaggagaagatgactaaatagaacac

SEQ ID NO: 230574 - DNA, 120 bp, Artificial Sequence
  ENSG00000119335_10 (sequence is synthesized)
aggagaggaggatgaaggagaagatgactaaatagaacactgatggattccaaccttcctttttttaaattttctccagtccctgggagcaagttgcagtcttttttttttttttttttt

SEQ ID NO: 230575 - DNA, 120 bp, Artificial Sequence
  ENSG00000119335_11 (sequence is synthesized)
cttttctctactccatggttctcaatttatttggggggaaataccttgagcagaatacaatgggaaaagagtctctacccctttctgttcgaagttcatttttatcccttcctgtctgaa

SEQ ID NO: 230576 - DNA, 120 bp, Artificial Sequence
  ENSG00000119335_12 (sequence is synthesized)
tgggaaaaaagaaaaacctgctcccttcgctctgctggaagctggagggtgctaggcccctgtgtagtagtgcatagaattctagcttttttcctcctttctctgtatattgggctcaga

SEQ ID NO: 230577 - DNA, 120 bp, Artificial Sequence
  ENSG00000119335_13 (sequence is synthesized)
gagtacactgtgtctctatgtgaatatggacagttagcatttaccaacatgtatctgtctactttctcttgtttaaaaaaagaaaaaaaaacttaaaaaaatggggttatagaaggtcag

SEQ ID NO: 230578 - DNA, 120 bp, Artificial Sequence
  ENSG00000119335_14 (sequence is synthesized)
caaagggtgggtttgagatgtttgggtgggttaagtgggcattttgacaacatggcttctcctttggcatgtttaattgtgatatttgacagacatccttgcagtttaagatgacacttt

SEQ ID NO: 230579 - DNA, 120 bp, Artificial Sequence
  ENSG00000119335_15 (sequence is synthesized)
tttgacagacatccttgcagtttaagatgacacttttaaaataaattctctcctaatgatgacttgagccctgccactcaatgggagaatcagcagaacctgtaggatcttatttggaat

SEQ ID NO: 230580 - DNA, 120 bp, Artificial Sequence
  ENSG00000119335_16 (sequence is synthesized)
ttaaattttctttttgtttcactggaaaggaaagatgatgctcagttttaaacgttaaaagtgtacaagttgctttgttacaataaaactaaatgtgtacacaaaggatttgatgctttt

SEQ ID NO: 230581 - DNA, 120 bp, Artificial Sequence
  ENSG00000119335_17 (sequence is synthesized)
ctctcagcataggtatgcttactatgaccttccaagtttgacttgtataacatcactgtcaaactttgtcaccctaacttcgtattttttgatacgcactttgcaggatgacctcagggc

SEQ ID NO: 230582 - DNA, 120 bp, Artificial Sequence
  ENSG00000119335_18 (sequence is synthesized)
tatgtggattgagtaatgggatttgaatcaatgtattaatatctccatagctgggaaacgtgggttcaatttgccattggtttctgaaagtattcacatcatttgggataccagatagct

SEQ ID NO: 230583 - DNA, 120 bp, Artificial Sequence
  ENSG00000119335_19 (sequence is synthesized)
caatactctctgagtacattgtgcccttgatttttatctccaagtggcagtttttaaaattggccttttacctggatataaattaattgtgcctgccaccaccatccaacagacctggtg

SEQ ID NO: 230584 - DNA, 120 bp, Artificial Sequence
  ENSG00000119335_20 (sequence is synthesized)
ctctaatgccaagttatacacgggacagttgctggcatgtcttcattggctatataaaatgtggccaagaagataggctctcagtaagaagtctgatggtgagcagtaactgtccctgct

SEQ ID NO: 230585 - DNA, 120 bp, Artificial Sequence
  ENSG00000119335_21 (sequence is synthesized)
ttctggtataaagctctcaaatgtgaccatgtgaatctgggtgggataatggactcagctctgtctgctcaatgccattgtgcagagaagcaccctaatgcataagctttttaatgctgt

SEQ ID NO: 230586 - DNA, 120 bp, Artificial Sequence
  ENSG00000119335_22 (sequence is synthesized)
aaaatatagtcgctgaaattaaatgccactttttcagaggtgaattaatggacagtctggtgaacttcaaaagctttttgatgtataaaacttgataaatggaactattccatcaatagg

SEQ ID NO: 230587 - DNA, 120 bp, Artificial Sequence
  ENSG00000119335_23 (sequence is synthesized)
caaaagtgtaacaacctatctagatggatagtatgtaatttctgcacaggtctctgtttagtaaatacatcactgtataccgatcaggaatcttgctccaataaaggaacataaagattt

SEQ ID NO: 230588 - DNA, 120 bp, Artificial Sequence
  ENSG00000119335_24 (sequence is synthesized)
tggcgccgcgaccagtgtatcgggggtcttggaaatggctaagaaagctggcctctgcctaggaggctctcggcaggggggctgccaatccgggatggttaccggaaatgaaccgcgcga

SEQ ID NO: 230589 - DNA, 120 bp, Artificial Sequence
  ENSG00000119335_25 (sequence is synthesized)
gtgcccctgcagagcgaggcagagagcaactaaaagaaatttctcctgattggagggtgggtgggatgaggctgggggagggggccggggtgtgtgtcccactgtcatgtaaatatccct

SEQ ID NO: 230590 - DNA, 120 bp, Artificial Sequence
  ENSG00000119335_26 (sequence is synthesized)
tccaggcagggcggctccagtgcagatttaagccgctggcacctggggcagtctcagtgttcagcctgcttccggacgggcgaggagactcgtggtctggttctgggacttccctaacag

SEQ ID NO: 230591 - DNA, 120 bp, Artificial Sequence
  ENSG00000119335_27 (sequence is synthesized)
catggcccctaaacgccagtctccactcccgcctcaaaagaagaaaccaagaccacctcctgctctgggaccggaggagacatcggcctctgcaggcttgccgaagaagggagaaaaaga

SEQ ID NO: 230592 - DNA, 120 bp, Artificial Sequence
  ENSG00000119335_28 (sequence is synthesized)
gggttcatgttctgagaaggcgaaggccagggtgtaggatggtgccccgtgactttccagtctttgtaggcgtgcctggtatcttcatcgtaatagcagagtcgtcaactttctatgaaa

SEQ ID NO: 230593 - DNA, 120 bp, Artificial Sequence
  ENSG00000119335_29 (sequence is synthesized)
aagaagcactgaggaggagtcctacctcagggctcagtgtggacctgttggcacttttactgggtctcagtcccttttcctccacatgggatgcagagacctcctgcccagcttgaaacc

SEQ ID NO: 230594 - DNA, 120 bp, Artificial Sequence
  ENSG00000119335_30 (sequence is synthesized)
tgttttaatggcttttggaatattatagtattaacatctggaaaactaggtaaatttatcttagaattaagttttttgctccttttttgcagaaaaagaacagcaagaagcgattgaaca

SEQ ID NO: 230595 - DNA, 79 bp, Artificial Sequence
  ENSG00000119335_31 (sequence is synthesized)
cgggaaaagatatacagctactgctttctattctgtttaggagaagctatattctaattgcttgatgaaagatagtgac

SEQ ID NO: 230596 - DNA, 120 bp, Artificial Sequence
  ENSG00000119335_32 (sequence is synthesized)
ggagaagctatattctaattgcttgatgaaagatagtgacagtctgatattgagcaattgcctttagttaataatgggtttataaaaccaaagatgctcactaagttcggaaaaatttta

SEQ ID NO: 230597 - DNA, 120 bp, Artificial Sequence
  ENSG00000119383_0 (sequence is synthesized)
attgagacctgtggaggaggaaggaggaggtcaccgtccagctgtctctcccctgtccccacatgtcttctaagctgttggagccggccggcgctcacttgtcttcaggaagctcggagc

SEQ ID NO: 230598 - DNA, 120 bp, Artificial Sequence
  ENSG00000119383_1 (sequence is synthesized)
ctttggtggagccggggagaggaagggtgggtgcaagagtgaaaggcgagaggggactgcaagcatccgggtcggctcctggccggagcaagatggctgagggcgagcggcagccgccgc

SEQ ID NO: 230599 - DNA, 120 bp, Artificial Sequence
  ENSG00000119383_2 (sequence is synthesized)
cagattcttcagaggaggcccctccagccactcagaacttcatcattccaaaaaaggagatccacacagttccagacatgggcaaatggaagcgttctcaggcatacgctgactacatcg

SEQ ID NO: 230600 - DNA, 120 bp, Artificial Sequence
  ENSG00000119383_3 (sequence is synthesized)
gattcatccttaccctcaacgaaggtgtgaaggggaagaagctgaccttcgagtacagagtctccgaggccattgagaaactagtcgctcttctcaacacgctggacaggtggattgatg

SEQ ID NO: 230601 - DNA, 120 bp, Artificial Sequence
  ENSG00000119383_4 (sequence is synthesized)
agactcctccagtggaccagccctctcggtttgggaataaggcatacaggacctggtatgccaaacttgatgaggaagcagaaaacttggtggccacagtggtccctacccatctggcag

SEQ ID NO: 230602 - DNA, 120 bp, Artificial Sequence
  ENSG00000119383_5 (sequence is synthesized)
ctgctgtgcctgaggtggctgtttacctaaaggagtcagtggggaactccacgcgcattgactacggcacagggcatgaggcagccttcgctgctttcctctgctgtctctgcaagattg

SEQ ID NO: 230603 - DNA, 120 bp, Artificial Sequence
  ENSG00000119383_6 (sequence is synthesized)
gggtgctccgggtggatgaccaaatagctattgtcttcaaggtgttcaatcggtaccttgaggttatgcggaaactccagaaaacatacaggatggagccagccggcagccagggagtgt

SEQ ID NO: 230604 - DNA, 120 bp, Artificial Sequence
  ENSG00000119383_7 (sequence is synthesized)
ggggtctggatgacttccagtttctgcccttcatctggggcagttcgcagctgatagaccacccatacctggagcccagacactttgtggatgagaaggccgtgaatgagaaccacaagg

SEQ ID NO: 230605 - DNA, 120 bp, Artificial Sequence
  ENSG00000119383_8 (sequence is synthesized)
actacatgttcctggagtgtatcctgtttattaccgagatgaagactggcccatttgcagagcactccaaccagctgtggaacatcagcgccgtcccttcctggtccaaagtgaaccagg

SEQ ID NO: 230606 - DNA, 120 bp, Artificial Sequence
  ENSG00000119383_9 (sequence is synthesized)
gtctcatccgcatgtataaggccgagtgcctggagaagttccctgtgatccagcacttcaagttcgggagcctgctgcccatccatcctgtcacgtcgggctaggaggggccaagccgaa

SEQ ID NO: 230607 - DNA, 120 bp, Artificial Sequence
  ENSG00000119383_10 (sequence is synthesized)
gagccacccaggccacagttcctgtgcctgccttccccaccccagcagtggcccctccccatcccctccctctgttcgtcccgtttgatgagaggctgtttactggggtggggtggcgag

SEQ ID NO: 230608 - DNA, 120 bp, Artificial Sequence
  ENSG00000119383_11 (sequence is synthesized)
taaggcttcagggcccaagttgggagaagtgaccaaagtgtagccagttttctgagttcccgtgtgctagactggccagaagagagggtctggggcctggtcactcggccactctctcct

SEQ ID NO: 230609 - DNA, 120 bp, Artificial Sequence
  ENSG00000119383_12 (sequence is synthesized)
gtttctggcctcttctcccttcactcccgtccagtctggttttgagagcaggggctgttctgcagcaccgcagggaagggaggagagatacctgctgcttccattgcttttcccttcctg

SEQ ID NO: 230610 - DNA, 120 bp, Artificial Sequence
  ENSG00000119383_13 (sequence is synthesized)
gagtcgatgcctttctaagggttggagctgctccttgcaggggcgggtcagtttcccaggccatgccggggtggccatctatggtagggctggaagctgaggctggccgccagctgtggg

SEQ ID NO: 230611 - DNA, 120 bp, Artificial Sequence
  ENSG00000119383_14 (sequence is synthesized)
ctggggtggggtgggtggggtcgggtggtggagaggccttagctgtcctggctggtgcccctcccaggctccttttcaccctgccccctgggcctgaggccccctgtgtccaagcctccc

SEQ ID NO: 230612 - DNA, 120 bp, Artificial Sequence
  ENSG00000119383_15 (sequence is synthesized)
cctggctcttcagttctctagcccttggctctgctgggtttcctgactgtagccacatctctcccgctccctaagggtaacctagccaatggaagctgccctttgggtaggtgctgggct

SEQ ID NO: 230613 - DNA, 120 bp, Artificial Sequence
  ENSG00000119383_16 (sequence is synthesized)
cctgggagggcccagatgatggggtgaggcatgtctttccagaactttccctggcagggaggggatggcagaaactcagggaggggcttggggcccattgtatctggagagcctggattc

SEQ ID NO: 230614 - DNA, 120 bp, Artificial Sequence
  ENSG00000119383_17 (sequence is synthesized)
ctcttggcagtcttaggcccggccacttctgctacctttgcgctgctgtgagcctcaccctgggcccctgggccctgcttctctgctcccctgggtgatgggtgggcccagaaggtggca

SEQ ID NO: 230615 - DNA, 120 bp, Artificial Sequence
  ENSG00000119383_18 (sequence is synthesized)
gtcccacaccttgtcctcccacctccctgaactgtccattgcttttatagggtgaggtaagagacagcctcccaagcccaggctttggcactcagaatgggcccagtgggggctgggcag

SEQ ID NO: 230616 - DNA, 120 bp, Artificial Sequence
  ENSG00000119383_19 (sequence is synthesized)
gcccattgagggccaccgccgaggtttctcctagggctgttcctgggcctggctcttacaggctcgtcccccaggcctgcccttctccactgccccctcctgtgtctgggtccacacacc

SEQ ID NO: 230617 - DNA, 120 bp, Artificial Sequence
  ENSG00000119383_20 (sequence is synthesized)
cttcaggaagggggagcactgagaagcacagcacaggggctcagcctgggatccggtgatggtctgggcagaggctgggtcaggagtcccaaaggtcagtgacagtttctcagaagaggc

SEQ ID NO: 230618 - DNA, 120 bp, Artificial Sequence
  ENSG00000119383_21 (sequence is synthesized)
ccagcgtccacctctctcccagggccagacagcccttcctggctcccccatccccctatgggctcccagccccttgcaccctcattgctgttcagattaaagcctctgttttgcacctgt

SEQ ID NO: 230619 - DNA, 120 bp, Artificial Sequence
  ENSG00000119383_22 (sequence is synthesized)
atgcgccccgcgcgccccgcactgacatggccgtcgcccggttccgcgcgtccgccgcgcgccggccgttaataggcttgctccctgagcgccccgcaccgacatggcggccgtcttcgc

SEQ ID NO: 230620 - DNA, 120 bp, Artificial Sequence
  ENSG00000119383_23 (sequence is synthesized)
ccttcgagtacagagtctccgagatgtggaatgaggttcatgaggaaaaggagcaggctgcaaagcagagtgtgtcctgcgatgaatgcataccattaccccgcgccgggcactgtgcac

SEQ ID NO: 230621 - DNA, 120 bp, Artificial Sequence
  ENSG00000119383_24 (sequence is synthesized)
cctggagggtcagactctttggcaagagggaggaccaggaatggagccgtccttgtgcctgcctctttcagctgctgtggcggccaccccttccccacctcctggccaggccaggctggc

SEQ ID NO: 230622 - DNA, 120 bp, Artificial Sequence
  ENSG00000119383_25 (sequence is synthesized)
tgctgcttcaggcacccctgcctcccatcggccctctcttccctgcctgcatggcaggcagagggctgtcggatacctgggtttggtcatacccaccttggtcctcttgcaaattgaccc

SEQ ID NO: 230623 - DNA, 120 bp, Artificial Sequence
  ENSG00000119383_26 (sequence is synthesized)
gaaggaacagggaggggagggcgtgcctagagttgttggctgttccgcaccttctccacaggtccgggttttcactttgggtctaggctcttgggcatggtgttcaacagtagaccctag

SEQ ID NO: 230624 - DNA, 120 bp, Artificial Sequence
  ENSG00000119383_27 (sequence is synthesized)
gaggagtgtgcccaggagccggggtggctgcagcaagggcccatcttgccacgtggccgctggttgcagcacacgttgtgttggttctccagagcgcccaccctcttccacctcggagca

SEQ ID NO: 230625 - DNA, 120 bp, Artificial Sequence
  ENSG00000119383_28 (sequence is synthesized)
ctggtggccttacagtggatcagaagagccagagctgctgcccaaaatggcagggccggccggagcgggttattgaaaaggaagcaccactgggcctcttccgaaagagccgctgctgac

SEQ ID NO: 230626 - DNA, 120 bp, Artificial Sequence
  ENSG00000119383_29 (sequence is synthesized)
tgtcaggtcctccgcccagttctccttcagtttctcctgaacaccacaggagtcttgagatgagggtctaagacttggtcactaactggccttggtgactgctgcagcaggtctgaaagg

SEQ ID NO: 230627 - DNA, 120 bp, Artificial Sequence
  ENSG00000119383_30 (sequence is synthesized)
gtcggggcgggcggaggtttgtgggggagggtcagcatctttcggtggggccccacaagggtctgtagaaccatgtgctgtggatgtgtaaaatgaaaccaccagaggagatggagcgaa

SEQ ID NO: 230628 - DNA, 120 bp, Artificial Sequence
  ENSG00000119383_31 (sequence is synthesized)
agatttcagctggaagggaaggagctgacaggaaggcgctgtgcagagcctccccacccccgcccatccccccagttactgacagaggagccatttacaaaaggccgattctctggggag

SEQ ID NO: 230629 - DNA, 120 bp, Artificial Sequence
  ENSG00000119383_32 (sequence is synthesized)
gctggagaggcgctctgaggctcctggggagtcggtgggaacgacaccagaagctcaggtggagatcttatcttcctgaggctgctggatttggtgggcgataggaatcaggcccccttt

SEQ ID NO: 230630 - DNA, 120 bp, Artificial Sequence
  ENSG00000119383_33 (sequence is synthesized)
gctatttatctgaacccaagtgaatccctgtgctggagaggcgctctgaggctcctggggagtcggtgggaacgacaccagaagctcaggtggagatcttatcttcctgaggctgctgga

SEQ ID NO: 230631 - DNA, 120 bp, Artificial Sequence
  ENSG00000119383_34 (sequence is synthesized)
gatgtggaacctggggctcctgcttcctcctaccccactgttttgctctgaatcttaggccagcccctctgacacttggggcctcggaatctcccatctggggcatgggcagtcagagaa

SEQ ID NO: 230632 - DNA, 120 bp, Artificial Sequence
  ENSG00000119383_35 (sequence is synthesized)
gcaccagccaccccagccccgaaaagctgcagtccagctctgtcctgatgagcttggaggctgaggcaaggacctgctgcatggggagtgggggcgatgggggcctcccttctcctttat

SEQ ID NO: 230633 - DNA, 120 bp, Artificial Sequence
  ENSG00000119383_36 (sequence is synthesized)
caagtggccaaaggctcctcaaagctcgggcagtctgagtctggctctcccatggcatacctgggaagggtcttaccctttggaggcatctccaaagtgctgccttcaaatgttagtgtg

SEQ ID NO: 230634 - DNA, 120 bp, Artificial Sequence
  ENSG00000119383_37 (sequence is synthesized)
tgtgggcaccatctcttgactcctggccggccttctcttctgggaaggggctgctccaggtcttcattggacccagagcttcctggatcccatcagcagaggcgggacaacggggaaggg

SEQ ID NO: 230635 - DNA, 120 bp, Artificial Sequence
  ENSG00000119383_38 (sequence is synthesized)
tgccagaggccagcggggtgggggagcacagatgcttccagttggcttggctccctgcacttggtcctgaaggggttaatgaggcttgaactgaacagaccgggccctcactcccttccg

SEQ ID NO: 230636 - DNA, 120 bp, Artificial Sequence
  ENSG00000119383_39 (sequence is synthesized)
agagggggtgggcctggaggggtggggcctagctgctgctgctatttatctgaacccaagtgaatccctgtgctggagaggcgctctgaggctcctggggagtcggtgggaacgacacca

SEQ ID NO: 230637 - DNA, 120 bp, Artificial Sequence
  ENSG00000119392_0 (sequence is synthesized)
gcgcgcgcgtcccggaagcagaagcctgtgtggccttcccggcggctgattcgagggcttgtttggtcagaaggggggcgtcagagaagctgccccttagccaaccatgccgtctgaggg

SEQ ID NO: 230638 - DNA, 120 bp, Artificial Sequence
  ENSG00000119392_1 (sequence is synthesized)
tcgctgctgggagaccttgaaggccctacgcagttccgacaaaggtcgcctttgctactaccgcgactggctgctgcggcgcgaggatgttttagaagaatgtatgtctcttcccaagct

SEQ ID NO: 230639 - DNA, 120 bp, Artificial Sequence
  ENSG00000119392_2 (sequence is synthesized)
atcttcttattctggatgggtggtagagcacgtcctaccccatatgcaggagaaccaacctctgtctgagacttcgccatcctctacgtcagcttcagccctagatcaaccctcatttgt

SEQ ID NO: 230640 - DNA, 120 bp, Artificial Sequence
  ENSG00000119392_3 (sequence is synthesized)
tcccaaatctcctgacgcaagctctgccttttccccagcctcccctgcaacaccaaatggaaccaagggcaaagatgagtcccagcacacagaatctatggtacttcagtcctcacgggg

SEQ ID NO: 230641 - DNA, 120 bp, Artificial Sequence
  ENSG00000119392_4 (sequence is synthesized)
gatcaaagtggaaggctgcgtccgaatgtacgaactggtacacagaatgaaaggaacagagggcctgaggctatggcaggaggagcaggagaggaaggtgcaagccctctcggagatggc

SEQ ID NO: 230642 - DNA, 120 bp, Artificial Sequence
  ENSG00000119392_5 (sequence is synthesized)
atctgaacaactgaagcggtttgatgaatggaaggaactgaagcagcataaagaattccaggacttgcgggaagtaatggagaagagctccagagaagccttgggacaccaagagaagct

SEQ ID NO: 230643 - DNA, 120 bp, Artificial Sequence
  ENSG00000119392_6 (sequence is synthesized)
aaaagctgagcaccgtcacagagcaaagattctcaacctgaagctgcgggaagcagagcagcagcgcgtgaagcaagcagaacaggagcggcttcggaaggaagaaggccagatccgcct

SEQ ID NO: 230644 - DNA, 120 bp, Artificial Sequence
  ENSG00000119392_7 (sequence is synthesized)
gcgggccctctatgctctgcaggaggagatgctgcagctcagccagcagctggatgcctctgagcagcacaaagccctgcttaaggtcgacctggctgccttccagacccgaggcaacca

SEQ ID NO: 230645 - DNA, 120 bp, Artificial Sequence
  ENSG00000119392_8 (sequence is synthesized)
gctgtgcagcctcatctcagggatcatccgggcctcttcagagagcagctatcccacagcagagagtcaagctgaggctgagcgagctctgcgggaaatgcgggacctcctgatgaactt

SEQ ID NO: 230646 - DNA, 120 bp, Artificial Sequence
  ENSG00000119392_9 (sequence is synthesized)
ggggcaggagatcaccagagcctgcgaagacaagaggaggcaggatgaagaagaggcccaggtaaagctgcaagaggcacagatgcagcagggaccagaggcccacaaagagcccccagc

SEQ ID NO: 230647 - DNA, 120 bp, Artificial Sequence
  ENSG00000119392_10 (sequence is synthesized)
tcccagccagggcccaggagggaaacagaatgaagacctccaggtgaaggtacaagacattacaatgcagtggtaccagcagctgcaggatgcttccatgcagtgtgtgttgacctttga

SEQ ID NO: 230648 - DNA, 120 bp, Artificial Sequence
  ENSG00000119392_11 (sequence is synthesized)
gggcctgaccaacagcaaggacagtcaggccaaaaagataaagatggacctccagaaggctgctaccatcccagtgagccaaatctctaccattgcaggctcaaaactgaaggagatctt

SEQ ID NO: 230649 - DNA, 120 bp, Artificial Sequence
  ENSG00000119392_12 (sequence is synthesized)
tgacaagatccacagcctgctctctggaaaacctgttcaatctggtgggcgctctgtgtctgtcacacttaacccacaggggctggactttgttcaatacaaactggcagagaaatttgt

SEQ ID NO: 230650 - DNA, 120 bp, Artificial Sequence
  ENSG00000119392_13 (sequence is synthesized)
ccaccccagagtgggggacctcattcttgctcatctacataagaagtgtccttactctgttcctttctatcccactttcaaggagggaatggctttggaagactatcagaggatgcttgg

SEQ ID NO: 230651 - DNA, 120 bp, Artificial Sequence
  ENSG00000119392_14 (sequence is synthesized)
ttaccaagtaaaggattccaaagtggagcagcaagacaactttctaaaacgcatgtcagggatgatccgtctctacgctgctatcatccagctccggtggccatatggaaaccgacagga

SEQ ID NO: 230652 - DNA, 120 bp, Artificial Sequence
  ENSG00000119392_15 (sequence is synthesized)
gattcaccctcatggcttaaatcatggatggcgctggttggcacagatcttaaacatggagcccttgtcagatgtgacagccaccctcctctttgacttcctggaggtgtgtgggaatgc

SEQ ID NO: 230653 - DNA, 120 bp, Artificial Sequence
  ENSG00000119392_16 (sequence is synthesized)
cctcatgaagcaataccaggttcagttctggaagatgctaattctcatcaaagaggactactttcccagaattgaagctatcacaagctcaggacagatgggctccttcatacgcctcaa

SEQ ID NO: 230654 - DNA, 120 bp, Artificial Sequence
  ENSG00000119392_17 (sequence is synthesized)
gcagttcttggagaaatgtttgcaacacaaggacattcctgtccccaagggctttctgacttcctccttctggcgctcctgatgtcactccatcacccaccatcaccgctgctgcaaaga

SEQ ID NO: 230655 - DNA, 120 bp, Artificial Sequence
  ENSG00000119392_18 (sequence is synthesized)
ggcaataataaaggaactgaagacagctgtatttgggagaagtcatgtcagattcagaaatttgccattatgtatttttatgtatttatgccttgtgactaggagaggagattttcatgg

SEQ ID NO: 230656 - DNA, 120 bp, Artificial Sequence
  ENSG00000119392_19 (sequence is synthesized)
gtcacaaaattcttggaggtcccttagtagatttggtagttccttaagagatccacgtgataaaataaatggagttggcctttcttgttttttgcaaaagtgataaaaggtctttagcac

SEQ ID NO: 230657 - DNA, 120 bp, Artificial Sequence
  ENSG00000119392_20 (sequence is synthesized)
ttggtctcctcccttgtctctagtgtctttcagaaagttggcaataccttaacaaatgcactctgagctggagggagcccaccatttgcacccacctacccaccctcacccctgttcaga

SEQ ID NO: 230658 - DNA, 120 bp, Artificial Sequence
  ENSG00000119392_21 (sequence is synthesized)
tgaatttccagaaagagctaaggctcataaggttcccttttaagtattatttaatagttgaggccagatacttacatgcaagtctgggttatggttgttttgcctttctcagcttgtgaa

SEQ ID NO: 230659 - DNA, 120 bp, Artificial Sequence
  ENSG00000119392_22 (sequence is synthesized)
gtcattctaaagctagaggaagtatgtgatatacacatggactaaggctcaggtgacactatggctagattaacatctgggattaggactggaaacacatgtcattttgaactaagggaa

SEQ ID NO: 230660 - DNA, 120 bp, Artificial Sequence
  ENSG00000119392_23 (sequence is synthesized)
acatgtcattttgaactaagggaaactctttgtcatcctaatttggaatttggtccctggatggctagggatccatgaaccaggcaggtaccttttttgtttttgttttgttttgtttct

SEQ ID NO: 230661 - DNA, 120 bp, Artificial Sequence
  ENSG00000119392_24 (sequence is synthesized)
aagatggggcttgcaacattaaacatgagctgagcatccataagcattgaattgggattaaataaagatgttgggcaggaactgaacactgctaatatgatgataaatatgcctgactaa

SEQ ID NO: 230662 - DNA, 120 bp, Artificial Sequence
  ENSG00000119392_25 (sequence is synthesized)
agccactacagaaatccagagattggctgttaaaatttgttttgtggaaagactaattctctttgatactgcagaggcagtggccatggatctgttcctctgtgctaaatgtcttgtggc

SEQ ID NO: 230663 - DNA, 120 bp, Artificial Sequence
  ENSG00000119392_26 (sequence is synthesized)
agggtgtgtttgtgggggagtgttcactggtactcttgagtggcctgaagtgacccattctatgaattgttaattaaggtgccaaaaaaaattaataataaagcttggttttttgaaaaa

SEQ ID NO: 230664 - DNA, 120 bp, Artificial Sequence
  ENSG00000119392_27 (sequence is synthesized)
acccaagggtgctattacctgctggttttgattcaagttaaaaacacctgtactaagtatgacatctttcctactccagtccctctcgttgatatttgaataaatgcttttgaaccttaa

SEQ ID NO: 230665 - DNA, 120 bp, Artificial Sequence
  ENSG00000119396_0 (sequence is synthesized)
atcttggaccagcccgaggaagatactgagggagcacaggagcagtcaccgctgccactgctactgccgctactgctgccggcgcgtctgcacctctcggcctgccagtgtacctgccgg

SEQ ID NO: 230666 - DNA, 120 bp, Artificial Sequence
  ENSG00000119396_1 (sequence is synthesized)
cgcctcggtcgaccgcccccgccccctctcccgctgcgtccgcactcctgttcctggtcctgacgcccccctcccgcccggaaagctgcccagccaccagcaaccccccagtgccaccat

SEQ ID NO: 230667 - DNA, 120 bp, Artificial Sequence
  ENSG00000119396_2 (sequence is synthesized)
ggcaactgcaccatacaactactcttacatctttaaatatattattattggggacatgggagtaggaaaatcttgcttgcttcatcaatttacagaaaaaaaatttatggctgattgtcc

SEQ ID NO: 230668 - DNA, 120 bp, Artificial Sequence
  ENSG00000119396_3 (sequence is synthesized)
tcacacaattggtgttgaatttggtacaagaataatcgaagttagtggccaaaaaataaaactgcagatttgggatacggcaggacaggagcgatttagggctgttacacggagctacta

SEQ ID NO: 230669 - DNA, 120 bp, Artificial Sequence
  ENSG00000119396_4 (sequence is synthesized)
cagaggagctgcgggagctcttatggtctatgatatcactagaagaagtacatataaccacttaagcagctggttgacagatgcaaggaatctcaccaatccaaatactgtaataattct

SEQ ID NO: 230670 - DNA, 120 bp, Artificial Sequence
  ENSG00000119396_5 (sequence is synthesized)
cataggaaataaagcagatttggaggcacagagagatgttacatatgaagaagccaaacagtttgctgaagaaaatggcttattgttcctcgaagcgagtgcaaaaacgggagagaatgt

SEQ ID NO: 230671 - DNA, 120 bp, Artificial Sequence
  ENSG00000119396_6 (sequence is synthesized)
agaagatgccttccttgaggctgccaagaaaatctatcagaacattcaggatggaagcttggatctgaatgctgctgagtctggtgtacaacacaaaccttcagccccgcagggaggccg

SEQ ID NO: 230672 - DNA, 120 bp, Artificial Sequence
  ENSG00000119396_7 (sequence is synthesized)
gctaaccagtgaaccccaaccccagagagaaggctgtggctgctagtgacctctttgctgtggcccctcatttgacctttcacctctgtctgttggaagcagtactttttactgcctcat

SEQ ID NO: 230673 - DNA, 120 bp, Artificial Sequence
  ENSG00000119396_8 (sequence is synthesized)
tgtcttctgtacatcttactgggtttaattaaaaaaaaagaaaaaactctgttgtaaaaacagtttaacacaatactaaactgctaaacaactagatgtaatcaggttatcaaaggcaag

SEQ ID NO: 230674 - DNA, 120 bp, Artificial Sequence
  ENSG00000119396_9 (sequence is synthesized)
tagagtaataaatctctcctgcatggtaaatctagactttttttcccccttgtcctcgtgataagtatgtcaccaatatatgatttaaaccgagcactgatgctggacttcatgattttt

SEQ ID NO: 230675 - DNA, 120 bp, Artificial Sequence
  ENSG00000119396_10 (sequence is synthesized)
accctccctttggcaaggctttgtctcactgtacggtttaatttggtgatatcttaagcctttcttcccatccttaactgttcaagtatgtctgttgtaaccaataagtttattgctgtg

SEQ ID NO: 230676 - DNA, 120 bp, Artificial Sequence
  ENSG00000119396_11 (sequence is synthesized)
aaattacttctgatggtagagaaggggttctataactgcttttgttttgttttggataaatttcctgttgtgtgggtggcatttttcttaacgagatttgcttctgtcttagcctcacac

SEQ ID NO: 230677 - DNA, 120 bp, Artificial Sequence
  ENSG00000119396_12 (sequence is synthesized)
agggaaaatatccatttatcttctctctcgtgcttaattaatagctttatctttttttataccattttatccttttctctttaacagaaagtaaatatgtataaaatttgaaggaatcga

SEQ ID NO: 230678 - DNA, 120 bp, Artificial Sequence
  ENSG00000119396_13 (sequence is synthesized)
actaacaatacattctgtgtatattattttaatgaagaaaataaattgattactggcattggaacagtataaaataccagtttgtacagtatgacctatatgtgaccatgttactccctt

SEQ ID NO: 230679 - DNA, 120 bp, Artificial Sequence
  ENSG00000119396_14 (sequence is synthesized)
ccatttcacacaaagaaatagacacaactgcagttcacaagtagtactggctccaccccttggtgctggcagtgtttggggacattatgctggaaagagctcctagcatcagaggattaa

SEQ ID NO: 230680 - DNA, 120 bp, Artificial Sequence
  ENSG00000119396_15 (sequence is synthesized)
cactagcagattctgttccatctttgcactgttgcttacctgctgattttcttaactgttcttgtgcaatcgacaatgtgctaacctgcttttctctttttgtaaacgtttttgcattac

SEQ ID NO: 230681 - DNA, 120 bp, Artificial Sequence
  ENSG00000119396_16 (sequence is synthesized)
aggctgcattcttgccttactgtatagaaaaagaaaaaaggctgggtttactattgcacattttaagcttttatacctttatcttcttggaatggtcagattctgaactggacagtcaga

SEQ ID NO: 230682 - DNA, 120 bp, Artificial Sequence
  ENSG00000119396_17 (sequence is synthesized)
tccctgtgttcacagtgtgaggggctgttttatgtcatgttggcataaattgttttgtaaaagggaaagtgtttctaaaggtgtttcagcgcttgtgctgatacaaagtaagttattact

SEQ ID NO: 230683 - DNA, 120 bp, Artificial Sequence
  ENSG00000119396_18 (sequence is synthesized)
ttgcaccaggtggtttggccactgaattaatactgtatagcaagagaaacaatcttatttttttggacaacatgttttattaagttcttcatttctgttgattttttttattgcatttat

SEQ ID NO: 230684 - DNA, 120 bp, Artificial Sequence
  ENSG00000119396_19 (sequence is synthesized)
gattcagtggctgggaattgagaatttatttgaaatagaataggtaacacctcagcgtactatagaaaatgcactcagctcaactgctgtgtttaaaatacacattttaaatccctcttt

SEQ ID NO: 230685 - DNA, 120 bp, Artificial Sequence
  ENSG00000119396_20 (sequence is synthesized)
acagacactaacataaaagtacatctttctgggttgtaaacatgtggtagtaccagagtattgtatagtcaatgttaaataaaagccaaaactggaatgtgcagaaagtaggctttggtt

SEQ ID NO: 230686 - DNA, 120 bp, Artificial Sequence
  ENSG00000119396_21 (sequence is synthesized)
aatttgtggattcatttttatttttgtctttgtttaactttttaaaaaataagatttctggagtagattggtatattctgttaaagacttacagtgatccattttgcttacactgttgca

SEQ ID NO: 230687 - DNA, 120 bp, Artificial Sequence
  ENSG00000119396_22 (sequence is synthesized)
tcacaagggactcacccagggaccatgacctgctggtgtgtgtgtatatttacaaaaacaaaacaaacaaaccacccattgggatataaggtagcaatcacaaactaaagactgcggctt

SEQ ID NO: 230688 - DNA, 120 bp, Artificial Sequence
  ENSG00000119396_23 (sequence is synthesized)
gttgaggtgcaataccctgactcccaaagttagttacagtgggttttattgtttttgtgactgaaggatttattcagactgctgtactcttcatttgatgtaacaaaatgctattaatct

SEQ ID NO: 230689 - DNA, 120 bp, Artificial Sequence
  ENSG00000119396_24 (sequence is synthesized)
aaatatttgtaaataaagtacctgtatctagattaaattaaaattggttgcattattttctgaactataatagggtttttcttcaggtgaacaatttgacgtgtcatcagtttttattgc

SEQ ID NO: 230690 - DNA, 120 bp, Artificial Sequence
  ENSG00000119396_25 (sequence is synthesized)
agcactgtccatattcattgtataaagagaggtctacgtatgtagcatataaaaccacatcactaagtaatagacccacagctttattcttgtgtttacattacccttgaaatgttttca

SEQ ID NO: 230691 - DNA, 120 bp, Artificial Sequence
  ENSG00000119396_26 (sequence is synthesized)
gtcaacccttttcagtgtaagatcagcacatttggtggctgatgctgttctcctttgactgtaccgggagccagattctatcatatgcatgtgtaatcccctgtaatacactcaggtgct

SEQ ID NO: 230692 - DNA, 120 bp, Artificial Sequence
  ENSG00000119396_27 (sequence is synthesized)
cacaaatagagcagattgtcatattgtaacatgcgtgtgccagacaccgggcagtacactttggaaagaatgtgaaatccttttaatttttaatccatagcttactgcttgtgcagtcac

SEQ ID NO: 230693 - DNA, 120 bp, Artificial Sequence
  ENSG00000119396_28 (sequence is synthesized)
ctgcctcttgaggttgctcattgcccttggacctgtgaggaggccttcagattagtaattggtgcttagtactatttatgcttaaatagatcttccagtacaatgttgaagtctttttta

SEQ ID NO: 230694 - DNA, 120 bp, Artificial Sequence
  ENSG00000119396_29 (sequence is synthesized)
tggataataacgtgtttgatggagtaacttattatttttttttggttggtggtttacacgttaatagaggtagtacaatttctttggaaaggtgtcttttgaagccagctgttaagcttc

SEQ ID NO: 230695 - DNA, 120 bp, Artificial Sequence
  ENSG00000119396_30 (sequence is synthesized)
atacattacctcccttctcaaattcggtaagacagtagttttggggaacttttttgcccatgtgtcttttaagtgtgattttaaaaaaatgagtggttcagttcattcccctaaacagaa

SEQ ID NO: 230696 - DNA, 120 bp, Artificial Sequence
  ENSG00000119396_31 (sequence is synthesized)
gaaaagaccaaataattaccttccattcctcttcatgtgggaatatagagagggttcatgtggcattttagagaaaagataatttatcctcattcaacacaggcccagaaaattgtgtcc

SEQ ID NO: 230697 - DNA, 120 bp, Artificial Sequence
  ENSG00000119396_32 (sequence is synthesized)
cagaaggatgtcagtaattgtgactaggccaggccttttagcattttgctaagacttgaaacaaaaaatgtaaatacaaaagaaatcaagttttgttttgaaagatgccttctagaactt

SEQ ID NO: 230698 - DNA, 120 bp, Artificial Sequence
  ENSG00000119396_33 (sequence is synthesized)
actgtgtattaataaattgtcactttcattgtctttattgtaactccattgatcccgtatcttaacggttcacgtctagccaaataactgttttggaataaaaaccttggtggtgaggga

SEQ ID NO: 230699 - DNA, 120 bp, Artificial Sequence
  ENSG00000119396_34 (sequence is synthesized)
acatgcgcccctctcaagtgctggcagaccactgtgcatgcagacaacgcacccaaagggaagaatcaggggaacagtaacgcaaccctgccagcatgccaatgtagaaaacttgaaaga

SEQ ID NO: 230700 - DNA, 120 bp, Artificial Sequence
  ENSG00000119397_0 (sequence is synthesized)
gttttgatgaacacctggctttattcttgcaatgaagaaaggttctcaacaaaaaatattctccaaagcaaagataccatcatcatctcactctcctatcccatcatctatgtccaatat

SEQ ID NO: 230701 - DNA, 120 bp, Artificial Sequence
  ENSG00000119397_1 (sequence is synthesized)
gagatctaggtcactttcacctttgattggatcagagactctaccttttcattctggaggacagtggtgtgagcaagttgagattgcagatgaaaacaatatgcttttggactatcaaga

SEQ ID NO: 230702 - DNA, 120 bp, Artificial Sequence
  ENSG00000119397_2 (sequence is synthesized)
ccataaaggagctgattcacatgcaggagttagatatattacagaggccctcattaaaaaacttactaaacaggataatttggctttgataaaatctctgaacctttcactttctaaaga

SEQ ID NO: 230703 - DNA, 120 bp, Artificial Sequence
  ENSG00000119397_3 (sequence is synthesized)
cggtggcaagaaatttaagtatattgagaatttggaaaaatgtgttaaacttgaagtactgaatctcagctataatctaatagggaagattgaaaagttggacaagctgttaaaattacg

SEQ ID NO: 230704 - DNA, 120 bp, Artificial Sequence
  ENSG00000119397_4 (sequence is synthesized)
tgaactcaacttatcatataacaaaatcagcaaaattgaaggcatagaaaatatgtgtaatctgcaaaagcttaaccttgcaggaaatgaaattgagcatattccagtatggttagggaa

SEQ ID NO: 230705 - DNA, 120 bp, Artificial Sequence
  ENSG00000119397_5 (sequence is synthesized)
gaagttaaaatctttgcgagtcctcaatttgaaaggcaacaagatatcatcgctccaagatataagcaagttgaaaccgcttcaagatttgatttctctgatcctagttgaaaatccagt

SEQ ID NO: 230706 - DNA, 120 bp, Artificial Sequence
  ENSG00000119397_6 (sequence is synthesized)
tgtgacccttcctcattacctccagtttaccattttccacctccgttcattggaaagtttggaaggtcagccagtaaccactcaggatagacaggaggcttttgagagattcagtttaga

SEQ ID NO: 230707 - DNA, 120 bp, Artificial Sequence
  ENSG00000119397_7 (sequence is synthesized)
agaggtagaaagactggaaagagacctagaaaaaaagatgatagaaactgaagagcttaagagcaaacaaacaaggttccttgaggaaattaaaaatcaagataaattgaataaatcatt

SEQ ID NO: 230708 - DNA, 120 bp, Artificial Sequence
  ENSG00000119397_8 (sequence is synthesized)
aaaagaggaggccatgttacagaaacagagctgtgaggaactcaagagtgacttaaacacaaaaaatgaattgctaaaacagaagaccatagaattaacacgagcatgtcagaagcaata

SEQ ID NO: 230709 - DNA, 120 bp, Artificial Sequence
  ENSG00000119397_9 (sequence is synthesized)
tgagctggaacaggaattggccttttataaaattgatgctaaatttgagccactaaattattatccatcagagtatgctgaaattgataaagccccagatgaaagcccttacattggcaa

SEQ ID NO: 230710 - DNA, 120 bp, Artificial Sequence
  ENSG00000119397_10 (sequence is synthesized)
atccagatacaagagaaatatgtttgccacagagagttatattattgacagtgctcaggcagtacagatcaagaagatggagccagatgaacaacttagaaatgatcacatgaacttgag

SEQ ID NO: 230711 - DNA, 120 bp, Artificial Sequence
  ENSG00000119397_11 (sequence is synthesized)
aggccacacaccactggacacgcaactggaagacaaagaaaaaaaaataagtgcagcacaaactcgactatcagaactgcatgatgaaatagaaaaggcagaacaacaaattttgagagc

SEQ ID NO: 230712 - DNA, 120 bp, Artificial Sequence
  ENSG00000119397_12 (sequence is synthesized)
tactgaagaatttaaacaactggaagaagctatacaactaaaaaagatttcagaagcagggaaagaccttctttacaagcagttgagtggtagactacaacttgtaaataaattacgcca

SEQ ID NO: 230713 - DNA, 120 bp, Artificial Sequence
  ENSG00000119397_13 (sequence is synthesized)
ggaagctctggatctagaactgcagatggaaaagcaaaagcaggaaattgccggaaagcagaaggagattaaggacctgcaaatagccatagatagcctggattccaaagacccaaaaca

SEQ ID NO: 230714 - DNA, 120 bp, Artificial Sequence
  ENSG00000119397_14 (sequence is synthesized)
ttcccatatgaaggctcaaaagagcggtaaagaacaacagcttgacattatgaacaagcagtaccaacaacttgaaagtcgtttggatgagatactttctagaattgctaaggaaacgga

SEQ ID NO: 230715 - DNA, 120 bp, Artificial Sequence
  ENSG00000119397_15 (sequence is synthesized)
agagattaaggaccttgaagaacagcttactgaaggccagatagcagcaaatgaagccctgaagaaggatttagaaggtgttatcagtgggttgcaagaatacctggggaccattaaagg

SEQ ID NO: 230716 - DNA, 120 bp, Artificial Sequence
  ENSG00000119397_16 (sequence is synthesized)
ccaggcaactcaggcccagaatgagtgcaggaagctgcgggatgagaaagagacattgttgcagagattgacagaagtcgagcaggagagagaccagctggaaatagttgccatggatgc

SEQ ID NO: 230717 - DNA, 120 bp, Artificial Sequence
  ENSG00000119397_17 (sequence is synthesized)
agaaaatatgaggaaggagcttgcagagctagaaagtgccctccaagagcagcatgaggtgaatgcatctttgcagcagacccagggagatctcagtgcctatgaagctgagctagaggc

SEQ ID NO: 230718 - DNA, 120 bp, Artificial Sequence
  ENSG00000119397_18 (sequence is synthesized)
tcggctaaacctaagggatgctgaagccaaccagctcaaggaagagttggaaaaagtaacaagacttacccagttagaacaatcagcccttcaagcagaacttgagaaggaaaggcaagc

SEQ ID NO: 230719 - DNA, 120 bp, Artificial Sequence
  ENSG00000119397_19 (sequence is synthesized)
cctcaagaatgcccttggaaaagcccagttctcagaagaaaaggagcaagagaacagtgagctccatgcaaaacttaaacacttgcaggatgacaataatctgttaaaacagcaacttaa

SEQ ID NO: 230720 - DNA, 120 bp, Artificial Sequence
  ENSG00000119397_20 (sequence is synthesized)
agatttccagaatcaccttaaccatgtggttgatggtttggttcgtccagaagaagtggcagctcgtgtggatgagctaagaagaaaactgaaattaggaactggggaaatgaacatcca

SEQ ID NO: 230721 - DNA, 120 bp, Artificial Sequence
  ENSG00000119397_21 (sequence is synthesized)
tagtccttcagatgtcttagggaaaagtcttgctgatttacagaaacaattcagtgaaattcttgcacgctccaagtgggaaagagatgaagcacaagttagagagagaaaactccaaga

SEQ ID NO: 230722 - DNA, 120 bp, Artificial Sequence
  ENSG00000119397_22 (sequence is synthesized)
agaaatggctctgcagcaagagaaactggcaactggacaagaagagttcaggcaggcctgtgagagagccctggaagcaagaatgaattttgataagaggcaacatgaagcaagaatcca

SEQ ID NO: 230723 - DNA, 120 bp, Artificial Sequence
  ENSG00000119397_23 (sequence is synthesized)
gcaaatggagaatgaaattcactatttgcaagaaaatctaaaaagtatggaggaaatccaaggccttacagatctccaacttcaggaagctgatgaagagaaggagagaattctggccca

SEQ ID NO: 230724 - DNA, 120 bp, Artificial Sequence
  ENSG00000119397_24 (sequence is synthesized)
actccgagagttagagaaaaagaagaaacttgaagatgccaaatctcaggagcaagtttttggtttagataaagaactgaagaaactaaagaaagccgtggccacctctgataagctagc

SEQ ID NO: 230725 - DNA, 120 bp, Artificial Sequence
  ENSG00000119397_25 (sequence is synthesized)
cacagctgagctcaccattgccaaagaccagctgaagtcccttcatggaactgttatgaaaattaaccaggagcgagcagaggagttgcaggaagcagagaggttcagcagaaaggcagc

SEQ ID NO: 230726 - DNA, 120 bp, Artificial Sequence
  ENSG00000119397_26 (sequence is synthesized)
acaagcagccagagatctcacccgagcagaagctgagatcgaactcctgcagaatctcctcaggcagaagggggagcagtttcgacttgagatggagaaaacaggtgtaggtactggagc

SEQ ID NO: 230727 - DNA, 120 bp, Artificial Sequence
  ENSG00000119397_27 (sequence is synthesized)
aaactcacaggtcctagaaattgagaaactgaatgagacaatggaacgacaaaggacagagattgcaaggctgcagaatgtactagacctcactggaagtgacaacaaaggaggctttga

SEQ ID NO: 230728 - DNA, 120 bp, Artificial Sequence
  ENSG00000119397_28 (sequence is synthesized)
aaatgttttagaagaaattgctgaacttcgacgtgaagtttcttatcagaatgattacataagcagcatggcagatcctttcaaaagacgaggctattggtactttatgccaccaccacc

SEQ ID NO: 230729 - DNA, 120 bp, Artificial Sequence
  ENSG00000119397_29 (sequence is synthesized)
atcatcaaaagtttccagccatagttcccaggccaccaaggactctggtgttggccttaagtactcagcctcaactcctgttagaaaaccacgccctgggcagcaggatgggaaggaagg

SEQ ID NO: 230730 - DNA, 120 bp, Artificial Sequence
  ENSG00000119397_30 (sequence is synthesized)
gagtgagctggatgaccaagaagaacccccatttgtgcctcctcctggatacatgatgtatactgtgcttcctgatggttctcctgtaccccagggcatggccctgtatgcaccacctcc

SEQ ID NO: 230731 - DNA, 120 bp, Artificial Sequence
  ENSG00000119397_31 (sequence is synthesized)
tcccttgccaaacaatagccgacctctcacccctggcactgttgtttatggcccacctcctgctggggcccccatggtgtatgggcctccaccccccaacttctccatccccttcatccc

SEQ ID NO: 230732 - DNA, 120 bp, Artificial Sequence
  ENSG00000119397_32 (sequence is synthesized)
tatgggtgtgctgcattgcaacgtccctgaacaccataacttagagaatgaagtttctagattagaagacataatgcagcatttaaaatcaaagaagcgggaagaaaggtggatgagagc

SEQ ID NO: 230733 - DNA, 120 bp, Artificial Sequence
  ENSG00000119397_33 (sequence is synthesized)
atccaagcggcagtcggagaaagaaatggaagaactgcatcataatattgatgatcttttgcaagagaagaaaagcttagagtgtgaagtagaagaattacatagaactgtccagaaacg

SEQ ID NO: 230734 - DNA, 120 bp, Artificial Sequence
  ENSG00000119397_34 (sequence is synthesized)
tcaacagcaaaaggacttcattgatggaaatgttgagagtcttatgactgaactagaaatagaaaaatcactcaaacatcatgaagatattgtagatgaaattgagtgcattgagaagac

SEQ ID NO: 230735 - DNA, 120 bp, Artificial Sequence
  ENSG00000119397_35 (sequence is synthesized)
tcttctgaaacgtcgctcagagctcagggaagctgaccgactcctggcagaggctgagagtgaactttcatgcactaaagaaaagacaaaaaatgctgttgaaaagttcactgatgccaa

SEQ ID NO: 230736 - DNA, 120 bp, Artificial Sequence
  ENSG00000119397_36 (sequence is synthesized)
gagaagtttattgcaaactgagtcagatgctgaggaattagaaaggagagctcaggaaactgctgttaacctcgtcaaagctgatcagcagctaagatcgctccaggctgatgcaaagga

SEQ ID NO: 230737 - DNA, 120 bp, Artificial Sequence
  ENSG00000119397_37 (sequence is synthesized)
tttggagcagcacaaaatcaagcaagaagaaatcttgaaagaaataaacaaaattgtagcagcaaaagactcagacttccaatgtttaagcaagaagaaggaaaaactgacagaagagct

SEQ ID NO: 230738 - DNA, 120 bp, Artificial Sequence
  ENSG00000119397_38 (sequence is synthesized)
tcagaaactacagaaagacatagagatggcagaacgcaatgaggatcaccacctgcaggtccttaaagaatctgaggtgcttcttcaggccaaaagagccgagctggaaaagctgaaaag

SEQ ID NO: 230739 - DNA, 120 bp, Artificial Sequence
  ENSG00000119397_39 (sequence is synthesized)
ccaggtgacaagtcagcagcaggagatggctgtcttggacaggcagttagggcataaaaaggaggagctgcatctactccaaggaagcatggtccaggcaaaagctgacctccaggaagc

SEQ ID NO: 230740 - DNA, 120 bp, Artificial Sequence
  ENSG00000119397_40 (sequence is synthesized)
tctgagactgggagagactgaagtaactgagaagtgcaatcacattagggaagtaaaatctcttctggaagaactgagttttcagaaaggagaactaaatgttcagattagtgaaagaaa

SEQ ID NO: 230741 - DNA, 120 bp, Artificial Sequence
  ENSG00000119397_41 (sequence is synthesized)
aactcaacttacacttataaagcaggaaattgaaaaagaggaagaaaatcttcaggttgttttaaggcagatgtctaaacataaaaccgaactaaagaatattctggacatgttgcaact

SEQ ID NO: 230742 - DNA, 120 bp, Artificial Sequence
  ENSG00000119397_42 (sequence is synthesized)
tgaaaaccatgagctacaaggtttgaagctacaacatgaccaaagggtatctgaattagagaagactcaggtggcagtgctagaggagaaactggagttagagaatttgcagcagatatc

SEQ ID NO: 230743 - DNA, 120 bp, Artificial Sequence
  ENSG00000119397_43 (sequence is synthesized)
ccagcagcagaaaggggaaatagagtggcagaagcagctccttgagagggataaacgagaaatagaacgaatgactgctgagtcccgagctttacaatcgtgtgttgagtgtttgagcaa

SEQ ID NO: 230744 - DNA, 120 bp, Artificial Sequence
  ENSG00000119397_44 (sequence is synthesized)
agaaaaggaagatctccaagagaaatgtgacatttgggaaaaaaagttggcacaaaccaaaagggttttagcagcagcagaagaaaatagcaaaatggagcaatcaaacttagaaaagtt

SEQ ID NO: 230745 - DNA, 120 bp, Artificial Sequence
  ENSG00000119397_45 (sequence is synthesized)
ggaattgaatgtcagaaaactgcagcaggaactagaccaactaaacagagacaagttgtcactgcataacgacatttcagcaatgcaacagcagctccaagaaaaacgagaagcagtaaa

SEQ ID NO: 230746 - DNA, 120 bp, Artificial Sequence
  ENSG00000119397_46 (sequence is synthesized)
ctcactgcaggaggaactagctaatgtccaagaccatttgaacctagcaaaacaggacctgcttcacaccaccaagcatcaggatgtgttgctcagtgagcagacccgactccagaagga

SEQ ID NO: 230747 - DNA, 120 bp, Artificial Sequence
  ENSG00000119397_47 (sequence is synthesized)
catcagtgaatgggcaaataggtttgaagactgtcagaaagaagaggagacaaaacaacaacaacttcaagtgcttcagaatgagattgaagaaaacaagctcaaactagtccaacaaga

SEQ ID NO: 230748 - DNA, 120 bp, Artificial Sequence
  ENSG00000119397_48 (sequence is synthesized)
aatgatgtttcagagactccagaaagagagagaaagtgaagaaagcaaattagaaaccagtaaagtgacactgaaggagcaacagcaccagctggaaaaggaattaacagaccagaaaag

SEQ ID NO: 230749 - DNA, 120 bp, Artificial Sequence
  ENSG00000119397_49 (sequence is synthesized)
caaactggaccaagtgctctcaaaggtgctggcagctgaagagcgtgttaggactctgcaggaagaggagaggtggtgtgagagcctggagaagacactctcccaaactaaacggcagct

SEQ ID NO: 230750 - DNA, 120 bp, Artificial Sequence
  ENSG00000119397_50 (sequence is synthesized)
ttcagaaagggagcagcaattggtggagaaatcaggtgagctgttggccctccagaaagaggcagattctatgagggcagacttcagccttctgcggaaccagttcttgacagaaagaaa

SEQ ID NO: 230751 - DNA, 120 bp, Artificial Sequence
  ENSG00000119397_51 (sequence is synthesized)
gaaagctgagaagcaggtggccagcctgaaggaagcacttaagatccagcggagccagctggagaaaaaccttcttgagcaaaaacaggagaacagctgcatacaaaaggaaatggcaac

SEQ ID NO: 230752 - DNA, 120 bp, Artificial Sequence
  ENSG00000119397_52 (sequence is synthesized)
aattgaactggtagcccaggacaaccatgagcgggccaggcgcctgatgaaggagctcaaccagatgcagtatgagtacacggagctcaagaaacagatggcaaaccaaaaagatttgga

SEQ ID NO: 230753 - DNA, 120 bp, Artificial Sequence
  ENSG00000119397_53 (sequence is synthesized)
gagaagacaaatggaaatcagtgatgcaatgaggacacttaaatctgaggtgaaggatgaaatcagaaccagcttgaagaatcttaatcagtttcttccagaactaccagcagatctaga

SEQ ID NO: 230754 - DNA, 120 bp, Artificial Sequence
  ENSG00000119397_54 (sequence is synthesized)
agctattttggaaagaaacgaaaacctagaaggagaattggaaagcttgaaagagaaccttccatttaccatgaatgagggaccttttgaagaaaaactgaacttttcccaagttcacat

SEQ ID NO: 230755 - DNA, 120 bp, Artificial Sequence
  ENSG00000119397_55 (sequence is synthesized)
aatggatgaacactggcgtggagaagcactccgggagaaactgcgtcaccgggaagaccgactcaaggcccaactccgacactgtatgtccaagcaagcagaagtattaattaaaggaaa

SEQ ID NO: 230756 - DNA, 120 bp, Artificial Sequence
  ENSG00000119397_56 (sequence is synthesized)
gcggcagacagagggcactttacacagtttgaggagacaagtagatgctttaggggaattggtcaccagcacctctgcagattcagcgtcatcacccagtctgtctcagctggagtcttc

SEQ ID NO: 230757 - DNA, 120 bp, Artificial Sequence
  ENSG00000119397_57 (sequence is synthesized)
cctcacagaggactctcaacttggacaaaatcaggaaaagaatgcctcagccagatgaggaatactgtcttgtgtaaatatattcaaggaaaacacctccactacctcactgacttcata

SEQ ID NO: 230758 - DNA, 120 bp, Artificial Sequence
  ENSG00000119397_58 (sequence is synthesized)
attggaatgtcacatggtttttttaatcaagatgcagtgaactgagattctgaaactccactgtagtttactttgcctgtaccattaatgccaatgtttttataaatcacttgtacatag

SEQ ID NO: 230759 - DNA, 120 bp, Artificial Sequence
  ENSG00000119397_59 (sequence is synthesized)
tacatatgggaatagttgcatatgggaatttaaaccaacatgtggctgagcctttttttttttaatcttcgtaacatgtttaaaaaaaaacagtgattttaactgcatatttgaacctac

SEQ ID NO: 230760 - DNA, 120 bp, Artificial Sequence
  ENSG00000119397_60 (sequence is synthesized)
aaactggtaaatcttattaacaaaaagaatgtacttaaggccctctttatttatagtgtcgagttatttttgaattttgcttaaaatctatttttcatatgaaaataaaagataacaatc

SEQ ID NO: 230761 - DNA, 120 bp, Artificial Sequence
  ENSG00000119397_61 (sequence is synthesized)
cgaacttctcccgctctacctcagcctgcgggactgctcggctcggcttctaggcgagacaggggctccctgtgtttcccaggctgcagtgcagtggccagtcacaaggttgatcatagc

SEQ ID NO: 230762 - DNA, 120 bp, Artificial Sequence
  ENSG00000119397_62 (sequence is synthesized)
gggaaacgcctccgcgtcccttccaacagtaccggagagggagaggggcgtggctgagactagccccgaccacgcgcgcgcggcccctcggcaaccggcacaacacaacaaaatggctgc

SEQ ID NO: 230763 - DNA, 120 bp, Artificial Sequence
  ENSG00000119397_63 (sequence is synthesized)
gaacccaagattagttgacagtgttgattgtgagttgctttcttgagactcggagacttatgatcattcagtgaaaatatcaatgtgggtaatgtgctggacaccctgcagcagtacatc

SEQ ID NO: 230764 - DNA, 120 bp, Artificial Sequence
  ENSG00000119397_64 (sequence is synthesized)
gaaggcagcatggaagaataggcagtattggatttgaaatcaggagacttggaattgaattctgcctcttccactaccagctgtgaaattggctaaaacagaagaccatagaattaacac

SEQ ID NO: 230765 - DNA, 120 bp, Artificial Sequence
  ENSG00000119397_65 (sequence is synthesized)
aaagttcttggaaaactgtaacctgagggatgatcatgattatcatattgttgttcttactgtgatcactgtgatttgagtggttttaagtatgtgagctcaaggttttcattaggcatt

SEQ ID NO: 230766 - DNA, 120 bp, Artificial Sequence
  ENSG00000119397_66 (sequence is synthesized)
tcacccttgcactccttgcctggcttttctgactcttgggggctaggatattagctcctgattttacctcacaactaaattatctccaggttagcactgagggctgtatggcctttgtca

SEQ ID NO: 230767 - DNA, 120 bp, Artificial Sequence
  ENSG00000119397_67 (sequence is synthesized)
gtctaaacataaaaccgcttttctacagtaagcaagtatctctatgatcagaaaaaaagttaatatttaaatatctgtatttcaaaggccaaaaaattgttatataaatctcagtctgta

SEQ ID NO: 230768 - DNA, 120 bp, Artificial Sequence
  ENSG00000119397_68 (sequence is synthesized)
tttcaaagtatttttaatttattttgatcaattttatataaaatgcttttagttgattcttttatgtagaagcaaatgctttggaaccagatctttgttaattaaatgtttttgttaaaa

SEQ ID NO: 230769 - DNA, 120 bp, Artificial Sequence
  ENSG00000119397_69 (sequence is synthesized)
cacttttatacttcccttcgtttgcatgtgttacttcttcagcctaggtctttccccttccgttcgttcttcaaaacccaggcaaaacacctcttcctctgagcagccttctcagaactt

SEQ ID NO: 230770 - DNA, 120 bp, Artificial Sequence
  ENSG00000119397_70 (sequence is synthesized)
ttctcccatgtggccagaggaaggagagacttctgtctatctcttctgctagaccccgaactctttggaggcagaggttatccacaagaggcttggcaaatgtttctcagtcatagttgg

SEQ ID NO: 230771 - DNA, 120 bp, Artificial Sequence
  ENSG00000119397_71 (sequence is synthesized)
actgtttgaaaaattaaaggttctatttgtctgtcagtttcatccgtgacatttaactttttataccaaagtcttagaatctaccatcattttttgggccattgataccactttaaccac

SEQ ID NO: 230772 - DNA, 120 bp, Artificial Sequence
  ENSG00000119397_72 (sequence is synthesized)
agttaatttcagcttttggcaggaaagagaggaaacatcctgtgatgtttcagcactgcatttttttccccatctcattcaggagaatgaagtttctagattagaagacataatgcagca

SEQ ID NO: 230773 - DNA, 120 bp, Artificial Sequence
  ENSG00000119397_73 (sequence is synthesized)
gcgaagttacagaggctcggaggcgcttgcaaaaatgtggctgtcagagagggaagtgcacatgaatttgaagacagcattagaaagcgttccgcccacagtttctctgttctcaacggc

SEQ ID NO: 230774 - DNA, 120 bp, Artificial Sequence
  ENSG00000119397_74 (sequence is synthesized)
gataaggttatatacttaatgagttgacctatttatgactggattatatggcaaagtgtgtttgtaaggctgatgtttagaactgtgcaagcattctcttattaaaattctcttataaaa

SEQ ID NO: 230775 - DNA, 120 bp, Artificial Sequence
  ENSG00000119401_0 (sequence is synthesized)
ggcaggcgggtgggctgccggcggtggactcgtcggagccgcgggcggtcaggaatttgaccctctagggcatgaatactgtgctgttcagttctgagctgtgctagcaatacccttcaa

SEQ ID NO: 230776 - DNA, 120 bp, Artificial Sequence
  ENSG00000119401_1 (sequence is synthesized)
aggaagagcaatggctgcagcagcagcttctcacctgaacctggatgccctccgggaagtgctagaatgccccatctgcatggagtccttcacagaagagcagctgcgtcccaagcttct

SEQ ID NO: 230777 - DNA, 120 bp, Artificial Sequence
  ENSG00000119401_2 (sequence is synthesized)
gcactgtggccataccatctgccgccagtgcctggagaagctattggccagtagcatcaatggtgtccgctgtcccttttgcagcaagattacccgcataaccagcttgacccagctgac

SEQ ID NO: 230778 - DNA, 120 bp, Artificial Sequence
  ENSG00000119401_3 (sequence is synthesized)
agacaatctgacagtgctaaagatcattgatacagctgggctcagcgaggctgtggggctgctcatgtgtcggtcctgtgggcggcgtctgccccggcaattctgccggagctgtggttt

SEQ ID NO: 230779 - DNA, 120 bp, Artificial Sequence
  ENSG00000119401_4 (sequence is synthesized)
ggtgttatgtgagccctgccgggaggcagaccatcagcctcctggccactgtacactccctgtcaaagaagcagctgaggagcggcgtcgggactttggagagaagttaactcgtctgcg

SEQ ID NO: 230780 - DNA, 120 bp, Artificial Sequence
  ENSG00000119401_5 (sequence is synthesized)
ggaacttatgggggagctgcagcggcggaaggcagccttggaaggtgtctccaaggaccttcaggcaaggtataaagcagttctccaggagtatgggcatgaggagcgcagggtccagga

SEQ ID NO: 230781 - DNA, 120 bp, Artificial Sequence
  ENSG00000119401_6 (sequence is synthesized)
tgagctggctcgctctcggaagttcttcacaggctctttggctgaagttgagaagtccaatagtcaagtggtagaggagcagagttacctgcttaacattgcagaggtgcaggctgtgtc

SEQ ID NO: 230782 - DNA, 120 bp, Artificial Sequence
  ENSG00000119401_7 (sequence is synthesized)
tcgctgtgactacttcctggccaagatcaagcaggcagatgtagcactactggaggagacagctgatgaggaggagccagagctcactgccagcttgcctcgggagctcaccctgcaaga

SEQ ID NO: 230783 - DNA, 120 bp, Artificial Sequence
  ENSG00000119401_8 (sequence is synthesized)
tgtggagctccttaaggtaggtcatgttggccccctccaaattggacaagctgttaagaagccccggacagttaacgtggaagattcctgggccatggaggccacagcgtctgctgcctc

SEQ ID NO: 230784 - DNA, 120 bp, Artificial Sequence
  ENSG00000119401_9 (sequence is synthesized)
tacctctgttacttttagagagatggacatgagcccggaggaagtggttgccagccctagggcctcacctgctaaacagcggggtcctgaggcagcctccaatatccagcagtgcctctt

SEQ ID NO: 230785 - DNA, 120 bp, Artificial Sequence
  ENSG00000119401_10 (sequence is synthesized)
tctcaagaagatgggggccaaaggcagcactccaggaatgttcaatcttccagtcagtctctacgtgaccagtcaaggtgaagtactagtcgctgaccgtggtaactatcgtatacaagt

SEQ ID NO: 230786 - DNA, 120 bp, Artificial Sequence
  ENSG00000119401_11 (sequence is synthesized)
ctttacccgcaaaggctttttgaaggaaatccgccgcagccccagtggcattgatagctttgtgctaagcttccttggggcagatctacccaacctcactcctctctcagtggcaatgaa

SEQ ID NO: 230787 - DNA, 120 bp, Artificial Sequence
  ENSG00000119401_12 (sequence is synthesized)
ctgccaggggctgattggtgtgactgacagctatgataactccctcaaggtatataccttggatggccactgcgtggcctgtcacaggagccagctgagcaaaccatggggtatcacagc

SEQ ID NO: 230788 - DNA, 120 bp, Artificial Sequence
  ENSG00000119401_13 (sequence is synthesized)
cttgccatctggccagtttgtagtaaccgatgtggaaggtggaaagctttggtgtttcacagttgatcgaggatcaggggtggtcaaatacagctgcctatgtagtgctgtgcggcccaa

SEQ ID NO: 230789 - DNA, 120 bp, Artificial Sequence
  ENSG00000119401_14 (sequence is synthesized)
atttgtcacctgtgatgctgagggcaccgtctacttcacccagggcttaggcctcaatctggagaatcggcagaatgagcaccacctggagggtggcttttccattggctctgtaggccc

SEQ ID NO: 230790 - DNA, 120 bp, Artificial Sequence
  ENSG00000119401_15 (sequence is synthesized)
ggtgatctcatcgtggctgacagtagtcgcaaggaaattctccattttcctaagggtgggggctatagtgtccttattcgagagggacttacctgtccggtgggcatagccctaactcct

SEQ ID NO: 230791 - DNA, 120 bp, Artificial Sequence
  ENSG00000119401_16 (sequence is synthesized)
aaggggcagctgctggtcttggactgttgggatcattgcatcaagatctacagctaccatctgagaagatattccaccccataggggatgagaaattatcagtttcttctgctcccaagc

SEQ ID NO: 230792 - DNA, 120 bp, Artificial Sequence
  ENSG00000119401_17 (sequence is synthesized)
caacttcccttcccttagttcttggttgttagtggcacatgcagaatagactcagcctatgtcctgattccagctgggtagttctagaacttcagaagctccatcttttaatgtttttat

SEQ ID NO: 230793 - DNA, 120 bp, Artificial Sequence
  ENSG00000119401_18 (sequence is synthesized)
ttgttatgtccccctccccgcttcccacctaaatttagagctttaaaagatgcactgcccaaataggacacacgatggtgttagctgaagtttgattagcaattaggcacttccaaggct

SEQ ID NO: 230794 - DNA, 120 bp, Artificial Sequence
  ENSG00000119401_19 (sequence is synthesized)
ttagtagagagagccactttagccctttgtgccatgtttgaaatttgcccttgtattaaatccttgattttttcccatttggctttgatgcccttgatccattgtttccttcctactata

SEQ ID NO: 230795 - DNA, 120 bp, Artificial Sequence
  ENSG00000119401_20 (sequence is synthesized)
atgtgcttcatctgtgacactttctcttgaactctgattggattcactgtgcatgcttcagtgggatctgctccacctttcagtgacatttaagacatcatattcccgtaacattatgtc

SEQ ID NO: 230796 - DNA, 120 bp, Artificial Sequence
  ENSG00000119401_21 (sequence is synthesized)
tcagtctgatcgtctttaccagtatgaaagtcattcatttagtgctaccaaaggggatacacaagccctttaggaagcagtacctctcgcctggaggatctgtgccatcttggattgaga

SEQ ID NO: 230797 - DNA, 120 bp, Artificial Sequence
  ENSG00000119401_22 (sequence is synthesized)
attgcagatgtgacagaatggattgaccctagttggttggtattgatgacttcagcctggaaattgcttgccttttaaagaagcatatatgggttggaattatgccaaagcataggaagc

SEQ ID NO: 230798 - DNA, 120 bp, Artificial Sequence
  ENSG00000119401_23 (sequence is synthesized)
tgggaataagcaaacaaatgctgatatagtcagcaaatttggatagtctctagggctcatcatttttcatactacctctctcttctggcctgtgtctaaggaattgtacaacataggcca

SEQ ID NO: 230799 - DNA, 120 bp, Artificial Sequence
  ENSG00000119401_24 (sequence is synthesized)
gggccaacaaagtggagaggtggacacattttcatgttcattactaaaacaaacagcaaaactattggtttgttattctgtgttttcctcaagtcagtacatactatttggtttcaggat

SEQ ID NO: 230800 - DNA, 120 bp, Artificial Sequence
  ENSG00000119401_25 (sequence is synthesized)
ttctttccatttctctatcaagcattaaataattgagaactgtttcttcatctctggtgttcatgtcttttaattaaatacggaattttggagatgataagagggataacctgcgctatg

SEQ ID NO: 230801 - DNA, 120 bp, Artificial Sequence
  ENSG00000119401_26 (sequence is synthesized)
ccattttgcttccttatctcactgtgttctttcagagtgtagatatctacccaggtcaaaattcagccaaaagcactattatgtaaagataataatccaaatctttctcccaaatacatg

SEQ ID NO: 230802 - DNA, 120 bp, Artificial Sequence
  ENSG00000119401_27 (sequence is synthesized)
tgtacagaatcatcccccaaggtttagagtcaccaataccctattctgagcttctgctgtatgttttatgtttataattacagttcacaaaaaggaagttagtcttgtttttaagatcag

SEQ ID NO: 230803 - DNA, 120 bp, Artificial Sequence
  ENSG00000119401_28 (sequence is synthesized)
aagtgggtgagaggacctgtgatgaggttcctgagggtttggtgtttactaagtaatatatcttactctaggtgcagggctgatggcaagccaaagagcaactgccttactttgatgtaa

SEQ ID NO: 230804 - DNA, 120 bp, Artificial Sequence
  ENSG00000119401_29 (sequence is synthesized)
acaaaatttgctaaactgagctgctcaaaattgtttttatggtagtagtgtttctttggattgtatcataatagctgccaaaggataggtaaagaggtcattaaaatgatgttgaactag

SEQ ID NO: 230805 - DNA, 120 bp, Artificial Sequence
  ENSG00000119401_30 (sequence is synthesized)
ggtgctcaacggcgcgtgcgcagagggaggcaggcgggtgggctgccggcggtggactcgtcggagccgcgggcggtcagcaggaatttgaccctctagggcatgaatactgtgctgttc

SEQ ID NO: 230806 - DNA, 120 bp, Artificial Sequence
  ENSG00000119401_31 (sequence is synthesized)
gctgccggcggtggactcgtcggagccgcgggcggtcagatgagtgatggggaaagagcttttggaagtttgagttaattccttatggtcatgcagctaacaggaatttgaccctctagg

SEQ ID NO: 230807 - DNA, 120 bp, Artificial Sequence
  ENSG00000119402_0 (sequence is synthesized)
aggcagcaccggaagccgctcccctgtgaggctgcggaccgggagcagcggccgcaggtccgggcgccatggctgcggagcggacccggccgctgcaaggctctggcggtccgagcgtgc

SEQ ID NO: 230808 - DNA, 120 bp, Artificial Sequence
  ENSG00000119402_1 (sequence is synthesized)
ctagtagctgtgaacccggcgcgaggtcccgggccccggggcgctcgctcaggtaaatttttccataaccttatggagagaaaggactttgagacatggcttgataacatttctgttaca

SEQ ID NO: 230809 - DNA, 120 bp, Artificial Sequence
  ENSG00000119402_2 (sequence is synthesized)
tttctttctctgacggacttgcagaaaaatgaaactctggatcacctgattagtctgagtggggcagtccagctcaggcatctctccaataacctagagactctcctcaagcgggacttc

SEQ ID NO: 230810 - DNA, 120 bp, Artificial Sequence
  ENSG00000119402_3 (sequence is synthesized)
ctcaaactccttcccctggagctcagtttttatttgttaaaatggctcgatcctcagactttactcacatgctgcctcgtctctaaacagtggaataaggtgataagtgcctgtacagag

SEQ ID NO: 230811 - DNA, 120 bp, Artificial Sequence
  ENSG00000119402_4 (sequence is synthesized)
gtgtggcagactgcatgtaaaaatttgggctggcagatagatgattctgttcaggacgctttgcactggaagaaggtttatttgaaggctattttgagaatgaagcaactggaggaccat

SEQ ID NO: 230812 - DNA, 120 bp, Artificial Sequence
  ENSG00000119402_5 (sequence is synthesized)
gaagcctttgaaacctcgtcattaattggacacagtgccagagtgtatgcactttactacaaagatggacttctctgtacagggtcagatgacttgtctgcaaagctgtgggatgtgagc

SEQ ID NO: 230813 - DNA, 120 bp, Artificial Sequence
  ENSG00000119402_6 (sequence is synthesized)
acagggcagtgcgtttatggcatccagacccacacttgtgcagcggtgaagtttgatgaacagaagcttgtgacaggctcctttgacaacactgtggcttgctgggaatggagttccgga

SEQ ID NO: 230814 - DNA, 120 bp, Artificial Sequence
  ENSG00000119402_7 (sequence is synthesized)
gccaggacccagcactttcgggggcacacgggggcggtatttagcgtggactacaatgatgaactggatatcttggtgagcggctctgcagacttcactgtgaaagtatgggctttatct

SEQ ID NO: 230815 - DNA, 120 bp, Artificial Sequence
  ENSG00000119402_8 (sequence is synthesized)
gctgggacatgcctgaacacactcaccgggcacacggaatgggtcaccaaggtagttttgcagaagtgcaaagtcaagtctctcttgcacagtcctggagactacatcctcttaagtgca

SEQ ID NO: 230816 - DNA, 120 bp, Artificial Sequence
  ENSG00000119402_9 (sequence is synthesized)
gacaaatatgagattaagatttggccaattgggagagaaatcaactgtaagtgcttaaagacattgtctgtctctgaggatagaagtatctgcctgcagccaagacttcattttgatggc

SEQ ID NO: 230817 - DNA, 120 bp, Artificial Sequence
  ENSG00000119402_10 (sequence is synthesized)
aaatacattgtctgtagttcagcacttggtctctaccagtgggactttgccagttatgatattctcagggtcatcaagactcctgagatagcaaacttggccttgcttggctttggagat

SEQ ID NO: 230818 - DNA, 120 bp, Artificial Sequence
  ENSG00000119402_11 (sequence is synthesized)
atctttgccctgctgtttgacaaccgctacctgtacatcatggacttgcggacagagagcctgattagtcgctggcctctgccagagtacaggaaatcaaagagaggctcaagcttcctg

SEQ ID NO: 230819 - DNA, 120 bp, Artificial Sequence
  ENSG00000119402_12 (sequence is synthesized)
gcaggcgaagcatcctggctgaatggactggatgggcacaatgacacgggcttggtctttgccaccagcatgcctgaccacagtattcacctggtgttgtggaaggagcacggctgacac

SEQ ID NO: 230820 - DNA, 120 bp, Artificial Sequence
  ENSG00000119402_13 (sequence is synthesized)
catgagccaccaccgctgactgactttgggtgccggggctgcgggttttgggtgcaacctctgcggcagccgactgcatgaaccaaagttctcacctaatggtatcatcacgcagtgcac

SEQ ID NO: 230821 - DNA, 120 bp, Artificial Sequence
  ENSG00000119402_14 (sequence is synthesized)
aatcatttatctatgttttgccaggggccagggctcggggtgggggagggcttgttttattgacatacaacgcagcatgctaatggggtacaccattgacttcatttgtacttagttatg

SEQ ID NO: 230822 - DNA, 120 bp, Artificial Sequence
  ENSG00000119402_15 (sequence is synthesized)
ttggtcagtgttagaggatgcattttgggttcatctttcttgagtggagtattggttttaagtaaagaaagttaaatgatccattaatctgctaattggttgcctatgaaatcacattgt

SEQ ID NO: 230823 - DNA, 120 bp, Artificial Sequence
  ENSG00000119402_16 (sequence is synthesized)
ctgttattaaagctttttaccatagcctttttttcttttgaagttgaagcaaaggtgctatgatgttgttacagcaactttcctcacacggggtttagctcttataagagccagtgttaa

SEQ ID NO: 230824 - DNA, 120 bp, Artificial Sequence
  ENSG00000119402_17 (sequence is synthesized)
aacttccaccaaataccagtttataaacttccaccaaataccagtgctaaggaaagtctgtcttccagttcaaatccaattctgtaaattgaatgttagcaactcattctaaaccttata

SEQ ID NO: 230825 - DNA, 120 bp, Artificial Sequence
  ENSG00000119402_18 (sequence is synthesized)
tcttggcagagtcaaggttggccatgtttaagatgtgagcgagttctgtagtttttgttgccatgtcggggaagctagtccccggcagcctggatgactgcacagcggtgccctggtata

SEQ ID NO: 230826 - DNA, 120 bp, Artificial Sequence
  ENSG00000119402_19 (sequence is synthesized)
gcagaaaagagcagtgagctggaaggttagagaccgggcctcttaccctggaactctgcaccctctctgggtcccagcttccttgtctgtacagccaggtatgaagctcagtgatttcta

SEQ ID NO: 230827 - DNA, 120 bp, Artificial Sequence
  ENSG00000119402_20 (sequence is synthesized)
agattctttctggtccttcacctactgaaatgtgtaaaagttgatcatgtatttttgtctgatccctgattcatggtttctttcaggtcggataatatttaaatgaaatgactgttacag

SEQ ID NO: 230828 - DNA, 120 bp, Artificial Sequence
  ENSG00000119402_21 (sequence is synthesized)
agttttctataagaacatcaattatatgaaaaggatgaataaaagggaaatgtagaaaatatagctgattccacttagacagtttaagtaattggttgaagaaatgctgatagaagccat

SEQ ID NO: 230829 - DNA, 120 bp, Artificial Sequence
  ENSG00000119402_22 (sequence is synthesized)
ggtttaaatagggacacagtatgctatactagaaggatacctgaacccaacctaacttcctcctttgcctctaacttaatctgcagcctcaggcaagttaactttctcttctaagaccat

SEQ ID NO: 230830 - DNA, 120 bp, Artificial Sequence
  ENSG00000119402_23 (sequence is synthesized)
cattttcttcatcttttaagtgagggaattgtcctagatgagggctcacaaacccaaatgcctaagggagccgtgcaggtaacataaatgagtaaaacattctggggaggattgtgctgt

SEQ ID NO: 230831 - DNA, 120 bp, Artificial Sequence
  ENSG00000119402_24 (sequence is synthesized)
cccctggaaagttgatctaatagggcagttattcagctctgttttgtcattaggagaagcaagcccagggttggcaggtcttcacattgtttcaggaggagctagaaatccagattttta

SEQ ID NO: 230832 - DNA, 120 bp, Artificial Sequence
  ENSG00000119402_25 (sequence is synthesized)
tttgaaatcctggatttttaaaacgttacaactgattaaagaaaatttgaaataaggtgagccaaacaaaacatgtccctgggttgccagattgtgtcctcctccctctctaaagttagg

SEQ ID NO: 230833 - DNA, 120 bp, Artificial Sequence
  ENSG00000119402_26 (sequence is synthesized)
taattttgtgattcagcagtggaaatgttagtggtcacaatcagggagagagtagagggagcaagcagtagaaaaatctcagccgctcttcagctgtctccccttgtattacaagggtgg

SEQ ID NO: 230834 - DNA, 120 bp, Artificial Sequence
  ENSG00000119402_27 (sequence is synthesized)
tggggagggatgtatttcattcacagaccaataggaaggtagtttgaagatgaacataagaattggaacctcagtgacagcttatgtctgggaacatgagttattccttcttgctgactc

SEQ ID NO: 230835 - DNA, 120 bp, Artificial Sequence
  ENSG00000119402_28 (sequence is synthesized)
cagtataaagcatatccattttacaggtgagaaaaagggttgctggcagagctgagaatgatgtgaactctagagtggggacctatctcttgcagaatctgcattagcatagagccagac

SEQ ID NO: 230836 - DNA, 120 bp, Artificial Sequence
  ENSG00000119402_29 (sequence is synthesized)
tctggacctctgagtgctgtgaagttgatagaaattaatggtgaatttcaaggacagatatcattaatatccatgttgaaactctgtggggtttaagcaaaagaacaatatcttccccca

SEQ ID NO: 230837 - DNA, 120 bp, Artificial Sequence
  ENSG00000119402_30 (sequence is synthesized)
tcccacaaaatctgggtttaatctatctcacattgagttctgtgcatcagctctgcttagtactctagaaatagaaccggaatcacaactgaatctattttgcagaagccccaggagact

SEQ ID NO: 230838 - DNA, 70 bp, Artificial Sequence
  ENSG00000119402_31 (sequence is synthesized)
aatcacaactgaatctattttgcagaagccccaggagactttgggcaatgatgatggtaaatgacctgcg

SEQ ID NO: 230839 - DNA, 120 bp, Artificial Sequence
  ENSG00000119402_32 (sequence is synthesized)
ctgaacagataactattactgatctaatgaccatccccaccctacctcactttcagatctatccaatagcttcaaagggcaagtaattataatcatttgtgggaaaagttttattaaaaa

SEQ ID NO: 230840 - DNA, 120 bp, Artificial Sequence
  ENSG00000119402_33 (sequence is synthesized)
gtgacaaacttgaagctgtatatagtatgttctatttcagtttttagtggtgaatacagaagtcatcaaggtggtacttggtgccgctggaattttttttttttcctaggcagtcttgct

SEQ ID NO: 230841 - DNA, 120 bp, Artificial Sequence
  ENSG00000119402_34 (sequence is synthesized)
ctgtcatacaggctggagtacagtggcatcatcatgcagctggattttgacagcagaacttcaggcagtaattggagtcctaatgtcagttcttccttatggaggcctttatttggcctg

SEQ ID NO: 230842 - DNA, 120 bp, Artificial Sequence
  ENSG00000119402_35 (sequence is synthesized)
agattttattcaactactttatagatgctgggtttattcatactatcgccagtttttataaaaatggaaaactagctcatcctttttgcaaaagaaagcaaagtggggagtcagaatgag

SEQ ID NO: 230843 - DNA, 120 bp, Artificial Sequence
  ENSG00000119402_36 (sequence is synthesized)
actattctttactctcctttcattgcctttgagagctagctcttgcacacactgactttggcttccttagcgcataggtaagggaattgcctttccctcttttgtgaatattctcatttc

SEQ ID NO: 230844 - DNA, 120 bp, Artificial Sequence
  ENSG00000119402_37 (sequence is synthesized)
tgaaaaattctaagtcatgagaagataagccctatcctttcttacaaggattggatttcttgggtgacactgtggtgtggtggaagccagcggcttctttcaggttcataaaggccatca

SEQ ID NO: 230845 - DNA, 120 bp, Artificial Sequence
  ENSG00000119402_38 (sequence is synthesized)
taacaacttcaggcttcatggtgtggacagggatccaggagagctgagtggatgtgtgaagtttctgatagattctgtcatcattccaaaggaatgtagtttcctccagctcaatcattt

SEQ ID NO: 230846 - DNA, 120 bp, Artificial Sequence
  ENSG00000119402_39 (sequence is synthesized)
gaagtaatacacattgccaaatctgactgtaacctgacattttagacctattggagaaataggaagaaagcccctccagtggaaggactggacttggaagaagttctgcaggaaggtgca

SEQ ID NO: 230847 - DNA, 120 bp, Artificial Sequence
  ENSG00000119402_40 (sequence is synthesized)
tgcaattggatagctgttcatgagtgaaacgtggggaacattgctatgaaattgtaaggtttgcacttcatttttcgtagtttaaaaattgctctgttctggctgttgaaaacacttggt

SEQ ID NO: 230848 - DNA, 120 bp, Artificial Sequence
  ENSG00000119402_41 (sequence is synthesized)
gtgaggtttgaatgaggattatataatcattctagtattcataggaaaatgattactgctctctatttgtaaaacaaaagaaataactttcggaaacagtattttagacatgaggaaatt

SEQ ID NO: 230849 - DNA, 120 bp, Artificial Sequence
  ENSG00000119402_42 (sequence is synthesized)
gtttgtattaggcattttgatctaacagaatcagctaaggatagtggatcctggctttacacatttctttgaccaaacccagctggcaacttgaagttgttactgtgtggcttccagatt

SEQ ID NO: 230850 - DNA, 86 bp, Artificial Sequence
  ENSG00000119402_43 (sequence is synthesized)
agctggcaacttgaagttgttactgtgtggcttccagattgcctagaggtgaatcctaccaacatcagtttttgagacagagtctt

SEQ ID NO: 230851 - DNA, 88 bp, Artificial Sequence
  ENSG00000119402_44 (sequence is synthesized)
cgtgttctgcccgcctctatgctgtgcccggccccagcatcacttttatagctttctgtgcctcttcctctgggccttggtgtatgaa

SEQ ID NO: 230852 - DNA, 120 bp, Artificial Sequence
  ENSG00000119402_45 (sequence is synthesized)
tagctttctgtgcctcttcctctgggccttggtgtatgaagccacttgcctttctctgttgggaagcgagcagaatcagattgctactcatgatgcagtccgggcagggcatactgtcac

SEQ ID NO: 230853 - DNA, 120 bp, Artificial Sequence
  ENSG00000119402_46 (sequence is synthesized)
ctttgcctgtggacacagttgtcaggataggggagaagccctttaggtccgtcttcttgacacagccctcctacctggttacgctggtgctttcgcttggtttagacaaccaagacactt

SEQ ID NO: 230854 - DNA, 120 bp, Artificial Sequence
  ENSG00000119402_47 (sequence is synthesized)
gagaattatgctgtcctcagaatgtctgatgaaaagaacagattcacttttttgacacaatgcccattagccatctttggcagtgtttctgatcaaaggttccccatgcctgctctagga

SEQ ID NO: 230855 - DNA, 120 bp, Artificial Sequence
  ENSG00000119402_48 (sequence is synthesized)
aagtaaacttttttcagaataaatcctcaaatggattactgagtagtctttgcaccattcccatcagcctaatcagactgaatggtcacgctcagtgcaaaaagctgttttgctgttagg

SEQ ID NO: 230856 - DNA, 120 bp, Artificial Sequence
  ENSG00000119402_49 (sequence is synthesized)
atgtttcagtgtttcttgtctttcctggaacagttcagttgtttaaatttagtaattcaatcctgaccagtgtaaacccacttaattattgcagcctaaagaattcagctacttctactc

SEQ ID NO: 230857 - DNA, 120 bp, Artificial Sequence
  ENSG00000119402_50 (sequence is synthesized)
ttcataaatgtgcccaagtaaatatgtgtttttaatattcaaccctggaaaattagtaattcagatgataaaagctcatgttttggtgtctttgtactcagattgtgaacaggcatattt

SEQ ID NO: 230858 - DNA, 120 bp, Artificial Sequence
  ENSG00000119402_51 (sequence is synthesized)
cactgatttagacttagtatacttgatgagaatgctcaggttgaagagatagttctgtcagcaatccaacatctatagcaatgtggaaaaagtaatcaactcatatttcacgaatttgat

SEQ ID NO: 230859 - DNA, 120 bp, Artificial Sequence
  ENSG00000119402_52 (sequence is synthesized)
gtatgttgtgatttagagggcatgagataaagtttatatttgaactgtgtggggtagggggaagaagaggttgcttaagcaaatagtggggtgattgtggaacaagatgtctctaagatg

SEQ ID NO: 230860 - DNA, 120 bp, Artificial Sequence
  ENSG00000119402_53 (sequence is synthesized)
agaagttattttcttgcatcatagaagcactctttttacccgtgagtgattgtgttaactataaatcatttatatctgtacattaaagcagattccctcaattaggcaaatttggttagc

SEQ ID NO: 230861 - DNA, 120 bp, Artificial Sequence
  ENSG00000119402_54 (sequence is synthesized)
caagcccaagttattgtttgtacttgaaagtaataaagctgcatttccttaaaaatatattctgtagttaagactttgtcttgctttccccccaaccacttcagacattttatccaacca

SEQ ID NO: 230862 - DNA, 120 bp, Artificial Sequence
  ENSG00000119402_55 (sequence is synthesized)
atgcagggacttttcaaaagtcagtgtgtttttgaaaatagaacaaccccttgagtgatctgaggtggctctgtttttttactgtttctgcatcttctagaaggtaaactcaacaatata

SEQ ID NO: 230863 - DNA, 120 bp, Artificial Sequence
  ENSG00000119402_56 (sequence is synthesized)
accatttctgaaggtgatccaaaaagcaaaacaataaaggtaaaacacaaggaaataattttggtgaatttcatgaatagttgcaaatgaagggatggggtgggtaaaagtcccattttg

SEQ ID NO: 230864 - DNA, 120 bp, Artificial Sequence
  ENSG00000119402_57 (sequence is synthesized)
cttccagaccttggaatagtcttcctctcttttgcccaaggatgtgtctatccagcacatctttgcatgagttctttcttactaacttaaacttacggggcttcttgtcatttgagtacc

SEQ ID NO: 230865 - DNA, 120 bp, Artificial Sequence
  ENSG00000119402_58 (sequence is synthesized)
acggccctgcacctttgatcccctgacagcatcattaagggcagattgtcattcctgttttacagatgagaaagctgtggcttggtaaagtgattcattgcctagaggagttatagtaag

SEQ ID NO: 230866 - DNA, 120 bp, Artificial Sequence
  ENSG00000119402_59 (sequence is synthesized)
tggtgaggctgaagccctgattttcagcccccacacacctggattttttccatgttttcatgtttgtctgttctttctgtatttcaagtctcttcaaatcccgactgctgccttctgcct

SEQ ID NO: 230867 - DNA, 120 bp, Artificial Sequence
  ENSG00000119402_60 (sequence is synthesized)
tcaccacttgtgtgcactgttcaacctgtcttatgctttgcttccagggagtctccccaaccacttctttgagcacttacttgctcttgttcaatcttggtaactctccgttaccatcag

SEQ ID NO: 230868 - DNA, 120 bp, Artificial Sequence
  ENSG00000119402_61 (sequence is synthesized)
ggcacatctggattccttaacatcatggagccctagctaatttcttcgagcaaacagttcttgctcctctatttatttccacccttgcgctttgggtgttaatctcccatcctcgtggaa

SEQ ID NO: 230869 - DNA, 120 bp, Artificial Sequence
  ENSG00000119402_62 (sequence is synthesized)
agttcttgatgttcctttccaccagtcctagggccaggctttaatcccattgatctcccactatctttaaagcctctgctgaccaccataccccactccagcctcactgagcatttttgt

SEQ ID NO: 230870 - DNA, 120 bp, Artificial Sequence
  ENSG00000119402_63 (sequence is synthesized)
gtaaggttagtggtgcagttcatttagcaataaatactgttgtaccttttgcagtagacaactattaactttcatccttgattctcagttttttccaaaatacaagtgaatacctggttt

SEQ ID NO: 230871 - DNA, 120 bp, Artificial Sequence
  ENSG00000119402_64 (sequence is synthesized)
ccccagcaacattgtaagattgagagtaggaattcattgagattttaatgaattccatggattgtcttaagagctatctaaacttggaagaaaaataacttccagagcatctaaaattga

SEQ ID NO: 230872 - DNA, 120 bp, Artificial Sequence
  ENSG00000119402_65 (sequence is synthesized)
aaataaaagatcagaagcaaatgaaagatcaattccacacagcttttcctctcttagacgtccctcttctgccatatcctgtaaacatctgaagtgttctgagtacatttggagagaata

SEQ ID NO: 230873 - DNA, 120 bp, Artificial Sequence
  ENSG00000119402_66 (sequence is synthesized)
tttaatgatcacactgtgattagacatgagtagtccctgccagtgggatgttcctgtcctttgcattttaaccacatgttctgtgctctctgtggtaaagataatctaacagtaataaaa

SEQ ID NO: 230874 - DNA, 120 bp, Artificial Sequence
  ENSG00000119402_67 (sequence is synthesized)
acttatggagaaaattacccagagctcctttatcattacgatttttaatactctcttctaatccttatgcacatgtgtatggatttatgtactgcaaatcattgttttgtaatacattct

SEQ ID NO: 230875 - DNA, 120 bp, Artificial Sequence
  ENSG00000119402_68 (sequence is synthesized)
caaaaatgtgctttaggtttttacaactaccataatattttgtaattttccttcattactgtaatttgctaaaccatttctgttttggtagataattaggtagtttccagttctgctttt

SEQ ID NO: 230876 - DNA, 120 bp, Artificial Sequence
  ENSG00000119402_69 (sequence is synthesized)
tagaagatactacagagaacttctttgtgcatatttccttagaacaagttccagtagaagacttactcgcaaaagcagtggaattttttcttagtattttctgttacaggtacagaagag

SEQ ID NO: 230877 - DNA, 120 bp, Artificial Sequence
  ENSG00000119402_70 (sequence is synthesized)
tgcatacaacacacagttttgtcgaatagttatgaagtgaacacttgtctaaccactgcccgagtcaagaaagaacatttctaaacatgtttgccaatttaatagatataaaggaagtat

SEQ ID NO: 230878 - DNA, 120 bp, Artificial Sequence
  ENSG00000119402_71 (sequence is synthesized)
ctcaaggttgctttaactgacatttctttaacacatgacaacatttttatgggggaggggactagagagaaaatgacatatttttatgtgtgcttatttgtatctcttgaattctgtctg

SEQ ID NO: 230879 - DNA, 120 bp, Artificial Sequence
  ENSG00000119402_72 (sequence is synthesized)
catcttttacccattacactttcaaatacttgtgaaatcattggtcgagatgaattatggctataaataaaatttcactaatctaattatcactgatttagaaataatagttcaacccaa

SEQ ID NO: 230880 - DNA, 120 bp, Artificial Sequence
  ENSG00000119402_73 (sequence is synthesized)
ttttcttgagtctgggtgctgttttgcagcttccattctttatattttgtcttactgttagtgtgtatcagagtaggaccatgtacgttttgttttcctgcataaattagataaagtatt

SEQ ID NO: 230881 - DNA, 120 bp, Artificial Sequence
  ENSG00000119402_74 (sequence is synthesized)
gtgtagtgtcaggcaggcagtcctaagaaggaatgccattatctccaacatttgttttgcctctcactgtagctaccacaaataaaagagattgtattattcctaggactttccacctta

SEQ ID NO: 230882 - DNA, 120 bp, Artificial Sequence
  ENSG00000119402_75 (sequence is synthesized)
gaataataagctataatagtaagaattttgaaatagttttatcagaaaattgctagttgaatagcatcattcttacggtgtctctggttgggaaattatataattggggaaaataaacat

SEQ ID NO: 230883 - DNA, 120 bp, Artificial Sequence
  ENSG00000119402_76 (sequence is synthesized)
gaacttgaaggcaaaaatcattaaacaactgaaaacacaaaatgagcaggttggtggtggtgccagcctggtttttaatctcttcaaatccacacaaagaacagcaactaggccaggcgc

SEQ ID NO: 230884 - DNA, 120 bp, Artificial Sequence
  ENSG00000119402_77 (sequence is synthesized)
ctcaaacaaacaaacaaacaaacaaaaaacccagcaactgaatagcaaaaccaagggcccagacagtactttcaacaaagctaggtacaaggtaacttcatgagccccagaatacagtag

SEQ ID NO: 230885 - DNA, 120 bp, Artificial Sequence
  ENSG00000119402_78 (sequence is synthesized)
aaggtaacttcatgagccccagaatacagtagttgaggcgaaatacctattgccacaagaacatttttgtaggaggaaaatgaaggaaggaaaagagatagtatatgagaggcctgagaa

SEQ ID NO: 230886 - DNA, 120 bp, Artificial Sequence
  ENSG00000119402_79 (sequence is synthesized)
caggagaatccaaaataggcaacaggtgatcaatggagagttgggctgccaatcctaaaatgtcagctgaagctgggagaggctctccaacagtggatgagaacaaggacctaaggcaag

SEQ ID NO: 230887 - DNA, 120 bp, Artificial Sequence
  ENSG00000119402_80 (sequence is synthesized)
aacgcctgaaagggctggagcactgtagcccttataaacagttgaggctgatcggctctcttttaggacaaggccccacaccagggaaaactcctggggctaaaactcctgggagcagga

SEQ ID NO: 230888 - DNA, 120 bp, Artificial Sequence
  ENSG00000119402_81 (sequence is synthesized)
cagggacaagagaggaaagtaagagatggcccagactcaagaaaggataaagacagaggcaggaaatgccagaaagcaacttgcaatatgtttgaatccatacataagagaagagggact

SEQ ID NO: 230889 - DNA, 120 bp, Artificial Sequence
  ENSG00000119402_82 (sequence is synthesized)
gctctgagaaggttgaaaagcttgcctgaacatacactcattccaaaaagtcaggaaaacaaattttacataaaaataatataaaagtatcaagatcaaattctatacacagttattaag

SEQ ID NO: 230890 - DNA, 120 bp, Artificial Sequence
  ENSG00000119402_83 (sequence is synthesized)
aaaaaaatgcgaagaaggagcagattaacatccttacagacaatgaaaacacaccagggagacaccataaaacagaccaagactaacttaaaaacaaatacatcagcctgggcatggtgg

SEQ ID NO: 230891 - DNA, 120 bp, Artificial Sequence
  ENSG00000119402_84 (sequence is synthesized)
cggggcgctcgctcaggtcagtgccgcgcggaacacgattccgagagcaagggacctgggagcaacgaatgggttgatgggatctggattttagagacgggaaaacagggttttggagtt

SEQ ID NO: 230892 - DNA, 120 bp, Artificial Sequence
  ENSG00000119402_85 (sequence is synthesized)
ctaccaaacgtttgaaagacgatgaagtgtgatgaggtggtttatgaagtacaaagcgctatactgcgccataattgtgggtatgccatgaaaacaggtaaatttttccataaccttatg

SEQ ID NO: 230893 - DNA, 120 bp, Artificial Sequence
  ENSG00000119402_86 (sequence is synthesized)
ggccgcaggtccgggtctgtatgcgaggcggggccggtcggggaggggactcttaggcgcccgcggctctgctgacccgccgcgccttggctgtttttctttccctgcaggcgccatggc

SEQ ID NO: 230894 - DNA, 120 bp, Artificial Sequence
  ENSG00000119403_0 (sequence is synthesized)
actcggccgggcagccgcgggccgagcgcagccgcctccgccaccgatgcgcctggtggccagactccaagtgggaccggcggacacgcagcctcgcgtgtcaggggaagctgatggaga

SEQ ID NO: 230895 - DNA, 120 bp, Artificial Sequence
  ENSG00000119403_1 (sequence is synthesized)
atcgagctctggatccagggactcgggactcctatggtgccaccagccacctccccaacaagggggccctggcgaaggtcaagaacaacttcaaagacttgatgtccaaactgacggagg

SEQ ID NO: 230896 - DNA, 120 bp, Artificial Sequence
  ENSG00000119403_2 (sequence is synthesized)
gccagtatgtgctgtgccggtggacagatggcctgtactacctcgggaagatcaagagggtcagcagctctaagcaaagctgcctcgtgactttcgaagataattccaaatactgggtcc

SEQ ID NO: 230897 - DNA, 120 bp, Artificial Sequence
  ENSG00000119403_3 (sequence is synthesized)
tatggaaggacatacagcatgccggtgttccaggagaggagcccaagtgcaacatctgcctagggaagacatcagggccgctgaatgagatcctcatctgcgggaagtgtggcctgggtt

SEQ ID NO: 230898 - DNA, 120 bp, Artificial Sequence
  ENSG00000119403_4 (sequence is synthesized)
accaccagcagtgccacatccccatagcgggcagtgctgaccagcccctgctcacaccttggttctgccgacgctgcatcttcgcactggctgtgcggaaaggcggcgcgctgaagaagg

SEQ ID NO: 230899 - DNA, 120 bp, Artificial Sequence
  ENSG00000119403_5 (sequence is synthesized)
gcgccatcgccaggacgctgcaggccgtgaagatggtgctgtcctaccagcccgaggagctcgagtgggactcgccccatcgcaccaaccagcagcaatgctactgctactgcggcgggc

SEQ ID NO: 230900 - DNA, 120 bp, Artificial Sequence
  ENSG00000119403_6 (sequence is synthesized)
ccggagaatggtacctgcggatgctgcaatgttaccggtgcaggcagtggttccacgaggcctgcacccagtgcctcaatgagcccatgatgtttggagaccggttttacctgttcttct

SEQ ID NO: 230901 - DNA, 120 bp, Artificial Sequence
  ENSG00000119403_7 (sequence is synthesized)
gctccgtgtgtaaccagggcccagagtacatcgagaggctgcccctgcgatgggtggatgtggttcacctggccctctataatctgggggtacagagcaagaagaagtactttgactttg

SEQ ID NO: 230902 - DNA, 120 bp, Artificial Sequence
  ENSG00000119403_8 (sequence is synthesized)
aggagattctggcctttgtcaaccaccactgggagctcctgcagcttggcaagctcaccagcaccccagtgacagatcgaggaccacatctcctcaacgctctgaacagttataaaagcc

SEQ ID NO: 230903 - DNA, 120 bp, Artificial Sequence
  ENSG00000119403_9 (sequence is synthesized)
ggttcctctgcggcaaggagatcaagaagaagaagtgcatcttccgcctgcgcatccgcgtcccacccaacccgccagggaagctgctgcctgacaaaggactgctgccaaatgagaaca

SEQ ID NO: 230904 - DNA, 120 bp, Artificial Sequence
  ENSG00000119403_10 (sequence is synthesized)
gcgcctcctctgagctgcgtaagagaggaaagagcaagcctggtttgttgcctcacgaattccagcagcagaaaaggcgagtttatagaagaaaaagatcaaagtttttgctggaagatg

SEQ ID NO: 230905 - DNA, 120 bp, Artificial Sequence
  ENSG00000119403_11 (sequence is synthesized)
ctattcccagtagtgacttcacctcagcctggagcaccaaccaccacctggctagcatatttgacttcacgctggatgaaattcaaagtttaaaaagtgccagctcaggccagaccttct

SEQ ID NO: 230906 - DNA, 120 bp, Artificial Sequence
  ENSG00000119403_12 (sequence is synthesized)
tctcagatgtcgactccaccgacgctgccagcacctctggctctgcctccaccagcctctcctatgactccagatggacagtgggcagccgaaagaggaagctggcagccaaggcataca

SEQ ID NO: 230907 - DNA, 120 bp, Artificial Sequence
  ENSG00000119403_13 (sequence is synthesized)
tgcccctgcgggcaaagcggtgggcagctgagctggatggacgctgcccctcggacagcagtgcagagggggcttcagtccccgagcggccagacgaaggcattgacagccacacatttg

SEQ ID NO: 230908 - DNA, 120 bp, Artificial Sequence
  ENSG00000119403_14 (sequence is synthesized)
agagcatcagtgaagatgactcatccctgtcccacctcaagtcatctatcaccaactactttggtgcagctgggcggttggcctgtggggagaagtaccaggtgttggctcggagggtca

SEQ ID NO: 230909 - DNA, 120 bp, Artificial Sequence
  ENSG00000119403_15 (sequence is synthesized)
cacctgagggcaaggttcagtacctggtggagtgggaagggaccaccccttactgactagcccccgggggtgccaggggtcctgaaaaccaaaggaggagcagcagaagccataggctcc

SEQ ID NO: 230910 - DNA, 120 bp, Artificial Sequence
  ENSG00000119403_16 (sequence is synthesized)
ccagctttctccaggctggggtgggagaaggaagcaggacagagctgcaagtgcctggcagaatgccctgcctgcctgcctgccaggccaaggcctgcgtctctctgctgtaccagctct

SEQ ID NO: 230911 - DNA, 120 bp, Artificial Sequence
  ENSG00000119403_17 (sequence is synthesized)
ctgtttatctgttctctgaccttgtgtcccctgcgctgggacccttcctcctgaggcccaggtctttgtccccagttgtgtgccttgacctctctcgcccctttctgggtgtgttcgcac

SEQ ID NO: 230912 - DNA, 120 bp, Artificial Sequence
  ENSG00000119403_18 (sequence is synthesized)
atcctgtgtgtgcacagctgtccctccactggatccccttcacacgtgacccgtggggcagccagtcctcccagggactacataacaggcacctttgagagagcatgggagaaggtggat

SEQ ID NO: 230913 - DNA, 120 bp, Artificial Sequence
  ENSG00000119403_19 (sequence is synthesized)
aagaggatgctgctcagtgcttttctcttccactttcctgccactccccactaccctcggagagaggtggtgggatgggagagagcccctgtgaaagcctgtgaggatctgaagagtaaa

SEQ ID NO: 230914 - DNA, 120 bp, Artificial Sequence
  ENSG00000119403_20 (sequence is synthesized)
gggctgggtctgcctcagaaggcaccagcaccagggcccaggtattaaggctgagagtgaaggctgccaatgtcagctttggaggtcccagaagtcttctgttctctggcctcaccccct

SEQ ID NO: 230915 - DNA, 120 bp, Artificial Sequence
  ENSG00000119403_21 (sequence is synthesized)
cagtcgccatagagctgggcctggccttgctggaatggaggcatccttccaaacctgggggacgggggtggggggtggtagtggtgggagggaaaccatgtcttgctaaacctgtttctg

SEQ ID NO: 230916 - DNA, 120 bp, Artificial Sequence
  ENSG00000119403_22 (sequence is synthesized)
gtgcctcccatccccagacccaccagacaccacacagcagacaatacacacccactcgcacaagcttccatccacatgtgttgtactttcagctctaggcatgcagacaaccccacacgg

SEQ ID NO: 230917 - DNA, 120 bp, Artificial Sequence
  ENSG00000119403_23 (sequence is synthesized)
ccacaccaccacatgcccaagtgtacacacacagagccacaccgtccctctgggcctgctggctcctcccttggctttcccttggcccacttccagggcccaggtgctgcaactaaatgt

SEQ ID NO: 230918 - DNA, 120 bp, Artificial Sequence
  ENSG00000119403_24 (sequence is synthesized)
gaaagctcagtggccgctccttctttcagcccatcaaccagcattggtcccatagggaagcacaggggactcaccctctttcatatcccttgccctgccctgaaatggacaatcactttt

SEQ ID NO: 230919 - DNA, 120 bp, Artificial Sequence
  ENSG00000119403_25 (sequence is synthesized)
tgggataggttgaaatttttaaagagcctgcatcatttggttccctcaaagggaagcccttgccagtgggggtttgaaagagaatttttggaaccaacattcaaattctgcctcatctgg

SEQ ID NO: 230920 - DNA, 120 bp, Artificial Sequence
  ENSG00000119403_26 (sequence is synthesized)
agggaaaccaaaattgggagggggaagaggacccctgatgttttgctgcttccagagatattagaaactgactcacttgattggaaaatggacaaaagtgccttgacgtggagggtgggc

SEQ ID NO: 230921 - DNA, 120 bp, Artificial Sequence
  ENSG00000119403_27 (sequence is synthesized)
accagatggggaccagccttgccaactgctgctgtggcctccagcttggctggttttgcaggccgccagcaggaaggcgaaggtggtagtacagcaagaggcactggcggggcagcaggc

SEQ ID NO: 230922 - DNA, 120 bp, Artificial Sequence
  ENSG00000119403_28 (sequence is synthesized)
ctgcaggagctgtttttccattgctaggcctgacccctctctacctgtgagcgttcagggggtccctgagatagtttagatgcccccccatcttagacctcagctcccacagtgcctttt

SEQ ID NO: 230923 - DNA, 120 bp, Artificial Sequence
  ENSG00000119403_29 (sequence is synthesized)
aagggggacctcacctcctgtgcacagcccacccactttcctctgcttccctggcacagcccaggcatagacgagctggcgttggacccagttcttcccccttttcagccccacagctgc

SEQ ID NO: 230924 - DNA, 120 bp, Artificial Sequence
  ENSG00000119403_30 (sequence is synthesized)
tgccacaggggccaactagggccaggtggaaggggagctgagaagccaacccctagcccaggggtgctgtgggaactgggatccaatttgtagcttcctgcctggcttcagagagcccag

SEQ ID NO: 230925 - DNA, 120 bp, Artificial Sequence
  ENSG00000119403_31 (sequence is synthesized)
caaccttctaggcctgctttccagacttctgagatagcctgggatgagcaatcctgttatagtacatctggaccttccctacctgggctctggggaggctgtgggcctggagagggaaaa

SEQ ID NO: 230926 - DNA, 120 bp, Artificial Sequence
  ENSG00000119403_32 (sequence is synthesized)
ggagggagggggtgtctgcaccacctgggaagatagcacaaggcctaatgaggtcaccctgactccccaccccagcatttcattcataccagataatagctgcattactgccaactgacc

SEQ ID NO: 230927 - DNA, 120 bp, Artificial Sequence
  ENSG00000119403_33 (sequence is synthesized)
ttataaccctctgcaccttcaaaaagattcatggtttttaattgctgcttttaataacatttgttaaagttataattaatgtgtctgatttatgatttaaaacctccctttgaacaatca

SEQ ID NO: 230928 - DNA, 120 bp, Artificial Sequence
  ENSG00000119403_34 (sequence is synthesized)
accagtaagtcgtgtatttagcattcattcatcaaagcctccggatgcctcctacgtgccctgcactatgctggtcttggtaatccgtggtccctatcccagcgcccagtgtcaggggaa

SEQ ID NO: 230929 - DNA, 120 bp, Artificial Sequence
  ENSG00000119403_35 (sequence is synthesized)
agcactgtggagcagggctggagggcagaggtgttaccttggagctttgtaggaaacgaggaagtattgaagagtggttaagagcctgggccggacacagtgcgaatcctcccaggacgt

SEQ ID NO: 230930 - DNA, 120 bp, Artificial Sequence
  ENSG00000119403_36 (sequence is synthesized)
ccacgtcctagctctgctccttaccagctgtgcaaccccttagcctcagctctctgaatagtttccccatcatgtggtgattatgagcagagcatgaattacgtaattcacatagaggtt

SEQ ID NO: 230931 - DNA, 120 bp, Artificial Sequence
  ENSG00000119403_37 (sequence is synthesized)
ttttacctaaatcccttaacctctctgaacctcctcagctcttttcctcaaacaagataatgcaaatgaaagcacttttgacctgtgaagtgttgcacaggtgccttggatcacgctcga

SEQ ID NO: 230932 - DNA, 120 bp, Artificial Sequence
  ENSG00000119403_38 (sequence is synthesized)
gttattgacaccagtgcttacgtcaccgccaggggagggtgctccaggaggtttttttgacttcttggactttgaagggtggctgggtaggaaacagacaggtgtggtggtgggaagctc

SEQ ID NO: 230933 - DNA, 120 bp, Artificial Sequence
  ENSG00000119403_39 (sequence is synthesized)
cagcctggacccagaaagctgtgaccctggctgagcaggctgccacctcacctggtcccacctccttgcccccttgcccagggtggatgtggttcacctggccctctataatctgggggt

SEQ ID NO: 230934 - DNA, 120 bp, Artificial Sequence
  ENSG00000119403_40 (sequence is synthesized)
ccagtccctgcctctcctgcctcctccagtggggcagaccagagactcccatcacagagtctgagctccaagcagaagggccacacctgggctttggagacagatagcgcctctgccact

SEQ ID NO: 230935 - DNA, 120 bp, Artificial Sequence
  ENSG00000119403_41 (sequence is synthesized)
gtccttggccaggatttgtagactccctgagcctcagtttcctcaactgtaaagtggagatgggtttggtgtcgggaataacgggaccaataaatgatgctttactattaaaaaagaaaa

SEQ ID NO: 230936 - DNA, 120 bp, Artificial Sequence
  ENSG00000119403_42 (sequence is synthesized)
agaaagccaagccctcagttaaaaggatccctgctgtgcaggtctgtctgaaggggctttttgcagtagagctttcagcataacatccctgttcccagagcaccacagccctcccctctt

SEQ ID NO: 230937 - DNA, 120 bp, Artificial Sequence
  ENSG00000119403_43 (sequence is synthesized)
cgcccggccagggtggaggcgggtgcggcgacccggccggctcctagaggcgcagcgggagaggaagtgtcagtttgtgaacctgcagcggccccggcctggcccctggccgggcgggcg

SEQ ID NO: 230938 - DNA, 120 bp, Artificial Sequence
  ENSG00000119403_44 (sequence is synthesized)
gggacctcgcagcgccgggcgagccaggtggcagggagaggacagggattcagaccgcatcccctgcccgggagcctgtgcgctctgcgctggagaaaaaggagatgggagtgggggtgg

SEQ ID NO: 230939 - DNA, 120 bp, Artificial Sequence
  ENSG00000119403_45 (sequence is synthesized)
agaaggtcgtggccacgccaccatctggggagccgagacccctgcagtgcctggctcgccccagggccccgcacatacttagcttcacacactccctggcacaatgccgtagacatcatc

SEQ ID NO: 230940 - DNA, 120 bp, Artificial Sequence
  ENSG00000119403_46 (sequence is synthesized)
ctggactctctccctgtgaacagatagtcacaacaccaggtgcccagcgccatggccacaaggaggagacccgagtaggcccgcggggaaagagagaggctgtgtgtggctgtagtggag

SEQ ID NO: 230941 - DNA, 120 bp, Artificial Sequence
  ENSG00000119403_47 (sequence is synthesized)
ggccttggggctggttgaggcaaacaaaagggagaagagcagcaagaaccacactcatgcaggaggaagcacagggaggaggcaccagccgtgttctcagctgctacctggaaccccgca

SEQ ID NO: 230942 - DNA, 120 bp, Artificial Sequence
  ENSG00000119403_48 (sequence is synthesized)
tcccatgggctttgaggaagtcagcatctgcagagaccatccggattttagctctgggtccaaggaggcagagaggcttgtgtcatgcttgaccccactccccaggaggatggactgaca

SEQ ID NO: 230943 - DNA, 120 bp, Artificial Sequence
  ENSG00000119408_0 (sequence is synthesized)
ccgcaaactcgtgtgggacgcaccgctccagccgcccgcgggccagcgcaccggtcccccagcggcagccgagcccgcccgcgcgccgttcgtgccctcgtgaggctggcatgcaggatg

SEQ ID NO: 230944 - DNA, 120 bp, Artificial Sequence
  ENSG00000119408_1 (sequence is synthesized)
tgccctcgtgaggctggcatgcaggatggcaggacagcccggccacatgccccatggagggagttccaacaacctctgccacaccctggggcctgtgcatcctcctgacccacagaggca

SEQ ID NO: 230945 - DNA, 120 bp, Artificial Sequence
  ENSG00000119408_2 (sequence is synthesized)
tcccaacacgctgtcttttcgctgctcgctggcggacttccagatcgaaaagaagataggccgaggacagttcagcgaggtgtacaaggccacctgcctgctggacaggaagacagtggc

SEQ ID NO: 230946 - DNA, 120 bp, Artificial Sequence
  ENSG00000119408_3 (sequence is synthesized)
tctgaagaaggtgcagatctttgagatgatggacgccaaggcgaggcaggactgtgtcaaggagatcggcctcttgaagcaactgaaccacccaaatatcatcaagtatttggactcgtt

SEQ ID NO: 230947 - DNA, 120 bp, Artificial Sequence
  ENSG00000119408_4 (sequence is synthesized)
tatcgaagacaacgagctgaacattgtgctggagttggctgacgcaggggacctctcgcagatgatcaagtactttaagaagcagaagcggctcatcccggagaggacagtatggaagta

SEQ ID NO: 230948 - DNA, 120 bp, Artificial Sequence
  ENSG00000119408_5 (sequence is synthesized)
ctttgtgcagctgtgcagcgccgtggagcacatgcattcacgccgggtgatgcaccgagacatcaagcctgccaacgtgttcatcacagccacgggcgtcgtgaagctcggtgaccttgg

SEQ ID NO: 230949 - DNA, 120 bp, Artificial Sequence
  ENSG00000119408_6 (sequence is synthesized)
tctgggccgcttcttcagctctgagaccaccgcagcccactccctagtggggacgccctactacatgtcaccggagaggatccatgagaacggctacaacttcaagtccgacatctggtc

SEQ ID NO: 230950 - DNA, 120 bp, Artificial Sequence
  ENSG00000119408_7 (sequence is synthesized)
cctgggctgtctgctgtacgagatggcagccctccagagccccttctatggagataagatgaatctcttctccctgtgccagaagatcgagcagtgtgactaccccccactccccgggga

SEQ ID NO: 230951 - DNA, 120 bp, Artificial Sequence
  ENSG00000119408_8 (sequence is synthesized)
gcactactccgagaagttacgagaactggtcagcatgtgcatctgccctgacccccaccagagacctgacatcggatacgtgcaccaggtggccaagcagatgcacatctggatgtccag

SEQ ID NO: 230952 - DNA, 120 bp, Artificial Sequence
  ENSG00000119408_9 (sequence is synthesized)
cacctgagcgtggatgcaccgtgccttatcaaagccagcaccactttgccttacttgagtcgtcttctcttcgagtggccacctggtagcctagaacagctaagaccacagggttcagca

SEQ ID NO: 230953 - DNA, 120 bp, Artificial Sequence
  ENSG00000119408_10 (sequence is synthesized)
ggttccccaaaaggctgcccagccttacagcagatgctgaaggcagagcagctgagggaggggcgctggccacatgtcactgatggtcagattccaaagtcctttctttatactgttgtg

SEQ ID NO: 230954 - DNA, 120 bp, Artificial Sequence
  ENSG00000119408_11 (sequence is synthesized)
gacaatctcagctgggtcaataagggcaggtggttcagcgagccacggcagccccctgtatctggattgtaatgtgaatctttagggtaattcctccagtgacctgtcaaggcttatgct

SEQ ID NO: 230955 - DNA, 120 bp, Artificial Sequence
  ENSG00000119408_12 (sequence is synthesized)
aacaggagacttgcaggagaccgtgtgatttgtgtagtgagcctttgaaaatggttagtaccgggttcagtttagttcttagtatcttttcaatcaagctgtgtgcttaatttactctgt

SEQ ID NO: 230956 - DNA, 120 bp, Artificial Sequence
  ENSG00000119408_13 (sequence is synthesized)
tgtaaagggataaagtggaaatcatttttttccgtggagtggtgattctgctaacatttttatctacgttttataacttggtgagtgacgatgagagccctgcacctggccagagtgtca

SEQ ID NO: 230957 - DNA, 120 bp, Artificial Sequence
  ENSG00000119408_14 (sequence is synthesized)
ttcgtcacctccttgaatgctggcggttcatttcatgatcagtgttaagcattttcctccatgggaaggaagcatgggatatagaaaagcgaagggctgtcctttacaaattctggttct

SEQ ID NO: 230958 - DNA, 120 bp, Artificial Sequence
  ENSG00000119408_15 (sequence is synthesized)
gcaacttcctagcgtgactttgggcttgggcaagtttcttagccgttctgagccttcatttcctcatctgtacaatgagattaatagtacctatcatctaccttcaggattgctgacaga

SEQ ID NO: 230959 - DNA, 120 bp, Artificial Sequence
  ENSG00000119408_16 (sequence is synthesized)
cagaatttgaaataaaatatgcaagttagctaatacaaaaagtagatgatccaaaaatggtagccactcacccttcacaaactgaagtccatggaccacggaagtcgagaattaatgtac

SEQ ID NO: 230960 - DNA, 120 bp, Artificial Sequence
  ENSG00000119408_17 (sequence is synthesized)
acctgtatcatgtgtaggaaaccagaaatgtgttccttatttcttgttcccaaacaggattaactgtgaagactaatttataaatgtgaacctaagaaaactccacctctgaaggaaatc

SEQ ID NO: 230961 - DNA, 120 bp, Artificial Sequence
  ENSG00000119408_18 (sequence is synthesized)
atttgaattttgtttttgtacgtaaagttaaccttccaattgtctgagctgtcgtcactgacttcatgacagtctggccctccagacaagagcagcgctggcatcgggcaggtgattcct

SEQ ID NO: 230962 - DNA, 120 bp, Artificial Sequence
  ENSG00000119408_19 (sequence is synthesized)
gacacctgctgcctgcaggcattcactgaccaggcctttcctggaggaaacacccagggccgggcggctgctgtttccacacgtggactcggatctgctgtgacaccgtcagcccgacag

SEQ ID NO: 230963 - DNA, 120 bp, Artificial Sequence
  ENSG00000119408_20 (sequence is synthesized)
tctctccatatgcagcctttcctctgtacttttctccatggttgaaataaaacagggtgactgggagttacttagaattcatgaagattttaaaatggctttggagattttgcttttaaa

SEQ ID NO: 230964 - DNA, 120 bp, Artificial Sequence
  ENSG00000119408_21 (sequence is synthesized)
ccagtagattcaaaacttaaacagcgtctgcagcacaatttcttgaggaaccttgaaaaacacaacttcccaggccccattcagtaatcccaggatttctttaagctccccaaataattt

SEQ ID NO: 230965 - DNA, 120 bp, Artificial Sequence
  ENSG00000119408_22 (sequence is synthesized)
tgaaactcatcatcagccgagtttctgccctcatgaggtaattccatcgttctccccagcctgcccctggcagctgtaacacaggagctggcctgagagcagattcaccctggaatgttc

SEQ ID NO: 230966 - DNA, 120 bp, Artificial Sequence
  ENSG00000119408_23 (sequence is synthesized)
tctccacagaacaatcaagtccctgtcgcctgcctagtgcttaccactgaagatttttctgattccagaccaactttttgccaacattctgcttccagctctctgagcccctgccgtgtc

SEQ ID NO: 230967 - DNA, 120 bp, Artificial Sequence
  ENSG00000119408_24 (sequence is synthesized)
tccccaacactgccagccccagcacgcaatcaacctactttgtgcatgccacccgctttccacactgtgagaacaatctgcccaactggaccctctggaggcgcacgatctcagccactc

SEQ ID NO: 230968 - DNA, 120 bp, Artificial Sequence
  ENSG00000119408_25 (sequence is synthesized)
accaggcctgagtgtttgtgaaatgatcatgtcctacttattacaaaaccgtaaccccaaaacattccttttatttctgtgaaaccggccaaagtgaggtccacccaccttcacacagct

SEQ ID NO: 230969 - DNA, 120 bp, Artificial Sequence
  ENSG00000119408_26 (sequence is synthesized)
ctggcggtgcacctgctcaccttctcttggttctcagaactgagctgggcttgagaacacagctttggctttgccatttttttcctacttggctgctgaggtggagggtgtgctgcactt

SEQ ID NO: 230970 - DNA, 120 bp, Artificial Sequence
  ENSG00000119408_27 (sequence is synthesized)
atcaccccatttcaaaaccaaaccaaacctgaggccaccccaaacaaattcagccagcaaaaagggtaggtatcgatggtcacctgaagcctcaagggagtccactctgacttctgacag

SEQ ID NO: 230971 - DNA, 120 bp, Artificial Sequence
  ENSG00000119408_28 (sequence is synthesized)
gcaatgctaggcgatggggaatccgaagacgcacaggagtccaagggttggctgactgcagaccctcatcataagtctagagccggagaagatggggagacgccggcctgcgccctttcg

SEQ ID NO: 230972 - DNA, 120 bp, Artificial Sequence
  ENSG00000119408_29 (sequence is synthesized)
cacccaccccagcccagagaggcgacccagctccctggaggcccaggcacctcatgtctgccctcaacccagagtggagcagaccttccctggagcttctcaggagccacttcaaaagtt

SEQ ID NO: 230973 - DNA, 120 bp, Artificial Sequence
  ENSG00000119408_30 (sequence is synthesized)
attgccacagagacaagccagccaagaagtgccaccctggacgaaggtcgggagaagaagacacatgaattagagacagcacgggggagcaggctgtggagctgggagtgacggggtgag

SEQ ID NO: 230974 - DNA, 120 bp, Artificial Sequence
  ENSG00000119408_31 (sequence is synthesized)
ttttgtctgccccttcctgcctgtgggaaggagagaaaattaggggaggccacgggcttgaaagctttccctgcatggaggccactggatgggattctagatgctcgcctgggacccagg

SEQ ID NO: 230975 - DNA, 120 bp, Artificial Sequence
  ENSG00000119408_32 (sequence is synthesized)
cgtgcggccgctgcgccgcaaactcgtgtgggacgcaccgctccagccgcccgcgggccagcgcaccggtcccccagcggcagccgagcccgcccgcgcgccggagaagaagacacatga

SEQ ID NO: 230976 - DNA, 120 bp, Artificial Sequence
  ENSG00000119408_33 (sequence is synthesized)
tattttgagagagcaggtttaccccagaacagtctgtggaaggtgtggggcagggaggagagctgggccgccctgaggacacagagggagaagggtgctgggagccagcctgcaagttct

SEQ ID NO: 230977 - DNA, 80 bp, Artificial Sequence
  ENSG00000119411_0 (sequence is synthesized)
ggagccggggccggggtccgggtccgggcccgggccggggccactctgccccgaacacggccaggctctgagctggttct

SEQ ID NO: 230978 - DNA, 120 bp, Artificial Sequence
  ENSG00000119411_1 (sequence is synthesized)
ctggttctgcggctccgagcgacggcccgtgtgcgccgcctgcgcggggttgggcggtcgctgccgggggcaccgcatccgccgggcggaggagcgcgccgaggagctgcggaacaagat

SEQ ID NO: 230979 - DNA, 120 bp, Artificial Sequence
  ENSG00000119411_2 (sequence is synthesized)
aacaagattgtggaccagtgtgagaggctgcagttacagagtgctgccatcaccaagtatgtggcggacgtcctgccggggaagaatcaaagagcagtgagcatggccagtgcagcgagg

SEQ ID NO: 230980 - DNA, 120 bp, Artificial Sequence
  ENSG00000119411_3 (sequence is synthesized)
gaactggttatccagcggttgagtctggtgaggagtctttgcgagagcgaggagcagcggttactggaacaggtgcatggcgaagaggagcgggcccaccagagcatcctgacacagcgg

SEQ ID NO: 230981 - DNA, 120 bp, Artificial Sequence
  ENSG00000119411_4 (sequence is synthesized)
gtgcactgggccgaggcgctgcagaaacttgacaccatccgcactggcctggtgggcatgcttactcacctggatgacctccagctgattcagaaggagcaagagattttcgagaggacc

SEQ ID NO: 230982 - DNA, 120 bp, Artificial Sequence
  ENSG00000119411_5 (sequence is synthesized)
gaagaagcagagggcattttggatccccaggagtcggaaatgttaaactttaatgagaagtgcactcggagcccactactgacccaactctgggcaacggcggttcttgggtctctctca

SEQ ID NO: 230983 - DNA, 120 bp, Artificial Sequence
  ENSG00000119411_6 (sequence is synthesized)
ggcacagaggacatacggatcgatgagaggacagtcagccccttcctgcaattgtcagatgatcgaaagaccctgaccttcagcaccaagaagtcaaaggcctgtgcagatggcccggag

SEQ ID NO: 230984 - DNA, 120 bp, Artificial Sequence
  ENSG00000119411_7 (sequence is synthesized)
cgcttcgaccactggcccaatgccctggctgccacctccttccagaatgggctccatgcctggatggtgaatgtccagaacagttgtgcctataaggtgggcgtggcttcaggccacctg

SEQ ID NO: 230985 - DNA, 120 bp, Artificial Sequence
  ENSG00000119411_8 (sequence is synthesized)
ccccgcaagggttctggcagtgactgccgtctgggccacaatgccttctcctgggtcttctctcgctatgatcaggagtttcgtttctcacacaatgggcagcacgagcccctggggctg

SEQ ID NO: 230986 - DNA, 120 bp, Artificial Sequence
  ENSG00000119411_9 (sequence is synthesized)
gagctgctcttctatgagccagcctccggcacagtgctctgtgcccatcatgtgtccttcccggggcccctcttcccagtctttgctgtggccgatcagaccatttctatcgtccgctga

SEQ ID NO: 230987 - DNA, 120 bp, Artificial Sequence
  ENSG00000119411_10 (sequence is synthesized)
cctctggccacaggaagccaggtccaccgcccaccaccctttcaggccatgtttctactcagtgtgcttttcccaaatgatgtgtgtggtgtttctaagagaaacagggcccataaccag

SEQ ID NO: 230988 - DNA, 120 bp, Artificial Sequence
  ENSG00000119411_11 (sequence is synthesized)
tgggcagctttaggagggatggggatctgtttcagatctaggcataacctgtaaatcacaggtgtccaaacttttggcttccctgggccacatttgaagaagaattttcttgggccacat

SEQ ID NO: 230989 - DNA, 120 bp, Artificial Sequence
  ENSG00000119411_12 (sequence is synthesized)
aaaatacactaacgatagctgatgagctaaaaaaaaaaaaaaagtctgtgtataatttttgtgatatctgccaccacagataagcaaaaaagtccttgcattcaaagggttggagattgc

SEQ ID NO: 230990 - DNA, 120 bp, Artificial Sequence
  ENSG00000119411_13 (sequence is synthesized)
tgctttgagtgctgggtacctgtggggaacctactactccctgggccttagtctcccaaatccaccatgcatctgcccctctgagggtgtcttcactttgtctctggcatctagcatggt

SEQ ID NO: 230991 - DNA, 120 bp, Artificial Sequence
  ENSG00000119411_14 (sequence is synthesized)
gcctggtgcatagtgagcatgcaataaatatttggcaggtgagtggatggatagatggataggtgaatgtaggtggacaggtgactgggtggatgttgtggtctctggagaagcactgcc

SEQ ID NO: 230992 - DNA, 120 bp, Artificial Sequence
  ENSG00000119411_15 (sequence is synthesized)
attcagcctcctgctccagctgttcacatgcagaaatgctctcttcacaggcagagaagcctgtggctaaagtttccacatcccattaactcagtgcttttgtctttttcatgacatggc

SEQ ID NO: 230993 - DNA, 120 bp, Artificial Sequence
  ENSG00000119411_16 (sequence is synthesized)
acatagagaaaatatttttttctagcacacaagagcaacctgaaaggctgctcctggccagaggactctgtcccgggggaccgtgtcctcccccatgtcctgcctaggccctcagaggac

SEQ ID NO: 230994 - DNA, 120 bp, Artificial Sequence
  ENSG00000119411_17 (sequence is synthesized)
caggggatcatgtctccaggtaacccgactgtagcccctgctggctgagctccagcctgtgcccactgataatagcagggacggccttttctcttagagcagctgataagtttccctacc

SEQ ID NO: 230995 - DNA, 120 bp, Artificial Sequence
  ENSG00000119411_18 (sequence is synthesized)
tgatggccccctctgacataaactgcacacctggggtgatggcttaaagccagaaagagctgagggagttaagagggccaaccttagggcacgtgggcattattaaaggtcttaaaagca

SEQ ID NO: 230996 - DNA, 120 bp, Artificial Sequence
  ENSG00000119414_0 (sequence is synthesized)
ggacgtgacgcagggaaagttccggcttcggcctccgccgctgccgccgccgctgctacagccgccgccgccgctgttgccgcggcttgttattcttaaaatggcgccgctagacctgga

SEQ ID NO: 230997 - DNA, 120 bp, Artificial Sequence
  ENSG00000119414_1 (sequence is synthesized)
caagtatgtggaaatagcgcggctgtgcaagtacctgccagagaacgacctgaagcggctatgtgactacgtttgtgacctcctcttagaagagtcaaatgttcagccagtatcaacacc

SEQ ID NO: 230998 - DNA, 120 bp, Artificial Sequence
  ENSG00000119414_2 (sequence is synthesized)
agtaacagtgtgtggagatatccatggacagttttatgacctttgtgaactgttcagaactggaggtcaggttcctgacacaaactacatatttatgggtgattttgtagacagaggtta

SEQ ID NO: 230999 - DNA, 120 bp, Artificial Sequence
  ENSG00000119414_3 (sequence is synthesized)
ctatagtttggagaccttcacttaccttcttgcattaaaggctaaatggcctgatcgtattacacttttgcgaggaaatcatgagagtagacagataacacaggtctatggattttatga

SEQ ID NO: 231000 - DNA, 120 bp, Artificial Sequence
  ENSG00000119414_4 (sequence is synthesized)
tgagtgccaaaccaaatatggaaatgctaatgcctggagatactgtaccaaagtttttgacatgctcacagtagcagctttaatagatgagcagattttgtgtgtccatggtggtttatc

SEQ ID NO: 231001 - DNA, 120 bp, Artificial Sequence
  ENSG00000119414_5 (sequence is synthesized)
tcctgatatcaaaacactggatcaaattcgaaccatcgaacggaatcaggaaattcctcataaaggagcattttgtgatctggtttggtcagatcctgaagatgtggatacctgggctat

SEQ ID NO: 231002 - DNA, 120 bp, Artificial Sequence
  ENSG00000119414_6 (sequence is synthesized)
cagtccccgaggagcaggttggctttttggagcaaaggtcacaaatgagtttgttcatatcaacaacttaaaactcatctgcagagcacatcaactagtgcacgaaggctataaatttat

SEQ ID NO: 231003 - DNA, 120 bp, Artificial Sequence
  ENSG00000119414_7 (sequence is synthesized)
gtttgatgagaagctggtgacagtatggtctgctcctaattactgctatcgttgtggaaatattgcttcgatcatggtcttcaaagatgtaaatacaagagaaccaaagttattccgggc

SEQ ID NO: 231004 - DNA, 120 bp, Artificial Sequence
  ENSG00000119414_8 (sequence is synthesized)
agttccagattcagaacgtgttattcctcccagaacgacaacgccatatttcctttgaggccttcgcccatcctgctgacccatttttctgccctcttcttaccccaattttcttgtatt

SEQ ID NO: 231005 - DNA, 120 bp, Artificial Sequence
  ENSG00000119414_9 (sequence is synthesized)
accctctacaatatactttttattgagcactttgctgctgaaatgctgcctcttgcctttttttttttaaattttaaattatctaaatttattgtttgttgtggtgtctatagcaaagtt

SEQ ID NO: 231006 - DNA, 120 bp, Artificial Sequence
  ENSG00000119414_10 (sequence is synthesized)
tttctatcaattttcccccatcccatccccaccctggactcatttgagaagacttgagaaatgtcttaatactcacactgctgcatgtagctcttgcttatttactggtctgggaaacag

SEQ ID NO: 231007 - DNA, 120 bp, Artificial Sequence
  ENSG00000119414_11 (sequence is synthesized)
gatgtgtttcctttttttaaaagccaattgacagattacacctaaatactcctccttttgtatcattcagccttttgttttagtttggtaagttttaagaaatttcagcagcaaagttgt

SEQ ID NO: 231008 - DNA, 120 bp, Artificial Sequence
  ENSG00000119414_12 (sequence is synthesized)
tattcagtgggcacgatggactccaaatgcctcaagttatgtatacctgtcccagatgtaaacttcattgtcctttgttggatgatattttaaatggatataaaataaattggtctaaag

SEQ ID NO: 231009 - DNA, 120 bp, Artificial Sequence
  ENSG00000119414_13 (sequence is synthesized)
ggctgccctccttgttgtgtttttaaattttagttaaaaactgctacagcttatgactttgtactttaagataattgtattgatcttttttcagattccttgtattttttaataaagtaa

SEQ ID NO: 231010 - DNA, 120 bp, Artificial Sequence
  ENSG00000119414_14 (sequence is synthesized)
tcttaaataaaactcagataggttaagtgttagaaattttaaacagcttacattgttagcgtaaagttatcttttcttttttcctaatcagagttcttgaccctttggttattgagttta

SEQ ID NO: 231011 - DNA, 120 bp, Artificial Sequence
  ENSG00000119414_15 (sequence is synthesized)
aaacttcaattgaaattcaatagtatttatttttgaaaaaaatcactaaactgtgcctaaagaacataactgccatattaatgttttggtttatatcctctatagtaatagaaaaacatt

SEQ ID NO: 231012 - DNA, 120 bp, Artificial Sequence
  ENSG00000119414_16 (sequence is synthesized)
taatacttgtaatgctgatgtgttaatttgataccagttgagtagaatgtgatcaatccagtttacaatctatcatgagtattattaactaaaatctatgtgcttttcaataggaatcat

SEQ ID NO: 231013 - DNA, 120 bp, Artificial Sequence
  ENSG00000119414_17 (sequence is synthesized)
agtgttcatttttaaactgcaactggaaaggttgaaaagttaggactcttgtatttgtgaactgtaatctgaagcagattatttaaagtgtagaaaaagaaacaagttcttcttttttgc

SEQ ID NO: 231014 - DNA, 120 bp, Artificial Sequence
  ENSG00000119414_18 (sequence is synthesized)
aaaggtctgtgataccatatttcagctttgtgtaagtaatttgaatatccaaagggttgtgatgatcagttctgaatatgcaactgtccacttaataaggacaagtattccagtatctct

SEQ ID NO: 231015 - DNA, 120 bp, Artificial Sequence
  ENSG00000119414_19 (sequence is synthesized)
tatgactgtagtcataaatgatgttggaatgtacattttgtgaaatagttggtatccctttactatgattaatttttgttattccaggaaatacttgtgaagccagccaattaataaagc

SEQ ID NO: 231016 - DNA, 120 bp, Artificial Sequence
  ENSG00000119414_20 (sequence is synthesized)
actttagcatctgttcaggtagttttgaaaacccacttttccccttcaggataagaacttccaggttacctaaaaatgcaataaaaatctttatagtctaagcttcttggcatataattt

SEQ ID NO: 231017 - DNA, 120 bp, Artificial Sequence
  ENSG00000119414_21 (sequence is synthesized)
ttcatcagggttttcttttattaattgagcacaatactgttttgatttaatttttttccctcaaaccacccagctccttacatagtttttaattatatagctatatgaaagaggtggcta

SEQ ID NO: 231018 - DNA, 120 bp, Artificial Sequence
  ENSG00000119414_22 (sequence is synthesized)
agacatttgctgcacacacttgaactaatgttgggtcagtagcttcgtgttactgccctgatcccagtgtaattcaggtggaaaggtatttttatctcacagggatatgtagctatgtat

SEQ ID NO: 231019 - DNA, 120 bp, Artificial Sequence
  ENSG00000119414_23 (sequence is synthesized)
tttactaattgtgaaacactggaaattaatgatgcagacaacttggtgtggtctttgaacagctctctgcagtatttttttttttcctgttaccataaattgtatttaagtgcttgcttt

SEQ ID NO: 231020 - DNA, 120 bp, Artificial Sequence
  ENSG00000119414_24 (sequence is synthesized)
ccacttaagttgtactaatagaaccggtaactcccagccctccctgtttgacactccttagcttagattgatgtagttgtttttgttatccctataatgtgacttttatttttaagtcat

SEQ ID NO: 231021 - DNA, 120 bp, Artificial Sequence
  ENSG00000119414_25 (sequence is synthesized)
tgtgtactgcatttgtttgtcactagttgggcacgtgccaataatattctctccattccttatctgccatctctgttttgcctgatttctcttcaactgaataatggctttttgcatgga

SEQ ID NO: 231022 - DNA, 120 bp, Artificial Sequence
  ENSG00000119414_26 (sequence is synthesized)
aaaaatagtttttactattagacgtgtaaagggaagagagagctaatgtattggactttgtgagcctacaaggaatattttggatccctccaataaataagggctatgtactatatgtac

SEQ ID NO: 231023 - DNA, 120 bp, Artificial Sequence
  ENSG00000119414_27 (sequence is synthesized)
tatatagagttatcatgtggtggaagatacttgcaagtcatagatttatgggcaggaggatttgttactccctatatctaggctgaatgtaaaatcccttatgttgtatcaatgggggta

SEQ ID NO: 231024 - DNA, 120 bp, Artificial Sequence
  ENSG00000119414_28 (sequence is synthesized)
aaaactatttttatttgcctatgatatacttggtttctaataaagtgccctaggctctagtgagaactgtctactttgaattgccatttactccctttcctcctttggccgatatgctct

SEQ ID NO: 231025 - DNA, 120 bp, Artificial Sequence
  ENSG00000119414_29 (sequence is synthesized)
tggctagctttttataagttaatgtgtttccccaaaaagtttcactactttatattcatttgagtgtgatcctaaaacacctggatcaacagtacatctcatatgcaatctgcatcagct

SEQ ID NO: 231026 - DNA, 120 bp, Artificial Sequence
  ENSG00000119414_30 (sequence is synthesized)
cctattctgtctggatgtctagaactgttggaagattttgacgtcttaagccctaggttttgctttgggaaataaggtttgaaatattgttcattgcattaagatttgtgtgtgtgtgct

SEQ ID NO: 231027 - DNA, 120 bp, Artificial Sequence
  ENSG00000119414_31 (sequence is synthesized)
ttgtaagcccagaaccaggttttggaaaatgcctgtactgtgaaagcaaattaggactctttctgagcctctttcattgtcagaaatagaatcactttccatcagcttccaggaaattgt

SEQ ID NO: 231028 - DNA, 120 bp, Artificial Sequence
  ENSG00000119414_32 (sequence is synthesized)
gtatctggagtcgaagagatttgacatcaagaatccagatttttaaatgtaattgttttttaaatgctaatgtttgtaaagcaccttcagttcttcggatgaaaggtgctatattccctc

SEQ ID NO: 231029 - DNA, 120 bp, Artificial Sequence
  ENSG00000119414_33 (sequence is synthesized)
agtgtaaattaataaaaagattacaggaagtttgtcaaaaaattcaatgcatagtctgtagtatgtcctgacaagaagttagcattttatataagaaattaaaaaatgcttattcctcca

SEQ ID NO: 231030 - DNA, 120 bp, Artificial Sequence
  ENSG00000119414_34 (sequence is synthesized)
gaagcgggctctcttggggcctgcagtcggggttcagccagagggggcgccgggcgtaccgacgtagcggggagaaacgggtcgcgctttaacggcgctgcgcaggcgccactcacgggc

SEQ ID NO: 231031 - DNA, 120 bp, Artificial Sequence
  ENSG00000119414_35 (sequence is synthesized)
tgccagagaacgacctgaagttttgggctatgatgcattaggcttctgcgagtatttatatacagattttgaacatgtttttattgccaagactacagttgctgggtcaaatgcggctat

SEQ ID NO: 231032 - DNA, 120 bp, Artificial Sequence
  ENSG00000119421_0 (sequence is synthesized)
atgcgcaggcgccgtgtggcactcggcggtcgaaaggggagttcaaggagacgggggcgacgcggctgagggcttctcgtcggggtcggggctgcagccgtcatgccggggatagtggag

SEQ ID NO: 231033 - DNA, 120 bp, Artificial Sequence
  ENSG00000119421_1 (sequence is synthesized)
ctgcccactctagaggagctgaaagtagatgaggtgaaaattagttctgctgtgcttaaagctgcggcccatcactatggagctcaatgtgataagcccaacaaggagtttatgctctgc

SEQ ID NO: 231034 - DNA, 120 bp, Artificial Sequence
  ENSG00000119421_2 (sequence is synthesized)
cgctgggaagagaaagatccgaggcggtgtttagaggaaggcaaactggtcaacaagtgtgctttggacttctttaggcagataaaacgtcactgtgcagagccttttacagaatattgg

SEQ ID NO: 231035 - DNA, 120 bp, Artificial Sequence
  ENSG00000119421_3 (sequence is synthesized)
ctgggctgggtgcggcctgacctgggagaactgtcaaaggtcaccaaagtgaaaacagatcgacctttaccggagaatccctatcactcaagaccaagaccggatcccagccctgagatc

SEQ ID NO: 231036 - DNA, 120 bp, Artificial Sequence
  ENSG00000119421_4 (sequence is synthesized)
gagggagatctgcagcctgccacacatggcagccgcttttatttctggaccaagtaaagatgggtccgtggcccacactcggtcatgtgctcagacaacgactgatgaaaacgcccatgc

SEQ ID NO: 231037 - DNA, 120 bp, Artificial Sequence
  ENSG00000119421_5 (sequence is synthesized)
ggtttgcatcgactgatagtgtgttctttccgggatcacaaacattaacaaaaaagttaacttatgtgacttggcagttattctataccatttcctgtccattaaaatttttaaaggaaa

SEQ ID NO: 231038 - DNA, 120 bp, Artificial Sequence
  ENSG00000119431_0 (sequence is synthesized)
aaaaaaaagccgtgggtcaggagccagagccctctgctctagtcttagctgtgccaatgtgactccctgtgtgatttgggggtaaattactgcccctcactgggtctctgtctacccacc

SEQ ID NO: 231039 - DNA, 120 bp, Artificial Sequence
  ENSG00000119431_1 (sequence is synthesized)
tgcaaaatgagaggatctttggatgagtctccttaattcatttcctggacaaacttcctccaaggctcccccagatttaccagtgacgcccttccctaagtatcaacttagccgtacttt

SEQ ID NO: 231040 - DNA, 120 bp, Artificial Sequence
  ENSG00000119431_2 (sequence is synthesized)
gaactctggcccctcaggtttcaaggggacggccttgtctgggatcagctctgtctggggaaagaagctgcaccagcctctggatagcaggctgagtcacttgtttcttgtgccttgagt

SEQ ID NO: 231041 - DNA, 120 bp, Artificial Sequence
  ENSG00000119431_3 (sequence is synthesized)
cagttctctcatcagctctcctcctaggccagtgttattacctccagtaaagatggaaaagttggggttcagagagggctagagacagacagcctgctgtgtcctgtcttttctcctgtg

SEQ ID NO: 231042 - DNA, 120 bp, Artificial Sequence
  ENSG00000119431_4 (sequence is synthesized)
ctgtacaggttcaccaatttttaaaatccaaatatatctcatggtacagtggaagaactggccagagagtctggaagtttgggttctggtcctggctgtgccactgactcactgtgacct

SEQ ID NO: 231043 - DNA, 120 bp, Artificial Sequence
  ENSG00000119431_5 (sequence is synthesized)
tgggatcttgtgctgtgaagacatttcccaagtgcttcatgttagccagcaaatctgacccacaaggcctggaaagaggtgattgttaggttgcgcagaggtggtcttatccagctcagc

SEQ ID NO: 231044 - DNA, 120 bp, Artificial Sequence
  ENSG00000119431_6 (sequence is synthesized)
actggggtggacttggcctcctccatggcacaccggctgcagatacgactgctgacgtgggatgtgaaggacacgctgctcaggctccgccaccccttaggggaggcctatgccaccaag

SEQ ID NO: 231045 - DNA, 120 bp, Artificial Sequence
  ENSG00000119431_7 (sequence is synthesized)
gcccgggcccatgggctggaggtggagccctcagccctggaacaaggcttcaggcaggcatacagggctcagagccacagcttccccaactacggcctgagccacggcctaacctcccgc

SEQ ID NO: 231046 - DNA, 120 bp, Artificial Sequence
  ENSG00000119431_8 (sequence is synthesized)
cagtggtggctggatgtggtcctgcagaccttccacctggcgggtgtccaggatgctcaggctgtagcccccatcgctgaacagctttataaagacttcagccacccctgcacctggcag

SEQ ID NO: 231047 - DNA, 120 bp, Artificial Sequence
  ENSG00000119431_9 (sequence is synthesized)
gtgttggatggggctgaggacaccctgagggagtgccgcacacggggtctgagactggcagtgatctccaactttgaccgacggctagagggcatcctggggggccttggcctgcgtgaa

SEQ ID NO: 231048 - DNA, 120 bp, Artificial Sequence
  ENSG00000119431_10 (sequence is synthesized)
cacttcgactttgtgctgacctccgaggctgctggctggcccaagccggacccccgcattttccaggaggccttgcggcttgctcatatggaaccagtagtggcagcccatgttggggat

SEQ ID NO: 231049 - DNA, 120 bp, Artificial Sequence
  ENSG00000119431_11 (sequence is synthesized)
aattacctctgcgattaccaggggcctcgggctgtgggcatgcacagcttcctggtggttggcccacaggcactggaccccgtggtcagggattctgtacctaaagaacacatcctcccc

SEQ ID NO: 231050 - DNA, 120 bp, Artificial Sequence
  ENSG00000119431_12 (sequence is synthesized)
tctctggcccatctcctgcctgcccttgactgcctagagggctcaactccagggctttgaggccagtgagggaagtggctgggccctaggccatggagaaaaccttaaacaaaccctgga

SEQ ID NO: 231051 - DNA, 120 bp, Artificial Sequence
  ENSG00000119431_13 (sequence is synthesized)
gacagggagccccttctttctccacagctctggacctttccccctctccctgcggcctttgtcacctactgtgataataaagcagtgagtgctgagctctcacccttcccccactaacca

SEQ ID NO: 231052 - DNA, 120 bp, Artificial Sequence
  ENSG00000119431_14 (sequence is synthesized)
ccggcgcttgcgcacctccgcccgagctcgcgggccttgcggctgcgttttcaatctgcttccttgtgagtcaggtgggtcctgggcccaggaaccggcccggagccgtggacgccctac

SEQ ID NO: 231053 - DNA, 120 bp, Artificial Sequence
  ENSG00000119431_15 (sequence is synthesized)
agctgagaaggggacccaaggggtcggccgcggccaaggcccctaggaccgccgccccagctcacgctgccgacggcagctatagacattctgcgtcaggtccgggctcctggacttcgc

SEQ ID NO: 231054 - DNA, 120 bp, Artificial Sequence
  ENSG00000119446_0 (sequence is synthesized)
ttaacgcgtcacgggcggcctggcagctggcggcattgaggcggacgcgtctagaggtccgtctgaccgcggcgtcgggacctggtttccgggcatgagctgagagcaccacgccgaggc

SEQ ID NO: 231055 - DNA, 120 bp, Artificial Sequence
  ENSG00000119446_1 (sequence is synthesized)
cacgagtatttcatagacattgatggaagcagaaaccaaaactcttcccctggagaatgcatccatcctttcagagggctctctgcaggaaggacaccgattatggattggcaacctgga

SEQ ID NO: 231056 - DNA, 120 bp, Artificial Sequence
  ENSG00000119446_2 (sequence is synthesized)
ccccaaaattaccgaataccacctcctcaagctcctccagaagtttggcaaggtaaagcagtttgacttcctcttccacaagtcaggtgctttggagggacagcctcgaggctactgttt

SEQ ID NO: 231057 - DNA, 120 bp, Artificial Sequence
  ENSG00000119446_3 (sequence is synthesized)
tgttaactttgaaactaagcaggaagcagagcaagccatccagtgtctcaatggcaagttggccctgtccaagaagctggtggtgcgatgggcacatgctcaagtaaagagatatgatca

SEQ ID NO: 231058 - DNA, 120 bp, Artificial Sequence
  ENSG00000119446_4 (sequence is synthesized)
taacaagaatgataagattcttccaatcagtctcgagccatcctcaagcactgagcctactcagtctaacctaagtgtcactgcaaagataaaagccattgaagcaaaactgaaaatgat

SEQ ID NO: 231059 - DNA, 120 bp, Artificial Sequence
  ENSG00000119446_5 (sequence is synthesized)
ggcggaaaatcctgatgcagagtatccagcagcgcctgtttattcctactttaagccaccagataaaaaaaggactactccatattctagaacagcatggaaatctcgaagatgatggtt

SEQ ID NO: 231060 - DNA, 120 bp, Artificial Sequence
  ENSG00000119446_6 (sequence is synthesized)
gtgaattactgtagcagcaaaagcaaattggtctccacacctaaaatcgtctgcctgtgtactttgtagatgtgaatggtactattcaacggagcacaatcacatgttagcatttggtaa

SEQ ID NO: 231061 - DNA, 120 bp, Artificial Sequence
  ENSG00000119446_7 (sequence is synthesized)
cataatgtttttggatgttcttatggatgtttcttccctaaactatgtatggaattgagcatcatccagaataaatagcgttgtatcccaaattgtgatttgaaccctgggatgctctaa

SEQ ID NO: 231062 - DNA, 120 bp, Artificial Sequence
  ENSG00000119446_8 (sequence is synthesized)
ttggctggttggtttggatttgtaactccagaaacattctatagtgtgccagagcaaaaggcaaatacacaaaatattatttaaatcaggaaactaaaaatattaacatctattaaaaaa

SEQ ID NO: 231063 - DNA, 120 bp, Artificial Sequence
  ENSG00000119446_9 (sequence is synthesized)
ttgagcatttttctacgctcgtgtgtcttttacaacataaagaaaaagtaaaaggcagggagggaagtgagagacagattttaaatcatgttcagaactgttgttccagaatttactacg

SEQ ID NO: 231064 - DNA, 120 bp, Artificial Sequence
  ENSG00000119446_10 (sequence is synthesized)
gcaatccctccaactggactgaaaaagagaaagttcttggcaaaaaggagctgattctttgaacaaatgttgtagtaatctgtttaagaattatgcttattgtttcaaaatcccaactag

SEQ ID NO: 231065 - DNA, 120 bp, Artificial Sequence
  ENSG00000119446_11 (sequence is synthesized)
gaaaacatggtgtatatcttaaaattgtttgtgttgacaaaactagaatcaaatttaacattttataccacaacacaagttctatttggaaattgaacttttattctatagcaaccattt

SEQ ID NO: 231066 - DNA, 120 bp, Artificial Sequence
  ENSG00000119446_12 (sequence is synthesized)
ttttcaaatctaaataaccatgccttctataataacaaatgttgctattatcatgggacttttaaaattacatttattgcatgggattgtttttatagcatgagaatgttctgtttggaa

SEQ ID NO: 231067 - DNA, 120 bp, Artificial Sequence
  ENSG00000119446_13 (sequence is synthesized)
ttatatcatggtcagtctaaatagaaaaagcaaaatttctttgaaaacctaaacattgctatattggtcactatcaaacatacaattttctaataattgtgtagcggtctaagtggaaga

SEQ ID NO: 231068 - DNA, 120 bp, Artificial Sequence
  ENSG00000119446_14 (sequence is synthesized)
gattgcattatcttgtgcaggacgaggagaggacatgcagtgggcacagaaagtcaatggaacagatgccactgtggcaccaagactgtaatgactctgtgtggtaggtagttttaaagg

SEQ ID NO: 231069 - DNA, 120 bp, Artificial Sequence
  ENSG00000119446_15 (sequence is synthesized)
actgcatgccttggaaatgattcttcacttggagaacatacttgcctctagatatgtttgtcactctaagcatcctgaatataacaatagagaaagataagtcaaccaacagatttaggg

SEQ ID NO: 231070 - DNA, 120 bp, Artificial Sequence
  ENSG00000119446_16 (sequence is synthesized)
atgtgtttcttcagcacattttggtcattttgatgccaagtttgacatactgtttaattgggcagcacctttgctcctttaccaggtatgtatcactttgttactccaggtgccattctt

SEQ ID NO: 231071 - DNA, 120 bp, Artificial Sequence
  ENSG00000119446_17 (sequence is synthesized)
ggtgatgacagaatgtttatcactatcgttgttagcaagaggaagctttcaatataggaacttaacatcttcccatgagtataaatgaatttaagacatttgaatcaaaacttcagtaga

SEQ ID NO: 231072 - DNA, 120 bp, Artificial Sequence
  ENSG00000119446_18 (sequence is synthesized)
gggaggttttagaattcataaaactggtttaaggaaattctttttacttttcccaaggttaatctttttaaatatctctagacatcaaatactttctgtatgtattagctgtgtctgtct

SEQ ID NO: 231073 - DNA, 120 bp, Artificial Sequence
  ENSG00000119446_19 (sequence is synthesized)
atgatgcaagtaactctcctcctatttgggggatagttcagagaggtaggagcattatctcccatttttctggtgacttcttggagtatagaattcaccattttatccgtaagtcttcaa

SEQ ID NO: 231074 - DNA, 120 bp, Artificial Sequence
  ENSG00000119446_20 (sequence is synthesized)
aacttagaaaaaacttagaattatatatagagttgtttcctttagaaaccagagctatttatttgtatttaaagcactgtttattatttgtactgattcttatccctctgtgtgaataaa

SEQ ID NO: 231075 - DNA, 120 bp, Artificial Sequence
  ENSG00000119446_21 (sequence is synthesized)
tgtaagacggtgtccgtgtggttatatcttctctcgttcacttactggcatagactgcagttctctgacaggcttgtttccactcaggactctggccagcatgtccacgtggggtgcttc

SEQ ID NO: 231076 - DNA, 120 bp, Artificial Sequence
  ENSG00000119446_22 (sequence is synthesized)
ttctaagtgccttctctgcagagggttctggctagagagtcaaactgagaggcaactctctttaccctttatgcctgcctacctctgttgttagagatgagaatagagaccagctgtttc

SEQ ID NO: 231077 - DNA, 120 bp, Artificial Sequence
  ENSG00000119446_23 (sequence is synthesized)
cattgcaaatgtcactatttgaaaagaagttgttaatggaaatctctgcaagtatcgtactgtgtttagtctctcgtggtagagatttcaaaagaagaaatgtatgtatcctaaatatgc

SEQ ID NO: 231078 - DNA, 120 bp, Artificial Sequence
  ENSG00000119446_24 (sequence is synthesized)
tgaaagcagtctgatgaaaggtttttaaatttcaggtgttaacttggtcaactctttgttaggaggttgtctgtactttaagtaaaattattctttggtttactggttattttggtttgc

SEQ ID NO: 231079 - DNA, 120 bp, Artificial Sequence
  ENSG00000119446_25 (sequence is synthesized)
taaaattatgtcacttataattttgatttatatacaagagtgaagaattgaaggaaatactgaggagagacgtatgaactattttcttcatctcaattcctattttatcaaatgcaaaat

SEQ ID NO: 231080 - DNA, 120 bp, Artificial Sequence
  ENSG00000119446_26 (sequence is synthesized)
aaatgtaatcctaaccagttgattttctataattggtatcttagtactggggaggagtatcacatgaggaaagatttttcaaagcatgtcagctgaggcacaagaatcgcttgaacccag

SEQ ID NO: 231081 - DNA, 83 bp, Artificial Sequence
  ENSG00000119446_27 (sequence is synthesized)
caaaaacaaaacaggtcaaaaatcagttgcacaagttgtatgaaaccaggtattctgcagctctgtctcttgtttattaagat

SEQ ID NO: 231082 - DNA, 120 bp, Artificial Sequence
  ENSG00000119446_28 (sequence is synthesized)
aaccaggtattctgcagctctgtctcttgtttattaagatatgcacagtttctgaatcaacaaatatatctgtgattcttttatactactacataaaagaacaggagtaattcttgcctt

SEQ ID NO: 231083 - DNA, 120 bp, Artificial Sequence
  ENSG00000119446_29 (sequence is synthesized)
ataaattaaatgtcaaacatttcctatatgtaatcatttgttcctaaaatatgatttagtcccagcatgcttatccctgttttctctttttctctccagctcctatctagttcttcaaca

SEQ ID NO: 231084 - DNA, 120 bp, Artificial Sequence
  ENSG00000119446_30 (sequence is synthesized)
aatcctgtcaactctaccttccaaatgcctcttgaatccagccatctcaccacctccaacactaccaccatttttcttaaagccaccatcatctcttccctggactattacaataccttc

SEQ ID NO: 231085 - DNA, 120 bp, Artificial Sequence
  ENSG00000119446_31 (sequence is synthesized)
ctaattatctccctgcctctgctattgattctttagggtccgttttccacacagtagccaaagcaatttttaaaaaaattattttaaaatgtgattctcttctttgtggctttccatcac

SEQ ID NO: 231086 - DNA, 120 bp, Artificial Sequence
  ENSG00000119446_32 (sequence is synthesized)
agcctagaaaaaattgaaagatctgtaaggccctaatgacctgtccttcactacgtgtctgaccctatagcctactgttctccccttgtgcggtgtactgcagccacgttggccttcttg

SEQ ID NO: 231087 - DNA, 120 bp, Artificial Sequence
  ENSG00000119446_33 (sequence is synthesized)
ctattctttgaatacaagggagcttctacttcaaggcatttacattggctgttgccttagcttagaacgctctttctccagatagccgcagagcccgctctctcacctgactcatgtctc

SEQ ID NO: 231088 - DNA, 120 bp, Artificial Sequence
  ENSG00000119446_34 (sequence is synthesized)
tgctcaaatgttaatgatcaagaggcagtccccggcctccctcttaaaattacaacctgtcactctccaatcctttcctcacgattttctcaaaagcacttaccgctaaccaacattata

SEQ ID NO: 231089 - DNA, 120 bp, Artificial Sequence
  ENSG00000119446_35 (sequence is synthesized)
tctaaatttttttttgtctctttttattggaatgtaagtttcatgtaagcaggaactgtatatcactgctataccctcagcatttaaaacaatggctgtacatcatacatactcaataaa

SEQ ID NO: 231090 - DNA, 120 bp, Artificial Sequence
  ENSG00000119446_36 (sequence is synthesized)
tatttgttggataaactacaagaattctggtatttgagagccaaagggccttaagagaccatctcatatagccccctcattgtccagatggggaaaacgggaacccagagagacaaagcg

SEQ ID NO: 231091 - DNA, 120 bp, Artificial Sequence
  ENSG00000119446_37 (sequence is synthesized)
atttggccagggtcacctggttaatgggagagctttaggtagaacccaggcctgcaaacatctagtccagtgttcagcaaactggcctctgcctcctaattttgtatagcctacaagtta

SEQ ID NO: 231092 - DNA, 120 bp, Artificial Sequence
  ENSG00000119446_38 (sequence is synthesized)
agaatgatttttttttcattttcgagtggttgagaaaaaaagtaaacaaaatatatatactatattgtgacatgaaaatgatacgaaattcaaatctcagtgtatgttaataactattag

SEQ ID NO: 231093 - DNA, 120 bp, Artificial Sequence
  ENSG00000119446_39 (sequence is synthesized)
aacacaaccatgcccaggcatttacatgtggctgttttccccatataatagaagagttgaatagttggcaatgaagactgtggcctacaaaacctgaaatatatactatcggtcccttta

SEQ ID NO: 231094 - DNA, 120 bp, Artificial Sequence
  ENSG00000119446_40 (sequence is synthesized)
caggaaaaatttgccaaaccctactctaaacaatattccatgactggaaatgtgttttctaaaattctcgtattaatgcagagaataaaagcaacagatgtcagaatgatgtgcaccgaa

SEQ ID NO: 231095 - DNA, 120 bp, Artificial Sequence
  ENSG00000119446_41 (sequence is synthesized)
tggtgcgatgggcacatgctcaagtaaagagatatgatcataacaagaatgataagattcttccaatcagtctcgagccatcctcaagcactgagcctactcagtctaacctaagaggac

SEQ ID NO: 231096 - DNA, 120 bp, Artificial Sequence
  ENSG00000119446_42 (sequence is synthesized)
ctcagcttacatctctctattaacatctatgcctaatgagagaaggttgcttccctgtgacttatacaaaatcagtgaccagctgtggcattaatggaagaggggccagaatgcatctcg

SEQ ID NO: 231097 - DNA, 120 bp, Artificial Sequence
  ENSG00000119457_0 (sequence is synthesized)
acaggcgctgcgtgccctggctctgctcgccactggccggcgcgctcccggcgcacggagcacactcgcgctcccggcgcacggagcacactcgcgctccgggactgaaacctgagcagc

SEQ ID NO: 231098 - DNA, 120 bp, Artificial Sequence
  ENSG00000119457_1 (sequence is synthesized)
cgtagcagccgaatttgggagcatatccttgtcactgcagccagaaagcccttcgatccccatcagagaggtcacatgagccccgaggtcacctgcccgcggaggggccacctgcctcgc

SEQ ID NO: 231099 - DNA, 120 bp, Artificial Sequence
  ENSG00000119457_2 (sequence is synthesized)
ttccacccgaggacctgggttgagcccgtggtggcctcgtcccaggtggctgcctccctctacgatgcggggctactcctcgtggtgaaggcgtcctacggaaccggaggctcctccaac

SEQ ID NO: 231100 - DNA, 120 bp, Artificial Sequence
  ENSG00000119457_3 (sequence is synthesized)
cacagtgccagcccatcgccccggggggctctagaggaccaacagcagagagccatctccaatttctacattatctacaaccttgtggtgggcctgtcccccctgctgtccgcctacggg

SEQ ID NO: 231101 - DNA, 120 bp, Artificial Sequence
  ENSG00000119457_4 (sequence is synthesized)
ctgggatggctcagcgaccgctaccaccgaaagatctccatctgcatgtcgctgctgggcttcctgctctcccgcctcgggctgctgctcaaggtgctgctggactggccagtggaggtg

SEQ ID NO: 231102 - DNA, 120 bp, Artificial Sequence
  ENSG00000119457_5 (sequence is synthesized)
ctgtacggggcggcggcgctgaacgggctattcggcggcttctccgccttctggtccggggtcatggcgctgggatcgctgggctcctccgagggccgccgctctgtgcgcctcatcctc

SEQ ID NO: 231103 - DNA, 120 bp, Artificial Sequence
  ENSG00000119457_6 (sequence is synthesized)
attgacctgatgctgggcttggcggggttctgcgggagcatggcttccgggcatctcttcaagcagatggctgggcactctgggcagggcctgatactgacggcctgcagcgtgagctgt

SEQ ID NO: 231104 - DNA, 120 bp, Artificial Sequence
  ENSG00000119457_7 (sequence is synthesized)
gcctcgtttgccctgctctacagccttttggtgctaaaggtccctgagtcggtggccaaacccagccaggagctccccgccgtggataccgtgtctggcacggttggcacataccgcact

SEQ ID NO: 231105 - DNA, 120 bp, Artificial Sequence
  ENSG00000119457_8 (sequence is synthesized)
ctggatcctgatcagttggaccaacagtatgcagtggggcaccctccatctcctggaaaagcaaaaccccataaaaccaccattgccttgctctttgtgggtgctatcatatatgacctg

SEQ ID NO: 231106 - DNA, 120 bp, Artificial Sequence
  ENSG00000119457_9 (sequence is synthesized)
gcggtggtgggcacagtggacgtgatccctctttttgtgctgagggagcctctcggttggaaccaagtgcaggtgggctatggtatggctgcagggtacaccatcttcatcaccagcttc

SEQ ID NO: 231107 - DNA, 120 bp, Artificial Sequence
  ENSG00000119457_10 (sequence is synthesized)
ctttgggtcaggagccctcctcttggcttttgtgaaagagacatacatgttctatattgctcgagccgtcatgctgtttgctctcatccccgtcacaaccatccgatcagctatgtccaa

SEQ ID NO: 231108 - DNA, 120 bp, Artificial Sequence
  ENSG00000119457_11 (sequence is synthesized)
actcataaagggctcctcttatggaaaggtgttcgtcatactgcagctgtccttggctctgaccggcgtggtgacatccaccttgtacaacaagatctaccagctcaccatggacatgtt

SEQ ID NO: 231109 - DNA, 120 bp, Artificial Sequence
  ENSG00000119457_12 (sequence is synthesized)
tgtgggctcctgctttgctctctcctcctttctctccttcctggccatcattccaattagcatcgtggcctataaacaagtcccattgtcaccatatggagacatcatagagaaatgaag

SEQ ID NO: 231110 - DNA, 120 bp, Artificial Sequence
  ENSG00000119457_13 (sequence is synthesized)
atgcttacctgcaggaactgaaaacatcagccatggccaggcccccagaagacaaaagaagggaccagggaactggtgacctaagcaacccactgcttaagaaacctgcgttccagccag

SEQ ID NO: 231111 - DNA, 120 bp, Artificial Sequence
  ENSG00000119457_14 (sequence is synthesized)
agttggcctcagaatgacctgctctggctcagggatccctggtggatggggaaaagcactttcctggtgatggaaaaacgttctcagctttaagacacccccattaggcagacactgggt

SEQ ID NO: 231112 - DNA, 120 bp, Artificial Sequence
  ENSG00000119457_15 (sequence is synthesized)
tctgtgacagcagagcatgaccttaagggttacaggcaggctgcacacagcagtcccaggccctgtgaggggcttcagactccagctacagcgagcctgccccttttcttcaagggactg

SEQ ID NO: 231113 - DNA, 120 bp, Artificial Sequence
  ENSG00000119457_16 (sequence is synthesized)
tcttgagggctccaaagtatagctaactagtcacctgggtgctgtgctgaaagtcccatgggagaactcaaagcgtgcattatcacagcctgaggggaatgtggaagggatgttttgtaa

SEQ ID NO: 231114 - DNA, 120 bp, Artificial Sequence
  ENSG00000119457_17 (sequence is synthesized)
gaactaccaacagttttgcacgaacaatgtcttttaaattaaaataaaaccttgaaaaaagtcagctttctttcctgagtcttccttacctacaaacactcaggagggggatggagctca

SEQ ID NO: 231115 - DNA, 120 bp, Artificial Sequence
  ENSG00000119457_18 (sequence is synthesized)
ggcccttgtcttctgggtagttttgttactactgttgcttttaagaagcaaatgtcacaaggctttcttcaatgggatgttcaattgagtacttccagtcaacagtgcttcccaaagtgg

SEQ ID NO: 231116 - DNA, 120 bp, Artificial Sequence
  ENSG00000119457_19 (sequence is synthesized)
gtggtgtgaaggaagaggaggtacattaagagctattttatttgaggtagtcatttttataaccttgtttacttggatttataaaagcagactcacctaataaaatcaacattcattgta

SEQ ID NO: 231117 - DNA, 120 bp, Artificial Sequence
  ENSG00000119471_0 (sequence is synthesized)
agctctctgctcgccgccgccgctgtcgccgccacctcctctgatctacgaaagtcatgttacccaacaccgggaggctggcaggatgtacagtttttatcacaggtgcaagccgtggca

SEQ ID NO: 231118 - DNA, 120 bp, Artificial Sequence
  ENSG00000119471_1 (sequence is synthesized)
ttggcaaagctattgcattgaaagcagcaaaggatggagcaaatattgttattgctgcaaagaccgcccagccacatccaaaacttctaggcacaatctatactgctgctgaagaaattg

SEQ ID NO: 231119 - DNA, 120 bp, Artificial Sequence
  ENSG00000119471_2 (sequence is synthesized)
aagcagttggaggaaaggccttgccatgtattgttgatgtgagagatgaacagcagatcagtgctgcagtggagaaagccatcaagaaatttggaggaattgatattctggtaaataatg

SEQ ID NO: 231120 - DNA, 120 bp, Artificial Sequence
  ENSG00000119471_3 (sequence is synthesized)
ccagtgccattagtttgaccaatacattggacacacctaccaagagattggatctgatgatgaacgtgaacaccagaggcacctaccttgcatctaaagcatgtattccttatttgaaaa

SEQ ID NO: 231121 - DNA, 120 bp, Artificial Sequence
  ENSG00000119471_4 (sequence is synthesized)
agagcaaagttgctcatatcctcaatatcagtccaccactgaacctaaatccagtttggttcaaacagcactgtgcttataccattgctaagtatggtatgtctatgtatgtgcttggaa

SEQ ID NO: 231122 - DNA, 120 bp, Artificial Sequence
  ENSG00000119471_5 (sequence is synthesized)
tggcagaagaatttaaaggtgaaattgcagtcaatgcattatggcctaaaacagccatacacactgctgctatggatatgctgggaggacctggtatcgaaagccagtgtagaaaagttg

SEQ ID NO: 231123 - DNA, 120 bp, Artificial Sequence
  ENSG00000119471_6 (sequence is synthesized)
atatcattgcagatgcagcatattccattttccaaaagccaaaaagttttactggcaactttgtcattgatgaaaatatcttaaaagaagaaggaatagaaaattttgacgtttatgcaa

SEQ ID NO: 231124 - DNA, 120 bp, Artificial Sequence
  ENSG00000119471_7 (sequence is synthesized)
ttaaaccaggtcatcctttgcaaccagatttcttcttagatgaatacccagaagcagttagcaagaaagtggaatcaactggtgctgttccagaattcaaagaagagaaactgcagctgc

SEQ ID NO: 231125 - DNA, 120 bp, Artificial Sequence
  ENSG00000119471_8 (sequence is synthesized)
aaccaaaaccacgttctggagctgtggaagaaacatttagaattgttaaggactctctcagtgatgatgttgttaaagccactcaagcaatctatctgtttgaactctccggtgaagatg

SEQ ID NO: 231126 - DNA, 120 bp, Artificial Sequence
  ENSG00000119471_9 (sequence is synthesized)
gtggcacgtggtttcttgatctgaaaagcaagggtgggaatgtcggatatggagagccttctgatcaggcagatgtggtgatgagtatgactactgatgactttgtaaaaatgttttcag

SEQ ID NO: 231127 - DNA, 120 bp, Artificial Sequence
  ENSG00000119471_10 (sequence is synthesized)
ggaaactaaaaccaacaatggcattcatgtcagggaaattgaagattaaaggtaacatggccctagcaatcaaattggagaagctaatgaatcagatgaatgccagactgtgaaggaaaa

SEQ ID NO: 231128 - DNA, 120 bp, Artificial Sequence
  ENSG00000119471_11 (sequence is synthesized)
tataaaaaaaaagtcgactgctatgctcaaaaagtaaaaaaagctcaacagttaaaatctaatgtttgttttctttcctgttatattataaggatatgcacgtttgttctggaaaagata

SEQ ID NO: 231129 - DNA, 120 bp, Artificial Sequence
  ENSG00000119471_12 (sequence is synthesized)
gaatttgtctctaaaagacttgaaattgtaattaaaatggcaagctaatcaaacataagcttcattaagtgggattctaagacagtctgtgtttttatatttcaagggtttaaccctttg

SEQ ID NO: 231130 - DNA, 120 bp, Artificial Sequence
  ENSG00000119471_13 (sequence is synthesized)
tcagatcaagcagtaaaattagctctttcaaatcttcttgtcatgtaaaatgaagctagtctgttttaaaatttttagttttggattgtatactaatgaaaatcttaatgatgtttttga

SEQ ID NO: 231131 - DNA, 120 bp, Artificial Sequence
  ENSG00000119471_14 (sequence is synthesized)
tacttattttaaagaaaatcttatatagtacattttacaaaaattataaaaaatgaattagtactggcgaggactaaatgaaacaataatttttcattttgataactagctttccaggtg

SEQ ID NO: 231132 - DNA, 120 bp, Artificial Sequence
  ENSG00000119471_15 (sequence is synthesized)
tccaggtggacttagccataggaaaatattactaatgtaatttaacaaattgctgcatgtattccatttaaaaatatgtttaaattgtcctaaaacaaaataattttctccctaggagta

SEQ ID NO: 231133 - DNA, 120 bp, Artificial Sequence
  ENSG00000119471_16 (sequence is synthesized)
tgcatttggctacagtgttttgaaacagaaaccttagaataggtcattggtatgggctgaactgtgtatcccccaattcatttgttgaggtcctaactcccatttcttttgaatgtgact

SEQ ID NO: 231134 - DNA, 120 bp, Artificial Sequence
  ENSG00000119471_17 (sequence is synthesized)
gttcggagatgaggcctttaaagaggtgacttaagttcaaaggaggctgttagtctaatccaacatggtgtcctttggacataagagataccagcaatgtgtgcacagaacaaagaccag

SEQ ID NO: 231135 - DNA, 120 bp, Artificial Sequence
  ENSG00000119471_18 (sequence is synthesized)
gagaggacacagtgagaaggcagttatctgcaagcaaagagagaggcttcagaagaaacaaaatcaccagcaccttgatctttgacttctaatctccagaatagtgagaaataaatttct

SEQ ID NO: 231136 - DNA, 87 bp, Artificial Sequence
  ENSG00000119471_19 (sequence is synthesized)
acaacatagtaagaccctatctctacccccctaataaattaatttaaaaagccccccaatctgtggtattttattatggcagcccta

SEQ ID NO: 231137 - DNA, 120 bp, Artificial Sequence
  ENSG00000119471_20 (sequence is synthesized)
aaagccccccaatctgtggtattttattatggcagccctagcaagctaatacagtggtttgagaggctgggagggttgaggggaagataaacttttaaaaagctcttatctttcatttca

SEQ ID NO: 231138 - DNA, 120 bp, Artificial Sequence
  ENSG00000119471_21 (sequence is synthesized)
atcagttaaaaatacttgctcagtgtaacaattttgcttctcagcttccactctaatattgttgtgccattaagcaatttagctaatcctgacatttcttagattcataatgttaggagc

SEQ ID NO: 231139 - DNA, 120 bp, Artificial Sequence
  ENSG00000119471_22 (sequence is synthesized)
atttaatctgtattttacaagttaggaagcagaggatcagagatgggaaaggactagcccaaggccaacattaacaagccctctaacaaaaactttacaatacatttatgttgaatggaa

SEQ ID NO: 231140 - DNA, 120 bp, Artificial Sequence
  ENSG00000119471_23 (sequence is synthesized)
ctccaagatctcacctctccatccaggaatggagtccatgtaatcaaagtgaacttaaaaataggacagtttcaacaagtcaggagattcacagcaactgatcaaagggagtccagtcaa

SEQ ID NO: 231141 - DNA, 120 bp, Artificial Sequence
  ENSG00000119471_24 (sequence is synthesized)
cgtgagcaagcgtgattatgatgaggaagccccctctgctttaatccacacaaggaacgtaacctgaagtaacctgatgttaaccaatctgctgtgtctactatgctgtttccttgttcc

SEQ ID NO: 231142 - DNA, 120 bp, Artificial Sequence
  ENSG00000119471_25 (sequence is synthesized)
tgctagtgctgctttacaaatgcagaccattctatcatacctggcggggcttctgttttattttgtaggctggatgctacccagttcatgaatcgctaataaaagccaattagatcttta

SEQ ID NO: 231143 - DNA, 120 bp, Artificial Sequence
  ENSG00000119471_26 (sequence is synthesized)
aaacccataccaacacaacttaaaaaaaaagatgaatgaaaaatagaggtcatcctttgcaaccagatttcttcttagatgaatacccagaagcagttagcaagaaagtggaatcaactg

SEQ ID NO: 231144 - DNA, 120 bp, Artificial Sequence
  ENSG00000119487_0 (sequence is synthesized)
gtgcggctcggggtaatagggctgctgctcggccggccggcggcggcgagcagcaggggcatgagggctaacccgggaagcggcagctgagcgggccgggaggagcgccggtccccgtgg

SEQ ID NO: 231145 - DNA, 120 bp, Artificial Sequence
  ENSG00000119487_1 (sequence is synthesized)
atcccgagagtgcagagctcggggcaggggccgggaggcgtgggggagccgggccctcccctcaggaacgtgtcccggggccgacccggcccgtagtgtggaagcagcttcaggtaggtg

SEQ ID NO: 231146 - DNA, 120 bp, Artificial Sequence
  ENSG00000119487_2 (sequence is synthesized)
agctcgtgaaacaatatgaagaggagaaaatagccttttaaggaaattggcccacagaaaggatggccttcttggacaatccaactatcattctagctcatattcgacagtcacatgtga

SEQ ID NO: 231147 - DNA, 120 bp, Artificial Sequence
  ENSG00000119487_3 (sequence is synthesized)
ccagtgatgacacgggaatgtgtgagatggttctcattgatcatgatgttgacctagagaagattcatcctccttcaatgcctggagacagtgggtcagaaattcagggaagcaatggtg

SEQ ID NO: 231148 - DNA, 120 bp, Artificial Sequence
  ENSG00000119487_4 (sequence is synthesized)
agactcagggctatgtatatgcccagtcagtcgatattacctcaagttgggactttggtattagaagacgctcaaacacagctcaaagattagaacgactccgaaaagagagacaaaacc

SEQ ID NO: 231149 - DNA, 120 bp, Artificial Sequence
  ENSG00000119487_5 (sequence is synthesized)
agatcaaatgcaaaaatattcagtggaaagaaagaaattctaagcaatcagcccaggagttaaagtcactgtttgaaaaaaaatctctcaaagagaagcctccaatttctgggaagcagt

SEQ ID NO: 231150 - DNA, 120 bp, Artificial Sequence
  ENSG00000119487_6 (sequence is synthesized)
cgatattatctgtacgcctagaacagtgccctctgcagctgaataacccttttaacgagtattccaaatttgatggcaagggtcatgtaggtacaacagcaaccaagaagatcgatgtct

SEQ ID NO: 231151 - DNA, 120 bp, Artificial Sequence
  ENSG00000119487_7 (sequence is synthesized)
acctccctctgcactcgagccaggacagactgctgccaatgaccgtggtgacaatggccagcgccagggtgcaggacctgatcgggctcatctgctggcagtatacaagcgaaggacggg

SEQ ID NO: 231152 - DNA, 120 bp, Artificial Sequence
  ENSG00000119487_8 (sequence is synthesized)
agccgaagctcaatgacaatgtcagtgcctactgcctgcatattgctgaggatgatggggaggtggacaccgatttccccccgctggattccaatgagcccattcataagtttggcttca

SEQ ID NO: 231153 - DNA, 120 bp, Artificial Sequence
  ENSG00000119487_9 (sequence is synthesized)
gtactttggccctggttgaaaagtactcatctcctggtctgacatccaaagagtcactctttgttcgaataaatgctgctcatggattctcccttattcaggtggacaacacaaaggtta

SEQ ID NO: 231154 - DNA, 120 bp, Artificial Sequence
  ENSG00000119487_10 (sequence is synthesized)
ccatgaaggaaatcttactgaaggcagtgaagcgaagaaaaggatcccagaaagtttcaggttcaagggcagacggggtttttgaggaggattcgcaaattgacatagccacagtacagg

SEQ ID NO: 231155 - DNA, 120 bp, Artificial Sequence
  ENSG00000119487_11 (sequence is synthesized)
atatgcttagcagccaccattacaagtcattcaaagtcagcatgatccacagactgcgattcacaaccgacgtacagctaggtatctctggagacaaagtagagatagaccctgttacga

SEQ ID NO: 231156 - DNA, 120 bp, Artificial Sequence
  ENSG00000119487_12 (sequence is synthesized)
atcagaaagccagcactaagttttggattaagcagaaacccatctcaatcgattccgacctgctctgtgcctgtgaccttgctgaagagaaaagccccagtcacgcaatatttaaactca

SEQ ID NO: 231157 - DNA, 120 bp, Artificial Sequence
  ENSG00000119487_13 (sequence is synthesized)
cgactataaacacctctactttgaatcggacgctgctaccgtcaatgaaattgtgctcaaggttaactacatcctggaatcgcgagctagcactgcccgggctgactactttgctcaaaa

SEQ ID NO: 231158 - DNA, 120 bp, Artificial Sequence
  ENSG00000119487_14 (sequence is synthesized)
acaaagaaaactgaacagacgtacgagcttcagcttccagaaggagaagaaatccgggcagcagtgacactggcctccagcctcaatctgttccgtagctcagagcctgcctgccagggc

SEQ ID NO: 231159 - DNA, 120 bp, Artificial Sequence
  ENSG00000119487_15 (sequence is synthesized)
caagtgccctagagtccacccggtgtcctgaagtcctcggggggaggccagcccctggctcactggcacagggcaggtgggctctcggggaaggtgtcgggggccccctaggagggagcg

SEQ ID NO: 231160 - DNA, 120 bp, Artificial Sequence
  ENSG00000119487_16 (sequence is synthesized)
ctggggacattgccatgggacggaagtctgcttggcagtggctttgataagcgatgcttgggggtcagaccaccccctagaggagccacgtgccgcccagccaccttcaatgcctgccac

SEQ ID NO: 231161 - DNA, 120 bp, Artificial Sequence
  ENSG00000119487_17 (sequence is synthesized)
cctgcccgaggatgtacagagccgtgcccacacatttccttgcaacttgatcaaatttcttaaagcaaacaacaaaaatgtacatttctgtttttccttttaataaacaggtgtactctt

SEQ ID NO: 231162 - DNA, 120 bp, Artificial Sequence
  ENSG00000119487_18 (sequence is synthesized)
tatcatggttggtatgatggaccattctttggggcggaggattgattatgttactctctttaaaatctgttcccatattgaacaggcagattggaaaagctatggttcgatttctcagaa

SEQ ID NO: 231163 - DNA, 120 bp, Artificial Sequence
  ENSG00000119487_19 (sequence is synthesized)
gaaatgtttaggtcttagtcaatagttttaactatgccatttgtttaaatgagtgcatttgcttcgagggtagtgtcttactaaaagttaggaacagagacctagtggtgtgtccaaggc

SEQ ID NO: 231164 - DNA, 120 bp, Artificial Sequence
  ENSG00000119487_20 (sequence is synthesized)
cgtgtcactttccccttcagcacaccccagcttctgacctcagagcccaggagctgcgtggacagtgtggggtgccaggaggaggggcggtggctggtcctcaggcacgctgcactccca

SEQ ID NO: 231165 - DNA, 120 bp, Artificial Sequence
  ENSG00000119487_21 (sequence is synthesized)
gccagacatggtctttccgtttcttaagtagcaagtgtaggtttcagctggcagttccacctgcatgttctctgcttcgctgccttggaaggggccacattccccattcctcttctcctt

SEQ ID NO: 231166 - DNA, 120 bp, Artificial Sequence
  ENSG00000119487_22 (sequence is synthesized)
acagcgcctgcctcctttttcaagcaggcggaaagctgctgtttctcacgtttcagggagaggggtgagcggagggagacctgtgtccgtgccgtccggctccctgggtgggaacaggca

SEQ ID NO: 231167 - DNA, 120 bp, Artificial Sequence
  ENSG00000119487_23 (sequence is synthesized)
agggatcagatgcccctgacaccacgcctctggccacaccagatgcctctgcagtcctcgacagcctcttcagtgtccctcctgcggtgatgtccttactgtccccagccagggccgggg

SEQ ID NO: 231168 - DNA, 120 bp, Artificial Sequence
  ENSG00000119487_24 (sequence is synthesized)
accggtgtttcactgaggacctgcattagaaacattttttaaattgttgtacaggaagagatgtgtctaaaacagcatcttaaagctgagtgtatttctttgcacaaggggtcatgctga

SEQ ID NO: 231169 - DNA, 120 bp, Artificial Sequence
  ENSG00000119487_25 (sequence is synthesized)
tgaattcttctttcattctgatctttgttcagccaacaggagcgtccttttctaatgtcttccattcctaccccccacccaaaaacaaaagaaatatttgtagcttgctatctgtatttg

SEQ ID NO: 231170 - DNA, 120 bp, Artificial Sequence
  ENSG00000119487_26 (sequence is synthesized)
tttgtagcttgctatctgtatttgaatttttagcaattttatatttagatactttgaaaaatgtaaatgactaatttggtcattaaatcttgtgacatattcgatattaaaatgatatta

SEQ ID NO: 231171 - DNA, 120 bp, Artificial Sequence
  ENSG00000119487_27 (sequence is synthesized)
aacgatgcttccttggcgtgtccacaggcagaaaggagtaagctgacaaacatagcatgatatttcttaattcaagattattttgaactgaatcccatctgtattcttattgcttctcct

SEQ ID NO: 231172 - DNA, 120 bp, Artificial Sequence
  ENSG00000119487_28 (sequence is synthesized)
tgcagagagcaagagggggctgtctgctgtggctgtccaccgtgcctcggcccagtgattaactttgcagctgtgtcattgttcaagtccaaacacaagtgctccacagaacgttctctg

SEQ ID NO: 231173 - DNA, 120 bp, Artificial Sequence
  ENSG00000119487_29 (sequence is synthesized)
gaagcagagcgagcccaatgtcgccgttgacctggacagcactttggagagccagagcgcatgggagttctgcctggtccgcgagaacagttcaagggcagacggggtttttgaggagga

SEQ ID NO: 231174 - DNA, 120 bp, Artificial Sequence
  ENSG00000119487_30 (sequence is synthesized)
ggatcaggaagttatctaacttcctgaggtttttttggacctcactttcctgaggggttttggagaaaaggaaatcttgatcaccttaaacgccttttctctgatttcagagatatcagc

SEQ ID NO: 231175 - DNA, 120 bp, Artificial Sequence
  ENSG00000119487_31 (sequence is synthesized)
ttctgagctgcaatcctcatgaccttttttcccttgctaatgcccaatacactattaatattgattctttcatcaaaataaacaccaaagcccaagtaatgagagttctggacatttaaa

SEQ ID NO: 231176 - DNA, 120 bp, Artificial Sequence
  ENSG00000119487_32 (sequence is synthesized)
aatcatgtgctcttttatttttcatgtaaaaaaaaaacaataagcattcatctatctggtcatcatacttaagtgtgttttacattttccgaggatgagtgaatttttatgagtatgtaa

SEQ ID NO: 231177 - DNA, 120 bp, Artificial Sequence
  ENSG00000119487_33 (sequence is synthesized)
gaacagtgccctctgcagctgaataacccttttaacgagtattccaaatttgatggcaagcattgttccagtctatgtcggataattatgaacaaatgttttctacaatcattggcatta

SEQ ID NO: 231178 - DNA, 120 bp, Artificial Sequence
  ENSG00000119487_34 (sequence is synthesized)
gtggcacgatcacggctcactgcagcctcaacttcctggactcaagcgatcctcccacctcttcctccccagcagctgggactacaggcatgcactaccacggcctcccaaattgttggg

SEQ ID NO: 231179 - DNA, 120 bp, Artificial Sequence
  ENSG00000119487_35 (sequence is synthesized)
gaatttggcaattttgaggaaccaaaagaaagttgtgtgactggagccctagggtgaagtagatcgtggtgaaaagtgaagctctgggggaagaccggggtcatgtaggtacaacagcaa

SEQ ID NO: 231180 - DNA, 120 bp, Artificial Sequence
  ENSG00000119487_36 (sequence is synthesized)
tggccgcctcgctccatgcccgctttgtccgttgcaaacttgcttagaagtcatgtgtttggaaacgctcactggtctggtttccctaggcagatttgaagtgactgttttccaaggcag

SEQ ID NO: 231181 - DNA, 120 bp, Artificial Sequence
  ENSG00000119487_37 (sequence is synthesized)
actgcagtcttcgtgccaaagtatatcccaaagtgaaatgattgattttgtgctttttggtagagaggctgcatcctgtttagcactctgtgattaatattttcctgttaaactgtcttc

SEQ ID NO: 231182 - DNA, 120 bp, Artificial Sequence
  ENSG00000119487_38 (sequence is synthesized)
ctaagttgggagcatccctggaaacagcttagaagcatgaggccttttctgaagtaaaggctattttgtatataaagcagctggccctgtcagtatcactattcagacatcaggttttag

SEQ ID NO: 231183 - DNA, 62 bp, Artificial Sequence
  ENSG00000119487_39 (sequence is synthesized)
tgggccggatcacctgaggtcaggagttcaagcagccacgtcacctgagggtcatgtaggta

SEQ ID NO: 231184 - DNA, 120 bp, Artificial Sequence
  ENSG00000119487_40 (sequence is synthesized)
acctaacctcagaatttgttccaacacagtcctataagcaacccctacccatcaattgaagtaggtgtgcactcttcccgggggtgctcaggaagagggctgctcccgtggactgcctca

SEQ ID NO: 231185 - DNA, 120 bp, Artificial Sequence
  ENSG00000119487_41 (sequence is synthesized)
ttgttcgaatgtgagtactgactctattacttctctcggtatctcatcccaaccttctagcattttggatctgattttggttttgttcatcaaataaatgatatttggcatctggagagt

SEQ ID NO: 231186 - DNA, 120 bp, Artificial Sequence
  ENSG00000119487_42 (sequence is synthesized)
cattgtatttcatgcctctgcacctaggctacgcagactgctttgcagtggcacattgtgtgaagcagatctctgaacggcatgtccagagccaggcctctggaaacactggtgcactgg

SEQ ID NO: 231187 - DNA, 120 bp, Artificial Sequence
  ENSG00000119487_43 (sequence is synthesized)
gagcctgtgaagcaaaacttctaggtttgcaccttctctgcgaggaatacacactaactgaaaatgtgcactgtggccacttctctcttgtgacttaaaataattttctctcagaccaaa

SEQ ID NO: 231188 - DNA, 120 bp, Artificial Sequence
  ENSG00000119487_44 (sequence is synthesized)
tttgaccttccctgtcagttgcctgccttgagactgagcacatgtcttcagctttttttttgtgcctttctcagaaaagcgtgtgtaaatgcataaaataaaatccactggaatataaaa

SEQ ID NO: 231189 - DNA, 120 bp, Artificial Sequence
  ENSG00000119487_45 (sequence is synthesized)
gttaatactggaggtgctcagtgaatggtgtctataactggcgtcatgcctgttgggcctaaggagaaaattgtactgaatgatcgctggtgcccgagcctgccgaagcagaaacggcag

SEQ ID NO: 231190 - DNA, 120 bp, Artificial Sequence
  ENSG00000119487_46 (sequence is synthesized)
tgagcctaccagggttgcacctttgctcttggcctaggcctttgccttaaggagtctgagctacagggaccgtgtgtgcagcagccctcttctcctggtgctctgctcacagggagacag

SEQ ID NO: 231191 - DNA, 120 bp, Artificial Sequence
  ENSG00000119487_47 (sequence is synthesized)
tgctgcttctgcccacaacccactcactccccttagcatagagaagtggcagtgacaagtggggtactactcaacctccgcacttgcaaccccactagcctggcttccacaacctcttcc

SEQ ID NO: 231192 - DNA, 120 bp, Artificial Sequence
  ENSG00000119487_48 (sequence is synthesized)
cccacccctcatcactgcggcgatgccccaggaacctctctgactcccttctccctcacaccctgtgtgcagccatctgcctactcctaactcttttgtctttaatatgctcatccccac

SEQ ID NO: 231193 - DNA, 120 bp, Artificial Sequence
  ENSG00000119487_49 (sequence is synthesized)
tgcaccccagccgcgactgtccctgcccctggcctgggctgtggcacctgcttcctcactgatctctcctccaccaagccaactcctccttgtaaccaagaagactaccgagggctccga

SEQ ID NO: 231194 - DNA, 120 bp, Artificial Sequence
  ENSG00000119487_50 (sequence is synthesized)
agccaaggacagagaggcctctgtttgcctccaggctggattctgggcctcctttctcttttctgcagtaggtgtgcactcttcccgggggtgctcaggaagagggctgctcccgtggac

SEQ ID NO: 231195 - DNA, 120 bp, Artificial Sequence
  ENSG00000119487_51 (sequence is synthesized)
ggtttgaactgctgtgggttttgagtactggactggatgtcagaaacctttgccatcacgggaaattctgtcactctggatttactgtctgttccccacagctaaattcctctgcagtgt

SEQ ID NO: 231196 - DNA, 120 bp, Artificial Sequence
  ENSG00000119487_52 (sequence is synthesized)
gatttagcaccctggatccccatcaaccagttttggcatttatttgaatgcattaccccactggtttccataaactattttacaattgtttaaaataaatgactgtttatttccacaaaa

SEQ ID NO: 231197 - DNA, 120 bp, Artificial Sequence
  ENSG00000119508_0 (sequence is synthesized)
caggccctcatcaccttttttcaagtcaagatttcatcccatacatgcatgactcaatcagatttggaaatgtggatatgccctgcgtccaagcccaatatagcccttcccctccaggtt

SEQ ID NO: 231198 - DNA, 120 bp, Artificial Sequence
  ENSG00000119508_1 (sequence is synthesized)
ccagttatgcggcgcagacatacagctcggaatacaccacggagatcatgaaccccgactacaccaagctgaccatggaccttggcagcactgagatcacggctacagccaccacgtccc

SEQ ID NO: 231199 - DNA, 120 bp, Artificial Sequence
  ENSG00000119508_2 (sequence is synthesized)
tgcccagcatcagtaccttcgtggagggctactcgagcaactacgaactcaagccttcctgcgtgtaccaaatgcagcggcccttgatcaaagtggaggaggggcgggcgcccagctacc

SEQ ID NO: 231200 - DNA, 120 bp, Artificial Sequence
  ENSG00000119508_3 (sequence is synthesized)
caccaccaccaccaccaccaccaccaccatcaccagcagcagcatcagcagccatccattcctccagcctccagcccggaggacgaggtgctgcccagcacctccatgtacttcaagcag

SEQ ID NO: 231201 - DNA, 120 bp, Artificial Sequence
  ENSG00000119508_4 (sequence is synthesized)
tcaagcagtccccaccgtccacccccaccacgccggccttccccccgcaggcgggggcgttatgggacgaggcactgccctcggcgcccggctgcatcgcacccggcccgctgctggacc

SEQ ID NO: 231202 - DNA, 120 bp, Artificial Sequence
  ENSG00000119508_5 (sequence is synthesized)
cgccgatgaaggcggtccccacggtggccggcgcgcgcttcccgctcttccacttcaagccctcgccgccgcatccccccgcgcccagcccggccggcggccaccacctcggctacgacc

SEQ ID NO: 231203 - DNA, 80 bp, Artificial Sequence
  ENSG00000119508_6 (sequence is synthesized)
cgacggccgctgccgcgctcagcctgccgctgggagccgcagccgccgcgggcagccaggccgccgcgcttgagagccac

SEQ ID NO: 231204 - DNA, 120 bp, Artificial Sequence
  ENSG00000119508_7 (sequence is synthesized)
ccttcccgcctctcggcctcacgccctcccctaccgcgtccagcctgctgggcgagagtcccagcctgccgtcgccgcccagcaggagctcgtcgtctggcgagggcacgtgtgccgtgt

SEQ ID NO: 231205 - DNA, 120 bp, Artificial Sequence
  ENSG00000119508_8 (sequence is synthesized)
gcggggacaacgccgcctgccagcactacggcgtgcgaacctgcgagggctgcaagggctttttcaagagaacagtgcagaaaaatgcaaaatatgtttgcctggcaaataaaaactgcc

SEQ ID NO: 231206 - DNA, 120 bp, Artificial Sequence
  ENSG00000119508_9 (sequence is synthesized)
cagtagacaagagacgtcgaaaccgatgtcagtactgtcgatttcagaagtgtctcagtgttggaatggtaaaagaagttgtccgtacagatagtctgaaagggaggagaggtcgtctgc

SEQ ID NO: 231207 - DNA, 120 bp, Artificial Sequence
  ENSG00000119508_10 (sequence is synthesized)
cttccaaaccaaagagcccattacaacaggaaccttctcagccctctccaccttctcctccaatctgcatgatgaatgcccttgtccgagctttaacagactcaacacccagagatcttg

SEQ ID NO: 231208 - DNA, 120 bp, Artificial Sequence
  ENSG00000119508_11 (sequence is synthesized)
attattccagatactgtcccactgaccaggctgctgcaggcacagatgctgagcatgtgcaacaattctacaacctcctgacagcctccattgatgtatccagaagctgggcagaaaaga

SEQ ID NO: 231209 - DNA, 120 bp, Artificial Sequence
  ENSG00000119508_12 (sequence is synthesized)
ttccgggatttactgatctccccaaagaagatcagacattacttattgaatcagcctttttggagctgtttgtcctcagactttccatcaggtcaaacactgctgaagataagtttgtgt

SEQ ID NO: 231210 - DNA, 120 bp, Artificial Sequence
  ENSG00000119508_13 (sequence is synthesized)
tctgcaatggacttgtcctgcatcgacttcagtgccttcgtggatttggggagtggctcgactctattaaagacttttccttaaatttgcagagcctgaaccttgatatccaagccttag

SEQ ID NO: 231211 - DNA, 120 bp, Artificial Sequence
  ENSG00000119508_14 (sequence is synthesized)
cctgcctgtcagcactgagcatgatcacagaaagacatgggttaaaagaaccaaagagagtcgaagagctatgcaacaagatcacaagcagtttaaaagaccaccagagtaagggacagg

SEQ ID NO: 231212 - DNA, 120 bp, Artificial Sequence
  ENSG00000119508_15 (sequence is synthesized)
ctctggagcccaccgagtccaaggtcctgggtgccctggtagaactgaggaagatctgcaccctgggcctccagcgcatcttctacctgaagctggaagacttggtgtctccaccttcca

SEQ ID NO: 231213 - DNA, 120 bp, Artificial Sequence
  ENSG00000119508_16 (sequence is synthesized)
tcattgacaagctcttcctggacaccctacctttctaatcaggagcagtggagcagtgagctgcctcctctcctagcacctgcttgctacgcagcaaagggataggtttggaaacctatc

SEQ ID NO: 231214 - DNA, 120 bp, Artificial Sequence
  ENSG00000119508_17 (sequence is synthesized)
atttcctgtccttccttaagaggaaaagcagctcctgtagaaagcaaagactttcttttttttctggctcttttccttacaacctaaagccagaaaacttgcagagtattgtgttggggt

SEQ ID NO: 231215 - DNA, 120 bp, Artificial Sequence
  ENSG00000119508_18 (sequence is synthesized)
tgtgttttatatttaggcattgggggatggggtgggagggggttatagttcatgagggttttctaagaaattgctaacaaagcacttttggacaatgctatcccagcaggaaaaaaaagg

SEQ ID NO: 231216 - DNA, 120 bp, Artificial Sequence
  ENSG00000119508_19 (sequence is synthesized)
ataatataactgttttaaaactctttctggggaatccaattatagttgctttgtatttaaaaacaagaacagccaagggttgttcgccagggtaggatgtgtcttaaagattggtccctt

SEQ ID NO: 231217 - DNA, 120 bp, Artificial Sequence
  ENSG00000119508_20 (sequence is synthesized)
aatttccttcttcctttattttaacaaatggtgaaagatggaggattacctacaaatcagacatggcaaaacaataatggctgtttgcttccataaacaagtgcaattttttaaagtgct

SEQ ID NO: 231218 - DNA, 120 bp, Artificial Sequence
  ENSG00000119508_21 (sequence is synthesized)
gtcttactaagtcttgtttattaactctcctttattctatatggaaataaaaaggaggcagtcatgttagcaaatgacacgttaatatccctagcagaggctgtgttcaccttccctgtc

SEQ ID NO: 231219 - DNA, 120 bp, Artificial Sequence
  ENSG00000119508_22 (sequence is synthesized)
gatcccttctgaggtatggcccatccaagacttttaggccattcttgatggaaccagatccctgccctgactgtccagctatcctgaaagtggatcagattataaactggattacatgta

SEQ ID NO: 231220 - DNA, 120 bp, Artificial Sequence
  ENSG00000119508_23 (sequence is synthesized)
actgttttggttgtgttctatcaaccccaccagagttccctaaacttgcttcagttatagtaactgactggtatattcattcagaagcgccataagtcagttgagtatttgatccctaga

SEQ ID NO: 231221 - DNA, 120 bp, Artificial Sequence
  ENSG00000119508_24 (sequence is synthesized)
taagaacatgcaaatcagcaggaactggtcatacagggtaagcaccagggacaataaggatttttatagatataatttaatttttgttattggttaaggagacaattttggagagcaagc

SEQ ID NO: 231222 - DNA, 120 bp, Artificial Sequence
  ENSG00000119508_25 (sequence is synthesized)
aaatctttttaaaaaatagtatgaatgtgaatactagaaaagatttaaaaaatagtatgagtgtgagtactaggaaggattagtgggctgcgtttcaacattccgtgttcgtactccctt

SEQ ID NO: 231223 - DNA, 120 bp, Artificial Sequence
  ENSG00000119508_26 (sequence is synthesized)
ttgtatgtttctactgttaatgccatattactatgagataatttgttgcatagtgtccttatttgtataaacatttgtatgcacgttatattgtaatagctttgcctgtatttattgcaa

SEQ ID NO: 231224 - DNA, 120 bp, Artificial Sequence
  ENSG00000119508_27 (sequence is synthesized)
gaccaccagctcctggaagctgagttacagagtaattaaatggggtgttcacagtgacttggatacaccaattagaaattaaataagcaaatatatatatatatataaatatagcaggtt

SEQ ID NO: 231225 - DNA, 120 bp, Artificial Sequence
  ENSG00000119508_28 (sequence is synthesized)
acatatatatatttataatgtgtctttttattaaccatttgtacaataaatgtcacttcccatgccgttattttatggttcatttgcagtgacttttaaggcagtactgtttagcacttt

SEQ ID NO: 231226 - DNA, 120 bp, Artificial Sequence
  ENSG00000119508_29 (sequence is synthesized)
gatattaaaattttgcttatgttttgctaaattcgaataatgtttgaagatttttaggtctaaaagtctttatattatatactctgtatcaagtcaaaatatctttggccattttgctaa

SEQ ID NO: 231227 - DNA, 120 bp, Artificial Sequence
  ENSG00000119508_30 (sequence is synthesized)
gaaacaaactttgaatgtcaaactgatgtcacagtagtttttgttagctttaaatcatttttgctttagtctttttaaaggaaaataacaaaactatgctgtttatattgtcattaaatt

SEQ ID NO: 231228 - DNA, 120 bp, Artificial Sequence
  ENSG00000119508_31 (sequence is synthesized)
atacaatcaaacaaatgccaaatgaattgcctaattgctgcaaagtataacccagataggaaatcatatgtttttttccaagagtcattctaatatttgattatgttatgtgtgctttta

SEQ ID NO: 231229 - DNA, 120 bp, Artificial Sequence
  ENSG00000119508_32 (sequence is synthesized)
tgaaagattgttatttttatatatcaagatgatagaacctggaatgttaggattttgaaatgttagacttggaaggggcctggtctgtcaactagtccaaccccttaaaattcatagagg

SEQ ID NO: 231230 - DNA, 120 bp, Artificial Sequence
  ENSG00000119508_33 (sequence is synthesized)
agcaaactggggcccattgaagggtgaagagttactcaaggtcaaacagctggtaacagaatcaagactaagacctaatttacctttccatactctttttttttctcaacttcatctata

SEQ ID NO: 231231 - DNA, 120 bp, Artificial Sequence
  ENSG00000119508_34 (sequence is synthesized)
taaaatcaggcttttaaacataaccactaatatttacctgaagataaccatgagtaaagtatacttttgcattaattttttgagcttatatgcaaacataataaatattattaaatatca

SEQ ID NO: 231232 - DNA, 120 bp, Artificial Sequence
  ENSG00000119508_35 (sequence is synthesized)
ggaaagctaacatttcatacaagatagcttcagaccaaattcaaattgaatttgaataaattagaaatactgtgcatacataaccttcttgtgcaccatgagtatttggaaagttaatcc

SEQ ID NO: 231233 - DNA, 120 bp, Artificial Sequence
  ENSG00000119508_36 (sequence is synthesized)
ttgtttttgtcgtgtctataaaggaagaacaaaacaaaataaaaacagagccctagagaaatgctgttactttttatttttacacccatcagatttaaggaaaagactttttagccatta

SEQ ID NO: 231234 - DNA, 120 bp, Artificial Sequence
  ENSG00000119508_37 (sequence is synthesized)
taatctagtggttggaaggaatgaagaagcttttttagtaataggtccagatatgagtgctaaaaataaagatgatagcatgttcttctgtcttccatagttattacaactatgagagcc

SEQ ID NO: 231235 - DNA, 120 bp, Artificial Sequence
  ENSG00000119508_38 (sequence is synthesized)
tcccaagtcatcttatcaactcaactcccttttttttgtcttaatgttgcacataagtttatacagagtggatgaccacactagcacagaagagaacaacatgtattaaagcaggtgatt

SEQ ID NO: 231236 - DNA, 120 bp, Artificial Sequence
  ENSG00000119508_39 (sequence is synthesized)
cctccccttggcgggagagctctctcagtgtgaacatgccttctgtgggcggaaatcaggaagccaccagctgttaatggagagtgccttgcttttatttcagacagcagagttttccaa

SEQ ID NO: 231237 - DNA, 120 bp, Artificial Sequence
  ENSG00000119508_40 (sequence is synthesized)
agtttctctgctcctctaacagcattgctctttagtgtgtgttaacctgtggtttgaaagaaatgctcttgtacattaacaatgtaaatttaaatgattaaattacattttatcaatggc

SEQ ID NO: 231238 - DNA, 120 bp, Artificial Sequence
  ENSG00000119508_41 (sequence is synthesized)
ataaatgacgtgccgagagagcgagcgaacgcgcagccgggagagcggagtctcctgcctcccgccccccacccctccagctcctgctcctcctccgctccccatacacagacgcgctca

SEQ ID NO: 231239 - DNA, 120 bp, Artificial Sequence
  ENSG00000119508_42 (sequence is synthesized)
cacccgctccctcactcgcacacacagacacaagcgcgcacacaggctccgcacacacacttcgctctcccgcgcgctcacacccctcttgccctgagcccttgccggtgcagcgcggcg

SEQ ID NO: 231240 - DNA, 120 bp, Artificial Sequence
  ENSG00000119508_43 (sequence is synthesized)
ccgcagctggacgcccctcccgggctcactttgcaacgctgacggtgccggcagtggccgtggaggtgggaacagcggcggcatcctcccccctggtcacagcccaagccaggacgcccg

SEQ ID NO: 231241 - DNA, 120 bp, Artificial Sequence
  ENSG00000119508_44 (sequence is synthesized)
cggaacctctcggctgtgctctcccatgagtcgggatcgcagcatcccccaccagccgctcaccgcctccgggagccgctgggcttgtacaccgcagcccttccgggacagcagctgtga

SEQ ID NO: 231242 - DNA, 120 bp, Artificial Sequence
  ENSG00000119508_45 (sequence is synthesized)
ctcccccccagtgcagatttcgggacagctctctagaaactcgctctaaagacggaaccgccacagcactcaaagcccactgcggaagagggcagcccggcaagcccgggccctgagcct

SEQ ID NO: 231243 - DNA, 120 bp, Artificial Sequence
  ENSG00000119508_46 (sequence is synthesized)
ggacccttagcggtgccgggcagcactgccggcgcttcgcctcgccggacgtccgctcctcctacactctcagcctccgctggagagacccccagccccaccattcagcgcgcaagatac

SEQ ID NO: 231244 - DNA, 120 bp, Artificial Sequence
  ENSG00000119508_47 (sequence is synthesized)
ttttatgatttcctgctttcaaatgaatgatcagggtctctatttatggctactagtaataagagttgattgaatgattttgtgtctggcaccatgttagacagttttcatactttttct

SEQ ID NO: 231245 - DNA, 120 bp, Artificial Sequence
  ENSG00000119508_48 (sequence is synthesized)
atatttctcgcttcatttagcaattcagtgcatccattgcagcaaataatttttgccttattgaatctctaaatgccttaacaagtgaccctgacagtgctgcacctgtcatacacattg

SEQ ID NO: 231246 - DNA, 120 bp, Artificial Sequence
  ENSG00000119508_49 (sequence is synthesized)
ttgcaggattcctggtggttgtgccaatgaaaatctgcacagacaaactacaatttgtagatttatctcgtgatctagacaaagtgactactgttttttttcatattgtgttcaaaccat

SEQ ID NO: 231247 - DNA, 120 bp, Artificial Sequence
  ENSG00000119508_50 (sequence is synthesized)
ctgggtgagcctcaagttattactaagcagtttatccaattgcatcagcattgattgacctgctgcttattcagagggattagaccattggtggagagaagcgagctctggctgtgacat

SEQ ID NO: 231248 - DNA, 120 bp, Artificial Sequence
  ENSG00000119508_51 (sequence is synthesized)
cagttgtcaggagaactgggatggaacgccacctctgctacttcctgcctgtgtcacctggttcctgcttttggctctctcctgcctacagtggaaatggctacaatatttaacctcaga

SEQ ID NO: 231249 - DNA, 120 bp, Artificial Sequence
  ENSG00000119509_0 (sequence is synthesized)
agaaggatgtgcggccgaaagcctcgggcggccttttgaggggctcggctagcttcagcgccgtggggtctgacctggctggatatagtgtaccggcccggcaggaggggcggcccggtc

SEQ ID NO: 231250 - DNA, 120 bp, Artificial Sequence
  ENSG00000119509_1 (sequence is synthesized)
cgggttgcgcctcctggagccgcccccgggacgtcagtcctggaggaggcgagggttgctccggttgctaagaagactatgaacaagtcagagaacctgctgtttgctggttcatcatta

SEQ ID NO: 231251 - DNA, 120 bp, Artificial Sequence
  ENSG00000119509_2 (sequence is synthesized)
gcatcacaagtccatgctgctgccgttaatggagataagggtgctctacagaggctcatcgtaggaaactctgctcttaaagacaaagaagatcagtttgggagaacaccacttatgtat

SEQ ID NO: 231252 - DNA, 120 bp, Artificial Sequence
  ENSG00000119509_3 (sequence is synthesized)
tgcgtgttggctgacagattggattgtgcagatgctcttctgaaggcaggagcagatgtgaataaaactgaccatagccagagaacagccctccatcttgcagcccagaagggaaattat

SEQ ID NO: 231253 - DNA, 120 bp, Artificial Sequence
  ENSG00000119509_4 (sequence is synthesized)
cgtttcatgaaactcttacttacacgcagagcaaactggatgcaaaaggatctggaagagatgactcctttgcacttgaccacccggcacaggagccctaagtgtttggcacttctgctg

SEQ ID NO: 231254 - DNA, 120 bp, Artificial Sequence
  ENSG00000119509_5 (sequence is synthesized)
aagtttatggcaccaggagaagtggatacacaggataaaaacaagcaaacagctctgcattggagtgcctactacaataaccctgagcatgtgaagctgctcatcaagcatgattctaac

SEQ ID NO: 231255 - DNA, 120 bp, Artificial Sequence
  ENSG00000119509_6 (sequence is synthesized)
attgggattcctgatgttgaaggcaagatcccacttcactgggcagccaaccataaagatccaagtgctgttcacacagtgagatgcattctggatgctgctccaacagagtctttactg

SEQ ID NO: 231256 - DNA, 120 bp, Artificial Sequence
  ENSG00000119509_7 (sequence is synthesized)
aactggcaagactacgagggtcgaactcctcttcactttgcagttgctgatgggaatgtgaccgtggttgatgtcttgacctcatatgaaagctgcaatataacgtcttatgataactta

SEQ ID NO: 231257 - DNA, 120 bp, Artificial Sequence
  ENSG00000119509_8 (sequence is synthesized)
tttcgaaccccactgcactgggcagctttattaggccatgcacagattgtccatctccttttagaaagaaataagtctggaactatcccatctgacagccaaggagccacacctttgcac

SEQ ID NO: 231258 - DNA, 120 bp, Artificial Sequence
  ENSG00000119509_9 (sequence is synthesized)
tatgctgctcagagtaactttgctgaaacggttaaagtgtttttaaaacatccttcagtgaaagatgattcagacctggaaggaagaacatcctttatgtgggcagctggcaaaggcagt

SEQ ID NO: 231259 - DNA, 120 bp, Artificial Sequence
  ENSG00000119509_10 (sequence is synthesized)
gatgatgtccttagaactatgctgagcttaaaatcggacatagatattaacatggctgacaaatatggaggtacagctttgcatgctgctgctctttctggccatgtcagcaccgtgaag

SEQ ID NO: 231260 - DNA, 120 bp, Artificial Sequence
  ENSG00000119509_11 (sequence is synthesized)
ttattactggaaaataatgctcaagtagatgctactgatgttatgaaacatactccacttttccgagcctgtgagatgggacacaaagatgtgattcagacactcattaaaggtggagca

SEQ ID NO: 231261 - DNA, 120 bp, Artificial Sequence
  ENSG00000119509_12 (sequence is synthesized)
agggtagatctagttgaccaagatggacattctcttctacattgggcagcactgggaggaaatgctgatgtttgccagatattaatagaaaataagatcaatccaaatgtccaggattat

SEQ ID NO: 231262 - DNA, 120 bp, Artificial Sequence
  ENSG00000119509_13 (sequence is synthesized)
gcaggaagaacccctttgcagtgtgcagcatatggaggctatatcaactgcatggcagttctcatggaaaacaatgcagaccctaacattcaagacaaagagggaagaacagctttgcat

SEQ ID NO: 231263 - DNA, 120 bp, Artificial Sequence
  ENSG00000119509_14 (sequence is synthesized)
tggtcctgcaacaatggataccttgatgccattaaattactgctagactttgctgctttccctaatcagatggaaaacaatgaagagagatacacaccccttgattatgctttgcttggt

SEQ ID NO: 231264 - DNA, 120 bp, Artificial Sequence
  ENSG00000119509_15 (sequence is synthesized)
gagcgccatgaagtgatccagttcatgttggagcacggtgccctgtccatcgcagccatacaagacatcgccgccttcaaaatccaagctgtctacaaagggtacaaggtcagaaaagcc

SEQ ID NO: 231265 - DNA, 120 bp, Artificial Sequence
  ENSG00000119509_16 (sequence is synthesized)
ttccgagacaggaaaaatctcctcatgaagcatgaacagttgagaaaagatgctgctgccaaaaagcgagaggaagaaaacaaacgaaaagaggcagaacagcaaaaaggaaggcggagc

SEQ ID NO: 231266 - DNA, 120 bp, Artificial Sequence
  ENSG00000119509_17 (sequence is synthesized)
ccagattcctgcagaccccaggcccttccctgtctgcctagcacccaggatgtgcccagcaggcagagccgggcccccagcaagcagcctcctgctggcaacgtggcccaaggccctgag

SEQ ID NO: 231267 - DNA, 120 bp, Artificial Sequence
  ENSG00000119509_18 (sequence is synthesized)
ccaagagacagcagaggatctccaggagggtctctaggcggagccctccagaaggagcagcatgtttcctcagatttgcagggaacaaactccagaaggccaaatgaaacagccagagaa

SEQ ID NO: 231268 - DNA, 120 bp, Artificial Sequence
  ENSG00000119509_19 (sequence is synthesized)
cattctaaaggccaatctgcttgtgtccacttcagacccaatgaaggcagtgatggaagcaggcatccaggagttccctctgttgagaagtccagaggtgagacagctggcgatgagcgg

SEQ ID NO: 231269 - DNA, 120 bp, Artificial Sequence
  ENSG00000119509_20 (sequence is synthesized)
ttccaccgcacgatagccactggaagcccagcaggcggcatgacacagaacccaaggccaaatgtgccccccagaaaaggcgcactcaagagctcagaggaggaaggtgctctccggctg

SEQ ID NO: 231270 - DNA, 120 bp, Artificial Sequence
  ENSG00000119509_21 (sequence is synthesized)
gttctagccgccctggcagtgcccggggggaggcggtccatgctgggcagaatcctccccaccatcgtacaccaagaaacaaagtgacacaagccaagctcacaggagggctctattcac

SEQ ID NO: 231271 - DNA, 120 bp, Artificial Sequence
  ENSG00000119509_22 (sequence is synthesized)
atttgccacagagcacagaggagttgaggtcaggagctaggaggctggagacatctaccctgtccgaggactttcaggtatctaaggagactgatccagcacctggtcccctctctgggc

SEQ ID NO: 231272 - DNA, 120 bp, Artificial Sequence
  ENSG00000119509_23 (sequence is synthesized)
agagtgtgaatattgaccttctccccgtagagctccgactgcagataattcagagagaacgaaggaggaaggagctgtttcgcaaaaagaacaaggcagcagcagtcatccagcgcgcct

SEQ ID NO: 231273 - DNA, 120 bp, Artificial Sequence
  ENSG00000119509_24 (sequence is synthesized)
ggcgaagctaccagctcaggaagcacctgtcccaccttcggcatatgaagcagcttggagctggagatgtggacagatggaggcaagagtctacagcattgctcctccaggtttggagga

SEQ ID NO: 231274 - DNA, 120 bp, Artificial Sequence
  ENSG00000119509_25 (sequence is synthesized)
aggaactggaactaaaattcccccaaaccactgcagtaagcaaggcccccaagagtccatccaagggcacctcaggcacaaagtccaccaagcactcagtgcttaagcaaatctatggtt

SEQ ID NO: 231275 - DNA, 120 bp, Artificial Sequence
  ENSG00000119509_26 (sequence is synthesized)
gttctcacgaagggaaaatacatcatcctacaagatctgtaaaagcctcttctgtgctgcgtctcaactcagtgagcaacctacagtgtatacatctccttgagaacagtggaagatcaa

SEQ ID NO: 231276 - DNA, 120 bp, Artificial Sequence
  ENSG00000119509_27 (sequence is synthesized)
agaacttttcttataacctgcaatcagctactcagccaaaaaacaaaacaaaaccttgactgcctatggaggaagactgtgttcgggggagctggcatagctagtgcagagttcagattt

SEQ ID NO: 231277 - DNA, 120 bp, Artificial Sequence
  ENSG00000119509_28 (sequence is synthesized)
tctgctgataatcttttacaccttgggaaaactttaatatccgtacctgaaggctgattcacctaaaaatgtgttaactgaaagaaaatgtcagaatgtttcctttctgctcttacacag

SEQ ID NO: 231278 - DNA, 120 bp, Artificial Sequence
  ENSG00000119509_29 (sequence is synthesized)
cattgttttgtcaatcaacacagcctgcactgaaaggacctgcatagactatgtctgtgcaaagtgcctgagtgtctgctttcacctcagtctgtacagttggaaatgagaattcataat

SEQ ID NO: 231279 - DNA, 120 bp, Artificial Sequence
  ENSG00000119509_30 (sequence is synthesized)
taacagcaaaatctaaggaaaactacggctgctgggttgggatttctgccagctagctggtactggcttcttgtttcaagagatgaacctaaatgagataggaagcctgtcccatagcag

SEQ ID NO: 231280 - DNA, 79 bp, Artificial Sequence
  ENSG00000119509_31 (sequence is synthesized)
agatgaacctaaatgagataggaagcctgtcccatagcagccttcctctcactactttcctggcatctaatgcaacaaa

SEQ ID NO: 231281 - DNA, 120 bp, Artificial Sequence
  ENSG00000119509_32 (sequence is synthesized)
ttaaattttagatcagaatcattgcccactgttttcatttagaaattgtccaaaagaccatagatacattctggtgattccttacattttacagttcctacgttagcctctcaaggccac

SEQ ID NO: 231282 - DNA, 120 bp, Artificial Sequence
  ENSG00000119509_33 (sequence is synthesized)
aagttgccgccacgtcttcactgaatggctttctcagtgctgaataccaacagccgtattacagtatcaaggattctgtcaggtagggtttacagaccagactgttcatgcagcaaggtg

SEQ ID NO: 231283 - DNA, 120 bp, Artificial Sequence
  ENSG00000119509_34 (sequence is synthesized)
ctaactcaggcgtcaacgttctacttgtattttctgaccaacttgcagaagtgagcaatcttcttaaaatgccatttctgttggcagggaagaatgaaacggcacacatcctagcattct

SEQ ID NO: 231284 - DNA, 120 bp, Artificial Sequence
  ENSG00000119509_35 (sequence is synthesized)
aagaacacctggtttaaataaaatccagtgatgatgggctctttcacattgtttaaggggaaagctgctgtgagaatattgacagtaggcataaacagtgatatattttactcacaggta

SEQ ID NO: 231285 - DNA, 120 bp, Artificial Sequence
  ENSG00000119509_36 (sequence is synthesized)
ttttgggggttgctttcattttcttcagatcagtgccacttctgtgctaacggtaagagatagacagataggcaatgaagtgttcacttaattaccttggtttttagtttactaattatt

SEQ ID NO: 231286 - DNA, 120 bp, Artificial Sequence
  ENSG00000119509_37 (sequence is synthesized)
acattcatcgtttttgtgatcacaaaaacacaaagaaggaggtctgcctggatggaattacaaagatttagccagtttcttggtatataacagaaggtaccacagtatcactctctattt

SEQ ID NO: 231287 - DNA, 120 bp, Artificial Sequence
  ENSG00000119509_38 (sequence is synthesized)
tgtaaatatttagctcctatgaaatgcacaatgcacaaccgcctatgaccatgtatcgtgtgctagtccgggaagccagcctacacatcaataggaacgcccaaacattattttcatata

SEQ ID NO: 231288 - DNA, 120 bp, Artificial Sequence
  ENSG00000119509_39 (sequence is synthesized)
tcagtgcaaagaaagaaggttcgtaaacttctttaaaagttcagctttaatgacaaagatctattacatcagtctttttcttcaaataagatagatgtgaataaacaacttcaaacagga

SEQ ID NO: 231289 - DNA, 120 bp, Artificial Sequence
  ENSG00000119509_40 (sequence is synthesized)
agagaaacacgtaaagtgagtaccacattcatcctggccttttcctttatgacattttccaaactggaatgcaaaagaatacaaccctaacaggaagcagcagccttaccaggctgaaga

SEQ ID NO: 231290 - DNA, 120 bp, Artificial Sequence
  ENSG00000119509_41 (sequence is synthesized)
aactgaggcagagtttggagataatagtggctggaacttgaaagtcaaaatcctggagaggagggaattgcagagaaagaatgcaagaatctggatacaaattcctcacaagtttttaac

SEQ ID NO: 231291 - DNA, 120 bp, Artificial Sequence
  ENSG00000119509_42 (sequence is synthesized)
aaattatcctatattttcttttatgtttaaatctcttaatatataacacattgatttttgtatggggatccattctcattttaaagcatatggataactaattttcccaacacaacctag

SEQ ID NO: 231292 - DNA, 120 bp, Artificial Sequence
  ENSG00000119509_43 (sequence is synthesized)
ttcattaatttttggccatttagtatctgctctctgtcagttccaggcttttgtactacgaactccctatgcatttctgtttttttaaatgagggatcctgaatactagggagcctttgg

SEQ ID NO: 231293 - DNA, 120 bp, Artificial Sequence
  ENSG00000119509_44 (sequence is synthesized)
gaaatttgaaaataaaagttacatgatcagtgtattttagggggactaatatggcaactaaagctactttggaagagaaagagtggagatacatagattgctattatagttcaggccaat

SEQ ID NO: 231294 - DNA, 120 bp, Artificial Sequence
  ENSG00000119509_45 (sequence is synthesized)
agagaggaattgggtttaagagatacattatggaggcagaagtgttcattcaacaagcgtttgttaaatatctactatgtaatcatgattatacaactagagagaatatgaaaaaaatga

SEQ ID NO: 231295 - DNA, 120 bp, Artificial Sequence
  ENSG00000119509_46 (sequence is synthesized)
attacgtatgttagcttatagatggatgctctcagtacccatccctattaatcgtcatttccctttgtttagtgaaccttctgatatattggatatcaaatatcctttccaagtattgtc

SEQ ID NO: 231296 - DNA, 120 bp, Artificial Sequence
  ENSG00000119509_47 (sequence is synthesized)
tgtcccacttaattctggtatccatgaatgcagaagtgtgctatttatgtaatcatgaacactcatgtatatgtgtataccttcattcattcaacatgtgttaaaactattatgtaacag

SEQ ID NO: 231297 - DNA, 120 bp, Artificial Sequence
  ENSG00000119509_48 (sequence is synthesized)
gcatcatgttaggccttggaacacaaaggtgaacaacatgattcctgctcttaagttgcttacaaagatcatggatgaagatattaaatgataattaaagctgattgatctaccttgtaa

SEQ ID NO: 231298 - DNA, 120 bp, Artificial Sequence
  ENSG00000119509_49 (sequence is synthesized)
gaaggggctgaagttgttgctttccttctttggccacatagttaatgtgtcccattccagtagatataacttcgccttttctccaatcatcccctacttgtgcctgtagcttatagaagg

SEQ ID NO: 231299 - DNA, 120 bp, Artificial Sequence
  ENSG00000119509_50 (sequence is synthesized)
gacgtcagtcctggaggaggcgaggaaacctagaaagctgacatagcctgaggacacactgctgattataaatacaactgggcctagaacccaagtgcagttactcccctcccatgtttt

SEQ ID NO: 231300 - DNA, 120 bp, Artificial Sequence
  ENSG00000119509_51 (sequence is synthesized)
cacctccacctctattttgtagcttctctcaaataaccttaatataatcctggatatgacagtagttcttctgacatgactgttagactcagacatgactgaagtgtctcacaacaccct

SEQ ID NO: 231301 - DNA, 120 bp, Artificial Sequence
  ENSG00000119509_52 (sequence is synthesized)
tccttaactcaaattgtcagcaaaataaagacgtaaggagctgtgctttaccataattaagaaagtattaatatgttctctcaagggcagaatttgaaccaataatccttgtcgatgaca

SEQ ID NO: 231302 - DNA, 120 bp, Artificial Sequence
  ENSG00000119509_53 (sequence is synthesized)
agacaaataccagctcatccgttataaatttatcttagaaaactctcagatccccaggagtaacagcgattggcgtgacctgctttttggtgaaatcagaaaaggacttgcctaccctca

SEQ ID NO: 231303 - DNA, 120 bp, Artificial Sequence
  ENSG00000119509_54 (sequence is synthesized)
tggcagcaattaactggagctgattaacagctgctccctttagataagtacatatgcttgagtttaccgtgattctgtgactccctacgtttctaacagttgttacctctctggtccttg

SEQ ID NO: 231304 - DNA, 120 bp, Artificial Sequence
  ENSG00000119509_55 (sequence is synthesized)
taggcattcagctttggaactttgataaagcagcttaagggtttaggaaggatgtttaagatcactgatgcaactattcatctttccttcccatcaggtgtttgaattgttgctgcattt

SEQ ID NO: 231305 - DNA, 120 bp, Artificial Sequence
  ENSG00000119514_0 (sequence is synthesized)
gcagatcgctggctgcagttggcgggcgcatgtgggggcgcacggcgcggcggcgctgcccgcgggaactgcggcgcggccgggaggcgctgttggtgctcctggcgctactggcgttgg

SEQ ID NO: 231306 - DNA, 80 bp, Artificial Sequence
  ENSG00000119514_1 (sequence is synthesized)
tgctcctggcgctactggcgttggccgggctgggctcggtgctgcgggcgcagcgtggggccggggccggggctgccgag

SEQ ID NO: 231307 - DNA, 120 bp, Artificial Sequence
  ENSG00000119514_2 (sequence is synthesized)
cggcgaacgcgctgggcgcgcggggcgaggcggtgcggctgcagctgcagggcgaggagctgcggctgcaggaggagagcgtgcggctgcaccagattaacatctacctcagcgaccgca

SEQ ID NO: 231308 - DNA, 120 bp, Artificial Sequence
  ENSG00000119514_3 (sequence is synthesized)
tctcactgcaccgccgcctgcccgagcgctggaacccgctgtgcaaagagaagaaatatgattatgataatttgcccaggacatctgttatcatagcattttataatgaagcctggtcaa

SEQ ID NO: 231309 - DNA, 120 bp, Artificial Sequence
  ENSG00000119514_4 (sequence is synthesized)
ctctccttcggacagtttacagtgtccttgagacatccccggatatcctgctagaagaagtgatccttgtagatgactacagtgatagagagcacctgaaggagcgcttggccaatgagc

SEQ ID NO: 231310 - DNA, 120 bp, Artificial Sequence
  ENSG00000119514_5 (sequence is synthesized)
tttcgggactgcccaaggtgcgcctgatccgcgccaacaagagagagggcctggtgcgagcccggctgctgggggcgtctgcggcgaggggcgatgttctgaccttcctggactgtcact

SEQ ID NO: 231311 - DNA, 120 bp, Artificial Sequence
  ENSG00000119514_6 (sequence is synthesized)
gtgagtgccacgaagggtggctggagccgctgctgcagaggatccatgaagaggagtcggcagtggtgtgcccggtgattgatgtgatcgactggaacaccttcgaatacctggggaact

SEQ ID NO: 231312 - DNA, 120 bp, Artificial Sequence
  ENSG00000119514_7 (sequence is synthesized)
ccggggagccccagatcggcggtttcgactggaggctggtgttcacgtggcacacagttcctgagagggagaggatacggatgcaatcccccgtcgatgtcatcaggtctccaacaatgg

SEQ ID NO: 231313 - DNA, 120 bp, Artificial Sequence
  ENSG00000119514_8 (sequence is synthesized)
ctggtgggctgtttgctgtgagtaagaaatattttgaatatctggggtcttatgatacaggaatggaagtttggggaggagaaaacctcgaattttcctttaggatctggcagtgtggtg

SEQ ID NO: 231314 - DNA, 120 bp, Artificial Sequence
  ENSG00000119514_9 (sequence is synthesized)
gggttctggaaacacacccatgttcccatgttggccatgttttccccaagcaagctccctactcccgcaacaaggctctggccaacagtgttcgtgcagctgaagtatggatggatgaat

SEQ ID NO: 231315 - DNA, 120 bp, Artificial Sequence
  ENSG00000119514_10 (sequence is synthesized)
ttaaagagctctactaccatcgcaacccccgtgcccgcttggaaccttttggggatgtgacagagaggaagcagctccgggacaagctccagtgtaaagacttcaagtggttcttggaga

SEQ ID NO: 231316 - DNA, 120 bp, Artificial Sequence
  ENSG00000119514_11 (sequence is synthesized)
gtatccagaactgcatgtgcctgaggacaggcctggcttcttcgggatgctccagaacaaaggactaacagactactgctttgactataaccctcccgatgaaaaccagattgtgggaca

SEQ ID NO: 231317 - DNA, 120 bp, Artificial Sequence
  ENSG00000119514_12 (sequence is synthesized)
ccaggtcattctgtacctctgtcatgggatgggccagaatcagtttttcgagtacacgtcccagaaagaaatacgctataacacccaccagcctgagggctgcattgctgtggaagcagg

SEQ ID NO: 231318 - DNA, 120 bp, Artificial Sequence
  ENSG00000119514_13 (sequence is synthesized)
aatggatacccttatcatgcatctctgcgaagaaactgccccagagaatcagaagttcatcttgcaggaggatggatctttatttcacgaacagtccaagaaatgtgtccaggctgcgag

SEQ ID NO: 231319 - DNA, 120 bp, Artificial Sequence
  ENSG00000119514_14 (sequence is synthesized)
gaaggagtcgagtgacagtttcgttccactcttacgagactgcaccaactcggatcatcagaaatggttcttcaaagagcgcatgttatgaagcctcgtgtatcaaggagcccatcgaag

SEQ ID NO: 231320 - DNA, 120 bp, Artificial Sequence
  ENSG00000119514_15 (sequence is synthesized)
gagactgtggagccaggactctgcccaacaaagacttagctaagcagtgaccagaacccaccaaaaactaggctgcattgctttgaagaggcaatcattttgccatttgtgaaagttgtg

SEQ ID NO: 231321 - DNA, 120 bp, Artificial Sequence
  ENSG00000119514_16 (sequence is synthesized)
ttggatttagtaaaaatgtgaataagctttgtacttattttgagaactttttaaatgttccaaaataccctattttcaaagggtaatcgtaagatgttaacccttggtatttagaaaatt

SEQ ID NO: 231322 - DNA, 120 bp, Artificial Sequence
  ENSG00000119514_17 (sequence is synthesized)
aaaaccttataatatttttctatcaagatgtatattttacagtcgtgccttttactctcattagcaaaaaagataaagattttattttggtatttacaagaattcccaggtacgaagata

SEQ ID NO: 231323 - DNA, 120 bp, Artificial Sequence
  ENSG00000119514_18 (sequence is synthesized)
tctgcatgggtggaaatcaggttcaagcaacgtactttgcattaactgataatacctcagctgcggggttaaagttttcccagtatagagagactgtcactaggaacattgtattgattt

SEQ ID NO: 231324 - DNA, 120 bp, Artificial Sequence
  ENSG00000119514_19 (sequence is synthesized)
attcaggtcattgagatcttctagatgtattttaaaaagaatgctttttggttatgtgttgctaccacagttaacactccataatgttcatgtcagccaaagaggactaaccaaagctga

SEQ ID NO: 231325 - DNA, 120 bp, Artificial Sequence
  ENSG00000119514_20 (sequence is synthesized)
aatctcagagaacaatttgctttactaagctgagtcaacttgagagcgaacttctaacaatgccgcactgtagtgtggctggttctaccactatgactttaaaacatgtttatatcattt

SEQ ID NO: 231326 - DNA, 120 bp, Artificial Sequence
  ENSG00000119514_21 (sequence is synthesized)
ttaatttttatgatacggtagtgtcagggagaaatgtaatgttctatatgaaattcctttttcaagtttgttcattaataacagttattaatttaaatcagcgttagagtttgtgctgct

SEQ ID NO: 231327 - DNA, 120 bp, Artificial Sequence
  ENSG00000119514_22 (sequence is synthesized)
gcaactgctgtgaaaatttctctgagtaattctgatttgtgaatgatcccagaccaaccctgagattttgtcaacctgattaagtcaatatgaatgattaaaaagatgtgagaacactga

SEQ ID NO: 231328 - DNA, 120 bp, Artificial Sequence
  ENSG00000119514_23 (sequence is synthesized)
gtacaagcctggtgctgtgtccccgggacagtcctgagttgctgcgttacacggaagacacttacccctcaataaatatttctgaaatggatggatctttatttcacgaacagtccaaga

SEQ ID NO: 231329 - DNA, 120 bp, Artificial Sequence
  ENSG00000119514_24 (sequence is synthesized)
gtaaaagtaatatttgggaaatataaaaagtagaagcctagggtggccagactcagagagaccactgttaaaattaaaatgtgttttcttcccatcattttttacacataacacacagag

SEQ ID NO: 231330 - DNA, 120 bp, Artificial Sequence
  ENSG00000119514_25 (sequence is synthesized)
attatgtgttgtaaatagttgtcataatgtctgtatgttttatattccattatttccattcccttcatctacttttcttatgttattagataccccttgagaatatcattcctagtggcc

SEQ ID NO: 231331 - DNA, 120 bp, Artificial Sequence
  ENSG00000119522_0 (sequence is synthesized)
gcgttcgccgggctggagcgagtacattaacccctggaggcggcggcggcggcgagggagcgagcctcgagcgggcgggccccagcctgagggaagggaggaaggggcggggagagcgcc

SEQ ID NO: 231332 - DNA, 120 bp, Artificial Sequence
  ENSG00000119522_1 (sequence is synthesized)
agagggaggccggtcggccgcgggcgggcgggcagcgcagcgccgagcggggcccgcgggcccatgaggaggcctggggaccatgggctccaggatcaagcagaatccagagaccacatt

SEQ ID NO: 231333 - DNA, 120 bp, Artificial Sequence
  ENSG00000119522_2 (sequence is synthesized)
tgaagtatatgttgaagtggcctatcccaggacaggtggcactctttcagatcctgaggtgcagaggcaattcccggaggactacagtgaccaggaagttctacagactttgaccaagtt

SEQ ID NO: 231334 - DNA, 120 bp, Artificial Sequence
  ENSG00000119522_3 (sequence is synthesized)
ttgtttccccttctatgtggacagcctcacagttagccaagttggccagaacttcacattcgtgctcactgacattgacagcaaacagagattcgggttctgccgcttatcttcaggagc

SEQ ID NO: 231335 - DNA, 120 bp, Artificial Sequence
  ENSG00000119522_4 (sequence is synthesized)
gaagagctgcttctgtatcttaagctatctcccctggttcgaggtattttataagctgcttaacatcctggcagattacacgacaaaaagacaggaaaatcagtggaatgagcttcttga

SEQ ID NO: 231336 - DNA, 120 bp, Artificial Sequence
  ENSG00000119522_5 (sequence is synthesized)
aactctgcacaaacttcccatccctgacccaggagtgtctgtccatctcagcgtgcattcttattttactgtgcctgataccagagaacttcccagcatacctgagaatagaaatctgac

SEQ ID NO: 231337 - DNA, 120 bp, Artificial Sequence
  ENSG00000119522_6 (sequence is synthesized)
agaatattttgtggctgtggatgttaacaacatgttgcatctgtacgccagtatgctgtacgaacgccggatactcatcatttgcagcaaactcagcactctgactgcctgcatccacgg

SEQ ID NO: 231338 - DNA, 120 bp, Artificial Sequence
  ENSG00000119522_7 (sequence is synthesized)
gtctgcggcgatgctctaccccatgtactggcagcacgtgtacatccccgtgctgccgccgcatctgctggactactgctgtgctcccatgccctacctcataggaatccatttaagttt

SEQ ID NO: 231339 - DNA, 120 bp, Artificial Sequence
  ENSG00000119522_8 (sequence is synthesized)
aatggagaaagtcagaaacatggccctggatgatgtcgtgatcctgaatgtggacaccaacaccctggaaacccccttcgatgacctccagagcctcccaaacgacgtgatctcttccct

SEQ ID NO: 231340 - DNA, 120 bp, Artificial Sequence
  ENSG00000119522_9 (sequence is synthesized)
gaagaacaggctgaaaaaggtctccacaaccactggggatggtgtggccagagcgttcctcaaggcccaggctgctttcttcggtagctaccgaaacgctctgaaaatcgagccggagga

SEQ ID NO: 231341 - DNA, 120 bp, Artificial Sequence
  ENSG00000119522_10 (sequence is synthesized)
gccgatcactttctgtgaggaagccttcgtgtcccactaccgctccggagccatgaggcagttcctgcagaacgccacacagctgcagctcttcaagcagtttattgatggtcgattaga

SEQ ID NO: 231342 - DNA, 120 bp, Artificial Sequence
  ENSG00000119522_11 (sequence is synthesized)
tcttctcaattccggcgaaggtttcagtgatgtttttgaagaggaaatcaacatgggcgagtacgctggcagtgacaaactgtaccatcagtggctctccactgtccggaaaggaagtgg

SEQ ID NO: 231343 - DNA, 120 bp, Artificial Sequence
  ENSG00000119522_12 (sequence is synthesized)
agcaattctgaatactgtaaagaccaaagcaaatccggccatgaagactgtctacaagttcgcaaaagatcatgcaaaaatgggaataaaagaggtgaaaaaccgcttgaagcaaaagga

SEQ ID NO: 231344 - DNA, 120 bp, Artificial Sequence
  ENSG00000119522_13 (sequence is synthesized)
cattgccgagaatggctgcgcccccaccccagaagagcagctgccaaagactgcaccgtccccactggtggaggccaaggaccccaagctccgagaagaccggcggccaatcacagtcca

SEQ ID NO: 231345 - DNA, 120 bp, Artificial Sequence
  ENSG00000119522_14 (sequence is synthesized)
ctttggacaggtgcgcccacctcgtccacatgttgttaagagaccaaagagcaacatcgcagtggaaggccggaggacgtctgtgccgagccctgagcagccgcagccgtatcggacact

SEQ ID NO: 231346 - DNA, 120 bp, Artificial Sequence
  ENSG00000119522_15 (sequence is synthesized)
cagggagtcagacagcgcggaaggcgacgaggcagagagtccagagcagcaagtgcggaagtccacaggccctgtcccagctccccctgaccgggctgccagcatcgaccttctggaaga

SEQ ID NO: 231347 - DNA, 120 bp, Artificial Sequence
  ENSG00000119522_16 (sequence is synthesized)
cgtcttcagcaacctggacatggaggccgcactgcagccactgggccaggccaagagcttagaggaccttcgtgcccccaaagacctgagggagcagccagggacctttgactatcagag

SEQ ID NO: 231348 - DNA, 120 bp, Artificial Sequence
  ENSG00000119522_17 (sequence is synthesized)
gctggatctgggcgggagtgagaggagccgcggggtgacagtggccttgaagcttacccacccgtacaacaagctctggagcctgggccaggacgacatggccatccccagcaagccccc

SEQ ID NO: 231349 - DNA, 120 bp, Artificial Sequence
  ENSG00000119522_18 (sequence is synthesized)
agctgcctcccctgagaagccctcagccctgctcggaaactccctggccctgcctcgaaggccccagaaccgggacagcatcctgaaccccagtgacaaggaggaggtgcccacccctac

SEQ ID NO: 231350 - DNA, 120 bp, Artificial Sequence
  ENSG00000119522_19 (sequence is synthesized)
tctgggcagcatcaccatcccccggccccaaggcaggaagaccccagagctgggcatcgtgcctccaccgcccattccccgcccggccaagctccaggctgccggcgccgcacttggtga

SEQ ID NO: 231351 - DNA, 120 bp, Artificial Sequence
  ENSG00000119522_20 (sequence is synthesized)
actgctccagccgctcagccctggccccggggctgcaggcacgagcagtgacgccctgctcgccctcctggacccgctcagcacagcctggtcaggcagcaccctcccgtcacgccccgc

SEQ ID NO: 231352 - DNA, 120 bp, Artificial Sequence
  ENSG00000119522_21 (sequence is synthesized)
caccccgaatgtagccaccccattcaccccccaattcagcttcccccctgcagggacacccaccccattcccacagccaccactcaacccctttgtcccatccatgccagcagccccacc

SEQ ID NO: 231353 - DNA, 120 bp, Artificial Sequence
  ENSG00000119522_22 (sequence is synthesized)
caccctgcccctggtctccacaccagccgggcctttcggggcccctccagcttccctggggccggcttttgcgtccggcctcctgctgtccagtgctggcttctgtgcccctcacaggtc

SEQ ID NO: 231354 - DNA, 120 bp, Artificial Sequence
  ENSG00000119522_23 (sequence is synthesized)
tcagcccaacctctccgccctctccatgcccaacctctttggccagatgcccatgggcacccacacgagccccctacagccgctgggtcccccagcagttgccccgtcgaggatccgaac

SEQ ID NO: 231355 - DNA, 120 bp, Artificial Sequence
  ENSG00000119522_24 (sequence is synthesized)
gttgcccctggcccgctcaagtgccagggctgctgagaccaagcaggggctggccctgaggcctggagaccccccgcttctgcctcccaggccccctcaaggcctggagccaacactgca

SEQ ID NO: 231356 - DNA, 120 bp, Artificial Sequence
  ENSG00000119522_25 (sequence is synthesized)
gccctctgctcctcaacaggccagagacccctttgaggatttgttacagaaaaccaagcaagacgtgagcccgagtccggccctggccccggccccagactcggtggagcagctcaggaa

SEQ ID NO: 231357 - DNA, 120 bp, Artificial Sequence
  ENSG00000119522_26 (sequence is synthesized)
gcagtgggagaccttcgagtgagccgggccctgagggtgggggatgcaccgaggcccgagggtccgtccactgctgcggttccgaggctcccccgccactctctctctgcccaggttctg

SEQ ID NO: 231358 - DNA, 120 bp, Artificial Sequence
  ENSG00000119522_27 (sequence is synthesized)
ctggtgggaagggatgggacccctctctgctgccccctcctcccctccacactgcccatctctgatgtctggccctggggaatggcaccagttccagcctgggaatcaacccagttcctg

SEQ ID NO: 231359 - DNA, 120 bp, Artificial Sequence
  ENSG00000119522_28 (sequence is synthesized)
agtgcccatcccaccccgcggttgcctctcctcggcacccttgattgggttttgcactaaagaggtcagctgggccaatgatattgctccagaccgagtcctacccaccttcccccggaa

SEQ ID NO: 231360 - DNA, 120 bp, Artificial Sequence
  ENSG00000119522_29 (sequence is synthesized)
gtgtcccaagaggctccgaaggcctcccctccgagcccagctctcctgtctcctccacagccaggccctgcacgcccacctcctcggacacaggtgacagggttaccctccagtttgagc

SEQ ID NO: 231361 - DNA, 120 bp, Artificial Sequence
  ENSG00000119522_30 (sequence is synthesized)
tcatctgcacgagacacaggtagcttggggttgaagttaggactcctcctgggctggaggatttacctggtggggcacttccagactgtttctagcaatatacacacacgttctttcctg

SEQ ID NO: 231362 - DNA, 120 bp, Artificial Sequence
  ENSG00000119522_31 (sequence is synthesized)
tgtcttcaccccaaaacttcagttgattctgacctgggaggatctggggaccagggggtcttgggctgccttgtgatacacagccccagccaccctgcacgggggctgcgagcaccagca

SEQ ID NO: 231363 - DNA, 120 bp, Artificial Sequence
  ENSG00000119522_32 (sequence is synthesized)
actttgatttatagaaggaaaatggaaacccccatctgagtattttgggaggagcccccagccctcatccagctctggcacgctgatacctccaggtactcccctcactgtcaaagctgg

SEQ ID NO: 231364 - DNA, 120 bp, Artificial Sequence
  ENSG00000119522_33 (sequence is synthesized)
ggctcagcctcttgtcatctggagctttgtgggcaaagctgagaagctgcaacccagatttcaacccaaaaaggtcaagctgaatgcctcagactgatgtggaaggcagctggccttcct

SEQ ID NO: 231365 - DNA, 120 bp, Artificial Sequence
  ENSG00000119522_34 (sequence is synthesized)
gggttggaacgaggcagtggccctgagccccttctccagggccaggtagaaaggacaaacttggtctctgcctcggggaagcaggaggagggctagaagccagtccctccccacctgccc

SEQ ID NO: 231366 - DNA, 120 bp, Artificial Sequence
  ENSG00000119522_35 (sequence is synthesized)
agagctccaggccagcacagaaattcctgaggccaacgtcaccaaagttagattgaatgtttattatctttctttttcctttttaccttattgatttgatgaatcttgaaatggattcat

SEQ ID NO: 231367 - DNA, 120 bp, Artificial Sequence
  ENSG00000119522_36 (sequence is synthesized)
ttccataaaccaagttaaagtatggcccgaccatttaagaaaacaaccatctgagacacgcaggaaattgtgagcatttcgacccgagctctcatttcctatttgtgaagggtcagacac

SEQ ID NO: 231368 - DNA, 120 bp, Artificial Sequence
  ENSG00000119522_37 (sequence is synthesized)
agtctacccaggggtgtctgggggacaagggggtctctggagatgtcacccagggagccccctctatgtctgagaggctgccactgctgcacatgctcagtgaggcttggcggccatcct

SEQ ID NO: 231369 - DNA, 120 bp, Artificial Sequence
  ENSG00000119522_38 (sequence is synthesized)
ggcacatggctcttcctgggtcaaccgtgacctgtctggctcaggaatgggctctggctgctgggggagccgtgtcactcctgggccatgggggcacctcctgggcacttaggtgtttca

SEQ ID NO: 231370 - DNA, 120 bp, Artificial Sequence
  ENSG00000119522_39 (sequence is synthesized)
gcatagattccagtttcgcaccctgggcagacccccaggccccatccgggatagggcagaggaggtgctggcggccccagggaaggagggtgtgtaccccaaggccccctggctgtgctg

SEQ ID NO: 231371 - DNA, 120 bp, Artificial Sequence
  ENSG00000119522_40 (sequence is synthesized)
aggggctggggtgagcgctccatgttcacatgagcactgctgcctcttcacttgtgggactttttgcaaacccaaggatgaactttgtgtgcattcaataaaatcatcttggggaagagg

SEQ ID NO: 231372 - DNA, 120 bp, Artificial Sequence
  ENSG00000119522_41 (sequence is synthesized)
caccagctacactccacatcctacagaaaagcattacccattttgcggccaagttcccgacgagaggctggacctcttcatcacattgacttacgccgttgcttttccagactgggcaga

SEQ ID NO: 231373 - DNA, 120 bp, Artificial Sequence
  ENSG00000119522_42 (sequence is synthesized)
ggggctgacttcgcagtgtgtgccaaagagccggtgtctgataatcccattttcctgcttatcacctgaactgtgtcagtatcacttttagttttgttggttggttggtttgttgtttgt

SEQ ID NO: 231374 - DNA, 120 bp, Artificial Sequence
  ENSG00000119522_43 (sequence is synthesized)
ttaatatgccctgttttctacttctgttggaaaatatttggggttgaaataaaccagtgggagcatgggagccagtttggtggttggcaaactaccagtgatagaaaacaaatgacaggt

SEQ ID NO: 231375 - DNA, 120 bp, Artificial Sequence
  ENSG00000119522_44 (sequence is synthesized)
tttctgtgagcgtacgtcacagtggctcgggcccacaaggagacagaggggtacgtttcaggacatcattccaagggtttctgttcacgtttgtttaacgaggaaggggaagttgttctc

SEQ ID NO: 231376 - DNA, 120 bp, Artificial Sequence
  ENSG00000119522_45 (sequence is synthesized)
ccataataccagtggtatttctagtgcaacccgggtgtttttctacgcctcttcccatgctgcttccccacccccccactgtgctccgccccttccaaatgccatgtcacaacagcactt

SEQ ID NO: 231377 - DNA, 120 bp, Artificial Sequence
  ENSG00000119522_46 (sequence is synthesized)
ggatgtgtttttctcaactgtcatcagctccagctggcaggaccaacttcttgaaacacaggaagcatccagcggaaaatattttaataaaacagactcctcataaaatattgttcgggg

SEQ ID NO: 231378 - DNA, 120 bp, Artificial Sequence
  ENSG00000119522_47 (sequence is synthesized)
gagggggaagaaaccggctccaccaatctgtcggcattgtattgggagatgtgagaagccaggctggcagcaggggcccgatcctaatgggcctttgtcaggtggtggttccgtgttggg

SEQ ID NO: 231379 - DNA, 120 bp, Artificial Sequence
  ENSG00000119522_48 (sequence is synthesized)
cacacggacttggtgcctggccctttaatctggcctgggttttcttgaatcacagatcttcatctccactgggaatatcaaagtgcttgggaaacttagaagactggggcagcagaaggg

SEQ ID NO: 231380 - DNA, 120 bp, Artificial Sequence
  ENSG00000119522_49 (sequence is synthesized)
gcagcagaaggggatgcaggatctttgaagtggagaggagagattcattcctcctgacttcttgccccaactctcacttccaattgcacattaaataatcccagcactttgggaggccaa

SEQ ID NO: 231381 - DNA, 78 bp, Artificial Sequence
  ENSG00000119522_50 (sequence is synthesized)
ccgtgagctgagatcacaccacctaaaataaccagctttgtggacagcaagatggggctgattaagagtaagactgtc

SEQ ID NO: 231382 - DNA, 120 bp, Artificial Sequence
  ENSG00000119522_51 (sequence is synthesized)
tgtggacagcaagatggggctgattaagagtaagactgtctcctggagtagctgagcatcctgggactcatcagggcccagaaacactagccagccactctctggccagtccacccctga

SEQ ID NO: 231383 - DNA, 120 bp, Artificial Sequence
  ENSG00000119522_52 (sequence is synthesized)
agttcatttcttccttcccagctgatgtccatccctccatcattccatctgtccattcgtgcattcattcattcagcaagtatctttgaaaacctactaggcgcaagcacggacgatttt

SEQ ID NO: 231384 - DNA, 120 bp, Artificial Sequence
  ENSG00000119522_53 (sequence is synthesized)
tttaaaggaggccttaaaagggagtccccatgctgactcttggttgacttgcattttcccaaaatgaaattttcctgtgtcaaattttctttctgaatcaatgataggtttcctagtccc

SEQ ID NO: 231385 - DNA, 120 bp, Artificial Sequence
  ENSG00000119522_54 (sequence is synthesized)
ttaaaactggccgttggcaattggaagaagacttttttgaagatttgtgggggaaacattccctttacttttcaggtaacattacttggttaatattcagttactaaatctcttcaagaa

SEQ ID NO: 231386 - DNA, 120 bp, Artificial Sequence
  ENSG00000119522_55 (sequence is synthesized)
aggcgttgtgaatccccaaaaggagcaagacagaagacagcatttctcagatttgcctggctggggaacctccttttttcccttcacacaatgcgtctcccaggatggtgtttctcagca

SEQ ID NO: 231387 - DNA, 120 bp, Artificial Sequence
  ENSG00000119522_56 (sequence is synthesized)
gacaccctgtgagatgccggccttccactgagatgatttcatctgccaagtgccaagactgggtggacatttttttaagtcctctctggaaacaaatgtaggcgatggactgggaggggg

SEQ ID NO: 231388 - DNA, 120 bp, Artificial Sequence
  ENSG00000119522_57 (sequence is synthesized)
agaggctggaggcagggaaacctgctgatggtaatggttgctaatgtctgttggtggcactgtgcaaagaacctgacgtccatcatctcgttgaatcttcctaacaggacactcgggtag

SEQ ID NO: 231389 - DNA, 120 bp, Artificial Sequence
  ENSG00000119522_58 (sequence is synthesized)
gcagtgctgttacctgtacttcacagatgaggacagtaaggcttggaatggtcaaatcgtgggcctggagtaacccagggagtaaatgggagaactggggttctctccaaaactgtctga

SEQ ID NO: 231390 - DNA, 120 bp, Artificial Sequence
  ENSG00000119522_59 (sequence is synthesized)
cccctagaggctgcctcccgagcgctctggtgcactgccacccagcaggaatggaaatagcccaagccagaggtgacaagcagtgaagacagtggggctggagaagatggttcccccgaa

SEQ ID NO: 231391 - DNA, 120 bp, Artificial Sequence
  ENSG00000119522_60 (sequence is synthesized)
gtagaaaggccaagcataagagaagcagtattgtggggagtggtgtaggagagctgggtgtctagacagggtagcagcctgtgcaccggtggagggggtgggctcccctctccctgatca

SEQ ID NO: 231392 - DNA, 120 bp, Artificial Sequence
  ENSG00000119522_61 (sequence is synthesized)
cctcttcctcttgatgaatggtgtgaattgaggggtgggggggctgttcccctttcccccacacacttcctgtaagccaggaaggggaaaaaacatggtggccttgcccatccctaggca

SEQ ID NO: 231393 - DNA, 120 bp, Artificial Sequence
  ENSG00000119522_62 (sequence is synthesized)
gcacccccaactcccgggtagctgtcagctgaagggtcaccaagcatgggtcagccctcacgcccagctaatggcataggatctgggaagccacggtgtcattctatcccatcgtgttct

SEQ ID NO: 231394 - DNA, 120 bp, Artificial Sequence
  ENSG00000119522_63 (sequence is synthesized)
ccatgtgccgccagggaaccctccaccaagtccctggacccgctttcccctcaggctgccccgacaggttccatgcagagcaccagggacccagggacaactgggacacaggccctgccc

SEQ ID NO: 231395 - DNA, 120 bp, Artificial Sequence
  ENSG00000119522_64 (sequence is synthesized)
tccaggagtagtggggcaggttcagaaaacaaattctaaggcagatttgagatctgaagtgtcactcccactcagtagagccctatatcagcactgtccaagaaaaacataatgggagct

SEQ ID NO: 231396 - DNA, 120 bp, Artificial Sequence
  ENSG00000119522_65 (sequence is synthesized)
tcatacgggagtcacatgtggaattctgaatgtgaaacataaacaggtgaaattgattttaatataatgaacccaatatatccaaaatattatttcaacatgtaatcaatctaaaaatta

SEQ ID NO: 231397 - DNA, 120 bp, Artificial Sequence
  ENSG00000119522_66 (sequence is synthesized)
gcactctgcttaaggtgcctctgttagctaagcatctcattagaacactttagcatcccgggcccttctttgcaccttcaaataaaaggcaacaagcgaagtcttaaaaaaaaaatcaat

SEQ ID NO: 231398 - DNA, 120 bp, Artificial Sequence
  ENSG00000119522_67 (sequence is synthesized)
taggagttctttattaatgtacttcctgaaaatcaatatcaggagtcgtgcttctgagagtaaacacccgtgctacaattctagagattcaattttttaagcaactgttttcaactacct

SEQ ID NO: 231399 - DNA, 120 bp, Artificial Sequence
  ENSG00000119522_68 (sequence is synthesized)
gagcattagaaaaattgtctatttaattttttttcccttaagtaaaacattccactctgtatagaaactaaaattttgtatccccttcctacttgtaattatatttttggttaaaaaaga

SEQ ID NO: 231400 - DNA, 120 bp, Artificial Sequence
  ENSG00000119522_69 (sequence is synthesized)
agtagctggtggttctgccctccccacctaacactgcctgagccattctccctcagcctgactaaacctccagagtttggaccctcctgcctggcaaaagaaaactgggaattgggtttt

SEQ ID NO: 231401 - DNA, 120 bp, Artificial Sequence
  ENSG00000119522_70 (sequence is synthesized)
tcagcttccctctctgtgtggcatgaacttgagcttgcattctctgggcttctcttgctttttcgtgaataagtttggtgacttgcagatcagagccataggtagcaagggggccactgt

SEQ ID NO: 231402 - DNA, 120 bp, Artificial Sequence
  ENSG00000119522_71 (sequence is synthesized)
gtgctgcgtgtgctgcgtgtgcattatttgagcaagtctcctagggtgagcaatgggttggaagccttcctccagacgcctgttcctcacaaacgaagcagaagtccgggggcaagggtc

SEQ ID NO: 231403 - DNA, 120 bp, Artificial Sequence
  ENSG00000119522_72 (sequence is synthesized)
tcgttcccgccagatcttggtctggagatgcatttgtaccttcccaggggtggaggctatgtccagggagtatggagccagctcatatggatacaggtaccgctgccctgccaggccttc

SEQ ID NO: 231404 - DNA, 120 bp, Artificial Sequence
  ENSG00000119522_73 (sequence is synthesized)
catgattttacacatgtggggatttggcctcccaggtagaaagaaaaggacagggaaagaacagagtatactttctgattattttatgtttcttatgctcttattagatacagttataat

SEQ ID NO: 231405 - DNA, 120 bp, Artificial Sequence
  ENSG00000119522_74 (sequence is synthesized)
tattgacccagagctggagctcagagacgtgagagaacctgcccagggccacttcaccagcttggaaacccaagcccagacacctcctctcgagcccacaccagctctcaaaacaagcag

SEQ ID NO: 231406 - DNA, 120 bp, Artificial Sequence
  ENSG00000119522_75 (sequence is synthesized)
tgaaactccctagattttactgtataatgtcaatggactcattatttgtacaacagctgatgtatttaggacttgttgattcacttaattggtaactgtactacattcataacttcaaca

SEQ ID NO: 231407 - DNA, 120 bp, Artificial Sequence
  ENSG00000119522_76 (sequence is synthesized)
actgaaaacaataggtcagtgtctgctgtttatgcataaatagtcacatcggagcaggatatgtctgaatggcagaatatgttagtctgaggaggaatctggcatgtgaatggctccatt

SEQ ID NO: 231408 - DNA, 120 bp, Artificial Sequence
  ENSG00000119522_77 (sequence is synthesized)
cctggtaaagcccttgcgacactatgcggtcttcctctccgaagactcctctgatgatgaatgccagcgggaagagggcccgagctctggcttcaccgagagctttttcttctccgctcc

SEQ ID NO: 231409 - DNA, 120 bp, Artificial Sequence
  ENSG00000119522_78 (sequence is synthesized)
cgtttatccaaatgttcagaatgtacctgtatggcttttccaactcactccttcttggggctctccccctgtacctcctctaggtgcgcccacctcgtccacatgttgttaagagaccaa

SEQ ID NO: 231410 - DNA, 120 bp, Artificial Sequence
  ENSG00000119523_0 (sequence is synthesized)
gcagaagacccccatcagggtgcggggtgcagttgcggctccagggccatggcggaggagcagggccgggaacgggactcggttcccaagccgtcggtgctgttcctccacccagacctg

SEQ ID NO: 231411 - DNA, 120 bp, Artificial Sequence
  ENSG00000119523_1 (sequence is synthesized)
ggcgtgggcggcgctgagcggctggtgttggacgcggcgctggcgctgcaggcgcgcgggtgtagcgtgaagatctggacagcgcactacgacccgggccactgtttcgccgagagccgc

SEQ ID NO: 231412 - DNA, 120 bp, Artificial Sequence
  ENSG00000119523_2 (sequence is synthesized)
gagctaccggtgcgctgtgccggggactggctgccgcgaggcctgggctggggcggccgcggcgccgccgtctgcgcctacgtgcgcatggttttcctggcgctctacgtgctgttcctc

SEQ ID NO: 231413 - DNA, 120 bp, Artificial Sequence
  ENSG00000119523_3 (sequence is synthesized)
gccgacgaggagttcgacgtggtagtgtgcgaccaggtgtctgcctgtatcccagtgttcaggctggctagacggcggaagaagatcctattttactgtcacttcccagatctgcttctc

SEQ ID NO: 231414 - DNA, 120 bp, Artificial Sequence
  ENSG00000119523_4 (sequence is synthesized)
accaagagagattcttttcttaaacgactatacagggccccaattgactggatagaggaatacaccacaggcatggcagactgcatcttagtcaacagccagttcacagctgctgttttt

SEQ ID NO: 231415 - DNA, 120 bp, Artificial Sequence
  ENSG00000119523_5 (sequence is synthesized)
aaggaaacattcaagtccctgtctcacatagaccctgatgtcctctatccatctctaaatgtcaccagctttgactcagttgttcctgaaaagctggatgacctagtccccaaggggaaa

SEQ ID NO: 231416 - DNA, 120 bp, Artificial Sequence
  ENSG00000119523_6 (sequence is synthesized)
aaattcctgctgctctccatcaacagatacgaaaggaagaaaaatctgactttggcactggaagccctagtacagctgcgtggaagattgacatcccaagattgggagagggttcatctg

SEQ ID NO: 231417 - DNA, 120 bp, Artificial Sequence
  ENSG00000119523_7 (sequence is synthesized)
atcgtggcaggtggttatgacgagagagtcctggagaatgtggaacattatcaggaattgaagaaaatggtccaacagtccgaccttggccagtatgtgaccttcttgaggtctttctca

SEQ ID NO: 231418 - DNA, 120 bp, Artificial Sequence
  ENSG00000119523_8 (sequence is synthesized)
gacaaacagaaaatctccctcctccacagctgcacgtgtgtgctttacacaccaagcaatgagcactttggcattgtccctctggaagccatgtacatgcagtgcccagtcattgctgtt

SEQ ID NO: 231419 - DNA, 120 bp, Artificial Sequence
  ENSG00000119523_9 (sequence is synthesized)
aattcgggtggacccttggagtccattgaccacagtgtcacagggtttctgtgtgagcctgacccggtgcacttctcagaagcaatagaaaagttcatccgtgaaccttccttaaaagcc

SEQ ID NO: 231420 - DNA, 120 bp, Artificial Sequence
  ENSG00000119523_10 (sequence is synthesized)
accatgggcctggctggaagagccagagtgaaggaaaaattttcccctgaagcatttacagaacagctctaccgatatgttaccaaactgctggtataatcagattgtttttaagatctc

SEQ ID NO: 231421 - DNA, 120 bp, Artificial Sequence
  ENSG00000119523_11 (sequence is synthesized)
agaaacctagaatctaatgcagaagagatcttttaaaaaataaacttgagtcttgaatgtgagccactttcctatataccacacctccctgtccacttttcagaaaaaccatgtctttta

SEQ ID NO: 231422 - DNA, 120 bp, Artificial Sequence
  ENSG00000119523_12 (sequence is synthesized)
tgctataatcattccaaattttgccagtgttaagttacaaatgtggtgtcattccatgttcagcagagtattttaattatattttctcgggattattgctcttctgtctataaattttga

SEQ ID NO: 231423 - DNA, 120 bp, Artificial Sequence
  ENSG00000119523_13 (sequence is synthesized)
atgatactgtgccttaattggttttcatagtttaagtgtgtatcattatcaaagttgattaatttggcttcatagtataatgagagcagggctattgtagttcccagattcaatccaccg

SEQ ID NO: 231424 - DNA, 120 bp, Artificial Sequence
  ENSG00000119523_14 (sequence is synthesized)
aagtgttcactgtcatctgttagggaatttttgtttgtcctgtctttgcctggatccatagcgagagtgctctgtattttttttaagataatttgtatttttgcacactgagatataata

SEQ ID NO: 231425 - DNA, 120 bp, Artificial Sequence
  ENSG00000119523_15 (sequence is synthesized)
aaaggtgtttatcataaaaaagaaacagtattagattttggtctccataatctattttggtattgttacgaacatggatatgacaaccaaactggaaatcagaacactagggtaaagtgg

SEQ ID NO: 231426 - DNA, 120 bp, Artificial Sequence
  ENSG00000119523_16 (sequence is synthesized)
atattgaaatgaagcaagaatattgtcacacatgtgttgtgcatcttgtttagggtatatttcttaatgtcatctaggtcattagttttgttaatatttgtgttgtcttgaccaagctcc

SEQ ID NO: 231427 - DNA, 120 bp, Artificial Sequence
  ENSG00000119523_17 (sequence is synthesized)
tactaagtataggacacaaatgttttttatcttccaaggcctggctcaaatgccactgctgcaaagctttctttgaccctctggccacctcccaagccagaagttatcttccccctccat

SEQ ID NO: 231428 - DNA, 120 bp, Artificial Sequence
  ENSG00000119523_18 (sequence is synthesized)
gtactctagccttttcatgacactgatattttcgtgacactgacttatagttcactgtttacctgttggtctaacagcaaatcataaacagtagttttcaacatacttctaaggctaaat

SEQ ID NO: 231429 - DNA, 120 bp, Artificial Sequence
  ENSG00000119523_19 (sequence is synthesized)
tcatttccagaagtagcaaagcttactagccaaaggctccacatttatcaactcttaagagctagacttgagagcctaacagcctatatgattttgtgtaaattgatctctatacctcag

SEQ ID NO: 231430 - DNA, 120 bp, Artificial Sequence
  ENSG00000119523_20 (sequence is synthesized)
cttcttcatctgcaaagtgagataattgtactattctactttcctcatagtgcggttataacagattatgataatattacaaagtacttaatacttggcatatagtatatatattagcta

SEQ ID NO: 231431 - DNA, 120 bp, Artificial Sequence
  ENSG00000119523_21 (sequence is synthesized)
ttagtattttgcaatttggggatattgaaaattagaaattgcatgttagttcatgctgcactaccatattgttcttttggggctcttcaatgggtgaaattccattttacagtttatcat

SEQ ID NO: 231432 - DNA, 120 bp, Artificial Sequence
  ENSG00000119523_22 (sequence is synthesized)
gtgcatctgtatcacaggagtattttggcaaaatgattctgtaccaaaaaggagtactataaaatgagggtgccaaatatattgagtcttttatgggattaaaagttctgttgcattcca

SEQ ID NO: 231433 - DNA, 120 bp, Artificial Sequence
  ENSG00000119523_23 (sequence is synthesized)
gccgacgaggagttcgacgtggtagtgtgcgaccaggccatttgcatcccactgtccttgtgttcggagccaggccacaccgtcctcagcagtgtcatgtgttaaaaacgccaagctgaa

SEQ ID NO: 231434 - DNA, 120 bp, Artificial Sequence
  ENSG00000119535_0 (sequence is synthesized)
gaaaagaggcttagggccgggtgagccttccagccagggcctgcctccaagtgatgctcccccagggcagggggcataaggatggcacccagccaggtgggagcctgggccctgcccagc

SEQ ID NO: 231435 - DNA, 120 bp, Artificial Sequence
  ENSG00000119535_1 (sequence is synthesized)
ctcaaagctttgagctcaggaaatccggaggcaggggagggggacatcgttgccacattccccagccctttaagacccccaaggcaggaaggctgcccgggcctcaccagcttccctcac

SEQ ID NO: 231436 - DNA, 120 bp, Artificial Sequence
  ENSG00000119535_2 (sequence is synthesized)
aggctccttcctgggaggaaggggctgcctgtgccctcgaaggcgcaagggagggcaggagggaggctcggaaggtgttgcaatccccagcccccgggcctgtcagaggctgagccatta

SEQ ID NO: 231437 - DNA, 120 bp, Artificial Sequence
  ENSG00000119535_3 (sequence is synthesized)
acgacagagctcggggagagaagctggactgcagctggtttcaggaacttctcttgacgagaagagagaccaaggaggccaagcaggggctgggccagaggtgccaacatggggaaactg

SEQ ID NO: 231438 - DNA, 120 bp, Artificial Sequence
  ENSG00000119535_4 (sequence is synthesized)
aggctcggctcggaaaggtgaagtaacttgtccaagatcacaaagctggtgaacatcaagttggtgctatggcaaggctgggaaactgcagcctgacttgggctgccctgatcatcctgc

SEQ ID NO: 231439 - DNA, 120 bp, Artificial Sequence
  ENSG00000119535_5 (sequence is synthesized)
tgctccccggaagtctggaggagtgcgggcacatcagtgtctcagcccccatcgtccacctgggggatcccatcacagcctcctgcatcatcaagcagaactgcagccatctggacccgg

SEQ ID NO: 231440 - DNA, 120 bp, Artificial Sequence
  ENSG00000119535_6 (sequence is synthesized)
agccacagattctgtggagactgggagcagagcttcagcccgggggcaggcagcagcgtctgtctgatgggacccaggaatctatcatcaccctgccccacctcaaccacactcaggcct

SEQ ID NO: 231441 - DNA, 120 bp, Artificial Sequence
  ENSG00000119535_7 (sequence is synthesized)
ttctctcctgctgcctgaactggggcaacagcctgcagatcctggaccaggttgagctgcgcgcaggctaccctccagccataccccacaacctctcctgcctcatgaacctcacaacca

SEQ ID NO: 231442 - DNA, 120 bp, Artificial Sequence
  ENSG00000119535_8 (sequence is synthesized)
gcagcctcatctgccagtgggagccaggacctgagacccacctacccaccagcttcactctgaagagtttcaagagccggggcaactgtcagacccaaggggactccatcctggactgcg

SEQ ID NO: 231443 - DNA, 120 bp, Artificial Sequence
  ENSG00000119535_9 (sequence is synthesized)
tgcccaaggacgggcagagccactgctgcatcccacgcaaacacctgctgttgtaccagaatatgggcatctgggtgcaggcagagaatgcgctggggaccagcatgtccccacaactgt

SEQ ID NO: 231444 - DNA, 120 bp, Artificial Sequence
  ENSG00000119535_10 (sequence is synthesized)
gtcttgatcccatggatgttgtgaaactggagccccccatgctgcggaccatggaccccagccctgaagcggcccctccccaggcaggctgcctacagctgtgctgggagccatggcagc

SEQ ID NO: 231445 - DNA, 120 bp, Artificial Sequence
  ENSG00000119535_11 (sequence is synthesized)
caggcctgcacataaatcagaagtgtgagctgcgccacaagccgcagcgtggagaagccagctgggcactggtgggccccctccccttggaggcccttcagtatgagctctgcgggctcc

SEQ ID NO: 231446 - DNA, 120 bp, Artificial Sequence
  ENSG00000119535_12 (sequence is synthesized)
tcccagccacggcctacaccctgcagatacgctgcatccgctggcccctgcctggccactggagcgactggagccccagcctggagctgagaactaccgaacgggcccccactgtcagac

SEQ ID NO: 231447 - DNA, 120 bp, Artificial Sequence
  ENSG00000119535_13 (sequence is synthesized)
tggacacatggtggcggcagaggcagctggaccccaggacagtgcagctgttctggaagccagtgcccctggaggaagacagcggacggatccaaggttatgtggtttcttggagaccct

SEQ ID NO: 231448 - DNA, 120 bp, Artificial Sequence
  ENSG00000119535_14 (sequence is synthesized)
ggcctataactcagccgggacctctcgtcccactccggtggtcttctcagaaagcagaggcccagctctgaccagactccatgccatggcccgagaccctcacagcctctgggtaggctg

SEQ ID NO: 231449 - DNA, 120 bp, Artificial Sequence
  ENSG00000119535_15 (sequence is synthesized)
ggagccccccaatccatggcctcagggctatgtgattgagtggggcctgggcccccccagcgcgagcaatagcaacaagacctggaggatggaacagaatgggagagccacggggtttct

SEQ ID NO: 231450 - DNA, 120 bp, Artificial Sequence
  ENSG00000119535_16 (sequence is synthesized)
gctgaaggagaacatcaggccctttcagctctatgagatcatcgtgactcccttgtaccaggacaccatgggaccctcccagcatgtctatgcctactctcaagaaatggctccctccca

SEQ ID NO: 231451 - DNA, 120 bp, Artificial Sequence
  ENSG00000119535_17 (sequence is synthesized)
tgccccagagctgcatctaaagcacattggcaagacctgggcacagctggagtgggtgcctgagccccctgagctggggaagagcccccttacccactacaccatcttctggaccaacgc

SEQ ID NO: 231452 - DNA, 120 bp, Artificial Sequence
  ENSG00000119535_18 (sequence is synthesized)
tcagaaccagtccttctccgccatcctgaatgcctcctcccgtggctttgtcctccatggcctggagcccgccagtctgtatcacatccacctcatggctgccagccaggctggggccac

SEQ ID NO: 231453 - DNA, 120 bp, Artificial Sequence
  ENSG00000119535_19 (sequence is synthesized)
caacagtacagtcctcaccctgatgaccttgaccccagaggggtcggagctacacatcatcctgggcctgttcggcctcctgctgttgctcacctgcctctgtggaactgcctggctctg

SEQ ID NO: 231454 - DNA, 120 bp, Artificial Sequence
  ENSG00000119535_20 (sequence is synthesized)
ttgcagccccaacaggaagaatcccctctggccaagtgtcccagacccagctcacagcagcctgggctcctgggtgcccacaatcatggaggagctgcccggacccagacagggacagtg

SEQ ID NO: 231455 - DNA, 120 bp, Artificial Sequence
  ENSG00000119535_21 (sequence is synthesized)
gctggggcagacatctgaaatgagccgtgctctcaccccacatccttgtgtgcaggatgccttccagctgcccggccttggcacgccacccatcaccaagctcacagtgctggaggagga

SEQ ID NO: 231456 - DNA, 120 bp, Artificial Sequence
  ENSG00000119535_22 (sequence is synthesized)
tgaaaagaagccggtgccctgggagtcccataacagctcagagacctgtggcctccccactctggtccagacctatgtgctccagggggacccaagagcagtttccacccagccccaatc

SEQ ID NO: 231457 - DNA, 120 bp, Artificial Sequence
  ENSG00000119535_23 (sequence is synthesized)
ccagtctggcaccagcgatcaggtcctttatgggcagctgctgggcagccccacaagcccagggccagggcactatctccgctgtgactccactcagcccctcttggcgggcctcacccc

SEQ ID NO: 231458 - DNA, 120 bp, Artificial Sequence
  ENSG00000119535_24 (sequence is synthesized)
cagccccaagtcctatgagaacctctggttccaggccagccccttggggaccctggtaaccccagccccaagccaggaggacgactgtgtctttgggccactgctcaacttccccctcct

SEQ ID NO: 231459 - DNA, 120 bp, Artificial Sequence
  ENSG00000119535_25 (sequence is synthesized)
gcaggggatccgggtccatgggatggaggcgctggggagcttctagggcttcctggggttcccttcttgggcctgcctcttaaaggcctgagctagctggagaagaggggagggtccata

SEQ ID NO: 231460 - DNA, 120 bp, Artificial Sequence
  ENSG00000119535_26 (sequence is synthesized)
agcccatgactaaaaactaccccagcccaggctctcaccatctccagtcaccagcatctccctctcctcccaatctccataggctgggcctcccaggcgatctgcatactttaaggacca

SEQ ID NO: 231461 - DNA, 120 bp, Artificial Sequence
  ENSG00000119535_27 (sequence is synthesized)
gatcatgctccatccagccccacccaatggccttttgtgcttgtttcctataacttcagtattgtaaactagtttttggtttgcagtttttgttgttgtttatagacactcttgggtgta

SEQ ID NO: 231462 - DNA, 120 bp, Artificial Sequence
  ENSG00000119535_28 (sequence is synthesized)
ctgtgagtctatcctcagttcccccacagccccagaaggcctggaagggggtgctcagctgccacggaggcagctttaccatccaggcctatgctgaccgtacacccctcccagccgcca

SEQ ID NO: 231463 - DNA, 120 bp, Artificial Sequence
  ENSG00000119535_29 (sequence is synthesized)
gggggctgggcagagatggctgtttggagggtaccccacccaaaggatgctgattttgagagtagctggggactgactttgaatcccctggtcggagggaggagacccagccttcccaac

SEQ ID NO: 231464 - DNA, 120 bp, Artificial Sequence
  ENSG00000119535_30 (sequence is synthesized)
agacttccacaggcaaaccaccacccaagaggaatggtgagacgacccgggctggtcatcctggaaaaggccagtgaggcgcagatcttgtccgcaaatctctaccaagctgtcagaagc

SEQ ID NO: 231465 - DNA, 120 bp, Artificial Sequence
  ENSG00000119535_31 (sequence is synthesized)
aacccatgggtcctatgcagccttggtgggcagcaaagggatcaggatggaagctacaaggggacaggtttcatcctgaaataaagaagcccaggcagagcttggtttccaaccatggaa

SEQ ID NO: 231466 - DNA, 120 bp, Artificial Sequence
  ENSG00000119535_32 (sequence is synthesized)
actctgtcttgagaggtagagaacttcccatccccaggggtatgcaagctaaagccaggattgataaagatgctgtgcagcaggggttggcaaactttttctgacagtaatgtttaggct

SEQ ID NO: 231467 - DNA, 120 bp, Artificial Sequence
  ENSG00000119535_33 (sequence is synthesized)
gcatccccatcagtaaaacgggcctaagaacacctgagagaggacagaaagcattgcgggcaaagtgtatgttgatttgtttgtttatttatttatcaaaaaaaattcatcggccgggcg

SEQ ID NO: 231468 - DNA, 120 bp, Artificial Sequence
  ENSG00000119535_34 (sequence is synthesized)
ctccagcctgggtgacagagcgaaactccttctcaaaataataataataataaatattcaccaaggtcctactctgtactaggcactgggaatacagtaataagcaaacagccaaggtct

SEQ ID NO: 231469 - DNA, 120 bp, Artificial Sequence
  ENSG00000119535_35 (sequence is synthesized)
ggaatacagtaataagcaaacagccaaggtctgctggcctcacagaatttatagtctagctggagtgatagataagtaaataatcataagactctataattatgaaggataataagagct

SEQ ID NO: 231470 - DNA, 120 bp, Artificial Sequence
  ENSG00000119535_36 (sequence is synthesized)
ttgaggaagtacagggaccttggcctcctccagttcgttagtgcctggtctggtttcttcaagatgcctaagcgttaaccaggtgaaacaggggtgggagagagaaagaagagtccctcc

SEQ ID NO: 231471 - DNA, 120 bp, Artificial Sequence
  ENSG00000119535_37 (sequence is synthesized)
gagagtagaaacagcaagggagcgaggggtgtgaagtggggaagagagtgtgaggggagagggctgagcgtgatgagggagaaacagaaagagggaatgtgaaggcagccagcccaggag

SEQ ID NO: 231472 - DNA, 120 bp, Artificial Sequence
  ENSG00000119535_38 (sequence is synthesized)
acatcgagctgtgctgggccacaggagtgagcacctgcagagcccagcagagatggccgcagtgacaggagggccagggggcccaggagttaggaggagaggatccagaaagggggcttt

SEQ ID NO: 231473 - DNA, 120 bp, Artificial Sequence
  ENSG00000119535_39 (sequence is synthesized)
gatggggaaactgaggctcggctcggaaaggtgaagtaacttgtccaagatcacaaagctgggataaattgaccctccagtggacagctctgagaagtgttctacatggctctttggaag

SEQ ID NO: 231474 - DNA, 120 bp, Artificial Sequence
  ENSG00000119535_40 (sequence is synthesized)
gttccagcaggatagagccccagttgtccatagaggtgaacatcaagttggtgctatggcaaggctgggaaactgcagcctgacttgggctgccctgatcatcctgctgctccccggaag

SEQ ID NO: 231475 - DNA, 120 bp, Artificial Sequence
  ENSG00000119535_41 (sequence is synthesized)
aaggctctgcctggtccccagcaatcagaagtatagggaacattgccttcctaccatacttccagccctggagaggatctctcccaatcccctggcttacactggatccctacagctgga

SEQ ID NO: 231476 - DNA, 120 bp, Artificial Sequence
  ENSG00000119535_42 (sequence is synthesized)
cagaaatcaggtgctgggatagaaattgagtagggagttggcacaattcaaggagcaaacctggcaaaaatcaaaccatttcccagacaaaaataaggtgttatatgtaacagaaattgg

SEQ ID NO: 231477 - DNA, 79 bp, Artificial Sequence
  ENSG00000119535_43 (sequence is synthesized)
acagctgggaggccagggcaggcagatcccctgagttcaagagtttgagaccagcctaggcaaccttgtctctacagaa

SEQ ID NO: 231478 - DNA, 120 bp, Artificial Sequence
  ENSG00000119535_44 (sequence is synthesized)
ggcacaggaagtcttagaaatataccaggatcatgtaattaataagcaatagaaccagaatttaaacctaggcagtctagttccaacatccacactcatccatcacaccacactgccttt

SEQ ID NO: 231479 - DNA, 120 bp, Artificial Sequence
  ENSG00000119535_45 (sequence is synthesized)
cagagcaataatgtgccattgaagtgctgcgatggagatggggtagcagaatcagatttgaattgtgaaaagattgctgtggctatgggttcttatcactctaatcactgcttgcaccat

SEQ ID NO: 231480 - DNA, 120 bp, Artificial Sequence
  ENSG00000119535_46 (sequence is synthesized)
ccttggggagggcactggggagttaacagtctccatctggtggtgtgctggtgctggcttgcaaaaactaattgtgcacatctcttcccaactccccgatcaatgatgtcacatcaatag

SEQ ID NO: 231481 - DNA, 120 bp, Artificial Sequence
  ENSG00000119535_47 (sequence is synthesized)
gctgaaatcagctacagtgagagcacttacaccgcggaaaggcacacactacaaaccagggtctgcttttctctgccaagctggctgataaacggttaccagcacatcactatctctgtg

SEQ ID NO: 231482 - DNA, 120 bp, Artificial Sequence
  ENSG00000119535_48 (sequence is synthesized)
tcacccccgtagcctctcgaagtctccgtccccatccttccatttccagcccccatatcttgaagggtgagacaggaaggtgaggcctctgagtctaggagtacaaaggcctagattata

SEQ ID NO: 231483 - DNA, 120 bp, Artificial Sequence
  ENSG00000119535_49 (sequence is synthesized)
ggggagggaggggatccccaaaatgggcagacactgagaggaatggagagggaaacacagaactagcgacagacaagaagacactggaagacctagagacagaggcacagaagagggaca

SEQ ID NO: 231484 - DNA, 120 bp, Artificial Sequence
  ENSG00000119535_50 (sequence is synthesized)
gagacaaagaaaggtgcagctggagacagagaaatggggacacagacccagagacaggaagagacacagaggcaaagagacacattcagtcatgctttcagcgtgtttcctaaagcaccc

SEQ ID NO: 231485 - DNA, 120 bp, Artificial Sequence
  ENSG00000119535_51 (sequence is synthesized)
actacatgttaggcactgctctaggtactggggatacaaagcatcaaaaatgccctcagaatgttagattcaagtgggggggaaaataagatagaatttcagatagcaataagcagaaag

SEQ ID NO: 231486 - DNA, 120 bp, Artificial Sequence
  ENSG00000119535_52 (sequence is synthesized)
gagaaattaaaggaggagaagggcatagagagagaggggggaaggggagcactggctattttaatatgctggtcaagaaaggcctcactaagagggtgacaattgagcagatccttgaag

SEQ ID NO: 231487 - DNA, 120 bp, Artificial Sequence
  ENSG00000119535_53 (sequence is synthesized)
gaaatgagggagcaagccgctggatatctggagggaaaacatttcaagcagaagtaacaaccagtgcaaaggccctggggcaagagcggaaacagagacctagagagaaacaaagacaca

SEQ ID NO: 231488 - DNA, 120 bp, Artificial Sequence
  ENSG00000119535_54 (sequence is synthesized)
tagagatcgaaccacagaaacgtgtcattggcaacgtggacagatggtgaaccacagacagggagacaagagggagctaaggcagagccctctagggtgggatagggagaccttctgaca

SEQ ID NO: 231489 - DNA, 120 bp, Artificial Sequence
  ENSG00000119535_55 (sequence is synthesized)
acatggtggcggcagaggcagctggaccccaggacagtgcagctgttctggaaggtgactccctctgaaggccatccctccacctcgacacctcccgcagtccaaacagatccctacaaa

SEQ ID NO: 231490 - DNA, 120 bp, Artificial Sequence
  ENSG00000119535_56 (sequence is synthesized)
ccggggcttaggactccaacaggtctgggaggcgtggacgcatttatatgtgatttgcatgcactttgcatgtgcctagggagctgagttagcttttggacagactgtaacgcacgtcac

SEQ ID NO: 231491 - DNA, 120 bp, Artificial Sequence
  ENSG00000119535_57 (sequence is synthesized)
agtgtggttcagtgaatagttaagagcctgctgtgtccaccaacttgtttcttcctgccctccttcctagaacctagcacaagggaacagagggaaaaggggaggggggtgagaagcctg

SEQ ID NO: 231492 - DNA, 120 bp, Artificial Sequence
  ENSG00000119535_58 (sequence is synthesized)
gaccccagcctggggaggctccgtttgtatgatccatccaccccacctagaggctctccttgactcaagatgagctgcacatccccttctctttttcctcctgtgccccacagccagtgc

SEQ ID NO: 231493 - DNA, 87 bp, Artificial Sequence
  ENSG00000119535_59 (sequence is synthesized)
aaataaataaataaacaaacaaacaaaccaaaaattagctgggtgcagtgacacatgcctgtaacggagggcttgagcccaggaggt

SEQ ID NO: 231494 - DNA, 83 bp, Artificial Sequence
  ENSG00000119535_60 (sequence is synthesized)
aagaaattggacagaggacctggcataaattcggagagtgagtggcagaaatcagagagtaaatcagatgaaatcaggcctgg

SEQ ID NO: 231495 - DNA, 120 bp, Artificial Sequence
  ENSG00000119535_61 (sequence is synthesized)
ggcagaaatcagagagtaaatcagatgaaatcaggcctggtagaaatcagaaagtgaggctttagagtcaagcagagccaggttcaaatcctggctcagacacttattagcagtagatgg

SEQ ID NO: 231496 - DNA, 120 bp, Artificial Sequence
  ENSG00000119535_62 (sequence is synthesized)
aatctggattaaatccctgggaaaaatgaggcttgggcatgagtccccttggactcttttctcacccaccccacagtgtctgggaagccacaagaagtccaaccgggctcttgctctgcc

SEQ ID NO: 231497 - DNA, 120 bp, Artificial Sequence
  ENSG00000119535_63 (sequence is synthesized)
caatcatggaggaggtgagaatccaggagggagagggaaatgagatggggatgtcggcccaggctcagtgaagggacaccttctgaagccaagtactcaggccttcctgtcacttccggc

SEQ ID NO: 231498 - DNA, 120 bp, Artificial Sequence
  ENSG00000119535_64 (sequence is synthesized)
aacatctcgtccctttggactgaagcagacccaactttgaatcccacctctgtccatctcaaagcctcagtcacctccctgtgatatggaaaaactgaccatgctgagtctgaacggtgc

SEQ ID NO: 231499 - DNA, 120 bp, Artificial Sequence
  ENSG00000119535_65 (sequence is synthesized)
atggcatgtgtcaggcatgtgtgaggaacatactagtgctttgcaagtggtaccctttgtgttccaccagtaacaacagttgaatgtccccacagctgcccggacccagacagggacagt

SEQ ID NO: 231500 - DNA, 120 bp, Artificial Sequence
  ENSG00000119537_0 (sequence is synthesized)
ctgcgcgccttgcccggcggcccccgcccggccgctccgggcccctggccccgcggagcgatgctgctgctggctgccgccttcctcgtggccttcgtgctgctgctgtacatggtgtct

SEQ ID NO: 231501 - DNA, 120 bp, Artificial Sequence
  ENSG00000119537_1 (sequence is synthesized)
cttcgtgctgctgctgtacatggtgtctccgctcatcagccccaagcccctcgccctgcccggggcgcatgtggtggttacaggaggttccagtggcatcgggaagtgcattgctatcga

SEQ ID NO: 231502 - DNA, 120 bp, Artificial Sequence
  ENSG00000119537_2 (sequence is synthesized)
gtgctataaacaaggagcttttataactctggttgcacgaaatgaggataagctgctgcaggcaaagaaagaaattgaaatgcactctattaatgacaaacaggtggtgctttgcatatc

SEQ ID NO: 231503 - DNA, 120 bp, Artificial Sequence
  ENSG00000119537_3 (sequence is synthesized)
agttgatgtatctcaagactataaccaagtagagaatgtcataaaacaagcacaggagaaactgggtccagtggacatgctggtaaattgtgcaggaatggcagtgtcaggaaaatttga

SEQ ID NO: 231504 - DNA, 120 bp, Artificial Sequence
  ENSG00000119537_4 (sequence is synthesized)
agatcttgaagttagtacctttgaaaggttaatgagcatcaattacctgggcagcgtgtaccccagccgggccgtgatcaccaccatgaaggagcgccgggtgggcaggatcgtgtttgt

SEQ ID NO: 231505 - DNA, 120 bp, Artificial Sequence
  ENSG00000119537_5 (sequence is synthesized)
gtcctcccaggcaggacagttgggattattcggtttcacagcctactctgcatccaagtttgccataaggggattggcagaagctttgcagatggaggtgaagccatataatgtctacat

SEQ ID NO: 231506 - DNA, 120 bp, Artificial Sequence
  ENSG00000119537_6 (sequence is synthesized)
cacagttgcttacccaccagacacagacacacctggctttgccgaagaaaacagaacaaagcctttggagactcgacttatttcagagaccacatctgtgtgcaaaccagaacaggtggc

SEQ ID NO: 231507 - DNA, 120 bp, Artificial Sequence
  ENSG00000119537_7 (sequence is synthesized)
caaacaaattgttaaagatgccatacaaggaaatttcaacagttcccttggctcagatgggtacatgctctcggccctgacctgtgggatggctccagtaacttctattactgaggggct

SEQ ID NO: 231508 - DNA, 120 bp, Artificial Sequence
  ENSG00000119537_8 (sequence is synthesized)
ccagcaggtggtcaccatgggccttttccgcactattgctttgttttaccttggaagttttgacagcatagttcgtcgctgcatgatgcagagagaaaaatctgaaaatgcagacaaaac

SEQ ID NO: 231509 - DNA, 120 bp, Artificial Sequence
  ENSG00000119537_9 (sequence is synthesized)
tgcctaatcttcttaccccttggaagaagactgtttccaaataatttgaacagcttgctgctaaatgggacccaatttttggcctatagacacttatgtattgttttcgaatacgtcaga

SEQ ID NO: 231510 - DNA, 120 bp, Artificial Sequence
  ENSG00000119537_10 (sequence is synthesized)
ttggaccagtgctcttcaggaatgtggctgcaagcaaggggctagaagttcacctcctgacagtattattaatactatgcaaatatggaataggagaccatttgattttctaggctttgt

SEQ ID NO: 231511 - DNA, 120 bp, Artificial Sequence
  ENSG00000119537_11 (sequence is synthesized)
ggtagagaggtgaaggtatgagaattaatagcgtgtgaacaaagtaaagaacaggattccagaatgatcattaaatttgtttctatttattcttttttgcccccctagagattaagtcca

SEQ ID NO: 231512 - DNA, 120 bp, Artificial Sequence
  ENSG00000119537_12 (sequence is synthesized)
taagtccagaaatgtactttctggcacataaagaaatcttgaggactttgtttaaaccttccataaaaaaacaattttcggtttctcgggttctctctctctctctctctgtctctctgt

SEQ ID NO: 231513 - DNA, 120 bp, Artificial Sequence
  ENSG00000119537_13 (sequence is synthesized)
ctctctgtctctctctctctctctctttctttctttgtgtattttattcaagatgagttggacccattgccagtgagtctgaatgtcactgacagccctgtgttgtgctcaggactcact

SEQ ID NO: 231514 - DNA, 120 bp, Artificial Sequence
  ENSG00000119537_14 (sequence is synthesized)
gtgctcaggactcactctgctgctggtggaaactcatggcttctctctctctttgatcccataaagctacgagggggacgggagagggcagtgcaatgggaagtaaagagatattttcca

SEQ ID NO: 231515 - DNA, 120 bp, Artificial Sequence
  ENSG00000119537_15 (sequence is synthesized)
gtaggaaaagcaatgctttcttgtctttagactcaaatgcttagggaacgtttcatttctcattcatggggaaaggcagcctccttaaatgttttctgaagagcggtaaaatctagaagc

SEQ ID NO: 231516 - DNA, 120 bp, Artificial Sequence
  ENSG00000119537_16 (sequence is synthesized)
ttaagaatttacagttccttcaataaccatgatgacctgaagttcacctatcccattttagcatctacttgtttttcccatctcttcctttccaattttgcttatactgctgtaatattt

SEQ ID NO: 231517 - DNA, 120 bp, Artificial Sequence
  ENSG00000119537_17 (sequence is synthesized)
aaaaaaaaaaaggaaaaaaaagaccagctaaaattttcgacttgactttttaacttaactcatgaattaattaaagcaaatgaaaaaattaaaaagtgtgactttttctcggagcatata

SEQ ID NO: 231518 - DNA, 120 bp, Artificial Sequence
  ENSG00000119537_18 (sequence is synthesized)
agcatatatgtagcttttaggaaaggctgatgatggtataaagtttgctcattaagaaaaaaagacaaggctgattttgaagagagttgcttttgaaataaaatgatcacctgttcttta

SEQ ID NO: 231519 - DNA, 120 bp, Artificial Sequence
  ENSG00000119537_19 (sequence is synthesized)
tgtgactctcccactgaacctgcagacattatttttataccacatgctaaggaagcccactcatctaactctgtagccctggaaaccctcttggcccctgaatgttgtttccaggttata

SEQ ID NO: 231520 - DNA, 120 bp, Artificial Sequence
  ENSG00000119537_20 (sequence is synthesized)
ggatctgtgttcattagtggattttgacagcaagtgcctctgatgagttttagccaacattccccgttgcatcctgctcattgttcacactcctctgacttgaggagagctgccttcacc

SEQ ID NO: 231521 - DNA, 120 bp, Artificial Sequence
  ENSG00000119537_21 (sequence is synthesized)
aaataaaacttaaaaaacataaaaactctatacaaaaattgaagacctaaaaattatagcataccttttttttgctcttgagtttttgaagctcttgactttaaatgacttaacttttta

SEQ ID NO: 231522 - DNA, 120 bp, Artificial Sequence
  ENSG00000119537_22 (sequence is synthesized)
aaaaataagatgttttatggctttaacccatgtttttattaagatctgagaatagcatattttaaacactgatagatacagaagaaattattatttaatatataaattgcttggaatgat

SEQ ID NO: 231523 - DNA, 120 bp, Artificial Sequence
  ENSG00000119537_23 (sequence is synthesized)
ttcattgcagcttgtaaggatgggttgatgccagaatggtttcataaatctttcagtcttacagagccaaagtttgcagattatatcgagttgcgttgtgcagctgctaaaatggaatca

SEQ ID NO: 231524 - DNA, 120 bp, Artificial Sequence
  ENSG00000119537_24 (sequence is synthesized)
tagctttttataatttgcagaaaacaattgcattaatgtctggatgtttctcagttttattcttttctcataaatgttcctcgaatgttggcaccttctactgctgatctatattagaat

SEQ ID NO: 231525 - DNA, 120 bp, Artificial Sequence
  ENSG00000119537_25 (sequence is synthesized)
ctagtccaagaaagtgtctgatttaataacattaaatagttatttcaatatattttttcaaattatcctcatagaacctgttgcctccagtgagatggtaatctactacccgaataaatt

SEQ ID NO: 231526 - DNA, 120 bp, Artificial Sequence
  ENSG00000119537_26 (sequence is synthesized)
taagagcacctgttgagagcccctgttttgcggtagaagacaattgtccctatcccaatttccactgaaatatgagagcagatttgcagagaccatcatgtcagagaagaaatttccttg

SEQ ID NO: 231527 - DNA, 120 bp, Artificial Sequence
  ENSG00000119537_27 (sequence is synthesized)
tcagagatgttaaagggctacagtcccttagcaaagaaacttcgaaatctaagttggtttgtgtttttctaaatttgataccgtaattcatttggcagcaaaatctgacttgaactgatg

SEQ ID NO: 231528 - DNA, 120 bp, Artificial Sequence
  ENSG00000119537_28 (sequence is synthesized)
tgagagtattgtactttatatttatgctacttcattgtgacttaattttccctgaagaaatatccatggatttgattataggttttcccttagatgctgtggaggtgttttgtaatattc

SEQ ID NO: 231529 - DNA, 120 bp, Artificial Sequence
  ENSG00000119537_29 (sequence is synthesized)
aaaatatgcccatattgcctttttaaaaccccaaagattatgaattctgaaacacatccagcccagcgggttttggataaggggttgtaggcatttaagcagcctcacataatgggctga

SEQ ID NO: 231530 - DNA, 120 bp, Artificial Sequence
  ENSG00000119537_30 (sequence is synthesized)
cttcatccaaaacatgaaaatattacaaggcaaattctattttttatattttttggttcaatgcttgaacaacttgtttttctgctgggggaagaaaaaaagaaccaaccctgagtgtga

SEQ ID NO: 231531 - DNA, 120 bp, Artificial Sequence
  ENSG00000119537_31 (sequence is synthesized)
ttgttacggaaactaatgactttgtttttaaaggatcacattgattcaacaccttctattggacccagaagtgcgtaaatattacctatggtagtaaacgtttaattatcattcagttta

SEQ ID NO: 231532 - DNA, 120 bp, Artificial Sequence
  ENSG00000119537_32 (sequence is synthesized)
aatgttggccttctgtatgtagccaagaacagctcattttgtgaatttcagtttttaagtggctgctttttgatttggttgtattattttattataatgtatttgcaagtatattaaaaa

SEQ ID NO: 231533 - DNA, 120 bp, Artificial Sequence
  ENSG00000119537_33 (sequence is synthesized)
attaacattgagccataaaaatccccaaatatgttcaaggacttcataattgaaaaatatatagaaaacaatccttacttctttttacaaaaacaaaatcatgggaattattcttttcta

SEQ ID NO: 231534 - DNA, 65 bp, Artificial Sequence
  ENSG00000119537_34 (sequence is synthesized)
acaaaatcatgggaattattcttttctatatatttagttataaatctttctctgggcaatcacga

SEQ ID NO: 231535 - DNA, 71 bp, Artificial Sequence
  ENSG00000119537_35 (sequence is synthesized)
actccagccttctttatctggatctgttaaaccatatattattgatcattgcaagtgaaattttgagagat

SEQ ID NO: 231536 - DNA, 120 bp, Artificial Sequence
  ENSG00000119537_36 (sequence is synthesized)
ccatatattattgatcattgcaagtgaaattttgagagattgtttctagtatttaggtgatgaaaacatttggtaatattgctttggttcaaagaattttatgtctttatctttctagaa

SEQ ID NO: 231537 - DNA, 120 bp, Artificial Sequence
  ENSG00000119537_37 (sequence is synthesized)
gaaagcaattatatatatatttttgctaaattacataaacatttaattacatcaggttctaatttaaacatgtattactcacttgaggccacttttaaatattcatactctttgacataa

SEQ ID NO: 231538 - DNA, 120 bp, Artificial Sequence
  ENSG00000119537_38 (sequence is synthesized)
gatgctttgtatatttctcatttcttttagttcttagtaagtcagctttaaaaagtacctgccaaccagaaccttccatattctggactaaatcttgctcttcggattatacttcagtgc

SEQ ID NO: 231539 - DNA, 120 bp, Artificial Sequence
  ENSG00000119537_39 (sequence is synthesized)
agtaactgtggatttgcaattttgaaggggagatagtagctattatattttacacttgcttgatgtgataactctaaagactttttaactgataaaagcgcacatggctattttgataca

SEQ ID NO: 231540 - DNA, 120 bp, Artificial Sequence
  ENSG00000119537_40 (sequence is synthesized)
caaagttgtgtttgctactttagaagcttttgtggcagaattgtaatctaattttcataccttgtatttctgaatcacaacaaaaaaataaatggggaacaagacttacagatttgcaaa

SEQ ID NO: 231541 - DNA, 120 bp, Artificial Sequence
  ENSG00000119537_41 (sequence is synthesized)
agaatgtcataaaacaagcacaggagaaactgggtccagtggacatgctggtaaattgtgcaggaatggcagtgtcaggaaaatttgaagatcttgaagttagtacctttgaagttaatg

SEQ ID NO: 231542 - DNA, 120 bp, Artificial Sequence
  ENSG00000119537_42 (sequence is synthesized)
ttacccaccagacacagacacacctggctttgccgaagaaaacagaacaaaggtcagtatcctacatgtcccaatttgaacctctaatgtttactgcttttctgattttctttctactct

SEQ ID NO: 231543 - DNA, 120 bp, Artificial Sequence
  ENSG00000119537_43 (sequence is synthesized)
tcctgtcttccattagctttggagccagcatccttctttaccatgagagagaaggcagaggggcagcacagacgtgagtttctgggcagtcgatgtcagtctttatgtgggctgcctaat

SEQ ID NO: 231544 - DNA, 120 bp, Artificial Sequence
  ENSG00000119537_44 (sequence is synthesized)
gaccactcgttggattttttgtggtgtttttctctggtctatgcacagcagagggcaaggctgggggagacaaggtttttataagtcactatctcaaaaacaagtggaagcgagtttctg

SEQ ID NO: 231545 - DNA, 120 bp, Artificial Sequence
  ENSG00000119537_45 (sequence is synthesized)
gctcatctgccttactacctggccccgatccagagctatttatgagcatggctgggccgtgaagctgcatgccctggcaatgcccggtggatgggctgtcccacaccctaattgtgctgg

SEQ ID NO: 231546 - DNA, 120 bp, Artificial Sequence
  ENSG00000119537_46 (sequence is synthesized)
aatggaacccacaaagacatctcactttcacgactgcactttccaggatggctggcctggatcttctgcttgcaggcctgtgcgtgcttctccttccccttgaagctccccttaaagccc

SEQ ID NO: 231547 - DNA, 120 bp, Artificial Sequence
  ENSG00000119537_47 (sequence is synthesized)
cccttgaagctccccttaaagccctcaaaactgtgcttcactgaaggaaccagggcgaaaaagggctgcataagatgagactctgggctactgtttttatttttttgttgtttttttgtt

SEQ ID NO: 231548 - DNA, 73 bp, Artificial Sequence
  ENSG00000119537_48 (sequence is synthesized)
ttgttgtttttttgttgtttttttttttgggatggagtctccctccttccgcctcctgggctcaagcaattct

SEQ ID NO: 231549 - DNA, 120 bp, Artificial Sequence
  ENSG00000119537_49 (sequence is synthesized)
gttgggattacaggtgtgagccactgcccccggcccctgggctactcttaaaggccgtcacattaggcagtggtgttgatttttagcctagggtacccttctgaagatgtgcagtggctg

SEQ ID NO: 231550 - DNA, 120 bp, Artificial Sequence
  ENSG00000119537_50 (sequence is synthesized)
atctatcagctgcctctccacttccagatcccttaggtgtttcctagggacaaaaaagtgagccaataccaaataaaaatcatggcaaagagattttcatggtaggaaccattgctctta

SEQ ID NO: 231551 - DNA, 120 bp, Artificial Sequence
  ENSG00000119537_51 (sequence is synthesized)
gagttgctaattagcagggcaagataagcatgtgcagcagggctgtggctgagcagtctgtgggagggggtgtcctggccaacagcagaagaatctgctggaattgttgggggtgtgtgt

SEQ ID NO: 231552 - DNA, 120 bp, Artificial Sequence
  ENSG00000119537_52 (sequence is synthesized)
atgagtggggtcgtgaagcgtgaagtgtgcaggcatggtggtgaggcacacaagtgtaacaacctgctccaagtgtcagatttagaggagccacatagagtttcagataaggcagagggc

SEQ ID NO: 231553 - DNA, 120 bp, Artificial Sequence
  ENSG00000119537_53 (sequence is synthesized)
tttccctatgtgaatgcaggttgaggttgtccacaggggaggtacttggctggtctgacttggaggttctacccagtggttcttgttggttcagtggaggaggaagtgactcttgacctc

SEQ ID NO: 231554 - DNA, 120 bp, Artificial Sequence
  ENSG00000119537_54 (sequence is synthesized)
ctaatgtgcagaggccggttatacagggagctctggaataagcagacttctcagggacagttctggactgggtttggagtagggcacaagaaagggatagggcagcagattttaatgacc

SEQ ID NO: 231555 - DNA, 120 bp, Artificial Sequence
  ENSG00000119537_55 (sequence is synthesized)
ccaatgtattttgtggatgaaatcaacacaagagtatcagaagcagtctgaaggaaaaacagatgtacagtctggtgaagaaaggaggggcagactggtcccattgccttgataaagggc

SEQ ID NO: 231556 - DNA, 120 bp, Artificial Sequence
  ENSG00000119537_56 (sequence is synthesized)
gaactggactctttttaaaacactgccctcgtcggacggctcccagggcctctgtctgggcagcaggagtggaagacactgcaaaggaggtgacttgccatactttagggccagctgttt

SEQ ID NO: 231557 - DNA, 120 bp, Artificial Sequence
  ENSG00000119537_57 (sequence is synthesized)
tctggggtccaggttagggtgagctttttgcctacattctggaatcatcatggagaggggtttctcaatgcaattggtgtagttccccgcctaacagaatcaccccattgttctcaccgc

SEQ ID NO: 231558 - DNA, 120 bp, Artificial Sequence
  ENSG00000119537_58 (sequence is synthesized)
ttgctatgtggcttggaatggacacaacttctctataggtttaatagttttgtaaattttatttatcagcatggatttgctgctgagtggtttttcttctctgtttcttaatgcctgctc

SEQ ID NO: 231559 - DNA, 120 bp, Artificial Sequence
  ENSG00000119537_59 (sequence is synthesized)
ctcatgaggaagctgttctgaaaagctctgttttaacctttggcaatgcagccgtaaccttgagtttgagaagcactgctctgaaatcctgtcttccattagctttggagccagcatcct

SEQ ID NO: 231560 - DNA, 120 bp, Artificial Sequence
  ENSG00000119537_60 (sequence is synthesized)
gcacagagaggctgagaaactttgccaaggacacagcggtcggtggtgtgcagggtgcggcgcgcggccccgggcgggggcagacagcggggaagtggggtcccagccgccgggacccgc

SEQ ID NO: 231561 - DNA, 120 bp, Artificial Sequence
  ENSG00000119537_61 (sequence is synthesized)
cgaggcagctcggaactggaagatggcctgtgcgagtgacgggaagagccgctgccagaggattccaggaagtgactcacctggggaaactgctcagaacccagcgggctggcggtggtg

SEQ ID NO: 231562 - DNA, 120 bp, Artificial Sequence
  ENSG00000119537_62 (sequence is synthesized)
tgaaagcatatatgtactgttttttaaaaggtggaattgtttgaatggtctagtaactcagaatatcacacacacgcaaaatgaatagactcccacacacattcatatctacaaatggtc

SEQ ID NO: 231563 - DNA, 120 bp, Artificial Sequence
  ENSG00000119537_63 (sequence is synthesized)
tcatcagccccaagcccctcgccctgcccggggcgcatgtggtgtgggaaggatgagctaaacgacaaggcttgtgtgcgaggaatgaaggagaggtggataggttacaggaggttccag

SEQ ID NO: 231564 - DNA, 120 bp, Artificial Sequence
  ENSG00000119537_64 (sequence is synthesized)
agagagaatgcctccttgcctgcgcccagcactttcccgtttgcagtggctttctcacgagcattctcgtttggatctcccaaacccgaggcacagtgaggcgaggagttaggagtaagg

SEQ ID NO: 231565 - DNA, 120 bp, Artificial Sequence
  ENSG00000119537_65 (sequence is synthesized)
agggttggttacaaaattggccgcacacctcttcctgtcctatctctgcaccggagatccgagcctccccgctgagctggtataaaataagatggttacaggaggttccagtggcatcgg

SEQ ID NO: 231566 - DNA, 120 bp, Artificial Sequence
  ENSG00000119537_66 (sequence is synthesized)
tgatgctccatgaaagaagtggcagtttagcccttgacttcaggagctgcacaaggacttttgttccaggcagttgtcccgccctggaatgcagtgctgcggaagcgcgttgggcgcatt

SEQ ID NO: 231567 - DNA, 120 bp, Artificial Sequence
  ENSG00000119537_67 (sequence is synthesized)
ctcatttgtcacacagagtattaagaagacatgtcctcgagggttgccattgaacaaaatgatgaattttcctgctttatcaagaggattttaaagcaaaactgacactttgatttttaa

SEQ ID NO: 231568 - DNA, 120 bp, Artificial Sequence
  ENSG00000119537_68 (sequence is synthesized)
aagaattttagaacttgtattttctttgtgtattatttattactgcgagtgcgtgtggtagtagaggtgacaatgactcctagtacagtttggcaagaaccccgtggttcttgcccatgt

SEQ ID NO: 231569 - DNA, 120 bp, Artificial Sequence
  ENSG00000119537_69 (sequence is synthesized)
ctctgcagttttgcagaggcaaaactgtattttccatacaacacactgtggaaaagacaatgaatgtcttagtgttattaggacaatcatttgtccttgggggcccgcaggggtccgtgg

SEQ ID NO: 231570 - DNA, 120 bp, Artificial Sequence
  ENSG00000119537_70 (sequence is synthesized)
actcacttgttgagaactgccatctgccaaggccgtgcgtccatttctgagtgctgatcaatgctttgtgaccattttatctcacttaaagtgaacgagcacactccactgtttctgatg

SEQ ID NO: 231571 - DNA, 120 bp, Artificial Sequence
  ENSG00000119541_0 (sequence is synthesized)
agagggcctcgggattgcggaagtttggtggggagggtcggagctctggtggagagagtgttgtctaaaacaagttccggaagggaggctgcccttcgcggtccgagaaccaccggcctc

SEQ ID NO: 231572 - DNA, 120 bp, Artificial Sequence
  ENSG00000119541_1 (sequence is synthesized)
cccagtttgagggctgttaccccgtgcgcgcttcgacgttgctgctgttggctctcctcgcccctcgttcccttgggaaccgcctgggaactccgccatgtcatccacttcgcccaacct

SEQ ID NO: 231573 - DNA, 120 bp, Artificial Sequence
  ENSG00000119541_2 (sequence is synthesized)
ccagaaagcgatagatctggctagcaaagcagcgcaagaagacaaggctgggaactacgaagaagcccttcagctctatcagcatgctgtgcagtattttcttcatgtcgttaaatatga

SEQ ID NO: 231574 - DNA, 120 bp, Artificial Sequence
  ENSG00000119541_3 (sequence is synthesized)
agcacagggtgataaagccaagcaaagtatcagggcaaagtgtacagaatatcttgatagagcagaaaaactaaaggagtacctgaaaaataaagagaaaaaagcacagaagccagtgaa

SEQ ID NO: 231575 - DNA, 120 bp, Artificial Sequence
  ENSG00000119541_4 (sequence is synthesized)
agaaggacagccgagtccagcagatgagaaggggaatgacagtgatggggaaggagaatctgatgatcctgaaaaaaagaaactacagaatcaacttcaaggtgccattgttatagaacg

SEQ ID NO: 231576 - DNA, 120 bp, Artificial Sequence
  ENSG00000119541_5 (sequence is synthesized)
accaaatgtgaaatggagtgacgttgctggacttgaaggagccaaagaagcactgaaagaggctgtgatactgcctattaaatttcctcatctttttacaggcaagagaacaccttggag

SEQ ID NO: 231577 - DNA, 120 bp, Artificial Sequence
  ENSG00000119541_6 (sequence is synthesized)
gggaatcctattatttgggccgcctggaacaggaaagtcctacttagccaaagctgtagcaacagaagccaacaactcaacatttttttcaatatcttcctctgatcttgtttctaagtg

SEQ ID NO: 231578 - DNA, 120 bp, Artificial Sequence
  ENSG00000119541_7 (sequence is synthesized)
gctaggtgaaagtgaaaaactggttaagaatttattccaacttgccagagagaacaagccctccattatcttcattgatgaaattgattctctctgtggttcaagaagtgaaaatgaaag

SEQ ID NO: 231579 - DNA, 120 bp, Artificial Sequence
  ENSG00000119541_8 (sequence is synthesized)
tgaagccgcacgtagaattaagacggagttcctagtgcaaatgcaaggggttggtgtagacaatgatggaattttggttctgggagctacaaatataccctgggttctggattctgccat

SEQ ID NO: 231580 - DNA, 120 bp, Artificial Sequence
  ENSG00000119541_9 (sequence is synthesized)
taggcgaagatttgagaaacgaatttatattcccttgccggaaccccatgcccgagcagcaatgtttaaactgcacctagggaccactcagaacagtctcacggaagcagactttcggga

SEQ ID NO: 231581 - DNA, 120 bp, Artificial Sequence
  ENSG00000119541_10 (sequence is synthesized)
acttgggaggaaaacagatggttattcaggggcagatataagtatcattgtacgtgatgcccttatgcagcctgttaggaaagtacagtcagctactcattttaaaaaggttcgcggacc

SEQ ID NO: 231582 - DNA, 120 bp, Artificial Sequence
  ENSG00000119541_11 (sequence is synthesized)
ttcccgagctgatcctaaccatcttgtagatgatctgctaacaccttgctctccaggtgaccctggtgccattgaaatgacatggatggatgtccctggagataaacttttggagccagt

SEQ ID NO: 231583 - DNA, 120 bp, Artificial Sequence
  ENSG00000119541_12 (sequence is synthesized)
tgtttccatgtcggatatgttgcggtcactatctaacacaaaacctacagtcaatgaacatgacttgttgaaattaaagaagtttacagaagattttggtcaagaaggctaagccaaaga

SEQ ID NO: 231584 - DNA, 120 bp, Artificial Sequence
  ENSG00000119541_13 (sequence is synthesized)
gaaatacacatctcacttcagagttccattaggttttatattgtacttttcctccattacttattaaatactcctattaacaaaaggtacaaaataacaggttatgaggaaatgagcgat

SEQ ID NO: 231585 - DNA, 120 bp, Artificial Sequence
  ENSG00000119541_14 (sequence is synthesized)
atatgaacggcataaaaacagaaattacccagtaaaaaggatgtcagaaattgacatacaaatatttacaatttttatgaatggtggtctttgcaaagagcatttatattttcttttttt

SEQ ID NO: 231586 - DNA, 120 bp, Artificial Sequence
  ENSG00000119541_15 (sequence is synthesized)
ctaaaatgatatagggtttattttatattttcaaaaaaattgttaaacatcattcttatcaatgtaaaatttacgttattaaaaaattacaaatgatagaatctttactcagggatgggc

SEQ ID NO: 231587 - DNA, 120 bp, Artificial Sequence
  ENSG00000119541_16 (sequence is synthesized)
gggcaataaaacagcaaagagctttgtgattgggtttgaaagattttgaattatagacagtgctcttaatagtttttaataagttgatatttttttctgtgtagatttaaataatttctt

SEQ ID NO: 231588 - DNA, 68 bp, Artificial Sequence
  ENSG00000119541_17 (sequence is synthesized)
aagttgatatttttttctgtgtagatttaaataatttctttaaaagcgtaagccgatgggtggatcac

SEQ ID NO: 231589 - DNA, 87 bp, Artificial Sequence
  ENSG00000119541_18 (sequence is synthesized)
tgaataaaactctgtctcaaaaaaaaacaaaaacggtaagcttttatatttaattaactgatacctttcactgtgcaatctcaagag

SEQ ID NO: 231590 - DNA, 120 bp, Artificial Sequence
  ENSG00000119541_19 (sequence is synthesized)
atttaattaactgatacctttcactgtgcaatctcaagaggaagattttctaaattagacattgtctttaccttaaagaagaaaattgtctatttcagtgtcttttttagcaagattgac

SEQ ID NO: 231591 - DNA, 120 bp, Artificial Sequence
  ENSG00000119541_20 (sequence is synthesized)
caaaacaggtggtaggtgtgtaatttttaactgtcatgaaatactgtaatgcgcacctttgctaataaggaaatggtctccctttgaattatgggaagtttcttgtctgtgatatggggt

SEQ ID NO: 231592 - DNA, 120 bp, Artificial Sequence
  ENSG00000119541_21 (sequence is synthesized)
gtctgtgtacatatatgtatatttccttttttaatacaggataataatatggggtcttgtccttcaccttttaagttcagggaacagtttgtcctgaccacacatatgttatcagtgtaa

SEQ ID NO: 231593 - DNA, 120 bp, Artificial Sequence
  ENSG00000119541_22 (sequence is synthesized)
tgctttatgaagctttagaaatgagctcatgactcattaaaaaataataaacgatgctattttaatattttcaaataaataatctgaggatgtgtttcatactttagcatcaacgctgag

SEQ ID NO: 231594 - DNA, 120 bp, Artificial Sequence
  ENSG00000119541_23 (sequence is synthesized)
ttgtgccttgtagaattgcattgtctatacatgcaaaagactattaagttaggatgaactagattccctaattacagtgaaattctatcttgcaaatgctatagaataacttgcatttta

SEQ ID NO: 231595 - DNA, 120 bp, Artificial Sequence
  ENSG00000119541_24 (sequence is synthesized)
aagtgtatttgcacattttacatatgctatgtggttgcctttgggttttctgtacagattgtttttgttattaaatggaaaaggcctgaattatgctcttatgtgaagtaaattgatata

SEQ ID NO: 231596 - DNA, 120 bp, Artificial Sequence
  ENSG00000119541_25 (sequence is synthesized)
acctattgactgtattctgtgtattattctttattttgggaccttctgtgtaaaagaaaatattacctaaattggttagatacaaagaaatcattaaaattattaatgtatatatgaaaa

SEQ ID NO: 231597 - DNA, 120 bp, Artificial Sequence
  ENSG00000119541_26 (sequence is synthesized)
aactaactacatgtcatcttagaacaggctgcttcatagtttatagtggaacagtttccatattctagaaaattagaaaagcttttgataaaagagaactagaaaatttgtcagtaggct

SEQ ID NO: 231598 - DNA, 87 bp, Artificial Sequence
  ENSG00000119541_27 (sequence is synthesized)
ctcgaactcctgactcgtgagccactgcgcctggcccttttcctgtatttttaaaatcaagtttcaagaccgtcattggtttgtctt

SEQ ID NO: 231599 - DNA, 120 bp, Artificial Sequence
  ENSG00000119541_28 (sequence is synthesized)
tttttaaaatcaagtttcaagaccgtcattggtttgtcttcaaagaatttgggaggatttcagtgttgtataataataccataagtgggtttacataatagacatatttctgtgtcactg

SEQ ID NO: 231600 - DNA, 120 bp, Artificial Sequence
  ENSG00000119541_29 (sequence is synthesized)
gtttacataatagacatatttctgtgtcactgaaacaagttctttaataaagtttatttattggccatttttggctgggtgcagtgccccatacctgtaatcccagcactttaggaggcc

SEQ ID NO: 231601 - DNA, 84 bp, Artificial Sequence
  ENSG00000119541_30 (sequence is synthesized)
gaggtgggcagatctcttgagctcaggagagaccagcctcaggcaacatggcaaaaccccatctctgttcctgtagtcccagct

SEQ ID NO: 231602 - DNA, 120 bp, Artificial Sequence
  ENSG00000119547_0 (sequence is synthesized)
agagcccttctggacagctcccgctcacccaaacagaagacgtcggcgccggagcgggctcggacatggcgaggctgcgagccggcccgagcggcggggcccggtgatccctccctccct

SEQ ID NO: 231603 - DNA, 80 bp, Artificial Sequence
  ENSG00000119547_1 (sequence is synthesized)
ccccaccccgcccccaccccgggcgagcccgcccgcagcccggggcgcacacccgcacgcgcactcctctccactcactc

SEQ ID NO: 231604 - DNA, 120 bp, Artificial Sequence
  ENSG00000119547_2 (sequence is synthesized)
ccgagccccgccacgcgcgccttgcccgcccgccggccgcccccgccgcccccgccgcccccgggccctgatggactgaatgaaggctgcctacaccgcctatcgatgcctcaccaaaga

SEQ ID NO: 231605 - DNA, 120 bp, Artificial Sequence
  ENSG00000119547_3 (sequence is synthesized)
cgcctatcgatgcctcaccaaagacctagaaggctgcgccatgaacccggagctgacaatggaaagtctgggcactttgcacgggccggccggcggcggcagtggcgggggcggcggcgg

SEQ ID NO: 231606 - DNA, 120 bp, Artificial Sequence
  ENSG00000119547_4 (sequence is synthesized)
cgcgcaccaggagctgggcacggcggcagcggcggcagcggcggcgtcgcgctcggccatggtcaccagcatggcctcgatcctggacggcggcgactaccggcccgagctctccatccc

SEQ ID NO: 231607 - DNA, 120 bp, Artificial Sequence
  ENSG00000119547_5 (sequence is synthesized)
gctgcaccacgccatgagcatgtcctgcgactcgtctccgcctggcatgggcatgagcaacacctacaccacgctgacaccgctccagccgctgccacccatctccaccgtgtctgacaa

SEQ ID NO: 231608 - DNA, 120 bp, Artificial Sequence
  ENSG00000119547_6 (sequence is synthesized)
gttccaccaccctcacccgcaccaccatccgcaccaccaccaccaccaccaccaccagcgcctgtccggcaacgtcagcggcagcttcaccctcatgcgcgacgagcgcgggctcccggc

SEQ ID NO: 231609 - DNA, 120 bp, Artificial Sequence
  ENSG00000119547_7 (sequence is synthesized)
catgaacaacctctacagtccctacaaggagatgcccggcatgagccagagcctgtccccgctggccgccacgccgctgggcaacgggctaggcggcctccacaacgcgcagcagagtct

SEQ ID NO: 231610 - DNA, 120 bp, Artificial Sequence
  ENSG00000119547_8 (sequence is synthesized)
gcccaactacggtccgccgggccacgacaaaatgctcagccccaacttcgacgcgcaccacactgccatgctgacccgcggtgagcaacacctgtcccgcggcctgggcaccccacctgc

SEQ ID NO: 231611 - DNA, 120 bp, Artificial Sequence
  ENSG00000119547_9 (sequence is synthesized)
ggccatgatgtcgcacctgaacggcctgcaccacccgggccacactcagtctcacgggccggtgctggcacccagtcgcgagcggccaccctcgtcctcatcgggctcgcaggtggccac

SEQ ID NO: 231612 - DNA, 120 bp, Artificial Sequence
  ENSG00000119547_10 (sequence is synthesized)
gtcgggccagctggaagaaatcaacaccaaagaggtggcccagcgcatcacagcggagctgaagcgctacagtatcccccaggcgatctttgcgcagagggtgctgtgccggtctcaggg

SEQ ID NO: 231613 - DNA, 120 bp, Artificial Sequence
  ENSG00000119547_11 (sequence is synthesized)
gactctctccgacctgctccggaatccaaaaccgtggagtaaactcaaatctggcagggagaccttccgcaggatgtggaagtggcttcaggagcccgagttccagcgcatgtccgcctt

SEQ ID NO: 231614 - DNA, 120 bp, Artificial Sequence
  ENSG00000119547_12 (sequence is synthesized)
acgcctggcagcgtgcaaacgcaaagagcaagaaccaaacaaagacaggaacaattcccagaagaagtcccgcctggtgttcactgacctccaacgccgaacactcttcgccatcttcaa

SEQ ID NO: 231615 - DNA, 120 bp, Artificial Sequence
  ENSG00000119547_13 (sequence is synthesized)
ggagaacaaacgcccgtcaaaggagatgcagatcaccatttcccagcagctgggcctggagctcacaaccgtcagcaacttcttcatgaacgcccggcgccgcagcctggagaagtggca

SEQ ID NO: 231616 - DNA, 120 bp, Artificial Sequence
  ENSG00000119547_14 (sequence is synthesized)
agacgatctgagcacagggggctcctcgtccacctccagcacgtgtaccaaagcatgatggaaggactctcacttgggcacaagtcacctccaaatgaggacaacagataccaaaagaaa

SEQ ID NO: 231617 - DNA, 120 bp, Artificial Sequence
  ENSG00000119547_15 (sequence is synthesized)
acaaaggaaaaagacaccggattcctagctggggcccttcactggtgatttgaaagcacaattctcttgcaaagaaacttatattctagctgtaatcataggccaggtgttcttcttttg

SEQ ID NO: 231618 - DNA, 120 bp, Artificial Sequence
  ENSG00000119547_16 (sequence is synthesized)
tttttaatggctatggagtccaagtgcaagctgaaaaattaatctcttagaaccagacactgttctctgagcatgctaagcatcccagaaacccaaatggggccttcctggagcgagtta

SEQ ID NO: 231619 - DNA, 120 bp, Artificial Sequence
  ENSG00000119547_17 (sequence is synthesized)
attccagtatggtgtcaaccaagctcgggattgcttaaaatatcatccatcccacttcaggtcctgtcagcttcttgcagtcagagttcctatgagtaacaataggagtttggcctatgt

SEQ ID NO: 231620 - DNA, 120 bp, Artificial Sequence
  ENSG00000119547_18 (sequence is synthesized)
aaggactctgagtttaggcttccaagatacaacaataagagaagaatctagcaacgagaatgacctcatttgctttccacatgcttagcctcattataccatgttatgtccaagttcaca

SEQ ID NO: 231621 - DNA, 120 bp, Artificial Sequence
  ENSG00000119547_19 (sequence is synthesized)
gccacaacatcagaatggtaattactgagcacaagttttaaatatggacgttaaaaaaaaaaatccaaggacctgtttttccaacccagacatcttttcattgaatgatttagaaagctt

SEQ ID NO: 231622 - DNA, 120 bp, Artificial Sequence
  ENSG00000119547_20 (sequence is synthesized)
taagttgatccagcttacaattttttttttctttacctcctggaaatctcatatggtcttggatccgtcaaaaaaaccagtcagttcacttgcgctcaaagtatcaagcacaacaaagat

SEQ ID NO: 231623 - DNA, 120 bp, Artificial Sequence
  ENSG00000119547_21 (sequence is synthesized)
aaacagaagtgaggaaggttctgggttcactacatctggattttcaagacacctattgtgaagtcattagggaattgatgagaatatggcttcaagcacattttgcagtttgctacaaat

SEQ ID NO: 231624 - DNA, 120 bp, Artificial Sequence
  ENSG00000119547_22 (sequence is synthesized)
tctgttgtacataatgcagacgcacactcaggaggccaatttaactgttaacagtgcatggagcgaatgcagcattttaaaagatctaggtttttttaggtcattaatgtgtccttggtt

SEQ ID NO: 231625 - DNA, 120 bp, Artificial Sequence
  ENSG00000119547_23 (sequence is synthesized)
gatcagtcatctggtccctcctactgtgtgttatgaccaccacgtaatccattctcgctctttctgatttggggtttttcctcatccatcccattagtagggatgttttctgtgttttct

SEQ ID NO: 231626 - DNA, 120 bp, Artificial Sequence
  ENSG00000119547_24 (sequence is synthesized)
agcaagaaaaaaaaatcaatcaatcaaacctgcatacatgttactcatgactgtcatctagtcctaaatctcttctgttgttgaatcatccttgcaaaacagctgaatacatctggagaa

SEQ ID NO: 231627 - DNA, 120 bp, Artificial Sequence
  ENSG00000119547_25 (sequence is synthesized)
aacacagcacaccaaagaagcagaatactgcaaaccaaagacatttatgacttgtcattttctagcctaaaaatactgtgattacttttagaaatcagaaaacctctgcaactccgaatg

SEQ ID NO: 231628 - DNA, 120 bp, Artificial Sequence
  ENSG00000119547_26 (sequence is synthesized)
gcattcagctcttgcatttggcgcatcatcgggctgagcggaccagctacaccaaggacattagccaagccacccagaggggtggctttgccacaccagttgtcaccttcccatagcaag

SEQ ID NO: 231629 - DNA, 120 bp, Artificial Sequence
  ENSG00000119547_27 (sequence is synthesized)
tggaagagcgcccacagaactctgggagattgcaaaggtcacaatgtgcatatttaccagtgaatggccccgggtggggccacgtgggggtgttcaaagcaagccaaacgctgcaatcat

SEQ ID NO: 231630 - DNA, 120 bp, Artificial Sequence
  ENSG00000119547_28 (sequence is synthesized)
tctttacagacacttgagactgacttttttatgaattacttagtcgaaaccaaagaaactttttctgcacctacttctgcaacaaacaaaactgtcccattaaaatgaataaataaatcc

SEQ ID NO: 231631 - DNA, 120 bp, Artificial Sequence
  ENSG00000119547_29 (sequence is synthesized)
gtaaatcaatggaaatcaccaccaataagaaggaagcacgccagaaaataaacgaaaacaaaaacagggagacacactgtgttcaaacagacctcttgggacattttttggaagcagatt

SEQ ID NO: 231632 - DNA, 120 bp, Artificial Sequence
  ENSG00000119547_30 (sequence is synthesized)
ttaaagaaagggttgagacaaagatagaaataaggaagagcctcagtggctgctgcttcatttgacaactcacacggtaatcttaaagctgaagattgtctttaatttgtgcctatgcag

SEQ ID NO: 231633 - DNA, 120 bp, Artificial Sequence
  ENSG00000119547_31 (sequence is synthesized)
tttttcaaaagaacacggaacagagcaacagaaacctcaacagctacaataccaaagatgaggatttctcacaccttttgtttcagttcattatctcctcttgcctggctaaaatactaa

SEQ ID NO: 231634 - DNA, 120 bp, Artificial Sequence
  ENSG00000119547_32 (sequence is synthesized)
tagcgccattgaactgtataaaggtaatcaattatgtttctctgagcaacaaaaggaaagggccatttatttgattttattgtttcatttcaattttgtcttatggttttttgccccaac

SEQ ID NO: 231635 - DNA, 120 bp, Artificial Sequence
  ENSG00000119547_33 (sequence is synthesized)
atggaatctctcaaaagtttccatggactccaagtttaagatgttgggatattgaacagttctctctgctcagcagagggtagggaataacattatcacttgaatgttctttgcttaacc

SEQ ID NO: 231636 - DNA, 120 bp, Artificial Sequence
  ENSG00000119547_34 (sequence is synthesized)
cttagacttggttccttctatgttcagagtctcatcatcaggggaaggaaagggagtgagggtcagggataggggtcttggtgatgcatcctctcccgagccacagaaccaaagagttta

SEQ ID NO: 231637 - DNA, 120 bp, Artificial Sequence
  ENSG00000119547_35 (sequence is synthesized)
tagaggaatttacagcctcgttttcatgtgattgctacatcctaacagggcttcatttgggggtggggggaaacatgtaaaaataattgccagtttctacttttctattagctttttaaa

SEQ ID NO: 231638 - DNA, 120 bp, Artificial Sequence
  ENSG00000119547_36 (sequence is synthesized)
aatcagctgtaaagttgcatttctaaagaaagatatatataatatataaaatacatatatagatcaacttgacattggtgataaccaaaattattgctgtccaaattcatgtcttgtttt

SEQ ID NO: 231639 - DNA, 120 bp, Artificial Sequence
  ENSG00000119547_37 (sequence is synthesized)
ggtccagtgcttcatttgctaagtattcggttcagaatttttctcatttctcatgccattccagagttaatttgccactgtggatgatttgaagtattcagatctctatggaagtttctg

SEQ ID NO: 231640 - DNA, 120 bp, Artificial Sequence
  ENSG00000119547_38 (sequence is synthesized)
ggacaggtttaaagtcaagatcaagcattttagcatttaacctgttgataaatggatccatggtgtacatgagttttatttgtattcggagtcatctctattctatccctcagcctcgat

SEQ ID NO: 231641 - DNA, 120 bp, Artificial Sequence
  ENSG00000119547_39 (sequence is synthesized)
taaggtggtgagtgaagtgcatccaacagactcggcccagaactgggtcctgacagtggggtgctcatcttctgtaactgttgggaaggctcggtggtccattttcaccagttaaagaat

SEQ ID NO: 231642 - DNA, 120 bp, Artificial Sequence
  ENSG00000119547_40 (sequence is synthesized)
atgaggccagcccagaaatctgttctccaggagctgccctgtcccatctgggtgtgccagaccccctcagtgagcaggtccaccaaagggacttctcacaggggaagcccaactcctgtt

SEQ ID NO: 231643 - DNA, 120 bp, Artificial Sequence
  ENSG00000119547_41 (sequence is synthesized)
gcaatgggttgatagatttcctcagggtggtaattaccaattcgtattttgacaagcctatgtgcaaccacagctggcactggggtgggcagtggtgttgggtgggatgggggagagtgt

SEQ ID NO: 231644 - DNA, 120 bp, Artificial Sequence
  ENSG00000119547_42 (sequence is synthesized)
ctcaatcctgaagagaaaatataaagcaggttttggggagacttctggagtcctgcccctagagagccccattgttgttctttgtgccccctcctcattccccctatgtgggtctcccta

SEQ ID NO: 231645 - DNA, 120 bp, Artificial Sequence
  ENSG00000119547_43 (sequence is synthesized)
tgcaggagctgtgagagaatgtgactctccacaatttttataattcatccttcctaggagattgttcattggctcttcccttgtgtccctttgtcccttgctcatactccatgtttcctt

SEQ ID NO: 231646 - DNA, 120 bp, Artificial Sequence
  ENSG00000119547_44 (sequence is synthesized)
tgtcaaaggactaagaaaagagcatatttcagcagaggagtgttcccatgtgggttgatttcaacttgggtatttctaaaagagtccttgtgacatgtgtccagtggaaatggttgctct

SEQ ID NO: 231647 - DNA, 120 bp, Artificial Sequence
  ENSG00000119547_45 (sequence is synthesized)
tttccagactggattgaggaatggagcctgtttgatttggttagtgattctttgacatactaatctcagcgtttgggtctccagcatcctctgaagatgtctagactagtagaggctgcc

SEQ ID NO: 231648 - DNA, 120 bp, Artificial Sequence
  ENSG00000119547_46 (sequence is synthesized)
tttgtgacctgacattacaacattggtcaaaccagtcctctgataatcagaagaacatgtcataattgtttaaaaaaaaaaaaaaggcaagaatttctctccaaggagctttaataaatg

SEQ ID NO: 231649 - DNA, 120 bp, Artificial Sequence
  ENSG00000119547_47 (sequence is synthesized)
tctcattccagataatgtcataccagagaaaagtgcttgcttttagaaaattatttacatacatatataaatatatatgtgtatctatacagttatgtatcaaaattttaagccctgcag

SEQ ID NO: 231650 - DNA, 120 bp, Artificial Sequence
  ENSG00000119547_48 (sequence is synthesized)
aatttcaatttgttagaaatctaacagaaaaaaatttctatattgaaaggtaatagaatttaacccagtgagtttactcaaggatttttaaatttaagttaataatttcagagaaaataa

SEQ ID NO: 231651 - DNA, 120 bp, Artificial Sequence
  ENSG00000119547_49 (sequence is synthesized)
ccatttgggtgtggttatagtttagtatccattacctcaatccaaggaaaattccaggcattcctcaaccatcaggaaaaggtacagtgtgaaggaacagttctcagccaaatttcacat

SEQ ID NO: 231652 - DNA, 120 bp, Artificial Sequence
  ENSG00000119547_50 (sequence is synthesized)
tcttgaggcaacagaaatcaaaacactcagagccattgagtggaaaaacaatttactttattcctttacacaaataggcttgcattgtttttgttttaatgtgattttggtactagggat

SEQ ID NO: 231653 - DNA, 120 bp, Artificial Sequence
  ENSG00000119547_51 (sequence is synthesized)
ataattatttcattccaggaaataataaaaaaaaacagacagagccaatacatttctttttttaaaggaaacagcaacaacaataaaaactcagcaccaatatttaaaagcttttccaaa

SEQ ID NO: 231654 - DNA, 120 bp, Artificial Sequence
  ENSG00000119547_52 (sequence is synthesized)
atgtaaaagaagtgtttagcttgcaccatgcataaaggtgcaggctagttgaaccaggaagcatggcacttcctctggagaaatccagaaagagttgcttctaagctcccttttccccct

SEQ ID NO: 231655 - DNA, 120 bp, Artificial Sequence
  ENSG00000119547_53 (sequence is synthesized)
gcaggctcttggcaattgtaggctttagcaaatccagaataattttcaattcaagctaaaataaaatcaacatttggaatgtaaatctgatacacacacacttttctaagtcaaacaaca

SEQ ID NO: 231656 - DNA, 120 bp, Artificial Sequence
  ENSG00000119547_54 (sequence is synthesized)
tatttcaaaaccaaaaataaataccttttagataatcagttattttctttgtctatactgggcacccacctactagtgccagtaaattcaagttgaacagatttttaaaatcactattat

SEQ ID NO: 231657 - DNA, 120 bp, Artificial Sequence
  ENSG00000119547_55 (sequence is synthesized)
ctgggtatgggggaaacttccccacttttgaaaatgttggtagaattataggaatgtctgtttgattatcattaccaaagtgtcatgacagtatgcctttgtagtgaactcggattttca

SEQ ID NO: 231658 - DNA, 120 bp, Artificial Sequence
  ENSG00000119547_56 (sequence is synthesized)
ggagtttgaatagttggatattttaaaatctaagaagaaaaggcctgtttccaatgttgttgaagaataatgaactctattaaaaagtggagaaaaagataatacatgtggtcaaggttg

SEQ ID NO: 231659 - DNA, 120 bp, Artificial Sequence
  ENSG00000119547_57 (sequence is synthesized)
accacaaggcccaggcacaactaccttggcgataatcttctagattcgtaacaggttagagctgactttttgtttttgttgttgctgatgctgtgtgattcagacttctcagcctaacca

SEQ ID NO: 231660 - DNA, 120 bp, Artificial Sequence
  ENSG00000119547_58 (sequence is synthesized)
ggaagagtaagtggaaatggtagatgaagaaggggtagagctggtgtatctataactttctgatatttgtctgccaaacttgatatattagtaatttttttatctttagctaagatcaag

SEQ ID NO: 231661 - DNA, 120 bp, Artificial Sequence
  ENSG00000119547_59 (sequence is synthesized)
tcacccctgaaacaacaggagattctagttttaaaataaggccacaaaaatccttacggaatgaagaatggcaccccagttggttgtataagtctcataagataatgatgttgattttaa

SEQ ID NO: 231662 - DNA, 120 bp, Artificial Sequence
  ENSG00000119547_60 (sequence is synthesized)
atatggatgtctcaatgcctgttttctatcaatgatttgtttgtttccaaggtcggggagggaaagaggggagggtttatctgttttagaaagtctcagaatacttataaaatacagaag

SEQ ID NO: 231663 - DNA, 120 bp, Artificial Sequence
  ENSG00000119547_61 (sequence is synthesized)
tagttattaaaatatataggacctcacataggtagatacagaacttaccattgaggctgatgggctgttgtgtgaatcacacaggaccttaaatgaggctcattattctcacacaccaaa

SEQ ID NO: 231664 - DNA, 120 bp, Artificial Sequence
  ENSG00000119547_62 (sequence is synthesized)
atgactctgacagcctgaagcagttattgctagagcccaagctttccttggaggttttggagttaggttgattggaagtaaccagctaataccttttctagtggagaaaaagacattgct

SEQ ID NO: 231665 - DNA, 120 bp, Artificial Sequence
  ENSG00000119547_63 (sequence is synthesized)
accagcttgttcatcccatagaagtcttccactctgctccatttttagcagcaagcatttcatgtagcataaaccttggcagataagtgtgcctaaggtttatacagtctgtccgcttgg

SEQ ID NO: 231666 - DNA, 120 bp, Artificial Sequence
  ENSG00000119547_64 (sequence is synthesized)
atgtatacaaatttagatacatattttaacatgtgttctcatagatgactttataacaacacacattacctataggtgtctagactgtgtacatacaagtgtgtacagacaagcttcata

SEQ ID NO: 231667 - DNA, 120 bp, Artificial Sequence
  ENSG00000119547_65 (sequence is synthesized)
cgtatatactgtaatccgttacaacaaataaattttaaatcatcgtttaacatgtatgtggtacttctacagtgtacattgttttcattatttattgtaacattgaaaaccacagtgcag

SEQ ID NO: 231668 - DNA, 120 bp, Artificial Sequence
  ENSG00000119547_66 (sequence is synthesized)
ggaaaacaaaagtatcccagcatcttcatcctgtacacttggaattaatttcatttgggcatatccaagataaactcaactttcaagaaatcttgtatattatttaatcatctgtgttag

SEQ ID NO: 231669 - DNA, 120 bp, Artificial Sequence
  ENSG00000119547_67 (sequence is synthesized)
aacaaagaaaaagaagaaaaaataataaagtcaagcgcaaactgatggggagacagtgggctctggtttccaggattgagacaatggtactgcggtcttggggagactgcgttagctagt

SEQ ID NO: 231670 - DNA, 120 bp, Artificial Sequence
  ENSG00000119547_68 (sequence is synthesized)
ggggagtggtgatttttttcatgcttgtcacatctaaatggtctttaacatgagaaagttttagaggttataatttcctgctttgtttttatttagactatcaaatgaagttatacatgt

SEQ ID NO: 231671 - DNA, 120 bp, Artificial Sequence
  ENSG00000119547_69 (sequence is synthesized)
tgtcagtcaaaaaatgaagacaccctctgccccaccccacagaatgctttttatcttgtctctttgggttatgacccaacaagctaagtaccattaatgtaattaacttatttaaattag

SEQ ID NO: 231672 - DNA, 120 bp, Artificial Sequence
  ENSG00000119547_70 (sequence is synthesized)
ttcctagtacataaatgtataggatttgggtaattatttaatcatccttccttagtttgattctactccttgtacttatttatcaaaacctagaccaatggtgcatcagagatgcaaaat

SEQ ID NO: 231673 - DNA, 120 bp, Artificial Sequence
  ENSG00000119547_71 (sequence is synthesized)
tctacttggaatactcttgaagtttagtttgctttataaagcagtgaaattctgttacagacagggaagaaatacaggttacaaaaagagaatttgggatattcttccctcttaaattaa

SEQ ID NO: 231674 - DNA, 120 bp, Artificial Sequence
  ENSG00000119547_72 (sequence is synthesized)
cttttaaaatagtctaagtaacaatttttaaattatttaacttaagttcgcagccccacctggtaccaggcgaacttcacctcttaattattgtggccctcggagccttcatattgtaac

SEQ ID NO: 231675 - DNA, 120 bp, Artificial Sequence
  ENSG00000119547_73 (sequence is synthesized)
ttatttatttaacttattcagcatctgtgaaaggtgcactgtatagtttatatttttaatttaaaacaacagagagcactgcagtttgtttgctgtcagaacaacagagcaaattttgtg

SEQ ID NO: 231676 - DNA, 120 bp, Artificial Sequence
  ENSG00000119547_74 (sequence is synthesized)
gacaagcaatgactattcagcctgaacctgtgcattcagaaaacataagctgagaccctgcttcaccagcctggatttcggggcttctatacagaaactggaaaaataaattttaaaaaa

SEQ ID NO: 231677 - DNA, 120 bp, Artificial Sequence
  ENSG00000119547_75 (sequence is synthesized)
ttaaaaaaatcgtaaacaaaaagagagaaacccttacactagctgcttccaagaatgaactctgtgtgtatgtaaagcaacaaaacaaaaaaggaaaaaaacaaaaagcagaaaaaagaa

SEQ ID NO: 231678 - DNA, 120 bp, Artificial Sequence
  ENSG00000119547_76 (sequence is synthesized)
tgaaaaactttctatttctagtgagaaccaaagaaggctacctcactgactttttccatttgtaattttaatcgtgttgatgacaccaaagataccaaagatttctttctctgtgcggtc

SEQ ID NO: 231679 - DNA, 120 bp, Artificial Sequence
  ENSG00000119547_77 (sequence is synthesized)
tgcattttgcttgtgctcttttataatttgaacgattttctctgacatatggtatgtacagccacagctcagataccccaaagaaataattatctatgcgacggcggctgctaatttgga

SEQ ID NO: 231680 - DNA, 120 bp, Artificial Sequence
  ENSG00000119547_78 (sequence is synthesized)
aagggatattttctgtgtttctcttatatgtttgctgtctgctcgacatgttcaagatgcgagttcagatgctgctgtaattggattccttaaattctgattacaaattgaggaaggaaa

SEQ ID NO: 231681 - DNA, 120 bp, Artificial Sequence
  ENSG00000119547_79 (sequence is synthesized)
ctggttggaaatggccttcagtcctagccatggcctctatccccgctgggacctgtcacagtaaagactgccaattactgaaccacagaagctctgaccattgagtagttgagctggaag

SEQ ID NO: 231682 - DNA, 120 bp, Artificial Sequence
  ENSG00000119547_80 (sequence is synthesized)
agaccttaggaatcatttagtccaagccccggtggcccagaggaatgaaatagttatccaaatcaaataactcttgagagtgaaagcccacacatgcctcctggttcctgccccagtgct

SEQ ID NO: 231683 - DNA, 120 bp, Artificial Sequence
  ENSG00000119547_81 (sequence is synthesized)
ccgcttattgtacagtgctacctctgcatgagagcggtcccacattgacaaataggatggtggcaatcctttagcaatgagcagggactggggtttatctcttaacattttcagctgtaa

SEQ ID NO: 231684 - DNA, 120 bp, Artificial Sequence
  ENSG00000119547_82 (sequence is synthesized)
aattagtcacaagcattttcagtgtcccattagtacatagtcacatatggtcggttgcttcgtgaaggtggcctgtcttgaaatactagggctcatacgggatttttgccctaggaaaaa

SEQ ID NO: 231685 - DNA, 120 bp, Artificial Sequence
  ENSG00000119547_83 (sequence is synthesized)
catgttgatcccaatgatgtgatcacttttgaacctttccattacaaagcattgtatagataactttttaattcagtaggaggagaaagttcattcttggcctgttggctttgattatta

SEQ ID NO: 231686 - DNA, 120 bp, Artificial Sequence
  ENSG00000119547_84 (sequence is synthesized)
tgggtactttaaagtcagtatttatcaagaaagggaacttgaccaccattggcacatgtgacatttaagctcttcagccttttcctttttagttgtaggtgtttacatttcatttctaag

SEQ ID NO: 231687 - DNA, 120 bp, Artificial Sequence
  ENSG00000119547_85 (sequence is synthesized)
ccaactctgtatttatgagagaagtttaagccttacatcatttgatactaaagggttatttgtggtaaatgaaaaatgaccccaaaattacagaggaatatgccagtttaagaaatggct

SEQ ID NO: 231688 - DNA, 120 bp, Artificial Sequence
  ENSG00000119547_86 (sequence is synthesized)
acttaaagttgcttctctctttccttcttactcatgaaattaattggtcttcttcaagtttctttagattccattaaatgattaaatcactattaagagccattcatcaacgtgatttgt

SEQ ID NO: 231689 - DNA, 120 bp, Artificial Sequence
  ENSG00000119547_87 (sequence is synthesized)
gtgttagccaatgaatctgtctcagcttttgaccaaatgggttttagacaaatgcaaagatctgcctctagtccatatggctctttttgagtgctagtattttgcatttcacataatgta

SEQ ID NO: 231690 - DNA, 120 bp, Artificial Sequence
  ENSG00000119547_88 (sequence is synthesized)
gttattttgagcttttaaagagagcatttagacaaagaagcaaagagaggaagggaccaatcaactcatcagttccatgcatcaacaaagcatagctagtagaggaatataaatgacaga

SEQ ID NO: 231691 - DNA, 120 bp, Artificial Sequence
  ENSG00000119547_89 (sequence is synthesized)
ttgacaaactgtaggaaacactgttactctctttctgaagttttcaagcaccatcctatgtgaaagttccctcctgtccaaacaagctcaaggcccatcttctccctatacaaggcaaac

SEQ ID NO: 231692 - DNA, 120 bp, Artificial Sequence
  ENSG00000119547_90 (sequence is synthesized)
ctgtaaggccttccttccaaagagtacattgctttggttttcttcctaaattcctattggaattagaactctcagaatccctgggagacagagcaaagatgacttaattcattgagcagc

SEQ ID NO: 231693 - DNA, 120 bp, Artificial Sequence
  ENSG00000119547_91 (sequence is synthesized)
agagctccctataagtgaacatcaccttccccatctttcctactgccacacccatacgagagaggatctagaaagagcgatggcagcctgaacacagaaaacatccccacttggcagacc

SEQ ID NO: 231694 - DNA, 120 bp, Artificial Sequence
  ENSG00000119547_92 (sequence is synthesized)
tctcctcagcaatccccccagcctcatgcttcacttgcaaagtgtgacataaccacgggacgagtgccttgcttgaaccaaagcaacgatttagccagtctggacctctctgtgcttttt

SEQ ID NO: 231695 - DNA, 120 bp, Artificial Sequence
  ENSG00000119547_93 (sequence is synthesized)
ttaattcttcctgtgaatacctcagcttcaactgggcctccatacagtcagttggtgggcttattgtactgtggtgctttgcaatgcaaccctgcaaagaacaagatttgtactaatacc

SEQ ID NO: 231696 - DNA, 120 bp, Artificial Sequence
  ENSG00000119547_94 (sequence is synthesized)
aaaggttctttctctatgtctcctcctctgcctccctcgttcttcccttttttctagttcttcacggttccaaagctttactatgaacctgggcatgttggcaatgcagaccgcgcaatt

SEQ ID NO: 231697 - DNA, 120 bp, Artificial Sequence
  ENSG00000119547_95 (sequence is synthesized)
ccttaccgaattttctcagatatacctcatagacaatagtgtttagagtaatgttattatagcgtatgtaataaattattcactgtttcttttggtaactgtgatttaaaaaaagaaaaa

SEQ ID NO: 231698 - DNA, 120 bp, Artificial Sequence
  ENSG00000119547_96 (sequence is synthesized)
agaaaaaaaagctttatacgttttaggttgtgcttttgtaatagatgaaaaaaggtgcgcttaaaaagaaaatgtatgtttttttccccctttggattttatttatgctggattggggaa

SEQ ID NO: 231699 - DNA, 120 bp, Artificial Sequence
  ENSG00000119547_97 (sequence is synthesized)
agttgcagaatgagcccaaagtttacagtttcatattttgctgaagaaacaatctgtgttcatttgctctgttgaaaagaataattattttctacatttgtgccacttggtctgaacaat

SEQ ID NO: 231700 - DNA, 120 bp, Artificial Sequence
  ENSG00000119547_98 (sequence is synthesized)
taattgttccgtgttaacagtgtagtattatgattagcaactgccaatcagtgctataattttatgcatgaggctaaaaatttagcagtgtgatgcattgtggtcttaatagcaacattt

SEQ ID NO: 231701 - DNA, 120 bp, Artificial Sequence
  ENSG00000119547_99 (sequence is synthesized)
ttcattttgaactagatcttcccctttggttcaatggactttatttatgcatgggcgcctattgtttgttagcagttgtggaacagttgtgtatacattaaactgtgaaaatgtacacag

SEQ ID NO: 231702 - DNA, 120 bp, Artificial Sequence
  ENSG00000119547_100 (sequence is synthesized)
ttcagcctcagacggtggtaatattggttttattgggagatgtgtcacctcgaaaataccctttacatctgttgggatctgaaaatgagtcacattgaattgggttccagctttataatg

SEQ ID NO: 231703 - DNA, 120 bp, Artificial Sequence
  ENSG00000119547_101 (sequence is synthesized)
agaaacgttattcctaatttttgagttagccaatttgcattccacaaattgggatcctcataacccaaatatatcaccgtatgtgagagggatttgaaagcgagtattgaaaaactcacc

SEQ ID NO: 231704 - DNA, 120 bp, Artificial Sequence
  ENSG00000119547_102 (sequence is synthesized)
tttgcatatttaatttccaccaaaaggagttattttggctttatgctcatgaacttagacctaactggccatgtatatgtagatgcaaattcatctagctgtggccctctttgatctctg

SEQ ID NO: 231705 - DNA, 120 bp, Artificial Sequence
  ENSG00000119547_103 (sequence is synthesized)
cttgggaatggctatttttgactatgcgtggtttcttctcgtattttgtgatcaggtcagctcccagtagaaactcaaatggcatcaatattactaactcttctctgcccacttctcttt

SEQ ID NO: 231706 - DNA, 120 bp, Artificial Sequence
  ENSG00000119547_104 (sequence is synthesized)
tgtccactctcctagacattcccaccaactgttccagtgatttgggcaaaaatacgcagccatttcccaaaacttcacatgtgcagctatcatggctgtccctccctagacttggaggtg

SEQ ID NO: 231707 - DNA, 120 bp, Artificial Sequence
  ENSG00000119547_105 (sequence is synthesized)
actctcacttaatttttacctgcccaacaatgttccatctaccatctaaaaggtaatataagaagaagttttgaaacccactttaggaaaaccatcttctttaaatccttcaattatctg

SEQ ID NO: 231708 - DNA, 120 bp, Artificial Sequence
  ENSG00000119547_106 (sequence is synthesized)
aggcctctatatgtcaaaactatttttcagttgcaggggattgggcaaacttgttctttcttatacttgggttcaaagacccattctccagtttcatatttcccaaaccaaaatgcttga

SEQ ID NO: 231709 - DNA, 120 bp, Artificial Sequence
  ENSG00000119547_107 (sequence is synthesized)
cataaagccaaatcaactgccaagcacactttattttgcataggagtatgcagcctagggaaccttggttgaaaagcagcagtctgctatgcaaaatattggaaatcactgacagtgtag

SEQ ID NO: 231710 - DNA, 120 bp, Artificial Sequence
  ENSG00000119547_108 (sequence is synthesized)
cattcatattatctgtcaatgagggtatattgggaacgtgctctcgtgaataataaaaagcaacatatttttatttggccttataaattaggttgtggtaatgtaaactttgatatatag

SEQ ID NO: 231711 - DNA, 120 bp, Artificial Sequence
  ENSG00000119547_109 (sequence is synthesized)
tctttttatttttctcttattaatctgccaaagatgggaacagatacaagaatttttcaaattggcttttgtaagacaattgatgattgtaatagtgtttaatcttccagaaagctttat

SEQ ID NO: 231712 - DNA, 120 bp, Artificial Sequence
  ENSG00000119547_110 (sequence is synthesized)
atgttgttccacaataaaattgatatttgtttcagcaaagttttcctgacactcacaaacccacaaactgttcctcttaatgcagatattgtagaatctacaaagttcaaatccattttt

SEQ ID NO: 231713 - DNA, 120 bp, Artificial Sequence
  ENSG00000119547_111 (sequence is synthesized)
gatccaaagaaagtagaggagtatttgagacatgagtgtacccagccctttttttaatcacaggcaatgcatgggtctggctggttacactttgccaagaagacttgtcttatgaaaccc

SEQ ID NO: 231714 - DNA, 120 bp, Artificial Sequence
  ENSG00000119547_112 (sequence is synthesized)
aaggtatattttgttatgccattttatgtccttttcttttaacattgtggaaagtggtatgttgaatcaagtgtaagctgagttttccagacaactgaagtagctacatcatgaatgtta

SEQ ID NO: 231715 - DNA, 120 bp, Artificial Sequence
  ENSG00000119547_113 (sequence is synthesized)
ttttgttattaaagggtttttactcagtgctttgtgccaatggatgtccttttccttggagacacataactacaaaattacctcagcttggcctggttttctctcctgccctcttgggga

SEQ ID NO: 231716 - DNA, 120 bp, Artificial Sequence
  ENSG00000119547_114 (sequence is synthesized)
aacatgggcctggcctgggaaaaggcaggtcatgggctggaaggtaggttttggtactaggaagaaatctctgtatctgtcagctttaaagagaactgggccaaaaatctctaacctcac

SEQ ID NO: 231717 - DNA, 120 bp, Artificial Sequence
  ENSG00000119547_115 (sequence is synthesized)
tctctctggactccaacacttccctgcaatcctttggtcttgagcatgtgccagcatgaaggcagactccagttcatacatgaaaggcaagaaaaagaaaatagtaaccttgaatcttct

SEQ ID NO: 231718 - DNA, 120 bp, Artificial Sequence
  ENSG00000119547_116 (sequence is synthesized)
gtgggccaccaggcactcacctttccccaccttgcacactatccagtcaaggctattgcagcccatctggtggctttacatgggacattaccaaaggcttcttcctccatcctggggttg

SEQ ID NO: 231719 - DNA, 120 bp, Artificial Sequence
  ENSG00000119547_117 (sequence is synthesized)
caaaggatccaggtcccctccatccagtggggctcttccacatcagaagtccccctcccaccatcctctgcatcctgtttagctatcccatctataccttttggagatgattatttagaa

SEQ ID NO: 231720 - DNA, 120 bp, Artificial Sequence
  ENSG00000119547_118 (sequence is synthesized)
aacaaagaaaggtatggaatggggtttcctattgtttgctaggttatattttagcaattctcaattctttgatctggaaaaatacaagagggaaaaggagaccccactatctccctgtgc

SEQ ID NO: 231721 - DNA, 120 bp, Artificial Sequence
  ENSG00000119547_119 (sequence is synthesized)
tttgctcccatctcagggggcaggggcagtgcacattgcctatgctgttgatctgtcttgggcgacaggctgaatcacagctattgccccagccaaaaacatggcccatcaatgcctact

SEQ ID NO: 231722 - DNA, 120 bp, Artificial Sequence
  ENSG00000119547_120 (sequence is synthesized)
ttatctctgcttgaaaatcctattcaaaaagttgtagagtttgaggtttttatccccccatatcctttgctttggtccagtttggcctttagcataagagtcagctttatctctaggaaa

SEQ ID NO: 231723 - DNA, 120 bp, Artificial Sequence
  ENSG00000119547_121 (sequence is synthesized)
gttttttcagattatgacaaggaacctgccacctgggaagaaaagagtccgaagactagcaatcggataggtagtcataccattaacagatacttccttgaaggtagaatattatttcct

SEQ ID NO: 231724 - DNA, 120 bp, Artificial Sequence
  ENSG00000119547_122 (sequence is synthesized)
ttctttacagttttgtgttacacaagtccaagtggtgccagcaaacttcttaccgtgaaatgttgtaaaacacctggcatactgaaatttctgaaacaaaaacacaagctccacattgat

SEQ ID NO: 231725 - DNA, 120 bp, Artificial Sequence
  ENSG00000119547_123 (sequence is synthesized)
aacttgataaataaccactaaagtttagatgcagggactgagatgatacaggcaaaatcttggtgttggtttctcttttaattcgtatcttcgatcacctaacctttctcaatccaagag

SEQ ID NO: 231726 - DNA, 120 bp, Artificial Sequence
  ENSG00000119547_124 (sequence is synthesized)
cagttcagtcttttctccccaagtctaggatgccaaagagcatcataggaaaagataattagggattgaccagcatttcaattagttctcttcttcatctttgcatttctcaaaagtgtt

SEQ ID NO: 231727 - DNA, 120 bp, Artificial Sequence
  ENSG00000119547_125 (sequence is synthesized)
ctcctggaccagagggaaagagctggtccattttttttcattctttctattcaaatttttccacccagacaatactttattaacacagatactgtagatccttccttggtcagtgaatta

SEQ ID NO: 231728 - DNA, 120 bp, Artificial Sequence
  ENSG00000119547_126 (sequence is synthesized)
ttacaagaggagctatccttccaccaaagtgagtgaaaacaagttccagtatcttttcttccatccagttttgttctcagaatccaagtcagtcctgggtcttttctcactttagaccct

SEQ ID NO: 231729 - DNA, 120 bp, Artificial Sequence
  ENSG00000119547_127 (sequence is synthesized)
ggcctcagatgtgtttattcttgctatttaaaaatacctttaaatttcacatgctggcctgcagaacttgcatcctttgttctatactgttgactgcttgatggtattgaaaggtgacta

SEQ ID NO: 231730 - DNA, 120 bp, Artificial Sequence
  ENSG00000119547_128 (sequence is synthesized)
taatgagggaagaaaggaggaggtaaagagagaagaatttgtcccagatctgtttaaagtttcaaaatttaaaaagggacccattaaattatgggaaaatggctatagagtgtgagcctc

SEQ ID NO: 231731 - DNA, 120 bp, Artificial Sequence
  ENSG00000119547_129 (sequence is synthesized)
cgttgaccatatgctcaaagaccgtactctgccacctgccttccaggtagctattctagaaactcagtcctttgtggaaacccaactaccttttaaaagtctctttccagattccaaaag

SEQ ID NO: 231732 - DNA, 120 bp, Artificial Sequence
  ENSG00000119547_130 (sequence is synthesized)
gacaagagatcagagagtcacatatacgcctcttgttttattttcttgctttcacgggtattattgccaagaaaatcgtagggaaaaactttaaacttttcttttcagttgatccctttg

SEQ ID NO: 231733 - DNA, 120 bp, Artificial Sequence
  ENSG00000119547_131 (sequence is synthesized)
acatcacctctcatgtttaaaatcaggaaaacacacccctaaaatttgcactctcttccgttttgaaaaagaaaacccacacacaaatgcacactattaccgtctttcaccctgcgctat

SEQ ID NO: 231734 - DNA, 120 bp, Artificial Sequence
  ENSG00000119547_132 (sequence is synthesized)
atttccaaagtgtattataatccagatattgccccatctcaaacatgttaagtcagactgtgctgaaagactttccagggacggtcaacagggtatatgttcagtggctgccctgaaatc

SEQ ID NO: 231735 - DNA, 120 bp, Artificial Sequence
  ENSG00000119547_133 (sequence is synthesized)
ctggtggggatgaggatcacgcttcatcatcaaggggatgcccatcccctgataagctcccagtccttttggaagatttctttgaatgttaattgcattttcagttttgctcatttccca

SEQ ID NO: 231736 - DNA, 120 bp, Artificial Sequence
  ENSG00000119547_134 (sequence is synthesized)
ccccaatgttttgtctgcaacatcgcttacactggattctttctatttttattcctatcattaaatggtagtgctgtaaattctgcaattaatgttaaataaactgctttaattcattga

SEQ ID NO: 231737 - DNA, 120 bp, Artificial Sequence
  ENSG00000119547_135 (sequence is synthesized)
atttggagaggccacaggcagcagcagctccttgagttccagcaggatctggagaatgtctttgaagcttgggaacacagaatggtcgctgtgcggtctgcctccagccgacacgtgcaa

SEQ ID NO: 231738 - DNA, 120 bp, Artificial Sequence
  ENSG00000119559_0 (sequence is synthesized)
cagaggttgagccagaccctgaagccttggccaccgtgtttttgggcggagggagggtcagggcctggggcgagctcagaggggcgggacagggcgggcttccccgggagcgggaccgcg

SEQ ID NO: 231739 - DNA, 120 bp, Artificial Sequence
  ENSG00000119559_1 (sequence is synthesized)
acgggtgcgtacgagttcgctgggcgggaggagcagcccgggcaagggcggagaggtggacgccccggtcagcgcccccttccccgccttcagagatgggctccaaggcaaagaagcgcg

SEQ ID NO: 231740 - DNA, 120 bp, Artificial Sequence
  ENSG00000119559_2 (sequence is synthesized)
tgctgctgcccacccgcccagcgccccccacggtggagcagatcctggaggatgtgcggggtgcgccggcagaggatccagtgttcaccatcctggccccggaagaccccccagttccct

SEQ ID NO: 231741 - DNA, 120 bp, Artificial Sequence
  ENSG00000119559_3 (sequence is synthesized)
tcaggatgatggaggatgcggaggccccgggagagcagctctaccagcaaagccgggcctacgtggctgccaaccagcggctgcagcaggcgggcaacgtgctgaggcagaggtgtgagc

SEQ ID NO: 231742 - DNA, 120 bp, Artificial Sequence
  ENSG00000119559_4 (sequence is synthesized)
tcctgcagcgagccggcgaggacctggagcgggaggtggcccagatgaagcaggcagcattaccggcagccgaggctgcctcctcaggctgacctctcggggcctgcaggcttgggcagc

SEQ ID NO: 231743 - DNA, 120 bp, Artificial Sequence
  ENSG00000119559_5 (sequence is synthesized)
gcacaaggtggcctgcacccaggctttccctgggggtccgtcggccccagactggcattcacggggtcccagcccacgtgggtgttgacacaggcgcccctcctgatgctggggctgcgg

SEQ ID NO: 231744 - DNA, 120 bp, Artificial Sequence
  ENSG00000119559_6 (sequence is synthesized)
ttcatccgtcgtctcattcatgccgagttggtgggacccacccagctggctccgtcctgcgtgacctgagggccccactggggttctggaagaggatagggacattattgctgtactgtg

SEQ ID NO: 231745 - DNA, 120 bp, Artificial Sequence
  ENSG00000119559_7 (sequence is synthesized)
attctgtcgtcagctcacagtggccgtgctctgcagtggggcccctgggagcaggtgccacctccttcctctcccggggcaggcactcgcctgtccacttctgagtccaggtgttgggat

SEQ ID NO: 231746 - DNA, 120 bp, Artificial Sequence
  ENSG00000119559_8 (sequence is synthesized)
cgaggtgttaactgtgattccatccagcgagtgcccacccaatgtcagagcagcccgagggccagcctgagcccctgaccccacttccttctgggccccgggctcctcccacaagccacg

SEQ ID NO: 231747 - DNA, 120 bp, Artificial Sequence
  ENSG00000119559_9 (sequence is synthesized)
ttgatcttcacaacgaccctgggccgctggggtcacccaagagaagcagccctgagacccagccaggctgggcctagctccacggcacgggtgtctcccagccactgcccttgctggagg

SEQ ID NO: 231748 - DNA, 120 bp, Artificial Sequence
  ENSG00000119559_10 (sequence is synthesized)
gctgtgagtcactggccaggagcccagggtgtcctgagtctcatagccaccctgccagctgcagcaggtcctgggcctgcttccctgcgggttctggccctgggggagggggcgttagtg

SEQ ID NO: 231749 - DNA, 120 bp, Artificial Sequence
  ENSG00000119559_11 (sequence is synthesized)
cggcggagggtcttgccaaaggcttttcatcctaaatagcaacttgagtggaaacctgggcaaggcggcccagaggctgggccctgcacataaagctttcgtgtgtgtctggccgtctga

SEQ ID NO: 231750 - DNA, 120 bp, Artificial Sequence
  ENSG00000119559_12 (sequence is synthesized)
atggtgcctctgtgagcggctccgtcccggggccccggaagctggggagggatgggtaccggcgaccccgggaaccctgctcagtcctgccgggcactgcatgcagggaccgtccgcctg

SEQ ID NO: 231751 - DNA, 120 bp, Artificial Sequence
  ENSG00000119559_13 (sequence is synthesized)
acccagagacctggggctgcctcaccctctctccagacccacagccagctttgtttcttgaatgtggaagatgtttcttattccctgaagaaagggggcctgccacacacagcctgggag

SEQ ID NO: 231752 - DNA, 120 bp, Artificial Sequence
  ENSG00000119559_14 (sequence is synthesized)
gcgcctcatccagaaactgggacttggctagcccggcctgggccctagggacttctcactggtcatgcttctgaagctgctcacctggccgagggaggtcccggcagtgtcccagggtgg

SEQ ID NO: 231753 - DNA, 120 bp, Artificial Sequence
  ENSG00000119559_15 (sequence is synthesized)
aaggtggggagggggccggctcctgccatcccttcccaccctgcacttctgtgctgcttgcagtcatagctttccttgtccccccagctgggccagggctgtgctccctgaagtggcttt

SEQ ID NO: 231754 - DNA, 120 bp, Artificial Sequence
  ENSG00000119559_16 (sequence is synthesized)
gacgtggggccgtcccagctcccgcagcccctgtccaccattgactctccccggtagtggctgctgtggctgccccatcccagctgttgcaccagccacagctcctagtggctcatgggt

SEQ ID NO: 231755 - DNA, 120 bp, Artificial Sequence
  ENSG00000119559_17 (sequence is synthesized)
gcctcctgccccacactggggcctgccataataactggcccaggtaccaatgcccaggttggaccccctgtctggggtgctgtgcaccccctggagcctgccctcccttgggaccagggg

SEQ ID NO: 231756 - DNA, 120 bp, Artificial Sequence
  ENSG00000119559_18 (sequence is synthesized)
gagactcctggcctcagccagtgcctccccggcccatctgggtggggtgcccacaaaccctgtgcccccagtttctgctttctggctctgcttccagggatctaacctggggggtctcag

SEQ ID NO: 231757 - DNA, 120 bp, Artificial Sequence
  ENSG00000119559_19 (sequence is synthesized)
caattctgtggcagcacatagacagcgatgaacctacccgcccacagcccattttgaggaagaggtgatggcggcaggcaatgcaagagctcagtttattaaatgtgtgcgagtcggaca

SEQ ID NO: 231758 - DNA, 120 bp, Artificial Sequence
  ENSG00000119559_20 (sequence is synthesized)
gtgttccggccgccgagtgctcatgcaccaccaggctcccttaggtggacagcaattttgtgctcccgtcagccacatgggtggcgtgtcccctagtgccgtgttccccttttcagaaag

SEQ ID NO: 231759 - DNA, 120 bp, Artificial Sequence
  ENSG00000119559_21 (sequence is synthesized)
acgagcctcggatgcttttctacccagccagtggagcctggactcgaactcgctctcatcgtagcgcgtccaggttcgggttcgcctgagaggctgagatccgagtctcaagggcactat

SEQ ID NO: 231760 - DNA, 120 bp, Artificial Sequence
  ENSG00000119559_22 (sequence is synthesized)
ccctttaagacggggcggagccccgcgatgagcggcgggccggcgggagaggaggccggaagtgtgtgtcacgtgttcggggacggggcggtgctccgaccggaatcggaagtggctgcg

SEQ ID NO: 231761 - DNA, 120 bp, Artificial Sequence
  ENSG00000119559_23 (sequence is synthesized)
gagccaccacacctggctgcatccgtcatgttaagaagaccccggctggcaagctcactcggggactgcagggaaccctgccctttgggggcagtagtgaggggtgcccaggaggatggg

SEQ ID NO: 231762 - DNA, 88 bp, Artificial Sequence
  ENSG00000119559_24 (sequence is synthesized)
cagtgaggttgtttttttgagacgcagtcttgctctgtggcccaggctggaatgcagtggcgcaacctccgcctcctaggttcaagtg

SEQ ID NO: 231763 - DNA, 77 bp, Artificial Sequence
  ENSG00000119559_25 (sequence is synthesized)
acaggcgcccgctgccacgcctggctgttttttttagtagagatggggtctgaccatgttggccaggctggtctcga

SEQ ID NO: 231764 - DNA, 120 bp, Artificial Sequence
  ENSG00000119559_26 (sequence is synthesized)
tcgaactcctgacctcaagtgagccacggcgcccagcccacatttgctttcaaagagcagtgacatgaggagtgagccccagccggtctgaggctggaccacccgctaagcagtgagctg

SEQ ID NO: 231765 - DNA, 120 bp, Artificial Sequence
  ENSG00000119559_27 (sequence is synthesized)
gtgagctgttcaacttgatttcctcccaagtcggagagctcgcccgctgccgccagcagtctccttccagtgactgaagaagcatccctgccgcccaccgggtgcccaccttggtggccc

SEQ ID NO: 231766 - DNA, 120 bp, Artificial Sequence
  ENSG00000119559_28 (sequence is synthesized)
tgcactgggcttgcatacgtgggggagcagggagccatacgtagtttctgctgaatgtgggagtcaccaggacgtcaatgcccacctctcaccttcgccacccctgcctccctaagtgtg

SEQ ID NO: 231767 - DNA, 120 bp, Artificial Sequence
  ENSG00000119559_29 (sequence is synthesized)
tgctccaggaggttgcacggcccctggagaggttttcggtggcgggcttgttgcgtctctggcttccagagacagcaggaatgagagccaggccagctcagtggagtccatcccggtggg

SEQ ID NO: 231768 - DNA, 120 bp, Artificial Sequence
  ENSG00000119559_30 (sequence is synthesized)
agcatgcagttcggtcacctgagggtgctggggccgtggtttgagcttcatgggctcaggtccatggccgttgagtgtggcgaaactgaggcacgctgtgcgggggacggggggcgctca

SEQ ID NO: 231769 - DNA, 120 bp, Artificial Sequence
  ENSG00000119559_31 (sequence is synthesized)
cagaaggtagggggcctcctgtgccttcatccaggcactgcccggcctttcccaccctgttgctaaagcaggtgatgacagaggtgatttgatcagcccagacccgtgcggcacgtggag

SEQ ID NO: 231770 - DNA, 120 bp, Artificial Sequence
  ENSG00000119559_32 (sequence is synthesized)
aatggaagccccgcccccaggagggccactgctggcgaggcttgagctctttctgtgacccgatccccctggtcacacgctttgctaaggcgggtagcctagagctggaagcccctcctg

SEQ ID NO: 231771 - DNA, 120 bp, Artificial Sequence
  ENSG00000119559_33 (sequence is synthesized)
gcctagagctggaagcccctcctgccacccagccactgtgcctctcccagctgatggacgaggaagcctccattacttgatttttgtttttatttatttttgagacagggtctcattctg

SEQ ID NO: 231772 - DNA, 120 bp, Artificial Sequence
  ENSG00000119559_34 (sequence is synthesized)
accgtggcacgatcatagcttattgcagcctcggcctcccagtctcaagcgatcctcctgcctctgcctccagagaagtagggaccacagatgcgtgctaccacgcccagctaatttttg

SEQ ID NO: 231773 - DNA, 120 bp, Artificial Sequence
  ENSG00000119559_35 (sequence is synthesized)
aacccccgcaacatgggcacggtccgtatcctctccgagtctccctctactcctccgtagagtgggaccgattttcagagggttcttctgacaggggtggaggccgggcgctgtggttca

SEQ ID NO: 231774 - DNA, 68 bp, Artificial Sequence
  ENSG00000119559_36 (sequence is synthesized)
ggttcttctgacaggggtggaggccgggcgctgtggttcaggcctgtaagcccagcactttcggagga

SEQ ID NO: 231775 - DNA, 120 bp, Artificial Sequence
  ENSG00000119574_0 (sequence is synthesized)
gtggggcgcgggcaatggagcagagtatgggagaacgcgctcggagtaaagcacacggcgcggcgaaggcgtggcgggagtgtgcggcgccggacccgggaagctggcctgggcgccggg

SEQ ID NO: 231776 - DNA, 120 bp, Artificial Sequence
  ENSG00000119574_1 (sequence is synthesized)
tctcgagtgcaggcctttgttctgaagtgtccaggccggccttgcggcgtcgggactgaggaatggagcccgtcgcggggcggggcgggaaaggaaggttcaagtctctcgggttgatgc

SEQ ID NO: 231777 - DNA, 120 bp, Artificial Sequence
  ENSG00000119574_2 (sequence is synthesized)
gcaagtttccgtccccatcggccggacagattagaatcctttcaggtgctagatggcggctgcagaggctgtgcatcacatacacctgcagaacttctcacgctctctgcttgagaccct

SEQ ID NO: 231778 - DNA, 120 bp, Artificial Sequence
  ENSG00000119574_3 (sequence is synthesized)
caatgggcagaggcttgggggacacttctgtgacgtgactgtgcgcattcgtgaagcttcgctgcgtgcccaccgctgcgtgctggcggccggctcacccttcttccaagacaagctgct

SEQ ID NO: 231779 - DNA, 120 bp, Artificial Sequence
  ENSG00000119574_4 (sequence is synthesized)
gctcggccactctgagatccgtgtgcctccggtggtgcccgcgcagacagtgcgacagctggtagagttcctgtacagcggttcgctcgttgtggcgcagggtgaagccctgcaggtgct

SEQ ID NO: 231780 - DNA, 120 bp, Artificial Sequence
  ENSG00000119574_5 (sequence is synthesized)
cacggccgcgtcagtgcttcgcatacagacagttatcgacgaatgcacgcagattatcgcccgcgctcgagccccgggcacctctgcgcccacgcccctgcccacccctgtgcccccgcc

SEQ ID NO: 231781 - DNA, 120 bp, Artificial Sequence
  ENSG00000119574_6 (sequence is synthesized)
actcgcacctgcgcagctgcgtcaccgcctgcgccacctgctggctgcacgtcccccggggcaccccggtgctgcacacagccgtaagcagcgccagcccgcgcgtttgcagctgccagc

SEQ ID NO: 231782 - DNA, 120 bp, Artificial Sequence
  ENSG00000119574_7 (sequence is synthesized)
gcccccaacacctgccaaggctgaggggcctgatgctgacccctcactgtccgcggcccctgatgaccgaggtgacgaggatgacgaggaaagtgacgatgagaccgatggcgaggatgg

SEQ ID NO: 231783 - DNA, 120 bp, Artificial Sequence
  ENSG00000119574_8 (sequence is synthesized)
cgaaggtggcggcccaggcgagggccaggcacctccttccttcccagactgtgctgctggcttcctcactgctgctgctgacagcgcgtgcgaggagccccctgcacccactggcctcgc

SEQ ID NO: 231784 - DNA, 120 bp, Artificial Sequence
  ENSG00000119574_9 (sequence is synthesized)
tgtatccacttggcacgacgaggatggcgctgtccccgaaggctgtcccactgagacccctgtccagcccgactgcatactgtctggatcccgcccgcctggtgtgaagaccccagggcc

SEQ ID NO: 231785 - DNA, 120 bp, Artificial Sequence
  ENSG00000119574_10 (sequence is synthesized)
gcccgttgcactcttcccctttcacttgggtgcccctgggccacccgcaccacccccttcagcaccatcggggccagcccctgcgcccccacccgccttctaccccacactccagcccga

SEQ ID NO: 231786 - DNA, 120 bp, Artificial Sequence
  ENSG00000119574_11 (sequence is synthesized)
ggcagcccccagtactcagctgggggaggtcccggctccctctgctgctcccaccacggccccctcaggcacccctgctcgcaccccaggtgctgagccacctacgtatgagtgcagcca

SEQ ID NO: 231787 - DNA, 120 bp, Artificial Sequence
  ENSG00000119574_12 (sequence is synthesized)
ctgtcgcaagacgttcagctcccggaaaaactacaccaagcacatgttcatccactcgggggagaagccgcaccagtgcgccgtgtgctggcgatccttctctctacgcgactacctgct

SEQ ID NO: 231788 - DNA, 120 bp, Artificial Sequence
  ENSG00000119574_13 (sequence is synthesized)
caaacacatggtcacgcacaccggcgtgcgcgccttccagtgcgccgtctgcgccaagcgcttcacgcagaagagctcgctcaacgtgcacatgcgcactcaccggcccgagcgcgcgcc

SEQ ID NO: 231789 - DNA, 120 bp, Artificial Sequence
  ENSG00000119574_14 (sequence is synthesized)
cctgcggcaaggtcttctcgcaccgcgcgctgctggagcgccacctggcggcgcaccctgcgccctgatggcgctggggcctggcctcgcccacggtggatccggggcctcccgcacagt

SEQ ID NO: 231790 - DNA, 120 bp, Artificial Sequence
  ENSG00000119574_15 (sequence is synthesized)
cgcacagtcggccacgcccgctgcgggacccgtggttcccgccactagaccacgctccctcctgagcgcaggtcctctctctcccttcaccctttctccataccagggcctaagtccgcc

SEQ ID NO: 231791 - DNA, 120 bp, Artificial Sequence
  ENSG00000119574_16 (sequence is synthesized)
ttactcctctcctccatgtacttgaaccctccaggtggtgccgggctggggctggggctggttagaccacttctgagaactggactatttcctgcgtaaaccgggcgctcaggcgcttgg

SEQ ID NO: 231792 - DNA, 120 bp, Artificial Sequence
  ENSG00000119574_17 (sequence is synthesized)
acccggcccaagatttgactccggttctcaccccgccctctcctggggtggtggtgggggctggggggccgcttgcctgccccagggtcaggctgggcaaggtccctagctctctaccca

SEQ ID NO: 231793 - DNA, 120 bp, Artificial Sequence
  ENSG00000119574_18 (sequence is synthesized)
agctgttactccctcatggggcgcctaaggagactcaagtggacccatcatatatgggggctgggcctcgggactctcgctctaataaaggactgtaggccatggggcctaaaccacgaa

SEQ ID NO: 231794 - DNA, 120 bp, Artificial Sequence
  ENSG00000119574_19 (sequence is synthesized)
ggagtcggaggtggggtcgaatgggcatccccctgccgcagggcgggcgaggaggctggggcgtgccaggggaggggcacctgcgctccgctagaagcgcacgctgagaacgcgaggggg

SEQ ID NO: 231795 - DNA, 120 bp, Artificial Sequence
  ENSG00000119574_20 (sequence is synthesized)
cctggcttttttgaggcattgcacagaaggctcagaacagggccagggagcggggtggtgtatccggatccgtagtctggaaaagctccctctggctgccgtgtggggaacagaagggga

SEQ ID NO: 231796 - DNA, 120 bp, Artificial Sequence
  ENSG00000119574_21 (sequence is synthesized)
ggcgaggggcgcagagacaccagccaggtttcttcatccgtccaggacagcgggaacggggcagtggagatggcggctgcagaggctgtgcatcacatacacctgcagaacttctcacgc

SEQ ID NO: 231797 - DNA, 120 bp, Artificial Sequence
  ENSG00000119574_22 (sequence is synthesized)
gttgaaaacgtggtgggtgggtgcattgaggctggccccgggggggtgggcctcagccccctgtgcggtgcccctggggtcgtgaggtctccggtccaggtgacaacggctgggggcggg

SEQ ID NO: 231798 - DNA, 120 bp, Artificial Sequence
  ENSG00000119574_23 (sequence is synthesized)
gtaggtggcagcttccggaggatgtttggaggccgcgaggactggcgcgaacaaccatgaaacccattcgccactcccaaggcgcgcacagatggcggctgcagaggctgtgcatcacat

SEQ ID NO: 231799 - DNA, 120 bp, Artificial Sequence
  ENSG00000119596_0 (sequence is synthesized)
cttcccggtcgcgggcccagctcgggagcgccggcgcactggcgcgctccgtttacacgctccggggcctgtaggcgccgcgagttccggctgtcgccgtcgccgccgcggctcctggag

SEQ ID NO: 231800 - DNA, 120 bp, Artificial Sequence
  ENSG00000119596_1 (sequence is synthesized)
gtcggttgcgacgagtaacggcgccaggacgagccctgcgccttctttttcgatatgtacccgaattggggccggtatggcgggagcagccactatccgccgccaccggtcccaccgccg

SEQ ID NO: 231801 - DNA, 120 bp, Artificial Sequence
  ENSG00000119596_2 (sequence is synthesized)
ccgccagtggcgcttcctgaggcctcgccggggcccgggtactcgagctcgacgactcccgcggccccctcctcctcgggcttcatgagcttccgcgaacagcacttggcgcagctccag

SEQ ID NO: 231802 - DNA, 120 bp, Artificial Sequence
  ENSG00000119596_3 (sequence is synthesized)
cagctgcagcagatgcaccagaagcaaatgcagtgcgtgcttcagccccaccaccttcctccgccccctctgccgcccccgccagtgatgccggggggcggctacggagactggcagccg

SEQ ID NO: 231803 - DNA, 120 bp, Artificial Sequence
  ENSG00000119596_4 (sequence is synthesized)
ccaccgccaccgatgcccccgccacccgggccggccctcagctatcagaagcagcagcagtacaaacaccagatgctccaccaccaacgagacgggcctcctggtttggttccaatggag

SEQ ID NO: 231804 - DNA, 120 bp, Artificial Sequence
  ENSG00000119596_5 (sequence is synthesized)
ctggaatccccccctgaatctccccctgtgccgcctgggtcctatatgcccccatctcagtcttacatgcccccacctcagccgccaccctcttactaccccccgacctcatctcagccc

SEQ ID NO: 231805 - DNA, 120 bp, Artificial Sequence
  ENSG00000119596_6 (sequence is synthesized)
tacctgcctcctgctcagccgtccccttcgcagtccccaccttcccaatcctacctggcgcccaccccttcttactcatcctcctcctcttcctcgcaatcctatttgagccattcccag

SEQ ID NO: 231806 - DNA, 120 bp, Artificial Sequence
  ENSG00000119596_7 (sequence is synthesized)
tcctacttgccctcttctcaggcatctccttcccgcccctcccagggccattctaaatcccaactactagctccaccaccaccgtccgccccccctggaaataagacaactgtccagcaa

SEQ ID NO: 231807 - DNA, 120 bp, Artificial Sequence
  ENSG00000119596_8 (sequence is synthesized)
gagcctttggagagtggggccaaaaacaagagtactgaacagcagcaagccgcccctgagccagatccctctacgatgactccacaggaacagcagcagtattggtatcgacagcacttg

SEQ ID NO: 231808 - DNA, 120 bp, Artificial Sequence
  ENSG00000119596_9 (sequence is synthesized)
cttagtttgcaacagaggacaaaagttcatttgccaggacacaaaaagggtcctgtggtagcaaaggatacaccagagccggtaaaagaagaagttacagtacctgccaccagtcaagtt

SEQ ID NO: 231809 - DNA, 120 bp, Artificial Sequence
  ENSG00000119596_10 (sequence is synthesized)
ccagaatctccttcttctgaggagcccccattgccacctccaaatgaggaagtgccacctcctctcccacctgaggaaccccagtctgaggacccagaagaagatgccaggttaaagcag

SEQ ID NO: 231810 - DNA, 120 bp, Artificial Sequence
  ENSG00000119596_11 (sequence is synthesized)
ttgcaggctgcagcagcacactggcagcagcaccagcagcatcgagtcggtttccagtatcagggaataatgcagaagcacactcagttacagcagattctacaacagtatcagcagatt

SEQ ID NO: 231811 - DNA, 120 bp, Artificial Sequence
  ENSG00000119596_12 (sequence is synthesized)
atacagcccccaccacatatacagaccatgtctgtagatatgcagctgcggcattatgagatgcagcagcaacagtttcaacatctttaccaagaatgggagcgagagtttcagctatgg

SEQ ID NO: 231812 - DNA, 120 bp, Artificial Sequence
  ENSG00000119596_13 (sequence is synthesized)
gaggaacaactccattcctatcctcataaagatcagcttcaggagtatgagaagcagtggaaaacatggcagggacatatgaaagccactcagagctatctccaggagaaagtcaattca

SEQ ID NO: 231813 - DNA, 120 bp, Artificial Sequence
  ENSG00000119596_14 (sequence is synthesized)
tttcagaacatgaagaaccagtatatggggaacatgtcaatgccacctccttttgttccatattctcagatgcctccacctctacctacaatgccccctccagtgttgcctccttcattg

SEQ ID NO: 231814 - DNA, 120 bp, Artificial Sequence
  ENSG00000119596_15 (sequence is synthesized)
ccaccaccagtgatgccccctgccctccctgctacagtgccaccacctggcatgcccccacctgttatgccaccttctctaccaacctctgttcccccaccagggatgcctccttctctc

SEQ ID NO: 231815 - DNA, 120 bp, Artificial Sequence
  ENSG00000119596_16 (sequence is synthesized)
tcttctgcagggccaccaccagttctccccccaccttccctgtcttctgcagggccaccaccagttcttcccccaccatctctctcttcaacagcacctccacctgtcatgcccctccca

SEQ ID NO: 231816 - DNA, 120 bp, Artificial Sequence
  ENSG00000119596_17 (sequence is synthesized)
ccattgtcttcagctacacctcctccaggaatacctccccctggagttccacaagggatacctcctcagttaacagcagccccagttccaccagcctccagttcacagagctcgcaagtt

SEQ ID NO: 231817 - DNA, 120 bp, Artificial Sequence
  ENSG00000119596_18 (sequence is synthesized)
ccagagaaacctagaccagcactgcttcctactcctgtgtcttttggttctgccccaccgacaacttaccatcctccgttgcaatcagctggtccatcagaacaagtgaattcaaaagct

SEQ ID NO: 231818 - DNA, 120 bp, Artificial Sequence
  ENSG00000119596_19 (sequence is synthesized)
cctttgagcaagtctgctctgccatacagttcattctcatctgatcaaggacttggggagtcttcagctgctccatctcagccaatcactgcagtgaaggacatgccagtgagatcaggt

SEQ ID NO: 231819 - DNA, 120 bp, Artificial Sequence
  ENSG00000119596_20 (sequence is synthesized)
ggcctgcttccagatcctcctagaagtagttacttggaaagtccaagaggcccaagatttgatggtcctcgaagatttgaggatttagggtcaaggtgtgaaggaccgagacccaaaggg

SEQ ID NO: 231820 - DNA, 120 bp, Artificial Sequence
  ENSG00000119596_21 (sequence is synthesized)
cctcgttttgaaggaaatcgccccgatgggccaagacccagatatgaaggtcacccagcagagggcactaaaagcaagtggggaatgattccccgggggccagcatctcaattttatatt

SEQ ID NO: 231821 - DNA, 120 bp, Artificial Sequence
  ENSG00000119596_22 (sequence is synthesized)
acccccagtacatccctaagtcctcgacagagtggaccacagtggaaaggccccaaaccagcttttggacagcagcatcagcagcaacctaagtcacaagcagaacctctttcaggaaac

SEQ ID NO: 231822 - DNA, 120 bp, Artificial Sequence
  ENSG00000119596_23 (sequence is synthesized)
aaagaaccattagcagacaccagtagtaaccagcagaagaattttaaaatgcaatcagctgcattttccattgctgcagatgtaaaggatgtcaaggcggctcagtcaaatgagaatcta

SEQ ID NO: 231823 - DNA, 120 bp, Artificial Sequence
  ENSG00000119596_24 (sequence is synthesized)
agcgactctcaacaagagccacctaaaagtgaagtctcggaagggcccgtagagccctctaattgggaccagaatgttcaaagtatggagactcaaatcgacaaagcccaagctgttact

SEQ ID NO: 231824 - DNA, 120 bp, Artificial Sequence
  ENSG00000119596_25 (sequence is synthesized)
cagcctgtaccccttgcgaataagcctgtacctgctcaatctacttttccttcaaaaacaggggggatggagggaggaacagcagtagcaacatcatcattaacagcagataatgatttt

SEQ ID NO: 231825 - DNA, 120 bp, Artificial Sequence
  ENSG00000119596_26 (sequence is synthesized)
aaacctgtgggtattggtctaccccattcagaaaacaaccaagataaaggcctgcctcggccagataatagagataatagattagaaggcaatagaggcaacagctcatcttacagaggt

SEQ ID NO: 231826 - DNA, 120 bp, Artificial Sequence
  ENSG00000119596_27 (sequence is synthesized)
cctgggcaaagcagaatggaagacacacgggataaaggtctagtaaacagaggtcgcggccaggcaatcagtcgaggcccaggattggtcaagcaagaagactttcgggataagatgatg

SEQ ID NO: 231827 - DNA, 120 bp, Artificial Sequence
  ENSG00000119596_28 (sequence is synthesized)
ggtagaagagaagatagtcgagagaagatgaacagaggagaaggtagccgggacagagggttggtgaggcctggaagcagtcgggagaaagtgccaggtggtcttcaagggagccaggac

SEQ ID NO: 231828 - DNA, 120 bp, Artificial Sequence
  ENSG00000119596_29 (sequence is synthesized)
aggggtgcagctggcagccgagaaaggggaccacctcggagggctggcagtcaggagaggggacctcttcgaagggctgggagtagagagagaataccaccccgaagagctgggagcagg

SEQ ID NO: 231829 - DNA, 120 bp, Artificial Sequence
  ENSG00000119596_30 (sequence is synthesized)
gagagaggaccacctcgagggcctggcagtcgagaaaggggactgggaagatcagattttggtcgtgatagaggtccattcagaccagaaccaggagatggtggggaaaaaatgtatcca

SEQ ID NO: 231830 - DNA, 120 bp, Artificial Sequence
  ENSG00000119596_31 (sequence is synthesized)
tatcaccgggatgagcctcctagggctccatggaaccatggagaagagcgagggcatgaagagtttccattagatggtagaaatgctccaatggaacgagaaagactcgatgactgggat

SEQ ID NO: 231831 - DNA, 120 bp, Artificial Sequence
  ENSG00000119596_32 (sequence is synthesized)
agagagagatactggagagaatgtgaacgtgactatcaagatgatacactagagctctataacagagaggacaggttctcagcaccaccatctcggtctcatgatggagataggcgaggc

SEQ ID NO: 231832 - DNA, 120 bp, Artificial Sequence
  ENSG00000119596_33 (sequence is synthesized)
ccttggtgggatgattgggagagagaccaggatatggatgaggactacaatagggaaatggaaagggacatggacagggatgtggatcggatttcaagacctatggatatgtatgataga

SEQ ID NO: 231833 - DNA, 120 bp, Artificial Sequence
  ENSG00000119596_34 (sequence is synthesized)
accactggatgaacaagaatcacagtttcgtgaacgggatattccatctcttccacctttaccgcccctcccacctcttccacctttggatagatatcgggatgatagatggagagaaga

SEQ ID NO: 231834 - DNA, 120 bp, Artificial Sequence
  ENSG00000119596_35 (sequence is synthesized)
aagaaatcgagagcatgggtatgatcgagatttccgtgataggggtgagttgaggattcgagagtatccagaaagaggagatacatggcgggaaaagcgagattatgttcctgacagaat

SEQ ID NO: 231835 - DNA, 120 bp, Artificial Sequence
  ENSG00000119596_36 (sequence is synthesized)
ggactgggaaagagaacggttgtcagacagatggtacccatctgatgtggatagacattcccccatggcggaacatatgccctcctcacatcattcctcagaaatgatggggtccgatgc

SEQ ID NO: 231836 - DNA, 120 bp, Artificial Sequence
  ENSG00000119596_37 (sequence is synthesized)
aagcttagactctgaccaaggccttggaggggtaatggttctcagtcagaggcagcatgaaatcattttgaaagctgcacaagaactgaaaatgcttcgggaacagaaagaacagcttca

SEQ ID NO: 231837 - DNA, 120 bp, Artificial Sequence
  ENSG00000119596_38 (sequence is synthesized)
aaagatgaaagacttcgggtctgagccacagatggctgaccatctaccacctcaggaatcaagattgcagaatacatcttcaagacctggaatgtatccgcctccagggtcgtatagacc

SEQ ID NO: 231838 - DNA, 120 bp, Artificial Sequence
  ENSG00000119596_39 (sequence is synthesized)
tccccctcctatgggcaaaccaccaggttcaattgtaagaccctctgctccaccagcaagatcatctgttcctgtgaccaggccacctgtcccaataccaccacctccacctcctccacc

SEQ ID NO: 231839 - DNA, 120 bp, Artificial Sequence
  ENSG00000119596_40 (sequence is synthesized)
tctacctcctcctcctccagtgataaagccacaaacttcagctgtagaacaggaacgatgggatgaagattctttctatgggctctgggatacaaatgatgaacaaggactgaattcaga

SEQ ID NO: 231840 - DNA, 120 bp, Artificial Sequence
  ENSG00000119596_41 (sequence is synthesized)
atttaagtcagaaactgcagcaattccatctgctccagtattaccacccccacctgttcactcttccattccccctcctggcccagtgcctatgggtatgccaccaatgtccaagccacc

SEQ ID NO: 231841 - DNA, 120 bp, Artificial Sequence
  ENSG00000119596_42 (sequence is synthesized)
accagtacaacagactgttgattatggccatggccgagatatatccactaataaagttgaacagataccttatggagaaagaataactctacgcccagatccactacctgaaagatcaac

SEQ ID NO: 231842 - DNA, 120 bp, Artificial Sequence
  ENSG00000119596_43 (sequence is synthesized)
ttttgagacagagcatgcaggccaacgtgatcgttatgatagagaaagagatcgtgagccttattttgatcgtcaaagtaatgtcatagcagatcatcgagattttaaaagggatcgtga

SEQ ID NO: 231843 - DNA, 120 bp, Artificial Sequence
  ENSG00000119596_44 (sequence is synthesized)
gacacatagagatcgagaccgggatcgtggtgttattgactatgaccgggatcgatttgacagagaacgccgaccccgagatgatagagctcagtcatatcgagacaaaaaagaccattc

SEQ ID NO: 231844 - DNA, 120 bp, Artificial Sequence
  ENSG00000119596_45 (sequence is synthesized)
ctcatccagaagagggggttttgataggccatcctatgaccggaagtctgaccgaccagtctatgaaggaccatccatgtttggaggagaacgaaggacttatcctgaggagcgaatgcc

SEQ ID NO: 231845 - DNA, 120 bp, Artificial Sequence
  ENSG00000119596_46 (sequence is synthesized)
tctgccagctccttcactgagccaccagcctcctccagctccacgagtcgagaagaagcctgaatcaaagaatgtggacgatattttgaaaccaccgggccgggagagcagacctgagag

SEQ ID NO: 231846 - DNA, 120 bp, Artificial Sequence
  ENSG00000119596_47 (sequence is synthesized)
aattgttgttataatgagaggattacctggcagtggaaagacacatgttgcaaaacttattcgagataaggaggtagaatttggaggacctgcacccagagttctaagcctggatgatta

SEQ ID NO: 231847 - DNA, 120 bp, Artificial Sequence
  ENSG00000119596_48 (sequence is synthesized)
cttcatcactgaagtggaaaaagaagaaaaagatccagattctggaaagaaagtgaaaaagaaggtaatggaatatgaatatgaagctgagatggaggagacttaccgcaccagcatgtt

SEQ ID NO: 231848 - DNA, 120 bp, Artificial Sequence
  ENSG00000119596_49 (sequence is synthesized)
caaaactttcaaaaagactctggatgatggcttttttcccttcatcatcctggatgccatcaatgacagagttaggcattttgaccagttttggagtgcagcaaaaaccaagggatttga

SEQ ID NO: 231849 - DNA, 120 bp, Artificial Sequence
  ENSG00000119596_50 (sequence is synthesized)
ggtatatttggctgaaatgagtgcagataaccagacttgtggcaagagaaatattcatggaagaaagcttaaagaaataaataagatggctgatcactgggaaactgcacctcgtcacat

SEQ ID NO: 231850 - DNA, 120 bp, Artificial Sequence
  ENSG00000119596_51 (sequence is synthesized)
gatgcgtctagatattcgttctttgctgcaagatgctgctattgaagaggtagagatggaagattttgatgcaaatatcgaagaacagaaagaagaaaagaaagatgcagaggaagagga

SEQ ID NO: 231851 - DNA, 120 bp, Artificial Sequence
  ENSG00000119596_52 (sequence is synthesized)
aagcgaactgggttacattccgaaaagcaaatgggagatggacacatctgaggcaaagctagacaagttggatggcttgaggactggtactaaaaggaaacgtgactgggaggccattgc

SEQ ID NO: 231852 - DNA, 120 bp, Artificial Sequence
  ENSG00000119596_53 (sequence is synthesized)
cagcagaatggaggattatcttcagctccccgatgattatgatactcgtgcttctgagcctgggaagaagagggtcagatgggcagacctggaagagaagaaggatgcagataggaaaag

SEQ ID NO: 231853 - DNA, 120 bp, Artificial Sequence
  ENSG00000119596_54 (sequence is synthesized)
ggccataggttttgtggtcggacagactgattgggagaagatcacagatgaaagtggtcacctggctgaaaaagccctcaatcgaaccaaatatatatgagacttagtttttgaacggag

SEQ ID NO: 231854 - DNA, 120 bp, Artificial Sequence
  ENSG00000119596_55 (sequence is synthesized)
tcattattcctctaaggtggttcgctttgaggtggtctgaagccaaggcctcgcggagcttctttgtgtgtcaccttgcttccacgtttcagttcttgttttgtttctactgctttagtt

SEQ ID NO: 231855 - DNA, 120 bp, Artificial Sequence
  ENSG00000119596_56 (sequence is synthesized)
ttttttaaagttctccagtgtccccaagaggtattagaatcttgctgtacccaagcaagacgttaatttttcttttaactgttttggggagggagggagtgatagcttaactgctgaagc

SEQ ID NO: 231856 - DNA, 120 bp, Artificial Sequence
  ENSG00000119596_57 (sequence is synthesized)
caggcgggggtctgctggaggattccaacagagagtatttcctccactgtacaatgtcacagactatctctatcatcattgctttgtggctgtttctgttttttactgtatgtaactggt

SEQ ID NO: 231857 - DNA, 120 bp, Artificial Sequence
  ENSG00000119596_58 (sequence is synthesized)
agctgattgtactaggattaaaaacaataaactttcatgataaagccgatgagattcatgggctatacagcatgggcccttttctcttgttttcttaattttatttttaattgcttttta

SEQ ID NO: 231858 - DNA, 120 bp, Artificial Sequence
  ENSG00000119596_59 (sequence is synthesized)
aatatggtatgtcctaattaaatgctagctgaacatcccaaaacctttttttcattgaatattatatggctcaatgattccgtagcacatgttgtaaaacacagggttcaaatgatgttc

SEQ ID NO: 231859 - DNA, 120 bp, Artificial Sequence
  ENSG00000119596_60 (sequence is synthesized)
aaaacactcatctttgttttatagctgatttctctatctttgtgtcttgaagactgaccaagttcaaatattcatcagttccctggagcatatccattctgtaacatgatgctttattta

SEQ ID NO: 231860 - DNA, 120 bp, Artificial Sequence
  ENSG00000119596_61 (sequence is synthesized)
aaaattttttttgatcctctctctgttcttccctctcttctttccttccttcttcttttcactttctgcctttatgctgttaggtttttattttttcctgatctggctttgaattctggt

SEQ ID NO: 231861 - DNA, 120 bp, Artificial Sequence
  ENSG00000119596_62 (sequence is synthesized)
agacagaactgatgtattctgtggaactcaagcttgttgccttcatttgaacttgaattgtggatttttaaatgaagattgcagggaaagagtataaagatgcagagcactctggcatgt

SEQ ID NO: 231862 - DNA, 120 bp, Artificial Sequence
  ENSG00000119596_63 (sequence is synthesized)
aacctttaagcctgtcaggttttcaagttcttgccagattgttcattactggaaagcatggccttctgcacagaatttcctctcttgtggttaataccaggtggaacccagaaacataca

SEQ ID NO: 231863 - DNA, 120 bp, Artificial Sequence
  ENSG00000119596_64 (sequence is synthesized)
gagataaaacccaaatattatttctatgtaaacacagaaaagggactcttccctttttcatcctgcaaagaaaaaagtcatcttttagcatgaaagaagatgagagagccttcttcctca

SEQ ID NO: 231864 - DNA, 120 bp, Artificial Sequence
  ENSG00000119596_65 (sequence is synthesized)
agcataatttgcattttgtaatccaactcagtaatttgtaaatgtgttcactgaagacttcaatattttgaaatattctctttcaggccacagatgaaaatcctttacttttatgaccta

SEQ ID NO: 231865 - DNA, 120 bp, Artificial Sequence
  ENSG00000119596_66 (sequence is synthesized)
cattaaagactgtatgaatagagctaatagttactagcatttgaatagtatcactttgggttcaacaaattgatattatagtactgaatacccctaatttaatggaaattctaacaactt

SEQ ID NO: 231866 - DNA, 120 bp, Artificial Sequence
  ENSG00000119596_67 (sequence is synthesized)
tctgtacttttatcttccctgaaaatctgaatttttaagcaagtgactttaagttcattaagtcaatattgaatgtataaattgctacattaaataacttctgctgtttgtagtatttaa

SEQ ID NO: 231867 - DNA, 120 bp, Artificial Sequence
  ENSG00000119596_68 (sequence is synthesized)
actttgaacagtgtctctttattaaaattcttaaagaaggtttaaattcagatctgtggttagacaactactgttgatatacactttagtggtaaaagtttccataatcatcttcaagga

SEQ ID NO: 231868 - DNA, 120 bp, Artificial Sequence
  ENSG00000119596_69 (sequence is synthesized)
gacttttggatactctttatttttccccagaccaaaagaaccctctaatgtggtgttaagagaaagttttaacagagtgctaagaaacttacccttgtactcatctatttgtgggtggtt

SEQ ID NO: 231869 - DNA, 120 bp, Artificial Sequence
  ENSG00000119596_70 (sequence is synthesized)
ttaggggagtataccttttaagaaaatcaattacatatgaaagggcattcttacattccagcagatatgtggcacagcctacccaacatatgcataattgtctcttctttgctacaagat

SEQ ID NO: 231870 - DNA, 120 bp, Artificial Sequence
  ENSG00000119596_71 (sequence is synthesized)
ctccaaatttgagtttctgtcaacagaggcagaagaacttattgaatggggaggcagagggttgccactggctgctagatttgttcttctgcattttatcctaagtgacggggaaaaatt

SEQ ID NO: 231871 - DNA, 120 bp, Artificial Sequence
  ENSG00000119596_72 (sequence is synthesized)
aaatgactgtgtaggcaatggattttgctcaggctgattagaggcttacatagtgtgagtttaaagtttctgtgtacctaatgtaaaatgctttcgatcacacctctgtagagatgtttg

SEQ ID NO: 231872 - DNA, 120 bp, Artificial Sequence
  ENSG00000119596_73 (sequence is synthesized)
cctttccctgtcattcaagaatatgcgacctatagagttacgttgacttttcagtgtttactgaagtacagagattagcaatgccttggaatagtgttgctttttaaatccagaatatta

SEQ ID NO: 231873 - DNA, 120 bp, Artificial Sequence
  ENSG00000119596_74 (sequence is synthesized)
ctcggtttatttaatacttgagcccttgctaaagttgctcctcatattcttttgaaaatgtacaaaatgagaactctgattcctaccccctagagtatacagaatctccagggagtggtc

SEQ ID NO: 231874 - DNA, 120 bp, Artificial Sequence
  ENSG00000119596_75 (sequence is synthesized)
ccatcgaacccgtgtgtgatatagaggactcttgataaaaactgtgtttatataaagatggtgtcaacctctacattccaagatttcaaatgtggattaaaaaataagttttaaagttaa

SEQ ID NO: 231875 - DNA, 120 bp, Artificial Sequence
  ENSG00000119596_76 (sequence is synthesized)
gaagaactcctgtaacgtcaagctggcaatttccaagaagcaatctggaacctgcatttccaaagagacccacaagaaagaaaagacgtgaggttgggaagcactggtgccagagccctc

SEQ ID NO: 231876 - DNA, 120 bp, Artificial Sequence
  ENSG00000119596_77 (sequence is synthesized)
actagcgggtgctgcctgtttcttgggtagtgggctaggagcatccctgctctagtggcccctgattctgcaaccctaggactcctctgcttcctcatcagacacaaaccttgataagac

SEQ ID NO: 231877 - DNA, 120 bp, Artificial Sequence
  ENSG00000119596_78 (sequence is synthesized)
agctccagtgagaaagccctgggagaaggtgaattaaggacacttcctttgtaggaggagctgatctcgctaatgggcgactttttaactaagcaggtcagaaaatcttactgaaagtaa

SEQ ID NO: 231878 - DNA, 120 bp, Artificial Sequence
  ENSG00000119596_79 (sequence is synthesized)
atctgtggctcaaagagacttcggtattcttttccctagtactaactgtggaaaggagtgcccccaagcttctgactgtcatacctcattccactgccttttagggctgggtctgaagag

SEQ ID NO: 231879 - DNA, 120 bp, Artificial Sequence
  ENSG00000119596_80 (sequence is synthesized)
cttacactcctgctttcagagctggttgacgggggtgctgttctagaatcctaacccagactggcaccatgaatgatgggttgccccactgccaagctccagacccagcttggcttgggg

SEQ ID NO: 231880 - DNA, 120 bp, Artificial Sequence
  ENSG00000119596_81 (sequence is synthesized)
cttgctgccactgcaggtcaaatgaccaccctatgtggaaagatgcagcagtgctgcctgtcccatactggccgtgaccccttgagcctcagaaagggagacatggacaattttccccac

SEQ ID NO: 231881 - DNA, 120 bp, Artificial Sequence
  ENSG00000119596_82 (sequence is synthesized)
aggtagtcttagctttccaaacatactctgactcaccagtcaaccagtggatgaccacagttcttgtattttttggaggtatcaataaaccactctttgtgatcacagtcaagggagaag

SEQ ID NO: 231882 - DNA, 120 bp, Artificial Sequence
  ENSG00000119596_83 (sequence is synthesized)
tcaagaagagggaagtgtaatctgtgaccagatatacccggcacctgcagaatcagatgccagcctaacagctgtcagctgtgcatgaggcaacatgcatctcttgattaggaatgtgcg

SEQ ID NO: 231883 - DNA, 120 bp, Artificial Sequence
  ENSG00000119596_84 (sequence is synthesized)
ccagtgacacctaggctcacctttcactgacgctttacctctgaggtgccaccagtgtgccttcatagggatccccgagggactgagcttgagtgttgtttattgttatttccagaaagg

SEQ ID NO: 231884 - DNA, 120 bp, Artificial Sequence
  ENSG00000119596_85 (sequence is synthesized)
atttgaggtgacttgctatggaaggcccactgatacattttcaagggaaaatacagataagaatcaaatcatgaaaagcatagaaattgttgagaaaacctaggccaagactaggtgcca

SEQ ID NO: 231885 - DNA, 120 bp, Artificial Sequence
  ENSG00000119596_86 (sequence is synthesized)
caactgagctcagcattcagtcctgagcctcctggcactaaggcaaaaaggtcaggaagttatgtaacttgataatgacagggtattcagtctaagatggtgtaacacctggcagccctc

SEQ ID NO: 231886 - DNA, 120 bp, Artificial Sequence
  ENSG00000119596_87 (sequence is synthesized)
tcactaagcttcagaatgaagactggctgttgactcagtttgctgcttccacctgttgcccaagtgaagatgttgaggctgtaatctttgtggatgatacagagattggcccaggctgcc

SEQ ID NO: 231887 - DNA, 120 bp, Artificial Sequence
  ENSG00000119596_88 (sequence is synthesized)
ctggctctcagtaacttaaggagacacagaagagggatctttcctaaaactcgaatcatatagggaagacactcatcagatctcatgggaacccagtacatggtcttacctcaaagtcat

SEQ ID NO: 231888 - DNA, 120 bp, Artificial Sequence
  ENSG00000119596_89 (sequence is synthesized)
ttcccttgttgtagtgcatattgagagcttgaaaaagttctgaattgcggagaaccaccagcattttgggatttgtgacaccatctgaaattgcttgccgggcagatttttccatttgga

SEQ ID NO: 231889 - DNA, 120 bp, Artificial Sequence
  ENSG00000119596_90 (sequence is synthesized)
tgtaataaaactcacgaaagttgctgaaccacttgatcatctgggaggtaatgcagcggttgaactgtacaaacaagaggtccatccagtcagacatttgccacgaggtgctcagaatta

SEQ ID NO: 231890 - DNA, 120 bp, Artificial Sequence
  ENSG00000119596_91 (sequence is synthesized)
gaactgtctgcttccagctcagtataggggttcatatacggctttaaccagcattaacaggggcttcctttaaaaaaagaagcgaagccaccgctattttccaagcctatttagttatac

SEQ ID NO: 231891 - DNA, 120 bp, Artificial Sequence
  ENSG00000119596_92 (sequence is synthesized)
ttgagtgggacttaggggtcacgaccagtgtggtgccagattttgctgcacccaggtggactgcatggcaggcctggggccttccacttggataaagggccaagggaagggcaagatgta

SEQ ID NO: 231892 - DNA, 120 bp, Artificial Sequence
  ENSG00000119596_93 (sequence is synthesized)
ggtcagggagcagtttattagcaactttgaattgtggaatgaattgaaatcaaaatcagaggttgcttcagggatcaaccaaccaactgaatatgagggaaagaaaagcttgaatgatgt

SEQ ID NO: 231893 - DNA, 120 bp, Artificial Sequence
  ENSG00000119596_94 (sequence is synthesized)
agaccaaaagtattaacagcccctaacccaacacccaaagtaaaagaggccctcagaaaccttttatgggaacaggggaggtctggtcccaacaattagtttgattttccttattgtcac

SEQ ID NO: 231894 - DNA, 120 bp, Artificial Sequence
  ENSG00000119596_95 (sequence is synthesized)
acttcatctgtatgtactttcactcagttttgaactatagcaatttgaacataaatttgacagtgtctgacactctgtctctctctccctctctatatatattttttgttgtttgtttgt

SEQ ID NO: 231895 - DNA, 120 bp, Artificial Sequence
  ENSG00000119596_96 (sequence is synthesized)
agaggcatgagccactgtgcctggcctatattttatttttcatagtgtccccagccaaggcagaaaactagccaaaaaggccactaactagtgtttctgtttccctctacttttcctgcc

SEQ ID NO: 231896 - DNA, 120 bp, Artificial Sequence
  ENSG00000119596_97 (sequence is synthesized)
ccactaactagtgtttctgtttccctctacttttcctgcccatgtgtttctgttttggggattatctacagctcagtagcttaagaatttagacagccagcctttctagcctaaagttat

SEQ ID NO: 231897 - DNA, 120 bp, Artificial Sequence
  ENSG00000119596_98 (sequence is synthesized)
tcacggttatttgggtagagtctcagcccagaactggacattgcttccatcagcaacactaaggggagcttgaagtgcacatatgatgacctaggacttgcctcacaccaggcaaaacac

SEQ ID NO: 231898 - DNA, 120 bp, Artificial Sequence
  ENSG00000119596_99 (sequence is synthesized)
actgcctcttgggagttctgcagaagctgccatttagttgagtgactttacctgaacatcaggaaaataaaccttcaggaggttggagctgggatatcgtgtgaagaaaaacattagttt

SEQ ID NO: 231899 - DNA, 120 bp, Artificial Sequence
  ENSG00000119596_100 (sequence is synthesized)
ggccttcttcaagtgaccagggtttagaccctcctggatttatctcagtgtcaaggaaaatgaacactttaaaatgccagtttatcaattaactagtgaattccttgttcctgtggtttc

SEQ ID NO: 231900 - DNA, 120 bp, Artificial Sequence
  ENSG00000119596_101 (sequence is synthesized)
tatttgatttcattttgtttttctgattggaattgtgtatttgctccatttttctgtctctggaaactctggtcaaataagctggatgacatatgtgcacagttaagtcacagaatgtaa

SEQ ID NO: 231901 - DNA, 120 bp, Artificial Sequence
  ENSG00000119596_102 (sequence is synthesized)
gatgacatatgtgcacagttaagtcacagaatgtaaaaatcatctcgatgtggaaaagttatgtagcatagatgatgtcaaatacaggttggtgtattttgtgtgtgtgtgtgtgtgtgt

SEQ ID NO: 231902 - DNA, 120 bp, Artificial Sequence
  ENSG00000119596_103 (sequence is synthesized)
gtgtgtgtgtgtgtgtgtgtgtggtgtccaagtgggatgggaagagatggcaattctatcccagataaaccatttcaaaaccccaagcagagatttacttcccctctctgcctcagtttc

SEQ ID NO: 231903 - DNA, 120 bp, Artificial Sequence
  ENSG00000119596_104 (sequence is synthesized)
atttacttcccctctctgcctcagtttcctcagctgtaaaacgagaagagtaaactaggtggtccccattctggctgtcactcttatcattgccttcacagtgttgcctttataaccagc

SEQ ID NO: 231904 - DNA, 120 bp, Artificial Sequence
  ENSG00000119596_105 (sequence is synthesized)
aaacatctaagcaggctgaataccagctcatattttgctcttgctcaagaagcttgaatggttgggtggtacccactctccatttgcctggcagaactatccctcatctttcaggtctca

SEQ ID NO: 231905 - DNA, 120 bp, Artificial Sequence
  ENSG00000119596_106 (sequence is synthesized)
gctcagaagctcccacctctgttaaacccttccttgccaaattaggccttccttaccctgggctatgaagactctttgtacaaactgttgcagcgatgaccttattggaatttttactgt

SEQ ID NO: 231906 - DNA, 120 bp, Artificial Sequence
  ENSG00000119596_107 (sequence is synthesized)
atgtttgtctcgtctagactgtgagctccttgagagtgaggaccttatcttttcatctttgtgcctagcccagtgctaggaacatagcaggtgctcaataaatatttgttgtgtgaagga

SEQ ID NO: 231907 - DNA, 120 bp, Artificial Sequence
  ENSG00000119596_108 (sequence is synthesized)
acatctgaggcaaagctagtatgccatgtggaagaggtgtgagcctttcttcagcccaagaaggaaactttaaacatatttgcacaataaaatttcaaattaaacatttcaaaaagggtg

SEQ ID NO: 231908 - DNA, 120 bp, Artificial Sequence
  ENSG00000119596_109 (sequence is synthesized)
ctcagactagaaatacatgctcttctgaaattccatgttgcaactgtaactcctgtcatatatacccagtgtatgaggaaaagttcttgcagttttcacactgcccttctgtattgctgc

SEQ ID NO: 231909 - DNA, 120 bp, Artificial Sequence
  ENSG00000119596_110 (sequence is synthesized)
tttggaaatcctttgaggtttatctaataagtgtgttggagcttctgtctcttctggtaatactgtaccctgttgaaccaagaacagttttattgtttgtgggacttcgttggttttcta

SEQ ID NO: 231910 - DNA, 120 bp, Artificial Sequence
  ENSG00000119596_111 (sequence is synthesized)
ataccataacctgtgtccctgtgcagtcagggggtcacttctttaagatcatgtataatacggcccgtcatatacacgtagatagagccatgtgattccagaaattagaagactggatct

SEQ ID NO: 231911 - DNA, 120 bp, Artificial Sequence
  ENSG00000119596_112 (sequence is synthesized)
gtggaatccatacatgttaaaattttgccaaaatgagatgattaaaatttttgtgagttttataaactgttgcagttcgccttactgatttttcaatgataatcacttttatgggaaggg

SEQ ID NO: 231912 - DNA, 120 bp, Artificial Sequence
  ENSG00000119596_113 (sequence is synthesized)
aaacatcaggttttattacatataaatattttgagcagcacctttttactagtattttggaaaagcatttctgtcttcattgagcgaagtggcaatacatatgtaatatactgatgctga

SEQ ID NO: 231913 - DNA, 120 bp, Artificial Sequence
  ENSG00000119596_114 (sequence is synthesized)
atttgcggtgggttgatttttgtccattgttggctttcacatggaagcatgaatattgtctccccgctaccccttttgagtgacatccttccagtacctccatttctcaagttgcaggaa

SEQ ID NO: 231914 - DNA, 120 bp, Artificial Sequence
  ENSG00000119596_115 (sequence is synthesized)
cagcatgaatctggagcgggtgagtacagacaggaagactaggtagagattagtgctttgctttcaggtgaaaaaaaaatgaggtcagtgaattattaaataaaaaggaatggcagagga

SEQ ID NO: 231915 - DNA, 120 bp, Artificial Sequence
  ENSG00000119596_116 (sequence is synthesized)
gaaagagaggacaggattgagctgaactgttcaggagctggaatggttaggacttggattgtccagagagttttctctttgtgacttaaaatatatggcttttcccagttttcctgggtt

SEQ ID NO: 231916 - DNA, 120 bp, Artificial Sequence
  ENSG00000119596_117 (sequence is synthesized)
agtttttaattttttaaacttgcggtttcaaatgagtcattctaccccttagactgtccagagagggagggggctctttgcatatttatttttcctaaagctcagcctaatgctatgttc

SEQ ID NO: 231917 - DNA, 120 bp, Artificial Sequence
  ENSG00000119596_118 (sequence is synthesized)
cagactacaattgtgagtcctgaactgtagctgcctcaaagcgccttcatgatactattctgaagtgactactctgaaatgtggacagtgaagtttggtgaatttggtcatttagtttct

SEQ ID NO: 231918 - DNA, 120 bp, Artificial Sequence
  ENSG00000119599_0 (sequence is synthesized)
ctttccgggtccttgcacgcttcgctccaactcctgcagagctgagccggaggggaatccggaagggacacgctgaacaggaacagaaatgaataaaagtcgctggcagagtagaagacg

SEQ ID NO: 231919 - DNA, 120 bp, Artificial Sequence
  ENSG00000119599_1 (sequence is synthesized)
acatgggagaagaagccaccagcagaacccttggttcagactccgtgattctgaagacaggtctgactcccgggcagcacagcccgctcacgattccggccacggtgatgacgagtctcc

SEQ ID NO: 231920 - DNA, 120 bp, Artificial Sequence
  ENSG00000119599_2 (sequence is synthesized)
gtcaacctcgtctggcacagctgggacctcctctgtgccagagctacctgggttttactttgaccctgaaaagaaacgctacttccgcttgctccctggacataacaactgcaaccccct

SEQ ID NO: 231921 - DNA, 120 bp, Artificial Sequence
  ENSG00000119599_3 (sequence is synthesized)
gacgaaagagagcatccggcagaaggagatggagagcaagagactgcggctgctccaggaagaagacagacggaaaaagattgccaggatgggatttaatgcatcttccatgctacgaaa

SEQ ID NO: 231922 - DNA, 120 bp, Artificial Sequence
  ENSG00000119599_4 (sequence is synthesized)
aagccagctgggttttctcaacgtcaccaattactgccatttagcccacgagctgcgtctcagctgcatggagaggaaaaaggtccagattcgaagcatggatccctccgccttggcaag

SEQ ID NO: 231923 - DNA, 120 bp, Artificial Sequence
  ENSG00000119599_5 (sequence is synthesized)
cgaccgatttaacctcatactggcagataccaacagtgaccggctcttcacagtgaacgatgttaaagttggaggctccaagtatggtatcatcaacctgcaaagtctgaagacccctac

SEQ ID NO: 231924 - DNA, 120 bp, Artificial Sequence
  ENSG00000119599_6 (sequence is synthesized)
gctcaaggtgttcatgcacgaaaacctctacttcaccaaccggaaggtgaattcggtgtgctgggcctcgctgaatcacttggattcccacattctgctatgcctcatgggactcgcaga

SEQ ID NO: 231925 - DNA, 120 bp, Artificial Sequence
  ENSG00000119599_7 (sequence is synthesized)
gactccaggctgtgccaccctgctcccagcatcactgttcgtcaatagtcacccaggaatagaccggcctggcatgctctgcagtttccggatccctggtgcctggtcctgtgcctggtc

SEQ ID NO: 231926 - DNA, 120 bp, Artificial Sequence
  ENSG00000119599_8 (sequence is synthesized)
cctgaatatccaagcaaataactgcttcagtacaggcttgtctcggcgggtcctgttgaccaacgtggtgacgggacaccggcagtcctttgggaccaacagtgatgtcttggcccagca

SEQ ID NO: 231927 - DNA, 120 bp, Artificial Sequence
  ENSG00000119599_9 (sequence is synthesized)
gtttgctctcatggctcctctgctgtttaatggctgccgctctggggaaatctttgccattgatctgcgttgtggaaatcaaggcaagggatggaaggccacccgcctgtttcatgattc

SEQ ID NO: 231928 - DNA, 120 bp, Artificial Sequence
  ENSG00000119599_10 (sequence is synthesized)
tgtgggacctgaggaccacgaagtgcgtaaggcagtacgaaggccacgtgaatgagtacgcctacctgcccctgcatgtgcacgaggaagaaggaatcctggtggcagtgggccaggact

SEQ ID NO: 231929 - DNA, 120 bp, Artificial Sequence
  ENSG00000119599_11 (sequence is synthesized)
gctacacgagaatctggagcctccacgatgcccgcctactgagaaccataccctccccgtaccctgcctccaaggccgacattcccagtgtggccttctcgtcgcggctggggggctccc

SEQ ID NO: 231930 - DNA, 120 bp, Artificial Sequence
  ENSG00000119599_12 (sequence is synthesized)
ggggcgcgccggggctgctcatggctgtcgggcaggacctttactgttactcctacagctaattctgcagggcacagcccagagccatgtggatttgacttacgggagtaaagcgtaact

SEQ ID NO: 231931 - DNA, 120 bp, Artificial Sequence
  ENSG00000119599_13 (sequence is synthesized)
ttttactgcatctaatgagggtgttttaagtgacactcagtgtacacagatcccatcctctggctgctaggagagaagtgctgaatgttccgtgtggagatgctcaggaaagttatttga

SEQ ID NO: 231932 - DNA, 120 bp, Artificial Sequence
  ENSG00000119599_14 (sequence is synthesized)
gttaaattgctggctgagagagcttggaagtccttttcataaaaggtacctctttccttttcttattgaattcttagaacttagttaaccctccctgccttttcttaacaaaaaggactt

SEQ ID NO: 231933 - DNA, 120 bp, Artificial Sequence
  ENSG00000119599_15 (sequence is synthesized)
ttctaaggactgaagattggcaaaaacgaaaagcttcttcctccaagagcccattgaagaagcccagtgatgagacggtgagatggtttgagtcctcggtgcctgggtagcaggaagaaa

SEQ ID NO: 231934 - DNA, 120 bp, Artificial Sequence
  ENSG00000119599_16 (sequence is synthesized)
gacctgcatcctgcatctgtacttggggaagccagcggagaggacggggaggttacttctctaagtttctgcagaaatattgaaggctggagtttggaatccttaaacttggccttctca

SEQ ID NO: 231935 - DNA, 120 bp, Artificial Sequence
  ENSG00000119599_17 (sequence is synthesized)
aactcagcagcagatctccgggattctgctgttattatccaaaggcgttggaaggaaagatggatcttcttacatgctagaagttttaaacggtccttaacatgcctttgttcaagcacc

SEQ ID NO: 231936 - DNA, 120 bp, Artificial Sequence
  ENSG00000119599_18 (sequence is synthesized)
ttccagaatgtaaggttcagcagctctggtttctattacggtgacttgaatgtcagattcaagggcccggcgtcaaaggaaattggttttgactttttgtaatctaggagcgacagttcg

SEQ ID NO: 231937 - DNA, 120 bp, Artificial Sequence
  ENSG00000119599_19 (sequence is synthesized)
tgagatgtttattcagtgttaaagagcctgtttttctaccaaacaataaaaccaagagaagaatcatggtgtgacatgcacttctgtgaatgacttaggagatcatgagcttgggctgct

SEQ ID NO: 231938 - DNA, 120 bp, Artificial Sequence
  ENSG00000119599_20 (sequence is synthesized)
aaacacgcagggagggcaccccgagtgtcgccgctgagggcgtttctctaagcgcttctctgagacctgctgctgaaggccccacccgacacctggcgggggctgggctgcgggccttgg

SEQ ID NO: 231939 - DNA, 120 bp, Artificial Sequence
  ENSG00000119599_21 (sequence is synthesized)
atagaccatgtggctaccccgtgaagcacctgcacagttgaggggctccagttcacaccctgccttctgctgcttaaacccaccctgagaaagctgttctctctagagcgaaggcggggg

SEQ ID NO: 231940 - DNA, 120 bp, Artificial Sequence
  ENSG00000119599_22 (sequence is synthesized)
actcttgcaggaggatagggagagaggatggggacgtaggcagagatgtctattctctgttactcgccgatactttcccccatttcctgaagaagagactgaggctcagagtggagtgat

SEQ ID NO: 231941 - DNA, 120 bp, Artificial Sequence
  ENSG00000119599_23 (sequence is synthesized)
tgctcaagtgaagaacctgcatttgaggcagcttcctggggcacagccctcggaccttggagcagggccccttcagggaaggccagaaacacctttagcccacgagctgcgtctcagctg

SEQ ID NO: 231942 - DNA, 120 bp, Artificial Sequence
  ENSG00000119599_24 (sequence is synthesized)
ctctccgctcctgccagcacctgtccatccactgttgaaaagggtgccaattagatgcccctgcgacacttagcagaggcacttcagggggtgtggccctagcttttccctgacaggaag

SEQ ID NO: 231943 - DNA, 120 bp, Artificial Sequence
  ENSG00000119599_25 (sequence is synthesized)
acccttttcttgatgaacttgagggcccatttctccttgaagaccttcagtgactccatggcgcgcagctcgtacgaagcgaagccacacacctcccggatcatgtcccgctacaaactt

SEQ ID NO: 231944 - DNA, 120 bp, Artificial Sequence
  ENSG00000119599_26 (sequence is synthesized)
aatactgtctctcaggggcgatcccagcaacttcagcagcagagggaaaagttaccccaaaacagaactgaatcaaggggagtgtggacagctgggtggggagactaggagggaagtaga

SEQ ID NO: 231945 - DNA, 120 bp, Artificial Sequence
  ENSG00000119599_27 (sequence is synthesized)
aatcaggagtgtaaataaatgtccaccaggtggacagcctcatcccatgtcagtgggcaaacgtcacttcagaaacaggcaggtggggaggtcctggggagcctgggtttggagtttgag

SEQ ID NO: 231946 - DNA, 120 bp, Artificial Sequence
  ENSG00000119599_28 (sequence is synthesized)
tggatttcatcaggccagcattattccaccacgcaactatcttatccaaaaacttgggctccctgttgtctctactcacatttccaccagaggatgctgagaaaagaagttatggtcatt

SEQ ID NO: 231947 - DNA, 65 bp, Artificial Sequence
  ENSG00000119599_29 (sequence is synthesized)
tttccaccagaggatgctgagaaaagaagttatggtcattgtaaagattcttggccccggcccgg

SEQ ID NO: 231948 - DNA, 90 bp, Artificial Sequence
  ENSG00000119599_30 (sequence is synthesized)
tacaaaaattaactgggcatggtggcacctgcctgtaatctctcagctactcggaagtcagaagcaggagaattgcttggaccaggaagt

SEQ ID NO: 231949 - DNA, 80 bp, Artificial Sequence
  ENSG00000119599_31 (sequence is synthesized)
agatttgtggcccctttactaccatccctgtggctccatgatctgcagattaggagcagctatctggccactaagccccc

SEQ ID NO: 231950 - DNA, 120 bp, Artificial Sequence
  ENSG00000119599_32 (sequence is synthesized)
atctgcagattaggagcagctatctggccactaagccccctggaagggagttaccagttgattacagatgatggtggctatagcgtaatcagacagtgtgcaggctcaatgctttcacac

SEQ ID NO: 231951 - DNA, 120 bp, Artificial Sequence
  ENSG00000119599_33 (sequence is synthesized)
tgaaatagtagctgctgacactgcagaatgtgttctcagtcttcaagaattgtcacctctactggtattcctatagaaagggcttataccccatggaacatttttgtggctaggaagcat

SEQ ID NO: 231952 - DNA, 120 bp, Artificial Sequence
  ENSG00000119599_34 (sequence is synthesized)
tactttgttaggacattcatagacttatttactattctcatcaacaccaggacttcgcctcctttttaagtcgatttttcacctgtttttatcacagaagagctcttgtgagctggatga

SEQ ID NO: 231953 - DNA, 120 bp, Artificial Sequence
  ENSG00000119599_35 (sequence is synthesized)
tagagagagctcagccttgctgagaggcagatgcaggtagttaccagctgcagtaataaactgcagccgggattcagcttcagccaagatagcacttctggtcttagagccacacaagtg

SEQ ID NO: 231954 - DNA, 120 bp, Artificial Sequence
  ENSG00000119599_36 (sequence is synthesized)
atcagaatcacaaatgtgaaatccatgactgcccaaggcctgtcctcttctcctgctgaaggtctccagtagtgtatatcatgtttctgggctgctgtaacccatgctgttgtgtgtcac

SEQ ID NO: 231955 - DNA, 120 bp, Artificial Sequence
  ENSG00000119599_37 (sequence is synthesized)
agtcctcagaactggagccctgaagacttaaaccggtcctaggaactgaagcattaaaccagaaagagctgtggggagagttgtcaacctagcccatccccaggatgtaatgactttgac

SEQ ID NO: 231956 - DNA, 120 bp, Artificial Sequence
  ENSG00000119599_38 (sequence is synthesized)
agatcttttactataacatgaaaagatcaggccaggtgtggtagctataattccagcacttagggagcttgaggccaggagtttaagaccagctggggcaacacagcaagaccctatctc

SEQ ID NO: 231957 - DNA, 120 bp, Artificial Sequence
  ENSG00000119599_39 (sequence is synthesized)
gtactgaatgatgcagacacaactccctctaactcccactctttgactctgcaaatgggccacccacttcttcattttcatcttcctgagcgttctgtggggaaactcaaattcggataa

SEQ ID NO: 231958 - DNA, 120 bp, Artificial Sequence
  ENSG00000119599_40 (sequence is synthesized)
tctgggatcttgctcagctccattgctgagaagtactgtggagcaggctgacgaggagagatgggcgtcagcggggcagggaaggccagagacccccgaatcttcttcatggatgtcagc

SEQ ID NO: 231959 - DNA, 120 bp, Artificial Sequence
  ENSG00000119608_0 (sequence is synthesized)
atggatccaaactccatcttgctttctcctcagccccagatctgctcccacctagcagaagcttgtacggaaggcgagagaagctcatcccctccagagctggatagagactccccgttt

SEQ ID NO: 231960 - DNA, 120 bp, Artificial Sequence
  ENSG00000119608_1 (sequence is synthesized)
ccctggagtcaggtccccagctccagccctacagaccccgaatggtttggtgatgagcacatccaggcaaagagggccagagtggagaccattgtccgaggcatgtgtctctccccgaat

SEQ ID NO: 231961 - DNA, 120 bp, Artificial Sequence
  ENSG00000119608_2 (sequence is synthesized)
cctctggtgccaggcaatgcgcaagctggggtcagcccacgctgcccaaagaaggcccgagagaggaagaggaagcagaaccttcccacaccgcaaggcctcctgatgccagcccctgcc

SEQ ID NO: 231962 - DNA, 120 bp, Artificial Sequence
  ENSG00000119608_3 (sequence is synthesized)
tgggaccagggcaacaggaaggggggccctcgtgtgagagaacaacttcatctgctgaagcaacagctaagacatctgcaagagcacatcctacaggctgccaagcccagggacacagct

SEQ ID NO: 231963 - DNA, 120 bp, Artificial Sequence
  ENSG00000119608_4 (sequence is synthesized)
caggggccaggaggctgtggcacggggaaaggccctctgagtgcaaagcaggggaatggctgtgggcctcgcccctgggttgtggacggtgaccaccagcaaggtaccagcaaggacctc

SEQ ID NO: 231964 - DNA, 120 bp, Artificial Sequence
  ENSG00000119608_5 (sequence is synthesized)
tctggggcagaaaaacaccaagagtctgagaagcccagtttccttccttctggagcaccagcttcactagagattctgaggaaagagctgaccagggcagtgtcccaggctgtggactcg

SEQ ID NO: 231965 - DNA, 120 bp, Artificial Sequence
  ENSG00000119608_6 (sequence is synthesized)
gtattacaaaaggtactattggatccaccaggccacctgactcagctgggcagaagcttccaggggcaggtggcagagggtagaagcgagccctcacctcctgtgggaggggcctgtaaa

SEQ ID NO: 231966 - DNA, 120 bp, Artificial Sequence
  ENSG00000119608_7 (sequence is synthesized)
gatccacttgctttggctgccttgcccaggagggtccagctacaagctggggtcccagtaggaaatttatcactggccaagcgtctagattctcctaggtaccctatccctccaagaatg

SEQ ID NO: 231967 - DNA, 120 bp, Artificial Sequence
  ENSG00000119608_8 (sequence is synthesized)
acccccaaaccctgtcaggatcccccagcaaactttcccttgactgcaccttcccacatccaggaaaatcagattcttagccagctactgggtcatagatacaacaatggccattggagt

SEQ ID NO: 231968 - DNA, 120 bp, Artificial Sequence
  ENSG00000119608_9 (sequence is synthesized)
agcagtcctccccaggactcatcttcccagaggcacccctcctcagagcctgccctacgaccttggagaactactaagccgcaaccattggtcctgagccagcagcagtgtcccttgcct

SEQ ID NO: 231969 - DNA, 120 bp, Artificial Sequence
  ENSG00000119608_10 (sequence is synthesized)
ttcacctctgcccatctggaaagtctaccccttcttccctcggtgaagatggaacagagaggcctgcatgctgtcatggaggcactgcctttctctttggtccacatccaggagggtcta

SEQ ID NO: 231970 - DNA, 120 bp, Artificial Sequence
  ENSG00000119608_11 (sequence is synthesized)
aaccctggtcacttgaagaaggccaaactaatgtttttcttcacacgatatcccagctccaacctcctgaaggtttattttcctgatgttcagttcaaccgctgcattacctcccagatg

SEQ ID NO: 231971 - DNA, 120 bp, Artificial Sequence
  ENSG00000119608_12 (sequence is synthesized)
atcaagtggttcagcaactttcgtgagttttattacatccaaatggaaaaatctgcccggcaagcaatttcagatggtgtcacaaatcccaaaatgctggtggttctccgcaattcagaa

SEQ ID NO: 231972 - DNA, 120 bp, Artificial Sequence
  ENSG00000119608_13 (sequence is synthesized)
ctttttcaagctctcaatatgcactacaacaagggaaatgactttgaggttccagattgcttcttggaaattgccagcttgacgttacaggagttcttcagggctgtctccgcagggaga

SEQ ID NO: 231973 - DNA, 120 bp, Artificial Sequence
  ENSG00000119608_14 (sequence is synthesized)
gactcagatccttcctggaagaaacccatttataaaattatttcgaaactggacagtgacatcccagagatattcaaatcttccagctatccccagtagctgtttcggggttaagatccc

SEQ ID NO: 231974 - DNA, 120 bp, Artificial Sequence
  ENSG00000119608_15 (sequence is synthesized)
acaacgtgaggagtgactggctagggtttcctgggtttgtcttaaagggcaatttagctgtagtcatataaaaagggcacaaggaaatctcctctatcaaaacaggtactattaccattt

SEQ ID NO: 231975 - DNA, 120 bp, Artificial Sequence
  ENSG00000119608_16 (sequence is synthesized)
aactataaaatgtactaactatattggtgtattggtagtatattgtaaaaggaacacaagtttccaatcagaagacttgaagctcaactccattgtttccaggtgttgtgaccctgggaa

SEQ ID NO: 231976 - DNA, 120 bp, Artificial Sequence
  ENSG00000119608_17 (sequence is synthesized)
cttcctggtatctctgtatctgtaaaatgaggttgttaaggattaaaggacagtatgtcctatgcaatgtcattcacacacaaatgtcagttttttgagcccctctttcagataaggtta

SEQ ID NO: 231977 - DNA, 120 bp, Artificial Sequence
  ENSG00000119608_18 (sequence is synthesized)
tcttatttggggtttttacaaattgctgtttttagtcacctaattataaagcgccatctatttgctagatactttcacatactttaagcttttcaccctgaaaagtagttattatcatca

SEQ ID NO: 231978 - DNA, 120 bp, Artificial Sequence
  ENSG00000119608_19 (sequence is synthesized)
tttaaaagatgaccaaacagaagctttagaactgcaaggtaactcgccaaagcctatgaggctaggacatctgggttgatagggacagtcaggagcctggaggaaccaagactttctgat

SEQ ID NO: 231979 - DNA, 120 bp, Artificial Sequence
  ENSG00000119608_20 (sequence is synthesized)
gcccaactgcatgctggacccatctcctgcagctaactcaggatctcaagcaggaccccacccctagtaagcatccagcgctgacagggcaccgtcacctgacaactcctgcccagcact

SEQ ID NO: 231980 - DNA, 120 bp, Artificial Sequence
  ENSG00000119608_21 (sequence is synthesized)
taggagcacttcaccgcccaagatttctgctgatcatttcagcaaactcaagacaaactttatgcaggacttgagtgttgctgtttattcacatttgtctgctggaagagtttatcagct

SEQ ID NO: 231981 - DNA, 120 bp, Artificial Sequence
  ENSG00000119608_22 (sequence is synthesized)
ggataatgcaaatagtctccagctgaccattgcaattggtgccccaacctcatatatgcagaagaagctgaacttcagactgtgaaaggtagaaagggccttaggagatcatctggccca

SEQ ID NO: 231982 - DNA, 120 bp, Artificial Sequence
  ENSG00000119608_23 (sequence is synthesized)
tgctgcttaaattgggaaggaagaaccgcagtccagacaggaggcttgcacaggctgtgcacagccttgcagatgataaatggcataactgggacaaatgcagcatcacacagaaatgga

SEQ ID NO: 231983 - DNA, 120 bp, Artificial Sequence
  ENSG00000119608_24 (sequence is synthesized)
aattctcccactccataacaaaattacagtccatggctgaccttccactgatgaaggaattcatgaaatcaacatttccccctgctgctggcccagcacaattgtgacccactcttgagt

SEQ ID NO: 231984 - DNA, 120 bp, Artificial Sequence
  ENSG00000119608_25 (sequence is synthesized)
atataggcaaggcatgtacaaagctgagtaactgcatctgtcttctaagctagtcaggatcaagtctttgtaagcactgccaaaggtacgccgggtggggtggggtgggggtaatacaca

SEQ ID NO: 231985 - DNA, 120 bp, Artificial Sequence
  ENSG00000119608_26 (sequence is synthesized)
gctcgggctttgtagtcctgataaggggtgtctgtgagttcattagcttctttcctgtctatataaaacaagtttcatattcggctactcaacttccataatttttctggtggggtgttg

SEQ ID NO: 231986 - DNA, 120 bp, Artificial Sequence
  ENSG00000119608_27 (sequence is synthesized)
ctggagcagatgagataaaatccctaaactattactagaactatcagcataaaaagtatgaaagatgaattttcctttgaattttctcttcaaacagctgaaaggaaaaacaaaacagac

SEQ ID NO: 231987 - DNA, 120 bp, Artificial Sequence
  ENSG00000119608_28 (sequence is synthesized)
ttagcccaaacccatctttacaggctaaaggttaagtgccctccagtacatccaattgcactcagaagatctttgccctattttcacaaaaatgaaggaatctgccaaacctaagtttta

SEQ ID NO: 231988 - DNA, 120 bp, Artificial Sequence
  ENSG00000119608_29 (sequence is synthesized)
aacacaggcaagcatggagtgctctgagcaagggcaatcagttttctgtgtccggacatagtagaagaaccctctatccagagtgacattacatacctaagttagacatacaggggaaac

SEQ ID NO: 231989 - DNA, 120 bp, Artificial Sequence
  ENSG00000119608_30 (sequence is synthesized)
aagttcacatgactgtccaatagagagcagcccttcttctgtcccaaacctgaaattcattagtgtgtgtttaaagactgagccaagtcacctccagggcagtgaaccttgtctcaggga

SEQ ID NO: 231990 - DNA, 120 bp, Artificial Sequence
  ENSG00000119608_31 (sequence is synthesized)
ccaatgagatgaaatgtacaagctcaaattgaaaacatttgtgtactgcagtctttccaggaagtgttctctaaccactgagctaaacacagaagaatgtataaatatgtatgctctgcc

SEQ ID NO: 231991 - DNA, 120 bp, Artificial Sequence
  ENSG00000119608_32 (sequence is synthesized)
atagacccacagggagaaaggctgccatgtaggaggtgatctgtgcaggtgatgatgccacagacactggctgttccttttcagctcatgccccggtgctctaacacaaagctgaaagga

SEQ ID NO: 231992 - DNA, 120 bp, Artificial Sequence
  ENSG00000119608_33 (sequence is synthesized)
gacaacacacaacttctctcagacagggtcttactttgttgcccaggctggaatgcagtggctattcattggcatgatcgtagcacactacagctttgaactcctgggctcaagcagtct

SEQ ID NO: 231993 - DNA, 120 bp, Artificial Sequence
  ENSG00000119608_34 (sequence is synthesized)
tgctcactccatgagcccagaagaaggcccgacacacagcaggagtctgcccaggaggttcatgagccctggcatcccagaatctgaatccttcctcagtgacagtggctctttaccctt

SEQ ID NO: 231994 - DNA, 120 bp, Artificial Sequence
  ENSG00000119608_35 (sequence is synthesized)
ctaagtgcagaggaggaagcccagcgcattctgggtgcacttccagctgaggaaataaggaggaggaattcctgaagccctgaacaagtgcctgggatggatccaaactccatcttgctt

SEQ ID NO: 231995 - DNA, 120 bp, Artificial Sequence
  ENSG00000119608_36 (sequence is synthesized)
agtgcgtatccctctctgttggaaacacatggagtgtaagctgagtgggttattattttagcaatcatactttgccaaagatctggtcattttttccactaaggtatatgagggcactat

SEQ ID NO: 231996 - DNA, 120 bp, Artificial Sequence
  ENSG00000119614_0 (sequence is synthesized)
agcattagacaccggagggggcacctgggaccaacttcgcgaagcgggaagcccggcgggggggtggggggagctaaagacctgcggcctcagcccctccaaagaacagggagatgacgg

SEQ ID NO: 231997 - DNA, 120 bp, Artificial Sequence
  ENSG00000119614_1 (sequence is synthesized)
ggaaagcaggggaagcgctgagcaagcccaaatccgagacagtggccaagagtacctcggggggcgccccggccaggtgcactgggttcggcatccaggagatcctgggcttgaacaagg

SEQ ID NO: 231998 - DNA, 120 bp, Artificial Sequence
  ENSG00000119614_2 (sequence is synthesized)
gcttgaacaaggagcccccgagctcccacccgcgggcagcgctcgacggcctggcccccgggcacttgctggcggcgcgctcagtgctcagccccgcgggggtgggcggcatggggcttc

SEQ ID NO: 231999 - DNA, 120 bp, Artificial Sequence
  ENSG00000119614_3 (sequence is synthesized)
ggctccctggcttctacacgcagcccaccttcctggaagtgctgtccgacccgcagagcgtccacttgcagccattgggcagagcatcggggccgctggacaccagccagacggccagct

SEQ ID NO: 232000 - DNA, 120 bp, Artificial Sequence
  ENSG00000119614_4 (sequence is synthesized)
cggattctgaagatgtttcctccagcgatcgaaaaatgtccaaatctgctttaaaccagaccaagaaacggaagaagcggcgacacaggacaatctttacctcctaccagctagaggagc

SEQ ID NO: 232001 - DNA, 120 bp, Artificial Sequence
  ENSG00000119614_5 (sequence is synthesized)
tggagaaggcattcaacgaagcccactacccagacgtctatgcccgggagatgctggccatgaaaacggagctgccggaagacaggatacaggtctggttccagaaccgtcgagccaagt

SEQ ID NO: 232002 - DNA, 120 bp, Artificial Sequence
  ENSG00000119614_6 (sequence is synthesized)
ggaggaagcgggagaagtgctggggccggagcagtgtcatggcggagtatgggctctacggggccatggtgcggcactccatccccctgcccgagtccatcctcaagtcagccaaggatg

SEQ ID NO: 232003 - DNA, 120 bp, Artificial Sequence
  ENSG00000119614_7 (sequence is synthesized)
gcatcatggactcctgtgccccgtggctactggggatgcacaaaaagtcgctggaggcagcagccgagtcggggaggaagcccgagggggaacgccaggccctgcccaagctcgacaaga

SEQ ID NO: 232004 - DNA, 120 bp, Artificial Sequence
  ENSG00000119614_8 (sequence is synthesized)
tggagcaggacgagcggggccccgacgctcaggcggccatctcccaggaggaactgagggagaacagcattgcggtgctccgggccaaagctcaggagcacagcaccaaagtgctgggga

SEQ ID NO: 232005 - DNA, 120 bp, Artificial Sequence
  ENSG00000119614_9 (sequence is synthesized)
ctgtgtctgggccggacagcctggcccggagtaccgagaagccagaggaggaggaggccatggatgaagacaggccggcggagaggctcagtccaccgcagctggaggacatggcttagg

SEQ ID NO: 232006 - DNA, 120 bp, Artificial Sequence
  ENSG00000119614_10 (sequence is synthesized)
tcaaggcgcgctcagatgccggagccccaagactctgctctcctcgggccctgtggtgctgggagatgctctctgaggcaaggcccagacctggcctctgccatcctccctgttccccac

SEQ ID NO: 232007 - DNA, 120 bp, Artificial Sequence
  ENSG00000119614_11 (sequence is synthesized)
aggtcctccatcacccctggtggctgcaggcaccgctgggttctgactctggaccatgctgagacatccctcatctagtcttgacctctccagcatcccagcctcagaagccttcttgct

SEQ ID NO: 232008 - DNA, 120 bp, Artificial Sequence
  ENSG00000119614_12 (sequence is synthesized)
agccccttctctcaatccctttgcaacgctcactggttttggccaccccttgctctctgttctcttgctttaaagagtcctccttcccagctctacattctgctctgcccatgcctaaag

SEQ ID NO: 232009 - DNA, 120 bp, Artificial Sequence
  ENSG00000119614_13 (sequence is synthesized)
cccattgctgcaaatgcattgtgaattgcctgccatggctgtgacacagacggaggactggaactgcaactccagcgtcctcagcaccccactcctcagtaaaagtcttctcccaactca

SEQ ID NO: 232010 - DNA, 120 bp, Artificial Sequence
  ENSG00000119614_14 (sequence is synthesized)
gcctgttccttcctgcagacctggctgggcctgggcttccacagtgtgaagacactgtgcaggcccaggcaggcccagcctctgccccacccatcagtggagtccagatggcaggctaca

SEQ ID NO: 232011 - DNA, 120 bp, Artificial Sequence
  ENSG00000119614_15 (sequence is synthesized)
gttgggaagtctcagcctgggcccctcagccacccttggtctcatgccccgccatggtcaccctcaggaacccaccctctccacacccagcctgtcccactggctcctcccagcacaggc

SEQ ID NO: 232012 - DNA, 120 bp, Artificial Sequence
  ENSG00000119614_16 (sequence is synthesized)
acctatgtggcatgtggtgatgtacgctgcgtgccatgagtccatgtcctatgcctcacaaatgctgtggttcactgcactgttcaggagtccaaaccttctaccctgggtcctcgggcc

SEQ ID NO: 232013 - DNA, 120 bp, Artificial Sequence
  ENSG00000119614_17 (sequence is synthesized)
cctgagcctgtgtcctgaagaatctcgactctcgtgatatgctgcttgtgaccttgacttgccatgaaggcacctgcccccacagctccttgcaaactatgagttcacatgtgccctgcc

SEQ ID NO: 232014 - DNA, 120 bp, Artificial Sequence
  ENSG00000119614_18 (sequence is synthesized)
ttgaacaacccaatctggctggtaaatgacatctacgaagccacaggcctggcctcaactgagaagccaagcctggagtaggcctggggctatgcatacgcattaagggcctgctggaga

SEQ ID NO: 232015 - DNA, 120 bp, Artificial Sequence
  ENSG00000119614_19 (sequence is synthesized)
aaccttcactccagacagacagggggctaaggggctagggctgagcacctctcagagcaagcctttgacctgttcagaaggatgggaaaaaggctggaaggaaagcaaggcagaaggcca

SEQ ID NO: 232016 - DNA, 120 bp, Artificial Sequence
  ENSG00000119614_20 (sequence is synthesized)
ggagtaagcccaagctaagctgcaggcacacacgccttcatgccagtgcatgccaggaagcacgttcactagactaaaacacggtaaccatgatggaataaggagctggggcttctttct

SEQ ID NO: 232017 - DNA, 120 bp, Artificial Sequence
  ENSG00000119614_21 (sequence is synthesized)
gctggctgatgggtggacctgtgtatggtgacctctccggcctggccttttccattcgcatgaacaatgggagcacatagccctgttgacctgcccgatccagattcccaggccaggctc

SEQ ID NO: 232018 - DNA, 120 bp, Artificial Sequence
  ENSG00000119614_22 (sequence is synthesized)
ccgaccccatccacctatccaccaccccacccacctttgcagggaatacctcgttagagaatggcctgagacagtgcgttgcaactttttaattccatatcaaaagttgatttcttcttc

SEQ ID NO: 232019 - DNA, 120 bp, Artificial Sequence
  ENSG00000119614_23 (sequence is synthesized)
attccatttatggaacttccctccccctagtccggttcttcttgtctttgtccctgttggtttgaagtgttagactatagcccctggtgtgtaaataatgtacatagagtgagaagaaag

SEQ ID NO: 232020 - DNA, 120 bp, Artificial Sequence
  ENSG00000119614_24 (sequence is synthesized)
aaacttgatattgaggtgtttgaaatatggaactgtaataacttctaggtattcgaaacctgtgatttctgtgccattttctgtaaagatacaagtaagaataaaattgacttaaaaata

SEQ ID NO: 232021 - DNA, 120 bp, Artificial Sequence
  ENSG00000119616_0 (sequence is synthesized)
gtagaagtattgcgccgttggtgattacggaagaaccaggagtttggcgtgaccatggggaagcaaaagaaaacaaggaagtatgcgaccatgaagcgaatgcttagtctcagagatcag

SEQ ID NO: 232022 - DNA, 120 bp, Artificial Sequence
  ENSG00000119616_1 (sequence is synthesized)
aggcttaaagaaaaggatagattaaaacctaaaaagaaagaaaagaaggatcccagcgcattaaaggaaagagaagttccccaacacccttcctgcttatttttccaatataatacacag

SEQ ID NO: 232023 - DNA, 120 bp, Artificial Sequence
  ENSG00000119616_2 (sequence is synthesized)
ctgggcccaccttaccacatcctcgttgataccaactttatcaacttttccataaaagccaaactggacttagtgcagtcaatgatggactgtctgtatgccaagtgtatcccatgtata

SEQ ID NO: 232024 - DNA, 120 bp, Artificial Sequence
  ENSG00000119616_3 (sequence is synthesized)
accgattgtgtaatggctgaaattgagaaattggggcagaagtatcgagtggctctaaggattgccaaggatccaagatttgaacgattaccatgtacacacaaaggaacctatgcagat

SEQ ID NO: 232025 - DNA, 120 bp, Artificial Sequence
  ENSG00000119616_4 (sequence is synthesized)
gactgcttagtacagagagtaactcagcataagtgttacattgtggccacagttgaccgggacctgaaaagaagaatccgtaagattcctggagttcctatcatgtacatttctaaccat

SEQ ID NO: 232026 - DNA, 120 bp, Artificial Sequence
  ENSG00000119616_5 (sequence is synthesized)
agatacaacattgaacggatgccagatgattatggagcccctcgattctaattcttacaagacacagttcctctgcctttcttcgaccaactttctcttgttgccagttcattacacaaa

SEQ ID NO: 232027 - DNA, 120 bp, Artificial Sequence
  ENSG00000119616_6 (sequence is synthesized)
atgtagcgggatttttaaggaatcagagagactgatggagttcagggagatatttattatttaggtgcaccagcccagtcagattaacatccaaaggactgaaccctgaacagagttaag

SEQ ID NO: 232028 - DNA, 83 bp, Artificial Sequence
  ENSG00000119616_7 (sequence is synthesized)
agattaacatccaaaggactgaaccctgaacagagttaagttaccttttaagcattttgtggggccgcgggggttggggggag

SEQ ID NO: 232029 - DNA, 88 bp, Artificial Sequence
  ENSG00000119616_8 (sequence is synthesized)
atcatttcttacttttcaaggaaaatcatgttttacgacttgagtttatctgtctagttatttacaatgcctgggaaaggaggagaga

SEQ ID NO: 232030 - DNA, 120 bp, Artificial Sequence
  ENSG00000119616_9 (sequence is synthesized)
aaaggactccagctctttctctttctcacggggaattggattttcttacatgcaactgaatttctgcttacacatttttaaatttcttttaattgcttttccaatgcaatagcatgaatt

SEQ ID NO: 232031 - DNA, 120 bp, Artificial Sequence
  ENSG00000119616_10 (sequence is synthesized)
ttaattgcttttccaatgcaatagcatgaattattattctgttgacctatttgccttactatgagctgagggtagttcaatatgctcactcttttttttttttttcttgagatgaagttt

SEQ ID NO: 232032 - DNA, 66 bp, Artificial Sequence
  ENSG00000119616_11 (sequence is synthesized)
tttttttttttttcttgagatgaagtcctgcctcccatccttcaagtgattctcctgcctcagcct

SEQ ID NO: 232033 - DNA, 120 bp, Artificial Sequence
  ENSG00000119616_12 (sequence is synthesized)
ccaccatgctcaactaatttttcttttttgggcggggggggtggatatttttagtagagacaaatacttttgtatttttaatacagaaaagtatgcctcggcctcccaaagtgctggaat

SEQ ID NO: 232034 - DNA, 74 bp, Artificial Sequence
  ENSG00000119616_13 (sequence is synthesized)
tggcctgctcactttctgatgctgcttttttgttgtttgtttgtttatttgtttgttttgagacggagtctcgc

SEQ ID NO: 232035 - DNA, 66 bp, Artificial Sequence
  ENSG00000119616_14 (sequence is synthesized)
caagcgtccagccactgatgctgttttgccactgatgctgttttgaaattgatattttgtctcata

SEQ ID NO: 232036 - DNA, 86 bp, Artificial Sequence
  ENSG00000119616_15 (sequence is synthesized)
tataggtgcgtgccaccacgtccagccactgatgctgttttgccactgatgctgttttgaaattgatattttgtctcataaaaact

SEQ ID NO: 232037 - DNA, 61 bp, Artificial Sequence
  ENSG00000119616_16 (sequence is synthesized)
ggatcacctgaggtcaggagttggagatgagcctggtcacgtgcctgtaatcccagccact

SEQ ID NO: 232038 - DNA, 120 bp, Artificial Sequence
  ENSG00000119616_17 (sequence is synthesized)
aagaatatgttttatgctttttttgagttctgttgtacagtgtggtgcctatacttaataatggggtattatacatttcaaaattgatgttctcatcacagaaatgtatttgaagtattg

SEQ ID NO: 232039 - DNA, 120 bp, Artificial Sequence
  ENSG00000119616_18 (sequence is synthesized)
catatgttaactagcttgatttaactattccatattgtatccacaatttatgatatcactttgtaacccatacatttatacaattataaattgtcaatttacaataaaaaatttttgttg

SEQ ID NO: 232040 - DNA, 120 bp, Artificial Sequence
  ENSG00000119616_19 (sequence is synthesized)
cgtctttttagaaatcagatattctgatgattgctcacataatttggcggtcattgttttatactgacttactcaataaacatttattaaatgtatactaggtgcttaataagagatggt

SEQ ID NO: 232041 - DNA, 120 bp, Artificial Sequence
  ENSG00000119616_20 (sequence is synthesized)
cctgccctcaagacactcattatggtgggaaagaaaaacatgtaaatgaataaatgccgtaaaatagcagtgctagggtaaaagtttcagaggcatgtcatgggcacataaaggtggaat

SEQ ID NO: 232042 - DNA, 120 bp, Artificial Sequence
  ENSG00000119616_21 (sequence is synthesized)
gatttttttctactggttgggatggagagggaggaaaggccagtggtcatgtggtttgagctaatcttaaaaatgaataggtgcctccccagtaaattaggaatggaagatgaagcatag

SEQ ID NO: 232043 - DNA, 74 bp, Artificial Sequence
  ENSG00000119616_22 (sequence is synthesized)
gtgcctccccagtaaattaggaatggaagatgaagcataggaaacagtacaccatagaaaatccattaacctat

SEQ ID NO: 232044 - DNA, 87 bp, Artificial Sequence
  ENSG00000119616_23 (sequence is synthesized)
tcctatgtatttgtggggatttggtatattattaaggtggtatttcgtttctgtgggaaaaggaaatttcattaacaggccaaatag

SEQ ID NO: 232045 - DNA, 120 bp, Artificial Sequence
  ENSG00000119616_24 (sequence is synthesized)
tttctgtgggaaaaggaaatttcattaacaggccaaatagtctggagtcattctgttagtgttagaatactaattccaccagttaatatctgtatgagttggacaaaccatataaccatc

SEQ ID NO: 232046 - DNA, 120 bp, Artificial Sequence
  ENSG00000119616_25 (sequence is synthesized)
tgttgccttccttgtttcctctttaaagtgtttaatccgcaaaacaaacctgataaagtgagattaaattgaatagtacctggcccaagtaagtgttcttcagtaaatgttagtgattat

SEQ ID NO: 232047 - DNA, 78 bp, Artificial Sequence
  ENSG00000119616_26 (sequence is synthesized)
tggcccaagtaagtgttcttcagtaaatgttagtgattattacacaatggcaaggtggctatccatttgaaaaaaaat

SEQ ID NO: 232048 - DNA, 77 bp, Artificial Sequence
  ENSG00000119616_27 (sequence is synthesized)
cccatctctactaaaaatacaaaaaaacaattaggcaggcatggtggcaagcttgaacctgggagatggaggttgtg

SEQ ID NO: 232049 - DNA, 81 bp, Artificial Sequence
  ENSG00000119616_28 (sequence is synthesized)
agctactctggaggctgaggcaggagaacgcttgaacctgggagatggaggttgtgatgagccgagatcatgccattgcac

SEQ ID NO: 232050 - DNA, 120 bp, Artificial Sequence
  ENSG00000119616_29 (sequence is synthesized)
aaaaaattagtttcctacttcacatgattcataaaaatatttcaagtggatcaaagacctaaattttttttttttttgagacagtttctcactctgtcacccaggctgcagtgcgttggc

SEQ ID NO: 232051 - DNA, 120 bp, Artificial Sequence
  ENSG00000119616_30 (sequence is synthesized)
acaatcatgactcactgcagccttgaccttcccaggccctgatgatccaccccagcctctcaagtagctgggatttttgtatttcttacagagatgggattttgccttattgcccacctt

SEQ ID NO: 232052 - DNA, 120 bp, Artificial Sequence
  ENSG00000119616_31 (sequence is synthesized)
ggccttctaaagtattgggattatgggcatgagccactgcacccaccctaaacttatttctaagctatggaagcattaggaaaataaatgtaaagaaaaacgtgtttatcacctttggat

SEQ ID NO: 232053 - DNA, 120 bp, Artificial Sequence
  ENSG00000119616_32 (sequence is synthesized)
agaattcttaagcagaatctaaaaagattgaagagtttgaatatattaaaattatagatttctgtgcaagacactcccctcccctaaaaaacaagtgactgatgagattttccaatacat

SEQ ID NO: 232054 - DNA, 120 bp, Artificial Sequence
  ENSG00000119616_33 (sequence is synthesized)
gtaacaagggtttagagaaatgagtactgatgtcatgctgacagaagtgcaaatatttatggccattttttacagctgttgacaagatccactaaaataaaaattgcagatatcctgtga

SEQ ID NO: 232055 - DNA, 120 bp, Artificial Sequence
  ENSG00000119616_34 (sequence is synthesized)
acttttgctagaggaagagctagattggataattgctttttttgtttgtttgtttttgataattgcttttttaaagttggtgacaaaggttgccaggggagctgagattaagataatgat

SEQ ID NO: 232056 - DNA, 120 bp, Artificial Sequence
  ENSG00000119616_35 (sequence is synthesized)
attactttcttccttgccttcctttttaggatttatttccaatgaacatggacaaaagagtttacagcaaacagtcccaagcagacttcttttttgtttttgttaatactagggtatcaa

SEQ ID NO: 232057 - DNA, 120 bp, Artificial Sequence
  ENSG00000119616_36 (sequence is synthesized)
acggaagaaccaggagtttggcgtgaccatggtgagagaagacggtccaagaagggacgttatcaggccactttttgggtggagaaggaggggaagcaaaagaaaacaaggaagtatgcg

SEQ ID NO: 232058 - DNA, 120 bp, Artificial Sequence
  ENSG00000119630_0 (sequence is synthesized)
agaagggagctgctgtctgcggaggaaactgcatcgacggacggccgcccagctacgggaggacctggagtggcactgggcgcccgacggaccatccccgggacccgcctgcccctcggc

SEQ ID NO: 232059 - DNA, 120 bp, Artificial Sequence
  ENSG00000119630_1 (sequence is synthesized)
gccccgccccgccgggccgctccccgtcgggttccccagccacagccttacctacgggctcctgactccgcaaggcttccagaagatgctcgaaccaccggccggggcctcggggcagca

SEQ ID NO: 232060 - DNA, 120 bp, Artificial Sequence
  ENSG00000119630_2 (sequence is synthesized)
gtgagggaggcgtccagccccccactcagctcttctcctcctgtgccaggggctccccgggggatgagcatggtggttttccctcggagccccctggctcgggacgtctgagaagatgcc

SEQ ID NO: 232061 - DNA, 120 bp, Artificial Sequence
  ENSG00000119630_3 (sequence is synthesized)
ggtcatgaggctgttcccttgcttcctgcagctcctggccgggctggcgctgcctgctgtgcccccccagcagtgggccttgtctgctgggaacggctcgtcagaggtggaagtggtacc

SEQ ID NO: 232062 - DNA, 120 bp, Artificial Sequence
  ENSG00000119630_4 (sequence is synthesized)
cttccaggaagtgtggggccgcagctactgccgggcgctggagaggctggtggacgtcgtgtccgagtaccccagcgaggtggagcacatgttcagcccatcctgtgtctccctgctgcg

SEQ ID NO: 232063 - DNA, 120 bp, Artificial Sequence
  ENSG00000119630_5 (sequence is synthesized)
ctgcaccggctgctgcggcgatgagaatctgcactgtgtgccggtggagacggccaatgtcaccatgcagctcctaaagatccgttctggggaccggccctcctacgtggagctgacgtt

SEQ ID NO: 232064 - DNA, 120 bp, Artificial Sequence
  ENSG00000119630_6 (sequence is synthesized)
ctctcagcacgttcgctgcgaatgccggcctctgcgggagaagatgaagccggaaaggaggagacccaagggcagggggaagaggaggagagagaagcagagacccacagactgccacct

SEQ ID NO: 232065 - DNA, 120 bp, Artificial Sequence
  ENSG00000119630_7 (sequence is synthesized)
ggctcgtgtatttattaccgtcacactcttcagtgactcctgctggtacctgccctctatttattagccaactgtttccctgctgaatgcctcgctcccttcaagacgaggggcagggaa

SEQ ID NO: 232066 - DNA, 120 bp, Artificial Sequence
  ENSG00000119630_8 (sequence is synthesized)
ggacaggaccctcaggaattcagtgccttcaacaacgtgagagaaagagagaagccagccacagacccctgggagcttccgctttgaaagaagcaagacacgtggcctcgtgaggggcaa

SEQ ID NO: 232067 - DNA, 120 bp, Artificial Sequence
  ENSG00000119630_9 (sequence is synthesized)
gctaggccccagaggccctggaggtctccaggggcctgcagaaggaaagaagggggccctgctacctgttcttgggcctcaggctctgcacagacaagcagcccttgctttcggagctcc

SEQ ID NO: 232068 - DNA, 120 bp, Artificial Sequence
  ENSG00000119630_10 (sequence is synthesized)
tgtccaaagtagggatgcggatcctgctggggccgccacggcctggctggtgggaaggccggcagcgggcggaggggatccagccacttccccctcttcttctgaagatcagaacattca

SEQ ID NO: 232069 - DNA, 120 bp, Artificial Sequence
  ENSG00000119630_11 (sequence is synthesized)
gctctggagaacagtggttgcctgggggcttttgccactccttgtcccccgtgatctcccctcacactttgccatttgcttgtactgggacattgttctttccggccaaggtgccaccac

SEQ ID NO: 232070 - DNA, 120 bp, Artificial Sequence
  ENSG00000119630_12 (sequence is synthesized)
cctgccccccctaagagacacatacagagtgggccccgggctggagaaagagctgcctggatgagaaacagctcagccagtggggatgaggtcaccaggggaggagcctgtgcgtcccag

SEQ ID NO: 232071 - DNA, 120 bp, Artificial Sequence
  ENSG00000119630_13 (sequence is synthesized)
ctgaaggcagtggcaggggagcaggttccccaagggccctggcacccccacaagctgtccctgcagggccatctgactgccaagccagattctcttgaataaagtattctagtgtggaaa

SEQ ID NO: 232072 - DNA, 120 bp, Artificial Sequence
  ENSG00000119630_14 (sequence is synthesized)
gtgggtagcaaggaaaggcccccgtcctcttggcagcctcagcaaagatgggtcccagggcagaggcaaaggctgcccatccccgctgcgggctgaacttttttccagactgagggagac

SEQ ID NO: 232073 - DNA, 120 bp, Artificial Sequence
  ENSG00000119630_15 (sequence is synthesized)
caagagggcaggaccaggggtggctaccattcattttgtccccccaccagccagttttgccaagggagctggtcccagcagctggggtacagctgttgagatactgcaagggaagagaga

SEQ ID NO: 232074 - DNA, 120 bp, Artificial Sequence
  ENSG00000119630_16 (sequence is synthesized)
gggtgggtccctcccagcctcgcaggggttcggtgcgtgtcgttccccttctctgggatgggaggcagctgccacgggcctctgaaagaggtgcctggaggcaaagacattgcaagtctg

SEQ ID NO: 232075 - DNA, 120 bp, Artificial Sequence
  ENSG00000119630_17 (sequence is synthesized)
tgcgtgtcgttccccttctctgggatgggaggcagctgccacgggcctctgaaagaggtgcctggaggcaaagacattgcaagtctgaacttcgttctggggcaagctgtgtgcccacag

SEQ ID NO: 232076 - DNA, 120 bp, Artificial Sequence
  ENSG00000119630_18 (sequence is synthesized)
gagcgggcaaacggggctgagaagcagcaagaaggacaagctcgggtaggagaaaaggggcagaagaagagtgacactgtggcttccttgatgttgcagcacccctctacggcccctccc

SEQ ID NO: 232077 - DNA, 120 bp, Artificial Sequence
  ENSG00000119630_19 (sequence is synthesized)
aatccacagagcctctgaccagcaccagtcttgctgcctgtgctgggggcacttggaacattggttagcaggagcaacaggcctggcactgccagctaggttcagggaagagagaaatgg

SEQ ID NO: 232078 - DNA, 120 bp, Artificial Sequence
  ENSG00000119630_20 (sequence is synthesized)
gctgagctgctgctcctggtactactgggccatggatgaaggcaccagactagaagtccagagccctagccaggggcggcaggagggaagactaccacttattgtgtacctattctgtgc

SEQ ID NO: 232079 - DNA, 120 bp, Artificial Sequence
  ENSG00000119630_21 (sequence is synthesized)
ctagccccgcaggaggcacttgaatgtttctcatttagtcacatacatttattgagcacctaccacatgccaggcattgtcctgatgggatgcagtggtgagcaaggttcctgctctcat

SEQ ID NO: 232080 - DNA, 120 bp, Artificial Sequence
  ENSG00000119630_22 (sequence is synthesized)
aacaaccctgggaggtaggccctattgtcatccccattttacagatgagaaaatcaaggctcaatacagtttcatgatttatcacagctagtgagtgtgggaggagggattctgggccct

SEQ ID NO: 232081 - DNA, 120 bp, Artificial Sequence
  ENSG00000119630_23 (sequence is synthesized)
gacctaactcgtaagccttcgtttttcaggctacctttcatggccatgaccacttttctaatagcccccaggcttagccttgcctcctgggcagggctatggctgccccttttgttggag

SEQ ID NO: 232082 - DNA, 120 bp, Artificial Sequence
  ENSG00000119630_24 (sequence is synthesized)
tgttggagaccctgcctcaacttgtttccacccatccctccaagccagagcttagccatataacaagagctcggtaatgaaccctcctgggtgcaatgctgggtggtgacccagagtcac

SEQ ID NO: 232083 - DNA, 120 bp, Artificial Sequence
  ENSG00000119630_25 (sequence is synthesized)
cttctccatcccctttgccctgacagccactcttttggggcaggcagatgaagagactgaggttccaagagtgtctgtcacttgcccaatatggagaggtacaaccagacagtcccaaga

SEQ ID NO: 232084 - DNA, 120 bp, Artificial Sequence
  ENSG00000119630_26 (sequence is synthesized)
ggccctggtaccttgccctggctcccaagggaggaaccagctgagggtagcatgtcctggccccaaagctgactgctaccatgctgtcccatgtctctacccactgttcccagtgaagac

SEQ ID NO: 232085 - DNA, 120 bp, Artificial Sequence
  ENSG00000119630_27 (sequence is synthesized)
tgaggccctatcccctgccaggggccaggcaacagggacacctttcttcttgcttctgggccaacagccacagccctgggaggcagagcccagacatgcctggtgacttcagggctgatg

SEQ ID NO: 232086 - DNA, 120 bp, Artificial Sequence
  ENSG00000119630_28 (sequence is synthesized)
ctccctccttcctcccaccccgtcgctcactccccatgttgttccggatggagtggggctgtgccctgacaggcagccagtccgctgtctggccatcatctcctgtccctgaggaaattc

SEQ ID NO: 232087 - DNA, 120 bp, Artificial Sequence
  ENSG00000119630_29 (sequence is synthesized)
ccagaatgcaccctggaaggaacggaaaaaagcagcaaagaaagtgagaaagaaaaagcaacagagaacagacagaaacaaccaaatttgatgccaagaggctgagaagtgcagaagcgg

SEQ ID NO: 232088 - DNA, 120 bp, Artificial Sequence
  ENSG00000119630_30 (sequence is synthesized)
gtggcaggggtccccaggaggttgatttgtccctctcgtggtggggtcaccagagcctggagtgggagtgaagccttgaggctctggccacctctcccttgccaactccatgctaccccc

SEQ ID NO: 232089 - DNA, 120 bp, Artificial Sequence
  ENSG00000119630_31 (sequence is synthesized)
agccccacttattgctttcctaacgttcctctgcccctctctctgtctgtttccctaggcctctgcgggagaagatgaagccggaaaggaggagacccaagggcagggggaagaggagga

SEQ ID NO: 232090 - DNA, 120 bp, Artificial Sequence
  ENSG00000119630_32 (sequence is synthesized)
gagagaagcagagacccacagactgccacctgtgagtgtgcggggtcccagggatggcgaggaggctgggcccgaggggagccccgccttgccgccagggttaggttggggagggggaga

SEQ ID NO: 232091 - DNA, 120 bp, Artificial Sequence
  ENSG00000119630_33 (sequence is synthesized)
ggcaggactgaggccagtcttgggggcagaacagggagctgcacctcctcaagactctagggcccaggaagcatcagtggaccttggtttttgtcccggcttagccctaggtttccattg

SEQ ID NO: 232092 - DNA, 120 bp, Artificial Sequence
  ENSG00000119630_34 (sequence is synthesized)
accttcaacaaatcatttcacctttgtcagcctagcttttctctgtgtagaatgaggggcaggaggtccagcaaacattcagtcactctacaaacatttactgagcacttactgtgtgtc

SEQ ID NO: 232093 - DNA, 120 bp, Artificial Sequence
  ENSG00000119630_35 (sequence is synthesized)
aggtacatctgtgagcaaacaaacaggattcctgcacattagtgtttaccttttagtgattaaaagtctgtcatcagctgagacgttatctggggccacttcctagtagccccggggaac

SEQ ID NO: 232094 - DNA, 120 bp, Artificial Sequence
  ENSG00000119630_36 (sequence is synthesized)
atgtgcccctcgccactgtctcccaggagtatttttgcctgtgggtccccttgctgcttctaacccacttcgtaccttgtgggcagcagaatggagccccaggcctgagtgtggctggga

SEQ ID NO: 232095 - DNA, 120 bp, Artificial Sequence
  ENSG00000119630_37 (sequence is synthesized)
gagaaggatgagaggagggaaaacccaaatctgtgagagtaaatagaaaaaataaaatatttcacgtgcacagtcaatcagtcactgaagagaggtggctctccttcaggggctaagcct

SEQ ID NO: 232096 - DNA, 120 bp, Artificial Sequence
  ENSG00000119630_38 (sequence is synthesized)
cccccacgcacgtgactccaggaagtcatttcgtgctatggagtggagttgacccaagccctgaccccatgagccccactccatgaagacagggatcctggggactgcgccccctagggg

SEQ ID NO: 232097 - DNA, 120 bp, Artificial Sequence
  ENSG00000119630_39 (sequence is synthesized)
tttatgctctcatctcttttctgggcccgcgcggcaatttgggaaacaagctggcagggaagtccatccaggcccgagttacccgccggcagccggaggcagaaagtgtcccgtggctcc

SEQ ID NO: 232098 - DNA, 120 bp, Artificial Sequence
  ENSG00000119630_40 (sequence is synthesized)
aggcagaaagtgtcccgtggctcctgttcccaaggcagcagtcttcagacatttcactcgggaatctcctgaaagaatttcaaaagtggccgggcgcagtggctaacacctgtaatccca

SEQ ID NO: 232099 - DNA, 70 bp, Artificial Sequence
  ENSG00000119630_41 (sequence is synthesized)
tttgggaggccgaagtgggtagatcacttgaggtcagaagttcgaggccagcctgaccttggtgcatgcc

SEQ ID NO: 232100 - DNA, 120 bp, Artificial Sequence
  ENSG00000119630_42 (sequence is synthesized)
aaaaagaattccaaaagcccatgtgctcccttgcccattcttaagttgacattgaacattttcatcagaattataagtcaagccaggctcagtacctcatgcctgtaattctagcacttt

SEQ ID NO: 232101 - DNA, 87 bp, Artificial Sequence
  ENSG00000119630_43 (sequence is synthesized)
ggccaggagttcaagcctagccgaaatacaaaaactagctggacgtggtgccatgtgcctatagtcccaactactcaggaggctgag

SEQ ID NO: 232102 - DNA, 81 bp, Artificial Sequence
  ENSG00000119630_44 (sequence is synthesized)
gtcccaactactcaggaggctgaggtggaatagatagatccactgcacctcagcctgggtgacagagtaagaacctgtctc

SEQ ID NO: 232103 - DNA, 120 bp, Artificial Sequence
  ENSG00000119630_45 (sequence is synthesized)
caggattggaagatctttgggatgcagcaggccaagggtctccaaaagcttctagcctcccatccttttccaaatgaggaaaactgaggccagagaggggtgggacctaacctacccagg

SEQ ID NO: 232104 - DNA, 120 bp, Artificial Sequence
  ENSG00000119630_46 (sequence is synthesized)
gtccagtgagtttttagtggtactcaggctgctctgagacagggcagagcatgtgcagcaagtgggaaggaacccagaggggcccctaccttcttgccatcacacttggcccaagagtgc

SEQ ID NO: 232105 - DNA, 120 bp, Artificial Sequence
  ENSG00000119632_0 (sequence is synthesized)
gtcatttcctgggccaagttgggacccggacggcctcaccatgatgaaacgggcagctgctgctgcagtgggaggagccctggcagtgggggctgtgcccgtggtgctcagtgccatggg

SEQ ID NO: 232106 - DNA, 120 bp, Artificial Sequence
  ENSG00000119632_1 (sequence is synthesized)
agcctggtggctactctgcagtccgtgggggcagctggactctccacatcatccaacatcctcctggcctctgttgggtcagtgttgggggcctgcttggggaattcaccttcttcttct

SEQ ID NO: 232107 - DNA, 120 bp, Artificial Sequence
  ENSG00000119632_2 (sequence is synthesized)
ctcccagctgaacccgaggctaaagaagatgaggcaagagaaaatgtaccccaaggtgaacctccaaaacccccactcaagtcagagaaacatgaggaataaaggtcacatgcagatgca

SEQ ID NO: 232108 - DNA, 120 bp, Artificial Sequence
  ENSG00000119632_3 (sequence is synthesized)
atcagagccgtcaaagcctcccagactcacagaagtgtacactacaagggtgaattttactttgtgtaaatcacctacaccttaataaacttgactttttaaaaatcttgatgaaggata

SEQ ID NO: 232109 - DNA, 120 bp, Artificial Sequence
  ENSG00000119632_4 (sequence is synthesized)
aagttgggacccggacggcctcaccatgatgagtgagtcttgcttccccagggggctggcgggctgggctgggggcaggcttccccaaccccagcccaggaagggacagggaatagcttc

SEQ ID NO: 232110 - DNA, 120 bp, Artificial Sequence
  ENSG00000119632_5 (sequence is synthesized)
cccttctctctcctctttctcccctttcccatctccctctgccttcccctggcactctctctctagaacgggcagctgctgctgcagtgggaggaggggcagctggactctccacatcat

SEQ ID NO: 232111 - DNA, 120 bp, Artificial Sequence
  ENSG00000119632_6 (sequence is synthesized)
cacacacacacacacacacacacaaatttgagaccaatgaagggtattgacttcctcagcatcacacagcaagttagagacaaaccagggccatggctggtccttctatgacatctttgc

SEQ ID NO: 232112 - DNA, 120 bp, Artificial Sequence
  ENSG00000119632_7 (sequence is synthesized)
atctttgcttcacctggctccacactccaccttttcttcaccagaagaccactaagttgccatctctgtattgctcaagctgacagtctccggaaactgtcaaggaattcctaagcgggg

SEQ ID NO: 232113 - DNA, 120 bp, Artificial Sequence
  ENSG00000119632_8 (sequence is synthesized)
cccggacggcctcaccatgatgaaacgggcagctgctgctgcagtgggaggaggtaagttacccggatcgcctgtctccaggccctcacctagcctggtccccgggctgctgggagaacg

SEQ ID NO: 232114 - DNA, 120 bp, Artificial Sequence
  ENSG00000119632_9 (sequence is synthesized)
cagagatgaggcgctgggctggctctcaccctccacttccgaagctgcccgagtagcctgagtgagccacagcatcaaaatactccagggaaaagctcactcccattcctgacccagctt

SEQ ID NO: 232115 - DNA, 120 bp, Artificial Sequence
  ENSG00000119632_10 (sequence is synthesized)
gcggggggaagggtcccttctcctgagcccacctctgcactcagcttctctctccccacagccctggcagtgggggctgtgcccgtggtgctcagtgccatgggcttcactggggcagga

SEQ ID NO: 232116 - DNA, 120 bp, Artificial Sequence
  ENSG00000119632_11 (sequence is synthesized)
gaccaccagagctgcgagaagatccagccctgaggctgagcccgagggaagctcttctcaccctgaagttccgtgaccctcagcttcctgggtcttcagtctctccctcactgtcccctc

SEQ ID NO: 232117 - DNA, 120 bp, Artificial Sequence
  ENSG00000119636_0 (sequence is synthesized)
gctctccgcgcgccgtcagcggcgcgggtggggcattgccagctcggcgtcccggttcccttggagacagagctggccagggcggccgcggctgggcaactacgacagcggagcccctgg

SEQ ID NO: 232118 - DNA, 120 bp, Artificial Sequence
  ENSG00000119636_1 (sequence is synthesized)
ggaagccaagatgccgtcgaagggaaaggacaaaaagaaaggcaagagcaaaggcaaagacacgaagaagttaataaaaacagatgaatctgtggtggacagagccaaggccaatgcctc

SEQ ID NO: 232119 - DNA, 120 bp, Artificial Sequence
  ENSG00000119636_2 (sequence is synthesized)
cctttgggaggccaggttggaagtcacagaactctctaggattaagtatcgtgatacttcacggatactggcaaaaagtaatgaggacttaaagaaaaagcaatgtaaaatggagaaaga

SEQ ID NO: 232120 - DNA, 120 bp, Artificial Sequence
  ENSG00000119636_3 (sequence is synthesized)
cataatgtcagtattaagttacctgaagaagcaggatcaggagaaagataatatgattgaaaaactgaaacagcaattaaatgaaacaaaggaaaaagcccaagaggagaaggataaatt

SEQ ID NO: 232121 - DNA, 120 bp, Artificial Sequence
  ENSG00000119636_4 (sequence is synthesized)
ggaacaaaagtataccaggcaaattaatgaactagagggacagttccatcaaaaagccaaagaaattggcatgattcacacagagctgaaagcagtaagacaattccagaagagaaaaat

SEQ ID NO: 232122 - DNA, 120 bp, Artificial Sequence
  ENSG00000119636_5 (sequence is synthesized)
ccaagtggagagagagttagatgatctgaaagagaatttaagaaacacagagcggatacatcaggagactcttagaagactggaaagcagattttttgaagaaaagcaccgactagaaca

SEQ ID NO: 232123 - DNA, 120 bp, Artificial Sequence
  ENSG00000119636_6 (sequence is synthesized)
agaggctgaaaagaagataataatgctagcagagagagcccaccatgaggctattgtgcaattgaacgatgctggaagaaatgtttttaaagagaatgattatcttcagaaagctctggc

SEQ ID NO: 232124 - DNA, 120 bp, Artificial Sequence
  ENSG00000119636_7 (sequence is synthesized)
atatcacctgaaggaaactgacgctctacaaaaaaactcccagaagttgcaagagagtcatactttacttttacatcaaaaggagatcaatgatctgttggttaaggaaaagattatgca

SEQ ID NO: 232125 - DNA, 120 bp, Artificial Sequence
  ENSG00000119636_8 (sequence is synthesized)
acttgtccagcagagatcacaaatccaaacccttcagaagaaggtagtaaacttggagactgctctgagttacatgaccaaagagtttgagagtgaagttttaaaactgcagcaacacgc

SEQ ID NO: 232126 - DNA, 120 bp, Artificial Sequence
  ENSG00000119636_9 (sequence is synthesized)
aatgatagagaaccaagcaggtcaggtagaaattgacaagctgcagcaccttcttcagatgaaggacagggaaatgaatcgtgtgaagaagctggccaagaacatactggatgagagaac

SEQ ID NO: 232127 - DNA, 120 bp, Artificial Sequence
  ENSG00000119636_10 (sequence is synthesized)
agaagtggaaagattctttttagatgctctgcaccaagtgaagcaacagatcctaattagcaggaagcattataagcagatagcacaagctgctttcaatttaaaaatgagagcagcatg

SEQ ID NO: 232128 - DNA, 120 bp, Artificial Sequence
  ENSG00000119636_11 (sequence is synthesized)
tacaggaagaacagaatatcccaaaatcagaacatttgatggcagagagcacagcaccaatagtgtgaatcaggatcttctggaggccgaaaaatggacacatattgaaggaaatgtgga

SEQ ID NO: 232129 - DNA, 120 bp, Artificial Sequence
  ENSG00000119636_12 (sequence is synthesized)
actatgttgtttctgacagtggggaaacaaaggaatttggggatgaaagtaagcttcaagataaaatcttcatcacccagcaaattgcaatatcagactcttctggtgaagtggtgctac

SEQ ID NO: 232130 - DNA, 120 bp, Artificial Sequence
  ENSG00000119636_13 (sequence is synthesized)
ccactattccaaaagaacctcaggagtctgacacaggaaccttctgagaagcactgattatgacctcacagatgctgctggcagtcccttccttgcagaatccttgctcctgaatatctt

SEQ ID NO: 232131 - DNA, 120 bp, Artificial Sequence
  ENSG00000119636_14 (sequence is synthesized)
taagaaaatttcttaaaggaaaagacaaaaaatttaactcaaaagttacctgtttgccatagaaattggtgtctcccctgaaggaggatcgagagccggtgaatgagaacattggcaaag

SEQ ID NO: 232132 - DNA, 120 bp, Artificial Sequence
  ENSG00000119636_15 (sequence is synthesized)
gcactggaatggggacattcactcccacctaaaacagaacaaatccgtgtcatatcctaaggacaaaggaactctccatttagaaacacaaaggcatcagagaccagttttaaataccca

SEQ ID NO: 232133 - DNA, 120 bp, Artificial Sequence
  ENSG00000119636_16 (sequence is synthesized)
ccttctaccctatcctctaccccatgaactttcattcctgaggaagaaatggggcaatgtgggaggtcatgggggcaatcttaaaccaatgactcaccattatttactgtttcctcttag

SEQ ID NO: 232134 - DNA, 120 bp, Artificial Sequence
  ENSG00000119636_17 (sequence is synthesized)
gaaatagtaaatggatataagaatctcttaaaaattctgttcacgaacctgtccaacatccaccaagtgggcatatttccgagcagtggctccattggtggtgaagatggcagttccatt

SEQ ID NO: 232135 - DNA, 120 bp, Artificial Sequence
  ENSG00000119636_18 (sequence is synthesized)
tccatatgggttgttatttacaatctggatggcttcatccaatgtttctgtctccagaaccacaagaactggaccaaaaatctcctctttgtaacaggtcatatttggctgccaggagtg

SEQ ID NO: 232136 - DNA, 120 bp, Artificial Sequence
  ENSG00000119636_19 (sequence is synthesized)
atgcatccagaaaagaagtcagctttttggattctgagtattttatgcttatttggtactttcacttactacacatcatttacgtggacaactttcatattactaatctcttttcatttc

SEQ ID NO: 232137 - DNA, 120 bp, Artificial Sequence
  ENSG00000119636_20 (sequence is synthesized)
aaatcacctatttaaaaaaaaagtcctctctcaagtgtattccgtcttccaagttaccaatcatataaacaacttggaattcctatcaacaataaccacacttcctttaagggactgtat

SEQ ID NO: 232138 - DNA, 120 bp, Artificial Sequence
  ENSG00000119636_21 (sequence is synthesized)
ctttagttcatgacccatcatcagctgcctttttaatacctgaacgactagtttcatccaattgttatcaaaaagttacatgaaaatttattttttataaatccaatctatagtaaatat

SEQ ID NO: 232139 - DNA, 120 bp, Artificial Sequence
  ENSG00000119636_22 (sequence is synthesized)
accaggataatttttctctttacagaaaccccatgctgttttctgtaacataaataatccattcttattcactcctttgcctcccaaatatgtctgtatgtttatattttgatatcaggt

SEQ ID NO: 232140 - DNA, 120 bp, Artificial Sequence
  ENSG00000119636_23 (sequence is synthesized)
cgcagacactcaaaacatccttcaccatgcaattaatgtttgttgctgataaacggatttttctgtatggttctgtggcaagagatttcataatttctactgcacttacattcaacactt

SEQ ID NO: 232141 - DNA, 120 bp, Artificial Sequence
  ENSG00000119636_24 (sequence is synthesized)
gatgattcactattatagtaaggatatatgaatttcaaaaaatgcctcataacctcaatttttaagtcatgttagctgagagactttcaaagttttgataaataaaaattgacaagtcaa

SEQ ID NO: 232142 - DNA, 120 bp, Artificial Sequence
  ENSG00000119636_25 (sequence is synthesized)
tatttatatgcattctgaaacatcagccttccatttggtatcttaatagaagattagaagattgttaccaaattatagcacaatacaatgagggaaaataaaaccttctagaaatctcaa

SEQ ID NO: 232143 - DNA, 89 bp, Artificial Sequence
  ENSG00000119636_26 (sequence is synthesized)
tggctctgtcacccaggctggagtacattggcatcatcatggttcactgcatcctccactgcctgggctcaagtgatcctctcacgatt

SEQ ID NO: 232144 - DNA, 120 bp, Artificial Sequence
  ENSG00000119636_27 (sequence is synthesized)
aaaagagttggtccctgagtcacttaggaatacatttagcggtgagtaacagtcctgacatcagtggcatcaccacacaagggtttattctttcacctaaaggaggcctggaggagatca

SEQ ID NO: 232145 - DNA, 120 bp, Artificial Sequence
  ENSG00000119636_28 (sequence is synthesized)
aaagaacctcaggagtctgacacaagcacacagaaaccatcagatgagaacttctcaacttcctactagcaaacctacaaaactgaactcaacctaatggagaaggtagccagcaagctc

SEQ ID NO: 232146 - DNA, 120 bp, Artificial Sequence
  ENSG00000119636_29 (sequence is synthesized)
catgcaggaaaagtgaccgagacagtggtgcacgatcaatatatgtggactggatgaagaggtccccactcagccatcatcactttctctaggaagtctcaacctcaggtctatggtcac

SEQ ID NO: 232147 - DNA, 120 bp, Artificial Sequence
  ENSG00000119636_30 (sequence is synthesized)
tagattgttgtgtccccagcccctagcacaattcctggaagagagtcacttcagaagtttctccaaatgaatcagaaaatacatagtgtctgtttctgaaataaaagtacatggaaagag

SEQ ID NO: 232148 - DNA, 120 bp, Artificial Sequence
  ENSG00000119636_31 (sequence is synthesized)
aatcttataatgcttataagaagcattagactcaacttataaagaatatatcagaaacataaatatgacccttatcctctactaccttagaatattcatttttctttgcttagagttggt

SEQ ID NO: 232149 - DNA, 120 bp, Artificial Sequence
  ENSG00000119636_32 (sequence is synthesized)
ccctgagtcacttaggaatacatttagcggtgagtaacagtcctgacatcagtggcatcaccacacaagggtttattctttcacctaaaggaggcctggaggtaagcaatccacagcagg

SEQ ID NO: 232150 - DNA, 120 bp, Artificial Sequence
  ENSG00000119636_33 (sequence is synthesized)
aatggtagtgccacaaagttaatagacactcagcttccttaactttgctctgcaacacttggcttacatcctcaaactcacctcacagcctggggggcgctgctggagctctaaccattc

SEQ ID NO: 232151 - DNA, 120 bp, Artificial Sequence
  ENSG00000119636_34 (sequence is synthesized)
tatttgaccgtatttttccttttcacatttttttcctttgaaattctttaggacacatattgaaggaaatgtggatattggagatttgacctgggagcagaaggaaaaagtattgcgatt

SEQ ID NO: 232152 - DNA, 120 bp, Artificial Sequence
  ENSG00000119636_35 (sequence is synthesized)
tctctactagttgagagacttcagggatcagtggaatgagtaataaatagcattagtagattacataaatttttaaagcaatatccgtacaaatgcatattatactaatgcaaatgcaaa

SEQ ID NO: 232153 - DNA, 120 bp, Artificial Sequence
  ENSG00000119638_0 (sequence is synthesized)
accatcgagcttcgcggggttgctgggctgacggatccgcgggccggcatctgaagcgagcgggacgcagcgcggccagggcctccgggcatacgcaggctggtccccaaggcccgcggc

SEQ ID NO: 232154 - DNA, 120 bp, Artificial Sequence
  ENSG00000119638_1 (sequence is synthesized)
cgccgccatgtcggtgctgggcgagtacgagcgacactgcgattccatcaactcggactttgggagcgagtccgggggttgcggggactcgagtccggggcctagcgccagtcaggggcc

SEQ ID NO: 232155 - DNA, 120 bp, Artificial Sequence
  ENSG00000119638_2 (sequence is synthesized)
gcgagccggcggcggcgcggcggagcaggaggaactgcactacatccccatccgcgtcctgggccgcggcgccttcggggaagccacgctgtaccgccgcaccgaggatgactcactggt

SEQ ID NO: 232156 - DNA, 120 bp, Artificial Sequence
  ENSG00000119638_3 (sequence is synthesized)
tgtgtggaaggaagtcgatttgacccggctgtctgagaaggaacgtcgtgatgccttgaatgagattgttattctggcactgctgcagcacgacaacattattgcctactacaatcactt

SEQ ID NO: 232157 - DNA, 120 bp, Artificial Sequence
  ENSG00000119638_4 (sequence is synthesized)
catggacaataccacgctgctgattgagctggaatattgtaatggagggaacctgtatgacaaaatccttcgtcagaaggacaagttgtttgaggaagagatggtggtgtggtacctatt

SEQ ID NO: 232158 - DNA, 120 bp, Artificial Sequence
  ENSG00000119638_5 (sequence is synthesized)
tcagattgtttcagcagtgagctgcatccataaagctggaatccttcatagagatataaagacattaaatatttttctgaccaaggcaaacctgataaaacttggagattatggcctagc

SEQ ID NO: 232159 - DNA, 120 bp, Artificial Sequence
  ENSG00000119638_6 (sequence is synthesized)
aaagaaacttaattctgagtattccatggctgagacgcttgtgggaaccccatattacatgtctccagagctctgtcaaggagtaaagtacaatttcaagtctgatatctgggcagttgg

SEQ ID NO: 232160 - DNA, 120 bp, Artificial Sequence
  ENSG00000119638_7 (sequence is synthesized)
ctgcgtcatttttgaactgcttaccttaaagaggacgtttgatgctacaaacccacttaacctgtgtgtgaagatcgtgcaaggaattcgggccatggaagttgactctagccagtactc

SEQ ID NO: 232161 - DNA, 120 bp, Artificial Sequence
  ENSG00000119638_8 (sequence is synthesized)
tttggaattgatccaaatggttcattcgtgccttgaccaggatcctgagcagagacctactgcagatgaacttctagatcgccctcttctcaggaaacgcaggagagagatggaggaaaa

SEQ ID NO: 232162 - DNA, 120 bp, Artificial Sequence
  ENSG00000119638_9 (sequence is synthesized)
agtcactctgcttaatgcacctacaaagagaccaaggtcaagcactgtgactgaagcacccattgctgtagtaacatcacgaaccagtgaagtctatgtttggggtggtggaaaatccac

SEQ ID NO: 232163 - DNA, 120 bp, Artificial Sequence
  ENSG00000119638_10 (sequence is synthesized)
cccccagaaactggatgttatcaagagtggctgtagtgcccggcaggtctgtgcagggaatacccactttgctgtggtcacagtggagaaggaactgtacacttgggtgaacatgcaagg

SEQ ID NO: 232164 - DNA, 120 bp, Artificial Sequence
  ENSG00000119638_11 (sequence is synthesized)
aggcactaaactccatggtcagctgggccatggagacaaagcctcctatcgacagccaaagcatgtggaaaagttgcaaggcaaagctatccgtcaggtgtcatgtggtgatgatttcac

SEQ ID NO: 232165 - DNA, 120 bp, Artificial Sequence
  ENSG00000119638_12 (sequence is synthesized)
tgtctgtgtgactgatgagggtcagctctatgccttcggatcagattattatggctgcatgggggtggacaaagttgctggccctgaagtgctagaacccatgcagctgaacttcttcct

SEQ ID NO: 232166 - DNA, 120 bp, Artificial Sequence
  ENSG00000119638_13 (sequence is synthesized)
cagcaatccagtggagcaggtctcctgtggagataatcatgtggtggttctgacacgaaacaaggaagtctattcttggggctgtggcgaatatggacgactgggtttggattcagaaga

SEQ ID NO: 232167 - DNA, 120 bp, Artificial Sequence
  ENSG00000119638_14 (sequence is synthesized)
ggattattatacaccacaaaaggtggatgttcccaaggccttgattattgttgcagttcaatgtggctgtgatgggacatttctgttgacccagtcaggcaaagtgctggcctgtggact

SEQ ID NO: 232168 - DNA, 120 bp, Artificial Sequence
  ENSG00000119638_15 (sequence is synthesized)
caatgaattcaataagctgggtctgaatcagtgcatgtcgggaattatcaaccatgaagcataccatgaagttccctacacaacgtcctttaccttggccaaacagttgtccttttataa

SEQ ID NO: 232169 - DNA, 120 bp, Artificial Sequence
  ENSG00000119638_16 (sequence is synthesized)
gatccgtaccattgccccaggcaagactcacacagctgctattgatgagcgaggccggctgctgacctttggctgcaacaagtgtgggcagctgggcgttgggaactacaagaagcgtct

SEQ ID NO: 232170 - DNA, 120 bp, Artificial Sequence
  ENSG00000119638_17 (sequence is synthesized)
gggaatcaacctgttggggggaccccttggtgggaagcaagtgatcagggtctcctgcggtgatgagtttaccattgctgccactgatgataatcacatttttgcctggggcaatggtgg

SEQ ID NO: 232171 - DNA, 120 bp, Artificial Sequence
  ENSG00000119638_18 (sequence is synthesized)
taatggccgcctggcaatgacccccacagagagaccacatggctctgatatctgtacctcatggcctcggcctatttttggatctctgcatcatgtcccggacctgtcttgccgtggatg

SEQ ID NO: 232172 - DNA, 120 bp, Artificial Sequence
  ENSG00000119638_19 (sequence is synthesized)
gcataccattctcatcgttgagaaagtattgaattctaagaccatccgttccaatagcagtggcttatccattggaactgtgtttcagagctctagcccgggaggaggcggcgggggcgg

SEQ ID NO: 232173 - DNA, 120 bp, Artificial Sequence
  ENSG00000119638_20 (sequence is synthesized)
cggtggtgaagaagaggacagtcagcaggaatctgaaactcctgacccaagtggaggcttccgaggaacaatggaagcagaccgaggaatggaaggtttaatcagtcccacagaggccat

SEQ ID NO: 232174 - DNA, 120 bp, Artificial Sequence
  ENSG00000119638_21 (sequence is synthesized)
ggggaacagtaatggggccagcagctcctgtcctggctggcttcgaaaggagctggaaaatgcagaatttatccccatgcctgacagcccatctcctctcagtgcagcgttttcagaatc

SEQ ID NO: 232175 - DNA, 120 bp, Artificial Sequence
  ENSG00000119638_22 (sequence is synthesized)
tgagaaagataccctgccctatgaagagctgcaaggactcaaagtggcctctgaagctcctttggaacacaaaccccaagtagaagcctcgtcacctcggctgaatcctgcagtaacctg

SEQ ID NO: 232176 - DNA, 120 bp, Artificial Sequence
  ENSG00000119638_23 (sequence is synthesized)
tgctgggaagggaacaccactgactcctcctgcgtgtgcgtgcagctctctgcaggtggaggttgagagattgcagggtctggtgttaaagtgtctggctgaacaacagaagctacagca

SEQ ID NO: 232177 - DNA, 120 bp, Artificial Sequence
  ENSG00000119638_24 (sequence is synthesized)
agaaaacctccagatttttacccaactgcagaagttgaacaagaaattagaaggagggcagcaggtggggatgcattccaaaggaactcagacagcaaaggaagagatggaaatggatcc

SEQ ID NO: 232178 - DNA, 120 bp, Artificial Sequence
  ENSG00000119638_25 (sequence is synthesized)
aaagcctgacttagattcagattcctggtgcctcctgggaacagactcctgtagacccagcctctagtctcctgagcctgtagagcccccaggagactgggacccaaagaacttcacagc

SEQ ID NO: 232179 - DNA, 120 bp, Artificial Sequence
  ENSG00000119638_26 (sequence is synthesized)
acacttaccgaatgcagagagcagctttcctggctttgttcacttgcagaaaaggagcgcaaggcagaggctctgaagcactttccttgtacatttggagagtggcattgccttttagat

SEQ ID NO: 232180 - DNA, 120 bp, Artificial Sequence
  ENSG00000119638_27 (sequence is synthesized)
aggatctaggagtgattttattgttttggagaatggaagggcccccatggccctggctttgtcatcagtgactgccatagcaacagcagctctgtacctcatctgttgatcccacctttg

SEQ ID NO: 232181 - DNA, 120 bp, Artificial Sequence
  ENSG00000119638_28 (sequence is synthesized)
aagaggagacacagtgctcaccttaattgcgctggtagcagcttatatcccatgtatcattttcaccattgattggaagctgccttgggaattcagtaccaggcattacccctctgggtg

SEQ ID NO: 232182 - DNA, 120 bp, Artificial Sequence
  ENSG00000119638_29 (sequence is synthesized)
ggagagggagaagtgtaaagttggagtgggctggaatcaggtgtggcccgcccagtgtcctctgcagagtggtgaagtagtctggccctcttgggagccctgagtccaggaaaatatgtc

SEQ ID NO: 232183 - DNA, 120 bp, Artificial Sequence
  ENSG00000119638_30 (sequence is synthesized)
tgatggagtcaatctagggcttgtttcgaaaaagttcagttactctgtgcagctaaatgctttaggaggaaaggtaggcttaggttgcttttcctctgagggttgattgaaatttcttca

SEQ ID NO: 232184 - DNA, 120 bp, Artificial Sequence
  ENSG00000119638_31 (sequence is synthesized)
gtgaggaatagagaaagggcaggaccctcctcatcacacagctggtgtttcaggctgtgaccaatgcagggtgggatttcctaactgtggatgaggggatgaggtgtctctgagggatga

SEQ ID NO: 232185 - DNA, 120 bp, Artificial Sequence
  ENSG00000119638_32 (sequence is synthesized)
ggtgtctcagagaattgagtccatggggcagtcagaatagccttaagagaaaatcatgaaggagaagaggtcctcctttagctgcctctacttggtatcttagagagggcttagagggct

SEQ ID NO: 232186 - DNA, 120 bp, Artificial Sequence
  ENSG00000119638_33 (sequence is synthesized)
ctcagtcttctgcccatgaaaagacttctttgagcctctgccttcatggctcttagggttctgatcttgatatcagcagccccaaccactttctttctgaatgtctagtcagtatttttc

SEQ ID NO: 232187 - DNA, 120 bp, Artificial Sequence
  ENSG00000119638_34 (sequence is synthesized)
agaacttgcaaaaggaatttggctgagagctcacttctaatcctgtactcactgtgtctttgtagatagaaacaagctagctttaccaaagagaaatagtgtcatagaagaacaaaactt

SEQ ID NO: 232188 - DNA, 120 bp, Artificial Sequence
  ENSG00000119638_35 (sequence is synthesized)
catatagaaagttctaggcaagtatttgatggtttccttaaggatgtgagctttgtatttccacctagccttgtaaaatgttcctgtggtattttgtgtcacacatcctacctttgatga

SEQ ID NO: 232189 - DNA, 120 bp, Artificial Sequence
  ENSG00000119638_36 (sequence is synthesized)
gtctcacatcccaccttcctataaacagctaaattaattttgtttcatcttccccagaccaaaatgtttgataatcttatcaacattgtgggaggtcttgtgcaatggaaattttgccat

SEQ ID NO: 232190 - DNA, 120 bp, Artificial Sequence
  ENSG00000119638_37 (sequence is synthesized)
ttctccaaaactggtggcataaaggctgatgcttggggagaaccccattgctcgggacaggcaactctgttcaatgggatcttctttggtttgatgttcccattgttttctcagttctgg

SEQ ID NO: 232191 - DNA, 120 bp, Artificial Sequence
  ENSG00000119638_38 (sequence is synthesized)
gaagcctagtacattagtactaatgtaatcactgaaaccttttcttgaaataagggaagcagccaaactttgattaaagttgcaagttctggggacttgcgggggttgtcataaactgta

SEQ ID NO: 232192 - DNA, 120 bp, Artificial Sequence
  ENSG00000119638_39 (sequence is synthesized)
acagtgggttttggttcagcatgtaaatgcaactttgattttcttgaggaccgattgacctgtcatgtccctgtatcctcatgctcatcatctcagcaggcctgagaggctgggtcagtt

SEQ ID NO: 232193 - DNA, 120 bp, Artificial Sequence
  ENSG00000119638_40 (sequence is synthesized)
tgggtgttcatcatgaggattgcttctgccatggagctgatggacatgggcaggttgctgagaaggtggggtgaaagtgagtgccgggggtgggtgagtgccctggtcttgttcataggg

SEQ ID NO: 232194 - DNA, 120 bp, Artificial Sequence
  ENSG00000119638_41 (sequence is synthesized)
gagcctttccctagcagtggaacgctgtggtcattttctctagcatattcccttgggaagtctagatttgctattaatctggctgagaatctaagttctgtgccttagagacagtttgca

SEQ ID NO: 232195 - DNA, 120 bp, Artificial Sequence
  ENSG00000119638_42 (sequence is synthesized)
ctttcccatattgtgcctgggacagccatatgattttttttcccaccaaacaagtatgcaaacagaaaccagttcaaagggggatggagtaaaagatgaggcagtagaaatgcctttgaa

SEQ ID NO: 232196 - DNA, 120 bp, Artificial Sequence
  ENSG00000119638_43 (sequence is synthesized)
tggttttctgtagctaattctctttaaattttgtcctgctttttttctttatgcagtgctaggtgttttaagttttctagtagtattgcttttgagttacagtataacctgagttactcc

SEQ ID NO: 232197 - DNA, 120 bp, Artificial Sequence
  ENSG00000119638_44 (sequence is synthesized)
tctgctctaacattgttgcagaagaactagtttattgttagccaggttgcttgaaaggttgagagtggagtggtttggcatttctgttttaaataaacatttaagctcttaatcagtact

SEQ ID NO: 232198 - DNA, 120 bp, Artificial Sequence
  ENSG00000119638_45 (sequence is synthesized)
gtgcttcagtaagcctgtgcatggaccttagtctctggggataaaacatccagattctaagcctccgtgaatctttgattctgtgagtctttatataaataatgttcttggaacagaaac

SEQ ID NO: 232199 - DNA, 120 bp, Artificial Sequence
  ENSG00000119638_46 (sequence is synthesized)
aatgcaagggacatctgcacagaaatattctttgcttctctccagtttcttattcttgccagcagaatcattgctgctgctacagcttttttcccaaaaatgtctaaaagtgccgaaagt

SEQ ID NO: 232200 - DNA, 120 bp, Artificial Sequence
  ENSG00000119638_47 (sequence is synthesized)
gcagagggagggaaaaaatgagccactaaaagaaggatgatcctttcttgtacctacctcctcagtctcagtgggggcctttccaagtgataatgccagtttatggtttgtaaaactttt

SEQ ID NO: 232201 - DNA, 120 bp, Artificial Sequence
  ENSG00000119638_48 (sequence is synthesized)
ccttcaaagagattgaactgaatttggtctccctggcatagcacagccaagttacaacttctcttggctgagcatttcactgaagtttaaagcaaaagtacactaaaaaatttcatttca

SEQ ID NO: 232202 - DNA, 120 bp, Artificial Sequence
  ENSG00000119638_49 (sequence is synthesized)
cttgccatatgttcacaaacattcataatagaacaattcaggggcaagaatacattttaaataaattcattcacatgaaatccctaaacctccaaaaaagtattcatgatggtcagggca

SEQ ID NO: 232203 - DNA, 120 bp, Artificial Sequence
  ENSG00000119638_50 (sequence is synthesized)
gagtgggctataatcaggactataaaacatgttcctaactgctgcaaagccaaaaatcatttattgtttcaatgattaactgtggaaataaacacgctgatcattaaacctcacagaatg

SEQ ID NO: 232204 - DNA, 120 bp, Artificial Sequence
  ENSG00000119638_51 (sequence is synthesized)
atgaacattagggagaaaaactccactatgtcacatctctgttaccacctgtgtagctgtggagagtgataaattgataatgaaagcaaacattggccagaaggtgctgtgctgcattac

SEQ ID NO: 232205 - DNA, 68 bp, Artificial Sequence
  ENSG00000119638_52 (sequence is synthesized)
tgaaagcaaacattggccagaaggtgctgtgctgcattacatacattgctgttaagaaatactgtctc

SEQ ID NO: 232206 - DNA, 71 bp, Artificial Sequence
  ENSG00000119638_53 (sequence is synthesized)
ttgcagtgagctgagattgcgccacaaaaaatactgtcttggcaggacaggcgcggtggctcacgcctgta

SEQ ID NO: 232207 - DNA, 120 bp, Artificial Sequence
  ENSG00000119638_54 (sequence is synthesized)
ccgtctcaaaaaaaaaaaaaaagaaatactgtctcggcacatctgcatacatttttaatgaaatgagtttccacatgaggagtttccccgtgaaatttctcctatggtgtaaccttatga

SEQ ID NO: 232208 - DNA, 120 bp, Artificial Sequence
  ENSG00000119638_55 (sequence is synthesized)
ccttatgaactttataatgtttacttgcactaaacatttcttggataaagttgtataaaatacagacattaagaagcagcatgcatttactgtcatcgtctgagctatccaggaagaaat

SEQ ID NO: 232209 - DNA, 120 bp, Artificial Sequence
  ENSG00000119638_56 (sequence is synthesized)
cgtctgagctatccaggaagaaattcagatttttttaaaaaaaggttcttatctcttcccagagaccagatcaagataaatttaaaagatgaaagatatttcttttttttttttcttttt

SEQ ID NO: 232210 - DNA, 120 bp, Artificial Sequence
  ENSG00000119638_57 (sequence is synthesized)
ggcatgagccaccatgctcggccttgaaagatatttctaatataaccaaggcctaaacatgtagagattaaagggaacacttaaggcattgactattgttttatttctttagcaaaatga

SEQ ID NO: 232211 - DNA, 120 bp, Artificial Sequence
  ENSG00000119638_58 (sequence is synthesized)
gagcaaacaactgcttcctttttagaaagcactccccacatataacaacaatttgttctctctggagggcccggatctatgaccttactaacatccagcgatcccaaatccaagtgcctg

SEQ ID NO: 232212 - DNA, 120 bp, Artificial Sequence
  ENSG00000119638_59 (sequence is synthesized)
tggtaccaggcagataaggtaaagaagtgaagcaggccaagtgagactgcagtggtctggtgctaccattcccatctggaggagcatctgattctaaaccccacccaatttgtgccatgc

SEQ ID NO: 232213 - DNA, 120 bp, Artificial Sequence
  ENSG00000119638_60 (sequence is synthesized)
gggttgctggcccagtgtttccagaacttccagtttttcaagagatgttccatatcccagtttttaaatgtcagatcatattatgaatgctaggccagcgaaataaaacatctgtggagc

SEQ ID NO: 232214 - DNA, 120 bp, Artificial Sequence
  ENSG00000119638_61 (sequence is synthesized)
aaagcaatccacatgttgccattttgtgaccttggccacagcttactcttgccatctattgcaatgtactggtttacattcccacttaaagtgtacatttcattgaacttgcctagggaa

SEQ ID NO: 232215 - DNA, 120 bp, Artificial Sequence
  ENSG00000119638_62 (sequence is synthesized)
tgtacctattaggttaaatatccattatctctgtgtgaggtttccttaaggggctaaccataaagctttattatgtgatacctcctttcctttggaacaattaaaaagagtgcaaagaaa

SEQ ID NO: 232216 - DNA, 120 bp, Artificial Sequence
  ENSG00000119638_63 (sequence is synthesized)
gcctactcaacctgcaaggaagagatgtcaagtcatgttgaatcataacttctggttgcagttttctttgttttgtttgtttatgtgtgtgtgtatttacttaaatggagctttttgttt

SEQ ID NO: 232217 - DNA, 120 bp, Artificial Sequence
  ENSG00000119638_64 (sequence is synthesized)
ctccacatcatgattctctgtgggctttctttcctggttctattactgcgtactgatggtggtgtggtacctatttcagattgtttcagcagtgagctgcatccataaagctggaatcct

SEQ ID NO: 232218 - DNA, 120 bp, Artificial Sequence
  ENSG00000119638_65 (sequence is synthesized)
actggacgacctctgggcctccaagttgtatgagtccggaccggggaggcagagaagggtcaatagacccgagaggccgtaccgtcagtgatgcccttgttcccgtgggagcccttcggt

SEQ ID NO: 232219 - DNA, 120 bp, Artificial Sequence
  ENSG00000119638_66 (sequence is synthesized)
ctctgtccacttcttcacaggtatacaacctgacttcaaagttgtatgcatctaaacccatcatgcagcccctaaatgagaagtgttaattcagtaaatctttttttttttttttttttt

SEQ ID NO: 232220 - DNA, 62 bp, Artificial Sequence
  ENSG00000119638_67 (sequence is synthesized)
ttttttttttttctttgcaaccaccacctcccgagttcgagtgattctcctgcctcagcctc

SEQ ID NO: 232221 - DNA, 120 bp, Artificial Sequence
  ENSG00000119638_68 (sequence is synthesized)
caggtgtgagccaccgcacctggcaaaagagaatcttacagaacctattcactgggaaggaagccctcattataatgattttcattcttatgtgtgtttcaggacgactgggtttggatt

SEQ ID NO: 232222 - DNA, 120 bp, Artificial Sequence
  ENSG00000119638_69 (sequence is synthesized)
gagggcagcaggtgagagcattaaaagaataatccaatttctaagcctgttttgaagaatcacagaaacaaaacacaaagtactgaaatagacttgttcctttgcaggtccttacttttt

SEQ ID NO: 232223 - DNA, 120 bp, Artificial Sequence
  ENSG00000119638_70 (sequence is synthesized)
tacaggtgtgagccaccacgcctggccgatccttagtttttaatgataccatttttgtaattataatcccagaagccttgggccttgttcaggcacctagattgaatcattttcatcact

SEQ ID NO: 232224 - DNA, 120 bp, Artificial Sequence
  ENSG00000119638_71 (sequence is synthesized)
aatcattttcatcacttgcattgctttttcttagtgtatgttttttcttttacaatacttaattacatacctctgaaaatagacattctcctgaacaaccacaatactataaccacacct

SEQ ID NO: 232225 - DNA, 120 bp, Artificial Sequence
  ENSG00000119638_72 (sequence is synthesized)
tcacattgttggaaacagaaatgtcctgaagaagccatttctgtaagtcttgtaatggtcaaggatgccatgcctagtggtgggaacagaacattgtcatttcctggagctttgctatct

SEQ ID NO: 232226 - DNA, 120 bp, Artificial Sequence
  ENSG00000119638_73 (sequence is synthesized)
gaacattgtcatttcctggagctttgctatctgccatctcttgattattttttaatataagtttgggctctgcctgcccccttagaattgatttttttggttgtttttttttgtcttttt

SEQ ID NO: 232227 - DNA, 71 bp, Artificial Sequence
  ENSG00000119638_74 (sequence is synthesized)
gtcttttttttgagttggagtttcactcttttcgcccaggctggagtgctattctcttgcctcagcctccc

SEQ ID NO: 232228 - DNA, 120 bp, Artificial Sequence
  ENSG00000119638_75 (sequence is synthesized)
tcctgatatacaaatacaactatacaaaattacaaaacatagtttgtatgaaaaccaaaaatttagtccctaacatttgacttgcactgttgccattgcacttcatgcagcttataggca

SEQ ID NO: 232229 - DNA, 120 bp, Artificial Sequence
  ENSG00000119638_76 (sequence is synthesized)
cctttccagggtaagtagggttgtcaaatggtaaatctgtcttgctgcatagcaaagctgtctatttctgtgctgtatatctgtcagtgtttcagagctctagcccgggaggaggcggcg

SEQ ID NO: 232230 - DNA, 120 bp, Artificial Sequence
  ENSG00000119638_77 (sequence is synthesized)
aggtcaaggctgcagtgatccgtgatcacaccactgcacttcggcgtaagcaacagagcaagaccctgtctcaaaaacacacacacacacaaggtaagattggcagctatagcagggaga

SEQ ID NO: 232231 - DNA, 120 bp, Artificial Sequence
  ENSG00000119638_78 (sequence is synthesized)
agattgttttgcccaggactttttccattttaaaactaagagttctgcatcccaggaaaccccgcagtcctggacaaacctggatagttggtcaccctacctgcagtaaatataaaggtg

SEQ ID NO: 232232 - DNA, 120 bp, Artificial Sequence
  ENSG00000119640_0 (sequence is synthesized)
gcgcgccttggtgagccgttggcgtggtggtcccggagtgatcctggcagccggtggggaagacaaggagggtttgagcatggcagaaggaaacaccctgatatcagtggattatgaaat

SEQ ID NO: 232233 - DNA, 120 bp, Artificial Sequence
  ENSG00000119640_1 (sequence is synthesized)
ttttgggaaggtgcaaggggtgtttttccgtaagcatactcaggctgagggtaaaaagctgggattggtaggctgggtccagaacactgaccggggcacagtgcaaggacaattgcaagg

SEQ ID NO: 232234 - DNA, 120 bp, Artificial Sequence
  ENSG00000119640_2 (sequence is synthesized)
ttgaagttggattactcagacttccaaattgtaaaataatggcctgaatttaagttttctaagataaactcagtggtttggtttttattattaatagagatagaactattgtgtgttaat

SEQ ID NO: 232235 - DNA, 120 bp, Artificial Sequence
  ENSG00000119640_3 (sequence is synthesized)
attagcattagtcaataagttattttaatgtcagatttttgaatgttattatatattacctgtatgatggaaggattaccactgtacacaaatctaatcaataaaaacgttagaaccttc

SEQ ID NO: 232236 - DNA, 120 bp, Artificial Sequence
  ENSG00000119640_4 (sequence is synthesized)
gggtgtttttccgtaagcatactcaggaaatgactgttgaaaacagaattgctgaaactcacagcaagagctgtgttccagttagctttgctaccagttatgcaggtattaatgaattta

SEQ ID NO: 232237 - DNA, 120 bp, Artificial Sequence
  ENSG00000119640_5 (sequence is synthesized)
aactaaaccacattaaaaaaataaaaaggataactggaaaatcccaaaatatttggaaaccatatagcacacttacttctaaaattgtggtagaatacatataacatagaaattattgtt

SEQ ID NO: 232238 - DNA, 120 bp, Artificial Sequence
  ENSG00000119640_6 (sequence is synthesized)
ctaaccatttttaaatgtacaattcagtggtcttaagcacattcacattgttctgtttatctacagaacgcttttcatcttgcaaaactgaaactctgtattcattaaacactaactccc

SEQ ID NO: 232239 - DNA, 120 bp, Artificial Sequence
  ENSG00000119640_7 (sequence is synthesized)
cattttctccttcccccatgcccctgacaatcataaatctacattctattaattcaactgctctagttacctcatataagtggaattttacagtatttgtccttttgtggctggcttatt

SEQ ID NO: 232240 - DNA, 120 bp, Artificial Sequence
  ENSG00000119640_8 (sequence is synthesized)
gggaaggtgcaaggggtgtttttccgtaagcatactcaggtatgtggcctgcaggctttggggtggtaacctaggttgtgggcataggaacaagggacgtgttcttgacaaatgtgaact

SEQ ID NO: 232241 - DNA, 120 bp, Artificial Sequence
  ENSG00000119640_9 (sequence is synthesized)
cgctggctatttggtagctgcatggcaaagaggtagtttgtagagcaatgagtatgaaaatgctgtgcaatcggtaaaacatggtgtaaatggaagatcaccctgctgttattattagtc

SEQ ID NO: 232242 - DNA, 120 bp, Artificial Sequence
  ENSG00000119640_10 (sequence is synthesized)
agtggtgcctgagcatctagatacacatattaatgagcttctctcttccaagggaaatagagggcttccccagtgctcgccgttgtggcatcatcaaaccaagtcaggtttcttatagaa

SEQ ID NO: 232243 - DNA, 120 bp, Artificial Sequence
  ENSG00000119640_11 (sequence is synthesized)
aggctaacattgattgaagagctggcatttagatgacctgatgtcatgtatataacatatataaatgcttcctctgcagctgctgcactttcttcagacctctttctccaagcttccctc

SEQ ID NO: 232244 - DNA, 120 bp, Artificial Sequence
  ENSG00000119640_12 (sequence is synthesized)
gtccggccaactctgcagctcggtccagccctgcccttggggagccggggaggggcgggagaggcttttctggagctccttcaaagaagaacttgtacttttctgagaacgacgctccca

SEQ ID NO: 232245 - DNA, 120 bp, Artificial Sequence
  ENSG00000119640_13 (sequence is synthesized)
gaccttggggtgtgcccttgtctggcaaagggcggaggccctggctgtgcctccgcgtgcttccgccgcaggatgccggcgtccgcccgcctggcgggagcggggctgctgctggccttt

SEQ ID NO: 232246 - DNA, 120 bp, Artificial Sequence
  ENSG00000119650_0 (sequence is synthesized)
ggtttccaggaagtgacgtcaggcggccgcggagatggaggatttgctcgacttggacgaggagcttcgctacagcttggctacctccagggccaagatgggtcgccgagctcaacagga

SEQ ID NO: 232247 - DNA, 120 bp, Artificial Sequence
  ENSG00000119650_1 (sequence is synthesized)
gtcagcgcaggccgagaatcacctcaatggcaagaattcctctttgactctgactggagagacttcctctgctaaattacctcgctgccgacagggaggctgggcaggtgattccgtgaa

SEQ ID NO: 232248 - DNA, 120 bp, Artificial Sequence
  ENSG00000119650_2 (sequence is synthesized)
ggcttcgaagtttaggaggaaggcttctgaagaaatagaagatttccgcctcagaccacagagcctgaatggatcagattatggaggagatattcctatcattccggatctggaggaagt

SEQ ID NO: 232249 - DNA, 120 bp, Artificial Sequence
  ENSG00000119650_3 (sequence is synthesized)
cactggatggggagatcgacctgaaactcctcaccaaagtgctcgcgccggagcacgaagtccgggaggatgatgtcggctgggactgggaccatctgttcactgaggtgtcctcagagg

SEQ ID NO: 232250 - DNA, 120 bp, Artificial Sequence
  ENSG00000119650_4 (sequence is synthesized)
tcctcactgagtgggacccactgcagacggagaaggaggaccctgcggggcaggccaggcacacctgagcccgtcacccatgctctagacatgaagaaatgcaatgagcttaaagctaaa

SEQ ID NO: 232251 - DNA, 120 bp, Artificial Sequence
  ENSG00000119650_5 (sequence is synthesized)
gaagcttgtaagcagctccgaatttttacctggaatattttgtaataaaaatatttatattcagtcaaccacattggataattcaattgcaataaattgcttattctgtgccatctcctc

SEQ ID NO: 232252 - DNA, 120 bp, Artificial Sequence
  ENSG00000119650_6 (sequence is synthesized)
aacagctggatctgaacgcatgctatcacaaaacgcatcacagagatttggggctggcttcattggaagaggcagatattcctatcattccggatctggaggaagtacaggaagaagact

SEQ ID NO: 232253 - DNA, 120 bp, Artificial Sequence
  ENSG00000119650_7 (sequence is synthesized)
cggagatggaggatttgctcgacttggacgaggagcttcgctacagcttggctacctccagccccgagtgcgaacttccccagaacagatcgatcacagggtgataggggagccccggcc

SEQ ID NO: 232254 - DNA, 120 bp, Artificial Sequence
  ENSG00000119650_8 (sequence is synthesized)
gaaatagaagagtacgtttccagtattcttattcttatggtatcctatgttgatcttggtcaacagtgcagtcttggtggtcatgatctgttccacctatgttgaacactgtgttagaag

SEQ ID NO: 232255 - DNA, 120 bp, Artificial Sequence
  ENSG00000119650_9 (sequence is synthesized)
tagaattattgatgcctgctgaatccaaggtttggttaatcccgcttcctcaactgaaggtctggaccctggcattgatgcccatgtcctatctcccactgtgtggttttagaattatat

SEQ ID NO: 232256 - DNA, 120 bp, Artificial Sequence
  ENSG00000119650_10 (sequence is synthesized)
gtccaggtatcagggtactggcccatgccttctgcattattgatatagatgggcagaagcaataccagcttctaagccttgccttctcataagacttatatcagaaaagaaagaagtttt

SEQ ID NO: 232257 - DNA, 120 bp, Artificial Sequence
  ENSG00000119650_11 (sequence is synthesized)
ctagataaaggtgctgtgaaggtagggccacccagtttcctactcccaggggcggaagctgcattcatgtcatagcctctgtgatgctgtcctctggaatagtgcatcgcacagcctgtg

SEQ ID NO: 232258 - DNA, 120 bp, Artificial Sequence
  ENSG00000119650_12 (sequence is synthesized)
caaccacacacggcacacccagtggcctaattaggtttgactaagttgacagagaaaaacaggttcagggacattttcatctaggagaaagaatggatacaataaacatttgggatgttc

SEQ ID NO: 232259 - DNA, 120 bp, Artificial Sequence
  ENSG00000119650_13 (sequence is synthesized)
agacttcctctgctaaattacctcgctgccgacagggaggctgggcaggtgattccgtgaaggcttcgaaccgcaaagaacccggaatcagtatggcatgaccggagtcctgggcaacgt

SEQ ID NO: 232260 - DNA, 120 bp, Artificial Sequence
  ENSG00000119650_14 (sequence is synthesized)
gattggggaggcaaagaacacgtgaattaatacactccagatatcatctatagtggaccttgatgtcaatctggatctttctggtgttgggctccatccagggttcccattttgttattc

SEQ ID NO: 232261 - DNA, 120 bp, Artificial Sequence
  ENSG00000119650_15 (sequence is synthesized)
ccattctggtcatcccctgctgtatacaaggttctggggacggtggcccggcagcactcctggaacaggtcctgcctggggttcccgcctctcgctctctctttccttcagcatccagat

SEQ ID NO: 232262 - DNA, 120 bp, Artificial Sequence
  ENSG00000119650_16 (sequence is synthesized)
gtgtgaagggcacagaaaagcagttccaaagtctgaagcctgaactgcgaggcgaggacatccctttttgctcgttgcaagtcgcaagtgctgacagctaacaacaccaaataagaccca

SEQ ID NO: 232263 - DNA, 120 bp, Artificial Sequence
  ENSG00000119650_17 (sequence is synthesized)
gggtctcagtcctaagaaagcactctataaatcagtcagttaattgctgaaagaaaagagggcactgaatcatctgtatctatttgaattttaagccactcgctcaacctgcacttacac

SEQ ID NO: 232264 - DNA, 120 bp, Artificial Sequence
  ENSG00000119650_18 (sequence is synthesized)
ggcactacagcatcttcagttctctcatgctggttgtggggcttgtctctaaagaggactgcagacaaataaagcacttgagatatactaatttgcctccacttttgaaaccttcctcaa

SEQ ID NO: 232265 - DNA, 120 bp, Artificial Sequence
  ENSG00000119650_19 (sequence is synthesized)
gatactacctggtgcatgagactagtgggctctcaaaaaccttgtcttttctttttttttttcaggtttaggaggaaggcttctgaagaaatagaagatttccgcctcagaccacagagc

SEQ ID NO: 232266 - DNA, 120 bp, Artificial Sequence
  ENSG00000119650_20 (sequence is synthesized)
gattcaggcggagaaggagtgggcactcctactgaaagctgttcacttctcgggaggtttcaaacagttgcctgctggggttctggggcggggcctcccttcccgtgggtgctctgggcc

SEQ ID NO: 232267 - DNA, 120 bp, Artificial Sequence
  ENSG00000119650_21 (sequence is synthesized)
ctttgtgaccttagtgacgcagcactgccacctgcatcataggcttccaggcagctgcagcggagggaggaggcggcgggagggataaggagactcattcttcactcgcatcagggtttg

SEQ ID NO: 232268 - DNA, 120 bp, Artificial Sequence
  ENSG00000119650_22 (sequence is synthesized)
gtggctgttgtgacaatattctcctttctcccctcttcctgcagtccatgccttgagctccaaaagcttctacaggttcccagagcctcatttctgattctcatgggaaggggccagcca

SEQ ID NO: 232269 - DNA, 120 bp, Artificial Sequence
  ENSG00000119650_23 (sequence is synthesized)
gcagccctgagaattccatggaagccctctcttacagagcctgggcctcccttctccttatccttttagatacgttgcagccatctccaccgctgcaagtattataaccgcctggttcca

SEQ ID NO: 232270 - DNA, 120 bp, Artificial Sequence
  ENSG00000119650_24 (sequence is synthesized)
agatgtgctgagatcaggagcagagtcccacccttctcctaaacagagctgtcttttgtttttgtttttctcttttcctccctgagacttcttatctgaggacagagccccttcgctgcc

SEQ ID NO: 232271 - DNA, 120 bp, Artificial Sequence
  ENSG00000119650_25 (sequence is synthesized)
tgcttctcttggatgcggctttgggttaggctggcagcagctaactaaggcccactccccggccatagggagcgctgagtgcttctgttatcctgcctggaaagcccttcattaaaattc

SEQ ID NO: 232272 - DNA, 120 bp, Artificial Sequence
  ENSG00000119650_26 (sequence is synthesized)
atttgctcgacttggacgaggagcttcgctacagcttggctacctccgtgaggaccaattcgggggccttgggggccaggatttggcgggtggggaggagcgaccccgccggccccgact

SEQ ID NO: 232273 - DNA, 120 bp, Artificial Sequence
  ENSG00000119650_27 (sequence is synthesized)
tctctgaggcgactcagggcggcaggcctcgcgccgcgccgggtgaggcccagaaggaggcagcctcaccgccccgcccccaggccactgtgggctccgccgctgctggcctggggtttg

SEQ ID NO: 232274 - DNA, 120 bp, Artificial Sequence
  ENSG00000119650_28 (sequence is synthesized)
tttcagagggtcctccgcggaagggcagctgaatggactccagagcagccttaaccctgcagcctttgtgcccatcaccagctctacagagggccaagatgggtcgccgagctcaacagg

SEQ ID NO: 232275 - DNA, 120 bp, Artificial Sequence
  ENSG00000119650_29 (sequence is synthesized)
gaagtgagtaccagcagctcataagagtatgggtgggggtgcacacggttggggggactttgctcctgtgttgttttattttttacaatagctttattgagaaaaaatttatataccata

SEQ ID NO: 232276 - DNA, 120 bp, Artificial Sequence
  ENSG00000119650_30 (sequence is synthesized)
caattcacccacttaaaatgcacaatttaatcattcttaatatattcacagagttgtgcaaccattaacacaatcaattttacaacattttcatcacctccccaccaaaagaaaccctgt

SEQ ID NO: 232277 - DNA, 120 bp, Artificial Sequence
  ENSG00000119650_31 (sequence is synthesized)
gaggtaagaggcccttggaggaagtcaaaaggtcttctagagaggccccagaacatttcctgggctacagctaaggcactgttggctgcagcatcactgaagacatttgcagtggtcttc

SEQ ID NO: 232278 - DNA, 120 bp, Artificial Sequence
  ENSG00000119650_32 (sequence is synthesized)
tgacgcatgctgatgcacatcttcatgccttgctgaatgctgccacctctacctggagtatctctcccttctttatctgataaccctgcttatccttcaaaaggtcagccaaagcatcac

SEQ ID NO: 232279 - DNA, 120 bp, Artificial Sequence
  ENSG00000119655_0 (sequence is synthesized)
ggtccgggcgggtcaggcctctgaggggatggcatgggcggagactgcaggcttctgggcctgagagggctggagctggctttccggagccgggggcggggcgcgggcgggcctcagctg

SEQ ID NO: 232280 - DNA, 120 bp, Artificial Sequence
  ENSG00000119655_1 (sequence is synthesized)
tggttactggtgacaggtcgcctgactgggctcctccccgggcccgccccgacaggtttgtcttgtgaccgcgggcggccgctgcttctttcccgagcttggaacttcgttatccgcgat

SEQ ID NO: 232281 - DNA, 120 bp, Artificial Sequence
  ENSG00000119655_2 (sequence is synthesized)
gcgtttcctggcagctacattcctgctcctggcgctcagcaccgctgcccaggccgaaccggtgcagttcaaggactgcggttctgtggatggagttataaaggaagtgaatgtgagccc

SEQ ID NO: 232282 - DNA, 120 bp, Artificial Sequence
  ENSG00000119655_3 (sequence is synthesized)
atgccccacccaaccctgccagctgagcaaaggacagtcttacagcgtcaatgtcaccttcaccagcaatattcagtctaaaagcagcaaggccgtggtgcatggcatcctgatgggcgt

SEQ ID NO: 232283 - DNA, 120 bp, Artificial Sequence
  ENSG00000119655_4 (sequence is synthesized)
ctatagctacctgaataaactaccagtgaaaagcgaatatccctctataaaactggtggtggagtggcaacttcaggatgacaaaaaccaaagtctcttctgctgggaaatcccagtaca

SEQ ID NO: 232284 - DNA, 120 bp, Artificial Sequence
  ENSG00000119655_5 (sequence is synthesized)
gatcgtttctcatctctaagtgcctcattgagttcggtgcatctggccaatgagtctgctgagactcttgacagcacctccagctctgctgcttcaacaacagtgacttgctctccaatg

SEQ ID NO: 232285 - DNA, 120 bp, Artificial Sequence
  ENSG00000119655_6 (sequence is synthesized)
gtatccagtgattcgttgaagaggaggtgctctgtagcagaaactgagctccgggtggctggttctcagtggttgtctcatgtctctttttctgtcttaggtggtttcattaaatgcagc

SEQ ID NO: 232286 - DNA, 120 bp, Artificial Sequence
  ENSG00000119655_7 (sequence is synthesized)
acttggttagcagatgtttaattttttttttaacaacattaacttgtggcctctttctacacctggaaatttactcttgaataaataaaaactcgtttgtcttgtcttctgcatgtgggc

SEQ ID NO: 232287 - DNA, 120 bp, Artificial Sequence
  ENSG00000119655_8 (sequence is synthesized)
cacagagcacaggtgtttgcagttgcaaatggagactaagagcctgagattctggagcagacgtggcatgtcagtgtggctcccctcacctgcaggggcttggagaaggacggctccctt

SEQ ID NO: 232288 - DNA, 120 bp, Artificial Sequence
  ENSG00000119655_9 (sequence is synthesized)
ctagcaggccgtcctccacaaatcatatgtcccagataagcagccagcaggcagaaagatcagcttagctctgactgccagtgggtaaggccaagaaggagcctggcagacaaatggatg

SEQ ID NO: 232289 - DNA, 120 bp, Artificial Sequence
  ENSG00000119655_10 (sequence is synthesized)
gctgctggccttgaacatggcagagctgctgggtgtgccagatcaaaaagcagagagcaggccagcagcagcagactgttctcagcgctggagaaatgcattgctctgcccactacaccc

SEQ ID NO: 232290 - DNA, 120 bp, Artificial Sequence
  ENSG00000119655_11 (sequence is synthesized)
cgccgctccgcgtccggcctcctacctggacgcaactgtctgtgaggcggatctgcccttcgccggcctcggggctggaggacgacgcctcccgacgcgcctggggtcccagggaggccg

SEQ ID NO: 232291 - DNA, 120 bp, Artificial Sequence
  ENSG00000119655_12 (sequence is synthesized)
tttttcctcctttttgtccagtaagaccatatctattttatataaaatggccttgttttgctttatttgacacaatcttataccaccaagcatgctcgaaagaagcagtgaaagtaaaaa

SEQ ID NO: 232292 - DNA, 120 bp, Artificial Sequence
  ENSG00000119655_13 (sequence is synthesized)
tcacctagttgaataataacgcctgaaaggttgaaggaactgaatttggtggggagggcaggtaggggttagggattacaggttaggatgaggcatggtgatcttttgggaacactgctg

SEQ ID NO: 232293 - DNA, 120 bp, Artificial Sequence
  ENSG00000119655_14 (sequence is synthesized)
tgaagaaagcctagaagcttaaaaatgaaatgtgaagttgtagcaagtaatggctaaattaattaaatcttggagtttcctatcttaaagtacaagtataatcatgggcatatattttgc

SEQ ID NO: 232294 - DNA, 120 bp, Artificial Sequence
  ENSG00000119655_15 (sequence is synthesized)
cacctattttgagtcagtatactagcagtcagctcttaggtggtacagggattacaaccccattcacaattgagttgaataacatggaccttaggtcatccattgttagggcaaaaggaa

SEQ ID NO: 232295 - DNA, 120 bp, Artificial Sequence
  ENSG00000119655_16 (sequence is synthesized)
ggaacattcatacaaagtgcttgtgagcaagtgattgatttgatccagttcttttcatcccactaatttcactagacccttggatttctttggtctgtgagtttcccaggaaaaccacca

SEQ ID NO: 232296 - DNA, 120 bp, Artificial Sequence
  ENSG00000119655_17 (sequence is synthesized)
gggaagaaagtggaggagaaatcagactgaaactaaatcagtgccataagataaaaggaatttcaagactgctgttttatgcctctcaacctctaaaagcatctgagaccctatttcctg

SEQ ID NO: 232297 - DNA, 120 bp, Artificial Sequence
  ENSG00000119655_18 (sequence is synthesized)
agagctcagaactgttgcctttgtaatatcctttgttaaaaaaaaaaaaggttgaaggaaagaagagagagtgagactgtagagattgatttaactgtcttcattggtttttttctgtcg

SEQ ID NO: 232298 - DNA, 120 bp, Artificial Sequence
  ENSG00000119655_19 (sequence is synthesized)
gagtaaggaaggtccagccagacaggacctgaaggaggttgcttaggaatgtctgataacttgccctagggttattgccctgacagtggaggaaaggttccaaaccacttccactgagct

SEQ ID NO: 232299 - DNA, 120 bp, Artificial Sequence
  ENSG00000119655_20 (sequence is synthesized)
gggacattacatccacaggtttctcatctctaagtgcctcattgagttcggtgcatctggccaatgagtctgctgagactcttgacagcacctccagctctgctgcttcaacaacagtga

SEQ ID NO: 232300 - DNA, 120 bp, Artificial Sequence
  ENSG00000119661_0 (sequence is synthesized)
gcactgaccccgcgggccctagcaaccagagcagtgacagtagcaaccgccggaatggcgaaagcaacaacaatcaaagaagccttagcgagatgggaagagaaaactggccagaggcca

SEQ ID NO: 232301 - DNA, 120 bp, Artificial Sequence
  ENSG00000119661_1 (sequence is synthesized)
tctgaagccaaagagataaaactttatgcccagattccccctatagagaagatggatgcatccttgtccatgcttgctaattgcgagaagctttcactgtctacaaactgcattgaaaaa

SEQ ID NO: 232302 - DNA, 120 bp, Artificial Sequence
  ENSG00000119661_2 (sequence is synthesized)
attgccaacctgaatggcttaaaaaacttgaggatattatctttaggaagaaacaacataaagaacttaaatggactggaggcagtaggggacacattagaagaactgtggatctcctac

SEQ ID NO: 232303 - DNA, 120 bp, Artificial Sequence
  ENSG00000119661_3 (sequence is synthesized)
aattttattgagaagttgaaagggatccacataatgaagaaattgaagattctctacatgtctaataacctggtaaaagactgggctgagtttgtgaagctggcagaactgccatgcctc

SEQ ID NO: 232304 - DNA, 120 bp, Artificial Sequence
  ENSG00000119661_4 (sequence is synthesized)
gaagacctggtgtttgtaggcaatcccttggaagagaaacattctgctgagaataactggattgaagaagcaaccaagagagtgcccaaactgaaaaagctggatggtactccagtaatt

SEQ ID NO: 232305 - DNA, 120 bp, Artificial Sequence
  ENSG00000119661_5 (sequence is synthesized)
aaaggggatgaggaagaagacaactaatgccacgctttccactgtgtgttaacttatttaaatgtcataagaacaatagataaattttatataattgtctattttaaagattctgtatgg

SEQ ID NO: 232306 - DNA, 120 bp, Artificial Sequence
  ENSG00000119661_6 (sequence is synthesized)
gacaaaagtttcttaagataaaacagatcactcattctcatctttttttttcctttaacttattcagtgtttctccccaaaactggtaatgccaaccttatatatcctatttctcttttt

SEQ ID NO: 232307 - DNA, 120 bp, Artificial Sequence
  ENSG00000119661_7 (sequence is synthesized)
agaaaccacaaattttcgatttttgtcttcagtctcagttacgtactgtgtagccccatctactaaaacaaaacctttgtagaccagtcatttttaataacaaaggaacaaatgtttttt

SEQ ID NO: 232308 - DNA, 120 bp, Artificial Sequence
  ENSG00000119661_8 (sequence is synthesized)
tcagtttgttcattttttttaggttagacattttaaaagatgtacatttgaaaattcagaacatttttcctgaaggtctgtctctgtacaattcagaagcacatgcctttagctcagaag

SEQ ID NO: 232309 - DNA, 120 bp, Artificial Sequence
  ENSG00000119661_9 (sequence is synthesized)
gcagcatggtgatgggaagagttcctcttagaaatacagcaggtccggaaccaagactccaaagttccattggaaaagatatggtgaaaaaaggaaaaagtagtatctcagagaccttct

SEQ ID NO: 232310 - DNA, 120 bp, Artificial Sequence
  ENSG00000119661_10 (sequence is synthesized)
agtctatattatacttatttgtttttccaaaaatgtgcacattgtcaactggaatttaggttgtttttatatgcatggccacttgagtcattgtgtacagtcattctgtgatctcagtta

SEQ ID NO: 232311 - DNA, 120 bp, Artificial Sequence
  ENSG00000119661_11 (sequence is synthesized)
gtggttaaaatgactgtcatgatcatttctttgactgataatgtggcaatgttactcatgtggacctcgccttaagcacacattttggttttatagttccttatgtgtttaaagcattag

SEQ ID NO: 232312 - DNA, 120 bp, Artificial Sequence
  ENSG00000119661_12 (sequence is synthesized)
ttatatttgaattcctagactaaatgctggccattgatgtatgtcaaaatttaccctaattatttggtctggtgaccctcattgttgggaaaagtgactaccatggttataagtaagggt

SEQ ID NO: 232313 - DNA, 120 bp, Artificial Sequence
  ENSG00000119661_13 (sequence is synthesized)
ataatgaaacttagtatttcaaaatatattttttgagaagttctaagttaaacagctcttaaaatgtattatgtacgtggttgtggagggaagggagatgtttcattatgagatcccagg

SEQ ID NO: 232314 - DNA, 120 bp, Artificial Sequence
  ENSG00000119661_14 (sequence is synthesized)
caaatggcaatatgtttgaggattgtctcctacataaagcagtgtaggtgatttaacctcaaaattgcaaagcaatagttagatgcagaggttagaatttatcatgtaaacaaaaaatcc

SEQ ID NO: 232315 - DNA, 120 bp, Artificial Sequence
  ENSG00000119661_15 (sequence is synthesized)
ttcaggaaaatgtaagacattgtagtcagtaagcagatgaggtcataggaggccatggctggatcactattagattgcagaaaagaagtcaggggccctctgccaaattgtgcctaaagt

SEQ ID NO: 232316 - DNA, 120 bp, Artificial Sequence
  ENSG00000119661_16 (sequence is synthesized)
ccctcagagactgttgattctggtttccccatctacttgtgtgattttacttgcataaaatcacagtgaaagagggaagaatcatctttaaaaagtgattgcataagtagtcctgggttt

SEQ ID NO: 232317 - DNA, 120 bp, Artificial Sequence
  ENSG00000119661_17 (sequence is synthesized)
cagaagatttcagctatcatttacataggaattacttgatttttctaagttactctgatcaaaagggaccactgctttgacaatcaactctaaatacaaacaagaggccaggcgtggtgg

SEQ ID NO: 232318 - DNA, 120 bp, Artificial Sequence
  ENSG00000119661_18 (sequence is synthesized)
aaaaaaaaaaaaaaaaaagaggaaaacttggtctaacacccttttagttttcttttctctcttcttttcaatctgataggaagaaaccttattctactctagctggtttatgcattcaaa

SEQ ID NO: 232319 - DNA, 120 bp, Artificial Sequence
  ENSG00000119661_19 (sequence is synthesized)
ttattctactctagctggtttatgcattcaaagcctttggacatttcttttatgaaccataggcaatgagccttcattctccttggtgatgttttaagttccataaactgagagggaaga

SEQ ID NO: 232320 - DNA, 120 bp, Artificial Sequence
  ENSG00000119661_20 (sequence is synthesized)
tgatcttcttaaagtttgcacttccttcagtaggcaagcttgaagccatgttgatatggatatgttttctaaaagtaaccctggaagtgaatataataggaagtaagtgatttcatattg

SEQ ID NO: 232321 - DNA, 120 bp, Artificial Sequence
  ENSG00000119661_21 (sequence is synthesized)
aatttatttgtaaaatggcttagagttttggtgtttgttttttctgaattctgtaatatagaaactggttctctttctccttgtttctcaatgacttttaattacaggtagttctcagac

SEQ ID NO: 232322 - DNA, 120 bp, Artificial Sequence
  ENSG00000119661_22 (sequence is synthesized)
aaatgtaagatacttttctctgtccatttcatgcaaaattcatattcagtatcattcaacaaatctttgaatgacttctatgcatccctgttcatggaacccatgccattagaaaatggc

SEQ ID NO: 232323 - DNA, 120 bp, Artificial Sequence
  ENSG00000119661_23 (sequence is synthesized)
agttgggatgtatgaagaaatgtaggatattctctcaaatcattccctaaattatcctttactgctgcaaatttagctgataaaactgcctttggtttatgcctcttggatcagatattt

SEQ ID NO: 232324 - DNA, 120 bp, Artificial Sequence
  ENSG00000119661_24 (sequence is synthesized)
agatatttgacctatgtggaatagattatctctgtgcttccggtttaagacattacgccattttagtggatcatttaaattttttctattctgtttttttttgtttgtttgtttgtttgt

SEQ ID NO: 232325 - DNA, 90 bp, Artificial Sequence
  ENSG00000119661_25 (sequence is synthesized)
ttctgaaacagagtctcactcccgagtagctgggaccacaggcacgtgccatcatgcctggcctatttttgtatttttagtagagatggg

SEQ ID NO: 232326 - DNA, 88 bp, Artificial Sequence
  ENSG00000119661_26 (sequence is synthesized)
ttcttctattcttgtaagtgatggtaaaactctggaatcagtccagtattttagtttttcacagcaaatttgattttagtctaccaag

SEQ ID NO: 232327 - DNA, 120 bp, Artificial Sequence
  ENSG00000119661_27 (sequence is synthesized)
ttttagtttttcacagcaaatttgattttagtctaccaaggagtttaacttttctatgttccctaactctaagattagggctgtattacctagacaggccttaaaaggtttttgtgttgt

SEQ ID NO: 232328 - DNA, 120 bp, Artificial Sequence
  ENSG00000119661_28 (sequence is synthesized)
tctctgttaataagaatttgttcctttaaaccagaggatcaaccttggaactattaacattttgggattgataattcattgttgttgggggctgtcctgtgtgcttaggatgttcagctg

SEQ ID NO: 232329 - DNA, 120 bp, Artificial Sequence
  ENSG00000119661_29 (sequence is synthesized)
cagccctggcctctacccactagattccagtagaccccctcctcagccatgacaacaaagatatctccagacattgccatctgtcccttgggtaggagggtgggaacaaattctccctta

SEQ ID NO: 232330 - DNA, 120 bp, Artificial Sequence
  ENSG00000119661_30 (sequence is synthesized)
gttgtactttttataccaacatcacttgtgtccagggtccatttattttcagtctgtagccatgtgccacttgaattgttatatgagagaaggtgatgtattcagtaatcatggatggaa

SEQ ID NO: 232331 - DNA, 78 bp, Artificial Sequence
  ENSG00000119661_31 (sequence is synthesized)
atatgagagaaggtgatgtattcagtaatcatggatggaaagaaatggtcactggtattttttgtaatgctaggctgg

SEQ ID NO: 232332 - DNA, 120 bp, Artificial Sequence
  ENSG00000119661_32 (sequence is synthesized)
gctgggattacagacgtgagccactgcgactggcttaatgctcattttcataattttcatgtaatattagaaactcagggctggaaggttcaacttctcttttttgaagcagggtctcaa

SEQ ID NO: 232333 - DNA, 120 bp, Artificial Sequence
  ENSG00000119661_33 (sequence is synthesized)
aaggttcaacttctcttttttgaagcagggtctcaacttttatttctaagcattcttgcttatcttaggacagtgattattaacctacctctctgtttctatcaacagaagccaacttta

SEQ ID NO: 232334 - DNA, 120 bp, Artificial Sequence
  ENSG00000119661_34 (sequence is synthesized)
tgatagattttgctttgtctctaaagtttaatattttgagtgtactttagaaaataggtcatcattctttaagcgtcattcattgtctaatcacataattttgcagaccatggcagtcat

SEQ ID NO: 232335 - DNA, 120 bp, Artificial Sequence
  ENSG00000119661_35 (sequence is synthesized)
taaatacagaaaaatactgtgtaaaatttgataatcttgtaggaaagttagctgatgtagacatcaattttggatgtgatcagaagaatgtctgcttaagataactggtcaataacttgg

SEQ ID NO: 232336 - DNA, 120 bp, Artificial Sequence
  ENSG00000119661_36 (sequence is synthesized)
tgtctgcttaagataactggtcaataacttggtatggctactggattcattccacatatggtagtataaggcacttaaatgtgtttcctgattgggcactgtggctcatgcctgtaatcc

SEQ ID NO: 232337 - DNA, 90 bp, Artificial Sequence
  ENSG00000119661_37 (sequence is synthesized)
cagtgagccgaaatagtgtgtctccgtctcaaaaagaaaaaaaaaaatgtggttcttttgtggaaagaggaatttgaacttgaataaaca

SEQ ID NO: 232338 - DNA, 120 bp, Artificial Sequence
  ENSG00000119661_38 (sequence is synthesized)
ggttcttttgtggaaagaggaatttgaacttgaataaacacttcttttgacaccttttaccagtggtctgaagcagaataaggaagaataagaaatgaatcttgactgttgacttattct

SEQ ID NO: 232339 - DNA, 120 bp, Artificial Sequence
  ENSG00000119661_39 (sequence is synthesized)
gagaattggtgatgtgtaaagagagttggaatcttctacctgggtttttctcagggctaaatggaaaagcacagggcccagaaaggttggagttaatcattcacttaaaagcattaggag

SEQ ID NO: 232340 - DNA, 120 bp, Artificial Sequence
  ENSG00000119661_40 (sequence is synthesized)
gaagtgtcaaagcatcagtcatgaatagattatgtctctctgactacagtcagaccatcaattcactaagaccttatactctgtaagtgttggtaaaggaagaaaactgctaaattgcat

SEQ ID NO: 232341 - DNA, 120 bp, Artificial Sequence
  ENSG00000119661_41 (sequence is synthesized)
gttaccctttactagaaattcattcctttggcacagattttatttatttggggctgtttaatgtgtctgtaaatcatgaaatataaaagcaagattcagtgtagcagagttggtgcttct

SEQ ID NO: 232342 - DNA, 120 bp, Artificial Sequence
  ENSG00000119661_42 (sequence is synthesized)
tctgacaagctaacttgaccatatttctttatctgtgctctaacatgtgtcatattgttttctttttgtaaaccataaaatgggtgaacttccaaaaatcaagggtcatgttttaaaatc

SEQ ID NO: 232343 - DNA, 120 bp, Artificial Sequence
  ENSG00000119661_43 (sequence is synthesized)
atggaacttttagaaataccatatctgtatctctattcctgcattttataaatctgtaaaggaagaaaactgaaaggaagaactagactgagtcttacctttctctgacctaagataaac

SEQ ID NO: 232344 - DNA, 120 bp, Artificial Sequence
  ENSG00000119661_44 (sequence is synthesized)
tgataaaactttttacttgatatttggagaagtcattaactggattctagttaatttcccatattgggcagtttagaggagacccagccaaccaaattatgatctagcaaatttaacata

SEQ ID NO: 232345 - DNA, 120 bp, Artificial Sequence
  ENSG00000119661_45 (sequence is synthesized)
ggggaagagggatagtaaactatttttcagtagatttgcactttaaacttaggaactggatgttggtggaaaggacttccatagggcagatgggtaaatatctagcctgcacttggatgt

SEQ ID NO: 232346 - DNA, 120 bp, Artificial Sequence
  ENSG00000119661_46 (sequence is synthesized)
tagagaatcaaacctcacccttgctcgttctaaacccacatgagtagttaactgtcttttgacataatcagagtcaggatttccctttttccctacttgagtcgtcttccatgtctgtta

SEQ ID NO: 232347 - DNA, 120 bp, Artificial Sequence
  ENSG00000119661_47 (sequence is synthesized)
catccaagatcatccctctgggggatgtgtcaagtagttctcctactcagaatagaagctttgcgaattatcattcccacctctagattttaaatgaatgtagagttgtctaacattata

SEQ ID NO: 232348 - DNA, 120 bp, Artificial Sequence
  ENSG00000119661_48 (sequence is synthesized)
tgggtgggaggctctttgcctctgtgatcagtagggtacctgcctctgaggtgctactgcctggagggatcactcccatcaaaagactggtgagttggaagctaagagcacatgcgcata

SEQ ID NO: 232349 - DNA, 120 bp, Artificial Sequence
  ENSG00000119661_49 (sequence is synthesized)
gccagctcctctcccaggctggcagtcatgattacgagcatcattccagaatctttggcttctagaaccaactccattctgaagaacattttaacatctatgaataccttggtaataatc

SEQ ID NO: 232350 - DNA, 120 bp, Artificial Sequence
  ENSG00000119661_50 (sequence is synthesized)
ttttatacacaggagttttgtagcatgactttatgactaaacttattgtgaattaagttatttagaaatgttgagtttctgaatgttattttgtgatttgtttcaaaatggtaataaatt

SEQ ID NO: 232351 - DNA, 120 bp, Artificial Sequence
  ENSG00000119661_51 (sequence is synthesized)
gtgttattttgtaaaaaaaaaaaaaagtatatttttggtacatgattattagttttagctaatatagagcaattatataaacttctagtgatattcagtccaaagaaattcagcctttgg

SEQ ID NO: 232352 - DNA, 79 bp, Artificial Sequence
  ENSG00000119661_52 (sequence is synthesized)
acttctagtgatattcagtccaaagaaattcagcctttggataacatgtaccatgcagtttgagagagagtgaaagaga

SEQ ID NO: 232353 - DNA, 87 bp, Artificial Sequence
  ENSG00000119661_53 (sequence is synthesized)
ttgacctcgtgatctgcccgccacagcctcccaaagagctaggattacaggcacgagccaccgcgcacggccagaggcattcatttc

SEQ ID NO: 232354 - DNA, 120 bp, Artificial Sequence
  ENSG00000119661_54 (sequence is synthesized)
caggcacgagccaccgcgcacggccagaggcattcatttctttagctaagtttttttttcttagtaggtttttttctcccaggcttgtaactcttccccagttctttgggcactatttca

SEQ ID NO: 232355 - DNA, 120 bp, Artificial Sequence
  ENSG00000119661_55 (sequence is synthesized)
aattattaggcttctggaaagagtgcttccagggacagcaagttactactgcacttgaccattcctagtcctcacctgattaccagaaggtacgcaaggtaaaagttagctgataggccc

SEQ ID NO: 232356 - DNA, 120 bp, Artificial Sequence
  ENSG00000119661_56 (sequence is synthesized)
tgaattgagaaaaaggaatcaccaagcaatatccgtaacattacacattttgccagcacattttctatgctatcagctaaaacgtaattttggtcacaaaatagggctgtagtgtagttt

SEQ ID NO: 232357 - DNA, 120 bp, Artificial Sequence
  ENSG00000119661_57 (sequence is synthesized)
tgtagtttctacttcttattccagttgtttgattatgaggatacatttcttgctgctgtcctccactaaacagcagacaaattgccaggtgtgctggctcatgcctgtaatcccagtgct

SEQ ID NO: 232358 - DNA, 89 bp, Artificial Sequence
  ENSG00000119661_58 (sequence is synthesized)
gaccccatctcttgggcatggcaatgccgcctgtggtcctagctactggggaggctgaggcaggattgcttgaacccagaagtttgagg

SEQ ID NO: 232359 - DNA, 120 bp, Artificial Sequence
  ENSG00000119661_59 (sequence is synthesized)
gtttgaggttacagtgagctatgatcatgtcactgcaagaccctgtccctaaaaaaaggaaaaacaaatagaagacaaatttcaatttctgagtttatacaaagaaagccttaattcaga

SEQ ID NO: 232360 - DNA, 120 bp, Artificial Sequence
  ENSG00000119661_60 (sequence is synthesized)
ctgagtttatacaaagaaagccttaattcagatcataaatatcccattgttatttttagttcattgtttcctagaacaaaggatggacatttaggatcctcacattgatttatgtcatat

SEQ ID NO: 232361 - DNA, 120 bp, Artificial Sequence
  ENSG00000119661_61 (sequence is synthesized)
atatgtattgcattgaatatatatatacgcatgtagatacatacaattgttatatataattaaaagtcagaatcttaggtgataactgtcagacctctgagcccaagctaagccatcgca

SEQ ID NO: 232362 - DNA, 85 bp, Artificial Sequence
  ENSG00000119661_62 (sequence is synthesized)
aggttcttttctccacccactgtctgcaaaacattgctcttaacttcagcgcctatcccaaaacctataagaactgatgataatc

SEQ ID NO: 232363 - DNA, 70 bp, Artificial Sequence
  ENSG00000119661_63 (sequence is synthesized)
gtgagctccacccactgtctgcaaaacattgctcttaacttcagcgcctatcccaaaacctataagaact

SEQ ID NO: 232364 - DNA, 120 bp, Artificial Sequence
  ENSG00000119661_64 (sequence is synthesized)
gaccccgcgggccctagcaaccagagcagtgacagtagcaaccgccggaatgctgggccttgattggttgagtcaagtgagctgattggttgattcaggcgaaagcaacaacaatcaaag

SEQ ID NO: 232365 - DNA, 120 bp, Artificial Sequence
  ENSG00000119661_65 (sequence is synthesized)
gcggccgccacgcagtcccacaatgccccgctcgcaccaccctgagggcggagagaaaggaccgctgccggggatagggcttccgccgagagcgccgagaagtgcgcacgcgcactgacc

SEQ ID NO: 232366 - DNA, 120 bp, Artificial Sequence
  ENSG00000119661_66 (sequence is synthesized)
ttacaggcgtgagccaccacacctgggcaaaatttgatatttgtgatgttctaaataaattggaggcagtaggggacacattagaagaactgtggatctcctacaattttattgagaagt

SEQ ID NO: 232367 - DNA, 120 bp, Artificial Sequence
  ENSG00000119669_0 (sequence is synthesized)
ggggacagcgcgagccgcagccggagcaggagcgccgagacgcgcctccggaacgtagagtaacaatcacaaccccacattccgggcgagcgtgagcacgagcgggaagggatgcgaccc

SEQ ID NO: 232368 - DNA, 120 bp, Artificial Sequence
  ENSG00000119669_1 (sequence is synthesized)
ctgcagccaacgtgagcgccgccagccgcggcggcccgggcgccggccaggcctgggggcggcgggagcctgcgtgcgtgcactcctctcctctgctctcgtgcgtcctggaagcagtgg

SEQ ID NO: 232369 - DNA, 120 bp, Artificial Sequence
  ENSG00000119669_2 (sequence is synthesized)
tctcgtgcgtcctggaagcagtggccgcggcggctccctccggggtgcaaacccagtcgccgccagcagaacggccgacgctgcggaggggagaaggtcctttctcggctgccaccccct

SEQ ID NO: 232370 - DNA, 120 bp, Artificial Sequence
  ENSG00000119669_3 (sequence is synthesized)
cccccggtcctccggggaagcagcggcttcagcaagattggacccgggcaccgggtggcactgaaccctctggccctcgccccagggggcccgtcggggagaggacgcagctcgtagggg

SEQ ID NO: 232371 - DNA, 120 bp, Artificial Sequence
  ENSG00000119669_4 (sequence is synthesized)
ggtccccggggagaggaagagacagcccctttcgagcttccacgcaccagccactccggggagggggccaagaggcaacggcggccaccaccgggcaccctcgccccctcccctcgggcc

SEQ ID NO: 232372 - DNA, 120 bp, Artificial Sequence
  ENSG00000119669_5 (sequence is synthesized)
gggagcttccagcccaagtctgcagcaccaggaagaaggcgcctgagctcccctcgcgacgagtcaaccgcagtaggaggtgggggcgaagagagggctgaacccgtccgctgcccgggc

SEQ ID NO: 232373 - DNA, 120 bp, Artificial Sequence
  ENSG00000119669_6 (sequence is synthesized)
ggtggagcccccacggcgaggcgctgcgccggcggtggagactcgcgttccctccagcccctggggcagaactttctcgccccccctcctccctcccccgcagtcggactccctccccag

SEQ ID NO: 232374 - DNA, 120 bp, Artificial Sequence
  ENSG00000119669_7 (sequence is synthesized)
ccggccagtcctcccggaggagaaggcgccgcggagacagcccgggcgggggcctaccttccccagggcaggcatcatgtcggcggcgcaggtgtcctcgtcccggagacaatcttgcta

SEQ ID NO: 232375 - DNA, 120 bp, Artificial Sequence
  ENSG00000119669_8 (sequence is synthesized)
cctgtgcgacctgccccgcatgccctgggccatgatctgggacttctcggaacccgtatgccgcggttgcgtcaactacgagggcgctgatcgcatcgaattcgtgatcgagacagcgcg

SEQ ID NO: 232376 - DNA, 120 bp, Artificial Sequence
  ENSG00000119669_9 (sequence is synthesized)
ccagctgaagcgggcgcacggctgcttccaggacggccgctcccccgggccgccgccgcccgtcggggtcaagacagtggccctgtcggctaaggaagcggcggcggcggcggcagcagc

SEQ ID NO: 232377 - DNA, 120 bp, Artificial Sequence
  ENSG00000119669_10 (sequence is synthesized)
ccctgtcggctaaggaagcggcggcggcggcggcagcagcggcggccgccgccgccgccgcgcaacagcaacagcaacagcagcagcagcagcagcaacagcagcagcagcagcagcagc

SEQ ID NO: 232378 - DNA, 120 bp, Artificial Sequence
  ENSG00000119669_11 (sequence is synthesized)
agcagcagcaacaacagctcaaccacgttgatggttccagcaagcctgcggtgctggcggccccgtctggcctggagcgctacggcctaagcgctgccgccgccgccgccgccgccgccg

SEQ ID NO: 232379 - DNA, 120 bp, Artificial Sequence
  ENSG00000119669_12 (sequence is synthesized)
accgccggtgagcctgggaagcagcagccacaccgcgcgactgcccaacggcctggggggcccaaacggcttccccaaaccaacaccagaggagggacccccagagctgaaccgtcagag

SEQ ID NO: 232380 - DNA, 120 bp, Artificial Sequence
  ENSG00000119669_13 (sequence is synthesized)
ccccaattcttcttcagcggcggcgtcggtggcgtctcggcgtggaacgcacggtgggctggttacggggctgcccaacccggggggtggcggaggcccccagctcaccgtgccccccaa

SEQ ID NO: 232381 - DNA, 120 bp, Artificial Sequence
  ENSG00000119669_14 (sequence is synthesized)
cctgctaccgcagacgctgcttaacggcccggccagcgctgcggtactccccccaccccctccccacgccctgggcagccgtgggcccccgacgcctgctcccccaggggctcctggggg

SEQ ID NO: 232382 - DNA, 120 bp, Artificial Sequence
  ENSG00000119669_15 (sequence is synthesized)
ccccgcttgtctcgggggtaccccgggtgtatcggccacgtcgtcctccgcgtcgtcttcgacctcttcgtcggtggcagaggtgggcgtgggtgctggtggtaagaggcccggctcggt

SEQ ID NO: 232383 - DNA, 120 bp, Artificial Sequence
  ENSG00000119669_16 (sequence is synthesized)
gtcgagcacagaccaggagcgcgagttgaaggagaagcagcgcaacgccgaggccctggccgagctgagcgagagcctgcgcaaccgcgccgaggagtgggccagcaagcccaagatggt

SEQ ID NO: 232384 - DNA, 120 bp, Artificial Sequence
  ENSG00000119669_17 (sequence is synthesized)
ccttcgacgccgtctccaagcccggcatggactacgaattgaagctgttcattgagtaccccacgggctcgggcaacgtgtactccagtgcatctggtgtggccaagcagatgtatcagg

SEQ ID NO: 232385 - DNA, 120 bp, Artificial Sequence
  ENSG00000119669_18 (sequence is synthesized)
actgcatgaaggacttcggccggggcctatcctcgggtttcaagtacctggagtacgaaaagaagcacggctccggggactggcgcctgcttggagacctgctccccgaagccgtgcgct

SEQ ID NO: 232386 - DNA, 120 bp, Artificial Sequence
  ENSG00000119669_19 (sequence is synthesized)
tcttcaaggagggcgtgcccggcgccgacatgctgccccagccctacctggacgccagctgtcccatgctgcccactgctctggtgagtctgagccgcgcccccagcgcacccccgggga

SEQ ID NO: 232387 - DNA, 120 bp, Artificial Sequence
  ENSG00000119669_20 (sequence is synthesized)
ggccttgccgcccgccgcgccgtcgggccggggcgcagccgccagcctgcgcaagagaaaggcctctccggagcccccggactcagccgagggcgcgctgaagctgggcgaggaacagca

SEQ ID NO: 232388 - DNA, 120 bp, Artificial Sequence
  ENSG00000119669_21 (sequence is synthesized)
agcagaggcagcagtggatggcgaaccagagcgaggcgctgaagctcaccatgtccgccgggggcttcgcggcgccggggcacgcggcggggggtccgcctccgccgcccccacctctgg

SEQ ID NO: 232389 - DNA, 120 bp, Artificial Sequence
  ENSG00000119669_22 (sequence is synthesized)
gaccccattccaaccggaccaccccacctgagtcagccccccagaacggtccgtcccctatggccgctctcatgtcggtggcagatactctgggcacagcgcactcgcccaaggatggca

SEQ ID NO: 232390 - DNA, 120 bp, Artificial Sequence
  ENSG00000119669_23 (sequence is synthesized)
gttccgtgcactctaccactgcgtcggcgcggcgaaacagcagcagcccagtctcgccggcctccgtgccggggcagcgccgcttggcatcacgtaacggggacctgaatttacaggtgg

SEQ ID NO: 232391 - DNA, 120 bp, Artificial Sequence
  ENSG00000119669_24 (sequence is synthesized)
cgcccccgccgcctagcgcccacccgggcatggaccaagtgcacccccaaaacattccggattcccccatggccaacagcggacccctctgctgcaccatttgccacgaacgtttggagg

SEQ ID NO: 232392 - DNA, 120 bp, Artificial Sequence
  ENSG00000119669_25 (sequence is synthesized)
atacgcatttcgttcagtgcccttccgtccccagccacaaattttgcttcccttgctctagagagagtatcaaggcccagggggccaccggcgaggtgtattgccccagcggagagaaat

SEQ ID NO: 232393 - DNA, 120 bp, Artificial Sequence
  ENSG00000119669_26 (sequence is synthesized)
gccccctagtcgggtcgaatgtaccttgggccttcatgcagggcgaaatcgcgactatcttagctggggatgttaaagtgaaaaaggagagagacccttgaaccactgggcagccacctc

SEQ ID NO: 232394 - DNA, 120 bp, Artificial Sequence
  ENSG00000119669_27 (sequence is synthesized)
ctttgccctagaccagctcctctccaatcctgagggcccctcccccaacccaactcgaccctccctcccctcacccccaaggtgtagaattgtgaatataacgaaactgcaaaaagttag

SEQ ID NO: 232395 - DNA, 120 bp, Artificial Sequence
  ENSG00000119669_28 (sequence is synthesized)
tcttatgtatagacattattttcgtcgtatgtttctatattttgaaacaaaggtatgtaacttcttcatttgaaggataagctggtttgtgttaagcagtatagtattggttgggtcatt

SEQ ID NO: 232396 - DNA, 120 bp, Artificial Sequence
  ENSG00000119669_29 (sequence is synthesized)
tgcatcatatcgttagcatttatttggtggcagaatgtttgcctaggtacagaattaatagcccttagcaacgactgctgctggtgtgtatttttgtaaatgttatgcactctctgaaag

SEQ ID NO: 232397 - DNA, 120 bp, Artificial Sequence
  ENSG00000119669_30 (sequence is synthesized)
tttgtaaatgttatgcactctctgaaaggaaaaacacacacaaaagaaaaagacttttttttttttttttttttttttgccaaggccagtgttgctgcctaaaaaaaaaaaaaaaaaaaa

SEQ ID NO: 232398 - DNA, 120 bp, Artificial Sequence
  ENSG00000119669_31 (sequence is synthesized)
gtgaaagcttccttctaaactgccccaagtgttgaagtcttcactttattttgttgttttgttttgtttttctgttttgtttgcaaaatggtaagggggtgtcgggggggatggggtgta

SEQ ID NO: 232399 - DNA, 120 bp, Artificial Sequence
  ENSG00000119669_32 (sequence is synthesized)
ttttgttgcaagtttgtgaggggaaaatgttttggtttgtttctactgacctgaatgtgttggatctacacgtgttgttttgtttttgctttattgatgcacggatgcttttgaacagta

SEQ ID NO: 232400 - DNA, 120 bp, Artificial Sequence
  ENSG00000119669_33 (sequence is synthesized)
gagcgaaatgctagacatggagaatctgctctgtttgtcctttatacatttctgtagttaacagaacactgtaatgtgccttggagcttagtaacttgtaataaattcaattgatattaa

SEQ ID NO: 232401 - DNA, 120 bp, Artificial Sequence
  ENSG00000119673_0 (sequence is synthesized)
aaagcaaacctaggaagtagctttccaacataaagtggaggtttcaacacaggagactttaagcaagttccagtgtgtctatatttggtctggctgatcggctggactctggccttcccc

SEQ ID NO: 232402 - DNA, 120 bp, Artificial Sequence
  ENSG00000119673_1 (sequence is synthesized)
gctcacgttagcagacagctctgccctagtgggcgcttagcctgcgacggcagcccgagaggatgtctaacaagcttctttctccccacccccattcagttgttctcaggtctgaattca

SEQ ID NO: 232403 - DNA, 120 bp, Artificial Sequence
  ENSG00000119673_2 (sequence is synthesized)
aaatggcctcatctcctgctgtccttcgagcgtcccggctgtaccaatggagcctgaagagttcggcgcagttcctggggtctccacagctgaggcaggttggtcagatcattagggttc

SEQ ID NO: 232404 - DNA, 120 bp, Artificial Sequence
  ENSG00000119673_3 (sequence is synthesized)
ctgctcggatggcggcgacgctgatcctggagcctgcgggccgctgctgctgggacgaaccggtgcgaatcgccgtgcgcggcctagccccggagcagccggtcacgctgcgcgcgtccc

SEQ ID NO: 232405 - DNA, 120 bp, Artificial Sequence
  ENSG00000119673_4 (sequence is synthesized)
tgcgcgacgagaagggcgcgcttttccaggcccacgcgcgctaccgcgccgacactcttggcgagctggacctggagcgcgcgcccgcgctgggcggcagcttcgcggggcttgagccca

SEQ ID NO: 232406 - DNA, 120 bp, Artificial Sequence
  ENSG00000119673_5 (sequence is synthesized)
tggggctgctctgggccttggagcccgagaaacctttggtgcggctggtgaagcgcgacgtgcgaacgcccttggccgtggagctggaggtgctggatggccacgaccccgaccccgggc

SEQ ID NO: 232407 - DNA, 120 bp, Artificial Sequence
  ENSG00000119673_6 (sequence is synthesized)
ggctgctgtgccagacgcggcacgagcgctacttcctcccgcccggggtgcggcgcgagccggtgcgcgtgggccgggtgcgaggcacgctcttcctgccgccagaacctgggccctttc

SEQ ID NO: 232408 - DNA, 120 bp, Artificial Sequence
  ENSG00000119673_7 (sequence is synthesized)
ttattataactatgaagacctccccaagaccatggagacgctccatctggagtactttgaagaagccatgaactacttgctcagtcatcccgaggtaaaaggtccaggagttgggctgct

SEQ ID NO: 232409 - DNA, 120 bp, Artificial Sequence
  ENSG00000119673_8 (sequence is synthesized)
tggaatttccaaagggggtgagctctgcctttccatggcctctttcctgaagggcatcacggctgctgtcgtcatcaacggctctgtggccaatgttgggggaaccttacactacaaggg

SEQ ID NO: 232410 - DNA, 120 bp, Artificial Sequence
  ENSG00000119673_9 (sequence is synthesized)
cgagaccctgccccctgtgggcgtcaacagaaatcgcatcaaggtgaccaaagatggctatgcagacattgtggatgtcctgaacagccctttggaaggacctgaccagaagagcttcat

SEQ ID NO: 232411 - DNA, 120 bp, Artificial Sequence
  ENSG00000119673_10 (sequence is synthesized)
tcctgtggaaagggcagagagcaccttcctgttcctggtaggtcaggatgaccacaactggaagagtgagttctatgctaatgaggcctgtaaacgcttgcaggcccatgggaggagaaa

SEQ ID NO: 232412 - DNA, 120 bp, Artificial Sequence
  ENSG00000119673_11 (sequence is synthesized)
gccccagatcatctgttacccagagacagggcactatattgagcctccttacttccccctgtgtcgggcttccctgcatgccttggtgggcagtcctattatctggggaggggagcccag

SEQ ID NO: 232413 - DNA, 120 bp, Artificial Sequence
  ENSG00000119673_12 (sequence is synthesized)
ggctcatgccatggctcaggtggatgcttggaaacaactccagactttcttccacaaacacttgggtggccacgaggggacaatcccatcaaaagtgtaaattttatttgatcatgtggc

SEQ ID NO: 232414 - DNA, 120 bp, Artificial Sequence
  ENSG00000119673_13 (sequence is synthesized)
ctctctgttgctaatctctcctggaaacatctgccacatttagtgtgtgtatgtgtattcattcttttgtttttaataactaaagttttttcccctcattattaaaatgaatttaccagt

SEQ ID NO: 232415 - DNA, 120 bp, Artificial Sequence
  ENSG00000119673_14 (sequence is synthesized)
ctgcaaactccacctcccaggttcaattgattcttctgcctcagcctcccacgtagctgtgactacaggtaaaaggtccaggagttgggctgcttggaatttccaaagggggtgagctct

SEQ ID NO: 232416 - DNA, 120 bp, Artificial Sequence
  ENSG00000119673_15 (sequence is synthesized)
aacctgcgtgagttccgctccaggctgatggaagctttgttcttttgtacttcacaataaaccttgctactgctccttctttgggtccatactgcatttcagagctgtaacaccgtgaag

SEQ ID NO: 232417 - DNA, 120 bp, Artificial Sequence
  ENSG00000119673_16 (sequence is synthesized)
gtatacagcttcactcctgaagccaagaccatgaacccactgagaggaacaagaaaaacaactctggacctgctgcctttatgagctgtaacactcaccttgaaggtctgtggctttact

SEQ ID NO: 232418 - DNA, 120 bp, Artificial Sequence
  ENSG00000119673_17 (sequence is synthesized)
cttgaagtcggtgagaagcgagaccatgaacccaccagaaggaacacattccggacgcatctgaacatcagaggaaacaaactccagacacactacttttcagaactgtattaagaactg

SEQ ID NO: 232419 - DNA, 120 bp, Artificial Sequence
  ENSG00000119673_18 (sequence is synthesized)
taacagtcactgcgagggtctgcggcttcattcttgatgtcagcgagaccaagaatccaccagaaggaaccaattccagacacagaattatttgccttcttacttcctgagagttctagg

SEQ ID NO: 232420 - DNA, 120 bp, Artificial Sequence
  ENSG00000119681_0 (sequence is synthesized)
ccaaaaataaaaccgtccgggtccccttcagacggctgcaggcacagggaggaggcgcgaaggtgcagcagccgtgcgagcccagctggagtaggagcgcggactcgaggctcggggcgc

SEQ ID NO: 232421 - DNA, 120 bp, Artificial Sequence
  ENSG00000119681_1 (sequence is synthesized)
gcagccctcgttccgccgagagccgggcccccagtcggccgcttcagggccccctagactcagagaagctggccgccgggcggggccgggagaacagcccgcgggcgtccagcgtgccga

SEQ ID NO: 232422 - DNA, 120 bp, Artificial Sequence
  ENSG00000119681_2 (sequence is synthesized)
ccacaaagctcttcgcggtgcccgcgcgcaccactctccagccgccccgcgccatgaggccgcggaccaaagcccgcagcccggggcgcgccctgcggaacccctggagaggcttcctgc

SEQ ID NO: 232423 - DNA, 120 bp, Artificial Sequence
  ENSG00000119681_3 (sequence is synthesized)
cgctcaccctggctctcttcgtgggcgcgggtcatgcccaaagggaccccgtagggagatacgagccggctggtggagacgcgaatcgactgcggcgccctgggggcagctacccggcag

SEQ ID NO: 232424 - DNA, 120 bp, Artificial Sequence
  ENSG00000119681_4 (sequence is synthesized)
cggctgcagccaaggtgtacagtctgttccgggagcaggacgcgcctgtcgcgggcttgcagcccgtggagcgggcccagccgggctgggggagccccaggaggcccaccgaggcggagg

SEQ ID NO: 232425 - DNA, 120 bp, Artificial Sequence
  ENSG00000119681_5 (sequence is synthesized)
ccaggaggccgtcccgcgcgcagcagtcgcggcgtgtccagccacctgcgcagacccggagaagcactcccctgggccagcagcaaccagcaccccggacccgggccgcgccggctctcc

SEQ ID NO: 232426 - DNA, 120 bp, Artificial Sequence
  ENSG00000119681_6 (sequence is synthesized)
cacgcctggggaccccacagcggtctggggctgcgcccccaaccccgccgcgagggcggctcacggggaggaacgtctgcgggggacagtgctgcccaggatggacaacagcaaacagca

SEQ ID NO: 232427 - DNA, 120 bp, Artificial Sequence
  ENSG00000119681_7 (sequence is synthesized)
ccaaccactgtatcaaacccgtttgcgagccgccgtgccagaaccggggctcctgcagccgcccgcagctctgtgtctgccgctctggtttccgtggagcccgctgcgaggaggtcattc

SEQ ID NO: 232428 - DNA, 120 bp, Artificial Sequence
  ENSG00000119681_8 (sequence is synthesized)
ccgatgaggaatttgacccccagaactccaggctggcacctcgacgctgggccgagcgttcacccaacctgcgcaggagcagtgcggctggagagggcaccttggccagagcacagccgc

SEQ ID NO: 232429 - DNA, 120 bp, Artificial Sequence
  ENSG00000119681_9 (sequence is synthesized)
cagcaccacagtcgccgcccgcaccacagtcgccaccagctgggaccctgagtggcctcagccagacccacccttcccagcagcacgtggggttgtcccgcactgtccgacttcacccga

SEQ ID NO: 232430 - DNA, 120 bp, Artificial Sequence
  ENSG00000119681_10 (sequence is synthesized)
ctgccacggccagtagccagctctcttccaacgccctgcccccgggaccaggccttgagcagagagatggcacccaacaggcggtacctctggagcacccctcatccccctgggggctga

SEQ ID NO: 232431 - DNA, 120 bp, Artificial Sequence
  ENSG00000119681_11 (sequence is synthesized)
acctcacggagaaaatcaagaagatcaagatcgtcttcactcccaccatctgcaagcagacctgtgcccgtggacactgtgccaacagctgtgagaggggcgacaccaccaccctgtaca

SEQ ID NO: 232432 - DNA, 120 bp, Artificial Sequence
  ENSG00000119681_12 (sequence is synthesized)
gccagggcggccatgggcacgatcccaagtctggcttccgcatctatttctgccagatcccctgcctgaacggaggccgctgcatcggcagggacgaatgctggtgccccgccaactcca

SEQ ID NO: 232433 - DNA, 120 bp, Artificial Sequence
  ENSG00000119681_13 (sequence is synthesized)
ccgggaagttctgccacctgcctatcccgcagccggacagggagcctccagggagggggtcccgccccagggccttgctggaagccccactgaagcagtccactttcacactgccgctct

SEQ ID NO: 232434 - DNA, 120 bp, Artificial Sequence
  ENSG00000119681_14 (sequence is synthesized)
ccaaccagctggcctccgtgaacccctccctggtgaaggtgcacattcaccacccacccgaggcctcagtgcagatccaccaggtggcccaggtgcggggcggggtggaggaggccctag

SEQ ID NO: 232435 - DNA, 120 bp, Artificial Sequence
  ENSG00000119681_15 (sequence is synthesized)
tggagaacagcgtggagaccagacccccgccctggctgcctgccagccctggccacagcctctgggacagcaacaacatccctgctcggtctggagagccccctcggccactgcccccag

SEQ ID NO: 232436 - DNA, 120 bp, Artificial Sequence
  ENSG00000119681_16 (sequence is synthesized)
cagcacccaggcctcgaggactgctgggccggtgttacctgaacactgtgaacggacagtgtgccaaccctctgctggagctgactacccaggaggactgctgtggcagtgtgggagcct

SEQ ID NO: 232437 - DNA, 120 bp, Artificial Sequence
  ENSG00000119681_17 (sequence is synthesized)
tctggggggtgactttgtgtgccccatgcccacccagaccagcctccccggtgattgagaatggccagctggagtgtcctcaggggtacaagagactgaacctcactcactgccaagata

SEQ ID NO: 232438 - DNA, 120 bp, Artificial Sequence
  ENSG00000119681_18 (sequence is synthesized)
tcaacgagtgcttgaccctgggcctgtgcaaggacgcggagtgtgtgaataccaggggcagctacctgtgcacatgcagacctggcctcatgctggatccatcgcggagccgctgtgtgt

SEQ ID NO: 232439 - DNA, 120 bp, Artificial Sequence
  ENSG00000119681_19 (sequence is synthesized)
cggacaaggcaatctccatgctgcagggactgtgctaccggtcgctggggcccggcacctgcaccctgcctttggcccagcggatcaccaagcagatatgctgctgcagccgcgtgggca

SEQ ID NO: 232440 - DNA, 120 bp, Artificial Sequence
  ENSG00000119681_20 (sequence is synthesized)
aagcatggggcagcgagtgtgagaaatgccctctgcctggcacagaggccttcagagagatctgccctgccggccacggctacacctacgcgagctccgacatccgcctgtccatgagga

SEQ ID NO: 232441 - DNA, 120 bp, Artificial Sequence
  ENSG00000119681_21 (sequence is synthesized)
aagccgaggaggaggaactggcaaggcccccaagggagcaagggcagaggagcagcggggcactgcccgggccagcagagaggcagcccctccgggtcgtcacggacacctggcttgagg

SEQ ID NO: 232442 - DNA, 120 bp, Artificial Sequence
  ENSG00000119681_22 (sequence is synthesized)
ccgggaccatccctgacaagggtgactctcaggctggccaggtcacgaccagtgtcactcatgcacctgcctgggtcacagggaatgccacaaccccaccaatgcctgaacaggggattg

SEQ ID NO: 232443 - DNA, 120 bp, Artificial Sequence
  ENSG00000119681_23 (sequence is synthesized)
cagagatacaggaagaacaagtgaccccctccactgatgtgctggtgaccctgagcaccccaggcattgacagatgcgctgctggagccaccaacgtctgtggccctggaacctgcgtga

SEQ ID NO: 232444 - DNA, 120 bp, Artificial Sequence
  ENSG00000119681_24 (sequence is synthesized)
acctccccgatggatacagatgtgtctgcagccctggctaccagctgcaccccagccaggcctactgcacagatgacaacgagtgtctgagggacccctgcaagggaaaagggcgctgca

SEQ ID NO: 232445 - DNA, 120 bp, Artificial Sequence
  ENSG00000119681_25 (sequence is synthesized)
tcaaccgcgtggggtcctactcctgcttctgctaccctggctacactctggccacctcaggggcgacacaggagtgtcaagatatcaatgagtgtgagcagccaggggtgtgcagcgggg

SEQ ID NO: 232446 - DNA, 120 bp, Artificial Sequence
  ENSG00000119681_26 (sequence is synthesized)
ggcagtgcaccaacaccgagggctcgtaccactgcgagtgtgatcagggctacatcatggtcaggaaaggacactgccaagatatcaacgaatgccgtcaccccggtacctgccctgatg

SEQ ID NO: 232447 - DNA, 120 bp, Artificial Sequence
  ENSG00000119681_27 (sequence is synthesized)
ggagatgcgtcaattcccctggctcctacacttgtctggcctgtgaggagggctaccggggccagagtgggagctgtgtagatgtgaatgagtgtctgactcccggggtctgtgcccatg

SEQ ID NO: 232448 - DNA, 120 bp, Artificial Sequence
  ENSG00000119681_28 (sequence is synthesized)
gaaagtgcaccaacctagaaggctccttcagatgctcttgtgagcagggctatgaggtcacctcagatgagaagggctgccaagatgtggatgagtgtgccagccgggcctcatgcccca

SEQ ID NO: 232449 - DNA, 120 bp, Artificial Sequence
  ENSG00000119681_29 (sequence is synthesized)
caggcctctgcctcaacacggagggctccttcgcctgctctgcctgtgagaacgggtactgggtgaatgaagacggcactgcctgtgaagacctagatgagtgtgccttcccgggagtct

SEQ ID NO: 232450 - DNA, 120 bp, Artificial Sequence
  ENSG00000119681_30 (sequence is synthesized)
gcccctccggagtctgcaccaacacggctggctccttctcctgcaaggactgcgatgggggctaccggcccagccccctgggtgactcctgtgaagatgtggatgaatgtgaagaccccc

SEQ ID NO: 232451 - DNA, 120 bp, Artificial Sequence
  ENSG00000119681_31 (sequence is synthesized)
agagcagctgcctgggaggcgagtgcaagaacactgtgggctcctaccagtgcctctgtccccagggcttccagctggccaatggcaccgtgtgtgaggatgtgaatgagtgcatggggg

SEQ ID NO: 232452 - DNA, 120 bp, Artificial Sequence
  ENSG00000119681_32 (sequence is synthesized)
aggagcactgcgcaccccacggcgagtgcctcaacagccacgggtctttcttctgtctgtgcgcgcctggcttcgtcagcgcagaggggggcaccagctgccaggatgtggacgagtgtg

SEQ ID NO: 232453 - DNA, 120 bp, Artificial Sequence
  ENSG00000119681_33 (sequence is synthesized)
ccaccacagacccgtgtgtgggagggcactgtgtcaacaccgagggctccttcaactgtctatgtgagactggcttccagccctccccagagagtggagagtgtgtggatattgacgagt

SEQ ID NO: 232454 - DNA, 120 bp, Artificial Sequence
  ENSG00000119681_34 (sequence is synthesized)
gtgaggactatggagacccggtgtgtggcacctggaagtgtgaaaacagccctggctcctaccgctgtgttctgggctgccagcctggcttccacatggccccgaacggagactgcattg

SEQ ID NO: 232455 - DNA, 120 bp, Artificial Sequence
  ENSG00000119681_35 (sequence is synthesized)
atggctccttccgctgcctctgtgaccagggcttcgagatctctccctcaggctgggactgtgtggatgtgaacgagtgtgagcttatgctggcggtatgtggggccgcgctctgtgaga

SEQ ID NO: 232456 - DNA, 120 bp, Artificial Sequence
  ENSG00000119681_36 (sequence is synthesized)
acgtggagggctccttcctgtgcctctgtgccagtgacctggaggagtacgatgcccaggaggggcactgccgcccacggggggctggaggtcagagtatgtctgaggccccaacggggg

SEQ ID NO: 232457 - DNA, 120 bp, Artificial Sequence
  ENSG00000119681_37 (sequence is synthesized)
accatgccccggcccccacccgcatggactgctactccgggcagaagggccatgcgccctgctccagtgtcctgggccggaacaccacacaggctgaatgctgctgcacccagggcgcta

SEQ ID NO: 232458 - DNA, 120 bp, Artificial Sequence
  ENSG00000119681_38 (sequence is synthesized)
gctggggagatgcctgtgacctctgcccgtctgaggactcagctgaattcagcgagatctgccctagtggaaaaggctacattcctgtggaaggagcctggacgtttggacagaccatgt

SEQ ID NO: 232459 - DNA, 120 bp, Artificial Sequence
  ENSG00000119681_39 (sequence is synthesized)
acacagatgcggatgagtgtgtgatattcgggcctggtctctgcccgaacggccggtgcctcaacaccgtgcctggttatgtctgcctgtgcaatcccggcttccactacgatgcttccc

SEQ ID NO: 232460 - DNA, 120 bp, Artificial Sequence
  ENSG00000119681_40 (sequence is synthesized)
acaagaagtgtgaggatcacgatgagtgccaggacctggcctgtgagaatggcgagtgcgtcaacacggagggctccttccactgcttctgcagccccccgctcaccctggacctcagcc

SEQ ID NO: 232461 - DNA, 120 bp, Artificial Sequence
  ENSG00000119681_41 (sequence is synthesized)
agcagcgctgcatgaacagcaccagcagcacggaggacctccctgaccacgacatccacatggacatctgctggaaaaaagtcaccaatgatgtgtgcagcgaacccctgcgtgggcacc

SEQ ID NO: 232462 - DNA, 120 bp, Artificial Sequence
  ENSG00000119681_42 (sequence is synthesized)
gcaccacctacacggaatgctgctgccaggacggcgaggcctggagccagcagtgtgctctgtgtcccccgaggagctctgaggtctatgctcagctgtgcaacgtggctcgcattgagg

SEQ ID NO: 232463 - DNA, 120 bp, Artificial Sequence
  ENSG00000119681_43 (sequence is synthesized)
cagagcgggaggccggggtccacttccggccaggctatgagtatggccccgggcccgatgacctgcactacagcatctatggcccagatggggcccccttctacaactacctgggccccg

SEQ ID NO: 232464 - DNA, 120 bp, Artificial Sequence
  ENSG00000119681_44 (sequence is synthesized)
aggacaccgtccctgagcctgccttccccaacacagccggtcactcagcggaccgcacacccatccttgagtctcctttgcagccctcagaactccagccccactacgtggccagccatc

SEQ ID NO: 232465 - DNA, 120 bp, Artificial Sequence
  ENSG00000119681_45 (sequence is synthesized)
cagagcccccagccggcttcgaagggcttcaggcggaggagtgcggcatcctgaacggctgtgagaatggccgctgtgtgcgcgtgcgggagggctacacctgtgactgttttgagggct

SEQ ID NO: 232466 - DNA, 120 bp, Artificial Sequence
  ENSG00000119681_46 (sequence is synthesized)
tccagctggatgcggcccacatggcctgcgtagatgtgaatgagtgtgatgacttgaacgggcctgctgtgctctgtgtccatggttactgcgagaacacagagggctcctaccgctgcc

SEQ ID NO: 232467 - DNA, 120 bp, Artificial Sequence
  ENSG00000119681_47 (sequence is synthesized)
actgctccccgggatatgtggctgaggcagggcccccccactgcactgccaaggagtagcagtcaggggtcagtgtggcaactacctggaaatggcctccagtcacaggcaggggccttg

SEQ ID NO: 232468 - DNA, 120 bp, Artificial Sequence
  ENSG00000119681_48 (sequence is synthesized)
aggatgatttcctagctgggaagacaccgtgacatcaggccagaggtttccaatcagccttgcctgctttcatctctcccagcttagcctctggctgtaagcttcggtcattgcctccat

SEQ ID NO: 232469 - DNA, 120 bp, Artificial Sequence
  ENSG00000119681_49 (sequence is synthesized)
gcccttgcttggctcaagcaccaccaatcgctttaatgcttcagccaccgcatgaggccctgtccaccacctttcctggccttgctatgggatgcttaccaaaggatggccctcatccac

SEQ ID NO: 232470 - DNA, 120 bp, Artificial Sequence
  ENSG00000119681_50 (sequence is synthesized)
cctcccaagctgtgcgagcatgcaaggccccatggcctcacactgcagacacccctttccagccacaatccaccatcatcctgacgatcccacaactgggacagaggctacatctgccct

SEQ ID NO: 232471 - DNA, 120 bp, Artificial Sequence
  ENSG00000119681_51 (sequence is synthesized)
agggaggtccttcagaatctgtggagcaagaaaggatttggggaagcttggggactgactccagagccccctcctaagaaccatcaccaccactcagccaatctgttctgggccctgatt

SEQ ID NO: 232472 - DNA, 120 bp, Artificial Sequence
  ENSG00000119681_52 (sequence is synthesized)
ttgccacacctccatcctgtagcccattctctgaccccaaggagtggcagaagatcccttcactcagagaagcaaggctgatattagcttgttgaatgtaagagacacaaatgaagaaga

SEQ ID NO: 232473 - DNA, 120 bp, Artificial Sequence
  ENSG00000119681_53 (sequence is synthesized)
acaaagagcctgagaaagcagcaagaggacatgatgaaaaatacgtggagttgatgagaaaggggagccaaggctttatacgtctaaagaaaatattcagtagctgaatccgcccagtga

SEQ ID NO: 232474 - DNA, 120 bp, Artificial Sequence
  ENSG00000119681_54 (sequence is synthesized)
tagcctgtgggcaccagcagcaagggctgccatgggatacagcacccatctacaaagacctctattacataaacactgcttcttacaggaaacaaacctcttctgggatctccttttgtg

SEQ ID NO: 232475 - DNA, 120 bp, Artificial Sequence
  ENSG00000119681_55 (sequence is synthesized)
aaaaccagtttgatgtgctaaaagtaaaaagtctattttccagtgtggtcttgttcagaagcagccagatttccaatgttgtttttcccctccactcagaaacccctgccctttcccttc

SEQ ID NO: 232476 - DNA, 120 bp, Artificial Sequence
  ENSG00000119681_56 (sequence is synthesized)
agaaaacgatggcaggcattcctctgagtttacaagcagagactcactccaacccaaactagctgggagttcagaaccatggtggaataaagaaatgtgcatctggtctcttctgttgtt

SEQ ID NO: 232477 - DNA, 120 bp, Artificial Sequence
  ENSG00000119681_57 (sequence is synthesized)
tttatttcatatcagattaaatttctttaccatgttggctaagtctaaatattagagatgaggctgtgcctactccctggccagctctgctgatagcctatgatgggttccaatgggaaa

SEQ ID NO: 232478 - DNA, 120 bp, Artificial Sequence
  ENSG00000119681_58 (sequence is synthesized)
tgactctttactattaaaagacaaggaaagctctgacttcgtacttctctgatgaatggcaatgtaaatgaacaaggctccatgtgactggagcatggaagtgaatgctactttcttaat

SEQ ID NO: 232479 - DNA, 120 bp, Artificial Sequence
  ENSG00000119681_59 (sequence is synthesized)
ttaatctgccctgtcctacctgctcctctgattgttagccatcacataacttattgaatgcttgccatgtgccaggcactgtgctgagtgccatacatacatttcatttaattatccaat

SEQ ID NO: 232480 - DNA, 120 bp, Artificial Sequence
  ENSG00000119681_60 (sequence is synthesized)
aatcctacttactattgtttattctcaatttacaggtgaggaaactgagacatagaaagcttaaataatttgctctaggtccctatactaattgagatgttttcagcagacaaaaataag

SEQ ID NO: 232481 - DNA, 120 bp, Artificial Sequence
  ENSG00000119681_61 (sequence is synthesized)
tcactcttacgcatgtaaaaatattctttcactcataataaaagaaatgcaacttaaaaccatactgagatcctttttaaaactgtcagattggcaaagatcaaaaagcttgttaagact

SEQ ID NO: 232482 - DNA, 120 bp, Artificial Sequence
  ENSG00000119681_62 (sequence is synthesized)
cctagctggcaagcatgtgggaaataggtactctcataacagctgacagaagtacatattgaagaggacaatatggcaatgtccttcaaaattataaaagcactaactctttgatccagt

SEQ ID NO: 232483 - DNA, 120 bp, Artificial Sequence
  ENSG00000119681_63 (sequence is synthesized)
agtttccacttctaggaacttaaccttcagatatattttcaccagatataaaatgacatacgtaagaagttattactgcatcatttgtaatagctaaagattagaaacaattaattgcta

SEQ ID NO: 232484 - DNA, 120 bp, Artificial Sequence
  ENSG00000119681_64 (sequence is synthesized)
tggaacccttaaaaaaggtggctctaaattccttaagaaagatatccaaaacaaattaaggggaaaagggagggttgcataacagcatgtaacataacactatttgtctaaagaatgggg

SEQ ID NO: 232485 - DNA, 120 bp, Artificial Sequence
  ENSG00000119681_65 (sequence is synthesized)
aaagagaagcggttgtctgttcacctcatccttgccactccgccttatacctcaccatcggagaacttaccatcccccaaatatatcctgctggcactacaccttcgtaactgctgttcc

SEQ ID NO: 232486 - DNA, 120 bp, Artificial Sequence
  ENSG00000119681_66 (sequence is synthesized)
cactgcccccacaacactccaatctccaccttcctgccaaccttgagatattgtatgcatatatacatatttcctttgtttaaaatacaaatagcatactatgcatgctgttctgcactt

SEQ ID NO: 232487 - DNA, 120 bp, Artificial Sequence
  ENSG00000119681_67 (sequence is synthesized)
tgctttttttttatacttgcaattagagctgcctcatttcattttacagctgtatactattccattgaatggataaaccataatttatttaatcagtccctcactgacagacgtttccat

SEQ ID NO: 232488 - DNA, 120 bp, Artificial Sequence
  ENSG00000119681_68 (sequence is synthesized)
tgtttcctgtcttttgctataaataatgctgtaatgaatattcttgtgcatatttcacattaatttatgggattacatctgcaggataaattcttagaaccaatggtggtttgtggggag

SEQ ID NO: 232489 - DNA, 120 bp, Artificial Sequence
  ENSG00000119681_69 (sequence is synthesized)
ggtgacagggtggataggtacaggattgggagacttttcactgtatctccttttgtatttttttgaattttgtaccatatgtatcacctattcaaaaaaaataaaatatttttaaataca

SEQ ID NO: 232490 - DNA, 120 bp, Artificial Sequence
  ENSG00000119681_70 (sequence is synthesized)
tcgccgcccgctggcttcccggtgccaaagtgggtgttgctggaattcctcgctccctctccggtaatgagggggctgagctgtccctccgaggagggggcctggtgtggataaaagaga

SEQ ID NO: 232491 - DNA, 120 bp, Artificial Sequence
  ENSG00000119681_71 (sequence is synthesized)
cacttcccaaaaacacgatgtgaaggtttaaacaaaacacctcaccccttccccacgcccaaacccaaaaactatgtagcaacacactcctcgaccacccaaaccccagcaggagccggg

SEQ ID NO: 232492 - DNA, 120 bp, Artificial Sequence
  ENSG00000119681_72 (sequence is synthesized)
cattgtggaagcagcgagtctcagcctccctggagccctcatttgaagcccagagcacctctccccatctaaaatgacacatactttttttttcaagagtactgccttttgttctagcat

SEQ ID NO: 232493 - DNA, 120 bp, Artificial Sequence
  ENSG00000119681_73 (sequence is synthesized)
ctttccacaagaattttatgatcctctctgcccccacccccacagttccacaggggcaccctttgtccagaagggcgagggtcccagcattagggagagtctggacacagccctcagcct

SEQ ID NO: 232494 - DNA, 120 bp, Artificial Sequence
  ENSG00000119682_0 (sequence is synthesized)
aatcccccgagccggttcccaggccgggtggagaccaactctggggtctgttggtgggagagtggggagcccgtcttctgctgagtgctgccgccccttcccaggacagcggaggtggaa

SEQ ID NO: 232495 - DNA, 120 bp, Artificial Sequence
  ENSG00000119682_1 (sequence is synthesized)
cttcgtcgcgctgcaacccccggctcgggatcctggggcgtcctttggcagtcgattgcaccctgcactagagagaagtccaggaatgatatattcttgggctgtatttctctaccctgg

SEQ ID NO: 232496 - DNA, 120 bp, Artificial Sequence
  ENSG00000119682_2 (sequence is synthesized)
agttcatccagttcatcccagaaacactgacctgattactgtgacaaagtctgatggatagaccctttctgttgaccttgtggcgtttttctttcatgtggaagttggaagacaaggtga

SEQ ID NO: 232497 - DNA, 120 bp, Artificial Sequence
  ENSG00000119682_3 (sequence is synthesized)
aaggggccaaaagttacctgctttggtgaataggagtgctctacttggttctcagaacatgggccctcgtttaaagctgcagctgtgatcctcggctgtctgttggcattgacgggacct

SEQ ID NO: 232498 - DNA, 120 bp, Artificial Sequence
  ENSG00000119682_4 (sequence is synthesized)
gatgttttacgttattggtggaatcacagtgtctgtggttgcattcttcttcacaattaagttcctctttgagcttgccgcacgtgtagtcagcttcctccagaatgaggaccgcgagcg

SEQ ID NO: 232499 - DNA, 120 bp, Artificial Sequence
  ENSG00000119682_5 (sequence is synthesized)
ccgaggggaccggactatttatgactacgtgcggggaaattacctggatccccggtcttgcaaagtctcctgggattggaaggacccctatgaggtgggccacagcatggccttccgagt

SEQ ID NO: 232500 - DNA, 120 bp, Artificial Sequence
  ENSG00000119682_6 (sequence is synthesized)
gcatttattctataagaacgggcagcctttccctgcacatcggcctgtgggactaagagttcacatctctcatgtcgagctagcagtggaaattccagtgacccaggaagtccttcagga

SEQ ID NO: 232501 - DNA, 120 bp, Artificial Sequence
  ENSG00000119682_7 (sequence is synthesized)
gcccaattccaacgtagtaaaagtggccttcactgtgcgcaaggctgggcgttatgaaatcacagtgaagcttggtggattaaatgtggcatatagtccctactacaaaatttttcaacc

SEQ ID NO: 232502 - DNA, 120 bp, Artificial Sequence
  ENSG00000119682_8 (sequence is synthesized)
tggaatggtggttccttctaagaccaaaattgtgtgccacttttctactcttgtattgacctgtgggcagccgcacacccttcaaatagtaccccgagatgagtatgataatcccaccaa

SEQ ID NO: 232503 - DNA, 120 bp, Artificial Sequence
  ENSG00000119682_9 (sequence is synthesized)
caattccatgtccttgagagatgagcacaattacaccttgtccattcatgagctcggccctcaagaagaagagagtactggtgtctcatttgagaaatcagtaacatccaacaggcagac

SEQ ID NO: 232504 - DNA, 120 bp, Artificial Sequence
  ENSG00000119682_10 (sequence is synthesized)
tttccaggtgttcttgcgactcaccctgcattctcgaggctgcttccatgcttgcatttcataccaaaatcagccaatcaataatggtgaatttgacattattgtcctaagtgaggatga

SEQ ID NO: 232505 - DNA, 120 bp, Artificial Sequence
  ENSG00000119682_11 (sequence is synthesized)
gaagaatatcgtcgaacgcaatgtgtccacttcaggcgtgagcatttactttgaggcttatctttataatgctaccaactgtagcagcactccatggcacctgccacccatgcacatgac

SEQ ID NO: 232506 - DNA, 120 bp, Artificial Sequence
  ENSG00000119682_12 (sequence is synthesized)
ctcttcccagcgccggccatccactgctgttgacgaggaagatgaagactcgccctctgagtgccacacccctgagaaggtgaagaaaccgaagaaggtgtactgctatgtgtcaccaaa

SEQ ID NO: 232507 - DNA, 120 bp, Artificial Sequence
  ENSG00000119682_13 (sequence is synthesized)
gcaattctcagtgaaggagttctacctgaagatcatcccctggcgcctttacaccttccgagtgtgtccaggaacaaaattttcataccttggtcctgaccctgtccataagctgctcac

SEQ ID NO: 232508 - DNA, 120 bp, Artificial Sequence
  ENSG00000119682_14 (sequence is synthesized)
actggtggtggatgatggcattcaacctcctgtggagctcagctgtaaggagaggaacattctagcagccacttttatccgctccctgcataagaacataggaggctctgagacctttca

SEQ ID NO: 232509 - DNA, 120 bp, Artificial Sequence
  ENSG00000119682_15 (sequence is synthesized)
ggacaaggtgaactttttccagcgagagcttcggcaggtacatatgaaaagaccacattccaaagtcaccctgaaggtcagcagacatgccttgttggaatcgtctctgaaagccactcg

SEQ ID NO: 232510 - DNA, 120 bp, Artificial Sequence
  ENSG00000119682_16 (sequence is synthesized)
gaatttctccatctcagattggagcaagaactttgaggttgttttccaggatgaagaagctctggactggggagggcctcgccgggaatggtttgagctaatctgcaaagcactatttga

SEQ ID NO: 232511 - DNA, 120 bp, Artificial Sequence
  ENSG00000119682_17 (sequence is synthesized)
taccaccaatcagctcttcacccggttcagtgacaacaaccaagcattagtgcatcccaaccctaatcgccccgctcatctgcgcctgaaaatgtatgagtttgcgggacggctcgtggg

SEQ ID NO: 232512 - DNA, 120 bp, Artificial Sequence
  ENSG00000119682_18 (sequence is synthesized)
caagtgtctctatgagtcctctctaggaggagcctacaagcagttggtccgagctcgcttcacccgctctttcctggcccaaatcataggactgcgtatgcattacaagtactttgaaac

SEQ ID NO: 232513 - DNA, 120 bp, Artificial Sequence
  ENSG00000119682_19 (sequence is synthesized)
agatgacccagaattctacaaatctaaagtttgttttatcctcaacaatgacatgagtgagatggagctggtctttgcagaagagaaatataataaatcaggtcaattggataaggttgt

SEQ ID NO: 232514 - DNA, 120 bp, Artificial Sequence
  ENSG00000119682_20 (sequence is synthesized)
agaactcatgacaggtggagctcaaactccagtcaccaatgcgaataaaatcttctatttaaatttgctggcccaatatcggctggccagtcaagtgaaagaggaggtggaacatttcct

SEQ ID NO: 232515 - DNA, 120 bp, Artificial Sequence
  ENSG00000119682_21 (sequence is synthesized)
aaaaggcctgaatgaattggtccctgagaaccttttggctatttttgatgagaatgagcttgagctgctgatgtgtgggactggagacatcagtgtgtctgacttcaaagcccatgcagt

SEQ ID NO: 232516 - DNA, 120 bp, Artificial Sequence
  ENSG00000119682_22 (sequence is synthesized)
ggcatttcagagaaaaggtcatgaggtggttttggactgtggtttccagtctgacccaggaggagttggctcggctacttcagttcacaacaggctcctctcagctaccacctggaggct

SEQ ID NO: 232517 - DNA, 120 bp, Artificial Sequence
  ENSG00000119682_23 (sequence is synthesized)
ttgccgccctctgtccctcatttcagattattgccgctccgacccatagcacgctgcctactgcacacacatgttttaaccagctgtgcctccctacatatgactcctatgaagaggtgc

SEQ ID NO: 232518 - DNA, 120 bp, Artificial Sequence
  ENSG00000119682_24 (sequence is synthesized)
acaggatgctgcagctggccatcagcgagggttgcgagggctttggcatgctctgaccactctcctgtcatccagttggctcccatgctctctggagcttctgggcgcaagttacagaca

SEQ ID NO: 232519 - DNA, 120 bp, Artificial Sequence
  ENSG00000119682_25 (sequence is synthesized)
tcataaccactgatcctaacacacataaccatcagccagaagatgccgcatgctcccctgtgtctggaggattttgtcacctacaagccttgtctttacctcacctgctccctgcccata

SEQ ID NO: 232520 - DNA, 120 bp, Artificial Sequence
  ENSG00000119682_26 (sequence is synthesized)
tctaccacaggccactttggcatggtatgtaagctgagctcttcattctgtcatgagaagaggaccatgctgctatcatttatttggtcctttgaagatctcagtagctgagggagatgg

SEQ ID NO: 232521 - DNA, 120 bp, Artificial Sequence
  ENSG00000119682_27 (sequence is synthesized)
cacacggggctcagccctgttgggaaactggtgtggagacccttaaatccacactgtgctccaaaactccctctgctgatactccttggagacaccctctttggccctcactacttgacc

SEQ ID NO: 232522 - DNA, 120 bp, Artificial Sequence
  ENSG00000119682_28 (sequence is synthesized)
agactggtacttgagtccttctcatgggtggggtgattgcctcttctcatcaggagccaggagagagggggacagataggaggtggcccataggagcagtcccgctgcacaatggtaggc

SEQ ID NO: 232523 - DNA, 120 bp, Artificial Sequence
  ENSG00000119682_29 (sequence is synthesized)
ataggccatggcactggactgcctctaaggactgctaaaaagaatatttttttgtggtgtcagaactggaaaaagcactttcccttcgggcatttctggaaatgattattaatccacaaa

SEQ ID NO: 232524 - DNA, 120 bp, Artificial Sequence
  ENSG00000119682_30 (sequence is synthesized)
gaagaactctgtaagctttttcttgaattgtagccagtgagaaaagcagatagactgaagaatatgaaggatagctgagctgtagcctccagagtggggcatgcctaggcatatggctgg

SEQ ID NO: 232525 - DNA, 120 bp, Artificial Sequence
  ENSG00000119682_31 (sequence is synthesized)
cttggagactactgatgcttttccctgagtttgttattggcactgaagtatggccggcttgggccactgacttccccattatgtagtctgctaaaagctggggatcctttagcattctac

SEQ ID NO: 232526 - DNA, 120 bp, Artificial Sequence
  ENSG00000119682_32 (sequence is synthesized)
tgaagaaaattttgtagcaaaagattagaacagtaagaatagtatgccagcaatccctgattctctctctgcttggtgttctctggcagcactaagacaaaggaacagggactaggagtt

SEQ ID NO: 232527 - DNA, 120 bp, Artificial Sequence
  ENSG00000119682_33 (sequence is synthesized)
tacgtgcttatcacaggtccttggcgtcaggacactagggatgaacatggaggtgatatgttacacagtaaacacctgccaacccctgtactcccctttgctccatcagttatcaggaag

SEQ ID NO: 232528 - DNA, 120 bp, Artificial Sequence
  ENSG00000119682_34 (sequence is synthesized)
gagaactaaggagggaggaagcttattaggttcactgttgaatgatgattgaagagtacctgctgctgtatcttggaagatgacaacatcctttttcattactgtttgattgaaaataat

SEQ ID NO: 232529 - DNA, 120 bp, Artificial Sequence
  ENSG00000119682_35 (sequence is synthesized)
ttcaagattcaaaatctcattgacttcccaaatttgtgtttttaagaaggctttgctgcaagctaccattcccaatggggcagtcaactctgagaatattacaagccatctttattgcca

SEQ ID NO: 232530 - DNA, 120 bp, Artificial Sequence
  ENSG00000119682_36 (sequence is synthesized)
aaaccagcaagtacacagagtcctgaaacaaggcaggactttggcaatgccttggcctcctggaagcatgtctgagccctcctgttcgcagggatcatgaggaacaagccctcctgagct

SEQ ID NO: 232531 - DNA, 120 bp, Artificial Sequence
  ENSG00000119682_37 (sequence is synthesized)
gctacagttcctgcctgacctcagtctttcgcagtcatcatttgtcctttcttggcacatgggtgctgacctcactcatccttggggtccgggatccagcatcagggtctctatacccca

SEQ ID NO: 232532 - DNA, 120 bp, Artificial Sequence
  ENSG00000119682_38 (sequence is synthesized)
ggatcctccatgccacatggtcactgctctcctcagggaccaggacaaggtgctgctgcttgcccaaatgttttcccatgggatatgtaccggaaggtttatcaccaccctgggaaacat

SEQ ID NO: 232533 - DNA, 120 bp, Artificial Sequence
  ENSG00000119682_39 (sequence is synthesized)
aatgctgccccttgggcccagaaaggggtttccagctgggggcacgtggactggttctgctgtttttggcagtcgcttttctgaattctcccctccggcagccttccagagactgatcct

SEQ ID NO: 232534 - DNA, 120 bp, Artificial Sequence
  ENSG00000119682_40 (sequence is synthesized)
ggagattgagttgattgtcttggctagacctgtcattttaagctctagtcatagcactttttcagagcatcttaggcaccattgcaacccaaccagggaagctgcatccctgtggtggtc

SEQ ID NO: 232535 - DNA, 120 bp, Artificial Sequence
  ENSG00000119682_41 (sequence is synthesized)
cttaggcaccagtctttgttaaacaaaaccctttggcactattgtggttttctattctctgtctgaactctattcaaaagtatctttgctctcttgggccttttcttttactgttttgtt

SEQ ID NO: 232536 - DNA, 120 bp, Artificial Sequence
  ENSG00000119682_42 (sequence is synthesized)
ttttttttttctaatcctgctttcatactagccagtgtggggaaaaggtacaatatgtcaaagagatgagagagtgttatttcttgggcaattttctattagtgtttcttattttggcca

SEQ ID NO: 232537 - DNA, 120 bp, Artificial Sequence
  ENSG00000119682_43 (sequence is synthesized)
gttcttttatttatgtccttgtgacccaggtacttggggggccagctacccttctggccttttagcgtctttgaaggagaccagacatgagtgaatacctaggagagtgtcagcatgttt

SEQ ID NO: 232538 - DNA, 120 bp, Artificial Sequence
  ENSG00000119682_44 (sequence is synthesized)
ctggaaaattggcagagaccaagccctgctgcagattcgtcaggccaggtgaaagggccaggcagttgcagctgatgatgtaaatattttgtacagtagataaataaatgtttaaaagaa

SEQ ID NO: 232539 - DNA, 120 bp, Artificial Sequence
  ENSG00000119682_45 (sequence is synthesized)
aaattcaatatagaaaatttggaaataagaaaaagaacaagggaaataggtaagttgctatccagaggtaatcaccgttaacactttgataaatagccttttgattttcatatttaagca

SEQ ID NO: 232540 - DNA, 120 bp, Artificial Sequence
  ENSG00000119682_46 (sequence is synthesized)
cacatttgtctcccaacatctccctcacccacaaggggtttgggagtggcaaacaaaaatactgctcctaagaagtttgttggcggcaagtcttaccgattcttttcagcttacaaaggt

SEQ ID NO: 232541 - DNA, 120 bp, Artificial Sequence
  ENSG00000119682_47 (sequence is synthesized)
aagcttggaagagaagaaaaaaaacagacctctgatttgggcctagaaggagtagtattaaggaccctgactttcttgggaaagtaattatgatgtcttgtatattggttcccaatctgg

SEQ ID NO: 232542 - DNA, 120 bp, Artificial Sequence
  ENSG00000119682_48 (sequence is synthesized)
aaaatgttaaaaaaattcccttttgaatttaaaaacaaaacaaaacagatccttgcccccaccccaaacagtgcattctcctcttacctcatcaagctcctgagtgatatgagatatctt

SEQ ID NO: 232543 - DNA, 120 bp, Artificial Sequence
  ENSG00000119682_49 (sequence is synthesized)
tgatatgagatatcttaaagggccaggcacagtgactcatatgtataatcccagtactttggaacactgcaaggcaggagggtcacttgaacccaggagttcgaggctgcagtgagctat

SEQ ID NO: 232544 - DNA, 90 bp, Artificial Sequence
  ENSG00000119682_50 (sequence is synthesized)
ctatgcctgtgtcactgtgctcttctttctctttttttttgaaaaggtggggttttggcatgtttcccaggctgatcttgaactcctggg

SEQ ID NO: 232545 - DNA, 120 bp, Artificial Sequence
  ENSG00000119682_51 (sequence is synthesized)
gtggccttcactgtgcgcaaggctgggcgttatgaaatcacagtgaagcttggtggattaaatgtggcatatagtccctactacaaaatttttcaacctggaatagggtctcactatgtt

SEQ ID NO: 232546 - DNA, 85 bp, Artificial Sequence
  ENSG00000119682_52 (sequence is synthesized)
ctacaaaatttttcaacctggaatagggtctcactatgttgcccagggtggtctcgaactcctggactcaagtaatcttcctgct

SEQ ID NO: 232547 - DNA, 120 bp, Artificial Sequence
  ENSG00000119682_53 (sequence is synthesized)
gtgagttggtgacgggtgggtggaaaatgtggattatgttatcatgggtagactaacaaggattcaaaattatgaaactgatctgggaacctgacaacctgtgtcctattcttaatttta

SEQ ID NO: 232548 - DNA, 120 bp, Artificial Sequence
  ENSG00000119682_54 (sequence is synthesized)
tgagaagcaattctcagtgaaggagttctacctgaagatcatcccctggcgcctttacaccttccgagtgtgtccaggaacaaaattttcataccttggtcctgaccctgtccataagct

SEQ ID NO: 232549 - DNA, 120 bp, Artificial Sequence
  ENSG00000119682_55 (sequence is synthesized)
ataagaaaaagaacaagggaaataggcaggccagagagaatgagtactcaagacacctggcccaaacattcatgaagaagacaccaagtcagaagagacttcctcctttgcatgatcctc

SEQ ID NO: 232550 - DNA, 120 bp, Artificial Sequence
  ENSG00000119682_56 (sequence is synthesized)
tcttcccatatgctaggagctttagtatttattgtctcattcacaacaaccctgcaagctagcagctgtggatactccgaacagaccagtgaggcagagcagcaaaagcagcctggaact

SEQ ID NO: 232551 - DNA, 120 bp, Artificial Sequence
  ENSG00000119682_57 (sequence is synthesized)
aataggagtgctctacttggttctcagaacatgggccctcgtttaaagagacagggttttgccatgttgctcaggctggtcccaagctcttgagctcaagtgatcctcctgccttggctt

SEQ ID NO: 232552 - DNA, 120 bp, Artificial Sequence
  ENSG00000119682_58 (sequence is synthesized)
tgcacacacatggtaggtatctgcccgcctgatgcatgcccagtgtttttggtggtatgagttaatcacttctcccttgcccttccagttttaaccagctgtgcctccctacatatgact

SEQ ID NO: 232553 - DNA, 120 bp, Artificial Sequence
  ENSG00000119684_0 (sequence is synthesized)
aacaactggtgcgcatgcgcactggtgtctcgcggcctggcgcgccccctccgaagcgcatgctcgtgggcacgcacgagcctcaagatccaaggtgcgcgcgtcggcgtccgaggcggt

SEQ ID NO: 232554 - DNA, 120 bp, Artificial Sequence
  ENSG00000119684_1 (sequence is synthesized)
tggtgtcggagaatttgttaagcgggactccaggcaattatttccagtcagagaaggaaaccagtgcctggcattctcaccatctttctacctaccatgatcaagtgcttgtcagttgaa

SEQ ID NO: 232555 - DNA, 120 bp, Artificial Sequence
  ENSG00000119684_2 (sequence is synthesized)
gtacaagccaaattgcgttctggtttggccataagctccttgggccaatgtgttgaggaacttgccctcaacagtattgatgctgaagcaaaatgtgtggctgtcagggtgaatatggaa

SEQ ID NO: 232556 - DNA, 120 bp, Artificial Sequence
  ENSG00000119684_3 (sequence is synthesized)
accttccaagttcaagtgatagacaatggatttgggatggggagtgatgatgtagagaaagtgggaaatcgttatttcaccagtaaatgccactcggtacaggacttggagaatccaagg

SEQ ID NO: 232557 - DNA, 120 bp, Artificial Sequence
  ENSG00000119684_4 (sequence is synthesized)
ttttatggtttccgaggagaggccttggcaaatattgctgacatggccagtgctgtggaaatttcgtccaagaaaaacaggacaatgaaaacttttgtgaaactgtttcagagtggaaaa

SEQ ID NO: 232558 - DNA, 120 bp, Artificial Sequence
  ENSG00000119684_5 (sequence is synthesized)
gccctgaaagcttgtgaagctgatgtgactagagcaagcgctgggactactgtaacagtgtataacctattttaccagcttcctgtaaggaggaaatgcatggaccctagactggagttt

SEQ ID NO: 232559 - DNA, 120 bp, Artificial Sequence
  ENSG00000119684_6 (sequence is synthesized)
gagaaggttaggcagagaatagaagctctctcactcatgcacccttccatttctttctctttgagaaatgatgtttctggttccatggttcttcagctccctaaaaccaaagacgtatgt

SEQ ID NO: 232560 - DNA, 120 bp, Artificial Sequence
  ENSG00000119684_7 (sequence is synthesized)
tcccgattttgtcaaatttatggattgggaaagtcccaaaagctaagagaaataagttttaaatataaagagtttgagcttagtggctatatcagctctgaagcacattacaacaagaat

SEQ ID NO: 232561 - DNA, 120 bp, Artificial Sequence
  ENSG00000119684_8 (sequence is synthesized)
atgcagtttttgtttgtgaacaaaagactagttttaaggacaaagctacataaactcattgactttttattaaggaaagaaagtattatatgcaagccaaagaatggtcccaccagtagg

SEQ ID NO: 232562 - DNA, 120 bp, Artificial Sequence
  ENSG00000119684_9 (sequence is synthesized)
caaatgaattcaagtcttcggcaccggtctaccccagaactctatggcatatatgtaattaatgtgcagtgccaattctgtgagtatgatgtgtgcatggagccagccaaaactctgatt

SEQ ID NO: 232563 - DNA, 120 bp, Artificial Sequence
  ENSG00000119684_10 (sequence is synthesized)
gaatttcagaactgggacactctcttgttttgcattcaggaaggagtgaaaatgtttttaaagcaagaaaaattatttgtggaattatcaggtgaggatattaaggaatttagtgaagat

SEQ ID NO: 232564 - DNA, 120 bp, Artificial Sequence
  ENSG00000119684_11 (sequence is synthesized)
aatggttttagtttatttgatgctactcttcagaagcgtgtgacttccgatgagaggagcaatttccaggaagcatgtaataatattttagattcctatgagatgtttaatttgcagtca

SEQ ID NO: 232565 - DNA, 120 bp, Artificial Sequence
  ENSG00000119684_12 (sequence is synthesized)
aaagctgtgaaaagaaaaactactgcagaaaacgtaaacacacagagttctagggattcagaagctaccagaaaaaatacaaatgatgcatttttgtacatttatgaatcaggtggtcca

SEQ ID NO: 232566 - DNA, 120 bp, Artificial Sequence
  ENSG00000119684_13 (sequence is synthesized)
ggccatagcaaaatgacagagccatctttacaaaacaaagacagctcttgctcagaatcaaagatgttagaacaagagacaattgtagcatcagaagctggagaaaatgagaaacataaa

SEQ ID NO: 232567 - DNA, 120 bp, Artificial Sequence
  ENSG00000119684_14 (sequence is synthesized)
aaatctttcctggaacatagctctttagaaaatccgtgtggaaccagtttagaaatgtttttaagcccttttcagacaccatgtcactttgaggagagtgggcaggatctagaaatatgg

SEQ ID NO: 232568 - DNA, 120 bp, Artificial Sequence
  ENSG00000119684_15 (sequence is synthesized)
aaagaaagtactactgttaatggcatggctgccaacatcttgaaaaataatagaattcagaatcaaccaaagagatttaaagatgctactgaagtgggatgccagcctctgccttttgca

SEQ ID NO: 232569 - DNA, 120 bp, Artificial Sequence
  ENSG00000119684_16 (sequence is synthesized)
acaacattatggggagtacatagtgctcagacagagaaagagaaaaaaaaagaatctagcaattgtggaagaagaaatgtttttagttatgggcgagttaaattatgttccactggcttt

SEQ ID NO: 232570 - DNA, 120 bp, Artificial Sequence
  ENSG00000119684_17 (sequence is synthesized)
ataactcatgtagtacaaaatgaaaaaactaaatcaactgaaacagaacattcatttaaaaattatgttagacctggtcccacacgtgcccaagaaacatttggaaatagaacacgtcat

SEQ ID NO: 232571 - DNA, 120 bp, Artificial Sequence
  ENSG00000119684_18 (sequence is synthesized)
tcagttgaaactccagacatcaaagatttagccagcactttaagtaaagaatctggtcaattgcccaacaaaaaaaattgcagaacgaatataagttatgggctagagaatgaacctaca

SEQ ID NO: 232572 - DNA, 120 bp, Artificial Sequence
  ENSG00000119684_19 (sequence is synthesized)
gcaacttatacaatgttttctgcttttcaggaaggtagcaaaaaatcacaaacagattgcatattatctgatacatccccctctttcccctggtatagacacgtttccaatgatagtagg

SEQ ID NO: 232573 - DNA, 120 bp, Artificial Sequence
  ENSG00000119684_20 (sequence is synthesized)
aaaacagataaattaattggtttctccaaaccaatcgtccgtaagaagctaagcttgagttcacagctaggatctttagagaagtttaagaggcaatatgggaaggttgaaaatcctctg

SEQ ID NO: 232574 - DNA, 120 bp, Artificial Sequence
  ENSG00000119684_21 (sequence is synthesized)
gatacagaagtagaggaaagtaatggagtcactaccaatctcagtcttcaagttgaacctgacattctgctgaaggacaagaaccgcttagagaactctgatgtttgtaaaatcactact

SEQ ID NO: 232575 - DNA, 120 bp, Artificial Sequence
  ENSG00000119684_22 (sequence is synthesized)
atggagcatagtgattcagatagtagttgtcaaccagcaagccacatccttaactcagagaagtttccattctccaaggatgaagattgtttagaacaacagatgcctagtttgagagaa

SEQ ID NO: 232576 - DNA, 120 bp, Artificial Sequence
  ENSG00000119684_23 (sequence is synthesized)
agtcctatgaccctgaaggagttatctctctttaatagaaaacctttggaccttgagaagtcatctgaatcactagcctctaaattatccagactgaagggttccgaaagagaaactcaa

SEQ ID NO: 232577 - DNA, 120 bp, Artificial Sequence
  ENSG00000119684_24 (sequence is synthesized)
acaatggggatgatgagtcgttttaatgaacttccaaattcagattccagtaggaaagacagcaagttgtgcagtgtgttaacacaagatttttgtatgttatttaacaacaagcatgaa

SEQ ID NO: 232578 - DNA, 120 bp, Artificial Sequence
  ENSG00000119684_25 (sequence is synthesized)
aaaacagagaatggtgtcatcccaacatcagattctgccacacaggataattcctttaataaaaatagtaaaacacattctaacagcaatacaacagagaactgtgtgatatcagaaact

SEQ ID NO: 232579 - DNA, 120 bp, Artificial Sequence
  ENSG00000119684_26 (sequence is synthesized)
cctttggtattgccctataataattctaaagttaccggtaaagattcagatgttcttatcagagcctcagaacaacagataggaagtcttgactctcccagtggaatgttaatgaatccg

SEQ ID NO: 232580 - DNA, 120 bp, Artificial Sequence
  ENSG00000119684_27 (sequence is synthesized)
gtagaagatgccacaggtgaccaaaatggaatttgttttcagagtgaggaatctaaagcaagagcttgttctgaaactgaagagtcaaacacgtgttgttcagattggcagcggcatttc

SEQ ID NO: 232581 - DNA, 120 bp, Artificial Sequence
  ENSG00000119684_28 (sequence is synthesized)
gatgtagccctgggaagaatggtttatgtcaacaaaatgactggactcagcacattcattgccccaactgaggacattcaggctgcttgtactaaagacctgacaactgtggctgtggat

SEQ ID NO: 232582 - DNA, 120 bp, Artificial Sequence
  ENSG00000119684_29 (sequence is synthesized)
gttgtacttgagaatgggtctcagtacaggtgtcaaccttttagaagcgaccttgttcttcctttccttccgagagctcgagcagagaggactgtgatgagacaggataacagagatact

SEQ ID NO: 232583 - DNA, 120 bp, Artificial Sequence
  ENSG00000119684_30 (sequence is synthesized)
gtggatgatactgttagtagcgaatcgcttcagtctttgttctcagaatgggacaatccagtatttgcccgttatccagaggttgctgttgatgtaagcagtggccaggctgagagctta

SEQ ID NO: 232584 - DNA, 120 bp, Artificial Sequence
  ENSG00000119684_31 (sequence is synthesized)
gcagttaaaattcacaacatcttgtatccctatcgtttcaccaaaggaatgattcattcaatgcaggttctccagcaagtagataacaagtttattgcctgtttgatgagcactaagact

SEQ ID NO: 232585 - DNA, 120 bp, Artificial Sequence
  ENSG00000119684_32 (sequence is synthesized)
tacgagaagcaacaggcacaaggctctggtcggaaaaaattactgtcttctactctaattcctccgctagagataacagtgacagaggaacaaaggagactcttatggtgttaccacaaa

SEQ ID NO: 232586 - DNA, 120 bp, Artificial Sequence
  ENSG00000119684_33 (sequence is synthesized)
aatctggaagatctgggccttgaatttgtatttccagacactagtgattctctggtccttgtgggaaaagtaccactatgttttgtggaaagagaagccaatgaacttcggagaggaaga

SEQ ID NO: 232587 - DNA, 120 bp, Artificial Sequence
  ENSG00000119684_34 (sequence is synthesized)
tctactgtgaccaagagtattgtggaggaatttatccgagaacaactggagctactccagaccaccggaggcatccaagggacattgccactgactgtccagaaggtgttggcatcccaa

SEQ ID NO: 232588 - DNA, 120 bp, Artificial Sequence
  ENSG00000119684_35 (sequence is synthesized)
gcctgccatggggccattaagtttaatgatggcctgagcttacaggaaagttgccgccttattgaagctctgtcctcatgccagctgccattccagtgtgctcacgggagaccttctatg

SEQ ID NO: 232589 - DNA, 120 bp, Artificial Sequence
  ENSG00000119684_36 (sequence is synthesized)
ctgccgttagctgacatagaccacttggaacaggaaaaacagattaaacccaacctcactaaacttcgcaaaatggcccaggcctggcgtctctttggaaaagcagagtgtgatacaagg

SEQ ID NO: 232590 - DNA, 120 bp, Artificial Sequence
  ENSG00000119684_37 (sequence is synthesized)
cagagcctgcagcaatccatgcctccctgtgagccaccatgagaacagaatcactggtctaaaaggaacaaagggatgttcactgtatgcctctgagcagagagcagcagcagcaggtac

SEQ ID NO: 232591 - DNA, 120 bp, Artificial Sequence
  ENSG00000119684_38 (sequence is synthesized)
cagcacggccctgactgaatcagcccagtgtccctgagcagcttagacagcagggctctctgtatcagtctttcttgagcagatgattcccctagttgagtagccagatgaaattcaagc

SEQ ID NO: 232592 - DNA, 120 bp, Artificial Sequence
  ENSG00000119684_39 (sequence is synthesized)
ctaaagacaattcattcatttgcatccatgggcacagaaggttgctatatagtatctaccttttgctacttatttaatgataaaatttaatgacagtttgattggttgcttggtttgtta

SEQ ID NO: 232593 - DNA, 120 bp, Artificial Sequence
  ENSG00000119684_40 (sequence is synthesized)
tttgaagggtgtgatttttgtttttgtacagttttttttcaagcttcacatttgcgtgtatctaattcagctgatgctcaagtccaaggggtagtctgccttcccaggctgcccccaggg

SEQ ID NO: 232594 - DNA, 120 bp, Artificial Sequence
  ENSG00000119684_41 (sequence is synthesized)
tttctgcactggtcccctcttttcccttcagtcttcttcacttccctatgctgctgcttcatgtgctacatctcagacttaaagagtttctctactacagtgaaaacattctctagggtc

SEQ ID NO: 232595 - DNA, 120 bp, Artificial Sequence
  ENSG00000119684_42 (sequence is synthesized)
tttcatcaggcctttagttattttagggataaaaactattgataaaaaggacaaggatagaacagagaaaatttaaagtcctgttccgggttttttgttatgttttctttaaaaactcag

SEQ ID NO: 232596 - DNA, 120 bp, Artificial Sequence
  ENSG00000119684_43 (sequence is synthesized)
agactgatgttcaatatcccaaaccagtaaaatggtgaaaatactatgagcttgttttttaaaatatgattttttttggtactttataaagtatctctttatgtgaaagcaattgtcata

SEQ ID NO: 232597 - DNA, 120 bp, Artificial Sequence
  ENSG00000119684_44 (sequence is synthesized)
tcaaaacacagcatacatacgttcaacctaaccaaatatctttacactttttctttcaggagacaagggttctttgggtccctttcaaacggtatcttggtgttattacattatgcctat

SEQ ID NO: 232598 - DNA, 120 bp, Artificial Sequence
  ENSG00000119684_45 (sequence is synthesized)
ctattgcccttataatatcacttgggaccaggactgatcgttctgcaaatgcttgttatgccattctcaatctatttttcccgcaccttttcacatgatttgtggttaataggactcaac

SEQ ID NO: 232599 - DNA, 120 bp, Artificial Sequence
  ENSG00000119684_46 (sequence is synthesized)
agactaaaattgcatagtagaaaaaaaatgcaaaaagccagctggtaatgtttattgcaactggggtgctatacaattagtaagatgatgcaatgagaatttctacttttgtatttcctg

SEQ ID NO: 232600 - DNA, 120 bp, Artificial Sequence
  ENSG00000119684_47 (sequence is synthesized)
accagcctgctcaaagtggcttttatatcaattgaatgattttcctcattttttaatacaggaaaccaattcgtgctcatggaagaaaagttcctttgccagcagccttgaagtgaatct

SEQ ID NO: 232601 - DNA, 120 bp, Artificial Sequence
  ENSG00000119684_48 (sequence is synthesized)
tacaggagcaatgaaagtattgcattcattagcgtctgccccagagaaggttcagagaaaaccttcacttgttttcaaggggatccttgtagatttacgtaattggaatcctgaagaaca

SEQ ID NO: 232602 - DNA, 120 bp, Artificial Sequence
  ENSG00000119684_49 (sequence is synthesized)
ggccctactgtctaaaaaatggcttttattcttctaaatacatataaacggatgttttatagatgggaagacatgaccttagaaaggagagagttttcagaggatttgccaggctgtcag

SEQ ID NO: 232603 - DNA, 120 bp, Artificial Sequence
  ENSG00000119684_50 (sequence is synthesized)
gggctctgcctccaggcccagtgtggcagtgtggcctcagggcctccgcctccctgcttgagggctgcatggaggccaactgtcctgggagttgtaaaaatcttttaaggccagaccaat

SEQ ID NO: 232604 - DNA, 120 bp, Artificial Sequence
  ENSG00000119684_51 (sequence is synthesized)
ttgagggattttaaaaagtgtctcagtgcctcttatgatttcagaaggttttgctatatgtaatcccaactactgttttcttgagagtagcagaggattagaaaaagtcctccataaatt

SEQ ID NO: 232605 - DNA, 120 bp, Artificial Sequence
  ENSG00000119684_52 (sequence is synthesized)
atgtaaccggccttcctgactagcctgactcaagcaatgtaagagataattattctgttttcataatttataagtgtgggggcatgcctcagcataaaaacaacctattagggaaaaata

SEQ ID NO: 232606 - DNA, 120 bp, Artificial Sequence
  ENSG00000119684_53 (sequence is synthesized)
tctaatagattacctttatcgcctgttagggttttatgttgtttttaactcagatgccataagaacaaagatacatgtaatttataatagtaatcattaatacctatattgtgctttaag

SEQ ID NO: 232607 - DNA, 120 bp, Artificial Sequence
  ENSG00000119684_54 (sequence is synthesized)
gtttacaaaataatttttctcatactttatcttagtttagtttcttgacagtccatgaggtaaggtggtagctttatcaccattttacaaagtgggaaacgaaggttcctcttaggaacc

SEQ ID NO: 232608 - DNA, 120 bp, Artificial Sequence
  ENSG00000119684_55 (sequence is synthesized)
tagttgtcacctttgtataataaaacttcgaagctcggagctgttaactggtttgctgaaggcttagctgtaagagccagaattcagacccaggtctgagtgacttcaaactgcacagtc
